(19) United States
(12) Patent Application Publication
(10) Pub. No.: US 2025/0059260 A1
(43) Pub. Date: Feb. 20, 2025

(54) METHODS FOR DETECTING OR TREATING INFLUENZA INFECTIONS

(71) Applicant: THE UNIVERSITY OF CHICAGO, Chicago, IL (US)

(72) Inventors: Jenna GUTHMILLER, Chicago, IL (US); Patrick WILSON, Chicago, IL (US)

(73) Assignee: THE UNIVERSITY OF CHICAGO, Chicago, IL (US)

(21) Appl. No.: 18/723,099

(22) PCT Filed: Dec. 21, 2022
(86) PCT No.: PCT/US2022/082115

§ 371 Date: Jun. 21, 2024

Related U.S. Application Data
(60) Provisional application No. 63/292,804, filed on Dec. 22, 2021.

(51) Int. Cl. C07K 16/10; A61K 39/00; A61K 45/06; A61P 31/16; G01N 33/569

(52) U.S. Cl. CPC C07K 16/1018; A61K 45/06; A61P 31/16; G01N 33/56983; A61K 2039/505; C07K 2317/14; C07K 2317/24; C07K 2317/31; C07K 2317/565; C07K 2317/567; C07K 2317/76; G01N 2333/11

(57) ABSTRACT

To address the need in the art, the inventors have comprehensively characterized Aspects of the disclosure relate to novel antibody and antigen binding fragments. Further aspects relate to polypeptides comprising the antigen binding fragment(s) of the disclosure, and compositions comprising the polypeptides, antibodies, and/or antigen binding fragments of the disclosure. Also described are nucleic acids encoding an antibody or antigen binding fragment of the disclosure.

### CROSS-REFERENCE TO RELATED APPLICATIONS

[0001] This application claims the benefit of priority of U.S. Provisional Patent Application No. 63/292,804 filed Dec. 22, 2021, which is hereby incorporated by reference in its entirety.

### STATEMENT OF GOVERNMENT SUPPORT

[0002] This invention was made with government support under AI159136, 75N93019C00051, A1109946, A1057266, A1082724, HHSN272201400005C, and 75N93019R00028 awarded by the National Institutes of Health. The government has certain rights in the invention.

### SEQUENCE LISTING

[0003] The application contains a Sequence Listing prepared in compliance with ST.26 format and is hereby incorporated by reference in its entirety. Said Sequence Listing, created on Dec. 21, 2022 is named ARCDP0759WO.xml and is 18,165,760 bytes in size.

### FIELD OF THE INVENTION

[0004] Aspects of the invention relate to at least the fields of virology and molecular biology.

### BACKGROUND

[0005] Antibodies against the major surface glycoprotein hemagglutinin (HA) are critical for providing protection against influenza virus infection^{6,7}. However, most HA-binding antibodies target variable epitopes of the HA head domain, which provide limited protection against antigenically similar influenza virus strains³. Vaccine formulations that preferentially induce antibodies against conserved epitopes of the HA head and stalk domains could provide broad and potent protectionagainst a wide array of influenza viruses. There is a need in the art for the development of better antibodies to combat the flu virus.

### SUMMARY

[0006] The disclosure describes novel antibody and antigen binding fragments. Also described are polypeptides comprising the antigen binding fragment(s) of the disclosure, and compositions comprising the polypeptides, antibodies, and/or antigen binding fragments of the disclosure. Also described are nucleic acids encoding an antibody or antigen binding fragment of the disclosure. The disclosure also relates to nucleic acids encoding an antibody heavy chain, wherein the nucleic acid has at least 60, 61, 62, 63, 64, 65, 66, 67, 68, 69, 70, 71, 72, 73, 74, 75, 76, 77, 78, 79, 80, 81, 82, 83, 84, 85, 86, 87, 88, 89, 90, 91, 92, 93, 94, 95, 96, 97, 98, 99, or 100% (or any derivable range therein) sequence identity to one of the nucleic acid sequences of a heavy chain of Table 2. Also described are nucleic acids encoding an antibody light chain of the disclosure, wherein the nucleic acid has at least 60, 61, 62, 63, 64, 65, 66, 67, 68, 69, 70, 71, 72, 73, 74, 75, 76, 77, 78, 79, 80, 81, 82, 83, 84, 85, 86, 87, 88, 89, 90, 91, 92, 93, 94, 95, 96, 97, 98, 99, or 100/o (or any derivable range therein) sequence identity to one of the nucleic acid sequences of a light chain of Table 2. Also provided are vectors or expression vectors comprising nucleic acids of the disclosure and host cells comprising polypeptides, nucleic acids, vectors, antibodies, or antigen binding fragments of the disclosure. The nucleic acids of the disclosure may be DNA or RNA.

[0007] Also described is a method of a making a cell comprising transferring one or more nucleic acid(s) of the disclosure into a cell. The method may further comprise culturing the cell under conditions that allow for expression of a polypeptide from the nucleic acid. The method may further comprise isolating the expressed polypeptide. Also described is a method for producing a polypeptide comprising transferring one or more nucleic acid(s) or vector(s) of the disclosure into a cell and isolating polypeptides expressed from the nucleic acid. Methods also include a method for producing a polypeptide comprising culturing cells comprising nucleic acid(s) or vectors of the disclosure and isolating polypeptides expressed from the nucleic acid. The cell may be further defined as a human cell, B cell, T cell, Chinese hamster ovary, NS0 murine myeloma cell, PER.C6 cell, or a cell described herein.

[0008] Methods include a method for treating, preventing, vaccinating against, and/or inducing an immune response against a coronavirus infection in a subject, the method comprising administering to the subject an antibody, antigen binding fragment, polypeptide, nucleic acid, or host cell of the disclosure. Also provided is a method for evaluating a sample from a subject, the method comprising contacting a biological sample from the subject, or extract thereof, with at least one antibody, antigen binding fragment, or polypeptide of the disclosure. Also disclosed is a method for diagnosing an influenze infection in a subject, the method comprising contacting a biological sample from the subject, or extract thereof, with at least one antibody, antigen binding fragment, or polypeptide of any one of the disclosure. The compositions of the disclosure may be formulated as a vaccine for the treatment or prevention of an influenza infection. The antibodies, antigen binding fragments, or compositions of the disclosure may be used in a vaccine for preventing coronaviral infections in a subject that does not have a influenza infection. The antibodies, antigen binding fragments, or compositions of the disclosure may be used to treat a subject having a influenza infection.

[0009] The disclosure describes an antibody or antigen binding fragment comprising a heavy chain variable region and a light chain variable region, wherein the heavy chain variable region comprises a HCDR1, HCDR2, and HCDR3 from a heavy chain variable region of an antibody clone of Table 1 and wherein the light chain variable region comprises a LCDR1, LCDR2, and LCDR3 from the light chain variable region of the same clone of Table 1. Also described is an antibody or antigen binding fragment comprising a heavy chain variable region and a light chain variable region, wherein the heavy chain variable region comprises a HCDR1, HCDR2, and HCDR3 having or having at least 80% sequence identity or having or having at least 60, 61, 62, 63, 64, 65, 66, 67, 68, 69, 70, 71, 72, 73, 74, 75, 76, 77, 78, 79, 80, 81, 82, 83, 84, 85, 86, 87, 88, 89, 90, 91, 92, 93, 94, 95, 96, 97, 98, 99, or 100% (or any derivable range therein) sequence identity with a HCDR1, HCDR2, and HCDR3 from a heavy chain variable region of an antibody clone of Table 1 and wherein the light chain variable region comprises a LCDR1, LCDR2, and LCDR3 having or having at least least 80% sequence identity or having or having at least 60, 61, 62, 63, 64, 65, 66, 67, 68, 69, 70, 71, 72, 73, 74, 75, 76, 77, 78, 79, 80, 81, 82, 83, 84, 85, 86, 87, 88, 89, 90, 91, 92, 93, 94, 95, 96, 97, 98, 99, or 100% (or any derivable range therein) sequence identity with a LCDR1, LCDR2, and LCDR3 from the light chain variable region of the same clone of Table 1. The HCDR1, HCDR2, HCDR3, LCDR1, LCDR2, and/or LCDR3 may be determined from the variable region sequences by methods known in the art. The CDR may be a HCDR1, HCDR2, HCDR3, LCDR1, LCDR2, and/or LCDR3 determined by the Chothia method. The CDR may be a HCDR1, HCDR2, HCDR3, LCDR1, LCDR2, and/or LCDR3 determined by the Kabat method. The CDR may be a HCDR1, HCDR2, HCDR3, LCDR1, LCDR2, and/or LCDR3 determined by the IMGT method.

[0010] Also described is an antibody or antigen binding fragment in which the HCDR1, HCDR2, HCDR2, LCDR1, LCDR2, and LCDR3 each comprise an amino acid sequence that has at least 80% sequence identity to an HCDR1, HCDR2, HCDR2, LCDR1, LCDR2, and LCDR3 of Table 1, wherein the HCDR1, HCDR2, HCDR2, LCDR1, LCDR2, and LCDR3 are from the same antibody clone. The HCDR1, HCDR2, HCDR2, LCDR1, LCDR2, and LCDR3 may each comprise an amino acid sequence that has or has at least 60, 61, 62, 63, 64, 65, 66, 67, 68, 69, 70, 71, 72, 73, 74, 75, 76, 77, 78, 79, 80, 81, 82, 83, 84, 85, 86, 87, 88, 89, 90, 91, 92, 93, 94, 95, 96, 97, 98, 99, or 100% (or any derivable range therein) sequence identity to an HCDR1, HCDR2, HCDR2, LCDR1, LCDR2, and LCDR3 of Table 1, wherein the HCDR1, HCDR2, HCDR2, LCDR1, LCDR2, and LCDR3 are from the same antibody clone. The HCDR1, HCDR2, HCDR2, LCDR1, LCDR2, and LCDR3 may each comprise the amino acid sequence of an HCDR1, HCDR2, HCDR2, LCDR1, LCDR2, and LCDR3 of Table 1, wherein the HCDR1, HCDR2, HCDR2, LCDR1, LCDR2, and LCDR3 are from the same antibody clone.

[0011] Also described is an antibody or antigen binding fragment comprising a heavy chain variable region and a light chain variable region, wherein the heavy chain variable region comprises a HCDR1, HCDR2, and HCDR3 having at least 60, 61, 62, 63, 64, 65, 66, 67, 68, 69, 70, 71, 72, 73, 74, 75, 76, 77, 78, 79, 80, 81, 82, 83, 84, 85, 86, 87, 88, 89, 90, 91, 92, 93, 94, 95, 96, 97, 98, 99, or 100% (or any derivable range therein) sequence identity to the HCDR1, HCR2, HCR3 from a heavy chain variable region of a antibody clone of Table 1 and wherein the light chain variable region comprises a LCDR1, LCDR2, and LCDR3 having or having at least 60, 61, 62, 63, 64, 65, 66, 67, 68, 69, 70, 71, 72, 73, 74, 75, 76, 77, 78, 79, 80, 81, 82, 83, 84, 85, 86, 87, 88, 89, 90, 91, 92, 93, 94, 95, 96, 97, 98, 99, or 100% (or any derivable range therein) sequence identity to the LCDR1, LCDR2, and LCDR3 from the light chain variable region of the same antibody clone of Table 1. The antibody or antigen binding fragment may comprise a heavy chain variable region and a light chain variable region, wherein the heavy chain variable region comprises a HCDR1, HCDR2, and HCDR3 having or having at least 80% sequence identity to the HCDR1, HCR2, HCR3 from a heavy chain variable region of a antibody clone of Table 1 and wherein the light chain variable region comprises a LCDR1, LCDR2, and LCDR3 having at least 80% sequence identity to the LCDR1, LCDR2, and LCDR3 from the light chain variable region of the same antibody clone of Table 1. In some aspsects, the heavy chain variable region comprises a HCDR1, HCDR2, and HCDR3 having the amino acid sequence of an of a HCDR1, HCDR2, and HCDR3 of a clone of Table 1 and the light chain variable region comprises a LCDR1, LCDR2, and LCDR3 comprising the amino acid sequence of the LCDR1, LCDR2, and LCDR3 from the light chain variable region of the same clone of Table 1.

[0012] The polypeptides of the disclosure may comprise at least two antigen binding fragments or antibodies, wherein each antigen binding fragment or antibody is independently selected from an antigen binding fragment or antibody of the disclosure, such as those disclosed in Table 1. The polypeptide may be multivalent. The polypeptide may be multispecific. The polypeptide may be bispecific. The polypeptide may comprise, comprise at least, or comprise at most 1, 2, 3, 4, 5, 6, 7, 8, 9, or 10 antigen binding regions or antibodies. Each antigen binding region or antibody may be independently selected from an antigen binding region or antibody of the disclosure, such as those in Table 1. The polypeptide may have repeated units of the same antigen binding region, such as at least, at most, or exactly 1, 2, 3, 4, 5, 6, 7, 8, 9, or 10 repeated units.

[0013] The heavy chain variable region may comprise an amino acid sequence with at least 80% sequence identity to a heavy chain variable region of an antibody clone of Table 1 and/or the light chain variable region may comprise an amino acid sequence with at least 80% sequence identity to the light chain variable region of the same antibody clone of Table 1. The heavy chain variable region may comprise an amino acid sequence having or having at least 60, 61, 62, 63, 64, 65, 66, 67, 68, 69, 70, 71, 72, 73, 74, 75, 76, 77, 78, 79, 80, 81, 82, 83, 84, 85, 86, 87, 88, 89, 90, 91, 92, 93, 94, 95, 96, 97, 98, 99, or 100% (or any derivable range therein) sequence identity to a heavy chain variable region of an antibody clone of Table 1 and/or the light chain variable region may comprise an amino acid sequence having or having at least 60, 61, 62, 63, 64, 65, 66, 67, 68, 69, 70, 71, 72, 73, 74, 75, 76, 77, 78, 79, 80, 81, 82, 83, 84, 85, 86, 87, 88, 89, 90, 91, 92, 93, 94, 95, 96, 97, 98, 99, or 100% (or any derivable range therein) sequence identity to the light chain variable region of the same antibody clone of Table 1. The heavy chain variable region may comprise the amino acid sequence of a heavy chain variable region of an antibody clone of Table 1 and/or the light chain variable region may comprise the amino acid sequence of the same antibody clone of Table 1.

[0014] The framework regions are the regions between the CDR sequences. For example, HFR1 is the heavy chain framework region immediately before (amino proximal) to the HCDR1. HFR2 is between HCDR1 and HCDR2. HFR3 is between HCDR2 and HCDR3. HFR4 is after (carboxy proximal) to HCDR3. LFR1 is the light chain framework region immediately before (amino proximal) to the LCDR1. LFR2 is between LCDR1 and LCDR2. LFR3 is between LCDR2 and LCDR3. LFR4 is after (carboxy proximal) LCDR3. The antibody or antigen binding fragment may comprise a heavy chain framework region (HFR) 1, HFR2, HFR3, and HFR4 and light chain framework region (LFR) 1, LFR2, LFR3, and LFR4, and wherein the HFR1, HFR2, HFR3, and HFR4 comprises an amino acid sequence with at least 80% sequence identity to an HFR1, HFR2, HFR3, and HFR4, respectively, of an antibody clone of Table 1, and the LFR1, LFR2, LFR3, and LFR4 may comprise an amino acid sequence with at least 80% sequence identity to the LFR1, LFR2, LFR3, and LFR4, respectively, of the same antibody clone of Table 1. The antibody or antigen binding fragment may comprise a heavy chain framework region (HFR) 1, HFR2, HFR3, and HFR4 and light chain framework region (LFR) 1, LFR2, LFR3, and LFR4, and wherein the HFR1, HFR2, HFR3, and HFR4 may comprise an amino acid sequence having or having at least 60, 61, 62, 63, 64, 65, 66, 67, 68, 69, 70, 71, 72, 73, 74, 75, 76, 77, 78, 79, 80, 81, 82, 83, 84, 85, 86, 87, 88, 89, 90, 91, 92, 93, 94, 95, 96, 97, 98, 99, or 100% (or any derivable range therein) sequence identity to an HFR1, HFR2, HFR3, and HFR4, respectively, of an antibody clone of Table 1, and the LFR1, LFR2, LFR3, and LFR4 may comprise an amino acid sequence having or having at least 60, 61, 62, 63, 64, 65, 66, 67, 68, 69, 70, 71, 72, 73, 74, 75, 76, 77, 78, 79, 80, 81, 82, 83, 84, 85, 86, 87, 88, 89, 90, 91, 92, 93, 94, 95, 96, 97, 98, 99, or 100% (or any derivable range therein) sequence identity to the LFR1, LFR2, LFR3, and LFR4, respectively, of the same antibody clone of Table 1. The HFR1, HFR2, HFR3, and HFR4 may comprise the amino acid sequence of an HFR1, HFR2, HFR3, and HFR4, respectively, of an antibody clone of Table 1, and the LFR1, LFR2, LFR3, and LFR4 may comprise the amino acid sequence of the LFR1, LFR2, LFR3, and LFR4, respectively, of the same antibody clone of Table 1. The antibody or antigen binding fragment may comprise a heavy chain and a light chain and wherein the heavy chain may comprise an amino acid sequence with at least 70% sequence identity to a heavy chain of an antibody clone of Table 1 and the light chain may comprise an amino acid sequence with at least 70% sequence identity to the light chain of the same antibody clone of Table 1. The antibody or antigen binding fragment may comprise a heavy chain and a light chain and wherein the heavy chain may comprise an amino acid sequence having or having at least 60, 61, 62, 63, 64, 65, 66, 67, 68, 69, 70, 71, 72, 73, 74, 75, 76, 77, 78, 79, 80, 81, 82, 83, 84, 85, 86, 87, 88, 89, 90, 91, 92, 93, 94, 95, 96, 97, 98, 99, or 100% (or any derivable range therein) sequence identity to a heavy chain of an antibody clone of Table 1 and the light chain may comprise an amino acid sequence having or having at least 60, 61, 62, 63, 64, 65, 66, 67, 68, 69, 70, 71, 72, 73, 74, 75, 76, 77, 78, 79, 80, 81, 82, 83, 84, 85, 86, 87, 88, 89, 90, 91, 92, 93, 94, 95, 96, 97, 98, 99, or 100% (or any derivable range therein) sequence identity to the light chain of the same antibody clone of Table 1. The antibody or antigen binding fragment may comprise a heavy chain and a light chain and wherein the heavy chain may comprise the amino acid sequence of an antibody clone of Table 1 and the light chain may comprise the amino acid sequence of the same antibody clone of Table 1.

[0015] Aspects of the disclosure relate to an antibody or antigen binding fragment comprising a heavy chain variable region and a light chain variable region, wherein the heavy chain variable region comprises a HCDR1, HCDR2, and HCDR3 from a heavy chain variable region of an antibody clone encoded by a heavy chain nucleic acid of Table 2 and wherein the light chain variable region comprises a LCDR1, LCDR2, and LCDR3 from the light chain variable region of the same clone encoded by the light chain nucleic acid of Table 2. Further aspects relate to an antibody or antigen binding fragment comprising a heavy chain variable region and a light chain variable region, wherein the heavy chain variable region comprises a HCDR1, HCDR2, and HCDR3 having or having at least 80% sequence identity or having or having at least 60, 61, 62, 63, 64, 65, 66, 67, 68, 69, 70, 71, 72, 73, 74, 75, 76, 77, 78, 79, 80, 81, 82, 83, 84, 85, 86, 87, 88, 89, 90, 91, 92, 93, 94, 95, 96, 97, 98, 99, or 100% (or any derivable range therein) sequence identity with a HCDR1, HCDR2, and HCDR3 from a heavy chain variable region of an antibody clone encoded by a heavy chain nucleic acid of Table 2 and wherein the light chain variable region comprises a LCDR1, LCDR2, and LCDR3 having or having at least least 80% sequence identity or having or having at least 60, 61, 62, 63, 64, 65, 66, 67, 68, 69, 70, 71, 72, 73, 74, 75, 76, 77, 78, 79, 80, 81, 82, 83, 84, 85, 86, 87, 88, 89, 90, 91, 92, 93, 94, 95, 96, 97, 98, 99, or 100% (or any derivable range therein) sequence identity with a LCDR1, LCDR2, and LCDR3 from the light chain variable region of the same clone encoded by a light chain nucleic acid of Table 2. The HCDR1, HCDR2, HCDR3, LCDR1, LCDR2, and/or LCDR3 may be determined from the variable region sequences by methods known in the art. In some aspects, the CDR is HCDR1, HCDR2, HCDR3, LCDR1, LCDR2, and/or LCDR3 determined by the Chothia method. In some aspects, the CDR is HCDR1, HCDR2, HCDR3, LCDR1, LCDR2, and/or LCDR3 determined by the Kabat method. In some aspects, the CDR is HCDR1, HCDR2, HCDR3, LCDR1, LCDR2, and/or LCDR3 determined by the IMGT method.

[0016] Aspects of the disclosure relate to an antibody or antigen binding fragment in which the HCDR1, HCDR2, HCDR2, LCDR1, LCDR2, and LCDR3 each comprise an amino acid sequence that has at least 80% sequence identity to an HCDR1, HCDR2, HCDR2, LCDR1, LCDR2, and LCDR3 of Table 2, wherein the HCDR1, HCDR2, HCDR2, LCDR1, LCDR2, and LCDR3 are from the same antibody clone encoded by a heavy and light chain nucleic acid of Table 2.

[0017] Aspects of the disclosure relate to an antibody or antigen binding fragment comprising a heavy chain variable region and a light chain variable region, wherein the heavy chain variable region comprises a HCDR1, HCDR2, and HCDR3 having at least 60, 61, 62, 63, 64, 65, 66, 67, 68, 69, 70, 71, 72, 73, 74, 75, 76, 77, 78, 79, 80, 81, 82, 83, 84, 85, 86, 87, 88, 89, 90, 91, 92, 93, 94, 95, 96, 97, 98, 99, or 10000 (or any derivable range therein) sequence identity to the HCDR1, HCR2, HCR3 from a heavy chain variable region of a antibody clone encoded by a heavy chain nucleic acid of Table 2 and wherein the light chain variable region comprises a LCDR1, LCDR2, and LCDR3 having or having at least 60, 61, 62, 63, 64, 65, 66, 67, 68, 69, 70, 71, 72, 73, 74, 75, 76, 77, 78, 79, 80, 81, 82, 83, 84, 85, 86, 87, 88, 89, 90, 91, 92, 93, 94, 95, 96, 97, 98, 99, or 100% (or any derivable range therein) sequence identity to the LCDR1, LCDR2, and LCDR3 from the light chain variable region of the same antibody clone encoded by a light chain nucleic acid of Table 2. In some aspects, the antibody or antigen binding fragment comprises a heavy chain variable region and a light chain variable region, wherein the heavy chain variable region comprises a HCDR1, HCDR2, and HCDR3 having or having at least 80% sequence identity to the HCDR1, HCR2, HCR3 from a heavy chain variable region of a antibody clone encoded by a heavy chain nucleic acid of Table 2 and wherein the light chain variable region comprises a LCDR1, LCDR2, and LCDR3 having at least 80% sequence identity to the LCDR1, LCDR2, and LCDR3 from the light chain variable region of the same antibody clone encoded by a light chain nucleic acid of Table 2. In some aspsects, the heavy chain variable region comprises a HCDR1, HCDR2, and HCDR3 having the amino acid sequence of an of a HCDR1, HCDR2, and HCDR3 of a clone encoded by a heavy chain nucleic acid of Table 2 and the light chain variable region comprises a LCDR1, LCDR2, and LCDR3 comprising the amino acid sequence of the LCDR1, LCDR2, and LCDR3 from the light chain variable region of the same clone encoded by a light chain nucleic acid of Table 2.

[0018] The polypeptides of the disclosure may comprise at least two antigen binding fragments, wherein each antigen binding fragment is independently selected from an antigen binding fragment of the disclosure. In some aspects, the polypeptide is multivalent. In some aspects, the polypeptide is multispecific. In some aspects, the polypeptide is bispecific. In some aspects, the polypeptide comprises, comprises at least, or comprises at most 1, 2, 3, 4, 5, 6, 7, 8, 9, or 10 antigen binding regions. Each antigen binding region may be independently selected from an antigen binding region of the disclosure. In some aspects, the polypeptide may have repeated units of the same antigen binding region, such as at least, at most, or exactly 1, 2, 3, 4, 5, 6, 7, 8, 9, or 10 repeated units.

[0019] In some aspects, the heavy chain variable region comprises an amino acid sequence with at least 80% sequence identity to a heavy chain variable region of an antibody clone encoded by a heavy chain nucleic acid of Table 2 and/or the light chain variable region comprises an amino acid sequence with at least 80% sequence identity to the light chain variable region of the same antibody clone encoded by a light chain nucleic acid of Table 2. In some aspects, the heavy chain variable region comprises an amino acid sequence having or having at least 60, 61, 62, 63, 64, 65, 66, 67, 68, 69, 70, 71, 72, 73, 74, 75, 76, 77, 78, 79, 80, 81, 82, 83, 84, 85, 86, 87, 88, 89, 90, 91, 92, 93, 94, 95, 96, 97, 98, 99, or 100% (or any derivable range therein) sequence identity to a heavy chain variable region of an antibody clone encoded by a heavy chain nucleic acid of Table 2 and/or the light chain variable region comprises an amino acid sequence having or having at least 60, 61, 62, 63, 64, 65, 66, 67, 68, 69, 70, 71, 72, 73, 74, 75, 76, 77, 78, 79, 80, 81, 82, 83, 84, 85, 86, 87, 88, 89, 90, 91, 92, 93, 94, 95, 96, 97, 98, 99, or 100% (or any derivable range therein) sequence identity to the light chain variable region of the same antibody clone encoded by a light chain nucleic acid of Table 2. In some aspects, the heavy chain variable region comprises the amino acid sequence of a heavy chain variable region of an antibody clone encoded by a heavy chain nucleic acid of Table 2 and/or the light chain variable region comprises the amino acid sequence of the same antibody clone encoded by a light chain nucleic acid of Table 2. In some aspects, the antibody or antigen binding fragment comprises a heavy chain framework region (HFR) 1, HFR2, HFR3, and HFR4 and light chain framework region (LFR) 1, LFR2, LFR3, and LFR4, and wherein the HFR1, HFR2, HFR3, and HFR4 comprises an amino acid sequence with at least 80% sequence identity to an HFR1, HFR2, HFR3, and HFR4, respectively, of an antibody clone encoded by a heavy chain nucleic acid of Table 2, and the LFR1, LFR2, LFR3, and LFR4 comprises an amino acid sequence with at least 80% sequence identity to the LFR1, LFR2, LFR3, and LFR4, respectively, of the same antibody clone encoded by a light chain nucleic acid of Table 2. In some aspects, the antibody or antigen binding fragment comprises a heavy chain framework region (HFR) 1, HFR2, HFR3, and HFR4 and light chain framework region (LFR) 1, LFR2, LFR3, and LFR4, and wherein the HFR1, HFR2, HFR3, and HFR4 comprises an amino acid sequence having or having at least 60, 61, 62, 63, 64, 65, 66, 67, 68, 69, 70, 71, 72, 73, 74, 75, 76, 77, 78, 79, 80, 81, 82, 83, 84, 85, 86, 87, 88, 89, 90, 91, 92, 93, 94, 95, 96, 97, 98, 99, or 100% (or any derivable range therein) sequence identity to an HFR1, HFR2, HFR3, and HFR4, respectively, of an antibody clone encoded by a heavy chain nucleic acid of Table 2, and the LFR1, LFR2, LFR3, and LFR4 comprises an amino acid sequence having or having at least 60, 61, 62, 63, 64, 65, 66, 67, 68, 69, 70, 71, 72, 73, 74, 75, 76, 77, 78, 79, 80, 81, 82, 83, 84, 85, 86, 87, 88, 89, 90, 91, 92, 93, 94, 95, 96, 97, 98, 99, or 100% (or any derivable range therein) sequence identity to the LFR1, LFR2, LFR3, and LFR4, respectively, of the same antibody clone encoded by a light chain nucleic acid of Table 2. In some aspects, the HFR1, HFR2, HFR3, and HFR4 comprises the amino acid sequence of an HFR1, HFR2, HFR3, and HFR4, respectively, of an antibody clone encoded by a heavy chain nucleic acid of Table 2, and the LFR1, LFR2, LFR3, and LFR4 comprises the amino acid sequence of the LFR1, LFR2, LFR3, and LFR4, respectively, of the same antibody clone encoded by a light chain nucleic acid of Table 2. In some aspects, the antibody or antigen binding fragment comprises a heavy chain and a light chain and wherein the heavy chain comprises an amino acid sequence with at least 70% sequence identity to a heavy chain of an antibody clone encoded by a heavy chain nucleic acid of Table 2 and the light chain comprises an amino acid sequence with at least 70% sequence identity to the light chain of the same antibody clone encoded by a light chain nucleic acid of Table 2. In some aspects, the antibody or antigen binding fragment comprises a heavy chain and a light chain and wherein the heavy chain comprises an amino acid sequence having or having at least 60, 61, 62, 63, 64, 65, 66, 67, 68, 69, 70, 71, 72, 73, 74, 75, 76, 77, 78, 79, 80, 81, 82, 83, 84, 85, 86, 87, 88, 89, 90, 91, 92, 93, 94, 95, 96, 97, 98, 99, or 10000 (or any derivable range therein) sequence identity to a heavy chain of an antibody clone encoded by a heavy chain nucleic acid of Table 2 and the light chain comprises an amino acid sequence having or having at least 60, 61, 62, 63, 64, 65, 66, 67, 68, 69, 70, 71, 72, 73, 74, 75, 76, 77, 78, 79, 80, 81, 82, 83, 84, 85, 86, 87, 88, 89, 90, 91, 92, 93, 94, 95, 96, 97, 98, 99, or 100% (or any derivable range therein) sequence identity to the light chain of the same antibody clone encoded by a light chain nucleic acid of Table 2. In some aspects, the antibody or antigen binding fragment comprises a heavy chain and a light chain and wherein the heavy chain comprises the amino acid sequence of an antibody clone encoded by a heavy chain nucleic acid of Table 2 and the light chain comprises the amino acid sequence of the same antibody clone encoded by a light chain nucleic acid of Table 2.

[0020] In some aspects, the heavy chain variable region comprises a heavy chain framework region that has or has at least 80% sequence identity to a heavy chain framework region of an antibody clone encoded by a heavy chain nucleic acid of Table 2 and the light chain variable region comprises a light chain framework region that has or has at least 80% sequence identity to a light chain framework region of the same antibody clone encoded by a light chain nucleic acid of Table 2. In some aspects, the heavy chain variable region comprises a heavy chain framework region having or having at least 60, 61, 62, 63, 64, 65, 66, 67, 68, 69, 70, 71, 72, 73, 74, 75, 76, 77, 78, 79, 80, 81, 82, 83, 84, 85, 86, 87, 88, 89, 90, 91, 92, 93, 94, 95, 96, 97, 98, 99, or 100% (or any derivable range therein) sequence identity to a heavy chain framework region of an antibody clone encoded by a heavy chain nucleic acid of Table 2 and the light chain variable region comprises a light chain framework region having or having at least 60, 61, 62, 63, 64, 65, 66, 67, 68, 69, 70, 71, 72, 73, 74, 75, 76, 77, 78, 79, 80, 81, 82, 83, 84, 85, 86, 87, 88, 89, 90, 91, 92, 93, 94, 95, 96, 97, 98, 99, or 100% (or any derivable range therein) sequence identity to a light chain framework region of the same antibody clone encoded by a light chain nucleic acid of Table 2.

[0021] In some aspects, the heavy chain variable region comprises at least 70% sequence identity to the heavy chain variable region of an antibody clone encoded by a heavy chain nucleic acid of Table 2 and the light chain variable region comprises at least 70% sequence identity to the light chain variable region of the same antibody clone encoded by a light chain nucleic acid of Table 2, and wherein the heavy chain and light chain comprise 100% sequence identity to each of the three heavy chain CDRs and three light chain CDRs from the same antibody clone of Table 2. In some aspects, the heavy chain variable region comprises at least 75% sequence identity to the heavy chain variable region of an antibody clone encoded by a heavy chain nucleic acid of Table 2 and the light chain variable region comprises at least 75% sequence identity to the light chain variable region of the same antibody clone encoded by a light chain nucleic acid of Table 2, and wherein the heavy chain and light chain comprise 100% sequence identity to each of the three heavy chain CDRs and three light chain CDRs from the same antibody clone of Table 2. In some aspects, the heavy chain variable region comprises at least 80% sequence identity to the heavy chain variable region of an antibody clone encoded by a heavy chain nucleic acid of Table 2 and the light chain variable region comprises at least 80% sequence identity to the light chain variable region of the same antibody clone encoded by a light chain nucleic acid of Table 2, and wherein the heavy chain and light chain comprise 100% sequence identity to each of the three heavy chain CDRs and three light chain CDRs from the same antibody clone of Table 2. In some aspects, the heavy chain variable region comprises at least 85% sequence identity to the heavy chain variable region of an antibody clone encoded by a heavy chain nucleic acid of Table 2 and the light chain variable region comprises at least 85% sequence identity to the light chain variable region of the same antibody clone encoded by a light chain nucleic acid of Table 2, and wherein the heavy chain and light chain comprise 100% sequence identity to each of the three heavy chain CDRs and three light chain CDRs from the same antibody clone of Table 2. In some aspects, the heavy chain variable region comprises at least 90% sequence identity to the heavy chain variable region of an antibody clone encoded by a heavy chain nucleic acid of Table 2 and the light chain variable region comprises at least 90% sequence identity to the light chain variable region of the same antibody clone encoded by a light chain nucleic acid of Table 2, and wherein the heavy chain and light chain comprise 100% sequence identity to each of the three heavy chain CDRs and three light chain CDRs from the same antibody clone of Table 2. In some aspects, the heavy chain variable region comprises at least 95% sequence identity to the heavy chain variable region of an antibody clone encoded by a heavy chain nucleic acid of Table 2 and the light chain variable region comprises at least 95% sequence identity to the light chain variable region of the same antibody clone encoded by a light chain nucleic acid of Table 2, and wherein the heavy chain and light chain comprise 100% sequence identity to each of the three heavy chain CDRs and three light chain CDRs from the same antibody clone of Table 2.

[0022] The antibody or antigen binding fragment of the disclosure may be human, chimeric, or humanized. The antibody, or antigen binding fragment may bind an influenza antigen with a kD of about 10⁻⁶ nM to about 10⁻¹² pM. The antibody, or antigen binding fragment may bind an influenza antigen with a kD of about, a kD of at least, or a kD of at most 10⁻³, 10⁻⁴, 10⁻⁵, 10⁻⁶, 10⁻⁷, 10⁻⁸, 10⁻⁹, 10⁻¹⁰, 10⁻¹¹, 10⁻¹², 10⁻¹³, 10⁻¹⁴, 10⁻¹⁵, 10⁻¹⁶, 10⁻¹⁷, or 10⁻¹⁸ (or any derivable range therein) μM, nM, or pM. The antibody may be further defined as a neutralizing antibody. The antibody or antigen binding fragment may be further defined as a human antibody or antigen binding fragment, humanized antibody or antigen binding fragment, recombinant antibody or antigen binding fragment, chimeric antibody or antigen binding fragment, an antibody or antigen binding fragment derivative, a veneered antibody or antigen binding fragment, a diabody, a monoclonal antibody or antigen binding fragment, a single domain antibody, or a single chain antibody. The antigen binding fragment may be further defined as a single chain variable fragment (scFv), F(ab′)2, Fab′, Fab, Fv, or rIgG. The antibody, antigen binding fragment, or polypeptide may be operatively linked to a detectable label. Detectable labels are described herein.

[0023] Also provided are multi-specific and/or multivalent antibodies and polypeptides. The disclosure provides for bivalent or bispecific antibodies that comprise two antigen binding fragments, wherein the antigen binding fragment is two of the same antigen binding fragments or two different antigen binding fragments described herein. The disclosure also provides for multi-specific polypeptides. The polypeptides may comprise at least 2, 3, 4, 5, or 6 antigen binding fragments.

[0024] The antigen binding fragment may be at least 2, 3, 4, 5, or 6 scFv, F(ab′)₂, Fab′, Fab, Fv, or rIgG, or combinations thereof. The polypeptide and/or antigen binding fragments of the disclosure may comprise a linker between a heavy chain and light chain variable region or between antigen binding fragments. The linker may be a flexible linker. Exemplary flexible linkers include glycine polymers (G)n, glycine-serine polymers (including, for example, (GS)n, (GSGGS-SEQ ID NO: 18642)n, (G₄S)n and (GGGS-SEQ ID NO: 18643)n, where n is an integer of at least one. n may be at least, at most, or exactly 1, 2, 3, 4, 5, 6, 7, 8, 9, or 10 (or any derivable range therein). Glycine-alanine polymers, alanine-serine polymers, and other flexible linkers known in the art and may be used as a linker in the polypeptides of the disclosure. Exemplary linkers can comprise or consist of GGSG (SEQ ID NO: 18644), GGSGG (SEQ ID NO:18645), GSGSG (SEQ ID NO:18646), GSGGG (SEQ ID NO:18647), GGGSG (SEQ ID NO:18648), GSSSG (SEQ ID NO: 18649), and the like.

[0025] Compositions of the disclosure, such as pharmaceutical compositions may comprise a pharmaceutical excipient, carrier, or molecule described herein. The composition may further comprises an adjuvant or an immunostimulator. Such adjuvants or immunostimulators may include, but are not limited to stimulators of pattern recognition receptors, such as Toll-like receptors, RIG-1 and NOD-like receptors (NLR), mineral salts, such as alum, alum combined with monphosphoryl lipid (MPL) A of Enterobacteria, such as Escherichia coli, Salmonella minnesota, Salmonella typhimurium, or Shigella flexneri or specifically with MPL (ASO4), MPL A of above-mentioned bacteria separately, saponins, such as QS-21, Quil-A, ISCOMs, ISCOMATRIX, emulsions such as MF59, Montanide, ISA 51 and ISA 720, AS02 (QS21+squalene+MPL.), liposomes and liposomal formulations such as ASO1, synthesized or specifically prepared microparticles and microcarriers such as bacteria-derived outer membrane vesicles (OMV) of N. gonorrheae, Chlamydia trachomatis and others, or chitosan particles, depot-forming agents, such as Pluronic block co-polymers, specifically modified or prepared peptides, such as muramyl dipeptide, aminoalkyl glucosaminide 4-phosphates, such as RC529, or proteins, such as bacterial toxoids or toxin fragments. Compositions may comprise more than one antibody and/or antigen binding fragment of the disclosure. Accordingly, compositions of the disclosure may comprise, may comprise at least, or may comprise at most 1, 2, 3, 4, 5, 6, 7, 8, 9, or 10 antibodies and/or antigen binding fragments of the disclosure, wherein each antibody or antigen binding fragment is independently selected from an antibody or antigen binding fragment of the disclosure, such as those shown in Table 1. The compositions of the disclosure may be formulated for a route of administration described herein. The composition, antibody, antigen binding fragment, or polypeptide may be formulated for parenteral, intravenous, subcutaneous, intramuscular, or intranasal administration. The compositions may be formulated for intranasal administration.

[0026] The polypeptides, compositions, antibodies, antigen binding fragments, nucleic acids, or host cells, when administered to a subject, may be provided or may be provided at least, or may be provided at most 1, 2, 3, 4, 5, 6, 7, 8, 9, 10, 11, 12, 13, 14, 15, 16, 17, 18, 19, or 20 times (or any derivable range therein) over the course of, over the course of at least, or over the course of at most 1, 2, 3, 4, 5, 6, 7, 8, 9, 10, 11, 12, 13, or 14 days or 1, 2, 3, 4, 5, 6, 7, 8 9, 10, 11, 12, 13, 14, 15, 16, 17, 18, 19, or 20 weeks, or 1, 2, 3, 4, 5, 6, 7, 8, 9, 10, 11, or 12 months, or 1, 2, 3, 4, 5, 6, 7, 8, 9, or 10 years (or any range derivable therein).

[0027] The host cell may be a human cell, B cell, T cell, Chinese hamster ovary, NS0 murine myeloma cell, or PER.C6 cell. The host cell may be a cell type or cell population described herein.

[0028] The subject or patient may be a human subject or a human patient. The subject or patient may be a non-human animal. The non-human animal may be a bat, monkey, camel, rat, mouse, rabbit, goat, chicken, bird, cat, or dog. The subject may further be defined as an at-risk subject. At-risk subjects include health care workers, immunocompromised subjects, people over the age of 65, or those with at least one or at least two underlying conditions. Example of underlying conditions include obesity, high blood pressure, autoimmunity, cancer, and asthma. The subject may be one has one or more symptoms of an influenza infection. Symptoms of an influenza infection include, but are not limited to elevated temperature or a fever of 100.0° F. or more, difficulty breathing, shortness of breath, fatigue, headache, chills, sore throat, congestion or runny nose, shaking or exaggerated shivering, significant muscle pain or ache, diarrhea, and/or nausea or vomiting. The subject may be one that does not have any symptoms of an influenza infection. The subject may be one that has been diagnosed with an influenza infection. The subject may be one that has not been diagnosed with an influenza infection. The subject may be one that has been previously treated for an influenza infection. The subject may be one that has been previously vaccinated for influenza. The subject may be one that has not been previously vaccinated for influenza. The influenza infection may comprise an H1N1 influenza infection. The influenza infection may comprise an H1H2 infection. The previous treatment may comprise a pain reliever, such as acetaminophen or ibuprofen, a steroid such as dexamethasone, prednisolone, beclomethasone, fluticasone, or methylprednisone or an antiviral such as remdesivir. The subject may be administered an additional therapeutic. The additional therapeutic may comprise one or more of a pain reliever, such as acetaminophen or ibuprofen, a steroid such as dexamethasone, prednisolone, beclomethasone, fluticasone, or methylprednisone or an antiviral such as oseltamivir, zanamivir, peramivir, or baloxavir.

[0029] The method may further comprise incubating the antibody, antigen binding fragment, or polypeptide under conditions that allow for the binding of the antibody, antigen binding fragment, or polypeptide to antigens in the biological sample or extract thereof. The method may further comprise detecting the binding of an antigen to the antibody, antigen binding fragment, or polypeptide. The method may further comprise contacting the biological sample with at least one capture antibody, antigen, or polypeptide. The biological sample may comprise a blood sample, urine sample, fecal sample, or nasopharyngeal sample.

[0030] Aspects of the disclosure are also described in “A public broadly neutralizing antibody class targets a membrane-proximal anchor epitope of influenza virus hemagglutinin Jenna J. Guthmiller, Julianna Han, Henry A. Utset, Lei Li, Linda Yu-Ling Lan, Carole Henry, Christopher T. Stamper, Olivia Stovicek, Lauren Gentles, Haley L. Dugan, Nai-Ying Zheng, Sara T. Richey, Micah E. Tepora, Dalia J. Bitar, Siriruk Changrob, Shimn Strohmeier, Min Huang, Adolfo Garcia-Sastre, Raffael Nachbagauer, Peter Palese, Jesse D. Bloom, Florian Krammer, Lynda Coughlan, Andrew B. Ward, Patrick C. Wilson; bioRxiv 2021.02.25.432905; and the supplemental materials related thereto: Li, Lei; Guthmiller, Jenna; Lan, Linda; Wilson, Patrick (2021), “Broadly neutralizing antibodies target a hemagglutinin anchor epitope, Guthmiller et al. 2021”, Mendeley Data, V1, doi: 10.17632/jzsx489pmk.1, both of which are herein incorporated by reference for all purposes.

[0031] Also described are multi-specific and/or multivalent antibodies and polypeptides. Accordingly, described are bivalent or bispecific antibodies that comprise two antigen binding fragments, wherein the antigen binding fragment is two of the same antigen binding fragments or two different antigen binding fragments described herein. The disclosure also provides for multi-specific polypeptides. Also disclosed are polypeptides comprising or comprising at least 2, 3, 4, 5, or 6 antigen binding fragments.

[0032] Methods may comprise or further comprise incubating the antibody, antigen binding fragment, or polypeptide under conditions that allow for the binding of the antibody, antigen binding fragment, or polypeptide to antigens in the biological sample or extract thereof. The method may comprise detecting the binding of an antigen to the antibody, antigen binding fragment, or polypeptide. The method may further comprise contacting the biological sample with at least one capture antibody, antigen, or polypeptide. The at least one capture antibody, antigen binding fragment, or polypeptide may be an antibody, polypeptide, or antigen binding fragment of the disclosure. The capture antibody may be linked or operatively linked to a solid support. The term “operatively linked” refers to a situation where two components are combined or capable of combining to form a complex. For example, the components may be covalently attached and/or on the same polypeptide, such as in a fusion protein or the components may have a certain degree of binding affinity for each other, such as a binding affinity that occurs through van der Waals forces. The biological sample may comprise a blood sample, urine sample, fecal sample, or nasopharyngeal sample. The at least one antibody, antigen binding fragment, or polypeptide may be operatively linked to a detectable label.

[0033] The disclosure describes an antibody, antigen binding fragment, or polypeptide comprising a heavy chain variable region having a HCDR1, HCDR2, and HCDR3, and a light chain variable region having a LCDR1, LCDR2, and LCDR3, wherein the HCDR1, HCDR2, and HCDR3 comprises an amino acid sequence of SEQ ID NOS: 17275, 18029, and 3941, respectively and the LCDR1, LCDR2, and LCDR3 comprises an amino acid sequence of SEQ ID NOS: 16056, 9503, and 12778, respectively.

[0034] The disclosure describes an antibody, antigen binding fragment, or polypeptide comprising a heavy chain variable region having a HCDR1, HCDR2, and HCDR3, and a light chain variable region having a LCDR1, LCDR2, and LCDR3, wherein the HCDR1, HCDR2, and HCDR3 comprises an amino acid sequence of SEQ ID NOS:17274, 4138, and 5911, respectively and the LCDR1, LCDR2, and LCDR3 comprises an amino acid sequence of SEQ ID NOS: 16037, 4425, and 12433, respectively.

[0035] The disclosure describes an antibody, antigen binding fragment, or polypeptide comprising a heavy chain variable region having a HCDR1, HCDR2, and HCDR3, and a light chain variable region having a LCDR1, LCDR2, and LCDR3, wherein the HCDR1, HCDR2, and HCDR3 comprises an amino acid sequence of SEQ ID NOS: 17273, 4149, and 7845, respectively and the LCDR1, LCDR2, and LCDR3 comprises an amino acid sequence of SEQ ID NOS: 15964, 4425, and 10711, respectively.

[0036] The disclosure describes an antibody, antigen binding fragment, or polypeptide comprising a heavy chain variable region having a HCDR1, HCDR2, and HCDR3, and a light chain variable region having a LCDR1, LCDR2, and LCDR3, wherein the HCDR1, HCDR2, and HCDR3 comprises an amino acid sequence of SEQ ID NOS: 11668, 4139, and 6334, respectively and the LCDR1, LCDR2, and LCDR3 comprises an amino acid sequence of SEQ ID NOS: 16037, 4425, and 12433, respectively.

[0037] The disclosure describes an antibody, antigen binding fragment, or polypeptide comprising a heavy chain variable region having a HCDR1, HCDR2, and HCDR3, and a light chain variable region having a LCDR1, LCDR2, and LCDR3, wherein the HCDR1, HCDR2, and HCDR3 comprises an amino acid sequence of SEQ ID NOS: 17628, 18542, and 9462, respectively and the LCDR1, LCDR2, and LCDR3 comprises an amino acid sequence of SEQ ID NOS: 16045, 9503, and 12947, respectively.

[0038] The disclosure describes an antibody, antigen binding fragment, or polypeptide comprising a heavy chain variable region having a HCDR1, HCDR2, and HCDR3, and a light chain variable region having a LCDR1, LCDR2, and LCDR3, wherein the HCDR1, HCDR2, and HCDR3 comprises an amino acid sequence of SEQ ID NOS: 16519, 4138, and 5907, respectively and the LCDR1, LCDR2, and LCDR3 comprises an amino acid sequence of SEQ ID NOS:15887, 10225, and 12775, respectively.

[0039] The disclosure describes an antibody, antigen binding fragment, or polypeptide comprising a heavy chain variable region having a HCDR1, HCDR2, and HCDR3, and a light chain variable region having a LCDR1, LCDR2, and LCDR3, wherein the HCDR1, HCDR2, and HCDR3 comprises an amino acid sequence of SEQ ID NOS:17634, 18542, and 10208, respectively and the LCDR1, LCDR2, and LCDR3 comprises an amino acid sequence of SEQ ID NOS:16109, 9503, and 12775, respectively.

[0040] The disclosure describes an antibody, antigen binding fragment, or polypeptide comprising a heavy chain variable region having a HCDR1, HCDR2, and HCDR3, and a light chain variable region having a LCDR1, LCDR2, and LCDR3, wherein the HCDR1, HCDR2, and HCDR3 comprises an amino acid sequence of SEQ ID NOS: 10339, 16888, and 6142, respectively and the LCDR1, LCDR2, and LCDR3 comprises an amino acid sequence of SEQ ID NOS: 16076, 4432, and 12433, respectively.

[0041] The disclosure describes an antibody, antigen binding fragment, or polypeptide comprising a heavy chain variable region having a HCDR1, HCDR2, and HCDR3, and a light chain variable region having a LCDR1, LCDR2, and LCDR3, wherein the HCDR1, HCDR2, and HCDR3 comprises an amino acid sequence of SEQ ID NOS: 18251, 16888, and 6142, respectively and the LCDR1, LCDR2, and LCDR3 comprises an amino acid sequence of SEQ ID NOS: 16076, 4425, and 12433, respectively.

[0042] The disclosure describes an antibody, antigen binding fragment, or polypeptide comprising a heavy chain variable region having a HCDR1, HCDR2, and HCDR3, and a light chain variable region having a LCDR1, LCDR2, and LCDR3, wherein the HCDR1, HCDR2, and HCDR3 comprises an amino acid sequence of SEQ ID NOS: 17274, 4138, and 6550, respectively and the LCDR1, LCDR2, and LCDR3 comprises an amino acid sequence of SEQ ID NOS: 16015, 4400, and 12433, respectively. having a LCDR1, LCDR2, and LCDR3, wherein the HCDR1, HCDR2, and HCDR3 comprises an amino acid sequence of SEQ ID NOS:4303, 16921, and 6142, respectively and the LCDR1, LCDR2, and LCDR3 comprises an amino acid sequence of SEQ ID NOS: 16076, 4425, and 12433, respectively.

[0043] The disclosure describes an antibody, antigen binding fragment, or polypeptide comprising a heavy chain variable region having a HCDR1, HCDR2, and HCDR3, and a light chain variable region having a LCDR1, LCDR2, and LCDR3, wherein the HCDR1, HCDR2, and HCDR3 comprises an amino acid sequence of SEQ ID NOS: 11622, 18491, and 4403, respectively and the LCDR1, LCDR2, and LCDR3 comprises an amino acid sequence of SEQ ID NOS: 15867, 9502, and 12772, respectively.

[0044] The disclosure describes an antibody, antigen binding fragment, or polypeptide comprising a heavy chain variable region having a HCDR1, HCDR2, and HCDR3, and a light chain variable region having a LCDR1, LCDR2, and LCDR3, wherein the HCDR1, HCDR2, and HCDR3 comprises an amino acid sequence of SEQ ID NOS: 10937, 10406, and 4405, respectively and the LCDR1, LCDR2, and LCDR3 comprises an amino acid sequence of SEQ ID NOS: 16045, 9503, and 12772, respectively.

[0045] The disclosure describes an antibody, antigen binding fragment, or polypeptide comprising a heavy chain variable region having a HCDR1, HCDR2, and HCDR3, and a light chain variable region having a LCDR1, LCDR2, and LCDR3, wherein the HCDR1, HCDR2, and HCDR3 comprises an amino acid sequence of SEQ ID NOS: 17270, 10404, and 4598, respectively and the LCDR1, LCDR2, and LCDR3 comprises an amino acid sequence of SEQ ID NOS: 15958, 9503, and 12724, respectively.

[0046] The disclosure describes an antibody, antigen binding fragment, or polypeptide comprising a heavy chain variable region having a HCDR1, HCDR2, and HCDR3, and a light chain variable region having a LCDR1, LCDR2, and LCDR3, wherein the HCDR1, HCDR2, and HCDR3 comprises an amino acid sequence of SEQ ID NOS:17446, 4138, and 10174, respectively and the LCDR1, LCDR2, and LCDR3 comprises an amino acid sequence of SEQ ID NOS: 16045, 9503, and 12775, respectively.

[0047] The disclosure describes an antibody, antigen binding fragment, or polypeptide comprising a heavy chain variable region having a HCDR1, HCDR2, and HCDR3, and a light chain variable region having a LCDR1, LCDR2, and LCDR3, wherein the HCDR1, HCDR2, and HCDR3 comprises an amino acid sequence of SEQ ID NOS:4302, 9894, and 10124, respectively and the LCDR1, LCDR2, and LCDR3 comprises an amino acid sequence of SEQ ID NOS: 15968, 6211, and 12666, respectively.

[0048] The disclosure describes an antibody, antigen binding fragment, or polypeptide comprising a heavy chain variable region having a HCDR1, HCDR2, and HCDR3, and a light chain variable region having a LCDR1, LCDR2, and LCDR3, wherein the HCDR1, HCDR2, and HCDR3 comprises an amino acid sequence of SEQ ID NOS:17445, 11019, and 7810, respectively and the LCDR1, LCDR2, and LCDR3 comprises an amino acid sequence of SEQ ID NOS: 16746, 17025, and 4263, respectively.

[0049] The disclosure describes an antibody, antigen binding fragment, or polypeptide comprising a heavy chain variable region having a HCDR1, HCDR2, and HCDR3, and a light chain variable region having a LCDR1, LCDR2, and LCDR3, wherein the HCDR1, HCDR2, and HCDR3 comprises an amino acid sequence of SEQ ID NOS: 10934, 9864, and 4608, respectively and the LCDR1, LCDR2, and LCDR3 comprises an amino acid sequence of SEQ ID NOS: 15727, 9494, and 12687, respectively.

[0050] The disclosure describes an antibody, antigen binding fragment, or polypeptide comprising a heavy chain variable region having a HCDR1, HCDR2, and HCDR3, and a light chain variable region having a LCDR1, LCDR2, and LCDR3, wherein the HCDR1, HCDR2, and HCDR3 comprises an amino acid sequence of SEQ ID NOS: 17443, 9384, and 9544, respectively and the LCDR1, LCDR2, and LCDR3 comprises an amino acid sequence of SEQ ID NOS:17905, 16330, and 16565, respectively.

[0051] The disclosure describes an antibody, antigen binding fragment, or polypeptide comprising a heavy chain variable region having a HCDR1, HCDR2, and HCDR3, and a light chain variable region having a LCDR1, LCDR2, and LCDR3, wherein the HCDR1, HCDR2, and HCDR3 comprises an amino acid sequence of SEQ ID NOS: 16990, 10052, and 4205, respectively and the LCDR1, LCDR2, and LCDR3 comprises an amino acid sequence of SEQ ID NOS: 10830, 7825, and 11302, respectively.

[0052] The disclosure describes an antibody, antigen binding fragment, or polypeptide comprising a heavy chain variable region having a HCDR1, HCDR2, and HCDR3, and a light chain variable region having a LCDR1, LCDR2, and LCDR3, wherein the HCDR1, HCDR2, and HCDR3 comprises an amino acid sequence of SEQ ID NOS: 17842, 11512, and 6669, respectively and the LCDR1, LCDR2, and LCDR3 comprises an amino acid sequence of SEQ ID NOS:15803, 11791, and 12839, respectively.

[0053] The disclosure describes an antibody, antigen binding fragment, or polypeptide comprising a heavy chain variable region having a HCDR1, HCDR2, and HCDR3, and a light chain variable region having a LCDR1, LCDR2, and LCDR3, wherein the HCDR1, HCDR2, and HCDR3 comprises an amino acid sequence of SEQ ID NOS:6560, 4156, and 6710, respectively and the LCDR1, LCDR2, and LCDR3 comprises an amino acid sequence of SEQ ID NOS:18044, 11072, and 13612, respectively.

[0054] The disclosure describes an antibody, antigen binding fragment, or polypeptide comprising a heavy chain variable region having a HCDR1, HCDR2, and HCDR3, and a light chain variable region having a LCDR1, LCDR2, and LCDR3, wherein the HCDR1, HCDR2, and HCDR3 comprises an amino acid sequence of SEQ ID NOS:11562, 16250, and 10357, respectively and the LCDR1, LCDR2, and LCDR3 comprises an amino acid sequence of SEQ ID NOS:10223, 6213, and 11054, respectively.

[0055] The disclosure describes an antibody, antigen binding fragment, or polypeptide comprising a heavy chain variable region having a HCDR1, HCDR2, and HCDR3, and a light chain variable region having a LCDR1, LCDR2, and LCDR3, wherein the HCDR1, HCDR2, and HCDR3 comprises an amino acid sequence of SEQ ID NOS:10100, 18318, and 10167, respectively and the LCDR1, LCDR2, and LCDR3 comprises an amino acid sequence of SEQ ID NOS: 15701, 9496, and 12922, respectively.

[0056] The disclosure describes an antibody, antigen binding fragment, or polypeptide comprising a heavy chain variable region having a HCDR1, HCDR2, and HCDR3, and a light chain variable region having a LCDR1, LCDR2, and LCDR3, wherein the HCDR1, HCDR2, and HCDR3 comprises an amino acid sequence of SEQ ID NOS: 17275, 9826, and 4035, respectively and the LCDR1, LCDR2, and LCDR3 comprises an amino acid sequence of SEQ ID NOS: 16021, 9494, and 12690, respectively.

[0057] The disclosure describes an antibody, antigen binding fragment, or polypeptide comprising a heavy chain variable region having a HCDR1, HCDR2, and HCDR3, and a light chain variable region having a LCDR1, LCDR2, and LCDR3, wherein the HCDR1, HCDR2, and HCDR3 comprises an amino acid sequence of SEQ ID NOS:6156, 11022, and 10173, respectively and the LCDR1, LCDR2, and LCDR3 comprises an amino acid sequence of SEQ ID NOS:16454, 18279, and 12895, respectively.

[0058] The disclosure describes an antibody, antigen binding fragment, or polypeptide comprising a heavy chain variable region having a HCDR1, HCDR2, and HCDR3, and a light chain variable region having a LCDR1, LCDR2, and LCDR3, wherein the HCDR1, HCDR2, and HCDR3 comprises an amino acid sequence of SEQ ID NOS: 17855, 18573, and 9340, respectively and the LCDR1, LCDR2, and LCDR3 comprises an amino acid sequence of SEQ ID NOS: 16108, 3969, and 12490, respectively.

[0059] The disclosure describes an antibody, antigen binding fragment, or polypeptide comprising a heavy chain variable region having a HCDR1, HCDR2, and HCDR3, and a light chain variable region having a LCDR1, LCDR2, and LCDR3, wherein the HCDR1, HCDR2, and HCDR3 comprises an amino acid sequence of SEQ ID NOS:9659, 11531, and 10034, respectively and the LCDR1, LCDR2, and LCDR3 comprises an amino acid sequence of SEQ ID NOS: 15644, 6322, and 12380, respectively.

[0060] The disclosure describes an antibody, antigen binding fragment, or polypeptide comprising a heavy chain variable region having a HCDR1, HCDR2, and HCDR3, and a light chain variable region having a LCDR1, LCDR2, and LCDR3, wherein the HCDR1, HCDR2, and HCDR3 comprises an amino acid sequence of SEQ ID NOS: 15582, 18398, and 9468, respectively and the LCDR1, LCDR2, and LCDR3 comprises an amino acid sequence of SEQ ID NOS: 15965, 9503, and 12564, respectively.

[0061] The disclosure describes an antibody, antigen binding fragment, or polypeptide comprising a heavy chain variable region having a HCDR1, HCDR2, and HCDR3, and a light chain variable region having a LCDR1, LCDR2, and LCDR3, wherein the HCDR1, HCDR2, and HCDR3 comprises an amino acid sequence of SEQ ID NOS: 15590, 18356, and 9465, respectively and the LCDR1, LCDR2, and LCDR3 comprises an amino acid sequence of SEQ ID NOS: 15986, 9503, and 12787, respectively. having a LCDR1, LCDR2, and LCDR3, wherein the HCDR1, HCDR2, and HCDR3 comprises an amino acid sequence of SEQ ID NOS: 10352, 18315, and 6016, respectively and the LCDR1, LCDR2, and LCDR3 comprises an amino acid sequence of SEQ ID NOS: 15878, 4413, and 12431, respectively.

[0062] The disclosure describes an antibody, antigen binding fragment, or polypeptide comprising a heavy chain variable region having a HCDR1, HCDR2, and HCDR3, and a light chain variable region having a LCDR1, LCDR2, and LCDR3, wherein the HCDR1, HCDR2, and HCDR3 comprises an amino acid sequence of SEQ ID NOS: 17842, 16478, and 4198, respectively and the LCDR1, LCDR2, and LCDR3 comprises an amino acid sequence of SEQ ID NOS:16693, 16156, and 13624, respectively.

[0063] The disclosure describes an antibody, antigen binding fragment, or polypeptide comprising a heavy chain variable region having a HCDR1, HCDR2, and HCDR3, and a light chain variable region having a LCDR1, LCDR2, and LCDR3, wherein the HCDR1, HCDR2, and HCDR3 comprises an amino acid sequence of SEQ ID NOS:6507, 9971, and 4487, respectively and the LCDR1, LCDR2, and LCDR3 comprises an amino acid sequence of SEQ ID NOS: 17966, 6717, and 17206, respectively.

[0064] The disclosure describes an antibody, antigen binding fragment, or polypeptide comprising a heavy chain variable region having a HCDR1, HCDR2, and HCDR3, and a light chain variable region having a LCDR1, LCDR2, and LCDR3, wherein the HCDR1, HCDR2, and HCDR3 comprises an amino acid sequence of SEQ ID NOS: 16994, 10050, and 4205, respectively and the LCDR1, LCDR2, and LCDR3 comprises an amino acid sequence of SEQ ID NOS: 10830, 9273, and 11297, respectively.

[0065] The disclosure describes an antibody, antigen binding fragment, or polypeptide comprising a heavy chain variable region having a HCDR1, HCDR2, and HCDR3, and a light chain variable region having a LCDR1, LCDR2, and LCDR3, wherein the HCDR1, HCDR2, and HCDR3 comprises an amino acid sequence of SEQ ID NOS:6558, 9696, and 9548, respectively and the LCDR1, LCDR2, and LCDR3 comprises an amino acid sequence of SEQ ID NOS: 15773, 4415, and 12411, respectively.

[0066] The disclosure describes an antibody, antigen binding fragment, or polypeptide comprising a heavy chain variable region having a HCDR1, HCDR2, and HCDR3, and a light chain variable region having a LCDR1, LCDR2, and LCDR3, wherein the HCDR1, HCDR2, and HCDR3 comprises an amino acid sequence of SEQ ID NOS:11679, 11543, and 10252, respectively and the LCDR1, LCDR2, and LCDR3 comprises an amino acid sequence of SEQ ID NOS:10782, 18277, and 12901, respectively.

[0067] The disclosure describes an antibody, antigen binding fragment, or polypeptide comprising a heavy chain variable region having a HCDR1, HCDR2, and HCDR3, and a light chain variable region having a LCDR1, LCDR2, and LCDR3, wherein the HCDR1, HCDR2, and HCDR3 comprises an amino acid sequence of SEQ ID NOS: 10534, 16275, and 4247, respectively and the LCDR1, LCDR2, and LCDR3 comprises an amino acid sequence of SEQ ID NOS:16388, 18272, and 12007, respectively.

[0068] The disclosure describes an antibody, antigen binding fragment, or polypeptide comprising a heavy chain variable region having a HCDR1, HCDR2, and HCDR3, and a light chain variable region having a LCDR1, LCDR2, and LCDR3, wherein the HCDR1, HCDR2, and HCDR3 comprises an amino acid sequence of SEQ ID NOS:6546, 18556, and 6131, respectively and the LCDR1, LCDR2, and LCDR3 comprises an amino acid sequence of SEQ ID NOS: 15804, 4425, and 12433, respectively.

[0069] The disclosure describes an antibody, antigen binding fragment, or polypeptide comprising a heavy chain variable region having a HCDR1, HCDR2, and HCDR3, and a light chain variable region having a LCDR1, LCDR2, and LCDR3, wherein the HCDR1, HCDR2, and HCDR3 comprises an amino acid sequence of SEQ ID NOS:17842, 11502, and 11737, respectively and the LCDR1, LCDR2, and LCDR3 comprises an amino acid sequence of SEQ ID NOS:15739, 11613, and 12880, respectively.

[0070] The disclosure describes an antibody, antigen binding fragment, or polypeptide comprising a heavy chain variable region having a HCDR1, HCDR2, and HCDR3, and a light chain variable region having a LCDR1, LCDR2, and LCDR3, wherein the HCDR1, HCDR2, and HCDR3 comprises an amino acid sequence of SEQ ID NOS:17534, 17815, and 16369, respectively and the LCDR1, LCDR2, and LCDR3 comprises an amino acid sequence of SEQ ID NOS:16004, 9494, and 12652, respectively.

[0071] The disclosure describes an antibody, antigen binding fragment, or polypeptide comprising a heavy chain variable region having a HCDR1, HCDR2, and HCDR3, and a light chain variable region having a LCDR1, LCDR2, and LCDR3, wherein the HCDR1, HCDR2, and HCDR3 comprises an amino acid sequence of SEQ ID NOS: 11632, 4154, and 6035, respectively and the LCDR1, LCDR2, and LCDR3 comprises an amino acid sequence of SEQ ID NOS:16642, 10747, and 13326, respectively.

[0072] The disclosure describes an antibody, antigen binding fragment, or polypeptide comprising a heavy chain variable region having a HCDR1, HCDR2, and HCDR3, and a light chain variable region having a LCDR1, LCDR2, and LCDR3, wherein the HCDR1, HCDR2, and HCDR3 comprises an amino acid sequence of SEQ ID NOS: 17988, 18293, and 3959, respectively and the LCDR1, LCDR2, and LCDR3 comprises an amino acid sequence of SEQ ID NOS: 15663, 4259, and 12812, respectively.

[0073] The disclosure describes an antibody, antigen binding fragment, or polypeptide comprising a heavy chain variable region having a HCDR1, HCDR2, and HCDR3, and a light chain variable region having a LCDR1, LCDR2, and LCDR3, wherein the HCDR1, HCDR2, and HCDR3 comprises an amino acid sequence of SEQ ID NOS:9678, 17782, and 9661, respectively and the LCDR1, LCDR2, and LCDR3 comprises an amino acid sequence of SEQ ID NOS: 15730, 9469, and 11926, respectively.

[0074] The disclosure describes an antibody, antigen binding fragment, or polypeptide comprising a heavy chain variable region having a HCDR1, HCDR2, and HCDR3, and a light chain variable region having a LCDR1, LCDR2, and LCDR3, wherein the HCDR1, HCDR2, and HCDR3 comprises an amino acid sequence of SEQ ID NOS:17649, 17996, and 11542, respectively and the LCDR1, LCDR2, and LCDR3 comprises an amino acid sequence of SEQ ID NOS: 16392, 9272, and 11242, respectively.

[0075] The disclosure describes an antibody, antigen binding fragment, or polypeptide comprising a heavy chain variable region having a HCDR1, HCDR2, and HCDR3, and a light chain variable region having a LCDR1, LCDR2, and LCDR3, wherein the HCDR1, HCDR2, and HCDR3 comprises an amino acid sequence of SEQ ID NOS:11539, 18037, and 10487, respectively and the LCDR1, LCDR2, and LCDR3 comprises an amino acid sequence of SEQ ID NOS:9584, 5976, and 15576, respectively.

[0076] The disclosure describes an antibody, antigen binding fragment, or polypeptide comprising a heavy chain variable region having a HCDR1, HCDR2, and HCDR3, and a light chain variable region having a LCDR1, LCDR2, and LCDR3, wherein the HCDR1, HCDR2, and HCDR3 comprises an amino acid sequence of SEQ ID NOS:6563, 16941, and 16292, respectively and the LCDR1, LCDR2, and LCDR3 comprises an amino acid sequence of SEQ ID NOS: 15849, 3953, and 10456, respectively.

[0077] The disclosure describes an antibody, antigen binding fragment, or polypeptide comprising a heavy chain variable region having a HCDR1, HCDR2, and HCDR3, and a light chain variable region having a LCDR1, LCDR2, and LCDR3, wherein the HCDR1, HCDR2, and HCDR3 comprises an amino acid sequence of SEQ ID NOS: 17112, 10413, and 9644, respectively and the LCDR1, LCDR2, and LCDR3 comprises an amino acid sequence of SEQ ID NOS: 15850, 6612, and 12824, respectively.

[0078] The disclosure describes an antibody, antigen binding fragment, or polypeptide comprising a heavy chain variable region having a HCDR1, HCDR2, and HCDR3, and a light chain variable region having a LCDR1, LCDR2, and LCDR3, wherein the HCDR1, HCDR2, and HCDR3 comprises an amino acid sequence of SEQ ID NOS:17870, 18098, and 18225, respectively and the LCDR1, LCDR2, and LCDR3 comprises an amino acid sequence of SEQ ID NOS:10812, 18275, and 12943, respectively.

[0079] The disclosure describes an antibody, antigen binding fragment, or polypeptide comprising a heavy chain variable region having a HCDR1, HCDR2, and HCDR3, and a light chain variable region having a LCDR1, LCDR2, and LCDR3, wherein the HCDR1, HCDR2, and HCDR3 comprises an amino acid sequence of SEQ ID NOS:16611, 4218, and 6159, respectively and the LCDR1, LCDR2, and LCDR3 comprises an amino acid sequence of SEQ ID NOS: 15889, 9494, and 12616, respectively.

[0080] The disclosure describes an antibody, antigen binding fragment, or polypeptide comprising a heavy chain variable region having a HCDR1, HCDR2, and HCDR3, and a light chain variable region having a LCDR1, LCDR2, and LCDR3, wherein the HCDR1, HCDR2, and HCDR3 comprises an amino acid sequence of SEQ ID NOS: 17270, 16869, and 6128, respectively and the LCDR1, LCDR2, and LCDR3 comprises an amino acid sequence of SEQ ID NOS: 15958, 9503, and 12725, respectively. having a LCDR1, LCDR2, and LCDR3, wherein the HCDR1, HCDR2, and HCDR3 comprises an amino acid sequence of SEQ ID NOS:6566, 11467, and 10415, respectively and the LCDR1, LCDR2, and LCDR3 comprises an amino acid sequence of SEQ ID NOS: 10818, 7977, and 11242, respectively.

[0081] The disclosure describes an antibody, antigen binding fragment, or polypeptide comprising a heavy chain variable region having a HCDR1, HCDR2, and HCDR3, and a light chain variable region having a LCDR1, LCDR2, and LCDR3, wherein the HCDR1, HCDR2, and HCDR3 comprises an amino acid sequence of SEQ ID NOS:17263, 9904, and 10125, respectively and the LCDR1, LCDR2, and LCDR3 comprises an amino acid sequence of SEQ ID NOS: 15783, 3974, and 12595, respectively.

[0082] The disclosure describes an antibody, antigen binding fragment, or polypeptide comprising a heavy chain variable region having a HCDR1, HCDR2, and HCDR3, and a light chain variable region having a LCDR1, LCDR2, and LCDR3, wherein the HCDR1, HCDR2, and HCDR3 comprises an amino acid sequence of SEQ ID NOS:11156, 16875, and 11709, respectively and the LCDR1, LCDR2, and LCDR3 comprises an amino acid sequence of SEQ ID NOS:16129, 4019, and 12553, respectively.

[0083] The disclosure describes an antibody, antigen binding fragment, or polypeptide comprising a heavy chain variable region having a HCDR1, HCDR2, and HCDR3, and a light chain variable region having a LCDR1, LCDR2, and LCDR3, wherein the HCDR1, HCDR2, and HCDR3 comprises an amino acid sequence of SEQ ID NOS:10953, 10538, and 17212, respectively and the LCDR1, LCDR2, and LCDR3 comprises an amino acid sequence of SEQ ID NOS:17959, 9261, and 17573, respectively.

[0084] The disclosure describes an antibody, antigen binding fragment, or polypeptide comprising a heavy chain variable region having a HCDR1, HCDR2, and HCDR3, and a light chain variable region having a LCDR1, LCDR2, and LCDR3, wherein the HCDR1, HCDR2, and HCDR3 comprises an amino acid sequence of SEQ ID NOS:17144, 10387, and 11138, respectively and the LCDR1, LCDR2, and LCDR3 comprises an amino acid sequence of SEQ ID NOS:15640, 6215, and 12646, respectively.

[0085] The disclosure describes an antibody, antigen binding fragment, or polypeptide comprising a heavy chain variable region having a HCDR1, HCDR2, and HCDR3, and a light chain variable region having a LCDR1, LCDR2, and LCDR3, wherein the HCDR1, HCDR2, and HCDR3 comprises an amino acid sequence of SEQ ID NOS:4208, 18095, and 10486, respectively and the LCDR1, LCDR2, and LCDR3 comprises an amino acid sequence of SEQ ID NOS:6704, 4467, and 15574, respectively.

[0086] The disclosure describes an antibody, antigen binding fragment, or polypeptide comprising a heavy chain variable region having a HCDR1, HCDR2, and HCDR3, and a light chain variable region having a LCDR1, LCDR2, and LCDR3, wherein the HCDR1, HCDR2, and HCDR3 comprises an amino acid sequence of SEQ ID NOS: 10340, 18486, and 6077, respectively and the LCDR1, LCDR2, and LCDR3 comprises an amino acid sequence of SEQ ID NOS:16730, 7918, and 4265, respectively.

[0087] The disclosure describes an antibody, antigen binding fragment, or polypeptide comprising a heavy chain variable region having a HCDR1, HCDR2, and HCDR3, and a light chain variable region having a LCDR1, LCDR2, and LCDR3, wherein the HCDR1, HCDR2, and HCDR3 comprises an amino acid sequence of SEQ ID NOS:18100, 10047, and 4202, respectively and the LCDR1, LCDR2, and LCDR3 comprises an amino acid sequence of SEQ ID NOS: 10830, 9272, and 11255, respectively.

[0088] The disclosure describes an antibody, antigen binding fragment, or polypeptide comprising a heavy chain variable region having a HCDR1, HCDR2, and HCDR3, and a light chain variable region having a LCDR1, LCDR2, and LCDR3, wherein the HCDR1, HCDR2, and HCDR3 comprises an amino acid sequence of SEQ ID NOS: 16596, 18567, and 5967, respectively and the LCDR1, LCDR2, and LCDR3 comprises an amino acid sequence of SEQ ID NOS:16485, 16558, and 12506, respectively.

[0089] The disclosure describes an antibody, antigen binding fragment, or polypeptide comprising a heavy chain variable region having a HCDR1, HCDR2, and HCDR3, and a light chain variable region having a LCDR1, LCDR2, and LCDR3, wherein the HCDR1, HCDR2, and HCDR3 comprises an amino acid sequence of SEQ ID NOS:17558, 11036, and 17675, respectively and the LCDR1, LCDR2, and LCDR3 comprises an amino acid sequence of SEQ ID NOS:16708, 16159, and 3993, respectively.

[0090] The disclosure describes an antibody, antigen binding fragment, or polypeptide comprising a heavy chain variable region having a HCDR1, HCDR2, and HCDR3, and a light chain variable region having a LCDR1, LCDR2, and LCDR3, wherein the HCDR1, HCDR2, and HCDR3 comprises an amino acid sequence of SEQ ID NOS: 11409, 10399, and 9683, respectively and the LCDR1, LCDR2, and LCDR3 comprises an amino acid sequence of SEQ ID NOS: 15634, 4414, and 11930, respectively.

[0091] The disclosure describes an antibody, antigen binding fragment, or polypeptide comprising a heavy chain variable region having a HCDR1, HCDR2, and HCDR3, and a light chain variable region having a LCDR1, LCDR2, and LCDR3, wherein the HCDR1, HCDR2, and HCDR3 comprises an amino acid sequence of SEQ ID NOS: 17269, 10067, and 9350, respectively and the LCDR1, LCDR2, and LCDR3 comprises an amino acid sequence of SEQ ID NOS:17922, 10088, and 13573, respectively.

[0092] The disclosure describes an antibody, antigen binding fragment, or polypeptide comprising a heavy chain variable region having a HCDR1, HCDR2, and HCDR3, and a light chain variable region having a LCDR1, LCDR2, and LCDR3, wherein the HCDR1, HCDR2, and HCDR3 comprises an amino acid sequence of SEQ ID NOS: 17609, 9816, and 6023, respectively and the LCDR1, LCDR2, and LCDR3 comprises an amino acid sequence of SEQ ID NOS:16975, 10589, and 13611, respectively.

[0093] The disclosure describes an antibody, antigen binding fragment, or polypeptide comprising a heavy chain variable region having a HCDR1, HCDR2, and HCDR3, and a light chain variable region having a LCDR1, LCDR2, and LCDR3, wherein the HCDR1, HCDR2, and HCDR3 comprises an amino acid sequence of SEQ ID NOS: 16541, 16242, and 4572, respectively and the LCDR1, LCDR2, and LCDR3 comprises an amino acid sequence of SEQ ID NOS: 17984, 9261, and 17153, respectively.

[0094] The disclosure describes an antibody, antigen binding fragment, or polypeptide comprising a heavy chain variable region having a HCDR1, HCDR2, and HCDR3, and a light chain variable region having a LCDR1, LCDR2, and LCDR3, wherein the HCDR1, HCDR2, and HCDR3 comprises an amino acid sequence of SEQ ID NOS:17028, 17823, and 16315, respectively and the LCDR1, LCDR2, and LCDR3 comprises an amino acid sequence of SEQ ID NOS: 17923, 10094, and 13580, respectively.

[0095] The disclosure describes an antibody, antigen binding fragment, or polypeptide comprising a heavy chain variable region having a HCDR1, HCDR2, and HCDR3, and a light chain variable region having a LCDR1, LCDR2, and LCDR3, wherein the HCDR1, HCDR2, and HCDR3 comprises an amino acid sequence of SEQ ID NOS: 17649, 10395, and 6058, respectively and the LCDR1, LCDR2, and LCDR3 comprises an amino acid sequence of SEQ ID NOS:10820, 11190, and 11308, respectively.

[0096] The disclosure describes an antibody, antigen binding fragment, or polypeptide comprising a heavy chain variable region having a HCDR1, HCDR2, and HCDR3, and a light chain variable region having a LCDR1, LCDR2, and LCDR3, wherein the HCDR1, HCDR2, and HCDR3 comprises an amino acid sequence of SEQ ID NOS:17136, 16936, and 10382, respectively and the LCDR1, LCDR2, and LCDR3 comprises an amino acid sequence of SEQ ID NOS:16013, 9503, and 12781, respectively.

[0097] The disclosure describes an antibody, antigen binding fragment, or polypeptide comprising a heavy chain variable region having a HCDR1, HCDR2, and HCDR3, and a light chain variable region having a LCDR1, LCDR2, and LCDR3, wherein the HCDR1, HCDR2, and HCDR3 comprises an amino acid sequence of SEQ ID NOS:4305, 9893, and 10123, respectively and the LCDR1, LCDR2, and LCDR3 comprises an amino acid sequence of SEQ ID NOS: 15969, 6326, and 12721, respectively.

[0098] The disclosure describes an antibody, antigen binding fragment, or polypeptide comprising a heavy chain variable region having a HCDR1, HCDR2, and HCDR3, and a light chain variable region having a LCDR1, LCDR2, and LCDR3, wherein the HCDR1, HCDR2, and HCDR3 comprises an amino acid sequence of SEQ ID NOS:4631, 11451, and 11105, respectively and the LCDR1, LCDR2, and LCDR3 comprises an amino acid sequence of SEQ ID NOS:16448, 18275, and 12926, respectively.

[0099] The disclosure describes an antibody, antigen binding fragment, or polypeptide comprising a heavy chain variable region having a HCDR1, HCDR2, and HCDR3, and a light chain variable region having a LCDR1, LCDR2, and LCDR3, wherein the HCDR1, HCDR2, and HCDR3 comprises an amino acid sequence of SEQ ID NOS: 17640, 16907, and 5947, respectively and the LCDR1, LCDR2, and LCDR3 comprises an amino acid sequence of SEQ ID NOS: 15949, 4413, and 12404, respectively. having a LCDR1, LCDR2, and LCDR3, wherein the HCDR1, HCDR2, and HCDR3 comprises an amino acid sequence of SEQ ID NOS:17535, 17736, and 10426, respectively and the LCDR1, LCDR2, and LCDR3 comprises an amino acid sequence of SEQ ID NOS:10809, 18271, and 13008, respectively.

[0100] The disclosure describes an antibody, antigen binding fragment, or polypeptide comprising a heavy chain variable region having a HCDR1, HCDR2, and HCDR3, and a light chain variable region having a LCDR1, LCDR2, and LCDR3, wherein the HCDR1, HCDR2, and HCDR3 comprises an amino acid sequence of SEQ ID NOS:18103, 18040, and 11160, respectively and the LCDR1, LCDR2, and LCDR3 comprises an amino acid sequence of SEQ ID NOS:16664, 10749, and 18616, respectively.

[0101] The disclosure describes an antibody, antigen binding fragment, or polypeptide comprising a heavy chain variable region having a HCDR1, HCDR2, and HCDR3, and a light chain variable region having a LCDR1, LCDR2, and LCDR3, wherein the HCDR1, HCDR2, and HCDR3 comprises an amino acid sequence of SEQ ID NOS:16990, 4072, and 10078, respectively and the LCDR1, LCDR2, and LCDR3 comprises an amino acid sequence of SEQ ID NOS: 10849, 7824, and 11248, respectively.

[0102] The disclosure describes an antibody, antigen binding fragment, or polypeptide comprising a heavy chain variable region having a HCDR1, HCDR2, and HCDR3, and a light chain variable region having a LCDR1, LCDR2, and LCDR3, wherein the HCDR1, HCDR2, and HCDR3 comprises an amino acid sequence of SEQ ID NOS:6566, 11482, and 17716, respectively and the LCDR1, LCDR2, and LCDR3 comprises an amino acid sequence of SEQ ID NOS:10867, 18275, and 12940, respectively.

[0103] The disclosure describes an antibody, antigen binding fragment, or polypeptide comprising a heavy chain variable region having a HCDR1, HCDR2, and HCDR3, and a light chain variable region having a LCDR1, LCDR2, and LCDR3, wherein the HCDR1, HCDR2, and HCDR3 comprises an amino acid sequence of SEQ ID NOS: 10363, 11440, and 9439, respectively and the LCDR1, LCDR2, and LCDR3 comprises an amino acid sequence of SEQ ID NOS: 16430, 9259, and 11305, respectively.

[0104] The disclosure describes an antibody, antigen binding fragment, or polypeptide comprising a heavy chain variable region having a HCDR1, HCDR2, and HCDR3, and a light chain variable region having a LCDR1, LCDR2, and LCDR3, wherein the HCDR1, HCDR2, and HCDR3 comprises an amino acid sequence of SEQ ID NOS:11618, 11024, and 18604, respectively and the LCDR1, LCDR2, and LCDR3 comprises an amino acid sequence of SEQ ID NOS: 16429, 10764, and 11286, respectively.

[0105] The disclosure describes an antibody, antigen binding fragment, or polypeptide comprising a heavy chain variable region having a HCDR1, HCDR2, and HCDR3, and a light chain variable region having a LCDR1, LCDR2, and LCDR3, wherein the HCDR1, HCDR2, and HCDR3 comprises an amino acid sequence of SEQ ID NOS: 16990, 9755, and 7908, respectively and the LCDR1, LCDR2, and LCDR3 comprises an amino acid sequence of SEQ ID NOS:16051, 4442, and 12617, respectively.

[0106] The disclosure describes an antibody, antigen binding fragment, or polypeptide comprising a heavy chain variable region having a HCDR1, HCDR2, and HCDR3, and a light chain variable region having a LCDR1, LCDR2, and LCDR3, wherein the HCDR1, HCDR2, and HCDR3 comprises an amino acid sequence of SEQ ID NOS:11624, 10040, and 18255, respectively and the LCDR1, LCDR2, and LCDR3 comprises an amino acid sequence of SEQ ID NOS:15781, 17254, and 12909, respectively.

[0107] The disclosure describes an antibody, antigen binding fragment, or polypeptide comprising a heavy chain variable region having a HCDR1, HCDR2, and HCDR3, and a light chain variable region having a LCDR1, LCDR2, and LCDR3, wherein the HCDR1, HCDR2, and HCDR3 comprises an amino acid sequence of SEQ ID NOS:17849, 11494, and 18196, respectively and the LCDR1, LCDR2, and LCDR3 comprises an amino acid sequence of SEQ ID NOS:10899, 18279, and 12906, respectively.

[0108] The disclosure describes an antibody, antigen binding fragment, or polypeptide comprising a heavy chain variable region having a HCDR1, HCDR2, and HCDR3, and a light chain variable region having a LCDR1, LCDR2, and LCDR3, wherein the HCDR1, HCDR2, and HCDR3 comprises an amino acid sequence of SEQ ID NOS:6577, 4330, and 6135, respectively and the LCDR1, LCDR2, and LCDR3 comprises an amino acid sequence of SEQ ID NOS:16037, 4425, and 10721, respectively.

[0109] The disclosure describes an antibody, antigen binding fragment, or polypeptide comprising a heavy chain variable region having a HCDR1, HCDR2, and HCDR3, and a light chain variable region having a LCDR1, LCDR2, and LCDR3, wherein the HCDR1, HCDR2, and HCDR3 comprises an amino acid sequence of SEQ ID NOS: 10686, 17775, and 4562, respectively and the LCDR1, LCDR2, and LCDR3 comprises an amino acid sequence of SEQ ID NOS: 16045, 9503, and 12998, respectively.

[0110] The disclosure describes an antibody, antigen binding fragment, or polypeptide comprising a heavy chain variable region having a HCDR1, HCDR2, and HCDR3, and a light chain variable region having a LCDR1, LCDR2, and LCDR3, wherein the HCDR1, HCDR2, and HCDR3 comprises an amino acid sequence of SEQ ID NOS:16200, 9401, and 4033, respectively and the LCDR1, LCDR2, and LCDR3 comprises an amino acid sequence of SEQ ID NOS:16698, 10093, and 17255, respectively.

[0111] The disclosure describes an antibody, antigen binding fragment, or polypeptide comprising a heavy chain variable region having a HCDR1, HCDR2, and HCDR3, and a light chain variable region having a LCDR1, LCDR2, and LCDR3, wherein the HCDR1, HCDR2, and HCDR3 comprises an amino acid sequence of SEQ ID NOS:6576, 18326, and 9668, respectively and the LCDR1, LCDR2, and LCDR3 comprises an amino acid sequence of SEQ ID NOS:15890, 10708, and 12570, respectively.

[0112] The disclosure describes an antibody, antigen binding fragment, or polypeptide comprising a heavy chain variable region having a HCDR1, HCDR2, and HCDR3, and a light chain variable region having a LCDR1, LCDR2, and LCDR3, wherein the HCDR1, HCDR2, and HCDR3 comprises an amino acid sequence of SEQ ID NOS:11595, 10391, and 10530, respectively and the LCDR1, LCDR2, and LCDR3 comprises an amino acid sequence of SEQ ID NOS:9448, 4467, and 15568, respectively.

[0113] The disclosure describes an antibody, antigen binding fragment, or polypeptide comprising a heavy chain variable region having a HCDR1, HCDR2, and HCDR3, and a light chain variable region having a LCDR1, LCDR2, and LCDR3, wherein the HCDR1, HCDR2, and HCDR3 comprises an amino acid sequence of SEQ ID NOS:11679, 11448, and 17831, respectively and the LCDR1, LCDR2, and LCDR3 comprises an amino acid sequence of SEQ ID NOS:7914, 18275, and 12961, respectively.

[0114] The disclosure describes an antibody, antigen binding fragment, or polypeptide comprising a heavy chain variable region having a HCDR1, HCDR2, and HCDR3, and a light chain variable region having a LCDR1, LCDR2, and LCDR3, wherein the HCDR1, HCDR2, and HCDR3 comprises an amino acid sequence of SEQ ID NOS: 17570, 16916, and 4582, respectively and the LCDR1, LCDR2, and LCDR3 comprises an amino acid sequence of SEQ ID NOS:10862, 18275, and 12346, respectively.

[0115] The disclosure describes an antibody, antigen binding fragment, or polypeptide comprising a heavy chain variable region having a HCDR1, HCDR2, and HCDR3, and a light chain variable region having a LCDR1, LCDR2, and LCDR3, wherein the HCDR1, HCDR2, and HCDR3 comprises an amino acid sequence of SEQ ID NOS: 16545, 11440, and 9439, respectively and the LCDR1, LCDR2, and LCDR3 comprises an amino acid sequence of SEQ ID NOS: 16419, 9259, and 11304, respectively.

[0116] The disclosure describes an antibody, antigen binding fragment, or polypeptide comprising a heavy chain variable region having a HCDR1, HCDR2, and HCDR3, and a light chain variable region having a LCDR1, LCDR2, and LCDR3, wherein the HCDR1, HCDR2, and HCDR3 comprises an amino acid sequence of SEQ ID NOS: 17881, 9997, and 4583, respectively and the LCDR1, LCDR2, and LCDR3 comprises an amino acid sequence of SEQ ID NOS: 15667, 4256, and 11091, respectively.

[0117] The disclosure describes an antibody, antigen binding fragment, or polypeptide comprising a heavy chain variable region having a HCDR1, HCDR2, and HCDR3, and a light chain variable region having a LCDR1, LCDR2, and LCDR3, wherein the HCDR1, HCDR2, and HCDR3 comprises an amino acid sequence of SEQ ID NOS:17613, 18411, and 11938, respectively and the LCDR1, LCDR2, and LCDR3 comprises an amino acid sequence of SEQ ID NOS: 16484, 6317, and 12362, respectively.

[0118] The disclosure describes an antibody, antigen binding fragment, or polypeptide comprising a heavy chain variable region having a HCDR1, HCDR2, and HCDR3, and a light chain variable region having a LCDR1, LCDR2, and LCDR3, wherein the HCDR1, HCDR2, and HCDR3 comprises an amino acid sequence of SEQ ID NOS:6546, 18526, and 6134, respectively and the LCDR1, LCDR2, and LCDR3 comprises an amino acid sequence of SEQ ID NOS: 16067, 4424, and 12433, respectively. having a LCDR1, LCDR2, and LCDR3, wherein the HCDR1, HCDR2, and HCDR3 comprises an amino acid sequence of SEQ ID NOS:11551, 9906, and 10121, respectively and the LCDR1, LCDR2, and LCDR3 comprises an amino acid sequence of SEQ ID NOS: 16004, 9479, and 12619, respectively.

[0119] The disclosure describes an antibody, antigen binding fragment, or polypeptide comprising a heavy chain variable region having a HCDR1, HCDR2, and HCDR3, and a light chain variable region having a LCDR1, LCDR2, and LCDR3, wherein the HCDR1, HCDR2, and HCDR3 comprises an amino acid sequence of SEQ ID NOS: 17466, 16919, and 9601, respectively and the LCDR1, LCDR2, and LCDR3 comprises an amino acid sequence of SEQ ID NOS: 15704, 3969, and 12828, respectively.

[0120] The disclosure describes an antibody, antigen binding fragment, or polypeptide comprising a heavy chain variable region having a HCDR1, HCDR2, and HCDR3, and a light chain variable region having a LCDR1, LCDR2, and LCDR3, wherein the HCDR1, HCDR2, and HCDR3 comprises an amino acid sequence of SEQ ID NOS: 11615, 16248, and 7911, respectively and the LCDR1, LCDR2, and LCDR3 comprises an amino acid sequence of SEQ ID NOS:16660, 11903, and 11891, respectively.

[0121] The disclosure describes an antibody, antigen binding fragment, or polypeptide comprising a heavy chain variable region having a HCDR1, HCDR2, and HCDR3, and a light chain variable region having a LCDR1, LCDR2, and LCDR3, wherein the HCDR1, HCDR2, and HCDR3 comprises an amino acid sequence of SEQ ID NOS:10356, 16838, and 10688, respectively and the LCDR1, LCDR2, and LCDR3 comprises an amino acid sequence of SEQ ID NOS:13333, 18275, and 12955, respectively.

[0122] The disclosure describes an antibody, antigen binding fragment, or polypeptide comprising a heavy chain variable region having a HCDR1, HCDR2, and HCDR3, and a light chain variable region having a LCDR1, LCDR2, and LCDR3, wherein the HCDR1, HCDR2, and HCDR3 comprises an amino acid sequence of SEQ ID NOS:17534, 11524, and 16206, respectively and the LCDR1, LCDR2, and LCDR3 comprises an amino acid sequence of SEQ ID NOS: 15755, 4425, and 12422, respectively.

[0123] The disclosure describes an antibody, antigen binding fragment, or polypeptide comprising a heavy chain variable region having a HCDR1, HCDR2, and HCDR3, and a light chain variable region having a LCDR1, LCDR2, and LCDR3, wherein the HCDR1, HCDR2, and HCDR3 comprises an amino acid sequence of SEQ ID NOS: 10934, 9866, and 4607, respectively and the LCDR1, LCDR2, and LCDR3 comprises an amino acid sequence of SEQ ID NOS: 15723, 9480, and 12598, respectively.

[0124] The disclosure describes an antibody, antigen binding fragment, or polypeptide comprising a heavy chain variable region having a HCDR1, HCDR2, and HCDR3, and a light chain variable region having a LCDR1, LCDR2, and LCDR3, wherein the HCDR1, HCDR2, and HCDR3 comprises an amino acid sequence of SEQ ID NOS:6535, 9383, and 6019, respectively and the LCDR1, LCDR2, and LCDR3 comprises an amino acid sequence of SEQ ID NOS:17909, 16325, and 17236, respectively.

[0125] The disclosure describes an antibody, antigen binding fragment, or polypeptide comprising a heavy chain variable region having a HCDR1, HCDR2, and HCDR3, and a light chain variable region having a LCDR1, LCDR2, and LCDR3, wherein the HCDR1, HCDR2, and HCDR3 comprises an amino acid sequence of SEQ ID NOS:17649, 11475, and 18205, respectively and the LCDR1, LCDR2, and LCDR3 comprises an amino acid sequence of SEQ ID NOS:16447, 18275, and 12400, respectively.

[0126] The disclosure describes an antibody, antigen binding fragment, or polypeptide comprising a heavy chain variable region having a HCDR1, HCDR2, and HCDR3, and a light chain variable region having a LCDR1, LCDR2, and LCDR3, wherein the HCDR1, HCDR2, and HCDR3 comprises an amino acid sequence of SEQ ID NOS: 16689, 18458, and 9558, respectively and the LCDR1, LCDR2, and LCDR3 comprises an amino acid sequence of SEQ ID NOS: 16066, 6607, and 12822, respectively.

[0127] The disclosure describes an antibody, antigen binding fragment, or polypeptide comprising a heavy chain variable region having a HCDR1, HCDR2, and HCDR3, and a light chain variable region having a LCDR1, LCDR2, and LCDR3, wherein the HCDR1, HCDR2, and HCDR3 comprises an amino acid sequence of SEQ ID NOS:16992, 18002, and 10072, respectively and the LCDR1, LCDR2, and LCDR3 comprises an amino acid sequence of SEQ ID NOS:10838, 9267, and 11249, respectively.

[0128] The disclosure describes an antibody, antigen binding fragment, or polypeptide comprising a heavy chain variable region having a HCDR1, HCDR2, and HCDR3, and a light chain variable region having a LCDR1, LCDR2, and LCDR3, wherein the HCDR1, HCDR2, and HCDR3 comprises an amino acid sequence of SEQ ID NOS:6507, 9969, and 4042, respectively and the LCDR1, LCDR2, and LCDR3 comprises an amino acid sequence of SEQ ID NOS: 16489, 9478, and 12666, respectively.

[0129] The disclosure describes an antibody, antigen binding fragment, or polypeptide comprising a heavy chain variable region having a HCDR1, HCDR2, and HCDR3, and a light chain variable region having a LCDR1, LCDR2, and LCDR3, wherein the HCDR1, HCDR2, and HCDR3 comprises an amino acid sequence of SEQ ID NOS: 11648, 18357, and 9467, respectively and the LCDR1, LCDR2, and LCDR3 comprises an amino acid sequence of SEQ ID NOS:15975, 10316, and 12786, respectively.

[0130] The disclosure describes an antibody, antigen binding fragment, or polypeptide comprising a heavy chain variable region having a HCDR1, HCDR2, and HCDR3, and a light chain variable region having a LCDR1, LCDR2, and LCDR3, wherein the HCDR1, HCDR2, and HCDR3 comprises an amino acid sequence of SEQ ID NOS: 16990, 10050, and 4201, respectively and the LCDR1, LCDR2, and LCDR3 comprises an amino acid sequence of SEQ ID NOS: 10828, 6793, and 11296, respectively.

[0131] The disclosure describes an antibody, antigen binding fragment, or polypeptide comprising a heavy chain variable region having a HCDR1, HCDR2, and HCDR3, and a light chain variable region having a LCDR1, LCDR2, and LCDR3, wherein the HCDR1, HCDR2, and HCDR3 comprises an amino acid sequence of SEQ ID NOS: 11651, 16900, and 7904, respectively and the LCDR1, LCDR2, and LCDR3 comprises an amino acid sequence of SEQ ID NOS:18082, 18135, and 13621, respectively.

[0132] The disclosure describes an antibody, antigen binding fragment, or polypeptide comprising a heavy chain variable region having a HCDR1, HCDR2, and HCDR3, and a light chain variable region having a LCDR1, LCDR2, and LCDR3, wherein the HCDR1, HCDR2, and HCDR3 comprises an amino acid sequence of SEQ ID NOS:11538, 16874, and 10488, respectively and the LCDR1, LCDR2, and LCDR3 comprises an amino acid sequence of SEQ ID NOS:9583, 6537, and 15575, respectively.

[0133] The disclosure describes an antibody, antigen binding fragment, or polypeptide comprising a heavy chain variable region having a HCDR1, HCDR2, and HCDR3, and a light chain variable region having a LCDR1, LCDR2, and LCDR3, wherein the HCDR1, HCDR2, and HCDR3 comprises an amino acid sequence of SEQ ID NOS:17028, 10578, and 10186, respectively and the LCDR1, LCDR2, and LCDR3 comprises an amino acid sequence of SEQ ID NOS: 16045, 9500, and 12787, respectively.

[0134] The disclosure describes an antibody, antigen binding fragment, or polypeptide comprising a heavy chain variable region having a HCDR1, HCDR2, and HCDR3, and a light chain variable region having a LCDR1, LCDR2, and LCDR3, wherein the HCDR1, HCDR2, and HCDR3 comprises an amino acid sequence of SEQ ID NOS: 11387, 18487, and 6075, respectively and the LCDR1, LCDR2, and LCDR3 comprises an amino acid sequence of SEQ ID NOS:16770, 16574, and 17670, respectively.

[0135] The disclosure describes an antibody, antigen binding fragment, or polypeptide comprising a heavy chain variable region having a HCDR1, HCDR2, and HCDR3, and a light chain variable region having a LCDR1, LCDR2, and LCDR3, wherein the HCDR1, HCDR2, and HCDR3 comprises an amino acid sequence of SEQ ID NOS:11679, 16843, and 11162, respectively and the LCDR1, LCDR2, and LCDR3 comprises an amino acid sequence of SEQ ID NOS:16451, 18273, and 10471, respectively.

[0136] The disclosure describes an antibody, antigen binding fragment, or polypeptide comprising a heavy chain variable region having a HCDR1, HCDR2, and HCDR3, and a light chain variable region having a LCDR1, LCDR2, and LCDR3, wherein the HCDR1, HCDR2, and HCDR3 comprises an amino acid sequence of SEQ ID NOS:6546, 18528, and 6133, respectively and the LCDR1, LCDR2, and LCDR3 comprises an amino acid sequence of SEQ ID NOS: 15794, 4425, and 12433, respectively.

[0137] The disclosure describes an antibody, antigen binding fragment, or polypeptide comprising a heavy chain variable region having a HCDR1, HCDR2, and HCDR3, and a light chain variable region having a LCDR1, LCDR2, and LCDR3, wherein the HCDR1, HCDR2, and HCDR3 comprises an amino acid sequence of SEQ ID NOS:16990, 9699, and 10501, respectively and the LCDR1, LCDR2, and LCDR3 comprises an amino acid sequence of SEQ ID NOS: 16072, 9494, and 12717, respectively. having a LCDR1, LCDR2, and LCDR3, wherein the HCDR1, HCDR2, and HCDR3 comprises an amino acid sequence of SEQ ID NOS:4302, 9896, and 10125, respectively and the LCDR1, LCDR2, and LCDR3 comprises an amino acid sequence of SEQ ID NOS: 16087, 9480, and 12636, respectively.

[0138] The disclosure describes an antibody, antigen binding fragment, or polypeptide comprising a heavy chain variable region having a HCDR1, HCDR2, and HCDR3, and a light chain variable region having a LCDR1, LCDR2, and LCDR3, wherein the HCDR1, HCDR2, and HCDR3 comprises an amino acid sequence of SEQ ID NOS: 17576, 8078, and 4486, respectively and the LCDR1, LCDR2, and LCDR3 comprises an amino acid sequence of SEQ ID NOS: 16747, 10089, and 3997, respectively.

[0139] The disclosure describes an antibody, antigen binding fragment, or polypeptide comprising a heavy chain variable region having a HCDR1, HCDR2, and HCDR3, and a light chain variable region having a LCDR1, LCDR2, and LCDR3, wherein the HCDR1, HCDR2, and HCDR3 comprises an amino acid sequence of SEQ ID NOS:11558, 10572, and 11121, respectively and the LCDR1, LCDR2, and LCDR3 comprises an amino acid sequence of SEQ ID NOS:16667, 11895, and 11867, respectively.

[0140] The disclosure describes an antibody, antigen binding fragment, or polypeptide comprising a heavy chain variable region having a HCDR1, HCDR2, and HCDR3, and a light chain variable region having a LCDR1, LCDR2, and LCDR3, wherein the HCDR1, HCDR2, and HCDR3 comprises an amino acid sequence of SEQ ID NOS:17293, 18416, and 15587, respectively and the LCDR1, LCDR2, and LCDR3 comprises an amino acid sequence of SEQ ID NOS: 15641, 6319, and 12358, respectively.

[0141] The disclosure describes an antibody, antigen binding fragment, or polypeptide comprising a heavy chain variable region having a HCDR1, HCDR2, and HCDR3, and a light chain variable region having a LCDR1, LCDR2, and LCDR3, wherein the HCDR1, HCDR2, and HCDR3 comprises an amino acid sequence of SEQ ID NOS:16990, 10250, and 11693, respectively and the LCDR1, LCDR2, and LCDR3 comprises an amino acid sequence of SEQ ID NOS: 16097, 10737, and 12020, respectively.

[0142] The disclosure describes an antibody, antigen binding fragment, or polypeptide comprising a heavy chain variable region having a HCDR1, HCDR2, and HCDR3, and a light chain variable region having a LCDR1, LCDR2, and LCDR3, wherein the HCDR1, HCDR2, and HCDR3 comprises an amino acid sequence of SEQ ID NOS: 11639, 16918, and 9663, respectively and the LCDR1, LCDR2, and LCDR3 comprises an amino acid sequence of SEQ ID NOS:16114, 10727, and 12847, respectively.

[0143] The disclosure describes an antibody, antigen binding fragment, or polypeptide comprising a heavy chain variable region having a HCDR1, HCDR2, and HCDR3, and a light chain variable region having a LCDR1, LCDR2, and LCDR3, wherein the HCDR1, HCDR2, and HCDR3 comprises an amino acid sequence of SEQ ID NOS: 17474, 16231, and 4596, respectively and the LCDR1, LCDR2, and LCDR3 comprises an amino acid sequence of SEQ ID NOS:16408, 10987, and 11213, respectively.

[0144] The disclosure describes an antibody, antigen binding fragment, or polypeptide comprising a heavy chain variable region having a HCDR1, HCDR2, and HCDR3, and a light chain variable region having a LCDR1, LCDR2, and LCDR3, wherein the HCDR1, HCDR2, and HCDR3 comprises an amino acid sequence of SEQ ID NOS: 17843, 10396, and 6057, respectively and the LCDR1, LCDR2, and LCDR3 comprises an amino acid sequence of SEQ ID NOS:10831, 11161, and 11308, respectively.

[0145] The disclosure describes an antibody, antigen binding fragment, or polypeptide comprising a heavy chain variable region having a HCDR1, HCDR2, and HCDR3, and a light chain variable region having a LCDR1, LCDR2, and LCDR3, wherein the HCDR1, HCDR2, and HCDR3 comprises an amino acid sequence of SEQ ID NOS: 17464, 18542, and 4591, respectively and the LCDR1, LCDR2, and LCDR3 comprises an amino acid sequence of SEQ ID NOS: 15808, 6310, and 10711, respectively.

[0146] The disclosure describes an antibody, antigen binding fragment, or polypeptide comprising a heavy chain variable region having a HCDR1, HCDR2, and HCDR3, and a light chain variable region having a LCDR1, LCDR2, and LCDR3, wherein the HCDR1, HCDR2, and HCDR3 comprises an amino acid sequence of SEQ ID NOS: 17648, 5434, and 6727, respectively and the LCDR1, LCDR2, and LCDR3 comprises an amino acid sequence of SEQ ID NOS:17959, 9275, and 17150, respectively.

[0147] The disclosure describes an antibody, antigen binding fragment, or polypeptide comprising a heavy chain variable region having a HCDR1, HCDR2, and HCDR3, and a light chain variable region having a LCDR1, LCDR2, and LCDR3, wherein the HCDR1, HCDR2, and HCDR3 comprises an amino acid sequence of SEQ ID NOS:17263, 9901, and 10118, respectively and the LCDR1, LCDR2, and LCDR3 comprises an amino acid sequence of SEQ ID NOS: 15814, 9493, and 12666, respectively.

[0148] The disclosure describes an antibody, antigen binding fragment, or polypeptide comprising a heavy chain variable region having a HCDR1, HCDR2, and HCDR3, and a light chain variable region having a LCDR1, LCDR2, and LCDR3, wherein the HCDR1, HCDR2, and HCDR3 comprises an amino acid sequence of SEQ ID NOS:16581, 18505, and 9556, respectively and the LCDR1, LCDR2, and LCDR3 comprises an amino acid sequence of SEQ ID NOS:15890, 10726, and 12808, respectively.

[0149] The disclosure describes an antibody, antigen binding fragment, or polypeptide comprising a heavy chain variable region having a HCDR1, HCDR2, and HCDR3, and a light chain variable region having a LCDR1, LCDR2, and LCDR3, wherein the HCDR1, HCDR2, and HCDR3 comprises an amino acid sequence of SEQ ID NOS:16990, 9719, and 10500, respectively and the LCDR1, LCDR2, and LCDR3 comprises an amino acid sequence of SEQ ID NOS: 15923, 9503, and 9654, respectively.

[0150] The disclosure describes an antibody, antigen binding fragment, or polypeptide comprising a heavy chain variable region having a HCDR1, HCDR2, and HCDR3, and a light chain variable region having a LCDR1, LCDR2, and LCDR3, wherein the HCDR1, HCDR2, and HCDR3 comprises an amino acid sequence of SEQ ID NOS:11672, 11521, and 16205, respectively and the LCDR1, LCDR2, and LCDR3 comprises an amino acid sequence of SEQ ID NOS: 15999, 4425, and 12434, respectively.

[0151] The disclosure describes an antibody, antigen binding fragment, or polypeptide comprising a heavy chain variable region having a HCDR1, HCDR2, and HCDR3, and a light chain variable region having a LCDR1, LCDR2, and LCDR3, wherein the HCDR1, HCDR2, and HCDR3 comprises an amino acid sequence of SEQ ID NOS: 16999, 18402, and 6705, respectively and the LCDR1, LCDR2, and LCDR3 comprises an amino acid sequence of SEQ ID NOS: 16045, 9503, and 10776, respectively.

[0152] The disclosure describes an antibody, antigen binding fragment, or polypeptide comprising a heavy chain variable region having a HCDR1, HCDR2, and HCDR3, and a light chain variable region having a LCDR1, LCDR2, and LCDR3, wherein the HCDR1, HCDR2, and HCDR3 comprises an amino acid sequence of SEQ ID NOS: 17561, 10766, and 9537, respectively and the LCDR1, LCDR2, and LCDR3 comprises an amino acid sequence of SEQ ID NOS:15861, 10702, and 12854, respectively.

[0153] The disclosure describes an antibody, antigen binding fragment, or polypeptide comprising a heavy chain variable region having a HCDR1, HCDR2, and HCDR3, and a light chain variable region having a LCDR1, LCDR2, and LCDR3, wherein the HCDR1, HCDR2, and HCDR3 comprises an amino acid sequence of SEQ ID NOS:11386, 9700, and 10431, respectively and the LCDR1, LCDR2, and LCDR3 comprises an amino acid sequence of SEQ ID NOS: 10819, 9267, and 11333, respectively.

[0154] The disclosure describes an antibody, antigen binding fragment, or polypeptide comprising a heavy chain variable region having a HCDR1, HCDR2, and HCDR3, and a light chain variable region having a LCDR1, LCDR2, and LCDR3, wherein the HCDR1, HCDR2, and HCDR3 comprises an amino acid sequence of SEQ ID NOS:4634, 4328, and 17145, respectively and the LCDR1, LCDR2, and LCDR3 comprises an amino acid sequence of SEQ ID NOS:15683, 17864, and 12728, respectively.

[0155] The disclosure describes an antibody, antigen binding fragment, or polypeptide comprising a heavy chain variable region having a HCDR1, HCDR2, and HCDR3, and a light chain variable region having a LCDR1, LCDR2, and LCDR3, wherein the HCDR1, HCDR2, and HCDR3 comprises an amino acid sequence of SEQ ID NOS:16594, 16232, and 10038, respectively and the LCDR1, LCDR2, and LCDR3 comprises an amino acid sequence of SEQ ID NOS: 15883, 9503, and 12892, respectively.

[0156] The disclosure describes an antibody, antigen binding fragment, or polypeptide comprising a heavy chain variable region having a HCDR1, HCDR2, and HCDR3, and a light chain variable region having a LCDR1, LCDR2, and LCDR3, wherein the HCDR1, HCDR2, and HCDR3 comprises an amino acid sequence of SEQ ID NOS:10516, 11452, and 10528, respectively and the LCDR1, LCDR2, and LCDR3 comprises an amino acid sequence of SEQ ID NOS: 15752, 10705, and 12734, respectively. having a LCDR1, LCDR2, and LCDR3, wherein the HCDR1, HCDR2, and HCDR3 comprises an amino acid sequence of SEQ ID NOS:4034, 9691, and 18058, respectively and the LCDR1, LCDR2, and LCDR3 comprises an amino acid sequence of SEQ ID NOS: 15602, 4425, and 12414, respectively.

[0157] The disclosure describes an antibody, antigen binding fragment, or polypeptide comprising a heavy chain variable region having a HCDR1, HCDR2, and HCDR3, and a light chain variable region having a LCDR1, LCDR2, and LCDR3, wherein the HCDR1, HCDR2, and HCDR3 comprises an amino acid sequence of SEQ ID NOS:16707, 11529, and 10034, respectively and the LCDR1, LCDR2, and LCDR3 comprises an amino acid sequence of SEQ ID NOS:15714, 6321, and 12379, respectively.

[0158] The disclosure describes an antibody, antigen binding fragment, or polypeptide comprising a heavy chain variable region having a HCDR1, HCDR2, and HCDR3, and a light chain variable region having a LCDR1, LCDR2, and LCDR3, wherein the HCDR1, HCDR2, and HCDR3 comprises an amino acid sequence of SEQ ID NOS:16701, 11530, and 10034, respectively and the LCDR1, LCDR2, and LCDR3 comprises an amino acid sequence of SEQ ID NOS: 15709, 6323, and 12380, respectively.

[0159] The disclosure describes an antibody, antigen binding fragment, or polypeptide comprising a heavy chain variable region having a HCDR1, HCDR2, and HCDR3, and a light chain variable region having a LCDR1, LCDR2, and LCDR3, wherein the HCDR1, HCDR2, and HCDR3 comprises an amino acid sequence of SEQ ID NOS: 16572, 17894, and 9536, respectively and the LCDR1, LCDR2, and LCDR3 comprises an amino acid sequence of SEQ ID NOS:15890, 10705, and 12808, respectively.

[0160] The disclosure describes an antibody, antigen binding fragment, or polypeptide comprising a heavy chain variable region having a HCDR1, HCDR2, and HCDR3, and a light chain variable region having a LCDR1, LCDR2, and LCDR3, wherein the HCDR1, HCDR2, and HCDR3 comprises an amino acid sequence of SEQ ID NOS:4031, 9749, and 17119, respectively and the LCDR1, LCDR2, and LCDR3 comprises an amino acid sequence of SEQ ID NOS: 10778, 9255, and 11250, respectively.

[0161] The disclosure describes an antibody, antigen binding fragment, or polypeptide comprising a heavy chain variable region having a HCDR1, HCDR2, and HCDR3, and a light chain variable region having a LCDR1, LCDR2, and LCDR3, wherein the HCDR1, HCDR2, and HCDR3 comprises an amino acid sequence of SEQ ID NOS: 16596, 18566, and 5946, respectively and the LCDR1, LCDR2, and LCDR3 comprises an amino acid sequence of SEQ ID NOS:16486, 16558, and 12505, respectively.

[0162] The disclosure describes an antibody, antigen binding fragment, or polypeptide comprising a heavy chain variable region having a HCDR1, HCDR2, and HCDR3, and a light chain variable region having a LCDR1, LCDR2, and LCDR3, wherein the HCDR1, HCDR2, and HCDR3 comprises an amino acid sequence of SEQ ID NOS: 11652, 16928, and 6118, respectively and the LCDR1, LCDR2, and LCDR3 comprises an amino acid sequence of SEQ ID NOS: 15838, 9503, and 12725, respectively.

[0163] The disclosure describes an antibody, antigen binding fragment, or polypeptide comprising a heavy chain variable region having a HCDR1, HCDR2, and HCDR3, and a light chain variable region having a LCDR1, LCDR2, and LCDR3, wherein the HCDR1, HCDR2, and HCDR3 comprises an amino acid sequence of SEQ ID NOS: 17274, 9949, and 4592, respectively and the LCDR1, LCDR2, and LCDR3 comprises an amino acid sequence of SEQ ID NOS:10858, 18268, and 16346, respectively.

[0164] The disclosure describes an antibody, antigen binding fragment, or polypeptide comprising a heavy chain variable region having a HCDR1, HCDR2, and HCDR3, and a light chain variable region having a LCDR1, LCDR2, and LCDR3, wherein the HCDR1, HCDR2, and HCDR3 comprises an amino acid sequence of SEQ ID NOS:16618, 10003, and 17119, respectively and the LCDR1, LCDR2, and LCDR3 comprises an amino acid sequence of SEQ ID NOS:10823, 9272, and 11234, respectively.

[0165] The disclosure describes an antibody, antigen binding fragment, or polypeptide comprising a heavy chain variable region having a HCDR1, HCDR2, and HCDR3, and a light chain variable region having a LCDR1, LCDR2, and LCDR3, wherein the HCDR1, HCDR2, and HCDR3 comprises an amino acid sequence of SEQ ID NOS:16990, 4073, and 10079, respectively and the LCDR1, LCDR2, and LCDR3 comprises an amino acid sequence of SEQ ID NOS:16411, 7824, and 11248, respectively.

[0166] The disclosure describes an antibody, antigen binding fragment, or polypeptide comprising a heavy chain variable region having a HCDR1, HCDR2, and HCDR3, and a light chain variable region having a LCDR1, LCDR2, and LCDR3, wherein the HCDR1, HCDR2, and HCDR3 comprises an amino acid sequence of SEQ ID NOS: 10934, 9865, and 4608, respectively and the LCDR1, LCDR2, and LCDR3 comprises an amino acid sequence of SEQ ID NOS: 15726, 9494, and 12716, respectively.

[0167] The disclosure describes an antibody, antigen binding fragment, or polypeptide comprising a heavy chain variable region having a HCDR1, HCDR2, and HCDR3, and a light chain variable region having a LCDR1, LCDR2, and LCDR3, wherein the HCDR1, HCDR2, and HCDR3 comprises an amino acid sequence of SEQ ID NOS:6507, 9920, and 17713, respectively and the LCDR1, LCDR2, and LCDR3 comprises an amino acid sequence of SEQ ID NOS:15891, 10705, and 12601, respectively.

[0168] The disclosure describes an antibody, antigen binding fragment, or polypeptide comprising a heavy chain variable region having a HCDR1, HCDR2, and HCDR3, and a light chain variable region having a LCDR1, LCDR2, and LCDR3, wherein the HCDR1, HCDR2, and HCDR3 comprises an amino acid sequence of SEQ ID NOS: 16990, 10051, and 4200, respectively and the LCDR1, LCDR2, and LCDR3 comprises an amino acid sequence of SEQ ID NOS: 10830, 9269, and 11246, respectively.

[0169] The disclosure describes an antibody, antigen binding fragment, or polypeptide comprising a heavy chain variable region having a HCDR1, HCDR2, and HCDR3, and a light chain variable region having a LCDR1, LCDR2, and LCDR3, wherein the HCDR1, HCDR2, and HCDR3 comprises an amino acid sequence of SEQ ID NOS: 17855, 18574, and 4036, respectively and the LCDR1, LCDR2, and LCDR3 comprises an amino acid sequence of SEQ ID NOS: 17959, 6311, and 4363, respectively.

[0170] The disclosure describes an antibody, antigen binding fragment, or polypeptide comprising a heavy chain variable region having a HCDR1, HCDR2, and HCDR3, and a light chain variable region having a LCDR1, LCDR2, and LCDR3, wherein the HCDR1, HCDR2, and HCDR3 comprises an amino acid sequence of SEQ ID NOS: 16686, 18586, and 9539, respectively and the LCDR1, LCDR2, and LCDR3 comprises an amino acid sequence of SEQ ID NOS: 15895, 6610, and 12752, respectively.

[0171] The disclosure describes an antibody, antigen binding fragment, or polypeptide comprising a heavy chain variable region having a HCDR1, HCDR2, and HCDR3, and a light chain variable region having a LCDR1, LCDR2, and LCDR3, wherein the HCDR1, HCDR2, and HCDR3 comprises an amino acid sequence of SEQ ID NOS:17263, 9896, and 10125, respectively and the LCDR1, LCDR2, and LCDR3 comprises an amino acid sequence of SEQ ID NOS: 15837, 9494, and 12666, respectively.

[0172] The disclosure describes an antibody, antigen binding fragment, or polypeptide comprising a heavy chain variable region having a HCDR1, HCDR2, and HCDR3, and a light chain variable region having a LCDR1, LCDR2, and LCDR3, wherein the HCDR1, HCDR2, and HCDR3 comprises an amino acid sequence of SEQ ID NOS:9677, 18485, and 6076, respectively and the LCDR1, LCDR2, and LCDR3 comprises an amino acid sequence of SEQ ID NOS: 16739, 10205, and 4261, respectively.

[0173] The disclosure describes an antibody, antigen binding fragment, or polypeptide comprising a heavy chain variable region having a HCDR1, HCDR2, and HCDR3, and a light chain variable region having a LCDR1, LCDR2, and LCDR3, wherein the HCDR1, HCDR2, and HCDR3 comprises an amino acid sequence of SEQ ID NOS:6576, 18331, and 5979, respectively and the LCDR1, LCDR2, and LCDR3 comprises an amino acid sequence of SEQ ID NOS: 17959, 8080, and 17165, respectively.

[0174] The disclosure describes an antibody, antigen binding fragment, or polypeptide comprising a heavy chain variable region having a HCDR1, HCDR2, and HCDR3, and a light chain variable region having a LCDR1, LCDR2, and LCDR3, wherein the HCDR1, HCDR2, and HCDR3 comprises an amino acid sequence of SEQ ID NOS: 11669, 16870, and 4438, respectively and the LCDR1, LCDR2, and LCDR3 comprises an amino acid sequence of SEQ ID NOS:16085, 16563, and 12725, respectively.

[0175] The disclosure describes an antibody, antigen binding fragment, or polypeptide comprising a heavy chain variable region having a HCDR1, HCDR2, and HCDR3, and a light chain variable region having a LCDR1, LCDR2, and LCDR3, wherein the HCDR1, HCDR2, and HCDR3 comprises an amino acid sequence of SEQ ID NOS:11552, 9907, and 10126, respectively and the LCDR1, LCDR2, and LCDR3 comprises an amino acid sequence of SEQ ID NOS: 15915, 9503, and 12607, respectively. having a LCDR1, LCDR2, and LCDR3, wherein the HCDR1, HCDR2, and HCDR3 comprises an amino acid sequence of SEQ ID NOS:16610, 9890, and 4050, respectively and the LCDR1, LCDR2, and LCDR3 comprises an amino acid sequence of SEQ ID NOS: 10830, 9272, and 11236, respectively.

[0176] The disclosure describes an antibody, antigen binding fragment, or polypeptide comprising a heavy chain variable region having a HCDR1, HCDR2, and HCDR3, and a light chain variable region having a LCDR1, LCDR2, and LCDR3, wherein the HCDR1, HCDR2, and HCDR3 comprises an amino acid sequence of SEQ ID NOS: 17263, 9929, and 9528, respectively and the LCDR1, LCDR2, and LCDR3 comprises an amino acid sequence of SEQ ID NOS: 10841, 9274, and 11238, respectively.

[0177] The disclosure describes an antibody, antigen binding fragment, or polypeptide comprising a heavy chain variable region having a HCDR1, HCDR2, and HCDR3, and a light chain variable region having a LCDR1, LCDR2, and LCDR3, wherein the HCDR1, HCDR2, and HCDR3 comprises an amino acid sequence of SEQ ID NOS:6539, 17893, and 9517, respectively and the LCDR1, LCDR2, and LCDR3 comprises an amino acid sequence of SEQ ID NOS:10914, 18272, and 12893, respectively.

[0178] The disclosure describes an antibody, antigen binding fragment, or polypeptide comprising a heavy chain variable region having a HCDR1, HCDR2, and HCDR3, and a light chain variable region having a LCDR1, LCDR2, and LCDR3, wherein the HCDR1, HCDR2, and HCDR3 comprises an amino acid sequence of SEQ ID NOS:17837, 11460, and 10394, respectively and the LCDR1, LCDR2, and LCDR3 comprises an amino acid sequence of SEQ ID NOS:10818, 7978, and 11244, respectively.

[0179] The disclosure describes an antibody, antigen binding fragment, or polypeptide comprising a heavy chain variable region having a HCDR1, HCDR2, and HCDR3, and a light chain variable region having a LCDR1, LCDR2, and LCDR3, wherein the HCDR1, HCDR2, and HCDR3 comprises an amino acid sequence of SEQ ID NOS: 17872, 10048, and 4202, respectively and the LCDR1, LCDR2, and LCDR3 comprises an amino acid sequence of SEQ ID NOS: 10830, 9272, and 11255, respectively.

[0180] The disclosure describes an antibody, antigen binding fragment, or polypeptide comprising a heavy chain variable region having a HCDR1, HCDR2, and HCDR3, and a light chain variable region having a LCDR1, LCDR2, and LCDR3, wherein the HCDR1, HCDR2, and HCDR3 comprises an amino acid sequence of SEQ ID NOS: 11648, 18358, and 9466, respectively and the LCDR1, LCDR2, and LCDR3 comprises an amino acid sequence of SEQ ID NOS: 16030, 9503, and 12754, respectively.

[0181] The disclosure describes an antibody, antigen binding fragment, or polypeptide comprising a heavy chain variable region having a HCDR1, HCDR2, and HCDR3, and a light chain variable region having a LCDR1, LCDR2, and LCDR3, wherein the HCDR1, HCDR2, and HCDR3 comprises an amino acid sequence of SEQ ID NOS:18623, 18602, and 16968, respectively and the LCDR1, LCDR2, and LCDR3 comprises an amino acid sequence of SEQ ID NOS:16098, 10521, and 12537, respectively.

[0182] The disclosure describes an antibody, antigen binding fragment, or polypeptide comprising a heavy chain variable region having a HCDR1, HCDR2, and HCDR3, and a light chain variable region having a LCDR1, LCDR2, and LCDR3, wherein the HCDR1, HCDR2, and HCDR3 comprises an amino acid sequence of SEQ ID NOS: 17638, 16504, and 4482, respectively and the LCDR1, LCDR2, and LCDR3 comprises an amino acid sequence of SEQ ID NOS:16466, 15521, and 11272, respectively.

[0183] The disclosure describes an antibody, antigen binding fragment, or polypeptide comprising a heavy chain variable region having a HCDR1, HCDR2, and HCDR3, and a light chain variable region having a LCDR1, LCDR2, and LCDR3, wherein the HCDR1, HCDR2, and HCDR3 comprises an amino acid sequence of SEQ ID NOS: 17443, 9389, and 4624, respectively and the LCDR1, LCDR2, and LCDR3 comprises an amino acid sequence of SEQ ID NOS:15811, 10705, and 12888, respectively.

[0184] The disclosure describes an antibody, antigen binding fragment, or polypeptide comprising a heavy chain variable region having a HCDR1, HCDR2, and HCDR3, and a light chain variable region having a LCDR1, LCDR2, and LCDR3, wherein the HCDR1, HCDR2, and HCDR3 comprises an amino acid sequence of SEQ ID NOS: 16990, 10046, and 4202, respectively and the LCDR1, LCDR2, and LCDR3 comprises an amino acid sequence of SEQ ID NOS:10819, 9272, and 11301, respectively.

[0185] The disclosure describes an antibody, antigen binding fragment, or polypeptide comprising a heavy chain variable region having a HCDR1, HCDR2, and HCDR3, and a light chain variable region having a LCDR1, LCDR2, and LCDR3, wherein the HCDR1, HCDR2, and HCDR3 comprises an amino acid sequence of SEQ ID NOS:6573, 17743, and 6666, respectively and the LCDR1, LCDR2, and LCDR3 comprises an amino acid sequence of SEQ ID NOS: 17934, 4283, and 17170, respectively.

[0186] The disclosure describes an antibody, antigen binding fragment, or polypeptide comprising a heavy chain variable region having a HCDR1, HCDR2, and HCDR3, and a light chain variable region having a LCDR1, LCDR2, and LCDR3, wherein the HCDR1, HCDR2, and HCDR3 comprises an amino acid sequence of SEQ ID NOS:17284, 18415, and 10133, respectively and the LCDR1, LCDR2, and LCDR3 comprises an amino acid sequence of SEQ ID NOS:10890, 18275, and 12976, respectively.

[0187] The disclosure describes an antibody, antigen binding fragment, or polypeptide comprising a heavy chain variable region having a HCDR1, HCDR2, and HCDR3, and a light chain variable region having a LCDR1, LCDR2, and LCDR3, wherein the HCDR1, HCDR2, and HCDR3 comprises an amino acid sequence of SEQ ID NOS:6549, 18552, and 6092, respectively and the LCDR1, LCDR2, and LCDR3 comprises an amino acid sequence of SEQ ID NOS: 15863, 4425, and 12433, respectively.

[0188] The disclosure describes an antibody, antigen binding fragment, or polypeptide comprising a heavy chain variable region having a HCDR1, HCDR2, and HCDR3, and a light chain variable region having a LCDR1, LCDR2, and LCDR3, wherein the HCDR1, HCDR2, and HCDR3 comprises an amino acid sequence of SEQ ID NOS:17141, 11433, and 11134, respectively and the LCDR1, LCDR2, and LCDR3 comprises an amino acid sequence of SEQ ID NOS:18091, 11073, and 13615, respectively.

[0189] The disclosure describes an antibody, antigen binding fragment, or polypeptide comprising a heavy chain variable region having a HCDR1, HCDR2, and HCDR3, and a light chain variable region having a LCDR1, LCDR2, and LCDR3, wherein the HCDR1, HCDR2, and HCDR3 comprises an amino acid sequence of SEQ ID NOS:17441, 9735, and 17123, respectively and the LCDR1, LCDR2, and LCDR3 comprises an amino acid sequence of SEQ ID NOS: 10839, 9255, and 11247, respectively.

[0190] The disclosure describes an antibody, antigen binding fragment, or polypeptide comprising a heavy chain variable region having a HCDR1, HCDR2, and HCDR3, and a light chain variable region having a LCDR1, LCDR2, and LCDR3, wherein the HCDR1, HCDR2, and HCDR3 comprises an amino acid sequence of SEQ ID NOS:17141, 16954, and 10482, respectively and the LCDR1, LCDR2, and LCDR3 comprises an amino acid sequence of SEQ ID NOS: 17919, 9278, and 4346, respectively.

[0191] The disclosure describes an antibody, antigen binding fragment, or polypeptide comprising a heavy chain variable region having a HCDR1, HCDR2, and HCDR3, and a light chain variable region having a LCDR1, LCDR2, and LCDR3, wherein the HCDR1, HCDR2, and HCDR3 comprises an amino acid sequence of SEQ ID NOS: 10510, 18354, and 9467, respectively and the LCDR1, LCDR2, and LCDR3 comprises an amino acid sequence of SEQ ID NOS: 15626, 9503, and 12756, respectively.

[0192] The disclosure describes an antibody, antigen binding fragment, or polypeptide comprising a heavy chain variable region having a HCDR1, HCDR2, and HCDR3, and a light chain variable region having a LCDR1, LCDR2, and LCDR3, wherein the HCDR1, HCDR2, and HCDR3 comprises an amino acid sequence of SEQ ID NOS:17293, 18414, and 15586, respectively and the LCDR1, LCDR2, and LCDR3 comprises an amino acid sequence of SEQ ID NOS: 16483, 6325, and 12358, respectively.

[0193] The disclosure describes an antibody, antigen binding fragment, or polypeptide comprising a heavy chain variable region having a HCDR1, HCDR2, and HCDR3, and a light chain variable region having a LCDR1, LCDR2, and LCDR3, wherein the HCDR1, HCDR2, and HCDR3 comprises an amino acid sequence of SEQ ID NOS:17264, 9891, and 16776, respectively and the LCDR1, LCDR2, and LCDR3 comprises an amino acid sequence of SEQ ID NOS:9482, 4425, and 12685, respectively.

[0194] The disclosure describes an antibody, antigen binding fragment, or polypeptide comprising a heavy chain variable region having a HCDR1, HCDR2, and HCDR3, and a light chain variable region having a LCDR1, LCDR2, and LCDR3, wherein the HCDR1, HCDR2, and HCDR3 comprises an amino acid sequence of SEQ ID NOS: 10947, 16929, and 6068, respectively and the LCDR1, LCDR2, and LCDR3 comprises an amino acid sequence of SEQ ID NOS: 16045, 9503, and 12868, respectively. having a LCDR1, LCDR2, and LCDR3, wherein the HCDR1, HCDR2, and HCDR3 comprises an amino acid sequence of SEQ ID NOS: 10944, 9981, and 9523, respectively and the LCDR1, LCDR2, and LCDR3 comprises an amino acid sequence of SEQ ID NOS: 10837, 9274, and 11085, respectively.

[0195] The disclosure describes an antibody, antigen binding fragment, or polypeptide comprising a heavy chain variable region having a HCDR1, HCDR2, and HCDR3, and a light chain variable region having a LCDR1, LCDR2, and LCDR3, wherein the HCDR1, HCDR2, and HCDR3 comprises an amino acid sequence of SEQ ID NOS: 16545, 11441, and 9439, respectively and the LCDR1, LCDR2, and LCDR3 comprises an amino acid sequence of SEQ ID NOS: 16393, 9259, and 11306, respectively.

[0196] The disclosure describes an antibody, antigen binding fragment, or polypeptide comprising a heavy chain variable region having a HCDR1, HCDR2, and HCDR3, and a light chain variable region having a LCDR1, LCDR2, and LCDR3, wherein the HCDR1, HCDR2, and HCDR3 comprises an amino acid sequence of SEQ ID NOS:17278, 9745, and 6159, respectively and the LCDR1, LCDR2, and LCDR3 comprises an amino acid sequence of SEQ ID NOS: 16028, 9494, and 12872, respectively.

[0197] The disclosure describes an antibody, antigen binding fragment, or polypeptide comprising a heavy chain variable region having a HCDR1, HCDR2, and HCDR3, and a light chain variable region having a LCDR1, LCDR2, and LCDR3, wherein the HCDR1, HCDR2, and HCDR3 comprises an amino acid sequence of SEQ ID NOS: 16990, 9903, and 7922, respectively and the LCDR1, LCDR2, and LCDR3 comprises an amino acid sequence of SEQ ID NOS: 16010, 9480, and 11996, respectively.

[0198] The disclosure describes an antibody, antigen binding fragment, or polypeptide comprising a heavy chain variable region having a HCDR1, HCDR2, and HCDR3, and a light chain variable region having a LCDR1, LCDR2, and LCDR3, wherein the HCDR1, HCDR2, and HCDR3 comprises an amino acid sequence of SEQ ID NOS:11552, 9724, and 10200, respectively and the LCDR1, LCDR2, and LCDR3 comprises an amino acid sequence of SEQ ID NOS:15654, 16561, and 12093, respectively.

[0199] The disclosure describes an antibody, antigen binding fragment, or polypeptide comprising a heavy chain variable region having a HCDR1, HCDR2, and HCDR3, and a light chain variable region having a LCDR1, LCDR2, and LCDR3, wherein the HCDR1, HCDR2, and HCDR3 comprises an amino acid sequence of SEQ ID NOS:17263, 9832, and 10745, respectively and the LCDR1, LCDR2, and LCDR3 comprises an amino acid sequence of SEQ ID NOS: 16061, 9494, and 12693, respectively.

[0200] The disclosure describes an antibody, antigen binding fragment, or polypeptide comprising a heavy chain variable region having a HCDR1, HCDR2, and HCDR3, and a light chain variable region having a LCDR1, LCDR2, and LCDR3, wherein the HCDR1, HCDR2, and HCDR3 comprises an amino acid sequence of SEQ ID NOS:17857, 9367, and 10499, respectively and the LCDR1, LCDR2, and LCDR3 comprises an amino acid sequence of SEQ ID NOS: 18083, 17678, and 9447, respectively.

[0201] The disclosure describes an antibody, antigen binding fragment, or polypeptide comprising a heavy chain variable region having a HCDR1, HCDR2, and HCDR3, and a light chain variable region having a LCDR1, LCDR2, and LCDR3, wherein the HCDR1, HCDR2, and HCDR3 comprises an amino acid sequence of SEQ ID NOS:17028, 17825, and 17567, respectively and the LCDR1, LCDR2, and LCDR3 comprises an amino acid sequence of SEQ ID NOS:15805, 18442, and 10449, respectively.

[0202] The disclosure describes an antibody, antigen binding fragment, or polypeptide comprising a heavy chain variable region having a HCDR1, HCDR2, and HCDR3, and a light chain variable region having a LCDR1, LCDR2, and LCDR3, wherein the HCDR1, HCDR2, and HCDR3 comprises an amino acid sequence of SEQ ID NOS:10071, 9887, and 10073, respectively and the LCDR1, LCDR2, and LCDR3 comprises an amino acid sequence of SEQ ID NOS: 10838, 9272, and 11248, respectively.

[0203] The disclosure describes an antibody, antigen binding fragment, or polypeptide comprising a heavy chain variable region having a HCDR1, HCDR2, and HCDR3, and a light chain variable region having a LCDR1, LCDR2, and LCDR3, wherein the HCDR1, HCDR2, and HCDR3 comprises an amino acid sequence of SEQ ID NOS: 17014, 16501, and 4046, respectively and the LCDR1, LCDR2, and LCDR3 comprises an amino acid sequence of SEQ ID NOS: 16061, 9494, and 12870, respectively.

[0204] The disclosure describes an antibody, antigen binding fragment, or polypeptide comprising a heavy chain variable region having a HCDR1, HCDR2, and HCDR3, and a light chain variable region having a LCDR1, LCDR2, and LCDR3, wherein the HCDR1, HCDR2, and HCDR3 comprises an amino acid sequence of SEQ ID NOS: 16990, 10049, and 4201, respectively and the LCDR1, LCDR2, and LCDR3 comprises an amino acid sequence of SEQ ID NOS: 10828, 9273, and 11298, respectively.

[0205] The disclosure describes an antibody, antigen binding fragment, or polypeptide comprising a heavy chain variable region having a HCDR1, HCDR2, and HCDR3, and a light chain variable region having a LCDR1, LCDR2, and LCDR3, wherein the HCDR1, HCDR2, and HCDR3 comprises an amino acid sequence of SEQ ID NOS: 11561, 18233, and 6724, respectively and the LCDR1, LCDR2, and LCDR3 comprises an amino acid sequence of SEQ ID NOS: 16116, 6609, and 12821, respectively.

[0206] The disclosure describes an antibody, antigen binding fragment, or polypeptide comprising a heavy chain variable region having a HCDR1, HCDR2, and HCDR3, and a light chain variable region having a LCDR1, LCDR2, and LCDR3, wherein the HCDR1, HCDR2, and HCDR3 comprises an amino acid sequence of SEQ ID NOS: 17263, 9980, and 9524, respectively and the LCDR1, LCDR2, and LCDR3 comprises an amino acid sequence of SEQ ID NOS: 10841, 9274, and 11238, respectively.

[0207] The disclosure describes an antibody, antigen binding fragment, or polypeptide comprising a heavy chain variable region having a HCDR1, HCDR2, and HCDR3, and a light chain variable region having a LCDR1, LCDR2, and LCDR3, wherein the HCDR1, HCDR2, and HCDR3 comprises an amino acid sequence of SEQ ID NOS:4320, 16210, and 4315, respectively and the LCDR1, LCDR2, and LCDR3 comprises an amino acid sequence of SEQ ID NOS: 17937, 9276, and 17125, respectively.

[0208] The disclosure describes an antibody, antigen binding fragment, or polypeptide comprising a heavy chain variable region having a HCDR1, HCDR2, and HCDR3, and a light chain variable region having a LCDR1, LCDR2, and LCDR3, wherein the HCDR1, HCDR2, and HCDR3 comprises an amino acid sequence of SEQ ID NOS:11632, 4133, and 16185, respectively and the LCDR1, LCDR2, and LCDR3 comprises an amino acid sequence of SEQ ID NOS: 15703, 3982, and 12092, respectively.

[0209] The disclosure describes an antibody, antigen binding fragment, or polypeptide comprising a heavy chain variable region having a HCDR1, HCDR2, and HCDR3, and a light chain variable region having a LCDR1, LCDR2, and LCDR3, wherein the HCDR1, HCDR2, and HCDR3 comprises an amino acid sequence of SEQ ID NOS:6145, 11023, and 10215, respectively and the LCDR1, LCDR2, and LCDR3 comprises an amino acid sequence of SEQ ID NOS:16454, 18279, and 10472, respectively.

[0210] The disclosure describes an antibody, antigen binding fragment, or polypeptide comprising a heavy chain variable region having a HCDR1, HCDR2, and HCDR3, and a light chain variable region having a LCDR1, LCDR2, and LCDR3, wherein the HCDR1, HCDR2, and HCDR3 comprises an amino acid sequence of SEQ ID NOS:6524, 18317, and 10216, respectively and the LCDR1, LCDR2, and LCDR3 comprises an amino acid sequence of SEQ ID NOS: 15892, 9480, and 11999, respectively.

[0211] The disclosure describes an antibody, antigen binding fragment, or polypeptide comprising a heavy chain variable region having a HCDR1, HCDR2, and HCDR3, and a light chain variable region having a LCDR1, LCDR2, and LCDR3, wherein the HCDR1, HCDR2, and HCDR3 comprises an amino acid sequence of SEQ ID NOS:11623, 9841, and 10108, respectively and the LCDR1, LCDR2, and LCDR3 comprises an amino acid sequence of SEQ ID NOS:15968, 10222, and 12664, respectively.

[0212] The disclosure describes an antibody, antigen binding fragment, or polypeptide comprising a heavy chain variable region having a HCDR1, HCDR2, and HCDR3, and a light chain variable region having a LCDR1, LCDR2, and LCDR3, wherein the HCDR1, HCDR2, and HCDR3 comprises an amino acid sequence of SEQ ID NOS:11553, 9906, and 10128, respectively and the LCDR1, LCDR2, and LCDR3 comprises an amino acid sequence of SEQ ID NOS: 15920, 9494, and 12568, respectively.

[0213] The disclosure describes an antibody, antigen binding fragment, or polypeptide comprising a heavy chain variable region having a HCDR1, HCDR2, and HCDR3, and a light chain variable region having a LCDR1, LCDR2, and LCDR3, wherein the HCDR1, HCDR2, and HCDR3 comprises an amino acid sequence of SEQ ID NOS:16542, 11459, and 11159, respectively and the LCDR1, LCDR2, and LCDR3 comprises an amino acid sequence of SEQ ID NOS:10909, 18275, and 12905, respectively. having a LCDR1, LCDR2, and LCDR3, wherein the HCDR1, HCDR2, and HCDR3 comprises an amino acid sequence of SEQ ID NOS:17449, 9736, and 17118, respectively and the LCDR1, LCDR2, and LCDR3 comprises an amino acid sequence of SEQ ID NOS: 10830, 9272, and 11234, respectively.

[0214] The disclosure describes an antibody, antigen binding fragment, or polypeptide comprising a heavy chain variable region having a HCDR1, HCDR2, and HCDR3, and a light chain variable region having a LCDR1, LCDR2, and LCDR3, wherein the HCDR1, HCDR2, and HCDR3 comprises an amino acid sequence of SEQ ID NOS:17147, 10571, and 16314, respectively and the LCDR1, LCDR2, and LCDR3 comprises an amino acid sequence of SEQ ID NOS:15803, 6611, and 12869, respectively.

[0215] The disclosure describes an antibody, antigen binding fragment, or polypeptide comprising a heavy chain variable region having a HCDR1, HCDR2, and HCDR3, and a light chain variable region having a LCDR1, LCDR2, and LCDR3, wherein the HCDR1, HCDR2, and HCDR3 comprises an amino acid sequence of SEQ ID NOS: 11392, 9382, and 9599, respectively and the LCDR1, LCDR2, and LCDR3 comprises an amino acid sequence of SEQ ID NOS: 17955, 8077, and 17183, respectively.

[0216] The disclosure describes an antibody, antigen binding fragment, or polypeptide comprising a heavy chain variable region having a HCDR1, HCDR2, and HCDR3, and a light chain variable region having a LCDR1, LCDR2, and LCDR3, wherein the HCDR1, HCDR2, and HCDR3 comprises an amino acid sequence of SEQ ID NOS:6231, 11504, and 9351, respectively and the LCDR1, LCDR2, and LCDR3 comprises an amino acid sequence of SEQ ID NOS: 16385, 9266, and 11279, respectively.

[0217] The disclosure describes an antibody, antigen binding fragment, or polypeptide comprising a heavy chain variable region having a HCDR1, HCDR2, and HCDR3, and a light chain variable region having a LCDR1, LCDR2, and LCDR3, wherein the HCDR1, HCDR2, and HCDR3 comprises an amino acid sequence of SEQ ID NOS: 17272, 18015, and 4610, respectively and the LCDR1, LCDR2, and LCDR3 comprises an amino acid sequence of SEQ ID NOS: 16045, 9503, and 12767, respectively.

[0218] The disclosure describes an antibody, antigen binding fragment, or polypeptide comprising a heavy chain variable region having a HCDR1, HCDR2, and HCDR3, and a light chain variable region having a LCDR1, LCDR2, and LCDR3, wherein the HCDR1, HCDR2, and HCDR3 comprises an amino acid sequence of SEQ ID NOS: 11689, 18573, and 9342, respectively and the LCDR1, LCDR2, and LCDR3 comprises an amino acid sequence of SEQ ID NOS: 16110, 3953, and 12499, respectively.

[0219] The disclosure describes an antibody, antigen binding fragment, or polypeptide comprising a heavy chain variable region having a HCDR1, HCDR2, and HCDR3, and a light chain variable region having a LCDR1, LCDR2, and LCDR3, wherein the HCDR1, HCDR2, and HCDR3 comprises an amino acid sequence of SEQ ID NOS:17263, 9892, and 10127, respectively and the LCDR1, LCDR2, and LCDR3 comprises an amino acid sequence of SEQ ID NOS: 16001, 9494, and 12666, respectively.

[0220] The disclosure describes an antibody, antigen binding fragment, or polypeptide comprising a heavy chain variable region having a HCDR1, HCDR2, and HCDR3, and a light chain variable region having a LCDR1, LCDR2, and LCDR3, wherein the HCDR1, HCDR2, and HCDR3 comprises an amino acid sequence of SEQ ID NOS:11623, 9813, and 16776, respectively and the LCDR1, LCDR2, and LCDR3 comprises an amino acid sequence of SEQ ID NOS:9485, 4425, and 12685, respectively.

[0221] The disclosure describes an antibody, antigen binding fragment, or polypeptide comprising a heavy chain variable region having a HCDR1, HCDR2, and HCDR3, and a light chain variable region having a LCDR1, LCDR2, and LCDR3, wherein the HCDR1, HCDR2, and HCDR3 comprises an amino acid sequence of SEQ ID NOS:17263, 9820, and 7921, respectively and the LCDR1, LCDR2, and LCDR3 comprises an amino acid sequence of SEQ ID NOS: 16049, 9480, and 12712, respectively.

[0222] The disclosure describes an antibody, antigen binding fragment, or polypeptide comprising a heavy chain variable region having a HCDR1, HCDR2, and HCDR3, and a light chain variable region having a LCDR1, LCDR2, and LCDR3, wherein the HCDR1, HCDR2, and HCDR3 comprises an amino acid sequence of SEQ ID NOS:6549, 18511, and 6132, respectively and the LCDR1, LCDR2, and LCDR3 comprises an amino acid sequence of SEQ ID NOS: 15857, 4425, and 12406, respectively.

[0223] The disclosure describes an antibody, antigen binding fragment, or polypeptide comprising a heavy chain variable region having a HCDR1, HCDR2, and HCDR3, and a light chain variable region having a LCDR1, LCDR2, and LCDR3, wherein the HCDR1, HCDR2, and HCDR3 comprises an amino acid sequence of SEQ ID NOS:16990, 9886, and 10073, respectively and the LCDR1, LCDR2, and LCDR3 comprises an amino acid sequence of SEQ ID NOS: 10840, 9272, and 11248, respectively.

[0224] The disclosure describes an antibody, antigen binding fragment, or polypeptide comprising a heavy chain variable region having a HCDR1, HCDR2, and HCDR3, and a light chain variable region having a LCDR1, LCDR2, and LCDR3, wherein the HCDR1, HCDR2, and HCDR3 comprises an amino acid sequence of SEQ ID NOS:17535, 10571, and 16181, respectively and the LCDR1, LCDR2, and LCDR3 comprises an amino acid sequence of SEQ ID NOS:16674, 6637, and 11887, respectively.

[0225] The disclosure describes an antibody, antigen binding fragment, or polypeptide comprising a heavy chain variable region having a HCDR1, HCDR2, and HCDR3, and a light chain variable region having a LCDR1, LCDR2, and LCDR3, wherein the HCDR1, HCDR2, and HCDR3 comprises an amino acid sequence of SEQ ID NOS:17534, 11525, and 16206, respectively and the LCDR1, LCDR2, and LCDR3 comprises an amino acid sequence of SEQ ID NOS: 15994, 4425, and 12422, respectively.

[0226] The disclosure describes an antibody, antigen binding fragment, or polypeptide comprising a heavy chain variable region having a HCDR1, HCDR2, and HCDR3, and a light chain variable region having a LCDR1, LCDR2, and LCDR3, wherein the HCDR1, HCDR2, and HCDR3 comprises an amino acid sequence of SEQ ID NOS:17261, 9906, and 10119, respectively and the LCDR1, LCDR2, and LCDR3 comprises an amino acid sequence of SEQ ID NOS: 16004, 9494, and 12666, respectively.

[0227] The disclosure describes an antibody, antigen binding fragment, or polypeptide comprising a heavy chain variable region having a HCDR1, HCDR2, and HCDR3, and a light chain variable region having a LCDR1, LCDR2, and LCDR3, wherein the HCDR1, HCDR2, and HCDR3 comprises an amino acid sequence of SEQ ID NOS:17072, 16854, and 10425, respectively and the LCDR1, LCDR2, and LCDR3 comprises an amino acid sequence of SEQ ID NOS:17917, 9277, and 17203, respectively.

[0228] The disclosure describes an antibody, antigen binding fragment, or polypeptide comprising a heavy chain variable region having a HCDR1, HCDR2, and HCDR3, and a light chain variable region having a LCDR1, LCDR2, and LCDR3, wherein the HCDR1, HCDR2, and HCDR3 comprises an amino acid sequence of SEQ ID NOS: 17263, 10010, and 7923, respectively and the LCDR1, LCDR2, and LCDR3 comprises an amino acid sequence of SEQ ID NOS: 15886, 9494, and 12279, respectively.

[0229] The disclosure describes an antibody, antigen binding fragment, or polypeptide comprising a heavy chain variable region having a HCDR1, HCDR2, and HCDR3, and a light chain variable region having a LCDR1, LCDR2, and LCDR3, wherein the HCDR1, HCDR2, and HCDR3 comprises an amino acid sequence of SEQ ID NOS:10952, 11514, and 11153, respectively and the LCDR1, LCDR2, and LCDR3 comprises an amino acid sequence of SEQ ID NOS: 16375, 9266, and 17542, respectively.

[0230] The disclosure describes an antibody, antigen binding fragment, or polypeptide comprising a heavy chain variable region having a HCDR1, HCDR2, and HCDR3, and a light chain variable region having a LCDR1, LCDR2, and LCDR3, wherein the HCDR1, HCDR2, and HCDR3 comprises an amino acid sequence of SEQ ID NOS: 17855, 18573, and 9341, respectively and the LCDR1, LCDR2, and LCDR3 comprises an amino acid sequence of SEQ ID NOS: 16108, 3969, and 12490, respectively.

[0231] The disclosure describes an antibody, antigen binding fragment, or polypeptide comprising a heavy chain variable region having a HCDR1, HCDR2, and HCDR3, and a light chain variable region having a LCDR1, LCDR2, and LCDR3, wherein the HCDR1, HCDR2, and HCDR3 comprises an amino acid sequence of SEQ ID NOS:10384, 11465, and 11541, respectively and the LCDR1, LCDR2, and LCDR3 comprises an amino acid sequence of SEQ ID NOS: 10821, 9272, and 11243, respectively.

[0232] The disclosure describes an antibody, antigen binding fragment, or polypeptide comprising a heavy chain variable region having a HCDR1, HCDR2, and HCDR3, and a light chain variable region having a LCDR1, LCDR2, and LCDR3, wherein the HCDR1, HCDR2, and HCDR3 comprises an amino acid sequence of SEQ ID NOS:17448, 9371, and 6567, respectively and the LCDR1, LCDR2, and LCDR3 comprises an amino acid sequence of SEQ ID NOS: 15701, 6605, and 12990, respectively. having a LCDR1, LCDR2, and LCDR3, wherein the HCDR1, HCDR2, and HCDR3 comprises an amino acid sequence of SEQ ID NOS:4305, 9895, and 10120, respectively and the LCDR1, LCDR2, and LCDR3 comprises an amino acid sequence of SEQ ID NOS: 15774, 9503, and 12721, respectively.

[0233] The disclosure describes an antibody, antigen binding fragment, or polypeptide comprising a heavy chain variable region having a HCDR1, HCDR2, and HCDR3, and a light chain variable region having a LCDR1, LCDR2, and LCDR3, wherein the HCDR1, HCDR2, and HCDR3 comprises an amino acid sequence of SEQ ID NOS: 10919, 11445, and 9440, respectively and the LCDR1, LCDR2, and LCDR3 comprises an amino acid sequence of SEQ ID NOS: 16401, 9259, and 11305, respectively.

[0234] The disclosure describes an antibody, antigen binding fragment, or polypeptide comprising a heavy chain variable region having a HCDR1, HCDR2, and HCDR3, and a light chain variable region having a LCDR1, LCDR2, and LCDR3, wherein the HCDR1, HCDR2, and HCDR3 comprises an amino acid sequence of SEQ ID NOS: 16200, 9400, and 4032, respectively and the LCDR1, LCDR2, and LCDR3 comprises an amino acid sequence of SEQ ID NOS: 15692, 3953, and 11097, respectively.

[0235] The disclosure describes an antibody, antigen binding fragment, or polypeptide comprising a heavy chain variable region having a HCDR1, HCDR2, and HCDR3, and a light chain variable region having a LCDR1, LCDR2, and LCDR3, wherein the HCDR1, HCDR2, and HCDR3 comprises an amino acid sequence of SEQ ID NOS:4316, 9908, and 10122, respectively and the LCDR1, LCDR2, and LCDR3 comprises an amino acid sequence of SEQ ID NOS:16120, 10225, and 12630, respectively.

[0236] The disclosure describes an antibody, antigen binding fragment, or polypeptide comprising a heavy chain variable region having a HCDR1, HCDR2, and HCDR3, and a light chain variable region having a LCDR1, LCDR2, and LCDR3, wherein the HCDR1, HCDR2, and HCDR3 comprises an amino acid sequence of SEQ ID NOS:4619, 11510, and 9552, respectively and the LCDR1, LCDR2, and LCDR3 comprises an amino acid sequence of SEQ ID NOS: 17943, 9270, and 17155, respectively.

[0237] The disclosure describes an antibody, antigen binding fragment, or polypeptide comprising a heavy chain variable region having a HCDR1, HCDR2, and HCDR3, and a light chain variable region having a LCDR1, LCDR2, and LCDR3, wherein the HCDR1, HCDR2, and HCDR3 comprises an amino acid sequence of SEQ ID NOS:4319, 11524, and 16204, respectively and the LCDR1, LCDR2, and LCDR3 comprises an amino acid sequence of SEQ ID NOS: 15994, 4422, and 12422, respectively.

[0238] The disclosure describes an antibody, antigen binding fragment, or polypeptide comprising a heavy chain variable region having a HCDR1, HCDR2, and HCDR3, and a light chain variable region having a LCDR1, LCDR2, and LCDR3, wherein the HCDR1, HCDR2, and HCDR3 comprises an amino acid sequence of SEQ ID NOS:6531, 18022, and 16977, respectively and the LCDR1, LCDR2, and LCDR3 comprises an amino acid sequence of SEQ ID NOS:16387, 10926, and 11230, respectively.

[0239] The disclosure describes an antibody, antigen binding fragment, or polypeptide comprising a heavy chain variable region having a HCDR1, HCDR2, and HCDR3, and a light chain variable region having a LCDR1, LCDR2, and LCDR3, wherein the HCDR1, HCDR2, and HCDR3 comprises an amino acid sequence of SEQ ID NOS:17534, 17815, and 16369, respectively and the LCDR1, LCDR2, and LCDR3 comprises an amino acid sequence of SEQ ID NOS:10714, 4424, and 12435, respectively.

[0240] The disclosure describes an antibody, antigen binding fragment, or polypeptide comprising a heavy chain variable region having a HCDR1, HCDR2, and HCDR3, and a light chain variable region having a LCDR1, LCDR2, and LCDR3, wherein the HCDR1, HCDR2, and HCDR3 comprises an amino acid sequence of SEQ ID NOS:11552, 9905, and 10125, respectively and the LCDR1, LCDR2, and LCDR3 comprises an amino acid sequence of SEQ ID NOS: 15921, 9494, and 12565, respectively.

[0241] The disclosure describes an antibody, antigen binding fragment, or polypeptide comprising a heavy chain variable region having a HCDR1, HCDR2, and HCDR3, and a light chain variable region having a LCDR1, LCDR2, and LCDR3, wherein the HCDR1, HCDR2, and HCDR3 comprises an amino acid sequence of SEQ ID NOS:6559, 16866, and 5952, respectively and the LCDR1, LCDR2, and LCDR3 comprises an amino acid sequence of SEQ ID NOS:15821, 4417, and 12433, respectively.

[0242] The disclosure describes an antibody, antigen binding fragment, or polypeptide comprising a heavy chain variable region having a HCDR1, HCDR2, and HCDR3, and a light chain variable region having a LCDR1, LCDR2, and LCDR3, wherein the HCDR1, HCDR2, and HCDR3 comprises an amino acid sequence of SEQ ID NOS:17293, 18418, and 15588, respectively and the LCDR1, LCDR2, and LCDR3 comprises an amino acid sequence of SEQ ID NOS:15718, 6325, and 12358, respectively.

[0243] The disclosure describes an antibody, antigen binding fragment, or polypeptide comprising a heavy chain variable region having a HCDR1, HCDR2, and HCDR3, and a light chain variable region having a LCDR1, LCDR2, and LCDR3, wherein the HCDR1, HCDR2, and HCDR3 comprises an amino acid sequence of SEQ ID NOS:17263, 9896, and 10125, respectively and the LCDR1, LCDR2, and LCDR3 comprises an amino acid sequence of SEQ ID NOS: 15831, 9503, and 12666, respectively.

[0244] The disclosure describes an antibody, antigen binding fragment, or polypeptide comprising a heavy chain variable region having a HCDR1, HCDR2, and HCDR3, and a light chain variable region having a LCDR1, LCDR2, and LCDR3, wherein the HCDR1, HCDR2, and HCDR3 comprises an amino acid sequence of SEQ ID NOS: 10936, 9928, and 9527, respectively and the LCDR1, LCDR2, and LCDR3 comprises an amino acid sequence of SEQ ID NOS: 16461, 9274, and 11264, respectively.

[0245] The disclosure describes an antibody, antigen binding fragment, or polypeptide comprising a heavy chain variable region having a HCDR1, HCDR2, and HCDR3, and a light chain variable region having a LCDR1, LCDR2, and LCDR3, wherein the HCDR1, HCDR2, and HCDR3 comprises an amino acid sequence of SEQ ID NOS:17277, 9902, and 10121, respectively and the LCDR1, LCDR2, and LCDR3 comprises an amino acid sequence of SEQ ID NOS: 16088, 9494, and 12711, respectively.

[0246] The disclosure describes an antibody, antigen binding fragment, or polypeptide comprising a heavy chain variable region having a HCDR1, HCDR2, and HCDR3, and a light chain variable region having a LCDR1, LCDR2, and LCDR3, wherein the HCDR1, HCDR2, and HCDR3 comprises an amino acid sequence of SEQ ID NOS:11551, 9897, and 10121, respectively and the LCDR1, LCDR2, and LCDR3 comprises an amino acid sequence of SEQ ID NOS: 16004, 9480, and 12666, respectively.

[0247] The disclosure describes an antibody, antigen binding fragment, or polypeptide comprising a heavy chain variable region having a HCDR1, HCDR2, and HCDR3, and a light chain variable region having a LCDR1, LCDR2, and LCDR3, wherein the HCDR1, HCDR2, and HCDR3 comprises an amino acid sequence of SEQ ID NOS:11645, 18353, and 17031, respectively and the LCDR1, LCDR2, and LCDR3 comprises an amino acid sequence of SEQ ID NOS: 15656, 3969, and 12339, respectively.

[0248] The disclosure describes an antibody, antigen binding fragment, or polypeptide comprising a heavy chain variable region having a HCDR1, HCDR2, and HCDR3, and a light chain variable region having a LCDR1, LCDR2, and LCDR3, wherein the HCDR1, HCDR2, and HCDR3 comprises an amino acid sequence of SEQ ID NOS:11425, 18601, and 10301, respectively and the LCDR1, LCDR2, and LCDR3 comprises an amino acid sequence of SEQ ID NOS:16115, 9490, and 12511, respectively.

[0249] The disclosure describes an antibody, antigen binding fragment, or polypeptide comprising a heavy chain variable region having a HCDR1, HCDR2, and HCDR3, and a light chain variable region having a LCDR1, LCDR2, and LCDR3, wherein the HCDR1, HCDR2, and HCDR3 comprises an amino acid sequence of SEQ ID NOS:17042, 9993, and 10379, respectively and the LCDR1, LCDR2, and LCDR3 comprises an amino acid sequence of SEQ ID NOS: 15959, 9494, and 12671, respectively.

[0250] The disclosure describes an antibody, antigen binding fragment, or polypeptide comprising a heavy chain variable region having a HCDR1, HCDR2, and HCDR3, and a light chain variable region having a LCDR1, LCDR2, and LCDR3, wherein the HCDR1, HCDR2, and HCDR3 comprises an amino acid sequence of SEQ ID NOS:6534, 18437, and 5995, respectively and the LCDR1, LCDR2, and LCDR3 comprises an amino acid sequence of SEQ ID NOS: 15761, 3982, and 12471, respectively.

[0251] The disclosure describes an antibody, antigen binding fragment, or polypeptide comprising a heavy chain variable region having a HCDR1, HCDR2, and HCDR3, and a light chain variable region having a LCDR1, LCDR2, and LCDR3, wherein the HCDR1, HCDR2, and HCDR3 comprises an amino acid sequence of SEQ ID NOS:17263, 9797, and 17662, respectively and the LCDR1, LCDR2, and LCDR3 comprises an amino acid sequence of SEQ ID NOS: 15941, 9494, and 12676, respectively. having a LCDR1, LCDR2, and LCDR3, wherein the HCDR1, HCDR2, and HCDR3 comprises an amino acid sequence of SEQ ID NOS: 10680, 18344, and 6021, respectively and the LCDR1, LCDR2, and LCDR3 comprises an amino acid sequence of SEQ ID NOS: 15873, 9498, and 12525, respectively.

[0252] The disclosure describes an antibody, antigen binding fragment, or polypeptide comprising a heavy chain variable region having a HCDR1, HCDR2, and HCDR3, and a light chain variable region having a LCDR1, LCDR2, and LCDR3, wherein the HCDR1, HCDR2, and HCDR3 comprises an amino acid sequence of SEQ ID NOS: 11621, 18301, and 9357, respectively and the LCDR1, LCDR2, and LCDR3 comprises an amino acid sequence of SEQ ID NOS:15605, 10727, and 12845, respectively.

[0253] The disclosure describes an antibody, antigen binding fragment, or polypeptide comprising a heavy chain variable region having a HCDR1, HCDR2, and HCDR3, and a light chain variable region having a LCDR1, LCDR2, and LCDR3, wherein the HCDR1, HCDR2, and HCDR3 comprises an amino acid sequence of SEQ ID NOS:17003, 9818, and 10920, respectively and the LCDR1, LCDR2, and LCDR3 comprises an amino acid sequence of SEQ ID NOS:15895, 10724, and 15592, respectively.

[0254] The disclosure describes an antibody, antigen binding fragment, or polypeptide comprising a heavy chain variable region having a HCDR1, HCDR2, and HCDR3, and a light chain variable region having a LCDR1, LCDR2, and LCDR3, wherein the HCDR1, HCDR2, and HCDR3 comprises an amino acid sequence of SEQ ID NOS: 16999, 9819, and 4224, respectively and the LCDR1, LCDR2, and LCDR3 comprises an amino acid sequence of SEQ ID NOS: 15639, 9480, and 12707, respectively.

[0255] The disclosure describes an antibody, antigen binding fragment, or polypeptide comprising a heavy chain variable region having a HCDR1, HCDR2, and HCDR3, and a light chain variable region having a LCDR1, LCDR2, and LCDR3, wherein the HCDR1, HCDR2, and HCDR3 comprises an amino acid sequence of SEQ ID NOS: 10942, 18424, and 4491, respectively and the LCDR1, LCDR2, and LCDR3 comprises an amino acid sequence of SEQ ID NOS:16131, 9477, and 12533, respectively.

[0256] The disclosure describes an antibody, antigen binding fragment, or polypeptide comprising a heavy chain variable region having a HCDR1, HCDR2, and HCDR3, and a light chain variable region having a LCDR1, LCDR2, and LCDR3, wherein the HCDR1, HCDR2, and HCDR3 comprises an amino acid sequence of SEQ ID NOS: 17443, 17809, and 6109, respectively and the LCDR1, LCDR2, and LCDR3 comprises an amino acid sequence of SEQ ID NOS: 16322, 3982, and 12957, respectively.

[0257] The disclosure describes an antibody, antigen binding fragment, or polypeptide comprising a heavy chain variable region having a HCDR1, HCDR2, and HCDR3, and a light chain variable region having a LCDR1, LCDR2, and LCDR3, wherein the HCDR1, HCDR2, and HCDR3 comprises an amino acid sequence of SEQ ID NOS:17441, 18371, and 10177, respectively and the LCDR1, LCDR2, and LCDR3 comprises an amino acid sequence of SEQ ID NOS: 15864, 9490, and 12502, respectively.

[0258] The disclosure describes an antibody, antigen binding fragment, or polypeptide comprising a heavy chain variable region having a HCDR1, HCDR2, and HCDR3, and a light chain variable region having a LCDR1, LCDR2, and LCDR3, wherein the HCDR1, HCDR2, and HCDR3 comprises an amino acid sequence of SEQ ID NOS:11623, 9707, and 10489, respectively and the LCDR1, LCDR2, and LCDR3 comprises an amino acid sequence of SEQ ID NOS: 18258, 9503, and 12749, respectively.

[0259] The disclosure describes an antibody, antigen binding fragment, or polypeptide comprising a heavy chain variable region having a HCDR1, HCDR2, and HCDR3, and a light chain variable region having a LCDR1, LCDR2, and LCDR3, wherein the HCDR1, HCDR2, and HCDR3 comprises an amino acid sequence of SEQ ID NOS:17263, 10002, and 10203, respectively and the LCDR1, LCDR2, and LCDR3 comprises an amino acid sequence of SEQ ID NOS:16057, 9494, and 12664, respectively.

[0260] The disclosure describes an antibody, antigen binding fragment, or polypeptide comprising a heavy chain variable region having a HCDR1, HCDR2, and HCDR3, and a light chain variable region having a LCDR1, LCDR2, and LCDR3, wherein the HCDR1, HCDR2, and HCDR3 comprises an amino acid sequence of SEQ ID NOS:16571, 9733, and 10202, respectively and the LCDR1, LCDR2, and LCDR3 comprises an amino acid sequence of SEQ ID NOS:15982, 9451, and 12671, respectively.

[0261] The disclosure describes an antibody, antigen binding fragment, or polypeptide comprising a heavy chain variable region having a HCDR1, HCDR2, and HCDR3, and a light chain variable region having a LCDR1, LCDR2, and LCDR3, wherein the HCDR1, HCDR2, and HCDR3 comprises an amino acid sequence of SEQ ID NOS: 10942, 18387, and 4505, respectively and the LCDR1, LCDR2, and LCDR3 comprises an amino acid sequence of SEQ ID NOS: 16130, 6616, and 12491, respectively.

[0262] The disclosure describes an antibody, antigen binding fragment, or polypeptide comprising a heavy chain variable region having a HCDR1, HCDR2, and HCDR3, and a light chain variable region having a LCDR1, LCDR2, and LCDR3, wherein the HCDR1, HCDR2, and HCDR3 comprises an amino acid sequence of SEQ ID NOS:17263, 9776, and 18216, respectively and the LCDR1, LCDR2, and LCDR3 comprises an amino acid sequence of SEQ ID NOS:15890, 10727, and 12844, respectively.

[0263] The disclosure describes an antibody, antigen binding fragment, or polypeptide comprising a heavy chain variable region having a HCDR1, HCDR2, and HCDR3, and a light chain variable region having a LCDR1, LCDR2, and LCDR3, wherein the HCDR1, HCDR2, and HCDR3 comprises an amino acid sequence of SEQ ID NOS: 17282, 18392, and 7880, respectively and the LCDR1, LCDR2, and LCDR3 comprises an amino acid sequence of SEQ ID NOS: 16005, 9494, and 12680, respectively.

[0264] The disclosure describes an antibody, antigen binding fragment, or polypeptide comprising a heavy chain variable region having a HCDR1, HCDR2, and HCDR3, and a light chain variable region having a LCDR1, LCDR2, and LCDR3, wherein the HCDR1, HCDR2, and HCDR3 comprises an amino acid sequence of SEQ ID NOS: 17618, 18335, and 9620, respectively and the LCDR1, LCDR2, and LCDR3 comprises an amino acid sequence of SEQ ID NOS: 15746, 3964, and 11104, respectively.

[0265] The disclosure describes an antibody, antigen binding fragment, or polypeptide comprising a heavy chain variable region having a HCDR1, HCDR2, and HCDR3, and a light chain variable region having a LCDR1, LCDR2, and LCDR3, wherein the HCDR1, HCDR2, and HCDR3 comprises an amino acid sequence of SEQ ID NOS:11391, 10767, and 17038, respectively and the LCDR1, LCDR2, and LCDR3 comprises an amino acid sequence of SEQ ID NOS: 16003, 9503, and 12600, respectively.

[0266] The disclosure describes an antibody, antigen binding fragment, or polypeptide comprising a heavy chain variable region having a HCDR1, HCDR2, and HCDR3, and a light chain variable region having a LCDR1, LCDR2, and LCDR3, wherein the HCDR1, HCDR2, and HCDR3 comprises an amino acid sequence of SEQ ID NOS: 17848, 10544, and 9600, respectively and the LCDR1, LCDR2, and LCDR3 comprises an amino acid sequence of SEQ ID NOS:17966, 9261, and 4371, respectively.

[0267] The disclosure describes an antibody, antigen binding fragment, or polypeptide comprising a heavy chain variable region having a HCDR1, HCDR2, and HCDR3, and a light chain variable region having a LCDR1, LCDR2, and LCDR3, wherein the HCDR1, HCDR2, and HCDR3 comprises an amino acid sequence of SEQ ID NOS:17141, 16950, and 11723, respectively and the LCDR1, LCDR2, and LCDR3 comprises an amino acid sequence of SEQ ID NOS:17957, 9275, and 10612, respectively.

[0268] The disclosure describes an antibody, antigen binding fragment, or polypeptide comprising a heavy chain variable region having a HCDR1, HCDR2, and HCDR3, and a light chain variable region having a LCDR1, LCDR2, and LCDR3, wherein the HCDR1, HCDR2, and HCDR3 comprises an amino acid sequence of SEQ ID NOS:16822, 17598, and 18230, respectively and the LCDR1, LCDR2, and LCDR3 comprises an amino acid sequence of SEQ ID NOS:16118, 3950, and 12487, respectively.

[0269] The disclosure describes an antibody, antigen binding fragment, or polypeptide comprising a heavy chain variable region having a HCDR1, HCDR2, and HCDR3, and a light chain variable region having a LCDR1, LCDR2, and LCDR3, wherein the HCDR1, HCDR2, and HCDR3 comprises an amino acid sequence of SEQ ID NOS: 16822, 16952, and 6193, respectively and the LCDR1, LCDR2, and LCDR3 comprises an amino acid sequence of SEQ ID NOS:15890, 10727, and 12840, respectively.

[0270] The disclosure describes an antibody, antigen binding fragment, or polypeptide comprising a heavy chain variable region having a HCDR1, HCDR2, and HCDR3, and a light chain variable region having a LCDR1, LCDR2, and LCDR3, wherein the HCDR1, HCDR2, and HCDR3 comprises an amino acid sequence of SEQ ID NOS: 17857, 18591, and 6329, respectively and the LCDR1, LCDR2, and LCDR3 comprises an amino acid sequence of SEQ ID NOS: 15594, 9490, and 12482, respectively. having a LCDR1, LCDR2, and LCDR3, wherein the HCDR1, HCDR2, and HCDR3 comprises an amino acid sequence of SEQ ID NOS:17263, 9814, and 17002, respectively and the LCDR1, LCDR2, and LCDR3 comprises an amino acid sequence of SEQ ID NOS:9484, 4432, and 12658, respectively.

[0271] The disclosure describes an antibody, antigen binding fragment, or polypeptide comprising a heavy chain variable region having a HCDR1, HCDR2, and HCDR3, and a light chain variable region having a LCDR1, LCDR2, and LCDR3, wherein the HCDR1, HCDR2, and HCDR3 comprises an amino acid sequence of SEQ ID NOS:11391, 10767, and 17038, respectively and the LCDR1, LCDR2, and LCDR3 comprises an amino acid sequence of SEQ ID NOS: 16003, 9503, and 12703, respectively.

[0272] The disclosure describes an antibody, antigen binding fragment, or polypeptide comprising a heavy chain variable region having a HCDR1, HCDR2, and HCDR3, and a light chain variable region having a LCDR1, LCDR2, and LCDR3, wherein the HCDR1, HCDR2, and HCDR3 comprises an amino acid sequence of SEQ ID NOS: 11382, 10539, and 6627, respectively and the LCDR1, LCDR2, and LCDR3 comprises an amino acid sequence of SEQ ID NOS: 15853, 3982, and 12510, respectively.

[0273] The disclosure describes an antibody, antigen binding fragment, or polypeptide comprising a heavy chain variable region having a HCDR1, HCDR2, and HCDR3, and a light chain variable region having a LCDR1, LCDR2, and LCDR3, wherein the HCDR1, HCDR2, and HCDR3 comprises an amino acid sequence of SEQ ID NOS: 17890, 9388, and 7903, respectively and the LCDR1, LCDR2, and LCDR3 comprises an amino acid sequence of SEQ ID NOS:15966, 16560, and 12508, respectively.

[0274] The disclosure describes an antibody, antigen binding fragment, or polypeptide comprising a heavy chain variable region having a HCDR1, HCDR2, and HCDR3, and a light chain variable region having a LCDR1, LCDR2, and LCDR3, wherein the HCDR1, HCDR2, and HCDR3 comprises an amino acid sequence of SEQ ID NOS:17274, 17755, and 10289, respectively and the LCDR1, LCDR2, and LCDR3 comprises an amino acid sequence of SEQ ID NOS: 16036, 9503, and 12725, respectively.

[0275] The disclosure describes an antibody, antigen binding fragment, or polypeptide comprising a heavy chain variable region having a HCDR1, HCDR2, and HCDR3, and a light chain variable region having a LCDR1, LCDR2, and LCDR3, wherein the HCDR1, HCDR2, and HCDR3 comprises an amino acid sequence of SEQ ID NOS: 11416, 17242, and 6670, respectively and the LCDR1, LCDR2, and LCDR3 comprises an amino acid sequence of SEQ ID NOS: 16643, 6634, and 9426, respectively.

[0276] The disclosure describes an antibody, antigen binding fragment, or polypeptide comprising a heavy chain variable region having a HCDR1, HCDR2, and HCDR3, and a light chain variable region having a LCDR1, LCDR2, and LCDR3, wherein the HCDR1, HCDR2, and HCDR3 comprises an amino acid sequence of SEQ ID NOS:16777, 10412, and 11892, respectively and the LCDR1, LCDR2, and LCDR3 comprises an amino acid sequence of SEQ ID NOS: 15893, 9475, and 12493, respectively.

[0277] The disclosure describes an antibody, antigen binding fragment, or polypeptide comprising a heavy chain variable region having a HCDR1, HCDR2, and HCDR3, and a light chain variable region having a LCDR1, LCDR2, and LCDR3, wherein the HCDR1, HCDR2, and HCDR3 comprises an amino acid sequence of SEQ ID NOS: 16821, 11537, and 6469, respectively and the LCDR1, LCDR2, and LCDR3 comprises an amino acid sequence of SEQ ID NOS: 15827, 9490, and 12492, respectively.

[0278] The disclosure describes an antibody, antigen binding fragment, or polypeptide comprising a heavy chain variable region having a HCDR1, HCDR2, and HCDR3, and a light chain variable region having a LCDR1, LCDR2, and LCDR3, wherein the HCDR1, HCDR2, and HCDR3 comprises an amino acid sequence of SEQ ID NOS: 17443, 17809, and 4210, respectively and the LCDR1, LCDR2, and LCDR3 comprises an amino acid sequence of SEQ ID NOS:16408, 10987, and 11206, respectively.

[0279] The disclosure describes an antibody, antigen binding fragment, or polypeptide comprising a heavy chain variable region having a HCDR1, HCDR2, and HCDR3, and a light chain variable region having a LCDR1, LCDR2, and LCDR3, wherein the HCDR1, HCDR2, and HCDR3 comprises an amino acid sequence of SEQ ID NOS:17644, 10571, and 16207, respectively and the LCDR1, LCDR2, and LCDR3 comprises an amino acid sequence of SEQ ID NOS:15893, 3961, and 12480, respectively.

[0280] The disclosure describes an antibody, antigen binding fragment, or polypeptide comprising a heavy chain variable region having a HCDR1, HCDR2, and HCDR3, and a light chain variable region having a LCDR1, LCDR2, and LCDR3, wherein the HCDR1, HCDR2, and HCDR3 comprises an amino acid sequence of SEQ ID NOS: 10937, 16865, and 4051, respectively and the LCDR1, LCDR2, and LCDR3 comprises an amino acid sequence of SEQ ID NOS: 16036, 9503, and 12775, respectively.

[0281] The disclosure describes an antibody, antigen binding fragment, or polypeptide comprising a heavy chain variable region having a HCDR1, HCDR2, and HCDR3, and a light chain variable region having a LCDR1, LCDR2, and LCDR3, wherein the HCDR1, HCDR2, and HCDR3 comprises an amino acid sequence of SEQ ID NOS:11632, 18005, and 10192, respectively and the LCDR1, LCDR2, and LCDR3 comprises an amino acid sequence of SEQ ID NOS: 16457, 3955, and 12405, respectively.

[0282] The disclosure describes an antibody, antigen binding fragment, or polypeptide comprising a heavy chain variable region having a HCDR1, HCDR2, and HCDR3, and a light chain variable region having a LCDR1, LCDR2, and LCDR3, wherein the HCDR1, HCDR2, and HCDR3 comprises an amino acid sequence of SEQ ID NOS:16987, 9913, and 17724, respectively and the LCDR1, LCDR2, and LCDR3 comprises an amino acid sequence of SEQ ID NOS: 16071, 9511, and 12723, respectively.

[0283] The disclosure describes an antibody, antigen binding fragment, or polypeptide comprising a heavy chain variable region having a HCDR1, HCDR2, and HCDR3, and a light chain variable region having a LCDR1, LCDR2, and LCDR3, wherein the HCDR1, HCDR2, and HCDR3 comprises an amino acid sequence of SEQ ID NOS:11373, 9800, and 9610, respectively and the LCDR1, LCDR2, and LCDR3 comprises an amino acid sequence of SEQ ID NOS: 15704, 9498, and 12305, respectively.

[0284] The disclosure describes an antibody, antigen binding fragment, or polypeptide comprising a heavy chain variable region having a HCDR1, HCDR2, and HCDR3, and a light chain variable region having a LCDR1, LCDR2, and LCDR3, wherein the HCDR1, HCDR2, and HCDR3 comprises an amino acid sequence of SEQ ID NOS:17535, 10571, and 11699, respectively and the LCDR1, LCDR2, and LCDR3 comprises an amino acid sequence of SEQ ID NOS:9633, 4467, and 15560, respectively.

[0285] The disclosure describes an antibody, antigen binding fragment, or polypeptide comprising a heavy chain variable region having a HCDR1, HCDR2, and HCDR3, and a light chain variable region having a LCDR1, LCDR2, and LCDR3, wherein the HCDR1, HCDR2, and HCDR3 comprises an amino acid sequence of SEQ ID NOS: 11670, 16894, and 6087, respectively and the LCDR1, LCDR2, and LCDR3 comprises an amino acid sequence of SEQ ID NOS: 16071, 9503, and 12867, respectively.

[0286] The disclosure describes an antibody, antigen binding fragment, or polypeptide comprising a heavy chain variable region having a HCDR1, HCDR2, and HCDR3, and a light chain variable region having a LCDR1, LCDR2, and LCDR3, wherein the HCDR1, HCDR2, and HCDR3 comprises an amino acid sequence of SEQ ID NOS:4494, 9373, and 7889, respectively and the LCDR1, LCDR2, and LCDR3 comprises an amino acid sequence of SEQ ID NOS: 15670, 3960, and 12830, respectively.

[0287] The disclosure describes an antibody, antigen binding fragment, or polypeptide comprising a heavy chain variable region having a HCDR1, HCDR2, and HCDR3, and a light chain variable region having a LCDR1, LCDR2, and LCDR3, wherein the HCDR1, HCDR2, and HCDR3 comprises an amino acid sequence of SEQ ID NOS:10367, 18323, and 16787, respectively and the LCDR1, LCDR2, and LCDR3 comprises an amino acid sequence of SEQ ID NOS: 15893, 3969, and 12524, respectively.

[0288] The disclosure describes an antibody, antigen binding fragment, or polypeptide comprising a heavy chain variable region having a HCDR1, HCDR2, and HCDR3, and a light chain variable region having a LCDR1, LCDR2, and LCDR3, wherein the HCDR1, HCDR2, and HCDR3 comprises an amino acid sequence of SEQ ID NOS: 10367, 18323, and 7895, respectively and the LCDR1, LCDR2, and LCDR3 comprises an amino acid sequence of SEQ ID NOS: 16061, 9494, and 12692, respectively.

[0289] The disclosure describes an antibody, antigen binding fragment, or polypeptide comprising a heavy chain variable region having a HCDR1, HCDR2, and HCDR3, and a light chain variable region having a LCDR1, LCDR2, and LCDR3, wherein the HCDR1, HCDR2, and HCDR3 comprises an amino acid sequence of SEQ ID NOS:17274, 4134, and 17879, respectively and the LCDR1, LCDR2, and LCDR3 comprises an amino acid sequence of SEQ ID NOS: 16763, 16329, and 4246, respectively. having a LCDR1, LCDR2, and LCDR3, wherein the HCDR1, HCDR2, and HCDR3 comprises an amino acid sequence of SEQ ID NOS:17600, 9805, and 6155, respectively and the LCDR1, LCDR2, and LCDR3 comprises an amino acid sequence of SEQ ID NOS: 15823, 3969, and 12528, respectively.

[0290] The disclosure describes an antibody, antigen binding fragment, or polypeptide comprising a heavy chain variable region having a HCDR1, HCDR2, and HCDR3, and a light chain variable region having a LCDR1, LCDR2, and LCDR3, wherein the HCDR1, HCDR2, and HCDR3 comprises an amino acid sequence of SEQ ID NOS:17263, 9988, and 10417, respectively and the LCDR1, LCDR2, and LCDR3 comprises an amino acid sequence of SEQ ID NOS: 15704, 9490, and 12832, respectively.

[0291] The disclosure describes an antibody, antigen binding fragment, or polypeptide comprising a heavy chain variable region having a HCDR1, HCDR2, and HCDR3, and a light chain variable region having a LCDR1, LCDR2, and LCDR3, wherein the HCDR1, HCDR2, and HCDR3 comprises an amino acid sequence of SEQ ID NOS:6571, 4327, and 6153, respectively and the LCDR1, LCDR2, and LCDR3 comprises an amino acid sequence of SEQ ID NOS:10907, 18266, and 12921, respectively.

[0292] The disclosure describes an antibody, antigen binding fragment, or polypeptide comprising a heavy chain variable region having a HCDR1, HCDR2, and HCDR3, and a light chain variable region having a LCDR1, LCDR2, and LCDR3, wherein the HCDR1, HCDR2, and HCDR3 comprises an amino acid sequence of SEQ ID NOS:16800, 9982, and 10379, respectively and the LCDR1, LCDR2, and LCDR3 comprises an amino acid sequence of SEQ ID NOS: 15772, 9494, and 10465, respectively.

[0293] The disclosure describes an antibody, antigen binding fragment, or polypeptide comprising a heavy chain variable region having a HCDR1, HCDR2, and HCDR3, and a light chain variable region having a LCDR1, LCDR2, and LCDR3, wherein the HCDR1, HCDR2, and HCDR3 comprises an amino acid sequence of SEQ ID NOS:16805, 9756, and 17058, respectively and the LCDR1, LCDR2, and LCDR3 comprises an amino acid sequence of SEQ ID NOS: 15701, 3982, and 12095, respectively.

[0294] The disclosure describes an antibody, antigen binding fragment, or polypeptide comprising a heavy chain variable region having a HCDR1, HCDR2, and HCDR3, and a light chain variable region having a LCDR1, LCDR2, and LCDR3, wherein the HCDR1, HCDR2, and HCDR3 comprises an amino acid sequence of SEQ ID NOS:10757, 9851, and 4601, respectively and the LCDR1, LCDR2, and LCDR3 comprises an amino acid sequence of SEQ ID NOS:16020, 10262, and 12560, respectively.

[0295] The disclosure describes an antibody, antigen binding fragment, or polypeptide comprising a heavy chain variable region having a HCDR1, HCDR2, and HCDR3, and a light chain variable region having a LCDR1, LCDR2, and LCDR3, wherein the HCDR1, HCDR2, and HCDR3 comprises an amino acid sequence of SEQ ID NOS: 17610, 18427, and 6746, respectively and the LCDR1, LCDR2, and LCDR3 comprises an amino acid sequence of SEQ ID NOS: 15812, 9490, and 10455, respectively.

[0296] The disclosure describes an antibody, antigen binding fragment, or polypeptide comprising a heavy chain variable region having a HCDR1, HCDR2, and HCDR3, and a light chain variable region having a LCDR1, LCDR2, and LCDR3, wherein the HCDR1, HCDR2, and HCDR3 comprises an amino acid sequence of SEQ ID NOS: 10752, 18388, and 4505, respectively and the LCDR1, LCDR2, and LCDR3 comprises an amino acid sequence of SEQ ID NOS: 16130, 6616, and 12534, respectively.

[0297] The disclosure describes an antibody, antigen binding fragment, or polypeptide comprising a heavy chain variable region having a HCDR1, HCDR2, and HCDR3, and a light chain variable region having a LCDR1, LCDR2, and LCDR3, wherein the HCDR1, HCDR2, and HCDR3 comprises an amino acid sequence of SEQ ID NOS:6507, 9973, and 5963, respectively and the LCDR1, LCDR2, and LCDR3 comprises an amino acid sequence of SEQ ID NOS: 17959, 9261, and 17160, respectively.

[0298] The disclosure describes an antibody, antigen binding fragment, or polypeptide comprising a heavy chain variable region having a HCDR1, HCDR2, and HCDR3, and a light chain variable region having a LCDR1, LCDR2, and LCDR3, wherein the HCDR1, HCDR2, and HCDR3 comprises an amino acid sequence of SEQ ID NOS:17558, 11038, and 11123, respectively and the LCDR1, LCDR2, and LCDR3 comprises an amino acid sequence of SEQ ID NOS:11774, 4420, and 12563, respectively.

[0299] The disclosure describes an antibody, antigen binding fragment, or polypeptide comprising a heavy chain variable region having a HCDR1, HCDR2, and HCDR3, and a light chain variable region having a LCDR1, LCDR2, and LCDR3, wherein the HCDR1, HCDR2, and HCDR3 comprises an amino acid sequence of SEQ ID NOS: 10943, 9934, and 4223, respectively and the LCDR1, LCDR2, and LCDR3 comprises an amino acid sequence of SEQ ID NOS: 15609, 4432, and 12641, respectively.

[0300] The disclosure describes an antibody, antigen binding fragment, or polypeptide comprising a heavy chain variable region having a HCDR1, HCDR2, and HCDR3, and a light chain variable region having a LCDR1, LCDR2, and LCDR3, wherein the HCDR1, HCDR2, and HCDR3 comprises an amino acid sequence of SEQ ID NOS: 11691, 18456, and 6329, respectively and the LCDR1, LCDR2, and LCDR3 comprises an amino acid sequence of SEQ ID NOS: 15595, 3966, and 12489, respectively.

[0301] The disclosure describes an antibody, antigen binding fragment, or polypeptide comprising a heavy chain variable region having a HCDR1, HCDR2, and HCDR3, and a light chain variable region having a LCDR1, LCDR2, and LCDR3, wherein the HCDR1, HCDR2, and HCDR3 comprises an amino acid sequence of SEQ ID NOS: 11644, 16882, and 5928, respectively and the LCDR1, LCDR2, and LCDR3 comprises an amino acid sequence of SEQ ID NOS: 15986, 4425, and 12409, respectively.

[0302] The disclosure describes an antibody, antigen binding fragment, or polypeptide comprising a heavy chain variable region having a HCDR1, HCDR2, and HCDR3, and a light chain variable region having a LCDR1, LCDR2, and LCDR3, wherein the HCDR1, HCDR2, and HCDR3 comprises an amino acid sequence of SEQ ID NOS:16989, 9750, and 16688, respectively and the LCDR1, LCDR2, and LCDR3 comprises an amino acid sequence of SEQ ID NOS: 15691, 3953, and 11093, respectively.

[0303] The disclosure describes an antibody, antigen binding fragment, or polypeptide comprising a heavy chain variable region having a HCDR1, HCDR2, and HCDR3, and a light chain variable region having a LCDR1, LCDR2, and LCDR3, wherein the HCDR1, HCDR2, and HCDR3 comprises an amino acid sequence of SEQ ID NOS: 17258, 9810, and 6306, respectively and the LCDR1, LCDR2, and LCDR3 comprises an amino acid sequence of SEQ ID NOS: 15764, 3953, and 12550, respectively.

[0304] The disclosure describes an antibody, antigen binding fragment, or polypeptide comprising a heavy chain variable region having a HCDR1, HCDR2, and HCDR3, and a light chain variable region having a LCDR1, LCDR2, and LCDR3, wherein the HCDR1, HCDR2, and HCDR3 comprises an amino acid sequence of SEQ ID NOS:17442, 9853, and 6161, respectively and the LCDR1, LCDR2, and LCDR3 comprises an amino acid sequence of SEQ ID NOS: 16055, 9494, and 12709, respectively.

[0305] The disclosure describes an antibody, antigen binding fragment, or polypeptide comprising a heavy chain variable region having a HCDR1, HCDR2, and HCDR3, and a light chain variable region having a LCDR1, LCDR2, and LCDR3, wherein the HCDR1, HCDR2, and HCDR3 comprises an amino acid sequence of SEQ ID NOS:11692, 6789, and 10969, respectively and the LCDR1, LCDR2, and LCDR3 comprises an amino acid sequence of SEQ ID NOS: 16716, 5991, and 10282, respectively.

[0306] The disclosure describes an antibody, antigen binding fragment, or polypeptide comprising a heavy chain variable region having a HCDR1, HCDR2, and HCDR3, and a light chain variable region having a LCDR1, LCDR2, and LCDR3, wherein the HCDR1, HCDR2, and HCDR3 comprises an amino acid sequence of SEQ ID NOS:6532, 11065, and 4167, respectively and the LCDR1, LCDR2, and LCDR3 comprises an amino acid sequence of SEQ ID NOS: 16706, 11378, and 4289, respectively.

[0307] The disclosure describes an antibody, antigen binding fragment, or polypeptide comprising a heavy chain variable region having a HCDR1, HCDR2, and HCDR3, and a light chain variable region having a LCDR1, LCDR2, and LCDR3, wherein the HCDR1, HCDR2, and HCDR3 comprises an amino acid sequence of SEQ ID NOS:17578, 18036, and 16201, respectively and the LCDR1, LCDR2, and LCDR3 comprises an amino acid sequence of SEQ ID NOS: 15930, 10225, and 11979, respectively.

[0308] The disclosure describes an antibody, antigen binding fragment, or polypeptide comprising a heavy chain variable region having a HCDR1, HCDR2, and HCDR3, and a light chain variable region having a LCDR1, LCDR2, and LCDR3, wherein the HCDR1, HCDR2, and HCDR3 comprises an amino acid sequence of SEQ ID NOS:16769, 10324, and 18406, respectively and the LCDR1, LCDR2, and LCDR3 comprises an amino acid sequence of SEQ ID NOS: 15593, 10705, and 12022, respectively. having a LCDR1, LCDR2, and LCDR3, wherein the HCDR1, HCDR2, and HCDR3 comprises an amino acid sequence of SEQ ID NOS: 10775, 11034, and 4594, respectively and the LCDR1, LCDR2, and LCDR3 comprises an amino acid sequence of SEQ ID NOS: 11781, 4419, and 12345, respectively.

[0309] The disclosure describes an antibody, antigen binding fragment, or polypeptide comprising a heavy chain variable region having a HCDR1, HCDR2, and HCDR3, and a light chain variable region having a LCDR1, LCDR2, and LCDR3, wherein the HCDR1, HCDR2, and HCDR3 comprises an amino acid sequence of SEQ ID NOS:17473, 16236, and 16815, respectively and the LCDR1, LCDR2, and LCDR3 comprises an amino acid sequence of SEQ ID NOS: 15764, 3969, and 12513, respectively.

[0310] The disclosure describes an antibody, antigen binding fragment, or polypeptide comprising a heavy chain variable region having a HCDR1, HCDR2, and HCDR3, and a light chain variable region having a LCDR1, LCDR2, and LCDR3, wherein the HCDR1, HCDR2, and HCDR3 comprises an amino acid sequence of SEQ ID NOS:4321, 11500, and 6144, respectively and the LCDR1, LCDR2, and LCDR3 comprises an amino acid sequence of SEQ ID NOS: 16137, 3952, and 12476, respectively.

[0311] The disclosure describes an antibody, antigen binding fragment, or polypeptide comprising a heavy chain variable region having a HCDR1, HCDR2, and HCDR3, and a light chain variable region having a LCDR1, LCDR2, and LCDR3, wherein the HCDR1, HCDR2, and HCDR3 comprises an amino acid sequence of SEQ ID NOS:6187, 18562, and 11143, respectively and the LCDR1, LCDR2, and LCDR3 comprises an amino acid sequence of SEQ ID NOS: 15763, 9490, and 12526, respectively.

[0312] The disclosure describes an antibody, antigen binding fragment, or polypeptide comprising a heavy chain variable region having a HCDR1, HCDR2, and HCDR3, and a light chain variable region having a LCDR1, LCDR2, and LCDR3, wherein the HCDR1, HCDR2, and HCDR3 comprises an amino acid sequence of SEQ ID NOS: 16174, 16932, and 5908, respectively and the LCDR1, LCDR2, and LCDR3 comprises an amino acid sequence of SEQ ID NOS: 16092, 4417, and 10711, respectively.

[0313] The disclosure describes an antibody, antigen binding fragment, or polypeptide comprising a heavy chain variable region having a HCDR1, HCDR2, and HCDR3, and a light chain variable region having a LCDR1, LCDR2, and LCDR3, wherein the HCDR1, HCDR2, and HCDR3 comprises an amino acid sequence of SEQ ID NOS:11366, 16249, and 11418, respectively and the LCDR1, LCDR2, and LCDR3 comprises an amino acid sequence of SEQ ID NOS:16341, 10313, and 12548, respectively.

[0314] The disclosure describes an antibody, antigen binding fragment, or polypeptide comprising a heavy chain variable region having a HCDR1, HCDR2, and HCDR3, and a light chain variable region having a LCDR1, LCDR2, and LCDR3, wherein the HCDR1, HCDR2, and HCDR3 comprises an amino acid sequence of SEQ ID NOS:17126, 16955, and 10377, respectively and the LCDR1, LCDR2, and LCDR3 comprises an amino acid sequence of SEQ ID NOS: 17925, 10097, and 13570, respectively.

[0315] The disclosure describes an antibody, antigen binding fragment, or polypeptide comprising a heavy chain variable region having a HCDR1, HCDR2, and HCDR3, and a light chain variable region having a LCDR1, LCDR2, and LCDR3, wherein the HCDR1, HCDR2, and HCDR3 comprises an amino acid sequence of SEQ ID NOS: 17069, 4155, and 6552, respectively and the LCDR1, LCDR2, and LCDR3 comprises an amino acid sequence of SEQ ID NOS: 16037, 4425, and 10711, respectively.

[0316] The disclosure describes an antibody, antigen binding fragment, or polypeptide comprising a heavy chain variable region having a HCDR1, HCDR2, and HCDR3, and a light chain variable region having a LCDR1, LCDR2, and LCDR3, wherein the HCDR1, HCDR2, and HCDR3 comprises an amino acid sequence of SEQ ID NOS:16810, 4107, and 7891, respectively and the LCDR1, LCDR2, and LCDR3 comprises an amino acid sequence of SEQ ID NOS: 16045, 9503, and 12772, respectively.

[0317] The disclosure describes an antibody, antigen binding fragment, or polypeptide comprising a heavy chain variable region having a HCDR1, HCDR2, and HCDR3, and a light chain variable region having a LCDR1, LCDR2, and LCDR3, wherein the HCDR1, HCDR2, and HCDR3 comprises an amino acid sequence of SEQ ID NOS: 17648, 11515, and 6638, respectively and the LCDR1, LCDR2, and LCDR3 comprises an amino acid sequence of SEQ ID NOS: 16740, 11555, and 3990, respectively.

[0318] The disclosure describes an antibody, antigen binding fragment, or polypeptide comprising a heavy chain variable region having a HCDR1, HCDR2, and HCDR3, and a light chain variable region having a LCDR1, LCDR2, and LCDR3, wherein the HCDR1, HCDR2, and HCDR3 comprises an amino acid sequence of SEQ ID NOS:11633, 16868, and 18201, respectively and the LCDR1, LCDR2, and LCDR3 comprises an amino acid sequence of SEQ ID NOS: 16071, 9503, and 12775, respectively.

[0319] The disclosure describes an antibody, antigen binding fragment, or polypeptide comprising a heavy chain variable region having a HCDR1, HCDR2, and HCDR3, and a light chain variable region having a LCDR1, LCDR2, and LCDR3, wherein the HCDR1, HCDR2, and HCDR3 comprises an amino acid sequence of SEQ ID NOS: 11371, 16256, and 7910, respectively and the LCDR1, LCDR2, and LCDR3 comprises an amino acid sequence of SEQ ID NOS:11947, 10022, and 11593, respectively.

[0320] The disclosure describes an antibody, antigen binding fragment, or polypeptide comprising a heavy chain variable region having a HCDR1, HCDR2, and HCDR3, and a light chain variable region having a LCDR1, LCDR2, and LCDR3, wherein the HCDR1, HCDR2, and HCDR3 comprises an amino acid sequence of SEQ ID NOS:16194, 18034, and 17735, respectively and the LCDR1, LCDR2, and LCDR3 comprises an amino acid sequence of SEQ ID NOS: 17944, 6313, and 4360, respectively.

[0321] The disclosure describes an antibody, antigen binding fragment, or polypeptide comprising a heavy chain variable region having a HCDR1, HCDR2, and HCDR3, and a light chain variable region having a LCDR1, LCDR2, and LCDR3, wherein the HCDR1, HCDR2, and HCDR3 comprises an amino acid sequence of SEQ ID NOS:10115, 17214, and 10693, respectively and the LCDR1, LCDR2, and LCDR3 comprises an amino acid sequence of SEQ ID NOS: 15782, 3953, and 11983, respectively.

[0322] The disclosure describes an antibody, antigen binding fragment, or polypeptide comprising a heavy chain variable region having a HCDR1, HCDR2, and HCDR3, and a light chain variable region having a LCDR1, LCDR2, and LCDR3, wherein the HCDR1, HCDR2, and HCDR3 comprises an amino acid sequence of SEQ ID NOS:16823, 18561, and 15608, respectively and the LCDR1, LCDR2, and LCDR3 comprises an amino acid sequence of SEQ ID NOS: 16046, 9503, and 12605, respectively.

[0323] The disclosure describes an antibody, antigen binding fragment, or polypeptide comprising a heavy chain variable region having a HCDR1, HCDR2, and HCDR3, and a light chain variable region having a LCDR1, LCDR2, and LCDR3, wherein the HCDR1, HCDR2, and HCDR3 comprises an amino acid sequence of SEQ ID NOS:16619, 9369, and 17450, respectively and the LCDR1, LCDR2, and LCDR3 comprises an amino acid sequence of SEQ ID NOS: 17959, 6312, and 4353, respectively.

[0324] The disclosure describes an antibody, antigen binding fragment, or polypeptide comprising a heavy chain variable region having a HCDR1, HCDR2, and HCDR3, and a light chain variable region having a LCDR1, LCDR2, and LCDR3, wherein the HCDR1, HCDR2, and HCDR3 comprises an amino acid sequence of SEQ ID NOS: 17628, 16899, and 4615, respectively and the LCDR1, LCDR2, and LCDR3 comprises an amino acid sequence of SEQ ID NOS:15895, 10733, and 12736, respectively.

[0325] The disclosure describes an antibody, antigen binding fragment, or polypeptide comprising a heavy chain variable region having a HCDR1, HCDR2, and HCDR3, and a light chain variable region having a LCDR1, LCDR2, and LCDR3, wherein the HCDR1, HCDR2, and HCDR3 comprises an amino acid sequence of SEQ ID NOS:17534, 17818, and 16495, respectively and the LCDR1, LCDR2, and LCDR3 comprises an amino acid sequence of SEQ ID NOS: 15993, 4425, and 11923, respectively.

[0326] The disclosure describes an antibody, antigen binding fragment, or polypeptide comprising a heavy chain variable region having a HCDR1, HCDR2, and HCDR3, and a light chain variable region having a LCDR1, LCDR2, and LCDR3, wherein the HCDR1, HCDR2, and HCDR3 comprises an amino acid sequence of SEQ ID NOS:17270, 17769, and 10198, respectively and the LCDR1, LCDR2, and LCDR3 comprises an amino acid sequence of SEQ ID NOS: 17949, 6312, and 4377, respectively.

[0327] The disclosure describes an antibody, antigen binding fragment, or polypeptide comprising a heavy chain variable region having a HCDR1, HCDR2, and HCDR3, and a light chain variable region having a LCDR1, LCDR2, and LCDR3, wherein the HCDR1, HCDR2, and HCDR3 comprises an amino acid sequence of SEQ ID NOS:10179, 17213, and 10679, respectively and the LCDR1, LCDR2, and LCDR3 comprises an amino acid sequence of SEQ ID NOS:16487, 3953, and 15591, respectively. having a LCDR1, LCDR2, and LCDR3, wherein the HCDR1, HCDR2, and HCDR3 comprises an amino acid sequence of SEQ ID NOS:17543, 10414, and 18420, respectively and the LCDR1, LCDR2, and LCDR3 comprises an amino acid sequence of SEQ ID NOS:16407, 11166, and 11212, respectively.

[0328] The disclosure describes an antibody, antigen binding fragment, or polypeptide comprising a heavy chain variable region having a HCDR1, HCDR2, and HCDR3, and a light chain variable region having a LCDR1, LCDR2, and LCDR3, wherein the HCDR1, HCDR2, and HCDR3 comprises an amino acid sequence of SEQ ID NOS:10349, 6785, and 10035, respectively and the LCDR1, LCDR2, and LCDR3 comprises an amino acid sequence of SEQ ID NOS:10815, 18272, and 12945, respectively.

[0329] The disclosure describes an antibody, antigen binding fragment, or polypeptide comprising a heavy chain variable region having a HCDR1, HCDR2, and HCDR3, and a light chain variable region having a LCDR1, LCDR2, and LCDR3, wherein the HCDR1, HCDR2, and HCDR3 comprises an amino acid sequence of SEQ ID NOS:11673, 10677, and 17677, respectively and the LCDR1, LCDR2, and LCDR3 comprises an amino acid sequence of SEQ ID NOS: 16413, 10987, and 11202, respectively.

[0330] The disclosure describes an antibody, antigen binding fragment, or polypeptide comprising a heavy chain variable region having a HCDR1, HCDR2, and HCDR3, and a light chain variable region having a LCDR1, LCDR2, and LCDR3, wherein the HCDR1, HCDR2, and HCDR3 comprises an amino acid sequence of SEQ ID NOS:0, 9791, and 4222, respectively and the LCDR1, LCDR2, and LCDR3 comprises an amino acid sequence of SEQ ID NOS:16123, 10737, and 11993, respectively.

[0331] The disclosure describes an antibody, antigen binding fragment, or polypeptide comprising a heavy chain variable region having a HCDR1, HCDR2, and HCDR3, and a light chain variable region having a LCDR1, LCDR2, and LCDR3, wherein the HCDR1, HCDR2, and HCDR3 comprises an amino acid sequence of SEQ ID NOS:17991, 10571, and 15607, respectively and the LCDR1, LCDR2, and LCDR3 comprises an amino acid sequence of SEQ ID NOS:16669, 6628, and 11888, respectively.

[0332] The disclosure describes an antibody, antigen binding fragment, or polypeptide comprising a heavy chain variable region having a HCDR1, HCDR2, and HCDR3, and a light chain variable region having a LCDR1, LCDR2, and LCDR3, wherein the HCDR1, HCDR2, and HCDR3 comprises an amino acid sequence of SEQ ID NOS:17991, 10568, and 15607, respectively and the LCDR1, LCDR2, and LCDR3 comprises an amino acid sequence of SEQ ID NOS:16669, 6628, and 11888, respectively.

[0333] The disclosure describes an antibody, antigen binding fragment, or polypeptide comprising a heavy chain variable region having a HCDR1, HCDR2, and HCDR3, and a light chain variable region having a LCDR1, LCDR2, and LCDR3, wherein the HCDR1, HCDR2, and HCDR3 comprises an amino acid sequence of SEQ ID NOS: 10367, 18323, and 7804, respectively and the LCDR1, LCDR2, and LCDR3 comprises an amino acid sequence of SEQ ID NOS:15816, 10727, and 12823, respectively.

[0334] The disclosure describes an antibody, antigen binding fragment, or polypeptide comprising a heavy chain variable region having a HCDR1, HCDR2, and HCDR3, and a light chain variable region having a LCDR1, LCDR2, and LCDR3, wherein the HCDR1, HCDR2, and HCDR3 comprises an amino acid sequence of SEQ ID NOS:10163, 18559, and 16507, respectively and the LCDR1, LCDR2, and LCDR3 comprises an amino acid sequence of SEQ ID NOS: 16041, 4436, and 12999, respectively.

[0335] The disclosure describes an antibody, antigen binding fragment, or polypeptide comprising a heavy chain variable region having a HCDR1, HCDR2, and HCDR3, and a light chain variable region having a LCDR1, LCDR2, and LCDR3, wherein the HCDR1, HCDR2, and HCDR3 comprises an amino acid sequence of SEQ ID NOS:10187, 9992, and 10143, respectively and the LCDR1, LCDR2, and LCDR3 comprises an amino acid sequence of SEQ ID NOS: 16049, 9494, and 12671, respectively.

[0336] The disclosure describes an antibody, antigen binding fragment, or polypeptide comprising a heavy chain variable region having a HCDR1, HCDR2, and HCDR3, and a light chain variable region having a LCDR1, LCDR2, and LCDR3, wherein the HCDR1, HCDR2, and HCDR3 comprises an amino acid sequence of SEQ ID NOS:16547, 10503, and 10259, respectively and the LCDR1, LCDR2, and LCDR3 comprises an amino acid sequence of SEQ ID NOS:16408, 10987, and 11343, respectively.

[0337] The disclosure describes an antibody, antigen binding fragment, or polypeptide comprising a heavy chain variable region having a HCDR1, HCDR2, and HCDR3, and a light chain variable region having a LCDR1, LCDR2, and LCDR3, wherein the HCDR1, HCDR2, and HCDR3 comprises an amino acid sequence of SEQ ID NOS:17261, 9771, and 16532, respectively and the LCDR1, LCDR2, and LCDR3 comprises an amino acid sequence of SEQ ID NOS: 16067, 4417, and 10713, respectively.

[0338] The disclosure describes an antibody, antigen binding fragment, or polypeptide comprising a heavy chain variable region having a HCDR1, HCDR2, and HCDR3, and a light chain variable region having a LCDR1, LCDR2, and LCDR3, wherein the HCDR1, HCDR2, and HCDR3 comprises an amino acid sequence of SEQ ID NOS:6507, 9961, and 4568, respectively and the LCDR1, LCDR2, and LCDR3 comprises an amino acid sequence of SEQ ID NOS: 16742, 16586, and 4287, respectively.

[0339] The disclosure describes an antibody, antigen binding fragment, or polypeptide comprising a heavy chain variable region having a HCDR1, HCDR2, and HCDR3, and a light chain variable region having a LCDR1, LCDR2, and LCDR3, wherein the HCDR1, HCDR2, and HCDR3 comprises an amino acid sequence of SEQ ID NOS: 17451, 9994, and 7902, respectively and the LCDR1, LCDR2, and LCDR3 comprises an amino acid sequence of SEQ ID NOS:15939, 16562, and 12650, respectively.

[0340] The disclosure describes an antibody, antigen binding fragment, or polypeptide comprising a heavy chain variable region having a HCDR1, HCDR2, and HCDR3, and a light chain variable region having a LCDR1, LCDR2, and LCDR3, wherein the HCDR1, HCDR2, and HCDR3 comprises an amino acid sequence of SEQ ID NOS: 11647, 9776, and 5894, respectively and the LCDR1, LCDR2, and LCDR3 comprises an amino acid sequence of SEQ ID NOS: 16045, 9503, and 12772, respectively.

[0341] The disclosure describes an antibody, antigen binding fragment, or polypeptide comprising a heavy chain variable region having a HCDR1, HCDR2, and HCDR3, and a light chain variable region having a LCDR1, LCDR2, and LCDR3, wherein the HCDR1, HCDR2, and HCDR3 comprises an amino acid sequence of SEQ ID NOS:17274, 18007, and 6081, respectively and the LCDR1, LCDR2, and LCDR3 comprises an amino acid sequence of SEQ ID NOS: 16045, 9494, and 12775, respectively.

[0342] The disclosure describes an antibody, antigen binding fragment, or polypeptide comprising a heavy chain variable region having a HCDR1, HCDR2, and HCDR3, and a light chain variable region having a LCDR1, LCDR2, and LCDR3, wherein the HCDR1, HCDR2, and HCDR3 comprises an amino acid sequence of SEQ ID NOS:17634, 17729, and 10154, respectively and the LCDR1, LCDR2, and LCDR3 comprises an amino acid sequence of SEQ ID NOS:10890, 18275, and 12917, respectively.

[0343] The disclosure describes an antibody, antigen binding fragment, or polypeptide comprising a heavy chain variable region having a HCDR1, HCDR2, and HCDR3, and a light chain variable region having a LCDR1, LCDR2, and LCDR3, wherein the HCDR1, HCDR2, and HCDR3 comprises an amino acid sequence of SEQ ID NOS: 16673, 18586, and 6030, respectively and the LCDR1, LCDR2, and LCDR3 comprises an amino acid sequence of SEQ ID NOS: 11789, 4420, and 12579, respectively.

[0344] The disclosure describes an antibody, antigen binding fragment, or polypeptide comprising a heavy chain variable region having a HCDR1, HCDR2, and HCDR3, and a light chain variable region having a LCDR1, LCDR2, and LCDR3, wherein the HCDR1, HCDR2, and HCDR3 comprises an amino acid sequence of SEQ ID NOS:17274, 4136, and 16283, respectively and the LCDR1, LCDR2, and LCDR3 comprises an amino acid sequence of SEQ ID NOS: 16045, 9503, and 12760, respectively.

[0345] The disclosure describes an antibody, antigen binding fragment, or polypeptide comprising a heavy chain variable region having a HCDR1, HCDR2, and HCDR3, and a light chain variable region having a LCDR1, LCDR2, and LCDR3, wherein the HCDR1, HCDR2, and HCDR3 comprises an amino acid sequence of SEQ ID NOS:10681, 16878, and 6463, respectively and the LCDR1, LCDR2, and LCDR3 comprises an amino acid sequence of SEQ ID NOS: 16761, 17586, and 4000, respectively.

[0346] The disclosure describes an antibody, antigen binding fragment, or polypeptide comprising a heavy chain variable region having a HCDR1, HCDR2, and HCDR3, and a light chain variable region having a LCDR1, LCDR2, and LCDR3, wherein the HCDR1, HCDR2, and HCDR3 comprises an amino acid sequence of SEQ ID NOS:10950, 11492, and 10609, respectively and the LCDR1, LCDR2, and LCDR3 comprises an amino acid sequence of SEQ ID NOS:10881, 18275, and 13007, respectively. having a LCDR1, LCDR2, and LCDR3, wherein the HCDR1, HCDR2, and HCDR3 comprises an amino acid sequence of SEQ ID NOS: 11669, 4139, and 4025, respectively and the LCDR1, LCDR2, and LCDR3 comprises an amino acid sequence of SEQ ID NOS: 16036, 9503, and 12772, respectively.

[0347] The disclosure describes an antibody, antigen binding fragment, or polypeptide comprising a heavy chain variable region having a HCDR1, HCDR2, and HCDR3, and a light chain variable region having a LCDR1, LCDR2, and LCDR3, wherein the HCDR1, HCDR2, and HCDR3 comprises an amino acid sequence of SEQ ID NOS:6531, 9381, and 5942, respectively and the LCDR1, LCDR2, and LCDR3 comprises an amino acid sequence of SEQ ID NOS: 15835, 3969, and 12536, respectively.

[0348] The disclosure describes an antibody, antigen binding fragment, or polypeptide comprising a heavy chain variable region having a HCDR1, HCDR2, and HCDR3, and a light chain variable region having a LCDR1, LCDR2, and LCDR3, wherein the HCDR1, HCDR2, and HCDR3 comprises an amino acid sequence of SEQ ID NOS:17535, 17816, and 10383, respectively and the LCDR1, LCDR2, and LCDR3 comprises an amino acid sequence of SEQ ID NOS: 17959, 10305, and 10237, respectively.

[0349] The disclosure describes an antibody, antigen binding fragment, or polypeptide comprising a heavy chain variable region having a HCDR1, HCDR2, and HCDR3, and a light chain variable region having a LCDR1, LCDR2, and LCDR3, wherein the HCDR1, HCDR2, and HCDR3 comprises an amino acid sequence of SEQ ID NOS: 11414, 18473, and 6124, respectively and the LCDR1, LCDR2, and LCDR3 comprises an amino acid sequence of SEQ ID NOS: 15873, 3969, and 12488, respectively.

[0350] The disclosure describes an antibody, antigen binding fragment, or polypeptide comprising a heavy chain variable region having a HCDR1, HCDR2, and HCDR3, and a light chain variable region having a LCDR1, LCDR2, and LCDR3, wherein the HCDR1, HCDR2, and HCDR3 comprises an amino acid sequence of SEQ ID NOS: 17842, 11488, and 6110, respectively and the LCDR1, LCDR2, and LCDR3 comprises an amino acid sequence of SEQ ID NOS: 16748, 17007, and 3999, respectively.

[0351] The disclosure describes an antibody, antigen binding fragment, or polypeptide comprising a heavy chain variable region having a HCDR1, HCDR2, and HCDR3, and a light chain variable region having a LCDR1, LCDR2, and LCDR3, wherein the HCDR1, HCDR2, and HCDR3 comprises an amino acid sequence of SEQ ID NOS: 16570, 9758, and 9602, respectively and the LCDR1, LCDR2, and LCDR3 comprises an amino acid sequence of SEQ ID NOS: 15614, 9488, and 12626, respectively.

[0352] The disclosure describes an antibody, antigen binding fragment, or polypeptide comprising a heavy chain variable region having a HCDR1, HCDR2, and HCDR3, and a light chain variable region having a LCDR1, LCDR2, and LCDR3, wherein the HCDR1, HCDR2, and HCDR3 comprises an amino acid sequence of SEQ ID NOS:17259, 9762, and 10019, respectively and the LCDR1, LCDR2, and LCDR3 comprises an amino acid sequence of SEQ ID NOS: 16125, 9494, and 12654, respectively.

[0353] The disclosure describes an antibody, antigen binding fragment, or polypeptide comprising a heavy chain variable region having a HCDR1, HCDR2, and HCDR3, and a light chain variable region having a LCDR1, LCDR2, and LCDR3, wherein the HCDR1, HCDR2, and HCDR3 comprises an amino acid sequence of SEQ ID NOS:17649, 11495, and 11152, respectively and the LCDR1, LCDR2, and LCDR3 comprises an amino acid sequence of SEQ ID NOS:10853, 18259, and 10476, respectively.

[0354] The disclosure describes an antibody, antigen binding fragment, or polypeptide comprising a heavy chain variable region having a HCDR1, HCDR2, and HCDR3, and a light chain variable region having a LCDR1, LCDR2, and LCDR3, wherein the HCDR1, HCDR2, and HCDR3 comprises an amino acid sequence of SEQ ID NOS: 17067, 9760, and 9608, respectively and the LCDR1, LCDR2, and LCDR3 comprises an amino acid sequence of SEQ ID NOS:15951, 9494, and 12626, respectively.

[0355] The disclosure describes an antibody, antigen binding fragment, or polypeptide comprising a heavy chain variable region having a HCDR1, HCDR2, and HCDR3, and a light chain variable region having a LCDR1, LCDR2, and LCDR3, wherein the HCDR1, HCDR2, and HCDR3 comprises an amino acid sequence of SEQ ID NOS:6187, 18502, and 4193, respectively and the LCDR1, LCDR2, and LCDR3 comprises an amino acid sequence of SEQ ID NOS:17966, 9261, and 17164, respectively.

[0356] The disclosure describes an antibody, antigen binding fragment, or polypeptide comprising a heavy chain variable region having a HCDR1, HCDR2, and HCDR3, and a light chain variable region having a LCDR1, LCDR2, and LCDR3, wherein the HCDR1, HCDR2, and HCDR3 comprises an amino acid sequence of SEQ ID NOS:16991, 9852, and 10064, respectively and the LCDR1, LCDR2, and LCDR3 comprises an amino acid sequence of SEQ ID NOS: 16049, 9494, and 12671, respectively.

[0357] The disclosure describes an antibody, antigen binding fragment, or polypeptide comprising a heavy chain variable region having a HCDR1, HCDR2, and HCDR3, and a light chain variable region having a LCDR1, LCDR2, and LCDR3, wherein the HCDR1, HCDR2, and HCDR3 comprises an amino acid sequence of SEQ ID NOS:18042, 17826, and 10676, respectively and the LCDR1, LCDR2, and LCDR3 comprises an amino acid sequence of SEQ ID NOS: 17962, 6331, and 4356, respectively.

[0358] The disclosure describes an antibody, antigen binding fragment, or polypeptide comprising a heavy chain variable region having a HCDR1, HCDR2, and HCDR3, and a light chain variable region having a LCDR1, LCDR2, and LCDR3, wherein the HCDR1, HCDR2, and HCDR3 comprises an amino acid sequence of SEQ ID NOS:17262, 10013, and 16634, respectively and the LCDR1, LCDR2, and LCDR3 comprises an amino acid sequence of SEQ ID NOS: 16045, 9503, and 12429, respectively.

[0359] The disclosure describes an antibody, antigen binding fragment, or polypeptide comprising a heavy chain variable region having a HCDR1, HCDR2, and HCDR3, and a light chain variable region having a LCDR1, LCDR2, and LCDR3, wherein the HCDR1, HCDR2, and HCDR3 comprises an amino acid sequence of SEQ ID NOS:16196, 9765, and 11736, respectively and the LCDR1, LCDR2, and LCDR3 comprises an amino acid sequence of SEQ ID NOS:10860, 18278, and 12995, respectively.

[0360] The disclosure describes an antibody, antigen binding fragment, or polypeptide comprising a heavy chain variable region having a HCDR1, HCDR2, and HCDR3, and a light chain variable region having a LCDR1, LCDR2, and LCDR3, wherein the HCDR1, HCDR2, and HCDR3 comprises an amino acid sequence of SEQ ID NOS: 17262, 9758, and 9606, respectively and the LCDR1, LCDR2, and LCDR3 comprises an amino acid sequence of SEQ ID NOS: 16456, 9494, and 12626, respectively.

[0361] The disclosure describes an antibody, antigen binding fragment, or polypeptide comprising a heavy chain variable region having a HCDR1, HCDR2, and HCDR3, and a light chain variable region having a LCDR1, LCDR2, and LCDR3, wherein the HCDR1, HCDR2, and HCDR3 comprises an amino acid sequence of SEQ ID NOS:17469, 9744, and 4185, respectively and the LCDR1, LCDR2, and LCDR3 comprises an amino acid sequence of SEQ ID NOS: 16042, 9503, and 12749, respectively.

[0362] The disclosure describes an antibody, antigen binding fragment, or polypeptide comprising a heavy chain variable region having a HCDR1, HCDR2, and HCDR3, and a light chain variable region having a LCDR1, LCDR2, and LCDR3, wherein the HCDR1, HCDR2, and HCDR3 comprises an amino acid sequence of SEQ ID NOS:17528, 16890, and 17245, respectively and the LCDR1, LCDR2, and LCDR3 comprises an amino acid sequence of SEQ ID NOS: 16036, 9494, and 12775, respectively.

[0363] The disclosure describes an antibody, antigen binding fragment, or polypeptide comprising a heavy chain variable region having a HCDR1, HCDR2, and HCDR3, and a light chain variable region having a LCDR1, LCDR2, and LCDR3, wherein the HCDR1, HCDR2, and HCDR3 comprises an amino acid sequence of SEQ ID NOS:17263, 9776, and 16697, respectively and the LCDR1, LCDR2, and LCDR3 comprises an amino acid sequence of SEQ ID NOS: 16061, 9494, and 12690, respectively.

[0364] The disclosure describes an antibody, antigen binding fragment, or polypeptide comprising a heavy chain variable region having a HCDR1, HCDR2, and HCDR3, and a light chain variable region having a LCDR1, LCDR2, and LCDR3, wherein the HCDR1, HCDR2, and HCDR3 comprises an amino acid sequence of SEQ ID NOS: 17274, 4136, and 4597, respectively and the LCDR1, LCDR2, and LCDR3 comprises an amino acid sequence of SEQ ID NOS:16642, 10747, and 13031, respectively.

[0365] The disclosure describes an antibody, antigen binding fragment, or polypeptide comprising a heavy chain variable region having a HCDR1, HCDR2, and HCDR3, and a light chain variable region having a LCDR1, LCDR2, and LCDR3, wherein the HCDR1, HCDR2, and HCDR3 comprises an amino acid sequence of SEQ ID NOS: 17283, 18409, and 9582, respectively and the LCDR1, LCDR2, and LCDR3 comprises an amino acid sequence of SEQ ID NOS:16105, 10731, and 12889, respectively. having a LCDR1, LCDR2, and LCDR3, wherein the HCDR1, HCDR2, and HCDR3 comprises an amino acid sequence of SEQ ID NOS:6577, 11059, and 9540, respectively and the LCDR1, LCDR2, and LCDR3 comprises an amino acid sequence of SEQ ID NOS:18063, 18596, and 11066, respectively.

[0366] The disclosure describes an antibody, antigen binding fragment, or polypeptide comprising a heavy chain variable region having a HCDR1, HCDR2, and HCDR3, and a light chain variable region having a LCDR1, LCDR2, and LCDR3, wherein the HCDR1, HCDR2, and HCDR3 comprises an amino acid sequence of SEQ ID NOS:17549, 10582, and 10675, respectively and the LCDR1, LCDR2, and LCDR3 comprises an amino acid sequence of SEQ ID NOS: 17962, 6331, and 4356, respectively.

[0367] The disclosure describes an antibody, antigen binding fragment, or polypeptide comprising a heavy chain variable region having a HCDR1, HCDR2, and HCDR3, and a light chain variable region having a LCDR1, LCDR2, and LCDR3, wherein the HCDR1, HCDR2, and HCDR3 comprises an amino acid sequence of SEQ ID NOS:17263, 9741, and 4184, respectively and the LCDR1, LCDR2, and LCDR3 comprises an amino acid sequence of SEQ ID NOS: 16045, 9503, and 12772, respectively.

[0368] The disclosure describes an antibody, antigen binding fragment, or polypeptide comprising a heavy chain variable region having a HCDR1, HCDR2, and HCDR3, and a light chain variable region having a LCDR1, LCDR2, and LCDR3, wherein the HCDR1, HCDR2, and HCDR3 comprises an amino acid sequence of SEQ ID NOS: 17438, 9757, and 9607, respectively and the LCDR1, LCDR2, and LCDR3 comprises an amino acid sequence of SEQ ID NOS: 15995, 9441, and 11994, respectively.

[0369] The disclosure describes an antibody, antigen binding fragment, or polypeptide comprising a heavy chain variable region having a HCDR1, HCDR2, and HCDR3, and a light chain variable region having a LCDR1, LCDR2, and LCDR3, wherein the HCDR1, HCDR2, and HCDR3 comprises an amino acid sequence of SEQ ID NOS:17606, 17730, and 10155, respectively and the LCDR1, LCDR2, and LCDR3 comprises an amino acid sequence of SEQ ID NOS:10872, 18275, and 12919, respectively.

[0370] The disclosure describes an antibody, antigen binding fragment, or polypeptide comprising a heavy chain variable region having a HCDR1, HCDR2, and HCDR3, and a light chain variable region having a LCDR1, LCDR2, and LCDR3, wherein the HCDR1, HCDR2, and HCDR3 comprises an amino acid sequence of SEQ ID NOS:6507, 11011, and 9674, respectively and the LCDR1, LCDR2, and LCDR3 comprises an amino acid sequence of SEQ ID NOS: 16034, 9503, and 10459, respectively.

[0371] The disclosure describes an antibody, antigen binding fragment, or polypeptide comprising a heavy chain variable region having a HCDR1, HCDR2, and HCDR3, and a light chain variable region having a LCDR1, LCDR2, and LCDR3, wherein the HCDR1, HCDR2, and HCDR3 comprises an amino acid sequence of SEQ ID NOS:17441, 9715, and 10442, respectively and the LCDR1, LCDR2, and LCDR3 comprises an amino acid sequence of SEQ ID NOS: 15725, 9441, and 12620, respectively.

[0372] The disclosure describes an antibody, antigen binding fragment, or polypeptide comprising a heavy chain variable region having a HCDR1, HCDR2, and HCDR3, and a light chain variable region having a LCDR1, LCDR2, and LCDR3, wherein the HCDR1, HCDR2, and HCDR3 comprises an amino acid sequence of SEQ ID NOS:6511, 17582, and 5965, respectively and the LCDR1, LCDR2, and LCDR3 comprises an amino acid sequence of SEQ ID NOS:10879, 18275, and 12370, respectively.

[0373] The disclosure describes an antibody, antigen binding fragment, or polypeptide comprising a heavy chain variable region having a HCDR1, HCDR2, and HCDR3, and a light chain variable region having a LCDR1, LCDR2, and LCDR3, wherein the HCDR1, HCDR2, and HCDR3 comprises an amino acid sequence of SEQ ID NOS:16799, 9702, and 9614, respectively and the LCDR1, LCDR2, and LCDR3 comprises an amino acid sequence of SEQ ID NOS: 15980, 9503, and 12775, respectively.

[0374] The disclosure describes an antibody, antigen binding fragment, or polypeptide comprising a heavy chain variable region having a HCDR1, HCDR2, and HCDR3, and a light chain variable region having a LCDR1, LCDR2, and LCDR3, wherein the HCDR1, HCDR2, and HCDR3 comprises an amino acid sequence of SEQ ID NOS:11386, 9983, and 17050, respectively and the LCDR1, LCDR2, and LCDR3 comprises an amino acid sequence of SEQ ID NOS:16145, 9494, and 12645, respectively.

[0375] The disclosure describes an antibody, antigen binding fragment, or polypeptide comprising a heavy chain variable region having a HCDR1, HCDR2, and HCDR3, and a light chain variable region having a LCDR1, LCDR2, and LCDR3, wherein the HCDR1, HCDR2, and HCDR3 comprises an amino acid sequence of SEQ ID NOS:6556, 10256, and 11163, respectively and the LCDR1, LCDR2, and LCDR3 comprises an amino acid sequence of SEQ ID NOS:15822, 10722, and 12881, respectively.

[0376] The disclosure describes an antibody, antigen binding fragment, or polypeptide comprising a heavy chain variable region having a HCDR1, HCDR2, and HCDR3, and a light chain variable region having a LCDR1, LCDR2, and LCDR3, wherein the HCDR1, HCDR2, and HCDR3 comprises an amino acid sequence of SEQ ID NOS: 16175, 16895, and 5950, respectively and the LCDR1, LCDR2, and LCDR3 comprises an amino acid sequence of SEQ ID NOS: 15879, 9503, and 12775, respectively.

[0377] The disclosure describes an antibody, antigen binding fragment, or polypeptide comprising a heavy chain variable region having a HCDR1, HCDR2, and HCDR3, and a light chain variable region having a LCDR1, LCDR2, and LCDR3, wherein the HCDR1, HCDR2, and HCDR3 comprises an amino acid sequence of SEQ ID NOS:11370, 16253, and 17832, respectively and the LCDR1, LCDR2, and LCDR3 comprises an amino acid sequence of SEQ ID NOS:17913, 6629, and 13588, respectively.

[0378] The disclosure describes an antibody, antigen binding fragment, or polypeptide comprising a heavy chain variable region having a HCDR1, HCDR2, and HCDR3, and a light chain variable region having a LCDR1, LCDR2, and LCDR3, wherein the HCDR1, HCDR2, and HCDR3 comprises an amino acid sequence of SEQ ID NOS:10368, 6782, and 10193, respectively and the LCDR1, LCDR2, and LCDR3 comprises an amino acid sequence of SEQ ID NOS: 15893, 3969, and 12519, respectively.

[0379] The disclosure describes an antibody, antigen binding fragment, or polypeptide comprising a heavy chain variable region having a HCDR1, HCDR2, and HCDR3, and a light chain variable region having a LCDR1, LCDR2, and LCDR3, wherein the HCDR1, HCDR2, and HCDR3 comprises an amino acid sequence of SEQ ID NOS:17274, 4136, and 18284, respectively and the LCDR1, LCDR2, and LCDR3 comprises an amino acid sequence of SEQ ID NOS: 16322, 3982, and 12957, respectively.

[0380] The disclosure describes an antibody, antigen binding fragment, or polypeptide comprising a heavy chain variable region having a HCDR1, HCDR2, and HCDR3, and a light chain variable region having a LCDR1, LCDR2, and LCDR3, wherein the HCDR1, HCDR2, and HCDR3 comprises an amino acid sequence of SEQ ID NOS:17263, 9802, and 10196, respectively and the LCDR1, LCDR2, and LCDR3 comprises an amino acid sequence of SEQ ID NOS: 10832, 9267, and 11317, respectively.

[0381] The disclosure describes an antibody, antigen binding fragment, or polypeptide comprising a heavy chain variable region having a HCDR1, HCDR2, and HCDR3, and a light chain variable region having a LCDR1, LCDR2, and LCDR3, wherein the HCDR1, HCDR2, and HCDR3 comprises an amino acid sequence of SEQ ID NOS:17443, 17778, and 10165, respectively and the LCDR1, LCDR2, and LCDR3 comprises an amino acid sequence of SEQ ID NOS:10890, 18275, and 12971, respectively.

[0382] The disclosure describes an antibody, antigen binding fragment, or polypeptide comprising a heavy chain variable region having a HCDR1, HCDR2, and HCDR3, and a light chain variable region having a LCDR1, LCDR2, and LCDR3, wherein the HCDR1, HCDR2, and HCDR3 comprises an amino acid sequence of SEQ ID NOS: 11560, 10540, and 9540, respectively and the LCDR1, LCDR2, and LCDR3 comprises an amino acid sequence of SEQ ID NOS:18060, 18596, and 17788, respectively.

[0383] The disclosure describes an antibody, antigen binding fragment, or polypeptide comprising a heavy chain variable region having a HCDR1, HCDR2, and HCDR3, and a light chain variable region having a LCDR1, LCDR2, and LCDR3, wherein the HCDR1, HCDR2, and HCDR3 comprises an amino acid sequence of SEQ ID NOS:6570, 4127, and 18405, respectively and the LCDR1, LCDR2, and LCDR3 comprises an amino acid sequence of SEQ ID NOS: 15647, 3982, and 12859, respectively.

[0384] The disclosure describes an antibody, antigen binding fragment, or polypeptide comprising a heavy chain variable region having a HCDR1, HCDR2, and HCDR3, and a light chain variable region having a LCDR1, LCDR2, and LCDR3, wherein the HCDR1, HCDR2, and HCDR3 comprises an amino acid sequence of SEQ ID NOS:6510, 9379, and 10993, respectively and the LCDR1, LCDR2, and LCDR3 comprises an amino acid sequence of SEQ ID NOS: 10223, 6212, and 11053, respectively. having a LCDR1, LCDR2, and LCDR3, wherein the HCDR1, HCDR2, and HCDR3 comprises an amino acid sequence of SEQ ID NOS:6578, 18547, and 6147, respectively and the LCDR1, LCDR2, and LCDR3 comprises an amino acid sequence of SEQ ID NOS:9633, 18448, and 15562, respectively.

[0385] The disclosure describes an antibody, antigen binding fragment, or polypeptide comprising a heavy chain variable region having a HCDR1, HCDR2, and HCDR3, and a light chain variable region having a LCDR1, LCDR2, and LCDR3, wherein the HCDR1, HCDR2, and HCDR3 comprises an amino acid sequence of SEQ ID NOS:17467, 11446, and 11544, respectively and the LCDR1, LCDR2, and LCDR3 comprises an amino acid sequence of SEQ ID NOS:10856, 18261, and 12927, respectively.

[0386] The disclosure describes an antibody, antigen binding fragment, or polypeptide comprising a heavy chain variable region having a HCDR1, HCDR2, and HCDR3, and a light chain variable region having a LCDR1, LCDR2, and LCDR3, wherein the HCDR1, HCDR2, and HCDR3 comprises an amino acid sequence of SEQ ID NOS:17263, 9754, and 10144, respectively and the LCDR1, LCDR2, and LCDR3 comprises an amino acid sequence of SEQ ID NOS: 16026, 9494, and 12030, respectively.

[0387] The disclosure describes an antibody, antigen binding fragment, or polypeptide comprising a heavy chain variable region having a HCDR1, HCDR2, and HCDR3, and a light chain variable region having a LCDR1, LCDR2, and LCDR3, wherein the HCDR1, HCDR2, and HCDR3 comprises an amino acid sequence of SEQ ID NOS: 11370, 16250, and 6055, respectively and the LCDR1, LCDR2, and LCDR3 comprises an amino acid sequence of SEQ ID NOS:16408, 10987, and 11211, respectively.

[0388] The disclosure describes an antibody, antigen binding fragment, or polypeptide comprising a heavy chain variable region having a HCDR1, HCDR2, and HCDR3, and a light chain variable region having a LCDR1, LCDR2, and LCDR3, wherein the HCDR1, HCDR2, and HCDR3 comprises an amino acid sequence of SEQ ID NOS:17453, 16257, and 18113, respectively and the LCDR1, LCDR2, and LCDR3 comprises an amino acid sequence of SEQ ID NOS: 16022, 9503, and 10458, respectively.

[0389] The disclosure describes an antibody, antigen binding fragment, or polypeptide comprising a heavy chain variable region having a HCDR1, HCDR2, and HCDR3, and a light chain variable region having a LCDR1, LCDR2, and LCDR3, wherein the HCDR1, HCDR2, and HCDR3 comprises an amino acid sequence of SEQ ID NOS: 17443, 17784, and 4585, respectively and the LCDR1, LCDR2, and LCDR3 comprises an amino acid sequence of SEQ ID NOS: 10839, 9267, and 11313, respectively.

[0390] The disclosure describes an antibody, antigen binding fragment, or polypeptide comprising a heavy chain variable region having a HCDR1, HCDR2, and HCDR3, and a light chain variable region having a LCDR1, LCDR2, and LCDR3, wherein the HCDR1, HCDR2, and HCDR3 comprises an amino acid sequence of SEQ ID NOS:17263, 9776, and 10267, respectively and the LCDR1, LCDR2, and LCDR3 comprises an amino acid sequence of SEQ ID NOS: 17959, 6318, and 17197, respectively.

[0391] The disclosure describes an antibody, antigen binding fragment, or polypeptide comprising a heavy chain variable region having a HCDR1, HCDR2, and HCDR3, and a light chain variable region having a LCDR1, LCDR2, and LCDR3, wherein the HCDR1, HCDR2, and HCDR3 comprises an amino acid sequence of SEQ ID NOS:10935, 10318, and 10441, respectively and the LCDR1, LCDR2, and LCDR3 comprises an amino acid sequence of SEQ ID NOS:16061, 9494, and 12671, respectively.

[0392] The disclosure describes an antibody, antigen binding fragment, or polypeptide comprising a heavy chain variable region having a HCDR1, HCDR2, and HCDR3, and a light chain variable region having a LCDR1, LCDR2, and LCDR3, wherein the HCDR1, HCDR2, and HCDR3 comprises an amino acid sequence of SEQ ID NOS: 10362, 11545, and 4459, respectively and the LCDR1, LCDR2, and LCDR3 comprises an amino acid sequence of SEQ ID NOS:15778, 10730, and 12874, respectively.

[0393] The disclosure describes an antibody, antigen binding fragment, or polypeptide comprising a heavy chain variable region having a HCDR1, HCDR2, and HCDR3, and a light chain variable region having a LCDR1, LCDR2, and LCDR3, wherein the HCDR1, HCDR2, and HCDR3 comprises an amino acid sequence of SEQ ID NOS:17263, 9838, and 10232, respectively and the LCDR1, LCDR2, and LCDR3 comprises an amino acid sequence of SEQ ID NOS: 15956, 9480, and 12684, respectively.

[0394] The disclosure describes an antibody, antigen binding fragment, or polypeptide comprising a heavy chain variable region having a HCDR1, HCDR2, and HCDR3, and a light chain variable region having a LCDR1, LCDR2, and LCDR3, wherein the HCDR1, HCDR2, and HCDR3 comprises an amino acid sequence of SEQ ID NOS: 17141, 16954, and 5910, respectively and the LCDR1, LCDR2, and LCDR3 comprises an amino acid sequence of SEQ ID NOS:15890, 10727, and 12846, respectively.

[0395] The disclosure describes an antibody, antigen binding fragment, or polypeptide comprising a heavy chain variable region having a HCDR1, HCDR2, and HCDR3, and a light chain variable region having a LCDR1, LCDR2, and LCDR3, wherein the HCDR1, HCDR2, and HCDR3 comprises an amino acid sequence of SEQ ID NOS:11622, 6755, and 16635, respectively and the LCDR1, LCDR2, and LCDR3 comprises an amino acid sequence of SEQ ID NOS:16024, 10261, and 12429, respectively.

[0396] The disclosure describes an antibody, antigen binding fragment, or polypeptide comprising a heavy chain variable region having a HCDR1, HCDR2, and HCDR3, and a light chain variable region having a LCDR1, LCDR2, and LCDR3, wherein the HCDR1, HCDR2, and HCDR3 comprises an amino acid sequence of SEQ ID NOS: 17608, 18012, and 4037, respectively and the LCDR1, LCDR2, and LCDR3 comprises an amino acid sequence of SEQ ID NOS: 15790, 9472, and 13016, respectively.

[0397] The disclosure describes an antibody, antigen binding fragment, or polypeptide comprising a heavy chain variable region having a HCDR1, HCDR2, and HCDR3, and a light chain variable region having a LCDR1, LCDR2, and LCDR3, wherein the HCDR1, HCDR2, and HCDR3 comprises an amino acid sequence of SEQ ID NOS:17263, 9817, and 10517, respectively and the LCDR1, LCDR2, and LCDR3 comprises an amino acid sequence of SEQ ID NOS:16102, 10732, and 12851, respectively.

[0398] The disclosure describes an antibody, antigen binding fragment, or polypeptide comprising a heavy chain variable region having a HCDR1, HCDR2, and HCDR3, and a light chain variable region having a LCDR1, LCDR2, and LCDR3, wherein the HCDR1, HCDR2, and HCDR3 comprises an amino acid sequence of SEQ ID NOS:11677, 16244, and 11727, respectively and the LCDR1, LCDR2, and LCDR3 comprises an amino acid sequence of SEQ ID NOS:10870, 18275, and 12952, respectively.

[0399] The disclosure describes an antibody, antigen binding fragment, or polypeptide comprising a heavy chain variable region having a HCDR1, HCDR2, and HCDR3, and a light chain variable region having a LCDR1, LCDR2, and LCDR3, wherein the HCDR1, HCDR2, and HCDR3 comprises an amino acid sequence of SEQ ID NOS:17432, 18531, and 17708, respectively and the LCDR1, LCDR2, and LCDR3 comprises an amino acid sequence of SEQ ID NOS: 17966, 6717, and 4368, respectively.

[0400] The disclosure describes an antibody, antigen binding fragment, or polypeptide comprising a heavy chain variable region having a HCDR1, HCDR2, and HCDR3, and a light chain variable region having a LCDR1, LCDR2, and LCDR3, wherein the HCDR1, HCDR2, and HCDR3 comprises an amino acid sequence of SEQ ID NOS:17141, 16954, and 12091, respectively and the LCDR1, LCDR2, and LCDR3 comprises an amino acid sequence of SEQ ID NOS:16408, 10987, and 11201, respectively.

[0401] The disclosure describes an antibody, antigen binding fragment, or polypeptide comprising a heavy chain variable region having a HCDR1, HCDR2, and HCDR3, and a light chain variable region having a LCDR1, LCDR2, and LCDR3, wherein the HCDR1, HCDR2, and HCDR3 comprises an amino acid sequence of SEQ ID NOS: 17270, 4146, and 7815, respectively and the LCDR1, LCDR2, and LCDR3 comprises an amino acid sequence of SEQ ID NOS: 15893, 3969, and 12523, respectively.

[0402] The disclosure describes an antibody, antigen binding fragment, or polypeptide comprising a heavy chain variable region having a HCDR1, HCDR2, and HCDR3, and a light chain variable region having a LCDR1, LCDR2, and LCDR3, wherein the HCDR1, HCDR2, and HCDR3 comprises an amino acid sequence of SEQ ID NOS:17558, 11037, and 16623, respectively and the LCDR1, LCDR2, and LCDR3 comprises an amino acid sequence of SEQ ID NOS:16061, 9494, and 12691, respectively.

[0403] The disclosure describes an antibody, antigen binding fragment, or polypeptide comprising a heavy chain variable region having a HCDR1, HCDR2, and HCDR3, and a light chain variable region having a LCDR1, LCDR2, and LCDR3, wherein the HCDR1, HCDR2, and HCDR3 comprises an amino acid sequence of SEQ ID NOS:17263, 9776, and 10941, respectively and the LCDR1, LCDR2, and LCDR3 comprises an amino acid sequence of SEQ ID NOS:16659, 11900, and 11884, respectively. having a LCDR1, LCDR2, and LCDR3, wherein the HCDR1, HCDR2, and HCDR3 comprises an amino acid sequence of SEQ ID NOS: 17621, 16867, and 6544, respectively and the LCDR1, LCDR2, and LCDR3 comprises an amino acid sequence of SEQ ID NOS: 16071, 9503, and 12725, respectively.

[0404] The disclosure describes an antibody, antigen binding fragment, or polypeptide comprising a heavy chain variable region having a HCDR1, HCDR2, and HCDR3, and a light chain variable region having a LCDR1, LCDR2, and LCDR3, wherein the HCDR1, HCDR2, and HCDR3 comprises an amino acid sequence of SEQ ID NOS:17068, 9876, and 11955, respectively and the LCDR1, LCDR2, and LCDR3 comprises an amino acid sequence of SEQ ID NOS: 15881, 9503, and 12599, respectively.

[0405] The disclosure describes an antibody, antigen binding fragment, or polypeptide comprising a heavy chain variable region having a HCDR1, HCDR2, and HCDR3, and a light chain variable region having a LCDR1, LCDR2, and LCDR3, wherein the HCDR1, HCDR2, and HCDR3 comprises an amino acid sequence of SEQ ID NOS:17208, 18581, and 6183, respectively and the LCDR1, LCDR2, and LCDR3 comprises an amino acid sequence of SEQ ID NOS: 15760, 3975, and 10451, respectively.

[0406] The disclosure describes an antibody, antigen binding fragment, or polypeptide comprising a heavy chain variable region having a HCDR1, HCDR2, and HCDR3, and a light chain variable region having a LCDR1, LCDR2, and LCDR3, wherein the HCDR1, HCDR2, and HCDR3 comprises an amino acid sequence of SEQ ID NOS: 17848, 10544, and 6569, respectively and the LCDR1, LCDR2, and LCDR3 comprises an amino acid sequence of SEQ ID NOS: 15893, 3969, and 12520, respectively.

[0407] The disclosure describes an antibody, antigen binding fragment, or polypeptide comprising a heavy chain variable region having a HCDR1, HCDR2, and HCDR3, and a light chain variable region having a LCDR1, LCDR2, and LCDR3, wherein the HCDR1, HCDR2, and HCDR3 comprises an amino acid sequence of SEQ ID NOS:11663, 11018, and 16521, respectively and the LCDR1, LCDR2, and LCDR3 comprises an amino acid sequence of SEQ ID NOS: 15980, 9503, and 12796, respectively.

[0408] The disclosure describes an antibody, antigen binding fragment, or polypeptide comprising a heavy chain variable region having a HCDR1, HCDR2, and HCDR3, and a light chain variable region having a LCDR1, LCDR2, and LCDR3, wherein the HCDR1, HCDR2, and HCDR3 comprises an amino acid sequence of SEQ ID NOS: 17441, 18360, and 6047, respectively and the LCDR1, LCDR2, and LCDR3 comprises an amino acid sequence of SEQ ID NOS: 16759, 16331, and 4008, respectively.

[0409] The disclosure describes an antibody, antigen binding fragment, or polypeptide comprising a heavy chain variable region having a HCDR1, HCDR2, and HCDR3, and a light chain variable region having a LCDR1, LCDR2, and LCDR3, wherein the HCDR1, HCDR2, and HCDR3 comprises an amino acid sequence of SEQ ID NOS:10367, 18323, and 18288, respectively and the LCDR1, LCDR2, and LCDR3 comprises an amino acid sequence of SEQ ID NOS: 15890, 10727, and 12845, respectively.

[0410] The disclosure describes an antibody, antigen binding fragment, or polypeptide comprising a heavy chain variable region having a HCDR1, HCDR2, and HCDR3, and a light chain variable region having a LCDR1, LCDR2, and LCDR3, wherein the HCDR1, HCDR2, and HCDR3 comprises an amino acid sequence of SEQ ID NOS:17603, 18341, and 17699, respectively and the LCDR1, LCDR2, and LCDR3 comprises an amino acid sequence of SEQ ID NOS:15711, 3963, and 12335, respectively.

[0411] The disclosure describes an antibody, antigen binding fragment, or polypeptide comprising a heavy chain variable region having a HCDR1, HCDR2, and HCDR3, and a light chain variable region having a LCDR1, LCDR2, and LCDR3, wherein the HCDR1, HCDR2, and HCDR3 comprises an amino acid sequence of SEQ ID NOS: 17441, 18360, and 9645, respectively and the LCDR1, LCDR2, and LCDR3 comprises an amino acid sequence of SEQ ID NOS:10788, 10932, and 11263, respectively.

[0412] The disclosure describes an antibody, antigen binding fragment, or polypeptide comprising a heavy chain variable region having a HCDR1, HCDR2, and HCDR3, and a light chain variable region having a LCDR1, LCDR2, and LCDR3, wherein the HCDR1, HCDR2, and HCDR3 comprises an amino acid sequence of SEQ ID NOS: 17141, 16954, and 6726, respectively and the LCDR1, LCDR2, and LCDR3 comprises an amino acid sequence of SEQ ID NOS: 15893, 3969, and 12512, respectively.

[0413] The disclosure describes an antibody, antigen binding fragment, or polypeptide comprising a heavy chain variable region having a HCDR1, HCDR2, and HCDR3, and a light chain variable region having a LCDR1, LCDR2, and LCDR3, wherein the HCDR1, HCDR2, and HCDR3 comprises an amino acid sequence of SEQ ID NOS:16529, 4153, and 16931, respectively and the LCDR1, LCDR2, and LCDR3 comprises an amino acid sequence of SEQ ID NOS: 16011, 9502, and 12780, respectively.

[0414] The disclosure describes an antibody, antigen binding fragment, or polypeptide comprising a heavy chain variable region having a HCDR1, HCDR2, and HCDR3, and a light chain variable region having a LCDR1, LCDR2, and LCDR3, wherein the HCDR1, HCDR2, and HCDR3 comprises an amino acid sequence of SEQ ID NOS: 17466, 16919, and 4231, respectively and the LCDR1, LCDR2, and LCDR3 comprises an amino acid sequence of SEQ ID NOS: 17550, 6629, and 13586, respectively.

[0415] The disclosure describes an antibody, antigen binding fragment, or polypeptide comprising a heavy chain variable region having a HCDR1, HCDR2, and HCDR3, and a light chain variable region having a LCDR1, LCDR2, and LCDR3, wherein the HCDR1, HCDR2, and HCDR3 comprises an amino acid sequence of SEQ ID NOS: 17443, 17809, and 5921, respectively and the LCDR1, LCDR2, and LCDR3 comprises an amino acid sequence of SEQ ID NOS: 16045, 9503, and 12788, respectively.

[0416] The disclosure describes an antibody, antigen binding fragment, or polypeptide comprising a heavy chain variable region having a HCDR1, HCDR2, and HCDR3, and a light chain variable region having a LCDR1, LCDR2, and LCDR3, wherein the HCDR1, HCDR2, and HCDR3 comprises an amino acid sequence of SEQ ID NOS:17600, 9821, and 4212, respectively and the LCDR1, LCDR2, and LCDR3 comprises an amino acid sequence of SEQ ID NOS: 17875, 6328, and 17182, respectively.

[0417] The disclosure describes an antibody, antigen binding fragment, or polypeptide comprising a heavy chain variable region having a HCDR1, HCDR2, and HCDR3, and a light chain variable region having a LCDR1, LCDR2, and LCDR3, wherein the HCDR1, HCDR2, and HCDR3 comprises an amino acid sequence of SEQ ID NOS:10337, 9790, and 11968, respectively and the LCDR1, LCDR2, and LCDR3 comprises an amino acid sequence of SEQ ID NOS: 15918, 9494, and 12610, respectively.

[0418] The disclosure describes an antibody, antigen binding fragment, or polypeptide comprising a heavy chain variable region having a HCDR1, HCDR2, and HCDR3, and a light chain variable region having a LCDR1, LCDR2, and LCDR3, wherein the HCDR1, HCDR2, and HCDR3 comprises an amino acid sequence of SEQ ID NOS: 17842, 11488, and 6480, respectively and the LCDR1, LCDR2, and LCDR3 comprises an amino acid sequence of SEQ ID NOS: 16067, 4425, and 10715, respectively.

[0419] The disclosure describes an antibody, antigen binding fragment, or polypeptide comprising a heavy chain variable region having a HCDR1, HCDR2, and HCDR3, and a light chain variable region having a LCDR1, LCDR2, and LCDR3, wherein the HCDR1, HCDR2, and HCDR3 comprises an amino acid sequence of SEQ ID NOS:17274, 4136, and 5912, respectively and the LCDR1, LCDR2, and LCDR3 comprises an amino acid sequence of SEQ ID NOS: 17959, 6312, and 17199, respectively.

[0420] The disclosure describes an antibody, antigen binding fragment, or polypeptide comprising a heavy chain variable region having a HCDR1, HCDR2, and HCDR3, and a light chain variable region having a LCDR1, LCDR2, and LCDR3, wherein the HCDR1, HCDR2, and HCDR3 comprises an amino acid sequence of SEQ ID NOS:17263, 9861, and 11973, respectively and the LCDR1, LCDR2, and LCDR3 comprises an amino acid sequence of SEQ ID NOS: 16061, 9503, and 12700, respectively.

[0421] The disclosure describes an antibody, antigen binding fragment, or polypeptide comprising a heavy chain variable region having a HCDR1, HCDR2, and HCDR3, and a light chain variable region having a LCDR1, LCDR2, and LCDR3, wherein the HCDR1, HCDR2, and HCDR3 comprises an amino acid sequence of SEQ ID NOS:17141, 16954, and 17458, respectively and the LCDR1, LCDR2, and LCDR3 comprises an amino acid sequence of SEQ ID NOS: 15890, 10727, and 12831, respectively.

[0422] The disclosure describes an antibody, antigen binding fragment, or polypeptide comprising a heavy chain variable region having a HCDR1, HCDR2, and HCDR3, and a light chain variable region having a LCDR1, LCDR2, and LCDR3, wherein the HCDR1, HCDR2, and HCDR3 comprises an amino acid sequence of SEQ ID NOS: 17466, 16919, and 4484, respectively and the LCDR1, LCDR2, and LCDR3 comprises an amino acid sequence of SEQ ID NOS: 16322, 3982, and 12958, respectively. having a LCDR1, LCDR2, and LCDR3, wherein the HCDR1, HCDR2, and HCDR3 comprises an amino acid sequence of SEQ ID NOS:6578, 18531, and 5919, respectively and the LCDR1, LCDR2, and LCDR3 comprises an amino acid sequence of SEQ ID NOS: 16067, 4425, and 12433, respectively.

[0423] The disclosure describes an antibody, antigen binding fragment, or polypeptide comprising a heavy chain variable region having a HCDR1, HCDR2, and HCDR3, and a light chain variable region having a LCDR1, LCDR2, and LCDR3, wherein the HCDR1, HCDR2, and HCDR3 comprises an amino acid sequence of SEQ ID NOS:17270, 17778, and 10755, respectively and the LCDR1, LCDR2, and LCDR3 comprises an amino acid sequence of SEQ ID NOS:16659, 11900, and 11886, respectively.

[0424] The disclosure describes an antibody, antigen binding fragment, or polypeptide comprising a heavy chain variable region having a HCDR1, HCDR2, and HCDR3, and a light chain variable region having a LCDR1, LCDR2, and LCDR3, wherein the HCDR1, HCDR2, and HCDR3 comprises an amino acid sequence of SEQ ID NOS:17432, 18531, and 18281, respectively and the LCDR1, LCDR2, and LCDR3 comprises an amino acid sequence of SEQ ID NOS:15713, 3982, and 12389, respectively.

[0425] The disclosure describes an antibody, antigen binding fragment, or polypeptide comprising a heavy chain variable region having a HCDR1, HCDR2, and HCDR3, and a light chain variable region having a LCDR1, LCDR2, and LCDR3, wherein the HCDR1, HCDR2, and HCDR3 comprises an amino acid sequence of SEQ ID NOS: 17432, 18531, and 6192, respectively and the LCDR1, LCDR2, and LCDR3 comprises an amino acid sequence of SEQ ID NOS: 16736, 7859, and 10276, respectively.

[0426] The disclosure describes an antibody, antigen binding fragment, or polypeptide comprising a heavy chain variable region having a HCDR1, HCDR2, and HCDR3, and a light chain variable region having a LCDR1, LCDR2, and LCDR3, wherein the HCDR1, HCDR2, and HCDR3 comprises an amino acid sequence of SEQ ID NOS: 16692, 18569, and 4215, respectively and the LCDR1, LCDR2, and LCDR3 comprises an amino acid sequence of SEQ ID NOS: 15893, 3969, and 12519, respectively.

[0427] The disclosure describes an antibody, antigen binding fragment, or polypeptide comprising a heavy chain variable region having a HCDR1, HCDR2, and HCDR3, and a light chain variable region having a LCDR1, LCDR2, and LCDR3, wherein the HCDR1, HCDR2, and HCDR3 comprises an amino acid sequence of SEQ ID NOS: 16692, 18586, and 7874, respectively and the LCDR1, LCDR2, and LCDR3 comprises an amino acid sequence of SEQ ID NOS: 16045, 9503, and 12787, respectively.

[0428] The disclosure describes an antibody, antigen binding fragment, or polypeptide comprising a heavy chain variable region having a HCDR1, HCDR2, and HCDR3, and a light chain variable region having a LCDR1, LCDR2, and LCDR3, wherein the HCDR1, HCDR2, and HCDR3 comprises an amino acid sequence of SEQ ID NOS:17446, 4136, and 6121, respectively and the LCDR1, LCDR2, and LCDR3 comprises an amino acid sequence of SEQ ID NOS:16408, 10987, and 11210, respectively.

[0429] The disclosure describes an antibody, antigen binding fragment, or polypeptide comprising a heavy chain variable region having a HCDR1, HCDR2, and HCDR3, and a light chain variable region having a LCDR1, LCDR2, and LCDR3, wherein the HCDR1, HCDR2, and HCDR3 comprises an amino acid sequence of SEQ ID NOS: 17447, 16896, and 6553, respectively and the LCDR1, LCDR2, and LCDR3 comprises an amino acid sequence of SEQ ID NOS: 16045, 9503, and 12775, respectively.

[0430] The disclosure describes an antibody, antigen binding fragment, or polypeptide comprising a heavy chain variable region having a HCDR1, HCDR2, and HCDR3, and a light chain variable region having a LCDR1, LCDR2, and LCDR3, wherein the HCDR1, HCDR2, and HCDR3 comprises an amino acid sequence of SEQ ID NOS:18101, 9717, and 17219, respectively and the LCDR1, LCDR2, and LCDR3 comprises an amino acid sequence of SEQ ID NOS:15810, 4425, and 12713, respectively.

[0431] The disclosure describes an antibody, antigen binding fragment, or polypeptide comprising a heavy chain variable region having a HCDR1, HCDR2, and HCDR3, and a light chain variable region having a LCDR1, LCDR2, and LCDR3, wherein the HCDR1, HCDR2, and HCDR3 comprises an amino acid sequence of SEQ ID NOS:16713, 16824, and 10381, respectively and the LCDR1, LCDR2, and LCDR3 comprises an amino acid sequence of SEQ ID NOS:15952, 4425, and 12440, respectively.

[0432] The disclosure describes an antibody, antigen binding fragment, or polypeptide comprising a heavy chain variable region having a HCDR1, HCDR2, and HCDR3, and a light chain variable region having a LCDR1, LCDR2, and LCDR3, wherein the HCDR1, HCDR2, and HCDR3 comprises an amino acid sequence of SEQ ID NOS: 17535, 10571, and 5964, respectively and the LCDR1, LCDR2, and LCDR3 comprises an amino acid sequence of SEQ ID NOS: 16061, 9494, and 12686, respectively.

[0433] The disclosure describes an antibody, antigen binding fragment, or polypeptide comprising a heavy chain variable region having a HCDR1, HCDR2, and HCDR3, and a light chain variable region having a LCDR1, LCDR2, and LCDR3, wherein the HCDR1, HCDR2, and HCDR3 comprises an amino acid sequence of SEQ ID NOS: 17614, 18557, and 4392, respectively and the LCDR1, LCDR2, and LCDR3 comprises an amino acid sequence of SEQ ID NOS: 15958, 9503, and 12450, respectively.

[0434] The disclosure describes an antibody, antigen binding fragment, or polypeptide comprising a heavy chain variable region having a HCDR1, HCDR2, and HCDR3, and a light chain variable region having a LCDR1, LCDR2, and LCDR3, wherein the HCDR1, HCDR2, and HCDR3 comprises an amino acid sequence of SEQ ID NOS:6530, 9911, and 18107, respectively and the LCDR1, LCDR2, and LCDR3 comprises an amino acid sequence of SEQ ID NOS: 15655, 3978, and 12945, respectively.

[0435] The disclosure describes an antibody, antigen binding fragment, or polypeptide comprising a heavy chain variable region having a HCDR1, HCDR2, and HCDR3, and a light chain variable region having a LCDR1, LCDR2, and LCDR3, wherein the HCDR1, HCDR2, and HCDR3 comprises an amino acid sequence of SEQ ID NOS:17004, 16980, and 13594, respectively and the LCDR1, LCDR2, and LCDR3 comprises an amino acid sequence of SEQ ID NOS: 15736, 9352, and 12504, respectively.

[0436] The disclosure describes an antibody, antigen binding fragment, or polypeptide comprising a heavy chain variable region having a HCDR1, HCDR2, and HCDR3, and a light chain variable region having a LCDR1, LCDR2, and LCDR3, wherein the HCDR1, HCDR2, and HCDR3 comprises an amino acid sequence of SEQ ID NOS: 16796, 16939, and 9690, respectively and the LCDR1, LCDR2, and LCDR3 comprises an amino acid sequence of SEQ ID NOS: 16759, 16331, and 4005, respectively.

[0437] The disclosure describes an antibody, antigen binding fragment, or polypeptide comprising a heavy chain variable region having a HCDR1, HCDR2, and HCDR3, and a light chain variable region having a LCDR1, LCDR2, and LCDR3, wherein the HCDR1, HCDR2, and HCDR3 comprises an amino acid sequence of SEQ ID NOS:17028, 17823, and 10164, respectively and the LCDR1, LCDR2, and LCDR3 comprises an amino acid sequence of SEQ ID NOS:16659, 11900, and 11869, respectively.

[0438] The disclosure describes an antibody, antigen binding fragment, or polypeptide comprising a heavy chain variable region having a HCDR1, HCDR2, and HCDR3, and a light chain variable region having a LCDR1, LCDR2, and LCDR3, wherein the HCDR1, HCDR2, and HCDR3 comprises an amino acid sequence of SEQ ID NOS:6507, 9971, and 4027, respectively and the LCDR1, LCDR2, and LCDR3 comprises an amino acid sequence of SEQ ID NOS: 16061, 9494, and 12666, respectively.

[0439] The disclosure describes an antibody, antigen binding fragment, or polypeptide comprising a heavy chain variable region having a HCDR1, HCDR2, and HCDR3, and a light chain variable region having a LCDR1, LCDR2, and LCDR3, wherein the HCDR1, HCDR2, and HCDR3 comprises an amino acid sequence of SEQ ID NOS:17856, 9437, and 18229, respectively and the LCDR1, LCDR2, and LCDR3 comprises an amino acid sequence of SEQ ID NOS:16662, 11901, and 11862, respectively.

[0440] The disclosure describes an antibody, antigen binding fragment, or polypeptide comprising a heavy chain variable region having a HCDR1, HCDR2, and HCDR3, and a light chain variable region having a LCDR1, LCDR2, and LCDR3, wherein the HCDR1, HCDR2, and HCDR3 comprises an amino acid sequence of SEQ ID NOS:6578, 18553, and 9559, respectively and the LCDR1, LCDR2, and LCDR3 comprises an amino acid sequence of SEQ ID NOS:15895, 10727, and 12829, respectively.

[0441] The disclosure describes an antibody, antigen binding fragment, or polypeptide comprising a heavy chain variable region having a HCDR1, HCDR2, and HCDR3, and a light chain variable region having a LCDR1, LCDR2, and LCDR3, wherein the HCDR1, HCDR2, and HCDR3 comprises an amino acid sequence of SEQ ID NOS:17535, 10571, and 16182, respectively and the LCDR1, LCDR2, and LCDR3 comprises an amino acid sequence of SEQ ID NOS: 16759, 16331, and 4008, respectively. having a LCDR1, LCDR2, and LCDR3, wherein the HCDR1, HCDR2, and HCDR3 comprises an amino acid sequence of SEQ ID NOS:18100, 9716, and 17120, respectively and the LCDR1, LCDR2, and LCDR3 comprises an amino acid sequence of SEQ ID NOS: 15960, 9494, and 12627, respectively.

[0442] The disclosure describes an antibody, antigen binding fragment, or polypeptide comprising a heavy chain variable region having a HCDR1, HCDR2, and HCDR3, and a light chain variable region having a LCDR1, LCDR2, and LCDR3, wherein the HCDR1, HCDR2, and HCDR3 comprises an amino acid sequence of SEQ ID NOS: 11677, 12038, and 4462, respectively and the LCDR1, LCDR2, and LCDR3 comprises an amino acid sequence of SEQ ID NOS:10845, 16677, and 11336, respectively.

[0443] The disclosure describes an antibody, antigen binding fragment, or polypeptide comprising a heavy chain variable region having a HCDR1, HCDR2, and HCDR3, and a light chain variable region having a LCDR1, LCDR2, and LCDR3, wherein the HCDR1, HCDR2, and HCDR3 comprises an amino acid sequence of SEQ ID NOS:17284, 18415, and 10210, respectively and the LCDR1, LCDR2, and LCDR3 comprises an amino acid sequence of SEQ ID NOS:10890, 18275, and 12994, respectively.

[0444] The disclosure describes an antibody, antigen binding fragment, or polypeptide comprising a heavy chain variable region having a HCDR1, HCDR2, and HCDR3, and a light chain variable region having a LCDR1, LCDR2, and LCDR3, wherein the HCDR1, HCDR2, and HCDR3 comprises an amino acid sequence of SEQ ID NOS:17605, 9948, and 17046, respectively and the LCDR1, LCDR2, and LCDR3 comprises an amino acid sequence of SEQ ID NOS: 17948, 6245, and 17175, respectively.

[0445] The disclosure describes an antibody, antigen binding fragment, or polypeptide comprising a heavy chain variable region having a HCDR1, HCDR2, and HCDR3, and a light chain variable region having a LCDR1, LCDR2, and LCDR3, wherein the HCDR1, HCDR2, and HCDR3 comprises an amino acid sequence of SEQ ID NOS: 10367, 18323, and 6017, respectively and the LCDR1, LCDR2, and LCDR3 comprises an amino acid sequence of SEQ ID NOS: 16749, 17007, and 3997, respectively.

[0446] The disclosure describes an antibody, antigen binding fragment, or polypeptide comprising a heavy chain variable region having a HCDR1, HCDR2, and HCDR3, and a light chain variable region having a LCDR1, LCDR2, and LCDR3, wherein the HCDR1, HCDR2, and HCDR3 comprises an amino acid sequence of SEQ ID NOS:17446, 4136, and 16622, respectively and the LCDR1, LCDR2, and LCDR3 comprises an amino acid sequence of SEQ ID NOS: 17959, 6312, and 17197, respectively.

[0447] The disclosure describes an antibody, antigen binding fragment, or polypeptide comprising a heavy chain variable region having a HCDR1, HCDR2, and HCDR3, and a light chain variable region having a LCDR1, LCDR2, and LCDR3, wherein the HCDR1, HCDR2, and HCDR3 comprises an amino acid sequence of SEQ ID NOS: 17270, 11026, and 6011, respectively and the LCDR1, LCDR2, and LCDR3 comprises an amino acid sequence of SEQ ID NOS:15890, 10697, and 12826, respectively.

[0448] The disclosure describes an antibody, antigen binding fragment, or polypeptide comprising a heavy chain variable region having a HCDR1, HCDR2, and HCDR3, and a light chain variable region having a LCDR1, LCDR2, and LCDR3, wherein the HCDR1, HCDR2, and HCDR3 comprises an amino acid sequence of SEQ ID NOS:17558, 11037, and 16350, respectively and the LCDR1, LCDR2, and LCDR3 comprises an amino acid sequence of SEQ ID NOS: 17966, 6717, and 4367, respectively.

[0449] The disclosure describes an antibody, antigen binding fragment, or polypeptide comprising a heavy chain variable region having a HCDR1, HCDR2, and HCDR3, and a light chain variable region having a LCDR1, LCDR2, and LCDR3, wherein the HCDR1, HCDR2, and HCDR3 comprises an amino acid sequence of SEQ ID NOS:17263, 9873, and 11967, respectively and the LCDR1, LCDR2, and LCDR3 comprises an amino acid sequence of SEQ ID NOS: 16048, 9501, and 12700, respectively.

[0450] The disclosure describes an antibody, antigen binding fragment, or polypeptide comprising a heavy chain variable region having a HCDR1, HCDR2, and HCDR3, and a light chain variable region having a LCDR1, LCDR2, and LCDR3, wherein the HCDR1, HCDR2, and HCDR3 comprises an amino acid sequence of SEQ ID NOS:16796, 16939, and 16349, respectively and the LCDR1, LCDR2, and LCDR3 comprises an amino acid sequence of SEQ ID NOS:15890, 10727, and 12831, respectively.

[0451] The disclosure describes an antibody, antigen binding fragment, or polypeptide comprising a heavy chain variable region having a HCDR1, HCDR2, and HCDR3, and a light chain variable region having a LCDR1, LCDR2, and LCDR3, wherein the HCDR1, HCDR2, and HCDR3 comprises an amino acid sequence of SEQ ID NOS:16813, 16910, and 10066, respectively and the LCDR1, LCDR2, and LCDR3 comprises an amino acid sequence of SEQ ID NOS:15757, 6214, and 12447, respectively.

[0452] The disclosure describes an antibody, antigen binding fragment, or polypeptide comprising a heavy chain variable region having a HCDR1, HCDR2, and HCDR3, and a light chain variable region having a LCDR1, LCDR2, and LCDR3, wherein the HCDR1, HCDR2, and HCDR3 comprises an amino acid sequence of SEQ ID NOS:17263, 9859, and 11971, respectively and the LCDR1, LCDR2, and LCDR3 comprises an amino acid sequence of SEQ ID NOS: 15792, 9503, and 12599, respectively.

[0453] The disclosure describes an antibody, antigen binding fragment, or polypeptide comprising a heavy chain variable region having a HCDR1, HCDR2, and HCDR3, and a light chain variable region having a LCDR1, LCDR2, and LCDR3, wherein the HCDR1, HCDR2, and HCDR3 comprises an amino acid sequence of SEQ ID NOS: 16531, 18307, and 6189, respectively and the LCDR1, LCDR2, and LCDR3 comprises an amino acid sequence of SEQ ID NOS: 17935, 6327, and 11603, respectively.

[0454] The disclosure describes an antibody, antigen binding fragment, or polypeptide comprising a heavy chain variable region having a HCDR1, HCDR2, and HCDR3, and a light chain variable region having a LCDR1, LCDR2, and LCDR3, wherein the HCDR1, HCDR2, and HCDR3 comprises an amino acid sequence of SEQ ID NOS:4060, 9711, and 17012, respectively and the LCDR1, LCDR2, and LCDR3 comprises an amino acid sequence of SEQ ID NOS: 16014, 9494, and 12700, respectively.

[0455] The disclosure describes an antibody, antigen binding fragment, or polypeptide comprising a heavy chain variable region having a HCDR1, HCDR2, and HCDR3, and a light chain variable region having a LCDR1, LCDR2, and LCDR3, wherein the HCDR1, HCDR2, and HCDR3 comprises an amino acid sequence of SEQ ID NOS:4060, 9932, and 17011, respectively and the LCDR1, LCDR2, and LCDR3 comprises an amino acid sequence of SEQ ID NOS: 16008, 9494, and 12631, respectively.

[0456] The disclosure describes an antibody, antigen binding fragment, or polypeptide comprising a heavy chain variable region having a HCDR1, HCDR2, and HCDR3, and a light chain variable region having a LCDR1, LCDR2, and LCDR3, wherein the HCDR1, HCDR2, and HCDR3 comprises an amino acid sequence of SEQ ID NOS:11650, 9434, and 17533, respectively and the LCDR1, LCDR2, and LCDR3 comprises an amino acid sequence of SEQ ID NOS: 16076, 4413, and 10443, respectively.

[0457] The disclosure describes an antibody, antigen binding fragment, or polypeptide comprising a heavy chain variable region having a HCDR1, HCDR2, and HCDR3, and a light chain variable region having a LCDR1, LCDR2, and LCDR3, wherein the HCDR1, HCDR2, and HCDR3 comprises an amino acid sequence of SEQ ID NOS:17557, 11146, and 16344, respectively and the LCDR1, LCDR2, and LCDR3 comprises an amino acid sequence of SEQ ID NOS: 15890, 10695, and 12593, respectively.

[0458] The disclosure describes an antibody, antigen binding fragment, or polypeptide comprising a heavy chain variable region having a HCDR1, HCDR2, and HCDR3, and a light chain variable region having a LCDR1, LCDR2, and LCDR3, wherein the HCDR1, HCDR2, and HCDR3 comprises an amino acid sequence of SEQ ID NOS:17443, 9388, and 4471, respectively and the LCDR1, LCDR2, and LCDR3 comprises an amino acid sequence of SEQ ID NOS: 15893, 3969, and 12516, respectively.

[0459] The disclosure describes an antibody, antigen binding fragment, or polypeptide comprising a heavy chain variable region having a HCDR1, HCDR2, and HCDR3, and a light chain variable region having a LCDR1, LCDR2, and LCDR3, wherein the HCDR1, HCDR2, and HCDR3 comprises an amino acid sequence of SEQ ID NOS: 16779, 16311, and 7912, respectively and the LCDR1, LCDR2, and LCDR3 comprises an amino acid sequence of SEQ ID NOS:9632, 16162, and 15565, respectively.

[0460] The disclosure describes an antibody, antigen binding fragment, or polypeptide comprising a heavy chain variable region having a HCDR1, HCDR2, and HCDR3, and a light chain variable region having a LCDR1, LCDR2, and LCDR3, wherein the HCDR1, HCDR2, and HCDR3 comprises an amino acid sequence of SEQ ID NOS:10335, 9870, and 11975, respectively and the LCDR1, LCDR2, and LCDR3 comprises an amino acid sequence of SEQ ID NOS: 16049, 9503, and 12719, respectively. having a LCDR1, LCDR2, and LCDR3, wherein the HCDR1, HCDR2, and HCDR3 comprises an amino acid sequence of SEQ ID NOS: 17274, 4136, and 6562, respectively and the LCDR1, LCDR2, and LCDR3 comprises an amino acid sequence of SEQ ID NOS:11949, 10024, and 11584, respectively.

[0461] The disclosure describes an antibody, antigen binding fragment, or polypeptide comprising a heavy chain variable region having a HCDR1, HCDR2, and HCDR3, and a light chain variable region having a LCDR1, LCDR2, and LCDR3, wherein the HCDR1, HCDR2, and HCDR3 comprises an amino acid sequence of SEQ ID NOS:9672, 4159, and 17022, respectively and the LCDR1, LCDR2, and LCDR3 comprises an amino acid sequence of SEQ ID NOS: 17959, 6244, and 17157, respectively.

[0462] The disclosure describes an antibody, antigen binding fragment, or polypeptide comprising a heavy chain variable region having a HCDR1, HCDR2, and HCDR3, and a light chain variable region having a LCDR1, LCDR2, and LCDR3, wherein the HCDR1, HCDR2, and HCDR3 comprises an amino acid sequence of SEQ ID NOS:17270, 4146, and 18043, respectively and the LCDR1, LCDR2, and LCDR3 comprises an amino acid sequence of SEQ ID NOS: 15711, 3969, and 12336, respectively.

[0463] The disclosure describes an antibody, antigen binding fragment, or polypeptide comprising a heavy chain variable region having a HCDR1, HCDR2, and HCDR3, and a light chain variable region having a LCDR1, LCDR2, and LCDR3, wherein the HCDR1, HCDR2, and HCDR3 comprises an amino acid sequence of SEQ ID NOS: 16631, 11426, and 4293, respectively and the LCDR1, LCDR2, and LCDR3 comprises an amino acid sequence of SEQ ID NOS:16467, 15521, and 11269, respectively.

[0464] The disclosure describes an antibody, antigen binding fragment, or polypeptide comprising a heavy chain variable region having a HCDR1, HCDR2, and HCDR3, and a light chain variable region having a LCDR1, LCDR2, and LCDR3, wherein the HCDR1, HCDR2, and HCDR3 comprises an amino acid sequence of SEQ ID NOS:17135, 16826, and 11041, respectively and the LCDR1, LCDR2, and LCDR3 comprises an amino acid sequence of SEQ ID NOS: 15980, 3983, and 12857, respectively.

[0465] The disclosure describes an antibody, antigen binding fragment, or polypeptide comprising a heavy chain variable region having a HCDR1, HCDR2, and HCDR3, and a light chain variable region having a LCDR1, LCDR2, and LCDR3, wherein the HCDR1, HCDR2, and HCDR3 comprises an amino acid sequence of SEQ ID NOS:17633, 18336, and 17565, respectively and the LCDR1, LCDR2, and LCDR3 comprises an amino acid sequence of SEQ ID NOS:10916, 18272, and 12907, respectively.

[0466] The disclosure describes an antibody, antigen binding fragment, or polypeptide comprising a heavy chain variable region having a HCDR1, HCDR2, and HCDR3, and a light chain variable region having a LCDR1, LCDR2, and LCDR3, wherein the HCDR1, HCDR2, and HCDR3 comprises an amino acid sequence of SEQ ID NOS:17432, 18531, and 13626, respectively and the LCDR1, LCDR2, and LCDR3 comprises an amino acid sequence of SEQ ID NOS:16067, 4425, and 12412, respectively.

[0467] The disclosure describes an antibody, antigen binding fragment, or polypeptide comprising a heavy chain variable region having a HCDR1, HCDR2, and HCDR3, and a light chain variable region having a LCDR1, LCDR2, and LCDR3, wherein the HCDR1, HCDR2, and HCDR3 comprises an amino acid sequence of SEQ ID NOS: 17558, 11037, and 4169, respectively and the LCDR1, LCDR2, and LCDR3 comprises an amino acid sequence of SEQ ID NOS:15890, 10727, and 12849, respectively.

[0468] The disclosure describes an antibody, antigen binding fragment, or polypeptide comprising a heavy chain variable region having a HCDR1, HCDR2, and HCDR3, and a light chain variable region having a LCDR1, LCDR2, and LCDR3, wherein the HCDR1, HCDR2, and HCDR3 comprises an amino acid sequence of SEQ ID NOS:17535, 10571, and 10375, respectively and the LCDR1, LCDR2, and LCDR3 comprises an amino acid sequence of SEQ ID NOS:16045, 9503, and 12769, respectively.

[0469] The disclosure describes an antibody, antigen binding fragment, or polypeptide comprising a heavy chain variable region having a HCDR1, HCDR2, and HCDR3, and a light chain variable region having a LCDR1, LCDR2, and LCDR3, wherein the HCDR1, HCDR2, and HCDR3 comprises an amino acid sequence of SEQ ID NOS:17263, 9860, and 11974, respectively and the LCDR1, LCDR2, and LCDR3 comprises an amino acid sequence of SEQ ID NOS: 15792, 9503, and 12599, respectively.

[0470] The disclosure describes an antibody, antigen binding fragment, or polypeptide comprising a heavy chain variable region having a HCDR1, HCDR2, and HCDR3, and a light chain variable region having a LCDR1, LCDR2, and LCDR3, wherein the HCDR1, HCDR2, and HCDR3 comprises an amino acid sequence of SEQ ID NOS:16692, 18569, and 10209, respectively and the LCDR1, LCDR2, and LCDR3 comprises an amino acid sequence of SEQ ID NOS:10890, 18275, and 12982, respectively.

[0471] The disclosure describes an antibody, antigen binding fragment, or polypeptide comprising a heavy chain variable region having a HCDR1, HCDR2, and HCDR3, and a light chain variable region having a LCDR1, LCDR2, and LCDR3, wherein the HCDR1, HCDR2, and HCDR3 comprises an amino acid sequence of SEQ ID NOS:10338, 10303, and 11954, respectively and the LCDR1, LCDR2, and LCDR3 comprises an amino acid sequence of SEQ ID NOS:16067, 4417, and 12433, respectively.

[0472] The disclosure describes an antibody, antigen binding fragment, or polypeptide comprising a heavy chain variable region having a HCDR1, HCDR2, and HCDR3, and a light chain variable region having a LCDR1, LCDR2, and LCDR3, wherein the HCDR1, HCDR2, and HCDR3 comprises an amino acid sequence of SEQ ID NOS: 10367, 18323, and 4593, respectively and the LCDR1, LCDR2, and LCDR3 comprises an amino acid sequence of SEQ ID NOS:16408, 10987, and 11202, respectively.

[0473] The disclosure describes an antibody, antigen binding fragment, or polypeptide comprising a heavy chain variable region having a HCDR1, HCDR2, and HCDR3, and a light chain variable region having a LCDR1, LCDR2, and LCDR3, wherein the HCDR1, HCDR2, and HCDR3 comprises an amino acid sequence of SEQ ID NOS:10368, 6781, and 16600, respectively and the LCDR1, LCDR2, and LCDR3 comprises an amino acid sequence of SEQ ID NOS: 16061, 9480, and 12349, respectively.

[0474] The disclosure describes an antibody, antigen binding fragment, or polypeptide comprising a heavy chain variable region having a HCDR1, HCDR2, and HCDR3, and a light chain variable region having a LCDR1, LCDR2, and LCDR3, wherein the HCDR1, HCDR2, and HCDR3 comprises an amino acid sequence of SEQ ID NOS: 17432, 18531, and 6167, respectively and the LCDR1, LCDR2, and LCDR3 comprises an amino acid sequence of SEQ ID NOS: 16067, 4425, and 12434, respectively.

[0475] The disclosure describes an antibody, antigen binding fragment, or polypeptide comprising a heavy chain variable region having a HCDR1, HCDR2, and HCDR3, and a light chain variable region having a LCDR1, LCDR2, and LCDR3, wherein the HCDR1, HCDR2, and HCDR3 comprises an amino acid sequence of SEQ ID NOS: 11377, 16172, and 9366, respectively and the LCDR1, LCDR2, and LCDR3 comprises an amino acid sequence of SEQ ID NOS: 15869, 4141, and 13785, respectively.

[0476] The disclosure describes an antibody, antigen binding fragment, or polypeptide comprising a heavy chain variable region having a HCDR1, HCDR2, and HCDR3, and a light chain variable region having a LCDR1, LCDR2, and LCDR3, wherein the HCDR1, HCDR2, and HCDR3 comprises an amino acid sequence of SEQ ID NOS:17884, 18509, and 17681, respectively and the LCDR1, LCDR2, and LCDR3 comprises an amino acid sequence of SEQ ID NOS:9595, 4465, and 15570, respectively.

[0477] The disclosure describes an antibody, antigen binding fragment, or polypeptide comprising a heavy chain variable region having a HCDR1, HCDR2, and HCDR3, and a light chain variable region having a LCDR1, LCDR2, and LCDR3, wherein the HCDR1, HCDR2, and HCDR3 comprises an amino acid sequence of SEQ ID NOS: 17210, 18306, and 4600, respectively and the LCDR1, LCDR2, and LCDR3 comprises an amino acid sequence of SEQ ID NOS: 15686, 9498, and 12535, respectively.

[0478] The disclosure describes an antibody, antigen binding fragment, or polypeptide comprising a heavy chain variable region having a HCDR1, HCDR2, and HCDR3, and a light chain variable region having a LCDR1, LCDR2, and LCDR3, wherein the HCDR1, HCDR2, and HCDR3 comprises an amino acid sequence of SEQ ID NOS:7820, 9562, and 10592, respectively and the LCDR1, LCDR2, and LCDR3 comprises an amino acid sequence of SEQ ID NOS:17924, 10094, and 13576, respectively.

[0479] The disclosure describes an antibody, antigen binding fragment, or polypeptide comprising a heavy chain variable region having a HCDR1, HCDR2, and HCDR3, and a light chain variable region having a LCDR1, LCDR2, and LCDR3, wherein the HCDR1, HCDR2, and HCDR3 comprises an amino acid sequence of SEQ ID NOS:11417, 16825, and 11984, respectively and the LCDR1, LCDR2, and LCDR3 comprises an amino acid sequence of SEQ ID NOS: 15645, 17227, and 12347, respectively. having a LCDR1, LCDR2, and LCDR3, wherein the HCDR1, HCDR2, and HCDR3 comprises an amino acid sequence of SEQ ID NOS:17270, 9407, and 6713, respectively and the LCDR1, LCDR2, and LCDR3 comprises an amino acid sequence of SEQ ID NOS: 16049, 4431, and 12003, respectively.

[0480] The disclosure describes an antibody, antigen binding fragment, or polypeptide comprising a heavy chain variable region having a HCDR1, HCDR2, and HCDR3, and a light chain variable region having a LCDR1, LCDR2, and LCDR3, wherein the HCDR1, HCDR2, and HCDR3 comprises an amino acid sequence of SEQ ID NOS: 11637, 18410, and 6473, respectively and the LCDR1, LCDR2, and LCDR3 comprises an amino acid sequence of SEQ ID NOS: 16717, 9535, and 17232, respectively.

[0481] The disclosure describes an antibody, antigen binding fragment, or polypeptide comprising a heavy chain variable region having a HCDR1, HCDR2, and HCDR3, and a light chain variable region having a LCDR1, LCDR2, and LCDR3, wherein the HCDR1, HCDR2, and HCDR3 comprises an amino acid sequence of SEQ ID NOS: 16779, 16311, and 4219, respectively and the LCDR1, LCDR2, and LCDR3 comprises an amino acid sequence of SEQ ID NOS:15890, 10727, and 12809, respectively.

[0482] The disclosure describes an antibody, antigen binding fragment, or polypeptide comprising a heavy chain variable region having a HCDR1, HCDR2, and HCDR3, and a light chain variable region having a LCDR1, LCDR2, and LCDR3, wherein the HCDR1, HCDR2, and HCDR3 comprises an amino acid sequence of SEQ ID NOS:17856, 18585, and 18141, respectively and the LCDR1, LCDR2, and LCDR3 comprises an amino acid sequence of SEQ ID NOS: 16067, 4425, and 12424, respectively.

[0483] The disclosure describes an antibody, antigen binding fragment, or polypeptide comprising a heavy chain variable region having a HCDR1, HCDR2, and HCDR3, and a light chain variable region having a LCDR1, LCDR2, and LCDR3, wherein the HCDR1, HCDR2, and HCDR3 comprises an amino acid sequence of SEQ ID NOS:16692, 18569, and 16601, respectively and the LCDR1, LCDR2, and LCDR3 comprises an amino acid sequence of SEQ ID NOS: 11949, 10024, and 11588, respectively.

[0484] The disclosure describes an antibody, antigen binding fragment, or polypeptide comprising a heavy chain variable region having a HCDR1, HCDR2, and HCDR3, and a light chain variable region having a LCDR1, LCDR2, and LCDR3, wherein the HCDR1, HCDR2, and HCDR3 comprises an amino acid sequence of SEQ ID NOS:17838, 16277, and 6080, respectively and the LCDR1, LCDR2, and LCDR3 comprises an amino acid sequence of SEQ ID NOS:15890, 10727, and 13593, respectively.

[0485] The disclosure describes an antibody, antigen binding fragment, or polypeptide comprising a heavy chain variable region having a HCDR1, HCDR2, and HCDR3, and a light chain variable region having a LCDR1, LCDR2, and LCDR3, wherein the HCDR1, HCDR2, and HCDR3 comprises an amino acid sequence of SEQ ID NOS: 17651, 11439, and 4292, respectively and the LCDR1, LCDR2, and LCDR3 comprises an amino acid sequence of SEQ ID NOS: 16077, 9503, and 12772, respectively.

[0486] The disclosure describes an antibody, antigen binding fragment, or polypeptide comprising a heavy chain variable region having a HCDR1, HCDR2, and HCDR3, and a light chain variable region having a LCDR1, LCDR2, and LCDR3, wherein the HCDR1, HCDR2, and HCDR3 comprises an amino acid sequence of SEQ ID NOS:6576, 18332, and 10236, respectively and the LCDR1, LCDR2, and LCDR3 comprises an amino acid sequence of SEQ ID NOS: 16726, 16851, and 3991, respectively.

[0487] The disclosure describes an antibody, antigen binding fragment, or polypeptide comprising a heavy chain variable region having a HCDR1, HCDR2, and HCDR3, and a light chain variable region having a LCDR1, LCDR2, and LCDR3, wherein the HCDR1, HCDR2, and HCDR3 comprises an amino acid sequence of SEQ ID NOS:6504, 18381, and 10183, respectively and the LCDR1, LCDR2, and LCDR3 comprises an amino acid sequence of SEQ ID NOS: 16061, 4431, and 12692, respectively.

[0488] The disclosure describes an antibody, antigen binding fragment, or polypeptide comprising a heavy chain variable region having a HCDR1, HCDR2, and HCDR3, and a light chain variable region having a LCDR1, LCDR2, and LCDR3, wherein the HCDR1, HCDR2, and HCDR3 comprises an amino acid sequence of SEQ ID NOS:16692, 18569, and 10286, respectively and the LCDR1, LCDR2, and LCDR3 comprises an amino acid sequence of SEQ ID NOS:11949, 10024, and 11586, respectively.

[0489] The disclosure describes an antibody, antigen binding fragment, or polypeptide comprising a heavy chain variable region having a HCDR1, HCDR2, and HCDR3, and a light chain variable region having a LCDR1, LCDR2, and LCDR3, wherein the HCDR1, HCDR2, and HCDR3 comprises an amino acid sequence of SEQ ID NOS: 17029, 16942, and 6095, respectively and the LCDR1, LCDR2, and LCDR3 comprises an amino acid sequence of SEQ ID NOS: 15905, 9490, and 12483, respectively.

[0490] The disclosure describes an antibody, antigen binding fragment, or polypeptide comprising a heavy chain variable region having a HCDR1, HCDR2, and HCDR3, and a light chain variable region having a LCDR1, LCDR2, and LCDR3, wherein the HCDR1, HCDR2, and HCDR3 comprises an amino acid sequence of SEQ ID NOS: 17856, 18575, and 6603, respectively and the LCDR1, LCDR2, and LCDR3 comprises an amino acid sequence of SEQ ID NOS: 15893, 3969, and 12519, respectively.

[0491] The disclosure describes an antibody, antigen binding fragment, or polypeptide comprising a heavy chain variable region having a HCDR1, HCDR2, and HCDR3, and a light chain variable region having a LCDR1, LCDR2, and LCDR3, wherein the HCDR1, HCDR2, and HCDR3 comprises an amino acid sequence of SEQ ID NOS:17432, 18531, and 11157, respectively and the LCDR1, LCDR2, and LCDR3 comprises an amino acid sequence of SEQ ID NOS: 15691, 3969, and 11083, respectively.

[0492] The disclosure describes an antibody, antigen binding fragment, or polypeptide comprising a heavy chain variable region having a HCDR1, HCDR2, and HCDR3, and a light chain variable region having a LCDR1, LCDR2, and LCDR3, wherein the HCDR1, HCDR2, and HCDR3 comprises an amino acid sequence of SEQ ID NOS: 16692, 18569, and 6122, respectively and the LCDR1, LCDR2, and LCDR3 comprises an amino acid sequence of SEQ ID NOS: 17959, 6318, and 17190, respectively.

[0493] The disclosure describes an antibody, antigen binding fragment, or polypeptide comprising a heavy chain variable region having a HCDR1, HCDR2, and HCDR3, and a light chain variable region having a LCDR1, LCDR2, and LCDR3, wherein the HCDR1, HCDR2, and HCDR3 comprises an amino acid sequence of SEQ ID NOS:17554, 9706, and 17122, respectively and the LCDR1, LCDR2, and LCDR3 comprises an amino acid sequence of SEQ ID NOS: 15741, 4436, and 12621, respectively.

[0494] The disclosure describes an antibody, antigen binding fragment, or polypeptide comprising a heavy chain variable region having a HCDR1, HCDR2, and HCDR3, and a light chain variable region having a LCDR1, LCDR2, and LCDR3, wherein the HCDR1, HCDR2, and HCDR3 comprises an amino acid sequence of SEQ ID NOS:11671, 9996, and 16960, respectively and the LCDR1, LCDR2, and LCDR3 comprises an amino acid sequence of SEQ ID NOS:16359, 10976, and 11252, respectively.

[0495] The disclosure describes an antibody, antigen binding fragment, or polypeptide comprising a heavy chain variable region having a HCDR1, HCDR2, and HCDR3, and a light chain variable region having a LCDR1, LCDR2, and LCDR3, wherein the HCDR1, HCDR2, and HCDR3 comprises an amino acid sequence of SEQ ID NOS: 17443, 17741, and 6091, respectively and the LCDR1, LCDR2, and LCDR3 comprises an amino acid sequence of SEQ ID NOS: 17950, 5445, and 17191, respectively.

[0496] The disclosure describes an antibody, antigen binding fragment, or polypeptide comprising a heavy chain variable region having a HCDR1, HCDR2, and HCDR3, and a light chain variable region having a LCDR1, LCDR2, and LCDR3, wherein the HCDR1, HCDR2, and HCDR3 comprises an amino acid sequence of SEQ ID NOS:17291, 4065, and 9453, respectively and the LCDR1, LCDR2, and LCDR3 comprises an amino acid sequence of SEQ ID NOS: 16061, 9494, and 12678, respectively.

[0497] The disclosure describes an antibody, antigen binding fragment, or polypeptide comprising a heavy chain variable region having a HCDR1, HCDR2, and HCDR3, and a light chain variable region having a LCDR1, LCDR2, and LCDR3, wherein the HCDR1, HCDR2, and HCDR3 comprises an amino acid sequence of SEQ ID NOS:17535, 10571, and 10981, respectively and the LCDR1, LCDR2, and LCDR3 comprises an amino acid sequence of SEQ ID NOS:10890, 18275, and 12983, respectively.

[0498] The disclosure describes an antibody, antigen binding fragment, or polypeptide comprising a heavy chain variable region having a HCDR1, HCDR2, and HCDR3, and a light chain variable region having a LCDR1, LCDR2, and LCDR3, wherein the HCDR1, HCDR2, and HCDR3 comprises an amino acid sequence of SEQ ID NOS:18639, 9808, and 11764, respectively and the LCDR1, LCDR2, and LCDR3 comprises an amino acid sequence of SEQ ID NOS: 16053, 4054, and 12879, respectively. having a LCDR1, LCDR2, and LCDR3, wherein the HCDR1, HCDR2, and HCDR3 comprises an amino acid sequence of SEQ ID NOS: 11370, 16250, and 5931, respectively and the LCDR1, LCDR2, and LCDR3 comprises an amino acid sequence of SEQ ID NOS:10890, 18275, and 12970, respectively.

[0499] The disclosure describes an antibody, antigen binding fragment, or polypeptide comprising a heavy chain variable region having a HCDR1, HCDR2, and HCDR3, and a light chain variable region having a LCDR1, LCDR2, and LCDR3, wherein the HCDR1, HCDR2, and HCDR3 comprises an amino acid sequence of SEQ ID NOS:10101, 6782, and 9673, respectively and the LCDR1, LCDR2, and LCDR3 comprises an amino acid sequence of SEQ ID NOS: 11789, 4420, and 12575, respectively.

[0500] The disclosure describes an antibody, antigen binding fragment, or polypeptide comprising a heavy chain variable region having a HCDR1, HCDR2, and HCDR3, and a light chain variable region having a LCDR1, LCDR2, and LCDR3, wherein the HCDR1, HCDR2, and HCDR3 comprises an amino acid sequence of SEQ ID NOS: 16692, 18586, and 4168, respectively and the LCDR1, LCDR2, and LCDR3 comprises an amino acid sequence of SEQ ID NOS: 15711, 3969, and 12335, respectively.

[0501] The disclosure describes an antibody, antigen binding fragment, or polypeptide comprising a heavy chain variable region having a HCDR1, HCDR2, and HCDR3, and a light chain variable region having a LCDR1, LCDR2, and LCDR3, wherein the HCDR1, HCDR2, and HCDR3 comprises an amino acid sequence of SEQ ID NOS: 17838, 16277, and 6100, respectively and the LCDR1, LCDR2, and LCDR3 comprises an amino acid sequence of SEQ ID NOS: 18093, 17720, and 9444, respectively.

[0502] The disclosure describes an antibody, antigen binding fragment, or polypeptide comprising a heavy chain variable region having a HCDR1, HCDR2, and HCDR3, and a light chain variable region having a LCDR1, LCDR2, and LCDR3, wherein the HCDR1, HCDR2, and HCDR3 comprises an amino acid sequence of SEQ ID NOS:17015, 16499, and 10091, respectively and the LCDR1, LCDR2, and LCDR3 comprises an amino acid sequence of SEQ ID NOS:17959, 6318, and 17198, respectively.

[0503] The disclosure describes an antibody, antigen binding fragment, or polypeptide comprising a heavy chain variable region having a HCDR1, HCDR2, and HCDR3, and a light chain variable region having a LCDR1, LCDR2, and LCDR3, wherein the HCDR1, HCDR2, and HCDR3 comprises an amino acid sequence of SEQ ID NOS:10367, 18323, and 17834, respectively and the LCDR1, LCDR2, and LCDR3 comprises an amino acid sequence of SEQ ID NOS: 15893, 3969, and 12519, respectively.

[0504] The disclosure describes an antibody, antigen binding fragment, or polypeptide comprising a heavy chain variable region having a HCDR1, HCDR2, and HCDR3, and a light chain variable region having a LCDR1, LCDR2, and LCDR3, wherein the HCDR1, HCDR2, and HCDR3 comprises an amino acid sequence of SEQ ID NOS: 17856, 18575, and 4045, respectively and the LCDR1, LCDR2, and LCDR3 comprises an amino acid sequence of SEQ ID NOS: 11789, 4420, and 12575, respectively.

[0505] The disclosure describes an antibody, antigen binding fragment, or polypeptide comprising a heavy chain variable region having a HCDR1, HCDR2, and HCDR3, and a light chain variable region having a LCDR1, LCDR2, and LCDR3, wherein the HCDR1, HCDR2, and HCDR3 comprises an amino acid sequence of SEQ ID NOS: 17842, 11497, and 4292, respectively and the LCDR1, LCDR2, and LCDR3 comprises an amino acid sequence of SEQ ID NOS:16423, 15521, and 11266, respectively.

[0506] The disclosure describes an antibody, antigen binding fragment, or polypeptide comprising a heavy chain variable region having a HCDR1, HCDR2, and HCDR3, and a light chain variable region having a LCDR1, LCDR2, and LCDR3, wherein the HCDR1, HCDR2, and HCDR3 comprises an amino acid sequence of SEQ ID NOS:16680, 16227, and 10045, respectively and the LCDR1, LCDR2, and LCDR3 comprises an amino acid sequence of SEQ ID NOS:16049, 9494, and 12698, respectively.

[0507] The disclosure describes an antibody, antigen binding fragment, or polypeptide comprising a heavy chain variable region having a HCDR1, HCDR2, and HCDR3, and a light chain variable region having a LCDR1, LCDR2, and LCDR3, wherein the HCDR1, HCDR2, and HCDR3 comprises an amino acid sequence of SEQ ID NOS:17856, 18585, and 18232, respectively and the LCDR1, LCDR2, and LCDR3 comprises an amino acid sequence of SEQ ID NOS: 17959, 6312, and 4370, respectively.

[0508] The disclosure describes an antibody, antigen binding fragment, or polypeptide comprising a heavy chain variable region having a HCDR1, HCDR2, and HCDR3, and a light chain variable region having a LCDR1, LCDR2, and LCDR3, wherein the HCDR1, HCDR2, and HCDR3 comprises an amino acid sequence of SEQ ID NOS: 17141, 16911, and 9516, respectively and the LCDR1, LCDR2, and LCDR3 comprises an amino acid sequence of SEQ ID NOS: 16759, 16334, and 4013, respectively.

[0509] The disclosure describes an antibody, antigen binding fragment, or polypeptide comprising a heavy chain variable region having a HCDR1, HCDR2, and HCDR3, and a light chain variable region having a LCDR1, LCDR2, and LCDR3, wherein the HCDR1, HCDR2, and HCDR3 comprises an amino acid sequence of SEQ ID NOS: 11370, 16250, and 6078, respectively and the LCDR1, LCDR2, and LCDR3 comprises an amino acid sequence of SEQ ID NOS: 17959, 6318, and 17193, respectively.

[0510] The disclosure describes an antibody, antigen binding fragment, or polypeptide comprising a heavy chain variable region having a HCDR1, HCDR2, and HCDR3, and a light chain variable region having a LCDR1, LCDR2, and LCDR3, wherein the HCDR1, HCDR2, and HCDR3 comprises an amino acid sequence of SEQ ID NOS: 17272, 18342, and 4163, respectively and the LCDR1, LCDR2, and LCDR3 comprises an amino acid sequence of SEQ ID NOS: 16045, 9503, and 12787, respectively.

[0511] The disclosure describes an antibody, antigen binding fragment, or polypeptide comprising a heavy chain variable region having a HCDR1, HCDR2, and HCDR3, and a light chain variable region having a LCDR1, LCDR2, and LCDR3, wherein the HCDR1, HCDR2, and HCDR3 comprises an amino acid sequence of SEQ ID NOS:10306, 16508, and 11415, respectively and the LCDR1, LCDR2, and LCDR3 comprises an amino acid sequence of SEQ ID NOS: 16774, 11403, and 4234, respectively.

[0512] The disclosure describes an antibody, antigen binding fragment, or polypeptide comprising a heavy chain variable region having a HCDR1, HCDR2, and HCDR3, and a light chain variable region having a LCDR1, LCDR2, and LCDR3, wherein the HCDR1, HCDR2, and HCDR3 comprises an amino acid sequence of SEQ ID NOS:11370, 16252, and 10061, respectively and the LCDR1, LCDR2, and LCDR3 comprises an amino acid sequence of SEQ ID NOS:6180, 6207, and 11050, respectively.

[0513] The disclosure describes an antibody, antigen binding fragment, or polypeptide comprising a heavy chain variable region having a HCDR1, HCDR2, and HCDR3, and a light chain variable region having a LCDR1, LCDR2, and LCDR3, wherein the HCDR1, HCDR2, and HCDR3 comprises an amino acid sequence of SEQ ID NOS:16169, 16872, and 16914, respectively and the LCDR1, LCDR2, and LCDR3 comprises an amino acid sequence of SEQ ID NOS: 16007, 9503, and 12856, respectively.

[0514] The disclosure describes an antibody, antigen binding fragment, or polypeptide comprising a heavy chain variable region having a HCDR1, HCDR2, and HCDR3, and a light chain variable region having a LCDR1, LCDR2, and LCDR3, wherein the HCDR1, HCDR2, and HCDR3 comprises an amino acid sequence of SEQ ID NOS: 17270, 17778, and 6025, respectively and the LCDR1, LCDR2, and LCDR3 comprises an amino acid sequence of SEQ ID NOS:10890, 18275, and 12975, respectively.

[0515] The disclosure describes an antibody, antigen binding fragment, or polypeptide comprising a heavy chain variable region having a HCDR1, HCDR2, and HCDR3, and a light chain variable region having a LCDR1, LCDR2, and LCDR3, wherein the HCDR1, HCDR2, and HCDR3 comprises an amino acid sequence of SEQ ID NOS:17141, 16954, and 12374, respectively and the LCDR1, LCDR2, and LCDR3 comprises an amino acid sequence of SEQ ID NOS: 16045, 9503, and 12783, respectively.

[0516] The disclosure describes an antibody, antigen binding fragment, or polypeptide comprising a heavy chain variable region having a HCDR1, HCDR2, and HCDR3, and a light chain variable region having a LCDR1, LCDR2, and LCDR3, wherein the HCDR1, HCDR2, and HCDR3 comprises an amino acid sequence of SEQ ID NOS:17446, 4136, and 18618, respectively and the LCDR1, LCDR2, and LCDR3 comprises an amino acid sequence of SEQ ID NOS:15890, 10727, and 12819, respectively.

[0517] The disclosure describes an antibody, antigen binding fragment, or polypeptide comprising a heavy chain variable region having a HCDR1, HCDR2, and HCDR3, and a light chain variable region having a LCDR1, LCDR2, and LCDR3, wherein the HCDR1, HCDR2, and HCDR3 comprises an amino acid sequence of SEQ ID NOS:16692, 18569, and 11164, respectively and the LCDR1, LCDR2, and LCDR3 comprises an amino acid sequence of SEQ ID NOS: 16061, 9494, and 12657, respectively. having a LCDR1, LCDR2, and LCDR3, wherein the HCDR1, HCDR2, and HCDR3 comprises an amino acid sequence of SEQ ID NOS:17558, 9413, and 11661, respectively and the LCDR1, LCDR2, and LCDR3 comprises an amino acid sequence of SEQ ID NOS: 15710, 3980, and 12384, respectively.

[0518] The disclosure describes an antibody, antigen binding fragment, or polypeptide comprising a heavy chain variable region having a HCDR1, HCDR2, and HCDR3, and a light chain variable region having a LCDR1, LCDR2, and LCDR3, wherein the HCDR1, HCDR2, and HCDR3 comprises an amino acid sequence of SEQ ID NOS: 16602, 17820, and 4241, respectively and the LCDR1, LCDR2, and LCDR3 comprises an amino acid sequence of SEQ ID NOS:15819, 10908, and 12014, respectively.

[0519] The disclosure describes an antibody, antigen binding fragment, or polypeptide comprising a heavy chain variable region having a HCDR1, HCDR2, and HCDR3, and a light chain variable region having a LCDR1, LCDR2, and LCDR3, wherein the HCDR1, HCDR2, and HCDR3 comprises an amino acid sequence of SEQ ID NOS:4226, 9871, and 11976, respectively and the LCDR1, LCDR2, and LCDR3 comprises an amino acid sequence of SEQ ID NOS: 16058, 3983, and 12700, respectively.

[0520] The disclosure describes an antibody, antigen binding fragment, or polypeptide comprising a heavy chain variable region having a HCDR1, HCDR2, and HCDR3, and a light chain variable region having a LCDR1, LCDR2, and LCDR3, wherein the HCDR1, HCDR2, and HCDR3 comprises an amino acid sequence of SEQ ID NOS:4038, 11501, and 4309, respectively and the LCDR1, LCDR2, and LCDR3 comprises an amino acid sequence of SEQ ID NOS:10220, 15522, and 11281, respectively.

[0521] The disclosure describes an antibody, antigen binding fragment, or polypeptide comprising a heavy chain variable region having a HCDR1, HCDR2, and HCDR3, and a light chain variable region having a LCDR1, LCDR2, and LCDR3, wherein the HCDR1, HCDR2, and HCDR3 comprises an amino acid sequence of SEQ ID NOS: 11631, 18342, and 4268, respectively and the LCDR1, LCDR2, and LCDR3 comprises an amino acid sequence of SEQ ID NOS: 16067, 4425, and 12430, respectively.

[0522] The disclosure describes an antibody, antigen binding fragment, or polypeptide comprising a heavy chain variable region having a HCDR1, HCDR2, and HCDR3, and a light chain variable region having a LCDR1, LCDR2, and LCDR3, wherein the HCDR1, HCDR2, and HCDR3 comprises an amino acid sequence of SEQ ID NOS: 17856, 18585, and 6568, respectively and the LCDR1, LCDR2, and LCDR3 comprises an amino acid sequence of SEQ ID NOS: 16736, 7859, and 10275, respectively.

[0523] The disclosure describes an antibody, antigen binding fragment, or polypeptide comprising a heavy chain variable region having a HCDR1, HCDR2, and HCDR3, and a light chain variable region having a LCDR1, LCDR2, and LCDR3, wherein the HCDR1, HCDR2, and HCDR3 comprises an amino acid sequence of SEQ ID NOS: 17263, 9776, and 7885, respectively and the LCDR1, LCDR2, and LCDR3 comprises an amino acid sequence of SEQ ID NOS:10890, 18275, and 12979, respectively.

[0524] The disclosure describes an antibody, antigen binding fragment, or polypeptide comprising a heavy chain variable region having a HCDR1, HCDR2, and HCDR3, and a light chain variable region having a LCDR1, LCDR2, and LCDR3, wherein the HCDR1, HCDR2, and HCDR3 comprises an amino acid sequence of SEQ ID NOS:17446, 4140, and 11733, respectively and the LCDR1, LCDR2, and LCDR3 comprises an amino acid sequence of SEQ ID NOS: 16045, 9503, and 12775, respectively.

[0525] The disclosure describes an antibody, antigen binding fragment, or polypeptide comprising a heavy chain variable region having a HCDR1, HCDR2, and HCDR3, and a light chain variable region having a LCDR1, LCDR2, and LCDR3, wherein the HCDR1, HCDR2, and HCDR3 comprises an amino acid sequence of SEQ ID NOS: 11649, 9399, and 4395, respectively and the LCDR1, LCDR2, and LCDR3 comprises an amino acid sequence of SEQ ID NOS: 16045, 9499, and 12946, respectively.

[0526] The disclosure describes an antibody, antigen binding fragment, or polypeptide comprising a heavy chain variable region having a HCDR1, HCDR2, and HCDR3, and a light chain variable region having a LCDR1, LCDR2, and LCDR3, wherein the HCDR1, HCDR2, and HCDR3 comprises an amino acid sequence of SEQ ID NOS:16777, 16305, and 10194, respectively and the LCDR1, LCDR2, and LCDR3 comprises an amino acid sequence of SEQ ID NOS:15787, 16557, and 12541, respectively.

[0527] The disclosure describes an antibody, antigen binding fragment, or polypeptide comprising a heavy chain variable region having a HCDR1, HCDR2, and HCDR3, and a light chain variable region having a LCDR1, LCDR2, and LCDR3, wherein the HCDR1, HCDR2, and HCDR3 comprises an amino acid sequence of SEQ ID NOS:17635, 10254, and 17629, respectively and the LCDR1, LCDR2, and LCDR3 comprises an amino acid sequence of SEQ ID NOS: 15943, 9503, and 12866, respectively.

[0528] The disclosure describes an antibody, antigen binding fragment, or polypeptide comprising a heavy chain variable region having a HCDR1, HCDR2, and HCDR3, and a light chain variable region having a LCDR1, LCDR2, and LCDR3, wherein the HCDR1, HCDR2, and HCDR3 comprises an amino acid sequence of SEQ ID NOS:17443, 9388, and 10308, respectively and the LCDR1, LCDR2, and LCDR3 comprises an amino acid sequence of SEQ ID NOS: 16067, 4425, and 12436, respectively.

[0529] The disclosure describes an antibody, antigen binding fragment, or polypeptide comprising a heavy chain variable region having a HCDR1, HCDR2, and HCDR3, and a light chain variable region having a LCDR1, LCDR2, and LCDR3, wherein the HCDR1, HCDR2, and HCDR3 comprises an amino acid sequence of SEQ ID NOS: 17842, 11488, and 4213, respectively and the LCDR1, LCDR2, and LCDR3 comprises an amino acid sequence of SEQ ID NOS:16659, 11903, and 11874, respectively.

[0530] The disclosure describes an antibody, antigen binding fragment, or polypeptide comprising a heavy chain variable region having a HCDR1, HCDR2, and HCDR3, and a light chain variable region having a LCDR1, LCDR2, and LCDR3, wherein the HCDR1, HCDR2, and HCDR3 comprises an amino acid sequence of SEQ ID NOS: 17432, 18531, and 5939, respectively and the LCDR1, LCDR2, and LCDR3 comprises an amino acid sequence of SEQ ID NOS:16428, 10764, and 11223, respectively.

[0531] The disclosure describes an antibody, antigen binding fragment, or polypeptide comprising a heavy chain variable region having a HCDR1, HCDR2, and HCDR3, and a light chain variable region having a LCDR1, LCDR2, and LCDR3, wherein the HCDR1, HCDR2, and HCDR3 comprises an amino acid sequence of SEQ ID NOS:18100, 9570, and 17830, respectively and the LCDR1, LCDR2, and LCDR3 comprises an amino acid sequence of SEQ ID NOS: 15903, 6613, and 12023, respectively.

[0532] The disclosure describes an antibody, antigen binding fragment, or polypeptide comprising a heavy chain variable region having a HCDR1, HCDR2, and HCDR3, and a light chain variable region having a LCDR1, LCDR2, and LCDR3, wherein the HCDR1, HCDR2, and HCDR3 comprises an amino acid sequence of SEQ ID NOS:17443, 9388, and 18045, respectively and the LCDR1, LCDR2, and LCDR3 comprises an amino acid sequence of SEQ ID NOS: 16061, 9494, and 12677, respectively.

[0533] The disclosure describes an antibody, antigen binding fragment, or polypeptide comprising a heavy chain variable region having a HCDR1, HCDR2, and HCDR3, and a light chain variable region having a LCDR1, LCDR2, and LCDR3, wherein the HCDR1, HCDR2, and HCDR3 comprises an amino acid sequence of SEQ ID NOS: 17270, 17778, and 6499, respectively and the LCDR1, LCDR2, and LCDR3 comprises an amino acid sequence of SEQ ID NOS:18090, 11073, and 13614, respectively.

[0534] The disclosure describes an antibody, antigen binding fragment, or polypeptide comprising a heavy chain variable region having a HCDR1, HCDR2, and HCDR3, and a light chain variable region having a LCDR1, LCDR2, and LCDR3, wherein the HCDR1, HCDR2, and HCDR3 comprises an amino acid sequence of SEQ ID NOS:17005, 16831, and 18287, respectively and the LCDR1, LCDR2, and LCDR3 comprises an amino acid sequence of SEQ ID NOS: 16458, 10727, and 12802, respectively.

[0535] The disclosure describes an antibody, antigen binding fragment, or polypeptide comprising a heavy chain variable region having a HCDR1, HCDR2, and HCDR3, and a light chain variable region having a LCDR1, LCDR2, and LCDR3, wherein the HCDR1, HCDR2, and HCDR3 comprises an amino acid sequence of SEQ ID NOS: 16786, 16300, and 3945, respectively and the LCDR1, LCDR2, and LCDR3 comprises an amino acid sequence of SEQ ID NOS: 16052, 9494, and 12663, respectively.

[0536] The disclosure describes an antibody, antigen binding fragment, or polypeptide comprising a heavy chain variable region having a HCDR1, HCDR2, and HCDR3, and a light chain variable region having a LCDR1, LCDR2, and LCDR3, wherein the HCDR1, HCDR2, and HCDR3 comprises an amino acid sequence of SEQ ID NOS: 17849, 17822, and 4186, respectively and the LCDR1, LCDR2, and LCDR3 comprises an amino acid sequence of SEQ ID NOS: 16736, 7859, and 10279, respectively. having a LCDR1, LCDR2, and LCDR3, wherein the HCDR1, HCDR2, and HCDR3 comprises an amino acid sequence of SEQ ID NOS:17263, 9776, and 11682, respectively and the LCDR1, LCDR2, and LCDR3 comprises an amino acid sequence of SEQ ID NOS: 16067, 4425, and 12432, respectively.

[0537] The disclosure describes an antibody, antigen binding fragment, or polypeptide comprising a heavy chain variable region having a HCDR1, HCDR2, and HCDR3, and a light chain variable region having a LCDR1, LCDR2, and LCDR3, wherein the HCDR1, HCDR2, and HCDR3 comprises an amino acid sequence of SEQ ID NOS:17600, 9714, and 17120, respectively and the LCDR1, LCDR2, and LCDR3 comprises an amino acid sequence of SEQ ID NOS: 16048, 3973, and 12615, respectively.

[0538] The disclosure describes an antibody, antigen binding fragment, or polypeptide comprising a heavy chain variable region having a HCDR1, HCDR2, and HCDR3, and a light chain variable region having a LCDR1, LCDR2, and LCDR3, wherein the HCDR1, HCDR2, and HCDR3 comprises an amino acid sequence of SEQ ID NOS:17842, 11488, and 7812, respectively and the LCDR1, LCDR2, and LCDR3 comprises an amino acid sequence of SEQ ID NOS: 16736, 5977, and 10276, respectively.

[0539] The disclosure describes an antibody, antigen binding fragment, or polypeptide comprising a heavy chain variable region having a HCDR1, HCDR2, and HCDR3, and a light chain variable region having a LCDR1, LCDR2, and LCDR3, wherein the HCDR1, HCDR2, and HCDR3 comprises an amino acid sequence of SEQ ID NOS:11632, 10317, and 11565, respectively and the LCDR1, LCDR2, and LCDR3 comprises an amino acid sequence of SEQ ID NOS:16676, 11895, and 11866, respectively.

[0540] The disclosure describes an antibody, antigen binding fragment, or polypeptide comprising a heavy chain variable region having a HCDR1, HCDR2, and HCDR3, and a light chain variable region having a LCDR1, LCDR2, and LCDR3, wherein the HCDR1, HCDR2, and HCDR3 comprises an amino acid sequence of SEQ ID NOS: 17838, 16277, and 5949, respectively and the LCDR1, LCDR2, and LCDR3 comprises an amino acid sequence of SEQ ID NOS:17924, 10094, and 13579, respectively.

[0541] The disclosure describes an antibody, antigen binding fragment, or polypeptide comprising a heavy chain variable region having a HCDR1, HCDR2, and HCDR3, and a light chain variable region having a LCDR1, LCDR2, and LCDR3, wherein the HCDR1, HCDR2, and HCDR3 comprises an amino acid sequence of SEQ ID NOS: 17848, 10544, and 6046, respectively and the LCDR1, LCDR2, and LCDR3 comprises an amino acid sequence of SEQ ID NOS: 16061, 9494, and 12690, respectively.

[0542] The disclosure describes an antibody, antigen binding fragment, or polypeptide comprising a heavy chain variable region having a HCDR1, HCDR2, and HCDR3, and a light chain variable region having a LCDR1, LCDR2, and LCDR3, wherein the HCDR1, HCDR2, and HCDR3 comprises an amino acid sequence of SEQ ID NOS:10337, 9734, and 11968, respectively and the LCDR1, LCDR2, and LCDR3 comprises an amino acid sequence of SEQ ID NOS: 16061, 9494, and 12697, respectively.

[0543] The disclosure describes an antibody, antigen binding fragment, or polypeptide comprising a heavy chain variable region having a HCDR1, HCDR2, and HCDR3, and a light chain variable region having a LCDR1, LCDR2, and LCDR3, wherein the HCDR1, HCDR2, and HCDR3 comprises an amino acid sequence of SEQ ID NOS:17856, 18585, and 17589, respectively and the LCDR1, LCDR2, and LCDR3 comprises an amino acid sequence of SEQ ID NOS: 16061, 9494, and 12704, respectively.

[0544] The disclosure describes an antibody, antigen binding fragment, or polypeptide comprising a heavy chain variable region having a HCDR1, HCDR2, and HCDR3, and a light chain variable region having a LCDR1, LCDR2, and LCDR3, wherein the HCDR1, HCDR2, and HCDR3 comprises an amino acid sequence of SEQ ID NOS: 17466, 16919, and 6709, respectively and the LCDR1, LCDR2, and LCDR3 comprises an amino acid sequence of SEQ ID NOS:15890, 10727, and 12835, respectively.

[0545] The disclosure describes an antibody, antigen binding fragment, or polypeptide comprising a heavy chain variable region having a HCDR1, HCDR2, and HCDR3, and a light chain variable region having a LCDR1, LCDR2, and LCDR3, wherein the HCDR1, HCDR2, and HCDR3 comprises an amino acid sequence of SEQ ID NOS: 17842, 11488, and 7892, respectively and the LCDR1, LCDR2, and LCDR3 comprises an amino acid sequence of SEQ ID NOS:17959, 6318, and 17194, respectively.

[0546] The disclosure describes an antibody, antigen binding fragment, or polypeptide comprising a heavy chain variable region having a HCDR1, HCDR2, and HCDR3, and a light chain variable region having a LCDR1, LCDR2, and LCDR3, wherein the HCDR1, HCDR2, and HCDR3 comprises an amino acid sequence of SEQ ID NOS: 17444, 18342, and 6190, respectively and the LCDR1, LCDR2, and LCDR3 comprises an amino acid sequence of SEQ ID NOS: 15879, 9503, and 12792, respectively.

[0547] The disclosure describes an antibody, antigen binding fragment, or polypeptide comprising a heavy chain variable region having a HCDR1, HCDR2, and HCDR3, and a light chain variable region having a LCDR1, LCDR2, and LCDR3, wherein the HCDR1, HCDR2, and HCDR3 comprises an amino acid sequence of SEQ ID NOS:16525, 9785, and 4161, respectively and the LCDR1, LCDR2, and LCDR3 comprises an amino acid sequence of SEQ ID NOS:15676, 10736, and 12023, respectively.

[0548] The disclosure describes an antibody, antigen binding fragment, or polypeptide comprising a heavy chain variable region having a HCDR1, HCDR2, and HCDR3, and a light chain variable region having a LCDR1, LCDR2, and LCDR3, wherein the HCDR1, HCDR2, and HCDR3 comprises an amino acid sequence of SEQ ID NOS: 16779, 16311, and 9667, respectively and the LCDR1, LCDR2, and LCDR3 comprises an amino acid sequence of SEQ ID NOS: 16067, 4425, and 12433, respectively.

[0549] The disclosure describes an antibody, antigen binding fragment, or polypeptide comprising a heavy chain variable region having a HCDR1, HCDR2, and HCDR3, and a light chain variable region having a LCDR1, LCDR2, and LCDR3, wherein the HCDR1, HCDR2, and HCDR3 comprises an amino acid sequence of SEQ ID NOS:17463, 9793, and 11759, respectively and the LCDR1, LCDR2, and LCDR3 comprises an amino acid sequence of SEQ ID NOS: 16084, 9492, and 12701, respectively.

[0550] The disclosure describes an antibody, antigen binding fragment, or polypeptide comprising a heavy chain variable region having a HCDR1, HCDR2, and HCDR3, and a light chain variable region having a LCDR1, LCDR2, and LCDR3, wherein the HCDR1, HCDR2, and HCDR3 comprises an amino acid sequence of SEQ ID NOS:11406, 16940, and 15589, respectively and the LCDR1, LCDR2, and LCDR3 comprises an amino acid sequence of SEQ ID NOS:16023, 10230, and 12618, respectively.

[0551] The disclosure describes an antibody, antigen binding fragment, or polypeptide comprising a heavy chain variable region having a HCDR1, HCDR2, and HCDR3, and a light chain variable region having a LCDR1, LCDR2, and LCDR3, wherein the HCDR1, HCDR2, and HCDR3 comprises an amino acid sequence of SEQ ID NOS: 17848, 10544, and 6102, respectively and the LCDR1, LCDR2, and LCDR3 comprises an amino acid sequence of SEQ ID NOS: 16067, 4425, and 12432, respectively.

[0552] The disclosure describes an antibody, antigen binding fragment, or polypeptide comprising a heavy chain variable region having a HCDR1, HCDR2, and HCDR3, and a light chain variable region having a LCDR1, LCDR2, and LCDR3, wherein the HCDR1, HCDR2, and HCDR3 comprises an amino acid sequence of SEQ ID NOS: 17263, 9776, and 7893, respectively and the LCDR1, LCDR2, and LCDR3 comprises an amino acid sequence of SEQ ID NOS:9633, 4467, and 15558, respectively.

[0553] The disclosure describes an antibody, antigen binding fragment, or polypeptide comprising a heavy chain variable region having a HCDR1, HCDR2, and HCDR3, and a light chain variable region having a LCDR1, LCDR2, and LCDR3, wherein the HCDR1, HCDR2, and HCDR3 comprises an amino acid sequence of SEQ ID NOS:17441, 18360, and 17538, respectively and the LCDR1, LCDR2, and LCDR3 comprises an amino acid sequence of SEQ ID NOS:10059, 17222, and 18117, respectively.

[0554] The disclosure describes an antibody, antigen binding fragment, or polypeptide comprising a heavy chain variable region having a HCDR1, HCDR2, and HCDR3, and a light chain variable region having a LCDR1, LCDR2, and LCDR3, wherein the HCDR1, HCDR2, and HCDR3 comprises an amino acid sequence of SEQ ID NOS: 17838, 16277, and 4456, respectively and the LCDR1, LCDR2, and LCDR3 comprises an amino acid sequence of SEQ ID NOS:16659, 11900, and 11881, respectively.

[0555] The disclosure describes an antibody, antigen binding fragment, or polypeptide comprising a heavy chain variable region having a HCDR1, HCDR2, and HCDR3, and a light chain variable region having a LCDR1, LCDR2, and LCDR3, wherein the HCDR1, HCDR2, and HCDR3 comprises an amino acid sequence of SEQ ID NOS: 16529, 9573, and 4579, respectively and the LCDR1, LCDR2, and LCDR3 comprises an amino acid sequence of SEQ ID NOS:15988, 10264, and 12772, respectively. having a LCDR1, LCDR2, and LCDR3, wherein the HCDR1, HCDR2, and HCDR3 comprises an amino acid sequence of SEQ ID NOS:16790, 11580, and 12308, respectively and the LCDR1, LCDR2, and LCDR3 comprises an amino acid sequence of SEQ ID NOS:15618, 9657, and 12467, respectively.

[0556] The disclosure describes an antibody, antigen binding fragment, or polypeptide comprising a heavy chain variable region having a HCDR1, HCDR2, and HCDR3, and a light chain variable region having a LCDR1, LCDR2, and LCDR3, wherein the HCDR1, HCDR2, and HCDR3 comprises an amino acid sequence of SEQ ID NOS:9679, 18080, and 6703, respectively and the LCDR1, LCDR2, and LCDR3 comprises an amino acid sequence of SEQ ID NOS: 15735, 6716, and 12589, respectively.

[0557] The disclosure describes an antibody, antigen binding fragment, or polypeptide comprising a heavy chain variable region having a HCDR1, HCDR2, and HCDR3, and a light chain variable region having a LCDR1, LCDR2, and LCDR3, wherein the HCDR1, HCDR2, and HCDR3 comprises an amino acid sequence of SEQ ID NOS:17263, 9776, and 11728, respectively and the LCDR1, LCDR2, and LCDR3 comprises an amino acid sequence of SEQ ID NOS: 16061, 9494, and 12677, respectively.

[0558] The disclosure describes an antibody, antigen binding fragment, or polypeptide comprising a heavy chain variable region having a HCDR1, HCDR2, and HCDR3, and a light chain variable region having a LCDR1, LCDR2, and LCDR3, wherein the HCDR1, HCDR2, and HCDR3 comprises an amino acid sequence of SEQ ID NOS: 17466, 16919, and 6082, respectively and the LCDR1, LCDR2, and LCDR3 comprises an amino acid sequence of SEQ ID NOS:15890, 10727, and 12829, respectively.

[0559] The disclosure describes an antibody, antigen binding fragment, or polypeptide comprising a heavy chain variable region having a HCDR1, HCDR2, and HCDR3, and a light chain variable region having a LCDR1, LCDR2, and LCDR3, wherein the HCDR1, HCDR2, and HCDR3 comprises an amino acid sequence of SEQ ID NOS:6510, 9379, and 18248, respectively and the LCDR1, LCDR2, and LCDR3 comprises an amino acid sequence of SEQ ID NOS:16408, 10987, and 11209, respectively.

[0560] The disclosure describes an antibody, antigen binding fragment, or polypeptide comprising a heavy chain variable region having a HCDR1, HCDR2, and HCDR3, and a light chain variable region having a LCDR1, LCDR2, and LCDR3, wherein the HCDR1, HCDR2, and HCDR3 comprises an amino acid sequence of SEQ ID NOS:4177, 16216, and 17076, respectively and the LCDR1, LCDR2, and LCDR3 comprises an amino acid sequence of SEQ ID NOS:16410, 10985, and 11197, respectively.

[0561] The disclosure describes an antibody, antigen binding fragment, or polypeptide comprising a heavy chain variable region having a HCDR1, HCDR2, and HCDR3, and a light chain variable region having a LCDR1, LCDR2, and LCDR3, wherein the HCDR1, HCDR2, and HCDR3 comprises an amino acid sequence of SEQ ID NOS: 17838, 16277, and 4618, respectively and the LCDR1, LCDR2, and LCDR3 comprises an amino acid sequence of SEQ ID NOS: 15691, 3969, and 11094, respectively.

[0562] The disclosure describes an antibody, antigen binding fragment, or polypeptide comprising a heavy chain variable region having a HCDR1, HCDR2, and HCDR3, and a light chain variable region having a LCDR1, LCDR2, and LCDR3, wherein the HCDR1, HCDR2, and HCDR3 comprises an amino acid sequence of SEQ ID NOS:17446, 4136, and 10105, respectively and the LCDR1, LCDR2, and LCDR3 comprises an amino acid sequence of SEQ ID NOS:16642, 10747, and 13030, respectively.

[0563] The disclosure describes an antibody, antigen binding fragment, or polypeptide comprising a heavy chain variable region having a HCDR1, HCDR2, and HCDR3, and a light chain variable region having a LCDR1, LCDR2, and LCDR3, wherein the HCDR1, HCDR2, and HCDR3 comprises an amino acid sequence of SEQ ID NOS:11643, 10542, and 10345, respectively and the LCDR1, LCDR2, and LCDR3 comprises an amino acid sequence of SEQ ID NOS:17959, 6244, and 11602, respectively.

[0564] The disclosure describes an antibody, antigen binding fragment, or polypeptide comprising a heavy chain variable region having a HCDR1, HCDR2, and HCDR3, and a light chain variable region having a LCDR1, LCDR2, and LCDR3, wherein the HCDR1, HCDR2, and HCDR3 comprises an amino acid sequence of SEQ ID NOS: 17279, 17253, and 5944, respectively and the LCDR1, LCDR2, and LCDR3 comprises an amino acid sequence of SEQ ID NOS: 16045, 9472, and 12887, respectively.

[0565] The disclosure describes an antibody, antigen binding fragment, or polypeptide comprising a heavy chain variable region having a HCDR1, HCDR2, and HCDR3, and a light chain variable region having a LCDR1, LCDR2, and LCDR3, wherein the HCDR1, HCDR2, and HCDR3 comprises an amino acid sequence of SEQ ID NOS:18100, 9704, and 17218, respectively and the LCDR1, LCDR2, and LCDR3 comprises an amino acid sequence of SEQ ID NOS: 16091, 9492, and 12701, respectively.

[0566] The disclosure describes an antibody, antigen binding fragment, or polypeptide comprising a heavy chain variable region having a HCDR1, HCDR2, and HCDR3, and a light chain variable region having a LCDR1, LCDR2, and LCDR3, wherein the HCDR1, HCDR2, and HCDR3 comprises an amino acid sequence of SEQ ID NOS: 17270, 17767, and 6037, respectively and the LCDR1, LCDR2, and LCDR3 comprises an amino acid sequence of SEQ ID NOS: 16736, 7859, and 10273, respectively.

[0567] The disclosure describes an antibody, antigen binding fragment, or polypeptide comprising a heavy chain variable region having a HCDR1, HCDR2, and HCDR3, and a light chain variable region having a LCDR1, LCDR2, and LCDR3, wherein the HCDR1, HCDR2, and HCDR3 comprises an amino acid sequence of SEQ ID NOS: 17602, 18337, and 6022, respectively and the LCDR1, LCDR2, and LCDR3 comprises an amino acid sequence of SEQ ID NOS: 15770, 3953, and 12479, respectively.

[0568] The disclosure describes an antibody, antigen binding fragment, or polypeptide comprising a heavy chain variable region having a HCDR1, HCDR2, and HCDR3, and a light chain variable region having a LCDR1, LCDR2, and LCDR3, wherein the HCDR1, HCDR2, and HCDR3 comprises an amino acid sequence of SEQ ID NOS:18100, 9703, and 17121, respectively and the LCDR1, LCDR2, and LCDR3 comprises an amino acid sequence of SEQ ID NOS: 15740, 4413, and 12685, respectively.

[0569] The disclosure describes an antibody, antigen binding fragment, or polypeptide comprising a heavy chain variable region having a HCDR1, HCDR2, and HCDR3, and a light chain variable region having a LCDR1, LCDR2, and LCDR3, wherein the HCDR1, HCDR2, and HCDR3 comprises an amino acid sequence of SEQ ID NOS:16796, 16939, and 10434, respectively and the LCDR1, LCDR2, and LCDR3 comprises an amino acid sequence of SEQ ID NOS: 16736, 7859, and 10278, respectively.

[0570] The disclosure describes an antibody, antigen binding fragment, or polypeptide comprising a heavy chain variable region having a HCDR1, HCDR2, and HCDR3, and a light chain variable region having a LCDR1, LCDR2, and LCDR3, wherein the HCDR1, HCDR2, and HCDR3 comprises an amino acid sequence of SEQ ID NOS:11627, 9883, and 16913, respectively and the LCDR1, LCDR2, and LCDR3 comprises an amino acid sequence of SEQ ID NOS: 15950, 9503, and 12780, respectively.

[0571] The disclosure describes an antibody, antigen binding fragment, or polypeptide comprising a heavy chain variable region having a HCDR1, HCDR2, and HCDR3, and a light chain variable region having a LCDR1, LCDR2, and LCDR3, wherein the HCDR1, HCDR2, and HCDR3 comprises an amino acid sequence of SEQ ID NOS:10188, 9875, and 11972, respectively and the LCDR1, LCDR2, and LCDR3 comprises an amino acid sequence of SEQ ID NOS: 15926, 9503, and 12655, respectively.

[0572] The disclosure describes an antibody, antigen binding fragment, or polypeptide comprising a heavy chain variable region having a HCDR1, HCDR2, and HCDR3, and a light chain variable region having a LCDR1, LCDR2, and LCDR3, wherein the HCDR1, HCDR2, and HCDR3 comprises an amino acid sequence of SEQ ID NOS:16796, 16939, and 10956, respectively and the LCDR1, LCDR2, and LCDR3 comprises an amino acid sequence of SEQ ID NOS:16659, 11900, and 11880, respectively.

[0573] The disclosure describes an antibody, antigen binding fragment, or polypeptide comprising a heavy chain variable region having a HCDR1, HCDR2, and HCDR3, and a light chain variable region having a LCDR1, LCDR2, and LCDR3, wherein the HCDR1, HCDR2, and HCDR3 comprises an amino acid sequence of SEQ ID NOS:17446, 4136, and 17563, respectively and the LCDR1, LCDR2, and LCDR3 comprises an amino acid sequence of SEQ ID NOS:16659, 11900, and 11876, respectively.

[0574] The disclosure describes an antibody, antigen binding fragment, or polypeptide comprising a heavy chain variable region having a HCDR1, HCDR2, and HCDR3, and a light chain variable region having a LCDR1, LCDR2, and LCDR3, wherein the HCDR1, HCDR2, and HCDR3 comprises an amino acid sequence of SEQ ID NOS: 17842, 11511, and 4291, respectively and the LCDR1, LCDR2, and LCDR3 comprises an amino acid sequence of SEQ ID NOS:16420, 10926, and 11270, respectively. having a LCDR1, LCDR2, and LCDR3, wherein the HCDR1, HCDR2, and HCDR3 comprises an amino acid sequence of SEQ ID NOS:4324, 18325, and 6714, respectively and the LCDR1, LCDR2, and LCDR3 comprises an amino acid sequence of SEQ ID NOS: 16061, 3974, and 12674, respectively.

[0575] The disclosure describes an antibody, antigen binding fragment, or polypeptide comprising a heavy chain variable region having a HCDR1, HCDR2, and HCDR3, and a light chain variable region having a LCDR1, LCDR2, and LCDR3, wherein the HCDR1, HCDR2, and HCDR3 comprises an amino acid sequence of SEQ ID NOS:17463, 9879, and 11761, respectively and the LCDR1, LCDR2, and LCDR3 comprises an amino acid sequence of SEQ ID NOS: 16014, 9480, and 12701, respectively.

[0576] The disclosure describes an antibody, antigen binding fragment, or polypeptide comprising a heavy chain variable region having a HCDR1, HCDR2, and HCDR3, and a light chain variable region having a LCDR1, LCDR2, and LCDR3, wherein the HCDR1, HCDR2, and HCDR3 comprises an amino acid sequence of SEQ ID NOS:16779, 16311, and 10026, respectively and the LCDR1, LCDR2, and LCDR3 comprises an amino acid sequence of SEQ ID NOS: 16642, 10747, and 13026, respectively.

[0577] The disclosure describes an antibody, antigen binding fragment, or polypeptide comprising a heavy chain variable region having a HCDR1, HCDR2, and HCDR3, and a light chain variable region having a LCDR1, LCDR2, and LCDR3, wherein the HCDR1, HCDR2, and HCDR3 comprises an amino acid sequence of SEQ ID NOS: 16692, 18569, and 4021, respectively and the LCDR1, LCDR2, and LCDR3 comprises an amino acid sequence of SEQ ID NOS: 16061, 9494, and 12677, respectively.

[0578] The disclosure describes an antibody, antigen binding fragment, or polypeptide comprising a heavy chain variable region having a HCDR1, HCDR2, and HCDR3, and a light chain variable region having a LCDR1, LCDR2, and LCDR3, wherein the HCDR1, HCDR2, and HCDR3 comprises an amino acid sequence of SEQ ID NOS:6145, 16320, and 17539, respectively and the LCDR1, LCDR2, and LCDR3 comprises an amino acid sequence of SEQ ID NOS: 16061, 9494, and 12671, respectively.

[0579] The disclosure describes an antibody, antigen binding fragment, or polypeptide comprising a heavy chain variable region having a HCDR1, HCDR2, and HCDR3, and a light chain variable region having a LCDR1, LCDR2, and LCDR3, wherein the HCDR1, HCDR2, and HCDR3 comprises an amino acid sequence of SEQ ID NOS:17443, 17809, and 16789, respectively and the LCDR1, LCDR2, and LCDR3 comprises an amino acid sequence of SEQ ID NOS:17959, 6312, and 17185, respectively.

[0580] The disclosure describes an antibody, antigen binding fragment, or polypeptide comprising a heavy chain variable region having a HCDR1, HCDR2, and HCDR3, and a light chain variable region having a LCDR1, LCDR2, and LCDR3, wherein the HCDR1, HCDR2, and HCDR3 comprises an amino acid sequence of SEQ ID NOS:6548, 18025, and 5899, respectively and the LCDR1, LCDR2, and LCDR3 comprises an amino acid sequence of SEQ ID NOS: 17931, 7982, and 4336, respectively.

[0581] The disclosure describes an antibody, antigen binding fragment, or polypeptide comprising a heavy chain variable region having a HCDR1, HCDR2, and HCDR3, and a light chain variable region having a LCDR1, LCDR2, and LCDR3, wherein the HCDR1, HCDR2, and HCDR3 comprises an amino acid sequence of SEQ ID NOS: 10367, 18323, and 6020, respectively and the LCDR1, LCDR2, and LCDR3 comprises an amino acid sequence of SEQ ID NOS: 15713, 3982, and 13000, respectively.

[0582] The disclosure describes an antibody, antigen binding fragment, or polypeptide comprising a heavy chain variable region having a HCDR1, HCDR2, and HCDR3, and a light chain variable region having a LCDR1, LCDR2, and LCDR3, wherein the HCDR1, HCDR2, and HCDR3 comprises an amino acid sequence of SEQ ID NOS:16516, 9807, and 17833, respectively and the LCDR1, LCDR2, and LCDR3 comprises an amino acid sequence of SEQ ID NOS:10882, 18275, and 12997, respectively.

[0583] The disclosure describes an antibody, antigen binding fragment, or polypeptide comprising a heavy chain variable region having a HCDR1, HCDR2, and HCDR3, and a light chain variable region having a LCDR1, LCDR2, and LCDR3, wherein the HCDR1, HCDR2, and HCDR3 comprises an amino acid sequence of SEQ ID NOS: 17141, 16954, and 6178, respectively and the LCDR1, LCDR2, and LCDR3 comprises an amino acid sequence of SEQ ID NOS: 15893, 3969, and 12522, respectively.

[0584] The disclosure describes an antibody, antigen binding fragment, or polypeptide comprising a heavy chain variable region having a HCDR1, HCDR2, and HCDR3, and a light chain variable region having a LCDR1, LCDR2, and LCDR3, wherein the HCDR1, HCDR2, and HCDR3 comprises an amino acid sequence of SEQ ID NOS:17141, 16954, and 11978, respectively and the LCDR1, LCDR2, and LCDR3 comprises an amino acid sequence of SEQ ID NOS:15805, 18441, and 10448, respectively.

[0585] The disclosure describes an antibody, antigen binding fragment, or polypeptide comprising a heavy chain variable region having a HCDR1, HCDR2, and HCDR3, and a light chain variable region having a LCDR1, LCDR2, and LCDR3, wherein the HCDR1, HCDR2, and HCDR3 comprises an amino acid sequence of SEQ ID NOS: 11561, 10577, and 6248, respectively and the LCDR1, LCDR2, and LCDR3 comprises an amino acid sequence of SEQ ID NOS: 16036, 9503, and 12764, respectively.

[0586] The disclosure describes an antibody, antigen binding fragment, or polypeptide comprising a heavy chain variable region having a HCDR1, HCDR2, and HCDR3, and a light chain variable region having a LCDR1, LCDR2, and LCDR3, wherein the HCDR1, HCDR2, and HCDR3 comprises an amino acid sequence of SEQ ID NOS:17558, 11037, and 16502, respectively and the LCDR1, LCDR2, and LCDR3 comprises an amino acid sequence of SEQ ID NOS: 16750, 17007, and 3997, respectively.

[0587] The disclosure describes an antibody, antigen binding fragment, or polypeptide comprising a heavy chain variable region having a HCDR1, HCDR2, and HCDR3, and a light chain variable region having a LCDR1, LCDR2, and LCDR3, wherein the HCDR1, HCDR2, and HCDR3 comprises an amino acid sequence of SEQ ID NOS:16796, 16939, and 10989, respectively and the LCDR1, LCDR2, and LCDR3 comprises an amino acid sequence of SEQ ID NOS: 16045, 9503, and 12799, respectively.

[0588] The disclosure describes an antibody, antigen binding fragment, or polypeptide comprising a heavy chain variable region having a HCDR1, HCDR2, and HCDR3, and a light chain variable region having a LCDR1, LCDR2, and LCDR3, wherein the HCDR1, HCDR2, and HCDR3 comprises an amino acid sequence of SEQ ID NOS: 16692, 18569, and 9616, respectively and the LCDR1, LCDR2, and LCDR3 comprises an amino acid sequence of SEQ ID NOS:11949, 10024, and 11590, respectively.

[0589] The disclosure describes an antibody, antigen binding fragment, or polypeptide comprising a heavy chain variable region having a HCDR1, HCDR2, and HCDR3, and a light chain variable region having a LCDR1, LCDR2, and LCDR3, wherein the HCDR1, HCDR2, and HCDR3 comprises an amino acid sequence of SEQ ID NOS: 11383, 18529, and 6182, respectively and the LCDR1, LCDR2, and LCDR3 comprises an amino acid sequence of SEQ ID NOS: 15603, 3951, and 10453, respectively.

[0590] The disclosure describes an antibody, antigen binding fragment, or polypeptide comprising a heavy chain variable region having a HCDR1, HCDR2, and HCDR3, and a light chain variable region having a LCDR1, LCDR2, and LCDR3, wherein the HCDR1, HCDR2, and HCDR3 comprises an amino acid sequence of SEQ ID NOS: 17848, 10544, and 4612, respectively and the LCDR1, LCDR2, and LCDR3 comprises an amino acid sequence of SEQ ID NOS:11949, 10024, and 11588, respectively.

[0591] The disclosure describes an antibody, antigen binding fragment, or polypeptide comprising a heavy chain variable region having a HCDR1, HCDR2, and HCDR3, and a light chain variable region having a LCDR1, LCDR2, and LCDR3, wherein the HCDR1, HCDR2, and HCDR3 comprises an amino acid sequence of SEQ ID NOS:17883, 10549, and 10171, respectively and the LCDR1, LCDR2, and LCDR3 comprises an amino acid sequence of SEQ ID NOS: 15615, 16352, and 11080, respectively.

[0592] The disclosure describes an antibody, antigen binding fragment, or polypeptide comprising a heavy chain variable region having a HCDR1, HCDR2, and HCDR3, and a light chain variable region having a LCDR1, LCDR2, and LCDR3, wherein the HCDR1, HCDR2, and HCDR3 comprises an amino acid sequence of SEQ ID NOS:17463, 9855, and 11757, respectively and the LCDR1, LCDR2, and LCDR3 comprises an amino acid sequence of SEQ ID NOS: 15984, 9480, and 12697, respectively.

[0593] The disclosure describes an antibody, antigen binding fragment, or polypeptide comprising a heavy chain variable region having a HCDR1, HCDR2, and HCDR3, and a light chain variable region having a LCDR1, LCDR2, and LCDR3, wherein the HCDR1, HCDR2, and HCDR3 comprises an amino acid sequence of SEQ ID NOS:6576, 18310, and 10293, respectively and the LCDR1, LCDR2, and LCDR3 comprises an amino acid sequence of SEQ ID NOS:18088, 11073, and 13617, respectively. having a LCDR1, LCDR2, and LCDR3, wherein the HCDR1, HCDR2, and HCDR3 comprises an amino acid sequence of SEQ ID NOS:17263, 9776, and 17559, respectively and the LCDR1, LCDR2, and LCDR3 comprises an amino acid sequence of SEQ ID NOS: 16045, 9503, and 12784, respectively.

[0594] The disclosure describes an antibody, antigen binding fragment, or polypeptide comprising a heavy chain variable region having a HCDR1, HCDR2, and HCDR3, and a light chain variable region having a LCDR1, LCDR2, and LCDR3, wherein the HCDR1, HCDR2, and HCDR3 comprises an amino acid sequence of SEQ ID NOS:11673, 10535, and 10504, respectively and the LCDR1, LCDR2, and LCDR3 comprises an amino acid sequence of SEQ ID NOS:10894, 18276, and 12962, respectively.

[0595] The disclosure describes an antibody, antigen binding fragment, or polypeptide comprising a heavy chain variable region having a HCDR1, HCDR2, and HCDR3, and a light chain variable region having a LCDR1, LCDR2, and LCDR3, wherein the HCDR1, HCDR2, and HCDR3 comprises an amino acid sequence of SEQ ID NOS:11651, 4074, and 18624, respectively and the LCDR1, LCDR2, and LCDR3 comprises an amino acid sequence of SEQ ID NOS: 10533, 5989, and 9509, respectively.

[0596] The disclosure describes an antibody, antigen binding fragment, or polypeptide comprising a heavy chain variable region having a HCDR1, HCDR2, and HCDR3, and a light chain variable region having a LCDR1, LCDR2, and LCDR3, wherein the HCDR1, HCDR2, and HCDR3 comprises an amino acid sequence of SEQ ID NOS: 11660, 16896, and 4509, respectively and the LCDR1, LCDR2, and LCDR3 comprises an amino acid sequence of SEQ ID NOS:15980, 17868, and 12868, respectively.

[0597] The disclosure describes an antibody, antigen binding fragment, or polypeptide comprising a heavy chain variable region having a HCDR1, HCDR2, and HCDR3, and a light chain variable region having a LCDR1, LCDR2, and LCDR3, wherein the HCDR1, HCDR2, and HCDR3 comprises an amino acid sequence of SEQ ID NOS:4242, 10402, and 16363, respectively and the LCDR1, LCDR2, and LCDR3 comprises an amino acid sequence of SEQ ID NOS: 15765, 6616, and 12033, respectively.

[0598] The disclosure describes an antibody, antigen binding fragment, or polypeptide comprising a heavy chain variable region having a HCDR1, HCDR2, and HCDR3, and a light chain variable region having a LCDR1, LCDR2, and LCDR3, wherein the HCDR1, HCDR2, and HCDR3 comprises an amino acid sequence of SEQ ID NOS: 16529, 9576, and 4580, respectively and the LCDR1, LCDR2, and LCDR3 comprises an amino acid sequence of SEQ ID NOS: 15988, 9503, and 12772, respectively.

[0599] The disclosure describes an antibody, antigen binding fragment, or polypeptide comprising a heavy chain variable region having a HCDR1, HCDR2, and HCDR3, and a light chain variable region having a LCDR1, LCDR2, and LCDR3, wherein the HCDR1, HCDR2, and HCDR3 comprises an amino acid sequence of SEQ ID NOS:17068, 9877, and 11973, respectively and the LCDR1, LCDR2, and LCDR3 comprises an amino acid sequence of SEQ ID NOS: 16044, 9503, and 12599, respectively.

[0600] The disclosure describes an antibody, antigen binding fragment, or polypeptide comprising a heavy chain variable region having a HCDR1, HCDR2, and HCDR3, and a light chain variable region having a LCDR1, LCDR2, and LCDR3, wherein the HCDR1, HCDR2, and HCDR3 comprises an amino acid sequence of SEQ ID NOS:17263, 9776, and 4211, respectively and the LCDR1, LCDR2, and LCDR3 comprises an amino acid sequence of SEQ ID NOS: 16067, 4425, and 12438, respectively.

[0601] The disclosure describes an antibody, antigen binding fragment, or polypeptide comprising a heavy chain variable region having a HCDR1, HCDR2, and HCDR3, and a light chain variable region having a LCDR1, LCDR2, and LCDR3, wherein the HCDR1, HCDR2, and HCDR3 comprises an amino acid sequence of SEQ ID NOS: 17270, 4146, and 6794, respectively and the LCDR1, LCDR2, and LCDR3 comprises an amino acid sequence of SEQ ID NOS: 15713, 3982, and 12387, respectively.

[0602] The disclosure describes an antibody, antigen binding fragment, or polypeptide comprising a heavy chain variable region having a HCDR1, HCDR2, and HCDR3, and a light chain variable region having a LCDR1, LCDR2, and LCDR3, wherein the HCDR1, HCDR2, and HCDR3 comprises an amino acid sequence of SEQ ID NOS:17848, 10544, and 11707, respectively and the LCDR1, LCDR2, and LCDR3 comprises an amino acid sequence of SEQ ID NOS:10890, 18275, and 12992, respectively.

[0603] The disclosure describes an antibody, antigen binding fragment, or polypeptide comprising a heavy chain variable region having a HCDR1, HCDR2, and HCDR3, and a light chain variable region having a LCDR1, LCDR2, and LCDR3, wherein the HCDR1, HCDR2, and HCDR3 comprises an amino acid sequence of SEQ ID NOS: 17648, 11498, and 4290, respectively and the LCDR1, LCDR2, and LCDR3 comprises an amino acid sequence of SEQ ID NOS:16377, 10926, and 11268, respectively.

[0604] The disclosure describes an antibody, antigen binding fragment, or polypeptide comprising a heavy chain variable region having a HCDR1, HCDR2, and HCDR3, and a light chain variable region having a LCDR1, LCDR2, and LCDR3, wherein the HCDR1, HCDR2, and HCDR3 comprises an amino acid sequence of SEQ ID NOS:16171, 16871, and 16931, respectively and the LCDR1, LCDR2, and LCDR3 comprises an amino acid sequence of SEQ ID NOS: 16079, 9503, and 12856, respectively.

[0605] The disclosure describes an antibody, antigen binding fragment, or polypeptide comprising a heavy chain variable region having a HCDR1, HCDR2, and HCDR3, and a light chain variable region having a LCDR1, LCDR2, and LCDR3, wherein the HCDR1, HCDR2, and HCDR3 comprises an amino acid sequence of SEQ ID NOS: 17443, 17809, and 5951, respectively and the LCDR1, LCDR2, and LCDR3 comprises an amino acid sequence of SEQ ID NOS:16642, 10747, and 13025, respectively.

[0606] The disclosure describes an antibody, antigen binding fragment, or polypeptide comprising a heavy chain variable region having a HCDR1, HCDR2, and HCDR3, and a light chain variable region having a LCDR1, LCDR2, and LCDR3, wherein the HCDR1, HCDR2, and HCDR3 comprises an amino acid sequence of SEQ ID NOS:17432, 18514, and 10228, respectively and the LCDR1, LCDR2, and LCDR3 comprises an amino acid sequence of SEQ ID NOS: 15890, 10727, and 12836, respectively.

[0607] The disclosure describes an antibody, antigen binding fragment, or polypeptide comprising a heavy chain variable region having a HCDR1, HCDR2, and HCDR3, and a light chain variable region having a LCDR1, LCDR2, and LCDR3, wherein the HCDR1, HCDR2, and HCDR3 comprises an amino acid sequence of SEQ ID NOS:18104, 9705, and 17034, respectively and the LCDR1, LCDR2, and LCDR3 comprises an amino acid sequence of SEQ ID NOS: 15722, 4425, and 12597, respectively.

[0608] The disclosure describes an antibody, antigen binding fragment, or polypeptide comprising a heavy chain variable region having a HCDR1, HCDR2, and HCDR3, and a light chain variable region having a LCDR1, LCDR2, and LCDR3, wherein the HCDR1, HCDR2, and HCDR3 comprises an amino acid sequence of SEQ ID NOS: 17270, 17778, and 6728, respectively and the LCDR1, LCDR2, and LCDR3 comprises an amino acid sequence of SEQ ID NOS:10890, 18275, and 12988, respectively.

[0609] The disclosure describes an antibody, antigen binding fragment, or polypeptide comprising a heavy chain variable region having a HCDR1, HCDR2, and HCDR3, and a light chain variable region having a LCDR1, LCDR2, and LCDR3, wherein the HCDR1, HCDR2, and HCDR3 comprises an amino acid sequence of SEQ ID NOS:10367, 18323, and 17698, respectively and the LCDR1, LCDR2, and LCDR3 comprises an amino acid sequence of SEQ ID NOS: 15890, 10727, and 12831, respectively.

[0610] The disclosure describes an antibody, antigen binding fragment, or polypeptide comprising a heavy chain variable region having a HCDR1, HCDR2, and HCDR3, and a light chain variable region having a LCDR1, LCDR2, and LCDR3, wherein the HCDR1, HCDR2, and HCDR3 comprises an amino acid sequence of SEQ ID NOS:10188, 9869, and 11977, respectively and the LCDR1, LCDR2, and LCDR3 comprises an amino acid sequence of SEQ ID NOS: 16059, 9503, and 12559, respectively.

[0611] The disclosure describes an antibody, antigen binding fragment, or polypeptide comprising a heavy chain variable region having a HCDR1, HCDR2, and HCDR3, and a light chain variable region having a LCDR1, LCDR2, and LCDR3, wherein the HCDR1, HCDR2, and HCDR3 comprises an amino acid sequence of SEQ ID NOS:17263, 9776, and 18142, respectively and the LCDR1, LCDR2, and LCDR3 comprises an amino acid sequence of SEQ ID NOS: 16751, 17007, and 3999, respectively.

[0612] The disclosure describes an antibody, antigen binding fragment, or polypeptide comprising a heavy chain variable region having a HCDR1, HCDR2, and HCDR3, and a light chain variable region having a LCDR1, LCDR2, and LCDR3, wherein the HCDR1, HCDR2, and HCDR3 comprises an amino acid sequence of SEQ ID NOS:17279, 9862, and 11795, respectively and the LCDR1, LCDR2, and LCDR3 comprises an amino acid sequence of SEQ ID NOS: 15984, 4436, and 12700, respectively. having a LCDR1, LCDR2, and LCDR3, wherein the HCDR1, HCDR2, and HCDR3 comprises an amino acid sequence of SEQ ID NOS:17284, 18415, and 10180, respectively and the LCDR1, LCDR2, and LCDR3 comprises an amino acid sequence of SEQ ID NOS: 16045, 9503, and 12767, respectively.

[0613] The disclosure describes an antibody, antigen binding fragment, or polypeptide comprising a heavy chain variable region having a HCDR1, HCDR2, and HCDR3, and a light chain variable region having a LCDR1, LCDR2, and LCDR3, wherein the HCDR1, HCDR2, and HCDR3 comprises an amino acid sequence of SEQ ID NOS:11649, 17249, and 11517, respectively and the LCDR1, LCDR2, and LCDR3 comprises an amino acid sequence of SEQ ID NOS:16666, 11894, and 13607, respectively.

[0614] The disclosure describes an antibody, antigen binding fragment, or polypeptide comprising a heavy chain variable region having a HCDR1, HCDR2, and HCDR3, and a light chain variable region having a LCDR1, LCDR2, and LCDR3, wherein the HCDR1, HCDR2, and HCDR3 comprises an amino acid sequence of SEQ ID NOS:6507, 9971, and 5900, respectively and the LCDR1, LCDR2, and LCDR3 comprises an amino acid sequence of SEQ ID NOS: 15713, 3982, and 13004, respectively.

[0615] The disclosure describes an antibody, antigen binding fragment, or polypeptide comprising a heavy chain variable region having a HCDR1, HCDR2, and HCDR3, and a light chain variable region having a LCDR1, LCDR2, and LCDR3, wherein the HCDR1, HCDR2, and HCDR3 comprises an amino acid sequence of SEQ ID NOS: 11599, 11547, and 5960, respectively and the LCDR1, LCDR2, and LCDR3 comprises an amino acid sequence of SEQ ID NOS: 17959, 6244, and 11576, respectively.

[0616] The disclosure describes an antibody, antigen binding fragment, or polypeptide comprising a heavy chain variable region having a HCDR1, HCDR2, and HCDR3, and a light chain variable region having a LCDR1, LCDR2, and LCDR3, wherein the HCDR1, HCDR2, and HCDR3 comprises an amino acid sequence of SEQ ID NOS:17463, 9787, and 11842, respectively and the LCDR1, LCDR2, and LCDR3 comprises an amino acid sequence of SEQ ID NOS: 15733, 9658, and 12656, respectively.

[0617] The disclosure describes an antibody, antigen binding fragment, or polypeptide comprising a heavy chain variable region having a HCDR1, HCDR2, and HCDR3, and a light chain variable region having a LCDR1, LCDR2, and LCDR3, wherein the HCDR1, HCDR2, and HCDR3 comprises an amino acid sequence of SEQ ID NOS:17270, 9406, and 6713, respectively and the LCDR1, LCDR2, and LCDR3 comprises an amino acid sequence of SEQ ID NOS: 15944, 4432, and 11997, respectively.

[0618] The disclosure describes an antibody, antigen binding fragment, or polypeptide comprising a heavy chain variable region having a HCDR1, HCDR2, and HCDR3, and a light chain variable region having a LCDR1, LCDR2, and LCDR3, wherein the HCDR1, HCDR2, and HCDR3 comprises an amino acid sequence of SEQ ID NOS:11363, 16295, and 17032, respectively and the LCDR1, LCDR2, and LCDR3 comprises an amino acid sequence of SEQ ID NOS: 16061, 4426, and 12596, respectively.

[0619] The disclosure describes an antibody, antigen binding fragment, or polypeptide comprising a heavy chain variable region having a HCDR1, HCDR2, and HCDR3, and a light chain variable region having a LCDR1, LCDR2, and LCDR3, wherein the HCDR1, HCDR2, and HCDR3 comprises an amino acid sequence of SEQ ID NOS:4318, 10304, and 11762, respectively and the LCDR1, LCDR2, and LCDR3 comprises an amino acid sequence of SEQ ID NOS: 16050, 9480, and 12701, respectively.

[0620] The disclosure describes an antibody, antigen binding fragment, or polypeptide comprising a heavy chain variable region having a HCDR1, HCDR2, and HCDR3, and a light chain variable region having a LCDR1, LCDR2, and LCDR3, wherein the HCDR1, HCDR2, and HCDR3 comprises an amino acid sequence of SEQ ID NOS: 17624, 5443, and 6554, respectively and the LCDR1, LCDR2, and LCDR3 comprises an amino acid sequence of SEQ ID NOS: 15879, 9503, and 12725, respectively.

[0621] The disclosure describes an antibody, antigen binding fragment, or polypeptide comprising a heavy chain variable region having a HCDR1, HCDR2, and HCDR3, and a light chain variable region having a LCDR1, LCDR2, and LCDR3, wherein the HCDR1, HCDR2, and HCDR3 comprises an amino acid sequence of SEQ ID NOS: 17466, 16919, and 5927, respectively and the LCDR1, LCDR2, and LCDR3 comprises an amino acid sequence of SEQ ID NOS:17924, 10094, and 13582, respectively.

[0622] The disclosure describes an antibody, antigen binding fragment, or polypeptide comprising a heavy chain variable region having a HCDR1, HCDR2, and HCDR3, and a light chain variable region having a LCDR1, LCDR2, and LCDR3, wherein the HCDR1, HCDR2, and HCDR3 comprises an amino acid sequence of SEQ ID NOS:11362, 9409, and 17032, respectively and the LCDR1, LCDR2, and LCDR3 comprises an amino acid sequence of SEQ ID NOS: 15732, 4426, and 12710, respectively.

[0623] The disclosure describes an antibody, antigen binding fragment, or polypeptide comprising a heavy chain variable region having a HCDR1, HCDR2, and HCDR3, and a light chain variable region having a LCDR1, LCDR2, and LCDR3, wherein the HCDR1, HCDR2, and HCDR3 comprises an amino acid sequence of SEQ ID NOS:17446, 4136, and 18234, respectively and the LCDR1, LCDR2, and LCDR3 comprises an amino acid sequence of SEQ ID NOS:15890, 10727, and 12845, respectively.

[0624] The disclosure describes an antibody, antigen binding fragment, or polypeptide comprising a heavy chain variable region having a HCDR1, HCDR2, and HCDR3, and a light chain variable region having a LCDR1, LCDR2, and LCDR3, wherein the HCDR1, HCDR2, and HCDR3 comprises an amino acid sequence of SEQ ID NOS:11364, 11028, and 17032, respectively and the LCDR1, LCDR2, and LCDR3 comprises an amino acid sequence of SEQ ID NOS:15731, 4426, and 12635, respectively.

[0625] The disclosure describes an antibody, antigen binding fragment, or polypeptide comprising a heavy chain variable region having a HCDR1, HCDR2, and HCDR3, and a light chain variable region having a LCDR1, LCDR2, and LCDR3, wherein the HCDR1, HCDR2, and HCDR3 comprises an amino acid sequence of SEQ ID NOS:17432, 18517, and 10141, respectively and the LCDR1, LCDR2, and LCDR3 comprises an amino acid sequence of SEQ ID NOS:16075, 10727, and 12019, respectively.

[0626] The disclosure describes an antibody, antigen binding fragment, or polypeptide comprising a heavy chain variable region having a HCDR1, HCDR2, and HCDR3, and a light chain variable region having a LCDR1, LCDR2, and LCDR3, wherein the HCDR1, HCDR2, and HCDR3 comprises an amino acid sequence of SEQ ID NOS:11685, 16847, and 17044, respectively and the LCDR1, LCDR2, and LCDR3 comprises an amino acid sequence of SEQ ID NOS:4052, 10084, and 13568, respectively.

[0627] The disclosure describes an antibody, antigen binding fragment, or polypeptide comprising a heavy chain variable region having a HCDR1, HCDR2, and HCDR3, and a light chain variable region having a LCDR1, LCDR2, and LCDR3, wherein the HCDR1, HCDR2, and HCDR3 comprises an amino acid sequence of SEQ ID NOS:17263, 9863, and 11760, respectively and the LCDR1, LCDR2, and LCDR3 comprises an amino acid sequence of SEQ ID NOS: 16023, 9503, and 12700, respectively.

[0628] The disclosure describes an antibody, antigen binding fragment, or polypeptide comprising a heavy chain variable region having a HCDR1, HCDR2, and HCDR3, and a light chain variable region having a LCDR1, LCDR2, and LCDR3, wherein the HCDR1, HCDR2, and HCDR3 comprises an amino acid sequence of SEQ ID NOS: 17680, 11428, and 4294, respectively and the LCDR1, LCDR2, and LCDR3 comprises an amino acid sequence of SEQ ID NOS:16368, 10926, and 11260, respectively.

[0629] The disclosure describes an antibody, antigen binding fragment, or polypeptide comprising a heavy chain variable region having a HCDR1, HCDR2, and HCDR3, and a light chain variable region having a LCDR1, LCDR2, and LCDR3, wherein the HCDR1, HCDR2, and HCDR3 comprises an amino acid sequence of SEQ ID NOS:17432, 18531, and 17661, respectively and the LCDR1, LCDR2, and LCDR3 comprises an amino acid sequence of SEQ ID NOS:10830, 9267, and 11318, respectively.

[0630] The disclosure describes an antibody, antigen binding fragment, or polypeptide comprising a heavy chain variable region having a HCDR1, HCDR2, and HCDR3, and a light chain variable region having a LCDR1, LCDR2, and LCDR3, wherein the HCDR1, HCDR2, and HCDR3 comprises an amino acid sequence of SEQ ID NOS:17274, 4136, and 17040, respectively and the LCDR1, LCDR2, and LCDR3 comprises an amino acid sequence of SEQ ID NOS: 15701, 3957, and 12989, respectively.

[0631] The disclosure describes an antibody, antigen binding fragment, or polypeptide comprising a heavy chain variable region having a HCDR1, HCDR2, and HCDR3, and a light chain variable region having a LCDR1, LCDR2, and LCDR3, wherein the HCDR1, HCDR2, and HCDR3 comprises an amino acid sequence of SEQ ID NOS: 17270, 17778, and 6064, respectively and the LCDR1, LCDR2, and LCDR3 comprises an amino acid sequence of SEQ ID NOS:10890, 18275, and 12985, respectively. having a LCDR1, LCDR2, and LCDR3, wherein the HCDR1, HCDR2, and HCDR3 comprises an amino acid sequence of SEQ ID NOS:17274, 4136, and 17707, respectively and the LCDR1, LCDR2, and LCDR3 comprises an amino acid sequence of SEQ ID NOS: 11789, 4420, and 12575, respectively.

[0632] The disclosure describes an antibody, antigen binding fragment, or polypeptide comprising a heavy chain variable region having a HCDR1, HCDR2, and HCDR3, and a light chain variable region having a LCDR1, LCDR2, and LCDR3, wherein the HCDR1, HCDR2, and HCDR3 comprises an amino acid sequence of SEQ ID NOS:6510, 9378, and 5936, respectively and the LCDR1, LCDR2, and LCDR3 comprises an amino acid sequence of SEQ ID NOS: 15955, 4425, and 12428, respectively.

[0633] The disclosure describes an antibody, antigen binding fragment, or polypeptide comprising a heavy chain variable region having a HCDR1, HCDR2, and HCDR3, and a light chain variable region having a LCDR1, LCDR2, and LCDR3, wherein the HCDR1, HCDR2, and HCDR3 comprises an amino acid sequence of SEQ ID NOS:9669, 18033, and 4040, respectively and the LCDR1, LCDR2, and LCDR3 comprises an amino acid sequence of SEQ ID NOS:16642, 10747, and 13031, respectively.

[0634] The disclosure describes an antibody, antigen binding fragment, or polypeptide comprising a heavy chain variable region having a HCDR1, HCDR2, and HCDR3, and a light chain variable region having a LCDR1, LCDR2, and LCDR3, wherein the HCDR1, HCDR2, and HCDR3 comprises an amino acid sequence of SEQ ID NOS:17535, 10571, and 17215, respectively and the LCDR1, LCDR2, and LCDR3 comprises an amino acid sequence of SEQ ID NOS: 15890, 10727, and 12825, respectively.

[0635] The disclosure describes an antibody, antigen binding fragment, or polypeptide comprising a heavy chain variable region having a HCDR1, HCDR2, and HCDR3, and a light chain variable region having a LCDR1, LCDR2, and LCDR3, wherein the HCDR1, HCDR2, and HCDR3 comprises an amino acid sequence of SEQ ID NOS:6187, 18500, and 9543, respectively and the LCDR1, LCDR2, and LCDR3 comprises an amino acid sequence of SEQ ID NOS: 15871, 6611, and 12018, respectively.

[0636] The disclosure describes an antibody, antigen binding fragment, or polypeptide comprising a heavy chain variable region having a HCDR1, HCDR2, and HCDR3, and a light chain variable region having a LCDR1, LCDR2, and LCDR3, wherein the HCDR1, HCDR2, and HCDR3 comprises an amino acid sequence of SEQ ID NOS:6576, 16285, and 6154, respectively and the LCDR1, LCDR2, and LCDR3 comprises an amino acid sequence of SEQ ID NOS:10790, 18273, and 12951, respectively.

[0637] The disclosure describes an antibody, antigen binding fragment, or polypeptide comprising a heavy chain variable region having a HCDR1, HCDR2, and HCDR3, and a light chain variable region having a LCDR1, LCDR2, and LCDR3, wherein the HCDR1, HCDR2, and HCDR3 comprises an amino acid sequence of SEQ ID NOS:17141, 16954, and 16703, respectively and the LCDR1, LCDR2, and LCDR3 comprises an amino acid sequence of SEQ ID NOS: 16736, 7859, and 10277, respectively.

[0638] The disclosure describes an antibody, antigen binding fragment, or polypeptide comprising a heavy chain variable region having a HCDR1, HCDR2, and HCDR3, and a light chain variable region having a LCDR1, LCDR2, and LCDR3, wherein the HCDR1, HCDR2, and HCDR3 comprises an amino acid sequence of SEQ ID NOS:11635, 9811, and 17037, respectively and the LCDR1, LCDR2, and LCDR3 comprises an amino acid sequence of SEQ ID NOS: 15928, 4425, and 12413, respectively.

[0639] The disclosure describes an antibody, antigen binding fragment, or polypeptide comprising a heavy chain variable region having a HCDR1, HCDR2, and HCDR3, and a light chain variable region having a LCDR1, LCDR2, and LCDR3, wherein the HCDR1, HCDR2, and HCDR3 comprises an amino acid sequence of SEQ ID NOS: 17432, 18531, and 6668, respectively and the LCDR1, LCDR2, and LCDR3 comprises an amino acid sequence of SEQ ID NOS: 16061, 9494, and 12694, respectively.

[0640] The disclosure describes an antibody, antigen binding fragment, or polypeptide comprising a heavy chain variable region having a HCDR1, HCDR2, and HCDR3, and a light chain variable region having a LCDR1, LCDR2, and LCDR3, wherein the HCDR1, HCDR2, and HCDR3 comprises an amino acid sequence of SEQ ID NOS:4452, 16251, and 9364, respectively and the LCDR1, LCDR2, and LCDR3 comprises an amino acid sequence of SEQ ID NOS:4239, 11608, and 11061, respectively.

[0641] The disclosure describes an antibody, antigen binding fragment, or polypeptide comprising a heavy chain variable region having a HCDR1, HCDR2, and HCDR3, and a light chain variable region having a LCDR1, LCDR2, and LCDR3, wherein the HCDR1, HCDR2, and HCDR3 comprises an amino acid sequence of SEQ ID NOS:17443, 9391, and 6065, respectively and the LCDR1, LCDR2, and LCDR3 comprises an amino acid sequence of SEQ ID NOS: 11789, 4429, and 12556, respectively.

[0642] The disclosure describes an antibody, antigen binding fragment, or polypeptide comprising a heavy chain variable region having a HCDR1, HCDR2, and HCDR3, and a light chain variable region having a LCDR1, LCDR2, and LCDR3, wherein the HCDR1, HCDR2, and HCDR3 comprises an amino acid sequence of SEQ ID NOS:10344, 18516, and 10069, respectively and the LCDR1, LCDR2, and LCDR3 comprises an amino acid sequence of SEQ ID NOS: 15890, 10727, and 12820, respectively.

[0643] The disclosure describes an antibody, antigen binding fragment, or polypeptide comprising a heavy chain variable region having a HCDR1, HCDR2, and HCDR3, and a light chain variable region having a LCDR1, LCDR2, and LCDR3, wherein the HCDR1, HCDR2, and HCDR3 comprises an amino acid sequence of SEQ ID NOS: 17447, 16891, and 9345, respectively and the LCDR1, LCDR2, and LCDR3 comprises an amino acid sequence of SEQ ID NOS: 16045, 3983, and 12775, respectively.

[0644] The disclosure describes an antibody, antigen binding fragment, or polypeptide comprising a heavy chain variable region having a HCDR1, HCDR2, and HCDR3, and a light chain variable region having a LCDR1, LCDR2, and LCDR3, wherein the HCDR1, HCDR2, and HCDR3 comprises an amino acid sequence of SEQ ID NOS: 11651, 16904, and 6119, respectively and the LCDR1, LCDR2, and LCDR3 comprises an amino acid sequence of SEQ ID NOS: 16019, 4425, and 10711, respectively.

[0645] The disclosure describes an antibody, antigen binding fragment, or polypeptide comprising a heavy chain variable region having a HCDR1, HCDR2, and HCDR3, and a light chain variable region having a LCDR1, LCDR2, and LCDR3, wherein the HCDR1, HCDR2, and HCDR3 comprises an amino acid sequence of SEQ ID NOS:17535, 10571, and 17146, respectively and the LCDR1, LCDR2, and LCDR3 comprises an amino acid sequence of SEQ ID NOS: 15704, 3982, and 12096, respectively.

[0646] The disclosure describes an antibody, antigen binding fragment, or polypeptide comprising a heavy chain variable region having a HCDR1, HCDR2, and HCDR3, and a light chain variable region having a LCDR1, LCDR2, and LCDR3, wherein the HCDR1, HCDR2, and HCDR3 comprises an amino acid sequence of SEQ ID NOS:17611, 4131, and 16934, respectively and the LCDR1, LCDR2, and LCDR3 comprises an amino acid sequence of SEQ ID NOS: 16007, 9442, and 12856, respectively.

[0647] The disclosure describes an antibody, antigen binding fragment, or polypeptide comprising a heavy chain variable region having a HCDR1, HCDR2, and HCDR3, and a light chain variable region having a LCDR1, LCDR2, and LCDR3, wherein the HCDR1, HCDR2, and HCDR3 comprises an amino acid sequence of SEQ ID NOS:10368, 6782, and 10130, respectively and the LCDR1, LCDR2, and LCDR3 comprises an amino acid sequence of SEQ ID NOS: 15893, 3969, and 12514, respectively.

[0648] The disclosure describes an antibody, antigen binding fragment, or polypeptide comprising a heavy chain variable region having a HCDR1, HCDR2, and HCDR3, and a light chain variable region having a LCDR1, LCDR2, and LCDR3, wherein the HCDR1, HCDR2, and HCDR3 comprises an amino acid sequence of SEQ ID NOS:16517, 9792, and 17828, respectively and the LCDR1, LCDR2, and LCDR3 comprises an amino acid sequence of SEQ ID NOS: 16071, 9499, and 12946, respectively.

[0649] The disclosure describes an antibody, antigen binding fragment, or polypeptide comprising a heavy chain variable region having a HCDR1, HCDR2, and HCDR3, and a light chain variable region having a LCDR1, LCDR2, and LCDR3, wherein the HCDR1, HCDR2, and HCDR3 comprises an amino acid sequence of SEQ ID NOS: 11370, 16250, and 6522, respectively and the LCDR1, LCDR2, and LCDR3 comprises an amino acid sequence of SEQ ID NOS: 11789, 4420, and 12580, respectively.

[0650] The disclosure describes an antibody, antigen binding fragment, or polypeptide comprising a heavy chain variable region having a HCDR1, HCDR2, and HCDR3, and a light chain variable region having a LCDR1, LCDR2, and LCDR3, wherein the HCDR1, HCDR2, and HCDR3 comprises an amino acid sequence of SEQ ID NOS:6571, 18428, and 11683, respectively and the LCDR1, LCDR2, and LCDR3 comprises an amino acid sequence of SEQ ID NOS: 15653, 9497, and 12456, respectively. having a LCDR1, LCDR2, and LCDR3, wherein the HCDR1, HCDR2, and HCDR3 comprises an amino acid sequence of SEQ ID NOS:11367, 10390, and 17581, respectively and the LCDR1, LCDR2, and LCDR3 comprises an amino acid sequence of SEQ ID NOS:16671, 10747, and 18613, respectively.

[0651] The disclosure describes an antibody, antigen binding fragment, or polypeptide comprising a heavy chain variable region having a HCDR1, HCDR2, and HCDR3, and a light chain variable region having a LCDR1, LCDR2, and LCDR3, wherein the HCDR1, HCDR2, and HCDR3 comprises an amino acid sequence of SEQ ID NOS:17535, 10571, and 18222, respectively and the LCDR1, LCDR2, and LCDR3 comprises an amino acid sequence of SEQ ID NOS: 16067, 4425, and 12425, respectively.

[0652] The disclosure describes an antibody, antigen binding fragment, or polypeptide comprising a heavy chain variable region having a HCDR1, HCDR2, and HCDR3, and a light chain variable region having a LCDR1, LCDR2, and LCDR3, wherein the HCDR1, HCDR2, and HCDR3 comprises an amino acid sequence of SEQ ID NOS:17263, 9776, and 6160, respectively and the LCDR1, LCDR2, and LCDR3 comprises an amino acid sequence of SEQ ID NOS:10890, 18275, and 12984, respectively.

[0653] The disclosure describes an antibody, antigen binding fragment, or polypeptide comprising a heavy chain variable region having a HCDR1, HCDR2, and HCDR3, and a light chain variable region having a LCDR1, LCDR2, and LCDR3, wherein the HCDR1, HCDR2, and HCDR3 comprises an amino acid sequence of SEQ ID NOS: 11670, 16886, and 6060, respectively and the LCDR1, LCDR2, and LCDR3 comprises an amino acid sequence of SEQ ID NOS: 15879, 3983, and 12947, respectively.

[0654] The disclosure describes an antibody, antigen binding fragment, or polypeptide comprising a heavy chain variable region having a HCDR1, HCDR2, and HCDR3, and a light chain variable region having a LCDR1, LCDR2, and LCDR3, wherein the HCDR1, HCDR2, and HCDR3 comprises an amino acid sequence of SEQ ID NOS:6564, 16841, and 4570, respectively and the LCDR1, LCDR2, and LCDR3 comprises an amino acid sequence of SEQ ID NOS:9587, 18447, and 15572, respectively.

[0655] The disclosure describes an antibody, antigen binding fragment, or polypeptide comprising a heavy chain variable region having a HCDR1, HCDR2, and HCDR3, and a light chain variable region having a LCDR1, LCDR2, and LCDR3, wherein the HCDR1, HCDR2, and HCDR3 comprises an amino acid sequence of SEQ ID NOS:6578, 18531, and 4506, respectively and the LCDR1, LCDR2, and LCDR3 comprises an amino acid sequence of SEQ ID NOS:17924, 10094, and 13578, respectively.

[0656] The disclosure describes an antibody, antigen binding fragment, or polypeptide comprising a heavy chain variable region having a HCDR1, HCDR2, and HCDR3, and a light chain variable region having a LCDR1, LCDR2, and LCDR3, wherein the HCDR1, HCDR2, and HCDR3 comprises an amino acid sequence of SEQ ID NOS:16798, 9880, and 10129, respectively and the LCDR1, LCDR2, and LCDR3 comprises an amino acid sequence of SEQ ID NOS: 16047, 9494, and 12622, respectively.

[0657] The disclosure describes an antibody, antigen binding fragment, or polypeptide comprising a heavy chain variable region having a HCDR1, HCDR2, and HCDR3, and a light chain variable region having a LCDR1, LCDR2, and LCDR3, wherein the HCDR1, HCDR2, and HCDR3 comprises an amino acid sequence of SEQ ID NOS: 17535, 10571, and 7957, respectively and the LCDR1, LCDR2, and LCDR3 comprises an amino acid sequence of SEQ ID NOS: 15711, 3969, and 12334, respectively.

[0658] The disclosure describes an antibody, antigen binding fragment, or polypeptide comprising a heavy chain variable region having a HCDR1, HCDR2, and HCDR3, and a light chain variable region having a LCDR1, LCDR2, and LCDR3, wherein the HCDR1, HCDR2, and HCDR3 comprises an amino acid sequence of SEQ ID NOS:17141, 16954, and 16187, respectively and the LCDR1, LCDR2, and LCDR3 comprises an amino acid sequence of SEQ ID NOS:9633, 4467, and 15559, respectively.

[0659] The disclosure describes an antibody, antigen binding fragment, or polypeptide comprising a heavy chain variable region having a HCDR1, HCDR2, and HCDR3, and a light chain variable region having a LCDR1, LCDR2, and LCDR3, wherein the HCDR1, HCDR2, and HCDR3 comprises an amino acid sequence of SEQ ID NOS:11672, 11171, and 10591, respectively and the LCDR1, LCDR2, and LCDR3 comprises an amino acid sequence of SEQ ID NOS:10807, 18275, and 12937, respectively.

[0660] The disclosure describes an antibody, antigen binding fragment, or polypeptide comprising a heavy chain variable region having a HCDR1, HCDR2, and HCDR3, and a light chain variable region having a LCDR1, LCDR2, and LCDR3, wherein the HCDR1, HCDR2, and HCDR3 comprises an amino acid sequence of SEQ ID NOS:11632, 18001, and 16192, respectively and the LCDR1, LCDR2, and LCDR3 comprises an amino acid sequence of SEQ ID NOS:16400, 10987, and 11212, respectively.

[0661] The disclosure describes an antibody, antigen binding fragment, or polypeptide comprising a heavy chain variable region having a HCDR1, HCDR2, and HCDR3, and a light chain variable region having a LCDR1, LCDR2, and LCDR3, wherein the HCDR1, HCDR2, and HCDR3 comprises an amino acid sequence of SEQ ID NOS: 17263, 9776, and 4396, respectively and the LCDR1, LCDR2, and LCDR3 comprises an amino acid sequence of SEQ ID NOS: 15713, 3982, and 12392, respectively.

[0662] The disclosure describes an antibody, antigen binding fragment, or polypeptide comprising a heavy chain variable region having a HCDR1, HCDR2, and HCDR3, and a light chain variable region having a LCDR1, LCDR2, and LCDR3, wherein the HCDR1, HCDR2, and HCDR3 comprises an amino acid sequence of SEQ ID NOS: 17272, 4150, and 6069, respectively and the LCDR1, LCDR2, and LCDR3 comprises an amino acid sequence of SEQ ID NOS:9629, 5985, and 15567, respectively.

[0663] The disclosure describes an antibody, antigen binding fragment, or polypeptide comprising a heavy chain variable region having a HCDR1, HCDR2, and HCDR3, and a light chain variable region having a LCDR1, LCDR2, and LCDR3, wherein the HCDR1, HCDR2, and HCDR3 comprises an amino acid sequence of SEQ ID NOS:6510, 9379, and 17688, respectively and the LCDR1, LCDR2, and LCDR3 comprises an amino acid sequence of SEQ ID NOS:16428, 10764, and 11222, respectively.

[0664] The disclosure describes an antibody, antigen binding fragment, or polypeptide comprising a heavy chain variable region having a HCDR1, HCDR2, and HCDR3, and a light chain variable region having a LCDR1, LCDR2, and LCDR3, wherein the HCDR1, HCDR2, and HCDR3 comprises an amino acid sequence of SEQ ID NOS:17432, 18521, and 10218, respectively and the LCDR1, LCDR2, and LCDR3 comprises an amino acid sequence of SEQ ID NOS: 16061, 9494, and 12699, respectively.

[0665] The disclosure describes an antibody, antigen binding fragment, or polypeptide comprising a heavy chain variable region having a HCDR1, HCDR2, and HCDR3, and a light chain variable region having a LCDR1, LCDR2, and LCDR3, wherein the HCDR1, HCDR2, and HCDR3 comprises an amino acid sequence of SEQ ID NOS:17263, 9776, and 18221, respectively and the LCDR1, LCDR2, and LCDR3 comprises an amino acid sequence of SEQ ID NOS:15890, 10727, and 12831, respectively.

[0666] The disclosure describes an antibody, antigen binding fragment, or polypeptide comprising a heavy chain variable region having a HCDR1, HCDR2, and HCDR3, and a light chain variable region having a LCDR1, LCDR2, and LCDR3, wherein the HCDR1, HCDR2, and HCDR3 comprises an amino acid sequence of SEQ ID NOS:16526, 9785, and 17829, respectively and the LCDR1, LCDR2, and LCDR3 comprises an amino acid sequence of SEQ ID NOS:15890, 10737, and 12023, respectively.

[0667] The disclosure describes an antibody, antigen binding fragment, or polypeptide comprising a heavy chain variable region having a HCDR1, HCDR2, and HCDR3, and a light chain variable region having a LCDR1, LCDR2, and LCDR3, wherein the HCDR1, HCDR2, and HCDR3 comprises an amino acid sequence of SEQ ID NOS: 17270, 17778, and 4567, respectively and the LCDR1, LCDR2, and LCDR3 comprises an amino acid sequence of SEQ ID NOS: 10830, 9267, and 11319, respectively.

[0668] The disclosure describes an antibody, antigen binding fragment, or polypeptide comprising a heavy chain variable region having a HCDR1, HCDR2, and HCDR3, and a light chain variable region having a LCDR1, LCDR2, and LCDR3, wherein the HCDR1, HCDR2, and HCDR3 comprises an amino acid sequence of SEQ ID NOS: 17842, 11488, and 4048, respectively and the LCDR1, LCDR2, and LCDR3 comprises an amino acid sequence of SEQ ID NOS:16428, 10764, and 11227, respectively.

[0669] The disclosure describes an antibody, antigen binding fragment, or polypeptide comprising a heavy chain variable region having a HCDR1, HCDR2, and HCDR3, and a light chain variable region having a LCDR1, LCDR2, and LCDR3, wherein the HCDR1, HCDR2, and HCDR3 comprises an amino acid sequence of SEQ ID NOS:17263, 9872, and 11758, respectively and the LCDR1, LCDR2, and LCDR3 comprises an amino acid sequence of SEQ ID NOS: 15984, 9503, and 12700, respectively. having a LCDR1, LCDR2, and LCDR3, wherein the HCDR1, HCDR2, and HCDR3 comprises an amino acid sequence of SEQ ID NOS:17443, 17809, and 17710, respectively and the LCDR1, LCDR2, and LCDR3 comprises an amino acid sequence of SEQ ID NOS:17959, 6318, and 17192, respectively.

[0670] The disclosure describes an antibody, antigen binding fragment, or polypeptide comprising a heavy chain variable region having a HCDR1, HCDR2, and HCDR3, and a light chain variable region having a LCDR1, LCDR2, and LCDR3, wherein the HCDR1, HCDR2, and HCDR3 comprises an amino acid sequence of SEQ ID NOS:17535, 10571, and 17596, respectively and the LCDR1, LCDR2, and LCDR3 comprises an amino acid sequence of SEQ ID NOS: 16045, 9503, and 12767, respectively.

[0671] The disclosure describes an antibody, antigen binding fragment, or polypeptide comprising a heavy chain variable region having a HCDR1, HCDR2, and HCDR3, and a light chain variable region having a LCDR1, LCDR2, and LCDR3, wherein the HCDR1, HCDR2, and HCDR3 comprises an amino acid sequence of SEQ ID NOS:17068, 9878, and 11969, respectively and the LCDR1, LCDR2, and LCDR3 comprises an amino acid sequence of SEQ ID NOS: 15979, 9472, and 12700, respectively.

[0672] The disclosure describes an antibody, antigen binding fragment, or polypeptide comprising a heavy chain variable region having a HCDR1, HCDR2, and HCDR3, and a light chain variable region having a LCDR1, LCDR2, and LCDR3, wherein the HCDR1, HCDR2, and HCDR3 comprises an amino acid sequence of SEQ ID NOS:17284, 18415, and 18108, respectively and the LCDR1, LCDR2, and LCDR3 comprises an amino acid sequence of SEQ ID NOS: 16045, 9494, and 12665, respectively.

[0673] The disclosure describes an antibody, antigen binding fragment, or polypeptide comprising a heavy chain variable region having a HCDR1, HCDR2, and HCDR3, and a light chain variable region having a LCDR1, LCDR2, and LCDR3, wherein the HCDR1, HCDR2, and HCDR3 comprises an amino acid sequence of SEQ ID NOS: 17274, 4136, and 9592, respectively and the LCDR1, LCDR2, and LCDR3 comprises an amino acid sequence of SEQ ID NOS:16659, 11900, and 11871, respectively.

[0674] The disclosure describes an antibody, antigen binding fragment, or polypeptide comprising a heavy chain variable region having a HCDR1, HCDR2, and HCDR3, and a light chain variable region having a LCDR1, LCDR2, and LCDR3, wherein the HCDR1, HCDR2, and HCDR3 comprises an amino acid sequence of SEQ ID NOS:17270, 17778, and 7813, respectively and the LCDR1, LCDR2, and LCDR3 comprises an amino acid sequence of SEQ ID NOS: 17959, 6312, and 4376, respectively.

[0675] The disclosure describes an antibody, antigen binding fragment, or polypeptide comprising a heavy chain variable region having a HCDR1, HCDR2, and HCDR3, and a light chain variable region having a LCDR1, LCDR2, and LCDR3, wherein the HCDR1, HCDR2, and HCDR3 comprises an amino acid sequence of SEQ ID NOS:10338, 9732, and 11968, respectively and the LCDR1, LCDR2, and LCDR3 comprises an amino acid sequence of SEQ ID NOS: 16061, 9494, and 12701, respectively.

[0676] The disclosure describes an antibody, antigen binding fragment, or polypeptide comprising a heavy chain variable region having a HCDR1, HCDR2, and HCDR3, and a light chain variable region having a LCDR1, LCDR2, and LCDR3, wherein the HCDR1, HCDR2, and HCDR3 comprises an amino acid sequence of SEQ ID NOS:10354, 9788, and 11763, respectively and the LCDR1, LCDR2, and LCDR3 comprises an amino acid sequence of SEQ ID NOS: 16059, 9503, and 12594, respectively.

[0677] The disclosure describes an antibody, antigen binding fragment, or polypeptide comprising a heavy chain variable region having a HCDR1, HCDR2, and HCDR3, and a light chain variable region having a LCDR1, LCDR2, and LCDR3, wherein the HCDR1, HCDR2, and HCDR3 comprises an amino acid sequence of SEQ ID NOS: 17535, 10571, and 7899, respectively and the LCDR1, LCDR2, and LCDR3 comprises an amino acid sequence of SEQ ID NOS: 16061, 9494, and 12695, respectively.

[0678] The disclosure describes an antibody, antigen binding fragment, or polypeptide comprising a heavy chain variable region having a HCDR1, HCDR2, and HCDR3, and a light chain variable region having a LCDR1, LCDR2, and LCDR3, wherein the HCDR1, HCDR2, and HCDR3 comprises an amino acid sequence of SEQ ID NOS: 16582, 11017, and 6725, respectively and the LCDR1, LCDR2, and LCDR3 comprises an amino acid sequence of SEQ ID NOS: 15876, 3983, and 12755, respectively.

[0679] The disclosure describes an antibody, antigen binding fragment, or polypeptide comprising a heavy chain variable region having a HCDR1, HCDR2, and HCDR3, and a light chain variable region having a LCDR1, LCDR2, and LCDR3, wherein the HCDR1, HCDR2, and HCDR3 comprises an amino acid sequence of SEQ ID NOS: 17466, 16919, and 4178, respectively and the LCDR1, LCDR2, and LCDR3 comprises an amino acid sequence of SEQ ID NOS: 11789, 4420, and 12578, respectively.

[0680] The disclosure describes an antibody, antigen binding fragment, or polypeptide comprising a heavy chain variable region having a HCDR1, HCDR2, and HCDR3, and a light chain variable region having a LCDR1, LCDR2, and LCDR3, wherein the HCDR1, HCDR2, and HCDR3 comprises an amino acid sequence of SEQ ID NOS:4306, 9933, and 17010, respectively and the LCDR1, LCDR2, and LCDR3 comprises an amino acid sequence of SEQ ID NOS: 15845, 9494, and 12631, respectively.

[0681] The disclosure describes an antibody, antigen binding fragment, or polypeptide comprising a heavy chain variable region having a HCDR1, HCDR2, and HCDR3, and a light chain variable region having a LCDR1, LCDR2, and LCDR3, wherein the HCDR1, HCDR2, and HCDR3 comprises an amino acid sequence of SEQ ID NOS:17272, 18342, and 10255, respectively and the LCDR1, LCDR2, and LCDR3 comprises an amino acid sequence of SEQ ID NOS:15713, 3982, and 13006, respectively.

[0682] The disclosure describes an antibody, antigen binding fragment, or polypeptide comprising a heavy chain variable region having a HCDR1, HCDR2, and HCDR3, and a light chain variable region having a LCDR1, LCDR2, and LCDR3, wherein the HCDR1, HCDR2, and HCDR3 comprises an amino acid sequence of SEQ ID NOS: 17620, 9398, and 4504, respectively and the LCDR1, LCDR2, and LCDR3 comprises an amino acid sequence of SEQ ID NOS: 16067, 4425, and 12433, respectively.

[0683] The disclosure describes an antibody, antigen binding fragment, or polypeptide comprising a heavy chain variable region having a HCDR1, HCDR2, and HCDR3, and a light chain variable region having a LCDR1, LCDR2, and LCDR3, wherein the HCDR1, HCDR2, and HCDR3 comprises an amino acid sequence of SEQ ID NOS:16605, 11431, and 12301, respectively and the LCDR1, LCDR2, and LCDR3 comprises an amino acid sequence of SEQ ID NOS:15673, 6216, and 12457, respectively.

[0684] The disclosure describes an antibody, antigen binding fragment, or polypeptide comprising a heavy chain variable region having a HCDR1, HCDR2, and HCDR3, and a light chain variable region having a LCDR1, LCDR2, and LCDR3, wherein the HCDR1, HCDR2, and HCDR3 comprises an amino acid sequence of SEQ ID NOS:4503, 18394, and 10086, respectively and the LCDR1, LCDR2, and LCDR3 comprises an amino acid sequence of SEQ ID NOS:10850, 10931, and 11259, respectively.

[0685] The disclosure describes an antibody, antigen binding fragment, or polypeptide comprising a heavy chain variable region having a HCDR1, HCDR2, and HCDR3, and a light chain variable region having a LCDR1, LCDR2, and LCDR3, wherein the HCDR1, HCDR2, and HCDR3 comprises an amino acid sequence of SEQ ID NOS: 17885, 10006, and 5975, respectively and the LCDR1, LCDR2, and LCDR3 comprises an amino acid sequence of SEQ ID NOS: 15699, 3981, and 11988, respectively.

[0686] The disclosure describes an antibody, antigen binding fragment, or polypeptide comprising a heavy chain variable region having a HCDR1, HCDR2, and HCDR3, and a light chain variable region having a LCDR1, LCDR2, and LCDR3, wherein the HCDR1, HCDR2, and HCDR3 comprises an amino acid sequence of SEQ ID NOS:16818, 16264, and 10039, respectively and the LCDR1, LCDR2, and LCDR3 comprises an amino acid sequence of SEQ ID NOS: 16357, 16480, and 11279, respectively.

[0687] The disclosure describes an antibody, antigen binding fragment, or polypeptide comprising a heavy chain variable region having a HCDR1, HCDR2, and HCDR3, and a light chain variable region having a LCDR1, LCDR2, and LCDR3, wherein the HCDR1, HCDR2, and HCDR3 comprises an amino acid sequence of SEQ ID NOS:17535, 10571, and 17061, respectively and the LCDR1, LCDR2, and LCDR3 comprises an amino acid sequence of SEQ ID NOS: 16061, 9494, and 12676, respectively.

[0688] The disclosure describes an antibody, antigen binding fragment, or polypeptide comprising a heavy chain variable region having a HCDR1, HCDR2, and HCDR3, and a light chain variable region having a LCDR1, LCDR2, and LCDR3, wherein the HCDR1, HCDR2, and HCDR3 comprises an amino acid sequence of SEQ ID NOS: 17284, 18415, and 4220, respectively and the LCDR1, LCDR2, and LCDR3 comprises an amino acid sequence of SEQ ID NOS: 17959, 6312, and 17197, respectively. having a LCDR1, LCDR2, and LCDR3, wherein the HCDR1, HCDR2, and HCDR3 comprises an amino acid sequence of SEQ ID NOS: 17838, 10397, and 5924, respectively and the LCDR1, LCDR2, and LCDR3 comprises an amino acid sequence of SEQ ID NOS:10890, 18275, and 12972, respectively.

[0689] The disclosure describes an antibody, antigen binding fragment, or polypeptide comprising a heavy chain variable region having a HCDR1, HCDR2, and HCDR3, and a light chain variable region having a LCDR1, LCDR2, and LCDR3, wherein the HCDR1, HCDR2, and HCDR3 comprises an amino acid sequence of SEQ ID NOS:17141, 16954, and 11708, respectively and the LCDR1, LCDR2, and LCDR3 comprises an amino acid sequence of SEQ ID NOS:16061, 9494, and 12671, respectively.

[0690] The disclosure describes an antibody, antigen binding fragment, or polypeptide comprising a heavy chain variable region having a HCDR1, HCDR2, and HCDR3, and a light chain variable region having a LCDR1, LCDR2, and LCDR3, wherein the HCDR1, HCDR2, and HCDR3 comprises an amino acid sequence of SEQ ID NOS: 17443, 17809, and 6240, respectively and the LCDR1, LCDR2, and LCDR3 comprises an amino acid sequence of SEQ ID NOS: 16067, 4425, and 10711, respectively.

[0691] The disclosure describes an antibody, antigen binding fragment, or polypeptide comprising a heavy chain variable region having a HCDR1, HCDR2, and HCDR3, and a light chain variable region having a LCDR1, LCDR2, and LCDR3, wherein the HCDR1, HCDR2, and HCDR3 comprises an amino acid sequence of SEQ ID NOS:17141, 16954, and 10416, respectively and the LCDR1, LCDR2, and LCDR3 comprises an amino acid sequence of SEQ ID NOS:17959, 6318, and 17191, respectively.

[0692] The disclosure describes an antibody, antigen binding fragment, or polypeptide comprising a heavy chain variable region having a HCDR1, HCDR2, and HCDR3, and a light chain variable region having a LCDR1, LCDR2, and LCDR3, wherein the HCDR1, HCDR2, and HCDR3 comprises an amino acid sequence of SEQ ID NOS:4306, 9850, and 17013, respectively and the LCDR1, LCDR2, and LCDR3 comprises an amino acid sequence of SEQ ID NOS: 15846, 9480, and 12700, respectively.

[0693] The disclosure describes an antibody, antigen binding fragment, or polypeptide comprising a heavy chain variable region having a HCDR1, HCDR2, and HCDR3, and a light chain variable region having a LCDR1, LCDR2, and LCDR3, wherein the HCDR1, HCDR2, and HCDR3 comprises an amino acid sequence of SEQ ID NOS: 11646, 18380, and 9647, respectively and the LCDR1, LCDR2, and LCDR3 comprises an amino acid sequence of SEQ ID NOS: 16491, 9503, and 12640, respectively.

[0694] The disclosure describes an antibody, antigen binding fragment, or polypeptide comprising a heavy chain variable region having a HCDR1, HCDR2, and HCDR3, and a light chain variable region having a LCDR1, LCDR2, and LCDR3, wherein the HCDR1, HCDR2, and HCDR3 comprises an amino acid sequence of SEQ ID NOS:16692, 18569, and 10219, respectively and the LCDR1, LCDR2, and LCDR3 comprises an amino acid sequence of SEQ ID NOS:9633, 18448, and 15563, respectively.

[0695] The disclosure describes an antibody, antigen binding fragment, or polypeptide comprising a heavy chain variable region having a HCDR1, HCDR2, and HCDR3, and a light chain variable region having a LCDR1, LCDR2, and LCDR3, wherein the HCDR1, HCDR2, and HCDR3 comprises an amino acid sequence of SEQ ID NOS:11688, 11533, and 10421, respectively and the LCDR1, LCDR2, and LCDR3 comprises an amino acid sequence of SEQ ID NOS: 16052, 9494, and 12637, respectively.

[0696] The disclosure describes an antibody, antigen binding fragment, or polypeptide comprising a heavy chain variable region having a HCDR1, HCDR2, and HCDR3, and a light chain variable region having a LCDR1, LCDR2, and LCDR3, wherein the HCDR1, HCDR2, and HCDR3 comprises an amino acid sequence of SEQ ID NOS: 16630, 16897, and 6555, respectively and the LCDR1, LCDR2, and LCDR3 comprises an amino acid sequence of SEQ ID NOS: 15957, 9503, and 12775, respectively.

[0697] The disclosure describes an antibody, antigen binding fragment, or polypeptide comprising a heavy chain variable region having a HCDR1, HCDR2, and HCDR3, and a light chain variable region having a LCDR1, LCDR2, and LCDR3, wherein the HCDR1, HCDR2, and HCDR3 comprises an amino acid sequence of SEQ ID NOS:10368, 6782, and 11714, respectively and the LCDR1, LCDR2, and LCDR3 comprises an amino acid sequence of SEQ ID NOS:16091, 9494, and 12671, respectively.

[0698] The disclosure describes an antibody, antigen binding fragment, or polypeptide comprising a heavy chain variable region having a HCDR1, HCDR2, and HCDR3, and a light chain variable region having a LCDR1, LCDR2, and LCDR3, wherein the HCDR1, HCDR2, and HCDR3 comprises an amino acid sequence of SEQ ID NOS:17547, 18308, and 10098, respectively and the LCDR1, LCDR2, and LCDR3 comprises an amino acid sequence of SEQ ID NOS: 15701, 4256, and 10477, respectively.

[0699] The disclosure describes an antibody, antigen binding fragment, or polypeptide comprising a heavy chain variable region having a HCDR1, HCDR2, and HCDR3, and a light chain variable region having a LCDR1, LCDR2, and LCDR3, wherein the HCDR1, HCDR2, and HCDR3 comprises an amino acid sequence of SEQ ID NOS:7820, 9562, and 18213, respectively and the LCDR1, LCDR2, and LCDR3 comprises an amino acid sequence of SEQ ID NOS: 16067, 4425, and 12443, respectively.

[0700] The disclosure describes an antibody, antigen binding fragment, or polypeptide comprising a heavy chain variable region having a HCDR1, HCDR2, and HCDR3, and a light chain variable region having a LCDR1, LCDR2, and LCDR3, wherein the HCDR1, HCDR2, and HCDR3 comprises an amino acid sequence of SEQ ID NOS:6578, 18531, and 10178, respectively and the LCDR1, LCDR2, and LCDR3 comprises an amino acid sequence of SEQ ID NOS: 16045, 9503, and 12768, respectively.

[0701] The disclosure describes an antibody, antigen binding fragment, or polypeptide comprising a heavy chain variable region having a HCDR1, HCDR2, and HCDR3, and a light chain variable region having a LCDR1, LCDR2, and LCDR3, wherein the HCDR1, HCDR2, and HCDR3 comprises an amino acid sequence of SEQ ID NOS: 17432, 18531, and 6561, respectively and the LCDR1, LCDR2, and LCDR3 comprises an amino acid sequence of SEQ ID NOS: 11789, 4420, and 12581, respectively.

[0702] The disclosure describes an antibody, antigen binding fragment, or polypeptide comprising a heavy chain variable region having a HCDR1, HCDR2, and HCDR3, and a light chain variable region having a LCDR1, LCDR2, and LCDR3, wherein the HCDR1, HCDR2, and HCDR3 comprises an amino acid sequence of SEQ ID NOS: 17856, 18589, and 4502, respectively and the LCDR1, LCDR2, and LCDR3 comprises an amino acid sequence of SEQ ID NOS: 17942, 6312, and 4378, respectively.

[0703] The disclosure describes an antibody, antigen binding fragment, or polypeptide comprising a heavy chain variable region having a HCDR1, HCDR2, and HCDR3, and a light chain variable region having a LCDR1, LCDR2, and LCDR3, wherein the HCDR1, HCDR2, and HCDR3 comprises an amino acid sequence of SEQ ID NOS: 11648, 18386, and 6108, respectively and the LCDR1, LCDR2, and LCDR3 comprises an amino acid sequence of SEQ ID NOS:16381, 10763, and 11263, respectively.

[0704] The disclosure describes an antibody, antigen binding fragment, or polypeptide comprising a heavy chain variable region having a HCDR1, HCDR2, and HCDR3, and a light chain variable region having a LCDR1, LCDR2, and LCDR3, wherein the HCDR1, HCDR2, and HCDR3 comprises an amino acid sequence of SEQ ID NOS: 10682, 18467, and 7956, respectively and the LCDR1, LCDR2, and LCDR3 comprises an amino acid sequence of SEQ ID NOS:9662, 5985, and 11940, respectively.

[0705] The disclosure describes an antibody, antigen binding fragment, or polypeptide comprising a heavy chain variable region having a HCDR1, HCDR2, and HCDR3, and a light chain variable region having a LCDR1, LCDR2, and LCDR3, wherein the HCDR1, HCDR2, and HCDR3 comprises an amino acid sequence of SEQ ID NOS:16990, 10001, and 10437, respectively and the LCDR1, LCDR2, and LCDR3 comprises an amino acid sequence of SEQ ID NOS: 10830, 9267, and 11325, respectively.

[0706] The disclosure describes an antibody, antigen binding fragment, or polypeptide comprising a heavy chain variable region having a HCDR1, HCDR2, and HCDR3, and a light chain variable region having a LCDR1, LCDR2, and LCDR3, wherein the HCDR1, HCDR2, and HCDR3 comprises an amino acid sequence of SEQ ID NOS:17443, 9388, and 6136, respectively and the LCDR1, LCDR2, and LCDR3 comprises an amino acid sequence of SEQ ID NOS: 11789, 4420, and 12573, respectively.

[0707] The disclosure describes an antibody, antigen binding fragment, or polypeptide comprising a heavy chain variable region having a HCDR1, HCDR2, and HCDR3, and a light chain variable region having a LCDR1, LCDR2, and LCDR3, wherein the HCDR1, HCDR2, and HCDR3 comprises an amino acid sequence of SEQ ID NOS:17535, 10571, and 18143, respectively and the LCDR1, LCDR2, and LCDR3 comprises an amino acid sequence of SEQ ID NOS: 10830, 9267, and 11320, respectively. having a LCDR1, LCDR2, and LCDR3, wherein the HCDR1, HCDR2, and HCDR3 comprises an amino acid sequence of SEQ ID NOS: 17270, 17777, and 6485, respectively and the LCDR1, LCDR2, and LCDR3 comprises an amino acid sequence of SEQ ID NOS: 16045, 9503, and 12770, respectively.

[0708] The disclosure describes an antibody, antigen binding fragment, or polypeptide comprising a heavy chain variable region having a HCDR1, HCDR2, and HCDR3, and a light chain variable region having a LCDR1, LCDR2, and LCDR3, wherein the HCDR1, HCDR2, and HCDR3 comprises an amino acid sequence of SEQ ID NOS:17856, 16303, and 10323, respectively and the LCDR1, LCDR2, and LCDR3 comprises an amino acid sequence of SEQ ID NOS: 16715, 16326, and 4008, respectively.

[0709] The disclosure describes an antibody, antigen binding fragment, or polypeptide comprising a heavy chain variable region having a HCDR1, HCDR2, and HCDR3, and a light chain variable region having a LCDR1, LCDR2, and LCDR3, wherein the HCDR1, HCDR2, and HCDR3 comprises an amino acid sequence of SEQ ID NOS: 16595, 16228, and 4623, respectively and the LCDR1, LCDR2, and LCDR3 comprises an amino acid sequence of SEQ ID NOS:10898, 18275, and 12960, respectively.

[0710] The disclosure describes an antibody, antigen binding fragment, or polypeptide comprising a heavy chain variable region having a HCDR1, HCDR2, and HCDR3, and a light chain variable region having a LCDR1, LCDR2, and LCDR3, wherein the HCDR1, HCDR2, and HCDR3 comprises an amino acid sequence of SEQ ID NOS:17274, 4130, and 10136, respectively and the LCDR1, LCDR2, and LCDR3 comprises an amino acid sequence of SEQ ID NOS: 16045, 9503, and 12604, respectively.

[0711] The disclosure describes an antibody, antigen binding fragment, or polypeptide comprising a heavy chain variable region having a HCDR1, HCDR2, and HCDR3, and a light chain variable region having a LCDR1, LCDR2, and LCDR3, wherein the HCDR1, HCDR2, and HCDR3 comprises an amino acid sequence of SEQ ID NOS:4457, 18311, and 11569, respectively and the LCDR1, LCDR2, and LCDR3 comprises an amino acid sequence of SEQ ID NOS:10802, 18275, and 10480, respectively.

[0712] The disclosure describes an antibody, antigen binding fragment, or polypeptide comprising a heavy chain variable region having a HCDR1, HCDR2, and HCDR3, and a light chain variable region having a LCDR1, LCDR2, and LCDR3, wherein the HCDR1, HCDR2, and HCDR3 comprises an amino acid sequence of SEQ ID NOS:6146, 18488, and 4574, respectively and the LCDR1, LCDR2, and LCDR3 comprises an amino acid sequence of SEQ ID NOS: 15852, 3962, and 12481, respectively.

[0713] The disclosure describes an antibody, antigen binding fragment, or polypeptide comprising a heavy chain variable region having a HCDR1, HCDR2, and HCDR3, and a light chain variable region having a LCDR1, LCDR2, and LCDR3, wherein the HCDR1, HCDR2, and HCDR3 comprises an amino acid sequence of SEQ ID NOS: 17441, 18359, and 6101, respectively and the LCDR1, LCDR2, and LCDR3 comprises an amino acid sequence of SEQ ID NOS:16432, 10926, and 11291, respectively.

[0714] The disclosure describes an antibody, antigen binding fragment, or polypeptide comprising a heavy chain variable region having a HCDR1, HCDR2, and HCDR3, and a light chain variable region having a LCDR1, LCDR2, and LCDR3, wherein the HCDR1, HCDR2, and HCDR3 comprises an amino acid sequence of SEQ ID NOS: 16603, 16225, and 4394, respectively and the LCDR1, LCDR2, and LCDR3 comprises an amino acid sequence of SEQ ID NOS:9359, 11895, and 11865, respectively.

[0715] The disclosure describes an antibody, antigen binding fragment, or polypeptide comprising a heavy chain variable region having a HCDR1, HCDR2, and HCDR3, and a light chain variable region having a LCDR1, LCDR2, and LCDR3, wherein the HCDR1, HCDR2, and HCDR3 comprises an amino acid sequence of SEQ ID NOS: 17027, 17823, and 4463, respectively and the LCDR1, LCDR2, and LCDR3 comprises an amino acid sequence of SEQ ID NOS: 15704, 3969, and 12803, respectively.

[0716] The disclosure describes an antibody, antigen binding fragment, or polypeptide comprising a heavy chain variable region having a HCDR1, HCDR2, and HCDR3, and a light chain variable region having a LCDR1, LCDR2, and LCDR3, wherein the HCDR1, HCDR2, and HCDR3 comprises an amino acid sequence of SEQ ID NOS:17443, 9388, and 6149, respectively and the LCDR1, LCDR2, and LCDR3 comprises an amino acid sequence of SEQ ID NOS:16427, 10926, and 11276, respectively.

[0717] The disclosure describes an antibody, antigen binding fragment, or polypeptide comprising a heavy chain variable region having a HCDR1, HCDR2, and HCDR3, and a light chain variable region having a LCDR1, LCDR2, and LCDR3, wherein the HCDR1, HCDR2, and HCDR3 comprises an amino acid sequence of SEQ ID NOS:17443, 9388, and 4617, respectively and the LCDR1, LCDR2, and LCDR3 comprises an amino acid sequence of SEQ ID NOS:16408, 10987, and 11208, respectively.

[0718] The disclosure describes an antibody, antigen binding fragment, or polypeptide comprising a heavy chain variable region having a HCDR1, HCDR2, and HCDR3, and a light chain variable region having a LCDR1, LCDR2, and LCDR3, wherein the HCDR1, HCDR2, and HCDR3 comprises an amino acid sequence of SEQ ID NOS: 17270, 17778, and 4646, respectively and the LCDR1, LCDR2, and LCDR3 comprises an amino acid sequence of SEQ ID NOS: 15713, 3982, and 12391, respectively.

[0719] The disclosure describes an antibody, antigen binding fragment, or polypeptide comprising a heavy chain variable region having a HCDR1, HCDR2, and HCDR3, and a light chain variable region having a LCDR1, LCDR2, and LCDR3, wherein the HCDR1, HCDR2, and HCDR3 comprises an amino acid sequence of SEQ ID NOS: 17855, 16304, and 6693, respectively and the LCDR1, LCDR2, and LCDR3 comprises an amino acid sequence of SEQ ID NOS: 16045, 9503, and 12780, respectively.

[0720] The disclosure describes an antibody, antigen binding fragment, or polypeptide comprising a heavy chain variable region having a HCDR1, HCDR2, and HCDR3, and a light chain variable region having a LCDR1, LCDR2, and LCDR3, wherein the HCDR1, HCDR2, and HCDR3 comprises an amino acid sequence of SEQ ID NOS:11385, 4068, and 10288, respectively and the LCDR1, LCDR2, and LCDR3 comprises an amino acid sequence of SEQ ID NOS: 15897, 3967, and 12521, respectively.

[0721] The disclosure describes an antibody, antigen binding fragment, or polypeptide comprising a heavy chain variable region having a HCDR1, HCDR2, and HCDR3, and a light chain variable region having a LCDR1, LCDR2, and LCDR3, wherein the HCDR1, HCDR2, and HCDR3 comprises an amino acid sequence of SEQ ID NOS:9568, 5444, and 4478, respectively and the LCDR1, LCDR2, and LCDR3 comprises an amino acid sequence of SEQ ID NOS:16767, 4173, and 4015, respectively.

[0722] The disclosure describes an antibody, antigen binding fragment, or polypeptide comprising a heavy chain variable region having a HCDR1, HCDR2, and HCDR3, and a light chain variable region having a LCDR1, LCDR2, and LCDR3, wherein the HCDR1, HCDR2, and HCDR3 comprises an amino acid sequence of SEQ ID NOS:17991, 10566, and 10429, respectively and the LCDR1, LCDR2, and LCDR3 comprises an amino acid sequence of SEQ ID NOS:4237, 17225, and 11060, respectively.

[0723] The disclosure describes an antibody, antigen binding fragment, or polypeptide comprising a heavy chain variable region having a HCDR1, HCDR2, and HCDR3, and a light chain variable region having a LCDR1, LCDR2, and LCDR3, wherein the HCDR1, HCDR2, and HCDR3 comprises an amino acid sequence of SEQ ID NOS: 11413, 18632, and 6061, respectively and the LCDR1, LCDR2, and LCDR3 comprises an amino acid sequence of SEQ ID NOS:15635, 17863, and 12474, respectively.

[0724] The disclosure describes an antibody, antigen binding fragment, or polypeptide comprising a heavy chain variable region having a HCDR1, HCDR2, and HCDR3, and a light chain variable region having a LCDR1, LCDR2, and LCDR3, wherein the HCDR1, HCDR2, and HCDR3 comprises an amino acid sequence of SEQ ID NOS: 17838, 16277, and 7888, respectively and the LCDR1, LCDR2, and LCDR3 comprises an amino acid sequence of SEQ ID NOS:9633, 18448, and 15560, respectively.

[0725] The disclosure describes an antibody, antigen binding fragment, or polypeptide comprising a heavy chain variable region having a HCDR1, HCDR2, and HCDR3, and a light chain variable region having a LCDR1, LCDR2, and LCDR3, wherein the HCDR1, HCDR2, and HCDR3 comprises an amino acid sequence of SEQ ID NOS: 11633, 10551, and 4183, respectively and the LCDR1, LCDR2, and LCDR3 comprises an amino acid sequence of SEQ ID NOS:10890, 18271, and 12942, respectively.

[0726] The disclosure describes an antibody, antigen binding fragment, or polypeptide comprising a heavy chain variable region having a HCDR1, HCDR2, and HCDR3, and a light chain variable region having a LCDR1, LCDR2, and LCDR3, wherein the HCDR1, HCDR2, and HCDR3 comprises an amino acid sequence of SEQ ID NOS: 17432, 18555, and 5898, respectively and the LCDR1, LCDR2, and LCDR3 comprises an amino acid sequence of SEQ ID NOS:18090, 11069, and 13623, respectively. having a LCDR1, LCDR2, and LCDR3, wherein the HCDR1, HCDR2, and HCDR3 comprises an amino acid sequence of SEQ ID NOS:17842, 11491, and 10975, respectively and the LCDR1, LCDR2, and LCDR3 comprises an amino acid sequence of SEQ ID NOS:10905, 18275, and 12959, respectively.

[0727] The disclosure describes an antibody, antigen binding fragment, or polypeptide comprising a heavy chain variable region having a HCDR1, HCDR2, and HCDR3, and a light chain variable region having a LCDR1, LCDR2, and LCDR3, wherein the HCDR1, HCDR2, and HCDR3 comprises an amino acid sequence of SEQ ID NOS: 17606, 9753, and 6097, respectively and the LCDR1, LCDR2, and LCDR3 comprises an amino acid sequence of SEQ ID NOS:16463, 10987, and 11254, respectively.

[0728] The disclosure describes an antibody, antigen binding fragment, or polypeptide comprising a heavy chain variable region having a HCDR1, HCDR2, and HCDR3, and a light chain variable region having a LCDR1, LCDR2, and LCDR3, wherein the HCDR1, HCDR2, and HCDR3 comprises an amino acid sequence of SEQ ID NOS:16796, 11430, and 11706, respectively and the LCDR1, LCDR2, and LCDR3 comprises an amino acid sequence of SEQ ID NOS:10811, 18275, and 12896, respectively.

[0729] The disclosure describes an antibody, antigen binding fragment, or polypeptide comprising a heavy chain variable region having a HCDR1, HCDR2, and HCDR3, and a light chain variable region having a LCDR1, LCDR2, and LCDR3, wherein the HCDR1, HCDR2, and HCDR3 comprises an amino acid sequence of SEQ ID NOS: 17443, 17778, and 4622, respectively and the LCDR1, LCDR2, and LCDR3 comprises an amino acid sequence of SEQ ID NOS:11949, 10024, and 11585, respectively.

[0730] The disclosure describes an antibody, antigen binding fragment, or polypeptide comprising a heavy chain variable region having a HCDR1, HCDR2, and HCDR3, and a light chain variable region having a LCDR1, LCDR2, and LCDR3, wherein the HCDR1, HCDR2, and HCDR3 comprises an amino acid sequence of SEQ ID NOS: 16692, 18586, and 4312, respectively and the LCDR1, LCDR2, and LCDR3 comprises an amino acid sequence of SEQ ID NOS: 16067, 4425, and 12420, respectively.

[0731] The disclosure describes an antibody, antigen binding fragment, or polypeptide comprising a heavy chain variable region having a HCDR1, HCDR2, and HCDR3, and a light chain variable region having a LCDR1, LCDR2, and LCDR3, wherein the HCDR1, HCDR2, and HCDR3 comprises an amino acid sequence of SEQ ID NOS:10935, 9846, and 10240, respectively and the LCDR1, LCDR2, and LCDR3 comprises an amino acid sequence of SEQ ID NOS:16062, 10261, and 12641, respectively.

[0732] The disclosure describes an antibody, antigen binding fragment, or polypeptide comprising a heavy chain variable region having a HCDR1, HCDR2, and HCDR3, and a light chain variable region having a LCDR1, LCDR2, and LCDR3, wherein the HCDR1, HCDR2, and HCDR3 comprises an amino acid sequence of SEQ ID NOS: 17855, 16220, and 7832, respectively and the LCDR1, LCDR2, and LCDR3 comprises an amino acid sequence of SEQ ID NOS:10806, 18275, and 12987, respectively.

[0733] The disclosure describes an antibody, antigen binding fragment, or polypeptide comprising a heavy chain variable region having a HCDR1, HCDR2, and HCDR3, and a light chain variable region having a LCDR1, LCDR2, and LCDR3, wherein the HCDR1, HCDR2, and HCDR3 comprises an amino acid sequence of SEQ ID NOS:17274, 4136, and 10957, respectively and the LCDR1, LCDR2, and LCDR3 comprises an amino acid sequence of SEQ ID NOS: 16061, 9494, and 12696, respectively.

[0734] The disclosure describes an antibody, antigen binding fragment, or polypeptide comprising a heavy chain variable region having a HCDR1, HCDR2, and HCDR3, and a light chain variable region having a LCDR1, LCDR2, and LCDR3, wherein the HCDR1, HCDR2, and HCDR3 comprises an amino acid sequence of SEQ ID NOS:4633, 18303, and 6009, respectively and the LCDR1, LCDR2, and LCDR3 comprises an amino acid sequence of SEQ ID NOS: 16023, 9494, and 12643, respectively.

[0735] The disclosure describes an antibody, antigen binding fragment, or polypeptide comprising a heavy chain variable region having a HCDR1, HCDR2, and HCDR3, and a light chain variable region having a LCDR1, LCDR2, and LCDR3, wherein the HCDR1, HCDR2, and HCDR3 comprises an amino acid sequence of SEQ ID NOS: 11679, 11513, and 9473, respectively and the LCDR1, LCDR2, and LCDR3 comprises an amino acid sequence of SEQ ID NOS:10792, 18275, and 12985, respectively.

[0736] The disclosure describes an antibody, antigen binding fragment, or polypeptide comprising a heavy chain variable region having a HCDR1, HCDR2, and HCDR3, and a light chain variable region having a LCDR1, LCDR2, and LCDR3, wherein the HCDR1, HCDR2, and HCDR3 comprises an amino acid sequence of SEQ ID NOS:10779, 9795, and 6166, respectively and the LCDR1, LCDR2, and LCDR3 comprises an amino acid sequence of SEQ ID NOS: 16061, 4432, and 12713, respectively.

[0737] The disclosure describes an antibody, antigen binding fragment, or polypeptide comprising a heavy chain variable region having a HCDR1, HCDR2, and HCDR3, and a light chain variable region having a LCDR1, LCDR2, and LCDR3, wherein the HCDR1, HCDR2, and HCDR3 comprises an amino acid sequence of SEQ ID NOS:6507, 9968, and 16682, respectively and the LCDR1, LCDR2, and LCDR3 comprises an amino acid sequence of SEQ ID NOS:16671, 10747, and 18615, respectively.

[0738] The disclosure describes an antibody, antigen binding fragment, or polypeptide comprising a heavy chain variable region having a HCDR1, HCDR2, and HCDR3, and a light chain variable region having a LCDR1, LCDR2, and LCDR3, wherein the HCDR1, HCDR2, and HCDR3 comprises an amino acid sequence of SEQ ID NOS: 17655, 18558, and 4474, respectively and the LCDR1, LCDR2, and LCDR3 comprises an amino acid sequence of SEQ ID NOS:16356, 10263, and 12474, respectively.

[0739] The disclosure describes an antibody, antigen binding fragment, or polypeptide comprising a heavy chain variable region having a HCDR1, HCDR2, and HCDR3, and a light chain variable region having a LCDR1, LCDR2, and LCDR3, wherein the HCDR1, HCDR2, and HCDR3 comprises an amino acid sequence of SEQ ID NOS: 17466, 16919, and 6665, respectively and the LCDR1, LCDR2, and LCDR3 comprises an amino acid sequence of SEQ ID NOS: 17959, 9268, and 17188, respectively.

[0740] The disclosure describes an antibody, antigen binding fragment, or polypeptide comprising a heavy chain variable region having a HCDR1, HCDR2, and HCDR3, and a light chain variable region having a LCDR1, LCDR2, and LCDR3, wherein the HCDR1, HCDR2, and HCDR3 comprises an amino acid sequence of SEQ ID NOS: 17842, 11488, and 6164, respectively and the LCDR1, LCDR2, and LCDR3 comprises an amino acid sequence of SEQ ID NOS: 10830, 9267, and 11322, respectively.

[0741] The disclosure describes an antibody, antigen binding fragment, or polypeptide comprising a heavy chain variable region having a HCDR1, HCDR2, and HCDR3, and a light chain variable region having a LCDR1, LCDR2, and LCDR3, wherein the HCDR1, HCDR2, and HCDR3 comprises an amino acid sequence of SEQ ID NOS: 11642, 18533, and 9557, respectively and the LCDR1, LCDR2, and LCDR3 comprises an amino acid sequence of SEQ ID NOS:15847, 10737, and 12834, respectively.

[0742] The disclosure describes an antibody, antigen binding fragment, or polypeptide comprising a heavy chain variable region having a HCDR1, HCDR2, and HCDR3, and a light chain variable region having a LCDR1, LCDR2, and LCDR3, wherein the HCDR1, HCDR2, and HCDR3 comprises an amino acid sequence of SEQ ID NOS:11642, 16924, and 10290, respectively and the LCDR1, LCDR2, and LCDR3 comprises an amino acid sequence of SEQ ID NOS: 15597, 4436, and 12725, respectively.

[0743] The disclosure describes an antibody, antigen binding fragment, or polypeptide comprising a heavy chain variable region having a HCDR1, HCDR2, and HCDR3, and a light chain variable region having a LCDR1, LCDR2, and LCDR3, wherein the HCDR1, HCDR2, and HCDR3 comprises an amino acid sequence of SEQ ID NOS:10227, 11010, and 10481, respectively and the LCDR1, LCDR2, and LCDR3 comprises an amino acid sequence of SEQ ID NOS:15817, 10727, and 12811, respectively.

[0744] The disclosure describes an antibody, antigen binding fragment, or polypeptide comprising a heavy chain variable region having a HCDR1, HCDR2, and HCDR3, and a light chain variable region having a LCDR1, LCDR2, and LCDR3, wherein the HCDR1, HCDR2, and HCDR3 comprises an amino acid sequence of SEQ ID NOS: 17028, 17823, and 6120, respectively and the LCDR1, LCDR2, and LCDR3 comprises an amino acid sequence of SEQ ID NOS:15890, 10727, and 12825, respectively.

[0745] The disclosure describes an antibody, antigen binding fragment, or polypeptide comprising a heavy chain variable region having a HCDR1, HCDR2, and HCDR3, and a light chain variable region having a LCDR1, LCDR2, and LCDR3, wherein the HCDR1, HCDR2, and HCDR3 comprises an amino acid sequence of SEQ ID NOS:17856, 16306, and 10099, respectively and the LCDR1, LCDR2, and LCDR3 comprises an amino acid sequence of SEQ ID NOS: 16736, 7860, and 10274, respectively. having a LCDR1, LCDR2, and LCDR3, wherein the HCDR1, HCDR2, and HCDR3 comprises an amino acid sequence of SEQ ID NOS:6507, 9971, and 10175, respectively and the LCDR1, LCDR2, and LCDR3 comprises an amino acid sequence of SEQ ID NOS: 17959, 9268, and 17190, respectively.

[0746] The disclosure describes an antibody, antigen binding fragment, or polypeptide comprising a heavy chain variable region having a HCDR1, HCDR2, and HCDR3, and a light chain variable region having a LCDR1, LCDR2, and LCDR3, wherein the HCDR1, HCDR2, and HCDR3 comprises an amino acid sequence of SEQ ID NOS: 17843, 18049, and 4602, respectively and the LCDR1, LCDR2, and LCDR3 comprises an amino acid sequence of SEQ ID NOS:10878, 18275, and 12916, respectively.

[0747] The disclosure describes an antibody, antigen binding fragment, or polypeptide comprising a heavy chain variable region having a HCDR1, HCDR2, and HCDR3, and a light chain variable region having a LCDR1, LCDR2, and LCDR3, wherein the HCDR1, HCDR2, and HCDR3 comprises an amino acid sequence of SEQ ID NOS:10368, 6737, and 10132, respectively and the LCDR1, LCDR2, and LCDR3 comprises an amino acid sequence of SEQ ID NOS:15659, 17663, and 10466, respectively.

[0748] The disclosure describes an antibody, antigen binding fragment, or polypeptide comprising a heavy chain variable region having a HCDR1, HCDR2, and HCDR3, and a light chain variable region having a LCDR1, LCDR2, and LCDR3, wherein the HCDR1, HCDR2, and HCDR3 comprises an amino acid sequence of SEQ ID NOS:17839, 11508, and 10526, respectively and the LCDR1, LCDR2, and LCDR3 comprises an amino acid sequence of SEQ ID NOS: 15674, 10370, and 11079, respectively.

[0749] The disclosure describes an antibody, antigen binding fragment, or polypeptide comprising a heavy chain variable region having a HCDR1, HCDR2, and HCDR3, and a light chain variable region having a LCDR1, LCDR2, and LCDR3, wherein the HCDR1, HCDR2, and HCDR3 comprises an amino acid sequence of SEQ ID NOS:11640, 17590, and 18283, respectively and the LCDR1, LCDR2, and LCDR3 comprises an amino acid sequence of SEQ ID NOS:15871, 10737, and 12810, respectively.

[0750] The disclosure describes an antibody, antigen binding fragment, or polypeptide comprising a heavy chain variable region having a HCDR1, HCDR2, and HCDR3, and a light chain variable region having a LCDR1, LCDR2, and LCDR3, wherein the HCDR1, HCDR2, and HCDR3 comprises an amino acid sequence of SEQ ID NOS: 17608, 18030, and 6175, respectively and the LCDR1, LCDR2, and LCDR3 comprises an amino acid sequence of SEQ ID NOS: 16045, 4436, and 12946, respectively.

[0751] The disclosure describes an antibody, antigen binding fragment, or polypeptide comprising a heavy chain variable region having a HCDR1, HCDR2, and HCDR3, and a light chain variable region having a LCDR1, LCDR2, and LCDR3, wherein the HCDR1, HCDR2, and HCDR3 comprises an amino acid sequence of SEQ ID NOS:16796, 16939, and 10253, respectively and the LCDR1, LCDR2, and LCDR3 comprises an amino acid sequence of SEQ ID NOS: 16061, 9494, and 12669, respectively.

[0752] The disclosure describes an antibody, antigen binding fragment, or polypeptide comprising a heavy chain variable region having a HCDR1, HCDR2, and HCDR3, and a light chain variable region having a LCDR1, LCDR2, and LCDR3, wherein the HCDR1, HCDR2, and HCDR3 comprises an amino acid sequence of SEQ ID NOS:17266, 9728, and 11120, respectively and the LCDR1, LCDR2, and LCDR3 comprises an amino acid sequence of SEQ ID NOS: 15748, 9494, and 12005, respectively.

[0753] The disclosure describes an antibody, antigen binding fragment, or polypeptide comprising a heavy chain variable region having a HCDR1, HCDR2, and HCDR3, and a light chain variable region having a LCDR1, LCDR2, and LCDR3, wherein the HCDR1, HCDR2, and HCDR3 comprises an amino acid sequence of SEQ ID NOS: 10368, 6782, and 7898, respectively and the LCDR1, LCDR2, and LCDR3 comprises an amino acid sequence of SEQ ID NOS: 16061, 9494, and 12688, respectively.

[0754] The disclosure describes an antibody, antigen binding fragment, or polypeptide comprising a heavy chain variable region having a HCDR1, HCDR2, and HCDR3, and a light chain variable region having a LCDR1, LCDR2, and LCDR3, wherein the HCDR1, HCDR2, and HCDR3 comprises an amino acid sequence of SEQ ID NOS:17432, 18523, and 11372, respectively and the LCDR1, LCDR2, and LCDR3 comprises an amino acid sequence of SEQ ID NOS:17936, 6721, and 4361, respectively.

[0755] The disclosure describes an antibody, antigen binding fragment, or polypeptide comprising a heavy chain variable region having a HCDR1, HCDR2, and HCDR3, and a light chain variable region having a LCDR1, LCDR2, and LCDR3, wherein the HCDR1, HCDR2, and HCDR3 comprises an amino acid sequence of SEQ ID NOS:6580, 16301, and 10302, respectively and the LCDR1, LCDR2, and LCDR3 comprises an amino acid sequence of SEQ ID NOS:11950, 10024, and 11592, respectively.

[0756] The disclosure describes an antibody, antigen binding fragment, or polypeptide comprising a heavy chain variable region having a HCDR1, HCDR2, and HCDR3, and a light chain variable region having a LCDR1, LCDR2, and LCDR3, wherein the HCDR1, HCDR2, and HCDR3 comprises an amino acid sequence of SEQ ID NOS:16990, 9854, and 11191, respectively and the LCDR1, LCDR2, and LCDR3 comprises an amino acid sequence of SEQ ID NOS: 10826, 9267, and 11338, respectively.

[0757] The disclosure describes an antibody, antigen binding fragment, or polypeptide comprising a heavy chain variable region having a HCDR1, HCDR2, and HCDR3, and a light chain variable region having a LCDR1, LCDR2, and LCDR3, wherein the HCDR1, HCDR2, and HCDR3 comprises an amino acid sequence of SEQ ID NOS: 17443, 9370, and 6053, respectively and the LCDR1, LCDR2, and LCDR3 comprises an amino acid sequence of SEQ ID NOS:15890, 10704, and 10469, respectively.

[0758] The disclosure describes an antibody, antigen binding fragment, or polypeptide comprising a heavy chain variable region having a HCDR1, HCDR2, and HCDR3, and a light chain variable region having a LCDR1, LCDR2, and LCDR3, wherein the HCDR1, HCDR2, and HCDR3 comprises an amino acid sequence of SEQ ID NOS:17263, 9836, and 10483, respectively and the LCDR1, LCDR2, and LCDR3 comprises an amino acid sequence of SEQ ID NOS: 15883, 4426, and 12625, respectively.

[0759] The disclosure describes an antibody, antigen binding fragment, or polypeptide comprising a heavy chain variable region having a HCDR1, HCDR2, and HCDR3, and a light chain variable region having a LCDR1, LCDR2, and LCDR3, wherein the HCDR1, HCDR2, and HCDR3 comprises an amino acid sequence of SEQ ID NOS: 17432, 18531, and 6056, respectively and the LCDR1, LCDR2, and LCDR3 comprises an amino acid sequence of SEQ ID NOS:17924, 10094, and 13587, respectively.

[0760] The disclosure describes an antibody, antigen binding fragment, or polypeptide comprising a heavy chain variable region having a HCDR1, HCDR2, and HCDR3, and a light chain variable region having a LCDR1, LCDR2, and LCDR3, wherein the HCDR1, HCDR2, and HCDR3 comprises an amino acid sequence of SEQ ID NOS: 10367, 18323, and 7858, respectively and the LCDR1, LCDR2, and LCDR3 comprises an amino acid sequence of SEQ ID NOS: 16061, 9494, and 12668, respectively.

[0761] The disclosure describes an antibody, antigen binding fragment, or polypeptide comprising a heavy chain variable region having a HCDR1, HCDR2, and HCDR3, and a light chain variable region having a LCDR1, LCDR2, and LCDR3, wherein the HCDR1, HCDR2, and HCDR3 comprises an amino acid sequence of SEQ ID NOS:17558, 11039, and 17545, respectively and the LCDR1, LCDR2, and LCDR3 comprises an amino acid sequence of SEQ ID NOS: 16067, 4425, and 12426, respectively.

[0762] The disclosure describes an antibody, antigen binding fragment, or polypeptide comprising a heavy chain variable region having a HCDR1, HCDR2, and HCDR3, and a light chain variable region having a LCDR1, LCDR2, and LCDR3, wherein the HCDR1, HCDR2, and HCDR3 comprises an amino acid sequence of SEQ ID NOS:10367, 18323, and 10298, respectively and the LCDR1, LCDR2, and LCDR3 comprises an amino acid sequence of SEQ ID NOS: 16408, 10987, and 11203, respectively.

[0763] The disclosure describes an antibody, antigen binding fragment, or polypeptide comprising a heavy chain variable region having a HCDR1, HCDR2, and HCDR3, and a light chain variable region having a LCDR1, LCDR2, and LCDR3, wherein the HCDR1, HCDR2, and HCDR3 comprises an amino acid sequence of SEQ ID NOS:17535, 10571, and 17657, respectively and the LCDR1, LCDR2, and LCDR3 comprises an amino acid sequence of SEQ ID NOS: 15890, 10727, and 12839, respectively.

[0764] The disclosure describes an antibody, antigen binding fragment, or polypeptide comprising a heavy chain variable region having a HCDR1, HCDR2, and HCDR3, and a light chain variable region having a LCDR1, LCDR2, and LCDR3, wherein the HCDR1, HCDR2, and HCDR3 comprises an amino acid sequence of SEQ ID NOS: 11413, 18469, and 6123, respectively and the LCDR1, LCDR2, and LCDR3 comprises an amino acid sequence of SEQ ID NOS:15636, 17862, and 12540, respectively. having a LCDR1, LCDR2, and LCDR3, wherein the HCDR1, HCDR2, and HCDR3 comprises an amino acid sequence of SEQ ID NOS: 17466, 16919, and 6623, respectively and the LCDR1, LCDR2, and LCDR3 comprises an amino acid sequence of SEQ ID NOS: 15713, 3982, and 13003, respectively.

[0765] The disclosure describes an antibody, antigen binding fragment, or polypeptide comprising a heavy chain variable region having a HCDR1, HCDR2, and HCDR3, and a light chain variable region having a LCDR1, LCDR2, and LCDR3, wherein the HCDR1, HCDR2, and HCDR3 comprises an amino acid sequence of SEQ ID NOS:6578, 18531, and 9609, respectively and the LCDR1, LCDR2, and LCDR3 comprises an amino acid sequence of SEQ ID NOS: 16061, 9494, and 12670, respectively.

[0766] The disclosure describes an antibody, antigen binding fragment, or polypeptide comprising a heavy chain variable region having a HCDR1, HCDR2, and HCDR3, and a light chain variable region having a LCDR1, LCDR2, and LCDR3, wherein the HCDR1, HCDR2, and HCDR3 comprises an amino acid sequence of SEQ ID NOS: 18636, 18355, and 4191, respectively and the LCDR1, LCDR2, and LCDR3 comprises an amino acid sequence of SEQ ID NOS: 10808, 9267, and 11329, respectively.

[0767] The disclosure describes an antibody, antigen binding fragment, or polypeptide comprising a heavy chain variable region having a HCDR1, HCDR2, and HCDR3, and a light chain variable region having a LCDR1, LCDR2, and LCDR3, wherein the HCDR1, HCDR2, and HCDR3 comprises an amino acid sequence of SEQ ID NOS:6530, 9915, and 4621, respectively and the LCDR1, LCDR2, and LCDR3 comprises an amino acid sequence of SEQ ID NOS:9629, 4470, and 15557, respectively.

[0768] The disclosure describes an antibody, antigen binding fragment, or polypeptide comprising a heavy chain variable region having a HCDR1, HCDR2, and HCDR3, and a light chain variable region having a LCDR1, LCDR2, and LCDR3, wherein the HCDR1, HCDR2, and HCDR3 comprises an amino acid sequence of SEQ ID NOS: 17840, 11503, and 6163, respectively and the LCDR1, LCDR2, and LCDR3 comprises an amino acid sequence of SEQ ID NOS:18072, 18596, and 11179, respectively.

[0769] The disclosure describes an antibody, antigen binding fragment, or polypeptide comprising a heavy chain variable region having a HCDR1, HCDR2, and HCDR3, and a light chain variable region having a LCDR1, LCDR2, and LCDR3, wherein the HCDR1, HCDR2, and HCDR3 comprises an amino acid sequence of SEQ ID NOS:16633, 16313, and 10195, respectively and the LCDR1, LCDR2, and LCDR3 comprises an amino acid sequence of SEQ ID NOS: 16045, 9503, and 12782, respectively.

[0770] The disclosure describes an antibody, antigen binding fragment, or polypeptide comprising a heavy chain variable region having a HCDR1, HCDR2, and HCDR3, and a light chain variable region having a LCDR1, LCDR2, and LCDR3, wherein the HCDR1, HCDR2, and HCDR3 comprises an amino acid sequence of SEQ ID NOS:17432, 18531, and 16551, respectively and the LCDR1, LCDR2, and LCDR3 comprises an amino acid sequence of SEQ ID NOS:16122, 6615, and 12848, respectively.

[0771] The disclosure describes an antibody, antigen binding fragment, or polypeptide comprising a heavy chain variable region having a HCDR1, HCDR2, and HCDR3, and a light chain variable region having a LCDR1, LCDR2, and LCDR3, wherein the HCDR1, HCDR2, and HCDR3 comprises an amino acid sequence of SEQ ID NOS: 17466, 16971, and 4227, respectively and the LCDR1, LCDR2, and LCDR3 comprises an amino acid sequence of SEQ ID NOS:16114, 10703, and 12601, respectively.

[0772] The disclosure describes an antibody, antigen binding fragment, or polypeptide comprising a heavy chain variable region having a HCDR1, HCDR2, and HCDR3, and a light chain variable region having a LCDR1, LCDR2, and LCDR3, wherein the HCDR1, HCDR2, and HCDR3 comprises an amino acid sequence of SEQ ID NOS:16575, 18474, and 10523, respectively and the LCDR1, LCDR2, and LCDR3 comprises an amino acid sequence of SEQ ID NOS:4057, 6312, and 4374, respectively.

[0773] The disclosure describes an antibody, antigen binding fragment, or polypeptide comprising a heavy chain variable region having a HCDR1, HCDR2, and HCDR3, and a light chain variable region having a LCDR1, LCDR2, and LCDR3, wherein the HCDR1, HCDR2, and HCDR3 comprises an amino acid sequence of SEQ ID NOS:6571, 18323, and 11390, respectively and the LCDR1, LCDR2, and LCDR3 comprises an amino acid sequence of SEQ ID NOS:17946, 6331, and 4347, respectively.

[0774] The disclosure describes an antibody, antigen binding fragment, or polypeptide comprising a heavy chain variable region having a HCDR1, HCDR2, and HCDR3, and a light chain variable region having a LCDR1, LCDR2, and LCDR3, wherein the HCDR1, HCDR2, and HCDR3 comprises an amino acid sequence of SEQ ID NOS:17263, 9776, and 4061, respectively and the LCDR1, LCDR2, and LCDR3 comprises an amino acid sequence of SEQ ID NOS: 17959, 9268, and 17196, respectively.

[0775] The disclosure describes an antibody, antigen binding fragment, or polypeptide comprising a heavy chain variable region having a HCDR1, HCDR2, and HCDR3, and a light chain variable region having a LCDR1, LCDR2, and LCDR3, wherein the HCDR1, HCDR2, and HCDR3 comprises an amino acid sequence of SEQ ID NOS: 17441, 18360, and 6696, respectively and the LCDR1, LCDR2, and LCDR3 comprises an amino acid sequence of SEQ ID NOS: 17959, 9268, and 17190, respectively.

[0776] The disclosure describes an antibody, antigen binding fragment, or polypeptide comprising a heavy chain variable region having a HCDR1, HCDR2, and HCDR3, and a light chain variable region having a LCDR1, LCDR2, and LCDR3, wherein the HCDR1, HCDR2, and HCDR3 comprises an amino acid sequence of SEQ ID NOS:4457, 18384, and 11570, respectively and the LCDR1, LCDR2, and LCDR3 comprises an amino acid sequence of SEQ ID NOS:10802, 18275, and 10480, respectively.

[0777] The disclosure describes an antibody, antigen binding fragment, or polypeptide comprising a heavy chain variable region having a HCDR1, HCDR2, and HCDR3, and a light chain variable region having a LCDR1, LCDR2, and LCDR3, wherein the HCDR1, HCDR2, and HCDR3 comprises an amino acid sequence of SEQ ID NOS: 11678, 11548, and 4573, respectively and the LCDR1, LCDR2, and LCDR3 comprises an amino acid sequence of SEQ ID NOS:15813, 17226, and 12555, respectively.

[0778] The disclosure describes an antibody, antigen binding fragment, or polypeptide comprising a heavy chain variable region having a HCDR1, HCDR2, and HCDR3, and a light chain variable region having a LCDR1, LCDR2, and LCDR3, wherein the HCDR1, HCDR2, and HCDR3 comprises an amino acid sequence of SEQ ID NOS: 11411, 11472, and 6031, respectively and the LCDR1, LCDR2, and LCDR3 comprises an amino acid sequence of SEQ ID NOS:10798, 18275, and 12959, respectively.

[0779] The disclosure describes an antibody, antigen binding fragment, or polypeptide comprising a heavy chain variable region having a HCDR1, HCDR2, and HCDR3, and a light chain variable region having a LCDR1, LCDR2, and LCDR3, wherein the HCDR1, HCDR2, and HCDR3 comprises an amino acid sequence of SEQ ID NOS:17534, 10568, and 16168, respectively and the LCDR1, LCDR2, and LCDR3 comprises an amino acid sequence of SEQ ID NOS:16018, 4425, and 12427, respectively.

[0780] The disclosure describes an antibody, antigen binding fragment, or polypeptide comprising a heavy chain variable region having a HCDR1, HCDR2, and HCDR3, and a light chain variable region having a LCDR1, LCDR2, and LCDR3, wherein the HCDR1, HCDR2, and HCDR3 comprises an amino acid sequence of SEQ ID NOS: 11690, 16222, and 5916, respectively and the LCDR1, LCDR2, and LCDR3 comprises an amino acid sequence of SEQ ID NOS:16659, 11900, and 11884, respectively.

[0781] The disclosure describes an antibody, antigen binding fragment, or polypeptide comprising a heavy chain variable region having a HCDR1, HCDR2, and HCDR3, and a light chain variable region having a LCDR1, LCDR2, and LCDR3, wherein the HCDR1, HCDR2, and HCDR3 comprises an amino acid sequence of SEQ ID NOS:11582, 9784, and 7915, respectively and the LCDR1, LCDR2, and LCDR3 comprises an amino acid sequence of SEQ ID NOS: 10828, 9267, and 11319, respectively.

[0782] The disclosure describes an antibody, antigen binding fragment, or polypeptide comprising a heavy chain variable region having a HCDR1, HCDR2, and HCDR3, and a light chain variable region having a LCDR1, LCDR2, and LCDR3, wherein the HCDR1, HCDR2, and HCDR3 comprises an amino acid sequence of SEQ ID NOS:11690, 16318, and 10341, respectively and the LCDR1, LCDR2, and LCDR3 comprises an amino acid sequence of SEQ ID NOS: 10787, 9267, and 11315, respectively.

[0783] The disclosure describes an antibody, antigen binding fragment, or polypeptide comprising a heavy chain variable region having a HCDR1, HCDR2, and HCDR3, and a light chain variable region having a LCDR1, LCDR2, and LCDR3, wherein the HCDR1, HCDR2, and HCDR3 comprises an amino acid sequence of SEQ ID NOS: 17856, 16219, and 7955, respectively and the LCDR1, LCDR2, and LCDR3 comprises an amino acid sequence of SEQ ID NOS: 16737, 16331, and 4012, respectively. having a LCDR1, LCDR2, and LCDR3, wherein the HCDR1, HCDR2, and HCDR3 comprises an amino acid sequence of SEQ ID NOS:11642, 18600, and 10149, respectively and the LCDR1, LCDR2, and LCDR3 comprises an amino acid sequence of SEQ ID NOS:15861, 10727, and 12800, respectively.

[0784] The disclosure describes an antibody, antigen binding fragment, or polypeptide comprising a heavy chain variable region having a HCDR1, HCDR2, and HCDR3, and a light chain variable region having a LCDR1, LCDR2, and LCDR3, wherein the HCDR1, HCDR2, and HCDR3 comprises an amino acid sequence of SEQ ID NOS:16990, 9881, and 18627, respectively and the LCDR1, LCDR2, and LCDR3 comprises an amino acid sequence of SEQ ID NOS: 10830, 9272, and 11300, respectively.

[0785] The disclosure describes an antibody, antigen binding fragment, or polypeptide comprising a heavy chain variable region having a HCDR1, HCDR2, and HCDR3, and a light chain variable region having a LCDR1, LCDR2, and LCDR3, wherein the HCDR1, HCDR2, and HCDR3 comprises an amino acid sequence of SEQ ID NOS:11677, 17246, and 10060, respectively and the LCDR1, LCDR2, and LCDR3 comprises an amino acid sequence of SEQ ID NOS: 15767, 9555, and 10438, respectively.

[0786] The disclosure describes an antibody, antigen binding fragment, or polypeptide comprising a heavy chain variable region having a HCDR1, HCDR2, and HCDR3, and a light chain variable region having a LCDR1, LCDR2, and LCDR3, wherein the HCDR1, HCDR2, and HCDR3 comprises an amino acid sequence of SEQ ID NOS: 17441, 18360, and 6692, respectively and the LCDR1, LCDR2, and LCDR3 comprises an amino acid sequence of SEQ ID NOS: 17550, 6629, and 13584, respectively.

[0787] The disclosure describes an antibody, antigen binding fragment, or polypeptide comprising a heavy chain variable region having a HCDR1, HCDR2, and HCDR3, and a light chain variable region having a LCDR1, LCDR2, and LCDR3, wherein the HCDR1, HCDR2, and HCDR3 comprises an amino acid sequence of SEQ ID NOS: 17432, 18532, and 4402, respectively and the LCDR1, LCDR2, and LCDR3 comprises an amino acid sequence of SEQ ID NOS:16114, 11791, and 12818, respectively.

[0788] The disclosure describes an antibody, antigen binding fragment, or polypeptide comprising a heavy chain variable region having a HCDR1, HCDR2, and HCDR3, and a light chain variable region having a LCDR1, LCDR2, and LCDR3, wherein the HCDR1, HCDR2, and HCDR3 comprises an amino acid sequence of SEQ ID NOS: 17270, 17778, and 6171, respectively and the LCDR1, LCDR2, and LCDR3 comprises an amino acid sequence of SEQ ID NOS: 17550, 6629, and 13585, respectively.

[0789] The disclosure describes an antibody, antigen binding fragment, or polypeptide comprising a heavy chain variable region having a HCDR1, HCDR2, and HCDR3, and a light chain variable region having a LCDR1, LCDR2, and LCDR3, wherein the HCDR1, HCDR2, and HCDR3 comprises an amino acid sequence of SEQ ID NOS:17274, 4136, and 11075, respectively and the LCDR1, LCDR2, and LCDR3 comprises an amino acid sequence of SEQ ID NOS: 17967, 9268, and 17186, respectively.

[0790] The disclosure describes an antibody, antigen binding fragment, or polypeptide comprising a heavy chain variable region having a HCDR1, HCDR2, and HCDR3, and a light chain variable region having a LCDR1, LCDR2, and LCDR3, wherein the HCDR1, HCDR2, and HCDR3 comprises an amino acid sequence of SEQ ID NOS: 11650, 17809, and 9638, respectively and the LCDR1, LCDR2, and LCDR3 comprises an amino acid sequence of SEQ ID NOS: 16056, 9503, and 12731, respectively.

[0791] The disclosure describes an antibody, antigen binding fragment, or polypeptide comprising a heavy chain variable region having a HCDR1, HCDR2, and HCDR3, and a light chain variable region having a LCDR1, LCDR2, and LCDR3, wherein the HCDR1, HCDR2, and HCDR3 comprises an amino acid sequence of SEQ ID NOS: 10368, 6782, and 9624, respectively and the LCDR1, LCDR2, and LCDR3 comprises an amino acid sequence of SEQ ID NOS: 16025, 9494, and 12862, respectively.

[0792] The disclosure describes an antibody, antigen binding fragment, or polypeptide comprising a heavy chain variable region having a HCDR1, HCDR2, and HCDR3, and a light chain variable region having a LCDR1, LCDR2, and LCDR3, wherein the HCDR1, HCDR2, and HCDR3 comprises an amino acid sequence of SEQ ID NOS: 16795, 11520, and 9586, respectively and the LCDR1, LCDR2, and LCDR3 comprises an amino acid sequence of SEQ ID NOS:10900, 18272, and 12992, respectively.

[0793] The disclosure describes an antibody, antigen binding fragment, or polypeptide comprising a heavy chain variable region having a HCDR1, HCDR2, and HCDR3, and a light chain variable region having a LCDR1, LCDR2, and LCDR3, wherein the HCDR1, HCDR2, and HCDR3 comprises an amino acid sequence of SEQ ID NOS:6529, 9698, and 5892, respectively and the LCDR1, LCDR2, and LCDR3 comprises an amino acid sequence of SEQ ID NOS: 15984, 9494, and 12278, respectively.

[0794] The disclosure describes an antibody, antigen binding fragment, or polypeptide comprising a heavy chain variable region having a HCDR1, HCDR2, and HCDR3, and a light chain variable region having a LCDR1, LCDR2, and LCDR3, wherein the HCDR1, HCDR2, and HCDR3 comprises an amino acid sequence of SEQ ID NOS:11673, 10565, and 17223, respectively and the LCDR1, LCDR2, and LCDR3 comprises an amino acid sequence of SEQ ID NOS:9485, 4393, and 12708, respectively.

[0795] The disclosure describes an antibody, antigen binding fragment, or polypeptide comprising a heavy chain variable region having a HCDR1, HCDR2, and HCDR3, and a light chain variable region having a LCDR1, LCDR2, and LCDR3, wherein the HCDR1, HCDR2, and HCDR3 comprises an amino acid sequence of SEQ ID NOS:6507, 9971, and 4599, respectively and the LCDR1, LCDR2, and LCDR3 comprises an amino acid sequence of SEQ ID NOS: 11789, 4420, and 12574, respectively.

[0796] The disclosure describes an antibody, antigen binding fragment, or polypeptide comprising a heavy chain variable region having a HCDR1, HCDR2, and HCDR3, and a light chain variable region having a LCDR1, LCDR2, and LCDR3, wherein the HCDR1, HCDR2, and HCDR3 comprises an amino acid sequence of SEQ ID NOS: 17646, 16262, and 6335, respectively and the LCDR1, LCDR2, and LCDR3 comprises an amino acid sequence of SEQ ID NOS: 15958, 9504, and 12013, respectively.

[0797] The disclosure describes an antibody, antigen binding fragment, or polypeptide comprising a heavy chain variable region having a HCDR1, HCDR2, and HCDR3, and a light chain variable region having a LCDR1, LCDR2, and LCDR3, wherein the HCDR1, HCDR2, and HCDR3 comprises an amino acid sequence of SEQ ID NOS:17855, 16306, and 18111, respectively and the LCDR1, LCDR2, and LCDR3 comprises an amino acid sequence of SEQ ID NOS:16659, 11903, and 11879, respectively.

[0798] The disclosure describes an antibody, antigen binding fragment, or polypeptide comprising a heavy chain variable region having a HCDR1, HCDR2, and HCDR3, and a light chain variable region having a LCDR1, LCDR2, and LCDR3, wherein the HCDR1, HCDR2, and HCDR3 comprises an amino acid sequence of SEQ ID NOS: 17432, 18515, and 4408, respectively and the LCDR1, LCDR2, and LCDR3 comprises an amino acid sequence of SEQ ID NOS:15871, 11794, and 11929, respectively.

[0799] The disclosure describes an antibody, antigen binding fragment, or polypeptide comprising a heavy chain variable region having a HCDR1, HCDR2, and HCDR3, and a light chain variable region having a LCDR1, LCDR2, and LCDR3, wherein the HCDR1, HCDR2, and HCDR3 comprises an amino acid sequence of SEQ ID NOS: 17856, 18560, and 6217, respectively and the LCDR1, LCDR2, and LCDR3 comprises an amino acid sequence of SEQ ID NOS: 15812, 4255, and 12472, respectively.

[0800] The disclosure describes an antibody, antigen binding fragment, or polypeptide comprising a heavy chain variable region having a HCDR1, HCDR2, and HCDR3, and a light chain variable region having a LCDR1, LCDR2, and LCDR3, wherein the HCDR1, HCDR2, and HCDR3 comprises an amino acid sequence of SEQ ID NOS:17474, 9768, and 10135, respectively and the LCDR1, LCDR2, and LCDR3 comprises an amino acid sequence of SEQ ID NOS: 16067, 4425, and 12431, respectively.

[0801] The disclosure describes an antibody, antigen binding fragment, or polypeptide comprising a heavy chain variable region having a HCDR1, HCDR2, and HCDR3, and a light chain variable region having a LCDR1, LCDR2, and LCDR3, wherein the HCDR1, HCDR2, and HCDR3 comprises an amino acid sequence of SEQ ID NOS: 17443, 17748, and 6113, respectively and the LCDR1, LCDR2, and LCDR3 comprises an amino acid sequence of SEQ ID NOS: 17950, 9268, and 11601, respectively.

[0802] The disclosure describes an antibody, antigen binding fragment, or polypeptide comprising a heavy chain variable region having a HCDR1, HCDR2, and HCDR3, and a light chain variable region having a LCDR1, LCDR2, and LCDR3, wherein the HCDR1, HCDR2, and HCDR3 comprises an amino acid sequence of SEQ ID NOS: 17478, 9828, and 9356, respectively and the LCDR1, LCDR2, and LCDR3 comprises an amino acid sequence of SEQ ID NOS:10835, 10983, and 11193, respectively. having a LCDR1, LCDR2, and LCDR3, wherein the HCDR1, HCDR2, and HCDR3 comprises an amino acid sequence of SEQ ID NOS:17263, 9763, and 17682, respectively and the LCDR1, LCDR2, and LCDR3 comprises an amino acid sequence of SEQ ID NOS: 16150, 6308, and 12418, respectively.

[0803] The disclosure describes an antibody, antigen binding fragment, or polypeptide comprising a heavy chain variable region having a HCDR1, HCDR2, and HCDR3, and a light chain variable region having a LCDR1, LCDR2, and LCDR3, wherein the HCDR1, HCDR2, and HCDR3 comprises an amino acid sequence of SEQ ID NOS: 17432, 18531, and 7919, respectively and the LCDR1, LCDR2, and LCDR3 comprises an amino acid sequence of SEQ ID NOS: 16045, 9503, and 12768, respectively.

[0804] The disclosure describes an antibody, antigen binding fragment, or polypeptide comprising a heavy chain variable region having a HCDR1, HCDR2, and HCDR3, and a light chain variable region having a LCDR1, LCDR2, and LCDR3, wherein the HCDR1, HCDR2, and HCDR3 comprises an amino acid sequence of SEQ ID NOS: 17641, 12036, and 4589, respectively and the LCDR1, LCDR2, and LCDR3 comprises an amino acid sequence of SEQ ID NOS:18086, 10590, and 13610, respectively.

[0805] The disclosure describes an antibody, antigen binding fragment, or polypeptide comprising a heavy chain variable region having a HCDR1, HCDR2, and HCDR3, and a light chain variable region having a LCDR1, LCDR2, and LCDR3, wherein the HCDR1, HCDR2, and HCDR3 comprises an amino acid sequence of SEQ ID NOS:17647, 16848, and 10116, respectively and the LCDR1, LCDR2, and LCDR3 comprises an amino acid sequence of SEQ ID NOS:10801, 18275, and 12963, respectively.

[0806] The disclosure describes an antibody, antigen binding fragment, or polypeptide comprising a heavy chain variable region having a HCDR1, HCDR2, and HCDR3, and a light chain variable region having a LCDR1, LCDR2, and LCDR3, wherein the HCDR1, HCDR2, and HCDR3 comprises an amino acid sequence of SEQ ID NOS:16796, 16939, and 11717, respectively and the LCDR1, LCDR2, and LCDR3 comprises an amino acid sequence of SEQ ID NOS: 16067, 4425, and 10709, respectively.

[0807] The disclosure describes an antibody, antigen binding fragment, or polypeptide comprising a heavy chain variable region having a HCDR1, HCDR2, and HCDR3, and a light chain variable region having a LCDR1, LCDR2, and LCDR3, wherein the HCDR1, HCDR2, and HCDR3 comprises an amino acid sequence of SEQ ID NOS:17847, 17740, and 16191, respectively and the LCDR1, LCDR2, and LCDR3 comprises an amino acid sequence of SEQ ID NOS: 15685, 3969, and 12805, respectively.

[0808] The disclosure describes an antibody, antigen binding fragment, or polypeptide comprising a heavy chain variable region having a HCDR1, HCDR2, and HCDR3, and a light chain variable region having a LCDR1, LCDR2, and LCDR3, wherein the HCDR1, HCDR2, and HCDR3 comprises an amino acid sequence of SEQ ID NOS:6507, 16853, and 5448, respectively and the LCDR1, LCDR2, and LCDR3 comprises an amino acid sequence of SEQ ID NOS: 17960, 6722, and 4344, respectively.

[0809] The disclosure describes an antibody, antigen binding fragment, or polypeptide comprising a heavy chain variable region having a HCDR1, HCDR2, and HCDR3, and a light chain variable region having a LCDR1, LCDR2, and LCDR3, wherein the HCDR1, HCDR2, and HCDR3 comprises an amino acid sequence of SEQ ID NOS: 16796, 16939, and 9520, respectively and the LCDR1, LCDR2, and LCDR3 comprises an amino acid sequence of SEQ ID NOS: 16045, 9503, and 12777, respectively.

[0810] The disclosure describes an antibody, antigen binding fragment, or polypeptide comprising a heavy chain variable region having a HCDR1, HCDR2, and HCDR3, and a light chain variable region having a LCDR1, LCDR2, and LCDR3, wherein the HCDR1, HCDR2, and HCDR3 comprises an amino acid sequence of SEQ ID NOS:17648, 16840, and 10995, respectively and the LCDR1, LCDR2, and LCDR3 comprises an amino acid sequence of SEQ ID NOS:10886, 18275, and 12913, respectively.

[0811] The disclosure describes an antibody, antigen binding fragment, or polypeptide comprising a heavy chain variable region having a HCDR1, HCDR2, and HCDR3, and a light chain variable region having a LCDR1, LCDR2, and LCDR3, wherein the HCDR1, HCDR2, and HCDR3 comprises an amino acid sequence of SEQ ID NOS: 10367, 18323, and 4164, respectively and the LCDR1, LCDR2, and LCDR3 comprises an amino acid sequence of SEQ ID NOS:15713, 3982, and 12390, respectively.

[0812] The disclosure describes an antibody, antigen binding fragment, or polypeptide comprising a heavy chain variable region having a HCDR1, HCDR2, and HCDR3, and a light chain variable region having a LCDR1, LCDR2, and LCDR3, wherein the HCDR1, HCDR2, and HCDR3 comprises an amino acid sequence of SEQ ID NOS:17888, 9574, and 6104, respectively and the LCDR1, LCDR2, and LCDR3 comprises an amino acid sequence of SEQ ID NOS: 16056, 9503, and 12772, respectively.

[0813] The disclosure describes an antibody, antigen binding fragment, or polypeptide comprising a heavy chain variable region having a HCDR1, HCDR2, and HCDR3, and a light chain variable region having a LCDR1, LCDR2, and LCDR3, wherein the HCDR1, HCDR2, and HCDR3 comprises an amino acid sequence of SEQ ID NOS:17842, 11487, and 17725, respectively and the LCDR1, LCDR2, and LCDR3 comprises an amino acid sequence of SEQ ID NOS: 15890, 10727, and 12837, respectively.

[0814] The disclosure describes an antibody, antigen binding fragment, or polypeptide comprising a heavy chain variable region having a HCDR1, HCDR2, and HCDR3, and a light chain variable region having a LCDR1, LCDR2, and LCDR3, wherein the HCDR1, HCDR2, and HCDR3 comprises an amino acid sequence of SEQ ID NOS: 17272, 17760, and 6479, respectively and the LCDR1, LCDR2, and LCDR3 comprises an amino acid sequence of SEQ ID NOS: 16736, 5977, and 10279, respectively.

[0815] The disclosure describes an antibody, antigen binding fragment, or polypeptide comprising a heavy chain variable region having a HCDR1, HCDR2, and HCDR3, and a light chain variable region having a LCDR1, LCDR2, and LCDR3, wherein the HCDR1, HCDR2, and HCDR3 comprises an amino acid sequence of SEQ ID NOS: 17208, 18460, and 4439, respectively and the LCDR1, LCDR2, and LCDR3 comprises an amino acid sequence of SEQ ID NOS: 15633, 3977, and 12544, respectively.

[0816] The disclosure describes an antibody, antigen binding fragment, or polypeptide comprising a heavy chain variable region having a HCDR1, HCDR2, and HCDR3, and a light chain variable region having a LCDR1, LCDR2, and LCDR3, wherein the HCDR1, HCDR2, and HCDR3 comprises an amino acid sequence of SEQ ID NOS: 17441, 18360, and 4490, respectively and the LCDR1, LCDR2, and LCDR3 comprises an amino acid sequence of SEQ ID NOS: 16045, 9503, and 12789, respectively.

[0817] The disclosure describes an antibody, antigen binding fragment, or polypeptide comprising a heavy chain variable region having a HCDR1, HCDR2, and HCDR3, and a light chain variable region having a LCDR1, LCDR2, and LCDR3, wherein the HCDR1, HCDR2, and HCDR3 comprises an amino acid sequence of SEQ ID NOS:6500, 9974, and 5966, respectively and the LCDR1, LCDR2, and LCDR3 comprises an amino acid sequence of SEQ ID NOS:17960, 6717, and 4365, respectively.

[0818] The disclosure describes an antibody, antigen binding fragment, or polypeptide comprising a heavy chain variable region having a HCDR1, HCDR2, and HCDR3, and a light chain variable region having a LCDR1, LCDR2, and LCDR3, wherein the HCDR1, HCDR2, and HCDR3 comprises an amino acid sequence of SEQ ID NOS:11623, 9806, and 4187, respectively and the LCDR1, LCDR2, and LCDR3 comprises an amino acid sequence of SEQ ID NOS: 16494, 4428, and 12354, respectively.

[0819] The disclosure describes an antibody, antigen binding fragment, or polypeptide comprising a heavy chain variable region having a HCDR1, HCDR2, and HCDR3, and a light chain variable region having a LCDR1, LCDR2, and LCDR3, wherein the HCDR1, HCDR2, and HCDR3 comprises an amino acid sequence of SEQ ID NOS: 16603, 18578, and 4440, respectively and the LCDR1, LCDR2, and LCDR3 comprises an amino acid sequence of SEQ ID NOS: 15596, 3953, and 12484, respectively.

[0820] The disclosure describes an antibody, antigen binding fragment, or polypeptide comprising a heavy chain variable region having a HCDR1, HCDR2, and HCDR3, and a light chain variable region having a LCDR1, LCDR2, and LCDR3, wherein the HCDR1, HCDR2, and HCDR3 comprises an amino acid sequence of SEQ ID NOS: 17028, 17823, and 9648, respectively and the LCDR1, LCDR2, and LCDR3 comprises an amino acid sequence of SEQ ID NOS: 15713, 3982, and 13005, respectively.

[0821] The disclosure describes an antibody, antigen binding fragment, or polypeptide comprising a heavy chain variable region having a HCDR1, HCDR2, and HCDR3, and a light chain variable region having a LCDR1, LCDR2, and LCDR3, wherein the HCDR1, HCDR2, and HCDR3 comprises an amino acid sequence of SEQ ID NOS:11374, 11471, and 10054, respectively and the LCDR1, LCDR2, and LCDR3 comprises an amino acid sequence of SEQ ID NOS:10869, 18275, and 12965, respectively. having a LCDR1, LCDR2, and LCDR3, wherein the HCDR1, HCDR2, and HCDR3 comprises an amino acid sequence of SEQ ID NOS: 11422, 17771, and 6137, respectively and the LCDR1, LCDR2, and LCDR3 comprises an amino acid sequence of SEQ ID NOS: 16054, 9494, and 10464, respectively.

[0822] The disclosure describes an antibody, antigen binding fragment, or polypeptide comprising a heavy chain variable region having a HCDR1, HCDR2, and HCDR3, and a light chain variable region having a LCDR1, LCDR2, and LCDR3, wherein the HCDR1, HCDR2, and HCDR3 comprises an amino acid sequence of SEQ ID NOS: 17856, 16224, and 6731, respectively and the LCDR1, LCDR2, and LCDR3 comprises an amino acid sequence of SEQ ID NOS: 16045, 9503, and 12758, respectively.

[0823] The disclosure describes an antibody, antigen binding fragment, or polypeptide comprising a heavy chain variable region having a HCDR1, HCDR2, and HCDR3, and a light chain variable region having a LCDR1, LCDR2, and LCDR3, wherein the HCDR1, HCDR2, and HCDR3 comprises an amino acid sequence of SEQ ID NOS:10347, 18333, and 16775, respectively and the LCDR1, LCDR2, and LCDR3 comprises an amino acid sequence of SEQ ID NOS: 16045, 9503, and 12780, respectively.

[0824] The disclosure describes an antibody, antigen binding fragment, or polypeptide comprising a heavy chain variable region having a HCDR1, HCDR2, and HCDR3, and a light chain variable region having a LCDR1, LCDR2, and LCDR3, wherein the HCDR1, HCDR2, and HCDR3 comprises an amino acid sequence of SEQ ID NOS: 17443, 9388, and 5922, respectively and the LCDR1, LCDR2, and LCDR3 comprises an amino acid sequence of SEQ ID NOS:10059, 17222, and 18118, respectively.

[0825] The disclosure describes an antibody, antigen binding fragment, or polypeptide comprising a heavy chain variable region having a HCDR1, HCDR2, and HCDR3, and a light chain variable region having a LCDR1, LCDR2, and LCDR3, wherein the HCDR1, HCDR2, and HCDR3 comprises an amino acid sequence of SEQ ID NOS: 17432, 18498, and 4627, respectively and the LCDR1, LCDR2, and LCDR3 comprises an amino acid sequence of SEQ ID NOS:15890, 10727, and 12820, respectively.

[0826] The disclosure describes an antibody, antigen binding fragment, or polypeptide comprising a heavy chain variable region having a HCDR1, HCDR2, and HCDR3, and a light chain variable region having a LCDR1, LCDR2, and LCDR3, wherein the HCDR1, HCDR2, and HCDR3 comprises an amino acid sequence of SEQ ID NOS:9542, 16220, and 4616, respectively and the LCDR1, LCDR2, and LCDR3 comprises an amino acid sequence of SEQ ID NOS:16642, 10756, and 13336, respectively.

[0827] The disclosure describes an antibody, antigen binding fragment, or polypeptide comprising a heavy chain variable region having a HCDR1, HCDR2, and HCDR3, and a light chain variable region having a LCDR1, LCDR2, and LCDR3, wherein the HCDR1, HCDR2, and HCDR3 comprises an amino acid sequence of SEQ ID NOS:6530, 9918, and 6620, respectively and the LCDR1, LCDR2, and LCDR3 comprises an amino acid sequence of SEQ ID NOS:4056, 10094, and 13590, respectively.

[0828] The disclosure describes an antibody, antigen binding fragment, or polypeptide comprising a heavy chain variable region having a HCDR1, HCDR2, and HCDR3, and a light chain variable region having a LCDR1, LCDR2, and LCDR3, wherein the HCDR1, HCDR2, and HCDR3 comprises an amino acid sequence of SEQ ID NOS:6507, 9966, and 5442, respectively and the LCDR1, LCDR2, and LCDR3 comprises an amino acid sequence of SEQ ID NOS:17945, 6717, and 4362, respectively.

[0829] The disclosure describes an antibody, antigen binding fragment, or polypeptide comprising a heavy chain variable region having a HCDR1, HCDR2, and HCDR3, and a light chain variable region having a LCDR1, LCDR2, and LCDR3, wherein the HCDR1, HCDR2, and HCDR3 comprises an amino acid sequence of SEQ ID NOS: 10531, 18506, and 9538, respectively and the LCDR1, LCDR2, and LCDR3 comprises an amino acid sequence of SEQ ID NOS: 16114, 6607, and 12833, respectively.

[0830] The disclosure describes an antibody, antigen binding fragment, or polypeptide comprising a heavy chain variable region having a HCDR1, HCDR2, and HCDR3, and a light chain variable region having a LCDR1, LCDR2, and LCDR3, wherein the HCDR1, HCDR2, and HCDR3 comprises an amino acid sequence of SEQ ID NOS: 17441, 18360, and 9338, respectively and the LCDR1, LCDR2, and LCDR3 comprises an amino acid sequence of SEQ ID NOS: 16045, 9503, and 12787, respectively.

[0831] The disclosure describes an antibody, antigen binding fragment, or polypeptide comprising a heavy chain variable region having a HCDR1, HCDR2, and HCDR3, and a light chain variable region having a LCDR1, LCDR2, and LCDR3, wherein the HCDR1, HCDR2, and HCDR3 comprises an amino acid sequence of SEQ ID NOS: 16791, 11427, and 6642, respectively and the LCDR1, LCDR2, and LCDR3 comprises an amino acid sequence of SEQ ID NOS: 15680, 3969, and 12337, respectively.

[0832] The disclosure describes an antibody, antigen binding fragment, or polypeptide comprising a heavy chain variable region having a HCDR1, HCDR2, and HCDR3, and a light chain variable region having a LCDR1, LCDR2, and LCDR3, wherein the HCDR1, HCDR2, and HCDR3 comprises an amino acid sequence of SEQ ID NOS: 17441, 18360, and 5999, respectively and the LCDR1, LCDR2, and LCDR3 comprises an amino acid sequence of SEQ ID NOS: 16752, 17007, and 4003, respectively.

[0833] The disclosure describes an antibody, antigen binding fragment, or polypeptide comprising a heavy chain variable region having a HCDR1, HCDR2, and HCDR3, and a light chain variable region having a LCDR1, LCDR2, and LCDR3, wherein the HCDR1, HCDR2, and HCDR3 comprises an amino acid sequence of SEQ ID NOS:6528, 9380, and 6018, respectively and the LCDR1, LCDR2, and LCDR3 comprises an amino acid sequence of SEQ ID NOS: 15985, 9480, and 12460, respectively.

[0834] The disclosure describes an antibody, antigen binding fragment, or polypeptide comprising a heavy chain variable region having a HCDR1, HCDR2, and HCDR3, and a light chain variable region having a LCDR1, LCDR2, and LCDR3, wherein the HCDR1, HCDR2, and HCDR3 comprises an amino acid sequence of SEQ ID NOS: 16597, 4172, and 6730, respectively and the LCDR1, LCDR2, and LCDR3 comprises an amino acid sequence of SEQ ID NOS:15851, 3969, and 12801, respectively.

[0835] The disclosure describes an antibody, antigen binding fragment, or polypeptide comprising a heavy chain variable region having a HCDR1, HCDR2, and HCDR3, and a light chain variable region having a LCDR1, LCDR2, and LCDR3, wherein the HCDR1, HCDR2, and HCDR3 comprises an amino acid sequence of SEQ ID NOS:7820, 9562, and 10238, respectively and the LCDR1, LCDR2, and LCDR3 comprises an amino acid sequence of SEQ ID NOS: 16061, 9494, and 12673, respectively.

[0836] The disclosure describes an antibody, antigen binding fragment, or polypeptide comprising a heavy chain variable region having a HCDR1, HCDR2, and HCDR3, and a light chain variable region having a LCDR1, LCDR2, and LCDR3, wherein the HCDR1, HCDR2, and HCDR3 comprises an amino acid sequence of SEQ ID NOS: 16522, 18522, and 9849, respectively and the LCDR1, LCDR2, and LCDR3 comprises an amino acid sequence of SEQ ID NOS:11946, 10029, and 11594, respectively.

[0837] The disclosure describes an antibody, antigen binding fragment, or polypeptide comprising a heavy chain variable region having a HCDR1, HCDR2, and HCDR3, and a light chain variable region having a LCDR1, LCDR2, and LCDR3, wherein the HCDR1, HCDR2, and HCDR3 comprises an amino acid sequence of SEQ ID NOS: 10368, 6782, and 4300, respectively and the LCDR1, LCDR2, and LCDR3 comprises an amino acid sequence of SEQ ID NOS: 16045, 9503, and 12795, respectively.

[0838] The disclosure describes an antibody, antigen binding fragment, or polypeptide comprising a heavy chain variable region having a HCDR1, HCDR2, and HCDR3, and a light chain variable region having a LCDR1, LCDR2, and LCDR3, wherein the HCDR1, HCDR2, and HCDR3 comprises an amino acid sequence of SEQ ID NOS:6530, 9919, and 6038, respectively and the LCDR1, LCDR2, and LCDR3 comprises an amino acid sequence of SEQ ID NOS: 15914, 4425, and 12426, respectively.

[0839] The disclosure describes an antibody, antigen binding fragment, or polypeptide comprising a heavy chain variable region having a HCDR1, HCDR2, and HCDR3, and a light chain variable region having a LCDR1, LCDR2, and LCDR3, wherein the HCDR1, HCDR2, and HCDR3 comprises an amino acid sequence of SEQ ID NOS:16610, 9775, and 6170, respectively and the LCDR1, LCDR2, and LCDR3 comprises an amino acid sequence of SEQ ID NOS: 16045, 9503, and 12584, respectively.

[0840] The disclosure describes an antibody, antigen binding fragment, or polypeptide comprising a heavy chain variable region having a HCDR1, HCDR2, and HCDR3, and a light chain variable region having a LCDR1, LCDR2, and LCDR3, wherein the HCDR1, HCDR2, and HCDR3 comprises an amino acid sequence of SEQ ID NOS: 17474, 16231, and 6008, respectively and the LCDR1, LCDR2, and LCDR3 comprises an amino acid sequence of SEQ ID NOS:17924, 10094, and 13583, respectively. having a LCDR1, LCDR2, and LCDR3, wherein the HCDR1, HCDR2, and HCDR3 comprises an amino acid sequence of SEQ ID NOS:17263, 9804, and 9621, respectively and the LCDR1, LCDR2, and LCDR3 comprises an amino acid sequence of SEQ ID NOS: 16125, 4432, and 12697, respectively.

[0841] The disclosure describes an antibody, antigen binding fragment, or polypeptide comprising a heavy chain variable region having a HCDR1, HCDR2, and HCDR3, and a light chain variable region having a LCDR1, LCDR2, and LCDR3, wherein the HCDR1, HCDR2, and HCDR3 comprises an amino acid sequence of SEQ ID NOS: 17274, 4136, and 4023, respectively and the LCDR1, LCDR2, and LCDR3 comprises an amino acid sequence of SEQ ID NOS:17905, 16330, and 16564, respectively.

[0842] The disclosure describes an antibody, antigen binding fragment, or polypeptide comprising a heavy chain variable region having a HCDR1, HCDR2, and HCDR3, and a light chain variable region having a LCDR1, LCDR2, and LCDR3, wherein the HCDR1, HCDR2, and HCDR3 comprises an amino acid sequence of SEQ ID NOS:18252, 9368, and 11713, respectively and the LCDR1, LCDR2, and LCDR3 comprises an amino acid sequence of SEQ ID NOS:10868, 18275, and 12912, respectively.

[0843] The disclosure describes an antibody, antigen binding fragment, or polypeptide comprising a heavy chain variable region having a HCDR1, HCDR2, and HCDR3, and a light chain variable region having a LCDR1, LCDR2, and LCDR3, wherein the HCDR1, HCDR2, and HCDR3 comprises an amino acid sequence of SEQ ID NOS:17463, 9737, and 9618, respectively and the LCDR1, LCDR2, and LCDR3 comprises an amino acid sequence of SEQ ID NOS: 16061, 9494, and 12679, respectively.

[0844] The disclosure describes an antibody, antigen binding fragment, or polypeptide comprising a heavy chain variable region having a HCDR1, HCDR2, and HCDR3, and a light chain variable region having a LCDR1, LCDR2, and LCDR3, wherein the HCDR1, HCDR2, and HCDR3 comprises an amino acid sequence of SEQ ID NOS:6520, 18413, and 10142, respectively and the LCDR1, LCDR2, and LCDR3 comprises an amino acid sequence of SEQ ID NOS: 17959, 9277, and 17109, respectively.

[0845] The disclosure describes an antibody, antigen binding fragment, or polypeptide comprising a heavy chain variable region having a HCDR1, HCDR2, and HCDR3, and a light chain variable region having a LCDR1, LCDR2, and LCDR3, wherein the HCDR1, HCDR2, and HCDR3 comprises an amino acid sequence of SEQ ID NOS:9676, 10552, and 4407, respectively and the LCDR1, LCDR2, and LCDR3 comprises an amino acid sequence of SEQ ID NOS: 17951, 10311, and 4335, respectively.

[0846] The disclosure describes an antibody, antigen binding fragment, or polypeptide comprising a heavy chain variable region having a HCDR1, HCDR2, and HCDR3, and a light chain variable region having a LCDR1, LCDR2, and LCDR3, wherein the HCDR1, HCDR2, and HCDR3 comprises an amino acid sequence of SEQ ID NOS: 17838, 16293, and 4313, respectively and the LCDR1, LCDR2, and LCDR3 comprises an amino acid sequence of SEQ ID NOS:17959, 9268, and 17181, respectively.

[0847] The disclosure describes an antibody, antigen binding fragment, or polypeptide comprising a heavy chain variable region having a HCDR1, HCDR2, and HCDR3, and a light chain variable region having a LCDR1, LCDR2, and LCDR3, wherein the HCDR1, HCDR2, and HCDR3 comprises an amino acid sequence of SEQ ID NOS:6521, 9914, and 18250, respectively and the LCDR1, LCDR2, and LCDR3 comprises an amino acid sequence of SEQ ID NOS: 16061, 4432, and 12677, respectively.

[0848] The disclosure describes an antibody, antigen binding fragment, or polypeptide comprising a heavy chain variable region having a HCDR1, HCDR2, and HCDR3, and a light chain variable region having a LCDR1, LCDR2, and LCDR3, wherein the HCDR1, HCDR2, and HCDR3 comprises an amino acid sequence of SEQ ID NOS:16800, 9989, and 10159, respectively and the LCDR1, LCDR2, and LCDR3 comprises an amino acid sequence of SEQ ID NOS:15931, 7929, and 12462, respectively.

[0849] The disclosure describes an antibody, antigen binding fragment, or polypeptide comprising a heavy chain variable region having a HCDR1, HCDR2, and HCDR3, and a light chain variable region having a LCDR1, LCDR2, and LCDR3, wherein the HCDR1, HCDR2, and HCDR3 comprises an amino acid sequence of SEQ ID NOS:16177, 10251, and 9581, respectively and the LCDR1, LCDR2, and LCDR3 comprises an amino acid sequence of SEQ ID NOS: 16089, 4431, and 12625, respectively.

[0850] The disclosure describes an antibody, antigen binding fragment, or polypeptide comprising a heavy chain variable region having a HCDR1, HCDR2, and HCDR3, and a light chain variable region having a LCDR1, LCDR2, and LCDR3, wherein the HCDR1, HCDR2, and HCDR3 comprises an amino acid sequence of SEQ ID NOS: 17456, 18546, and 4468, respectively and the LCDR1, LCDR2, and LCDR3 comprises an amino acid sequence of SEQ ID NOS:9632, 16163, and 15566, respectively.

[0851] The disclosure describes an antibody, antigen binding fragment, or polypeptide comprising a heavy chain variable region having a HCDR1, HCDR2, and HCDR3, and a light chain variable region having a LCDR1, LCDR2, and LCDR3, wherein the HCDR1, HCDR2, and HCDR3 comprises an amino acid sequence of SEQ ID NOS:16702, 18576, and 17133, respectively and the LCDR1, LCDR2, and LCDR3 comprises an amino acid sequence of SEQ ID NOS:16659, 6628, and 11878, respectively.

[0852] The disclosure describes an antibody, antigen binding fragment, or polypeptide comprising a heavy chain variable region having a HCDR1, HCDR2, and HCDR3, and a light chain variable region having a LCDR1, LCDR2, and LCDR3, wherein the HCDR1, HCDR2, and HCDR3 comprises an amino acid sequence of SEQ ID NOS: 17006, 10670, and 4243, respectively and the LCDR1, LCDR2, and LCDR3 comprises an amino acid sequence of SEQ ID NOS: 16037, 4432, and 12667, respectively.

[0853] The disclosure describes an antibody, antigen binding fragment, or polypeptide comprising a heavy chain variable region having a HCDR1, HCDR2, and HCDR3, and a light chain variable region having a LCDR1, LCDR2, and LCDR3, wherein the HCDR1, HCDR2, and HCDR3 comprises an amino acid sequence of SEQ ID NOS:17612, 18019, and 16523, respectively and the LCDR1, LCDR2, and LCDR3 comprises an amino acid sequence of SEQ ID NOS:18093, 17719, and 9446, respectively.

[0854] The disclosure describes an antibody, antigen binding fragment, or polypeptide comprising a heavy chain variable region having a HCDR1, HCDR2, and HCDR3, and a light chain variable region having a LCDR1, LCDR2, and LCDR3, wherein the HCDR1, HCDR2, and HCDR3 comprises an amino acid sequence of SEQ ID NOS:6564, 11466, and 11149, respectively and the LCDR1, LCDR2, and LCDR3 comprises an amino acid sequence of SEQ ID NOS:18069, 18629, and 11178, respectively.

[0855] The disclosure describes an antibody, antigen binding fragment, or polypeptide comprising a heavy chain variable region having a HCDR1, HCDR2, and HCDR3, and a light chain variable region having a LCDR1, LCDR2, and LCDR3, wherein the HCDR1, HCDR2, and HCDR3 comprises an amino acid sequence of SEQ ID NOS:6507, 11015, and 6165, respectively and the LCDR1, LCDR2, and LCDR3 comprises an amino acid sequence of SEQ ID NOS:16661, 11903, and 13609, respectively.

[0856] The disclosure describes an antibody, antigen binding fragment, or polypeptide comprising a heavy chain variable region having a HCDR1, HCDR2, and HCDR3, and a light chain variable region having a LCDR1, LCDR2, and LCDR3, wherein the HCDR1, HCDR2, and HCDR3 comprises an amino acid sequence of SEQ ID NOS:17216, 10579, and 10672, respectively and the LCDR1, LCDR2, and LCDR3 comprises an amino acid sequence of SEQ ID NOS: 17918, 6235, and 4355, respectively.

[0857] The disclosure describes an antibody, antigen binding fragment, or polypeptide comprising a heavy chain variable region having a HCDR1, HCDR2, and HCDR3, and a light chain variable region having a LCDR1, LCDR2, and LCDR3, wherein the HCDR1, HCDR2, and HCDR3 comprises an amino acid sequence of SEQ ID NOS:16817, 10574, and 16472, respectively and the LCDR1, LCDR2, and LCDR3 comprises an amino acid sequence of SEQ ID NOS:15967, 4425, and 12591, respectively.

[0858] The disclosure describes an antibody, antigen binding fragment, or polypeptide comprising a heavy chain variable region having a HCDR1, HCDR2, and HCDR3, and a light chain variable region having a LCDR1, LCDR2, and LCDR3, wherein the HCDR1, HCDR2, and HCDR3 comprises an amino acid sequence of SEQ ID NOS:17113, 9822, and 6067, respectively and the LCDR1, LCDR2, and LCDR3 comprises an amino acid sequence of SEQ ID NOS: 10826, 9272, and 11237, respectively.

[0859] The disclosure describes an antibody, antigen binding fragment, or polypeptide comprising a heavy chain variable region having a HCDR1, HCDR2, and HCDR3, and a light chain variable region having a LCDR1, LCDR2, and LCDR3, wherein the HCDR1, HCDR2, and HCDR3 comprises an amino acid sequence of SEQ ID NOS:11678, 11463, and 11150, respectively and the LCDR1, LCDR2, and LCDR3 comprises an amino acid sequence of SEQ ID NOS:18066, 18629, and 11175, respectively. having a LCDR1, LCDR2, and LCDR3, wherein the HCDR1, HCDR2, and HCDR3 comprises an amino acid sequence of SEQ ID NOS: 17270, 17778, and 6029, respectively and the LCDR1, LCDR2, and LCDR3 comprises an amino acid sequence of SEQ ID NOS: 16124, 4432, and 12697, respectively.

[0860] The disclosure describes an antibody, antigen binding fragment, or polypeptide comprising a heavy chain variable region having a HCDR1, HCDR2, and HCDR3, and a light chain variable region having a LCDR1, LCDR2, and LCDR3, wherein the HCDR1, HCDR2, and HCDR3 comprises an amino acid sequence of SEQ ID NOS: 17279, 9947, and 4334, respectively and the LCDR1, LCDR2, and LCDR3 comprises an amino acid sequence of SEQ ID NOS: 16124, 4432, and 12697, respectively.

[0861] The disclosure describes an antibody, antigen binding fragment, or polypeptide comprising a heavy chain variable region having a HCDR1, HCDR2, and HCDR3, and a light chain variable region having a LCDR1, LCDR2, and LCDR3, wherein the HCDR1, HCDR2, and HCDR3 comprises an amino acid sequence of SEQ ID NOS: 16528, 10407, and 5904, respectively and the LCDR1, LCDR2, and LCDR3 comprises an amino acid sequence of SEQ ID NOS:15860, 10224, and 12775, respectively.

[0862] The disclosure describes an antibody, antigen binding fragment, or polypeptide comprising a heavy chain variable region having a HCDR1, HCDR2, and HCDR3, and a light chain variable region having a LCDR1, LCDR2, and LCDR3, wherein the HCDR1, HCDR2, and HCDR3 comprises an amino acid sequence of SEQ ID NOS:16990, 9839, and 17551, respectively and the LCDR1, LCDR2, and LCDR3 comprises an amino acid sequence of SEQ ID NOS: 16049, 6214, and 11995, respectively.

[0863] The disclosure describes an antibody, antigen binding fragment, or polypeptide comprising a heavy chain variable region having a HCDR1, HCDR2, and HCDR3, and a light chain variable region having a LCDR1, LCDR2, and LCDR3, wherein the HCDR1, HCDR2, and HCDR3 comprises an amino acid sequence of SEQ ID NOS: 11424, 11509, and 6625, respectively and the LCDR1, LCDR2, and LCDR3 comprises an amino acid sequence of SEQ ID NOS:17907, 10093, and 17235, respectively.

[0864] The disclosure describes an antibody, antigen binding fragment, or polypeptide comprising a heavy chain variable region having a HCDR1, HCDR2, and HCDR3, and a light chain variable region having a LCDR1, LCDR2, and LCDR3, wherein the HCDR1, HCDR2, and HCDR3 comprises an amino acid sequence of SEQ ID NOS: 11597, 18011, and 6702, respectively and the LCDR1, LCDR2, and LCDR3 comprises an amino acid sequence of SEQ ID NOS: 15861, 6615, and 12838, respectively.

[0865] The disclosure describes an antibody, antigen binding fragment, or polypeptide comprising a heavy chain variable region having a HCDR1, HCDR2, and HCDR3, and a light chain variable region having a LCDR1, LCDR2, and LCDR3, wherein the HCDR1, HCDR2, and HCDR3 comprises an amino acid sequence of SEQ ID NOS: 17474, 9888, and 9533, respectively and the LCDR1, LCDR2, and LCDR3 comprises an amino acid sequence of SEQ ID NOS: 10827, 9272, and 11235, respectively.

[0866] The disclosure describes an antibody, antigen binding fragment, or polypeptide comprising a heavy chain variable region having a HCDR1, HCDR2, and HCDR3, and a light chain variable region having a LCDR1, LCDR2, and LCDR3, wherein the HCDR1, HCDR2, and HCDR3 comprises an amino acid sequence of SEQ ID NOS:9686, 18327, and 6052, respectively and the LCDR1, LCDR2, and LCDR3 comprises an amino acid sequence of SEQ ID NOS: 15964, 9499, and 12775, respectively.

[0867] The disclosure describes an antibody, antigen binding fragment, or polypeptide comprising a heavy chain variable region having a HCDR1, HCDR2, and HCDR3, and a light chain variable region having a LCDR1, LCDR2, and LCDR3, wherein the HCDR1, HCDR2, and HCDR3 comprises an amino acid sequence of SEQ ID NOS:17131, 17256, and 16812, respectively and the LCDR1, LCDR2, and LCDR3 comprises an amino acid sequence of SEQ ID NOS:10901, 18275, and 12032, respectively.

[0868] The disclosure describes an antibody, antigen binding fragment, or polypeptide comprising a heavy chain variable region having a HCDR1, HCDR2, and HCDR3, and a light chain variable region having a LCDR1, LCDR2, and LCDR3, wherein the HCDR1, HCDR2, and HCDR3 comprises an amino acid sequence of SEQ ID NOS: 17896, 11434, and 9687, respectively and the LCDR1, LCDR2, and LCDR3 comprises an amino acid sequence of SEQ ID NOS:11775, 4441, and 11987, respectively.

[0869] The disclosure describes an antibody, antigen binding fragment, or polypeptide comprising a heavy chain variable region having a HCDR1, HCDR2, and HCDR3, and a light chain variable region having a LCDR1, LCDR2, and LCDR3, wherein the HCDR1, HCDR2, and HCDR3 comprises an amino acid sequence of SEQ ID NOS: 16519, 4138, and 5906, respectively and the LCDR1, LCDR2, and LCDR3 comprises an amino acid sequence of SEQ ID NOS:15887, 10225, and 12775, respectively.

[0870] The disclosure describes an antibody, antigen binding fragment, or polypeptide comprising a heavy chain variable region having a HCDR1, HCDR2, and HCDR3, and a light chain variable region having a LCDR1, LCDR2, and LCDR3, wherein the HCDR1, HCDR2, and HCDR3 comprises an amino acid sequence of SEQ ID NOS:3948, 10389, and 17897, respectively and the LCDR1, LCDR2, and LCDR3 comprises an amino acid sequence of SEQ ID NOS:15806, 11791, and 12729, respectively.

[0871] The disclosure describes an antibody, antigen binding fragment, or polypeptide comprising a heavy chain variable region having a HCDR1, HCDR2, and HCDR3, and a light chain variable region having a LCDR1, LCDR2, and LCDR3, wherein the HCDR1, HCDR2, and HCDR3 comprises an amino acid sequence of SEQ ID NOS:16864, 16944, and 17658, respectively and the LCDR1, LCDR2, and LCDR3 comprises an amino acid sequence of SEQ ID NOS: 15796, 13595, and 10998, respectively.

[0872] The disclosure describes an antibody, antigen binding fragment, or polypeptide comprising a heavy chain variable region having a HCDR1, HCDR2, and HCDR3, and a light chain variable region having a LCDR1, LCDR2, and LCDR3, wherein the HCDR1, HCDR2, and HCDR3 comprises an amino acid sequence of SEQ ID NOS: 17449, 18385, and 6467, respectively and the LCDR1, LCDR2, and LCDR3 comprises an amino acid sequence of SEQ ID NOS:9632, 16154, and 10506, respectively.

[0873] The disclosure describes an antibody, antigen binding fragment, or polypeptide comprising a heavy chain variable region having a HCDR1, HCDR2, and HCDR3, and a light chain variable region having a LCDR1, LCDR2, and LCDR3, wherein the HCDR1, HCDR2, and HCDR3 comprises an amino acid sequence of SEQ ID NOS: 17455, 18535, and 5948, respectively and the LCDR1, LCDR2, and LCDR3 comprises an amino acid sequence of SEQ ID NOS: 16699, 10773, and 4010, respectively.

[0874] The disclosure describes an antibody, antigen binding fragment, or polypeptide comprising a heavy chain variable region having a HCDR1, HCDR2, and HCDR3, and a light chain variable region having a LCDR1, LCDR2, and LCDR3, wherein the HCDR1, HCDR2, and HCDR3 comprises an amino acid sequence of SEQ ID NOS:16799, 9730, and 9611, respectively and the LCDR1, LCDR2, and LCDR3 comprises an amino acid sequence of SEQ ID NOS: 15989, 9503, and 12767, respectively.

[0875] The disclosure describes an antibody, antigen binding fragment, or polypeptide comprising a heavy chain variable region having a HCDR1, HCDR2, and HCDR3, and a light chain variable region having a LCDR1, LCDR2, and LCDR3, wherein the HCDR1, HCDR2, and HCDR3 comprises an amino acid sequence of SEQ ID NOS:10071, 9940, and 4206, respectively and the LCDR1, LCDR2, and LCDR3 comprises an amino acid sequence of SEQ ID NOS:16403, 10961, and 11205, respectively.

[0876] The disclosure describes an antibody, antigen binding fragment, or polypeptide comprising a heavy chain variable region having a HCDR1, HCDR2, and HCDR3, and a light chain variable region having a LCDR1, LCDR2, and LCDR3, wherein the HCDR1, HCDR2, and HCDR3 comprises an amino acid sequence of SEQ ID NOS: 17623, 18490, and 5954, respectively and the LCDR1, LCDR2, and LCDR3 comprises an amino acid sequence of SEQ ID NOS:18046, 16958, and 11188, respectively.

[0877] The disclosure describes an antibody, antigen binding fragment, or polypeptide comprising a heavy chain variable region having a HCDR1, HCDR2, and HCDR3, and a light chain variable region having a LCDR1, LCDR2, and LCDR3, wherein the HCDR1, HCDR2, and HCDR3 comprises an amino acid sequence of SEQ ID NOS: 10685, 18389, and 4680, respectively and the LCDR1, LCDR2, and LCDR3 comprises an amino acid sequence of SEQ ID NOS: 16728, 7863, and 10281, respectively.

[0878] The disclosure describes an antibody, antigen binding fragment, or polypeptide comprising a heavy chain variable region having a HCDR1, HCDR2, and HCDR3, and a light chain variable region having a LCDR1, LCDR2, and LCDR3, wherein the HCDR1, HCDR2, and HCDR3 comprises an amino acid sequence of SEQ ID NOS:6184, 4666, and 6059, respectively and the LCDR1, LCDR2, and LCDR3 comprises an amino acid sequence of SEQ ID NOS: 15606, 6214, and 12590, respectively. having a LCDR1, LCDR2, and LCDR3, wherein the HCDR1, HCDR2, and HCDR3 comprises an amino acid sequence of SEQ ID NOS: 11597, 18010, and 6701, respectively and the LCDR1, LCDR2, and LCDR3 comprises an amino acid sequence of SEQ ID NOS: 15861, 6615, and 12737, respectively.

[0879] The disclosure describes an antibody, antigen binding fragment, or polypeptide comprising a heavy chain variable region having a HCDR1, HCDR2, and HCDR3, and a light chain variable region having a LCDR1, LCDR2, and LCDR3, wherein the HCDR1, HCDR2, and HCDR3 comprises an amino acid sequence of SEQ ID NOS:6502, 9965, and 4029, respectively and the LCDR1, LCDR2, and LCDR3 comprises an amino acid sequence of SEQ ID NOS: 15786, 9503, and 12791, respectively.

[0880] The disclosure describes an antibody, antigen binding fragment, or polypeptide comprising a heavy chain variable region having a HCDR1, HCDR2, and HCDR3, and a light chain variable region having a LCDR1, LCDR2, and LCDR3, wherein the HCDR1, HCDR2, and HCDR3 comprises an amino acid sequence of SEQ ID NOS: 17028, 17823, and 6688, respectively and the LCDR1, LCDR2, and LCDR3 comprises an amino acid sequence of SEQ ID NOS:17924, 10094, and 13581, respectively.

[0881] The disclosure describes an antibody, antigen binding fragment, or polypeptide comprising a heavy chain variable region having a HCDR1, HCDR2, and HCDR3, and a light chain variable region having a LCDR1, LCDR2, and LCDR3, wherein the HCDR1, HCDR2, and HCDR3 comprises an amino acid sequence of SEQ ID NOS:17149, 16276, and 17899, respectively and the LCDR1, LCDR2, and LCDR3 comprises an amino acid sequence of SEQ ID NOS: 17950, 8079, and 17575, respectively.

[0882] The disclosure describes an antibody, antigen binding fragment, or polypeptide comprising a heavy chain variable region having a HCDR1, HCDR2, and HCDR3, and a light chain variable region having a LCDR1, LCDR2, and LCDR3, wherein the HCDR1, HCDR2, and HCDR3 comprises an amino acid sequence of SEQ ID NOS: 17006, 10669, and 4236, respectively and the LCDR1, LCDR2, and LCDR3 comprises an amino acid sequence of SEQ ID NOS: 16111, 4436, and 12667, respectively.

[0883] The disclosure describes an antibody, antigen binding fragment, or polypeptide comprising a heavy chain variable region having a HCDR1, HCDR2, and HCDR3, and a light chain variable region having a LCDR1, LCDR2, and LCDR3, wherein the HCDR1, HCDR2, and HCDR3 comprises an amino acid sequence of SEQ ID NOS:11653, 9888, and 18133, respectively and the LCDR1, LCDR2, and LCDR3 comprises an amino acid sequence of SEQ ID NOS:15695, 10737, and 12603, respectively.

[0884] The disclosure describes an antibody, antigen binding fragment, or polypeptide comprising a heavy chain variable region having a HCDR1, HCDR2, and HCDR3, and a light chain variable region having a LCDR1, LCDR2, and LCDR3, wherein the HCDR1, HCDR2, and HCDR3 comprises an amino acid sequence of SEQ ID NOS: 10684, 18401, and 5974, respectively and the LCDR1, LCDR2, and LCDR3 comprises an amino acid sequence of SEQ ID NOS: 16732, 5977, and 7954, respectively.

[0885] The disclosure describes an antibody, antigen binding fragment, or polypeptide comprising a heavy chain variable region having a HCDR1, HCDR2, and HCDR3, and a light chain variable region having a LCDR1, LCDR2, and LCDR3, wherein the HCDR1, HCDR2, and HCDR3 comprises an amino acid sequence of SEQ ID NOS:16571, 10312, and 10182, respectively and the LCDR1, LCDR2, and LCDR3 comprises an amino acid sequence of SEQ ID NOS:16061, 4432, and 12715, respectively.

[0886] The disclosure describes an antibody, antigen binding fragment, or polypeptide comprising a heavy chain variable region having a HCDR1, HCDR2, and HCDR3, and a light chain variable region having a LCDR1, LCDR2, and LCDR3, wherein the HCDR1, HCDR2, and HCDR3 comprises an amino acid sequence of SEQ ID NOS:9593, 5449, and 11119, respectively and the LCDR1, LCDR2, and LCDR3 comprises an amino acid sequence of SEQ ID NOS:16418, 10926, and 11192, respectively.

[0887] The disclosure describes an antibody, antigen binding fragment, or polypeptide comprising a heavy chain variable region having a HCDR1, HCDR2, and HCDR3, and a light chain variable region having a LCDR1, LCDR2, and LCDR3, wherein the HCDR1, HCDR2, and HCDR3 comprises an amino acid sequence of SEQ ID NOS: 11155, 18461, and 9348, respectively and the LCDR1, LCDR2, and LCDR3 comprises an amino acid sequence of SEQ ID NOS:17959, 9277, and 4384, respectively.

[0888] The disclosure describes an antibody, antigen binding fragment, or polypeptide comprising a heavy chain variable region having a HCDR1, HCDR2, and HCDR3, and a light chain variable region having a LCDR1, LCDR2, and LCDR3, wherein the HCDR1, HCDR2, and HCDR3 comprises an amino acid sequence of SEQ ID NOS: 10368, 6782, and 6551, respectively and the LCDR1, LCDR2, and LCDR3 comprises an amino acid sequence of SEQ ID NOS:16659, 11900, and 11884, respectively.

[0889] The disclosure describes an antibody, antigen binding fragment, or polypeptide comprising a heavy chain variable region having a HCDR1, HCDR2, and HCDR3, and a light chain variable region having a LCDR1, LCDR2, and LCDR3, wherein the HCDR1, HCDR2, and HCDR3 comprises an amino acid sequence of SEQ ID NOS:6548, 18463, and 9348, respectively and the LCDR1, LCDR2, and LCDR3 comprises an amino acid sequence of SEQ ID NOS: 17985, 9277, and 4384, respectively.

[0890] The disclosure describes an antibody, antigen binding fragment, or polypeptide comprising a heavy chain variable region having a HCDR1, HCDR2, and HCDR3, and a light chain variable region having a LCDR1, LCDR2, and LCDR3, wherein the HCDR1, HCDR2, and HCDR3 comprises an amino acid sequence of SEQ ID NOS:17441, 9778, and 6234, respectively and the LCDR1, LCDR2, and LCDR3 comprises an amino acid sequence of SEQ ID NOS: 15715, 3969, and 11089, respectively.

[0891] The disclosure describes an antibody, antigen binding fragment, or polypeptide comprising a heavy chain variable region having a HCDR1, HCDR2, and HCDR3, and a light chain variable region having a LCDR1, LCDR2, and LCDR3, wherein the HCDR1, HCDR2, and HCDR3 comprises an amino acid sequence of SEQ ID NOS:16618, 9910, and 18218, respectively and the LCDR1, LCDR2, and LCDR3 comprises an amino acid sequence of SEQ ID NOS:15884, 10742, and 12602, respectively.

[0892] The disclosure describes an antibody, antigen binding fragment, or polypeptide comprising a heavy chain variable region having a HCDR1, HCDR2, and HCDR3, and a light chain variable region having a LCDR1, LCDR2, and LCDR3, wherein the HCDR1, HCDR2, and HCDR3 comprises an amino acid sequence of SEQ ID NOS:11633, 17252, and 17066, respectively and the LCDR1, LCDR2, and LCDR3 comprises an amino acid sequence of SEQ ID NOS: 16045, 9503, and 12775, respectively.

[0893] The disclosure describes an antibody, antigen binding fragment, or polypeptide comprising a heavy chain variable region having a HCDR1, HCDR2, and HCDR3, and a light chain variable region having a LCDR1, LCDR2, and LCDR3, wherein the HCDR1, HCDR2, and HCDR3 comprises an amino acid sequence of SEQ ID NOS:10934, 9926, and 10107, respectively and the LCDR1, LCDR2, and LCDR3 comprises an amino acid sequence of SEQ ID NOS: 15883, 4436, and 12697, respectively.

[0894] The disclosure describes an antibody, antigen binding fragment, or polypeptide comprising a heavy chain variable region having a HCDR1, HCDR2, and HCDR3, and a light chain variable region having a LCDR1, LCDR2, and LCDR3, wherein the HCDR1, HCDR2, and HCDR3 comprises an amino acid sequence of SEQ ID NOS: 16208, 16972, and 5920, respectively and the LCDR1, LCDR2, and LCDR3 comprises an amino acid sequence of SEQ ID NOS: 16453, 9503, and 12725, respectively.

[0895] The disclosure describes an antibody, antigen binding fragment, or polypeptide comprising a heavy chain variable region having a HCDR1, HCDR2, and HCDR3, and a light chain variable region having a LCDR1, LCDR2, and LCDR3, wherein the HCDR1, HCDR2, and HCDR3 comprises an amino acid sequence of SEQ ID NOS: 10362, 16873, and 4483, respectively and the LCDR1, LCDR2, and LCDR3 comprises an amino acid sequence of SEQ ID NOS:17908, 10093, and 17239, respectively.

[0896] The disclosure describes an antibody, antigen binding fragment, or polypeptide comprising a heavy chain variable region having a HCDR1, HCDR2, and HCDR3, and a light chain variable region having a LCDR1, LCDR2, and LCDR3, wherein the HCDR1, HCDR2, and HCDR3 comprises an amino acid sequence of SEQ ID NOS: 17462, 18465, and 9354, respectively and the LCDR1, LCDR2, and LCDR3 comprises an amino acid sequence of SEQ ID NOS: 17959, 9277, and 4384, respectively.

[0897] The disclosure describes an antibody, antigen binding fragment, or polypeptide comprising a heavy chain variable region having a HCDR1, HCDR2, and HCDR3, and a light chain variable region having a LCDR1, LCDR2, and LCDR3, wherein the HCDR1, HCDR2, and HCDR3 comprises an amino acid sequence of SEQ ID NOS:16800, 9692, and 17039, respectively and the LCDR1, LCDR2, and LCDR3 comprises an amino acid sequence of SEQ ID NOS: 16049, 9494, and 12865, respectively. having a LCDR1, LCDR2, and LCDR3, wherein the HCDR1, HCDR2, and HCDR3 comprises an amino acid sequence of SEQ ID NOS:11169, 9761, and 6066, respectively and the LCDR1, LCDR2, and LCDR3 comprises an amino acid sequence of SEQ ID NOS:15859, 10225, and 12775, respectively.

[0898] The disclosure describes an antibody, antigen binding fragment, or polypeptide comprising a heavy chain variable region having a HCDR1, HCDR2, and HCDR3, and a light chain variable region having a LCDR1, LCDR2, and LCDR3, wherein the HCDR1, HCDR2, and HCDR3 comprises an amino acid sequence of SEQ ID NOS:17440, 9843, and 10160, respectively and the LCDR1, LCDR2, and LCDR3 comprises an amino acid sequence of SEQ ID NOS: 16012, 6214, and 10385, respectively.

[0899] The disclosure describes an antibody, antigen binding fragment, or polypeptide comprising a heavy chain variable region having a HCDR1, HCDR2, and HCDR3, and a light chain variable region having a LCDR1, LCDR2, and LCDR3, wherein the HCDR1, HCDR2, and HCDR3 comprises an amino acid sequence of SEQ ID NOS: 11674, 16294, and 4498, respectively and the LCDR1, LCDR2, and LCDR3 comprises an amino acid sequence of SEQ ID NOS: 17938, 6316, and 17139, respectively.

[0900] The disclosure describes an antibody, antigen binding fragment, or polypeptide comprising a heavy chain variable region having a HCDR1, HCDR2, and HCDR3, and a light chain variable region having a LCDR1, LCDR2, and LCDR3, wherein the HCDR1, HCDR2, and HCDR3 comprises an amino acid sequence of SEQ ID NOS:17535, 10571, and 10418, respectively and the LCDR1, LCDR2, and LCDR3 comprises an amino acid sequence of SEQ ID NOS: 16067, 4425, and 12428, respectively.

[0901] The disclosure describes an antibody, antigen binding fragment, or polypeptide comprising a heavy chain variable region having a HCDR1, HCDR2, and HCDR3, and a light chain variable region having a LCDR1, LCDR2, and LCDR3, wherein the HCDR1, HCDR2, and HCDR3 comprises an amino acid sequence of SEQ ID NOS: 11632, 4128, and 6482, respectively and the LCDR1, LCDR2, and LCDR3 comprises an amino acid sequence of SEQ ID NOS:18067, 18594, and 11357, respectively.

[0902] The disclosure describes an antibody, antigen binding fragment, or polypeptide comprising a heavy chain variable region having a HCDR1, HCDR2, and HCDR3, and a light chain variable region having a LCDR1, LCDR2, and LCDR3, wherein the HCDR1, HCDR2, and HCDR3 comprises an amino acid sequence of SEQ ID NOS:10367, 18323, and 6581, respectively and the LCDR1, LCDR2, and LCDR3 comprises an amino acid sequence of SEQ ID NOS: 16061, 9494, and 12682, respectively.

[0903] The disclosure describes an antibody, antigen binding fragment, or polypeptide comprising a heavy chain variable region having a HCDR1, HCDR2, and HCDR3, and a light chain variable region having a LCDR1, LCDR2, and LCDR3, wherein the HCDR1, HCDR2, and HCDR3 comprises an amino acid sequence of SEQ ID NOS: 11646, 17804, and 6094, respectively and the LCDR1, LCDR2, and LCDR3 comprises an amino acid sequence of SEQ ID NOS:15890, 10727, and 12845, respectively.

[0904] The disclosure describes an antibody, antigen binding fragment, or polypeptide comprising a heavy chain variable region having a HCDR1, HCDR2, and HCDR3, and a light chain variable region having a LCDR1, LCDR2, and LCDR3, wherein the HCDR1, HCDR2, and HCDR3 comprises an amino acid sequence of SEQ ID NOS:10934, 9930, and 10143, respectively and the LCDR1, LCDR2, and LCDR3 comprises an amino acid sequence of SEQ ID NOS: 16049, 4432, and 12365, respectively.

[0905] The disclosure describes an antibody, antigen binding fragment, or polypeptide comprising a heavy chain variable region having a HCDR1, HCDR2, and HCDR3, and a light chain variable region having a LCDR1, LCDR2, and LCDR3, wherein the HCDR1, HCDR2, and HCDR3 comprises an amino acid sequence of SEQ ID NOS:16610, 4069, and 9612, respectively and the LCDR1, LCDR2, and LCDR3 comprises an amino acid sequence of SEQ ID NOS: 15684, 4454, and 12735, respectively.

[0906] The disclosure describes an antibody, antigen binding fragment, or polypeptide comprising a heavy chain variable region having a HCDR1, HCDR2, and HCDR3, and a light chain variable region having a LCDR1, LCDR2, and LCDR3, wherein the HCDR1, HCDR2, and HCDR3 comprises an amino acid sequence of SEQ ID NOS:17272, 18342, and 18285, respectively and the LCDR1, LCDR2, and LCDR3 comprises an amino acid sequence of SEQ ID NOS:15691, 3969, and 11083, respectively.

[0907] The disclosure describes an antibody, antigen binding fragment, or polypeptide comprising a heavy chain variable region having a HCDR1, HCDR2, and HCDR3, and a light chain variable region having a LCDR1, LCDR2, and LCDR3, wherein the HCDR1, HCDR2, and HCDR3 comprises an amino acid sequence of SEQ ID NOS: 11614, 16243, and 5909, respectively and the LCDR1, LCDR2, and LCDR3 comprises an amino acid sequence of SEQ ID NOS:16408, 18286, and 11192, respectively.

[0908] The disclosure describes an antibody, antigen binding fragment, or polypeptide comprising a heavy chain variable region having a HCDR1, HCDR2, and HCDR3, and a light chain variable region having a LCDR1, LCDR2, and LCDR3, wherein the HCDR1, HCDR2, and HCDR3 comprises an amino acid sequence of SEQ ID NOS:17544, 10580, and 11132, respectively and the LCDR1, LCDR2, and LCDR3 comprises an amino acid sequence of SEQ ID NOS: 17951, 6243, and 4356, respectively.

[0909] The disclosure describes an antibody, antigen binding fragment, or polypeptide comprising a heavy chain variable region having a HCDR1, HCDR2, and HCDR3, and a light chain variable region having a LCDR1, LCDR2, and LCDR3, wherein the HCDR1, HCDR2, and HCDR3 comprises an amino acid sequence of SEQ ID NOS:4451, 16246, and 9449, respectively and the LCDR1, LCDR2, and LCDR3 comprises an amino acid sequence of SEQ ID NOS:9636, 16161, and 15555, respectively.

[0910] The disclosure describes an antibody, antigen binding fragment, or polypeptide comprising a heavy chain variable region having a HCDR1, HCDR2, and HCDR3, and a light chain variable region having a LCDR1, LCDR2, and LCDR3, wherein the HCDR1, HCDR2, and HCDR3 comprises an amino acid sequence of SEQ ID NOS: 11677, 16261, and 6049, respectively and the LCDR1, LCDR2, and LCDR3 comprises an amino acid sequence of SEQ ID NOS: 16725, 10770, and 4059, respectively.

[0911] The disclosure describes an antibody, antigen binding fragment, or polypeptide comprising a heavy chain variable region having a HCDR1, HCDR2, and HCDR3, and a light chain variable region having a LCDR1, LCDR2, and LCDR3, wherein the HCDR1, HCDR2, and HCDR3 comprises an amino acid sequence of SEQ ID NOS:17262, 9772, and 11729, respectively and the LCDR1, LCDR2, and LCDR3 comprises an amino acid sequence of SEQ ID NOS:15822, 10705, and 12021, respectively.

[0912] The disclosure describes an antibody, antigen binding fragment, or polypeptide comprising a heavy chain variable region having a HCDR1, HCDR2, and HCDR3, and a light chain variable region having a LCDR1, LCDR2, and LCDR3, wherein the HCDR1, HCDR2, and HCDR3 comprises an amino acid sequence of SEQ ID NOS:11406, 17813, and 11724, respectively and the LCDR1, LCDR2, and LCDR3 comprises an amino acid sequence of SEQ ID NOS:15716, 3949, and 12386, respectively.

[0913] The disclosure describes an antibody, antigen binding fragment, or polypeptide comprising a heavy chain variable region having a HCDR1, HCDR2, and HCDR3, and a light chain variable region having a LCDR1, LCDR2, and LCDR3, wherein the HCDR1, HCDR2, and HCDR3 comprises an amino acid sequence of SEQ ID NOS:16926, 16943, and 10520, respectively and the LCDR1, LCDR2, and LCDR3 comprises an amino acid sequence of SEQ ID NOS:15871, 15520, and 12806, respectively.

[0914] The disclosure describes an antibody, antigen binding fragment, or polypeptide comprising a heavy chain variable region having a HCDR1, HCDR2, and HCDR3, and a light chain variable region having a LCDR1, LCDR2, and LCDR3, wherein the HCDR1, HCDR2, and HCDR3 comprises an amino acid sequence of SEQ ID NOS:6565, 18477, and 4026, respectively and the LCDR1, LCDR2, and LCDR3 comprises an amino acid sequence of SEQ ID NOS:16386, 15512, and 11221, respectively.

[0915] The disclosure describes an antibody, antigen binding fragment, or polypeptide comprising a heavy chain variable region having a HCDR1, HCDR2, and HCDR3, and a light chain variable region having a LCDR1, LCDR2, and LCDR3, wherein the HCDR1, HCDR2, and HCDR3 comprises an amino acid sequence of SEQ ID NOS: 17284, 18415, and 6234, respectively and the LCDR1, LCDR2, and LCDR3 comprises an amino acid sequence of SEQ ID NOS:16659, 11900, and 11875, respectively.

[0916] The disclosure describes an antibody, antigen binding fragment, or polypeptide comprising a heavy chain variable region having a HCDR1, HCDR2, and HCDR3, and a light chain variable region having a LCDR1, LCDR2, and LCDR3, wherein the HCDR1, HCDR2, and HCDR3 comprises an amino acid sequence of SEQ ID NOS:6507, 9971, and 6232, respectively and the LCDR1, LCDR2, and LCDR3 comprises an amino acid sequence of SEQ ID NOS: 17959, 6312, and 4369, respectively. having a LCDR1, LCDR2, and LCDR3, wherein the HCDR1, HCDR2, and HCDR3 comprises an amino acid sequence of SEQ ID NOS: 17654, 10541, and 4590, respectively and the LCDR1, LCDR2, and LCDR3 comprises an amino acid sequence of SEQ ID NOS: 16714, 10770, and 4264, respectively.

[0917] The disclosure describes an antibody, antigen binding fragment, or polypeptide comprising a heavy chain variable region having a HCDR1, HCDR2, and HCDR3, and a light chain variable region having a LCDR1, LCDR2, and LCDR3, wherein the HCDR1, HCDR2, and HCDR3 comprises an amino acid sequence of SEQ ID NOS:17600, 9770, and 16963, respectively and the LCDR1, LCDR2, and LCDR3 comprises an amino acid sequence of SEQ ID NOS: 15870, 4432, and 12676, respectively.

[0918] The disclosure describes an antibody, antigen binding fragment, or polypeptide comprising a heavy chain variable region having a HCDR1, HCDR2, and HCDR3, and a light chain variable region having a LCDR1, LCDR2, and LCDR3, wherein the HCDR1, HCDR2, and HCDR3 comprises an amino acid sequence of SEQ ID NOS: 17466, 16919, and 6540, respectively and the LCDR1, LCDR2, and LCDR3 comprises an amino acid sequence of SEQ ID NOS: 17959, 6312, and 17195, respectively.

[0919] The disclosure describes an antibody, antigen binding fragment, or polypeptide comprising a heavy chain variable region having a HCDR1, HCDR2, and HCDR3, and a light chain variable region having a LCDR1, LCDR2, and LCDR3, wherein the HCDR1, HCDR2, and HCDR3 comprises an amino acid sequence of SEQ ID NOS:6546, 11001, and 18605, respectively and the LCDR1, LCDR2, and LCDR3 comprises an amino acid sequence of SEQ ID NOS:16408, 10987, and 11215, respectively.

[0920] The disclosure describes an antibody, antigen binding fragment, or polypeptide comprising a heavy chain variable region having a HCDR1, HCDR2, and HCDR3, and a light chain variable region having a LCDR1, LCDR2, and LCDR3, wherein the HCDR1, HCDR2, and HCDR3 comprises an amino acid sequence of SEQ ID NOS:10933, 9979, and 10109, respectively and the LCDR1, LCDR2, and LCDR3 comprises an amino acid sequence of SEQ ID NOS: 16119, 6326, and 12558, respectively.

[0921] The disclosure describes an antibody, antigen binding fragment, or polypeptide comprising a heavy chain variable region having a HCDR1, HCDR2, and HCDR3, and a light chain variable region having a LCDR1, LCDR2, and LCDR3, wherein the HCDR1, HCDR2, and HCDR3 comprises an amino acid sequence of SEQ ID NOS: 10780, 9393, and 4267, respectively and the LCDR1, LCDR2, and LCDR3 comprises an amino acid sequence of SEQ ID NOS: 15998, 9503, and 12775, respectively.

[0922] The disclosure describes an antibody, antigen binding fragment, or polypeptide comprising a heavy chain variable region having a HCDR1, HCDR2, and HCDR3, and a light chain variable region having a LCDR1, LCDR2, and LCDR3, wherein the HCDR1, HCDR2, and HCDR3 comprises an amino acid sequence of SEQ ID NOS: 17634, 18544, and 9353, respectively and the LCDR1, LCDR2, and LCDR3 comprises an amino acid sequence of SEQ ID NOS: 17959, 9277, and 17202, respectively.

[0923] The disclosure describes an antibody, antigen binding fragment, or polypeptide comprising a heavy chain variable region having a HCDR1, HCDR2, and HCDR3, and a light chain variable region having a LCDR1, LCDR2, and LCDR3, wherein the HCDR1, HCDR2, and HCDR3 comprises an amino acid sequence of SEQ ID NOS: 16520, 16890, and 4397, respectively and the LCDR1, LCDR2, and LCDR3 comprises an amino acid sequence of SEQ ID NOS: 16030, 4425, and 10711, respectively.

[0924] The disclosure describes an antibody, antigen binding fragment, or polypeptide comprising a heavy chain variable region having a HCDR1, HCDR2, and HCDR3, and a light chain variable region having a LCDR1, LCDR2, and LCDR3, wherein the HCDR1, HCDR2, and HCDR3 comprises an amino acid sequence of SEQ ID NOS: 11655, 18630, and 7894, respectively and the LCDR1, LCDR2, and LCDR3 comprises an amino acid sequence of SEQ ID NOS: 11789, 4406, and 12571, respectively.

[0925] The disclosure describes an antibody, antigen binding fragment, or polypeptide comprising a heavy chain variable region having a HCDR1, HCDR2, and HCDR3, and a light chain variable region having a LCDR1, LCDR2, and LCDR3, wherein the HCDR1, HCDR2, and HCDR3 comprises an amino acid sequence of SEQ ID NOS: 17263, 10009, and 4207, respectively and the LCDR1, LCDR2, and LCDR3 comprises an amino acid sequence of SEQ ID NOS: 16089, 4432, and 12689, respectively.

[0926] The disclosure describes an antibody, antigen binding fragment, or polypeptide comprising a heavy chain variable region having a HCDR1, HCDR2, and HCDR3, and a light chain variable region having a LCDR1, LCDR2, and LCDR3, wherein the HCDR1, HCDR2, and HCDR3 comprises an amino acid sequence of SEQ ID NOS:17279, 9946, and 4217, respectively and the LCDR1, LCDR2, and LCDR3 comprises an amino acid sequence of SEQ ID NOS: 16061, 4432, and 12718, respectively.

[0927] The disclosure describes an antibody, antigen binding fragment, or polypeptide comprising a heavy chain variable region having a HCDR1, HCDR2, and HCDR3, and a light chain variable region having a LCDR1, LCDR2, and LCDR3, wherein the HCDR1, HCDR2, and HCDR3 comprises an amino acid sequence of SEQ ID NOS: 17568, 18495, and 5992, respectively and the LCDR1, LCDR2, and LCDR3 comprises an amino acid sequence of SEQ ID NOS:18076, 17715, and 11184, respectively.

[0928] The disclosure describes an antibody, antigen binding fragment, or polypeptide comprising a heavy chain variable region having a HCDR1, HCDR2, and HCDR3, and a light chain variable region having a LCDR1, LCDR2, and LCDR3, wherein the HCDR1, HCDR2, and HCDR3 comprises an amino acid sequence of SEQ ID NOS:16800, 9693, and 17036, respectively and the LCDR1, LCDR2, and LCDR3 comprises an amino acid sequence of SEQ ID NOS: 16027, 9494, and 12664, respectively.

[0929] The disclosure describes an antibody, antigen binding fragment, or polypeptide comprising a heavy chain variable region having a HCDR1, HCDR2, and HCDR3, and a light chain variable region having a LCDR1, LCDR2, and LCDR3, wherein the HCDR1, HCDR2, and HCDR3 comprises an amino acid sequence of SEQ ID NOS:17436, 9999, and 10030, respectively and the LCDR1, LCDR2, and LCDR3 comprises an amino acid sequence of SEQ ID NOS: 16049, 9494, and 12680, respectively.

[0930] The disclosure describes an antibody, antigen binding fragment, or polypeptide comprising a heavy chain variable region having a HCDR1, HCDR2, and HCDR3, and a light chain variable region having a LCDR1, LCDR2, and LCDR3, wherein the HCDR1, HCDR2, and HCDR3 comprises an amino acid sequence of SEQ ID NOS:5441, 16976, and 10955, respectively and the LCDR1, LCDR2, and LCDR3 comprises an amino acid sequence of SEQ ID NOS:15820, 11779, and 10996, respectively.

[0931] The disclosure describes an antibody, antigen binding fragment, or polypeptide comprising a heavy chain variable region having a HCDR1, HCDR2, and HCDR3, and a light chain variable region having a LCDR1, LCDR2, and LCDR3, wherein the HCDR1, HCDR2, and HCDR3 comprises an amino acid sequence of SEQ ID NOS:11410, 4664, and 4628, respectively and the LCDR1, LCDR2, and LCDR3 comprises an amino acid sequence of SEQ ID NOS: 15606, 6214, and 12591, respectively.

[0932] The disclosure describes an antibody, antigen binding fragment, or polypeptide comprising a heavy chain variable region having a HCDR1, HCDR2, and HCDR3, and a light chain variable region having a LCDR1, LCDR2, and LCDR3, wherein the HCDR1, HCDR2, and HCDR3 comprises an amino acid sequence of SEQ ID NOS:17555, 16217, and 17595, respectively and the LCDR1, LCDR2, and LCDR3 comprises an amino acid sequence of SEQ ID NOS: 16721, 6628, and 10280, respectively.

[0933] The disclosure describes an antibody, antigen binding fragment, or polypeptide comprising a heavy chain variable region having a HCDR1, HCDR2, and HCDR3, and a light chain variable region having a LCDR1, LCDR2, and LCDR3, wherein the HCDR1, HCDR2, and HCDR3 comprises an amino acid sequence of SEQ ID NOS: 17648, 16845, and 4508, respectively and the LCDR1, LCDR2, and LCDR3 comprises an amino acid sequence of SEQ ID NOS:16422, 10763, and 11275, respectively.

[0934] The disclosure describes an antibody, antigen binding fragment, or polypeptide comprising a heavy chain variable region having a HCDR1, HCDR2, and HCDR3, and a light chain variable region having a LCDR1, LCDR2, and LCDR3, wherein the HCDR1, HCDR2, and HCDR3 comprises an amino acid sequence of SEQ ID NOS: 10362, 18006, and 4062, respectively and the LCDR1, LCDR2, and LCDR3 comprises an amino acid sequence of SEQ ID NOS: 16036, 9503, and 12772, respectively.

[0935] The disclosure describes an antibody, antigen binding fragment, or polypeptide comprising a heavy chain variable region having a HCDR1, HCDR2, and HCDR3, and a light chain variable region having a LCDR1, LCDR2, and LCDR3, wherein the HCDR1, HCDR2, and HCDR3 comprises an amino acid sequence of SEQ ID NOS:17263, 9742, and 10151, respectively and the LCDR1, LCDR2, and LCDR3 comprises an amino acid sequence of SEQ ID NOS: 16089, 9494, and 12671, respectively. having a LCDR1, LCDR2, and LCDR3, wherein the HCDR1, HCDR2, and HCDR3 comprises an amino acid sequence of SEQ ID NOS: 16989, 9840, and 4044, respectively and the LCDR1, LCDR2, and LCDR3 comprises an amino acid sequence of SEQ ID NOS:15958, 10102, and 12767, respectively.

[0936] The disclosure describes an antibody, antigen binding fragment, or polypeptide comprising a heavy chain variable region having a HCDR1, HCDR2, and HCDR3, and a light chain variable region having a LCDR1, LCDR2, and LCDR3, wherein the HCDR1, HCDR2, and HCDR3 comprises an amino acid sequence of SEQ ID NOS:6547, 18462, and 9349, respectively and the LCDR1, LCDR2, and LCDR3 comprises an amino acid sequence of SEQ ID NOS: 17983, 9279, and 4383, respectively.

[0937] The disclosure describes an antibody, antigen binding fragment, or polypeptide comprising a heavy chain variable region having a HCDR1, HCDR2, and HCDR3, and a light chain variable region having a LCDR1, LCDR2, and LCDR3, wherein the HCDR1, HCDR2, and HCDR3 comprises an amino acid sequence of SEQ ID NOS: 17442, 18379, and 6140, respectively and the LCDR1, LCDR2, and LCDR3 comprises an amino acid sequence of SEQ ID NOS: 15704, 9477, and 11094, respectively.

[0938] The disclosure describes an antibody, antigen binding fragment, or polypeptide comprising a heavy chain variable region having a HCDR1, HCDR2, and HCDR3, and a light chain variable region having a LCDR1, LCDR2, and LCDR3, wherein the HCDR1, HCDR2, and HCDR3 comprises an amino acid sequence of SEQ ID NOS: 11409, 11435, and 9688, respectively and the LCDR1, LCDR2, and LCDR3 comprises an amino acid sequence of SEQ ID NOS: 11782, 4418, and 12562, respectively.

[0939] The disclosure describes an antibody, antigen binding fragment, or polypeptide comprising a heavy chain variable region having a HCDR1, HCDR2, and HCDR3, and a light chain variable region having a LCDR1, LCDR2, and LCDR3, wherein the HCDR1, HCDR2, and HCDR3 comprises an amino acid sequence of SEQ ID NOS:11381, 10571, and 11113, respectively and the LCDR1, LCDR2, and LCDR3 comprises an amino acid sequence of SEQ ID NOS: 15737, 10727, and 12331, respectively.

[0940] The disclosure describes an antibody, antigen binding fragment, or polypeptide comprising a heavy chain variable region having a HCDR1, HCDR2, and HCDR3, and a light chain variable region having a LCDR1, LCDR2, and LCDR3, wherein the HCDR1, HCDR2, and HCDR3 comprises an amino acid sequence of SEQ ID NOS:17639, 16969, and 10498, respectively and the LCDR1, LCDR2, and LCDR3 comprises an amino acid sequence of SEQ ID NOS: 16036, 9503, and 12724, respectively.

[0941] The disclosure describes an antibody, antigen binding fragment, or polypeptide comprising a heavy chain variable region having a HCDR1, HCDR2, and HCDR3, and a light chain variable region having a LCDR1, LCDR2, and LCDR3, wherein the HCDR1, HCDR2, and HCDR3 comprises an amino acid sequence of SEQ ID NOS:17263, 9874, and 17060, respectively and the LCDR1, LCDR2, and LCDR3 comprises an amino acid sequence of SEQ ID NOS: 16061, 4432, and 12692, respectively.

[0942] The disclosure describes an antibody, antigen binding fragment, or polypeptide comprising a heavy chain variable region having a HCDR1, HCDR2, and HCDR3, and a light chain variable region having a LCDR1, LCDR2, and LCDR3, wherein the HCDR1, HCDR2, and HCDR3 comprises an amino acid sequence of SEQ ID NOS: 11665, 9823, and 7805, respectively and the LCDR1, LCDR2, and LCDR3 comprises an amino acid sequence of SEQ ID NOS:10906, 18275, and 12612, respectively.

[0943] The disclosure describes an antibody, antigen binding fragment, or polypeptide comprising a heavy chain variable region having a HCDR1, HCDR2, and HCDR3, and a light chain variable region having a LCDR1, LCDR2, and LCDR3, wherein the HCDR1, HCDR2, and HCDR3 comprises an amino acid sequence of SEQ ID NOS:17889, 11147, and 16515, respectively and the LCDR1, LCDR2, and LCDR3 comprises an amino acid sequence of SEQ ID NOS:16428, 10765, and 11348, respectively.

[0944] The disclosure describes an antibody, antigen binding fragment, or polypeptide comprising a heavy chain variable region having a HCDR1, HCDR2, and HCDR3, and a light chain variable region having a LCDR1, LCDR2, and LCDR3, wherein the HCDR1, HCDR2, and HCDR3 comprises an amino acid sequence of SEQ ID NOS:17474, 9708, and 10110, respectively and the LCDR1, LCDR2, and LCDR3 comprises an amino acid sequence of SEQ ID NOS: 16049, 4432, and 12705, respectively.

[0945] The disclosure describes an antibody, antigen binding fragment, or polypeptide comprising a heavy chain variable region having a HCDR1, HCDR2, and HCDR3, and a light chain variable region having a LCDR1, LCDR2, and LCDR3, wherein the HCDR1, HCDR2, and HCDR3 comprises an amino acid sequence of SEQ ID NOS:7856, 6791, and 6551, respectively and the LCDR1, LCDR2, and LCDR3 comprises an amino acid sequence of SEQ ID NOS: 16043, 9494, and 12704, respectively.

[0946] The disclosure describes an antibody, antigen binding fragment, or polypeptide comprising a heavy chain variable region having a HCDR1, HCDR2, and HCDR3, and a light chain variable region having a LCDR1, LCDR2, and LCDR3, wherein the HCDR1, HCDR2, and HCDR3 comprises an amino acid sequence of SEQ ID NOS:17456, 18546, and 10287, respectively and the LCDR1, LCDR2, and LCDR3 comprises an amino acid sequence of SEQ ID NOS: 17950, 6331, and 4348, respectively.

[0947] The disclosure describes an antibody, antigen binding fragment, or polypeptide comprising a heavy chain variable region having a HCDR1, HCDR2, and HCDR3, and a light chain variable region having a LCDR1, LCDR2, and LCDR3, wherein the HCDR1, HCDR2, and HCDR3 comprises an amino acid sequence of SEQ ID NOS: 17856, 18598, and 9598, respectively and the LCDR1, LCDR2, and LCDR3 comprises an amino acid sequence of SEQ ID NOS: 16764, 10772, and 4266, respectively.

[0948] The disclosure describes an antibody, antigen binding fragment, or polypeptide comprising a heavy chain variable region having a HCDR1, HCDR2, and HCDR3, and a light chain variable region having a LCDR1, LCDR2, and LCDR3, wherein the HCDR1, HCDR2, and HCDR3 comprises an amino acid sequence of SEQ ID NOS:10367, 18323, and 17546, respectively and the LCDR1, LCDR2, and LCDR3 comprises an amino acid sequence of SEQ ID NOS:16659, 11900, and 11879, respectively.

[0949] The disclosure describes an antibody, antigen binding fragment, or polypeptide comprising a heavy chain variable region having a HCDR1, HCDR2, and HCDR3, and a light chain variable region having a LCDR1, LCDR2, and LCDR3, wherein the HCDR1, HCDR2, and HCDR3 comprises an amino acid sequence of SEQ ID NOS:10257, 6745, and 5918, respectively and the LCDR1, LCDR2, and LCDR3 comprises an amino acid sequence of SEQ ID NOS: 16072, 4437, and 12661, respectively.

[0950] The disclosure describes an antibody, antigen binding fragment, or polypeptide comprising a heavy chain variable region having a HCDR1, HCDR2, and HCDR3, and a light chain variable region having a LCDR1, LCDR2, and LCDR3, wherein the HCDR1, HCDR2, and HCDR3 comprises an amino acid sequence of SEQ ID NOS:17609, 4135, and 17588, respectively and the LCDR1, LCDR2, and LCDR3 comprises an amino acid sequence of SEQ ID NOS: 16783, 10758, and 3989, respectively.

[0951] The disclosure describes an antibody, antigen binding fragment, or polypeptide comprising a heavy chain variable region having a HCDR1, HCDR2, and HCDR3, and a light chain variable region having a LCDR1, LCDR2, and LCDR3, wherein the HCDR1, HCDR2, and HCDR3 comprises an amino acid sequence of SEQ ID NOS: 11631, 4137, and 9532, respectively and the LCDR1, LCDR2, and LCDR3 comprises an amino acid sequence of SEQ ID NOS:15890, 10727, and 12806, respectively.

[0952] The disclosure describes an antibody, antigen binding fragment, or polypeptide comprising a heavy chain variable region having a HCDR1, HCDR2, and HCDR3, and a light chain variable region having a LCDR1, LCDR2, and LCDR3, wherein the HCDR1, HCDR2, and HCDR3 comprises an amino acid sequence of SEQ ID NOS:17649, 11455, and 11077, respectively and the LCDR1, LCDR2, and LCDR3 comprises an amino acid sequence of SEQ ID NOS:10819, 6635, and 11241, respectively.

[0953] The disclosure describes an antibody, antigen binding fragment, or polypeptide comprising a heavy chain variable region having a HCDR1, HCDR2, and HCDR3, and a light chain variable region having a LCDR1, LCDR2, and LCDR3, wherein the HCDR1, HCDR2, and HCDR3 comprises an amino acid sequence of SEQ ID NOS:6565, 4669, and 4625, respectively and the LCDR1, LCDR2, and LCDR3 comprises an amino acid sequence of SEQ ID NOS: 10827, 9272, and 11239, respectively.

[0954] The disclosure describes an antibody, antigen binding fragment, or polypeptide comprising a heavy chain variable region having a HCDR1, HCDR2, and HCDR3, and a light chain variable region having a LCDR1, LCDR2, and LCDR3, wherein the HCDR1, HCDR2, and HCDR3 comprises an amino acid sequence of SEQ ID NOS: 17017, 16498, and 9571, respectively and the LCDR1, LCDR2, and LCDR3 comprises an amino acid sequence of SEQ ID NOS:17941, 10320, and 17201, respectively. having a LCDR1, LCDR2, and LCDR3, wherein the HCDR1, HCDR2, and HCDR3 comprises an amino acid sequence of SEQ ID NOS:16598, 10614, and 11115, respectively and the LCDR1, LCDR2, and LCDR3 comprises an amino acid sequence of SEQ ID NOS:16103, 10913, and 12010, respectively.

[0955] The disclosure describes an antibody, antigen binding fragment, or polypeptide comprising a heavy chain variable region having a HCDR1, HCDR2, and HCDR3, and a light chain variable region having a LCDR1, LCDR2, and LCDR3, wherein the HCDR1, HCDR2, and HCDR3 comprises an amino acid sequence of SEQ ID NOS:17263, 9743, and 9613, respectively and the LCDR1, LCDR2, and LCDR3 comprises an amino acid sequence of SEQ ID NOS: 15701, 4430, and 12826, respectively.

[0956] The disclosure describes an antibody, antigen binding fragment, or polypeptide comprising a heavy chain variable region having a HCDR1, HCDR2, and HCDR3, and a light chain variable region having a LCDR1, LCDR2, and LCDR3, wherein the HCDR1, HCDR2, and HCDR3 comprises an amino acid sequence of SEQ ID NOS: 17465, 18464, and 9355, respectively and the LCDR1, LCDR2, and LCDR3 comprises an amino acid sequence of SEQ ID NOS: 17959, 9277, and 4384, respectively.

[0957] The disclosure describes an antibody, antigen binding fragment, or polypeptide comprising a heavy chain variable region having a HCDR1, HCDR2, and HCDR3, and a light chain variable region having a LCDR1, LCDR2, and LCDR3, wherein the HCDR1, HCDR2, and HCDR3 comprises an amino acid sequence of SEQ ID NOS: 17266, 9889, and 4595, respectively and the LCDR1, LCDR2, and LCDR3 comprises an amino acid sequence of SEQ ID NOS: 16061, 6176, and 12585, respectively.

[0958] The disclosure describes an antibody, antigen binding fragment, or polypeptide comprising a heavy chain variable region having a HCDR1, HCDR2, and HCDR3, and a light chain variable region having a LCDR1, LCDR2, and LCDR3, wherein the HCDR1, HCDR2, and HCDR3 comprises an amino acid sequence of SEQ ID NOS: 16475, 10576, and 5969, respectively and the LCDR1, LCDR2, and LCDR3 comprises an amino acid sequence of SEQ ID NOS: 17958, 9275, and 17201, respectively.

[0959] The disclosure describes an antibody, antigen binding fragment, or polypeptide comprising a heavy chain variable region having a HCDR1, HCDR2, and HCDR3, and a light chain variable region having a LCDR1, LCDR2, and LCDR3, wherein the HCDR1, HCDR2, and HCDR3 comprises an amino acid sequence of SEQ ID NOS:17475, 16912, and 17858, respectively and the LCDR1, LCDR2, and LCDR3 comprises an amino acid sequence of SEQ ID NOS:16148, 9503, and 12588, respectively.

[0960] The disclosure describes an antibody, antigen binding fragment, or polypeptide comprising a heavy chain variable region having a HCDR1, HCDR2, and HCDR3, and a light chain variable region having a LCDR1, LCDR2, and LCDR3, wherein the HCDR1, HCDR2, and HCDR3 comprises an amino acid sequence of SEQ ID NOS:11604, 10493, and 10683, respectively and the LCDR1, LCDR2, and LCDR3 comprises an amino acid sequence of SEQ ID NOS:15890, 10727, and 12841, respectively.

[0961] The disclosure describes an antibody, antigen binding fragment, or polypeptide comprising a heavy chain variable region having a HCDR1, HCDR2, and HCDR3, and a light chain variable region having a LCDR1, LCDR2, and LCDR3, wherein the HCDR1, HCDR2, and HCDR3 comprises an amino acid sequence of SEQ ID NOS:17441, 18338, and 18050, respectively and the LCDR1, LCDR2, and LCDR3 comprises an amino acid sequence of SEQ ID NOS: 17904, 10095, and 17238, respectively.

[0962] The disclosure describes an antibody, antigen binding fragment, or polypeptide comprising a heavy chain variable region having a HCDR1, HCDR2, and HCDR3, and a light chain variable region having a LCDR1, LCDR2, and LCDR3, wherein the HCDR1, HCDR2, and HCDR3 comprises an amino acid sequence of SEQ ID NOS:16624, 18342, and 18215, respectively and the LCDR1, LCDR2, and LCDR3 comprises an amino acid sequence of SEQ ID NOS:16428, 10764, and 11228, respectively.

[0963] The disclosure describes an antibody, antigen binding fragment, or polypeptide comprising a heavy chain variable region having a HCDR1, HCDR2, and HCDR3, and a light chain variable region having a LCDR1, LCDR2, and LCDR3, wherein the HCDR1, HCDR2, and HCDR3 comprises an amino acid sequence of SEQ ID NOS:4493, 9374, and 6489, respectively and the LCDR1, LCDR2, and LCDR3 comprises an amino acid sequence of SEQ ID NOS:15664, 17587, and 11084, respectively.

[0964] The disclosure describes an antibody, antigen binding fragment, or polypeptide comprising a heavy chain variable region having a HCDR1, HCDR2, and HCDR3, and a light chain variable region having a LCDR1, LCDR2, and LCDR3, wherein the HCDR1, HCDR2, and HCDR3 comprises an amino acid sequence of SEQ ID NOS: 11577, 18363, and 6096, respectively and the LCDR1, LCDR2, and LCDR3 comprises an amino acid sequence of SEQ ID NOS:16384, 10926, and 11275, respectively.

[0965] The disclosure describes an antibody, antigen binding fragment, or polypeptide comprising a heavy chain variable region having a HCDR1, HCDR2, and HCDR3, and a light chain variable region having a LCDR1, LCDR2, and LCDR3, wherein the HCDR1, HCDR2, and HCDR3 comprises an amino acid sequence of SEQ ID NOS: 17432, 18518, and 4022, respectively and the LCDR1, LCDR2, and LCDR3 comprises an amino acid sequence of SEQ ID NOS: 10710, 6617, and 11087, respectively.

[0966] The disclosure describes an antibody, antigen binding fragment, or polypeptide comprising a heavy chain variable region having a HCDR1, HCDR2, and HCDR3, and a light chain variable region having a LCDR1, LCDR2, and LCDR3, wherein the HCDR1, HCDR2, and HCDR3 comprises an amino acid sequence of SEQ ID NOS:17856, 16309, and 18443, respectively and the LCDR1, LCDR2, and LCDR3 comprises an amino acid sequence of SEQ ID NOS: 15897, 3965, and 12473, respectively.

[0967] The disclosure describes an antibody, antigen binding fragment, or polypeptide comprising a heavy chain variable region having a HCDR1, HCDR2, and HCDR3, and a light chain variable region having a LCDR1, LCDR2, and LCDR3, wherein the HCDR1, HCDR2, and HCDR3 comprises an amino acid sequence of SEQ ID NOS:11367, 10392, and 18056, respectively and the LCDR1, LCDR2, and LCDR3 comprises an amino acid sequence of SEQ ID NOS:16647, 16164, and 13033, respectively.

[0968] The disclosure describes an antibody, antigen binding fragment, or polypeptide comprising a heavy chain variable region having a HCDR1, HCDR2, and HCDR3, and a light chain variable region having a LCDR1, LCDR2, and LCDR3, wherein the HCDR1, HCDR2, and HCDR3 comprises an amino acid sequence of SEQ ID NOS: 18451, 17803, and 6036, respectively and the LCDR1, LCDR2, and LCDR3 comprises an amino acid sequence of SEQ ID NOS: 15682, 4434, and 12950, respectively.

[0969] The disclosure describes an antibody, antigen binding fragment, or polypeptide comprising a heavy chain variable region having a HCDR1, HCDR2, and HCDR3, and a light chain variable region having a LCDR1, LCDR2, and LCDR3, wherein the HCDR1, HCDR2, and HCDR3 comprises an amino acid sequence of SEQ ID NOS: 11626, 17753, and 9519, respectively and the LCDR1, LCDR2, and LCDR3 comprises an amino acid sequence of SEQ ID NOS: 16114, 6611, and 12846, respectively.

[0970] The disclosure describes an antibody, antigen binding fragment, or polypeptide comprising a heavy chain variable region having a HCDR1, HCDR2, and HCDR3, and a light chain variable region having a LCDR1, LCDR2, and LCDR3, wherein the HCDR1, HCDR2, and HCDR3 comprises an amino acid sequence of SEQ ID NOS:6565, 17998, and 17134, respectively and the LCDR1, LCDR2, and LCDR3 comprises an amino acid sequence of SEQ ID NOS:10797, 18280, and 12941, respectively.

[0971] The disclosure describes an antibody, antigen binding fragment, or polypeptide comprising a heavy chain variable region having a HCDR1, HCDR2, and HCDR3, and a light chain variable region having a LCDR1, LCDR2, and LCDR3, wherein the HCDR1, HCDR2, and HCDR3 comprises an amino acid sequence of SEQ ID NOS:17443, 17809, and 16178, respectively and the LCDR1, LCDR2, and LCDR3 comprises an amino acid sequence of SEQ ID NOS:15713, 3982, and 12394, respectively.

[0972] The disclosure describes an antibody, antigen binding fragment, or polypeptide comprising a heavy chain variable region having a HCDR1, HCDR2, and HCDR3, and a light chain variable region having a LCDR1, LCDR2, and LCDR3, wherein the HCDR1, HCDR2, and HCDR3 comprises an amino acid sequence of SEQ ID NOS:16553, 10390, and 10585, respectively and the LCDR1, LCDR2, and LCDR3 comprises an amino acid sequence of SEQ ID NOS: 16638, 10966, and 13035, respectively.

[0973] The disclosure describes an antibody, antigen binding fragment, or polypeptide comprising a heavy chain variable region having a HCDR1, HCDR2, and HCDR3, and a light chain variable region having a LCDR1, LCDR2, and LCDR3, wherein the HCDR1, HCDR2, and HCDR3 comprises an amino acid sequence of SEQ ID NOS:4039, 5447, and 11952, respectively and the LCDR1, LCDR2, and LCDR3 comprises an amino acid sequence of SEQ ID NOS: 16136, 3956, and 13010, respectively. having a LCDR1, LCDR2, and LCDR3, wherein the HCDR1, HCDR2, and HCDR3 comprises an amino acid sequence of SEQ ID NOS: 17537, 18471, and 6619, respectively and the LCDR1, LCDR2, and LCDR3 comprises an amino acid sequence of SEQ ID NOS: 16061, 9491, and 12693, respectively.

[0974] The disclosure describes an antibody, antigen binding fragment, or polypeptide comprising a heavy chain variable region having a HCDR1, HCDR2, and HCDR3, and a light chain variable region having a LCDR1, LCDR2, and LCDR3, wherein the HCDR1, HCDR2, and HCDR3 comprises an amino acid sequence of SEQ ID NOS:17474, 10295, and 16626, respectively and the LCDR1, LCDR2, and LCDR3 comprises an amino acid sequence of SEQ ID NOS:15623, 16141, and 11106, respectively.

[0975] The disclosure describes an antibody, antigen binding fragment, or polypeptide comprising a heavy chain variable region having a HCDR1, HCDR2, and HCDR3, and a light chain variable region having a LCDR1, LCDR2, and LCDR3, wherein the HCDR1, HCDR2, and HCDR3 comprises an amino acid sequence of SEQ ID NOS:16535, 10008, and 18217, respectively and the LCDR1, LCDR2, and LCDR3 comprises an amino acid sequence of SEQ ID NOS:16106, 3974, and 12693, respectively.

[0976] The disclosure describes an antibody, antigen binding fragment, or polypeptide comprising a heavy chain variable region having a HCDR1, HCDR2, and HCDR3, and a light chain variable region having a LCDR1, LCDR2, and LCDR3, wherein the HCDR1, HCDR2, and HCDR3 comprises an amino acid sequence of SEQ ID NOS:11637, 18403, and 10131, respectively and the LCDR1, LCDR2, and LCDR3 comprises an amino acid sequence of SEQ ID NOS: 16488, 4425, and 11103, respectively.

[0977] The disclosure describes an antibody, antigen binding fragment, or polypeptide comprising a heavy chain variable region having a HCDR1, HCDR2, and HCDR3, and a light chain variable region having a LCDR1, LCDR2, and LCDR3, wherein the HCDR1, HCDR2, and HCDR3 comprises an amino acid sequence of SEQ ID NOS: 17608, 16858, and 6210, respectively and the LCDR1, LCDR2, and LCDR3 comprises an amino acid sequence of SEQ ID NOS: 16094, 4425, and 10711, respectively.

[0978] The disclosure describes an antibody, antigen binding fragment, or polypeptide comprising a heavy chain variable region having a HCDR1, HCDR2, and HCDR3, and a light chain variable region having a LCDR1, LCDR2, and LCDR3, wherein the HCDR1, HCDR2, and HCDR3 comprises an amino acid sequence of SEQ ID NOS:4453, 16247, and 11042, respectively and the LCDR1, LCDR2, and LCDR3 comprises an amino acid sequence of SEQ ID NOS:15908, 16558, and 12498, respectively.

[0979] The disclosure describes an antibody, antigen binding fragment, or polypeptide comprising a heavy chain variable region having a HCDR1, HCDR2, and HCDR3, and a light chain variable region having a LCDR1, LCDR2, and LCDR3, wherein the HCDR1, HCDR2, and HCDR3 comprises an amino acid sequence of SEQ ID NOS: 17273, 5440, and 5945, respectively and the LCDR1, LCDR2, and LCDR3 comprises an amino acid sequence of SEQ ID NOS: 16011, 9503, and 12775, respectively.

[0980] The disclosure describes an antibody, antigen binding fragment, or polypeptide comprising a heavy chain variable region having a HCDR1, HCDR2, and HCDR3, and a light chain variable region having a LCDR1, LCDR2, and LCDR3, wherein the HCDR1, HCDR2, and HCDR3 comprises an amino acid sequence of SEQ ID NOS: 17009, 16497, and 5895, respectively and the LCDR1, LCDR2, and LCDR3 comprises an amino acid sequence of SEQ ID NOS: 15625, 6215, and 12632, respectively.

[0981] The disclosure describes an antibody, antigen binding fragment, or polypeptide comprising a heavy chain variable region having a HCDR1, HCDR2, and HCDR3, and a light chain variable region having a LCDR1, LCDR2, and LCDR3, wherein the HCDR1, HCDR2, and HCDR3 comprises an amino acid sequence of SEQ ID NOS:17843, 11488, and 17676, respectively and the LCDR1, LCDR2, and LCDR3 comprises an amino acid sequence of SEQ ID NOS:10864, 18275, and 12894, respectively.

[0982] The disclosure describes an antibody, antigen binding fragment, or polypeptide comprising a heavy chain variable region having a HCDR1, HCDR2, and HCDR3, and a light chain variable region having a LCDR1, LCDR2, and LCDR3, wherein the HCDR1, HCDR2, and HCDR3 comprises an amino acid sequence of SEQ ID NOS:17856, 11033, and 11068, respectively and the LCDR1, LCDR2, and LCDR3 comprises an amino acid sequence of SEQ ID NOS:15828, 9490, and 12527, respectively.

[0983] The disclosure describes an antibody, antigen binding fragment, or polypeptide comprising a heavy chain variable region having a HCDR1, HCDR2, and HCDR3, and a light chain variable region having a LCDR1, LCDR2, and LCDR3, wherein the HCDR1, HCDR2, and HCDR3 comprises an amino acid sequence of SEQ ID NOS:11367, 10393, and 18057, respectively and the LCDR1, LCDR2, and LCDR3 comprises an amino acid sequence of SEQ ID NOS:16642, 16164, and 13033, respectively.

[0984] The disclosure describes an antibody, antigen binding fragment, or polypeptide comprising a heavy chain variable region having a HCDR1, HCDR2, and HCDR3, and a light chain variable region having a LCDR1, LCDR2, and LCDR3, wherein the HCDR1, HCDR2, and HCDR3 comprises an amino acid sequence of SEQ ID NOS: 11650, 17762, and 5986, respectively and the LCDR1, LCDR2, and LCDR3 comprises an amino acid sequence of SEQ ID NOS: 15825, 9499, and 12946, respectively.

[0985] The disclosure describes an antibody, antigen binding fragment, or polypeptide comprising a heavy chain variable region having a HCDR1, HCDR2, and HCDR3, and a light chain variable region having a LCDR1, LCDR2, and LCDR3, wherein the HCDR1, HCDR2, and HCDR3 comprises an amino acid sequence of SEQ ID NOS: 17466, 18545, and 6185, respectively and the LCDR1, LCDR2, and LCDR3 comprises an amino acid sequence of SEQ ID NOS: 16061, 9494, and 12675, respectively.

[0986] The disclosure describes an antibody, antigen binding fragment, or polypeptide comprising a heavy chain variable region having a HCDR1, HCDR2, and HCDR3, and a light chain variable region having a LCDR1, LCDR2, and LCDR3, wherein the HCDR1, HCDR2, and HCDR3 comprises an amino acid sequence of SEQ ID NOS:17132, 16828, and 10974, respectively and the LCDR1, LCDR2, and LCDR3 comprises an amino acid sequence of SEQ ID NOS:16134, 9506, and 12529, respectively.

[0987] The disclosure describes an antibody, antigen binding fragment, or polypeptide comprising a heavy chain variable region having a HCDR1, HCDR2, and HCDR3, and a light chain variable region having a LCDR1, LCDR2, and LCDR3, wherein the HCDR1, HCDR2, and HCDR3 comprises an amino acid sequence of SEQ ID NOS:7820, 9562, and 4047, respectively and the LCDR1, LCDR2, and LCDR3 comprises an amino acid sequence of SEQ ID NOS:16642, 10747, and 13031, respectively.

[0988] The disclosure describes an antibody, antigen binding fragment, or polypeptide comprising a heavy chain variable region having a HCDR1, HCDR2, and HCDR3, and a light chain variable region having a LCDR1, LCDR2, and LCDR3, wherein the HCDR1, HCDR2, and HCDR3 comprises an amino acid sequence of SEQ ID NOS:17274, 4136, and 10994, respectively and the LCDR1, LCDR2, and LCDR3 comprises an amino acid sequence of SEQ ID NOS:16642, 10747, and 13028, respectively.

[0989] The disclosure describes an antibody, antigen binding fragment, or polypeptide comprising a heavy chain variable region having a HCDR1, HCDR2, and HCDR3, and a light chain variable region having a LCDR1, LCDR2, and LCDR3, wherein the HCDR1, HCDR2, and HCDR3 comprises an amino acid sequence of SEQ ID NOS:17447, 9387, and 11056, respectively and the LCDR1, LCDR2, and LCDR3 comprises an amino acid sequence of SEQ ID NOS: 17916, 4179, and 17233, respectively.

[0990] The disclosure describes an antibody, antigen binding fragment, or polypeptide comprising a heavy chain variable region having a HCDR1, HCDR2, and HCDR3, and a light chain variable region having a LCDR1, LCDR2, and LCDR3, wherein the HCDR1, HCDR2, and HCDR3 comprises an amino acid sequence of SEQ ID NOS:16822, 18581, and 5990, respectively and the LCDR1, LCDR2, and LCDR3 comprises an amino acid sequence of SEQ ID NOS: 16117, 3982, and 10450, respectively.

[0991] The disclosure describes an antibody, antigen binding fragment, or polypeptide comprising a heavy chain variable region having a HCDR1, HCDR2, and HCDR3, and a light chain variable region having a LCDR1, LCDR2, and LCDR3, wherein the HCDR1, HCDR2, and HCDR3 comprises an amino acid sequence of SEQ ID NOS:16797, 9394, and 10153, respectively and the LCDR1, LCDR2, and LCDR3 comprises an amino acid sequence of SEQ ID NOS: 15973, 3983, and 12868, respectively.

[0992] The disclosure describes an antibody, antigen binding fragment, or polypeptide comprising a heavy chain variable region having a HCDR1, HCDR2, and HCDR3, and a light chain variable region having a LCDR1, LCDR2, and LCDR3, wherein the HCDR1, HCDR2, and HCDR3 comprises an amino acid sequence of SEQ ID NOS: 16569, 9376, and 6233, respectively and the LCDR1, LCDR2, and LCDR3 comprises an amino acid sequence of SEQ ID NOS:16438, 10926, and 11271, respectively. having a LCDR1, LCDR2, and LCDR3, wherein the HCDR1, HCDR2, and HCDR3 comprises an amino acid sequence of SEQ ID NOS:11574, 9372, and 10021, respectively and the LCDR1, LCDR2, and LCDR3 comprises an amino acid sequence of SEQ ID NOS:10869, 18275, and 12923, respectively.

[0993] The disclosure describes an antibody, antigen binding fragment, or polypeptide comprising a heavy chain variable region having a HCDR1, HCDR2, and HCDR3, and a light chain variable region having a LCDR1, LCDR2, and LCDR3, wherein the HCDR1, HCDR2, and HCDR3 comprises an amino acid sequence of SEQ ID NOS:17852, 18320, and 10028, respectively and the LCDR1, LCDR2, and LCDR3 comprises an amino acid sequence of SEQ ID NOS:10915, 18275, and 10479, respectively.

[0994] The disclosure describes an antibody, antigen binding fragment, or polypeptide comprising a heavy chain variable region having a HCDR1, HCDR2, and HCDR3, and a light chain variable region having a LCDR1, LCDR2, and LCDR3, wherein the HCDR1, HCDR2, and HCDR3 comprises an amino acid sequence of SEQ ID NOS: 11664, 16925, and 6198, respectively and the LCDR1, LCDR2, and LCDR3 comprises an amino acid sequence of SEQ ID NOS: 15848, 3982, and 12519, respectively.

[0995] The disclosure describes an antibody, antigen binding fragment, or polypeptide comprising a heavy chain variable region having a HCDR1, HCDR2, and HCDR3, and a light chain variable region having a LCDR1, LCDR2, and LCDR3, wherein the HCDR1, HCDR2, and HCDR3 comprises an amino acid sequence of SEQ ID NOS:17028, 17823, and 17846, respectively and the LCDR1, LCDR2, and LCDR3 comprises an amino acid sequence of SEQ ID NOS:16659, 11903, and 11863, respectively.

[0996] The disclosure describes an antibody, antigen binding fragment, or polypeptide comprising a heavy chain variable region having a HCDR1, HCDR2, and HCDR3, and a light chain variable region having a LCDR1, LCDR2, and LCDR3, wherein the HCDR1, HCDR2, and HCDR3 comprises an amino acid sequence of SEQ ID NOS:16337, 16849, and 11111, respectively and the LCDR1, LCDR2, and LCDR3 comprises an amino acid sequence of SEQ ID NOS:10880, 18275, and 12360, respectively.

[0997] The disclosure describes an antibody, antigen binding fragment, or polypeptide comprising a heavy chain variable region having a HCDR1, HCDR2, and HCDR3, and a light chain variable region having a LCDR1, LCDR2, and LCDR3, wherein the HCDR1, HCDR2, and HCDR3 comprises an amino acid sequence of SEQ ID NOS:16591, 18481, and 9597, respectively and the LCDR1, LCDR2, and LCDR3 comprises an amino acid sequence of SEQ ID NOS:18075, 18603, and 11177, respectively.

[0998] The disclosure describes an antibody, antigen binding fragment, or polypeptide comprising a heavy chain variable region having a HCDR1, HCDR2, and HCDR3, and a light chain variable region having a LCDR1, LCDR2, and LCDR3, wherein the HCDR1, HCDR2, and HCDR3 comprises an amino acid sequence of SEQ ID NOS:17068, 9944, and 10201, respectively and the LCDR1, LCDR2, and LCDR3 comprises an amino acid sequence of SEQ ID NOS: 16062, 9494, and 12706, respectively.

[0999] The disclosure describes an antibody, antigen binding fragment, or polypeptide comprising a heavy chain variable region having a HCDR1, HCDR2, and HCDR3, and a light chain variable region having a LCDR1, LCDR2, and LCDR3, wherein the HCDR1, HCDR2, and HCDR3 comprises an amino acid sequence of SEQ ID NOS:17274, 4136, and 4571, respectively and the LCDR1, LCDR2, and LCDR3 comprises an amino acid sequence of SEQ ID NOS: 16061, 9494, and 12661, respectively.

[1000] The disclosure describes an antibody, antigen binding fragment, or polypeptide comprising a heavy chain variable region having a HCDR1, HCDR2, and HCDR3, and a light chain variable region having a LCDR1, LCDR2, and LCDR3, wherein the HCDR1, HCDR2, and HCDR3 comprises an amino acid sequence of SEQ ID NOS:16957, 7846, and 6116, respectively and the LCDR1, LCDR2, and LCDR3 comprises an amino acid sequence of SEQ ID NOS: 16063, 9487, and 12000, respectively.

[1001] The disclosure describes an antibody, antigen binding fragment, or polypeptide comprising a heavy chain variable region having a HCDR1, HCDR2, and HCDR3, and a light chain variable region having a LCDR1, LCDR2, and LCDR3, wherein the HCDR1, HCDR2, and HCDR3 comprises an amino acid sequence of SEQ ID NOS: 17276, 17757, and 4214, respectively and the LCDR1, LCDR2, and LCDR3 comprises an amino acid sequence of SEQ ID NOS: 15976, 9495, and 12948, respectively.

[1002] The disclosure describes an antibody, antigen binding fragment, or polypeptide comprising a heavy chain variable region having a HCDR1, HCDR2, and HCDR3, and a light chain variable region having a LCDR1, LCDR2, and LCDR3, wherein the HCDR1, HCDR2, and HCDR3 comprises an amino acid sequence of SEQ ID NOS:6510, 17746, and 17986, respectively and the LCDR1, LCDR2, and LCDR3 comprises an amino acid sequence of SEQ ID NOS:16442, 15521, and 11288, respectively.

[1003] The disclosure describes an antibody, antigen binding fragment, or polypeptide comprising a heavy chain variable region having a HCDR1, HCDR2, and HCDR3, and a light chain variable region having a LCDR1, LCDR2, and LCDR3, wherein the HCDR1, HCDR2, and HCDR3 comprises an amino acid sequence of SEQ ID NOS: 17220, 10575, and 6044, respectively and the LCDR1, LCDR2, and LCDR3 comprises an amino acid sequence of SEQ ID NOS: 10223, 6199, and 11057, respectively.

[1004] The disclosure describes an antibody, antigen binding fragment, or polypeptide comprising a heavy chain variable region having a HCDR1, HCDR2, and HCDR3, and a light chain variable region having a LCDR1, LCDR2, and LCDR3, wherein the HCDR1, HCDR2, and HCDR3 comprises an amino acid sequence of SEQ ID NOS: 10368, 6782, and 9463, respectively and the LCDR1, LCDR2, and LCDR3 comprises an amino acid sequence of SEQ ID NOS: 16067, 4425, and 10717, respectively.

[1005] The disclosure describes an antibody, antigen binding fragment, or polypeptide comprising a heavy chain variable region having a HCDR1, HCDR2, and HCDR3, and a light chain variable region having a LCDR1, LCDR2, and LCDR3, wherein the HCDR1, HCDR2, and HCDR3 comprises an amino acid sequence of SEQ ID NOS:10939, 18112, and 16788, respectively and the LCDR1, LCDR2, and LCDR3 comprises an amino acid sequence of SEQ ID NOS:18422, 15521, and 11245, respectively.

[1006] The disclosure describes an antibody, antigen binding fragment, or polypeptide comprising a heavy chain variable region having a HCDR1, HCDR2, and HCDR3, and a light chain variable region having a LCDR1, LCDR2, and LCDR3, wherein the HCDR1, HCDR2, and HCDR3 comprises an amino acid sequence of SEQ ID NOS: 17466, 18439, and 9660, respectively and the LCDR1, LCDR2, and LCDR3 comprises an amino acid sequence of SEQ ID NOS:16440, 11612, and 11265, respectively.

[1007] The disclosure describes an antibody, antigen binding fragment, or polypeptide comprising a heavy chain variable region having a HCDR1, HCDR2, and HCDR3, and a light chain variable region having a LCDR1, LCDR2, and LCDR3, wherein the HCDR1, HCDR2, and HCDR3 comprises an amino acid sequence of SEQ ID NOS: 17459, 18497, and 6667, respectively and the LCDR1, LCDR2, and LCDR3 comprises an amino acid sequence of SEQ ID NOS: 16768, 16585, and 4288, respectively.

[1008] The disclosure describes an antibody, antigen binding fragment, or polypeptide comprising a heavy chain variable region having a HCDR1, HCDR2, and HCDR3, and a light chain variable region having a LCDR1, LCDR2, and LCDR3, wherein the HCDR1, HCDR2, and HCDR3 comprises an amino acid sequence of SEQ ID NOS: 16202, 18480, and 9530, respectively and the LCDR1, LCDR2, and LCDR3 comprises an amino acid sequence of SEQ ID NOS:16415, 10926, and 11273, respectively.

[1009] The disclosure describes an antibody, antigen binding fragment, or polypeptide comprising a heavy chain variable region having a HCDR1, HCDR2, and HCDR3, and a light chain variable region having a LCDR1, LCDR2, and LCDR3, wherein the HCDR1, HCDR2, and HCDR3 comprises an amino acid sequence of SEQ ID NOS:11658, 11480, and 16964, respectively and the LCDR1, LCDR2, and LCDR3 comprises an amino acid sequence of SEQ ID NOS:15784, 10918, and 12882, respectively.

[1010] The disclosure describes an antibody, antigen binding fragment, or polypeptide comprising a heavy chain variable region having a HCDR1, HCDR2, and HCDR3, and a light chain variable region having a LCDR1, LCDR2, and LCDR3, wherein the HCDR1, HCDR2, and HCDR3 comprises an amino acid sequence of SEQ ID NOS:17141, 16951, and 17993, respectively and the LCDR1, LCDR2, and LCDR3 comprises an amino acid sequence of SEQ ID NOS:11945, 10024, and 11591, respectively.

[1011] The disclosure describes an antibody, antigen binding fragment, or polypeptide comprising a heavy chain variable region having a HCDR1, HCDR2, and HCDR3, and a light chain variable region having a LCDR1, LCDR2, and LCDR3, wherein the HCDR1, HCDR2, and HCDR3 comprises an amino acid sequence of SEQ ID NOS:6508, 4105, and 4391, respectively and the LCDR1, LCDR2, and LCDR3 comprises an amino acid sequence of SEQ ID NOS:16470, 10987, and 11327, respectively. having a LCDR1, LCDR2, and LCDR3, wherein the HCDR1, HCDR2, and HCDR3 comprises an amino acid sequence of SEQ ID NOS:16170, 4390, and 4458, respectively and the LCDR1, LCDR2, and LCDR3 comprises an amino acid sequence of SEQ ID NOS:16438, 10926, and 11261, respectively.

[1012] The disclosure describes an antibody, antigen binding fragment, or polypeptide comprising a heavy chain variable region having a HCDR1, HCDR2, and HCDR3, and a light chain variable region having a LCDR1, LCDR2, and LCDR3, wherein the HCDR1, HCDR2, and HCDR3 comprises an amino acid sequence of SEQ ID NOS:9566, 6788, and 10161, respectively and the LCDR1, LCDR2, and LCDR3 comprises an amino acid sequence of SEQ ID NOS:15910, 16142, and 10467, respectively.

[1013] The disclosure describes an antibody, antigen binding fragment, or polypeptide comprising a heavy chain variable region having a HCDR1, HCDR2, and HCDR3, and a light chain variable region having a LCDR1, LCDR2, and LCDR3, wherein the HCDR1, HCDR2, and HCDR3 comprises an amino acid sequence of SEQ ID NOS: 17263, 9988, and 4043, respectively and the LCDR1, LCDR2, and LCDR3 comprises an amino acid sequence of SEQ ID NOS: 16061, 3974, and 12685, respectively.

[1014] The disclosure describes an antibody, antigen binding fragment, or polypeptide comprising a heavy chain variable region having a HCDR1, HCDR2, and HCDR3, and a light chain variable region having a LCDR1, LCDR2, and LCDR3, wherein the HCDR1, HCDR2, and HCDR3 comprises an amino acid sequence of SEQ ID NOS: 17649, 11476, and 6517, respectively and the LCDR1, LCDR2, and LCDR3 comprises an amino acid sequence of SEQ ID NOS:15627, 10696, and 12738, respectively.

[1015] The disclosure describes an antibody, antigen binding fragment, or polypeptide comprising a heavy chain variable region having a HCDR1, HCDR2, and HCDR3, and a light chain variable region having a LCDR1, LCDR2, and LCDR3, wherein the HCDR1, HCDR2, and HCDR3 comprises an amino acid sequence of SEQ ID NOS: 17466, 18538, and 0, respectively and the LCDR1, LCDR2, and LCDR3 comprises an amino acid sequence of SEQ ID NOS:16060, 10262, and 12671, respectively.

[1016] The disclosure describes an antibody, antigen binding fragment, or polypeptide comprising a heavy chain variable region having a HCDR1, HCDR2, and HCDR3, and a light chain variable region having a LCDR1, LCDR2, and LCDR3, wherein the HCDR1, HCDR2, and HCDR3 comprises an amino acid sequence of SEQ ID NOS: 10350, 18478, and 5925, respectively and the LCDR1, LCDR2, and LCDR3 comprises an amino acid sequence of SEQ ID NOS:16367, 10926, and 11258, respectively.

[1017] The disclosure describes an antibody, antigen binding fragment, or polypeptide comprising a heavy chain variable region having a HCDR1, HCDR2, and HCDR3, and a light chain variable region having a LCDR1, LCDR2, and LCDR3, wherein the HCDR1, HCDR2, and HCDR3 comprises an amino acid sequence of SEQ ID NOS:10774, 17999, and 11148, respectively and the LCDR1, LCDR2, and LCDR3 comprises an amino acid sequence of SEQ ID NOS:18073, 18596, and 11358, respectively.

[1018] The disclosure describes an antibody, antigen binding fragment, or polypeptide comprising a heavy chain variable region having a HCDR1, HCDR2, and HCDR3, and a light chain variable region having a LCDR1, LCDR2, and LCDR3, wherein the HCDR1, HCDR2, and HCDR3 comprises an amino acid sequence of SEQ ID NOS: 17646, 16260, and 9459, respectively and the LCDR1, LCDR2, and LCDR3 comprises an amino acid sequence of SEQ ID NOS:4240, 17231, and 11058, respectively.

[1019] The disclosure describes an antibody, antigen binding fragment, or polypeptide comprising a heavy chain variable region having a HCDR1, HCDR2, and HCDR3, and a light chain variable region having a LCDR1, LCDR2, and LCDR3, wherein the HCDR1, HCDR2, and HCDR3 comprises an amino acid sequence of SEQ ID NOS: 17842, 11473, and 6515, respectively and the LCDR1, LCDR2, and LCDR3 comprises an amino acid sequence of SEQ ID NOS:15890, 10696, and 11928, respectively.

[1020] The disclosure describes an antibody, antigen binding fragment, or polypeptide comprising a heavy chain variable region having a HCDR1, HCDR2, and HCDR3, and a light chain variable region having a LCDR1, LCDR2, and LCDR3, wherein the HCDR1, HCDR2, and HCDR3 comprises an amino acid sequence of SEQ ID NOS:18099, 9809, and 10978, respectively and the LCDR1, LCDR2, and LCDR3 comprises an amino acid sequence of SEQ ID NOS: 10784, 9272, and 11299, respectively.

[1021] The disclosure describes an antibody, antigen binding fragment, or polypeptide comprising a heavy chain variable region having a HCDR1, HCDR2, and HCDR3, and a light chain variable region having a LCDR1, LCDR2, and LCDR3, wherein the HCDR1, HCDR2, and HCDR3 comprises an amino acid sequence of SEQ ID NOS: 16524, 18373, and 6461, respectively and the LCDR1, LCDR2, and LCDR3 comprises an amino acid sequence of SEQ ID NOS: 16446, 9266, and 11287, respectively.

[1022] The disclosure describes an antibody, antigen binding fragment, or polypeptide comprising a heavy chain variable region having a HCDR1, HCDR2, and HCDR3, and a light chain variable region having a LCDR1, LCDR2, and LCDR3, wherein the HCDR1, HCDR2, and HCDR3 comprises an amino acid sequence of SEQ ID NOS: 17842, 11478, and 6516, respectively and the LCDR1, LCDR2, and LCDR3 comprises an amino acid sequence of SEQ ID NOS:16140, 10744, and 11934, respectively.

[1023] The disclosure describes an antibody, antigen binding fragment, or polypeptide comprising a heavy chain variable region having a HCDR1, HCDR2, and HCDR3, and a light chain variable region having a LCDR1, LCDR2, and LCDR3, wherein the HCDR1, HCDR2, and HCDR3 comprises an amino acid sequence of SEQ ID NOS:11636, 9912, and 6032, respectively and the LCDR1, LCDR2, and LCDR3 comprises an amino acid sequence of SEQ ID NOS:16416, 18275, and 12964, respectively.

[1024] The disclosure describes an antibody, antigen binding fragment, or polypeptide comprising a heavy chain variable region having a HCDR1, HCDR2, and HCDR3, and a light chain variable region having a LCDR1, LCDR2, and LCDR3, wherein the HCDR1, HCDR2, and HCDR3 comprises an amino acid sequence of SEQ ID NOS:16804, 16883, and 6481, respectively and the LCDR1, LCDR2, and LCDR3 comprises an amino acid sequence of SEQ ID NOS:16711, 10092, and 18228, respectively.

[1025] The disclosure describes an antibody, antigen binding fragment, or polypeptide comprising a heavy chain variable region having a HCDR1, HCDR2, and HCDR3, and a light chain variable region having a LCDR1, LCDR2, and LCDR3, wherein the HCDR1, HCDR2, and HCDR3 comprises an amino acid sequence of SEQ ID NOS:17263, 9834, and 18599, respectively and the LCDR1, LCDR2, and LCDR3 comprises an amino acid sequence of SEQ ID NOS: 15599, 4425, and 12368, respectively.

[1026] The disclosure describes an antibody, antigen binding fragment, or polypeptide comprising a heavy chain variable region having a HCDR1, HCDR2, and HCDR3, and a light chain variable region having a LCDR1, LCDR2, and LCDR3, wherein the HCDR1, HCDR2, and HCDR3 comprises an amino acid sequence of SEQ ID NOS:10423, 11029, and 16811, respectively and the LCDR1, LCDR2, and LCDR3 comprises an amino acid sequence of SEQ ID NOS: 15992, 9494, and 12566, respectively.

[1027] The disclosure describes an antibody, antigen binding fragment, or polypeptide comprising a heavy chain variable region having a HCDR1, HCDR2, and HCDR3, and a light chain variable region having a LCDR1, LCDR2, and LCDR3, wherein the HCDR1, HCDR2, and HCDR3 comprises an amino acid sequence of SEQ ID NOS: 11654, 18364, and 6130, respectively and the LCDR1, LCDR2, and LCDR3 comprises an amino acid sequence of SEQ ID NOS: 17142, 6208, and 11145, respectively.

[1028] The disclosure describes an antibody, antigen binding fragment, or polypeptide comprising a heavy chain variable region having a HCDR1, HCDR2, and HCDR3, and a light chain variable region having a LCDR1, LCDR2, and LCDR3, wherein the HCDR1, HCDR2, and HCDR3 comprises an amino acid sequence of SEQ ID NOS: 17619, 18351, and 4455, respectively and the LCDR1, LCDR2, and LCDR3 comprises an amino acid sequence of SEQ ID NOS:16373, 10926, and 11258, respectively.

[1029] The disclosure describes an antibody, antigen binding fragment, or polypeptide comprising a heavy chain variable region having a HCDR1, HCDR2, and HCDR3, and a light chain variable region having a LCDR1, LCDR2, and LCDR3, wherein the HCDR1, HCDR2, and HCDR3 comprises an amino acid sequence of SEQ ID NOS: 17432, 18525, and 6138, respectively and the LCDR1, LCDR2, and LCDR3 comprises an amino acid sequence of SEQ ID NOS: 16036, 9503, and 12775, respectively.

[1030] The disclosure describes an antibody, antigen binding fragment, or polypeptide comprising a heavy chain variable region having a HCDR1, HCDR2, and HCDR3, and a light chain variable region having a LCDR1, LCDR2, and LCDR3, wherein the HCDR1, HCDR2, and HCDR3 comprises an amino acid sequence of SEQ ID NOS: 17648, 11479, and 6514, respectively and the LCDR1, LCDR2, and LCDR3 comprises an amino acid sequence of SEQ ID NOS:15753, 10912, and 11933, respectively. having a LCDR1, LCDR2, and LCDR3, wherein the HCDR1, HCDR2, and HCDR3 comprises an amino acid sequence of SEQ ID NOS:11623, 10211, and 18608, respectively and the LCDR1, LCDR2, and LCDR3 comprises an amino acid sequence of SEQ ID NOS:15829, 10735, and 12817, respectively.

[1031] The disclosure describes an antibody, antigen binding fragment, or polypeptide comprising a heavy chain variable region having a HCDR1, HCDR2, and HCDR3, and a light chain variable region having a LCDR1, LCDR2, and LCDR3, wherein the HCDR1, HCDR2, and HCDR3 comprises an amino acid sequence of SEQ ID NOS:17270, 17778, and 7881, respectively and the LCDR1, LCDR2, and LCDR3 comprises an amino acid sequence of SEQ ID NOS: 15713, 3982, and 12949, respectively.

[1032] The disclosure describes an antibody, antigen binding fragment, or polypeptide comprising a heavy chain variable region having a HCDR1, HCDR2, and HCDR3, and a light chain variable region having a LCDR1, LCDR2, and LCDR3, wherein the HCDR1, HCDR2, and HCDR3 comprises an amino acid sequence of SEQ ID NOS:6500, 11020, and 17835, respectively and the LCDR1, LCDR2, and LCDR3 comprises an amino acid sequence of SEQ ID NOS:16408, 10987, and 11198, respectively.

[1033] The disclosure describes an antibody, antigen binding fragment, or polypeptide comprising a heavy chain variable region having a HCDR1, HCDR2, and HCDR3, and a light chain variable region having a LCDR1, LCDR2, and LCDR3, wherein the HCDR1, HCDR2, and HCDR3 comprises an amino acid sequence of SEQ ID NOS:11386, 9774, and 5917, respectively and the LCDR1, LCDR2, and LCDR3 comprises an amino acid sequence of SEQ ID NOS: 17950, 6312, and 17190, respectively.

[1034] The disclosure describes an antibody, antigen binding fragment, or polypeptide comprising a heavy chain variable region having a HCDR1, HCDR2, and HCDR3, and a light chain variable region having a LCDR1, LCDR2, and LCDR3, wherein the HCDR1, HCDR2, and HCDR3 comprises an amino acid sequence of SEQ ID NOS:16542, 11493, and 17687, respectively and the LCDR1, LCDR2, and LCDR3 comprises an amino acid sequence of SEQ ID NOS:10855, 18264, and 12931, respectively.

[1035] The disclosure describes an antibody, antigen binding fragment, or polypeptide comprising a heavy chain variable region having a HCDR1, HCDR2, and HCDR3, and a light chain variable region having a LCDR1, LCDR2, and LCDR3, wherein the HCDR1, HCDR2, and HCDR3 comprises an amino acid sequence of SEQ ID NOS:4248, 16513, and 6720, respectively and the LCDR1, LCDR2, and LCDR3 comprises an amino acid sequence of SEQ ID NOS:16355, 10924, and 11283, respectively.

[1036] The disclosure describes an antibody, antigen binding fragment, or polypeptide comprising a heavy chain variable region having a HCDR1, HCDR2, and HCDR3, and a light chain variable region having a LCDR1, LCDR2, and LCDR3, wherein the HCDR1, HCDR2, and HCDR3 comprises an amino acid sequence of SEQ ID NOS:17535, 10571, and 11129, respectively and the LCDR1, LCDR2, and LCDR3 comprises an amino acid sequence of SEQ ID NOS:17924, 10094, and 13581, respectively.

[1037] The disclosure describes an antibody, antigen binding fragment, or polypeptide comprising a heavy chain variable region having a HCDR1, HCDR2, and HCDR3, and a light chain variable region having a LCDR1, LCDR2, and LCDR3, wherein the HCDR1, HCDR2, and HCDR3 comprises an amino acid sequence of SEQ ID NOS: 10513, 18304, and 5953, respectively and the LCDR1, LCDR2, and LCDR3 comprises an amino acid sequence of SEQ ID NOS:16441, 17593, and 11258, respectively.

[1038] The disclosure describes an antibody, antigen binding fragment, or polypeptide comprising a heavy chain variable region having a HCDR1, HCDR2, and HCDR3, and a light chain variable region having a LCDR1, LCDR2, and LCDR3, wherein the HCDR1, HCDR2, and HCDR3 comprises an amino acid sequence of SEQ ID NOS:17632, 11546, and 11051, respectively and the LCDR1, LCDR2, and LCDR3 comprises an amino acid sequence of SEQ ID NOS:18425, 18275, and 12928, respectively.

[1039] The disclosure describes an antibody, antigen binding fragment, or polypeptide comprising a heavy chain variable region having a HCDR1, HCDR2, and HCDR3, and a light chain variable region having a LCDR1, LCDR2, and LCDR3, wherein the HCDR1, HCDR2, and HCDR3 comprises an amino acid sequence of SEQ ID NOS:16794, 16939, and 10378, respectively and the LCDR1, LCDR2, and LCDR3 comprises an amino acid sequence of SEQ ID NOS:17959, 6331, and 17190, respectively.

[1040] The disclosure describes an antibody, antigen binding fragment, or polypeptide comprising a heavy chain variable region having a HCDR1, HCDR2, and HCDR3, and a light chain variable region having a LCDR1, LCDR2, and LCDR3, wherein the HCDR1, HCDR2, and HCDR3 comprises an amino acid sequence of SEQ ID NOS:11679, 18000, and 11148, respectively and the LCDR1, LCDR2, and LCDR3 comprises an amino acid sequence of SEQ ID NOS:18073, 18596, and 11360, respectively.

[1041] The disclosure describes an antibody, antigen binding fragment, or polypeptide comprising a heavy chain variable region having a HCDR1, HCDR2, and HCDR3, and a light chain variable region having a LCDR1, LCDR2, and LCDR3, wherein the HCDR1, HCDR2, and HCDR3 comprises an amino acid sequence of SEQ ID NOS:17842, 11488, and 11062, respectively and the LCDR1, LCDR2, and LCDR3 comprises an amino acid sequence of SEQ ID NOS: 16408, 10987, and 11345, respectively.

[1042] The disclosure describes an antibody, antigen binding fragment, or polypeptide comprising a heavy chain variable region having a HCDR1, HCDR2, and HCDR3, and a light chain variable region having a LCDR1, LCDR2, and LCDR3, wherein the HCDR1, HCDR2, and HCDR3 comprises an amino acid sequence of SEQ ID NOS: 17842, 11477, and 6513, respectively and the LCDR1, LCDR2, and LCDR3 comprises an amino acid sequence of SEQ ID NOS:15738, 10696, and 11931, respectively.

[1043] The disclosure describes an antibody, antigen binding fragment, or polypeptide comprising a heavy chain variable region having a HCDR1, HCDR2, and HCDR3, and a light chain variable region having a LCDR1, LCDR2, and LCDR3, wherein the HCDR1, HCDR2, and HCDR3 comprises an amino acid sequence of SEQ ID NOS:16784, 16308, and 16970, respectively and the LCDR1, LCDR2, and LCDR3 comprises an amino acid sequence of SEQ ID NOS:16093, 9503, and 12814, respectively.

[1044] The disclosure describes an antibody, antigen binding fragment, or polypeptide comprising a heavy chain variable region having a HCDR1, HCDR2, and HCDR3, and a light chain variable region having a LCDR1, LCDR2, and LCDR3, wherein the HCDR1, HCDR2, and HCDR3 comprises an amino acid sequence of SEQ ID NOS: 17028, 17824, and 6114, respectively and the LCDR1, LCDR2, and LCDR3 comprises an amino acid sequence of SEQ ID NOS: 16076, 4425, and 10707, respectively.

[1045] The disclosure describes an antibody, antigen binding fragment, or polypeptide comprising a heavy chain variable region having a HCDR1, HCDR2, and HCDR3, and a light chain variable region having a LCDR1, LCDR2, and LCDR3, wherein the HCDR1, HCDR2, and HCDR3 comprises an amino acid sequence of SEQ ID NOS: 16998, 9830, and 4276, respectively and the LCDR1, LCDR2, and LCDR3 comprises an amino acid sequence of SEQ ID NOS:16650, 10747, and 13022, respectively.

[1046] The disclosure describes an antibody, antigen binding fragment, or polypeptide comprising a heavy chain variable region having a HCDR1, HCDR2, and HCDR3, and a light chain variable region having a LCDR1, LCDR2, and LCDR3, wherein the HCDR1, HCDR2, and HCDR3 comprises an amino acid sequence of SEQ ID NOS: 17854, 16514, and 6719, respectively and the LCDR1, LCDR2, and LCDR3 comprises an amino acid sequence of SEQ ID NOS:16438, 10926, and 11284, respectively.

[1047] The disclosure describes an antibody, antigen binding fragment, or polypeptide comprising a heavy chain variable region having a HCDR1, HCDR2, and HCDR3, and a light chain variable region having a LCDR1, LCDR2, and LCDR3, wherein the HCDR1, HCDR2, and HCDR3 comprises an amino acid sequence of SEQ ID NOS:17148, 18059, and 11148, respectively and the LCDR1, LCDR2, and LCDR3 comprises an amino acid sequence of SEQ ID NOS:18071, 18596, and 11180, respectively.

[1048] The disclosure describes an antibody, antigen binding fragment, or polypeptide comprising a heavy chain variable region having a HCDR1, HCDR2, and HCDR3, and a light chain variable region having a LCDR1, LCDR2, and LCDR3, wherein the HCDR1, HCDR2, and HCDR3 comprises an amino acid sequence of SEQ ID NOS: 11678, 11505, and 4496, respectively and the LCDR1, LCDR2, and LCDR3 comprises an amino acid sequence of SEQ ID NOS:15744, 17866, and 11936, respectively.

[1049] The disclosure describes an antibody, antigen binding fragment, or polypeptide comprising a heavy chain variable region having a HCDR1, HCDR2, and HCDR3, and a light chain variable region having a LCDR1, LCDR2, and LCDR3, wherein the HCDR1, HCDR2, and HCDR3 comprises an amino acid sequence of SEQ ID NOS:11669, 16881, and 6478, respectively and the LCDR1, LCDR2, and LCDR3 comprises an amino acid sequence of SEQ ID NOS: 16762, 5987, and 17673, respectively. having a LCDR1, LCDR2, and LCDR3, wherein the HCDR1, HCDR2, and HCDR3 comprises an amino acid sequence of SEQ ID NOS: 17854, 16512, and 6719, respectively and the LCDR1, LCDR2, and LCDR3 comprises an amino acid sequence of SEQ ID NOS:16342, 10926, and 11285, respectively.

[1050] The disclosure describes an antibody, antigen binding fragment, or polypeptide comprising a heavy chain variable region having a HCDR1, HCDR2, and HCDR3, and a light chain variable region having a LCDR1, LCDR2, and LCDR3, wherein the HCDR1, HCDR2, and HCDR3 comprises an amino acid sequence of SEQ ID NOS:10367, 18329, and 10554, respectively and the LCDR1, LCDR2, and LCDR3 comprises an amino acid sequence of SEQ ID NOS:4057, 6238, and 18625, respectively.

[1051] The disclosure describes an antibody, antigen binding fragment, or polypeptide comprising a heavy chain variable region having a HCDR1, HCDR2, and HCDR3, and a light chain variable region having a LCDR1, LCDR2, and LCDR3, wherein the HCDR1, HCDR2, and HCDR3 comprises an amino acid sequence of SEQ ID NOS: 11421, 10559, and 5897, respectively and the LCDR1, LCDR2, and LCDR3 comprises an amino acid sequence of SEQ ID NOS: 11785, 4420, and 12576, respectively.

[1052] The disclosure describes an antibody, antigen binding fragment, or polypeptide comprising a heavy chain variable region having a HCDR1, HCDR2, and HCDR3, and a light chain variable region having a LCDR1, LCDR2, and LCDR3, wherein the HCDR1, HCDR2, and HCDR3 comprises an amino acid sequence of SEQ ID NOS: 16518, 17742, and 6010, respectively and the LCDR1, LCDR2, and LCDR3 comprises an amino acid sequence of SEQ ID NOS:16138, 10698, and 12609, respectively.

[1053] The disclosure describes an antibody, antigen binding fragment, or polypeptide comprising a heavy chain variable region having a HCDR1, HCDR2, and HCDR3, and a light chain variable region having a LCDR1, LCDR2, and LCDR3, wherein the HCDR1, HCDR2, and HCDR3 comprises an amino acid sequence of SEQ ID NOS: 16195, 18305, and 5956, respectively and the LCDR1, LCDR2, and LCDR3 comprises an amino acid sequence of SEQ ID NOS: 16135, 9503, and 12767, respectively.

[1054] The disclosure describes an antibody, antigen binding fragment, or polypeptide comprising a heavy chain variable region having a HCDR1, HCDR2, and HCDR3, and a light chain variable region having a LCDR1, LCDR2, and LCDR3, wherein the HCDR1, HCDR2, and HCDR3 comprises an amino acid sequence of SEQ ID NOS: 17000, 18395, and 4577, respectively and the LCDR1, LCDR2, and LCDR3 comprises an amino acid sequence of SEQ ID NOS:16433, 15521, and 11287, respectively.

[1055] The disclosure describes an antibody, antigen binding fragment, or polypeptide comprising a heavy chain variable region having a HCDR1, HCDR2, and HCDR3, and a light chain variable region having a LCDR1, LCDR2, and LCDR3, wherein the HCDR1, HCDR2, and HCDR3 comprises an amino acid sequence of SEQ ID NOS:18638, 17807, and 10147, respectively and the LCDR1, LCDR2, and LCDR3 comprises an amino acid sequence of SEQ ID NOS: 17966, 6312, and 4380, respectively.

[1056] The disclosure describes an antibody, antigen binding fragment, or polypeptide comprising a heavy chain variable region having a HCDR1, HCDR2, and HCDR3, and a light chain variable region having a LCDR1, LCDR2, and LCDR3, wherein the HCDR1, HCDR2, and HCDR3 comprises an amino acid sequence of SEQ ID NOS:16538, 4148, and 11076, respectively and the LCDR1, LCDR2, and LCDR3 comprises an amino acid sequence of SEQ ID NOS: 15704, 3976, and 12826, respectively.

[1057] The disclosure describes an antibody, antigen binding fragment, or polypeptide comprising a heavy chain variable region having a HCDR1, HCDR2, and HCDR3, and a light chain variable region having a LCDR1, LCDR2, and LCDR3, wherein the HCDR1, HCDR2, and HCDR3 comprises an amino acid sequence of SEQ ID NOS: 17070, 18404, and 5937, respectively and the LCDR1, LCDR2, and LCDR3 comprises an amino acid sequence of SEQ ID NOS:16029, 10697, and 12095, respectively.

[1058] The disclosure describes an antibody, antigen binding fragment, or polypeptide comprising a heavy chain variable region having a HCDR1, HCDR2, and HCDR3, and a light chain variable region having a LCDR1, LCDR2, and LCDR3, wherein the HCDR1, HCDR2, and HCDR3 comprises an amino acid sequence of SEQ ID NOS: 17441, 18382, and 4576, respectively and the LCDR1, LCDR2, and LCDR3 comprises an amino acid sequence of SEQ ID NOS:16445, 15521, and 11287, respectively.

[1059] The disclosure describes an antibody, antigen binding fragment, or polypeptide comprising a heavy chain variable region having a HCDR1, HCDR2, and HCDR3, and a light chain variable region having a LCDR1, LCDR2, and LCDR3, wherein the HCDR1, HCDR2, and HCDR3 comprises an amino acid sequence of SEQ ID NOS:11630, 18431, and 10360, respectively and the LCDR1, LCDR2, and LCDR3 comprises an amino acid sequence of SEQ ID NOS: 16383, 10926, and 11272, respectively.

[1060] The disclosure describes an antibody, antigen binding fragment, or polypeptide comprising a heavy chain variable region having a HCDR1, HCDR2, and HCDR3, and a light chain variable region having a LCDR1, LCDR2, and LCDR3, wherein the HCDR1, HCDR2, and HCDR3 comprises an amino acid sequence of SEQ ID NOS:6529, 11031, and 10113, respectively and the LCDR1, LCDR2, and LCDR3 comprises an amino acid sequence of SEQ ID NOS: 16727, 5977, and 10268, respectively.

[1061] The disclosure describes an antibody, antigen binding fragment, or polypeptide comprising a heavy chain variable region having a HCDR1, HCDR2, and HCDR3, and a light chain variable region having a LCDR1, LCDR2, and LCDR3, wherein the HCDR1, HCDR2, and HCDR3 comprises an amino acid sequence of SEQ ID NOS: 16588, 6792, and 6538, respectively and the LCDR1, LCDR2, and LCDR3 comprises an amino acid sequence of SEQ ID NOS: 16082, 9494, and 12704, respectively.

[1062] The disclosure describes an antibody, antigen binding fragment, or polypeptide comprising a heavy chain variable region having a HCDR1, HCDR2, and HCDR3, and a light chain variable region having a LCDR1, LCDR2, and LCDR3, wherein the HCDR1, HCDR2, and HCDR3 comprises an amino acid sequence of SEQ ID NOS: 17556, 17787, and 6007, respectively and the LCDR1, LCDR2, and LCDR3 comprises an amino acid sequence of SEQ ID NOS: 17960, 6239, and 4359, respectively.

[1063] The disclosure describes an antibody, antigen binding fragment, or polypeptide comprising a heavy chain variable region having a HCDR1, HCDR2, and HCDR3, and a light chain variable region having a LCDR1, LCDR2, and LCDR3, wherein the HCDR1, HCDR2, and HCDR3 comprises an amino acid sequence of SEQ ID NOS: 11365, 11438, and 6042, respectively and the LCDR1, LCDR2, and LCDR3 comprises an amino acid sequence of SEQ ID NOS:16436, 10926, and 11295, respectively.

[1064] The disclosure describes an antibody, antigen binding fragment, or polypeptide comprising a heavy chain variable region having a HCDR1, HCDR2, and HCDR3, and a light chain variable region having a LCDR1, LCDR2, and LCDR3, wherein the HCDR1, HCDR2, and HCDR3 comprises an amino acid sequence of SEQ ID NOS:16351, 18508, and 17874, respectively and the LCDR1, LCDR2, and LCDR3 comprises an amino acid sequence of SEQ ID NOS:16481, 3969, and 11095, respectively.

[1065] The disclosure describes an antibody, antigen binding fragment, or polypeptide comprising a heavy chain variable region having a HCDR1, HCDR2, and HCDR3, and a light chain variable region having a LCDR1, LCDR2, and LCDR3, wherein the HCDR1, HCDR2, and HCDR3 comprises an amino acid sequence of SEQ ID NOS:17606, 18018, and 10358, respectively and the LCDR1, LCDR2, and LCDR3 comprises an amino acid sequence of SEQ ID NOS: 17902, 10094, and 13567, respectively.

[1066] The disclosure describes an antibody, antigen binding fragment, or polypeptide comprising a heavy chain variable region having a HCDR1, HCDR2, and HCDR3, and a light chain variable region having a LCDR1, LCDR2, and LCDR3, wherein the HCDR1, HCDR2, and HCDR3 comprises an amino acid sequence of SEQ ID NOS: 16575, 18580, and 7901, respectively and the LCDR1, LCDR2, and LCDR3 comprises an amino acid sequence of SEQ ID NOS:15766, 11695, and 12532, respectively.

[1067] The disclosure describes an antibody, antigen binding fragment, or polypeptide comprising a heavy chain variable region having a HCDR1, HCDR2, and HCDR3, and a light chain variable region having a LCDR1, LCDR2, and LCDR3, wherein the HCDR1, HCDR2, and HCDR3 comprises an amino acid sequence of SEQ ID NOS:17891, 18492, and 17048, respectively and the LCDR1, LCDR2, and LCDR3 comprises an amino acid sequence of SEQ ID NOS: 15879, 9502, and 12724, respectively.

[1068] The disclosure describes an antibody, antigen binding fragment, or polypeptide comprising a heavy chain variable region having a HCDR1, HCDR2, and HCDR3, and a light chain variable region having a LCDR1, LCDR2, and LCDR3, wherein the HCDR1, HCDR2, and HCDR3 comprises an amino acid sequence of SEQ ID NOS: 10694, 17764, and 9518, respectively and the LCDR1, LCDR2, and LCDR3 comprises an amino acid sequence of SEQ ID NOS:15847, 10705, and 11935, respectively. having a LCDR1, LCDR2, and LCDR3, wherein the HCDR1, HCDR2, and HCDR3 comprises an amino acid sequence of SEQ ID NOS:17643, 10573, and 10485, respectively and the LCDR1, LCDR2, and LCDR3 comprises an amino acid sequence of SEQ ID NOS: 10833, 9267, and 11312, respectively.

[1069] The disclosure describes an antibody, antigen binding fragment, or polypeptide comprising a heavy chain variable region having a HCDR1, HCDR2, and HCDR3, and a light chain variable region having a LCDR1, LCDR2, and LCDR3, wherein the HCDR1, HCDR2, and HCDR3 comprises an amino acid sequence of SEQ ID NOS:17443, 9411, and 10529, respectively and the LCDR1, LCDR2, and LCDR3 comprises an amino acid sequence of SEQ ID NOS:9641, 4464, and 15573, respectively.

[1070] The disclosure describes an antibody, antigen binding fragment, or polypeptide comprising a heavy chain variable region having a HCDR1, HCDR2, and HCDR3, and a light chain variable region having a LCDR1, LCDR2, and LCDR3, wherein the HCDR1, HCDR2, and HCDR3 comprises an amino acid sequence of SEQ ID NOS:6509, 9977, and, respectively and the LCDR1, LCDR2, and LCDR3 comprises an amino acid sequence of SEQ ID NOS: 15620, 3974, and 12791, respectively.

[1071] The disclosure describes an antibody, antigen binding fragment, or polypeptide comprising a heavy chain variable region having a HCDR1, HCDR2, and HCDR3, and a light chain variable region having a LCDR1, LCDR2, and LCDR3, wherein the HCDR1, HCDR2, and HCDR3 comprises an amino acid sequence of SEQ ID NOS:17130, 7803, and 7928, respectively and the LCDR1, LCDR2, and LCDR3 comprises an amino acid sequence of SEQ ID NOS:9639, 6632, and 15569, respectively.

[1072] The disclosure describes an antibody, antigen binding fragment, or polypeptide comprising a heavy chain variable region having a HCDR1, HCDR2, and HCDR3, and a light chain variable region having a LCDR1, LCDR2, and LCDR3, wherein the HCDR1, HCDR2, and HCDR3 comprises an amino acid sequence of SEQ ID NOS:4667, 10388, and 17548, respectively and the LCDR1, LCDR2, and LCDR3 comprises an amino acid sequence of SEQ ID NOS: 16482, 3944, and 12478, respectively.

[1073] The disclosure describes an antibody, antigen binding fragment, or polypeptide comprising a heavy chain variable region having a HCDR1, HCDR2, and HCDR3, and a light chain variable region having a LCDR1, LCDR2, and LCDR3, wherein the HCDR1, HCDR2, and HCDR3 comprises an amino acid sequence of SEQ ID NOS:11407, 11436, and 17695, respectively and the LCDR1, LCDR2, and LCDR3 comprises an amino acid sequence of SEQ ID NOS:17982, 9277, and 17111, respectively.

[1074] The disclosure describes an antibody, antigen binding fragment, or polypeptide comprising a heavy chain variable region having a HCDR1, HCDR2, and HCDR3, and a light chain variable region having a LCDR1, LCDR2, and LCDR3, wherein the HCDR1, HCDR2, and HCDR3 comprises an amino acid sequence of SEQ ID NOS: 11650, 9408, and 4398, respectively and the LCDR1, LCDR2, and LCDR3 comprises an amino acid sequence of SEQ ID NOS:15793, 10718, and 12011, respectively.

[1075] The disclosure describes an antibody, antigen binding fragment, or polypeptide comprising a heavy chain variable region having a HCDR1, HCDR2, and HCDR3, and a light chain variable region having a LCDR1, LCDR2, and LCDR3, wherein the HCDR1, HCDR2, and HCDR3 comprises an amino acid sequence of SEQ ID NOS:11673, 17817, and 4171, respectively and the LCDR1, LCDR2, and LCDR3 comprises an amino acid sequence of SEQ ID NOS:4058, 6333, and 17207, respectively.

[1076] The disclosure describes an antibody, antigen binding fragment, or polypeptide comprising a heavy chain variable region having a HCDR1, HCDR2, and HCDR3, and a light chain variable region having a LCDR1, LCDR2, and LCDR3, wherein the HCDR1, HCDR2, and HCDR3 comprises an amino acid sequence of SEQ ID NOS:6519, 11014, and 4507, respectively and the LCDR1, LCDR2, and LCDR3 comprises an amino acid sequence of SEQ ID NOS:16394, 10990, and 11202, respectively.

[1077] The disclosure describes an antibody, antigen binding fragment, or polypeptide comprising a heavy chain variable region having a HCDR1, HCDR2, and HCDR3, and a light chain variable region having a LCDR1, LCDR2, and LCDR3, wherein the HCDR1, HCDR2, and HCDR3 comprises an amino acid sequence of SEQ ID NOS: 17441, 18360, and 9529, respectively and the LCDR1, LCDR2, and LCDR3 comprises an amino acid sequence of SEQ ID NOS:15713, 3982, and 12388, respectively.

[1078] The disclosure describes an antibody, antigen binding fragment, or polypeptide comprising a heavy chain variable region having a HCDR1, HCDR2, and HCDR3, and a light chain variable region having a LCDR1, LCDR2, and LCDR3, wherein the HCDR1, HCDR2, and HCDR3 comprises an amino acid sequence of SEQ ID NOS:6529, 11032, and 10114, respectively and the LCDR1, LCDR2, and LCDR3 comprises an amino acid sequence of SEQ ID NOS: 16736, 5977, and 10269, respectively.

[1079] The disclosure describes an antibody, antigen binding fragment, or polypeptide comprising a heavy chain variable region having a HCDR1, HCDR2, and HCDR3, and a light chain variable region having a LCDR1, LCDR2, and LCDR3, wherein the HCDR1, HCDR2, and HCDR3 comprises an amino acid sequence of SEQ ID NOS:11650, 17806, and 10139, respectively and the LCDR1, LCDR2, and LCDR3 comprises an amino acid sequence of SEQ ID NOS:9633, 4472, and 15554, respectively.

[1080] The disclosure describes an antibody, antigen binding fragment, or polypeptide comprising a heavy chain variable region having a HCDR1, HCDR2, and HCDR3, and a light chain variable region having a LCDR1, LCDR2, and LCDR3, wherein the HCDR1, HCDR2, and HCDR3 comprises an amino acid sequence of SEQ ID NOS: 16527, 17749, and 5932, respectively and the LCDR1, LCDR2, and LCDR3 comprises an amino acid sequence of SEQ ID NOS:16396, 10987, and 11202, respectively.

[1081] The disclosure describes an antibody, antigen binding fragment, or polypeptide comprising a heavy chain variable region having a HCDR1, HCDR2, and HCDR3, and a light chain variable region having a LCDR1, LCDR2, and LCDR3, wherein the HCDR1, HCDR2, and HCDR3 comprises an amino acid sequence of SEQ ID NOS: 16518, 18195, and 6148, respectively and the LCDR1, LCDR2, and LCDR3 comprises an amino acid sequence of SEQ ID NOS:16029, 10697, and 12878, respectively.

[1082] The disclosure describes an antibody, antigen binding fragment, or polypeptide comprising a heavy chain variable region having a HCDR1, HCDR2, and HCDR3, and a light chain variable region having a LCDR1, LCDR2, and LCDR3, wherein the HCDR1, HCDR2, and HCDR3 comprises an amino acid sequence of SEQ ID NOS: 17114, 17786, and 6006, respectively and the LCDR1, LCDR2, and LCDR3 comprises an amino acid sequence of SEQ ID NOS: 17964, 6239, and 4388, respectively.

[1083] The disclosure describes an antibody, antigen binding fragment, or polypeptide comprising a heavy chain variable region having a HCDR1, HCDR2, and HCDR3, and a light chain variable region having a LCDR1, LCDR2, and LCDR3, wherein the HCDR1, HCDR2, and HCDR3 comprises an amino acid sequence of SEQ ID NOS:17441, 9824, and 10291, respectively and the LCDR1, LCDR2, and LCDR3 comprises an amino acid sequence of SEQ ID NOS:10890, 18275, and 12977, respectively.

[1084] The disclosure describes an antibody, antigen binding fragment, or polypeptide comprising a heavy chain variable region having a HCDR1, HCDR2, and HCDR3, and a light chain variable region having a LCDR1, LCDR2, and LCDR3, wherein the HCDR1, HCDR2, and HCDR3 comprises an amino acid sequence of SEQ ID NOS:6510, 9415, and 18254, respectively and the LCDR1, LCDR2, and LCDR3 comprises an amino acid sequence of SEQ ID NOS: 15887, 9503, and 12793, respectively.

[1085] The disclosure describes an antibody, antigen binding fragment, or polypeptide comprising a heavy chain variable region having a HCDR1, HCDR2, and HCDR3, and a light chain variable region having a LCDR1, LCDR2, and LCDR3, wherein the HCDR1, HCDR2, and HCDR3 comprises an amino acid sequence of SEQ ID NOS:6529, 11032, and 10114, respectively and the LCDR1, LCDR2, and LCDR3 comprises an amino acid sequence of SEQ ID NOS: 16736, 5977, and 10269, respectively.

[1086] The disclosure describes an antibody, antigen binding fragment, or polypeptide comprising a heavy chain variable region having a HCDR1, HCDR2, and HCDR3, and a light chain variable region having a LCDR1, LCDR2, and LCDR3, wherein the HCDR1, HCDR2, and HCDR3 comprises an amino acid sequence of SEQ ID NOS:11641, 6735, and 10979, respectively and the LCDR1, LCDR2, and LCDR3 comprises an amino acid sequence of SEQ ID NOS:15631, 10241, and 12342, respectively.

[1087] The disclosure describes an antibody, antigen binding fragment, or polypeptide comprising a heavy chain variable region having a HCDR1, HCDR2, and HCDR3, and a light chain variable region having a LCDR1, LCDR2, and LCDR3, wherein the HCDR1, HCDR2, and HCDR3 comprises an amino acid sequence of SEQ ID NOS:17443, 17806, and 10140, respectively and the LCDR1, LCDR2, and LCDR3 comprises an amino acid sequence of SEQ ID NOS:9631, 4467, and 15554, respectively. having a LCDR1, LCDR2, and LCDR3, wherein the HCDR1, HCDR2, and HCDR3 comprises an amino acid sequence of SEQ ID NOS:17279, 9741, and 17241, respectively and the LCDR1, LCDR2, and LCDR3 comprises an amino acid sequence of SEQ ID NOS: 15701, 3982, and 12095, respectively.

[1088] The disclosure describes an antibody, antigen binding fragment, or polypeptide comprising a heavy chain variable region having a HCDR1, HCDR2, and HCDR3, and a light chain variable region having a LCDR1, LCDR2, and LCDR3, wherein the HCDR1, HCDR2, and HCDR3 comprises an amino acid sequence of SEQ ID NOS: 17278, 18339, and 5957, respectively and the LCDR1, LCDR2, and LCDR3 comprises an amino acid sequence of SEQ ID NOS: 17962, 6244, and 4350, respectively.

[1089] The disclosure describes an antibody, antigen binding fragment, or polypeptide comprising a heavy chain variable region having a HCDR1, HCDR2, and HCDR3, and a light chain variable region having a LCDR1, LCDR2, and LCDR3, wherein the HCDR1, HCDR2, and HCDR3 comprises an amino acid sequence of SEQ ID NOS: 17891, 18492, and 9422, respectively and the LCDR1, LCDR2, and LCDR3 comprises an amino acid sequence of SEQ ID NOS: 15879, 9502, and 12724, respectively.

[1090] The disclosure describes an antibody, antigen binding fragment, or polypeptide comprising a heavy chain variable region having a HCDR1, HCDR2, and HCDR3, and a light chain variable region having a LCDR1, LCDR2, and LCDR3, wherein the HCDR1, HCDR2, and HCDR3 comprises an amino acid sequence of SEQ ID NOS: 17621, 17793, and 4629, respectively and the LCDR1, LCDR2, and LCDR3 comprises an amino acid sequence of SEQ ID NOS: 16492, 4425, and 12448, respectively.

[1091] The disclosure describes an antibody, antigen binding fragment, or polypeptide comprising a heavy chain variable region having a HCDR1, HCDR2, and HCDR3, and a light chain variable region having a LCDR1, LCDR2, and LCDR3, wherein the HCDR1, HCDR2, and HCDR3 comprises an amino acid sequence of SEQ ID NOS: 16524, 18378, and 5903, respectively and the LCDR1, LCDR2, and LCDR3 comprises an amino acid sequence of SEQ ID NOS:16471, 11611, and 11257, respectively.

[1092] The disclosure describes an antibody, antigen binding fragment, or polypeptide comprising a heavy chain variable region having a HCDR1, HCDR2, and HCDR3, and a light chain variable region having a LCDR1, LCDR2, and LCDR3, wherein the HCDR1, HCDR2, and HCDR3 comprises an amino acid sequence of SEQ ID NOS:16690, 9412, and 7927, respectively and the LCDR1, LCDR2, and LCDR3 comprises an amino acid sequence of SEQ ID NOS:16642, 16164, and 13334, respectively.

[1093] The disclosure describes an antibody, antigen binding fragment, or polypeptide comprising a heavy chain variable region having a HCDR1, HCDR2, and HCDR3, and a light chain variable region having a LCDR1, LCDR2, and LCDR3, wherein the HCDR1, HCDR2, and HCDR3 comprises an amino acid sequence of SEQ ID NOS:11633, 16973, and 17860, respectively and the LCDR1, LCDR2, and LCDR3 comprises an amino acid sequence of SEQ ID NOS:9637, 4472, and 15564, respectively.

[1094] The disclosure describes an antibody, antigen binding fragment, or polypeptide comprising a heavy chain variable region having a HCDR1, HCDR2, and HCDR3, and a light chain variable region having a LCDR1, LCDR2, and LCDR3, wherein the HCDR1, HCDR2, and HCDR3 comprises an amino acid sequence of SEQ ID NOS:11641, 6736, and 10980, respectively and the LCDR1, LCDR2, and LCDR3 comprises an amino acid sequence of SEQ ID NOS:16339, 10244, and 12340, respectively.

[1095] The disclosure describes an antibody, antigen binding fragment, or polypeptide comprising a heavy chain variable region having a HCDR1, HCDR2, and HCDR3, and a light chain variable region having a LCDR1, LCDR2, and LCDR3, wherein the HCDR1, HCDR2, and HCDR3 comprises an amino acid sequence of SEQ ID NOS:4630, 11013, and 10226, respectively and the LCDR1, LCDR2, and LCDR3 comprises an amino acid sequence of SEQ ID NOS:10819, 9267, and 11331, respectively.

[1096] The disclosure describes an antibody, antigen binding fragment, or polypeptide comprising a heavy chain variable region having a HCDR1, HCDR2, and HCDR3, and a light chain variable region having a LCDR1, LCDR2, and LCDR3, wherein the HCDR1, HCDR2, and HCDR3 comprises an amino acid sequence of SEQ ID NOS:17274, 9950, and 11375, respectively and the LCDR1, LCDR2, and LCDR3 comprises an amino acid sequence of SEQ ID NOS:17970, 9261, and 4342, respectively.

[1097] The disclosure describes an antibody, antigen binding fragment, or polypeptide comprising a heavy chain variable region having a HCDR1, HCDR2, and HCDR3, and a light chain variable region having a LCDR1, LCDR2, and LCDR3, wherein the HCDR1, HCDR2, and HCDR3 comprises an amino acid sequence of SEQ ID NOS:11650, 17806, and 10138, respectively and the LCDR1, LCDR2, and LCDR3 comprises an amino acid sequence of SEQ ID NOS:9588, 5984, and 15556, respectively.

[1098] The disclosure describes an antibody, antigen binding fragment, or polypeptide comprising a heavy chain variable region having a HCDR1, HCDR2, and HCDR3, and a light chain variable region having a LCDR1, LCDR2, and LCDR3, wherein the HCDR1, HCDR2, and HCDR3 comprises an amino acid sequence of SEQ ID NOS: 11638, 17785, and 4507, respectively and the LCDR1, LCDR2, and LCDR3 comprises an amino acid sequence of SEQ ID NOS:16397, 10990, and 11202, respectively.

[1099] The disclosure describes an antibody, antigen binding fragment, or polypeptide comprising a heavy chain variable region having a HCDR1, HCDR2, and HCDR3, and a light chain variable region having a LCDR1, LCDR2, and LCDR3, wherein the HCDR1, HCDR2, and HCDR3 comprises an amino acid sequence of SEQ ID NOS: 11633, 16876, and 6464, respectively and the LCDR1, LCDR2, and LCDR3 comprises an amino acid sequence of SEQ ID NOS: 16718, 11555, and 4286, respectively.

[1100] The disclosure describes an antibody, antigen binding fragment, or polypeptide comprising a heavy chain variable region having a HCDR1, HCDR2, and HCDR3, and a light chain variable region having a LCDR1, LCDR2, and LCDR3, wherein the HCDR1, HCDR2, and HCDR3 comprises an amino acid sequence of SEQ ID NOS: 11620, 16278, and 4020, respectively and the LCDR1, LCDR2, and LCDR3 comprises an amino acid sequence of SEQ ID NOS:16655, 16505, and 11740, respectively.

[1101] The disclosure describes an antibody, antigen binding fragment, or polypeptide comprising a heavy chain variable region having a HCDR1, HCDR2, and HCDR3, and a light chain variable region having a LCDR1, LCDR2, and LCDR3, wherein the HCDR1, HCDR2, and HCDR3 comprises an amino acid sequence of SEQ ID NOS:17558, 11009, and 16348, respectively and the LCDR1, LCDR2, and LCDR3 comprises an amino acid sequence of SEQ ID NOS:10844, 18275, and 12939, respectively.

[1102] The disclosure describes an antibody, antigen binding fragment, or polypeptide comprising a heavy chain variable region having a HCDR1, HCDR2, and HCDR3, and a light chain variable region having a LCDR1, LCDR2, and LCDR3, wherein the HCDR1, HCDR2, and HCDR3 comprises an amino acid sequence of SEQ ID NOS:17842, 11488, and 15581, respectively and the LCDR1, LCDR2, and LCDR3 comprises an amino acid sequence of SEQ ID NOS: 15893, 3969, and 12517, respectively.

[1103] The disclosure describes an antibody, antigen binding fragment, or polypeptide comprising a heavy chain variable region having a HCDR1, HCDR2, and HCDR3, and a light chain variable region having a LCDR1, LCDR2, and LCDR3, wherein the HCDR1, HCDR2, and HCDR3 comprises an amino acid sequence of SEQ ID NOS:6507, 9964, and 9546, respectively and the LCDR1, LCDR2, and LCDR3 comprises an amino acid sequence of SEQ ID NOS: 15611, 9503, and 12766, respectively.

[1104] The disclosure describes an antibody, antigen binding fragment, or polypeptide comprising a heavy chain variable region having a HCDR1, HCDR2, and HCDR3, and a light chain variable region having a LCDR1, LCDR2, and LCDR3, wherein the HCDR1, HCDR2, and HCDR3 comprises an amino acid sequence of SEQ ID NOS:17263, 9776, and 16820, respectively and the LCDR1, LCDR2, and LCDR3 comprises an amino acid sequence of SEQ ID NOS:17924, 10094, and 13579, respectively.

[1105] The disclosure describes an antibody, antigen binding fragment, or polypeptide comprising a heavy chain variable region having a HCDR1, HCDR2, and HCDR3, and a light chain variable region having a LCDR1, LCDR2, and LCDR3, wherein the HCDR1, HCDR2, and HCDR3 comprises an amino acid sequence of SEQ ID NOS:9579, 16274, and 11722, respectively and the LCDR1, LCDR2, and LCDR3 comprises an amino acid sequence of SEQ ID NOS: 17915, 6629, and 13332, respectively.

[1106] The disclosure describes an antibody, antigen binding fragment, or polypeptide comprising a heavy chain variable region having a HCDR1, HCDR2, and HCDR3, and a light chain variable region having a LCDR1, LCDR2, and LCDR3, wherein the HCDR1, HCDR2, and HCDR3 comprises an amino acid sequence of SEQ ID NOS: 11650, 9408, and 4398, respectively and the LCDR1, LCDR2, and LCDR3 comprises an amino acid sequence of SEQ ID NOS:15948, 10729, and 12860, respectively. having a LCDR1, LCDR2, and LCDR3, wherein the HCDR1, HCDR2, and HCDR3 comprises an amino acid sequence of SEQ ID NOS:4634, 16284, and 11681, respectively and the LCDR1, LCDR2, and LCDR3 comprises an amino acid sequence of SEQ ID NOS: 15675, 3982, and 12552, respectively.

[1107] The disclosure describes an antibody, antigen binding fragment, or polypeptide comprising a heavy chain variable region having a HCDR1, HCDR2, and HCDR3, and a light chain variable region having a LCDR1, LCDR2, and LCDR3, wherein the HCDR1, HCDR2, and HCDR3 comprises an amino acid sequence of SEQ ID NOS:17553, 6790, and 6169, respectively and the LCDR1, LCDR2, and LCDR3 comprises an amino acid sequence of SEQ ID NOS: 15971, 9488, and 11986, respectively.

[1108] The disclosure describes an antibody, antigen binding fragment, or polypeptide comprising a heavy chain variable region having a HCDR1, HCDR2, and HCDR3, and a light chain variable region having a LCDR1, LCDR2, and LCDR3, wherein the HCDR1, HCDR2, and HCDR3 comprises an amino acid sequence of SEQ ID NOS:11423, 18476, and 10512, respectively and the LCDR1, LCDR2, and LCDR3 comprises an amino acid sequence of SEQ ID NOS:10878, 18275, and 12930, respectively.

[1109] The disclosure describes an antibody, antigen binding fragment, or polypeptide comprising a heavy chain variable region having a HCDR1, HCDR2, and HCDR3, and a light chain variable region having a LCDR1, LCDR2, and LCDR3, wherein the HCDR1, HCDR2, and HCDR3 comprises an amino acid sequence of SEQ ID NOS:17466, 18496, and 17051, respectively and the LCDR1, LCDR2, and LCDR3 comprises an amino acid sequence of SEQ ID NOS:16128, 9503, and 12775, respectively.

[1110] The disclosure describes an antibody, antigen binding fragment, or polypeptide comprising a heavy chain variable region having a HCDR1, HCDR2, and HCDR3, and a light chain variable region having a LCDR1, LCDR2, and LCDR3, wherein the HCDR1, HCDR2, and HCDR3 comprises an amino acid sequence of SEQ ID NOS:11668, 16902, and 11966, respectively and the LCDR1, LCDR2, and LCDR3 comprises an amino acid sequence of SEQ ID NOS: 15638, 9503, and 12366, respectively.

[1111] The disclosure describes an antibody, antigen binding fragment, or polypeptide comprising a heavy chain variable region having a HCDR1, HCDR2, and HCDR3, and a light chain variable region having a LCDR1, LCDR2, and LCDR3, wherein the HCDR1, HCDR2, and HCDR3 comprises an amino acid sequence of SEQ ID NOS:17642, 11137, and 17056, respectively and the LCDR1, LCDR2, and LCDR3 comprises an amino acid sequence of SEQ ID NOS: 17933, 6331, and 10235, respectively.

[1112] The disclosure describes an antibody, antigen binding fragment, or polypeptide comprising a heavy chain variable region having a HCDR1, HCDR2, and HCDR3, and a light chain variable region having a LCDR1, LCDR2, and LCDR3, wherein the HCDR1, HCDR2, and HCDR3 comprises an amino acid sequence of SEQ ID NOS: 17880, 18249, and 8076, respectively and the LCDR1, LCDR2, and LCDR3 comprises an amino acid sequence of SEQ ID NOS: 15958, 9503, and 12891, respectively.

[1113] The disclosure describes an antibody, antigen binding fragment, or polypeptide comprising a heavy chain variable region having a HCDR1, HCDR2, and HCDR3, and a light chain variable region having a LCDR1, LCDR2, and LCDR3, wherein the HCDR1, HCDR2, and HCDR3 comprises an amino acid sequence of SEQ ID NOS:6505, 9415, and 17728, respectively and the LCDR1, LCDR2, and LCDR3 comprises an amino acid sequence of SEQ ID NOS: 15887, 9503, and 12733, respectively.

[1114] The disclosure describes an antibody, antigen binding fragment, or polypeptide comprising a heavy chain variable region having a HCDR1, HCDR2, and HCDR3, and a light chain variable region having a LCDR1, LCDR2, and LCDR3, wherein the HCDR1, HCDR2, and HCDR3 comprises an amino acid sequence of SEQ ID NOS: 17891, 18492, and 9423, respectively and the LCDR1, LCDR2, and LCDR3 comprises an amino acid sequence of SEQ ID NOS: 15758, 9503, and 12586, respectively.

[1115] The disclosure describes an antibody, antigen binding fragment, or polypeptide comprising a heavy chain variable region having a HCDR1, HCDR2, and HCDR3, and a light chain variable region having a LCDR1, LCDR2, and LCDR3, wherein the HCDR1, HCDR2, and HCDR3 comprises an amino acid sequence of SEQ ID NOS:17432, 18520, and 18144, respectively and the LCDR1, LCDR2, and LCDR3 comprises an amino acid sequence of SEQ ID NOS:17892, 18629, and 11182, respectively.

[1116] The disclosure describes an antibody, antigen binding fragment, or polypeptide comprising a heavy chain variable region having a HCDR1, HCDR2, and HCDR3, and a light chain variable region having a LCDR1, LCDR2, and LCDR3, wherein the HCDR1, HCDR2, and HCDR3 comprises an amino acid sequence of SEQ ID NOS:6529, 11032, and 10114, respectively and the LCDR1, LCDR2, and LCDR3 comprises an amino acid sequence of SEQ ID NOS: 16736, 5968, and 10269, respectively.

[1117] The disclosure describes an antibody, antigen binding fragment, or polypeptide comprising a heavy chain variable region having a HCDR1, HCDR2, and HCDR3, and a light chain variable region having a LCDR1, LCDR2, and LCDR3, wherein the HCDR1, HCDR2, and HCDR3 comprises an amino acid sequence of SEQ ID NOS:16692, 9414, and 6179, respectively and the LCDR1, LCDR2, and LCDR3 comprises an amino acid sequence of SEQ ID NOS: 16085, 9503, and 12587, respectively.

[1118] The disclosure describes an antibody, antigen binding fragment, or polypeptide comprising a heavy chain variable region having a HCDR1, HCDR2, and HCDR3, and a light chain variable region having a LCDR1, LCDR2, and LCDR3, wherein the HCDR1, HCDR2, and HCDR3 comprises an amino acid sequence of SEQ ID NOS: 17607, 17783, and 7909, respectively and the LCDR1, LCDR2, and LCDR3 comprises an amino acid sequence of SEQ ID NOS: 16045, 9464, and 12886, respectively.

[1119] The disclosure describes an antibody, antigen binding fragment, or polypeptide comprising a heavy chain variable region having a HCDR1, HCDR2, and HCDR3, and a light chain variable region having a LCDR1, LCDR2, and LCDR3, wherein the HCDR1, HCDR2, and HCDR3 comprises an amino acid sequence of SEQ ID NOS:11352, 4151, and 5914, respectively and the LCDR1, LCDR2, and LCDR3 comprises an amino acid sequence of SEQ ID NOS: 15711, 3969, and 12469, respectively.

[1120] The disclosure describes an antibody, antigen binding fragment, or polypeptide comprising a heavy chain variable region having a HCDR1, HCDR2, and HCDR3, and a light chain variable region having a LCDR1, LCDR2, and LCDR3, wherein the HCDR1, HCDR2, and HCDR3 comprises an amino acid sequence of SEQ ID NOS:17141, 16954, and 10508, respectively and the LCDR1, LCDR2, and LCDR3 comprises an amino acid sequence of SEQ ID NOS: 16045, 9503, and 12790, respectively.

[1121] The disclosure describes an antibody, antigen binding fragment, or polypeptide comprising a heavy chain variable region having a HCDR1, HCDR2, and HCDR3, and a light chain variable region having a LCDR1, LCDR2, and LCDR3, wherein the HCDR1, HCDR2, and HCDR3 comprises an amino acid sequence of SEQ ID NOS: 16527, 17750, and 5933, respectively and the LCDR1, LCDR2, and LCDR3 comprises an amino acid sequence of SEQ ID NOS:16395, 10987, and 11202, respectively.

[1122] The disclosure describes an antibody, antigen binding fragment, or polypeptide comprising a heavy chain variable region having a HCDR1, HCDR2, and HCDR3, and a light chain variable region having a LCDR1, LCDR2, and LCDR3, wherein the HCDR1, HCDR2, and HCDR3 comprises an amino acid sequence of SEQ ID NOS:6507, 9976, and 9603, respectively and the LCDR1, LCDR2, and LCDR3 comprises an amino acid sequence of SEQ ID NOS: 15637, 4435, and 12761, respectively.

[1123] The disclosure describes an antibody, antigen binding fragment, or polypeptide comprising a heavy chain variable region having a HCDR1, HCDR2, and HCDR3, and a light chain variable region having a LCDR1, LCDR2, and LCDR3, wherein the HCDR1, HCDR2, and HCDR3 comprises an amino acid sequence of SEQ ID NOS: 17275, 16898, and 6462, respectively and the LCDR1, LCDR2, and LCDR3 comprises an amino acid sequence of SEQ ID NOS:16722, 10074, and 17667, respectively.

[1124] The disclosure describes an antibody, antigen binding fragment, or polypeptide comprising a heavy chain variable region having a HCDR1, HCDR2, and HCDR3, and a light chain variable region having a LCDR1, LCDR2, and LCDR3, wherein the HCDR1, HCDR2, and HCDR3 comprises an amino acid sequence of SEQ ID NOS:18638, 17811, and 10145, respectively and the LCDR1, LCDR2, and LCDR3 comprises an amino acid sequence of SEQ ID NOS: 17968, 9275, and 4359, respectively.

[1125] The disclosure describes an antibody, antigen binding fragment, or polypeptide comprising a heavy chain variable region having a HCDR1, HCDR2, and HCDR3, and a light chain variable region having a LCDR1, LCDR2, and LCDR3, wherein the HCDR1, HCDR2, and HCDR3 comprises an amino acid sequence of SEQ ID NOS: 11650, 17770, and 5915, respectively and the LCDR1, LCDR2, and LCDR3 comprises an amino acid sequence of SEQ ID NOS:11951, 10024, and 11589, respectively. having a LCDR1, LCDR2, and LCDR3, wherein the HCDR1, HCDR2, and HCDR3 comprises an amino acid sequence of SEQ ID NOS:10494, 16981, and 6012, respectively and the LCDR1, LCDR2, and LCDR3 comprises an amino acid sequence of SEQ ID NOS: 16014, 9488, and 12884, respectively.

[1126] The disclosure describes an antibody, antigen binding fragment, or polypeptide comprising a heavy chain variable region having a HCDR1, HCDR2, and HCDR3, and a light chain variable region having a LCDR1, LCDR2, and LCDR3, wherein the HCDR1, HCDR2, and HCDR3 comprises an amino acid sequence of SEQ ID NOS:6529, 11032, and 10112, respectively and the LCDR1, LCDR2, and LCDR3 comprises an amino acid sequence of SEQ ID NOS: 16736, 5977, and 10268, respectively.

[1127] The disclosure describes an antibody, antigen binding fragment, or polypeptide comprising a heavy chain variable region having a HCDR1, HCDR2, and HCDR3, and a light chain variable region having a LCDR1, LCDR2, and LCDR3, wherein the HCDR1, HCDR2, and HCDR3 comprises an amino acid sequence of SEQ ID NOS: 17843, 11506, and 6043, respectively and the LCDR1, LCDR2, and LCDR3 comprises an amino acid sequence of SEQ ID NOS:16434, 10923, and 11287, respectively.

[1128] The disclosure describes an antibody, antigen binding fragment, or polypeptide comprising a heavy chain variable region having a HCDR1, HCDR2, and HCDR3, and a light chain variable region having a LCDR1, LCDR2, and LCDR3, wherein the HCDR1, HCDR2, and HCDR3 comprises an amino acid sequence of SEQ ID NOS: 16803, 18340, and 5957, respectively and the LCDR1, LCDR2, and LCDR3 comprises an amino acid sequence of SEQ ID NOS: 17898, 6244, and 4349, respectively.

[1129] The disclosure describes an antibody, antigen binding fragment, or polypeptide comprising a heavy chain variable region having a HCDR1, HCDR2, and HCDR3, and a light chain variable region having a LCDR1, LCDR2, and LCDR3, wherein the HCDR1, HCDR2, and HCDR3 comprises an amino acid sequence of SEQ ID NOS:11650, 17806, and 10137, respectively and the LCDR1, LCDR2, and LCDR3 comprises an amino acid sequence of SEQ ID NOS:9628, 4467, and 15554, respectively.

[1130] The disclosure describes an antibody, antigen binding fragment, or polypeptide comprising a heavy chain variable region having a HCDR1, HCDR2, and HCDR3, and a light chain variable region having a LCDR1, LCDR2, and LCDR3, wherein the HCDR1, HCDR2, and HCDR3 comprises an amino acid sequence of SEQ ID NOS:6530, 9375, and 16580, respectively and the LCDR1, LCDR2, and LCDR3 comprises an amino acid sequence of SEQ ID NOS:16435, 10926, and 11271, respectively.

[1131] The disclosure describes an antibody, antigen binding fragment, or polypeptide comprising a heavy chain variable region having a HCDR1, HCDR2, and HCDR3, and a light chain variable region having a LCDR1, LCDR2, and LCDR3, wherein the HCDR1, HCDR2, and HCDR3 comprises an amino acid sequence of SEQ ID NOS: 17621, 17801, and 7909, respectively and the LCDR1, LCDR2, and LCDR3 comprises an amino acid sequence of SEQ ID NOS: 16045, 9464, and 12864, respectively.

[1132] The disclosure describes an antibody, antigen binding fragment, or polypeptide comprising a heavy chain variable region having a HCDR1, HCDR2, and HCDR3, and a light chain variable region having a LCDR1, LCDR2, and LCDR3, wherein the HCDR1, HCDR2, and HCDR3 comprises an amino acid sequence of SEQ ID NOS:11626, 18430, and 10361, respectively and the LCDR1, LCDR2, and LCDR3 comprises an amino acid sequence of SEQ ID NOS: 16383, 10926, and 11272, respectively.

[1133] The disclosure describes an antibody, antigen binding fragment, or polypeptide comprising a heavy chain variable region having a HCDR1, HCDR2, and HCDR3, and a light chain variable region having a LCDR1, LCDR2, and LCDR3, wherein the HCDR1, HCDR2, and HCDR3 comprises an amino acid sequence of SEQ ID NOS:6566, 11462, and 6197, respectively and the LCDR1, LCDR2, and LCDR3 comprises an amino acid sequence of SEQ ID NOS:16391, 10927, and 11275, respectively.

[1134] The disclosure describes an antibody, antigen binding fragment, or polypeptide comprising a heavy chain variable region having a HCDR1, HCDR2, and HCDR3, and a light chain variable region having a LCDR1, LCDR2, and LCDR3, wherein the HCDR1, HCDR2, and HCDR3 comprises an amino acid sequence of SEQ ID NOS: 11647, 18433, and 5929, respectively and the LCDR1, LCDR2, and LCDR3 comprises an amino acid sequence of SEQ ID NOS: 16444, 9266, and 11272, respectively.

[1135] The disclosure describes an antibody, antigen binding fragment, or polypeptide comprising a heavy chain variable region having a HCDR1, HCDR2, and HCDR3, and a light chain variable region having a LCDR1, LCDR2, and LCDR3, wherein the HCDR1, HCDR2, and HCDR3 comprises an amino acid sequence of SEQ ID NOS: 17621, 17774, and 4511, respectively and the LCDR1, LCDR2, and LCDR3 comprises an amino acid sequence of SEQ ID NOS: 16067, 4423, and 12417, respectively.

[1136] The disclosure describes an antibody, antigen binding fragment, or polypeptide comprising a heavy chain variable region having a HCDR1, HCDR2, and HCDR3, and a light chain variable region having a LCDR1, LCDR2, and LCDR3, wherein the HCDR1, HCDR2, and HCDR3 comprises an amino acid sequence of SEQ ID NOS: 10944, 18390, and 5930, respectively and the LCDR1, LCDR2, and LCDR3 comprises an amino acid sequence of SEQ ID NOS: 16443, 9481, and 11257, respectively.

[1137] The disclosure describes an antibody, antigen binding fragment, or polypeptide comprising a heavy chain variable region having a HCDR1, HCDR2, and HCDR3, and a light chain variable region having a LCDR1, LCDR2, and LCDR3, wherein the HCDR1, HCDR2, and HCDR3 comprises an amino acid sequence of SEQ ID NOS:11650, 17805, and 10146, respectively and the LCDR1, LCDR2, and LCDR3 comprises an amino acid sequence of SEQ ID NOS: 17966, 9261, and 4342, respectively.

[1138] The disclosure describes an antibody, antigen binding fragment, or polypeptide comprising a heavy chain variable region having a HCDR1, HCDR2, and HCDR3, and a light chain variable region having a LCDR1, LCDR2, and LCDR3, wherein the HCDR1, HCDR2, and HCDR3 comprises an amino acid sequence of SEQ ID NOS: 17272, 18339, and 5957, respectively and the LCDR1, LCDR2, and LCDR3 comprises an amino acid sequence of SEQ ID NOS: 17962, 6244, and 4350, respectively.

[1139] The disclosure describes an antibody, antigen binding fragment, or polypeptide comprising a heavy chain variable region having a HCDR1, HCDR2, and HCDR3, and a light chain variable region having a LCDR1, LCDR2, and LCDR3, wherein the HCDR1, HCDR2, and HCDR3 comprises an amino acid sequence of SEQ ID NOS:10365, 16273, and 16705, respectively and the LCDR1, LCDR2, and LCDR3 comprises an amino acid sequence of SEQ ID NOS:17978, 6715, and 4381, respectively.

[1140] The disclosure describes an antibody, antigen binding fragment, or polypeptide comprising a heavy chain variable region having a HCDR1, HCDR2, and HCDR3, and a light chain variable region having a LCDR1, LCDR2, and LCDR3, wherein the HCDR1, HCDR2, and HCDR3 comprises an amino acid sequence of SEQ ID NOS:17441, 6747, and 16820, respectively and the LCDR1, LCDR2, and LCDR3 comprises an amino acid sequence of SEQ ID NOS: 15777, 3974, and 12006, respectively.

[1141] The disclosure describes an antibody, antigen binding fragment, or polypeptide comprising a heavy chain variable region having a HCDR1, HCDR2, and HCDR3, and a light chain variable region having a LCDR1, LCDR2, and LCDR3, wherein the HCDR1, HCDR2, and HCDR3 comprises an amino acid sequence of SEQ ID NOS:10515, 18299, and 7814, respectively and the LCDR1, LCDR2, and LCDR3 comprises an amino acid sequence of SEQ ID NOS:16431, 10762, and 11347, respectively.

[1142] The disclosure describes an antibody, antigen binding fragment, or polypeptide comprising a heavy chain variable region having a HCDR1, HCDR2, and HCDR3, and a light chain variable region having a LCDR1, LCDR2, and LCDR3, wherein the HCDR1, HCDR2, and HCDR3 comprises an amino acid sequence of SEQ ID NOS:4492, 9954, and 9452, respectively and the LCDR1, LCDR2, and LCDR3 comprises an amino acid sequence of SEQ ID NOS: 15611, 9503, and 12766, respectively.

[1143] The disclosure describes an antibody, antigen binding fragment, or polypeptide comprising a heavy chain variable region having a HCDR1, HCDR2, and HCDR3, and a light chain variable region having a LCDR1, LCDR2, and LCDR3, wherein the HCDR1, HCDR2, and HCDR3 comprises an amino acid sequence of SEQ ID NOS:17599, 18298, and 10234, respectively and the LCDR1, LCDR2, and LCDR3 comprises an amino acid sequence of SEQ ID NOS:16379, 15521, and 11292, respectively.

[1144] The disclosure describes an antibody, antigen binding fragment, or polypeptide comprising a heavy chain variable region having a HCDR1, HCDR2, and HCDR3, and a light chain variable region having a LCDR1, LCDR2, and LCDR3, wherein the HCDR1, HCDR2, and HCDR3 comprises an amino acid sequence of SEQ ID NOS: 17842, 4681, and 6028, respectively and the LCDR1, LCDR2, and LCDR3 comprises an amino acid sequence of SEQ ID NOS: 16687, 16995, and 4002, respectively. having a LCDR1, LCDR2, and LCDR3, wherein the HCDR1, HCDR2, and HCDR3 comprises an amino acid sequence of SEQ ID NOS: 17443, 17765, and 5446, respectively and the LCDR1, LCDR2, and LCDR3 comprises an amino acid sequence of SEQ ID NOS:16139, 17865, and 12507, respectively.

[1145] The disclosure describes an antibody, antigen binding fragment, or polypeptide comprising a heavy chain variable region having a HCDR1, HCDR2, and HCDR3, and a light chain variable region having a LCDR1, LCDR2, and LCDR3, wherein the HCDR1, HCDR2, and HCDR3 comprises an amino acid sequence of SEQ ID NOS:16990, 9835, and 17047, respectively and the LCDR1, LCDR2, and LCDR3 comprises an amino acid sequence of SEQ ID NOS:17930, 10229, and 13566, respectively.

[1146] The disclosure describes an antibody, antigen binding fragment, or polypeptide comprising a heavy chain variable region having a HCDR1, HCDR2, and HCDR3, and a light chain variable region having a LCDR1, LCDR2, and LCDR3, wherein the HCDR1, HCDR2, and HCDR3 comprises an amino acid sequence of SEQ ID NOS:17130, 6782, and 10593, respectively and the LCDR1, LCDR2, and LCDR3 comprises an amino acid sequence of SEQ ID NOS:16404, 10987, and 11207, respectively.

[1147] The disclosure describes an antibody, antigen binding fragment, or polypeptide comprising a heavy chain variable region having a HCDR1, HCDR2, and HCDR3, and a light chain variable region having a LCDR1, LCDR2, and LCDR3, wherein the HCDR1, HCDR2, and HCDR3 comprises an amino acid sequence of SEQ ID NOS:17257, 16939, and 10322, respectively and the LCDR1, LCDR2, and LCDR3 comprises an amino acid sequence of SEQ ID NOS: 11777, 4420, and 11989, respectively.

[1148] The disclosure describes an antibody, antigen binding fragment, or polypeptide comprising a heavy chain variable region having a HCDR1, HCDR2, and HCDR3, and a light chain variable region having a LCDR1, LCDR2, and LCDR3, wherein the HCDR1, HCDR2, and HCDR3 comprises an amino acid sequence of SEQ ID NOS: 17258, 9739, and 4272, respectively and the LCDR1, LCDR2, and LCDR3 comprises an amino acid sequence of SEQ ID NOS: 16045, 9494, and 12852, respectively.

[1149] The disclosure describes an antibody, antigen binding fragment, or polypeptide comprising a heavy chain variable region having a HCDR1, HCDR2, and HCDR3, and a light chain variable region having a LCDR1, LCDR2, and LCDR3, wherein the HCDR1, HCDR2, and HCDR3 comprises an amino acid sequence of SEQ ID NOS: 11420, 16909, and 6126, respectively and the LCDR1, LCDR2, and LCDR3 comprises an amino acid sequence of SEQ ID NOS: 15769, 9501, and 12946, respectively.

[1150] The disclosure describes an antibody, antigen binding fragment, or polypeptide comprising a heavy chain variable region having a HCDR1, HCDR2, and HCDR3, and a light chain variable region having a LCDR1, LCDR2, and LCDR3, wherein the HCDR1, HCDR2, and HCDR3 comprises an amino acid sequence of SEQ ID NOS:16517, 6754, and 10754, respectively and the LCDR1, LCDR2, and LCDR3 comprises an amino acid sequence of SEQ ID NOS: 15899, 3970, and 12497, respectively.

[1151] The disclosure describes an antibody, antigen binding fragment, or polypeptide comprising a heavy chain variable region having a HCDR1, HCDR2, and HCDR3, and a light chain variable region having a LCDR1, LCDR2, and LCDR3, wherein the HCDR1, HCDR2, and HCDR3 comprises an amino acid sequence of SEQ ID NOS: 17856, 16311, and 6003, respectively and the LCDR1, LCDR2, and LCDR3 comprises an amino acid sequence of SEQ ID NOS: 11786, 9476, and 12575, respectively.

[1152] The disclosure describes an antibody, antigen binding fragment, or polypeptide comprising a heavy chain variable region having a HCDR1, HCDR2, and HCDR3, and a light chain variable region having a LCDR1, LCDR2, and LCDR3, wherein the HCDR1, HCDR2, and HCDR3 comprises an amino acid sequence of SEQ ID NOS:17270, 4147, and 16358, respectively and the LCDR1, LCDR2, and LCDR3 comprises an amino acid sequence of SEQ ID NOS:17966, 9261, and 4386, respectively.

[1153] The disclosure describes an antibody, antigen binding fragment, or polypeptide comprising a heavy chain variable region having a HCDR1, HCDR2, and HCDR3, and a light chain variable region having a LCDR1, LCDR2, and LCDR3, wherein the HCDR1, HCDR2, and HCDR3 comprises an amino acid sequence of SEQ ID NOS: 17849, 11499, and 4295, respectively and the LCDR1, LCDR2, and LCDR3 comprises an amino acid sequence of SEQ ID NOS:16424, 10926, and 11267, respectively.

[1154] The disclosure describes an antibody, antigen binding fragment, or polypeptide comprising a heavy chain variable region having a HCDR1, HCDR2, and HCDR3, and a light chain variable region having a LCDR1, LCDR2, and LCDR3, wherein the HCDR1, HCDR2, and HCDR3 comprises an amino acid sequence of SEQ ID NOS:6578, 18531, and 16186, respectively and the LCDR1, LCDR2, and LCDR3 comprises an amino acid sequence of SEQ ID NOS: 17928, 9680, and 13574, respectively.

[1155] The disclosure describes an antibody, antigen binding fragment, or polypeptide comprising a heavy chain variable region having a HCDR1, HCDR2, and HCDR3, and a light chain variable region having a LCDR1, LCDR2, and LCDR3, wherein the HCDR1, HCDR2, and HCDR3 comprises an amino acid sequence of SEQ ID NOS:6566, 11462, and 6181, respectively and the LCDR1, LCDR2, and LCDR3 comprises an amino acid sequence of SEQ ID NOS:16424, 10929, and 11274, respectively.

[1156] The disclosure describes an antibody, antigen binding fragment, or polypeptide comprising a heavy chain variable region having a HCDR1, HCDR2, and HCDR3, and a light chain variable region having a LCDR1, LCDR2, and LCDR3, wherein the HCDR1, HCDR2, and HCDR3 comprises an amino acid sequence of SEQ ID NOS:10690, 18008, and 11711, respectively and the LCDR1, LCDR2, and LCDR3 comprises an amino acid sequence of SEQ ID NOS: 16056, 4426, and 12027, respectively.

[1157] The disclosure describes an antibody, antigen binding fragment, or polypeptide comprising a heavy chain variable region having a HCDR1, HCDR2, and HCDR3, and a light chain variable region having a LCDR1, LCDR2, and LCDR3, wherein the HCDR1, HCDR2, and HCDR3 comprises an amino acid sequence of SEQ ID NOS:17433, 16933, and 17211, respectively and the LCDR1, LCDR2, and LCDR3 comprises an amino acid sequence of SEQ ID NOS:16665, 11900, and 11890, respectively.

[1158] The disclosure describes an antibody, antigen binding fragment, or polypeptide comprising a heavy chain variable region having a HCDR1, HCDR2, and HCDR3, and a light chain variable region having a LCDR1, LCDR2, and LCDR3, wherein the HCDR1, HCDR2, and HCDR3 comprises an amino acid sequence of SEQ ID NOS: 17560, 17243, and 4162, respectively and the LCDR1, LCDR2, and LCDR3 comprises an amino acid sequence of SEQ ID NOS:15713, 16561, and 12375, respectively.

[1159] The disclosure describes an antibody, antigen binding fragment, or polypeptide comprising a heavy chain variable region having a HCDR1, HCDR2, and HCDR3, and a light chain variable region having a LCDR1, LCDR2, and LCDR3, wherein the HCDR1, HCDR2, and HCDR3 comprises an amino acid sequence of SEQ ID NOS:10692, 18013, and 18055, respectively and the LCDR1, LCDR2, and LCDR3 comprises an amino acid sequence of SEQ ID NOS: 15876, 9503, and 12780, respectively.

[1160] The disclosure describes an antibody, antigen binding fragment, or polypeptide comprising a heavy chain variable region having a HCDR1, HCDR2, and HCDR3, and a light chain variable region having a LCDR1, LCDR2, and LCDR3, wherein the HCDR1, HCDR2, and HCDR3 comprises an amino acid sequence of SEQ ID NOS: 17856, 16226, and 6002, respectively and the LCDR1, LCDR2, and LCDR3 comprises an amino acid sequence of SEQ ID NOS: 11776, 9476, and 12575, respectively.

[1161] The disclosure describes an antibody, antigen binding fragment, or polypeptide comprising a heavy chain variable region having a HCDR1, HCDR2, and HCDR3, and a light chain variable region having a LCDR1, LCDR2, and LCDR3, wherein the HCDR1, HCDR2, and HCDR3 comprises an amino acid sequence of SEQ ID NOS:6507, 9971, and 4575, respectively and the LCDR1, LCDR2, and LCDR3 comprises an amino acid sequence of SEQ ID NOS: 15698, 3982, and 12097, respectively.

[1162] The disclosure describes an antibody, antigen binding fragment, or polypeptide comprising a heavy chain variable region having a HCDR1, HCDR2, and HCDR3, and a light chain variable region having a LCDR1, LCDR2, and LCDR3, wherein the HCDR1, HCDR2, and HCDR3 comprises an amino acid sequence of SEQ ID NOS: 11690, 18590, and 6330, respectively and the LCDR1, LCDR2, and LCDR3 comprises an amino acid sequence of SEQ ID NOS: 15754, 3963, and 12470, respectively.

[1163] The disclosure describes an antibody, antigen binding fragment, or polypeptide comprising a heavy chain variable region having a HCDR1, HCDR2, and HCDR3, and a light chain variable region having a LCDR1, LCDR2, and LCDR3, wherein the HCDR1, HCDR2, and HCDR3 comprises an amino acid sequence of SEQ ID NOS: 17274, 18016, and 4030, respectively and the LCDR1, LCDR2, and LCDR3 comprises an amino acid sequence of SEQ ID NOS:17924, 10094, and 13575, respectively. having a LCDR1, LCDR2, and LCDR3, wherein the HCDR1, HCDR2, and HCDR3 comprises an amino acid sequence of SEQ ID NOS:6578, 18550, and 11705, respectively and the LCDR1, LCDR2, and LCDR3 comprises an amino acid sequence of SEQ ID NOS:15798, 18440, and 10447, respectively.

[1164] The disclosure describes an antibody, antigen binding fragment, or polypeptide comprising a heavy chain variable region having a HCDR1, HCDR2, and HCDR3, and a light chain variable region having a LCDR1, LCDR2, and LCDR3, wherein the HCDR1, HCDR2, and HCDR3 comprises an amino acid sequence of SEQ ID NOS: 17435, 10319, and 4274, respectively and the LCDR1, LCDR2, and LCDR3 comprises an amino acid sequence of SEQ ID NOS: 16479, 9503, and 12775, respectively.

[1165] The disclosure describes an antibody, antigen binding fragment, or polypeptide comprising a heavy chain variable region having a HCDR1, HCDR2, and HCDR3, and a light chain variable region having a LCDR1, LCDR2, and LCDR3, wherein the HCDR1, HCDR2, and HCDR3 comprises an amino acid sequence of SEQ ID NOS: 16539, 12037, and 6050, respectively and the LCDR1, LCDR2, and LCDR3 comprises an amino acid sequence of SEQ ID NOS:18054, 18136, and 11889, respectively.

[1166] The disclosure describes an antibody, antigen binding fragment, or polypeptide comprising a heavy chain variable region having a HCDR1, HCDR2, and HCDR3, and a light chain variable region having a LCDR1, LCDR2, and LCDR3, wherein the HCDR1, HCDR2, and HCDR3 comprises an amino acid sequence of SEQ ID NOS:6168, 18626, and 4480, respectively and the LCDR1, LCDR2, and LCDR3 comprises an amino acid sequence of SEQ ID NOS:17900, 16158, and 17571, respectively.

[1167] The disclosure describes an antibody, antigen binding fragment, or polypeptide comprising a heavy chain variable region having a HCDR1, HCDR2, and HCDR3, and a light chain variable region having a LCDR1, LCDR2, and LCDR3, wherein the HCDR1, HCDR2, and HCDR3 comprises an amino acid sequence of SEQ ID NOS:10691, 18014, and 11710, respectively and the LCDR1, LCDR2, and LCDR3 comprises an amino acid sequence of SEQ ID NOS: 15961, 4432, and 12885, respectively.

[1168] The disclosure describes an antibody, antigen binding fragment, or polypeptide comprising a heavy chain variable region having a HCDR1, HCDR2, and HCDR3, and a light chain variable region having a LCDR1, LCDR2, and LCDR3, wherein the HCDR1, HCDR2, and HCDR3 comprises an amino acid sequence of SEQ ID NOS: 17856, 16223, and 6005, respectively and the LCDR1, LCDR2, and LCDR3 comprises an amino acid sequence of SEQ ID NOS: 11787, 9476, and 12575, respectively.

[1169] The disclosure describes an antibody, antigen binding fragment, or polypeptide comprising a heavy chain variable region having a HCDR1, HCDR2, and HCDR3, and a light chain variable region having a LCDR1, LCDR2, and LCDR3, wherein the HCDR1, HCDR2, and HCDR3 comprises an amino acid sequence of SEQ ID NOS: 17274, 18024, and 6088, respectively and the LCDR1, LCDR2, and LCDR3 comprises an amino acid sequence of SEQ ID NOS: 15990, 4422, and 12437, respectively.

[1170] The disclosure describes an antibody, antigen binding fragment, or polypeptide comprising a heavy chain variable region having a HCDR1, HCDR2, and HCDR3, and a light chain variable region having a LCDR1, LCDR2, and LCDR3, wherein the HCDR1, HCDR2, and HCDR3 comprises an amino acid sequence of SEQ ID NOS:6578, 18531, and 10044, respectively and the LCDR1, LCDR2, and LCDR3 comprises an amino acid sequence of SEQ ID NOS:17928, 10094, and 13574, respectively.

[1171] The disclosure describes an antibody, antigen binding fragment, or polypeptide comprising a heavy chain variable region having a HCDR1, HCDR2, and HCDR3, and a light chain variable region having a LCDR1, LCDR2, and LCDR3, wherein the HCDR1, HCDR2, and HCDR3 comprises an amino acid sequence of SEQ ID NOS:17446, 10405, and 17694, respectively and the LCDR1, LCDR2, and LCDR3 comprises an amino acid sequence of SEQ ID NOS:15942, 9472, and 12749, respectively.

[1172] The disclosure describes an antibody, antigen binding fragment, or polypeptide comprising a heavy chain variable region having a HCDR1, HCDR2, and HCDR3, and a light chain variable region having a LCDR1, LCDR2, and LCDR3, wherein the HCDR1, HCDR2, and HCDR3 comprises an amino acid sequence of SEQ ID NOS: 16176, 16209, and 6486, respectively and the LCDR1, LCDR2, and LCDR3 comprises an amino acid sequence of SEQ ID NOS: 16096, 3960, and 12543, respectively.

[1173] The disclosure describes an antibody, antigen binding fragment, or polypeptide comprising a heavy chain variable region having a HCDR1, HCDR2, and HCDR3, and a light chain variable region having a LCDR1, LCDR2, and LCDR3, wherein the HCDR1, HCDR2, and HCDR3 comprises an amino acid sequence of SEQ ID NOS:16617, 9984, and 4273, respectively and the LCDR1, LCDR2, and LCDR3 comprises an amino acid sequence of SEQ ID NOS: 15779, 9503, and 12727, respectively.

[1174] The disclosure describes an antibody, antigen binding fragment, or polypeptide comprising a heavy chain variable region having a HCDR1, HCDR2, and HCDR3, and a light chain variable region having a LCDR1, LCDR2, and LCDR3, wherein the HCDR1, HCDR2, and HCDR3 comprises an amino acid sequence of SEQ ID NOS: 16993, 9392, and 6694, respectively and the LCDR1, LCDR2, and LCDR3 comprises an amino acid sequence of SEQ ID NOS: 16045, 9503, and 12724, respectively.

[1175] The disclosure describes an antibody, antigen binding fragment, or polypeptide comprising a heavy chain variable region having a HCDR1, HCDR2, and HCDR3, and a light chain variable region having a LCDR1, LCDR2, and LCDR3, wherein the HCDR1, HCDR2, and HCDR3 comprises an amino acid sequence of SEQ ID NOS:11628, 10056, and 10221, respectively and the LCDR1, LCDR2, and LCDR3 comprises an amino acid sequence of SEQ ID NOS:10891, 18262, and 12992, respectively.

[1176] The disclosure describes an antibody, antigen binding fragment, or polypeptide comprising a heavy chain variable region having a HCDR1, HCDR2, and HCDR3, and a light chain variable region having a LCDR1, LCDR2, and LCDR3, wherein the HCDR1, HCDR2, and HCDR3 comprises an amino acid sequence of SEQ ID NOS:10949, 11481, and 6181, respectively and the LCDR1, LCDR2, and LCDR3 comprises an amino acid sequence of SEQ ID NOS:16427, 15513, and 11220, respectively.

[1177] The disclosure describes an antibody, antigen binding fragment, or polypeptide comprising a heavy chain variable region having a HCDR1, HCDR2, and HCDR3, and a light chain variable region having a LCDR1, LCDR2, and LCDR3, wherein the HCDR1, HCDR2, and HCDR3 comprises an amino acid sequence of SEQ ID NOS:17616, 16281, and 6001, respectively and the LCDR1, LCDR2, and LCDR3 comprises an amino acid sequence of SEQ ID NOS: 11788, 7913, and 12575, respectively.

[1178] The disclosure describes an antibody, antigen binding fragment, or polypeptide comprising a heavy chain variable region having a HCDR1, HCDR2, and HCDR3, and a light chain variable region having a LCDR1, LCDR2, and LCDR3, wherein the HCDR1, HCDR2, and HCDR3 comprises an amino acid sequence of SEQ ID NOS:6570, 16364, and 11731, respectively and the LCDR1, LCDR2, and LCDR3 comprises an amino acid sequence of SEQ ID NOS:16428, 10764, and 11227, respectively.

[1179] The disclosure describes an antibody, antigen binding fragment, or polypeptide comprising a heavy chain variable region having a HCDR1, HCDR2, and HCDR3, and a light chain variable region having a LCDR1, LCDR2, and LCDR3, wherein the HCDR1, HCDR2, and HCDR3 comprises an amino acid sequence of SEQ ID NOS:17114, 9386, and 17043, respectively and the LCDR1, LCDR2, and LCDR3 comprises an amino acid sequence of SEQ ID NOS: 15604, 3969, and 11110, respectively.

[1180] The disclosure describes an antibody, antigen binding fragment, or polypeptide comprising a heavy chain variable region having a HCDR1, HCDR2, and HCDR3, and a light chain variable region having a LCDR1, LCDR2, and LCDR3, wherein the HCDR1, HCDR2, and HCDR3 comprises an amino acid sequence of SEQ ID NOS:17141, 16954, and 10435, respectively and the LCDR1, LCDR2, and LCDR3 comprises an amino acid sequence of SEQ ID NOS:16659, 11900, and 11884, respectively.

[1181] The disclosure describes an antibody, antigen binding fragment, or polypeptide comprising a heavy chain variable region having a HCDR1, HCDR2, and HCDR3, and a light chain variable region having a LCDR1, LCDR2, and LCDR3, wherein the HCDR1, HCDR2, and HCDR3 comprises an amino acid sequence of SEQ ID NOS:18621, 9689, and 18220, respectively and the LCDR1, LCDR2, and LCDR3 comprises an amino acid sequence of SEQ ID NOS:16419, 10762, and 17540, respectively.

[1182] The disclosure describes an antibody, antigen binding fragment, or polypeptide comprising a heavy chain variable region having a HCDR1, HCDR2, and HCDR3, and a light chain variable region having a LCDR1, LCDR2, and LCDR3, wherein the HCDR1, HCDR2, and HCDR3 comprises an amino acid sequence of SEQ ID NOS:6541, 18504, and 6072, respectively and the LCDR1, LCDR2, and LCDR3 comprises an amino acid sequence of SEQ ID NOS:9365, 7855, and 11127, respectively. having a LCDR1, LCDR2, and LCDR3, wherein the HCDR1, HCDR2, and HCDR3 comprises an amino acid sequence of SEQ ID NOS: 17443, 9390, and 6033, respectively and the LCDR1, LCDR2, and LCDR3 comprises an amino acid sequence of SEQ ID NOS: 15704, 3982, and 12099, respectively.

[1183] The disclosure describes an antibody, antigen binding fragment, or polypeptide comprising a heavy chain variable region having a HCDR1, HCDR2, and HCDR3, and a light chain variable region having a LCDR1, LCDR2, and LCDR3, wherein the HCDR1, HCDR2, and HCDR3 comprises an amino acid sequence of SEQ ID NOS: 11151, 11464, and 6157, respectively and the LCDR1, LCDR2, and LCDR3 comprises an amino acid sequence of SEQ ID NOS:16424, 10929, and 11274, respectively.

[1184] The disclosure describes an antibody, antigen binding fragment, or polypeptide comprising a heavy chain variable region having a HCDR1, HCDR2, and HCDR3, and a light chain variable region having a LCDR1, LCDR2, and LCDR3, wherein the HCDR1, HCDR2, and HCDR3 comprises an amino acid sequence of SEQ ID NOS: 17274, 18017, and 6070, respectively and the LCDR1, LCDR2, and LCDR3 comprises an amino acid sequence of SEQ ID NOS: 15986, 4422, and 10711, respectively.

[1185] The disclosure describes an antibody, antigen binding fragment, or polypeptide comprising a heavy chain variable region having a HCDR1, HCDR2, and HCDR3, and a light chain variable region having a LCDR1, LCDR2, and LCDR3, wherein the HCDR1, HCDR2, and HCDR3 comprises an amino acid sequence of SEQ ID NOS:6526, 16279, and 6004, respectively and the LCDR1, LCDR2, and LCDR3 comprises an amino acid sequence of SEQ ID NOS: 11780, 4420, and 12575, respectively.

[1186] The disclosure describes an antibody, antigen binding fragment, or polypeptide comprising a heavy chain variable region having a HCDR1, HCDR2, and HCDR3, and a light chain variable region having a LCDR1, LCDR2, and LCDR3, wherein the HCDR1, HCDR2, and HCDR3 comprises an amino acid sequence of SEQ ID NOS:4181, 16272, and 7890, respectively and the LCDR1, LCDR2, and LCDR3 comprises an amino acid sequence of SEQ ID NOS: 17924, 9534, and 13578, respectively.

[1187] The disclosure describes an antibody, antigen binding fragment, or polypeptide comprising a heavy chain variable region having a HCDR1, HCDR2, and HCDR3, and a light chain variable region having a LCDR1, LCDR2, and LCDR3, wherein the HCDR1, HCDR2, and HCDR3 comprises an amino acid sequence of SEQ ID NOS:16796, 16939, and 18243, respectively and the LCDR1, LCDR2, and LCDR3 comprises an amino acid sequence of SEQ ID NOS:16660, 11900, and 11885, respectively.

[1188] The disclosure describes an antibody, antigen binding fragment, or polypeptide comprising a heavy chain variable region having a HCDR1, HCDR2, and HCDR3, and a light chain variable region having a LCDR1, LCDR2, and LCDR3, wherein the HCDR1, HCDR2, and HCDR3 comprises an amino acid sequence of SEQ ID NOS:11557, 16891, and 18449, respectively and the LCDR1, LCDR2, and LCDR3 comprises an amino acid sequence of SEQ ID NOS: 15922, 9503, and 12772, respectively.

[1189] The disclosure describes an antibody, antigen binding fragment, or polypeptide comprising a heavy chain variable region having a HCDR1, HCDR2, and HCDR3, and a light chain variable region having a LCDR1, LCDR2, and LCDR3, wherein the HCDR1, HCDR2, and HCDR3 comprises an amino acid sequence of SEQ ID NOS: 17466, 18545, and 5896, respectively and the LCDR1, LCDR2, and LCDR3 comprises an amino acid sequence of SEQ ID NOS: 15713, 3982, and 13001, respectively.

[1190] The disclosure describes an antibody, antigen binding fragment, or polypeptide comprising a heavy chain variable region having a HCDR1, HCDR2, and HCDR3, and a light chain variable region having a LCDR1, LCDR2, and LCDR3, wherein the HCDR1, HCDR2, and HCDR3 comprises an amino acid sequence of SEQ ID NOS:4635, 11002, and 12236, respectively and the LCDR1, LCDR2, and LCDR3 comprises an amino acid sequence of SEQ ID NOS:16408, 10987, and 11216, respectively.

[1191] The disclosure describes an antibody, antigen binding fragment, or polypeptide comprising a heavy chain variable region having a HCDR1, HCDR2, and HCDR3, and a light chain variable region having a LCDR1, LCDR2, and LCDR3, wherein the HCDR1, HCDR2, and HCDR3 comprises an amino acid sequence of SEQ ID NOS:17844, 11189, and 16967, respectively and the LCDR1, LCDR2, and LCDR3 comprises an amino acid sequence of SEQ ID NOS:16753, 17007, and 4194, respectively.

[1192] The disclosure describes an antibody, antigen binding fragment, or polypeptide comprising a heavy chain variable region having a HCDR1, HCDR2, and HCDR3, and a light chain variable region having a LCDR1, LCDR2, and LCDR3, wherein the HCDR1, HCDR2, and HCDR3 comprises an amino acid sequence of SEQ ID NOS:10680, 18009, and 18079, respectively and the LCDR1, LCDR2, and LCDR3 comprises an amino acid sequence of SEQ ID NOS:16127, 9461, and 12747, respectively.

[1193] The disclosure describes an antibody, antigen binding fragment, or polypeptide comprising a heavy chain variable region having a HCDR1, HCDR2, and HCDR3, and a light chain variable region having a LCDR1, LCDR2, and LCDR3, wherein the HCDR1, HCDR2, and HCDR3 comprises an amino acid sequence of SEQ ID NOS: 17989, 18377, and 6105, respectively and the LCDR1, LCDR2, and LCDR3 comprises an amino acid sequence of SEQ ID NOS:16462, 10926, and 11289, respectively.

[1194] The disclosure describes an antibody, antigen binding fragment, or polypeptide comprising a heavy chain variable region having a HCDR1, HCDR2, and HCDR3, and a light chain variable region having a LCDR1, LCDR2, and LCDR3, wherein the HCDR1, HCDR2, and HCDR3 comprises an amino acid sequence of SEQ ID NOS: 17655, 16280, and 6000, respectively and the LCDR1, LCDR2, and LCDR3 comprises an amino acid sequence of SEQ ID NOS: 11788, 4420, and 12575, respectively.

[1195] The disclosure describes an antibody, antigen binding fragment, or polypeptide comprising a heavy chain variable region having a HCDR1, HCDR2, and HCDR3, and a light chain variable region having a LCDR1, LCDR2, and LCDR3, wherein the HCDR1, HCDR2, and HCDR3 comprises an amino acid sequence of SEQ ID NOS:4632, 16365, and 11730, respectively and the LCDR1, LCDR2, and LCDR3 comprises an amino acid sequence of SEQ ID NOS:16383, 10764, and 11217, respectively.

[1196] The disclosure describes an antibody, antigen binding fragment, or polypeptide comprising a heavy chain variable region having a HCDR1, HCDR2, and HCDR3, and a light chain variable region having a LCDR1, LCDR2, and LCDR3, wherein the HCDR1, HCDR2, and HCDR3 comprises an amino acid sequence of SEQ ID NOS: 17529, 16930, and 5973, respectively and the LCDR1, LCDR2, and LCDR3 comprises an amino acid sequence of SEQ ID NOS: 16045, 9503, and 12775, respectively.

[1197] The disclosure describes an antibody, antigen binding fragment, or polypeptide comprising a heavy chain variable region having a HCDR1, HCDR2, and HCDR3, and a light chain variable region having a LCDR1, LCDR2, and LCDR3, wherein the HCDR1, HCDR2, and HCDR3 comprises an amino acid sequence of SEQ ID NOS:10690, 18008, and 11711, respectively and the LCDR1, LCDR2, and LCDR3 comprises an amino acid sequence of SEQ ID NOS: 16056, 4427, and 12029, respectively.

[1198] The disclosure describes an antibody, antigen binding fragment, or polypeptide comprising a heavy chain variable region having a HCDR1, HCDR2, and HCDR3, and a light chain variable region having a LCDR1, LCDR2, and LCDR3, wherein the HCDR1, HCDR2, and HCDR3 comprises an amino acid sequence of SEQ ID NOS:17258, 9739, and 10497, respectively and the LCDR1, LCDR2, and LCDR3 comprises an amino acid sequence of SEQ ID NOS: 15962, 3974, and 12713, respectively.

[1199] The disclosure describes an antibody, antigen binding fragment, or polypeptide comprising a heavy chain variable region having a HCDR1, HCDR2, and HCDR3, and a light chain variable region having a LCDR1, LCDR2, and LCDR3, wherein the HCDR1, HCDR2, and HCDR3 comprises an amino acid sequence of SEQ ID NOS: 17271, 16896, and 6477, respectively and the LCDR1, LCDR2, and LCDR3 comprises an amino acid sequence of SEQ ID NOS: 15856, 4436, and 12433, respectively.

[1200] The disclosure describes an antibody, antigen binding fragment, or polypeptide comprising a heavy chain variable region having a HCDR1, HCDR2, and HCDR3, and a light chain variable region having a LCDR1, LCDR2, and LCDR3, wherein the HCDR1, HCDR2, and HCDR3 comprises an amino acid sequence of SEQ ID NOS:10948, 10569, and 10509, respectively and the LCDR1, LCDR2, and LCDR3 comprises an amino acid sequence of SEQ ID NOS:11789, 4412, and 12582, respectively.

[1201] The disclosure describes an antibody, antigen binding fragment, or polypeptide comprising a heavy chain variable region having a HCDR1, HCDR2, and HCDR3, and a light chain variable region having a LCDR1, LCDR2, and LCDR3, wherein the HCDR1, HCDR2, and HCDR3 comprises an amino acid sequence of SEQ ID NOS:6510, 9379, and 4466, respectively and the LCDR1, LCDR2, and LCDR3 comprises an amino acid sequence of SEQ ID NOS: 16045, 9503, and 12797, respectively. having a LCDR1, LCDR2, and LCDR3, wherein the HCDR1, HCDR2, and HCDR3 comprises an amino acid sequence of SEQ ID NOS:6507, 9971, and 6209, respectively and the LCDR1, LCDR2, and LCDR3 comprises an amino acid sequence of SEQ ID NOS: 16067, 4425, and 12437, respectively.

[1202] The disclosure describes an antibody, antigen binding fragment, or polypeptide comprising a heavy chain variable region having a HCDR1, HCDR2, and HCDR3, and a light chain variable region having a LCDR1, LCDR2, and LCDR3, wherein the HCDR1, HCDR2, and HCDR3 comprises an amino acid sequence of SEQ ID NOS: 11634, 16906, and 6139, respectively and the LCDR1, LCDR2, and LCDR3 comprises an amino acid sequence of SEQ ID NOS: 15970, 9503, and 12775, respectively.

[1203] The disclosure describes an antibody, antigen binding fragment, or polypeptide comprising a heavy chain variable region having a HCDR1, HCDR2, and HCDR3, and a light chain variable region having a LCDR1, LCDR2, and LCDR3, wherein the HCDR1, HCDR2, and HCDR3 comprises an amino acid sequence of SEQ ID NOS: 17454, 10543, and 4233, respectively and the LCDR1, LCDR2, and LCDR3 comprises an amino acid sequence of SEQ ID NOS:16653, 10747, and 18614, respectively.

[1204] The disclosure describes an antibody, antigen binding fragment, or polypeptide comprising a heavy chain variable region having a HCDR1, HCDR2, and HCDR3, and a light chain variable region having a LCDR1, LCDR2, and LCDR3, wherein the HCDR1, HCDR2, and HCDR3 comprises an amino acid sequence of SEQ ID NOS:6565, 11450, and 10346, respectively and the LCDR1, LCDR2, and LCDR3 comprises an amino acid sequence of SEQ ID NOS:10807, 18263, and 12936, respectively.

[1205] The disclosure describes an antibody, antigen binding fragment, or polypeptide comprising a heavy chain variable region having a HCDR1, HCDR2, and HCDR3, and a light chain variable region having a LCDR1, LCDR2, and LCDR3, wherein the HCDR1, HCDR2, and HCDR3 comprises an amino acid sequence of SEQ ID NOS:11623, 9759, and 10490, respectively and the LCDR1, LCDR2, and LCDR3 comprises an amino acid sequence of SEQ ID NOS: 16744, 10089, and 3988, respectively.

[1206] The disclosure describes an antibody, antigen binding fragment, or polypeptide comprising a heavy chain variable region having a HCDR1, HCDR2, and HCDR3, and a light chain variable region having a LCDR1, LCDR2, and LCDR3, wherein the HCDR1, HCDR2, and HCDR3 comprises an amino acid sequence of SEQ ID NOS:17263, 9988, and 9617, respectively and the LCDR1, LCDR2, and LCDR3 comprises an amino acid sequence of SEQ ID NOS: 16002, 9505, and 10461, respectively.

[1207] The disclosure describes an antibody, antigen binding fragment, or polypeptide comprising a heavy chain variable region having a HCDR1, HCDR2, and HCDR3, and a light chain variable region having a LCDR1, LCDR2, and LCDR3, wherein the HCDR1, HCDR2, and HCDR3 comprises an amino acid sequence of SEQ ID NOS:17645, 11496, and 17734, respectively and the LCDR1, LCDR2, and LCDR3 comprises an amino acid sequence of SEQ ID NOS: 17926, 10088, and 13572, respectively.

[1208] The disclosure describes an antibody, antigen binding fragment, or polypeptide comprising a heavy chain variable region having a HCDR1, HCDR2, and HCDR3, and a light chain variable region having a LCDR1, LCDR2, and LCDR3, wherein the HCDR1, HCDR2, and HCDR3 comprises an amino acid sequence of SEQ ID NOS: 11632, 16861, and 6484, respectively and the LCDR1, LCDR2, and LCDR3 comprises an amino acid sequence of SEQ ID NOS:18074, 18596, and 11356, respectively.

[1209] The disclosure describes an antibody, antigen binding fragment, or polypeptide comprising a heavy chain variable region having a HCDR1, HCDR2, and HCDR3, and a light chain variable region having a LCDR1, LCDR2, and LCDR3, wherein the HCDR1, HCDR2, and HCDR3 comprises an amino acid sequence of SEQ ID NOS:11656, 16239, and 17033, respectively and the LCDR1, LCDR2, and LCDR3 comprises an amino acid sequence of SEQ ID NOS:16056, 9503, and 10457, respectively.

[1210] The disclosure describes an antibody, antigen binding fragment, or polypeptide comprising a heavy chain variable region having a HCDR1, HCDR2, and HCDR3, and a light chain variable region having a LCDR1, LCDR2, and LCDR3, wherein the HCDR1, HCDR2, and HCDR3 comprises an amino acid sequence of SEQ ID NOS:11650, 17812, and 6305, respectively and the LCDR1, LCDR2, and LCDR3 comprises an amino acid sequence of SEQ ID NOS: 11777, 4420, and 12344, respectively.

[1211] The disclosure describes an antibody, antigen binding fragment, or polypeptide comprising a heavy chain variable region having a HCDR1, HCDR2, and HCDR3, and a light chain variable region having a LCDR1, LCDR2, and LCDR3, wherein the HCDR1, HCDR2, and HCDR3 comprises an amino acid sequence of SEQ ID NOS:16197, 9938, and 6099, respectively and the LCDR1, LCDR2, and LCDR3 comprises an amino acid sequence of SEQ ID NOS: 15855, 9490, and 12514, respectively.

[1212] The disclosure describes an antibody, antigen binding fragment, or polypeptide comprising a heavy chain variable region having a HCDR1, HCDR2, and HCDR3, and a light chain variable region having a LCDR1, LCDR2, and LCDR3, wherein the HCDR1, HCDR2, and HCDR3 comprises an amino acid sequence of SEQ ID NOS:16800, 9710, and 10070, respectively and the LCDR1, LCDR2, and LCDR3 comprises an amino acid sequence of SEQ ID NOS: 15882, 9494, and 12629, respectively.

[1213] The disclosure describes an antibody, antigen binding fragment, or polypeptide comprising a heavy chain variable region having a HCDR1, HCDR2, and HCDR3, and a light chain variable region having a LCDR1, LCDR2, and LCDR3, wherein the HCDR1, HCDR2, and HCDR3 comprises an amino acid sequence of SEQ ID NOS:17536, 16214, and 11380, respectively and the LCDR1, LCDR2, and LCDR3 comprises an amino acid sequence of SEQ ID NOS:16656, 10746, and 18610, respectively.

[1214] The disclosure describes an antibody, antigen binding fragment, or polypeptide comprising a heavy chain variable region having a HCDR1, HCDR2, and HCDR3, and a light chain variable region having a LCDR1, LCDR2, and LCDR3, wherein the HCDR1, HCDR2, and HCDR3 comprises an amino acid sequence of SEQ ID NOS:11667, 9925, and 10068, respectively and the LCDR1, LCDR2, and LCDR3 comprises an amino acid sequence of SEQ ID NOS: 15719, 3954, and 12732, respectively.

[1215] The disclosure describes an antibody, antigen binding fragment, or polypeptide comprising a heavy chain variable region having a HCDR1, HCDR2, and HCDR3, and a light chain variable region having a LCDR1, LCDR2, and LCDR3, wherein the HCDR1, HCDR2, and HCDR3 comprises an amino acid sequence of SEQ ID NOS: 16592, 18023, and 7958, respectively and the LCDR1, LCDR2, and LCDR3 comprises an amino acid sequence of SEQ ID NOS: 15856, 4425, and 12433, respectively.

[1216] The disclosure describes an antibody, antigen binding fragment, or polypeptide comprising a heavy chain variable region having a HCDR1, HCDR2, and HCDR3, and a light chain variable region having a LCDR1, LCDR2, and LCDR3, wherein the HCDR1, HCDR2, and HCDR3 comprises an amino acid sequence of SEQ ID NOS:17274, 4136, and 6103, respectively and the LCDR1, LCDR2, and LCDR3 comprises an amino acid sequence of SEQ ID NOS:16642, 10747, and 13030, respectively.

[1217] The disclosure describes an antibody, antigen binding fragment, or polypeptide comprising a heavy chain variable region having a HCDR1, HCDR2, and HCDR3, and a light chain variable region having a LCDR1, LCDR2, and LCDR3, wherein the HCDR1, HCDR2, and HCDR3 comprises an amino acid sequence of SEQ ID NOS:11369, 16173, and 10327, respectively and the LCDR1, LCDR2, and LCDR3 comprises an amino acid sequence of SEQ ID NOS:15927, 9494, and 12001, respectively.

[1218] The disclosure describes an antibody, antigen binding fragment, or polypeptide comprising a heavy chain variable region having a HCDR1, HCDR2, and HCDR3, and a light chain variable region having a LCDR1, LCDR2, and LCDR3, wherein the HCDR1, HCDR2, and HCDR3 comprises an amino acid sequence of SEQ ID NOS:17645, 11496, and 17734, respectively and the LCDR1, LCDR2, and LCDR3 comprises an amino acid sequence of SEQ ID NOS:17926, 10088, and 13571, respectively.

[1219] The disclosure describes an antibody, antigen binding fragment, or polypeptide comprising a heavy chain variable region having a HCDR1, HCDR2, and HCDR3, and a light chain variable region having a LCDR1, LCDR2, and LCDR3, wherein the HCDR1, HCDR2, and HCDR3 comprises an amino acid sequence of SEQ ID NOS: 17443, 17778, and 7808, respectively and the LCDR1, LCDR2, and LCDR3 comprises an amino acid sequence of SEQ ID NOS: 16054, 9494, and 12690, respectively.

[1220] The disclosure describes an antibody, antigen binding fragment, or polypeptide comprising a heavy chain variable region having a HCDR1, HCDR2, and HCDR3, and a light chain variable region having a LCDR1, LCDR2, and LCDR3, wherein the HCDR1, HCDR2, and HCDR3 comprises an amino acid sequence of SEQ ID NOS:11369, 16173, and 10326, respectively and the LCDR1, LCDR2, and LCDR3 comprises an amino acid sequence of SEQ ID NOS:16065, 10314, and 12001, respectively. having a LCDR1, LCDR2, and LCDR3, wherein the HCDR1, HCDR2, and HCDR3 comprises an amino acid sequence of SEQ ID NOS: 17466, 4143, and 7878, respectively and the LCDR1, LCDR2, and LCDR3 comprises an amino acid sequence of SEQ ID NOS: 15904, 4425, and 10725, respectively.

[1221] The disclosure describes an antibody, antigen binding fragment, or polypeptide comprising a heavy chain variable region having a HCDR1, HCDR2, and HCDR3, and a light chain variable region having a LCDR1, LCDR2, and LCDR3, wherein the HCDR1, HCDR2, and HCDR3 comprises an amino acid sequence of SEQ ID NOS:12304, 17819, and 6639, respectively and the LCDR1, LCDR2, and LCDR3 comprises an amino acid sequence of SEQ ID NOS:16644, 10748, and 13034, respectively.

[1222] The disclosure describes an antibody, antigen binding fragment, or polypeptide comprising a heavy chain variable region having a HCDR1, HCDR2, and HCDR3, and a light chain variable region having a LCDR1, LCDR2, and LCDR3, wherein the HCDR1, HCDR2, and HCDR3 comprises an amino acid sequence of SEQ ID NOS:11668, 16233, and 17035, respectively and the LCDR1, LCDR2, and LCDR3 comprises an amino acid sequence of SEQ ID NOS: 16067, 4425, and 12408, respectively.

[1223] The disclosure describes an antibody, antigen binding fragment, or polypeptide comprising a heavy chain variable region having a HCDR1, HCDR2, and HCDR3, and a light chain variable region having a LCDR1, LCDR2, and LCDR3, wherein the HCDR1, HCDR2, and HCDR3 comprises an amino acid sequence of SEQ ID NOS:17645, 11496, and 17733, respectively and the LCDR1, LCDR2, and LCDR3 comprises an amino acid sequence of SEQ ID NOS: 17926, 10097, and 13565, respectively.

[1224] The disclosure describes an antibody, antigen binding fragment, or polypeptide comprising a heavy chain variable region having a HCDR1, HCDR2, and HCDR3, and a light chain variable region having a LCDR1, LCDR2, and LCDR3, wherein the HCDR1, HCDR2, and HCDR3 comprises an amino acid sequence of SEQ ID NOS: 17068, 9752, and 9642, respectively and the LCDR1, LCDR2, and LCDR3 comprises an amino acid sequence of SEQ ID NOS: 15974, 4432, and 12683, respectively.

[1225] The disclosure describes an antibody, antigen binding fragment, or polypeptide comprising a heavy chain variable region having a HCDR1, HCDR2, and HCDR3, and a light chain variable region having a LCDR1, LCDR2, and LCDR3, wherein the HCDR1, HCDR2, and HCDR3 comprises an amino acid sequence of SEQ ID NOS:17579, 17827, and 11064, respectively and the LCDR1, LCDR2, and LCDR3 comprises an amino acid sequence of SEQ ID NOS: 17979, 6312, and 4373, respectively.

[1226] The disclosure describes an antibody, antigen binding fragment, or polypeptide comprising a heavy chain variable region having a HCDR1, HCDR2, and HCDR3, and a light chain variable region having a LCDR1, LCDR2, and LCDR3, wherein the HCDR1, HCDR2, and HCDR3 comprises an amino acid sequence of SEQ ID NOS:16568, 17752, and 10063, respectively and the LCDR1, LCDR2, and LCDR3 comprises an amino acid sequence of SEQ ID NOS:16378, 18275, and 12953, respectively.

[1227] The disclosure describes an antibody, antigen binding fragment, or polypeptide comprising a heavy chain variable region having a HCDR1, HCDR2, and HCDR3, and a light chain variable region having a LCDR1, LCDR2, and LCDR3, wherein the HCDR1, HCDR2, and HCDR3 comprises an amino acid sequence of SEQ ID NOS: 16673, 18577, and 7875, respectively and the LCDR1, LCDR2, and LCDR3 comprises an amino acid sequence of SEQ ID NOS: 15898, 4281, and 12465, respectively.

[1228] The disclosure describes an antibody, antigen binding fragment, or polypeptide comprising a heavy chain variable region having a HCDR1, HCDR2, and HCDR3, and a light chain variable region having a LCDR1, LCDR2, and LCDR3, wherein the HCDR1, HCDR2, and HCDR3 comprises an amino acid sequence of SEQ ID NOS: 10351, 17800, and 6014, respectively and the LCDR1, LCDR2, and LCDR3 comprises an amino acid sequence of SEQ ID NOS: 16036, 4404, and 12406, respectively.

[1229] The disclosure describes an antibody, antigen binding fragment, or polypeptide comprising a heavy chain variable region having a HCDR1, HCDR2, and HCDR3, and a light chain variable region having a LCDR1, LCDR2, and LCDR3, wherein the HCDR1, HCDR2, and HCDR3 comprises an amino acid sequence of SEQ ID NOS:17441, 18360, and 11715, respectively and the LCDR1, LCDR2, and LCDR3 comprises an amino acid sequence of SEQ ID NOS:16045, 9503, and 12775, respectively.

[1230] The disclosure describes an antibody, antigen binding fragment, or polypeptide comprising a heavy chain variable region having a HCDR1, HCDR2, and HCDR3, and a light chain variable region having a LCDR1, LCDR2, and LCDR3, wherein the HCDR1, HCDR2, and HCDR3 comprises an amino acid sequence of SEQ ID NOS:16336, 16298, and 10117, respectively and the LCDR1, LCDR2, and LCDR3 comprises an amino acid sequence of SEQ ID NOS: 16340, 3969, and 12515, respectively.

[1231] The disclosure describes an antibody, antigen binding fragment, or polypeptide comprising a heavy chain variable region having a HCDR1, HCDR2, and HCDR3, and a light chain variable region having a LCDR1, LCDR2, and LCDR3, wherein the HCDR1, HCDR2, and HCDR3 comprises an amino acid sequence of SEQ ID NOS:10946, 16892, and 10446, respectively and the LCDR1, LCDR2, and LCDR3 comprises an amino acid sequence of SEQ ID NOS: 16022, 9503, and 12725, respectively.

[1232] The disclosure describes an antibody, antigen binding fragment, or polypeptide comprising a heavy chain variable region having a HCDR1, HCDR2, and HCDR3, and a light chain variable region having a LCDR1, LCDR2, and LCDR3, wherein the HCDR1, HCDR2, and HCDR3 comprises an amino acid sequence of SEQ ID NOS: 16673, 18587, and 7807, respectively and the LCDR1, LCDR2, and LCDR3 comprises an amino acid sequence of SEQ ID NOS:15932, 15643, and 12452, respectively.

[1233] The disclosure describes an antibody, antigen binding fragment, or polypeptide comprising a heavy chain variable region having a HCDR1, HCDR2, and HCDR3, and a light chain variable region having a LCDR1, LCDR2, and LCDR3, wherein the HCDR1, HCDR2, and HCDR3 comprises an amino acid sequence of SEQ ID NOS:17536, 16213, and 11379, respectively and the LCDR1, LCDR2, and LCDR3 comprises an amino acid sequence of SEQ ID NOS:16656, 10746, and 18611, respectively.

[1234] The disclosure describes an antibody, antigen binding fragment, or polypeptide comprising a heavy chain variable region having a HCDR1, HCDR2, and HCDR3, and a light chain variable region having a LCDR1, LCDR2, and LCDR3, wherein the HCDR1, HCDR2, and HCDR3 comprises an amino acid sequence of SEQ ID NOS:16990, 9723, and 10199, respectively and the LCDR1, LCDR2, and LCDR3 comprises an amino acid sequence of SEQ ID NOS: 15775, 4436, and 12751, respectively.

[1235] The disclosure describes an antibody, antigen binding fragment, or polypeptide comprising a heavy chain variable region having a HCDR1, HCDR2, and HCDR3, and a light chain variable region having a LCDR1, LCDR2, and LCDR3, wherein the HCDR1, HCDR2, and HCDR3 comprises an amino acid sequence of SEQ ID NOS: 17270, 17778, and 4461, respectively and the LCDR1, LCDR2, and LCDR3 comprises an amino acid sequence of SEQ ID NOS: 16045, 9494, and 12775, respectively.

[1236] The disclosure describes an antibody, antigen binding fragment, or polypeptide comprising a heavy chain variable region having a HCDR1, HCDR2, and HCDR3, and a light chain variable region having a LCDR1, LCDR2, and LCDR3, wherein the HCDR1, HCDR2, and HCDR3 comprises an amino acid sequence of SEQ ID NOS:9347, 11516, and 18051, respectively and the LCDR1, LCDR2, and LCDR3 comprises an amino acid sequence of SEQ ID NOS:15800, 10930, and 13019, respectively.

[1237] The disclosure describes an antibody, antigen binding fragment, or polypeptide comprising a heavy chain variable region having a HCDR1, HCDR2, and HCDR3, and a light chain variable region having a LCDR1, LCDR2, and LCDR3, wherein the HCDR1, HCDR2, and HCDR3 comprises an amino acid sequence of SEQ ID NOS:17140, 4071, and 9358, respectively and the LCDR1, LCDR2, and LCDR3 comprises an amino acid sequence of SEQ ID NOS:17906, 16330, and 16564, respectively.

[1238] The disclosure describes an antibody, antigen binding fragment, or polypeptide comprising a heavy chain variable region having a HCDR1, HCDR2, and HCDR3, and a light chain variable region having a LCDR1, LCDR2, and LCDR3, wherein the HCDR1, HCDR2, and HCDR3 comprises an amino acid sequence of SEQ ID NOS: 17472, 16235, and 7862, respectively and the LCDR1, LCDR2, and LCDR3 comprises an amino acid sequence of SEQ ID NOS:15657, 10263, and 12355, respectively.

[1239] The disclosure describes an antibody, antigen binding fragment, or polypeptide comprising a heavy chain variable region having a HCDR1, HCDR2, and HCDR3, and a light chain variable region having a LCDR1, LCDR2, and LCDR3, wherein the HCDR1, HCDR2, and HCDR3 comprises an amino acid sequence of SEQ ID NOS:17230, 10548, and 9681, respectively and the LCDR1, LCDR2, and LCDR3 comprises an amino acid sequence of SEQ ID NOS:10899, 18275, and 12359, respectively. having a LCDR1, LCDR2, and LCDR3, wherein the HCDR1, HCDR2, and HCDR3 comprises an amino acid sequence of SEQ ID NOS: 16533, 16240, and 9640, respectively and the LCDR1, LCDR2, and LCDR3 comprises an amino acid sequence of SEQ ID NOS: 16045, 9503, and 12012, respectively.

[1240] The disclosure describes an antibody, antigen binding fragment, or polypeptide comprising a heavy chain variable region having a HCDR1, HCDR2, and HCDR3, and a light chain variable region having a LCDR1, LCDR2, and LCDR3, wherein the HCDR1, HCDR2, and HCDR3 comprises an amino acid sequence of SEQ ID NOS: 17468, 16237, and 6518, respectively and the LCDR1, LCDR2, and LCDR3 comprises an amino acid sequence of SEQ ID NOS: 15888, 6608, and 12410, respectively.

[1241] The disclosure describes an antibody, antigen binding fragment, or polypeptide comprising a heavy chain variable region having a HCDR1, HCDR2, and HCDR3, and a light chain variable region having a LCDR1, LCDR2, and LCDR3, wherein the HCDR1, HCDR2, and HCDR3 comprises an amino acid sequence of SEQ ID NOS:11386, 9759, and 10491, respectively and the LCDR1, LCDR2, and LCDR3 comprises an amino acid sequence of SEQ ID NOS: 16744, 10096, and 3988, respectively.

[1242] The disclosure describes an antibody, antigen binding fragment, or polypeptide comprising a heavy chain variable region having a HCDR1, HCDR2, and HCDR3, and a light chain variable region having a LCDR1, LCDR2, and LCDR3, wherein the HCDR1, HCDR2, and HCDR3 comprises an amino acid sequence of SEQ ID NOS: 17558, 11039, and 4323, respectively and the LCDR1, LCDR2, and LCDR3 comprises an amino acid sequence of SEQ ID NOS:17924, 10094, and 13577, respectively.

[1243] The disclosure describes an antibody, antigen binding fragment, or polypeptide comprising a heavy chain variable region having a HCDR1, HCDR2, and HCDR3, and a light chain variable region having a LCDR1, LCDR2, and LCDR3, wherein the HCDR1, HCDR2, and HCDR3 comprises an amino acid sequence of SEQ ID NOS: 16692, 18571, and 9604, respectively and the LCDR1, LCDR2, and LCDR3 comprises an amino acid sequence of SEQ ID NOS: 16765, 16331, and 3998, respectively.

[1244] The disclosure describes an antibody, antigen binding fragment, or polypeptide comprising a heavy chain variable region having a HCDR1, HCDR2, and HCDR3, and a light chain variable region having a LCDR1, LCDR2, and LCDR3, wherein the HCDR1, HCDR2, and HCDR3 comprises an amino acid sequence of SEQ ID NOS: 17441, 18361, and 6158, respectively and the LCDR1, LCDR2, and LCDR3 comprises an amino acid sequence of SEQ ID NOS:16441, 10926, and 11277, respectively.

[1245] The disclosure describes an antibody, antigen binding fragment, or polypeptide comprising a heavy chain variable region having a HCDR1, HCDR2, and HCDR3, and a light chain variable region having a LCDR1, LCDR2, and LCDR3, wherein the HCDR1, HCDR2, and HCDR3 comprises an amino acid sequence of SEQ ID NOS: 17443, 17759, and 5938, respectively and the LCDR1, LCDR2, and LCDR3 comprises an amino acid sequence of SEQ ID NOS: 16030, 6176, and 12433, respectively.

[1246] The disclosure describes an antibody, antigen binding fragment, or polypeptide comprising a heavy chain variable region having a HCDR1, HCDR2, and HCDR3, and a light chain variable region having a LCDR1, LCDR2, and LCDR3, wherein the HCDR1, HCDR2, and HCDR3 comprises an amino acid sequence of SEQ ID NOS:17645, 11496, and 17732, respectively and the LCDR1, LCDR2, and LCDR3 comprises an amino acid sequence of SEQ ID NOS: 16045, 9503, and 12772, respectively.

[1247] The disclosure describes an antibody, antigen binding fragment, or polypeptide comprising a heavy chain variable region having a HCDR1, HCDR2, and HCDR3, and a light chain variable region having a LCDR1, LCDR2, and LCDR3, wherein the HCDR1, HCDR2, and HCDR3 comprises an amino acid sequence of SEQ ID NOS: 16673, 11532, and 7876, respectively and the LCDR1, LCDR2, and LCDR3 comprises an amino acid sequence of SEQ ID NOS: 15865, 3968, and 12486, respectively.

[1248] The disclosure describes an antibody, antigen binding fragment, or polypeptide comprising a heavy chain variable region having a HCDR1, HCDR2, and HCDR3, and a light chain variable region having a LCDR1, LCDR2, and LCDR3, wherein the HCDR1, HCDR2, and HCDR3 comprises an amino acid sequence of SEQ ID NOS:17263, 9978, and 10027, respectively and the LCDR1, LCDR2, and LCDR3 comprises an amino acid sequence of SEQ ID NOS: 16038, 9488, and 12623, respectively.

[1249] The disclosure describes an antibody, antigen binding fragment, or polypeptide comprising a heavy chain variable region having a HCDR1, HCDR2, and HCDR3, and a light chain variable region having a LCDR1, LCDR2, and LCDR3, wherein the HCDR1, HCDR2, and HCDR3 comprises an amino acid sequence of SEQ ID NOS:16170, 4066, and 7879, respectively and the LCDR1, LCDR2, and LCDR3 comprises an amino acid sequence of SEQ ID NOS:15815, 16143, and 10474, respectively.

[1250] The disclosure describes an antibody, antigen binding fragment, or polypeptide comprising a heavy chain variable region having a HCDR1, HCDR2, and HCDR3, and a light chain variable region having a LCDR1, LCDR2, and LCDR3, wherein the HCDR1, HCDR2, and HCDR3 comprises an amino acid sequence of SEQ ID NOS: 11632, 17754, and 5439, respectively and the LCDR1, LCDR2, and LCDR3 comprises an amino acid sequence of SEQ ID NOS: 16460, 9502, and 12947, respectively.

[1251] The disclosure describes an antibody, antigen binding fragment, or polypeptide comprising a heavy chain variable region having a HCDR1, HCDR2, and HCDR3, and a light chain variable region having a LCDR1, LCDR2, and LCDR3, wherein the HCDR1, HCDR2, and HCDR3 comprises an amino acid sequence of SEQ ID NOS: 11673, 10536, and 4341, respectively and the LCDR1, LCDR2, and LCDR3 comprises an amino acid sequence of SEQ ID NOS:15890, 10727, and 11107, respectively.

[1252] The disclosure describes an antibody, antigen binding fragment, or polypeptide comprising a heavy chain variable region having a HCDR1, HCDR2, and HCDR3, and a light chain variable region having a LCDR1, LCDR2, and LCDR3, wherein the HCDR1, HCDR2, and HCDR3 comprises an amino acid sequence of SEQ ID NOS:17443, 4152, and 4461, respectively and the LCDR1, LCDR2, and LCDR3 comprises an amino acid sequence of SEQ ID NOS: 16067, 4425, and 12433, respectively.

[1253] The disclosure describes an antibody, antigen binding fragment, or polypeptide comprising a heavy chain variable region having a HCDR1, HCDR2, and HCDR3, and a light chain variable region having a LCDR1, LCDR2, and LCDR3, wherein the HCDR1, HCDR2, and HCDR3 comprises an amino acid sequence of SEQ ID NOS:9682, 16234, and 3942, respectively and the LCDR1, LCDR2, and LCDR3 comprises an amino acid sequence of SEQ ID NOS: 16045, 3983, and 12557, respectively.

[1254] The disclosure describes an antibody, antigen binding fragment, or polypeptide comprising a heavy chain variable region having a HCDR1, HCDR2, and HCDR3, and a light chain variable region having a LCDR1, LCDR2, and LCDR3, wherein the HCDR1, HCDR2, and HCDR3 comprises an amino acid sequence of SEQ ID NOS:17471, 16231, and 18455, respectively and the LCDR1, LCDR2, and LCDR3 comprises an amino acid sequence of SEQ ID NOS: 15983, 9503, and 10386, respectively.

[1255] The disclosure describes an antibody, antigen binding fragment, or polypeptide comprising a heavy chain variable region having a HCDR1, HCDR2, and HCDR3, and a light chain variable region having a LCDR1, LCDR2, and LCDR3, wherein the HCDR1, HCDR2, and HCDR3 comprises an amino acid sequence of SEQ ID NOS:9684, 18296, and 18446, respectively and the LCDR1, LCDR2, and LCDR3 comprises an amino acid sequence of SEQ ID NOS: 16738, 5977, and 10272, respectively.

[1256] The disclosure describes an antibody, antigen binding fragment, or polypeptide comprising a heavy chain variable region having a HCDR1, HCDR2, and HCDR3, and a light chain variable region having a LCDR1, LCDR2, and LCDR3, wherein the HCDR1, HCDR2, and HCDR3 comprises an amino acid sequence of SEQ ID NOS: 16610, 10042, and 3946, respectively and the LCDR1, LCDR2, and LCDR3 comprises an amino acid sequence of SEQ ID NOS:15801, 10727, and 12024, respectively.

[1257] The disclosure describes an antibody, antigen binding fragment, or polypeptide comprising a heavy chain variable region having a HCDR1, HCDR2, and HCDR3, and a light chain variable region having a LCDR1, LCDR2, and LCDR3, wherein the HCDR1, HCDR2, and HCDR3 comprises an amino acid sequence of SEQ ID NOS:17838, 11456, and 12105, respectively and the LCDR1, LCDR2, and LCDR3 comprises an amino acid sequence of SEQ ID NOS: 16733, 17007, and 4016, respectively.

[1258] The disclosure describes an antibody, antigen binding fragment, or polypeptide comprising a heavy chain variable region having a HCDR1, HCDR2, and HCDR3, and a light chain variable region having a LCDR1, LCDR2, and LCDR3, wherein the HCDR1, HCDR2, and HCDR3 comprises an amino acid sequence of SEQ ID NOS:17270, 18302, and 17709, respectively and the LCDR1, LCDR2, and LCDR3 comprises an amino acid sequence of SEQ ID NOS: 16382, 10926, and 11293, respectively. having a LCDR1, LCDR2, and LCDR3, wherein the HCDR1, HCDR2, and HCDR3 comprises an amino acid sequence of SEQ ID NOS:6573, 18321, and 10213, respectively and the LCDR1, LCDR2, and LCDR3 comprises an amino acid sequence of SEQ ID NOS: 16773, 10025, and 4000, respectively.

[1259] The disclosure describes an antibody, antigen binding fragment, or polypeptide comprising a heavy chain variable region having a HCDR1, HCDR2, and HCDR3, and a light chain variable region having a LCDR1, LCDR2, and LCDR3, wherein the HCDR1, HCDR2, and HCDR3 comprises an amino acid sequence of SEQ ID NOS: 17621, 17778, and 4399, respectively and the LCDR1, LCDR2, and LCDR3 comprises an amino acid sequence of SEQ ID NOS:15948, 10705, and 12861, respectively.

[1260] The disclosure describes an antibody, antigen binding fragment, or polypeptide comprising a heavy chain variable region having a HCDR1, HCDR2, and HCDR3, and a light chain variable region having a LCDR1, LCDR2, and LCDR3, wherein the HCDR1, HCDR2, and HCDR3 comprises an amino acid sequence of SEQ ID NOS:17631, 8043, and 11116, respectively and the LCDR1, LCDR2, and LCDR3 comprises an amino acid sequence of SEQ ID NOS: 16016, 9477, and 12501, respectively.

[1261] The disclosure describes an antibody, antigen binding fragment, or polypeptide comprising a heavy chain variable region having a HCDR1, HCDR2, and HCDR3, and a light chain variable region having a LCDR1, LCDR2, and LCDR3, wherein the HCDR1, HCDR2, and HCDR3 comprises an amino acid sequence of SEQ ID NOS:11649, 18400, and 10343, respectively and the LCDR1, LCDR2, and LCDR3 comprises an amino acid sequence of SEQ ID NOS: 17953, 6312, and 4337, respectively.

[1262] The disclosure describes an antibody, antigen binding fragment, or polypeptide comprising a heavy chain variable region having a HCDR1, HCDR2, and HCDR3, and a light chain variable region having a LCDR1, LCDR2, and LCDR3, wherein the HCDR1, HCDR2, and HCDR3 comprises an amino acid sequence of SEQ ID NOS:17645, 4070, and 4401, respectively and the LCDR1, LCDR2, and LCDR3 comprises an amino acid sequence of SEQ ID NOS:17927, 10088, and 13323, respectively.

[1263] The disclosure describes an antibody, antigen binding fragment, or polypeptide comprising a heavy chain variable region having a HCDR1, HCDR2, and HCDR3, and a light chain variable region having a LCDR1, LCDR2, and LCDR3, wherein the HCDR1, HCDR2, and HCDR3 comprises an amino acid sequence of SEQ ID NOS:16534, 16241, and 17564, respectively and the LCDR1, LCDR2, and LCDR3 comprises an amino acid sequence of SEQ ID NOS: 16035, 4425, and 12408, respectively.

[1264] The disclosure describes an antibody, antigen binding fragment, or polypeptide comprising a heavy chain variable region having a HCDR1, HCDR2, and HCDR3, and a light chain variable region having a LCDR1, LCDR2, and LCDR3, wherein the HCDR1, HCDR2, and HCDR3 comprises an amino acid sequence of SEQ ID NOS: 17292, 18584, and 6676, respectively and the LCDR1, LCDR2, and LCDR3 comprises an amino acid sequence of SEQ ID NOS: 15893, 9498, and 12518, respectively.

[1265] The disclosure describes an antibody, antigen binding fragment, or polypeptide comprising a heavy chain variable region having a HCDR1, HCDR2, and HCDR3, and a light chain variable region having a LCDR1, LCDR2, and LCDR3, wherein the HCDR1, HCDR2, and HCDR3 comprises an amino acid sequence of SEQ ID NOS:6578, 10410, and 18137, respectively and the LCDR1, LCDR2, and LCDR3 comprises an amino acid sequence of SEQ ID NOS:10847, 18275, and 12980, respectively.

[1266] The disclosure describes an antibody, antigen binding fragment, or polypeptide comprising a heavy chain variable region having a HCDR1, HCDR2, and HCDR3, and a light chain variable region having a LCDR1, LCDR2, and LCDR3, wherein the HCDR1, HCDR2, and HCDR3 comprises an amino acid sequence of SEQ ID NOS: 17627, 10547, and 4232, respectively and the LCDR1, LCDR2, and LCDR3 comprises an amino acid sequence of SEQ ID NOS:16671, 10749, and 18614, respectively.

[1267] The disclosure describes an antibody, antigen binding fragment, or polypeptide comprising a heavy chain variable region having a HCDR1, HCDR2, and HCDR3, and a light chain variable region having a LCDR1, LCDR2, and LCDR3, wherein the HCDR1, HCDR2, and HCDR3 comprises an amino acid sequence of SEQ ID NOS:17562, 16832, and 18444, respectively and the LCDR1, LCDR2, and LCDR3 comprises an amino acid sequence of SEQ ID NOS:17959, 9262, and 17152, respectively.

[1268] The disclosure describes an antibody, antigen binding fragment, or polypeptide comprising a heavy chain variable region having a HCDR1, HCDR2, and HCDR3, and a light chain variable region having a LCDR1, LCDR2, and LCDR3, wherein the HCDR1, HCDR2, and HCDR3 comprises an amino acid sequence of SEQ ID NOS:6501, 4106, and 10185, respectively and the LCDR1, LCDR2, and LCDR3 comprises an amino acid sequence of SEQ ID NOS: 15617, 6604, and 12853, respectively.

[1269] The disclosure describes an antibody, antigen binding fragment, or polypeptide comprising a heavy chain variable region having a HCDR1, HCDR2, and HCDR3, and a light chain variable region having a LCDR1, LCDR2, and LCDR3, wherein the HCDR1, HCDR2, and HCDR3 comprises an amino acid sequence of SEQ ID NOS: 17446, 16856, and 4170, respectively and the LCDR1, LCDR2, and LCDR3 comprises an amino acid sequence of SEQ ID NOS: 16099, 4425, and 12449, respectively.

[1270] The disclosure describes an antibody, antigen binding fragment, or polypeptide comprising a heavy chain variable region having a HCDR1, HCDR2, and HCDR3, and a light chain variable region having a LCDR1, LCDR2, and LCDR3, wherein the HCDR1, HCDR2, and HCDR3 comprises an amino acid sequence of SEQ ID NOS:17604, 9399, and 10584, respectively and the LCDR1, LCDR2, and LCDR3 comprises an amino acid sequence of SEQ ID NOS: 15901, 9503, and 12448, respectively.

[1271] The disclosure describes an antibody, antigen binding fragment, or polypeptide comprising a heavy chain variable region having a HCDR1, HCDR2, and HCDR3, and a light chain variable region having a LCDR1, LCDR2, and LCDR3, wherein the HCDR1, HCDR2, and HCDR3 comprises an amino acid sequence of SEQ ID NOS:17645, 11496, and 17734, respectively and the LCDR1, LCDR2, and LCDR3 comprises an amino acid sequence of SEQ ID NOS:17926, 10088, and 13571, respectively.

[1272] The disclosure describes an antibody, antigen binding fragment, or polypeptide comprising a heavy chain variable region having a HCDR1, HCDR2, and HCDR3, and a light chain variable region having a LCDR1, LCDR2, and LCDR3, wherein the HCDR1, HCDR2, and HCDR3 comprises an amino acid sequence of SEQ ID NOS: 16335, 16297, and 4317, respectively and the LCDR1, LCDR2, and LCDR3 comprises an amino acid sequence of SEQ ID NOS: 15885, 3974, and 12651, respectively.

[1273] The disclosure describes an antibody, antigen binding fragment, or polypeptide comprising a heavy chain variable region having a HCDR1, HCDR2, and HCDR3, and a light chain variable region having a LCDR1, LCDR2, and LCDR3, wherein the HCDR1, HCDR2, and HCDR3 comprises an amino acid sequence of SEQ ID NOS: 17841, 11437, and 4041, respectively and the LCDR1, LCDR2, and LCDR3 comprises an amino acid sequence of SEQ ID NOS: 16045, 9503, and 12433, respectively.

[1274] The disclosure describes an antibody, antigen binding fragment, or polypeptide comprising a heavy chain variable region having a HCDR1, HCDR2, and HCDR3, and a light chain variable region having a LCDR1, LCDR2, and LCDR3, wherein the HCDR1, HCDR2, and HCDR3 comprises an amino acid sequence of SEQ ID NOS:11619, 9777, and 17059, respectively and the LCDR1, LCDR2, and LCDR3 comprises an amino acid sequence of SEQ ID NOS: 17949, 6318, and 17184, respectively.

[1275] The disclosure describes an antibody, antigen binding fragment, or polypeptide comprising a heavy chain variable region having a HCDR1, HCDR2, and HCDR3, and a light chain variable region having a LCDR1, LCDR2, and LCDR3, wherein the HCDR1, HCDR2, and HCDR3 comprises an amino acid sequence of SEQ ID NOS:17580, 17827, and 11063, respectively and the LCDR1, LCDR2, and LCDR3 comprises an amino acid sequence of SEQ ID NOS: 16780, 6242, and 4373, respectively.

[1276] The disclosure describes an antibody, antigen binding fragment, or polypeptide comprising a heavy chain variable region having a HCDR1, HCDR2, and HCDR3, and a light chain variable region having a LCDR1, LCDR2, and LCDR3, wherein the HCDR1, HCDR2, and HCDR3 comprises an amino acid sequence of SEQ ID NOS:10940, 11449, and 10687, respectively and the LCDR1, LCDR2, and LCDR3 comprises an amino acid sequence of SEQ ID NOS:10887, 18275, and 12911, respectively.

[1277] The disclosure describes an antibody, antigen binding fragment, or polypeptide comprising a heavy chain variable region having a HCDR1, HCDR2, and HCDR3, and a light chain variable region having a LCDR1, LCDR2, and LCDR3, wherein the HCDR1, HCDR2, and HCDR3 comprises an amino acid sequence of SEQ ID NOS:17274, 4132, and 10977, respectively and the LCDR1, LCDR2, and LCDR3 comprises an amino acid sequence of SEQ ID NOS:17966, 9261, and 4379, respectively. having a LCDR1, LCDR2, and LCDR3, wherein the HCDR1, HCDR2, and HCDR3 comprises an amino acid sequence of SEQ ID NOS:16536, 16230, and 11055, respectively and the LCDR1, LCDR2, and LCDR3 comprises an amino acid sequence of SEQ ID NOS: 15927, 9494, and 12642, respectively.

[1278] The disclosure describes an antibody, antigen binding fragment, or polypeptide comprising a heavy chain variable region having a HCDR1, HCDR2, and HCDR3, and a light chain variable region having a LCDR1, LCDR2, and LCDR3, wherein the HCDR1, HCDR2, and HCDR3 comprises an amino acid sequence of SEQ ID NOS: 17114, 17751, and 9619, respectively and the LCDR1, LCDR2, and LCDR3 comprises an amino acid sequence of SEQ ID NOS:10795, 18275, and 12371, respectively.

[1279] The disclosure describes an antibody, antigen binding fragment, or polypeptide comprising a heavy chain variable region having a HCDR1, HCDR2, and HCDR3, and a light chain variable region having a LCDR1, LCDR2, and LCDR3, wherein the HCDR1, HCDR2, and HCDR3 comprises an amino acid sequence of SEQ ID NOS:17622, 16922, and 10134, respectively and the LCDR1, LCDR2, and LCDR3 comprises an amino acid sequence of SEQ ID NOS:15916, 9503, and 12725, respectively.

[1280] The disclosure describes an antibody, antigen binding fragment, or polypeptide comprising a heavy chain variable region having a HCDR1, HCDR2, and HCDR3, and a light chain variable region having a LCDR1, LCDR2, and LCDR3, wherein the HCDR1, HCDR2, and HCDR3 comprises an amino acid sequence of SEQ ID NOS:6565, 18539, and 17110, respectively and the LCDR1, LCDR2, and LCDR3 comprises an amino acid sequence of SEQ ID NOS: 16036, 9503, and 12772, respectively.

[1281] The disclosure describes an antibody, antigen binding fragment, or polypeptide comprising a heavy chain variable region having a HCDR1, HCDR2, and HCDR3, and a light chain variable region having a LCDR1, LCDR2, and LCDR3, wherein the HCDR1, HCDR2, and HCDR3 comprises an amino acid sequence of SEQ ID NOS:17536, 16212, and 11379, respectively and the LCDR1, LCDR2, and LCDR3 comprises an amino acid sequence of SEQ ID NOS:16663, 10746, and 18612, respectively.

[1282] The disclosure describes an antibody, antigen binding fragment, or polypeptide comprising a heavy chain variable region having a HCDR1, HCDR2, and HCDR3, and a light chain variable region having a LCDR1, LCDR2, and LCDR3, wherein the HCDR1, HCDR2, and HCDR3 comprises an amino acid sequence of SEQ ID NOS: 17275, 4144, and 4296, respectively and the LCDR1, LCDR2, and LCDR3 comprises an amino acid sequence of SEQ ID NOS: 16743, 17007, and 4018, respectively.

[1283] The disclosure describes an antibody, antigen binding fragment, or polypeptide comprising a heavy chain variable region having a HCDR1, HCDR2, and HCDR3, and a light chain variable region having a LCDR1, LCDR2, and LCDR3, wherein the HCDR1, HCDR2, and HCDR3 comprises an amino acid sequence of SEQ ID NOS:17646, 16245, and 11617, respectively and the LCDR1, LCDR2, and LCDR3 comprises an amino acid sequence of SEQ ID NOS: 17939, 9268, and 4385, respectively.

[1284] The disclosure describes an antibody, antigen binding fragment, or polypeptide comprising a heavy chain variable region having a HCDR1, HCDR2, and HCDR3, and a light chain variable region having a LCDR1, LCDR2, and LCDR3, wherein the HCDR1, HCDR2, and HCDR3 comprises an amino acid sequence of SEQ ID NOS:11679, 16836, and 17859, respectively and the LCDR1, LCDR2, and LCDR3 comprises an amino acid sequence of SEQ ID NOS:10885, 18275, and 12910, respectively.

[1285] The disclosure describes an antibody, antigen binding fragment, or polypeptide comprising a heavy chain variable region having a HCDR1, HCDR2, and HCDR3, and a light chain variable region having a LCDR1, LCDR2, and LCDR3, wherein the HCDR1, HCDR2, and HCDR3 comprises an amino acid sequence of SEQ ID NOS: 10080, 10563, and, respectively and the LCDR1, LCDR2, and LCDR3 comprises an amino acid sequence of SEQ ID NOS:4238, 6212, and 9416, respectively.

[1286] The disclosure describes an antibody, antigen binding fragment, or polypeptide comprising a heavy chain variable region having a HCDR1, HCDR2, and HCDR3, and a light chain variable region having a LCDR1, LCDR2, and LCDR3, wherein the HCDR1, HCDR2, and HCDR3 comprises an amino acid sequence of SEQ ID NOS:6575, 16862, and 11351, respectively and the LCDR1, LCDR2, and LCDR3 comprises an amino acid sequence of SEQ ID NOS:18269, 3982, and 12383, respectively.

[1287] The disclosure describes an antibody, antigen binding fragment, or polypeptide comprising a heavy chain variable region having a HCDR1, HCDR2, and HCDR3, and a light chain variable region having a LCDR1, LCDR2, and LCDR3, wherein the HCDR1, HCDR2, and HCDR3 comprises an amino acid sequence of SEQ ID NOS:11598, 11444, and 11100, respectively and the LCDR1, LCDR2, and LCDR3 comprises an amino acid sequence of SEQ ID NOS:10886, 18275, and 12903, respectively.

[1288] The disclosure describes an antibody, antigen binding fragment, or polypeptide comprising a heavy chain variable region having a HCDR1, HCDR2, and HCDR3, and a light chain variable region having a LCDR1, LCDR2, and LCDR3, wherein the HCDR1, HCDR2, and HCDR3 comprises an amino acid sequence of SEQ ID NOS:10951, 11447, and 10963, respectively and the LCDR1, LCDR2, and LCDR3 comprises an amino acid sequence of SEQ ID NOS:10877, 18275, and 12611, respectively.

[1289] The disclosure describes an antibody, antigen binding fragment, or polypeptide comprising a heavy chain variable region having a HCDR1, HCDR2, and HCDR3, and a light chain variable region having a LCDR1, LCDR2, and LCDR3, wherein the HCDR1, HCDR2, and HCDR3 comprises an amino acid sequence of SEQ ID NOS:11662, 11468, and 11130, respectively and the LCDR1, LCDR2, and LCDR3 comprises an amino acid sequence of SEQ ID NOS:10884, 18268, and 12934, respectively.

[1290] The disclosure describes an antibody, antigen binding fragment, or polypeptide comprising a heavy chain variable region having a HCDR1, HCDR2, and HCDR3, and a light chain variable region having a LCDR1, LCDR2, and LCDR3, wherein the HCDR1, HCDR2, and HCDR3 comprises an amino acid sequence of SEQ ID NOS:10368, 6782, and 15585, respectively and the LCDR1, LCDR2, and LCDR3 comprises an amino acid sequence of SEQ ID NOS: 17959, 6318, and 17163, respectively.

[1291] The disclosure describes an antibody, antigen binding fragment, or polypeptide comprising a heavy chain variable region having a HCDR1, HCDR2, and HCDR3, and a light chain variable region having a LCDR1, LCDR2, and LCDR3, wherein the HCDR1, HCDR2, and HCDR3 comprises an amino acid sequence of SEQ ID NOS:11559, 10568, and 11114, respectively and the LCDR1, LCDR2, and LCDR3 comprises an amino acid sequence of SEQ ID NOS:10813, 18275, and 12903, respectively.

[1292] The disclosure describes an antibody, antigen binding fragment, or polypeptide comprising a heavy chain variable region having a HCDR1, HCDR2, and HCDR3, and a light chain variable region having a LCDR1, LCDR2, and LCDR3, wherein the HCDR1, HCDR2, and HCDR3 comprises an amino acid sequence of SEQ ID NOS:11650, 5893, and 10181, respectively and the LCDR1, LCDR2, and LCDR3 comprises an amino acid sequence of SEQ ID NOS:16149, 17577, and 12546, respectively.

[1293] The disclosure describes an antibody, antigen binding fragment, or polypeptide comprising a heavy chain variable region having a HCDR1, HCDR2, and HCDR3, and a light chain variable region having a LCDR1, LCDR2, and LCDR3, wherein the HCDR1, HCDR2, and HCDR3 comprises an amino acid sequence of SEQ ID NOS:11406, 10568, and 11114, respectively and the LCDR1, LCDR2, and LCDR3 comprises an amino acid sequence of SEQ ID NOS:16147, 10705, and 12858, respectively.

[1294] The disclosure describes an antibody, antigen binding fragment, or polypeptide comprising a heavy chain variable region having a HCDR1, HCDR2, and HCDR3, and a light chain variable region having a LCDR1, LCDR2, and LCDR3, wherein the HCDR1, HCDR2, and HCDR3 comprises an amino acid sequence of SEQ ID NOS:6673, 10560, and 17026, respectively and the LCDR1, LCDR2, and LCDR3 comprises an amino acid sequence of SEQ ID NOS:16658, 12302, and 11868, respectively.

[1295] The disclosure describes an antibody, antigen binding fragment, or polypeptide comprising a heavy chain variable region having a HCDR1, HCDR2, and HCDR3, and a light chain variable region having a LCDR1, LCDR2, and LCDR3, wherein the HCDR1, HCDR2, and HCDR3 comprises an amino acid sequence of SEQ ID NOS:11650, 17792, and 16996, respectively and the LCDR1, LCDR2, and LCDR3 comprises an amino acid sequence of SEQ ID NOS: 15987, 9494, and 10997, respectively.

[1296] The disclosure describes an antibody, antigen binding fragment, or polypeptide comprising a heavy chain variable region having a HCDR1, HCDR2, and HCDR3, and a light chain variable region having a LCDR1, LCDR2, and LCDR3, wherein the HCDR1, HCDR2, and HCDR3 comprises an amino acid sequence of SEQ ID NOS:4321, 16842, and 16814, respectively and the LCDR1, LCDR2, and LCDR3 comprises an amino acid sequence of SEQ ID NOS:10871, 18275, and 12926, respectively. having a LCDR1, LCDR2, and LCDR3, wherein the HCDR1, HCDR2, and HCDR3 comprises an amino acid sequence of SEQ ID NOS: 17228, 10422, and 9622, respectively and the LCDR1, LCDR2, and LCDR3 comprises an amino acid sequence of SEQ ID NOS: 15991, 9474, and 12714, respectively.

[1297] The disclosure describes an antibody, antigen binding fragment, or polypeptide comprising a heavy chain variable region having a HCDR1, HCDR2, and HCDR3, and a light chain variable region having a LCDR1, LCDR2, and LCDR3, wherein the HCDR1, HCDR2, and HCDR3 comprises an amino acid sequence of SEQ ID NOS: 17648, 11457, and 6054, respectively and the LCDR1, LCDR2, and LCDR3 comprises an amino acid sequence of SEQ ID NOS:18087, 11071, and 13613, respectively.

[1298] The disclosure describes an antibody, antigen binding fragment, or polypeptide comprising a heavy chain variable region having a HCDR1, HCDR2, and HCDR3, and a light chain variable region having a LCDR1, LCDR2, and LCDR3, wherein the HCDR1, HCDR2, and HCDR3 comprises an amino acid sequence of SEQ ID NOS: 17456, 18536, and 5994, respectively and the LCDR1, LCDR2, and LCDR3 comprises an amino acid sequence of SEQ ID NOS:18003, 18597, and 11030, respectively.

[1299] The disclosure describes an antibody, antigen binding fragment, or polypeptide comprising a heavy chain variable region having a HCDR1, HCDR2, and HCDR3, and a light chain variable region having a LCDR1, LCDR2, and LCDR3, wherein the HCDR1, HCDR2, and HCDR3 comprises an amino acid sequence of SEQ ID NOS:17069, 9403, and 6071, respectively and the LCDR1, LCDR2, and LCDR3 comprises an amino acid sequence of SEQ ID NOS:15958, 10316, and 12772, respectively.

[1300] The disclosure describes an antibody, antigen binding fragment, or polypeptide comprising a heavy chain variable region having a HCDR1, HCDR2, and HCDR3, and a light chain variable region having a LCDR1, LCDR2, and LCDR3, wherein the HCDR1, HCDR2, and HCDR3 comprises an amino acid sequence of SEQ ID NOS:17291, 17994, and 10111, respectively and the LCDR1, LCDR2, and LCDR3 comprises an amino acid sequence of SEQ ID NOS: 15660, 3969, and 11094, respectively.

[1301] The disclosure describes an antibody, antigen binding fragment, or polypeptide comprising a heavy chain variable region having a HCDR1, HCDR2, and HCDR3, and a light chain variable region having a LCDR1, LCDR2, and LCDR3, wherein the HCDR1, HCDR2, and HCDR3 comprises an amino acid sequence of SEQ ID NOS:7819, 16613, and 9344, respectively and the LCDR1, LCDR2, and LCDR3 comprises an amino acid sequence of SEQ ID NOS: 16409, 9363, and 11344, respectively.

[1302] The disclosure describes an antibody, antigen binding fragment, or polypeptide comprising a heavy chain variable region having a HCDR1, HCDR2, and HCDR3, and a light chain variable region having a LCDR1, LCDR2, and LCDR3, wherein the HCDR1, HCDR2, and HCDR3 comprises an amino acid sequence of SEQ ID NOS:11564, 11443, and 11712, respectively and the LCDR1, LCDR2, and LCDR3 comprises an amino acid sequence of SEQ ID NOS:10799, 18275, and 13013, respectively.

[1303] The disclosure describes an antibody, antigen binding fragment, or polypeptide comprising a heavy chain variable region having a HCDR1, HCDR2, and HCDR3, and a light chain variable region having a LCDR1, LCDR2, and LCDR3, wherein the HCDR1, HCDR2, and HCDR3 comprises an amino acid sequence of SEQ ID NOS:6563, 10678, and 11125, respectively and the LCDR1, LCDR2, and LCDR3 comprises an amino acid sequence of SEQ ID NOS:10816, 18275, and 12967, respectively.

[1304] The disclosure describes an antibody, antigen binding fragment, or polypeptide comprising a heavy chain variable region having a HCDR1, HCDR2, and HCDR3, and a light chain variable region having a LCDR1, LCDR2, and LCDR3, wherein the HCDR1, HCDR2, and HCDR3 comprises an amino acid sequence of SEQ ID NOS:11678, 17997, and 10594, respectively and the LCDR1, LCDR2, and LCDR3 comprises an amino acid sequence of SEQ ID NOS:10816, 18275, and 12918, respectively.

[1305] The disclosure describes an antibody, antigen binding fragment, or polypeptide comprising a heavy chain variable region having a HCDR1, HCDR2, and HCDR3, and a light chain variable region having a LCDR1, LCDR2, and LCDR3, wherein the HCDR1, HCDR2, and HCDR3 comprises an amino acid sequence of SEQ ID NOS:11158, 18343, and 10430, respectively and the LCDR1, LCDR2, and LCDR3 comprises an amino acid sequence of SEQ ID NOS:15832, 10310, and 12461, respectively.

[1306] The disclosure describes an antibody, antigen binding fragment, or polypeptide comprising a heavy chain variable region having a HCDR1, HCDR2, and HCDR3, and a light chain variable region having a LCDR1, LCDR2, and LCDR3, wherein the HCDR1, HCDR2, and HCDR3 comprises an amino acid sequence of SEQ ID NOS:11647, 10007, and 18138, respectively and the LCDR1, LCDR2, and LCDR3 comprises an amino acid sequence of SEQ ID NOS:15917, 4425, and 12442, respectively.

[1307] The disclosure describes an antibody, antigen binding fragment, or polypeptide comprising a heavy chain variable region having a HCDR1, HCDR2, and HCDR3, and a light chain variable region having a LCDR1, LCDR2, and LCDR3, wherein the HCDR1, HCDR2, and HCDR3 comprises an amino acid sequence of SEQ ID NOS:6575, 4329, and 4343, respectively and the LCDR1, LCDR2, and LCDR3 comprises an amino acid sequence of SEQ ID NOS:15661, 16561, and 12382, respectively.

[1308] The disclosure describes an antibody, antigen binding fragment, or polypeptide comprising a heavy chain variable region having a HCDR1, HCDR2, and HCDR3, and a light chain variable region having a LCDR1, LCDR2, and LCDR3, wherein the HCDR1, HCDR2, and HCDR3 comprises an amino acid sequence of SEQ ID NOS:11677, 16258, and 17895, respectively and the LCDR1, LCDR2, and LCDR3 comprises an amino acid sequence of SEQ ID NOS: 10053, 17222, and 4165, respectively.

[1309] The disclosure describes an antibody, antigen binding fragment, or polypeptide comprising a heavy chain variable region having a HCDR1, HCDR2, and HCDR3, and a light chain variable region having a LCDR1, LCDR2, and LCDR3, wherein the HCDR1, HCDR2, and HCDR3 comprises an amino acid sequence of SEQ ID NOS: 11393, 18530, and 9545, respectively and the LCDR1, LCDR2, and LCDR3 comprises an amino acid sequence of SEQ ID NOS:18078, 18596, and 11183, respectively.

[1310] The disclosure describes an antibody, antigen binding fragment, or polypeptide comprising a heavy chain variable region having a HCDR1, HCDR2, and HCDR3, and a light chain variable region having a LCDR1, LCDR2, and LCDR3, wherein the HCDR1, HCDR2, and HCDR3 comprises an amino acid sequence of SEQ ID NOS:11412, 11003, and 11168, respectively and the LCDR1, LCDR2, and LCDR3 comprises an amino acid sequence of SEQ ID NOS: 16412, 10960, and 11194, respectively.

[1311] The disclosure describes an antibody, antigen binding fragment, or polypeptide comprising a heavy chain variable region having a HCDR1, HCDR2, and HCDR3, and a light chain variable region having a LCDR1, LCDR2, and LCDR3, wherein the HCDR1, HCDR2, and HCDR3 comprises an amino acid sequence of SEQ ID NOS:4635, 10553, and 17128, respectively and the LCDR1, LCDR2, and LCDR3 comprises an amino acid sequence of SEQ ID NOS:10781, 10764, and 11224, respectively.

[1312] The disclosure describes an antibody, antigen binding fragment, or polypeptide comprising a heavy chain variable region having a HCDR1, HCDR2, and HCDR3, and a light chain variable region having a LCDR1, LCDR2, and LCDR3, wherein the HCDR1, HCDR2, and HCDR3 comprises an amino acid sequence of SEQ ID NOS: 17466, 18466, and 5955, respectively and the LCDR1, LCDR2, and LCDR3 comprises an amino acid sequence of SEQ ID NOS:16425, 10926, and 11272, respectively.

[1313] The disclosure describes an antibody, antigen binding fragment, or polypeptide comprising a heavy chain variable region having a HCDR1, HCDR2, and HCDR3, and a light chain variable region having a LCDR1, LCDR2, and LCDR3, wherein the HCDR1, HCDR2, and HCDR3 comprises an amino acid sequence of SEQ ID NOS:17842, 11488, and 18031, respectively and the LCDR1, LCDR2, and LCDR3 comprises an amino acid sequence of SEQ ID NOS: 16640, 6634, and 18620, respectively.

[1314] The disclosure describes an antibody, antigen binding fragment, or polypeptide comprising a heavy chain variable region having a HCDR1, HCDR2, and HCDR3, and a light chain variable region having a LCDR1, LCDR2, and LCDR3, wherein the HCDR1, HCDR2, and HCDR3 comprises an amino acid sequence of SEQ ID NOS: 11600, 18524, and 6468, respectively and the LCDR1, LCDR2, and LCDR3 comprises an amino acid sequence of SEQ ID NOS: 15776, 4433, and 12459, respectively.

[1315] The disclosure describes an antibody, antigen binding fragment, or polypeptide comprising a heavy chain variable region having a HCDR1, HCDR2, and HCDR3, and a light chain variable region having a LCDR1, LCDR2, and LCDR3, wherein the HCDR1, HCDR2, and HCDR3 comprises an amino acid sequence of SEQ ID NOS:16544, 11458, and 17659, respectively and the LCDR1, LCDR2, and LCDR3 comprises an amino acid sequence of SEQ ID NOS:10803, 18273, and 16345, respectively. having a LCDR1, LCDR2, and LCDR3, wherein the HCDR1, HCDR2, and HCDR3 comprises an amino acid sequence of SEQ ID NOS: 17886, 18350, and 9425, respectively and the LCDR1, LCDR2, and LCDR3 comprises an amino acid sequence of SEQ ID NOS: 17975, 6245, and 17204, respectively.

[1316] The disclosure describes an antibody, antigen binding fragment, or polypeptide comprising a heavy chain variable region having a HCDR1, HCDR2, and HCDR3, and a light chain variable region having a LCDR1, LCDR2, and LCDR3, wherein the HCDR1, HCDR2, and HCDR3 comprises an amino acid sequence of SEQ ID NOS:4620, 16477, and 4603, respectively and the LCDR1, LCDR2, and LCDR3 comprises an amino acid sequence of SEQ ID NOS:10904, 18275, and 12933, respectively.

[1317] The disclosure describes an antibody, antigen binding fragment, or polypeptide comprising a heavy chain variable region having a HCDR1, HCDR2, and HCDR3, and a light chain variable region having a LCDR1, LCDR2, and LCDR3, wherein the HCDR1, HCDR2, and HCDR3 comprises an amino acid sequence of SEQ ID NOS:7818, 9572, and 9343, respectively and the LCDR1, LCDR2, and LCDR3 comprises an amino acid sequence of SEQ ID NOS: 16409, 9361, and 11272, respectively.

[1318] The disclosure describes an antibody, antigen binding fragment, or polypeptide comprising a heavy chain variable region having a HCDR1, HCDR2, and HCDR3, and a light chain variable region having a LCDR1, LCDR2, and LCDR3, wherein the HCDR1, HCDR2, and HCDR3 comprises an amino acid sequence of SEQ ID NOS: 17466, 18545, and 4460, respectively and the LCDR1, LCDR2, and LCDR3 comprises an amino acid sequence of SEQ ID NOS: 11789, 4420, and 12577, respectively.

[1319] The disclosure describes an antibody, antigen binding fragment, or polypeptide comprising a heavy chain variable region having a HCDR1, HCDR2, and HCDR3, and a light chain variable region having a LCDR1, LCDR2, and LCDR3, wherein the HCDR1, HCDR2, and HCDR3 comprises an amino acid sequence of SEQ ID NOS:4569, 18328, and 17701, respectively and the LCDR1, LCDR2, and LCDR3 comprises an amino acid sequence of SEQ ID NOS: 16056, 9503, and 12644, respectively.

[1320] The disclosure describes an antibody, antigen binding fragment, or polypeptide comprising a heavy chain variable region having a HCDR1, HCDR2, and HCDR3, and a light chain variable region having a LCDR1, LCDR2, and LCDR3, wherein the HCDR1, HCDR2, and HCDR3 comprises an amino acid sequence of SEQ ID NOS: 11630, 17776, and 9627, respectively and the LCDR1, LCDR2, and LCDR3 comprises an amino acid sequence of SEQ ID NOS:16402, 17717, and 11278, respectively.

[1321] The disclosure describes an antibody, antigen binding fragment, or polypeptide comprising a heavy chain variable region having a HCDR1, HCDR2, and HCDR3, and a light chain variable region having a LCDR1, LCDR2, and LCDR3, wherein the HCDR1, HCDR2, and HCDR3 comprises an amino acid sequence of SEQ ID NOS:6571, 11000, and 9666, respectively and the LCDR1, LCDR2, and LCDR3 comprises an amino acid sequence of SEQ ID NOS:16405, 17665, and 11195, respectively.

[1322] The disclosure describes an antibody, antigen binding fragment, or polypeptide comprising a heavy chain variable region having a HCDR1, HCDR2, and HCDR3, and a light chain variable region having a LCDR1, LCDR2, and LCDR3, wherein the HCDR1, HCDR2, and HCDR3 comprises an amino acid sequence of SEQ ID NOS: 17275, 16974, and 6483, respectively and the LCDR1, LCDR2, and LCDR3 comprises an amino acid sequence of SEQ ID NOS:16745, 18105, and 4011, respectively.

[1323] The disclosure describes an antibody, antigen binding fragment, or polypeptide comprising a heavy chain variable region having a HCDR1, HCDR2, and HCDR3, and a light chain variable region having a LCDR1, LCDR2, and LCDR3, wherein the HCDR1, HCDR2, and HCDR3 comprises an amino acid sequence of SEQ ID NOS:5901, 9565, and 9343, respectively and the LCDR1, LCDR2, and LCDR3 comprises an amino acid sequence of SEQ ID NOS: 16409, 9362, and 11344, respectively.

[1324] The disclosure describes an antibody, antigen binding fragment, or polypeptide comprising a heavy chain variable region having a HCDR1, HCDR2, and HCDR3, and a light chain variable region having a LCDR1, LCDR2, and LCDR3, wherein the HCDR1, HCDR2, and HCDR3 comprises an amino acid sequence of SEQ ID NOS:10769, 9858, and 11725, respectively and the LCDR1, LCDR2, and LCDR3 comprises an amino acid sequence of SEQ ID NOS:15847, 10706, and 12015, respectively.

[1325] The disclosure describes an antibody, antigen binding fragment, or polypeptide comprising a heavy chain variable region having a HCDR1, HCDR2, and HCDR3, and a light chain variable region having a LCDR1, LCDR2, and LCDR3, wherein the HCDR1, HCDR2, and HCDR3 comprises an amino acid sequence of SEQ ID NOS:6576, 18322, and 10958, respectively and the LCDR1, LCDR2, and LCDR3 comprises an amino acid sequence of SEQ ID NOS:15880, 10706, and 12015, respectively.

[1326] The disclosure describes an antibody, antigen binding fragment, or polypeptide comprising a heavy chain variable region having a HCDR1, HCDR2, and HCDR3, and a light chain variable region having a LCDR1, LCDR2, and LCDR3, wherein the HCDR1, HCDR2, and HCDR3 comprises an amino acid sequence of SEQ ID NOS:11412, 11136, and 11167, respectively and the LCDR1, LCDR2, and LCDR3 comprises an amino acid sequence of SEQ ID NOS: 16465, 10990, and 11195, respectively.

[1327] The disclosure describes an antibody, antigen binding fragment, or polypeptide comprising a heavy chain variable region having a HCDR1, HCDR2, and HCDR3, and a light chain variable region having a LCDR1, LCDR2, and LCDR3, wherein the HCDR1, HCDR2, and HCDR3 comprises an amino acid sequence of SEQ ID NOS:11424, 11458, and 11937, respectively and the LCDR1, LCDR2, and LCDR3 comprises an amino acid sequence of SEQ ID NOS:16376, 18275, and 10460, respectively.

[1328] The disclosure describes an antibody, antigen binding fragment, or polypeptide comprising a heavy chain variable region having a HCDR1, HCDR2, and HCDR3, and a light chain variable region having a LCDR1, LCDR2, and LCDR3, wherein the HCDR1, HCDR2, and HCDR3 comprises an amino acid sequence of SEQ ID NOS: 17443, 17778, and 4613, respectively and the LCDR1, LCDR2, and LCDR3 comprises an amino acid sequence of SEQ ID NOS: 16045, 9503, and 12775, respectively.

[1329] The disclosure describes an antibody, antigen binding fragment, or polypeptide comprising a heavy chain variable region having a HCDR1, HCDR2, and HCDR3, and a light chain variable region having a LCDR1, LCDR2, and LCDR3, wherein the HCDR1, HCDR2, and HCDR3 comprises an amino acid sequence of SEQ ID NOS:17443, 17798, and 12102, respectively and the LCDR1, LCDR2, and LCDR3 comprises an amino acid sequence of SEQ ID NOS:10891, 18275, and 12973, respectively.

[1330] The disclosure describes an antibody, antigen binding fragment, or polypeptide comprising a heavy chain variable region having a HCDR1, HCDR2, and HCDR3, and a light chain variable region having a LCDR1, LCDR2, and LCDR3, wherein the HCDR1, HCDR2, and HCDR3 comprises an amino acid sequence of SEQ ID NOS:17441, 4326, and 10197, respectively and the LCDR1, LCDR2, and LCDR3 comprises an amino acid sequence of SEQ ID NOS: 10716, 9503, and 12798, respectively.

[1331] The disclosure describes an antibody, antigen binding fragment, or polypeptide comprising a heavy chain variable region having a HCDR1, HCDR2, and HCDR3, and a light chain variable region having a LCDR1, LCDR2, and LCDR3, wherein the HCDR1, HCDR2, and HCDR3 comprises an amino acid sequence of SEQ ID NOS:17023, 18038, and 10369, respectively and the LCDR1, LCDR2, and LCDR3 comprises an amino acid sequence of SEQ ID NOS:16736, 7864, and 10271, respectively.

[1332] The disclosure describes an antibody, antigen binding fragment, or polypeptide comprising a heavy chain variable region having a HCDR1, HCDR2, and HCDR3, and a light chain variable region having a LCDR1, LCDR2, and LCDR3, wherein the HCDR1, HCDR2, and HCDR3 comprises an amino acid sequence of SEQ ID NOS:4251, 10581, and 11355, respectively and the LCDR1, LCDR2, and LCDR3 comprises an amino acid sequence of SEQ ID NOS: 17980, 11610, and 4372, respectively.

[1333] The disclosure describes an antibody, antigen binding fragment, or polypeptide comprising a heavy chain variable region having a HCDR1, HCDR2, and HCDR3, and a light chain variable region having a LCDR1, LCDR2, and LCDR3, wherein the HCDR1, HCDR2, and HCDR3 comprises an amino acid sequence of SEQ ID NOS:6545, 18564, and 6697, respectively and the LCDR1, LCDR2, and LCDR3 comprises an amino acid sequence of SEQ ID NOS: 16741, 16332, and 4014, respectively.

[1334] The disclosure describes an antibody, antigen binding fragment, or polypeptide comprising a heavy chain variable region having a HCDR1, HCDR2, and HCDR3, and a light chain variable region having a LCDR1, LCDR2, and LCDR3, wherein the HCDR1, HCDR2, and HCDR3 comprises an amino acid sequence of SEQ ID NOS:17262, 9798, and 11694, respectively and the LCDR1, LCDR2, and LCDR3 comprises an amino acid sequence of SEQ ID NOS:15809, 10727, and 12020, respectively. having a LCDR1, LCDR2, and LCDR3, wherein the HCDR1, HCDR2, and HCDR3 comprises an amino acid sequence of SEQ ID NOS: 11687, 18519, and 4475, respectively and the LCDR1, LCDR2, and LCDR3 comprises an amino acid sequence of SEQ ID NOS: 15841, 3962, and 12472, respectively.

[1335] The disclosure describes an antibody, antigen binding fragment, or polypeptide comprising a heavy chain variable region having a HCDR1, HCDR2, and HCDR3, and a light chain variable region having a LCDR1, LCDR2, and LCDR3, wherein the HCDR1, HCDR2, and HCDR3 comprises an amino acid sequence of SEQ ID NOS: 17260, 18300, and 4411, respectively and the LCDR1, LCDR2, and LCDR3 comprises an amino acid sequence of SEQ ID NOS:10789, 18275, and 12373, respectively.

[1336] The disclosure describes an antibody, antigen binding fragment, or polypeptide comprising a heavy chain variable region having a HCDR1, HCDR2, and HCDR3, and a light chain variable region having a LCDR1, LCDR2, and LCDR3, wherein the HCDR1, HCDR2, and HCDR3 comprises an amino acid sequence of SEQ ID NOS:17618, 18358, and 17836, respectively and the LCDR1, LCDR2, and LCDR3 comprises an amino acid sequence of SEQ ID NOS:17959, 6318, and 17195, respectively.

[1337] The disclosure describes an antibody, antigen binding fragment, or polypeptide comprising a heavy chain variable region having a HCDR1, HCDR2, and HCDR3, and a light chain variable region having a LCDR1, LCDR2, and LCDR3, wherein the HCDR1, HCDR2, and HCDR3 comprises an amino acid sequence of SEQ ID NOS: 11647, 18372, and 6151, respectively and the LCDR1, LCDR2, and LCDR3 comprises an amino acid sequence of SEQ ID NOS: 16101, 4257, and 12551, respectively.

[1338] The disclosure describes an antibody, antigen binding fragment, or polypeptide comprising a heavy chain variable region having a HCDR1, HCDR2, and HCDR3, and a light chain variable region having a LCDR1, LCDR2, and LCDR3, wherein the HCDR1, HCDR2, and HCDR3 comprises an amino acid sequence of SEQ ID NOS:17856, 18631, and 10328, respectively and the LCDR1, LCDR2, and LCDR3 comprises an amino acid sequence of SEQ ID NOS:15864, 10671, and 12489, respectively.

[1339] The disclosure describes an antibody, antigen binding fragment, or polypeptide comprising a heavy chain variable region having a HCDR1, HCDR2, and HCDR3, and a light chain variable region having a LCDR1, LCDR2, and LCDR3, wherein the HCDR1, HCDR2, and HCDR3 comprises an amino acid sequence of SEQ ID NOS:17441, 18360, and 10519, respectively and the LCDR1, LCDR2, and LCDR3 comprises an amino acid sequence of SEQ ID NOS:16659, 11900, and 11873, respectively.

[1340] The disclosure describes an antibody, antigen binding fragment, or polypeptide comprising a heavy chain variable region having a HCDR1, HCDR2, and HCDR3, and a light chain variable region having a LCDR1, LCDR2, and LCDR3, wherein the HCDR1, HCDR2, and HCDR3 comprises an amino acid sequence of SEQ ID NOS:11566, 18470, and 10329, respectively and the LCDR1, LCDR2, and LCDR3 comprises an amino acid sequence of SEQ ID NOS:15749, 10671, and 12532, respectively.

[1341] The disclosure describes an antibody, antigen binding fragment, or polypeptide comprising a heavy chain variable region having a HCDR1, HCDR2, and HCDR3, and a light chain variable region having a LCDR1, LCDR2, and LCDR3, wherein the HCDR1, HCDR2, and HCDR3 comprises an amino acid sequence of SEQ ID NOS:17569, 16947, and 11927, respectively and the LCDR1, LCDR2, and LCDR3 comprises an amino acid sequence of SEQ ID NOS:16389, 18256, and 12968, respectively.

[1342] The disclosure describes an antibody, antigen binding fragment, or polypeptide comprising a heavy chain variable region having a HCDR1, HCDR2, and HCDR3, and a light chain variable region having a LCDR1, LCDR2, and LCDR3, wherein the HCDR1, HCDR2, and HCDR3 comprises an amino acid sequence of SEQ ID NOS:4324, 18316, and 9655, respectively and the LCDR1, LCDR2, and LCDR3 comprises an amino acid sequence of SEQ ID NOS: 15785, 3953, and 12503, respectively.

[1343] The disclosure describes an antibody, antigen binding fragment, or polypeptide comprising a heavy chain variable region having a HCDR1, HCDR2, and HCDR3, and a light chain variable region having a LCDR1, LCDR2, and LCDR3, wherein the HCDR1, HCDR2, and HCDR3 comprises an amino acid sequence of SEQ ID NOS:17024, 16945, and 10374, respectively and the LCDR1, LCDR2, and LCDR3 comprises an amino acid sequence of SEQ ID NOS:15836, 11368, and 12744, respectively.

[1344] The disclosure describes an antibody, antigen binding fragment, or polypeptide comprising a heavy chain variable region having a HCDR1, HCDR2, and HCDR3, and a light chain variable region having a LCDR1, LCDR2, and LCDR3, wherein the HCDR1, HCDR2, and HCDR3 comprises an amino acid sequence of SEQ ID NOS:11653, 9738, and 17071, respectively and the LCDR1, LCDR2, and LCDR3 comprises an amino acid sequence of SEQ ID NOS: 15981, 9494, and 12664, respectively.

[1345] The disclosure describes an antibody, antigen binding fragment, or polypeptide comprising a heavy chain variable region having a HCDR1, HCDR2, and HCDR3, and a light chain variable region having a LCDR1, LCDR2, and LCDR3, wherein the HCDR1, HCDR2, and HCDR3 comprises an amino acid sequence of SEQ ID NOS:11648, 18391, and 10172, respectively and the LCDR1, LCDR2, and LCDR3 comprises an amino acid sequence of SEQ ID NOS: 16771, 5988, and 10270, respectively.

[1346] The disclosure describes an antibody, antigen binding fragment, or polypeptide comprising a heavy chain variable region having a HCDR1, HCDR2, and HCDR3, and a light chain variable region having a LCDR1, LCDR2, and LCDR3, wherein the HCDR1, HCDR2, and HCDR3 comprises an amino acid sequence of SEQ ID NOS: 11650, 11012, and 9531, respectively and the LCDR1, LCDR2, and LCDR3 comprises an amino acid sequence of SEQ ID NOS:15728, 10697, and 12875, respectively.

[1347] The disclosure describes an antibody, antigen binding fragment, or polypeptide comprising a heavy chain variable region having a HCDR1, HCDR2, and HCDR3, and a light chain variable region having a LCDR1, LCDR2, and LCDR3, wherein the HCDR1, HCDR2, and HCDR3 comprises an amino acid sequence of SEQ ID NOS:11690, 18585, and 10299, respectively and the LCDR1, LCDR2, and LCDR3 comprises an amino acid sequence of SEQ ID NOS: 15688, 11732, and 12338, respectively.

[1348] The disclosure describes an antibody, antigen binding fragment, or polypeptide comprising a heavy chain variable region having a HCDR1, HCDR2, and HCDR3, and a light chain variable region having a LCDR1, LCDR2, and LCDR3, wherein the HCDR1, HCDR2, and HCDR3 comprises an amino acid sequence of SEQ ID NOS:11675, 16215, and 10440, respectively and the LCDR1, LCDR2, and LCDR3 comprises an amino acid sequence of SEQ ID NOS: 16733, 18445, and 4001, respectively.

[1349] The disclosure describes an antibody, antigen binding fragment, or polypeptide comprising a heavy chain variable region having a HCDR1, HCDR2, and HCDR3, and a light chain variable region having a LCDR1, LCDR2, and LCDR3, wherein the HCDR1, HCDR2, and HCDR3 comprises an amino acid sequence of SEQ ID NOS:16778, 16985, and 15601, respectively and the LCDR1, LCDR2, and LCDR3 comprises an amino acid sequence of SEQ ID NOS:18053, 11070, and 13620, respectively.

[1350] The disclosure describes an antibody, antigen binding fragment, or polypeptide comprising a heavy chain variable region having a HCDR1, HCDR2, and HCDR3, and a light chain variable region having a LCDR1, LCDR2, and LCDR3, wherein the HCDR1, HCDR2, and HCDR3 comprises an amino acid sequence of SEQ ID NOS:16785, 16984, and 15600, respectively and the LCDR1, LCDR2, and LCDR3 comprises an amino acid sequence of SEQ ID NOS:18052, 11070, and 13620, respectively.

[1351] The disclosure describes an antibody, antigen binding fragment, or polypeptide comprising a heavy chain variable region having a HCDR1, HCDR2, and HCDR3, and a light chain variable region having a LCDR1, LCDR2, and LCDR3, wherein the HCDR1, HCDR2, and HCDR3 comprises an amino acid sequence of SEQ ID NOS: 11647, 18432, and 4488, respectively and the LCDR1, LCDR2, and LCDR3 comprises an amino acid sequence of SEQ ID NOS:16353, 10926, and 11280, respectively.

[1352] The disclosure describes an antibody, antigen binding fragment, or polypeptide comprising a heavy chain variable region having a HCDR1, HCDR2, and HCDR3, and a light chain variable region having a LCDR1, LCDR2, and LCDR3, wherein the HCDR1, HCDR2, and HCDR3 comprises an amino acid sequence of SEQ ID NOS: 11690, 18472, and 4473, respectively and the LCDR1, LCDR2, and LCDR3 comprises an amino acid sequence of SEQ ID NOS: 15802, 3966, and 12488, respectively.

[1353] The disclosure describes an antibody, antigen binding fragment, or polypeptide comprising a heavy chain variable region having a HCDR1, HCDR2, and HCDR3, and a light chain variable region having a LCDR1, LCDR2, and LCDR3, wherein the HCDR1, HCDR2, and HCDR3 comprises an amino acid sequence of SEQ ID NOS:4308, 16857, and 6470, respectively and the LCDR1, LCDR2, and LCDR3 comprises an amino acid sequence of SEQ ID NOS:16766, 18102, and 4285, respectively. having a LCDR1, LCDR2, and LCDR3, wherein the HCDR1, HCDR2, and HCDR3 comprises an amino acid sequence of SEQ ID NOS:11655, 18634, and 10325, respectively and the LCDR1, LCDR2, and LCDR3 comprises an amino acid sequence of SEQ ID NOS:15705, 10671, and 12489, respectively.

[1354] The disclosure describes an antibody, antigen binding fragment, or polypeptide comprising a heavy chain variable region having a HCDR1, HCDR2, and HCDR3, and a light chain variable region having a LCDR1, LCDR2, and LCDR3, wherein the HCDR1, HCDR2, and HCDR3 comprises an amino acid sequence of SEQ ID NOS:17274, 9695, and 5961, respectively and the LCDR1, LCDR2, and LCDR3 comprises an amino acid sequence of SEQ ID NOS: 16709, 16327, and 4245, respectively.

[1355] The disclosure describes an antibody, antigen binding fragment, or polypeptide comprising a heavy chain variable region having a HCDR1, HCDR2, and HCDR3, and a light chain variable region having a LCDR1, LCDR2, and LCDR3, wherein the HCDR1, HCDR2, and HCDR3 comprises an amino acid sequence of SEQ ID NOS:17552, 11039, and 11572, respectively and the LCDR1, LCDR2, and LCDR3 comprises an amino acid sequence of SEQ ID NOS:10883, 18275, and 12968, respectively.

[1356] The disclosure describes an antibody, antigen binding fragment, or polypeptide comprising a heavy chain variable region having a HCDR1, HCDR2, and HCDR3, and a light chain variable region having a LCDR1, LCDR2, and LCDR3, wherein the HCDR1, HCDR2, and HCDR3 comprises an amino acid sequence of SEQ ID NOS:4630, 9410, and 10168, respectively and the LCDR1, LCDR2, and LCDR3 comprises an amino acid sequence of SEQ ID NOS:10869, 18275, and 12959, respectively.

[1357] The disclosure describes an antibody, antigen binding fragment, or polypeptide comprising a heavy chain variable region having a HCDR1, HCDR2, and HCDR3, and a light chain variable region having a LCDR1, LCDR2, and LCDR3, wherein the HCDR1, HCDR2, and HCDR3 comprises an amino acid sequence of SEQ ID NOS:4310, 9395, and 6084, respectively and the LCDR1, LCDR2, and LCDR3 comprises an amino acid sequence of SEQ ID NOS: 15860, 4425, and 12415, respectively.

[1358] The disclosure describes an antibody, antigen binding fragment, or polypeptide comprising a heavy chain variable region having a HCDR1, HCDR2, and HCDR3, and a light chain variable region having a LCDR1, LCDR2, and LCDR3, wherein the HCDR1, HCDR2, and HCDR3 comprises an amino acid sequence of SEQ ID NOS:4311, 18393, and 9580, respectively and the LCDR1, LCDR2, and LCDR3 comprises an amino acid sequence of SEQ ID NOS: 15900, 3953, and 12531, respectively.

[1359] The disclosure describes an antibody, antigen binding fragment, or polypeptide comprising a heavy chain variable region having a HCDR1, HCDR2, and HCDR3, and a light chain variable region having a LCDR1, LCDR2, and LCDR3, wherein the HCDR1, HCDR2, and HCDR3 comprises an amino acid sequence of SEQ ID NOS: 17656, 18635, and 4479, respectively and the LCDR1, LCDR2, and LCDR3 comprises an amino acid sequence of SEQ ID NOS: 16117, 3964, and 12401, respectively.

[1360] The disclosure describes an antibody, antigen binding fragment, or polypeptide comprising a heavy chain variable region having a HCDR1, HCDR2, and HCDR3, and a light chain variable region having a LCDR1, LCDR2, and LCDR3, wherein the HCDR1, HCDR2, and HCDR3 comprises an amino acid sequence of SEQ ID NOS:11408, 16263, and 17250, respectively and the LCDR1, LCDR2, and LCDR3 comprises an amino acid sequence of SEQ ID NOS:16133, 17666, and 12547, respectively.

[1361] The disclosure describes an antibody, antigen binding fragment, or polypeptide comprising a heavy chain variable region having a HCDR1, HCDR2, and HCDR3, and a light chain variable region having a LCDR1, LCDR2, and LCDR3, wherein the HCDR1, HCDR2, and HCDR3 comprises an amino acid sequence of SEQ ID NOS:10768, 10537, and 16606, respectively and the LCDR1, LCDR2, and LCDR3 comprises an amino acid sequence of SEQ ID NOS:16652, 11893, and 11864, respectively.

[1362] The disclosure describes an antibody, antigen binding fragment, or polypeptide comprising a heavy chain variable region having a HCDR1, HCDR2, and HCDR3, and a light chain variable region having a LCDR1, LCDR2, and LCDR3, wherein the HCDR1, HCDR2, and HCDR3 comprises an amino acid sequence of SEQ ID NOS: 11647, 18370, and 6152, respectively and the LCDR1, LCDR2, and LCDR3 comprises an amino acid sequence of SEQ ID NOS:16100, 4257, and 12551, respectively.

[1363] The disclosure describes an antibody, antigen binding fragment, or polypeptide comprising a heavy chain variable region having a HCDR1, HCDR2, and HCDR3, and a light chain variable region having a LCDR1, LCDR2, and LCDR3, wherein the HCDR1, HCDR2, and HCDR3 comprises an amino acid sequence of SEQ ID NOS:16374, 17244, and 10371, respectively and the LCDR1, LCDR2, and LCDR3 comprises an amino acid sequence of SEQ ID NOS:15907, 6614, and 12807, respectively.

[1364] The disclosure describes an antibody, antigen binding fragment, or polypeptide comprising a heavy chain variable region having a HCDR1, HCDR2, and HCDR3, and a light chain variable region having a LCDR1, LCDR2, and LCDR3, wherein the HCDR1, HCDR2, and HCDR3 comprises an amino acid sequence of SEQ ID NOS: 17475, 16830, and 6698, respectively and the LCDR1, LCDR2, and LCDR3 comprises an amino acid sequence of SEQ ID NOS:18081, 18134, and 13619, respectively.

[1365] The disclosure describes an antibody, antigen binding fragment, or polypeptide comprising a heavy chain variable region having a HCDR1, HCDR2, and HCDR3, and a light chain variable region having a LCDR1, LCDR2, and LCDR3, wherein the HCDR1, HCDR2, and HCDR3 comprises an amino acid sequence of SEQ ID NOS:17558, 11040, and 11571, respectively and the LCDR1, LCDR2, and LCDR3 comprises an amino acid sequence of SEQ ID NOS:10874, 18275, and 10478, respectively.

[1366] The disclosure describes an antibody, antigen binding fragment, or polypeptide comprising a heavy chain variable region having a HCDR1, HCDR2, and HCDR3, and a light chain variable region having a LCDR1, LCDR2, and LCDR3, wherein the HCDR1, HCDR2, and HCDR3 comprises an amino acid sequence of SEQ ID NOS:16793, 10564, and 10307, respectively and the LCDR1, LCDR2, and LCDR3 comprises an amino acid sequence of SEQ ID NOS:9635, 4467, and 15561, respectively.

[1367] The disclosure describes an antibody, antigen binding fragment, or polypeptide comprising a heavy chain variable region having a HCDR1, HCDR2, and HCDR3, and a light chain variable region having a LCDR1, LCDR2, and LCDR3, wherein the HCDR1, HCDR2, and HCDR3 comprises an amino acid sequence of SEQ ID NOS: 17649, 11429, and 9605, respectively and the LCDR1, LCDR2, and LCDR3 comprises an amino acid sequence of SEQ ID NOS: 15789, 3969, and 12500, respectively.

[1368] The disclosure describes an antibody, antigen binding fragment, or polypeptide comprising a heavy chain variable region having a HCDR1, HCDR2, and HCDR3, and a light chain variable region having a LCDR1, LCDR2, and LCDR3, wherein the HCDR1, HCDR2, and HCDR3 comprises an amino acid sequence of SEQ ID NOS: 11650, 9420, and 6024, respectively and the LCDR1, LCDR2, and LCDR3 comprises an amino acid sequence of SEQ ID NOS:16437, 10931, and 11271, respectively.

[1369] The disclosure describes an antibody, antigen binding fragment, or polypeptide comprising a heavy chain variable region having a HCDR1, HCDR2, and HCDR3, and a light chain variable region having a LCDR1, LCDR2, and LCDR3, wherein the HCDR1, HCDR2, and HCDR3 comprises an amino acid sequence of SEQ ID NOS:6507, 9971, and 4586, respectively and the LCDR1, LCDR2, and LCDR3 comprises an amino acid sequence of SEQ ID NOS: 16045, 9503, and 12772, respectively.

[1370] The disclosure describes an antibody, antigen binding fragment, or polypeptide comprising a heavy chain variable region having a HCDR1, HCDR2, and HCDR3, and a light chain variable region having a LCDR1, LCDR2, and LCDR3, wherein the HCDR1, HCDR2, and HCDR3 comprises an amino acid sequence of SEQ ID NOS: 10759, 4668, and 4469, respectively and the LCDR1, LCDR2, and LCDR3 comprises an amino acid sequence of SEQ ID NOS:17914, 16333, and 16566, respectively.

[1371] The disclosure describes an antibody, antigen binding fragment, or polypeptide comprising a heavy chain variable region having a HCDR1, HCDR2, and HCDR3, and a light chain variable region having a LCDR1, LCDR2, and LCDR3, wherein the HCDR1, HCDR2, and HCDR3 comprises an amino acid sequence of SEQ ID NOS:11632, 17821, and 10239, respectively and the LCDR1, LCDR2, and LCDR3 comprises an amino acid sequence of SEQ ID NOS:15702, 3961, and 12944, respectively.

[1372] The disclosure describes an antibody, antigen binding fragment, or polypeptide comprising a heavy chain variable region having a HCDR1, HCDR2, and HCDR3, and a light chain variable region having a LCDR1, LCDR2, and LCDR3, wherein the HCDR1, HCDR2, and HCDR3 comprises an amino acid sequence of SEQ ID NOS:17124, 18039, and 17697, respectively and the LCDR1, LCDR2, and LCDR3 comprises an amino acid sequence of SEQ ID NOS:10810, 18275, and 12992, respectively. having a LCDR1, LCDR2, and LCDR3, wherein the HCDR1, HCDR2, and HCDR3 comprises an amino acid sequence of SEQ ID NOS:16962, 17821, and 10239, respectively and the LCDR1, LCDR2, and LCDR3 comprises an amino acid sequence of SEQ ID NOS: 15771, 9502, and 12743, respectively.

[1373] The disclosure describes an antibody, antigen binding fragment, or polypeptide comprising a heavy chain variable region having a HCDR1, HCDR2, and HCDR3, and a light chain variable region having a LCDR1, LCDR2, and LCDR3, wherein the HCDR1, HCDR2, and HCDR3 comprises an amino acid sequence of SEQ ID NOS:6509, 9957, and 4197, respectively and the LCDR1, LCDR2, and LCDR3 comprises an amino acid sequence of SEQ ID NOS:15619, 10264, and 12794, respectively.

[1374] The disclosure describes an antibody, antigen binding fragment, or polypeptide comprising a heavy chain variable region having a HCDR1, HCDR2, and HCDR3, and a light chain variable region having a LCDR1, LCDR2, and LCDR3, wherein the HCDR1, HCDR2, and HCDR3 comprises an amino acid sequence of SEQ ID NOS: 17278, 17739, and 4297, respectively and the LCDR1, LCDR2, and LCDR3 comprises an amino acid sequence of SEQ ID NOS:9626, 5985, and 15553, respectively.

[1375] The disclosure describes an antibody, antigen binding fragment, or polypeptide comprising a heavy chain variable region having a HCDR1, HCDR2, and HCDR3, and a light chain variable region having a LCDR1, LCDR2, and LCDR3, wherein the HCDR1, HCDR2, and HCDR3 comprises an amino acid sequence of SEQ ID NOS:16962, 17821, and 10239, respectively and the LCDR1, LCDR2, and LCDR3 comprises an amino acid sequence of SEQ ID NOS:16104, 9503, and 12867, respectively.

[1376] The disclosure describes an antibody, antigen binding fragment, or polypeptide comprising a heavy chain variable region having a HCDR1, HCDR2, and HCDR3, and a light chain variable region having a LCDR1, LCDR2, and LCDR3, wherein the HCDR1, HCDR2, and HCDR3 comprises an amino acid sequence of SEQ ID NOS:16962, 17821, and 10239, respectively and the LCDR1, LCDR2, and LCDR3 comprises an amino acid sequence of SEQ ID NOS:17959, 6327, and 17187, respectively.

[1377] The disclosure describes an antibody, antigen binding fragment, or polypeptide comprising a heavy chain variable region having a HCDR1, HCDR2, and HCDR3, and a light chain variable region having a LCDR1, LCDR2, and LCDR3, wherein the HCDR1, HCDR2, and HCDR3 comprises an amino acid sequence of SEQ ID NOS:16962, 17821, and 10239, respectively and the LCDR1, LCDR2, and LCDR3 comprises an amino acid sequence of SEQ ID NOS: 10532, 10093, and 17234, respectively.

[1378] The disclosure describes an antibody, antigen binding fragment, or polypeptide comprising a heavy chain variable region having a HCDR1, HCDR2, and HCDR3, and a light chain variable region having a LCDR1, LCDR2, and LCDR3, wherein the HCDR1, HCDR2, and HCDR3 comprises an amino acid sequence of SEQ ID NOS:17278, 9741, and 4298, respectively and the LCDR1, LCDR2, and LCDR3 comprises an amino acid sequence of SEQ ID NOS:9625, 5985, and 15553, respectively.

[1379] The disclosure describes an antibody, antigen binding fragment, or polypeptide comprising a heavy chain variable region having a HCDR1, HCDR2, and HCDR3, and a light chain variable region having a LCDR1, LCDR2, and LCDR3, wherein the HCDR1, HCDR2, and HCDR3 comprises an amino acid sequence of SEQ ID NOS:17474, 9985, and 18421, respectively and the LCDR1, LCDR2, and LCDR3 comprises an amino acid sequence of SEQ ID NOS: 10828, 9267, and 11310, respectively.

[1380] The disclosure describes an antibody, antigen binding fragment, or polypeptide comprising a heavy chain variable region having a HCDR1, HCDR2, and HCDR3, and a light chain variable region having a LCDR1, LCDR2, and LCDR3, wherein the HCDR1, HCDR2, and HCDR3 comprises an amino acid sequence of SEQ ID NOS: 16822, 16290, and 4501, respectively and the LCDR1, LCDR2, and LCDR3 comprises an amino acid sequence of SEQ ID NOS: 15880, 3953, and 12519, respectively.

[1381] The disclosure describes an antibody, antigen binding fragment, or polypeptide comprising a heavy chain variable region having a HCDR1, HCDR2, and HCDR3, and a light chain variable region having a LCDR1, LCDR2, and LCDR3, wherein the HCDR1, HCDR2, and HCDR3 comprises an amino acid sequence of SEQ ID NOS:17432, 18483, and 17652, respectively and the LCDR1, LCDR2, and LCDR3 comprises an amino acid sequence of SEQ ID NOS:15826, 11791, and 12816, respectively.

[1382] The disclosure describes an antibody, antigen binding fragment, or polypeptide comprising a heavy chain variable region having a HCDR1, HCDR2, and HCDR3, and a light chain variable region having a LCDR1, LCDR2, and LCDR3, wherein the HCDR1, HCDR2, and HCDR3 comprises an amino acid sequence of SEQ ID NOS:16962, 17821, and 10239, respectively and the LCDR1, LCDR2, and LCDR3 comprises an amino acid sequence of SEQ ID NOS:16450, 18262, and 12954, respectively.

[1383] The disclosure describes an antibody, antigen binding fragment, or polypeptide comprising a heavy chain variable region having a HCDR1, HCDR2, and HCDR3, and a light chain variable region having a LCDR1, LCDR2, and LCDR3, wherein the HCDR1, HCDR2, and HCDR3 comprises an amino acid sequence of SEQ ID NOS:16962, 17821, and 10239, respectively and the LCDR1, LCDR2, and LCDR3 comprises an amino acid sequence of SEQ ID NOS:18048, 18609, and 11177, respectively.

[1384] The disclosure describes an antibody, antigen binding fragment, or polypeptide comprising a heavy chain variable region having a HCDR1, HCDR2, and HCDR3, and a light chain variable region having a LCDR1, LCDR2, and LCDR3, wherein the HCDR1, HCDR2, and HCDR3 comprises an amino acid sequence of SEQ ID NOS:16962, 17821, and 10239, respectively and the LCDR1, LCDR2, and LCDR3 comprises an amino acid sequence of SEQ ID NOS:4053, 10076, and 17237, respectively.

[1385] The disclosure describes an antibody, antigen binding fragment, or polypeptide comprising a heavy chain variable region having a HCDR1, HCDR2, and HCDR3, and a light chain variable region having a LCDR1, LCDR2, and LCDR3, wherein the HCDR1, HCDR2, and HCDR3 comprises an amino acid sequence of SEQ ID NOS:17263, 9739, and 10484, respectively and the LCDR1, LCDR2, and LCDR3 comprises an amino acid sequence of SEQ ID NOS: 10830, 9267, and 11307, respectively.

[1386] The disclosure describes an antibody, antigen binding fragment, or polypeptide comprising a heavy chain variable region having a HCDR1, HCDR2, and HCDR3, and a light chain variable region having a LCDR1, LCDR2, and LCDR3, wherein the HCDR1, HCDR2, and HCDR3 comprises an amino acid sequence of SEQ ID NOS: 17020, 10294, and 6089, respectively and the LCDR1, LCDR2, and LCDR3 comprises an amino acid sequence of SEQ ID NOS: 11789, 4420, and 12577, respectively.

[1387] The disclosure describes an antibody, antigen binding fragment, or polypeptide comprising a heavy chain variable region having a HCDR1, HCDR2, and HCDR3, and a light chain variable region having a LCDR1, LCDR2, and LCDR3, wherein the HCDR1, HCDR2, and HCDR3 comprises an amino acid sequence of SEQ ID NOS:17446, 4271, and 6496, respectively and the LCDR1, LCDR2, and LCDR3 comprises an amino acid sequence of SEQ ID NOS:16754, 17001, and 17671, respectively.

[1388] The disclosure describes an antibody, antigen binding fragment, or polypeptide comprising a heavy chain variable region having a HCDR1, HCDR2, and HCDR3, and a light chain variable region having a LCDR1, LCDR2, and LCDR3, wherein the HCDR1, HCDR2, and HCDR3 comprises an amino acid sequence of SEQ ID NOS:18641, 4166, and 10239, respectively and the LCDR1, LCDR2, and LCDR3 comprises an amino acid sequence of SEQ ID NOS:16641, 10747, and 13020, respectively.

[1389] The disclosure describes an antibody, antigen binding fragment, or polypeptide comprising a heavy chain variable region having a HCDR1, HCDR2, and HCDR3, and a light chain variable region having a LCDR1, LCDR2, and LCDR3, wherein the HCDR1, HCDR2, and HCDR3 comprises an amino acid sequence of SEQ ID NOS:17053, 11006, and 17911, respectively and the LCDR1, LCDR2, and LCDR3 comprises an amino acid sequence of SEQ ID NOS: 15762, 3986, and 12539, respectively.

[1390] The disclosure describes an antibody, antigen binding fragment, or polypeptide comprising a heavy chain variable region having a HCDR1, HCDR2, and HCDR3, and a light chain variable region having a LCDR1, LCDR2, and LCDR3, wherein the HCDR1, HCDR2, and HCDR3 comprises an amino acid sequence of SEQ ID NOS:11678, 11489, and 10239, respectively and the LCDR1, LCDR2, and LCDR3 comprises an amino acid sequence of SEQ ID NOS:10875, 18271, and 12899, respectively.

[1391] The disclosure describes an antibody, antigen binding fragment, or polypeptide comprising a heavy chain variable region having a HCDR1, HCDR2, and HCDR3, and a light chain variable region having a LCDR1, LCDR2, and LCDR3, wherein the HCDR1, HCDR2, and HCDR3 comprises an amino acid sequence of SEQ ID NOS:16962, 17821, and 10239, respectively and the LCDR1, LCDR2, and LCDR3 comprises an amino acid sequence of SEQ ID NOS: 16735, 10087, and 17672, respectively. having a LCDR1, LCDR2, and LCDR3, wherein the HCDR1, HCDR2, and HCDR3 comprises an amino acid sequence of SEQ ID NOS: 17263, 9812, and 4338, respectively and the LCDR1, LCDR2, and LCDR3 comprises an amino acid sequence of SEQ ID NOS:11790, 10727, and 12016, respectively.

[1392] The disclosure describes an antibody, antigen binding fragment, or polypeptide comprising a heavy chain variable region having a HCDR1, HCDR2, and HCDR3, and a light chain variable region having a LCDR1, LCDR2, and LCDR3, wherein the HCDR1, HCDR2, and HCDR3 comprises an amino acid sequence of SEQ ID NOS:17478, 18396, and 16190, respectively and the LCDR1, LCDR2, and LCDR3 comprises an amino acid sequence of SEQ ID NOS:15768, 3974, and 12681, respectively.

[1393] The disclosure describes an antibody, antigen binding fragment, or polypeptide comprising a heavy chain variable region having a HCDR1, HCDR2, and HCDR3, and a light chain variable region having a LCDR1, LCDR2, and LCDR3, wherein the HCDR1, HCDR2, and HCDR3 comprises an amino acid sequence of SEQ ID NOS: 16567, 4332, and 9675, respectively and the LCDR1, LCDR2, and LCDR3 comprises an amino acid sequence of SEQ ID NOS: 16731, 7859, and 10284, respectively.

[1394] The disclosure describes an antibody, antigen binding fragment, or polypeptide comprising a heavy chain variable region having a HCDR1, HCDR2, and HCDR3, and a light chain variable region having a LCDR1, LCDR2, and LCDR3, wherein the HCDR1, HCDR2, and HCDR3 comprises an amino acid sequence of SEQ ID NOS:16962, 17821, and 10239, respectively and the LCDR1, LCDR2, and LCDR3 comprises an amino acid sequence of SEQ ID NOS:15652, 9470, and 11981, respectively.

[1395] The disclosure describes an antibody, antigen binding fragment, or polypeptide comprising a heavy chain variable region having a HCDR1, HCDR2, and HCDR3, and a light chain variable region having a LCDR1, LCDR2, and LCDR3, wherein the HCDR1, HCDR2, and HCDR3 comprises an amino acid sequence of SEQ ID NOS:16962, 17821, and 10239, respectively and the LCDR1, LCDR2, and LCDR3 comprises an amino acid sequence of SEQ ID NOS: 15708, 3980, and 12395, respectively.

[1396] The disclosure describes an antibody, antigen binding fragment, or polypeptide comprising a heavy chain variable region having a HCDR1, HCDR2, and HCDR3, and a light chain variable region having a LCDR1, LCDR2, and LCDR3, wherein the HCDR1, HCDR2, and HCDR3 comprises an amino acid sequence of SEQ ID NOS: 16632, 11172, and 4643, respectively and the LCDR1, LCDR2, and LCDR3 comprises an amino acid sequence of SEQ ID NOS: 17952, 9275, and 17172, respectively.

[1397] The disclosure describes an antibody, antigen binding fragment, or polypeptide comprising a heavy chain variable region having a HCDR1, HCDR2, and HCDR3, and a light chain variable region having a LCDR1, LCDR2, and LCDR3, wherein the HCDR1, HCDR2, and HCDR3 comprises an amino acid sequence of SEQ ID NOS: 11654, 18349, and 4578, respectively and the LCDR1, LCDR2, and LCDR3 comprises an amino acid sequence of SEQ ID NOS: 16371, 9257, and 11279, respectively.

[1398] The disclosure describes an antibody, antigen binding fragment, or polypeptide comprising a heavy chain variable region having a HCDR1, HCDR2, and HCDR3, and a light chain variable region having a LCDR1, LCDR2, and LCDR3, wherein the HCDR1, HCDR2, and HCDR3 comprises an amino acid sequence of SEQ ID NOS: 17619, 18399, and 4235, respectively and the LCDR1, LCDR2, and LCDR3 comprises an amino acid sequence of SEQ ID NOS: 17961, 9275, and 17173, respectively.

[1399] The disclosure describes an antibody, antigen binding fragment, or polypeptide comprising a heavy chain variable region having a HCDR1, HCDR2, and HCDR3, and a light chain variable region having a LCDR1, LCDR2, and LCDR3, wherein the HCDR1, HCDR2, and HCDR3 comprises an amino acid sequence of SEQ ID NOS:16962, 17821, and 10239, respectively and the LCDR1, LCDR2, and LCDR3 comprises an amino acid sequence of SEQ ID NOS:10817, 18275, and 12904, respectively.

[1400] The disclosure describes an antibody, antigen binding fragment, or polypeptide comprising a heavy chain variable region having a HCDR1, HCDR2, and HCDR3, and a light chain variable region having a LCDR1, LCDR2, and LCDR3, wherein the HCDR1, HCDR2, and HCDR3 comprises an amino acid sequence of SEQ ID NOS:10938, 9936, and 10239, respectively and the LCDR1, LCDR2, and LCDR3 comprises an amino acid sequence of SEQ ID NOS:16684, 16587, and 17668, respectively.

[1401] The disclosure describes an antibody, antigen binding fragment, or polypeptide comprising a heavy chain variable region having a HCDR1, HCDR2, and HCDR3, and a light chain variable region having a LCDR1, LCDR2, and LCDR3, wherein the HCDR1, HCDR2, and HCDR3 comprises an amino acid sequence of SEQ ID NOS: 16541, 10400, and 6079, respectively and the LCDR1, LCDR2, and LCDR3 comprises an amino acid sequence of SEQ ID NOS: 15690, 3961, and 11082, respectively.

[1402] The disclosure describes an antibody, antigen binding fragment, or polypeptide comprising a heavy chain variable region having a HCDR1, HCDR2, and HCDR3, and a light chain variable region having a LCDR1, LCDR2, and LCDR3, wherein the HCDR1, HCDR2, and HCDR3 comprises an amino acid sequence of SEQ ID NOS: 17608, 16850, and 6491, respectively and the LCDR1, LCDR2, and LCDR3 comprises an amino acid sequence of SEQ ID NOS: 16710, 16585, and 4262, respectively.

[1403] The disclosure describes an antibody, antigen binding fragment, or polypeptide comprising a heavy chain variable region having a HCDR1, HCDR2, and HCDR3, and a light chain variable region having a LCDR1, LCDR2, and LCDR3, wherein the HCDR1, HCDR2, and HCDR3 comprises an amino acid sequence of SEQ ID NOS:16962, 17821, and 10239, respectively and the LCDR1, LCDR2, and LCDR3 comprises an amino acid sequence of SEQ ID NOS: 16085, 9503, and 12772, respectively.

[1404] The disclosure describes an antibody, antigen binding fragment, or polypeptide comprising a heavy chain variable region having a HCDR1, HCDR2, and HCDR3, and a light chain variable region having a LCDR1, LCDR2, and LCDR3, wherein the HCDR1, HCDR2, and HCDR3 comprises an amino acid sequence of SEQ ID NOS:6191, 10999, and 4129, respectively and the LCDR1, LCDR2, and LCDR3 comprises an amino acid sequence of SEQ ID NOS: 10830, 9267, and 11272, respectively.

[1405] The disclosure describes an antibody, antigen binding fragment, or polypeptide comprising a heavy chain variable region having a HCDR1, HCDR2, and HCDR3, and a light chain variable region having a LCDR1, LCDR2, and LCDR3, wherein the HCDR1, HCDR2, and HCDR3 comprises an amino acid sequence of SEQ ID NOS:17053, 11008, and 17910, respectively and the LCDR1, LCDR2, and LCDR3 comprises an amino acid sequence of SEQ ID NOS: 15843, 3986, and 12539, respectively.

[1406] The disclosure describes an antibody, antigen binding fragment, or polypeptide comprising a heavy chain variable region having a HCDR1, HCDR2, and HCDR3, and a light chain variable region having a LCDR1, LCDR2, and LCDR3, wherein the HCDR1, HCDR2, and HCDR3 comprises an amino acid sequence of SEQ ID NOS:17264, 16835, and 16552, respectively and the LCDR1, LCDR2, and LCDR3 comprises an amino acid sequence of SEQ ID NOS:10903, 7981, and 11341, respectively.

[1407] The disclosure describes an antibody, antigen binding fragment, or polypeptide comprising a heavy chain variable region having a HCDR1, HCDR2, and HCDR3, and a light chain variable region having a LCDR1, LCDR2, and LCDR3, wherein the HCDR1, HCDR2, and HCDR3 comprises an amino acid sequence of SEQ ID NOS:16962, 17821, and 10239, respectively and the LCDR1, LCDR2, and LCDR3 comprises an amino acid sequence of SEQ ID NOS:16781, 9254, and 17159, respectively.

[1408] The disclosure describes an antibody, antigen binding fragment, or polypeptide comprising a heavy chain variable region having a HCDR1, HCDR2, and HCDR3, and a light chain variable region having a LCDR1, LCDR2, and LCDR3, wherein the HCDR1, HCDR2, and HCDR3 comprises an amino acid sequence of SEQ ID NOS:11633, 16880, and 10239, respectively and the LCDR1, LCDR2, and LCDR3 comprises an amino acid sequence of SEQ ID NOS: 16755, 17007, and 17669, respectively.

[1409] The disclosure describes an antibody, antigen binding fragment, or polypeptide comprising a heavy chain variable region having a HCDR1, HCDR2, and HCDR3, and a light chain variable region having a LCDR1, LCDR2, and LCDR3, wherein the HCDR1, HCDR2, and HCDR3 comprises an amino acid sequence of SEQ ID NOS:10336, 9776, and 16347, respectively and the LCDR1, LCDR2, and LCDR3 comprises an amino acid sequence of SEQ ID NOS: 15681, 4611, and 12351, respectively.

[1410] The disclosure describes an antibody, antigen binding fragment, or polypeptide comprising a heavy chain variable region having a HCDR1, HCDR2, and HCDR3, and a light chain variable region having a LCDR1, LCDR2, and LCDR3, wherein the HCDR1, HCDR2, and HCDR3 comprises an amino acid sequence of SEQ ID NOS:16802, 9942, and 11122, respectively and the LCDR1, LCDR2, and LCDR3 comprises an amino acid sequence of SEQ ID NOS: 16061, 4431, and 12677, respectively. having a LCDR1, LCDR2, and LCDR3, wherein the HCDR1, HCDR2, and HCDR3 comprises an amino acid sequence of SEQ ID NOS:17209, 11536, and 10309, respectively and the LCDR1, LCDR2, and LCDR3 comprises an amino acid sequence of SEQ ID NOS:10830, 9267, and 11321, respectively.

[1411] The disclosure describes an antibody, antigen binding fragment, or polypeptide comprising a heavy chain variable region having a HCDR1, HCDR2, and HCDR3, and a light chain variable region having a LCDR1, LCDR2, and LCDR3, wherein the HCDR1, HCDR2, and HCDR3 comprises an amino acid sequence of SEQ ID NOS: 17535, 10570, and 4221, respectively and the LCDR1, LCDR2, and LCDR3 comprises an amino acid sequence of SEQ ID NOS:10889, 18275, and 12966, respectively.

[1412] The disclosure describes an antibody, antigen binding fragment, or polypeptide comprising a heavy chain variable region having a HCDR1, HCDR2, and HCDR3, and a light chain variable region having a LCDR1, LCDR2, and LCDR3, wherein the HCDR1, HCDR2, and HCDR3 comprises an amino acid sequence of SEQ ID NOS: 11154, 9803, and 9656, respectively and the LCDR1, LCDR2, and LCDR3 comprises an amino acid sequence of SEQ ID NOS: 17920, 6244, and 4382, respectively.

[1413] The disclosure describes an antibody, antigen binding fragment, or polypeptide comprising a heavy chain variable region having a HCDR1, HCDR2, and HCDR3, and a light chain variable region having a LCDR1, LCDR2, and LCDR3, wherein the HCDR1, HCDR2, and HCDR3 comprises an amino acid sequence of SEQ ID NOS:17848, 10546, and 17065, respectively and the LCDR1, LCDR2, and LCDR3 comprises an amino acid sequence of SEQ ID NOS: 16092, 9494, and 12664, respectively.

[1414] The disclosure describes an antibody, antigen binding fragment, or polypeptide comprising a heavy chain variable region having a HCDR1, HCDR2, and HCDR3, and a light chain variable region having a LCDR1, LCDR2, and LCDR3, wherein the HCDR1, HCDR2, and HCDR3 comprises an amino acid sequence of SEQ ID NOS:5958, 11135, and 4192, respectively and the LCDR1, LCDR2, and LCDR3 comprises an amino acid sequence of SEQ ID NOS: 16045, 9503, and 12779, respectively.

[1415] The disclosure describes an antibody, antigen binding fragment, or polypeptide comprising a heavy chain variable region having a HCDR1, HCDR2, and HCDR3, and a light chain variable region having a LCDR1, LCDR2, and LCDR3, wherein the HCDR1, HCDR2, and HCDR3 comprises an amino acid sequence of SEQ ID NOS:16544, 16839, and 11982, respectively and the LCDR1, LCDR2, and LCDR3 comprises an amino acid sequence of SEQ ID NOS:10806, 18275, and 10475, respectively.

[1416] The disclosure describes an antibody, antigen binding fragment, or polypeptide comprising a heavy chain variable region having a HCDR1, HCDR2, and HCDR3, and a light chain variable region having a LCDR1, LCDR2, and LCDR3, wherein the HCDR1, HCDR2, and HCDR3 comprises an amino acid sequence of SEQ ID NOS:6045, 16289, and 10176, respectively and the LCDR1, LCDR2, and LCDR3 comprises an amino acid sequence of SEQ ID NOS:10794, 18275, and 12920, respectively.

[1417] The disclosure describes an antibody, antigen binding fragment, or polypeptide comprising a heavy chain variable region having a HCDR1, HCDR2, and HCDR3, and a light chain variable region having a LCDR1, LCDR2, and LCDR3, wherein the HCDR1, HCDR2, and HCDR3 comprises an amino acid sequence of SEQ ID NOS: 11630, 17763, and 6062, respectively and the LCDR1, LCDR2, and LCDR3 comprises an amino acid sequence of SEQ ID NOS: 16045, 9503, and 12749, respectively.

[1418] The disclosure describes an antibody, antigen binding fragment, or polypeptide comprising a heavy chain variable region having a HCDR1, HCDR2, and HCDR3, and a light chain variable region having a LCDR1, LCDR2, and LCDR3, wherein the HCDR1, HCDR2, and HCDR3 comprises an amino acid sequence of SEQ ID NOS:7811, 16612, and 11704, respectively and the LCDR1, LCDR2, and LCDR3 comprises an amino acid sequence of SEQ ID NOS:16408, 10984, and 11346, respectively.

[1419] The disclosure describes an antibody, antigen binding fragment, or polypeptide comprising a heavy chain variable region having a HCDR1, HCDR2, and HCDR3, and a light chain variable region having a LCDR1, LCDR2, and LCDR3, wherein the HCDR1, HCDR2, and HCDR3 comprises an amino acid sequence of SEQ ID NOS:10368, 6780, and 10247, respectively and the LCDR1, LCDR2, and LCDR3 comprises an amino acid sequence of SEQ ID NOS:11946, 10024, and 13327, respectively.

[1420] The disclosure describes an antibody, antigen binding fragment, or polypeptide comprising a heavy chain variable region having a HCDR1, HCDR2, and HCDR3, and a light chain variable region having a LCDR1, LCDR2, and LCDR3, wherein the HCDR1, HCDR2, and HCDR3 comprises an amino acid sequence of SEQ ID NOS:6501, 18484, and 9670, respectively and the LCDR1, LCDR2, and LCDR3 comprises an amino acid sequence of SEQ ID NOS:16439, 10926, and 11294, respectively.

[1421] The disclosure describes an antibody, antigen binding fragment, or polypeptide comprising a heavy chain variable region having a HCDR1, HCDR2, and HCDR3, and a light chain variable region having a LCDR1, LCDR2, and LCDR3, wherein the HCDR1, HCDR2, and HCDR3 comprises an amino acid sequence of SEQ ID NOS:16961, 10398, and 11117, respectively and the LCDR1, LCDR2, and LCDR3 comprises an amino acid sequence of SEQ ID NOS:10807, 18275, and 13009, respectively.

[1422] The disclosure describes an antibody, antigen binding fragment, or polypeptide comprising a heavy chain variable region having a HCDR1, HCDR2, and HCDR3, and a light chain variable region having a LCDR1, LCDR2, and LCDR3, wherein the HCDR1, HCDR2, and HCDR3 comprises an amino acid sequence of SEQ ID NOS: 11067, 11016, and 5998, respectively and the LCDR1, LCDR2, and LCDR3 comprises an amino acid sequence of SEQ ID NOS:16414, 10987, and 11199, respectively.

[1423] The disclosure describes an antibody, antigen binding fragment, or polypeptide comprising a heavy chain variable region having a HCDR1, HCDR2, and HCDR3, and a light chain variable region having a LCDR1, LCDR2, and LCDR3, wherein the HCDR1, HCDR2, and HCDR3 comprises an amino acid sequence of SEQ ID NOS: 11634, 17778, and 6093, respectively and the LCDR1, LCDR2, and LCDR3 comprises an amino acid sequence of SEQ ID NOS: 11784, 4609, and 12398, respectively.

[1424] The disclosure describes an antibody, antigen binding fragment, or polypeptide comprising a heavy chain variable region having a HCDR1, HCDR2, and HCDR3, and a light chain variable region having a LCDR1, LCDR2, and LCDR3, wherein the HCDR1, HCDR2, and HCDR3 comprises an amino acid sequence of SEQ ID NOS:17856, 18585, and 11118, respectively and the LCDR1, LCDR2, and LCDR3 comprises an amino acid sequence of SEQ ID NOS:16712, 18105, and 4284, respectively.

[1425] The disclosure describes an antibody, antigen binding fragment, or polypeptide comprising a heavy chain variable region having a HCDR1, HCDR2, and HCDR3, and a light chain variable region having a LCDR1, LCDR2, and LCDR3, wherein the HCDR1, HCDR2, and HCDR3 comprises an amino acid sequence of SEQ ID NOS: 17263, 9776, and 6723, respectively and the LCDR1, LCDR2, and LCDR3 comprises an amino acid sequence of SEQ ID NOS:16712, 18105, and 4284, respectively.

[1426] The disclosure describes an antibody, antigen binding fragment, or polypeptide comprising a heavy chain variable region having a HCDR1, HCDR2, and HCDR3, and a light chain variable region having a LCDR1, LCDR2, and LCDR3, wherein the HCDR1, HCDR2, and HCDR3 comprises an amino acid sequence of SEQ ID NOS: 17263, 9781, and 4333, respectively and the LCDR1, LCDR2, and LCDR3 comprises an amino acid sequence of SEQ ID NOS:15847, 10704, and 12021, respectively.

[1427] The disclosure describes an antibody, antigen binding fragment, or polypeptide comprising a heavy chain variable region having a HCDR1, HCDR2, and HCDR3, and a light chain variable region having a LCDR1, LCDR2, and LCDR3, wherein the HCDR1, HCDR2, and HCDR3 comprises an amino acid sequence of SEQ ID NOS: 11659, 18507, and 5993, respectively and the LCDR1, LCDR2, and LCDR3 comprises an amino acid sequence of SEQ ID NOS:18047, 18628, and 11186, respectively.

[1428] The disclosure describes an antibody, antigen binding fragment, or polypeptide comprising a heavy chain variable region having a HCDR1, HCDR2, and HCDR3, and a light chain variable region having a LCDR1, LCDR2, and LCDR3, wherein the HCDR1, HCDR2, and HCDR3 comprises an amino acid sequence of SEQ ID NOS:11419, 18346, and 10332, respectively and the LCDR1, LCDR2, and LCDR3 comprises an amino acid sequence of SEQ ID NOS:10796, 18267, and 12935, respectively.

[1429] The disclosure describes an antibody, antigen binding fragment, or polypeptide comprising a heavy chain variable region having a HCDR1, HCDR2, and HCDR3, and a light chain variable region having a LCDR1, LCDR2, and LCDR3, wherein the HCDR1, HCDR2, and HCDR3 comprises an amino acid sequence of SEQ ID NOS:18641, 4067, and 18219, respectively and the LCDR1, LCDR2, and LCDR3 comprises an amino acid sequence of SEQ ID NOS:16642, 10747, and 13021, respectively. having a LCDR1, LCDR2, and LCDR3, wherein the HCDR1, HCDR2, and HCDR3 comprises an amino acid sequence of SEQ ID NOS:5996, 18312, and 9515, respectively and the LCDR1, LCDR2, and LCDR3 comprises an amino acid sequence of SEQ ID NOS:10869, 18265, and 12932, respectively.

[1430] The disclosure describes an antibody, antigen binding fragment, or polypeptide comprising a heavy chain variable region having a HCDR1, HCDR2, and HCDR3, and a light chain variable region having a LCDR1, LCDR2, and LCDR3, wherein the HCDR1, HCDR2, and HCDR3 comprises an amino acid sequence of SEQ ID NOS:6565, 4647, and 4477, respectively and the LCDR1, LCDR2, and LCDR3 comprises an amino acid sequence of SEQ ID NOS: 16760, 11575, and 4284, respectively.

[1431] The disclosure describes an antibody, antigen binding fragment, or polypeptide comprising a heavy chain variable region having a HCDR1, HCDR2, and HCDR3, and a light chain variable region having a LCDR1, LCDR2, and LCDR3, wherein the HCDR1, HCDR2, and HCDR3 comprises an amino acid sequence of SEQ ID NOS:17263, 9783, and 9421, respectively and the LCDR1, LCDR2, and LCDR3 comprises an amino acid sequence of SEQ ID NOS: 15807, 3953, and 12477, respectively.

[1432] The disclosure describes an antibody, antigen binding fragment, or polypeptide comprising a heavy chain variable region having a HCDR1, HCDR2, and HCDR3, and a light chain variable region having a LCDR1, LCDR2, and LCDR3, wherein the HCDR1, HCDR2, and HCDR3 comprises an amino acid sequence of SEQ ID NOS:16962, 17821, and 10239, respectively and the LCDR1, LCDR2, and LCDR3 comprises an amino acid sequence of SEQ ID NOS:15818, 18426, and 12842, respectively.

[1433] The disclosure describes an antibody, antigen binding fragment, or polypeptide comprising a heavy chain variable region having a HCDR1, HCDR2, and HCDR3, and a light chain variable region having a LCDR1, LCDR2, and LCDR3, wherein the HCDR1, HCDR2, and HCDR3 comprises an amino acid sequence of SEQ ID NOS:10337, 9991, and 9455, respectively and the LCDR1, LCDR2, and LCDR3 comprises an amino acid sequence of SEQ ID NOS: 16059, 4432, and 11998, respectively.

[1434] The disclosure describes an antibody, antigen binding fragment, or polypeptide comprising a heavy chain variable region having a HCDR1, HCDR2, and HCDR3, and a light chain variable region having a LCDR1, LCDR2, and LCDR3, wherein the HCDR1, HCDR2, and HCDR3 comprises an amino acid sequence of SEQ ID NOS: 17263, 9856, and 6085, respectively and the LCDR1, LCDR2, and LCDR3 comprises an amino acid sequence of SEQ ID NOS:17951, 9261, and 17205, respectively.

[1435] The disclosure describes an antibody, antigen binding fragment, or polypeptide comprising a heavy chain variable region having a HCDR1, HCDR2, and HCDR3, and a light chain variable region having a LCDR1, LCDR2, and LCDR3, wherein the HCDR1, HCDR2, and HCDR3 comprises an amino acid sequence of SEQ ID NOS:4634, 18223, and 17240, respectively and the LCDR1, LCDR2, and LCDR3 comprises an amino acid sequence of SEQ ID NOS: 15679, 6324, and 12381, respectively.

[1436] The disclosure describes an antibody, antigen binding fragment, or polypeptide comprising a heavy chain variable region having a HCDR1, HCDR2, and HCDR3, and a light chain variable region having a LCDR1, LCDR2, and LCDR3, wherein the HCDR1, HCDR2, and HCDR3 comprises an amino acid sequence of SEQ ID NOS:11652, 9397, and 11165, respectively and the LCDR1, LCDR2, and LCDR3 comprises an amino acid sequence of SEQ ID NOS: 15858, 4436, and 12772, respectively.

[1437] The disclosure describes an antibody, antigen binding fragment, or polypeptide comprising a heavy chain variable region having a HCDR1, HCDR2, and HCDR3, and a light chain variable region having a LCDR1, LCDR2, and LCDR3, wherein the HCDR1, HCDR2, and HCDR3 comprises an amino acid sequence of SEQ ID NOS:16962, 17821, and 10239, respectively and the LCDR1, LCDR2, and LCDR3 comprises an amino acid sequence of SEQ ID NOS:15906, 4436, and 12772, respectively.

[1438] The disclosure describes an antibody, antigen binding fragment, or polypeptide comprising a heavy chain variable region having a HCDR1, HCDR2, and HCDR3, and a light chain variable region having a LCDR1, LCDR2, and LCDR3, wherein the HCDR1, HCDR2, and HCDR3 comprises an amino acid sequence of SEQ ID NOS:17266, 9867, and 4160, respectively and the LCDR1, LCDR2, and LCDR3 comprises an amino acid sequence of SEQ ID NOS: 15834, 3972, and 12350, respectively.

[1439] The disclosure describes an antibody, antigen binding fragment, or polypeptide comprising a heavy chain variable region having a HCDR1, HCDR2, and HCDR3, and a light chain variable region having a LCDR1, LCDR2, and LCDR3, wherein the HCDR1, HCDR2, and HCDR3 comprises an amino acid sequence of SEQ ID NOS:16962, 17821, and 10239, respectively and the LCDR1, LCDR2, and LCDR3 comprises an amino acid sequence of SEQ ID NOS: 16073, 6606, and 11985, respectively.

[1440] The disclosure describes an antibody, antigen binding fragment, or polypeptide comprising a heavy chain variable region having a HCDR1, HCDR2, and HCDR3, and a light chain variable region having a LCDR1, LCDR2, and LCDR3, wherein the HCDR1, HCDR2, and HCDR3 comprises an amino acid sequence of SEQ ID NOS:4228, 18479, and 11563, respectively and the LCDR1, LCDR2, and LCDR3 comprises an amino acid sequence of SEQ ID NOS: 16559, 6628, and 7952, respectively.

[1441] The disclosure describes an antibody, antigen binding fragment, or polypeptide comprising a heavy chain variable region having a HCDR1, HCDR2, and HCDR3, and a light chain variable region having a LCDR1, LCDR2, and LCDR3, wherein the HCDR1, HCDR2, and HCDR3 comprises an amino acid sequence of SEQ ID NOS: 11690, 4331, and 9665, respectively and the LCDR1, LCDR2, and LCDR3 comprises an amino acid sequence of SEQ ID NOS: 16017, 3983, and 12746, respectively.

[1442] The disclosure describes an antibody, antigen binding fragment, or polypeptide comprising a heavy chain variable region having a HCDR1, HCDR2, and HCDR3, and a light chain variable region having a LCDR1, LCDR2, and LCDR3, wherein the HCDR1, HCDR2, and HCDR3 comprises an amino acid sequence of SEQ ID NOS:16962, 17821, and 10239, respectively and the LCDR1, LCDR2, and LCDR3 comprises an amino acid sequence of SEQ ID NOS: 16380, 10929, and 11290, respectively.

[1443] The disclosure describes an antibody, antigen binding fragment, or polypeptide comprising a heavy chain variable region having a HCDR1, HCDR2, and HCDR3, and a light chain variable region having a LCDR1, LCDR2, and LCDR3, wherein the HCDR1, HCDR2, and HCDR3 comprises an amino acid sequence of SEQ ID NOS:16962, 17821, and 10239, respectively and the LCDR1, LCDR2, and LCDR3 comprises an amino acid sequence of SEQ ID NOS: 16022, 9503, and 12775, respectively.

[1444] The disclosure describes an antibody, antigen binding fragment, or polypeptide comprising a heavy chain variable region having a HCDR1, HCDR2, and HCDR3, and a light chain variable region having a LCDR1, LCDR2, and LCDR3, wherein the HCDR1, HCDR2, and HCDR3 comprises an amino acid sequence of SEQ ID NOS:10518, 11507, and 18200, respectively and the LCDR1, LCDR2, and LCDR3 comprises an amino acid sequence of SEQ ID NOS:10869, 18275, and 12915, respectively.

[1445] The disclosure describes an antibody, antigen binding fragment, or polypeptide comprising a heavy chain variable region having a HCDR1, HCDR2, and HCDR3, and a light chain variable region having a LCDR1, LCDR2, and LCDR3, wherein the HCDR1, HCDR2, and HCDR3 comprises an amino acid sequence of SEQ ID NOS:11388, 16927, and 10239, respectively and the LCDR1, LCDR2, and LCDR3 comprises an amino acid sequence of SEQ ID NOS: 15953, 10700, and 12567, respectively.

[1446] The disclosure describes an antibody, antigen binding fragment, or polypeptide comprising a heavy chain variable region having a HCDR1, HCDR2, and HCDR3, and a light chain variable region having a LCDR1, LCDR2, and LCDR3, wherein the HCDR1, HCDR2, and HCDR3 comprises an amino acid sequence of SEQ ID NOS: 17441, 18383, and 6488, respectively and the LCDR1, LCDR2, and LCDR3 comprises an amino acid sequence of SEQ ID NOS:16421, 10927, and 11282, respectively.

[1447] The disclosure describes an antibody, antigen binding fragment, or polypeptide comprising a heavy chain variable region having a HCDR1, HCDR2, and HCDR3, and a light chain variable region having a LCDR1, LCDR2, and LCDR3, wherein the HCDR1, HCDR2, and HCDR3 comprises an amino acid sequence of SEQ ID NOS:18640, 11173, and 18450, respectively and the LCDR1, LCDR2, and LCDR3 comprises an amino acid sequence of SEQ ID NOS: 15646, 3969, and 11090, respectively.

[1448] The disclosure describes an antibody, antigen binding fragment, or polypeptide comprising a heavy chain variable region having a HCDR1, HCDR2, and HCDR3, and a light chain variable region having a LCDR1, LCDR2, and LCDR3, wherein the HCDR1, HCDR2, and HCDR3 comprises an amino acid sequence of SEQ ID NOS:17270, 10556, and 10239, respectively and the LCDR1, LCDR2, and LCDR3 comprises an amino acid sequence of SEQ ID NOS:16642, 16157, and 13335, respectively. having a LCDR1, LCDR2, and LCDR3, wherein the HCDR1, HCDR2, and HCDR3 comprises an amino acid sequence of SEQ ID NOS:16962, 17821, and 10239, respectively and the LCDR1, LCDR2, and LCDR3 comprises an amino acid sequence of SEQ ID NOS:15919, 4425, and 12867, respectively.

[1449] The disclosure describes an antibody, antigen binding fragment, or polypeptide comprising a heavy chain variable region having a HCDR1, HCDR2, and HCDR3, and a light chain variable region having a LCDR1, LCDR2, and LCDR3, wherein the HCDR1, HCDR2, and HCDR3 comprises an amino acid sequence of SEQ ID NOS: 10337, 9884, and 9455, respectively and the LCDR1, LCDR2, and LCDR3 comprises an amino acid sequence of SEQ ID NOS: 16064, 4425, and 11991, respectively.

[1450] The disclosure describes an antibody, antigen binding fragment, or polypeptide comprising a heavy chain variable region having a HCDR1, HCDR2, and HCDR3, and a light chain variable region having a LCDR1, LCDR2, and LCDR3, wherein the HCDR1, HCDR2, and HCDR3 comprises an amino acid sequence of SEQ ID NOS: 11622, 16286, and 4299, respectively and the LCDR1, LCDR2, and LCDR3 comprises an amino acid sequence of SEQ ID NOS:10800, 18275, and 12898, respectively.

[1451] The disclosure describes an antibody, antigen binding fragment, or polypeptide comprising a heavy chain variable region having a HCDR1, HCDR2, and HCDR3, and a light chain variable region having a LCDR1, LCDR2, and LCDR3, wherein the HCDR1, HCDR2, and HCDR3 comprises an amino acid sequence of SEQ ID NOS:5997, 17738, and 10239, respectively and the LCDR1, LCDR2, and LCDR3 comprises an amino acid sequence of SEQ ID NOS:9360, 6459, and 17176, respectively.

[1452] The disclosure describes an antibody, antigen binding fragment, or polypeptide comprising a heavy chain variable region having a HCDR1, HCDR2, and HCDR3, and a light chain variable region having a LCDR1, LCDR2, and LCDR3, wherein the HCDR1, HCDR2, and HCDR3 comprises an amino acid sequence of SEQ ID NOS: 10511, 16879, and 6490, respectively and the LCDR1, LCDR2, and LCDR3 comprises an amino acid sequence of SEQ ID NOS:16758, 4176, and 4284, respectively.

[1453] The disclosure describes an antibody, antigen binding fragment, or polypeptide comprising a heavy chain variable region having a HCDR1, HCDR2, and HCDR3, and a light chain variable region having a LCDR1, LCDR2, and LCDR3, wherein the HCDR1, HCDR2, and HCDR3 comprises an amino acid sequence of SEQ ID NOS:11678, 11454, and 10496, respectively and the LCDR1, LCDR2, and LCDR3 comprises an amino acid sequence of SEQ ID NOS:10876, 18271, and 12908, respectively.

[1454] The disclosure describes an antibody, antigen binding fragment, or polypeptide comprising a heavy chain variable region having a HCDR1, HCDR2, and HCDR3, and a light chain variable region having a LCDR1, LCDR2, and LCDR3, wherein the HCDR1, HCDR2, and HCDR3 comprises an amino acid sequence of SEQ ID NOS:17263, 9783, and 9421, respectively and the LCDR1, LCDR2, and LCDR3 comprises an amino acid sequence of SEQ ID NOS: 15704, 3982, and 12094, respectively.

[1455] The disclosure describes an antibody, antigen binding fragment, or polypeptide comprising a heavy chain variable region having a HCDR1, HCDR2, and HCDR3, and a light chain variable region having a LCDR1, LCDR2, and LCDR3, wherein the HCDR1, HCDR2, and HCDR3 comprises an amino acid sequence of SEQ ID NOS:17263, 9935, and 10239, respectively and the LCDR1, LCDR2, and LCDR3 comprises an amino acid sequence of SEQ ID NOS: 10861, 9267, and 11323, respectively.

[1456] The disclosure describes an antibody, antigen binding fragment, or polypeptide comprising a heavy chain variable region having a HCDR1, HCDR2, and HCDR3, and a light chain variable region having a LCDR1, LCDR2, and LCDR3, wherein the HCDR1, HCDR2, and HCDR3 comprises an amino acid sequence of SEQ ID NOS:9567, 9885, and 10751, respectively and the LCDR1, LCDR2, and LCDR3 comprises an amino acid sequence of SEQ ID NOS: 15696, 3982, and 12393, respectively.

[1457] The disclosure describes an antibody, antigen binding fragment, or polypeptide comprising a heavy chain variable region having a HCDR1, HCDR2, and HCDR3, and a light chain variable region having a LCDR1, LCDR2, and LCDR3, wherein the HCDR1, HCDR2, and HCDR3 comprises an amino acid sequence of SEQ ID NOS: 17274, 4142, and 6474, respectively and the LCDR1, LCDR2, and LCDR3 comprises an amino acid sequence of SEQ ID NOS:16719, 17007, and 3995, respectively.

[1458] The disclosure describes an antibody, antigen binding fragment, or polypeptide comprising a heavy chain variable region having a HCDR1, HCDR2, and HCDR3, and a light chain variable region having a LCDR1, LCDR2, and LCDR3, wherein the HCDR1, HCDR2, and HCDR3 comprises an amino acid sequence of SEQ ID NOS:16962, 17821, and 10239, respectively and the LCDR1, LCDR2, and LCDR3 comprises an amino acid sequence of SEQ ID NOS:18064, 18596, and 11174, respectively.

[1459] The disclosure describes an antibody, antigen binding fragment, or polypeptide comprising a heavy chain variable region having a HCDR1, HCDR2, and HCDR3, and a light chain variable region having a LCDR1, LCDR2, and LCDR3, wherein the HCDR1, HCDR2, and HCDR3 comprises an amino acid sequence of SEQ ID NOS:16962, 17821, and 10239, respectively and the LCDR1, LCDR2, and LCDR3 comprises an amino acid sequence of SEQ ID NOS: 16037, 4425, and 12433, respectively.

[1460] The disclosure describes an antibody, antigen binding fragment, or polypeptide comprising a heavy chain variable region having a HCDR1, HCDR2, and HCDR3, and a light chain variable region having a LCDR1, LCDR2, and LCDR3, wherein the HCDR1, HCDR2, and HCDR3 comprises an amino acid sequence of SEQ ID NOS:11648, 18365, and 17781, respectively and the LCDR1, LCDR2, and LCDR3 comprises an amino acid sequence of SEQ ID NOS:16657, 11895, and 13608, respectively.

[1461] The disclosure describes an antibody, antigen binding fragment, or polypeptide comprising a heavy chain variable region having a HCDR1, HCDR2, and HCDR3, and a light chain variable region having a LCDR1, LCDR2, and LCDR3, wherein the HCDR1, HCDR2, and HCDR3 comprises an amino acid sequence of SEQ ID NOS:16800, 9943, and 11124, respectively and the LCDR1, LCDR2, and LCDR3 comprises an amino acid sequence of SEQ ID NOS:16361, 10926, and 11330, respectively.

[1462] The disclosure describes an antibody, antigen binding fragment, or polypeptide comprising a heavy chain variable region having a HCDR1, HCDR2, and HCDR3, and a light chain variable region having a LCDR1, LCDR2, and LCDR3, wherein the HCDR1, HCDR2, and HCDR3 comprises an amino acid sequence of SEQ ID NOS:10368, 6784, and 10083, respectively and the LCDR1, LCDR2, and LCDR3 comprises an amino acid sequence of SEQ ID NOS:11942, 10023, and 13329, respectively.

[1463] The disclosure describes an antibody, antigen binding fragment, or polypeptide comprising a heavy chain variable region having a HCDR1, HCDR2, and HCDR3, and a light chain variable region having a LCDR1, LCDR2, and LCDR3, wherein the HCDR1, HCDR2, and HCDR3 comprises an amino acid sequence of SEQ ID NOS:16962, 17821, and 10239, respectively and the LCDR1, LCDR2, and LCDR3 comprises an amino acid sequence of SEQ ID NOS: 15941, 9494, and 10463, respectively.

[1464] The disclosure describes an antibody, antigen binding fragment, or polypeptide comprising a heavy chain variable region having a HCDR1, HCDR2, and HCDR3, and a light chain variable region having a LCDR1, LCDR2, and LCDR3, wherein the HCDR1, HCDR2, and HCDR3 comprises an amino acid sequence of SEQ ID NOS:16962, 17821, and 10239, respectively and the LCDR1, LCDR2, and LCDR3 comprises an amino acid sequence of SEQ ID NOS:10806, 18275, and 10475, respectively.

[1465] The disclosure describes an antibody, antigen binding fragment, or polypeptide comprising a heavy chain variable region having a HCDR1, HCDR2, and HCDR3, and a light chain variable region having a LCDR1, LCDR2, and LCDR3, wherein the HCDR1, HCDR2, and HCDR3 comprises an amino acid sequence of SEQ ID NOS:17443, 17766, and 10239, respectively and the LCDR1, LCDR2, and LCDR3 comprises an amino acid sequence of SEQ ID NOS:16121, 9503, and 12772, respectively.

[1466] The disclosure describes an antibody, antigen binding fragment, or polypeptide comprising a heavy chain variable region having a HCDR1, HCDR2, and HCDR3, and a light chain variable region having a LCDR1, LCDR2, and LCDR3, wherein the HCDR1, HCDR2, and HCDR3 comprises an amino acid sequence of SEQ ID NOS: 17263, 16965, and 6472, respectively and the LCDR1, LCDR2, and LCDR3 comprises an amino acid sequence of SEQ ID NOS:18070, 18595, and 11177, respectively.

[1467] The disclosure describes an antibody, antigen binding fragment, or polypeptide comprising a heavy chain variable region having a HCDR1, HCDR2, and HCDR3, and a light chain variable region having a LCDR1, LCDR2, and LCDR3, wherein the HCDR1, HCDR2, and HCDR3 comprises an amino acid sequence of SEQ ID NOS:16962, 17821, and 10239, respectively and the LCDR1, LCDR2, and LCDR3 comprises an amino acid sequence of SEQ ID NOS:10865, 18275, and 12914, respectively. having a LCDR1, LCDR2, and LCDR3, wherein the HCDR1, HCDR2, and HCDR3 comprises an amino acid sequence of SEQ ID NOS: 16806, 18570, and 7900, respectively and the LCDR1, LCDR2, and LCDR3 comprises an amino acid sequence of SEQ ID NOS:15840, 17664, and 12494, respectively.

[1468] The disclosure describes an antibody, antigen binding fragment, or polypeptide comprising a heavy chain variable region having a HCDR1, HCDR2, and HCDR3, and a light chain variable region having a LCDR1, LCDR2, and LCDR3, wherein the HCDR1, HCDR2, and HCDR3 comprises an amino acid sequence of SEQ ID NOS: 17021, 10294, and 6090, respectively and the LCDR1, LCDR2, and LCDR3 comprises an amino acid sequence of SEQ ID NOS: 11789, 4420, and 12577, respectively.

[1469] The disclosure describes an antibody, antigen binding fragment, or polypeptide comprising a heavy chain variable region having a HCDR1, HCDR2, and HCDR3, and a light chain variable region having a LCDR1, LCDR2, and LCDR3, wherein the HCDR1, HCDR2, and HCDR3 comprises an amino acid sequence of SEQ ID NOS:17263, 9986, and 6241, respectively and the LCDR1, LCDR2, and LCDR3 comprises an amino acid sequence of SEQ ID NOS: 16126, 9503, and 12772, respectively.

[1470] The disclosure describes an antibody, antigen binding fragment, or polypeptide comprising a heavy chain variable region having a HCDR1, HCDR2, and HCDR3, and a light chain variable region having a LCDR1, LCDR2, and LCDR3, wherein the HCDR1, HCDR2, and HCDR3 comprises an amino acid sequence of SEQ ID NOS:16543, 18475, and 11353, respectively and the LCDR1, LCDR2, and LCDR3 comprises an amino acid sequence of SEQ ID NOS:10873, 18275, and 12991, respectively.

[1471] The disclosure describes an antibody, antigen binding fragment, or polypeptide comprising a heavy chain variable region having a HCDR1, HCDR2, and HCDR3, and a light chain variable region having a LCDR1, LCDR2, and LCDR3, wherein the HCDR1, HCDR2, and HCDR3 comprises an amino acid sequence of SEQ ID NOS:6571, 18290, and 9514, respectively and the LCDR1, LCDR2, and LCDR3 comprises an amino acid sequence of SEQ ID NOS:10886, 18265, and 12929, respectively.

[1472] The disclosure describes an antibody, antigen binding fragment, or polypeptide comprising a heavy chain variable region having a HCDR1, HCDR2, and HCDR3, and a light chain variable region having a LCDR1, LCDR2, and LCDR3, wherein the HCDR1, HCDR2, and HCDR3 comprises an amino acid sequence of SEQ ID NOS:16962, 17821, and 10239, respectively and the LCDR1, LCDR2, and LCDR3 comprises an amino acid sequence of SEQ ID NOS: 15909, 9503, and 12724, respectively.

[1473] The disclosure describes an antibody, antigen binding fragment, or polypeptide comprising a heavy chain variable region having a HCDR1, HCDR2, and HCDR3, and a light chain variable region having a LCDR1, LCDR2, and LCDR3, wherein the HCDR1, HCDR2, and HCDR3 comprises an amino acid sequence of SEQ ID NOS:11690, 6786, and 10246, respectively and the LCDR1, LCDR2, and LCDR3 comprises an amino acid sequence of SEQ ID NOS:6690, 10023, and 13330, respectively.

[1474] The disclosure describes an antibody, antigen binding fragment, or polypeptide comprising a heavy chain variable region having a HCDR1, HCDR2, and HCDR3, and a light chain variable region having a LCDR1, LCDR2, and LCDR3, wherein the HCDR1, HCDR2, and HCDR3 comprises an amino acid sequence of SEQ ID NOS: 17272, 10297, and 6083, respectively and the LCDR1, LCDR2, and LCDR3 comprises an amino acid sequence of SEQ ID NOS: 15842, 4425, and 10444, respectively.

[1475] The disclosure describes an antibody, antigen binding fragment, or polypeptide comprising a heavy chain variable region having a HCDR1, HCDR2, and HCDR3, and a light chain variable region having a LCDR1, LCDR2, and LCDR3, wherein the HCDR1, HCDR2, and HCDR3 comprises an amino acid sequence of SEQ ID NOS:17270, 17772, and 10266, respectively and the LCDR1, LCDR2, and LCDR3 comprises an amino acid sequence of SEQ ID NOS:15999, 10264, and 12767, respectively.

[1476] The disclosure describes an antibody, antigen binding fragment, or polypeptide comprising a heavy chain variable region having a HCDR1, HCDR2, and HCDR3, and a light chain variable region having a LCDR1, LCDR2, and LCDR3, wherein the HCDR1, HCDR2, and HCDR3 comprises an amino acid sequence of SEQ ID NOS:10353, 18330, and 18097, respectively and the LCDR1, LCDR2, and LCDR3 comprises an amino acid sequence of SEQ ID NOS:15996, 9494, and 11990, respectively.

[1477] The disclosure describes an antibody, antigen binding fragment, or polypeptide comprising a heavy chain variable region having a HCDR1, HCDR2, and HCDR3, and a light chain variable region having a LCDR1, LCDR2, and LCDR3, wherein the HCDR1, HCDR2, and HCDR3 comprises an amino acid sequence of SEQ ID NOS:16962, 17821, and 10239, respectively and the LCDR1, LCDR2, and LCDR3 comprises an amino acid sequence of SEQ ID NOS:16729, 17001, and 3995, respectively.

[1478] The disclosure describes an antibody, antigen binding fragment, or polypeptide comprising a heavy chain variable region having a HCDR1, HCDR2, and HCDR3, and a light chain variable region having a LCDR1, LCDR2, and LCDR3, wherein the HCDR1, HCDR2, and HCDR3 comprises an amino acid sequence of SEQ ID NOS:11622, 16288, and 10330, respectively and the LCDR1, LCDR2, and LCDR3 comprises an amino acid sequence of SEQ ID NOS:10805, 18276, and 12935, respectively.

[1479] The disclosure describes an antibody, antigen binding fragment, or polypeptide comprising a heavy chain variable region having a HCDR1, HCDR2, and HCDR3, and a light chain variable region having a LCDR1, LCDR2, and LCDR3, wherein the HCDR1, HCDR2, and HCDR3 comprises an amino acid sequence of SEQ ID NOS: 17474, 9815, and 4249, respectively and the LCDR1, LCDR2, and LCDR3 comprises an amino acid sequence of SEQ ID NOS:15890, 10737, and 12871, respectively.

[1480] The disclosure describes an antibody, antigen binding fragment, or polypeptide comprising a heavy chain variable region having a HCDR1, HCDR2, and HCDR3, and a light chain variable region having a LCDR1, LCDR2, and LCDR3, wherein the HCDR1, HCDR2, and HCDR3 comprises an amino acid sequence of SEQ ID NOS:17461, 9789, and 17057, respectively and the LCDR1, LCDR2, and LCDR3 comprises an amino acid sequence of SEQ ID NOS:15896, 10705, and 12804, respectively.

[1481] The disclosure describes an antibody, antigen binding fragment, or polypeptide comprising a heavy chain variable region having a HCDR1, HCDR2, and HCDR3, and a light chain variable region having a LCDR1, LCDR2, and LCDR3, wherein the HCDR1, HCDR2, and HCDR3 comprises an amino acid sequence of SEQ ID NOS:11678, 17821, and 10239, respectively and the LCDR1, LCDR2, and LCDR3 comprises an amino acid sequence of SEQ ID NOS:10814, 18275, and 12978, respectively.

[1482] The disclosure describes an antibody, antigen binding fragment, or polypeptide comprising a heavy chain variable region having a HCDR1, HCDR2, and HCDR3, and a light chain variable region having a LCDR1, LCDR2, and LCDR3, wherein the HCDR1, HCDR2, and HCDR3 comprises an amino acid sequence of SEQ ID NOS:10364, 6777, and 10082, respectively and the LCDR1, LCDR2, and LCDR3 comprises an amino acid sequence of SEQ ID NOS:11943, 10023, and 13328, respectively.

[1483] The disclosure describes an antibody, antigen binding fragment, or polypeptide comprising a heavy chain variable region having a HCDR1, HCDR2, and HCDR3, and a light chain variable region having a LCDR1, LCDR2, and LCDR3, wherein the HCDR1, HCDR2, and HCDR3 comprises an amino acid sequence of SEQ ID NOS:16796, 16939, and 17221, respectively and the LCDR1, LCDR2, and LCDR3 comprises an amino acid sequence of SEQ ID NOS: 17924, 10094, and 13579, respectively.

[1484] The disclosure describes an antibody, antigen binding fragment, or polypeptide comprising a heavy chain variable region having a HCDR1, HCDR2, and HCDR3, and a light chain variable region having a LCDR1, LCDR2, and LCDR3, wherein the HCDR1, HCDR2, and HCDR3 comprises an amino acid sequence of SEQ ID NOS:6150, 17731, and 4129, respectively and the LCDR1, LCDR2, and LCDR3 comprises an amino acid sequence of SEQ ID NOS:16399, 10959, and 11256, respectively.

[1485] The disclosure describes an antibody, antigen binding fragment, or polypeptide comprising a heavy chain variable region having a HCDR1, HCDR2, and HCDR3, and a light chain variable region having a LCDR1, LCDR2, and LCDR3, wherein the HCDR1, HCDR2, and HCDR3 comprises an amino acid sequence of SEQ ID NOS:17274, 16855, and 10239, respectively and the LCDR1, LCDR2, and LCDR3 comprises an amino acid sequence of SEQ ID NOS:18065, 18593, and 11176, respectively.

[1486] The disclosure describes an antibody, antigen binding fragment, or polypeptide comprising a heavy chain variable region having a HCDR1, HCDR2, and HCDR3, and a light chain variable region having a LCDR1, LCDR2, and LCDR3, wherein the HCDR1, HCDR2, and HCDR3 comprises an amino acid sequence of SEQ ID NOS:11361, 9827, and 17583, respectively and the LCDR1, LCDR2, and LCDR3 comprises an amino acid sequence of SEQ ID NOS:16354, 10987, and 11204, respectively. having a LCDR1, LCDR2, and LCDR3, wherein the HCDR1, HCDR2, and HCDR3 comprises an amino acid sequence of SEQ ID NOS:11630, 9960, and 6194, respectively and the LCDR1, LCDR2, and LCDR3 comprises an amino acid sequence of SEQ ID NOS: 16723, 10911, and 4017, respectively.

[1487] The disclosure describes an antibody, antigen binding fragment, or polypeptide comprising a heavy chain variable region having a HCDR1, HCDR2, and HCDR3, and a light chain variable region having a LCDR1, LCDR2, and LCDR3, wherein the HCDR1, HCDR2, and HCDR3 comprises an amino acid sequence of SEQ ID NOS: 17262, 16321, and 7877, respectively and the LCDR1, LCDR2, and LCDR3 comprises an amino acid sequence of SEQ ID NOS: 16068, 3982, and 12451, respectively.

[1488] The disclosure describes an antibody, antigen binding fragment, or polypeptide comprising a heavy chain variable region having a HCDR1, HCDR2, and HCDR3, and a light chain variable region having a LCDR1, LCDR2, and LCDR3, wherein the HCDR1, HCDR2, and HCDR3 comprises an amino acid sequence of SEQ ID NOS: 17617, 18362, and 5913, respectively and the LCDR1, LCDR2, and LCDR3 comprises an amino acid sequence of SEQ ID NOS: 15858, 9503, and 12025, respectively.

[1489] The disclosure describes an antibody, antigen binding fragment, or polypeptide comprising a heavy chain variable region having a HCDR1, HCDR2, and HCDR3, and a light chain variable region having a LCDR1, LCDR2, and LCDR3, wherein the HCDR1, HCDR2, and HCDR3 comprises an amino acid sequence of SEQ ID NOS:17614, 18482, and 17653, respectively and the LCDR1, LCDR2, and LCDR3 comprises an amino acid sequence of SEQ ID NOS:15861, 11791, and 12843, respectively.

[1490] The disclosure describes an antibody, antigen binding fragment, or polypeptide comprising a heavy chain variable region having a HCDR1, HCDR2, and HCDR3, and a light chain variable region having a LCDR1, LCDR2, and LCDR3, wherein the HCDR1, HCDR2, and HCDR3 comprises an amino acid sequence of SEQ ID NOS:16962, 17821, and 10239, respectively and the LCDR1, LCDR2, and LCDR3 comprises an amino acid sequence of SEQ ID NOS: 15821, 4425, and 12763, respectively.

[1491] The disclosure describes an antibody, antigen binding fragment, or polypeptide comprising a heavy chain variable region having a HCDR1, HCDR2, and HCDR3, and a light chain variable region having a LCDR1, LCDR2, and LCDR3, wherein the HCDR1, HCDR2, and HCDR3 comprises an amino acid sequence of SEQ ID NOS:16962, 17821, and 10239, respectively and the LCDR1, LCDR2, and LCDR3 comprises an amino acid sequence of SEQ ID NOS: 15954, 9503, and 12769, respectively.

[1492] The disclosure describes an antibody, antigen binding fragment, or polypeptide comprising a heavy chain variable region having a HCDR1, HCDR2, and HCDR3, and a light chain variable region having a LCDR1, LCDR2, and LCDR3, wherein the HCDR1, HCDR2, and HCDR3 comprises an amino acid sequence of SEQ ID NOS:16962, 17821, and 10239, respectively and the LCDR1, LCDR2, and LCDR3 comprises an amino acid sequence of SEQ ID NOS:16452, 18275, and 12914, respectively.

[1493] The disclosure describes an antibody, antigen binding fragment, or polypeptide comprising a heavy chain variable region having a HCDR1, HCDR2, and HCDR3, and a light chain variable region having a LCDR1, LCDR2, and LCDR3, wherein the HCDR1, HCDR2, and HCDR3 comprises an amino acid sequence of SEQ ID NOS:16543, 18475, and 11354, respectively and the LCDR1, LCDR2, and LCDR3 comprises an amino acid sequence of SEQ ID NOS:10873, 18275, and 12991, respectively.

[1494] The disclosure describes an antibody, antigen binding fragment, or polypeptide comprising a heavy chain variable region having a HCDR1, HCDR2, and HCDR3, and a light chain variable region having a LCDR1, LCDR2, and LCDR3, wherein the HCDR1, HCDR2, and HCDR3 comprises an amino acid sequence of SEQ ID NOS:11633, 16627, and 10988, respectively and the LCDR1, LCDR2, and LCDR3 comprises an amino acid sequence of SEQ ID NOS:15759, 9503, and 12772, respectively.

[1495] The disclosure describes an antibody, antigen binding fragment, or polypeptide comprising a heavy chain variable region having a HCDR1, HCDR2, and HCDR3, and a light chain variable region having a LCDR1, LCDR2, and LCDR3, wherein the HCDR1, HCDR2, and HCDR3 comprises an amino acid sequence of SEQ ID NOS:16962, 17821, and 10239, respectively and the LCDR1, LCDR2, and LCDR3 comprises an amino acid sequence of SEQ ID NOS: 16735, 10090, and 4004, respectively.

[1496] The disclosure describes an antibody, antigen binding fragment, or polypeptide comprising a heavy chain variable region having a HCDR1, HCDR2, and HCDR3, and a light chain variable region having a LCDR1, LCDR2, and LCDR3, wherein the HCDR1, HCDR2, and HCDR3 comprises an amino acid sequence of SEQ ID NOS:6503, 18345, and 10333, respectively and the LCDR1, LCDR2, and LCDR3 comprises an amino acid sequence of SEQ ID NOS:10793, 18260, and 12898, respectively.

[1497] The disclosure describes an antibody, antigen binding fragment, or polypeptide comprising a heavy chain variable region having a HCDR1, HCDR2, and HCDR3, and a light chain variable region having a LCDR1, LCDR2, and LCDR3, wherein the HCDR1, HCDR2, and HCDR3 comprises an amino acid sequence of SEQ ID NOS:16962, 17821, and 10239, respectively and the LCDR1, LCDR2, and LCDR3 comprises an amino acid sequence of SEQ ID NOS:10712, 4425, and 12406, respectively.

[1498] The disclosure describes an antibody, antigen binding fragment, or polypeptide comprising a heavy chain variable region having a HCDR1, HCDR2, and HCDR3, and a light chain variable region having a LCDR1, LCDR2, and LCDR3, wherein the HCDR1, HCDR2, and HCDR3 comprises an amino acid sequence of SEQ ID NOS:16962, 17821, and 10239, respectively and the LCDR1, LCDR2, and LCDR3 comprises an amino acid sequence of SEQ ID NOS: 17976, 6717, and 4389, respectively.

[1499] The disclosure describes an antibody, antigen binding fragment, or polypeptide comprising a heavy chain variable region having a HCDR1, HCDR2, and HCDR3, and a light chain variable region having a LCDR1, LCDR2, and LCDR3, wherein the HCDR1, HCDR2, and HCDR3 comprises an amino acid sequence of SEQ ID NOS: 17052, 18459, and 7883, respectively and the LCDR1, LCDR2, and LCDR3 comprises an amino acid sequence of SEQ ID NOS: 16031, 3982, and 12485, respectively.

[1500] The disclosure describes an antibody, antigen binding fragment, or polypeptide comprising a heavy chain variable region having a HCDR1, HCDR2, and HCDR3, and a light chain variable region having a LCDR1, LCDR2, and LCDR3, wherein the HCDR1, HCDR2, and HCDR3 comprises an amino acid sequence of SEQ ID NOS:16962, 17821, and 10239, respectively and the LCDR1, LCDR2, and LCDR3 comprises an amino acid sequence of SEQ ID NOS:10804, 18275, and 12994, respectively.

[1501] The disclosure describes an antibody, antigen binding fragment, or polypeptide comprising a heavy chain variable region having a HCDR1, HCDR2, and HCDR3, and a light chain variable region having a LCDR1, LCDR2, and LCDR3, wherein the HCDR1, HCDR2, and HCDR3 comprises an amino acid sequence of SEQ ID NOS: 17263, 9578, and 4340, respectively and the LCDR1, LCDR2, and LCDR3 comprises an amino acid sequence of SEQ ID NOS:15890, 10917, and 12016, respectively.

[1502] The disclosure describes an antibody, antigen binding fragment, or polypeptide comprising a heavy chain variable region having a HCDR1, HCDR2, and HCDR3, and a light chain variable region having a LCDR1, LCDR2, and LCDR3, wherein the HCDR1, HCDR2, and HCDR3 comprises an amino acid sequence of SEQ ID NOS: 10152, 18412, and 4497, respectively and the LCDR1, LCDR2, and LCDR3 comprises an amino acid sequence of SEQ ID NOS: 17974, 6307, and 17171, respectively.

[1503] The disclosure describes an antibody, antigen binding fragment, or polypeptide comprising a heavy chain variable region having a HCDR1, HCDR2, and HCDR3, and a light chain variable region having a LCDR1, LCDR2, and LCDR3, wherein the HCDR1, HCDR2, and HCDR3 comprises an amino acid sequence of SEQ ID NOS:11622, 18347, and 10331, respectively and the LCDR1, LCDR2, and LCDR3 comprises an amino acid sequence of SEQ ID NOS:10805, 18275, and 12935, respectively.

[1504] The disclosure describes an antibody, antigen binding fragment, or polypeptide comprising a heavy chain variable region having a HCDR1, HCDR2, and HCDR3, and a light chain variable region having a LCDR1, LCDR2, and LCDR3, wherein the HCDR1, HCDR2, and HCDR3 comprises an amino acid sequence of SEQ ID NOS: 17263, 9747, and 4230, respectively and the LCDR1, LCDR2, and LCDR3 comprises an amino acid sequence of SEQ ID NOS: 16070, 9503, and 12778, respectively.

[1505] The disclosure describes an antibody, antigen binding fragment, or polypeptide comprising a heavy chain variable region having a HCDR1, HCDR2, and HCDR3, and a light chain variable region having a LCDR1, LCDR2, and LCDR3, wherein the HCDR1, HCDR2, and HCDR3 comprises an amino acid sequence of SEQ ID NOS:11650, 11027, and 10239, respectively and the LCDR1, LCDR2, and LCDR3 comprises an amino acid sequence of SEQ ID NOS: 16646, 10747, and 13032, respectively. having a LCDR1, LCDR2, and LCDR3, wherein the HCDR1, HCDR2, and HCDR3 comprises an amino acid sequence of SEQ ID NOS:16571, 9985, and 18421, respectively and the LCDR1, LCDR2, and LCDR3 comprises an amino acid sequence of SEQ ID NOS: 10836, 9267, and 11332, respectively.

[1506] The disclosure describes an antibody, antigen binding fragment, or polypeptide comprising a heavy chain variable region having a HCDR1, HCDR2, and HCDR3, and a light chain variable region having a LCDR1, LCDR2, and LCDR3, wherein the HCDR1, HCDR2, and HCDR3 comprises an amino acid sequence of SEQ ID NOS:16962, 17821, and 10239, respectively and the LCDR1, LCDR2, and LCDR3 comprises an amino acid sequence of SEQ ID NOS: 17977, 11605, and 16474, respectively.

[1507] The disclosure describes an antibody, antigen binding fragment, or polypeptide comprising a heavy chain variable region having a HCDR1, HCDR2, and HCDR3, and a light chain variable region having a LCDR1, LCDR2, and LCDR3, wherein the HCDR1, HCDR2, and HCDR3 comprises an amino acid sequence of SEQ ID NOS:10935, 9723, and 10214, respectively and the LCDR1, LCDR2, and LCDR3 comprises an amino acid sequence of SEQ ID NOS: 10824, 7822, and 11240, respectively.

[1508] The disclosure describes an antibody, antigen binding fragment, or polypeptide comprising a heavy chain variable region having a HCDR1, HCDR2, and HCDR3, and a light chain variable region having a LCDR1, LCDR2, and LCDR3, wherein the HCDR1, HCDR2, and HCDR3 comprises an amino acid sequence of SEQ ID NOS:4304, 9783, and 18227, respectively and the LCDR1, LCDR2, and LCDR3 comprises an amino acid sequence of SEQ ID NOS:10058, 17222, and 18116, respectively.

[1509] The disclosure describes an antibody, antigen binding fragment, or polypeptide comprising a heavy chain variable region having a HCDR1, HCDR2, and HCDR3, and a light chain variable region having a LCDR1, LCDR2, and LCDR3, wherein the HCDR1, HCDR2, and HCDR3 comprises an amino acid sequence of SEQ ID NOS:16962, 17821, and 10239, respectively and the LCDR1, LCDR2, and LCDR3 comprises an amino acid sequence of SEQ ID NOS:16636, 10771, and 10285, respectively.

[1510] The disclosure describes an antibody, antigen binding fragment, or polypeptide comprising a heavy chain variable region having a HCDR1, HCDR2, and HCDR3, and a light chain variable region having a LCDR1, LCDR2, and LCDR3, wherein the HCDR1, HCDR2, and HCDR3 comprises an amino acid sequence of SEQ ID NOS:6509, 9953, and 4195, respectively and the LCDR1, LCDR2, and LCDR3 comprises an amino acid sequence of SEQ ID NOS: 15628, 9503, and 12763, respectively.

[1511] The disclosure describes an antibody, antigen binding fragment, or polypeptide comprising a heavy chain variable region having a HCDR1, HCDR2, and HCDR3, and a light chain variable region having a LCDR1, LCDR2, and LCDR3, wherein the HCDR1, HCDR2, and HCDR3 comprises an amino acid sequence of SEQ ID NOS:10368, 18513, and 11939, respectively and the LCDR1, LCDR2, and LCDR3 comprises an amino acid sequence of SEQ ID NOS:9653, 4467, and 15571, respectively.

[1512] The disclosure describes an antibody, antigen binding fragment, or polypeptide comprising a heavy chain variable region having a HCDR1, HCDR2, and HCDR3, and a light chain variable region having a LCDR1, LCDR2, and LCDR3, wherein the HCDR1, HCDR2, and HCDR3 comprises an amino acid sequence of SEQ ID NOS:16962, 17821, and 10239, respectively and the LCDR1, LCDR2, and LCDR3 comprises an amino acid sequence of SEQ ID NOS: 16000, 9503, and 12586, respectively.

[1513] The disclosure describes an antibody, antigen binding fragment, or polypeptide comprising a heavy chain variable region having a HCDR1, HCDR2, and HCDR3, and a light chain variable region having a LCDR1, LCDR2, and LCDR3, wherein the HCDR1, HCDR2, and HCDR3 comprises an amino acid sequence of SEQ ID NOS:16962, 17821, and 10239, respectively and the LCDR1, LCDR2, and LCDR3 comprises an amino acid sequence of SEQ ID NOS:16712, 18105, and 4284, respectively.

[1514] The disclosure describes an antibody, antigen binding fragment, or polypeptide comprising a heavy chain variable region having a HCDR1, HCDR2, and HCDR3, and a light chain variable region having a LCDR1, LCDR2, and LCDR3, wherein the HCDR1, HCDR2, and HCDR3 comprises an amino acid sequence of SEQ ID NOS:16962, 17821, and 10239, respectively and the LCDR1, LCDR2, and LCDR3 comprises an amino acid sequence of SEQ ID NOS:15824, 11793, and 12816, respectively.

[1515] The disclosure describes an antibody, antigen binding fragment, or polypeptide comprising a heavy chain variable region having a HCDR1, HCDR2, and HCDR3, and a light chain variable region having a LCDR1, LCDR2, and LCDR3, wherein the HCDR1, HCDR2, and HCDR3 comprises an amino acid sequence of SEQ ID NOS: 10337, 9990, and 9456, respectively and the LCDR1, LCDR2, and LCDR3 comprises an amino acid sequence of SEQ ID NOS: 16059, 4432, and 12004, respectively.

[1516] The disclosure describes an antibody, antigen binding fragment, or polypeptide comprising a heavy chain variable region having a HCDR1, HCDR2, and HCDR3, and a light chain variable region having a LCDR1, LCDR2, and LCDR3, wherein the HCDR1, HCDR2, and HCDR3 comprises an amino acid sequence of SEQ ID NOS:16962, 17821, and 10239, respectively and the LCDR1, LCDR2, and LCDR3 comprises an amino acid sequence of SEQ ID NOS:10869, 18275, and 12986, respectively.

[1517] The disclosure describes an antibody, antigen binding fragment, or polypeptide comprising a heavy chain variable region having a HCDR1, HCDR2, and HCDR3, and a light chain variable region having a LCDR1, LCDR2, and LCDR3, wherein the HCDR1, HCDR2, and HCDR3 comprises an amino acid sequence of SEQ ID NOS: 11632, 16609, and 6471, respectively and the LCDR1, LCDR2, and LCDR3 comprises an amino acid sequence of SEQ ID NOS:18068, 18596, and 11181, respectively.

[1518] The disclosure describes an antibody, antigen binding fragment, or polypeptide comprising a heavy chain variable region having a HCDR1, HCDR2, and HCDR3, and a light chain variable region having a LCDR1, LCDR2, and LCDR3, wherein the HCDR1, HCDR2, and HCDR3 comprises an amino acid sequence of SEQ ID NOS:11634, 17778, and 10239, respectively and the LCDR1, LCDR2, and LCDR3 comprises an amino acid sequence of SEQ ID NOS: 11784, 4609, and 12398, respectively.

[1519] The disclosure describes an antibody, antigen binding fragment, or polypeptide comprising a heavy chain variable region having a HCDR1, HCDR2, and HCDR3, and a light chain variable region having a LCDR1, LCDR2, and LCDR3, wherein the HCDR1, HCDR2, and HCDR3 comprises an amino acid sequence of SEQ ID NOS:16962, 17821, and 10239, respectively and the LCDR1, LCDR2, and LCDR3 comprises an amino acid sequence of SEQ ID NOS:16756, 17001, and 3995, respectively.

[1520] The disclosure describes an antibody, antigen binding fragment, or polypeptide comprising a heavy chain variable region having a HCDR1, HCDR2, and HCDR3, and a light chain variable region having a LCDR1, LCDR2, and LCDR3, wherein the HCDR1, HCDR2, and HCDR3 comprises an amino acid sequence of SEQ ID NOS:6571, 18314, and 9513, respectively and the LCDR1, LCDR2, and LCDR3 comprises an amino acid sequence of SEQ ID NOS:10846, 18268, and 12929, respectively.

[1521] The disclosure describes an antibody, antigen binding fragment, or polypeptide comprising a heavy chain variable region having a HCDR1, HCDR2, and HCDR3, and a light chain variable region having a LCDR1, LCDR2, and LCDR3, wherein the HCDR1, HCDR2, and HCDR3 comprises an amino acid sequence of SEQ ID NOS:16962, 17821, and 10239, respectively and the LCDR1, LCDR2, and LCDR3 comprises an amino acid sequence of SEQ ID NOS:15742, 11791, and 12816, respectively.

[1522] The disclosure describes an antibody, antigen binding fragment, or polypeptide comprising a heavy chain variable region having a HCDR1, HCDR2, and HCDR3, and a light chain variable region having a LCDR1, LCDR2, and LCDR3, wherein the HCDR1, HCDR2, and HCDR3 comprises an amino acid sequence of SEQ ID NOS:9339, 9972, and 10239, respectively and the LCDR1, LCDR2, and LCDR3 comprises an amino acid sequence of SEQ ID NOS: 15879, 9503, and 12791, respectively.

[1523] The disclosure describes an antibody, antigen binding fragment, or polypeptide comprising a heavy chain variable region having a HCDR1, HCDR2, and HCDR3, and a light chain variable region having a LCDR1, LCDR2, and LCDR3, wherein the HCDR1, HCDR2, and HCDR3 comprises an amino acid sequence of SEQ ID NOS:11634, 11026, and 10239, respectively and the LCDR1, LCDR2, and LCDR3 comprises an amino acid sequence of SEQ ID NOS:11784, 4421, and 12343, respectively.

[1524] The disclosure describes an antibody, antigen binding fragment, or polypeptide comprising a heavy chain variable region having a HCDR1, HCDR2, and HCDR3, and a light chain variable region having a LCDR1, LCDR2, and LCDR3, wherein the HCDR1, HCDR2, and HCDR3 comprises an amino acid sequence of SEQ ID NOS:11573, 9909, and 10962, respectively and the LCDR1, LCDR2, and LCDR3 comprises an amino acid sequence of SEQ ID NOS:15795, 10731, and 12873, respectively. having a LCDR1, LCDR2, and LCDR3, wherein the HCDR1, HCDR2, and HCDR3 comprises an amino acid sequence of SEQ ID NOS: 11652, 4270, and 6497, respectively and the LCDR1, LCDR2, and LCDR3 comprises an amino acid sequence of SEQ ID NOS:16720, 10081, and 11133, respectively.

[1525] The disclosure describes an antibody, antigen binding fragment, or polypeptide comprising a heavy chain variable region having a HCDR1, HCDR2, and HCDR3, and a light chain variable region having a LCDR1, LCDR2, and LCDR3, wherein the HCDR1, HCDR2, and HCDR3 comprises an amino acid sequence of SEQ ID NOS:16962, 17821, and 10239, respectively and the LCDR1, LCDR2, and LCDR3 comprises an amino acid sequence of SEQ ID NOS:10857, 18257, and 12972, respectively.

[1526] The disclosure describes an antibody, antigen binding fragment, or polypeptide comprising a heavy chain variable region having a HCDR1, HCDR2, and HCDR3, and a light chain variable region having a LCDR1, LCDR2, and LCDR3, wherein the HCDR1, HCDR2, and HCDR3 comprises an amino acid sequence of SEQ ID NOS: 11385, 10012, and 4339, respectively and the LCDR1, LCDR2, and LCDR3 comprises an amino acid sequence of SEQ ID NOS:15890, 10726, and 11992, respectively.

[1527] The disclosure describes an antibody, antigen binding fragment, or polypeptide comprising a heavy chain variable region having a HCDR1, HCDR2, and HCDR3, and a light chain variable region having a LCDR1, LCDR2, and LCDR3, wherein the HCDR1, HCDR2, and HCDR3 comprises an amino acid sequence of SEQ ID NOS: 11389, 17779, and 6098, respectively and the LCDR1, LCDR2, and LCDR3 comprises an amino acid sequence of SEQ ID NOS: 11784, 4420, and 12399, respectively.

[1528] The disclosure describes an antibody, antigen binding fragment, or polypeptide comprising a heavy chain variable region having a HCDR1, HCDR2, and HCDR3, and a light chain variable region having a LCDR1, LCDR2, and LCDR3, wherein the HCDR1, HCDR2, and HCDR3 comprises an amino acid sequence of SEQ ID NOS:17064, 16829, and 18282, respectively and the LCDR1, LCDR2, and LCDR3 comprises an amino acid sequence of SEQ ID NOS: 10830, 9267, and 11314, respectively.

[1529] The disclosure describes an antibody, antigen binding fragment, or polypeptide comprising a heavy chain variable region having a HCDR1, HCDR2, and HCDR3, and a light chain variable region having a LCDR1, LCDR2, and LCDR3, wherein the HCDR1, HCDR2, and HCDR3 comprises an amino acid sequence of SEQ ID NOS:17019, 11534, and 18454, respectively and the LCDR1, LCDR2, and LCDR3 comprises an amino acid sequence of SEQ ID NOS: 16408, 10990, and 11196, respectively.

[1530] The disclosure describes an antibody, antigen binding fragment, or polypeptide comprising a heavy chain variable region having a HCDR1, HCDR2, and HCDR3, and a light chain variable region having a LCDR1, LCDR2, and LCDR3, wherein the HCDR1, HCDR2, and HCDR3 comprises an amino acid sequence of SEQ ID NOS: 11421, 16905, and 6177, respectively and the LCDR1, LCDR2, and LCDR3 comprises an amino acid sequence of SEQ ID NOS: 15925, 4417, and 12341, respectively.

[1531] The disclosure describes an antibody, antigen binding fragment, or polypeptide comprising a heavy chain variable region having a HCDR1, HCDR2, and HCDR3, and a light chain variable region having a LCDR1, LCDR2, and LCDR3, wherein the HCDR1, HCDR2, and HCDR3 comprises an amino acid sequence of SEQ ID NOS:6578, 18547, and 4278, respectively and the LCDR1, LCDR2, and LCDR3 comprises an amino acid sequence of SEQ ID NOS:16712, 18105, and 4284, respectively.

[1532] The disclosure describes an antibody, antigen binding fragment, or polypeptide comprising a heavy chain variable region having a HCDR1, HCDR2, and HCDR3, and a light chain variable region having a LCDR1, LCDR2, and LCDR3, wherein the HCDR1, HCDR2, and HCDR3 comprises an amino acid sequence of SEQ ID NOS:16962, 17821, and 10239, respectively and the LCDR1, LCDR2, and LCDR3 comprises an amino acid sequence of SEQ ID NOS:11783, 4416, and 12722, respectively.

[1533] The disclosure describes an antibody, antigen binding fragment, or polypeptide comprising a heavy chain variable region having a HCDR1, HCDR2, and HCDR3, and a light chain variable region having a LCDR1, LCDR2, and LCDR3, wherein the HCDR1, HCDR2, and HCDR3 comprises an amino acid sequence of SEQ ID NOS: 11679, 11474, and 6040, respectively and the LCDR1, LCDR2, and LCDR3 comprises an amino acid sequence of SEQ ID NOS:16441, 10926, and 11287, respectively.

[1534] The disclosure describes an antibody, antigen binding fragment, or polypeptide comprising a heavy chain variable region having a HCDR1, HCDR2, and HCDR3, and a light chain variable region having a LCDR1, LCDR2, and LCDR3, wherein the HCDR1, HCDR2, and HCDR3 comprises an amino acid sequence of SEQ ID NOS:11678, 11469, and 10527, respectively and the LCDR1, LCDR2, and LCDR3 comprises an amino acid sequence of SEQ ID NOS:10804, 18275, and 12897, respectively.

[1535] The disclosure describes an antibody, antigen binding fragment, or polypeptide comprising a heavy chain variable region having a HCDR1, HCDR2, and HCDR3, and a light chain variable region having a LCDR1, LCDR2, and LCDR3, wherein the HCDR1, HCDR2, and HCDR3 comprises an amino acid sequence of SEQ ID NOS:4634, 18223, and 17251, respectively and the LCDR1, LCDR2, and LCDR3 comprises an amino acid sequence of SEQ ID NOS: 15678, 6324, and 12378, respectively.

[1536] The disclosure describes an antibody, antigen binding fragment, or polypeptide comprising a heavy chain variable region having a HCDR1, HCDR2, and HCDR3, and a light chain variable region having a LCDR1, LCDR2, and LCDR3, wherein the HCDR1, HCDR2, and HCDR3 comprises an amino acid sequence of SEQ ID NOS: 11385, 10012, and 4339, respectively and the LCDR1, LCDR2, and LCDR3 comprises an amino acid sequence of SEQ ID NOS:16712, 18105, and 4284, respectively.

[1537] The disclosure describes an antibody, antigen binding fragment, or polypeptide comprising a heavy chain variable region having a HCDR1, HCDR2, and HCDR3, and a light chain variable region having a LCDR1, LCDR2, and LCDR3, wherein the HCDR1, HCDR2, and HCDR3 comprises an amino acid sequence of SEQ ID NOS:16962, 17821, and 10239, respectively and the LCDR1, LCDR2, and LCDR3 comprises an amino acid sequence of SEQ ID NOS: 15807, 3953, and 12496, respectively.

[1538] The disclosure describes an antibody, antigen binding fragment, or polypeptide comprising a heavy chain variable region having a HCDR1, HCDR2, and HCDR3, and a light chain variable region having a LCDR1, LCDR2, and LCDR3, wherein the HCDR1, HCDR2, and HCDR3 comprises an amino acid sequence of SEQ ID NOS:11678, 11490, and 10239, respectively and the LCDR1, LCDR2, and LCDR3 comprises an amino acid sequence of SEQ ID NOS:10875, 18271, and 12900, respectively.

[1539] The disclosure describes an antibody, antigen binding fragment, or polypeptide comprising a heavy chain variable region having a HCDR1, HCDR2, and HCDR3, and a light chain variable region having a LCDR1, LCDR2, and LCDR3, wherein the HCDR1, HCDR2, and HCDR3 comprises an amino acid sequence of SEQ ID NOS: 11405, 16908, and 4510, respectively and the LCDR1, LCDR2, and LCDR3 comprises an amino acid sequence of SEQ ID NOS: 15902, 9499, and 12775, respectively.

[1540] The disclosure describes an antibody, antigen binding fragment, or polypeptide comprising a heavy chain variable region having a HCDR1, HCDR2, and HCDR3, and a light chain variable region having a LCDR1, LCDR2, and LCDR3, wherein the HCDR1, HCDR2, and HCDR3 comprises an amino acid sequence of SEQ ID NOS:11629, 16877, and 10239, respectively and the LCDR1, LCDR2, and LCDR3 comprises an amino acid sequence of SEQ ID NOS: 16765, 17008, and 3996, respectively.

[1541] The disclosure describes an antibody, antigen binding fragment, or polypeptide comprising a heavy chain variable region having a HCDR1, HCDR2, and HCDR3, and a light chain variable region having a LCDR1, LCDR2, and LCDR3, wherein the HCDR1, HCDR2, and HCDR3 comprises an amino acid sequence of SEQ ID NOS:17053, 11007, and 17912, respectively and the LCDR1, LCDR2, and LCDR3 comprises an amino acid sequence of SEQ ID NOS: 15833, 3953, and 12464, respectively.

[1542] The disclosure describes an antibody, antigen binding fragment, or polypeptide comprising a heavy chain variable region having a HCDR1, HCDR2, and HCDR3, and a light chain variable region having a LCDR1, LCDR2, and LCDR3, wherein the HCDR1, HCDR2, and HCDR3 comprises an amino acid sequence of SEQ ID NOS:16962, 17821, and 10239, respectively and the LCDR1, LCDR2, and LCDR3 comprises an amino acid sequence of SEQ ID NOS: 16045, 9507, and 12468, respectively.

[1543] The disclosure describes an antibody, antigen binding fragment, or polypeptide comprising a heavy chain variable region having a HCDR1, HCDR2, and HCDR3, and a light chain variable region having a LCDR1, LCDR2, and LCDR3, wherein the HCDR1, HCDR2, and HCDR3 comprises an amino acid sequence of SEQ ID NOS:16962, 17821, and 10239, respectively and the LCDR1, LCDR2, and LCDR3 comprises an amino acid sequence of SEQ ID NOS:18062, 18596, and 11359, respectively. having a LCDR1, LCDR2, and LCDR3, wherein the HCDR1, HCDR2, and HCDR3 comprises an amino acid sequence of SEQ ID NOS:11622, 16287, and 10334, respectively and the LCDR1, LCDR2, and LCDR3 comprises an amino acid sequence of SEQ ID NOS:10800, 18275, and 12898, respectively.

[1544] The disclosure describes an antibody, antigen binding fragment, or polypeptide comprising a heavy chain variable region having a HCDR1, HCDR2, and HCDR3, and a light chain variable region having a LCDR1, LCDR2, and LCDR3, wherein the HCDR1, HCDR2, and HCDR3 comprises an amino acid sequence of SEQ ID NOS:17856, 18588, and 10184, respectively and the LCDR1, LCDR2, and LCDR3 comprises an amino acid sequence of SEQ ID NOS: 11789, 4420, and 12572, respectively.

[1545] The disclosure describes an antibody, antigen binding fragment, or polypeptide comprising a heavy chain variable region having a HCDR1, HCDR2, and HCDR3, and a light chain variable region having a LCDR1, LCDR2, and LCDR3, wherein the HCDR1, HCDR2, and HCDR3 comprises an amino acid sequence of SEQ ID NOS:7871, 9963, and 10342, respectively and the LCDR1, LCDR2, and LCDR3 comprises an amino acid sequence of SEQ ID NOS: 16005, 9494, and 12638, respectively.

[1546] The disclosure describes an antibody, antigen binding fragment, or polypeptide comprising a heavy chain variable region having a HCDR1, HCDR2, and HCDR3, and a light chain variable region having a LCDR1, LCDR2, and LCDR3, wherein the HCDR1, HCDR2, and HCDR3 comprises an amino acid sequence of SEQ ID NOS:11669, 16890, and 10055, respectively and the LCDR1, LCDR2, and LCDR3 comprises an amino acid sequence of SEQ ID NOS: 16036, 9503, and 12775, respectively.

[1547] The disclosure describes an antibody, antigen binding fragment, or polypeptide comprising a heavy chain variable region having a HCDR1, HCDR2, and HCDR3, and a light chain variable region having a LCDR1, LCDR2, and LCDR3, wherein the HCDR1, HCDR2, and HCDR3 comprises an amino acid sequence of SEQ ID NOS:17263, 9776, and 16193, respectively and the LCDR1, LCDR2, and LCDR3 comprises an amino acid sequence of SEQ ID NOS:15890, 10727, and 12017, respectively.

[1548] The disclosure describes an antibody, antigen binding fragment, or polypeptide comprising a heavy chain variable region having a HCDR1, HCDR2, and HCDR3, and a light chain variable region having a LCDR1, LCDR2, and LCDR3, wherein the HCDR1, HCDR2, and HCDR3 comprises an amino acid sequence of SEQ ID NOS:6509, 9971, and 4064, respectively and the LCDR1, LCDR2, and LCDR3 comprises an amino acid sequence of SEQ ID NOS: 15620, 4436, and 12791, respectively.

[1549] The disclosure describes an antibody, antigen binding fragment, or polypeptide comprising a heavy chain variable region having a HCDR1, HCDR2, and HCDR3, and a light chain variable region having a LCDR1, LCDR2, and LCDR3, wherein the HCDR1, HCDR2, and HCDR3 comprises an amino acid sequence of SEQ ID NOS: 17129, 18028, and 6013, respectively and the LCDR1, LCDR2, and LCDR3 comprises an amino acid sequence of SEQ ID NOS: 17950, 9261, and 17151, respectively.

[1550] The disclosure describes an antibody, antigen binding fragment, or polypeptide comprising a heavy chain variable region having a HCDR1, HCDR2, and HCDR3, and a light chain variable region having a LCDR1, LCDR2, and LCDR3, wherein the HCDR1, HCDR2, and HCDR3 comprises an amino acid sequence of SEQ ID NOS:6573, 18297, and 10014, respectively and the LCDR1, LCDR2, and LCDR3 comprises an amino acid sequence of SEQ ID NOS: 16090, 9503, and 12634, respectively.

[1551] The disclosure describes an antibody, antigen binding fragment, or polypeptide comprising a heavy chain variable region having a HCDR1, HCDR2, and HCDR3, and a light chain variable region having a LCDR1, LCDR2, and LCDR3, wherein the HCDR1, HCDR2, and HCDR3 comprises an amino acid sequence of SEQ ID NOS:11629, 4662, and 17054, respectively and the LCDR1, LCDR2, and LCDR3 comprises an amino acid sequence of SEQ ID NOS: 15671, 3982, and 12101, respectively.

[1552] The disclosure describes an antibody, antigen binding fragment, or polypeptide comprising a heavy chain variable region having a HCDR1, HCDR2, and HCDR3, and a light chain variable region having a LCDR1, LCDR2, and LCDR3, wherein the HCDR1, HCDR2, and HCDR3 comprises an amino acid sequence of SEQ ID NOS: 11690, 16312, and 3947, respectively and the LCDR1, LCDR2, and LCDR3 comprises an amino acid sequence of SEQ ID NOS:10859, 18275, and 12980, respectively.

[1553] The disclosure describes an antibody, antigen binding fragment, or polypeptide comprising a heavy chain variable region having a HCDR1, HCDR2, and HCDR3, and a light chain variable region having a LCDR1, LCDR2, and LCDR3, wherein the HCDR1, HCDR2, and HCDR3 comprises an amino acid sequence of SEQ ID NOS:11384, 9725, and 16160, respectively and the LCDR1, LCDR2, and LCDR3 comprises an amino acid sequence of SEQ ID NOS:15861, 10727, and 12890, respectively.

[1554] The disclosure describes an antibody, antigen binding fragment, or polypeptide comprising a heavy chain variable region having a HCDR1, HCDR2, and HCDR3, and a light chain variable region having a LCDR1, LCDR2, and LCDR3, wherein the HCDR1, HCDR2, and HCDR3 comprises an amino acid sequence of SEQ ID NOS: 17466, 16919, and 9664, respectively and the LCDR1, LCDR2, and LCDR3 comprises an amino acid sequence of SEQ ID NOS:18090, 11073, and 13616, respectively.

[1555] The disclosure describes an antibody, antigen binding fragment, or polypeptide comprising a heavy chain variable region having a HCDR1, HCDR2, and HCDR3, and a light chain variable region having a LCDR1, LCDR2, and LCDR3, wherein the HCDR1, HCDR2, and HCDR3 comprises an amino acid sequence of SEQ ID NOS:6558, 9697, and 6111, respectively and the LCDR1, LCDR2, and LCDR3 comprises an amino acid sequence of SEQ ID NOS: 15844, 3969, and 11925, respectively.

[1556] The disclosure describes an antibody, antigen binding fragment, or polypeptide comprising a heavy chain variable region having a HCDR1, HCDR2, and HCDR3, and a light chain variable region having a LCDR1, LCDR2, and LCDR3, wherein the HCDR1, HCDR2, and HCDR3 comprises an amino acid sequence of SEQ ID NOS:17534, 10567, and 16180, respectively and the LCDR1, LCDR2, and LCDR3 comprises an amino acid sequence of SEQ ID NOS:17878, 6633, and 17156, respectively.

[1557] The disclosure describes an antibody, antigen binding fragment, or polypeptide comprising a heavy chain variable region having a HCDR1, HCDR2, and HCDR3, and a light chain variable region having a LCDR1, LCDR2, and LCDR3, wherein the HCDR1, HCDR2, and HCDR3 comprises an amino acid sequence of SEQ ID NOS: 18637, 18368, and 6493, respectively and the LCDR1, LCDR2, and LCDR3 comprises an amino acid sequence of SEQ ID NOS:15750, 10986, and 12453, respectively.

[1558] The disclosure describes an antibody, antigen binding fragment, or polypeptide comprising a heavy chain variable region having a HCDR1, HCDR2, and HCDR3, and a light chain variable region having a LCDR1, LCDR2, and LCDR3, wherein the HCDR1, HCDR2, and HCDR3 comprises an amino acid sequence of SEQ ID NOS:6577, 18468, and 4190, respectively and the LCDR1, LCDR2, and LCDR3 comprises an amino acid sequence of SEQ ID NOS:10852, 18271, and 12031, respectively.

[1559] The disclosure describes an antibody, antigen binding fragment, or polypeptide comprising a heavy chain variable region having a HCDR1, HCDR2, and HCDR3, and a light chain variable region having a LCDR1, LCDR2, and LCDR3, wherein the HCDR1, HCDR2, and HCDR3 comprises an amino acid sequence of SEQ ID NOS:17882, 9899, and 9591, respectively and the LCDR1, LCDR2, and LCDR3 comprises an amino acid sequence of SEQ ID NOS: 16078, 4417, and 12446, respectively.

[1560] The disclosure describes an antibody, antigen binding fragment, or polypeptide comprising a heavy chain variable region having a HCDR1, HCDR2, and HCDR3, and a light chain variable region having a LCDR1, LCDR2, and LCDR3, wherein the HCDR1, HCDR2, and HCDR3 comprises an amino acid sequence of SEQ ID NOS: 17601, 12039, and 6074, respectively and the LCDR1, LCDR2, and LCDR3 comprises an amino acid sequence of SEQ ID NOS:15797, 10731, and 12017, respectively.

[1561] The disclosure describes an antibody, antigen binding fragment, or polypeptide comprising a heavy chain variable region having a HCDR1, HCDR2, and HCDR3, and a light chain variable region having a LCDR1, LCDR2, and LCDR3, wherein the HCDR1, HCDR2, and HCDR3 comprises an amino acid sequence of SEQ ID NOS:10783, 11453, and 10315, respectively and the LCDR1, LCDR2, and LCDR3 comprises an amino acid sequence of SEQ ID NOS: 15743, 11792, and 12883, respectively.

[1562] The disclosure describes an antibody, antigen binding fragment, or polypeptide comprising a heavy chain variable region having a HCDR1, HCDR2, and HCDR3, and a light chain variable region having a LCDR1, LCDR2, and LCDR3, wherein the HCDR1, HCDR2, and HCDR3 comprises an amino acid sequence of SEQ ID NOS:16608, 9741, and 10169, respectively and the LCDR1, LCDR2, and LCDR3 comprises an amino acid sequence of SEQ ID NOS: 16056, 9503, and 12787, respectively. having a LCDR1, LCDR2, and LCDR3, wherein the HCDR1, HCDR2, and HCDR3 comprises an amino acid sequence of SEQ ID NOS:16779, 16311, and 17597, respectively and the LCDR1, LCDR2, and LCDR3 comprises an amino acid sequence of SEQ ID NOS:16408, 10987, and 11214, respectively.

[1563] The disclosure describes an antibody, antigen binding fragment, or polypeptide comprising a heavy chain variable region having a HCDR1, HCDR2, and HCDR3, and a light chain variable region having a LCDR1, LCDR2, and LCDR3, wherein the HCDR1, HCDR2, and HCDR3 comprises an amino acid sequence of SEQ ID NOS: 11657, 10545, and 6027, respectively and the LCDR1, LCDR2, and LCDR3 comprises an amino acid sequence of SEQ ID NOS:16700, 11902, and 18622, respectively.

[1564] The disclosure describes an antibody, antigen binding fragment, or polypeptide comprising a heavy chain variable region having a HCDR1, HCDR2, and HCDR3, and a light chain variable region having a LCDR1, LCDR2, and LCDR3, wherein the HCDR1, HCDR2, and HCDR3 comprises an amino acid sequence of SEQ ID NOS: 17432, 10411, and 4587, respectively and the LCDR1, LCDR2, and LCDR3 comprises an amino acid sequence of SEQ ID NOS: 17954, 9258, and 17179, respectively.

[1565] The disclosure describes an antibody, antigen binding fragment, or polypeptide comprising a heavy chain variable region having a HCDR1, HCDR2, and HCDR3, and a light chain variable region having a LCDR1, LCDR2, and LCDR3, wherein the HCDR1, HCDR2, and HCDR3 comprises an amino acid sequence of SEQ ID NOS: 11631, 17594, and 6173, respectively and the LCDR1, LCDR2, and LCDR3 comprises an amino acid sequence of SEQ ID NOS: 16056, 3983, and 12775, respectively.

[1566] The disclosure describes an antibody, antigen binding fragment, or polypeptide comprising a heavy chain variable region having a HCDR1, HCDR2, and HCDR3, and a light chain variable region having a LCDR1, LCDR2, and LCDR3, wherein the HCDR1, HCDR2, and HCDR3 comprises an amino acid sequence of SEQ ID NOS:17439, 17808, and 18106, respectively and the LCDR1, LCDR2, and LCDR3 comprises an amino acid sequence of SEQ ID NOS:16670, 11902, and 11941, respectively.

[1567] The disclosure describes an antibody, antigen binding fragment, or polypeptide comprising a heavy chain variable region having a HCDR1, HCDR2, and HCDR3, and a light chain variable region having a LCDR1, LCDR2, and LCDR3, wherein the HCDR1, HCDR2, and HCDR3 comprises an amino acid sequence of SEQ ID NOS:17650, 16221, and 18139, respectively and the LCDR1, LCDR2, and LCDR3 comprises an amino acid sequence of SEQ ID NOS:15912, 9503, and 12364, respectively.

[1568] The disclosure describes an antibody, antigen binding fragment, or polypeptide comprising a heavy chain variable region having a HCDR1, HCDR2, and HCDR3, and a light chain variable region having a LCDR1, LCDR2, and LCDR3, wherein the HCDR1, HCDR2, and HCDR3 comprises an amino acid sequence of SEQ ID NOS: 11392, 18554, and 6695, respectively and the LCDR1, LCDR2, and LCDR3 comprises an amino acid sequence of SEQ ID NOS: 16056, 9503, and 12775, respectively.

[1569] The disclosure describes an antibody, antigen binding fragment, or polypeptide comprising a heavy chain variable region having a HCDR1, HCDR2, and HCDR3, and a light chain variable region having a LCDR1, LCDR2, and LCDR3, wherein the HCDR1, HCDR2, and HCDR3 comprises an amino acid sequence of SEQ ID NOS: 17838, 16259, and 5962, respectively and the LCDR1, LCDR2, and LCDR3 comprises an amino acid sequence of SEQ ID NOS:16639, 10747, and 13024, respectively.

[1570] The disclosure describes an antibody, antigen binding fragment, or polypeptide comprising a heavy chain variable region having a HCDR1, HCDR2, and HCDR3, and a light chain variable region having a LCDR1, LCDR2, and LCDR3, wherein the HCDR1, HCDR2, and HCDR3 comprises an amino acid sequence of SEQ ID NOS:17440, 9799, and 10964, respectively and the LCDR1, LCDR2, and LCDR3 comprises an amino acid sequence of SEQ ID NOS: 10830, 9260, and 11170, respectively.

[1571] The disclosure describes an antibody, antigen binding fragment, or polypeptide comprising a heavy chain variable region having a HCDR1, HCDR2, and HCDR3, and a light chain variable region having a LCDR1, LCDR2, and LCDR3, wherein the HCDR1, HCDR2, and HCDR3 comprises an amino acid sequence of SEQ ID NOS:17018, 9720, and 9521, respectively and the LCDR1, LCDR2, and LCDR3 comprises an amino acid sequence of SEQ ID NOS:10830, 7821, and 11337, respectively.

[1572] The disclosure describes an antibody, antigen binding fragment, or polypeptide comprising a heavy chain variable region having a HCDR1, HCDR2, and HCDR3, and a light chain variable region having a LCDR1, LCDR2, and LCDR3, wherein the HCDR1, HCDR2, and HCDR3 comprises an amino acid sequence of SEQ ID NOS:11393, 18543, and 17700, respectively and the LCDR1, LCDR2, and LCDR3 comprises an amino acid sequence of SEQ ID NOS:15961, 9503, and 12613, respectively.

[1573] The disclosure describes an antibody, antigen binding fragment, or polypeptide comprising a heavy chain variable region having a HCDR1, HCDR2, and HCDR3, and a light chain variable region having a LCDR1, LCDR2, and LCDR3, wherein the HCDR1, HCDR2, and HCDR3 comprises an amino acid sequence of SEQ ID NOS:17621, 17747, and 11953, respectively and the LCDR1, LCDR2, and LCDR3 comprises an amino acid sequence of SEQ ID NOS: 15853, 16557, and 12542, respectively.

[1574] The disclosure describes an antibody, antigen binding fragment, or polypeptide comprising a heavy chain variable region having a HCDR1, HCDR2, and HCDR3, and a light chain variable region having a LCDR1, LCDR2, and LCDR3, wherein the HCDR1, HCDR2, and HCDR3 comprises an amino acid sequence of SEQ ID NOS:11623, 9844, and 11906, respectively and the LCDR1, LCDR2, and LCDR3 comprises an amino acid sequence of SEQ ID NOS: 15924, 4425, and 12441, respectively.

[1575] The disclosure describes an antibody, antigen binding fragment, or polypeptide comprising a heavy chain variable region having a HCDR1, HCDR2, and HCDR3, and a light chain variable region having a LCDR1, LCDR2, and LCDR3, wherein the HCDR1, HCDR2, and HCDR3 comprises an amino acid sequence of SEQ ID NOS:9685, 4253, and 6247, respectively and the LCDR1, LCDR2, and LCDR3 comprises an amino acid sequence of SEQ ID NOS:15713, 16144, and 12390, respectively.

[1576] The disclosure describes an antibody, antigen binding fragment, or polypeptide comprising a heavy chain variable region having a HCDR1, HCDR2, and HCDR3, and a light chain variable region having a LCDR1, LCDR2, and LCDR3, wherein the HCDR1, HCDR2, and HCDR3 comprises an amino acid sequence of SEQ ID NOS:17141, 16954, and 17873, respectively and the LCDR1, LCDR2, and LCDR3 comprises an amino acid sequence of SEQ ID NOS: 17924, 10094, and 13578, respectively.

[1577] The disclosure describes an antibody, antigen binding fragment, or polypeptide comprising a heavy chain variable region having a HCDR1, HCDR2, and HCDR3, and a light chain variable region having a LCDR1, LCDR2, and LCDR3, wherein the HCDR1, HCDR2, and HCDR3 comprises an amino acid sequence of SEQ ID NOS:17263, 9796, and 11970, respectively and the LCDR1, LCDR2, and LCDR3 comprises an amino acid sequence of SEQ ID NOS: 16045, 9503, and 12759, respectively.

[1578] The disclosure describes an antibody, antigen binding fragment, or polypeptide comprising a heavy chain variable region having a HCDR1, HCDR2, and HCDR3, and a light chain variable region having a LCDR1, LCDR2, and LCDR3, wherein the HCDR1, HCDR2, and HCDR3 comprises an amino acid sequence of SEQ ID NOS:6527, 6744, and 10502, respectively and the LCDR1, LCDR2, and LCDR3 comprises an amino acid sequence of SEQ ID NOS:17566, 10922, and 11229, respectively.

[1579] The disclosure describes an antibody, antigen binding fragment, or polypeptide comprising a heavy chain variable region having a HCDR1, HCDR2, and HCDR3, and a light chain variable region having a LCDR1, LCDR2, and LCDR3, wherein the HCDR1, HCDR2, and HCDR3 comprises an amino acid sequence of SEQ ID NOS:17466, 18537, and 16599, respectively and the LCDR1, LCDR2, and LCDR3 comprises an amino acid sequence of SEQ ID NOS: 16045, 9503, and 12947, respectively.

[1580] The disclosure describes an antibody, antigen binding fragment, or polypeptide comprising a heavy chain variable region having a HCDR1, HCDR2, and HCDR3, and a light chain variable region having a LCDR1, LCDR2, and LCDR3, wherein the HCDR1, HCDR2, and HCDR3 comprises an amino acid sequence of SEQ ID NOS:11633, 4279, and 11702, respectively and the LCDR1, LCDR2, and LCDR3 comprises an amino acid sequence of SEQ ID NOS: 16036, 9503, and 12775, respectively.

[1581] The disclosure describes an antibody, antigen binding fragment, or polypeptide comprising a heavy chain variable region having a HCDR1, HCDR2, and HCDR3, and a light chain variable region having a LCDR1, LCDR2, and LCDR3, wherein the HCDR1, HCDR2, and HCDR3 comprises an amino acid sequence of SEQ ID NOS:9685, 4254, and 6246, respectively and the LCDR1, LCDR2, and LCDR3 comprises an amino acid sequence of SEQ ID NOS:15707, 16554, and 12382, respectively. having a LCDR1, LCDR2, and LCDR3, wherein the HCDR1, HCDR2, and HCDR3 comprises an amino acid sequence of SEQ ID NOS:7809, 10037, and 10032, respectively and the LCDR1, LCDR2, and LCDR3 comprises an amino acid sequence of SEQ ID NOS:16464, 10990, and 11251, respectively.

[1582] The disclosure describes an antibody, antigen binding fragment, or polypeptide comprising a heavy chain variable region having a HCDR1, HCDR2, and HCDR3, and a light chain variable region having a LCDR1, LCDR2, and LCDR3, wherein the HCDR1, HCDR2, and HCDR3 comprises an amino acid sequence of SEQ ID NOS:6509, 9971, and 4063, respectively and the LCDR1, LCDR2, and LCDR3 comprises an amino acid sequence of SEQ ID NOS: 15620, 4436, and 12791, respectively.

[1583] The disclosure describes an antibody, antigen binding fragment, or polypeptide comprising a heavy chain variable region having a HCDR1, HCDR2, and HCDR3, and a light chain variable region having a LCDR1, LCDR2, and LCDR3, wherein the HCDR1, HCDR2, and HCDR3 comprises an amino acid sequence of SEQ ID NOS:11650, 10562, and 10103, respectively and the LCDR1, LCDR2, and LCDR3 comprises an amino acid sequence of SEQ ID NOS:17950, 6237, and 17177, respectively.

[1584] The disclosure describes an antibody, antigen binding fragment, or polypeptide comprising a heavy chain variable region having a HCDR1, HCDR2, and HCDR3, and a light chain variable region having a LCDR1, LCDR2, and LCDR3, wherein the HCDR1, HCDR2, and HCDR3 comprises an amino acid sequence of SEQ ID NOS:6525, 16211, and 6729, respectively and the LCDR1, LCDR2, and LCDR3 comprises an amino acid sequence of SEQ ID NOS:16408, 10985, and 11328, respectively.

[1585] The disclosure describes an antibody, antigen binding fragment, or polypeptide comprising a heavy chain variable region having a HCDR1, HCDR2, and HCDR3, and a light chain variable region having a LCDR1, LCDR2, and LCDR3, wherein the HCDR1, HCDR2, and HCDR3 comprises an amino acid sequence of SEQ ID NOS:11623, 9782, and 11905, respectively and the LCDR1, LCDR2, and LCDR3 comprises an amino acid sequence of SEQ ID NOS: 16024, 9480, and 10719, respectively.

[1586] The disclosure describes an antibody, antigen binding fragment, or polypeptide comprising a heavy chain variable region having a HCDR1, HCDR2, and HCDR3, and a light chain variable region having a LCDR1, LCDR2, and LCDR3, wherein the HCDR1, HCDR2, and HCDR3 comprises an amino acid sequence of SEQ ID NOS: 17887, 9898, and 9590, respectively and the LCDR1, LCDR2, and LCDR3 comprises an amino acid sequence of SEQ ID NOS: 16078, 4417, and 12446, respectively.

[1587] The disclosure describes an antibody, antigen binding fragment, or polypeptide comprising a heavy chain variable region having a HCDR1, HCDR2, and HCDR3, and a light chain variable region having a LCDR1, LCDR2, and LCDR3, wherein the HCDR1, HCDR2, and HCDR3 comprises an amino acid sequence of SEQ ID NOS:16324, 16884, and 17217, respectively and the LCDR1, LCDR2, and LCDR3 comprises an amino acid sequence of SEQ ID NOS: 15668, 3969, and 12333, respectively.

[1588] The disclosure describes an antibody, antigen binding fragment, or polypeptide comprising a heavy chain variable region having a HCDR1, HCDR2, and HCDR3, and a light chain variable region having a LCDR1, LCDR2, and LCDR3, wherein the HCDR1, HCDR2, and HCDR3 comprises an amino acid sequence of SEQ ID NOS:7806, 9564, and 10433, respectively and the LCDR1, LCDR2, and LCDR3 comprises an amino acid sequence of SEQ ID NOS: 16009, 4425, and 12439, respectively.

[1589] The disclosure describes an antibody, antigen binding fragment, or polypeptide comprising a heavy chain variable region having a HCDR1, HCDR2, and HCDR3, and a light chain variable region having a LCDR1, LCDR2, and LCDR3, wherein the HCDR1, HCDR2, and HCDR3 comprises an amino acid sequence of SEQ ID NOS:10057, 9563, and 10432, respectively and the LCDR1, LCDR2, and LCDR3 comprises an amino acid sequence of SEQ ID NOS: 16067, 4425, and 12423, respectively.

[1590] The disclosure describes an antibody, antigen binding fragment, or polypeptide comprising a heavy chain variable region having a HCDR1, HCDR2, and HCDR3, and a light chain variable region having a LCDR1, LCDR2, and LCDR3, wherein the HCDR1, HCDR2, and HCDR3 comprises an amino acid sequence of SEQ ID NOS:11652, 9396, and 10157, respectively and the LCDR1, LCDR2, and LCDR3 comprises an amino acid sequence of SEQ ID NOS:16036, 9471, and 12772, respectively.

[1591] The disclosure describes an antibody, antigen binding fragment, or polypeptide comprising a heavy chain variable region having a HCDR1, HCDR2, and HCDR3, and a light chain variable region having a LCDR1, LCDR2, and LCDR3, wherein the HCDR1, HCDR2, and HCDR3 comprises an amino acid sequence of SEQ ID NOS:17264, 9829, and 16530, respectively and the LCDR1, LCDR2, and LCDR3 comprises an amino acid sequence of SEQ ID NOS: 16061, 9480, and 12649, respectively.

[1592] The disclosure describes an antibody, antigen binding fragment, or polypeptide comprising a heavy chain variable region having a HCDR1, HCDR2, and HCDR3, and a light chain variable region having a LCDR1, LCDR2, and LCDR3, wherein the HCDR1, HCDR2, and HCDR3 comprises an amino acid sequence of SEQ ID NOS: 10681, 4108, and 4325, respectively and the LCDR1, LCDR2, and LCDR3 comprises an amino acid sequence of SEQ ID NOS: 15694, 3971, and 11086, respectively.

[1593] The disclosure describes an antibody, antigen binding fragment, or polypeptide comprising a heavy chain variable region having a HCDR1, HCDR2, and HCDR3, and a light chain variable region having a LCDR1, LCDR2, and LCDR3, wherein the HCDR1, HCDR2, and HCDR3 comprises an amino acid sequence of SEQ ID NOS:11647, 10296, and 18289, respectively and the LCDR1, LCDR2, and LCDR3 comprises an amino acid sequence of SEQ ID NOS: 15911, 10731, and 12876, respectively.

[1594] The disclosure describes an antibody, antigen binding fragment, or polypeptide comprising a heavy chain variable region having a HCDR1, HCDR2, and HCDR3, and a light chain variable region having a LCDR1, LCDR2, and LCDR3, wherein the HCDR1, HCDR2, and HCDR3 comprises an amino acid sequence of SEQ ID NOS:17274, 4136, and 18131, respectively and the LCDR1, LCDR2, and LCDR3 comprises an amino acid sequence of SEQ ID NOS: 17959, 6312, and 4375, respectively.

[1595] The disclosure describes an antibody, antigen binding fragment, or polypeptide comprising a heavy chain variable region having a HCDR1, HCDR2, and HCDR3, and a light chain variable region having a LCDR1, LCDR2, and LCDR3, wherein the HCDR1, HCDR2, and HCDR3 comprises an amino acid sequence of SEQ ID NOS:16986, 9825, and 10492, respectively and the LCDR1, LCDR2, and LCDR3 comprises an amino acid sequence of SEQ ID NOS: 15616, 3982, and 12850, respectively.

[1596] The disclosure describes an antibody, antigen binding fragment, or polypeptide comprising a heavy chain variable region having a HCDR1, HCDR2, and HCDR3, and a light chain variable region having a LCDR1, LCDR2, and LCDR3, wherein the HCDR1, HCDR2, and HCDR3 comprises an amino acid sequence of SEQ ID NOS:17634, 18503, and 17705, respectively and the LCDR1, LCDR2, and LCDR3 comprises an amino acid sequence of SEQ ID NOS: 15998, 9503, and 12775, respectively.

[1597] The disclosure describes an antibody, antigen binding fragment, or polypeptide comprising a heavy chain variable region having a HCDR1, HCDR2, and HCDR3, and a light chain variable region having a LCDR1, LCDR2, and LCDR3, wherein the HCDR1, HCDR2, and HCDR3 comprises an amino acid sequence of SEQ ID NOS: 17263, 9709, and 9454, respectively and the LCDR1, LCDR2, and LCDR3 comprises an amino acid sequence of SEQ ID NOS: 15717, 3982, and 12095, respectively.

[1598] The disclosure describes an antibody, antigen binding fragment, or polypeptide comprising a heavy chain variable region having a HCDR1, HCDR2, and HCDR3, and a light chain variable region having a LCDR1, LCDR2, and LCDR3, wherein the HCDR1, HCDR2, and HCDR3 comprises an amino acid sequence of SEQ ID NOS: 17270, 10555, and 6706, respectively and the LCDR1, LCDR2, and LCDR3 comprises an amino acid sequence of SEQ ID NOS: 16045, 9503, and 12753, respectively.

[1599] The disclosure describes an antibody, antigen binding fragment, or polypeptide comprising a heavy chain variable region having a HCDR1, HCDR2, and HCDR3, and a light chain variable region having a LCDR1, LCDR2, and LCDR3, wherein the HCDR1, HCDR2, and HCDR3 comprises an amino acid sequence of SEQ ID NOS:11653, 9773, and 17903, respectively and the LCDR1, LCDR2, and LCDR3 comprises an amino acid sequence of SEQ ID NOS:15890, 10731, and 12606, respectively.

[1600] The disclosure describes an antibody, antigen binding fragment, or polypeptide comprising a heavy chain variable region having a HCDR1, HCDR2, and HCDR3, and a light chain variable region having a LCDR1, LCDR2, and LCDR3, wherein the HCDR1, HCDR2, and HCDR3 comprises an amino acid sequence of SEQ ID NOS:10348, 6778, and 11078, respectively and the LCDR1, LCDR2, and LCDR3 comprises an amino acid sequence of SEQ ID NOS: 10825, 9267, and 11326, respectively. having a LCDR1, LCDR2, and LCDR3, wherein the HCDR1, HCDR2, and HCDR3 comprises an amino acid sequence of SEQ ID NOS:17018, 9721, and 9522, respectively and the LCDR1, LCDR2, and LCDR3 comprises an amino acid sequence of SEQ ID NOS: 10830, 9267, and 11337, respectively.

[1601] The disclosure describes an antibody, antigen binding fragment, or polypeptide comprising a heavy chain variable region having a HCDR1, HCDR2, and HCDR3, and a light chain variable region having a LCDR1, LCDR2, and LCDR3, wherein the HCDR1, HCDR2, and HCDR3 comprises an amino acid sequence of SEQ ID NOS:17432, 18531, and 17723, respectively and the LCDR1, LCDR2, and LCDR3 comprises an amino acid sequence of SEQ ID NOS: 16061, 9494, and 12659, respectively.

[1602] The disclosure describes an antibody, antigen binding fragment, or polypeptide comprising a heavy chain variable region having a HCDR1, HCDR2, and HCDR3, and a light chain variable region having a LCDR1, LCDR2, and LCDR3, wherein the HCDR1, HCDR2, and HCDR3 comprises an amino acid sequence of SEQ ID NOS:6186, 11005, and 6712, respectively and the LCDR1, LCDR2, and LCDR3 comprises an amino acid sequence of SEQ ID NOS:16417, 10982, and 11342, respectively.

[1603] The disclosure describes an antibody, antigen binding fragment, or polypeptide comprising a heavy chain variable region having a HCDR1, HCDR2, and HCDR3, and a light chain variable region having a LCDR1, LCDR2, and LCDR3, wherein the HCDR1, HCDR2, and HCDR3 comprises an amino acid sequence of SEQ ID NOS:16990, 9801, and 10206, respectively and the LCDR1, LCDR2, and LCDR3 comprises an amino acid sequence of SEQ ID NOS: 10786, 9267, and 11317, respectively.

[1604] The disclosure describes an antibody, antigen binding fragment, or polypeptide comprising a heavy chain variable region having a HCDR1, HCDR2, and HCDR3, and a light chain variable region having a LCDR1, LCDR2, and LCDR3, wherein the HCDR1, HCDR2, and HCDR3 comprises an amino acid sequence of SEQ ID NOS: 17045, 12040, and 6073, respectively and the LCDR1, LCDR2, and LCDR3 comprises an amino acid sequence of SEQ ID NOS:15734, 10740, and 12028, respectively.

[1605] The disclosure describes an antibody, antigen binding fragment, or polypeptide comprising a heavy chain variable region having a HCDR1, HCDR2, and HCDR3, and a light chain variable region having a LCDR1, LCDR2, and LCDR3, wherein the HCDR1, HCDR2, and HCDR3 comprises an amino acid sequence of SEQ ID NOS:17534, 10571, and 16167, respectively and the LCDR1, LCDR2, and LCDR3 comprises an amino acid sequence of SEQ ID NOS: 15972, 4422, and 10445, respectively.

[1606] The disclosure describes an antibody, antigen binding fragment, or polypeptide comprising a heavy chain variable region having a HCDR1, HCDR2, and HCDR3, and a light chain variable region having a LCDR1, LCDR2, and LCDR3, wherein the HCDR1, HCDR2, and HCDR3 comprises an amino acid sequence of SEQ ID NOS:17263, 9987, and 9615, respectively and the LCDR1, LCDR2, and LCDR3 comprises an amino acid sequence of SEQ ID NOS:16406, 11126, and 11200, respectively.

[1607] The disclosure describes an antibody, antigen binding fragment, or polypeptide comprising a heavy chain variable region having a HCDR1, HCDR2, and HCDR3, and a light chain variable region having a LCDR1, LCDR2, and LCDR3, wherein the HCDR1, HCDR2, and HCDR3 comprises an amino acid sequence of SEQ ID NOS:6531, 9694, and 9560, respectively and the LCDR1, LCDR2, and LCDR3 comprises an amino acid sequence of SEQ ID NOS: 17966, 9278, and 4364, respectively.

[1608] The disclosure describes an antibody, antigen binding fragment, or polypeptide comprising a heavy chain variable region having a HCDR1, HCDR2, and HCDR3, and a light chain variable region having a LCDR1, LCDR2, and LCDR3, wherein the HCDR1, HCDR2, and HCDR3 comprises an amino acid sequence of SEQ ID NOS:6508, 9956, and 4175, respectively and the LCDR1, LCDR2, and LCDR3 comprises an amino acid sequence of SEQ ID NOS: 15610, 9503, and 12766, respectively.

[1609] The disclosure describes an antibody, antigen binding fragment, or polypeptide comprising a heavy chain variable region having a HCDR1, HCDR2, and HCDR3, and a light chain variable region having a LCDR1, LCDR2, and LCDR3, wherein the HCDR1, HCDR2, and HCDR3 comprises an amino acid sequence of SEQ ID NOS: 11609, 10401, and 6718, respectively and the LCDR1, LCDR2, and LCDR3 comprises an amino acid sequence of SEQ ID NOS:15712, 3987, and 12332, respectively.

[1610] The disclosure describes an antibody, antigen binding fragment, or polypeptide comprising a heavy chain variable region having a HCDR1, HCDR2, and HCDR3, and a light chain variable region having a LCDR1, LCDR2, and LCDR3, wherein the HCDR1, HCDR2, and HCDR3 comprises an amino acid sequence of SEQ ID NOS:11622, 9927, and 16583, respectively and the LCDR1, LCDR2, and LCDR3 comprises an amino acid sequence of SEQ ID NOS: 10829, 9272, and 11303, respectively.

[1611] The disclosure describes an antibody, antigen binding fragment, or polypeptide comprising a heavy chain variable region having a HCDR1, HCDR2, and HCDR3, and a light chain variable region having a LCDR1, LCDR2, and LCDR3, wherein the HCDR1, HCDR2, and HCDR3 comprises an amino acid sequence of SEQ ID NOS: 17856, 18585, and 9848, respectively and the LCDR1, LCDR2, and LCDR3 comprises an amino acid sequence of SEQ ID NOS:10890, 18275, and 12996, respectively.

[1612] The disclosure describes an antibody, antigen binding fragment, or polypeptide comprising a heavy chain variable region having a HCDR1, HCDR2, and HCDR3, and a light chain variable region having a LCDR1, LCDR2, and LCDR3, wherein the HCDR1, HCDR2, and HCDR3 comprises an amino acid sequence of SEQ ID NOS:11689, 18592, and 16604, respectively and the LCDR1, LCDR2, and LCDR3 comprises an amino acid sequence of SEQ ID NOS: 16772, 16331, and 4009, respectively.

[1613] The disclosure describes an antibody, antigen binding fragment, or polypeptide comprising a heavy chain variable region having a HCDR1, HCDR2, and HCDR3, and a light chain variable region having a LCDR1, LCDR2, and LCDR3, wherein the HCDR1, HCDR2, and HCDR3 comprises an amino acid sequence of SEQ ID NOS: 18637, 18376, and 6492, respectively and the LCDR1, LCDR2, and LCDR3 comprises an amino acid sequence of SEQ ID NOS:15747, 11144, and 12453, respectively.

[1614] The disclosure describes an antibody, antigen binding fragment, or polypeptide comprising a heavy chain variable region having a HCDR1, HCDR2, and HCDR3, and a light chain variable region having a LCDR1, LCDR2, and LCDR3, wherein the HCDR1, HCDR2, and HCDR3 comprises an amino acid sequence of SEQ ID NOS: 10368, 6677, and 9569, respectively and the LCDR1, LCDR2, and LCDR3 comprises an amino acid sequence of SEQ ID NOS: 16734, 5977, and 10283, respectively.

[1615] The disclosure describes an antibody, antigen binding fragment, or polypeptide comprising a heavy chain variable region having a HCDR1, HCDR2, and HCDR3, and a light chain variable region having a LCDR1, LCDR2, and LCDR3, wherein the HCDR1, HCDR2, and HCDR3 comprises an amino acid sequence of SEQ ID NOS:6188, 9256, and 12407, respectively and the LCDR1, LCDR2, and LCDR3 comprises an amino acid sequence of SEQ ID NOS:10892, 18275, and 12938, respectively.

[1616] The disclosure describes an antibody, antigen binding fragment, or polypeptide comprising a heavy chain variable region having a HCDR1, HCDR2, and HCDR3, and a light chain variable region having a LCDR1, LCDR2, and LCDR3, wherein the HCDR1, HCDR2, and HCDR3 comprises an amino acid sequence of SEQ ID NOS:17990, 16893, and 17049, respectively and the LCDR1, LCDR2, and LCDR3 comprises an amino acid sequence of SEQ ID NOS: 16069, 9503, and 12772, respectively.

[1617] The disclosure describes an antibody, antigen binding fragment, or polypeptide comprising a heavy chain variable region having a HCDR1, HCDR2, and HCDR3, and a light chain variable region having a LCDR1, LCDR2, and LCDR3, wherein the HCDR1, HCDR2, and HCDR3 comprises an amino acid sequence of SEQ ID NOS:11623, 9941, and 11550, respectively and the LCDR1, LCDR2, and LCDR3 comprises an amino acid sequence of SEQ ID NOS: 15691, 4282, and 11096, respectively.

[1618] The disclosure describes an antibody, antigen binding fragment, or polypeptide comprising a heavy chain variable region having a HCDR1, HCDR2, and HCDR3, and a light chain variable region having a LCDR1, LCDR2, and LCDR3, wherein the HCDR1, HCDR2, and HCDR3 comprises an amino acid sequence of SEQ ID NOS:6512, 9419, and 11716, respectively and the LCDR1, LCDR2, and LCDR3 comprises an amino acid sequence of SEQ ID NOS: 17932, 6307, and 16978, respectively.

[1619] The disclosure describes an antibody, antigen binding fragment, or polypeptide comprising a heavy chain variable region having a HCDR1, HCDR2, and HCDR3, and a light chain variable region having a LCDR1, LCDR2, and LCDR3, wherein the HCDR1, HCDR2, and HCDR3 comprises an amino acid sequence of SEQ ID NOS: 10367, 18323, and 9457, respectively and the LCDR1, LCDR2, and LCDR3 comprises an amino acid sequence of SEQ ID NOS: 15704, 3982, and 12098, respectively. having a LCDR1, LCDR2, and LCDR3, wherein the HCDR1, HCDR2, and HCDR3 comprises an amino acid sequence of SEQ ID NOS: 10365, 18294, and 6542, respectively and the LCDR1, LCDR2, and LCDR3 comprises an amino acid sequence of SEQ ID NOS: 18094, 17718, and 9443, respectively.

[1620] The disclosure describes an antibody, antigen binding fragment, or polypeptide comprising a heavy chain variable region having a HCDR1, HCDR2, and HCDR3, and a light chain variable region having a LCDR1, LCDR2, and LCDR3, wherein the HCDR1, HCDR2, and HCDR3 comprises an amino acid sequence of SEQ ID NOS:17262, 9900, and 16589, respectively and the LCDR1, LCDR2, and LCDR3 comprises an amino acid sequence of SEQ ID NOS: 10829, 9267, and 11232, respectively.

[1621] The disclosure describes an antibody, antigen binding fragment, or polypeptide comprising a heavy chain variable region having a HCDR1, HCDR2, and HCDR3, and a light chain variable region having a LCDR1, LCDR2, and LCDR3, wherein the HCDR1, HCDR2, and HCDR3 comprises an amino acid sequence of SEQ ID NOS:16816, 10568, and 16155, respectively and the LCDR1, LCDR2, and LCDR3 comprises an amino acid sequence of SEQ ID NOS: 15724, 4425, and 11102, respectively.

[1622] The disclosure describes an antibody, antigen binding fragment, or polypeptide comprising a heavy chain variable region having a HCDR1, HCDR2, and HCDR3, and a light chain variable region having a LCDR1, LCDR2, and LCDR3, wherein the HCDR1, HCDR2, and HCDR3 comprises an amino acid sequence of SEQ ID NOS:17018, 9720, and 9521, respectively and the LCDR1, LCDR2, and LCDR3 comprises an amino acid sequence of SEQ ID NOS: 10830, 9267, and 11337, respectively.

[1623] The disclosure describes an antibody, antigen binding fragment, or polypeptide comprising a heavy chain variable region having a HCDR1, HCDR2, and HCDR3, and a light chain variable region having a LCDR1, LCDR2, and LCDR3, wherein the HCDR1, HCDR2, and HCDR3 comprises an amino acid sequence of SEQ ID NOS:17987, 9998, and 7861, respectively and the LCDR1, LCDR2, and LCDR3 comprises an amino acid sequence of SEQ ID NOS: 10828, 9267, and 11340, respectively.

[1624] The disclosure describes an antibody, antigen binding fragment, or polypeptide comprising a heavy chain variable region having a HCDR1, HCDR2, and HCDR3, and a light chain variable region having a LCDR1, LCDR2, and LCDR3, wherein the HCDR1, HCDR2, and HCDR3 comprises an amino acid sequence of SEQ ID NOS:6186, 11004, and 6711, respectively and the LCDR1, LCDR2, and LCDR3 comprises an amino acid sequence of SEQ ID NOS:16455, 10990, and 11342, respectively.

[1625] The disclosure describes an antibody, antigen binding fragment, or polypeptide comprising a heavy chain variable region having a HCDR1, HCDR2, and HCDR3, and a light chain variable region having a LCDR1, LCDR2, and LCDR3, wherein the HCDR1, HCDR2, and HCDR3 comprises an amino acid sequence of SEQ ID NOS:10355, 18540, and 17703, respectively and the LCDR1, LCDR2, and LCDR3 comprises an amino acid sequence of SEQ ID NOS: 15980, 9503, and 12775, respectively.

[1626] The disclosure describes an antibody, antigen binding fragment, or polypeptide comprising a heavy chain variable region having a HCDR1, HCDR2, and HCDR3, and a light chain variable region having a LCDR1, LCDR2, and LCDR3, wherein the HCDR1, HCDR2, and HCDR3 comprises an amino acid sequence of SEQ ID NOS:17466, 18541, and 17704, respectively and the LCDR1, LCDR2, and LCDR3 comprises an amino acid sequence of SEQ ID NOS:18270, 9503, and 12775, respectively.

[1627] The disclosure describes an antibody, antigen binding fragment, or polypeptide comprising a heavy chain variable region having a HCDR1, HCDR2, and HCDR3, and a light chain variable region having a LCDR1, LCDR2, and LCDR3, wherein the HCDR1, HCDR2, and HCDR3 comprises an amino acid sequence of SEQ ID NOS:16610, 9931, and 4204, respectively and the LCDR1, LCDR2, and LCDR3 comprises an amino acid sequence of SEQ ID NOS: 16045, 9503, and 12780, respectively.

[1628] The disclosure describes an antibody, antigen binding fragment, or polypeptide comprising a heavy chain variable region having a HCDR1, HCDR2, and HCDR3, and a light chain variable region having a LCDR1, LCDR2, and LCDR3, wherein the HCDR1, HCDR2, and HCDR3 comprises an amino acid sequence of SEQ ID NOS:7806, 10036, and 10031, respectively and the LCDR1, LCDR2, and LCDR3 comprises an amino acid sequence of SEQ ID NOS:10834, 10990, and 11251, respectively.

[1629] The disclosure describes an antibody, antigen binding fragment, or polypeptide comprising a heavy chain variable region having a HCDR1, HCDR2, and HCDR3, and a light chain variable region having a LCDR1, LCDR2, and LCDR3, wherein the HCDR1, HCDR2, and HCDR3 comprises an amino acid sequence of SEQ ID NOS:16681, 18572, and 5941, respectively and the LCDR1, LCDR2, and LCDR3 comprises an amino acid sequence of SEQ ID NOS: 15844, 3969, and 12530, respectively.

[1630] The disclosure describes an antibody, antigen binding fragment, or polypeptide comprising a heavy chain variable region having a HCDR1, HCDR2, and HCDR3, and a light chain variable region having a LCDR1, LCDR2, and LCDR3, wherein the HCDR1, HCDR2, and HCDR3 comprises an amino acid sequence of SEQ ID NOS: 17263, 9806, and 4269, respectively and the LCDR1, LCDR2, and LCDR3 comprises an amino acid sequence of SEQ ID NOS:16372, 10925, and 11218, respectively.

[1631] The disclosure describes an antibody, antigen binding fragment, or polypeptide comprising a heavy chain variable region having a HCDR1, HCDR2, and HCDR3, and a light chain variable region having a LCDR1, LCDR2, and LCDR3, wherein the HCDR1, HCDR2, and HCDR3 comprises an amino acid sequence of SEQ ID NOS:17263, 9701, and 4216, respectively and the LCDR1, LCDR2, and LCDR3 comprises an amino acid sequence of SEQ ID NOS: 16089, 9480, and 12653, respectively.

[1632] The disclosure describes an antibody, antigen binding fragment, or polypeptide comprising a heavy chain variable region having a HCDR1, HCDR2, and HCDR3, and a light chain variable region having a LCDR1, LCDR2, and LCDR3, wherein the HCDR1, HCDR2, and HCDR3 comprises an amino acid sequence of SEQ ID NOS: 17477, 16834, and 6174, respectively and the LCDR1, LCDR2, and LCDR3 comprises an amino acid sequence of SEQ ID NOS: 15940, 9503, and 12775, respectively.

[1633] The disclosure describes an antibody, antigen binding fragment, or polypeptide comprising a heavy chain variable region having a HCDR1, HCDR2, and HCDR3, and a light chain variable region having a LCDR1, LCDR2, and LCDR3, wherein the HCDR1, HCDR2, and HCDR3 comprises an amino acid sequence of SEQ ID NOS:6507, 9955, and 16966, respectively and the LCDR1, LCDR2, and LCDR3 comprises an amino acid sequence of SEQ ID NOS:15622, 10224, and 12766, respectively.

[1634] The disclosure describes an antibody, antigen binding fragment, or polypeptide comprising a heavy chain variable region having a HCDR1, HCDR2, and HCDR3, and a light chain variable region having a LCDR1, LCDR2, and LCDR3, wherein the HCDR1, HCDR2, and HCDR3 comprises an amino acid sequence of SEQ ID NOS: 11642, 12048, and 9646, respectively and the LCDR1, LCDR2, and LCDR3 comprises an amino acid sequence of SEQ ID NOS: 15830, 4425, and 12444, respectively.

[1635] The disclosure describes an antibody, antigen binding fragment, or polypeptide comprising a heavy chain variable region having a HCDR1, HCDR2, and HCDR3, and a light chain variable region having a LCDR1, LCDR2, and LCDR3, wherein the HCDR1, HCDR2, and HCDR3 comprises an amino acid sequence of SEQ ID NOS: 17263, 9731, and 9526, respectively and the LCDR1, LCDR2, and LCDR3 comprises an amino acid sequence of SEQ ID NOS: 16061, 9494, and 12639, respectively.

[1636] The disclosure describes an antibody, antigen binding fragment, or polypeptide comprising a heavy chain variable region having a HCDR1, HCDR2, and HCDR3, and a light chain variable region having a LCDR1, LCDR2, and LCDR3, wherein the HCDR1, HCDR2, and HCDR3 comprises an amino acid sequence of SEQ ID NOS: 11651, 18004, and 5934, respectively and the LCDR1, LCDR2, and LCDR3 comprises an amino acid sequence of SEQ ID NOS: 15975, 4417, and 10711, respectively.

[1637] The disclosure describes an antibody, antigen binding fragment, or polypeptide comprising a heavy chain variable region having a HCDR1, HCDR2, and HCDR3, and a light chain variable region having a LCDR1, LCDR2, and LCDR3, wherein the HCDR1, HCDR2, and HCDR3 comprises an amino acid sequence of SEQ ID NOS:11623, 9708, and 10204, respectively and the LCDR1, LCDR2, and LCDR3 comprises an amino acid sequence of SEQ ID NOS: 16028, 9494, and 12627, respectively.

[1638] The disclosure describes an antibody, antigen binding fragment, or polypeptide comprising a heavy chain variable region having a HCDR1, HCDR2, and HCDR3, and a light chain variable region having a LCDR1, LCDR2, and LCDR3, wherein the HCDR1, HCDR2, and HCDR3 comprises an amino acid sequence of SEQ ID NOS:16573, 9842, and 10970, respectively and the LCDR1, LCDR2, and LCDR3 comprises an amino acid sequence of SEQ ID NOS:9486, 4415, and 12635, respectively. having a LCDR1, LCDR2, and LCDR3, wherein the HCDR1, HCDR2, and HCDR3 comprises an amino acid sequence of SEQ ID NOS:11578, 18534, and 17705, respectively and the LCDR1, LCDR2, and LCDR3 comprises an amino acid sequence of SEQ ID NOS: 15879, 9503, and 12775, respectively.

[1639] The disclosure describes an antibody, antigen binding fragment, or polypeptide comprising a heavy chain variable region having a HCDR1, HCDR2, and HCDR3, and a light chain variable region having a LCDR1, LCDR2, and LCDR3, wherein the HCDR1, HCDR2, and HCDR3 comprises an amino acid sequence of SEQ ID NOS:16816, 11519, and 16476, respectively and the LCDR1, LCDR2, and LCDR3 comprises an amino acid sequence of SEQ ID NOS:16032, 6608, and 12421, respectively.

[1640] The disclosure describes an antibody, antigen binding fragment, or polypeptide comprising a heavy chain variable region having a HCDR1, HCDR2, and HCDR3, and a light chain variable region having a LCDR1, LCDR2, and LCDR3, wherein the HCDR1, HCDR2, and HCDR3 comprises an amino acid sequence of SEQ ID NOS:17620, 17773, and 16607, respectively and the LCDR1, LCDR2, and LCDR3 comprises an amino acid sequence of SEQ ID NOS: 17871, 6624, and 13564, respectively.

[1641] The disclosure describes an antibody, antigen binding fragment, or polypeptide comprising a heavy chain variable region having a HCDR1, HCDR2, and HCDR3, and a light chain variable region having a LCDR1, LCDR2, and LCDR3, wherein the HCDR1, HCDR2, and HCDR3 comprises an amino acid sequence of SEQ ID NOS:6506, 4660, and 11568, respectively and the LCDR1, LCDR2, and LCDR3 comprises an amino acid sequence of SEQ ID NOS: 15720, 9498, and 12101, respectively.

[1642] The disclosure describes an antibody, antigen binding fragment, or polypeptide comprising a heavy chain variable region having a HCDR1, HCDR2, and HCDR3, and a light chain variable region having a LCDR1, LCDR2, and LCDR3, wherein the HCDR1, HCDR2, and HCDR3 comprises an amino acid sequence of SEQ ID NOS:10689, 18549, and 10260, respectively and the LCDR1, LCDR2, and LCDR3 comprises an amino acid sequence of SEQ ID NOS: 15854, 9503, and 12769, respectively.

[1643] The disclosure describes an antibody, antigen binding fragment, or polypeptide comprising a heavy chain variable region having a HCDR1, HCDR2, and HCDR3, and a light chain variable region having a LCDR1, LCDR2, and LCDR3, wherein the HCDR1, HCDR2, and HCDR3 comprises an amino acid sequence of SEQ ID NOS:17642, 11522, and 16469, respectively and the LCDR1, LCDR2, and LCDR3 comprises an amino acid sequence of SEQ ID NOS: 16033, 4425, and 12445, respectively.

[1644] The disclosure describes an antibody, antigen binding fragment, or polypeptide comprising a heavy chain variable region having a HCDR1, HCDR2, and HCDR3, and a light chain variable region having a LCDR1, LCDR2, and LCDR3, wherein the HCDR1, HCDR2, and HCDR3 comprises an amino acid sequence of SEQ ID NOS: 11625, 10011, and 4024, respectively and the LCDR1, LCDR2, and LCDR3 comprises an amino acid sequence of SEQ ID NOS: 15691, 3969, and 11094, respectively.

[1645] The disclosure describes an antibody, antigen binding fragment, or polypeptide comprising a heavy chain variable region having a HCDR1, HCDR2, and HCDR3, and a light chain variable region having a LCDR1, LCDR2, and LCDR3, wherein the HCDR1, HCDR2, and HCDR3 comprises an amino acid sequence of SEQ ID NOS:17466, 16919, and 10245, respectively and the LCDR1, LCDR2, and LCDR3 comprises an amino acid sequence of SEQ ID NOS:18077, 18596, and 11185, respectively.

[1646] The disclosure describes an antibody, antigen binding fragment, or polypeptide comprising a heavy chain variable region having a HCDR1, HCDR2, and HCDR3, and a light chain variable region having a LCDR1, LCDR2, and LCDR3, wherein the HCDR1, HCDR2, and HCDR3 comprises an amino acid sequence of SEQ ID NOS:10681, 16859, and 16548, respectively and the LCDR1, LCDR2, and LCDR3 comprises an amino acid sequence of SEQ ID NOS:15689, 3969, and 11099, respectively.

[1647] The disclosure describes an antibody, antigen binding fragment, or polypeptide comprising a heavy chain variable region having a HCDR1, HCDR2, and HCDR3, and a light chain variable region having a LCDR1, LCDR2, and LCDR3, wherein the HCDR1, HCDR2, and HCDR3 comprises an amino acid sequence of SEQ ID NOS:17630, 9402, and 6115, respectively and the LCDR1, LCDR2, and LCDR3 comprises an amino acid sequence of SEQ ID NOS:11703, 6333, and 4387, respectively.

[1648] The disclosure describes an antibody, antigen binding fragment, or polypeptide comprising a heavy chain variable region having a HCDR1, HCDR2, and HCDR3, and a light chain variable region having a LCDR1, LCDR2, and LCDR3, wherein the HCDR1, HCDR2, and HCDR3 comprises an amino acid sequence of SEQ ID NOS:17615, 4280, and 5943, respectively and the LCDR1, LCDR2, and LCDR3 comprises an amino acid sequence of SEQ ID NOS: 16045, 9503, and 12775, respectively.

[1649] The disclosure describes an antibody, antigen binding fragment, or polypeptide comprising a heavy chain variable region having a HCDR1, HCDR2, and HCDR3, and a light chain variable region having a LCDR1, LCDR2, and LCDR3, wherein the HCDR1, HCDR2, and HCDR3 comprises an amino acid sequence of SEQ ID NOS:16618, 9751, and 11376, respectively and the LCDR1, LCDR2, and LCDR3 comprises an amino acid sequence of SEQ ID NOS: 16049, 9494, and 12687, respectively.

[1650] The disclosure describes an antibody, antigen binding fragment, or polypeptide comprising a heavy chain variable region having a HCDR1, HCDR2, and HCDR3, and a light chain variable region having a LCDR1, LCDR2, and LCDR3, wherein the HCDR1, HCDR2, and HCDR3 comprises an amino acid sequence of SEQ ID NOS:17263, 9776, and 10106, respectively and the LCDR1, LCDR2, and LCDR3 comprises an amino acid sequence of SEQ ID NOS: 16061, 9494, and 12660, respectively.

[1651] The disclosure describes an antibody, antigen binding fragment, or polypeptide comprising a heavy chain variable region having a HCDR1, HCDR2, and HCDR3, and a light chain variable region having a LCDR1, LCDR2, and LCDR3, wherein the HCDR1, HCDR2, and HCDR3 comprises an amino acid sequence of SEQ ID NOS:17141, 16954, and 16704, respectively and the LCDR1, LCDR2, and LCDR3 comprises an amino acid sequence of SEQ ID NOS: 16045, 9503, and 12776, respectively.

[1652] The disclosure describes an antibody, antigen binding fragment, or polypeptide comprising a heavy chain variable region having a HCDR1, HCDR2, and HCDR3, and a light chain variable region having a LCDR1, LCDR2, and LCDR3, wherein the HCDR1, HCDR2, and HCDR3 comprises an amino acid sequence of SEQ ID NOS:4305, 9712, and 3943, respectively and the LCDR1, LCDR2, and LCDR3 comprises an amino acid sequence of SEQ ID NOS: 17959, 9275, and 17162, respectively.

[1653] The disclosure describes an antibody, antigen binding fragment, or polypeptide comprising a heavy chain variable region having a HCDR1, HCDR2, and HCDR3, and a light chain variable region having a LCDR1, LCDR2, and LCDR3, wherein the HCDR1, HCDR2, and HCDR3 comprises an amino acid sequence of SEQ ID NOS: 16549, 18572, and 5940, respectively and the LCDR1, LCDR2, and LCDR3 comprises an amino acid sequence of SEQ ID NOS: 15844, 3969, and 12518, respectively.

[1654] The disclosure describes an antibody, antigen binding fragment, or polypeptide comprising a heavy chain variable region having a HCDR1, HCDR2, and HCDR3, and a light chain variable region having a LCDR1, LCDR2, and LCDR3, wherein the HCDR1, HCDR2, and HCDR3 comprises an amino acid sequence of SEQ ID NOS: 17637, 17778, and 4489, respectively and the LCDR1, LCDR2, and LCDR3 comprises an amino acid sequence of SEQ ID NOS: 17947, 9275, and 4345, respectively.

[1655] The disclosure describes an antibody, antigen binding fragment, or polypeptide comprising a heavy chain variable region having a HCDR1, HCDR2, and HCDR3, and a light chain variable region having a LCDR1, LCDR2, and LCDR3, wherein the HCDR1, HCDR2, and HCDR3 comprises an amino acid sequence of SEQ ID NOS: 17837, 11470, and 7884, respectively and the LCDR1, LCDR2, and LCDR3 comprises an amino acid sequence of SEQ ID NOS:15913, 10728, and 12742, respectively.

[1656] The disclosure describes an antibody, antigen binding fragment, or polypeptide comprising a heavy chain variable region having a HCDR1, HCDR2, and HCDR3, and a light chain variable region having a LCDR1, LCDR2, and LCDR3, wherein the HCDR1, HCDR2, and HCDR3 comprises an amino acid sequence of SEQ ID NOS:17263, 9727, and 17116, respectively and the LCDR1, LCDR2, and LCDR3 comprises an amino acid sequence of SEQ ID NOS: 10830, 9269, and 11311, respectively.

[1657] The disclosure describes an antibody, antigen binding fragment, or polypeptide comprising a heavy chain variable region having a HCDR1, HCDR2, and HCDR3, and a light chain variable region having a LCDR1, LCDR2, and LCDR3, wherein the HCDR1, HCDR2, and HCDR3 comprises an amino acid sequence of SEQ ID NOS: 17466, 18494, and 5923, respectively and the LCDR1, LCDR2, and LCDR3 comprises an amino acid sequence of SEQ ID NOS: 16045, 9503, and 12775, respectively. having a LCDR1, LCDR2, and LCDR3, wherein the HCDR1, HCDR2, and HCDR3 comprises an amino acid sequence of SEQ ID NOS:10077, 17797, and 16188, respectively and the LCDR1, LCDR2, and LCDR3 comprises an amino acid sequence of SEQ ID NOS:17973, 9271, and 17574, respectively.

[1658] The disclosure describes an antibody, antigen binding fragment, or polypeptide comprising a heavy chain variable region having a HCDR1, HCDR2, and HCDR3, and a light chain variable region having a LCDR1, LCDR2, and LCDR3, wherein the HCDR1, HCDR2, and HCDR3 comprises an amino acid sequence of SEQ ID NOS:16608, 9748, and 10380, respectively and the LCDR1, LCDR2, and LCDR3 comprises an amino acid sequence of SEQ ID NOS: 10902, 9267, and 11324, respectively.

[1659] The disclosure describes an antibody, antigen binding fragment, or polypeptide comprising a heavy chain variable region having a HCDR1, HCDR2, and HCDR3, and a light chain variable region having a LCDR1, LCDR2, and LCDR3, wherein the HCDR1, HCDR2, and HCDR3 comprises an amino acid sequence of SEQ ID NOS:17030, 16949, and 10265, respectively and the LCDR1, LCDR2, and LCDR3 comprises an amino acid sequence of SEQ ID NOS:16659, 11895, and 11882, respectively.

[1660] The disclosure describes an antibody, antigen binding fragment, or polypeptide comprising a heavy chain variable region having a HCDR1, HCDR2, and HCDR3, and a light chain variable region having a LCDR1, LCDR2, and LCDR3, wherein the HCDR1, HCDR2, and HCDR3 comprises an amino acid sequence of SEQ ID NOS:16537, 16903, and 10157, respectively and the LCDR1, LCDR2, and LCDR3 comprises an amino acid sequence of SEQ ID NOS: 16069, 9472, and 12772, respectively.

[1661] The disclosure describes an antibody, antigen binding fragment, or polypeptide comprising a heavy chain variable region having a HCDR1, HCDR2, and HCDR3, and a light chain variable region having a LCDR1, LCDR2, and LCDR3, wherein the HCDR1, HCDR2, and HCDR3 comprises an amino acid sequence of SEQ ID NOS:16779, 16307, and 16179, respectively and the LCDR1, LCDR2, and LCDR3 comprises an amino acid sequence of SEQ ID NOS:15721, 3958, and 12361, respectively.

[1662] The disclosure describes an antibody, antigen binding fragment, or polypeptide comprising a heavy chain variable region having a HCDR1, HCDR2, and HCDR3, and a light chain variable region having a LCDR1, LCDR2, and LCDR3, wherein the HCDR1, HCDR2, and HCDR3 comprises an amino acid sequence of SEQ ID NOS: 17855, 16302, and 7924, respectively and the LCDR1, LCDR2, and LCDR3 comprises an amino acid sequence of SEQ ID NOS: 15872, 3985, and 12549, respectively.

[1663] The disclosure describes an antibody, antigen binding fragment, or polypeptide comprising a heavy chain variable region having a HCDR1, HCDR2, and HCDR3, and a light chain variable region having a LCDR1, LCDR2, and LCDR3, wherein the HCDR1, HCDR2, and HCDR3 comprises an amino acid sequence of SEQ ID NOS:17842, 16846, and 18226, respectively and the LCDR1, LCDR2, and LCDR3 comprises an amino acid sequence of SEQ ID NOS: 15860, 4425, and 12369, respectively.

[1664] The disclosure describes an antibody, antigen binding fragment, or polypeptide comprising a heavy chain variable region having a HCDR1, HCDR2, and HCDR3, and a light chain variable region having a LCDR1, LCDR2, and LCDR3, wherein the HCDR1, HCDR2, and HCDR3 comprises an amino acid sequence of SEQ ID NOS:16152, 16979, and 18438, respectively and the LCDR1, LCDR2, and LCDR3 comprises an amino acid sequence of SEQ ID NOS: 15788, 4425, and 12403, respectively.

[1665] The disclosure describes an antibody, antigen binding fragment, or polypeptide comprising a heavy chain variable region having a HCDR1, HCDR2, and HCDR3, and a light chain variable region having a LCDR1, LCDR2, and LCDR3, wherein the HCDR1, HCDR2, and HCDR3 comprises an amino acid sequence of SEQ ID NOS:17479, 17758, and 18214, respectively and the LCDR1, LCDR2, and LCDR3 comprises an amino acid sequence of SEQ ID NOS:17956, 6460, and 17189, respectively.

[1666] The disclosure describes an antibody, antigen binding fragment, or polypeptide comprising a heavy chain variable region having a HCDR1, HCDR2, and HCDR3, and a light chain variable region having a LCDR1, LCDR2, and LCDR3, wherein the HCDR1, HCDR2, and HCDR3 comprises an amino acid sequence of SEQ ID NOS:6507, 9971, and 4063, respectively and the LCDR1, LCDR2, and LCDR3 comprises an amino acid sequence of SEQ ID NOS:15620, 4436, and 12791, respectively.

[1667] The disclosure describes an antibody, antigen binding fragment, or polypeptide comprising a heavy chain variable region having a HCDR1, HCDR2, and HCDR3, and a light chain variable region having a LCDR1, LCDR2, and LCDR3, wherein the HCDR1, HCDR2, and HCDR3 comprises an amino acid sequence of SEQ ID NOS:17634, 18548, and 17702, respectively and the LCDR1, LCDR2, and LCDR3 comprises an amino acid sequence of SEQ ID NOS: 15624, 9503, and 12775, respectively.

[1668] The disclosure describes an antibody, antigen binding fragment, or polypeptide comprising a heavy chain variable region having a HCDR1, HCDR2, and HCDR3, and a light chain variable region having a LCDR1, LCDR2, and LCDR3, wherein the HCDR1, HCDR2, and HCDR3 comprises an amino acid sequence of SEQ ID NOS:17457, 9847, and 10583, respectively and the LCDR1, LCDR2, and LCDR3 comprises an amino acid sequence of SEQ ID NOS: 16052, 9493, and 12671, respectively.

[1669] The disclosure describes an antibody, antigen binding fragment, or polypeptide comprising a heavy chain variable region having a HCDR1, HCDR2, and HCDR3, and a light chain variable region having a LCDR1, LCDR2, and LCDR3, wherein the HCDR1, HCDR2, and HCDR3 comprises an amino acid sequence of SEQ ID NOS: 17842, 11488, and 6143, respectively and the LCDR1, LCDR2, and LCDR3 comprises an amino acid sequence of SEQ ID NOS: 16045, 9503, and 12775, respectively.

[1670] The disclosure describes an antibody, antigen binding fragment, or polypeptide comprising a heavy chain variable region having a HCDR1, HCDR2, and HCDR3, and a light chain variable region having a LCDR1, LCDR2, and LCDR3, wherein the HCDR1, HCDR2, and HCDR3 comprises an amino acid sequence of SEQ ID NOS:17263, 9831, and 10189, respectively and the LCDR1, LCDR2, and LCDR3 comprises an amino acid sequence of SEQ ID NOS:11596, 10928, and 11231, respectively.

[1671] The disclosure describes an antibody, antigen binding fragment, or polypeptide comprising a heavy chain variable region having a HCDR1, HCDR2, and HCDR3, and a light chain variable region having a LCDR1, LCDR2, and LCDR3, wherein the HCDR1, HCDR2, and HCDR3 comprises an amino acid sequence of SEQ ID NOS: 17263, 9837, and 4229, respectively and the LCDR1, LCDR2, and LCDR3 comprises an amino acid sequence of SEQ ID NOS: 10851, 9267, and 11340, respectively.

[1672] The disclosure describes an antibody, antigen binding fragment, or polypeptide comprising a heavy chain variable region having a HCDR1, HCDR2, and HCDR3, and a light chain variable region having a LCDR1, LCDR2, and LCDR3, wherein the HCDR1, HCDR2, and HCDR3 comprises an amino acid sequence of SEQ ID NOS: 10365, 18429, and 6543, respectively and the LCDR1, LCDR2, and LCDR3 comprises an amino acid sequence of SEQ ID NOS: 18093, 17721, and 9450, respectively.

[1673] The disclosure describes an antibody, antigen binding fragment, or polypeptide comprising a heavy chain variable region having a HCDR1, HCDR2, and HCDR3, and a light chain variable region having a LCDR1, LCDR2, and LCDR3, wherein the HCDR1, HCDR2, and HCDR3 comprises an amino acid sequence of SEQ ID NOS: 17443, 17768, and 6452, respectively and the LCDR1, LCDR2, and LCDR3 comprises an amino acid sequence of SEQ ID NOS:15945, 10720, and 12356, respectively.

[1674] The disclosure describes an antibody, antigen binding fragment, or polypeptide comprising a heavy chain variable region having a HCDR1, HCDR2, and HCDR3, and a light chain variable region having a LCDR1, LCDR2, and LCDR3, wherein the HCDR1, HCDR2, and HCDR3 comprises an amino acid sequence of SEQ ID NOS: 17441, 18352, and 4055, respectively and the LCDR1, LCDR2, and LCDR3 comprises an amino acid sequence of SEQ ID NOS:16659, 11900, and 11877, respectively.

[1675] The disclosure describes an antibody, antigen binding fragment, or polypeptide comprising a heavy chain variable region having a HCDR1, HCDR2, and HCDR3, and a light chain variable region having a LCDR1, LCDR2, and LCDR3, wherein the HCDR1, HCDR2, and HCDR3 comprises an amino acid sequence of SEQ ID NOS:17263, 4661, and 16679, respectively and the LCDR1, LCDR2, and LCDR3 comprises an amino acid sequence of SEQ ID NOS: 16045, 3983, and 12815, respectively.

[1676] The disclosure describes an antibody, antigen binding fragment, or polypeptide comprising a heavy chain variable region having a HCDR1, HCDR2, and HCDR3, and a light chain variable region having a LCDR1, LCDR2, and LCDR3, wherein the HCDR1, HCDR2, and HCDR3 comprises an amino acid sequence of SEQ ID NOS:17432, 18563, and 17861, respectively and the LCDR1, LCDR2, and LCDR3 comprises an amino acid sequence of SEQ ID NOS:16668, 11904, and 11872, respectively. having a LCDR1, LCDR2, and LCDR3, wherein the HCDR1, HCDR2, and HCDR3 comprises an amino acid sequence of SEQ ID NOS: 17449, 9780, and 4209, respectively and the LCDR1, LCDR2, and LCDR3 comprises an amino acid sequence of SEQ ID NOS:15866, 10727, and 12602, respectively.

[1677] The disclosure describes an antibody, antigen binding fragment, or polypeptide comprising a heavy chain variable region having a HCDR1, HCDR2, and HCDR3, and a light chain variable region having a LCDR1, LCDR2, and LCDR3, wherein the HCDR1, HCDR2, and HCDR3 comprises an amino acid sequence of SEQ ID NOS: 18637, 18369, and 6495, respectively and the LCDR1, LCDR2, and LCDR3 comprises an amino acid sequence of SEQ ID NOS:15751, 11144, and 12453, respectively.

[1678] The disclosure describes an antibody, antigen binding fragment, or polypeptide comprising a heavy chain variable region having a HCDR1, HCDR2, and HCDR3, and a light chain variable region having a LCDR1, LCDR2, and LCDR3, wherein the HCDR1, HCDR2, and HCDR3 comprises an amino acid sequence of SEQ ID NOS: 10935, 10085, and 4028, respectively and the LCDR1, LCDR2, and LCDR3 comprises an amino acid sequence of SEQ ID NOS: 16045, 9503, and 12748, respectively.

[1679] The disclosure describes an antibody, antigen binding fragment, or polypeptide comprising a heavy chain variable region having a HCDR1, HCDR2, and HCDR3, and a light chain variable region having a LCDR1, LCDR2, and LCDR3, wherein the HCDR1, HCDR2, and HCDR3 comprises an amino acid sequence of SEQ ID NOS:6530, 9916, and 6026, respectively and the LCDR1, LCDR2, and LCDR3 comprises an amino acid sequence of SEQ ID NOS: 15704, 3969, and 12827, respectively.

[1680] The disclosure describes an antibody, antigen binding fragment, or polypeptide comprising a heavy chain variable region having a HCDR1, HCDR2, and HCDR3, and a light chain variable region having a LCDR1, LCDR2, and LCDR3, wherein the HCDR1, HCDR2, and HCDR3 comprises an amino acid sequence of SEQ ID NOS: 17476, 16834, and 6174, respectively and the LCDR1, LCDR2, and LCDR3 comprises an amino acid sequence of SEQ ID NOS: 16083, 9503, and 12775, respectively.

[1681] The disclosure describes an antibody, antigen binding fragment, or polypeptide comprising a heavy chain variable region having a HCDR1, HCDR2, and HCDR3, and a light chain variable region having a LCDR1, LCDR2, and LCDR3, wherein the HCDR1, HCDR2, and HCDR3 comprises an amino acid sequence of SEQ ID NOS:10190, 18291, and 17714, respectively and the LCDR1, LCDR2, and LCDR3 comprises an amino acid sequence of SEQ ID NOS: 15963, 10727, and 12466, respectively.

[1682] The disclosure describes an antibody, antigen binding fragment, or polypeptide comprising a heavy chain variable region having a HCDR1, HCDR2, and HCDR3, and a light chain variable region having a LCDR1, LCDR2, and LCDR3, wherein the HCDR1, HCDR2, and HCDR3 comprises an amino acid sequence of SEQ ID NOS:11686, 9405, and 16616, respectively and the LCDR1, LCDR2, and LCDR3 comprises an amino acid sequence of SEQ ID NOS: 15629, 4258, and 12277, respectively.

[1683] The disclosure describes an antibody, antigen binding fragment, or polypeptide comprising a heavy chain variable region having a HCDR1, HCDR2, and HCDR3, and a light chain variable region having a LCDR1, LCDR2, and LCDR3, wherein the HCDR1, HCDR2, and HCDR3 comprises an amino acid sequence of SEQ ID NOS: 10365, 18295, and 6542, respectively and the LCDR1, LCDR2, and LCDR3 comprises an amino acid sequence of SEQ ID NOS: 18093, 17718, and 9445, respectively.

[1684] The disclosure describes an antibody, antigen binding fragment, or polypeptide comprising a heavy chain variable region having a HCDR1, HCDR2, and HCDR3, and a light chain variable region having a LCDR1, LCDR2, and LCDR3, wherein the HCDR1, HCDR2, and HCDR3 comprises an amino acid sequence of SEQ ID NOS:11632, 9923, and 16166, respectively and the LCDR1, LCDR2, and LCDR3 comprises an amino acid sequence of SEQ ID NOS: 18092, 10968, and 7953, respectively.

[1685] The disclosure describes an antibody, antigen binding fragment, or polypeptide comprising a heavy chain variable region having a HCDR1, HCDR2, and HCDR3, and a light chain variable region having a LCDR1, LCDR2, and LCDR3, wherein the HCDR1, HCDR2, and HCDR3 comprises an amino acid sequence of SEQ ID NOS:6509, 9958, and 4175, respectively and the LCDR1, LCDR2, and LCDR3 comprises an amino acid sequence of SEQ ID NOS:15612, 9500, and 12766, respectively.

[1686] The disclosure describes an antibody, antigen binding fragment, or polypeptide comprising a heavy chain variable region having a HCDR1, HCDR2, and HCDR3, and a light chain variable region having a LCDR1, LCDR2, and LCDR3, wherein the HCDR1, HCDR2, and HCDR3 comprises an amino acid sequence of SEQ ID NOS:11673, 17814, and 16183, respectively and the LCDR1, LCDR2, and LCDR3 comprises an amino acid sequence of SEQ ID NOS: 17876, 6626, and 17572, respectively.

[1687] The disclosure describes an antibody, antigen binding fragment, or polypeptide comprising a heavy chain variable region having a HCDR1, HCDR2, and HCDR3, and a light chain variable region having a LCDR1, LCDR2, and LCDR3, wherein the HCDR1, HCDR2, and HCDR3 comprises an amino acid sequence of SEQ ID NOS: 18637, 18376, and 6492, respectively and the LCDR1, LCDR2, and LCDR3 comprises an amino acid sequence of SEQ ID NOS:15751, 11144, and 12453, respectively.

[1688] The disclosure describes an antibody, antigen binding fragment, or polypeptide comprising a heavy chain variable region having a HCDR1, HCDR2, and HCDR3, and a light chain variable region having a LCDR1, LCDR2, and LCDR3, wherein the HCDR1, HCDR2, and HCDR3 comprises an amino acid sequence of SEQ ID NOS: 11647, 18366, and 6476, respectively and the LCDR1, LCDR2, and LCDR3 comprises an amino acid sequence of SEQ ID NOS:15877, 11144, and 12495, respectively.

[1689] The disclosure describes an antibody, antigen binding fragment, or polypeptide comprising a heavy chain variable region having a HCDR1, HCDR2, and HCDR3, and a light chain variable region having a LCDR1, LCDR2, and LCDR3, wherein the HCDR1, HCDR2, and HCDR3 comprises an amino acid sequence of SEQ ID NOS:6508, 10000, and 4605, respectively and the LCDR1, LCDR2, and LCDR3 comprises an amino acid sequence of SEQ ID NOS: 16045, 9501, and 12745, respectively.

[1690] The disclosure describes an antibody, antigen binding fragment, or polypeptide comprising a heavy chain variable region having a HCDR1, HCDR2, and HCDR3, and a light chain variable region having a LCDR1, LCDR2, and LCDR3, wherein the HCDR1, HCDR2, and HCDR3 comprises an amino acid sequence of SEQ ID NOS:17274, 4136, and 11697, respectively and the LCDR1, LCDR2, and LCDR3 comprises an amino acid sequence of SEQ ID NOS:16659, 11900, and 11884, respectively.

[1691] The disclosure describes an antibody, antigen binding fragment, or polypeptide comprising a heavy chain variable region having a HCDR1, HCDR2, and HCDR3, and a light chain variable region having a LCDR1, LCDR2, and LCDR3, wherein the HCDR1, HCDR2, and HCDR3 comprises an amino acid sequence of SEQ ID NOS:17263, 9751, and 11376, respectively and the LCDR1, LCDR2, and LCDR3 comprises an amino acid sequence of SEQ ID NOS: 16061, 9494, and 12628, respectively.

[1692] The disclosure describes an antibody, antigen binding fragment, or polypeptide comprising a heavy chain variable region having a HCDR1, HCDR2, and HCDR3, and a light chain variable region having a LCDR1, LCDR2, and LCDR3, wherein the HCDR1, HCDR2, and HCDR3 comprises an amino acid sequence of SEQ ID NOS:17261, 10004, and 17689, respectively and the LCDR1, LCDR2, and LCDR3 comprises an amino acid sequence of SEQ ID NOS: 16061, 9494, and 12633, respectively.

[1693] The disclosure describes an antibody, antigen binding fragment, or polypeptide comprising a heavy chain variable region having a HCDR1, HCDR2, and HCDR3, and a light chain variable region having a LCDR1, LCDR2, and LCDR3, wherein the HCDR1, HCDR2, and HCDR3 comprises an amino acid sequence of SEQ ID NOS: 11666, 9962, and 9585, respectively and the LCDR1, LCDR2, and LCDR3 comprises an amino acid sequence of SEQ ID NOS: 16726, 11556, and 4244, respectively.

[1694] The disclosure describes an antibody, antigen binding fragment, or polypeptide comprising a heavy chain variable region having a HCDR1, HCDR2, and HCDR3, and a light chain variable region having a LCDR1, LCDR2, and LCDR3, wherein the HCDR1, HCDR2, and HCDR3 comprises an amino acid sequence of SEQ ID NOS:4182, 18313, and 18145, respectively and the LCDR1, LCDR2, and LCDR3 comprises an amino acid sequence of SEQ ID NOS: 17963, 9275, and 11128, respectively.

[1695] The disclosure describes an antibody, antigen binding fragment, or polypeptide comprising a heavy chain variable region having a HCDR1, HCDR2, and HCDR3, and a light chain variable region having a LCDR1, LCDR2, and LCDR3, wherein the HCDR1, HCDR2, and HCDR3 comprises an amino acid sequence of SEQ ID NOS:9512, 4145, and 17660, respectively and the LCDR1, LCDR2, and LCDR3 comprises an amino acid sequence of SEQ ID NOS: 16061, 9494, and 10462, respectively. having a LCDR1, LCDR2, and LCDR3, wherein the HCDR1, HCDR2, and HCDR3 comprises an amino acid sequence of SEQ ID NOS:10945, 9766, and 16997, respectively and the LCDR1, LCDR2, and LCDR3 comprises an amino acid sequence of SEQ ID NOS: 16001, 9494, and 12720, respectively.

[1696] The disclosure describes an antibody, antigen binding fragment, or polypeptide comprising a heavy chain variable region having a HCDR1, HCDR2, and HCDR3, and a light chain variable region having a LCDR1, LCDR2, and LCDR3, wherein the HCDR1, HCDR2, and HCDR3 comprises an amino acid sequence of SEQ ID NOS: 10777, 16860, and 6498, respectively and the LCDR1, LCDR2, and LCDR3 comprises an amino acid sequence of SEQ ID NOS:18061, 18606, and 11177, respectively.

[1697] The disclosure describes an antibody, antigen binding fragment, or polypeptide comprising a heavy chain variable region having a HCDR1, HCDR2, and HCDR3, and a light chain variable region having a LCDR1, LCDR2, and LCDR3, wherein the HCDR1, HCDR2, and HCDR3 comprises an amino acid sequence of SEQ ID NOS:4182, 18319, and 18145, respectively and the LCDR1, LCDR2, and LCDR3 comprises an amino acid sequence of SEQ ID NOS: 17965, 9275, and 9427, respectively.

[1698] The disclosure describes an antibody, antigen binding fragment, or polypeptide comprising a heavy chain variable region having a HCDR1, HCDR2, and HCDR3, and a light chain variable region having a LCDR1, LCDR2, and LCDR3, wherein the HCDR1, HCDR2, and HCDR3 comprises an amino acid sequence of SEQ ID NOS: 10359, 16917, and 6125, respectively and the LCDR1, LCDR2, and LCDR3 comprises an amino acid sequence of SEQ ID NOS: 16045, 9480, and 12772, respectively.

[1699] The disclosure describes an antibody, antigen binding fragment, or polypeptide comprising a heavy chain variable region having a HCDR1, HCDR2, and HCDR3, and a light chain variable region having a LCDR1, LCDR2, and LCDR3, wherein the HCDR1, HCDR2, and HCDR3 comprises an amino acid sequence of SEQ ID NOS:17144, 16953, and 16338, respectively and the LCDR1, LCDR2, and LCDR3 comprises an amino acid sequence of SEQ ID NOS: 17959, 6312, and 4357, respectively.

[1700] The disclosure describes an antibody, antigen binding fragment, or polypeptide comprising a heavy chain variable region having a HCDR1, HCDR2, and HCDR3, and a light chain variable region having a LCDR1, LCDR2, and LCDR3, wherein the HCDR1, HCDR2, and HCDR3 comprises an amino acid sequence of SEQ ID NOS: 17608, 18027, and 5926, respectively and the LCDR1, LCDR2, and LCDR3 comprises an amino acid sequence of SEQ ID NOS: 16067, 4425, and 10711, respectively.

[1701] The disclosure describes an antibody, antigen binding fragment, or polypeptide comprising a heavy chain variable region having a HCDR1, HCDR2, and HCDR3, and a light chain variable region having a LCDR1, LCDR2, and LCDR3, wherein the HCDR1, HCDR2, and HCDR3 comprises an amino acid sequence of SEQ ID NOS:17881, 10207, and 11567, respectively and the LCDR1, LCDR2, and LCDR3 comprises an amino acid sequence of SEQ ID NOS:16654, 6636, and 11881, respectively.

[1702] The disclosure describes an antibody, antigen binding fragment, or polypeptide comprising a heavy chain variable region having a HCDR1, HCDR2, and HCDR3, and a light chain variable region having a LCDR1, LCDR2, and LCDR3, wherein the HCDR1, HCDR2, and HCDR3 comprises an amino acid sequence of SEQ ID NOS:17263, 9718, and 17115, respectively and the LCDR1, LCDR2, and LCDR3 comprises an amino acid sequence of SEQ ID NOS: 15929, 9494, and 10439, respectively.

[1703] The disclosure describes an antibody, antigen binding fragment, or polypeptide comprising a heavy chain variable region having a HCDR1, HCDR2, and HCDR3, and a light chain variable region having a LCDR1, LCDR2, and LCDR3, wherein the HCDR1, HCDR2, and HCDR3 comprises an amino acid sequence of SEQ ID NOS:6530, 9916, and 9550, respectively and the LCDR1, LCDR2, and LCDR3 comprises an amino acid sequence of SEQ ID NOS:16045, 10264, and 12813, respectively.

[1704] The disclosure describes an antibody, antigen binding fragment, or polypeptide comprising a heavy chain variable region having a HCDR1, HCDR2, and HCDR3, and a light chain variable region having a LCDR1, LCDR2, and LCDR3, wherein the HCDR1, HCDR2, and HCDR3 comprises an amino acid sequence of SEQ ID NOS:16621, 9764, and 6015, respectively and the LCDR1, LCDR2, and LCDR3 comprises an amino acid sequence of SEQ ID NOS: 15664, 9489, and 11109, respectively.

[1705] The disclosure describes an antibody, antigen binding fragment, or polypeptide comprising a heavy chain variable region having a HCDR1, HCDR2, and HCDR3, and a light chain variable region having a LCDR1, LCDR2, and LCDR3, wherein the HCDR1, HCDR2, and HCDR3 comprises an amino acid sequence of SEQ ID NOS:6574, 18565, and 18146, respectively and the LCDR1, LCDR2, and LCDR3 comprises an amino acid sequence of SEQ ID NOS: 16459, 4436, and 12771, respectively.

[1706] The disclosure describes an antibody, antigen binding fragment, or polypeptide comprising a heavy chain variable region having a HCDR1, HCDR2, and HCDR3, and a light chain variable region having a LCDR1, LCDR2, and LCDR3, wherein the HCDR1, HCDR2, and HCDR3 comprises an amino acid sequence of SEQ ID NOS:18100, 9868, and 16503, respectively and the LCDR1, LCDR2, and LCDR3 comprises an amino acid sequence of SEQ ID NOS: 16049, 9494, and 12671, respectively.

[1707] The disclosure describes an antibody, antigen binding fragment, or polypeptide comprising a heavy chain variable region having a HCDR1, HCDR2, and HCDR3, and a light chain variable region having a LCDR1, LCDR2, and LCDR3, wherein the HCDR1, HCDR2, and HCDR3 comprises an amino acid sequence of SEQ ID NOS: 11649, 18374, and 6475, respectively and the LCDR1, LCDR2, and LCDR3 comprises an amino acid sequence of SEQ ID NOS:15868, 11144, and 12463, respectively.

[1708] The disclosure describes an antibody, antigen binding fragment, or polypeptide comprising a heavy chain variable region having a HCDR1, HCDR2, and HCDR3, and a light chain variable region having a LCDR1, LCDR2, and LCDR3, wherein the HCDR1, HCDR2, and HCDR3 comprises an amino acid sequence of SEQ ID NOS:10944, 9702, and 10191, respectively and the LCDR1, LCDR2, and LCDR3 comprises an amino acid sequence of SEQ ID NOS: 15947, 3974, and 12648, respectively.

[1709] The disclosure describes an antibody, antigen binding fragment, or polypeptide comprising a heavy chain variable region having a HCDR1, HCDR2, and HCDR3, and a light chain variable region having a LCDR1, LCDR2, and LCDR3, wherein the HCDR1, HCDR2, and HCDR3 comprises an amino acid sequence of SEQ ID NOS:11391, 10005, and 10062, respectively and the LCDR1, LCDR2, and LCDR3 comprises an amino acid sequence of SEQ ID NOS:17950, 9261, and 17167, respectively.

[1710] The disclosure describes an antibody, antigen binding fragment, or polypeptide comprising a heavy chain variable region having a HCDR1, HCDR2, and HCDR3, and a light chain variable region having a LCDR1, LCDR2, and LCDR3, wherein the HCDR1, HCDR2, and HCDR3 comprises an amino acid sequence of SEQ ID NOS:16473, 11442, and 18607, respectively and the LCDR1, LCDR2, and LCDR3 comprises an amino acid sequence of SEQ ID NOS: 15691, 3982, and 11092, respectively.

[1711] The disclosure describes an antibody, antigen binding fragment, or polypeptide comprising a heavy chain variable region having a HCDR1, HCDR2, and HCDR3, and a light chain variable region having a LCDR1, LCDR2, and LCDR3, wherein the HCDR1, HCDR2, and HCDR3 comprises an amino acid sequence of SEQ ID NOS: 10753, 17796, and 9424, respectively and the LCDR1, LCDR2, and LCDR3 comprises an amino acid sequence of SEQ ID NOS:15934, 10738, and 11924, respectively.

[1712] The disclosure describes an antibody, antigen binding fragment, or polypeptide comprising a heavy chain variable region having a HCDR1, HCDR2, and HCDR3, and a light chain variable region having a LCDR1, LCDR2, and LCDR3, wherein the HCDR1, HCDR2, and HCDR3 comprises an amino acid sequence of SEQ ID NOS: 11633, 16915, and 6200, respectively and the LCDR1, LCDR2, and LCDR3 comprises an amino acid sequence of SEQ ID NOS:15662, 16556, and 12981, respectively.

[1713] The disclosure describes an antibody, antigen binding fragment, or polypeptide comprising a heavy chain variable region having a HCDR1, HCDR2, and HCDR3, and a light chain variable region having a LCDR1, LCDR2, and LCDR3, wherein the HCDR1, HCDR2, and HCDR3 comprises an amino acid sequence of SEQ ID NOS:6509, 9958, and 17434, respectively and the LCDR1, LCDR2, and LCDR3 comprises an amino acid sequence of SEQ ID NOS: 15630, 9503, and 12794, respectively.

[1714] The disclosure describes an antibody, antigen binding fragment, or polypeptide comprising a heavy chain variable region having a HCDR1, HCDR2, and HCDR3, and a light chain variable region having a LCDR1, LCDR2, and LCDR3, wherein the HCDR1, HCDR2, and HCDR3 comprises an amino acid sequence of SEQ ID NOS:17263, 9814, and 6117, respectively and the LCDR1, LCDR2, and LCDR3 comprises an amino acid sequence of SEQ ID NOS: 16493, 9503, and 12757, respectively. having a LCDR1, LCDR2, and LCDR3, wherein the HCDR1, HCDR2, and HCDR3 comprises an amino acid sequence of SEQ ID NOS:17991, 11523, and 16218, respectively and the LCDR1, LCDR2, and LCDR3 comprises an amino acid sequence of SEQ ID NOS: 15997, 9464, and 12785, respectively.

[1715] The disclosure describes an antibody, antigen binding fragment, or polypeptide comprising a heavy chain variable region having a HCDR1, HCDR2, and HCDR3, and a light chain variable region having a LCDR1, LCDR2, and LCDR3, wherein the HCDR1, HCDR2, and HCDR3 comprises an amino acid sequence of SEQ ID NOS:6579, 18579, and 17055, respectively and the LCDR1, LCDR2, and LCDR3 comprises an amino acid sequence of SEQ ID NOS: 15664, 3953, and 11081, respectively.

[1716] The disclosure describes an antibody, antigen binding fragment, or polypeptide comprising a heavy chain variable region having a HCDR1, HCDR2, and HCDR3, and a light chain variable region having a LCDR1, LCDR2, and LCDR3, wherein the HCDR1, HCDR2, and HCDR3 comprises an amino acid sequence of SEQ ID NOS:16819, 11461, and 6466, respectively and the LCDR1, LCDR2, and LCDR3 comprises an amino acid sequence of SEQ ID NOS:15936, 11778, and 12739, respectively.

[1717] The disclosure describes an antibody, antigen binding fragment, or polypeptide comprising a heavy chain variable region having a HCDR1, HCDR2, and HCDR3, and a light chain variable region having a LCDR1, LCDR2, and LCDR3, wherein the HCDR1, HCDR2, and HCDR3 comprises an amino acid sequence of SEQ ID NOS: 16696, 16937, and 4485, respectively and the LCDR1, LCDR2, and LCDR3 comprises an amino acid sequence of SEQ ID NOS:10843, 18277, and 12925, respectively.

[1718] The disclosure describes an antibody, antigen binding fragment, or polypeptide comprising a heavy chain variable region having a HCDR1, HCDR2, and HCDR3, and a light chain variable region having a LCDR1, LCDR2, and LCDR3, wherein the HCDR1, HCDR2, and HCDR3 comprises an amino acid sequence of SEQ ID NOS:17992, 18292, and 18202, respectively and the LCDR1, LCDR2, and LCDR3 comprises an amino acid sequence of SEQ ID NOS:10231, 6218, and 11043, respectively.

[1719] The disclosure describes an antibody, antigen binding fragment, or polypeptide comprising a heavy chain variable region having a HCDR1, HCDR2, and HCDR3, and a light chain variable region having a LCDR1, LCDR2, and LCDR3, wherein the HCDR1, HCDR2, and HCDR3 comprises an amino acid sequence of SEQ ID NOS:4619, 9971, and 4636, respectively and the LCDR1, LCDR2, and LCDR3 comprises an amino acid sequence of SEQ ID NOS: 15649, 3969, and 12554, respectively.

[1720] The disclosure describes an antibody, antigen binding fragment, or polypeptide comprising a heavy chain variable region having a HCDR1, HCDR2, and HCDR3, and a light chain variable region having a LCDR1, LCDR2, and LCDR3, wherein the HCDR1, HCDR2, and HCDR3 comprises an amino acid sequence of SEQ ID NOS:17262, 9767, and 10243, respectively and the LCDR1, LCDR2, and LCDR3 comprises an amino acid sequence of SEQ ID NOS: 16040, 9503, and 10468, respectively.

[1721] The disclosure describes an antibody, antigen binding fragment, or polypeptide comprising a heavy chain variable region having a HCDR1, HCDR2, and HCDR3, and a light chain variable region having a LCDR1, LCDR2, and LCDR3, wherein the HCDR1, HCDR2, and HCDR3 comprises an amino acid sequence of SEQ ID NOS:17141, 11527, and 11773, respectively and the LCDR1, LCDR2, and LCDR3 comprises an amino acid sequence of SEQ ID NOS:17958, 6332, and 17178, respectively.

[1722] The disclosure describes an antibody, antigen binding fragment, or polypeptide comprising a heavy chain variable region having a HCDR1, HCDR2, and HCDR3, and a light chain variable region having a LCDR1, LCDR2, and LCDR3, wherein the HCDR1, HCDR2, and HCDR3 comprises an amino acid sequence of SEQ ID NOS:16620, 18493, and 17706, respectively and the LCDR1, LCDR2, and LCDR3 comprises an amino acid sequence of SEQ ID NOS:15946, 9503, and 12725, respectively.

[1723] The disclosure describes an antibody, antigen binding fragment, or polypeptide comprising a heavy chain variable region having a HCDR1, HCDR2, and HCDR3, and a light chain variable region having a LCDR1, LCDR2, and LCDR3, wherein the HCDR1, HCDR2, and HCDR3 comprises an amino acid sequence of SEQ ID NOS:17062, 9833, and 10321, respectively and the LCDR1, LCDR2, and LCDR3 comprises an amino acid sequence of SEQ ID NOS: 10830, 9265, and 11316, respectively.

[1724] The disclosure describes an antibody, antigen binding fragment, or polypeptide comprising a heavy chain variable region having a HCDR1, HCDR2, and HCDR3, and a light chain variable region having a LCDR1, LCDR2, and LCDR3, wherein the HCDR1, HCDR2, and HCDR3 comprises an amino acid sequence of SEQ ID NOS:6578, 18512, and 18140, respectively and the LCDR1, LCDR2, and LCDR3 comprises an amino acid sequence of SEQ ID NOS:16449, 18274, and 12959, respectively.

[1725] The disclosure describes an antibody, antigen binding fragment, or polypeptide comprising a heavy chain variable region having a HCDR1, HCDR2, and HCDR3, and a light chain variable region having a LCDR1, LCDR2, and LCDR3, wherein the HCDR1, HCDR2, and HCDR3 comprises an amino acid sequence of SEQ ID NOS: 10367, 18323, and 6618, respectively and the LCDR1, LCDR2, and LCDR3 comprises an amino acid sequence of SEQ ID NOS:18077, 18596, and 11185, respectively.

[1726] The disclosure describes an antibody, antigen binding fragment, or polypeptide comprising a heavy chain variable region having a HCDR1, HCDR2, and HCDR3, and a light chain variable region having a LCDR1, LCDR2, and LCDR3, wherein the HCDR1, HCDR2, and HCDR3 comprises an amino acid sequence of SEQ ID NOS:9438, 10248, and 17138, respectively and the LCDR1, LCDR2, and LCDR3 comprises an amino acid sequence of SEQ ID NOS: 16039, 9494, and 12002, respectively.

[1727] The disclosure describes an antibody, antigen binding fragment, or polypeptide comprising a heavy chain variable region having a HCDR1, HCDR2, and HCDR3, and a light chain variable region having a LCDR1, LCDR2, and LCDR3, wherein the HCDR1, HCDR2, and HCDR3 comprises an amino acid sequence of SEQ ID NOS:17460, 9746, and 16550, respectively and the LCDR1, LCDR2, and LCDR3 comprises an amino acid sequence of SEQ ID NOS: 16189, 9503, and 12765, respectively.

[1728] The disclosure describes an antibody, antigen binding fragment, or polypeptide comprising a heavy chain variable region having a HCDR1, HCDR2, and HCDR3, and a light chain variable region having a LCDR1, LCDR2, and LCDR3, wherein the HCDR1, HCDR2, and HCDR3 comprises an amino acid sequence of SEQ ID NOS: 16796, 11518, and 9921, respectively and the LCDR1, LCDR2, and LCDR3 comprises an amino acid sequence of SEQ ID NOS: 17924, 4180, and 13569, respectively.

[1729] The disclosure describes an antibody, antigen binding fragment, or polypeptide comprising a heavy chain variable region having a HCDR1, HCDR2, and HCDR3, and a light chain variable region having a LCDR1, LCDR2, and LCDR3, wherein the HCDR1, HCDR2, and HCDR3 comprises an amino acid sequence of SEQ ID NOS:17446, 18501, and 11726, respectively and the LCDR1, LCDR2, and LCDR3 comprises an amino acid sequence of SEQ ID NOS: 16036, 9503, and 12775, respectively.

[1730] The disclosure describes an antibody, antigen binding fragment, or polypeptide comprising a heavy chain variable region having a HCDR1, HCDR2, and HCDR3, and a light chain variable region having a LCDR1, LCDR2, and LCDR3, wherein the HCDR1, HCDR2, and HCDR3 comprises an amino acid sequence of SEQ ID NOS:17441, 9779, and 16792, respectively and the LCDR1, LCDR2, and LCDR3 comprises an amino acid sequence of SEQ ID NOS: 15691, 3969, and 11098, respectively.

[1731] The disclosure describes an antibody, antigen binding fragment, or polypeptide comprising a heavy chain variable region having a HCDR1, HCDR2, and HCDR3, and a light chain variable region having a LCDR1, LCDR2, and LCDR3, wherein the HCDR1, HCDR2, and HCDR3 comprises an amino acid sequence of SEQ ID NOS: 17275, 17756, and 5935, respectively and the LCDR1, LCDR2, and LCDR3 comprises an amino acid sequence of SEQ ID NOS: 16045, 9503, and 12775, respectively.

[1732] The disclosure describes an antibody, antigen binding fragment, or polypeptide comprising a heavy chain variable region having a HCDR1, HCDR2, and HCDR3, and a light chain variable region having a LCDR1, LCDR2, and LCDR3, wherein the HCDR1, HCDR2, and HCDR3 comprises an amino acid sequence of SEQ ID NOS:11673, 10568, and 16184, respectively and the LCDR1, LCDR2, and LCDR3 comprises an amino acid sequence of SEQ ID NOS:17877, 6626, and 17158, respectively.

[1733] The disclosure describes an antibody, antigen binding fragment, or polypeptide comprising a heavy chain variable region having a HCDR1, HCDR2, and HCDR3, and a light chain variable region having a LCDR1, LCDR2, and LCDR3, wherein the HCDR1, HCDR2, and HCDR3 comprises an amino acid sequence of SEQ ID NOS:4307, 9577, and 6086, respectively and the LCDR1, LCDR2, and LCDR3 comprises an amino acid sequence of SEQ ID NOS: 15964, 4424, and 10711, respectively. having a LCDR1, LCDR2, and LCDR3, wherein the HCDR1, HCDR2, and HCDR3 comprises an amino acid sequence of SEQ ID NOS:11650, 10562, and 10103, respectively and the LCDR1, LCDR2, and LCDR3 comprises an amino acid sequence of SEQ ID NOS:17981, 6237, and 17177, respectively.

[1734] The disclosure describes an antibody, antigen binding fragment, or polypeptide comprising a heavy chain variable region having a HCDR1, HCDR2, and HCDR3, and a light chain variable region having a LCDR1, LCDR2, and LCDR3, wherein the HCDR1, HCDR2, and HCDR3 comprises an amino acid sequence of SEQ ID NOS:17263, 9945, and 6162, respectively and the LCDR1, LCDR2, and LCDR3 comprises an amino acid sequence of SEQ ID NOS: 10830, 9267, and 11334, respectively.

[1735] The disclosure describes an antibody, antigen binding fragment, or polypeptide comprising a heavy chain variable region having a HCDR1, HCDR2, and HCDR3, and a light chain variable region having a LCDR1, LCDR2, and LCDR3, wherein the HCDR1, HCDR2, and HCDR3 comprises an amino acid sequence of SEQ ID NOS:4322, 11483, and 6672, respectively and the LCDR1, LCDR2, and LCDR3 comprises an amino acid sequence of SEQ ID NOS:18085, 18224, and 13625, respectively.

[1736] The disclosure describes an antibody, antigen binding fragment, or polypeptide comprising a heavy chain variable region having a HCDR1, HCDR2, and HCDR3, and a light chain variable region having a LCDR1, LCDR2, and LCDR3, wherein the HCDR1, HCDR2, and HCDR3 comprises an amino acid sequence of SEQ ID NOS:17634, 18539, and 17702, respectively and the LCDR1, LCDR2, and LCDR3 comprises an amino acid sequence of SEQ ID NOS: 16045, 10264, and 12775, respectively.

[1737] The disclosure describes an antibody, antigen binding fragment, or polypeptide comprising a heavy chain variable region having a HCDR1, HCDR2, and HCDR3, and a light chain variable region having a LCDR1, LCDR2, and LCDR3, wherein the HCDR1, HCDR2, and HCDR3 comprises an amino acid sequence of SEQ ID NOS: 11650, 17802, and 5905, respectively and the LCDR1, LCDR2, and LCDR3 comprises an amino acid sequence of SEQ ID NOS:16408, 10985, and 11253, respectively.

[1738] The disclosure describes an antibody, antigen binding fragment, or polypeptide comprising a heavy chain variable region having a HCDR1, HCDR2, and HCDR3, and a light chain variable region having a LCDR1, LCDR2, and LCDR3, wherein the HCDR1, HCDR2, and HCDR3 comprises an amino acid sequence of SEQ ID NOS:16799, 10065, and 11735, respectively and the LCDR1, LCDR2, and LCDR3 comprises an amino acid sequence of SEQ ID NOS: 15958, 9503, and 12353, respectively.

[1739] The disclosure describes an antibody, antigen binding fragment, or polypeptide comprising a heavy chain variable region having a HCDR1, HCDR2, and HCDR3, and a light chain variable region having a LCDR1, LCDR2, and LCDR3, wherein the HCDR1, HCDR2, and HCDR3 comprises an amino acid sequence of SEQ ID NOS: 18637, 18375, and 6492, respectively and the LCDR1, LCDR2, and LCDR3 comprises an amino acid sequence of SEQ ID NOS:15751, 11144, and 12454, respectively.

[1740] The disclosure describes an antibody, antigen binding fragment, or polypeptide comprising a heavy chain variable region having a HCDR1, HCDR2, and HCDR3, and a light chain variable region having a LCDR1, LCDR2, and LCDR3, wherein the HCDR1, HCDR2, and HCDR3 comprises an amino acid sequence of SEQ ID NOS:9438, 10249, and 17137, respectively and the LCDR1, LCDR2, and LCDR3 comprises an amino acid sequence of SEQ ID NOS: 16080, 9494, and 12614, respectively.

[1741] The disclosure describes an antibody, antigen binding fragment, or polypeptide comprising a heavy chain variable region having a HCDR1, HCDR2, and HCDR3, and a light chain variable region having a LCDR1, LCDR2, and LCDR3, wherein the HCDR1, HCDR2, and HCDR3 comprises an amino acid sequence of SEQ ID NOS:11632, 9924, and 6107, respectively and the LCDR1, LCDR2, and LCDR3 comprises an amino acid sequence of SEQ ID NOS:10893, 18275, and 12372, respectively.

[1742] The disclosure describes an antibody, antigen binding fragment, or polypeptide comprising a heavy chain variable region having a HCDR1, HCDR2, and HCDR3, and a light chain variable region having a LCDR1, LCDR2, and LCDR3, wherein the HCDR1, HCDR2, and HCDR3 comprises an amino acid sequence of SEQ ID NOS:17991, 17794, and 11112, respectively and the LCDR1, LCDR2, and LCDR3 comprises an amino acid sequence of SEQ ID NOS:15933, 10737, and 12455, respectively.

[1743] The disclosure describes an antibody, antigen binding fragment, or polypeptide comprising a heavy chain variable region having a HCDR1, HCDR2, and HCDR3, and a light chain variable region having a LCDR1, LCDR2, and LCDR3, wherein the HCDR1, HCDR2, and HCDR3 comprises an amino acid sequence of SEQ ID NOS:11652, 18489, and 17679, respectively and the LCDR1, LCDR2, and LCDR3 comprises an amino acid sequence of SEQ ID NOS: 16360, 10928, and 11350, respectively.

[1744] The disclosure describes an antibody, antigen binding fragment, or polypeptide comprising a heavy chain variable region having a HCDR1, HCDR2, and HCDR3, and a light chain variable region having a LCDR1, LCDR2, and LCDR3, wherein the HCDR1, HCDR2, and HCDR3 comprises an amino acid sequence of SEQ ID NOS:17274, 16885, and 10157, respectively and the LCDR1, LCDR2, and LCDR3 comprises an amino acid sequence of SEQ ID NOS: 16036, 9472, and 12772, respectively.

[1745] The disclosure describes an antibody, antigen binding fragment, or polypeptide comprising a heavy chain variable region having a HCDR1, HCDR2, and HCDR3, and a light chain variable region having a LCDR1, LCDR2, and LCDR3, wherein the HCDR1, HCDR2, and HCDR3 comprises an amino acid sequence of SEQ ID NOS:16546, 18408, and 10613, respectively and the LCDR1, LCDR2, and LCDR3 comprises an amino acid sequence of SEQ ID NOS: 16782, 6244, and 4366, respectively.

[1746] The disclosure describes an antibody, antigen binding fragment, or polypeptide comprising a heavy chain variable region having a HCDR1, HCDR2, and HCDR3, and a light chain variable region having a LCDR1, LCDR2, and LCDR3, wherein the HCDR1, HCDR2, and HCDR3 comprises an amino acid sequence of SEQ ID NOS:17466, 18539, and 17705, respectively and the LCDR1, LCDR2, and LCDR3 comprises an amino acid sequence of SEQ ID NOS: 16045, 9503, and 12775, respectively.

[1747] The disclosure describes an antibody, antigen binding fragment, or polypeptide comprising a heavy chain variable region having a HCDR1, HCDR2, and HCDR3, and a light chain variable region having a LCDR1, LCDR2, and LCDR3, wherein the HCDR1, HCDR2, and HCDR3 comprises an amino acid sequence of SEQ ID NOS:17018, 9722, and 9525, respectively and the LCDR1, LCDR2, and LCDR3 comprises an amino acid sequence of SEQ ID NOS: 10830, 9267, and 11337, respectively.

[1748] The disclosure describes an antibody, antigen binding fragment, or polypeptide comprising a heavy chain variable region having a HCDR1, HCDR2, and HCDR3, and a light chain variable region having a LCDR1, LCDR2, and LCDR3, wherein the HCDR1, HCDR2, and HCDR3 comprises an amino acid sequence of SEQ ID NOS: 17443, 17809, and 6533, respectively and the LCDR1, LCDR2, and LCDR3 comprises an amino acid sequence of SEQ ID NOS:18077, 18596, and 11187, respectively.

[1749] The disclosure describes an antibody, antigen binding fragment, or polypeptide comprising a heavy chain variable region having a HCDR1, HCDR2, and HCDR3, and a light chain variable region having a LCDR1, LCDR2, and LCDR3, wherein the HCDR1, HCDR2, and HCDR3 comprises an amino acid sequence of SEQ ID NOS: 17626, 18633, and 4409, respectively and the LCDR1, LCDR2, and LCDR3 comprises an amino acid sequence of SEQ ID NOS:9671, 4464, and 15501, respectively.

[1750] The disclosure describes an antibody, antigen binding fragment, or polypeptide comprising a heavy chain variable region having a HCDR1, HCDR2, and HCDR3, and a light chain variable region having a LCDR1, LCDR2, and LCDR3, wherein the HCDR1, HCDR2, and HCDR3 comprises an amino acid sequence of SEQ ID NOS:11676, 11484, and 10973, respectively and the LCDR1, LCDR2, and LCDR3 comprises an amino acid sequence of SEQ ID NOS:10854, 18271, and 12902, respectively.

[1751] The disclosure describes an antibody, antigen binding fragment, or polypeptide comprising a heavy chain variable region having a HCDR1, HCDR2, and HCDR3, and a light chain variable region having a LCDR1, LCDR2, and LCDR3, wherein the HCDR1, HCDR2, and HCDR3 comprises an amino acid sequence of SEQ ID NOS:16692, 18583, and 17696, respectively and the LCDR1, LCDR2, and LCDR3 comprises an amino acid sequence of SEQ ID NOS:16659, 11900, and 11874, respectively.

[1752] The disclosure describes an antibody, antigen binding fragment, or polypeptide comprising a heavy chain variable region having a HCDR1, HCDR2, and HCDR3, and a light chain variable region having a LCDR1, LCDR2, and LCDR3, wherein the HCDR1, HCDR2, and HCDR3 comprises an amino acid sequence of SEQ ID NOS:11622, 9769, and 11734, respectively and the LCDR1, LCDR2, and LCDR3 comprises an amino acid sequence of SEQ ID NOS: 15958, 9503, and 12773, respectively. having a LCDR1, LCDR2, and LCDR3, wherein the HCDR1, HCDR2, and HCDR3 comprises an amino acid sequence of SEQ ID NOS:16809, 9708, and 10505, respectively and the LCDR1, LCDR2, and LCDR3 comprises an amino acid sequence of SEQ ID NOS:16006, 10262, and 12702, respectively.

[1753] The disclosure describes an antibody, antigen binding fragment, or polypeptide comprising a heavy chain variable region having a HCDR1, HCDR2, and HCDR3, and a light chain variable region having a LCDR1, LCDR2, and LCDR3, wherein the HCDR1, HCDR2, and HCDR3 comprises an amino acid sequence of SEQ ID NOS:17441, 9857, and 11719, respectively and the LCDR1, LCDR2, and LCDR3 comprises an amino acid sequence of SEQ ID NOS:15890, 10705, and 12021, respectively.

[1754] The disclosure describes an antibody, antigen binding fragment, or polypeptide comprising a heavy chain variable region having a HCDR1, HCDR2, and HCDR3, and a light chain variable region having a LCDR1, LCDR2, and LCDR3, wherein the HCDR1, HCDR2, and HCDR3 comprises an amino acid sequence of SEQ ID NOS:17262, 9786, and 10242, respectively and the LCDR1, LCDR2, and LCDR3 comprises an amino acid sequence of SEQ ID NOS: 16045, 9503, and 10473, respectively.

[1755] The disclosure describes an antibody, antigen binding fragment, or polypeptide comprising a heavy chain variable region having a HCDR1, HCDR2, and HCDR3, and a light chain variable region having a LCDR1, LCDR2, and LCDR3, wherein the HCDR1, HCDR2, and HCDR3 comprises an amino acid sequence of SEQ ID NOS:4619, 9959, and 4314, respectively and the LCDR1, LCDR2, and LCDR3 comprises an amino acid sequence of SEQ ID NOS: 15621, 9501, and 12762, respectively.

[1756] The disclosure describes an antibody, antigen binding fragment, or polypeptide comprising a heavy chain variable region having a HCDR1, HCDR2, and HCDR3, and a light chain variable region having a LCDR1, LCDR2, and LCDR3, wherein the HCDR1, HCDR2, and HCDR3 comprises an amino acid sequence of SEQ ID NOS:11650, 10561, and 10104, respectively and the LCDR1, LCDR2, and LCDR3 comprises an amino acid sequence of SEQ ID NOS:17958, 6312, and 17174, respectively.

[1757] The disclosure describes an antibody, antigen binding fragment, or polypeptide comprising a heavy chain variable region having a HCDR1, HCDR2, and HCDR3, and a light chain variable region having a LCDR1, LCDR2, and LCDR3, wherein the HCDR1, HCDR2, and HCDR3 comprises an amino acid sequence of SEQ ID NOS:17534, 11526, and 16468, respectively and the LCDR1, LCDR2, and LCDR3 comprises an amino acid sequence of SEQ ID NOS: 15999, 4400, and 10723, respectively.

[1758] The disclosure describes an antibody, antigen binding fragment, or polypeptide comprising a heavy chain variable region having a HCDR1, HCDR2, and HCDR3, and a light chain variable region having a LCDR1, LCDR2, and LCDR3, wherein the HCDR1, HCDR2, and HCDR3 comprises an amino acid sequence of SEQ ID NOS:17270, 17778, and 16691, respectively and the LCDR1, LCDR2, and LCDR3 comprises an amino acid sequence of SEQ ID NOS: 17924, 10094, and 13579, respectively.

[1759] The disclosure describes an antibody, antigen binding fragment, or polypeptide comprising a heavy chain variable region having a HCDR1, HCDR2, and HCDR3, and a light chain variable region having a LCDR1, LCDR2, and LCDR3, wherein the HCDR1, HCDR2, and HCDR3 comprises an amino acid sequence of SEQ ID NOS:6536, 9377, and 17674, respectively and the LCDR1, LCDR2, and LCDR3 comprises an amino acid sequence of SEQ ID NOS:16362, 16510, and 11219, respectively.

[1760] The disclosure describes an antibody, antigen binding fragment, or polypeptide comprising a heavy chain variable region having a HCDR1, HCDR2, and HCDR3, and a light chain variable region having a LCDR1, LCDR2, and LCDR3, wherein the HCDR1, HCDR2, and HCDR3 comprises an amino acid sequence of SEQ ID NOS:11652, 9399, and 10157, respectively and the LCDR1, LCDR2, and LCDR3 comprises an amino acid sequence of SEQ ID NOS: 16036, 9472, and 12724, respectively.

[1761] The disclosure describes an antibody, antigen binding fragment, or polypeptide comprising a heavy chain variable region having a HCDR1, HCDR2, and HCDR3, and a light chain variable region having a LCDR1, LCDR2, and LCDR3, wherein the HCDR1, HCDR2, and HCDR3 comprises an amino acid sequence of SEQ ID NOS: 17263, 9729, and 4277, respectively and the LCDR1, LCDR2, and LCDR3 comprises an amino acid sequence of SEQ ID NOS: 10830, 9267, and 11309, respectively.

[1762] The disclosure describes an antibody, antigen binding fragment, or polypeptide comprising a heavy chain variable region having a HCDR1, HCDR2, and HCDR3, and a light chain variable region having a LCDR1, LCDR2, and LCDR3, wherein the HCDR1, HCDR2, and HCDR3 comprises an amino acid sequence of SEQ ID NOS: 10233, 16299, and 4250, respectively and the LCDR1, LCDR2, and LCDR3 comprises an amino acid sequence of SEQ ID NOS:15895, 10699, and 10162, respectively.

[1763] The disclosure describes an antibody, antigen binding fragment, or polypeptide comprising a heavy chain variable region having a HCDR1, HCDR2, and HCDR3, and a light chain variable region having a LCDR1, LCDR2, and LCDR3, wherein the HCDR1, HCDR2, and HCDR3 comprises an amino acid sequence of SEQ ID NOS: 17476, 16833, and 6174, respectively and the LCDR1, LCDR2, and LCDR3 comprises an amino acid sequence of SEQ ID NOS: 16083, 9503, and 12775, respectively.

[1764] The disclosure describes an antibody, antigen binding fragment, or polypeptide comprising a heavy chain variable region having a HCDR1, HCDR2, and HCDR3, and a light chain variable region having a LCDR1, LCDR2, and LCDR3, wherein the HCDR1, HCDR2, and HCDR3 comprises an amino acid sequence of SEQ ID NOS:16199, 9575, and 11696, respectively and the LCDR1, LCDR2, and LCDR3 comprises an amino acid sequence of SEQ ID NOS: 16074, 9503, and 12775, respectively.

[1765] The disclosure describes an antibody, antigen binding fragment, or polypeptide comprising a heavy chain variable region having a HCDR1, HCDR2, and HCDR3, and a light chain variable region having a LCDR1, LCDR2, and LCDR3, wherein the HCDR1, HCDR2, and HCDR3 comprises an amino acid sequence of SEQ ID NOS: 17441, 18352, and 9541, respectively and the LCDR1, LCDR2, and LCDR3 comprises an amino acid sequence of SEQ ID NOS: 16759, 16331, and 4006, respectively.

[1766] The disclosure describes an antibody, antigen binding fragment, or polypeptide comprising a heavy chain variable region having a HCDR1, HCDR2, and HCDR3, and a light chain variable region having a LCDR1, LCDR2, and LCDR3, wherein the HCDR1, HCDR2, and HCDR3 comprises an amino acid sequence of SEQ ID NOS: 10365, 18324, and 3984, respectively and the LCDR1, LCDR2, and LCDR3 comprises an amino acid sequence of SEQ ID NOS:10896, 18275, and 13011, respectively.

[1767] The disclosure describes an antibody, antigen binding fragment, or polypeptide comprising a heavy chain variable region having a HCDR1, HCDR2, and HCDR3, and a light chain variable region having a LCDR1, LCDR2, and LCDR3, wherein the HCDR1, HCDR2, and HCDR3 comprises an amino acid sequence of SEQ ID NOS: 17274, 18021, and 6127, respectively and the LCDR1, LCDR2, and LCDR3 comprises an amino acid sequence of SEQ ID NOS: 15598, 6214, and 12433, respectively.

[1768] The disclosure describes an antibody, antigen binding fragment, or polypeptide comprising a heavy chain variable region having a HCDR1, HCDR2, and HCDR3, and a light chain variable region having a LCDR1, LCDR2, and LCDR3, wherein the HCDR1, HCDR2, and HCDR3 comprises an amino acid sequence of SEQ ID NOS: 10359, 16887, and 5959, respectively and the LCDR1, LCDR2, and LCDR3 comprises an amino acid sequence of SEQ ID NOS: 16036, 9503, and 12772, respectively.

[1769] The disclosure describes an antibody, antigen binding fragment, or polypeptide comprising a heavy chain variable region having a HCDR1, HCDR2, and HCDR3, and a light chain variable region having a LCDR1, LCDR2, and LCDR3, wherein the HCDR1, HCDR2, and HCDR3 comprises an amino acid sequence of SEQ ID NOS: 10376, 10015, and 7907, respectively and the LCDR1, LCDR2, and LCDR3 comprises an amino acid sequence of SEQ ID NOS: 15874, 3969, and 10454, respectively.

[1770] The disclosure describes an antibody, antigen binding fragment, or polypeptide comprising a heavy chain variable region having a HCDR1, HCDR2, and HCDR3, and a light chain variable region having a LCDR1, LCDR2, and LCDR3, wherein the HCDR1, HCDR2, and HCDR3 comprises an amino acid sequence of SEQ ID NOS:17264, 9702, and 11579, respectively and the LCDR1, LCDR2, and LCDR3 comprises an amino acid sequence of SEQ ID NOS: 16005, 9494, and 12662, respectively.

[1771] The disclosure describes an antibody, antigen binding fragment, or polypeptide comprising a heavy chain variable region having a HCDR1, HCDR2, and HCDR3, and a light chain variable region having a LCDR1, LCDR2, and LCDR3, wherein the HCDR1, HCDR2, and HCDR3 comprises an amino acid sequence of SEQ ID NOS: 16540, 18020, and 9652, respectively and the LCDR1, LCDR2, and LCDR3 comprises an amino acid sequence of SEQ ID NOS: 16113, 9480, and 12772, respectively. having a LCDR1, LCDR2, and LCDR3, wherein the HCDR1, HCDR2, and HCDR3 comprises an amino acid sequence of SEQ ID NOS: 11632, 9937, and 4626, respectively and the LCDR1, LCDR2, and LCDR3 comprises an amino acid sequence of SEQ ID NOS: 15858, 9503, and 12367, respectively.

[1772] The disclosure describes an antibody, antigen binding fragment, or polypeptide comprising a heavy chain variable region having a HCDR1, HCDR2, and HCDR3, and a light chain variable region having a LCDR1, LCDR2, and LCDR3, wherein the HCDR1, HCDR2, and HCDR3 comprises an amino acid sequence of SEQ ID NOS:16988, 9995, and 11581, respectively and the LCDR1, LCDR2, and LCDR3 comprises an amino acid sequence of SEQ ID NOS: 16757, 17007, and 3992, respectively.

[1773] The disclosure describes an antibody, antigen binding fragment, or polypeptide comprising a heavy chain variable region having a HCDR1, HCDR2, and HCDR3, and a light chain variable region having a LCDR1, LCDR2, and LCDR3, wherein the HCDR1, HCDR2, and HCDR3 comprises an amino acid sequence of SEQ ID NOS:11630, 17780, and 4481, respectively and the LCDR1, LCDR2, and LCDR3 comprises an amino acid sequence of SEQ ID NOS:16651, 10746, and 13339, respectively.

[1774] The disclosure describes an antibody, antigen binding fragment, or polypeptide comprising a heavy chain variable region having a HCDR1, HCDR2, and HCDR3, and a light chain variable region having a LCDR1, LCDR2, and LCDR3, wherein the HCDR1, HCDR2, and HCDR3 comprises an amino acid sequence of SEQ ID NOS: 17842, 4665, and 5978, respectively and the LCDR1, LCDR2, and LCDR3 comprises an amino acid sequence of SEQ ID NOS:18084, 11074, and 13622, respectively.

[1775] The disclosure describes an antibody, antigen binding fragment, or polypeptide comprising a heavy chain variable region having a HCDR1, HCDR2, and HCDR3, and a light chain variable region having a LCDR1, LCDR2, and LCDR3, wherein the HCDR1, HCDR2, and HCDR3 comprises an amino acid sequence of SEQ ID NOS:6579, 18457, and 16956, respectively and the LCDR1, LCDR2, and LCDR3 comprises an amino acid sequence of SEQ ID NOS: 15691, 3969, and 11081, respectively.

[1776] The disclosure describes an antibody, antigen binding fragment, or polypeptide comprising a heavy chain variable region having a HCDR1, HCDR2, and HCDR3, and a light chain variable region having a LCDR1, LCDR2, and LCDR3, wherein the HCDR1, HCDR2, and HCDR3 comprises an amino acid sequence of SEQ ID NOS:17274, 16889, and 10166, respectively and the LCDR1, LCDR2, and LCDR3 comprises an amino acid sequence of SEQ ID NOS: 16036, 9503, and 12772, respectively.

[1777] The disclosure describes an antibody, antigen binding fragment, or polypeptide comprising a heavy chain variable region having a HCDR1, HCDR2, and HCDR3, and a light chain variable region having a LCDR1, LCDR2, and LCDR3, wherein the HCDR1, HCDR2, and HCDR3 comprises an amino acid sequence of SEQ ID NOS:17018, 9721, and 9521, respectively and the LCDR1, LCDR2, and LCDR3 comprises an amino acid sequence of SEQ ID NOS: 10830, 9267, and 11335, respectively.

[1778] The disclosure describes an antibody, antigen binding fragment, or polypeptide comprising a heavy chain variable region having a HCDR1, HCDR2, and HCDR3, and a light chain variable region having a LCDR1, LCDR2, and LCDR3, wherein the HCDR1, HCDR2, and HCDR3 comprises an amino acid sequence of SEQ ID NOS:16786, 11035, and 10258, respectively and the LCDR1, LCDR2, and LCDR3 comprises an amino acid sequence of SEQ ID NOS:16659, 11900, and 11870, respectively.

[1779] The disclosure describes an antibody, antigen binding fragment, or polypeptide comprising a heavy chain variable region having a HCDR1, HCDR2, and HCDR3, and a light chain variable region having a LCDR1, LCDR2, and LCDR3, wherein the HCDR1, HCDR2, and HCDR3 comprises an amino acid sequence of SEQ ID NOS:17470, 16310, and 10292, respectively and the LCDR1, LCDR2, and LCDR3 comprises an amino acid sequence of SEQ ID NOS:16490, 16558, and 12545, respectively.

[1780] The disclosure describes an antibody, antigen binding fragment, or polypeptide comprising a heavy chain variable region having a HCDR1, HCDR2, and HCDR3, and a light chain variable region having a LCDR1, LCDR2, and LCDR3, wherein the HCDR1, HCDR2, and HCDR3 comprises an amino acid sequence of SEQ ID NOS: 17224, 9882, and 9589, respectively and the LCDR1, LCDR2, and LCDR3 comprises an amino acid sequence of SEQ ID NOS:15895, 10727, and 12877, respectively.

[1781] The disclosure describes an antibody, antigen binding fragment, or polypeptide comprising a heavy chain variable region having a HCDR1, HCDR2, and HCDR3, and a light chain variable region having a LCDR1, LCDR2, and LCDR3, wherein the HCDR1, HCDR2, and HCDR3 comprises an amino acid sequence of SEQ ID NOS:17263, 9740, and 10018, respectively and the LCDR1, LCDR2, and LCDR3 comprises an amino acid sequence of SEQ ID NOS: 15700, 3982, and 13017, respectively.

[1782] The disclosure describes an antibody, antigen binding fragment, or polypeptide comprising a heavy chain variable region having a HCDR1, HCDR2, and HCDR3, and a light chain variable region having a LCDR1, LCDR2, and LCDR3, wherein the HCDR1, HCDR2, and HCDR3 comprises an amino acid sequence of SEQ ID NOS:17619, 9764, and 10170, respectively and the LCDR1, LCDR2, and LCDR3 comprises an amino acid sequence of SEQ ID NOS:16640, 10747, and 13023, respectively.

[1783] The disclosure describes an antibody, antigen binding fragment, or polypeptide comprising a heavy chain variable region having a HCDR1, HCDR2, and HCDR3, and a light chain variable region having a LCDR1, LCDR2, and LCDR3, wherein the HCDR1, HCDR2, and HCDR3 comprises an amino acid sequence of SEQ ID NOS: 18637, 18369, and 6494, respectively and the LCDR1, LCDR2, and LCDR3 comprises an amino acid sequence of SEQ ID NOS:15751, 11144, and 12453, respectively.

[1784] The disclosure describes an antibody, antigen binding fragment, or polypeptide comprising a heavy chain variable region having a HCDR1, HCDR2, and HCDR3, and a light chain variable region having a LCDR1, LCDR2, and LCDR3, wherein the HCDR1, HCDR2, and HCDR3 comprises an amino acid sequence of SEQ ID NOS: 18637, 18375, and 6494, respectively and the LCDR1, LCDR2, and LCDR3 comprises an amino acid sequence of SEQ ID NOS:15750, 11144, and 12454, respectively.

[1785] The disclosure describes an antibody, antigen binding fragment, or polypeptide comprising a heavy chain variable region having a HCDR1, HCDR2, and HCDR3, and a light chain variable region having a LCDR1, LCDR2, and LCDR3, wherein the HCDR1, HCDR2, and HCDR3 comprises an amino acid sequence of SEQ ID NOS:16695, 18582, and 10522, respectively and the LCDR1, LCDR2, and LCDR3 comprises an amino acid sequence of SEQ ID NOS: 11788, 4420, and 12569, respectively.

[1786] The disclosure describes an antibody, antigen binding fragment, or polypeptide comprising a heavy chain variable region having a HCDR1, HCDR2, and HCDR3, and a light chain variable region having a LCDR1, LCDR2, and LCDR3, wherein the HCDR1, HCDR2, and HCDR3 comprises an amino acid sequence of SEQ ID NOS:11623, 9726, and 17117, respectively and the LCDR1, LCDR2, and LCDR3 comprises an amino acid sequence of SEQ ID NOS: 10830, 9267, and 11316, respectively.

[1787] The disclosure describes an antibody, antigen binding fragment, or polypeptide comprising a heavy chain variable region having a HCDR1, HCDR2, and HCDR3, and a light chain variable region having a LCDR1, LCDR2, and LCDR3, wherein the HCDR1, HCDR2, and HCDR3 comprises an amino acid sequence of SEQ ID NOS:6523, 16863, and 9458, respectively and the LCDR1, LCDR2, and LCDR3 comprises an amino acid sequence of SEQ ID NOS:16426, 10764, and 18197, respectively.

[1788] The disclosure describes an antibody, antigen binding fragment, or polypeptide comprising a heavy chain variable region having a HCDR1, HCDR2, and HCDR3, and a light chain variable region having a LCDR1, LCDR2, and LCDR3, wherein the HCDR1, HCDR2, and HCDR3 comprises an amino acid sequence of SEQ ID NOS:17440, 18397, and 11721, respectively and the LCDR1, LCDR2, and LCDR3 comprises an amino acid sequence of SEQ ID NOS:17929, 6312, and 17166, respectively.

[1789] The disclosure describes an antibody, antigen binding fragment, or polypeptide comprising a heavy chain variable region having a HCDR1, HCDR2, and HCDR3, and a light chain variable region having a LCDR1, LCDR2, and LCDR3, wherein the HCDR1, HCDR2, and HCDR3 comprises an amino acid sequence of SEQ ID NOS:11632, 9922, and 6106, respectively and the LCDR1, LCDR2, and LCDR3 comprises an amino acid sequence of SEQ ID NOS:10842, 18267, and 12372, respectively.

[1790] The disclosure describes an antibody, antigen binding fragment, or polypeptide comprising a heavy chain variable region having a HCDR1, HCDR2, and HCDR3, and a light chain variable region having a LCDR1, LCDR2, and LCDR3, wherein the HCDR1, HCDR2, and HCDR3 comprises an amino acid sequence of SEQ ID NOS:6557, 11021, and 9650, respectively and the LCDR1, LCDR2, and LCDR3 comprises an amino acid sequence of SEQ ID NOS: 15713, 3982, and 13002, respectively. having a LCDR1, LCDR2, and LCDR3, wherein the HCDR1, HCDR2, and HCDR3 comprises an amino acid sequence of SEQ ID NOS: 11651, 10016, and 7907, respectively and the LCDR1, LCDR2, and LCDR3 comprises an amino acid sequence of SEQ ID NOS: 15875, 3969, and 10452, respectively.

[1791] The disclosure describes an antibody, antigen binding fragment, or polypeptide comprising a heavy chain variable region having a HCDR1, HCDR2, and HCDR3, and a light chain variable region having a LCDR1, LCDR2, and LCDR3, wherein the HCDR1, HCDR2, and HCDR3 comprises an amino acid sequence of SEQ ID NOS:17609, 18016, and 11701, respectively and the LCDR1, LCDR2, and LCDR3 comprises an amino acid sequence of SEQ ID NOS: 15977, 9503, and 12775, respectively.

[1792] The disclosure describes an antibody, antigen binding fragment, or polypeptide comprising a heavy chain variable region having a HCDR1, HCDR2, and HCDR3, and a light chain variable region having a LCDR1, LCDR2, and LCDR3, wherein the HCDR1, HCDR2, and HCDR3 comprises an amino acid sequence of SEQ ID NOS:5997, 10586, and 9201, respectively and the LCDR1, LCDR2, and LCDR3 comprises an amino acid sequence of SEQ ID NOS: 15756, 3979, and 12475, respectively.

[1793] The disclosure describes an antibody, antigen binding fragment, or polypeptide comprising a heavy chain variable region having a HCDR1, HCDR2, and HCDR3, and a light chain variable region having a LCDR1, LCDR2, and LCDR3, wherein the HCDR1, HCDR2, and HCDR3 comprises an amino acid sequence of SEQ ID NOS:17269, 4663, and 17054, respectively and the LCDR1, LCDR2, and LCDR3 comprises an amino acid sequence of SEQ ID NOS: 15677, 3982, and 12100, respectively.

[1794] The disclosure describes an antibody, antigen binding fragment, or polypeptide comprising a heavy chain variable region having a HCDR1, HCDR2, and HCDR3, and a light chain variable region having a LCDR1, LCDR2, and LCDR3, wherein the HCDR1, HCDR2, and HCDR3 comprises an amino acid sequence of SEQ ID NOS: 11647, 18367, and 4588, respectively and the LCDR1, LCDR2, and LCDR3 comprises an amino acid sequence of SEQ ID NOS:16112, 10697, and 12831, respectively.

[1795] The disclosure describes an antibody, antigen binding fragment, or polypeptide comprising a heavy chain variable region having a HCDR1, HCDR2, and HCDR3, and a light chain variable region having a LCDR1, LCDR2, and LCDR3, wherein the HCDR1, HCDR2, and HCDR3 comprises an amino acid sequence of SEQ ID NOS: 11642, 18551, and 4049, respectively and the LCDR1, LCDR2, and LCDR3 comprises an amino acid sequence of SEQ ID NOS: 16036, 9503, and 12778, respectively.

[1796] The disclosure describes an antibody, antigen binding fragment, or polypeptide comprising a heavy chain variable region having a HCDR1, HCDR2, and HCDR3, and a light chain variable region having a LCDR1, LCDR2, and LCDR3, wherein the HCDR1, HCDR2, and HCDR3 comprises an amino acid sequence of SEQ ID NOS:17636, 9845, and 11718, respectively and the LCDR1, LCDR2, and LCDR3 comprises an amino acid sequence of SEQ ID NOS:16428, 10764, and 11225, respectively.

[1797] The disclosure describes an antibody, antigen binding fragment, or polypeptide comprising a heavy chain variable region having a HCDR1, HCDR2, and HCDR3, and a light chain variable region having a LCDR1, LCDR2, and LCDR3, wherein the HCDR1, HCDR2, and HCDR3 comprises an amino acid sequence of SEQ ID NOS: 17270, 17799, and 6772, respectively and the LCDR1, LCDR2, and LCDR3 comprises an amino acid sequence of SEQ ID NOS: 16390, 9503, and 12886, respectively.

[1798] The disclosure describes an antibody, antigen binding fragment, or polypeptide comprising a heavy chain variable region having a HCDR1, HCDR2, and HCDR3, and a light chain variable region having a LCDR1, LCDR2, and LCDR3, wherein the HCDR1, HCDR2, and HCDR3 comprises an amino acid sequence of SEQ ID NOS: 10948, 17795, and 9424, respectively and the LCDR1, LCDR2, and LCDR3 comprises an amino acid sequence of SEQ ID NOS:15933, 10738, and 12455, respectively.

[1799] The disclosure describes an antibody, antigen binding fragment, or polypeptide comprising a heavy chain variable region having a HCDR1, HCDR2, and HCDR3, and a light chain variable region having a LCDR1, LCDR2, and LCDR3, wherein the HCDR1, HCDR2, and HCDR3 comprises an amino acid sequence of SEQ ID NOS: 17634, 16923, and 9547, respectively and the LCDR1, LCDR2, and LCDR3 comprises an amino acid sequence of SEQ ID NOS:16067, 4425, and 12419, respectively.

[1800] The disclosure describes an antibody, antigen binding fragment, or polypeptide comprising a heavy chain variable region having a HCDR1, HCDR2, and HCDR3, and a light chain variable region having a LCDR1, LCDR2, and LCDR3, wherein the HCDR1, HCDR2, and HCDR3 comprises an amino acid sequence of SEQ ID NOS: 10366, 16270, and 9203, respectively and the LCDR1, LCDR2, and LCDR3 comprises an amino acid sequence of SEQ ID NOS: 15706, 3979, and 11980, respectively.

[1801] The disclosure describes an antibody, antigen binding fragment, or polypeptide comprising a heavy chain variable region having a HCDR1, HCDR2, and HCDR3, and a light chain variable region having a LCDR1, LCDR2, and LCDR3, wherein the HCDR1, HCDR2, and HCDR3 comprises an amino acid sequence of SEQ ID NOS:17274, 16888, and 16959, respectively and the LCDR1, LCDR2, and LCDR3 comprises an amino acid sequence of SEQ ID NOS: 16086, 4436, and 12366, respectively.

[1802] The disclosure describes an antibody, antigen binding fragment, or polypeptide comprising a heavy chain variable region having a HCDR1, HCDR2, and HCDR3, and a light chain variable region having a LCDR1, LCDR2, and LCDR3, wherein the HCDR1, HCDR2, and HCDR3 comprises an amino acid sequence of SEQ ID NOS:17530, 17778, and 11720, respectively and the LCDR1, LCDR2, and LCDR3 comprises an amino acid sequence of SEQ ID NOS: 15895, 10727, and 12863, respectively.

[1803] The disclosure describes an antibody, antigen binding fragment, or polypeptide comprising a heavy chain variable region having a HCDR1, HCDR2, and HCDR3, and a light chain variable region having a LCDR1, LCDR2, and LCDR3, wherein the HCDR1, HCDR2, and HCDR3 comprises an amino acid sequence of SEQ ID NOS:16778, 17995, and 18247, respectively and the LCDR1, LCDR2, and LCDR3 comprises an amino acid sequence of SEQ ID NOS:17959, 6307, and 17197, respectively.

[1804] The disclosure describes an antibody, antigen binding fragment, or polypeptide comprising a heavy chain variable region having a HCDR1, HCDR2, and HCDR3, and a light chain variable region having a LCDR1, LCDR2, and LCDR3, wherein the HCDR1, HCDR2, and HCDR3 comprises an amino acid sequence of SEQ ID NOS:17845, 17744, and 10148, respectively and the LCDR1, LCDR2, and LCDR3 comprises an amino acid sequence of SEQ ID NOS:16637, 16164, and 13027, respectively.

[1805] The disclosure describes an antibody, antigen binding fragment, or polypeptide comprising a heavy chain variable region having a HCDR1, HCDR2, and HCDR3, and a light chain variable region having a LCDR1, LCDR2, and LCDR3, wherein the HCDR1, HCDR2, and HCDR3 comprises an amino acid sequence of SEQ ID NOS: 16518, 18026, and 4584, respectively and the LCDR1, LCDR2, and LCDR3 comprises an amino acid sequence of SEQ ID NOS:11944, 10020, and 11583, respectively.

[1806] The disclosure describes an antibody, antigen binding fragment, or polypeptide comprising a heavy chain variable region having a HCDR1, HCDR2, and HCDR3, and a light chain variable region having a LCDR1, LCDR2, and LCDR3, wherein the HCDR1, HCDR2, and HCDR3 comprises an amino acid sequence of SEQ ID NOS:17229, 18041, and 17722, respectively and the LCDR1, LCDR2, and LCDR3 comprises an amino acid sequence of SEQ ID NOS: 16685, 16584, and 3997, respectively.

[1807] The disclosure describes an antibody, antigen binding fragment, or polypeptide comprising a heavy chain variable region having a HCDR1, HCDR2, and HCDR3, and a light chain variable region having a LCDR1, LCDR2, and LCDR3, wherein the HCDR1, HCDR2, and HCDR3 comprises an amino acid sequence of SEQ ID NOS:16165, 11607, and 10427, respectively and the LCDR1, LCDR2, and LCDR3 comprises an amino acid sequence of SEQ ID NOS: 15669, 17867, and 12397, respectively.

[1808] The disclosure describes an antibody, antigen binding fragment, or polypeptide comprising a heavy chain variable region having a HCDR1, HCDR2, and HCDR3, and a light chain variable region having a LCDR1, LCDR2, and LCDR3, wherein the HCDR1, HCDR2, and HCDR3 comprises an amino acid sequence of SEQ ID NOS: 11540, 16323, and 9561, respectively and the LCDR1, LCDR2, and LCDR3 comprises an amino acid sequence of SEQ ID NOS:16675, 12300, and 11883, respectively.

[1809] The disclosure describes an antibody, antigen binding fragment, or polypeptide comprising a heavy chain variable region having a HCDR1, HCDR2, and HCDR3, and a light chain variable region having a LCDR1, LCDR2, and LCDR3, wherein the HCDR1, HCDR2, and HCDR3 comprises an amino acid sequence of SEQ ID NOS:11673, 10571, and 10965, respectively and the LCDR1, LCDR2, and LCDR3 comprises an amino acid sequence of SEQ ID NOS: 16398, 10967, and 11349, respectively. having a LCDR1, LCDR2, and LCDR3, wherein the HCDR1, HCDR2, and HCDR3 comprises an amino acid sequence of SEQ ID NOS:17655, 6779, and 12041, respectively and the LCDR1, LCDR2, and LCDR3 comprises an amino acid sequence of SEQ ID NOS: 15713, 3982, and 12363, respectively.

[1810] The disclosure describes an antibody, antigen binding fragment, or polypeptide comprising a heavy chain variable region having a HCDR1, HCDR2, and HCDR3, and a light chain variable region having a LCDR1, LCDR2, and LCDR3, wherein the HCDR1, HCDR2, and HCDR3 comprises an amino acid sequence of SEQ ID NOS:10368, 6783, and 16366, respectively and the LCDR1, LCDR2, and LCDR3 comprises an amino acid sequence of SEQ ID NOS: 17972, 6318, and 17200, respectively.

[1811] The disclosure describes an antibody, antigen binding fragment, or polypeptide comprising a heavy chain variable region having a HCDR1, HCDR2, and HCDR3, and a light chain variable region having a LCDR1, LCDR2, and LCDR3, wherein the HCDR1, HCDR2, and HCDR3 comprises an amino acid sequence of SEQ ID NOS: 17475, 16888, and 9649, respectively and the LCDR1, LCDR2, and LCDR3 comprises an amino acid sequence of SEQ ID NOS:16151, 9494, and 12774, respectively.

[1812] The disclosure describes an antibody, antigen binding fragment, or polypeptide comprising a heavy chain variable region having a HCDR1, HCDR2, and HCDR3, and a light chain variable region having a LCDR1, LCDR2, and LCDR3, wherein the HCDR1, HCDR2, and HCDR3 comprises an amino acid sequence of SEQ ID NOS: 11554, 18417, and 4252, respectively and the LCDR1, LCDR2, and LCDR3 comprises an amino acid sequence of SEQ ID NOS: 16724, 9549, and 3994, respectively.

[1813] The disclosure describes an antibody, antigen binding fragment, or polypeptide comprising a heavy chain variable region having a HCDR1, HCDR2, and HCDR3, and a light chain variable region having a LCDR1, LCDR2, and LCDR3, wherein the HCDR1, HCDR2, and HCDR3 comprises an amino acid sequence of SEQ ID NOS:16819, 11485, and 16982, respectively and the LCDR1, LCDR2, and LCDR3 comprises an amino acid sequence of SEQ ID NOS: 15666, 10750, and 12740, respectively.

[1814] The disclosure describes an antibody, antigen binding fragment, or polypeptide comprising a heavy chain variable region having a HCDR1, HCDR2, and HCDR3, and a light chain variable region having a LCDR1, LCDR2, and LCDR3, wherein the HCDR1, HCDR2, and HCDR3 comprises an amino acid sequence of SEQ ID NOS: 17441, 18436, and 5970, respectively and the LCDR1, LCDR2, and LCDR3 comprises an amino acid sequence of SEQ ID NOS: 15648, 3982, and 12402, respectively.

[1815] The disclosure describes an antibody, antigen binding fragment, or polypeptide comprising a heavy chain variable region having a HCDR1, HCDR2, and HCDR3, and a light chain variable region having a LCDR1, LCDR2, and LCDR3, wherein the HCDR1, HCDR2, and HCDR3 comprises an amino acid sequence of SEQ ID NOS: 11650, 10557, and 7896, respectively and the LCDR1, LCDR2, and LCDR3 comprises an amino acid sequence of SEQ ID NOS:15839, 10727, and 12601, respectively.

[1816] The disclosure describes an antibody, antigen binding fragment, or polypeptide comprising a heavy chain variable region having a HCDR1, HCDR2, and HCDR3, and a light chain variable region having a LCDR1, LCDR2, and LCDR3, wherein the HCDR1, HCDR2, and HCDR3 comprises an amino acid sequence of SEQ ID NOS:17272, 18342, and 17901, respectively and the LCDR1, LCDR2, and LCDR3 comprises an amino acid sequence of SEQ ID NOS: 15704, 3969, and 11088, respectively.

[1817] The disclosure describes an antibody, antigen binding fragment, or polypeptide comprising a heavy chain variable region having a HCDR1, HCDR2, and HCDR3, and a light chain variable region having a LCDR1, LCDR2, and LCDR3, wherein the HCDR1, HCDR2, and HCDR3 comprises an amino acid sequence of SEQ ID NOS:6671, 9975, and 4604, respectively and the LCDR1, LCDR2, and LCDR3 comprises an amino acid sequence of SEQ ID NOS: 15937, 9951, and 12855, respectively.

[1818] The disclosure describes an antibody, antigen binding fragment, or polypeptide comprising a heavy chain variable region having a HCDR1, HCDR2, and HCDR3, and a light chain variable region having a LCDR1, LCDR2, and LCDR3, wherein the HCDR1, HCDR2, and HCDR3 comprises an amino acid sequence of SEQ ID NOS:17127, 18032, and 16282, respectively and the LCDR1, LCDR2, and LCDR3 comprises an amino acid sequence of SEQ ID NOS:10866, 18278, and 12357, respectively.

[1819] The disclosure describes an antibody, antigen binding fragment, or polypeptide comprising a heavy chain variable region having a HCDR1, HCDR2, and HCDR3, and a light chain variable region having a LCDR1, LCDR2, and LCDR3, wherein the HCDR1, HCDR2, and HCDR3 comprises an amino acid sequence of SEQ ID NOS:17064, 16948, and 10372, respectively and the LCDR1, LCDR2, and LCDR3 comprises an amino acid sequence of SEQ ID NOS: 15887, 9503, and 12583, respectively.

[1820] The disclosure describes an antibody, antigen binding fragment, or polypeptide comprising a heavy chain variable region having a HCDR1, HCDR2, and HCDR3, and a light chain variable region having a LCDR1, LCDR2, and LCDR3, wherein the HCDR1, HCDR2, and HCDR3 comprises an amino acid sequence of SEQ ID NOS:17064, 10017, and 10373, respectively and the LCDR1, LCDR2, and LCDR3 comprises an amino acid sequence of SEQ ID NOS: 15887, 9503, and 12583, respectively.

[1821] The disclosure describes an antibody, antigen binding fragment, or polypeptide comprising a heavy chain variable region having a HCDR1, HCDR2, and HCDR3, and a light chain variable region having a LCDR1, LCDR2, and LCDR3, wherein the HCDR1, HCDR2, and HCDR3 comprises an amino acid sequence of SEQ ID NOS:6509, 9952, and 4174, respectively and the LCDR1, LCDR2, and LCDR3 comprises an amino acid sequence of SEQ ID NOS: 10701, 9503, and 12352, respectively.

[1822] The disclosure describes an antibody, antigen binding fragment, or polypeptide comprising a heavy chain variable region having a HCDR1, HCDR2, and HCDR3, and a light chain variable region having a LCDR1, LCDR2, and LCDR3, wherein the HCDR1, HCDR2, and HCDR3 comprises an amino acid sequence of SEQ ID NOS:16518, 18231, and 18212, respectively and the LCDR1, LCDR2, and LCDR3 comprises an amino acid sequence of SEQ ID NOS:15861, 10743, and 12608, respectively.

[1823] The disclosure describes an antibody, antigen binding fragment, or polypeptide comprising a heavy chain variable region having a HCDR1, HCDR2, and HCDR3, and a light chain variable region having a LCDR1, LCDR2, and LCDR3, wherein the HCDR1, HCDR2, and HCDR3 comprises an amino acid sequence of SEQ ID NOS: 17270, 18302, and 6600, respectively and the LCDR1, LCDR2, and LCDR3 comprises an amino acid sequence of SEQ ID NOS: 16045, 9503, and 12787, respectively.

[1824] The disclosure describes an antibody, antigen binding fragment, or polypeptide comprising a heavy chain variable region having a HCDR1, HCDR2, and HCDR3, and a light chain variable region having a LCDR1, LCDR2, and LCDR3, wherein the HCDR1, HCDR2, and HCDR3 comprises an amino acid sequence of SEQ ID NOS:10368, 6782, and 13015, respectively and the LCDR1, LCDR2, and LCDR3 comprises an amino acid sequence of SEQ ID NOS: 16061, 9494, and 12671, respectively.

[1825] The disclosure describes an antibody, antigen binding fragment, or polypeptide comprising a heavy chain variable region having a HCDR1, HCDR2, and HCDR3, and a light chain variable region having a LCDR1, LCDR2, and LCDR3, wherein the HCDR1, HCDR2, and HCDR3 comprises an amino acid sequence of SEQ ID NOS:6511, 9404, and 4495, respectively and the LCDR1, LCDR2, and LCDR3 comprises an amino acid sequence of SEQ ID NOS: 15894, 4425, and 11101, respectively.

[1826] The disclosure describes an antibody, antigen binding fragment, or polypeptide comprising a heavy chain variable region having a HCDR1, HCDR2, and HCDR3, and a light chain variable region having a LCDR1, LCDR2, and LCDR3, wherein the HCDR1, HCDR2, and HCDR3 comprises an amino acid sequence of SEQ ID NOS:10935, 9713, and 10158, respectively and the LCDR1, LCDR2, and LCDR3 comprises an amino acid sequence of SEQ ID NOS: 15701, 3982, and 12303, respectively.

[1827] The disclosure describes an antibody, antigen binding fragment, or polypeptide comprising a heavy chain variable region having a HCDR1, HCDR2, and HCDR3, and a light chain variable region having a LCDR1, LCDR2, and LCDR3, wherein the HCDR1, HCDR2, and HCDR3 comprises an amino acid sequence of SEQ ID NOS:6520, 18419, and 10156, respectively and the LCDR1, LCDR2, and LCDR3 comprises an amino acid sequence of SEQ ID NOS:15651, 6309, and 12416, respectively.

[1828] The disclosure describes an antibody, antigen binding fragment, or polypeptide comprising a heavy chain variable region having a HCDR1, HCDR2, and HCDR3, and a light chain variable region having a LCDR1, LCDR2, and LCDR3, wherein the HCDR1, HCDR2, and HCDR3 comprises an amino acid sequence of SEQ ID NOS:9579, 16268, and 6112, respectively and the LCDR1, LCDR2, and LCDR3 comprises an amino acid sequence of SEQ ID NOS: 15687, 3954, and 12376, respectively. having a LCDR1, LCDR2, and LCDR3, wherein the HCDR1, HCDR2, and HCDR3 comprises an amino acid sequence of SEQ ID NOS: 11680, 18499, and 4188, respectively and the LCDR1, LCDR2, and LCDR3 comprises an amino acid sequence of SEQ ID NOS:10863, 18272, and 12592, respectively.

[1829] The disclosure describes an antibody, antigen binding fragment, or polypeptide comprising a heavy chain variable region having a HCDR1, HCDR2, and HCDR3, and a light chain variable region having a LCDR1, LCDR2, and LCDR3, wherein the HCDR1, HCDR2, and HCDR3 comprises an amino acid sequence of SEQ ID NOS:17853, 11616, and 13014, respectively and the LCDR1, LCDR2, and LCDR3 comprises an amino acid sequence of SEQ ID NOS: 16642, 10749, and 13331, respectively.

[1830] The disclosure describes an antibody, antigen binding fragment, or polypeptide comprising a heavy chain variable region having a HCDR1, HCDR2, and HCDR3, and a light chain variable region having a LCDR1, LCDR2, and LCDR3, wherein the HCDR1, HCDR2, and HCDR3 comprises an amino acid sequence of SEQ ID NOS:11638, 16852, and 18096, respectively and the LCDR1, LCDR2, and LCDR3 comprises an amino acid sequence of SEQ ID NOS:15665, 3982, and 13018, respectively.

[1831] The disclosure describes an antibody, antigen binding fragment, or polypeptide comprising a heavy chain variable region having a HCDR1, HCDR2, and HCDR3, and a light chain variable region having a LCDR1, LCDR2, and LCDR3, wherein the HCDR1, HCDR2, and HCDR3 comprises an amino acid sequence of SEQ ID NOS: 11650, 10558, and 7897, respectively and the LCDR1, LCDR2, and LCDR3 comprises an amino acid sequence of SEQ ID NOS:15839, 10727, and 12601, respectively.

[1832] The disclosure describes an antibody, antigen binding fragment, or polypeptide comprising a heavy chain variable region having a HCDR1, HCDR2, and HCDR3, and a light chain variable region having a LCDR1, LCDR2, and LCDR3, wherein the HCDR1, HCDR2, and HCDR3 comprises an amino acid sequence of SEQ ID NOS: 10365, 16271, and 9200, respectively and the LCDR1, LCDR2, and LCDR3 comprises an amino acid sequence of SEQ ID NOS: 15713, 3949, and 11088, respectively.

[1833] The disclosure describes an antibody, antigen binding fragment, or polypeptide comprising a heavy chain variable region having a HCDR1, HCDR2, and HCDR3, and a light chain variable region having a LCDR1, LCDR2, and LCDR3, wherein the HCDR1, HCDR2, and HCDR3 comprises an amino acid sequence of SEQ ID NOS:4476, 10567, and 11048, respectively and the LCDR1, LCDR2, and LCDR3 comprises an amino acid sequence of SEQ ID NOS:15862, 10727, and 12009, respectively.

[1834] The disclosure describes an antibody, antigen binding fragment, or polypeptide comprising a heavy chain variable region having a HCDR1, HCDR2, and HCDR3, and a light chain variable region having a LCDR1, LCDR2, and LCDR3, wherein the HCDR1, HCDR2, and HCDR3 comprises an amino acid sequence of SEQ ID NOS: 11684, 16267, and 7920, respectively and the LCDR1, LCDR2, and LCDR3 comprises an amino acid sequence of SEQ ID NOS: 15658, 9498, and 12377, respectively.

[1835] The disclosure describes an antibody, antigen binding fragment, or polypeptide comprising a heavy chain variable region having a HCDR1, HCDR2, and HCDR3, and a light chain variable region having a LCDR1, LCDR2, and LCDR3, wherein the HCDR1, HCDR2, and HCDR3 comprises an amino acid sequence of SEQ ID NOS:17474, 10761, and 16590, respectively and the LCDR1, LCDR2, and LCDR3 comprises an amino acid sequence of SEQ ID NOS: 16061, 9494, and 12624, respectively.

[1836] The disclosure describes an antibody, antigen binding fragment, or polypeptide comprising a heavy chain variable region having a HCDR1, HCDR2, and HCDR3, and a light chain variable region having a LCDR1, LCDR2, and LCDR3, wherein the HCDR1, HCDR2, and HCDR3 comprises an amino acid sequence of SEQ ID NOS:10337, 16238, and 17041, respectively and the LCDR1, LCDR2, and LCDR3 comprises an amino acid sequence of SEQ ID NOS:16429, 10926, and 11275, respectively.

[1837] The disclosure describes an antibody, antigen binding fragment, or polypeptide comprising a heavy chain variable region having a HCDR1, HCDR2, and HCDR3, and a light chain variable region having a LCDR1, LCDR2, and LCDR3, wherein the HCDR1, HCDR2, and HCDR3 comprises an amino acid sequence of SEQ ID NOS: 16529, 10403, and 6051, respectively and the LCDR1, LCDR2, and LCDR3 comprises an amino acid sequence of SEQ ID NOS:15791, 9501, and 12772, respectively.

[1838] The disclosure describes an antibody, antigen binding fragment, or polypeptide comprising a heavy chain variable region having a HCDR1, HCDR2, and HCDR3, and a light chain variable region having a LCDR1, LCDR2, and LCDR3, wherein the HCDR1, HCDR2, and HCDR3 comprises an amino acid sequence of SEQ ID NOS: 17441, 18434, and 5972, respectively and the LCDR1, LCDR2, and LCDR3 comprises an amino acid sequence of SEQ ID NOS: 15650, 3982, and 12538, respectively.

[1839] The disclosure describes an antibody, antigen binding fragment, or polypeptide comprising a heavy chain variable region having a HCDR1, HCDR2, and HCDR3, and a light chain variable region having a LCDR1, LCDR2, and LCDR3, wherein the HCDR1, HCDR2, and HCDR3 comprises an amino acid sequence of SEQ ID NOS:6500, 9967, and 4606, respectively and the LCDR1, LCDR2, and LCDR3 comprises an amino acid sequence of SEQ ID NOS: 15729, 9503, and 12750, respectively.

[1840] The disclosure describes an antibody, antigen binding fragment, or polypeptide comprising a heavy chain variable region having a HCDR1, HCDR2, and HCDR3, and a light chain variable region having a LCDR1, LCDR2, and LCDR3, wherein the HCDR1, HCDR2, and HCDR3 comprises an amino acid sequence of SEQ ID NOS: 11561, 17737, and 9651, respectively and the LCDR1, LCDR2, and LCDR3 comprises an amino acid sequence of SEQ ID NOS: 17959, 6331, and 4352, respectively.

[1841] The disclosure describes an antibody, antigen binding fragment, or polypeptide comprising a heavy chain variable region having a HCDR1, HCDR2, and HCDR3, and a light chain variable region having a LCDR1, LCDR2, and LCDR3, wherein the HCDR1, HCDR2, and HCDR3 comprises an amino acid sequence of SEQ ID NOS:17534, 10568, and 16153, respectively and the LCDR1, LCDR2, and LCDR3 comprises an amino acid sequence of SEQ ID NOS: 15999, 4425, and 12434, respectively.

[1842] The disclosure describes an antibody, antigen binding fragment, or polypeptide comprising a heavy chain variable region having a HCDR1, HCDR2, and HCDR3, and a light chain variable region having a LCDR1, LCDR2, and LCDR3, wherein the HCDR1, HCDR2, and HCDR3 comprises an amino acid sequence of SEQ ID NOS: 17856, 16319, and 9202, respectively and the LCDR1, LCDR2, and LCDR3 comprises an amino acid sequence of SEQ ID NOS: 16045, 9503, and 12782, respectively.

[1843] The disclosure describes an antibody, antigen binding fragment, or polypeptide comprising a heavy chain variable region having a HCDR1, HCDR2, and HCDR3, and a light chain variable region having a LCDR1, LCDR2, and LCDR3, wherein the HCDR1, HCDR2, and HCDR3 comprises an amino acid sequence of SEQ ID NOS:6465, 6787, and 16343, respectively and the LCDR1, LCDR2, and LCDR3 comprises an amino acid sequence of SEQ ID NOS:16694, 11903, and 11861, respectively.

[1844] The disclosure describes an antibody, antigen binding fragment, or polypeptide comprising a heavy chain variable region having a HCDR1, HCDR2, and HCDR3, and a light chain variable region having a LCDR1, LCDR2, and LCDR3, wherein the HCDR1, HCDR2, and HCDR3 comprises an amino acid sequence of SEQ ID NOS:17869, 16255, and 16370, respectively and the LCDR1, LCDR2, and LCDR3 comprises an amino acid sequence of SEQ ID NOS:9634, 16330, and 10507, respectively.

[1845] The disclosure describes an antibody, antigen binding fragment, or polypeptide comprising a heavy chain variable region having a HCDR1, HCDR2, and HCDR3, and a light chain variable region having a LCDR1, LCDR2, and LCDR3, wherein the HCDR1, HCDR2, and HCDR3 comprises an amino acid sequence of SEQ ID NOS:16593, 16496, and 17851, respectively and the LCDR1, LCDR2, and LCDR3 comprises an amino acid sequence of SEQ ID NOS:15895, 10731, and 12741, respectively.

[1846] The disclosure describes an antibody, antigen binding fragment, or polypeptide comprising a heavy chain variable region having a HCDR1, HCDR2, and HCDR3, and a light chain variable region having a LCDR1, LCDR2, and LCDR3, wherein the HCDR1, HCDR2, and HCDR3 comprises an amino acid sequence of SEQ ID NOS:6576, 16506, and 9596, respectively and the LCDR1, LCDR2, and LCDR3 comprises an amino acid sequence of SEQ ID NOS:17971, 6312, and 4354, respectively.

[1847] The disclosure describes an antibody, antigen binding fragment, or polypeptide comprising a heavy chain variable region having a HCDR1, HCDR2, and HCDR3, and a light chain variable region having a LCDR1, LCDR2, and LCDR3, wherein the HCDR1, HCDR2, and HCDR3 comprises an amino acid sequence of SEQ ID NOS: 11650, 4260, and 4275, respectively and the LCDR1, LCDR2, and LCDR3 comprises an amino acid sequence of SEQ ID NOS: 16648, 6628, and 18619, respectively. having a LCDR1, LCDR2, and LCDR3, wherein the HCDR1, HCDR2, and HCDR3 comprises an amino acid sequence of SEQ ID NOS:17263, 9940, and 10150, respectively and the LCDR1, LCDR2, and LCDR3 comprises an amino acid sequence of SEQ ID NOS: 15935, 9494, and 12647, respectively.

[1848] The disclosure describes an antibody, antigen binding fragment, or polypeptide comprising a heavy chain variable region having a HCDR1, HCDR2, and HCDR3, and a light chain variable region having a LCDR1, LCDR2, and LCDR3, wherein the HCDR1, HCDR2, and HCDR3 comprises an amino acid sequence of SEQ ID NOS: 11689, 18568, and 4189, respectively and the LCDR1, LCDR2, and LCDR3 comprises an amino acid sequence of SEQ ID NOS:10791, 18256, and 12975, respectively.

[1849] The disclosure describes an antibody, antigen binding fragment, or polypeptide comprising a heavy chain variable region having a HCDR1, HCDR2, and HCDR3, and a light chain variable region having a LCDR1, LCDR2, and LCDR3, wherein the HCDR1, HCDR2, and HCDR3 comprises an amino acid sequence of SEQ ID NOS: 17437, 18348, and 7857, respectively and the LCDR1, LCDR2, and LCDR3 comprises an amino acid sequence of SEQ ID NOS: 15693, 3982, and 12402, respectively.

[1850] The disclosure describes an antibody, antigen binding fragment, or polypeptide comprising a heavy chain variable region having a HCDR1, HCDR2, and HCDR3, and a light chain variable region having a LCDR1, LCDR2, and LCDR3, wherein the HCDR1, HCDR2, and HCDR3 comprises an amino acid sequence of SEQ ID NOS: 11630, 18244, and 9346, respectively and the LCDR1, LCDR2, and LCDR3 comprises an amino acid sequence of SEQ ID NOS:16419, 18510, and 11262, respectively.

[1851] The disclosure describes an antibody, antigen binding fragment, or polypeptide comprising a heavy chain variable region having a HCDR1, HCDR2, and HCDR3, and a light chain variable region having a LCDR1, LCDR2, and LCDR3, wherein the HCDR1, HCDR2, and HCDR3 comprises an amino acid sequence of SEQ ID NOS:17143, 16827, and 10954, respectively and the LCDR1, LCDR2, and LCDR3 comprises an amino acid sequence of SEQ ID NOS: 11948, 10024, and 11587, respectively.

[1852] The disclosure describes an antibody, antigen binding fragment, or polypeptide comprising a heavy chain variable region having a HCDR1, HCDR2, and HCDR3, and a light chain variable region having a LCDR1, LCDR2, and LCDR3, wherein the HCDR1, HCDR2, and HCDR3 comprises an amino acid sequence of SEQ ID NOS: 10935, 16229, and 9510, respectively and the LCDR1, LCDR2, and LCDR3 comprises an amino acid sequence of SEQ ID NOS:16428, 10764, and 11226, respectively.

[1853] The disclosure describes an antibody, antigen binding fragment, or polypeptide comprising a heavy chain variable region having a HCDR1, HCDR2, and HCDR3, and a light chain variable region having a LCDR1, LCDR2, and LCDR3, wherein the HCDR1, HCDR2, and HCDR3 comprises an amino acid sequence of SEQ ID NOS:17618, 16291, and 11131, respectively and the LCDR1, LCDR2, and LCDR3 comprises an amino acid sequence of SEQ ID NOS: 16683, 16328, and 4007, respectively.

[1854] The disclosure describes an antibody, antigen binding fragment, or polypeptide comprising a heavy chain variable region having a HCDR1, HCDR2, and HCDR3, and a light chain variable region having a LCDR1, LCDR2, and LCDR3, wherein the HCDR1, HCDR2, and HCDR3 comprises an amino acid sequence of SEQ ID NOS:6530, 16935, and 4225, respectively and the LCDR1, LCDR2, and LCDR3 comprises an amino acid sequence of SEQ ID NOS: 16056, 9503, and 12725, respectively.

[1855] The disclosure describes an antibody, antigen binding fragment, or polypeptide comprising a heavy chain variable region having a HCDR1, HCDR2, and HCDR3, and a light chain variable region having a LCDR1, LCDR2, and LCDR3, wherein the HCDR1, HCDR2, and HCDR3 comprises an amino acid sequence of SEQ ID NOS: 10935, 16296, and 6691, respectively and the LCDR1, LCDR2, and LCDR3 comprises an amino acid sequence of SEQ ID NOS:9483, 4417, and 10470, respectively.

[1856] The disclosure describes an antibody, antigen binding fragment, or polypeptide comprising a heavy chain variable region having a HCDR1, HCDR2, and HCDR3, and a light chain variable region having a LCDR1, LCDR2, and LCDR3, wherein the HCDR1, HCDR2, and HCDR3 comprises an amino acid sequence of SEQ ID NOS: 16802, 10300, and 4203, respectively and the LCDR1, LCDR2, and LCDR3 comprises an amino acid sequence of SEQ ID NOS:18089, 18132, and 13618, respectively.

[1857] The disclosure describes an antibody, antigen binding fragment, or polypeptide comprising a heavy chain variable region having a HCDR1, HCDR2, and HCDR3, and a light chain variable region having a LCDR1, LCDR2, and LCDR3, wherein the HCDR1, HCDR2, and HCDR3 comprises an amino acid sequence of SEQ ID NOS: 10033, 16265, and 7906, respectively and the LCDR1, LCDR2, and LCDR3 comprises an amino acid sequence of SEQ ID NOS: 15697, 9498, and 11980, respectively.

[1858] The disclosure describes an antibody, antigen binding fragment, or polypeptide comprising a heavy chain variable region having a HCDR1, HCDR2, and HCDR3, and a light chain variable region having a LCDR1, LCDR2, and LCDR3, wherein the HCDR1, HCDR2, and HCDR3 comprises an amino acid sequence of SEQ ID NOS:17064, 11528, and 17585, respectively and the LCDR1, LCDR2, and LCDR3 comprises an amino acid sequence of SEQ ID NOS: 10785, 9272, and 11233, respectively.

[1859] The disclosure describes an antibody, antigen binding fragment, or polypeptide comprising a heavy chain variable region having a HCDR1, HCDR2, and HCDR3, and a light chain variable region having a LCDR1, LCDR2, and LCDR3, wherein the HCDR1, HCDR2, and HCDR3 comprises an amino acid sequence of SEQ ID NOS: 17265, 17745, and 6063, respectively and the LCDR1, LCDR2, and LCDR3 comprises an amino acid sequence of SEQ ID NOS: 15642, 9503, and 12775, respectively.

[1860] The disclosure describes an antibody, antigen binding fragment, or polypeptide comprising a heavy chain variable region having a HCDR1, HCDR2, and HCDR3, and a light chain variable region having a LCDR1, LCDR2, and LCDR3, wherein the HCDR1, HCDR2, and HCDR3 comprises an amino acid sequence of SEQ ID NOS:17838, 16254, and 10217, respectively and the LCDR1, LCDR2, and LCDR3 comprises an amino acid sequence of SEQ ID NOS: 15799, 10731, and 11108, respectively.

[1861] The disclosure describes an antibody, antigen binding fragment, or polypeptide comprising a heavy chain variable region having a HCDR1, HCDR2, and HCDR3, and a light chain variable region having a LCDR1, LCDR2, and LCDR3, wherein the HCDR1, HCDR2, and HCDR3 comprises an amino acid sequence of SEQ ID NOS: 16198, 10043, and 9508, respectively and the LCDR1, LCDR2, and LCDR3 comprises an amino acid sequence of SEQ ID NOS: 16089, 9494, and 12561, respectively.

[1862] The disclosure describes an antibody, antigen binding fragment, or polypeptide comprising a heavy chain variable region having a HCDR1, HCDR2, and HCDR3, and a light chain variable region having a LCDR1, LCDR2, and LCDR3, wherein the HCDR1, HCDR2, and HCDR3 comprises an amino acid sequence of SEQ ID NOS:11404, 10041, and 11049, respectively and the LCDR1, LCDR2, and LCDR3 comprises an amino acid sequence of SEQ ID NOS: 15895, 10739, and 11932, respectively.

[1863] The disclosure describes an antibody, antigen binding fragment, or polypeptide comprising a heavy chain variable region having a HCDR1, HCDR2, and HCDR3, and a light chain variable region having a LCDR1, LCDR2, and LCDR3, wherein the HCDR1, HCDR2, and HCDR3 comprises an amino acid sequence of SEQ ID NOS:6571, 18309, and 6689, respectively and the LCDR1, LCDR2, and LCDR3 comprises an amino acid sequence of SEQ ID NOS: 16005, 9494, and 12348, respectively.

[1864] The disclosure describes an antibody, antigen binding fragment, or polypeptide comprising a heavy chain variable region having a HCDR1, HCDR2, and HCDR3, and a light chain variable region having a LCDR1, LCDR2, and LCDR3, wherein the HCDR1, HCDR2, and HCDR3 comprises an amino acid sequence of SEQ ID NOS: 10368, 16511, and 4410, respectively and the LCDR1, LCDR2, and LCDR3 comprises an amino acid sequence of SEQ ID NOS: 16061, 6320, and 12685, respectively.

[1865] The disclosure describes an antibody, antigen binding fragment, or polypeptide comprising a heavy chain variable region having a HCDR1, HCDR2, and HCDR3, and a light chain variable region having a LCDR1, LCDR2, and LCDR3, wherein the HCDR1, HCDR2, and HCDR3 comprises an amino acid sequence of SEQ ID NOS:11690, 11606, and 10428, respectively and the LCDR1, LCDR2, and LCDR3 comprises an amino acid sequence of SEQ ID NOS:16132, 17867, and 12396, respectively.

[1866] The disclosure describes an antibody, antigen binding fragment, or polypeptide comprising a heavy chain variable region having a HCDR1, HCDR2, and HCDR3, and a light chain variable region having a LCDR1, LCDR2, and LCDR3, wherein the HCDR1, HCDR2, and HCDR3 comprises an amino acid sequence of SEQ ID NOS: 10514, 9385, and 9551, respectively and the LCDR1, LCDR2, and LCDR3 comprises an amino acid sequence of SEQ ID NOS: 17959, 9275, and 17154, respectively. having a LCDR1, LCDR2, and LCDR3, wherein the HCDR1, HCDR2, and HCDR3 comprises an amino acid sequence of SEQ ID NOS: 18253, 11025, and 6129, respectively and the LCDR1, LCDR2, and LCDR3 comprises an amino acid sequence of SEQ ID NOS: 15938, 9503, and 12775, respectively.

[1867] The disclosure describes an antibody, antigen binding fragment, or polypeptide comprising a heavy chain variable region having a HCDR1, HCDR2, and HCDR3, and a light chain variable region having a LCDR1, LCDR2, and LCDR3, wherein the HCDR1, HCDR2, and HCDR3 comprises an amino acid sequence of SEQ ID NOS: 17648, 16844, and 4500, respectively and the LCDR1, LCDR2, and LCDR3 comprises an amino acid sequence of SEQ ID NOS:16427, 16509, and 11275, respectively.

[1868] The disclosure describes an antibody, antigen binding fragment, or polypeptide comprising a heavy chain variable region having a HCDR1, HCDR2, and HCDR3, and a light chain variable region having a LCDR1, LCDR2, and LCDR3, wherein the HCDR1, HCDR2, and HCDR3 comprises an amino acid sequence of SEQ ID NOS:17636, 16231, and 11698, respectively and the LCDR1, LCDR2, and LCDR3 comprises an amino acid sequence of SEQ ID NOS: 16396, 10987, and 11209, respectively.

[1869] The disclosure describes an antibody, antigen binding fragment, or polypeptide comprising a heavy chain variable region having a HCDR1, HCDR2, and HCDR3, and a light chain variable region having a LCDR1, LCDR2, and LCDR3, wherein the HCDR1, HCDR2, and HCDR3 comprises an amino acid sequence of SEQ ID NOS: 17073, 18334, and 6034, respectively and the LCDR1, LCDR2, and LCDR3 comprises an amino acid sequence of SEQ ID NOS:10888, 18272, and 12969, respectively.

[1870] The disclosure describes an antibody, antigen binding fragment, or polypeptide comprising a heavy chain variable region having a HCDR1, HCDR2, and HCDR3, and a light chain variable region having a LCDR1, LCDR2, and LCDR3, wherein the HCDR1, HCDR2, and HCDR3 comprises an amino acid sequence of SEQ ID NOS: 17431, 18527, and 6048, respectively and the LCDR1, LCDR2, and LCDR3 comprises an amino acid sequence of SEQ ID NOS: 15876, 9503, and 12775, respectively.

[1871] The disclosure describes an antibody, antigen binding fragment, or polypeptide comprising a heavy chain variable region having a HCDR1, HCDR2, and HCDR3, and a light chain variable region having a LCDR1, LCDR2, and LCDR3, wherein the HCDR1, HCDR2, and HCDR3 comprises an amino acid sequence of SEQ ID NOS:17064, 11535, and 18435, respectively and the LCDR1, LCDR2, and LCDR3 comprises an amino acid sequence of SEQ ID NOS: 10822, 9267, and 11339, respectively.

[1872] The disclosure describes an antibody, antigen binding fragment, or polypeptide comprising a heavy chain variable region having a HCDR1, HCDR2, and HCDR3, and a light chain variable region having a LCDR1, LCDR2, and LCDR3, wherein the HCDR1, HCDR2, and HCDR3 comprises an amino acid sequence of SEQ ID NOS: 17284, 18407, and 9643, respectively and the LCDR1, LCDR2, and LCDR3 comprises an amino acid sequence of SEQ ID NOS:15871, 10697, and 13012, respectively.

[1873] The disclosure describes an antibody, antigen binding fragment, or polypeptide comprising a heavy chain variable region having a HCDR1, HCDR2, and HCDR3, and a light chain variable region having a LCDR1, LCDR2, and LCDR3, wherein the HCDR1, HCDR2, and HCDR3 comprises an amino acid sequence of SEQ ID NOS:11678, 16837, and 10495, respectively and the LCDR1, LCDR2, and LCDR3 comprises an amino acid sequence of SEQ ID NOS:10895, 18275, and 12956, respectively.

[1874] The disclosure describes an antibody, antigen binding fragment, or polypeptide comprising a heavy chain variable region having a HCDR1, HCDR2, and HCDR3, and a light chain variable region having a LCDR1, LCDR2, and LCDR3, wherein the HCDR1, HCDR2, and HCDR3 comprises an amino acid sequence of SEQ ID NOS:17856, 18575, and 10991, respectively and the LCDR1, LCDR2, and LCDR3 comprises an amino acid sequence of SEQ ID NOS:10848, 18256, and 12726, respectively.

[1875] The disclosure describes an antibody, antigen binding fragment, or polypeptide comprising a heavy chain variable region having a HCDR1, HCDR2, and HCDR3, and a light chain variable region having a LCDR1, LCDR2, and LCDR3, wherein the HCDR1, HCDR2, and HCDR3 comprises an amino acid sequence of SEQ ID NOS: 11634, 10550, and 4199, respectively and the LCDR1, LCDR2, and LCDR3 comprises an amino acid sequence of SEQ ID NOS:15861, 10731, and 12026, respectively.

[1876] The disclosure describes an antibody, antigen binding fragment, or polypeptide comprising a heavy chain variable region having a HCDR1, HCDR2, and HCDR3, and a light chain variable region having a LCDR1, LCDR2, and LCDR3, wherein the HCDR1, HCDR2, and HCDR3 comprises an amino acid sequence of SEQ ID NOS:10368, 4682, and 10436, respectively and the LCDR1, LCDR2, and LCDR3 comprises an amino acid sequence of SEQ ID NOS:10878, 18275, and 12974, respectively.

[1877] The disclosure describes an antibody, antigen binding fragment, or polypeptide comprising a heavy chain variable region having a HCDR1, HCDR2, and HCDR3, and a light chain variable region having a LCDR1, LCDR2, and LCDR3, wherein the HCDR1, HCDR2, and HCDR3 comprises an amino acid sequence of SEQ ID NOS:16625, 9794, and 17711, respectively and the LCDR1, LCDR2, and LCDR3 comprises an amino acid sequence of SEQ ID NOS: 16146, 3969, and 12385, respectively.

[1878] The disclosure describes an antibody, antigen binding fragment, or polypeptide comprising a heavy chain variable region having a HCDR1, HCDR2, and HCDR3, and a light chain variable region having a LCDR1, LCDR2, and LCDR3, wherein the HCDR1, HCDR2, and HCDR3 comprises an amino acid sequence of SEQ ID NOS:17291, 9388, and 4581, respectively and the LCDR1, LCDR2, and LCDR3 comprises an amino acid sequence of SEQ ID NOS:16649, 10747, and 13029, respectively.

[1879] The disclosure describes an antibody, antigen binding fragment, or polypeptide comprising a heavy chain variable region having a HCDR1, HCDR2, and HCDR3, and a light chain variable region having a LCDR1, LCDR2, and LCDR3, wherein the HCDR1, HCDR2, and HCDR3 comprises an amino acid sequence of SEQ ID NOS:10212, 16832, and 11700, respectively and the LCDR1, LCDR2, and LCDR3 comprises an amino acid sequence of SEQ ID NOS:10897, 18275, and 12993, respectively.

[1880] The disclosure describes an antibody, antigen binding fragment, or polypeptide comprising a heavy chain variable region having a HCDR1, HCDR2, and HCDR3, and a light chain variable region having a LCDR1, LCDR2, and LCDR3, wherein the HCDR1, HCDR2, and HCDR3 comprises an amino acid sequence of SEQ ID NOS:17466, 16920, and 17712, respectively and the LCDR1, LCDR2, and LCDR3 comprises an amino acid sequence of SEQ ID NOS:17972, 9261, and 17161, respectively.

[1881] The disclosure describes an antibody, antigen binding fragment, or polypeptide comprising a heavy chain variable region having a HCDR1, HCDR2, and HCDR3, and a light chain variable region having a LCDR1, LCDR2, and LCDR3, wherein the HCDR1, HCDR2, and HCDR3 comprises an amino acid sequence of SEQ ID NOS:17274, 9939, and 4614, respectively and the LCDR1, LCDR2, and LCDR3 comprises an amino acid sequence of SEQ ID NOS: 16039, 9494, and 12672, respectively.

[1882] The disclosure describes an antibody, antigen binding fragment, or polypeptide comprising a heavy chain variable region having a HCDR1, HCDR2, and HCDR3, and a light chain variable region having a LCDR1, LCDR2, and LCDR3, wherein the HCDR1, HCDR2, and HCDR3 comprises an amino acid sequence of SEQ ID NOS:6571, 16266, and 9594, respectively and the LCDR1, LCDR2, and LCDR3 comprises an amino acid sequence of SEQ ID NOS: 17940, 6331, and 4358, respectively.

[1883] The disclosure describes an antibody, antigen binding fragment, or polypeptide comprising a heavy chain variable region having a HCDR1, HCDR2, and HCDR3, and a light chain variable region having a LCDR1, LCDR2, and LCDR3, wherein the HCDR1, HCDR2, and HCDR3 comprises an amino acid sequence of SEQ ID NOS:6572, 16269, and 7920, respectively and the LCDR1, LCDR2, and LCDR3 comprises an amino acid sequence of SEQ ID NOS: 15672, 9498, and 12377, respectively.

[1884] The disclosure describes an antibody, antigen binding fragment, or polypeptide comprising a heavy chain variable region having a HCDR1, HCDR2, and HCDR3, and a light chain variable region having a LCDR1, LCDR2, and LCDR3, wherein the HCDR1, HCDR2, and HCDR3 comprises an amino acid sequence of SEQ ID NOS: 16692, 18586, and 6732, respectively and the LCDR1, LCDR2, and LCDR3 comprises an amino acid sequence of SEQ ID NOS:10890, 18275, and 12826, respectively.

[1885] The disclosure describes an antibody, antigen binding fragment, or polypeptide comprising a heavy chain variable region having a HCDR1, HCDR2, and HCDR3, and a light chain variable region having a LCDR1, LCDR2, and LCDR3, wherein the HCDR1, HCDR2, and HCDR3 comprises an amino acid sequence of SEQ ID NOS:6531, 9917, and 9623, respectively and the LCDR1, LCDR2, and LCDR3 comprises an amino acid sequence of SEQ ID NOS:15780, 10734, and 12730, respectively. having a LCDR1, LCDR2, and LCDR3, wherein the HCDR1, HCDR2, and HCDR3 comprises an amino acid sequence of SEQ ID NOS: 11410, 11549, and 7882, respectively and the LCDR1, LCDR2, and LCDR3 comprises an amino acid sequence of SEQ ID NOS:10910, 18275, and 12924, respectively.

[1886] The disclosure describes an antibody, antigen binding fragment, or polypeptide comprising a heavy chain variable region having a HCDR1, HCDR2, and HCDR3, and a light chain variable region having a LCDR1, LCDR2, and LCDR3, wherein the HCDR1, HCDR2, and HCDR3 comprises an amino acid sequence of SEQ ID NOS: 17016, 16500, and 6487, respectively and the LCDR1, LCDR2, and LCDR3 comprises an amino acid sequence of SEQ ID NOS: 17969, 6628, and 4351, respectively.

[1887] The disclosure describes an antibody, antigen binding fragment, or polypeptide comprising a heavy chain variable region having a HCDR1, HCDR2, and HCDR3, and a light chain variable region having a LCDR1, LCDR2, and LCDR3, wherein the HCDR1, HCDR2, and HCDR3 comprises an amino acid sequence of SEQ ID NOS:17850, 17823, and 17541, respectively and the LCDR1, LCDR2, and LCDR3 comprises an amino acid sequence of SEQ ID NOS:16672, 10747, and 18617, respectively.

[1888] The disclosure describes an antibody, antigen binding fragment, or polypeptide comprising a heavy chain variable region having a HCDR1, HCDR2, and HCDR3, and a light chain variable region having a LCDR1, LCDR2, and LCDR3, wherein the HCDR1, HCDR2, and HCDR3 comprises an amino acid sequence of SEQ ID NOS: 17625, 16983, and 7823, respectively and the LCDR1, LCDR2, and LCDR3 comprises an amino acid sequence of SEQ ID NOS: 16081, 9503, and 12778, respectively.

[1889] The disclosure describes an antibody, antigen binding fragment, or polypeptide comprising a heavy chain variable region having a HCDR1, HCDR2, and HCDR3, and a light chain variable region having a LCDR1, LCDR2, and LCDR3, wherein the HCDR1, HCDR2, and HCDR3 comprises an amino acid sequence of SEQ ID NOS:6509, 9970, and 4196, respectively and the LCDR1, LCDR2, and LCDR3 comprises an amino acid sequence of SEQ ID NOS: 15613, 9503, and 12794, respectively.

[1890] The disclosure describes an antibody, antigen binding fragment, or polypeptide comprising a heavy chain variable region having a HCDR1, HCDR2, and HCDR3, and a light chain variable region having a LCDR1, LCDR2, and LCDR3, wherein the HCDR1, HCDR2, and HCDR3 comprises an amino acid sequence of SEQ ID NOS: 16678, 16938, and 9460, respectively and the LCDR1, LCDR2, and LCDR3 comprises an amino acid sequence of SEQ ID NOS:16107, 10741, and 12008, respectively.

[1891] The disclosure describes an antibody, antigen binding fragment, or polypeptide comprising a heavy chain variable region having a HCDR1, HCDR2, and HCDR3, and a light chain variable region having a LCDR1, LCDR2, and LCDR3, wherein the HCDR1, HCDR2, and HCDR3 comprises an amino acid sequence of SEQ ID NOS:17443, 17810, and 6172, respectively and the LCDR1, LCDR2, and LCDR3 comprises an amino acid sequence of SEQ ID NOS:9630, 4467, and 15559, respectively.

[1892] The disclosure describes an antibody, antigen binding fragment, or polypeptide comprising a heavy chain variable region having a HCDR1, HCDR2, and HCDR3, and a light chain variable region having a LCDR1, LCDR2, and LCDR3, wherein the HCDR1, HCDR2, and HCDR3 comprises an amino acid sequence of SEQ ID NOS:16801, 10760, and 10424, respectively and the LCDR1, LCDR2, and LCDR3 comprises an amino acid sequence of SEQ ID NOS:10223, 6212, and 11052, respectively.

[1893] The disclosure describes an antibody, antigen binding fragment, or polypeptide comprising a heavy chain variable region having a HCDR1, HCDR2, and HCDR3, and a light chain variable region having a LCDR1, LCDR2, and LCDR3, wherein the HCDR1, HCDR2, and HCDR3 comprises an amino acid sequence of SEQ ID NOS: 17441, 18434, and 5971, respectively and the LCDR1, LCDR2, and LCDR3 comprises an amino acid sequence of SEQ ID NOS: 15650, 3982, and 12538, respectively.

[1894] The disclosure describes an antibody, antigen binding fragment, or polypeptide comprising a heavy chain variable region having a HCDR1, HCDR2, and HCDR3, and a light chain variable region having a LCDR1, LCDR2, and LCDR3, wherein the HCDR1, HCDR2, and HCDR3 comprises an amino acid sequence of SEQ ID NOS:17063, 11432, and 17584, respectively and the LCDR1, LCDR2, and LCDR3 comprises an amino acid sequence of SEQ ID NOS:10828, 9272, and 11233, respectively.

[1895] The disclosure describes an antibody, antigen binding fragment, or polypeptide comprising a heavy chain variable region having a HCDR1, HCDR2, and HCDR3, and a light chain variable region having a LCDR1, LCDR2, and LCDR3, wherein the HCDR1, HCDR2, and HCDR3 comprises an amino acid sequence of SEQ ID NOS:6505, 10408, and 6141, respectively and the LCDR1, LCDR2, and LCDR3 comprises an amino acid sequence of SEQ ID NOS: 15978, 9472, and 12775, respectively.

[1896] The disclosure describes an antibody, antigen binding fragment, or polypeptide comprising a heavy chain variable region having a HCDR1, HCDR2, and HCDR3, and a light chain variable region having a LCDR1, LCDR2, and LCDR3, wherein the HCDR1, HCDR2, and HCDR3 comprises an amino acid sequence of SEQ ID NOS: 10680, 17761, and 6039, respectively and the LCDR1, LCDR2, and LCDR3 comprises an amino acid sequence of SEQ ID NOS: 15632, 4413, and 12433, respectively.

[1897] The disclosure describes an antibody, antigen binding fragment, or polypeptide comprising a heavy chain variable region having a HCDR1, HCDR2, and HCDR3, and a light chain variable region having a LCDR1, LCDR2, and LCDR3, wherein the HCDR1, HCDR2, and HCDR3 comprises an amino acid sequence of SEQ ID NOS: 10937, 10408, and 5902, respectively and the LCDR1, LCDR2, and LCDR3 comprises an amino acid sequence of SEQ ID NOS: 15975, 4425, and 12433, respectively.

[1898] The disclosure also describes a heavy and light chain comprising the sequences of SEQ ID NO:8200 and 7658; SEQ ID NO:8199 and 7657; SEQ ID NO:8234 and 6918; SEQ ID NO:8233 and 6917; SEQ ID NO:8280 and 6876; SEQ ID NO:8279 and 6875; SEQ ID NO:8332 and 6918; SEQ ID NO:8331 and 6917; SEQ ID NO:8623 and 7460; SEQ ID NO:8622 and 7459; SEQ ID NO:8228 and 7504; SEQ ID NO:8227 and 7503; SEQ ID NO:8440 and 7676; SEQ ID NO:8439 and 7675; SEQ ID NO:8637 and 6972; SEQ ID NO:8636 and 6971; SEQ ID NO:8192 and 6974; SEQ ID NO:8191 and 6973; SEQ ID NO:8254 and 6900; SEQ ID NO:8253 and 6899; SEQ ID NO:8182 and 6969; SEQ ID NO:8181 and 6968; SEQ ID NO:8148 and 7490; SEQ ID NO:8147 and 7489; SEQ ID NO:8300 and 7634; SEQ ID NO:8299 and 7633; SEQ ID NO:8302 and 7788; SEQ ID NO:8301 and 7787; SEQ ID NO:8264 and 7770; SEQ ID NO:8263 and 7769; SEQ ID NO:13811 and 7380; SEQ ID NO:13810 and 7379; SEQ ID NO: 14223 and 13409; SEQ ID NO: 14222 and 13408; SEQ ID NO: 13776 and 6802; SEQ ID NO: 13775 and 6801; SEQ ID NO:14333 and 11746; SEQ ID NO: 14332 and 11745; SEQ ID NO: 14925 and 5481; SEQ ID NO: 14924 and 5480; SEQ ID NO:8834 and 6294; SEQ ID NO:8833 and 6293; SEQ ID NO:7992 and 12248; SEQ ID NO:7991 and 12247; SEQ ID NO:8418 and 11854; SEQ ID NO:8417 and 11853; SEQ ID NO:15498 and 4816; SEQ ID NO:15497 and 4815; SEQ ID NO:15517 and 7046; SEQ ID NO:15516 and 7045; SEQ ID NO:15474 and 5645; SEQ ID NO:15473 and 5644; SEQ ID NO: 13986 and 4764; SEQ ID NO: 13985 and 4763; SEQ ID NO: 12147 and 4080; SEQ ID NO: 12146 and 4079; SEQ ID NO:14551 and 6751; SEQ ID NO: 14550 and 6750; SEQ ID NO:13694 and 7458; SEQ ID NO: 13693 and 7457; SEQ ID NO: 15243 and 7398; SEQ ID NO:15242 and 7397; SEQ ID NO:8625 and 17404; SEQ ID NO:8624 and 17403; SEQ ID NO:9554 and 13174; SEQ ID NO:9553 and 13173; SEQ ID NO: 15235 and 5794; SEQ ID NO: 15234 and 5793; SEQ ID NO:8874 and 6848; SEQ ID NO:8873 and 6847; SEQ ID NO:8943 and 5465; SEQ ID NO:8942 and 5464; SEQ ID NO:6286 and 4675; SEQ ID NO:6285 and 4674; SEQ ID NO: 14241 and 5455; SEQ ID NO: 14240 and 5454; SEQ ID NO:7976 and 4776; SEQ ID NO:7975 and 4775; SEQ ID NO:9125 and 7162; SEQ ID NO:9124 and 7161; SEQ ID NO:8651 and 17338; SEQ ID NO:8650 and 17337; SEQ ID NO:13789 and 4931; SEQ ID NO:13788 and 4930; SEQ ID NO:13682 and 7040; SEQ ID NO:13681 and 7039; SEQ ID NO:8838 and 18242; SEQ ID NO:8837 and 18241; SEQ ID NO: 12195 and 16629; SEQ ID NO: 12194 and 16628; SEQ ID NO:9056 and 4800; SEQ ID NO:9055 and 4799; SEQ ID NO: 14077 and 5173; SEQ ID NO: 14076 and 5172; SEQ ID NO: 14152 and 5657; SEQ ID NO: 14151 and 5656; SEQ ID NO:15343 and 7122; SEQ ID NO:15342 and 7121; SEQ ID NO:8284 and 6992; SEQ ID NO:8283 and 6991; SEQ ID NO:8000 and 10666; SEQ ID NO:7999 and 10665; SEQ ID NO:13819 and 7030; SEQ ID NO:13818 and 7029; SEQ ID NO:8998 and 4726; SEQ ID NO:8997 and 4725; SEQ ID NO:9153 and 13246; SEQ ID NO:9152 and 13245; SEQ ID NO:12281 and 7080; SEQ ID NO:12280 and 7079; SEQ ID NO:12193 and 17268; SEQ ID NO: 12192 and 17267; SEQ ID NO:6280 and 13391; SEQ ID NO:6279 and 13390; SEQ ID NO:14527 and 7798; SEQ ID NO:14526 and 7797; SEQ ID NO:14073 and 5107; SEQ ID NO:14072 and 5106; SEQ ID NO:12076 and 13377; SEQ ID NO: 12075 and 13376; SEQ ID NO:8500 and 4927; SEQ ID NO:8499 and 4926; SEQ ID NO:8593 and 13506; SEQ ID NO:8592 and 13505; SEQ ID NO:13724 and 12270; SEQ ID NO:13723 and 12269; SEQ ID NO:8428 and 13216; SEQ ID NO:8427 and 13215; SEQ ID NO:8994 and 13508; SEQ ID NO:8993 and 13507; SEQ ID NO:7970 and 6454; SEQ ID NO:7969 and 6453; SEQ ID NO:12135 and 7554; SEQ ID NO:12134 and 7553; SEQ ID NO:13823 and 7146; SEQ ID NO:13822 and 7145; SEQ ID NO: 12246 and 5889; SEQ ID NO: 12245 and 5888; SEQ ID NO:6266 and 6872; SEQ ID NO:6265 and 6871; SEQ ID NO:18194 and 5539; SEQ ID NO:18193 and 5538; SEQ ID NO:12141 and 17416; SEQ ID NO:12140 and 17415; SEQ ID NO:14891 and 5792; SEQ ID NO:14890 and 5791; SEQ ID NO:6272 and 5463; SEQ ID NO:6271 and 5462; SEQ ID NO:9183 and 4553; SEQ ID NO:9182 and 4552; SEQ ID NO:15319 and 5875; SEQ ID NO:15318 and 5874; SEQ ID NO:15466 and 7370; SEQ ID NO: 15465 and 7369; SEQ ID NO: 15295 and 7926; SEQ ID NO: 15294 and 7925; SEQ ID NO:8088 and 4551; SEQ ID NO:8087 and 4550; SEQ ID NO:14264 and 6920; SEQ ID NO: 14263 and 6917; SEQ ID NO: 14383 and 7605; SEQ ID NO: 14382 and 7604; SEQ ID NO: 14327 and 13039; SEQ ID NO:14326 and 13038; SEQ ID NO:15301 and 5311; SEQ ID NO:15300 and 5310; SEQ ID NO:15524 and 17517; SEQ ID NO:15523 and 17516; SEQ ID NO:8438 and 5513; SEQ ID NO:8437 and 5512; SEQ ID NO:8502 and 5565; SEQ ID NO:8501 and 5564; SEQ ID NO:8012 and 4557; SEQ ID NO:8011 and 4556; SEQ ID NO:15169 and 4774; SEQ ID NO:15168 and 4773; SEQ ID NO:14557 and 4112; SEQ ID NO: 14556 and 4111; SEQ ID NO: 14247 and 6934; SEQ ID NO: 14246 and 6933; SEQ ID NO: 13847 and 7160; SEQ ID NO: 13846 and 7159; SEQ ID NO:8537 and 4974; SEQ ID NO:8527 and 4972; SEQ ID NO:8547 and 17392; SEQ ID NO:8546 and 17391; SEQ ID NO:18168 and 5881; SEQ ID NO:18167 and 5880; SEQ ID NO:8360 and 6826; SEQ ID NO:8359 and 6825; SEQ ID NO:13835 and 18115; SEQ ID NO:13834 and 18114; SEQ ID NO: 14294 and 11750; SEQ ID NO:14293 and 11749; SEQ ID NO:8992 and 4549; SEQ ID NO:8991 and 4548; SEQ ID NO:14079 and 4748; SEQ ID NO:14078 and 4747; SEQ ID NO:14803 and 4561; SEQ ID NO:14802 and 4560; SEQ ID NO:8462 and 7368; SEQ ID NO:8461 and 7367; SEQ ID NO:13805 and 7532; SEQ ID NO: 13804 and 7531; SEQ ID NO: 14923 and 5814; SEQ ID NO: 14922 and 5813; SEQ ID NO:8504 and 12324; SEQ ID NO:8503 and 12323; SEQ ID NO: 12307 and 17487; SEQ ID NO: 12306 and 17486; SEQ ID NO:9018 and 7597; SEQ ID NO:9017 and 7596; SEQ ID NO:8452 and 13435; SEQ ID NO:8451 and 13434; SEQ ID NO:8842 and 4519; SEQ ID NO:8841 and 4518; SEQ ID NO:14237 and 6850; SEQ ID NO:14236 and 6849; SEQ ID NO:14859 and 7310; SEQ ID NO: 14858 and 7309; SEQ ID NO:13813 and 7318; SEQ ID NO:13812 and 7317; SEQ ID NO: 14209 and 13357; SEQ ID NO: 14208 and 13356; SEQ ID NO:9066 and 17400; SEQ ID NO:9065 and 17399; SEQ ID NO: 14621 and 4078; SEQ ID NO: 14620 and 4077; SEQ ID NO: 15059 and 5383; SEQ ID NO:15058 and 5382; SEQ ID NO:8152 and 5395; SEQ ID NO:8151 and 5394; SEQ ID NO:15032 and 5747; SEQ ID NO:15031 and 5736; SEQ ID NO:7968 and 6458; SEQ ID NO:7967 and 6457; SEQ ID NO:8778 and 6852; SEQ ID NO:8777 and 6851; SEQ ID NO:18176 and 13248; SEQ ID NO:18175 and 13247; SEQ ID NO:13815 and 7028; SEQ ID NO:13814 and 7027; SEQ ID NO:12211 and 5343; SEQ ID NO:12210 and 5342; SEQ ID NO: 14861 and 7048; SEQ ID NO: 14860 and 7047; SEQ ID NO:9109 and 6894; SEQ ID NO:9108 and 6893; SEQ ID NO:15275 and 7438; SEQ ID NO:15274 and 7437; SEQ ID NO:13712 and 5275; SEQ ID NO:13711 and 5274; SEQ ID NO: 14847 and 5800; SEQ ID NO: 14846 and 5799; SEQ ID NO:8631 and 5113; SEQ ID NO:8630 and 5112; SEQ ID NO:14795 and 7070; SEQ ID NO:14794 and 7069; SEQ ID NO:9264 and 5239; SEQ ID NO:9263 and 5238; SEQ ID NO:8104 and 9283; SEQ ID NO:8103 and 9282; SEQ ID NO:12149 and 4088; SEQ ID NO: 12148 and 4087; SEQ ID NO: 12143 and 4086; SEQ ID NO: 12142 and 4085; SEQ ID NO:8166 and 5309; SEQ ID NO:8165 and 5308; SEQ ID NO:13732 and 18128; SEQ ID NO:13731 and 18127; SEQ ID NO: 14075 and 5109; SEQ ID NO: 14074 and 5108; SEQ ID NO:8794 and 7486; SEQ ID NO:8793 and 7485; SEQ ID NO:8036 and 5559; SEQ ID NO:8035 and 5558; SEQ ID NO:14627 and 7951; SEQ ID NO: 14626 and 7950; SEQ ID NO:11920 and 7756; SEQ ID NO:11919 and 7755; SEQ ID NO: 13762 and 6800; SEQ ID NO:13761 and 6799; SEQ ID NO:8020 and 5345; SEQ ID NO:8019 and 5344; SEQ ID NO:15349 and 5775; SEQ ID NO:15348 and 5774; SEQ ID NO: 14053 and 13272; SEQ ID NO: 14052 and 13271; SEQ ID NO: 14071 and 5187; SEQ ID NO: 14070 and 5186; SEQ ID NO:13831 and 7366; SEQ ID NO:13830 and 7365; SEQ ID NO:9213 and 13395; SEQ ID NO:9212 and 13394; SEQ ID NO:15237 and 13111; SEQ ID NO:15236 and 13110; SEQ ID NO:9141 and 7424; SEQ ID NO:9140 and 7423; SEQ ID NO:13837 and 7032; SEQ ID NO:13836 and 7031; SEQ ID NO:13827 and 6443; SEQ ID NO:13826 and 6442; SEQ ID NO: 15117 and 5778; SEQ ID NO:15116 and 5776; SEQ ID NO:6298 and 5451; SEQ ID NO:6297 and 5450; SEQ ID NO:8585 and 6451; SEQ ID NO:8584 and 6450; SEQ ID NO: 14525 and 7800; SEQ ID NO: 14524 and 7799; SEQ ID NO:13803 and 6761; SEQ ID NO: 13802 and 6760; SEQ ID NO: 11908 and 4858; SEQ ID NO: 11907 and 4857; SEQ ID NO: 15511 and 6449; SEQ ID NO:15510 and 6448; SEQ ID NO:14339 and 5251; SEQ ID NO:14338 and 5250; SEQ ID NO:14935 and 5804; SEQ ID NO:14934 and 5803; SEQ ID NO:14553 and 13057; SEQ ID NO: 14552 and 13056; SEQ ID NO: 14693 and 5610; SEQ ID NO: 14692 and 5607; SEQ ID NO: 14245 and 6822; SEQ ID NO: 14244 and 6821; SEQ ID NO: 12161 and 12266; SEQ ID NO: 12160 and 12265; SEQ ID NO:14569 and 6196; SEQ ID NO:14568 and 6195; SEQ ID NO:12175 and 13230; SEQ ID NO: 12170 and 13229; SEQ ID NO:13853 and 7474; SEQ ID NO:13852 and 7473; SEQ ID NO:14619 and 4092; SEQ ID NO:14618 and 4091; SEQ ID NO:12113 and 6838; SEQ ID NO:12112 and 6837; SEQ ID NO:8996 and 7466; SEQ ID NO:8995 and 7465; SEQ ID NO:13632 and 5483; SEQ ID NO:13631 and 5482; SEQ ID NO:9169 and 4513; SEQ ID NO:9168 and 4512; SEQ ID NO:14899 and 7190; SEQ ID NO:14898 and 7189; SEQ ID NO:13841 and 7174; SEQ ID NO:13840 and 7173; SEQ ID NO: 13875 and 5436; SEQ ID NO:13874 and 5435; SEQ ID NO: 14869 and 6759; SEQ ID NO: 14868 and 6758; SEQ ID NO: 13754 and 12320; SEQ ID NO:13753 and 12319; SEQ ID NO:8010 and 7006; SEQ ID NO:8009 and 7005; SEQ ID NO:14887 and 5790; SEQ ID NO: 14886 and 5789; SEQ ID NO: 14176 and 7258; SEQ ID NO: 14175 and 7257; SEQ ID NO: 15163 and 5816; SEQ ID NO:15162 and 5815; SEQ ID NO:8611 and 5399; SEQ ID NO:8610 and 5398; SEQ ID NO:15119 and 5777; SEQ ID NO:15118 and 5776; SEQ ID NO:8782 and 13073; SEQ ID NO:8781 and 13072; SEQ ID NO:7990 and 4967; SEQ ID NO:7989 and 4966; SEQ ID NO:15472 and 10652; SEQ ID NO:15471 and 10651; SEQ ID NO:15247 and 7008; SEQ ID NO:15246 and 7007; SEQ ID NO:13821 and 7020; SEQ ID NO:13820 and 7019; SEQ ID NO:13807 and 7034; SEQ ID NO: 13806 and 7033; SEQ ID NO:8808 and 4541; SEQ ID NO:8807 and 4540; SEQ ID NO:15345 and 6224; SEQ ID NO:15344 and 6223; SEQ ID NO:9042 and 5183; SEQ ID NO:9041 and 5182; SEQ ID NO:14284 and 13101; SEQ ID NO:14283 and 13100; SEQ ID NO:9173 and 18238; SEQ ID NO:9172 and 18237; SEQ ID NO:8672 and 7710; SEQ ID NO:8671 and 7709; SEQ ID NO:13968 and 4766; SEQ ID NO:13967 and 4765; SEQ ID NO:13817 and 7038; SEQ ID NO:13816 and 7037; SEQ ID NO: 14917 and 7392; SEQ ID NO:14916 and 7391; SEQ ID NO:13843 and 7210; SEQ ID NO:13842 and 7209; SEQ ID NO:14270 and 7110; SEQ ID NO:14269 and 7109; SEQ ID NO:14893 and 10664; SEQ ID NO:14892 and 10663; SEQ ID NO:9151 and 17402; SEQ ID NO:9150 and 17401; SEQ ID NO:9155 and 6890; SEQ ID NO:9154 and 6889; SEQ ID NO: 13644 and 7164; SEQ ID NO:13643 and 7163; SEQ ID NO: 12203 and 13065; SEQ ID NO: 12202 and 13064; SEQ ID NO:15123 and 7120; SEQ ID NO:15122 and 7119; SEQ ID NO:7844 and 6375; SEQ ID NO:7843 and 6374; SEQ ID NO:13984 and 4764; SEQ ID NO: 13983 and 4763; SEQ ID NO:7980 and 10662; SEQ ID NO:7979 and 10661; SEQ ID NO:15458 and 4736; SEQ ID NO:15457 and 4735; SEQ ID NO:13839 and 7094; SEQ ID NO:13838 and 7093; SEQ ID NO:8840 and 4555; SEQ ID NO:8839 and 4554; SEQ ID NO: 14325 and 4782; SEQ ID NO: 14324 and 4781; SEQ ID NO:13825 and 5475; SEQ ID NO:13824 and 5474; SEQ ID NO:8972 and 13236; SEQ ID NO:8971 and 13235; SEQ ID NO:9064 and 6818; SEQ ID NO:9063 and 6817; SEQ ID NO:8208 and 6385; SEQ ID NO:8207 and 6384; SEQ ID NO:9123 and 6982; SEQ ID NO:9122 and 6981; SEQ ID NO:13833 and 7036; SEQ ID NO:13832 and 7035; SEQ ID NO:9147 and 7396; SEQ ID NO:9146 and 7395; SEQ ID NO:14617 and 4090; SEQ ID NO: 14616 and 4089; SEQ ID NO:13829 and 7372; SEQ ID NO:13828 and 7371; SEQ ID NO:15299 and 5780; SEQ ID NO:15298 and 5779; SEQ ID NO:18148 and 7320; SEQ ID NO:18147 and 7319; SEQ ID NO:13642 and 7166; SEQ ID NO: 13641 and 7165; SEQ ID NO: 14631 and 5147; SEQ ID NO: 14630 and 5146; SEQ ID NO:15503 and 4836; SEQ ID NO:15502 and 4835; SEQ ID NO:11897 and 7140; SEQ ID NO:11896 and 7139; SEQ ID NO:15450 and 5133; SEQ ID NO:15449 and 5132; SEQ ID NO:15091 and 7022; SEQ ID NO:15090 and 7021; SEQ ID NO:13787 and 4844; SEQ ID NO:13786 and 4843; SEQ ID NO: 14625 and 5195; SEQ ID NO: 14624 and 5194; SEQ ID NO: 15283 and 5349; SEQ ID NO: 15282 and 5348; SEQ ID NO: 15049 and 7078; SEQ ID NO: 15048 and 7077; SEQ ID NO:12047 and 5095; SEQ ID NO:12046 and 5094; SEQ ID NO: 14463 and 17791; SEQ ID NO:14460 and 17789; SEQ ID NO:15492 and 4806; SEQ ID NO:15491 and 4805; SEQ ID NO:15223 and 7686; SEQ ID NO:15222 and 7685; SEQ ID NO: 14791 and 7230; SEQ ID NO: 14790 and 7229; SEQ ID NO:13778 and 7348; SEQ ID NO:13777 and 7347; SEQ ID NO:18209 and 4852; SEQ ID NO:18208 and 4851; SEQ ID NO:14998 and 5333; SEQ ID NO:14984 and 5327; SEQ ID NO:15335 and 7168; SEQ ID NO:15334 and 7167; SEQ ID NO:11756 and 5438; SEQ ID NO:11755 and 5437; SEQ ID NO: 14563 and 7376; SEQ ID NO: 14562 and 7375; SEQ ID NO: 14733 and 13176; SEQ ID NO: 14724 and 13175; SEQ ID NO: 12163 and 13244; SEQ ID NO: 12162 and 13243; SEQ ID NO:13907 and 5093; SEQ ID NO: 13906 and 5092; SEQ ID NO: 14004 and 5332; SEQ ID NO: 14003 and 5330; SEQ ID NO: 13994 and 4919; SEQ ID NO: 13993 and 4918; SEQ ID NO: 15257 and 6840; SEQ ID NO:15256 and 6839; SEQ ID NO:14563 and 7378; SEQ ID NO:14562 and 7377; SEQ ID NO:14581 and 4842; SEQ ID NO:14580 and 4841; SEQ ID NO: 13634 and 5087; SEQ ID NO:13633 and 5086; SEQ ID NO:8340 and 7436; SEQ ID NO:8339 and 7435; SEQ ID NO:14144 and 17295; SEQ ID NO: 14143 and 17294; SEQ ID NO: 13668 and 5071; SEQ ID NO:13667 and 5070; SEQ ID NO: 13903 and 4872; SEQ ID NO:13902 and 4871; SEQ ID NO: 14469 and 5742; SEQ ID NO: 14458 and 5741; SEQ ID NO:9105 and 4860; SEQ ID NO:9104 and 4859; SEQ ID NO:8326 and 6998; SEQ ID NO:8325 and 6997; SEQ ID NO:6583 and 5453; SEQ ID NO:6582 and 5452; SEQ ID NO:13696 and 7728; SEQ ID NO:13695 and 7727; SEQ ID NO: 14809 and 4983; SEQ ID NO: 14808 and 4982; SEQ ID NO:9080 and 17505; SEQ ID NO:9074 and 17504; SEQ ID NO:6315 and 7774; SEQ ID NO:6314 and 7773; SEQ ID NO:8022 and 4937; SEQ ID NO:8021 and 4936; SEQ ID NO:14675 and 5069; SEQ ID NO:14664 and 5058; SEQ ID NO:14672 and 7287; SEQ ID NO:14665 and 7268; SEQ ID NO:8306 and 13361; SEQ ID NO:8305 and 13360; SEQ ID NO:15039 and 5027; SEQ ID NO: 15038 and 5026; SEQ ID NO: 15159 and 4976; SEQ ID NO:15158 and 4975; SEQ ID NO: 12299 and 4638; SEQ ID NO:12298 and 4637; SEQ ID NO:11899 and 7092; SEQ ID NO:11898 and 7091; SEQ ID NO:15519 and 4963; SEQ ID NO:15518 and 4962; SEQ ID NO:15229 and 7180; SEQ ID NO:15228 and 7179; SEQ ID NO:14736 and 5025; SEQ ID NO: 14735 and 5024; SEQ ID NO:18211 and 4880; SEQ ID NO:18210 and 4879; SEQ ID NO:8909 and 13252; SEQ ID NO:8908 and 13251; SEQ ID NO: 12090 and 4828; SEQ ID NO: 12089 and 4827; SEQ ID NO: 13728 and 7018; SEQ ID NO: 13727 and 7017; SEQ ID NO: 13956 and 4921; SEQ ID NO:13955 and 4920; SEQ ID NO:8224 and 6886; SEQ ID NO:8223 and 6885; SEQ ID NO:15436 and 6206; SEQ ID NO:15435 and 6205; SEQ ID NO: 14967 and 5009; SEQ ID NO: 14966 and 5008; SEQ ID NO: 14817 and 7228; SEQ ID NO: 14816 and 7227; SEQ ID NO:14217 and 13494; SEQ ID NO: 14216 and 13493; SEQ ID NO:14321 and 13449; SEQ ID NO:14320 and 13448; SEQ ID NO:12117 and 7044; SEQ ID NO:12116 and 7043; SEQ ID NO:12151 and 5225; SEQ ID NO:12150 and 5224; SEQ ID NO:8474 and 5137; SEQ ID NO:8473 and 5136; SEQ ID NO:13716 and 5135; SEQ ID NO:13715 and 5134; SEQ ID NO:6278 and 5097; SEQ ID NO:6277 and 5096; SEQ ID NO: 14239 and 5007; SEQ ID NO: 14238 and 5006; SEQ ID NO:8308 and 10618; SEQ ID NO:8307 and 10617; SEQ ID NO:6589 and 5101; SEQ ID NO:6588 and 5100; SEQ ID NO:12125 and 13527; SEQ ID NO: 12124 and 13526; SEQ ID NO:8230 and 6919; SEQ ID NO:8229 and 6917; SEQ ID NO:8126 and 7644; SEQ ID NO:8125 and 7643; SEQ ID NO:7840 and 13397; SEQ ID NO:7839 and 13396; SEQ ID NO:6252 and 7664; SEQ ID NO:6251 and 7663; SEQ ID NO:8490 and 17084; SEQ ID NO:8489 and 17083; SEQ ID NO:13917 and 13292; SEQ ID NO:13916 and 13291; SEQ ID NO:12227 and 5015; SEQ ID NO: 12226 and 5014; SEQ ID NO: 14006 and 9327; SEQ ID NO: 14005 and 9326; SEQ ID NO: 14337 and 13310; SEQ ID NO: 14336 and 13309; SEQ ID NO:9143 and 5357; SEQ ID NO:9142 and 5356; SEQ ID NO:9062 and 6984; SEQ ID NO:9061 and 6983; SEQ ID NO: 14485 and 13296; SEQ ID NO: 14484 and 13295; SEQ ID NO: 12225 and 5111; SEQ ID NO: 12224 and 5110; SEQ ID NO: 12056 and 5725; SEQ ID NO: 12055 and 5724; SEQ ID NO:13672 and 5549; SEQ ID NO:13671 and 5548; SEQ ID NO:9253 and 5757; SEQ ID NO:9252 and 5756; SEQ ID NO:15416 and 5403; SEQ ID NO:15415 and 5402; SEQ ID NO:9101 and 17356; SEQ ID NO:9100 and 17355; SEQ ID NO:9099 and 17358; SEQ ID NO:9098 and 17357; SEQ ID NO: 15333 and 5253; SEQ ID NO: 15332 and 5252; SEQ ID NO: 14146 and 6622; SEQ ID NO: 14145 and 6621; SEQ ID NO:15217 and 7214; SEQ ID NO:15216 and 7213; SEQ ID NO: 14055 and 5751; SEQ ID NO:14054 and 5750; SEQ ID NO: 13750 and 6930; SEQ ID NO: 13749 and 6929; SEQ ID NO:8886 and 13355; SEQ ID NO:8885 and 13354; SEQ ID NO: 12272 and 9289; SEQ ID NO: 12271 and 9288; SEQ ID NO:15113 and 7730; SEQ ID NO:15112 and 7729; SEQ ID NO:8142 and 9323; SEQ ID NO:8141 and 9322; SEQ ID NO:8176 and 4539; SEQ ID NO:8175 and 4538; SEQ ID NO:14097 and 4911; SEQ ID NO: 14096 and 4905; SEQ ID NO:8248 and 7627; SEQ ID NO:8238 and 7627; SEQ ID NO:8348 and 12322; SEQ ID NO:8347 and 12321; SEQ ID NO:10420 and 5587; SEQ ID NO:10419 and 5586; SEQ ID NO:8278 and 7569; SEQ ID NO:8277 and 7568; SEQ ID NO:8460 and 5029; SEQ ID NO:8459 and 5028; SEQ ID NO:9032 and 13148; SEQ ID NO:9031 and 13147; SEQ ID NO:13998 and 4798; SEQ ID NO: 13997 and 4797; SEQ ID NO:8728 and 13416; SEQ ID NO:8726 and 13413; SEQ ID NO:13744 and 10620; SEQ ID NO:13743 and 10619; SEQ ID NO:15141 and 7334; SEQ ID NO:15140 and 7333; SEQ ID NO:8086 and 9436; SEQ ID NO:8085 and 9435; SEQ ID NO:14799 and 7136; SEQ ID NO: 14798 and 7135; SEQ ID NO: 14243 and 13182; SEQ ID NO: 14242 and 13181; SEQ ID NO:15462 and 7016; SEQ ID NO:15461 and 7015; SEQ ID NO:12088 and 13547; SEQ ID NO:12087 and 13546; SEQ ID NO:15353 and 6922; SEQ ID NO:15352 and 6921; SEQ ID NO:15197 and 5563; SEQ ID NO: 15196 and 5562; SEQ ID NO: 14895 and 7336; SEQ ID NO: 14894 and 7335; SEQ ID NO: 14587 and 7577; SEQ ID NO: 14586 and 7576; SEQ ID NO:9209 and 7560; SEQ ID NO:9208 and 7559; SEQ ID NO:15004 and 7284; SEQ ID NO: 15002 and 7268; SEQ ID NO:8241 and 17332; SEQ ID NO:8238 and 17329; SEQ ID NO: 15255 and 5415; SEQ ID NO: 15254 and 5414; SEQ ID NO:6585 and 11807; SEQ ID NO:6584 and 11806; SEQ ID NO:12050 and 13314; SEQ ID NO:12049 and 13313; SEQ ID NO:15151 and 6767; SEQ ID NO:15150 and 6766; SEQ ID NO: 15233 and 9299; SEQ ID NO: 15232 and 9298; SEQ ID NO:9163 and 4533; SEQ ID NO:9162 and 4532; SEQ ID NO:9016 and 10644; SEQ ID NO:9015 and 10643; SEQ ID NO:15432 and 7084; SEQ ID NO: 15431 and 7083; SEQ ID NO:8024 and 4537; SEQ ID NO:8023 and 4536; SEQ ID NO:15496 and 6765; SEQ ID NO:15495 and 6764; SEQ ID NO:15195 and 7060; SEQ ID NO:15194 and 7059; SEQ ID NO: 15055 and 5259; SEQ ID NO:15054 and 5258; SEQ ID NO:6254 and 7502; SEQ ID NO:6253 and 7501; SEQ ID NO:9181 and 11395; SEQ ID NO:9180 and 11394; SEQ ID NO:14204 and 5065; SEQ ID NO:14201 and 5058; SEQ ID NO:8252 and 17790; SEQ ID NO:8238 and 17789; SEQ ID NO: 14813 and 7794; SEQ ID NO: 14812 and 7793; SEQ ID NO:14453 and 5606; SEQ ID NO: 14450 and 5604; SEQ ID NO:18154 and 11860; SEQ ID NO:18153 and 11859; SEQ ID NO:6270 and 4929; SEQ ID NO:6269 and 4928; SEQ ID NO:8930 and 11850; SEQ ID NO:8929 and 11849; SEQ ID NO:14258 and 17502; SEQ ID NO: 14256 and 17500; SEQ ID NO:8492 and 5557; SEQ ID NO:8491 and 5556; SEQ ID NO:14779 and 7186; SEQ ID NO:14778 and 7185; SEQ ID NO:8519 and 5746; SEQ ID NO:8517 and 5737; SEQ ID NO:15189 and 6994; SEQ ID NO:15188 and 6993; SEQ ID NO:14363 and 5845; SEQ ID NO:14362 and 5844; SEQ ID NO:15003 and 13133; SEQ ID NO:15002 and 13126; SEQ ID NO: 14875 and 7294; SEQ ID NO: 14874 and 7293; SEQ ID NO:8806 and 4790; SEQ ID NO:8805 and 4789; SEQ ID NO:13881 and 7138; SEQ ID NO:13880 and 7137; SEQ ID NO:12171 and 5335; SEQ ID NO: 12170 and 5327; SEQ ID NO: 15285 and 6908; SEQ ID NO: 15284 and 6907; SEQ ID NO:8206 and 7098; SEQ ID NO:8205 and 7097; SEQ ID NO:15087 and 5385; SEQ ID NO:15086 and 5384; SEQ ID NO:8657 and 4531; SEQ ID NO:8656 and 4530; SEQ ID NO:8698 and 13172; SEQ ID NO:8687 and 13171; SEQ ID NO: 12178 and 5738; SEQ ID NO: 12170 and 5737; SEQ ID NO:8669 and 5068; SEQ ID NO:8667 and 5058; SEQ ID NO:12069 and 7286; SEQ ID NO:12063 and 7268; SEQ ID NO: 14994 and 17387; SEQ ID NO: 14984 and 17377; SEQ ID NO:8868 and 7662; SEQ ID NO:8867 and 7661; SEQ ID NO:15355 and 7346; SEQ ID NO: 15354 and 7345; SEQ ID NO: 14138 and 5005; SEQ ID NO: 14137 and 5004; SEQ ID NO: 14732 and 5066; SEQ ID NO: 14725 and 5058; SEQ ID NO:8655 and 9317; SEQ ID NO:8654 and 9316; SEQ ID NO:14708 and 13425; SEQ ID NO:14705 and 13422; SEQ ID NO:14679 and 5334; SEQ ID NO:14665 and 5327; SEQ ID NO:15380 and 5155; SEQ ID NO:15379 and 5154; SEQ ID NO: 14713 and 6367; SEQ ID NO: 14705 and 6366; SEQ ID NO: 12172 and 5059; SEQ ID NO: 12170 and 5058; SEQ ID NO: 8402 and 7768; SEQ ID NO:8401 and 7767; SEQ ID NO:8529 and 11399; SEQ ID NO:8526 and 11398; SEQ ID NO: 14461 and 7627; SEQ ID NO: 14460 and 7615; SEQ ID NO:15041 and 15584; SEQ ID NO:15040 and 15583; SEQ ID NO: 14561 and 7943; SEQ ID NO: 14560 and 7942; SEQ ID NO:8731 and 6960; SEQ ID NO:8726 and 6952; SEQ ID NO:8242 and 13125; SEQ ID NO:8238 and 13120; SEQ ID NO:15404 and 7296; SEQ ID NO:15403 and 7295; SEQ ID NO: 12168 and 5326; SEQ ID NO: 12167 and 5321; SEQ ID NO:8530 and 4158; SEQ ID NO:8527 and 4157; SEQ ID NO: 14252 and 6956; SEQ ID NO: 14250 and 6952; SEQ ID NO:14434 and 17388; SEQ ID NO:14424 and 17375; SEQ ID NO:8700 and 4719; SEQ ID NO:8686 and 4716; SEQ ID NO:8691 and 13479; SEQ ID NO:8687 and 13477; SEQ ID NO:14112 and 5064; SEQ ID NO:14110 and 5058; SEQ ID NO:14107 and 7627; SEQ ID NO: 14104 and 7615; SEQ ID NO:8864 and 5745; SEQ ID NO:8863 and 5737; SEQ ID NO:18152 and 7627; SEQ ID NO:18151 and 7627; SEQ ID NO:15482 and 7052; SEQ ID NO:15481 and 7051; SEQ ID NO: 12104 and 6874; SEQ ID NO: 12103 and 6873; SEQ ID NO:9075 and 7282; SEQ ID NO:9074 and 7268; SEQ ID NO:9217 and 6739; SEQ ID NO:9216 and 6738; SEQ ID NO:8970 and 5127; SEQ ID NO:8969 and 5126; SEQ ID NO:12235 and 4876; SEQ ID NO:12234 and 4875; SEQ ID NO:13923 and 13423; SEQ ID NO:13921 and 13422; SEQ ID NO:8762 and 17376; SEQ ID NO:8759 and 17375; SEQ ID NO:8900 and 7269; SEQ ID NO:8899 and 7268; SEQ ID NO:14174 and 17430; SEQ ID NO:14173 and 17429; SEQ ID NO:14266 and 5351; SEQ ID NO:14265 and 5350; SEQ ID NO:9081 and 13425; SEQ ID NO:9074 and 13422; SEQ ID NO:15490 and 7142; SEQ ID NO:15489 and 7141; SEQ ID NO:6602 and 5713; SEQ ID NO:6601 and 5712; SEQ ID NO:14695 and 5619; SEQ ID NO:14692 and 5607; SEQ ID NO:7974 and 13087; SEQ ID NO:7973 and 13086; SEQ ID NO: 14667 and 13415; SEQ ID NO: 14665 and 13414; SEQ ID NO:8859 and 13124; SEQ ID NO:8857 and 13122; SEQ ID NO: 14479 and 5305; SEQ ID NO: 14478 and 5304; SEQ ID NO:12066 and 13170; SEQ ID NO: 12065 and 13169; SEQ ID NO: 15406 and 7410; SEQ ID NO:15405 and 7409; SEQ ID NO:13928 and 5326; SEQ ID NO: 13921 and 5321; SEQ ID NO:8545 and 10588; SEQ ID NO:8544 and 10587; SEQ ID NO:15400 and 7102; SEQ ID NO:15399 and 7101; SEQ ID NO:15371 and 13069; SEQ ID NO:15370 and 13068; SEQ ID NO: 14937 and 6685; SEQ ID NO:14936 and 6684; SEQ ID NO:14593 and 6687; SEQ ID NO:14592 and 6686; SEQ ID NO:14335 and 6967; SEQ ID NO:14334 and 6966; SEQ ID NO:12082 and 5407; SEQ ID NO:12081 and 5406; SEQ ID NO:14305 and 5062; SEQ ID NO:14304 and 5060; SEQ ID NO:14125 and 17303; SEQ ID NO:14123 and 17302; SEQ ID NO: 15454 and 7216; SEQ ID NO:15453 and 7215; SEQ ID NO:8244 and 17090; SEQ ID NO:8238 and 17089; SEQ ID NO:13768 and 13304; SEQ ID NO: 13767 and 13303; SEQ ID NO:8670 and 5161; SEQ ID NO:8666 and 5160; SEQ ID NO:6268 and 9433; SEQ ID NO:6267 and 9432; SEQ ID NO: 12197 and 7534; SEQ ID NO: 12196 and 7533; SEQ ID NO: 14537 and 4564; SEQ ID NO: 14536 and 4563; SEQ ID NO: 8699 and 6940; SEQ ID NO:8686 and 6939; SEQ ID NO: 12064 and 5336; SEQ ID NO: 12063 and 5321; SEQ ID NO:9077 and 7619; SEQ ID NO:9074 and 7618; SEQ ID NO: 15434 and 7100; SEQ ID NO: 15433 and 7099; SEQ ID NO: 14115 and 5613; SEQ ID NO: 14110 and 5611; SEQ ID NO:15418 and 6932; SEQ ID NO: 15417 and 6931; SEQ ID NO: 14666 and 5739; SEQ ID NO: 14665 and 5737; SEQ ID NO: 14190 and 7252; SEQ ID NO: 14189 and 7251; SEQ ID NO:8690 and 6962; SEQ ID NO:8687 and 6950; SEQ ID NO: 14093 and 4808; SEQ ID NO: 14092 and 4807; SEQ ID NO:8057 and 17527; SEQ ID NO:8056 and 17526; SEQ ID NO:14609 and 4802; SEQ ID NO: 14608 and 4801; SEQ ID NO: 14756 and 13516; SEQ ID NO: 14753 and 13515; SEQ ID NO:13936 and 7082; SEQ ID NO:13935 and 7081; SEQ ID NO: 14503 and 7208; SEQ ID NO: 14502 and 7207; SEQ ID NO: 14777 and 13363; SEQ ID NO:14776 and 13362; SEQ ID NO:14124 and 5320; SEQ ID NO:14123 and 5317; SEQ ID NO: 14023 and 6947; SEQ ID NO: 14019 and 6946; SEQ ID NO: 14119 and 17093; SEQ ID NO:14108 and 17088; SEQ ID NO:8721 and 5337; SEQ ID NO:8718 and 5316; SEQ ID NO:8571 and 7716; SEQ ID NO:8570 and 7715; SEQ ID NO:14744 and 13325; SEQ ID NO:14743 and 13324; SEQ ID NO:14613 and 7360; SEQ ID NO: 14612 and 7359; SEQ ID NO:14117 and 17092; SEQ ID NO:14110 and 17089; SEQ ID NO:8482 and 4866; SEQ ID NO:8481 and 4865; SEQ ID NO: 14017 and 5065; SEQ ID NO:14015 and 5058; SEQ ID NO:8695 and 4102; SEQ ID NO:8687 and 4101; SEQ ID NO:14113 and 13128; SEQ ID NO: 14110 and 13127; SEQ ID NO:15484 and 7090; SEQ ID NO:15483 and 7089; SEQ ID NO:13740 and 18124; SEQ ID NO:13739 and 18123; SEQ ID NO: 14369 and 13097; SEQ ID NO:14368 and 13096; SEQ ID NO:8679 and 7280; SEQ ID NO:8678 and 7275; SEQ ID NO:9079 and 5614; SEQ ID NO:9074 and 5607; SEQ ID NO:15265 and 7226; SEQ ID NO:15264 and 7225; SEQ ID NO:8518 and 5605; SEQ ID NO:8517 and 5604; SEQ ID NO: 14219 and 4874; SEQ ID NO: 14218 and 4873; SEQ ID NO: 14105 and 5159; SEQ ID NO: 14104 and 5158; SEQ ID NO:8722 and 12314; SEQ ID NO:8718 and 12313; SEQ ID NO:14178 and 13134; SEQ ID NO:14177 and 13126; SEQ ID NO:14678 and 5065; SEQ ID NO: 14665 and 5058; SEQ ID NO: 14016 and 4907; SEQ ID NO: 14015 and 4905; SEQ ID NO:6274 and 6439; SEQ ID NO:6273 and 6438; SEQ ID NO:14085 and 7342; SEQ ID NO:14084 and 7341; SEQ ID NO:14024 and 13119; SEQ ID NO:14019 and 13116; SEQ ID NO:12187 and 13421; SEQ ID NO:12186 and 13420; SEQ ID NO:8520 and 13131; SEQ ID NO:8517 and 13126; SEQ ID NO:15375 and 7627; SEQ ID NO:15374 and 7615; SEQ ID NO:18156 and 13553; SEQ ID NO:18155 and 13552; SEQ ID NO:8053 and 11848; SEQ ID NO:8052 and 11847; SEQ ID NO:8130 and 7552; SEQ ID NO:8129 and 7551; SEQ ID NO:14428 and 5609; SEQ ID NO:14425 and 5607; SEQ ID NO:12179 and 7626; SEQ ID NO:12170 and 7615; SEQ ID NO:8862 and 5322; SEQ ID NO:8857 and 5321; SEQ ID NO: 14118 and 7264; SEQ ID NO: 14109 and 7263; SEQ ID NO: 12062 and 4712; SEQ ID NO: 12061 and 4711; SEQ ID NO:8468 and 4750; SEQ ID NO:8467 and 4749; SEQ ID NO:15402 and 7232; SEQ ID NO:15401 and 7231; SEQ ID NO:7842 and 6441; SEQ ID NO:7841 and 6440; SEQ ID NO:15373 and 6953; SEQ ID NO:15372 and 6952; SEQ ID NO:14020 and 13478; SEQ ID NO:14019 and 13477; SEQ ID NO:14991 and 5612; SEQ ID NO:14985 and 5611; SEQ ID NO:8866 and 7646; SEQ ID NO:8865 and 7645; SEQ ID NO:8484 and 7428; SEQ ID NO:8483 and 7427; SEQ ID NO: 14154 and 4840; SEQ ID NO: 14153 and 4839; SEQ ID NO: 13692 and 6776; SEQ ID NO: 13691 and 6775; SEQ ID NO:14310 and 6963; SEQ ID NO: 14304 and 6946; SEQ ID NO:8848 and 17366; SEQ ID NO:8847 and 17365; SEQ ID NO:8688 and 5864; SEQ ID NO:8687 and 5862; SEQ ID NO:15175 and 5209; SEQ ID NO:15174 and 5208; SEQ ID NO:14311 and 7279; SEQ ID NO: 14303 and 7275; SEQ ID NO:14437 and 12261; SEQ ID NO: 14436 and 12260; SEQ ID NO:12131 and 5201; SEQ ID NO:12130 and 5200; SEQ ID NO: 14130 and 7224; SEQ ID NO: 14129 and 7223; SEQ ID NO:8434 and 13482; SEQ ID NO:8433 and 13476; SEQ ID NO:15001 and 6955; SEQ ID NO: 14984 and 6952; SEQ ID NO:15488 and 7204; SEQ ID NO:15487 and 7203; SEQ ID NO:8732 and 13472; SEQ ID NO:8726 and 13471; SEQ ID NO:6262 and 17299; SEQ ID NO:6261 and 17298; SEQ ID NO:8717 and 13520; SEQ ID NO:8716 and 13515; SEQ ID NO: 14730 and 7285; SEQ ID NO: 14726 and 7268; SEQ ID NO:15442 and 7304; SEQ ID NO: 15441 and 7303; SEQ ID NO: 14022 and 7292; SEQ ID NO: 14019 and 7263; SEQ ID NO:8536 and 5328; SEQ ID NO:8527 and 5327; SEQ ID NO:8733 and 13132; SEQ ID NO:8726 and 13126; SEQ ID NO: 15369 and 7496; SEQ ID NO: 15368 and 7495; SEQ ID NO: 15412 and 5417; SEQ ID NO: 15411 and 5416; SEQ ID NO: 14127 and 6957; SEQ ID NO: 14122 and 6952; SEQ ID NO:15069 and 6808; SEQ ID NO:15068 and 6807; SEQ ID NO:9135 and 6812; SEQ ID NO:9134 and 6811; SEQ ID NO:14731 and 6955; SEQ ID NO: 14727 and 6952; SEQ ID NO: 14992 and 17497; SEQ ID NO: 14985 and 17496; SEQ ID NO:14716 and 13601; SEQ ID NO: 14705 and 13600; SEQ ID NO:8719 and 17386; SEQ ID NO:8718 and 17377; SEQ ID NO:8980 and 7422; SEQ ID NO:8979 and 7421; SEQ ID NO:15476 and 5425; SEQ ID NO: 15475 and 5424; SEQ ID NO:16317 and 5409; SEQ ID NO:16316 and 5408; SEQ ID NO: 15000 and 7279; SEQ ID NO: 14984 and 7275; SEQ ID NO:8532 and 5325; SEQ ID NO:8527 and 5317; SEQ ID NO:8931 and 5744; SEQ ID NO:8929 and 5737; SEQ ID NO:15548 and 4677; SEQ ID NO:15547 and 4676; SEQ ID NO:8720 and 4945; SEQ ID NO:8718 and 4944; SEQ ID NO:8858 and 17331; SEQ ID NO:8857 and 17330; SEQ ID NO:15446 and 13055; SEQ ID NO:15445 and 13054; SEQ ID NO:8260 and 7589; SEQ ID NO:8259 and 7588; SEQ ID NO:15480 and 6810; SEQ ID NO:15479 and 6809; SEQ ID NO: 14495 and 13475; SEQ ID NO: 14494 and 13474; SEQ ID NO: 14771 and 5013; SEQ ID NO: 14770 and 5012; SEQ ID NO:15486 and 7050; SEQ ID NO:15485 and 7049; SEQ ID NO:13925 and 13481; SEQ ID NO:13921 and 13476; SEQ ID NO: 8134 and 7520; SEQ ID NO:8133 and 7519; SEQ ID NO:15422 and 7124; SEQ ID NO:15421 and 7123; SEQ ID NO:13926 and 17385; SEQ ID NO:13921 and 17377; SEQ ID NO:8860 and 17382; SEQ ID NO:8857 and 17378; SEQ ID NO:6658 and 9431; SEQ ID NO:6657 and 9430; SEQ ID NO:14547 and 7064; SEQ ID NO:14546 and 7063; SEQ ID NO:15221 and 7178; SEQ ID NO:15220 and 7177; SEQ ID NO:14126 and 17327; SEQ ID NO: 14123 and 17324; SEQ ID NO: 14111 and 7279; SEQ ID NO: 14110 and 7275; SEQ ID NO:8422 and 7260; SEQ ID NO:8421 and 7259; SEQ ID NO:14459 and 13121; SEQ ID NO:14458 and 13120; SEQ ID NO:8366 and 13232; SEQ ID NO:8365 and 13231; SEQ ID NO: 14668 and 4123; SEQ ID NO: 14665 and 4122; SEQ ID NO:15183 and 5485; SEQ ID NO:15182 and 5484; SEQ ID NO:12169 and 5067; SEQ ID NO: 12166 and 5058; SEQ ID NO: 12177 and 7004; SEQ ID NO: 12170 and 7003; SEQ ID NO:8581 and 7462; SEQ ID NO:8580 and 7461; SEQ ID NO: 12067 and 13415; SEQ ID NO: 12065 and 13414; SEQ ID NO:13927 and 7627; SEQ ID NO:13920 and 7614; SEQ ID NO:14114 and 17094; SEQ ID NO:14110 and 17087; SEQ ID NO:13996 and 4812; SEQ ID NO:13995 and 4811; SEQ ID NO:14729 and 17093; SEQ ID NO: 14728 and 17088; SEQ ID NO:15507 and 4096; SEQ ID NO:15506 and 4095; SEQ ID NO: 13702 and 6743; SEQ ID NO: 13701 and 6742; SEQ ID NO:14659 and 12256; SEQ ID NO:14658 and 12255; SEQ ID NO: 14996 and 7630; SEQ ID NO: 14984 and 7627; SEQ ID NO:9117 and 5631; SEQ ID NO:9116 and 5630; SEQ ID NO:8986 and 13447; SEQ ID NO:8985 and 13446; SEQ ID NO:8380 and 7536; SEQ ID NO:8379 and 7535; SEQ ID NO:8370 and 5203; SEQ ID NO:8369 and 5202; SEQ ID NO:8448 and 7540; SEQ ID NO:8447 and 7539; SEQ ID NO:15426 and 7352; SEQ ID NO:15425 and 7351; SEQ ID NO: 14987 and 6964; SEQ ID NO: 14985 and 6946; SEQ ID NO:8668 and 4717; SEQ ID NO:8667 and 4716; SEQ ID NO: 14734 and 5618; SEQ ID NO:14723 and 5607; SEQ ID NO:8404 and 6343; SEQ ID NO:8403 and 6342; SEQ ID NO:8599 and 7666; SEQ ID NO:8598 and 7665; SEQ ID NO:14462 and 17326; SEQ ID NO: 14460 and 17325; SEQ ID NO:8822 and 5185; SEQ ID NO:8821 and 5184; SEQ ID NO:15478 and 9291; SEQ ID NO: 15477 and 9290; SEQ ID NO: 14432 and 5617; SEQ ID NO: 14425 and 5607; SEQ ID NO:14677 and 5326; SEQ ID NO: 14664 and 5317; SEQ ID NO: 15430 and 7234; SEQ ID NO: 15429 and 7233; SEQ ID NO: 14997 and 13416; SEQ ID NO: 14985 and 13413; SEQ ID NO:15420 and 7154; SEQ ID NO:15419 and 7153; SEQ ID NO: 14694 and 7616; SEQ ID NO: 14692 and 7615; SEQ ID NO:6282 and 17315; SEQ ID NO:6281 and 17314; SEQ ID NO: 8905 and 4118; SEQ ID NO:8901 and 4117; SEQ ID NO:8456 and 13113; SEQ ID NO:8455 and 13112; SEQ ID NO:15219 and 6774; SEQ ID NO:15218 and 6773; SEQ ID NO: 14377 and 7362; SEQ ID NO:14376 and 7361; SEQ ID NO:13630 and 9301; SEQ ID NO:13629 and 9300; SEQ ID NO:15297 and 7220; SEQ ID NO:15296 and 7219; SEQ ID NO:8458 and 7500; SEQ ID NO:8457 and 7499; SEQ ID NO:8531 and 13522; SEQ ID NO:8527 and 13515; SEQ ID NO: 14341 and 7088; SEQ ID NO: 14340 and 7087; SEQ ID NO:8861 and 5334; SEQ ID NO:8857 and 5327; SEQ ID NO: 14483 and 7086; SEQ ID NO: 14482 and 7085; SEQ ID NO:8810 and 5381; SEQ ID NO:8809 and 5380; SEQ ID NO:8661 and 15550; SEQ ID NO:8660 and 15549; SEQ ID NO: 15424 and 7184; SEQ ID NO: 15423 and 7183; SEQ ID NO:7838 and 6437; SEQ ID NO:7837 and 6436; SEQ ID NO:8697 and 5830; SEQ ID NO:8687 and 5828; SEQ ID NO:8249 and 4961; SEQ ID NO:8238 and 4960; SEQ ID NO: 14430 and 5616; SEQ ID NO: 14425 and 5607; SEQ ID NO:8250 and 4907; SEQ ID NO:8238 and 4905; SEQ ID NO:8917 and 6832; SEQ ID NO:8916 and 6831; SEQ ID NO:13919 and 17406; SEQ ID NO: 13918 and 17405; SEQ ID NO:9084 and 5324; SEQ ID NO:9074 and 5321; SEQ ID NO:14262 and 5293; SEQ ID NO:14261 and 5292; SEQ ID NO:8846 and 5517; SEQ ID NO:8845 and 5516; SEQ ID NO:12185 and 13480; SEQ ID NO: 12166 and 13476; SEQ ID NO: 14929 and 6796; SEQ ID NO: 14928 and 6795; SEQ ID NO:8693 and 7288; SEQ ID NO:8687 and 7263; SEQ ID NO:8512 and 13604; SEQ ID NO:8511 and 13603; SEQ ID NO:14315 and 4915; SEQ ID NO:14314 and 4914; SEQ ID NO:8639 and 5323; SEQ ID NO:8638 and 5321; SEQ ID NO:8118 and 7587; SEQ ID NO:8117 and 7586; SEQ ID NO:8870 and 6904; SEQ ID NO:8869 and 6903; SEQ ID NO:9083 and 4979; SEQ ID NO:9074 and 4978; SEQ ID NO:8132 and 7550; SEQ ID NO:8131 and 7549; SEQ ID NO:14203 and 5061; SEQ ID NO:14201 and 5060; SEQ ID NO: 15325 and 7430; SEQ ID NO: 15324 and 7429; SEQ ID NO:8521 and 4912; SEQ ID NO:8517 and 4905; SEQ ID NO:15279 and 10525; SEQ ID NO:15278 and 10524; SEQ ID NO:15530 and 17419; SEQ ID NO: 15529 and 17418; SEQ ID NO:9086 and 6948; SEQ ID NO:9074 and 6946; SEQ ID NO:14989 and 5615; SEQ ID NO:14985 and 5607; SEQ ID NO:8412 and 7454; SEQ ID NO:8411 and 7453; SEQ ID NO:9177 and 17485; SEQ ID NO:9176 and 17484; SEQ ID NO:14251 and 13519; SEQ ID NO:14250 and 13518; SEQ ID NO: 15145 and 4671; SEQ ID NO:15144 and 4670; SEQ ID NO:9087 and 5157; SEQ ID NO:9073 and 5156; SEQ ID NO: 12180 and 17498; SEQ ID NO:12166 and 17496; SEQ ID NO:9121 and 5501; SEQ ID NO:9120 and 5500; SEQ ID NO:9161 and 10658; SEQ ID NO:9160 and 10657; SEQ ID NO: 14988 and 4723; SEQ ID NO: 14985 and 4721; SEQ ID NO: 14441 and 17481; SEQ ID NO: 14440 and 17480; SEQ ID NO:8928 and 5863; SEQ ID NO:8926 and 5862; SEQ ID NO:8685 and 7291; SEQ ID NO:8684 and 7263; SEQ ID NO: 14999 and 5326; SEQ ID NO:14985 and 5321; SEQ ID NO:14951 and 5179; SEQ ID NO:14950 and 5178; SEQ ID NO:14426 and 5831; SEQ ID NO: 14425 and 5828; SEQ ID NO:8727 and 5865; SEQ ID NO:8726 and 5862; SEQ ID NO:15438 and 7152; SEQ ID NO:15437 and 7151; SEQ ID NO:14465 and 13130; SEQ ID NO:14460 and 13127; SEQ ID NO:9088 and 7628; SEQ ID NO:9073 and 7627; SEQ ID NO:15428 and 7150; SEQ ID NO:15427 and 7149; SEQ ID NO: 14688 and 7595; SEQ ID NO: 14687 and 7594; SEQ ID NO:8245 and 17379; SEQ ID NO:8238 and 17378; SEQ ID NO:14433 and 13308; SEQ ID NO: 14425 and 13305; SEQ ID NO:15444 and 7302; SEQ ID NO:15443 and 7301; SEQ ID NO: 13760 and 7056; SEQ ID NO:13759 and 7055; SEQ ID NO:9076 and 7289; SEQ ID NO:9074 and 7263; SEQ ID NO: 14231 and 7492; SEQ ID NO:14230 and 7491; SEQ ID NO:8528 and 4910; SEQ ID NO:8527 and 4905; SEQ ID NO:15303 and 6683; SEQ ID NO:15302 and 6682; SEQ ID NO: 15376 and 4126; SEQ ID NO:15374 and 4124; SEQ ID NO:8947 and 6936; SEQ ID NO:8946 and 6935; SEQ ID NO:13662 and 4834; SEQ ID NO:13661 and 4833; SEQ ID NO: 15311 and 6341; SEQ ID NO:15310 and 6340; SEQ ID NO:14785 and 5153; SEQ ID NO: 14784 and 5152; SEQ ID NO:9337 and 6355; SEQ ID NO:9336 and 6354; SEQ ID NO:9082 and 7278; SEQ ID NO:9074 and 7275; SEQ ID NO: 14690 and 13124; SEQ ID NO: 14689 and 13122; SEQ ID NO:8715 and 5608; SEQ ID NO:8714 and 5607; SEQ ID NO:12176 and 7274; SEQ ID NO: 12170 and 7268; SEQ ID NO:14464 and 6959; SEQ ID NO:14460 and 6952; SEQ ID NO:12173 and 13129; SEQ ID NO:12170 and 13127; SEQ ID NO: 14941 and 6681; SEQ ID NO:14940 and 6680; SEQ ID NO:15227 and 7338; SEQ ID NO:15226 and 7337; SEQ ID NO: 14116 and 17503; SEQ ID NO: 14110 and 17499; SEQ ID NO: 13911 and 7356; SEQ ID NO:13910 and 7355; SEQ ID NO: 8328 and 7524; SEQ ID NO:8327 and 7523; SEQ ID NO: 14196 and 7324; SEQ ID NO: 14195 and 7323; SEQ ID NO:15365 and 4738; SEQ ID NO:15364 and 4737; SEQ ID NO:14757 and 6965; SEQ ID NO:14753 and 6941; SEQ ID NO:14255 and 7629; SEQ ID NO: 14250 and 7627; SEQ ID NO:8692 and 4913; SEQ ID NO:8687 and 4905; SEQ ID NO: 14027 and 13081; SEQ ID NO: 14026 and 13080; SEQ ID NO:13883 and 6365; SEQ ID NO:13882 and 6364; SEQ ID NO:8583 and 17483; SEQ ID NO:8582 and 17482; SEQ ID NO:14857 and 5826; SEQ ID NO: 14856 and 5825; SEQ ID NO: 14308 and 4904; SEQ ID NO: 14304 and 4903; SEQ ID NO:9085 and 5832; SEQ ID NO:9074 and 5828; SEQ ID NO:14423 and 7620; SEQ ID NO:14422 and 7618; SEQ ID NO:14014 and 13383; SEQ ID NO:14013 and 13382; SEQ ID NO: 13948 and 5635; SEQ ID NO:13947 and 5634; SEQ ID NO:8674 and 7854; SEQ ID NO:8673 and 7853; SEQ ID NO: 14645 and 4521; SEQ ID NO: 14644 and 4520; SEQ ID NO:8555 and 5041; SEQ ID NO:8554 and 5040; SEQ ID NO: 14703 and 6407; SEQ ID NO: 14702 and 6406; SEQ ID NO: 14035 and 17362; SEQ ID NO: 14034 and 17361; SEQ ID NO:8758 and 4971; SEQ ID NO:8757 and 4970; SEQ ID NO: 14309 and 6399; SEQ ID NO: 14304 and 6398; SEQ ID NO: 14306 and 5743; SEQ ID NO: 14304 and 5737; SEQ ID NO: 14427 and 4722; SEQ ID NO: 14425 and 4721; SEQ ID NO:14008 and 7780; SEQ ID NO: 14007 and 7779; SEQ ID NO: 14787 and 5077; SEQ ID NO: 14786 and 5076; SEQ ID NO:11957 and 13433; SEQ ID NO:11956 and 13432; SEQ ID NO:9091 and 18246; SEQ ID NO:9090 and 18245; SEQ ID NO:13944 and 4830; SEQ ID NO:13943 and 4829; SEQ ID NO:8723 and 17501; SEQ ID NO:8718 and 17500; SEQ ID NO:8222 and 5603; SEQ ID NO:8221 and 5602; SEQ ID NO:8432 and 12264; SEQ ID NO:8431 and 12263; SEQ ID NO:9191 and 5641; SEQ ID NO:9190 and 5640; SEQ ID NO:6258 and 5761; SEQ ID NO:6257 and 5760; SEQ ID NO: 14164 and 5543; SEQ ID NO: 14163 and 5542; SEQ ID NO:14452 and 17091; SEQ ID NO:14450 and 17089; SEQ ID NO: 14103 and 6943; SEQ ID NO: 14102 and 6942; SEQ ID NO: 14827 and 7062; SEQ ID NO: 14826 and 7061; SEQ ID NO: 13982 and 5531; SEQ ID NO:13981 and 5530; SEQ ID NO:8676 and 7290; SEQ ID NO:8675 and 7263; SEQ ID NO: 14647 and 7182; SEQ ID NO: 14646 and 7181; SEQ ID NO:6296 and 5519; SEQ ID NO:6295 and 5518; SEQ ID NO:14945 and 7250; SEQ ID NO:14944 and 7249; SEQ ID NO:8894 and 17420; SEQ ID NO:8893 and 17417; SEQ ID NO:13636 and 5103; SEQ ID NO:13635 and 5102; SEQ ID NO:8535 and 13140; SEQ ID NO:8527 and 13139; SEQ ID NO:8730 and 5833; SEQ ID NO:8726 and 5827; SEQ ID NO:12240 and 5269; SEQ ID NO:12239 and 5268; SEQ ID NO:8579 and 7700; SEQ ID NO:8578 and 7699; SEQ ID NO:9245 and 5255; SEQ ID NO:9244 and 5254; SEQ ID NO:9020 and 5324; SEQ ID NO:9019 and 5321; SEQ ID NO:14049 and 13484; SEQ ID NO:14048 and 13483; SEQ ID NO:8907 and 13143; SEQ ID NO:8899 and 13142; SEQ ID NO:8028 and 4535; SEQ ID NO:8027 and 4534; SEQ ID NO: 14188 and 4742; SEQ ID NO:14187 and 4741; SEQ ID NO:8424 and 4084; SEQ ID NO:8423 and 4083; SEQ ID NO:8764 and 5297; SEQ ID NO:8763 and 5296; SEQ ID NO:8346 and 7694; SEQ ID NO:8345 and 7693; SEQ ID NO:13924 and 7271; SEQ ID NO:13921 and 7268; SEQ ID NO: 15177 and 7939; SEQ ID NO: 15176 and 7938; SEQ ID NO: 14200 and 7283; SEQ ID NO: 14197 and 7268; SEQ ID NO:8776 and 13071; SEQ ID NO:8775 and 13070; SEQ ID NO: 13628 and 17096; SEQ ID NO:13627 and 17095; SEQ ID NO:14585 and 7412; SEQ ID NO:14584 and 7411; SEQ ID NO:11912 and 4746; SEQ ID NO:11911 and 4745; SEQ ID NO:14783 and 7116; SEQ ID NO:14782 and 7115; SEQ ID NO:8689 and 13525; SEQ ID NO:8687 and 13524; SEQ ID NO: 14671 and 7270; SEQ ID NO: 14665 and 7268; SEQ ID NO: 12072 and 6949; SEQ ID NO: 12070 and 6946; SEQ ID NO: 14674 and 5740; SEQ ID NO:14665 and 5737; SEQ ID NO:9089 and 5331; SEQ ID NO:9073 and 5330; SEQ ID NO:13960 and 4832; SEQ ID NO:13959 and 4831; SEQ ID NO:8534 and 4125; SEQ ID NO:8527 and 4124; SEQ ID NO: 14253 and 7272; SEQ ID NO: 14250 and 7268; SEQ ID NO:13748 and 5853; SEQ ID NO:13747 and 5852; SEQ ID NO:6595 and 17511; SEQ ID NO:6594 and 17510; SEQ ID NO:8788 and 11739; SEQ ID NO:8787 and 11738; SEQ ID NO: 13905 and 7607; SEQ ID NO: 13904 and 7606; SEQ ID NO:8696 and 5401; SEQ ID NO:8687 and 5400; SEQ ID NO:8549 and 5177; SEQ ID NO:8548 and 5176; SEQ ID NO: 14095 and 13280; SEQ ID NO: 14094 and 13279; SEQ ID NO:13772 and 13294; SEQ ID NO:13771 and 13293; SEQ ID NO:14986 and 13144; SEQ ID NO:14985 and 13141; SEQ ID NO:14710 and 13143; SEQ ID NO: 14705 and 13142; SEQ ID NO:15392 and 5503; SEQ ID NO:15391 and 5502; SEQ ID NO:8784 and 7068; SEQ ID NO:8783 and 7067; SEQ ID NO:9195 and 4547; SEQ ID NO:9194 and 4546; SEQ ID NO:9133 and 6902; SEQ ID NO:9132 and 6901; SEQ ID NO:13885 and 17387; SEQ ID NO:13884 and 17377; SEQ ID NO:15099 and 4642; SEQ ID NO:15098 and 4641; SEQ ID NO:13954 and 5765; SEQ ID NO:13953 and 5764; SEQ ID NO:13988 and 17248; SEQ ID NO: 13987 and 17247; SEQ ID NO:8790 and 5277; SEQ ID NO:8789 and 5276; SEQ ID NO:15267 and 10668; SEQ ID NO: 15266 and 10667; SEQ ID NO:8961 and 6816; SEQ ID NO:8960 and 6815; SEQ ID NO:14709 and 11401; SEQ ID NO: 14705 and 11400; SEQ ID NO:8704 and 5391; SEQ ID NO:8703 and 5390; SEQ ID NO:14431 and 11402; SEQ ID NO:14425 and 11400; SEQ ID NO:8677 and 13268; SEQ ID NO:8675 and 13267; SEQ ID NO:14415 and 7654; SEQ ID NO:14414 and 7653; SEQ ID NO:14192 and 6741; SEQ ID NO: 14191 and 6740; SEQ ID NO:13901 and 5637; SEQ ID NO:13900 and 5636; SEQ ID NO:8935 and 6806; SEQ ID NO:8934 and 6805; SEQ ID NO:9058 and 6842; SEQ ID NO:9057 and 6841; SEQ ID NO:8904 and 4906; SEQ ID NO:8901 and 4905; SEQ ID NO:8589 and 5495; SEQ ID NO:8588 and 5494; SEQ ID NO:13964 and 17368; SEQ ID NO:13963 and 17367; SEQ ID NO:8488 and 5299; SEQ ID NO:8487 and 5298; SEQ ID NO:13899 and 4838; SEQ ID NO:13898 and 4837; SEQ ID NO:15028 and 6954; SEQ ID NO:15027 and 6952; SEQ ID NO: 14447 and 13095; SEQ ID NO: 14446 and 13094; SEQ ID NO: 15035 and 5693; SEQ ID NO: 15034 and 5692; SEQ ID NO: 15259 and 7406; SEQ ID NO: 15258 and 7405; SEQ ID NO:8694 and 7617; SEQ ID NO:8687 and 7615; SEQ ID NO: 14539 and 12276; SEQ ID NO:14538 and 12275; SEQ ID NO:8573 and 5521; SEQ ID NO:8572 and 5520; SEQ ID NO:13930 and 6958; SEQ ID NO:13920 and 6952; SEQ ID NO: 14655 and 4762; SEQ ID NO: 14654 and 4761; SEQ ID NO:7998 and 13059; SEQ ID NO:7997 and 13058; SEQ ID NO:13922 and 7625; SEQ ID NO:13921 and 7618; SEQ ID NO:9187 and 4566; SEQ ID NO:9186 and 4565; SEQ ID NO: 14680 and 4720; SEQ ID NO: 14664 and 4716; SEQ ID NO:8945 and 6753; SEQ ID NO:8944 and 6752; SEQ ID NO:8725 and 5329; SEQ ID NO:8724 and 5327; SEQ ID NO: 14300 and 13473; SEQ ID NO: 14299 and 13470; SEQ ID NO: 14045 and 4925; SEQ ID NO: 14044 and 4924; SEQ ID NO: 14706 and 7627; SEQ ID NO: 14705 and 7615; SEQ ID NO:8933 and 13158; SEQ ID NO:8932 and 13157; SEQ ID NO:15071 and 4094; SEQ ID NO:15070 and 4093; SEQ ID NO: 14000 and 4923; SEQ ID NO:13999 and 4922; SEQ ID NO:8761 and 4119; SEQ ID NO:8759 and 4115; SEQ ID NO:8613 and 4545; SEQ ID NO:8612 and 4544; SEQ ID NO:12231 and 7054; SEQ ID NO:12230 and 7053; SEQ ID NO:13966 and 7613; SEQ ID NO:13965 and 7612; SEQ ID NO: 14746 and 7601; SEQ ID NO: 14745 and 7600; SEQ ID NO: 14307 and 13602; SEQ ID NO: 14304 and 13600; SEQ ID NO:8368 and 4752; SEQ ID NO:8367 and 4751; SEQ ID NO:13958 and 16577; SEQ ID NO:13957 and 16576; SEQ ID NO:8955 and 13502; SEQ ID NO:8954 and 13501; SEQ ID NO:8911 and 13083; SEQ ID NO:8910 and 13082; SEQ ID NO: 12209 and 5393; SEQ ID NO: 12208 and 5392; SEQ ID NO:14711 and 7631; SEQ ID NO: 14705 and 7627; SEQ ID NO: 14051 and 5149; SEQ ID NO:14050 and 5148; SEQ ID NO:14707 and 13417; SEQ ID NO:14705 and 13412; SEQ ID NO:8450 and 9297; SEQ ID NO:8449 and 9296; SEQ ID NO:14319 and 5199; SEQ ID NO:14318 and 5198; SEQ ID NO: 14755 and 7276; SEQ ID NO: 14753 and 7275; SEQ ID NO:8006 and 17082; SEQ ID NO:8005 and 17081; SEQ ID NO:14198 and 7632; SEQ ID NO:14197 and 7627; SEQ ID NO:8963 and 6679; SEQ ID NO:8962 and 6678; SEQ ID NO:14807 and 7603; SEQ ID NO: 14806 and 7602; SEQ ID NO:15033 and 13523; SEQ ID NO:15031 and 13513; SEQ ID NO:14575 and 7332; SEQ ID NO:14574 and 7331; SEQ ID NO:8239 and 11748; SEQ ID NO:8238 and 11747; SEQ ID NO:14323 and 5885; SEQ ID NO: 14322 and 5884; SEQ ID NO: 15135 and 7298; SEQ ID NO: 15134 and 7297; SEQ ID NO: 13758 and 13260; SEQ ID NO:13757 and 13259; SEQ ID NO:14286 and 13298; SEQ ID NO:14285 and 13297; SEQ ID NO:8436 and 13156; SEQ ID NO:8435 and 13155; SEQ ID NO: 8965 and 7243; SEQ ID NO:8964 and 7242; SEQ ID NO:13770 and 7132; SEQ ID NO: 13769 and 7131; SEQ ID NO:15191 and 6804; SEQ ID NO: 15190 and 6803; SEQ ID NO:8430 and 17305; SEQ ID NO:8429 and 17304; SEQ ID NO: 13889 and 17370; SEQ ID NO: 13888 and 17369; SEQ ID NO: 15329 and 7344; SEQ ID NO: 15328 and 7343; SEQ ID NO:8342 and 12312; SEQ ID NO:8341 and 12311; SEQ ID NO:8951 and 11799; SEQ ID NO:8950 and 11798; SEQ ID NO:8065 and 17396; SEQ ID NO:8064 and 17395; SEQ ID NO: 12078 and 13288; SEQ ID NO:12077 and 13287; SEQ ID NO:9107 and 6878; SEQ ID NO:9106 and 6877; SEQ ID NO: 15215 and 4640; SEQ ID NO:15214 and 4639; SEQ ID NO:8004 and 11813; SEQ ID NO:8003 and 11812; SEQ ID NO: 14429 and 7330; SEQ ID NO: 14425 and 7329; SEQ ID NO:15153 and 7330; SEQ ID NO:15152 and 7329; SEQ ID NO:6648 and 7776; SEQ ID NO:6647 and 7775; SEQ ID NO: 13845 and 10624; SEQ ID NO:13844 and 10623; SEQ ID NO:8647 and 13051; SEQ ID NO:8646 and 13050; SEQ ID NO:8304 and 5207; SEQ ID NO:8303 and 5206; SEQ ID NO:14841 and 5810; SEQ ID NO:14840 and 5809; SEQ ID NO:15396 and 7736; SEQ ID NO:15395 and 7735; SEQ ID NO: 12127 and 5639; SEQ ID NO: 12126 and 5638; SEQ ID NO:7887 and 6204; SEQ ID NO:7886 and 6203; SEQ ID NO:6646 and 7504; SEQ ID NO:6645 and 7503; SEQ ID NO:15532 and 5217; SEQ ID NO:15531 and 5216; SEQ ID NO:12295 and 5433; SEQ ID NO: 12294 and 5432; SEQ ID NO:15309 and 17307; SEQ ID NO:15308 and 17306; SEQ ID NO:8160 and 13375; SEQ ID NO:8159 and 13374; SEQ ID NO:15464 and 7947; SEQ ID NO:15463 and 7946; SEQ ID NO:13726 and 5773; SEQ ID NO: 13725 and 5772; SEQ ID NO:8740 and 11803; SEQ ID NO:8739 and 11802; SEQ ID NO: 11959 and 13488; SEQ ID NO: 11958 and 13487; SEQ ID NO:8082 and 5471; SEQ ID NO:8081 and 5470; SEQ ID NO:8296 and 5283; SEQ ID NO:8295 and 5282; SEQ ID NO:8557 and 7831; SEQ ID NO:8556 and 7830; SEQ ID NO:8760 and 13521; SEQ ID NO:8759 and 13515; SEQ ID NO:8605 and 13053; SEQ ID NO:8604 and 13052; SEQ ID NO:14577 and 9295; SEQ ID NO:14576 and 9294; SEQ ID NO:14573 and 5219; SEQ ID NO:14572 and 5218; SEQ ID NO:15500 and 13463; SEQ ID NO: 15499 and 13462; SEQ ID NO: 14523 and 7240; SEQ ID NO: 14522 and 7239; SEQ ID NO: 12219 and 5703; SEQ ID NO: 12218 and 5702; SEQ ID NO:8982 and 13150; SEQ ID NO:8981 and 13149; SEQ ID NO:14199 and 17387; SEQ ID NO:14197 and 17377; SEQ ID NO:9000 and 13202; SEQ ID NO:8999 and 13201; SEQ ID NO:15020 and 5227; SEQ ID NO: 15019 and 5226; SEQ ID NO:15057 and 5175; SEQ ID NO:15056 and 5174; SEQ ID NO:7836 and 7202; SEQ ID NO:7835 and 7201; SEQ ID NO:14871 and 7114; SEQ ID NO:14870 and 7113; SEQ ID NO:9281 and 7782; SEQ ID NO:9280 and 7781; SEQ ID NO:8002 and 13047; SEQ ID NO:8001 and 13046; SEQ ID NO:8978 and 13152; SEQ ID NO: 8977 and 13151; SEQ ID NO:14851 and 7026; SEQ ID NO:14850 and 7025; SEQ ID NO:15327 and 7112; SEQ ID NO:15326 and 7111; SEQ ID NO:14811 and 7176; SEQ ID NO:14810 and 7175; SEQ ID NO:8774 and 13075; SEQ ID NO:8773 and 13074; SEQ ID NO:9078 and 6951; SEQ ID NO:9074 and 6950; SEQ ID NO:8144 and 11815; SEQ ID NO:8143 and 11814; SEQ ID NO:14669 and 7281; SEQ ID NO: 14665 and 7268; SEQ ID NO: 14505 and 5334; SEQ ID NO: 14504 and 5327; SEQ ID NO:14873 and 7206; SEQ ID NO:14872 and 7205; SEQ ID NO:15205 and 4814; SEQ ID NO:15204 and 4813; SEQ ID NO:15378 and 4102; SEQ ID NO: 15374 and 4101; SEQ ID NO:8506 and 10656; SEQ ID NO:8505 and 10655; SEQ ID NO: 12052 and 13276; SEQ ID NO:12051 and 13275; SEQ ID NO:6264 and 17281; SEQ ID NO:6263 and 17280; SEQ ID NO:9239 and 13387; SEQ ID NO:9238 and 13386; SEQ ID NO: 14971 and 5169; SEQ ID NO: 14970 and 5168; SEQ ID NO:9137 and 10596; SEQ ID NO:9136 and 10595; SEQ ID NO: 12297 and 5291; SEQ ID NO: 12296 and 5290; SEQ ID NO:8844 and 6357; SEQ ID NO:8843 and 6356; SEQ ID NO:14691 and 17381; SEQ ID NO:14689 and 17378; SEQ ID NO:8906 and 13118; SEQ ID NO:8899 and 13117; SEQ ID NO:11922 and 13381; SEQ ID NO:11921 and 13380; SEQ ID NO:15037 and 7010; SEQ ID NO:15036 and 7009; SEQ ID NO:8533 and 13123; SEQ ID NO:8527 and 13122; SEQ ID NO:9131 and 5749; SEQ ID NO:9130 and 5736; SEQ ID NO:15440 and 7386; SEQ ID NO:15439 and 7385; SEQ ID NO:8146 and 7750; SEQ ID NO:8145 and 7749; SEQ ID NO:8621 and 13146; SEQ ID NO:8620 and 13145; SEQ ID NO:8324 and 6910; SEQ ID NO:8323 and 6909; SEQ ID NO: 14039 and 4900; SEQ ID NO: 14038 and 4899; SEQ ID NO: 15155 and 7866; SEQ ID NO: 15154 and 7865; SEQ ID NO:15085 and 7246; SEQ ID NO: 15084 and 7245; SEQ ID NO:8454 and 11819; SEQ ID NO:8453 and 11818; SEQ ID NO:15341 and 7937; SEQ ID NO:15340 and 7936; SEQ ID NO:15357 and 7218; SEQ ID NO:15356 and 7217; SEQ ID NO: 12289 and 5257; SEQ ID NO: 12288 and 5256; SEQ ID NO:8595 and 7072; SEQ ID NO:8594 and 7071; SEQ ID NO:15546 and 13457; SEQ ID NO:15545 and 13456; SEQ ID NO:8818 and 6391; SEQ ID NO:8817 and 6390; SEQ ID NO:6650 and 7566; SEQ ID NO:6649 and 7565; SEQ ID NO:15137 and 7358; SEQ ID NO:15136 and 7357; SEQ ID NO:13640 and 7704; SEQ ID NO: 13639 and 7703; SEQ ID NO:8988 and 13208; SEQ ID NO:8987 and 13207; SEQ ID NO:15337 and 4786; SEQ ID NO: 15336 and 4785; SEQ ID NO:9167 and 6202; SEQ ID NO:9166 and 6201; SEQ ID NO:9097 and 5233; SEQ ID NO:9096 and 5232; SEQ ID NO:8178 and 7446; SEQ ID NO:8177 and 7445; SEQ ID NO:15143 and 7244; SEQ ID NO:15142 and 7241; SEQ ID NO:15261 and 5689; SEQ ID NO: 15260 and 5688; SEQ ID NO:12058 and 5873; SEQ ID NO: 12057 and 5872; SEQ ID NO: 14839 and 5469; SEQ ID NO:14838 and 5468; SEQ ID NO: 14069 and 7198; SEQ ID NO: 14068 and 7197; SEQ ID NO:8746 and 13091; SEQ ID NO:8745 and 13090; SEQ ID NO: 14172 and 13429; SEQ ID NO:14171 and 13428; SEQ ID NO:14676 and 17384; SEQ ID NO:14665 and 17377; SEQ ID NO:14057 and 7312; SEQ ID NO:14056 and 7311; SEQ ID NO:8122 and 13439; SEQ ID NO:8121 and 13438; SEQ ID NO:8214 and 5319; SEQ ID NO:8213 and 5318; SEQ ID NO:8744 and 5802; SEQ ID NO:8743 and 5801; SEQ ID NO:8597 and 5812; SEQ ID NO:8596 and 5811; SEQ ID NO: 14180 and 13079; SEQ ID NO: 14179 and 13078; SEQ ID NO:9044 and 5387; SEQ ID NO:9043 and 5386; SEQ ID NO: 14981 and 4959; SEQ ID NO: 14980 and 4958; SEQ ID NO:8984 and 13154; SEQ ID NO:8983 and 13153; SEQ ID NO: 15047 and 10626; SEQ ID NO: 15046 and 10625; SEQ ID NO:8426 and 13212; SEQ ID NO:8425 and 13211; SEQ ID NO:8128 and 9331; SEQ ID NO:8127 and 9330; SEQ ID NO:15536 and 5181; SEQ ID NO:15535 and 5180; SEQ ID NO: 14742 and 13045; SEQ ID NO: 14741 and 13044; SEQ ID NO:15367 and 5869; SEQ ID NO:15366 and 5868; SEQ ID NO:8464 and 4098; SEQ ID NO:8463 and 4097; SEQ ID NO:15313 and 6433; SEQ ID NO:15312 and 6432; SEQ ID NO:11047 and 7931; SEQ ID NO:11046 and 7930; SEQ ID NO:14012 and 5075; SEQ ID NO:14011 and 5074; SEQ ID NO:15534 and 17348; SEQ ID NO:15533 and 17347; SEQ ID NO: 18453 and 4114; SEQ ID NO:18452 and 4113; SEQ ID NO:14298 and 5397; SEQ ID NO: 14297 and 5396; SEQ ID NO:6276 and 4525; SEQ ID NO:6275 and 4524; SEQ ID NO: 14468 and 4724; SEQ ID NO: 14466 and 4715; SEQ ID NO:15538 and 17317; SEQ ID NO:15537 and 17316; SEQ ID NO: 13849 and 4684; SEQ ID NO:13848 and 4683; SEQ ID NO:14031 and 7256; SEQ ID NO:14030 and 7255; SEQ ID NO:14901 and 5431; SEQ ID NO:14900 and 5430; SEQ ID NO:14953 and 7328; SEQ ID NO: 14952 and 7327; SEQ ID NO: 15394 and 7802; SEQ ID NO:15393 and 7801; SEQ ID NO:8190 and 6830; SEQ ID NO:8189 and 6829; SEQ ID NO:8514 and 5083; SEQ ID NO:8513 and 5082; SEQ ID NO:8312 and 7708; SEQ ID NO:8311 and 7707; SEQ ID NO:14168 and 7074; SEQ ID NO:14167 and 7073; SEQ ID NO:8084 and 5673; SEQ ID NO:8083 and 5672; SEQ ID NO:13887 and 4796; SEQ ID NO:13886 and 4795; SEQ ID NO:15544 and 17340; SEQ ID NO: 15543 and 17339; SEQ ID NO: 14497 and 7702; SEQ ID NO:14496 and 7701; SEQ ID NO:8713 and 7277; SEQ ID NO:8711 and 7275; SEQ ID NO: 12207 and 5121; SEQ ID NO: 12206 and 5120; SEQ ID NO:14754 and 17332; SEQ ID NO: 14753 and 17329; SEQ ID NO:8246 and 17328; SEQ ID NO:8238 and 17324; SEQ ID NO: 14292 and 13049; SEQ ID NO:14291 and 13048; SEQ ID NO:13940 and 4846; SEQ ID NO:13939 and 4845; SEQ ID NO:8047 and 7444; SEQ ID NO:8046 and 7443; SEQ ID NO:14329 and 6413; SEQ ID NO:14328 and 6412; SEQ ID NO:8444 and 5675; SEQ ID NO:8443 and 5674; SEQ ID NO: 13690 and 5891; SEQ ID NO: 13689 and 5890; SEQ ID NO:8525 and 5039; SEQ ID NO:8524 and 5038; SEQ ID NO:8478 and 17390; SEQ ID NO:8477 and 17389; SEQ ID NO:8830 and 5585; SEQ ID NO:8829 and 5584; SEQ ID NO:8567 and 11821; SEQ ID NO:8566 and 11820; SEQ ID NO: 15129 and 7306; SEQ ID NO: 15128 and 7305; SEQ ID NO:8240 and 7267; SEQ ID NO:8238 and 7263; SEQ ID NO:14067 and 7941; SEQ ID NO: 14066 and 7940; SEQ ID NO: 14509 and 7456; SEQ ID NO: 14508 and 7455; SEQ ID NO:8164 and 6421; SEQ ID NO:8163 and 6420; SEQ ID NO:8040 and 11844; SEQ ID NO:8039 and 11843; SEQ ID NO: 14202 and 6961; SEQ ID NO:14201 and 6952; SEQ ID NO:8032 and 18240; SEQ ID NO:8031 and 18239; SEQ ID NO:8949 and 6415; SEQ ID NO:8948 and 6414; SEQ ID NO:8408 and 9429; SEQ ID NO:8407 and 9428; SEQ ID NO:8059 and 6425; SEQ ID NO:8058 and 6424; SEQ ID NO:9006 and 5413; SEQ ID NO:9005 and 5412; SEQ ID NO:12165 and 17080; SEQ ID NO: 12164 and 17079; SEQ ID NO:8049 and 5755; SEQ ID NO:8048 and 5754; SEQ ID NO:14317 and 4559; SEQ ID NO:14316 and 4558; SEQ ID NO:12043 and 5421; SEQ ID NO:12042 and 5420; SEQ ID NO: 15293 and 7248; SEQ ID NO: 15292 and 7247; SEQ ID NO:8384 and 5215; SEQ ID NO:8383 and 5214; SEQ ID NO:6660 and 7236; SEQ ID NO:6659 and 7235; SEQ ID NO:15363 and 6359; SEQ ID NO: 15362 and 6358; SEQ ID NO:9189 and 11835; SEQ ID NO:9188 and 11834; SEQ ID NO:8742 and 13606; SEQ ID NO:8741 and 13605; SEQ ID NO:8396 and 5341; SEQ ID NO:8395 and 5340; SEQ ID NO: 14843 and 5763; SEQ ID NO: 14842 and 5762; SEQ ID NO:14603 and 6447; SEQ ID NO: 14602 and 6446; SEQ ID NO:8394 and 5405; SEQ ID NO:8393 and 5404; SEQ ID NO:8286 and 5681; SEQ ID NO:8285 and 5680; SEQ ID NO:8338 and 13445; SEQ ID NO:8337 and 13444; SEQ ID NO:15109 and 6834; SEQ ID NO:15108 and 6833; SEQ ID NO:8212 and 6757; SEQ ID NO:8211 and 6756; SEQ ID NO:13746 and 11858; SEQ ID NO:13745 and 11857; SEQ ID NO:15359 and 6373; SEQ ID NO:15358 and 6372; SEQ ID NO:9197 and 6996; SEQ ID NO:9196 and 6995; SEQ ID NO:9175 and 5167; SEQ ID NO:9174 and 5166; SEQ ID NO: 14919 and 5213; SEQ ID NO:14918 and 5212; SEQ ID NO:14439 and 4121; SEQ ID NO:14438 and 4120; SEQ ID NO:9012 and 5735; SEQ ID NO:9011 and 5734; SEQ ID NO:14927 and 13206; SEQ ID NO:14926 and 13205; SEQ ID NO: 17684 and 5555; SEQ ID NO: 17683 and 5554; SEQ ID NO: 13972 and 4444; SEQ ID NO:13971 and 4443; SEQ ID NO:9072 and 13521; SEQ ID NO:9071 and 13515; SEQ ID NO:14579 and 6361; SEQ ID NO:14578 and 6360; SEQ ID NO:8014 and 5883; SEQ ID NO:8013 and 5882; SEQ ID NO:13915 and 13353; SEQ ID NO:13914 and 13352; SEQ ID NO:8659 and 11833; SEQ ID NO:8658 and 11832; SEQ ID NO:8494 and 5731; SEQ ID NO:8493 and 5730; SEQ ID NO:8398 and 5235; SEQ ID NO:8397 and 5234; SEQ ID NO:14136 and 7440; SEQ ID NO: 14135 and 7439; SEQ ID NO:8780 and 6970; SEQ ID NO:8779 and 6968; SEQ ID NO:15207 and 16808; SEQ ID NO:15206 and 16807; SEQ ID NO:14156 and 18126; SEQ ID NO: 14155 and 18125; SEQ ID NO:8603 and 11831; SEQ ID NO:8602 and 11830; SEQ ID NO:8392 and 6304; SEQ ID NO:8391 and 6303; SEQ ID NO:8204 and 13555; SEQ ID NO:8203 and 13554; SEQ ID NO:13893 and 6230; SEQ ID NO:13892 and 6229; SEQ ID NO: 14682 and 13278; SEQ ID NO:14681 and 13277; SEQ ID NO:14349 and 4896; SEQ ID NO:14348 and 4895; SEQ ID NO:14274 and 5423; SEQ ID NO:14273 and 5422; SEQ ID NO: 13877 and 7945; SEQ ID NO: 13876 and 7944; SEQ ID NO: 15390 and 6409; SEQ ID NO: 15389 and 6408; SEQ ID NO: 14499 and 13168; SEQ ID NO: 14498 and 13167; SEQ ID NO:6300 and 4969; SEQ ID NO:6299 and 4968; SEQ ID NO:12293 and 10611; SEQ ID NO: 12292 and 10610; SEQ ID NO: 15398 and 6427; SEQ ID NO: 15397 and 6426; SEQ ID NO: 14643 and 6445; SEQ ID NO: 14642 and 6444; SEQ ID NO: 14491 and 13459; SEQ ID NO: 14490 and 13458; SEQ ID NO:14065 and 7316; SEQ ID NO:14064 and 7315; SEQ ID NO:14359 and 13160; SEQ ID NO: 14358 and 13159; SEQ ID NO:8446 and 6353; SEQ ID NO:8445 and 6352; SEQ ID NO:8016 and 5105; SEQ ID NO:8015 and 5104; SEQ ID NO:6708 and 13549; SEQ ID NO:6707 and 13548; SEQ ID NO:12287 and 5011; SEQ ID NO:12286 and 5010; SEQ ID NO:8188 and 10642; SEQ ID NO:8187 and 10641; SEQ ID NO:13865 and 4756; SEQ ID NO:13864 and 4755; SEQ ID NO:9171 and 5841; SEQ ID NO:9170 and 5840; SEQ ID NO:13688 and 17525; SEQ ID NO:13687 and 17524; SEQ ID NO:8018 and 5487; SEQ ID NO:8017 and 5486; SEQ ID NO:14063 and 17515; SEQ ID NO:14062 and 17514; SEQ ID NO:15542 and 4850; SEQ ID NO:15541 and 4849; SEQ ID NO:8816 and 13266; SEQ ID NO:8815 and 13265; SEQ ID NO: 14409 and 5243; SEQ ID NO: 14408 and 5242; SEQ ID NO:6664 and 13214; SEQ ID NO:6663 and 13213; SEQ ID NO: 14399 and 5705; SEQ ID NO: 14398 and 5704; SEQ ID NO: 14712 and 4718; SEQ ID NO: 14705 and 4716; SEQ ID NO:14381 and 13492; SEQ ID NO:14380 and 13491; SEQ ID NO:14367 and 17523; SEQ ID NO:14366 and 17522; SEQ ID NO: 14511 and 5695; SEQ ID NO:14510 and 5694; SEQ ID NO:14375 and 5379; SEQ ID NO:14374 and 5378; SEQ ID NO: 14357 and 13210; SEQ ID NO: 14356 and 13209; SEQ ID NO: 15024 and 5625; SEQ ID NO: 15023 and 5624; SEQ ID NO:13680 and 7508; SEQ ID NO:13679 and 7507; SEQ ID NO:14371 and 13467; SEQ ID NO:14370 and 13466; SEQ ID NO:13861 and 7374; SEQ ID NO:13860 and 7373; SEQ ID NO:14457 and 17521; SEQ ID NO:14456 and 17520; SEQ ID NO:15147 and 5129; SEQ ID NO:15146 and 5128; SEQ ID NO:15386 and 13316; SEQ ID NO:15385 and 13315; SEQ ID NO:8266 and 10642; SEQ ID NO:8265 and 10641; SEQ ID NO: 14493 and 7408; SEQ ID NO: 14492 and 7407; SEQ ID NO: 15321 and 6363; SEQ ID NO: 15320 and 6362; SEQ ID NO:12213 and 17336; SEQ ID NO:12212 and 17335; SEQ ID NO:8358 and 17519; SEQ ID NO:8357 and 17518; SEQ ID NO:13863 and 7014; SEQ ID NO:13862 and 7013; SEQ ID NO:14278 and 6347; SEQ ID NO:14277 and 6346; SEQ ID NO:8314 and 13188; SEQ ID NO:8313 and 13187; SEQ ID NO:14373 and 17507; SEQ ID NO:14372 and 17506; SEQ ID NO:14507 and 5769; SEQ ID NO: 14506 and 5768; SEQ ID NO:8356 and 13349; SEQ ID NO:8355 and 13348; SEQ ID NO: 12035 and 17301; SEQ ID NO:12034 and 17300; SEQ ID NO:12084 and 10650; SEQ ID NO:12083 and 10649; SEQ ID NO:8734 and 5063; SEQ ID NO:8726 and 5060; SEQ ID NO:8042 and 10634; SEQ ID NO:8041 and 10633; SEQ ID NO:14995 and 13520; SEQ ID NO:14985 and 13515; SEQ ID NO:14583 and 11397; SEQ ID NO: 14582 and 11396; SEQ ID NO: 14409 and 5373; SEQ ID NO: 14408 and 5372; SEQ ID NO:8766 and 4704; SEQ ID NO:8765 and 4703; SEQ ID NO:14061 and 7364; SEQ ID NO: 14060 and 7363; SEQ ID NO:8112 and 5581; SEQ ID NO:8111 and 5580; SEQ ID NO:8919 and 7678; SEQ ID NO:8918 and 7677; SEQ ID NO:8354 and 7766; SEQ ID NO:8353 and 7765; SEQ ID NO:8073 and 13234; SEQ ID NO:8072 and 13233; SEQ ID NO:13851 and 9315; SEQ ID NO:13850 and 9314; SEQ ID NO:13678 and 7506; SEQ ID NO:13677 and 7505; SEQ ID NO:8180 and 7482; SEQ ID NO:8179 and 7481; SEQ ID NO:17686 and 11823; SEQ ID NO:17685 and 11822; SEQ ID NO:14379 and 13465; SEQ ID NO: 14378 and 13464; SEQ ID NO: 14121 and 7668; SEQ ID NO: 14120 and 7667; SEQ ID NO:14343 and 9321; SEQ ID NO:14342 and 9320; SEQ ID NO:14481 and 5163; SEQ ID NO:14480 and 5162; SEQ ID NO: 12184 and 7627; SEQ ID NO: 12183 and 7615; SEQ ID NO: 14515 and 6345; SEQ ID NO: 14514 and 6344; SEQ ID NO:9004 and 10648; SEQ ID NO:9003 and 10647; SEQ ID NO:8336 and 13385; SEQ ID NO:8335 and 13384; SEQ ID NO: 14477 and 13184; SEQ ID NO: 14476 and 13183; SEQ ID NO: 13686 and 17098; SEQ ID NO: 13685 and 17097; SEQ ID NO:8470 and 6898; SEQ ID NO:8469 and 6897; SEQ ID NO:14487 and 13469; SEQ ID NO:14486 and 13468; SEQ ID NO:8824 and 6411; SEQ ID NO:8823 and 6410; SEQ ID NO:15382 and 13286; SEQ ID NO:15381 and 13285; SEQ ID NO:14391 and 17509; SEQ ID NO:14390 and 17508; SEQ ID NO:8416 and 4446; SEQ ID NO:8415 and 4445; SEQ ID NO:14345 and 9319; SEQ ID NO:14344 and 9318; SEQ ID NO:14641 and 6383; SEQ ID NO:14640 and 6382; SEQ ID NO:9022 and 6387; SEQ ID NO:9021 and 6386; SEQ ID NO:15307 and 18236; SEQ ID NO:15306 and 18235; SEQ ID NO:13660 and 6980; SEQ ID NO:13659 and 6979; SEQ ID NO: 15578 and 4450; SEQ ID NO:15577 and 4449; SEQ ID NO:13684 and 13166; SEQ ID NO:13683 and 13165; SEQ ID NO:15384 and 13312; SEQ ID NO:15383 and 13311; SEQ ID NO:18186 and 13198; SEQ ID NO: 18185 and 13197; SEQ ID NO:15133 and 7066; SEQ ID NO:15132 and 7065; SEQ ID NO:14684 and 5877; SEQ ID NO: 14683 and 5876; SEQ ID NO:8888 and 10632; SEQ ID NO:8887 and 10631; SEQ ID NO: 14740 and 6377; SEQ ID NO: 14739 and 6376; SEQ ID NO:8941 and 13373; SEQ ID NO:8940 and 13372; SEQ ID NO: 14276 and 5099; SEQ ID NO: 14275 and 5098; SEQ ID NO:15101 and 13541; SEQ ID NO:15100 and 13540; SEQ ID NO: 14059 and 5723; SEQ ID NO:14058 and 5722; SEQ ID NO: 13932 and 4884; SEQ ID NO:13931 and 4883; SEQ ID NO: 14877 and 7949; SEQ ID NO: 14876 and 7948; SEQ ID NO:8310 and 6763; SEQ ID NO:8309 and 6762; SEQ ID NO: 14589 and 4788; SEQ ID NO: 14588 and 4787; SEQ ID NO:13913 and 4754; SEQ ID NO:13912 and 4753; SEQ ID NO:8587 and 13178; SEQ ID NO:8586 and 13177; SEQ ID NO:8802 and 4515; SEQ ID NO:8801 and 4514; SEQ ID NO:14296 and 13537; SEQ ID NO: 14295 and 13536; SEQ ID NO:6599 and 6395; SEQ ID NO:6598 and 6394; SEQ ID NO:6652 and 7744; SEQ ID NO:6651 and 7743; SEQ ID NO:18180 and 17398; SEQ ID NO:18179 and 17397; SEQ ID NO:15193 and 10598; SEQ ID NO:15192 and 10597; SEQ ID NO:8641 and 7494; SEQ ID NO:8640 and 7493; SEQ ID NO:14010 and 4882; SEQ ID NO:14009 and 4881; SEQ ID NO:8902 and 4955; SEQ ID NO:8901 and 4954; SEQ ID NO:14037 and 5001; SEQ ID NO:14036 and 5000; SEQ ID NO:8256 and 13514; SEQ ID NO:8255 and 13513; SEQ ID NO: 14233 and 9287; SEQ ID NO: 14232 and 9286; SEQ ID NO:15018 and 7784; SEQ ID NO:15017 and 7783; SEQ ID NO:15225 and 12274; SEQ ID NO:15224 and 12273; SEQ ID NO:9193 and 11742; SEQ ID NO:9192 and 11741; SEQ ID NO:6656 and 7740; SEQ ID NO:6655 and 7739; SEQ ID NO: 12189 and 4898; SEQ ID NO:12188 and 4897; SEQ ID NO:8110 and 6888; SEQ ID NO:8109 and 6887; SEQ ID NO:14254 and 13539; SEQ ID NO:14250 and 13538; SEQ ID NO:8262 and 7516; SEQ ID NO:8261 and 7515; SEQ ID NO:8601 and 4760; SEQ ID NO:8600 and 4759; SEQ ID NO: 15249 and 7732; SEQ ID NO: 15248 and 7731; SEQ ID NO:8186 and 7772; SEQ ID NO:8185 and 7771; SEQ ID NO:8202 and 5627; SEQ ID NO:8201 and 5626; SEQ ID NO:8609 and 6401; SEQ ID NO:8608 and 6400; SEQ ID NO:15468 and 4824; SEQ ID NO:15467 and 4823; SEQ ID NO:8098 and 5786; SEQ ID NO:8097 and 5785; SEQ ID NO: 14517 and 4864; SEQ ID NO: 14516 and 4863; SEQ ID NO: 12174 and 17387; SEQ ID NO: 12170 and 17377; SEQ ID NO: 14805 and 5771; SEQ ID NO: 14804 and 5770; SEQ ID NO:8030 and 13343; SEQ ID NO:8029 and 13342; SEQ ID NO:14313 and 4981; SEQ ID NO:14312 and 4977; SEQ ID NO:6591 and 6393; SEQ ID NO:6590 and 6392; SEQ ID NO:8108 and 7400; SEQ ID NO:8107 and 7399; SEQ ID NO:13891 and 4886; SEQ ID NO:13890 and 4885; SEQ ID NO:14657 and 13512; SEQ ID NO:14656 and 13511; SEQ ID NO:13929 and 17394; SEQ ID NO:13921 and 17393; SEQ ID NO:8124 and 7512; SEQ ID NO:8123 and 7511; SEQ ID NO:8710 and 4110; SEQ ID NO:8709 and 4109; SEQ ID NO:9026 and 5733; SEQ ID NO:9025 and 5732; SEQ ID NO:9040 and 13407; SEQ ID NO:9039 and 13406; SEQ ID NO:6654 and 7718; SEQ ID NO:6653 and 7717; SEQ ID NO:13752 and 6435; SEQ ID NO:13751 and 6434; SEQ ID NO: 15470 and 4810; SEQ ID NO: 15469 and 4809; SEQ ID NO:8388 and 6228; SEQ ID NO:8387 and 6227; SEQ ID NO:8138 and 7636; SEQ ID NO:8137 and 7635; SEQ ID NO:6662 and 9335; SEQ ID NO:6661 and 9334; SEQ ID NO: 14969 and 7144; SEQ ID NO:14968 and 7143; SEQ ID NO:8232 and 6860; SEQ ID NO:8231 and 6859; SEQ ID NO:9157 and 4902; SEQ ID NO:9156 and 4901; SEQ ID NO:8927 and 7627; SEQ ID NO:8926 and 7614; SEQ ID NO:8896 and 6928; SEQ ID NO:8895 and 6927; SEQ ID NO:8330 and 7530; SEQ ID NO:8329 and 7529; SEQ ID NO: 14720 and 17412; SEQ ID NO: 14719 and 17411; SEQ ID NO:9145 and 5537; SEQ ID NO:9144 and 5536; SEQ ID NO:15187 and 13365; SEQ ID NO:15186 and 13364; SEQ ID NO: 14973 and 7350; SEQ ID NO: 14972 and 7349; SEQ ID NO:8619 and 13531; SEQ ID NO:8618 and 13530; SEQ ID NO:8174 and 11837; SEQ ID NO:8173 and 11836; SEQ ID NO:14793 and 7652; SEQ ID NO:14792 and 7651; SEQ ID NO:11768 and 5139; SEQ ID NO:11767 and 5138; SEQ ID NO:8226 and 5043; SEQ ID NO:8225 and 5042; SEQ ID NO: 14853 and 10622; SEQ ID NO: 14852 and 10621; SEQ ID NO:9028 and 17424; SEQ ID NO:9027 and 17423; SEQ ID NO:8116 and 4987; SEQ ID NO:8115 and 4986; SEQ ID NO:12119 and 7108; SEQ ID NO:12118 and 7107; SEQ ID NO:8243 and 17331; SEQ ID NO:8238 and 17330; SEQ ID NO:6587 and 7128; SEQ ID NO:6586 and 7127; SEQ ID NO:8617 and 13529; SEQ ID NO:8616 and 13528; SEQ ID NO: 18174 and 7868; SEQ ID NO:18173 and 7867; SEQ ID NO:8516 and 7308; SEQ ID NO:8515 and 7307; SEQ ID NO:8288 and 6864; SEQ ID NO:8287 and 6863; SEQ ID NO:8754 and 17342; SEQ ID NO:8753 and 17341; SEQ ID NO:15127 and 7402; SEQ ID NO:15126 and 7401; SEQ ID NO:8615 and 13535; SEQ ID NO:8614 and 13534; SEQ ID NO: 14541 and 7148; SEQ ID NO: 14540 and 7147; SEQ ID NO: 12086 and 13320; SEQ ID NO: 12085 and 13319; SEQ ID NO: 10972 and 5661; SEQ ID NO: 10971 and 5660; SEQ ID NO:14089 and 5079; SEQ ID NO:14088 and 5078; SEQ ID NO:14361 and 6916; SEQ ID NO: 14360 and 6915; SEQ ID NO: 14715 and 7738; SEQ ID NO: 14704 and 7737; SEQ ID NO: 14921 and 4848; SEQ ID NO:14920 and 4847; SEQ ID NO:8508 and 7556; SEQ ID NO:8507 and 7555; SEQ ID NO:14132 and 5085; SEQ ID NO:14131 and 5084; SEQ ID NO:9113 and 17426; SEQ ID NO:9112 and 17425; SEQ ID NO:15515 and 7484; SEQ ID NO:15514 and 7483; SEQ ID NO:18150 and 7593; SEQ ID NO:18149 and 7592; SEQ ID NO:8575 and 5981; SEQ ID NO:8574 and 5980; SEQ ID NO:13980 and 11744; SEQ ID NO:13979 and 11743; SEQ ID NO: 15165 and 4694; SEQ ID NO:15164 and 4693; SEQ ID NO:8158 and 5659; SEQ ID NO:8157 and 5658; SEQ ID NO: 14907 and 7609; SEQ ID NO: 14906 and 7608; SEQ ID NO:15089 and 6862; SEQ ID NO:15088 and 6861; SEQ ID NO:15185 and 13403; SEQ ID NO:15184 and 13402; SEQ ID NO:12071 and 13517; SEQ ID NO:12070 and 13515; SEQ ID NO:14099 and 13431; SEQ ID NO:14098 and 13430; SEQ ID NO:14718 and 6419; SEQ ID NO:14717 and 6418; SEQ ID NO: 14449 and 9285; SEQ ID NO: 14448 and 9284; SEQ ID NO:8196 and 7648; SEQ ID NO:8195 and 7647; SEQ ID NO:14091 and 5045; SEQ ID NO: 14090 and 5044; SEQ ID NO: 14885 and 7192; SEQ ID NO:14884 and 7191; SEQ ID NO:18162 and 5221; SEQ ID NO:18161 and 5220; SEQ ID NO:8100 and 7682; SEQ ID NO:8099 and 7681; SEQ ID NO:8378 and 5315; SEQ ID NO:8377 and 5314; SEQ ID NO: 14445 and 6926; SEQ ID NO: 14444 and 6925; SEQ ID NO: 15173 and 7002; SEQ ID NO: 15172 and 7001; SEQ ID NO: 14829 and 7538; SEQ ID NO: 14828 and 7537; SEQ ID NO: 14661 and 13490; SEQ ID NO:14660 and 13489; SEQ ID NO:15111 and 5249; SEQ ID NO:15110 and 5248; SEQ ID NO:18182 and 13393; SEQ ID NO:18181 and 13392; SEQ ID NO:14651 and 6381; SEQ ID NO:14650 and 6380; SEQ ID NO: 14765 and 13322; SEQ ID NO: 14764 and 13321; SEQ ID NO: 13795 and 5375; SEQ ID NO:13794 and 5374; SEQ ID NO:14611 and 4822; SEQ ID NO:14610 and 4821; SEQ ID NO: 15245 and 13300; SEQ ID NO:15244 and 13299; SEQ ID NO:8114 and 13500; SEQ ID NO:8113 and 13499; SEQ ID NO:14905 and 6914; SEQ ID NO:14904 and 6913; SEQ ID NO: 13990 and 5073; SEQ ID NO: 13989 and 5072; SEQ ID NO:14268 and 5553; SEQ ID NO:14267 and 5552; SEQ ID NO:15253 and 16579; SEQ ID NO:15252 and 16578; SEQ ID NO:12205 and 13258; SEQ ID NO:12204 and 13257; SEQ ID NO:8350 and 5171; SEQ ID NO:8349 and 5170; SEQ ID NO:7834 and 6976; SEQ ID NO:7833 and 6975; SEQ ID NO:8194 and 7390; SEQ ID NO:8193 and 7389; SEQ ID NO:8800 and 13533; SEQ ID NO:8799 and 13532; SEQ ID NO:15161 and 7118; SEQ ID NO:15160 and 7117; SEQ ID NO:8850 and 7416; SEQ ID NO:8849 and 7415; SEQ ID NO:15213 and 13089; SEQ ID NO:15212 and 13088; SEQ ID NO:12080 and 13284; SEQ ID NO: 12079 and 13283; SEQ ID NO:6260 and 5597; SEQ ID NO:6259 and 5596; SEQ ID NO:8236 and 13061; SEQ ID NO:8235 and 13060; SEQ ID NO: 15199 and 7126; SEQ ID NO: 15198 and 7125; SEQ ID NO:15460 and 5669; SEQ ID NO:15459 and 5668; SEQ ID NO:8051 and 7778; SEQ ID NO:8050 and 7777; SEQ ID NO:8633 and 7575; SEQ ID NO:8632 and 7574; SEQ ID NO:9111 and 17428; SEQ ID NO:9110 and 17427; SEQ ID NO:8322 and 13401; SEQ ID NO:8321 and 13400; SEQ ID NO:6593 and 13077; SEQ ID NO:6592 and 13076; SEQ ID NO:8026 and 10674; SEQ ID NO:8025 and 10673; SEQ ID NO:8768 and 11846; SEQ ID NO:8767 and 11845; SEQ ID NO:8748 and 5983; SEQ ID NO:8747 and 5982; SEQ ID NO:8649 and 5593; SEQ ID NO:8648 and 5592; SEQ ID NO:9221 and 5887; SEQ ID NO:9220 and 5886; SEQ ID NO:8653 and 5591; SEQ ID NO:8652 and 5590; SEQ ID NO: 14215 and 13250; SEQ ID NO: 14214 and 13249; SEQ ID NO:9103 and 5545; SEQ ID NO:9102 and 5544; SEQ ID NO:13674 and 4826; SEQ ID NO:13673 and 4825; SEQ ID NO:6288 and 4772; SEQ ID NO:6287 and 4771; SEQ ID NO: 14280 and 17364; SEQ ID NO: 14279 and 17363; SEQ ID NO: 14272 and 7156; SEQ ID NO:14271 and 7155; SEQ ID NO:6641 and 5677; SEQ ID NO:6640 and 5676; SEQ ID NO:14134 and 7388; SEQ ID NO:14133 and 7387; SEQ ID NO:9185 and 12254; SEQ ID NO:9184 and 12253; SEQ ID NO: 12238 and 11825; SEQ ID NO:12237 and 11824; SEQ ID NO:11045 and 7448; SEQ ID NO:11044 and 7447; SEQ ID NO:8681 and 4780; SEQ ID NO:8680 and 4779; SEQ ID NO:15263 and 7758; SEQ ID NO: 15262 and 7757; SEQ ID NO:8045 and 6222; SEQ ID NO:8044 and 6221; SEQ ID NO:9036 and 4527; SEQ ID NO:9035 and 4526; SEQ ID NO:9211 and 18122; SEQ ID NO:9210 and 18121; SEQ ID NO:15305 and 7104; SEQ ID NO:15304 and 7103; SEQ ID NO:14931 and 7935; SEQ ID NO:14930 and 7934; SEQ ID NO:8812 and 4692; SEQ ID NO:8811 and 4691; SEQ ID NO:6675 and 13599; SEQ ID NO:6674 and 13598; SEQ ID NO:8386 and 11801; SEQ ID NO:8385 and 11800; SEQ ID NO:9034 and 7754; SEQ ID NO:9033 and 7753; SEQ ID NO: 14763 and 5857; SEQ ID NO:14762 and 5856; SEQ ID NO:8708 and 6397; SEQ ID NO:8707 and 6396; SEQ ID NO:8738 and 17323; SEQ ID NO:8737 and 17322; SEQ ID NO:14260 and 7096; SEQ ID NO: 14259 and 7095; SEQ ID NO:8665 and 5523; SEQ ID NO:8664 and 5522; SEQ ID NO: 14529 and 13194; SEQ ID NO: 14528 and 13193; SEQ ID NO:8629 and 4645; SEQ ID NO:8628 and 4644; SEQ ID NO: 14752 and 7762; SEQ ID NO:14751 and 7761; SEQ ID NO:8712 and 4909; SEQ ID NO:8711 and 4908; SEQ ID NO: 14637 and 9293; SEQ ID NO: 14636 and 9292; SEQ ID NO:14403 and 5721; SEQ ID NO: 14402 and 5720; SEQ ID NO:9030 and 5701; SEQ ID NO:9029 and 5700; SEQ ID NO:8120 and 13405; SEQ ID NO:8119 and 13404; SEQ ID NO:13797 and 7760; SEQ ID NO:13796 and 7759; SEQ ID NO:15167 and 5267; SEQ ID NO:15166 and 5266; SEQ ID NO:15271 and 5055; SEQ ID NO: 15270 and 5054; SEQ ID NO:6597 and 5759; SEQ ID NO:6596 and 5758; SEQ ID NO:8400 and 6351; SEQ ID NO:8399 and 6350; SEQ ID NO:14451 and 7623; SEQ ID NO:14450 and 7618; SEQ ID NO: 14455 and 5505; SEQ ID NO: 14454 and 5504; SEQ ID NO:15211 and 6988; SEQ ID NO:15210 and 6987; SEQ ID NO: 12285 and 13486; SEQ ID NO: 12284 and 13485; SEQ ID NO: 12054 and 13274; SEQ ID NO: 12053 and 13273; SEQ ID NO:6700 and 13399; SEQ ID NO:6699 and 13398; SEQ ID NO:15361 and 5419; SEQ ID NO:15360 and 5418; SEQ ID NO:13897 and 4770; SEQ ID NO:13896 and 4769; SEQ ID NO: 13704 and 5515; SEQ ID NO: 13703 and 5514; SEQ ID NO: 13708 and 13109; SEQ ID NO: 13707 and 13108; SEQ ID NO:15239 and 5091; SEQ ID NO:15238 and 5090; SEQ ID NO: 14170 and 4768; SEQ ID NO: 14169 and 4767; SEQ ID NO: 14714 and 17380; SEQ ID NO: 14704 and 17378; SEQ ID NO:13871 and 5427; SEQ ID NO:13870 and 5426; SEQ ID NO:12111 and 5499; SEQ ID NO: 12110 and 5498; SEQ ID NO:14519 and 5017; SEQ ID NO: 14518 and 5016; SEQ ID NO: 12145 and 6220; SEQ ID NO:12144 and 6219; SEQ ID NO: 15287 and 7340; SEQ ID NO: 15286 and 7339; SEQ ID NO:13809 and 13451; SEQ ID NO:13808 and 13450; SEQ ID NO:15580 and 5229; SEQ ID NO:15579 and 5228; SEQ ID NO:13974 and 5151; SEQ ID NO: 13973 and 5150; SEQ ID NO:9038 and 13498; SEQ ID NO:9037 and 13497; SEQ ID NO: 12221 and 12328; SEQ ID NO: 12220 and 12327; SEQ ID NO: 12223 and 12326; SEQ ID NO: 12222 and 12325; SEQ ID NO: 14769 and 6369; SEQ ID NO: 14768 and 6368; SEQ ID NO:13970 and 4744; SEQ ID NO: 13969 and 4743; SEQ ID NO:7986 and 13367; SEQ ID NO:7985 and 13366; SEQ ID NO:12137 and 4794; SEQ ID NO:12136 and 4793; SEQ ID NO:6250 and 13347; SEQ ID NO:6249 and 13346; SEQ ID NO: 12060 and 5589; SEQ ID NO: 12059 and 5588; SEQ ID NO:14288 and 4523; SEQ ID NO:14287 and 4522; SEQ ID NO: 14347 and 7384; SEQ ID NO: 14346 and 7383; SEQ ID NO:11140 and 5081; SEQ ID NO:11139 and 5080; SEQ ID NO: 14047 and 4740; SEQ ID NO: 14046 and 4739; SEQ ID NO:8645 and 5429; SEQ ID NO:8644 and 5428; SEQ ID NO: 14629 and 17410; SEQ ID NO:14628 and 17409; SEQ ID NO:15241 and 5089; SEQ ID NO:15240 and 5088; SEQ ID NO:13738 and 5363; SEQ ID NO:13737 and 5362; SEQ ID NO:8510 and 15552; SEQ ID NO:8509 and 15551; SEQ ID NO: 12074 and 5577; SEQ ID NO: 12073 and 5576; SEQ ID NO: 13934 and 17513; SEQ ID NO: 13933 and 17512; SEQ ID NO:12242 and 5019; SEQ ID NO:12241 and 5018; SEQ ID NO:14290 and 6431; SEQ ID NO:14289 and 6430; SEQ ID NO:8903 and 7621; SEQ ID NO:8901 and 7618; SEQ ID NO:18160 and 11752; SEQ ID NO:18159 and 11751; SEQ ID NO:6256 and 4965; SEQ ID NO:6255 and 4964; SEQ ID NO: 12159 and 5541; SEQ ID NO: 12158 and 5540; SEQ ID NO:8756 and 7696; SEQ ID NO:8755 and 7695; SEQ ID NO:8925 and 7420; SEQ ID NO:8924 and 7419; SEQ ID NO:15016 and 17493; SEQ ID NO:15015 and 17492; SEQ ID NO: 18164 and 7674; SEQ ID NO:18163 and 7673; SEQ ID NO:8476 and 13204; SEQ ID NO:8475 and 13203; SEQ ID NO: 12244 and 13043; SEQ ID NO: 12243 and 13042; SEQ ID NO:15014 and 17491; SEQ ID NO: 15013 and 17490; SEQ ID NO:15030 and 5767; SEQ ID NO:15029 and 5766; SEQ ID NO:14148 and 5053; SEQ ID NO: 14147 and 5052; SEQ ID NO:8410 and 10608; SEQ ID NO:8409 and 10607; SEQ ID NO:8406 and 5663; SEQ ID NO:8405 and 5662; SEQ ID NO:8476 and 13561; SEQ ID NO:8475 and 13560; SEQ ID NO:8476 and 13041; SEQ ID NO:8475 and 13040; SEQ ID NO: 14979 and 5839; SEQ ID NO: 14978 and 5838; SEQ ID NO: 15179 and 6292; SEQ ID NO: 15178 and 6291; SEQ ID NO:8569 and 13563; SEQ ID NO:8568 and 13562; SEQ ID NO:8561 and 17288; SEQ ID NO:8560 and 17287; SEQ ID NO: 15526 and 5115; SEQ ID NO:15525 and 5114; SEQ ID NO:8852 and 5460; SEQ ID NO:8851 and 5459; SEQ ID NO:8476 and 13341; SEQ ID NO:8475 and 13340; SEQ ID NO: 15006 and 5223; SEQ ID NO: 15005 and 5222; SEQ ID NO: 14615 and 7042; SEQ ID NO: 14614 and 7041; SEQ ID NO:8798 and 13461; SEQ ID NO:8797 and 13460; SEQ ID NO:8476 and 4690; SEQ ID NO:8475 and 4689; SEQ ID NO:8476 and 4710; SEQ ID NO:8475 and 4709; SEQ ID NO: 14605 and 13242; SEQ ID NO: 14604 and 13241; SEQ ID NO:15448 and 4448; SEQ ID NO:15447 and 4447; SEQ ID NO:14738 and 13262; SEQ ID NO:14737 and 13261; SEQ ID NO:8008 and 7746; SEQ ID NO:8007 and 7745; SEQ ID NO:8061 and 13441; SEQ ID NO:8060 and 13440; SEQ ID NO:7972 and 4100; SEQ ID NO:7971 and 4099; SEQ ID NO:8559 and 13443; SEQ ID NO:8558 and 13442; SEQ ID NO:8476 and 7670; SEQ ID NO:8475 and 7669; SEQ ID NO:9127 and 5709; SEQ ID NO:9126 and 5708; SEQ ID NO:15528 and 5119; SEQ ID NO:15527 and 5118; SEQ ID NO:15012 and 5851; SEQ ID NO:15011 and 5850; SEQ ID NO:18166 and 13222; SEQ ID NO:18165 and 13221; SEQ ID NO:8055 and 12250; SEQ ID NO:8054 and 12249; SEQ ID NO:13714 and 4076; SEQ ID NO:13713 and 4075; SEQ ID NO:13799 and 6924; SEQ ID NO:13798 and 6923; SEQ ID NO:12133 and 5879; SEQ ID NO: 12132 and 5878; SEQ ID NO:9159 and 5601; SEQ ID NO:9158 and 5600; SEQ ID NO:15347 and 13290; SEQ ID NO:15346 and 13289; SEQ ID NO: 14722 and 7326; SEQ ID NO: 14721 and 7325; SEQ ID NO:6284 and 7200; SEQ ID NO:6283 and 7199; SEQ ID NO:7817 and 5529; SEQ ID NO:7816 and 5528; SEQ ID NO:13656 and 5649; SEQ ID NO:13655 and 5648; SEQ ID NO: 14401 and 7583; SEQ ID NO: 14400 and 7582; SEQ ID NO:13859 and 5729; SEQ ID NO:13858 and 5728; SEQ ID NO:14211 and 17100; SEQ ID NO:14210 and 17099; SEQ ID NO:9199 and 6429; SEQ ID NO:9198 and 6428; SEQ ID NO:8096 and 5535; SEQ ID NO:8095 and 5534; SEQ ID NO:13676 and 7764; SEQ ID NO:13675 and 7763; SEQ ID NO: 14389 and 4892; SEQ ID NO:14388 and 4891; SEQ ID NO: 14025 and 13379; SEQ ID NO: 14018 and 13378; SEQ ID NO: 14990 and 13379; SEQ ID NO: 14985 and 13378; SEQ ID NO: 14825 and 5271; SEQ ID NO:14824 and 5270; SEQ ID NO:8038 and 11827; SEQ ID NO:8037 and 11826; SEQ ID NO:13764 and 5667; SEQ ID NO:13763 and 5666; SEQ ID NO:8420 and 17290; SEQ ID NO:8419 and 17289; SEQ ID NO:18188 and 5573; SEQ ID NO:18187 and 5572; SEQ ID NO:8792 and 13427; SEQ ID NO:8791 and 13426; SEQ ID NO:15494 and 5021; SEQ ID NO:15493 and 5020; SEQ ID NO:8476 and 10602; SEQ ID NO:8475 and 10601; SEQ ID NO:15081 and 7848; SEQ ID NO:15080 and 7847; SEQ ID NO:15073 and 13220; SEQ ID NO: 15072 and 13219; SEQ ID NO:7996 and 4734; SEQ ID NO:7995 and 4733; SEQ ID NO:8034 and 10638; SEQ ID NO:8033 and 10637; SEQ ID NO:8476 and 6734; SEQ ID NO:8475 and 6733; SEQ ID NO:11754 and 7106; SEQ ID NO:11753 and 7105; SEQ ID NO:9226 and 6749; SEQ ID NO:9222 and 6748; SEQ ID NO:7984 and 13455; SEQ ID NO:7983 and 13454; SEQ ID NO: 13942 and 7434; SEQ ID NO: 13941 and 7433; SEQ ID NO:8476 and 6379; SEQ ID NO:8475 and 6378; SEQ ID NO:8476 and 7692; SEQ ID NO:8475 and 7691; SEQ ID NO: 18207 and 4517; SEQ ID NO: 18206 and 4516; SEQ ID NO:8442 and 5377; SEQ ID NO:8441 and 5376; SEQ ID NO:15388 and 6389; SEQ ID NO:15387 and 6388; SEQ ID NO: 14607 and 4778; SEQ ID NO: 14606 and 4777; SEQ ID NO: 14419 and 17334; SEQ ID NO: 14418 and 17333; SEQ ID NO:9227 and 6866; SEQ ID NO:9223 and 6865; SEQ ID NO:15251 and 7850; SEQ ID NO:15250 and 7849; SEQ ID NO:13652 and 5651; SEQ ID NO:13651 and 5650; SEQ ID NO:8496 and 13063; SEQ ID NO:8495 and 13062; SEQ ID NO:8069 and 13419; SEQ ID NO:8068 and 13418; SEQ ID NO:8752 and 5579; SEQ ID NO: 8751 and 5578; SEQ ID NO: 15494 and 4856; SEQ ID NO: 15493 and 4855; SEQ ID NO: 14815 and 5849; SEQ ID NO: 14814 and 5848; SEQ ID NO:15289 and 4708; SEQ ID NO:15288 and 4707; SEQ ID NO:8607 and 13351; SEQ ID NO:8606 and 13350; SEQ ID NO:8756 and 11809; SEQ ID NO:8755 and 11808; SEQ ID NO:9228 and 6918; SEQ ID NO:9224 and 6917; SEQ ID NO: 14623 and 17286; SEQ ID NO: 14622 and 17285; SEQ ID NO:15139 and 6456; SEQ ID NO:15138 and 6455; SEQ ID NO:12215 and 17104; SEQ ID NO: 12214 and 17103; SEQ ID NO:8476 and 6798; SEQ ID NO:8475 and 6797; SEQ ID NO:8756 and 5533; SEQ ID NO:8755 and 5532; SEQ ID NO: 14443 and 7450; SEQ ID NO:14442 and 7449; SEQ ID NO:9165 and 11817; SEQ ID NO:9164 and 11816; SEQ ID NO:8756 and 5567; SEQ ID NO:8755 and 5566; SEQ ID NO:14002 and 5031; SEQ ID NO: 14001 and 5030; SEQ ID NO: 15083 and 6290; SEQ ID NO: 15082 and 6289; SEQ ID NO: 14897 and 7452; SEQ ID NO: 14896 and 7451; SEQ ID NO:9235 and 5575; SEQ ID NO:9234 and 5574; SEQ ID NO: 14591 and 5595; SEQ ID NO:14590 and 5594; SEQ ID NO: 8476 and 7510; SEQ ID NO:8475 and 7509; SEQ ID NO:12109 and 17108; SEQ ID NO:12108 and 17107; SEQ ID NO:15339 and 6858; SEQ ID NO:15338 and 6857; SEQ ID NO:14421 and 7546; SEQ ID NO:14420 and 7545; SEQ ID NO: 14543 and 7158; SEQ ID NO: 14542 and 7157; SEQ ID NO:8476 and 13557; SEQ ID NO:8475 and 13556; SEQ ID NO:13646 and 5683; SEQ ID NO:13645 and 5682; SEQ ID NO:13720 and 5189; SEQ ID NO:13719 and 5188; SEQ ID NO:15291 and 5361; SEQ ID NO:15290 and 5360; SEQ ID NO:9247 and 5547; SEQ ID NO:9246 and 5546; SEQ ID NO:14166 and 17102; SEQ ID NO:14165 and 17101; SEQ ID NO:14043 and 13520; SEQ ID NO:14042 and 13515; SEQ ID NO:9251 and 5719; SEQ ID NO:9250 and 5718; SEQ ID NO:8075 and 11811; SEQ ID NO:8074 and 11810; SEQ ID NO: 14943 and 4679; SEQ ID NO:14942 and 4678; SEQ ID NO:8063 and 13545; SEQ ID NO:8062 and 13544; SEQ ID NO:15093 and 4868; SEQ ID NO:15092 and 4867; SEQ ID NO: 13706 and 7752; SEQ ID NO:13705 and 7751; SEQ ID NO:8472 and 5273; SEQ ID NO:8471 and 5272; SEQ ID NO:8476 and 6854; SEQ ID NO:8475 and 6853; SEQ ID NO:8476 and 7522; SEQ ID NO:8475 and 7521; SEQ ID NO:9205 and 4543; SEQ ID NO:9204 and 4542; SEQ ID NO:9233 and 5575; SEQ ID NO:9232 and 5574; SEQ ID NO:8154 and 10636; SEQ ID NO:8153 and 10635; SEQ ID NO:8476 and 13345; SEQ ID NO:8475 and 13344; SEQ ID NO: 13648 and 5647; SEQ ID NO:13647 and 5646; SEQ ID NO:9229 and 6844; SEQ ID NO:9225 and 6843; SEQ ID NO:18166 and 13196; SEQ ID NO:18165 and 13195; SEQ ID NO:13895 and 4659; SEQ ID NO:13894 and 4658; SEQ ID NO:8476 and 5527; SEQ ID NO:8475 and 5526; SEQ ID NO:14975 and 5339; SEQ ID NO:14974 and 5338; SEQ ID NO:14748 and 13192; SEQ ID NO:14747 and 13191; SEQ ID NO:13650 and 5655; SEQ ID NO:13649 and 5654; SEQ ID NO:14983 and 7690; SEQ ID NO:14982 and 7689; SEQ ID NO: 14489 and 17346; SEQ ID NO: 14488 and 17345; SEQ ID NO:15181 and 5843; SEQ ID NO:15180 and 5842; SEQ ID NO:8476 and 13543; SEQ ID NO:8475 and 13542; SEQ ID NO:15410 and 5806; SEQ ID NO:15409 and 5805; SEQ ID NO: 14939 and 13597; SEQ ID NO:14938 and 13596; SEQ ID NO:8476 and 13496; SEQ ID NO:8475 and 13495; SEQ ID NO:8092 and 7476; SEQ ID NO:8091 and 7475; SEQ ID NO: 14162 and 17489; SEQ ID NO: 14161 and 17488; SEQ ID NO:8476 and 7548; SEQ ID NO: 8475 and 7547; SEQ ID NO:8476 and 13379; SEQ ID NO:8475 and 13378; SEQ ID NO:8476 and 5261; SEQ ID NO:8475 and 5260; SEQ ID NO:15079 and 7660; SEQ ID NO:15078 and 7659; SEQ ID NO:9249 and 5571; SEQ ID NO:9248 and 5570; SEQ ID NO:8172 and 11797; SEQ ID NO:8171 and 11796; SEQ ID NO:14387 and 4894; SEQ ID NO: 14386 and 4893; SEQ ID NO:8476 and 13551; SEQ ID NO:8475 and 13550; SEQ ID NO:18190 and 5691; SEQ ID NO: 18189 and 5690; SEQ ID NO:8476 and 5237; SEQ ID NO:8475 and 5236; SEQ ID NO:9243 and 5497; SEQ ID NO:9242 and 5496; SEQ ID NO:14385 and 4890; SEQ ID NO:14384 and 4889; SEQ ID NO:15201 and 4792; SEQ ID NO:15200 and 4791; SEQ ID NO:8563 and 13559; SEQ ID NO:8562 and 13558; SEQ ID NO:8476 and 5507; SEQ ID NO:8475 and 5506; SEQ ID NO: 14881 and 5313; SEQ ID NO: 14880 and 5312; SEQ ID NO: 13793 and 4888; SEQ ID NO:13792 and 4887; SEQ ID NO:12157 and 5829; SEQ ID NO:12156 and 5828; SEQ ID NO:12155 and 5727; SEQ ID NO:12154 and 5726; SEQ ID NO:9241 and 6870; SEQ ID NO:9240 and 6869; SEQ ID NO: 14257 and 13379; SEQ ID NO: 14256 and 13378; SEQ ID NO:8476 and 4862; SEQ ID NO:8475 and 4861; SEQ ID NO:9237 and 6417; SEQ ID NO:9236 and 6416; SEQ ID NO:8828 and 5525; SEQ ID NO:8827 and 5524; SEQ ID NO:7994 and 4732; SEQ ID NO:7993 and 4731; SEQ ID NO: 14881 and 13379; SEQ ID NO:14880 and 13378; SEQ ID NO:8476 and 5023; SEQ ID NO:8475 and 5022; SEQ ID NO:8854 and 5461; SEQ ID NO:8853 and 5458; SEQ ID NO:17691 and 18120; SEQ ID NO: 17690 and 18119; SEQ ID NO: 11142 and 13270; SEQ ID NO:11141 and 13269; SEQ ID NO:15540 and 5117; SEQ ID NO:15539 and 5116; SEQ ID NO:8476 and 7712; SEQ ID NO:8475 and 7711; SEQ ID NO:8476 and 11805; SEQ ID NO:8475 and 11804; SEQ ID NO: 13654 and 5653; SEQ ID NO: 13653 and 5652; SEQ ID NO: 13992 and 4917; SEQ ID NO:13991 and 4916; SEQ ID NO:9010 and 7170; SEQ ID NO:9009 and 7169; SEQ ID NO:8318 and 7573; SEQ ID NO:8317 and 7572; SEQ ID NO:14913 and 5303; SEQ ID NO:14912 and 5302; SEQ ID NO:8878 and 5491; SEQ ID NO:8877 and 5490; SEQ ID NO:12199 and 13240; SEQ ID NO:12198 and 13239; SEQ ID NO:13698 and 17592; SEQ ID NO:13697 and 17591; SEQ ID NO:6644 and 4939; SEQ ID NO:6643 and 4938; SEQ ID NO:14041 and 5561; SEQ ID NO:14040 and 5560; SEQ ID NO:15509 and 5285; SEQ ID NO:15508 and 5284; SEQ ID NO:8538 and 12262; SEQ ID NO:8526 and 12259; SEQ ID NO:8884 and 5037; SEQ ID NO:8883 and 5036; SEQ ID NO:9070 and 13228; SEQ ID NO:9069 and 13227; SEQ ID NO:14533 and 4995; SEQ ID NO:14532 and 4994; SEQ ID NO:11766 and 5671; SEQ ID NO:11765 and 5670; SEQ ID NO:15051 and 7404; SEQ ID NO: 15050 and 7403; SEQ ID NO: 15043 and 5245; SEQ ID NO: 15042 and 5244; SEQ ID NO:8959 and 5205; SEQ ID NO:8958 and 5204; SEQ ID NO: 14889 and 7650; SEQ ID NO: 14888 and 7649; SEQ ID NO: 14128 and 5748; SEQ ID NO: 14122 and 5736; SEQ ID NO:18192 and 17422; SEQ ID NO:18191 and 17421; SEQ ID NO:8706 and 13099; SEQ ID NO:8705 and 13098; SEQ ID NO:8216 and 7714; SEQ ID NO:8215 and 7713; SEQ ID NO: 14282 and 17360; SEQ ID NO:14281 and 17359; SEQ ID NO:15277 and 7829; SEQ ID NO:15276 and 7828; SEQ ID NO:8826 and 7442; SEQ ID NO:8825 and 7441; SEQ ID NO:8953 and 17319; SEQ ID NO:8952 and 17318; SEQ ID NO:15157 and 5788; SEQ ID NO:15156 and 5787; SEQ ID NO:14801 and 5782; SEQ ID NO:14800 and 5781; SEQ ID NO:8643 and 7528; SEQ ID NO:8642 and 7527; SEQ ID NO: 14397 and 4820; SEQ ID NO: 14396 and 4819; SEQ ID NO:15452 and 6868; SEQ ID NO:15451 and 6867; SEQ ID NO:8770 and 4688; SEQ ID NO:8769 and 4687; SEQ ID NO:12182 and 13519; SEQ ID NO:12166 and 13518; SEQ ID NO: 15010 and 7585; SEQ ID NO:15009 and 7584; SEQ ID NO: 13791 and 7796; SEQ ID NO: 13790 and 7795; SEQ ID NO:8796 and 7627; SEQ ID NO:8795 and 7627; SEQ ID NO:8220 and 7464; SEQ ID NO:8219 and 7463; SEQ ID NO:8772 and 4686; SEQ ID NO:8771 and 4685; SEQ ID NO:13774 and 5753; SEQ ID NO: 13773 and 5752; SEQ ID NO:8913 and 5493; SEQ ID NO:8912 and 5492; SEQ ID NO: 14501 and 13093; SEQ ID NO:14500 and 13092; SEQ ID NO:9149 and 10654; SEQ ID NO:9148 and 10653; SEQ ID NO:14947 and 6906; SEQ ID NO:14946 and 6905; SEQ ID NO:15053 and 7404; SEQ ID NO: 15052 and 7403; SEQ ID NO:6302 and 10606; SEQ ID NO:6301 and 10605; SEQ ID NO: 14750 and 6896; SEQ ID NO: 14749 and 6895; SEQ ID NO: 14599 and 6945; SEQ ID NO: 14598 and 6944; SEQ ID NO:8294 and 10646; SEQ ID NO:8293 and 10645; SEQ ID NO:14879 and 7254; SEQ ID NO: 14878 and 7253; SEQ ID NO:8170 and 4953; SEQ ID NO:8169 and 4952; SEQ ID NO: 14949 and 5365; SEQ ID NO: 14948 and 5364; SEQ ID NO:8251 and 13307; SEQ ID NO:8238 and 13306; SEQ ID NO: 14963 and 4804; SEQ ID NO: 14962 and 4803; SEQ ID NO:8836 and 7544; SEQ ID NO:8835 and 7543; SEQ ID NO:14835 and 4985; SEQ ID NO:14834 and 4984; SEQ ID NO:14417 and 7611; SEQ ID NO:14416 and 7610; SEQ ID NO: 15351 and 5301; SEQ ID NO: 15350 and 5300; SEQ ID NO: 14221 and 5808; SEQ ID NO: 14220 and 5807; SEQ ID NO: 15065 and 7792; SEQ ID NO:15064 and 7791; SEQ ID NO:8702 and 7265; SEQ ID NO:8701 and 7263; SEQ ID NO:9119 and 5697; SEQ ID NO:9118 and 5696; SEQ ID NO:14903 and 5798; SEQ ID NO:14902 and 5797; SEQ ID NO:14965 and 5231; SEQ ID NO:14964 and 5230; SEQ ID NO:9068 and 6880; SEQ ID NO:9067 and 6879; SEQ ID NO:15008 and 5707; SEQ ID NO: 15007 and 5706; SEQ ID NO: 17693 and 13180; SEQ ID NO:17692 and 13179; SEQ ID NO:8486 and 5489; SEQ ID NO:8485 and 5488; SEQ ID NO:8523 and 5143; SEQ ID NO:8522 and 5142; SEQ ID NO:15095 and 5820; SEQ ID NO:15094 and 5819; SEQ ID NO:14021 and 5621; SEQ ID NO:14019 and 5620; SEQ ID NO: 14033 and 13437; SEQ ID NO: 14032 and 13436; SEQ ID NO: 14565 and 4991; SEQ ID NO:14564 and 4990; SEQ ID NO:13855 and 13453; SEQ ID NO: 13854 and 13452; SEQ ID NO:14213 and 5509; SEQ ID NO:14212 and 5508; SEQ ID NO:7964 and 9303; SEQ ID NO:7963 and 9302; SEQ ID NO:14823 and 4951; SEQ ID NO:14822 and 4950; SEQ ID NO:18199 and 13067; SEQ ID NO:18198 and 13066; SEQ ID NO: 14673 and 4980; SEQ ID NO: 14665 and 4978; SEQ ID NO: 14775 and 12318; SEQ ID NO: 14774 and 12317; SEQ ID NO:13873 and 5818; SEQ ID NO:13872 and 5817; SEQ ID NO:9060 and 6846; SEQ ID NO:9059 and 6845; SEQ ID NO:15067 and 5784; SEQ ID NO:15066 and 5783; SEQ ID NO:13784 and 10660; SEQ ID NO:13783 and 10659; SEQ ID NO:8071 and 5699; SEQ ID NO:8070 and 5698; SEQ ID NO:8814 and 7698; SEQ ID NO:8813 and 7697; SEQ ID NO:8876 and 7688; SEQ ID NO:8875 and 7687; SEQ ID NO:15077 and 7722; SEQ ID NO:15076 and 7721; SEQ ID NO:13766 and 5711; SEQ ID NO:13765 and 5710; SEQ ID NO:13664 and 5035; SEQ ID NO:13663 and 5034; SEQ ID NO: 14909 and 6371; SEQ ID NO: 14908 and 6370; SEQ ID NO: 14833 and 7322; SEQ ID NO: 14832 and 7321; SEQ ID NO:8102 and 7514; SEQ ID NO:8101 and 7513; SEQ ID NO:8090 and 7472; SEQ ID NO:8089 and 7471; SEQ ID NO:17727 and 6856; SEQ ID NO:17726 and 6855; SEQ ID NO:14977 and 7300; SEQ ID NO: 14976 and 7299; SEQ ID NO:8184 and 6884; SEQ ID NO:8183 and 6883; SEQ ID NO:14781 and 7188; SEQ ID NO:14780 and 7187; SEQ ID NO:14933 and 7933; SEQ ID NO:14932 and 7932; SEQ ID NO:8067 and 7498; SEQ ID NO:8066 and 7497; SEQ ID NO:9093 and 6912; SEQ ID NO:9092 and 6911; SEQ ID NO:13756 and 9418; SEQ ID NO:13755 and 9417; SEQ ID NO:8352 and 4818; SEQ ID NO:8351 and 4817; SEQ ID NO:8939 and 9311; SEQ ID NO:8938 and 9310; SEQ ID NO:9050 and 6836; SEQ ID NO:9049 and 6835; SEQ ID NO:13857 and 4943; SEQ ID NO:13856 and 4942; SEQ ID NO:8539 and 11840; SEQ ID NO:8526 and 11839; SEQ ID NO:8344 and 4941; SEQ ID NO:8343 and 4940; SEQ ID NO:15317 and 13282; SEQ ID NO:15316 and 13281; SEQ ID NO:8272 and 7622; SEQ ID NO:8271 and 7618; SEQ ID NO: 14955 and 7354; SEQ ID NO: 14954 and 7353; SEQ ID NO:14993 and 7266; SEQ ID NO:14985 and 7263; SEQ ID NO:12181 and 7624; SEQ ID NO:12170 and 7618; SEQ ID NO:15149 and 13256; SEQ ID NO:15148 and 13255; SEQ ID NO:13666 and 5033; SEQ ID NO: 13665 and 5032; SEQ ID NO: 14473 and 13085; SEQ ID NO: 14472 and 13084; SEQ ID NO:9231 and 5191; SEQ ID NO:9230 and 5190; SEQ ID NO:14883 and 5835; SEQ ID NO:14882 and 5834; SEQ ID NO:8750 and 7623; SEQ ID NO:8749 and 7618; SEQ ID NO: 14513 and 13218; SEQ ID NO: 14512 and 13217; SEQ ID NO:13736 and 5477; SEQ ID NO:13735 and 5476; SEQ ID NO: 12123 and 17372; SEQ ID NO:12122 and 17371; SEQ ID NO:8298 and 7724; SEQ ID NO:8297 and 7723; SEQ ID NO:14087 and 4989; SEQ ID NO:14086 and 4988; SEQ ID NO:14158 and 5047; SEQ ID NO:14157 and 5046; SEQ ID NO:8856 and 5457; SEQ ID NO:8855 and 5456; SEQ ID NO:13909 and 10616; SEQ ID NO:13908 and 10615; SEQ ID NO:12291 and 13103; SEQ ID NO:12290 and 13102; SEQ ID NO: 8898 and 5493; SEQ ID NO:8897 and 5492; SEQ ID NO:8786 and 7726; SEQ ID NO:8785 and 7725; SEQ ID NO: 15061 and 7222; SEQ ID NO:15060 and 7221; SEQ ID NO:8729 and 7623; SEQ ID NO:8726 and 7618; SEQ ID NO:14867 and 18130; SEQ ID NO:14866 and 18129; SEQ ID NO:15414 and 5847; SEQ ID NO:15413 and 5846; SEQ ID NO:14633 and 12316; SEQ ID NO:14632 and 12315; SEQ ID NO:18178 and 5371; SEQ ID NO:18177 and 5370; SEQ ID NO: 14700 and 17383; SEQ ID NO: 14699 and 17377; SEQ ID NO: 14797 and 7414; SEQ ID NO: 14796 and 7413; SEQ ID NO:8683 and 17311; SEQ ID NO:8682 and 17310; SEQ ID NO: 15026 and 5289; SEQ ID NO: 15025 and 5288; SEQ ID NO: 14535 and 4997; SEQ ID NO: 14534 and 4996; SEQ ID NO: 13710 and 7579; SEQ ID NO: 13709 and 7578; SEQ ID NO:8968 and 4973; SEQ ID NO:8966 and 4972; SEQ ID NO:6631 and 9329; SEQ ID NO:6630 and 9328; SEQ ID NO:14639 and 4758; SEQ ID NO:14638 and 4757; SEQ ID NO: 15315 and 7394; SEQ ID NO: 15314 and 7393; SEQ ID NO: 14773 and 12310; SEQ ID NO: 14772 and 12309; SEQ ID NO:8218 and 12330; SEQ ID NO:8217 and 12329; SEQ ID NO:8957 and 10630; SEQ ID NO:8956 and 10629; SEQ ID NO:9048 and 13224; SEQ ID NO:9047 and 13223; SEQ ID NO: 13700 and 4997; SEQ ID NO: 13699 and 4996; SEQ ID NO:11961 and 5125; SEQ ID NO:11960 and 5124; SEQ ID NO:8880 and 7599; SEQ ID NO:8879 and 7598; SEQ ID NO:8247 and 17387; SEQ ID NO:8237 and 17377; SEQ ID NO:15131 and 7058; SEQ ID NO: 15130 and 7057; SEQ ID NO: 15209 and 10628; SEQ ID NO:15208 and 10627; SEQ ID NO:8466 and 13389; SEQ ID NO:8465 and 13388; SEQ ID NO:14759 and 13162; SEQ ID NO:14758 and 13161; SEQ ID NO:8414 and 7238; SEQ ID NO: 8413 and 7237; SEQ ID NO: 15125 and 5473; SEQ ID NO: 15124 and 5472; SEQ ID NO:8274 and 11829; SEQ ID NO:8273 and 11828; SEQ ID NO:14761 and 13164; SEQ ID NO: 14760 and 13163; SEQ ID NO:8374 and 7591; SEQ ID NO:8373 and 7590; SEQ ID NO: 12191 and 13302; SEQ ID NO: 12190 and 13301; SEQ ID NO:8268 and 6959; SEQ ID NO:8267 and 6952; SEQ ID NO:15281 and 17106; SEQ ID NO:15280 and 17105; SEQ ID NO: 14837 and 7130; SEQ ID NO: 14836 and 7129; SEQ ID NO:8976 and 7642; SEQ ID NO:8975 and 7641; SEQ ID NO: 14957 and 4933; SEQ ID NO:14956 and 4932; SEQ ID NO:14249 and 7432; SEQ ID NO: 14248 and 7431; SEQ ID NO:14845 and 7212; SEQ ID NO: 14844 and 7211; SEQ ID NO:11963 and 5123; SEQ ID NO:11962 and 5122; SEQ ID NO: 15103 and 7134; SEQ ID NO: 15102 and 7133; SEQ ID NO:15231 and 13238; SEQ ID NO:15230 and 13237; SEQ ID NO: 8663 and 4949; SEQ ID NO:8662 and 4948; SEQ ID NO:7966 and 5369; SEQ ID NO:7965 and 5368; SEQ ID NO:8168 and 4657; SEQ ID NO:8167 and 4656; SEQ ID NO:8937 and 7734; SEQ ID NO:8936 and 7733; SEQ ID NO: 14911 and 7684; SEQ ID NO:14910 and 7683; SEQ ID NO:9115 and 7542; SEQ ID NO:9114 and 7541; SEQ ID NO:13946 and 4082; SEQ ID NO:13945 and 4081; SEQ ID NO:9219 and 5211; SEQ ID NO:9218 and 5210; SEQ ID NO: 13950 and 5467; SEQ ID NO: 13949 and 5466; SEQ ID NO:14767 and 11856; SEQ ID NO:14766 and 11855; SEQ ID NO:8892 and 5145; SEQ ID NO:8891 and 5144; SEQ ID NO:15107 and 7852; SEQ ID NO:15106 and 7851; SEQ ID NO:12129 and 13107; SEQ ID NO: 12128 and 13106; SEQ ID NO:9002 and 7518; SEQ ID NO:9001 and 7517; SEQ ID NO: 14821 and 5479; SEQ ID NO: 14820 and 5478; SEQ ID NO: 11770 and 5665; SEQ ID NO: 11769 and 5664; SEQ ID NO: 14670 and 11840; SEQ ID NO: 14665 and 11839; SEQ ID NO: 14831 and 7194; SEQ ID NO:14830 and 7193; SEQ ID NO:14559 and 7680; SEQ ID NO:14558 and 7679; SEQ ID NO:13952 and 13510; SEQ ID NO:13951 and 13509; SEQ ID NO:8292 and 7564; SEQ ID NO:8291 and 7563; SEQ ID NO: 15022 and 4947; SEQ ID NO:15021 and 4946; SEQ ID NO:8258 and 7623; SEQ ID NO:8257 and 7618; SEQ ID NO:9046 and 13226; SEQ ID NO:9045 and 13225; SEQ ID NO:8198 and 6828; SEQ ID NO:8197 and 6827; SEQ ID NO:14411 and 13200; SEQ ID NO:14410 and 13199; SEQ ID NO:14545 and 5822; SEQ ID NO: 14544 and 5821; SEQ ID NO:8627 and 12252; SEQ ID NO:8626 and 12251; SEQ ID NO:8498 and 7640; SEQ ID NO:8497 and 7639; SEQ ID NO:14413 and 7873; SEQ ID NO: 14412 and 7872; SEQ ID NO: 14865 and 7526; SEQ ID NO: 14864 and 7525; SEQ ID NO: 11772 and 4999; SEQ ID NO:11771 and 4998; SEQ ID NO: 13742 and 7314; SEQ ID NO:13741 and 7313; SEQ ID NO:8290 and 5629; SEQ ID NO:8289 and 5628; SEQ ID NO:8364 and 5411; SEQ ID NO:8363 and 5410; SEQ ID NO:8923 and 6337; SEQ ID NO:8922 and 6336; SEQ ID NO:8140 and 7558; SEQ ID NO:8139 and 7557; SEQ ID NO: 14601 and 13037; SEQ ID NO:14600 and 13036; SEQ ID NO:8832 and 7638; SEQ ID NO:8831 and 7637; SEQ ID NO:13730 and 6226; SEQ ID NO:13729 and 6225; SEQ ID NO: 14467 and 11841; SEQ ID NO:14466 and 11838; SEQ ID NO:13962 and 17532; SEQ ID NO:13961 and 17531; SEQ ID NO:18204 and 4529; SEQ ID NO:18203 and 4528; SEQ ID NO:14101 and 17408; SEQ ID NO:14100 and 17407; SEQ ID NO:14915 and 6771; SEQ ID NO:14914 and 6770; SEQ ID NO: 14855 and 7172; SEQ ID NO: 14854 and 7171; SEQ ID NO:14571 and 5307; SEQ ID NO: 14570 and 5306; SEQ ID NO:15105 and 7581; SEQ ID NO:15104 and 7580; SEQ ID NO:8890 and 7470; SEQ ID NO:8889 and 7469; SEQ ID NO: 14365 and 13105; SEQ ID NO: 14364 and 13104; SEQ ID NO:9095 and 6892; SEQ ID NO:9094 and 6891; SEQ ID NO:14435 and 13520; SEQ ID NO:14425 and 13515; SEQ ID NO:8921 and 6339; SEQ ID NO:8920 and 6338; SEQ ID NO:7962 and 7571; SEQ ID NO:7961 and 7570; SEQ ID NO:15269 and 5837; SEQ ID NO:15268 and 5836; SEQ ID NO:8635 and 5347; SEQ ID NO:8634 and 5346; SEQ ID NO:8106 and 7418; SEQ ID NO:8105 and 7417; SEQ ID NO:8320 and 9309; SEQ ID NO:8319 and 9308; SEQ ID NO: 14701 and 13424; SEQ ID NO: 14698 and 13422; SEQ ID NO: 14663 and 5679; SEQ ID NO: 14662 and 5678; SEQ ID NO:8316 and 6824; SEQ ID NO:8315 and 6823; SEQ ID NO:8210 and 7720; SEQ ID NO:8209 and 7719; SEQ ID NO:13869 and 5051; SEQ ID NO:13868 and 5050; SEQ ID NO: 14863 and 7917; SEQ ID NO: 14862 and 7916; SEQ ID NO:8372 and 6769; SEQ ID NO:8371 and 6768; SEQ ID NO:7960 and 7488; SEQ ID NO:7959 and 7487; SEQ ID NO:15171 and 13411; SEQ ID NO:15170 and 13410; SEQ ID NO:18158 and 17354; SEQ ID NO:18157 and 17353; SEQ ID NO:8736 and 12268; SEQ ID NO:8735 and 12267; SEQ ID NO:14140 and 4104; SEQ ID NO:14139 and 4103; SEQ ID NO:8150 and 7567; SEQ ID NO:8149 and 7565; SEQ ID NO:15063 and 7790; SEQ ID NO:15062 and 7789; SEQ ID NO: 14083 and 17374; SEQ ID NO: 14082 and 17373; SEQ ID NO: 14150 and 4870; SEQ ID NO:14149 and 4869; SEQ ID NO:15203 and 5353; SEQ ID NO: 15202 and 5352; SEQ ID NO: 13734 and 4957; SEQ ID NO:13733 and 4956; SEQ ID NO:13722 and 17321; SEQ ID NO:13721 and 17320; SEQ ID NO:14531 and 4997; SEQ ID NO:14530 and 4996; SEQ ID NO: 14567 and 4993; SEQ ID NO: 14566 and 4992; SEQ ID NO: 14081 and 5131; SEQ ID NO: 14080 and 5130; SEQ ID NO: 14849 and 5824; SEQ ID NO: 14848 and 5823; SEQ ID NO:8376 and 5861; SEQ ID NO:8375 and 5860; SEQ ID NO: 14597 and 13592; SEQ ID NO:14596 and 13591; SEQ ID NO:8276 and 5551; SEQ ID NO:8275 and 5550; SEQ ID NO:9014 and 4116; SEQ ID NO:9013 and 4115; SEQ ID NO: 13867 and 5049; SEQ ID NO:13866 and 5048; SEQ ID NO:8270 and 7706; SEQ ID NO:8269 and 7705; SEQ ID NO:8382 and 5003; SEQ ID NO:8381 and 5002; SEQ ID NO:7988 and 4854; SEQ ID NO:7987 and 4853; SEQ ID NO:12045 and 5389; SEQ ID NO:12044 and 5388; SEQ ID NO:9024 and 7562; SEQ ID NO:9023 and 7561; SEQ ID NO:14819 and 5867; SEQ ID NO: 14818 and 5866; SEQ ID NO: 14351 and 9305; SEQ ID NO: 14350 and 9304; SEQ ID NO:8362 and 5367; SEQ ID NO:8361 and 5366; SEQ ID NO:8543 and 6938; SEQ ID NO:8542 and 6937; SEQ ID NO: 14549 and 10604; SEQ ID NO: 14548 and 10603; SEQ ID NO:8390 and 7672; SEQ ID NO:8389 and 7671; SEQ ID NO:14471 and 5355; SEQ ID NO:14470 and 5354; SEQ ID NO:12153 and 13115; SEQ ID NO: 12152 and 13114; SEQ ID NO: 14595 and 17075; SEQ ID NO:14594 and 17074; SEQ ID NO:8565 and 17078; SEQ ID NO:8564 and 17077; SEQ ID NO:12107 and 13371; SEQ ID NO:12106 and 13370; SEQ ID NO:13978 and 4696; SEQ ID NO:13977 and 4695; SEQ ID NO: 14160 and 17297; SEQ ID NO:14159 and 17296; SEQ ID NO:9052 and 5717; SEQ ID NO:9051 and 5716; SEQ ID NO: 14186 and 4730; SEQ ID NO: 14185 and 4729; SEQ ID NO: 14207 and 13190; SEQ ID NO: 14206 and 13189; SEQ ID NO:8282 and 9307; SEQ ID NO:8281 and 9306; SEQ ID NO: 14649 and 13359; SEQ ID NO: 14648 and 13358; SEQ ID NO:8820 and 5197; SEQ ID NO:8819 and 5196; SEQ ID NO: 14653 and 4700; SEQ ID NO: 14652 and 4699; SEQ ID NO: 14353 and 5265; SEQ ID NO: 14352 and 5264; SEQ ID NO:15377 and 4784; SEQ ID NO:15374 and 4783; SEQ ID NO:8990 and 6986; SEQ ID NO:8989 and 6985; SEQ ID NO:12121 and 5569; SEQ ID NO: 12120 and 5568; SEQ ID NO:14229 and 6990; SEQ ID NO:14228 and 6989; SEQ ID NO: 14227 and 7000; SEQ ID NO: 14226 and 6999; SEQ ID NO:8882 and 7468; SEQ ID NO:8881 and 7467; SEQ ID NO:14235 and 5281; SEQ ID NO: 14234 and 5280; SEQ ID NO: 14686 and 7631; SEQ ID NO: 14685 and 7627; SEQ ID NO: 14205 and 7273; SEQ ID NO: 14197 and 7268; SEQ ID NO:18110 and 6814; SEQ ID NO:18109 and 6813; SEQ ID NO:15121 and 5141; SEQ ID NO:15120 and 5140; SEQ ID NO: 13638 and 7827; SEQ ID NO: 13637 and 7826; SEQ ID NO: 15456 and 10600; SEQ ID NO: 15455 and 10599; SEQ ID NO: 13782 and 5685; SEQ ID NO:13781 and 5684; SEQ ID NO: 15505 and 17313; SEQ ID NO:15504 and 17312; SEQ ID NO:9139 and 4935; SEQ ID NO:9138 and 4934; SEQ ID NO:14355 and 5263; SEQ ID NO: 14354 and 5262; SEQ ID NO: 15273 and 4714; SEQ ID NO:15272 and 4713; SEQ ID NO:9129 and 5287; SEQ ID NO:9128 and 5286; SEQ ID NO:11918 and 4702; SEQ ID NO: 11917 and 4701; SEQ ID NO: 14789 and 7262; SEQ ID NO: 14788 and 7261; SEQ ID NO: 15097 and 6405; SEQ ID NO:15096 and 6404; SEQ ID NO:8334 and 7748; SEQ ID NO:8333 and 7747; SEQ ID NO:15331 and 4651; SEQ ID NO:15330 and 4650; SEQ ID NO:8872 and 7480; SEQ ID NO:8871 and 7479; SEQ ID NO:9215 and 13136; SEQ ID NO:9214 and 13135; SEQ ID NO:9054 and 6820; SEQ ID NO:9053 and 6819; SEQ ID NO:14029 and 9325; SEQ ID NO: 14028 and 9324; SEQ ID NO:13670 and 16615; SEQ ID NO:13669 and 16614; SEQ ID NO:8551 and 17309; SEQ ID NO:8550 and 17308; SEQ ID NO:14182 and 5359; SEQ ID NO:14181 and 5358; SEQ ID NO:18184 and 13318; SEQ ID NO:18183 and 13317; SEQ ID NO:11914 and 17350; SEQ ID NO:11913 and 17349; SEQ ID NO:15075 and 7382; SEQ ID NO:15074 and 7381; SEQ ID NO:11910 and 5687; SEQ ID NO:11909 and 5686; SEQ ID NO: 14697 and 4706; SEQ ID NO: 14696 and 4705; SEQ ID NO: 14405 and 5859; SEQ ID NO: 14404 and 5858; SEQ ID NO: 12115 and 17086; SEQ ID NO: 12114 and 17085; SEQ ID NO:15115 and 5871; SEQ ID NO:15114 and 5870; SEQ ID NO:14635 and 13369; SEQ ID NO: 14634 and 13368; SEQ ID NO:8553 and 7656; SEQ ID NO:8552 and 7655; SEQ ID NO:13658 and 6978; SEQ ID NO:13657 and 6977; SEQ ID NO: 15408 and 12258; SEQ ID NO: 15407 and 12257; SEQ ID NO: 14555 and 4655; SEQ ID NO:14554 and 4654; SEQ ID NO:12217 and 5796; SEQ ID NO:12216 and 5795; SEQ ID NO:14395 and 7478; SEQ ID NO: 14394 and 7477; SEQ ID NO:9008 and 5247; SEQ ID NO:9007 and 5246; SEQ ID NO: 11965 and 7024; SEQ ID NO:11964 and 7023; SEQ ID NO: 13718 and 5193; SEQ ID NO:13717 and 5192; SEQ ID NO:13801 and 7012; SEQ ID NO:13800 and 7011; SEQ ID NO:14225 and 7870; SEQ ID NO:14224 and 7869; SEQ ID NO: 13976 and 4698; SEQ ID NO: 13975 and 4697; SEQ ID NO: 14331 and 13254; SEQ ID NO:14330 and 13253; SEQ ID NO: 14475 and 7786; SEQ ID NO:14474 and 7785; SEQ ID NO:8591 and 6403; SEQ ID NO:8590 and 6402; SEQ ID NO:15045 and 5715; SEQ ID NO:15044 and 5714; SEQ ID NO:13780 and 5599; SEQ ID NO:13779 and 5598; SEQ ID NO:18172 and 9313; SEQ ID NO:18171 and 9312; SEQ ID NO: 12233 and 6349; SEQ ID NO: 12232 and 6348; SEQ ID NO:13879 and 5295; SEQ ID NO:13878 and 5294; SEQ ID NO:18170 and 5633; SEQ ID NO:18169 and 5632; SEQ ID NO:13938 and 4673; SEQ ID NO: 13937 and 4672; SEQ ID NO: 14407 and 5279; SEQ ID NO: 14406 and 5278; SEQ ID NO: 14194 and 5583; SEQ ID NO:14193 and 5582; SEQ ID NO: 14959 and 4728; SEQ ID NO:14958 and 4727; SEQ ID NO: 14302 and 17352; SEQ ID NO: 14301 and 17351; SEQ ID NO: 12283 and 5511; SEQ ID NO: 12282 and 5510; SEQ ID NO:8541 and 13264; SEQ ID NO:8540 and 13263; SEQ ID NO:8577 and 7196; SEQ ID NO:8576 and 7195; SEQ ID NO: 14521 and 13338; SEQ ID NO: 14520 and 13337; SEQ ID NO:11916 and 4653; SEQ ID NO:11915 and 4652; SEQ ID NO:14106 and 5623; SEQ ID NO:14104 and 5622; SEQ ID NO:8974 and 5241; SEQ ID NO:8973 and 5240; SEQ ID NO:8804 and 5643; SEQ ID NO:8803 and 5642; SEQ ID NO:14184 and 13186; SEQ ID NO:14183 and 13185; SEQ ID NO:9179 and 17414; SEQ ID NO:9178 and 17413; SEQ ID NO:8480 and 9333; SEQ ID NO:8479 and 9332; SEQ ID NO:8915 and 10640; SEQ ID NO:8914 and 10639; SEQ ID NO:14142 and 5165; SEQ ID NO:14141 and 5164; SEQ ID NO:17169 and 17495; SEQ ID NO:17168 and 17494; SEQ ID NO:14961 and 11852; SEQ ID NO:14960 and 11851; SEQ ID NO:15323 and 4649; SEQ ID NO: 15322 and 4648; SEQ ID NO:12229 and 5855; SEQ ID NO:12228 and 5854; SEQ ID NO:8156 and 7742; SEQ ID NO:8155 and 7741; SEQ ID NO:14393 and 7076; SEQ ID NO: 14392 and 7075; SEQ ID NO:8136 and 6882; or SEQ ID NO:8135 and 6881.

[1899] Throughout this application, the term “about” is used to indicate that a value includes the inherent variation of error for the measurement or quantitation method.

[1900] The use of the word “a” or “an” when used in conjunction with the term “comprising” may mean “one,” but it is also consistent with the meaning of “one or more,” “at least one,” and “one or more than one.”

[1901] The phrase “and/or” means “and” or “or”. To illustrate, A, B, and/or C includes: A alone, B alone, C alone, a combination of A and B, a combination of A and C, a combination of B and C, or a combination of A, B, and C. In other words, “and/or” operates as an inclusive or.

[1902] The words “comprising” (and any form of comprising, such as “comprise” and “comprises”), “having” (and any form of having, such as “have” and “has”), “including” (and any form of including, such as “includes” and “include”) or “containing” (and any form of containing, such as “contains” and “contain”) are inclusive or open-ended and do not exclude additional, unrecited elements or method steps.

[1903] The compositions and methods for their use can “comprise,” “consist essentially of,” or “consist of” any of the ingredients or steps disclosed throughout the specification. Compositions and methods “consisting essentially of” any of the ingredients or steps disclosed limits the scope of the claim to the specified materials or steps which do not materially affect the basic and novel characteristic of the claimed invention. As used in this specification and claim(s), the words “comprising” (and any form of comprising, such as “comprise” and “comprises”), “having” (and any form of having, such as “have” and “has”), “including” (and any form of including, such as “includes” and “include”) or “containing” (and any form of containing, such as “contains” and “contain”) are inclusive or open-ended and do not exclude additional, unrecited elements or method steps. It is contemplated that embodiments described herein in the context of the term “comprising” may also be implemented in the context of the term “consisting of” or “consisting essentially of”.

[1904] “Individual, “subject,” and “patient” are used interchangeably and can refer to a human or non-human.

[1905] It is specifically contemplated that any limitation discussed with respect to one embodiment of the invention may apply to any other embodiment of the invention. Furthermore, any composition of the invention may be used in any method of the invention, and any method of the invention may be used to produce or to utilize any composition of the invention. Aspects of an embodiment set forth in the Examples are also embodiments that may be implemented in the context of embodiments discussed elsewhere in a different Example or elsewhere in the application, such as in the Summary of Invention, Detailed Description of the Embodiments, Claims, and description of Figure Legends.

[1906] Any method in the context of a therapeutic, diagnostic, or physiologic purpose or effect may also be described in “use” claim language such as “Use of” any compound, composition, or agent discussed herein for achieving or implementing a described therapeutic, diagnostic, or physiologic purpose or effect.

[1907] Other objects, features and advantages of the present invention will become apparent from the following detailed description. It should be understood, however, that the detailed description and the specific examples, while indicating specific embodiments of the invention, are given by way of illustration only, since various changes and modifications within the spirit and scope of the invention will become apparent to those skilled in the art from this detailed description.

### BRIEF DESCRIPTION OF THE DRAWINGS

[1908] The following drawings form part of the present specification and are included to further demonstrate certain aspects of the present invention. The invention may be better understood by reference to one or more of these drawings in combination with the detailed description of specific embodiments presented herein.

[1909] FIG. 1A-G: The anchor epitope is a common target of stalk-binding antibodies. a, Negative stain EM of representative 2D class averages and 3D reconstructions of Fabs binding to A/California/July 2009 E376K HA. b, Juxtaposed 3D reconstructions of Fabs binding to A/California/July 2009 E376K HA. c, Binding footprints of anchor-binding Fabs relative to mAbs targeting the CS epitope (CR9114 and FI6v3). d, Competition of stalk-binding mAbs withCR9114 or 047-09 4F04. e, Neutralization potency of anchor-(n=50) and CS-binding (n=37) mAbs against A/California/July 2009. f, Proportion of anchor-(n=50) and CS-targeting (n=37)mAbs binding to other group 1 influenza virus A subtypes. g, Representative 2D class averages,3D reconstructions, and footprints of 222-1C06 binding to H2 and the relative footprint on H1. Data in e are represented as mean±S.D and were analyzed by two-tailed unpaired non-parametric Mann-Whitney test. Data in f were analyzed by Fisher's Exact tests. See also FIGS. 5-7.

[1910] FIG. 2A-K: Anchor-targeting mAbs bind the HA fusion peptide via public binding motifs. a andb, VH (a) and VK (b) gene usage by anchor-binding mAbs. c, Cryo-EM structure of anchor-targeting 222-1C06 (blue) and lateral patch-targeting 045-09 2B05 (dark gray; see methods) binding to A/California/July 2009 (E376K) HA (light gray). d, Heavy and light chain footprint of 222-1C06 binding to HA based on cryo-EM structure. e, HA epitope contact residues (maroon) and heavy chain (green) and light chain (yellow) antibody contact residues of the 222-1C06 paratope. Peach highlighted amino acids represent the fusion peptide of HA2. f, K-CDR3 NWP and H-CDR2 Y58 motifs of 222-1C06. g, Major contacts of 222-1C06 K-CDR1 and H-CDR3 (normal typeface) binding to HA (bold residues). h and i, Weblogo plot and germline sequenceof Y58 following the H-CDR2 (h) and K-CDR3 NWP motif (i). j and k, Amino acid conservationof s contact residues across human, swine, and avian H1 viruses (j) and group 1 influenza A viruses (k). Strain information used for conservation models in j and k are in Supplementary Table 4 and 5, respectively. See also Extended Data FIG. 4. Shown in FIG. 2H are SEQ ID NOS:18650, 18651, and 18652, respectively. Shown in FIG. 2I are SEQ ID NOS:10711, 12433, 12775, and 12772, respectively.

[1911] FIG. 3A-D: MBCs and serum antibodies commonly target the anchor epitope. a, Proportion of all cH5/1⁺ B cells with repertoire features of anchor-binding mAbs, VH1-69/kappa (CS epitope), or with other repertoire features. b, Proportion of B cells with anchor-binding mAb features or that use VH1-69/kappa chain by participant (n=20 donors). Lines connect the same participant. c, EMPEM summary of pAbs in serum collected at day 7 and 14 following 2014 QIV inparticipants 236 and 241 binding to A/Michigan/45/2015 H A. Fabs shown as graphics withdotted lines represent predicted placements due to limited particle representation. d, Overlap of 241 IgA 2F04 Fab and pAb from participant 241 binding the anchor epitope. Data in b were analyzed using a two-tailed paired non-parametric Wilcoxon matched-pairs signed rank test. See also FIG. 9.

[1912] FIG. 4A-E: cHA vaccination in humans robustly recalls MBCs targeting the anchor epitope. a, cHA vaccine trial design including vaccine groups (right; group 1 n=10 participants; group 2 n=7 participants; group 4 n=7 participants; group 3&5 n=6). i.n., intranasal; i.m., intramuscular. b-c, Fold change by participant of serum antibodies competing for binding against the anchor and CS epitopes after the prime (d29/d1; b) and boost (d113/85; c). d-e, Proportion of participants that seroconverted (d) and half maximal effective concentration titers (EC₅₀; e) against the anchor and CS epitopes. Individuals in the cHA (IIV+AS03) cohort were those that received the cHA vaccine with adjuvant (cH8/1 IIV+AS03 Prime and cH5/1 IIV+AS03 Boost; n=17 donors) and the IIV cohort were those that received licensed IIV vaccines (2009 MIV, 2010 TIV, and 2014 QIV; n=1 1 donors). Data in b, c, and e are mean±S.D. Dashed line represents limit of detection. Data in b and c were analyzed by two-tailed non-parametric Kruskal-Wallis Tests, data in d were analyzed by Fisher's Exact test, and data in e were analyzed by two-tailed unpaired non-parametric Mann-Whitney test. See also FIG. 10.

[1913] FIG. 5A-L: Binding and neutralization features of anchor epitope-bindingmAbs. Related to FIG. 1. a, Proportion of HA⁺ mAbs binding to distinct HA domains (left) and proportion of stalk-binding mAbs binding the CS domain (right). Number in the center of the pie graphs represent the number of mAbs tested. b, Proportion of mAbs per cohort that bind the HAstalk domain. c, Negative stain 2D class averages of 047-09 4F04, 241 IgA 2F04, and 222-1C06 binding to H1 (A/California/July 2009 E376K HA). d, Overlay of 047-09 4F04, 241 IgA 2F04, 222-1C06, and FISW84 (PDB:6HJQ) Fabs binding the anchor epitope of A/California/April 2009 HA. e, Overlay of CR8020 (PDB:3SDY), CR8043 (PDB:4NM8), and FISW84 (PDB:6HJQ) modeled on A/California/July 2009 E376G (PDB:4M4Y). f, Footprints of anchor mAb 222-1C06 on H1 (top; PDB: 4M4Y) and CR8020 and CR8043 on H3 (bottom; PDB:4WE4). g, Heatmap of apparent affinity (K_{d}; M) of anchor-targeting mAbs binding to historical and recent H1N1 viruses.h, Neutralization potency of anchor-binding mAbs (n=15) against H1-expressing viruses. i, Representative microneutralization curves of anchor-(n=42) and CS-binding (n=29) mAbs against A/California/July 2009. j, IC₅₀ of anchor- and CS-binding mAbs against A/California/July 2009.k, ADCC activity of mAbs targeting the CS and anchor epitopes. Dashed line represents the limit of detection (L.O.D). 1, ADCC potency of mAbs targeting the anchor (n=18 mAbs) and CS (n=8 mAbs) epitopes. Data in h, j, and 1 are represented as mean±S.D. Data in j and 1 were analyzed using a two-tailed unpaired non-parametric Mann-Whitney test.

[1914] FIG. 6A-G: Anchor-targeting mAb binding to influenza subtype, viral mutants, and polyreactivity antigen panel. Related to FIG. 1. a, Proportion of anchor- (n=50 mAbs) andCS-targeting mAbs (n=37) binding influenza B viruses and H3N2 viruses. b, Negative stain 2D class averages of 222-1C06 binding to H2 (A/Singapore/January 1957), and H5 (A/Indonesia/May 2005). c, H2N2 neutralizing data of anchor- (n=11 mAbs) and CS-binding mAbs (n=4) represented as minimum neutralizing concentration. The limit of detection (L.O.D.) is 30 mg/ml. d, Proportion of mAbs targeting the anchor (n=50 mAbs) or CS (n=50 mAbs) epitope that are polyreactive. e, LPS binding strength, represented as area under the curve (AUC), of polyreactive mAbs targeting the anchor (n=30 mAbs) and central stalk (n=43 mAbs) epitopes. Data are mean±S.D. f and g, Anchor- and CS epitope-binding mAbs were tested for binding to A/California/July 2009 HA with naturally occurring and experimentally determined mutations induced by 045-09 2B06, a CS-binding mAb. f, Location of mutations modeled onA/California/April 2009 HA (PDB: 4JTV). Residues in blue are located on HA1 and residues in red are located on HA2. Outlines represent binding footprints of 047-09 4F04 (sky blue) and CR9114 (green). g, Heatmap of mAb binding to WT and mutant HAs shown as the proportion of signal relative to mAb binding to the WT HA. Data in a and d were analyzed using Fisher's Exact tests. Data in e were analyzed using a two-tailed unpaired non-parametric Mann-Whitney test.

[1915] FIG. 7A-D: Anchor epitope-targeting mAbs are potently protective in vivo and lack ADCC activity. Related to FIG. 1. a-b, Mice were prophylactically (2 hours prior to infection; a) or therapeutically (48 hours after infection; b) administered i.p. a cocktail of mAbs (n=5 mAbs/cocktail) against the anchor- or CS-, or an anthrax-specific antibody. Mice were infected with 10 LD₅₀ of A/Netherlands/602/2009 H1N1. Weight loss (top) and survival (bottom) of mice in each treatment group. c, Lung viral titers of mice in each prophylactic treatment group infected with 1 LD₅₀ of A/Netherlands/602/2009. dpi, days post infection. d, Mice were prophylactically (2 hours prior to infection) administered i.p. a cocktail of mAbs (n=5 mAbs/cocktail) against the anchor- or CS-, or an anthrax-specific antibody. Mice were infected with 10 LD₅₀ of A/Fort Monmouth/January 1947 H1N1. Weight loss (top) and survival (bottom) of mice in each treatment group. For a, b, and d, 10 mice per treatment group were used and data are pooled from two independent experiments. For c, 5 mice per treatment group and timepointwere used except for anchor cocktail group at dpi 3 only 4 mice were used. Data in a, b, and d are represented as mean±S.D and data in c are represented by mean S.E.M. Kaplan-Meier curves in a, b, d were analyzed using a Log-rank Mantel-Cox test, and data in c were analyzed using multiple two-tailed unpaired non-parametric Kruskal-Wallis tests.

[1916] FIG. 8A-Q: Additional repertoire and structural features of mAbs binding the anchor epitope. Related to FIG. 2. a, VH locus usage by anchor- (n=52 mAbs) and CS-binding mAbs (n=37 mAbs). b, VH1 gene usage of mAbs targeting the CS epitope. c, VK locus usage by anchor- (n=52 mAbs) and CS-binding mAbs (n=37 mAbs). d, JK gene usage by anchor epitope-binding mAbs. e, Clonal expansions of anchor epitope-targeting mAbs. Numbers indicate heavy and light chain parings, which are described in Extended Data Table 2. f, Heavy and light chain sequences of the public clone. g and h, Mutations (g) and CDR3 amino acid (AA) lengths (h) of heavy and light chains of mAbs binding the anchor (n=52 mabs) or CS (n=37mAbs) epitopes. Data are mean±S.D. i, Cryo-EM map of 222-1C06 binding to A/California/July 2009 E376K HA. j and k, Local resolution (j) and Fourier Shell Correlation (k) of 222-1C06 binding to HA. 1, Aromatic pockets of 222-1C06 binding A/California/July 2009 E376K and FISW84 binding to A/duck/Alberta/35/1976 (PDB:6HJQ; top) and overlay ofepitope:paratope interaction (bottom). m, MD simulations demonstrating the K-CDR3 NWP and H-CDR2 Y58 motifs of 222-1C06, FISW84, 241 IgA 2F04, and SFV009 3G01 binding to HA A/California/July 2009 H A. For left-hand panels in 1 and all panels in m, HA epitope contact residues (maroon) and heavy chain (green) and light chain (yellow) antibody contact residues of anchor mAb paratopes. Peach highlighted amino acids represent the fusion peptide of HA2. n, Fab-Fab interactions of the aromatic pocket of 222-1C06. o, MD simulation of the paratope flexibility of 222-1C06, highlighting the p-stacking of H-CDR2 and K-CDR3. p, Conservation of side-chain contacts of 222-1C06 across seasonal human H1N1 viruses circulating between 1918-2019. q, Deep mutational scanning of the side-chain contacts of 222-1C06. Data in a andc were analyzed using a Chi-square test, and data in g and h were analyzed by two-tailed unpaired non-parametric Mann-Whitney tests. Shown in FIG. 8F are SEQ ID NOS: 18653, 18654, 18655, 7623, 7678 and 7627, respectively.

[1917] FIG. 9A-E: Features of anchor-targeting MBCs and EMPEM 2D classes. Related to FIG. 3. a, 33 mAbs with anchor epitope-binding mAb repertoire features weregenerated and tested for competing for binding with 047-09 4F04. b-c, Number of heavy chain mutations (b) and isotype usage (c) of B cells with repertoire features of anchor-binding mAbs (n=119 cells) or utilize VH1-69/kappa (n=365 cells). d-e, 2D class averages of pAbs from donors236 (d) and 241 (e) at days 7 and 14 post immunization binding to A/Michigan/45/2015 H A. The last row of 2D classes in d is HA monomer complexes processed independently from trimer complexes. Data in b are represented as mean±S.D. Data in b were analyzed using a two-tailed paired non-parametric Wilcoxon matched-pairs signed rank test.

[1918] FIG. 10A-I: Serum antibody kinetics of anchor- and CS-epitope binding antibodies after cHA vaccination and mAb binding to recombinant HAs. Related to FIG. 4. a-b, EC50s of serum antibodies competing for binding with 047-09 4F04 for binding to the anchor epitope (a) and CR9114 for binding to the CS epitope (b). a-b, Kinetics of serumantibody responses against the anchor (a) and CS (b) epitopes. Data are mean±S.D. c-d, Proportion of stalk⁺ mAbs per donor (c) or proportion of donors with an isolated anchor mAb (d) upon first exposure to the pH1N1 virus (2009 MIV cohort) relative to donors who have repeatedly been exposed to pH1N1 (2010 TIV and 2014 QIV). Data in c are mean±S.D. Data in c includes only donors with an isolated anti-stalk mAb, whereas d includes all donors. e-f, Antibody titers (EC₅₀) of serum antibodies collected on day 113 and day 420 against the anchor epitope (e) and the CS epitope (f). Lines connect titers from the same donor and each pair of symbols represents one donor. g, Proportion of anchor epitope-binding mAbs binding to cHA (cH6/1) or mini-HA (n=50). h, Representative flow cytometry plots of mAbs binding to A/California/July 2009 Cal09 HA and mini-HA (left) and geometric mean fluorescence intensity (gMFI) of mAbs binding to Cal09 and mini-HA (right). Data represent the mean±S.D. and each symbol represents an individual mAb. i, Proportion of anchor epitope-targeting mAbs binding to A/California/July 2009 recombinant HA with a GCN4 or fibritin trimerization domain (n=50). Fordata in a, b, e, and f, Group 1 n=10 participants, group 2 n=7 participants, group 4 n=7 participants, group 3&5 n=6. For data in c, first exposure n=7 donors and repeated exposure n=4 donors. For data in d, first exposure n=10 donors and repeated exposure n=13 donors. Data in a and b were analyzed using a two-tailed two-way ANOVA testing for simple effects within rows, data in c and h were analyzed using a two-tailed unpaired non-parametric Mann-Whitney test, data in d, g, and i were analyzed using Fisher's Exact test, and data in c and d were analyzed using a two-tailed paired non-parametric Wilcoxon matched-pairs signed rank test. See also Supplementary FIG. 1 for gating strategy for panel h.

[1919] FIG. 11. Gating Strategy for FIG. 10h. Examples of gating for total cells and mAb+ cells in samples that were transfected to express membrane-bound A/California/July 2009 HA relating gMFI presented in FIG. 10h.

[1920] FIG. 12A-F. The anchor epitope is a common target of HA stalk binding antibodies. (A-B), Negative stain EM 2D class averages and 3D reconstructions of negative stain EM of 047-09 4F04 Fab (A) and 241 IgA 2F04 Fab (B) binding to A/California/April 2009 HA. (C) Overlay of 047-09 4F04, 241 IgA 2F04, and FISW84 (PDB: 6HJQ) Fabs binding the anchor epitope of A/California/04/2009 HA. (D) Binding footprints of 047-09 4F04, 241 IgA 2F04, CR9114, and FI6v3 on A/California/04/2009 HA. (E) Competition of stalk binding mAbs with CR9114 or 047-09 4F04. (F) Proportion of mAbs binding to the anchor epitope, the BN stalk epitope, or an unknown stalk epitope based on competition with 047-09 4F04 or CR9114. Number in the center of the pie graph represents the number of mAbs tested. See also FIG. 19 and Table S2.

[1921] FIG. 13A-D. Anchor epitope targeting antibodies are broadly reactive amongst H1 expressing viruses. (A) Proportion of anchor epitope and BN stalk epitope targeting mAbs binding to other group 1 subtypes. (B) Apparent affinity of anchor and BN stalk binding mAbs to A/California/July 2009 virus. Data are represented as mean±S.D. (C-D) Anchor and BN stalk binding mAbs were tested for binding to A/California/July 2009 HA with naturally occurring mutations and experimentally determined mutations induced by 045-09 2B06, a BN stalk epitope binding mAb. (C) Location of mutations modeled on A/California/04/2009 HA (PDB: 4JTV). Residues in blue are located on HA1 and residues in red are located on HA2. Outlines represent binding footprints of 047-09 4F04 (sky blue) and CR9114 (green). (D) Heatmap of mAb binding to WT and mutant HAs shown as the proportion of signal relative to mAb binding to the WT HA. Data in A were analyzed by Fisher's Exact tests and B were analyzed by unpaired non-parametric Mann-Whitney test. See also FIG. 20, FIG. 21, Table S3.

[1922] FIG. 14A-E. Anchor epitope targeting mAbs are broadly neutralizing amongst H1 viruses and potently protective in vivo. (A) Neutralization potency of mAbs binding the anchor or BN stalk epitope against A/California/July 2009 H1N1. (B) Neutralization potency of anchor epitope binding mAbs against H1-expressing viruses. (C-E) Mice were prophylactically administered i.p. a cocktail of mAbs (n=5 mAbs/cocktail) against the anchor epitope or BN stalk epitope, or an anthrax specific antibody. Mice were infected 2 hours later with 10 LD50 ofA/Netherlands/602/2009 HIN1. (C) Experiment design. Weight loss (D) and survival (E) of mice in each treatment group. N=10 mice per treatment group and are pooled from two independent experiments. Data in A, B, and D are represented as mean±S.D. Data in A were analyzed by unpaired non-parametric Mann-Whitney test. See also Table S4.

[1923] FIG. 15A-H. Anchor epitope targeting B cells are induced by licensed influenza virus vaccines. (A-C) MAbs were generated from plasmablasts isolated 7 days after influenza virus vaccination with the 2009 MIV and the 2014 QIV. (A) Domain binding of HA+ mAbs. (B-C) Epitope specificity of stalk domain binding mAbs by vaccine cohort (B) and by subjects (C). (D-F) EMPEM of serum collected at day 7 and 14 following 2014 QIV in subjects 236 and 241 binding to A/Michigan/45/2015 HA. (D) Summary ofpAbs at day 7 and d14. (E) Overlap of 241 IgA 2F04 fab and pAb binding anchor epitope from subject 241. (F) Binding footprint of 241 IgA 2F04 (sky blue) and pAb from subject 241 (purple). (G) Overlap of anchor epitope binding pAbs from subjects 236 (lavender) and 241 (purple). (H) Binding footprint of pAbs from subjects 236 (lavender) and 241 (purple) relative to 241 IgA 2F04 and 047-09 4F04. Data in A and B were analyzed using Chi-square tests. See also FIG. 22.

[1924] FIG. 16A-D. cHA vaccination in humans recalls MBCs targeting the anchor epitope. (A-B) Subjects enrolled in a phase 1 clinical trial received a prime-boost of cHA vaccine, where the prime used cH8/1 and the boost used cH5/1. On the prime, subjects either received a LAIV or IIV with adjuvant (AS03). On the boost, subjects received the IIV with or without adjuvant (AS03). Serum was collected before and after vaccination and monitored for competing serum antibodies against the anchor epitope (047-09 4F04) and BN stalk epitope (CR9114). LAIV/IIV+AS03 (n=10); LAIV/IIV (n=7); IIV+AS03/IIV+AS03 (n=7); Placebo (n=6). (A) Trial design. (B) EC50s of serum antibodies competing for binding with 047-09 4F04 for binding to the anchor epitope (left) and CR9114 for binding to the BN stalk epitope (right). Data are mean±S.D. (C) Proportion of anchor epitope binding mAbs binding to cHA or mini-HA. (D) MAb binding to HEK293T cells expressing full length A/California/July 2009 HA (Cal09) or mini-HA with a transmembrane domain. Representative flow cytometry plots of mAbs binding to Cal09 HA and mini-HA (left) and geometric mean fluorescence intensity (gMFI) of mAbs binding to Cal09 and mini-HA (right). Data represent the median and each symbol represents a distinct mAb. Data in B were analyzed using a two-way ANOVA testing for simple effects within rows, data in C were analyzed by Fisher's Exact test and data in D were analyzed by unpaired non-parametric Mann-Whitney test. See also FIG. 23.

[1925] FIG. 17A-J. Anchor targeting mAbs use a highly restricted repertoire and possess a conserved binding motif within the K-CDR3. (A-C) Heavy chain VH classes (A) and gene usage of mAbs binding the anchor epitope (B) and the BN stalk epitope (C). Only VH1 gene usage of BN stalk epitope binding mAbs is shown in C. (D) Heavy chain clonality of mAbs binding the anchor epitope. (E) Light chain VK/VL classes usage of mAbs binding the anchor epitope or BN stalk epitope. (F-G) VK (F) and JK (G) gene usage of mAbs binding the anchor epitope. (H) Light chain clonality of mAbs binding the anchor epitope. (I) Private and public clones that share heavy and light chains. (J) Alignment of VDJ of the VH3-48 public clone. (K) Sequence logo of the K-CDR3 and the germline sequence of the K-CDR3 of VK3-11/VK3-15 combined with JK4/JK5. NWP motif is highlighted. (L) Sequence logo of the H-CDR2 with the tyrosines directly following the H-CDR2 and the germline sequence of the H-CDR2 of VH3-23, VH3-30, and VH3-48. Data in A and E were analyzed using Chi-square tests. See also FIG. 24. Shown in FIG. 17J are SEQ ID NOS:18653, 18654, and 18655, respectively. Shown in FIG. 17K are SEQ ID NOS:10711, 12433, 12775, and 12772, respectively. Shown in FIG. 17L are SEQ ID NOS:18650, 18651, and 18652, respectively.

[1926] FIG. 18A-F. Humans possess MBCs targeting the anchor epitope. cH5/1+ B cells from PBMCs were sorted from subjects 28 days following a booster with the cH5/1 and were subjected to single-cell RNA-sequencing. (A) Proportion of all B cells with features of anchor antibodies, VH1-69/kappa (BN stalk epitope), or with other repertoire features. (B) Proportion of B cells with anchor binding antibody features or that use VH1-69/kappa chain by subject. Lines connect the same subject. (C) VH/VK pairing of B cells with features of anchor epitope binding antibodies. (D) 34 mAbs with anchor epitope binding mAb repertoire features and tested for competing for binding with 047-09 4F04. (E-F) number of heavy chain mutations (E) and isotype usage (F) of B cells with repertoire features of anchor binding antibodies or VH1-69/kappa. Data in E are represented as mean±S.D. Data in D were analyzed using a paired non-parametric Wilcoxon matched-pairs signed rank test and data in E were analyzed by unpaired non-parametric Mann-Whitney test.

[1927] FIG. 19A-E. Binding features of isolated mAbs and 2D class average of anchor epitope binding mAbs. Related to FIG. 12. (A) Proportion of HA+ mAbs binding to distinct HA domains. (B) Proportion of stalk-binding mAbs binding the BN stalk domain. (C-D) Negative stain 2D class averages of 047-09 4F04 (C) and 241 IgA 2F04 (D) binding A/California/April 2009 HA. (E) Binding footprint of mAbs binding the anchor epitope (047-09 4F04, 241 IgA 2F04, and FISW84) and the BN stalk epitope (CR9114 and FI6v3) on A/California/July 2009.

[1928] FIG. 20A-D. MAbs targeted the anchor epitope binding to distinct HIN1 viruses, H3N2, influenza B viruses and comparison of mAbs binding virus versus HA. Related to FIG. 13. (A) Heatmap of apparent affinity (Kd; M) of anchor mAb binding to historical and recent HIN1 viruses. (B) Proportion of anchor binding and BN stalk binding mAbs binding to influenza B viruses and H3N2 viruses. (C) Conservation of group 1 influenza virus HAs, as shown on A/California/04/2009 (PDB: 4JTV), with the binding footprint of CR9114 (maroon) and 047-09 4F04 (orange) outlined. (D) Apparent affinity (Kd; M) of mAbs binding anchor, BN stalk, or head epitope binding to recombinant HA from A/California/July 2009 HIN1 and A/California/July 2009 virus. Lines connect the same mAb. Data in B were analyzed by Fisher's Exact tests and data in D were analyzed using a paired non-parametric Wilcoxon matched-pairs signed rank test.

[1929] FIG. 21A-E. Deep mutational scanning of 045-09 2B06 and mAb affinity for A/Michigan/45/2015 H1N1. Related to FIG. 13. (A-B) 045-09 2B06 was subjected to deep mutational scanning with a mutant library of A/WSN/1933 (H1N1). (A) Differential selection at each site in HA (H3 numbering). (B) Logo plot of key sites of escape, with the height of each letter proportional to the antibody selection for mutations to that amino acid at that site. (C) Differences in mutations found on the stalk domain of A/Michigan/45/2015 relative to the binding footprints of 047-09 4F04 and 241 IgA 2F04. (D-E) Apparent Affinity (Kd; M) of anchor binding mAbs (D) and BN stalk binding mAbs (E) to A/California/July 2009 and A/Michigan/45/2009. Lines connect the same mAb. Data in D and E were analyzed using a paired non-parametric Wilcoxon matched-pairs signed rank test.

[1930] FIG. 22A-E. Characterization of stalk binding mAbs induced by influenza virus vaccines. Related to FIG. 15. (A) Proportion of subjects with stalk+ mAbs from the 2009 MIV or 2014 QIV cohorts. (B) Proportion of mAbs targeting the stalk per person in the 2009 MIV and 2014 QIV cohorts. Red line represents the median. Each symbol in B represents one subject. Only subjects with stalk+ mAbs were included in the analysis. (C-D) 2D class averages of pAbs from subject 236 (C) and 241 (D) at days 7 and 14 post immunization binding to A/Michigan/45/2015 HA. (E) 3D reconstruction of the overlapping of 047-09 4F04, 236 pAb, and FISW84. Data in A were analyzed by Fisher's Exact tests and data in B were analyzed by unpaired non-parametric Mann-Whitney test.

[1931] FIG. 23A-F. Seroconversion against anchor and BN stalk epitopes after cHA vaccination and mAb binding to various recombinant HAs. Related to FIG. 16. (A-B) Seroconversion (d28/d0) of antibodies competing for binding against the anchor epitope (A) and the BN stalk epitope (B). Bar represents the median and each symbol represents one subject. (C-D) Antibody titers (EC50) of serum antibodies collected on day 112 and day 420 against the anchor epitope (C) and the BN stalk epitope (D). Lines connect titers from the same subject and each pair of symbols represents one subject. (E) Anchor and BN stalk targeting mAbs binding to mini-HA and cH6/1. (F) Proportion of anchor epitope targeting mAbs binding to A/California/July 2009 recombinant HA with a GCN4 or fibritin trimerization domain. Data in A and B were analyzed by non-parametric Kruskal-Wallis Tests, data in C and D were analyzed using a paired non-parametric Wilcoxon matched-pairs signed rank test, and data in F were analyzed by a Fisher's Exact test.

[1932] FIG. 24A-G. Additional repertoire features of mAs binding the anchor epitope. Related to FIG. 17. (A) JH gene usage by anchor and BN stalk binding antibodies. (B) JK gene usage of mAbs binding the BN stalk epitope. (C) VJ sequences of kappa chains of the public clone paired VH3-48. (D-E) Mutations (D) and CDR3 amino acid (AA) lengths (E) of heavy and light chains of mAbs binding the anchor or BN stalk epitopes. Red bar represents median. (F) NWP motif of K-CDR3 and Y59 following H-CDR2 (H) of FISW84 (PDB: 6HJQ). (G) H-CDR2 sequences of germline VH3 genes. H-CDR2 is highlighted in blue and the first amino acid following H-CDR2 is highlighted in red. Data in A were analyzed using a Chi-square test, and data in D and E were analyzed by unpaired non-parametric Mann-Whitney tests. Shown in FIG. 24C are SEQ ID NOS:7623, 7678, and 7627, respectively. Shown in FIG. 24G are SEQ ID NOS: 18656-18668, respectively.

### DETAILED DESCRIPTION OF THE INVENTION

[1933] Broadly neutralizing antibodies (bnAbs) targeting epitopes of the influenza virus hemagglutinin (HA) have the potential to provide near universal protection against influenza virus infection¹. However, viral mutants that escape bnAbs have been reported^{2,3}. The identification of bnAb classes that can neutralize viral escape mutants is critical for universal influenza virus vaccine design. Here, we report a distinct class of bnAbs targeting a discrete membrane-proximal anchor epitope of the HA stalk domain. Anchor epitope-targeting antibodies are broadly neutralizing across H1 viruses and can cross-react with pandemic-threat H2 and H5 viruses. Antibodies targeting this anchor epitope utilize a highly restricted repertoire, which encodes for two public binding motifs that make extensive contacts with conserved residues in the fusion peptide. Moreover, anchor epitope-targeting B cells are common in the human memory B cell (MBC) repertoire and were recalled in humans by an oil-in-water adjuvanted chimeric HA (cHA) vaccine^{4,5}, a potential universal influenza virus vaccine. To maximize protection against seasonal and pandemic influenza viruses, vaccines should aim to boost this previously untapped source of bnAbs that are widespread in the human MBC pool.

### I. Antibodies

[1934] Described herein are antibodies, antigen binding fragments thereof, or polypeptides capable of specifically binding to an influenza antigen

[1935] The term “antibody” refers to an intact immunoglobulin of any isotype, or a fragment thereof that can compete with the intact antibody for specific binding to the target antigen, and includes chimeric, humanized, fully human, and bispecific antibodies. As used herein, the terms “antibody” or “immunoglobulin” are used interchangeably and refer to any of several classes of structurally related proteins that function as part of the immune response of an animal, including IgG, IgD, IgE, IgA, IgM, and related proteins, as well as polypeptides comprising antibody CDR domains that retain antigen-binding activity.

[1936] The term “antigen” refers to a molecule or a portion of a molecule capable of being bound by a selective binding agent, such as an antibody. An antigen may possess one or more epitopes that are capable of interacting with different antibodies.

[1937] The term “epitope” includes any region or portion of molecule capable eliciting an immune response by binding to an immunoglobulin or to a T-cell receptor. Epitope determinants may include chemically active surface groups such as amino acids, sugar side chains, phosphoryl or sulfonyl groups, and may have specific three-dimensional structural characteristics and/or specific charge characteristics. Generally, antibodies specific for a particular target antigen will preferentially recognize an epitope on the target antigen within a complex mixture.

[1938] The epitope regions of a given polypeptide can be identified using many different epitope mapping techniques are well known in the art, including: x-ray crystallography, nuclear magnetic resonance spectroscopy, site-directed mutagenesis mapping, protein display arrays, see, e.g., Epitope Mapping Protocols, (Johan Rockberg and Johan Nilvebrant, Ed., 2018) Humana Press, New York, N.Y. Such techniques are known in the art and described in, e.g., U.S. Pat. No. 4,708,871; Geysen et al. Proc. Natl. Acad. Sci. USA 81:3998-4002 (1984); Geysen et al. Proc. Natl. Acad. Sci. USA 82:178-182 (1985); Geysen et al. Molec. Immunol. 23:709-715 (1986). Additionally, antigenic regions of proteins can also be predicted and identified using standard antigenicity and hydropathy plots.

[1939] The term “immunogenic sequence” means a molecule that includes an amino acid sequence of at least one epitope such that the molecule is capable of stimulating the production of antibodies in an appropriate host. The term “immunogenic composition” means a composition that comprises at least one immunogenic molecule (e.g., an antigen or carbohydrate).

[1940] An intact antibody is generally composed of two full-length heavy chains and two full-length light chains, but in some instances may include fewer chains, such as antibodies naturally occurring in camelids that may comprise only heavy chains. Antibodies as disclosed herein may be derived solely from a single source or may be “chimeric,” that is, different portions of the antibody may be derived from two different antibodies. For example, the variable or CDR regions may be derived from a rat or murine source, while the constant region is derived from a different animal source, such as a human. The antibodies or binding fragments may be produced in hybridomas, by recombinant DNA techniques, or by enzymatic or chemical cleavage of intact antibodies. Unless otherwise indicated, the term “antibody” includes derivatives, variants, fragments, and muteins thereof, examples of which are described below (Sela-Culang et al., Front Immunol. 2013; 4: 302; 2013).

[1941] The term “light chain” includes a full-length light chain and fragments thereof having sufficient variable region sequence to confer binding specificity. A full-length light chain has a molecular weight of around 25,000 Daltons and includes a variable region domain (abbreviated herein as VL), and a constant region domain (abbreviated herein as CL). There are two classifications of light chains, identified as kappa (κ) and lambda (λ). The term “VL fragment” means a fragment of the light chain of a monoclonal antibody that includes all or part of the light chain variable region, including CDRs. A VL fragment can further include light chain constant region sequences. The variable region domain of the light chain is at the amino-terminus of the polypeptide.

[1942] The term “heavy chain” includes a full-length heavy chain and fragments thereof having sufficient variable region sequence to confer binding specificity. A full-length heavy chain has a molecular weight of around 50,000 Daltons and includes a variable region domain (abbreviated herein as VH), and three constant region domains (abbreviated herein as CH1, CH2, and CH3). The term “VH fragment” means a fragment of the heavy chain of a monoclonal antibody that includes all or part of the heavy chain variable region, including CDRs. A VH fragment can further include heavy chain constant region sequences. The number of heavy chain constant region domains will depend on the isotype. The VH domain is at the amino-terminus of the polypeptide, and the CH domains are at the carboxy-terminus, with the CH3 being closest to the —COOH end. The isotype of an antibody can be IgM, IgD, IgG, IgA, or IgE and is defined by the heavy chains present of which there are five classifications: mu (μ), delta (δ), gamma (γ), alpha (α), or epsilon (ε) chains, respectively. IgG has several subtypes, including, but not limited to, IgG1, IgG2, IgG3, and IgG4. IgM subtypes include IgM1 and IgM2. IgA subtypes include IgA1 and IgA2.

### A. Types of Antibodies

[1943] Antibodies can be whole immunoglobulins of any isotype or classification, chimeric antibodies, or hybrid antibodies with specificity to two or more antigens. They may also be fragments (e.g., F(ab′)2, Fab′, Fab, Fv, and the like), including hybrid fragments. An immunoglobulin also includes natural, synthetic, or genetically engineered proteins that act like an antibody by binding to specific antigens to form a complex. The term antibody includes genetically engineered or otherwise modified forms of immunoglobulins.

[1944] The term “monomer” means an antibody containing only one Ig unit. Monomers are the basic functional units of antibodies. The term “dimer” means an antibody containing two Ig units attached to one another via constant domains of the antibody heavy chains (the Fc, or fragment crystallizable, region). The complex may be stabilized by a joining (J) chain protein. The term “multimer” means an antibody containing more than two Ig units attached to one another via constant domains of the antibody heavy chains (the Fc region). The complex may be stabilized by a joining (J) chain protein.

[1945] The term “bivalent antibody” means an antibody that comprises two antigen-binding sites. The two binding sites may have the same antigen specificities or they may be bi-specific, meaning the two antigen-binding sites have different antigen specificities.

[1946] Bispecific antibodies are a class of antibodies that have two paratopes with different binding sites for two or more distinct epitopes. In some embodiments, bispecific antibodies can be biparatopic, wherein a bispecific antibody may specifically recognize a different epitope from the same antigen. In some embodiments, bispecific antibodies can be constructed from a pair of different single domain antibodies termed “nanobodies”. Single domain antibodies are sourced and modified from cartilaginous fish and camelids. Nanobodies can be joined together by a linker using techniques typical to a person skilled in the art; such methods for selection and joining of nanobodies are described in PCT Publication No. WO2015044386A1, No. WO2010037838A2, and Bever et al., Anal Chem. 86:7875-7882 (2014), each of which are specifically incorporated herein by reference in their entirety.

[1947] Bispecific antibodies can be constructed as: a whole IgG, Fab′2, Fab′PEG, a diabody, or alternatively as scFv. Diabodies and scFvs can be constructed without an Fc region, using only variable domains, potentially reducing the effects of anti-idiotypic reaction. Bispecific antibodies may be produced by a variety of methods including, but not limited to, fusion of hybridomas or linking of Fab′ fragments. See, e.g., Songsivilai and Lachmann, Clin. Exp. Immunol. 79:315-321 (1990); Kostelny et al., J. Immunol. 148:1547-1553 (1992), each of which are specifically incorporated by reference in their entirety.

[1948] In certain aspects, the antigen-binding domain may be multispecific or heterospecific by multimerizing with VH and VL region pairs that bind a different antigen. For example, the antibody may bind to, or interact with, (a) a cell surface antigen, (b) an Fc receptor on the surface of an effector cell, or (c) at least one other component. Accordingly, aspects may include, but are not limited to, bispecific, trispecific, tetraspecific, and other multispecific antibodies or antigen-binding fragments thereof that are directed to epitopes and to other targets, such as Fc receptors on effector cells.

[1949] In some embodiments, multispecific antibodies can be used and directly linked via a short flexible polypeptide chain, using routine methods known in the art. One such example is diabodies that are bivalent, bispecific antibodies in which the VH and VL domains are expressed on a single polypeptide chain, and utilize a linker that is too short to allow for pairing between domains on the same chain, thereby forcing the domains to pair with complementary domains of another chain creating two antigen binding sites. The linker functionality is applicable for embodiments of triabodies, tetrabodies, and higher order antibody multimers. (see, e.g., Hollinger et al., Proc Natl. Acad. Sci. USA 90:6444-6448 (1993); Polijak et al., Structure 2:1121-1123 (1994); Todorovska et al., J. Immunol. Methods 248:47-66 (2001)).

[1950] Bispecific diabodies, as opposed to bispecific whole antibodies, may also be advantageous because they can be readily constructed and expressed in E. coli. Diabodies (and other polypeptides such as antibody fragments) of appropriate binding specificities can be readily selected using phage display (WO94/13804) from libraries. If one arm of the diabody is kept constant, for instance, with a specificity directed against a protein, then a library can be made where the other arm is varied and an antibody of appropriate specificity selected. Bispecific whole antibodies may be made by alternative engineering methods as described in Ridgeway et al., (Protein Eng., 9:616-621, 1996) and Krah et al., (N Biotechnol. 39:167-173, 2017), each of which is hereby incorporated by reference in their entirety.

[1951] Heteroconjugate antibodies are composed of two covalently linked monoclonal antibodies with different specificities. See, e.g., U.S. Pat. No. 6,010,902, incorporated herein by reference in its entirety.

[1952] The part of the Fv fragment of an antibody molecule that binds with high specificity to the epitope of the antigen is referred to herein as the “paratope.” The paratope consists of the amino acid residues that make contact with the epitope of an antigen to facilitate antigen recognition. Each of the two Fv fragments of an antibody is composed of the two variable domains, VH and VL, in dimerized configuration. The primary structure of each of the variable domains includes three hypervariable loops separated by, and flanked by, Framework Regions (FR). The hypervariable loops are the regions of highest primary sequences variability among the antibody molecules from any mammal. The term hypervariable loop is sometimes used interchangeably with the term “Complementarity Determining Region (CDR).” The length of the hypervariable loops (or CDRs) varies between antibody molecules. The framework regions of all antibody molecules from a given mammal have high primary sequence similarity/consensus. The consensus of framework regions can be used by one skilled in the art to identify both the framework regions and the hypervariable loops (or CDRs) which are interspersed among the framework regions. The hypervariable loops are given identifying names which distinguish their position within the polypeptide, and on which domain they occur. CDRs in the VL domain are identified as L1, L2, and L3, with L1 occurring at the most distal end and L3 occurring closest to the CL domain. The CDRs may also be given the names CDR-L1, CDR-L2, and CDR-L3. The L3 (CDR-L3) is generally the region of highest variability among all antibody molecules produced by a given organism. The CDRs are regions of the polypeptide chain arranged linearly in the primary structure, and separated from each other by Framework Regions. The amino terminal (N-terminal) end of the VL chain is named FR1. The region identified as FR2 occurs between L1 and L2 hypervariable loops. FR3 occurs between L2 and L3 hypervariable loops, and the FR4 region is closest to the CL domain. This structure and nomenclature is repeated for the VH chain, which includes three CDRs identified as CDR-H1, CDR-H2 and CDR-H3. The majority of amino acid residues in the variable domains, or Fv fragments (VH and VL), are part of the framework regions (approximately 85%). The three dimensional, or tertiary, structure of an antibody molecule is such that the framework regions are more internal to the molecule and provide the majority of the structure, with the CDRs on the external surface of the molecule.

[1953] Several methods have been developed and can be used by one skilled in the art to identify the exact amino acids that constitute each of these regions. This can be done using any of a number of multiple sequence alignment methods and algorithms, which identify the conserved amino acid residues that make up the framework regions, therefore identifying the CDRs that may vary in length but are located between framework regions. Three commonly used methods have been developed for identification of the CDRs of antibodies: Kabat (as described in T. T. Wu and E. A. Kabat, “AN ANALYSIS OF THE SEQUENCES OF THE VARIABLE REGIONS OF BENCE JONES PROTEINS AND MYELOMA LIGHT CHAINS AND THEIR IMPLICATIONS FOR ANTIBODY COMPLEMENTARITY,” J Exp Med, vol. 132, no. 2, pp. 211-250, August 1970); Chothia (as described in C. Chothia et al., “Conformations of immunoglobulin hypervariable regions,” Nature, vol. 342, no. 6252, pp. 877-883, December 1989); and IMGT (as described in M.-P. Lefranc et al., “IMGT unique numbering for immunoglobulin and T cell receptor variable domains and Ig superfamily V-like domains,” Developmental & Comparative Immunology, vol. 27, no. 1, pp. 55-77, January 2003). These methods each include unique numbering systems for the identification of the amino acid residues that constitute the variable regions. In most antibody molecules, the amino acid residues that actually contact the epitope of the antigen occur in the CDRs, although in some cases, residues within the framework regions contribute to antigen binding.

[1954] One skilled in the art can use any of several methods to determine the paratope of an antibody. These methods include:
[1955] 1) Computational predictions of the tertiary structure of the antibody/epitope binding interactions based on the chemical nature of the amino acid sequence of the antibody variable region and composition of the epitope.
[1956] 2) Hydrogen-deuterium exchange and mass spectroscopy
[1957] 3) Polypeptide fragmentation and peptide mapping approaches in which one generates multiple overlapping peptide fragments from the full length of the polypeptide and evaluates the binding affinity of these peptides for the epitope.
[1958] 4) Antibody Phage Display Library analysis in which the antibody Fab fragment encoding genes of the mammal are expressed by bacteriophage in such a way as to be incorporated into the coat of the phage. This population of Fab expressing phage are then allowed to interact with the antigen which has been immobilized or may be expressed in by a different exogenous expression system. Non-binding Fab fragments are washed away, thereby leaving only the specific binding Fab fragments attached to the antigen. The binding Fab fragments can be readily isolated and the genes which encode them determined. This approach can also be used for smaller regions of the Fab fragment including Fv fragments or specific VH and VL domains as appropriate.

[1959] In certain aspects, affinity matured antibodies are enhanced with one or more modifications in one or more CDRs thereof that result in an improvement in the affinity of the antibody for a target antigen as compared to a parent antibody that does not possess those alteration(s). Certain affinity matured antibodies will have nanomolar or picomolar affinities for the target antigen. Affinity matured antibodies are produced by procedures known in the art, e.g., Marks et al., Bio/Technology 10:779 (1992) describes affinity maturation by VH and VL domain shuffling, random mutagenesis of CDR and/or framework residues employed in phage display is described by Rajpal et al., PNAS. 24: 8466-8471 (2005) and Thie et al., Methods Mol Biol. 525:309-22 (2009) in conjugation with computation methods as demonstrated in Tiller et al., Front. Immunol. 8:986 (2017).

[1960] Chimeric immunoglobulins are the products of fused genes derived from different species; “humanized” chimeras generally have the framework region (FR) from human immunoglobulins and one or more CDRs are from a non-human source.

[1961] In certain aspects, portions of the heavy and/or light chain are identical or homologous to corresponding sequences from another particular species or belonging to a particular antibody class or subclass, while the remainder of the chain(s) is identical or homologous to corresponding sequences in antibodies derived from another species or belonging to another antibody class or subclass, as well as fragments of such antibodies, so long as they exhibit the desired biological activity. U.S. Pat. No. 4,816,567; and Morrison et al., Proc. Natl. Acad. Sci. USA 81:6851 (1984). For methods relating to chimeric antibodies, see, e.g., U.S. Pat. No. 4,816,567; and Morrison et al., Proc. Natl. Acad. Sci. USA 81:6851-6855 (1985), each of which are specifically incorporated herein by reference in their entirety. CDR grafting is described, for example, in U.S. Pat. Nos. 6,180,370, 5,693,762, 5,693,761, 5,585,089, and 5,530,101, which are all hereby incorporated by reference for all purposes.

[1962] In some embodiments, minimizing the antibody polypeptide sequence from the non-human species optimizes chimeric antibody function and reduces immunogenicity. Specific amino acid residues from non-antigen recognizing regions of the non-human antibody are modified to be homologous to corresponding residues in a human antibody or isotype. One example is the “CDR-grafted” antibody, in which an antibody comprises one or more CDRs from a particular species or belonging to a specific antibody class or subclass, while the remainder of the antibody chain(s) is identical or homologous to a corresponding sequence in antibodies derived from another species or belonging to another antibody class or subclass. For use in humans, the V region composed of CDR1, CDR2, and partial CDR3 for both the light and heavy chain variance region from a non-human immunoglobulin, are grafted with a human antibody framework region, replacing the naturally occurring antigen receptors of the human antibody with the non-human CDRs. In some instances, corresponding non-human residues replace framework region residues of the human immunoglobulin. Furthermore, humanized antibodies may comprise residues that are not found in the recipient antibody or in the donor antibody to further refine performance. The humanized antibody may also comprise at least a portion of an immunoglobulin constant region (Fc), typically that of a human immunoglobulin. See, e.g., Jones et al., Nature 321:522 (1986); Riechmann et al., Nature 332:323 (1988); Presta, Curr. Op. Struct. Biol. 2:593 (1992); Vaswani and Hamilton, Ann. Allergy, Asthma and Immunol. 1:105 (1998); Harris, Biochem. Soc. Transactions 23; 1035 (1995); Hurle and Gross, Curr. Op. Biotech. 5:428 (1994); Verhoeyen et al., Science 239:1534-36 (1988).

[1963] Intrabodies are intracellularly localized immunoglobulins that bind to intracellular antigens as opposed to secreted antibodies, which bind antigens in the extracellular space.

[1964] Polyclonal antibody preparations typically include different antibodies against different determinants (epitopes). In order to produce polyclonal antibodies, a host, such as a rabbit or goat, is immunized with the antigen or antigen fragment, generally with an adjuvant and, if necessary, coupled to a carrier. Antibodies to the antigen are subsequently collected from the sera of the host. The polyclonal antibody can be affinity purified against the antigen rendering it monospecific.

[1965] Monoclonal antibodies or “mAb” refer to an antibody obtained from a population of homogeneous antibodies from an exclusive parental cell, e.g., the population is identical except for naturally occurring mutations that may be present in minor amounts. Each monoclonal antibody is directed against a single antigenic determinant.

### B. Functional Antibody Fragments and Antigen-Binding Fragments

### 1. Antigen-Binding Fragments

[1966] Certain aspects relate to antibody fragments, such as antibody fragments that bind to flu antigens. The term functional antibody fragment includes antigen-binding fragments of an antibody that retain the ability to specifically bind to an antigen. These fragments are constituted of various arrangements of the variable region heavy chain (VH) and/or light chain (VL); and in some embodiments, include constant region heavy chain 1 (CH1) and light chain (CL). In some embodiments, they lack the Fc region constituted of heavy chain 2 (CH2) and 3 (CH3) domains. Embodiments of antigen binding fragments and the modifications thereof may include: (i) the Fab fragment type constituted with the VL, VH, CL, and CH1 domains; (ii) the Fd fragment type constituted with the VH and CH1 domains; (iii) the Fv fragment type constituted with the VH and VL domains; (iv) the single domain fragment type, dAb, (Ward, 1989; McCafferty et al., 1990; Holt et al., 2003) constituted with a single VH or VL domain; (v) isolated complementarity determining region (CDR) regions. Such terms are described, for example, in Harlow and Lane, Antibodies: A Laboratory Manual, Cold Spring Harbor Laboratory, NY (1989); Molec. Biology and Biotechnology: A Comprehensive Desk Reference (Myers, R. A. (ed.), New York: VCH Publisher, Inc.); Huston et al., Cell Biophysics, 22:189-224 (1993); Pluckthun and Skerra, Meth. Enzymol., 178:497-515 (1989) and in Day, E. D., Advanced Immunochemistry, 2d ed., Wiley-Liss, Inc. New York, N.Y. (1990); Antibodies, 4:259-277 (2015), each of which are incorporated by reference.

[1967] Antigen-binding fragments also include fragments of an antibody that retain exactly, at least, or at most 1, 2, or 3 complementarity determining regions (CDRs) from a light chain variable region. Fusions of CDR-containing sequences to an Fc region (or a CH2 or CH3 region thereof) are included within the scope of this definition including, for example, scFv fused, directly or indirectly, to an Fc region are included herein.

[1968] The term Fab fragment (also “Fab”) means a monovalent antigen-binding fragment of an antibody containing the VL, VH, CL and CH1 domains. The term Fab′ fragment means a monovalent antigen-binding fragment of a monoclonal antibody that is larger than a Fab fragment. For example, a Fab′ fragment includes the VL, VH, CL and CH1 domains and all or part of the hinge region. The term F(ab′)2 fragment means a bivalent antigen-binding fragment of a monoclonal antibody comprising two Fab′ fragments linked by a disulfide bridge at the hinge region. An F(ab′)2 fragment includes, for example, all or part of the two VH and VL domains, and can further include all or part of the two CL and CH1 domains.

[1969] The term Fd fragment means a fragment of the heavy chain of a monoclonal antibody, which includes all or part of the VH, including the CDRs. An Fd fragment can further include CH1 region sequences.

[1970] The term Fv fragment means a monovalent antigen-binding fragment of a monoclonal antibody, including all or part of the VL and VH, and absent of the CL and CH1 domains. The VL and VH include, for example, the CDRs. Single-chain antibodies (sFv or scFv) are Fv molecules in which the VL and VH regions have been connected by a flexible linker to form a single polypeptide chain, which forms an antigen-binding fragment. Single chain antibodies are discussed in detail in International Patent Application Publication No. WO 88/01649 and U.S. Pat. Nos. 4,946,778 and 5,260,203, the disclosures of which are herein incorporated by reference. The term (scFv)2 means bivalent or bispecific sFv polypeptide chains that include oligomerization domains at their C-termini, separated from the sFv by a hinge region (Pack et al. 1992). The oligomerization domain comprises self-associating a-helices, e.g., leucine zippers, which can be further stabilized by additional disulfide bonds. (scFv)2 fragments are also known as “miniantibodies” or “minibodies.”

[1971] A single domain antibody is an antigen-binding fragment containing only a VH or the VL domain. In some instances, two or more VH regions are covalently joined with a peptide linker to create a bivalent domain antibody. The two VH regions of a bivalent domain antibody may target the same or different antigens.

### 2. Fragment Antigen Binding Region, Fab

[1972] Fab polypeptides of the disclosure include the Fab antigen binding fragment of an antibody. Unless specifically stated otherwise, the term “Fab” relates to a polypeptide excluding the Fc portion of the antibody. The Fab may be conjugated to a polypeptide comprising other components, such as further antigen binding domains, costimulatory domains, linkers, peptide spacers, transmembrane domains, endodomains, and accessory proteins. Fab polypeptides can be generated using conventional techniques known in the art and are well-described in the literature.

### 3. Fragment Crystallizable Region, Fc

[1973] An Fc region contains two heavy chain fragments comprising the CH2 and CH3 domains of an antibody. The two heavy chain fragments are held together by two or more disulfide bonds and by hydrophobic interactions of the CH3 domains. The term “Fc polypeptide” as used herein includes native and mutein forms of polypeptides derived from the Fc region of an antibody. Truncated forms of such polypeptides containing the hinge region that promotes dimerization are included.

### C. Polypeptides with Antibody CDRs & Scaffolding Domains that Display the CDRs

[1974] Antigen-binding peptide scaffolds, such as complementarity-determining regions (CDRs), are used to generate protein-binding molecules in accordance with the embodiments. Generally, a person skilled in the art can determine the type of protein scaffold on which to graft at least one of the CDRs. It is known that scaffolds, optimally, must meet a number of criteria such as: good phylogenetic conservation; known three-dimensional structure; small size; few or no post-transcriptional modifications; and/or be easy to produce, express, and purify. Skerra, J Mol Recognit, 13:167-87 (2000).

[1975] The protein scaffolds can be sourced from, but not limited to: fibronectin type III FN3 domain (known as “monobodies”), fibronectin type III domain 10, lipocalin, anticalin, Z-domain of protein A of Staphylococcus aureus, thioredoxin A or proteins with a repeated motif such as the “ankyrin repeat”, the “armadillo repeat”, the “leucine-rich repeat” and the “tetratricopeptide repeat”. Such proteins are described in US Patent Publication Nos. 2010/0285564, 2006/0058510, 2006/0088908, 2005/0106660, and PCT Publication No. WO2006/056464, each of which are specifically incorporated herein by reference in their entirety. Scaffolds derived from toxins from scorpions, insects, plants, mollusks, etc., and the protein inhibiters of neuronal NO synthase (PIN) may also be used.

### D. Antibody Binding

[1976] The term “selective binding agent” refers to a molecule that binds to an antigen. Non-limiting examples include antibodies, antigen-binding fragments, scFv, Fab, Fab′, F(ab′)2, single chain antibodies, peptides, peptide fragments and proteins.

[1977] The term “binding” refers to a direct association between two molecules, due to, for example, covalent, electrostatic, hydrophobic, and ionic and/or hydrogen-bond interactions, including interactions such as salt bridges and water bridges. “Immunologically reactive” means that the selective binding agent or antibody of interest will bind with antigens present in a biological sample. The term “immune complex” refers the combination formed when an antibody or selective binding agent binds to an epitope on an antigen.

### 1. Affinity/Avidity

[1978] The term “affinity” refers the strength with which an antibody or selective binding agent binds an epitope. In antibody binding reactions, this is expressed as the affinity constant (Ka or ka sometimes referred to as the association constant) for any given antibody or selective binding agent. Affinity is measured as a comparison of the binding strength of the antibody to its antigen relative to the binding strength of the antibody to an unrelated amino acid sequence. Affinity can be expressed as, for example, 20-fold greater binding ability of the antibody to its antigen then to an unrelated amino acid sequence. As used herein, the term “avidity” refers to the resistance of a complex of two or more agents to dissociation after dilution. The terms “immunoreactive” and “preferentially binds” are used interchangeably herein with respect to antibodies and/or selective binding agent.

[1979] There are several experimental methods that can be used by one skilled in the art to evaluate the binding affinity of any given antibody or selective binding agent for its antigen. This is generally done by measuring the equilibrium dissociation constant (KD or Kd), using the equation KD=koff/kon=[A][B]/[AB]. The term koff is the rate of dissociation between the antibody and antigen per unit time, and is related to the concentration of antibody and antigen present in solution in the unbound form at equilibrium. The term kon is the rate of antibody and antigen association per unit time, and is related to the concentration of the bound antigen-antibody complex at equilibrium. The units used for measuring the KD are mol/L (molarity, or M), or concentration. The Ka of an antibody is the opposite of the KD, and is determined by the equation Ka=1/KD. Examples of some experimental methods that can be used to determine the KD value are: enzyme-linked immunosorbent assays (ELISA), isothermal titration calorimetry (ITC), fluorescence anisotropy, surface plasmon resonance (SPR), and affinity capillary electrophoresis (ACE). The affinity constant (Ka) of an antibody is the opposite of the KD, and is determined by the equation Ka=1/KD.

[1980] Antibodies deemed useful in certain embodiments may have an affinity constant (Ka) of about, at least about, or at most about 10⁶, 10⁷, 10⁸, 10⁹, or 10¹⁰ M or any range derivable therein. Similarly, in some embodiments, antibodies may have a dissociation constant of about, at least about or at most about 10⁻⁶, 10⁻⁷, 10⁻⁸, 10⁻⁹, 10⁻¹⁰ M, or any range derivable therein. These values are reported for antibodies discussed herein and the same assay may be used to evaluate the binding properties of such antibodies. An antibody of the invention is said to “specifically bind” its target antigen when the dissociation constant (KD) is ≤10⁻⁸ M. The antibody specifically binds antigen with “high affinity” when the KD is ≤5×10⁻⁹ M, and with “very high affinity” when the KD is ≤5×10⁻¹⁰ M.

### 2. Epitope Specificity

[1981] The epitope of an antigen is the specific region of the antigen for which an antibody has binding affinity. In the case of protein or polypeptide antigens, the epitope is the specific residues (or specified amino acids or protein segment) that the antibody binds with high affinity. An antibody does not necessarily contact every residue within the protein. Nor does every single amino acid substitution or deletion within a protein necessarily affect binding affinity. For purposes of this specification and the accompanying claims, the terms “epitope” and “antigenic determinant” are used interchangeably to refer to the site on an antigen to which B and/or T cells respond or recognize. Polypeptide epitopes can be formed from both contiguous amino acids and noncontiguous amino acids juxtaposed by tertiary folding of a polypeptide. An epitope typically includes at least 3, and typically 5-10 amino acids in a unique spatial conformation.

[1982] Epitope specificity of an antibody can be determined in a variety of ways. One approach, for example, involves testing a collection of overlapping peptides of 15 amino acids spanning the full sequence of the protein and differing in increments of a small number of amino acids (e.g., 3 to 30 amino acids). The peptides are immobilized in separate wells of a microtiter dish. Immobilization can be accomplished, for example, by biotinylating one terminus of the peptides. This process may affect the antibody affinity for the epitope, therefore different samples of the same peptide can be biotinylated at the N and C terminus and immobilized in separate wells for the purposes of comparison. This is useful for identifying end-specific antibodies. Optionally, additional peptides can be included terminating at a particular amino acid of interest. This approach is useful for identifying end-specific antibodies to internal fragments. An antibody or antigen-binding fragment is screened for binding to each of the various peptides. The epitope is defined as a segment of amino acids that is common to all peptides to which the antibody shows high affinity binding.

### 3. Modification of Antibody Antigen-Binding Domains

[1983] It is understood that the antibodies of the present invention may be modified, such that they are substantially identical to the antibody polypeptide sequences, or fragments thereof, and still bind the epitopes of the present invention. Polypeptide sequences are “substantially identical” when optimally aligned using such programs as Clustal Omega, IGBLAST, GAP or BESTFIT using default gap weights, they share at least 80% sequence identity, at least 90% sequence identity, at least 95% sequence identity, at least 96% sequence identity, at least 97% sequence identity, at least 98% sequence identity, or at least 99% sequence identity or any range therein.

[1984] As discussed herein, minor variations in the amino acid sequences of antibodies or antigen-binding regions thereof are contemplated as being encompassed by the present invention, providing that the variations in the amino acid sequence maintain at least 75%, more preferably at least 80%, at least 90%, at least 95%, at least 96%, at least 97%, at least 98% and most preferably at least 99% sequence identity. In particular, conservative amino acid replacements are contemplated.

[1985] Conservative replacements are those that take place within a family of amino acids that are related in their side chains. Genetically encoded amino acids are generally divided into families based on the chemical nature of the side chain; e.g., acidic (aspartate, glutamate), basic (lysine, arginine, histidine), nonpolar (alanine, valine, leucine, isoleucine, proline, phenylalanine, methionine, tryptophan), and uncharged polar (glycine, asparagine, glutamine, cysteine, serine, threonine, tyrosine). For example, it is reasonable to expect that an isolated replacement of a leucine moiety with an isoleucine or valine moiety, or a similar replacement of an amino acid with a structurally related amino acid in the same family, will not have a major effect on the binding or properties of the resulting molecule, especially if the replacement does not involve an amino acid within a framework site. Whether an amino acid change results in a functional peptide can readily be determined by assaying the specific activity of the polypeptide derivative. Standard ELISA, Surface Plasmon Resonance (SPR), or other antibody binding assays can be performed by one skilled in the art to make a quantitative comparison of antigen binging affinity between the unmodified antibody and any polypeptide derivatives with conservative substitutions generated through any of several methods available to one skilled in the art.

[1986] Fragments or analogs of antibodies or immunoglobulin molecules can be readily prepared by those skilled in the art. Preferred amino- and carboxy-termini of fragments or analogs occur near boundaries of functional domains. Structural and functional domains can be identified by comparison of the nucleotide and/or amino acid sequence data to public or proprietary sequence databases. Preferably, computerized comparison methods are used to identify sequence motifs or predicted protein conformation domains that occur in other proteins of known structure and/or function. Standard methods to identify protein sequences that fold into a known three-dimensional structure are available to those skilled in the art; Dill and McCallum., Science 338:1042-1046 (2012). Several algorithms for predicting protein structures and the gene sequences that encode these have been developed, and many of these algorithms can be found at the National Center for Biotechnology Information (on the World Wide Web at ncbi.nlm.nih.gov/guide/proteins/) and at the Bioinformatics Resource Portal (on the World Wide Web at expasy.org/proteomics). Thus, the foregoing examples demonstrate that those of skill in the art can recognize sequence motifs and structural conformations that may be used to define structural and functional domains in accordance with the invention.

[1987] Framework modifications can be made to antibodies to decrease immunogenicity, for example, by “backmutating” one or more framework residues to a corresponding germline sequence.

[1988] It is also contemplated that the antigen-binding domain may be multi-specific or multivalent by multimerizing the antigen-binding domain with VH and VL region pairs that bind either the same antigen (multi-valent) or a different antigen (multi-specific).

### E. Chemical Modification of Antibodies

[1989] In some aspects, also contemplated are glycosylation variants of antibodies, wherein the number and/or type of glycosylation site(s) has been altered compared to the amino acid sequences of the parent polypeptide. Glycosylation of the polypeptides can be altered, for example, by modifying one or more sites of glycosylation within the polypeptide sequence to increase the affinity of the polypeptide for antigen (U.S. Pat. Nos. 5,714,350 and 6,350,861). In certain embodiments, antibody protein variants comprise a greater or a lesser number of N-linked glycosylation sites than the native antibody. An N-linked glycosylation site is characterized by the sequence: Asn-X-Ser or Asn-X-Thr, wherein the amino acid residue designated as X may be any amino acid residue except proline. The substitution of amino acid residues to create this sequence provides a potential new site for the addition of an N-linked carbohydrate chain. Alternatively, substitutions that eliminate or alter this sequence will prevent addition of an N-linked carbohydrate chain present in the native polypeptide. For example, the glycosylation can be reduced by the deletion of an Asn or by substituting the Asn with a different amino acid. In other embodiments, one or more new N-linked glycosylation sites are created. Antibodies typically have an N-linked glycosylation site in the Fc region.

[1990] Additional antibody variants include cysteine variants, wherein one or more cysteine residues in the parent or native amino acid sequence are deleted from or substituted with another amino acid (e.g., serine). Cysteine variants are useful, inter alia, when antibodies must be refolded into a biologically active conformation. Cysteine variants may have fewer cysteine residues than the native antibody and typically have an even number to minimize interactions resulting from unpaired cysteines.

[1991] In some aspects, the polypeptides can be pegylated to increase biological half-life by reacting the polypeptide with polyethylene glycol (PEG) or a reactive ester or aldehyde derivative of PEG, under conditions in which one or more PEG groups become attached to the polypeptide. Polypeptide pegylation may be carried out by an acylation reaction or an alkylation reaction with a reactive PEG molecule (or an analogous reactive water-soluble polymer). Methods for pegylating proteins are known in the art and can be applied to the polypeptides of the invention to obtain PEGylated derivatives of antibodies. See, e.g., EP 0 154 316 and EP 0 401 384. In some aspects, the antibody is conjugated or otherwise linked to transthyretin (TTR) or a TTR variant. The TTR or TTR variant can be chemically modified with, for example, a chemical selected from the group consisting of dextran, poly(n-vinyl pyrrolidone), polyethylene glycols, propropylene glycol homopolymers, polypropylene oxide/ethylene oxide co-polymers, polyoxyethylated polyols, and polyvinyl alcohols. As used herein, the term “polyethylene glycol” is intended to encompass any of the forms of PEG that have been used to derivatize other proteins.

### 1. Conjugation

[1992] Derivatives of the antibodies and antigen binding fragments that are described herein are also provided. The derivatized antibody or fragment thereof may comprise any molecule or substance that imparts a desired property to the antibody or fragment. The derivatized antibody can comprise, for example, a detectable (or labeling) moiety (e.g., a radioactive, colorimetric, antigenic, or enzymatic molecule, or a detectable bead), a molecule that binds to another molecule (e.g., biotin or streptavidin), a therapeutic or diagnostic moiety (e.g., a radioactive, cytotoxic, or pharmaceutically active moiety), or a molecule that increases the suitability of the antibody for a particular use (e.g., administration to a subject, such as a human subject, or other in vivo or in vitro uses).

[1993] Optionally, an antibody or an immunological portion of an antibody can be chemically conjugated to, or expressed as, a fusion protein with other proteins. In some aspects, polypeptides may be chemically modified by conjugating or fusing the polypeptide to serum protein, such as human serum albumin, to increase half-life of the resulting molecule. See, e.g., EP 0322094 and EP 0 486 525. In some aspects, the polypeptides may be conjugated to a diagnostic agent and used diagnostically, for example, to monitor the development or progression of a disease and determine the efficacy of a given treatment regimen. In some aspects, the polypeptides may also be conjugated to a therapeutic agent to provide a therapy in combination with the therapeutic effect of the polypeptide. Additional suitable conjugated molecules include ribonuclease (RNase), DNase I, an antisense nucleic acid, an inhibitory RNA molecule such as a siRNA molecule, an immunostimulatory nucleic acid, aptamers, ribozymes, triplex forming molecules, and external guide sequences. The functional nucleic acid molecules may act as effectors, inhibitors, modulators, and stimulators of a specific activity possessed by a target molecule, or the functional nucleic acid molecules may possess a de novo activity independent of any other molecules.

[1994] In some aspects, disclosed are antibodies and antibody-like molecules that are linked to at least one agent to form an antibody conjugate or payload. In order to increase the efficacy of antibody molecules as diagnostic or therapeutic agents, it is conventional to link or covalently bind or complex at least one desired molecule or moiety. Such a molecule or moiety may be, but is not limited to, at least one effector or reporter molecule. Effector molecules comprise molecules having a desired activity, e.g., cytotoxic activity. Non-limiting examples of effector molecules include toxins, therapeutic enzymes, antibiotics, radiolabeled nucleotides and the like. By contrast, a reporter molecule is defined as any moiety that may be detected using an assay. Non-limiting examples of reporter molecules that have been conjugated to antibodies include enzymes, radiolabels, haptens, fluorescent labels, phosphorescent molecules, chemiluminescent molecules, chromophores, luminescent molecules, photoaffinity molecules, colored particles, or ligands.

### a. Conjugate Types

[1995] Certain examples of antibody conjugates are those conjugates in which the antibody is linked to a detectable label. “Detectable labels” are compounds and/or elements that can be detected due to their specific functional properties, and/or chemical characteristics, the use of which allows the antibody to be detected, and/or further quantified if desired. Examples of detectable labels include, but not limited to, radioactive isotopes, fluorescers, semiconductor nanocrystals, chemiluminescers, chromophores, enzymes, enzyme substrates, enzyme cofactors, enzyme inhibitors, dyes, metal ions, metal sols, ligands (e.g., biotin, streptavidin or haptens) and the like. Particular examples of labels are, but not limited to, horseradish peroxidase (HRP), fluorescein, FITC, rhodamine, dansyl, umbelliferone, dimethyl acridinium ester (DMAE), Texas red, luminol, NADPH and α- or β-galactosidase. Antibody conjugates include those intended primarily for use in vitro, where the antibody is linked to a secondary binding ligand and/or to an enzyme to generate a colored product upon contact with a chromogenic substrate. Examples of suitable enzymes include, but are not limited to, urease, alkaline phosphatase, (horseradish) hydrogen peroxidase, or glucose oxidase. Preferred secondary binding ligands are biotin and/or avidin and streptavidin compounds. The uses of such labels is well known to those of skill in the art and are described, for example, in U.S. Pat. Nos. 3,817,837; 3,850,752; 3,939,350; 3,996,345; 4,277,437; 4,275,149 and 4,366,241; each incorporated herein by reference. Molecules containing azido groups may also be used to form covalent bonds to proteins through reactive nitrene intermediates that are generated by low intensity ultraviolet light (Potter & Haley, 1983).

[1996] In some aspects, contemplated are immunoconjugates comprising an antibody or antigen-binding fragment thereof conjugated to a cytotoxic agent such as a chemotherapeutic agent, a drug, a growth inhibitory agent, a toxin (e.g., an enzymatically active toxin of bacterial, fungal, plant, or animal origin, or fragments thereof), or a radioactive isotope (i.e., a radioconjugate). In this way, the agent of interest can be targeted directly to cells bearing cell surface antigen. The antibody and agent may be associated through non-covalent interactions such as through electrostatic forces, or by covalent bonds. Various linkers, known in the art, can be employed in order to form the immunoconjugate. Additionally, the immunoconjugate can be provided in the form of a fusion protein. In one aspect, an antibody may be conjugated to various therapeutic substances in order to target the cell surface antigen. Examples of conjugated agents include, but are not limited to, metal chelate complexes, drugs, toxins and other effector molecules, such as cytokines, lymphokines, chemokines, immunomodulators, radiosensitizers, asparaginase, carboranes, and radioactive halogens.

[1997] In antibody drug conjugates (ADC), an antibody (Ab) is conjugated to one or more drug moieties (D) through a linker (L). The ADC may be prepared by several routes, employing organic chemistry reactions, conditions, and reagents known to those skilled in the art, including: (1) reaction of a nucleophilic group of an antibody with a bivalent linker reagent, to form Ab-L, via a covalent bond, followed by reaction with a drug moiety D; and (2) reaction of a nucleophilic group of a drug moiety with a bivalent linker reagent, to form D-L, via a covalent bond, followed by reaction with the nucleophilic group of an antibody. Antibody drug conjugates may also be produced by modification of the antibody to introduce electrophilic moieties, which can react with nucleophilic substituents on the linker reagent or drug. Alternatively, a fusion protein comprising the antibody and cytotoxic agent may be made, e.g., by recombinant techniques or peptide synthesis. The length of DNA may comprise respective regions encoding the two portions of the conjugate either adjacent one another or separated by a region encoding a linker peptide which does not destroy the desired properties of the conjugate. In yet another aspect, the antibody may be conjugated to a “receptor” (such as streptavidin) for utilization in tumor or cancer cell pre-targeting wherein the antibody-receptor conjugate is administered to the patient, followed by removal of unbound conjugate from the circulation using a clearing agent and then administration of a “ligand” (e.g., avidin) which is conjugated to a cytotoxic agent (e.g., a radionucleotide).

[1998] Examples of an antibody-drug conjugates known to a person skilled in the art are pro-drugs useful for the local delivery of cytotoxic or cytostatic agents, i.e. drugs to kill or inhibit tumor cells in the treatment of cancer (Syrigos and Epenetos, Anticancer Res. 19:605-614 (1999); Niculescu-Duvaz and Springer, Adv. Drg. Del. Rev. 26:151-172 (1997); U.S. Pat. No. 4,975,278). In contrast, systematic administration of these unconjugated drug agents may result in unacceptable levels of toxicity to normal cells as well as the target tumor cells (Baldwin et al., Lancet 1:603-5 (1986); Thorpe, (1985) “Antibody Carriers of Cytotoxic Agents in Cancer Therapy: A Review,” In: Monoclonal Antibodies '84: Biological and Clinical Applications, A. Pincera et al., (eds.) pp. 475-506). Both polyclonal antibodies and monoclonal antibodies have been reported as useful in these strategies (Rowland et al., Cancer Immunol. Immunother. 21:183-87 (1986)).

[1999] In certain aspects, ADC include covalent or aggregative conjugates of antibodies, or antigen-binding fragments thereof, with other proteins or polypeptides, such as by expression of recombinant fusion proteins comprising heterologous polypeptides fused to the N-terminus or C-terminus of an antibody polypeptide. For example, the conjugated peptide may be a heterologous signal (or leader) polypeptide, e.g., the yeast alpha-factor leader, or a peptide such as an epitope tag (e.g., V5-His). Antibody-containing fusion proteins may comprise peptides added to facilitate purification or identification of the antibody (e.g., poly-His). An antibody polypeptide also can be linked to the FLAG® (Sigma-Aldrich, St. Louis, Mo.) peptide as described in Hopp et al., Bio/Technology 6:1204 (1988), and U.S. Pat. No. 5,011,912. Oligomers that contain one or more antibody polypeptides may be employed as antagonists. Oligomers may be in the form of covalently linked or non-covalently linked dimers, trimers, or higher oligomers. Oligomers comprising two or more antibody polypeptides are contemplated for use. Other oligomers include heterodimers, homotrimers, heterotrimers, homotetramers, heterotetramers, etc. In certain aspects, oligomers comprise multiple antibody polypeptides joined via covalent or non-covalent interactions between peptide moieties fused to the antibody polypeptides. Such peptides may be peptide linkers (spacers), or peptides that have the property of promoting oligomerization. Leucine zippers and certain polypeptides derived from antibodies are among the peptides that can promote oligomerization of antibody polypeptides attached thereto, as described in more detail below.

### b. Conjugation Methodology

[2000] Several methods are known in the art for the attachment or conjugation of an antibody to its conjugate moiety. Some attachment methods involve the use of a metal chelate complex employing, for example, an organic chelating agent such a diethylenetriaminepentaacetic acid anhydride (DTPA); ethylenetriaminetetraacetic acid; N-chloro-p-toluenesulfonamide; and/or tetrachloro-3-6-diphenylglycouril-3 attached to the antibody (U.S. Pat. Nos. 4,472,509 and 4,938,948, each incorporated herein by reference). Monoclonal antibodies may also be reacted with an enzyme in the presence of a coupling agent such as glutaraldehyde or periodate. Conjugates may also be made using a variety of bifunctional protein-coupling agents such as N-succinimidyl-3-(2-pyridyldithiol) propionate (SPDP), iminothiolane (IT), bifunctional derivatives of imidoesters (such as dimethyl adipimidate HCl), active esters (such as disuccinimidyl suberate), aldehydes (such as glutaraldehyde), bis-azido compounds (such as bis(p-azidobenzoyl)hexanediamine), bis-diazonium derivatives (such as bos(p-diazoniumbenzoyl)-ethylenediamine), diisocyanates (such as toluene 2,6-diisocyanate), and bis-active fluorine compounds (such as 1,5-difluoro-2,4-dinitrobenzene). In some aspects, derivatization of immunoglobulins by selectively introducing sulfhydryl groups in the Fc region of an immunoglobulin, using reaction conditions that do not alter the antibody combining site, are contemplated. Antibody conjugates produced according to this methodology are disclosed to exhibit improved longevity, specificity, and sensitivity (U.S. Pat. No. 5,196,066, incorporated herein by reference). Site-specific attachment of effector or reporter molecules, wherein the reporter or effector molecule is conjugated to a carbohydrate residue in the Fc region has also been disclosed in the literature (O'Shannessy et al., 1987).

### II. Antibody Production

### A. Antibody Production

[2001] Methods for preparing and characterizing antibodies for use in diagnostic and detection assays, for purification, and for use as therapeutics are well known in the art as disclosed in, for example, U.S. Pat. Nos. 4,011,308; 4,722,890; 4,016,043; 3,876,504; 3,770,380; and 4,372,745 (see, e.g., Antibodies: A Laboratory Manual, Cold Spring Harbor Laboratory, 1988; incorporated herein by reference). These antibodies may be polyclonal or monoclonal antibody preparations, monospecific antisera, human antibodies, hybrid or chimeric antibodies, such as humanized antibodies, altered antibodies, F(ab′)2 fragments, Fab fragments, Fv fragments, single-domain antibodies, dimeric or trimeric antibody fragment constructs, minibodies, or functional fragments thereof which bind to the antigen in question. In certain aspects, polypeptides, peptides, and proteins and immunogenic fragments thereof for use in various embodiments can also be synthesized in solution or on a solid support in accordance with conventional techniques. See, for example, Stewart and Young, (1984); Tam et al, (1983); Merrifield, (1986); and Barany and Merrifield (1979), each incorporated herein by reference.

[2002] Briefly, a polyclonal antibody is prepared by immunizing an animal with an antigen or a portion thereof and collecting antisera from that immunized animal. The antigen may be altered compared to an antigen sequence found in nature. In some embodiments, a variant or altered antigenic peptide or polypeptide is employed to generate antibodies. Inocula are typically prepared by dispersing the antigenic composition in a physiologically tolerable diluent to form an aqueous composition. Antisera is subsequently collected by methods known in the arts, and the serum may be used as-is for various applications or else the desired antibody fraction may be purified by well-known methods, such as affinity chromatography (Harlow and Lane, Antibodies: A Laboratory Manual 1988).

[2003] Methods of making monoclonal antibodies are also well known in the art (Kohler and Milstein, 1975; Harlow and Lane, 1988, U.S. Pat. No. 4,196,265, herein incorporated by reference in its entirety for all purposes). Typically, this technique involves immunizing a suitable animal with a selected immunogenic composition, e.g., a purified or partially purified protein, polypeptide, peptide or domain. Resulting antibody-producing B-cells from the immunized animal, or all dissociated splenocytes, are then induced to fuse with cells from an immortalized cell line to form hybridomas. Myeloma cell lines suited for use in hybridoma-producing fusion procedures preferably are non-antibody-producing and have high fusion efficiency and enzyme deficiencies that render then incapable of growing in certain selective media that support the growth of only the desired fused cells (hybridomas). Typically, the fusion partner includes a property that allows selection of the resulting hybridomas using specific media. For example, fusion partners can be hypoxanthine/aminopterin/thymidine (HAT)-sensitive. Methods for generating hybrids of antibody-producing spleen or lymph node cells and myeloma cells usually comprise mixing somatic cells with myeloma cells in the presence of an agent or agents (chemical or electrical) that promote the fusion of cell membranes. Next, selection of hybridomas can be performed by culturing the cells by single-clone dilution in microtiter plates, followed by testing the individual clonal supernatants (after two to three weeks) for the desired reactivity. Fusion procedures for making hybridomas, immunization protocols, and techniques for isolation of immunized splenocytes for fusion are known in the art.

[2004] Other techniques for producing monoclonal antibodies include the viral or oncogenic transformation of B-lymphocytes, a molecular cloning approach may be used to generate a nucleic acid or polypeptide, the selected lymphocyte antibody method (SLAM) (see, e.g., Babcook et al., Proc. Natl. Acad. Sci. USA 93:7843-7848 (1996), the preparation of combinatorial immunoglobulin phagemid libraries from RNA isolated from the spleen of the immunized animal and selection of phagemids expressing appropriate antibodies, or producing a cell expressing an antibody from a genomic sequence of the cell comprising a modified immunoglobulin locus using Cre-mediated site-specific recombination (see, e.g., U.S. Pat. No. 6,091,001).

[2005] Monoclonal antibodies may be further purified using filtration, centrifugation, and various chromatographic methods such as HPLC or affinity chromatography. Monoclonal antibodies may be further screened or optimized for properties relating to specificity, avidity, half-life, immunogenicity, binding association, binding disassociation, or overall functional properties relative to being a treatment for infection. Thus, monoclonal antibodies may have alterations in the amino acid sequence of CDRs, including insertions, deletions, or substitutions with a conserved or non-conserved amino acid.

[2006] The immunogenicity of a particular immunogen composition can be enhanced by the use of non-specific stimulators of the immune response, known as adjuvants. Adjuvants that may be used in accordance with embodiments include, but are not limited to, IL-1, IL-2, IL-4, IL-7, IL-12, -interferon, GMCSP, BCG, aluminum hydroxide, MDP compounds, such as thur-MDP and nor-MDP, CGP (MTP-PE), lipid A, and monophosphoryl lipid A (MPL). Exemplary adjuvants may include complete Freund's adjuvant (a non-specific stimulator of the immune response containing killed Mycobacterium tuberculosis), incomplete Freund's adjuvants, and/or aluminum hydroxide adjuvant. In addition to adjuvants, it may be desirable to co-administer biologic response modifiers (BRM), such as but not limited to, Cimetidine (CIM; 1200 mg/d) (Smith/Kline, PA); low-dose Cyclophosphamide (CYP; 300 mg/m2) (Johnson/Mead, NJ), cytokines such as β-interferon, IL-2, or IL-12, or genes encoding proteins involved in immune helper functions, such as B-7.A phage-display system can be used to expand antibody molecule populations in vitro. Saiki, et al., Nature 324:163 (1986); Scharf et al., Science 233:1076 (1986); U.S. Pat. Nos. 4,683,195 and 4,683,202; Yang et al., J Mol Biol. 254:392 (1995); Barbas, III et al., Methods: Comp. Meth Enzymol. (1995) 8:94; Barbas, III et al., Proc Natl Acad Sci USA 88:7978 (1991).

### B. Fully Human Antibody Production

[2007] Methods are available for making fully human antibodies. Using fully human antibodies can minimize the immunogenic and allergic responses that may be caused by administering non-human monoclonal antibodies to humans as therapeutic agents. In one embodiment, human antibodies may be produced in a non-human transgenic animal, e.g., a transgenic mouse capable of producing multiple isotypes of human antibodies to protein (e.g., IgG, IgA, and/or IgE) by undergoing V-D-J recombination and isotype switching. Accordingly, this aspect applies to antibodies, antibody fragments, and pharmaceutical compositions thereof, but also non-human transgenic animals, B-cells, host cells, and hybridomas that produce monoclonal antibodies. Applications of human antibodies include, but are not limited to, detect a cell expressing an anticipated protein, either in vivo or in vitro, pharmaceutical preparations containing the antibodies of the present invention, and methods of treating disorders by administering the antibodies.

[2008] Fully human antibodies can be produced by immunizing transgenic animals (usually mice) that are capable of producing a repertoire of human antibodies in the absence of endogenous immunoglobulin production. Antigens for this purpose typically have six or more contiguous amino acids, and optionally are conjugated to a carrier, such as a hapten. See, for example, Jakobovits et al., Proc. Natl. Acad. Sci. USA 90:2551-2555 (1993); Jakobovits et al., Nature 362:255-258 (1993); Bruggermann et al., Year in Immunol. 7:33 (1993). In one example, transgenic animals are produced by incapacitating the endogenous mouse immunoglobulin loci encoding the mouse heavy and light immunoglobulin chains therein, and inserting into the mouse genome large fragments of human genome DNA containing loci that encode human heavy and light chain proteins. Partially modified animals, which have less than the full complement of human immunoglobulin loci, are then crossbred to obtain an animal having all of the desired immune system modifications. When administered an immunogen, these transgenic animals produce antibodies that are immunospecific for the immunogen but have human rather than murine amino acid sequences, including the variable regions. For further details of such methods, see, for example, International Patent Application Publication Nos. WO 96/33735 and WO 94/02602, which are hereby incorporated by reference in their entirety. Additional methods relating to transgenic mice for making human antibodies are described in U.S. Pat. Nos. 5,545,807; 6,713,610; 6,673,986; 6,162,963; 6,300,129; 6,255,458; 5,877,397; 5,874,299 and 5,545,806; in International Patent Application Publication Nos. WO 91/10741 and WO 90/04036; and in European Patent Nos. EP 546073B1 and EP 546073A1, all of which are hereby incorporated by reference in their entirety for all purposes.

[2009] The transgenic mice described above, referred to herein as “HuMAb” mice, contain a human immunoglobulin gene minilocus that encodes unrearranged human heavy (μ and γ) and κ light chain immunoglobulin sequences, together with targeted mutations that inactivate the endogenous μ and κ chain loci (Lonberg et al., Nature 368:856-859 (1994)). Accordingly, the mice exhibit reduced expression of mouse IgM or κ chains and in response to immunization, the introduced human heavy and light chain transgenes undergo class switching and somatic mutation to generate high affinity human IgG κ monoclonal antibodies (Lonberg et al., supra; Lonberg and Huszar, Intern. Ref. Immunol. 13:65-93 (1995); Harding and Lonberg, Ann. N.Y. Acad. Sci. 764:536-546 (1995)). The preparation of HuMAb mice is described in detail in Taylor et al., Nucl. Acids Res. 20:6287-6295 (1992); Chen et al., Int. Immunol. 5:647-656 (1993); Tuaillon et al., J. Immunol. 152:2912-2920 (1994); Lonberg et al., supra; Lonberg, Handbook of Exp. Pharmacol. 113:49-101 (1994); Taylor et al., Int. Immunol. 6:579-591 (1994); Lonberg and Huszar, Intern. Ref. Immunol. 13:65-93 (1995); Harding and Lonberg, Ann. N.Y. Acad. Sci. 764:536-546 (1995); Fishwild et al., Nat. Biotechnol. 14:845-851 (1996); the foregoing references are herein incorporated by reference in their entirety for all purposes. See further, U.S. Pat. Nos. 5,545,806; 5,569,825; 5,625,126; 5,633,425; 5,789,650; 5,877,397; 5,661,016; 5,814,318; 5,874,299; 5,770,429; and 5,545,807; as well as International Patent Application Publication Nos. WO 93/1227; WO 92/22646; and WO 92/03918, the disclosures of all of which are hereby incorporated by reference in their entirety for all purposes. Technologies utilized for producing human antibodies in these transgenic mice are disclosed also in WO 98/24893, and Mendez et al., Nat. Genetics 15:146-156 (1997), which are herein incorporated by reference. For example, the HCo7 and HCo12 transgenic mice strains can be used to generate human antibodies.

[2010] Using hybridoma technology, antigen-specific humanized monoclonal antibodies with the desired specificity can be produced and selected from the transgenic mice such as those described above. Such antibodies may be cloned and expressed using a suitable vector and host cell, or the antibodies can be harvested from cultured hybridoma cells. Fully human antibodies can also be derived from phage-display libraries (as disclosed in Hoogenboom et al., J. Mol. Biol. 227:381 (1991); and Marks et al., J. Mol. Biol. 222:581 (1991)). One such technique is described in International Patent Application Publication No. WO 99/10494 (herein incorporated by reference), which describes the isolation of high affinity and functional agonistic antibodies for MPL- and msk-receptors using such an approach.

### C. Antibody Fragments Production

[2011] Antibody fragments that retain the ability to recognize the antigen of interest will also find use herein. A number of antibody fragments are known in the art that comprise antigen-binding sites capable of exhibiting immunological binding properties of an intact antibody molecule and can be subsequently modified by methods known in the arts. Functional fragments, including only the variable regions of the heavy and light chains, can also be produced using standard techniques such as recombinant production or preferential proteolytic cleavage of immunoglobulin molecules. These fragments are known as Fv. See, e.g., Inbar et al., Proc. Nat. Acad. Sci. USA 69:2659-2662 (1972); Hochman et al., Biochem. 15:2706-2710 (1976); and Ehrlich et al., Biochem. 19:4091-4096 (1980).

[2012] Single-chain variable fragments (scFvs) may be prepared by fusing DNA encoding a peptide linker between DNAs encoding the two variable domain polypeptides (VL and VH). scFvs can form antigen-binding monomers, or they can form multimers (e.g., dimers, trimers, or tetramers), depending on the length of a flexible linker between the two variable domains (Kortt et al., Prot. Eng. 10:423 (1997); Kort et al., Biomol. Eng. 18:95-108 (2001)). By combining different VL- and VH-comprising polypeptides, one can form multimeric scFvs that bind to different epitopes (Kriangkum et al., Biomol. Eng. 18:31-40 (2001)). Antigen-binding fragments are typically produced by recombinant DNA methods known to those skilled in the art. Although the two domains of the Fv fragment, VL and VH, are coded for by separate genes, they can be joined using recombinant methods by a synthetic linker that enables them to be made as a single chain polypeptide (known as single chain Fv (sFv or scFv); see e.g., Bird et al., Science 242:423-426 (1988); and Huston et al., Proc. Natl. Acad. Sci. USA 85:5879-5883 (1988). Design criteria include determining the appropriate length to span the distance between the C-terminus of one chain and the N-terminus of the other, wherein the linker is generally formed from small hydrophilic amino acid residues that do not tend to coil or form secondary structures. Suitable linkers generally comprise polypeptide chains of alternating sets of glycine and serine residues, and may include glutamic acid and lysine residues inserted to enhance solubility. Antigen-binding fragments are screened for utility in the same manner as intact antibodies. Such fragments include those obtained by amino-terminal and/or carboxy-terminal deletions, where the remaining amino acid sequence is substantially identical to the corresponding positions in the naturally occurring sequence deduced, for example, from a full-length cDNA sequence.

[2013] Antibodies may also be generated using peptide analogs of the epitopic determinants disclosed herein, which may consist of non-peptide compounds having properties analogous to those of the template peptide. These types of non-peptide compound are termed “peptide mimetics” or “peptidomimetics”. Fauchere, J. Adv. Drug Res. 15:29 (1986); Veber and Freidinger TINS p. 392 (1985); and Evans et al., J. Med. Chem. 30:1229 (1987). Liu et al. (2003) also describe “antibody like binding peptidomimetics” (ABiPs), which are peptides that act as pared-down antibodies and have certain advantages of longer serum half-life as well as less cumbersome synthesis methods. These analogs can be peptides, non-peptides or combinations of peptide and non-peptide regions. Fauchere, Adv. Drug Res. 15:29 (1986); Veber and Freidiner, TINS p. 392 (1985); and Evans et al., J. Med. Chem. 30:1229 (1987), which are incorporated herein by reference in their entirety for any purpose. Peptide mimetics that are structurally similar to therapeutically useful peptides may be used to produce a similar therapeutic or prophylactic effect. Such compounds are often developed with the aid of computerized molecular modeling. Generally, peptidomimetics of the invention are proteins that are structurally similar to an antibody displaying a desired biological activity, such as the ability to bind a protein, but have one or more peptide linkages optionally replaced by a linkage selected from: —CH2NH—, —CH2S—, —CH2—CH2—, —CH═CH—(cis and trans), —COCH2—, —CH(OH)CH2—, and —CH2SO— by methods well known in the art. Systematic substitution of one or more amino acids of a consensus sequence with a D-amino acid of the same type (e.g., D-lysine in place of L-lysine) may be used in certain embodiments of the invention to generate more stable proteins. In addition, constrained peptides comprising a consensus sequence or a substantially identical consensus sequence variation may be generated by methods known in the art (Rizo and Gierasch, Ann. Rev. Biochem. 61:387 (1992), incorporated herein by reference), for example, by adding internal cysteine residues capable of forming intramolecular disulfide bridges which cyclize the peptide.

[2014] Once generated, a phage display library can be used to improve the immunological binding affinity of the Fab molecules using known techniques. See, e.g., Figini et al., J. Mol. Biol. 239:68 (1994). The coding sequences for the heavy and light chain portions of the Fab molecules selected from the phage display library can be isolated or synthesized and cloned into any suitable vector or replicon for expression. Any suitable expression system can be used.

### III. Obtaining Encoded Antibodies

[2015] In some aspects, there are nucleic acid molecule encoding antibody polypeptides (e.g., heavy or light chain, variable domain only, or full-length). These may be generated by methods known in the art, e.g., isolated from B cells of mice that have been immunized and isolated, phage display, expressed in any suitable recombinant expression system and allowed to assemble to form antibody molecules.

### A. Expression

[2016] The nucleic acid molecules may be used to express large quantities of recombinant antibodies or to produce chimeric antibodies, single chain antibodies, immunoadhesins, diabodies, mutated antibodies, and other antibody derivatives. If the nucleic acid molecules are derived from a non-human, non-transgenic animal, the nucleic acid molecules may be used for antibody humanization.

### 1. Vectors

[2017] In some aspects, contemplated are expression vectors comprising a nucleic acid molecule encoding a polypeptide of the desired sequence or a portion thereof (e.g., a fragment containing one or more CDRs or one or more variable region domains). Expression vectors comprising the nucleic acid molecules may encode the heavy chain, light chain, or the antigen-binding portion thereof. In some aspects, expression vectors comprising nucleic acid molecules may encode fusion proteins, modified antibodies, antibody fragments, and probes thereof. In addition to control sequences that govern transcription and translation, vectors and expression vectors may contain nucleic acid sequences that serve other functions as well.

[2018] To express the antibodies, or antigen-binding fragments thereof, DNAs encoding partial or full-length light and heavy chains are inserted into expression vectors such that the gene area is operatively linked to transcriptional and translational control sequences. In some aspects, a vector that encodes a functionally complete human CH or CL immunoglobulin sequence with appropriate restriction sites engineered so that any VH or VL sequence can be easily inserted and expressed. Typically, expression vectors used in any of the host cells contain sequences for plasmid or virus maintenance and for cloning and expression of exogenous nucleotide sequences. Such sequences, collectively referred to as “flanking sequences” typically include one or more of the following operatively linked nucleotide sequences: a promoter, one or more enhancer sequences, an origin of replication, a transcriptional termination sequence, a complete intron sequence containing a donor and acceptor splice site, a sequence encoding a leader sequence for polypeptide secretion, a ribosome binding site, a polyadenylation sequence, a polylinker region for inserting the nucleic acid encoding the polypeptide to be expressed, and a selectable marker element. Such sequences and methods of using the same are well known in the art.

### 2. Expression Systems

[2019] Numerous expression systems exist that comprise at least a part or all of the expression vectors discussed above. Prokaryote- and/or eukaryote-based systems can be employed for use with an embodiment to produce nucleic acid sequences, or their cognate polypeptides, proteins and peptides. Commercially and widely available systems include in but are not limited to bacterial, mammalian, yeast, and insect cell systems. Different host cells have characteristic and specific mechanisms for the post-translational processing and modification of proteins. Appropriate cell lines or host systems can be chosen to ensure the correct modification and processing of the foreign protein expressed. Those skilled in the art are able to express a vector to produce a nucleic acid sequence or its cognate polypeptide, protein, or peptide using an appropriate expression system.

### 3. Methods of Gene Transfer

[2020] Suitable methods for nucleic acid delivery to effect expression of compositions are anticipated to include virtually any method by which a nucleic acid (e.g., DNA, including viral and nonviral vectors) can be introduced into a cell, a tissue or an organism, as described herein or as would be known to one of ordinary skill in the art. Such methods include, but are not limited to, direct delivery of DNA such as by injection (U.S. Pat. No. 5,994,624,5,981,274, 5,945,100, 5,780,448, 5,736,524, 5,702,932, 5,656,610, 5,589,466 and 5,580,859, each incorporated herein by reference), including microinjection (Harland and Weintraub, 1985; U.S. Pat. No. 5,789,215, incorporated herein by reference); by electroporation (U.S. Pat. No. 5,384,253, incorporated herein by reference); by calcium phosphate precipitation (Graham and Van Der Eb, 1973; Chen and Okayama, 1987; Rippe et al., 1990); by using DEAE dextran followed by polyethylene glycol (Gopal, 1985); by direct sonic loading (Fechheimer et al., 1987); by liposome mediated transfection (Nicolau and Sene, 1982; Fraley et al., 1979; Nicolau et al., 1987; Wong et al., 1980; Kaneda et al., 1989; Kato et al., 1991); by microprojectile bombardment (PCT Application Nos. WO 94/09699 and 95/06128; U.S. Pat. Nos. 5,610,042; 5,322,783, 5,563,055, 5,550,318, 5,538,877 and 5,538,880, and each incorporated herein by reference); by agitation with silicon carbide fibers (Kaeppler et al., 1990; U.S. Pat. Nos. 5,302,523 and 5,464,765, each incorporated herein by reference); by Agrobacterium mediated transformation (U.S. Pat. Nos. 5,591,616 and 5,563,055, each incorporated herein by reference); or by PEG mediated transformation of protoplasts (Omirulleh et al., 1993; U.S. Pat. Nos. 4,684,611 and 4,952,500, each incorporated herein by reference); by desiccation/inhibition mediated DNA uptake (Potrykus et al., 1985). Other methods include viral transduction, such as gene transfer by lentiviral or retroviral transduction.

### 4. Host Cells

[2021] In another aspect, contemplated are the use of host cells into which a recombinant expression vector has been introduced. Antibodies can be expressed in a variety of cell types. An expression construct encoding an antibody can be transfected into cells according to a variety of methods known in the art. Vector DNA can be introduced into prokaryotic or eukaryotic cells via conventional transformation or transfection techniques. Some vectors may employ control sequences that allow it to be replicated and/or expressed in both prokaryotic and eukaryotic cells. In certain aspects, the antibody expression construct can be placed under control of a promoter that is linked to T-cell activation, such as one that is controlled by NFAT-1 or NF-κB, both of which are transcription factors that can be activated upon T-cell activation. Control of antibody expression allows T cells, such as tumor-targeting T cells, to sense their surroundings and perform real-time modulation of cytokine signaling, both in the T cells themselves and in surrounding endogenous immune cells. One of skill in the art would understand the conditions under which to incubate host cells to maintain them and to permit replication of a vector. Also understood and known are techniques and conditions that would allow large-scale production of vectors, as well as production of the nucleic acids encoded by vectors and their cognate polypeptides, proteins, or peptides.

[2022] For stable transfection of mammalian cells, it is known, depending upon the expression vector and transfection technique used, only a small fraction of cells may integrate the foreign DNA into their genome. In order to identify and select these integrants, a selectable marker (e.g., for resistance to antibiotics) is generally introduced into the host cells along with the gene of interest. Cells stably transfected with the introduced nucleic acid can be identified by drug selection (e.g., cells that have incorporated the selectable marker gene will survive, while the other cells die), among other methods known in the arts.

### B. Isolation

[2023] The nucleic acid molecule encoding either or both of the entire heavy and light chains of an antibody or the variable regions thereof may be obtained from any source that produces antibodies. Methods of isolating mRNA encoding an antibody are well known in the art. See e.g., Sambrook et al., supra. The sequences of human heavy and light chain constant region genes are also known in the art. See, e.g., Kabat et al., 1991, supra. Nucleic acid molecules encoding the full-length heavy and/or light chains may then be expressed in a cell into which they have been introduced and the antibody isolated.

### IV. Antibodys, Antigen Binding Fragments, and Polypeptides

[2024] As used herein, a “protein” or “polypeptide” refers to a molecule comprising at least five amino acid residues. As used herein, the term “wild-type” refers to the endogenous version of a molecule that occurs naturally in an organism. In some embodiments, wild-type versions of a protein or polypeptide are employed, however, in many embodiments of the disclosure, a modified protein or polypeptide is employed to generate an immune response. The terms described above may be used interchangeably. A “modified protein” or “modified polypeptide” or a “variant” refers to a protein or polypeptide whose chemical structure, particularly its amino acid sequence, is altered with respect to the wild-type protein or polypeptide. In some embodiments, a modified/variant protein or polypeptide has at least one modified activity or function (recognizing that proteins or polypeptides may have multiple activities or functions). It is specifically contemplated that a modified/variant protein or polypeptide may be altered with respect to one activity or function yet retain a wild-type activity or function in other respects, such as immunogenicity. The term polypeptide also includes and antibody fragment described herein as well as antibody domains, such as HCDR1, HCDR2, HCDR3, LCDR1, LCDR2, LCDR3, HFRW1, HFRW2, HFRW3, HFRW4, LFRW1, LFRW2, LFRW3, LFRW4, VH, VL, CH, or CL.

[2025] Where a protein is specifically mentioned herein, it is in general a reference to a native (wild-type) or recombinant (modified) protein or, optionally, a protein in which any signal sequence has been removed. The protein may be isolated directly from the organism of which it is native, produced by recombinant DNA/exogenous expression methods, or produced by solid-phase peptide synthesis (SPPS) or other in vitro methods. In particular embodiments, there are isolated nucleic acid segments and recombinant vectors incorporating nucleic acid sequences that encode a polypeptide (e.g., an antibody or fragment thereof). The term “recombinant” may be used in conjunction with a polypeptide or the name of a specific polypeptide, and this generally refers to a polypeptide produced from a nucleic acid molecule that has been manipulated in vitro or that is a replication product of such a molecule.

[2026] In certain embodiments the size of an antibody, antigen binding fragment, protein or polypeptide (wild-type or modified) may comprise, but is not limited to, 5, 6, 7, 8, 9, 10, 11, 12, 13, 14, 15, 16, 17, 18, 19, 20, 21, 22, 23, 24, 25, 26, 27, 28, 29, 30, 31, 32, 33, 34, 35, 36, 37, 38, 39, 40, 41, 42, 43, 44, 45, 46, 47, 48, 49, 50, 51, 52, 53, 54, 55, 56, 57, 58, 59, 60, 61, 62, 63, 64, 65, 66, 67, 68, 69, 70, 71, 72, 73, 74, 75, 76, 77, 78, 79, 80, 81, 82, 83, 84, 85, 86, 87, 88, 89, 90, 91, 92, 93, 94, 95, 96, 97, 98, 99, 100, 110, 120, 130, 140, 150, 160, 170, 180, 190, 200, 210, 220, 230, 240, 250, 275, 300, 325, 350, 375, 400, 425, 450, 475, 500, 525, 550, 575, 600, 625, 650, 675, 700, 725, 750, 775, 800, 825, 850, 875, 900, 925, 950, 975, 1000, 1100, 1200, 1300, 1400, 1500, 1750, 2000, 2250, 2500 amino acid residues or greater, and any range derivable therein, or derivative of a corresponding amino sequence described or referenced herein. It is contemplated that polypeptides may be mutated by truncation, rendering them shorter than their corresponding wild-type form, also, they might be altered by fusing or conjugating a heterologous protein or polypeptide sequence with a particular function (e.g., for targeting or localization, for enhanced immunogenicity, for purification purposes, etc.). As used herein, the term “domain” refers to any distinct functional or structural unit of a protein or polypeptide, and generally refers to a sequence of amino acids with a structure or function recognizable by one skilled in the art.

[2027] The antibody, antigen binding fragment, polypeptides, proteins, or polynucleotides encoding such polypeptides or proteins of the disclosure may include 1, 2, 3, 4, 5, 6, 7, 8, 9, 10, 11, 12, 13, 14, 15, 16, 17, 18, 19, 20, 21, 22, 23, 24, 25, 26, 27, 28, 29, 30, 31, 32, 33, 34, 35, 36, 37, 38, 39, 40, 41, 42, 43, 44, 45, 46, 47, 48, 49, or 50 (or any derivable range therein) or more variant amino acids or nucleic acid substitutions or be at least 60%, 61%, 62%, 63%, 64%, 65%, 66%, 67%, 68%, 69%, 70%, 71%, 72%, 73%, 74%, 75%, 76%, 77%, 78%, 79%, 80%, 81%, 82%, 83%, 84%, 85%, 86%, 87%, 88%, 89%, 90%, 91%, 92%, 93%, 94%, 95%, 96%, 97%, 98%, 99%, or 100% (or any derivable range therein) similar, identical, or homologous with at least, or at most 3, 4, 5, 6, 7, 8, 9, 10, 11, 12, 13, 14, 15, 16, 17, 18, 19, 20, 21, 22, 23, 24, 25, 26, 27, 28, 29, 30, 31, 32, 33, 34, 35, 36, 37, 38, 39, 40, 41, 42, 43, 44, 45, 46, 47, 48, 49, 50, 51, 52, 53, 54, 55, 56, 57, 58, 59, 60, 61, 62, 63, 64, 65, 66, 67, 68, 69, 70, 71, 72, 73, 74, 75, 76, 77, 78, 79, 80, 81, 82, 83, 84, 85, 86, 87, 88, 89, 90, 91, 92, 93, 94, 95, 96, 97, 98, 99, 100, 101, 102, 103, 104, 105, 106, 107, 108, 109, 110, 111, 112, 113, 114, 115, 116, 117, 118, 119, 120, 121, 122, 123, 124, 125, 126, 127, 128, 129, 130, 131, 132, 133, 134, 135, 136, 137, 138, 139, 140, 141, 142, 143, 144, 145, 146, 147, 148, 149, 150, 151, 152, 153, 154, 155, 156, 157, 158, 159, 160, 161, 162, 163, 164, 165, 166, 167, 168, 169, 170, 171, 172, 173, 174, 175, 176, 177, 178, 179, 180, 181, 182, 183, 184, 185, 186, 187, 188, 189, 190, 191, 192, 193, 194, 195, 196, 197, 198, 199, 200, 201, 202, 203, 204, 205, 206, 207, 208, 209, 210, 211, 212, 213, 214, 215, 216, 217, 218, 219, 220, 221, 222, 223, 224, 225, 226, 227, 228, 229, 230, 231, 232, 233, 234, 235, 236, 237, 238, 239, 240, 241, 242, 243, 244, 245, 246, 247, 248, 249, 250, 300, 400, 500, 550, 1000 or more contiguous amino acids or nucleic acids, or any range derivable therein, of a polypeptide of table 1, a nucleic acid of table 2, a polypeptide encoded by a nucleic acid of table 2, or the polypeptide or nucleic acid of any one of SEQ ID NOS: 1-18668.

[2028] In some embodiments, the antibody, antigen binding fragment, protein, or polypeptide may comprise amino acids 1 to 2, 3, 4, 5, 6, 7, 8, 9, 10, 11, 12, 13, 14, 15, 16, 17, 18, 19, 20, 21, 22, 23, 24, 25, 26, 27, 28, 29, 30, 31, 32, 33, 34, 35, 36, 37, 38, 39, 40, 41, 42, 43, 44, 45, 46, 47, 48, 49, 50, 51, 52, 53, 54, 55, 56, 57, 58, 59, 60, 61, 62, 63, 64, 65, 66, 67, 68, 69, 70, 71, 72, 73, 74, 75, 76, 77, 78, 79, 80, 81, 82, 83, 84, 85, 86, 87, 88, 89, 90, 91, 92, 93, 94, 95, 96, 97, 98, 99, 100, 101, 102, 103, 104, 105, 106, 107, 108, 109, 110, 111, 112, 113, 114, 115, 116, 117, 118, 119, 120, 121, 122, 123, 124, 125, 126, 127, 128, 129, 130, 131, 132, 133, 134, 135, 136, 137, 138, 139, 140, 141, 142, 143, 144, 145, 146, 147, 148, 149, 150, 151, 152, 153, 154, 155, 156, 157, 158, 159, 160, 161, 162, 163, 164, 165, 166, 167, 168, 169, 170, 171, 172, 173, 174, 175, 176, 177, 178, 179, 180, 181, 182, 183, 184, 185, 186, 187, 188, 189, 190, 191, 192, 193, 194, 195, 196, 197, 198, 199, 200, 201, 202, 203, 204, 205, 206, 207, 208, 209, 210, 211, 212, 213, 214, 215, 216, 217, 218, 219, 220, 221, 222, 223, 224, 225, 226, 227, 228, 229, 230, 231, 232, 233, 234, 235, 236, 237, 238, 239, 240, 241, 242, 243, 244, 245, 246, 247, 248, 249, 250, 251, 252, 253, 254, 255, 256, 257, 258, 259, 260, 261, 262, 263, 264, 265, 266, 267, 268, 269, 270, 271, 272, 273, 274, 275, 276, 277, 278, 279, 280, 281, 282, 283, 284, 285, 286, 287, 288, 289, 290, 291, 292, 293, 294, 295, 296, 297, 298, 299, 300, 301, 302, 303, 304, 305, 306, 307, 308, 309, 310, 311, 312, 313, 314, 315, 316, 317, 318, 319, 320, 321, 322, 323, 324, 325, 326, 327, 328, 329, 330, 331, 332, 333, 334, 335, 336, 337, 338, 339, 340, 341, 342, 343, 344, 345, 346, 347, 348, 349, 350, 351, 352, 353, 354, 355, 356, 357, 358, 359, 360, 361, 362, 363, 364, 365, 366, 367, 368, 369, 370, 371, 372, 373, 374, 375, 376, 377, 378, 379, 380, 381, 382, 383, 384, 385, 386, 387, 388, 389, 390, 391, 392, 393, 394, 395, 396, 397, 398, 399, 400, 401, 402, 403, 404, 405, 406, 407, 408, 409, 410, 411, 412, 413, 414, 415, 416, 417, 418, 419, 420, 421, 422, 423, 424, 425, 426, 427, 428, 429, 430, 431, 432, 433, 434, 435, 436, 437, 438, 439, 440, 441, 442, 443, 444, 445, 446, 447, 448, 449, 450, 451, 452, 453, 454, 455, 456, 457, 458, 459, 460, 461, 462, 463, 464, 465, 466, 467, 468, 469, 470, 471, 472, 473, 474, 475, 476, 477, 478, 479, 480, 481, 482, 483, 484, 485, 486, 487, 488, 489, 490, 491, 492, 493, 494, 495, 496, 497, 498, 499, 500, 501, 502, 503, 504, 505, 506, 507, 508, 509, 510, 511, 512, 513, 514, 515, 516, 517, 518, 519, 520, 521, 522, 523, 524, 525, 526, 527, 528, 529, 530, 531, 532, 533, 534, 535, 536, 537, 538, 539, 540, 541, 542, 543, 544, 545, 546, 547, 548, 549, 550, 551, 552, 553, 554, 555, 556, 557, 558, 559, 560, 561, 562, 563, 564, 565, 566, 567, 568, 569, 570, 571, 572, 573, 574, 575, 576, 577, 578, 579, 580, 581, 582, 583, 584, 585, 586, 587, 588, 589, 590, 591, 592, 593, 594, 595, 596, 597, 598, 599, 600, 601, 602, 603, 604, 605, 606, 607, 608, 609, 610, 611, 612, 613, 614, 615, 616, 617, 618, 619, 620, 621, 622, 623, 624, 625, 626, 627, 628, 629, 630, 631, 632, 633, 634, 635, 636, 637, 638, 639, 640, 641, 642, 643, 644, 645, 646, 647, 648, 649, 650, 651, 652, 653, 654, 655, 656, 657, 658, 659, 660, 661, 662, 663, 664, 665, 666, 667, 668, 669, 670, 671, 672, 673, 674, 675, 676, 677, 678, 679, 680, 681, 682, 683, 684, 685, 686, 687, 688, 689, 690, 691, 692, 693, 694, 695, 696, 697, 698, 699, 700, 701, 702, 703, 704, 705, 706, 707, 708, 709, 710, 711, 712, 713, 714, 715, 716, 717, 718, 719, 720, 721, 722, 723, 724, 725, 726, 727, 728, 729, 730, 731, 732, 733, 734, 735, 736, 737, 738, 739, 740, 741, 742, 743, 744, 745, 746, 747, 748, 749, 750, 751, 752, 753, 754, 755, 756, 757, 758, 759, 760, 761, 762, 763, 764, 765, 766, 767, 768, 769, 770, 771, 772, 773, 774, 775, 776, 777, 778, 779, 780, 781, 782, 783, 784, 785, 786, 787, 788, 789, 790, 791, 792, 793, 794, 795, 796, 797, 798, 799, 800, 801, 802, 803, 804, 805, 806, 807, 808, 809, 810, 811, 812, 813, 814, 815, 816, 817, 818, 819, 820, 821, 822, 823, 824, 825, 826, 827, 828, 829, 830, 831, 832, 833, 834, 835, 836, 837, 838, 839, 840, 841, 842, 843, 844, 845, 846, 847, 848, 849, 850, 851, 852, 853, 854, 855, 856, 857, 858, 859, 860, 861, 862, 863, 864, 865, 866, 867, 868, 869, 870, 871, 872, 873, 874, 875, 876, 877, 878, 879, 880, 881, 882, 883, 884, 885, 886, 887, 888, 889, 890, 891, 892, 893, 894, 895, 896, 897, 898, 899, 900, 901, 902, 903, 904, 905, 906, 907, 908, 909, 910, 911, 912, 913, 914, 915, 916, 917, 918, 919, 920, 921, 922, 923, 924, 925, 926, 927, 928, 929, 930, 931, 932, 933, 934, 935, 936, 937, 938, 939, 940, 941, 942, 943, 944, 945, 946, 947, 948, 949, 950, 951, 952, 953, 954, 955, 956, 957, 958, 959, 960, 961, 962, 963, 964, 965, 966, 967, 968, 969, 970, 971, 972, 973, 974, 975, 976, 977, 978, 979, 980, 981, 982, 983, 984, 985, 986, 987, 988, 989, 990, 991, 992, 993, 994, 995, 996, 997, 998, 999, or 1000, (or any derivable range therein) of a polypeptide of table 1, a nucleic acid of table 2, a polypeptide encoded by a nucleic acid of table 2, or the polypeptide or nucleic acid of any one of SEQ ID NOS:1-18668.

[2029] In some embodiments, the antibody, antigen binding fragment, or polypeptide may comprise 1,2, 3,4, 5, 6, 7, 8, 9, 10, 11, 12, 13, 14, 15, 16, 17, 18, 19, 20, 21, 22, 23, 24, 25, 26, 27, 28, 29, 30, 31, 32, 33, 34, 35, 36, 37, 38, 39, 40, 41, 42, 43, 44, 45, 46, 47, 48, 49, 50, 51, 52, 53, 54, 55, 56, 57, 58, 59, 60, 61, 62, 63, 64, 65, 66, 67, 68, 69, 70, 71, 72, 73, 74, 75, 76, 77, 78, 79, 80, 81, 82, 83, 84, 85, 86, 87, 88, 89, 90, 91, 92, 93, 94, 95, 96, 97, 98, 99, 100, 101, 102, 103, 104, 105, 106, 107, 108, 109, 110, 111, 112, 113, 114, 115, 116, 117, 118, 119, 120, 121, 122, 123, 124, 125, 126, 127, 128, 129, 130, 131, 132, 133, 134, 135, 136, 137, 138, 139, 140, 141, 142, 143, 144, 145, 146, 147, 148, 149, 150, 151, 152, 153, 154, 155, 156, 157, 158, 159, 160, 161, 162, 163, 164, 165, 166, 167, 168, 169, 170, 171, 172, 173, 174, 175, 176, 177, 178, 179, 180, 181, 182, 183, 184, 185, 186, 187, 188, 189, 190, 191, 192, 193, 194, 195, 196, 197, 198, 199, 200, 201, 202, 203, 204, 205, 206, 207, 208, 209, 210, 211, 212, 213, 214, 215, 216, 217, 218, 219, 220, 221, 222, 223, 224, 225, 226, 227, 228, 229, 230, 231, 232, 233, 234, 235, 236, 237, 238, 239, 240, 241, 242, 243, 244, 245, 246, 247, 248, 249, 250, 251, 252, 253, 254, 255, 256, 257, 258, 259, 260, 261, 262, 263, 264, 265, 266, 267, 268, 269, 270, 271, 272, 273, 274, 275, 276, 277, 278, 279, 280, 281, 282, 283, 284, 285, 286, 287, 288, 289, 290, 291, 292, 293, 294, 295, 296, 297, 298, 299, 300, 301, 302, 303, 304, 305, 306, 307, 308, 309, 310, 311, 312, 313, 314, 315, 316, 317, 318, 319, 320, 321, 322, 323, 324, 325, 326, 327, 328, 329, 330, 331, 332, 333, 334, 335, 336, 337, 338, 339, 340, 341, 342, 343, 344, 345, 346, 347, 348, 349, 350, 351, 352, 353, 354, 355, 356, 357, 358, 359, 360, 361, 362, 363, 364, 365, 366, 367, 368, 369, 370, 371, 372, 373, 374, 375, 376, 377, 378, 379, 380, 381, 382, 383, 384, 385, 386, 387, 388, 389, 390, 391, 392, 393, 394, 395, 396, 397, 398, 399, 400, 401, 402, 403, 404, 405, 406, 407,408,409, 410, 411, 412, 413, 414, 415, 416, 417, 418, 419, 420, 421, 422, 423, 424, 425, 426, 427, 428, 429, 430, 431, 432, 433, 434, 435, 436, 437, 438, 439, 440, 441, 442, 443, 444, 445, 446, 447, 448, 449, 450, 451, 452, 453, 454, 455, 456, 457, 458, 459, 460, 461, 462, 463, 464, 465, 466, 467, 468, 469, 470, 471, 472, 473, 474, 475, 476, 477, 478, 479, 480, 481, 482, 483, 484, 485, 486, 487, 488, 489, 490, 491, 492, 493, 494, 495, 496, 497, 498, 499, 500, 501, 502, 503, 504, 505, 506, 507, 508, 509, 510, 511, 512, 513, 514, 515, 516, 517, 518, 519, 520, 521, 522, 523, 524, 525, 526, 527, 528, 529, 530, 531, 532, 533, 534, 535, 536, 537, 538, 539, 540, 541, 542, 543, 544, 545, 546, 547, 548, 549, 550, 551, 552, 553, 554, 555, 556, 557, 558, 559, 560, 561, 562, 563, 564, 565, 566, 567, 568, 569, 570, 571, 572, 573, 574, 575, 576, 577, 578, 579, 580, 581, 582, 583, 584, 585, 586, 587, 588, 589, 590, 591, 592, 593, 594, 595, 596, 597, 598, 599, 600, 601, 602, 603, 604, 605, 606, 607, 608, 609, 610, 611, 612, 613, 614, 615, 616, 617, 618, 619, 620, 621, 622, 623, 624, 625, 626, 627, 628, 629, 630, 631, 632, 633, 634, 635, 636, 637, 638, 639, 640, 641, 642, 643, 644, 645, 646, 647, 648, 649, 650, 651, 652, 653, 654, 655, 656, 657, 658, 659, 660, 661, 662, 663, 664, 665, 666, 667, 668, 669, 670, 671, 672, 673, 674, 675, 676, 677, 678, 679, 680, 681, 682, 683, 684, 685, 686, 687, 688, 689, 690, 691, 692, 693, 694, 695, 696, 697, 698, 699, 700, 701, 702,703, 704, 705, 706,707, 708, 709, 710, 711, 712, 713, 714, 715,716, 717, 718, 719,720, 721, 722, 723, 724, 725, 726, 727, 728, 729, 730, 731, 732, 733, 734, 735, 736, 737, 738, 739, 740, 741, 742, 743, 744, 745, 746, 747, 748, 749, 750, 751, 752, 753, 754, 755, 756, 757, 758, 759, 760, 761, 762, 763, 764, 765, 766, 767, 768, 769, 770, 771, 772, 773, 774, 775, 776, 777, 778, 779, 780, 781, 782, 783, 784, 785, 786, 787, 788, 789, 790, 791, 792, 793, 794, 795, 796, 797, 798, 799, 800, 801, 802, 803, 804, 805, 806, 807, 808, 809, 810, 811, 812, 813, 814, 815, 816, 817, 818, 819, 820, 821, 822, 823, 824, 825, 826, 827, 828, 829, 830, 831, 832, 833, 834, 835, 836, 837, 838, 839, 840, 841, 842, 843, 844, 845, 846, 847, 848, 849, 850, 851, 852, 853, 854, 855, 856, 857, 858, 859, 860, 861, 862, 863, 864, 865, 866, 867, 868, 869, 870, 871, 872, 873, 874, 875, 876, 877, 878, 879, 880, 881, 882, 883, 884, 885, 886, 887, 888, 889, 890, 891, 892, 893, 894, 895, 896, 897, 898, 899, 900, 901, 902, 903, 904, 905, 906, 907, 908, 909, 910, 911, 912,913, 914, 915, 916,917, 918, 919, 920, 921, 922, 923, 924, 925,926, 927, 928, 929,930, 931, 932, 933, 934, 935, 936, 937, 938, 939, 940, 941, 942, 943, 944, 945, 946, 947, 948, 949, 950, 951, 952, 953, 954, 955, 956, 957, 958, 959, 960, 961, 962, 963, 964, 965, 966, 967, 968, 969, 970, 971, 972, 973, 974, 975, 976, 977, 978, 979, 980, 981, 982, 983, 984, 985, 986, 987, 988, 989, 990, 991, 992, 993, 994, 995, 996, 997, 998, 999, or 1000, (or any derivable range therein) contiguous amino acids or nucleic acids of a polypeptide of table 1, a nucleic acid of table 2, a polypeptide encoded by a nucleic acid of table 2, or the polypeptide or nucleic acid of any one of SEQ ID NOS: 1-18668.

[2030] In some embodiments, the antibody, antigen binding fragment, protein, or polypeptide may comprise at least, at most, or exactly 1, 2, 3, 4, 5, 6, 7, 8, 9, 10, 11, 12, 13, 14, 15, 16, 17, 18, 19, 20, 21, 22, 23, 24, 25, 26, 27, 28, 29, 30, 31, 32, 33, 34, 35, 36, 37, 38, 39, 40, 41, 42, 43, 44, 45, 46, 47, 48, 49, 50, 51, 52, 53, 54, 55, 56, 57, 58, 59, 60, 61, 62, 63, 64, 65, 66, 67, 68, 69, 70, 71, 72, 73, 74, 75, 76, 77, 78, 79, 80, 81, 82, 83, 84, 85, 86, 87, 88, 89, 90, 91, 92, 93, 94, 95, 96, 97, 98, 99, 100, 101, 102, 103, 104, 105, 106, 107, 108, 109, 110, 111, 112, 113, 114, 115, 116, 117, 118, 119, 120, 121, 122, 123, 124, 125, 126, 127, 128, 129, 130, 131, 132, 133, 134, 135, 136, 137, 138, 139, 140, 141, 142, 143, 144, 145, 146, 147, 148, 149, 150, 151, 152, 153, 154, 155, 156, 157, 158, 159, 160, 161, 162, 163, 164, 165, 166, 167, 168, 169, 170, 171, 172, 173, 174, 175, 176, 177, 178, 179, 180, 181, 182, 183, 184, 185, 186, 187, 188, 189, 190, 191, 192, 193, 194, 195, 196, 197, 198, 199, 200, 201, 202, 203, 204, 205, 206, 207, 208, 209, 210, 211, 212, 213, 214, 215, 216, 217, 218, 219, 220, 221, 222, 223, 224, 225, 226, 227, 228, 229, 230, 231, 232, 233, 234, 235, 236, 237, 238, 239, 240, 241, 242, 243, 244, 245, 246, 247, 248, 249, 250, 251, 252, 253, 254, 255, 256, 257, 258, 259, 260, 261, 262, 263, 264, 265, 266, 267, 268, 269, 270, 271, 272, 273, 274, 275, 276, 277, 278, 279, 280, 281, 282, 283, 284, 285, 286, 287, 288, 289, 290, 291, 292, 293, 294, 295, 296, 297, 298, 299, 300, 301, 302, 303, 304, 305, 306, 307, 308, 309, 310, 311, 312, 313, 314, 315, 316, 317, 318, 319, 320, 321, 322, 323, 324, 325, 326, 327, 328, 329, 330, 331, 332, 333, 334, 335, 336, 337, 338, 339, 340, 341, 342, 343, 344, 345, 346, 347, 348, 349, 350, 351, 352, 353, 354, 355, 356, 357, 358, 359, 360, 361, 362, 363, 364, 365, 366, 367, 368, 369, 370, 371, 372, 373, 374, 375, 376, 377, 378, 379, 380, 381, 382, 383, 384, 385, 386, 387, 388, 389, 390, 391, 392, 393, 394, 395, 396, 397, 398, 399, 400, 401, 402, 403, 404, 405, 406, 407, 408, 409, 410, 411, 412, 413, 414, 415, 416, 417, 418, 419, 420, 421, 422, 423, 424, 425, 426, 427, 428, 429, 430, 431, 432, 433, 434, 435, 436, 437, 438, 439, 440, 441, 442, 443, 444, 445, 446, 447, 448, 449, 450, 451, 452, 453, 454, 455, 456, 457, 458, 459, 460, 461, 462, 463, 464, 465, 466, 467, 468, 469, 470, 471, 472, 473, 474, 475, 476, 477, 478, 479, 480, 481, 482, 483, 484, 485, 486, 487, 488, 489, 490, 491, 492, 493, 494, 495, 496, 497, 498, 499, 500, 501, 502, 503, 504, 505, 506, 507, 508, 509, 510, 511, 512, 513, 514, 515, 516, 517, 518, 519, 520, 521, 522, 523, 524, 525, 526, 527, 528, 529, 530, 531, 532, 533, 534, 535, 536, 537, 538, 539, 540, 541, 542, 543, 544, 545, 546, 547, 548, 549, 550, 551, 552, 553, 554, 555, 556, 557, 558, 559, 560, 561, 562, 563, 564, 565, 566, 567, 568, 569, 570, 571, 572, 573, 574, 575, 576, 577, 578, 579, 580, 581, 582, 583, 584, 585, 586, 587, 588, 589, 590, 591, 592, 593, 594, 595, 596, 597, 598, 599, 600, 601, 602, 603, 604, 605, 606, 607, 608, 609, 610, 611, 612, 613, 614, 615, 616, 617, 618, 619, 620, 621, 622, 623, 624, 625, 626, 627, 628, 629, 630, 631, 632, 633, 634, 635, 636, 637, 638, 639, 640, 641, 642, 643, 644, 645, 646, 647, 648, 649, 650, 651, 652, 653, 654, 655, 656, 657, 658, 659, 660, 661, 662, 663, 664, 665, 666, 667, 668, 669, 670, 671, 672, 673, 674, 675, 676, 677, 678, 679, 680, 681, 682, 683, 684, 685, 686, 687, 688, 689, 690, 691, 692, 693, 694, 695, 696, 697, 698, 699, 700, 701, 702, 703, 704, 705, 706, 707, 708, 709, 710, 711, 712, 713, 714, 715, 716, 717, 718, 719, 720, 721, 722, 723, 724, 725, 726, 727, 728, 729, 730, 731, 732, 733, 734, 735, 736, 737, 738, 739, 740, 741, 742, 743, 744, 745, 746, 747, 748, 749, 750, 751, 752, 753, 754, 755, 756, 757, 758, 759, 760, 761, 762, 763, 764, 765, 766, 767, 768, 769, 770, 771, 772, 773, 774, 775, 776, 777, 778, 779, 780, 781, 782, 783, 784, 785, 786, 787, 788, 789, 790, 791, 792, 793, 794, 795, 796, 797, 798, 799, 800, 801, 802, 803, 804, 805, 806, 807, 808, 809, 810, 811, 812, 813, 814, 815, 816, 817, 818, 819, 820, 821, 822, 823, 824, 825, 826, 827, 828, 829, 830, 831, 832, 833, 834, 835, 836, 837, 838, 839, 840, 841, 842, 843, 844, 845, 846, 847, 848, 849, 850, 851, 852, 853, 854, 855, 856, 857, 858, 859, 860, 861, 862, 863, 864, 865, 866, 867, 868, 869, 870, 871, 872, 873, 874, 875, 876, 877, 878, 879, 880, 881, 882, 883, 884, 885, 886, 887, 888, 889, 890, 891, 892, 893, 894, 895, 896, 897, 898, 899, 900, 901, 902, 903, 904, 905, 906, 907, 908, 909, 910, 911, 912, 913, 914, 915, 916, 917, 918, 919, 920, 921, 922, 923, 924, 925, 926, 927, 928, 929, 930, 931, 932, 933, 934, 935, 936, 937, 938, 939, 940, 941, 942, 943, 944, 945, 946, 947, 948, 949, 950, 951, 952, 953, 954, 955, 956, 957, 958, 959, 960, 961, 962, 963, 964, 965, 966, 967, 968, 969, 970, 971, 972, 973, 974, 975, 976, 977, 978, 979, 980, 981, 982, 983, 984, 985, 986, 987, 988, 989, 990, 991, 992, 993, 994, 995, 996, 997, 998, 999, or 1000 (or any derivable range therein) contiguous amino acids of a polypeptide of table 1, a polypeptide encoded by a nucleic acid of table 2, a nucleic acids of table 2, or the polypeptide or nucleic acid of any one of SEQ ID NOS: 1-18668 that are at least, at most, or exactly 60%, 61%, 62%, 63%, 64%, 65%, 66%, 67%, 68%, 69%, 70%, 71%, 72%, 73%, 74%, 75%, 76%, 77%, 78%, 79%, 80%, 81%, 82%, 83%, 84%, 85%, 86%, 87%, 88%, 89%, 90%, 91%, 92%, 93%, 94%, 95%, 96%, 97%, 98%, 99%, or 100% (or any derivable range therein) similar, identical, or homologous with one of the polypeptides of table 1, nucleic acids of table 2, polypeptides encoded by the nucleic acids of table 2, or the polypeptide or nucleic acid of any one of SEQ ID NOS: 1-18668.

[2031] In some aspects there is a nucleic acid molecule, antibody, antigen binding fragment, protein, or polypeptide starting at position 1, 2, 3, 4, 5, 6, 7, 8, 9, 10, 11, 12, 13, 14, 15, 16, 17, 18, 19, 20, 21, 22, 23, 24, 25, 26, 27, 28, 29, 30, 31, 32, 33, 34, 35, 36, 37, 38, 39, 40, 41, 42, 43, 44, 45, 46, 47, 48, 49, 50, 51, 52, 53, 54, 55, 56, 57, 58, 59, 60, 61, 62, 63, 64, 65, 66, 67, 68, 69, 70, 71, 72, 73, 74, 75, 76, 77, 78, 79, 80, 81, 82, 83, 84, 85, 86, 87, 88, 89, 90, 91, 92, 93, 94, 95, 96, 97, 98, 99, 100, 101, 102, 103, 104, 105, 106, 107, 108, 109, 110, 111, 112, 113, 114, 115, 116, 117, 118, 119, 120, 121, 122, 123, 124, 125, 126, 127, 128, 129, 130, 131, 132, 133, 134, 135, 136, 137, 138, 139, 140, 141, 142, 143, 144, 145, 146, 147, 148, 149, 150, 151, 152, 153, 154, 155, 156, 157, 158, 159, 160, 161, 162, 163, 164, 165, 166, 167, 168, 169, 170, 171, 172, 173, 174, 175, 176, 177, 178, 179, 180, 181, 182, 183, 184, 185, 186, 187, 188, 189, 190, 191, 192, 193, 194, 195, 196, 197, 198, 199, 200, 201, 202, 203, 204, 205, 206, 207, 208, 209, 210, 211, 212, 213, 214, 215, 216, 217, 218, 219, 220, 221, 222, 223, 224, 225, 226, 227, 228, 229, 230, 231, 232, 233, 234, 235, 236, 237, 238, 239, 240, 241, 242, 243, 244, 245, 246, 247, 248, 249, 250, 251, 252, 253, 254, 255, 256, 257, 258, 259, 260, 261, 262, 263, 264, 265, 266, 267, 268, 269, 270, 271, 272, 273, 274, 275, 276, 277, 278, 279, 280, 281, 282, 283, 284, 285, 286, 287, 288, 289, 290, 291, 292, 293, 294, 295, 296, 297, 298, 299, 300, 301, 302, 303, 304, 305, 306, 307, 308, 309, 310, 311, 312, 313, 314, 315, 316, 317, 318, 319, 320, 321, 322, 323, 324, 325, 326, 327, 328, 329, 330, 331, 332, 333, 334, 335, 336, 337, 338, 339, 340, 341, 342, 343, 344, 345, 346, 347, 348, 349, 350, 351, 352, 353, 354, 355, 356, 357, 358, 359, 360, 361, 362, 363, 364, 365, 366, 367, 368, 369, 370, 371, 372, 373, 374, 375, 376, 377, 378, 379, 380, 381, 382, 383, 384, 385, 386, 387, 388, 389, 390, 391, 392, 393, 394, 395, 396, 397, 398, 399, 400, 401, 402, 403, 404, 405, 406, 407, 408, 409, 410, 411, 412, 413, 414, 415, 416, 417, 418, 419, 420, 421, 422, 423, 424, 425, 426, 427, 428, 429, 430, 431, 432, 433, 434, 435, 436, 437, 438, 439, 440, 441, 442, 443, 444, 445, 446, 447, 448, 449, 450, 451, 452, 453, 454, 455, 456, 457, 458, 459, 460, 461, 462, 463, 464, 465, 466, 467, 468, 469, 470, 471, 472, 473, 474, 475, 476, 477, 478, 479, 480, 481, 482, 483, 484, 485, 486, 487, 488, 489, 490, 491, 492, 493, 494, 495, 496, 497, 498, 499, 500, 501, 502, 503, 504, 505, 506, 507, 508, 509, 510, 511, 512, 513, 514, 515, 516, 517, 518, 519, 520, 521, 522, 523, 524, 525, 526, 527, 528, 529, 530, 531, 532, 533, 534, 535, 536, 537, 538, 539, 540, 541, 542, 543, 544, 545, 546, 547, 548, 549, 550, 551, 552, 553, 554, 555, 556, 557, 558, 559, 560, 561, 562, 563, 564, 565, 566, 567, 568, 569, 570, 571, 572, 573, 574, 575, 576, 577, 578, 579, 580, 581, 582, 583, 584, 585, 586, 587, 588, 589, 590, 591, 592, 593, 594, 595, 596, 597, 598, 599, 600, 601, 602, 603, 604, 605, 606, 607, 608, 609, 610, 611, 612, 613, 614, 615, 616, 617, 618, 619, 620, 621, 622, 623, 624, 625, 626, 627, 628, 629, 630, 631, 632, 633, 634, 635, 636, 637, 638, 639, 640, 641, 642, 643, 644, 645, 646, 647, 648, 649, 650, 651, 652, 653, 654, 655, 656, 657, 658, 659, 660, 661, 662, 663, 664, 665, 666, 667, 668, 669, 670, 671, 672, 673, 674, 675, 676, 677, 678, 679, 680, 681, 682, 683, 684, 685, 686, 687, 688, 689, 690, 691, 692, 693, 694, 695, 696, 697, 698, 699, 700, 701, 702, 703, 704, 705, 706, 707, 708, 709, 710, 711, 712, 713, 714, 715, 716, 717, 718, 719, 720, 721, 722, 723, 724, 725, 726, 727, 728, 729, 730, 731, 732, 733, 734, 735, 736, 737, 738, 739, 740, 741, 742, 743, 744, 745, 746, 747, 748, 749, 750, 751, 752, 753, 754, 755, 756, 757, 758, 759, 760, 761, 762, 763, 764, 765, 766, 767, 768, 769, 770, 771, 772, 773, 774, 775, 776, 777, 778, 779, 780, 781, 782, 783, 784, 785, 786, 787, 788, 789, 790, 791, 792, 793, 794, 795, 796, 797, 798, 799, 800, 801, 802, 803, 804, 805, 806, 807, 808, 809, 810, 811, 812, 813, 814, 815, 816, 817, 818, 819, 820, 821, 822, 823, 824, 825, 826, 827, 828, 829, 830, 831, 832, 833, 834, 835, 836, 837, 838, 839, 840, 841, 842, 843, 844, 845, 846, 847, 848, 849, 850, 851, 852, 853, 854, 855, 856, 857, 858, 859, 860, 861, 862, 863, 864, 865, 866, 867, 868, 869, 870, 871, 872, 873, 874, 875, 876, 877, 878, 879, 880, 881, 882, 883, 884, 885, 886, 887, 888, 889, 890, 891, 892, 893, 894, 895, 896, 897, 898, 899, 900, 901, 902, 903, 904, 905, 906, 907, 908, 909, 910, 911, 912, 913, 914, 915, 916, 917, 918, 919, 920, 921, 922, 923, 924, 925, 926, 927, 928, 929, 930, 931, 932, 933, 934, 935, 936, 937, 938, 939, 940, 941, 942, 943, 944, 945, 946, 947, 948, 949, 950, 951, 952, 953, 954, 955, 956, 957, 958, 959, 960, 961, 962, 963, 964, 965, 966, 967, 968, 969, 970, 971, 972, 973, 974, 975, 976, 977, 978, 979, 980, 981, 982, 983, 984, 985, 986, 987, 988, 989, 990, 991, 992, 993, 994, 995, 996, 997, 998, 999, or 1000 of any of the polypeptides of table 1, polypeptides encoded by the nucleic acids of table 2, nucleic acid of table 2, or the polypeptide or nucleic acid of any one of SEQ ID NOS:1-18668 and comprising at least, at most, or exactly 2, 3, 4, 5, 6, 7, 8, 9, 10, 11, 12, 13, 14, 15, 16, 17, 18, 19, 20, 21, 22, 23, 24, 25, 26, 27, 28, 29, 30, 31, 32, 33, 34, 35, 36, 37, 38, 39, 40, 41, 42, 43, 44, 45, 46, 47, 48, 49, 50, 51, 52, 53, 54, 55, 56, 57, 58, 59, 60, 61, 62, 63, 64, 65, 66, 67, 68, 69, 70, 71, 72, 73, 74, 75, 76, 77, 78, 79, 80, 81, 82, 83, 84, 85, 86, 87, 88, 89, 90, 91, 92, 93, 94, 95, 96, 97, 98, 99, 100, 101, 102, 103, 104, 105, 106, 107, 108, 109, 110, 111, 112, 113, 114, 115, 116, 117, 118, 119, 120, 121, 122, 123, 124, 125, 126, 127, 128, 129, 130, 131, 132, 133, 134, 135, 136, 137, 138, 139, 140, 141, 142, 143, 144, 145, 146, 147, 148, 149, 150, 151, 152, 153, 154, 155, 156, 157, 158, 159, 160, 161, 162, 163, 164, 165, 166, 167, 168, 169, 170, 171, 172, 173, 174, 175, 176, 177, 178, 179, 180, 181, 182, 183, 184, 185, 186, 187, 188, 189, 190, 191, 192, 193, 194, 195, 196, 197, 198, 199, 200, 201, 202, 203, 204, 205, 206, 207, 208, 209, 210, 211, 212, 213, 214, 215, 216, 217, 218, 219, 220, 221, 222, 223, 224, 225, 226, 227, 228, 229, 230, 231, 232, 233, 234, 235, 236, 237, 238, 239, 240, 241, 242, 243, 244, 245, 246, 247, 248, 249, 250, 251, 252, 253, 254, 255, 256, 257, 258, 259, 260, 261, 262, 263, 264, 265, 266, 267, 268, 269, 270, 271, 272, 273, 274, 275, 276, 277, 278, 279, 280, 281, 282, 283, 284, 285, 286, 287, 288, 289, 290, 291, 292, 293, 294, 295, 296, 297, 298, 299, 300, 301, 302, 303, 304, 305, 306, 307, 308, 309, 310, 311, 312, 313, 314, 315, 316, 317, 318, 319, 320, 321, 322, 323, 324, 325, 326, 327, 328, 329, 330, 331, 332, 333, 334, 335, 336, 337, 338, 339, 340, 341, 342, 343, 344, 345, 346, 347, 348, 349, 350, 351, 352, 353, 354, 355, 356, 357, 358, 359, 360, 361, 362, 363, 364, 365, 366, 367, 368, 369, 370, 371, 372, 373, 374, 375, 376, 377, 378, 379, 380, 381, 382, 383, 384, 385, 386, 387, 388, 389, 390, 391, 392, 393, 394, 395, 396, 397, 398, 399, 400, 401, 402, 403, 404, 405, 406, 407, 408, 409, 410, 411, 412, 413, 414, 415, 416, 417, 418, 419, 420, 421, 422, 423, 424, 425, 426, 427, 428, 429, 430, 431, 432, 433, 434, 435, 436, 437, 438, 439, 440, 441, 442, 443, 444, 445, 446, 447, 448, 449, 450, 451, 452, 453, 454, 455, 456, 457, 458, 459, 460, 461, 462, 463, 464, 465, 466, 467, 468, 469, 470, 471, 472, 473, 474, 475, 476, 477, 478, 479, 480, 481, 482, 483, 484, 485, 486, 487, 488, 489, 490, 491, 492, 493, 494, 495, 496, 497, 498, 499, 500, 501, 502, 503, 504, 505, 506, 507, 508, 509, 510, 511, 512, 513, 514, 515, 516, 517, 518, 519, 520, 521, 522, 523, 524, 525, 526, 527, 528, 529, 530, 531, 532, 533, 534, 535, 536, 537, 538, 539, 540, 541, 542, 543, 544, 545, 546, 547, 548, 549, 550, 551, 552, 553, 554, 555, 556, 557, 558, 559, 560, 561, 562, 563, 564, 565, 566, 567, 568, 569, 570, 571, 572, 573, 574, 575, 576, 577, 578, 579, 580, 581, 582, 583, 584, 585, 586, 587, 588, 589, 590, 591, 592, 593, 594, 595, 596, 597, 598, 599, 600, 601, 602, 603, 604, 605, 606, 607, 608, 609, 610, 611, 612, 613, 614, 615, 616, 617, 618, 619, 620, 621, 622, 623, 624, 625, 626, 627, 628, 629, 630, 631, 632, 633, 634, 635, 636, 637, 638, 639, 640, 641, 642, 643, 644, 645, 646, 647, 648, 649, 650, 651, 652, 653, 654, 655, 656, 657, 658, 659, 660, 661, 662, 663, 664, 665, 666, 667, 668, 669, 670, 671, 672, 673, 674, 675, 676, 677, 678, 679, 680, 681, 682, 683, 684, 685, 686, 687, 688, 689, 690, 691, 692, 693, 694, 695, 696, 697, 698, 699, 700, 701, 702, 703, 704, 705, 706, 707, 708, 709, 710, 711, 712, 713, 714, 715, 716, 717, 718, 719, 720, 721, 722, 723, 724, 725, 726, 727, 728, 729, 730, 731, 732, 733, 734, 735, 736, 737, 738, 739, 740, 741, 742, 743, 744, 745, 746, 747, 748, 749, 750, 751, 752, 753, 754, 755, 756, 757, 758, 759, 760, 761, 762, 763, 764, 765, 766, 767, 768, 769, 770, 771, 772, 773, 774, 775, 776, 777, 778, 779, 780, 781, 782, 783, 784, 785, 786, 787, 788, 789, 790, 791, 792, 793, 794, 795, 796, 797, 798, 799, 800, 801, 802, 803, 804, 805, 806, 807, 808, 809, 810, 811, 812, 813, 814, 815, 816, 817, 818, 819, 820, 821, 822, 823, 824, 825, 826, 827, 828, 829, 830, 831, 832, 833, 834, 835, 836, 837, 838, 839, 840, 841, 842, 843, 844, 845, 846, 847, 848, 849, 850, 851, 852, 853, 854, 855, 856, 857, 858, 859, 860, 861, 862, 863, 864, 865, 866, 867, 868, 869, 870, 871, 872, 873, 874, 875, 876, 877, 878, 879, 880, 881, 882, 883, 884, 885, 886, 887, 888, 889, 890, 891, 892, 893, 894, 895, 896, 897, 898, 899, 900, 901, 902, 903, 904, 905, 906, 907, 908, 909, 910, 911, 912, 913, 914, 915, 916, 917, 918, 919, 920, 921, 922, 923, 924, 925, 926, 927, 928, 929, 930, 931, 932, 933, 934, 935, 936, 937, 938, 939, 940, 941, 942, 943, 944, 945, 946, 947, 948, 949, 950, 951, 952, 953, 954, 955, 956, 957, 958, 959, 960, 961, 962, 963, 964, 965, 966, 967, 968, 969, 970, 971, 972, 973, 974, 975, 976, 977, 978, 979, 980, 981, 982, 983, 984, 985, 986, 987, 988, 989, 990, 991, 992, 993, 994, 995, 996, 997, 998, 999, or 1000 (or any derivable range therein) contiguous amino acids or nucleotides of a polypeptide of table 1, nucleic acid of table 2, a polypeptide encoded by a nucleic acid of table 2, or the polypeptide or nucleic acid of any one of SEQ ID NOS: 1-18668.

[2032] In some embodiments, the amino acid at position 1, 2, 3, 4, 5, 6, 7, 8, 9, 10, 11, 12, 13, 14, 15, 16, 17, 18, 19, 20, 21, 22, 23, 24, 25, 26, 27, 28, 29, 30, 31, 32, 33, 34, 35, 36, 37, 38, 39, 40, 41, 42, 43, 44, 45, 46, 47, 48, 49, 50, 51, 52, 53, 54, 55, 56, 57, 58, 59, 60, 61, 62, 63, 64, 65, 66, 67, 68, 69, 70, 71, 72, 73, 74, 75, 76, 77, 78, 79, 80, 81, 82, 83, 84, 85, 86, 87, 88, 89, 90, 91, 92, 93, 94, 95, 96, 97, 98, 99, 100, 101, 102, 103, 104, 105, 106, 107, 108, 109, 110, 111, 112, 113, 114, 115, 116, 117, 118, 119, 120, 121, 122, 123, 124, 125, 126, 127, 128, 129, 130, 131, 132, 133, 134, 135, 136, 137, 138, 139, 140, 141, 142, 143, 144, 145, 146, 147, 148, 149, 150, 151, 152, 153, 154, 155, 156, 157, 158, 159, 160, 161, 162, 163, 164, 165, 166, 167, 168, 169, 170, 171, 172, 173, 174, 175, 176, 177, 178, 179, 180, 181, 182, 183, 184, 185, 186, 187, 188, 189, 190, 191, 192, 193, 194, 195, 196, 197, 198, 199, 200, 201, 202, 203, 204, 205, 206, 207, 208, 209, 210, 211, 212, 213, 214, 215, 216, 217, 218, 219, 220, 221, 222, 223, 224, 225, 226, 227, 228, 229, 230, 231, 232, 233, 234, 235, 236, 237, 238, 239, 240, 241, 242, 243, 244, 245, 246, 247, 248, 249, 250, 251, 252, 253, 254, 255, 256, 257, 258, 259, 260, 261, 262, 263, 264, 265, 266, 267, 268, 269, 270, 271, 272, 273, 274, 275, 276, 277, 278, 279, 280, 281, 282, 283, 284, 285, 286, 287, 288, 289, 290, 291, 292, 293, 294, 295, 296, 297, 298, 299, 300, 301, 302, 303, 304, 305, 306, 307, 308, 309, 310, 311, 312, 313, 314, 315, 316, 317, 318, 319, 320, 321, 322, 323, 324, 325, 326, 327, 328, 329, 330, 331, 332, 333, 334, 335, 336, 337, 338, 339, 340, 341, 342, 343, 344, 345, 346, 347, 348, 349, 350, 351, 352, 353, 354, 355, 356, 357, 358, 359, 360, 361, 362, 363, 364, 365, 366, 367, 368, 369, 370, 371, 372, 373, 374, 375, 376, 377, 378, 379, 380, 381, 382, 383, 384, 385, 386, 387, 388, 389, 390, 391, 392, 393, 394, 395, 396, 397, 398, 399, or 400 of the heavy chain, light chain, VH, VL, HCDR1, HCDR2, HCDR3, LCDR1, LCDR2, LCDR3, HFRW1, HFRW2, HFRW3, HFRW4, LFRW1, LFRW2, LFRW3, or LFRW4 of a polypeptide of table 1, a polypeptide encoded by a nucleic acid of table 2, or a or the polypeptide of any one of SEQ ID NOS:1-18668, is substituted with an alanine, arginine, asparagine, aspartic acid, cysteine, glutamine, glutamic acid, glycine, histidine, isoleucine, leucine, lysine, methionine, phenylalanine, proline, serine, threonine, tryptophan, tyrosine, or valine.

[2033] In some embodiments, a polypeptide (e.g., antibody, antibody fragment, Fab, etc.) of the disclosure comprises a CDR that is at least 65, 66, 67, 68, 69, 70, 71, 72, 73, 74, 75, 76, 77, 78, 79, 80, 81, 82, 83, 84, 85, 86, 87, 88, 89, 90, 91, 92, 93, 94, 95, 96, 97, 98, 99, or 100% identical (or any range derivable therein) in sequence to one of a polypeptide of table 1, a polypeptide encoded by a nucleic acid of table 2, or the polypeptide of any one of SEQ ID NOS: 1-18668. In some embodiments, a polypeptide comprises 1, 2, and/or 3 CDRs from an antibody clone of table 1 or the antibody clones encoded by the nucleic acids of table 2. The CDR may be one that has been determined by Kabat, IMGT, or Chothia. In further embodiments, a polypeptide may have CDRs that have 1, 2, and/or 3 amino acid changes (e.g., addition of 1 or 2 amino acids, deletions of 1 or 2 amino acids, substitution) with respect to these 1, 2, or 3 CDRs. In some aspects, a polypeptide comprises additionally or alternatively, an amino acid sequence that is at least 60, 65, 70, 75, 80, 85, 90, 95, 96, 97, 98, 99, or 100% identical or homologous to the amino acid sequence of the variable region that is not a CDR sequence, i.e., the variable region framework.

[2034] From amino to carboxy terminus the CDRs are CDR1, CDR2, and CDR3. In some embodiments, a polypeptide may have CDRs that have 1, 2, and/or 3 amino acid changes (e.g., addition of 1 or 2 amino acids, deletions of 1 or 2 amino acids, substitution) with respect to CDR1, CDR2, or CDR3. In some embodiments, the CDRs of the heavy and light chains of Table 1 or Table 2 (or those in SEQ ID NOS:1-18668) may further comprise 1, 2, 3, 4, 5, or 6 additional amino acids at the amino or carboxy terminus of the CDR, The additional amino acids may be from the heavy and/or light chain framework regions of the HCs and LCs of Table 1, that are shown as immediately adjacent to the CDRs. Accordingly, embodiments relate to polypeptides comprising an HCDR1 (i.e., CDR-H1), HCDR2(i.e., CDR-H2), HCDR3(i.e., CDR-H3), LCDR1(i.e., CDR-L1), LCDR2(i.e., CDR-L2), and/or LCDR3(i.e., CDR-L3) with at least or at most or exactly 1, 2, 3, 4, 5, 6 or 7 amino acids at the amino end of the CDR or at the carboxy end of the CDR, wherein the additional amino acids are the 1, 2, 3, 4, 5, 6, or 7 amino acids of Table 1 that are shown as immediately adjacent to the CDRs. Other embodiments relate to antibodies comprising one or more CDRs, wherein the CDR is a fragment of Table 1 and wherein the fragment lacks 1, 2, 3, 4, or 5 amino acids from the amino or carboxy end of the CDR. In some embodiments, the CDR may lack one, 2, 3, 4, 5, 6, or 7 amino acids from the carboxy end and may further comprise 1, 2, 3, 4, 5, 6, 7, or 8 amino acids from the framework region of the amino end of the CDR. In some embodiments, the CDR may lack one, 2, 3, 4, 5, 6, or 7 amino acids from the amino end and may further comprise 1, 2, 3, 4, 5, 6, 7, or 8 amino acids from the framework region of the carboxy end of the CDR. In further embodiments, an antibody may be alternatively or additionally humanized in regions outside the CDR(s) and/or variable region(s). In some aspects, a polypeptide comprises additionally or alternatively, an amino acid sequence that is at least 60, 65, 70, 75, 80, 85, 90, 95, 96, 97, 98, 99, or 100% identical or homologous to the amino acid sequence of the variable region that is not a CDR sequence, i.e., the variable region framework.

[2035] In other embodiments, a polypeptide or protein comprises 1, 2, 3, 4, 5, or 6 CDRs from either or both of the light and heavy variable regions of the antibodies of Table 1, and 1, 2, 3, 4, 5, or 6 CDRs may have 1, 2, and/or 3 amino acid changes with respect to these CDRs. In some embodiments, parts or all of the antibody sequence outside the variable region have been humanized. A protein may comprise one or more polypeptides. In some aspects, a protein may contain one or two polypeptides similar to a heavy chain polypeptide and/or 1 or 2 polypeptides similar to a light chain polypeptide.

[2036] The nucleotide as well as the protein, polypeptide, and peptide sequences for various genes have been previously disclosed, and may be found in the recognized computerized databases. Two commonly used databases are the National Center for Biotechnology Information's Genbank and GenPept databases (on the World Wide Web at ncbi.nlm.nih.gov/) and The Universal Protein Resource (UniProt; on the World Wide Web at uniprot.org). The coding regions for these genes may be amplified and/or expressed using the techniques disclosed herein or as would be known to those of ordinary skill in the art.

[2037] It is contemplated that in compositions of the disclosure, there is between about 0.001 mg and about 10 mg of total polypeptide, peptide, and/or protein per ml. The concentration of protein in a composition can be about, at least about or at most about 0.001, 0.010, 0.050, 0.1, 0.2, 0.3, 0.4, 0.5, 0.6, 0.7, 0.8, 0.9, 1.0, 1.5, 2.0, 2.5, 3.0, 3.5, 4.0, 4.5, 5.0, 5.5, 6.0, 6.5, 7.0, 7.5, 8.0, 8.5, 9.0, 9.5, 10.0 mg/ml or more (or any range derivable therein).

### V. Sequences

[2038] Polypeptide, antibody, and antigen binding fragment embodiments are shown below in the following tables.

Lengthy table referenced here
US20250059260A1-20250220-T00001
Please refer to the end of the specification for access instructions.

Lengthy table referenced here
US20250059260A1-20250220-T00002
Please refer to the end of the specification for access instructions.

**The sequences associated with the GenBank accession numbers listed in Table 1 are incorporated by reference for all purposes.

### A. Variant Polypeptides

[2039] The following is a discussion of changing the amino acid subunits of a protein to create an equivalent, or even improved, second-generation variant polypeptide or peptide. For example, certain amino acids may be substituted for other amino acids in a protein or polypeptide sequence with or without appreciable loss of interactive binding capacity with structures such as, for example, antigen-binding regions of antibodies or binding sites on substrate molecules. Since it is the interactive capacity and nature of a protein that defines that protein's functional activity, certain amino acid substitutions can be made in a protein sequence and in its corresponding DNA coding sequence, and nevertheless produce a protein with similar or desirable properties. It is thus contemplated by the inventors that various changes may be made in the DNA sequences of genes which encode proteins without appreciable loss of their biological utility or activity.

[2040] The term “functionally equivalent codon” is used herein to refer to codons that encode the same amino acid, such as the six different codons for arginine. Also considered are “neutral substitutions” or “neutral mutations” which refers to a change in the codon or codons that encode biologically equivalent amino acids.

[2041] Amino acid sequence variants of the disclosure can be substitutional, insertional, or deletion variants. A variation in a polypeptide of the disclosure may affect 1, 2, 3, 4, 5, 6, 7, 8, 9, 10, 11, 12, 13, 14, 15, 16, 17, 18, 19, 20, 21, 22, 23, 24, 25, 26, 27, 28, 29, 30, 31, 32, 33, 34, 35, 36, 37, 38, 39, 40, 41, 42, 43, 44, 45, 46, 47, 48, 49, 50, or more non-contiguous or contiguous amino acids of the protein or polypeptide, as compared to wild-type. A variant can comprise an amino acid sequence that is at least 50%, 60%, 70%, 80%, or 90%, including all values and ranges there between, identical to any sequence provided or referenced herein. A variant can include 2, 3, 4, 5, 6, 7, 8, 9, 10, 11, 12, 13, 14, 15, 16, 17, 18, 19, 20, or more substitute amino acids.

[2042] It also will be understood that amino acid and nucleic acid sequences may include additional residues, such as additional N- or C-terminal amino acids, or 5′ or 3′ sequences, respectively, and yet still be essentially identical as set forth in one of the sequences disclosed herein, so long as the sequence meets the criteria set forth above, including the maintenance of biological protein activity where protein expression is concerned. The addition of terminal sequences particularly applies to nucleic acid sequences that may, for example, include various non-coding sequences flanking either of the 5′ or 3′ portions of the coding region.

[2043] Deletion variants typically lack one or more residues of the native or wild type protein. Individual residues can be deleted or a number of contiguous amino acids can be deleted. A stop codon may be introduced (by substitution or insertion) into an encoding nucleic acid sequence to generate a truncated protein.

[2044] Insertional mutants typically involve the addition of amino acid residues at a non-terminal point in the polypeptide. This may include the insertion of one or more amino acid residues. Terminal additions may also be generated and can include fusion proteins which are multimers or concatemers of one or more peptides or polypeptides described or referenced herein.

[2045] Substitutional variants typically contain the exchange of one amino acid for another at one or more sites within the protein or polypeptide, and may be designed to modulate one or more properties of the polypeptide, with or without the loss of other functions or properties. Substitutions may be conservative, that is, one amino acid is replaced with one of similar chemical properties. “Conservative amino acid substitutions” may involve exchange of a member of one amino acid class with another member of the same class. Conservative substitutions are well known in the art and include, for example, the changes of: alanine to serine; arginine to lysine; asparagine to glutamine or histidine; aspartate to glutamate; cysteine to serine; glutamine to asparagine; glutamate to aspartate; glycine to proline; histidine to asparagine or glutamine; isoleucine to leucine or valine; leucine to valine or isoleucine; lysine to arginine; methionine to leucine or isoleucine; phenylalanine to tyrosine, leucine or methionine; serine to threonine; threonine to serine; tryptophan to tyrosine; tyrosine to tryptophan or phenylalanine; and valine to isoleucine or leucine. Conservative amino acid substitutions may encompass non-naturally occurring amino acid residues, which are typically incorporated by chemical peptide synthesis rather than by synthesis in biological systems. These include peptidomimetics or other reversed or inverted forms of amino acid moieties.

[2046] Alternatively, substitutions may be “non-conservative”, such that a function or activity of the polypeptide is affected. Non-conservative changes typically involve substituting an amino acid residue with one that is chemically dissimilar, such as a polar or charged amino acid for a nonpolar or uncharged amino acid, and vice versa. Non-conservative substitutions may involve the exchange of a member of one of the amino acid classes for a member from another class.

### B. Considerations for Substitutions

[2047] One skilled in the art can determine suitable variants of polypeptides as set forth herein using well-known techniques. One skilled in the art may identify suitable areas of the molecule that may be changed without destroying activity by targeting regions not believed to be important for activity. The skilled artisan will also be able to identify amino acid residues and portions of the molecules that are conserved among similar proteins or polypeptides. In further embodiments, areas that may be important for biological activity or for structure may be subject to conservative amino acid substitutions without significantly altering the biological activity or without adversely affecting the protein or polypeptide structure.

[2048] In making such changes, the hydropathy index of amino acids may be considered. The hydropathy profile of a protein is calculated by assigning each amino acid a numerical value (“hydropathy index”) and then repetitively averaging these values along the peptide chain. Each amino acid has been assigned a value based on its hydrophobicity and charge characteristics. They are: isoleucine (+4.5); valine (+4.2); leucine (+3.8); phenylalanine (+2.8); cysteine/cysteine (+2.5); methionine (+1.9); alanine (+1.8); glycine (−0.4); threonine (−0.7); serine (−0.8); tryptophan (−0.9); tyrosine (−1.3); proline (1.6); histidine (−3.2); glutamate (−3.5); glutamine (−3.5); aspartate (−3.5); asparagine (−3.5); lysine (−3.9); and arginine (−4.5). The importance of the hydropathy amino acid index in conferring interactive biologic function on a protein is generally understood in the art (Kyte et al., J. Mol. Biol. 157:105-131 (1982)). It is accepted that the relative hydropathic character of the amino acid contributes to the secondary structure of the resultant protein or polypeptide, which in turn defines the interaction of the protein or polypeptide with other molecules, for example, enzymes, substrates, receptors, DNA, antibodies, antigens, and others. It is also known that certain amino acids may be substituted for other amino acids having a similar hydropathy index or score, and still retain a similar biological activity. In making changes based upon the hydropathy index, in certain embodiments, the substitution of amino acids whose hydropathy indices are within 2 is included. In some aspects of the invention, those that are within +1 are included, and in other aspects of the invention, those within +0.5 are included.

[2049] It also is understood in the art that the substitution of like amino acids can be effectively made based on hydrophilicity. U.S. Pat. No. 4,554,101, incorporated herein by reference, states that the greatest local average hydrophilicity of a protein, as governed by the hydrophilicity of its adjacent amino acids, correlates with a biological property of the protein. In certain embodiments, the greatest local average hydrophilicity of a protein, as governed by the hydrophilicity of its adjacent amino acids, correlates with its immunogenicity and antigen binding, that is, as a biological property of the protein. The following hydrophilicity values have been assigned to these amino acid residues: arginine (+3.0); lysine (+3.0); aspartate (+3.0±1); glutamate (+3.0±1); serine (+0.3); asparagine (+0.2); glutamine (+0.2); glycine (0); threonine (−0.4); proline (−0.5±1); alanine (−0.5); histidine (−0.5); cysteine (−1.0); methionine (−1.3); valine (−1.5); leucine (−1.8); isoleucine (−1.8); tyrosine (−2.3); phenylalanine (−2.5); and tryptophan (−3.4). In making changes based upon similar hydrophilicity values, in certain embodiments, the substitution of amino acids whose hydrophilicity values are within ±2 are included, in other embodiments, those which are within ±1 are included, and in still other embodiments, those within ±0.5 are included. In some instances, one may also identify epitopes from primary amino acid sequences based on hydrophilicity. These regions are also referred to as “epitopic core regions.” It is understood that an amino acid can be substituted for another having a similar hydrophilicity value and still produce a biologically equivalent and immunologically equivalent protein.

[2050] Additionally, one skilled in the art can review structure-function studies identifying residues in similar polypeptides or proteins that are important for activity or structure. In view of such a comparison, one can predict the importance of amino acid residues in a protein that correspond to amino acid residues important for activity or structure in similar proteins. One skilled in the art may opt for chemically similar amino acid substitutions for such predicted important amino acid residues.

[2051] One skilled in the art can also analyze the three-dimensional structure and amino acid sequence in relation to that structure in similar proteins or polypeptides. In view of such information, one skilled in the art may predict the alignment of amino acid residues of an antibody with respect to its three-dimensional structure. One skilled in the art may choose not to make changes to amino acid residues predicted to be on the surface of the protein, since such residues may be involved in important interactions with other molecules. Moreover, one skilled in the art may generate test variants containing a single amino acid substitution at each desired amino acid residue. These variants can then be screened using standard assays for binding and/or activity, thus yielding information gathered from such routine experiments, which may allow one skilled in the art to determine the amino acid positions where further substitutions should be avoided either alone or in combination with other mutations. Various tools available to determine secondary structure can be found on the world wide web at expasy.org/proteomics/protein_structure.

[2052] In some embodiments of the invention, amino acid substitutions are made that: (1) reduce susceptibility to proteolysis, (2) reduce susceptibility to oxidation, (3) alter binding affinity for forming protein complexes, (4) alter ligand or antigen binding affinities, and/or (5) confer or modify other physicochemical or functional properties on such polypeptides. For example, single or multiple amino acid substitutions (in certain embodiments, conservative amino acid substitutions) may be made in the naturally occurring sequence. Substitutions can be made in that portion of the antibody that lies outside the domain(s) forming intermolecular contacts. In such embodiments, conservative amino acid substitutions can be used that do not substantially change the structural characteristics of the protein or polypeptide (e.g., one or more replacement amino acids that do not disrupt the secondary structure that characterizes the native antibody).

### VI. Nucleic Acids

[2053] In certain embodiments, nucleic acid sequences can exist in a variety of instances such as: isolated segments and recombinant vectors of incorporated sequences or recombinant polynucleotides encoding peptides and polypeptides of the disclosure, or a fragment, derivative, mutein, or variant thereof, polynucleotides sufficient for use as hybridization probes, PCR primers or sequencing primers for identifying, analyzing, mutating or amplifying a polynucleotide encoding a polypeptide, anti-sense nucleic acids for inhibiting expression of a polynucleotide, and complementary sequences of the foregoing described herein. Nucleic acids encoding fusion proteins that include these peptides are also provided. The nucleic acids can be single-stranded or double-stranded and can comprise RNA and/or DNA nucleotides and artificial variants thereof (e.g., peptide nucleic acids).

[2054] The term “polynucleotide” refers to a nucleic acid molecule that either is recombinant or has been isolated from total genomic nucleic acid. Included within the term “polynucleotide” are oligonucleotides (nucleic acids 100 residues or less in length), recombinant vectors, including, for example, plasmids, cosmids, phage, viruses, and the like. Polynucleotides include, in certain aspects, regulatory sequences, isolated substantially away from their naturally occurring genes or protein encoding sequences. Polynucleotides may be single-stranded (coding or antisense) or double-stranded, and may be RNA, DNA (genomic, cDNA or synthetic), analogs thereof, or a combination thereof. Additional coding or non-coding sequences may, but need not, be present within a polynucleotide.

[2055] In this respect, the term “gene,” “polynucleotide,” or “nucleic acid” is used to refer to a nucleic acid that encodes a protein, polypeptide, or peptide (including any sequences required for proper transcription, post-translational modification, or localization). As will be understood by those in the art, this term encompasses genomic sequences, expression cassettes, cDNA sequences, and smaller engineered nucleic acid segments that express, or may be adapted to express, proteins, polypeptides, domains, peptides, fusion proteins, and mutants. A nucleic acid encoding all or part of a polypeptide may contain a contiguous nucleic acid sequence encoding all or a portion of such a polypeptide. It also is contemplated that a particular polypeptide may be encoded by nucleic acids containing variations having slightly different nucleic acid sequences but, nonetheless, encode the same or substantially similar protein.

[2056] In certain embodiments, there are polynucleotide variants having substantial identity to the sequences disclosed herein; those comprising at least 70%, 75%, 80%, 85%, 90%, 95%, 96%, 97%, 98%, or 99% or higher sequence identity, including all values and ranges there between, compared to a polynucleotide sequence provided herein using the methods described herein (e.g., BLAST analysis using standard parameters). In certain aspects, the isolated polynucleotide will comprise a nucleotide sequence encoding a polypeptide that has at least 90%, preferably 95% and above, identity to an amino acid sequence described herein, over the entire length of the sequence; or a nucleotide sequence complementary to said isolated polynucleotide.

[2057] The nucleic acid segments, regardless of the length of the coding sequence itself, may be combined with other nucleic acid sequences, such as promoters, polyadenylation signals, additional restriction enzyme sites, multiple cloning sites, other coding segments, and the like, such that their overall length may vary considerably. The nucleic acids can be any length. They can be, for example, 5, 10, 15, 20, 25, 30, 35, 40, 45, 50, 75, 100, 125, 175, 200, 250, 300, 350, 400, 450, 500, 750, 1000, 1500, 3000, 5000 or more nucleotides in length, and/or can comprise one or more additional sequences, for example, regulatory sequences, and/or be a part of a larger nucleic acid, for example, a vector. It is therefore contemplated that a nucleic acid fragment of almost any length may be employed, with the total length preferably being limited by the ease of preparation and use in the intended recombinant nucleic acid protocol. In some cases, a nucleic acid sequence may encode a polypeptide sequence with additional heterologous coding sequences, for example to allow for purification of the polypeptide, transport, secretion, post-translational modification, or for therapeutic benefits such as targeting or efficacy. As discussed above, a tag or other heterologous polypeptide may be added to the modified polypeptide-encoding sequence, wherein “heterologous” refers to a polypeptide that is not the same as the modified polypeptide.

### A. Hybridization

[2058] The nucleic acids that hybridize to other nucleic acids under particular hybridization conditions. Methods for hybridizing nucleic acids are well known in the art. See, e.g., Current Protocols in Molecular Biology, John Wiley and Sons, N.Y. (1989), 6.3.1-6.3.6. As defined herein, a moderately stringent hybridization condition uses a prewashing solution containing 5× sodium chloride/sodium citrate (SSC), 0.5% SDS, 1.0 mM EDTA (pH 8.0), hybridization buffer of about 50% formamide, 6×SSC, and a hybridization temperature of 550° C. (or other similar hybridization solutions, such as one containing about 50% formamide, with a hybridization temperature of 42° C.), and washing conditions of 60° C. in 0.5×SSC, 0.1% SDS. A stringent hybridization condition hybridizes in 6×SSC at 45° C., followed by one or more washes in 0.1×SSC, 0.2% SDS at 68° C. Furthermore, one of skill in the art can manipulate the hybridization and/or washing conditions to increase or decrease the stringency of hybridization such that nucleic acids comprising nucleotide sequence that are at least 65%, at least 70%, at least 75%, at least 80%, at least 85%, at least 90%, at least 95%, at least 96%, at least 97%, at least 98% or at least 99% identical to each other typically remain hybridized to each other.

[2059] The parameters affecting the choice of hybridization conditions and guidance for devising suitable conditions are set forth by, for example, Sambrook, Fritsch, and Maniatis (Molecular Cloning: A Laboratory Manual, Cold Spring Harbor Laboratory Press, Cold Spring Harbor, N.Y., chapters 9 and 11 (1989); Current Protocols in Molecular Biology, Ausubel et al., eds., John Wiley and Sons, Inc., sections 2.10 and 6.3-6.4 (1995), both of which are herein incorporated by reference in their entirety for all purposes) and can be readily determined by those having ordinary skill in the art based on, for example, the length and/or base composition of the DNA.

### B. Mutation

[2060] Changes can be introduced by mutation into a nucleic acid, thereby leading to changes in the amino acid sequence of a polypeptide (e.g., an antigenic peptide or polypeptide) that it encodes. Mutations can be introduced using any technique known in the art. In one embodiment, one or more particular amino acid residues are changed using, for example, a site-directed mutagenesis protocol. In another embodiment, one or more randomly selected residues are changed using, for example, a random mutagenesis protocol. However it is made, a mutant polypeptide can be expressed and screened for a desired property.

[2061] Mutations can be introduced into a nucleic acid without significantly altering the biological activity of a polypeptide that it encodes. For example, one can make nucleotide substitutions leading to amino acid substitutions at non-essential amino acid residues. Alternatively, one or more mutations can be introduced into a nucleic acid that selectively changes the biological activity of a polypeptide that it encodes. See, eg., Romain Studer et al., Biochem. J. 449:581-594 (2013). For example, the mutation can quantitatively or qualitatively change the biological activity. Examples of quantitative changes include increasing, reducing or eliminating the activity. Examples of qualitative changes include altering the antigen specificity of an antibody.

### C. Probes

[2062] In another aspect, nucleic acid molecules are suitable for use as primers or hybridization probes for the detection of nucleic acid sequences. A nucleic acid molecule can comprise only a portion of a nucleic acid sequence encoding a full-length polypeptide, for example, a fragment that can be used as a probe or primer or a fragment encoding an active portion of a given polypeptide.

[2063] In another embodiment, the nucleic acid molecules may be used as probes or PCR primers for specific nucleic acid sequences. For instance, a nucleic acid molecule probe may be used in diagnostic methods or a nucleic acid molecule PCR primer may be used to amplify regions of DNA that could be used, inter alia, to isolate nucleic acid sequences for use in producing the engineered cells of the disclosure. In a preferred embodiment, the nucleic acid molecules are oligonucleotides.

[2064] Probes based on the desired sequence of a nucleic acid can be used to detect the nucleic acid or similar nucleic acids, for example, transcripts encoding a polypeptide of interest. The probe can comprise a label group, e.g., a radioisotope, a fluorescent compound, an enzyme, or an enzyme co-factor. Such probes can be used to identify a cell that expresses the polypeptide.

### VII. Polypeptide Expression

[2065] In some aspects, there are nucleic acid molecule encoding polypeptides, antibodies, or antigen binding fragments of the disclosure. The nucleic acid molecules may be used to express large quantities of polypeptides. If the nucleic acid molecules are derived from a non-human, non-transgenic animal, the nucleic acid molecules may be used for humanization of the antibody or TCR genes.

### A. Vectors

[2066] In some aspects, contemplated are expression vectors comprising a nucleic acid molecule encoding a polypeptide of the desired sequence or a portion thereof (e.g., a fragment containing one or more CDRs or one or more variable region domains). Expression vectors comprising the nucleic acid molecules may encode the heavy chain, light chain, or the antigen-binding portion thereof. In some aspects, expression vectors comprising nucleic acid molecules may encode fusion proteins, modified antibodies, antibody heavy and/or light chain, antibody fragments, and probes thereof. In addition to control sequences that govern transcription and translation, vectors and expression vectors may contain nucleic acid sequences that serve other functions as well.

[2067] To express the polypeptides or peptides of the disclosure, DNAs encoding the polypeptides or peptides are inserted into expression vectors such that the gene area is operatively linked to transcriptional and translational control sequences. In some aspects, a vector that encodes a functionally complete human CH or CL immunoglobulin sequence with appropriate restriction sites engineered so that any VH or VL sequence can be easily inserted and expressed. In some aspects, a vector that encodes a functionally complete human TCR alpha or TCR beta sequence with appropriate restriction sites engineered so that any variable sequence or CDR1, CDR2, and/or CDR3 can be easily inserted and expressed. Typically, expression vectors used in any of the host cells contain sequences for plasmid or virus maintenance and for cloning and expression of exogenous nucleotide sequences. Such sequences, collectively referred to as “flanking sequences” typically include one or more of the following operatively linked nucleotide sequences: a promoter, one or more enhancer sequences, an origin of replication, a transcriptional termination sequence, a complete intron sequence containing a donor and acceptor splice site, a sequence encoding a leader sequence for polypeptide secretion, a ribosome binding site, a polyadenylation sequence, a polylinker region for inserting the nucleic acid encoding the polypeptide to be expressed, and a selectable marker element. Such sequences and methods of using the same are well known in the art.

### B. Expression Systems

[2068] Numerous expression systems exist that comprise at least a part or all of the expression vectors discussed above. Prokaryote- and/or eukaryote-based systems can be employed for use with an embodiment to produce nucleic acid sequences, or their cognate polypeptides, proteins and peptides. Commercially and widely available systems include in but are not limited to bacterial, mammalian, yeast, and insect cell systems. Different host cells have characteristic and specific mechanisms for the post-translational processing and modification of proteins. Appropriate cell lines or host systems can be chosen to ensure the correct modification and processing of the foreign protein expressed. Those skilled in the art are able to express a vector to produce a nucleic acid sequence or its cognate polypeptide, protein, or peptide using an appropriate expression system.

### C. Methods of Gene Transfer

[2069] Suitable methods for nucleic acid delivery to effect expression of compositions are anticipated to include virtually any method by which a nucleic acid (e.g., DNA, including viral and nonviral vectors) can be introduced into a cell, a tissue or an organism, as described herein or as would be known to one of ordinary skill in the art. Such methods include, but are not limited to, direct delivery of DNA such as by injection (U.S. Pat. No. 5,994,624,5,981,274, 5,945,100, 5,780,448, 5,736,524, 5,702,932, 5,656,610, 5,589,466 and 5,580,859, each incorporated herein by reference), including microinjection (Harland and Weintraub, 1985; U.S. Pat. No. 5,789,215, incorporated herein by reference); by electroporation (U.S. Pat. No. 5,384,253, incorporated herein by reference); by calcium phosphate precipitation (Graham and Van Der Eb, 1973; Chen and Okayama, 1987; Rippe et al., 1990); by using DEAE dextran followed by polyethylene glycol (Gopal, 1985); by direct sonic loading (Fechheimer et al., 1987); by liposome mediated transfection (Nicolau and Sene, 1982; Fraley et al., 1979; Nicolau et al., 1987; Wong et al., 1980; Kaneda et al., 1989; Kato et al., 1991); by microprojectile bombardment (PCT Application Nos. WO 94/09699 and 95/06128; U.S. Pat. Nos. 5,610,042; 5,322,783, 5,563,055, 5,550,318, 5,538,877 and 5,538,880, and each incorporated herein by reference); by agitation with silicon carbide fibers (Kaeppler et al., 1990; U.S. Pat. Nos. 5,302,523 and 5,464,765, each incorporated herein by reference); by Agrobacterium mediated transformation (U.S. Pat. Nos. 5,591,616 and 5,563,055, each incorporated herein by reference); or by PEG mediated transformation of protoplasts (Omirulleh et al., 1993; U.S. Pat. Nos. 4,684,611 and 4,952,500, each incorporated herein by reference); by desiccation/inhibition mediated DNA uptake (Potrykus et al., 1985). Other methods include viral transduction, such as gene transfer by lentiviral or retroviral transduction.

### VIII. Pharmaceutical Compositions

[2070] The present disclosure includes methods for treating disease and modulating immune responses in a subject in need thereof. The disclosure includes cells that may be in the form of a pharmaceutical composition that can be used to induce or modify an immune response.

[2071] Administration of the compositions according to the current disclosure will typically be via any common route. This includes, but is not limited to parenteral, orthotopic, intradermal, subcutaneous, orally, transdermally, intramuscular, intraperitoneal, intraperitoneally, intraorbitally, by implantation, by inhalation, intraventricularly, intranasally or intravenous injection. In some embodiments, compositions of the present disclosure (e.g., compositions comprising flu antigen-binding polypeptides) are administered to a subject intravenously.

[2072] Typically, compositions and therapies of the disclosure are administered in a manner compatible with the dosage formulation, and in such amount as will be therapeutically effective and immune modifying. The quantity to be administered depends on the subject to be treated. Precise amounts of active ingredient required to be administered depend on the judgment of the practitioner.

[2073] The manner of application may be varied widely. Any of the conventional methods for administration of pharmaceutical compositions comprising cellular components are applicable. The dosage of the pharmaceutical composition will depend on the route of administration and will vary according to the size and health of the subject.

[2074] In many instances, it will be desirable to have multiple administrations of at most or at least 3, 4, 5, 6, 7, 8, 9, 10 or more. The administrations may range from 2-day to 12-week intervals, more usually from one to two week intervals.

[2075] The phrases “pharmaceutically acceptable” or “pharmacologically acceptable” refer to molecular entities and compositions that do not produce an adverse, allergic, or other untoward reaction when administered to an animal, or human. As used herein, “pharmaceutically acceptable carrier” includes any and all solvents, dispersion media, coatings, antibacterial and antifungal agents, isotonic and absorption delaying agents, and the like. The use of such media and agents for pharmaceutical active substances is well known in the art. Except insofar as any conventional media or agent is incompatible with the active ingredients, its use in immunogenic and therapeutic compositions is contemplated. The pharmaceutical compositions of the current disclosure are pharmaceutically acceptable compositions.

[2076] The compositions of the disclosure can be formulated for parenteral administration, e.g., formulated for injection via the intravenous, intramuscular, sub-cutaneous, or even intraperitoneal routes. Typically, such compositions can be prepared as injectables, either as liquid solutions or suspensions and the preparations can also be emulsified.

[2077] Pharmaceutical forms suitable for injectable use include sterile aqueous solutions or dispersions; formulations including sesame oil, peanut oil, or aqueous propylene glycol. It also should be stable under the conditions of manufacture and storage and must be preserved against the contaminating action of microorganisms, such as bacteria and fungi.

[2078] Sterile injectable solutions are prepared by incorporating the active ingredients (e.g., polypeptides of the disclosure) in the required amount in the appropriate solvent with various of the other ingredients enumerated above, as required, followed by filtered sterilization. Generally, dispersions are prepared by incorporating the various sterilized active ingredients into a sterile vehicle which contains the basic dispersion medium and the required other ingredients from those enumerated above.

[2079] An effective amount of a composition is determined based on the intended goal. The term “unit dose” or “dosage” refers to physically discrete units suitable for use in a subject, each unit containing a predetermined quantity of the composition calculated to produce the desired responses discussed herein in association with its administration, i.e., the appropriate route and regimen. The quantity to be administered, both according to number of treatments and unit dose, depends on the result and/or protection desired. Precise amounts of the composition also depend on the judgment of the practitioner and are peculiar to each individual. Factors affecting dose include physical and clinical state of the subject, route of administration, intended goal of treatment (alleviation of symptoms versus cure), and potency, stability, and toxicity of the particular composition. Upon formulation, solutions will be administered in a manner compatible with the dosage formulation and in such amount as is therapeutically or prophylactically effective. The formulations are easily administered in a variety of dosage forms, such as the type of injectable solutions described above.

[2080] The compositions and related methods of the present disclosure, particularly administration of a composition of the disclosure may also be used in combination with the administration of additional therapies such as the additional therapeutics described herein or in combination with other traditional therapeutics known in the art.

[2081] The therapeutic compositions and treatments disclosed herein may precede, be co-current with and/or follow another treatment or agent by intervals ranging from minutes to weeks. In embodiments where agents are applied separately to a cell, tissue or organism, one would generally ensure that a significant period of time did not expire between the time of each delivery, such that the therapeutic agents would still be able to exert an advantageously combined effect on the cell, tissue or organism. For example, in such instances, it is contemplated that one may contact the cell, tissue or organism with two, three, four or more agents or treatments substantially simultaneously (i.e., within less than about a minute). In other aspects, one or more therapeutic agents or treatments may be administered or provided within 1 minute, 5 minutes, 10 minutes, 20 minutes, 30 minutes, 45 minutes, 60 minutes, 2 hours, 3 hours, 4 hours, 5 hours, 6 hours, 7 hours, 8 hours, 9 hours, 10 hours, 11 hours, 12 hours, 13 hours, 14 hours, 15 hours, 16 hours, 17 hours, 18 hours, 19 hours, 20 hours, 21 hours, 22 hours, 22 hours, 23 hours, 24 hours, 25 hours, 26 hours, 27 hours, 28 hours, 29 hours, 30 hours, 31 hours, 32 hours, 33 hours, 34 hours, 35 hours, 36 hours, 37 hours, 38 hours, 39 hours, 40 hours, 41 hours, 42 hours, 43 hours, 44 hours, 45 hours, 46 hours, 47 hours, 48 hours, 1 day, 2 days, 3 days, 4 days, 5 days, 6 days, 7 days, 8 days, 9 days, 10 days, 11 days, 12 days, 13 days, 14 days, 15 days, 16 days, 17 days, 18 days, 19 days, 20 days, 21 days, 1 week, 2 weeks, 3 weeks, 4 weeks, 5 weeks, 6 weeks, 7 weeks, or 8 weeks or more, and any range derivable therein, prior to and/or after administering another therapeutic agent or treatment.

[2082] The treatments may include various “unit doses.” Unit dose is defined as containing a predetermined-quantity of the therapeutic composition. The quantity to be administered, and the particular route and formulation, is within the skill of determination of those in the clinical arts. A unit dose need not be administered as a single injection but may comprise continuous infusion over a set period of time. In some embodiments, a unit dose comprises a single administrable dose.

[2083] The quantity to be administered, both according to number of treatments and unit dose, depends on the treatment effect desired. An effective dose is understood to refer to an amount necessary to achieve a particular effect. In the practice in certain embodiments, it is contemplated that doses in the range from 10 mg/kg to 200 mg/kg can affect the protective capability of these agents. Thus, it is contemplated that doses include doses of about 0.1, 0.5, 1, 5, 10, 15, 20, 25, 30, 35, 40, 45, 50, 55, 60, 65, 70, 75, 80, 85, 90, 100, 105, 110, 115, 120, 125, 130, 135, 140, 145, 150, 155, 160, 165, 170, 175, 180, 185, 190, 195, and 200, 300, 400, 500, 1000 μg/kg, mg/kg, μg/day, or mg/day or any range derivable therein. Furthermore, such doses can be administered at multiple times during a day, and/or on multiple days, weeks, or months.

[2084] In some embodiments, the therapeutically effective or sufficient amount of the immune checkpoint inhibitor, such as an antibody and/or microbial modulator, that is administered to a human will be in the range of about 0.01 to about 50 mg/kg of patient body weight whether by one or more administrations. In some embodiments, the therapy used is about 0.01 to about 45 mg/kg, about 0.01 to about 40 mg/kg, about 0.01 to about 35 mg/kg, about 0.01 to about 30 mg/kg, about 0.01 to about 25 mg/kg, about 0.01 to about 20 mg/kg, about 0.01 to about 15 mg/kg, about 0.01 to about 10 mg/kg, about 0.01 to about 5 mg/kg, or about 0.01 to about 1 mg/kg administered daily, for example. In one embodiment, a therapy described herein is administered to a subject at a dose of about 100 mg, about 200 mg, about 300 mg, about 400 mg, about 500 mg, about 600 mg, about 700 mg, about 800 mg, about 900 mg, about 1000 mg, about 1100 mg, about 1200 mg, about 1300 mg or about 1400 mg on day 1 of 21-day cycles. The dose may be administered as a single dose or as multiple doses (e.g., 2 or 3 doses), such as infusions. The progress of this therapy is easily monitored by conventional techniques.

[2085] In certain embodiments, the effective dose of the pharmaceutical composition is one which can provide a blood level of about 1 μM to 150 μM. In another embodiment, the effective dose provides a blood level of about 4 μM to 100 μM.; or about 1 μM to 100 μM; or about 1 μM to 50 μM; or about 1 μM to 40 μM; or about 1 μM to 30 μM; or about 1 μM to 20 μM; or about 1 μM to 10 μM; or about 10 μM to 150 μM; or about 10 μM to 100 μM; or about 10 μM to 50 μM; or about 25 μM to 150 μM; or about 25 μM to 100 μM; or about 25 μM to 50 μM; or about 50 μM to 150 μM; or about 50 μM to 100 μM (or any range derivable therein). In other embodiments, the dose can provide the following blood level of the agent that results from a therapeutic agent being administered to a subject: about, at least about, or at most about 1, 2, 3, 4, 5, 6, 7, 8, 9, 10, 11, 12, 13, 14, 15, 16, 17, 18, 19, 20, 21, 22, 23, 24, 25, 26, 27, 28, 29, 30, 31, 32, 33, 34, 35, 36, 37, 38, 39, 40, 41, 42, 43, 44, 45, 46, 47, 48, 49, 50, 51, 52, 53, 54, 55, 56, 57, 58, 59, 60, 61, 62, 63, 64, 65, 66, 67, 68, 69, 70, 71, 72, 73, 74, 75, 76, 77, 78, 79, 80, 81, 82, 83, 84, 85, 86, 87, 88, 89, 90, 91, 92, 93, 94, 95, 96, 97, 98, 99, or 100 μM or any range derivable therein. In certain embodiments, the therapeutic agent that is administered to a subject is metabolized in the body to a metabolized therapeutic agent, in which case the blood levels may refer to the amount of that agent. Alternatively, to the extent the therapeutic agent is not metabolized by a subject, the blood levels discussed herein may refer to the unmetabolized therapeutic agent.

[2086] Precise amounts of the therapeutic composition also depend on the judgment of the practitioner and are peculiar to each individual. Factors affecting dose include physical and clinical state of the patient, the route of administration, the intended goal of treatment (alleviation of symptoms versus cure) and the potency, stability and toxicity of the particular therapeutic substance or other therapies a subject may be undergoing.

[2087] It will be understood by those skilled in the art and made aware that dosage units of μg/kg or mg/kg of body weight can be converted and expressed in comparable concentration units of μg/ml or mM (blood levels), such as 4 μM to 100 μM. It is also understood that uptake is species and organ/tissue dependent. The applicable conversion factors and physiological assumptions to be made concerning uptake and concentration measurement are well-known and would permit those of skill in the art to convert one concentration measurement to another and make reasonable comparisons and conclusions regarding the doses, efficacies and results described herein.

### IX. Detectable Labels

[2088] In some aspects of this disclosure, it will be useful to detectably or therapeutically label a Fab polypeptide or protein G Fab-binding domain. Methods for conjugating polypeptides to these agents are known in the art. For the purpose of illustration only, polypeptides can be labeled with a detectable moiety such as a radioactive atom, a chromophore, a fluorophore, or the like. Such labeled polypeptides can be used for diagnostic techniques, either in vivo, or in an isolated test sample or in methods described herein.

[2089] As used herein, the term “label” intends a directly or indirectly detectable compound or composition that is conjugated directly or indirectly to the composition to be detected, e.g., polynucleotide or protein such as an antibody so as to generate a “labeled” composition. The term also includes sequences conjugated to the polynucleotide that will provide a signal upon expression of the inserted sequences, such as green fluorescent protein (GFP) and the like. The label may be detectable by itself (e.g. radioisotope labels or fluorescent labels) or, in the case of an enzymatic label, may catalyze chemical alteration of a substrate compound or composition that is detectable. The labels can be suitable for small scale detection or more suitable for high-throughput screening. As such, suitable labels include, but are not limited to radioisotopes, fluorochromes, chemiluminescent compounds, dyes, and proteins, including enzymes. The label may be simply detected or it may be quantified. A response that is simply detected generally comprises a response whose existence merely is confirmed, whereas a response that is quantified generally comprises a response having a quantifiable (e.g., numerically reportable) value such as an intensity, polarization, and/or other property. In luminescence or fluorescence assays, the detectable response may be generated directly using a luminophore or fluorophore associated with an assay component actually involved in binding, or indirectly using a luminophore or fluorophore associated with another (e.g., reporter or indicator) component.

[2090] Examples of luminescent labels that produce signals include, but are not limited to bioluminescence and chemiluminescence. Detectable luminescence response generally comprises a change in, or an occurrence of, a luminescence signal. Suitable methods and luminophores for luminescently labeling assay components are known in the art and described for example in Haugland, Richard P. (1996) Handbook of Fluorescent Probes and Research Chemicals (6.sup.th ed.). Examples of luminescent probes include, but are not limited to, aequorin and luciferases.

[2091] Examples of suitable fluorescent labels include, but are not limited to, fluorescein, rhodamine, tetramethylrhodamine, eosin, erythrosin, coumarin, methyl-coumarins, pyrene, Malacite green, stilbene, Lucifer Yellow, Cascade Blue.™., and Texas Red. Other suitable optical dyes are described in the Haugland, Richard P. (1996) Handbook of Fluorescent Probes and Research Chemicals (6.sup.th ed.).

[2092] In another aspect, the fluorescent label is functionalized to facilitate covalent attachment to a cellular component present in or on the surface of the cell or tissue such as a cell surface marker. Suitable functional groups, including, but not are limited to, isothiocyanate groups, amino groups, haloacetyl groups, maleimides, succinimidyl esters, and sulfonyl halides, all of which may be used to attach the fluorescent label to a second molecule. The choice of the functional group of the fluorescent label will depend on the site of attachment to either a linker, the agent, the marker, or the second labeling agent.

[2093] Attachment of the fluorescent label may be either directly to the cellular component or compound or alternatively, can by via a linker. Suitable binding pairs for use in indirectly linking the fluorescent label to the intermediate include, but are not limited to, antigens/polypeptides, e.g., rhodamine/anti-rhodamine, biotin/avidin and biotin/strepavidin.

[2094] The coupling of polypeptides to low molecular weight haptens can increase the sensitivity of the antibody in an assay. The haptens can then be specifically detected by means of a second reaction. For example, it is common to use haptens such as biotin, which reacts avidin, or dinitrophenol, pyridoxal, and fluorescein, which can react with specific anti-hapten polypeptides. See, Harlow and Lane (1988) supra.

### X. Sample Preparation

[2095] In certain aspects, methods involve obtaining or evaluating a sample from a subject. The sample may include a sample obtained from any source including but not limited to blood, sweat, hair follicle, buccal tissue, tears, menses, feces, or saliva. In certain aspects of the current methods, any medical professional such as a doctor, nurse or medical technician may obtain a biological sample for testing. Yet further, the biological sample can be obtained without the assistance of a medical professional.

[2096] A sample may include but is not limited to, tissue, cells, or biological material from cells or derived from cells of a subject. The biological sample may be a heterogeneous or homogeneous population of cells or tissues. The biological sample may be obtained using any method known to the art that can provide a sample suitable for the analytical methods described herein. The sample may be obtained by non-invasive methods including but not limited to: scraping of the skin or cervix, swabbing of the cheek, saliva collection, urine collection, feces collection, collection of menses, tears, or semen.

[2097] The sample may be obtained by methods known in the art. In certain embodiments the samples are obtained by biopsy. In other embodiments the sample is obtained by swabbing, endoscopy, scraping, phlebotomy, or any other methods known in the art. In some cases, the sample may be obtained, stored, or transported using components of a kit of the present methods. In some cases, multiple samples, such as multiple esophageal samples may be obtained for diagnosis by the methods described herein. In other cases, multiple samples, such as one or more samples from one tissue type (for example esophagus) and one or more samples from another specimen (for example serum) may be obtained for diagnosis by the methods. In some cases, multiple samples such as one or more samples from one tissue type (e.g. esophagus) and one or more samples from another specimen (e.g. serum) may be obtained at the same or different times. Samples may be obtained at different times are stored and/or analyzed by different methods. For example, a sample may be obtained and analyzed by routine staining methods or any other cytological analysis methods.

[2098] In some embodiments the biological sample may be obtained by a physician, nurse, or other medical professional such as a medical technician, endocrinologist, cytologist, phlebotomist, radiologist, or a pulmonologist. The medical professional may indicate the appropriate test or assay to perform on the sample. In certain aspects a molecular profiling business may consult on which assays or tests are most appropriately indicated. In further aspects of the current methods, the patient or subject may obtain a biological sample for testing without the assistance of a medical professional, such as obtaining a whole blood sample, a urine sample, a fecal sample, a buccal sample, or a saliva sample.

[2099] In other cases, the sample is obtained by an invasive procedure including but not limited to: biopsy, needle aspiration, endoscopy, or phlebotomy. The method of needle aspiration may further include fine needle aspiration, core needle biopsy, vacuum assisted biopsy, or large core biopsy. In some embodiments, multiple samples may be obtained by the methods herein to ensure a sufficient amount of biological material.

[2100] General methods for obtaining biological samples are also known in the art. Publications such as Ramzy, Ibrahim Clinical Cytopathology and Aspiration Biopsy 2001, which is herein incorporated by reference in its entirety, describes general methods for biopsy and cytological methods. In one embodiment, the sample is a fine needle aspirate of a esophageal or a suspected esophageal tumor or neoplasm. In some cases, the fine needle aspirate sampling procedure may be guided by the use of an ultrasound, X-ray, or other imaging device.

[2101] In some embodiments of the present methods, the molecular profiling business may obtain the biological sample from a subject directly, from a medical professional, from a third party, or from a kit provided by a molecular profiling business or a third party. In some cases, the biological sample may be obtained by the molecular profiling business after the subject, a medical professional, or a third party acquires and sends the biological sample to the molecular profiling business. In some cases, the molecular profiling business may provide suitable containers, and excipients for storage and transport ofthe biological sample to the molecular profiling business.

[2102] In some embodiments of the methods described herein, a medical professional need not be involved in the initial diagnosis or sample acquisition. An individual may alternatively obtain a sample through the use of an over the counter (OTC) kit. An OTC kit may contain a means for obtaining said sample as described herein, a means for storing said sample for inspection, and instructions for proper use of the kit. In some cases, molecular profiling services are included in the price for purchase of the kit. In other cases, the molecular profiling services are billed separately. A sample suitable for use by the molecular profiling business may be any material containing tissues, cells, nucleic acids, genes, gene fragments, expression products, gene expression products, or gene expression product fragments of an individual to be tested. Methods for determining sample suitability and/or adequacy are provided.

[2103] In some embodiments, the subject may be referred to a specialist such as an oncologist, surgeon, or endocrinologist. The specialist may likewise obtain a biological sample for testing or refer the individual to a testing center or laboratory for submission of the biological sample. In some cases the medical professional may refer the subject to a testing center or laboratory for submission of the biological sample. In other cases, the subject may provide the sample. In some cases, a molecular profiling business may obtain the sample.

### XI. Host Cells

[2104] As used herein, the terms “cell,” “cell line,” and “cell culture” may be used interchangeably. All of these terms also include both freshly isolated cells and ex vivo cultured, activated or expanded cells. All of these terms also include their progeny, which is any and all subsequent generations. It is understood that all progeny may not be identical due to deliberate or inadvertent mutations. In the context of expressing a heterologous nucleic acid sequence, “host cell” refers to a prokaryotic or eukaryotic cell, and it includes any transformable organism that is capable of replicating a vector or expressing a heterologous gene encoded by a vector. A host cell can, and has been, used as a recipient for vectors or viruses. A host cell may be “transfected” or “transformed,” which refers to a process by which exogenous nucleic acid, such as a recombinant protein-encoding sequence, is transferred or introduced into the host cell. A transformed cell includes the primary subject cell and its progeny.

[2105] In certain embodiments transfection can be carried out on any prokaryotic or eukaryotic cell. In some aspects electroporation involves transfection of a human cell. In other aspects electroporation involves transfection of an animal cell. In certain aspects transfection involves transfection of a cell line or a hybrid cell type. In some aspects the cell or cells being transfected are cancer cells, tumor cells or immortalized cells. In some instances tumor, cancer, immortalized cells or cell lines are induced and in other instances tumor, cancer, immortalized cells or cell lines enter their respective state or condition naturally. In certain aspects the cells or cell lines can be A549, B-cells, B16, BHK-21, C2C12, C6, CaCo-2, CAP/, CAP-T, CHO, CHO2, CHO-DG44, CHO-K1, COS-1, Cos-7, CV-1, Dendritic cells, DLD-1, Embryonic Stem (ES) Cell or derivative, H1299, HEK, 293, 293T, 293FT, Hep G2, Hematopoietic Stem Cells, HOS, Huh-7, Induced Pluripotent Stem (iPS) Cell or derivative, Jurkat, K562, L5278Y, LNCaP, MCF7, MDA-MB-231, MDCK, Mesenchymal Cells, Min-6, Monocytic cell, Neuro2a, NIH 3T3, NIH3T3L1, K562, NK-cells, NS0, Panc-1, PC12, PC-3, Peripheral blood cells, Plasma cells, Primary Fibroblasts, RBL, Renca, RLE, SF21, SF9, SH-SY5Y, SK-MES-1, SK—N—SH, SL3, SW403, Stimulus-triggered Acquisition of Pluripotency (STAP) cell or derivate SW403, T-cells, THP-1, Tumor cells, U2OS, U937, peripheral blood lymphocytes, expanded T cells, hematopoietic stem cells, or Vero cells.

### XII. Kits

[2106] Certain aspects of the present invention also concern kits containing compositions of the disclosure or compositions to implement methods of the disclosure. In some embodiments, kits can be used to detect the presence of an influenza virus or antigen in a sample. In certain embodiments, a kit contains, contains at least or contains at most 1, 2, 3, 4, 5, 6, 7, 8, 9, 10, 11, 12, 13, 14, 15, 16, 17, 18, 19, 20, 21, 22, 23, 24, 25, 26, 27, 28, 29, 30, 31, 32, 33, 34, 35, 36, 37, 38, 39, 40, 41, 42, 43, 44, 45, 46, 47, 48, 49, 50, 100, 500, 1,000 or more probes, primers or primer sets, synthetic molecules or inhibitors, or any value or range and combination derivable therein. In some embodiments, a kit contains one or more polypeptides capable of binding to an influenza antigen. For example, a kit may comprise at least 1, 2, 3, 4, 5, 6, 7, 8, 9, 10 or more Fabs disclosed herein for detecting an influenza antigen. In some embodiments, a kit comprises a detection pair. In some embodiments, a kit comprises an enzyme. In some embodiments, a kit comprises a substrate for an enzyme.

[2107] Kits may comprise components, which may be individually packaged or placed in a container, such as a tube, bottle, vial, syringe, or other suitable container means.

[2108] Individual components may also be provided in a kit in concentrated amounts; in some embodiments, a component is provided individually in the same concentration as it would be in a solution with other components. Concentrations of components may be provided as 1×, 2×, 5×, 10×, or 20× or more.

[2109] Kits for using probes, synthetic nucleic acids, nonsynthetic nucleic acids, and/or inhibitors of the disclosure for prognostic or diagnostic applications are included as part of the disclosure. In certain aspects, negative and/or positive control nucleic acids, probes, and inhibitors are included in some kit embodiments.

[2110] Kits may further comprise instructions for use. For example, in some embodiments, a kit comprises instructions for detecting an influenza antigen in a sample.

[2111] It is contemplated that any method or composition described herein can be implemented with respect to any other method or composition described herein and that different embodiments may be combined. The claims originally filed are contemplated to cover claims that are multiply dependent on any filed claim or combination of filed claims.

### XIII. EXAMPLES

[2112] The following examples are included to demonstrate certain embodiments of the invention. It should be appreciated by those of skill in the art that the techniques disclosed in the examples which follow represent techniques discovered by the inventor to function well in the practice of the invention. However, those of skill in the art should, in light of the present disclosure, appreciate that many changes can be made in the specific embodiments which are disclosed and still obtain a like or similar result without departing from the spirit and scope of the invention.

### Example 1—Broadly Neutralizing Antibodies Target a Hemagglutinin Anchor Epitope

[2113] Antibodies against the major surface glycoprotein hemagglutinin (HA) are critical for providing protection against influenza virus infection^{6,7}. However, most HA-binding antibodies target variable epitopes of the HA head domain, which provide limited protection against antigenically similar influenza virus strains³. Vaccine formulations that preferentially induce antibodies against conserved epitopes of the HA head and stalk domains could provide broad and potent protectionagainst a wide array of influenza viruses. Several leading universal influenza virus candidates are designed to induce antibodies specifically against the stalk domain, but the spectrum of distinct epitopes on the stalk targeted by the human B cell repertoire remains to be determined. By analyzing the specificities of B cells targeting the H1 stalk through the generation of monoclonal antibodies (mAbs), our study reveals a new class of bnAbs against an underappreciated epitope where HA anchors itself into the viral membrane. Next-generation vaccine platforms should take advantage of this finding to elicit antibodies against the conservedanchor epitope.

### A. Results

### 1. Discovery of Anchor Epitope Binding mAbs

[2114] To investigate the specificities of HA-specific antibodies, we generated 358 mAbs from plasmablasts and HA⁺ memory B cells (MBCs) isolated from volunteers that were vaccinated against or naturally infected with seasonal influenza viruses or were participants in a phase 1 clinical trial of cHA vaccine^{4,5}. Of all mAbs tested, nearly half targeted the HA stalk domain, 21% of which targeted the well-characterized central stalk (CS) epitope (FIG. 5a). Notably, stalk-binding mAbs were disproportionally isolated from the infected, 2009 pandemic HIN1 (pH1N1) monovalent inactivated influenza vaccine (MIV), and cHA vaccine cohorts (FIG. 5b), as these exposure routes have previously been shown to induce antibody responses against the HA stalk^{5,8,9}. To investigate which epitopes the remaining 79% of stalk-binding mAbs were targeting, we performed negative stain electron microscopy with three non-CR9114¹⁰ competing stalk domain-binding mAbs: 047-09 4F04, 241 IgA 2F04, and 222-1C06. All three mAbs bound an epitope near the anchor of the HA stalk and were oriented at an upward angle towards the epitope (FIG. 1a-b and FIG. 5c), suggesting this epitope may be partially obstructed by the lipid membrane and may only be exposed forantibody binding as the HA trimers flex on the membrane. FISW84, a recently identified stalk-binding mAb”, targets an epitope that overlaps with the three identified anchor-binding mAbs (FIG. 5d), suggesting the anchor epitope is a common stalk epitope. Moreover, a proximal epitope was previously identified on group 2 viruses that is targeted by mAbs CR8020¹² and CR8043¹³. Despite some overlap, the epitope targeted by the group 2 mAbs was considerably farther up and to the right on the HA stalk relative to the anchor epitope, and mAbsCR8020 and CR8043 targeted the stalk from above (FIG. 5e-f), at an angle and positioning more akin to antibodies targeting the CS epitope. MAbs binding the CS epitope (CR9114¹⁰ and FI6v3¹⁴) did not have overlapping footprints or compete for HA binding with the anchor-binding 047-09 4F04 mAb in an HA competition assay (FIG. 1c-d). In total, we identified 50 distinct mAbs that competed for binding to the anchor epitope from a total of 21 individuals (FIG. 1d and Extended Data Table 1 and 2). Of these, 34 anchor-binding mAbs from 15 donors were isolated from the cHA vaccine trial (Extended Data Table 1 and 2).

[2115] Anchor-binding mAbs were broadly reactive and broadly neutralizing against pre- and post-pandemic H1N1 viruses and a swine-origin H1N2 virus (FIG. 1e and FIG. 5g-h). Notably, anchor-binding mAbs had similar neutralizing potency against pH1N1 relative to mAbs against the central stalk epitope (FIG. 1e and FIG. 5i-j). Many stalk-targeting antibodies mediate protection via Fc-mediated functions, including antibody-dependentcellular cytotoxicity (ADCC)^{15,16}. Anchor epitope-binding mAbs largely did not possess ADCC activity (15/18; FIG. 5k-1), potentially due to the upward angle of approach of anchor-binding antibodies which may position the Fc distantly from effector cells. Despite pan-H1 binding, anchor-targeting mAbs rarely cross-reacted with other HA subtypes tested, including H3, a group 2 subtype, other group 1 subtypes, including H2 and H5, and influenza B viruses (FIG. 1f and FIG. 6a). Despite this, 222-1C06 mAb cross-reacted with H2 and H5 HA (FIG. 1g and FIG. 6b) and several anchor-binding antibodies could neutralize an H2N2 virus (FIG. 6c), suggesting antibodies targeting the anchor epitope can cross-neutralize other group 1 influenza A viruses. We recently demonstrated that bnAbs against the HA stalk are often polyreactive¹⁷, which may limit the activation of B cells expressing bnAbs. Relative to mAbs targeting the central stalk epitope, we identified thatanchor-binding mAbs were proportionally less likely to be polyreactive and those that were polyreactive had weaker relative affinity for LPS (FIG. 6d-e). These data suggest that although polyreactivity is selected for within the anti-anchor epitope B cell pool, it is not to the same level as B cells against the CS epitope.

[2116] H1N1 viruses have acquired several mutations within the HA stalk domain, likely due to antibody selective pressures or to increase stability. To understand whether these mutations affect antibody binding to the anchor epitope, we screened mAbs against naturally occurringand experimentally identified viral escape mutants of mAbs binding to the CS epitope (FIG. 6f-g and Extended Data Table 3). Anchor epitope-binding mAbs were mostly unaffected by these mutants whereas most of the CS-binding mAbs showed reduced binding to at least one mutant (FIG. 6g). Notably, most mAbs had reduced binding to A388V of HA2, which was recently shown to preferentially grow in the presence of mAbs againstthe CS epitope². While A373 is distant from the anchor epitope, the A373V mutation was shown to affect the conformation of the HA stalk², explaining the broad reduction of HA binding by antibodies targeting either stalk epitope. Anchor-binding mAbs only demonstrated a 10-30% reduction in binding (FIG. 6g), indicating they are still likely to neutralize viruses carrying the A373V mutation.

[2117] To test whether mAbs targeting the anchor epitope were protective in vivo, we prophylactically and therapeutically (48 hours after infection) administered a cocktail of 5 mAbs targeting the anchor epitope or the CS epitope to mimic a polyclonal response against these epitopes and infected mice with a lethal dose of a mouse-adapted pH1N1 virus (A/Netherlands/602/2009; Supplementary Table 1). Mice that received a prophylactic or therapeutic anti-anchor cocktail experienced similar weight loss and mortality, with 5 mg/kg doseproviding 100% protection (FIG. 7a-b). No differences in lung viral titers were detected in mice that received the anti-anchor cocktail prophylactically relative to the negative control mAb administered mice (FIG. 7c). Anti-stalk antibodies do not provide sterilizing immunity but are known to neutralize subsequent rounds and limit disease progression¹⁸. As a result, lung viral titers do not necessarily reflect protection from morbidity and mortality. Lastly, anti-anchor cocktail given prophylactically provided 70% protection againstlethal A/Fort Monmouth/January 1947 infection (FIG. 7d), a virus that circulated prior to the birth of any of the donors in our study (Extended Data Table 1). Since anchor-binding mAbs do not engage in ADCC for the most part, antibodies targeting the anchor epitope likely provide protection in vivo through direct neutralization of virus. Together, these data indicate that antibodies against the anchor epitope are pan-H1 neutralizing and protective in vivo.

### 2. Structure of an Anchor-Binding Antibody

[2118] All anchor epitope-binding mAbs utilized one of four VH3 genes: VH3-23, VH3-30/VH3-30-3, and VH3-48, in contrast to mAbs targeting the CS epitope which commonly use VH1-69 (FIG. 2a and FIG. 8a-b). Anchor epitope-binding mAbs also utilized a highly restricted lightchain repertoire, with all mAbs utilizing a combination of VK3-11 or VK3-15 combined with JK4or JK5 (FIG. 2b and FIG. 8c-d). Furthermore, all but one light chain of the anchor-targeting mAbs were clonally related (Extended Data Table 2), indicating the light chains were very similar across mAbs and study participants. We identified four distinct clonal expansions, with one public clone found across two donors (FIG. 8e-f and Extended Data Table 2). Anchor epitope- and CS-targeting mAbs exhibited similar levels of somatic hypermutations (FIG. 8g). The K-CDR3 length of anchor epitope-binding mAbs was highly restricted, with all K-CDR3s being ten amino acids long (FIG. 8h).

[2119] To investigate the binding motif of anchor-targeting mAbs, we generated a high-resolution (3.38 Å) cryo-EM structure of 222-1C06 bound to A/California/July 2009 HA (FIG. 2c and FIG. 8i-k). The broad paratope of 222-1C06 made extensive contacts across the HA fusion peptide (FIG. 2d-e)¹⁹, which mediates viral membrane fusion with the host membrane. Fusion peptide binding was largely mediated by an NWP motif within the K-CDR3, a Y58 directly following the H-CDR2, and a W99 in the H-CDR3, with these HA-binding motifs acting independently and in combination via an aromatic pocket (FIG. 2f-g and Supplementary Table2). Moreover, both the K-CDR3 NWP and H-CDR2 Y58 were found in all the anchor-binding mAbs and were germline encoded (FIG. 2h-i), which could have led to the selection of B cells utilizing these variable genes. Notably, FISW84 utilizes VH3-23 and VK3-15 and comparison of the paratopes showed the NWP and Y58 motifs of FISW84 similarly form an aromatic pocketbut orient towards the fusion peptide slightly differently than 222-1C06 (FIG. 8l). Molecular dynamic (MD) simulations additionally showed that VH3-23 and VH3-30 utilizing mAbs from our study and FISW84 targeted the HA fusion peptide similarly to the cryo-EM structure of 222-1C06 via the aromatic pocket created by the K-CDR3 NWP and H-CDR2 Y58 motifs albeit at different orientations (FIG. 8m). Crucially, MD and cryo-EM analyses revealed numerous intra-Fab interactions of hydrophobic and aromatic amino acids, including p-stacking of K-CDR3-P95 with K-CDR3-W94 and H-CDR2-Y58 that rigidified the paratope (FIG. 8n-o and Supplementary Table 3).

[2120] Broad analysis of human, swine, and avian H1 viruses revealed the side-chain contacts of 222-1C06 were highly conserved (94-100% conserved; FIG. 2j). In addition, the side-chain contacts were 100% conserved across 100 years of H1N1 virus evolution in humans (FIG. 8p). Deep mutational scanning of potential H1 viruses at these contact residues indicated substantial permissibility (FIG. 8q), although these mutations appear to not have been selected for in nature (FIG. 2j). The five side-chain contacts of this broad epitope were also highly conserved across group 1 viruses, with the W343 contact being 100% conserved across all group 1 viruses (FIG. 2k). Together, these data reveal B cells targeting the anchor epitope utilized a highly restricted V(D)J gene repertoire, and the specific features within this repertoire made critical and extensive contacts with the conserved anchor epitope.

### 3. The Anchor Epitope is a Common Target

[2121] Due to the restricted repertoire features of anchor-targeting mAbs, we next determined the relative proportion of B cells with these features by interrogating single-cell repertoire sequencing of HA-specific B cells isolated from 20 human participants following cHA vaccination^{4,5}. The cHA vaccine platform is intended to specifically induce antibodies against thestalk domain by retaining the stalk domain of H1 and replacing the head domain of HA with that of an avian subtype, either H8 (prime) or H5 (boost) for this trial^{4,5}. To investigate the proportion of B cells with anchor epitope-binding repertoire features, we selected B cells that used VH3-23/VH3-30/VH3-30-3/VH3-48, VK3-11/VK3-15, JK4/JK5, a 10 amino acid length K-CDR3, and possessed an NWP motif within the K-CDR3. We also segregated B cells expressing VH1-69 and a kappa chain, which are commonly used by B cells targeting the CS epitope. We identified that B cells with features of antibodies binding the anchor epitope were abundant within the human B cell repertoire, with 6% of all B cells identified fitting within this defined repertoire (FIG. 3a). Moreover, all but one participant had at least one B cell with anchor-binding repertoire features (FIG. 3b). Additionally, 32 out of 33 mAbs generated from the selected anchor-targeting B cell list competed for HA binding with 047-09 4F04 (FIG. 9a), indicating this population was greatly enriched for anchor-targeting B cells. Moreover, the anchor-binding B cells were highly mutated and were largely class-switched to IgG1 (ig. 9b-c), suggesting these B cells were MBCs that had undergone affinity maturation and class switch recombination. Together, these data indicate that the anchor epitope is a common target of the human MBC repertoire following cHA vaccination.

[2122] To confirm that anchor epitope-targeting mAbs were representative of the serum antibody response, we performed electron microscopy polyclonal epitope mapping (EMPEM²⁰) with serum antibodies from participants 236 and 241 from the 2014 quadrivalent inactivated influenza vaccine (QIV) cohort (Extended Data Table 1). Both participants had detectableantibodies targeting the anchor epitope at days 7 and 14 post vaccination (FIG. 3c; FIG. 9d-e). Comparison of anchor epitope-binding polyclonal antibodies (pAbs) identified in participant 241 revealed that 241 IgA 2F04 mAb strongly overlapped with the 241 pAb (FIG. 3d), suggesting the pAb derived from this clonal expansion. Together, these data indicate humoral immunity against the anchor epitope is common within the MBC pool and polyclonal serum antibody response after vaccination.

### 4. cHA Induces Anchor-Binding Antibodies

[2123] To investigate whether participants enrolled in a phase I clinical trial of the cHA vaccine (FIG. 4a)mounted an antibody response against the anchor and the CS epitope, we adapted the competition ELISA to detect serum antibody responses that could compete for binding with 047-09 4F04 and CR9114, respectively. 3 different vaccine formulations were used in this trial, with participants being primed with either a cH8/1 inactivated influenza vaccine (IIV) with an oil-in-water adjuvant (AS03) or cH8/1 live-attenuated influenza vaccine (LAIV) followed by a boostwith a cH5/1 IIV with or without AS03 (FIG. 4a). Only participants that received the IIV+AS03 on either the prime or boost were capable of seroconverting against both the anchor and CS epitopes (FIG. 4b-c and FIG. 10a-b). Participants that received the cH8/1 IIV+AS03prime did not further boost serum antibodies against either stalk epitope after the cH5/1+AS03 boost (FIG. 4c), suggesting these B cells were refractory to continued activation. Serum titers against the anchor and CS epitopes (FIG. 10a-b) closely matched that of serum neutralizing titers against a cH6/1N8 virus and an avian-swine HIN1 virus⁵, suggesting the anchor- and CS-targeting serum antibodies were responsible for neutralization.

[2124] All but one participant in the IIV+AS03 groups seroconverted against the anchor epitope (FIG. 4d) and had higher titers against the anchor epitope relative to participants that received the 2009 MIV or seasonal influenza virus vaccines (FIG. 4e). However, the precise role of the cHA immunogen versus the AS03 adjuvant in inducing anti-stalk antibody responses could not be resolved in our study. Notably, those individuals that received the IIV alone had weak plasmablast responses relative to those individuals that received the IIV+AS03⁴, suggesting the oil-in-water adjuvant, not the cHA immunogen, was essential for robust B cell activation and anti-anchor antibody responses. Moreover, considerable pre-existing antibodies may hinder recall of B cells against the stalk. Individuals first exposed to the 2009 pH1N1, a virus for which individuals had low pre-existing humoral immunity, had proportionally more isolated mAbsagainst the stalk and were more likely to have an anti-anchor mAb than individuals that had repeatedly been exposed to the pH1N1 virus in subsequent influenza seasons (FIG. 10c-d), therefore suggesting pre-existing antibodies may limit antibody responses against theHA stalk. Despite robust recall of antibodies against the anchor and CS epitopes by theadjuvanted vaccines, titers decreased one year after vaccination (day 420; FIG. 10e-f). Together, these data indicate that the adjuvanted inactivated cHA vaccine can robustly induce antibodies against multiple stalk epitopes, including the anchor.

[2125] Headless HA antigens, including mini-HA²¹, are attractive universal influenza virus vaccine antigens, as these antigens lack the immunodominant epitopes of the HA head^{21,22}. However, only 1/50 anchor-binding mAbs bound the mini-HA antigen²¹, whereas all anchor epitope-binding mAbs bound cH6/1 (FIG. 10g). Compared to full-length HA, the membrane-proximal region of the mini-HA splays by approximately 14.5 Å²¹, which may disrupt the antigenicity of the anchor epitope. To understand whether anchor epitope-targeting antibodies could bind the mini-HA in a more native setting, we generated a membrane-bound mini-HA and observed that mAbs targeting the anchor and CS epitopes readily bind both the full-length membrane-bound A/California/July 2009 HA (Cal09) and the membrane-bound mini-HA (FIG. 10h), indicating the mini-HA is antigenic when natively presented. Further, we demonstrated that anchor epitope-targeting antibodies bound HA with a fibritin but not a GCN4 trimerization domain (FIG. 10i), highlighting the trimerization domain selection as an important factor for vaccine design. Together, these data demonstrate native-like HA antigens, such as the cHA vaccine, can recall MBCs targeting the anchor epitope.

### B. Discussion

[2126] In this study, we identified a public class of bnAbs targeting an epitope at the anchor of the HA stalk domain near the membrane. The anchor-targeting mAbs were public clonotypes across participants, with all antibodies possessing two conserved, germline-encoded binding motifs: a Y58 directly following the H-CDR2 and an NWP motif within the K-CDR3. The neutralizing activity of anchor epitope-targeting mAbs against pre- and post-pH1N1 viruses anda swine-origin H1-expressing virus indicates the anchor epitope is an important target for pan-subtype neutralizing antibodies. As two of the last four influenza virus pandemics were caused by H1N1 viruses and a recent report shows antigenically novel H1-expressing viruses commonly spilling over from swine into humans²³, it is critically important to generate pan-H1 vaccines to prevent the next influenza pandemic. Moreover, the ability of anti-anchor antibodies to neutralize an H2 virus and the general conservation of contact residues suggests that anchor-targeting antibodies have the potential to acquire cross-neutralization against group 1 viruses.

[2127] Our study highlights an additional broadly protective epitope of the HA stalk and provides guidance on how vaccines can be designed to drive broadly protective antibodies against multiple distinct epitopes, which can work cooperatively to provide optimal protection while avoiding the generation of antibody escape mutants. Notably, studies in the HIV-1 field have shown that bnAb monotherapy can lead to the development of antibody resistant viral variants²⁴⁻²⁶. whereas combination bnAb therapy does not²⁷. Additionally, immune focusing toward a singleepitope can lead to the generation and selection of viral escape mutants at these highlyconserved epitopes^{2,3,28,29}. Therefore, it is critical that future universal influenza virus vaccines elicit antibodies against multiple conserved epitopes to prevent the generation of bnAb escape viruses.

[2128] The angle of approach of anchor-binding mAbs and the proximity of the epitope to the viral membrane suggest this epitope is typically obstructed, limiting antibody recognition and B cell activation. However, membrane-bound HA typically flexes between 0° to 25° and up to 52° on its threefold axis¹¹, suggesting antibodies and B cells can easily access the anchor epitope during this flexing process. Moreover, H1 viruses possess a highly conserved glycosylation site on the HA stalk that lies above the anchor epitope^{11,30}, which may obstruct antibodies from targeting this epitope from above. Similarly, a neutralizing mAb against the Middle East respiratory syndrome coronavirus targets an epitope on S2 from an upward angle to avoid glycans³¹. Therefore, the upward angle of approach may be a common feature of antibodies thatrecognize epitopes below glycans.

[2129] Our study shows that humans have pre-existing immunity against the anchor epitopeand influenza virus vaccination can recall MBCs to secrete antibodies against this epitope. However, vaccine HA antigens must have a native-like conformation near the transmembrane domain, as trimer splaying potentially due to the GCN4 trimerization domain ablates antibody binding to the anchor epitope. Moreover, our study reveals that the cHA vaccine strategyrecalled MBCs against the anchor and CS epitopes, as these MBCs do not need to compete against MBCs targeting the immunodominant variable HA head epitopes^{3,9,17,32}. Similarly, the mini-HA/headless HA vaccine strategy has the potential to also recall MBCs against multiple epitopes of the HA stalk domain, if displayed natively^{22,33}. The addition of an oil-in-water AS03 adjuvant to the cHA was critical for recalling MBCs against the anchor epitope. Oil-in-water adjuvants largely function to emulsify antigen, which may prevent sequestration of antigen by circulating antibodies, increase delivery of free antigen to lymph nodes, and help stimulateinnate immune receptors^{34,35}. Notably, an oil-in-water adjuvanted inactivated H5N1 vaccine induced higher neutralizing antibody titers, antibodies against more HA epitopes, and higher avidity antibodies³⁶. Therefore, the inclusion of oil-in-water adjuvants may play an important role in generating bnAbs and may improve vaccine effectiveness of seasonal influenza vaccines. Together, our study shows that novel influenza vaccination strategies, such as the cHA vaccine with the AS03 adjuvant, have the capability to robustly induce antibodies against the previously unappreciated anchor epitope and can provide broad protection against H1 viruses.

### C. Materials and Methods

### 1. Study Approvals, Cohorts, and Human Materials

[2130] Human peripheral blood mononuclear cells (PBMCs) and serum were obtained from multiple donors from multiple cohorts, which is outlined in Extended Data Table 1. Informed consent wasobtained from all participants. All studies were performed with the approval of the University of Chicago Institutional Review Board (IRB; ID #09-043-A). The 2009 pH1N1 infection and 2009 MIV cohorts were also approved by the IRB at Emory University. The chimeric HA vaccine studycohort is identified as clinical trial NCT03300050 and further details on trial design are outlined elsewhere^{4,5}. The study was approved by IRBs at local clinical sites, including Icahn School of Medicine at Mount Sinai, Duke University, and Cincinnati Children's Hospital Medical Center. Allexperiments performed with mice were done in accordance with the University of Chicago and Icahn School of Medicine at Mount Sinai Institutional Animal Care and Use Committees.

### 2. Cell Lines

[2131] Human Embryonic Kidney HEK293T (female, #CRL-11268), Madin Darby canine kidney (MDCK; female, #CCL-34, NBL-2), human A549 (#CCL-185) cells were purchased andauthenticated by the American Type Culture Collection (ATCC). MDCK-SIAT1 cells were generated previously³⁷ All cells were maintained in a humidified atmosphere of 5% CO₂ at 37° C. HEK293T cells were maintained in Advanced-DMEM supplemented with 2% ultra-low IgG fetal bovine serum (FBS; Invitrogen), 1% L-glutamine (Invitrogen) and 1% antibiotic-antimycotic(Invitrogen). MDCK, MDCK-SIAT1, and A549 cells were maintained in DMEM supplemented with 10% FBS (Invitrogen), 1% L-glutamine (Invitrogen) and 1% penicillin-streptomycin (Invitrogen). Jurkat cells expressing FcgRIIIa and FcgRI with NFAT-driven luciferase reporter gene (#G7010) were acquired and validated by Promega and were directly used for ADCC assays. Cell lines were not authenticated after receiving from suppliers and were not tested for mycoplasma.

### 3. Monoclonal Antibody Production

[2132] Monoclonal antibodies were generated as previously described³⁸⁻⁴⁰. Peripheral blood was obtained from each donor approximately 7 days after vaccination or infection or obtained 28+ days post-vaccination. Lymphocytes were isolated and enriched for B cells using RosetteSep. Total PBs (CD3⁻CD19⁺CD27^{hi}CD38^{hi}; all cohorts except 2014 QIV), IgG⁺PBs (CD3⁻CD19⁺IgM⁻ CD27^{hi}CD38^{hi}IgG⁺IgA⁻; 2014 QIV), IgA⁺PBs (CD3⁻CD19⁺IgM⁻CD27^{hi}CD38^{hi}IgG⁻IgA⁺; 2014 QIV cohort), or HA⁺ bait-sorted MBCs (CD3⁻CD19⁺CD27⁺CD38^{lo/+}HA⁺, for 030-09M 1B06) weresingle-cell sorted into 96-well plates. Immunoglobulin heavy and light chain genes were amplified by reverse transcriptase polymerase chain reaction (RT-PCR), sequenced, cloned intohuman IgG1, human kappa chain, or human lambda expression vectors, and co-transfected intoHEK293T cells. Secreted mAbs were purified from the supernatant using protein A agarose beads. For mAbs generated from the 2014 QIV cohort, mAb names include the original isotype of the sorted PB, and all mAbs were expressed as human IgG1. cH5/1-binding B cells (CD19+CD27+cH5/1+) were sorted from donors 28 days after cH5/1 vaccination(NCT03300050). Cells were sorted with A/Califomia/04/2009 HA probe (for 030-09M 1B06) or cH5/1 probe, each with a Y98F mutation to ablate non-specific binding to sialic acids on B cells. MAb heavy chain and light chain sequences were synthesized from single-cell RNA-sequencingdata of cH5/1-baited B cells (IDT), and cloned into the human IgG1, human kappa chain, or human lambda expression vectors. B cell clones were determined by aligning all the V(D)J sequences sharing identical progenitor sequences, as predicted by IgBLAST using our in-house software, VGenes. Consensus sequence analysis was performed using WebLogo⁴¹ and sequence alignments were determined using Clustal Omega.

### 4. Viruses and Recombinant Proteins

[2133] Influenza viruses used in all assays were grown in-house in specific pathogen free (SPF) eggs, harvested, purified, and titered. Recombinant HA, cHA, and mini-HA were obtained from BEI Resources or generated in-house. Recombinant HA mutant proteins used in Extended Data FIG. 2 were generated with identified mutations from the deep mutational scanning experiments (see below) or with known mutations that have arisen naturally or were identified in other studies^{2,10,42-52} (Extended Data Table 3). All mutations were made on HA from A/California/July 2009 and were expressed in HEK293T cells and purified using Ni-NTA agarose beads (Qiagen).

### 5. Antigen-Specific ELISA

[2134] High protein-binding microtiter plates (Costar) were coated with 8 hemagglutination units (HAU) of virus in carbonate buffer or with recombinant HA, including HA mutants described below, at 2 μg/ml in phosphate-buffered saline (PBS) overnight at 4° C. Plates were washed the nextmorning with PBS 0.05% Tween and blocked with PBS containing 20% fetal bovine serum(FBS) for 1 hour at 37° C. Antibodies were then serially diluted 1:3 starting at 10 μg/ml and incubated for 1.5 hour at 37° C. Horseradish peroxidase (HRP)-conjugated goat anti-human IgG antibody diluted 1:1000 (Jackson Immuno Research) was used to detect binding of mAbs, and plates were subsequently developed with Super Aquablue ELISA substrate (eBiosciences). Absorbance was measured at 405 nm on a microplate spectrophotometer (BioRad). To standardize the assays, control antibodies with known binding characteristics were included on each plate, and the plates were developed when the absorbance of the control reached 3.0 OD units. All ELISAs were performed in duplicate twice. To define antibodies as targeting the H1 stalk, mAbs were tested for binding to cH5/1, which utilizes the head domain from H5-expressing viruses and the stalk domain from the pH1N1 virus⁵³, and for hemagglutination inhibition (HAI) activity against pH1N1 (A/California/July 2009). MAbs that bound the cHA and lacked HAI activity were classified as those binding the HA stalk domain. To classify antigen-specificity, mAbs that did not definitively bind the HA head or stalk are listed as binding unknownHA⁺ epitopes. Affinity measurements, as represented as K_{d} at a molar concentration (M), were calculated using Prism 9 (Graphpad) by performing a non-linear regression. All experiments were performed in duplicate and technically replicated twice.

### 6. Competition ELISAs

[2135] Plates were coated with 50 μl of A/California/July 2009 HA at a concentration of 1 μg/ml and incubated overnight at 4° C. To biotinylate the antibodies with known epitope specificities, CR9114 (CS epitope) and 047-09-4F04 (anchor epitope) were incubated at 4° C. with EZ-Link™ Sulfo-NHS-Biotin (Thermo Scientific) for 24h or 48 h prior to use, respectively. After blocking the plates with PBS 20% FBS for 1 h at 37° C., serum samples were incubated (starting dilution of 1:50 for human serum or 20 □g/ml for mAbs) in the coated wells for 2 h at room temperature. Either biotinylated CR9114 or 047-09-4F04 was then added at a concentration equal to twice its K_{d} and incubated in the wells with the serum or mAbs for 2 h at room temperature. The biotinylated antibodies were desalted before addition to remove free biotin using Zeba™ spin desalting columns, 7 k MWCO (Thermo Scientific). After washing the plates, wells were incubated with HRP-conjugated streptavidin (Southern Biotech) at 37° C. for 1 h for detection of the biotinylated antibody. Super Aquablue ELISA substrate (eBiosciences) was then added, andabsorbance was measured at 405 nm on a microplate spectrophotometer (Bio-Rad). To standardize the assays, biotinylated CR9114 or 047-09 4F04 was incubated in designated wells on each plate without any competing serum or mAb, and data were recorded when the absorbance of these wells reached an optical density (OD) of 1 to 1.5 units. After subtracting background, percent competition by serum samples was then determined by dividing a sample'sobserved OD by the OD reached by the positive control, subtracting this value from 1, and multiplying by 100. For the serum data, ODs were log transformed and analyzed by non-linear regression to determine EC₅₀ values using Prism software (Graphpad). For FIG. 4 and Extended Data FIG. 5, only donors with serum for all timepoints were included. All experiments were performed in duplicate and technically replicated twice. 7. Polyreactive ELISAs

[2136] High-protein binding microtiter plates (Costar) were coated with 10 □g/ml calf thymus dsDNA (Thermo Fisher Scientific), 2 □g/ml Salmonella enterica serovar Typhimurium flagellin(Invitrogen), 5 □g/ml human insulin (Sigma-Aldrich), 10 □g/ml KLH (Invitrogen), and 10 □g/ml Escherichia coli LPS (Sigma-Aldrich) in PBS. Plates were coated with 10 □g/ml cardiolipin in 100% ethanol and allowed to dry overnight. Plates were washed with water and blocked with PBS/0.05% Tween/1 mM EDTA. MAbs were diluted 1 □g/ml in PBS and serially diluted 4-fold andadded to plates for 1.5 hours. Plates were washed and goat anti-human IgG-HRP (Jackson Immunoresearch) was diluted 1:2000 in PBS/0.05% Tween/1 mM EDTA. Plates were washed with water and were blocked with PBS/0.05% Tween/1 mM EDTA for 5 minutes. Plates were washed again with water and were developed with Super Aquablue ELISA substrate (eBioscience) until the positive control mAb, 3H9⁵⁴, reached an A₄₅₀ of 3. All experiments were performed in duplicate and technically replicated twice. 8. Deep mutational scanning for stalk domain mutants

[2137] The mutant libraries used herein were previously described⁵⁵. The libraries consist of all single amino-acid mutations to A/WSN/1933 (H1N1). The experiments were performed by using biological triplicate libraries. The mutational antigenic profiling of the 045-09 2B06, a CS epitope-binding mAb, was performed as previously outlined⁵⁶. In brief, 10⁶ TCID₅₀ of two of the virus library biological replicates was diluted in 1 ml in IGM (Opti-MEM supplemented with 0.01% FBS, 0.3% BSA, and 100 mg/ml calcium chloride) and incubated with an equal volume of 045-09 2B06 antibody at a final concentration of 50 or 25 □g/mL for 1.5 hours at 37° C. MDCK-SIAT1cells were infected with the virus antibody mixtures. 2 hours post-infection, the media was removed, the cells washed with 1 ml PBS, and 2 ml of fresh IGM was added. 15 hours post-infection, viral RNA was extracted, reverse-transcribed using primers WSNHA-For (5′-AGCAAAAGCAGGGGAAAATAAAAACAAC-3′) and WSNHA-Rev (5′-AGTAGAAACAAGGGTGTTTTTCCTTATATTTCTG-3′), and PCR amplified according to the barcoded-subamplicon library preparation as previously described⁵. The overall fraction of virions that survive antibody neutralization was estimated using qRT-PCR targeting the viral nucleoprotein (NP) and cellular GAPDH as previously described⁵⁶. Using 10-fold serial dilutions of the virus libraries, we infected cells with no antibody selection to serve as a standard curve of infectivity. qPCR Ct values from the standard curve samples compared to the virus-antibody mixsamples are determined for NP and GAPDH. We then generate a linear regression to fit the difference between the NP and GAPDH Ct values for the standard curve samples, and then usethis curve to interpolate the fraction surviving for the antibody-virus selection samples. Across the three library replicates the fraction of virus surviving antibody selection was 0.17, 0.1, and 0.14. Illumina(R) deep sequencing data was analyzed using dms_tools2 version 2.4.12 software package⁵⁷ which can be found at https://github.com/jbloomlab/dms_tools2. All of the computer code used is at https://github.com/jbloomlab/2B06_DMS, and the Jupyter notebook that performs most of the analysis is at https://github.com/jbloomlab/2B06_DMS/blob/master/analysis_notebook.ipynb. The sequencing counts were processed to estimate the differential selection for each mutation, which is the log enrichment of that mutation in the antibody-selected condition versus the control56. The numerical measurements of the differential selection that 2B06 imposes on each mutation can be found here: https://github.com/jbloomlab/2B06_DMS/blob/master/results/diffsel/tidy_diffsel.csv.

### 9. Deep Mutational Scanning for H1 Variants

[2138] Amino-acid preferences for the hemagglutinin (HA) ofA/WSN/1933 (H1N1) were previously determined⁵⁵. Briefly, deep mutational scanning was performed by passaging virus libraries at a low MOI in MDCK-SIAT1 cells. Following deep sequencing of the resulting virus, amino-acid preferences were determined using the Python package dms_tools (http://jbloomlab.github.io/dms_tools/), version 1.1.12. This program aligns subamplicon reads to the reference HA sequence, counts the number of mutations at each amino-acid site, and determines amino-acid preferences based on the mutation counts pre- and post-selection.

### 10. Microneutralization Assays

[2139] Microneutralization assays for mAb characterization were carried out as previously described^{58,59}. MDCK cells were maintained in DMEM supplemented with 10% FBS, 1% penicillin-streptomycin, and 1% L-glutamine at 37° C. with 5% CO₂. The day before the experiment, 25,000MDCK cells were added to each well of a 96-well plate. Serial two-fold dilutions of mAb were mixed with an equal volume of 100 TCID₅₀ of virus for 1 hour and added to MDCK cells for 1 hour at 37° C. The mixture was removed, and cells were cultured for 20 hours at 37° C. with 1× MEM supplemented with 1 μg/ml tosyl phenylalanyl chloromethyl ketone (TPCK)-treated trypsin and appropriate mAb concentration. Cells were washed twice with PBS, fixed with 80% ice cold acetone at −20° C. for at least 1 hour, washed 3 times with PBS, blocked for 30 min with 3% BSA-PBS, and then treated for 30 min with 2% H₂O₂. Cells were incubated with a mouse anti-nucleoprotein antibody (1:1000; Millipore) in 3% BSA-PBS for 1 hour at room temperature (RT), followed by goat anti-mouse IgG HRP (1:1000; Southern Biotech) in 3% BSA-PBS for 1 hour at RT. The plates were developed with Super Aquablue ELISA substrate at 405 nm until virus only controls reached an OD of 1. The signal from uninfected wells was averaged to represent 100% inhibition. The signal from infected wells without mAb was averaged to represent 0% inhibition. Duplication wells were used to calculate the mean and SD of neutralization, and inhibitory concentration 50 (IC₅₀) was determined by a sigmoidal dose response curve. The inhibition ratio (%) was calculated as: ((OD Pos. Control−OD Sample)/(OD Pos. Control−OD Neg. Control))*100. The final IC₅₀ was determined using Prism software (GraphPad). All experiments were performed in duplicate and technically replicated twice.

### 11. H2N2 Neutralization Assays

[2140] Twenty thousand MDCK cells were seeded per well in a 96-well cell culture plate (Corning) and the cells were used the next morning to perform the neutralization assay. Antibody dilutionswere prepared starting at 30 □g/ml with 3-fold subsequent dilutions in 1× MEM. Each respective dilution was mixed with 10,000 PFUs of cold adapted A/Ann Arbor/June 1960 (H2N2) virus for 1 hour at room temperature. After an hour, cells were washed with PBS and 100 □l of antibody-virus mixture was added onto the cells for 1 hour at 37° C. Next, antibody-virus mixture was removed and 60 μl of 1× MEM containing TPCK was added to each well. 60 □l of each corresponding antibody dilution was also added to each well and the cells were incubated at 33° C. for 3 days. On the 3rd day, a hemagglutination assay was performed using turkey red blood cells to assess the HAU at each antibody dilution.

### 12. In Vivo Challenge Infections

[2141] MAb cocktails (FIG. 6b) were passively transferred into 6- to 8-week-old female BALB/c mice (Jackson Laboratories) by intraperitoneal injection of 0.2, 1, and 5 mg/kg mAb cocktail, which are further detailed in Supplementary Table 1. Negative control mice received 5 mg/kg of the anthrax-specific mAb 003-15D03 as an isotype control. MAbs were administered two hours before infection for prophylactic treatment and 48 hours post infection for therapeutic treatment. For prophylactic mAb studies with A/Netherlands/602/2009 (FIG. 7a), mice were anesthetized with isoflurane and intranasally challenged with 10 LD₅₀ of mouse-adapted A/Netherlands/602/2009 H1N1 virus, with 10 μl of virus administered into each nostril (20 μl total). For therapeutic treatment of A/Netherlands/602/2009 and prophylactic treatment of A/Fort Monmouth/January 1947, mice were anesthetized with a ketamine-xylazine-water cocktail (0.15 mg ketamine/kg and 0.03 mg/kg xylazine; 100 ml intraperitoneally) and infected with 10 LD₅₀ of A/Netherlands/602/2009 or A/Fort Monmouth/January 1947. As a read out, survival and weight loss were monitored 1-2 times daily for two weeks. Mice were euthanized upon 25% weight loss or at the end of the experiment (14 days post challenge). 5 mice/condition/experiment with 2 biological replicates were utilized based on a previously performed power analysis. Data were pooled for analysis.

[2142] To determine differences in lung viral load, 5 mg/kg of the antibody cocktails were administered prophylactically as described above. Two hours after mAb administration, mice (n=5 mice/group) were anesthetized and intranasally challenged with 1 LD₅₀ of A/Netherlands/602/2009. Lungs were collected at day 3 and day 6 post infection, homogenized and viral load determined via plaque assay. All experiments were done in accordance with the University of Chicago and Icahn School of Medicine at Mount Sinai Institutional Animal Care andUse Committees. Animals studies were not blinded.

### 13. Plaque Assay

[2143] For determination of viral load in murine lung tissues a standard plaque assay was performed. Confluent monolayers of MDCK cells were infected with serial dilutions of homogenized lung tissue ranging from 1:10 to 1:1000000 diluted in 1× MEM (1% penicillin/streptomycin antibiotics mix, 1% HEPES, 1% L-Glutamine and 1% sodium-bicarboante (Gibco)) for 1 hour at 33° C., with shaking every 15 minutes. Afterwards, an overlay containing 2% Oxoid agar (ThermoFisher), H₂O, 2×MEM, DEAE, and TPCK-treated trypsin was added to the cells. The plates wereincubated at 33° C. for 3 days and then fixed with 3.7% paraformaldehyde overnight at 4° C. Plaques were visualized by immunostaining. Here, the agar overlay was removed and the platesblocked with 3% milk/PBS. The blocking solution was removed and primary antibody ((H1N1 guinea pig anti-sera (generated in house)) diluted 1:3000 in 1% milk/PBS was added for 1 hour. The plates were washed 3× with PBS and secondary antibody (anti-mouse IgG H&L peroxidase-conjugated (Rockland) diluted 1:3000 in 1% milk/PBS was added for 1 hour. The plates were washed 3× with PBS and developed by using KPL TrueBlue Peroxidase Substrate (SeraCare).

[2144] Antibody-dependent cellular cytotoxicity reporter assay A549 cells were maintained in DMEM supplemented with 10% FBS, 10 U/ml Penicillin, and 10 mg/ml Streptomycin) and were plated in 96-well, white-walled plates (Costar) at 2.5×10⁵ cells/ml overnight at 37° C. with 5% CO₂. The following day, cells were washed with PBS and infected with A/Netherlands/602/2009 at a multiplicity of infection of 5 in UltraMDCK media (Lonza) for24 hours in the absence of TPCK-treated trypsin. MAbs were serially diluted in assay buffer (RPMI 1640 supplemented with 4% ultra-low IgG FBS; Gibco), starting at 60 μg/ml and diluted 3-fold. Aspirate cell medium and add 25 μl of assay buffer and 25 μl of diluted antibody to each well. Jurkat cells expressing human FcgRIIIa with NFAT-driven luciferase reporter gene (Promega) were diluted to 3×10⁶ cells/ml, 25 μl of cells was added to each well and incubated at 37° C. with 5% CO₂ for 6 hours. Plates were removed from incubator and placed at roomtemperature for 15 minutes. 75 μl BioGlo luciferase substrate (Promega) was added to eachwell and luminescence was read immediately using a Syngery H1 hybrid multimode microplate reader (Biotek). EC₅₀ values were determined using Prism 8 (GraphPad).

### 14. HA:Antibody Binding Footprint Mapping

[2145] The footprints of three mAbs (FISW84 (PDB: 6HJQ), CR9114 (PDB: 4FQI), and FI6v3 (PDB: 3ZTN)) were mapped onto one HA protomer (A/California/April 2009, PDB: 4M4Y) using UCSF Chimera⁶⁰ and Adobe Photoshop. Negative stain EM maps of HA:Fab complexes were aligned in UCSF Chimera and estimated footprints were mapped onto one HA protomer. Individual protomers of the HA trimer are indicated in different shades of gray.

### 15. Negative Stain EM

[2146] Immune complexes were prepared by incubating Fab with HA (A/California/April 2009 with E376K or E376G stabilizing mutations) at greater than 3:1 molar ratio for 2 hours at room temperature (RT). Samples were deposited at −1011 g/mL on glow-discharged, carbon-coated 400 mesh copper grids (Electron Microscopy Sciences, EMS) and stained with 2% w/v uranyl formate. Samples were imaged at 52,000× magnification, 120 kV, on a Tecnai Spirit T12 microscope equipped with an Eagle CCD 4k camera (FEI) or 62,000 magnification, 200 kV, on a Tecnai T20 microscope equipped with a CMOS 4k camera (TVIPS). Micrographs were collected with Leginon, single particles were processed with Appion, Relion, and XQuartz, and footprints were mapped with UCSF Chimera, and figures were made with UCSF Chimera⁶⁰⁻⁶³.

### 16. Cryo-EM

[2147] 222-1C06 and 045-09 2B05 Fabs were incubated at greater than 3:1 molar ratio with HA (A/California/July 2009, E376K) for 1 hour at room temperature. 045-09 2B05 Fab, targeting the lateral patch, was added to the immune complex to induce particle tumbling and increase angular sampling³. Using a ThermoFisher Vitrobot, the immune complex (0.5 mg/ml) incubated with lauryl maltose neopentyl glycol (5 μM, Anatrace) was deposited onto glow-discharged Au 1.2/1.3 300 mesh grids (Electron Microscopy Sciences), blotted for 7 seconds, and plunge-frozen in liquid ethane. Samples were imaged at 36,000× nominal magnification on a 200 kV Talos Arctica electron microscope (FEI) with a CETA 4K CMOS camera (FEI, total dose 49.92 e/A²) and Gatan K2 Summit detector in counting mode. 2243 micrographs were collected, aligned, and CTF-corrected using Leginon, MotionCor2 in Appion, and Patch-CTF in CryoSPARC2, respectively^{61,62,64,65}. In CryoSPARC2, particles were picked using apo HA templates, selected through reference-free 2D classification, and reconstructed through 3Dclassification and refinement. The final map resolved to a global 3.75 Å resolution with C3 symmetry and 44,224 particles. Figures were made in Prism 8 (GraphPad) and UCSF Chimera⁶⁰.

### 17. Model Building and Refinement

[2148] A predicted model of 222-1C06 Fab was generated using abYsis (http://www.abysis.org/abysis/)and docked into EM density along with an initial model of CA09 H1 HA+045-09 2B05 (PDB: 7MEM). The initial model was iteratively refined using COOT and Rosetta⁶⁶′6⁷. The final model was numbered using the H3 and Kabat numbering schemes. The final model and map were evaluated using MolProbity, EMRinger^{68,69}, Phenix, and the PDB validation server. After modeling the immune complex, we segmented the Fab density from HA in the cryo-EM map andmapped the footprint of the 222-1C06 model in the HA density. Cryo-EM data collection and refinement statistics are included in Extended Data Table 4.

### 18. EMPEM

[2149] Human serum samples were heat-inactivated at 55° C. for 30 min before incubating on Capture Select IgG-Fc (ms) Affinity Matrix (Fisher) to bind IgG at 4° C. for 72 hours on a rotator. Samples with IgG bound to resin were centrifuged at 4,000 rpm and supernatant was collected. IgG samples were washed 3 times with PBS followed by centrifugation to remove supernatant. Samples were buffer exchanged into buffer containing 100 mM Tris, 2 mM EDTA, and 10 mM L-cysteine through centrifugation with Amicon filters, then incubated with papain for 4 hours at 37° C. shaking at 80 rpm. The digestion reactions were quenched with 50 mM iodoacetamide, buffer exchanged to TBS, and separated by size-exclusion chromatography (SEC) with aSuperdex 200 increase 10/300 column (GE Healthcare). Fab and undigested IgG were collectedand concentrated and 500 μg Fab was complexed with 10 □g HA for 18 hours at room temperature. Reactions were purified by SEC and immune complexes were collected andconcentrated. Negative stain EM grids were prepared as described above.

### 19. Membrane-Bound HA and mAb Staining

[2150] HEK293T cells were plated into a 6-well plate and transfected overnight with 0.2 μg of plasmid and 10 μg/ml PEI. After 12-16 hours, media was replaced with PFHM-II (Gibco) and cells were rested for 3 days. Transfected cells were trypsinized, washed, and aliquoted. Cells were stainedwith 10 μg/ml of individual mAbs for 30 minutes. Cells were washed and stained with anti-human IgG Fc-BV421 for 30 minutes. Cells were washed 2 times and run on a BD LSRFortessaand collected with BD FACSDiva software. Data were analyzed using FlowJo v10.

### 20. Single-Cell RNA-Seq and Repertoire Analysis

[2151] cH5/1+ memory B cells (CD19+CD27+HA+) were bulk sorted and partitioned into nanoliter-scale Gel Bead-In-Emulsions (GEMs) to achieve single cell resolution using the 10× Genomics Chromium Controller and according to the manufacturer's instruction (10× Genomics). The sorted single cells were processed according to 5′ gene expression and B cell Immunoglobulin (Ig) enrichment instruction to prepare the libraries for sequencing. Libraries were sequenced using an Illumina HiSeq 4000 at Northwestern University or an Illumina NextSeq 500 at the University of Chicago. Cellranger Single-Cell Software Suite (version 3.0) was used to perform sample de-multiplexing, barcode processing, and single-cell 5′ and V(D)J counting, and Cellranger mkfastq was used to de-multiplex raw base call (BCL) files into sample-specific fastq files. Subsequently, GRCh38-1.2.0 and cellranger-vdj-GRCh38-alta-ensembl-2.0.0 were used as references for the transcriptome and V(D)J assembly, respectively. Cellranger counts and Cellranger vdj package were used to identify gene expression and assemble V(D)J pairs of antibodies.

[2152] Single cell datasets were analyzed using Seurat 3 toolkit (Version 3.2.0). We performed conventional pre-process steps for all 20 donors including cell quality control (QC),normalization, identification of highly variable features, data scaling, and linear dimensional reduction. More specifically, we only kept cells with more than 200 and less then 2500 detected genes for QC step. We also filtered out cells with high mitochondrial gene expression using a “softThreshold” function in the R package LinQ-View (Version 0.99)⁷⁰. We normalized the RNA data using conventional log normalization. We identified 2000 highly variable genes for each dataset and performed principle component analysis (PCA) in linear dimensional reduction step. We then integrated all 20 single cell datasets from vaccinated participants to remove batch effects using the Anchor method in Seurat 3. In this analysis, we filtered our dataset and only kept cells with both transcriptome and full length and paired heavy and light chain V(D)Jsequences (n=1952). From these cells, we identified a group of “VH1-69/Kappa” B cells that used the VH1-69 gene and kappa light chain, which is enriched for B cells targeting the BN stalkepitope. We also identified a group of “anchor epitope” specific B cells by the following rules: 1) VH locus: VH3-23, VH3-30, VH3-30-3, or VH-3-48; 2) VK locus: VK3-11 or VK3-15; 3) JK locus: JK4 or JK5; 4) K-CDR3 length equal to 10; 5) a “NWP” pattern in K-CDR3 peptide.HA conservation modeling Pan-H1 conservation models are based on consensus strains (listed in Supplementary Table 4) of distinct H1 clades isolated from humans, swine, and avian sources, as described in Zhuanget al.⁷¹ and inclusion of the Eurasian swine-like A/swine/Jiangsu/J004/2018²³. To generate the group 1 HA conservation model, we selected one representative sequence for each group 1 HA subtype from FluDB (https://www.fludb.org/; Supplementary Table 5) according to a prior study⁷². A multiple sequence alignment from these HA protein sequences was generated using MUSCLE⁷³ and the conservation of each residue was quantified using an entropy model⁴¹. Seasonal H1 conservation models are based on consensus strains ofHIN1 viruses (59 strains total) circulating between 1918-1957 and 1976-2019, which was previously described³. Amino acid alignments and H3 numbering were performed using Librator⁷⁴ and Burke and Smith HA numbering⁷².

### 21. Structure Prediction

[2153] To predict the structures of the investigated Fv fragments (222-1C06, FISW84, 241 IgA 2F04 and SFV009 3G01) with A/California/April 2009 E47G HA (PDB:7MEM) we applied the program Rosettaantibody^{67,75,76}. The Fvs were protonated using the Protonate 3D tool^{77,78}. Charge neutrality was ensured by utilizing the uniform background plasma approach in AMBER^{79,80}. Using the tleap tool of the AmberTools20⁸¹ package, the structure models were soaked in cubic water boxes of TIP3P water molecules with a minimum wall distance of 10 Å to the proteins². Parameters for all antibody models derive from the AMBER force field 14SB⁸³. The Fvs were carefully equilibrated using a multistep equilibration protocol⁸⁴.

### 22. Metadynamics Simulations

[2154] To enhance the sampling of the conformational space, well-tempered bias-exchange metadynamics⁸⁵⁻⁸⁷ simulations were performed in GROMACS^{88,89} with the PLUMED 2 implementation⁹⁰. We chose metadynamics as it enhances sampling on predefined collective variables (CV). The sampling is accelerated by a history-dependent bias potential, which is constructed in the space of the CVs⁸⁵⁻⁵⁶⁻⁹¹. As collective variables, we used a well-established protocol, boosting a linear combination of sine and cosine of the ψ torsion angles of all six CDR loops calculated with functions MATHEVAL and COMBINE implemented in PLUMED 2⁹⁰. As discussed previously, the ψ torsion angle captures conformational transitions comprehensively⁹². The underlying method presented in this paper has been validated in various studies against a large number of experimental results⁹³. The simulations were performed at 300 K in an NpT ensemble using the GPU implementation of the pmemd module⁹⁴ to be as close to the experimental conditions as possible and to obtain the correct density distributions of both protein and water. We used a Gaussian height of 10.0 kJ/mol and a width of 0.3 rad. Gaussian deposition occurred every 1000 steps and a biasfactor of 10 was used. 500 ns of bias-exchange metadynamics simulations were performed for the prepared Fv structures. The resulting trajectories were aligned to the whole Fv and clustered with the program cpptraj^{80,95} using the average linkage hierarchical clustering algorithm with a RMSD cut-off criterion of 1.2 Å resulting in a large number of clusters. The cluster representatives for the antibody fragments were equilibrated and simulated for 100 ns using the AMBER 20⁸¹ simulation package.

### 23. Molecular Dynamics Simulations

[2155] Molecular dynamics simulations were performed in an NpT ensemble using the pmemd.cuda module of AMBER 20⁸⁰. Bonds involving hydrogen atoms were restrained with the SHAKEalgorithm⁹⁶, allowing a time step of 2.0 fs. Atmospheric pressure (1 bar) of the system was set by weak coupling to an external bath using the Berendsen algorithm⁹⁷. The Langevin thermostat⁹⁸ used to maintain the temperature during simulations at 300 K. With the obtained trajectories we performed a time-lagged independent component analysis (tICA) using the python library PyEMMA 2 employing a lag time of 10 ns. tICA was applied to identify the slowest movements of the investigated Fab fragments and consequentlyto obtain a kinetic discretization of the sampled conformational space”⁹. Based on the tICA conformational spaces, thermodynamics and kinetics were calculated with a Markov-state modello¹⁰⁰ of all 6 CDR loops by using PyEMMA 2. The resulting kinetically dominant ensemble insolution was further used to predict the interactions of H1 with the Fvs. To model the complex and to predict interactions in the binding interface, we used the crystal structure of the full-lengthinfluenza hemagglutinin (PDB:7MEM) as template structure. In addition, the obtained complex structure was further minimized and equilibrated.

### 24. Statistical Analysis

[2156] All statistical analyses were performed using Prism software (Graphpad Version 8 and 9) or R. Sample sizes (n) for the number of mAbs tested are indicated in corresponding figures or in the center of pie graphs. Number of biological repeats for experiments and specific tests for statistical significance used are indicated in the corresponding figure legends. P values less than or equal to 0.05 were considered significant. * P≤0.05, ** P≤0.01, *** P≤0.001, **** P≤0.0001.

### 25. Data Availability

[2157] Repertoire data generated from single cell RNA-sequencing data is deposited at Mendeley Data(https://data.mendeley.com/datasets/jzsx489pmk/1). Accession numbers for all other anchor-targeting mAbs are included in Supplementary Table 6. Electron microscopy maps were deposited
[2158] to the Electron Microscopy DataBank under accession IDs: D_100025433, D_1000254374, D_1000254375, D_1000254376, D 1000254377, D_1000254378, D 1000254383, D_1000254384, D_1000254385, D 1000254386, D_1000254388, D_1000254379, D 1000254391, and D_1000254382. All next generation sequencing data for 045-09 2B06 deep mutational scanning and for the H1N1 mutational scanning can be found on the Sequence Read Archive under BioProject accession number PRJNA309339. The following Protein Database accession numbers were downloaded and included in the manuscript-6HJQ, 3SDY, 4NM8, 6HJQ, 4M4Y, 4WE4, 4JTV, 4FQI, 3ZTN, and 7MEM. All source data are includedwith the manuscript.

### D. Tables

TABLE 1
Extended Data:
Donor information and demographics. Related to FIG. 1.

| Donor | Vaccine/Infection | Age | Sex |
|---|---|---|---|
| 029-09 | 2009 MIV | 24 | M |
| 030-09 | 2009 MIV | 31 | F |
| 045-09 | 2009 MIV | 24 | M |
| 047-09 | 2009 MIV | 22 | M |
| 051-09 | 2009 MIV | 42 | M |
| SFV005 | 2009 MIV | 60 | F |
| SFV009 | 2009 MIV | 31 | F |
| SFV015 | 2009 MIV | 48 | F |
| SFV018 | 2009 MIV | 58 | F |
| SFV019 | 2009 MIV | 48 | F |
| SFV020 | 2009 MIV | 64 | F |
| sc70 | 2009 pH1N1 Infection | 38 | F |
| sc1009 | 2009 pH1N1 Infection | 21 | M |
| SF1000 | 2009 pH1N1 Infection | 37 | M |
| 008-10 | 2010 TIV | 26 | F |
| 011-10 | 2010 TIV | 30 | M |
| 014-10 | 2010 TIV | 27 | M |
| 017-10 | 2010 TIV | 24 | M |
| 019-10 | 2010 TIV | 22 | F |
| 028-10 | 2010 TIV | 38 | M |
| 034-10 | 2010 TIV | 39 | F |
| 039-10 | 2010 TIV | 25 | M |
| 051-10 | 2010 TIV | 43 | M |
| 220-14 | 2014 QIV | 24 | F |
| 221-14 | 2014 QIV | 34 | F |
| 236-14 | 2014 QIV | 32 | F |
| 237-14 | 2014 QIV | 32 | F |
| 240-14 | 2014 QIV | 28 | M |
| 241-14 | 2014 QIV | 29 | F |

| | | | | |
|---|---|---|---|---|
| 121/324 | (d8/d113) | cHA - Group 4 | 24 | F |
| 222/310 | (d92/d113) | cHA - Group 1 | 25 | F |

| | | | |
|---|---|---|---|
| 301 | cHA - Group 4 | 34 | F |
| 308 | cHA - Group 1 | 29 | F |
| 311 | cHA - Group 4 | 28 | M |
| 317 | cHA - Group 1 | 37 | M |
| 319 | cHA - Group 1 | 31 | F |
| 322 | cHA - Group 4 | 20 | F |
| 326 | cHA - Group 2 | 27 | M |
| 327 | cHA - Group 1 | 22 | F |
| 328 | cHA - Group 2 | 40 | M |
| 334 | cHA - Group 1 | 33 | M |
| 336 | cHA - Group 1 | 36 | F |
| 337 | cHA - Group 1 | 27 | F |
| 342 | cHA - Group 2 | 22 | M |
| 343 | cHA - Group 4 | 27 | M |
| 346 | cHA - Group 2 | 20 | F |
| 347 | cHA - Group 1 | 31 | F |
| 350 | cHA - Group 1 | 35 | F |
| 351 | cHA - Group 4 | 27 | F |

Footnote:
2009 MIV—2009 pandemic H1N1 monovalent inactivated influenza vaccine; pH1N1—2009 pandemic H1N1 virus; 2010 TIV—2010-2011 trivalent inactivated influenza vaccine; 2014 QIV—2014-2015 quadrivant inactivated influenza vaccine; cHA—Group 1, primed with cH8/1 LAIV and boosted with cH5/1 IIV + AS03; cHA—Group 2, primed with cH8/1 LAIV and boosted with cH5/1 IIV; cHA—Group 4, primed with cH8/1 IIV + AS03 and boosted with cH5/1 IIV + AS03. LAIV—live-attenuated influenza vaccine; IIV—inactivated influenza vaccine; AS03—Adjuvant System 03.

TABLE 2
Extended Data:
Anchor epitope-binding mAb information. Related to FIG. 1 and 2.

| | Cellular | | | | HC Clone | | | KC Clone |
|---|---|---|---|---|---|---|---|---|
| mAb | Source | VH | DH | JH | # | VK | JK | # |
| 030-09 3E05 | Plasmablast | 3-23 | 3-22 | 4 | Non-clonal | 3-15 | 5 | 9 |
| 030-09M 1B06 | MBC | 3-23 | 3-10 | 4 | Non-clonal | 3-11 | 5 | 7 |
| 045-09 1A03 | Plasmablast | 3-23 | 6-13 | 4 | Non-clonal | 3-11 | 4 | 6 |
| 045-09 2B03 | Plasmablast | 3-23 | 5-12 | 4 | Non-clonal | 3-11 | 5 | 7 |
| 047-09 4F04 | Plasmablast | 3-48 | 6-19 | 4 | Non-clonal | 3-15 | 4 | 8 |
| SFV009 3D04 | Plasmablast | 3-23 | 2-2 | 4 | Non-clonal | 3-15 | 4 | 8 |
| SFV009 3G01 | Plasmablast | 3-30 | 3-16 | 4 | Non-clonal | 3-11 | 5 | 7 |
| SFV009 3G03 | Plasmablast | 3-23 | 3-15-3 | 5 | Non-clonal | 3-11 | 5 | 7 |
| 236 IgG 1A02 | Plasmablast | 3-23 | 2-2 | 4 | 2 | 3-11 | 5 | 7 |
| 236 IgG 1D01 | Plasmablast | 3-23 | 6-19 | 4 | Non-clonal | 3-11 | 5 | 7 |
| 236 IgG 1F01 | Plasmablast | 3-23 | 2-2 | 4 | 2 | 3-11 | 5 | 7 |
| 236 IgA 1F06 | Plasmablast | 3-23 | 2-2 | 4 | 2 | 3-11 | 5 | 7 |
| 241 IgG 2A06 | Plasmablast | 3-23 | 6-19 | 5 | Non-clonal | 3-15 | 4 | 8 |
| 241 IgA 1D05 | Plasmablast | 3-23 | 5-18 | 4 | 3 | 3-15 | 5 | 9 |
| 241 IgA 2F04 | Plasmablast | 3-23 | 2-21 | 4 | 3 | 3-15 | 5 | 9 |
| 241 IgA 2F06 | Plasmablast | 3-23 | 3-9 | 4 | 3 | 3-15 | 5 | 9 |
| 121 2C06 | Plasmablast | 3-23 | 2-15 | 4 | Non-clonal | 3-15 | 4 | 8 |
| 222 1C06 | Plasmablast | 3-48 | 2-15-2 | 4 | Non-clonal | 3-15 | 4 | 8 |
| 301_91 | MBC | 3-23 | 3-9 | 5 | Non-clonal | 3-11 | 5 | 7 |
| 301_249 | MBC | 3-48 | 5-24 | 3 | Non-clonal | 3-11 | 4 | Non-clonal |
| 301_275 | MBC | 3-23 | 2-21 | 4 | 1 | 3-15 | 4 | 8 |
| 308_60 | MBC | 3-23 | 1-26 | 4 | Non-clonal | 3-11 | 4 | 8 |
| 310_10 | MBC | 3-23 | 1-14 | 4 | Non-clonal | 3-15 | 4 | 8 |
| 310_49 | MBC | 3-23 | 3-22 | 4 | Non-clonal | 3-15 | 5 | 9 |
| 317_30 | MBC | 3-23 | 6-13 | 4 | Non-clonal | 3-15 | 4 | 8 |
| 317_117 | MBC | 3-23 | 2-2 | 4 | Non-clonal | 3-15 | 5 | 9 |
| 319_75 | MBC | 3-23 | 3-22 | 3 | Non-clonal | 3-11 | 5 | 7 |
| 319_147 | MBC | 3-48 | 3-15-3 | 6 | Non-clonal | 3-15 | 4 | 8 |
| 319_345 | MBC | 3-23 | 3-9 | 4 | 4 | 3-15 | 4 | 8 |
| 319_373 | MBC | 3-23 | 6-19 | 4 | 4 | 3-15 | 4 | 8 |
| 322_48 | MBC | 3-23 | 1-26 | 4 | 1 | 3-15 | 5 | 9 |
| 324_5 | MBC | 3-23 | 2-21 | 3 | Non-clonal | 3-15 | 5 | 9 |
| 326_38 | MBC | 3-23 | 1-26 | 4 | Non-clonal | 3-11 | 4 | 6 |
| 326_42 | MBC | 3-23 | 3-16 | 5 | Non-clonal | 3-15 | 4 | 8 |
| 326_50 | MBC | 3-30 | 5-12 | 4 | Non-clonal | 3-15 | 5 | 9 |
| 327_32 | MBC | 3-23 | 3-10 | 4 | Non-clonal | 3-15 | 4 | 8 |
| 334_52 | MBC | 3-48 | 6-13 | 6 | 5 | 3-15 | 4 | 8 |
| 334_53 | MBC | 3-23 | 2-2 | 4 | Non-clonal | 3-15 | 5 | 9 |
| 334_62 | MBC | 3-23 | 2-2 | 1 | Non-clonal | 3-11 | 4 | 6 |
| 337_32 | MBC | 3-30 | 5-24 | 4 | Non-clonal | 3-11 | 5 | 7 |
| 337_43 | MBC | 3-23 | 5-24 | 4 | Non-clonal | 3-15 | 4 | 8 |
| 337_95 | MBC | 3-48 | 3-16 | 6 | Non-clonal | 3-15 | 5 | 9 |
| 346_54 | MBC | 3-30-3 | 3-16 | 5 | Non-clonal | 3-11 | 4 | 6 |
| 347_64 | MBC | 3-23 | 1-7 | 2 | Non-clonal | 3-11 | 5 | 7 |
| 347_246 | MBC | 3-23 | 1-1 | 5 | Non-clonal | 3-15 | 5 | 9 |
| 350_8 | MBC | 3-23 | 3-16 | 4 | Non-clonal | 3-15 | 4 | 8 |
| 350_22 | MBC | 3-23 | 6-19 | 4 | Non-clonal | 3-11 | 4 | 6 |
| 350_132 | MBC | 3-48 | 1-26 | 4 | Non-clonal | 3-15 | 4 | 8 |
| 350_145 | MBC | 3-48 | 4-17 | 6 | 5 | 3-15 | 4 | 8 |
| 351_38 | MBC | 3-23 | 6-13 | 4 | Non-clonal | 3-15 | 4 | 8 |
| 351_93 | MBC | 3-23 | 1-1 | 4 | Non-clonal | 3-15 | 4 | 8 |
| 351_139 | MBC | 3-23 | 5-24 | 4 | Non-clonal | 3-11 | 4 | 6 |

TABLE 3
Extended Data:
Mutation information for FIG. 6f-g.

| | Naturally | 045-09 2B06 Deep | Other Experimentally | | |
|---|---|---|---|---|---|
| Mutation | Occurring? | Mutational Scan? | Determined? | Note | Source |
| H38S (HA1) | | No | Yes | Affects C179 binding | ⁴² |
| L292R (HA1) | | Yes | | In footprint of many VH1-69 utilizing mAbs | ⁴³ |
| I323V (HA1) | Yes | No | | Present in pH1N1 viruses | ⁴⁴ |
| K368D (HA2) | | Yes | Yes | Contacts with VH3-30 mAb | ⁴⁵ |
| Q371E (HA2) | | Yes | Yes | Interact with CR9114 and FI6v3 | ⁴⁶ |
| A373V (HA2) | | No | Yes | Expands in presence of stalk binding mAbs, | ^{2, 47} |
| | | | | escape mutant of 6F12 | |
| I374L (HA2) | | Yes | Yes | Mutation associated with resistance to group 1 | ^{46, 48, 49} |
| | | | | neutralizing stalk mAbs | |
| D375R (HA2) | | Yes | | Pre-pH1N1 viruses express N375 | |
| E376K (HA2) | Yes | Yes | | Associated with HA protein stability | ⁵⁰ |
| T378R (HA2) | | Yes | | Mutation associated with resistance to group 1 | ^{48, 49} |
| | | | | neutralizing stalk mAbs | |
| N379R (HA2) | | Yes | | Interacts with CR9114 | ¹⁰ |
| V381A (HA2) | | No | Yes | Affects FI6v3 mAb binding | ⁴⁶ |
| I385A (HA2) | | No | Yes | Affects F10 mAb binding | ⁵¹ |
| E386K (HA2) | | Yes | | Critical residue for membrane fusion | ⁵² |

TABLE 4
Extended Data:
Cryo-EM data collection and refinement statistics for
222-1C06 binding H1. Related to FIG. 2.

| | (EMDB-25655) |
|---|---|
| | (PDB 7T3D) |
| Data collection and processing | |
| Magnification | 36,000 |
| Voltage (kV) | 200 |
| Electron exposure (e−/Å²) | 49.9 |
| Defocus range (μm) | −0.8 to −1.8 |
| Pixel size (Å) | 1.15 |
| Symmetry imposed | C3 |
| Initial particle images (no.) | 92,514 (post 2D |
| | classification) |
| Final particle images (no.) | 48,846 |
| Map resolution (Å) | 3.38 |
| FSC threshold | 0.143 |
| Map resolution range (Å) | 3.2-4.4 |
| Refinement | |
| Initial model used (PDB code) | 7MEM |
| Model resolution (Å) | 3.5 |
| FSC threshold | 0.5 |
| Map sharpening B factor (Å²) | −88.1 |
| Model composition | |
| Non-hydrogen atoms | 22122 |
| Protein residues | 2796 |
| Ligands | NAG:21 |
| R.m.s. deviations | |
| Bond lengths (Å) | 0.022 |
| Bond angles (°) | 1.732 |
| Validation | |
| MolProbity score | 0.9 |
| Clashscore | 1.54 |
| Poor rotamers (%) | 0 |
| Ramachandran plot | |
| Favored (%) | 98.40 |
| Allowed (%) | 1.96 |
| Disallowed (%) | 0.00 |

SUPPLEMENTARY TABLE 1
mAbs used in cocktails for in vivo studies and neutralization
potency against A/Netherlands/602/2009.

| | | A/Netherlands/602/2009 IC₅₀ |
|---|---|---|
| mAb name | Epitope Specificity | (μg/ml) |
| 241 IgG 2A06 | Anchor | 22.99 |
| 047-09 4F04 | Anchor | 66.63 |
| 030-09 3E05 | Anchor | 39.71 |
| SFV009 3G01 | Anchor | 7.588 |
| 236 IgG 1A02 | Anchor | 66.88 |
| 045-09 2B06 | Central Stalk | 55.03 |
| SFV005 2G02 | Central Stalk | 9.342 |
| SFV019 4E03 | Central Stalk | 7.221 |
| 220 IgG 1A05 | Central Stalk | 9.536 |
| 241 IgA 2E06 | Central Stalk | 10.40 |

SUPPLEMENTARY TABLE 2
HA and 222-1C06 Fab interactions.

| HA Residues | Fab |
|---|---|
| S361 | K-CDR3 N93 |
| Q356 | K-CDR3-W94 |
| | H-CDR3 W99 |
| | H-CDR2 Y58 |
| E358 | H-CDR2 Y58 |
| backbone | |
| Aromatic Pocket: | Aromatic Pocket: |
| W343 | H-CDR3 W99 |
| H354 | H-CDR3 P100 |
| Y363 | K-CDR3 W94 |
| backbone | K-CDR1 R30 |
| positions 344-345 | |

SUPPLEMENTARY TABLE 3
Fab:Fab interactions of 222-1C06.
Fab:Fab interactions
Intra-fab aromatic pocket

K-CDR3 W94, P95, P96 -
Heavy Chain W47, Y50, Y59, W99, Y100c
K-CDR3 W94 - K-CDR3 P95
K-CDR3 P95 - HCDR2 Y59
K-CDR3 W94 - H-CDR3 Y100c
K-CDR3 P96 - H-FR2 W47

SUPPLEMENTARY TABLE 4
Reference H1 strains used in FIG. 2j.

| Subtype | Strain Name |
|---|---|
| H1N1 | A/Quebec/25/2013 |
| H1N1 | A/Czech Republic/4/2016 |
| H1N1 | A/Helsinki/77/2013 |
| H1N1 | A/New York/18/2009 |
| H1N1 | A/swine/Mexico/AVX27/2012 |
| H1N2 | A/swine/Korea/PZ4/2006 |
| H1N2 | A/swine/Ohio/8910/2001 |
| H1N1 | A/swine/North Carolina/SG1279/2007 |
| H1N1 | A/swine/Minnesota/00991/2006 |
| H1N1 | A/swine/Hong Kong/1937/1994 |
| H1N1 | A/swine/Wisconsin/1915/1988 |
| H1N1 | A/swine/Wisconsin/11/1976 |
| H1N2 | A/swine/Miyagi/5/2003 |
| H1N1 | A/swine/Manitoba/D0270/2013 |
| H1N1 | A/swine/Ohio/23/1935 |
| H1N1 | A/swine/USA/1976/1931 |
| H1N1 | A/South Carolina/1/1918 |
| H1N1 | A/Iran/1417/2016 |
| H1N1 | A/Henry/1936 |
| H1N1 | A/Albany/1618/1951 |
| H1N1 | A/Roma/1949 |
| H1N2 | A/swine/England/463180/1994 |
| H1N2 | A/swine/Italy/233139/2005 |
| H1N2 | A/swine/England/448813/1994 |
| H1N2 | A/swine/England/063782/2013 |
| H1N1 | A/Singapore/6/1986 |
| H1N1 | A/Ostrova/801/1998 |
| H1N2 | A/swine/Minnesota/A01201102/2011 |
| H1N2 | A/swine/Minnesota/A01567011/2014 |
| H1N2 | A/swine/North Carolina/2858/2010 |
| H1N1 | A/swine/IL/00685/2005 |
| H1N1 | A/Auckland/585/2000 |
| H1N1 | A/California/UR060479/2007 |
| H1N3 | A/pintail/Aomori/1130/2008 |
| H1N3 | A/duck/Fujian/FJ1239/2014 |
| H1N1 | A/duck/Bavaria/1/1977 |
| H1N9 | A/thickbilled murre/Alaska/390/1976 |
| H1N9 | A/northern shoveler/California/K168/2005 |
| H1N1 | A/yellow-billed pintail/Chile/1/2012 |
| H1N1 | A/mallard duck/Chile/C4079/2015 |
| H1N1 | A/swine/Arnsberg/6554/1979 |
| H1N1 | A/swine/Germany/8533/1991 |
| H1N2 | A/swine/Italy/195369/2010 |
| H1N1 | A/swine/Hong Kong/1559/2008 |
| H1N1 | A/swine/Cotes d'Armor/1624/2002 |
| H1N1 | A/swine/Jiangsu/J004/2018 |

### E. REFERENCES

[2159] The following references and the references cited throughout the specification, to the extent that they provide exemplary procedural or other details supplementary to those set forth herein, are specifically incorporated herein by reference.
[2160] 1. Paules, C. I., Marston, H. D., Eisinger, R. W., Baltimore, D. & Fauci, A. S. The Pathway to a Universal Influenza Vaccine. Immunity 47, 599-603, doi:10.1016/j.immuni.2017.09.007 (2017).
[2161] 2. Park, J. K. et al. Pre-existing immunity to influenza virus hemagglutinin stalk might drive selection for antibody-escape mutant viruses in a human challenge model. Nat Med 26, 1240-1246, doi:10.1038/s41591-020-0937-x (2020).
[2162] 3. Guthmiller, J. J. et al. First exposure to the pandemic H1N1 virus induced broadly neutralizing antibodies targeting hemagglutinin head epitopes. Sci Transl Med 13, doi: 10.1 126/scitranslmed.abg4535 (2021).
[2163] 4. Bernstein, D. I. et al. Immunogenicity of chimeric haemagglutinin-based, universal influenza virus vaccine candidates: interim results of a randomised, placebo-controlled, phase 1 clinical trial. Lancet Infect Dis 20, 80-91, doi:10.1016/S1473-3099(19)30393-7 (2020).
[2164] 5. Nachbagauer, R. et al. A chimeric hemagglutinin-based universal influenza virus vaccine approach induces broad and long-lasting immunity in a randomized, placebo-controlled phase I trial. Nat Med, doi:10.1038/s41591-020-1118-7 (2020).
[2165] 6. Ng, S. et al. Novel correlates of protection against pandemic H1N1 influenza A virus infection. Nat Med 25, 962-967, doi:10.1038/s41591-019-0463-x (2019).
[2166] 7. Aydillo, T. et al. Pre-existing Hemagglutinin Stalk Antibodies Correlate with Protection of Lower Respiratory Symptoms in Flu-Infected Transplant Patients. Cell Rep Med 1, 100130, doi:10.1016/j.xcrm.2020.100130 (2020).
[2167] 8. Wrammert, J. et al. Broadly cross-reactive antibodies dominate the human B cell response against 2009 pandemic H1N1 influenza virus infection. J Exp Med 208, 181-193, doi:10.1084/jem.20101352 (2011).
[2168] 9. Andrews, S. F. et al. Immune history profoundly affects broadly protective B cell responses to influenza. Sci Transl Med 7, 316ra192, doi:10.1126/scitranslmed.aad0522 (2015).
[2169] 10. Dreyfus, C. et al. Highly conserved protective epitopes on influenza B viruses. Science 337, 1343-1348, doi:10.1126/science.1222908 (2012).
[2170] 11. Benton, D. J. et al. Influenza hemagglutinin membrane anchor. Proc Natl Acad Sci USA 115, 10112-10117, doi:10.1073/pnas.1810927115 (2018).
[2171] 12. Ekiert, D. C. et al. A highly conserved neutralizing epitope on group 2 influenza A viruses. Science 333, 843-850, doi: 10.1126/science.1204839 (2011).
[2172] 13. Friesen, R. H. et al. A common solution to group 2 influenza virus neutralization. Proc Natl Acad Sci USA 111, 445-450, doi:10.1073/pnas.1319058110 (2014). 14. Corti, D. et al. A neutralizing antibody selected from plasma cells that binds to group 1 and group 2 influenza A hemagglutinins. Science 333, 850-856, doi: 10.1126/science.1205669 (2011).
[2173] 15. DiLillo, D. J., Palese, P., Wilson, P. C. & Ravetch, J. V. Broadly neutralizing anti-influenza antibodies require Fc receptor engagement for in vivo protection. J Clin Invest 126, 605-610, doi: 10.1 172/JC184428 (2016).
[2174] 16. He, W. et al. Epitope specificity plays a critical role in regulating antibody-dependent cell-mediated cytotoxicity against influenza A virus. Proc Natl Acad Sci USA 113, 11931-11936, doi:10.1073/pnas.1609316113 (2016).
[2175] 17. Guthmiller, J. J. et al. Polyreactive Broadly Neutralizing B cells Are Selected to Provide Defense against Pandemic Threat Influenza Viruses. Immunity, doi: 10.1016/j.immuni.2020.10.005 (2020).
[2176] 18. Sutton, T. C. et al. In Vitro Neutralization Is Not Predictive of Prophylactic Efficacy of Broadly Neutralizing Monoclonal Antibodies CR6261 and CR9114 against Lethal H2 Influenza Virus Challenge in Mice. J Virol 91, doi:10.1128/JVI.01603-17 (2017).
[2177] 19. Benton, D. J., Gamblin, S. J., Rosenthal, P. B. & Skehel, J. J. Structural transitions in influenza haemagglutinin at membrane fusion pH. Nature 583, 150-153, doi:10.1038/s41586-020-2333-6 (2020).
[2178] 20. Han, J. et al. Polyclonal epitope mapping reveals temporal dynamics and diversity of human antibody responses to H5N1 vaccination. Cell Rep 34, 108682, doi:10.1016/j.celrep.2020.108682 (2021).
[2179] 21. Impagliazzo, A. et al. A stable trimeric influenza hemagglutinin stem as a broadly protective immunogen. Science 349, 1301-1306, doi:10.1126/science.aac7263 (2015).
[2180] 22. Yassine, H. M. et al. Hemagglutinin-stem nanoparticles generate heterosubtypic influenza protection. Nat Med 21, 1065-1070, doi:10.1038/nm.3927 (2015).
[2181] 23. Sun, H. et al. Prevalent Eurasian avian-like HiN1 swine influenza virus with 2009 pandemic viral genes facilitating human infection. Proc Natl Acad Sci USA 117, 17204-17210, doi:10.1073/pnas.1921186117 (2020).
[2182] 24. Caskey, M. et al. Viraemia suppressed in HIV-1-infected humans by broadly neutralizing antibody 3BNC117. Nature 522, 487-491, doi:10.1038/naturel4411 (2015).
[2183] 25. Caskey, M. et al. Antibody 10-1074 suppresses viremia in HIV-1-infected individuals. Nat Med 23, 185-191, doi:10.1038/nm.4268 (2017).
[2184] 26. Bar, K. J. et al. Effect of HIV Antibody VRCO1 on Viral Rebound after Treatment Interruption. N Engl J Med 375, 2037-2050, doi:10.1056/NEJMoa1608243 (2016).
[2185] 27. Mendoza, P. et al. Combination therapy with anti-HIV-1 antibodies maintains viral suppression. Nature 561, 479-484, doi:10.1038/s41586-018-0531-2 (2018).
[2186] 28. Raymond, D. D. et al. Conserved epitope on influenza-virus hemagglutinin head defined by a vaccine-induced antibody. Proc Natl Acad Sci USA 115, 168-173, doi:10.1073/pnas.1715471115 (2018).
[2187] 29. Linderman, S. L. et al. Potential antigenic explanation for atypical HIN1 infections among middle-aged adults during the 2013-2014 influenza season. Proc Natl Acad Sci USA 111, 15798-15803, doi:10.1073/pnas.1409171111 (2014).
[2188] 30. Tate, M. D. et al. Playing hide and seek: how glycosylation of the influenza virus hemagglutinin can modulate the immune response to infection. Viruses 6, 1294-1316, doi: 10.3390/v6031294 (2014).
[2189] 31. Pallesen, J. et al. Immunogenicity and structures of a rationally designed prefusion MERS-CoV spike antigen. Proc Natl Acad Sci USA 114, E7348-E7357, doi: 10.1073/pnas.1707304114 (2017).
[2190] 32. Dugan, H. L. et al. Preexisting immunity shapes distinct antibody landscapes after influenza virus infection and vaccination in humans. Sci Transl Med 12, doi: 10.1 126/scitranslmed.abd3601 (2020).
[2191] 33. van der Lubbe, J. E. M. et al. Mini-hemagglutinin vaccination induces cross-reactive antibodies in pre-exposed NHP that protect mice against lethal influenza challenge. NPJ Vaccines 3, 25, doi:10.1038/s41541-018-0063-7 (2018).
[2192] 34. Cantisani, R. et al. Vaccine adjuvant MF59 promotes retention of unprocessed antigen in lymph node macrophage compartments and follicular dendritic cells. J Immunol 194, 1717-1725, doi: 10.4049/jimmunol.1400623 (2015).
[2193] 35. Liang, F. et al. Vaccine priming is restricted to draining lymph nodes and controlled by adjuvant-mediated antigen uptake. Sci Transl Med 9, doi:10.1126/scitranslmed.aal2094 (2017).
[2194] 36. Khurana, S. et al. Vaccines with MF59 adjuvant expand the antibody repertoire to target protective sites of pandemic avian H5N1 influenza virus. Sci Transl Med 2, 15ra15, doi: 10.1 126/scitranslmed.3000624 (2010).
[2195] 37. Bloom, J. D., Gong, L. I. & Baltimore, D. Permissive secondary mutations enable the evolution of influenza oseltamivir resistance. Science 328, 1272-1275, doi:10.1126/science.1187816 (2010).
[2196] 38. Guthmiller, J. J., Dugan, H. L., Neu, K. E., Lan, L. Y. & Wilson, P. C. An Efficient Method to Generate Monoclonal Antibodies from Human B Cells. Methods Mol Biol 1904, 109-145, doi: 10.1007/978-1-4939-8958-4_5 (2019).
[2197] 39. Wrammert, J. et al. Rapid cloning of high-affinity human monoclonal antibodies against influenza virus. Nature 453, 667-671, doi:10.1038/nature06890 (2008).
[2198] 40. Smith, K. et al. Rapid generation of fully human monoclonal antibodies specific to a vaccinating antigen. Nat Protoc 4, 372-384, doi:10.1038/nprot.2009.3 (2009).
[2199] 41. Crooks, G. E., Hon, G., Chandonia, J. M. & Brenner, S. E. WebLogo: a sequence logo generator. Genome Res 14, 1188-1190, doi:10.1101/gr.849004 (2004).
[2200] 42. Doud, M. B., Lee, J. M. & Bloom, J. D. How single mutations affect viral escape from broad and narrow antibodies to H1 influenza hemagglutinin. Nat Commun 9, 1386, doi:10.1038/s41467-018-03665-3 (2018).
[2201] 43. Lang, S. et al. Antibody 27F3 Broadly Targets Influenza A Group 1 and 2 Hemagglutinins through a Further Variation in VH1-69 Antibody Orientation on the H A Stem. Cell Rep 20, 2935-2943, doi:10.1016/j.celrep.2017.08.084 (2017).
[2202] 44. Xu, R. et al. Functional balance of the hemagglutinin and neuraminidase activities accompanies the emergence of the 2009 H1N1 influenza pandemic. J Virol 86, 9221-9232, doi:10.1128/JVI.00697-12 (2012).
[2203] 45. Fu, Y. et al. A broadly neutralizing anti-influenza antibody reveals ongoing capacity of haemagglutinin-specific memory B cells to evolve. Nat Commun 7, 12780, doi:10.1038/ncomms12780 (2016).
[2204] 46. Wu, N. C. et al. Different genetic barriers for resistance to H A stem antibodies in influenza H3 and H1 viruses. Science 368, 1335-1340, doi:10.1126/science.aaz5143 (2020).
[2205] 47. Tan, G. S. et al. A pan-H1 anti-hemagglutinin monoclonal antibody with potent broad-spectrum efficacy in vivo. J Virol 86, 6179-6188, doi: 10.1128/JVI.00469-12 (2012).
[2206] 48. Yassine, H. M. et al. Use of Hemagglutinin Stem Probes Demonstrate Prevalence of Broadly Reactive Group 1 Influenza Antibodies in Human Sera. Sci Rep 8, 8628, doi:10.1038/s41598-018-26538-7 (2018).
[2207] 49. Lingwood, D. et al. Structural and genetic basis for development of broadly neutralizing influenza antibodies. Nature 489, 566-570, doi:10.1038/nature11371 (2012).
[2208] 50. Cotter, C. R., Jin, H. & Chen, Z. A single amino acid in the stalk region of the HIN1pdm influenza virus H A protein affects viral fusion, stability and infectivity. PLoS Pathog 10, e1003831, doi:10.1371/journal.ppat.1003831 (2014).
[2209] 51. Sui, J. et al. Structural and functional bases for broad-spectrum neutralization of avian and human influenza A viruses. Nat Struct Mol Biol 16, 265-273, doi:10.1038/nsmb.1566 (2009).
[2210] 52. Vanderlinden, E. et al. Novel inhibitors of influenza virus fusion: structure-activity relationship and interaction with the viral hemagglutinin. J Virol 84, 4277-4288, doi:10.1128/JVI.02325-09 (2010).
[2211] 53. Hai, R. et al. Influenza viruses expressing chimeric hemagglutinins: globular head and stalk domains derived from different subtypes. J Virol 86, 5774-5781, doi:10.1128/JVI.00137-12 (2012).
[2212] 54. Shlomchik, M. J., Aucoin, A. H., Pisetsky, D. S. & Weigert, M. G. Structure and function of anti-DNA autoantibodies derived from a single autoimmune mouse. Proc Natl Acad Sci USA 84, 9150-9154 (1987).
[2213] 55. Doud, M. B. & Bloom, J. D. Accurate Measurement of the Effects of All Amino-Acid Mutations on Influenza Hemagglutinin. Viruses 8, doi:10.3390/v8060155 (2016).
[2214] 56. Doud, M. B., Hensley, S. E. & Bloom, J. D. Complete mapping of viral escape from neutralizing antibodies. PLoS Pathog 13, e1006271, doi:10.1371/journal.ppat.1006271 (2017).
[2215] 57. Bloom, J. D. Software for the analysis and visualization of deep mutational scanning data. BMC Bioinformatics 16, 168, doi:10.1186/s12859-015-0590-4 (2015).
[2216] 58. Henry Dunand, C. J. et al. Preexisting human antibodies neutralize recently emerged H7N9 influenza strains. J Clin Invest 125, 1255-1268, doi:10.1172/JCI74374 (2015).
[2217] 59. Chen, Y. Q. et al. Influenza Infection in Humans Induces Broadly Cross-Reactive and Protective Neuraminidase-Reactive Antibodies. Cell 173, 417-429 e410, doi:10.1016/j.cell.2018.03.030 (2018).
[2218] 60. Pettersen, E. F. et al. UCSF Chimera—a visualization system for exploratory research and analysis. J Comput Chem 25, 1605-1612, doi:10.1002/jcc.20084 (2004).
[2219] 61. Suloway, C. et al. Automated molecular microscopy: the new Leginon system. J Struct Biol 151, 41-60, doi:10.1016/j.jsb.2005.03.010 (2005).
[2220] 62. Lander, G. C. et al. Appion: an integrated, database-driven pipeline to facilitate E M image processing. J Struct Biol 166, 95-102, doi:10.1016/j.jsb.2009.01.002 (2009).
[2221] 63. Scheres, S. H. RELION: implementation of a Bayesian approach to cryo-E M structure determination. J Struct Biol 180, 519-530, doi:10.1016/j.jsb.2012.09.006 (2012).
[2222] 64. Zheng, S. Q. et al. MotionCor2: anisotropic correction of beam-induced motion for improved cryo-electron microscopy. Nat Methods 14, 331-332, doi: 10.1038/nmeth.4193 (2017).
[2223] 65. Punjani, A., Rubinstein, J. L., Fleet, D. J. & Brubaker, M. A. cryoSPARC: algorithms for rapid unsupervised cryo-E M structure determination. Nat Methods 14, 290-296, doi: 10.1038/nmeth.4169 (2017).
[2224] 66. Emsley, P. & Cowtan, K. Coot: model-building tools for molecular graphics. Acta Crystallogr D Biol Crystallogr 60, 2126-2132, doi:10.1107/S0907444904019158 (2004).
[2225] 67. Weitzner, B. D. et al. Modeling and docking of antibody structures with Rosetta. Nat Protoc 12, 401-416, doi:10.1038/nprot.2016.180 (2017).
[2226] 68. Chen, V. B. et al. MolProbity: all-atom structure validation for macromolecular crystallography. Acta Crystallogr D Biol Crystallogr 66, 12-21, doi:10.1107/S0907444909042073 (2010).
[2227] 69. Barad, B. A. et al. EMRinger: side chain-directed model and map validation for 3D cryo-electron microscopy. Nat Methods 12, 943-946, doi: 10.1038/nmeth.3541 (2015).
[2228] 70. Li, L. et al. Improved integration of single-cell transcriptome and surface protein expression by LinQ-View. Cell Reports Methods, 100056, doi:https://doi.org/10.1016/j.crmeth.2021.100056 (2021).
[2229] 71. Zhuang, Q. et al. Diversity and distribution of type A influenza viruses: an updated panorama analysis based on protein sequences. Virol J 16, 85, doi:10.1186/s12985-019-1188-7 (2019).
[2230] 72. Burke, D. F. & Smith, D. J. A recommended numbering scheme for influenza A H A subtypes. PLoS One 9, e112302, doi:10.1371/journal.pone.0112302 (2014).
[2231] 73. Edgar, R. C. MUSCLE: multiple sequence alignment with high accuracy and high throughput. Nucleic Acids Res 32, 1792-1797, doi:10.1093/nar/gkh340 (2004).
[2232] 74. Li, L. et al. Librator, a platform for optimized sequence editing, design, and expression of influenza virus proteins. bioRxiv, 2021.2004.2029.441999, doi:10.1101/2021.04.29.441999 (2021).
[2233] 75. Weitzner, B. D., Kuroda, D., Marze, N., Xu, J. & Gray, J. J. Blind prediction performance of RosettaAntibody 3.0: grafting, relaxation, kinematic loop modeling, and full CDR optimization. Proteins 82, 1611-1623, doi:10.1002/prot.24534 (2014).
[2234] 76. Stein, A. & Kortemme, T. Improvements to robotics-inspired conformational sampling in rosetta. PLoS One 8, e63090, doi:10.1371/journal.pone.0063090 (2013).
[2235] 77. Labute, P. Protonate3D: assignment of ionization states and hydrogen coordinates to macromolecular structures. Proteins 75, 187-205, doi:10.1002/prot.22234 (2009).
[2236] 78. Molecular Operating Environment (MOE). 1010 Sherbrooke St. West, S., Montreal, Q C, Canada,H3A 2R7: 2020..
[2237] 79. Hub, J. S., de Groot, B. L., Grubmuller, H. & Groenhof, G. Quantifying Artifacts in Ewald Simulations of Inhomogeneous Systems with a Net Charge. J Chem Theory Comput 10, 381-390, doi: 10.1021/ct400626b (2014).
[2238] 80. Roe, D. R. & Cheatham, T. E., 3rd. PTRAJ and CPPTRAJ: Software for Processing and Analysis of Molecular Dynamics Trajectory Data. J Chem Theory Comput 9, 3084-3095, doi:10.1021/ct400341p (2013).
[2239] 81. D. A. Case, K. B., I. Y. Ben-Shalom, S. R. Brozell, D. S. Cerutti, T. E. Cheatham, III, V. W. D. Cruzeiro, T. A. Darden, R. E. Duke, G. Giambasu, M. K. Gilson, H. Gohlke, A. W. Goetz,R Harris, S. Izadi, S. A. Izmailov, K. Kasavajhala, A. Kovalenko, R. Krasny, T. Kurtzman, T. S. Lee, S. LeGrand, P. Li, C. Lin, J. Liu, T. Luchko, R. Luo, V. Man, K. M. Merz, Y. Miao, O. Mikhailovskii, G. Monard, H. Nguyen, A. Onufriev, F., Pan, S. Pantano, R. Qi, D. R. Roe, A. Roitberg, C. Sagui, S. Schott-Verdugo, J. Shen, C. L. Simmerling, N. R., Skrynnikov, J. Smith, J. Swails, R. C. Walker, J. Wang, L. Wilson, R. M. Wolf, X. Wu, Y. Xiong, Y. Xue,, D. M. York and P. A. Kollman (2020), AMBER 2020, University of California, San Francisco. 2020;.
[2240] 82. Jorgensen, W. L., Chandrasekhar, J., Madura, J. D., Impey, R. W. & Klein, M. L. Comparison of simple potential functions for simulating liquid water. The Journal of Chemical Physics 79, 926-935, doi:10.1063/1.445869 (1983).
[2241] 83. Maier, J. A. et al. ffl4S B: Improving the Accuracy of Protein Side Chain and Backbone Parameters from ff99S B. J Chem Theory Comput 11, 3696-3713, doi:10.1021/acs.jctc.5b00255 (2015).
[2242] 84. Wallnoefer, H. G., Liedl, K. R. & Fox, T. A challenging system: free energy prediction for factor Xa. J Comput Chem 32, 1743-1752, doi:10.1002/jcc.21758 (2011).
[2243] 85. Barducci, A., Bonomi, M. & Parrinello, M. Metadynamics. WIREs Computational Molecular Science 1, 826-843, doi:https://doi.org/10.1002/wcms.31 (2011).
[2244] 86. Barducci, A., Bussi, G. & Parrinello, M. Well-tempered metadynamics: a smoothly converging and tunable free-energy method. Phys Rev Lett 100, 020603, doi: 10.1 103/PhysRevLett.100.020603 (2008).
[2245] 87. Biswas, M., Lickert, B. & Stock, G. Metadynamics Enhanced Markov Modeling of Protein Dynamics. J Phys Chem B 122, 5508-5514, doi:10.1021/acs.jpcb.7b11800 (2018).
[2246] 88. Abraham, M. J. et al. GROMACS: High performance molecular simulations through multi-level parallelism from laptops to supercomputers. SoftwareX 1-2, 19-25, doi:10.1016/j.softx.2015.06.001 (2015).
[2247] 89. Pronk, S. et al. GROMACS 4.5: a high-throughput and highly parallel open source molecular simulation toolkit. Bioinformatics 29, 845-854, doi:10.1093/bioinformatics/btt055 (2013).
[2248] 90. Tribello, G. A., Bonomi, M., Branduardi, D., Camilloni, C., Bussi, G. PLUMED 2: New feathers for an old bird. Computer Physics Communications Volume 185, Issue 2,, 604-613, doi:https://doi.org/10.1016/j.cpc.2013.09.018 (2014).
[2249] 91. Ilott, A. J., Palucha, S., Hodgkinson, P. & Wilson, M. R. Well-tempered metadynamics as a tool for characterizing multi-component, crystalline molecular machines. J Phys Chem B 117, 12286-12295, doi:10.1021/jp4045995 (2013).
[2250] 92. Ramachandran, G. N., Ramakrishnan, C. & Sasisekharan, V. Stereochemistry ofpolypeptide chain configurations. J Mol Biol 7, 95-99, doi:10.1016/s0022-2836(63)80023-6 (1963).
[2251] 93. Fernandez-Quintero, M. L. et al. Antibodies exhibit multiple paratope states influencing V H-V L domain orientations. Commun Biol 3, 589, doi:10.1038/s42003-020-01319-z (2020).
[2252] 94. Salomon-Ferrer, R., Gotz, A. W., Poole, D., Le Grand, S. & Walker, R. C. Routine Microsecond Molecular Dynamics Simulations with AMBER on GPUs. 2. Explicit Solvent Particle Mesh Ewald. J Chem Theory Comput 9, 3878-3888, doi:10.1021/ct400314y (2013).
[2253] 95. Shao, J., Tanner, S. W., Thompson, N. & Cheatham, T. E. Clustering Molecular Dynamics Trajectories: 1. Characterizing the Performance of Different Clustering Algorithms. J Chem Theory Comput 3, 2312-2334, doi:10.1021/ct700119m (2007).
[2254] 96. Miyamoto S, K. P. Settle: An analytical version of the SHAKE and RATTLE algorithm for rigid water models. J Comput Chem, 952-962 (1992).
[2255] 97. Berendsen H, P. J., van Gunsteren W, DiNola A, Haak J R. Molecular-Dynamics with Coupling to An External Bath. J Chem Phys, 3684 (1984).
[2256] 98. Adelman, S. A. & Doll, J. D. Generalized Langevin equation approach for atom/solid-surface scattering: General formulation for classical scattering off harmonic solids. The Journal of Chemical Physics 64, 2375-2388, doi:10.1063/1.432526 (1976).
[2257] 99. Scherer, M. K. et al. PyEMMA 2: A Software Package for Estimation, Validation, and Analysis of Markov Models. J Chem Theory Comput 11, 5525-5542, doi:10.1021/acs.jctc.5b00743 (2015).
[2258] 100. Chodera, J. D. & Noe, F. Markov state models of biomolecular conformational dynamics. Curr Opin Struct Biol 25, 135-144, doi:10.1016/j.sbi.2014.04.002 (2014).

### Example 2—Broadly Neutralizing Antibodies Target a Hemagglutinin Anchor Epitope

[2259] Broadly neutralizing antibodies against influenza virus hemagglutinin (HA) have the potential to provide universal protection against influenza virus infections. Here, we report a distinct class of broadly neutralizing antibodies targeting an epitope toward the bottom of the HA stalk domain where HA is “anchored” to the viral membrane. Antibodies targeting this membrane-proximal anchor epitope utilized a highly restricted repertoire, which encode for two conserved motifs responsible for HA binding. Anchor targeting B cells were common in the human memory B cell repertoire across subjects, indicating pre-existing immunity against this epitope. Antibodies against the anchor epitope at both the serological and monoclonal antibody levels were potently induced in humans by a chimeric HA vaccine, a potential universal influenza virus vaccine. Altogether, this study reveals an underappreciated class of broadly neutralizing antibodies against H1-expressing viruses that can be robustly recalled by a candidate universal influenza virus vaccine.

### A. Results

### 1. Identification of Antibodies Targeting the Anchor Epitope

[2260] To dissect conserved HA stalk domain epitopes, we generated mAbs from acutely activated plasmablasts isolated from subjects who received licensed or experimental influenza virus vaccines or were naturally infected with pH1N1 during the 2009 pandemic (Table S1). Notably, plasmablasts found in the blood of subjects after infection or vaccination derive from pre-existing MBCs (Andrews et al., 2015), and generation of mAbs from plasmablasts allows for the dissection of how distinct influenza viruses recall pre-existing immunity. We also generated mAbs from sorted HA+ B cells one month following vaccination with an experimental cHA vaccine that utilized the head domain from an avian influenza virus and stalk domain from pH1N1 (Bernstein et al., 2020). We specifically focused our studies on mAbs targeting the stalk domain of H1-expressing viruses, as prior studies have shown first exposure to the 2009 pandemic H1N1 virus induce antibodies against the stalk domain (Li et al., 2012; Wrammert et al., 2011). To define antibodies as targeting the H1 stalk, mAbs were tested for binding to cH5/1, which utilizes the head domain from H5-expressing viruses and the stalk domain from the pH1N1 virus (Hai et al., 2012), and for hemagglutination inhibition (HAI) activity against pH1N1 (A/California/July 2009), a feature of head binding antibodies. MAbs that bound the cHA and that lacked HAI activity were classified as those binding the HA stalk domain. Of all mAbs tested, nearly 49% targeted the HA stalk domain, whereas 40% targeted the HA head domain (FIG. 19A). To investigate what proportion were binding the BN stalk domain epitope, we competed the stalk binding mAbs from our cohorts with CR9114, a well-defined antibody targeting the BN stalk epitope (Dreyfus et al., 2012). We identified that only 21% of mAbs targeting the stalk domain had greater than 80% competition with CR9114 (FIG. 19B), indicating most H1 stalk domain targeting antibodies were binding other epitopes of the HA stalk.

[2261] To investigate which epitopes the remaining 79% of mAbs were targeting on the stalk domain, we performed negative stain electron microscopy with two stalk domain binding mAbs. Both mAbs bound an epitope near the anchor of the HA stalk, towards the lower portion of the HA protomer (FIG. 12A-B; FIG. 19C-D). Both mAbs were oriented at an upward angle towards the epitope (FIG. 12A-B), suggesting this epitope may be partially obstructed by the lipid membrane and may only be exposed for antibody binding as the HA trimers flex on the viral membrane (Benton et al., 2018). FISW84, a recently identified anchor binding mAb, (Benton et al., 2018), overlap with both 047-09 4F04 and 241 IgA 2F04 (FIG. 12C), suggesting this epitope is a common target of stalk binding antibodies. The footprint of several BN stalk epitope binding mAbs (CR9114 and FI6v3) did not overlap with those of 047-09 4F04 and 241 IgA 2F04 (FIG. 12D; FIG. 19E), indicating the anchor epitope and the BN stalk epitope are distinct epitopes on the HA stalk. To understand what proportion of stalk binding mAbs were binding to the anchor epitope, we competed 047-09 4F04 mAb with the remaining stalk binding mAbs that did not compete with CR9114. In total, we identified 50 distinct mAbs that competed for binding to the anchor epitope from a total of 21 subjects (Table S2) and accounted for 28% of all stalk mAbs identified (FIG. 12E-F). Together, these data indicate that the anchor epitope is a common target of antibodies binding the H1 stalk domain.

### 2. Antibodies Binding the Anchor are Broadly Reactive Amongst H1 Viruses

[2262] As the stalk domain is conserved amongst influenza viruses, we next determined the viral binding breadth of antibodies targeting the anchor epitope. Anchor mAbs were broadly reactive amongst H1-expressing viruses, including a swine origin H1N2 virus, but rarely cross-reacted with other influenza subtypes (FIG. 13A; FIG. 20A-B), as often occurs for antibodies targeting the BN stalk epitope (FIG. 13A; FIG. 20B). While highly conserved amongst H1 viruses, the anchor epitope was poorly conserved across divergent group 1 viral subtypes (FIG. 20C). Anchor epitope targeting mAbs had nearly a 2-fold higher affinity for pH1N1 virus than mAbs targeting the BN stalk epitope (FIG. 13B). Because the anchor epitope is partially obstructed by the lipid membrane, we next tested whether anchor binding mAbs had reduced affinity for whole virus relative to recombinant HA (rHA). MAbs binding the anchor epitope and the BN stalk epitope both exhibited reduced affinity for the whole virus (A/California/July 2009) relative to rHA from the same virus, whereas mAbs targeting the HA head domain had similar affinity for whole virus and rHA (FIG. 20D). These data indicate that antibodies targeting the anchor epitope are broadly reactive amongst H1-expressing viruses.

### 3. Antibodies Targeting the Anchor Epitope Maintain Binding to HA Mutants in the Stalk Domain

[2263] H1N1 viruses have acquired several mutations within the HA stalk domain, likely due to antibody selective pressures or to increase stability (Cotter et al., 2014). To understand whether these mutations have affected antibody binding to the anchor epitope, we screened mAbs against naturally occurring mutants and experimentally identified viral escape mutants of BN stalk epitope binding mAbs (FIG. 13C-D; FIG. 21A-B; Table S3). Anchor epitope binding mAbs were mostly unaffected by the mutants tested, whereas most of the mAbs targeting the BN stalk epitope were affected by at least one mutant, notably Q42E mutation in HA2 (FIG. 13D). Regardless of mAb specificity, most antibodies had reduced binding to A44V of HA2, which was recently shown to preferentially grow in the presence of mAbs against the BN stalk epitope (Park et al., 2020). While A44 is distant from the anchor epitope, the A44V mutation was shown to affect the conformation of the HA stalk (Park et al., 2020) and could explain the broad reduction of HA binding by antibodies targeting either the anchor epitope or the BN stalk epitope. Furthermore, A/Michigan/45/2015 acquired mutations at S124N and E172K of HA2 (Clark et al., 2017), which lay near the binding footprint of 047-09 4F04 and 241 IgA 2F04 (FIG. 21C). Despite this, mAbs targeting the anchor epitope or BN stalk epitope bind A/California/July 2009 (S124, E172) with nearly identical affinity as they do to A/Michigan/45/2015 (N124, K172; FIG. 21D-E), indicating these mutations were likely not driven by selective pressures of mAbs targeting these residues. Together, these data indicate that known mutations within the HA stalk largely do not affect the binding of antibodies to the anchor epitope.

### 4. Antibodies Targeting the Anchor Epitope are Broadly Neutralizing Against H1N1 Viruses and are Potently Protective In Vivo

[2264] We next determined whether mAbs targeting the anchor epitope were neutralizing. All mAbs targeting the anchor epitope and the BN stalk epitope were neutralizing against the pH1N1 virus (A/California/July 2009) and had similar neutralizing potency relative to mAbs binding the BN stalk epitope (FIG. 14A). Furthermore, anchor targeting mAbs were broadly neutralizing against historical and recent H1N1 viruses, as well as a swine H1N2 (A/swine/Mexico/AVX August 2011) virus (FIG. 14B). Together, these data indicate that antibodies against the anchor epitope and other broadly neutralizing epitopes could work in tandem to be potently neutralizing against antigenically drifted and shifted H1-expressing viruses.

[2265] To test whether mAbs targeting the anchor epitope were protective in vivo, we prophylactically administered a cocktail of 5 mAbs targeting the anchor epitope or the BN stalk epitope to mimic a polyclonal response against these epitopes and infected mice with a lethal dose of a mouse-adapted pH1N1 virus (A/Netherlands/602/2009; FIG. 14C). Mice that received either cocktail lost a similar amount of weight and experienced similar mortality (FIG. 14D-E). Notably, mice were completely protected at 5 mg/kg of mAb cocktail, whereas only 60-80% of animals survived at 1 mg/kg (FIG. 14E). Together, these data reveal mAbs targeting the anchor epitope are protective in vivo and could provide broad protection against H1-expressing viruses.

### 5. Anchor Epitope Targeting Antibodies are Induced by Seasonal Influenza Virus Vaccines

[2266] Antibodies induced by influenza vaccination are biased toward variable epitopes of the HA head (FIG. 15A). However, novel exposure to the 2009 pH1N1 virus robustly recalled MBCs targeting the conserved epitopes of the HA head and stalk domains, likely because subjects had low pre-existing antibody titers against the variable epitopes of the HA head (Andrews et al., 2015; Guthmiller et al., 2020; Li et al., 2012; Wrammert et al., 2011). In contrast, subjects that have been repeatedly exposed to the pH1N1 virus tend to recall MBCs targeting the variable epitopes of the HA head (Guthmiller et al., submitted for publication). Consistent with this, subjects that received the 2009 monovalent influenza virus (MIV) vaccine robustly induced a plasmablast response against the stalk domain (38%), as determined by generated mAbs, whereas only 15% of mAbs isolated from subjects that received the seasonal vaccine 2014 quadrivalent influenza virus vaccine (QIV) targeted the stalk domain (FIG. 15A). Most subjects in each cohort had at least one stalk domain-targeting mAb isolated, although the frequency of stalk domain-binding mAbs per subject was higher in the subjects that received the 2009 MIV relative to subjects in the 2014 QIV cohort (FIG. 22A-B). When broken down by the specific stalk epitopes targeted, nearly 40% of stalk binding mAbs isolated targeted the BN stalk epitope (FIG. 15B). A larger proportion of mAbs (57%) targeting the anchor epitope were isolated from subjects that received the 2014 QIV relative to those subjects that received the 2009 MIV (16%; FIG. 15B). Anchor epitope binding mAbs were detected in two out of six subjects in the 2014 QIV cohort (33.3%) and four out of eleven subjects in the 2009 MIV cohort (36%; FIG. 15C), demonstrating that this epitope is commonly targeted after influenza virus vaccinations.

[2267] To confirm that anchor epitope targeting mAbs generated from plasmablasts were representative of the serum antibody response, we performed electron microscopy polyclonal epitope mapping (EMPEM) to dissect the targets of the polyclonal serum antibody response mounted by subjects 236 and 241 from the 2014 QIV cohort. Both subjects had detectable antibodies targeting the anchor epitope at days 7 and 14 post vaccination, whereas only subject 241 had detectable antibodies against the BN stalk epitope at day 14 (FIG. 15D-E; FIG. 22C-D). Notably, subject 241 had more complexes with antibodies targeting the anchor than the BN stalk epitope (FIG. 22D), suggesting this subject more readily mounted an antibody response against the anchor epitope. Comparison of anchor epitope binding polyclonal antibodies (pAbs) identified in subjects 236 and 241 revealed the 241 IgA 2F04 mAb strongly overlapped with the 241 pAb from the same donor (FIG. 15E-F) while the 236 pAb sat slightly anterior to the HA trimer, similar to 047-09 4F04 (FIG. 15G-H; FIG. 22E). Together, these data indicate influenza virus vaccination can recall MBCs targeting the anchor epitope.

### 6. The cHA Universal Influenza Virus Vaccine Candidate Robustly Induced Antibodies Against the Anchor Epitope

[2268] Several experimental universal influenza virus vaccine candidates currently being tested in clinical trials are intended to induce antibodies against the stalk domain. Notably, a cHA vaccine platform was shown to specifically induce antibodies against the stalk domain (Bernstein et al., 2020; Nachbagauer et al., 2020). To investigate whether subjects who received the cHA vaccine mounted an antibody response against the anchor epitope and the BN stalk epitope, we adapted the competition ELISA to detect serum antibody responses that could compete for binding with 047-09 4F04 and CR9114, respectively. Subjects enrolled in the cHA clinical trial received a prime-boost regimen of cHA, with the prime being a cH8/1 inactivated influenza virus vaccine with an adjuvant (IIV+ASO3) or cH8/1 live-attenuated influenza virus (LAIV) followed by a boost 3 months later with a cH5/1 IIV with or without adjuvant (FIG. 16A). On the prime vaccination, subjects that received the cH8/1 IIV+ASO3 had a dramatic increase in serum antibody responses against the anchor epitope and BN stalk epitope relative to the placebo group (FIG. 16B) and had a 3-fold increase in antibodies binding the anchor epitope over the day 0 time point (FIG. 23A-B). However, these titers drastically dropped after 3 months post-prime (FIG. 16B). Subjects that received the cH8/1 LAIV did not have an increase in serum antibody responses against either the anchor epitope or the BN stalk epitope (FIG. 16B; FIG. 23A-B). After the cH5/1 boost, subjects in the LAIV/IIV+ASO3 group dramatically increased antibody titers against both the anchor epitope and BN stalk epitope, whereas subjects in the LAIV/IIV cohort with no adjuvant did not have a substantial increase in serum antibodies compared to the placebo cohort (FIG. 16B). Subjects that received the cH8/1 IIV+ASO3 followed by the cH5/1 IIV+ASO3 also boosted antibody responses against both the anchor and BN stalk epitopes compared to the placebo controls (FIG. 16B), although the fold-change in titers was not statistically greater than the placebo (FIG. 23A-B). Furthermore, only subjects in the LAIV/IIV+ASO3 cohort had a significant fold-increase in antibodies targeting both the anchor and BN stalk epitopes relative to pre-boost titers (FIG. 23A-B). At a 1-year time point, subjects within the LAIV/IIV+ASO3 and the IIV+ASO3/IIV+ASO3 had a significant decrease in serum antibodies against the anchor epitope and subjects within the LAIV/IIV+ASO3 cohort had a significant decrease in serum antibodies against the BN stalk epitopes (FIG. 23C-D). Furthermore, we identified and generated anchor epitope targeting mAbs from acutely activated plasmablasts isolated from one subject that received the cH8/1 IIV+ASO3 prime and one subject that received the cH5/1 IIV+ASO3 boost (Table S1 and Table S2). Together, these data indicate that the cHA vaccine strategy can robustly induce antibodies against the anchor epitope.

[2269] Headless HA antigens, or mini-HAs, are attractive universal influenza virus vaccine antigens, as these antigens lack the immunodominant epitopes of the HA head (Impagliazzo et al., 2015; Yassine et al., 2015). We next tested whether the anchor epitope was present on the recombinant mini-HA antigen (Impagliazzo et al., 2015) by performing ELISAs with the anchor epitope targeting antibodies. Only 1 out of 50 anchor antibodies bound the mini-HA antigen, whereas all anchor epitope binding mAbs bound cH6/1 (FIG. 16C; FIG. 23E). In contrast, all but one BN stalk epitope targeting mAbs were capable of binding to both the mini-HA and the cH6/1 (FIG. 23E), suggesting the anchor epitope is specifically disrupted on this antigen. Compared to full-length HA, the membrane proximal region of the mini-HA splays by approximately 14.5 Å (Impagliazzo et al., 2015), suggesting this splaying may disrupt the antigenicity of the anchor epitope. Notably, the mini-HA antigen utilizes a GCN4 trimerization domain, whereas the cH6/1 utilizes a fibritin trimerization domain. Therefore, we next tested whether the loss of antigenicity of the anchor epitope could be due to the utilization of the GCN4 trimerization domain. We identified that anchor epitope targeting antibodies could bind A/California/July 2009 rHA with a fibritin trimerization domain, but not A/California/July 2009 rHA with a GCN4 trimerization domain (FIG. 23F), indicating a GCN4 trimerization domain affected the antigenicity of this epitope. To understand whether anchor epitope targeting antibodies could bind the mini-HA in a more native setting, we modified the mini-HA antigen to remove the trimerization domain and include a transmembrane domain, which would lead to the HA being membrane-bound. Transfected HEK293T cells were stained with mAbs targeting H1 head epitopes, the BN stalk epitope, or the anchor epitope, and flow cytometry was performed. MAbs targeting the anchor and BN stalk epitopes readily bound both the full-length membrane-bound A/California/July 2009 HA (Cal09) and the membrane-bound mini-HA, whereas the H1 head-specific mAbs only bound the full-length Cal09 HA (FIG. 16D). These data indicate that the anchor epitope is antigenic when HA is trimerized more similarly to membrane-bound HA. Additionally, these data indicate native-like HA antigens are likely to recall MBCs targeting the anchor epitope, such as the cHA vaccine candidate.

### 7. Anchor Epitope Targeting mAbs Utilize a Restricted Antibody Repertoire

[2270] We next investigated the repertoire features of mAbs targeting the anchor epitope. All mAbs that targeted the anchor epitope utilized one of four VH3 genes: VH3-23, VH3-30/VH3-30-3, and VH3-48, with over three-quarters utilizing VH3-23 (FIG. 17A-B). MAbs targeting the BN stalk epitope commonly used VH1 genes, of which the vast majority used VH1-69 (FIG. 17A, C). Anchor epitope targeting mAbs used a variety of DH genes (Table S2) and JH genes, although 70% of anchor targeting mAbs utilized JH4 (FIG. 24A). Amongst the anchor targeting mAb heavy chain sequences, 75% were non-clonal (FIG. 17D), indicating most anchor targeting utilize similar but distinct heavy chain VDJ recombinations. Similar to the heavy chain, anchor epitope binding mAbs utilized a highly restricted light chain repertoire relative to the BN stalk binding mAbs, with all mAbs utilizing a combination of VK3-11 or VK3-15 combined with JK4 or JK5 (FIG. 17E-G; FIG. 24B). In contrast, mAbs targeting the BN stalk epitope used a wide array of VK/VL genes (FIG. 17E) and JK/JL genes (FIG. 24B). Furthermore, all but one light chain of the anchor targeting mAbs were clonal (FIG. 17H), indicating the light chains were very similar across mAbs and subjects. By determining paired heavy and light chain clones, we identified 4 distinct clonal expansions, with one public clonal expansion found across multiple subjects (FIG. 17I-J; FIG. 24C). Anchor epitope targeting mAbs were mutated to a similar extent as mAbs targeting the BN stalk epitope (FIG. 24D). The K-CDR3 length of anchor epitope binding mAbs was highly restricted, with all K-CDR3s being ten amino acids in length (FIG. 24E). Together, these data indicate that anchor epitope targeting mAbs utilize a highly restricted repertoire, particularly for the light chain.

[2271] FISW84 (Benton et al., 2018) similarly uses VH3-23/VK3-15 and largely makes interactions with the epitope via an NWP motif within the K-CDR3 loop and a tyrosine (Y) immediately following the H-CDR2 (FIG. 24F). We identified that all anchor targeting mAbs possessed this NWP motif at the exact same location within the K-CDR3, which was present in the germline sequence of the various VK/JK pairings (FIG. 17K). Moreover, all anchor binding mAbs utilized a germline encoded tyrosine at position 59 (FIG. 17L), suggesting this residue could have led to the selection of B cells utilizing these particular VH3 genes. Despite this, nearly 2/3 of VH3 genes utilize a tyrosine at this exact position (FIG. 24G), suggesting other features of the heavy chain may lead to the preferential selection of these particular VH3 genes into the B cell repertoire against the anchor epitope. Together, these data reveal B cells targeting the anchor epitope utilized a highly restricted V(D)J gene repertoire, and these specific features of the repertoire are likely critical for binding the anchor epitope.

### 8. Humans Possess MBCs with Features of Anchor Epitope Targeting Antibodies

[2272] Due to the restricted repertoire features of anchor targeting mAbs, we next determined the relative proportion of B cell subsets with these features by integrating single-cell RNA-sequencing and repertoire sequencing of HA-specific B cells isolated from 22 subjects following cH5/1 vaccination (d112; FIG. 16A). Notably, most B cells isolated likely target the H1 stalk domain as we sequenced sorted cH5/1+ B cells and humans have no measurable pre-existing immunity against the H5 head domain (Han et al., 2020). However, subjects may have recruited naïve B cells against the H5 head component of the cH5/1 vaccine, therefore the isolated B cell pool is likely a heterogenous population of mostly H1 stalk domain-reactive B cells and some H5 head domain-reactive B cells. To investigate the proportion of B cells with repertoire features of B cells targeting the anchor epitope, we selected B cells that used VH3-23/VH3-30/VH3-30-3/VH3-48, VK3-11/VK3-15, JK4/JK5, a 10 amino acid length K-CDR3, and possessed an NWP motif within the K-CDR3. For reference, we additionally segregated out B cells expressing VH1-69 and a kappa chain, as these are the dominate repertoire features of B cells targeting the BN stalk epitope (FIG. 17A, C, E). We identified that B cells with features of antibodies binding the anchor epitope were abundant within the human B cell repertoire, with 6% of all B cells identified fitting within this defined repertoire (FIG. 18A). Of subjects with ten or more VDJ+ B cells (n=20), we identified anchor targeting B cells in all but one subject (FIG. 18B). The anchor targeting B cell pool largely used VH3-23/VK3-15 pairing (FIG. 18C). Additionally, we generated 34 mAbs from the selected anchor targeting B cell list and 31 of these mAbs competed with 047-09 4F04 (FIG. 18D). The anchor epitope B cells had a similar number of mutations as VH1-69/kappa B cells (FIG. 18E) and were largely class-switched to IgG1 and IgG3 (FIG. 18F), indicative of prior class-switch recombination and B cell selection within germinal centers. Together, these data indicate that the anchor epitope is a common target of the human MBC repertoire against HA. Moreover, this study indicates that most adults have pre-existing immunity against this epitope that can be harnessed by a potential universal influenza virus vaccine candidate to provide broad protection against H1-expressing viruses.

### B. Experimental Model and Subject Details

### 1. Human Materials

[2273] Human PBMCs were obtained from multiple subjects from multiple cohorts, which is outlined in Table S1. All studies were performed with the approval of the University of Chicago Institutional Review Board (ID #09-043-A). The chimeric HA vaccine study cohort is identified as clinical trial NCT03300050.

### 2. Cell Lines

[2274] Human Embryonic Kidney HEK293T (female, #CRL-11268) and Madin Darby canine kidney MDCK (female, #CCL-34, NBL-2) cells were purchased and authenticated by the American Type Culture Collection (ATCC). All cells were maintained in a humidified atmosphere of 5% CO2 at 37° C. HEK293T cells were maintained in Advanced-DMEM supplemented with 2% ultra-low IgG fetal bovine serum (FBS) (Invitrogen), 1% L-glutamine (Invitrogen) and 1% antibiotic-antimycotic (Invitrogen). MDCK cells were maintained in DMEM supplemented with 10% FBS (Invitrogen), 1% L-glutamine (Invitrogen) and 1% penicillin-streptomycin (Invitrogen).

### C. Method Details

### 1. Monoclonal Antibody Production

[2275] Monoclonal antibodies were generated as previously described (Guthmiller et al., 2019; Smith et al., 2009; Wrammert et al., 2008). Peripheral blood was obtained from each subject approximately 7 days after vaccination or infection or obtained 28+ days post-vaccination. Lymphocytes were isolated and enriched for B cells using RosetteSep. Total PBs (CD3⁻CD19⁺CD27^{hi}CD38^{hi}; all cohorts except 2014 QIV), IgG⁺PBs (CD3⁻CD19⁺IgM⁻CD27^{hi}CD38^{hi}IgG⁺IgA⁻; 2014 QIV), IgA PBs (CD3⁻CD19⁺IgM⁻CD27^{hi}CD38^{hi}IgG⁻IgA⁺; 2014 QIV cohort), or HA⁺ bait-sorted MBCs (CD3⁻CD19⁺CD27⁺CD381^{lo/+}HA⁺, for 030-09M 1B06) were single-cell sorted into 96-well plates. Immunoglobulin heavy and light chain genes were amplified by reverse transcriptase polymerase chain reaction (RT-PCR), sequenced, cloned into human IgG1, human kappa chain, or human lambda expression vectors, and co-transfected into HEK293T cells. Secreted mAbs were purified from the supernatant using protein A agarose beads. For mAbs generated from the 2014 QIV cohort, mAb names include the original isotype of the sorted PB, and all mAbs were expressed as human IgG1. cH5/1-binding B cells (CD19⁺CD27⁺cH5/1⁺) were sorted from subjects 28 days after cH5/1 vaccination (NCT03300050). Cells were sorted with A/California/04/2009 HA (for 030-09M 1B06) or cH5/1 probe with a Y98F mutation to ablate non-specific binding to sialic acids on B cells. MAb heavy chain and light chain sequences were synthesized from single-cell RNA-sequencing data of cH5/1-baited B cells (IDT), and cloned into the human IgG1, human kappa chain, or human lambda expression vectors. B cell clones were determined by aligning all the V(D)J sequences sharing identical progenitor sequences, as predicted by IgBLAST using our in-house software, VGenes. Consensus sequence analysis was performed using WebLogo (Crooks et al., 2004) and sequence alignments were determined using Clustal Omega.

### 2. Viruses and Recombinant Proteins

[2276] Influenza viruses used in all assays were grown in-house in specific pathogen free (SPF) eggs, harvested, purified, and titered. The A/swine/Mexico/AVX August2011 H1N2 virus (Mena et al., 2016) was provided by Ignacio Mena, Adolfo Garcia-Sastre, and Sean Liu at Icahn School of Medicine at Mount Sinai. Recombinant HA, cHA, and mini-HA were obtained from BEI Resources or kindly provided by the Krammer laboratory at Icahn School of Medicine at Mount Sinai, the Coughlan laboratory at The University of Maryland School of Medicine, or the Wilson laboratory at the University of Chicago. Recombinant HA mutant proteins used in FIG. 13 were generated with identified mutations from the deep mutational scanning experiments (see below) or with known mutations that have arisen naturally or were identified in other studies (FIG. 21). All mutations were made on HA from A/California/July 2009. Mutant HAs were expressed in HEK293T cells and purified using Ni-NTA agarose beads (Qiagen).

### 3. Antigen Specific ELISA

[2277] High protein-binding microtiter plates (Costar) were coated with 8 hemagglutination units (HAU) of virus in carbonate buffer or with recombinant HA, including HA mutants described below, at 2 g/ml in phosphate-buffered saline (PBS) overnight at 4° C. Plates were washed the next morning with PBS 0.05% Tween and blocked with PBS containing 20% fetal bovine serum (FBS) for 1 hr at 37° C. Antibodies were then serially diluted 1:3 starting at 10 g/ml and incubated for 1.5 hr at 37° C. Horseradish peroxidase (HRP)-conjugated goat anti-human IgG antibody diluted 1:1000 (Jackson Immuno Research) was used to detect binding of mAbs, and plates were subsequently developed with Super Aquablue ELISA substrate (eBiosciences). Absorbance was measured at 405 nm on a microplate spectrophotometer (BioRad). To standardize the assays, control antibodies with known binding characteristics were included on each plate, and the plates were developed when the absorbance of the control reached 3.0 OD units. All ELISAs were performed in duplicate twice. To determine mAb affinity, a non-linear regression was performed on background subtracted ODs and Kd values were reported. To classify antigen-specificity, mAbs that did not definitively bind the HA head or stalk are listed as binding unknown HA⁺ epitopes. Affinity measurements, as represented as Kd at a molar concentration (M), were calculated using Prism 9 (Graphpad) by performing a non-linear regression.

### 4. Deep Mutational Scanning for Stalk Domain Mutants

[2278] The mutant libraires used herein were previously described (Doud and Bloom, 2016). The libraries consist of all single amino-acid mutations to A/WSN/1933 (H1N1). The experiments were performed by using biological triplicate libraries. The mutational antigenic profiling of the 045-09 2B06 was performed as previously outlined (Doud et al., 2017). In brief, 10⁶ TCID50 of two of the virus library biological replicates was diluted in 1 mL in IGM (Opti-MEM supplemented with 0.01% FBS, 0.3% BSA, and 100 g/ml calcium chloride) and incubated with an equal volume of 045-09 2B06 antibody at a final concentration of 50 or 25 g/mL for 1.5 hours at 37° C. MDCK-SIAT1 cells were infected with the virus antibody mixtures. 2 hours post-infection, the media was removed, the cells washed with 1 ml PBS, and 2 ml of fresh IGM was added. 15 hours post-infection, viral RNA was extracted, and PCR amplified according to the barcoded-subamplicon library preparation as previously described (Doud and Bloom, 2016). The overall fraction of virions that survive antibody neutralization was estimated using qRT-PCR targeting the viral nucleoprotein (NP) and cellular GAPDH as previously described (Doud et al., 2017). Using 10-fold serial dilutions of the virus libraries, we infected cells with no antibody selection to serve as a standard curve of infectivity. qPCR Ct values from the standard curve samples compared to the virus-antibody mix samples are determined for NP and GAPDH. We then generate a linear regression to fit the difference between the NP and GAPDH Ct values for the standard curve samples, and then use this curve to interpolate the fraction surviving for the antibody-virus selection samples. Across the three library replicates the fraction of virus surviving antibody selection was 0.17, 0.1, and 0.14.

[2279] Illumina(R) deep sequencing data was analyzed using dms_tools2 version 2.4.12 software package (Bloom, 2015) which can be found online at github.com/jbloomlab/dms_tools2. All of the computer code used is at https://github.com/jbloomlab/2B06_DMS, and the Jupyter notebook that performs most of the analysis is at github.com/jbloomlab/2B06_DMS/blob/master/analysis_notebook.ipynb. The sequencing counts were processed to estimate the differential selection for each mutation, which is the log enrichment of that mutation in the antibody-selected condition versus the control (Doud et al., 2017). The numerical measurements of the differential selection that 2B06 imposes on each mutation can be found here: github.com/jbloomlab/2B06_DMS/blob/master/results/diffsel/tidy_diffsel.csv.

### 5. Competition ELISAs

[2280] Plates were coated with 50 μl of A/California/July 2009 HA at a concentration of 1 g/ml and incubated overnight at 4° C. To biotinylate the antibodies with known epitope specificities, CR9114 and 047-09-4F04, were incubated at 4° C. with EZ-Link™ Sulfo-NHS-Biotin (Thermo Scientific) for 24 h or 48 h prior to use, respectively. After blocking the plates with PBS 20% FBS for 1 h at 37° C., serum samples were incubated (starting dilution of 1:50 for human serum or 20 g/ml for mAbs) in the coated wells for 2 h at room temperature. Either biotinylated CR9114 or 047-09-4F04 was then added at a concentration equal to twice its Kd and incubated in the wells with the serum or mAbs for 2 h at room temperature. The biotinylated antibodies were desalted before addition to remove free biotin using Zeba™ spin desalting columns, 7k MWCO (Thermo Scientific). After washing the plates, wells were incubated with HRP-conjugated streptavidin (Southern Biotech) at 37° C. for 1 h for detection of the biotinylated antibody. Super Aquablue ELISA substrate (eBiosciences) was then added and absorbance was measured at 405 nm on a microplate spectrophotometer (Bio-Rad). To standardize the assays, biotinylated CR9114 or TS-09-4F04 was incubated in designated wells on each plate without any competing serum or mAb, and data were recorded when the absorbance of these wells reached an optical density (OD) of 1 to 1.5 units. After subtracting background, percent competition by serum samples was then determined by dividing a sample's observed OD by the OD reached by the positive control, subtracting this value from 1, and multiplying by 100. For the serum data, ODs were log transformed and analyzed by non-linear regression to determine EC50 values using Prism software (Graphpad). For FIG. 16 and FIG. 22, only subjects with serum for all timepoints were included.

### 6. Microneutralization Assays

[2281] Microneutralization assays for mAb characterization were carried out as previously described (Chen et al., 2018; Henry Dunand et al., 2015). MDCK cells were maintained in DMEM supplemented with 10% FBS, 1% penicillin-streptomycin, and 1% L-glutamine at 37° C. with 5% CO2. The day before the experiment, 25,000 MDCK cells were added to each well of a 96-well plate. Serial two-fold dilutions of mAb were mixed with an equal volume of 100 TCID50 of virus for 1 hr and added to MDCK cells for 1 hr at 37° C. The mixture was removed, and cells were cultured for 20 hrs at 37° C. with 1× MEM supplemented with 1 g/ml tosyl phenylalanyl chloromethyl ketone (TPCK)-treated trypsin and appropriate mAb concentration. Cells were washed twice with PBS, fixed with 80% ice cold acetone at 20° C. for at least 1 hr, washed 3 times with PBS, blocked for 30 min with 3% BSA, and then treated for 30 min with 2% H2O2. Cells were incubated with a mouse anti-nucleoprotein antibody (1:1000; Millipore) in 3% BSA-PBS for 1 hr at room temperature (RT), followed by goat anti-mouse IgG HRP (1:1000; Southern Biotech) in 3% BSA-PBS for 1 hr at RT. The plates were developed with Super Aquablue ELISA substrate at 405 nm until virus only controls reached an OD of 1. The signal from uninfected wells was averaged to represent 100% inhibition. The signal from infected wells without mAb was averaged to represent 0% inhibition. Duplication wells were used to calculate the mean and SD of neutralization, and inhibitory concentration 50 (IC50) was determined by a sigmoidal dose response curve. The inhibition ratio (%) was calculated as below: ((OD Pos. Control−OD Sample)/(OD Pos. Control−OD Neg. Control))*100. The final IC50 was determined using Prism software (GraphPad).

### 7. In Vivo Challenge Infections

[2282] MAb cocktails (Table S4) were passively transferred into 6- to 8-week-old female BALB/c mice (Jackson Laboratories) by intraperitoneal injection of 0.2, 1, and 5 mg/kg mAb cocktail, which are further detailed in FIG. 22. Negative control mice received 5 mg/kg of the anthrax-specific mAb 003-15D03 as an isotype control. Two hours post-mAb injection, mice were anesthetized with isoflurane and intranasally challenged with 10 LD50 of mouse-adapted A/Netherlands/602/2009 H1N1 virus, with 10 l of virus administered into each nostril (20 μl total). As a read out, survival and weight loss were monitored 1-2 times daily for two weeks. Mice were euthanized upon 25% weight loss or at the end of the experiment (14 days post challenge). All experiments were done in accordance with the University of Chicago Institutional Animal Care and Use Committee.

### 8. HA Footprint Mapping

[2283] The footprints of three mAbs (FISW84 (PDB: 6HJQ), CR9114 (PDB: 4FQI), and FI6v3 (PDB: 3ZTN)) were mapped onto one HA protomer (A/California/April 2009, PDB: 4M4Y) using UCSF Chimera (Pettersen et al., 2004) and Adobe Photoshop. EM maps of HA:fab complexes were aligned in UCSF Chimera and footprints were mapped onto one HA protomer. Individual protomers of the HA trimer are indicated in different shades of gray.

### 9. Negative Stain EM

[2284] Immune complexes were prepared by incubating Fab with HA (A/California/04/2009 with E47K or E47G stabilizing mutations) at greater than 3:1 molar ratio for 2 hours at room temperature (RT). Samples were deposited at −10 g/mL on glow-discharged, carbon-coated 400 mesh copper grids (Electron Microscopy Sciences, EMS) and stained with 2% w/v uranyl formate. Samples were imaged at 52,000× magnification, 120 kV, on a Tecnai Spirit T12 microscope equipped with an Eagle CCD 4 k camera (FEI) or 62,000 magnification, 200 kV, on a Tecnai T20 microscope equipped with a CMOS 4k camera (TVIPS). Micrographs were collected with Leginon, single particles were processed with Appion and Relion, footprints were mapped with UCSF Chimera, and figures were made with UCSF Chimera (Lander et al., 2009; Pettersen et al., 2004; Scheres, 2012; Suloway et al., 2005).

### 10. EMPEM

[2285] Human serum samples were heat-inactivated at 55° C. for 30 min before incubating on Capture Select IgG-Fc (ms) Affinity Matrix (Fisher) to bind IgG at 4° C. for 72 hours on a rotator. Samples with IgG bound to resin were centrifuged at 4,000 rpm and supernatant was collected. IgG samples were washed 3 times with PBS followed by centrifugation to remove supernatant. Samples were buffer exchanged into buffer containing 100 mM Tris, 2 mM EDTA, and 10 mM L-cysteine through centrifugation with Amicon filters, then incubated with papain for 4 hours at 37° C. shaking at 80 rpm. The digestion reactions were quenched with 50 mM iodoacetamide, buffer exchanged to TBS, and separated by size-exclusion chromatography (SEC) with a Superdex 200 increase 10/300 column (GE Healthcare). Fab and undigested IgG were collected and concentrated and 500 g Fab was complexed with 10 g HA for 18 hours at room temperature. Reactions were purified by SEC and immune complexes were collected and concentrated. Negative stain EM grids were prepared as described above.

### 11. Membrane-Bound HA and mAb Staining

[2286] HEK293T cells were plated into a 6-well plate and transfected overnight with 0.2 g of plasmid and 10 g/ml PEI. After 12-16 hours, media was replaced with PFHM-II and cells were rested for 3 days. Transfected cells were trypsinized, washed, and aliquoted. Cells were stained with 10 g/ml of individual mAbs for 30 minutes. Cells were washed and stained with anti-human IgG Fc-BV421 for 30 minutes. Cells were washed 2 times and run on a BD LSRFortessa X-20. Data were analyzed using FlowJo v10.

### 12. Single-Cell RNA-Seq and Repertoire Analysis

[2287] cH5/1⁺ memory B cells (CD19⁺CD27⁺HA⁺) were bulk sorted and partitioned into nanoliter-scale Gel Bead-In-Emulsions (GEMs) to achieve single cell resolution using the 10× Genomics Chromium Controller and according to the manufacturer's instruction (10× Genomics). The sorted single cells were processed according to 5′ gene expression and B cell Immunoglobulin (Ig) enrichment instruction to prepare the libraries for sequencing. Libraries were sequenced using an Illumina HiSeq 4000 at Northwestern University or an Illumina NextSeq 500 at the University of Chicago. Cellranger Single-Cell Software Suite (version 3.0) was used to perform sample de-multiplexing, barcode processing, and single-cell 5′ and V(D)J counting, and Cellranger mkfastq was used to de-multiplex raw base call (BCL) files into sample-specific fastq files. Subsequently, reads were aligned to the GRCh38 human genome. Cellranger counts and Cellranger vdj package were used to identify gene expression and assemble V(D)J pairs of antibodies.

[2288] Single cell datasets were analyzed using Seurat 3 toolkit. We performed conventional pre-process steps for all 22 subjects including cell quality control (QC), normalization, identification of highly variable features, data scaling, and linear dimensional reduction. More specifically, we only kept cells with more than 200 and less then 2500 detected genes for QC step. We normalized the RNA data using conventional log normalization. We identified 2000 highly variable genes for each dataset and performed principle component analysis (PCA) in linear dimensional reduction step. We then integrated all 22 single cell datasets from vaccinated subjects to remove batch effects. In this analysis, we filtered our dataset and only kept cells with both transcriptome and full length and paired heavy and light chain V(D)J sequences (n=1955). From these cells, we identified a group of “VH1-69/Kappa” B cells that used the VH1-69 gene and kappa light chain. We also identified a group of “anchor epitope” B cells by the following rules: 1) VH locus: VH3-23, VH3-30, VH3-30-3, or VH-3-48; 2) VK locus: VK3-11 or VK3-15; 3) JK locus: JK4 or JK5; 4) K-CDR3 length equal to 10; 5) a “NWP” pattern in K-CDR3 peptide.

### 13. HA Conservation Modeling

[2289] To generate the group 1 HA conservation model, we selected one representative sequence for each group 1 HA subtype from FluDB (https://www.fludb.org/; Table S5) according to a prior study (Burke and Smith, 2014). A multiple sequence alignment from these HA protein sequences was generated using MUSCLE (Edgar, 2004) and the conservation of each residue was quantified using an entropy model (Crooks et al., 2004). HA conservation was visualized on a H1 protein (PDB: 4JTV) using PyMOL (Schrodinger).

### 14. Statistical Analysis

[2290] All statistical analyses were performed using Prism software (Graphpad Version 7.0) or R. Sample sizes (n) for the number of mAbs tested are indicated in corresponding figures or in the center of pie graphs. Number of biological repeats for experiments and specific tests for statistical significance used are indicated in the corresponding figure legends. P values less than or equal to 0.05 were considered significant. * P≤0.05, ** P≤0.01, *** P≤0.001, **** P≤0.0001.

### D. Tables

TABLE S1
Subject information and demographics.

| Subject | | Vaccine/Infection | Age | Sex |
|---|---|---|---|---|
| 029-09 | | 2009 MIV | 24 | M |
| 030-09 | | 2009 MIV | 31 | F |
| 045-09 | | 2009 MIV | 24 | M |
| 047-09 | | 2009 MIV | 22 | M |
| 051-09 | | 2009 MIV | 42 | M |
| SFV005 | | 2009 MIV | 60 | F |
| SFV009 | | 2009 MIV | 31 | F |
| SFV015 | | 2009 MIV | 48 | F |
| SFV018 | | 2009 MIV | 58 | F |
| SFV019 | | 2009 MIV | 48 | F |
| SFV020 | | 2009 MIV | 64 | F |
| sc70 | | 2009 pH1N1 Infection | 38 | F |
| sc1009 | | 2009 pH1N1 Infection | 21 | M |
| SF1000 | | 2009 pH1N1 Infection | 37 | M |
| 008-10 | | 2010 TIV | 26 | F |
| 011-10 | | 2010 TIV | 30 | M |
| 014-10 | | 2010 TIV | 27 | M |
| 017-10 | | 2010 TIV | 24 | M |
| 019-10 | | 2010 TIV | 22 | F |
| 028-10 | | 2010 TIV | 38 | M |
| 034-10 | | 2010 TIV | 39 | F |
| 039-10 | | 2010 TIV | 25 | M |
| 051-10 | | 2010 TIV | 43 | M |
| 220-14 | | 2014 QIV | 24 | F |
| 221-14 | | 2014 QIV | 34 | F |
| 236-14 | | 2014 QIV | 32 | F |
| 237-14 | | 2014 QIV | 32 | F |
| 240-14 | | 2014 QIV | 28 | M |
| 241-14 | | 2014 QIV | 29 | F |
| 121/324 | (d7/d112) | cHA IIV + AS03/IIV + AS03 | 24 | F |
| 222/310 | (d91/d112) | cHA LAIV/IIV + AS03 | 25 | F |

| | | | |
|---|---|---|---|
| 301 | cHA IIV + AS03/IIV + AS03 | 34 | F |
| 308 | cHA LAIV/IIV + AS03 | 29 | F |
| 311 | cHA IIV +AS03/IIV + AS03 | 28 | M |
| 317 | cHA LAIV/IIV + AS03 | 37 | M |
| 319 | cHA LAIV/IIV + AS03 | 31 | F |
| 322 | cHA IIV + AS03/IIV + AS03 | 20 | F |
| 326 | cHA LAIV/IIV | 27 | M |
| 327 | cHA LAIV/IIV + AS03 | 22 | F |
| 334 | cHA LAIV/IIV + AS03 | 33 | M |
| 336 | cHA LAIV/IIV + AS03 | 36 | F |
| 337 | cHA LAIV/IIV + AS03 | 27 | F |
| 346 | cHA LAIV/IIV | 20 | F |
| 347 | cHA LAIV/IIV + AS03 | 31 | F |
| 350 | cHA LAIV/IIV + AS03 | 35 | F |
| 351 | cHA IIV + AS03/IIV + AS03 | 27 | F |

TABLE S2
Anchor epitope binding mAb information.

| | Cellular | | | | HC Clone | | | KC Clone |
|---|---|---|---|---|---|---|---|---|
| mAb | Source | VH | DH | JH | # | VK | JK | # |
| 030-09 3E05 | Plasmablast | 3-23 | 3-22 | 4 | Non-clonal | 3-15 | 5 | 9 |
| 030-09M 1B06 | MBC | 3-23 | 3-10 | 4 | Non-clonal | 3-11 | 5 | 7 |
| 045-09 1A03 | Plasmablast | 3-23 | 6-13 | 4 | Non-clonal | 3-11 | 4 | 6 |
| 045-09 2B03 | Plasmablast | 3-23 | 5-12 | 4 | Non-clonal | 3-11 | 5 | 7 |
| 047-09 4F04 | Plasmablast | 3-48 | 6-19 | 4 | Non-clonal | 3-15 | 4 | 8 |
| SFV009 3D04 | Plasmablast | 3-23 | 2-2 | 4 | Non-clonal | 3-15 | 4 | 8 |
| SFV009 3G01 | Plasmablast | 3-30 | 3-16 | 4 | Non-clonal | 3-11 | 5 | 7 |
| SFV009 3G03 | Plasmablast | 3-23 | 3-15-3 | 5 | Non-clonal | 3-11 | 5 | 7 |
| 236 IgG 1A02 | Plasmablast | 3-23 | 2-2 | 4 | 2 | 3-11 | 5 | 7 |
| 236 IgG 1D01 | Plasmablast | 3-23 | 6-19 | 4 | Non-clonal | 3-11 | 5 | 7 |
| 236 IgG 1F01 | Plasmablast | 3-23 | 2-2 | 4 | 2 | 3-11 | 5 | 7 |
| 236 IgA 1F06 | Plasmablast | 3-23 | 2-2 | 4 | 2 | 3-11 | 5 | 7 |
| 241 IgG 2A06 | Plasmablast | 3-23 | 6-19 | 5 | Non-clonal | 3-15 | 4 | 8 |
| 241 IgA 1D05 | Plasmablast | 3-23 | 5-18 | 4 | 3 | 3-15 | 5 | 9 |
| 241 IgA 2F04 | Plasmablast | 3-23 | 2-21 | 4 | 3 | 3-15 | 5 | 9 |
| 241 IgA 2F06 | Plasmablast | 3-23 | 3-9 | 4 | 3 | 3-15 | 5 | 9 |
| 121 2C06 | Plasmablast | 3-23 | 2-15 | 4 | Non-clonal | 3-15 | 4 | 8 |
| 222 1C06 | Plasmablast | 3-48 | 2-15-2 | 4 | Non-clonal | 3-15 | 4 | 8 |
| 301_91 | MBC | 3-23 | 3-9 | 5 | Non-clonal | 3-11 | 5 | 7 |
| 301_249 | MBC | 3-48 | 5-24 | 3 | Non-clonal | 3-11 | 4 | Non-clonal |
| 301_275 | MBC | 3-23 | 2-21 | 4 | 1 | 3-15 | 4 | 8 |
| 308_60 | MBC | 3-23 | 1-26 | 4 | Non-clonal | 3-11 | 4 | 8 |
| 310_10 | MBC | 3-23 | 1-14 | 4 | Non-clonal | 3-15 | 4 | 8 |
| 310_49 | MBC | 3-23 | 3-22 | 4 | Non-clonal | 3-15 | 5 | 9 |
| 317_30 | MBC | 3-23 | 6-13 | 4 | Non-clonal | 3-15 | 4 | 8 |
| 317_117 | MBC | 3-23 | 2-2 | 4 | Non-clonal | 3-15 | 5 | 9 |
| 319_75 | MBC | 3-23 | 3-22 | 3 | Non-clonal | 3-11 | 5 | 7 |
| 319_147 | MBC | 3-48 | 3-15-3 | 6 | Non-clonal | 3-15 | 4 | 8 |
| 319_345 | MBC | 3-23 | 3-9 | 4 | 4 | 3-15 | 4 | 8 |
| 319_373 | MBC | 3-23 | 6-19 | 4 | 4 | 3-15 | 4 | 8 |
| 322_48 | MBC | 3-23 | 1-26 | 4 | 1 | 3-15 | 5 | 9 |
| 324_5 | MBC | 3-23 | 2-21 | 3 | Non-clonal | 3-15 | 5 | 9 |
| 326_38 | MBC | 3-23 | 1-26 | 4 | Non-clonal | 3-11 | 4 | 6 |
| 326_42 | MBC | 3-23 | 3-16 | 5 | Non-clonal | 3-15 | 4 | 8 |
| 326_50 | MBC | 3-30 | 5-12 | 4 | Non-clonal | 3-15 | 5 | 9 |
| 327_32 | MBC | 3-23 | 3-10 | 4 | Non-clonal | 3-15 | 4 | 8 |
| 334_52 | MBC | 3-48 | 6-13 | 6 | 5 | 3-15 | 4 | 8 |
| 334_53 | MBC | 3-23 | 2-2 | 4 | Non-clonal | 3-15 | 5 | 9 |
| 334_62 | MBC | 3-23 | 2-2 | 1 | Non-clonal | 3-11 | 4 | 6 |
| 337_32 | MBC | 3-30 | 5-24 | 4 | Non-clonal | 3-11 | 5 | 7 |
| 337_43 | MBC | 3-23 | 5-24 | 4 | Non-clonal | 3-15 | 4 | 8 |
| 337_95 | MBC | 3-48 | 3-16 | 6 | Non-clonal | 3-15 | 5 | 9 |
| 346_54 | MBC | 3-30-3 | 3-16 | 5 | Non-clonal | 3-11 | 4 | 6 |
| 347_64 | MBC | 3-23 | 1-7 | 2 | Non-clonal | 3-11 | 5 | 7 |
| 347_246 | MBC | 3-23 | 1-1 | 5 | Non-clonal | 3-15 | 5 | 9 |
| 350_8 | MBC | 3-23 | 3-16 | 4 | Non-clonal | 3-15 | 4 | 8 |
| 350_22 | MBC | 3-23 | 6-19 | 4 | Non-clonal | 3-11 | 4 | 6 |
| 350_132 | MBC | 3-48 | 1-26 | 4 | Non-clonal | 3-15 | 4 | 8 |
| 350_145 | MBC | 3-48 | 4-17 | 6 | 5 | 3-15 | 4 | 8 |
| 351_38 | MBC | 3-23 | 6-13 | 4 | Non-clonal | 3-15 | 4 | 8 |
| 351_93 | MBC | 3-23 | 1-1 | 4 | Non-clonal | 3-15 | 4 | 8 |
| 351_139 | MBC | 3-23 | 5-24 | 4 | Non-clonal | 3-11 | 4 | 6 |

TABLE S3
Mutation information for FIG. 2C-D.

| | | 045-09 2B06 | | | |
|---|---|---|---|---|---|
| | | Deep | Other | | |
| | Naturally | Mutational | Experimentally | | |
| Mutation | Occurring? | Scan? | Determined? | Note | Source |
| H38S (HA1) | | No | Yes | Affects C179 | (Doud et al., 2018) |
| | | | | binding | |
| L292R (HA1) | | Yes | | In footprint of | (Lang et al., 2017) |
| | | | | many VH1-69 | |
| | | | | utilizing mAbs | |
| I323V (HA1) | Yes | No | | Present in pH1N1 | (Xu et al., 2012) |
| | | | | viruses | |
| K39D (HA2) | | Yes | Yes | Contacts with | (Fu et al., 2016) |
| | | | | VH3-30 mAb | |
| Q42E (HA2) | | Yes | Yes | Interact with | (Wu et al., 2020) |
| | | | | CR9114 and | |
| | | | | FI6v3 | |
| A44V (HA2) | | No | Yes | Expands in | (Park et al., 2020; |
| | | | | presence of stalk | Tan et al., 2012) |
| | | | | binding mAbs, | |
| | | | | escape mutant of | |
| | | | | 6F12 | |
| I45L (HA2) | | Yes | Yes | Mutation | (Lingwood et al., |
| | | | | associated with | 2012; Wu et al., |
| | | | | resistance to | 2020; Yassine et |
| | | | | group 1 | al., 2018) |
| | | | | neutralizing stalk | |
| | | | | mAbs | |
| D46R (HA2) | | Yes | | Pre-pH1N1 | |
| | | | | viruses express | |
| | | | | N46 | |
| E47K (HA2) | Yes | Yes | | Associated with | (Cotter et al., 2014) |
| | | | | HA protein | |
| | | | | stability | |
| T49R (HA2) | | Yes | | Mutation | (Lingwood et al., |
| | | | | associated with | 2012; Yassine et |
| | | | | resistance to | al., 2018) |
| | | | | group 1 | |
| | | | | neutralizing stalk | |
| | | | | mAbs | |
| N50R (HA2) | | Yes | | Interacts with | (Dreyfus et al., |
| | | | | CR9114 | 2012) |
| v52A (HA2) | | No | Yes | Affects FI6v3 | (Wu et al., 2020) |
| | | | | mAb binding | |
| I56A (HA2) | | No | Yes | Affects F10 mAb | (Sui et al., 2009) |
| | | | | binding | |
| E57K (HA2) | | Yes | | Critical residue | (Vanderlinden et |
| | | | | for membrane | al., 2010) |
| | | | | fusion | |

TABLE S4
MAbs used in Figure 3 infection studies.

| mAb name | Epitope Specificity |
|---|---|
| 241 IgG 2A06 | Anchor |
| 047-09 4F04 | Anchor |
| 030-09 3E05 | Anchor |
| SFV009 3G01 | Anchor |
| 236 IgG 1A02 | Anchor |
| 045-09 2B06 | BN Stalk |
| SFV005 2G02 | BN Stalk |
| SFV019 4E03 | BN Stalk |
| 220 IgG 1A05 | BN Stalk |
| 241 IgA 2E06 | BN Stalk |

TABLE S5
Group 1 HA strains used in FIG. S2C.

| HA Subtype | Strain Name |
|---|---|
| H1 | A/California/04/2009 |
| H2 | A/Singapore/1/1957 |
| H5 | A/mallard/Italy/3401/2005 |
| H6 | A/chicken/Taiwan/0705/1999 |
| H8 | A/turkey/Ontario/6118/1968 |
| H9 | A/swine/HongKong/9/1998 |
| H11 | A/duck/England/1/1056 |
| H12 | A/duck/Alberta/60/1976 |
| H13 | A/gull/Maryland/704/1977 |
| H16 | A/black-headed-gull/Turkmenistan/13/1976 |
| H17 | A/little-yellow-shouldered-bat/Guatemala/060/2010 |
| H18 | A/flat-facedbat/Peru/033/2010 |

[2291] All of the methods disclosed and claimed herein can be made and executed without undue experimentation in light of the present disclosure. While the compositions and methods of this invention have been described in terms of preferred embodiments, it will be apparent to those of skill in the art that variations may be applied to the methods and in the steps or in the sequence of steps of the method described herein without departing from the concept, spirit and scope of the invention. More specifically, it will be apparent that certain agents which are both chemically and physiologically related may be substituted for the agents described herein while the same or similar results would be achieved. All such similar substitutes and modifications apparent to those skilled in the art are deemed to be within the spirit, scope and concept of the invention as defined by the appended claims.

LENGTHY TABLES
The patent application contains a lengthy table section. A copy of the table is available in electronic form from the USPTO web site (https://seqdata.uspto.gov/?pageRequest=docDetail&DocID=US20250059260A1). An electronic copy of the table will also be available from the USPTO upon request and payment of the fee set forth in 37 CFR 1.19(b)(3).

1. An antibody or antigen binding fragment comprising a heavy chain variable region and a light chain variable region, wherein the heavy chain variable region comprises a HCDR1, HCDR2, and HCDR3 having at least 80% sequence identity to the HCDR1, HCR2, HCR3 from a heavy chain variable region encoded by the heavy chain nucleic acid of an antibody clone of Table 1 and wherein the light chain variable region comprises a LCDR1, LCDR2, and LCDR3 having at least 80% sequence identity to the LCDR1, LCDR2, and LCDR3 from the light chain variable region encoded by the light chain nucleic acid of the same antibody clone of Table 1.

2. The antibody or antigen binding fragment of claim 1, wherein the heavy chain variable region comprises a HCDR1, HCDR2, and HCDR3 having the amino acid sequence of an of a HCDR1, HCDR2, and HCDR3 of a clone encoded by the heavy chain nucleic acid of Table 1 and wherein the light chain variable region comprises a LCDR1, LCDR2, and LCDR3 comprising the amino acid sequence of the LCDR1, LCDR2, and LCDR3 from the light chain variable region of the same clone encoded by the light chain nucleic acid of Table 1.

3. The antibody or antigen binding fragment of claim 1 or 2, wherein the HCDR1, HCDR2, HCDR2, LCDR1, LCDR2, and LCDR3 each comprise an amino acid sequence that has at least 80% sequence identity to an HCDR1, HCDR2, HCDR2, LCDR1, LCDR2, and LCDR3 of Table 1, wherein the HCDR1, HCDR2, HCDR2, LCDR1, LCDR2, and LCDR3 are from the same antibody clone.

4. The antibody or antigen binding fragment of claim 1 or 2, wherein the HCDR1, HCDR2, HCDR2, LCDR1, LCDR2, and LCDR3 each comprise the amino acid sequence of an HCDR1, HCDR2, HCDR2, LCDR1, LCDR2, and LCDR3 of Table 1, wherein the HCDR1, HCDR2, HCDR2, LCDR1, LCDR2, and LCDR3 are from the same antibody clone.

5. The antibody or antigen binding fragment of any one of claims 1-4, wherein the heavy chain variable region comprises an amino acid sequence with at least 80% sequence identity to a heavy chain variable region of an antibody clone encoded by the heavy chain nucleic acid of Table 1 and/or the light chain variable region comprises an amino acid sequence with at least 80% sequence identity to the light chain variable region of the same antibody clone encoded by the light chain nucleic acid of Table 1.

6. The antibody or antigen binding fragment of claim 5, wherein the heavy chain variable region comprises the amino acid sequence of a heavy chain variable region of an antibody clone encoded by the heavy chain nucleic acid of Table 1 and/or the light chain variable region comprises the amino acid sequence of the same antibody clone encoded by the light chain nucleic acid of Table 1.

7. The antibody or antigen binding fragment of any one of claims 1-6, wherein the antibody or antigen binding fragment comprises a heavy chain framework region (HFR) 1, HFR2, HFR3, and HFR4 and light chain framework region (LFR) 1, LFR2, LFR3, and LFR4, and wherein the HFR1, HFR2, HFR3, and HFR4 comprises an amino acid sequence with at least 80% sequence identity to an HFR1, HFR2, HFR3, and HFR4, respectively, of an antibody clone encoded by the heavy chain nucleic acid of Table 1, and the LFR1, LFR2, LFR3, and LFR4 comprises an amino acid sequence with at least 80% sequence identity to the LFR1, LFR2, LFR3, and LFR4, respectively, ofthe same antibody clone encoded by the light chain nucleic acid of Table 1.

8. The antibody or antigen binding fragment of any one of claims 1-6, wherein the HFR1, HFR2, HFR3, and HFR4 comprises the amino acid sequence of an HFR1, HFR2, HFR3, and HFR4, respectively, of an antibody clone encoded by the heavy chain nucleic acid of Table 1, and the LFR1, LFR2, LFR3, and LFR4 comprises the amino acid sequence of the LFR1, LFR2, LFR3, and LFR4, respectively, of the same antibody clone encoded by the light chain nucleic acid of Table 1.

9. The antibody or antigen binding fragment of any one of claims 1-8, wherein the antibody comprises a heavy chain and a light chain and wherein the heavy chain comprises an amino acid sequence with at least 70% sequence identity to a heavy chain of an antibody clone encoded by the heavy chain nucleic acid of Table 1 and the light chain comprises an amino acid sequence with at least 70% sequence identity to the light chain of the same antibody clone encoded by the light chain nucleic acid of Table 1.

10. The antibody or antigen binding fragment of claim 9, wherein the antibody comprises a heavy chain and a light chain and wherein the heavy chain comprises the amino acid sequence of an antibody clone encoded by the heavy chain nucleic acid of Table 1 and the light chain comprises the amino acid sequence of the same antibody clone encoded by the light chain nucleic acid of Table 1.

11. The antibody of any one of claims 1-10, wherein the antibody is human, chimeric, or humanized.

12. The antibody or antigen binding fragment of any one of claims 1-11, wherein the antibody is a neutralizing antibody.

13. The antibody or antigen binding fragment of any one of claims 1-12, wherein the antibody is a human antibody, humanized antibody, recombinant antibody, chimeric antibody, an antibody derivative, a veneered antibody, a diabody, a monoclonal antibody, a single domain antibody, or a single chain antibody.

14. The antigen binding fragment of any one of claims 1-12, wherein the antigen binding fragment is a single chain variable fragment (scFv), F(ab′)₂, Fab′, Fab, Fv, or rIgG.

15. A polypeptide comprising the antigen binding fragment of any one of claims 1-14.

16. The polypeptide of claim 15, wherein the polypeptide comprises at least two antigen binding fragments, wherein each antigen binding fragment is independently selected from an antigen binding fragment of any one of claims 1-14.

17. The polypeptide of claim 15 or 16, wherein the polypeptide is multivalent.

18. The polypeptide of any one of claims 15-17, wherein the polypeptide is bispecific.

19. A composition comprising the antibody or antigen binding fragment of any one of claims 1-18.

20. The composition of claim 19, wherein the composition comprises a pharmaceutical excipient.

21. The composition of claim 19 or 20, wherein the composition further comprises an adjuvant.

22. The composition of any one of claims 19-21, wherein the composition is formulated for parenteral, intravenous, subcutaneous, intramuscular, or intranasal administration.

23. The composition of any one of claims 1-22, wherein the composition comprises at least two antibodies or antigen binding fragments.

24. One or more nucleic acids encoding the antibody or antigen binding fragment of any one of claims 1-14 or the polypeptide of claim 18.

25. A nucleic acid encoding an antibody heavy chain, wherein the nucleic acid has at least 70% sequence identity to a heavy chain nucleic acid of Table 1.

26. A nucleic acid encoding an antibody light chain, wherein the nucleic acid has at least 70% sequence identity to a light chain nucleic acid of Table 1.

27. A vector comprising the nucleic acid(s) of any one of claims 24-26.

28. A host cell comprising the nucleic acid of any one of claims 24-26 or the vector of claim 27.

29. The host cell of claim 28, wherein the host cell is a human cell, B cell, T cell, Chinese hamster ovary, NS0 murine myeloma cell, or PER.C6 cell.

30. A method of a making a cell comprising transferring the nucleic acid(s) of any one of claims 24-26 or the vector of claim 27 into a cell.

31. The method of claim 30, wherein the method further comprises culturing the cell under conditions that allow for expression of a polypeptide from the nucleic acid.

32. The method of claim 31, wherein the method further comprising isolating the expressed polypeptide.

33. The method of any one of claims 30-32, wherein the cell is a human cell, B cell, T cell, Chinese hamster ovary, NS0 murine myeloma cell, or PER.C6 cell.

34. A method for producing a polypeptide comprising transferring the nucleic acid(s) of any one of claims 24-26 or the vector of claim 27 into a cell and isolating polypeptides expressed from the nucleic acid.

35. The method of claim 34, wherein the cell is a human cell, B cell, T cell, Chinese hamster ovary, NS0 murine myeloma cell, or PER.C6 cell.

36. A method for treating or preventing an influenza infection in a subject, the method comprising administering to the subject, the antibody or antigen binding fragment of any one of claims 1-14, the polypeptide of claim 18, or the host cell of claim 28.

37. The method of claim 36, wherein the subject is a human subject.

38. The method of claim 36 or 37, wherein the subject has one or more symptoms of an influenza infection.

39. The method of claim 36 or 37, wherein the subject does not have any symptoms of an influenza infection.

40. The method of any one of claims 35-39, wherein the influenza infection comprises an H1N1 or H1N2 infection.

41. The method of any one of claims 36-40, wherein the subject has been diagnosed with an influenza infection.

42. The method of any one of claims 36-40, wherein the subject has not been diagnosed with an influenza infection.

43. The method of any one of claims 36-42, wherein the subject has been previously vaccinated for influenza.

44. The method of any one of claims 36-42, wherein the subject has not been previously vaccinated for influenza.

45. The method of any one of claims 36-44, wherein the antibody, antigen binding fragment, polypeptide, or cell is administered by parenteral, intravenous, subcutaneous, intramuscular, or intranasal administration.

46. The method of any one of claims 36-45, wherein the subject has been previously treated for an influenza infection.

47. The method of any one of claims 36-46, wherein the subject is administered an additional therapeutic.

48. The method of claim 47, wherein the additional therapeutic comprises a steroid or an anti-viral therapeutic.

49. A method for evaluating a sample from a subject, the method comprising contacting a biological sample from the subject, or extract thereof, with at least one antibody, antigen binding fragment, or polypeptide of any one of claims 1-18.

50. The method of claim 49, wherein the at least one antibody, antigen binding fragment, or polypeptide is operatively linked to a detectable label.

51. The method of claim 49 or 50, wherein the method further comprises incubating the antibody, antigen binding fragment, or polypeptide under conditions that allow for the binding of the antibody, antigen binding fragment, or polypeptide to antigens in the biological sample or extract thereof.

52. The method of any one of claims 49-51, wherein the method further comprises detecting the binding of an antigen to the antibody, antigen binding fragment, or polypeptide.

53. The method of any one of claims 49-52, wherein the method further comprises contacting the biological sample with at least one capture antibody, antigen, or polypeptide.

54. The method of claim 53, wherein the at least one capture antibody, antigen binding fragment, or polypeptide comprises at least one antibody of claims 1-18.

55. The method of claim 53 or 54, wherein the capture antibody is linked to a solid support.

56. The method of any one of claims 49-55, wherein the biological sample comprises a blood sample, urine sample, fecal sample, or nasopharyngeal sample.

57. A method for diagnosing an influenza infection in a subject, the method comprising contacting a biological sample from the subject, or extract thereof, with at least one antibody, antigen binding fragment, or polypeptide of any one of claims 1-18.

58. The method of claim 57, wherein the at least one antibody, antigen binding fragment, or polypeptide is operatively linked to a detectable label.

59. The method of claim 57 or 58, wherein the method further comprises incubating the antibody, antigen binding fragment, or polypeptide under conditions that allow for the binding of the antibody, antigen binding fragment, or polypeptide to antigens in the biological sample or extract thereof.

60. The method of any one of claims 57-59, wherein the method further comprises detecting the binding of an antigen to the antibody, antigen binding fragment, or polypeptide.

61. The method of any one of claims 57-60, wherein the method further comprises contacting the biological sample with at least one capture antibody, antigen, or polypeptide.

62. The method of claim 61, wherein the at least one capture antibody, antigen, or polypeptide comprises at least one antibody, antigen, or polypeptide of claims 1-18.

63. The method of claim 61 or 62, wherein the capture antibody is linked to a solid support.

64. The method of any one of claims 57-63, wherein the biological sample comprises a blood sample, urine sample, fecal sample, or nasopharyngeal sample.

The application's sequence listing, which the Patent Office published only in electronic form, follows.

SEQUENCE LISTING (18668 sequences)

SEQ ID NO: 1 - DNA, 370 bp, Homo sapiens
  source 1..370: mol_type = other DNA
gaggtgcagctgttggagtctgggggaggcttggtacagcctggggggtccctgagactctcctgtgcagcctctggattcacatttggcagctatgccatgacctgggtccgccaggctccagggaaggggctggagtgggtctcaactattactggtagcggtattagcacatactacgcagactccgtgaagggccggttcaccatctccagagacaattccaagaacacgctgaatctgcaaatgaacagcctgagagccgaggacacggccgtatattactgtgcgaaagccgcagcgccacatatagtagtggctggggtctttgactactggggccagggaacaatggtcaccgtctcttcag

SEQ ID NO: 2 - DNA, 367 bp, Homo sapiens
  source 1..367: mol_type = other DNA
gaggtgcagctgttggagtctgggggaggcttggtacagcctggggggtccctgagactctcctgtgcagcctctggattcacctttagcagctatgccatgagctgggtccgcccggctccagggaaggggctggagtgggtctcagctattagtggtagtggtattagcacatactacgcagactccgtgaagggccggttcaccatctccagagacaattccaagaacacgctgtttctacaaatgaacagcctgagagccgaggacacggccgtatattactgtgcgaaagatctaggggattactatgcttcgggctcttttgacttctggggccagggaaccctggtcaccgtctcctcag

SEQ ID NO: 3 - DNA, 370 bp, Homo sapiens
  source 1..370: mol_type = other DNA
gaggtgcagctgttggagtctgggggaggcttggtacagcctggggggtccctgagactctcctgtgcagcctctggattcacctttactagctatgccatgaggtgggtccgccaggctccagggaaggggctggagtgggtctcagctattagtactagtggtggtagtagatactacgcagactccgtgaagggccggttcaccatctccagagacaattccaggaacacgctgtatctgcaaatgaacagcctgagagccgaggacacggccgtatattactgtgcgaaagaaatgcgacgcgatatagcaacagctggttactttgactactggggccagggaaccctggtcaccgtctcctcag

SEQ ID NO: 4 - DNA, 373 bp, Homo sapiens
  source 1..373: mol_type = other DNA
gaggtgcagctgttggagtctgggggaggcttggtacagcctgggaagtccctcagactctcctgtgcagcctctggattcacctttagcaactacgtcatgagctgggtccgccaggctccagggaaggggctggagtgggtctcagctattagtggtagcggtcttagcacatactacgcagactccgtgaagggccggttcaccatctccagagacaattccaagaacaccctgtatctgcaaatgaacagcctgagagccgaagacacggccgtatattactgtgcgaaagatgtagtggctacgaatcctcctctctctggctactttgactactggggccagggaattctggtcaccgtctcctcag

SEQ ID NO: 5 - DNA, 373 bp, Homo sapiens
  source 1..373: mol_type = other DNA
gaggtgcagctggtggagtctgggggaggcttggtacagcctggggggtccctaagactctcctgtgcagcctctggattcaccttcaatacttataacatgaactgggtccgtcaggctccagggaaggggctggagtgggtttcatacattagtagtagcagccttagtcgatactacgcagactctgtgaagggccgattcaccatctccagagacaacgccaagaactcattgtttctgcaaatgaacagcctgagagccgaggacacggctgtgtattactgtgcgagaggagcccaggccgggtatagcagtttcttccctccaacgacgttctggggccagggaaccctggtcaccgtctcctcag

SEQ ID NO: 6 - DNA, 376 bp, Homo sapiens
  source 1..376: mol_type = other DNA
gaggtgcagctgttggagtctgggggaggcttggtacagcctggggggtccctgagactctcctgtgcagcctctggattcacctttagcagatatgccatgaagtgggtccgccaggctccagggaaggggctggagtgggtctcagctatcagtggtagtggtattagtacatactacgcagactccgtgaagggccggttcaccatctccagagacaattccaagaacaccctgtttctgcaaatgaacagcctgagagccgaggacacggccgtttattactgtgcgaaggatcttgaatttgataatgtagtggcggtagctgggctaataggctactggggcccgggaatcctggtcaccgtctcctcag

SEQ ID NO: 7 - DNA, 367 bp, Homo sapiens
  source 1..367: mol_type = other DNA
gaggtgcagctggtggagtctgggggagacttggtacagccgggggggtccctgagactctcctgcgtagtctctggattcaccttcagtacctacagtatgaactgggtccgccaggctccagggaaggggctggagtgggtttcatacatcagcagtagtagtcttagtagatactacgcagactctgtgaagggccgattcaccatctccagagacaacgccaagaactcactgtctctgcaactgaacagcctgagagccgaggacacggctgtgtattactgtgtcagagggagcatcacctggcccaccgaatattacctagactactggggccagggaaccctggtcaccgtctcctcag

SEQ ID NO: 8 - DNA, 369 bp, Homo sapiens
  source 1..369: mol_type = other DNA
gaggtgcagctggtggagtctgggggaggcttggtgcagcctggggggtccctgagactctcctgtgcagcctctggcttcaccttcagtggctatgctatgcactgggtccgccaggttcccgggaaggggctagaatgggtctcaagtattagtggtagcggtggtagcacatattatgcagactccgtgaagggccggttcaccatctccagagacaattccaagaacacactgtatctgcgattgaacagcctgagagccggcgacacggccgtatattcctgtgcgaaagatcgcgtagtaccaactgctctgcacggttaccttgactcctggggccagggaaccctggtcaccgtctcctca

SEQ ID NO: 9 - DNA, 369 bp, Homo sapiens
  source 1..369: mol_type = other DNA
gaggtgcagctgttggagtctgggggaggcttggtgcagcctggggggtccctgagactctcctgtgcagcctctggcttcagcttcagtgtctatgctatgcactgggtccgccaggttccagggaaggggctggaatgggtctcaagtattagtggtagcggtggtagcacttattatgcagactccgtgaagggccggttcaccatctccagagacaattccaagaacacactgtatctgcaattgaacagcctgagcgccggcgacacggccgtatattcctgtgcgaaagatcgcgtagtaccaactcctctgcacggttaccttgactcctggggccagggaaccctggtcaccgtctcctca

SEQ ID NO: 10 - DNA, 369 bp, Homo sapiens
  source 1..369: mol_type = other DNA
gaggtgcagctgttggagtctgggggaggcttggtacagcctggggggtccctgagactctcctgtgcagcctctggattcacctttagcagctatgccatgagctgggtccgccaggctccagggaaggggctggagtgggtctcagctattagtggtagcggtattagcacatactacgcagactccgtgaagggccggttcaccatctccagagacacttccaggagcacgctgtatctgcaaatgagcaccctgagagccgaggacacggccgtatattactgtgcgaaagattactcacgtactataccattggctggtttccttgaccagtggggccagggaaccctggtcaccgtctcctca

SEQ ID NO: 11 - DNA, 369 bp, Homo sapiens
  source 1..369: mol_type = other DNA
gaggtgcagctgttggagtctgggggtggcttggtgcagcctggggggtccctgagactctcctgtgcagcctctggcttctccttcagtgcctatgctatccactgggtccgccaggttccagggaaggggctggaatgggtctcaagtattagtagtaccggtattagcacatattatgcagactccgtgaagggccggttcaccatctccagagacaattccaagaacacagtgtatctgcaattgaacagcctgagagccggcgacacagccgtgtatgcctgtgcgaaagatcgcgttgtaccaactgctctgcacggttaccttgactcctggggccagggaaccctggtcaccgtctcctca

SEQ ID NO: 12 - DNA, 372 bp, Homo sapiens
  source 1..372: mol_type = other DNA
gaggtgcagctgttggagtctgggggaggcttggtacaccctggggggtccctgagactctcatgtgcagtctctggattcacccttaccaattatgccatcaactgggtccgccaggctccagggaagggactggagtgggtctcatatattagtgcgactggtggcagtacatactacgcagactccgtgaagggccggttcaccatctccagagacacttccaagaacactctctttcttcaaatgaatagcctgagagccgaggacacggccctatattactgtgcgaaagatgcgatagcgggacgagtatggttacagggggcctttgactcttggggccagggaaccctggtcaccgtctcctca

SEQ ID NO: 13 - DNA, 372 bp, Homo sapiens
  source 1..372: mol_type = other DNA
gaggtgcagctgttggagtctgggggaggcttggtacagcctggggggtccctgagactctcatgtgcagtctctggattcacctttagcaagtatgccatgaactgggtccgccaggctccagggaaggggctggagtgggtctcacatattagtggtagtggtattagcacatactacgcagactccgtgaagggccggttcaccatctccagagacacttccaagaacatgctgtatctgcaaatgaacagcctgagagccgaggacacggccatatattactgtgcgaaagatgccatatcgggacagatttggttgcaggggacctttgactactggggccagggaaccctggtcaccgtctcctca

SEQ ID NO: 14 - DNA, 372 bp, Homo sapiens
  source 1..372: mol_type = other DNA
gaggtgcagctgttggagtctgggggaggcttggtacagcctggggggtccctgagactctcatgtgcagtctctggattcacctttagcagctatgccatgcactgggtccgtcaggctccagggaaggggctggagtgggtctcacatattagtgatagtggttatagcacatactacgcagactccgtgaagggccggttcaccatctccagagacaattccaagaacaaactttatctgcaaatgaacagcctgagggccgaggacacggccgtatattactgtgcgaaagatgggatatcgagacaggtctggttacaggggacctttgactcctggggccagggaaccctggtcaccgtctcctca

SEQ ID NO: 15 - DNA, 366 bp, Homo sapiens
  source 1..366: mol_type = other DNA
gaggtgcagctgttggagtctgggggaggcttggtacagcctggggggtccctgagactctcctgtgcagcctctggattcacctttagcagttatggcatgagctgggtccgccaggctccagggaagggcctggagtgggtctcagctataagtggtagtggtattagcacatactacgcagactccgtgaagggccggttcaccatctccagagacaattccaagaacacgctgtctctgcaaatgaacagtgtgagagtcgaggacacggccgtatattactgtgcgaaagggcggaggggaccatttgaggatggctggttcgacacctggggccagggaaccctggtcaccgtctcctca

SEQ ID NO: 16 - DNA, 367 bp, Homo sapiens
  source 1..367: mol_type = other DNA
caggtccagctggaacaatctggggctgagacgaagaagcctgggtcctcggtgaaggtctcctgtaaggtttctggaggcaggttcagcgcctatgcaatcggctgggtgcgacaggcccctggacaagggcttgagtggataggagggatcaatcctatgtttggcatagtcaactacgcagagaagttccagggcagagtcaccatttccgcggacacatttccgagtatgtcatacatggagttgcgcagcctgacatctgaagacacggccgtctatttctgtgcgagaggtccgaattaccatgatactacttcttacttcgactcctggggccagggaaccctggtcaccgtctcttcag

SEQ ID NO: 17 - DNA, 361 bp, Homo sapiens
  source 1..361: mol_type = other DNA
caggtgcaactgagagagtctgggggaggcgtggtccagcctggggggtccctgagactctcctgtgcagcgtctggcttcaccttaagttcctatggcatgcagtgggtccgccaggctccaggcaaggggctggagtgggtggcacttatatcatctaatggtcagaaaaaaaactacgcagtctccgtgaagggccgattcaccatctccagagacagttccaagaacaccctttatttgcaaatgaacagcctgagaactgaagacacggctgtgttttactgtgcaagagaactgggatatagcagcagtttgtttgacttttggggccacggaaccctggtcaccgtctcctcag

SEQ ID NO: 18 - DNA, 370 bp, Homo sapiens
  source 1..370: mol_type = other DNA
caggtcctgctggtgcaatccggggctgaggtgaagaagcctgggtcctcggtgagggtctcctgcaaggcttctggagtcaccttcagtaaatatgctatcaactgggtgcgacaggcccctggacaagggcttgagtggatgggagggatcatgcctatctttcatataacaaaatacgcacagaggttccagggcagagtcaccattaccgcggacgaatccacgaccacttcctacatggagctgaacagcctgacatctgaggacacggccgtctattactgtgcgagagatggttcggggaattattataaggactggtacttcgatctctggggccgtggcaccctgatcactgtctcctcag

SEQ ID NO: 19 - DNA, 364 bp, Homo sapiens
  source 1..364: mol_type = other DNA
caggtgcagctggtggagtctgggggaggcgtggtccagcctggggggtccctaagactctcctgtacagcgtctggattcaccttcagtagctatggcatgcactgggtccgccaggctccaggcaaggggctggagtgggtggcatttatacggtatgatggacgtgatatatactatgcagactccgtgaagggccgattcaccatctccagagacaattccaagaatacgctgtatctgcaaatgatcagcctgagagctgaggacacggctgtgttttactgtgcgaaaggggagttcgagtgggaacttaatgcttttgatatctggggccaagggacaatggtcaccgtctcttcag

SEQ ID NO: 20 - DNA, 361 bp, Homo sapiens
  source 1..361: mol_type = other DNA
caagtccagctggtgcagtctggggctgaggtgaagaagcctgggtcctcggtgaaggtctcctgcaaggcttctggaggcaccttcaacagcaatgctatcagctgggtgcggcaggcccctggacaagggcttgagtggatgggagggctcaaccctctctttaaaataacacactatgcacagaaattccagggcagactcacgatcaccgcggacgaattcatgagcactgcctacatggagctgaacagcctgacatctgaggacacggccgtgtatttctgtgcgagagcccagggatattatagacctattccccactactggggccagggaaccctggtcaccgtctcctcag

SEQ ID NO: 21 - DNA, 347 bp, Homo sapiens
  source 1..347: mol_type = other DNA
gaggtgcagctggtggagtctgggggaggcctggtccagcctggggggtccctgagactctcctgtgtagcctctggattcacctttagtagttattggatgagctgggtccgccagactccagggaaggggctggagtgggtggccaacatacagcgagagggatatgagaaaaactatgtggactctgtgaagggccgattcaccatctccagagacaacgccaaaaactcactgtatctgcaaatggacagcctgagagccgaggacacggccgtgtattattgtgcgagagaagaatacctctatgactactggggccagggaaccctggtcaccgtctcctc

SEQ ID NO: 22 - DNA, 364 bp, Homo sapiens
  source 1..364: mol_type = other DNA
gaggtgcacctggtggaatctgggggagatgtggtacggcccggggggtccctgagactctcctgtgcagcctctggattcacctttcgtgattatgtcatgacttgggtccgccaggctccagggaagggactagagtgggtctctgcaattacttggaatggtggcaacacagcttatgcagactctgtgaagggccgattcaccatttccagagacaacgccaggaactccctgtttctgcaattgaataatctgagagccgaggacacggcctactatttctgtgcgagagaaggacggtcgactatcgctggtgcattcgatatctggggccaagggacaacggtcatcgtctcttcag

SEQ ID NO: 23 - DNA, 364 bp, Homo sapiens
  source 1..364: mol_type = other DNA
gaggtgcagttggtggagtctgggggagacttggtaaagtctggggggtcccttagactctcctgtgcagcctctggattcactttcagtaacccctggatgagctgggtccgccaggctccagggaaggggctggagtgggttggccgtattaaaagtaaaactgatggtgggacaacagactacgctgcacccgtgaaaggcagattcaccatctcaagagatggttcaaaaaacacgctgtatctgcaaatgaacagcctgaaaaccgaggacacagccgtgtattactgtaccaccgggtatagcagtggctggtccctgggctactggggccagggaaccctggtcaccgtctcctcag

SEQ ID NO: 24 - DNA, 368 bp, Homo sapiens
  source 1..368: mol_type = other DNA
caggtacaggtcgtgcagtctgggcctgaggtgaagaagcctggggcctcagtgaaggtctcctgtcaaacttcaggacacattttcaccggcaactatgttcactgggtgcgacaggcccctggacaagggcttgagtggatggggtggatcaaccctaatagcggtgacacaaattatgcacagaaatttcagggcagggtcgtcatgaccagcgacacgtccatcggcacaacttacatggaattgagaaggctgagatctgacgacgcggccgtatacttctgtgcgagtggacgcggcctctcttatttctacggttcgggatttgcctattggggccagggaaccctagtcaccgtctcctc

SEQ ID NO: 25 - DNA, 376 bp, Homo sapiens
  source 1..376: mol_type = other DNA
caggtctccctggtgcaatctggggctgaggtgaagaggcctgggtcctcggtgaaagtctcctgcaagacctctggagtcatcttcagcagttatgctatgacctgggtgcgacaggcccctggacaagggcttgagtgggtggggggaatcatccctacgtttggtttgacaaagtacgcacagaagtttcagggcagagtcacgattaccgcggacgcctccactgtcacgtcctacatggagttgagcagcctgagatctgacgacacggccgtgtatttctgtgcgcgagcgttcccccctggttcggggacttattataatgatgcctttgatatctggggccaaggaacattggtcaccgtctcttcag

SEQ ID NO: 26 - DNA, 370 bp, Homo sapiens
  source 1..370: mol_type = other DNA
caggtgcaggtggtggagtctgggggaggcgtggtccagcctgggaggtccctgagactttcctgtgcagcctctggattcaccatcagtgactctggcatacactgggtccgccaggctccaggcaaggggctggagtgggtggcccttatatcatatgatgcaaaggataaattttatgcagactccgtgcagggccgattcattatctccagagacacctccaaaaacacggtgtatctacaaatggagagcctgagatctgaggacacggctctatattactgtgcgaaagggcgtcggggagcggaaagttactttgaaccttctaaaaattggggccagggaaccctggtcaccgtctcttcag

SEQ ID NO: 27 - DNA, 379 bp, Homo sapiens
  source 1..379: mol_type = other DNA
caggtgcagctgcaggagtcgggcccaggactggtgaagccttcggagaccctgtccctcacctgcactgtctctggtgactccatcagtagttactactggaattggatccggcagcccccaaggaagggactggagtggattggatatatttattccagtgggcgcaccaactacaacccttccctcaagagtcgactcaccatatcaatagacacgtccaagagccagttctccctggagctcaactctgtgaccgctgcggacacggccgtctattattgtgcgagagaatatgcctatggttcggggagtctctacaatagggctgatgcttttgatatctggggccaagggacaatggtcaccgtctcttcag

SEQ ID NO: 28 - DNA, 351 bp, Homo sapiens
  source 1..351: mol_type = other DNA
cagctgcagctgcaggagtcgggcccaggactggtgaagccttcggagaccctgtccctcacctgcactgtctctggtggctccatcagcggtgggagctactactggggctggatccgccagcccccagggaagggcctggagtgggttgggaatatctattatagtgggcacacctactacaatccgtccctcgagagtcgagtcaccatatccgtagacacgtccaagaaccagttctccctgatgctgacctctgtgaccgccgcagacacggctgtgtattactgtacgagaggcttagcagcagcgaacgtctggggccaagggaccacggtcaccgtgtcctca

SEQ ID NO: 29 - DNA, 373 bp, Homo sapiens
  source 1..373: mol_type = other DNA
caggttcaactggtgcagtctggagctgaggcgaagaagcctggggcctcagtgaaggtctcctgcaggggttctggttacctttttaatcagtacgctatctcctgggtgcgacaggcccctggacaaggccttgagtggatgggttggattagcgtttataatggtaaagcaaattatggacagaagttccagggcagactcaccttaagcacggacacatccacgaacactgcctacttggacctcaggagcctgaaatctgacgacacggccatctattactgtgcgagaggtgcctcattcgcatatttcgttgatcagagcccacttgattcctggggccagggaaccctaatcaccgtctcctcag

SEQ ID NO: 30 - DNA, 373 bp, Homo sapiens
  source 1..373: mol_type = other DNA
caggttcacctggtgcagtctgaaaatgaaacgaagaagcctggggcctcagtgaaggtctcctgcgagggttctggttacattttcagtcagtatggtatcagctgggtgcgacaggcccctggacaagggcttgagtggatgggatggattagcgcttataatggtaacacaaagtctgcacagaagttcgagggcagagtcaccttgaccacggacacatccacgaacactgcctacatggagctgaggagcctgagatctgacgacacggccgtgtattactgtacgaaaggtgcctcattcgcatatttccatgataatagtccatttgattcctggggccagggaaccctggtcaccgtctcctcag

SEQ ID NO: 31 - DNA, 373 bp, Homo sapiens
  source 1..373: mol_type = other DNA
caggtacaactggtgcagtctggggctgaggtgaagaggcctggggcctcggtgaaggtctcctgcaaggcctctggctacaccttcaccggctaccgtattcactggctgcggcaggccccaggacaagggcctgagtggatgggttggatcaaccctaacaatggcgccacagactatgcacggagatttcagggcagggtcaccatgaccagggaccggtccatcaacacagccttcatggaactgaggagcctgacatctgacgacacggccgtctactactgtgcgagagatccgggctatagtggctacccaccggagaactacttcgacccctggggccagggcacccaggtcatcgtctcttcag

SEQ ID NO: 32 - DNA, 358 bp, Homo sapiens
  source 1..358: mol_type = other DNA
gaggtgcagctggtggagtctgggggaggcttggtccagccgggggggtccctgagactctcttgtgcagcatctggattcacctttagaagttactggatgagctgggtccgccaggctccagggaaggggctggagtggttggccaggacaaacgaagatggaagtgcgacacactatgtggactctgtgaggggccgattcaccgtctccagagacaacgccaagaactccctgtatctgcaaatgaacagcctgagagccgatgacacggctctgtactactgtgcgagagccccctacgttgcgactatgattgactactggggccagggaacccaggtcattgtctcgtcag

SEQ ID NO: 33 - DNA, 359 bp, Homo sapiens
  source 1..359: mol_type = other DNA
gggggagtctgggggaggcttggtacagcctggcaggtccctgagactctcctgtgcaggatctggattcacctttgatgattatgccatgcactgggtccggcaagctccagggaagggcctggagtgggtctcaggcattagttggaatagtggtagcataggctatgcggactctgtgaagggccgattcaccatctccagagacaacgccaagaactccctgtatctgcaaatgaacagtctgagagctgaggacacggccttgtattactgtggaaaagatgaaagttcctcttcgctttttggaggagggttgggctactggggccagggaaccctggtcaccgtctcctcag

SEQ ID NO: 34 - DNA, 361 bp, Homo sapiens
  source 1..361: mol_type = other DNA
caagtccaactggtacagtctggggctgaagtgaagcagcctgggtcctcggtgagggtctcctgcagggcttctggaggcaccttcaacagcaatgctgtcagttgggtgcgacaggcccctggacaaggacttgagtggatgggaggcctcaatcctctctttaaaatagcaaactacgcacagaaattccagggccgaatcacgatcaccgcggacgaattcatgagtactgcctacatggaactgagcagcctcagatctgacgacacggccgtttattactgtgcgagagcccagggatactatagaccaatacctcactactggggccagggaaccctggtcaccgtctcctcag

SEQ ID NO: 35 - DNA, 376 bp, Homo sapiens
  source 1..376: mol_type = other DNA
gaggtgcagttggtggagtctgggggaggcttggtccagccggggaagtccctaagactctcctgtttaacttctggattcaggttctctgattatgtaatgcactgggtccgccagactccagagaaggggctgcaatacgtctcagggataggtgtttttgggggtgtcacaaattatgtagagtccgtgaagggcagattcaccgtcaccagagacgattccaagggcacgatggaccttcacatggacaatctgcgacctgaggacaccggaatttatcactgtgtgaagggggagaactttggtatggggacttatatcggagtgtggttcgacccctggggccagggagccccggtcactgtctcctcag

SEQ ID NO: 36 - DNA, 379 bp, Homo sapiens
  source 1..379: mol_type = other DNA
gaggtgcagttggtggagtctgggggaggcttggtccggcctggggagtccctgagactctcctgtgcggcctctggattcacctttaggaattattggatgacctgggtccgccaggctccagggacggggctggagtgggtggccaacctaaaaccagatggaagtgacaaatactatgtggactcggtgaagggccgattcaccatctccagagacaacgccaagaactcactatatctacaaatgaccagcctgagagccgaagacacggccgtctattactgtgcgagagggacgaagatggactatgatacttatggttattactacttctttgactactggggccagggaatcctggtcaccgtctcctcag

SEQ ID NO: 37 - DNA, 349 bp, Homo sapiens
  source 1..349: mol_type = other DNA
gacgtgcagctggtgcagtccgggggaggcttagttcagcctggggggtccctgaaactctcctgtgcagcctctggattcgccttcaacatccactcgatgtactgggtccgccaagctccagggagggggctggtgtgggtctcacgtattaatagcgatggagatagtgtaaactacgcggactccgtgaagggccgattcaccatctccagagacaacgccaggaacaccctgtttctgcagatgaaccgtctgcgcgacgaggacacggctgtttactattgtgtcagagcctcgtggttctttgactactggggccagggagtcctagtcaccgtctcctcag

SEQ ID NO: 38 - DNA, 374 bp, Homo sapiens
  source 1..374: mol_type = other DNA
caggtgcagctggtggagtctgggggaggcttggtcaagcctggagggtccctgagactctcctgtgcagcctccggattcagcttcggtgactactccatgcactggatccgccaggctccagggaagggtctagaatggctttcatatattagtaccactagcggtagtaaatattacgccgcctttgtgaagggccgattcaccatctccagggacaacgccaagaactcactgtatctgcaaatgaacagcctgagagccgacgacacggccgtctattactgtgcgagagatcgggttcggggaaacaaccctccggcattagggactctgggatcctggggccagggaatcctggtcaccgtctcctc

SEQ ID NO: 39 - DNA, 358 bp, Homo sapiens
  source 1..358: mol_type = other DNA
gaggtggaggtggtggagtctgggggaggcttggtccagccgggggggtccctgagactctcctgtgcagcctctggcttctcctttagtagttattggatgagttgggtccgccaggctccggggaaggggctggagtgggtggccaatataaacgaagatggaagtaagaagttctatgtggactctgtgaggggccgatttaccatctccagagacaacgccaagacctcagtgtttctgcaaatggacagcctgagagccgaagacacggccctgtattactgtgcgagcccttactatgattacaggccccaactctaccggggccagggaaccctggtcaccgtctcctcag

SEQ ID NO: 40 - DNA, 355 bp, Homo sapiens
  source 1..355: mol_type = other DNA
gaggtgcagctggtgcagtctggagcagaagtgagaaaacccggggagtctctgaagatctcctgcaagggttctggatatacctttgccagttactggatcgcctgggtgcgccagatgcccgggaaaggcctggagtggatgggggtcatctatcctggtgactctgataccagatacagcccgtccttccaaggccaggtcaccatctcagccgacaagtccatcagcaccgcgtacttgcagtggagcagcctgaaggcctcggacaccgccatgtattactgtgcgagacggtcttcagaaagtgggactgactactggggccagggaaccctagtcaccgtctcctcag

SEQ ID NO: 41 - DNA, 382 bp, Homo sapiens
  source 1..382: mol_type = other DNA
gaggtgcagctggtggagtctgggggaggcttggtacagcctggggggtccctgagactctcctgtgcagcctctggattcacctttagcaactacgccatgagctgggtccgccaggctccagggaaggggctggagtgggtctcagctattactggtagtggtgatagcacatactacgcagactccgtgaagggccggatcaccatctccagagacaattccaagtacactctgtatctgcaaatgaacagcctgagagccgaggacacggccatatattactgtgcgaaagacccctcggcggagggattacctttgggggacttctcctcgacctttgactactggggccagggaaccctggtcaccgtctcctcag

SEQ ID NO: 42 - DNA, 364 bp, Homo sapiens
  source 1..364: mol_type = other DNA
caggtccagtttgtgcagtccgggactgaggtgaagaagcctggggcctcagtgaaggtttcctgcaaggcttctggagacagtttcactacccacgctatgcattgggtgcgccaggcccccggacaaaggcctgagtggatgggatggatccatacttacaatggtaattcaaaatattcacaaaaattcctgggcagagtcaccttcaccagggacacatccgcgactgttgtctacatggagttgagcagcctgacatctgaagacacgtctgtctattactgtgcgactgatcgtggggtcgcggagtccacatactttgactcctggggccagggaaccctggtcaccgtctcctcag

SEQ ID NO: 43 - DNA, 382 bp, Homo sapiens
  source 1..382: mol_type = other DNA
caggtgcacctggtggagtcggggggaggcgtggtcccgcctgggaggtccctgacactctcctgtgcagcccctacatacaccttcagtggtcacgctgtgcactgggtccgctggactccaggcagggggcttgaatggatttcagtcatagtctatgacggaacaaacgaattttacgcagactccgtgaggggccgcttcactatctccagagacctttccaaggacacggtctccctgcaaatgaacaacttgagacctgaggacacggctatgtattattgtgcgagaggggggacgaatcattgtgatcacagttgttactggggtggatcttttgatctctggggccaggggacactggtcaccgtctcttcag

SEQ ID NO: 44 - DNA, 362 bp, Homo sapiens
  source 1..362: mol_type = other DNA
gaggtgcagctggtggagtctgggggaggcttggtccagcctggaggatccctgagactctcctgtgtggcctctggattcaccttaagtacatattggatgacctgggtccgccaggctccagggaaggggctggagtgggtggccaccattaaggaagacggacgtgagacatattatgtggactctgtgaagggccgcttcaccatctccagagacaacgccaagaattccttgtttctactgatgaatgccctgagagccgaggacacggccacatattactgtgcgagaaatctccacagtgacaatacctggtacttaggggacttctggggccagggagcccgggtcaccgtctc

SEQ ID NO: 45 - DNA, 379 bp, Homo sapiens
  source 1..379: mol_type = other DNA
cagctgcagctgcaggagtcgggcccaggcctggtgaagccttcggagaccctgtccctcacctgcactgtctctggtgtctccatcaccaataagcgttactcctggggctggatccgccagcccccaggaaaggggctggaatggattgcgactatatattataatgacagaacctacgagaacccgtccctcaagagtcgactcacagcgtccgcagacacgtccaagaaccagttctccctgaacctgaggtctgtgaccgccgcagacaccggtgtatactattgtgcgagacatcgcagtgtcattgtgacagggagatacggtgactactttgactactggggccagggagccctggtcgccgtctcctcag

SEQ ID NO: 46 - DNA, 385 bp, Homo sapiens
  source 1..385: mol_type = other DNA
gaggtgcagctggtgcagtctggagcagaggtgaaaaagcccggggagtctctgaagatctcctgtaagggttctggatacagctttaacgactactggatcggctgggtgcgccagatgcccgggaaaggcctggagtggatggggagcatctatcctggtgactctgataccagatacagcccgtccttccaaggccaggtcaccatctcagtcgacaagtccaccagcagcgcctacctgcagtggagcagcctgaaggcctcggacagcgccatgtattattgtacgagacgaattagcatgatagaagacgtggttgtcgacaatcagatgggtgtttttgatatgtggggccaagggacaatggtcaccgtctcttcag

SEQ ID NO: 47 - DNA, 352 bp, Homo sapiens
  source 1..352: mol_type = other DNA
caggtgcagctgcaggagtcgggcccaggactggtgaagccttcacagaccctgtccctcacctgcgctgtctctggtggctccatcaacagtagtggtgactcctggagctggatccggcagccaccagggaagggactggagtggattgggcacatatatgacagtggggacacctactccaacccgtccctcaagagtcgagttaccatatcggtagacacgtccaataaccagttctccctgaagctgacctctttaaccgccgcggacacggccgtctattactgtgccagaggaggccccacgttcgacccctggggccagggaaccccggtcaccgtctcctcag

SEQ ID NO: 48 - DNA, 364 bp, Homo sapiens
  source 1..364: mol_type = other DNA
caggtgcagctgcaggagtcgggcccaggactggtgaggtcctcggagaccctgtccctcacctgcacggtctccggttatggcctcggcactgcttactactgggcctggattcggcagctcccagggaagagactggagtggatcgggactatgcgtcatactgggagcaccctagacaacccggccctcaggagtcggatcagcatgtcaacagacgcgtccaagaatcaattctccctgaggctcagatctgtgaccgccgcagacacgggcatttactattgtgcgagagtgtcttctggaacggattgctgggctcttgatatctggggccaagggacaagggtcatcgtctcttcag

SEQ ID NO: 49 - DNA, 364 bp, Homo sapiens
  source 1..364: mol_type = other DNA
caggtccaactggtgcaatctgggcctgaggtgaagaagcctgggtcctcggtgaaggtctcctgcaaggcctcggggggccccttcagcagttttgctgtcaactgggtgcgacaggcccctggacaagggcttgagtggatgggtgcgagaataggtatgtttggtacaacaagttacgcagagaagttccagggcagagtcacgattacagcggacgaaatgacgagcacgtcctacatggagctgaccagcctgagatctgaggactcggccgtctattactgcgcgagagattcgggatatacctatggtgggaggctcgacccctggggccagggaaccctcgtcatcgtctccccag

SEQ ID NO: 50 - DNA, 368 bp, Homo sapiens
  source 1..368: mol_type = other DNA
gaggtgcaactcttggagtctgggggaggcttggtacagccgggggggtccctgagactctcctgtgcagccactggattccccttttccagctacgccatgcactgggtccgccaggctccaggaaaggggctggagtgggtctcaagtattagtgctactggtctcagcacctactacatagactccgtgaagggtcggttcaccatctccaggggcaagtccgagaccacggtgtatctgcaaatgaacagcctgagagccgaggacacggccgtatattactgtgtgaaagatcgggttatacaggtttgggccacggggacttttgatttctggggccgagggacaatggtcaccgtcgcttc

SEQ ID NO: 51 - DNA, 367 bp, Homo sapiens
  source 1..367: mol_type = other DNA
gaggtgcacctggtggagtctgggggaggcttagtccagccgggggggtctctgagactctcctgtgcagcctctggattcacctttagtgactattggatgacctgggtccgccaggttccagggaaggggctggagtggctggccaatataaagggtgatggaactgaaaaaaactatgtggactctgtgaagggccgattcaccgtctccagagacaacgccaagaattctcttttcctgcaagtgaacagcctgagagtcgaggacactgccgtttattactgtgcgaggcatatctactatggcaacaactggtacttaggggacctctggggccagggagccccggtcaccgtctcctcag

SEQ ID NO: 52 - DNA, 367 bp, Homo sapiens
  source 1..367: mol_type = other DNA
caggtccagttggagcagtctggggctgaggtgaagaagcctgggtcctcggtgaaggtctcctgtaaggcttctggaggcaaattcaacagttatgctattagttgggtgcgacaggccccaggacaagggcctgagtggatgggagggatcaatcctatgtttcgtatagttgactacgcaccgaagttcaagggcagactcacgattaccgcggagtctttaccgagcacagcctacatggaactgagcagcctgaaacttgaagacacggccgtatattactgtgtgagaggtccaaattatcatgatactactacttatttcgacccctggggccagggaaccctggtcaccgtctcctcag

SEQ ID NO: 53 - DNA, 370 bp, Homo sapiens
  source 1..370: mol_type = other DNA
gaggtgcagctggtggagtctgggggccgcctggtcaagcctggggggtccctgagactctcctgtgcagcctctggattcaccttcagtctctacagcatgaactgggtccgccaggctccagggaagggactggagtgggtcgcatccatcagcggtgatactaattacatctactacgcggactccgtgaagggccgattcaccatctcccgagacaacgccaaaaactcagtgtctctgcagatgaatagcctgacagccgaggacacggctgtctattactgtgcgcgacccttgatcactagtatagttcggggaggaggctgtccctactggggccagggaaccctggtcaccgtctcctcag

SEQ ID NO: 54 - DNA, 357 bp, Homo sapiens
  source 1..357: mol_type = other DNA
gaggtgcagctggtgcagtctgggacagaggtgaaaaagcccggggagtctctgaagatctcctgtaagggttatggatacaactttcccaagtattgggtcggctgggtgcgccagatccccgggagaggcctggagtggatggggatcatcatgcctgaaagatctgagaccacgtacaacccatccttccaagtccaggccaccctctcagccgacacgtccatcaataccgccttcctgcagtgggacagcctgaaggcctcagacaccgccatatactattgtgcgaagtccactttcgggggctacgcaatggacgtctggggccaagggaccgcggtctccgtctcctca

SEQ ID NO: 55 - DNA, 379 bp, Homo sapiens
  source 1..379: mol_type = other DNA
cagatgcagttgcatgagtcgggcccaggactggtgaagccttcggagaccctgtccctcacctgcagtgtctctggtggctccatcagcagcagtacttactattggggctggatccgccagtccccagggaaggggctagagtggattgggcatatcgattatcgtgggtggaccgactacaacccgtccctcaagaatcgagtcaccctattcgtagacacgtccaagaaccaattctccctgaagatgaactctgtgaccgccgcagacacggctgtgttttactgtgcgagactagtaaagagactttcattgaatatagttctttacgcctttgacttctggggccagggaacgctggtcaccgtctcctcag

SEQ ID NO: 56 - DNA, 379 bp, Homo sapiens
  source 1..379: mol_type = other DNA
cagttgcagctgcaggagtcgggcccaggactggtgaagccttcggagaccctgtccctcacctgcactgtctctggagtctccatcaccgctcagcgttactcctggggctgggtccgccagccccccgggaggggtctggagtggattgggactctctattatactggcatcacctatcaaagtccgtccctcaagagtcgactcacaacatccgttgactcgtccaagaacctcttctccctgaaactgaggtctgtgaccgccgcagacacggctgtctattactgtgtgagacatcgcagtgtattcgtgacaggaaaatacggtgactactttgactactggggccagggagccctggtcgccgtctcctcag

SEQ ID NO: 57 - DNA, 364 bp, Homo sapiens
  source 1..364: mol_type = other DNA
gacgtgcagctggtggagtctgggggaggctcggtggtgcctggggggtccctgagactctcctgtgcagcttctggattcaccttcagtggttatgccatgaattgggtccgccaggctcctgggaaggggctggagtgggttgcatacatcagaatcaatggtggtaaaatctactacgcagactctgtgaagggccgattcaccgtctccatcgacaacgccaagaactcattctatttggaaatgaacagcctgagaaacgaggacacggctgtctattactgcgcgagagatcgcgacaatactggctggtatttgggagactactggggcccggggaccctggtcaccgtctcctcag

SEQ ID NO: 58 - DNA, 361 bp, Homo sapiens
  source 1..361: mol_type = other DNA
caagtccaactggtgcagtctgcggctgaggtgaagatgcctgggtcctcggtgaaggtctcctgcaaggcttctggaggcaccttcagaaccaatgctattagttgggtgcgacaggcccctggacaagggcttgagtggatgggaggactcaaccctctatttggaatagcatactacgcacaggacttccagggcagactcacgatcaccgcggacgaattcatgagcacaacttttatggagctgagcagcctgcgatctgacgacacggccatatatttctgtgcgagagcccagggatataataggcctattccccactactggggccagggaaccctggtcgttgtctcctcag

SEQ ID NO: 59 - DNA, 373 bp, Homo sapiens
  source 1..373: mol_type = other DNA
caggtgcagctgcaggagtcgggcccaggactggtgaagccttcacagaccctgtccctcacctgcgctgtctctggtggctccatcatcagtgatacttattcctggagctggttccggcagccaccagggaagacactggagtggattggctatatctatgacagtgggaggaccaagtctaacccgtccctccagagtcgagttaccatatcaatagacacgtccaagaaccagttctccctgaacctgacctctgtgaccgccgcggacacggccgtgtattactgtgccagagatatgacgtccatggttcggagagctagttacttagactgctggggccagggaaccctggtcaccgtctcctcag

SEQ ID NO: 60 - DNA, 364 bp, Homo sapiens
  source 1..364: mol_type = other DNA
cagatcaccttgaaggagtctggtcctacgctggtgaaacccacacagaccctcacgctgacctgcaccttctctgggttctcactcaccactagtggagtgggtgtgggctggatccgtcagcccccaggaaaggccctggagtggcttgcactcatttattgggatgatgataagcgctacaggccatctctgaagagcaggctcaccatcaccaaggacacctccaaaaaccaagtggtccttacaatgaccaacatagaccctgtggacacagccacatattactgtgcacacgtcgatggcgcctacgggggcgcttttgatatctggggccaagggacaatggtcaccgtctcttcag

SEQ ID NO: 61 - DNA, 346 bp, Homo sapiens
  source 1..346: mol_type = other DNA
gaggtgcagttggtggagtcggggggaggcctggtccacccgggggggtccctcagactctcctgtgtaacctctggattcacctttagtaacttttggatgaattgggtccgccaggctccagggaaggggctggagtgggtggcccacataagggaagatggaagtgagaaagcatatgtggacgctgtgaagggccgattcatcgtctccagagacaacgccaagaacacactgtatctggagatgaacagcttgagacccgaagacacggctctctacttctgtcgcgtaggccattggagtaactcctggggacagggtaccctggtcaccgtctcctcag

SEQ ID NO: 62 - DNA, 367 bp, Homo sapiens
  source 1..367: mol_type = other DNA
gaggtgcagctggtggagtccgggggaggcttggtacagccgggggggtccctgagactctcctgtgcagcctctggattcccctttagcagttatgccatgggctgggtccgccaggctcaagggaaggggctggagtgggtcttagggatgagtggcagtagtggcaacacctactacgcagaccccgcgaagggccgattcagcatctccagagacaactccaagagcactctgtttcttcaaatgaacggcctgagaggcgacgacacggccgtatattactgtgcgaaattcgcggggagtctgcgggcgaactggttcatcaatttctggggccgcggcaccctagtcactgtctcctcag

SEQ ID NO: 63 - DNA, 397 bp, Homo sapiens
  source 1..397: mol_type = other DNA
caggtgcacctggtgcagtctggggctgaggtgaagaagcctgggtcctcggtgaaggtctcctgcaaggcttctggaggcaccctcagcacctatgctatgacctgggtgcgacaggcccctggacaagggcttgagtggatgggagggatcatccctatgtttggcacaccaaattacgcacagaagttccagggcagactcacgattatggcggacaaatccacgtttttggcggacaaatccacgagcacagcctacatggagctgaggagcctgagacctgaagacacggccatgtattactgtttgagagaccccctcggaggatattgtagtggtgataattgtcggggggactactggggccagggaaccctggtcaccgtctcctcag

SEQ ID NO: 64 - DNA, 355 bp, Homo sapiens
  source 1..355: mol_type = other DNA
gaggtgcagttggtggagtccgggggagacttggtccagccgggggggtccctgagactctcctgtgcagcctctggattcaccttcagcagatactggatgcactgggtccgtcaaactccagggaaggggcttgtgtgggtgtcacgtattattcgcgatgggacttacacaaactacgcggactccgtgaagggccgattcaccgtctccagagacaacgccaagagcacagtgtctctgcaaatgaacagtctgagagtcgaggacacggctatatattactgtgtgagagatggcgatgcctacaactttgacttctggggccagggaaccctggtcaccgtctccccag

SEQ ID NO: 65 - DNA, 361 bp, Homo sapiens
  source 1..361: mol_type = other DNA
gaggtgcagttggtggagtctgggggaaacttggtccagcctggggggtccctgagactctcctgtgcagcctctggattcaccgtcagtagcaactacatgagctgggtccgccaggctccagggaaggggctggagtgggtctcagttatttatagcggtggtagcacatactacgcagactccgtgaagggcagattcaccatctccagagacaattccaagaacacgctgtttcttcaaatgaacagcctgagagccgaggacacggctatgtattactgtgcgcgccgtaagtggggtatagtggactggtacttcgatctctggggccgtggcaccctggtcactgtctcctcag

SEQ ID NO: 66 - DNA, 358 bp, Homo sapiens
  source 1..358: mol_type = other DNA
gaggtggagctggtggagtctgggggaggcttggtccagcctggggggtccctgagactctcctgtgcagcctctggattcacctttggtacctattggatgacctgggtccgccaggctccagggaaggggctggagtgggtggcccacataaaccgagatggaagtgagaaataccatgtggactctataaagggccgattcaccatctccagagacaacgctaagaactcactgtacctgcaaatgaacagcctgagagctgacgacacggccgtatattactgtggaagagatcaaagagcaacatatggcgcgtccgactggggccggggaaccctggtcaccgtctcctcag

SEQ ID NO: 67 - DNA, 369 bp, Homo sapiens
  source 1..369: mol_type = other DNA
cagctgcagctgcaggagtcgggcccaggactggtgaagccttcggagaccctgtccctcacctgcaatgtctctggtggctccatcagcagtagtcgttactactggggctgggtccgccagtccccagggaaggggctggagtggcttggcagtatttattttagtgggagcacctactacaacccgtccctcaagagtcgagtcttcatattcgtagacacgcccaaggaccagttctccctgagactgatctctgtgaccgccgcagacacggctgtgtattactgtgcgagacatgggtatattgcccgggaccactacggtatggacgtctggggccaagggaccacggtcaccgtctcctca

SEQ ID NO: 68 - DNA, 367 bp, Homo sapiens
  source 1..367: mol_type = other DNA
caggtccagctggaacagtctggggctgaggtgaagaagcctgggtcctcggtgaaggtctcctgtaaggcttctggcggcaccttcaatgcctatgctatcagctggctgcgacaggcccctggacaagggcttgagtggatgggagggatcaaccctatgtttggtatagttaagtacgcagagaagttccagggcagactcacgattaccgcggacaatttcccgagcacagcctacatgcagctgagcagcctcagatctgacgacgcggccgtgtattactgtgcgagaggtccaaattaccatgatactacttcttacttcgacccctggggccagggaaccttggtcaccgtctcctcag

SEQ ID NO: 69 - DNA, 358 bp, Homo sapiens
  source 1..358: mol_type = other DNA
caactggtggagtctgggggaggcttggtccagcctggggggtccctaagactctcctgtatagcctccggattcatttttcgtgatcattggatgacctgggtccgtcaggctccagggaaggggctggagtgggtggccaatataaaggaagatggaagtgagaggaactatgtggactctgtgaagggccgactcaccatctccagagacaacgccaagaactcactgtttctgcaaatggacaacctgagggtcgaggacacggctgtttactactgtaccagacttcaggtcgaaactgggtacaggccctgccaggactggggccagggcaccctagtcaccgtctcgtcag

SEQ ID NO: 70 - DNA, 370 bp, Homo sapiens
  source 1..370: mol_type = other DNA
gacgtgcagctggtggagtctgggggaggcttggtacagcctggggggtccctgagaatctcatgtgcagcctctggattcacctttaatacttatgtcatgtattgggtccgccaggctccagggaagggactggagtgggtctcaagtattagtgggactggtctcagtacatactacgcagactccgtgaagggccggttcaccatttccagagacaattccaagaaaatggtgtatctgcaaatgaatgggctcagactcgaggacacggccgttttttactgtgcgaaagacctcacttcggtgaccccaatgaacggatacctccaccaatggggccagggcaccctggtcatcgtctcctcag

SEQ ID NO: 71 - DNA, 386 bp, Homo sapiens
  source 1..386: mol_type = other DNA
ggtgcagctggtacagtctggaccagaggtgaagaagcccggtgaaaatctgaagatctcctgtaagggttctggatacagtttttccagctactggatcggctgggtgcgccagatgcccgggaaaggcctggagtggatgggagtcatccatcctcataactcggataccacatatagcccgtccttccaaggccaggtcaccatctcagtagacaagtccatcagcaccgcctacctgcagtgggagagcctgaaggcctcggacaccgccatatattattgtgcgagacacccggagaccttctattattatgatagtagtcgtggtaaacgtgatgcttttgctatctggggccaagggacagtggtcaccgtctcttcag

SEQ ID NO: 72 - DNA, 373 bp, Homo sapiens
  source 1..373: mol_type = other DNA
cagctgcagctgcaggagtcgggcccaggactggtgaagccttcggagaccctgtccctcacctgcactgtctctggtgcctcttttaacactaatgattacttttgggtctggatccgccagcccccagggaagggtctggagtggattgggactatctattacagcgggggcacctacttcaacccgtccctcaggagtcgagtcgccatgtccgtagacacgtccaagaatcagttctccctgaaagtgacctctgtgaccgccgcagacacggctgtgtattcctgtgccgcgatggctcgggcaatttttttaacggagggtggattagatatatggggccaaggggcaatggtcatcgtctcttcag

SEQ ID NO: 73 - DNA, 367 bp, Homo sapiens
  source 1..367: mol_type = other DNA
caggtgcagctggtgcagtctggggctgaggtgaagaagcctgggtcctcggtgaaggtctcctgcaaggcttctggaggccccttcagcagcaatgctatcagctgggtgcgacaggccccgggacaagggcttgagtggatgggagcgatcaaccctatctttggtgtaacacattacgcacagaatttccagggcagactcaccgtcaccacggacagatccacgaacacacactatatggagctgagcagcctgaggtctggagacacggccgtctatttctgtgcgagaggaaatggctacaaaccttcactgagtcatattgacttctggggccagggaaccctggtcaccgtctcctcag

SEQ ID NO: 74 - DNA, 368 bp, Homo sapiens
  source 1..368: mol_type = other DNA
gacgtgcagctggtggagtctgggggaggcttggtccagcctggggggtccctgagactctcctgtgcaacctctggattcagcttcaatgactattggatgacctgggtccgccagactcctggcaagagcccggagtgggtggccaacataaaacaagatggaggtgagacgtcctatgtggcctctgtgaagggccgattcaccatctccagagacaacgccaagaactcattatttctgcaaatggacagcctgagagtcgaggacactgctgtctattactgtgcgagagtgggatcccatgatagtactgcctaccgatccttccacaactggggccagggcaccctggtcaccgtctcctc

SEQ ID NO: 75 - DNA, 346 bp, Homo sapiens
  source 1..346: mol_type = other DNA
gaggtgcaggtggtggagtctgggggaggcctggtccaacctggggggtccctgagactctcctgtgcagcctctggattcatgttcagtggatattggatgacctgggtccgccaggctccagggaaggggctggagtgggtggccaacataaaggaagatggaagtgcagaatattatgtggactctgtgaagggccgattcgtcgtctccagagacaacgccaagaattcactgtatctgcaaatgaacagcctgagagccgaagacacggccgtgtattattgtgggagtttctaccccgatgactaccggggccagggaaccctggtcaccgtctcctcag

SEQ ID NO: 76 - DNA, 378 bp, Homo sapiens
  source 1..378: mol_type = other DNA
caggtgcagttggtgcagtctgggggaggcgtggtccagcctgggaggtccctgagactctcctgtgcagtttctggatttaccttcagtaactatgctttcaactgggtccgccaggctccaggcaaggggctggagtgggtggcacttatatcatatgatgggagtgaaaaatattacgcagactccgtgaagggccgattcaccatctccagagacaattccaggaacacgctgtatctgcaaatgaacagcctgacagctgaggacacggctatgttttactgtgcgagatatccatggttcggggaggcccacaattattattattacggtatggaagtctggggccaagggaccacggtcaccgtctcctca

SEQ ID NO: 77 - DNA, 367 bp, Homo sapiens
  source 1..367: mol_type = other DNA
caggtgcaggtggagcagtctggggctgaggtgaagaagcctgggtcctcggtgaaggtctcctgcaagggctctggaggtatcttcaagagcaatgctatcagttgggtgcgacaggcccctggacagggccttgagtggctgggaggcatcatcggtgtctttggtgtaccaagatatgcacagaacttccagggcagagtcacgattaccgcggacaaatccacggccacagtctacatggagttgagcggcctgagatctgaggacacggccgtctattattgcgcggaggaaagtgggagttattatggtagggggtacttcgatgtctggggccgtggcaccctggtcacagtctcctcag

SEQ ID NO: 78 - DNA, 367 bp, Homo sapiens
  source 1..367: mol_type = other DNA
caggtgcaactggtgcagtctggggctgaggtgcggaagcctgggtcctcggtgagggtctcctgccaggcttctggaggcaccttcaagaattatgctatcacctggctgcggcaggcccctggacaaggtcttgagtgggtgggagggctcatccctctatttcgtgtgccaaaaaacgcacagaagttccaggacagaatcacattcaccgcggacgaatccacgagcacgacttatatggaactgcgcagcctaaaatctgaagactcggccgtctattactgtgcaacttgggcgttcggtgactacggaatgggggcttttgatgtctggggccaagggacggggatcaccgtctcttcag

SEQ ID NO: 79 - DNA, 373 bp, Homo sapiens
  source 1..373: mol_type = other DNA
gaggtgcagctggcggagtctgggggaggcttggtccagccgggggggtccctgagactctcctgttttacctctggattcaccttcagtagttattacatgagttgggtccgccaggctccaggaaagggcctggagtgggtggccaatataaagcaggataaaagtgaggaaaattatgtggattctgtgaagggccgcttcaccatctccagagacaacgccaagaattcattgtatctgcagatgaacagcctgagagccgaggacacggccatttatttctgtgcgagagttcaatcttatgatagacaagactattatcgacactttgactactggggccagggaatcctggtcaccgtctcctcag

SEQ ID NO: 80 - DNA, 376 bp, Homo sapiens
  source 1..376: mol_type = other DNA
caggtgcagctggtggagtctgggggaggcttggtcaagcctggagggtccctgagactctcctgtgcagtctctggattcaccttcagtgactactacatgaactggatccgccaggctccagggaaggggctggagtgggtttcatgcattagtagtagtggtctttccatatactacgcagactctgtgaagggccgattcaccatctccagggacaacgccaagaactcactgtatctgcaaatgaatagcctgagagccgaggacacggccgtgtattactgtgcgagagatcgggttcggggagttaaccctcctctcttaggaactttgggttcctggggccagggaaccctggtcatcgtctcctcag

SEQ ID NO: 81 - DNA, 370 bp, Homo sapiens
  source 1..370: mol_type = other DNA
caggtgcagctggtggagtctgggggaggcgtggtccagcctgggaggtccctgagactctcctgtgcagcctctggattcaccttcaatatctatggcatgaactgggtccgccaggctccaggcaaggggctggagtgggtggcagttatctcatatgatggaagtaatgaatactatgccgactccgtgaagggccgattcaccatctccagagacaattccaagaacatggtatatctacaaatgaacagcctgagagctgaggacacggctatttattactgtgcgaaagattttgtaagacagtgggcagtggttgccccctttgactactggggccagggaaccctggtcaccgtctcctcag

SEQ ID NO: 82 - DNA, 361 bp, Homo sapiens
  source 1..361: mol_type = other DNA
caggtgcaactggtggagtctgggggaggcgtggtccagcctggggggtccctgagactctcctgttcagcgtctggattcaccttcagtcgccatggcatacactgggtccgccaggctccaggcaaggggctggagtgggtggcatttataagtcatcatggaagtgataaatactatgcagcctccgtgaagggccgattcaccgtctccggagaccgttccaaaatggtggacctgcaaatgaacagcctgagaattgaggacacggctatgtattactgtgcggaagctttcgatgatgggagctaccacggccctgacttctggggccagggaaccctggtcatcgtctcctcag

SEQ ID NO: 83 - DNA, 376 bp, Homo sapiens
  source 1..376: mol_type = other DNA
caggtgcagctggtgcagtctggggctcaggtgaagatccctggggcctcagtgagggtctcctgcaaggcttctggatacatcttcaccgactactatatgcactgggtgcgacaggcccctggacaaggccttgagtggatgggatggatcaaccctaacagtggtggcacaaactatgcacggaattttcagggcagagtcaccatgaccacggacacgtccatcagcacaggctacatggacttgagtcggctgagatctgacgacacggccgtgtatttctgtgcgagagggggatattgtagtcgtaccagctgctatgacgatgcttttgatatctggggccaggggacaatggtcaccatctcttcag

SEQ ID NO: 84 - DNA, 373 bp, Homo sapiens
  source 1..373: mol_type = other DNA
caggtcaccttgaaggagtctggtcctgtgctggtgaaacccacagaggccctcacgctgacctgcaccgtctctggattctcactcagtaattctagagtgggtgtgagctggatccgtcagcccccagggagggccctggagtggctcgcacacattttctcgaatggcgagacatcctacagcacatctctgaagaccagactcaccatctccaaggacacttccaagagccaagtggtccttaccgtgacgaacatggaccccattgacacagccacatattactgtgctaaaatagggggctccgatgactactcccacctctggttcgacccctggggccagggcaccctggtcaccgtctcctcag

SEQ ID NO: 85 - DNA, 373 bp, Homo sapiens
  source 1..373: mol_type = other DNA
gaggtgcagctggtggagtctgggggagacttggtccagccgggggggtccctgagactctcctgtatagcctctggattcacctttactaactattggatgacttgggtccgcctggctccagggaaggggctggagtgggtggccaacataaaggaagatggaagtgagaaaaattatgtggactctgtgaagggccgattcaccatctccagagacaacaccaagaactcactgtatctgcaaatgaacagcctgagagccgaggacacggccgtgtattattgtgcgagagttaagttgtatgatcggaaagattattaccgtcactttgaccgctggggccagggaaccccggtcaccgtctcctcag

SEQ ID NO: 86 - DNA, 377 bp, Homo sapiens
  source 1..377: mol_type = other DNA
gaggtgcagctggtggagtccggggggggcctggtcaaggctggggggtccctgagactctcctgtgcagcctctggattcaccttcaatacctctaccatgaactgggtccgccaggctccagggaaggggctggagtgggtctcatccattagtcgtagtagtagttacattttctacgcagactcagtggagggccgattcaccatctccagagacaacgccaagaattcactgtatctgcaaatgaacaccctgagagccgaggacacggctgtttactactgtgcgagagatggggaatattgtagtggtaccagctgctatgtgaaatacatggacgtctggggcaaagggaccacggtcaccgtctcctc

SEQ ID NO: 87 - DNA, 346 bp, Homo sapiens
  source 1..346: mol_type = other DNA
gaggtgcacctggtggagtctgggggaggcctggtccaacctggggggtccctgagactctcctgtgcagcctccggattcgtctttagtagatattggatgacttgggtccgccaggctccagggaaggggctggagtgggtggccaacataaaggaagatggaagtgcagaatattatgtggactctgtgaagggccgattcgccgtctccagagacaacgccaaaaatttactgtatctgcaaatgaacagcctgagagccgaagacacggccgtgtattattgttcgattttctaccccgatgactataggggccagggaaccctggtcaccgtctcctcag

SEQ ID NO: 88 - DNA, 361 bp, Homo sapiens
  source 1..361: mol_type = other DNA
caggtccagctggtgcagtctggggctgaggtgaagaagcctgggtcctcggtgaaggtctcctgcaggacgactggaggcaccttcgatacctttgctatcagttggatccgacaggcccctggacaaggtcttgagtggatgggagggatcacccctatgtttggaacagtacaatacggtcagaagttccagggccgaatcacagtcaccgcggacaaatccacgagcacggcctacatggagttgagcagactgacatctgaggacgcggccctatattattgtgcgagagatggattcaccaatggctgggcctttgacacctggggccggggaaccctggtcaccgtctcctcag

SEQ ID NO: 89 - DNA, 354 bp, Homo sapiens
  source 1..354: mol_type = other DNA
caggtgcaactggtgcagtctggggctgagttgaagaagcctggggcctcagtgaaggtctcctgccaggcctctggattcatcttcaccacttatgatgtcaactgggtgcgacaggccactggacaagggcttgagtggatgggatggatgaaccctaacagcggtgacacaggctttgcaccgaaattccagggcagagtcactttgaccaggaacacctccataagtacagcctacatggagctgaccagcctgacatctgaggacacaggcatttattattgtgcgagacaattcgattcttggagtggttacctctggggccagggaaccccggtctccgtctcctca

SEQ ID NO: 90 - DNA, 374 bp, Homo sapiens
  source 1..374: mol_type = other DNA
caggtgcagctggtggagtctgggggaggcttggtcaagcctggagggtccctgagactctcctgtgcagcctctggattcagctccagtgactactccatgcactggatccgccaggctccagggaaggggctggagtggatttcatacattagtagtagtggaattagcatatactacgcagcctctgtgaagggccgattcaccatctccagggacaacgccaagaagtcactttatctgcaaatgaacagcctgagagccgaggacacggccatgtattactgtgcgagagatcgggttcggggagttaaccctcctcatttaggaagtctgggttcctggggccagggaacccgggtcaccgtcacctc

SEQ ID NO: 91 - DNA, 365 bp, Homo sapiens
  source 1..365: mol_type = other DNA
caggtccagttggaacagtctgggactgaggtgaagaagcctgggtcctcggtgaaggtctcctgtaaggcttctggaggcaccttcaacaataatgctatcatctgggtgcgacaggcccctggacagggacttgagtggatgggaggaatcaaccccatgtttcgtattgtgaattatgcacagaagttccagggcagagtcacgattaccgcggacacattcccgagcacagcctacatggaactgagcagcctgacatctgacgacacggccgtatattactgtgcgcgaggtccgaattaccatgatactaatacttacctcgacccgtggggccagggaaccctggtcaccgtctcctc

SEQ ID NO: 92 - DNA, 364 bp, Homo sapiens
  source 1..364: mol_type = other DNA
gaggtgcagctggtggagtctgggggaggcctggtcaagcctggggggtccctgagactctcctgtgcagcctctggattcaccttcagtagctatagcatgaactgggtccgccaggctccagggaaggggctggagtgggtctcatccattagtagtagtagtagttacatatactacgcagactcagtgaagggccgattcaccatctccagagacaacgccaagaactcactgtatctgcaaatgaacagcctgagagccgaggacacggctgtgtattactgtgcgagaggaggtggggcggggaggccccaccgcccgtatatctggggccaagggacaatggtcaccgtctcttcag

SEQ ID NO: 93 - DNA, 400 bp, Homo sapiens
  source 1..400: mol_type = other DNA
gaggtgcagctggtggagtctgggggaggcttggtaaagcctggggggtcccttagactctcctgtgcagcctctggagtctctttcaataatgtctggatgagctgggtccgccaggctccagggaaggggctggagtgggttggccgtattaaaagcaaaactgctggtgggacaacagactacgctgcacccgtgaagggcagattcttcatctcaacagatgattcaaaaaatacgctctatctgcaaatgaacagcctgaaatccgaggacacagccgtgtactactgtaccacagagtcacctacatatttggatattttgactgattattatgttccgggtagggatgcttttgatatctggggccaagggacagtggtcaccgtctcttcag

SEQ ID NO: 94 - DNA, 371 bp, Homo sapiens
  source 1..371: mol_type = other DNA
ggtgcaattggtggagtcggggggaggcttggtccagccgggggggtccctgagactctcctgtgcagcctctggattcatttttagtggctattctatgagctgggtccgccaggctccagggaaggggctggaatgggtggcctccattaaggaagatggacgtcaaaagtactatgtggactctgtgaagggccgatgcaccatctccagagacaacgccaggaactcattgtttctgcaaatgaacagcctgagagccgaggactcggccgtctattattgtgcgagaatttatcactttgagaagggtggtcattacaggcactttgactactggggccagggaacccaggccaccgtctcctcag

SEQ ID NO: 95 - DNA, 354 bp, Homo sapiens
  source 1..354: mol_type = other DNA
gaggtgcagctgctgcagtctggagcagaggtgaaaaagccgggggagtctctgaaaatctcctgtgagggttctggatacaactttgccagctactggatcgcctgggtgcgccagatgcccgggaaaggcctggagtggatgggaaacatctatcctggtgactctgataccaaatacagcccatccttccaaggccaggtcaccttctcagccgacaagtccatcaacaccgcctacctgcagtggagcggcctgcaggcctcggacaccgccatatattactgtgcgagacgacatacggactacaacatggacgtctggggcaatgggaccgcggtcaccgtctcctca

SEQ ID NO: 96 - DNA, 370 bp, Homo sapiens
  source 1..370: mol_type = other DNA
caggtccagctagagcagtctggggctgaggtgaagaagcctgggtcctcggtgaggctctcctgcaggcttactggagtccacttcaataaatatgccatcaactgggtgcgacaggcccctggacaaggccttgagtgggtgggcggcatcatgcccatcttccgtctagccaactacggccagaaattccagggcagagtcaccattaccgcggacgaatccgcgaccacatcctacttggagctgaacagcctgacctctgatgacacggccatatattattgtgcgagagacggatcggggaattataataaagactggtatttcgatgtctggggccgtggttccctgatcactgtctcgtcag

SEQ ID NO: 97 - DNA, 381 bp, Homo sapiens
  source 1..381: mol_type = other DNA
caggtgcagttggtggagtctgggggaggcgtggtccagcctggggggtccctgagactctcctgtgcagcgtctggattcaccttcagtgactatggcgtacactgggtccgccaggctccaggcaaggggctggagtgggtggcatttatacggtatgatggaaataataaatactatgcagcctccgtgaagggccgattcaccatctccagagacaattccaagaacacgctgtatctgcaaatgaacagtctgagaggtgaggacacggctgtgtattactgtgcgaaagacccgattcctttttatggttcggggactcactactattacggaatggacgtctggggccaagggaccacggtcaccgtctcctca

SEQ ID NO: 98 - DNA, 370 bp, Homo sapiens
  source 1..370: mol_type = other DNA
gaggtgcaactggtggagtctgggggaaacttggtccagccgggggggtccctgagactctcctgtgcagcctctggattcacctttagtacctattggatgacctgggtccgccaggctccaggaaaggggctggagtgggtggccaacataaagccagatggaagtgacaaaaattatctgggctctgtgaggggccgatttaccatctccagagacaacgtcaagaactcctcgtttttgcaattaaatagcctcagagccgaagacacggccgtatattactgtgcgagagtacgtcttcgagaggctagtgcctacaatccgattgacttctggggccagggaaccctggtcatcgtctcctcag

SEQ ID NO: 99 - DNA, 352 bp, Homo sapiens
  source 1..352: mol_type = other DNA
caggtgcagttgcaggagtcgggcccaggactggtgaagccttcacagaccctgtccctcacctgcgctgtctctggtggctccatcagcagtggtggttactcctgcagctggatccggcagccaccagggaagggactggagtggcttgggtatatcttttacaatgggaacaccttctacaacccgtccctcaggagtcgacttatcctctcagttgacacgtccaagaaccagttctccctgaggctgagctctgtgaccgccgcggacacggccgtgtattactgtgccaggggcgaaacccactttgacctctggggccagggaaccctggtcaccgtctcctcag

SEQ ID NO: 100 - DNA, 367 bp, Homo sapiens
  source 1..367: mol_type = other DNA
caggtgcagctggtgcagtctggggctgaggtgaagaagcctgggtcttcggtgaaggtctcctgcaaggctcctggaggccccttcatcagtaatgctctcagctgggtgcgacaggcccctggacaagggcttgagtggatgggcacaatcaaccctatctttggtataacaaactacgcacagaacttccagggcagactcaccattaccgtggacaaatccacgagcacagcctacatggagttgagcagcctgagatctggggacacggccgtttatttctgtgcgagaggaaatgcctacaagcctacactgagtcatattgactcctggggccagggaaccctggtcaccgtctcctcag

SEQ ID NO: 101 - DNA, 370 bp, Homo sapiens
  source 1..370: mol_type = other DNA
gaagtgcagctggtggagtctgggggaggcttggaacagcctggcaggtccctgagactctcctgtgcagcctctggattcacctttgatgattatgccatgcactgggtccggcaagctccagggaagggcctggagtgggtctcaggtattagttggaatagtggtagcatagactatgcggactctgtgaagggccgattcaccatctccagagacaacgccaagaactccctgtatctgcaaatgaacagtctgagagctgaggacacggccttctattactgtgcaaaagccgggggagggtttttggagtgggtattatatcttgatgactggggccagggaaccctggtcaccgtctcctcag

SEQ ID NO: 102 - DNA, 373 bp, Homo sapiens
  source 1..373: mol_type = other DNA
caggttcagctggagcagtctggagctgaggcgaagaagcctggggcctcagtgaaggtctcctgcaagggttttggttacatttttagtaactacggtatcacctgggtgcgacaggcccctggacaagggcttgagtggatgggatggattagcgcttataatggtaacacaaactctgcacagaagttccaggatagagtcaccttgaccacagacacatccacgagcactgcctacatggaattgaggagcctgaaatctgacgacacggccgtatattactgtgcgagaggtgcctcattcgcatatttccaggataatagcccacttgattcctggggccaggggaccctggtcaccgtctcctcag

SEQ ID NO: 103 - DNA, 361 bp, Homo sapiens
  source 1..361: mol_type = other DNA
caagtccagctggtgcagtctggggctgaggtgaagaagcctgggtcctcggtgaaggtctcctgcaaggcttctggaggcaccttcaatagcaatgctatcagttgggtgcgacaggcccctggacaagggcttgagtggatgggagggctcaatcctctgtttaaaatagcaaattacgcacagaaattccagggcagaatcacgatcaccgcggacgaattcatgagcactgcctacatggagttgagcagcctcagatctgacgacacggccatttatttttgtgcgagagcccagggatatcatagacctatacctcactactggggccagggaaccctggtcaccgtctcctcag

SEQ ID NO: 104 - DNA, 369 bp, Homo sapiens
  source 1..369: mol_type = other DNA
gaggtgcagttggtggagtctgggggaggcctggtcaagcctgggggatccctgagaatctcctgtgcagcctctggattcatcttcagtaactatggcatgaattgggtccgccaggctccagggaaggggctggagtgggtctcatccattagtggtagtagcatttacagatattacgcagagtcagtgaagggccgcgtcaccatctccagagacaacgccaagaactcactgtatctgcaaatgaatagcctgagagtcgaggacacggctgtttattactgtgcgagagagcgctatgatagcagtggtaattattacggtatggacgtctggggccaagggaccacggtcaccgtatcttca

SEQ ID NO: 105 - DNA, 379 bp, Homo sapiens
  source 1..379: mol_type = other DNA
cagccgcaactacagcagtcgggcccagggctggtgaagccttcggagaccctgtccctcacctgcactgtctctggtgactccatcaacaataagaatttcctctggggctggatccgccagcccccggggatggggctggagtggattgcaagtatctcttttagtgggaccacccactacagtccgtccctcgagagtcgtctcaccacatccgtagacacgtccacgaggcaattctccctgaaactgacgtctgtgaccgccgcagacacggcggtatattattgtgtgagacatcgcagtgttgtggtgaaaggaagatacggtgactactttgacttctggggccggggaacgctggtcgccgtctcctcag

SEQ ID NO: 106 - DNA, 343 bp, Homo sapiens
  source 1..343: mol_type = other DNA
gaggtgcagctggtggagactggaggaggcttgatccagcctggggggtccctgagactctcctgtgcagcctctgggttcaccgtcaggagcaactacatgagctgggtccgccaggctccagggaaggggctggagtgggtctcaattatttatagtggtggtagtacagactatgcagactccgtgaagggccgattcaccatctccagagacaattccaagaacacgctgtatcttcaaatgaacagcctgagagccgaggacacggccgtgtattactgtgcgagagggtcggcttttgatatctggggccaagggacaatggtcaccgtctcttcag

SEQ ID NO: 107 - DNA, 364 bp, Homo sapiens
  source 1..364: mol_type = other DNA
gaagtgcagctggtggagtctgggggaggcttcgtagtgcctggggggtccctgagactctcctgtgcagcctctggattcagattcagtaactttgccatgaactgggtccgccaggctccagggaaggggctggagtggatttcatacattagaattaatggtggtaatgactactacgcagaatctgtgaagggccgattcaccatctccatcgacctcgccaagaactcagcgtacttgcagatgaacagcctgagacacgaagactcgggtgtttattactgtgcgagagatcgcgataacagtggctggtatttgggagactcttggggccagggaaccctggtcaccgtctcctcag

SEQ ID NO: 108 - DNA, 373 bp, Homo sapiens
  source 1..373: mol_type = other DNA
gaggtgcagttggtggagtctgggggaggcctggtccagcctggggggtccctgagactctcctgtgtaacctctggattcaattttggaaactattggatgacctgggtccgtcagagtccacggaaggggctggagtgggtggccagtataaaaaaagacggaagtgagaaatactatgtgaaatctgtgaagggccgattcaccatttacagagacaatgtcaggaactcagtgtttctgcaactggacagcctcagagtcgacgacgcggccgtgtattattgtgcgagaatggatgactttgaatcggggacttattatcgattcttcggcccctggggccagggtaccctggtcaccgtctcctcag

SEQ ID NO: 109 - DNA, 376 bp, Homo sapiens
  source 1..376: mol_type = other DNA
caggtgcagttggtggagtctgggggaggcttggtcaagcctggagagtccctgagactctcctgtgcagcctctggattcagcttcagtgactactccatgcactggatccgccaggctccagggaaggggctggagtgggtttcatatattagtagcagtggacggagtatatattatgaagcctctgtgaagggccgattcaccatctccagggacaacgccaagaagtcactgtatctgcaaatgaacagcctgagagccgaggacacggccatgtattattgtgtgagagatcgggttcggggagttaaccctcctcatctcggaagtctgggtgactggggccagggaacccgggtcaccgtcacctcag

SEQ ID NO: 110 - DNA, 364 bp, Homo sapiens
  source 1..364: mol_type = other DNA
caggtccagctggtgcagtctggggctgaggtgaagaagcctgggtcctcggtgaaggtctcctgcaaggcctctgggggcatcttcaggagtaatgctatcagctgggtgcgacaggcccctggacaagggcttgagtggatgggagggatcatcgctatctttggtatagcaaactacgcacagaagtaccagggcagagtcacgatcaccgcggacgaatccacgaccacagtttacatggagctgagcagcctgagatctgacgacacggccgtatattactgtgcgagacacaccgggtatagcagtgacggccactttgactactggggccagggaaccctggtcaccgtctcctcag

SEQ ID NO: 111 - DNA, 367 bp, Homo sapiens
  source 1..367: mol_type = other DNA
caggtccaactggaacagtctggggctgaggtgaagaagcctgggtcctcggtgaagatctcctgtaaggcttctggcggcaccttcaatgcctatgctatcggctggctgcgacaggcccctggacaagggcttgagtggatgggaggcatcaaccctatgtttggtatagttaactacgcacagaaattccagggcagactcgcgattaccgcggacaatttcccgagcacagcctacatggaactgagcagcctcagatctgacgacacggccgtttattactgtgcgagaggtccaaattaccatgacaccactacttacttcgacccctggggccagggaaccttggtcaccgtctcctcag

SEQ ID NO: 112 - DNA, 364 bp, Homo sapiens
  source 1..364: mol_type = other DNA
caggtgcagctacagcagtggggcgcaggactgttgaagccttcggagaccctgtccctcacctgcgctgtctatggtgggtccttcagtacttcctactggacctggatccgccagcccccagggaaggggctggagtggattggagaagtcaatcatagtgggagcaccaaataccacccgtccctcaagagtcgagtcaccatatcagtagacacgtccaagaaccagttctccctgagtctgaactctgtgaccgccgcggacacggctgtgtattactgtgcgagagacgagagatggctacaatataacgccgcttttgatatctggggccaagggacaacggtcaccgtctcttcag

SEQ ID NO: 113 - DNA, 376 bp, Homo sapiens
  source 1..376: mol_type = other DNA
gaggtgcagctggtgcagtctggagcagaggtgaaaaagccgggggagtctctgaagatctcctgtaagggttctggatacagctttaccaacaattggatcggctgggtgcgccagatgcccgggaaaggcctggagtggatggggatcatctatcctggtgactctgataccagatacagccagtccttccaaggccaggtcaccatctcagccgacaagtccatcagcaccgcctacctgcagtggagcagcctgaaggcctcggacaccgccatgtattactgtgcgagactaagtcactggctggagagggggaatcttgcgggggcttttgatatctggggccaagggacaaaggtcaccgtctcttcag

SEQ ID NO: 114 - DNA, 355 bp, Homo sapiens
  source 1..355: mol_type = other DNA
caggtgcagctggtgcagtctggggctgaggtgaagaagcctggggcctcagtgaaggtctcctgcaaggcttttggaaacaccttcaccagttatgaaatcaattgggtacgacaggccactgggcaagggcttgagtggatgggatggatgaacccaaacactggtaacacaggctatgcagagaagttccagggcagagtcagcatgaccaggaacaactccataagcacggcctacatggaactgagcaacctgagatttgacgacacggccacgtattactgtgcgagacaatacgattcttggagtggttacctctggggccagggaaccgtggtcaccgtctcctcag

SEQ ID NO: 115 - DNA, 376 bp, Homo sapiens
  source 1..376: mol_type = other DNA
caggtccagctggtgcagtctggggctgaggtgaagaagcctgggtcctctgtaaaggtctcctgcaaggcctctggaggcaccctcagcagcaacgccatcagctgggtgcgacaggcccctggacaagggcttgagtgggtgggaggaaccatccctctctttggtgttgcaaagtacgcagtgaaattccagggcagagtcacgattaccgcggacgcatccacgagcacagcctacatggagttcaccagcctgagatccgatgacacggccgtctactactgtgcgcgacctgctaatttctatggtaatagtggtcattacaactactttgacctctggggccagggaaccctggtcaccgtctcctcag

SEQ ID NO: 116 - DNA, 349 bp, Homo sapiens
  source 1..349: mol_type = other DNA
gaggtgcagctgctggagtctgggggaggcctcgtcaagcctggggggtccctgagactctcctgtgcagcctctggattcagcttcgataactatgacatgaactgggtccgccaggctccagggaaggggctggagtgggtctcatccattagtagtagtagtggttacatattctacgcagactcagtgaagggccgattcaccatctccagagacaacgccaagaactcactgtatctgcaaatgaacagcctgagagccgaagacacggctgtatattactgtgcgggaggggggacctactttgactactggggccagggaaccctggtcaccgtctcctcag

SEQ ID NO: 117 - DNA, 375 bp, Homo sapiens
  source 1..375: mol_type = other DNA
caggtccagctggtgcaatctggggctgaggtgaagaagcctgggtcctcggtgaaggtctcctgcaaggcttctggaggcaccttcagcagctatactatcagctgggtgcgacaggcccctggacaagggcttgagtggatgggaaggatcatccctatccttggtatagcaaactacgcacagaagttccagggcagagtcacgattaccgcggacaaatccacgagcacagcctacatggagctgagcagcctgagatctgaggacacggccgtgtattactgtgcgagagacgggcacggttcggggagttattatatccattacggtatggacgtctggggccaagggaccacggtcaccgtctcctca

SEQ ID NO: 118 - DNA, 358 bp, Homo sapiens
  source 1..358: mol_type = other DNA
gaggtggagctggtggagtctgggggaggcttggtccagcctggggggtccctgagactctcctgtgcagcctctggattcacctttggtagctattggatgacctgggtccgccaggctccagggaaggggctggagtgggtggcccacataaaccgagatggaagtgagacataccatgtggactctgtaaagggccgattcaccatctccagagacaacgctaagaactcactgtatctgcaaatgaacagcctgagagctgaggacacggccgtttattactgtggaagagatcaaagagcaacatttggcgcgtccgactggggtcggggagccctggtcaccgtctcctcag

SEQ ID NO: 119 - DNA, 370 bp, Homo sapiens
  source 1..370: mol_type = other DNA
gaggtgcagctggtggagtctgggggaggcttggtacaaccgggggggtccctgagactctcctgtgcagtctctggattcaccctcagaagttacagtatgcactgggtccgccaggctccagggaaggggctggagtgggtttcgtacataagtagtagtagtctaagtcgatactacgcagactccgtgaagggccgattcaccgtctccagagacaatggcgacaacttactgtatctgcaaatgaacagcctgagagccgaggacacggctatgtattattgtgtgagagatggcggtatgacagtagtggccatggggactcttgatatttggggccgagggacaatggtcaccgtctcttcag

SEQ ID NO: 120 - DNA, 362 bp, Homo sapiens
  source 1..362: mol_type = other DNA
ggtgcaactagtggagtctgggggaggcttggtccggcctggggagtccctcagactctcctgtgcagcctccggattcaattttgacacctattggatgagttgggtccgccaggctccagggaaggggctggagtgggtggccgacataagggaagatggaggaaagacttattatggggactctgcgaagggccgattcaccatctccagagacaacgccaagaactcactgtatctgcaaatgtacagcctgagagccggagacacggccgtctattactgtgtcagagaaggatattgtaccggtggtggttgctacccgatctggggccggggaaccctgatcaccgtctcctcag

SEQ ID NO: 121 - DNA, 367 bp, Homo sapiens
  source 1..367: mol_type = other DNA
caggtccagctggaacagtctggggctgaggtgaagaagcctgggtcctcggtgaaggtctcctgtaaggctgctggaggcaaattcaacagttatgctatcagctggctgcggcaggcccctggacaaggccttgagtggatgggagggatcaaccctatgtttaaaatcgtcgactacgcaccgaagttccagggccgactcactattaccgcggacgcgttgccgagcacagcctacatggagctgagcagcctgagatctgaagacacggccgtatattattgtgcgagaggtccaaattaccatgatattgttacttacttcgacccctggggccagggaaccctggtcatcgtctcctcag

SEQ ID NO: 122 - DNA, 351 bp, Homo sapiens
  source 1..351: mol_type = other DNA
cagctgcagttgcaggagtccggctcaggactggtgaagccttcacagaccctgtccctcacctgcgctgtctctggtggctccatcagcagtgatggttactcctgcagctggatccggcagccactagggaagggcctggagtggattgggtacatctctcatagtggcatcacctacttcaacccgtccctcaggagtcgagtcaccatatcagtggacaggtccaggaaccagttctccctgaagctgacctctgtgagcgccgcggacacggccgtgtattactgtgccaggggggaaaccttcttggacgtctggggccaagggaccacggtcaccgtctcctca

SEQ ID NO: 123 - DNA, 364 bp, Homo sapiens
  source 1..364: mol_type = other DNA
caggtccagctggtgcagtctggggctgaggtgaagaagcctgggtcctcggtgaaggtctcctgcaaggcttctgggggcatcttcaggagtaatgctatcagctgggtgcgacaggcccctggacaagggcttgagtggatgggagggatcatcgctatttttaatgtaccaaactacgcacagaagtaccagggcagagtcacgatttccgcggacgattctacgagcacagtttacatggaactgcgcaacctgagatctgaagacacggccgtatattactgtgcgagacacaccgggtatagcgcaggcggccactttgactactggggcccgggatccctggtcaccgtctcctcag

SEQ ID NO: 124 - DNA, 355 bp, Homo sapiens
  source 1..355: mol_type = other DNA
gaggtgcagctggtgcagtctggagcagaggtgaaaaagccgggggagtctctgaaactctcctgtgagggttctggatacagcttcaccaactactggatcgcctgggtgcgccagatgcccgggaaaggcctggagtggatggggaacatctatcctggtgactctgctaccagatatagcccatccttccaaggccaggtcaccatctctgccgacaagtccatccacaccgcctacctgcagtggagcagcctgaaggcctcggacaccgccatatattactgtgcgagacgacatacggactacaatttggacgtctggggcaatgggaccacggtcaccgtctcctcag

SEQ ID NO: 125 - DNA, 361 bp, Homo sapiens
  source 1..361: mol_type = other DNA
caggttcagttggtgcagtctggagctgaggtgaggaagcctggggcctcagtgaaggtctcctgcaaggcttctggttacactcttaccagtaacggtatcagctgggtgcgacaggcccctggacaagggcttgagtggatgggatggatcaccccttccaagggtaatacacactatgcacagaagttccaagacagagtcaccttgaccacagacacatccacgcgcacagcctatatggagctgaggagcctgagatctgacgacacggccatgtattactgtgcgagagaggggaatactattcactggttcttcgatctctggggccgtggcaccctggtcactgtctcctcag

SEQ ID NO: 126 - DNA, 349 bp, Homo sapiens
  source 1..349: mol_type = other DNA
caggtccacctggtacaatctggggctgaggtgaagaagcctgggtcctcagtgaaggtcgcctgtgagacttctggagactccttcaacacctctattctcagctgggtgcgacaggcccctggacaagggcttgagtggatggggaagatcgtcgctatcgtgaatacggcacaatacgcaccaaagttccaggacaaagtcactctttccgcggacacatccacgaccacagcctacatggagctacacagtctgacatctgaagacacggccgtctattactgtgcagaaggtgatactacccttgactcttggggccagggaaccctggtcaccgtctcttcag

SEQ ID NO: 127 - DNA, 367 bp, Homo sapiens
  source 1..367: mol_type = other DNA
caggtccagctggtgcagtctggggctgaggtgaagaagcctgggtcctcggtgaaggtctcctgcaaggcttctggaggcatctttaggaactttgctatcagttgggtgcgacaggcccctggacaagggcttgagtggatgggagggatcatcgctatctttggaataccgaactacgcacagaagttccaggacagagtcacgattaccgcggacgagtcctcgagcacagcctacatggagctgagcagcctgcgatctgacgacacggccgtgtattactgtgcgacccaccctaaatatcactatgaaaatagtgcccttgattactggggccagggaaccctggtcaccgtctcctcag

SEQ ID NO: 128 - DNA, 367 bp, Homo sapiens
  source 1..367: mol_type = other DNA
gaggtgcagttggtggagtctgggggaggcttagtccagcctggagggtccctgagactctcctgtgcagcctctggattcaccttcagtgaccactacatggactgggtccgccaggctccagggaaggggctggagtgggttggttgtatcagaaataaggctaacagggccaccacagaatacgccgcatctgtgaaaggcagattcaccatctctagagatgattcaaagaagtcactatttctacaaatgaacagcctgaaagtcgaggacacggccatatactactgtgtaagaagcagcgtggcgccctactggtacttcggtctctggggtcgtggcgccctggtcactgtctcctcag

SEQ ID NO: 129 - DNA, 370 bp, Homo sapiens
  source 1..370: mol_type = other DNA
caggtccagctggtgcaatctggggctgaagtgaagaagcctgggtcctcggtgaaggtctcctgcgaggcttctgggggcaccttcagcagcgacagtgtcacctgggtgcgacaggccccgggacaagggcttgagtggatgggaaggatcatccctatcctgggtatagttgactatgcacagaagttccagggcagagtcacgatttccgcggccgcaactacgaccacagcctacatggaactgaacagcctgacatctgacgacacggccgtatattactgtgcgagaggacttgaggggagtaggagctggttccgggcggatgaaatctggggccagggaaccctggtcaccgtctcctcag

SEQ ID NO: 130 - DNA, 373 bp, Homo sapiens
  source 1..373: mol_type = other DNA
gaggtgtccctggtggagtctgggggaggctcggcccagcctggggggtccctgagactctcctgtgaagcctctggattcatcttcagccattattggatgacttgggtccgccaggctccagggaaggggctggagtgggtggccaacataaaggaggacggaagtgagacattgtatttggactctgtgaggggccgattctccgttttcagagacaataccaggaattcactgtatctgcaaatgtacagcctgagagccgaggacacggccgtgtattactgtgcgagaatctttcactttgagcaaggtggcttttatagacactttgactcttggggccagggaaccctggtcaccgtctcctcag

SEQ ID NO: 131 - DNA, 373 bp, Homo sapiens
  source 1..373: mol_type = other DNA
gaggtgcagttgttggagtctgggggagccttggtacagcctggggggtccctgagactctcctgtgtaggctctggactcaattttagtgcatttatggtgcactgggtccgccaggttccagggaggggcctggagtggctctcaggtattgatggaagtggctttagtctttactatggagactccgtggggggccgtttcaccgtctccagagacaagtccaagaacacagtgtatctgcaaatgcacaacctgagagtcgaggacacggccctatattattgtgcgaaaacattgcgtgagggtgtgaaaagttccgacataattttcgactcctggggtcagggaacccaggtcgccgtctcctcag

SEQ ID NO: 132 - DNA, 351 bp, Homo sapiens
  source 1..351: mol_type = other DNA
cagctgcagctgcaggagtcgggcccaggactggtgaagccttcggagaccctgtccctcacctgcactgtctctggtggctccatcagcagtgggaggtactactggggctggatccgccagcccccagggaagggcctggagtggattgggaatatctattatagtggggaaacctactacaccccgtccctcgagagtcgagtcaccatatccgtagacacgtccaagaaccagttctccctgaagctgacctctgtgatcgccgcagacacggctgtatattattgtacgagaggcttagcagcagcgaacgtctggggccaagggaccacggtcaccgtctcctca

SEQ ID NO: 133 - DNA, 351 bp, Homo sapiens
  source 1..351: mol_type = other DNA
cagctgcagctgcaggagtcgggcccaggactggtgaagccttcggagaccctgtccctcacctgcactgtctctggtgactccatcagcagtgggaactactactggggctggatccgccagcccccagggatgggcctggaatggattgggaatatctattatagtgggcacgcctactacaacccctccctcgagagtcgagtcaccatttccgttgacacgtccaggaaccagttctccctgatgctgacctctgtgaccgccgcagacacggctgtgtattactgtacgagaggcttagcagcagcgaacgtctggggccaagggaccccggtcaccgtgtcctca

SEQ ID NO: 134 - DNA, 343 bp, Homo sapiens
  source 1..343: mol_type = other DNA
gaggtgcagctgttggagtctgggggaggcttggtacagcctggggggtccctgagactctcctgtgcagcctttggattcacctttagcagcgatgccatgacctgggtccgccaggctccaggaaaggggctggagtgggtctcaacttttagtggtggtttctcatactacacagactccgtgaagggccgattcaccgtctccagagacaattccaaaaacacgctgtttctgcaaatgaacagcctgagagccggggacacggccatatattactgtgcggtaggggatacagctatggttatatggggccaaggaaccctggtcaccgtctcctcag

SEQ ID NO: 135 - DNA, 364 bp, Homo sapiens
  source 1..364: mol_type = other DNA
caggtccacttggtgcagtctggggctgaggtgaagaagcctgggtcctcggtgaaggtctcctgccaggcttctggaggccccttcagcgcctttgccatcaactgggtgcgactggcccctggacaagggcttgagtgggtgggagggatcatcggcatgtttggtgttacaaaatatgcacagaagttccaggacagaatcacaataaccgcggacgaatccacgagcacaggatatatggagttgaggagcctgagatcagaagacacggccatgtattattgtgcgagaagtagcggatacactttgaggggcaggctcgacccctggggccagggaaccctggtcaccgtctcctcag

SEQ ID NO: 136 - DNA, 373 bp, Homo sapiens
  source 1..373: mol_type = other DNA
caggtgcagctgcaggagtcgggcccaggactggtgaagccttcacagaccctgtccctcacctgcgctgtctctggtggctccatcatcagtgatacttattcctggagctggatccggcagccaccaggggagacactggagtggattgggtatatctatgccagtgggaggaccaagtccaacccgtccctcaagagtcgagtcaccatatcaatagacacgtccaagaaccagttctccctcaacctgacctctgtgaccgccgcggacacggccgtgtattactgtgccagagatctgacgtccatggttcggggagcgagttacttagactgctggggccagggaaccctggtcaccgtctcctcag

SEQ ID NO: 137 - DNA, 370 bp, Homo sapiens
  source 1..370: mol_type = other DNA
gaggtgcaactggtggaatctgggggaggcttggtacagcctggggggtccctgagactctcctgctcagcctctggattcatctttagaaattatggcatgagttgggtccgccaggctccagggaaggggctggagtgggtctcaagtatcacttttactggtggcagtagatactacgcagactccgtgaagggccggttcaccatctccagagaccaatccaagaacacattgtttctacaaatgaacagcctgagagccgacgacacggccgtctattactgtgcgaaagataggtcccttactattcccgattctgggacttttgactcctggggccaggggaccctggtcaccgtctcctcag

SEQ ID NO: 138 - DNA, 358 bp, Homo sapiens
  source 1..358: mol_type = other DNA
gaggtgaagctggtggagtctgggggaggcttggtgcagcctggggggtccctgagactctcttgtggagcctctggattcacctttagcagctatgccatgagctgggtccgccaggccccagggaagggtctggagtggatctcaggtatttctagtagcggtgataccacatcttacgcagcctccgtgaagggccgcttcaccatctccagagacaggtcgaagagtatgttatatctacaaatggacagcctgacagacgcggacacggccatgtattactgtgcgaaagacggcgggagcaaaacaccagagaggcactggggccagggaaccctggtcatcgtctcttcag

SEQ ID NO: 139 - DNA, 364 bp, Homo sapiens
  source 1..364: mol_type = other DNA
caggtccaactggtgcagtctggggctgaggtgaagaagcctggggcctcggtgaaggtctcctgtaaggcttctggaggccccttcagtagttttggaattagctgggtgcgacaggcccctggacaagggcttgagtggatgggagggatcgtcgggatgtttggcataacgaaatacgcacagaagttccagggaagggtcaccattaccgcggaagaagtcaccagcacagcctacatggagctgagaagcctgacatctgacgacacggccgtatattattgtgcgagaagcagtggatacactttgagggggaggctcgacccctggggcccgggaacccaggtcaccgtctcctcag

SEQ ID NO: 140 - DNA, 367 bp, Homo sapiens
  source 1..367: mol_type = other DNA
caggagcagctggtgcagtctggggctgaggtgaagaagcctgggtcctcggtgaaggtctcctgcaaggcttctggaggccccttcttcagcaacgctatcagctgggtgcgacaggcccctggacaggggcttgagtggatgggagcgatcaatcctatctttagtgtagtcgactacgcacagaagttccagggcaggctcaccgttagtgcggacaaatccacaaacacattctacatggagctgagcagcctggggtctgacgacacggccgtgtattactgtgcgagaggaaatggctacaaacctacactgacccatattgactactggggccagggaaccctggtcatcgtctcctcag

SEQ ID NO: 141 - DNA, 370 bp, Homo sapiens
  source 1..370: mol_type = other DNA
caggtcctgctggagcagtccggggctgaggtgaagaagcctgggtcctcggtgagggtctcctgcaaggcttctggagtcgccttcagtaaatatgctatcaactgggtgcgacaggccccgggacaagggctagagtggataggagggatcatgcctatctttcatgtaacaaaatacgcacagagatttcagggcagagtcaccattaccgcggacgaaaccacgaccacttcctatttggacctgaatagcctgagatctgaggacacggccgtctattactgtgcgagagatggctcgggaaattattataaggactggtacttcgatctctggggccgtggcaccctgatcactgtctcctcag

SEQ ID NO: 142 - DNA, 376 bp, Homo sapiens
  source 1..376: mol_type = other DNA
gaagtgcacctggtggagtctgggggaggcttggtacagcctggcaggtctctgagactctcctgtgctgcctctggattcaactttgaagattatgccatgcactgggtccgccaagttccagggaagggcctggagtgggtctcaggtattaattggaatagtgaggacatggcccacgcggactctgtgaggggccgattcaccatctccagagacaacgccaaggagtccctatatttgcaaatggacagtctgagaactgaggacacggccttgtatttctgcgcaaaggtggggcgcaggggtggcggtggctggagagcaggccattttgacaactggggccagggaaccctggtcaccgtctcctcag

SEQ ID NO: 143 - DNA, 361 bp, Homo sapiens
  source 1..361: mol_type = other DNA
caagtccagctggtgcagtctgggcctgaggtgaagaagcctgggtcctcggtgaaggtctcctgtaaggcttctggaggcaccttcaacagcaatgcaatcagctgggtgcgccaggcccctggacaaggacttgagtggatgggaggcctcaaccctctctttaaaataccaaaatactcacagaaattccagggcagagtcacgatctccgcggacgagtttatgagcactgcctacttggagctgagcaacctgagatctgaagacacggccgtatattattgtgcgagagcccagggatatcatagacctattccccacttctggggccagggaaccctagtcaccgtctcctcag

SEQ ID NO: 144 - DNA, 352 bp, Homo sapiens
  source 1..352: mol_type = other DNA
caggtgcagctgcaggagtcgggcccaggactggtgaagccttcggagaccgtgtccctcacctgcactgtctctggtgaccccatcagtagttactactggaactggatccggcagtccccagggaagggactggagtggattggctatatctattccagtgggagcaccaactacaacccctccctcaagactcgagtcaccatatcagtggacacgtccaagaaccagctctccctgaagctgagctctgtgaccgccgcagacacggccgtgtatttctgtgcgagagcgtttcggttcggggagttccatgcctggggccagggaaccctggtcaccgtctcctcag

SEQ ID NO: 145 - DNA, 352 bp, Homo sapiens
  source 1..352: mol_type = other DNA
caggtgcagctgcaggagtcgggcccaggactggtgaagccttcacagaccctgtccctcacctgcgctgtctctggtggctccttcagtagtggtggttcctcctggagctggatccggcagccaccagggaagggactggagtggattgggtatatctattacagtggaagcacctactacaacccgtccctcaagagtcgagttaccatatcagtggacacgtccaagaaccagctctccctgaagctgagttctgtgaccgccgcggacacggccgtctatttctgtgcccagggcgatacaactatgggtccctggggccagggaaccctggtcaccgtctcctcag

SEQ ID NO: 146 - DNA, 367 bp, Homo sapiens
  source 1..367: mol_type = other DNA
caggtccagctggaacagtctggggctgaggtgaagaagcctgggtcctcggtgaaggtctcctgtaagacttctggaggcaccttcaacagctatgctatcagctgggtgcgacaggcccctggacaggggcttgagtggataggagggatcaaccctatgtttggtatagtcaactacgcacagaagttccagggcagagtcaccattaccgcggactcatatccgagcacagcctacatggagttgcgcagcctgagatctgacgacacggccgtctattactgtgcgagaggtccgaattaccatgatacgaccacttatttcgacccctggggccagggaacccgggtcaccgtctcctcag

SEQ ID NO: 147 - DNA, 364 bp, Homo sapiens
  source 1..364: mol_type = other DNA
gaggtgcgcctggtggagtctgggggaggcttggtagagcctggggggtccctgagactctcctgtttaacctctggattcgcattcagtggccatgccatgaactgggtccgccaggctccagggaaggggctggagtgggttgcatacattagaattaatggtggtggaacctactatgcagactctgttaagggccggttcaccatctccatcgacaacgccaagaactcactgtatttggaaatgaacaacctgagagaagacgacgcggctgtatattactgtgcgagagaccgcgataatactggctggtatttgggagacaactggggccagggaaccctggtctccgtctcctcag

SEQ ID NO: 148 - DNA, 379 bp, Homo sapiens
  source 1..379: mol_type = other DNA
caggtgcagctggtgcagtctggggctgaggtgaagagacctggggcctcggtgaaggtctcctgcaaggcttctggatatatcttcaccgattattatatgcactgggtgcgacaggcccctggacaagggcttgagtggatgggatggatcaaccctcgcagtggtgccacaaactacgcacagaagtttcaggagtgtatcaccatgaccagggacacggccatcgacacagcctacatggaggtaatgaggctgagatctgacgacacggccctgtattactgtgcgagagacaaccagattgggcggttctatgatagtacgtccggcgcttttgaaatctggggccaagggacaatggtcaccgtatcttcag

SEQ ID NO: 149 - DNA, 370 bp, Homo sapiens
  source 1..370: mol_type = other DNA
gaggtgcaattggtgcagtctgggggaggtttgggacagcggggagggtccctgagactctcctgtgcagcctctggattcactttcagaaactatgtcatgacttgggtccgccaggctccagggaaggggctggagtgggtctcaagcatcagtgcaacagggctaagtacatactacacagactccgtgaagggccgcttcaccgtctccagagacaattccaaggacactgtctacttacaaatgaacagcctgagagacgaagacacggccgtttattactgtgcgaaagacgcgtccgttagaataccaacaactggttcttctgaccactggggccagggaaccctggtcgccgtctcctcag

SEQ ID NO: 150 - DNA, 367 bp, Homo sapiens
  source 1..367: mol_type = other DNA
caggtccagctggagcagtctggggcagaggtgaagaagcctgggtcctcggtgagggtctcctgtaaggcctccgggggcgccttcaacaacaatgctatcagctgggtgcgtcaggcccctggacaagggcttgagtggatgggagggatcaaccctatgtttcgtttagttgactacgcacagaagttccagggccgcctcaccattaccgcggacgcattgccgagcacagcctacatggaactgagcagcctgacatctgaggacacggccgtgtattactgtgcgcgcggtccaaattatcatgatactaccacttacttcgtctcctggggccagggaaccctggtcaccgtctcctcag

SEQ ID NO: 151 - DNA, 375 bp, Homo sapiens
  source 1..375: mol_type = other DNA
caggtgcagctggagcagtctggggctgaggtgaagaagcctgggtcctcggtgaaggtctcttgcaaggcctctggaggcaccttcaacagttttgctatcagctgggtgcgccaggcccctggacaagggcttgagtggatgggagggatcaaccctctctttggtctaccgaagtacgcacagaagttccagggcagagtcacgattaccgcggatagatccacgaccacagccttcttggaactgagcagcctgacatctgaagagacggccgtgtattactgtacggcggctgggagcttctcgccccgttactaccatttctactacatggacgtctggggcaaagggaccacggtcaccgtctcctca

SEQ ID NO: 152 - DNA, 367 bp, Homo sapiens
  source 1..367: mol_type = other DNA
caggtgcagctggtgcagtctggggctgaggtgaagaagcctgggtcctcggtgaaggtctcctgcaagacttctggaggcatcttcaacagctatgctatcagctgggtgcgacaggcccctggacaagggcttgagtggatgggagggatctccgctatctttggggtaccaagctacgcacagaagttccaaggcagagtcaccattaccgcggacaaatccacgaccacagccttcatggagctgagcagcctgacatctgaggacacggccatgtattactgtgcgagaggagatggctacaggcctacaatgacccaaattgcctactggggccagggaaccctggtcaccgtctcctcag

SEQ ID NO: 153 - DNA, 364 bp, Homo sapiens
  source 1..364: mol_type = other DNA
gacgtgcaggtggaggaatttgggggaggcttggtccagccgggggggtccctgaggctctcctgtttagtctctggggtcgacattgatgactataatatgcactgggtccgccaggctccagtgaagggcctggagtgggtggccacttttaagaagactggagaggagattcactatgtggactctgtgaagggccgattcatcatttccagagacagccccaggaactcaatttatctacagatgaacagactgagggccgatgatacggctgtctattactgtgtgagaggtgatgactacagtgagtggcggccctcgactttctggggccagggaaccctggtcaccgtctcctcag

SEQ ID NO: 154 - DNA, 367 bp, Homo sapiens
  source 1..367: mol_type = other DNA
gaggtgcagctggtggagtctgggggaggcttagtccagccgggggggtctctgagactctcctgtgcagcctctggattcatctttagatcctattggatggcctgggtccgccaggctccagggaaggggctggagtgggtggccaatataaaggaagatggaactgaggaatactatgtggactctgtgaagggccgattcaccgtctccagagacaacgccaagaattctctgttcctgcaaatgaacagcctgagagtcgaggacactgccatatattactgtgcgagacatatccacaatgccaacagctggtacttaggggacttctggggccagggaaccctcgtcgccgtctcctcag

SEQ ID NO: 155 - DNA, 361 bp, Homo sapiens
  source 1..361: mol_type = other DNA
caggtccaactggtgcagtctgcggctgaggtgaagatgcctgggtcctcggtgaaggtctcctgcaaggcctctggaggcaccttcagaaccgatgctatcagttgggtgcgacaggcccctggacaagggcttgagtggatgggaggactcaaccctctgtttggtataacatactacgcacaggacttccagggcagactcacgatcaccgcggacgaattcatgagcacgacgtccatggaactgagcagcctgcgatctgacgacacggccatatatttctgtgcgagagcccagggatataataggcctattccccactactggggccagggaaccctggtcgttgtctcctcag

SEQ ID NO: 156 - DNA, 371 bp, Homo sapiens
  source 1..371: mol_type = other DNA
caggttcagctggagcagtctggagctgaggcgaagaagcctggggcctcactgaaggtctcctgcgagggttccggttacatttttagtaattatggtatcacctgggtgcgacaggcccctggacaagggcttgagtggatgggatggattagcgcttataatggaaacacaaattatgcacagaagttccagggcagagtcaccatgaccactgacacatcgacgaacactgcctacatggagctgaggagcctgagatctgacgacacggccgtgtattactgtgcgcgaggggcctcattcgcctatttccatgataatagtccacttgattcatggggccagggaaccctggtcaccgtctcctc

SEQ ID NO: 157 - DNA, 355 bp, Homo sapiens
  source 1..355: mol_type = other DNA
caggagcacctgcaggagtcgggcccaggactggtgaagccttcggaaacgctgtccctcacttgcactgtctctggtggctccatcgcttattcctacttgaactggatccggcagcccccagggaagggactggagtggattggctatatgtattaccgtgggagccccatctacagcccctccctcgagagtcgagtcaccatctcagtagacacgtccatgggccaattccacctgacactgacctctgtgaccgccgcagacacggccgtctattattgtgcgcgatcacttagatacaattttggccctgatgactggggccagggaaccctggtcaccgtctcctcag

SEQ ID NO: 158 - DNA, 364 bp, Homo sapiens
  source 1..364: mol_type = other DNA
caggtccggctggtgcaatctggggccgaggtgaagaagcctgggtcctcggtgaaactctcctgcacggcttctggaggcacctccaacacctatactgtcagctgggtgcgacaggcccctggacaaggacttgagtggatgggaagggtcatccctatcataggtctagcaaacaacgcacagaagttcgagggcagagtctcgattaccggtgacatatcctcgggcacagtttacatggcgttgaacagcctcacatctgaggacacggccgtctattattgtgtgagagatgagggtgcatacagtctgcccaaattaggcgactggggccagggaacgctggtcaccgtctcctcag

SEQ ID NO: 159 - DNA, 379 bp, Homo sapiens
  source 1..379: mol_type = other DNA
caggtgcagctggtggagtctgggggaggcgtggtccagccgggggggtccctgagagtctcctgtgcagcgtctggatacaccttcagtagctatggcatgcactgggtccgccaggctccaggcaaggggctggagtgggtggcatttatacggtatgatggaagtaataaatactatggagattccgtgaagggccgattcaccatctccagagacaattccaagaacacgctgtttctgcaaatgaacaacctgagagctgaggacacggctgtgtattactgtgcgaaagatcaccatattagtgtgggtcggggagttacacacttcccttttgactactggggccagggaaccctggtcaccgtctcctcag

SEQ ID NO: 160 - DNA, 361 bp, Homo sapiens
  source 1..361: mol_type = other DNA
caggtccagctggtgcagtctggggctgaggtgaagaagcctgggtcctcggtgaaagtctcctgcaaggcttctggaggcaccttcagaagcaatgccattagctgggtgcgacaggcccctggacaagggcttgaatggatgggagggctcaaccctctctttggtattgcaaactatgcccagaagttccagggcagaatcgcgatcaccgcggacgaattcatgagcacagcctacatggagctgagcagtctgagatctgaggacacggccatgtattattgtacgagagcccagggatacaatagacctattccccactactggggccagggaaccctggtcaccgtctcctcag

SEQ ID NO: 161 - DNA, 358 bp, Homo sapiens
  source 1..358: mol_type = other DNA
caggtgcagctggtgcagtctggggctgagcttaagaagcctggggcctcagtgaaggtttcctgcaaggcatctggatacgcgttcaccgactactatttgcactgggtgcgacaggcccctggacagcggcttgaatggatgggagtgatcaaccctagtggtggtgccacagactacgcacagaagttccggggcagagtcaccgtgatcgctgacacgtccacgaggacaatttacatggagttgagcagcctgagacccgaggacacggccgtgtattattgtagcagagaggaggtagagggagccactcttgacaattggggccagggaaccctggtcaccgtctcctcag

SEQ ID NO: 162 - DNA, 370 bp, Homo sapiens
  source 1..370: mol_type = other DNA
caggtgcagctggtgcagtctggggctgaggtgaagaagcctggggcctcagtgaaggtctcctgcaaggcttctggatacaccttcaccagttatgatatcaactgggtgcgacaggccactggacaagggcttgagtggatgggatggatgaaccctaacagtggtaacacaggctatgcacagaagttccagggcagagtcaccatgaccaggaacacctccataagcacagcctacatggagctgagcagcctgagatctgaggacacggccgtgtattactgtgcgagaggcccaaggagagggtatggttcggggagttattatggctactggggccagggaaccctggtcaccgtctcctcag

SEQ ID NO: 163 - DNA, 376 bp, Homo sapiens
  source 1..376: mol_type = other DNA
caggtgcaactagtggagtctgggggaggcttggtcaagcctggagggtccctgagactctcctgtgcagcctctggattcagcctcagtgactactccatgtactggatccgccagactccagggcagggactggagtggatttcatatattagtaccagtggacttagcatctactacgcagccgctgtgaagggccgattcaccatctccagggacaacgccaagaacttactgtatctgcacatgagcggcctgagagccgacgacacggccatatattactgtgcgagagatcggattcggggaaataatcctcctcattcaggaactctgcattactggggccagggaacccgggtcatcgtctcctcag

SEQ ID NO: 164 - DNA, 361 bp, Homo sapiens
  source 1..361: mol_type = other DNA
cagctgcagctgcaggagtcgggcccaggactggtgaagccttcggagaccctgtccctcacctgcactgtctctggtggctccatcagcagcagtagttactactggggctggatccgccagcccccagggaaggggctggagtggattgggaatatcttttatactgggagcgcctactacaacccgtccctcaagagtcgagtcaccatatccgtagacacgcccaagaaccaattctccctgcagctgaactctgtgaccgccgcagacacggctgtctattactgtgcgagcctagtggcttttccccaaatcccggactactggggccagggaaccctggtcaccgtctcctcag

SEQ ID NO: 165 - DNA, 364 bp, Homo sapiens
  source 1..364: mol_type = other DNA
caggtccagctggtgcagtctggggctgagatgaagaagcctgggtcctcggtgaaggtctcctgcaaggcctctggaggccccttcagcagctatggcatcagctgggtgcgacaggcccctggacaagggcttgagtgggtgggaggaatcatcggcatgtttggtatagcgaagtatgcacagaagttcgagggcagagtcacgatcaccgcggacgaacccacgagtacaggctacatggagctgagcagtctgagatcagacgacacggccatatattattgtgcgagaagcagtggatattacttgaggggggggctcgacccctggggccagggaaccccggtcatcgtctcctcag

SEQ ID NO: 166 - DNA, 385 bp, Homo sapiens
  source 1..385: mol_type = other DNA
cagctgcagctgcaggagtcgggcccaggactggtgaagccttcggagaccctgtccctcacctgcactgtctctggtggctccatcagcagtagtagttactactggggctggatccgccagcccccagggaaggggctggagtggattgggagtatctattatagtgggagcacctactacaacccgtccctcaagagtcgagtcaccatatccgtagacacgtccaagaaccagttctccctgaagctgagctctgtgaccgccgcagacacggctgtgtattactgtgcgagacatcggggctctattactatggttcggggagttgacctcggctactttgactactggggccagggaaccctggtcaccgtctcctcag

SEQ ID NO: 167 - DNA, 373 bp, Homo sapiens
  source 1..373: mol_type = other DNA
caggttcagctggggcagtctggagttgaggcgaagaagcctggggcctcagtgaaggtctcctgcgagggttctggatacatttttagtcactacgctatcacgtgggtgcgacaggcccctggacaaggccttgagtggatgggatggattagcgcttataatggaaacagaaactatgcacagaagttccagggcagactcactttgaccacagacacatccgcgaacactgcctacatggagctgaggaccctgagatctgacgacacggccgtctattactgtgcgagaggagcctcattcgcatatttccaagataatagtccacttgattcttggggccagggaaccctggtcaccgtctcatcag

SEQ ID NO: 168 - DNA, 355 bp, Homo sapiens
  source 1..355: mol_type = other DNA
caggtgcagctggtgcagtctggggctgaggtgaagaagcctggggcctcagtgaaggtctcctgcaaggcttttggaaacaccttcaccagttatgaaatcaattgggtccgacaggccactggacaagggcttgagtggatgggatggatgaacccaaacagtggtaacacaggctatgcagagaagttccagggcagaatcagcatgaccaggaacacctccataagcacggcctacatggaactgagcaacctgagatctgaggacacggccacgtattactgtgcgagacaatacgatttttggagtggttacctctggggccagggcaccctggtcaccgtctcctcag

SEQ ID NO: 169 - DNA, 358 bp, Homo sapiens
  source 1..358: mol_type = other DNA
caactgatgcagtctggggctgaggtgaagaagcctgggtcctcggtgaaggtctcctgcaaggcttctggaggcacgttcaacagctatgctatcacctgggtgcgacaggcccccggacagggacctgagtggatgggggggatcaatcctatgtttggaataacagactacgcacagcagttccagggcagactcacgattaccgcggacaaaatcccgaccatagtctacatggagctgagcagcctgagatctgaggacacggccgtgtattattgtgggggttcggggagttatcacctagcgtcccccttgtcttcttggggccaggggaccctggtcaccgtctcctcag

SEQ ID NO: 170 - DNA, 370 bp, Homo sapiens
  source 1..370: mol_type = other DNA
gaggtgcagctggtggagtctgggggaaacttggtacgtcctggggggtccctgagactctcctgtgcaggctctggattcacctttagcaagtatggcatgagctgggtccgccaggctccagggaaggggctggagtgggtctcaagtattacttttactggtggtagcacatactacgcagactccgtgaagggccggttcaccatctccagagaccagtccaagaacactctgtttctgcaaatgaacagcctgagagccgaggacacggccgtatattactgtgcgaaagatcgggcccttactatacccgattccgggacttttgacacctggggccagggaaccctggtcaccgtctcctcag

SEQ ID NO: 171 - DNA, 367 bp, Homo sapiens
  source 1..367: mol_type = other DNA
caggtggaactggtacagtcaggggctgaggtgaagaagcctgggtcctcggtgaaggtctcctgcaaggtctctggaagcatcttcaataaatatggaatcagttgggtacgacaggcccctggacaagggcttgagtggatgggagggatcaccgctatctttaatgtcccaagttacgcacagaggttccagggcagggtcacaattaccgcggacaagtcaacgaccacagtttacatgcagctgagcagcctgagatctgaggacacggccgtctattactgtgcgcgaggagatggctacaaacctacaatgaccccaattgcctactggggccagggaacccttgtcaccgtctcctcag

SEQ ID NO: 172 - DNA, 346 bp, Homo sapiens
  source 1..346: mol_type = other DNA
gaggtgcagatggtggagtctgggggaggcctggtccaacctggggggtccctgagactctcctgtacagcctctggattcatgttcagtagatattggatgacctgggtccgccaggctccagggaaggggctggagtgggtggccaacataaaggaagatggaagtgacgaatattatgcggactctgtgaagggccgattcgccgtctccagagacaacgccaagaattcactgtatctgcaaatgaacagcctgagagccgaagacacggccgtgtatttttgtgcgactttctaccccgatgactaccggggccagggaaccctggtcaccgtctcctcag

SEQ ID NO: 173 - DNA, 364 bp, Homo sapiens
  source 1..364: mol_type = other DNA
caggtccagctggtgcaatctggggctgaggtgaagaagcctgggtcctcggtgaaggtctcctgcaaggcttctggaggccccttcagcagttatgctgtcaactgggtgcgacaggcccctggacaagggcttgagtgggtgggaggaatcatcggtatgtttggtacaacaacctacgcacagaaattccagggcagagtcaccattaccgcggacgagttgacgagcacagcatacatggagctgagcagcctgagatctgaggacacggccgtctattactgtgcgagagattcgggatacacctatggtgggaggctcgacccctggggccagggaacactggtcaccgtctccccag

SEQ ID NO: 174 - DNA, 364 bp, Homo sapiens
  source 1..364: mol_type = other DNA
caggtccagctggagcagtctggggctgaggtgaagaggcctgggtcctcggtgaaggtctcctgtaaggcttctggagcctccttcaacagcaatgctatcagctgggtgcgtcaggcccctggacacgggcttgagtggatgggaggcatcaaccctatgtttcgaataacaaactacgcacagaggttccagggcagaatcacgatttccgcggacgaattgccgagcacagcctacctggacctgagcagcctgagttctgacgacacggccatttattactgtgcgagagagacgggatacaactttggttctccttttgaggtctggggccagggaaccctggtcatcgtctcctcag

SEQ ID NO: 175 - DNA, 367 bp, Homo sapiens
  source 1..367: mol_type = other DNA
caggtccaactgctgcagtctggggccgaggtgaagaggcctgggtcctcggtgaaggtctcctgcaaggtgtctggcggcctctttaggaacaatgctatcagctgggtgcgacgggcccctggacaaggccttgagtgggtgggagggatcatcgcactttttggtgtatcaaattacgcacagaagttccagggcagagtcacagttagcgcggacgagtctacgaacacagtctacatggaattgaaaagtctgagatctgaggacacggccgtctattactgtgcgaagggaagtggatatcacttcagcacgggggctttggaccagtggggccagggaaccctggtcaccgtctcttcag

SEQ ID NO: 176 - DNA, 372 bp, Homo sapiens
  source 1..372: mol_type = other DNA
caggtccagctggtgcagtctggggctgaggtgaagaagcctgggtcctcggtgaaggtctcctgcaaggcttctggaggcattttcagcagttatgctatcagctgggtgcgacaggcccctggacaagggcttgagtggatgggggggatcatctctatctttggtgtagcaaggtacgcacagaaattccagggcagagtcaccattaccgcggacgaatccacgagcacagcctacatggagctgagcagcctgagatctgacgacacggccgtttattactgtgcgattaaagccactcgtcctggttccggctactactattacatggaggtctggggcaaagggaccacggtcgccgtctcctca

SEQ ID NO: 177 - DNA, 372 bp, Homo sapiens
  source 1..372: mol_type = other DNA
caggtgaagctgctggagtcgggcccacgactagtgaagccttcggagaccctgtccctctcctgcactgtctctgatgactccatcactagttactactggacctggatccggcagaccccagggaagggactggagtggatcgggttcatccacatcagtgggaacaccaactataacccctcactcaagggtcgactcaccatgacaattgacgccaccaaggaccagttctccctgaagttgacctctgtgaccgccgcagacacggccgtctattactgtgcgagacatacatttagtaggtcgcgccgacacttctactactacatggacgtctggggcatagggaccacggtcaccgtctcctca

SEQ ID NO: 178 - DNA, 384 bp, Homo sapiens
  source 1..384: mol_type = other DNA
gaggtgcacctagtggagtctggaggaggcttggtccagcctggggggtccctgagactctcctgtgcagcctctgggttcaccgtcagtagcaactacatgagctgggtccgccaggctccagggaaggggctggagtgggtctcagttatttatagtggtagtcgcacattctacgcagcctccgtgaagggccgattcaccatctccagacacgattccaagaacacgttgtatcttcagatgaacagcctgagagttgaggacacggccgtgtattactgtgtgagaacaagcagtcacgcgaatagcagcagctgggaggcatactactcctacgttatggacgtctggggccaagggaccacggtcaccgtctcctca

SEQ ID NO: 179 - DNA, 367 bp, Homo sapiens
  source 1..367: mol_type = other DNA
caggtgcagctggtgcagtctggggctgaggtgaagaagcctgggtcctcggtgaaggtctcctgcaaggcttctggaggccccttcagcggcaatgctatcagctgggtgcgacaggcccctggacaaggacttgagtggatgggaggtatcaaccctatctttaatatagcagactacgcacagaagttccagggcagactcacgattaccgcggacgcatccacgagcacagcctccatggaactgcgcagcctgacatctggagacacggccatatatttctgtgcgcgaggaaatgcctacaaacctacactgagtcacattgactactggggccagggaacccgggtcaccgtctcctcag

SEQ ID NO: 180 - DNA, 382 bp, Homo sapiens
  source 1..382: mol_type = other DNA
caggtccagctgcagcagtcaggtccaggactggtgaagccctcgcagaccctctctctcacctgtgccatctccggggacagtgtctctagcaacagtgctgcttggatctggatcaggcagtccccatcgagaggccttgagtggctgggaaggacatactacaggtccaagtggtatactgattatgcagtatctgtgaaaagtcgaataaccatcaacccagacacatccaagaaccagttctccctgcacctgtactctgtgactcccgaggacacggctgtgtattactgtgcaagagcgggtattacgatttttggaataattattggcgctcttgatatctggggccaagggacagtggtcaccgtctcttcag

SEQ ID NO: 181 - DNA, 361 bp, Homo sapiens
  source 1..361: mol_type = other DNA
caagtccagctggtgcagtctggggctgaggtgaagaagcctgggtcctcggtgaaggtctcctgcagggcttctggaggcaccttcaacagcaatgctatcagttgggtgcgacaggcccctggacaagggcttgagtggatgggaggcctcaatcctctgtttaagatagcacactacgcacagaaattccagggcagaatcacaatcaccgcggacgaattcatgagtactgcctacatggagttgagcagcctcagatctgacgacacggccatttatttttgtgcgagagcccagggatatcatagacctatacctcactactggggccagggaaccctggtcaccgtctcctcag

SEQ ID NO: 182 - DNA, 346 bp, Homo sapiens
  source 1..346: mol_type = other DNA
gaggtgcagttggtggagtctgggggaggcttggtccagcctggggggtccctgagactctcctgtgcagcctctggattcagcgtcagtaataattacatgagttgggtccgccaggctccagggaagggactggagtggatctcagttacttataccggtggtagcgcagactacgcggactccgtgaagggcagattcaccatctctagagacaattccaagaacacggtgtatcttcagatgaatagcctgagagtcgaggacacggctgtgtattactgtgcgagagagggaacttactttgactattggggccagggaaccctggtcaccgtctcctcag

SEQ ID NO: 183 - DNA, 367 bp, Homo sapiens
  source 1..367: mol_type = other DNA
caggtgcagctggtgcagtctggggctgaggtgaagaagcctgggtcctcggtgaaggtctcctgcaagacttctggaggcatcttcaacagctatgctatcagctgggtgcgacaggcccctggacaagggcttgagtggatgggagggatcaccgctatctttggggtaccaaactacgcacagaagttccaaggcagagtcacgattaccgcggacaaatccacgaccacagcctacatggagctgagcagcctgagatctgaggacacggccatgtattactgtgcgagaggagatggctacaagcctacaatgacccaaattgcctactggggccagggaaccctggtcaccgtctcctcag

SEQ ID NO: 184 - DNA, 361 bp, Homo sapiens
  source 1..361: mol_type = other DNA
gaggtgcagttggtggagtccgggggaggcttagttcagcctggggggtccctgagactctcctgtgaagcttctggattcaccttcagtgcctactggatgcactgggtccgccaagcgccagggcaggggctgatgtggctctcacgtattgataatggtgggagttacacaacctatgcggactccgtgaagggccgattcaccatttccagagacaacgccagaaatacactgtatctccaaatgaacagtctgggagtcgacgacacggccgtttattactgtctgagagcctacagtgccaattacggtcgcttcgacccctggggccagggaaccctggtcaccgtctcctcag

SEQ ID NO: 185 - DNA, 352 bp, Homo sapiens
  source 1..352: mol_type = other DNA
gaggtgcacctggtggagtctgggggagacttggtacagccgggggggtccctgagactctcctgtgcagcctcaggactcaccattagaaactatgccatgagctgggtccggcaggctccagggaaggggctggagtgggtctcagctattagtggtggctttgatagaacattctacgcagactccgtgaagggccggttcaccatctccagagacagttccaagaacacgctgtatctgcaaatgatcagcctgagagccgaggacacggccctatattactgcctcatgagggggaacaacaactgcccctactggggccagggaaccctggtcaccgtctcctcag

SEQ ID NO: 186 - DNA, 363 bp, Homo sapiens
  source 1..363: mol_type = other DNA
caggtgcaggtggtggagtctgggggaggcgtggtccagcctgggaggtccctgagactctcctgtgcagcctctggattcatcctcagtgattctgccatacactgggtccgccaggctccaggcaaggggctggagtgggtggcacttatatcatatgatgaaaaggataaattttatgcagactccgtgcagggccgattcattatctccagagacatttccaagaacacggtgtatctgcaaatggagagcctgagaactgaggacacggctgtatattactgtgcgaaagggtctcggggagcggagagttactttgaattttttaaatattggggccagggaaccctggttaccgtc

SEQ ID NO: 187 - DNA, 367 bp, Homo sapiens
  source 1..367: mol_type = other DNA
caggtgcagctggtgcagtctggggctgaggtgaagaggcctggggcctcagtgaaggtctcctgccagacttctggatacaccttcaccgactactttttacactgggtgcgacaggcccctggacaagggcttgagtggatgggatggatcaaccctaataatggtggcacaaactttgtgcagaagtttcagggcagtgtcactttgaccagggacacgtccatcagcacagcctacatggagctgaccaggctgagatctgacgacacggccctgtacttctgtgcgagggggtcccgtatcactggagcgaacgttgcttctgatatctggggccaagggacaatgctcatcgtctcttcag

SEQ ID NO: 188 - DNA, 363 bp, Homo sapiens
  source 1..363: mol_type = other DNA
caggtccagctggagcagtctggggctgaggtgaagaagcctgggtcctcggtgaaggtctcgtgcaaggcttctggaggcagcatcttcaggaattacgctatcagttgggtgcgacaggcccctggacaagggcttgagtggatgggagggatcctcgctgtctttggtgttccaacctacgcacagaaattccagggcagagtcacgattaccgcggacgattccacgagcacagcctacatggagctgagcaacctgagatctgaggacacggccgtttattactgtgcgaggggcccgcactattactccgactacctagacgtctggggccaggggaccacggtcaccgtctcatca

SEQ ID NO: 189 - DNA, 365 bp, Homo sapiens
  source 1..365: mol_type = other DNA
caggtccagttggaacagtctggggctgaactgaagaagcctgggtcctcggtgagggtctcctgtacggcctctggaggcaagttcaacaacaatgctgtcagttggctgcgacaggcccctggacaaggacttgagtggatgggggggatcaatcctatgtttcgcatagtcaactacgcacagaaattccagggccgcctcacaattaccgcggacgcactgccgagcacagcctatatggagctgaacagcctgacatctgacgacacggccgtatattattgtgcgcgcggtccaaattatcatgatactactacttactacgacccctggggcccgggaactgtggtcatcgtctcctc

SEQ ID NO: 190 - DNA, 373 bp, Homo sapiens
  source 1..373: mol_type = other DNA
gaggtgcagctggtggagtctgggggaggcttggtccagcctggagggtccctaagactctcctgtacaacctctggattcaactttagtagatattggatgatctgggtccgccaggctccagggaaggggctggagtgggtggccaatataaaggaagatggaagtcagaaacactatgtggactctgtgaagggccgattcaccatttccagagacaacgccaagaactcattgtctctgcaaatgaatagtgttggagcagaggacgcggccgtgtattactgtgcgagactttattactatgagaaaagagattgttacagacactttgacaactggggccagggaaccctggtcaccgtctcctcag

SEQ ID NO: 191 - DNA, 364 bp, Homo sapiens
  source 1..364: mol_type = other DNA
caggtccagctggtgcagtctgggcctgaggtgaagaagcctgggtcctcggtgaaggtctcctgcaaggcttctggaggccccttcagtagctatggtgtcagctgggtgcgacaggcccctggacaagggcttgagtggatgggaggcatcatcggtatgtttggaatagcaaagtatgcacagaagtttcagggcagagtcacgatcaccgcggacgaacccgcgagttcaggctacatggaactgaacagcctgagacctgaggacacggccgtatattactgtgcgagaagtagtggatacatgttgaaggggtggctcgacccctggggccagggaaccctggtcaccgtctcctcag

SEQ ID NO: 192 - DNA, 352 bp, Homo sapiens
  source 1..352: mol_type = other DNA
gaggtgcagctggtgcagtctggagcagaggtgaagaagcccggggagtctctgaagatctcctgtaaggcttctggatacagctttggcagttcctggatcacctgggtgcgccagatgcccgggaaaggcctggagtggatggggatcatctatcctggtgactctgataccagatatagcccgtccttccaaggccaggtcaccttctcagccgacaagtccatcagcaccgcctacttgcagtggagcagcctgaaggcctcggacaccgccatatattactgtgcgagacgaaaggatgcctacaatgactactggggccagggaaccctggtcaccgtctcctcag

SEQ ID NO: 193 - DNA, 370 bp, Homo sapiens
  source 1..370: mol_type = other DNA
caggtgcagctggtggagtctgggggaggcgtggtccagccgggggactccctgagactctcctgtgcagcgtctggattcaccttcaaaaactttggcatgcactgggtccgccaggctccaggcaaggggctggagtgggtggcttttatacgatatgatggacttgatagagactttgcagactccgtgaagggccgattcaccatctccagagacaattccaagaacacactgaatctgcaaatgaacagcctgagagctgaggacacggctgtctatttctgtgtgaaaggcggatttactataattcgcggcgggggcttctttgaatactggggccagggaaccctggtcaccgtctcctcag

SEQ ID NO: 194 - DNA, 346 bp, Homo sapiens
  source 1..346: mol_type = other DNA
gaggtgcaggtggtggcgtctgggggaggcttggtccagcccggggggtccctgagactctcctgtgccgcctctggattcaccttcagtgatacttggatgagttgggtccgccaggctccagggaaggggctggactgggtggccaacataaaccccgatggaagtgaggaatactatgcggactctgtgaagggccgattcatcatctccagagacaacgccaggaactctctgtctctgcaaatgaacagcctgagagccgacgacacggccgtctattactgtgcgagattcgctaatctgggtaactggggccagggaatcctggtcaccgtctcctcag

SEQ ID NO: 195 - DNA, 376 bp, Homo sapiens
  source 1..376: mol_type = other DNA
gaggtgcagctggtggagtctgggggaggcttggtacagcctggggggtccctgagactctcctgtgcagcctctggattcacctttagcagctatgccatgaactgggtccgccaggctccagggaaggggctggagtgggtctcaactattagtggtagtggtggtagcacatcctacgcagactccgtgaagggccggttcaccatctccagagacaattccaagaacacgctgtatctgcaaatgaacagcctgagagccgaggacacggccgtatattactgtgcgaaagacgggagtaaccaatattactatgatagtagtggttattactcgggctggggccagggaaccctggtcaccgtctcctcag

SEQ ID NO: 196 - DNA, 379 bp, Homo sapiens
  source 1..379: mol_type = other DNA
caggtgcaactgcaggagtcgggcccaggactggtgaagccttcggagaccctgtccctcacctgcactgtctctggtgactccatcggtaattactactggaattggatccggcagcccccagggaagggactggagtggattgcatatatctattccagtgggcgcaccaactacaacccctccctcaagagtcgactcaccatatcaataaacacgtccaagagccagttctccctggagctgaagtctgtgaccgctgcggacacggccgtgtattattgtgcgagagaatatgcctatggttcggggagtctttataatagggctgatgcttttgatgtctggggccaagggacaagggtcaccgtctcttcag

SEQ ID NO: 197 - DNA, 367 bp, Homo sapiens
  source 1..367: mol_type = other DNA
caggtccagctggaacagtctggggctgaggtgaagaagcctgggtcctcggtgaaggtctcctgtaaggcttctggaggcaaattcaacagttatgcaatcagctgggtgcgacaggcccctggacaagggcttgaatggatgggagggattaatccaatgtttggtatagttgactacgcacagaaattccagggcagaatcacgataaccgcggacgcactcccgagtacagcttacatggagttgaggagcctgacatctgacgacacggccgtttattattgtgcgagaggtccaaattaccatgatactactacttatctcgacccctggggccagggaaccctggtcaccgtctcctcag

SEQ ID NO: 198 - DNA, 364 bp, Homo sapiens
  source 1..364: mol_type = other DNA
caggtgcagctggtgcagtctggggctgaggtgaagaagcctgggtcctcggtgaaggtctcctgcaaggcttctggaggcaccttcaacaactatgctatcagttgggtgcgacaggcccctggacaagggcttgagtggatgggagggatcatccctatgtttgatatagcaaactacgcacagaagtttcagggcagagtcacgatttccgcggacaaaatcccgagcacagcctacatggagctgagcagcctgagatctgaggacacggccgtgtattattgtggtggttcggggagttatcacctggcgtcccccttgtcttcttggggccagggaacccttgtcaccgtctcctcag

SEQ ID NO: 199 - DNA, 364 bp, Homo sapiens
  source 1..364: mol_type = other DNA
caggtccagctggagcagtctggggctgaagtgaggaagcctgggtcctcggtgaaggtctcctgtaaggcttctggaggccccttcagcagctatgctatcagctgggtgcgacaggcccctggacaagggcttgagtggatgggagggatcatccctatgtttcgtataacaaactacgcacagaagtttcagggcagactcacgattaccgcggacgacttgccgagcacagcctacatggaactgagcagcctgagatctgaggacacggccgtttattattgcgcgagagagacggggtaccactttggttccccttttgacttgtggggccagggatccctggtctccgtctcctcag

SEQ ID NO: 200 - DNA, 376 bp, Homo sapiens
  source 1..376: mol_type = other DNA
caggtgcaactggtggaatctgggggaggcttggtcaggcctggccggtccctgagaatatcctgctcagcctctggattcagcttcagtgactactccatgtactgggtccgccaggctccagggaaggggctggagtggctttcatacattagtaatagtggaattagtatatattacgcagccgctgtgaagggccgattcaccatctccagggacaatgccaagacgtctctgtatctgcaaatgaacagcctgagagacgaggacacggccacttattactgtgtgagagatcgggttcggggaaataatcctcctcatttaggaagcctggattcgtggggccagggaacccgggtcaccgtcacctcag

SEQ ID NO: 201 - DNA, 367 bp, Homo sapiens
  source 1..367: mol_type = other DNA
caggtgcagctggtgcagtctggggctgaggtgaagaagcctgggtcctcggtgaaggtctcctgcaaggcttctggaggccccttcagcagcaatgctatcagctgggtgcgacaggcccctggacaagggcttgagtggatgggagggatcaaccctatttttggtatagcaaactatgcacagaggttccagggcagactcacgatttccgcggacaaatccacgaacacagcctacatggagctgagcggcctgagatctgaggacacggccatatatttctgtgcgagaggaaatgcctacaaacctacactgagtcatattgactactggggccagggaaccctggtcaccgtctcctcag

SEQ ID NO: 202 - DNA, 364 bp, Homo sapiens
  source 1..364: mol_type = other DNA
gaggtgcagctggtgcagtctggaacagacgtgaaaaagcccggggagtctctgaagatctcctgtaagggttctggatacagctttagcagttactggatcggctgggtgcgccagaggcccgggaaaggcctggagttgatggggatcatctatcccggtgactctgataccagatacagcccgtccttccaaggccaggtcaccatctcagtcgacaagtccgtcaacacggcctacctacagtggagcagcctgaaggcctcggacagcgccatgtattactgtgcgagacggggcggggaggcagtggctggaggatggctctactggggccagggaaccctggtcaccgtctcctcag

SEQ ID NO: 203 - DNA, 354 bp, Homo sapiens
  source 1..354: mol_type = other DNA
gaggtgcaactggtgcagtctggagtagaggtgaaaaagccgggggagtctctgaggatctcctgtcagggttctggatacacctttagcagctactggatcgcctgggtgcgccagacgcccgggaaaggcttggagtggatggggaatatatatcctggtgactctgatactaaatatagtcagtccttccaaggtcaggtcaccttctcagtcgacaagtccatcaacaccgcctacctgcagtggagcagcctgaaggcctcggacaccgccatatattattgtgcgcgacgacatacggactacaacatggacgtctggggcagagggaccccggtcaccgtctcctca

SEQ ID NO: 204 - DNA, 367 bp, Homo sapiens
  source 1..367: mol_type = other DNA
caggtccatctggaacagtctgggcctgaggtgaagaagcctgggtcctcggtgaaggtctcctgtaaggcctctggaggcactttcagcagctatgcaatcatctgggtgcgacaggcccctggacaagggcttgagtggatgggagggatcaaccctatgtttcgtatagtaaactatgcacagaagttccagggcagagtcacgattaccgcggacgaattcccgagcgcagcctacatggagctgagcagcctgagacctgaggacacggccgtctattactgtgcgcgaggtccaaattaccatgatacgaattcttatttggacccctggggccagggaaccctggtcaccgtctcctcag

SEQ ID NO: 205 - DNA, 373 bp, Homo sapiens
  source 1..373: mol_type = other DNA
cagctgcagctgcaggagtcgggcccaggactggtgaagacttcggagaccctgtccctcacctgtactgtctctggtggctccgtcagcagtagtgcctattactggggctggatccgccagcccccagggaagggcctggagtgggttgggagtatcaattataatggtaatgcctactacaacccgtccctcaagagtcgagtcaccttgtccgtagacacgtcccagaaccagttctccctgaggctgagctctgtggccgccgcagacacggctgtatatttctgtgcgagacataaccgggccggtggctactattgggacttctttcatccctggggccagggaaccctggtcaccgcctcctcag

SEQ ID NO: 206 - DNA, 364 bp, Homo sapiens
  source 1..364: mol_type = other DNA
caggtccagctggtgcagtctggggctgaggtgaagaagcctgggtcctcggtgaaggtctcctgtaagacatctggaggccccttcagcagctatgctatcagctgggtgcgacaggcccctggacaagggcttgagtggatgggagggatcgtccctatgtttcgtataacaaactacgcacagaagtttcagggcagaatcacgattaccgcggacgaattgccgagcacggcctacatggagctgagcagcctgagatctgaagacacggccgtttattattgtgcgagagagacggggtacagctttggttccccttttgacctctggggccagggaaccctggtcaccgtctcctcag

SEQ ID NO: 207 - DNA, 346 bp, Homo sapiens
  source 1..346: mol_type = other DNA
gagatgcggctggtggagtctgggggaggcttcgtccaacctggggagtccctgagactctcctgtgcagcctctggattcacctttagtaaatattggatgacttgggtccgccgggctccagggaaggggctggagtgggtggccaatataagggaagatggaagcgaaaagtactatctggactctgtgaagggccgattcgccgtctccagagacaacgccgagaactcactgtatctgcaaatcaacggcctgagagccgacgacacggccgtgtattattgtgcgagtttgtaccccgatgattactggggccagggaaccctggtcaccgtctcctcag

SEQ ID NO: 208 - DNA, 379 bp, Homo sapiens
  source 1..379: mol_type = other DNA
caggtgcagctgcaggagtcgggcccaggactggtgaagccttcggagaccctgtccctcacctgcactgtctctggtgactccatcagtagttactactggaattggatccggcagcccccagggaagggactggagtggattggatacatctattccagtgggcgcaccaactacaacccttccctcaagagtcgactcaccatatcaatagacacgtccaagagccagttctccctggagctcacctctgtgaccgctgcagacacggccgtctattattgtgcgagagaatatgcctatggttcggggagtctctataatagggctgatgcttttgatatctggggccaagggacaatggtcaccgtctcttcag

SEQ ID NO: 209 - DNA, 367 bp, Homo sapiens
  source 1..367: mol_type = other DNA
gaggtcttcctggtggagtcggggggaaacttggtccagccgggggggtctttgagactctcctgtgcagcctctggattcgcctttagtcatcattggatgacttgggtccgccaggctccaagaaagggcctggagtgggtggccaacataaaaggagatggaagtgagacacaatatgtggactctgtgaagggccttttcaccatctccagagacaacgccaagaatacattgtatctgcaaatgaccggcctgagagtcgaggacacggccgtctattattgtgcgagaaatcttcacaataatgatgcctggtttttaggggactactggggccagggagccctggtcaccgtctcctcag

SEQ ID NO: 210 - DNA, 371 bp, Homo sapiens
  source 1..371: mol_type = other DNA
caggtgcagatggtggagtctgggggaggcgtggtccagcccggggggtccctgagactctcctgtgcagcgtctggactcagattcagcagttatggcgtgcactgggtccgccaggctccaggcaaggggctggagtgggtgacatttatacggtttgatggaagtcagaaatcttttgcagactccgtgaagggccgattcaccatctccagagacaattccaagaacacactgtatctgcaaatggacagcctgagagctgaggacacggctgtgtattactgtgcgaacgattactacgatagtaatggttattaccgcactcattttgactactggggccagggaaccctggtcaccgtctcctc

SEQ ID NO: 211 - DNA, 367 bp, Homo sapiens
  source 1..367: mol_type = other DNA
caggtccagctggaacagtctggggctgaggtgaagaagcctgggtcctcggtgagggtctcctgcaaggttgctggcggcaagttcgatgcctatgctatcagctggctgcgacaggcccctggacaagggcttgagtggatgggagggatcaatcctatgtttggtatagttaactacgcaccgaagttccagggcagactcacgattaccgcggacaaattcccgagcacagcctacatgcagctgagcagcctcagatctgacgacacggccgtgtattactgtgcgagaggtccaaattatcatgatactaacacttatttcgacccctggggccaggggaccttggtcaccgtctcctcag

SEQ ID NO: 212 - DNA, 346 bp, Homo sapiens
  source 1..346: mol_type = other DNA
gaggtgcagctggtggagtctgggggaggcttggtccaacctggggggtccctgagactctcctgtgtagcctctggattaagttttagtaaaacatacatgagttgggtccgccaggctccaggttgggggctggagtgggtggccaacataaaagaagatggaagtgaggaatattatgtggactctgtgaagggccgattccgcgtctccagagacaacgccaagaactcactgtatctccaaatgaacagcctgagagccgaagacacggccgtgtattactgtgggagtttctaccccggtgactatcggggccagggaactctagtcaccgtctcctcag

SEQ ID NO: 213 - DNA, 361 bp, Homo sapiens
  source 1..361: mol_type = other DNA
caggtgcaactggtggagtctgggggaggcgtggtccagcctggggggtccctgagactctcctgttcagcgtctggattcaccttcagtcgccatggcatacactgggtccgccaggctccaggcaaggggctggagtgggtggcatttataagtcatcatgaaagtgatatatactatgcagcctccgtgaagggccgattcaccgtctccggagaccgttccaaagtggtggacctgcaaatgaacggcctgagaattgaggacacggctatgtattactgtgcggaggctttcgatgacgggaagtaccacggccctgacttctggggccagggaaccctggtcatcgtctcctcag

SEQ ID NO: 214 - DNA, 367 bp, Homo sapiens
  source 1..367: mol_type = other DNA
caggtccagctggaacagtctggggctgaggtgaagaagcctgggtcctcggtgaaggtctcctgtaaggcttctggaggcaccttcaacgcctattctatcgcctgggtgcgacaggcccctggacaagggcttgagtgggtgggggggatcaacccgatgtttcgtttagtgaactacgcccagaaattccagggccgagtcacacttaccgcggacacattcccgagcacagcctacatggagctgaccaacctgagatctgacgatacggccgtttattattgtgcgaggggtccaaattatcatgacactactggttacttcgacccctggggccagggaaccctggtcatcgtctcctcag

SEQ ID NO: 215 - DNA, 391 bp, Homo sapiens
  source 1..391: mol_type = other DNA
gaggtgcaactggtggagtctgggggaggtgtggtccggccgggggggtccctgagactgtcctgtgcagtctctggattttcctttggtgatcacgccatgaactgggtccgccaaagtccagggaaggggctggagtgggtcgctaatattaattacaacggtggtagtacaagttacgcagactctgtgaagggccgattcaccatctccagagacaacgccaagaactccctacatctgcatatgaacagagtgagagtcgaggatacggccttctattactgtgtgaggggtgaacggcgactgatgtttgccgattttctgggtgaatatcccaaagatggttttgatgtctggggccaggggacagtggtcaccgtctcttcag

SEQ ID NO: 216 - DNA, 354 bp, Homo sapiens
  source 1..354: mol_type = other DNA
gaggtgcagctggtgcagtctggagcagaggtgaaaaagccgggggagtctctgaagatctcctgcaagggttctggttacagctttaccgcctactggatcgcctgggtgcgccagatgcccgggaaaggcctggagtggatggggaacatctatcctggtgactctgataccaaatacagcccatccttccaaggccaggtcaccttctcagtcgacaagtccaccaacaccgcctacctgcagtggaacagcctgaaggcctcggacaccgccatatattattgtgcgagacgacatacggacttcaacatggacgtctggggcaacgggaccaaggtcaccgtctcctca

SEQ ID NO: 217 - DNA, 352 bp, Homo sapiens
  source 1..352: mol_type = other DNA
gaggtgcagctgttggagtctgggggaggcttggtacagcctggggggtccctgagactctcctgtgcagcctctggattcacctttagagactatggcatgacctgggtccgccaggctccagggaagggtccggagtgggtctcaactattagtaatagtggggctagtacatactacgcagattccgtgaggggccggttcaccatctccagagacaattccaagaacacgctgtatttgcagatgaaccgcctgagagccgaagacacggccgtatattactgtgcgcaatcactttactctgataccacggcctggggcccagggacaatggtcaccgtctcttcag

SEQ ID NO: 218 - DNA, 355 bp, Homo sapiens
  source 1..355: mol_type = other DNA
gaggtgcagctggtgcagtctggagcagaagtgagaaaacccggggagtctctgaagatctcctgcaagggttctggatatacctttgccagttactggatcgcctgggtgcgccagatgcccgggaaaggcctggagtggatgggggtcatctatcctggtgactctgataccagatacagcccgtccttccaaggccaggtcaccatctcagccgacaagtccatcagcaccgcgtacttgcagtggagcagcctggaggcctcggacaccgccatgtatttctgtgcgagacggtcttcagaaagtgggactgactactggggccagggaacccaagtcaccgtctcctcag

SEQ ID NO: 219 - DNA, 367 bp, Homo sapiens
  source 1..367: mol_type = other DNA
caggtccagctggaacagtctggggctgaggtgaagaagcctgggtcctcggtgaaggtctcctgtagggcctctggaggcagcttcaacaacaatgctatcagctggctgcgacaggcccctggacaaggacttgagtggatgggagggatcaaccccatgtttcgtatagttaactacgcaccgaagttccagggccgcctcacgattaccgcggacgcattgccgagtaccgcctacatggaattgagcagcctgacatctgaggacacggccgtgtattactgtgcgcgcggtccaaattatcatgatactactacttacttcgacccctggggccaggggaccctggtcaccgtctcctcag

SEQ ID NO: 220 - DNA, 370 bp, Homo sapiens
  source 1..370: mol_type = other DNA
gaggtgcagctggtgcagtctgggggaggcgtggtccagcctggggggtccctgagactctcctgtgcggcctctggattcatctttacagactatgtcatgagttgggtccgcctggctccagggagggggctggagtgggtctcaagtattagcgctagtggtatcagcacatattacgcagattccgtgaagggccgattcaccatctccagagacaagtccaagaacacgctgtatttgcaactgaatagcctgagagccgaggacacggccatgtattactgtgcgaaagatcttgtcagaccagtgcctggcacgggttattttgaatcctggggccagggaaccctggtcaccgtctcctcag

SEQ ID NO: 221 - DNA, 355 bp, Homo sapiens
  source 1..355: mol_type = other DNA
caggtgcagctggtgcagtcaggggctgaggtgaagaagcctggggcctcagtgaaggtctcctgcaaggcttttggaggcaccttcaccagttatgagatcaattggatacgacaggccactggacaagggctcgagtggatgggatggatgaacccaagtagtggtaaaacaggctatgcagaaaaattccagggcagagtcaacatgaccaggaacacctccataagcacggcctacatggagctgagcaacctcagatatgaggacacggccacgtattactgtgcgagacaatacgattcttggagtggttacctctggggccagggaaccctggtcagcgtctcctcag

SEQ ID NO: 222 - DNA, 367 bp, Homo sapiens
  source 1..367: mol_type = other DNA
caggtccagctggaacagtctggggctgaggtgaagaagcctgggtcctcggtgaaggtctcctgtaagacttctggaggcaccttcaacagctatgctatcagctgggtgcgacaggcccctggacaagggcttgagtggataggagggatcaaccctatgtttggaatagtcaactacgcacagaagttccagggcagagtcaccatttccgcggacgcatttccgagcacagcctacatggagttgcgcagcctgagatctgaggacacggccgtctattactgtgcgaggggtccgaattaccatgatactactacttacttcgacccctggggccagggaaccctggtcaccgtctcctcag

SEQ ID NO: 223 - DNA, 367 bp, Homo sapiens
  source 1..367: mol_type = other DNA
caggtgcagttggtgcagtctggggctgaggtgaggaggcctgggtcctcggtgaaggtctcctgcacggcctctggaggcatcatgaataagtatgctctcaactgggtgcgacaggcccctggacaagggcttgagtgggtgggagggatcagcgccatttttggtgtaccaaactacgcacagaagttccagggcagagtctcgattaccgcggacaaatcgacgaccacagcctacatggagttgaccagcctgagatctgacgacacggccgtgtatttgtgtgcgagaggagatggttatagacctacaatgactccccttgccgactggggccagggaaccctggtcgtcatctcctcag

SEQ ID NO: 224 - DNA, 365 bp, Homo sapiens
  source 1..365: mol_type = other DNA
ggtccagctggaacagtctggggctgaggtgaagaagcctgggtcctcggtgaaggtctcctgtaaggcttctggaggcgccttcaatagctatgctgtcatctgggtgcgacaggcccctggacaagggcttgagtggatgggagggatcaatcctatgtttaaaatagttaattacgcacagaaattccagggcagagtcacgattaccgcggacgcattcccgagcacagcctacatggagctaaacagcctgacatctgaggacacggccgtgtattactgcgcgagaggtcccaattaccatgatactaatacttacctcgacccctggggccagggaaccttggtcatcgtctcctcag

SEQ ID NO: 225 - DNA, 367 bp, Homo sapiens
  source 1..367: mol_type = other DNA
caggtccatctggaacagtctggggctgaggtgaagaagcctgggtcctcggtgaaggtctcctgtaaggcttctggaggcaccttcaataataatgctatcatctgggtgcgacaggcccctggacaaggtcttgagtggatgggagggatcaaccctatgtttggtttagtagattacgcagagaagttccagggcagagtcacgattaccgcggacggattcccgagcgcagcctacatggaactgcgcaaactgagatctgaggacacggccgtgtattactgtgcgagaggtccaaattaccatgacaccaacacttatttggacccctggggccagggaaccctggtcaccgtctcctcag

SEQ ID NO: 226 - DNA, 370 bp, Homo sapiens
  source 1..370: mol_type = other DNA
caggttcagctggtgcagtctggagctgaggtgaagaagcctggggcctcagtgaaggtctcctgcaaggcttctggttacatctttaccaactatggtatcggctgggtgcgacaggcccctggacaagggcttgagtggatgggatggatcagcgcttacaatggtaagacaaagtatgcacagaaactccagggcagagtcaccatgaccacagacacatccacgagcacagcctacatggagctgaggagcctgagatctgacgacacggccgtatattactgtgcgaggagccccgcggactatgatagtagccctgaatacttccaacactggggccagggcaccctggtcaccgtctcctcag

SEQ ID NO: 227 - DNA, 379 bp, Homo sapiens
  source 1..379: mol_type = other DNA
caggtgcggctgcaggagtcgggcccaggactggtgaagccttcggagaccctgtccctcacctgcactatctctggtggctccatcggtaatcactactggagctggatccggcagcccccagggaagggactggagtggattgggtatatgtattacggtaggaccaccaaggacaacccctccctcaagagtcgagtcaccatatcaatagacacgtcgaagaatcagtactccctggaactgagctctgtgaccgctgctgacacggccgtgtattactgtgcgagaggggtcttgggcccaattacgatttttggggtggctcaagatgcttttgatatctggggccaagggacaatggtcaccgtctcctcag

SEQ ID NO: 228 - DNA, 362 bp, Homo sapiens
  source 1..362: mol_type = other DNA
caggaccagttggtgcagtctggggctgaggtgaagaagcctggcttctcggtgaaggtctcctgcaaggcttctggagccatcttcagaagtcaggctatcagctgggtgcgacaggcccctggacaagggcttgagtggatgggagggatcaccggtgtctttgggacaacaaactacgcccagaagttccagggcagagtcactattaccgcggacgagtcaacgaccactgtcttcatggagttgagaagcctgacatctgacgacacggccgtctattattgtgtgagacacgggggttatcacttcacgacccactttgactattggggccagggaaccctggttactgtctcctc

SEQ ID NO: 229 - DNA, 367 bp, Homo sapiens
  source 1..367: mol_type = other DNA
caagttcagctggttcagtctggagttgaggtgaagaagcctggggcctcagtgaaggtctcctgcaagacttctggttacacctttgccgattatggtgtcgcctggatacgacaggcccctggacaaggcctcgagtggatgggatgggtcagcccgtacaatggtaaaacaacttatgcacaaaaggtccaagacagagtcaccatgaccacagacacatccacgaggacggcctacatggaactgaggagcctgacatctgacgacacggccgtatatttttgtgcgagagataattatgggtcgcggagtcctaatgcttttgatttctggggccaggggaccatggtcaccgtctcctcag

SEQ ID NO: 230 - DNA, 370 bp, Homo sapiens
  source 1..370: mol_type = other DNA
caggtccaactggtgcagtctggggctgaggtgaagaagcctgggtcctcggtgaaggtctcctgcaaggcttctagcatcttcaggagctatgctatcagctgggtgcgacaggcccctggacaagggcttgagtggatgggagggatcatccctatctttaatacagcaaactacgcacagaacttccagggcagagtcacgattagcgcggacgaatccacgagtacggtttacatggagctgagcagcctgagatctgaggacacggccgtgtattactgtgcgagagtcgctagtgacaactactacgatgtcttttcctggttcgacccctggggccagggaaccctggtcaccgtctcctcag

SEQ ID NO: 231 - DNA, 390 bp, Homo sapiens
  source 1..390: mol_type = other DNA
caggtccagtttgtgcagtctggggctgcggtgaagaagcctggggcctcagtgaatgtttcctgtcaggcttctggatacaccttcagtatttatgctatgcactgggtgcgccaggtccccggacaaagacttgaatgggtgggatggatcagcgctgacagtgacaacacaaaatattcacagaagttccaagatagagtcaccattacaagggacacgtccgcgaacacagtctacatggaattgagcagcctgacatctgaggacacggctgtatatttttgtgcgagagacccgaagccctacgatggtaaccccttgacggccctatctttttaccactacatggacgtctggggccaggggaccacggtcatcgtttcctca

SEQ ID NO: 232 - DNA, 361 bp, Homo sapiens
  source 1..361: mol_type = other DNA
caggtccagcttgtgcagtctggggctgaggtgaagaagcctggggcctcagtgaaggtttcctgcaaggcttctggagacaccttcaccaattatgctatccattgggttcgccaagaccccggactaaggcttgagtggatgggatggatcaacgctggcaatggtgacgcaaaatattcacagaagttccaggacagagtcaccattaccagggacacatccgcgaccacagcctatttggaactgatcagcctgacttctgaagacacggctgtgtattcctgtgcggggtttgagttgtatagtgggtactttatgagattctggggccagggaacccaggtcaccgtctcctcag

SEQ ID NO: 233 - DNA, 372 bp, Homo sapiens
  source 1..372: mol_type = other DNA
caggtccagctggtgcagtctggggctgaggtgaggaagcctgggtcctcagtgaaggtctcctgcaaggcttctggaggctccttcaagagtaatattatcagctgggtgcgacaggcccctggacaagggcttgagtggatgggggggatcatccctatgtttgggacaacaaattacgcgcggaagttcaagggcagagtcaccatcacctcggacgaatccacgcgcacatcttacatggaattgagcagcctgagatctgaggacacggccgtatattattgtgcgaagaaggtcgatcatatagtgggagctcctggagaattctttgacacctggggccagggaagcctggtcaccgtctcctca

SEQ ID NO: 234 - DNA, 367 bp, Homo sapiens
  source 1..367: mol_type = other DNA
caggtccagctggtgcagtctggggctgaggtgaagaagcctgggtcctcggtgaaggtctcctgcaaggcgtctggaggcaccttcgtcagtaatggtattagctgggtgcgacaggcccctggacaagggcttgagtggatgggagggatcatccctatgtttggtacaacgacctacgcacagaagttccagggcagagtcacgattaccgcggaccaatacccgagcacagtgtacctggagctgagcagcctgagatctgaggacacggccgtttattactgtgcgagcgcccgaacatattattatgataatagtccctttgactattggggccagggaaccctggtcaccgtctcctcag

SEQ ID NO: 235 - DNA, 373 bp, Homo sapiens
  source 1..373: mol_type = other DNA
cagattcagctggtgcagtctggaggtgaggtgaagaagcctggggcctcagtgaaggtctcctgcacggcctctggttacacctttgtcaaatatgggatcgactgggtgcgacaggcccctggacaggggcttgagtgggtgggatggagcagcccctacaacggtaacacaaaatatgcacagaagttccagggcagagtcaccttgaccacagacacatccacgaggacagcctatatggagctgaggagcctaacatctgacgacacggccgtctatttctgtgcgagagatttcgcggggcggggaggttccgatttaggctactttgactattggggccagggaaccctggtcaccgtctcctcag

SEQ ID NO: 236 - DNA, 370 bp, Homo sapiens
  source 1..370: mol_type = other DNA
caggtgcagctggtggagtctgggggaggcgtggtccagcctgggaggtccctgagactctcctgtgcagcgtctggattcaccttcagtagctatggcatgcactgggtccgccaggctccaggcaaggggctggagtgggtggcagttatatggtatgatggaagtaataaatactatgcagactccgtgaagggccgattcaccatctccagagacaattccaagaacacgctgtatctgcaaatgaacagcctgagagccgaggacacggctgtgtattactgtgcgaaagatcgacgtatagcagcagctcaccctgaatacttccagcactggggccagggcaccctggtcaccgtctcctcag

SEQ ID NO: 237 - DNA, 366 bp, Homo sapiens
  source 1..366: mol_type = other DNA
caggttcaggtggtgcagtctggagctgaggtgcagaagccaggggcctcagtgaaggtctcctgcaaggcttctggttacacgtttgtcagctatggtatcagctgggtgcgacaggcccctggacaagggcttgagtggatgggatggatcagcggtaataatgattacacaaactatacacagaagttccagggcagagtcaccatgaccacagacagaaccacgagcacagcctacatggagctgaggagcctgagatctgacgacacggccgtatattactgtgcgagagggcggtccccgggaattgtgatactaccagaggacgtctggggccaagggaccacggtcaccgtctcctca

SEQ ID NO: 238 - DNA, 364 bp, Homo sapiens
  source 1..364: mol_type = other DNA
caggtgcagctggtgcagtctggggctgaggtgaagaagcctgggacctcggtgaaggtctcctgcaaggcttctggaggcaccttcaggaactatgctatcagttgggtgcgacaggcccctggacaagggcctgagtggatgggaggtatcatcgctatctttggtacaacaaactacgcacagaagttccaggacagagtcacgattaccgcggacgaatccacggggacagcctacatggagctgagcagcctgacatctgacgacacggccgtttattattgtgcgagacatcgtacatactatgagagtggcccccttgactcctggggccagggaaccctggtcaccgtctcttcag

SEQ ID NO: 239 - DNA, 361 bp, Homo sapiens
  source 1..361: mol_type = other DNA
caggtccagctggtgcaatctggggctgaggtgaaaaagcctgggtcctcggtgaaggtctcctgcgaggcttctggaggcatcttcaacagttacgctatcagttgggtgcggcaggccccgggacaagggcttgagtggatgggcgggatcgtggctatttttcggacaccaaagtacgcacagaagtttcacggcagagtctcgattaccgcggacgagtccatgaagacagtctccctggaggtgaacggcctgagatttgacgacacggccgtttattattgtgcgagaggaagtggttaccaaccagatttcttccaaaactggggccagggtaccccggtcaccgtctcctcag

SEQ ID NO: 240 - DNA, 361 bp, Homo sapiens
  source 1..361: mol_type = other DNA
caggtgctgctggtgcagtctggggctgaggtgaagcagcctgggtcgtcggtgaaggtctcctgcagggcttctggaggcaccttcaggagtgatgctatcagctgggtgcgacaggcccctggaggagggcttgagtggatgggagggatcatcggaatttttagaacaacaaagtacgcacagaagttccagggcagagtcacgataaccgcggacgaattcatgaatacagccaacatggagctgaggagcctgagatatgaggacacggccgtgtattactgtgcgagaggaagtggttataagtacgaatatttccagtcctggggccagggcacccgggtcaccgtctcctcag

SEQ ID NO: 241 - DNA, 370 bp, Homo sapiens
  source 1..370: mol_type = other DNA
gttcggctggtgcaatctggaagtgaggtgaagaagcctggggcctcagtgaaggtctcttgcaaggcctctggttacacctttagtaaatatggtatcgactgggtgcgccaggccccagggcaagggcttgagtggatgggatggatcagcccttacaattataacacaaggtatgcagagaagctccagggcagagtcaccctgaccacagacacatccacgggcacagcctacatggaactgaagagtctcacgtctgacgacacggccgtctattactgtgcgagagatttcaaggggcggggaggttccgatttaggctactttgactactggggccagggaaccctggtcaccgtctcctcag

SEQ ID NO: 242 - DNA, 370 bp, Homo sapiens
  source 1..370: mol_type = other DNA
caggtccagctggtgcagtctggggctgaggtgaagaagcctgggtcctcagtgaaggtctcctgcaaggcttctggaggcaccttcagcagctatgctatcagctgggtgcgacaggcccctggacaagggcttgagtggatgggagggatcatccctatctttggtacagcaaactacgcacagaagttccagggcagagtcacgattaccgcggacgaatccacgagcacagcctacatggagctgagcagcctgagatctgaggacacggccgtgtattactgtgcgcgcgtacgatattttgactggctaacgggggggtactttgactactggggccagggaaccctggtcaccgtctcctcag

SEQ ID NO: 243 - DNA, 364 bp, Homo sapiens
  source 1..364: mol_type = other DNA
caggttcagctggtgcagtctggacctgaggtgaagaagcctggggcctcagtgaaggtctcctgcaaggcttctggttacacctttacgagctatgatttcagctgggtgcgacaggcccctggacaagggcttgagtggatgggatggatcagcagttacaatggtaacacaaactatgcacagaagttccaggacagagtcaccatgaccacagacacatccacgagcacagcttacatggagctgaggagcctgagatctgacgacacggccatgtattactgtgcgagagaaccgatgattcggggaattattaggaatgactactggggccagggaaccctggtcaccgtctcctcag

SEQ ID NO: 244 - DNA, 355 bp, Homo sapiens
  source 1..355: mol_type = other DNA
caggctcacctggagcagtctggacctgaagtgaagaagcctggggcctcagtgaaggtctcctgcaaggcatctggttacagttttaccacctatggtatcagctgggtgcgacaggtccctggacaagggcttgagtggatgggatggatcaacactgcaaatgataagatatactatggacaaagattcaaggggagagtcaccctgactgcagacacatcaagcaacacagcctacatggacctgaggagcctcagatccggcgacacggccgtctattattgtgcgagaggaggaatttcggactggttcgatccctggggccagggaaccctggtcaccgtctcctcag

SEQ ID NO: 245 - DNA, 361 bp, Homo sapiens
  source 1..361: mol_type = other DNA
caggtccagttggtgcagtctggggctgaactgaagaagcctgggtcctcggtgagggtctcctgcaaggcttctggaaccatcttcatcaactttggtatcagctgggtgcgacaggcccctggacaaggacttgagtggatggggaaaatcgtccctctctttccgacacccactttcgcccagaagtttcagggcagaatcagtcttaccgcggacaaatccacaggcactgtctacttggacctgagcgacctgagatctgacgacacgggcgtttattactgtgcgaaatccccacagatttatgaaaattggttcgactcatggggcccgggaactctggtcaccgtctcctcag

SEQ ID NO: 246 - DNA, 367 bp, Homo sapiens
  source 1..367: mol_type = other DNA
caggtgcagctggtgcagtctggggctgaggtgaagaagcctggggcctcagtgaaggtttcctgcaaggcatctggatacaccttcaccagctactatatgcactgggtgcgacaggcccctggacaagggcttgagtggatgggaataatcaaccctagtggtggtagcacaagctacgcacagaagttccagggcagagtcaccatgaccagggacacgtccacgagcacagtctacatggagctgagcagcctgagatctgaggacacggccgtgtattactgtgcgagaggggggtttacgtggatacagctatggctctttgactactggggccagggaaccctggtcaccgtctcctcag

SEQ ID NO: 247 - DNA, 369 bp, Homo sapiens
  source 1..369: mol_type = other DNA
cagctgcagctgcaggagtcgggcccaggactggtgaagccttcggagaccctgtccctcacctgcactgtctctggtggctccatcagcagtagtagttactactggggctggatccgccagcccccagggaagggactggagtggattgggagtatctattatagtgggaacacctactacaactcgtccctgaagagtcgagtcaccatatcacaagacacatccaagaaccagttctccctgaagttgagttctgtgaccgccgcggacacggccgtctattattgtgcgagacctaggggggcgaccaactactaccactacatggacgtctggggccaagggaccacggtcaccgtctcctca

SEQ ID NO: 248 - DNA, 361 bp, Homo sapiens
  source 1..361: mol_type = other DNA
caggtgcagctgcaggagtcgggcccaggacttgtgaagccttcggagaccctgtccctcaggtgcactgtctctggtgcctccatccgaagtcattactggagttggatccggcagacccccgggaaggggccagaatggattgggactgtctattacaccgggagcaccagctacaatccctccctcaagagtcgagtcaccacaacagttgacacgtccaagaatgaattctccctgaatttgacctctgtgaccgctgcggacacggccgtctattactgtgcgcgagtgaccagtgactcatacatctgggtgtttgacttctggggccagggatccctggtcaccgtctcctcag

SEQ ID NO: 249 - DNA, 373 bp, Homo sapiens
  source 1..373: mol_type = other DNA
caggtgcagctgcaggagtcgggcccaggactggtgaagccttcggagaccctgtccctcacctgcactgtctctggtggctccatcagtagtcactactggagctggatccggcagcccccagggaaggggctggagtggattgggagtatctattacagtgggagcaccaactacaacccctccctcaagagtcgagtcaccatatcagtagacacgtccaagaaccagttctccctgaagctgagctctgtgaccgctgcggacacggccgtgtattactgtgcgagagatactggtggatatagtggctacgtcccccctaactggttcgacccctggggccagggaaccctggtcaccgtctcctcag

SEQ ID NO: 250 - DNA, 362 bp, Homo sapiens
  source 1..362: mol_type = other DNA
caggtgcagctgcaggagtcgggcccaggactggtgaagccttcggagactctgtccctcacctgcactgtctctggtggctccatcaatagttactactggacctggatccggcagcccccagggaagggactggagtgcattgggtatatctattacactgggagaaccaactacaacccctccttcaagagtcgagtcaccatggcagtggacacgtccaagaaccagttctccctgaagctgacctctgtgacccctgcggacacgggcgtgtattactgtgcgcgagatgtaactggaatagagaaacttaatgcttttgatatctggggccaagggaccatggtcaccgtctcttc

SEQ ID NO: 251 - DNA, 360 bp, Homo sapiens
  source 1..360: mol_type = other DNA
caggtgcagttggtgcagtctggggctgaggtgaagacgcctgggtcctcgctgaaggtctcctgcaagacttctggaggcaccttcagcagctatgctatcagctgggtgcgacaggcccctggacaagggcttgagtggatgggaggcatcatccctatgtttggtacagcaaactacgcacagaagttccagggcagagtcacaattaccgcggacgatttcccgagcacagcctacatggagctgagcagcctgagatctgaggacacggccgtgtattactgtgcgagaagtaatcactactactactactacatggccgtctggggcaaagggaccacggtcaccgtctcctca

SEQ ID NO: 252 - DNA, 361 bp, Homo sapiens
  source 1..361: mol_type = other DNA
caggtccagttggtgcagtctggggctgaactgaagaagcctgggtcctcggtgagggtctcctgcaaggcttctggaaccatcttcatcaactttggtatcagctgggtgcgacaggcccctggacaaggacttgagtggatggggaaaatcgtccctctctttccgacacccactttcgcccagaagtttcagggcagaatcagtcttaccgcggacaaatccacaggcactgtctacttggacctgagcgacctgagatctgacgacacgggcgtttattactgtgcgaaatccccacagatttatgaaaattggttcgactcatggggcccgggaaccctggtcaccgtctcctcag

SEQ ID NO: 253 - DNA, 391 bp, Homo sapiens
  source 1..391: mol_type = other DNA
caagtacagctggtgcagtctggggctgaggtgaaggagcctggggcctcagtgaaggtatcctgcaaggcatctggatacaccttcaccaacgactatatacactgggtgcgacaggcccctggacaaggacttgagttgatgggaataatcaacgctagtggtgagaggacaaacaacgcacagaggttccagggcagagtcacaatgaccagggacgtctccacgagcacagtgtacatggagctgaccagcctgacaattgaagacacggccgtttattactgtgcgagagaggacttgcaggactactttggtttggggactcatcgcctccggacggggggccttgactcctggggccagggaaccctggtcaccgtctcctcag

SEQ ID NO: 254 - DNA, 368 bp, Homo sapiens
  source 1..368: mol_type = other DNA
caggtgcacctggaggagtctgggggaggcgtggtccagcctggggggtccctgagactctcctgtacagcgtctggattcaccttcagtacctttggcatgcactgggtccgccagcctccaggcaagggtctggagtgggtgtcttttatcagatatgatggaagtaataagtattacgcagactccgtgaagggccgattcaccgtctccagagacaattccaagaacacggtatatgtgcaaatgagcagcctaacacctgaggacacggctgtctatttctgtgcgaaagaacgcgtctccctgatggctggttatgattacatggacatgtggggccagggagccctggtcatcgtctcctc

SEQ ID NO: 255 - DNA, 363 bp, Homo sapiens
  source 1..363: mol_type = other DNA
gaggtgcagctgttggagtctgggggaggcttggtacagcggggggggtccctgagactctcctgtgcagcctctggactcaggtttaggagctatgccatgagctgggtccgccaggctccagggaaggggctggagtgggtctcagttattagtggtagtggtcttagcacatactacgcagactccgtgaagggccggttcaccatctccagcgacaattccaagaacatgctgtctctgcaaatgaacagcctgagagccgacgacacggccgtatattattgtgcgaagggggtggggttcccccactactactacatggacgtctggggccgagggaccacggtcaccgtctcctca

SEQ ID NO: 256 - DNA, 367 bp, Homo sapiens
  source 1..367: mol_type = other DNA
caggtgcagctgcaggagtcgggcccaggactggtgaggccttcggagaccctgtccctcacctgcagtgtctctggttactccatcagcaacggtttctactggggctgggtccgacagcccccagggaagggcctggagtgggttgggagtgttcatcacagtggcaccacctactacaacccgtccctgaagagtcgagtcaccatttcaatagacacgtccaagaaccagttctccttgaaggtgacgtctgtgaccgccacagacacggccatatattactgtgcgaaggaggagtatacaagtggccttctcccgtggttcgactcctggggccagggaacccttgtcaccgtctcctcag

SEQ ID NO: 257 - DNA, 367 bp, Homo sapiens
  source 1..367: mol_type = other DNA
caggtgcacctgcaggagtcgggcccaggatcggtgaagccttcagagaccctgtccctcacctgcactgtctctggtgcctccatcagcagtggtagttactcctggagttggatccgtcagcccgccggggagggactggagtggattgggcatatctctaccactgggagcaccaagtacaacccctccctcaagagtcgagtcaccatatcaattgacacgtccaggagtcagttctccctgaagctgagttctgtggccgccgcagacacggccgtgtattactgtgcgagacaagatggagtagtgggacctatcccctttgactactggggccagggaaccctggtcaccgtctcctcag

SEQ ID NO: 258 - DNA, 346 bp, Homo sapiens
  source 1..346: mol_type = other DNA
caggtgcagctgcaggagtcgggcccaggtctggtgaagccttcggagaccctgtctctcatctgcactgtctctgatggctccatcagcagtcactactggaactggatccggcagcccccagggaaggggctggagtggattgggaacatctattacactggaaccaccgactacaacccctccctcaggagtcgagtcaccatttccgtagacacgtccaagaaccagttttccctgaagctgacctccgtgaccgctgcggacacggccgtgtattactgtgtgagagattgggggcttggacgtaactggggccagggaaccctggtcaccgtctcctcag

SEQ ID NO: 259 - DNA, 370 bp, Homo sapiens
  source 1..370: mol_type = other DNA
caggtgcagctggtggagtctgggggaggcgtggtccagcctgggaggtccctgagactctcctgtgcagcctctggattcaccttcagtagctatggcatgcactgggtccgccaggctccaggcaaggggctggagtgggtggcagttatatggtatgatggaagtaataaatactatgcagactccgtgaagggccgattcaccatctccagagacaattccaagaacacgctgtatctgcaaatgaacagcctgagagctgaggacacggctgtgtattactgtgcgagcgcacagtattactatgatagtagtggtttctcacttgactactggggccagggaaccctggtcaccgtctcctcag

SEQ ID NO: 260 - DNA, 370 bp, Homo sapiens
  source 1..370: mol_type = other DNA
gaggtgcagctggtgcagtctggagcagaggtgaaaaagccgggggagtcgctgaagatctcctgtcagggttctggatacagctttaccacctactggatcgtctgggtgcgccagatgcccgggaaaggcctggagtggatggggatcatctatcctggtgactctgataccagatacagcccgtccttccaaggccaggtcaccatctctgccgacaagtccatcagcaccgcctacctgcagtggagcagcctgaaggcctcggacaccgccatgtattactgtgcgagacgtattgcaatacctggtaccagctggtactactttgactactggggccagggaaccctggtcaccgtctcctcag

SEQ ID NO: 261 - DNA, 370 bp, Homo sapiens
  source 1..370: mol_type = other DNA
gaggtgcagctgttggagtctgggggaggcttggtacagcctggggggtcccttagagtctcctgtgcagcctctggattcacctttagcaaatatgccatgaactgggtccgccaggctccagggaaggggctggaatgggtctcaagtattagtgctagtggtggcagcacatactacgcagactccgtgaagggccggttcaccatctccagagacaattccaagaatacggtgtctgtgcagatgagaagcctgagaggcgaggacacggccgtctattactgtgcgaaagcgggctcacacctcatcccgtatagtgggagccttgactcctggggccagggaaccctggtcaccgtctcctcag

SEQ ID NO: 262 - DNA, 361 bp, Homo sapiens
  source 1..361: mol_type = other DNA
gaggcgcaactattggaatctgggggagacttgatacagcctggggggtccctgagactctcctgtgcagcctctggattcacgtttcggaactatgccatgagctgggtccgccaggctccagggaaggggctggagtgggtctcgactattagtgccagtggtaggggcacttactacccagactccgtgaggggccgattcaccatctccagagataattccaagagcacggtgtatctgcaaatgaatggccttagagtcgaggatacggccatgtattactgtgcgggaggttcggagacttcttcatactgtttcgacccctggggccagggaaccctggtcaccgtctcctcag

SEQ ID NO: 263 - DNA, 364 bp, Homo sapiens
  source 1..364: mol_type = other DNA
caggtccaccttgtacagtctggggccgacatgaagacgcctggggcctctgtgaaaatttcctgtcaggcttctggatacagtttcaccagtaatgctatccattgggtgcgccaggaccccggacaaaggcttgagtgggtgggaggtatcaatactggcaatggaaagacggagttctcaccgaagttccagggcagagtcaccataacgagggacacatccgcgaccacagtctacatggaactgcgcagcctgacatctaaagacacggctgtatatttctgtgcgcgagtgggatatagtggcttcattaatgcttttgatgtctggggccaagggacaatggtcatcgtctcttcag

SEQ ID NO: 264 - DNA, 358 bp, Homo sapiens
  source 1..358: mol_type = other DNA
caggtccagctggtgcagtctggggctgaggtgaagaagcctgggtcctcagtgaaggtctcctgcaaggcttctggagccaccttcatgaactgtgctgtcagctgggtgcgacaggcccctggacaagggcttgagtggatgggagggatcatccctatctttcgttcagcaaattacgcacagaaattccagggcagagtcacgattaccgcggacgaactcatgaacacagtctatatggaactgagcagcctgagatctgaggacacggccgtatattactgtgcgagaggtgggggcgtctatgactacgacctttactggggccagggaaccctggtcaccgtctcctcag

SEQ ID NO: 265 - DNA, 358 bp, Homo sapiens
  source 1..358: mol_type = other DNA
gaggtgcagctggtgcagtctggagcagaggtgaaaaagccgggggagtctctgaagatctcctgtaagggttctggatacagctttaccagctactggatcggctgggtgcgccagatgcccgggaaaggcctggagtggatggggatcatctatcctggtgactctgataccagatacagcccgtccttccaaggccaggtcaccatctcagccgacaagtccatcagcaccgcctacctgcagtggagcagcctgaaggcctcggacaccgccatgtattactgtgcgagacctggggaatggggtggcggatttgactactggggccagggaaccctggtcaccgtctcctcag

SEQ ID NO: 266 - DNA, 368 bp, Homo sapiens
  source 1..368: mol_type = other DNA
gacgtgtccctgttggagtccgggggaggcttcgtacagcctggggggtccctgagactctcctgtagagcctctggattcaactttaacaactatgtcatgtattgggtccgccaggccccagggaaggggctggagtgggtctcaagtatcagcggaagtggtttaagtagatattacgcagactccgtgaagggccgattcaccatctccagagacacttcgaagaccacggttttcctgcagatgaatagcctgagcgccgaagacacggccctctattattgtgcgaaagatcgagggacttacgtgccttcctcggggacatttgactcttggggccacggaattctggtcaccgtctcctc

SEQ ID NO: 267 - DNA, 396 bp, Homo sapiens
  source 1..396: mol_type = other DNA
gaggtgcacctggtggagtctgggggaggcttggtacagccagggcggtccctgagactctcctgtacaggttctggattcacctttggtgactttgctatgacctgggtccgccagtctccagggaaggggctggagtgggtaggtttcattagaaggaaagcttatggtgggacaacagaatatgccgcgtctgtgaaaggcagattcaccatctcaagagatgattccgaaagcatcgcctttctgcaaatgagcagcctgaaaaccgaggacacaggcgtttatttctgtactagagaacagagaatccgtttgggggagttctccttatacgacccttcctactactacatggacgtctggggccaagggaccacggtcaccgtctcctca

SEQ ID NO: 268 - DNA, 363 bp, Homo sapiens
  source 1..363: mol_type = other DNA
caggtgcagctggtgcagtctggggctgaggtgaagaagcctggggcctcagtgaaggtctcctgcaaggcttctggatacaccttcaccggctactatatgcactgggtgcgacaggcccctggacaagggcttgagtggatgggatggatcaaccctaacagtggtggcacaaactatgcacagaagtttcagggcagggtcaccatgaccagggacacgtccatcagcacagcctacatggagctgagcaggctgagatctgacgacacggccgtgtattactgtgcgaggtctggggttcggggagtaccccgggacatggacgtctggggccaagggaccacggtcaccgtctcctca

SEQ ID NO: 269 - DNA, 370 bp, Homo sapiens
  source 1..370: mol_type = other DNA
caggtgcagctggtgcagtctggggctgaggtgaagaagcctggggcctcagtgaaggtctcctgcaaggcttctggatacaccttcaccggctactatatgcactgggtgcgacaggcccctggacaagggcttgagtggatgggatggatcaaccctaacagtggtggcacaaactatgcacagaagtttcagggcagggtcaccatgaccagggacacgtccatcagcacagcctacatggagctgagcaggctgagatctgacgacacggccgtgtattactgtgcgagagagcggggtaattactatggttcggggagaccactgggctactggggccagggaaccctggtcaccgtctcctcag

SEQ ID NO: 270 - DNA, 367 bp, Homo sapiens
  source 1..367: mol_type = other DNA
gaggtgcaactgttggagtcggggggaggcttggtacagcctggggggtccctgagactctcctgtgaagcctctggattcacctttatcagttatgccatgagttgggtccgccaggctccagggaaggggctggagtgggtctccgctattagtggtggaggtagtagtacatattatgcagactccgtgaagggccggttcaccatctccagggacaattccaagaacacgctgtatctgcaaatgagcagcctgagagtcgaggacacggccgtttattattgtgcgaaaacggagtgggaattaaaacggcactggtacttcgatctctggggccgtggcatcctggtcactgtctcttcag

SEQ ID NO: 271 - DNA, 376 bp, Homo sapiens
  source 1..376: mol_type = other DNA
caggtgcagctggtgcagtctggggctgaggtgaagaagcctgggtcctcggtgaaggtctcctgcaaggcttctggaggcaccttcagcacctatgctatcagctgggtgcgacaggcccctggacaagggcttgagtggatgggagggatcatccccctctttggttcagcaaactacgcacagaagttccagggcagagtcacgattaccgcggacgaatccacgagtacagcctacatggagttgagccgcctgagatctgaggacacggccatgtattactgtacgagagactccgggggtggatacagctttggccagaccaattggttcgacccctggggccagggaaccctggtcaccgtctcctcag

SEQ ID NO: 272 - DNA, 364 bp, Homo sapiens
  source 1..364: mol_type = other DNA
caggtccagttggtgcagtctggggctgaggtgaagaagcctgggtcctcagtgaaggtctcctgcagggcttctggaggccccttcagcagctatgctatcagctgggtgcgacaggcccctggacaggggcttgagtggatgggagggatcactggcatgtttggcacaacaaactacgcacagaagttccagggcagagtcacgattaccgcggacgaatctacgagcacatcctacatggagctgaggagcctgagatctgaggacacggccgtgtattattgtgcgcgacacaaaaattattatgataggagtgggcttgactactggggccagggaaccctggtcaccgtctcctcag

SEQ ID NO: 273 - DNA, 385 bp, Homo sapiens
  source 1..385: mol_type = other DNA
cagatgcgattggtgcagtctgggcctgaagtgaagaaccctggggcctcactgagagtctcctgtaaggcttctggattcagattcagcgactattacatccactgggtgcgacggaccccgggacaggggttcgagtggatgggatgcatcaaccctgacagtgggggcacaaagtttgcacagaaatttgagggcagggtcaccttgaccagggtcacctccatcaccacagtctacatggaactgcacagtctcacatctgacgatacggccgaatatttctgtgcgagagattcgggcgactattattttaataaggagaatctcccttacaactggttcgacccctggggccaagggaccctggtcaccgtctcctcag

SEQ ID NO: 274 - DNA, 362 bp, Homo sapiens
  source 1..362: mol_type = other DNA
caggaccagttggtgcagtctggggctgaggtgaagaagcctgggttctcggtgaaggtctcctgcaaggtttctggaggcatcttcagaagtcatgcaatcagctgggtgcgacaggcccccggacaagggcttgagtggatgggagggatcaccgctgtcttcggaacaacgagctatgcacagaaattccagggcagggtcacgatcaccgcggacgagtccacgaccactgtctacatggagttgaggagcctgacatctgaggacacagccgtttattattgtgtgagacacgggggttatcacttcacgacccactttgactactggggccagggaaccctggttaccgtctcctc

SEQ ID NO: 275 - DNA, 360 bp, Homo sapiens
  source 1..360: mol_type = other DNA
caggtgtcgcttgtgcagtctggggctgaggtgaggaggcctgggtcctcggtgaaggtgtcctgcgagtctggtcgaggcatcttcaatagtcatgctgtcacctgggtgcgacaggcccctggacaaggccttgagtggatgggagggatcatcggtgtctttcgtgcaacaagttatgcacagaagtttcagggcagaatcacgattaccgcggacgagtccgctagtacagtttacatggagttgaccaggctgagacctgaagacacggccgtatattactgtgcaaaaagtcggggatatcattatgaaagtagtgaagtatggggccaagggacaacggtcatcgtctcctca

SEQ ID NO: 276 - DNA, 367 bp, Homo sapiens
  source 1..367: mol_type = other DNA
caggtccaactggtgcagtctggggctgaggtgaagatgcctgggtcctcggtgaaggtctcctgcaaggcttctggaggccccttcaacaagcatgctatcacctgggtgcgacaggcccctggacaagggcttgagtggatgggagggatcatggctatatttcacacagtaaagtatgcagagaagttccagggcagagtcaccataaccgcggacgactctacgagtacagtctacatggagctgagccgcctgagatttgaggacacggccgtgtattactgtgcgcgagatgggccagattaccacgggtcggggtattttgacttctggggccagggaaccctggtcaccgtctcctcag

SEQ ID NO: 277 - DNA, 370 bp, Homo sapiens
  source 1..370: mol_type = other DNA
caggtgcagctggtgcagtctggggctgaggtgaagaagcctggggcctcagtgaaggtctcctgcaaggcttctggatacaccttcaccacttatgatatcaactgggtgcgacaggccactggacaaggacttgagtggatgggatgggtggaccctaagactggtaagacaggctatgcacagaagttccagggcagagtcaccatggccaggaacacctccataaacacagcctacatggagctaattagcctgagatctgaggacacggccgtctattactgtgcgacggagattcacagcctcgctcagggataccagtcgctaagggactggggccagggaaccctggtcaccgtctcctcag

SEQ ID NO: 278 - DNA, 370 bp, Homo sapiens
  source 1..370: mol_type = other DNA
gttcggctggtgcaatctggaactgaggtgaagaagcctggggcctcagtgaaggtctcttgcaaggcctctggttacacctttagtaaatttggtatcgactgggtgcgccaggccccagggcaagggcttgagtggatgggatggatcagcccttacaattataacacaaggtattcagagaagctccagggcagactcaccctgaccacagacacatccacgggcactacctacatggaactgaagagcctcacgtctgacgacacggccgtctattactgtgcgagagatttcaaggggcggggaggttccgatttaggctactttgactactggggccagggaaccctggtcaccgtctcctcag

SEQ ID NO: 279 - DNA, 370 bp, Homo sapiens
  source 1..370: mol_type = other DNA
gaagtgcagctggtggagtctgggggaggcttggtacagcctggcaggtccctgagactctcctgtgcagcctctggattcacctttgatgattatgccatgcactgggtccggcaagctccagggaagggcctggagtgggtctcaggtattagttggaatagtggtagcataggctacggggactctgtgaagggccgattcaccatctccagagacaacgccaagaactccctgtatctgcaaatgaacagtctgagagctgaggacacggccttgtattactgtgcaaaagatatgttggtagcagcagctggtacggccggctttgagtactggggccagggaaccctggtcaccgtctcctcag

SEQ ID NO: 280 - DNA, 388 bp, Homo sapiens
  source 1..388: mol_type = other DNA
cagatcaccttgcaggagtctggtcctacactggtgaaacccacacagaccctcacgctgacctgcaccttctctggcttctcactcaccactagtggagtgggtgtgggctggatccgtcagcccccaggaaaggccctggagtggcttgcactcatttattgggataatgataaactctacagcccatctctggagagcaggctcaccatcaccaaggacacctccaaaaaccaggtggtccttaccatgaccagcatggagcctctggacacagccacatatttctgtgcacacctttcgccccgtcactacgatgttgtgagtggttattatgggtatgcttttcaaatctggggccaaggaacaatggtcaccgtctcttcag

SEQ ID NO: 281 - DNA, 364 bp, Homo sapiens
  source 1..364: mol_type = other DNA
caggtgcacctggtgcagtctggggctgaggtgaagaagcctgggtcctcggtgaaggtctcctgcaaggccactggaggcatcttcaacaagtatggtatcaactgggtgcgacaggcccctggacaagggcttgagtggatgggcgggatcagcgctgtctttggcacagcaggctacgcacagaagttccagggcagagtcacaattaccgcggacgaatcgacgaccacagcctacatggagctgagcagcctgagatctgaggacacggccgtttattactgtgcgggggccagaacatactactatgacaatttctttgtctcttggggcctgggaaccccggtcaccgtctcctcag

SEQ ID NO: 282 - DNA, 362 bp, Homo sapiens
  source 1..362: mol_type = other DNA
caggtgcagctgcaggagtcgggcccaggactggtgaagccttcggagaccctgtccctcacctgcactgtctctgctggctccatcagtaattactactggacctggatccggcagtccccagggaagggactggagtgcattgggtatattgattacagtgggagaaccaactacaacccctccctcaagagtcgagtcaccatggcggtagacacgtccaggaaccagttctccctgaagctgacctctatgacccctgcggacacggccgtgtattactgtgcgcgagatgtaactggaatagagaaacttaatgcttttgatatctggggccaagggaccatggtcactgtctcttc

SEQ ID NO: 283 - DNA, 370 bp, Homo sapiens
  source 1..370: mol_type = other DNA
gaggtgcagctgttggagtctgggggaggcttagtacagcctggggggtccctgagactctcctgtgcagcctctggattcacctttagcaactacttcatgacctgggtccggcaggctccagggaaggggctggagtgggtctcaagtattagtggtagtgctggtagcgcatactacgcagactccgtgaagggccggttcaccatctccagagacacttccaagaacacgctgtatctgcaaatgaagagcctgagaggcgaggacacggccgtatattactgtgcgaaagatttaaatcggggaataccgacagctggctaccttgactcctggggccagggaaccctggtcaccgtctcctcag

SEQ ID NO: 284 - DNA, 367 bp, Homo sapiens
  source 1..367: mol_type = other DNA
caggtccagctggtgcagtctgggactgaggtgaagaagcctgggtcctcggtgaaggtctcctgcagggcttccggagccgcgttcaacagcaatgctataaactgggtgcgacaggcccctggacaagggcttgagtggatgggaggaatcatcggtatgtttcgtacagcacactacgcacagaagttccagggcagagtcacgattaccgcgggcgaaatgatgaccacagtctacatggagctgagcagcctgacatctgacgacacggccgtctattactgtgtgagatcgggaggatacgatattttgactgatggctttgactactggggccagggaaccctggtcaccgtctcctcag

SEQ ID NO: 285 - DNA, 376 bp, Homo sapiens
  source 1..376: mol_type = other DNA
caggtgcagctggtgcagtctggggctgaggtgaagaagcctgggtcctcggtgaaggtctcctgcaaggcttctggaggcaccttcagcagttatgctttcagctgggtgcgacaggcccctggacacgggcttgagtggatgggagggatcatccctctctttggtacaacatactacgcacagaagttccagggcagagtcacgattaccgcggacgaatctacgagcacagcctacatggagctgagcagcctgagatctgaggacacggccgtgtattactgtgcgagagatgtccgatattacgaaattttgactggtgttaactggttcgacccctggggccagggaaccctggtcaccgtctcctcag

SEQ ID NO: 286 - DNA, 364 bp, Homo sapiens
  source 1..364: mol_type = other DNA
caggtgcagctggtgcagtctggggctgaggtgaagaagcctgggtcctcggtgaaggtctcctgcaaggcttctggagacattttcagaagctatggtctgagctgggtgcgacaggcccctggacaagggcttgagtggatgggaggaatcatggctttgtttggtgtaacaaattatgcacagaggttccagggcagagtcacgatcaccgcggacgaacccgcgagaacaatatacatggagttgagcagcctgagatctgaggacacggccgtctattactgtgccagagattctcactatgataatagtggttatttcctagggtggggccagggaaccctggtcaccgtctcctcag

SEQ ID NO: 287 - DNA, 376 bp, Homo sapiens
  source 1..376: mol_type = other DNA
caggtgcaactgcaacagtggggcgcagggctcctgaggccgtcggagaccctgtccctcacctgcgctgtctctggtgggtccctcagtaattactattattcttggatccgtcaggccccaggaaagggcctgcagtggattggggaaatcaatcgcagtggcagcaccaactacctcccgtcactcaagagtcgagtcactatgtcaatagacacgtccaagagtcagttcttcctgaagttgacctctctgaccgccgcggacacggctgtttattattgtgccagacttgaaaaacggatagccttggctggtggtaaacgcatttggttcgacccttggggccggggaaccctggtcactgtctcctcag

SEQ ID NO: 288 - DNA, 367 bp, Homo sapiens
  source 1..367: mol_type = other DNA
caggtgcagctggtggaatcggggggaggcgtggtccagccgggggggtccctgagactctcctgtgaagcgtctggattcaagttcagtgactatgggatgtactgggtccgccaggctccaggcaaggggctggaatgggtggcacttatgtcacccgatggaagcagaaaatactacgcagagtccgtgaagggccgattcaccatctccagagacaattcgaagaacatactgtttcttcaaatgaacagcctgagaactgaagacacggcgaaattttactgtgcgagagccctgaacagtggttacaaaattcccagccttgactactggggccagggagccctggtcaccgtctcctcag

SEQ ID NO: 289 - DNA, 375 bp, Homo sapiens
  source 1..375: mol_type = other DNA
tgcaactgcaggagtcgggaacaggactggtgaggccttcggagaccctgtccctcacctgcggtgtctctggtgcctccatcactactactggcttcttctggggctggatccgccagccccccgggaagggtctggaatggattgggactatctattcttatggcactgtttactacaacccgtccctccagagtcgcgtcgtcatttccatggagacgtccaagaattacttctccctgaggttgacctctgtgaccgccgcagacacggctgtctactattgtgcgagacgacatcacgatcctttgactgggcaatattcgccctggttcgacccctggggccagggaaccctggtcaccgtctcctcag

SEQ ID NO: 290 - DNA, 367 bp, Homo sapiens
  source 1..367: mol_type = other DNA
cagctgcagttgcaggagtcgggcccaggactggtgaagccttcggagaccctgtccctcacctgcactgtttctggtggctccatcagcagtggaagttcctactggggctggatccgccagcccccagggaaggggctggagtggattggcggtgtctattatactgggagcacctactacaacccgtccctcaagagtcgagtcaccatatccgtagacacgtccaagaaccagttctccctgaggctgagctctgttaccgccgcagacacggccgtgtattattgtacgagatggaagacgacggggctgatgggggcttttgatatctggggccaagggacaatggtcgccgtctcttcag

SEQ ID NO: 291 - DNA, 348 bp, Homo sapiens
  source 1..348: mol_type = other DNA
gaggtgcagttggtggagtctggaggaggcttgatccagcctggggggtccctgagactctcctgtgcagcctctgggttcaccgtcagtaagaactacatgtcctgggtccgccaggctccaggggaggggctggagtgggtctctcttatttatagcggtggtctgacatactacatagactccgtgaagggccgattcaccatctccagagacaattccaagaatacgctgtatcttcaaatggacagcctgagagccgaggacacggccgtgtattattgtgcgagagatgggggctacggtatggacgtctggggccaagggaccacggtcaccgtctcctca

SEQ ID NO: 292 - DNA, 370 bp, Homo sapiens
  source 1..370: mol_type = other DNA
caggtccacctggtgcagtctggggctgaggtgaagaagcctgggtcctcggtgaaggtctcctgcaaggcttctggaggcaccttcaacagctatactatcaactgggtgcgacaggcccctggacaagggcttgagtggatgggaaggatcatccctctccttggtatatcaaacaacgcacagaagttccagggtagagtcacgattaccgcggacaaatccccgagcacagcctacatggagctgagcagcctgagatctgaggacacggccgtatattactgtgcgacatcgcatagcaccacctattacaagggatactactttgaatactggggcctgggaaccctggtcaccgtctcctcag

SEQ ID NO: 293 - DNA, 349 bp, Homo sapiens
  source 1..349: mol_type = other DNA
gacgtgcagctggtggagtctgggggaggcttggtccagcctggggggtccctgagactgtcctgtacagcctctggattcacttttactgcgtattggatgaactgggtccgccaggctccagggagggggctggagtggctggccaacataaacgaagatggaagtgacaaatactatgtggactctgtgaagggccgattcaccatctccagagacaacaccaagaactcattctatctgcaaatgaacagcctgagagtcgaggacacggctatatattactgtgcgagagatcgttattggagtggtgtctggggccagggaaccctggtcaccgtctcctcag

SEQ ID NO: 294 - DNA, 370 bp, Homo sapiens
  source 1..370: mol_type = other DNA
caggtgcagttggtggagtctgggggaggcttggtcaagcctggagggtccctgagactctcctgcgcagcctctggattcatcttcagtgactcctacatgagctgggtccgccaggctccagggaagaagctggaatgggttgcatacatcagttacagtcgtagtagcataaattacgcagactccgtgaagggccgattcaccatctccagggacaacgccaagaattcactgtatctgcaaatgaacagcctgagagccgaggacacggctgtgtattattgtgtgagactcgtgaggggtggtggctacaattggggcgcctttgactactggggccagggaaccctggtcaccgtctcctcag

SEQ ID NO: 295 - DNA, 370 bp, Homo sapiens
  source 1..370: mol_type = other DNA
gaggtgcagctgttggagtctgggggaggcttggtacagcctggggggtccctgagactctcctgtacagcctctggattcagctttagcagatttaccatgttctgggtccgccaggctccagggaaggggctggagtgggtctcatctattactagtagtggtattagcacatactacacagactccgtgaagggccggttcaccatctccagagacaattccaagaacacgctttttctgcaaatgaacagcctgagagccgcggacacggccgtatattactgtgcgaaagatctcgagattgcagtttggggctcgggctactttgactactggggccagggaaccctggtcaccgtctcctcag

SEQ ID NO: 296 - DNA, 352 bp, Homo sapiens
  source 1..352: mol_type = other DNA
gaggcgcaactggtggagtctgggggaggcctggtgaagcctggggggtccctcagactctcttgtgaagtgtctggattgatttttagcaacgccttgatacactgggtccgccaggctccagggaagggcctggagtgggttggccgtattaaaagtaaaactgatggtgagacaacagattacgctgcacccgtgagaggcagattcaccatttcaagagatgattcaaaaaacatggtttttctgcaaatgaacagcctgagaatcgaggacacagctctctattactgttacagtaaccatgcatttgatatttggggccaagggacaatggtcaccgtctcttcag

SEQ ID NO: 297 - DNA, 376 bp, Homo sapiens
  source 1..376: mol_type = other DNA
cagctgcagctgcaggagttgggcccaggactggtgaagccttcggagaccctgtccctcacctgcactgtctctggtggctccatcagcagtagtaaatactactggggctggatccgccagcccccagggaaggggctggagtggattgggagtatatattatagtgggaccacctactacaatccgtccctcaagagtcgagtcaccatattcgtagacacgtccaagaaccagttctccctgaagctgagctctgtgaccgccgcagacacggctgtatattactgtgcgagacactttccggattactttggttcagtctatgatgcttttgatatttggggccaagggacaatggtcaccgtctcttcag

SEQ ID NO: 298 - DNA, 370 bp, Homo sapiens
  source 1..370: mol_type = other DNA
gaggtgcagctgttggagtctgggggaggcttggtacagcctggggggtccctgagactctcctgtgcagcctctggattcacctttagcagctctgccatgagctgggtccgccaggctccagggaaggggctggagtgggtctcagctattactggtagtggcggtagtaaatactacggagactccgtgaagggccggttcaccatctccagagacatttccaagaagacgctatatctgcaaatgaacagcctgagagccgaggacacggccacatattattgtgcgaaagactacagtagctacgttcccagcggggggtactttgactactggggccagggaaccctggtcaccgtctcctcag

SEQ ID NO: 299 - DNA, 370 bp, Homo sapiens
  source 1..370: mol_type = other DNA
gaggtgcagctgttggagtctgggggaggcttggcacagcctggggggtccctgagactctcctgtgtcgccactggattcgcttttagtagccatggcatgagttgggtccgccaggctccagggaagggtctggagtgggtctcagctattcgtggtggtggatatagcacatactacgcagactccgtgaagggccggttcaccgtctccagagacacttccaagaatacgctgtatctgcaaatgaggagcctgagagccgacgacacggccgtatatttctgtgcgaaagaaagggcgtggttattgcccacggggggggactttgactactggggccagggaaccctggtcaccgtctcctcag

SEQ ID NO: 300 - DNA, 379 bp, Homo sapiens
  source 1..379: mol_type = other DNA
gagatgcagctggtgcagtctgggggaggcttggtccagccgggggggtccctgagactctcctgtgcagcctctggattcgcccttaatacctattggatgagttgggtccgccaggctccagggaagggactggagtgggtggccaacataaggaaggatggaagtaagatgtactatctggactctgtggagggccgattcaccatctccagagacgacgccaagaactcactgtatctgcaactgaacaacctgagagccgaggacacggctatatattactgtgcgacagaggactggggtcactctgatagtgatggttggtctaacaggggggactgctggggccagggagcccaggtcaccgtctcctcag

SEQ ID NO: 301 - DNA, 370 bp, Homo sapiens
  source 1..370: mol_type = other DNA
gacgtgcagctgttggagtctgggggaggcttggtacagccgggggggtccctgagactctcctgtgcagccactggattcacctttagcaactatgccatgacctgggtccgccaggctccagggaaggggctggaatgggtctcaagtattagtgctactggtattagcacatactacgcagactccgtgaagggccggttcaccatctccagagacagttccaagagcaccctgtttctgcaaatgagcagcctgagacccgaggacacggccctttattactgtgcgaaggtgagggaagacgttataccactggctggtacccttgactactggggccagggaaccctggtcaccgtctcctcag

SEQ ID NO: 302 - DNA, 367 bp, Homo sapiens
  source 1..367: mol_type = other DNA
gaggtgcagctggtggagtctgggggaggcttggtagagcctggggggtcccttagactctcctgtgcagcctctggatttactttcaataacgcctggatgacctgggtccgccaggctccagggaaggggctggagtgggttggccgtattaaaaccaaaactgatggtgggacaacagactacgctgtacccgtgaaaggcagattcaccatctcaagagatgattcgagaaacacgctgtatctgcaaatgaacagcctgagagccgaggacacagccgtctattactgtaccacagagagccctacaatggttcagggatggtactactggggccagggaaccctggtcaccgtctcctcag

SEQ ID NO: 303 - DNA, 358 bp, Homo sapiens
  source 1..358: mol_type = other DNA
caggtgcagctgcaggagtcgggcccaggactggtgaagccttcggagaccctgtccctcacctgcgctgtctctggtgactccatcagtaggggttactactggggctggatccggcagcccccagggaaggggctggagtggattgggactatctatcatagtgggagcaccttctacaacccgtccctcaagagccgagtcaccacatcaatagacacgtccaagaaccagttctccctgaagctgagctctgtgaccgccgcagacacggccgtgtattactgtgcgagagtgattggcttgtatggttactttgactactggggcctgggaaccctggtcaccgtctcctcag

SEQ ID NO: 304 - DNA, 385 bp, Homo sapiens
  source 1..385: mol_type = other DNA
cagctgcaactgcgggagtcgggcccaggactggtgaggccctcggagaccctgtctctcacctgctctgtctctggtggctccatcagcggtcctaattcttactgggtctgggtccgccagcccccagggaagggactggagtccgttgggagcacctttcatactgggaccacctactacaagccgtccctcaagagtcgtctcaccatttcagtcgacacgtccaagaaccagttctccctgattttgaggtctgtgaccgccgcagacacggccgtgtattattgtgcgagaatttatgtcgaaaaattatataactgggaatcagaaggggctgcttttgatttctggggccaagggacactggtcaccgtctcttcag

SEQ ID NO: 305 - DNA, 388 bp, Homo sapiens
  source 1..388: mol_type = other DNA
caagtgcagctgcaggagtcgggccccggactggtgaagccttcggagaccctgtcactcacctgcactgtctctgggggctccatcagtagtcactattggacctggatccggcagcccccagggaagggactggagtggattggctatatctcctacagtgggagcaccaactacatcccctccctcaagagtcgagtcaccatatcactggacacgtccaagaaccagttgtccctgaaactgttctcactgaccgtcgcagacacggccgtgtattactgtgcgagacgggcccccccggagatatttggaagggttcctagatgggccagtaatgggtacttcgatgtctggggccgtggcgccctggtcactgtctcctcag

SEQ ID NO: 306 - DNA, 358 bp, Homo sapiens
  source 1..358: mol_type = other DNA
caggtgcagctggtggagtctgggggaggcgtggtccagcctggggggtccctgagactctcctgtgtagcgtctggattcaccttcagtagctttggcatgcactgggtccgccaggctccaggcaaggggctggagtgggtggcttttataccgtatgatggaagtaataaattttatgcagactccgttaagggccgattcatcatctccagagacaataccatgaacacactgtatctgcaaatgaacagcctgagagctgaggacacgactgtgtattactgtgcaaactcctacggttacttcgggggctttgaccactggggccagggaacgctggtcaccgtctcctcag

SEQ ID NO: 307 - DNA, 379 bp, Homo sapiens
  source 1..379: mol_type = other DNA
gaggtgcagctggtgcagtctgggggaggcctggtcaagcctggggagtccctgagactctcctgtgcagcctctggattcatcttcagtacctataacatgaactgggtccgccaggctccagggaaggggctggagtgggtctcatctattagtggtagtagtggtgaaagaagtcacatatcctacgcagactcagtgaagggccgattcaccatctccagagacgacgccaagaactcactgtatctgcaaatgaacagcctgagagccgaggacacggctgtgtattattgtgcgagagatggcgtcagtaactacgaagaggggggctggttcgacccctggggccagggaaccctggtcaccgtctcctcag

SEQ ID NO: 308 - DNA, 351 bp, Homo sapiens
  source 1..351: mol_type = other DNA
gaggtgcagctggtgcagtctggagcagaggtgaaaaagcccggggagtctctgaaaatctcctgtaagggttctggatacagttttagtagctactggatcgcctgggtgcgccagatgcccgggaaaggcctggagtggatgggggtcatctatcctggtgattctgaaaccagatacagtccgtccttcgaaggccaggtcaccctctcagccgacaagtccatcagcaccgcctacctgcagtggagttccctgaaggcctcggacaccgccatgtattactgtgcgagacggacggtagacgatatggacgtctggggccaagggactacggtcatcgtctcttca

SEQ ID NO: 309 - DNA, 355 bp, Homo sapiens
  source 1..355: mol_type = other DNA
caggtgcaactggtggagtctgggggaggcgtggtccagcctgggaggtccctgagactctcctgtgaagcctctgaagccagcttcagtagctatgctatgcactgggtccgccaggctccaggcaagggcctggagtggctgtcagttatatcatatgatggaattaagaaatactacgcagactccgtgaagggccgattcaccatctccagagacaattccatgaatacgttgtatctgcaaatgaacagcctgagagttgaagacacggctgtatattactgtgcgagaggttctggatggttcggagagtttcattggggccagggaaccctggtcaccgtctccacag

SEQ ID NO: 310 - DNA, 385 bp, Homo sapiens
  source 1..385: mol_type = other DNA
caactgcagctgcgggagtcgggcccaggactggtgaggccttcggagaccctgtccctcacctgctctgtctctggtggctccatcaggggtcgtagtacttactggggctggatccgccagcccccagggaaggggctggaatgcattgggagcacctttcatagtgggaccacctactacaacccgtccctcaagagtcgagtcaccatttcagtcgacacgtccaagaaccagttctccctgaacttgaggtctgtgaccgccgcggacacggccgtgtattattgtgcgagaatttatgccgaaaaattatataattgggaatcagaaggggctgcttttgatgtatggggccaagggacactggtcaccgtctcttcag

SEQ ID NO: 311 - DNA, 388 bp, Homo sapiens
  source 1..388: mol_type = other DNA
cagatcaccttgaaggagtctggtcctacgctggtgaaacccacacagaccctcacgctgacctgcaccttctctgggttctcactcattactcgtggagagggtgtggcctggatccgtcagcccccaggaaaggccctggagtggcttgcacacatttactggaatgataataagcactacagcccatctctgaagagcaggctctccgtcacgaaggacacctccaaaaaccaggtggtgtttacaatgagcaacatggaccctgtggacacagccacatattactgtgcacactggcgggactacgatattgagactagttattctacggggggtgatgcttttgatgtctggggccaaggggcaatggtcatcgtctcttcag

SEQ ID NO: 312 - DNA, 376 bp, Homo sapiens
  source 1..376: mol_type = other DNA
caggtgcacctacaacagtggggcgcaggactgttgaagccttcggagaccctgtccctcacctgcgcagcctctggtgggaccttcagtggttacttttggtactggatccgccagcccccagggaaggggctggagtggattggggaaatcaatcatactggaggcaccacctacaatccgtccctcaagagtcgagtcactatgtcactagacacgtcccagaaccagttctccctgaagttgacctctttgaccgccgcggacacggctgtctatttctgtgcgagaggcctggcgcctggttattatggaatggtcggtgggcccccgccctactactggggccagggaacactggtcaccgtctcctcag

SEQ ID NO: 313 - DNA, 379 bp, Homo sapiens
  source 1..379: mol_type = other DNA
gaggtgcgactggtgcagtctggagtagaagtgaaaaagcccggggagtctctgaagatctcctgtaaggcctctggatataacttcactaactactggatcggctgggtgcgccacaagcccgagaaaggcctggagtggatggggatcgtctaccctggtgactctgatagcaaatacaatccgtcattccaaggccaggtcgccatctcagccgacaagtccatcagtaccgcctatttgcagtggagcagcatgaaggcctcggacagcgccatgtattattgtgtgagagttgaccgatattgtgctaaaagtagttgctttggggcctggttcgagccctggggccagggaaccctggtcaccgtctcctcag

SEQ ID NO: 314 - DNA, 358 bp, Homo sapiens
  source 1..358: mol_type = other DNA
caggtgcagttggtgcagtctgggactgaggtgaagaagcctggatcctccgtgaaggtctcctgcaaggcttctggacctatcagctgggtgcgacaggcccctggagaagggcttgagtggatgggagggatcatccctatctttggagttccaaagttcgcacagaaattccagggccgagtcagcattagtgtggacgagtccacgagcacagcctacatggagttgaccagcctgagatctgacgacacggccgtctattactgtgcgagagctcgatctgaactttttggcagtgcctcgtacttggtctttgactcctggggccagggaacgctggtcgccgtctcctcag

SEQ ID NO: 315 - DNA, 351 bp, Homo sapiens
  source 1..351: mol_type = other DNA
gaggtgcagctggtgcagtctggagcagaggtgaaaaagcccggggagtctctgaagatctcctgtcaggcttctggtctctcctttaacacccactggatcggctgggtgcgccagatgcccgggaaaggcctggagtggatggggatcatctatcctggtgactctgataccagatacagcccgtccttccaaggccaggtcaccatctcagccgacaagtccatcaacaccgcctacctgcagtggagcagcctgaaggcctcggacaccgccatgtattactgtgcgagacgggcgaatagtgcctacgactactggggccagggaactctggtcaccgtctcctca

SEQ ID NO: 316 - DNA, 351 bp, Homo sapiens
  source 1..351: mol_type = other DNA
gaggtgcagctggtgcagtctggagcagaggtgaaaaagcccggggagtctctgaagatctcctgtcaggcttctggtttctcctttaacacccactggatcggctgggtgcgccagctgcccgggaaaggcctggagtggatggggatcatctatcctggtgactctgataccaaatacagcccgtccttccaaggccacgtcaccatctcagccgacaagtccatcaacaccgcctacttgcagtggaacagcctgagggcctcggacaccgccatgtattactgtgcgagacgggcgaatagtgcctacgactactggggccagggaactctggtcaccgtctcctca

SEQ ID NO: 317 - DNA, 367 bp, Homo sapiens
  source 1..367: mol_type = other DNA
caggtgcagctggtgcagtctgggcctgaggtgaagaaacctggggcctcagtgaaggtctcctgcaaggcttctggatacaccttcaccggctactatatgcactgggtgcgacaggcccctggacaagggcttgagtggatgggatggatcaaccctaacagtggtggcacaaactatgcacagaagtttcagggcagggtcaccatgaccagggacacgtccatcagctcagcctacatggaactgagcaggctgaaacctgacgacacggccgtgtattactgtgcgaaggagaaggggagcagctcgaattggagtggcaaagacttctggggccagggaaccctggtcgccgtctcctcag

SEQ ID NO: 318 - DNA, 388 bp, Homo sapiens
  source 1..388: mol_type = other DNA
caggtgcagctgcaggagtcgggcccaggactggtgaggccttcggagaccctgtcactcacctgcactgtctctggtggctccatcaatggtcaatattggagttggatccggcagcccccagggaagggattggagtggattggctacatttcgtacagtgggggcaccaattacatcccctccctcaagagtcgactcaccatgtcagtggacatgtcgaagagccagttgtccatgaaactgaagtcagtgactgtcgcagacacggccgtgtattactgtgcgagacgcgtccctccggagatatatggagtggttcctagatgggccagcaatgggtacttcgatctctggggccgtggcaccctggtcacagtctcgtcag

SEQ ID NO: 319 - DNA, 360 bp, Homo sapiens
  source 1..360: mol_type = other DNA
caggtccagctggtgcagtctggggctgaggtgaagaagcctgggtcctcagtgagggtctcctgcacggcttctggagtcaccttcagcggctctgctatcaactgggtgcgacaggcccctggacaggggcttgagtggatgggagggatcaccggagtctttgggacagcaaactacgcacagaagttccagggcagagtcgccattaccgcggacgcatccacgaccacaacctacatggagctgagcagcctgagatctgaggacacggccgtctattactgtgcgagagggcctacctactacaactcctacatggacgtctggggcaaagggaccacggtcaccgtctcctca

SEQ ID NO: 320 - DNA, 384 bp, Homo sapiens
  source 1..384: mol_type = other DNA
caggtgcagctgcaggagtcgggcccaggactggtgaagccttcggggaccctggccctcacctgcactgtctctggtgactccatcactcgttactactggaactggatccggcggcccgccgggaagggactggagtggattgggcatgtctttattagtgggagcaccaactacaacccctccctcaagagtcgagtcaccatgtcagtggacacgtccaagaaccagttctacctgaagctgagctctgtgaccgccgcggacacggccgtgtattactgtgcgagaggaaccccagaaataggaggagctggtatttggtcctattactactactacatggacgtctggggcaaagggaccacggtcaccgtctcctca

SEQ ID NO: 321 - DNA, 364 bp, Homo sapiens
  source 1..364: mol_type = other DNA
caggtccacctggtgcagtctgggactgaggtgaagaagcctgggtcctcggtgaaggtctcctgcaaggcttctggaggccccttcgtcagctatgccatcatctgggtgcgacaggtccctggacaagggcttgagtggatgggagggatcatccctatctttggctcgccgaactacgcacagaagttccagggcagagtcacgatcaccacggacgaatccacgagatcggcctacatggaactgcgcagcctgagatttgaggacacggccgtgtatttctgtgcgagtcgctacagtgaaaactacaattctgcctttgatgtctggggccaagggacagtggtcaccgtctcttcag

SEQ ID NO: 322 - DNA, 373 bp, Homo sapiens
  source 1..373: mol_type = other DNA
gaagtgcaactggtggagtctgggggaggcttggtgcagcctggcaggtccctgagactctcctgtgcagcctctggattcaactttgatgattatgccatgcactgggtccggcaacttccagggaagggcctacagtgggtctcaggtatcagttggaatagtgctaccatacactatgtggactctgtgaagggccggttcaccatctccagggacaacgccaggaactccctgtatctgcaaatgaacagtctgagaactgaggacacggccttgtattactgtacaaaagacttttatcatgatagtagtggcacaacagcgcccattgaccactggggccagggaaccccggtcaccgtcgtctcag

SEQ ID NO: 323 - DNA, 371 bp, Homo sapiens
  source 1..371: mol_type = other DNA
tgcaactggtgcagtctggggctgaggtgaagaagcctgggtcctcggtgaaggtctcctgcaaggcttctggaggcagtttcagtagttatataatcaattgggtgcgacaggcccctggacaaggacttgagtggatgggaggaatcacgcctgcccttgggtcagcagaccacgcagcgaaactccagggcagactcacgatgaccgcggacacatccacgaacatcgcctatatggaactgagtagcctgacatctggggacacggccgtctactattgtgcgagagagaggaggcgatttttggatgggggtgggtactacggcatggacctctggggccaagggaccacggtcatcgtctcctca

SEQ ID NO: 324 - DNA, 381 bp, Homo sapiens
  source 1..381: mol_type = other DNA
caggtccagctggtgcagtctggggctgaggtgaagaagcctgggtcctcggtgaaggtctcctgcaagacttctggaggcgccttcagcaactatggtatcagctgggtgcgacaggcccctggacaagggcttgagtggatgggagggatcatccctatctttggtacagcaaactacgcacagaagtttcagggcagagtcacgattaccgcggacgaatccacgaccacagcctacatggagctgagcagcctgagatctgaggacacggccgtttattactgtgcgagagataaggatttttggagaggtataaggggagactactactattacatggacgtctggggcatagggaccacggtcaccgtctcctca

SEQ ID NO: 325 - DNA, 373 bp, Homo sapiens
  source 1..373: mol_type = other DNA
gaggtgcagctgttggagtctgggggaggcttactacagcctggggggtccctgagactctcctgtacagcctctggattcacctttagcagctatgccatgagttgggtccgccaggctccagggcaggggctggagtgggtctcaactattagtgatagtggtattagcacatactacgcagactccgtgaagggccggttcaccatctccagagacaagaccaagaacacgttgtatctgcaaatgaacagcctgagagccgaggacacggccgtatattactgtgcgagagatcgggagaggatacagttatggttccgtggagcttttgatctctggggtcaagggacagtggtcaccgtctcttcag

SEQ ID NO: 326 - DNA, 376 bp, Homo sapiens
  source 1..376: mol_type = other DNA
gaggtacagttgttggagtctgggggaggcttggtacagccgggggggtccctgagactctcctgtgcagcctctggattcatgtttagtacctactccatgaattgggtccgccagtgtccaggaaaggggctggagtgggtctcagttattgctggaagtggcgatagcacatcctacgcaggctccgtgaagggccggttcaccatctccagagacaattccaagaatacactgtatctgcaaatgaacagcctgagagccgaggacacggccttatattactgtgcgaaaggccaactttgggacaaaagtgttactttttatcgcccccttgagtcctggggccagggaaccctggtcaccgtctcctcag

SEQ ID NO: 327 - DNA, 384 bp, Homo sapiens
  source 1..384: mol_type = other DNA
caggtgcagctgcaggagtcgggcccaggactggtgaagccttcacagaccctgtccctcacctgcactgtctctggtggctccatcagcagtggtgattactactggagttggatccgccagcccccagggaagggcctggagtggattgggtacatctattacagtgggagcacctactacaacccgtccctcaagagtcgagttaccatatcagtagacacgtccaagaaccagttctccctgaagctgagctctgtgactgccgcagacacggccgtgtattactgtgccagagatccacagattaagtacggcctgcccgtttactactactacggtatggacgtctggggccaagggaccacggtcaccgtctcctca

SEQ ID NO: 328 - DNA, 352 bp, Homo sapiens
  source 1..352: mol_type = other DNA
gaggtgcagctgttggagtctgggggaggcttggtacagcctggggggtccctgagactctcctgtgcagcctctggattcacctttagcagctatgccatgagctgggtccgccaggctccagggaaggggctggagtgggtctcagctattagtggtagtggtggtagcacatactacgcagactccgtgaagggccggttcaccatctccagagacaattccaagaacacgctgtatctgcaaatgaacagcctgagagccgaggacacggccgtatattactgtgcgaaacggattcggggagtctttgactactggggccagggaaccctggtcaccgtctcctcag

SEQ ID NO: 329 - DNA, 370 bp, Homo sapiens
  source 1..370: mol_type = other DNA
gaagtgcagctgttggagtctgggggaaacttgatacagcctggggggtccctgagactctcctgtgcagcctctggattcacctttagcatctatgccatgagctgggtccgccaggctccagggaaggggctggagtgggtctcatctattagtggtaatgatggtgccacatactacggagactccgtgaagggccggttcaccatctccagagacaattccaagaacacgctgtatttgcaaatgagcagcctgagagccgaggacacggccgtatattactgtgtgaaagattgggagcgagaatcttgtaatggtgattgcctaagtaactggggccgggggaccctggtcaccgtctcctcag

SEQ ID NO: 330 - DNA, 388 bp, Homo sapiens
  source 1..388: mol_type = other DNA
cacctggaggagtctgggggaggcttggtccagcctggggggtccctgaggctctcctgtgtaggctctggattcacctttagtaaatattggatgaattgggtccgccaggctccagggagggggctggagtgggtggccaacataaagcaagatggaagtgagacgttctatggggactctgtgaagggccgattcgccatctccagagacaacgccaggaactcgttgtatctgcaactgaacagcctgagagccgaggacacggctttgtattactgtgcgagaatcagagaccgactgagagacggggacgacgatgactacctgggtccttatgatgcttttgatatctggggccaagggacaatggtcaccgtctcttcag

SEQ ID NO: 331 - DNA, 370 bp, Homo sapiens
  source 1..370: mol_type = other DNA
gaggtgcagctgttggagtctgggggaggcttggtccaacctggggggtccctgagactctcctgtgcagcctctggattcacctttaccaactatgtcatgacctgggtccgccaggctccagggaaggggctggagtgggtctcagcgattagtggtagtggtcttagcacatactacgcagactccgtgaagggccggttcaccatctccagagacaattccaagaacacactgtatctgcaaatgaatagcctgagagccgaggacacggccgtctattactgtgcgaaagccgagcgacattatataccaatggccggatactttgactactggggccagggaaccctggtcaccgtctcctcag

SEQ ID NO: 332 - DNA, 381 bp, Homo sapiens
  source 1..381: mol_type = other DNA
gaggtgcagctggtggagtctgggggaggcttggcacagccagggcgctccctgagactctcctgtacagcctctggattctcccttggtgattatggtatgacctgggtccgccaggctccagggaaggggctggagtgggtagcattcattagaagcaaatcttatggtgggacagcagaatacgccgcgtctgtgcaaggcagattcaccatctcaagagatgattctaagagcatcgtctacctgcaaatgaacagcctgaaaagggaggacacagccatatattactgtaccagagatctctccctcggtagactactccgttccactgacggcttggacgtctggggccaagggaccacggtcaccgtctcctca

SEQ ID NO: 333 - DNA, 364 bp, Homo sapiens
  source 1..364: mol_type = other DNA
gaggtgcagctggtgcagtctggagcagaagtgaaggagccgggggagtctctgaaggtctcctgtcagggttctggatacacctttaccagttactggatcggctgggtgcgccagatgcccgggaaaggcctggagtgggtgggggtcatctatcctggagactctgataccagatacaccccgtcgttccaaggccaggtcaccatgtcagtcgacaaggccgtcagcaccgcctatttgcagtggagcagcctgaaggcctcggacaccgccatgtattactgtgcgagacatcatcaccctcgttggtgggaggtgattgactactggggccagggaaccctggtcaccgtctcctcag

SEQ ID NO: 334 - DNA, 364 bp, Homo sapiens
  source 1..364: mol_type = other DNA
caggtgcagctgcaggagtcgggcccaggactggtgaagccttcggagaccctgtccctcacctgcactgtctctggtggttccatcagtaatttctactggagctggatccggcagcccccagggaagggactggagtgcattgggtatatccattacagtgggaggaccaactacaacccctccctcaagagtcgagtcaccatatcagtagacacgtccaagaaccagttctccctgaacctgaactctgtgaccgctgcggacacggccgtatatttctgtgcgagagataggacggggccgtcggactataatgcttttgatatctggggccaagggacaatggtcaccgtctcttcag

SEQ ID NO: 335 - DNA, 378 bp, Homo sapiens
  source 1..378: mol_type = other DNA
gaggtgcagctggtggagtctgggggaggcttggtccagcctggggggtccctgagactctcctgtgcagcctctggattcacctttagtagctattggatgagctgggtccgccaggctccagggaaggggctggagtgggtggccaacataaagcaagatggaagtgagaaatactatgtggactctgtgaagggccgattcaccatctccagagacaacgccaagaactcactgtatctgcaaatgaacagcctgagagccgaggacacggctgtgtattactgtgcgagagatcggcgaataggcagctggccagactactactactacggtatggacgtctggggccaagggaccacggtcaccgtctcctca

SEQ ID NO: 336 - DNA, 384 bp, Homo sapiens
  source 1..384: mol_type = other DNA
caggtccatctggtgcaatctggggctggggtgaagaagccggggtcctcggtgaaggtctcctgcaaggcttctggaggctccttcagcagtgatgctatcaactgggtgcgacaggcccctggacaagggcttgagtggatgggagggatcatccctgcccttggttcaggaaactacgcacagaacttccagggcagagtcacgataactgcagacgagcccactaccacagtctatctggaactgaccagtctgagatctcaggacacggccgtctattattgtgcgagaggagggggcgcggggagttctactttcgactatcagtactactactacatggatgtgtggggcagagggaccacggtcaccgtctcctca

SEQ ID NO: 337 - DNA, 376 bp, Homo sapiens
  source 1..376: mol_type = other DNA
caggtgcagctggtgcagtctggggctgaggtgaagaagcctggatcctcggtgaaagtctcctgcatggcttctggaggcgccttcagcagctatgctatcgcctggatgcgacaggcccctggacaagggcttgagtggatgggaggcatcatccctatcgatgctacaccaaactactcacagagattccaggacagagtcacgattaccgcggacagatccacgaccacagccttcatggagctgcgcagcctgagatctgaggacacggccgtgtattactgtgcgagagggaaggctattaccatttttggactggttacgtcatactttgactactggggccagggaaccatggtcaccgtctcctcag

SEQ ID NO: 338 - DNA, 370 bp, Homo sapiens
  source 1..370: mol_type = other DNA
gaggtgcagttggcggagtctgggggaggtttggtccagcctggggggtccctgagactctcctgtgcagcctctggattcaccttgagtacctattggatgacgtgggtccgccaggctccagggagggggctggagtgggtggccaacataaagtacgatggaagtgagggaagctatctggactctgtgaagggccgcttcaccgtgtccagagacaacgccaagaactcactgtttctggaaatgaacaacctgagagccgaggacacggccgtgtattactgtgcgaggctatatttatttgaggatagtggttaccgaagcattgactattggggccagggaaccctggtcaccgtctcctcag

SEQ ID NO: 339 - DNA, 384 bp, Homo sapiens
  source 1..384: mol_type = other DNA
caggtccagctggtgcagtctggggctgaggtgaagaagcctgggtcctcggtgaaggtctcctgcaaggcttttggaggcaccttcagcagctctgccatcaactgggtgcgacaggcccctggacaagggcttgaatggatgggagggatcatccctttcattggcacagcaaactacgcacagaagttccagggcaaagtcacgattaccgcggacaaatccacgagcacagcctacatggagctgagtagcctgagatctgaggacacggccgtctacttctgtgcgagaggagggggttcggggagttctaatttcaattatcagtactactactacatggatgtctggggcaaagggaccacggtcaccgtctcctca

SEQ ID NO: 340 - DNA, 349 bp, Homo sapiens
  source 1..349: mol_type = other DNA
caggtgcagctggtggagtctgggggaggcttggtcaagcctggagggtccctgagactctcctgtgcagcctctggattcagcttcagtgactcctacatgagctggatccgccaggctccagggaaggggctggagtgggtctcatacattagtggtagtggtactaccatatactacgcagactctgtgaagggccgattcaccatctccagggacaacgccaagaactcactgtatctgcaaatgaacagcctgagagccgaggacacggccgtatattactgtgcgagagccccagtagaggtgggctactggggccagggaaccctggtcaccgtctcctcag

SEQ ID NO: 341 - DNA, 367 bp, Homo sapiens
  source 1..367: mol_type = other DNA
caggtccagatggtgcagtctggggctgaggtgaagaagcctgggtcctcggtgaaagtctcctgcaaggcttctggagtctttttcagcagcaatgctctcaactgggtgcgacaggcccctggacaagggcttgagtgggtgggagggatcatggctctctttggtgcaccaaactacgcacagaagttccagggcagagtcacgattactacggacgaatccacgagcacagcctacatggagctgagtagcctgagatctgaggacacggccgtgtattactgtgcgagaggaatggggtacagctatgttaatggagcttctgatatctggggccaagggacaatggtcatcgtctcttcag

SEQ ID NO: 342 - DNA, 376 bp, Homo sapiens
  source 1..376: mol_type = other DNA
cagatcaccttgaaggagactggtcctgcgttggtgaaacccaaacagaccctcacgctgacctgcaccttctctgggttctcactcagcactaaaagggtgggtgtggcctggatccgtcagcccccaggaggggccctggagtggcttgcagtcatttattgggatgatgataagcgctacagcccatccctagaaaacaggctcaccatctacaaggacacctcccggaaccaggtggtccttacaatgaccaacatggaccctgtggacacagccacatactactgtgcgcacattgtggtagttccggctgctcagtcgaaagatgcttttgatttctggggcccaggggcagtggtcaccgtctcctcag

SEQ ID NO: 343 - DNA, 370 bp, Homo sapiens
  source 1..370: mol_type = other DNA
caggtccagctggtgcagtctgggcctgaggtgaagaagcctgggtcctcggtgaaggtctcctgcaagtcttctggaggcaccttcatcagctatgctatcaactgggtgcgacaggcccctggacaagggcttgagtggatgggagggatcgtccctgtctttcctacaccaaactacgcacagaaattccagggcagagtcacgattaccacggacgtgtccacgagcacagcctacatggaactgagcagcctgacatctgaggacacggccgtttattactgtgcgcactcgggggctgggagctaccgaaactcacaagcctttgactactggggccggggaaccccggtcaccgtctcctcag

SEQ ID NO: 344 - DNA, 376 bp, Homo sapiens
  source 1..376: mol_type = other DNA
caggtccagttggtgcagtctggggctgaggtgaagaagcctgggtcctcggtgagggtctcctgcaaggcttctggaggcagtttcaccaggcatgctatcagttgggtgcgacaggcccctggacaaggggtagagtggatgggagggatcatccctatttttgatacagcaaactacgcacagaagttccagggcagagtcacgattaccgcggacaaatccaccagtacagcctacatggagttgaacagcctgagatctgaagacacggccgtgtattactgtgcgagcccgtatttcgattttcggagtggttatacgagtggtgcttttgatatctggggccaagggacaatggtcaccgtctcttcag

SEQ ID NO: 345 - DNA, 384 bp, Homo sapiens
  source 1..384: mol_type = other DNA
caggtccagctggtgcagtctggggctgaggtgaagaagcctgggtcctcggtgaaggtctcctgcaaggcttctggaggccccttcagcagctatgctatcaactgggtgcgacaggcccctggacaagggcttgagtggttgggagggatcatccctgcccttggttcaggaaactacgcacagaacttccagggcaaagtcacgattaccgcggacgaatccacgagcacagcctatatggaattgagcagcctgagatctgaggacacggccgtgtattactgtgcgagaggagggggttcggggagttctaatttcgattatcagtactactactacatggatgtctggggcaaagggaccacggtcaccgtctcctca

SEQ ID NO: 346 - DNA, 361 bp, Homo sapiens
  source 1..361: mol_type = other DNA
caggtccagttggtgcagtctggggctgaggtgaaggagcctgggtcctcggtgagggtctcctgccaggcttctggaggcaccttcagcagctatagtgtcacctgggtgcgacaggcccctggacaagggcttgagtggatgggaggaatcatcggtatgtttgggacaacaaggtacgcacagagcttgcagggcagagtcacgattaccgcggacgaaatgacgagcactgcctacatggagctgagcagcctgagatctgaggacacggccgtatatttttgtgcgagagcgcccggttattatgattcgtacctcgaaatctggggccaagggacaatggtcaccgtgtcttcag

SEQ ID NO: 347 - DNA, 367 bp, Homo sapiens
  source 1..367: mol_type = other DNA
gaggtgcggctgttggagtctgggggaggcttggtgcaacctggggggtccctcagactctcctgtgcagcctctggattcacctttagcagctatgtcatgaactgggtccgccaggctccagggaaggggctggagtgggtctcatctattagtggtagtggtattagcacatactacgcagactccgtgaagggccggttcaccatctccagagacagttccaagaacgcgctgtatctgcaaatgaacagcctgagcgccgaggacacggccgtgtattactgtgcgaaatcagtcaaaggaatagtagcagctggcctatttgactactggggccagggaaccctggtccccgtctcctcag

SEQ ID NO: 348 - DNA, 364 bp, Homo sapiens
  source 1..364: mol_type = other DNA
caggtccagctggtgcagtctggggctgaggtgaagaagcctgggtcctcggtgaaggtctcctgcaaggcttctggaggcaccttcagcagctatgctatcagctgggtgcgacaggcccctggacaagggcttgagtggatgggagggatcatccctatctttggtacagcaaactacgcacagaagttccagggcagagtcacgattaccacggacgaatccacgagcacagcctacatggagctgagcagcctgagatctgaggacacggccgtgtattactgtgcgagatccggaataactgctcaaacgaactggttcgacccctggggccagggaaccctggtcaccgtctcctcag

SEQ ID NO: 349 - DNA, 352 bp, Homo sapiens
  source 1..352: mol_type = other DNA
gaggtgcagctgttggagtctgggggaggcttggtacagcctggggggtccctgagactctcctgtgcagcctctggattcacctttagcagctatgccatgagctgggtccgccaggctccagggaaggggctggagtgggtctcagctattagtggtagtggtggtagcacatactacgcagactccgtgaagggccggttcaccatctccagagacaattccaagaacacgctgtatctgcaaatgaacagcctgagagccgaggacacggccgtatattactgtgcgaaagatggtatcttaagttatgactactggggccagggaaccctggtcaccgtctcctcag

SEQ ID NO: 350 - DNA, 381 bp, Homo sapiens
  source 1..381: mol_type = other DNA
caggtgcagctggtgcagtctggggctgaggtgaagacgcctggggcctcagtgagggtctcctgcaaggcttctggatactccttcaccagttatgatataatctgggtgcgacaggccactggacaaggacttgagtggatgggatggatgctccctgacagtggtaacacaggctatgcacagaagttccagggaagagtcaccatgacccggagcacctccataagtacagcctacatggacctgagcgggctgagatctgaggacacggccgtgtattactgtgcgagaggcggggccattacaggtcctggagtggttatgaatcactacgggatggacgtttggggccaagggaccacggtcatcgtctcctca

SEQ ID NO: 351 - DNA, 346 bp, Homo sapiens
  source 1..346: mol_type = other DNA
gaggcgcagctggtggactctgggggaggcttggtccagcctggggggtccctaagactctcctgtacagcctctggaatcaccgtcagtgactactacatgaactgggtccgccaggctccagggaaggggctggaatgggtctcacttctttatcccgatggtaagacatactatgccgactccgtgaggggccgcttcgccatctccagagataattccaggaacacagtatattttcaaatgaacagcctgagaactgacgacacggctgtatattactgcgcgggtggtgactggggaattgactactggggccagggaaccctggtcaccgtctcctcag

SEQ ID NO: 352 - DNA, 376 bp, Homo sapiens
  source 1..376: mol_type = other DNA
cagatcaccttgaaggagtctggtcctacgctggtgaaacccacacagcccctcacgttgacctgcaccttctctggattctcactcagcaccaggagagtgggtgtggcctggatccgtcagcccccaggaaaggccctggagtggcttggaatcatttattgggatgatgataaacgctacaccccatctctggagaacaggctcaccatcaccaaggacacctccaaaaaccaggtggtcctttccatgaccaacatggaccctgtggacacagccacatattactgtgcacacattgtcgtagtgccggctgctgagtcgacagatgcttttgatgtctggggccaagggacaaaggtcaccgtctcttcag

SEQ ID NO: 353 - DNA, 361 bp, Homo sapiens
  source 1..361: mol_type = other DNA
caggtccagctggtgcagtctggggctgaggtgaagaagcctgggtcctcggtgaaggtctcctgccaggcttctggaggcaccttcagcagctatgctatcagctgggtgcgacaggcccctggacaagggcttgagtggatgggagggatcatcggtatgtttggtacaacaaactacgcacagaagttccagggcagagtcacgattaccgcggacgaattgacaagcactgcctacatggaactgagcagcctgagatctggggacacggccatgtattattgtgcgagagcgcccggttactatgattcctaccttgatatctggggccaagggacattggtcaccgtgtcttcag

SEQ ID NO: 354 - DNA, 384 bp, Homo sapiens
  source 1..384: mol_type = other DNA
caggtccagctggtgcagtctggggctgaggtgaagcagcctgggtcctcggtgaaggtctcctgcaaggcttctggaggcaccttcagcagctatggtttcacctgggtgcgacaggcccacggacaagggcttgagtggatgggagggatcatccctgccattggaacagcaaactacgcacagaagttccagggcagagtcacgattaccgcggacgagtccacgaccacagcctacatggcgctgagcagcctgagatctgaggacacggccgtatattactgtgcgagaggagggggttcggggagttctaatttccattaccagtattactaccacatggacgtctggggcaaagggaccacggtcaccgtctcctca

SEQ ID NO: 355 - DNA, 376 bp, Homo sapiens
  source 1..376: mol_type = other DNA
gaggtgcagttgtgggagtctgggggcggcttggtgcggccgggggggtccctgagactctcctgtgcagcctctggattcacgttttatacctatgccatgaattgggtccgccagtctccaggaaaggggctggagtgggtctcagttattgctggcagcggcgatagcacatcgtacggagactccgtgaagggccggttcaccatctccagagacaattccaagaatgtggtgtatctgcaaatgaacagcctgagagccgaggacacggccttctattactgtgcgaaaggccaactttgggacagaagtgttactttttatcgcccccttgagtcctggggccggggaaccctggtcaccgtctcctcag

SEQ ID NO: 356 - DNA, 373 bp, Homo sapiens
  source 1..373: mol_type = other DNA
gaagtgcaactggtggagtctgggggagtcgtggtgcagccgggggggtccctgagactctcctgtgcagcctctggattcacctttaatgattatgccatgcactgggtccgtcaaggtccggggaggggtctggagtgggtctctcttattaattgggatggtagtgacacctactattcagactctgtggagggtcgattcaccatctccagagacaacgacaaaagctccctgtatctgcaaatgaacagtctgagatttgaggacaccgccgtctattactgtgcaagggggggatattacttcaaacctccagagcagattcaggcggactattggggccggggaaccctggtcatcgtcacctcag

SEQ ID NO: 357 - DNA, 376 bp, Homo sapiens
  source 1..376: mol_type = other DNA
caggtccagctggtgcagtctgggactgaggtgaagaagcctgggtcctcggtgaaagtctcctgccaggcttcgggaggcattttcaacagctatggtatcagttgggtgcgacaggcccctggacaaggccttgagtggatgggcggcatcatcgctatctttaatacaccaaaatacgcacagaagttccagggcagagtcacgataagcatggacgaatcaacgaggacagtctacatggagctgaggagcctgaaacctgaggacacggccgtgtattactgtgcgagacaccaggggtactcagtggctggtcaggggagagagtacttcgacccctggggccagggaaccctggtcaccgtctcctcag

SEQ ID NO: 358 - DNA, 367 bp, Homo sapiens
  source 1..367: mol_type = other DNA
gaagttcacttggtggagtctgggggaggcttggtacagacgggggggtccctgagactctcttgtggagcctctggattcacctttagagactatgccatgacctgggtccgccaggctccagggaaggggctggagtgggtctcaactactagaaacaaccgtggtcgcacatcttacgcagactccgtgaagggccggttcaccatctccagagacgattccaagaacaccttgtatctacaaatgaacagcctgagagccgaggacacggccgtatattactgtgcgaaagatatgagaagtgggagtgacttcccactctttgacttttggggccagggaaccctagtcaccgtctcctcag

SEQ ID NO: 359 - DNA, 363 bp, Homo sapiens
  source 1..363: mol_type = other DNA
caggtccaggtggtgcagtctggggctgaggtgaggaagcctgggtcctcggtgaaggtctcctgcaagacttctggaggcatcttccgcagccatgctatcaactgggtgcgacaggcccctggacaagggcttgagtggatgggagggatcatcgctatctttggaacagcaaactacgcacagaagttccagggcagacttacaattaccgcggacgaatccacgagcacagcctacatggagctgagcagcctgagatttgaggacacggccgtgtatttctgtgcgagagggggtggttatcactaccagaactacatggacgtctggggcaaagggaccacggtcaccgtctcctca

SEQ ID NO: 360 - DNA, 361 bp, Homo sapiens
  source 1..361: mol_type = other DNA
caggtgcagctggtgcagtctggggctgaggtgaagaagcctgggtcctcggtgagggtctcctgcaaggcttctggaggccccttcagaaactttgctatcagctgggtgcgacaggcccctggacaaggccttgagtggatgggagggatcaccgctgtctttggcacaacaacctacgcacagaagttccagggcagagtcacgatgaccgcggacgaatccacgaccacagcctatttggaactgagcagcctcagatatgaagacacggccatgtactactgtgcgagaagtcagacatattacttgggattccttgactactggggccagggagccctggtcaccgtctcctcag

SEQ ID NO: 361 - DNA, 358 bp, Homo sapiens
  source 1..358: mol_type = other DNA
caggtgcagctggtgcagtctggggctgaggtgaagaagcctgggtcctcggtgaaggtctcctgcaaggcttctggaggcaccttaagtgactatactatcagctgggtgcggcaggcccctggacaagggcttgagtggatgggagggaccatgcctctctttggcacaccaatctacgcacagaagttccaggacagagtcgcgattaccgcggacagatccacgaacacagctgacttggagctgggcagcctcagagctgacgacacggccatatattactgtgcgacaatggataactggaagatgtctggtgcttactggggccagggaaccctggtcaccgtctcctcag

SEQ ID NO: 362 - DNA, 373 bp, Homo sapiens
  source 1..373: mol_type = other DNA
gacgtacaattgttggtgtctgggggaggcttggtccagcctggggggtccctgagactctcctgtgcagcctctggattcacctttagcaggtttaccatgtactgggtccgccagtctccagggaaggggctggagtgggtctcatctattagtggtagcggtcttagtacatacttcgcagactccgtgaagggccggttcaccctctccagagacaattccaagaacaggctgactctgcaactgagcagactgagagccgaggacacggccatatattactgtgcgaaagacctagtaccatctgccccttatgccgagggtgcttttgatatctggggccaagggacaatggtctccgtctctacag

SEQ ID NO: 363 - DNA, 394 bp, Homo sapiens
  source 1..394: mol_type = other DNA
gaggtgcaggtggtggagtctgggggaggcttggtaaagccgggggggtcccttagactctcctgtggagcctctggattcattttcagtaacgcctggatgagttgggtccgccaggctccaggggggggactggagtgggttggccgtattaaaagcaaccctaacggtgggacaagagactacgctgcacccgtaaaaggcagattcaccatctcaagagacgattcaaaaaatctgatgtatctacaaatgaacagcctgaaagccgaagacacaggcgtgtattactgtaccatagttaagaggttctacgattctttgactggttactccgaggtcggtgaatatttccagtactggggccggggcaccctggtcaccgtctcctcag

SEQ ID NO: 364 - DNA, 387 bp, Homo sapiens
  source 1..387: mol_type = other DNA
caggtgcagctacagcagtggggcgcaggactgttgaagccttcggagaccctgtccctcacctgcgctgtctatggtgggtccttcagtggttactactggagctggatccgccagcccccagggaaggggctggagtggattggggaaatcaatcatagtggaagcaccaactacaacccgtccctcaagagtcgagtcaccatatcagtagacacgtccaagaaccagttctccctgaagctgagctctgtgaccgccgcggacacggctgtgtattactgtgcgagaggctcgggcgggtactatggttcagggagttattacgactactactactacggtatggacgtctggggccaagggaccacggtcaccgtctcctca

SEQ ID NO: 365 - DNA, 379 bp, Homo sapiens
  source 1..379: mol_type = other DNA
gaggtgcagctgttggagtctgggggaggcttggtacagcctggggggtccctgagactctcctgtgcagcctctggattcacctttagcagctatgccatgagctgggtccgccaggctccagggaaggggctggagtgggtctcagctattagtggtagtggtggtagcacatactacgcagactccgtgaagggccggttcaccatctccagagacaattccaagaacacgctgtatctgcaaatgaacagcctgagagccgaggacacggccgtatattactgtgcgaaatggggtggggggctgaagcagctggtactggtgggcgatgcttttgatatctggggccaagggacaatggtcaccgtctcttcag

SEQ ID NO: 366 - DNA, 367 bp, Homo sapiens
  source 1..367: mol_type = other DNA
caggtccagctggtgcagtctggggctgaggtgaagaagcctgggtcctcggtgaaggtctcctgcaaggcttctggagccaccttcagcagctatgctatcagctggctgcgacaggcccctggacaagggcttgagtggatgggagggatcatccctatctttcgtacaacaaactacgcacagaagttccagggcagagtcacgattaccgcggacgatttcatgaacacagcctacatggaactgagcagcctgagatctgaggacacggccgtgtattactgtgcgagaggaagtgggagctacttaacgtacaactggttcgacccctggggccagggaaccctggtcaccgtctcctcag

SEQ ID NO: 367 - DNA, 382 bp, Homo sapiens
  source 1..382: mol_type = other DNA
caggtgcagctggtggagtctgggggaggcgtggtccagcctgggaggtccctgagactctcctgtgcagcctctggattcaccttcagtagctatggcatgcactgggtccgccaggctccaggcaaggggctggagtgggtggcagttatatcatatgatggaagtaataaatactatgcagactccgtgaagggccgattcaccatctccagagacaattccaagaacacgctgtatctgcaaatgaacagcctgagagctgaggacacggctgtgtattactgtgcgaaaggcagagagccgtattacgatttttggagtgccctaatgggtccgatgggctactggggccagggaaccctggtcaccgtctcctcag

SEQ ID NO: 368 - DNA, 343 bp, Homo sapiens
  source 1..343: mol_type = other DNA
gtgcagttgatggagtctgggggcggcttggtccagccgggggggtccctgagactctcctgtacagcccctggactcagcatcagtaataattacatgaactgggtccgccaggctccagggaaggggctggagtgggtctcaattattaatatcgacggtactaaaaagtacgcagactccgtgaagggccgattcaccatctccagagacaattccgcgaacacactgcatcttcaaatgaacgccctgagacctgacgacacggctctgtattactgtgcggggggggactggggaattgattactggggcctgggaaccttggtcaccgtctcctcag

SEQ ID NO: 369 - DNA, 364 bp, Homo sapiens
  source 1..364: mol_type = other DNA
gacgtgcaactggtggagtctgggggaggcttggtccagcctggagggtccctgagactctcctgtgcagcctctggactcaccctcattgactactacatcgactgggtccgccaggctccagggaaggggctggagtggtttggtgctatcagaaatagagctaagagttacagcacagaatacgccgcgtctgtggaaggcagattaaccgtctcaagagatgattcacaaaattcagcgcatctgcaactgaatggcctgaaaatcgacgatacggccgtctattattgtcttatttggaaggagggcgacaactggaagccttactggggccggggaaccctggtcaccgtctcctcag

SEQ ID NO: 370 - DNA, 393 bp, Homo sapiens
  source 1..393: mol_type = other DNA
gaggtgcagctggtggagtctgggggaggcttggtacagccagggcggtccctgagactctcctgtacagcttctggattcacctttggtgattatgctatgagctgggtccgccaggctccagggaaggggctggagtgggtaggtttcattagaagcaaagcttatggtgggacaacagaatacgccgcgtctgtgaaaggcagattcaccatctcaagagatgattccaaaagcatcgcctatctgcaaatgaacagcctgaaaaccgaggacacagccgtgtattactgtactagccttggatattgtagtggtggtagctgctcacagtactactactactacggtatggacgtctggggccaagggaccacggtcaccgtctcctca

SEQ ID NO: 371 - DNA, 369 bp, Homo sapiens
  source 1..369: mol_type = other DNA
caggtgcagctggtggagtctgggggaggcttggtcaagcctggagggtccctgagactctcctgtgcagcctctggattcaccttcagtgactactacatgagctggatccgccaggctccagggaaggggctggagtgggtttcatacattagtagtagtagtagttacacaaactacgcagactctgtgaagggccgattcaccatctccagagacaacgccaagaactcactgtatctgcaaatgaacagcctgagagccgaggacacggccgtgtattactgtgcgagagatagcgagtttgtcccagccggacgggggttcatggacgtctggggcaaagggaccacggtcaccgtctcctca

SEQ ID NO: 372 - DNA, 370 bp, Homo sapiens
  source 1..370: mol_type = other DNA
gaggtgcagctggtggagtctgggggaggcttggtccatcctggggggtccctgagactctcctgtgcagcctctggattcacctttagttcctattctatgacctgggtccgccaggctccagggaaggggccggagtgggtggccaacataaaggaagatggaagtgagatatactatgtggactctgtgaagggccgatttaccatctccagagacaagtccaagtactcactggatctgcaaatgaacagcctgagagccgaggacacggccgtgtattactgtgcgagaaaccttttgtacgaaagcagtacttatcggcctcttgactactggggccagggaaccctggtcaccgtctcctcag

SEQ ID NO: 373 - DNA, 360 bp, Homo sapiens
  source 1..360: mol_type = other DNA
caggtccagctggtgcagtctggggctgaggtgaagaagcctgggtccgcggtgaaggtctcctgccaggcttctggaggcattttcaacagctatgccatcagctgggtgcgacaggcccctggacaagggcttgagtggatgggagggatcatcggtgtctttggaactgtaaattatgcacagatgttccagggcagagtcacgataaccacggacgaatccacgagcacaatctacatggagctgaccagcctgacatctgaggacacggccgtgtattactgtgcgagaggaccaacttattactacaactacatggacgtctggggcaaagggaccacggtcaccgtctcctca

SEQ ID NO: 374 - DNA, 376 bp, Homo sapiens
  source 1..376: mol_type = other DNA
gaggtgcagctggtggagtctgggggaggcttggtaaagcctggggggtcccttagactctcctgtgcagcctctggattcactttcagtaacgcctggatgagctgggtccgccaggctccagggaagggactggagtgggttggccgtattaaaagcaaaactgatggtgggacaacagactacgctgcacccgtgaaaggcagattcaccatctcaagagatgattcaaaaaacacgctgtatctgcaaatgaacagcctgaaaaccgaggacacagccgtgtattactgtaccacagatcagttattactatggttcggggagttattattatcctactggggccagggaaccctggtcaccgtctcctcag

SEQ ID NO: 375 - DNA, 364 bp, Homo sapiens
  source 1..364: mol_type = other DNA
caggtgcaattggtgcagtctggggctgaggtgaagaagcctgggtcctcggtgagggtctcctgcaaggcttctgcagacaccttcagaagctatcttatcaattgggtgcgacaagcccctggacaggggcttgagtggatgggaaggatcctccctacatttggcacaacaagatacgcacagaagttccagggcagagtcacgatgaccgcggacgcatccacgggtacagcctatatggagctgagtagcctcagatctgacgacacggccgtgtattactgtgcgagagttttgacggggagatggctacaattaggacccgagtggggccagggaaccctggtcaccgtctcctcag

SEQ ID NO: 376 - DNA, 390 bp, Homo sapiens
  source 1..390: mol_type = other DNA
caggtgcagctggtggagtctgggggaggcgtggtccaacctgggaggtccctgagactctcctgtgcagcctctggattcgccatcagtagttatggcatgcactgggtccgccaggctccaggcaaggggctggagtgggtggcagttatatggtttgatggaagtggtaaatactatgcagactccgtgaagggccgattcaccatctccagagacaattccaagaacacgctatatctggtaatgaacagcctgagacctgaggacacggctgtgtattactgtgcgaaagatgggggttgtagtagtaccagctgctatatggctcactactattcctactacatggacgtctggggcaaagggaccacggtcaccgtctcctca

SEQ ID NO: 377 - DNA, 393 bp, Homo sapiens
  source 1..393: mol_type = other DNA
caggtccagctggtgcagtctggggctgaggtgaagaagcctgggtcctcggtgaaggtctcctgcaaggcttctggaggcaccttcagcagctatgctatcagctgggtgcgacaggcccctggacaagggcttgagtggatgggagggatcatccctatctttggtacagcaaactacgcacagaagttccagggcagagtcacgattaccacggacgaatccacgagcacagcctacatggagctgagcagcctgagatctgaggacacggccgtgtattactgtgcgagaggtacggttgtagtagtaccagctgctattccacctaccagctactactactactacatggacgtctggggcaaagggaccacggtcaccgtctcctca

SEQ ID NO: 378 - DNA, 376 bp, Homo sapiens
  source 1..376: mol_type = other DNA
caggtccagctggtgcagtctggggctgaggtgaagaagcctgggtcctcggtgaaggtctcctgcaaggcttctggaggcattctcaacaagtatgctatcagctgggtgcgacaggcccctggacaagggcttgagtggatgggaggggtcaccgctctctttggaacaacaaactacgcacagaacttccagggcagagtcacgataagtacggacaaatccacgaccacagtctacatggagctgagcagcctgagatctgacgacacggccgtatattactgtgcgagacaccaggggtactcagtggctggtcaggggagagagtggttcgacccctggggccagggaaccctggtcaccgtctcctcag

SEQ ID NO: 379 - DNA, 382 bp, Homo sapiens
  source 1..382: mol_type = other DNA
gaggtacaactggtggagtctgggggaggcttggtccagccgggggggtccctgagactctcctgtacagcctctggaatcaactttgttggttattggatgagttgggtccgccaggctccagggaaggggctggagtgggtggccaacttaaatcaacgtggaagtgagaaatactatgtggactctgtgaggggccggttcaccatctccagagacaacgccaagaactcgttgtatctgcaaatgaacagcctgcgagtcgaggactcggctgtctattactgtgcgagagatgacgggtgggagccacaacgcaggggcgaaggcccctacttctttgactactggggccagggaaccctggtcaccgtctcctcag

SEQ ID NO: 380 - DNA, 361 bp, Homo sapiens
  source 1..361: mol_type = other DNA
caggtccaactgatgcagtctggggctgaggtgaagaagcctgggtcctcggtgaaggtctcctgcaagacttctggaggcattttcagaagctatgctatcagttgggtgcgacaggcccctggacaaggccttgagtggatgggagggatcctcgctatcttcggaacaccaaactacgcacagaacttccagggcagagtcacgattagcacggacgaatccgcgagcacagtctacatggaactgagcaccctgagatctcaggacacggccgtgtatttctgtgcgtcgggaagtacttattatccctcatactttgactcctggggccagggaaccctggtcaccgtctcctcag

SEQ ID NO: 381 - DNA, 373 bp, Homo sapiens
  source 1..373: mol_type = other DNA
cagctgcagctgcaggagtcgggcccaggactggtgaagccttcggagaccctgtccctcacctgcactgtctctggtggctccatcagcagtagtagttactactggggctggatccgccagcccccagggaaggggctggagtggattgggagtatctattatagtgggagcacctactacaacccgtccctcaagagtcgagtcaccatatcagtagacacgtccaagaaccagttctccctgaagctgagctctgtgaccgccgcggacacggccgtgtattactgtgcgagagatctatttgattactatggttcgggtgggcggttcgacccctggggccagggaaccctggtcaccgtctcctcag

SEQ ID NO: 382 - DNA, 370 bp, Homo sapiens
  source 1..370: mol_type = other DNA
caggtccagctggtgcagtctggggctgaggtgaggaagcctgggtcctcggtgaaggtctcctgcaaggcttctggaggcaccttcctcaactatgctatcaactgggtgcgacaggcccctggacaagggcttgagtggatgggggagatcatccccgtctttggtacaccaaactacgcacagaggttccagggcagagtctcaattaccacggacgaatccacgaaaacagccttcatggagttgagcagcctgagatctgacgacacggccgtgtattactgtgcgcactcgggggctgggacctaccgaaactcacaagcctttgactactggggccagggaaccctggtcaccgtctcctcag

SEQ ID NO: 383 - DNA, 358 bp, Homo sapiens
  source 1..358: mol_type = other DNA
gaggtgcagctgttggagtctgggggaggcttggtacagcctggggggtccctgagactctcctgtgcagcctctggattcacctttaacacctatgccatgagctgggtccgccaggctccagggaaggggctggagtgggtctcaacaattagtggaaacggcgataccacctattacgcagactccgtgaagggccggttcaccatctccagagacaattccaagaacacgctgtatgtgcaaatgaacagcctgagagccgaggacacggccgtatattactgtgtggcggcgttctacctcttgtactactttgacttctggggccagggaaccctggtcaccgtctcctcag

SEQ ID NO: 384 - DNA, 373 bp, Homo sapiens
  source 1..373: mol_type = other DNA
caggtccagctggtgcagtctggggctgaggtgaagaagcctgggtcctcggtgaaggtctcctgcaaggcttcaagaggcatcttcagtagttatgctatcagctgggtgcgacaggcccctggacaagggcttgagtggatgggagggatcatccccatgtttggtacaacaaagggcgcacagaagttccagggcagagtcacgattaccgcggacaaatccatgagcgcagcctacatggagctgagcagcctgagatctgacgacacggccgtgtattactgtgcgcgacactattatggttcggggagttattttttggatggttttgatatctggggccaagggacaatggtcaccgtctcttcag

SEQ ID NO: 385 - DNA, 370 bp, Homo sapiens
  source 1..370: mol_type = other DNA
gaggtgcagctagtggagtccgggggaggcttagttcagcctggggggtccctgagactctcctgtgcagcctctggattcaccttcagtaactactggatgcactgggtccgccaagctccagggaaggggctggagtgggtctcacgtattaagagtgatgggagtgccacaacctacacgggctccgtgaagggtcgcttcaccatatccagagacaacgccaagaacacactgtttctgcaaatgaacagtctgagagccgaggacacggctgtgtattactgtgcaaggccgcgccgggaggactacggtgaatacacaagtttcgactactggggccagggaaccctggtcaccgtctcctcag

SEQ ID NO: 386 - DNA, 373 bp, Homo sapiens
  source 1..373: mol_type = other DNA
gaggtgcagctggtggagtctgggggaggcttggtacagcctggagggtccctgagactctcctgtgcagcctctggattcaccttcagtagttatgaaatgaactgggtccgccaggctccagggaaggggctggagtgggtttcatacattagtagtagtggtagtaccatatactacgcagactctgtgaagggccgattcaccatctccagagacaacgccaagaactcactgtatctgcaaatgaacagcctgagagccgaggacacggctgtttattactgtgcgagagttggaattagtgggagctaccaaactgttgatgcttttgatatctggggccaagggacaatggtcaccgtctcttcag

SEQ ID NO: 387 - DNA, 376 bp, Homo sapiens
  source 1..376: mol_type = other DNA
cagctgcagctgcaggagtcgggcccaggactggtgaagccttcggagaccctgtccctcacctgcactgtctctggtggctccatcagcagtagtagttactactggggctggatccgccagcccccagggaaggggctggagtggattgggagtatctattatagtgggagcacctactacaacccgtccctcaagagtcgagtcaccatatccgtagacacgtccaagaaccagttctccctgaagctgagctctgtgaccgccgcagacacggctgtgtattactgtgcgagacagaaattactatggttcggggagttatcaccccccaccgagtactggggccagggaacgctggtcaccgtctcctcag

SEQ ID NO: 388 - DNA, 364 bp, Homo sapiens
  source 1..364: mol_type = other DNA
gaggtgcagctggtggagtctgggggaggcttggtccagcctggggggtccctgagactctcctgtgcagcctctggattcaccttcagtagctatgctatgcactgggtccgccaggctccagggaagggactggaatatgtttcagctattagtagtaatgggggtagcacatattatgcaaactctgtgaagggcagattcaccatctccagagacaattccaagaacacgctgtatcttcaaatgggcagcctgagagctgaggacatggctgtgtattactgtgcgagagaattgcaggatacagctacgtactactttgactactggggccagggaacgctggtcaccgtctcctcag

SEQ ID NO: 389 - DNA, 385 bp, Homo sapiens
  source 1..385: mol_type = other DNA
cagatcaccttgaaggagtctggtcctacgctggtgaaacccacacagaccctcacgctgacctgcaccttctctgggttctcactcagcactagtggagtgggtgtgggctggatccgtcagcccccaggaaaggccctggagtggcttgcactcatttattgggatgatgataagcgctacagcccatctctgaagagcaggctcaccatcaccaaggacacctccaaaaaccaggtggtccttacaatgaccaacatggaccctgtggacacagccacatattactgtgcacacagttttcgtctggctggtatagcagcagctgatggtataggaataattgactactggggccagggaaccctggtcaccgtctcctcag

SEQ ID NO: 390 - DNA, 373 bp, Homo sapiens
  source 1..373: mol_type = other DNA
caggtccagctggtgcagtctggggctgaggtgaagaagcctgggtcctcggtgaaggtctcctgcaaggcttctggaggcaccttcagcagctatgctatcagctgggtgcgacaggcccctggacaagggcttgagtggatgggagggatcatccctatctttggtacagcaaactacgcacagaagttccagggcagagtcacgattaccgcggacgaatccacgagcacagcctacatggagctgagcagcctgagatctgaggacacggccgtgtattactgtgcgaggaagtattgtagtagtaccagctgctatggggggcactttgactactggggccagggaaccctggtcaccgtctcctcag

SEQ ID NO: 391 - DNA, 370 bp, Homo sapiens
  source 1..370: mol_type = other DNA
gaagtgcagttggtggagtctgggggaggcttggtacagcctggggggaccctgagactctcctgtgctgcctctggattcacctttagcacctatggcatgcactgggtccgtcaggctccagggaagggactggaatgggtctcaagtattagtgcaactgctggtagtacatactacgcagagtccgtgaagggccggttcaccatctccagagacaattccaagaaaacggtgtttctgcaaatgaatggcctgagagccggggacacggccgtatattactgtgcgaaagattactctgaatttataccagtggctggtgcattagactactggggccggggaaccctggtcaccgtctcctcag

SEQ ID NO: 392 - DNA, 372 bp, Homo sapiens
  source 1..372: mol_type = other DNA
caggtccagctggtgcagtctgggcctgaggtgaagaagcctgggtcctcggtaaaagtctcatgtaagacttctggagtcttcttcagcagctctgctatcagctgggtgcgacaggcccctggacaagggcttgagtgggtgggaggaatcatgcccatgtttggtacaacaaattacgcggagaggttccagggcagaatcacgataaccgcggaccagtcttcgaacacagcctacatggagctgagcagcctgagatctgaggacacggccgtttactactgtgcgaggcaggggccatctggaactacatattaccactactacatggacgtctggggcaaagggaccccggtcaccgtctcctca

SEQ ID NO: 393 - DNA, 364 bp, Homo sapiens
  source 1..364: mol_type = other DNA
caggtgcaactgcaggagtcgggcccaggactggtgaagtcttcggagaccctgtccctcacctgcactgtctctggtggctccatcagtagttcctactggagctgggtccggcagaccccagggaagggactggaatgcattggatatatctattacagtgggcgcacctactataacccctccctcaagagtcgagtcaccatatcagtcgacacgtccaagaatcagttctccctgaaactgaactctgtgaccgctgcggacacggccgtgtattactgtgcgagagattctactggctcccaagcaaagaatgcttttgatatctggggccgggggacattggtcaccgtctcttcag

SEQ ID NO: 394 - DNA, 364 bp, Homo sapiens
  source 1..364: mol_type = other DNA
caggtgcagctggtgcagtctggggctgaggtgaagaagcctggggcctcagtgaaggtttcctgcaaggcatctggatacaccttcaccagctactatatgcactgggtgcgacaggcccctggacaagggcttgagtggatgggaataatcaaccctagtggtggtagcacaagctacgcacagaagttccagggcagagtcaccatgaccagggacacgtccacgagcacagtctacatggagctgagcagcctgagatctgaggacacggccgtgtattactgtgcgagagattactatgatagtagtggttaccactttgactactggggccagggaaccctggtcaccgtctcctcag

SEQ ID NO: 395 - DNA, 367 bp, Homo sapiens
  source 1..367: mol_type = other DNA
gaggtgcagttggtggagtctgggggaggcttggtccagcctggggggtccctgagactttcctgtgcagcctcgggattcaccttcagtaactaccctatgcactgggtccgccaggctccagggaagagactggaatatgtgtctcttattagtagtaatgggggtagtccatattatgcagattttgtcaagggcagattcaccatctccagagacaattccaagaacacgctatatcttcaaatggacaacctgagacctgacgacatggctgtgtactactgtgcgaggcgatattgtagtggtggtcattgttacgcttctgactactggggccagggaacgctggtcaccgtctcctcag

SEQ ID NO: 396 - DNA, 376 bp, Homo sapiens
  source 1..376: mol_type = other DNA
caggttcagctggtgcagtctggagctgaggtgaagaagcctggggcctcagtgaaggtctcctgcaaggcttctggttacacctttaccagctatggtatcagctgggtgcgacaggcccctggacaagggcttgagtggatgggatggatcagcgcttacaatggtaacacaaactatgcacagaagctccagggcagagtcaccatgaccacagacacatccacgagcacagcctacatggagctgaggagcctgagatctgacgacacggccgtgtattactgtgcgagagatcaggagctaggtggttcggggagccatgatgatgcttttgatatctggggccaagggacaatggtcaccgtctcttcag

SEQ ID NO: 397 - DNA, 393 bp, Homo sapiens
  source 1..393: mol_type = other DNA
caggtgcagctggtgcagtctggggctgaggtgaagaagcctggggcctcagtgaaggtctcctgcaaggcttctggatacaccttcaccggctactatatgcactgggtgcgacaggcccctggacaagggcttgagtggatgggatggatcaaccctaacagtggtggcacaaactatgcacagaagtttcagggcagggtcaccatgaccagggacacgtccatcagcacagcctacatggagctgagcaggctgagatctgacgacacggccgtgtattactgtgcgagatgggggtattgtagtggtggtagctgctactccggggggtgggactactactacggtatggacgtctggggccaagggaccacggtcaccgtctcctca

SEQ ID NO: 398 - DNA, 384 bp, Homo sapiens
  source 1..384: mol_type = other DNA
caggtgcagctggtgcaatctgggtctgagttgaagaagcctggggcctcagtgaaggtttcctgcaaggcttctggatacaccttcactacctatgctctgaattgggtgcgacaggcccctggacaagggcttgagtggatgggatggatcaacaccaacactggggacccaacgtatgcccagggcttcacagggcggtttgtcttctccctggacacctctgtcagcacggcatatctgcagatcaaaaccctaaagactgaggacactgccatatattactgtgggagagtcggggccgggggcgtcggggaattatcatgggtcccctattatggtatggacgtctggggccaagggaccacggtcaccgtctcctca

SEQ ID NO: 399 - DNA, 376 bp, Homo sapiens
  source 1..376: mol_type = other DNA
caggttcagctggtgcagtctggagctgaggtgaagaagcctggggcctcagtgaaggtctcctgcaaggcttctggttacacctttaccagctatggtatcagctgggtgcgacaggcccctggacaagggcttgagtggatgggatggatcagcgcttacaatggtaacacaaactatgcacagaagctccagggcagagtcaccatgaccacagacacatccacgagcacagcctacatggagctgaggagcctgagatctgacgacacggccgtgtattactgtgcgagaggcgggccttggaggttcggggagtcctcacttaactactttgactactggggccagggaaccctggtcaccgtctcctcag

SEQ ID NO: 400 - DNA, 372 bp, Homo sapiens
  source 1..372: mol_type = other DNA
cagctgcagctgcaggagtcgggcccaggactggtgaagccttcggagaccctgtccctcacctgcactgtctctggtggctccatcagcagtagtagttactactggggctggatccgccagcccccagggaaggggctggagtggattgggagtatctattatagtgggagcacctactacaacccgtccctcaagagtcgagtcaccatatcagtagacacgtccaagaaccagttctccctgaagctgagctctgtgaccgccgcggacacggccgtgtattactgtgcgagagaaggggtgactacggagggctactactactacatggacgtctggggcaaagggaccacggtcaccgtctcctca

SEQ ID NO: 401 - DNA, 371 bp, Homo sapiens
  source 1..371: mol_type = other DNA
gaggtgcagctggtggagtctgggggagccttggtccaggctggggggtccctgagactctcctgtgccgcctcaggattctcctttagtagatatggcatgagttgggtccgccaggctccagggaaggggctggagtgggtctcagctattaccgatagtggtggtagcagttactacgcagactccgtgaagggccggttcaccatctccagagacaattccaagaacacgctgtatctgcaaatgaacagcctgagagacgaggacacggccgtatattactgtgcgaaaagcattactatgatagtcgtggttgttacttatgcttttgatatctggggccaagggacaatggtcaccgtctcttc

SEQ ID NO: 402 - DNA, 361 bp, Homo sapiens
  source 1..361: mol_type = other DNA
gaggtgcagctggtggagtctgggggaggcctggtcaagcctggggggtccctgagactctcctgtgcagcctctggattcaccttcagtagctatagcatgaactgggtccgccaggctccagggaaggggctggagtgggtctcatccattagtagtagtagtagttacatatactacgcagactcagtgaagggccgattcaccatctccagagacaacgccaagaactcactgtatctgcaaatgaacagcctgagagccgaggacacggctgtgtattactgtgcgagggcgtcattacgccggtatagtggctacgatctttggggccagggaaccctggtcaccgtctcctcag

SEQ ID NO: 403 - DNA, 375 bp, Homo sapiens
  source 1..375: mol_type = other DNA
caggtgcagctggtggagtctgggggaggcgtggtccagcctgggaggtccctgagactctcctgtgcagcgtctggattcaccttcagtagctatggcatgcactgggtccgccaggctccaggcaaggggctggagtgggtggcagttatatggtatgatggaagtaataaatactatgcagactccgtgaagggccgattcaccatctccagagacaattccaagaacacgctgtatctgcaaatgaacagcctgagagccgaggacacggctgtgtattactgtgcgaaagatctcggatacagctatggttattactactactacggtatggacgtctggggccaagggaccacggtcaccgtctcctca

SEQ ID NO: 404 - DNA, 367 bp, Homo sapiens
  source 1..367: mol_type = other DNA
caggtccaactggtgcaatctggggctgaggtgaagaagcctgggtcctcggtgaaggtctcctgcaaggcctctggaggcaccttcagcacctacgctatcagttgggtgcgacaggcccctggacaagggcttgagtggatgggggggatcatccctatgtttactacagcaaactacgcacagaacttccagggcagagtcacgattaccgcggacgaatccacgaggacagcctacctggaactcactagtctgagatctgaggacacggccctttattactgcgcgagagcgagagaaagtcactttgaaaatagtccttttaatttctggggccaagggacactggtcaccgtgtcttcag

SEQ ID NO: 405 - DNA, 372 bp, Homo sapiens
  source 1..372: mol_type = other DNA
caggtccagctggtgcagtctggggctgagttgaagaagcctgggtcctcggtgaggatctcctgcaaggcttctggagtcattttcaacggctatgctatcagctgggtgcgacaggcccctggacaagggcttgagtggatgggagggatcatccctatctttggcacaacaaggttcgctccgaggttccaaggcagaatcactattaccgcggacgaatccacgagcacagtctacatggaattgagtagcctgagatctgaggacacggccatatacttctgtgcgaggcagggtacacctggaactacctactacaactactatatggacgtctggggcgaagggacctcggtctccgtctcctca

SEQ ID NO: 406 - DNA, 352 bp, Homo sapiens
  source 1..352: mol_type = other DNA
gaggtgcagctggtggagtctgggggaggcttggtccagcctggggggtccctgagactctcctgtgcagcctctggattcacctttagtagctattggatgagctgggtccgccaggctccagggaaggggctggagtgggtggccaacataaagcaagatggaagtgagaaatactatgtggactctgtgaagggccgattcaccatctccagagacaacgccaagaactcactgtatctgcaaatgaacagcctgagagccgaggacacggctgtgtattactgtgcgagagattggccgggggcttttgatatctggggccaagggacaatggtcaccgtctcttcag

SEQ ID NO: 407 - DNA, 388 bp, Homo sapiens
  source 1..388: mol_type = other DNA
gaggtgcagctgttggagtctgggggaggcttggtacagcctggggggtccctgagactctcctgtgcagcctctggattcacctttagcagctatgccatgagctgggtccgccaggctccagggaaggggctggagtgggtctcagctattagtggtagtggtggtagcacatactacgcagactccgtgaagggccggttcaccatctccagagacaattccaagaacacgctgtatctgcaaatgaacagcctgagagccgaggacacggccgtatattactgtgcgaaagacctcggcggcccaaattactatgatagtagtggttatctttcgtactactttgactactggggccagggaacgctggtcaccgtctcctcag

SEQ ID NO: 408 - DNA, 372 bp, Homo sapiens
  source 1..372: mol_type = other DNA
caggtccagctggtgcagtctgggactgaggtgaagaagcctgggtcctccgtgaaggtctcctgcgaggcttctggagtcatcttcaacagttatgctatcagctgggtgcgacaggcccctggacaagggcttgagtggctgggagggatcatgcctatctttggtacaacaaactacgcacagaaattccagggcagaatcacgataaccgcggacgaatctacgagcacagcctacatggagctgagcagcctgacgtctgaggacacggccgtttactactgtgcgaggcagggggtatctggaactacctattaccactactacatggacgtctggggcaaagggaccccggtcaccgtctcctca

SEQ ID NO: 409 - DNA, 373 bp, Homo sapiens
  source 1..373: mol_type = other DNA
cagctgcagctgcaggagtcgggcccaggactggtgaagccttcggagaccctgtccctcacctgcactgtctctggtggctccatcagcagtagtagttactactggggctggatccgccagcccccagggaaggggctggagtggattgggagtatctattatagtgggagcacctactacaacccgtccctcaagagtcgagtcaccatatccgtagacacgtccaagaaccagttctccctgaagctgagctctgtgaccgccgcagacacggctgtgtattactgtgcgggatcttacccccccgtgatgactgctattgggtacttcgatctctggggccgtggcaccctggtcactgtctcctcag

SEQ ID NO: 410 - DNA, 369 bp, Homo sapiens
  source 1..369: mol_type = other DNA
gaggtgcagctggtggagtctgggggaggcctggtcaagcctggggggtccctgagactctcctgtgcagcctctggattcaccttcagtagctatagcatgaactgggtccgccaggctccagggaaggggctggagtgggtctcatccattagtagtagtagtagttacatatactacgcagactcagtgaagggccgattcaccatctccagagacaacgccaagaactcactgtatctgcaaatgaacagcctgagagccgaggacacggctgtgtattactgtgcgagagatgagcagcagctggactactactactactacatggacgtctggggcaaagggaccacggtcaccgtctcctca

SEQ ID NO: 411 - DNA, 358 bp, Homo sapiens
  source 1..358: mol_type = other DNA
caggtgcagctggtggagtctgggggaggcttggtcaagcctggagggtccctgagactctcctgtgcagcctctggattcaccttcagtgactactacatgagctggatccgccaggctccagggaaggggctggagtgggtttcatacattagtagtagtggtagtaccatatactacgcagactctgtgaagggccgattcaccatctccagggacaacgccaagaactcactgtatctgcaaatgaacagcctgagagccgaggacacggctgtgtattactgtgcgagagacctgggaaactacggtgacattgactactggggccagggaacgctggtcaccgtctcctcag

SEQ ID NO: 412 - DNA, 381 bp, Homo sapiens
  source 1..381: mol_type = other DNA
caggtgcagctggtggagtctgggggaggcgtggtccagcctgggaggtccctgagactctcctgtgcagcctctggattcaccttcagtagctatgctatgcactgggtccgccaggctccaggcaaggggctggagtgggtggcagttatatcatatgatggaagtaataaatactacgcagactccgtgaagggccgattcaccatctccagagacaattccaagaacacgctgtatctgcaaatgaacagcctgagagctgaggacacggctgtgtattactgtgcgaggaagggggggtattactatggttcggggagttattcggactacggtatggacgtctggggccaagggaccacggtcaccgtctcctca

SEQ ID NO: 413 - DNA, 367 bp, Homo sapiens
  source 1..367: mol_type = other DNA
gaggtgcagctggtggagtctgggggaggcttggtacagcctggagggtccctgagactctcctgtgcagcctctggattcaccttcagtagttatgaaatgaactgggtccgccaggctccagggaaggggctggagtgggtttcatacattagtagtagtggtagtaccatatactacgcagactctgtgaagggccgattcaccatctccagagacaacgccaagaactcactgtatctgcaaatgaacagcctgagagccgaggacacggctgtttattactgtgcgacctgggagggagtaccagctgctatgagctggttcgacccctggggccagggaaccctggtcaccgtctcctcag

SEQ ID NO: 414 - DNA, 355 bp, Homo sapiens
  source 1..355: mol_type = other DNA
gaggtgcagctggtggagtctgggggaggcttggtacagcctggagggtccctgagactctcctgtgcagcctctggattcaccttcagtagttatgaaatgaactgggtccgccaggctccagggaaggggctggagtgggtttcatacattagtagtagtggtagtaccatatactacgcagactctgtgaagggccgattcaccatctccagagacaacgccaagaactcactgtatctgcaaatgaacagcctgagagccgaggacacggctgtttattactgtgcgagagatacgggagatgggtggctggtccactggggccagggaaccctggtcaccgtctcctcag

SEQ ID NO: 415 - DNA, 358 bp, Homo sapiens
  source 1..358: mol_type = other DNA
caggtgcagctgcaggagtcgggcccaggactggtgaagccttcacagaccctgtccctcacctgcactgtctctggtggctccatcagcagtggtggttactactggagctggatccggcagccaccagggaagggcctggagtggattgggtacatctatcatagtgggagcacctactacaacccgtccctcaagagtcgagtcaccatatcagtagacaggtccaagaaccagttctccctgaagctgagctctgtgactgccgcggacacggccgtgtattactgtgcgagagcccggggcgtgaccgtctttgactactggggccagggaacgctggtcaccgtctcctcag

SEQ ID NO: 416 - DNA, 382 bp, Homo sapiens
  source 1..382: mol_type = other DNA
caggtgcagctgcaggagtcgggcccaggactggtgaagccttcacagaccctgtccctcacctgcactgtctctggtggctccatcagcagtggtggttactactggagctggatccgccagcacccagggaagggcctggagtggattgggtacatctattacagtgggagcacctactacaacccgtccctcaagagtcgagttaccatatcagtagacacgtctaagaaccagttctccctgaagctgagctctgtgactgccgcggacacggccgtgtattactgtgcgagagagaattatgaggttaatggttcggggagttattatccctactttgactactggggccagggaacgctggtcaccgtctcctcag

SEQ ID NO: 417 - DNA, 367 bp, Homo sapiens
  source 1..367: mol_type = other DNA
gaggtgcagctggtggagtctgggggaggcttggtacagcctggggggaccctgagactctcctgtgcagcctctggattcacctttagcagctatggcatgagctgggtccgccaggctccagggaaggggctggagtgggtctcagctattagtggtagtggtggtagcacatactacgcagactccgtgaagggccggttcaccatctccagagacaattccaagaacacgctgtatctgcaaatgaacagcctgagagccgaggacacggccgtatattactgtgcgaatgaccggagtcggaggccgccctggtacgggtttgactactggggccagggaaccctggtcaccgtctcctcag

SEQ ID NO: 418 - DNA, 369 bp, Homo sapiens
  source 1..369: mol_type = other DNA
aggtgcagctgctggagtctgggggaggcttggtacagcctggggggaccctgagactctcctgtgcagcctctggattcacctttagcagctatggcatgtactgggtccgccaggctccagggaaggggctggagtgggtctcaagtattagtggtagtggtcttagtacatactacgcagactccgtgaagggccggttcaccatctccagagacaattccaagaacacgctgtatctgcacatgaacagcctgagaggcgaggacacggccgtatattactgtgcgaaagattattctacctttatagcagtggctggtacgtttgactactggggccagggaaccctggtcaccgtctcctcag

SEQ ID NO: 419 - DNA, 361 bp, Homo sapiens
  source 1..361: mol_type = other DNA
caggtccaggtggtgcagtctggggctgaaatgaagaagcctgggtcctcggtgaaggtctcctgcaaggcttctggaggcatcttcaggaccaatgctctcagttgggtgcgacaggcccctggacaagggcttgaatggatgggagggatcatcgctatctttaatacaccaaactacgcacagaaattccaggacagagtcacgattaccgcggacgaatccacgagcacagtttacatggaattgagcagcctgagatctgaggacacggccatgtattactgtgcgagtagtactggttattaccataactactttgactcttggggccagggaaccctggtcaccgtctcctcag

SEQ ID NO: 420 - DNA, 364 bp, Homo sapiens
  source 1..364: mol_type = other DNA
cagctggaactgcaggagtcgggcccaagactggtaaagccttcggagaccctgtccctcacctgcactgtttctggtggctccattaacagtggttctaactgctggggctggatccgccagcccccagggaaggggctggagtggcttgggagtatttgttccaatgggagcacgtactacaacccgtccctgaagagtcgagtcaccatatccgcagacacgtccaagaaccagttctccctgaagttgacctctgtgaccgccgcacagtcggctatcttttactgtacgagacacgggggatatagtggcaatgcttttgatctgtggggccaagggacaatggttgtcgtctcttcag

SEQ ID NO: 421 - DNA, 376 bp, Homo sapiens
  source 1..376: mol_type = other DNA
gaggtgcagctggtgcagtctggagcagaggtgaaaaagcccggggagtctctgaagatctcctgtaagggttctggatacagctttaccagctactggatcggctgggtgcgccagatgcccgggaaaggcctggagtggatggggatcatctatcctggtgactctgataccagatacagcccgtccttccaaggccaggtcaccatctcagccgacaagtccatcagcaccgcctacctgcagtggagcagcctgaaggcctcggacaccgccatgtattactgtgcgcgagacatgaacggagatggctacaatactctgcataatgcttttgatatctggggccaagggacaatggtcaccgtctcttcag

SEQ ID NO: 422 - DNA, 366 bp, Homo sapiens
  source 1..366: mol_type = other DNA
gaggtgcggctggtggagtctgggggaggcttggtacaggccggaaggtccctgagactctcctgtgcggcctctggatttaatttcaggacttatgaaatgaactgggtccgccaggctccagggaaggggctggagtggatttcatacattagtgtcagtgccaatagtaaatactacgcagactctgtgaagggccgattcaccatctccagagacaacgccaagaattcactgtatctgcaaatgaacagcctgagagccgaggacacggccatttattactgtacgagagatgcggccccgggcccggtttttcactacatggacgtctggggcaaagggaccacggtcaccgtctcgtca

SEQ ID NO: 423 - DNA, 361 bp, Homo sapiens
  source 1..361: mol_type = other DNA
gaggtgcagttggtggagtctgggggaggtgtggtacggcctggggggtccctgagactctcctgtgcagcctctggattcacttttggtgattatggcatgagttgggtccgccaagtcccaggaaaggggctggagtgggtctgtggtattaatagggattctactagcagaagttatgcagactctgcgaagggccgattcaccatctccagagactacgccaagaactctctgtatctgcaaatgaacagtctgagagccgaggacacggccttgtattactgtgggagggttcttcacgcggctcacacggcttgggactactggggccagggaacgctggtcaccgtctcctcag

SEQ ID NO: 424 - DNA, 382 bp, Homo sapiens
  source 1..382: mol_type = other DNA
cagctgcgcctgcaggagtcgggcccaggactggtgaagccttcggagaccctgtccctcacctgcaccatctctggcgactccatcatcagtaatatctattactggggctggatccgccagcccccagggaaggggctggagtggattgggagcatgttttctagtgggagctcctactataagccgtccctcaagagtcgagtcgccatgtccatagactcgtccaagaaccaattctccctgaagctgagctctgtgaccgccgccgacactgctatgtattactgtgggagacagaccagagatcccccatattgtagtgatggcaactgccctataaatgagtggggccagggaatgctggtcaccgtctcctcag

SEQ ID NO: 425 - DNA, 346 bp, Homo sapiens
  source 1..346: mol_type = other DNA
caggtgcagctgcaggagtcgggcccaggactggtgaagccttcggagaccctgtccctcacctgcgctgtctctggttactccatcagcagtggttactactggggctggatccggcagcccccagggaaggggctggagtggattgggagtatctatcatagtgggagcacctactacaacccgtccctcaagagtcgagtcaccatatcagtagacacgtccaagaaccagttctccctgaagctgagctctgtgaccgccgcagacacggccgtgtattactgtgcgagaggtatcgactttgactactggggccagggaaccctggtcaccgtctcctcag

SEQ ID NO: 426 - DNA, 379 bp, Homo sapiens
  source 1..379: mol_type = other DNA
gaggtgcagctggtggagtctgggggaggcttggtccagcctggggggtccctgagactctcctgtgcagcctctggattcaccgtcagtagcaactacatgagctgggtccgccaggctccagggaaggggctggagtgggtctcagttatttatagcggtggtagcacatactacgcagactccgtgaagggcagattcaccatctccagagacaattccaagaacacgctgtatcttcaaatgaacagcctgagagccgaggacacggctgtgtattactgtgcgagaggccagtattactatgatagtagtggttattacagctactggtacttcgatctctggggccgtggcaccctggtcactgtctcctcag

SEQ ID NO: 427 - DNA, 373 bp, Homo sapiens
  source 1..373: mol_type = other DNA
gaagtgcagctggtggagtctgggggaggcttggtacagcctggcaggtccctgagactctcctgtgcagcctctggattcacctttgatgattatgccatgcactgggtccggcaagctccagggaagggcctggagtgggtctcaggtattagttggaatagtggtagcataggctatgcggactctgtgaagggccgattcaccatctccagagacaacgccaagaactccctgtatctgcaaatgaacagtctgagagctgaggacacggccttgtattactgtgcaaaagcggaaagttgggatagcagtggctggtccggatactttgactactggggccagggaaccctggtcaccgtctcctcag

SEQ ID NO: 428 - DNA, 355 bp, Homo sapiens
  source 1..355: mol_type = other DNA
caggtgcagctgcagcaatcgggcccaggactggtgaagccttcggagaccctgtccctcacttgcactgtctctggtggctccttcagttcttactactggagctggatccgacagcccccagggaagggactggaatacattggttttgtctattatactggactcaccgactacagcccctccctcaagagtcgagtcatcatttctgtagacgcgtccaagaaccagttctccctgaacttgacgtctgtgaccgctgcggacacggccatctattactgtgcgagtgtcacggcgcaaagaggctacttcctctcctggggccagggaacactggtctccgtctcctcag

SEQ ID NO: 429 - DNA, 349 bp, Homo sapiens
  source 1..349: mol_type = other DNA
caggtgcagctggtggagtctgggggaggcttggtcaagcctggagggtccctgagactctcctgtgtagcctctggattcagcttcagtgactactacatgagctggattcgccaggctccagggaaggggctggactggatttcatacattagtactagtggttataccatatactacgcagactctgtgaagggccgattcaccatctccagggacaacgccaagaactctctgtatctccaaatgaacagcctgagagccgaggacacggccatgtattactgtgcgataggtgagactactttgattaactggggccagggaaccctggtcaccgtctcctcag

SEQ ID NO: 430 - DNA, 358 bp, Homo sapiens
  source 1..358: mol_type = other DNA
gaggtgcagctggtgcagtctggagcagaggtgaaaaagccgggggagtctctgaagatctcctgtaagggttctggatacagctttaccagctactggatcggctgggtgcgccagatgcccgggaaaggcctggagtggatggggatcatctatcctggtgactctgataccagatacagcccgtccttccaaggccaggtcaccatctcagccgacaagtccatcagcaccgcctacctgcagtggagcagcctgaaggcctcggacaccgccatgtattactgtgcgagacgcggtggttcggggagtggccctgactactggggccagggaaccctggtcaccgtctcctcag

SEQ ID NO: 431 - DNA, 361 bp, Homo sapiens
  source 1..361: mol_type = other DNA
caggtccaggtggtgcagtctggggctgaggtcaagaagcctgggtcctcggtgaaggtctcctgcaaggcttctggaggcatcttcaggaccaatgctatcagctgggtgcgacaggcccctggacaagggcttgagtggatgggagggatcatcgctatctttaatacaccaaactacgcacataagttccagggccgagtcacgattaccgcggacgagtccacgagcacagtctacatggaactgagcagcctgagatccgaggacacggccctatattattgtgcgggtagtagtggttattatcataactactttgactactggggccagggaaccttggtcaccgtctcctcag

SEQ ID NO: 432 - DNA, 358 bp, Homo sapiens
  source 1..358: mol_type = other DNA
gaagcgcggctggtggagtccgggggaggcttggttcagccgggggggtccctgagactctcctgtactgcctctggactctccttgaccaattattggatgcactgggtccgccaagttccagggaaggggctgatgtgggtctcacagattaaaagtgatggcagtaacattaaatacgcggacgccgtgaagggccgattcaccatatccagagacaacaccaagaacacactgtatctgcaaatgaacagcctgagacccgacgacacggctgtatatttttgtgcaagagatgaccctggtcctcgggctttcgatttctggggccaagggacaatggtcaccgtctcttcag

SEQ ID NO: 433 - DNA, 367 bp, Homo sapiens
  source 1..367: mol_type = other DNA
caggtgcagctggtgcagtctggggctgaggtgaagaagcctggggcctcagtgaaggtctcctgcaaggcttctggatacaccttcaccagttatgatatcaactgggtgcgacaggccactggacaagggcttgagtggatgggatggatgaaccctaacagtggtaacacaggctatgcacagaagttccagggcagagtcaccatgaccaggaacacctccataagcacagcctacatggagctgagcagcctgagatctgaggacacggccgtgtattactgtgcgagaggctccctgtatagcagcagctggtactactttgactactggggccagggaaccctggtcaccgtctcctcag

SEQ ID NO: 434 - DNA, 358 bp, Homo sapiens
  source 1..358: mol_type = other DNA
gaggtggagttggtggagtctgggggaggcttggtccagcctggggggtccctgagactctcctgttcagcctctggattcaccttcagtacctacgctatgcactgggtccgccaggctccagggaagggactggaatatgtttcaggtattagtagtggtgggggaacctcatattatgcagactctgtgaagggcagattcaccatcttcagggacaattccaagagcacactgaatcttcaaatggacagcctgagaactgaagacatggctgtctattactgtacgagaagtcaactcagttatggttactgggactactggggccagggaacgctggtcaccgtctcctcag

SEQ ID NO: 435 - DNA, 370 bp, Homo sapiens
  source 1..370: mol_type = other DNA
caggtgcagctggtgcagtctggggctgaggtgaagaagcctggggcctcagtgaaggtctcctgcaaggcttctggatacaccttcaccggctactatatgcactgggtgcgacaggcccctggacaagggcttgagtggatgggatggatcaaccctaacagtggtggcacaaactatgcacagaagtttcagggcagggtcaccatgaccagggacacgtccatcagcacagcctacatggagctgagcaggctgagatctgacgacacggccgtgtattactgtgcgagagatccggggtacgtttttcgtccgttatcccactttgactactggggccagggaacgctggtcaccgtctcctcag

SEQ ID NO: 436 - DNA, 370 bp, Homo sapiens
  source 1..370: mol_type = other DNA
gaggtgcagctggtggagtctgggggaggcttggtacagcctggggggaccctgagactctcctgtgcagcctctggattcacctttagcagctatggcatgagctgggtccgccaggctccagggaaggggctggagtgggtctcagctattagtggtagtggtggtagcacatactacgcagactccgtgaagggccggttcaccatctccagagacaattccaagaacacgctgtatctgcaaatgaacagcctgagagccgaggacacggccgtatattactgtgcgaaatccttcctcgtagcagtggctgatttctactactttgactactggggccagggaaccctggtcaccgtctcctcag

SEQ ID NO: 437 - DNA, 361 bp, Homo sapiens
  source 1..361: mol_type = other DNA
caggtgcagctggtggagtctgggggaggcgtggtccagcctgggaggtccctgagactctcctgtgcagcctctggtttcaccttcaccagctatgccatgcactgggtccgccaggctccaggcaaggggctggagtgggtggcccttatatcatatgatggaagtaataaatactacgcagactccgtgaagggccgattcaccgtctccagagacatttccaagaacacgctgtttctacaaatgaacagcctgagggctgaggacacggctgtctattactgtgcgagagatcctggggatggcttcaattaccccaactactggggccagggaacgctggtcaccgtctcctcag

SEQ ID NO: 438 - DNA, 370 bp, Homo sapiens
  source 1..370: mol_type = other DNA
cagatcaccttgaaggagtctggtcctacgctggtgaaacccacacagaccctcacgctgacctgcaccttctctgggttctcactcagcactagtggagtgggtgtgggctggatccgtcagcccccaggaaaggccctggagtggcttgcactcatttattgggatgatgataagcgctacagcccatctctgaagagcaggctcaccatcaccaaggacacctccaaaaaccaggtggtccttacaatgaccaacatggaccctgtggacacagccacatattactgtgcacacagacggtactatggttcggggagtcgctggttcgacccctggggccagggaaccctggtcaccgtctcctcag

SEQ ID NO: 439 - DNA, 372 bp, Homo sapiens
  source 1..372: mol_type = other DNA
caggtccagctggtgcaatctgggactgaggtgaagaagcctgggtcctccgtgaaggtctcctgcgaggcttctggagtcatcttcaacagttatgctatcagctgggtgcgacaggcccctggacaggggcttgagtggctgggagggatcatgcctctctttcgtacaacaaactacgcacagaaattccagggcagagtcacgataaccgtggacgaatctacgagcacggcctacatggagctgagcagcctgacgtctgaggacacggccgtttactactgtgcgaggcagggaactcctggaactacctattatcactactacatggacgtctggggcaaagggaccccggtcattgtctcctca

SEQ ID NO: 440 - DNA, 367 bp, Homo sapiens
  source 1..367: mol_type = other DNA
caggtgcagctgcaggagtcgggcccaggactggtgaagccttcggagaccctgtccctcacctgcgctgtctctggttactccatcagcagtggttactactggggctggatccggcagcccccagggaaggggctggagtggattgggagtatctatcatagtgggagcacctactacaacccgtccctcaagagtcgagtcaccatatcagtagacacgtccaagaaccagttctccctgaagctgagctctgtgaccgccgcagacacggccgtgtattactgtgcgagaaggagggtggttcggggagttcgcgatgcttttgatatctggggccaagggacaatggtcaccgtctcttcag

SEQ ID NO: 441 - DNA, 381 bp, Homo sapiens
  source 1..381: mol_type = other DNA
gaggtgcaattggtggagtctgggggaggcctggtcaagcctggggggtccctgagactctcctgcgcagcctctggcttcaccctcagttctcacaacatgaactgggtccgccaggctccagggaggggactagagtgggtcgcatccatcagtcatcatgcgacttacacacacgtcgcagacgcattgagggaccgatttatcatctccagggacagccgcatgaattctctctatctgcaattgaatcgtctgactgccgacgacacggccacgtattactgtgcgcgcggcatgtctgacccatactgcagtaccaggatctgccctagtcaacttgacgcctggggccggggaacgctggtcatcgtctcctca

SEQ ID NO: 442 - DNA, 372 bp, Homo sapiens
  source 1..372: mol_type = other DNA
caggtccagctggtgcagtctgggactgaggtgaagaagcctgggtcctcgatgaaggtctcctgccaggcttctggagtcatcttctacagttatgctatcagctgggtgcgacaggcccctggacaagggcttgagtggctgggagggatcatgcctatttttgggacaacaaagtacgcacagaaattccagggcagagtcaccataaccgcggactcatctacgcgcacagcctacatggagatgaggagcctggcatctgacgacacggccatttactactgtgcgaggcagggggtctctgaaactacctattacaactactacatggacctctggggcgaagggacaccggtcaccgtctcctca

SEQ ID NO: 443 - DNA, 390 bp, Homo sapiens
  source 1..390: mol_type = other DNA
caggtgcagctggtgcaatctgggtctgagttgaagaagcctggggcctcagtgaaggtttcctgcaaggcttctggatacaccttcaaaaggtatcctatgaattgggtgcgacaggcccctggacaagggcttgagtggatgggatggatcaacggcaacactgggaacccaacctatgcccagggcttcacaggacggtttgtcttctccttggacacctcagtcagcacggcatatctggagatcagcagcctaaaggctgaggacactgccatatattactgtgcgagagacaccgcgggctgtagtggtggtagctgctacccctacgactactactacggtatggacgtctggggccaagggaccacggtcaccgtctcctca

SEQ ID NO: 444 - DNA, 361 bp, Homo sapiens
  source 1..361: mol_type = other DNA
caggtccagctggtgcagtctggggctgaggtgaagaagcctgggtcctcggtgaaggtctcctgcaaggcttctggaggcaccttcagcgcccatgctatcacctgggtgcgacaggcccctggacaagggcttgagtggatgggagggattatcgctatcttcggtgtaccaaaatacgcacagaagttccagggcagagtcaccattaccgcggacgactccacgaggacagcctacatggagctgagcagcctgagatttgaggacacggccgtgtattactgtgcgagaagcaataattactatgatagtagtggtttcgcctggggccagggaacgctggtcaccgtctcctcag

SEQ ID NO: 445 - DNA, 361 bp, Homo sapiens
  source 1..361: mol_type = other DNA
caggtccagctggtgcagtctggggctgaggtgaagaagcctgagtcctcggtgaaaatttcctgcaaggcttctggaggcaccttcagcgcccatgctatcacctgggtgcgacaggcccctggacaagggcttgagtggatgggagggatcagcgctctcttccacgtagcaaaatacgcccagaagttccagggcagagtcaccatcaccgcggacgactccacgaggacaacctacatggagttgagcagcctgagatctgaagacacggccgtgtattattgtgcgagaagcaataattactatgatagtcttggttttgcctggggccagggaacgctggtcaccgtctcctcag

SEQ ID NO: 446 - DNA, 367 bp, Homo sapiens
  source 1..367: mol_type = other DNA
caggtgcagctggtggagtctgggggaggcgtggtccagccgggggggtccctgagactctcctgtgtagcgtctggattcatcttcagtaattatggcatgcactgggtccgccaaggtccaggcaaggggctggaatgggtggcatttgtacgatatgatggaagtgatgaatactatgcagactccgtgaagggccgattcaccatctccagagacaattccgagaacacactgtatctgcaaatgaacagcctgagacttgaggacacggctatatattactgtgtgaaatcttacgtttgggggagtggagccagatacttcgatctctggggccgtggcaccctggtcactgtctcctcag

SEQ ID NO: 447 - DNA, 391 bp, Homo sapiens
  source 1..391: mol_type = other DNA
cagatcaccttgaaggagtctggtccaacgctggtgacacccacacagaccctcacgctgacctgcaacttctctgggttctcactcaagactagtggagtggctgtgggctggatccgtcagcccccaggaaaggccctggagtggcttgcactcgtttattgggatgatgataaacgctacagtccatctctgaagagcaggctcaccatcaccaaggacacctccaaaaatcaggttgtcctaacaatgaccgacatggaccctgtggacacaggcacatattactgtgcacacagacagggagtctacgaaagtttgactggttattttggctcccggggccactttgacttctggggccagggaaccctggtcaccgtctcctcag

SEQ ID NO: 448 - DNA, 375 bp, Homo sapiens
  source 1..375: mol_type = other DNA
caggtgcagctggtggagtctgggggaggcgtggtccagcctggggggtccctgagactctcctgtgcagcgtctggattcaccttcagtagctatggcatgcactgggtccgccaggctccaggcaaggggctggagtgggtggcatttatacggtatgatggaagtaataaatactatgcagactccgtgaagggccgattcaccatctccagagacaattccaagaacacgctgtatctgcaaatgaacagcctgagagctgaggacacggctgtgtattactgtgcgaaagacgattcctggagtaggagtttctactactactactacatggacgtctggggcaaagggaccacggtcaccgtctcctca

SEQ ID NO: 449 - DNA, 382 bp, Homo sapiens
  source 1..382: mol_type = other DNA
caggtgcagctgcaggagtcgggcccaggactggtgaagccttcacagaccctgtccctcacctgcactgtctctggtggctccatcagcagtggtagttactactggagctggatccggcagcccgccgggaagggactggagtggattgggcgtatctataccagtgggagcaccaactacaacccctccctcaagagtcgagtcaccatatcagtagacacgtccaagaaccagttctccctgaagctgagctctgtgaccgccgcagacacggccgtgtattactgtgcgagagagagctccgacagaatagcagtggctggtactccgcgctggttcgacccctggggccagggaaccctggtcaccgtctcctcag

SEQ ID NO: 450 - DNA, 372 bp, Homo sapiens
  source 1..372: mol_type = other DNA
caggtccagctggtgcagtctagaactgaggtgaaggagcctgggtcctcggtgaaggtctcctgtaaggcttctggagtcatcttcaacggctatgctttcagttgggtgcgacaggcccctggacaagggcttgagtggatgggagggatcatgcctctgtttggtacaacaaactacgcacagagattccagggcagagtcacgatgaccgtggaccagtctactaacactgcctacatggagctgaccaacctgagatctgaagacacggccgtctactactgtgcgagacagggggtttctggaaccacctattacaactactacatggacgtctggggcaaagggaccccggtcaccgtctcctca

SEQ ID NO: 451 - DNA, 367 bp, Homo sapiens
  source 1..367: mol_type = other DNA
gaggtgcagctgttggagtctgggggaggcttggtacagcctggggggtccctgagactctcctgtgcagcctctggattcacctttagcagctatgccatgagctgggtccgccaggctccagggaaggggctggagtgggtctcagctattagtggtagtggtggtagcacatactacgcagactccgtgaagggccggttcaccatctccagagacaattccaagaacacgctgtatctgcaaatgaacagcctgagagccgaggacacggccgtatattactgtgcgaaagactatgtggtggtgactgccgtccatgcttttgatatctggggccaagggacaatggtcaccgtctcttcag

SEQ ID NO: 452 - DNA, 367 bp, Homo sapiens
  source 1..367: mol_type = other DNA
caggtgctactgcaggagtcgggcccaggactggtgaagccttcggagaccctgtctctcacctgcgttgtttctggttactccatcagcggtggttacaactggggctggatccggcagcccccagggaaggggctggagtggattggggctatctatcatagtgggagcacctacttcaacccgtccctcaggagtcgagtcaccatgtcattagacacgtccaataaccagttctccctgaagctgaggtctgtgaccgccgcagacacggccgtgtattactgtgcgagatcaaatagcagcccctaccagggaaggctttttgactactggggccagggaaccctggtcaccgtctcctcag

SEQ ID NO: 453 - DNA, 364 bp, Homo sapiens
  source 1..364: mol_type = other DNA
gaggtgcagctggtggagtctgggggaggcttggtccagcctggggggtccctgagactctcctgtgcagcctctggattcaccttcagtagctatgctatgcactgggtccgccaggctccagggaagggactggaatatgtttcagctattagtagtaatgggggtagcacatattatgcaaactctgtgaagggcagattcaccatctccagagacaattccaagaacacgctgtatcttcaaatgggcagcctgagagctgaggacatggctgtgtattactgtgcgagcacaaaaacagctatggttacaagcgcttttgatatctggggccaagggacaatggtcaccgtctcttcag

SEQ ID NO: 454 - DNA, 358 bp, Homo sapiens
  source 1..358: mol_type = other DNA
gacgtacagctggtggagtctgggggaggcttggtccagccgggggggtccctgagactctcctgtgcagcctctggattcatcgttggctcgttctggatgagttgggtccgccaggctccagggaaggggctggaatgggtggccaacatagacgaaggtggaaatgacaagtactatgaggactctgtgaagggtcgattcaccatctccagagacaacgccaagaattcactatatctggaaatgaatagcctgagagccgaggacacggctgtctattactgcgcgagggcgtgggatgggcgtggtgcttttgatatctggggccaagggacaatggtcaccgtctcatcag

SEQ ID NO: 455 - DNA, 376 bp, Homo sapiens
  source 1..376: mol_type = other DNA
cagttgcagctgcaggagtcgggccctggactggtgaagccttcggagaccctgtccctgacctgcactgtctctgttggctccatcaggagtagtcgttactactgggcctggatccgccagcccccaggaaagggactggagtggattgggagtatcgattatagtgggagaacctactacaacccgtccctcaagagtcgagtcagcgcatccgtagacacgtccaggaaccagttctccctgaagctgacctctgtgacctccgcagacacggctgtctattattgtgcgactctaaaggatcactatggttcggggagccctgaattcttccaccactggggccagggcaccctggtcaccgtctcctcag

SEQ ID NO: 456 - DNA, 373 bp, Homo sapiens
  source 1..373: mol_type = other DNA
caggtccaacttgtgcagtctgaggctgaggtgaagcagcctggggcctcagtgaaaatttcctgcaaggcttctggatacacgttcactacctactctatgcattgggtgcgccaggcccccggacaaaggcctgagtggatgggatggatcaacactgacaaaggtaacacaaaatattcgcagagatttgaggacagagtcaccatttggagggacacatcctccaatacagtctacatggagatgagaggcctaatctctgaagacgcgggtttatattactgtgcgaggaccagtcgagtcgactacagcgacgtctatgatgcttttcatatctggggccgaggaacaatggtcaccgtctcttcag

SEQ ID NO: 457 - DNA, 367 bp, Homo sapiens
  source 1..367: mol_type = other DNA
gaggtgcagctggtggagtctgggggaggcttggtacagcctggagggtccctgagactctcctgtgcagcctctggattcaccttcagtagttatgaaatgaactgggtccgccaggctccagggaaggggctggagtgggtttcatacattagtagtagtggtagtaccatatactacgcagactctgtgaagggccgattcaccatctccagagacaacgccaagaactcactgtatctgcaaatgaacagcctgagagccgaggacacggctgtttattactgtgcttcacaagtggagggcagtggctccgtgacatacttccagcactggggccagggcaccctggtcaccgtctcctcag

SEQ ID NO: 458 - DNA, 352 bp, Homo sapiens
  source 1..352: mol_type = other DNA
cagatcaccttgaaggagtctggtcctacgctggtgaaacccacacagaccctcacgctgacctgcaccttctctgggttctcactcagcactagtggagtgggtgtgggctggatccgtcagcccccaggaaaggccctggagtggcttgcactcatttattgggatgatgataagcgctacagcccatctctgaagagcaggctcaccatcaccaaggacacctccaaaaaccaggtggtccttacaatgaccaacatggaccctgtggacacagccacatattactgtgcacacgctctacgaacgtttgactactggggccagggaaccctggtcaccgtctcctcag

SEQ ID NO: 459 - DNA, 352 bp, Homo sapiens
  source 1..352: mol_type = other DNA
gaggtgcagctggtgcagtctggagcagaggtgaaaaagcccggggagtctctgaagatctcctgtaagggttctggatacagctttaccagctactggatcggctgggtgcgccagatgcccgggaaaggcctggagtggatggggatcatctatcctggtgactctgataccagatacagcccgtccttccaaggccaggtcaccatctcagccgacaagtccatcagcaccgcctacctgcagtggagcagcctgaaggcctcggacaccgccatgtattactgtgcgagacacgaatcagctatggtggactactggggccagggaacgctggtcaccgtctcctcag

SEQ ID NO: 460 - DNA, 372 bp, Homo sapiens
  source 1..372: mol_type = other DNA
caggtccagctggtgcagtctgggactgaggtgaagaagcctgggtcctcggtgaaggtctcctgtcaggcttctggagtcatcttctacagttatgctatcagctgggtgcgacaggcccctggacaagggcttgagtggctgggagggatcatgcctatttttggtacaacaaagtacgcacagaggttccagggcagagtcacgataaccgcggactcatctacgcgcacagcctacatggagatgaggagcctgacatctgacgacacggccatttactactgtgcgaggcagggggtctctggaactacctattacaactactacatggacctctggggcgaagggacaccggtcaccgtctcctca

SEQ ID NO: 461 - DNA, 358 bp, Homo sapiens
  source 1..358: mol_type = other DNA
caggtgcagctgcaggagtcgggcccaggactggtgaagccttcacagaccctgtccctcacctgcactgtctctggtggctccatcagcagtggtggttactactggagctggatccggcagccaccagggaagggcctggagtggattgggtacatctatcatagtgggagcacctactacaacccgtccctcaagagtcgagtcaccatatcagtagacaggtccaagaaccagttctccctgaagctgagctctgtgactgccgcggacacggccgtgtattactgtgcgagagggagcctcggtggcccgcttgactactggggccagggaacgctggtcaccgtctcctcag

SEQ ID NO: 462 - DNA, 372 bp, Homo sapiens
  source 1..372: mol_type = other DNA
caggtccagctggtgcagtctgggactgaggtgaagaagcctgggtcctcggtgaaggtctcctgcaaggcctctggagtcatcttcaacggctatgctatcacctgggtgcgccaggcccctggacaagggcttgagtggattggaggggtcatgcctctttttggtacaacgaactacgcacagaggtttcagggcagagtctcgatgaccgcggaccaatcttcgaacacagcctacttggaactgaacagcctgagatctgaggacacggccgtctactattgtgcgaggcagggtatttctgaaactacctattcctactattacatggacgtctggggccaagggaccccggtcgccgtctcctca

SEQ ID NO: 463 - DNA, 361 bp, Homo sapiens
  source 1..361: mol_type = other DNA
caggtgcagctggtgcagtctggggctgaggtgaagaagcctggggcctcagtgaaggtctcctgcaaggcttctggatacaccttcaccggctactatatgcactgggtgcgacaggcccctggacaagggcttgagtggatgggatggatcaaccctaacagtggtggcacaaactatgcacagaagtttcagggcagggtcaccatgaccagggacacgtccatcagcacagcctacatggagctgagcaggctgagatctgacgacacggccgtgtattactgtgcgagagatggtggagtatcggtgacccccacagggtactggggccagggaaccctggtcaccgtctcctcag

SEQ ID NO: 464 - DNA, 369 bp, Homo sapiens
  source 1..369: mol_type = other DNA
caggtgcaactgcagcagtggggcgcaggactgttgaagccttcggagaccctgtccctcacctgcgctgtctatggtgagtccttcagtggttactactggagctggatccgccagtccccagggaaggggctggagtggattggggaaatcaatcatagtggaagcatcaactacaacccgtccctcaagagtcgagtcaccatatcagtagacacgtccaagaaccaattctccctgaagctgagctctgtgaccgccgcggacacggctgtgtattactgtgcgaggagtgattacgaggtccgatactactactactacggtatggacgtctggggccaagggaccacggtcaccgtctcctca

SEQ ID NO: 465 - DNA, 379 bp, Homo sapiens
  source 1..379: mol_type = other DNA
gaggtgcagctggtggagtctgggggaggcttggtacagcctggagggtccctgagactctcctgtgcagcctctggattcaccttcagtagttatgaaatgaactgggtccgccaggctccagggaaggggctggagtgggtttcatacattagtagtagtggtagtaccatatactacgcagactctgtgaagggccgattcaccatctccagagacaacgccaagaactcactgtatctgcaaatgaacagcctgagagccgaggacacggctgtttattactgtgcgagagactccctatctgttcatgactacggtgactacgtgtcttactttgactactggggccagggaaccctggtcaccgtctcctcag

SEQ ID NO: 466 - DNA, 382 bp, Homo sapiens
  source 1..382: mol_type = other DNA
caggtgcagctgcaggagtcgggcccaggactggtgaagccttcacagaccctgtccctcacctgcactgtctctggtggctccatcaataatgatatttactactggagctggatccggcagcccgccggaaagggactggagtggattgggcgttttcataccagtgggagcgtcaactataacccctccctcaagagtcgagtcaccatatcaggagacacgtccaagaaccagttctccctgaagctgacttctgtgaccgccgcagacacggccgtctattattgtgcgagatttatttttgagagactttatgactatggttcgggtggtgggttcgactactggggccagggaaccctcgtcaccgtctcctcag

SEQ ID NO: 467 - DNA, 355 bp, Homo sapiens
  source 1..355: mol_type = other DNA
gaagtactgcttgtagagtctgggggaggcctggtacagcctggagggtccctgagactctcttgtgacgcctctggattcaacttcagtacttttgaaatgaattgggtccgccaggctccagggaaggggctagagtgggttgcatacattagcattaggggcgacatcagatactacgcagactctgtgaagggccgattcaccatctccagagacaacgccaagaagtcactgtttctggagatgaggagtctgagagtcgaagacacggctttttatttctgtgcgcgagtcgattatttggctgggatcccatattggggccagggatccctggtcaccgtctcctcag

SEQ ID NO: 468 - DNA, 379 bp, Homo sapiens
  source 1..379: mol_type = other DNA
caggtccaactagtgcagtctggggctgaggtgaagaagcctggggcctcagtgaagatttcctgcagggcctctggatacgccctcagtagcactgctttacattgggtgcgccaggcccccggacaaaggcctcagtggatggggtggatcaacggtggcaacgggaagacgcagtattcacaggcgttgcagggcagagtcacttttaacagagacacatccgcaaacacagcctacatggagttgaccagcctgagatctgaagacatggctgtctactactgtgcgagagatggtaattacttggatgacagaaatcttttgaactggtatctcgatctctggggccagggcacccccgtcactgtctcctcag

SEQ ID NO: 469 - DNA, 381 bp, Homo sapiens
  source 1..381: mol_type = other DNA
caggtccagctggtacagtctggggctgaggtgaagaagcctggggcctcagtgaaggtctcctgcaaggtttccggatacaccctcactgaattatccatgcactgggtgcgacaggctcctggaaaagggcttgagtggatgggaggttttgatcctgaagatggtgaaacaatctacgcacagaagttccagggcagagtcaccatgaccgaggacacatctacagacacagcctacatggagctgagcagcctgagatctgaggacacggccgtgtattactgtgcaacaattcccccccgtattactatggttcggggagccagtcaggacggtatggacgtctggggccaagggaccacggtcaccgtctcctca

SEQ ID NO: 470 - DNA, 358 bp, Homo sapiens
  source 1..358: mol_type = other DNA
caggtgcagctgcaggagtcgggcccaggactggtgaagccttcggagaccctgtccctcacctgcggtgtctctgcttattccatcagcaatggttacaagtggggctggatccggcagcccccagggaagggactgcagtacattgggagtatcgatcatagtggacacacctacaacaacccgtccctcgagagtcgaatcaccttgtcaatggatatgtccaagaaccagttctccctgaggctcagttttgtgaccgccgcagattcggccgtctatttctgtgcgagacaacatcctactaatggttatattgactactggggccagggaaccctggtcaccgtctcctcag

SEQ ID NO: 471 - DNA, 364 bp, Homo sapiens
  source 1..364: mol_type = other DNA
caggtgcagttggtggagtctgggggaggcgtggtccagcctgggaggtccctgagactttcctgtgtagcctctggattcacttttagtagctatgctatgcactgggtccgccaggctccaggcaaggggctggagtgggtggcttttatatcatatgatggaagtaagacataccacgcagactccgtgaagggccgattcaccatctccagagacaggtccacgaaaacgctgtctctgcaaatgatcaacctgagacatgaagacacggctgtctattactgtgcgagagaaggcagtggctggagagacgatgcttttgatatctggggccaagggacaatggtcatcgtctcttcag

SEQ ID NO: 472 - DNA, 367 bp, Homo sapiens
  source 1..367: mol_type = other DNA
caggttcaactggtgcagtctggggctgaggtgaagaagcctggggactcagtgaaggtctcctgcacggcctctggatatagcttcaccaactatgatatcaactgggtgcgacaggcccctggtcaagggcttgactggatggggtggatgaaccctataagtggtaaaacgggccttgaaaagaagttccaggggagggtcgccatgaccagcgacacctccgtaaatacagcctacatggaattgagcagcctgacatctgacgacacggccgtatacttctgtgcgagagattggggttattatgacagtattgaggggttcgacccctggggccagggaaccctggtcatcgtctcttcag

SEQ ID NO: 473 - DNA, 358 bp, Homo sapiens
  source 1..358: mol_type = other DNA
caggtgcagctgcaggagtcgggcccaggactggtgaagccttcacagaccctgtccctcacctgcactgtctctggtggctccatcagcagtggtagttactactggagctggatccggcagcccgccgggaagggactggagtggattgggcgtatctataccagtgggagcaccaactacaacccctccctcaagagtcgagtcaccatatcagtagacacgtccaagaaccagttctccctgaagctgagctctgtgaccgccgcagacacggccgtgtattactgtgcgagagctagactacgtctctactttgactactggggccagggaaccctggtcaccgtctcctcag

SEQ ID NO: 474 - DNA, 376 bp, Homo sapiens
  source 1..376: mol_type = other DNA
caggtgcagctgcaggagtcgggcccaggactggtgaagccttcggagaccctgtccctcacctgcactgtctctggtggctccatcagtagttactactggagctggatccggcagcccccagggaagggactggagtggattgggtatatctattacagtgggagcaccaactacaacccctccctcaagagtcgagtcaccatatcagtagacacgtccaagaaccagttctccctgaagctgagctctgtgaccgctgcggacacggccgtgtattactgtgcgagagtccctaggggtatagcagtggctggtacgccccgcggtgcttttgatatctggggccaagggacaatggtcaccgtctcttcag

SEQ ID NO: 475 - DNA, 367 bp, Homo sapiens
  source 1..367: mol_type = other DNA
caggtgcagctgcaggagtcgggcccaggactggtgaagccttcacagaccctgtccctcacctgcactgtctctggtggctccatcagcagtggtggttactactggagctggatccggcagccaccagggaagggcctggagtggattgggtacatctatcatagtgggagcacctactacaacccgtccctcaagagtcgagtcaccatatcagtagacaggtccaagaaccagttctccctgaagctgagctctgtgactgccgcggacacggccgtgtattactgtgtaacctctgactacggtgactacgatgatgcttttgatatctggggccaagggacaatggtcaccgtctcttcag

SEQ ID NO: 476 - DNA, 364 bp, Homo sapiens
  source 1..364: mol_type = other DNA
gaggtgcagctggtggagtccgggggaggcttagttcagcctggggggtccctgagactctcctgtgcagcctctggattcaccttcagtagctactggatgcactgggtccgccaagctccagggaaggggctggtgtgggtctcacgtattaatagtgatgggagtagcacaagctacgcggactccgtgaagggccgattcaccatctccagagacaacgccaagaacacgctgtatctgcaaatgaacagtctgagagccgaggacacggctgtgtattactgtgcaagagatcgggattactatgatagtagtggttacttattctggggccagggaacgctggtcaccgtctcctcag

SEQ ID NO: 477 - DNA, 361 bp, Homo sapiens
  source 1..361: mol_type = other DNA
gaggtgcagttggtggagtctgggggaggcttggtccagcctggggggtccctgggactctcctgtgcagcctctggattcacgtttagtacatattacatgagctgggtccgccaggctccagggaaggggctggagtgggtggccaatataaaggaagatggacgtgagaaatggtatgtggactctgtggagggccgagccaccatctccagagacaacaccaagaattcactgtatctacaaatgaacagcctgagagtcgacgacacggctgtatattattgtgcgagggcgtgggatggcaacaatggtgcttttgatatctggggccaagggacaatggtcaccgtctcttcag

SEQ ID NO: 478 - DNA, 370 bp, Homo sapiens
  source 1..370: mol_type = other DNA
caggtgcagttggtgcagtctggggctgaggtgaagaagcctggggcctcagtgaaggtctcctgcaaggcttctggatacgtcttcaccgactactatatgcactgggtgcgacaggcccctggacaagggcttgagtggatgggatggatcaatcctagaagtggtggcacaaaatatgcacagagatttcagggcagtgtcaccatgacccgggacacgtccatcaacacaggccatatggacctgaacaggttgagaggcaacgacacggccgtgtattactgtacgagaggctcatatgatagtagtggttccccgggtgcttttgatatctggggccaagggacaatggtcaccgtctcttcag

SEQ ID NO: 479 - DNA, 376 bp, Homo sapiens
  source 1..376: mol_type = other DNA
caggtccagctggtgcagtctggggctgaggtgaagaagcctggggcctcagtgaagctttcctgtacgacttctggatacaccttcgctgactatgctttgcattgggtgcgccaggcccccggacagagacttgagtggatgggatggatcagccctggcaatggtaagacaaagtattcacaggagttcgagggcagagtctcaattagcacggacgcatccgcgaggacagcctacatggaggtgagcagcctgagagctgaggacatggctgtttattattgtgcgaaaggaagagtattacgatattttgactggttattggagcccttcgacttctggggccagggaacggtggtcaccgtctcctcag

SEQ ID NO: 480 - DNA, 379 bp, Homo sapiens
  source 1..379: mol_type = other DNA
caggtgcagctgcaggagtcgggcccaggactggtgaagccttcacagaccctgtccctcacctgcactgtctctggtggctccatcagcagtggtggttactactggagctggatccggcagccaccagggaagggcctggagtggattgggtacatctatcatagtgggagcacctactacaacccgtccctcaagagtcgagtcaccatatcagtagacaggtccaagaaccagttctccctgaagctgagctctgtgactgccgcggacacggccgtgtattactgtgcgagagggacgtattactatgatagtagtgatcgaggagatgcttttgatatctggggccaagggacaatggtcaccgtctcttcag

SEQ ID NO: 481 - DNA, 376 bp, Homo sapiens
  source 1..376: mol_type = other DNA
gaggtgcagctggtggagtctggaggaggcttgatccagccgggggggtccgtgagactctcctgtgcagtctctggcttcaccgtcagttccaactacgtgacgtgggtccgccaggcaccagggaaggggctggagtgggtctcatctatttatagcggtggtaacacattctacgcagactccgtgaggggccgattcaccatctccagagacaattcccagaacacggtgtttcttcaaatgaacagcctgagagtcgaggacacggccatgtactattgtgcgagagacaggctcggtcgtcgagatagtgggacctattaccggtgcctcgatctctggggccgtggcaccccggtcagtgtcacctcag

SEQ ID NO: 482 - DNA, 373 bp, Homo sapiens
  source 1..373: mol_type = other DNA
caggtgcagctgcaggagtcgggcccaggactggtgaagccttcggagaccctgtccctcacctgcactgtctctggtggctccatcagtagttactactggagctggatccggcagcccccagggaagggactggagtggattgggtatatctataccagtgggagcaccaactacaacccctccctcaagagtcgagtcaccatatccgtagacacgtccaagaaccagttctccctgaagctgagctctgtgaccgccgcagacacggccgtgtattactgtgcgagagaggcaagtggatatagtggctacgaccgcactttctactttgactactggggccagggaacgctggtcaccgtctcctcag

SEQ ID NO: 483 - DNA, 361 bp, Homo sapiens
  source 1..361: mol_type = other DNA
gaggtgcagctggtggagtctgggggaggcttggtacagcctggagggtccctgagactctcctgtgcagcctctggattcaccttcagtagttatgaaatgaactgggtccgccaggctccagggaaggggctggagtgggtttcatacattagtagtagtggtagtaccatatactacgcagactctgtgaagggccgattcaccatctccagagacaacgccaagaactcactgtatctgcaaatgaacagcctgagagccgaggacacggctgtttattactgtgcgagactctacagctatggttactctgatttgggctactggggccagggaaccctggtcaccgtctcctcag

SEQ ID NO: 484 - DNA, 382 bp, Homo sapiens
  source 1..382: mol_type = other DNA
caggtgcagctgcaggagtcgggcccaggactggtgaagccttcacagaccctgtccctcacctgcactgtctctggtggctccatcagcagtggtggttactactggagctggatccggcagccaccagggaagggcctggagtggattgggtacatctatcatagtgggagcacctactacaacccgtccctcaagagtcgagtcaccatatcagtagacaggtccaagaaccagttctccctgaagctgagctctgtgactgccgcggacacggccgtgtattactgtgcgagagatcgtactggactatatggttcggggagcccaggctactggttcgacccctggggccagggaaccctggtcaccgtctcctcag

SEQ ID NO: 485 - DNA, 361 bp, Homo sapiens
  source 1..361: mol_type = other DNA
caggtccaggtggtgcagtctggggctgaaatgaagaagcctgggtcctcggtgaaggtctcctgcaaggcttctggaggcatcttcaggacctctggtatcagctgggtgcgacaggcccctgggcaagggcttgagtggatgggagggatcatcgctatctttggtacaacacactactcacagaaattccagggcagagtcacaattaccgcggacgaatccacgagcacagtttacatggagctgagcagcctgagatctgacgacacggccatgtattactgtgggagaagtagtggttattaccataactacattgacaattggggccagggaaccctggtcaccgtctcctcag

SEQ ID NO: 486 - DNA, 382 bp, Homo sapiens
  source 1..382: mol_type = other DNA
caggtccacttggtgcagtctggggctgaggtgaaaaagcctgggtcctcggtgacagtctcctgcgcggcttctggagacaacttcaacaactacgttgtcaactgggtgcgacaggcccctggacaaggccttgagtggatgggaggaatcacccctatctttcctctaacacacgtcgcacagcagttccagggcagggtctcctttaccgcggacgaagcaacgaccgtggcctacatggacctggccagcctgacatcggaggacacggccatgtattattgttccctgagtaagtgggatgcgccggctgaacaagtcatgcctgttggcggccttgaggtttggggccagggaagccaggtcaccgtctcctcag

SEQ ID NO: 487 - DNA, 366 bp, Homo sapiens
  source 1..366: mol_type = other DNA
caggtgcagttggtggagtctgggggaggcgtggtccagcctgggaggtccctgagactctcctgtgcagcgtctggattcattttcagtagttatggcatgcactgggtccgccaggctccaggcaaggggctggagtgggtggcagttatattgtatgatggaggtaataaatattatggagactgtgcgaagggccgattcaccatctccagagacaattccaagaacacgctgtatttgcaaatgaacagcctgagagtcgaggacacggctgtgtattactgtacgaaagatcgacacagctatggttacctctacggtatggacgtctggggccaagggaccacggtcaccgtctcctca

SEQ ID NO: 488 - DNA, 373 bp, Homo sapiens
  source 1..373: mol_type = other DNA
gaggtgcagctggtggagtctgggggaggcttggtacagcctggggggtccctgagactctcctgtgcagcctctggattcaccttcagtagctacgacatgcactgggtccgccaagctacaggaaaaggtctggagtgggtctcagctattggtactgctggtgacacatactatccaggctccgtgaagggccgattcaccatctccagagaaaatgccaagaactccttgtatcttcaaatgaacagcctgagagccggggacacggctgtgtattactgtgcaagaggggcgggtactgttaactacggtgactacgaggatgcttttgatatctggggccaagggacaatggtcaccgtctcttcag

SEQ ID NO: 489 - DNA, 373 bp, Homo sapiens
  source 1..373: mol_type = other DNA
gaggtgcagctggtgcagtctggagcagaggtgaaaaagcccggggagtctctgaagatctcctgtaagggttctggatacagctttaccagctactggatcggctgggtgcgccagatgcccgggaaaggcctggagtggatggggatcatctatcctggtgactctgataccagatacagcccgtccttccaaggccaggtcaccatctcagccgacaagtccatcagcaccgcctacctgcagtggagcagcctgaaggcctcggacaccgccatgtattactgtgcgagactaggtagggtggtggtagctgctcaccccacgcccccggtttactggggccagggaacgctggtcaccgtctcctcag

SEQ ID NO: 490 - DNA, 369 bp, Homo sapiens
  source 1..369: mol_type = other DNA
caggtccagctggtacagtctggggctgaggtgcagaagcctgggtcctcggtgacggtctcctgcaaggcctctggagtcatcttcaactactattctatcagctgggtgcgacaggcccccggacaggggcttgagtggatgggaggaatcatccctctctttggtactacaaactatgcacagaaatttaagggcagagtcaccattaccgcagacgaatccacgaccacagcccacatggagctgactagccttagatttgaggacacggccgtctattactgtgcgaggcaagctatgacaggaagtacctactacaactactacatggacgtctggggcactgggaccacggtcatcgtctcc

SEQ ID NO: 491 - DNA, 379 bp, Homo sapiens
  source 1..379: mol_type = other DNA
gaggtgcagctggtggagtctgggggaggcttggtaaagcctggggggtcccttagactctcctgtgcagcctctggattcactttcagtaacgcctggatgagctgggtccgccaggctccagggaaggggctggagtgggttggccgtattaaaagcaaaactgatggtgggacaacagactacgctgcacccgtgaaaggcagattcaccatctcaagagatgattcaaaaaacacgctgtatctgcaaatgaacagcctgaaaaccgaggacacagccgtgtattactgtaccacagatctccagcagtggctggtacgggatcacgttgcttttgatatctggggccaagggacaatggtcaccgtctcttcag

SEQ ID NO: 492 - DNA, 364 bp, Homo sapiens
  source 1..364: mol_type = other DNA
caggtgcagctacagcagtggggcgcaggactgttgaggccttcggagaccctgtccctcacctgcgctgtctatggtgggtccctcagtggtaactactggagctggatccgccagcccccagggaaggggctggagtggattggggaaatcaatcatagtggaagcaccaactacaatccgtccctcaagagtcgagtcaccatatcagtagacacgtccaagaaccagttctccctgaagctgacctctgtgaccgccgcggacacggctgtgtattactgtgcgagaggcggatacagttatggtgacggtgatgcttttgatatctggggccaagggacaaaggtcaccgtctctccag

SEQ ID NO: 493 - DNA, 361 bp, Homo sapiens
  source 1..361: mol_type = other DNA
caggtgcagctgcaggagtcgggcccaggactggtgaagccttcacagaccctgtccctcacctgcactgtctctggtggctccatcagcagtggtggttactactggagctggatccgccagcacccagggaagggcctggagtggattgggtacatctattacagtgggagcacctactacaacccgtccctcaagagtcgagttaccatatcagtagacacgtctaagaaccagttctccctgaagctgagctctgtgactgccgcggacacggccgtgtattactgtgcgagagccctaccagctgccacaataattgactactggggccagggaacgctggtcaccgtctcctcag

SEQ ID NO: 494 - DNA, 370 bp, Homo sapiens
  source 1..370: mol_type = other DNA
gaggtgcagctggtggagtccgggggaggcttagttcagcctggggggtccctgagactctcctgtgcagcctctggattcaccttcagtagctactggatgcactgggtccgccaagctccagggaaggggctggtgtgggtctcacgtattaatagtgatgggagtagcacaagctacgcggactccgtgaagggccgattcaccatctccagagacaacgccaagaacacgctgtatctgcaaatgaacagtctgagagccgaggacacggctgtgtattactgtgcaagagataggccgagggtgggagctacccgagaaccctttgactactggggccagggaaccctggtcaccgtctcctcag

SEQ ID NO: 495 - DNA, 367 bp, Homo sapiens
  source 1..367: mol_type = other DNA
caggtacagctgcagcagtcaggtccaggactggtgaagccctcgcagaccctctcactcacctgtgccatctccggggacagtgtctctagcaacagtgctgcttggaactggatcaggcagtccccatcgagaggccttgagtggctgggaaggacatactacaggtccaagtggtataatgattatgcagtatctgtgaaaagtcgaataaccatcaacccagacacatccaagaaccagttctccctgcagctgaactctgtgactcccgaggacacggctgtgtattactgtgcaagagggaatccctcgtacaactggttcgacccctggggccagggaaccctggtcaccgtctcctcag

SEQ ID NO: 496 - DNA, 385 bp, Homo sapiens
  source 1..385: mol_type = other DNA
caggtgcagctggtgcagtctggggctgaggtgaagaagcctggggcctcagtgaaggtctcctgcaaggcttctggatacaccttcaccggctactatatgcactgggtgcgacaggcccctggacaagggcttgagtggatgggatggatcaaccctaacagtggtggcacaaactatgcacagaagtttcagggcagggtcaccatgaccagggacacgtccatcagcacagcctacatggagctgagcaggctgagatctgacgacacggccgtgtattactgtgcgagagtactggcaggacgaaggaacttgaatggttcggggagttatagggggtttgatatctggggccaagggacaatggtcaccgtctcttcag

SEQ ID NO: 497 - DNA, 385 bp, Homo sapiens
  source 1..385: mol_type = other DNA
caggtgcagctgcaggagtcgggcccaggactggtgaagccttcggagaccctgtccctcacctgcactgtctctggtggctccatcagtagttactactggagctggatccggcagcccccagggaagggactggagtggattgggtatatctataccagtgggagcaccaactacaacccctccctcaagagtcgagtcaccatatccgtagacacgtccaagaaccagttctccctgaagctgagctctgtgaccgccgcagacacggccgtgtattactgtgcgagagcaggaggatactatgatagtagtggttatttttcccccccgtccctatacttccagcactggggccagggcaccctggtcaccgtctcctcag

SEQ ID NO: 498 - DNA, 361 bp, Homo sapiens
  source 1..361: mol_type = other DNA
gacgtgcagctggtggagtctgggggaggcttggtccagcctggggggtccctgagactctcctgtgaagcctctggattcgggttgaatagttattggatgagctgggcccgccaggctccagggaaggggctggagtgggtgggcaacataaacgatgatggaagtgagaagcactatgtggactctgtggagggccgagccaccatgtccagagacaacaccaagaattcactgtatctgcatatgaacagcctgagagtcgaggatacggctgtgtattactgtgcgagggcgtgggatggcaacaatggtgcttttgatatctggggccaagggacaatggtcaccgtctcttcag

SEQ ID NO: 499 - DNA, 376 bp, Homo sapiens
  source 1..376: mol_type = other DNA
caggtgcagctgcaggagtcgggcccaggactggtgaagccttcacagaccctgtccctcacctgcactgtctctggtgactccatcagcagtggtggtaacttctggaattggatccggcagcccgccgggaagggactggagtggattgggcgtatccataccactgggagcaccaactacaacccctccctcaagagtcgagtcaccatatcactagacacgtccgagaaacacttctccctgacgctgacctctgtgaccgccgcagacaccgccgtgtattactgtgcgagaggattgttactctggttcggggagttatcagatgcttttgatatctggggccaagggacagtggtcaccgtctcttcag

SEQ ID NO: 500 - DNA, 361 bp, Homo sapiens
  source 1..361: mol_type = other DNA
caggtgcagctgcaggagtcgggcccaggactggtgaagccttcggagaccctgtccctcacctgcactgtctctggtggctccatcagtagttactactggagctggatccggcagcccccagggaagggactggagtggattgggtatatctattacagtgggagcaccaactacaacccctccctcaagagtcgagtcaccatatcagtagacacgtccaagaaccagttctccctgaagctgagctctgtgaccgctgcggacacggccgtgtattactgtgcgagagttaccgtggctggtacgagatactactttgactactggggccagggaaccctggtcaccgtctcctcag

SEQ ID NO: 501 - DNA, 381 bp, Homo sapiens
  source 1..381: mol_type = other DNA
cagctgcagctgcaggagtcgggcccaggactggtgaagccttcggagaccctgtccctcacctgcactgtctctggtggctccatcagcagtagtagttactactggggctggatccgccagcccccagggcaggggctggagtggattgggagtatctctcatattgggagtacctactacaacccgtccctcaagagtcgagtcaccatctcagtagacacgtccaagaaccagttctccctgaggctgagctctgtgaccgccgcggacacggccctgtattactgtgcgagaggggattgtagtaataccaattgctatgtccactattactacatggacgtctggggcaaagggaccacggtcaccgtctcctca

SEQ ID NO: 502 - DNA, 376 bp, Homo sapiens
  source 1..376: mol_type = other DNA
gaggtgcagctggtggagtctgggggaggcttggtaaagcctggggggtcccttagactctcctgtgcagcctctggattcactttcagtaacgcctggatgagctgggtccgccaggctccagggaaggggctggagtgggttggccgtattaaaagcaaaactgatggtgggacaacagactacgctgcacccgtgaaaggcagattcaccatctcaagagatgattcaaaaaacacgctgtatctgcaaatgaacagcctgaaaaccgaggacacagccgtgtattactgtaccacagaccgagatagtgggagctaccttaagggacttttgcggtactggggccagggaacgctggtcaccgtctcctcag

SEQ ID NO: 503 - DNA, 382 bp, Homo sapiens
  source 1..382: mol_type = other DNA
caggtgcagctggtgcaatctgggtctgagttgaagaagcctggggcctcagtgaaggtttcctgcaaggcttctggatacaccttcactagctatgctatgaattgggtgcgacaggcccctggacaagggcttgagtggatgggatggatcaacaccaacactgggaacccaacgtatgcccagggcttcacaggacggtttgtcttctccttggacacctctgtcagcacggcatatctgcagatcagcagcctaaaggctgaggacactgccgtgtattactgtgcgagagccaaggtgcgttactatgatagtagtggtcaccactcaggatacttgggctactggggccagggaacgctggtcaccgtctcctcag

SEQ ID NO: 504 - DNA, 362 bp, Homo sapiens
  source 1..362: mol_type = other DNA
ggtgcagctccaggagtcgggcccaggactgctgaagccttcacagaccctgtctctcacctgcattgtctctggtgacaccgtcagtggtgtgaactattattggagttggatccggcagcccgccgggaagggcctggaatacattggacgtgtcagtgacagagggagcgcccactacagcccctccctcaaaaatcgagtcaccatttcagtggacacgtccaagaaaactttctccctgaagatgacctctgtgaccgccgcagacacggccgtttattactgtggggcgaacggtgactacttgggatggggagtagaccagtggggccagggaaccctggtcaccgtctcctcag

SEQ ID NO: 505 - DNA, 363 bp, Homo sapiens
  source 1..363: mol_type = other DNA
gaggtgctgctggtggagtctgggggaggcttggtaatgcctggggggtcccttagactctcctgtgcagcctctggattcactttcaataatgcctggatgagctgggtccgccaggctccagggaaggggctggagtgggttggccgtattaaaagtaaaactaatggtggggcgacagactacgctgcacccgtgaaaggcagattcaccatttcaagggatgattcggaagacacgatgtatctgcaaatgaacaccctgaaaagcgaagacacaggcatctattactgttctacaggacttaccacaggctggtctcttggctactggggccagggaacgctggtcaccgtctcctca

SEQ ID NO: 506 - DNA, 373 bp, Homo sapiens
  source 1..373: mol_type = other DNA
gaggtgcagctgttggagtcggggggaggcttgggacagcctggggggtccctaagactctcctgtgcagcctctggattcagctttagtaggtttgccttgagctgggtccgccaggctccagggaaggggctggagtgggtctcaagtattagtgatagtggtggtagcacttactacgcagaatccgtgcagggccggttcaccatctccagagacaactccaagaacacgctgtatctgcaaatgaacaacctgagaaccgaggacacggccgtatattactgtgcgaaaagtattagtatgatagtggtggttgttacttatgcttttgatgtctggggccaggggacaacggtcaccgtctcttcag

SEQ ID NO: 507 - DNA, 372 bp, Homo sapiens
  source 1..372: mol_type = other DNA
caggtgcagctggtggagtctgggggaggcgtggtccagcctgggaggtccctgagactctcctgtgcagcctctggattcaccttcagtagctatgctatgcactgggtccgccaggctccaggcaaggggctggagtgggtggcagttatatcatatgatggaagcaataaatactacgcagactccgtgaagggccgattcaccatctccagagacaattccaagaacacgctgtatctgcaaatgaacagcctgagagctgaggacacggctgtgtattactgtgcgagagatccattgggcagtggctccaactactactactacatggacgtctggggcaaagggaccacggtcaccgtctcctca

SEQ ID NO: 508 - DNA, 373 bp, Homo sapiens
  source 1..373: mol_type = other DNA
cagctgcagctgcaggagtcgggcccaggactggtgaagccttcggagaccctgtccctcacctgcactgtctctggtggctccatcagcagtagtagttactactggggctggatccgccagcccccagggaaggggctggagtggattgggagtatctattatagtgggagcacctactacaacccgtccctcaagagtcgagtcaccatatcagtagacacgtccaagaaccagttctccctgaagctgagctctgtgaccgccgcggacacggccgtgtattactgtgcgagacagcagctggccccagcaatcggaggcgactactttgactactggggccagggaaccctggtcaccgtctcctcag

SEQ ID NO: 509 - DNA, 358 bp, Homo sapiens
  source 1..358: mol_type = other DNA
gaggtgcagctggtggagtctgggggaggcttggtacagcctggggggaccctgagactctcctgtgcagcctctggattcacctttagcagctatggcatgagctgggtccgccaggctccagggaaggggctggagtgggtctcagctattagtggtagtggtggtagcacatactacgcagactccgtgaagggccggttcaccatctccagagacaattccaagaacacgctgtatctgcaaatgaacagcctgagagccgaggacacggccgtatattactgtgcgaaatacagtgactacgggcccccgtcgggggactggggccaagggacaatggtcaccgtctcttcag

SEQ ID NO: 510 - DNA, 379 bp, Homo sapiens
  source 1..379: mol_type = other DNA
caggtgcagctgcaggagtcgggcccaggactggtgaagccttcacagaccctgtccctcacctgcactgtctctggtggctccatcagcagtggtggttactactggagctggatccggcagccaccagggaagggcctggagtggattgggtacatctatcatagtgggagcacctactacaacccgtccctcaagagtcgagtcaccatatcagtagacaggtccaagaaccagttctccctgaagctgagctctgtgactgccgcggacacggccgtgtattactgtgcgaggatgggtggttcggggagttattatcaagttccccgcctctttgactactggggccagggaacgctggtcaccgtctcctcag

SEQ ID NO: 511 - DNA, 364 bp, Homo sapiens
  source 1..364: mol_type = other DNA
cagatcaccttgaaggagtctggtcctacgctggtgaaacccacacagaccctcacgctgacctgcaccttctctgggttctcactcagcactagtggagtgggtgtgggctggatccgtcagcccccaggaaaggccctggagtggcttgcattcatttattgggatgatgataagcggtacagtccatctctgaagagcaggctcaccatcaccaaggacacctccaaaaatcaggtggtccttacaatgaccaacatggaccctgtggacacaggcacatattactgtgcacttaattataactatgatagtagtgcttattctgggtggggccagggaacgctggtcaccgtctcctcag

SEQ ID NO: 512 - DNA, 352 bp, Homo sapiens
  source 1..352: mol_type = other DNA
gaggtgcaactggtggagtctggaggaggcttgatccagcctggggggtccctgagactctcctgtgcagcctctgggttcaacgtcagtagcgactatatgaactgggtccgccaggctccagtgaaggggctggagtgggtctcagttatttataggggtggtactacatactacgcagactccgtgaagggccgattcaccatctccagagacaattccaagaacatgttgtttcttcaaatgaacagcctgagagtcgaggacacggccgtgtattactgcgcgagagcatcctcatggaatgtttttgatatatggggccaagggacaatggtcaccgtctcttcag

SEQ ID NO: 513 - DNA, 372 bp, Homo sapiens
  source 1..372: mol_type = other DNA
caggtccagttggtgcagtctgggactgaggtgaagaagcctgggtcctcggtgaagctctcctgtcaggcttctggagtcatcttcagcgcctctgctatcagctgggtgcggcaggcccctggacaagggcttgagtggatgggagggatcatgcctctctttgggacaacacagttcgcacagaggttccagggcagagtcacgataaccgcggaccagtctacgaacacagtctacatggagctgagcgacctgaggtctgaggacacggccgtttactactgtgcgaggcagggcgtttctggaactacttattactactactacatggacatctggggcaaagggactccggtcatcgtctcctca

SEQ ID NO: 514 - DNA, 361 bp, Homo sapiens
  source 1..361: mol_type = other DNA
gagatgcagctggtgcaatctgggggaggcttggtccagcctggggggtccctgagactctcctgtgcagcctctggattcaagtttagtgccttttacatgagctgggtccgccaggcgccagggaaggggctggagtgggtggccaacataaacgaggatgggagtgagacacactgtgtggactctgtgaagggccgagccaccttctccagagacaacaccaagaattcactgtatctgcaaatggaccgcctgagggtcgacgacacggctgtgtattactgtgcgagggcgtacgatgacaccaatggtgcttttgatatctggggccaagggacaatggtcaccgtctcttcag

SEQ ID NO: 515 - DNA, 352 bp, Homo sapiens
  source 1..352: mol_type = other DNA
caggtgcagctggtgcaatctgggtctgagttgaagaagcctggggcctcagtgaaggtttcctgcaaggcttctggatacaccttcactaactatgctatgaattgggtgcgacaggcccctggacaagggcttgagtggatgggatggatcaacaccaacactgggaacccaacgtatgcccagggcttcacaggacggtttgtcttctccttggacacctctgtcagcacggcatatctgcagatcagcagcctaaaggctgaggacactgccgtgtattactgctttatagcagtggctggtacgattgactactggggccagggaacgctggtcaccgtctcctcag

SEQ ID NO: 516 - DNA, 373 bp, Homo sapiens
  source 1..373: mol_type = other DNA
caggtgcagctgcaggagtcgggcccaggactggtgaagccttcggagaccctgtccctcacctgcactgtctctggtggctccatcagtagttactactggagctggatccggcagcccccagggaagggactggagtggattgggtatatctattacagtgggagcaccaactacaacccctccctcaagagtcgagtcaccatatcagtagacacgtccaagaaccagttctccctgaagctgagctctgtgaccgctgcggacacggccgtgtattactgtgcgagagattactatgatagtagtggtcacctatgggggggtgcttttgatatctggggccaagggacaatggtcaccgtctcttcag

SEQ ID NO: 517 - DNA, 361 bp, Homo sapiens
  source 1..361: mol_type = other DNA
caggtccagctggtgcagtctggggctgaggtgaagaagcctgggtcctcggtgaaggtctcctgcaaggcttctggaggcaccttcagcagctatgctatcagctgggtgcgacaggcccctggacaagggcttgagtggatgggagggatcatccctatctttggtacagcaaactacgcacagaagttccagggcagagtcacgattaccgcggacgaatccacgagcacagcctacatggagctgagcagcctgagatctgaggacacggccgtgtattactgtgcgagggagcaggggggttcggggagggcccttgactactggggccagggaacgctggtcaccgtctcctcag

SEQ ID NO: 518 - DNA, 370 bp, Homo sapiens
  source 1..370: mol_type = other DNA
gaggtgcagctggtggagtctgggggaggcttggtacagcctggggggaccctgagactctcctgtgcagcctctggattcacctttagtagctatggtatgagctgggtccgccaggctccagggaaggggctggagtgggtctcagcaattagtggtactggtattagcacatactacgcagactccgtgaagggccggttcaccatctccagagacaattccaagaacacactgtatctgcaaatgaacagcctgagagccgaggacacggccgtatattactgtgcgaaaccggttgcgactccagtttacctttctggtctgtttgactactggggccagggaaccctggtcaccgtctcctcag

SEQ ID NO: 519 - DNA, 370 bp, Homo sapiens
  source 1..370: mol_type = other DNA
gaggtgcagttggtggagtctgggggaggcttgatacagccgggggggacccggagactctcctgtgcagcctctggattcgcatttgtcaattatggcttgagttgggtccgccaggctccagggaaggggctggagtgggtctcatttattagtggtagtggtcttagcacctattatgcagactccgtgaagggccgcttcaccatctccagagacaattccaggaagacgctatatttacaaatgaacagcctgagagccgaggacacggccctatattattgtgtgaaagacgctgactaccgcgtaccaatgactgggagctttgactcctggggccagggaaccccggtcaccgtctcctcag

SEQ ID NO: 520 - DNA, 367 bp, Homo sapiens
  source 1..367: mol_type = other DNA
caggtgcagctgcaggagtcgggcccaggaatggtgaagccttcacagaccctgtccctcacctgcactgtctctggtggctccatgagtagtggtagttattcctggagttggatccggcagcccgccgggaggggactggagtggattgggcgtatctatatcagtgggagcaccaactacaacccctccctcgagagtggagtcaccatatcactagacgcgtccaggaatcagatctccctgaagttgagttctgtgaccgccacagacacggccatttattactgtgcgagagggtccggtttagtgggacctaccccctttgactactggggccagggaatcctggtcaccgtctcctcag

SEQ ID NO: 521 - DNA, 367 bp, Homo sapiens
  source 1..367: mol_type = other DNA
caggtccacctggtgcagtctgaggctgaggtgaagaagcctgggtcctcggtgaaggtctcctgcaaagcttctggaggcaccttcaacacctatacattcagttgggtgcgacaggcccctggacaagggcttgagtggatgggagggaccctccctatctttggcactgcaaattatgcacagaagttccagggcagagtcacgattagcgcggacgcatcaacgaatacaggctacatggaactgagcagcctcagatctgaggacacggccgtatattactgtgcgggaacatataattatgattccagtggttattacaattactactggggccagggaacgttggtcaccgtctcctcag

SEQ ID NO: 522 - DNA, 372 bp, Homo sapiens
  source 1..372: mol_type = other DNA
caggtgcagctggtggagtctgggggaggcgtggtccagcctggggggtccctgagactctcctgtgcagcgtctggattcaccttcagtagctatggcatgcactgggtccgccaggctccaggcaaggggctggagtgggtggcatttatacggtatgatggaagtaataaatactatgcagactccgtgaagggccgattcaccatctccagagacaattccaagaacacgctgtatctgcaaatgaacagcctgagagctgaggacacggctgtgtattactgtgcgaaaggggttcggcgtgatgattactactactactactacatggacgtctggggcaaagggaccacggtcaccgtctcctca

SEQ ID NO: 523 - DNA, 364 bp, Homo sapiens
  source 1..364: mol_type = other DNA
gaggtgcagctggtggagtctgggggaggcttggtccagccgggggggtccctgagagtctcctgtgaagtctctggattcacctttagtagttattggatgagttgggtccgccaggctccagggaaggggctggagtgggtggccaacataaagcaagatggaagtgagaaatactatgtggactctgtgaagggccgattcaccatctccagagacaacgccaagaactcactgtatctgcaaatgaacagcctgagagccgaagacacggctgtgtattactgtgcgagggccagagggttcggggaggaatattactttgactactggggccagggaacgctggtcaccgtctcctcag

SEQ ID NO: 524 - DNA, 370 bp, Homo sapiens
  source 1..370: mol_type = other DNA
gaggtgcagctggtggagtctgggggaggcttggtacagcctggagggtccctgagactctcctgtgcagcctctggattcaccttcagtagttatgaaatgaactgggtccgccaggctccagggaaggggctggagtgggtttcatacattagtagtagtggtagtaccatatactacgcagactctgtgaagggccgattcaccatctccagagacaacgccaagaactcactgtatctgcaaatgaacagcctgagagccgaggacacggctgtttattactgtgcgagagatctgagtttcgctatatggttcggggatcatagggactactggggccagggaaccctggtcaccgtctcctcag

SEQ ID NO: 525 - DNA, 373 bp, Homo sapiens
  source 1..373: mol_type = other DNA
caggtccagctggtgcagtctggggctgaggtgaagaagcctggatcctcggtgaaggtctcctgcacggcttctggaggcaccttcaaaacaaatgccatcagctgggtgcgacaggcccctggacaagggcttgagtgggtggggggattcatccccatatttggaacaccaaggtacgcagagagattccagggcagagtcacggtcaccgcggacgagtcctcgggcgcagtctacatggagttgagcagcctgagatctgaggacacggccctatatttctgtgcgaaggtgaaggagaggcatggttgggcaagtcattatattcttgactcctggggccagggaacgctggtcaccgtctcctcag

SEQ ID NO: 526 - DNA, 358 bp, Homo sapiens
  source 1..358: mol_type = other DNA
caggtgcagctggtggagtctgggggaggcgtggtccagcctggggggtccctgagactctcctgtgcagcgtctggattcaccttcagtagctatggcatgcactgggtccgccaggctccaggcaaggggctggagtgggtggcatttatacggtatgatggaagtaataaatactatgcagactccgtgaagggccgattcaccatctccagagacaattccaagaacacgctgtatctgcaaatgaacagcctgagagctgaggacacggctgtgtattactgtgcgaacacactaggagggagctacgaaattgactactggggccagggaaccctggtcaccgtctcctcag

SEQ ID NO: 527 - DNA, 346 bp, Homo sapiens
  source 1..346: mol_type = other DNA
caggtgcagctggtggagtctgggggaggcgtggtccagcctgggaggtccctgagactctcctgtgcagcctctggattcaccttcagtagctatgctatgcactgggtccgccaggctccaggcaaggggctggagtgggtggcagttatatcatatgatggaagtaataaatactacgcagactccgtgaagggccgattcaccatctccagagacaattccaagaacacgctgtatctgcaaatgaacagcctgagagctgaggacacggctgtgtattactgtggggcagactggtacttcgatctctggggccgtggcaccctggtcactgtctcctcag

SEQ ID NO: 528 - DNA, 367 bp, Homo sapiens
  source 1..367: mol_type = other DNA
cagttgcagctacaggagtcgggcccaggactggtgaagccttcggaaaccctgtccctcaattgcactgtctctggtggctccatcaccagtaataatttttactggggctggatccgccagcccccagggaaggggctggagtggattgggagtattcattatagcgggaaaacctactacaacccgtccctcaagagtcgactcaccatttctggtgacatgtccaaggagcagttctccctgaagctgaggtctgtgaccgccgcagacacggctgtatattactgtgtgagttggggagtgctatcattcgggacaaagttcgacccctggggccagggagccctggtcatcgtctcctcag

SEQ ID NO: 529 - DNA, 361 bp, Homo sapiens
  source 1..361: mol_type = other DNA
caggtgcagctgcaggagtcgggcccaggactggtgaagccttcacagaccctgtccctcacctgcactgtctctggtggctccatcagcagtggtacttactactggagctggttccggcagcccgccgggaagggactggagtggattgggcgtatctatgccaatggatacaccacctacaacccctccctcaagagtcgagtcaccatatcagtagacacgtccaagaaccagttctccctgaacctgagctctgtgaccgccgcagacacggccctctattactgtgcgagagccgcaatggctacaataagcccctatatctggggccaagggacaatggtcaccgtctcttcag

SEQ ID NO: 530 - DNA, 361 bp, Homo sapiens
  source 1..361: mol_type = other DNA
gaggtgcagctggtggagtctgggggagacttagtccagcctggggggtccctgagactctcctgtgcagcctctggattcaccgtcagtagctactacatgagctgggtccgccaggctccagggaaggggctggagtgggtctcagttatttatagcggtgatagtacatactacgcagactccgtgaagggcagattcaccatctccagagacaattccaagaacacgctgtatcttcaaatgaacagcctgagagccgaggacacggctgtgtattactgtgcgagagctcctatagtgggggctaggagctactttgactactggggccagggaaccctggtcaccgtctcctcag

SEQ ID NO: 531 - DNA, 367 bp, Homo sapiens
  source 1..367: mol_type = other DNA
caggtccagctggtgcagtctggggctgaggtgaagaagcctgggtcctcggtgaaggtctcctgcaaggcttctggaggcaccttcagcagctatgctatcagctgggtgcgacaggcccctggacaagggcttgagtggatgggagggatcatccctatctttggtacagcaaactacgcacagaagttccagggcagagtcacgattaccgcggacgaatccacgagcacagcctacatggagctgagcagcctgagatctgaggacacggccgtgtattactgtgcgactaattactatgatagtagtggttataaaatttttgactactggggccagggaaccctggtcaccgtctcctcag

SEQ ID NO: 532 - DNA, 361 bp, Homo sapiens
  source 1..361: mol_type = other DNA
caggtccaggtggtgcagtctggggctgaggtcaagcaccctgggtcctcgttgaaggtctcctgcaaggcttctggaggcatcttcaggacctatgctatcagctgggtgcgacaggcccccggacaagggcttgagtggatgggggggattatcgctatctttaatacagcaacctacgcacagaagttccagggcagagtcaccattaccgcggacgagtccacgagcacagtctatatggaagtgagcagcctgagatccgacgacacggccgtctattattgtgcgagtagtagtggttattatcacaattattttgattattggggccagggaaccctggtcaccgtctcctcag

SEQ ID NO: 533 - DNA, 375 bp, Homo sapiens
  source 1..375: mol_type = other DNA
gaggtgcagctggtggagtctgggggaggcttggtccagcctggggggtccctgagactctcctgtgcagcctctggattcacctttagtagctattggatgagctgggtccgccaggctccagggaaggggctggagtgggtggccaacataaagcaagatggaagtgagaaatactatgtggactctgtgaagggccgattcaccatctccagagacaacgccaagaactcactgtatctgcaaatgaacagcctgagagccgaggacacggctgtgtattactgtgcgagagaattaattcggggagttatatttgcgtactactacggtatggacgtctggggccaagggaccacggtcaccgtctcctca

SEQ ID NO: 534 - DNA, 373 bp, Homo sapiens
  source 1..373: mol_type = other DNA
gacgtccagctggtggagtctgggggaggcttggaacaccctggggggaccctgagactctcctgtgtagcctctggattcacttttagcaattatgccatgagctgggtccgccaggctccagggaaggggctggagtgggtctcaggtgtcagcgtgagtggtggtagtacatactacgcagactccgtgaagggccggttcaccatttctagagacaattccaagaacacactatatctacaaatgaacaggctgagaaccgaggacacggccatatattactgtgcgaaaaatcaatatgattactttggttcgtggacggactggttcgacccctggggccagggaaccctggtcacagtctcctcag

SEQ ID NO: 535 - DNA, 376 bp, Homo sapiens
  source 1..376: mol_type = other DNA
gaggtgcagctggtggagtccgggggaggcttagttcagcctggggggtccctgagactctcctgtgcagcctctggattcaccttcagtagttactggatgcactgggtccgccaagctccagggaaggggctggtgtgggtctcacgtattaatagtgatgggagtagcacgagctacgcggattccgtgaagggccgattcaccatctccagagacaacgccaagaacacgctgtatctgcaaatgaacagtctgagagccgaggacacggctgtttatttctgtgcaagagatctcgtaaagcgctatagtagtgtctatgaggctggtactgactactggggccagggaaccctggtcaccgtctcctcag

SEQ ID NO: 536 - DNA, 361 bp, Homo sapiens
  source 1..361: mol_type = other DNA
caggtgcagctggtgcagtctggggctgaggtgaagaagcctggggcctcagtgaaggtttcctgcaaggcatctggatacaccttcaccagctactatatgcactgggtgcgacaggcccctggacaagggcttgagtggatgggaataatcaaccctagtggtggtagcacaagctacgcacagaagttccagggcagagtcaccatgaccagggacacgtccacgagcacagtctacatggagctgagcagcctgagatctgaggacacggccgtgtattactgtgcgagagatcaggatacagctatgggaacctttgactactggggccagggaacgctggtcaccgtctcctcag

SEQ ID NO: 537 - DNA, 369 bp, Homo sapiens
  source 1..369: mol_type = other DNA
caggtccaactggtgcagtctgggactgaggtgaagaagcctgggtcctcggtgacggtctcctgcaaggcctctggagtcatcttcaacggatatgctatcagctgggtgcggcaggcccctggacaagggcttgagtggatgggagggatcatcggtctttttggtacaacaaaatacgcacagacattccaggacagagtcacgattaccgcggaccaatccacgaatacagcctacatggagctgagaagcctgagatttgaagacacggccgtgtatttttgtgcgagacagggcacaccgggaactacctactacaactactacatggacgtctggggccaagggaccacggtcaccgtctcc

SEQ ID NO: 538 - DNA, 363 bp, Homo sapiens
  source 1..363: mol_type = other DNA
caggtgcagctgcaggagtcgggcccaggactggtgaagccttcggagaccctgtccctcacctgcactgtctctggtggctccatcagtagttactactggagctggatccggcagcccccagggaagggactggagtggattgggtatatctattacagtgggagcaccaactacaacccctccctcaagagtcgagtcaccatatcagtagacacgtccaagaaccagttctccctgaagctgagctctgtgaccgctgcggacacggccgtgtattactgtgcgagaacggtagaggagggaccctactactactacatggacgtctggggcaaagggaccacggtcaccgtctcctca

SEQ ID NO: 539 - DNA, 382 bp, Homo sapiens
  source 1..382: mol_type = other DNA
gaggtgcagctggtggagtctgggggaggcctggtcaagcctggggggtccctgagactctcctgtgcagcctctggattcaccttcagtagctatagcatgaactgggtccgccaggctccagggaaggggctggagtgggtctcatccattagtagtagtagtagttacatatactacgcagactcagtgaagggccgattcaccatctccagagacaacgccaagaactcactgtatctgcaaatgaacagcctgagagccgaggacacggctgtgtattactgtgcgagagaggggaggttaggacgtggatacagctatggttacaactggtacttcgatctctggggccgtggcaccctggtcactgtctcctcag

SEQ ID NO: 540 - DNA, 373 bp, Homo sapiens
  source 1..373: mol_type = other DNA
gaggtgcagctggtggagtctgggggaggcttggtccagcctggggggtccctgagactctcctgtgcagcctctggattcacctttagtagctattggatgagctgggtccgccaggctccagggaaggggctggagtgggtggccaacataaagcaagatggaagtgagaaatactatgtggactctgtgaagggccgattcaccatctccagagacaacgccaagaactcactgtatctgcaaatgaacagcctgagagccgaggacacggctgtgtattactgtgcgagagaaaggtgtagtggtggtagctgctaccctggggtttctgactactggggccagggaacgctggtcaccgtctcctcag

SEQ ID NO: 541 - DNA, 376 bp, Homo sapiens
  source 1..376: mol_type = other DNA
caggtgcagctggtgcaatctgggtctgagttgaagaagcctggggcctcagtgaaggtttcctgcaaggcttctggatacagtttcactagttatggtatgaattgggtgcgacaggcccctggacaagggcttgagtggatgggatggatcaacaccaacactgggaacccaacgtatgcccagggcttcacaggacggtttgtcttctccttggacacctctgtcagcacggcatatctgcagatcagcagcctaaaggctgaggacactgccgtctattactgtgcgagggatacctttggacaactttatccccccgtccagtggccatctgactactggggccagggaacgctggtcaccgtctcctcag

SEQ ID NO: 542 - DNA, 372 bp, Homo sapiens
  source 1..372: mol_type = other DNA
caggtccagctggtgcagtctgggactgaggtgaagaagcctgggtcctcggtgaaggtctcctgcaaggcttctggaggcaccttcagtagatatggtatcacctgggtgcgacaggcccctggacaaggacttgagtggatgggggggatcatccctatctttggtacatcaaactacccacagaggttccagggccgagtcacgattaccgcggacgagtccacgaggacagcctacatggagctgaacagcctgagatctgaggacacggccctgtattactgtgcgaaggcaaaggagttctatggttcggcaagtcatttcctccttgagtcttggggccagggaacgctggtcagcgtcgcctca

SEQ ID NO: 543 - DNA, 387 bp, Homo sapiens
  source 1..387: mol_type = other DNA
caggtgcagctgcaggagtcgggcccaggactggtgaagccttcacagaccctgtccctcacctgcactgtctctggtggctccatcagcagtggtagttactactggagctggatccggcagcccgccgggaagggactggagtggattgggcgtatctataccagtgggagcaccaactacaacccctccctcaagagtcgagtcaccatatcagtagacacgtccaagaaccagttctccctgaagctgagctctgtgaccgccgcagacacggccgtgtattactgtgcgagcggaggatattgtagtggtggtagctgctactcgggctactactactacatggacgtctggggcaaagggaccacggtcaccgtctcctca

SEQ ID NO: 544 - DNA, 372 bp, Homo sapiens
  source 1..372: mol_type = other DNA
caggtccaactggtccagtctggggctgaggtgaagaagcctgggtcctcggtgaaggtctcctgcaaggcttctggagtcatcttcaatagttattctatcagctgggtgcgacaggcccctggacaaggacttgagtggattggagggatcatccctatctttcatacagcaaaatacgcaccgaggttccagggcagagtcacgatcaccgcggacgaatccacgagcacagtcttcatgaagctgagtagtctgacatctgaggacacggccgtgtattattgtgcgaggcaggctataagtggaaccacgtactacaattactatatggacgtctggggcaaagggaccacggtcaccgtctcctca

SEQ ID NO: 545 - DNA, 361 bp, Homo sapiens
  source 1..361: mol_type = other DNA
gaggtgcagctggtgcagtctggagaagaggtgaaaaaaccgggggagtctctgaagatctcctgcaaggcctctggatacggcttttctaacttctggatcggctgggtgcgccagatgtccgggagaggcctggagtggatggggagcatctatcctggtgactctgatatcaaatacaacccgtccttccaaggccaggtcaccatctcagccgacaagtccatcagtaccgcctacctgcagtggagcagcctgaaggcctcggacagcgccatgtattactgtgtgcgacaatatgaattcgtttggggggcttatttatactggggccagggaaccctggtcaccgtctcctcag

SEQ ID NO: 546 - DNA, 382 bp, Homo sapiens
  source 1..382: mol_type = other DNA
caggtgcagctggtgcagtctggggctgaggtgaagaagcctggggcctcagtgaaggtttcctgcaaggcatctggatacaccttcaccagctactatatgcactgggtgcgacaggcccctggacaagggcttgagtggatgggaataatcaaccctagtggtggtagcacaagctacgcacagaagttccagggcagagtcaccatgaccagggacacgtccacgagcacagtctacatggagctgagcagcctgagatctgaggacacggccgtgtattactgtgcgagagatagaccgtattactatgatagtagtggttatgaagatgatgcttttgatatctggggccaagggacaatggtcaccgtctcttcag

SEQ ID NO: 547 - DNA, 364 bp, Homo sapiens
  source 1..364: mol_type = other DNA
caggtccagctggtgcagtctggggctgaggtgaagaagcctgggtcctcggtgaaggtctcctgcaaggcttctggaggcaccttcagcagctatgctatcagctgggtgcgacaggcccctggacaagggcttgagtggatgggagggatcatccctatctttggtacagcaaactacgcacagaagttccagggcagagtcacgattaccgcggacgaatccacgagcacagcctacatggagctgagcagcctgagatctgaggacacggccgtgtattactgtgcgagagagcgggattacggtgactacgtttactttgactactggggccagggaacgctggtcaccgtctcctcag

SEQ ID NO: 548 - DNA, 358 bp, Homo sapiens
  source 1..358: mol_type = other DNA
caggttcagctggtgcagtctggagctgaggtgaagaagcctggggcctcagtgaaggtctcctgcaaggcttctggttacacctttaccagctatggtatcagctgggtgcgacaggcccctggacaagggcttgagtggatgggatggatcagcgcttacaatggtaacacaaactatgcacagaagctccagggcagagtcaccatgaccacagacacatccacgagcacagcctacatggagctgaggagcctgagatctgacgacacggccgtgtattactgtgcgagaaccccctttcccttcctttggttcgacccctggggccagggaaccctggtcaccgtctcctcag

SEQ ID NO: 549 - DNA, 367 bp, Homo sapiens
  source 1..367: mol_type = other DNA
gaggtgcagctggtggagtccgggggaggcttagttcagcctggggggtccctgagactctcctgtgcagcctctggattcaccttcagtagctactggatgcactgggtccgccaagctccagggaaggggctggtgtgggtctcacgtattaatagtgatgggagtagcacaagctacgcggactccgtgaagggccgattcaccatctccagagacaacgccaagaacacgctgtatctgcaaatgaacagtctgagagccgaggacacggctgtgtattactgtgcaagagacgcctattactatggttcggggagcgcctttgactactggggccagggaaccctggtcaccgtctcctcag

SEQ ID NO: 550 - DNA, 370 bp, Homo sapiens
  source 1..370: mol_type = other DNA
gaggtgcagttggtggagtctgggggacacttggtacagcctggggggaccctgagactctcctgtgcagcctctggattcacctttagcaggtatggcatgagctgggtccgccaggctccagggaaggggctggagtgggtctccggtttcagtggtggtggtaccagcacatactacacagactccgtgaagggccggttcaccatctccagagacaatttcaagaatacactctatctgcaaatgaacagcctgagagccgaggacacggccatatattactgtgcgaaagatggtgactatcggataccactggctggaagttttgactcctggggccagggtaccctggtcaccgtctcctcag

SEQ ID NO: 551 - DNA, 386 bp, Homo sapiens
  source 1..386: mol_type = other DNA
caagtgcaggtagtggagtcgggcccaggactggtgaagccttcggagaccctgtccctcacctgcgctgtgtccggtttttccatcagcagtggttatttctggggctggatccggcagtccccagggaggggactagagtggctgggaaattcccatcatgatggcactacctcctacaatccgtccctcaagagtcgagtgaccatctcagtggacacgtcccagaaccagttctccctgaggctgaattctgtgaccgtcgcagacacggccgtctatttctgtgcgcgacagcctaggggcacctactgctctcttggtgtgtgcgacccctattattacgtggacgtgtggggcaaagggaccacggtcaccgtcacctc

SEQ ID NO: 552 - DNA, 363 bp, Homo sapiens
  source 1..363: mol_type = other DNA
tgcgtctgttggactctgggggaggcttggtacatccgggggggtccctgagactctcctgcgcggcgtctggcgtcagttttagtggccatatcttgggttgggtccgccaggctccagggaggggactggagtggatctcaactcttagtttcttggatgaaagtatttactatgcagactccgtgaagggccgcttcaccatctccagagacgcctctaagaccacattgtatctacaaatggacagcctgagatccgacgactcggccatatattactgtgtgcgagaggggcataccagtggcaggtgtgggacttttgatccgtggggccaggggacaatggtcaccgtctcttcag

SEQ ID NO: 553 - DNA, 379 bp, Homo sapiens
  source 1..379: mol_type = other DNA
caggtccagctggtgcagtctggggctgaggtgaagaagcctgggtcctcggtgaaggtctcctgcaaggcttctggaggcaccttcagcagctatgctatcagctgggtgcgacaggcccctggacaagggcttgagtggatgggagggatcatccctatctttggtacagcaaactacgcacagaagttccagggcagagtcacgattaccgcggacgaatccacgagcacagcctacatggagctgagcagcctgagatctgaggacacggccgtgtattactgtgcgagcccccggtatagcagtggctggtaccaggttctggatgatgcttttgatatctggggccaagggacaatggtcaccgtctcttcag

SEQ ID NO: 554 - DNA, 372 bp, Homo sapiens
  source 1..372: mol_type = other DNA
gaggtgcagctggtggagtctgggggaggcctggtcaagcctggggggtccctgagactctcctgtgcagcctctggattcaccttcagtagctatagcatgaactgggtccgccaggctccagggaaggggctggagtgggtctcatccattagtagtagtagtagttacatatactacgcagactcagtgaagggccgattcaccatctccagagacaacgccaagaactcactgtatctgcaaatgaacagcctgagagccgaggacacggctgtgtattactgtgcgagagaccggggtgactactcaccctactactactacggtatggacgtctggggccaagggaccacggtcaccgtctcctca

SEQ ID NO: 555 - DNA, 379 bp, Homo sapiens
  source 1..379: mol_type = other DNA
gaggtgcagctggtggagtctgggggaggcttggtacagccagggcggtccctgagactctcctgtacagcttctggattcacctttggtgattatgctatgagctgggtccgccaggctccagggaaggggctggagtgggtaggtttcattagaagcaaagcttatggtgggacaacagaatacgccgcgtctgtgaaaggcagattcaccatctcaagagatgattccaaaagcatcgcctatctgcaaatgaacagcctgaaaaccgaggacacagccgtgtattactgtaccgttgtagtggtggtagctgctacaccgtccgccccctactttgactactggggccagggaaccctggtcaccgtctcctcag

SEQ ID NO: 556 - DNA, 390 bp, Homo sapiens
  source 1..390: mol_type = other DNA
caggtcaccttgagggagtctggtcctgcgctggtgaaacccacacagaccgtcacactgacctgcaccatctctgggttctcactcatcgctaacagaatgtgtatagattggatccgtcagcccccagggaaggccctggagtggcttgcacgcattgattgggatgatgataaatattacaacacatctctgaagaccagactcaccatctccaaggactcctccaataaccaggtgttccttacaatgaccaacatggaccctgtggacgcaggcacgtattattgtgcacggtcatctgactacggtgactacgtcgggggtcgccgctatttctattacggtctggacgtctggggccaagggaccacggtcaccgtctcctca

SEQ ID NO: 557 - DNA, 361 bp, Homo sapiens
  source 1..361: mol_type = other DNA
gaggtgcagctggtggagtccgggggaggcttagttcagcctggggggtccctgagactctcctgtgcagcctctggattcaccttcagtagctactggatgcactgggtccgccaagctccagggaaggggctggtgtgggtctcacgtattaatagtgatgggagtagcacaagctacgcggactccgtgaagggccgattcaccatctccagagacaacgccaagaacacgctgtatctgcaaatgaacagtctgagagccgaggacacggctgtgtattactgtgcaagagatggatactatgataggaatgcttttgatatctggggccaagggacaatggtcaccgtctcttcag

SEQ ID NO: 558 - DNA, 385 bp, Homo sapiens
  source 1..385: mol_type = other DNA
gaggtgcagctggtggagtctgggggaggcttggtacagcctggggggaccctgagactctcctgtgcagcctctggattcacctttagcagctatggcatgagctgggtccgccaggctccagggaaggggctggagtgggtctcagctattagtggtagtggtggtagcacatactacgcagactccgtgaagggccggttcaccatctccagagacaattccaagaacacgctgtatctgcaaatgaacagcctgagagccgaggacacggccgtatattactgtgcgaaaggccctttctattactatgatagtagtggttatccggaccttgatgcttttgatatctggggccaagggacaatggtcaccgtctcttcag

SEQ ID NO: 559 - DNA, 382 bp, Homo sapiens
  source 1..382: mol_type = other DNA
caggtgcagctggtgcagtctgggactgaggtgatgaagtctggggcctcagtgaaggtctcctgtaagacatctggatacacatttaaaaactactttatgaattgggtgcggcaggccccaggacaggggcttgagtggatggcaataatcaaccctaatactggctacacaacgtacgcacagaggtttcagggcagactcaccttgaccatggacacgtccacgagcacagtctacatggatctgagcagcctgagatctgatgacacggccgtctattactgtgcgagaggatatttcgatattttgactccttattctaatcaacatgatgcttttgatgtctggggccaagggactgtggtcaccatctcttcag

SEQ ID NO: 560 - DNA, 370 bp, Homo sapiens
  source 1..370: mol_type = other DNA
gaggtgcagctgttggagtctgggggaggcttggtacagcctggggggtccctgagactctcctgtgcagcctctggattcacgtttagcagctatgccgtgagctgggtccgccaggctccagggacggggctggagtgggtctcatctgttagtggtagtggcattagcacatactacgcagattccgtgaagggccggttcaccatctccagagacaattccaagaacaccctgtatctgcaaatgaacagcctgagagccgaggacacggccgtatattactgtgcgaaagatctctctagacaacaatgggacagcggctactttgactactggggccagggaacgctggtcaccgtctcctcag

SEQ ID NO: 561 - DNA, 361 bp, Homo sapiens
  source 1..361: mol_type = other DNA
caggtccaggtggtgcaatctggggctgagatgaagaagcctgggtcctcggtgaaggtctcctgcaaggcttctggaggcatctttaggaccaatgcaatcagctgggtgcgacaggcccctggacaagggctggagtggatgggagggatcatcgctatctttggcacaccgacatacgcacagaaatttcagggcagagtcacgatttccgcggacgaatccacgagcacagtttacatggaactgagcagcctgagatctgaggacacggccatgtattactgtgccagaagtactggttattaccataactactttgacaattggggccagggaaccctggtcaccgtctcctcag

SEQ ID NO: 562 - DNA, 381 bp, Homo sapiens
  source 1..381: mol_type = other DNA
caggtgcagctggtggagtctgggggaggcgtggtccagcctgggaggtccctgagactctcctgtacagtctctggattcaccttcagtagttatgctatgcactgggtccgccaggctccaggcaagggactggagtgggtggcagttatatcatatgatgaaaacaataaatactacgcaggctccgtgaagggccgactcagcatctccagagacgattccaagagcacgctgtatctgcaaataaacagcctgagagctgaggacacggctgtgtattactgtgcgagagaccccagcgactacggtggtgacttatataactcttactactacttggacgtctggggcaaagggacgacggtcaccgtctcctca

SEQ ID NO: 563 - DNA, 382 bp, Homo sapiens
  source 1..382: mol_type = other DNA
caggtccagcttgtgcagtctggggctgaggtgaagaagcctggggcctcagtgagggtttcctgcaaggctactggctacaccttcactacttatgctctgcattgggtgcgccaggcccccggacaaaggcttgagtggatgggatggatcaacactggcaatggtaatacaagatattcacagaagttccagggcagagtcaccattaccagggacacatccgcgagctcagcctacttggacctgagcagcctgagatttgaagacacggctgtgtattactgtgcgagagatccactcttcctgcgattttttgactggcccgcccagggatactttgactactggggccagggaaccctggtcaccgtctcctcag

SEQ ID NO: 564 - DNA, 361 bp, Homo sapiens
  source 1..361: mol_type = other DNA
caggtccaggtggtgcagtctggggctgaaatgaagaagcctgggtcctcggtgaaggtctcctgcagggcttctggaggcatcttcaggaccaatgctatcagctgggtgcgacaggcccctggacaagggcttgagtgggtgggcgggatcatcgctatctttggcacaccaaactacgcacagaaattccagggcagaatcacgattaccgcggacgaatccacgagcacagttaacatggagctgagcagcctgagatctgaagacacggccatgtattactgtgcgagtagtagtggttattaccataactactttaactattggggccaggggaccctggtcaccgtctcctcag

SEQ ID NO: 565 - DNA, 358 bp, Homo sapiens
  source 1..358: mol_type = other DNA
caggtgcagctgcaggagtcgggcccaggactggtgaagccttcggagaccctgtccctcacctgcgctgtctctggttactccatcagcagtggttactactggggctggatccggcagcccccagggaaggggctggagtggattgggagtatctatcatagtgggagcacctactacaacccgtccctcaagagtcgagtcaccatatcagtagacacgtccaagaaccagttctccctgaagctgagctctgtgaccgccgcagacacggccgtgtattactgtgcgagacacccgctatggttaacgggtacggactactggggccagggaaccctggtcaccgtctcctcag

SEQ ID NO: 566 - DNA, 373 bp, Homo sapiens
  source 1..373: mol_type = other DNA
gaggtgcaactgttggagtctgggggaggcttgggacagcctggggggtccctaagactctcctgtgcaggctctggattcagttttaataattatgccttgagctgggtccgccaggctccagggaaggggctggagtgggtctcaggtattaatgatagtggtggtagcacttactacgcagactccgtgaagggccggttcagcatctccagagacaactccaagaatacgctgtatttgcaaatgaacaacctgagagccgaggacacggccgtatattactgtgcgaaaagtattagtatgatagtggtggttgtcacttatgcttttgatatctggggccaagggacaatggtcaccgtctcttcag

SEQ ID NO: 567 - DNA, 372 bp, Homo sapiens
  source 1..372: mol_type = other DNA
caggtccagctggtgcagtctgggactgaggtgaagaagcctgggtcctcggtgaaggtctcctgtaaggcttctggagtcatcttcagcggctctgccatcagttgggtgcggcaggcccctggacaagggcttgagtggatgggagggatcatgcctatgtttggaacaacaaagtacgcagagaaattccagggcagagtcacgataaccgcggaccagcctacgaacacagcctacatggagctgagcaacctaaagtctgaggacacggccatttactactgtgcgaggcagggggtttctggaactaattactactactactacatggacatctggggcaaagggaccccggtcaccgtctcctca

SEQ ID NO: 568 - DNA, 358 bp, Homo sapiens
  source 1..358: mol_type = other DNA
caggtgcagctgcaggagtcgggcccaggactggtgaagccttcggagaccctgtccctcacctgcgctgtctctggttactccatcagcagtggttactactggggctggatccggcagcccccagggaaggggctggagtggattgggagtatctatcatagtgggagcacctactacaacccgtccctcaagagtcgagtcaccatatcagtagacacgtccaagaaccagttctccctgaagctgagctctgtgaccgccgcagacacggccgtgtattactgtgcgagactagctggtaccgtaggcgcttttgatatctggggccaagggacaatggtcaccgtctcttcag

SEQ ID NO: 569 - DNA, 376 bp, Homo sapiens
  source 1..376: mol_type = other DNA
gaggtgcagctggtggagtctgggggaggcttggtacagcctggggggaccctgagactctcctgtgcagcctctggattcacctttagcagctatggcatgagctgggtccgccaggctccagggaaggggctggagtgggtctcagctattagtggtagtggtggtagcacatactacgcagactccgtgaagggccggttcaccatctccagagacaattccaagaacacgctgtatctgcaaatgaacagcctgagagccgaggacacggccgtatattactgtgcgaaaacttcccccccgagagcagtggctggtcgtcgtgatgcttttgatatctggggccaagggacaatggtcaccgtctcttcag

SEQ ID NO: 570 - DNA, 361 bp, Homo sapiens
  source 1..361: mol_type = other DNA
gaggaacagctggtggagtcggggggaggcttggtccagccgggggggtccctgagactctcctgtgcagcctctggattcacctctagttcgtattggatgagttgggtccgccaggctccagggaaggggctggaatgggtggccaacatacaggaagatggaactgagaaatactatgaggactctgtgaagggccgattcaccatctccagagacaaccccaagaactcactctatctggaaatgaatagcctgagagccgaggacacggctttatattactgtgcgagggcgtgggatgggcacagtgctgcttatgatatctggggccaagggacaatggtcaccgtctcttcag

SEQ ID NO: 571 - DNA, 361 bp, Homo sapiens
  source 1..361: mol_type = other DNA
caggtgcagctggtgcagtctggggctgacgtgaagaagcctggggcctcagtgaaggtctcctgcaaggcttctggatacaccttcaccgcctactatatgcattgggtgcgacaggcccctggacaaggacttgagtggatgggatggatcaaccctaacagtggtggcacgaactatgcacagaagtctcagggcagggtcaacatgaccagggacacgtccatcagcacagtgtacatggagctgagcagcctgagatttgacgatacggccgtgtattattgtgcgagagaaggtagtggctggtatggtgcttttgatatctggggccaagggacaatggtcaccgtctcttcag

SEQ ID NO: 572 - DNA, 369 bp, Homo sapiens
  source 1..369: mol_type = other DNA
caggtccagctggtgcagtctggggctgaggtgaagaagcctgggtcctcggtgacagtctcctgcaaggcctctggagtcatcttcaacagctactccatcagctgggtgcgacaggcccctggacaagggcttgagtggatgggagggatcatgcctatgtttcgttcaacaaactacgcacagaaattccagggcagagtcacgattatcgcggacgaatccacgagcacagcctacatggagctgaacagcctgacatttgaagacacggccgtctattactgtgcgaggcaggctataacagagactacctactaccactattacatggacgtctggggcaaagggaccacggtcaccgtctcc

SEQ ID NO: 573 - DNA, 385 bp, Homo sapiens
  source 1..385: mol_type = other DNA
caggtgcagctgcaggagtcgggcccaggactggtgaagccttcacagaccctgtccctcacctgcactgtctctggtggctccatcagcagtggtagttactactggagctggatccggcagcccgccgggaagggactggagtggattgggcgtatctataccagtgggagcaccaactacaacccctccctcaagagtcgagtcaccatatcagtagacacgtccaagaaccagttctccctgaagctgagctctgtgaccgccgcagacacggccgtgtattactgtgcgagagggaagaattactatgatagtagtggtcccaaagggggtgatgcttttgatatctggggccaagggacaatggtcaccgtctcttcag

SEQ ID NO: 574 - DNA, 358 bp, Homo sapiens
  source 1..358: mol_type = other DNA
caggtgcagctgcaggagtcgggcccaggactggtgaagccttcacagaccctgtccctcacctgcactgtctctggtggctccatcagcagtggtggttactactggagctggatccggcagccaccagggaagggcctggagtggattgggtacatctatcatagtgggagcacctactacaacccgtccctcaagagtcgagtcaccatatcagtagacaggtccaagaaccagttctccctgaagctgagctctgtgactgccgcggacacggccgtgtattactgtgcgagagctgataggtgggaagcttttgatatctggggccaagggacaatggtcaccgtctcttcag

SEQ ID NO: 575 - DNA, 376 bp, Homo sapiens
  source 1..376: mol_type = other DNA
gaggtacaactggtggagtctgggggagacctggtccagcctggggggtccctgagactctcctgtgcagcctttgagttcaccttcagtgactctgctatacactgggtccgccaggcttccgggaaagggctggagtgggttggccgtatgagaagcaaaactaagagttacgcgacagcatatgctgtgtcggtgaaaggcaggttcaccatctccagagatgattcaaagaacacggggtatctgcaaatgaacagcctgaaaaccgaggacacggccgtgtattactgtaccaccaccccacttgattactttgaaagtagtggttatcaccggtcctggggccagggaacgctggtcaccgtctcctcag

SEQ ID NO: 576 - DNA, 375 bp, Homo sapiens
  source 1..375: mol_type = other DNA
caggtgcagctggtggagtctgggggaggcgtggtccagcctgggaggtccctgagactctcctgtgcagcgtctggattcaccttcagtagctatggcatgcactgggtccgccaggctccaggcaaggggctggagtgggtggcagttatatggtatgatggaagtaataaatactatgcagactccgtgaagggccgattcaccatctccagagacaattccaagaacacgctgtatctgcaaatgaacagcctgagagccgaggacacggctgtgtattactgtgccattagtggctacgacctcggctccttctactactactacggtatggacgtctggggccaagggaccacggtcaccgtctcctca

SEQ ID NO: 577 - DNA, 370 bp, Homo sapiens
  source 1..370: mol_type = other DNA
gaagtgcagttgatggaggcgggggggggcctggtcaaggcgggggggtccctcacactctcctgtgcagcctccggattcacgttcagcgactatagtatgaattggatccgccagactccagggaaggggctggagtgggtctcaaccattagtagtaatggtgagcacatccattacgccgactcagtgaagggccgattcaccatctccagagacaacgccaaaaattcactatatctacaactcaacagcctgcgagccgaagacacggctgtctatttttgtgcgaaagataagtcgacttgggcagtcgttgccgatgatcttgactattggggccagggaaccctggtcaccgtctcctcag

SEQ ID NO: 578 - DNA, 367 bp, Homo sapiens
  source 1..367: mol_type = other DNA
caggtgcagctggtgcagtctggggctgaggtgaagaagcctggggcctcagtgaaggtctcctgcaaggcttctggatacaccttcaccggctactatatgcactgggtgcgacaggcccctggacaagggcttgagtggatgggatggatcaaccctaacagtggtggcacaaactatgcacagaagtttcagggcagggtcaccatgaccagggacacgtccatcagcacagcctacatggagctgagcaggctgagatctgacgacacggccgtgtattactgtgcgagagatccgaaattacgtttgggggagttatcgtctgactactggggccagggaacgctggtcaccgtctcctcag

SEQ ID NO: 579 - DNA, 382 bp, Homo sapiens
  source 1..382: mol_type = other DNA
caggtccagctggtgcagtctggggctgaggtgaagaagcctgggtcctcggtgaacgtctcctgcaaggcttctggagacaccttcagcagatatgctatcaactgggtgcggcaggcccccggacgagggcttgagtggatgggaggtattatccctctttttggaacaacaaacaccgcacagaagttccagggcagagtcgcgattaccgcggacggatccacgagaacagtctacatggagctgagcagcctgagatctgaggacacggccctctattactgtgcgagagtcaaagtcagttacgatgttttgggggccggtcctttagttctctttgacaactggggccagggaacgctggtcaccgtctcctcag

SEQ ID NO: 580 - DNA, 373 bp, Homo sapiens
  source 1..373: mol_type = other DNA
cagctgcagctgcaggagtcgggcccaggactggtgaagccttcggagaccctgtccctcacctgcactgtctctggtggctccatcagcagtagtagttactactggggctggatccgccagcccccagggaaggggctggagtggattgggagtatctattatagtgggagcacctactacaacccgtccctcaagagtcgagtcaccatatcagtagacacgtccaagaaccagttctccctgaagctgagctctgtgaccgccgcggacacggccgtgtattactgtgcgaaggatagcagcagctggttcgggcccgggttcctttttgactactggggccagggaaccctggtcaccgtctcctcag

SEQ ID NO: 581 - DNA, 364 bp, Homo sapiens
  source 1..364: mol_type = other DNA
cagctgcagctgcaggagtcgggcccaggactggtgaagccttcggagaccctgtccctcacctgcactgtctctggtggctccatcagcagtagtagttactactggggctggatccgccagcccccagggaaggggctggagtggattgggagtatctattatagtgggagcacctactacaacccgtccctcaagagtcgagtcaccatatccgtagacacgtccaagaaccagttctccctgaagctgagctctgtgaccgccgcagacacggctgtgtattactgtgcgagacaaggctacggtgactacgtagtctttgactactggggccagggaacgctggtcaccgtctcctcag

SEQ ID NO: 582 - DNA, 361 bp, Homo sapiens
  source 1..361: mol_type = other DNA
gaggtgcaactggtggagtctgggggaggcttggtccagcctggggggtccctgagactctcctgtgcagcctctgaattgaccgtcagtaacaactacatgagctgggtccgccaggctccagggaaggggctggagtgggtctcaattatttatagcggtggtaacacatactacgcagactccgtgaagggcagattcaccatctccagagacaattccaagaacacgctgtatcttcaaatgaacagtgtgagagccgaggacacggctgtgtattactgtgcgagagatgttccggggagtcctgggtactactttgactactggggccagggaaccctggtcaccgtctcctcag

SEQ ID NO: 583 - DNA, 379 bp, Homo sapiens
  source 1..379: mol_type = other DNA
cagatcaccttgaaggagtctggtcctacgctggtgaaacccacacagaccctcacgctgacctgcaccttctctgggttctcactcagcactagtggagtgggtgtgggctggatccgtcagcccccaggaaaggccctggagtggcttgcactcatttattgggatgatgataagcgctacagcccatctctgaagagcaggctcaccatcaccaaggacacctccaaaaaccaggtggtccttacaatgaccaacatggaccctgtggacacagccacatattactgtgcacacagaacgtattactatgatagtagtggttacttcaactggttcgacccctggggccagggaaccctggtcaccgtctcctcag

SEQ ID NO: 584 - DNA, 355 bp, Homo sapiens
  source 1..355: mol_type = other DNA
caggtgcagctgcaggagtcgggcccaggactggtgaagccttcggagaccctgtccctcacctgcgctgtctctggttactccatcagcagtggttactactggggctggatccggcagcccccagggaaggggctggagtggattgggagtatctatcatagtgggagcacctactacaacccgtccctcaagagtcgagtcaccatatcagtagacacgtccaagaaccagttctccctgaagctgagctctgtgaccgccgcagacacggccgtgtattactgtgcgaggctgggtagcagcagctggtatgactactggggccagggaaccctggtcaccgtctcctcag

SEQ ID NO: 585 - DNA, 370 bp, Homo sapiens
  source 1..370: mol_type = other DNA
caggtgcagctgcaggagtcgggcccaggactggtgaagccttcacagaccctgtccctcacctgcactgtctctggtggctccatcagcagtggtggttactactggagctggatccggcagccaccagggaagggcctggagtggattgggtacatctatcatagtgggagcacctactacaacccgtccctcaagagtcgagtcaccatatcagtagacaggtccaagaaccagttctccctgaagctgagctctgtgactgccgcggacacggccgtgtattactgtgcgagagggggggggtactatggttcggggagttattccccgtactggggccagggaacgctggtcaccgtctcctcag

SEQ ID NO: 586 - DNA, 364 bp, Homo sapiens
  source 1..364: mol_type = other DNA
caggtgcagctgcaggagtcgggcccaggactggtgaagccttcggagaccctgtccctcacctgcactgtctccggtggctccatcagtaatgactactggagctggatccggcagcccccagggaagggactggagtgtattgggtatatctcttccagtgggcgcaccaattataacccctccctcaggagtcgagtcagcatgtcagtagacacgtccagaaaccagttctccctgacgttgaggtctgtgagcgctgcggacacggccgtgtattactgtgcgagagattctactggccaccaattaaagaatgcttttgatatctggggccgaggggcagaggtcaccgtctcttcag

SEQ ID NO: 587 - DNA, 373 bp, Homo sapiens
  source 1..373: mol_type = other DNA
caggtgcagctggtgcagtctggggctgaggtgaagaagcctggggcctcagtgaaggtttcctgcaaggcatctggatacaccttcaccagctactatatgcactgggtgcgacaggcccctggacaagggcttgagtggatgggaataatcaaccctagtggtggtagcacaagctacgcacagaagttccagggcagagtcaccatgaccagggacacgtccacgagcacagtctacatggagctgagcagcctgagatctgaggacacggccgtgtattactgtgcgagagacggtacgagtggctactcgggcggagactggtacttcgatctctggggccgtggcaccctggtcactgtctcctcag

SEQ ID NO: 588 - DNA, 370 bp, Homo sapiens
  source 1..370: mol_type = other DNA
caggtgcgactggtggagtctgggggagacgtggtccgccctggggagtccctgagactctcctgtatagcgtctggcttcagcttcaccacctttgcaatgcactgggtccgccaggcgccaggccagggtctagaatgggtttcaatcatttcgtttgatggaaaatatgaaaactatgcagactccgtgaagggccgattcaccgtctccagagacgactccagcaatatggtttatctccaaatgcacagcctgaaaagtgaagattcgggtgtctattattgtgtgaggggtcgaaactgtaatgcttataattgccacgtcctgaatgactggggccagggtaccccggtcatcgtgtccgcag

SEQ ID NO: 589 - DNA, 369 bp, Homo sapiens
  source 1..369: mol_type = other DNA
caggtccacctggtgcagtctggggctgaggtggcgaagcctgggtcctcggtgacagtctcctgcaaggcctctggagtcatcttcaatagctattctatcagttgggtgcgtcaggcccctggacaagggcttgaatggatgggcgggatcatgcctatatttggttcaacaaaatacgcacagaaattccagggcagagtcgccattaccgcggaccaatcaacgagcacagccttcatggcgctgagtgacctgacatttgaggactcggccgtctattactgtgcgaggcaggctataggagggactgactactaccactactacatggacgtctggggcaaagggaccacggtcaccgtctcc

SEQ ID NO: 590 - DNA, 355 bp, Homo sapiens
  source 1..355: mol_type = other DNA
caggtgcagctggtgcagtctggggctgaggtgaagaagcctggggcctcagtgaaagtctcctgcaaggcttctggatacaccttcaccgactattatatgcactgggtgcgacaggcccctggacaagggcttgagtggatgggatggatcaaccctgacactggtgactcaaagtatgcacagaagtttcagggcaggatcaccatgaccagggacacgtccatgagcacagcctacatggaggtgaacaggctgagatctgacgacacggccgtgttttactgtgcgagaggagtcgggtgggaacaaaccgactactggggccagggaaccctggtcaccgtctcctcag

SEQ ID NO: 591 - DNA, 355 bp, Homo sapiens
  source 1..355: mol_type = other DNA
caggtccagctggtgcagtctggggctgaggtgaagaagcctgggtcctcggtgaaggtctcctgcaaggcttctggaggcaccttcagcagctatgctatcagctgggtgcgacaggcccctggacaagggcttgagtggatgggagggatcatccctatctttggtacagcaaactacgcacagaagttccagggcagagtcacgattaccgcggacgaatccacgagcacagcctacatggagctgagcagcctgagatctgaggacacggccgtgtattactgtgcgaggaccagtggctggtctaaccttgactactggggccagggaaccctggtcaccgtctcctcag

SEQ ID NO: 592 - DNA, 370 bp, Homo sapiens
  source 1..370: mol_type = other DNA
gaggtgcagctggtgcagtctggagcagaggtgaagacgcccggggagtctctgaagatctcctgtctgggttctggatacagctttaccaactactggatcggctgggtgcgccagatgcccgggaaaggcctggagtggatggggatcatctttcctggtgactctgataccagatacagcccgtcctcccaaggccaggtcaccatctcagccgacaagtccaccaacaccgcctacctgcactggagcagcctgaaggcctcggacaccgccatgtattactgtgcgagacatgtgttcgtgggcgctactctccgtgggcctatggatatctggggccaagggacaatggtcaccgtctcttcag

SEQ ID NO: 593 - DNA, 361 bp, Homo sapiens
  source 1..361: mol_type = other DNA
gaggtgcaactggtggagtctgggggacactcagtgtaccctgggggggccctgagcctctcctgtgcaacctccggattcgcctttggaaactatggcatgaactgggtccgccaggctccaggaaagggactggagtgggtctcggctatcaatagtaacggtcgcaacacatattatgcagcctccgtaaagggccgcttcaccatctctagggacaattccaataagatagtatatctggaaatgaatagcctgagagccgaggacacggccatatattactgtgcggcatattcatatagtgagagttatccttttgactactggggccagggggtcctggtcaccgtctcctcag

SEQ ID NO: 594 - DNA, 370 bp, Homo sapiens
  source 1..370: mol_type = other DNA
gaagtgcaactacaggagtctgggggaggtttggttcggcctggggggaccctgagactctcctgtgcagcctctggattcagttttagcaattataacatgtactgggtccgccaggctccagggaaggggctggagtgggtctcaagtattagtggtagtggtcttagtacctactatgcagactccgtgaagggtcggttcaccatctccagagacaagtccaagaacacggtgtatttgcacatgaatagcctgcgagccgaggacacggccctatattactgtacgaaggatttttctacctatataccaatgactggtacctttgactcctggggccagggaacccaggtcaccgtctcctcag

SEQ ID NO: 595 - DNA, 385 bp, Homo sapiens
  source 1..385: mol_type = other DNA
gaggtgcagctgatggagtccgggggaggcttggtccagcctggggggtccctgaaactctcctgtgcagcctctgggttcaccttcagtgcctccactatgcactgggtccgccaggcttccgggaaagggctggaatgggttggacatattagaagcaagtttagcagttacgcgacagcatatggtgtgtcggtgaaaggcaggttcaccgtctccagagatgattcaaagaatatggcgtatttggaaatgaacagcctgaaaatcgaggacacggccatgtattattgtgcgcgtaggagcccggggggcgtctacgattcttggagtggttcttatctctcacactggggccagggaaccctggtcaccgtctcctcag

SEQ ID NO: 596 - DNA, 370 bp, Homo sapiens
  source 1..370: mol_type = other DNA
gaggtgcagctggtggagtcggggggaggcttcatacagcctggggggaccctgagactctcctgtgcagcctctggattcacctttagcagatatggcatgagctgggtccgccaggctccagggaaggggctggagtgggtctcaggttttagtggtagtgggagtagcacatattacgcagactctgtgaagggccggttcaccatctccagagacaattccaagaacacgctctttctgcaaatgaacaacctgagagtcgaggacacggccgtatattactgtgcgaaagatggtgactaccgaatacctctggctggaagttttgactactggggccagggaatcttggtctccgtctcctcag

SEQ ID NO: 597 - DNA, 372 bp, Homo sapiens
  source 1..372: mol_type = other DNA
caggtccagctggtgcagtctgggactgaggtgaagaagcctgggtcctcggtgaaggtctcctgtaagacttctggagtcttcttcagcagctctgctatcagctgggtgcgacaggcccctggacaagggcttgagtggatgggaggaatcatgcccatgtttggtacaacaaattacgcacagaggtttcagggcagaatcgcgataaccgcggatcagtcttccaacacagcctacatggagctgagcagcctgagatctgaggacacggccgtttactactgtgcgaggcagggggtttctggaactacatattaccactactacatggacgtctggggcaaagggaccccggtcaccgtctcctca

SEQ ID NO: 598 - DNA, 352 bp, Homo sapiens
  source 1..352: mol_type = other DNA
caggtccagctggtgcagtctggggctgaggtgaagaagcctgggtcctcggtgaaggtctcctgcaaggcttctggaggcaccttcagcagctatgctatcagctgggtgcgacaggcccctggacaagggcttgagtggatgggagggatcatccctatctttggtacagcaaactacgcacagaagttccagggcagagtcacgattaccgcggacgaatccacgagcacagcctacatggagctgagcagcctgagatctgaggacacggccgtgtattactgtgcgagagctagagatggctactttgactactggggccagggaacgctggtcaccgtctcctcag

SEQ ID NO: 599 - DNA, 381 bp, Homo sapiens
  source 1..381: mol_type = other DNA
gaggtgcagctggtggagtctgggggaggcttggtccagcctggggggtccctgagactctcctgtgcagcctctggattcaccttcagtagctatgctatgcactgggtccgccaggctccagggaagggactggaatatgtttcagctattagtagtaatgggggtagcacatattatgcaaactctgtgaagggcagattcaccatctccagagacaattccaagaacacgctgtatcttcaaatgggcagcctgagagctgaggacatggctgtgtattactgtgcgagagagatcgtcgactatatagcagcagctggtacgttctactacggtatggacgtctggggccaagggaccacggtcaccgtctcctca

SEQ ID NO: 600 - DNA, 358 bp, Homo sapiens
  source 1..358: mol_type = other DNA
caggtgcagctggtgcagtctggggctgaggtgaagaagcctggggcctcagtgaaggtttcctgcaaggcatctggatacaccttcaccagctactatatgcactgggtgcgacaggcccctggacaagggcttgagtggatgggaataatcaaccctagtggtggtagcacaagctacgcacagaagttccagggcagagtcaccatgaccagggacacgtccacgagcacagtctacatggagctgagcagcctgagatctgaggacacggccgtgtattactgtgcgacaccccatgatagagaccatgcttttgatatctggggccaagggacaatggtcaccgtctcttcag

SEQ ID NO: 601 - DNA, 361 bp, Homo sapiens
  source 1..361: mol_type = other DNA
gaggtgcagttggtggagtccgggggagccttagtccagcctggggggtccctgggactctcctgtgaagcctctggattaaactttagaacttactggatgagttgggtccgccaggctccaggcaagaggctggagtgggtggccaacataaacgacgatggaagtcagaaataccatgcggaccctgtggaaggccgattcaccatctccagagataatgccaagaggtcactgtatctacaaatgcacagcctgagactcgaggacacggctgtatatttttgtgcgacggcgtgggatggcgacaaaggtgcttttgatgtctggggccaagggacgatggtcaccgtctcttcag

SEQ ID NO: 602 - DNA, 371 bp, Homo sapiens
  source 1..371: mol_type = other DNA
gaggtgcagctggtggagtctgggggaggcttggtccagcctggggggtccctaagactctcctgtgcagcctcaggattctcatttagtcgttttggcatgagctgggtccgccaggctccagggaaggggccggagtgggtctcaagtattagtgatagtggtggtagcgctcactatacagactccgtgaagggccggttcaccatctccagagacaattccaggaacacgctgtatctgcaaatgaacaccctgagagccgaggacacggccgtatattactgtgcgaaaagtatcactatgatagttgtggttgttacttatgcttttgatatctggggccaagggacaatggtcaccgtctcttc

SEQ ID NO: 603 - DNA, 364 bp, Homo sapiens
  source 1..364: mol_type = other DNA
caggtgcagctggtggagtctgggggaggcgtggtccagcctgggaggtccctgagactctcctgtgcagcgtctggattcaccttcagtagctatggcatgcactgggtccgccaggctccaggcaaggggctggagtgggtggcagttatatggtatgatggaagtaataaatactatgcagactccgtgaagggccgattcaccatctccagagacaattccaagaacacgctgtatctgcaaatgaacagcctgagagccgaggacacggctgtgtattactgtgcgaaagatctagttcggggagttaacccccacattgactactggggccagggaacgctggtcaccgtctcctcag

SEQ ID NO: 604 - DNA, 349 bp, Homo sapiens
  source 1..349: mol_type = other DNA
gaggtgcagctggtggagtctgggggaggcttggtacagcctggagggtccctgagactctcctgtgtagcctctggattcaccttcaggagttatgaaatgaactgggtccgccaggctccagggaaggggctgcagtgggtttcatacattagtagaagtggtagtaccatatactactcagactctgtgaagggccgattcaccatctccagagacaacgccaagaactcactgtatctgcaaatgaacagcctgagagccgaggacacggctatttattactgtgcgacgggaagcactctccttgactactgggggccgggaaccctggtcaccgtctcctcag

SEQ ID NO: 605 - DNA, 361 bp, Homo sapiens
  source 1..361: mol_type = other DNA
caggtccaggtggtgcaatctggggctgaactgaagaagcctgggtcctcggtgagggtctcctgcaaggcttctggaggcatctttaggaccaatggtatcagctgggtgcgacaggcccctggacaagggctggaatggatgggagggatcatcgctatctttggcacgccgacgtacgcacagaatttccagggcagagtcacgatttccgcggacgagtccacgagtacggtttacatggagctgagcagcctgagatctgaggacacggccatgtattactgtgccagaagtcctggttattatcacaactactttgacaattggggccagggaaccctggtcaccgtctcctcag

SEQ ID NO: 606 - DNA, 376 bp, Homo sapiens
  source 1..376: mol_type = other DNA
caggtgcagctggtggagtctgggggaggcgtggtccagcctgggaggtccctgagactctcctgtgcagcctctggattcaccttcagtagctatgctatgcactgggtccgccaggctccaggcaaggggctggagtgggtggcagttatatcatatgatggaagtaataaatactacgcagactccgtgaagggccgattcaccatctccagagacaattccaagaacacgctgtatctgcaaatgaacagcctgagagctgaggacacggctgtgtattactgtgcgagagaaggttacgatattttgactggttatgcgaaagatgcttttgatatctggggccaagggacaatggtcaccgtctcttcag

SEQ ID NO: 607 - DNA, 352 bp, Homo sapiens
  source 1..352: mol_type = other DNA
caggtgcagctggtgcagtctggggctgaggtgaagaagcctggggcctcagtgaaggtctcctgcaaggcttctggatacaccttcaccggctactatatgcactgggtgcgacaggcccctggacaagggcttgagtggatgggatggatcaaccctaacagtggtggcacaaactatgcacagaagtttcagggcagggtcaccatgaccagggacacgtccatcagcacagcctacatggagctgagcaggctgagatctgacgacacggccgtgtattactgtgcgagggtattttacggtggggtaacctactggggccagggaaccctggtcaccgtctcctcag

SEQ ID NO: 608 - DNA, 372 bp, Homo sapiens
  source 1..372: mol_type = other DNA
caggtccagctggtgcaatctgggactgaggtgaagaagcctgggtcctcggtgaaggtctcctgtaaggtttctggagtcctcttcagcggctctgctatcagctgggtgcggcaggcccctggacaagggcttgagtggatgggagggatcatgcctctctttgggacaacaaactacgcacagatattccaggccagagtcacgataaccgcggaccagtctacgaacaccgcctacatggagctgagcaacctgagatctgaggacacggccatttactactgtgcgaggcagggagtttctggaactacttattactactactacatggacgtctggggcaaagggaccccggtcatcgtctcctca

SEQ ID NO: 609 - DNA, 361 bp, Homo sapiens
  source 1..361: mol_type = other DNA
caggtccagctggtgcagtctggggctgaggtgaagaagcctgggtcctcggtgaaggtctcctgcaaggcttctggaggcaccttcagcagctatgctatcagctgggtgcgacaggcccctggacaagggcttgagtggatgggagggatcatccctatctttggtacagcaaactacgcacagaagttccagggcagagtcacgattaccgcggacgaatccacgagcacagcctacatggagctgagcagcctgagatctgaggacacggccgtgtattactgtgcgagagtacctcggggagttaaaagttcttgggatgactggggccagggaacgctggtcaccgtctcctcag

SEQ ID NO: 610 - DNA, 372 bp, Homo sapiens
  source 1..372: mol_type = other DNA
caggtccaactggtgcagtctgggactgaggtgaagaagcctgggtcctcggtgaaggtctcctgcaaggcttctggagtaatcttcaacagctatgctgtcagctgggtgcgacaggcccctggacaagggcttgagtggatgggagggatcatgcctatatttggaacgacaaattatgcacagagattcaagggccgactcacgataaccgcggaccaatctacgagcacagtctacatggagttgaacagcctgagatctcaggacacggccgtctactactgtgcgaggcaggcaactcctggaactacttattactactattacatggacgtctggggcgaagggaccccggtcatcgtctcctca

SEQ ID NO: 611 - DNA, 370 bp, Homo sapiens
  source 1..370: mol_type = other DNA
caggtgcagctggtgcagtctggggctgaggtgaagaagcctggggcctcagtgaaggtctcctgcaaggcttctggatacaccttcaccagttatgatatcaactgggtgcgacaggccactggacaagggcttgagtggatgggatggatgaaccctaacagtggtaacacaggctatgcacagaagttccagggcagagtcaccatgaccaggaacacctccataagcacagcctacatggagctgagcagcctgagatctgaggacacggccgtgtattactgtgcgagaggccggacggactacggtggtaactcttatgcttttgatatctggggccaagggacaatggtcaccgtctcttcag

SEQ ID NO: 612 - DNA, 372 bp, Homo sapiens
  source 1..372: mol_type = other DNA
gacgtgcagttggtggagtctgggggaggtgtggtttggcctggggggtccctgagactctcctgtgtagcctctggattcacatttgataattatggcctgagttgggtccgccaagctccagggaaggggctggagtgggtctctagtgtaaattggaatggtggaaacacagattatgcagactctgtgaagggccgattcaccgtctccagagacaacgccaagaactctctatatttacaaatgaccagtctgagagccgaggacacggccttctattactgtgcgagaaatatagtgggaactactatagtccactactcttacatggacgtctggggcaaagggaccacggtcaccgtctcctca

SEQ ID NO: 613 - DNA, 370 bp, Homo sapiens
  source 1..370: mol_type = other DNA
gaagtgcagctggtggagtctgggggaggcttggtacagcctggcaggtccctgagactctcctgtgcagcctctggattcacctttgatgattatgccatgcactgggtccggcaagctccagggaagggcctggagtgggtctcaggtattagttggaatagtggtagcataggctatgcggactctgtgaagggccgattcaccatctccagagacaacgccaagaactccctgtatctgcaaatgaacagtctgagagctgaggacacggccttgtattactgtgcaaaagataaaacacatagcagcagctggtacggagcctttgactactggggccagggaaccctggtcaccgtctcctcag

SEQ ID NO: 614 - DNA, 355 bp, Homo sapiens
  source 1..355: mol_type = other DNA
gaggtgcagttggtggagtctgggggaggcttggcccagcctggggggtccctgagactctcctgtgtagcctctggattcagctttagtaactcttggatgagctgggtccgccaggctccagggaaggggctggagtgggtggccaacatgaagcacgatggaagtgagaaatactatctggactctgtgaagggccgattcaccatctccagagacaacgccaagaactcactttatctgcaaatgaacagcctgagagccgaggacacggctgtgtattactgtgcgagagatatggctgttggggcttctgatatctggggccaagggacaatggtcaccgtctcttcag

SEQ ID NO: 615 - DNA, 369 bp, Homo sapiens
  source 1..369: mol_type = other DNA
caggtccagttggtacagtctggggctgaggtgaagaagcctgggtcctcggtgacggtctcctgcaaggcctctggagtcatcttcaacagctactctataagttgggtgcgacaggcccctggacaagggcttgagtggatgggagggatcatccctatttttggtacaacaaaatacgcacagaaatttcagggcagagtcacaattaccgcggacgaatccacgagcacagtctacatgaggctgagcagcctgacatttgaggacacggccctatattactgtgcgaggcaagctgtcacaggaactacctactacaactactatatggacgtctggggcaaagggaccccggtcgacgtctcc

SEQ ID NO: 616 - DNA, 364 bp, Homo sapiens
  source 1..364: mol_type = other DNA
caggtgcagctggtggagtcggggggaggcgtggtccagcctgggaggtccctgcgactctcctgtgcagcctctggattcagtttcaatagctatgctatgcactgggtccgccaggctccaggcaaggggctggagtgggtggcatttatatcatatgatggaagtaaagaatactacgcagagtccgtgaagggccgattcaccatctccagagacagttccaagaaaatgctgtatttacaaatgaacaacttgagccctgaggacagggctttatattactgtgcgagagaaggcagtggctggagagacgatgcttttgatatctggggccgagggacaatggtcaccgtctcttcag

SEQ ID NO: 617 - DNA, 360 bp, Homo sapiens
  source 1..360: mol_type = other DNA
caggtggagctggtggagtctgggggaggcgtggtccagcctgggaggtccctgagactctcctgtgcagcctctaaagtcaccttcagtatgtataacatgcactgggtccgccaggctccaggcaaggggctggaatggctgacacgcatctcatacgatggaaccaataaatactacgcagactccgtgaagggccgattcaccatctccagagacaattccaagaccacactctatttgcaaatgaacagcctgagaactgaggacacgggtgtgtactactgtgcgagtagccccgcctatttctactactacatggacgtctggggcaaagggaccacggtcaccgtctcctca

SEQ ID NO: 618 - DNA, 369 bp, Homo sapiens
  source 1..369: mol_type = other DNA
caggtccagctggtgcagtctggggctgaggtgaggaagcctggatcctcggtaagagtctcctgccaggcctctggagtcatcttcaatgcttatactatcgcctgggtgcgactggcccctggacaggggcttgaatggatggggggggtcatgcctctctttcgttcaacaaagtacgcacagaaattccagggcagagtcactattaccgcggacgaatctacgagcacagcctacatggagctgagtggcctgacagttgacgacacggccgtctattactgtgcgaggcaggctatgggagggactacctactacaactactacatggacgtctggggcaaagggaccacggtcaccgtctcc

SEQ ID NO: 619 - DNA, 370 bp, Homo sapiens
  source 1..370: mol_type = other DNA
gaggtgcagctggtggaatctgggggaggcttggcacaacctggggggaccctgagactctcctgtgcagcctctggattcacctttaacacctatggcatgcgctgggtccgtcaggctccagggaaggggctggagtgggtctcagatattagtgggagtggtggtagcacatactacgcagactccgtgaagggccggttcaccatctccagagacaactccaagagaacgctgtatctccaaatgaacagcctgagagccgaggacacggccgtgtattactgtgcgaaagattattctacatttataccaatggctggtgcgtctgactactggggccagggaaccctggtcaccgtctcctcag

SEQ ID NO: 620 - DNA, 381 bp, Homo sapiens
  source 1..381: mol_type = other DNA
gaggtgcagctggtggagtctgggggaggcctggtcaagcctggggggtccctgagactctcctgtgcagcctctggattcaccttcagtagctatagcatgaactgggtccgccaggctccagggaaggggctggagtgggtctcatccattagtagtagtagtagttacatatactacgcagactcagtgaagggccgattcaccatctccagagacaacgccaagaactcactgtatctgcaaatgaacagcctgagagccgaggacacggctgtgtattactgtgcgagagatcttaaccgttgtagtggtggtagctgctactactactacggtatggacgtctggggccaagggaccacggtcaccgtctcctca

SEQ ID NO: 621 - DNA, 360 bp, Homo sapiens
  source 1..360: mol_type = other DNA
caggtgcagctggtggagtctgggggaggcgtggtccagcctggggggtccctgacactctcctgtgcagcctctacaatcaccttcagtatgtatggtctacactgggtccgccaggctccaggcaaggggctggaatgggtgacgtttatctcctatgatggaacgaaaaactactatgtagactccgtgaggggccgattcaccgtctccagagacaattccaagagcacactctatctgcacatgaacaacctgagagctgaggacacggctatttattactgtgcgagtagccccgcctacttttactactacatggacgtctggggcaaagggaccacggtcaccgtctcctca

SEQ ID NO: 622 - DNA, 348 bp, Homo sapiens
  source 1..348: mol_type = other DNA
gaggtgcagctggtggagtctgggggaggcttggtacagcctggggggaccctgagactctcctgtgcagcctctggattcacctttagcagctatggcatgagctgggtccgccaggctccagggaaggggctggagtgggtctcagctattagtggtagtggtggtagcacatactacgcagactccgtgaagggccggttcaccatctccagagacaattccaagaacacgctgtatctgcaaatgaacagcctgagagccgaggacacggccgtatattactgtgcgaaagttgtacaccccatggacgtctggggcaaagggaccacggtcaccgtctcctca

SEQ ID NO: 623 - DNA, 360 bp, Homo sapiens
  source 1..360: mol_type = other DNA
caggtgcaactggtggagtctgggggaggcgtggtccagcctgggaggtccctgagactctcctgtgcagcctctacaatcgccttcagtatgtatactatgcactgggtccgccaggctccaggcaagggactggaatgggtgacacttatctcatatgatggaacgaataaatactacgcagactccgtgaagggccgattcaccatctccagagacaattccaagagcacgctctatttgcagatgaacagcctgagagctgaggacacggctgtttattactgtgcgagtagccccgcctacttctactattacatggacgtctggggcaaagggaccacggtcaccgtctcctca

SEQ ID NO: 624 - DNA, 349 bp, Homo sapiens
  source 1..349: mol_type = other DNA
gaggtgcagctggtggagtctgggggaggcttggtacagcctggagggtccctgagactctcctgtacagtctctggattcaccttcagtagttatgaaatgaactgggtccgccagactccagggaaggggctggagtggctttcatacatttccagtggtggtgataccagattctacgcagactctgtgaagggccgattcaccgtctccagagacaacgccaagaactcattgtatctgcaaatgcacggcctgagagtcgcggacacggctgtttattactgtgtggcgggacctaccacttttgactactggggccagggaaccctggtcaccgtctcctcag

SEQ ID NO: 625 - DNA, 373 bp, Homo sapiens
  source 1..373: mol_type = other DNA
gaggtgcagctggtggagtctgggggaggcttggtccagcctggggggtccctgagactctcctgtgcagcctctggattcacctttagtaactattacatgaactgggtccgccagcctccagggaaggggctggagtgggtggccagcataaagcaagatggcagtgagaaatactatgtggactctgtgaagggccgattcaccatctccagagacaacgccaagaactcactgtatctgcaaatgaacagcctgagagccgaggacacggctgtgtattactgtgcgacgtcacagggggaattgatcggggaattattaagtccctttgactactggggccagggaacgctggtcaccgtctcctcag

SEQ ID NO: 626 - DNA, 372 bp, Homo sapiens
  source 1..372: mol_type = other DNA
caggtccaactggtgcagtctgggactgaagtgaagaagcctgggtcctcggtgaaggtctcctgcaaggcttctggagtcatcttcagcagttatgctatcagctgggtgcgacaggcccctggacaagggcttgagtggatgggagggatcatgcctatttttggtacaacgaactatgcacagaggttccagggcagagtcacactaaccgcggaccaatctacgagcacagcctatatggagctgaacagcctgagatctgaggacacggccgtttactactgtgcgaggcaggcaatttctggaactacctattactactattacatggacgtctggggcaaagggaccccggtcaccgtctcctca

SEQ ID NO: 627 - DNA, 361 bp, Homo sapiens
  source 1..361: mol_type = other DNA
gagatgcaactggtggagtcggggggaggcttggtccagcctggagagtccctgagactctcctgtagagggtctgaatctttctttagtgtcgattggatgagttgggtccgccagactccagggaagggactggagtgggtgggcaacatcgacaaagagggaagtgagagacactatgtggactctgtgaaaggccgcttcaccatctccagagacaacgccgagaattcagtgtttctgcaaatcaacagcctgagagtcggggacacgggtgtttattactgtgcgagggcgtgggatggcagcaatggtgcttttgatatttggggccaagggacaatggtcaccgtttcttcag

SEQ ID NO: 628 - DNA, 361 bp, Homo sapiens
  source 1..361: mol_type = other DNA
gaggtgcagctggtggagtctgggggaggcttggtacagcctggagggtccctgagactctcctgtgcagcctctggattcaccttcagtagttatgaaatgaactgggtccgccaggctccagggaaggggctggagtgggtttcatacattagtagtagtggtagtaccatatactacgcagactctgtgaagggccgattcaccatctccagagacaacgccaagaactcactgtatctgcaaatgaacagcctgagagccgaggacacggctgtttattactgtgcgagagttgcgagagctaccacgtactactttgactactggggccagggaacgctggtcaccgtctcctcag

SEQ ID NO: 629 - DNA, 361 bp, Homo sapiens
  source 1..361: mol_type = other DNA
gaggtgcagctgttggagtctgggggaggcttggtacagcctggggggtccctgagactctcctgtgcagcctctggattcacctttagcagctatgccatgagctgggtccgccaggctccagggaaggggctggagtgggtctcagctattagtggtagtggtggtagcacatactacgcagactccgtgaagggccggttcaccatctccagagacaattccaagaacacgctgtatctgcaaatgaacagcctgagagccgaggacacggccgtatattactgtgcgaaatccccctggaacgacgtccgttcccttgactactggggccagggaacgctggtcaccgtctcctcag

SEQ ID NO: 630 - DNA, 379 bp, Homo sapiens
  source 1..379: mol_type = other DNA
caggtgcagctggtggagtctgggggaggcgtggtccagcctgggaggtccctgagactctcctgtgcagcctctggattcaccttcagtagctatgctatgcactgggtccgccaggctccaggcaaggggctggagtgggtggcagttatatcatatgatggaagcaataaatactacgcagactccgtgaagggccgattcaccatctccagagacaattccaagaacacgctgtatctgcaaatgaacagcctgagagctgaggacacggctgtgtattactgtgcgagagatcaagtctacagttcgtacacgtggctggtagggtactggttcgacccctggggccagggaaccctggtcaccgtctcctcag

SEQ ID NO: 631 - DNA, 364 bp, Homo sapiens
  source 1..364: mol_type = other DNA
gaggtgcagctgttggagtctgggggaggcttggtacagcctggggggtccctgagactctcctgtgcagcctctggattcacctttagcagctatgccatgagctgggtccgccaggctccagggaaggggctggagtgggtctcagctattagtggtagtggtggtagcacatactacgcagactccgtgaagggccggttcaccatctccagagacaattccaagaacacgctgtatctgcaaatgaacagcctgagagccgaggacacggccgtatattactgtgcgaaagttggtggatacagctatgctggggcttttgatatctggggccaagggacaatggtcaccgtctcttcag

SEQ ID NO: 632 - DNA, 370 bp, Homo sapiens
  source 1..370: mol_type = other DNA
gaggtgcagctggtggagtctgggggaggcttggtacagccagggcggtccctgagactctcctgtgcagcttctggattcacctttggtgattatgctatgagctgggtccgccaggctccagggaaggggctggagtgggagtgggtaggtttcattagaagcaaagcttctggtgggacaacagaatacgccgcgtctgtgaaaggcagattcaccatctcaagagatgattccaaagacatcgcctatctgcaaatgaacagcctgaaaaccgaggacacagccgtgtattactgtactagagatctgcgtggagctagagcttttgatatctggggccaagggacaatggtcaccgtctcttcag

SEQ ID NO: 633 - DNA, 366 bp, Homo sapiens
  source 1..366: mol_type = other DNA
caggtacagctgcaggagtcgggcccaggactcgtgaagccttcggagaccctgtccctcacctgcgctgtgtctggttactccatcagcggtggttactgctggggctggatccggcagtccccagggaaggggctggagtggattgggactatctatcatagtgggatcacctactacaacccgtccctcaagagtcgcgtcaccctatcagtagacacgtccaagagtcaattctccctgaggctgagctctgtgaccgccgcagacacggccgtttactactgtgcgagggcgggggagattatagtagtacctggatacatggacgtctggggcaaagggaccacggtcaccgtctcttca

SEQ ID NO: 634 - DNA, 358 bp, Homo sapiens
  source 1..358: mol_type = other DNA
gaggtgcagctggtgcagtctggagcagaggtgaaaaagcccggggagtctctgaagatctcctgtaagggttctggatacagctttaccagctactggatcggctgggtgcgccagatgcccgggaaaggcctggagtggatggggatcatctatcctggtgactctgataccagatacagcccgtccttccaaggccaggtcaccatctcagccgacaagtccatcagcaccgcctacctgcagtggagcagcctgaaggcctcggacaccgccatgtattactgtgcgagatctactggggatcaggagccatttgactactggggccagggaacgctggtcaccgtctcctcag

SEQ ID NO: 635 - DNA, 349 bp, Homo sapiens
  source 1..349: mol_type = other DNA
caggtgcagctggtggagtctgggggaggcttggtcaagcctggagggtccctgagactctcctgtgcagcctctggattcacctacagtgactcctacatgagctggatccgccaggctccagggaaggggctggagtgggtttcatacattagtggtagtggtggtaccatatactacgcagagtctgtgaagggccgattcaccatctccagggacaacgccaagaactcactgtatctgcaaatgaacagcctgagagccgaggacacggccgtgtattactgtgcgagaggggactattactttgactactggggccagggaaccctggtcaccgtctcctcag

SEQ ID NO: 636 - DNA, 364 bp, Homo sapiens
  source 1..364: mol_type = other DNA
gaggtgcagctggtggagtctgggggaggcctggtccagcctggagggtccctgagagtctcctgtgcagcctctggattcagcttcagtgactactacatgcattgggtccgccaggctccagggaaggggctggagtgggttgcccgtattagaaacaaagctaacagttacatcacagagtacggcgcgtccatgagaggcagattcaccatctcaagagatgattcaaagaattcagtgtttctgcaaatcaacagcctgaaaatcgaggacacggccgtatattactgtgctagagattcgggtggcggtgcctattttgactactggggccagggaacgctggtcatcgtctcctcag

SEQ ID NO: 637 - DNA, 397 bp, Homo sapiens
  source 1..397: mol_type = other DNA
cagctgcagctgcaggagtcgggcccaggactggtgaagccttcggagaccctgtccctcacctgcactgtctctggtggctccatcagcagtagtagttactactggggctggatccgccagcccccagggaaggggctggagtggattgggagtatctattatagtgggagcacctactacaacccgtccctcaagagtcgagtcaccatatcagtagacacgtccaagaaccagttctccctgaagctgagctctgtgaccgccgcggacacggccgtgtattactgtgcgacctcggggccaggacgtattactatggttcggggagttatagcgcccatctttgactggttcgacccctggggccagggaaccctggtcaccgtctcctcag

SEQ ID NO: 638 - DNA, 370 bp, Homo sapiens
  source 1..370: mol_type = other DNA
caggtccagctggtgcagtctggggctgaggtgaagaagcctgggtcctcggtgaaggtctcctgcaaggcttctggaggcaccttcagaaactatgcagtcatctgggcgcgacaggcccctggacaagggcttgagtggatgggagggatcatccctctctttcgcacaacgaactacgcgcataagttccagggcagagtcacgattaccgcggacgaatccacgagcacagcctacatggagctgaacagcctgagatctgatgacacggccgtgtatttctgtgcgacttcccccccttattatgatagtagtggccctctctttgactactggggccagggaacgctggtcaccgtctcctcag

SEQ ID NO: 639 - DNA, 363 bp, Homo sapiens
  source 1..363: mol_type = other DNA
gaggtgcagctggtggagtctgggggaggcttggtacagcctggagggtccctgagactctcctgtgcagcctctggattcaccttcagtagttatgaaatgaactgggtccgccaggctccagggaaggggctggagtgggtttcatacattagtagtagtggtagtaccatatactacgcagactctgtgaagggccgattcaccatctccagagacaacgccaagaactcactgtatctgcaaatgaacagcctgagagccgaggacacggctgtttattactgtgcgagagaggaagtccactactactactacggtatggacgtctggggccaagggaccacggtcaccgtctcctca

SEQ ID NO: 640 - DNA, 352 bp, Homo sapiens
  source 1..352: mol_type = other DNA
gaggtgcagttggtggagtctgggggaggcttggtaaagcctggggggtcccttagactctcctgtgcagcctctggattcactttcagtgacgcctggatgaactgggtccgccaggctccagggaaggggctggagtgggttggccgtattaaaagcaaaactgatggtgggacaacaaactacgctgcacccgtgaaagacagattcaccatctcaagagatgattcaaaaactacgctgtatctgcaaatgaacagcctgaaaaccgaagacacagccgtgtattactgtaccacattcgggagcagaggctactggggccagggaacgctggtcaccgtctcctcag

SEQ ID NO: 641 - DNA, 373 bp, Homo sapiens
  source 1..373: mol_type = other DNA
caggtgcagctggtggaatcggggggaggcgtggtccagccgggggggtccctgagactctcctgtgcagcgtctgggttcacgttcagtagctatggcatgcactgggtccgccaggctccaagtaaggtgctggagtgggtggcatttatacgctatgatggaagttataaatcctatgcagactccgtgaagggccgattcaccatctccagagacaattccaagaacacgctgtatctgcaagtgaacagcctgagacctgaggacacggctgtgtattactgtgcgaaagatcaatatttttggagtggtcattatcaatacccgactgactactggggccagggaaccctggtcaccgtctcgtcag

SEQ ID NO: 642 - DNA, 349 bp, Homo sapiens
  source 1..349: mol_type = other DNA
gaggtgcagctggtggaatctgggggaggcttggtgcagcctggagggtccctaagactctcctgtgcagcctctggattcaccttcagtggttatgaactgaactgggtccgccaggctccagggaaggggctggagaggatttcatacattagtagtggtggtgataccatgtattacgcagactctgtgaagggccggttcaccatctccagagacaacgccaagaactcactgtatctgcaaatgaacagcctgagagccgaggacacggctgtttattactgtgcgagagggatgactacaattgactcttggggccagggaaccctggtcaccgtctcctcag

SEQ ID NO: 643 - DNA, 370 bp, Homo sapiens
  source 1..370: mol_type = other DNA
gaggtgcagctgctggagtctgggggaggcttcatacagcctggggggaccctgagactctcctgtgcagcctctggattcagctttagcagttatggcatgtactgggtccgccaggctccagggaaggggctggagtgggtctcaagtattagtggtagtggtcttagtgcatactacgcagactccgtgaagggtcggttcaccatctccagagacaactccaagcacacgctgtatttgtacatgaatagcctgagagccgaggacacggccctatattactgtgcgaaggagtattctacctatgtaccagtgactggtacgtttgactactggggccagggaaccctggtcaccgtctcctcag

SEQ ID NO: 644 - DNA, 370 bp, Homo sapiens
  source 1..370: mol_type = other DNA
gaggtgcagctggtggaatctgggggaggcttggtacagccgggggggaccctgagactctcctgtgtagcctctgggttcacccttagtaactatggcatgaactgggtccgccaggctccagggaaggggctggagtgggtctcatcgattagtggaactggtggtagctcatactatgcagacgccgtgaagggccggttcaccatctccagagacatttccaggaacacactgtatctgcaaatgagtggcctgagagccgaggacacggccgtatattactgtgcgaaagatcgcagcaactacgtcgtgtattatgggtacttcgactcctggggccagggaaccctggtcaccgtctcctcag

SEQ ID NO: 645 - DNA, 382 bp, Homo sapiens
  source 1..382: mol_type = other DNA
gaggtgcagctggtgcagtctggagcagaggtgaaaaagccgggggagtctctgaagatctcctgtaagggttctggatacagctttaccagctactggatcggctgggtgcgccagatgcccgggaaaggcctggagtggatggggatcatctatcctggtgactctgataccagatacagcccgtccttccaaggccaggtcaccatctcagccgacaagtccatcagcaccgcctacctgcagtggagcagcctgaaggcctcggacaccgccatgtattactgtgcgagatcaagttggggactcggtttcgagtgggagctactaccgggatactttgactactggggccagggaaccctggtcaccgtctcctcag

SEQ ID NO: 646 - DNA, 373 bp, Homo sapiens
  source 1..373: mol_type = other DNA
gaggtgcagctgttggagtcggggggaggcttgggacagcctggggggtccctaaggctctcctgtgcagcctctggattcagctttactacctatgacttgagttgggtccgccaggctccagggaaggggctggagtgggtctcagctattagtgatagtggtggtagtacttactacgcagactccgtgaagggccggttcaccatctccagagacaactccaagaacacgctgtatctggaaatgaacagtctgagaaccgaggacacggccgtatattactgtgcgaaaagtattactacgatagtggtagttgttacttatgcttttgatatctggggccaagggacaatggtcaccgtctcttcag

SEQ ID NO: 647 - DNA, 367 bp, Homo sapiens
  source 1..367: mol_type = other DNA
caggtgcagctacagcagtggggcgcaggactgttgaagccttcggagaccctgtccctcacctgcgctgtctatggtgggtccttcagtggttactactggagctggatccgccagcccccagggaaggggctggagtggattggggaaatcaatcatagtggaagcaccaactacaacccgtccctcaagagtcgagtcaccatatcagtagacacgtccaagaaccagttctccctgaagctgagctctgtgaccgccgcggacacggctgtgtattactgtgcgagaggccccccgggcaattactatggttcggggagttatgcagactggggccagggaacgctggtcaccgtctcctcag

SEQ ID NO: 648 - DNA, 373 bp, Homo sapiens
  source 1..373: mol_type = other DNA
caggtccagctggtgcagtctgggcctgagctgaagaagcctgggtcctcggtgaaggtctcctgcaaggcttctggaggcacctttagcagatatgccatcagctgggtgcgacaggcccctggacaaggccttgagtgggtgggggggatcatccctatatttggtgtatcaaagtacgcacagaggttccagggcagagtcacgattaccgcggacgagtccacgagcgcagccgacatggaattgagcagactgacacctgaggacacggccctgtacttctgtgcgaaggtgaaggagttccatggcttggcaagtcattatattcttgactcctggggccagggaacgctggtcaccgtctcctcag

SEQ ID NO: 649 - DNA, 364 bp, Homo sapiens
  source 1..364: mol_type = other DNA
gaggtgcagctggtggagtctgggggaggcttggtaaagcctggggggtcccttagactctcctgtgcagcctctggattcactttcagtaacgcctggatgagctgggtccgccaggctccagggaaggggctggagtgggttggccgtattaaaagcaaaactgatggtgggacaacagactacgctgcacccgtgaaaggcagattcaccatctcaagagatgattcaaaaaacacgctgtatctgcaaatgaacagcctgaaaaccgaggacacagccgtgtattactgtaccacagattacgagggatacagctatggtacacactggggccagggaacgctggtcaccgtctcctcag

SEQ ID NO: 650 - DNA, 361 bp, Homo sapiens
  source 1..361: mol_type = other DNA
caggttcaactggtacagtctggggcggaagtgaggaagcctggggcctcagtgagggtctcctgcaagacttctggattcgtcttcaccgactactatatacattggatgcgcctggccgctggacagggccttgagtgggttgggtgggtcgacccaacaagtggagacacaaatcttgcgccgaagtttcggggcagggtcaccatgaccctggacacgtccatcaccactgcctatatggagatcaccaacctggcatctgacgacacggccgtctattattgtgcgagaaattattatggttcggggagtaaacatgactcctggggccaggggaccctggtcaccgtctcctcag

SEQ ID NO: 651 - DNA, 361 bp, Homo sapiens
  source 1..361: mol_type = other DNA
caggtcaccttgaaggagtctggtcctgtgctggtgaaacccacagagaccctcacgctgacctgcaccatctctgggttctcactcagcaatgctagaatgggtgtgagctggatccgtcagcccccagggaaggccctggagtggcttgcacacattttttcgaatgacgaaaaatcctacagcacatctctgaagagcaggctcaccatctccaaggacacctccaaaagccaggtggtccttaccatgaccaacatggaccctgtggacacagccacatattactgtgcacggaccaccatcggtgactacgaggttgactactggggccagggaaccctggtcaccgtctcctcag

SEQ ID NO: 652 - DNA, 384 bp, Homo sapiens
  source 1..384: mol_type = other DNA
gaggtgcagctggtgcagtctggagcagaggtgaaaaagccgggggagtctctgaagatctcctgtaagggttctggatacagctttaccagctactggatcggctgggtgcgccagatgcccgggaaaggcctggagtggatggggatcatctatcctggtgactctgataccagatacagcccgtccttccaaggccaggtcaccatctcagccgacaagtccatcagcaccgcctacctgcagtggagcagcctgaaggcctcggacaccgccatgtattactgtgcgagagtctctccggcgtattacgatattttgactggttaccaaacgggctacatggacgtctggggcaaagggaccacggtcaccgtctcctca

SEQ ID NO: 653 - DNA, 376 bp, Homo sapiens
  source 1..376: mol_type = other DNA
caggtccagctggtgcagtctggggctgaggtgaagaagcctgggtcctcggtgaaggtctcctgcaaggcttctggaggcaccttcagcagctatgctatcagctgggtgcgacaggcccctggacaagggcttgagtggatgggagggatcatccctatctttggtacagcaaactacgcacagaagttccagggcagagtcacgattaccgcggacgaatccacgagcacagcctacatggagctgagcagcctgagatctgaggacacggccgtgtattactgtgcgagagattcccatacggtgactacgtaccgtttagggggcagttttgactactggggccagggaacgctggtcaccgtctcctcag

SEQ ID NO: 654 - DNA, 370 bp, Homo sapiens
  source 1..370: mol_type = other DNA
gaggtgcagctggtggagtctgggggagacttaatacagccgggggggaccctgagactctcctgtgcagcctctggattcacgtttagcaactatgtcatgtactgggtccgccaggctccagggaaggggctggagtgggtctcaagtattagtggtagtggtggtagcgcatactacgcagactccgtgaggggccggttcaccgtctccagagacacttccaagaacaccctgtatctgcaaataaatagtctgagaaccgaggacacggccgtctattattgtgcgaaggatcagtctacctttataccagtgactggtacgcttgactactggggccagggaaccctggtcaccgtctcctcag

SEQ ID NO: 655 - DNA, 379 bp, Homo sapiens
  source 1..379: mol_type = other DNA
gaggtgcaggtggtggaatctgggggagccttggtccggcctggggggtctctaagactctcctgtgcaggctctggattcacgtttggtgattattggatggcctgggtccgccaggttccagggaagggactggaatgggtggccagtataaaagaagatggaagtgagaaatattatggggactctgtgaagggccgaatcaccatctccagagacaacgccaagaagtcgctatatttgcaactgacaagcctgagagtcgaggacacggcactgtatcactgtgtgaaagatggggcatcttgtggcggtgactgcgacatgcctcaatatttccaagactggggtcagggcaccctggtcaccgtctcctcag

SEQ ID NO: 656 - DNA, 391 bp, Homo sapiens
  source 1..391: mol_type = other DNA
caggtgcagctggtggagtctgggggaggcttggtcaagcctggagggtccctgagactctcctgtgcagcctctggattcaccttcagtgactactacatgagctggatccgccaggctccagggaaggggctggagtgggtttcatacattagtagtagtggtagtaccatatactacgcagactctgtgaagggccgattcaccatctccagggacaacgccaagaactcactgtatctgcaaatgaacagcctgagagccgaggacacggccgtgtattactgtgcgagagatttccttgaaggggattactatgatagtagtggttattacttacccctcccttttgactactggggccagggaaccctggtcaccgtctcctcag

SEQ ID NO: 657 - DNA, 364 bp, Homo sapiens
  source 1..364: mol_type = other DNA
caggtccaactggtgcagtctggggctgaggtgaagaagcctgggtcctcggtgaaggtctcctgccaggcctctggaggccccttttttagtagtcatgctttcacctgggtgcgacaggcccctggacaagggcttgagtggatgggaggcatcatgtctatgtttcgtacaactaactacgcacagaaattccggggcagagtcacgattaccgcggacgaatcctcgaccaccagttacatggaattgaacagcctgacatctgacgacacggccgtctattattgtgcgagaggaccaaattattatgagacttacttcgatctctggggccctggcaccctggtcactgtctcctcag

SEQ ID NO: 658 - DNA, 367 bp, Homo sapiens
  source 1..367: mol_type = other DNA
gaggtgcagctggtgcagtctggagcagaggtgaaaaagcccggggagtctctgaagatctcctgtaagggttctggatacagctttaccagctactggatcggctgggtgcgccagatgcccgggaaaggcctggagtggatggggatcatctatcctggtgactctgataccagatacagcccgtccttccaaggccaggtcaccatctcagccgacaagtccatcagcaccgcctacctgcagtggagcagcctgaaggcctcggacaccgccatgtattactgtgcgagcgaagtcgcagtggctggtagtattgtagcttttgatatctggggccaagggacaatggtcaccgtctcttcag

SEQ ID NO: 659 - DNA, 373 bp, Homo sapiens
  source 1..373: mol_type = other DNA
cagctgcagctgcaggagtcgggcccaggactggtgaagccttcggagaccctgtccctcacctgcactgtctctggtggctccatcagcagtagtagttactactggggctggatccgccagcccccagggaaggggctggagtggattgggagtatctattatagtgggagcacctactacaacccgtccctcaagagtcgagtcaccatatcagtagacacgtccaagaaccagttctccctgaagctgagctctgtgaccgccgcggacacggccgtgtattactgtgctcgtcggggttcggggagttattataacgcgtactactttgactactggggccagggaaccctggtcaccgtctcctcag

SEQ ID NO: 660 - DNA, 367 bp, Homo sapiens
  source 1..367: mol_type = other DNA
gaggtgcagctggtgcagtctggagcagaagtgagaaagcccggggagtctctgaaaatctcttgtgagggttctggaaacagcttcatcaactattggatcgcctggtggcgccagatgcccgagaaaggcctggagtgggtgggtatgattcatcctagtgactctgataccagatacagtccgtccttccaaggccaggtcaccatctcagccgacaagtccatcaccaccgcctatctgcagtggagcagcctgaaggcctcggacaccgccatatattactgtgcgcgcataaatagtagttggccctcattgggccctcttgatatctggggccaggggacaatggtcaccgtctcttcag

SEQ ID NO: 661 - DNA, 397 bp, Homo sapiens
  source 1..397: mol_type = other DNA
gaggtgcagctgtgggagtctgggggcggcttggtacagccgggggggtccctgagactctcctgtgcagcctctggatacacatttagcaactatgccatgagttgggtccgccaggctccagggaaggggctggaatggatctcaactattaataaaaagggtgataacacacattatgcagactccgtgaagggccgcttcaccatctccagagacaattccaggaacacgttgtatctgcaaatgcacaacgtgagagtcgaggacacggccgtgttttactgtgcgaagagaggttactccgagcgagtattacgatattttgactgggtatcatgggagggggactactttgactattggggccagggaacgctggtcaccgtctcttcag

SEQ ID NO: 662 - DNA, 382 bp, Homo sapiens
  source 1..382: mol_type = other DNA
caggtccagctggtgcagtctggggctgaggtgaagaagcctgggtcctcggtgaaggtctcctgcaaggcttctggaggcaccttcagcagctatgctatcagctgggtgcgacaggcccctggacaagggcttgagtggatgggagggatcatccctatctttggtacagcaaactacgcacagaagttccagggcagagtcacgattaccgcggacgaatccacgagcacagcctacatggagctgagcagcctgagatctgaggacacggccgtgtattactgtgcgagagatgctgagcccgcatggttcggggagttagattattttaatgcttttgatatctggggccaagggacaatggtcaccgtctcttcag

SEQ ID NO: 663 - DNA, 368 bp, Homo sapiens
  source 1..368: mol_type = other DNA
caggtgcaactggtggagtctgggggaggcgtggtccagcctgggaggtccctgagactctcctgtgcagcctctggattcaccttcagtagctatgctatgaactgggtccgccaggctccaggccaggggctggactgggtggcagctatatcatatgatggaagcgataccaactacgcagactccgtgaagggccgattcaccatctccagagacaattccaagaacacgctgcatctgcaaatgaacagcctgagagctgaggacacggctgtctattactgtgcgagagatcgcgcgtcgtatcccctggtaccagaatacttccagtactggggccagggcaccctggtcaccgtctcctc

SEQ ID NO: 664 - DNA, 361 bp, Homo sapiens
  source 1..361: mol_type = other DNA
gaggtgcagctggtggagtctgggggaggcttggtacagccagggcggtccctgagactctcctgtacagcttctggattcacctttggtgattatgctatgagctggttccgccaggctccagggaaggggctggagtgggtaggtttcattagaagcaaagcttatggtgggacaacagaatacgccgcgtctgtgaaaggcagattcaccatctcaagagatgattccaaaagcatcgcctatctgcaaatgaacagcctgaaaaccgaggacacagccgtgtattactgtactagagtggagcaaagcagtggccctgactactggggccagggaacgctggtcaccgtctcctcag

SEQ ID NO: 665 - DNA, 367 bp, Homo sapiens
  source 1..367: mol_type = other DNA
gaggtgcagctggtggagtctgggggaggcttggtacagcctggagggtccctgagactctcctgtgcagcctctggattcaccttcagtagttatgaaatgaactgggtccgccaggctccagggaaggggctggagtgggtttcatacattagtagtagtggtgataccatatactacgcagactctgtgaagggccgattcaccatctccagagacaacgccaagaactcactgtatctgcaaatgaacagcctgagagccgaggacacggctgtttattactgtactgtgggtagcagtggctggtacgggggaaatgtttttgatatctggggccaagggacaatggtcaccgtctcttcag

SEQ ID NO: 666 - DNA, 364 bp, Homo sapiens
  source 1..364: mol_type = other DNA
caggtccagctggtgcagtctggggctgaggtgaagaagcctgggtcctcggtgaaggtctcctgcaaggcttctggaggcaccttcagcagctatgctatcagctgggtgcgacaggcccctggacaagggcttgagtggatgggagggatcatccctatctttggtacagcaaactacgcacagaagttccagggcagagtcacgattaccgcggacgaatccacgagcacagcctacatggagctgagcagcctgagatctgaggacacggccgtgtattactgtgcgagagtttccattgatcccgtacctcggccgttcgacccctggggccagggaaccctggtcaccgtctcctcag

SEQ ID NO: 667 - DNA, 371 bp, Homo sapiens
  source 1..371: mol_type = other DNA
caggtccagctggtgcagtctggggctgaggtgaagaagcctgggtcctcggtgaaggtctcctgtaaggcttctggaggcaccttcagcagatatggtctcacctgggtgcgacaggcccctggacaagggcttgagtggatgggggggatcatccctatctttggtacatcaaactacccgcagaggttccagggccgaatcacgattaccgcggacgattccacgagcacagcctacatggaactgagcagcctgagatctgaggacacggccctatattattgtgcgaaggtaaaggagttctatggttcggcaagtcattacatccttgagtcctggggccagggaacgctgatcatcgtcgcctc

SEQ ID NO: 668 - DNA, 376 bp, Homo sapiens
  source 1..376: mol_type = other DNA
caggtgcagctggtggagtctgggggaggcgtggtccagcctgggaggtccctgagactctcctgtgcagcctctggattcaccttcagtagctatgctatgcactgggtccgccaggctccaggcaaggggctggagtgggtggcagttatatcatatgatggaagcaataaatactacgcagactccgtgaagggccgattcaccatctccagagacaattccaagaacacgctgtatctgcaaatgaacagcctgagagctgaggacacggctgtgtattactgtgcgagagatttctatgactacagtaaccactaccccccgtggacgggtgactactggggccagggaaccctggtcaccgtctcctcag

SEQ ID NO: 669 - DNA, 355 bp, Homo sapiens
  source 1..355: mol_type = other DNA
gaggtgcagctggtggagtctgggggaggcttggtccagcctggggggtccctgagactctcctgtgcagcctctggattcacctttagtagctattggatgagctgggtccgccaggctccagggaaggggctggagtgggtggccaacataaagcaagatggaagtgagaaatactatgtggactctgtgaagggccgattcaccatctccagagacaacgccaagaactcactgtatctgcaaatgaacagcctgagagccgaggacacggctgtgtattactgtgcgagagctggccccggagctgcttttgatatctggggccaagggacaatggtcaccgtctcttcag

SEQ ID NO: 670 - DNA, 372 bp, Homo sapiens
  source 1..372: mol_type = other DNA
caggtccagctggtgcagtctgggactgaggtgaagaagcctgggtcctcggtgaaggtctcctgcagggcttctggagtcatcttcaacagctatgctatcagctgggtgcgacaggcccccggacaagggcttgagtggctgggagggatcatgcctttgtttggcacaacaacgtacgcacagaagttccagggcagagtcacgataatcgcggacgaatctacgagcacagcctacatggagctgagcagcctgacatctgaggacacggccgtttactactgtgcgaggcaggcgatacctggaactacctattaccactactacatggacgtctggggcaaagggaccccggtcaccatctcctca

SEQ ID NO: 671 - DNA, 372 bp, Homo sapiens
  source 1..372: mol_type = other DNA
caggtgcagctggtggagtctgggggaggcgtggtccagcctgggaggtccctgagactctcctgtgcagcgtctggattcaccttcagtagctatggcatgcactgggtccgccaggctccaggcaaggggctggagtgggtggcagttatatggtatgatggaagtaataaatactatgcagactccgtgaagggccgattcaccatctccagagacaattccaagaacacgctgtatctgcaaatgaacagcctgagagccgaggacacggctgtgtattactgtgcgaaagtgggaatggttcgggacacatactactactacggtatggacgtctggggccaagggaccacggtcaccgtctcctca

SEQ ID NO: 672 - DNA, 376 bp, Homo sapiens
  source 1..376: mol_type = other DNA
gaggtgcagctggtgcagtctggagcagaggtgaaaaagcccggggagtctctgaagatctcctgtaagggttctggatacagctttaccagctactggatcggctgggtgcgccagatgcccgggaaaggcctggagtggatggggatcatctatcctggtgactctgataccagatacagcccgtccttccaaggccaggtcaccatctcagccgacaagtccatcagcaccgcctacctgcagtggagcagcctgaaggcctcggacaccgccatgtattactgtgcgagcacggtgactatggttcggggaggcgaaccatactatgcttttgatatctggggccaagggacaatggtcaccgtctcttcag

SEQ ID NO: 673 - DNA, 373 bp, Homo sapiens
  source 1..373: mol_type = other DNA
caggtccaactggtgcagtctgggactgaggtgaagaagcctgggtcctcggtgaaggtctcctgtaagacttctggagtcttcttcagcagctccgcgatcagctgggtgcgacaggcccctggacaagggcttgagtggatgggagggatcatgccaatgtttggtacaacaacttatgcacagaggttccagggcagactcacgataaccgcggaccagtctaccagcacatcgtacatggagttgagcagtctgagatctgaggacacggccatatatttctgtgcgaggcagggaacttctggaacaaattatgtttattattatatggacgtctggggcgaagggaccccggtcatcgtctcctcag

SEQ ID NO: 674 - DNA, 369 bp, Homo sapiens
  source 1..369: mol_type = other DNA
caggtgcagctggtgcagtctggggctgaggtgaagaagcctggggcctcagtgaaggtctcctgcaaggcttctggatacaccttcaccagctatgatatcaactgggtgcgacaggccactggacaagggcttgagtggatgggatggatgaaccctaacagtggtaacacaggctatgcacagaagttccagggcagagtcaccattaccaggaacacctccataagcacagcctacatggagctgagcagcctgagatctgaggacacggccgtgtattactgtgcgagagtattgcacagtcaagactactactactacggtatggacgtctggggccaagggaccacggtcaccgtctcctca

SEQ ID NO: 675 - DNA, 361 bp, Homo sapiens
  source 1..361: mol_type = other DNA
gaggtgcagctgttggagtctgggggaggcttggtacagcctggggggtccctgagactctcctgtgcagcctctggattcacctttagcagctatgccatgagctgggtccgccaggctccagggaaggggctggagtgggtctcagctattagtggtagtggtggtagcacatactacgcagactccgtgaagggccggttcaccatctccagagacaattccaagaacacgctgtatctgcaaatgaacagcctgagagccgaggacacggccgtatattactgtgcgaaaggtggggatgttaatactatggcccaggactactggggccagggaacgctggtcaccgtctcctcag

SEQ ID NO: 676 - DNA, 376 bp, Homo sapiens
  source 1..376: mol_type = other DNA
caggtgcagctggtggagtctgggggaggcgtggtccagcctgggaggtccctgagactctcctgtgcagcctctggattcaccttcagtagctatgctatgcactgggtccgccaggctccaggcaaggggctggagtgggtggcagttatatcatatgatggaagtaataaatactacgcagactccgtgaagggccgattcaccatctccagagacaattccaagaacacgctgtatctgcaaatgaacagcctgagagctgaggacacggctgtgtattactgtgcgagggagttactatggttcggggagttgggggatcttggtgcttttgatatctggggccaagggacaatggtcaccgtctcttcag

SEQ ID NO: 677 - DNA, 369 bp, Homo sapiens
  source 1..369: mol_type = other DNA
caggtccagctggtgcagtctgggactgaggtgaagaagcctgggtcctcggtgacggtctcctgcaaggcctctggagtcatcttcaacggatatgctatcacctgggtgcggcaggcccctggacaagggcttgagtggatgggggggatcatcggtatttttggtacaacaaagtacgcacagacgttccagggcagagtcacgattaccgcggaccaatccacgaacacagcctacatggagctgagaagcctgagatttgaagacacggccgtctattattgtgcgaggcagggcacaccgggaactacctactacaactactacatggacgtctggggccaagggaccacggtcaccgtctcc

SEQ ID NO: 678 - DNA, 369 bp, Homo sapiens
  source 1..369: mol_type = other DNA
caggtcaagctggtacagtctggggctgaggtgaagaagcctgggtcctcggtgacactctcctgcaaggcctctggagtcatcttcaacggctattctatcacctgggtgcgacaggcccctggacaaggccttgagtggatgggaggcatcatccctatctttggtacaacaaagtacgctcagaggttccagggcagagtcacgattaccgcggacgaatccacgagcacagcccacatggagctgagcagcctgagatttggggacacggccgtatattactgtgcgaggcaagcaatgacagcaactacctactacaactactacatggacgtctggggcgaagggaccacggtcatcgtctcc

SEQ ID NO: 679 - DNA, 370 bp, Homo sapiens
  source 1..370: mol_type = other DNA
gaggtgcagctggtgcagtctggagcagaggtgaaaaagccgggggagtctctgaagatctcctgtaagggttctggatacagctttaccagctactggatcggctgggtgcgccagatgcccgggaaaggcctggagtggatggggatcatctatcctggtgactctgataccagatacagcccgtccttccaaggccaggtcaccatctcagccgacaagtccatcagcaccgcctacctgcagtggagcagcctgaaggcctcggacaccgccatgtattactgtgcgagagagaggcccggcagcagctggtacaatgatgcttttgatatctggggccaagggacaatggtcaccgtctcttcag

SEQ ID NO: 680 - DNA, 364 bp, Homo sapiens
  source 1..364: mol_type = other DNA
caggtgcagctggtagattctgggggaggcgtggtccaccctgggaggtccctgagactctcctgtgaagcctctggactcacattcagtagtgatcatttccactgggtccgccaggctccaggcaaggggctggagtgggtggctcttatatcatctgatggcactaataaggaatacgcagaccccgtgaagggccgattcaccatctccagagacaattccaagaatacactgtatctggaagtgaacagcctgagagctgaggacacggccatatattactgtgcgagagagggggtcgatgacttcggtgcttactttgactactggggccagggaacgctggtcattgtctcctcag

SEQ ID NO: 681 - DNA, 364 bp, Homo sapiens
  source 1..364: mol_type = other DNA
gaggtgcagctggtggagtctgggggaggcctggtcaagcctggggggtccctgagactctcctgtgcagcctctggattcaccttcagtagctatagcatgaactgggtccgccaggctccagggaaggggctggagtgggtctcatccattagtagtagtagtagttacatatactacgcagactcagtgaagggccgattcaccatctccagagacaacgccaagaactcactgtatctgcaaatgaacagcctgagagccgaggacacggctgtgtattactgtgcgagagccaatcgttataactggaacgacgtgtggcactactggggccagggaacgctggtcaccgtctcctcag

SEQ ID NO: 682 - DNA, 361 bp, Homo sapiens
  source 1..361: mol_type = other DNA
caggtccagctggtgcagtctggggctcaggtgaagaagcctgggtcctcggtgaaggtctcctgccagacttctggaggcaccttcagcgcctatgctatcacctgggtgcgacaggcccccggacaggggcttgagtggatgggagggatcagcgctctcttccatgttccaaaatacgcacagacgttccagggcagagtctctattaccacggacgactccacgaggacaacctacatggagctgagcagcctaacatctgaagacacggccgtctattattgtgcgagaagtaataattactatgacaattgtgctttcgcctggggccagggaacgctggtcaccgtctcctcag

SEQ ID NO: 683 - DNA, 373 bp, Homo sapiens
  source 1..373: mol_type = other DNA
caggtgcagctggtgcaatctgggtctgagttgaagaagcctggggcctcagtgaaggtttcctgcaaggcttctggatacaccttcactagctatgctatgaattgggtgcgacaggcccctggacaagggcttgagtggatgggatggatcaacaccaacactgggaacccaacgtatgcccagggcttcacaggacggtttgtcttctccttggacacctctgtcagcacggcatatctgcagatcagcagcctaaaggctgaggacactgccgtgtattactgtgcgagagggaccctatggttcggggaggacccccttgatgcttttgatatctggggccaagggacaatggtcaccgtctcttcag

SEQ ID NO: 684 - DNA, 368 bp, Homo sapiens
  source 1..368: mol_type = other DNA
gaggtgcaactggtggagtctgggggaggcttggtacggcctggggggaccctgagactctcctgtgcagcctctggattcacctttaccacctatggtttgcactgggtccgccaggctccagggaaggggctggagtgggtctcatttattagtggaagtggtattagcacatactacgcagactccgtgaagggccgattcaccatctccagagacaattccaagaacacggtttatctccacatgaacaccctgagagccgaggactcggccatatattattgtgcgagagattttggcctgagagtagtggaccagggtgcttttgatatctggggccgagggacaatggtcaccgtctcttc

SEQ ID NO: 685 - DNA, 346 bp, Homo sapiens
  source 1..346: mol_type = other DNA
caggtgcacctgcaggagtcgggcccaggactggtgaagccttcggagaccctgtccctcacctgcactgtctctgattccatcagcagtgattattattgggcctggatccggcagtccccagggaaggggctggagtggattggaaatatctttcgtagtgggaccacctactacaatccgtccctccagagtcgagtcaccatttccgtggacacgtccaagaaccagttctccctgaggctgacctctgtgaccgccgcagacacggccgtctattactgtgcgagacaaaatcatgcttttgacatttggggccaggggacaattgtcaccgtcgcttcag

SEQ ID NO: 686 - DNA, 361 bp, Homo sapiens
  source 1..361: mol_type = other DNA
caggttcagttggtgcagtccgggggtgaagtgaagaaccctggggcctcagtgagggtctcctgcaagacatctggttacaccttcaccgattttggaatcagttgggtgcgacaggcccctggacaagggcttgaatgggtgggatggatcagcacttacagtggttcttcaagatttgcacatagactccaggacagagtcaccctgactcgagacaagtccatcatgacagcccatctggaacttaggcacttggagcctggcgacacggccgtctatttttgtgttagaggaaatatgaagggttcggccagctatattttttggggccagggaaccccggtcttcgtctcctcag

SEQ ID NO: 687 - DNA, 370 bp, Homo sapiens
  source 1..370: mol_type = other DNA
caggtccagctggtgcagtctggggctgaggtgaagaagcctgggtcctcggtgaagatctcctgcaaggcttctggaggcaccttcaacacctttggtatcagctgggtgcgacaggcccctggacaagggcttgagtggatgggagggatcgtccctatctttcatacaccaaactacgcacagaacttccagggcagagtcacgattaccgcggacgaatccacgagcaccgcctacatggaagtgagcagactgagatctgaggacacggccatgtatttctgtgcgagagataatatggtcgctacactaaacgacaaaccttttgatgtctggggccaagggacaatggtcaccgtctcttcag

SEQ ID NO: 688 - DNA, 343 bp, Homo sapiens
  source 1..343: mol_type = other DNA
gaggtgtacctggtggagtccgggggagggttagttcagccgggggggtccctgagactctcctgtgtagcctctggattcatgttcagtagtcactggatgcactgggtccgccaagctccagggaaggggctgatgtgggtctcacgtattaataacgatgggagtttgacaactaatgcggactccgtgaagggccgaatcaccatctccagagacaacgccaagaacatggtgtatttgcagatgagaagtctgagagccgatgacacggctgtatattactgtgtaaggggattgggcgactactggggccagggaaccctggtcacagtctcctcag

SEQ ID NO: 689 - DNA, 379 bp, Homo sapiens
  source 1..379: mol_type = other DNA
gaggtgcagctggtgcagtctggagcagaggtgaaaaagcccggggagtctctgaagatctcctgtaagggttctggatacagctttaccagctactggatcggctgggtgcgccagatgcccgggaaaggcctggagtggatggggatcatctatcctggtgactctgataccagatacagcccgtccttccaaggccaggtcaccatctcagccgacaagtccatcagcaccgcctacctgcagtggagcagcctgaaggcctcggacaccgccatgtattactgtgcgagatcccgcaggtccggtgcagctggtaccggaggggtacgcgcttttgatatctggggccaagggacaatggtcaccgtctcttcag

SEQ ID NO: 690 - DNA, 364 bp, Homo sapiens
  source 1..364: mol_type = other DNA
caggtgcagctggtgcagtctggggctgaggtgaagaagcctggggcctcagtgaaggtctcctgcaaggcttctggatacaccttcaccagttatgatatcaactgggtgcgacaggccactggacaagggcttgagtggatgggatggatgaaccctaacagtggtaacacaggctatgcacagaagttccagggcagagtcaccatgaccaggaacacctccataagcacagcctacatggagctgagcagcctgagatctgaggacacggccgtgtattactgtgcgagagcccggccttcgtggaacgacaactggttcgacccctggggccagggaaccctggtcaccgtctcctcag

SEQ ID NO: 691 - DNA, 376 bp, Homo sapiens
  source 1..376: mol_type = other DNA
gaggtgcagctggtggagtccgggggaggcttagttcagcctggggggtccctgagactctcctgtgcagcctctggattcaccttcagtagttattggatgcactgggtccgccaagctccagggaaggggctggtgtgggtctcacatattaatagtgatgggagtagcacaaggtacgcggactccgtgaagggccgattcaccatctccagagacaacgccaagaacacgctgtatctgcaaatgaacagtctgagagccgaggacacggctgtgtattattgtgcaagagatttgatcacacctcttgactacagtaaccccgcgggtgttgactactggggccagggaaccctggtcaccgtctcctcag

SEQ ID NO: 692 - DNA, 382 bp, Homo sapiens
  source 1..382: mol_type = other DNA
cagctgcagctgcaggagtcgggcccaggactggtgaagccttcggagaccctgtccctcacctgcactgtctctggtggctccatcagcagtagtagttactactggggctggatccgccagcccccagggaaggggctggagtggattgggagtatctattatagtgggagcacctactacaacccgtccctcaagagtcgagtcaccatatccgtagacacgtccaagaaccagttctccctgaagctgagctctgtgaccgccgcagacacggctgtgtattactgtgcgagacctcatcatcatgactacggtgactactacgtaagtggctggttcgacccctggggccagggaaccctggtcaccgtctcctcag

SEQ ID NO: 693 - DNA, 373 bp, Homo sapiens
  source 1..373: mol_type = other DNA
caggtgcagctggtggagtctgggggaggcgtggtccagcctgggaggtccctgagactctcctgtgcagcgtctggattcaccttcagtagctatggcatgcactgggtccgccaggctccaggcaaggggctggagtgggtggcagttatatggtatgatggaagtaataaatactatgcagactccgtgaagggccgattcaccatctccagagacaattccaagaacacgctgtatctgcaaatgaacagcctgagagccgaggacacggctgtgtattactgtgcgaaagatgtggggcaagcagcagctggtaacgggggcagttttgactactggggccagggaacgctggtcaccgtctcctcag

SEQ ID NO: 694 - DNA, 367 bp, Homo sapiens
  source 1..367: mol_type = other DNA
cagctgcagctgcaggagtcgggcccaggactggtgaagccttcggagaccctgtccctcacctgcactgtctctggtggctccatcagcagtagtagttactactggggctggatccgccagcccccagggaaggggctggagtggattgggagtatctattatagtgggagcacctactacaacccgtccctcaagagtcgagtcaccatatccgtagacacgtccaagaaccagttctccctgaagctgagctctgtgaccgccgcagacacggctgtgtattactgtgcgagacacaagaatgggcagtggctggtcacttttgactactggggccagggaacgctggtcaccgtctcctcag

SEQ ID NO: 695 - DNA, 361 bp, Homo sapiens
  source 1..361: mol_type = other DNA
caggtccagctggtgcagtctggggctgaggtgaagaagcctgggtcctcggtgaaggtctcctgcaaggcctctggaggcaccttcagcgcctatgccatcacctgggtgcgacaggcccctggacaagggcttgagtggatgggagggatcatggctatcttcggtgtaataaaatacgcacagaagttccaggggagagtcacaattaccgcggacgactcaacgaggactacctacatggagctgaacagcctgagatctgaggacacggccgtgtattactgtgcgagaagcaacaattattatgatagtagtggattcgtctggggccagggaacgctggtcaccgtctcctcag

SEQ ID NO: 696 - DNA, 375 bp, Homo sapiens
  source 1..375: mol_type = other DNA
caggttcagctggtgcagtccggagctgaggtgaagaagtctggggcctcagtgaaggtctcctgcaaggcttctggttacacctttttcaattatggaatccattgggtgcgacaggcccctggacaagggcttgagtggatgggatggatcagcatttacaatggtaacacaaattatgcactgaagttccagggcagagtcaccatgaccgcggacacatccacgaacatagcctacatggaactgaggagtctgagatctgacgacacggccgtctattactgtgcgagaggcgggcagtggctggaccctttccagtactcctactacatggatgtctggggccaaggggccacggtcaccgtctcctca

SEQ ID NO: 697 - DNA, 364 bp, Homo sapiens
  source 1..364: mol_type = other DNA
caggtgcagctgcaggagtcgggcccaggactggtgaagccttcacagaccctgtccctcacctgcactgtctctggtggctccatcagcagtggtggttactactggagctggatccggcagccaccagggaagggcctggagtggattgggtacatctatcatagtgggagcacctactacaacccgtccctcaagagtcgagtcaccatatcagtagacaggtccaagaaccagttctccctgaagctgagctctgtgactgccgcggacacggccgtgtattactgtgcgagaggtagcagtggctggtataacgcttttgatatctggggccaagggacaatggtcaccgtctcttcag

SEQ ID NO: 698 - DNA, 379 bp, Homo sapiens
  source 1..379: mol_type = other DNA
caggtgcagctgcaggagtcgggcccaggactggtgaagccttcggagaccctgtccctcagttgcactgtctctggtggctccattagtaattactactggggctggatccggcagcccccagggaagggactggagtggattgggaatatctattacagtgggagcaccaactacaaccccttcctcaagagtcgagtcaccatatcagtagacacgtctaagaaccagttctccctgaagctgagctctgtgaccgctgcggacacggccgtgtattactgtgcgagacatctacgtatgattatgtttgggggagttatcgcccaagatgcttttgatatttggggccaagggacaatggtcaccgtctcttcag

SEQ ID NO: 699 - DNA, 370 bp, Homo sapiens
  source 1..370: mol_type = other DNA
gaggtgcagctgctggagtctgggggaggcttggtacagcctggggggaccctgagactctcctgtacagcctctggattcacctatagcagctttgtcatgttctgggtccgccaggctccagggaaggggctggagtgggtctcaagtattagtggtagtggtcttagtacatattacgcagagtctgtgaagggccggttcacgatctccagagacaattccaaaaacaccctgtatctgcacatgaggagcctgagagccgacgacacggccatatattactgtgcgaaagattattctacctacataccagtgactggaacgcttgactcctggggccagggaaccctggtcaccgtctcctcag

SEQ ID NO: 700 - DNA, 355 bp, Homo sapiens
  source 1..355: mol_type = other DNA
caggtgcagctacagcagtggggcgcaggactgttgaagccttcggagaccctgtccctcacctgcgctgtctatggtgggtccttcagtggttactactggagctggatccgccagcccccagggaaggggctggagtggattggggaaatcaatcatagtggaagcaccaactacaacccgtccctcaagagtcgagtcaccatatcagtagacacgtccaagaaccagttctccctgaagctgagctctgtgaccgccgcggacacggctatgtattactgtgcgagaccactcgtggatacagctatgattgactactggggccagggaaccctggtcaccgtctcctcag

SEQ ID NO: 701 - DNA, 361 bp, Homo sapiens
  source 1..361: mol_type = other DNA
caggtccagctggtacagtctgggcctcaggtgaagctccctggggcctcagtgcagatttcctgcacaccctctggataccccttcaccacaagaccaatacattgggtacgccaggcccccggacaacgacttgaatggctgggatggatcaaccccgacaatggaaacacaatatcttcaccggacttccagggcagagtcaccgtaactcgggacacttccgcgagacacatttatctagaagtgagcagcctgacatctgaagacacagctgtctattactgcgcgaggggaaatgttggttacggtgactactttgactcctggggccagggaacactggtcaccgtctcctcag

SEQ ID NO: 702 - DNA, 382 bp, Homo sapiens
  source 1..382: mol_type = other DNA
caggtccagctggtacagtctggggctgaggtgaagaagcctggggcctcagtgaaggtctcctgcaaggtttccggatacaccctcactgaattatccatgcactgggtgcgacaggctcctggaaaagggcttgagtggatgggaggttttgatcctgaagatggtgaaacaatctacgcacagaagttccagggcagagtcaccatgaccgaggacacatctacagacacagcctacatggagctgagcagcctgagatctgaggacacggccgtgtattactgtgcaacagtgcggtcgggggactatgatagtagtggttattacccgtactactttgactactggggccagggaacgctggtcaccgtctcctcag

SEQ ID NO: 703 - DNA, 361 bp, Homo sapiens
  source 1..361: mol_type = other DNA
caggtgcagctggtggagtctgggggaggcttggtcaagcctggagggtccctgagactctcctgtgcagcctctggattcaccttcagtgactactacatgagctggatccgccaggctccagggaaggggctggagtgggtttcatacattagtagtagtggtagtaccatatactacgcagactctgtgaagggccgattcaccatctccagggacaacgccaagaactcactgtatctgcaaatgaacagcctgagagccgaggacacggccgtgtattactgtgcgagaggacgcagcagctggtacctatactttgactactggggccagggaaccctggtcaccgtctcctcag

SEQ ID NO: 704 - DNA, 367 bp, Homo sapiens
  source 1..367: mol_type = other DNA
gaggtgcagctggtggagtctgggggaggcttggtacagcctggagggtccctgagactctcctgtgcagcctctggattcaccttcagtagttatgaaatgaactgggtccgccaggctccagggaaggggctggagtgggtttcatacattagtagtagtggtagtaccatatactacgcagactctgtgaagggccgattcaccatctccagagacaacgccaagaactcactgtatctgcaaatgaacagcctgagagccgaggacacggctgtttattactgtgcgagagattatgtttcgtggggggagctacggggccttgactactggggccagggaaccctggtcaccgtctcctcag

SEQ ID NO: 705 - DNA, 355 bp, Homo sapiens
  source 1..355: mol_type = other DNA
caggtgcagctgcaggagtcgggcccaggactggtgaagccttcggagaccctgtccctcacctgcactgtctctggtggctccatcagtagttactactggagctggatccggcagcccccagggaagggactggagtggattgggtatatctattacagtggaaccaccagctacaacccctccctcaagagtcgagtcatcatatcagtagacacgtccaacaaccagttgtccctaaaggtgaactctgtgaccgctgcggacacggccatgtattactgtgcgagagattttggtgcgtttgggggagttcgggactggggccagggaaccctggtcaccgtctcctcag

SEQ ID NO: 706 - DNA, 367 bp, Homo sapiens
  source 1..367: mol_type = other DNA
caggttcagctgatgcagtctggaggtgaggtgaagaagcctggggcctcagtgaaggtctcctgcaagacttctggttacacctttaataattatggaatcacctgggtgcgacaggcccctggacaaggacttgagtggatgggatggatcagcccttacaatggtaacacaaactttgcacagaaattccagggcagagtcagtatgaccacagacacatccacgaacacagtgtatatggagctgaggagcctgagatctgacgacacggccgtttattactgtgcgcgagaccggaggcacattttgagtggcttggatcctgactattggggccagggaacgctggtcattgtctcctcag

SEQ ID NO: 707 - DNA, 370 bp, Homo sapiens
  source 1..370: mol_type = other DNA
gaggtgcagctggtggagtctgggggaggcttggtacagcctggagggtccctgagactctcctgtgcagcctctggattcgacttcagtatttatgagatgaactgggtccgccaggctccagggaaggggctggagtgggtttcatacattggtagtagtgggaatatcatatactacaaagactctgtgaagggccgattcaccatctccagagataacgccaagaactcactgtatctggaaatgaaaagcctgagagccgaggacacggctgtttattactgtgcgagagagacatacagctatggccgctaccctaggtactttgactactggggccagggaacgctggtcaccgtctcctcag

SEQ ID NO: 708 - DNA, 367 bp, Homo sapiens
  source 1..367: mol_type = other DNA
caggtgcagctggtgcagtctggggctgaggtgaagaagcctgggtcctcggtgaaggtctcctgcaaggcctctggaggcatcttcagaagcaatgctatcagctgggtgcgacaggcccctggacaagggcttgagtggataggagggatcgtcgctatctttggtgcaccaaagaacgcacagaagttccagggcagagtcacgattaccgcggacgaatccacgagcacagcctacatggaactgaccagcctcagatctgatgacacggccgtttattactgtgcgagacaccccacctatcactatgacagaagtggttttgactactggggccagggcaccctggtcaccgtctcctcag

SEQ ID NO: 709 - DNA, 355 bp, Homo sapiens
  source 1..355: mol_type = other DNA
caggtgcagctggtggagtctgggggaggcgtggtccagcctggggggtccctgagactctcctgtgcagcgtctggattcaccttcagtagctatggcatgcactgggtccgccaggctccaggcaaggggctggagtgggtggcatttatacggtatgatggaagtaataaatactacgcagactccgtgaagggccgattcaccatctccagagacaattccaagaacacgctgtatctgcaaatgaacagcctgagagctgaggacacggctgtgtattactgtgcgaaagatcgggttacgggtttgtttgactactggggccagggaaccctggtcaccgtctcctcag

SEQ ID NO: 710 - DNA, 355 bp, Homo sapiens
  source 1..355: mol_type = other DNA
gaggtgcagctggtgcagtctggagcagaggtgaaaaagccgggggagtctctgaagatctcctgtaagggttctggatacagctttaccagctactggatcggctgggtgcgccagatgcccgggaaaggcctggagtggatggggatcatctatcctggtgactctgataccagatacagcccgtccttccaaggccaggtcaccatctcagccgacaagtccatcagcaccgcctacctgcagtggagcagcctgaaggcctcggacaccgccatgtattactgtgcgagagttcccacagtggctggaattgactactggggccagggaaccctggtcaccgtctcctcag

SEQ ID NO: 711 - DNA, 367 bp, Homo sapiens
  source 1..367: mol_type = other DNA
caggtgcagctggtggagtctgggggaggcgtggtccagccggggaggtccctgagactctcctgtgcagcctctggattcaccttcagtagctatgctatgcactgggtccgccaggctccaggcaaggggctagagtgggtggcagttatatcatatgatggaagtaataaatactacgcagacttcgtgaagggccgattcaccatctccagagacaattccaagaacacgctgtatctgcaaatgaacagcctgagagctgaggacacggctgtgtattactgtgcgagagattggcggggctattcccagctcggcctaattgactactggggccagggaaccctggtcaccgtctcctcag

SEQ ID NO: 712 - DNA, 372 bp, Homo sapiens
  source 1..372: mol_type = other DNA
caggtgcagctgcaggagtcgggcccaggactggtgaagccttcggagaccctgtccctcacctgcactgtctctggtggctccatcagtagttattactggagctggatccggcagcccgccgggaagggagtggagtggattgggcgtatctatataagtgggagaaccaactacaacccctccctcaagagtcgagtcaccatgtcagtagacacgtccaagaaccagttctccctgaaactgagctctgtgaccgccgcggacacggccgtgtattactgtgcgagaggggtttacgacattttgactggttatgtcgacttcggtatggacgtctggggccaagggaccacggtcaccgtctcctca

SEQ ID NO: 713 - DNA, 374 bp, Homo sapiens
  source 1..374: mol_type = other DNA
caggtgcagctgcaggagtcgggcccaggactggtgaagccttcggagaccctgtccctcacctgcagtgtctctggtggctccatcactagtgactcctgggcctggatccgacagtccgccgggaagggactggagtggattgggcgtatacacgtcagtgggactaccacctacaatccgtccctcaagagtcgagtcaccatgtctatagacacgtccaagaatcagttctccctgaagctgggctcagtgaccgccgcggacacggccgtatatcattgtgcgagagatcatggcagtcccgggtggctgcgacgaacggggtggtggttcgacccctggggccagggaaccctggtcaccgtctcctc

SEQ ID NO: 714 - DNA, 367 bp, Homo sapiens
  source 1..367: mol_type = other DNA
gaggtgcagctggtggagtctgggggaggcttagtacagcctggggggtccctgagactctcctgtgcagcctctggattcacctttagcagctatgccatgagctgggtccgccaggctccagggaaggggctggagtgggtctcagctattagtgatagtgataggaccacatactacgcagactccgtgaagggccggttcaccatctccagagacaattccaggaacacgctgtatctgcaaatgaacagcctgagagccgaggacacggccgtatattactgtgcgaaagggccgtcttacgaattttggagtggttattttcactactggggccagggaaccctggtcaccgtctcctcag

SEQ ID NO: 715 - DNA, 376 bp, Homo sapiens
  source 1..376: mol_type = other DNA
caggtgcagttggtgcagtctggggctgaagtgaagaagcctggggcctcagtgaaggtctcctgcaaggcctctggatacaccttcagcgactgctatatacactgggtgcggcaggcccctggacaagggcttgagtggatgggatggatcaatcctaaaggtgatgtcaccagttatggacagaagtttcagggcagggtcaccatgaccttggacccgtctgtcaccacagcctatatggagctgagcggactgcgatctgacgacacggccgtgtattactgtgcgaaaaatcggggggaatgtaatgatgacagctgctaccgcgactttgactactggggccagggaaccctggtctccgtctcgtcag

SEQ ID NO: 716 - DNA, 391 bp, Homo sapiens
  source 1..391: mol_type = other DNA
gaggtgcagttggtggaatctgggggaggcttggtacaggcagggcggtccctgagactctcctgtacagcctctggattcacgtttggcgattctgctatgagctgggtccgccaggctccagggaaggggctggagtgggtaggttacattagaagcaaagctttcggtgagaaaacagactacgccgcgtctgtgaaaggcagattcaccatctcaagagatgattcgaaaagtatcgcctatctgcaaatgaacagcctgaaaatcgaggacaccggcgtgtacttctgtgctagagatggcgatgtcgcacgatttttggagtggttgtcgaaacttgatgcctttgatatgtggggccaggggacaatggtcaccgtctcttcag

SEQ ID NO: 717 - DNA, 367 bp, Homo sapiens
  source 1..367: mol_type = other DNA
caggttcagctggtgcagtctggagctgaggtgaagaagcctggggcctcagtgaaggtctcctgcaaggcttctggttacacctttaccagctatggtataagctgggtgcggcaggcccctggacaagggcttgagtggatgggatggatcagcgcttacaatggtaacacaaactatgcacagaagctccaggacagagtcaccatgaccacagacacatccacgagcacagcctacatggagctgaggagcctgagatctgacgacacggccgtgtattactgtgcgagagatcggccctccgtattactcggcggagggttcgacccctggggccagggaaccctggtcaccgtctcctcag

SEQ ID NO: 718 - DNA, 382 bp, Homo sapiens
  source 1..382: mol_type = other DNA
caggtgcagctgcaggagtcgggcccaggactggtgaagccttcggagaccctgtccctcacgtgcactgtctctggtggctccatcactagtgactactggagctggatccggcagcccgccgggaagggactggagtggattgggcgtatccacatcagtgggagcaccaactacaatccctccctcacgagtcgagtcaccatgtcaatagacacgcccaagaaccacttctccctgaagctgggctctgtgaccgccgcggacacggccgtgtattactgtgcgagagacgccgactcgcattactatgcttcggggagttatcttcgtgatgcttttgatatctggggccaagggacaatggtcaccgtctcttcag

SEQ ID NO: 719 - DNA, 369 bp, Homo sapiens
  source 1..369: mol_type = other DNA
gaggtgcagctggtggagtctgggggaggcttggtccagcctggggggtccctgagactctcctgtgcagcctctggattcaccgtcagtagcaactacatgaactgggtccgccaggctccagggaaggggctggagtgggtctcagttatttatagcggtggtagcacatactacgcagactccgtgaagggccgattcaccatctccagagacaattccaagaacacgctgtatcttcaaatgaacagcctgagagctgaggacacggctgtgtattactgtgcgagagacgatagagatggctacaattactactactacggtatggacgtctggggccaagggaccacggtcaccgtctcctca

SEQ ID NO: 720 - DNA, 358 bp, Homo sapiens
  source 1..358: mol_type = other DNA
caggtgcagctggtggagtctgggggaggcgtggtccagcctggggggtccctgagactctcctgtgcagcgtctggattcaccttcagtagctatggcatgcactgggtccgccaggctccaggcaaggggctggagtgggtggcatttatacggtatgatggaagtaataaatactacgcagactccgtgaagggccgattcaccatctccagagacaattccaagaacacgctgtatctgcaaatgaacagcctgagagctgaggacacggctgtgtattactgtgcgaaagattctttcctcgcagctccggagaactactggggccagggaaccctggtcaccgtctcctcag

SEQ ID NO: 721 - DNA, 352 bp, Homo sapiens
  source 1..352: mol_type = other DNA
caggtgcagctggtggagtctgggggaggcgtggtccagcctggggggtccctgagactctcctgtgcagcgtctggattcaccttcagtagctatggcatgcactgggtccgccaggctccaggcaaggggctggagtgggtggcatttatacggtatgatggaagtaataaatactacgcagactccgtgaagggccgattcaccatctccagagacaattccaagaacacgctgtatctgcaaatgaacagcctgagagctgaggacacggctgtgtattactgtgcgaaagacggctatggttcgggggtgatctggggccagggaaccctggtcaccgtctcctcag

SEQ ID NO: 722 - DNA, 364 bp, Homo sapiens
  source 1..364: mol_type = other DNA
caggtgcagctggtggagtctgggggaggcgtggtccagcctgggaggtccctgagactctcctgtgcagcctctggattcaccttcagtagctatgctatgcactgggtccgccaggctccaggcaaggggctggagtgggtggcagttatatcatatgatggaagcaataaatactacgcagactccgtgaagggccgattcaccatctccagagacaattccaagaacacgctgtatctgcaaatgaacagcctgagagctgaggacacggctgtgtattactgtgcgagagacatcgggtggttcggggaagtaggtcttgatatctggggccaagggacaatggtcaccgtctcttcag

SEQ ID NO: 723 - DNA, 385 bp, Homo sapiens
  source 1..385: mol_type = other DNA
caggtgcagctgcaggagtcgggcccaggactggtgaagccttcggagaccctgtccctcacctgcactgtctctggtggctccattagtagttattactggaactggatccggcagcccgccgggaagggactggagtggattgggcgtatctatattagtgggagcaccaaatacaacccctccctcaagagtcgagtcaccatgacggcagagacgcccaagaaccagatctccctgaagctgagttctgtgaccgccgcggacacggccgtgtattactgtgcgagagagggggggcgaagggacattgtagtagtaccagctgccgtgggtagcgcttttgatatctggggccaagggacaatggtcaccgtctcttcag

SEQ ID NO: 724 - DNA, 364 bp, Homo sapiens
  source 1..364: mol_type = other DNA
caggtgcagctggtgcagtctggggctgaggtgaagaagcctgggtcctcggtgaaactctcctgcaaggcttctggaggcaccttcaccaactttgctatcaactgggtgcgacaggcccctggacaagggcttgagtggatgggagcaatcatccctatctttggtacagcaaactacgctcagaagttccagggcagagtcacgattaccgcggacgaatccacgagcacagcctacatggaggtgatcagcctgacatctgaggacacggccgtctattactgtgcgagaggagtgggagctaccgcgttttatgcttttgataactggggccaagggactatggtcaccgtttcttcag

SEQ ID NO: 725 - DNA, 370 bp, Homo sapiens
  source 1..370: mol_type = other DNA
caagggcagttggtggagtctgggggaggcgtggtccagcctgggaggtccctgagactctcctgtgcaccctctggactcagcatcagtggctttggtatggactgggtccgccagactccagggaaggggctagagtgggtggcagatatatcacataatggagctagaagacactacgcagactccgtgaagggccgattcaccgtctccagagacaattccaacaacacagtgtatctacaaatgaacagcctgagacctgaagacacggctgtgtattactgtgtcagagatgattatgagaggagtggttattactgggctttgagacattggggccagggagccctggtcacagtctcctcag

SEQ ID NO: 726 - DNA, 358 bp, Homo sapiens
  source 1..358: mol_type = other DNA
gaggtgcagctggtgcagtctggtgcagaggtgaaaaagcccggggagtctctgaagatctcctgtaagggttctggatacagctttaccacccactggatcggctgggtgcgccagatgcccgggaaaggcctggagtggatggggatcatctatcctgatgactctgataccagatacagcccgtccttccaaggccaggtcaccttctcagtcgacaaggccatcaacaccgcctacctgcagtggagcaggctgaaggcctcggacaccgccatgtattactgtgcgagacatcccgggagtgggaccgcaaatgactactggggccagggaaccctggtcaccgtcttctcag

SEQ ID NO: 727 - DNA, 361 bp, Homo sapiens
  source 1..361: mol_type = other DNA
caggtgcagctgcaggagtcgggcccaggattggtgaaaccttcggagaccctgtccctcacgtgctctgtttctgggggctccattggtaatttttattgggcttggatccgacaggccccagggaagggcctggagtgggttgggtacgtccattatagaggcagagtcaattacaatccgtccctcaagagccgagtcgccatatcagtggacacgtccaagaaccagttctccctcaatctgacctctgtgagcgctgcggacacggccgtatattactgtgcgagagaccaaactggacttggatacagctatgttgacttctggggccagggagccctggtcagcgtctcctcag

SEQ ID NO: 728 - DNA, 352 bp, Homo sapiens
  source 1..352: mol_type = other DNA
gaggtgcagctggtggagtccgggggaggcttagttcagcctggggggtccctgagactctcctgtgcagcctctggattcaccttcagtagctactggatgcactgggtccgccaagctccagggaaggggctggtgtgggtctcacgtattaatagtgatgggagtagcacaagctacgcggactccgtgaagggccgattcaccatctccagagacaacgccaagaacacgctgtatctgcaaatgaacagtctgagagccgaggacacggctgtgtattactgtgcaagagaacagcagctggtcattgactactggggccagggaaccctggtcaccgtctcctcag

SEQ ID NO: 729 - DNA, 367 bp, Homo sapiens
  source 1..367: mol_type = other DNA
gaggtgcagttgttggagtctgggggaggcttggtacagcctggggggtccctaagactctcctgtgcagcctctggattcacctttagcaactatgccatgacctgggtccgccgggctccagggaaggggctggagtgggtctcaattattagtggtagtggtgttagcacctactacgccgactccgtgaagggccggttcaccatctccagagacaactccaagaacacgctgtatctgcaagtgaacagcctgagagccgaggacacggccgtatattactgtgcgaaagccccggggcaatattttgactggctatactttgactactggggccagggaaccctggtcaccgtctcctcag

SEQ ID NO: 730 - DNA, 376 bp, Homo sapiens
  source 1..376: mol_type = other DNA
gaggtgcagctggtggagtctgggggagacttggtacagcctggagggtccctgagactctcctgtgcagcctctggattcaccctcagtagttatgaaatgaactgggtccgccaggctccagggaaggggctggagtgggtttcatacattagtactactggtaatatggtatactatgcagactctgtgaagggccgattcaccatctccagagacaacgtcaagaactcactgtatctgcaactgagcaccctgagagtcgaggacacggctgtttattactgtgcgagagataagagtagggagcagtgggtgatacggcctgatgcttttgatatctggggtcaagggacaatggtcaccgtctcttcag

SEQ ID NO: 731 - DNA, 376 bp, Homo sapiens
  source 1..376: mol_type = other DNA
gaggtgcaggtggtggagtctgggggaggcttggtccagcctggggggtccctgagactctcctgtgcagcctctggattcacctttagtagttattggatgagctgggtccgccaggctccagggaaggggctggagtgggtggccaatataaagcaagatggaagtgagaatcactatgtggactctgtgaagggccgattcaccatctccagagacaacgccaataacttactgtatttgcaaatgaacagcctgagagccgacgacacggctgtctatttctgtgcgagactgggctttgcggatagaagctcgacagcctaccgccacgcagactgctggggccagggaaccctggtcaccgtctcctcag

SEQ ID NO: 732 - DNA, 364 bp, Homo sapiens
  source 1..364: mol_type = other DNA
gacgttcaattggtggagtctgggggagccttggtacagcctggggagtccctgagactctcctgtgtagcctctggattcacctttggcacctatgccatgaactgggtccgccaggctccagggaagggcctggagtgggtctcaggcattattggtaatagtaacaccaaagagtacgcagactccgtgaagggccgattcaccatctccagagacaattccaagggcaccctctatcttcaaatgaatatcctgagagccgaggacacggccatatattattgtgcgaaggaccgacttccagacgggagatgggatattgactattggggcccgggaaccctggtcaccgtctcctcag

SEQ ID NO: 733 - DNA, 376 bp, Homo sapiens
  source 1..376: mol_type = other DNA
caggtgcagctgcaggagtcgggcccacgactggtgaagccttcggagaccctgtccgtcacctgcactgtctttggtggctccatcaacagtggttactactggggctggatccggcagcccccagggaaggggctggaatggattgggaatatctttcgtcgtggtgggaacaccttttacaatccgtccctcaagagtcgagtcaccatatcaatagacacgtccaagaaccagttctccgtgaacctaaattctgtgactgccgcagacacggccgtgtattattgtgtgagaccccattgtagtggtgttagttgttcggaaaactggttcgacacctggggccagggaaccctggtcaccgtctcctcag

SEQ ID NO: 734 - DNA, 372 bp, Homo sapiens
  source 1..372: mol_type = other DNA
caggtgcagctggtggagtctgggggaggcgtggtccagcctgggaggtccctgagactctcctgtgcagcctctggattcaccttcagtagctatggcatgcactgggtccgccaggctccaggcaaggggctggagtgggtggcagttatatcatatgatggaagtaataaatactatgcagactccgtgaagggccgattcaccatctccagagacaattccaagaacacgctgtatctgcaaatgaacagcctgagagctgaggacacggctgtgtattactgtgcgaaagatcatgaaaatagcagtggctggttaagttacggtatggacgtctggggccaagggaccacggtcaccgtctcctca

SEQ ID NO: 735 - DNA, 382 bp, Homo sapiens
  source 1..382: mol_type = other DNA
caggtgcagctgcaggagtcgggcccaggactggtgaagccttcacagaccctgtccctcacctgcactgtctctggtggctccatcagcagtggtggttactactggagctggatccgccagcacccagggaagggcctggagtggattgggtacatctattacagtgggagcacctactacaacccgtccctcaagagtctagttaccatatcagtagacacgtctaagaaccagttctccctgaagctgagctctgtgactgccgcggacacggccgtgtattactgtgcgagagcgtatggcctgagcagcagctggactgattccattaactggttcgacccctggggccagggaaccctggtcaccgtctcctcag

SEQ ID NO: 736 - DNA, 370 bp, Homo sapiens
  source 1..370: mol_type = other DNA
caggtgcagctggtgcagtctggggctgaggtgaagaagcctgggtcctcggtaaaggtctcctgtaaggcttctggaggcgccttcaataaatatgctatcagctgggtgcgacaggcccctggacaagggcttgagtggatgggagggatcctccctatctttcgtacagcaaagtacgcacagaagttccagggcagagtcaccattatcgcggacgaattcacgagcacagcctacatggagctgagcagcctgagatctgaggacacggccgtatattactgtgcgagaggaacggagggcagcatgtattacaattttcactttgactactggggccagggaaccctggtcaccgtctcctcag

SEQ ID NO: 737 - DNA, 376 bp, Homo sapiens
  source 1..376: mol_type = other DNA
caggtgcagctgcaggagtcgggcccaggactggtgaagccttcggagaccctctccctcacctgcactgtctctggtgactccatcagtagttactactggaattggatccggcagcccgccgggaagggactggagtggattgggcgcatctttatcagtgggagcaccaactacaacccgtccctcaagagtcgagtctccatgtcaatcgccacgccccagaaccagttctccctgaggctgagctctgtgaccgccgcggacacagccgtctattactgtgcgagggaattgtgggtaccacctgctatacgcggtaatattcactcctttgactactggggccagggaaccctggtcaccgtctcctcag

SEQ ID NO: 738 - DNA, 366 bp, Homo sapiens
  source 1..366: mol_type = other DNA
gaggtgcagctggtggagtctgggggaggcttggtacagcctggggggtccctgagactctcctgtgcagcctctggattcacctttagcagctatgccatgagctgggtccgccaggctccagggaaggggctggagtgggtctcagctattagtggtagtggtggtagcacatactacgcagactccgtgaagggccggttcaccatctccagagacaattccaagaacacgctgtatctgcaaatgaacagcctgagagccgaggacacggccgtatattactgtgcgaaattggctggttattactactactactactacatggacgtctggggcaaagggaccacggtcaccgtctcctca

SEQ ID NO: 739 - DNA, 361 bp, Homo sapiens
  source 1..361: mol_type = other DNA
caggtgcagctggtgcagtctggggctgaggtgaagaagcctggggcctcagtgaaggtctcctgcaaggcttctggatacaccttcagcgaccactatatacactgggtgcgacaggcccctggacaagggcttgagtgcatgggatggatcaacgctaacaatggtggcacaaagtatgcaccgaagtttcagggcagggtcaccatgaccagggacacgtccatcagcacagcctacatggagctcagcaggctgacatctgacgacacggccgtgtattactgtgcgagagatccggagatggctacaattggtattgactactggggccagggaaccctggtcaccgtctcctcag

SEQ ID NO: 740 - DNA, 376 bp, Homo sapiens
  source 1..376: mol_type = other DNA
gacgtacagatggtggaatctgggggaggcttggtccagcctggggggtccctgagactctcctgtggggcctctggattcacctttagtaactattggatgacttgggtccgtcagggtccagggaaggggctggagtgggtggccaacataagggcagatggaaatgagagaaactatgtggactctgtgaagggccgattcaccatctccagagacaacgccaataacttagtgtttctacaactgaacagtttgagagtcgaggacacggctgtctattactgcgcgagaggggcctcaaaggaggagtctgctgggggctaccgaccccttcactacgggggccagggaaccctggtcaccgtctcctcag

SEQ ID NO: 741 - DNA, 364 bp, Homo sapiens
  source 1..364: mol_type = other DNA
caggtacagctggtgcagtctggggctgaggtgaagaagcctgggtcctcggtgaaggtctcctgcaaggcttctggaggcaccttcagcaagtctggtttctcctgggtgcgacaggcccctggacaaggtcttgagtggattggagggatcatccctatctttcataccacaaactacgcgcagaagtttcagggcagagtcacgattaccgcggacgaattcacgagcacaagttacatggacttgagtagcctgcgatctgaagacacggccatgtatttctgtgcgagagattcccttaactatgataatcgctacttcgatctctggggccgtggcaccctggtcactgtctcctcag

SEQ ID NO: 742 - DNA, 352 bp, Homo sapiens
  source 1..352: mol_type = other DNA
gaagtgcagctggtggagtctgggggaggcttggtacagcctggcaggtccctgagactctcctgtgcagcctctggattcacctttgatgattatgccatgcactgggtccggcaagctccagggaagggcctggactgggtctcaggtattagttggaatagtggtagcatagcctatgcggactctgtgaagggccgattcaccatctccagagacaacgccaagaactccctgtttctgcaaatgaacagtctgagagctgaggacacggccttgtattactgtgcaagttcgggggggcgggaaaatgactactggggccagggaaccctggtcaccgtctcctcag

SEQ ID NO: 743 - DNA, 362 bp, Homo sapiens
  source 1..362: mol_type = other DNA
caggtgcacctggaagagtcgggcccaggactggtgaagccttcggagaccctgtccctcacctgcactgtctctggtgactccatcggtacttactactggagctggatccggcagcccccagggaagggcctggagtgcattggctatatctcttataatggacgcaccaactacaatccgtccctcaagagtcgagtcaccatttcagtggacacgtccaggaaccagttctccctgaagctgagctctgtgaccgctgcggacacggccgtctatttttgcgcgagagatgatactggaatccgccgcaagaatgcttttgatatctggggccaagggacaatggtcaccgtctcttc

SEQ ID NO: 744 - DNA, 379 bp, Homo sapiens
  source 1..379: mol_type = other DNA
gaggtgcagctggtggagtctgggggaggcctggtcaagcctggggggtccctgagactctcctgtgcagcctctggattcaccttcagtagctatagcatgaactgggtccgccaggctccagggaaggggctggagtgggtctcatccattagtagtagtagtagttacatatactacgcagactcagtgaagggccgattcaccatctccagagacaacgccaagaactcactgtatctgcaaatgaacagcctgagagccgaggacacggctgtgtattactgtgcgagagaagaaacgaaaggatattgtactaatggtgtatgctacaactttgactactggggccagggaaccctggtcaccgtctcctcag

SEQ ID NO: 745 - DNA, 382 bp, Homo sapiens
  source 1..382: mol_type = other DNA
gaggtgcagctggtggagtctgggggaggcttggtccagcctggggggtccctgagactctcctgtgcagcctctggattcacctttagtagctattggatgagctgggtccgccaggctccagggaaggggctggagtgggtggccaacataaagcaagatggaagtgagaaatactatgtggactctgtgaagggccgattcaccatctccagagacaacgccaagaactcactgtatctgcaaatgaacagcctgagagccgaggacacggctgtgtattactgtgcgagagattccctctttgatttttggagtggccaaccggggggggtctcctttgactactggggccagggaaccctggtcaccgtctcctcag

SEQ ID NO: 746 - DNA, 343 bp, Homo sapiens
  source 1..343: mol_type = other DNA
caactggtggagtctgggggaggcttggtacagcctggagggtccctgagactctcctgtgcagcctctggattcaccttcagtaattatgaaatgaactgggtccgccaggctccagggaaggggctggagttggtttcatacattagtagtagtggttataccatatactacgcagactctgtgaagggccgattcaccatctccagagacaacgccaagaactcactatatctgcagatgaacagcctgagagtcgaagacacggctgtttattactgtgcgagaggggagactttttatgactactggggccagggaaccctggtcaccgtctcctcag

SEQ ID NO: 747 - DNA, 367 bp, Homo sapiens
  source 1..367: mol_type = other DNA
gaggtgcagctggtggagtctgggggaggcttggtacagcctggagggtccctgagactctcctgtgcagcctctgcattcaccttcaataattatgaaatgaactgggtccgccaggctccagggaaggggctggagtgggtttcatccattagtactagtggtagtaccatatactacgcagactctgtgaagggccgattcaccacctccagagacaacgccaggaactcattgtatctgcgaatgaacagcctgagagccgaggacacggctgtttattactgtgcgagaggtgtcggtggctggttgagctactggtacttcgatctctggggccgtggcaccctgctcactgtctcctcag

SEQ ID NO: 748 - DNA, 388 bp, Homo sapiens
  source 1..388: mol_type = other DNA
gaggtgcgtctggtggagtccgggggaggcttggtccagtctggggggtccctgaaagtctcttgcgcaggctctggcttcaccttcagtggctctactatacactgggtccgccagtcctccgggaaagggctggagtggcttgccctcattaaaagtggtgctaacacctacgcgacagagtatgctgcggcggtgagaggcagattcaccatctccagagacgattcacagagcacggcatatctgcaaatggacggccttaaaaccgaggacacggccatctattactgtatcagacatcgcgatgttttacgatattttgactggcagcctcccttctattttgagtcctggggccagggaacccaggtcaccgtctcctcag

SEQ ID NO: 749 - DNA, 372 bp, Homo sapiens
  source 1..372: mol_type = other DNA
gaggtgcagctggtggagactggaggaggcttgatccagcctggggggtccctgagactctcctgtgcagcctctgggttcaccgtcagtagcaactacatgagctgggtccgccaggctccagggaaggggctggagtgggtctcagttatttatagcggtggtagcacatactacgcagactccgtgaagggccgattcaccatctccagagacaattccaagaacacgctgtatcttcaaatgaacagcctgagagccgaggacacggccgtgtattactgtgcgagagatcgatccccgggttccttaggttactactactacggtatggacgtctggggccaagggaccacggtcaccgtctcctca

SEQ ID NO: 750 - DNA, 373 bp, Homo sapiens
  source 1..373: mol_type = other DNA
caggtgcagctgcaggagtcgggcccaggactggtgaagccttcggagaccctgtccctctactgcactgtctctggtggttccattagtagttactactggagttggatccggcagcccgccgggaagggactggagtggattgggcgtatttatatcagtgggagcaccaactacaacccctccctcaagagtcgagtcaccatgtcagtagacacgcccaagaaccagatctccctgaagctgagctctgtgaccgccgcggacacggccgtatattactgtgcgagaggaaattacgatattttgactggttattataagggatggttcgacctctggggccagggaaccctggtcaccgtctcctcag

SEQ ID NO: 751 - DNA, 367 bp, Homo sapiens
  source 1..367: mol_type = other DNA
gaagtgcagctggtggagtctgggggaggcttggtacagcctggcaggtccctgagactctcctgtgcagcctctggattcacctttgatgattatgccatgcactgggtccggcaagctccagggaagggcctggagtgggtctcaggtattagttggaatagtggtagcataggctatgcggactctgtgaagggccgattcaccatctccagagacaacgccaagaactccctgtatctgcaaatgaacagtctgagagctgaggacacggccttgtattactgtgcaaaaggtcgccggggctcggtggtggtagctgctacagactactggggccagggaaccctggtcaccgtctcctcag

SEQ ID NO: 752 - DNA, 376 bp, Homo sapiens
  source 1..376: mol_type = other DNA
gaggtgcacttggtggagtctgggggaaacttggtccagcctggggggtccctgagactctcctgtgcagcctctggattcacgtttgggagttattggatgacctgggtccgccaggctccaggaaagggactggagtgggtggccaccttaaaacaagatggaagtaaaatttactatgtggactctatgaagggccgagtcaccatctccagagacaacgccaagaattcactgtatctgcaaatgaacagcctgagagtcgaggacacggctgtgtactactgtgcgagagatggtcgtgaggaccacggttcgggaagttattcgcagtttgactattggggccagggaaccctggtcaccgtctcctcag

SEQ ID NO: 753 - DNA, 370 bp, Homo sapiens
  source 1..370: mol_type = other DNA
caggtgcagctacagcagtggggcgcaggactgttgaagccttcggagaccctgtccctcacctgcgctgtcgatggtgggtccctcagtggttactactggagctggatccgccagtccccagaaaaggggctggagtggattggggaaatcgaccatggtggaagcaccaatgacaatacgtccctcaagagtcgagtcaccatgtcagtagacacgtccaagaaccaattctccctgaaactgaagtctgtgaccgccgcggacacggctgtgtattactgtgccagaggtccgccccgacgaacctactatggttcgggaaagtttgactactggggccagggaagcctggtcatcgtctcctcag

SEQ ID NO: 754 - DNA, 358 bp, Homo sapiens
  source 1..358: mol_type = other DNA
gaggtgcagctggtggagtctgggggagacttggtccagcctggggggtccctgagactctcctgtgcagcctctggattcagccttaggagttattggatgatctgggtccgccaggcaccagggaaggggctggagtgggtggccaacataaaccaagatgtaagccatatatattatttggactctgtgaggggccgattcaccatctccagagacaacgccgagaactcactgtttttgcaaatgaacagcctgaccgccgaggacacggctgtgtattattgtgcgagaatagagtgggagcaatggctggtacgctactggggccagggaaccctggtcaccgtctcctcag

SEQ ID NO: 755 - DNA, 346 bp, Homo sapiens
  source 1..346: mol_type = other DNA
gaggtgcagctggtggagtctgggggaggcttggtacagcctggggggtccctgagactctcctgtgcagcctctagattcaccttcagtaattacgacatgcagtgggtccgccaagctacaggaaaaggtctggagtgggtcgcaactgttggtgctgctggtgacacatactatgcagactccgtggagggccgattcaccgtctccagagacaatgccaggagctccttgtatcttcaaatgaacagcctgcgacccggggacacggctatttattactgtgcgaggtggggggagggccttgactactggggccagggaaccctggtcaccgtctcctcag

SEQ ID NO: 756 - DNA, 370 bp, Homo sapiens
  source 1..370: mol_type = other DNA
gaggtgcagctgttggagtctgggggaggctgggtacagcctggggggtccctgagactctcctgtgcagcctctggattcacctttaccacctatgccatgagctgggtccgccgggctccagggagggggctggagtgggtctcaactattactggtactggtcttagcacatactatgcagactccgtgaagggccggttcaccatctccagagacaattccaagaatacgctgtttctgcaaatgaccagcctgagagccgacgacacggccatatattactgtgcgaaggattctaggtcctggatagcagtggctggctcatttgactcctggggccagggaacccaggtcaccgtctcctcag

SEQ ID NO: 757 - DNA, 361 bp, Homo sapiens
  source 1..361: mol_type = other DNA
caggtgcagctgcaggagtcgggcccaggactggtgaagccttcggagaccctgtccctcacctgcgctgtctctggttactccatcagcagtggttactactggggctggatccggcagcccccagggaaggggctggagtggattgggagtatctatcatagtgggagcacctactacaacccgtccctcaagagtcgagtcaccatatcagtagacacgtccaagaaccagttctccctgaagctgagctctgtgaccgccgcagacacggccgtgtattactgtgcgagagggacccttgattttgactggttcctcggctactggggccagggaaccctggtcaccgtctcctcag

SEQ ID NO: 758 - DNA, 361 bp, Homo sapiens
  source 1..361: mol_type = other DNA
caggtgcagctggtgcagtctggggctgaggtgaagaagcctgggtcctcggtgaaggtctcctgcacggcctcaggaagcatcttcagaagctatgctctcagctgggtgcgacaggcccctggacaagggcttgagtggatgggagggatcatcgctgtctttggtacaacaaactacgcacagaagttccggggcagagtcacgattaccgcagacgaatccaggaacacagcctacatgcagctgagcagcctgagatctggcgacacggccatttattactgtgcgagcctttccgggtatgacagtggctactactcttcctggggccagggaaccctggtcaccgtctcctcag

SEQ ID NO: 759 - DNA, 385 bp, Homo sapiens
  source 1..385: mol_type = other DNA
caggtgcagctacagcagtggggcgcaggactgttgaagccttcggagaccctgtccctcacctgcgctgtctatggtgggtccttcagtggttactactggagctggatccgccagcccccagggaaggggctggagtggattggggaaatcaatcatagtggaagcaccaactacaacccgtccctcaagagtcgagtcaccatatcagtagacacgtccaagaaccagttctccctgaagctgagctctgtgaccgccgcggacacggctgtgtattactgtgcgagagaacggaagtaccagctgctaagtcggggtttaggatcattacatgatgcttttgatatctggggccaagggacaatggtcaccgtctcttcag

SEQ ID NO: 760 - DNA, 367 bp, Homo sapiens
  source 1..367: mol_type = other DNA
gaggtgcagctggtagaatctgggggaggcttggtacagcctggagggtccctgagactctcctgtgcagtctctggattcacgttcagtagttatgaaatgaactgggtccgccaggctccagggaaggggctggagtgggtttcatacattagtagcagtggttttaccgtacactacgcagactctgtgaagggccgattcaccatctccagagacaacgccaagaactcactgcatctgcaaatgaacagcctgagagccgaggacacggctgtttattactgtgcgaggaacgcatactatggttcggggagttataattttgactactggggccagggaaccctggtcaccgtctcctcag

SEQ ID NO: 761 - DNA, 361 bp, Homo sapiens
  source 1..361: mol_type = other DNA
caggtggagctgcaggagtcgggcccaggagtggtgaagccttcggagaccctgtccctcacctgcaatgtctctggtgtctccatcaatgattactactggacctggatccggcagcccgccgggaagggactggagtgggttggacgtatctatgccagtgggagcaccaactacaacccctccctcaagagtcgagtcatcatgtcagtagacacgtcccagaacctcttgtccctgaaggtggcctctgtgaccgccgcggacacggccgtctattactgtgcgagaggcgtcatgaactttggagtgatcattcttgagtcctggggccagggaatcctggtcgccgtctcctcag

SEQ ID NO: 762 - DNA, 367 bp, Homo sapiens
  source 1..367: mol_type = other DNA
caggtgcagctggtgcaatctggggctgaagtgaaggagcctgggtcctcggtgaaggtctcctgcaaggctcctggaggcaccttcagcagcaatgctatcagttgggtgcgacaggcccctggacaggggcttgagtggatgggagggatcatgggaatgtttcgtacagcacacaacgcacagaagttccagggcagagtcacatttacggcagacgaatatatgagggaaggctacatggagataagcggcctgagatctgatgacacggccatttattactgtgcgagaatgaacggctaccatttcctcacaaactggttcgacccctggggccagggaaccgtggtcaccgtctcctcag

SEQ ID NO: 763 - DNA, 364 bp, Homo sapiens
  source 1..364: mol_type = other DNA
caggagcagctggtggagtctgggggaggcgtggtccagcctggggggtccctgagactctcctgtgcagcgtctggattcaccttcagtagctatggcatgcactgggtccgccagggtccaggcaaggggctggagtgggtggcatttatacggtttgatggaagtgataagaactacgcagactccgtgaagggccgattcaccatctccagagacgattccaagaacacactatatctgcaaatgaacagcctgagagctgacgacacggctgtgtattactgtgcgagagatcaaatcctggaacaactaaatgcttttgatatctggggccacgggacactggtcaccgtctcttcag

SEQ ID NO: 764 - DNA, 373 bp, Homo sapiens
  source 1..373: mol_type = other DNA
caggtgcagctggtgcagtctggggctgaggtgaagaagcctgggtcctcaatgaaggtctcctgcacgggttctggggtcaccttcagcagctatgctatcagctgggtgcgacaggcccctggacaagggcttgagtgggtgggaggcatcatcactatgtttgggacagcaaactacgcacagaagtttcagggcagagtcacgattaccgcggaccaatccacgaggacagcctacatggaggtgagcagcctgagatctgaggacacggccgtgtattactgtgcgagacatcgcggttatcacacttcggggagccaggcgaactttgactcctggggccagggaaccctggtcaccgtctcctcag

SEQ ID NO: 765 - DNA, 349 bp, Homo sapiens
  source 1..349: mol_type = other DNA
gaggtgcagctggtggagtctgggggaggcttggtacagcctggagggtccctgagactctcctgtgcagcctctggattcaccttcagtagttatgaaatgaactgggtccgccaggctccagggaaggggctggagtgggtttcatacattagtagtagtggtagtaccatatactacgcagactctgtgaagggccgattcaccatctccagagacaacgccaagaactcactgtatctgcaaatgaacagcctgagagccgaggacacggctgtttattactgtgcgagagatcaaatggcatgggactactggggccagggaaccctggtcaccgtctcctcag

SEQ ID NO: 766 - DNA, 390 bp, Homo sapiens
  source 1..390: mol_type = other DNA
caggtgcagctggtgcagtctggggctgaggtgaagaagcctggggcctcagtgaaggtctcctgcaaggcttctggatacaccttcaccggctactatatgcactgggtgcgacaggcccctggacaagggcttgagtggatgggatggatcaaccctaacagtggtggcacaaactatgcacagaagtttcagggcagggtcaccatgaccagggacacgtccatcagcacagcctacatggagctgagcaggctgagatctgacgacacggccgtgtattactgtgcgagagagaacttacaagtgggtgaggatacagctatggttacttcctactactactacatggacgtctggggcaaagggaccacggtcaccgtctcctca

SEQ ID NO: 767 - DNA, 373 bp, Homo sapiens
  source 1..373: mol_type = other DNA
cagatcaccttgaaggagtctggtcctacgctggtgaaacccacacagaccctcacgctgacctgcaccttctctgggttctcactcagcactagtggagtgggtgtgggctggatccgtcagcccccaggaaaggccctggagtggcttgcactcatttattggaatgatgataagcgctacagcccatctctgaagagcaggctcaccatcaccaaggacacctccaaaaaccaggtggtccttacaatgaccaacatggaccctgtggacacagccacatattactgtgcacacacccgtatagcagcagctggtaccgctgaatacttccagcactggggccagggcaccctggtcaccgtctcctcag

SEQ ID NO: 768 - DNA, 372 bp, Homo sapiens
  source 1..372: mol_type = other DNA
caggtgcagctggtgcagtctggggctgaggtgaagaagcctggggcctcagtgaaggtctcctgcaaggcttctggatacaccttcaccggctactatatgcactgggtgcgacaggcccctggacaagggcttgagtggatgggatggatcaaccctaacagtggtggcacaaactatgcacagaagtttcagggcagggtcaccatgaccagggacacgtccatcagcacagcctacatggagctgagcaggctgagatctgacgacacggccgtgtattactgtgcgagaggggtcattactatggttcggggagattactacggtatggacgtctggggccaagggaccacggtcaccgtctcctca

SEQ ID NO: 769 - DNA, 373 bp, Homo sapiens
  source 1..373: mol_type = other DNA
gaggtgcagctggtgcagtctggagcagaggtgaaaaagccgggggagtctctgaagatctcctgtaagggttctggatacagctttaccagctactggatcggctgggtgcgccagatgcccgggaaaggcctggagtggatggggatcatctatcctggtgactctgataccagatacagcccgtccttccaaggccaggtcaccatctcagccgacaagtccatcagcaccgcctacctgcagtggagcagcctgaaggcctcggacaccgccatgtattactgtgcgagcacgtattactatggttcggggagttattcatatccatttgactactggggccagggaaccctggtcaccgtctcctcag

SEQ ID NO: 770 - DNA, 361 bp, Homo sapiens
  source 1..361: mol_type = other DNA
caggtgcagctgcaggagtcgggcccaggactggtgaagccttcggagaccctgtccctcacgtgcactgtttctgaagcctcccttgataatttttattgggcttggatccggcaggccccagggaagggcctggagtggattgggtacatccattatagagggagaaccaattacaatccctccctcaagaaccgagtcaccatgtcaatggacacgtccaagaaccagttctccctcaatctgacttctgtgaccgctgcggacacggccatatattactgtgcgagagaccgaactggacctggatacagctatgttgatttctggggccggggagccctggtcagcgtctcctcag

SEQ ID NO: 771 - DNA, 387 bp, Homo sapiens
  source 1..387: mol_type = other DNA
gaggtgcagctggtggagtctgggggaggcctggtcaagcctggggggtccctgagactctcctgtgcagcctctggattcaccttcagtagctatagcatgaactgggtccgccaggctccagggaaggggctggagtgggtctcatccattagtagtagtagtagttacatatactacgcagactcagtgaagggccgattcaccatctccagagacaacgccaagaactcactgtatctgcaaatgaacagcctgagagccgaggacacggctgtgtattactgtgcgagagaggcatattgtggtggtgattgcccagaacaaaactactactactactacatggacgtctggggcaaagggaccacggtcaccgtctcctca

SEQ ID NO: 772 - DNA, 367 bp, Homo sapiens
  source 1..367: mol_type = other DNA
caggtgcagctggtggagtctgggggaggcttggtcaagcctggagggtccctgagactctcctgtgcagcctctggattcaccttcagtgactactacatgagctggatccgccaggctccagggaaggggctggagtgggtttcatacattagtagtagtggtagtaccatatactacgcagactctgtgaagggccgattcaccatctccagggacaacgccaagaactcactgtatctgcaaatgaacagcctgagagccgaggacacggccgtgtattactgtgcgagaggcggtggtaccccctttaaccttggtgcttttgatatctggggccaagggacaatggtcaccgtctcttcag

SEQ ID NO: 773 - DNA, 367 bp, Homo sapiens
  source 1..367: mol_type = other DNA
caggttcacctggtgcagtctggatctgaggtgcggaagcctggggcctcagtgaacgtctcctgcaaggcctctggttatacttttgtctattatggtttcaattggctgcgacaggcccctggacaagggcttgagtggatggcatggatcagcgcctacaacggtaacacagagtatgcacagaagttccagggcagagtcaccgtgaccacggacacatccacgagcacagcctatttggatgtggggagcctacaatctgacgacacggccgtctattactgtgcgcgcgcgccaccttcgactttggcagctcgctggaatgactactggggccagggaaccctggtcaccgtctcctcag

SEQ ID NO: 774 - DNA, 367 bp, Homo sapiens
  source 1..367: mol_type = other DNA
gaggcgcagttggtggagtctgggggaggtgtggtacggcctggggggtccctgagactcgcctgtgcagcctctggattcacctttgatgattatggcatgagttgggtccgccaagttccagggaaggggctggagtgcgtctctggtatcaattggaatggagatagtacaggttatgcagactctgtgaagggccgattcaccatctccagagacaacaccaacaacgccttgtatctgcaaatgaacagtctgagagtcgaggacacggccttgtattattgtgcgagagatcatgactacggcgattcagactggtatttcgatctctggggccgtggcaccctggtcactgtctcctcag

SEQ ID NO: 775 - DNA, 352 bp, Homo sapiens
  source 1..352: mol_type = other DNA
gaggtgcagctggtggagtctgggggaggcttggtccagcctggggggtccctgagactctcctgtatagcctctggattcaggtttagtagttattggatgaagtgggtccgccaggctccagggaaggggctggagtgggtggccaatataaacaaagatggaagtgagaaatactacgtggactctgtgaagggccgattcaccatcttcagagacaacgccaagaattcagtgtatctgcaaatgaacagcctgagagtcgaagacacggctttttattactgtgcgggagattccaaggggagctatgactatcggggccagggaaccccggtcaccgtctcctcag

SEQ ID NO: 776 - DNA, 370 bp, Homo sapiens
  source 1..370: mol_type = other DNA
caggtgcagctgcaggagtcgggcccaggactggtgaagccttcggagaccctgtccctcatctgcactgtctctggtggctccatcagtagtttctactggagctggatccggcagcccgccgggaagggactggagtggattggacgtatctatgtcagtgggagcaccaaatacaatccctccctcaagagtcgagttaccatgtcaatagacacgtccaagtccaagaatcacttctccctgaagctgagctctgtgaccgccgcggacgcggccgtttattactgtgcgagagggtcaggcagtggctggttgggggactactttgactactggggccagggaatcctggtcaccgtctcctcag

SEQ ID NO: 777 - DNA, 348 bp, Homo sapiens
  source 1..348: mol_type = other DNA
gaggtgcagctggtggagtctgggggaggcttggtacagcctggagggtccctgagactctcctgtgcagcctctggattcaccttcagtagttatgaaatgaactgggtccgccaggctccagggaaggggctggagtgggtttcatacattagtagtagtggtagtaccatatactacgcagactctgtgaagggccgattcaccatctccagagacaacgccaagaactcactgtatctgcaaatgaacagcctgagagccgaggacacggctgtttattactgtgcgagatcagctcactattgggacgtctggggccaagggaccacggtcaccgtctcctca

SEQ ID NO: 778 - DNA, 385 bp, Homo sapiens
  source 1..385: mol_type = other DNA
gaggtgcaactggtggagtctgggggaggcctggtcaagcctggggggtccctgagactctcctgttcagcctctggattcaccttcagttcctatagcatgaactgggtccgccaggctccagggaaggggctggagtgggtctcgtctttgagtagtcgtagtacttacctatactacgcagactcagtgaagggccgattcaccatctccagagacaacgccgagaactcactgtttctgcaaatgaacagtctgagccccgaggacacggctatgtatttctgtgcgcgagcctcggacagagaactacgatttttggagtggctatcccatgaggcttttgatatctggggcccagggacaatggtcaccgtctcttcag

SEQ ID NO: 779 - DNA, 370 bp, Homo sapiens
  source 1..370: mol_type = other DNA
caggtgcagctgcaggagtcgggcccaggactggtgaagccttcacagaccctgtccctcacctgcactgtctctggtggctccatcagcagtgatgattactactggagctggatccgccagccccccgggaagggcctggagtggattggatacatccattacagtggcagcacctactacaacccgtccctcaagagtcgagttaccatgtcactagacacgtccaagaaccagttctccctgaagctgagctctgtgactgccgctgacacggccgtctatttctgtgcccgtattgacgttataccatctactatggggggttttgactactggggccagggaaccctggtcaccgtttcctcag

SEQ ID NO: 780 - DNA, 346 bp, Homo sapiens
  source 1..346: mol_type = other DNA
caggtgctgctggtgcagtctggggctgaggtgaagaagcctggggcctcagtgaaggtctcctgcaaggcttccagatacagcttcaccgactactatatacactgggtgcgacaggcccctggacaagggcttgagtggatgggatggatcaaccctaacagtggtggcacaaactatgcacagaagtttcagggcagggtcaccatgaccagggacacgtccatcagcacagcctacatggagctgagcagcctgagatctgacgacacggccgtgtattactgtgcgagaaatttcgcatgggactactggggccagggaaccctggtcaccgtctcctcag

SEQ ID NO: 781 - DNA, 376 bp, Homo sapiens
  source 1..376: mol_type = other DNA
caggtgcagctggtgcagtctggggctgaggtgaagaagcctgggtcctcggtgaaggtctcctgcaaggcttctggaggcaccttcagcagctatgctatcagctgggtgcgacaggcccctggacaagggcttgagtggatgggagggatcatccctatctttggtacagcaaactacgcacagaagttccagggcagagtcacgattaccgcggacgaatccacgagcacagcctacatggagctgagcagcctgagatctgaggacacggccgtgtattactgtgcgagagcccattgtactaatggtgtatgctatccgtctgatgcttttgatatctggggccaagggacaatggtcaccgtctcttcag

SEQ ID NO: 782 - DNA, 355 bp, Homo sapiens
  source 1..355: mol_type = other DNA
caggttcagctggtgcagtctggagctgaggtgaagaagcctggggcctcagtgaaggtctcctgcaaggcttctggttacacctttaccagctatggtatcagctgggtgcgacaggcccctggacaagggcttgagtggatgggatggatcagcgcttacaatggtaacacaaactatgcacagaagctccagggcagagtcaccatgaccacagacacatccacgagcacagcctacatggagctgaggagcctgagatctgacgacacggccgtgtattactgtgcgagagagggcgggtggctggcgcccgactactggggccagggaaccctggtcaccgtctcctcag

SEQ ID NO: 783 - DNA, 376 bp, Homo sapiens
  source 1..376: mol_type = other DNA
caggtgcagctggtgcagtctgggactgaggtgaagaagcctggggcctcagtgaaggtctcctgcaaggcctctggatacagcttcagcgactgctatatacactgggtgcggcaggcccctggacaagggcttgagtggatgggatggatcagtcctaaaggtgatgtcaccagttatggacagaagtttcagggcagggtcaccatgaccttggacccgtctgtcaccacagcctatatggaactgagcgcactgcgatctgacgacacggccgtgtattactgtgcgaaaaatcggggggaatgtaatgatgacagctgctaccgcgaccttgactactggggccagggaaccctggtctccgtctcgtcag

SEQ ID NO: 784 - DNA, 349 bp, Homo sapiens
  source 1..349: mol_type = other DNA
gaggtgcagctggtggagtctgggggaggcttggtccagcctggggggtccctgagactctcctgtgaagcctctggattcacttttagtaactattggatgagctgggtccgccaggctccagggatggggctggagtgggtggccaacatgaagaaagatggaagtgagatatactatgtggactctgtgaagggccgattcaccatctccagagacaacgccaagaactcagtatatctgcaaatgaacagcctgagagtcgaagacacggctgtgtattattgtgcgagagatggggatcaatttgactattggggccagggaaccctggtcaccgtctcctcag

SEQ ID NO: 785 - DNA, 364 bp, Homo sapiens
  source 1..364: mol_type = other DNA
gaggtgcaggtggtggagtctgggggaggcttggtccagcctggggggtccctgagactctcctgtgtaacctctggatacacctttagtaacttttggatgacctgggtccgccaggctccagggaagggactggagtgggtggccaacataaaaaacgatggaagtaaaacctactatgtggactctgtgaagggccgattcaccatctccagagacaacgcccagaattcactgtatctgcagatgaacagcctgggagtcgaagacacggctgtatattactgtgcgagagacccccgggacagtgagtatgccatctttgactactggggccaggggatcctggtcaccgtctcctcag

SEQ ID NO: 786 - DNA, 355 bp, Homo sapiens
  source 1..355: mol_type = other DNA
gaggtgcagctggtgcagtctggagcagtggtgaaaaagccgggggagtctctgaagatctcctgtaaggcctctggatacactttcaccagctactggatcgcctgggtgcgccagatgcccgagaaaggcctggagtggatggggatcatctatcctggtgactctgataccaaatacagcccgtcctttcaaggccaggtcaccatctcagccgacaagtccaccagtaccgtctacctgcactggagctccctgaaggcctcggacaccgccatgtactactgtgcgagacgagaaacagtggtaggtgtcgactactggggccagggaaccctggtcaccgtctcctcag

SEQ ID NO: 787 - DNA, 364 bp, Homo sapiens
  source 1..364: mol_type = other DNA
caggtgcagctgcaggcgtcgggcccaggactggtgaagccttcggagaccctgtccctcacctgcactgtctctggtgactccatcactaattactactggagctggatccggcagcccgccgggaagggactggagtggattgggcgtatctttaccagtgggagcaccaactacaacccctccctcaaaagtcgcgtcaccatgtcagtagacacgtccaagaaccagttctccctgaagctgagctctgtgaccgccgcggacacggccgtgtattactgtgcgagagatctaggtatcgtgggagccaatccgacctttgactactggggccagggaaccctggtcaccgtctcctcag

SEQ ID NO: 788 - DNA, 368 bp, Homo sapiens
  source 1..368: mol_type = other DNA
caggtgcagctggtgcagtctggggctgaggtgaagaagcctgggtcctcggtgaaggtctcctgcaagccttctggaggccccttcttcaatagtaatgctatcagttgggtgcgacaggcccctggacaagggcttgagtggatgggagggatcatccctatctttggtacaagaaactacgcacagaagttccagggcagagtcacgattagcgcggacgaaaccatgggcacagcctacatggagctgagcaacctgagatctgaagacacggccgtgtattactgtgcgagagagtcgacttactacggtcgacttaactacatggacgtctggggcaaagggaccacggtcatcgtctcctc

SEQ ID NO: 789 - DNA, 379 bp, Homo sapiens
  source 1..379: mol_type = other DNA
caggtgcagctgcaggagtcgggcccaggactggtgaagccttcggagaccctgtccctcacctgcactatctctggtagctccatcagtaattactactggagctggatccggcagcccgccgggaagggactggagtggattgggcgtctctatatcagtgggagcaccaactacaacccctccctcaagagtcgagtcaccatgtcattagacacgtccaagaaccagttctccctgaagctgaactctgtgaccgccgcggacacggccatatattactgtgcgagaggatattgtagtagaaccagctgctataagcgtggaggaacttactttgactactggggccagggaaccctggtcaccgtctcctcag

SEQ ID NO: 790 - DNA, 381 bp, Homo sapiens
  source 1..381: mol_type = other DNA
caggtgcagctgcaggagtcgggcccaggactggtgaagccttcggagaccctgtccctcacctgcactgtctctggtgactccattactagttactactggagctggatccggcagcccgccgggaggggactggagtggattgggcgtatctttatcagtgggagcaccgactacaatccctccctcaagagtcgagtcatcatgtcaatagactcgtccaagaagcagctctccctgaagttgaattctgtgaccgccgcggacacggccgtgtatttctgtgcgagggagacttactttggttcggggggtaattataactactactattatggtgtggacgtctggggccaagggaccacggtcaccgtctcctca

SEQ ID NO: 791 - DNA, 349 bp, Homo sapiens
  source 1..349: mol_type = other DNA
gaggtgcagctggtggagtctgggggaggcttggtacagcctggagggtccctgagactctcctgtatagcctctggattcaccttcagtaattatgaaatgaactgggtccgccaggctccagggaaggggctggagtgggtttcatatatggatagtagaggtaatgccatatactacgcagactctgtgaagggccgattcaccatctccagagacaacgccaagaactcactgtatctgcaaatgaacagcctgagagccgaggacacggctgtttattactgtgcgagagggccttggacccttgactactggggccagggaaccctggtcaccgtctcctcag

SEQ ID NO: 792 - DNA, 375 bp, Homo sapiens
  source 1..375: mol_type = other DNA
caggtgcaactggtgcagtctggggctgaggtgagggagccggggtcctcggtgaaggtctcctgcaaggcttctggagccaccctcaacagtaatgctatcagctgggtgcgacaggcccctggacaagggcttgagtggatgggaggaatcatgactatgtttgggaaaacaaattacgcacagaagttccagggcagactcacgattaccgcggacgactccacgagcacagcctacatggagctgagcggcctgagatctgaggacacggccgtatattactgtgcgagttatactccagcacccggccgcaactactacttcttttacatggacgtctggggcaaagggactacggtcatcgtctcctca

SEQ ID NO: 793 - DNA, 364 bp, Homo sapiens
  source 1..364: mol_type = other DNA
gaggtgcaactggtggagtctgggggaggcgtggtccagcctggggggtccctgagactctcctgtggaggctctggattcacctttagtaactattggatgcattgggtccgccaggctccaggtaaggggctggagtgggtggccagcgtgaagcaggatggacgtgaggagacctatgcagactccatgaagggccgattcaccatctccagagacaacgccaagaagtctctatatctgcagctaaacagcctgcgacccgaggacacggctgtgtattactgtgccagaggcttgagtaccagtgcctggtcccccctgggcttttggggccagggaaccctggtcaccgtctcctcag

SEQ ID NO: 794 - DNA, 364 bp, Homo sapiens
  source 1..364: mol_type = other DNA
caggttcagctggtgcagtctggagctgaggtgaagaagcctggggcctcagtgaaggtctcctgcaaggcttctggttacacctttaccagctatggtatcagctgggtgcgacaggcccctggacaagggcttgagtggatgggatggatcagcgcttacaatggtaacacaaactatgcacagaagctccagggcagagtcaccatgaccacagacacatccacgagcacagcctacatggagctgaggagcctgagatctgacgacacggccgtgtattactgtgcgagagaggggggtctatggttcggggagccccttaactactggggccagggaaccctggtcaccgtctcctcag

SEQ ID NO: 795 - DNA, 349 bp, Homo sapiens
  source 1..349: mol_type = other DNA
gaggtgcagctggtggagtctgggggaggcttggtacagcctggagggtccctgagactctcctgtgcagcctctggattcaccttcagtagttatgaaatgaattgggtccgccaggctccagggaaggggctggagtgggtttcatacattagtagtagtggttatatcatatactacgcagactctgtgaagggccgatttaccatctccagagacaacgccaagaactcactgtatctgcaaatgaacagcctgagagccgaggacacggctgtttattactgtgcgagagatgcccattattggcactactggggccagggaaccctggtcaccgtctcctcag

SEQ ID NO: 796 - DNA, 393 bp, Homo sapiens
  source 1..393: mol_type = other DNA
caggtgcagctggtggagtctgggggaggcgtggtccagcctgggaggtccctgagactctcctgtgcagcctctggattcaccttcagtagctatgctatgcactgggtccgccaggctccaggcaaggggctggagtgggtggcagttatatcatatgatggaagcaataaatactacgcagactccgtgaagggccgattcaccatctccagagacaattccaagaacacgctgtatctgcaaatgaacagcctgagagctgaggacacggctgtgtattactgtgcgagagattctcaattttgggctagcagtggctggtaccaccccaaaccttactactacggtatggacgtctggggccaagggaccacggtcaccgtctcctca

SEQ ID NO: 797 - DNA, 369 bp, Homo sapiens
  source 1..369: mol_type = other DNA
gaggtgcagctggtggagtctgggggaggcttggtacagcctggggggtccctgagactctcctgtgcagcctctggattcacctttagcagctatgccatgagctgggtccgccaggctccagggaaggggctggagtgggtctcagctattagtggtagtggtggtagcacatactacgcagactccgtgaagggccggttcaccatctccagagacaattccaagaacacgctgtatctgcaaatgaacagcctgagagccgaggacacggccgtatattactgtgcgaaattgaattcggagcgattacgatttttgccctacatggacgtctggggcaaagggaccacggtcaccgtctcctca

SEQ ID NO: 798 - DNA, 394 bp, Homo sapiens
  source 1..394: mol_type = other DNA
caggtgcagctggtggagtctgggggaggcgtagtccagcctgggaggtccctgagactctcctgtgcagcgtctggattcaccttcagtaactatggcatgcactgggtccgccaggctccaggcaaggggctggagtgggtggcagttatatggtatgatggaagtaataaatactatgcagactccgtgaagggccgattcatcatctccagagacaattccaggaacacgctgtatctgcaaatgaccagcctgagagccgaggacacggctgtgtattactgtgcgagaggaggaaacccgataaagaattacgattttttgactgcttacatagggccggaatacattgactactggggccagggaaccctggtcaccgtctcctcag

SEQ ID NO: 799 - DNA, 370 bp, Homo sapiens
  source 1..370: mol_type = other DNA
caggtgcagctacagcagtggggcgcaggactgttgaagccttcggagaccctgtccctcacctgcgctgtctatggtgggtccttcagtggttactactggagctggttccgccagcccccaggaaaggggctggagtggattggggaaatcaatcacagtggaagcaccaactacaacccgtccctcaagagtcgagtctccatatcagcggacacgtccaagaaccaattctccctgaagctgagttctgtgaccgccgcggacacggctgtctatttttgtgcgagaggcggactacagcatttggagtggttattatacccctttgacctctggggccagggaaccctggtcaccgtctcctcag

SEQ ID NO: 800 - DNA, 376 bp, Homo sapiens
  source 1..376: mol_type = other DNA
caggtgcagctgcaggagtcgggcccaggactggtgaagccctcggagaccctggccctcacctgcactgtctctggttactccatcagcagtggttactattgggcctggatccggcagcccccagggaaggggctggagtggataggaaatatctatcatagtgggagcgcctactacaacccgtcgctcaagagtcgagtcaccatatcagtagacacgtccaagaaccaattctccctgaagctgagctctgtgaccgccgcagacacggccatgttttactgtgcgagaggcggggataagccaggtatttcagtggctggtaactactttgactactggggccaaggaaccctggtcaccgtctcctcag

SEQ ID NO: 801 - DNA, 372 bp, Homo sapiens
  source 1..372: mol_type = other DNA
gaagtgcagttagtggagtctgggggaggcttggtacagcctggcaggtccctgagactctcctgtgtaggctctggattcaggtttgatgactatggcatgcactgggtccggcaagctccagggaagggcctggagtgggtctcaggtattggttggaatagtggcagtatagggtatgcggactctgtgaagggccgattcatcatctccagagacaacgccaagaactccctgtatctgcaaatgaacagtctgagagctgaggacacggccttgtattactgcgcaaaagatatatgggcagcaggaggaggctacttctattacatggacgtctggggcaaagggaccacggtcaccgtctcctca

SEQ ID NO: 802 - DNA, 382 bp, Homo sapiens
  source 1..382: mol_type = other DNA
gaggtgcagctggtgcagtctggagcagaggtgaaaaagcccggggagtctctgaagatctcgtgtaagggttctggatacagctttcccaactactggatcggctgggtgcgccagatgcccgggaaaggcctagagtggatggggatcatctatcctgatgactctgatatcagatacagcccgtccttccaaggccaggtcaccatctcagccgacaagtccatcaccaccgcctacctgcagtggaacagcctgaaggcctcggacaccgccctgtattactgtgcgagaagtaccccttattacgatttctggagtggcccttatcctcaaccatttgactactggggccagggaacactggtcaccgtctcctcag

SEQ ID NO: 803 - DNA, 370 bp, Homo sapiens
  source 1..370: mol_type = other DNA
gaagtgcagctggtggagtctgggggaggcttggtacagcctggcaggtccctgagactctcctgtgcagcctctggattcacctttgatgattatgccatgcactgggtccggcaagctccagggaagggcctggagtgggtctcaggtattagttggaatagtggtagcataggctatgcggactctgtgaagggccgattcaccatctccagagacaacgccaagaactccctgtatctgcaaatgaacagtctgagagctgaggacacggccttgtattactgtgcaaaagatgggttggatagcagcagctggtccggatcttttgactactggggccagggaaccctggtcaccgtctcctcag

SEQ ID NO: 804 - DNA, 355 bp, Homo sapiens
  source 1..355: mol_type = other DNA
gaggtgcagctggtggagtccgggggaggcttagttcagcctggggggtccctgagactctcctgtgcagcatctggattcatcttcactacctactggatgcactgggtccgccaagctccagggaaggggctggtgtgggtctcacgtattaacattgatgggagtagcacaacctacgcggactccgtgaagggccgattcaccatctccagagacaacaccaggaacgcggtgtatctgcaaatgaacagtctgagagccgaggacacggctgtctattactgtgcaagagacgtagtgggagctacttgtgacttctggggccagggaaccctggtcaccgtctcctcag

SEQ ID NO: 805 - DNA, 364 bp, Homo sapiens
  source 1..364: mol_type = other DNA
caggtgcagctgcaggagtcgggcccaggactggtgaagccttcggagaccctgtccctcacctgcactgtctctggtgcctccatcagtagttactactggaactggatccggcagcccgccgggaacggactggagtggattgggcgtatctatattagtgggagcaccaactacaacccctccctcaagagtcgagtcaccatgtcagtagacacgtccaagaatcagttctccctgaagttgacctctgtgaccgccgcggacacggccgtgtattactgtgcgagagtccttcccggggggggcggaattgatgcttttgatatctggggccacgggacaatggtcaccgtctcttcag

SEQ ID NO: 806 - DNA, 349 bp, Homo sapiens
  source 1..349: mol_type = other DNA
gaggtgcagttggtggagtctgggggaggcttgctacagcctggagggtccctgagactctcctgtgcagcctctggattcaacttcagtagttatgagatgaactgggtccgccaggctccagggaaggggctggagtgggtttcatacattagtagtggtggcgataccaaaaactacgcagactctgtgaagggccgcttcaccatctccagagacaacgccaagaactcactgtatctgcaaatgaacagcctgagagccgaggacacggctgtttattactgtgcgagagatgcccccctaattgactactggggccagggaaccctggtcaccgtctcctcag

SEQ ID NO: 807 - DNA, 379 bp, Homo sapiens
  source 1..379: mol_type = other DNA
caggtgcagctgcaggagtcgggcccaggactggtgaagccttcggagaccctggccctcacctgcactgtctctggtgtctccatcagcagttactactggagttggatccgacagtccccagggaagggactggagtgtgttggttatatctcttacagtgggcgcaccaactctgggcgcaccaactacaacccgtccctcaagagtcgagtcgccatttcagtagacatgtccaagaaccagttcttcctaaacttgaggtctgtgaccgctgcggacacggccgtgtattactgtgcgagagatacgacagcagctcttggaaaaaatgcttttgatatctggggccaagggacaatggtcaccgtctcttcag

SEQ ID NO: 808 - DNA, 361 bp, Homo sapiens
  source 1..361: mol_type = other DNA
caggtccagctggtgcagtctggggctgaggtgaagaagcctgggtcctcggtgaaggtctcctgcaaggcttctggaggcaccttcagcagctatactatcagctgggtgcgacaggcccctggacaagggcttgagtggatgggagggatcatccctatctttggtatagcaaactacgcacagaagttccagggcagagtcacgattaccgcggacgaatccacgagcacagcctacatggagctgagcagcctgagatctgaggacacggccgtgtattactgtgcgagaggcccgtcgaagctatggaccaaatttgactactggggccagggaaccctggtcaccgtctcctcag

SEQ ID NO: 809 - DNA, 367 bp, Homo sapiens
  source 1..367: mol_type = other DNA
caggtgcagctggtggagtctgggggaggcgtggtccagcctgggaggtccctgagactctcctgtgcagcctctggattcaccttcagcagctatggtatgcactgggtccgccaggctccaggcaaggggctggagtgggtggcagttatatcagatgatggaggtgataaatactactcagactccgtgaagggccgattcaccatctccagagacaatgccaagaacacgctgtatctgcaaatgaacagcctgagagctgaggacacggctgtatattactgtgcgagagatcgaaggaattacgatattttgactggttacttgtactggggccagggaaccctggtcaccgtctcctcag

SEQ ID NO: 810 - DNA, 356 bp, Homo sapiens
  source 1..356: mol_type = other DNA
caggtgcagctggtgcagtctggggctgaggtgaagaagcctgggtcctcggtgaaggtctcctgcaaggcttctggaggcaccttcagtagctatgtcatcagctgggtgcgacaggcccctggacaagggcttgagtggatgggagggatcatccctgtctttggaacagcaatctacgcacagaagttccagggcagagtcacgattaccgcggacaaatccacgagcacagcctacgtggagctgagcagtctgagatctgaggacacggccgtgtatttctgtgcgaggttcgactatggtggtgacggaggggactcctggggccaggggaccctggtcaccgtctcctc

SEQ ID NO: 811 - DNA, 368 bp, Homo sapiens
  source 1..368: mol_type = other DNA
caggtgcagctggtgcagtctggggctgaggtgaagacgcctgggtcctcggtgaaggtctcctgcaaggcctctggaagcaccttcaacagttacgctatcagctgggtgcgacaggcccctagacaagggcttgagtggatgggaggaatcatccctatatttgcaacagcaaagtatgcacagaagtaccagggcagagtcacaattaccgcggacgcatccacgagcacaggttacatggagctgagcggcctgagacctgaggacacggccatatattactgtgcgaatgttgagggatattgtactaatgacaattgctattttcggaactggggccagggaaccctggtcatcgtctcctc

SEQ ID NO: 812 - DNA, 387 bp, Homo sapiens
  source 1..387: mol_type = other DNA
gaggtgcagctggtggagtctgggggaggcttggtacagcctggagggtccctgagactctcctgtgcagcctctggattcaccttcagtagttatgaaatgaactgggtccgccaggctccagggaaggggctggagtgggtttcatacattagtagtagtggtagtaccatatactacgcagactctgtgaagggccgattcaccatctccagagacaacgccaagaactcactgtatctgcaaatgaacagcctgagagccgaggacacggctgtttattactgtgcgagagaaaccggtcattgtagtggtggtagctgctacgactactactactacggtatggacgtctggggccaagggaccacggtcaccgtctcctca

SEQ ID NO: 813 - DNA, 358 bp, Homo sapiens
  source 1..358: mol_type = other DNA
caggtgcagttggtgcagtctgagtctgaggtgaagaggcctgggtcctcggtgaaggtctcctgcaaggcttctggagacaccttcaacacttatgttgtcaactgggtgcgacaggcccctggacaagggcttgagtggatgggacagatcatccctttctttggtacaacaaacaccgcacagaggttccgcggcagagtcacgattaccgcggacgggtccgcgaacacagtctacatggagttgaccagactgagttctgacgacacggccgtgtattactgtgcgagagacgggggcttagagggtcattttgatatctggggccaagggacaatggtcaccgtctcctcag

SEQ ID NO: 814 - DNA, 361 bp, Homo sapiens
  source 1..361: mol_type = other DNA
gaggtgcaactggtggagtctgggggaggcttggtccagcctggggggtccctgggactctcctgtgcagtctctggattcacctttagtacctattggatgaactgggtccgccaggctccagggaaggggctggagtgggtggccagcataaagcaagatggaagtgagacaaactatgtggactctgtgaagggccgattcaccatctccagagacaacgccaagaactcactgtctctgcaaatgatcagcctgagagccgacgacacggctgtgtattactgtgcgagaggccccaacactgcctacagtcattttgactcctggggccagggaaccctggtcaccgtctcctcag

SEQ ID NO: 815 - DNA, 385 bp, Homo sapiens
  source 1..385: mol_type = other DNA
caggtgcagctgcaggagtcgggcccaggactggtgaagccttcggagaccctgtccctcacctgcgctgtctctggttactccatcagcagtggttactactggggctggatccggcagcccccagggaaggggctggagtggattgggagtatctatcatagtgggagcacctactacaacccgtccctcaagagtcgagtcaccatatcagtagacacgtccaagaaccagttctccctgaagctgagctctgtgaccgccgcagacacggccgtgtattactgtgcgagccctccacttagacggctagcatattgtggtggtgactgctattcctactttgactactggggccagggaaccctggtcaccgtctcctcag

SEQ ID NO: 816 - DNA, 393 bp, Homo sapiens
  source 1..393: mol_type = other DNA
caggtgcagctggtgcagtctggggctgaagtgaagaagcctggggcctcagtgaaggtttcctgcaaggcatctggatacaccttcagcagctactatataaactgggtgcggcaggcccctggacaagggcttgagtggatgggagtaatcaagcctagtggtgatagcacaaccgactcacagaggttccagggcagagtcaccttgaccagggacacgtccacgaacacagtctacatggaactgagcagcctgagatctgaggacacggccgtttattactgtgcgggtaggggttacgatgttttgactggttattttcccaataaaccgtactcctactacggtctggacgtctggggccaagggacctcggtcaccgtctcctca

SEQ ID NO: 817 - DNA, 367 bp, Homo sapiens
  source 1..367: mol_type = other DNA
gaagtgcatctggtggagtctgggggaggcttggtacagcctggcgggtccctgagactctcctgtgcagcctctggattcacctttgatgattatgccatgcactgggtccggcaagctccagggaagggcctggagtgggtctcaagtattaattggaatactattagcataggctatgcggactctgtgaagggccgattcaccatctccagagacaacgccaagaactccctgtatctgcaaatgaacagtctgagagctgaggacacggccttgtattattgtgtaaaagatatctctgtagtagtacccactggtgcttttgatatctggggccaagggacaatggtcaccgtctcttcag

SEQ ID NO: 818 - DNA, 367 bp, Homo sapiens
  source 1..367: mol_type = other DNA
caggtgcagctgcaggagtcgggcccaggactggtgaagccttcggagaccctgtccctcacctgcgctgtctctggttactccatcagcagtggttactactggggctggatccggcagcccccagggaaggggctggagtggattgggagtatctatcatagtgggagcacctactacaacccgtccctcaagagtcgagtcaccatatcagtagacacgtccaagaaccagttctccctgaagctgagctctgtgaccgccgcagacacggccgtgtattactgtgcgagaggggacggagggattacgccaatcttgtactttgactactggggccagggaaccctggtcaccgtctcctcag

SEQ ID NO: 819 - DNA, 373 bp, Homo sapiens
  source 1..373: mol_type = other DNA
gaggtgcaggtggtggagtctgggggaggcttggtccagcctggggggtccctgagactctcctgtgcagcctctggattcagttttagcacctattggatgagttgggtccgccaggctccagggaaggggctggagtgggtggccagcataaaagaggatggaagtgagaaaaattatgtggactctgtgaagggccgattcaccatctccagagaaaacgccaagaattcagtttatctgcaagtgagcagcctgagagccgaagacacggctgtctattactgtgggagactacatcaggacgaaggtgtcactggttaccgcgccattgagtcctggggccagggaactctggtcaccgtctcctcag

SEQ ID NO: 820 - DNA, 361 bp, Homo sapiens
  source 1..361: mol_type = other DNA
caggtgcagctggtgcagtctggggctgaggtgaagaagcctggggcctcagtgaaggtctcctgcaaggcttctggatacaccttcaccggctactatatgcactgggtgcgacaggcccctggacaagggcttgagtggatgggatggatcaaccctaacagtggtggcacaaactatgcacagaagtttcagggcagggtcaccatgaccagggacacgtccatcagcacagcctacatggagctgagcaggctgagatctgacgacacggccgtgtattactgtgcgacggctttggatagtagtggttattacccccggtactggggccagggaaccctggtcaccgtctcctcag

SEQ ID NO: 821 - DNA, 370 bp, Homo sapiens
  source 1..370: mol_type = other DNA
gaggtgcaacttgtggagtctgggggaggcttggtacggccgggggggtccctgagactctcttgcgcagcctctggattcacggttggcacttttggcctaacttgggtccgccaggctccagggaaggggctggagtgggtctcaggtttcagtggtaatggtaatagtgcatactacgcagactccgtgaagggccggttcaccatctccagagacacttccaagaatacattatatctccaaatgaacagcctgagagtcgacgactcggccgtctattattgtgcgaaggataggcagcgtaccattccaggagctgggtcttttgactcctggggccagggaaccctggtcatcgtctcctcag

SEQ ID NO: 822 - DNA, 375 bp, Homo sapiens
  source 1..375: mol_type = other DNA
gaggtgcagctggtggagtctgggggaggcttggtccagcctggggggtccctgagactctcctgtgcagcctctggattcacctttagtagctattggatgagttgggtccgccaggctccagggaaggggctggagtgggtggccaacataaagcaagatggaagtgagaaatactttgtggactctgtgaagggccgattcaccatctccagagacaacgccaagaactcactgtatctgcaaatgaacaacctgagagccgaggacacggctgtctattactgtgcgagagtccattgtagtagtaccagctgctactactactactatatggacgtctggggcaaagggaccacggtcaccgtctcctca

SEQ ID NO: 823 - DNA, 373 bp, Homo sapiens
  source 1..373: mol_type = other DNA
caggtgcagctggtggagtctgggggaggcgtggtccagcctggggggtccctgagactctcctgtgcagcctctggattcaccttcagtagctatgctatgaactgggtccgccaggttccaggcaaggggctagagtgggtggcagttatatcaaatgatggaggtgataaatactacgcagactccgtgaagggccgattcaccatctccagagacaattccaagaacacgctgtatctacaaatgaacagcctgagaagtgaggacgcggctgtgtatttctgtgcgagagattggaataattacgatattttcactggtctctactttgactcctggggccagggaaccctggtcaccgtctcctcag

SEQ ID NO: 824 - DNA, 364 bp, Homo sapiens
  source 1..364: mol_type = other DNA
caggtgcagctgcaggagtcgggcccaggactggtgaagccttcggagaccctgtccctcacctgcactgtcactggtgactccatcagtagttcttattggagttggatccggcagccccccgggaagggcctggaatcgattggctatatcttttacactgggcgcaccaattacaacccctccctcaggagtcgagtcaccatttcagtagacacgtccaataacctgttctccctgacgctgaggtccgtgaccgctgcggacacggccatgtattactgtgcgagagatgcgaccggtataactgaaaaaaatgcttttgatgtttggggccgagggacaatggtcaccgtctcttcag

SEQ ID NO: 825 - DNA, 340 bp, Homo sapiens
  source 1..340: mol_type = other DNA
caggttcagctggtgcagtctggagctgaggtgaagaagcctggggcctcagtgaaggtctcctgcaaggcttctggttacacctttaccagctatggtatcagctgggtgcgacaggcccctggacaagggcttgagtggatgggatggatcagcgcttacaatggtaacacaaactatgcacagaagctccagggcagagtcaccatgaccacagacacatccacgagcacagcctacatggagctgaggagcctgagatctgacgacacggccgtgtattactgtgcgagagatgaatactactggggccagggaaccctggtcaccgtctcctcag

SEQ ID NO: 826 - DNA, 360 bp, Homo sapiens
  source 1..360: mol_type = other DNA
gaagtgcagctggtggagtctgggggaggcttggtacagcctggcaggtccctgagactctcctgtgtagcctctggattcacctttcatgattatgccatacactgggtccggcaagctccagggaagggcctggagtgggtctcaggtattagttggaatagtattggtataggctatgcggactctgtgaagggccgattcaccatctccagagacaacgccaagaactccctatatctgcaaatgaacagtctgagacctgaggacacggccttatattactgtgcaaaagatatgtcattcgaatactacgctatggacgtctggggccaagggaccacggtcaccgtctcctca

SEQ ID NO: 827 - DNA, 361 bp, Homo sapiens
  source 1..361: mol_type = other DNA
caggtgcagctggtgcagtctggggctgaggtgaagaagcctgggtcctcggtgaaggtctcctgcaaggcttctggagtcattttcagtaactatgctatcagctgggtgcgacaggcccctggacaaggacttgagtggatgggagggatcatccctctctttggtacagcaaactacgcacagaagttccagggcagagtcacgattaccgcggacgagtccacgagcacagcctatatggagctgggcagcctgagatctgaggacacggccgtctattactgtgcgagagctcccaagatataccactggtacttcgatctctggggccttggcaccctggtcactgtctcctcag

SEQ ID NO: 828 - DNA, 364 bp, Homo sapiens
  source 1..364: mol_type = other DNA
caggtgcagctgcaggagtcgggcccaggactggtgaagccttcggagaccctgtccctcacctgcactgtctctggtggctccatcagtagtgactactggagctggatccgacagcccccagggaagggactggagtgcattggatacatctattacaatgggcgcaccaactacaacccctccctcaagagtcgagtcaccatatcagtagacacgtccaagaaccagttctccctgaagctgagctctgtgaccgctgcggacacggccgtgtattactgtgcgagagatgcgaccggtataactaaaaaaaatgcttttgatatctggggccaagggacaatggtcaccgtctcttcag

SEQ ID NO: 829 - DNA, 376 bp, Homo sapiens
  source 1..376: mol_type = other DNA
gaggtgcagctggtggagtctgggggaggcttggtccagcctggggggtccctgagactctcctgtgcagcctctggattcaccgtcagtagcaactacatgagctgggtccgccaggctccagggaaggggctggagtgggtctcagttatttatagcggtggtagcacatactacgcagactccgtgaagggccgattcaccatctccagagacaattccaagaacacgctgtatcttcaaatgaacagcctgagagctgaggacacggctgtgtattactgtgcgagaggaggtcggaaacgtgtggtggtagctgccgcggcatactactttgactactggggccagggaaccctggtcaccgtctcctcag

SEQ ID NO: 830 - DNA, 376 bp, Homo sapiens
  source 1..376: mol_type = other DNA
gaggtgcagctggtggagtctgggggaggcttggtccagcctggggggtccctgagactctcctgtgcagcctccggattcacatttgataattgttgcatgggctgggtccgccagactccaggtaagggcctcgagtgggtggccaacattaagaaagatggaactgaggaatactatgtggactctgtgaagggccgattcaccatctccagagacaatgccaagaactcactgtatctgcaaatgaatagcctgagagccgaggacacggctttgtattactgtgcgagaggactcccctgggatagtagtaacagttgctataggccgattgactactggggccagggaacgctggtcgccgtctcctcag

SEQ ID NO: 831 - DNA, 385 bp, Homo sapiens
  source 1..385: mol_type = other DNA
cagctgcagctggtggagtctgggggaggcgtggtccagcctgggaggtccctgagactctcctgtgtagcctctggattcactttcagtaaccatggcatgcactgggtccgccaggctcccggcaaggggctggagtgggtggcagttatatcatatgatggaaataatagatattatgcagaatccgcgaagggccgattcaccatctccagagacaattccaaagacacgctgtatctgcaaatgaacagcctgagagctgaggacacggctctttaccactgtgcgaaagaccgagtcacccgtctattacggtattttgactacataggggatgcttttgatatgtggggcccagggacaaaggtcaccgtctcttcag

SEQ ID NO: 832 - DNA, 382 bp, Homo sapiens
  source 1..382: mol_type = other DNA
caggtgcagctgcaggagtcgggcccaggactggtgaagccttcggagaccctgtccctcacctgcactgtctctggtgactccttcactagttattactggagctggatccggcagcccgccgggaagggactggagtggattgggcgtatctttgtcagtgggagcaccaactacaattcctccctcaagagtcgagtcaccatgtcagtagacacgtccaagtccaagaaccagttctccctgaagctgagctctgtgaccgccgcagacacggccgtctattactgtgcgagagagggttattatggttcggggaattattataagccttcctactttgactactggggccagggaaccctggtcaccgtctcctcag

SEQ ID NO: 833 - DNA, 361 bp, Homo sapiens
  source 1..361: mol_type = other DNA
caggtgcagttggtgcagtctggggctgaggtgaagaagcctggggcctcagtgaaggtctcctgcaagacttctggacacagcttcaccggctactttgtacactgggtgcgacaggcccctggacaagggcttgagtgggtgggatggatcaaccctgtcagtggtggcacgaactatgcacagaagtttgagggcagggtcaccatgaccagggacacgtccatcagcacagcctacatggagctgagcaggctgagatccgacgacacggccatttattactgtgcgactagtgggagctacgcggacaattggttcgacccctggggccagggaaccctggtcaccgtctcctcag

SEQ ID NO: 834 - DNA, 364 bp, Homo sapiens
  source 1..364: mol_type = other DNA
caggtgcagctggtggagtctgggggaggcgtggtccagcctggggggtccctgagactctcctgtgcagcgtctggattcaccttcagtagctatggcatgcactgggtccgccaggctccaggcaaggggctggagtgggtggcatttatacggtatgatggaagtaataaatactacgcagactccgtgaagggccgattcaccatctccagagacaattccaagaacacgctgtatctgcaaatgaacagcctgagagctgaggacacggctgtgtattactgtgcgaaagatctggggtattactatggttcggggagtctatactggggccagggaaccctggtcaccgtctcctcag

SEQ ID NO: 835 - DNA, 349 bp, Homo sapiens
  source 1..349: mol_type = other DNA
gaggtgcagctgatggagtctgggggaggcttggtacagcctgcagggtccttgagactctcctgtgcagcctctggattcaacttcagtagctatgaaatgaactgggtccgccaggctccagggaggaggctggaatgggtttcatacattagtggtggtggtgataccatgtactacgcagactctgtgaagggccgattcaccatctccagagacaacgccaagaactcactgtatctgcaaatgaacagccttagagccgacgacacggctgtttattactgtgcgagagatcaccccctttacgacttctggggccagggaaccctggtcaccgtctcctcag

SEQ ID NO: 836 - DNA, 373 bp, Homo sapiens
  source 1..373: mol_type = other DNA
caggtgcagctgcaggagtcgggcccaggactggtgaagccttcggagaccctgtccctcacctgcactgtctctgctggctccatcactggtgattactggagctggatccggcagcccgccgggaagggactggagtggattgggcgtatctttatcagtgggagcaccaactataacccctccctcaagagtcgagtcgccatgtcaatagactcgtccaagaaccagttctccctgaagctgagctctgtgaccgccgcggacacggccatctattactgtgcgagagatggttggaaatatagtaccaactggtacggatcctggttcgacccctggggccagggaaccctggtcaccgtctcctcag

SEQ ID NO: 837 - DNA, 376 bp, Homo sapiens
  source 1..376: mol_type = other DNA
gaggtgcagctggtggagtctgggggaggtgtggaacggcctggggggtccctgagactctcctgtgcagcctctggattcacctttgatgattatggcatgagctgggtccgccaagctccagggaaggggctggagtgggtctctggcattaattggaatggtggtagcacatattatgcagactctgtgaagggccgattcaccatctccagagacaacgccaagaactccctgtatctgcaaatgaacagtctgagagccgaggacacggccttgtattactgtgcgacagaggcggtttgtggtggtgactgccccccaggggtctggttcgacccctggggccagggaaccctggtcaccgtctcctcag

SEQ ID NO: 838 - DNA, 367 bp, Homo sapiens
  source 1..367: mol_type = other DNA
gaagtgcagctggtggaatctgggggaggcttggtgcagcctggcaggtccctgagactctcctgtgcagcctctggattcacctttgatgattatgccatgcactgggtccggcaagttccagggaagggcctggagtgggtctcaggtattagttggaatagtggtggcataggctatgctgactctgtgaagggccgattcaccatctccagagacaacgccaagaactccctgtttctgcaaatgaacagtctgagatctgaggacacggccttgtattactgtgcaaaagatatatcattcaccgccgaggacacctattttgactactggggccagggaaccctggtcaccgtctcctcag

SEQ ID NO: 839 - DNA, 352 bp, Homo sapiens
  source 1..352: mol_type = other DNA
cagctgcagctgcaggagtccggctcaggactggtgaagccttcacagactctgtccctcacctgcgccgtctctggtggctccatcagcattggtggttactccgggagctggattcggcagccaccagggaagggcctggagtggattgggtacatctctcatagtgggatcacctactacaacccgtcgctcaagagtcgagtcaccatgtcagtagacacgtctgagaaccacttctccctgaagctgagatctgtgactgccgcggacacggccgtgtatttttgtgccagaggggatacaactatggcagactggggccagggaaccctggtcaccgtctcctcag

SEQ ID NO: 840 - DNA, 375 bp, Homo sapiens
  source 1..375: mol_type = other DNA
caggttcagctggtgcagtctggagctgaggtgaagaagcctggggcctcagtgaaggtctcctgcaaggcttctggttacacctttaccagctatggtatcagctgggtgcgacaggcccctggacaagggcttgagtggatgggatggatcagcgcttacaatggtaacacaaactatgcacagaagctccagggcagagtcaccatgaccacagacacatccacgagcacagcctacatggagctgaggagcctgagatctgacgacacggccgtgtattactgtgcgagagagtggttttactatggttcggggagtaagtcttacggtatggacgtctggggccaagggaccacggtcaccgtctcctca

SEQ ID NO: 841 - DNA, 384 bp, Homo sapiens
  source 1..384: mol_type = other DNA
caggtgcagctgcaggagtcgggcccaggactggtgaagccttcggagaccatgtccctcacctgcgctgtctctggttaccccatcagcagtggttacttttgggtctggatccggcagtccccagggaaggggctggagtggattgggaacattgatcatagtgggaacacgtatcacaacccgtccctcaagagtcgagtcgccatttcagtagacacgtccaagaaccagttctccctgaagctgagttctgtgaccgccgcagacacggccgtctattactgtgcgagagaggaaaatagtggctacaatcccgaccattactactactacttcggtatggacgtctggggccgagggaccacggtcaccgtctcatca

SEQ ID NO: 842 - DNA, 373 bp, Homo sapiens
  source 1..373: mol_type = other DNA
caggttcagctggtgcagtctggagctgaggtgaagaagcctggggcctcagtgaaggtctcctgcaaggcttctggttacacctttaccagctatggtatcagctgggtgcgacaggcccctggacaagggcttgagtggatgggatggatcagcgcttacaatggtaacacaaactatgcacagaagctccagggcagagtcaccatgaccacagacacatccacgagcacagcctacatggagctgaggagcctgagatctgacgacacggccgtgtattactgtgcgagagacccatgtgggagtggtggtgattgctattatcaatttgactactggggccagggaaccctggtcaccgtctcctcag

SEQ ID NO: 843 - DNA, 379 bp, Homo sapiens
  source 1..379: mol_type = other DNA
gaggtgcagctggtggagtctgggggaggcttcgtacagccaggccggtccctgagactctcctgtacaacttctggattcacctttagtgattatggtctgagttgggtccgccagactccagataaggggctgcagtgggtaggtttcattagaagcaaagcttatggtgggacaacggagtacgccgcgtctgtgaacggcagattcaccatctcaagagatgattccaaagccatcgcctatctggaattgaacagcctgaaaatcgaggattcagccgtctattattgcactagagatcccattttgatcctccgggggggagttatcggccatgactactggggccatggaacgctggtcaccgtctcctcag

SEQ ID NO: 844 - DNA, 361 bp, Homo sapiens
  source 1..361: mol_type = other DNA
caggtgcagctggtggagtctgggggcggcgtggtccagcctggggggtccctgagactctcatgtgcgtcctctagatccacctttaatagtgatgttatgcactgggtccgccaggctccaggcaaggggctggagtgggtggcggctatgtcatttgatggatacagtaaatatcacgcagactccgtaaagggccgatccaccgtctccagagacagttcccagaaaacattttatctgcaaatcgatagcctgagagaagaggacacggctgtctactactgtgcgagagagggatataccagtagtcggtgcggggcttttgacatctggggccaagggacaatggtcaccgtct

SEQ ID NO: 845 - DNA, 372 bp, Homo sapiens
  source 1..372: mol_type = other DNA
caggtccagctggtacagtctggggctgaggtgaagaagcctggggcctcagtgaaggtctcctgcaaggtttccggatacaccctcactgaattatccatgcactgggtgcgacaggctcctggaaaagggcttgagtggatgggaggttttgatcctgaagatggtgaaacaatctacgcacagaagttccagggcagagtcaccatgaccgaggacacatctacagacacagcctacatggagctgagcagcctgagatctgaggacacggccgtgtattactgtgcaacagggacggacgagtgggagcgacggaactactactacatggacgtctggggcaaagggaccacggtcaccgtctcctca

SEQ ID NO: 846 - DNA, 352 bp, Homo sapiens
  source 1..352: mol_type = other DNA
gaggtgcacctggtggagtctgggggaggcttggtacagcccggagggtccctgagactctcctgtgcagcctctggattcaccttcagtcgttatgaaatgaactgggtccgccaggctccagggaaggggctggagtgggtttcatacattagtagtagtggttttaccatatactacgcagactctgtgaagggccgattcaccatctccagagacaacgccaagaactcactgtctctgcaaatgaacaccctgagagtcgaggacacggctgtttattactgtgcgagtggaatcatggctgctttcgaccactggggccagggaaccctggtcaccgtctcctcag

SEQ ID NO: 847 - DNA, 367 bp, Homo sapiens
  source 1..367: mol_type = other DNA
caggtgcagctacagcagtggggcgcaggactgttgaagccttcggagaccctgtccctcacctgcgctgtctatggtgggtccttcagtggttactactggagctggatccgccagcccccagggaaggggctggagtggattggggaaatcaatcatagtggaagcaccaactacaacccgtccctcaagagtcgagtcaccatatcagtagacacgtccaagaaccagttctccctgaagctgagctctgtgaccgccgcggacacggctgtgtattactgtgcgagagcctgggtggcctatggttcggggtactggtacttcgatctctggggccgtggcaccctggtcactgtctcctcag

SEQ ID NO: 848 - DNA, 364 bp, Homo sapiens
  source 1..364: mol_type = other DNA
gaggtgcagctggtggagtctgggggaggtgtggtacggcctggggggtccctgagactctcctgtgcagcctctggattcatctttgatgactatggcatgagctgggtccgccaagctccagggaaggggctggagtgggtctctggtattaattggaatggaaataacataggttatgtcgactctgtgaggggccgattcaccatctccagagacaccgccacgaactccgtgtatctgcaaatgaacagtctgagagccgaggacacggccttctattactgtgcgagagatcctagtggctggtacattaattaccttgacttctggggccagggaaccctggtcaccgtctcctcag

SEQ ID NO: 849 - DNA, 370 bp, Homo sapiens
  source 1..370: mol_type = other DNA
caggtgcagctggtgcagtctggggctgaggtgaagaagcctgggtcctcggtgaaggtctcctgcaaggcttctggagccatcttcagaagctttgctatcagctgggtgcgacaggcccctggacaagggcttgagtggatgggagggatcatccctatctttggtacagcaaactacgcacagaagttccaggacagagtcacgattaccgcggacgaatccacgagcacagcctacatggaactgagcagcctgagatctgaggacacggccgtgtattactgtgcgagagattcgccgaattactatggatcgaacaactggttcgacccctggggccagggaaccctggtcaccgtctcctcag

SEQ ID NO: 850 - DNA, 376 bp, Homo sapiens
  source 1..376: mol_type = other DNA
caggtccagctggtgcaatctggggctgaggtgaagaagcctgggtcctcggtgaaggtctcctgcaaggcttctggaggcaccttcagcagctatactatcagctgggtgcgacaggcccctggacaagggcttgagtggatgggaaggatcatccctatccttggtatagcaaactacgcacagaagttccagggcagagtcacgattaccgcggacaaatccacgagcacagcctacatggagctgagcagcctgagatctgaggacacggccgtgtattactgtgcgagagatcctgaggcatattgtggtggtgactgctccgatgcttttgatatctggggccaagggacaatggtcaccgtctcttcag

SEQ ID NO: 851 - DNA, 379 bp, Homo sapiens
  source 1..379: mol_type = other DNA
caggtgcagctggtgcagtctggggctgaggtggagaagcctgggtcctcggtgaaggtctcctgcaaggcttctggaggcaccttcagcagctatgctatcagctgggtgcgacaggcccctggacaagggcttgagtggatgggagggatcatccctctctttgctacatcaaactacgcacagaagtttcagggcagagtcacgattaccgcggacgaatccacgagcacagcctacatggagctgagcagcctgagatctgaggacacggccgtgtattactgtgcaatcggggggattgtattggtaccagcttttacgacaagcgggggccttgactcctggggccagggaaccctggtcaccgtctcctcag

SEQ ID NO: 852 - DNA, 364 bp, Homo sapiens
  source 1..364: mol_type = other DNA
gaggtgcagctgttggagtctgggggaggcttggtacagcctggggggtccctgagactctcctgtgcagcctctggattcacctttagcagctatgccatgagctgggtccgccaggctccagggaaggggctggagtgggtctcagctattagtggtagtggtggtagcacatactacgcagactccgtgaagggccggttcaccatctccagagacaattccaagaacacgctgtatctgcaaatgaacagcctgagagccgaggacacggccgtatattactgtgcgaaagccgagggacctatggttcggtccgccaatagctactggggccagggaaccctggtcaccgtctcctcag

SEQ ID NO: 853 - DNA, 388 bp, Homo sapiens
  source 1..388: mol_type = other DNA
caggtgcagctggtggagtctgggggaggcgtggtccagccgggggggtccctgagactctcctgtgaagtgcctggattcaccttcagtgtctatggcatgcattgggtccgccaggctccaggcaaggggctggagtgggtgtcatttatactttatgatggaagtaatgaacactacgcggactccgtgaagggccgattcaccatctccagggacacttccaggaacacactctatctacaaatgaacagcctgagacctgaggacacggctgtatattactgtgcgagaccccttcgtactgggacctcatccaatacccagcgtggcctttatgatggttttaatttgtggggccaagggacaatggtcaccgtctcctcag

SEQ ID NO: 854 - DNA, 361 bp, Homo sapiens
  source 1..361: mol_type = other DNA
caggtccagctggtgcagtctggggctgaggtgaagaagcctgggtcctcggtgaaggtctcctgcaagacttctggaggcaccttcagcagctatagtatcagctgggtgcgacaggcccctggacaagggcttgagtggatgggagggatcatcggtatgtttggtataacaaactacgcacagaaattccagggcagagtcaccattaccgcggacgaattaacgagcacagcctacatggacctgagcagcctgagatctgaggacacggccgtgtattactgtgcgaggggtggaggttattaccccaactactttgaccactggggccagggaaccctggtcaccgtctcctcag

SEQ ID NO: 855 - DNA, 373 bp, Homo sapiens
  source 1..373: mol_type = other DNA
caggtgaagctggtgcagtctggggctgagatgaagaagcctggggcctcagtgaaggtctcctgcaaggcttctggatacaccttcaccgactatgatatcaactgggtgcgacaggcctctggacaggggcttgagtggatgggatggatgaaccctaacagtggtaacagaggctatgcacggaagttccagggcagagtcaccatgaccagggacacctccataagcacagcctacatggagctgagcagcctgagatctgaggacgcggccgtgtattactgtgcgagaggccctacttactatgaacatagtgattatttcccaggggactcctggggccagggaaccctggtcaccgtcccctcag

SEQ ID NO: 856 - DNA, 364 bp, Homo sapiens
  source 1..364: mol_type = other DNA
caggtgcagctggtggagtctgggggaggcgtggtccagcctggggaggccctgagactctcctgtgcagcctctggatacagcttcagtggtcacgctatacactgggtccgccaggctccaggcaaggggctggagtgggtggcaattatatcgaatgatggaaatagaaaatactacgcagactccgtgaagggacgattcaccgtctccagagacaattcccagaacacggtgtatctgcaaatgagcagcctgggaggtgaggacacggctctgtattattgtgcgagagacgcgatgagtgggaaccactcagatttcgactactggggccagggaaccctggtcaccgtctcctcag

SEQ ID NO: 857 - DNA, 361 bp, Homo sapiens
  source 1..361: mol_type = other DNA
gaggtccaactggtggagtccgggggagacttagttcagcctggggggtccctgagactctcctgtgcagcctctggattggccttcagttcctactggatgcactgggtccgccaggctccagggaagggcctggtgtgggtctcacgtatcagtcctgatggcaggactacaaactacgcggactccgtgaagggccgagtcaccatctccagagacaacgccaagaacacgctgtttctgcaaatgaccagtctgagagccgaagacacggctctttactactgtataagtgcctatggtcgaaactatgggaggttcgacccctggggccaaggaaccctggtcaccgtctcctcag

SEQ ID NO: 858 - DNA, 367 bp, Homo sapiens
  source 1..367: mol_type = other DNA
gaggtgcagctggtggagtctgggggaggtgtggtacggcctggggggtccctgagactctcctgtgcagcctctggattcacctttgatgattatgacatgaactgggtccgccaagctccagggaaggggctggagtgggtctctggtattaattggaatgatgataacacagattattcagactctgtgaagggccgattcaccatctccagagacaaccccaagaactccctgtatctgcaaatgaacagtctgagagccgaggacacggccttgtattactgtgcgagagtttgggagacggaagcctacaggcgtccctttgactactggggccagggaaccctggtcaccgtctcctcag

SEQ ID NO: 859 - DNA, 360 bp, Homo sapiens
  source 1..360: mol_type = other DNA
caggtcctgctggtgcagtctggggctgaactgaagaagcctgggtcctcggtgaaggtctcctgtaagacttctggaggcaccttcaatagtcatgcaatcagctgggtgcgacaggcccctggacaggggcttgaatggatgggaggcatcaccggtatgtttcgtacaacatactatgtgcagaagttccaaggcagagtcacgatcaccgcggacgaattcatgactacagtctatctggaactgaacagcctgacatctgaagacacggccatatattactgtgcgagaggtcagacctactatttctcccacatggacgtctggggcgaagggaccacggtcaccgtctcctca

SEQ ID NO: 860 - DNA, 365 bp, Homo sapiens
  source 1..365: mol_type = other DNA
caggtccagctggtgcagtctggggctgaggtgaagaagcctgggtcctcagtgagggtctcctgcaaggcttctggagacaccttcagtaggggtgctatcagctggatgcgccaggcccctggacaacgtcttgagtgggtgggaggaaccatccctgtccttggaatagtcaattacgcacagaaattccagggcaaagtcgcgattaccgcggacaaatccacgaatacggcctacttggaggtgagcagcctgcgatctgacgacgcggccatctattactgtgcgacaggcggcgctggctggggaacaaaaaactactttcactcctggggccagggaaccctggtcaccgtatcctc

SEQ ID NO: 861 - DNA, 355 bp, Homo sapiens
  source 1..355: mol_type = other DNA
gaggtccaactggtggagtccgggggagacttagttcagcctggggggtccctgagactctcctgtgcagcctctggattcaccctcagaagttacaacatgaactgggtccgtcaggctccagggaagggactggagtggatttcatatattagtagcagtagtagcaccatgtactacgcagactctgtgaagggccgattcaccatctccagggacaacgccaagaactcactctatctacagatgaacagcctgagagccgaggacacggctgtgtattactgtgcgagagatgatagtagtgggggcttccagtcctggggcccgggcaccctggtcaccgtctcctcag

SEQ ID NO: 862 - DNA, 373 bp, Homo sapiens
  source 1..373: mol_type = other DNA
caggtgcaactgcaggagtcgggcccaggactgctgaagccttcggagaccctgtccctcacctgcactgtctctggtggctccgtcagcagtggtaattactactggagctggatccggcagcccccagggaagggactggagtggcttgggtatatctattacggtgggagcaccgactacaacccctccctcaagagtcgagtcaccatatcagtagacacgtccaagaaccagttctccctgaagctgagctctgtgaccgccgcggacacggccgtgtattattgtgcgagaagttcccccaacgatattttgactggttattatcttgactactggggccagggaaccctggtcaccgtctcctcag

SEQ ID NO: 863 - DNA, 378 bp, Homo sapiens
  source 1..378: mol_type = other DNA
caggtgcaactggtgcagtctgggcctgaggtgaagaagcctggggcctcagtgaaggtctcctgcaaggcatctggatacaccttcaacagcaacaacatatattgggtgcgacaggcccctggacaagggcttgagtggatgggaatagtcaaccctcctggtggtaccacaatctacgcacagaagttccagggcagagtcaccatgaccagggacacgtccacgagcacagtctacatggagctgagcagcctgagatctgaagacacggccgtatattactgcgcaagggcttctgttagggcgtcagtccgccaggataaaggaggttacatggacgtctgggggaaagggaccacggtcaccgtctcttca

SEQ ID NO: 864 - DNA, 382 bp, Homo sapiens
  source 1..382: mol_type = other DNA
gaggtgcagttgttggagtctgggggaggcttggtacagcggggggggtccctgagactctcctgtgaagcctctggattcaccttcagcacctatgacatgagttgggtccgccaggctccagggaaggggctggagtgggtctcaactatcagtggtactgatggcagcacatactacgcagactccgtgaagggccggttcaccatctccagagacaattccaagaacacgctgtatgtgcaactgaacagcctgagagtcgaggacacggccgtatattactgtgcgaaacgttactttgataggactgtttaccccagggcgtcctcggactactttgactactggggccagggaaccctggtcaccgtctcctcag

SEQ ID NO: 865 - DNA, 352 bp, Homo sapiens
  source 1..352: mol_type = other DNA
gaggtgcagctggtggagtctgggggaggctcggtccagcctggggggtccctgacactctcctgtgtagcctctggatctaccttaagagactattggatggcctgggtccgccaggctccaggaaaggggctggagtgggtggccaacataaagggagatggaagtaagaagtattatgtggactctgtgaagggccgattcaccatctccagagacaacgccaagaactcactgtatctgcaaatgaatagcctgagagtcgaagacacggctgtatatcactgtgcgaatctttgggaggggatcgctacattctggggccagggaaccctggtcaccgtctcctcag

SEQ ID NO: 866 - DNA, 373 bp, Homo sapiens
  source 1..373: mol_type = other DNA
gaagtgctgctggtggagtctgggggaggcgtggtacagcctggggggtccctgagactctcctgtgcttcctctggattcacctttgatgattatgccatgcactgggtccgtcaagctccagggaagggtctggagtgggtctctcttattagtggggatggtggtagtacatactatgtagactctgtgaagggccgattcagcatctccagagacaacagcaaaaagtcactgtatctgcaaatgaacagtctgagaactgaggacaccgccttatattactgtgcaaaagacagtttgatgtttgacagtagcgcctattacgggattgactactggggccagggaaccctggtcaccgtctcctcag

SEQ ID NO: 867 - DNA, 382 bp, Homo sapiens
  source 1..382: mol_type = other DNA
cagatcaccttgaaggagtctggtcctacgctggtgaatcccacacagaccctcacgctgacctgcaccttttctggcttctcactcacctctactggagtgggtgtggcctggatccgtcagccccccggagaggccctggagtggcttggaatcatttattgggatgatgataagcgctatagggcatcgctggagaacaggctcaccatcactaaggacacctccaaaaacgaggtggtccttagaatgaccaccatggaccctgtggacacagccacctattattgtgcacacattgtgactgactttaggggagttgtccaccattacgatgcttttgatgtctggggccaagggacaacggtcaccgtctcttcag

SEQ ID NO: 868 - DNA, 355 bp, Homo sapiens
  source 1..355: mol_type = other DNA
gaggtgcagctggtgcagtctggagcagaggtgaaaaagcccggggagtctctgaaaatctcctgtaggggctctggatacgacttcaacagccactggatcggctgggtgcgccagacgcccgggaaaggtctggagtggatgggcatcatctaccctcgtgactctgaaaccacatatagcccgtccttccaaggccaggtcaccttctcagtcgacaagtccatcaacaccgcctacctgcagtggagcagcctgcaggcttcggacagtggcatgtattattgtgcgagacggagtacagtggccgctggggactactggggccagggaaccccggtcactgtctcctcag

SEQ ID NO: 869 - DNA, 370 bp, Homo sapiens
  source 1..370: mol_type = other DNA
caggtccagctggtgcagtctggggctgaggtgaagaagcctgggtcctcggtgagggtctcctgcaagacttctggaggcaccttcagcagctctggtatcagctgggtgcgacaggcccctggacaagggcttgagtggatgggagggatcatccctatgattgggacagcaaactacgcacagaagttccagggcagagtcaccattaccgcggacgcagccacgaccacgaccacagcctacatggagctgagcagcctgagatctgacgacacggccgtgtattactgtgcgagagatcagtattactatgatagtggaacttatgtagggtggggccagggaaccctggtcaccgtctcctcag

SEQ ID NO: 870 - DNA, 352 bp, Homo sapiens
  source 1..352: mol_type = other DNA
gaggtgcacctggtggagtctgggggaggcttggtccagccgggggggtccctgagactctcctgtgcagcctctggattcacatttagtaactattggatgagctgggtccgccaggctccagggaaggggctggagtgggtggccaacataaaaggagatggaagtgagagatactatgtggactctgtgaagggccgattcaccatctccagagacaacgcccagaactcaatgtatctgcagatgaacaacctgagagtcgaggacacggctgtgtattactgtgcgaatctttgggaggggatcggtagcttctggggccagggaaccctggtcaccgtctcctcag

SEQ ID NO: 871 - DNA, 375 bp, Homo sapiens
  source 1..375: mol_type = other DNA
caggtgcagctggtggagtctgggggaggcgtggtccagcctgggaggtccctgagactctcctgtgcagcctctggattcaccttcagtagctatgctatgcactgggtccgccaggctccaggcaaggggctggagtgggtggcagttatatcatatgatggaagtaataaatactacgcagactccgtgaagggccgattcaccatctccagagacaattccaagaacacgctgtatctgcaaatgaacagcctgagagctgaggacacggctgtgtattactgtgcgagagatcccccttaccagctgcacggggactactactactacatggacgtctggggcaaagggaccacggtcaccgtctcctca

SEQ ID NO: 872 - DNA, 360 bp, Homo sapiens
  source 1..360: mol_type = other DNA
caggtccagctggtgcagtctggggctgaggtgaagaagcctgggtcctcggtgaaggtctcctgccaggcttctggagtcaccttcagcagctatgctgtcagctgggtgcgtcaggccccgggacaagggcttgagtggatgggagggatcagccctatgtttcgcacagcaaactacgcacagaagttccagggcagagttacgattaccgcggacgaagctacgagcacagcctatatggaactgagcagcctgagatctgaggacacggccgtgtattactgtgcgagatgccgacactactattcctcctacatggtcgtctggggcaaagggaccacggtcaccgtctcctca

SEQ ID NO: 873 - DNA, 374 bp, Homo sapiens
  source 1..374: mol_type = other DNA
gaggagcagctgttggagtctgggggaggcttggtgcagccgggggggtccctgagactctcttgtgtagcctctggattcacctttagcagatatggcatgaagtgggtccgccaggctccggggaaggggctggaatgggtctcacatattagcggtagtggtcttagtcgatactacgccgactccgtgaagggccgattcaccatctccagagacaattccaagaacatgctttatctacaaatgaaccgcctgggagccgaggacacggccgtctattactgtacgaaagatcttgcatatgataatgtcatggcggtagctggagtaatcgcctcctggggccagggaatcctggtcgccgtctcctc

SEQ ID NO: 874 - DNA, 364 bp, Homo sapiens
  source 1..364: mol_type = other DNA
caggtccagctggagcagtctggggctcaggtgaagaggcctgggtcctcggtaaaggtgtcctgtaaggtttctggaggcatcttcaggagtaatgctattagttgggtgcgacaggccccgggacaaggccttgagtggatgggagggattctcgctatctttggtacaacaaaatatgcacagaaattccagggcagagtcaccataagcgcggacgagtccacgagtacggtctacatggaggtgagcagcctgagatctgatgacacggccatatattactgtgcgaagacccgttattaccaccttgagggtgcttttgataactggggccaagggacagaggtcatcgtctcttcag

SEQ ID NO: 875 - DNA, 379 bp, Homo sapiens
  source 1..379: mol_type = other DNA
gaggtgcaattggtggagtctgggggaggcttggtccagcctggggggtccctgagactctcctgtgcagcctctggattcaccttcagtaaccattggatgagttgggtccgccaggctccagggaaggggctggagtgggtggccaacataaacagagatggaagtgagacatactatgtggactctgtgaagggccgatttaccatctccagagacaacgccaaaaactctctgtatctgcaaatgaacagcctgaaagccggggacacggctctatattactgtgcgagagaggatggggagaggatggagaacaggttcacgagttggtactttgactactgggggcagggaagtttggtcaccgtctcctcag

SEQ ID NO: 876 - DNA, 367 bp, Homo sapiens
  source 1..367: mol_type = other DNA
gaggtgcagctgttggagtctgggggaggcttggtacagcctggggggtccctgagactctcctgtgcagtctctggactcagttttagcaactctgtcatgggctgggtccgccaggctccaggcaaggggctggaatgggtcgcaactattagtggtattgatggtgccacacactacgcagactctgcggagggccggttcaccatctccggagacacttccaagaacacactgttcctgcaaatgaacagtctgagacccgacgacacggccgtatattattgtgcgagagaaggacataccagtggccactgtggggcttttaatctctggggccaggggacattggtcgccgtctcttcag

SEQ ID NO: 877 - DNA, 384 bp, Homo sapiens
  source 1..384: mol_type = other DNA
caggtccagctggtgcagtctggggctgaggtgaagaagcctgggtcctcggtgaaggtctcctgtaaggcttctggaggcatcttcaacagctatactatcagctgggtgcgacaggcccctggacaagggcttgagtggatgggagggatcaaccccatctttcgaacaccaaactacgcacagaagttccagggcagagtcacgattaccgcggacgaatccacgaccacagcctacatggagctgagcagcctgagatctgaagacacggccgtctattactgtgcgagaggggaccccacgggaccagcaactcgtaaatactaccacttctactacatggacgtctggggcaaagggaccacggtcaccgtctcctca

SEQ ID NO: 878 - DNA, 373 bp, Homo sapiens
  source 1..373: mol_type = other DNA
caggtgcagctggtgcagtctgggactgaggtgaagaagcctggggcctcagtgaaggtctcctgcaaggcttctggatacaccttcaccggccactatatgcagtgggtgcgacaggcccctggacaagggcttgagtggatgggatggatcaaccctaacagtggtaccacaaactatgcacagaagtttcagggcagggtcaccttgaccagggacacgtccatcagcacagcctacatggagctgaactggctgacatctgacgacacggccgtgtattattgtgcgagagatcagatcgatttgagtggttattcctcgaactttttcgacccctggggccagggaaccctggtcaccgtctcctcag

SEQ ID NO: 879 - DNA, 370 bp, Homo sapiens
  source 1..370: mol_type = other DNA
caactgcagctgcaggagtcggccccaagactggtgaaaccttcggagactgtgtccctcacctgcactgtctctggcggctccatcagcagtagtaattactactggggctggatccgccagccccccgggaagggacttgaatggattgggagtgtatattatagagggaccacctattacggcccgtccttcgggggtcgagccaccatatccggagacacgtccaagaatcagttctccctgaacctgatctctgtcaccgccgcagacacggccatgtattactgtgcgagcagccatctggggaccgtggggatgggtgcttttaatatctggggccacgggacaatggtcaccgtctcttcag

SEQ ID NO: 880 - DNA, 345 bp, Homo sapiens
  source 1..345: mol_type = other DNA
gagcagcagctggtggaatctgggggagccttggtccagcctggggggtccctgagactctcctgtctggtctctggaatcaattttaataccttttggatgaactgggtccgccaggctccagggaagggcctggagtgggtggccaacattaaggcagatgggactgagaaattctatgcggactctgtgaagggccgattcaccatctccagagacaactccaggaggtcactatatctgcgtctggacaacctgagagccgaggactcggctacatattactgtgcgcctggacactacaatgggcagtggggccaggggaccctggtcaccgtctcctca

SEQ ID NO: 881 - DNA, 376 bp, Homo sapiens
  source 1..376: mol_type = other DNA
gaggagcagctgttggagtctgggggaggcttggtacagcctggggggtccctgagactctcctgtgcagcctctggattcacctttagcagatatgccatgaagtgggtccgccaggctccagggaaggggctggagtgggtctcagctattagtggtagtggtattagtacatactacgcagactccgtgaagggccggttcaccatctccagagacaattccaagaacacgctgtatctgcaaatgaacagcctgagagccgaggacacggccgtatattactgtgcgaaagatcttgaatttgataatgtaatggtggtagctgggctaataggctactggggccagggaatcctggtcaccgtctcctcag

SEQ ID NO: 882 - DNA, 390 bp, Homo sapiens
  source 1..390: mol_type = other DNA
caggtcaccttgaaggagtctggtcctgtgctggtgaaacccacagagaccctcacgctgacctgcaccgtctctgggttctcactcagcgctgcgagaatgggtgtaagctggatccgtcagcccccagggaaggccctggagtggcttgcacacattttttcgggtgacgaaaaatcctacagcacatctctaaagaggaggctcaccatctccaaggacacctccaaaagccaggtggtccttaccatgaccaacatggaccctctggacacagccacatatttctgtgcacggacattttggaattacgatttttcgagtgcttattatcatttccagtactacatggacgtctggggcaaagggaccacggtcatcgtctcttca

SEQ ID NO: 883 - DNA, 352 bp, Homo sapiens
  source 1..352: mol_type = other DNA
cagatgcagccgcaggagtcgggcccgggactggtgaagccttcggagaccctgtccctcacctgcacagtctctggtgaccccatcagtagtatcagatacttctgggcctggatccgccagcccccagggaagggactggaatggattgggagtatatattatggtgggaggacctactacaatccgtccctcaagagtcgagtcgccatatttgtggacaagtccaagaaccagttggccctgacgttgacttctgcgaccgccgcagacacggctgtctattactgtgcgcgagttgccggaatccaagggatctggggcccagggactctggtcagcgtctcttcag

SEQ ID NO: 884 - DNA, 373 bp, Homo sapiens
  source 1..373: mol_type = other DNA
caggttcagttggtgcagtccggaggtgaggtgaagaagcctggggcctcagtgacggtctcctgcaagacttctggttacacctttacctcctatggtgtcagctggctgcgacaggcccctggacaagggcttgagtggatgggatggatcagccctcaagatgttaacgcacagtatgcacagaagttccagggcagactcaccatgaccacagacacatccacgagcacagcccacatggaactcaggagcctgacatctgacgacacggccatgtattattgtgcgagagattgggggggaccttcagagggctacaatgtgattacagactactggggccagggatccctggtcaccgtctcctcag

SEQ ID NO: 885 - DNA, 364 bp, Homo sapiens
  source 1..364: mol_type = other DNA
gaggtgcagctgctggagtctgggggaggcttggtacagcctggggagtccctgagactctcctgtgcagcctctggattcaccttcagtagttataacatgaaatgggtccgccaggctccagggaaggggctggagtgggtttcatatattagtagtagtagtgctaccatttactacgcaggctctgtgaggggccgattcaccatctccagagacaacgccaagaactccctatatctgcaattgaatagcctgagagccgaggacacggctgtttattactgtgcgagagatttggtggggtgggacctagttaatcaagacaactggggccagggaaccctggtcaccgtctcctcag

SEQ ID NO: 886 - DNA, 373 bp, Homo sapiens
  source 1..373: mol_type = other DNA
caggtccaggtggagcagtctggggctgaggtgaagaagcctgggtcctcggtgaaggtctcatgtaaggcttccggaggcatcttcagaagtcatgccatcaactgggtgcgacaggcccctggacaaggccttgagtggatgggaggaatcatcgcagtcttcggcaccacacaatacgcacagaaattgcaaggcagagtcgcgattaccgcggacgaggccacgagcacggtgtatatggagctgagtaggctgacatcggacgacacggccgtctatttttgtgctagagggggaggataccatatttcgggggagaggggttttttggacgtctggggcagagggacaacggtcatcgtctcctcag

SEQ ID NO: 887 - DNA, 367 bp, Homo sapiens
  source 1..367: mol_type = other DNA
caggtccacctggtgcagtctggggctgaagtgaagaagcctgggtcctcggtgaaggtctcctgcaaggcttctggagtcaccttcagcggtaatgctatcagctgggtgcgacaggcccctggacaagggcttgagtgggtgggagggatcagccctatcttcggtacaacaaactacgcacagaagttccagggcagagtcacgattaccgcggacgcatccacgagcacagcctacatggagttgagcagcctgagatctgaggacacggccgtgtattactgtgcgagagcccaaaagtattactttgagagtagtggatatcctaactggggccagggaaccctggtcaccgtctcctcag

SEQ ID NO: 888 - DNA, 373 bp, Homo sapiens
  source 1..373: mol_type = other DNA
gaggtgcagctggtggagtctgggggaggcttggtacagcctggggggtccctgagactctcctgtgcagcctctggattcaccttcagtacctatggcatgaattgggtccgccaggctccagggaaggggctggagtgggtttcatacattcgcagtagtagtggtagtagtaatgacatatactacgcagactctgtgaagggccgattcaccatctccagagacaacgccaagaactcactgtatctgcaaatgaacagcctgagagccgaggacacggctgtgtattactgtgcgagagatctgtgggactacgagggggaagcagacgactactggggccagggaaccctggtcaccgtctcctcag

SEQ ID NO: 889 - DNA, 380 bp, Homo sapiens
  source 1..380: mol_type = other DNA
cagggtcagttggtgcagtctggagctgaggagaagaagcctggggcctcagtgaaggtctcctgcaaggcttctggttacatctttaccatctatggtctcagctgggtgcggcaggcccctggacaagggcttgagtggatgggatggatcagtagtcacaatggtgacatgagggttgcacagaaattccaggacagagtcaccatgaccacggacacatcgacgaacacagggtacatggagctgaggagcctgacatctgacgacacggccgtctattactgtgcgagagatataatgcctcgggaaattcgatcttactactcctattaccacatggacgtctggggcaaagggaccacggtcaccgtctcctc

SEQ ID NO: 890 - DNA, 364 bp, Homo sapiens
  source 1..364: mol_type = other DNA
gaggtgcagctggcggagtctgggggaggcttggtccagccgggggggtcgctgagactctcttgtgcagcgtcaggatttacgtttagtgactcttggatgagctgggtccgccaggctccagggaaggggctggagtggctgaccgacataaagaaagatggaagtgtgacatactctgtggagtctgtgaagggccgattcaccatctccagagacaacgccaagaatttattgtatctgcagatgaatagtttgagagccgaggacacggctgtgtattactgtgcgcgagatcagagtggtggcggctcctggtacttcgatctctggggccgaggcaccctggtcactgtctcctcag

SEQ ID NO: 891 - DNA, 367 bp, Homo sapiens
  source 1..367: mol_type = other DNA
gaggtgcagctgttggagtctgggggaggcttggtacagcctggggggtccctgagactctcctgtgcagtctctggattcagttttagcaactctgtcatgggctgggtccgccaggctccagggaaggggctggagtgggtctcaactattagtggttttgatggtgccacacattacgcagactccgtggagggccggttcaccatctccggagacagttccaagaacacagtgttactgcagatgaacaatctgagagccgaggacacggccgtatattactgtgcgagagaaggacatagtagtggccgctgtggggcttttgatatctggggccaagggacattggtcgtcgtctcttcag

SEQ ID NO: 892 - DNA, 361 bp, Homo sapiens
  source 1..361: mol_type = other DNA
gaagtgcagttggtggagtccgggggaggcctggtacaggctggcaggtccctgagactctcctgtgtagcctctgggttcaactttgatgattatgccattcaatgggtccgacaagttccagggaagggcctggagtgggtcgcaggtattagttggaacagtggtgccgtgggctatggggactctgttgagggccgagtcaccatctccagggacaacgccaaaaacaccgtgtatctgcaaatcaacagactgagaccagacgacacggccttctatcattgtggaagagccgaatatggttcgggtagttatggtgacttctggggccagggaaccctggtcaccgtctcctcag

SEQ ID NO: 893 - DNA, 355 bp, Homo sapiens
  source 1..355: mol_type = other DNA
gaggtgcagctggtggagtctgggggaggcttggtccagcctggggggtccctgagactctcctgtgcagcctctggattcaccgtcagtagcaactacatgagctgggtccgccaggctccagggaaggggctggagtgggtctcagttatttatagcggtggtagcacatactacgcagactccgtgaagggcagattcaccatctccagagacaattccaagaacacgctgtatcttcaaatgaacagcctgagagccgaggacacggctgtgtattactgtgcgagagaaggagcagctggtacttattttgactactggggccagggaaccctggtcaccgtctcctcag

SEQ ID NO: 894 - DNA, 352 bp, Homo sapiens
  source 1..352: mol_type = other DNA
gaggtgcagttggtggagtccgggggaggcttagttcagccgggggggtccctgagactctcctgtgcagcctctggattcagcttcagtagttcttggatgcaatgggtccgccaagttccagggaaggggctggtgtgggtctcacgtattaatagtgatgggagcagcacagactacgcggactccgtgaagggccgattcaccgtctccagagacaacgccaagaataccctgtatttgcaaatgaacagtctgagagacgaggacacggctgtctattattgtacgaaaactggggacttctattacgcttcctggggccagggagccctggtcaccgtctcctcag

SEQ ID NO: 895 - DNA, 378 bp, Homo sapiens
  source 1..378: mol_type = other DNA
caggtgcaactggtgcagtctggggctgaggtgaaggagcctggggcctcagtgaaggtttcctgcaaggcatctggatacgccttcaacagtaacaacatatattgggtgcgactggcccctggacaagggcttgagtggatgggaatagtcaaccctcctggtggtagcacaatctacgcacagaagttccagggcagggtcaccatgaccagggacacgtccacgagcacagtctacatggagctgagcagcctgagatctgaggacacggccgtatatttctgtgcaagggcctctagtagggcgtcagtccgacagggaaaaggaggctacatggacgtctgggggaaagggaccacggtcaccgtctcctca

SEQ ID NO: 896 - DNA, 375 bp, Homo sapiens
  source 1..375: mol_type = other DNA
caggtccagctggtgcagtcgggggctgagatgaagaagcctgggtcctcggtgagggtctcctgcaagacttctggaggaaccctcaggaactatggtgtcagctgggtgcgacaggcccctggacaaggtcttgagtggatgggagggatcaacccgatctttcgtacacccaattacgcacagaaattccagggcagagtcaccattactgcggacgaagccacgggagcaacctacatggacctgagaagtctgagatctgaggacacggccgtctactactgtgcgagagtcaatcaatggttaggggggggagtctactattactacatgaacgtctggggcaaagggacgacggtcaccgtctcctca

SEQ ID NO: 897 - DNA, 381 bp, Homo sapiens
  source 1..381: mol_type = other DNA
caggttcaggtggtgcagtctggacctgaggtgagggagcctggggcctcagtgaaggtctcctgcaagacttctggttacacctttaacatctatggtattacttgggtgcgacaggcccctggacaagggcttgagtggatgggatggatcaccgcttatgatggtaacacaaaatatgcacagaagtttcagggcagagtcaccatgaccacagatgcatccacgagcacagcctacatggaactgaggagcctcagatctgacgacacgggcgtctattattgtgcgagagataatatggcgcgggcaattcgatcttactactactcctaccacgtggacgtctggggcaaagggaccacggtcaccgtctcctca

SEQ ID NO: 898 - DNA, 364 bp, Homo sapiens
  source 1..364: mol_type = other DNA
caggtccagctggtgcagtctgcggctgaggtgaagaagcctgggtcctcggtgaaggtctcctgcaaggcttctggaggcaccttcagcagtgatgctatcagctgggtgcgacaggcccctggacaagggcttgagtggatgggaggggtcagccctatgtttggaacaacaaactacgcacagaagttccagggcagagtcacgattaccgcggaccaattccccagcacagcctacatggagctgagcagcctgacatctgaggacacggccgtgtattactgtgcgaggggaaggacctactacgaaaagggctactttgaatactggggccagggaaccctggtcaccgtctcctcag

SEQ ID NO: 899 - DNA, 343 bp, Homo sapiens
  source 1..343: mol_type = other DNA
cagctgcagctgcgggagtcgggcccaggactggtgaagccttcggagaccctgtccctcacctgcactgtctctggtggctccatcagcggtggtgattacttctgggcctggatccgccagcccccagggaaggggctggagtggattggcgatatcacttatagtgggaccacctactacaatccgttcctccagagtcgagccaccatatccgtagacacgtccaggagccagttctccctaaaactcaactctgtgaccgccgcagacacggctgtgtatttctgtgcgagactaagtggggattggggccagggaaccctggtcaccgtctcctcag

SEQ ID NO: 900 - DNA, 373 bp, Homo sapiens
  source 1..373: mol_type = other DNA
gaggtgcaattggtggagtctgggggacactcggtacagccgggggggtccctaagactctcctgtgaagcctctggattcacttttaatctttatagcatgatctgggtccgccaggctccaggaaaggggctggagtggctttcatacattggtgacactggtaggaagatttactacgcagactctgtggagggccgcttcaccgtctccagagacaacgccaggaatttagtttatctgcaaatgaacagcctgagagccgacgacacggccgtgtattactgtgcgagattcgcattttgccgtagcaccaactgccccgaatcttttgactactggggccagggaaccctggtcaccgtctcctcag

SEQ ID NO: 901 - DNA, 358 bp, Homo sapiens
  source 1..358: mol_type = other DNA
caggtgcagctacagcagtggggcgcaggactgttgaagccttcggagaccctgtccctcacctgcgctgtctatggtgggtccttcagtggttactactggagctggatccgccagcccccagggaaggggctggagtggattggggaaatcaatcatagtggaagcaccaactacaacccgtccctcaagagtcgagtcaccatatcagtagacacgtccaagaaccagttctccctgaagctgagctctgtgaccgccgcggacacggctgtgtattactgtgcgagagattatagcagtggctggtacggtattttctactggggccagggaaccctggtcaccgtctcctcag

SEQ ID NO: 902 - DNA, 373 bp, Homo sapiens
  source 1..373: mol_type = other DNA
gaggtgcagttggtggagtctgggggacgcttggtacagccgggggggtccctgagactctcctgtgaagcctctggattcagctttagtgattatagcatgaactgggtccgccaggctccaggaaaggggctggagtggctttcatatattggtgatactggtaggagaacctactacgcagactctgtgaagggccggttcatcagctccagagacaacgccaagaactccgtgtacctgcaaatgaacagtctgagagccggggacacggccgtctattactgtgcgagattcgctttttgtcgtagtaccaactgtcccgaatcctttgactactggggccagggaaccctggtcaccgtctcctcag

SEQ ID NO: 903 - DNA, 355 bp, Homo sapiens
  source 1..355: mol_type = other DNA
caagtccagctggtgcagtctggggctgaggtgaagaagcctgggtcctcggtgaaggtctcctgcaaggcttctggaggcaccttcagcagctatggtatcagctgggtgcgacaggcccctggacaagggcttgagtggatgggagggatcatccctatctttggtacagcaagctacgcacagaacttccagggcagactcacgattaccgcggacgaatccacgagcacaaccgatatggaactgagcagcctgagatttgaggacacggccgtgtattactgtgcgagagacgtagccgaaagctactttgactactggggccagggaaccctggtcaccgtctcctcag

SEQ ID NO: 904 - DNA, 375 bp, Homo sapiens
  source 1..375: mol_type = other DNA
caggtccagttggtgcaatctggggctgaggtgaagaagcctgggtcctcggtgaaggtctcctgcaaggcttctggaggcaccctcagcagttttggtatcagctgggtgcgacaggcccctggacaagggcttgagtggatgggaggaatcaaccctgtctttcggacaccaaactacgcacagaagttccagggcagagtcacgattaccgcggacgagtccacgagcacagcctacatggacctgagcagactgagatctgaggacacggccgtgtattactgtgcgagggtcagtgagtggttaggggggggggtctactactactacatggacgtctggggcaaagggacgacggtcaccgtctcctca

SEQ ID NO: 905 - DNA, 360 bp, Homo sapiens
  source 1..360: mol_type = other DNA
gagatgcagctgttggaatctgggggaggcttggtgcagcctggggggtccctgagactctcctgtgcagcctctggattcacctttaagaactatgccatgacctgggtccgccaggctccagggaaggggctggagtgggtctcaagtgttagtggtagtggtgatagcacatattacgcagactccgtgaagggccggttcaccatctccagaggcaattccaagaacacgctgtatctgcaaatgaacagcctgagagccgaggacacggccatatatttctgtgcgaaatcccgatattactactactactatatggacgtctggggcaaagggaccacggtcaccgtctcctca

SEQ ID NO: 906 - DNA, 360 bp, Homo sapiens
  source 1..360: mol_type = other DNA
caggtccagctggtgcagtctggggctgaggtgaagaagcctgggtcctcggtgaaggtctcctgcaaggcttctggaggcatcctcaataaatatgcaatcaattgggtgcgacaggcccctggacaagggcttgagtggatgggagggatcagcgctatctttggtacgacaaactacgcacagaagttccatggcagagtcaccattagcgccgacggatccacgacgacagtctacatggaactgagcagcctgagatctgacgacacggccttgtatttctgtgcgagaggacctcactactacaactcctacatggacgtctggggcacagggaccacggtcaccgtctcctca

SEQ ID NO: 907 - DNA, 370 bp, Homo sapiens
  source 1..370: mol_type = other DNA
gaggtggttctgttgcagtctgggggaggcttagttcagccggggcggtccctgagactctcttgtgcagcctcgggaatcagtgttagtaggattgcaatgagctgggtccgtcaggctccagggaagggcctggagtgggtctccagtttgagtgtcaccggtggcagcaaatattatgcagactccgttaagggccggttcaccatctccagagacacgtcgacgaacattgtgtctctgacaatgaatgacctgagagccgacgacacggccgtctattactgtgcgaaagatcttggatatcgtcctttcgattggggatactttgacagttggggccagggaaccctggtcaccgtctcctcag

SEQ ID NO: 908 - DNA, 382 bp, Homo sapiens
  source 1..382: mol_type = other DNA
gaggtgcacctggtggagtctgggggaggcttggtccagccgggggggtccctgagactctcctgtgcagcctctggattcacctttagtggttattggatgagctgggtccgccaggctccagggaaggggctggagtgggtggccagtataagtgaagatggagatgtcaaaaagtatgtggactctgtgaagggccgatttaccatctccagagacaacggcaaggactcactgtatctgcaaatgaacagcctgagagacgaggacacggctgtgtattattgttcgagagacgaaggggatagtgggagttacaacaccctttcctcagcatttgaagcggtctggggccagggatccctggtcaccgtctcctcag

SEQ ID NO: 909 - DNA, 373 bp, Homo sapiens
  source 1..373: mol_type = other DNA
gaggtgcagttggtggagtctgggggacacttggtacagccgggggggtccctgagactctcctgtgagggctctggattcacctttagtagttacagtatcaactgggtccgccaggctccaggaaaggggctggagtggctttcatacattggtgatactggtaggaccagttactacggagactctgtgaggggccggttcaccatctccagagacaacgccaagaactcagtttatctgcaaatgaacagcctgagagccgaggacacggccgtgtattattgtgcgagattcgcatattgtcgtagtaccaactgccccgaagcctttgactattggggccagggaaccctggtcaccgtctcctcag

SEQ ID NO: 910 - DNA, 364 bp, Homo sapiens
  source 1..364: mol_type = other DNA
caggtccagctggtgcagtctggggctgaggtgaagaagcctgggtcctcggtgaaggtctcctgcaaggcttctggaggcatcttcagaagccatgctatcagctgggtgcgacaggcccccggacaagggcttgagtggatgggagggatcttcgctatctttggcacaacaaactacgcacagaagttccagggcagagtcgcgatcaccgcggacgaatccacgaccactgtgttcatcgagctgagcagcctgagatctgacgacacggccatatattactgtgcgagatcccctacgtattattctgataatttctttgactactggggccagggaaccctggtcaccgtctcctcag

SEQ ID NO: 911 - DNA, 364 bp, Homo sapiens
  source 1..364: mol_type = other DNA
caggtccaactggtgcagtcagggcctgagatgaagaagcctgggtcctcggtgaaggtctcctgtaaggcttctggaggccccttcaatatgcatgccatcagttgggtgcgacagacccctggacaagggcttgaatggatgggtgggatcatccctttctctcgtaaaacaaactacgcgcggaagtttcagggcaaagtcacatttaccgcggacgaattgccgaccacgacgtacatggagctgagtaacctgagatctgaggacacggccgtgtatttttgtgcgaaggaccaatattatgatggttccggatactttgagtcctggggccagggaaccctggtcaccgtctccgcag

SEQ ID NO: 912 - DNA, 359 bp, Homo sapiens
  source 1..359: mol_type = other DNA
caggtccagctggtgcagtctggggctgaggtgaagaagcctgggtcctcggtgaaggtctcctgcaaggcttctggagccaccttcaacagttatggtatcaactgggtgcgacaggcccccggacaagggcttgaatggatgggcggaatcctcggtatgtttcgtacagcaaagtacgcacagagattccagggcagagtcaccatctccgcggacgagtacatgagtacaatttacttggaactgaacggtctgagatctgaagacacggccgtgtattattgtgcgagaggtcagacttactatctcaactacatggaagtctggggcaaagggacaccggtcaccgtctcctc

SEQ ID NO: 913 - DNA, 349 bp, Homo sapiens
  source 1..349: mol_type = other DNA
gaggtgcagttggtggagtccgggggaggcttagttcagcctggggggtccctgagactctcctgtgcagtctctggattcaccttcagtaactactggatacactgggtccgccaagctccaggggaggggctggtttgggtctcacgtattagtcctgatgggagtatcgcaacctacgcggactccgtgaagggccgattcaccatctccagagacaacgccaagaacatgttgtatttgcaaatgaacagtctgagaggcgaggacacggctgtgtattactgtgcaaaagatttcgaccgaggggacgactggggccagggaaccctcgtcaccgtctcctcag

SEQ ID NO: 914 - DNA, 378 bp, Homo sapiens
  source 1..378: mol_type = other DNA
gaggtgcagctggtgcagtctggagcagaggtgaaaaagcccggggagtctctgaagatctcctgtaagggttctggatacagctttaccagctactggatcggctgggtgcgccagatgcccgggaaaggcctggagtggatggggatcatctatcctggtgactctgataccagatacagcccgtccttccaaggccaggtcaccatctcagccgacaagtccatcagcaccgcctacctgcagtggagcagcctgaaggcctcggacaccgccatgtattactgtgcgagacatctagcagcagctggtactggaggctactactactactacatggacgtctggggcaaagggaccacggtcaccgtctcctca

SEQ ID NO: 915 - DNA, 361 bp, Homo sapiens
  source 1..361: mol_type = other DNA
gaggtgcagctgttggagtctgggggaggcttgctacagcctggggggtccctgagactctcctgtgtagcctctggattcacctttagcaactatgccatgagttgggtccgccaggctccagggaaggcgctggagtgggtctcagcaattcggtctggtggcgattacgcatatcacgcagactccgtgaagggccggttcaccatctccagagacaattccgagaacacgttgtatctgcaaatgaacagcctgagagccgacgacacggccgtgtattactgtgcgagagattggcgagatgatagtggtggtattgagtactggggccagggaacgctggtcaccgtctcctcag

SEQ ID NO: 916 - DNA, 370 bp, Homo sapiens
  source 1..370: mol_type = other DNA
caggtgcagctggtgcagtctggggctgaggtgaagaagcctggggcctcagtgaaggtctcctgcaaggcttctggatacaccttcaccggctactatatgcactgggtgcgacaggcccctggacaagggcttgagtggatgggatggatcaaccctaacagtggtggcacaaactatgcacagaagtttcagggcagggtcaccatgaccagggacacgtccatcagcacagcctacatggagctgagcaggctgagatctgacgacacggccgtgtattactgtgcgagagaggctgggatagtagtggttacccagggctactttgactactggggccagggaaccctggtcaccgtctcctcag

SEQ ID NO: 917 - DNA, 367 bp, Homo sapiens
  source 1..367: mol_type = other DNA
caggtgcagctggtggagtctgggggaggcgtggtccagcctgggaggtccctgacactctcctgtgcagcgtctggattcaccttcagtaactatggcatacactgggtccgccaggctccaggcaaggggctggagtgggtgtcagttatatggtatgatggaagtgataaatggtatgcaggctccgtgaagggccgattcatcacctccagagacaattccaagaacacggtgtatttgcatatgaacagagtgagagccgacgacacggctctgtactactgtgcgagagatcggatcactggaaatggcgacggtatttttgactcctggggccagggaaccctggtcaccgtctcctcag

SEQ ID NO: 918 - DNA, 360 bp, Homo sapiens
  source 1..360: mol_type = other DNA
caggtccagctggtgcagtctggggctgaggtgaagaagcctgggtcctcggtaaaggtctcctgcaaggcttctggaggcatcctcaataaatatgcaatcaattgggtgcgacaggcccctggacaagggcttgagtggatgggagggatcagcgctatctttaatacggcaaactacgcacagaagttccgtggcagaatcaccattagcgcggacacatccacgacgacagtctacatggaactgagcagcctgagatctgacgacacggccttatattactgtgcgaggggacccacctactacaactcctacatggacgtctggggcactgggaccacggtcaccgtctcctca

SEQ ID NO: 919 - DNA, 364 bp, Homo sapiens
  source 1..364: mol_type = other DNA
caggtccaactggtacagtctggggctgaagtgaagaagcctgggtcctcggtgagggtctcctgtaaggcttctggcggcaccttcagcagctttgccattagttgggtgcgacaggcccctggacaaggacttgagtggatgggtgcaatcatgggtatgtttggcacaacaaactacgcacagaggttccagggcagagtcacgattaccgcggacgaaatgacgagcacaggttacatggaactgaagagtctgacacctgaagacacggccgtctatttttgcgcgagagggggtggctaccattcactttcgcggctcgacccctggggccagggaaccctggtcaccgtctcctcag

SEQ ID NO: 920 - DNA, 364 bp, Homo sapiens
  source 1..364: mol_type = other DNA
caggtgcagctggtgcaatctgggtctgagttgaagaagcctggggcctcagtgaaggtttcctgcaaggcttctggatacaccttcactagctatgctatgaattgggtgcgacaggcccctggacaagggcttgagtggatgggatggatcaacaccaacactgggaacccaacgtatgcccagggcttcacaggacggtttgtcttctccttggacacctctgtcagcacggcatatctgcagatcagcagcctaaaggctgaggacactgccgtgtattactgtgcgagatggggaaaataccggtcgtgggagctacttgactactggggccagggaaccctggtcaccgtctcctcag

SEQ ID NO: 921 - DNA, 367 bp, Homo sapiens
  source 1..367: mol_type = other DNA
gaggtgcagctggtggagtctgggggaggcttggtaaagcctggggggtcccttagactctcctgtgcagcctctggtttcagattcactaatgtctggatgaactgggtccgccaggctccagggaaggggctggagtgggttggccgtattaaaaatgatggtgggacaacagactacgctgcacccgtgagaggcagattcgccatctcaagagatgattcaaaaaacacactatatttacaaatgaacagcctgaagaccgaggacacagccgtgtattactgtaccacagatctggaagtggtggaagtaacttcgttgttgggctattggggccagggaaccctggtcaccgtctcctcag

SEQ ID NO: 922 - DNA, 379 bp, Homo sapiens
  source 1..379: mol_type = other DNA
cagatcaccctgaaggagtctggtccaaccctggtgaaacccacacagaccctcatgctgacctgcagcttctcagggttctcactcagcacgcgtggagtgggtgtgggctggatccgtcagcccccaggaaaggccctggagtggcttggaatcatttattgggatgatgacaagcgctacagtccatctctgaagaacaggatcaccatcaccaaggacacctccaaaagccaggtggtccttacgatgagcaacatggaccctgtggacacagccacatatttctgtgcacatttgacttccgtaacttcatctaattcgggctttgatgcttttgatttctggggccaagggacaatggtcatcgtctcttcag

SEQ ID NO: 923 - DNA, 373 bp, Homo sapiens
  source 1..373: mol_type = other DNA
gatgtgcagctggtggagtctgggggaggcttggtaaagccgggggggtcccttagactctcctgtacagtctctggtctcagtttcagtgacgcctggctgaattgggtccgccaggctccaggaaaggggctggagtgggttggccgcattaaaagtaaaattgatggtgggacaacagactacgctgcacccgtgaaaggaagattcaccatctcaagagatgattcaaaaaagacgctgtttctgcaaatgagcagcctgaaaattgaggacacagccgtgtactactgtcccacaggggccgattcctatgatgatagtggttattgggaattctggggccagggagccctggtcaccgtctcctcag

SEQ ID NO: 924 - DNA, 352 bp, Homo sapiens
  source 1..352: mol_type = other DNA
gaggtgcgactggtggagtccgggggaggcttagttcagcctggggggtccctgagcctctcctgtgcggcctctggattcggcttcagcaactactggatgcactgggtccgccaatctccagggaaggggctggtgtgggtctcccgtattaatattgatgggagtcggacaaactacgcggagtccgtgaagggccgattcaccatctccagagacaacgccaagaacacgctgtatctgcaaatgagcggtctgagagccgaggacacggctgtctattactgtattagagatcagggtgggaccgatgactactggggccaggggaccctggtcaccgtctcctcag

SEQ ID NO: 925 - DNA, 373 bp, Homo sapiens
  source 1..373: mol_type = other DNA
caggtccagctggtgcagtctggggctgaggtgaagaagcctgggtcctcggtgaaggtctcctgcaaggcttctggaggcaccttcagcagctatgctatcaactgggtgcgacaggcccctggacaagggcttgagtgggtgggagggatcatccctatctttggttcatcgagctacgcacagaagttccagggcagagtcacgataaccgcggacgagtccacgagcacagcctacatggagctgagcagcctgagatctgaagacacggccgtgtattactgtgcgactccctcttcggggagttattataactcccgtctttgctttcatttttggggccagggaaccctggtcaccgtctcatcag

SEQ ID NO: 926 - DNA, 379 bp, Homo sapiens
  source 1..379: mol_type = other DNA
gaggtgcagctggtgcagtcgggaggagaggtgaaaaagcccggggagtctctgaagatctcctgtaaggcttctggatacaacttcatcaacttctggatcggttgggtgcgccagatgcccgggaaaggcctggagtggatgggagtaatttatcctggtgactctgatattagatatagtcagtcgttccaaggccaagtcaccatgtcagtcgacaagtccattagcaccgcctacctgcagtggaccagcctgaaggcctcggacaccgccacatattactgtgcgagaccgcggggttattatggttcgggcctttattatcattctgcttttgacatttggggccaagggacagtggtcaccgtctcttcag

SEQ ID NO: 927 - DNA, 352 bp, Homo sapiens
  source 1..352: mol_type = other DNA
cagatgcagccgcaggagtcgggcccaggactggtgaagacttcggagaccctgtccctcacctgcacagtcgccggtggctccatcaccagcatcagttacttctgggcctggatccgccagcccccagggagggggctggagtggattgggagtatttattatggtggggggacctactacaatccgtccctcaagactcgagtcaccatattcgtagacaagtctaggaaccatttgtccctcaacttgacttctgccatcgccgcagacacgggtgtctactactgtgcgcgtattgccgggatccaggggatctggggccaagggacacgggtcaccgtctcttcag

SEQ ID NO: 928 - DNA, 348 bp, Homo sapiens
  source 1..348: mol_type = other DNA
gaggtgcagttggtggagtctgggggaggcttggtccagcctggggggtccctgagactcacctgtgcaacctctggattcacctttggtgattattggatgagttggctccggcagactccagggaaggggctggagtgggtggcctacataaagcgcgatggaagtgaggagaactatgtggactctgtgaggggccgattcaccatctccagagacaacgcccggaacacagtttatttgcaaatgaacagcctgagagtcgacgacacggctgtgtactactgtgggagagccgaacgtctgctggactactggggccagggaaccctggtcaccgtctcctca

SEQ ID NO: 929 - DNA, 355 bp, Homo sapiens
  source 1..355: mol_type = other DNA
caggtgcagctggtgcagtctggggctgaggtgaagaagcctggggcctcagtgaaggtctcctgcaaggcttctggatacaccttcaccagttatgatatcaactgggtgcgacaggccactggacaagggcttgagtggatgggatggatgaaccctaacagtggtaacacaggctatgcacagaagttccagggcagagtcaccatgaccaggaacacctccataagcacagcctacatggagctgagcagcctgagatctgaggacacggccgtgtattactgtgcgagagacgtagccgaaagctactttgactactggggccagggaaccctggtcaccgtctcctcag

SEQ ID NO: 930 - DNA, 367 bp, Homo sapiens
  source 1..367: mol_type = other DNA
gaagtgcagctggtggagtctgggggaggcttggtacagcctggcaggtccctgagactctcctgtgcagcctctggattcacctttgatgattatgccatgcactgggtccggcaagctccagggaagggcctggagtgggtctcaggtattagttggaatagtggtagcataggctatgcggactctgtgaagggccgattcaccatctccagagacaacgccaagaactccctgtatctgcaaatgaacagtctgagagctgaggacacggccttgtattactgtgcaaaagacacgtattactatgatagtagtggtttgatggatatctggggccaagggacaatggtcaccgtctcttcag

SEQ ID NO: 931 - DNA, 388 bp, Homo sapiens
  source 1..388: mol_type = other DNA
caggagcaggtggtgcagtctggggctgaggtgaagaagcctggggcctcagtgaaagtttcctgcaaggcatctagagacacattcagcacctactatgtgcactgggtgcgacaggcccctggacaagggcttgagtggctgggaataatcaaccctggtggtgattggacaagatacgcacagaagttccaggggcgactcaccatgaccagggacacgtccacgactactgtctacatggaactgagcagcctgagatctgaggacacggccatttattactgtgcaagagatgggggattacgatttttggagtggaatatcgggcgtgcctacaactggctcgacccctggggccagggaaccctggtcaccgtctcctcag

SEQ ID NO: 932 - DNA, 364 bp, Homo sapiens
  source 1..364: mol_type = other DNA
caggtccagctggtgcagtctggggctgaggtgaagaagcctgggtcctcggtgaaggtctcctgcaaggcttctggaggcaccttcagcacctatgctatcagctgggtacgacaggcccctggacaagggcttgagtggatgggagggatcatccctatttttggtagatcagactacgcacagaagttccagggcagagtcacaattaccgcggaccaattcacgagcacagcctacatggagctgagcagcctcagatctgaggacacggccgtgtattactgtgcgaaaagtaaatatagtgggagccatgatgcttttgatatctggggccaagggacaatggtcaccgtctcttcag

SEQ ID NO: 933 - DNA, 367 bp, Homo sapiens
  source 1..367: mol_type = other DNA
gaggtgcagctggtggagtctgggggaggcctggtcaagcctggggggtccctgagactctcctgtgcagcctctggattcaccttcagtagctatagcatgaactgggtccgccaggctccagggaaggggctggagtgggtctcatccattagtagtagtagtagttacatatactacgcagactcagtgaagggccgattcaccatctccagagacaacgccaagaactcactgtatctgcaaatgaacagcctgagagccgaggacacggctgtgtattactgtgcgagagattatccgggtatagcagtggctggaattttttgctactggggccagggaaccctggtcaccgtctcctcag

SEQ ID NO: 934 - DNA, 358 bp, Homo sapiens
  source 1..358: mol_type = other DNA
gaggtccagctggtacagtctggggctgtggtgaagaagcctggggctgcagtgaaaatctcctgcaaggtttctggatacaccttcaccgactactccatgcactgggtgaaacaggcccctggaaaagggcttgagtggatgggacttattgatcctgaggatggtgaagcaatatacgcagcgaagttccagggcagagccaccataaccgcggacacttctagagacacagcctacatggagctgagcagcctgagatccgaggacacggccgtgtattattgtcttttgtatcaaatagcagagggatactttgacttctggggtcagggaaccctggtcaccgtctcctcag

SEQ ID NO: 935 - DNA, 354 bp, Homo sapiens
  source 1..354: mol_type = other DNA
caggtccagctggtgcagtctgggactgaggtgaagaagcctggatcctcggtgaaggtctcctgcacggcttctggaggcatcctcaataagtatgctttcaattgggtgcgacaggccccaggacaagggcctgagtggatgggaggcatcactgctatctttggaacaactaagtatgcacagaagttccagggcagagtcaggatcaccgcggacgggaccacctcctacatggaactgaccagcctgacatctgaggacacggccgtatattactgtgcgagagggccccactactactcctcctacatagacgtctggggcacagggaccacggtcatcgtctcctca

SEQ ID NO: 936 - DNA, 376 bp, Homo sapiens
  source 1..376: mol_type = other DNA
gaggtgcagctgttggaatctgggggaggtttggtagagcctggggggtccctgagactctcctgtgcagcctctggattcacctttagcaaatctggcatgagctgggtccgccaggctccagggaagggactggagtgggtctcatttattagtgctactggtggtagcacatactatgtagactccgtgaagggccggttcaccatcgtcagagacagttccaagaacacgctgtatctgcaattgaacaggctgagagtcgaggacacggccgtatattactgttgggccgcaacgtggattcagccatggttacgcccgagggacttctttgactactggggccagggaaccctggtcaccgtctcctcag

SEQ ID NO: 937 - DNA, 373 bp, Homo sapiens
  source 1..373: mol_type = other DNA
gaggtgcagctggtggagtctgggggaggcttggtacagccgggggggtccctgagactctcctgtgcagcctctggattcaccttcggtacctatagcatgaactgggtccgccaggctccagggaaggggctggagtgggtttcatacattagtagtagtagtcgtcccatatactacgcagactctgtgaagggccgattcaccatctccagagacaacgccaagaactcactgtatctccaaatgaacagcctgagagccgaggacacggctgtatattactgtgcgaggtttgcatattgtcgtagtaccaactgccccgaagcctttgacttctggggccagggaaccctggtcaccgtctcctcag

SEQ ID NO: 938 - DNA, 369 bp, Homo sapiens
  source 1..369: mol_type = other DNA
gaggtgcagctgttggagtctgggggaggcttggtacagcctggggggtccctgagactctactgtgcagcctctggattcacctttagcagatatgccatgacctgggtccgccaggctccaggaaaggggctggagtgggtctcaagtattagtggtagtggtattagcacatactacgcagactccgtgaagggccggttcaccatctccagagacaattccaagaacacgctatatctgcaaatgaagagcctgagagccgaagacacggccgtatattactgtgcgaaagatgccgagtggacccctccgcgccaaggttacatggacgtctggggcaaagggaccacggtcaccgtctcctca

SEQ ID NO: 939 - DNA, 358 bp, Homo sapiens
  source 1..358: mol_type = other DNA
caggtgcagctgcaggagtcgggcccaggactggtgaagccttcggagaccctgtccctcacctgcactgtctccggtagctccatcaacaattaccactggagctggatccggcagcccccagggaagggactggagtggattgggtatacaacttacactgggcgcaccgactacaacccctccctcaagagtcgagtcaccatctcagtagacacgtccaagaaccagttttccctgaagctgacctctgtgaccgctgcggacacggccgtgtattactgtgcgagggagaggggcgacttctccaactggttcgacccctggggccagggaaccctggtcaccgtctcctcag

SEQ ID NO: 940 - DNA, 367 bp, Homo sapiens
  source 1..367: mol_type = other DNA
caggtccagttggtgcagtctggggctgaggtgaagaagcctgggtcctcggtgaaggtctcctgccagccttctggaggcaccttcagcagttatgctatcagctgggtgcgacaggcccctggacaaggacttgagtggatgggagggatcgtccctatgtttggaacagtaaagtacgcacagaagttccagggcagagtcacgattaccgcggaccaatttccgagcgcagcctacatggagctgagcagcctgagatctgaggacacggccgtgtattactgtgcgagagcccaaaattattatgggaccagtggttattggggcaactggggccagggaacccaggtcaccgtctcctcag

SEQ ID NO: 941 - DNA, 364 bp, Homo sapiens
  source 1..364: mol_type = other DNA
caggtccagctggtgcagtctggggctgaggtgaagaagcctgggtcctcggtgaaggtctcctgcaaggcttctggagtcaccttcagcagctacgctgtcagctgggtgcgacaggcccctggacaagggcctgagtggatgggagggatcagccctatgtttggtacagcaaactacgcacagaggtttcagggcagagtcacgattaccgcggacgcatccacgagcacagcctacatggagttgcgcagcctgagatctgaggacacggccgtctactactgtgcgcaagcccggcattactatgatactagttattatcactcctggggccagggaaccctggtcaccgtctcctcag

SEQ ID NO: 942 - DNA, 361 bp, Homo sapiens
  source 1..361: mol_type = other DNA
gaggtgcagttagtggagtctgggggaggcttggcacagcctggggggtccctgagactctcctgtgcagcctctggatttagcttcagtaccagcagcatgaactgggtccgccaggctccagggatggggctggagtggatttcatacattagtgatagtactggatccgtatactacgcagactctgtggagggccgattcaccgtctccagagacaacgccaagaactcactttatctgcaaatgaacagcctaagagccgaggacacggctgtgtattactgtgcgagagataactggaacgacgccgttgaccgtgactactggggccggggaaccctggtcaccgtctcctcag

SEQ ID NO: 943 - DNA, 361 bp, Homo sapiens
  source 1..361: mol_type = other DNA
caggtccagctggtgcagtctgggcccgaggtgaagaagcctgggtcctcggtgaaggtctcctgtaaggcgtcaggaggccccttcaggagccatgctatcagctgggtgcgacaggcccctggacaagggcttgagtggatgggagggatcttcgctgtctttggtacaacaaactacgcacagaagttccagggcagagtcacgattaccgcggacgaatccacgagcacagcctacatggagctgagcagcctgagatctgaggacacggccgtgtattactgtgcgagatccccgaattactatcctagcgtcattgactactggggccagggaagcctggtcaccgtctcctcag

SEQ ID NO: 944 - DNA, 364 bp, Homo sapiens
  source 1..364: mol_type = other DNA
caagtccagctggtgcagtctgggcctgaggtgaagaagcctgggtcctcggtgaaggtctcctgcaaggtttctggaggcaccttcagcagctatggtttcaactgggtgcgacaggcccctggacaagggcttgagtgggtgggagggatcacccctatgtttagtataacaaactacgcacagaagttccagggcagagtcacgattaccgcggacgaattgacgagcacagcctacatggacctgagtagcctgagatctgaggacacggccgtttattactgtgcgagagggaaaacgtattaccatgatactagtcacgactactggggccagggaaccctggtcaccgtgtcctcag

SEQ ID NO: 945 - DNA, 352 bp, Homo sapiens
  source 1..352: mol_type = other DNA
cagatgcaactgcaagagtcgggcccaggactggtgaggccctcgcagaccctgtccgtcacctgcacagtgtctagtggctccatcagcgacatcagtttcttctgggcctggatccggcagcccccagggaagggactggagtggattgggagcctctattttggtgggaggccccactacaatccgtccctaaagggtcgagtcaccatttccgttgacaagtccaagggccacttgtccctgacgttgacttctgtgaccgccgcagacacgggtgtctattactgtgcgcgactggccgggatccaaggcatatggggccaagggacactggtcaccgtctcttcag

SEQ ID NO: 946 - DNA, 364 bp, Homo sapiens
  source 1..364: mol_type = other DNA
gaggtgcagctggtggagtctgggggaggcttggtccagcctggggggtcgctgagactctcctgtgcagcctctggattcaggtttagtaacttttggatgagctgggtccgccaggctccagggaaggggctggagtgggtgaccgacataaaggaagatggaagtgcgacatactctgtggactctgtgaagggccgattcaccatctccagagacaacgccaagaatttattgtatctgcagatgaatagcctgagagccgaggacacggctgtgtattactgtgcgcgagatcatagtggtggcggctcctggcacttcgatctctggggccgcggcaccctggtcactgtctcctcag

SEQ ID NO: 947 - DNA, 379 bp, Homo sapiens
  source 1..379: mol_type = other DNA
caggtcaccttgagggagtctggtcctgcgctggtgaaacccacacagaccctcacactgacctgcaccttctctgggttctcactcagtactagtggaatgtgtgtgagctggatccgtcagcccccagggaaggccctggagtggcttgcacgcattgattgggataatgatgaatactacagcacatctctgaagaccaggctcaccatctccaaggacacctccaaaaaccaggtggtcctaacaatgaccaacatggacgctgtggacacagccacgtattactgtgcacggaccgtttcttacgatcttttgactggttattcctactactttgactactggggccagggaaccctggtcaccgtctcctcag

SEQ ID NO: 948 - DNA, 379 bp, Homo sapiens
  source 1..379: mol_type = other DNA
gaggtgcagctggtggaatctgggggaggcttggtccagcctggggggtccctgagactctcctgtgtagcctctggattcacctttaatacctattggatgagttgggtccgtcaggcgccagggaaggggctggagtgggtggccagtataaagcaggatggaagtgagaaaaaatatgtggactctgtgaggggccgattcaccatctccagagacaacgccaagaacgcagtggatctgcaaatagatagtctgagagccgaggacatggctgtgtattactgtgtgagagatttctccccacattgtgatggtgactgctacactgacttcttcgcctcctggggccagggaaccctggtcagtgtctcctcag

SEQ ID NO: 949 - DNA, 369 bp, Homo sapiens
  source 1..369: mol_type = other DNA
gaggagcagctattggagtctgggggaggcttggtacagcctcgggggtccctgagactctcctgtgcagcctctggattcacctttagtggttattggatgagctgggtccgccaggctccagggaaggggctggagtgggtctccactattagtgctactggtggtagcacatactacgcagactccgtgaagggccggttcacaatctccagagacaattccaagaagacgctgtatctgcaaatgcacagcctgagagccgaggacacggccatatatttctgtgcgaaagctcatgacagaagggttccaaaccagggcttcatggacgtctggggcaaagggaccacggtcaccgtctcctca

SEQ ID NO: 950 - DNA, 360 bp, Homo sapiens
  source 1..360: mol_type = other DNA
caggtccagctggtgcagtctggggctgaggtgaagaagcctgggtcctcggtgaaggtctcctgcaagacttctggacgcaccttcagcagttatgctatcagctgggtgcgacaggcccctggacagggtcttgagtggatgggagggatcatcggtatgtttggaacaacaaactacgcacagaacttccagggcagactcacgattaccgcggacgaatccacgagcacagcctacatggagctgagcagcctgagatctgaggacacggccgtgtattactgtgcgagaggcccttactactaccactactacatggacgtctggggcacagggaccacggtcaccgtctcctca

SEQ ID NO: 951 - DNA, 373 bp, Homo sapiens
  source 1..373: mol_type = other DNA
caggtccacctggagcagtctggggctgaggtgaagaagcctgggtcctcggtgaaggtctcctgcaaggcctcgggaggcatcttcagaagcaatgctatcaactgggttcgacaggcccctggacaagggcttgagtggatgggaggaatcctcgctctcttcggaacaacatattacgcacagaagttccagggcaggatcaccatcaccgcggacgagtccacgagcacagccttcatggagctgaggactctgaaatctgaggacacggccatttattactgtgcaaaagcggggggatatcatgtttcgggggagagggcttttatggacgtctggggcgaagggaccacggtcaccgtctcctcag

SEQ ID NO: 952 - DNA, 371 bp, Homo sapiens
  source 1..371: mol_type = other DNA
gaggtgcagttggtggagtctgggggactcttggtgcagcctggggggtccctaagactctcctgcgaagcctctggattcacttttagtgattattccatgatctgggtccgccaggctccaggaaaggggctggagtggctttcatatatcggtgacactggtaggaaaacctactacgcagactctgtgaagggccggttcaccacctccagagacaacgccaagaactcagtgtatctacaaatgaacagcctgagagtcgaggacacggccgtgtactactgcgcgagattcgcattttgtcgtagttatgactgccccgagtcctttgactactggggccaggggacccgggtcactgtctcctc

SEQ ID NO: 953 - DNA, 391 bp, Homo sapiens
  source 1..391: mol_type = other DNA
caggttcagctggtgcagtctggacctgaggtgaagaagcctggggcctcagtgaaggtctcctgcaaggcttctggttacaccttcaccagctatggtctcagctgggtgcgacaggcccctggacaaggacttgagtggatgggatggatcagcggttacactggtgacacaaagtatgcacagaagttccagggcagagtcatcatgaccacagacacatccacgaccacagcgtacatggagctgaggagcctgacctctgacgacacggccgtgtattcctgtgcgcgagatcgcgttgtgggcttagccgcagctggggacccctttggccgcgctgatgcttttgatttctggggccaggggacactggtcaccgtctcttcag

SEQ ID NO: 954 - DNA, 346 bp, Homo sapiens
  source 1..346: mol_type = other DNA
gaggtgcagatggtggaatctgggggaggcttggtccagcctggggggtccctgagactctcctgtgcagtctctggattcacctttagtaatttttggatgaactgggttcgccaggctccagggaaggggctggagtgggtggccaacataaaggatgatggaagtgagaaattctatgtggactctgtgaagggccgattcaccatctccagagacaacgccaagaagtcactgtatttgcaaatgaacagcctgagagccgaagacacggctgtgtattactgttcgactggacattacactgggcagtggggccagggaaccctggtcaccgtctccgcag

SEQ ID NO: 955 - DNA, 352 bp, Homo sapiens
  source 1..352: mol_type = other DNA
gaggtgcagctggtgcagtctggagcagaggtgaaaaagcccggggagtctctgaagatctcctgtaagggttctagagacatctttaccaacgactggatcggctgggtgcgccagatgcccgggaaaggtctggagtggatgggaatcatctatcctggtgactctgataccagatacagcccgtccttccaaggccaggtcaccatctcagccgacaagtccatcaacaccgcccacctgcagtggagcagcctgaaggcctcggacaccgccatgtattattgtgcgagactccggggggcagcctttgactactggggccagggaactgtggtcaccgtctcctcag

SEQ ID NO: 956 - DNA, 367 bp, Homo sapiens
  source 1..367: mol_type = other DNA
gaggttcagttgttggagtctgggggaggcttggtacagcctggggggtcactgagactctcctgtgcagcctctggattcaactttaatacgtatgtcatgagctgggtccgccaggctccagggaaggggctggagtgggtctcatctcttagtggtagtggtggtagcgcctactacgcagactccgtgaagggccggttcaccatctccaaggacaaatcgaagaacacgctatttctgcaactgaacagcctgagagccgaggacacggccgtatattactgtgcgaagcatacggccaaattcccccccgaccctgatgcttttgatgtctggggccaagggacattggtcaccgtctctt

SEQ ID NO: 957 - DNA, 361 bp, Homo sapiens
  source 1..361: mol_type = other DNA
caggtccagctggtgcagtctggggctgaggtgaagaagcctgggtcctcggtgaaggtctcctgcatggcttctggagtcaccttcagcagctatgctatcagctgggtgcgacaggcccctggacaagggcttgagtggatgggagggatcatgcctatgtttggtacagcaaactacgcacagaagttccagggcagagtcacgattaccgcggacgaatccacgagcacagcctacatggaactgagcagcctgagatctgaagacacggccgtgtattactgtgcgagatcccgcaattattacccttcctactttgactactggggcctgggaaccctggtcaccgtctcctcag

SEQ ID NO: 958 - DNA, 361 bp, Homo sapiens
  source 1..361: mol_type = other DNA
caggtccagctggtgcaatctggggctgaggtgaagacgcctgggtcctcggtgaaggtctcctgcacggcttctggaggcaccttcagcaattatgttatcagctgggtgcgacaggcccctggacaaggacttgagtggatgggagggatcatccctatgcttggcatagaaaaggacgcccagcagttccaggacagggtcaaagttaccgcggacaaatccacgaacacagtctacatggaactgcgcagcctgagaactgaagacacggccgtatatttttgtgcgagagaaaaaagtccctcagaggatgtctttgatatgtggggccaagggacagtggtcatcgtctcttcag

SEQ ID NO: 959 - DNA, 370 bp, Homo sapiens
  source 1..370: mol_type = other DNA
cagatcaccttgaaggagtctggtcctacgctggtgaaacccacacagaccctcacgctgacctgcaccttctctgggttctcactcaggacttttggaatgggtgtgggctggctccgtcagcccccaggaaaggccctggagtggcttgcactcgtctattgggatgatgataagcgctacagtccatctctgaggagcaggctcaccatcacccaggacacctccaaaaaccaggtggtccttacaatgaccaacatggaccctgtggacacagccacatattattgtggattcagatgggcagtggctaatttcacgcaagggttcgacccctggggcccgggaaccctagtcaccgtctcctcag

SEQ ID NO: 960 - DNA, 360 bp, Homo sapiens
  source 1..360: mol_type = other DNA
caggtccagctggtgcagtctggggcggaggtgaagaagcctgggtcctcggtgaaggtctcctgtaaggcttctggaggcatcttcaatagctatactatcagctgggtgcgacaggcccctggacaagggcttgagtggatgggagggatcatcgctatctttggtacaacaaactacgcacagaagttccagggcagagtcacgattaccgcggacgaatccacgagcacagcctacatggagctcagcagcctgagatctgaggacacggccgtatattactgtgcgagaggccctaagtactactactactacatggacgtctggggcaaagggaccacggtcaccgtctcctca

SEQ ID NO: 961 - DNA, 361 bp, Homo sapiens
  source 1..361: mol_type = other DNA
caggtgcagctgcaggagtcgggcccaggactggtgaagccttcggggaccctgtccctcacctgcgttgtctctggtgtctccatgaacgaaaatgactggtgggattgggtccgccagcccccagggaagggactggagtggattggggaaatctctcatagtgggagcaccatctacaacccgtcactcaagagtcgagtcaccgtttcaatagacaggaccaagaaccagttctccctgaatctgagctctgtgaccgccgcggacacggctgtgtattactgtgcgagagattatagcagtggctggtacggtattttctactggggccagggaaccctggtcaccgtctcctcag

SEQ ID NO: 962 - DNA, 367 bp, Homo sapiens
  source 1..367: mol_type = other DNA
gaggtgcaactggtggagtctgggggaggcttggtacagcctggggggtccctgagactctcctgtgcagcctctggattcaccctcagaagttacaacatgaactgggtccgtcaggctccagggaagggactggagtggatttcatatattagtagcagtagtagcaccatgtactacgcagactctgtgaagggccgattcaccatctccagagacaacgccaagaactcactgtatctgcaaatgaacagcctgagagccgaggacacggctgtctattactgtgcgagaggtgtggagatgactataagtgggtggtacttcgatctctggggccgtggcaacatggtcactgtctcctcag

SEQ ID NO: 963 - DNA, 352 bp, Homo sapiens
  source 1..352: mol_type = other DNA
caggtgcagctgcagcagtcgggcccaggactggtgaagccctcggagaccctgtccctcacctgcactctctctggtggctccatcagtagttactactggagttggatccggcagcccccagggaagggactggagtggattggatatctctttaatagcgggagcaccaggtacaacccctccctcaacagtcgagtctccatatcagtagacacgtccaagaaccagttctccctgaaattgaactctgtgaccgccgcagacacggccgtgtattactgtgcgagaggaggttttggtatagcttttgacatctggggccaagggacaatggtcaccgtctcctcag

SEQ ID NO: 964 - DNA, 364 bp, Homo sapiens
  source 1..364: mol_type = other DNA
caggtgcagctggtgcagtctggggctgaggtgaagaagcctggggcctcagtgaaggtctcctgcaaggcttctggatacaccttcaccggctactatatgcactgggtgcgacaggcccctggacaagggcttgagtggatgggatggatcaaccctaacagtggtggcacaaactatgcacagaagtttcagggcagggtcaccatgaccagggacacgtccatcagcacagcctacatggagctgagcaggctgagatctgacgacacggccgtgtattactgtgcgagaacccgaatagtgggagctactctgacgtttgactactggggccagggaaccctggtcaccgtctcctcag

SEQ ID NO: 965 - DNA, 361 bp, Homo sapiens
  source 1..361: mol_type = other DNA
caggtgcagctgcaggagtcgggcccaggactggtgaagccttcggggaccctgtccctcacctgcgctgtttctggtggctccttcaacggtactaactggtggagttgggtccgccagcccccagggaaggggctggagtggattggggaaatccatcatagtgggactaccaactacaacccgtccctcaagagtcgagtcaccatatcagtagacaagtccaagaaccagttctccctgaagatgacctctatgaccgccgcggacacggccgtgtattactgtgcgagagatctgggaaactggaaatactactttgactactggggccggggaaccctggtcaccgtctcctcag

SEQ ID NO: 966 - DNA, 373 bp, Homo sapiens
  source 1..373: mol_type = other DNA
gaggtgcaactattggagtctgggggaggcttggcacagcctggggggtccctgagactctcctgtgcagcctctggattcacctttagcacttatgccatgacttgggtccgccaggctccagggaaggggctggagtgggtctcagctattagtggtagtggtggtaggacatactacgcagactccgtgaggggccgcttcaccatctccagagacaattccaagaacaccctctatctacaaatcaacaccctgggagccgaggacacggccatttattactgtgcgaaaaccacgacatatattagtgggagctacctgtccccccctgaatactggggccagggaaccctggtctccgtctcctcag

SEQ ID NO: 967 - DNA, 370 bp, Homo sapiens
  source 1..370: mol_type = other DNA
gaggtgcagctgttggagtctgggggaggcttggtacagcctggggggtccctgagactctcctgtgcagcctctggattcacctttagcaactatgccatgaactgggtccgccaggctccagggaaggggctcgagtgggtctcagctattagtggtagtggtggtaccacatcctacgcagactccgtgaagggccggttcaccatctccagagacaattccaagaacacgctgtatctgcaaatgaacagcctgagagccgaggacacggccgtatattactgtgcgaaaggggacccgctacgggcggtggtaactcctccctttgactcctggggccagggaaccctggtcaccgtctcctcag

SEQ ID NO: 968 - DNA, 361 bp, Homo sapiens
  source 1..361: mol_type = other DNA
gaagtgcagctggtggaatctgggggaggcttggtccagcctggggggtccctgagactctcctgtgcagcctctggattcacctttagtacctattggatgacctgggtccgcctggctccagggaaggggctggagtggctggccaacataaaggaagatggaagtgaggtgttatatgtggactctgtgaagggccgattcaccatctccagagacaacgccatgaactcagtgtatctgcaaatgaacagcctgagagtcgaggacacggctgtgtattactgtgcatccttgaacagctggcactcggccccaatggacgtctggggcaaagggaccacggtcaccgtctcctcag

SEQ ID NO: 969 - DNA, 364 bp, Homo sapiens
  source 1..364: mol_type = other DNA
gaggtgcagctggtggagtctgggggaggcttggtccagccgggggggtccctgagactctcctgtgcagcctctggattcagctttagtgactattggatgagctgggtccgtcaggccccagggaaggggctggagtggctgtccgatataaagcaagatggaagtgtcaagtactttgtggactctgtgaagggccgattcaacatctccagagacaacgctaagaactcactgcatctgcagatgaacagcatgagagccgaagacacggctgtctattactgcgcgagagatcatcacagtggcggctcgtggcacttcgatctctggggccgtggcaccctggtcactgtctcctcag

SEQ ID NO: 970 - DNA, 364 bp, Homo sapiens
  source 1..364: mol_type = other DNA
caggtacaactgcagcagtcaggtccaggactggtgaagccctcgcagaccctctcactcacctgtgccatctccggggacagtgtctccagcaacagtgctatttggaactggatcaggcagtccccatcgagaggccttgagtgggtgggaaggacatactacaggtccaagtggattaatgattatgcagtttctgtgagaagtcgaatgacgatcaacgaagacacatccaagaaccagttctccctgcacctgaactctgtgactcccgacgacacggctgtgtattactgtgcaagaggattccttaaaactggttttgatttctggggccaagggacaatggtcaccgtctcttcag

SEQ ID NO: 971 - DNA, 351 bp, Homo sapiens
  source 1..351: mol_type = other DNA
gaggtgcagctggtgcagtctggagccgaggtgaaaaagcccggggagtctctgaagatctcctgtaagggttctggatacatctttaccagcgactggatcggctgggtgcgccagatgcccgggaaaggcctggagtggatggggatcgtctttcctggtgactccgataccaaatacagcccgtccttccaaggccaggtcaccatctccgccgacaagtccatcaccaccgcctacctgcagtggagcagcctgaaggcctcggacaccgccatgtattactgtgcgagactaagagggactgcttttgatgtctggggccaagggacaatggtcatcgtctcttca

SEQ ID NO: 972 - DNA, 364 bp, Homo sapiens
  source 1..364: mol_type = other DNA
caggtccagctggtgcagtctggggctgaggtgaagaagcctgggtcctcggtgaaggtctcctgcaaggcttctggaggcaccttcagcagttacgccatcagctgggtgcgacaggcccctggacaaggacttgagtggatgggagggatcatcggtatgtttggtacaacaaactacgcacagaggttccagggcagagtcacgattaccgcggacgaactcacgagcacaggttacatggaactgaacaacctgagatctgaggacacggccgtatattattgcgcgagagggggtggctaccattcgttatcgtggctcggcccctggggccagggaaccctggtcaccgtctcctcag

SEQ ID NO: 973 - DNA, 371 bp, Homo sapiens
  source 1..371: mol_type = other DNA
gaggtgcagttggtggagtcggggggacactcggtacagccgggggggtccctcagactctcctgtgaagcctctggattcacttttagtagttatagcatgatctgggtccgccaggctccaggaaaggggctggagtggctttcatacattggtgacacgggtaggaccagttactacgcagactctgtgcagggccggttcaccgtctccagagacaacgccaagaatttagtgtatctgcaaatgaacagcctgagagccgaggacacggccgtgtattactgtgcgagattcgcatattgtcgtagtaccaactgccccgaatcctttgactactggggccagggaacccaggtcaccgtctcctc

SEQ ID NO: 974 - DNA, 370 bp, Homo sapiens
  source 1..370: mol_type = other DNA
caggtccagctggtccagtctggggctgaggtgaagaagcctgggtcctcagtgaaggtctcctgcaaggcctctggaggcaccttcaccagctatgctctcagctgggtgcgacaggcccctggacaagggcttgagtggatgggagggatcaaccctatccttgatatcactaactacgcacagaagttccagggcagagtcaagattaccgcggagagatccacgaggacagcctacatggagctgagcagcctgacatctgaggacacggccgtgtactactgtgcgagagatgggggatatcactttgggtcggggagttataatgacaactggggccagggaaccctggtcaccgtctcctcag

SEQ ID NO: 975 - DNA, 352 bp, Homo sapiens
  source 1..352: mol_type = other DNA
gaggtgcaattggtggagtctggaggagacttggtccagcctggggggtccctgagactctcctgtgcagcctctggcttcagcgtcagtcgcagttacatgaattgggtccgccaggctccggggaaggggctggagtgggtctcaattatttacagcggtggtaatgcatactacgcagactccgtgaagggccgattcaccatctccagacacaactccaagaacaccctgtatcttcaaatgaacagcctgcgacctgaggacacggccgtgtattactgtgcgagagataatgaggagtgggcctttgactactggggccagggaaccctggtcaccgtctcctcag

SEQ ID NO: 976 - DNA, 367 bp, Homo sapiens
  source 1..367: mol_type = other DNA
gaggtgcagttgttggagtctgggggaggcttggcacagccgggggggtccctgagactctcctgtgtcggctctggattcacctttagtagctataccatgaactgggtccgccaggctccagggaaggggctggagtgggtcgcaagtattagtcttagtggtgttagcatgttctacggagactccgtgaggggccgcttcaccatctccagagacaattccaagaacaccctgtatctgcagatgaacagcctgggagccgaggacacggccttttatttctgtgcgaaaaccgccgaaatgatcaccaccatttctggttttgatctctggggccaagggacattggtcaccgtctcttcag

SEQ ID NO: 977 - DNA, 367 bp, Homo sapiens
  source 1..367: mol_type = other DNA
caggtcaccttgaaggagtctggtcctgtactggttaaacccacagagaccctcacgctgacctgcaccgtctctgggttctcactcagcaatactggattgggtgtgacctggatccgtcagcccccagggaaggccctggagtggcttgcccacagtgtttcgaatggcgaaaaatcctacaccacatctctgaacagcaggctcgccatcttcaaggacacctccaaaagccaggtggtccttaccatgaccaacgtggaccctgtggacacagccacatattactgtgcagtgatttatggtggtgacacgggcggctactttgattactggggccagggaatcctggtcaccgtctcctcag

SEQ ID NO: 978 - DNA, 367 bp, Homo sapiens
  source 1..367: mol_type = other DNA
caggttcagctggtgcagtctggagctgaggtgaagaagcctggggcctcagtgaaggtctcctgtaaggcttcaggttacacccttaccagctatggtatcagctgggtgcgacaggcccctggacaggggcttgagtggatgggatggatcaacactcacaatggtaacacagcctatgcacagacattccagggcagagtcaccatggccacagacacatcctcgaacacagcctatatggaggtgaggagcctgagatctgacgacacggccgtttattactgtgcgagaacccttttagagggacatagtagtggctggtatgactattggggccagggaaccctggtcaccgtctcctcag

SEQ ID NO: 979 - DNA, 376 bp, Homo sapiens
  source 1..376: mol_type = other DNA
caggtgcagctggtgcagtctgggtctgagttgaagaagcctggggcctcagtgaaggtttcctgcaaggcttctggatacatcttcactagtttttctatgcattgggtgcgacaggcccctggacaagggcttgagtggatgggatggatcaacaccaacactgggaacccaacgtatgcccagggcttcacaggacggtttgtcttctcgttggacacctctgtcagcacgacatatctgcagatcagcaacctaaaggctgaggacactgccgtatattactgtgtgagagttcgggttttacgatattttgactggcaggcgatacccacagactactggggccagggaaccctggtcaccgtctcctcag

SEQ ID NO: 980 - DNA, 367 bp, Homo sapiens
  source 1..367: mol_type = other DNA
gaggtgcagctggtggagtctgggggaggcttggaacagccagggcggtccctgagactctcctgtacaacttctggattcacctttggtgattttgctatgagctgggtccgccaggctccagggaaggggctggagtgggttggtttcattagaaggaaaactcatggtgggacaacagaatacgccgcgtctgtgaaaggcagattcaccatctcaagagatgattccaaaagcatcgcctatctgcaaatggacagcctgacaaccgaggacacagccgtgtattactgtactagagattggactgggagctacttccgaaaggactactggggccagggaaccctggtcaccgtctcctcag

SEQ ID NO: 981 - DNA, 367 bp, Homo sapiens
  source 1..367: mol_type = other DNA
caggttcagctggtgcagtctggaggtgaggtgaagagtcctggggcttcagtgaaggtctcctgcaagacttctggttacagctttaccaactctggtatcagctgggtacgacaggcccctggacaagggcctgagtggatgggatggatcagcgcttacagtggccacacaaatcacgcacagaagttccaggatcgagtcgccctgaccatagacacatccaagagcacagcctatatggagttgaggagcctgagatctgacgacacggccgtttattactgtgcgagagaccgtttgggatggctacaacccccactctttgaccactggggccagggaaccctggtcaccgtctcctcag

SEQ ID NO: 982 - DNA, 339 bp, Homo sapiens
  source 1..339: mol_type = other DNA
ctgctggagtctgggggaggcatggtacagcccggagggtccctgacactctcctgtgcagcctctgcattcacatttaggagctatgaaatgaactgggtccgccaggccccagggaaggggccggagtgggttgcatatatcagtagtcgtggtggcggtagtaccgtatactacgcagactctgtgaagggccgattcagcatctccagagacaacgacaagaactcactgtttctgcaaatggacagcctgagaggcgacgacacgggtatttattactgtgtgagagcagactacatggacgtctggggcttagggaccacggtctccgtctcc

SEQ ID NO: 983 - DNA, 366 bp, Homo sapiens
  source 1..366: mol_type = other DNA
caggtgcagctgcaggagtcgggcccaggactggtgaagccttcggagaccctgtccctcacctgcactgtctctggtggctccattagtagttactactggagttggatccggcagcccgccgggaagggactggagtggattgggcgtatctataccagtgggagcaccaagtacaacccctccctcgagagtcgagtcaccatgtcagtagacacgtccaagaaccacttgtccctgaagttgaactctgtgaccgccgcggacacggccgtatattactgtgcgaggtattgtagtggtggtggctgcacggggaactacatggacgtctggggcaaggggaccacggtcaccgtctcctca

SEQ ID NO: 984 - DNA, 388 bp, Homo sapiens
  source 1..388: mol_type = other DNA
caggtcaccttgaaggagtctggtcctgtgctggtgaaacccacagagaccctcacgctgacctgcaccgtctctgggttctcactcagcaatgctagaatgggtgtgagttggatccgtcagcccccagggaaggccctggaatggcttgcacacattttttcgagtggcgaaaaatcgtacaacacatctctgaagaccagactcaccatctccaaggaaacctccaaaagccaggtggtccttaccatgaccaacgtgggccctgtggacacagccacatattactgtgcacggacacttccagagaattacgtggatagtgatggctaccgaggctggtacttcgatctctggggccgtggcaccctggtcactgtctcctcag

SEQ ID NO: 985 - DNA, 283 bp, Homo sapiens
  source 1..283: mol_type = other DNA
tatggcatgcactgggtccgccaggctccaggcaaggggctggagtgggtggcagttatatggtatgatggaagtgataaaaattatgcagactccgtgaagggccgattcactatctccagagacaatttcaagaacacgctgtatctgcaaatgaacaacctgagagccgaggacacggctgtgtacttctgtgcgagagatccgtcggcgttggcagcagctggtaccgagggttggttcgacccctggggccagggaaccctggtcaccgtctcctcag

SEQ ID NO: 986 - DNA, 367 bp, Homo sapiens
  source 1..367: mol_type = other DNA
caggtgcagctggtggagtctgggggaggcgtggtccagcctggggggtccctgagactctcctgtgcagcctctggattcaccttcagtaactacgctttgcactgggtccgccagactccaggcaaggggctggagtgggtggcagttatatcatttgatgtaactaataaatactacgcagactcggtgaagggccgattcaccatctccagagacaactccaagaacacggtgtatctgcaaatgaacagcctgagacctgaggacacggctgtgtatttctgtgcgagaggagacggtgacttccatccgggggactggttcgacccctggggccagggaactctggtcaccgtctcctcag

SEQ ID NO: 987 - DNA, 364 bp, Homo sapiens
  source 1..364: mol_type = other DNA
gacgtgcaactggtggaatctgggggaggcttggtccagccgggggggtccctaagactctcctgtttagcctcgggattcagcattaaagactattggatgagttgggtccgccaggctccagggatggggctggagtgggtggccaccataaagaaagattcaagtgagaagtactttgtggactctgtgaagggccgattcaccatctccagggacaacgccaaaaattcattgtttctgcaaatgaacagcctgggagccgacgactcggctctgtattactgtgcgaagtccagtcgggacagtaattacgcgatttgggacctctggggccagggaaccctggtgaccgtctcctcag

SEQ ID NO: 988 - DNA, 364 bp, Homo sapiens
  source 1..364: mol_type = other DNA
caggtgcagctggtggagtctgggggaggcgtggtccagcctgggaggtccctgagactctcctgtgcagcgtctggattcaccttcagtagctatggcatgcactgggtccgccaggctccaggcaaggggctggagtgggtggcagttatatggtatgatggaagtaataaatactatgcagactccgtgaagggccgattcaccatctccagagacaattccaagaacacgctgtatctgcaaatgaacagcctgagagccgaggacacggctgtgtattactgtgcgagaaggggggcgtatagcagtggccgtgactttgactactggggccagggaaccctggtcaccgtctcctcag

SEQ ID NO: 989 - DNA, 388 bp, Homo sapiens
  source 1..388: mol_type = other DNA
caggtcaccttgaaggagtctggtcctgtgctggtgaaacccacagagaccctcacgctgacctgcaccgtctctgggttctcactcagcagtgctagaatgggtgtgagctggatccgtcagcccccagggaaggccctggagtggcttgcacacattttttcgaatgacgaaaaatcctacagtacatctctgaagagcaggctcaccatctccaaggacacctccaaaagtcaggtggtccttaccatgaccaacatggaccctgtggacacagccacatattattgtgcacggatacttccagagaattacgtggatagtagtggctaccgaggctggtatttcgatccctggggccgaggcaccctggtcactgtctcctcag

SEQ ID NO: 990 - DNA, 367 bp, Homo sapiens
  source 1..367: mol_type = other DNA
caggtgcaactggaacagtggggcgcaggactgttgaagccctcggagacgttgtccctcacctgcggtgtctctggtgggtccctcagtgctttctactggagctggatccgccagcccccagggaagggactggagtggattggggacatcagtgttagtgggggcacccactacaatccgtccctcaagagtcgagtcaccacctcaacagactcgtacaagaaccacttctccctggaactgaggtctctgaccgccgcggacacggccatttactattgtgcgcgccagggcggtgactacgtggagggtgaattctactttgattactggggccagggagccctggtcaccgtctcctcag

SEQ ID NO: 991 - DNA, 352 bp, Homo sapiens
  source 1..352: mol_type = other DNA
caggtgcagctgcaggagtcgggcccaggactggtgaagccttcggagaccctgtccctcacatgcactgtctctggtggctccatcagtactaactactggagctggatccggcagcccccagggaagggactggagtggattgggtatatccattacagtgggaacaccaagtacaacccctccctcaagagtcgagtcaccatatcagtagacacgtccaagaaccagttttacctgaagctgagctctgtgaccgctgcggacacggccgtgtattactgtgcgagagaggcagtggcagcttcttacttaaactactggggccagggaaccctggtcaccgtctcct

SEQ ID NO: 992 - DNA, 355 bp, Homo sapiens
  source 1..355: mol_type = other DNA
caggtccagctggtgcaatctggggctgaggtgaagaagcctgggtcctcggtgaaggtctcctgcaaggcttctggaggccccttgaacagttatactatcagttgggtgcgacaggcccctggacaaggacttgagtggatgggaggggtcatccctatctttggtacagcaaaatacgcacggaagttccaggacagagtcacaattaccacggacgagtccacgagcacggtgtacatggagatgagcagcctgagagctgacgacacggccatctatttttgttcgaaaagttttagcagtggctttggtgacaactggggccagggaaccctggtcaccgtctcctcag

SEQ ID NO: 993 - DNA, 370 bp, Homo sapiens
  source 1..370: mol_type = other DNA
caggtccagctggtgcagtctggggctgaggtgaagaagcctgggtcctcggtgaaggtctcctgcaaggcctctggaggcaccttcagcaggtatactatcaactgggtgcgacaggcccctggacaagggcttgagtggatgggagggatcgtccctctgtttggcacagcgaactacgcacagaggttccagggcagagtcacgataaccacggacgaatccacgaacacagcctacatggagctgcgcagcctgagatccgaggacacggccatgtattactgtacgagagtgtctgcggactgtagtggtgctacttgcccctttggttactggggccagggaaccccggtcatcctctcctcag

SEQ ID NO: 994 - DNA, 382 bp, Homo sapiens
  source 1..382: mol_type = other DNA
caggttcaactggtgcagtctggaactgaggtgaagaagcctggggcctcagtgaaggtctcctgcaaggcttctggttacacctttatcaattatgatattaactgggtgcgacaggtccctggacaagggcttgaatggatgggatggatcaccacatataatgggaacacaaagtatacacagaggctccagggcagagtcaccatgaccgcagacacatccacgagcacagcctacatggaattgaggagcctcacatctgacgacacggccgtctatttctgtgcgagggggccgcctaaacgcaagacgatttttgaggaggtcttcaagtggtttgacccctggggccagggaaccctggtcaccgtctcctcag

SEQ ID NO: 995 - DNA, 370 bp, Homo sapiens
  source 1..370: mol_type = other DNA
gaggtgcagctgttggagtctgggggaggcttggtacagcctggggggtccctgagactctcctgtgcagcctctggattcagctttagcacctatgccatgagttgggtccgccaggctccagggaaggggctggagtgggtctccagtattagaggtagtggtattagcacatactacgcagactccgtgaagggccggtgcaccatcgccagagacaattccaagaacacgctgtatctgcgaatgaacagcctgagagccgaggacacggccgtatattactgtgcgaaagatacgagtgggagtcctcccagagagggctactttgactactggggccagggaaccctggtcaccgtctcctcag

SEQ ID NO: 996 - DNA, 376 bp, Homo sapiens
  source 1..376: mol_type = other DNA
gaggtgcagctggtggagtctgggggaggcttggtaaagcctggggggtcccttcgactctcctgtgcagcctctggattcactttcagtgacgcctggatgacctgggtccgccaggctccaggaaaggggctggagtgggttggccgtattaaaagcaaaattgatggtgggacaacagactaccctgcacccgtgaaaggcagattcaccatctcaagagatgattcaaaaaacacgctgtatctgcaaatgaacagcctgaaaaccgaggacacagccgtgtattactgcaccacccttaaatattgtggtgctgattgtcgttttgtctttgagtactggggccagggaaccctggtcaccgtctcctcag

SEQ ID NO: 997 - DNA, 370 bp, Homo sapiens
  source 1..370: mol_type = other DNA
gaggtgcagttgttggagtctgggggaggcttggtacagccgggggggtccctgagactctcctgtacagcctctggattcacctttaccagctatgccatgcgctgggtccgccaggctcctgggaagggactgaagtgggtctcagatattagtgctagtggtggtagcacatactacgcagactccgtgaagggccggttcaccatctccagagacaattccaggaacacgctgtatctgcgaatgagcagcctgagagccgacgacacggccgtatattactgtgcgaaagatctctcgaccatgattccatttgggggagtttcctcgtcctggggccagggaaccctggtcaccgtctcctcag

SEQ ID NO: 998 - DNA, 361 bp, Homo sapiens
  source 1..361: mol_type = other DNA
caggtacagctgcagcagtcaggtccaggactgttgaagccctcgcagaccctctcactcacctgtgacatctccggggacaatgtctctagcaacaatgttgcttggaactggatcaggcagtccccatcgagaggccttgagtggctgggaaggacatactacaggtccaagtgggataatgattatgcagtttctgtgagaggtcgaataaccatcaacccagacacatccaagaaccagttctccctgcagctgaactctgtgactcccgaagacacggctgtgtattactgtgcaagagacaaagactggtcctttgactcttggggccagggaaccctggtcaccgtctcctcag

SEQ ID NO: 999 - DNA, 373 bp, Homo sapiens
  source 1..373: mol_type = other DNA
gaggtgcagctggcggagtctgggggaggcttggtccagcctggggggtccctgagactctcctgtgcagcctctggattcacctttagtagttattggatgacttgggtccgccaggctccagggaaggggctggagtgggtggccaacataaaacaagatggaagtgagaaatactatgtggactctgtgaagggccgatgcaccatctccagagacaacgccaagaattcactatatctgcaaatgaacagcctgagagccgaggacacggctgtgtattactgtgcgagagtcgatctccggtatgatagtagtggttatagaccgcttgacttttggggccagggaaccctggtcaccgtctcctcag

SEQ ID NO: 1000 - DNA, 361 bp, Homo sapiens
  source 1..361: mol_type = other DNA
caggtgcagctgcaggattcgggcccaggactggtgaagccttcggagaccctgtccctcacctgcgctgtctctggagcctccatcagtagttactactggagttggctccggcagcccccagggaaggggttggagtggattgggctcatctatcccagtgggagcaccagctacaactcttccctcaacagtcgagtcaccgtatcagtggacacgtccaagaaccagttctccctgaagctgcgctctctgaccgccgcagacacggccatatattactgtgcgagattaaattgtattattgccagttgtccccttgactactggggccagggaaccctggtcaccgtctcctcag

SEQ ID NO: 1001 - DNA, 388 bp, Homo sapiens
  source 1..388: mol_type = other DNA
caggtcaccttgaaggagtctggtcctgtgctggtgaaatccacagagaccctcacgctgacctgcaccgtctctgggttctcactcagcaatgctcgaatgggtgtgagttggatccgtcagcccccaggggaggccctggagtggcttgcacacattttttcgagtggcgaaaaatcgtacagcacgtctctgaagaccagactcaacatctccagggacacctccaaaagccaggtggtccttaccatgaccaacgtgggccctgtggacacagccacatattactgtgcacggacacttccagagaattacgtggatactgatggctaccgaggctggtacttcgatctctggggccgtggcaccctggtcactgtctcctcag

SEQ ID NO: 1002 - DNA, 373 bp, Homo sapiens
  source 1..373: mol_type = other DNA
caggtgcagttggtggagtctgggggaggcgtggtccagcctgggaggtctctgagactctcctgtgtagcctctggatttcccttccgtaactatggcatgcactgggtccgccaggctccaggcagggggctggagtgggtggcagttatctcaaatactgaaactaataaatactatgtagactccgtgaagggccgattcaccatctccagagacaattccaagaacacgctgtatctgcaaatgaacagcctgagacctgaggacacggctgtgtattactgtgcgaaagataattccggtggctacggcccctgggggggttactttgactactggggccagggagcccgggtcaccgtctcctcag

SEQ ID NO: 1003 - DNA, 387 bp, Homo sapiens
  source 1..387: mol_type = other DNA
gaggtgcagctggtggagtctgggggaggcttggtacagcctggggggtccctgagactctcctgtgcagcctctggattcaccttcagtagctatagcatgaactgggtccgccaggctccagggaaggggctggagtgggtttcatacattagtagtagtagtagtaccatatactacgcagactctgtgaagggccgattcaccatctccagagacaatgccaagaactcactgtatctgcaaatgaacagcctgagagacgaggacacggctgtgtattactgtgcgagagacagttacgatttttggagtggttattatctgacctactactactactacatggacgtctggggcaaagggaccacggtcaccgtctcctca

SEQ ID NO: 1004 - DNA, 364 bp, Homo sapiens
  source 1..364: mol_type = other DNA
cagctgcagctgcaggagtcgggcccaggactggtgaggccttcggagaccctgtccctcacttgttctgtctctggtggctccatcagcagcagcaattactattggagctgggtccgccagcccccagggaaggggctggagtgggttgcgagtattttttatagaaagagcaaccactacaatgagtctctcaggagtcgagccaccatttccgcggacgcgtcgaagaatgaaatattccttttcctgacctctgtgaccgccgcagacacggccacttattattgtgcgagacttttttggagtggtcaaagctactttgactcctggggccagggaaccctggtcaccgtttccccag

SEQ ID NO: 1005 - DNA, 382 bp, Homo sapiens
  source 1..382: mol_type = other DNA
caggtccagctggtacagtctggggctgaggtgaagaagcctggggcctcagtgaaggtctcctgcaaggtttccggatacaccctcactgaattatccatgcactgggtgcgacaggctcctggaaaagggcttgagtggatgggaggttttgatcctgaagatggtgaaacaatctacgcacagaagttccagggcagagtcaccatgaccgaggacacatctacagacacagcctacatggagctgagcagcctgagatctgaggacacggccgtgtattactgtgcaacagccggactccccccggctctatcagtgggagctacccggagtgcttttgatatctggggccaagggacaatggtcaccgtctcttcag

SEQ ID NO: 1006 - DNA, 379 bp, Homo sapiens
  source 1..379: mol_type = other DNA
gaggtgcagctgttggagtctgggggaggcttggtacagcctggggggtccctgagactctcctgtgcagcctctggattcacctttagcagctatgccatgagctgggtccgccaggctccagggaaggggctggagtgggtctcagctattagtggtagtggtggtagcacatactacgcagactccgtgaagggccggttcaccatctccagagacaattccaagaacacgctgtatctgcaaatgaacagcctgagagccgaggacacggccgtatattactgtgcgaaactaggatattgtagtagtaccagctgctccgcaggagcccaatttgactactggggccagggaaccctggtcaccgtctcctcag

SEQ ID NO: 1007 - DNA, 369 bp, Homo sapiens
  source 1..369: mol_type = other DNA
caggtgcagctggtggagtctgggggaggcgtggtccagcctggggggtccctgagactctcctgtgcagcgtctggattcagcttcagtagctatggcatgtactggttccgccaggctccaggcaaggggctggagtgggtggcatttatacggtatgatggaagtaaaaactactatgcagactccgtgaaggggcgattcaccgtctccagagacaattccaagaacacgctgtatctgcaaatgaacagcctgagagttgaggacacggctctatattcctgtgcgaagttactggttaataagggccggaattcaagcctcattgactgctggggccagggaaccctggtcaccgtctcctca

SEQ ID NO: 1008 - DNA, 362 bp, Homo sapiens
  source 1..362: mol_type = other DNA
caggtgcagctgcaggagtcgggcccaggactggtgaagccttcggagaccctgtccctcacctgtaatgtctctggtgactccatcactagccactactggagctggatccggcagcccccggggaaggggctggagtgcattgggtacatctattacagtgggcgcacctactacaacccgtccctcaagagtcgagtcaccatatcagtagacacgtccaagaaccagttctccctgagtctgcgttctgtgaccgctgcggacacggccatatattattgtgcgagagataataccggttcgtcggaaaagaacgcttttgatatctggggccaagggacactggtcgccgtctcttc

SEQ ID NO: 1009 - DNA, 370 bp, Homo sapiens
  source 1..370: mol_type = other DNA
gaggtgctcctgttggagtctggggggggcttgatgaagcctggggggtccctgagactctcctgtgcggcctccgggttcacctttagcagccatgccttccactgggtccgccaggctccagggaagggcctggaatgggtctcattcattagtgctactggtcttagtacatactacgcggactccgtgaagggccggttcaccatctccagagacgattccaagaacagggtctatctgcaagtgagtagcctgagggccgacgacacggccgtctactactgtgcgagaggccaggggagacccatcactggaactggcatcctcgactcctggggccaggggaccccggtcaccgtctcctcag

SEQ ID NO: 1010 - DNA, 367 bp, Homo sapiens
  source 1..367: mol_type = other DNA
caggtgcagttggtggagtctgggggaggcgtggtccagcctgggggatccctgagactctcctgttcagcgtctggattcaccttcagcagttgtggcatgcactgggtccgccaggttccaggcaaggggctggagtggctggcatttatacggagtgatgaaagtgataaatattatgcagcctccgtgaagggccgattcaccacctccagagacaattccaagaacacgctgtctctgcaaatggacagcctgagagctgaggacacggctctgtattattgtgcgaaagatgtagcggataaatctagtagtggctcttttgactactggggtcagggaaccctggtcaccgtctcctcag

SEQ ID NO: 1011 - DNA, 379 bp, Homo sapiens
  source 1..379: mol_type = other DNA
gaggtacaactggttgagtctgggggagacttggtacagccagggcggtccctgagactctcctgtacaacatctggattcacctttgataattccgctgtgggctggtttcgccaggctccaggcaaggggctggaatgggtaggtttcatcagaagagaagcctatggtgcgacaacagaatacgccgcgtctgtaaaaggcagattcaccatctcaagagatgattccaaaagcatcgcctatctgcaaatgaacggcctgaaaagcgaggacacagccgtatattattgtagtagagggaaggagtatgatggtaataactattacagaccttttgacttctggggccggggatccctggtcaccgtctcctcag

SEQ ID NO: 1012 - DNA, 367 bp, Homo sapiens
  source 1..367: mol_type = other DNA
caggtgcacctggtgcagtctgaggctgaggtgaagaagcctggggcctcagtgacggtctcctgcagggcctctggatacaacttcaacagctactatgtacactgggtacgacaagtccctggtcaagggcctgagtggatggggtggatcaatcctaacagtggtggcacagactctgcacagaagtttcagggcagggtcgccatgaccagggacacgtccatcaacacagtgtacatggaactgagcagcctgagatctgacgacacggccgtctattattgtgtgagaggcaagagttggagtggcgggcatatggggggcgtctactggggccagggagctctggtcaccgtctcctcag

SEQ ID NO: 1013 - DNA, 379 bp, Homo sapiens
  source 1..379: mol_type = other DNA
gaggtgcagctggtggagtctgggggaggcctggtcaagcctggggggtccctgagactctcctgtgcagcctctggattcaccttcagtaactataccatgaactgggtccgccaggctccagggaaggggctggagtgggtctcatccattagtactagtagtaattacatatataatgcagtctcagtgaagggccgattcaccatctccagagacaacgccaagaactcactgtatctgcaattgaacagcctgagagccgaggacacggctgtgttttactgtgcgagagatacaatgggtgactacggtggtttgctgaggcttggtgcttttgatatctggggccaagggacaatggtcaccgtctcttcag

SEQ ID NO: 1014 - DNA, 364 bp, Homo sapiens
  source 1..364: mol_type = other DNA
gaggtgcagctggtggagtctggaggaggcttgatccagcctggggggtccctgagactctcctgtgcagcctctgggttcaccgtcagtagcaactacatgagctgggtccgccaggctccagggaaggggctggagtgggtctcagttatttatagcggtggtagcacatactacgcagactccgtgaagggccgattcaccatctccagagacaattccaagaacaccctgtatcttcaaatgaacagcctgagagccgaggacacggccctgtattactgtgcgagaagttactacggtggtaactccgacgcccagattgactactggggccagggaaccctggtcaccgtctcctcag

SEQ ID NO: 1015 - DNA, 362 bp, Homo sapiens
  source 1..362: mol_type = other DNA
gaggtgcagctggtggagtctgggggaggcttggtccagccgggggggtccctgagactctcctgtgtagcctctggatttacgtttagtaggaattggatgagttgggtccgccaggctccagggaaggggctggagtgggtggccagcataaagcaagatggaagtcagagacattatgtcgactctgtggagggccgattcaacatctccagagacaacgccaagaagtcactgtctctgcaaatgaacagcctgagagccgaggacacggctctatattactgtgtgaggcttcgggaagacactgcctacaggccttgtgatcagtggggccagggaaccctggtcaccgtctcctc

SEQ ID NO: 1016 - DNA, 358 bp, Homo sapiens
  source 1..358: mol_type = other DNA
gaggtgcagctggtggagtctgggggaggcttggtacagcctggggagtccctgagactctcctgtgcagcctctggattcaccttcagttccgatagcatgaactgggtccgccaggttccagggaaggggctggaatgggtttcatacattaatcccaaatctgattccacatactacgcagactctgtgaagggccgattcaccatctccagagacaactccaagcagtcgctgtatctgcaaatgaacagcctgagagacggagacacggctgtttatcactgtgcgagaggtggggagagtggctggagtcttgagtcctggggccagggaaccctggtcaccgtctcttcag

SEQ ID NO: 1017 - DNA, 364 bp, Homo sapiens
  source 1..364: mol_type = other DNA
caggtgcagctggtgcagtctggggctgaggtgaagaagcccgggtcctcggtgaaggtttcctgcaagacttctggaggcacgttcagcagctctgctatcagctgggtgcgacaggcccctggacaagggcttgagtggatgggagggatcagccctatgtttggtccagcaaagtacgcagagaagttccagggcagactcactattaccgcggaccaatttccgagtataggctacatggaactgagcagcctgagatttgacgacacggccgtctattactgtgcgagagggtcgggctaccatattttgaatccttttgatatctggggccaagggacaatggtcaccgtctcttcag

SEQ ID NO: 1018 - DNA, 379 bp, Homo sapiens
  source 1..379: mol_type = other DNA
gaggtgcagctgttggagtctgggggaggcttggtacagcctggggggtccctgagactctcctgtgcagcctctggattcacctttagcagctatgccatgagctgggtccgccaggctccagggaaggggctggagtgggtctcagctattagtggtagtggtggtagcacatactacgcagactccgtgaagggccggttcaccatctccagagacaattccaagaacacgctgtatctgcaaatgaacagcctgagagccgaggacacggccgtatattactgtgcgaaggacggggcgacggttaacggagctcctgcacctctaaactggttcgacccctggggccagggaaccctggtcaccgtctcctcag

SEQ ID NO: 1019 - DNA, 370 bp, Homo sapiens
  source 1..370: mol_type = other DNA
caggttcaactgcaagagtcgggcccaggactggtgaagccttcggggaccctgtccctcacttgcgttgtctctggtgactccatcataagtaaaaactggtggacttgggtccgccagcccccagggaaggggctggagtggattgcagaaatgtctcatgatgggaaacccaactacagcccgtccctcaagagtcgagtcaccatatcagtagacaagtccaggaaccagttctccttgaacctgaactttgtgaccgccgcggacacggccgtgtattattgtgcgagagatcggtcctttagtgaaaaagatacatgggcttttgatatctggggcccaggggcaatggtcattgtctcttcag

SEQ ID NO: 1020 - DNA, 364 bp, Homo sapiens
  source 1..364: mol_type = other DNA
gaggtgcagctggtggagtctgggggaggtgtggtacggcctggggggtccctgagactctcctgtgcagcctctggattcacctttgatgattatggcatgagctgggtccgccaagctccagggaaggggctggagtgggtctctggtattaattggaatggtggtagcacaggttatgcagactctgtgaagggccgattcaccatctccagagacaacgccaagaactccctgtatctgcaaatgaacagtctgagagccgaggacacggccttgtattactgtgcgagagcgtggtggttcggggagttattcccgtttggctactggggccagggaaccctggtcaccgtctcctcag

SEQ ID NO: 1021 - DNA, 376 bp, Homo sapiens
  source 1..376: mol_type = other DNA
cagctgcagctgcaggagtcgggcccaggactggtgaagccttcggagaccctgtccctcacctgcagtgtctctggtggctccatcagcagtaatagttactactggggctggatccgccagcccccagggaaggggctggagtggattgggagtatctattatagtggaggcacctactacaacccgtccctcaagagtcgagtcaccatatcagtagacacgtccaagaaccagttctccctgaagctgagctctgtgaccgccgcggacacggccgtgtattactgtgcgagagatgtggatgatagtcatggttattacgcgtggcactttgactactggggccagggaaccctggtcaccgtctcctcag

SEQ ID NO: 1022 - DNA, 355 bp, Homo sapiens
  source 1..355: mol_type = other DNA
cagctgcagttgcaggagtcgggcccaggactggtgaagacttcggagaccctgtccctcacctgcactgtctctggtgcctccatcagcagtagtagttactactggggctggatccgccagcccccagggaagggcctggagtggattgggactatctattctagtgggactgcctactacaacccctccctcaagagtcgagtcaccatatcattgaaaatgtccaagaaccaattctccctgaagctgagctctgtgaccgccgcggacacggccatatattactgtgcgagggactttgaccggggttttgactactggggccagggatccctggtcaccgtctcctcag

SEQ ID NO: 1023 - DNA, 385 bp, Homo sapiens
  source 1..385: mol_type = other DNA
cagatcaccttgaaggagtctggtcctacgctggtgaaacccacacagaccctcacgctgacctgcaccttctctgggttctcactcagcactagtggagtgggtgtgggctggatccgtcagcccccaggaaaggccctggagtggcttgcactcatttattgggatgatgataagcgctacagcccatctctgaagagcaggctcaccatcaccaaggacacctccaaaaaccaggtggtccttacaatgaccaacatggaccctgtggacacagccacatattactgtgcacacagcgcaagccaccccctagagatggctacaatttccttcgatgcttttgatatctggggccaagggacaatggtcaccgtctcttcag

SEQ ID NO: 1024 - DNA, 382 bp, Homo sapiens
  source 1..382: mol_type = other DNA
gaggtgcggttggaggagtctgggggaggcttggtccagactggggggtccctgaaactctcctgtgcagcctctggattcacctttagtaggaattggatgagctgggtccgccaggctccagggaaggggctggagtgggtggccaacataaagcaagatggaagtgaaaaagtctatgtggactctgtgaagggccgattctccatctccagagacaacgccgagaacacactgtatctgcaaatgaacaacctcagagccgaggacacggctctgtattactgtgcgagagacccttattgcggtggtgactgccctggcggtagcttcggggcttttgatatctggggccaggggacaatggtcaccgtgtcttcag

SEQ ID NO: 1025 - DNA, 367 bp, Homo sapiens
  source 1..367: mol_type = other DNA
gaggtgcaattgttggagtctgggggaggcttggtacagcctgggggcttcctgcgactctcgtgttcagcctctggattcacctttagaagttatattatggcctgggtccgccaggctccagggaaggggctggagtgggtctcaagtattagtggtagtagtcttagcacatactacgtagacgccgtcaagggccgattcaccatctccagagacaattccaagaacacactgtatctccaaatgaccagcctgagagtcgaagacacggccgtatattactgtgcgacactgggagtgaacccggccctttcggggagtcttgactcctggggccagggaaccctggtcaccgtctcctcag

SEQ ID NO: 1026 - DNA, 388 bp, Homo sapiens
  source 1..388: mol_type = other DNA
gaggtgcagttggaggagtctgggggaggcttggttcagcctggggggccccggagactctcatgtgcagcctctggattcactttcagcagacatagcatgagctgggtccgccaggctccagggaaggggctggagtggctcgcacacatcagtcatagtagtaaaagaatctactacgcagactctgtgaagggccgattcagcatctccagagacaacgtcaggaactcactgtatctgcaaatggacagcctgacagccgaggacacggctctttattactgtgcgcgagagtcggccactgaaggtttcggggaattgtcctttaggggtgatcacgcttttgatctctggggccaagggactttgctcaccgtctcttcag

SEQ ID NO: 1027 - DNA, 364 bp, Homo sapiens
  source 1..364: mol_type = other DNA
caggtgcaactggtggagtctgggggaggcgtggtccagcctgggaggtcccagagactctcctgtgcagcctctggattcattttcagtagttatgctatgtactgggtccgccagtctccagacaaggggctggagtgggtggcagttatatcacatgatggaaataataaatattacgcagactacgtgaagggccgattcaccatctccagagacaattccaagaacacggtgtttctgcaaatggacagcctgagagctgaggacacggctgtgtattactgtgtgagggcccggggcagtaactacgtgggctggttcggcccctggggccagggaaccctggtcaccgtctcctcag

SEQ ID NO: 1028 - DNA, 378 bp, Homo sapiens
  source 1..378: mol_type = other DNA
gaggtgcagttgttggaatctgggggaggcttggtacagccgggggggtccctgagactcgcctgtgcagcctctggattcacctttagtgattatgccatgagctgggtccgccaggctccagggaaggggctggagtggatctcagttattcgtgctagtggtgaaagtagagattacggagactccgtgaagggccggttcaccacctccagagacaattccaagaacatgctttatctgcaaataaggagtctgagggccgaggacacggccgtatatttctgcgttagtactggctggacggacggggggtcttgggtctaccaccacaacatggacgtctggggcaaagggaccacggtcatcgtctcctca

SEQ ID NO: 1029 - DNA, 358 bp, Homo sapiens
  source 1..358: mol_type = other DNA
gaggtgaaactggtggagtctggaggaggcttggtccagccgggggggtccctgagactcacctgtgtagcctctgggttcagcgtcagtagcacccacatgaaatggatccgccgggtcccagggaaggggctggagtgggtctcaatcatttacagggacactaccatatataacgcggactccgtgaagggccgattcttcgtctccagagacattctcaggaacacagtgtatcttcaaatgaacagcctgaaaaccgaggacacgggcatttattactgtgcgagagatcaggccgaaactcaattctacttcgatctctggggccgtggcaccctggtcactgtctcctcag

SEQ ID NO: 1030 - DNA, 379 bp, Homo sapiens
  source 1..379: mol_type = other DNA
caggtgcagctacagcagtggggcgcaggactgttgaagccttcggagaccctgtccctcacctgcgctgtctatggtgggtccttcagtggttactactggagctggatccgccagcccccagggaaggggctggagtggattggggaaatcaatcatagtggaagcaccaactacaacccgtccctcaagagtcgagtcaccatatcagtagacacgtccaagaaccagttctccctgaagctgagctctgtgaccgccgcggacacggctgtgtattactgtgcgagaggcgctagatttttggagtggttattatatttcggtccgggtgcttttgatatctggggccaagggacaatggtcaccgtctcttcag

SEQ ID NO: 1031 - DNA, 381 bp, Homo sapiens
  source 1..381: mol_type = other DNA
gaggtgcacttgtgggagtctgggggaaccttgatacagccgggggggtccctgagactctcctgtggagcctctggattcacctttagtaaatatgccatgacctgggtccgccaggctccagggaaggggctggagtgggtctcagttcttcctggcagtggtaaaagtccatcttatgcagacttcgcgaggggccggttcgtcatctccagagacaattccaggaatatggtgtatctgctgctgaacagcctgacagccgaagacacggccatatattattgtgcaaatagtggctgggcgtacgaggaggggtcttgggtctatgattacaacatggacgtctggggtaaagggaccacggtcatcgtctcttca

SEQ ID NO: 1032 - DNA, 355 bp, Homo sapiens
  source 1..355: mol_type = other DNA
gaggtgcaactggtggagtctgggggaggctcggtacagcctggggggtctctgagactctcctgtgcagcctctggattcagattcagttcatatagcatgaactgggtccgccaggctccagggatggggctagaatggctttcatatgctaacaataaagacattttttatgcagactctgtgaagggccgattcaccgtctccagagacaacgccaagaactcactgtatctgcaaatgaacagcctgagagccgaggacacggctatttattactgtgcgagagggggaactggggatggggactactttgactactggggccagggaaccctggtcaccgtctcctcag

SEQ ID NO: 1033 - DNA, 367 bp, Homo sapiens
  source 1..367: mol_type = other DNA
gaggtgcaactggtggagtctgggggagacttggcacagcctggggggtccctgacactctcctgtgcagcctctggattcaccttcagtagttatagcttcgattgggtccgcctggctccagggaaggggccggagtggatttcatatattagtggtgatagtaagtccatatactacgcagactctgcgaagggccgattcaccatctccagagacaacgtcaagaactcactgtatctgcaaatgaacagcctgagagacgaggactcggctgtttattattgtgcgagagaggaagtagggggtagcaaaagttggtactgggcctactggggccggggaaccctggtcaccgtctcctcag

SEQ ID NO: 1034 - DNA, 361 bp, Homo sapiens
  source 1..361: mol_type = other DNA
gaggtgttgctggtggagtctgggggaggtttggtacagcctggggggtccctaagactctcctgtacagcctctggattcaccttcagtaggcatcccatgaactgggtccgccaggctccagggagggggctggagtgggtttcatacatcaatggtgaatctaagggtgtatattatggagactctgtgaagggccgattcaccacctccagagacaatgccaagaacgtactctacttgcaaatgagcagcctgagagacgaggacacggctgtgtatttttgtgtgagaggcgatattaccggctggctcttggaggcgacctggggccagggaaccctggtcaccgtctcctcag

SEQ ID NO: 1035 - DNA, 366 bp, Homo sapiens
  source 1..366: mol_type = other DNA
gaggtgcaactggtggagtctgggggaagcttggtccagtctggggggtccctgagactctcatgtacagcctctagattcagttttagtaactatttgatgacctgggtccgccaggctccagggaaagggctggagtgggtggccaacattaaacaagatggagatgccaaattctatgtggactctgtgaagggccgattcaccgtctccagagacaacgccaagagctcactgtatctgcaaatgaacggcctgagagccgaggacacggctgtttattattgtgcgacgtctttgggagacaatgacaatgctggttacctcgattactggggccagggaaccccagtcaccgtctcatca

SEQ ID NO: 1036 - DNA, 376 bp, Homo sapiens
  source 1..376: mol_type = other DNA
cagctgcagctgcaggagtcgggcccaggactggtgaagccttcggagaccctgtccctcacctgcactgtctctggtggctccatcagcagtagtagttactactggggctggatccgccagcccccagggaaggggctggagtggattgggagtatctattatagtgggagcgcctactacaacccgtccctcaagagtcgagtcaccatatcagtagacacgtccaagacccagttctccctgaagctgagttctgtgaccgccgcggacacggccgtgtattattgtgtgagaacgcactactatgatagcagtggggcgactaatgcttttgatatctggggccaagggacaatggtcaccgtctcttcag

SEQ ID NO: 1037 - DNA, 380 bp, Homo sapiens
  source 1..380: mol_type = other DNA
gaggtgctactgttggagtctgggggaaccttggtacagcctggggggtccctgagactctcctgtgcggcctctggattcacctttaccgactatgccatgaactgggtccgccaggctccagggaaggggctggagtgggtctcagctattcgtggtgatggaggcggcacgcactacgcaggctccgtgaagggccgcgtcaccatctccagagacaattccaagaatttactgtttctgcaaatgaacagcctgagagccgaggacacggccgtttattactgtgcgagatgcgtttccagcactgagcctaacagcagtggctggtgtaactggttcgacccctggggccagggaacccgggtcaccgtctcctc

SEQ ID NO: 1038 - DNA, 361 bp, Homo sapiens
  source 1..361: mol_type = other DNA
caggtgcaactggtggaatctgggggaggcgtggtccagcctggggggtccctcagactctcctgtgcagcgtctggattcaccttcactagatttgccatgcactgggtccgccaggctccaggcaaggggctggagtgggtggcatgtgtgcggtctgatggaagtagtcaatattcttcagagttcgtgaagggtcgattaaccatctccagagacaattccaagaacacgctgtatctgcaaatgaacagcctgagagctgaggacacggctgtctatttctgtgcgaaagatgacggtgacagtaatggttcctttgactactggggccagggaaccctggtcaccgtctcctcag

SEQ ID NO: 1039 - DNA, 355 bp, Homo sapiens
  source 1..355: mol_type = other DNA
cagatacagttacagcagtggggcacaagactgttgaagccctcggagaccctgtccctcacctgcgctgtctctggtgagtccttcagtggtttcttctgcagttggatccgccagtccccagggaaggaattggagtggattggagaaatcaatcaaagtggaaccgccaagtacaatccgtccctcacgagtcgagtcaccatgtcattggacacgtccaagaatcagttgtccctcaacatgacttctgtgaccgccgcggacacggctatatatttttgttcgagaggccagtggctggcccccctgggaaacctctggggcccgggaaccctggtctccgtctcctcag

SEQ ID NO: 1040 - DNA, 364 bp, Homo sapiens
  source 1..364: mol_type = other DNA
caggtccaattggtgcagtctggggctgaggtgaggaagcctgggtcctcggtgaaggtctcctgccaggcttctggcggcaccttcagcagctatgctatcagctgggtgcgacaggccccaggacaggggcttgagtggatgggaggcatcaccggtatgtttggaacaacaaactatgcacagaagttccagggcagagtcatccttactgcggacgaaattacgagcacagcctacatggatctgaacagcctgagatctgaggacacggccgtgtattactgtgcgagagccggcggctatcatcttaatgatgcttttcatatctggggccaagggacactggtaaccgtctcttcag

SEQ ID NO: 1041 - DNA, 376 bp, Homo sapiens
  source 1..376: mol_type = other DNA
gaggtgcaactggtggactctgggggagacttagtccaggctggggggtccctgagactctcctgtgcagcctctggattcacctttagtacttattggatgacctgggtccgccaggctccaggaaaggggctggagtgggtggccaatataaagccggacggaagtgagaaacattatgtggactctgtgaagggccgattcatcatcgacagagacaacgccaagaactcagtgtatctacaaatgaacaacctgcgagtcgacgacacggctgtatatttttgtgtgagagactactgtaatggtgatagttgttcacgtgaggcttggggtgactactggggccagggaacccgggtctccgtctcctcag

SEQ ID NO: 1042 - DNA, 337 bp, Homo sapiens
  source 1..337: mol_type = other DNA
gaggagcagctggtggagtctgggggaggcttggtacagccgggggggtccctgagactctcctgtacagcctctggattcagcttcagtagttatagcatgaactgggtccgccagggtccagggaagggactggaatggctttcatacattagtagtagtagtaaaaccatatactacgcagactctgtgaagggccgattcaccatctccagagacaatgccaagaattcactgtatctgcaaatgaacagcctgagagtcgaggatacggctgtgtatcactgtgtgagagggctactgtggggccagggaaccctggtcaccgtctcctcag

SEQ ID NO: 1043 - DNA, 382 bp, Homo sapiens
  source 1..382: mol_type = other DNA
caggttcagttggtgcagtctggacctgaggtgcgtcagcctggggcctcagtgaaagtctcctgcaagacttatgggtacacctttgccggttacggcatcacctgggtgcgccaggcccccggacaaggatttgaatatgtgggatatatcaacgcttacaatggcaacacgaactacccacagaacttcgaggacagagtcaccatgaccacagacacatccacgagcacagcctacatggagatgaggagcctaagatctgacgacacggccgtctattactgtgcgcgagatttgttgtggagtggtgacaaaacaaagaacacacaggactggttcgactcctggggccagggaaccctggtcaccgtctcctcag

SEQ ID NO: 1044 - DNA, 346 bp, Homo sapiens
  source 1..346: mol_type = other DNA
gaggtgcaagtggtggagtctgggggaggcttggtccagcctggggggtccctgagactctcctgtgcagcctctggattcacctttagtaagaattggatgacttgggtccgccaggctccagggaaggggctggagtgggtggccaccataaagccagatggaactgagacatattatgtggactcagtgaagggccggttcaccatctccagagacaacgcccagaatttgctttttctgcaactgaacagtctgagagtcgaagacacggctgtgtatcactgtgcgagtctgtgggaggggggctactggggccagggaaccctggtcaccgtctcctcag

SEQ ID NO: 1045 - DNA, 364 bp, Homo sapiens
  source 1..364: mol_type = other DNA
gaggtgcagctggtggagtccgggggaggcttagttcagcctggggggtccctgagactctcctgtgcagcatctggattcaccttcagtacttactggatgcactgggtccgccaagttccagggaaggggctggtgtgggtctcacgtattaatggtgatgggactaaaataaactacgtggactccgtgaagggccgattcaccatttccagagacaacgccaagaacacgctgtatctgcaattgaacagtctgagagccgaggacacggctgtgtattactgttcaagaggcgcactggaaaatacttattcggactggtcccactggggccagggaaccctggtcaccgtctcctcag

SEQ ID NO: 1046 - DNA, 385 bp, Homo sapiens
  source 1..385: mol_type = other DNA
gaggtgcaactggtggactctgggggaggcttagtccagcctggggggtccctaagactctcctgtgcagcctctggattcacctttagtagttattggatgagctgggtccgccaggctccagggaaggggctggagtgggtggccaacataaagccagatggaagtgcgaagaattatgtggactccgtgaagggccgattcaccatctccagagacaacgcctggaagtcactgtctctgcagatgaacagcctaagagacgacgacacggctgtgtattactgtgtgagagactactgtaatggtgataatggtgatagttgttcccgtgaatcttggggtgactactggggccagggaaccctggtctccgtctcctcag

SEQ ID NO: 1047 - DNA, 373 bp, Homo sapiens
  source 1..373: mol_type = other DNA
caggtccagctggtgcagtctggggctgaggtgaagaagcctgggtcctcggtgaaggtctcctgcaaggcttctggaggcatcttcaacaccaatgccttcagctgggtgcgacaggccccaggacaaggacttgagtggatgggagggatcatccctctctttggtacaacaaactacgcacagaagttccaggacagagtcacgattaccacggacgaatccaggagcacagcctacatggagttgagcagcctgagatctgaggacacggccgtctattactgtgcgagattgggggggtatcacctgctaaggagtcgcagctggctcgacccctggggccagggaaccctggtcaccgtctcttcag

SEQ ID NO: 1048 - DNA, 364 bp, Homo sapiens
  source 1..364: mol_type = other DNA
caggttcaactggtgcaatctggagctgaggtgaagaagcctggggcctcagtgatagtctcctgtaaggcttctggttacaccttcaccagatatgggatcagttgggtgcgacaggcccctggacaagggcttgagtgggtgggctggatcagcggtcaaaatgatgacacaagattcggacagaacgtccagggcagaatcaccctgaccgcagacacatccacgagcacggcctacatagaattgaggagcctgggacatggcgacacggctgtgtattattgtgtgagagattgggacgccaaaactccggtgattgcagactactggggccagggaaccctggtcaccgtctcctcag

SEQ ID NO: 1049 - DNA, 385 bp, Homo sapiens
  source 1..385: mol_type = other DNA
gaggtgcaactggtggactctgggggaggcttagtccagcctggggggtccctaagactctcctgtgcagcctctggattcaactttagtagttattggatgagctgggtccgccaggctccagggagggggctggagtgggtggccaacataaagccagatggaagtgagaagtattttattgactccgtgaagggccgattcaccatctccagagacaacgcctggaagtcactgtctctgcagatggacagcctaagagacgacgacacggctgtttattactgtgtgagagactactgtaatggtgataatggtgaaagttgttcccgtcaatcttggggtgactactggggccagggaaccctggtctccgtctcctcag

SEQ ID NO: 1050 - DNA, 372 bp, Homo sapiens
  source 1..372: mol_type = other DNA
gaggtacaattattggagtctgggggaggtttggtgcagcctggggggtccctgagactctcctgtgcaggcactggtttcatccttggaaattatgccgtcagttgggtccgccaggctccagggaaggggctggagtgggtcgcaggaatcaataccgcgggtgacaccacatactacgcagactccgtgaagggccggtccaccatctccagagacaatttcaaggacacggtgtctctgcaagtggacagcctcagagccgatgacatggccatttattactgtacgagggatcccagacccacttatgacgctggatggcacattttcgcctcctggggccagggagcccgggtcatcgtctcctca

SEQ ID NO: 1051 - DNA, 370 bp, Homo sapiens
  source 1..370: mol_type = other DNA
gaggtgcagttgttggagtctgggggaggcttggtacagcggggggggtccctgagactctcctgtgcagcctctggattcacctttagcagccatgccatgacctgggtccgccaggctccaggtaaggggctggagtgggtctcatctattagtggtagtgacactaagacatactatgcaggcgccgtgaagggccggttcaccatctccagagacaattctaagaacaccctgtatctgcaaatgaacagcctgagagccgaagacacggccgtttactattgtgtgacagactggcagacgtcatcttgtggggatgactgcttaatcaactggggccagggaaccccggtcaccgtctcctcag

SEQ ID NO: 1052 - DNA, 372 bp, Homo sapiens
  source 1..372: mol_type = other DNA
caggtccagctggtgcagtctggggctgaggtgaagaagcctgggtcctcggtgaaggtctcctgcaagacttctgaaatcaccttcagcagctatgctatcagctgggtgcgacaggcccctggacaagggcttgagtggatgggagggatcatcactatgtttggtccagcaaactacgcacagaagttccagggcagactcacgatcaccacggacgaatccacgagaacagcctatatggagctgagcagcctgagatctgaggacacggccgtatattactgtgcgagatatctcaattacaatggttcggggaaacggggagggatggacgtctggggccaagggaccacggtcaccgtctcctca

SEQ ID NO: 1053 - DNA, 367 bp, Homo sapiens
  source 1..367: mol_type = other DNA
gaggtgcagctgctggagtctgggggaggcttggtacagcctggggggtccctgagactctcctgtgcagcctcaggattcacctttagccataatgccatgagttgggtccgccaggctccagggaaggggctggagtgggtcgcacttattactggagatggtggtgtcacatactacccagactccgtgaagggccggttcaccatctcgagagacaattccaagggcacgctgtatttgcaaatgaacaccctgagagccgaggacacggccctatactactgtgcgccgtcacacgggagtggctatggaaccgactacttgggctactggggccagggaaccctggtcaccgtctcctcag

SEQ ID NO: 1054 - DNA, 379 bp, Homo sapiens
  source 1..379: mol_type = other DNA
caggttcacctggtgcagtctggaggtgaggtgaagaaggctggggcctcagtgaaagtctcctgcaagacttctggttacacctttaccaactatggtgtcacctgggtgcgacaggcccctggacaagggcttgagtggatgggatggatcagcgcttacactggtaacacacactatgcacagaagttccaggacagactcaccatgaccacagacacatccacgagcacagcctacatggagatgaggagcctccgatctgacgacacggccgtctatttttgtgtgagagatcgagtgcaggggcaggtatggtttgggagtgacggccggatggactactggggcctgggaaccctggtcaccgtctcctcag

SEQ ID NO: 1055 - DNA, 379 bp, Homo sapiens
  source 1..379: mol_type = other DNA
caggttcagctggtgcagtctggacctgaggtgaagaatcctggggcctcagtgaaggtctcctgccaggcttctggttacacctcgaccacctacggtatcacctgggtgcgacaggcccctggacaagggcttgagtggatgggatggatcagcgcttacaatgataaaacacaatatgcacagaactttcaggacagagtcaccatgaccacagaaacatccacgagcacagcctacatggagctgcggagcctgagatctgacgacacggccgtatattactgtgcgaaagatgcctattatgataatagtgatgtatggcggggagatgttcttgatatctggggccaagggacaatggtcaccgtctcttcag

SEQ ID NO: 1056 - DNA, 367 bp, Homo sapiens
  source 1..367: mol_type = other DNA
gaggtgcaggtggtggagtctgggggaggcttggtacagcctggagggtccctgagtctctcctgtgcagcctctggattcaccttcagtagttatgaaatgaactgggtccgccaggctccagggaaggggctggagtgggtttcatatattagtagtagtggtggttccagatactacgcagactctgtgaagggccgattcaccatttccagagacaacgccaagaattcactgtatctccaaatgaacagcgtgagagtcgaggacacggctgtttactattgtgcgagagatcgggtgacgacggtttttggagtgggcatagactcctggggccagggaaccctggtcaccgtctccacag

SEQ ID NO: 1057 - DNA, 376 bp, Homo sapiens
  source 1..376: mol_type = other DNA
gaggtgcaagtggtggactctgggggagacttagtccagccgggggggtctctcagactctcctgtgaagcctctggattcccctttagtacttattggatgagttgggtccgccaggctccagggaaggggctggaatgggtggccaacataaagccagatggaagtaagaaaaattatgtggactctgtgaggggccgattcaccatctccagagacaacgccaagaactcagtgtatctgcagatgaacagtctgagagtcgaggacacgggtgtgtatttctgtgcgagagactattgtaatggtgacaattgcccgcgtcaatcttggggtgacttctggggccagggaaccctggtctccgtctccgcag

SEQ ID NO: 1058 - DNA, 372 bp, Homo sapiens
  source 1..372: mol_type = other DNA
caggtccagctggtacagtctggggctgaggtgaagaagcctgggtcctcggtgaaggtctcctgcaaggcttctggaggcaccttcaacaactatgctatcagctgggtgcgacaggcccctggacaagggcctgagtggatgggagggagcaaccctatctttggttcagcaaattacgcacagaagttccagggcagagtcacgattacgacggacgaatccaggaccacagcctacatggagttgagcagcctgagatctgaggacacggccgtgtattattgtgcgacctatagggcgattagggcggttatctcctactactacattatggacgtctggggccaagggaccacggtcaccgtctcc

SEQ ID NO: 1059 - DNA, 387 bp, Homo sapiens
  source 1..387: mol_type = other DNA
caggtgcagctggtggagtctgggggaggcgtggtccagcctgggaggtccctgagactctcctgtgcagcctctggattcaccttcagtagctatgctatgcactgggtccgccaggctccaggcaaggggctggagtgggtggcagttatatcatatgatggaagtaataaatactacgcagactccgtgaagggccgattcaccatctccagagacaattccaagaacacgctgtatctgcaaatgaacagcctgagaactgaggacacggctgtgtattactgtgcgagagagccgaatccaccgtatagcagcagctggtacggaggctactactactacatggacgtctggggcaaagggaccacggtcaccgtctcctca

SEQ ID NO: 1060 - DNA, 363 bp, Homo sapiens
  source 1..363: mol_type = other DNA
gaagtgcagctggtggagtctgggggagtcgtggtacagcctggggggtccctgagactctcctgtgcagcctctggattcacctttgatgattatgccatacactgggtccgtcaagctccggggaagggtctggagtgggtctctcttattagttgggatggtgatagcacatactatgcagactctgtgaagggtcgattcaccatctccagagacaacagcacaaactccctgtatctgcaaatgaacagtctgagagctgaggacaccgccttgtattactgtgcaaaagtgttattttcccactattactacggtatggacgtctggggccaagggaccacggtcaccgtctcctca

SEQ ID NO: 1061 - DNA, 370 bp, Homo sapiens
  source 1..370: mol_type = other DNA
caggtccagctggtgcagtctggggctgaggtgaagaagcctgggtcctcggtgaaggtctcctgcaaggcctctggaggcaccttccgcaactttgctatcagctgggtgcgacaggcccctggacaagggcttgagtggatgggagggatcatcccaatctttggtacagcaaagtacgcacagaatttccagggcagagtcacgataatcgcggacgaatccacgagcacaggctacatggagctgagcagcctgagatctgaggacacggccatttattactgtgcgagagatttagggatatactatacttcgcggacgggcgatgactactggggccagggaaccctggtcaccgtctcctcag

SEQ ID NO: 1062 - DNA, 377 bp, Homo sapiens
  source 1..377: mol_type = other DNA
ggtggagttggtggagtctgggggaggcttggtccagccaggggggtccctgagactctcttgtgcagcctctggattcacttttaataggtattggatgatttgggtccgccagtttccagggaagggcctggagtggctggccaacataaagcaagacggaagtgagacacactatttggactctgtgaggggccgattcaccatctccagagacaacgcccagcactcactctatctacaaatgaacagcctgagagtcgaggacacggctgtgtattactgtgcgagagttgagcctgacgatggttcggggaattccttctataggttttatgacttgtggggccagggatccctggtcaccgtctcatcag

SEQ ID NO: 1063 - DNA, 376 bp, Homo sapiens
  source 1..376: mol_type = other DNA
caggtgcagctgcaggagtcgggcccaggactggtgaagccctcggagactctgtctctcacctgcactgtctctggtgactccatcagagcttcatactggcattggatccggcagcccgccgggaagggactggagtggattgggcgtgtctatagtagagggagcaccagatacaacccttccctcgagagtcgagtcaccgtgtcagtagacgcgtccaacactcagttcttcctgaggctgagatctgtgaccgccgcggacacggccgtgtattattgtgccagagagggcagttcctgtgatgaagccaggtgtgccgagggctcgtttgaccgctggggccagggaaccctggtcaccgtctcctcag

SEQ ID NO: 1064 - DNA, 370 bp, Homo sapiens
  source 1..370: mol_type = other DNA
gaggtgcagctggtgcagtctggagcagaggtgaaaaagcccggggagtctctgaagatctcctgtaagggttctggatacagctttaccagctactggatcggctgggtgcgccagatgcccgggaaaggcctggagtgcatggggatcatctatcctggtgactctgataccagatacagcccgtccttccaaggccaggtcaccatctcagccgacaagtccatcagcaccgcctacctgcagtggagcagcctgaaggcctcggacaccgccatgtattactgtgcgagactgagttacggtgacttcgtcctagaaaactggttcgacccctggggccagggaaccctggtcaccgtctcctcag

SEQ ID NO: 1065 - DNA, 379 bp, Homo sapiens
  source 1..379: mol_type = other DNA
caggttcagctggtgcagtctggagctgaggtgaaggagcctggggcctcagtgaaggtctcctgcaaggcttctggttacacctttagccactatggtatcagctggctgcgacaggcccctggacaagggcttgagtacatggggtggatcaatgcttacaaaggtaacacaaactatgcgcagaagttccaggatagagtcaccattaccacagacacatccacgagcacagcctacatggaactgaggagcctgacatctgacgacacggccgtctattactgtgccagagatctcgtctggggcgactcacctgctatcccctccaaatggatcgacccctggggccagggaaccctcgtcaccgtctcctcag

SEQ ID NO: 1066 - DNA, 370 bp, Homo sapiens
  source 1..370: mol_type = other DNA
gaggtgcacctggtggagtctgggggaggcttggtccagcctggggggtccctgagactctcctgtgcaacctctggattcacctttgatacctattccatggcctgggtccgccaggctccagacaaggggctggagtgggtggccaacatgaagcacgatggaagtgagaaaaactatgtggattctgtgaagggccggttcaccatctccagagacaacgccaggaattccctctttctacaaatgaacagcctgagagtcgaggattcggctctttactactgtgcgagattgctttcttatgaaattagtacttatcgtcccctagactcctggggccagggaaccctggtcaccgtctcctcag

SEQ ID NO: 1067 - DNA, 388 bp, Homo sapiens
  source 1..388: mol_type = other DNA
caggtgcagctgcaggagtcgggcccaggactggtgaagccttcggagaccctgtccctcacttgcgctgtctctgattactccatcagcagtggttactacttgggctggatccggcagcccccagggaaggggctggagtggattgggagtatctatcatagtgggagcacctactacaacccgtccctcaagagtcgagtcaccatatcagtagacacgtccaagaaccagttctccctgaagttgagctctgtgactgccgcagacacggccgtgtattactgtgcgaaacatgggggggctactatgatagtagtggttgccgagtgggccgctcaatacttccaacactggggccagggcaccctggtcaccgtctcttcag

SEQ ID NO: 1068 - DNA, 346 bp, Homo sapiens
  source 1..346: mol_type = other DNA
gaggtgcaactggtggagtctgggggaggcttggtccagcctggggggtccctgagactctcctgtgcagcctctggattcacctttagtaactattggatgacttgggtccgccaggctccagggaaggggctggagtgggtggccaccataaagcaagatggaagtgagaaatactatgtggactctctgaagggccgattcaccatctccagagacaacgcccagaactcactgtatctgcaaatgaacagcctgagagtcgaggacacggctgtgtatcactgtgcgagtctgtgggaggggggctactggggccagggaaccctggtcagcgtctcctcag

SEQ ID NO: 1069 - DNA, 373 bp, Homo sapiens
  source 1..373: mol_type = other DNA
gaggtgcagttggtggagtctgggggaggcttggtccaccctggggggtccctgagactctcctgtgcagcctctggattcacctttagtagctattggatgagctgggtccgccaggctccagggaaggggctggagtgggtggccaacataaagcaagatggaagtgagaaatactatgtggactctgtgaagggccgattcaccatctccagagacaacgccaagaactcactgtatctgcaaatgaacagcctgagagccgaggacacggctgtgtattactgtgcgagacttatgatagcagtgactggtagtcaagaagtgttccccggctactggggccagggaaccctggtcaccgtctcctcag

SEQ ID NO: 1070 - DNA, 376 bp, Homo sapiens
  source 1..376: mol_type = other DNA
gaggtgcaactggtggactctgggggaggcttagtccagcctggggggtccctaagactcacctgtgcagcctctggattcacttttagtagttattggatgagctgggtccgccaggctccagggaaggggctggagtgggtggccaacataaagccagatggaagtgagaagaattatgtggactccgtgaagggccgattcaccatttatagagacaacgcctggaggtcattgtccctgcagatgaacagcctaagagacgacgacacggctgtatattactgtgtgagagactactgtaatggcgatggttgttcccgtgaatcttggggtgacttctggggccagggaaccctggtctccgtctcctcag

SEQ ID NO: 1071 - DNA, 373 bp, Homo sapiens
  source 1..373: mol_type = other DNA
caggtgcagctgcaggagtcgggcccaggactggtgaagccttcacagaccgtgtccctcacctgcagtgtctctggtggctccatcagcagtggtacttacgactggagctggatccggcagcccgccgggaagggactggagtggattgggcgtatatataccagtgggaacaccaactacaatccctccctcaagagtcgcgtcaccatatcagtggacacgtccaagaaccacttctccctgaaactaacttctgtgaccgccgcagacacggccatatattactgtgcgaggagtctttcgatttttggagttgttaggcccgcttttgatgtctggggcccagggacaatggtcaccgtctcttcag

SEQ ID NO: 1072 - DNA, 378 bp, Homo sapiens
  source 1..378: mol_type = other DNA
gaggtgcagctggtggagtctgggggaggcttggtccagcctggggggtccctgagactctcctgtgcagtttctggactcaccgtcagtagcaactacatgagctgggtccgccaggctccagggaaggggctggagtgggtctcagtaatttatagcggtagtggcacatattacgcagactccgtgaagggcagattcaccatctccagagacaattccaagaacacactatatcttcaaatgaacagcctgagagccgaggacacggctgtgtattactgtgcgagagatcggagaagtagtggctggtacgacggtgcctacaactactacatggacgtctggggcaaagggaccacggtcaccgtctcctca

SEQ ID NO: 1073 - DNA, 370 bp, Homo sapiens
  source 1..370: mol_type = other DNA
caggtccagctggtgcagtctggggctgaggtgaagaagcctgggtcctcggtgagggtctcctgcaaggcttctggaggcaccttcagcagcaatggtatcgcctgggtgcgacaggcccctggacaagggcttgagtggatgggagggatcatccctgtttttggtacaacaaagtacgcacagaagttccagggcagagtcacaattaccacggacgaatccacgagcacagcctacatggaactgagcagcctgagatctgatgacacggccgtgtattactgtgcgagagccgtccttagcgtggagggggagttactgggacttgactactggggccagggagccctggtcaccgtctcctcag

SEQ ID NO: 1074 - DNA, 376 bp, Homo sapiens
  source 1..376: mol_type = other DNA
caggtgcagctgcaggagtcgggcccaggacaggtgaagccttcggagaccctgtctctcacctgcactgtctctggtggctccattagtagttactactggcactggatccggcagtccgccgggaagggactggagtggattgggcgtgtctatagcagtgggaacatcaaatacaacccctccctcgagagtcgagtcaccgtgtcactagacgcgtccaagaaccagctcttcctgagactgagctctgtgaccgccacggacacggccgtatatttctgtgcgagagagggtagttcctgtgatgaggccaagtgcgccgagggctcgtttgactgctggggccagggaaccctggtcaccgtctcctcag

SEQ ID NO: 1075 - DNA, 346 bp, Homo sapiens
  source 1..346: mol_type = other DNA
gaggtgcagctggtggagtctgggggaggcttggtccagcctggggggtccctgagactctcctgtgcagcctctgggttcagctttagtagttcttggatggactgggtccgccaggctccagggaaggggctggagtgggtggccactttaaggcaagatggaagtgagatatactatgtggactctgtgaagggccgattcaccatctccagagacaacgccaagagctcgctgtatctgcaaatgaacagcctgagagccgaggacacggctgtgtattactgtgcgaatctgtgggaggggggctactggggccagggaaccctggtcaccgtctcctcag

SEQ ID NO: 1076 - DNA, 385 bp, Homo sapiens
  source 1..385: mol_type = other DNA
gaggtgcaactggtggactctgggggaggcttagtccagccgggggggtccctgagactctcctgtgcagcctctggattcaattttaataattattggatgagttgggtccgtcaggctccagggaagggcctggagtgggtggccaatatcaacccagatggaagtaagacgaattatgtggactccgtgaagggccgattcaccatctcaagagacaacacctggaggtcagtgtctctgcagatgaacagcctaagagacgacgacacggctatatattactgtgtgagagacttttgtaatggtgataggcctgcaacttgttcccgtgactcttggggtgactactggggccagggaacccaggtctccgtctcctcag

SEQ ID NO: 1077 - DNA, 369 bp, Homo sapiens
  source 1..369: mol_type = other DNA
gaggtgcaactattggagtctgggggaggcttggtacagcctggggggtccctgagactctcctgtgcagcctctggattcacctttaataattatgtcatgacctgggtccgccaggctccagggaagggactggagtgggtcgcaagtattagtggaagaagtgatgccacatactacgcagactccgtgaagggccggttcaccgtctccagagacaactccaagagtacctcttatctccaaatgagcagcctgagagccgaggacacggccgtatattattgtgcgaaagattggaaagggaaccagtgtgatggtgactgcttgtcacattggggccagggaaccctggtcaccgtctcctca

SEQ ID NO: 1078 - DNA, 376 bp, Homo sapiens
  source 1..376: mol_type = other DNA
caggtgcagttgcaggagtcgggccccggactggtggagccttcggagaccctgtctctcacctgcactgtctctggtggctccattggtagttactactggcactggatccggcagcccgccgggaagggactggagtggattgggcgtgtctatagcaatgggcgcatcaaatacaatccctcactcgagagtcgagtcaccgtgtcagtagacgcgtccaagaaccagttcttcctgagactgaactctgtgactgccacggacacggccgtctattactgtgcgagagagggtagttcctgtgatgaggccaagtgcgccgagggctcgtttgactgctggggccagggaaccctggtcaccgtctcctcag

SEQ ID NO: 1079 - DNA, 357 bp, Homo sapiens
  source 1..357: mol_type = other DNA
caggtgcagctggtgcagtctggggctgaggtgaagaagcctggggcctcagtgaaggtctcctgcaaggcttctggatacaccttcaccggctactatatgcactgggtgcgacaggcccctggacaagggcttgagtggatgggatggatcaaccctaatactggtgacacaaagtatgcacagaagtttcaggactgggtcaccatgaccagggacacgtccatcagtacagcctacatggagctgaacaggctgagatctggcgacacggccgtctattattgtgcgaggataattagcaggtccagcggtctggacgtctggggccaagggaccacggtcaccgtctcctca

SEQ ID NO: 1080 - DNA, 367 bp, Homo sapiens
  source 1..367: mol_type = other DNA
caggtgcagctggtggagtctgggggaggcgtggtccagcctgggaagtccctgagactctcctgtgcagcctctggattcaccttcagtaaccatgctatgcactgggtccgccaggccccaggcaaggggctggagtgggtggcaattatatcatatgaaggaagcaataaatactacggagactccgtgaagggccgattcaccatctccagagacaattccaagaacaccctgtatctgcaaatgaacagcctgagagctgaggacacggctatgtatttctgtgcgagagataaacccattgaactggtgatccatgctcttgaccattggggccagggaaccctggtcaccgtctcctcag

SEQ ID NO: 1081 - DNA, 361 bp, Homo sapiens
  source 1..361: mol_type = other DNA
caggtgcagctggtggagtctgggggaggcgtgatccagcctgggaggtccctgagactctcctgtgcagcctctggattcaccttcagtaggtacgccatgcactgggtccgccaggctccaggcaaggggctggagtgggtggcagtgatattatatgatgggaatagtaaatactatgcagactccgtgaagggccgattcaccatctccagagacgattccaagaataaggtgtatttgcaaatgaacagtctgagaggtgaggacacggctgtgtatcactgtgcgaaagatcctgaatatagtgcctacgaagacgtttactggggccagggaaccctggtcaccgtctcttcag

SEQ ID NO: 1082 - DNA, 372 bp, Homo sapiens
  source 1..372: mol_type = other DNA
caggtccagcttatgcagtctggggctgaggtgaaaaagcctggggcctcagtgaagatttcctgcaggccttctggatacaccttcggtagacatgctatacactgggtgcgccaggcccccggacacaggcctgagtggatgggatggatcaacggtgccaatgatcacacaaaatatgctcagaagttccaggtcagagtcaccatctcgaggaacacatcagcgagcacagcatatatggagttgcgcagcctgcggcctgaagacacggctatttactactgtgcgagagatctgtggggctatggcagtggtgatccagatgctttggatatgtggggccaagggacaatggtcaccgtctcttca

SEQ ID NO: 1083 - DNA, 381 bp, Homo sapiens
  source 1..381: mol_type = other DNA
caggttcaattggtgcagtctgggactgaggtgaagaagcctggggcctcagtgaaggtctcctgcaaggctgctggtcacacctttcccagtaatggtctcagttgggtgcgacaggcccctgggcgagggctcgagtggatgggatggatcagcgttaacagtcatcagacatactatgcagagaacttccaggccagagtcaccatgaccacagacacatccacgagcactgcctacatggagctgaggagcctgagatctgacgacacggccgtgtattactgtgcgacagatggggactatgataatagtggccactggcgggggggccccggagaagactactggggccagggaaccctggtcaccgtctcctca

SEQ ID NO: 1084 - DNA, 381 bp, Homo sapiens
  source 1..381: mol_type = other DNA
caggtgcagctggtggagtctgggggaggcgtggtccagcctgggaggtccctgagactctcctgtgtagcgtctggattcaccttcaattactatggcatgcactgggtccgccaggccccaggcaaggggctggagtgggtggcagttatatggtacgatggaagtaataaagactatgcagaatccgtgaagggccgattcaccatctccagagacaattccaagaacacgctgtatctgcaaatgaacaggctgagagccgaggacacggctgtgtattactgtgcgagaggacccgttgattacgatatcttgactggttatgtggactacggtatggacgtctggggccaagggaccacggtcaccgtctcctca

SEQ ID NO: 1085 - DNA, 361 bp, Homo sapiens
  source 1..361: mol_type = other DNA
gacgtgcaggtgttggagtctgggggaggcttggtacagcctggggggtccctgagactctcctgtgcagcctctgggttcacctttaacaggtataccatgacctgggtccgccaggctccagggaaggggctggagtgggtcgcagctattagtagtagtgcaggaaccacacactacggagcctccgtgaagggccggttcaccatctccagagacaattcccagaatatgttgtttctgcaaatgagcagcctgagagtcgaggacaccgccgtatattattgtgcggtccttaacagtggctggtactcctactttgactactggggccaggggaccctggtctccgtctcctcag

SEQ ID NO: 1086 - DNA, 394 bp, Homo sapiens
  source 1..394: mol_type = other DNA
caaatgcagcttgtgcagtctgggcctgaggtgaagaagcctgggacctcagtgaaagtctcctgcaaggcttctggattcacctttattagttctgctgtacagtgggtgcgacaggctcgtggacaacgccttgagtggataggatggatcgtcgttggcagtggtaacacaaactacgaacagaaattccaggaaagagtcaccattaccagggacatgtccacaagcacagcctacatggagctgagcagcctgagatccgaggacacggccgtgtattactgtgcggcagatcttcgggggggatcccgggagtattactatgatagtagtggttattattggtggttcgacccctggggccagggaaccctggtcaccgtctcctcag

SEQ ID NO: 1087 - DNA, 382 bp, Homo sapiens
  source 1..382: mol_type = other DNA
caggttcagctggtgcagtctgggactgaggtgaagaagcctggggcctcagtgaaggtctcctgccaggcttctgattacacctttaccagttatggtatcagctgggtgcgacaggcccctgggcaagggctcgagtggatgggatggattagtcctcacagtggtaagacatcctatgcacagaagttccagggcagagtcaccatgaccacagacacatccacgagcacagcatacatggaactgaggagcctgagatctgacgacacggccgtgtattactgtgcgagagatggggactatgataataatggccactggcgggggggccccggagaagactactggggccagggaaccctggtcaccgtctcctcag

SEQ ID NO: 1088 - DNA, 381 bp, Homo sapiens
  source 1..381: mol_type = other DNA
caggtccagcttgtgcagtctggggctgaggtgaagaagcctggggcctcagtgaaggtctcctgcaaggcttctggatacaccttcagaaattatgctatgcattgggtgcgccaggcccccggacaaagacttgagtggatgggatgggtcaacaccgacaatggtaacacaaaaccttcacagaagttccagggcagactcacctttacccgggacacatccgcgagcacagcctatatggagctgagtggcctgagatctgaagacacggctgtctatttctgtgcgagaggatacgtgactcatgatttttggagtaattacttcccgtatggaatggacgtctggggccaagggaccacggtcaccgtctcctca

SEQ ID NO: 1089 - DNA, 385 bp, Homo sapiens
  source 1..385: mol_type = other DNA
caggtgcagctggtggagtctggggggggcgtggtccagcctgggaggtccctgagactctcctgtacagcgtctggattcacctttagtgactatggcatgcactgggtccgccaggctccaggcaagggactggagtgggtggcgcttatatggtatgatggaagtcataaagagtatgcagacttcgtgaagggccgcttcaccatctccagagacaattccaaggacacgctgtatctgcaaatgaacagcctgagagtcgaggacacggctatgtattactgtgcgagaggtcccctagattacgatattttgactggttattttaagggattgggctttgactactggggccagggactgctggtcaccgtctcctcag

SEQ ID NO: 1090 - DNA, 376 bp, Homo sapiens
  source 1..376: mol_type = other DNA
caggtgcagctgcaggagtcgggcccaggactggtgaagccttcggggaccctgtccctcacctgctctgtctctggtgactccatcagtagtgataactggtggacttgggtccgccagcccccagggaaggggctggagtggattggggaaatctctcaaagtgggaaaaccaactacaacccgtccctcaagagtcgagtcaccatatcaatagacaagtccaagaaccaattctccctgaacctggcctctgtgaccgccgcggacacggccgtctattactgtgcgagagactataactttggttcggggaactccgcgttctgggcttttgatatctggggcccagggaaaatggtcaccgcctcttcag

SEQ ID NO: 1091 - DNA, 385 bp, Homo sapiens
  source 1..385: mol_type = other DNA
caggtgcagctggtggagtctgggggaggcgtggtccagcctgggaggcccctgagactctcctgtgcagcgtctggattcagcttcagtacctctggcatgcactgggtccgccaggctccaggcaaggggctggagtgggtggcagttatatggcatgatggaagtaatgaattctatgctgactccgtgaagggccgattcatcatctccagagacaattccaagaacacactgtatctgcaaatgcagagcctgagagtcgaggacacggctctgtattactgtgcgagagaccctgacttagattacgatgttgagactggatatttgggaacatactttgactcctggggccagggaaccccggtcaccgtctcctcag

SEQ ID NO: 1092 - DNA, 369 bp, Homo sapiens
  source 1..369: mol_type = other DNA
gaggtgcagctggttgagtctgggggagactgggtgcagcctggggggtccctgagactgtcctgtgcagtctctggatttagatttagtatgtattggatgagctgggtccgccaggctccagggaaggggctggagtgggtggccaacataaaggaagatggaggtaaaatagtctatgtggactctgtgaagggccgattcaccatctctagagacaacgccaaggactcactgtttctgcaaatgaacagcgtgagagccgaggacacggctgtgtattactgtgcgagagatccgtataatcggaacgacggagggttcggtatggacgtctggggccaagggaccacggtcaccgtctcctca

SEQ ID NO: 1093 - DNA, 370 bp, Homo sapiens
  source 1..370: mol_type = other DNA
gaagtacatttggtggagtctgggggaggcttggttcagcctggagggtccctgagactctcctgtgtcgcctctgggttcaccttcagtcgttctgaaatgaactgggtccgccaggctccagggaaggggctggagtgggtctcatacattagtcatactggtaatacgatatactacgcagactctctgaagggtcgattcaccatctccagagacaacgccaagaacacactatatctgcaaatgaatagcctgagagtcgaggacacggctatttattactgtgcgagtacggattggtacatcaacaactgggggtcggcctttgactactggggacagggaatcctggtcaccgtctcctcag

SEQ ID NO: 1094 - DNA, 382 bp, Homo sapiens
  source 1..382: mol_type = other DNA
gaggggcagctgttggagtctgggggaggcttggtacagcctggggggtccctgagactctcctgtgcagcctctggattcacctttagtacctatgccatgaactgggtccgccaggctccagggaaggggctggagtgggtctcaactattagtggtagtggtaacagcacatactacgcagactccgtgaagggccggttcaccatctccagagacaattccaggaacacactatatatgcagatgaagagcctgagagccgaggacacggccaaatattactgcgcgaaaggatactcgaccctatggttcggggagtttttaaccccctacttctttgactcctggggccagggaacccaggtctccgtctcctcag

SEQ ID NO: 1095 - DNA, 382 bp, Homo sapiens
  source 1..382: mol_type = other DNA
cagatgcagctgcaggagtcgggcccaggactggtgaagccttcacagaccctgtccctcaactgcactgtctctggtggttccatcgacagtgacgattactactggagctggatccgccagttcccagggaagggcctggaatggattggatatatctattacagtgggaggaccgactacaacccgtccctcaagagtcgagttaccatatctatagacacgtctgaaaacctattctccctgaggatgagctctgtgactgccgcggacacggccgtgtttttctgtgcgagagagaggaggttcgggaggctgacactttctcgggcggatgcttttgatgtatggggccaagggacaatggtcaccgtctcttcag

SEQ ID NO: 1096 - DNA, 370 bp, Homo sapiens
  source 1..370: mol_type = other DNA
gaggtgcagctgttggagtctgggggaggcttggtacagcctggggggtccctgagactctcctgtgcagcctctggattcagctttagcacctttggcatgagctgggtccgccaggctccagggaaggggctgcagtgggtctcatatattagtgctactggtggtagcacatactacgaagactccgtgaagggccggttcaccatcgccagagacaattccaagaacacactgtatctgcaaatgaagagcctgagagccgaggacacggccgtatattactgtgcgaaatcccagtcgagaagtataccagtggcggggaactttgactactggggccaaggaaccctggtcaccgtctcctcag

SEQ ID NO: 1097 - DNA, 367 bp, Homo sapiens
  source 1..367: mol_type = other DNA
caggtgcagctgctggagtctgggggaggcgtggtccagcctgggaggtccctgagactctcctgtgcagcctctggattcagattcaatatctatgttatgcactgggtccgccaggctccaggcaaggggctggagtgggtggcagtcatatcacggtatggaaccaataaatacttcgcagactccgtgaagggccgattcaccatctcccgggacgattccaagagcaccctctttctacaaatgaacagcctgagaactgaagacacggctgtatattactgtgcgaggggggacggtgacttccatgaggggaactactttgacctctggggcccgggagccctggtcaccgtctcctcag

SEQ ID NO: 1098 - DNA, 373 bp, Homo sapiens
  source 1..373: mol_type = other DNA
gaggtgcagatggtgcagtctggagcagaggtgaaaaagcccggggagtctctgcagatctcctgtaagggttctggatacagttttaccacttactggatcggctgggtgcgccagatgcccgagaaaggcctggagtgggtggcaatcatctatccaggtgactctagtgtcaggtacagcccgcccttccaaggccgggtcaccatctcagccgacaagtccatcagcaccgcctacctccaatggagcaccctgaagccctcggacaccgccatttattactgtgcgagacataggaggtcccgtgaagatcctggctacgaccacgaggactcctggggccagggaaccctggtcaccgtctcctcag

SEQ ID NO: 1099 - DNA, 378 bp, Homo sapiens
  source 1..378: mol_type = other DNA
caggtgcacctggtggagtctgggggaggcgtggtccagcctgggaggtccctgagactctcctgtgtagcgtctggattcaccttcagtagttatggcatgcactgggtccgccaggctccaggcaaggggctggagtgggtggcttttatctggtatgatggaaataataaatactatacagactccctgaagggccgattcaccatctccagagacaattccaagaacactctgtatctgcaaatgaacagcctcagagccgacgacacggctgtgtattactgtgcgagaatagggggtggatcgaggagttatgaggactactactacggcttggacgtctggggccaagggaccacggtcaccgtctcctca

SEQ ID NO: 1100 - DNA, 358 bp, Homo sapiens
  source 1..358: mol_type = other DNA
gaagtgcacctggtggaatctgggggaggcttggtacagcctggcaggtccctgagactctcctgtgcagcctctggattcatctttgatgattatgccatgcagtgggtccggcaagctccagggaagggcctggagtgggtctcaggtattagttggagtagtggcagcatcggctatgcggactctgtgaagggccgattcaccatctccagagacaacgccaagaactccctgtatctgcaaatgaacagtctgagacttgacgacacggccttctatttctgtgcaaggggcgcaggttcggggagttattcggaccaattgggccagggaaccctggtctccgtctcctcag

SEQ ID NO: 1101 - DNA, 355 bp, Homo sapiens
  source 1..355: mol_type = other DNA
caggtgcagctgcaggagtcgggcccaggactggtgaagccttcggggaccctgtccctcacctgcgctgtctctggtgtctccattagtagtagtaactggtggagttgggtccgccagcccccagggaaggggctggagtgggttggggaaatctatcatagtgggagcaccaagttcaacccgtccctcaagagtcgagtcaccatgtcagtggacaagtccaagaaccagttctccctgaacctgagctctgtgaccgccgcggacacggccgtgtattactgtgcgaaagaaacccccagctcggcctttgactactggggcctgggaaccctggtcaccgtcgcctcag

SEQ ID NO: 1102 - DNA, 364 bp, Homo sapiens
  source 1..364: mol_type = other DNA
caggtcaccttgaaggagtctggtcctgtgctggtgaaacccacagagaccctcacgctgacctgcgtcgtctctgggttctctctcagtgatattaaaatgggtgtgggctggatccgtcagccccccgggaaggccctgcagtggcttgcacacattttttcgggtgacgacgtctcctacagcacatctctgaggaacagaatcaccctctccaaggacacctccaacagccgagtagtcctgaccatgaccaacatggaccctcttgacacaggcacctatttctgtgcgcggacgagacaggggatctggggatactttgactactggggccagggaaccctggtcaccgtctcctcag

SEQ ID NO: 1103 - DNA, 355 bp, Homo sapiens
  source 1..355: mol_type = other DNA
gaggtacaattggtggagtctgggggaggcttggtccagcctggggggtccctgagactctcctgtgtagcctctggattcacctttggtaacttttggataaactgggtccgccaggctccagggaaggggctggagtgggtggccaacataaaggacgatggaagtgagaaatactatgcggactctgtgaagggccgagtcaccatctccagagacaacgcccagaacacagcgtatctggaaatgaacagcctgagagtcgaagacacggctctgtatcactgtgcgagagttgagtataactatgcctttgactcctggggccagggaaccctggtcaccgtctcctcag

SEQ ID NO: 1104 - DNA, 370 bp, Homo sapiens
  source 1..370: mol_type = other DNA
caggtgcagctggtggagtctgggggaggcgtggtccagcctgggaggtccctgagactctcctgtgcagcctctggattcaccttcagtaattatggcatgcactgggtccgccaggctccaggcaaggggctggagtgggtggcatttatctcatatgatggaagtaataaatactatgcagactccgtgaagggccgattcaccatctccagagacacctccacaaatacaatatatttacaaatgaacagcctgagacctgaggacacggctatgtattactgtgcgaaagatgcagaatattgtggtggtgattgctacgaggaatacttctggggccagggaaccctggtcgccgtctcctcag

SEQ ID NO: 1105 - DNA, 373 bp, Homo sapiens
  source 1..373: mol_type = other DNA
gaggagcagctggtgcagtctggagcagaggtgaaaaagcccggggagtctctgaagatctcctgtcagggttctgggtacacctttcagaactactggatcggctgggtgcgccaggtggccgggaaaggcctagagtggatgggagtcatctatcctggtgactctgacaccagatatacgtcgtcctttgaaggccaggtcaccatctcagccgacaggtccgtctccaccgcctacctgcactggaacagcctgaaggcctcggacaccgccatgtattactgtgcgagagctctttctcccggcgggtcactccctacaatgactttcgcctcctggggccagggaaccctggtcgccgtctcctcag

SEQ ID NO: 1106 - DNA, 390 bp, Homo sapiens
  source 1..390: mol_type = other DNA
caggtgcagctggtggagtctgggggaggcgtggtccagcctgggaggtccctgagactctcttgtgcagcctctggattcaccttcagtgactatgacattcactgggtccgccaggctccaggcaaggggctggagtgggtggctcttatttcattcgatggaactaataaaaactatgcagactccgtgaagggccgattcaccatctccagagacaatttgtacaacacgttgtttctgcaaatgaacagcctgagagctgaggacacggctgtatatttctgtgcgaaagacttccaaattcatagattacgatattttgactggcaaaagtacaactacggtctggacgtctggggccaagggaccacggtcaccgtctcctca

SEQ ID NO: 1107 - DNA, 358 bp, Homo sapiens
  source 1..358: mol_type = other DNA
caggttcagctggtgcagtctggagctgaggtgaagaagcctggggcctcagtgaaggtctcctgcaaggcttctggttacacctttaccagctatggtatcagctgggtgcgacaggcccctggacaagggcttgagtggatgggatggatcagcgcttacaatggtaacacaaactatgcacagaagctccagggcagagtcaccatgaccacagacacatccacgagcacagcctacatggagctgaggagcctgagatctgacgacacggccgtgtattactgtgcgagaggcgatattttgactggttattatttctactggggccagggaaccctggtcaccgtctcctcag

SEQ ID NO: 1108 - DNA, 385 bp, Homo sapiens
  source 1..385: mol_type = other DNA
caggtgcagctggtggagtctgggggaggcgtggtccagcctgggaggtccctgagactctcctgtgcagcgtctggattcaccttcgatgactatggcatgcactgggtccgccaggctccaggcaaggggctggagtgggtggcacttatatggtatgatggaagtaataaagactatgcagactccgtgaagggccgattcaccatctccagagacaattccgagaacacgctgtatctgcacatgaacagcctgagagccgaggacacggctgtttattactgtgcgagaggacccctagattacgatgttttgactggttattataagggactgggctttgactactggggccagggaaccctggtcaccgtctcctcag

SEQ ID NO: 1109 - DNA, 382 bp, Homo sapiens
  source 1..382: mol_type = other DNA
caggtgcagctggtggagtctgggggaggcgtggtccagcctgggaggtccctgagactctcctgtgcagcgtctggattcatattcagtaactatggcatgcactgggtccgccaggctccaggcaaggggctggagtgggtggcagttatatggtatgatggaagtaataaagactatgcagactccgtgaagggccgattcaccatctccagggacaattccaagaacaccgtgtatctgcaaatgaacagcctgagagccgaggacacggctgtgtattactgtgcgagaggtcccacaaattttgatattttgactggttataaggagtcctattttgactactggggccagggaaccctggtcaccgtctcctcag

SEQ ID NO: 1110 - DNA, 390 bp, Homo sapiens
  source 1..390: mol_type = other DNA
caggtgcagctggtggagtctgggggaggcgtggtccagcctgggacgtccctgagactctcctgtgcagcctctgaattcaccctcagtcgttatggcatgcactgggtccgccaggctccaggcaaggggctggagtgggtggcagtcatatcagatgatggaggtaatcaatactatgcagactccgtgaagggccgattcaccgtctccagagacaattccaagaactcactttatctgcaaatgaacagcctgagacttgaggacacggctgtgtattactgtgcgaaagacctccaaaggcatagattaaagtattttgactggcaaaagtaccactacggtatggacgtctggggccaagggacggcggtcaccgtctcctca

SEQ ID NO: 1111 - DNA, 364 bp, Homo sapiens
  source 1..364: mol_type = other DNA
caggtgcagctggtggagtctgggggaggcgttgtccagcctgggaggtccctgagactctcctgtgcagcctccggattcaggttcagtaggtatgctatgcactgggtccgccaggccccaggcaaggggctgcagtgggtggcagttcaattatatgatggaagcaatgataaatactacgcagactccgtgaagggccgattcaccatctccagagacaatcccaagaacaccctgtatctgcaaatgaacagcctgagacctgaggacacggctgtctattattgtgcgagagatagcgaatatagtgccaaggaatctgcctattggggccagggaaccctggtcatcgtctcctcag

SEQ ID NO: 1112 - DNA, 385 bp, Homo sapiens
  source 1..385: mol_type = other DNA
caggtgcagctggtggagtctgggggaggcgtggtccagcctgggaggcccctgagactctcctgtgcagcgtctggattcagcttcagttcctctggcatgcactgggtccgccaggctccaggcaaggggctggagtgggtggcagttatatggcatgatggaagtaatgatttctatgctgactccgtgaagggccgattcatcatctccagagacaattccaagaacatgctgtatctgcaaatgcagagcctgcgagtcgaggacacggctctatattactgtgcgagagaccctgacttagattacgatgttgaggctggatatttgggaacatactttgactcctggggccagggaaccccggtcaccgtctcctcag

SEQ ID NO: 1113 - DNA, 373 bp, Homo sapiens
  source 1..373: mol_type = other DNA
caggtgcagctggtgcagtctggggctgaggtgaagaagcctgggtcctcggtgaaggtctcctgcaaggcctctggaggcaccttcagcagctatggtatcagctgggtgcgacaggcccctggacaagggcttgagtggatgggagggatcatccccatgcttggtacaacacgttacgcacagaagttccagggcagagtcacgattaccgcggacgaatccacgagcacagcctacatggagctgagcagcctgggatatggtgacacggccgtctattactgtgcgagaggtgttgggatgcgacttttggagtggttaaactggctcgactcctggggccagggaaccctggtcaccgtctccccag

SEQ ID NO: 1114 - DNA, 370 bp, Homo sapiens
  source 1..370: mol_type = other DNA
caggtgcacctcgtggagtctgggggaggcttggtcaggcctggagggtccctgagactctcctgtgtagcctctggattcaccttcagtgactacgccatgagctggatccgccaggctcccgggaaggggctggagtgggtttcattccttagcaatactgctagtgccatatactacgcagactctctgaagggccggttcagcatttccagggacaacgccaagaactcactgtatctgcaaatgaacagcctgagagccgaggacacggccgtctattactgtgtgagagtctacacaatttttggagtggtcaggggctactttgactactggggccagggaacccgggtcaccgtctcctcag

SEQ ID NO: 1115 - DNA, 385 bp, Homo sapiens
  source 1..385: mol_type = other DNA
caggtgcagctggtggagtctgggggaggcgtggtccagcctgggaggtccctgagactctcctgtgcagcgtctggattcatgttcgatgactatggcatgcactgggtccgccaggctccaggcaaggggctggagtgggtggcacttatatggtatgacggaagtaataaagactatgcagactccgtgaagggccgattcaccatctccagagacaattccgagaacacgttgtatttgcagatgaacagcctgagagccgaggacacggctgtttattactgtgcgagaggtcccctagattacgatgttttgactggttattataagggactgggctttgactactggggccagggaaccctggtcaccgtctcctcag

SEQ ID NO: 1116 - DNA, 381 bp, Homo sapiens
  source 1..381: mol_type = other DNA
caggtgcagctgaagcagtggggcgcaggactgttgaagccttcggagaccctgtccctcacctgcggtgtctctggtggatccttgcgtaattatgactggtcctgggtccgccagtccccagaaaagggcctggagtggattggtgaaatcgatgatcgtcgagctaccaactataatccgtctctgcagagtcgactcaccatgtcagtcgacacgtccaagaatcaatactccctgaagttgacctctgtgaccgccacagacacaggtgtctattattgtgcgcgactagggcccactacgcgacaagggcccaccagaagagcaccttccgctatggacgtctggggccaagggaccacggtcaccgtctcctca

SEQ ID NO: 1117 - DNA, 382 bp, Homo sapiens
  source 1..382: mol_type = other DNA
caggtgcagctggtggagtctgggggaggcgtggtccagcctgggaggtccctgagactctcctgtgcagcgtctggattcaccttcagtagctatggcatgcactgggtccgccaggctccaggcaaggggctggagtgggtggcagttatatggtatgatggaagtaataaagactatgcagactccgtgaagggccgattctccatctccagagacaattccaagaacacgctgtatctccaaatgaacagcctgagagccgaggacacggctgtgtattattgtgcgagaggtcccacaaattacgatattttgactggttatcaggaacactactttgactactggggccagggaaccctggtcaccgtctcctcag

SEQ ID NO: 1118 - DNA, 361 bp, Homo sapiens
  source 1..361: mol_type = other DNA
caggtgcagctggtgcagtctggggctgaggtgaagaagcctgggtcctcggtgaaggtctcttgccaggcttctggaggctccttcagcagctatgctgtcagctgggtgcgacaggcccctggacaaggccttgagtggatgggagggatcatcggtatgtttggtacaacaaactacgcacagaagttccagggcagagtcacgattaccgcggacgaattaacgagcacagcctacatggagctgagcagtctgagatctgaggacacggccgtctattattgtgcgagaagtgttggttattacctctcgtaccttgactcctggggccagggaaccctggtcaccgtctcctcag

SEQ ID NO: 1119 - DNA, 391 bp, Homo sapiens
  source 1..391: mol_type = other DNA
caggtgcagctggtgcaatctgggtctgagttgaagaagcctggggcctcagtgagggtttcctgcaaggcttctggatacaccctcagtagttatgctgtgaattgggtgcgacaggcccctggacaaggacttgagtggatgggctggatcaataccatcactggaaagccaacctatgcccaggccttcacaggacgctttgtcttctccttggacacctctgccggcacgtcatatgttcagattaacagcctgaggcctgaggacactgccatttattactgtgcgagagatttgtatgactatagcggcaccccgttcactgctcagggacgaaatgaagcttttgacatctggggccaagggacaatggtcaccgtctcttcag

SEQ ID NO: 1120 - DNA, 370 bp, Homo sapiens
  source 1..370: mol_type = other DNA
gaggtgcagctgttggagtctgggggaggcttggtacagcctggggggtccctgagactctcctgtgcagcctctggattcacctttagcacctttggcatgagctgggtccgccaggctccagggaaggggctgcagtgggtctcatatattagtgctactggtggtagcacatactacgaagactccgtgaagggccggttcaccatcgccagagacaattccaagaacacactgtatctgcaaatgaagagcctgagagccgaggacacggccgtatattactgtgcgaaattccagtcgagaagtataccagtggcggggaactttgactactggggccagggaaccctggtcaccgtctcctcag

SEQ ID NO: 1121 - DNA, 370 bp, Homo sapiens
  source 1..370: mol_type = other DNA
caggtgcagctggtggagtctgggggaggcgtggtccagcctgggaggtccctgagactctcctgtactgtgtctggattcaccttcaggacctatggcatgcactgggtccgccaggctccaggcaagggactggagtgggtggcagttatatggaatgatggaagtaataaatattatagagactccgtgaagggccgattcaccatctccagagacaattccaggaacacgctgtatctgcaaatgaacagcctgagagccgaggacacggctgtgtattactgtgcgagagatcatagtgggagcccgccctggggaggggtctttgaatactggggccagggaaccctggtcaccgtctcctcag

SEQ ID NO: 1122 - DNA, 385 bp, Homo sapiens
  source 1..385: mol_type = other DNA
caggttcagctggtacagtctggtaaagaggtgaagaaccctggggcctcagtgaaggtctcctgcaaggcttctggttacacctttaccagatatggtatcagctgggtgcgacaggcccctggacaaggacttgagtggatgggatggatcagcggttacaatggtcaaacaaactatgcagagaagttccaggatagagtcacgatgaccacagacacatccacgagcacagtttacatggagctgaggagcctgagatctgacgacacggccgtgtattggtgtgtgagagacctggcatggtcggagagtgtgggagctgctgagggactgtattactttggtcactggggccagggaaccctgctcaccgtctcctcag

SEQ ID NO: 1123 - DNA, 367 bp, Homo sapiens
  source 1..367: mol_type = other DNA
cagctgcagctgcaggagtccggctcaagactggtgaagccttcacagaccctgtccctcacctgcgttgtctctggtggctccatcagcagtggtggttactcctggagctggatccggcagccaccagggaagggcctggagtggattgggttcatctatcatagtgggagctactacaatccgtccctcaagagtcgagtcaccatatcagtagacaggtccaagaaccagttctccctggagctgagctctgtgaccgccgcggacacggccgtgtattattgtgccagagagactatggttcagggagttatggggtactttgactactggggccagggatccctggtcaccgtctcctcag

SEQ ID NO: 1124 - DNA, 364 bp, Homo sapiens
  source 1..364: mol_type = other DNA
gaggtgcagctgttggggtctgggggaggcttggtacagcctggggggtctctgagactctcctgtgtagcctctggattcacctttaccaattatgccatgacttgggtccgccaggctccagggaaggggctggagtgggtctcaagtcttactgctgatgaaggtcggagatactacgcagactccgtgaagggccggttcaccatctccagagacaattccaaggacacactttatctgcaaatgaacagcctgagagtcgaggacacggccgtctattactgtgcccccaccgcgggtggttcggggacttattgggttcactcttggggccagggaaccctggtcaccgtctcctcag

SEQ ID NO: 1125 - DNA, 381 bp, Homo sapiens
  source 1..381: mol_type = other DNA
caggtgcagctaaagcagtggggcgcaggactgttgaagccttcggagaccctgtccctcacctgcggtgtctatggtgggtccttgcgtaattatgactggtcttggattcgccagacccctgaaaagggactggagtggattggagaaatcgacgatcgtcgaaatatcaactacagtccgtctctcaagagtcgcctgaccatgtcagtcgacacgtcgaagaaccagtattccctgaggctgacctctgtgaccgccgcggacacgggtgtatactactgcgcgcgactagggcccactacgcgacaagggcccaccagaagagcaccttccgctatggacgtctggggccaagggaccacggtcaccgtctcctca

SEQ ID NO: 1126 - DNA, 358 bp, Homo sapiens
  source 1..358: mol_type = other DNA
caggtacaactggtggagtctgggggaggcgtggtcccgcctgggcagtccctgagactctcctgcgcagcctctaaattcgacttcagtgaccattctatgcactgggtccgccaggctccaggcaaggggctggagtgggtggctcttatttcgtttgatggaagcattacatactacgcagactccgtgaagggccgattcaccatctccagagacaattccaagaacacactttatctccaactaaacagcctgagacctgaggacacctctgtctattattgtacgaggggtagtagtacctcgtggggatttgactattggggccagggaaccctggtcaccgtctcctcag

SEQ ID NO: 1127 - DNA, 370 bp, Homo sapiens
  source 1..370: mol_type = other DNA
gaggtgcagctgttggagtctgggggaggcttggtacagcctggggggtccctgagactctcctgtgtagcctctggattcacctttagcagctatgccatgagctgggtccgccaggctccagggaaggggctggagtgggtctcaggtattagtactagtggtcatagcacatactacgcagactccgtgaagggccggttcaccgtctccagagacaattccaagaacacgctgtatctccaaatgaacagcctgagaggcgaggacacggccgtatattactgcgcgaaaaatgatgattacgtttgggggagttatcggtcccttgactactggggccagggaaccctggtcaccgtctcctcag

SEQ ID NO: 1128 - DNA, 382 bp, Homo sapiens
  source 1..382: mol_type = other DNA
caggtgcagctggtggagtctgggggaggcgtggtccagcctgggaggtccctgagactctcctgtgcagcgtctggattcaacttcaataactatggcatgcactgggtccgccaggctccaggcaagggactggagtgggtggccgttatatggtatgacggaagtaataaagactatgcagactccgtgaagggccggttcaccatctccagagacaattccaagaacactctatatctccacatgaacagcctgagagccgaggacacggctgtatactattgtgcgagaggtcccacagatttcgacattttgactggttatagtgaaacctacattgactactggggccagggaaccctggtcaccgtctcctcag

SEQ ID NO: 1129 - DNA, 390 bp, Homo sapiens
  source 1..390: mol_type = other DNA
caggtccagctggtggagtctgggggaggcgtggtccagcctgggaggtccatgagactctcctgtgcagcgtctggatttgacttcccgaactatgacatgcactgggtccgccaggctccaggcaaggggctggagtgggtggcagttatatggtttgatggaactaatgaacactatgtagactccgtgaagggccgattcaccatctccagagacaattccaggaatacgatgtatctgcaaatgaacagtctgagacctgaggacacggctgtatatttctgtgcgaaagacttccaaatccacagattacggtattttgactggcaaaagtataactacggtctggacgtctggggccaagggaccacggtcgtcgtctcctca

SEQ ID NO: 1130 - DNA, 367 bp, Homo sapiens
  source 1..367: mol_type = other DNA
gaggtgcagctcttggagtctgggggaaccttggttcagcctggggggtccctgagactctcctgtgcagcctcaggattcaccttttccaactatgccatgacctgggtccgccaggctccagggaaggggctggagtgggtctcaagtattagtggtggtggtaccacacactacgcagactccgtgatgggccggttcaccatctccagagacaattccaagaacacactgtatctgcaaatgaacagcctgagagccgaggacacggccctatattactgtgcgaaagattgggagacttcatcttgtaatggtgattgcttaagcaactggggccagggaaccctggtcaccgtctcctcag

SEQ ID NO: 1131 - DNA, 370 bp, Homo sapiens
  source 1..370: mol_type = other DNA
cagatcgaactcgtgcagtctggggctgaggtgaagaggcccggggcctcagtgaaggtttcctgcaaggcttctgggtacagtatcaccaactatgctcactattgggtgcgccaggcccgcggacaaagtcttgagtggatgggacggatcaacactggccatggtgacacactgtattcacacaagttccaggacagagtcaccatcaccagggacatatccgcgaacacaatctacatggagcttcgcagtctgcgatctgaagacacggctgtctatttctgtgcgagagccgatttttgggatagtttttttgggggtcactttgaccactggggccagggaaccctggtcaccgtctcctcag

SEQ ID NO: 1132 - DNA, 370 bp, Homo sapiens
  source 1..370: mol_type = other DNA
cagatcaccttgaaggagtctggtcctacggtggtgaaacccacacagaccctcacgctgacctgcaccttctctgggttctcactcgacactagtggagtgggtgtgggctggatccgtcagcccccaggaaaggccctggagtttcttgcactcattttctgggatggtgctgagcactacatcccatctctgaggaacagactcaccatcaccaaggacaccgccaaaaaccaggtggtcctaacactggccaacatggacccaatggacacaggcacatattactgtgcacacagacgaaggagaggcagtgactggtacacacttgactactggggccagggaaccctggtcaccgtctcctcag

SEQ ID NO: 1133 - DNA, 367 bp, Homo sapiens
  source 1..367: mol_type = other DNA
gaggtgcagctggtggagtctgggggaggcttggtccagcctggggggtccctgagactctcctgtgcagcctctggattcacctttagtagctattggatgagctgggtccgccaggctccagggaaggggctggagtgggtggccaacataaagcaagatggaagtgagaaatactatgtggactctgtgaagggccgattcaccatctccagagacaacgccaagaactcactgtatctgcaaatgaacagcctgagagccgaggacacggctgtgtattactgtgcgagacagtggtccctttactacggtgactacgtgttggactactggggccagggaaccctggtcaccgtctcctcag

SEQ ID NO: 1134 - DNA, 358 bp, Homo sapiens
  source 1..358: mol_type = other DNA
gaagtgaagttggtggagtctgggggaggcttggtgcagcctggcaggtccctgagactctcctgtgcagcctctggtttcatctttgatgattatgccatgcactgggtccggcaagctccagggaagggcctggagtgggtttcaggcattagttggaatagtggggccataggttatgcggcctctgttaagggccgattcaccatctccagagacaacgccaagaactccgtgtttctgcaaatgaacagtctgagaggtgaagacacggccttctattattgtgcaagaggggaaggttcggggagttattctgactactggggccagggaaccctggtcgccgtctcctcag

SEQ ID NO: 1135 - DNA, 361 bp, Homo sapiens
  source 1..361: mol_type = other DNA
caggtgcagctggtgcagtctggggctgaggtgaagaagcctgggtcctcggtgaaggtctcctgcaaggcttctggaggcaccttcagcagctatgctatcagctgggtgcgacaggcccctggacaagggcttgagtggatgggagggatcatccctatctttggtacagcaaactacgcacagaagttccagggcagagtcacgattaccgcggacgaatccacgagcacagcctacatggagctgagcagcctgagatctgaggacacggccgtgtattactgtgcgagaagccactacggtgactacccctgcgctgactactggggccagggaaccctggtcaccgtctcctcag

SEQ ID NO: 1136 - DNA, 352 bp, Homo sapiens
  source 1..352: mol_type = other DNA
caggtgcaactggtgcagtctggggctgaggtgaaggagcctggggcctcagtgaaggtgtcctgcaaggctgttggatacaccttcaccggcttttatatccactgggtgcggctggcccctggacaagggcttcagtggatgggacggatcaaccctcaaactggtggctcagactccacacagaaatttcagggcagggtcgccatgaccagggacacgtccatcaatacagcctacatggagctgagtagactgtcatctgacgacacggccgtttattattgtctgaccccccgagaagagggagttgaccactggggccagggaaccctgttaaccgtctcctcag

SEQ ID NO: 1137 - DNA, 370 bp, Homo sapiens; identical to SEQ ID NO: 1104
  source 1..370: mol_type = other DNA

SEQ ID NO: 1138 - DNA, 370 bp, Homo sapiens
  source 1..370: mol_type = other DNA
gaggtgcagctggtggagtctgggggaggtttggtccagcctggagggtccctgagactttcgtgtgcaggctctgggttcaggttcagtgaccactacatggactgggtccgtcaggctccagggaaggggctggagtgggttggccgtatcagaaagaacgctaacagttacaccacagagtatgccgcgtctgtgaaaggcagattcaccatctcaagagatgattcaaagagctcactgtttctgcaaatgaacagcctggaaaccgaggacacggccgtgtattactgtgctaggaattactatgatggaagtgctttttactttgactactggggccagggaacgctggtcaccgtctcctcag

SEQ ID NO: 1139 - DNA, 376 bp, Homo sapiens
  source 1..376: mol_type = other DNA
caggtgcaactacaagagtcgggcccaggactggtgaagccttcggggaccctgtctctcacctgcgctgtctctggtggctccatcaccactagcgcctggtggaattgggtccgccagaccccagggaaggggctgcagtggcttgcagaaatctctcatagtgggagcgccaattacaacccgtccctcaagagtcggctcaccatttcattagacaagtccaagaaccaattctccctgactttgacctttgtgaccgccgcggacacggccgtctattactgtgcgagagactctaactatgggtcggggaacaccaatttatgggcctttgatatgtggggccgagggacaagcgtcaccgtctcttcag

SEQ ID NO: 1140 - DNA, 373 bp, Homo sapiens
  source 1..373: mol_type = other DNA
gaggtgcaactactggagtctgggggcgacttggtccagccgggggggtccctgagactctcctgtgcagcctctggattcagctttgggaatcattggctgagctgggtccgccaggctccagggaaggggctggagtgggtggcctacataaagcaagatggaactgaaaaagactatgtggactctgtgaagggccgattcaccatctccagagacaacgccaagaactccctgtatctattaatgaacagcctgagagccgaggacacggctgtgtactactgtgcgagacattacttctacgataaaagtactcattaccgtcacttcgactcctggggccagggaaccctggtcaccgtctcctcag

SEQ ID NO: 1141 - DNA, 362 bp, Homo sapiens
  source 1..362: mol_type = other DNA
gaggtgcagttggtggagtctgggggaggcttggtacagcctgggaggtccctgagactctcctgtgcagcctctggattcaccttccgtagttatagcatgaactgggtacgccaggctccagagaaggggctggagtggctcgcttacattagtgagagtagtcttagcatttactacgcagactctgtgaagggccgattcatcatctccagagacaatgccaagaactcagtgcatctgcaaatgaacagcctgagagacgaggacacggctgtctattattgtgcgagatctagggcagcagcttactactacggtctggacgtctggggccaagggaccacgtcaccgtctcctca

SEQ ID NO: 1142 - DNA, 370 bp, Homo sapiens
  source 1..370: mol_type = other DNA
gaggtgcagctgttggagtctgggggaaacttggtacagcctggggggtccctgagcctctcctgtgaagcctctggatttacctttaagaactatgtcatgagttgggtccgccaggctccagggaaggggctggaatgggtcgcaagtataagtggtagtagtctgagtacatattatgtagactccgtgaagggccggttcaccatttccagagacaattccaagaataggctgtatctgcacatgagcagcctgagagccgaggacacggccgtttattactgtgcgctccaagggagaataggcaccagccggtacggcgactttgactcttggggccagggagtcctggtcaccgtctcctcag

SEQ ID NO: 1143 - DNA, 364 bp, Homo sapiens
  source 1..364: mol_type = other DNA
gaggtgctgctggtgcagtctggaccagaatttaaaaagcccggggagtctctgaggatctcctgtgaggcttctggatacagccttatcacctactggatcgcctgggtgcgccagaggcccggtaaaggccttgagtggatggggctcgtctttcctggtgactcggataccagatacagcccgtccttccaaggccaggtcaccatctcagccgacaagtccaccactatcgcctacttgcagtggggcagcctgaaggcctcggacaccgccatgtattactgtgcgaagtcgagagggttcggggaattattcacctttgacgcctggggccagggaaccctggtcaccgtctcctcag

SEQ ID NO: 1144 - DNA, 361 bp, Homo sapiens
  source 1..361: mol_type = other DNA
caggtgcagctgggggagtcgggggggggcgtggcccagcctgggacgtccctgagactctcctgtgaagtgtctggattcagcttcagtacctttgccattcactgggtccgccaggctccaggcaaggggctgcagtgggtggcagttgtgtggtctgatggaactactaaatactatgcggactccgtgaagggccgattcaccatctccagagacaattccaagaacacggtttctctggaaatgaacagcctgagagccgaagacacggctgtctattactgtgcgagagaggtcttatatggcggctactactttgactactggggacagggaaccctggtcaccgtctcctcag

SEQ ID NO: 1145 - DNA, 370 bp, Homo sapiens
  source 1..370: mol_type = other DNA
caggtgcacctcgtggagtctgggggaggcttggtcaggcctggagggtcccttagactctcctgtgtagcctctggattcaccttcagtgactacgccttgagttggatccgccaggctcccgggaaggggctggagtgggttgcattccttagcaatactgccagtgccatatactacgcagactctctgaagggccgcttcagcatttccagggacaacgccaagaactcactctatctgcaaatgaacagcctgagagccgaggacacggccgtctattactgtgtgagagtccacacaatttttggagtggtcaggggctactttgactactggggccagggaacccgggtcaccgtctcctcag

SEQ ID NO: 1146 - DNA, 370 bp, Homo sapiens
  source 1..370: mol_type = other DNA
gaggtgcagttgttggagtctgggggaggcttggtacagccgggggggtccctgagactctcctgtgcagcctctggattcagctttaacacctttggcatgagctgggtccgccaggctccagggaaggggctgcagtgggtctcatatattagtgctactggtggtagcacatactacgaagactccgtgaagggccggttcaccatctccagagacaattccaagaacacactgtatctgcaaatgaacaggctgagagccgacgacacggccatatattactgtgcgaaattccagtcgacatatataccagtggctgggaattttgactactggggccagggaaccctggtgaccgtctcctcag

SEQ ID NO: 1147 - DNA, 365 bp, Homo sapiens
  source 1..365: mol_type = other DNA
ggtggaactggtggagtcagggggaggcttggtgcagcctggagggtccctgacactctcctgtgcagcctctgaattcaccttcagtagttatgaaatgaattgggtccgccaggctccagggaaggggctggagtgggtttcatacattagtagtagtggtgataagatttactacgcagactctgtgaagggccgattcaccatatccagagacaacgccaagaaatcactgtatctgcaaatgaacagcctgagaggcgaggacacggctgtttattactgtgcgcgggtcccatggtatagcgagagccgatttgatgtcgacccctggggccagggaaccctggtcaccgtctcttcag

SEQ ID NO: 1148 - DNA, 385 bp, Homo sapiens
  source 1..385: mol_type = other DNA
caggtgcagctggtggagtctgggggaggcgtggtccagcctgggaggtccctgagactctcctgtgcagcgtctggattcaccttcgatgactatggcatgcactgggtccgccaggctccaggcaaggggctggagtgggtggcacttatatggtatgatggaagtaataaagactatgcagactccgtgaagggccgattcaccatctccagagacaattccgcgaacacgctgtatttgcagatggacagcctgagagccgaggacacggctgtttattactgtgcgagaggtcccctagattacgatgttttgactggttattataagggattgggctttgactactggggccagggaaccctggtcaccgtctcctcag

SEQ ID NO: 1149 - DNA, 358 bp, Homo sapiens
  source 1..358: mol_type = other DNA
caggtgcagctgcaggagtcgggcccaggactggtgaagccttcacagaccctgtccctcacctgcactgtctctggtggctccatcagcagtggtggttactactggagctggatccgccagtacccagggaagggcctggagtggattgggttcatctattacagtgggagcacctactacaacccgtcgctcaagagtcgagttaccatagcagtagacacgtctaagatgcagttctccctgaagctgagctctgtaactgccgcggacacggccgtctattactgtgcgagagacagcagcagctacggcatggacgtctgggggcaagggaccacggtcaccgtctcctcag

SEQ ID NO: 1150 - DNA, 361 bp, Homo sapiens
  source 1..361: mol_type = other DNA
caggtgcagctggtggagtctgggggaggcgtggtccagcctgggaagcccctgagactctcctgtgcagcgtctggattcagcttcagtacttatgccatgcagtgggtccgccaggctccaggcaaggggctggagtgggtggcagttatctgggctgatggaaatactaaatactataaagactccgtgaagggccgattcaccatctccagagacaattccaagaacaccgtgtatctgcaaatgaacagcccgagagccgaggacacggctgtctattactgtgcgagagaatccctatatggtggctactactttgactactggggccagggaaccctggtcaccgtctcctcag

SEQ ID NO: 1151 - DNA, 367 bp, Homo sapiens
  source 1..367: mol_type = other DNA
caggtgcagctggtggagtctgggggaggcgtggtccagcctgggaggtccctgagactctcctgtgcagcgtctggaatcaccttcagtatgtctggcatgcactgggtccgccaggctccaggcaaggggctggactgggtggcagctatatcgtatgatggaagtaatatatactatgcagactccgtgaagggccgattcaccatctccagagacaattccaggaacacgctgtatctgcaaatgaacagcctaagagccgaggacacggctgtgtattactgtgcgagagatctcggtggttattttctccgatactactttgactactggggccagggaaccctggtcaccgtctcctcag

SEQ ID NO: 1152 - DNA, 364 bp, Homo sapiens
  source 1..364: mol_type = other DNA
cagctgcagctgcaggagtcgggcccaggactggtgaagccttcggagaccctgtccctcacctgcactgtctctggtggctccatcagcagtagtagttactactggggctggatccgccagcccccagggaaggggctggagtggattgggagtatctattatagtgggagcacctactacaacccgtccctcaagagtcgagtcaccatatccgtagacacgtccaagaaccagttctccctgaagctgagctctgtgaccgccgcagacacggctgtgtattactgtgcgagccacgtatggttcggggagtttttgtttgactactggggccagggaaccctggtcaccgtctcctcag

SEQ ID NO: 1153 - DNA, 390 bp, Homo sapiens
  source 1..390: mol_type = other DNA
caggtgcagctggtggagtctgggggaggcgtggtccagcctgggacgtccctgagactctcctgtgtagcctctgaattcaccctcagtcgttatggcatgcactgggtccgccaggctccaggcaaggggctggagtgggtggcagtcatatcagatgatggaaataatcaatattatgcagactccgtgacgggccgattcaccatatccagagacaattccaggaagacggtgtttttggaaatggacagtctgagacttgaggacacggctacatattactgtgcgaaagacctccaaagccatagactaaaatattttgactggcaaaggtaccactacgggatggacgtctggggccaagggacaacggtcatggtctcctca

SEQ ID NO: 1154 - DNA, 358 bp, Homo sapiens
  source 1..358: mol_type = other DNA
gaagtgcaattggtggaatctgggggaagcttggtacaacctggcaggtccctgagactctcctgtgcagcctctgggttcacctttgatgattatgccatgcactgggtccgtcaatctccagggaagggcctggagtggatctcaggtatcagttggagtagtggtgccatcggctatgcggactctgtgaggggccgattcgtcatctcaagagacaacgccaagagctccctctatctccaaatgaccagtctgagacgtgacgacacggccttctattactgtgcaagaggcggaggtgcggggagttattcggaccacttgggccagggaaccctggtcaccgtctcctcag

SEQ ID NO: 1155 - DNA, 376 bp, Homo sapiens
  source 1..376: mol_type = other DNA
gaggtgcagctgttggagtctgggggaggcttggttcagcctgggtggtccctgagactctcctgtgcagcctctggattcacctttagcagctatgccatgacctgggtccgccaggctccagggaaggggctggagtgggtctcaagtatcagtggcagtggtagtggtggtaccacatactacgcagactccgtgaagggccggttcaccatctccagagacaattccaagaacacggtgtatctgcaaatgaacagcctgagagccgaggacacggccgcatattattgtgcgaaagattgggagaaatcatcttgtgaaggtgaatgcttaaattattggggccagggaaccctggtcaccgtctcctcag

SEQ ID NO: 1156 - DNA, 381 bp, Homo sapiens
  source 1..381: mol_type = other DNA
caggtgcagctggtggagtctgggggaggcgtggtccagcctgggaggtccctgagactctcctgtgcagcgtctggattcaccttcagttattatggcatgcactgggtccgccaggctccaggcaaggggctggagtgggtggcagttatatggtatgatggaagtaataactaccatgcagactccgtgaagggccgattcaccatctccagagacaattccaagaacacgctgtttctgcaaatgaacagcctgagagtcgaggacacggctgtgtattactgtgcgagaggacccgttgattacgatattgagactggttatttggactacggtatggacgtctggggccaagggaccacggtcaccgtctcctca

SEQ ID NO: 1157 - DNA, 361 bp, Homo sapiens
  source 1..361: mol_type = other DNA
caggtgcacctggtggagtctgggggaggcgtggtccagcctgggaggtccctgagactctcctgtgcagcctctggattcaccttcagtaactatggcatgcactgggtccgccagcctccaggcaaggggctggagtgggtggcggttatatcatatgatggaaacaacaaatactatccagcctccgtaaagggccgattcaccatctccagagacaattccaagaacacgctgtatctgcaaatgaacagcctgagaggtgaagacagggctgtgtattactgtgcgaaagatctgggaatcttagcagctggtacggactactggggccagggaaccccggtcatcgtctcctcag

SEQ ID NO: 1158 - DNA, 370 bp, Homo sapiens
  source 1..370: mol_type = other DNA
gaggtgcagctggtggagtctggaggaggcttgatccagcctggagggtccctgagactctcctgtgcagcctctggattcagctttagtcacagctacttgagctgggtccgccaggctccagggaaggggctagagtgggtctccagtatgcatatcggtgatagtacatactacgcagagtccgtgaagggccgattcaccatctccaaagacaactccaagaacacgctgcatcttcaaatgaacaacctgagagccgaagacacggccgtgtattactgtgcgagagatcctgggtttggtggcgcagcgggcaacaactggttcgacccctggggccggggaacccaggtcatcgtctcctcag

SEQ ID NO: 1159 - DNA, 385 bp, Homo sapiens
  source 1..385: mol_type = other DNA
caggtgcagctggtggagtctgggggaggcgtggtccagcctgggaggtccctgagactctcctgtgaagcgtctggattcaccttcagtgactatggcatgcactgggtccgccaggctccaggcaaggggctggagtgggtggcacttatatggtatgatggaagtaataaagactatgcagactccgtgaagggccgattcaccatctccagagacaattccaagaatacactgtatctgcaaatggacagcctgagagccgaggacacggctgtgtatttttgtgcaaaaggtcccctagactacgatattttggctggttattataagggcttgggctttgactactggggccagggaaccctggtcaccgtctcctcag

SEQ ID NO: 1160 - DNA, 364 bp, Homo sapiens
  source 1..364: mol_type = other DNA
gaggtgcagctggtggagtctgggggaggcttggtccagcctggggggtccctgagactctcctgtgtagcctctggattcacctttaggagctattggatgacctgggtccgccaggctccagggaaggggctggagtgggtggccaacataaaccaagatggaagtgggaaagagtatgtggactctgtgaagggccgattcaccatttccagagacaacgccgagaactcactgtatctacaaatgaacagcctgagagccgaggacacggctgtgtattactgtgcgagagacccatattcggatatctatggtgcttttgatatttggggccaagggacagtggtcaccgtctcttcag

SEQ ID NO: 1161 - DNA, 388 bp, Homo sapiens
  source 1..388: mol_type = other DNA
caggtgcagctggtgcaatctgggtctgagttgaagaagcctggggcctcagtgagggtttcttgcaaggcttctggatacaccttcagtagtcatgctatgaattgggtgcgacaggcccctggacaaggacttgagtggatgggctggatcaataccatcactggaaagtcaacctatgcccaggccttcacaggacgctttgtcttctccttggacacctctgccggcacgtcatatgttcagatcagtagcctgagacctgaggacactgccatttattattgtgcgagagatttgtacgactatagcggcaccccgttcactgctcaaggacgaaatgaagcttttgacatctggggccaagggacaatggtcaccgtctctt

SEQ ID NO: 1162 - DNA, 382 bp, Homo sapiens
  source 1..382: mol_type = other DNA
caggtccagctggtggagtctgggggaggcgtggtccagcctgggaggtccctgagactctcctgtgcagcgtctggattcaccttcaataactatggcatgcactgggtccgccaggctccaggcaaggggctggagtgggtggcagtcatatggtatgatggaagtaataaagactatgcagactccgtgaagggccgattaaccatctccagagacaattccaagaaaatgttgtttctgcaaatgaacagcctgagagccgaggacacggctgtgtattactgtgcgagaggtcccacagatttcgatattgaggctggttataaggaacactaccttgactactggggccagggaaccctggtcaccgtctcctcag

SEQ ID NO: 1163 - DNA, 370 bp, Homo sapiens
  source 1..370: mol_type = other DNA
gaggtgcagctggtggagtctgggggagacttggtaaaaccagggcggtccctgagactctcctgtataggttctggattcacctttggtgattatggaatgagctggttccgccaggctccagggaaggggctggaatggctaggtttcattagaaggagagctaatgatgggacaacagaatacgccgcgtctgtgaaaggcagattcaccgtctcaagagatgattccaaaagcatcgcctatctgcaattgaccagcctgaaaaccgaggacacagccatttattactgttctagatccgatggtggctacgatagggaattctttgactactggggccagggaaccctggtcaccgtctcctcag

SEQ ID NO: 1164 - DNA, 361 bp, Homo sapiens
  source 1..361: mol_type = other DNA
caggtgcagctggtggagtctgggggaggcgtggtccagcctgggaagtccctgagactctcctgtgcagcgtctggattcagcttcagtacttatggcatgcactgggtccgccaggctccaggcaaggggctggagtgggtggcagttatctggtatgatggaaatactaaatactatgcagactccgtgaagggccgattcaccatctccagagacaattccaagaacacggtgtatctgcaaatgaacagcccgagagccgaggacacggctgtgtattactgtgcgagagaatccctatatggtggctactactttgactactggggccagggaaccctggtcaccgtctcctcag

SEQ ID NO: 1165 - DNA, 381 bp, Homo sapiens
  source 1..381: mol_type = other DNA
caagtccaacttgtgcagtctggggctgaggtgaagaagcctggggcctcagtgaaggtttcctgcaaggcttctggatacaccttcagaaattatgctttgcattgggtgcgccaggcccccggacaaaggcttgagtggatgggatgggtcaacactgccaatggaaacacaaaatcttcacagaagttccagggcagactcacctttacccgggacacatccgcgagtacagcctatatggagctgagcagcctgagatctgaagacacgggagtctatttctgtgcgagaggatacgtgactcaggatttttggagtaattatttcccctacggaatggacgtctggggccaagggaccacggtcaccgtctcctca

SEQ ID NO: 1166 - DNA, 355 bp, Homo sapiens
  source 1..355: mol_type = other DNA
gaggtgcagctggtggagactgggggaggcttggtccagccgggggggtccctgagactctcctgtgcagcctctggattcacgtttagtgactattggatgacttggttccgccaggctccagggagggggctggagtgggtggccaacatcaagggagatggaagtgagaagtactatgtggactctgtgaagggccgatttaccatctccagagacaacgccgagaactcagtgtatctgcaaatgaacagtctgagagacgaggacacggctgtgtattactgtgcgagagacacccttagaatacttcagggttcctggggccagggaaccctggtcaccgtctcctcag

SEQ ID NO: 1167 - DNA, 379 bp, Homo sapiens
  source 1..379: mol_type = other DNA
caggttcagctggtgcagtctggaggtgaggtgaaggagcctggggcctcagtgaaggtctcctgcaagacttctgattacacctttagcaactatggtatcagttgggtgcggcaggcccctggacaagggcttgagtggataggatgggtcagcggtgacaatggtaacacaaactatgcacagaaactccaggacagagtcactttgaccacagacacatccacgagcacatcctacatggaactgaggagcctgagatctgacgacacggccgtgtattattgtgtgagagatcttaactggggaagtggtgccaacgacccgacccactactttgactactggggccagggaatcctggtcactgtctcctcag

SEQ ID NO: 1168 - DNA, 382 bp, Homo sapiens
  source 1..382: mol_type = other DNA
caggtgcacctgctggagtctgggggaggcgtggtccagcctgggatgtccctgagactctcctgtgcagcctctggattcaccttcaacacttatggcatgcactgggtccgccaggctccaggcaaggggctggagtgggtggcagttatatcatatgatggaagtaaaaaatactatgcagactccgtgaagggccgattcaccatctccagagacaattccaagaacacgctgtctctgcaaatgaacagcctgagagctgaggacacggctatgtattactgtacgaaagattttacgtattactataattcggggagtgatcatctgggttactttgactactggggccagggaaccctggtcaccgtctcctcag

SEQ ID NO: 1169 - DNA, 385 bp, Homo sapiens
  source 1..385: mol_type = other DNA
caggtttacctggagcagtctggacctgaggcgaagacgcctggggcctcagtgaaagtctcctgcaagacttctggtcacacctttatgaagtatggtattagttgggtgcgacaggcccctggagtcgggcttgagtggatgggatggatcagctctgtcgatggaaacacaaattatggacagaagttccagggcagaatcaccatgaccatagacacatccacgagcacagcctacgtggaactgaggagcctgagatctgacgacacgggcgtgtatttctgtgcgagagatctgccgtggggaaattgtggcggaatttgctccacgttgtattactttgagtcatggggccagggaaccctggtcaccgtctcctcag

SEQ ID NO: 1170 - DNA, 381 bp, Homo sapiens
  source 1..381: mol_type = other DNA
caggtgcacctggtggagtctgggggaggcgtggtccagcctgggaggtccctgagactctcctgtgcagcgtctggattcaccttcaataactatggcatgcactgggtccgccaggctccaggcaaggggctggagtggatggcagttatatggtatgatggaagtaatgaagactatgcagacgccgtgaagggccgattcaccatctccagagacaattccaagaacacactgtatctgcaaatgaacagcctgagagccgaggacacggctgtgtattactgtgcgagaggacccgttgattacgatattttgactggttatttggactacggtatggacgtctggggccaagggaccacggtcaccgtctcctca

SEQ ID NO: 1171 - DNA, 391 bp, Homo sapiens
  source 1..391: mol_type = other DNA
caggtgcagctggtgcaatctgggtctgagttgaagaagcctggggcctcagtgagggtttcctgcaaggcttctggatacaccttcagtagttatgctatgaattgggtgcgacaggcccctggacaaggacttgagtggatgggctggatcaataccatcactggaaagccaacctatgcccaggccttcacaggacgctttgtcttctccttggacacctctgccggcacgtcatatgttcagatcagcagcctgaggcctgaggacactgccatgtattactgtgcgagagatttgtacgactatagcggcaccccgttcactgctcaaggacgaaatgaagcttttgacatctggggccaagggacaatggtcaccgtctcttcag

SEQ ID NO: 1172 - DNA, 362 bp, Homo sapiens
  source 1..362: mol_type = other DNA
ggtgcagttggtgcagtctggggctgaagtgaagaagcctggggcctcagtgaaggtctcctgcaaggcttctggatacaccttcaccggctactatatacactgggtgcgacaggcccctggacaagggcttgagtggatgggacggatcaaccctaacactggtggcaccaactctgcacagaaatttcggggcagggtcaccatgaccagggacacgtccctcagcacagcctatatggacatcagcacgctgagatctgacgacacggccgtatattactgcgcgagaagcggtcgactatccccggtccactggttcgacccctggggccagggaaccctggtcaccgtctcctcag

SEQ ID NO: 1173 - DNA, 361 bp, Homo sapiens
  source 1..361: mol_type = other DNA
caggtgcagctggtgcagtctggggctgaggtgaagaagcctgggtcctcggtgaaggtctcctgcaagacttctggaggcactttcagcagctatggcatcagctgggtgcgacaggcccctggacaagggcttgagtggatgggagagatcattggtatgtttggaacagcaaactacgcacagaagttccagggcagagtcacgattaccgcggacgaattaacgagcacagcctacatggagctgagcagcctgagatctgaggacacggccgtgtattactgtgcgagaagccactacggtgactacccctgcgctgactactggggccagggaaccctggtcaccgtctcctcag

SEQ ID NO: 1174 - DNA, 387 bp, Homo sapiens
  source 1..387: mol_type = other DNA
caggtccaacttgtgcagtctggggctgaggtgaagaagcctggggcctcagtgaaggtttcctgcaaggcttctggatacaccttcactcattatgttatacattgggtgcgccaggcccccggacaaaggcttgagtggatgggatggatcaatgctgacagtggtgccacaaaatattcagagaagttccaggacaaagtcaccattaccagggacacattcgcggacacagcctacatggaactgagcagcctgagatctgaagacacggctgtctattactgtgcgagagaacttaattcggcactactccgatattttgactggttgcgagctgacggtctggacgtctggggccaagggaccacggtcaccgtctcctca

SEQ ID NO: 1175 - DNA, 358 bp, Homo sapiens
  source 1..358: mol_type = other DNA
gaagtgcagctggtggagtctgggggaggcttggtgcagcctggcaggtccttgagactctcctgtgcagcctctggtttcacctttgatgattttgccatgcactgggtccggcaagctccagggaagggcctggagtggctttcaggcattagttgggatagtggggccataggctatgcggcctctgtggagggccgattcaccatctccagagacaacgccaagaactccctgtttctgcaaatgaacagtctgagagctgaagacacggccttctatttctgtgcaagaggggcaggttcggggagttattctgactactggggccagggaaccctggtcgccgtctcctcag

SEQ ID NO: 1176 - DNA, 381 bp, Homo sapiens
  source 1..381: mol_type = other DNA
caggtccaacttgtgcagtctggggctgaggtgaagaagcctggggcctcagtgaaggtttcctgcaaggcttccggatacacctttgttacttatgctattcattgggtgcgccaggcccccggacaaaggcttgagtggatgggatggatcaacgctgccaatggtaacacaaaatattcacagaagttccaggatagagtcaccctagccagagacacatccgcgggctcagtccacatggaactaagcagcctgagatctgaagacacggctgtatattactgtgcgaggggatccgtgacttccgatttttggagtgcttattttcccaacggcatggacgtctggggccaagggaccacggtcaccgtctcctca

SEQ ID NO: 1177 - DNA, 370 bp, Homo sapiens
  source 1..370: mol_type = other DNA
gaggtgcagctggtggagtctgggggaggcttggtccagtcgggggggtccctgagactctcctgttcagcctctggattcacatttagtagttactggatgagctgggtccgccaggctccagggaagggtctggagtgggtggccgacataaatgaagatggaagtacgaaatattatgtggactcggtggagggccggttcaccatctccagagacaacggccagacttcactgtatctgcaaatgaacggcctgagagacgaagacacgggtgtatatttctgtgcgagagaccccccgagtacgtcaagtctcgacacgtggttcgacccctggggccagggaaccctggtcaccgtctcctcag

SEQ ID NO: 1178 - DNA, 370 bp, Homo sapiens
  source 1..370: mol_type = other DNA
caggtgcagctggtggagtctgggggcggcgtggtcccgcctggaaagtccctgagactctcctgtgaagcctctggaatcagcttcagtagctatggcatgcactgggtccgccaggctccagggaaggggctggagtgggtggctgttatatcatctgatggaagtgttcaatactatggagactccgggaagggccgattcaccatctccagagacaattccaagaacacactatttctgcaaatgaacagcctgagagctgaggacacggctgtatattactgtgcgaaagatatctcgacttttggactggtcaggaacatctttgacacctggggccagggaaccctggtcaccgtctcctcag

SEQ ID NO: 1179 - DNA, 373 bp, Homo sapiens
  source 1..373: mol_type = other DNA
caggtccagctggtgcagtctggggctgaggtgaagaagcctgggtcctcggtgaaggtctcctgcaagccttctggagtcatcttcagcagcaatgctatcagctgggtgcgacaggcccctggacaagggcttgagtggatgggagggatcatcactatgtttggtccagtaaagtatgcacagaagttccaggacagagtcacgataaccacggacgagtccaagagtacagtctacatggagctgagcagcctgagatctgaggacacggccatatattattgtgcatcctctcagaattactatgatagtagtggttccatgggtttcgacccctggggccagggaaccctggtcaccgtctcctcag

SEQ ID NO: 1180 - DNA, 370 bp, Homo sapiens
  source 1..370: mol_type = other DNA
caggtgcagctgcaggagtcgggcccaggactggtgaagccttcggggaccctgtccctcacctgcgctgtctctggtggctccatcagcagtagtaactggtggagttgggtccgccagcccccagggaaggggctggagtggattggagaaatcaatcatagtgggagcaccaactacaacccgtccctcaagagtcgagtcaccatatcagtagacaagtccaagaaccagttctccctgaagctgagctctgtgaccgccgcggacacggccgtgtattactgtgcgaccatacccaccgactacgatattttgactggttattatagttattggggccagggaaccctggtcaccgtctcctcag

SEQ ID NO: 1181 - DNA, 367 bp, Homo sapiens
  source 1..367: mol_type = other DNA
caggtgcagctgcaggagtcgggcccaggactggtgaagccttcggagaccctgtccctcacctgcgctgtctctggttactccatcagcagtgtttactactggggctggatccggcagcccccagggaaggggctggagtggattgggagtatctatcatagtgggagcacctactacaacccgtccctcaagagtcgagtcaccatatcagtagacacgtccaagaaccagttctccctgaagctgagctctgtgaccgccgcagacacggccgtgtattactgtgcgaggggggtggtggtgactgctattacccactactttgactactggggccagggaaccctggtcaccgtctcctcag

SEQ ID NO: 1182 - DNA, 364 bp, Homo sapiens
  source 1..364: mol_type = other DNA
caggtccaactagtgcagtctggggctgaggtgaagaagcctgggtcctcggtgaaggtctcctgcaaggcttctggaggcatgttcagcagctatgctttcagttgggtgcgacaggcccctggacaagggcttgagtggatgggaggaatcatcggtatgtttggtacagcaaactacgcacagaaattccagggcagactcacgattaccacggacgaattaacgagtacttccttcatggagctgagcagcctgagatctgaggacacggccgtctatttctgtgcgcgagccgtcggctactccttaccctcttactttgactactggggccagggaaccctggtcaccgtcgcctcag

SEQ ID NO: 1183 - DNA, 367 bp, Homo sapiens
  source 1..367: mol_type = other DNA
gaggtgcagttattggagtctgggggaggcttggtacagccgggggggtccctgagactctcctgcacagcctctggattcaccttcagcaaccacgccatcagttgggtccgccaggctccagggaaggggcttgagtgggtctcaagcattagtggtactagtcttagtagatattatgtggactccgtgaagggccggttcaccatttccagagacaattccaagaacacgttgtatctgcaaatgaacagcctgagagtcgaggacacggccatatattactgtgcgaaggaccgaactgtcccagccctagggggctggttcgagcactggggcaagggagtcctggtcaccgtctccacag

SEQ ID NO: 1184 - DNA, 359 bp, Homo sapiens
  source 1..359: mol_type = other DNA
caggtccagctggtgcagtctggggctgaggtgaagaaggctgggtcctcggtgaaggtctcctgcaaggcttctggaggcaccttcagtagatatgctatcagctgggtgcgacaggcccctggacaagggctagagtggatgggagaaatcatccctctctttggcacagtaaattacgcacagaagtttcagggcagagtcacgattaggacggacgaatcaacgagcacagccgacatggagctcagcagcctgagatctgaggacacggccgtgtattattgtgcgaaaaaggggggttcggggagttactactttgactcctggggccagggaaccctggtcaccgtctcctc

SEQ ID NO: 1185 - DNA, 378 bp, Homo sapiens
  source 1..378: mol_type = other DNA
caggtgcagctgcaggagtcgggcccaggactggtgaagccttcggagaccctgtccctcagctgcactgtctctggtggctccatcactagttactattggagctggatccggcagtccgccgggaagggactggagtggattgggcgcatctataccagtgggagcaccaactacaatccctccctcaagagtcgagtcattatgtcagtagacacgtccaagaaccagttgtccctgaacctgagctctgtgaccgccgcggacacggccgtgtacttctgtgcgagagatccggattttagtctggttcggggcccctgggactactacggtgtggacgtctggggccaagggaccacggtcaccgtctcctca

SEQ ID NO: 1186 - DNA, 358 bp, Homo sapiens
  source 1..358: mol_type = other DNA
gaggtgcagctggtggagtctgggggaggcttggtccagcctggggggtccctgagactctcctgtgcagcctctggattcattttcagtagttatgctatgcactgggtccgccaggctccagggaagggactggaatatgtttcagctattagtagtaatgggggtagtacatattatggaaactctgtgaagggcagattcaccatctccagagacaattccaagaacacgctgtatcttcaaatgggcagcctgagagctgaggacatggctgtgtattactgtgcgcggagaagtgggagccgctactactttgactactggggccagggaaccctggtcaccgtctcctcag

SEQ ID NO: 1187 - DNA, 354 bp, Homo sapiens
  source 1..354: mol_type = other DNA
gaggtgcagctggtggagtctgggggaggcttggtccagcctggggggtccctgagactctcttgtacagcctctggattcacctttagttcttattacatgagctgggtccgccaggctccagggaaggggctggagtgggtggccaacataaacgaagatggaggtgacaaattctatgtggactctgtgaagggccgattcaccatctccagagacaacgccaagaactcgctgtatctgcaaatgaacagcctgagagccgaggacacggctgtgtattactgtgcgactgcctgggggatagcagcctttgacttttggggccagggaacccgggtcaccgtctcctca

SEQ ID NO: 1188 - DNA, 364 bp, Homo sapiens
  source 1..364: mol_type = other DNA
caggtgcagctggtggagtctgggggaggcgtggtccagcctggggggtccctgagactctcctgtgcagcctctggattcaccttcagtgactactacatgagctggatccgccaggctccagggaaggggctggagtgggtttcatacattagtagtagtggtagtaccatatactacgcagactctgtgaagggccgattcaccatctccagggacaacgccaagaactcactgtatctgcaagtgaacagcctgagagccgaggacacggccgtgtattactgtgcgagacgggggcagcagctaggagggaactggttcgacccctggggccagggaaccctggtcaccgtctcctcag

SEQ ID NO: 1189 - DNA, 355 bp, Homo sapiens
  source 1..355: mol_type = other DNA
gaggcacagttggtgcagtctgggggaggcttggtccagccgggggggtccctgagactctcttgtatagcctctggattcaagtttagtgattattggatgacctgggtccgccaggctccagggaaggggctggagtgggtggccaacataaagggagatggaagtgagaaatattatgtggactctgtgaagggccgattctccatctccagagacaacgccaagaattcaatgtatctgcaaatgaatagcctgagaaccgaggacacggctgtgtattactgtgcgagagacagtagttggaatccccccgactactggggccagggaaccctggtcaccgtctcctcag

SEQ ID NO: 1190 - DNA, 361 bp, Homo sapiens
  source 1..361: mol_type = other DNA
gaggagcagttggtggagtctgggggaggcttggtccagcccggggggtccctgagactctcctgtgcagcctctggattccacttctatatctacagtatcaattgggtccgccaggctccagggagggggctggagtatgtttcaactattagtggtgatgggcgtcacacatattatgcagagtctgtgaagggcagattcaccatctccagagacaattccaagaacactgtgtatcttcaaatggacaccctgagaaccgaggacacggctatgtattactgtgcgaggccgcttaactggggcggtgatgcttttgaaatctggggccgagggacaatggtcaccgtctcttcag

SEQ ID NO: 1191 - DNA, 363 bp, Homo sapiens
  source 1..363: mol_type = other DNA
aggtgcagctggtggagtctgggggaggcgtggtccagcctgggaggtccctgagactctcctgtgcagcctctggattcaccttcagtagctatttcatgaactgggtccgccaggctccagggaaggggctggagtgggtctcatccattactagtagtggtacttacatatactacgcagactcagtgaagggccgattcaccatctccagagacaacgccaagaactcactgtatctgcaaatgaacagcctgagagccgaggacacggctgtgtattactgtgcgacgtctaccgaggataccctttcgtactactttgactactggggccagggagccctggtcaccgtctcctcag

SEQ ID NO: 1192 - DNA, 373 bp, Homo sapiens
  source 1..373: mol_type = other DNA
caggtccagctggtacaatctggggctgaggtgaagaagcctgggtcctcggtgagggtctcctgcaaggcttctggagacacgctcaggacctctattatcagctgggtgcgacaggcccctggacaagggcttgagtggatgggatcagtcatctttatctttggtacagcaaactacgcacagaggttccagggcagagtcacgattaccgcggacaaggtcacgagcacagccgacttggagttgagcagcctgagatctgaggacacggccgtctatttctgtgcgagagcgaaaatgcctggtgcaggggtccacccctactactttgactcctggggccagggaaccctggtcaccgtctcctcag

SEQ ID NO: 1193 - DNA, 361 bp, Homo sapiens
  source 1..361: mol_type = other DNA
gaggtgcagctggtggagtctgggggaggcttggtccagcctggggggtccctcagactgtcctgtgcagcctctggattcaccttcagtatctatagtatgcactgggtccgccaggctccagggaagggactggaatatgtttcaactattagtggtaatgggggtagcacatattatgcagactctgtgaagggcagattcaccatctccagagacaattccaagaacacgctgcatcttcaaatgggcagcctgagaattgaggacatggctgtatattactgtgcgaggacgcttaattggggcggtgatgcttttgatatctggggccaagggacaatggtcaccgtctcttcag

SEQ ID NO: 1194 - DNA, 378 bp, Homo sapiens
  source 1..378: mol_type = other DNA
caggtgcagctgcaggagtcgggcccaggactggtgaagccttcggagaccctgtccctcacctgcactgtctctggtggctccatcagtagttactattggagctggatccggcagcccgccgggaagggactggagtggattgggcgcatccataccagtgggagcaccaacttcaatccctccctcaagagtcgagtcatcatgtcagtagacacgtccaagaaccaattgtccctgaagctgagctctgtgaccgccgcggacacggccgtgtattactgtgcgagagatccggattttagtctggttcggggcccctgggacttctacggtgtggacgtctggggccaagggaccacggtcaccgtctcgtca

SEQ ID NO: 1195 - DNA, 367 bp, Homo sapiens
  source 1..367: mol_type = other DNA
gaagtgcagctggtggagtctgggggaggcttggtacagcctggcaggtccctgagactctcctgtgcagcctctggattcacctttgatgattatgccatgcactgggtccggcaagctccagggaagggcctggagtgggtctcaggtattagttggaatagtggtagcataggctatgcggactctgtgaagggccgattcaccatctccagagacaacgccaagaactccctgtatctgcaaatgaacagtctgagagctgaggacacggccttgtattactgtgcaaaagatggggattggcagctcgcccgtggctactttgactactggggccagggaaccctggtcaccgtctcctcag

SEQ ID NO: 1196 - DNA, 364 bp, Homo sapiens
  source 1..364: mol_type = other DNA
caggtgcagctgcaggagtcgggcccaggactggtgaagccttcggagaccctgtccctcacctgcactgtctctggtggctccctcagtaattactactggagttggatccggcagcccccaggggggggactggagtgcattggatatatctattacactgggaggaccaagtacaacccctcccttcagagtcgagtcaccatatcagtggacacgtccaacaaccagttctccctaaagttgaactctgtgaccgcagcggacacggccatgtattattgtgcgagagatgtgaccggctatggagccctcaatgctcttgatatctggggccaagggacaatggtcatcgtctcttcag

SEQ ID NO: 1197 - DNA, 376 bp, Homo sapiens
  source 1..376: mol_type = other DNA
gaggtgcagctgttggagtctgggggaggcttggtacagcctggggggtccctgagactctcctgtgcagcctctggattcacctttagcagctatgccatgagctgggtccgccaggctccagggaaggggctggagtgggtctcaactattagtggtagtggtggtagcacatactacgcagactccgtgaagggccggttcaccatctccagagacaattccaagaacacgctgtatctgcaaatgaacagcctgagagccgaggacacggccgtatattactgtgcgaaagctgaatattatggttcggggagttattattggggttactttgactactggggccagggaaccctggtcaccgtctcctcag

SEQ ID NO: 1198 - DNA, 367 bp, Homo sapiens
  source 1..367: mol_type = other DNA
caggtgcagctggtggagtctgggggagacttcgtcaagcctggagggtccctgagactctcctgtgcagcctctggattcaccttcagtgactactacatgagctggatccgccaggctccagggaaggggctggagtgggtttcatacatttctagtgttggtagtaccacatactacgcagactctgtgaagggccgattcaccatctccagggacaacgccaagaactcactgtatctacaaatgaacatcctgagagccgaggacaccgccgtctattactgtgcgaagcccgggtataccaatgcctggactgacgcttttcatatctggggccaagggacaacggtcactgtctcttcag

SEQ ID NO: 1199 - DNA, 364 bp, Homo sapiens
  source 1..364: mol_type = other DNA
caggtccagttggtgcagtctggggctgaggtgaagaagcctgggtcctcggtgaaggtctcctgcaaggcttctggaggcaccttcagcagctatggtttcatctgggcgcgccaggcccctggacaagggctggagtggatgggaggggtcaccggtatgtttggcacagcaaagtacgcacagaagttccagggcagactcacgataaccacggaggaacttacgagcacagcctacatggaagtgagcagcctgagatctgaggacacggccgtctattactgtgcgagagccgtcggctactatttaccctcttactttgactcctggggccagggaaccctggtcaccgtctcctcag

SEQ ID NO: 1200 - DNA, 358 bp, Homo sapiens
  source 1..358: mol_type = other DNA
caggtccagctggtgcaatctggggctgaggtgaagaagcctgggacttcggtgaaggtctcctgcaaggcttctggaggcaccttcagcagatatgttatcaactgggtgcgacaggcccctggacatgggcttgagtggatgggacagatcatccctatctttggtacagcaaactccgcacataagttccggggcagaatcaccatcaccgcggacacatccacgagcacagtctacatggaactgagcggcctcggatctgaagacacggccgtctattattgtgcgggagatcagggaaggaatggattcattgactcctggggccacggaaccctggtcatcgtctcctcag

SEQ ID NO: 1201 - DNA, 361 bp, Homo sapiens
  source 1..361: mol_type = other DNA
gaggtgcaagttgtggagtctgggggaggcttggtacagcctggggggtccctgagactctcctgtgtagcctctggattcagcttcagtgactctaacatgaattgggtccgccaggctccagggaaggggctggaatggctttcatatactgataagaatagtaaaaccatatattatgcagtctctataaagggccgattcaccatttccagagacaatgccaaggattcactgtttttgcaaatgaacagcctgagagccgaggacacggctgtatattactgtgcgagagatgactactatgagagtagcggttatattccctggggccagggaaccctggtcaccgtctcctcag

SEQ ID NO: 1202 - DNA, 361 bp, Homo sapiens
  source 1..361: mol_type = other DNA
gaggagcaactggtggagtctgggggaggcttggtccagccgggggggtccctgagactctcttgtgcagcctctggattcaccttcagcatctattctctgaactgggtccgccaggctccagggaagggactggaatatgtttcaactattagtggtaatgggagaagtacatattatgcaaactctgtgaagggcagattcaccatctccagagacaattccaagaacacagtgtatcttcaaatgagtagcctgagacctgaggacatggctgtgtattactgtgcgaggccgcttaactggggcggtgacgcttttgatatctggggccaagggacaatggtcaccgtctcttcag

SEQ ID NO: 1203 - DNA, 377 bp, Homo sapiens
  source 1..377: mol_type = other DNA
cagctgcagctgcaggagtcgggcccaggactggtgaagccttcggagaccctgtccctcacctgcactgtctctggtggctccatcagtagttactattggagctggatccgacagtccgccgggaagggactggagtggattgggcgcatctttaccagtgggaccaccagctacaatccctccctcaagagtcgagtcaccatgtcgatagacacgtccaagaaccagttgtccctgaaggtgaactctgtgaccgccgcggacacggccgtgtattattgtgcgagagatccggattttagtacggttcggggcccctgggacttctacggtgtggacgtctggggccaagggaccacggtcaccgtctcctc

SEQ ID NO: 1204 - DNA, 370 bp, Homo sapiens
  source 1..370: mol_type = other DNA
gaggtgcagctattggagtctgggggagacttcgtacagcctggggggtccctgagactctcctgtgcagtctctggatttatctttagcagctatgccatgagctggttccgccaggctccagggaagggactggagtgggtctcaacaattagtcctagtggtctgagcacatactacacagactccgtgaagggccggttcaccatctccagagacagttccaagaacacggtgtatttgcaagtgaacagcctgagagccgaggacacggccgtatattactgtgcgaaagatcgcggagtatcacctgctatggggggatacttccaggactggggccagggcaccctagtcaccgtctcctcag

SEQ ID NO: 1205 - DNA, 361 bp, Homo sapiens
  source 1..361: mol_type = other DNA
caggtgcagctggtggagtctgggggaggcttggtcaagcctggagggtccctgagactctcctgtgcagcctctggattcaccttcagtgactactacatgagctggatccgccaggctccagggaaggggctggagtgggtttcatacattagtagtagtggtagtaccatatactacgcagactctgtgaagggccgattcaccatctccagggacaacgccaagaactcactgtatctgcaaatgaacagcctgagagccgaggacacggccgtttattactgtgcgagaggcctcaagggtagcggattcccggccaactactggggccagggaaccctggtcaccgtctcctcag

SEQ ID NO: 1206 - DNA, 373 bp, Homo sapiens
  source 1..373: mol_type = other DNA
gaagtgcagctgttggaatctgggggaggcttggtacagcctggggggtccctgagactctcctgtgcagcctctggattcacctttagcagctatggcatgagctgcgtccgccaggctccagggaagggactggagtgggtctcacatattagtggtggtggtactattacatactacgcggactccgtgaagggccggttcaccatctccagagacaattccaagaacaccctatatgtgcaaatgaacagcctgagagccgacgacacggccgtctattactgtgcgaaagtcgagagttcatcagcaggaggcaggccctggtacttcgatctctggggccgtggcatgctggtcactgtctcctcag

SEQ ID NO: 1207 - DNA, 355 bp, Homo sapiens
  source 1..355: mol_type = other DNA
gaggtgcaactggtggagtctgggggaggcttagttcagcctggggggtccctgagactctcctgtgcagcctctggattcagtttcagtaggttctggatggactgggtccgccaaagtccagggaagggactggaatgggtctcacgtattgattttgatgggaatgtcacaacctacgcggactccgtgaggggccgattcaccatctccagagacaacgccaaaaataccttatatctgcaaatgaacagtctgagagtcgaggacacggctgtatattattgtgtaagagattggtccataatcgcttttgatatctggggccaagggacagtggtcaccgtctcttcag

SEQ ID NO: 1208 - DNA, 362 bp, Homo sapiens
  source 1..362: mol_type = other DNA
caggtccagttggtacagtctggggctgaggtgaagaggcctgggtcctcggtgaaggtctcctgcaaggctcctggaggcaagttcagcagctttggattcacctggatgcggcaggcccctggacagggcctagagtgggtgggaggcatcaccggcatgttcgcgacagtacactacgcgcagaagtttcagggcagagtcaccataaccacggaggaactcacgagcactgcctacatggagttgaggaacctgagatctgacgacacggccgtctatttttgtgggagagccgtcggctattctttgccttcttattttgagtcgtgggggcagggaaccctggtcaccgtctcctc

SEQ ID NO: 1209 - DNA, 366 bp, Homo sapiens
  source 1..366: mol_type = other DNA
gaggtgcagctgttggagtctgggggaggcctggtccaacctggggggtccctgagactctcctgtgcagcctccggattcagctttagcagcaatgccatgtactgggtccgccaggctccagggaaggggctggagtgggtctcatttattagtgctagtgctctgagtaaatactatgcagactccgtgaagggccggttcaccatctccagagacaattccaagaacacgctgtatgtgcaaatgaacagcctgagagtcgaggacacggccgtatattactgtgcgagagagggggggtcatttcccctaggggggtacatggacgtctggggcaaagggaccacggtcaccgtctcctca

SEQ ID NO: 1210 - DNA, 364 bp, Homo sapiens
  source 1..364: mol_type = other DNA
gaggtgcaattgttggagtctgggggaggcctggtacagcctggggggtccctgagactctcctgtgcagcctctggattcacctttatcaactatgccatggactgggtccgccaggctccagggaggggcctggagtgggtttcaggtctaagtggtagtggcgctagcacatactacgcagactccgtgaagggccggttcaccatctccagagacaactccaagaacactttgtatctgcaaatgaaaagcctgagaggcgaggacacggccgtgtattactgtgcgaagggctcctctcgttcggggagttattactttgactcctggggccagggaaccctggtctccgtctcctcag

SEQ ID NO: 1211 - DNA, 355 bp, Homo sapiens
  source 1..355: mol_type = other DNA
gaggtgcaactggtggagtctgggggaggcttagtccaacctggggggtccctgagactctcctgtgcagcctctggattcagtattagtaaatattggatgatctgggtccgccgggctccaggcaaggggctggagtgggtggccaacataaagcaagatggaggtgagaaacactatgtggactctgtgaagggccgattcaccatctccagagacaacgccaaaaattcactgtatctgcaaatgaacagcctgagagtcgaggacacgggtgtttattactgtgcgaaagacagcagctggaacccccccgactactggggccagggaaccctggtcaccgtctcctcag

SEQ ID NO: 1212 - DNA, 378 bp, Homo sapiens
  source 1..378: mol_type = other DNA
caggtgcaggtgcaggagtcgggcccaggactggtgaagccttcggagaccctgtccctcacctgcactgtctctggtgactccatcaatacttacttctggagctggatccggcagcccgccgggaagggactggagtgggttgggcgtattaataccagtgggagcaccaactacaacccctccctcaagagtcgagtcaccatgtcgatagacacgtccaagaaccaggtctccctgaggttgagctctgtgaccgccgcggacacggccgtgtattattgtgggagagatccggattttggtctggttcggggcccctgggagtactacggtctggacgtctggggccaagggaccacggtcaccgtctcctca

SEQ ID NO: 1213 - DNA, 379 bp, Homo sapiens
  source 1..379: mol_type = other DNA
gaggtgcagctggaggagtctgggggaggcttggtccagcctggagggtccctgagactctcctgtgtaggctctggattcatcctcagtgactactacatagactgggtccgccaggctccagggaaggggctggagtgggttggccgttctagaaataaagctaacaggtacagcacagactacaccgcgtctgtgaaaggcagattcaccgtctcaagagatgactcaagcaactcactgtatctgcaaatgaacagcctgaaaaccgaggacacggccgtgtattactgtactagacccacgaattgtggtggtgactgtgactatgatgcttttgatatctggggccaggggacaatggtcaccgtctcttcag

SEQ ID NO: 1214 - DNA, 367 bp, Homo sapiens
  source 1..367: mol_type = other DNA
caggtgcagctggtggagtcttggggaggcgtggtccagccgggggggtccctgagactctcctgtgcagcgtctggattcatcttcagtagctctggcatgcactgggtccgccaggctccaggcaaggggctggagtgggtggcatttatacgatatgatggaagtgataaatactacgcagactccgtgaagggccgattcaccatctccagagacaattccaagaacacgatgtatctgcaaatgaacagcctgacacctgaagacacggctttatattattgtgcgaaaagtcaggatgactatgatgcccctcctcttcctgactactggggccagggaaccccggtcaccgtctcctcag

SEQ ID NO: 1215 - DNA, 373 bp, Homo sapiens
  source 1..373: mol_type = other DNA
cagctgcagctgcaggagtcgggcccaggactggtgaagccttcggagaccctgtccctcacctgcactgtctctggtggctccatcagcagtagtagttactactggggctggatccgccagcccccagggaaggggctggagtggattgggagtatctattatagtgggagcacctactacaacccgtccctcaagagtcgagtcaccatatccgtagacacgtccaagaaccagttctccctgaagctgagctctgtgaccgccgcagacacggctgtgtattactgtgcgagacatcccccccccgatattttgactggttattatcttgactactggggccagggaaccctggtcaccgtctcctcag

SEQ ID NO: 1216 - DNA, 358 bp, Homo sapiens
  source 1..358: mol_type = other DNA
caggtccagctggtgcaatctggggctgaggtgaagaagcctgggtcctcggtgaaggtctcctgcaaggcctctgaaaacaccttcatctactctactatcagctgggtgcgacaggcccctggacaagggcttgagtggatgggagggatcgcccctctctttggttcaacaaactacgcacagaagttccagggcagagtcaccattaccgcggacaagtccacgagcacagcctacatggaactgcgcagcctgagatctgaggacacggccgtttattactgttcgagagtctcccactttaactgggaatctgactactggggccagggagccctggtcatcgtctcctcag

SEQ ID NO: 1217 - DNA, 367 bp, Homo sapiens
  source 1..367: mol_type = other DNA
gaggttcatctggtggagtctgggggaacctcggtacagccgggggggtccctgagactctcctgtacagcctctggattcatcttcagtgactatcccatgaactgggtccgccaggctccagggaaggggctggagtggatttcatatattagtggaagtagtcgtaatagcatattctacgcagactctgtgaagggccgattcaccatctccagagacaatgccaggaactccctgtatctgcaaatgagcagcctgagagccgacgacacggctgtctactactgtgcgagagaccgtgatgacggtggctggtacttgggtgcctattggggccagggaaccctggtcaccgtctccacag

SEQ ID NO: 1218 - DNA, 358 bp, Homo sapiens
  source 1..358: mol_type = other DNA
caggtgcagctggtggagtctgggggaggcgtggtccagcctggggggtccctgagactctcctgtgcagcgtctggattcaccttcagtagctatggcatgcactgggtccgccaggctccaggcaaggggctggagtgggtggcatttatacggtatgatggaagtaatcaatactatgcagactccataaagggccgattcaccatctccagagacagttccaagaacacgctgtttctgcaaatgaacagcctgagagctgaggacacggctgtgtattactgtgcgaaagatccgaggagtagtgacgcttttgatatctggggccaagggacaatggtcaccgtctcttcag

SEQ ID NO: 1219 - DNA, 352 bp, Homo sapiens
  source 1..352: mol_type = other DNA
gaggcgcagttggtggagtctgggggaggcttggtccagccgggggggtccctgagactctcctgcgcagcctctggatttaagtttgatctttggatgatgtgggtccgccaggctccaggaaaggggctggagtgggtggccaacataaagggagatggaagtgagacacattatgtggactctgtgaagggccgattcaccatcttcagagacaactccaagaactcaatgtatctgcaaatgaacagcctaagaatcgaggacacggctgtttattactgtgcgagagacagtggttggaacccccccgacttctggggccagggaaccctggtcaccgtctcctcag

SEQ ID NO: 1220 - DNA, 370 bp, Homo sapiens
  source 1..370: mol_type = other DNA
gaggtgcagctgttggagtctgggggagacttcgtacagcctggggggtccctgagactctcctgtgcagcctctggattcacctttagcagctatgccatgagctggttccgccaggctccagggaaggggctggagtgggtctcaactattagtggtagtggtcttagcacatactacgcagactccgtgaagggccggttcaccatctccagagacagttccaagaacacgctgtatctgcaagtgaacagcctgagagccgaggacacggccgtatattactgtgcgaaagatcgcgcagtatcacctgctatggggggatacttccacgactggggccagggcaccctagtcaccgtctcctcag

SEQ ID NO: 1221 - DNA, 378 bp, Homo sapiens
  source 1..378: mol_type = other DNA
caggtgcagctgcaggagtcgggcccaggactgatgaagccttcggagaccctgtccctcacctgcactgtctctgccgactccatccacgactacttctgggcctggatccggcagcccgccgggaaggcactggagtggattgggcgtatcaatactagtgggaacaccaactacaatccctccctcaagagtcgagtcaccatgtcagtagacacgtccaagaacgaggtctccctgaagctgagctctgtgaccgccgcggacacggccgtgtattactgtgcgagagatccggattttagtctggttcggggcccctgggactattacaatgtggacgtctggggccaagggaccacggtcactgtctcgtca

SEQ ID NO: 1222 - DNA, 388 bp, Homo sapiens
  source 1..388: mol_type = other DNA
caggtgcagctggtgcagtctggggctgaggtgaagaagcctggggcctcagtgaaggtctcctgcaaggcttctggatataccttcaccgccaactatatacactgggtgcgacaggcccctggacaagggcttgagtggatgggacggatcaaccctaacagtggtggcacaaactatgcacagaagtttcagggcagggtcaccatgaccagggacacgtccatcagcacagcctacatggagctgagcaggctgagatctgacgacacggccgtgtattactgtgcgagagaacaatacggatcatattactatggttcggggagttattataacggctgcttcgacccctggggccagggaaccctggtcaccgtctcctcag

SEQ ID NO: 1223 - DNA, 370 bp, Homo sapiens
  source 1..370: mol_type = other DNA
caggtgcagctgcaggagtcgggcccaggactggtgaagccttcggagaccctgtccctcacctgcgctgtctctggttactccatcagcagtggttactactggggctggatccggcagcccccagggaaggggctggagtggattgggagtatctatcatagtgggagcacctactacaacccgtccctcaagagtcgagtcaccatatcagtagacacgtccaagaaccagttctccctgaagctgagctctgtgaccgccgcagacacggccgtgtattactgtgcgagagtcgtcccagacgatattttgactggttatcatcttgactactggggccagggaaccctggtcaccgtctcctcag

SEQ ID NO: 1224 - DNA, 366 bp, Homo sapiens
  source 1..366: mol_type = other DNA
gaggtgcagctgttggagtctgggggaggcctggcacagcctggggggtccctgagactctcctgtgtagcctctggattcacctttaggaacaatgtcatgttctgggtccgccaggctccagggaaggggctggagtgggtctcatctattagtggcagtggtcttagtgcatactacgcagactccgtgaagggccggttcaccatctccagagacaattccaggaacactctgtatatgcacatgaacagcctgggagccgaggacacggccgtatattactgtgcgaaatatggggggtcatttcccctaggggggtacatggacgtctggggcaaaggggccacggtcaccgtctcctca

SEQ ID NO: 1225 - DNA, 391 bp, Homo sapiens
  source 1..391: mol_type = other DNA
gaggtgcagctggtggagtctgggggaggcttggtacagcctggggggtccctgagactctcctgtgcagcctctggattcaccttcagtagctatagcatgaactgggtccgccaggctccagggaaggggctggagtgggtttcatacattagtagtagtagtagtaccatatactacgcagactctgtgaagggccgattcaccatctccagagacaatgccaagaactcactgtatctgcaaatgaacagcctgagagccgaggacacggctgtgtattactgtgcgagagataagggatactggtattactatgatagtagtggttattcctatcatggggcttttgatatctggggccaagggacaatggtcaccgtctcttcag

SEQ ID NO: 1226 - DNA, 355 bp, Homo sapiens
  source 1..355: mol_type = other DNA
gaggtccagttggtacagtctgaggctgaagtgaagaggcctgggactacactgaaaatctcctgcagggcctcaggatacaccttcactgaccactacatgcactgggtgcgacaggcccctggaaaagggcttgagtggatgggactgattgatcctgaagatggtgaaagagaatatgcagagaagttccagggtagagccgctataagcgcggacacgtctgcagacacagcctacttggaactgagcagcctgagatctgaggacacggccgtatattactgtgtagcccaactacgatacaattggttcgacacctggggccggggaaccctgatcaccgtctcctcag

SEQ ID NO: 1227 - DNA, 385 bp, Homo sapiens
  source 1..385: mol_type = other DNA
gaggtgcagctggtgcagtctggcgcagaggtgaagaagccgggggagtctctgaagatctcttgtaaggcttttggatacagttttaccagctactgggtcggctgggtgcgccagatgcccgggaaaggcctggagttcgtgacaatgatctatcctggtgactctgatgccagatataacccgtccttcgagggccatgtcaccatctcagtcgacaactccatcaacaccgcctacctgcagtggagcagcctgagggcctcggacaccgccatgtattactgtgcaagatccctaggctattgtagcagcaccagctgttatggagctgaatacttctttgacttctggggccagggaaccctggtcaccgtctcctcag

SEQ ID NO: 1228 - DNA, 361 bp, Homo sapiens
  source 1..361: mol_type = other DNA
gaggagcagttggtggagtctgggggaggcttggtccaacctggggggtccctgagactctcctgtgcagcctctggattcaccttcagtatctatgctatgcactgggtccgccaggctccagggaagggactggaatatgtttcaactattagtggtgatgggcgtagcacatattatgcagactctgtgaagggcagattcaccgtctccagagacaattcgaagaacacgctgtatcttcaaatgggcagtctgagacctgatgacatggctgtttattactgtgcgaggacacttaggtggggcggtgatgcttttgatgtctggggccaagggacagtggtcaccgtctcttcag

SEQ ID NO: 1229 - DNA, 367 bp, Homo sapiens
  source 1..367: mol_type = other DNA
caggttcacctggtgcagtctggagttgaggtgaagaagcctggggcctcagtgaaggtctcctgcaaggcctctggttacaccttcaccacccatggaatcagttgggtgcgacaggcccctggacaagggcttgagtggatgggatggataagcggttacaacggtcacacaaattttgcacagaacttccagggcagagtcaccatgagcactgatccatccacgagcacagccttcatggagctgaagagcctgggatctgacgacacggccctgtattattgtgcgagagatcgtcgggatattttgactggctacaccgcagactactggggccagggaaccctggtcatcgtctcctcag

SEQ ID NO: 1230 - DNA, 378 bp, Homo sapiens
  source 1..378: mol_type = other DNA
caggtgcaggtgcaggagtcgggcccaggactggtgaagccttcggagaccctgtccctcacctgcactgtctctggtggctccatcaatacttactactggagctggatccggcagcccgccgggaagggactggagtggattgggcgtattaataccagtgggagcagcaactacaacccctccctcaagagtcgagtcaccatgtcagtagacacgtccaagaaccaggtctccctgaggttgaactctgtgaccgccgcggacacggccgtgtattactgtgggagagatccggattttggtctggttcggggcccctgggactactacggtctggacgtctggggccaagggaccacggtcaccgtctcctca

SEQ ID NO: 1231 - DNA, 379 bp, Homo sapiens
  source 1..379: mol_type = other DNA
gaggtgcagctggtggactctgggggagacttggtccagcctggagggtccctgagactctcctgtgcagcctctggattcaccatcagtgaccactacattgactgggtccgccgggctccagggaaggggctggagtgggttggccgttctagaaacaaagttaacaagtactccacagtctacctcgcgtctgtgcaaggcagattcaccatctcaagagatgattcaaagaactcactgtatctgcaaatgaacagcctgaaaaccgaggacacggccgtgtattactgtgctagacccacggattgtggtggtgattgccaatatgatgtttttgatatttggggccaagggacaatggtcaccgtctctacag

SEQ ID NO: 1232 - DNA, 369 bp, Homo sapiens
  source 1..369: mol_type = other DNA
gaggtacaactattggagtctgggggagggttgctgcacccgggggggtccctgagactctcctgtgtagcctctggatttacgtttcacagctatgtcatgacctgggtccgccaggctccagggaaggggctggagtgggtctcatcgattactggtagtggtggtagtaaatactacgcagactccgtgaagggccggttcaccatctccagagacaattccaagaacacagtgtttctgcaaatgaacaacctgagagtcgaggacacggccgtatattactgtgcgaaagacaatattccccgcataccaggagctggggccatggacgtctggggcgaagggactacggtcaccgtctcctca

SEQ ID NO: 1233 - DNA, 361 bp, Homo sapiens
  source 1..361: mol_type = other DNA
gaggagcagttggttgagtctgggggaaccttggtccagcccggggggtccctgagactctcctgtgcagcctctgggttccacttctatatctacagtatcaattgggtccgccaggctccagggaggggtctggagtatctttcaactatcagtggtgatggccgtcacacatattatgcagagtctgtgaagggcagatttaccatctccagagacaattccaaggacactgtgtatcttcaaatggacaccctgagaaccgacgacacggctatgtattactgtgcgaggccgcttaactggggcggtgatgcttttgaaatctggggccgagggacaatggtcaccgtctcttcag

SEQ ID NO: 1234 - DNA, 364 bp, Homo sapiens
  source 1..364: mol_type = other DNA
caggtccaactggtgcagtctggggctgaggtgaagaagcctgggtcctcggtgaaggtctcctgcaaggcttctggaggcaccttcagcagttatgcattcagctgggtgcgacaggcccctggacaagggcttgagtggatgggagggatcatcggtatgtttggaacagcaaactacgcacagaagttccagggcagagtcacgattaccacggaggaattgaggagtacagcctatatggagttgagcagcctgagacctgaggacacggccgtgtattactgtgcgagacactcctattactatgatagtagtgcccttgactattggggccagggaaccctggtcaccgtctcctcag

SEQ ID NO: 1235 - DNA, 372 bp, Homo sapiens
  source 1..372: mol_type = other DNA
gaggtgcaattgttggagtctgggggaggcttggtacagcctggggggtccctgagactctcctgtgcagcctctggattcacctttagcagctatgccatgatgtgggtccgccaggccccagggaaggggctggagtgggtctcaagtattagtggtagtggtctcagcacatactacgcagactccgtgaagggccggttcaccatctccagagacaattccaagaacatgttgtatctgcagatgaacaccctgagagccgaggacacggccgtctattactgtgcgaaagattggataccatctcgtccggccttagggggctacatggacgtctggggcaaagggaccacggtcaccgtctcctca

SEQ ID NO: 1236 - DNA, 367 bp, Homo sapiens
  source 1..367: mol_type = other DNA
gaggtgcagctggtgcagtctagagcagaggtgaaaaagccgggggagtctctgaagatctcctgtaagggttctggatacagctttaccaaatactggatcggatgggtgcgccagatgcccgggaaaggcctggagtggatggggatcatctatcctggtgactctgataccagatacaacccgtccttccaaggccaggtcaccatctcagccgacaagtccatcagcaccgcctacctgcagtggagcagcctgaaggcctcggacaccgccgtgtattactgtgcgagacactgggccctgtatagcagctcgtctgtgctccagcactggggccagggaacccaggtcaccgtctcctcag

SEQ ID NO: 1237 - DNA, 385 bp, Homo sapiens
  source 1..385: mol_type = other DNA
gaggtgcagctggtggagtctgggggaggcttggtacagccagggcggtccctgagactctcctgtacagcttctggattcacctttggtgattatgctatgagctggttccgccaggctccagggaaggggctggagtgggtaggtttcattagaagcaaagcttatggtgggacaacagaatacgccgcgtctgtgaaaggcagattcaccatctcaagagatgattccaaaagcatcgcctatctgcaaatgaacagcctgaaaaccgaggacacagccgtgtattactgtactagagatgatagacgatattttgactggttattaccgaactggtacttcgatctctggggccgtggcaccctggtcactgtctcctcag

SEQ ID NO: 1238 - DNA, 367 bp, Homo sapiens
  source 1..367: mol_type = other DNA
gaagtgcagctggtggagtctgggggaggcttggtacagcctggcaggtccctgagactctcctgtgcagcctctggattcacctttgatgattatgccatgcactgggtccggcaagctccagggaagggcctggagtgggtctcaggtattagttggaatagtggtagcataggctatgcggactctgtgaagggccgattcaccatctccagagacaacgccaagaactccctgtatctgcaaatgaacagtctgagagctgaggacatggccttgtattactgtgcaaaagatacctccttttcaattactatggtcgggtttgactactggggccagggaaccctggtcaccgtctcctcag

SEQ ID NO: 1239 - DNA, 376 bp, Homo sapiens
  source 1..376: mol_type = other DNA
gaggtgcagctgttggaatctgggggcggcttggtacagccggggaagtctctgagactctcctgcgcagcctctggattcagctttggcaattatgccatgtactgggtccgccaggctccagggaaggggctggagtgggtctcaagtattagtggcactggtcttagtagatactacatagactccgtgaagggccggttcaccatctccagagacgattccaggaatacggtgtatctgcaaatgagtggcctgagagccgaagacacggccgtatattattgtgtgaaagatcgtgtaacctataacaaggtcgtggtccagggcacttttgatgtctggggccaagggacaaaggtcaccgtttcttcag

SEQ ID NO: 1240 - DNA, 367 bp, Homo sapiens
  source 1..367: mol_type = other DNA
caggtgcagctggtgcagtctggggctgaggtgaagaagcctggggcctcagtgaaggtttcctgcaaggcgtctggatacaccttcaccagctacttaatgcactgggtgcgacaggcccctggacaagggcttgagtggatgggaataatcaaccctagtgctggtagcacaagctacgcacagaggttccagggcagagtcaccatgaccagggacacgtccacgagcacagtctacatggagctgagcagcctgagatctgaggacacggccgtgtattattgttctagagctagtcccccggtcgaaactggaacggagtatgactactggggccagggaaccctggtcaccgtctcctcag

SEQ ID NO: 1241 - DNA, 367 bp, Homo sapiens
  source 1..367: mol_type = other DNA
gaggtgcagctggtgcagtctgggggaggcttggtccagcctggggggtccctgagactctcctgtgcagcctctggattcacctttagtgactattggatgagctgggtccgccaggctccagggaaggggctggagtgggtggccaacataaaggaagatggaagtgaaaataactatgtggactctgtgaagggccgattcaccatctccagagacatcgccaagaactcactgtatctacaaatgaacagcctgagagccgaggacacggctgtgtattactgtgcgagaggatactttgagagtagtggttatcggccctatgatttctggggccagggaaccctggtcaccgtctcctcag

SEQ ID NO: 1242 - DNA, 370 bp, Homo sapiens
  source 1..370: mol_type = other DNA
caggtgcagctggtgcagtctggggctgaggtgaagaagcctgggtcctcggtgagaatctcctgcaaggcttctggaggcaccttccgcaactatgctatcagttgggtgcgacaggcccctggacaagggcttgagtggatgggagggatcatccctttctttggtgcatcaaactacccacagaagttccggggcagagtcgcgattagcgcggacgaatccacgagcacagcgtacatggaactgagcagcctgagatctgaggacacggccgtctactactgtgcgagacacagcggctatcactacggtaatagtggccattttgactactggggccagggaaccctggtcaccgtctcctcag

SEQ ID NO: 1243 - DNA, 361 bp, Homo sapiens
  source 1..361: mol_type = other DNA
caggtgcagctggtgcagtccggggctgaagtgaagaagcctgggtcctcggtgaaggtctcctgcaaggcctctggaggcaccttcagcagttatgctatcagctgggtgcgacaggcccctggacaagggcttgagtggatcggagggatcaccggtatgtttggtacaacaaactacgcacagaagtttcagggcagagtcacaataaccgcgcacgagctcacgagctcggcctatctggacctgagcagccttacatctgaagacacggccgtgtactactgtgcgagaggtgggggctactatcctggacacttccaggactggggccagggcaccctggtcatcgtctcctcag

SEQ ID NO: 1244 - DNA, 358 bp, Homo sapiens
  source 1..358: mol_type = other DNA
gaagtgcagctggtggagtctgggggaggcttggtccagcctggggggtccctgagactctcctgtgcagcctctggattcacctttgatacctattggatggcctgggtccgccaggctccagggaaggggctggaatacgtggccaatataaagtacgatggaagtgagaaatactatgtgggctccgtgaagggccgattcaccgtctccagagacaacgccaagaactcactgtatctgcaaatgaatagcctgacatccgaggacacggctgtgtatttctgtgcgagggtaatagggggacgctaccacgctgactactggggccggggaaccctggtcaccgtctcctcag

SEQ ID NO: 1245 - DNA, 361 bp, Homo sapiens
  source 1..361: mol_type = other DNA
gaggtgcagttgttggaatctggtggaggcttggtacagccgggggggtccctgagactctcctgtgcagcctccggattcatctttaccaactatgccatgagttgggtccgccaggctccagggaaggggctggagtgggtctcaagtattcggaggaatggtgataaggcatactacgcagactccgtgaagggccggtccaccatctccagagacaactccaagaacacactgaatctgcaagtgaatagcctgagagtcgaggacacggccgtgtattactgtgtgagagactggagaggcgacgaagacggcattgactactggggccggggaaccctggtcaccgtctcctcag

SEQ ID NO: 1246 - DNA, 364 bp, Homo sapiens
  source 1..364: mol_type = other DNA
caggtccagctggtgcaatctggggctgaggtgaagaagcctgggtcctcggtgaaagtctcctgcgaggcttctggaggcaccttcagcaactatattttcagctgggtgcgtcaggcccctggacaggggcttgagtggatgggaaggatcatccctatgcttggtatgacaaactacgcacagaggttccagggcagaatcaccattgccgtggacaaatccacgagcacattttacatggaactgagcaacctgagatctgaggacacggccctgtattactgtgcgagatcgcccggggcccctaacgatctctctcttgactcctggggccagggaaccctggtcaccgtctcctcag

SEQ ID NO: 1247 - DNA, 355 bp, Homo sapiens
  source 1..355: mol_type = other DNA
caggcgcagttggtggagtctgggggagacgtggtccagcctgggaggtccctgagactctcctgtgcagcgtctggattcaccttcaggaactatggcatgcactgggtccgccaggctccaggcaaggggctggagtgggtggcagttatttggtatgacggaactaataaatactacgcagactccgtgaagggccgattcaccatctccagagacaattcaaagaacacgctgtatctgcaaatcaacagcctgagagccgaggacacggctatatattactgtacgagagatgttcgttcccgatactttgactgttggggccagggaaccctggtcaccgtctcctcag

SEQ ID NO: 1248 - DNA, 370 bp, Homo sapiens
  source 1..370: mol_type = other DNA
gaggtgcagttgttggagtctgggggaggcttggtacagcctggggggtccctgagactctcctgtgcagcctctggattcacctttagccgccatgccatgacctgggtccgccaggctccagggaaggggctggagtgggtctcaggtattagtggtagtggtggtagcagatactacgcagactccgtgaaggggcggttcaccatctccagagacaattccaagaacacgctgtatctgcaaatgaacagcctgagagccgaggacacggccgtatattactgtgcgaaagatcgcccgccgagagttgtgcttattggggtactggggagctggggccagggaacccaggtcaccgtctcctcag

SEQ ID NO: 1249 - DNA, 361 bp, Homo sapiens
  source 1..361: mol_type = other DNA
caggtgcagttggtgcagtctggggctgaggtgaagaagcctgggtcctcggtgaaggtctcctgcaaggcttctggaggcatcttcagaagtcatgctatcagctgggtgcgacaggcccctggacaagggcttgagtggatgggagggatcatcgctatctttggaacagtaaactacgcacagaagttccagggcagagtcacgattaccgcggacgagtccacgagtacagtctacatggagctgagcagcctgagatctgaggacacggccgtgtattactgtgcgagaggaatgacttatacggtgaccaagtttgactactggggccagggaaccctggtcaccgtctcctcag

SEQ ID NO: 1250 - DNA, 384 bp, Homo sapiens
  source 1..384: mol_type = other DNA
gaagtgcagttggtgcagtccggagcagaggcgaaaaagcccggggagtctctgaggatctcctgtaagggttctggatacagctttgccagctactggatcagctgggtgcgccggatgcccgggaaaggcctggagtggatggggaggattgatccacgtgactcttataccagctacagcccgtccttccaaggccacgtcaccatctcagtagacaagtccatcaacacagcctacctgcagtggagcagcgtgaaggcctcggacaccgccatgtattactgtgcgacaaatgaccctaatacgtattactacgatgacagtggtgcgaactacgggatggacgtctggggccaagggaccacggtcaccgtctcctca

SEQ ID NO: 1251 - DNA, 385 bp, Homo sapiens
  source 1..385: mol_type = other DNA
gaggtgcagttgttggagtctgggggagacttggtacagcctggggggtccctgagactctcctgtgcagcctctggattcacctttagtaattatgtcatgatttgggtccgccaggctccagggaaggggctggagtgggtctcagatattagaggtattagaggtagtgttggtagcacaaactacgaggactccgtgatgggccggttcaccatctccagagacaactccaagaacacgttgtatctgcaaatgaacagcctgagagtcgaggacacggccgtctattactgtgcgaagggcatgagtctgtctgtatatagtggctccgggatgccgattgactactggggccagggaaccctggtcaccgtctcctcag

SEQ ID NO: 1252 - DNA, 385 bp, Homo sapiens
  source 1..385: mol_type = other DNA
cagctgcagctgcaccagtcgggcccaggactggtgaagacctcggagaccctgtccctcacctgcactgtctctggtggctccatcagcagtgatagttcctactggggctggatccgccagtccccagggaagggactggagtggattgggactatctctaatagtgggaccacctactacagcccgtccctcaggagtcgaaccaccatttccgtagacacgtcgaagaaccagttctccctgaagctgacctctgcgaccgccgctgacacggctctctatcattgtgcgagagaggtttgtcgtagtctcacctgcctcttttggagtggttattcggttgacctctggggccagggaaccctggtcaccgtctcctcag

SEQ ID NO: 1253 - DNA, 373 bp, Homo sapiens
  source 1..373: mol_type = other DNA
gaggtgcagctgttggagtctgggggaggcttggtacagcctggggggtccctgagactctcctgtgcagcctctggattcacctttagcagctatgccatgagctgggtccgccaggctccagggaaggggctggagtgggtctcagctattagtggtagtggtggtagcacatactacgcagactccgtgaagggccggttcaccatctccagagacaattccaagaacacgctgtatctgcaaatgaacagcctgagagccgaggacacggccgtatattactgtgcgaaagatcggcaaatttactatggtcctcccaggtactactttgactactggggccagggaaccctggtcaccgtctcctcag

SEQ ID NO: 1254 - DNA, 376 bp, Homo sapiens
  source 1..376: mol_type = other DNA
gaggcgcagctggtggagtctgggggaggcttggtaaagcctggggggtcccttagactctcctgtgcagcctctggattcactttcagtaacgcctggatgaactgggtccgccaggctccagggaaggggctggagtgggttggccgttttaaaacctacactgatggtgggacaacagactacgctgcacccgtgaaaggcagattcaccatctcaagagatgattcaaaaaacacactgtatctgcaaatgaacagcctgaaaatcgaggacacagccgtctattactgtaccacaggctggaatgactacggctgttgcgaggatgcttttgatatctggggccaagggacaatggtcaccgtctcttcag

SEQ ID NO: 1255 - DNA, 358 bp, Homo sapiens
  source 1..358: mol_type = other DNA
gaagtgcagctggtggagtctgggggaggcttggtccagcctggggggtccctgagactctcctgtgcagcctctggattcacctttgatacctattggatggcctgggtccgccaggctccagggaaggggctggaatacgtggccaatataaagtacgatggaagtgagaaatactatgtgggctccgtgaagggccgattcaccgtctccagagacaacgccaagaactcactgtatctgcaaatgaatggcctgacatccgaggacacggctatatattactgtgcgcgggtaatagggggacgctaccacgctgactactggggccggggaaccctggtcaccgtctcctcag

SEQ ID NO: 1256 - DNA, 382 bp, Homo sapiens
  source 1..382: mol_type = other DNA
gtgcagctggtggagtctgggggaggcttggtccagcctggggggtccctgagactctcctgtgcagcctctggattcaccttcagtagctatggcatgcactgggtccgccaggctccaggcaaggggctggagtgggtggcagttatatcatatgatggaagtaataaatactatgcagactccgtgaagggccgattcaccatctccagagacaattccaagaacacgctgtatctgcagatgaacagcctgagagctgaggacacggctgtgtatttctgtgcgaaagagctcgccgtacgcttattacgatattttgactggataaactccccctttgactactggggccagggaaccctggtcaccgtctcctcag

SEQ ID NO: 1257 - DNA, 376 bp, Homo sapiens
  source 1..376: mol_type = other DNA
gaggtgcagctggtggagtctgggggaggcttggtaaagccgggggggtcccttagactctcctgtgcagcctctggattcactttcagtaacgcctggatgaactgggtccgccaaactccagggaaggggctggagtgggttggccgttttaaaacctacactgatggtgggacaacagactacgctgcacccgtgaaaggcagattcaccatctcaagagatgattcaaaaaacaccctgtatctgcaaatgaacagccttaaaatcgaggacacaggcgtgtatttctgttccaccggctggaatgacttcggatgttgcgaggatgcttttgatatctggggccaagggacaatggtcaccgtctcttcag

SEQ ID NO: 1258 - DNA, 358 bp, Homo sapiens
  source 1..358: mol_type = other DNA
gaggtgcaactgttggagtctgggggaggcttggtacagccgggggggtcccttagactctcctgtgcatcctctggattcagttttagcagctattccatgaactgggtccgccaggctccagggaaggggcttgagtgggtctcagctattagtcctagtagtgatagtacaagtcacacagactccgtgaagggccggttcaccatctccagagacaattccaagaacacgctgtttctggaaatgagcagcctgagagccgaggacacggccgtatattactgtgcgagagagccggagggtctggggcactatgaccactggggccagggaaccctggtcaccgtctcctcag

SEQ ID NO: 1259 - DNA, 360 bp, Homo sapiens
  source 1..360: mol_type = other DNA
gaggtgcagttggtggagtctgggggaggcctggtccagccgggggggtccctgagactctcctgcgcagcctctggattcaccgtcagtcaaaactacatgagctgggtccgccaggctccagggaagggactggagtgggtctcagttatttaccccagtggtgccgcagactactcaagctcagtgaggggcagcttcaccgtctccagagacaactccaagaacacggtgtatattcaaatgaacagcctgagagtcgaggacacggctgtgtattactgtgcgagagaggactattcctcttactactacggtatggacgtctggggccaagggaccacggtcaccgtctcctca

SEQ ID NO: 1260 - DNA, 361 bp, Homo sapiens
  source 1..361: mol_type = other DNA
caggtccagctggtgcaatctggggctgaggtgaagaagcctgggtcctcggtgaaggtctcctgcaagacttctggaggcaccttcagcaattatgtaatgagttgggtgcgacaggcccctggacaagggcttgagtggatgggaaggatcatccctatcctcggtatgacaaactacgcacagaagttccagggcagagtcacaattactactgacacgagtacagtctacatggagttgagcagcctgagatctgaagacacggccgtgtattactgtgcgagaagtccacatcaagtgggaagcatgggaaaccatgactactggggccagggaaccctggtcaccgtctcctcag

SEQ ID NO: 1261 - DNA, 358 bp, Homo sapiens
  source 1..358: mol_type = other DNA
gaagtgcagctggtggagtctgggggaggcttggtccagccgggggggtccctgagactctcctgtgcagcctctggattcacctttgatacctattggatggcctgggtccgccaggctccagggaaggggctggaatatgtggccaatataaagtacgatggaagtgagaaatactatgtgggctccgtgaagggccgatgcaccgtctccagagacaacgccaagaactcagtgtatctgcaaatgaatagcctgacatccgaggacacggctgtgtactactgtgtgagggtaattgggggacgctaccacgctgacagctggggccggggaaccctggtcaccgtctcctcag

SEQ ID NO: 1262 - DNA, 361 bp, Homo sapiens
  source 1..361: mol_type = other DNA
caggtgcaactggtgcagtctggggctgcgattaagaagcctgggtcctcggtgaaggtctcctgcaaggcttctggaggcaccttcagtagctctgctatcagctgggtgcgacaggcccctggacaagggcttgagtggatgggagggatcatcggtatgtttcgtacagtaaactacgcacagaagttccagggcagagtcacgattagtgcggacgaattcatgaacacagcctatatggagctgagcagcctgagatctgacgacacggccgtgtattattgtgcgaggggggggaactactaccccaactactttgactcatggggccagggaaccccggtcaccgtctcctcag

SEQ ID NO: 1263 - DNA, 379 bp, Homo sapiens
  source 1..379: mol_type = other DNA
cagatcaccttgaaggagtctggtcgtacactggtgaaacccacagagaccctaatgctgacctgcaccttctctgggttctcgctcaccactactggagtgggtgtgggctggatccgtcagcccccaggagaggccctggagtggcttgcagtcatttattgggatgatgataagcgctacagcccatctctgaagagtaggctcaccatcaccaaggacacctccaaaaatcaggtggtccttacaatgaccaacatggaccctgtggacacaggcacatattactgtgcacacctgatgattacatttgggggaattatccgtgatgatgcttttgatatctggggccaagggacaatggtcaccgtctcttcag

SEQ ID NO: 1264 - DNA, 363 bp, Homo sapiens
  source 1..363: mol_type = other DNA
tgttagagtctgggggagacttggtacagcctggggggtccctgagactctcctgtggagcctctggatttacctttggcagctgtgccatgaactgggtccgccaggctccagggaaggggctggagtgggtctcagtcattagtgacagtggtgataagacatactacgcagactccgtgaagggccgcttcaccatctccagagacaattccaagaacacgctgtatctacaaatgaacagcctgagaggcgaggacacggccgtctattactgtgcgaaagggctttattgggacggcagcagctgctacaggtccgttgactggtggggccagggaaccctggtcaccgtctcctcag

SEQ ID NO: 1265 - DNA, 387 bp, Homo sapiens
  source 1..387: mol_type = other DNA
caggtgcagctgcaggagtcgggcccaggactggtgaagccttctcagaccctgtccctcacctgcactgtctctggtggctccttcaacagtggtgattactactggagttggatccgccagtccccagggaagggcctggagtggattggatacatctattacaatgggggcaccgactacaacccgtccctcaagagtcgcgttaccatatcaatggacacgtccaagagccaattctccctgaagttgagctctgtgactgccgcagacacggccgtatattactgtgccagagagccagcgacttttggagtggttattgtagacgactattacttcggtatggacgtctggggccaagggaccacggtcaccgtctcctca

SEQ ID NO: 1266 - DNA, 361 bp, Homo sapiens
  source 1..361: mol_type = other DNA
caggtgcagctggtggagtctgggggaggcgtggtccagcctgggaggtccctgagactcgcctgtgcagcgtctggattcaccttaagtggttatggcatgcactgggtccgccaggctccaggcaaggggctggaatgggtggcagttatatggtctaatggaattaataaatactatgcagactccgtgaagggccgattcaccatctccagagacacttccaagaacactctgtatgtgcaactgaacagcctgagagccgaggacacggctctatatttctgtgcgagagatccgggtataagagtggctggtattgacctctggggccagggaaccctggtcaccgtctcctcag

SEQ ID NO: 1267 - DNA, 384 bp, Homo sapiens
  source 1..384: mol_type = other DNA
caggttcagctggtgcagtctggagctgaggtgaagaagcctggggcctcagtgaaggtctcctgcaaggcttctggttacacctttaccagctatggtatcagctgggtgcgacaggcccctggacaagggcttgagtggatgggatggatcagcgcttacaatggtaacacaaactatgcacagaagctccagggcagagtcaccatgaccacagacacatccacgagcacagcctacatggagctgaggagcctgagatctgacgacacggccgtgtattactgtgcgaggcccatgggctgggcagtggctggtacacattactactactactacggtatggacgtctggggccaagggaccacggtcaccgtctcctca

SEQ ID NO: 1268 - DNA, 369 bp, Homo sapiens
  source 1..369: mol_type = other DNA
caggtccagctggtgcaatctggggctgaggtgaagaagcctgggtcctcggtgaaggtctcctgcaaggcttctggaggcaccttcaacagaaatacaatcacctgggtgcgacaggcctctggacaagggcatgagtggatgggaaggatcacccctatccttgggatgacaaactatgcacagaagttccagggcagagtcacgattaccgcggacatgttcacgagcacagcctacgtggaggtgagcaagttgagatctgaggacacggccgtctacttctgtgtctacggacccaatacggacgtatattaccactccggtatggccgtctggggccaagggaccacggtcaccgtctcctca

SEQ ID NO: 1269 - DNA, 373 bp, Homo sapiens
  source 1..373: mol_type = other DNA
gaggtgcagctggtggagtctgggggaggcctggtcaagcctggggggtccctgagactctcctgtgcagcctctggattcagcttcagtaaatatggcatgaactgggtccgccaggctccagggaaggggctggagtgggtctcatccattagtggcagtggtctttccatatactacgcagactcaatgaagggccgattcaccatctccagagacaacgccaagaactcactgtatctgcaaatgaacagcctgagagccgaggacacggctgtatacttctgtacgagacatcagagtgaatatagtggctacggacggggggtcgacggctactggggccagggaaccctggtcaccgtctcctcag

SEQ ID NO: 1270 - DNA, 387 bp, Homo sapiens
  source 1..387: mol_type = other DNA
caggtgcagctgcaggagtcgggcccaggactggtgaagccttcacagaccctgtccctcacctgcactgtctctggtggctccatcaccagtggtgattactactggagttggatccgccagcccccagggaagggcctggagtggattgggtacatctattacagtgggagcacctactataacccgtccctccagagtcgagttaccatatcagtagacacgtccaagaaccagttctccctgaagctgaagtctgtgactgccgcagacacggccgtgtatttctgtgccagagaactggcgaattttggggtcattattgttgacgactactacttcggtatggacgtctggggccaagggaccacggtcaccgtctcctca

SEQ ID NO: 1271 - DNA, 384 bp, Homo sapiens
  source 1..384: mol_type = other DNA
gaagtgcagttggtgcagtccggagcagaggtgaaaaagcccggggagtctctgaggatctcctgtaagggttctggatacagctttgccagctactggatcagctgggtgcgccagatgcccgggaaaggcctggagtggatggggaggattgatccacgtgactcttataccaggtacagcccgtccttccaaggccacgtcaccatctcagtagacaagtccatcaacacagcctacctgcagtggagcagcgtgaaggcctcggacaccgccatgtattactgtgcgacaaatgaccctgatacgtattactacgatgacagtggtgcgaactacgggatggacgtctggggccaagggaccacggtcaccgtctcctca

SEQ ID NO: 1272 - DNA, 364 bp, Homo sapiens
  source 1..364: mol_type = other DNA
caggtgtcgctggtgcagtctggggctgaggtgaagaagcctgggtcctcggtgaaggtctcctgcaaggcttctggaggcatcttcaggagcaatgccatcagttgggtgcgacaggcccctggacaagggcttgagtggatgggaggaatcatcgctatctttcgtacaacaaactacgcacagaagttccaggggcgagtcacgattaccgcggacgagtctacgagcacagtctacatggaactgaggggcctgagatctgacgacacggccgtttattactgtgcgagaggcagtggttatcacttcaaatttccttttgactactggggccagggagccctggtcaccgtctcctcag

SEQ ID NO: 1273 - DNA, 372 bp, Homo sapiens
  source 1..372: mol_type = other DNA
aggtgcaactgttggagtctgggggaggcttggtacagcctggggggtccctgagactctcctgtgcagcctctggattcaccttcagtagctatgctatgcactgggtccgccaggctccaggcaaggggctggagtgggtggcagttatatcatatgatggaagcaataaatactacgcagactccgtgaagggccgattcaccatctccagagacaattccaagaacacgctgtatctgcaaatgaacagcctgagagctgaggacacggctgtgtattactgtgcgagagatgatattgtagtagtaccagctgctacgtggtcctttgactactggggccagggaaccctggtcaccgtctcctcag

SEQ ID NO: 1274 - DNA, 391 bp, Homo sapiens
  source 1..391: mol_type = other DNA
gaggtgcaactggtggagtctgggggaggcttggtccagccgggggggtccctgagactcccctgtgtagcctctggattcacctttagtgagtattggatgagctgggtccgccaggctccagggaaggggctggagtgggtggccaatataagacaagatggaagtgaaatatactatgcggactctgtgaagggccgattcaccatctccagagacaacgccaagaattcactgtatctgcaaatgaacagcctgagagccgacgacaccgccgtatattactgtgcgagaacacttatgcaacgtggaattagaggctacgataacggttggggtccctactactttgactcctggggccagggaatcctggtcaccgtctcctcag

SEQ ID NO: 1275 - DNA, 343 bp, Homo sapiens
  source 1..343: mol_type = other DNA
caggtgcagctacaggagtcgggcccaggactggtgaagccttcggagaccctgtccctcacctgcactgtctctggtgactccatcagcagtagtagttatcactggggctggatccgccagcccccagggaaggggctggagtggattggggctataaataacagggggagcacctactacgacccgtccctcaagagtcgagccaccatatccgtagacacgtccaagaaccagctctccctgaaggtgaggtctgtgaccgccgcagacacggctgtttattactgttcgagattctttgatatatggggccaagggacaatggtcaccgtctcttcag

SEQ ID NO: 1276 - DNA, 382 bp, Homo sapiens
  source 1..382: mol_type = other DNA
caggtccagctggtgcaatctggggctgaggtgaagaagcctgggtcctcggtgaaggtctcctgcagggcttccggaggcactttcaccagttatactttcacctgggtgcgacaggcccctggacaaggacttgagtggatgggaaggatcatccccatcgtcaccatatcaaactacgcacagaagttccagggcagagtcactatcacggcggacaaaagcacgaatacagtcttcatggagttgaccagcctgaaatttgaggacacggccatttattattgtgtgagagagaactcattggtcattgatagcggtggtttttatttgggacccttcgaggaatggggccaggggactctggtcaccgtctcctcag

SEQ ID NO: 1277 - DNA, 373 bp, Homo sapiens
  source 1..373: mol_type = other DNA
gaggtacaactgttggagtctgggggaggcttggtacagcctggggactccctgaaactctcctgtgtaggctctggattgacctttggcagtactaccatgagctgggtccggcaggctccagggaaggggctggaatgggtctcaattattagtgataatggtggtaaaacatactacgcagactccgtgaagggccggttcaccatctccagagacaattccaagaacaccctgtatctgcaaatgaacagcctgagaggcgaggacacggccatatattactgtgcgaaagggcattcttgggacggcagtacttattacagggcctttgactgctggggccagggaaccctagtcatcgtctcctcag

SEQ ID NO: 1278 - DNA, 355 bp, Homo sapiens
  source 1..355: mol_type = other DNA
caggtccagctggtgcaatctggggctgaggtgaagaagcctgggtcctcggtgaaggtctcctgcaaggcttctggaggcagcttcagcagatatagtatcagctgggtgcgaaaggcccctggacaagggcttgagtggatgggaaggatcatccctgtcattggtttagtaaactacgcacagaagtttcagggcagagtcacgattaccgcggggatatcctcgaacacagcctacatggagctgagcagcctgagatctgaggacacggccgtctattactgtgcagtaggtgggaactacgggggccttgactactggggccagggaaccctggtcaccgtctcctcag

SEQ ID NO: 1279 - DNA, 361 bp, Homo sapiens
  source 1..361: mol_type = other DNA
caggtccagttggtgcaatctggggctgaggtgaagaagcctgggtcctcggtgaaggtctcctgcaaggcctctagaggcacgttcagcagttatagtgtcagctgggtgcgacaggcccctgggcaaggtcttgagtggatgggaaggatcatccctttacttgggattacaaactacgcacaaaagttccagggcagaatcaccattatcgcggacaagacctcgaccacagcctacatggagctgagcagcctgagatctgaggacacggccgtgtatttttgtgcgagagactattgtacgaatggtgtgtgccctgactactggggccagggaaccctggtcaccgtctcctcag

SEQ ID NO: 1280 - DNA, 370 bp, Homo sapiens
  source 1..370: mol_type = other DNA
caggtgcagctggtgcagtctggggctgaggtgaagaagcctgggtcctcggtgagaatctcctgcaaggcttctggaggcaccttccgcaactttgctatcagctgggtgcgacaggcccctggacaagggcttgagtggatgggggggatcatccctttctttggtgcatcaaactacccacagaagttccggggcagagtcgcgattaccgcggacgaatccacgagcacagcgtacatggaactgagcagcctgagatctgaagacacggccgtctactactgtgcgagacacagcggttatcactatggtaacagtggccattttgaatactggggccagggaaccctggtcaccgtctcctcag

SEQ ID NO: 1281 - DNA, 373 bp, Homo sapiens
  source 1..373: mol_type = other DNA
cagatcaccttgaaggagtctggtcctacgctggtgaaacccacacagaccctcacgctgacctgcaccttctctgggttctcactcagcactagtggagtgggtgtgggctggatccgtcagcccccaggaaaggccctggagtggcttgcactcatttattggaatgatgataagcgctacagcccatctctgaagagcaggctcaccatcaccaaggacacctccaaaaaccaggtggtccttacaatgaccaacatggaccctgtggacacagccacatattactgtgcacacgcttattatgattacgtttggtggggcggctggttcgacccctggggccagggaaccctggtcaccgtctcctcag

SEQ ID NO: 1282 - DNA, 358 bp, Homo sapiens
  source 1..358: mol_type = other DNA
caggtgcagctgcaggagtcgggcccaggactggtgaagccttcacagaccctgtccctcacctgcactgtctctggtggctccatcagcagtggaggttactactggagctggatccgccagcacccagggaagggcctggagtggattgggtacatctataacagtgggagcacccactacaacccgtccctcaagagtcgaggtaccatatcagaagacacgtctaagaaccagttctccctggagctgagctctgtgactgccgcggacacggccgtgtattattgttcgaggggagggggggggatcccctttgacccctggggccagggaaccctggtcaccgtctcctcag

SEQ ID NO: 1283 - DNA, 384 bp, Homo sapiens
  source 1..384: mol_type = other DNA
caggttcagctggtgcagtctggagctgaggtgaagaagcctggggcctcagtgaaggtctcctgcaaggcttctggttacacctttaccagctacggtatcagctgggtgcgacaggcccctggacaagggcttgagtggatgggatggatcagcgcttacaatggtaacacaaactatgaacagaagctccagggcagagtcaccatgaccacagacacatccacgagcacagcctacatggagctgaggagcctgagatctgacgactcggccgtgtattactgtgcgagagatagcggatacgctcctttgttcgtcccctccaacttctattacggtatggacgtctggggccaagggaccacggtcaccgtctcctca

SEQ ID NO: 1284 - DNA, 370 bp, Homo sapiens
  source 1..370: mol_type = other DNA
caggtgcagctggtggagtctgggggaggcgtggtccagcctgggaggtccctgagactctcctgtgcagcctctggattcaccttcagtagttatggcatgcactgggtccgccaggctccaggcaaggggctggagtgggtggcagttatatcaaaagatggaactaataaatactatgcagactccgtgaagggccgattcaccatctccagagacaattccaagaacacgctgtatctgcaaatgaccagcctgagaactgaggacacggctatatatttctgtgcgaaagatctgagatggctaccccctgagtgggggtactttgactactggggccagggaaccctggtcaccgtctcctcag

SEQ ID NO: 1285 - DNA, 358 bp, Homo sapiens
  source 1..358: mol_type = other DNA
gaggtgcagctgttggagtctgggggaggcttagtacagcctggggggtccctgagactctcctgtgcagcctctggattcacctttgatacctattggatggcctgggtccgccaggctccagggaaggggctggaatacgtggccaatataaagtacgatggaagtgagaaatactatgtgggctccgtgaagggccgattcaccgtctccagagacaacgccaagaactcactgtatctgcaaatgaacagcctgacatccgaagacacggctctgtattactgtgtgagggtcatagggggacgctaccacgctgacaactggggccggggaaccctggtcaccgtctcctcag

SEQ ID NO: 1286 - DNA, 387 bp, Homo sapiens
  source 1..387: mol_type = other DNA
caggtgcagctgcaggagtcgggcccaggactggtgaagccttcacagaccctgtccctcacctgcactgtctctggtggctccttcagcagtggtgattactactggagttggatccgccagcccccagggaagggcctggagtggattggaaacatctattacagtgggagcaccgactacaacccgtccctcaagagtcgagttaccatatcagtagacacgtccaagagccaattctccctgaagctgacctctgtgactgccgcagacacggccgtgtattactgtgccagagagccagcgacttttggagtggttattgtagacgactactacttcggttgggacgtctggggccaagggaccacggtcaccgtctcctca

SEQ ID NO: 1287 - DNA, 361 bp, Homo sapiens
  source 1..361: mol_type = other DNA
caggtgcagctggtgcagtctggggctgaggtgaagaagcctgggtcctcggtgaaggtctcctgcaaggcttctggaggccccttcaacagttatgccatcagctgggtgcgacaggcccctggacaagggcttgagtggatgggagggatcaccgctatatttggtacagcaaactacgcacagaaattccagggcagagtcaccattaccgcggacaaatcagggaccacagcctacatggaactgaccagcctgagatctgaggacacggccatttattactgtgcgagggggaagaactactaccccaactactttgacttctggggccagggaaccctggtcaccgtctcctcag

SEQ ID NO: 1288 - DNA, 366 bp, Homo sapiens
  source 1..366: mol_type = other DNA
aggtgcaactggtggagtccgggggagacttggtccagcctggggggtccctgagactctcctgttcagcctctggattcgccttcagtcggtttgctatgcactgggtccgccaggctccagggaagggactggagtatgtttcagctattggcactaatggagatacctactactcagactccgtgaagggccgattcaccatctccagagacaattccaagaacacgctgtatctgcaaatgaacagcctgagagccgaggacacggccgtatattactgtgcgaaagaaccccacccctttagcagtggcgactactactttgactactggggccagggaaccctggtcaccgtctcctcag

SEQ ID NO: 1289 - DNA, 367 bp, Homo sapiens
  source 1..367: mol_type = other DNA
gaggtgcagttgttggactctgggggaggcttggtacagccgggggggtccctgagactctcctgtgaagcctccggattcaccttaagaaactatgccatgagctgggtccgccaggctccagggaaggggctggagtgggtctcagttattagtggtagtggtggtagcagatactacgcagactccgtgaagggccggttcaccatctccagagacgattccaagaacacgctgtatctgcacatgaacagcctgagagccgatgacacggccgtatattactgtgcgaaagacatcaggtccacccctcctgcgggaattacagactactggggccagggaacccaggtcaccgtctcctcag

SEQ ID NO: 1290 - DNA, 364 bp, Homo sapiens
  source 1..364: mol_type = other DNA
gaggtgcagctgatgcagtctggagcagaggtgaaaaagccgggggagtctctgaagatctcctgtaagggttctggatacaggtttaccaactactggatcggctgggtgcgccagaagcccgggaaaggcctggagtggatggggattatccatcttggtgactctgaaaccagatacagtccgtccttccaaggccaagtcaccatctcagccgacaagtccatcagtaccgcctacgtgcagtggagcagcctgaaggcctcggacaccgccatgtatttctgtgcgttttgtagtgggacctacgagcctcgtccttttgatgtctggggccaagggacaatggtcaccgtcgctccag

SEQ ID NO: 1291 - DNA, 373 bp, Homo sapiens
  source 1..373: mol_type = other DNA
caggtgcagctggtggagtctgggggaggcgtggtccagcctgggaggtccctgagactctcctgtgcagcctctgggttcaccttcagtagctatggcatgcactgggtccgccaggctccaggcaaggggctggagtgggtggcagctatctcatatactggaaatagtaaatactatgcagactccgtgaagggccgattcaccatctccagagacagttccaagaacacactgtatctgcaaatgaacagcctgagagctgaggacacggctgtgtattactgtgcgagagatgatattgtagtagtaccagctgctacgtggtcctttgactactggggccagggaaccctggtcaccgtctcctcag

SEQ ID NO: 1292 - DNA, 360 bp, Homo sapiens
  source 1..360: mol_type = other DNA
caggtccaactggtgcaatctggggctgaggtgaagaagccggggtcctcggtgaaggtctcctgcacggcctctggaggctccttcagcggccatactgtcagctgggtgcgacaggcccctggacaagggcttgagtggatgggaaggattatccctatccttggtatgacaaattacgcacagaacttccagggcagagtcaccatcaccacggacaagcccaccactacagcctacatggagctgagtggcctgagatctgacgacacggccatatattactgtgcgagggcggccgggagtggttatagtcctcctgtcaactggggccagggaaccctggtcagcgtctcctca

SEQ ID NO: 1293 - DNA, 369 bp, Homo sapiens
  source 1..369: mol_type = other DNA
caggtccagctggtgcaatctggggctgaggtgaagaagcctgggtcctcggtgaaggtctcctgcaaggcttctggaggcgccttcaacagctatactttcaactgggtgcgacaggcccctggacaagggcttgagtggatgggaaggatcatccctatccttggtatagaaaactacgcacagaagttccagagcagagtcacgattaccgcggacaaatccatgagcacagcctacatggagctcagcagcctgagatctgaggacacggccgtgtattactgtgcgagttatggttcggggagttcttccccatactaccctatggacgtctggggccaagggaccacggtcaccgtctcctca

SEQ ID NO: 1294 - DNA, 367 bp, Homo sapiens
  source 1..367: mol_type = other DNA
caggtgcagctggtgcagtctggggctgaggtgaagaaacctggggcctcagtgaaggtctcctgcaaggcttctggatacaccttcaccggccactatatccactgggtgcgacaggcccctggacaagggcttgagtggatgggatggatcaagccaaacagcggtggcacaaactatgtacagaagtttcagggcagggtcaccatgaccattgatatgtccatcaacacagcctacatggagttgagcgggctgagatctgacgacacggccgtgtattattgtgcgtcgtatgactttgatagtaatggttactacagacttgacccctggggccagggaaccctggtcaccgtctcctcag

SEQ ID NO: 1295 - DNA, 376 bp, Homo sapiens
  source 1..376: mol_type = other DNA
caggtgcagctggtgcagtctggggctgaggtgaagaagcctgggtcctcggttaaggtctcctgcaagacttctggaggcgccttcaacagctttgctatcagctgggtgcggcaggcccctggacaagggcttgagtggatgggagggctcatccctgtctttcgtacaccaaagtacgcacagaagttccagggcagagtcacaattaccgcggacgactccacgagcacagtgtacatggaactgagcagcctgagatctgaggacacggccgtctattactgtgcgagagcggccccagacaccgccgggggaagctactacctcacttttgactactggggccagggaaccctggtcaccgtctcctcag

SEQ ID NO: 1296 - DNA, 350 bp, Homo sapiens
  source 1..350: mol_type = other DNA
ggtgcagctggtggagtctgggggaaacttggtcccgcctggggggtccctgagactctcctgtgtagcctctggattcaccgtgaatagttattggatgcattggatccgccaggctccagggaaggggctggagtgggtggccaacataaaggaagatggaagtaagatatactatttggactctgtgaagggccgattcaccatctccagagacaacgccaagaactcactgtatctgcaaatgaacagcctgagagccgaggacacggccatatattactgtgcgagacaacttggtggtggtgactgcctttggggccagggaaccctggtcaccgtctcctcag

SEQ ID NO: 1297 - DNA, 381 bp, Homo sapiens
  source 1..381: mol_type = other DNA
caggtccagcttgtgcagtctggggctgaggtgaagaagcctggggcctcagtgaaggtttcctgcaaggcttctggatacaccttcagtagctatgcaatgcattgggtgcgccaggcccccggacaaaggcttgagtggatgggatggatcaacgctggcaatggtaacacaaaatattcacagaagttccagggcagagtcaccattaccagggacacatccgcgagcacagcctacatggagctgagcagcctgagatctgaagacacggctgtgtattactgtgcgagagtaggaaaggtaggcgatttttggagtggttaccaccccaatggtatggacgtctggggccaagggaccacggtcaccgtctcctca

SEQ ID NO: 1298 - DNA, 367 bp, Homo sapiens
  source 1..367: mol_type = other DNA
caggtgcagctggtgcagtctggggctgaggtgaagaagcctggggcctcagtgcaggtctcctgcaaggcttctgaatacaccttcacggactactatttgcactgggtgcgacaggcccctggacaaggacttgagtggctggggtggatcaaccctaatagtggtggcacaaagtatccaccgaattttcagggcagggtcaccgtgacccgggacacgtccatcagcacagcctacatggatctgaacagcctacattatgacgacacggccgtgtattactgtacgagaggatcccccataagtggtgacccgaccgggttcgaccactggggccagggaaccctggtcaccgtctcctcag

SEQ ID NO: 1299 - DNA, 361 bp, Homo sapiens
  source 1..361: mol_type = other DNA
caggtgcagctggcggagtctgggggaggcgtggtccagcctgggaggtccctgagactctcctgtacaacctctggattcactttcagtacctatggcatgcactgggtccgccaggctccaggcaaggggctggaatgggtggcagttatatcatatgatggaagtaataaatattatgcagactccgtgaagggccgattcaccatctccagagacagttccaggaacaccctgtatctgcaaatgaacagcctgagagttgaggacacggctgtttattactgtgcgaaagatgccgagtacattaactacggggggcactactggggccagggaaccctggtcaccgtctcctcag

SEQ ID NO: 1300 - DNA, 372 bp, Homo sapiens
  source 1..372: mol_type = other DNA
caggtgcagctggtgcagtctggggctgaggtgaagaagcctggggcctcagtgaagctttcctgcaaggcatctggatacggcttgaccacctacagtctgcactgggtgcggcagggccctggacaagggcttgagtggatgggagaagtcaaatcaaatggtggaaatacacagtatgcacagaggttccagggccgagtcacgatgaccagggacacgtccacgagcacagactacatggagctgagcagcctgggatctgaggacacggccgtgtattattgtgcttcccttcgcccaggggtcgcccgcgtcagatactccggtctggacgtctggggccaggggaccacggtcatcgtctcctca

SEQ ID NO: 1301 - DNA, 370 bp, Homo sapiens
  source 1..370: mol_type = other DNA
caggttcagctggtgcagtctggagctgaggtgaagaggcctggggcctcagtgaaggtctcctgcaaggcttctggttacaccttcaccaactatggtctcagctgggtgcgacaggcccctggacaagggcttgagtggatgggatggatcaccgctgacattggtaacacaaactacgcacagaagttccagggcagagtcaccatgaccacagacacatccacgagcacagcctacatggagctgaggagcctgagatctgacgacacggccgtgtattactgtgcgggagggtacgatattttgactgcttattataaacaatttgactactggggccagggaaccctggtcaccgtctcctcag

SEQ ID NO: 1302 - DNA, 382 bp, Homo sapiens
  source 1..382: mol_type = other DNA
gaggtgcagctgttggagtctgggggagacttggttcagcctggggggtccctgagactctcctgtgcagcctctggattcacctttgatacctattggatggcctgggtccgccaggctccagggaaggggctggagtgggtctcagctattaatgctggtggtggtggcacatactacgcagactccgtgaagggccggttcaccatctccagagacaattccaagaacacgctgtatctgcaaatgaacagcctcaaagccgaggacacggccgtatattactgtgcgaaagatgcggggaaaatgctttttggattagttattattcagtactactttgactcctggggccagggaaccctggtcaccgtctcctcag

SEQ ID NO: 1303 - DNA, 361 bp, Homo sapiens
  source 1..361: mol_type = other DNA
caggtccagctggtgcaatctggggctgaggtgaagaagcctgggtcctcggtgaaggtctcctgcaaggcttctggaggctccttcttcaggtatactttcagctgggtgcgacaggcccctggacaagggcttgagtggatgggaaggatcatccctgtacttggtatgacaaactacgcacagaagttccagggcagagtcacgattaccgcggacaaatccacgagcacagcctacatggagctgagcagcctgagatttgaggacacggccgtgtattactgtgcggtgacatcgccccagcagcagctggagtttgactactggggccagggaaccctggtcaccgtctcctcag

SEQ ID NO: 1304 - DNA, 376 bp, Homo sapiens
  source 1..376: mol_type = other DNA
caggtgcagctgcaggagtcgggcccaggactggtgaagccttcggagaccctgtccctcacctgcactgtctctggtggcgccatcagtagttacgattggagctggatccggcagcccccagggaagggactggagtggatcgggtatatctattacagtgggagcaccaagtacaacccctccctcaagagtcgagtcaccatctcagcagacacgtccaagaaccagttctccctgaagttgaactttgtgaccgctgcggacacggccgtgtattactgtgcgagagagtttcggttcgggcaattatcactcagtcgacatgatgcttttgatatgtggggccaaggggcgatggtcaccgtctcttcag

SEQ ID NO: 1305 - DNA, 379 bp, Homo sapiens
  source 1..379: mol_type = other DNA
caggtgcagctggtggagtctgggggaggcttggtcaaccctggagggtccctgagactctcctgtgcagcttctggattcaccttcagtgactactacatgagttggatccgccaggctccagggaaggggctggagtgggtttcacacattagtaaaagtagtagtcacacaaactacgcagactctgtgaagggccgattcaccatctccagagacaacgccaagaactcactgtttctgcacatgagcagcctgagggccgaggacacggctgtgtattactgtgcgagagtaccggcctcacggtgtgatggtgatagctgctacccgatttttgattattggggccagggaaccctggtcaccgtctcctcag

SEQ ID NO: 1306 - DNA, 367 bp, Homo sapiens
  source 1..367: mol_type = other DNA
caggtgcagctggtgcagtctggggctgaggtgaagacgcctggggcctcagtgaaggtttcctgcaaggcgtctggatacaccttcaccacctacttaatgcactgggtgcgacaggcccctggacaagggcttgagtggatgggaataatcaaccctagtagtggtagcacaagctacgcacagaagtttcagggcagagtcaccatgaccagggacacgtccacgagcacagtctacatggagctgagcagcctgagatctgaggacacggccgtgtattactgttctagagctagtcccccggtcgaaagtggaacggaatatgactactggggccagggaaccctggtcaccgtctcctcag

SEQ ID NO: 1307 - DNA, 376 bp, Homo sapiens
  source 1..376: mol_type = other DNA
cagctgcagctgcaggagtcgggcccaggactggtgaacccttcggagaccgtgtccctcacctgcactgtctctggtgactccatcagcactagtaattactactggggctggatccgccagccccctgggaaggggctggagtggactgggagtatccattatagtgggagcacctactacaacccgtccctcaagagtcgagtcaccatatccgttgacacgtccaagaaccagttctccctgaggctgagctctgtgaccgccgcagacacggctgtgtattactgtgcgagttattgtagtactgccagctgccccacgcggcgggcttttgatatctggggccaggggacaatggtcaccgtctcttcag

SEQ ID NO: 1308 - DNA, 370 bp, Homo sapiens
  source 1..370: mol_type = other DNA
gaggtgcaactgttggagtctgggggaaacttggtgcagcctggggggtccctgagactctcctgtgcagcctctggattcacctttaacgactatgccataaattgggtccgccaggctccagggaaggggctggactgggtctcagccattagaggtgatggtggtaataaatactacgcaggctccgtgaagggccggttcaccatctccagagacagttccaagaacacggtctacctgcaaatgaacagcctgagagccgaggacacggccgtatattactgtgcgaaagggcgctataggggtgactggaccgttgatactcttcatttctggggccaagggacaagggtcaccgtctcttcag

SEQ ID NO: 1309 - DNA, 373 bp, Homo sapiens
  source 1..373: mol_type = other DNA
gagatgcagctgttggagtctgggggaggcttggtacttccgggggggtccctgagactgtcctgtgcagcctctggattcacctttggcagctatggcatgagctgggtccgccaggctccagggaaggggctggagtgggtctgttctattagggacagtggcattagtagatactatacagactccgttaaggggcgattcaccatctccagagacaactccaagaacacgctgcatctgcaaatgagcagcctgagagccgacgacacggccgtctactactgtgcgaaagctcttagcaacaaatggcccggcagggaggcgtacctcgatctctggggccgcggcaccctggtcagcgtctcctcag

SEQ ID NO: 1310 - DNA, 374 bp, Homo sapiens
  source 1..374: mol_type = other DNA
gaggtgcagctgttggagtctgggggaggcttggtacagccgggggggtccctgagactctcctgtgcagcctctggattctccttgaacacctatgccatggcctgggtccgccaggctccagggatggggctggagtgggtctcatttattagtggcagtggtcttagcacgtactacgcagactccgtgaagggccggttcaccatctccagagacaagtccaaggacacggtgtctctgcaaatgaggagcctgagagccgaggacacggccgtttattactgtgcgaagattctgggttcggggaattacccccctactcaaggatactttgactcttggggccagggcaccctggtcaccgtctcctc

SEQ ID NO: 1311 - DNA, 358 bp, Homo sapiens
  source 1..358: mol_type = other DNA
gaagtgcagctggtggagtctgggggaggcttggtccagcctggggggtccctgagactctcctgtacagcctctggattcacctttgatacctattggatggcctgggtccgccaggctccagggaaggggctggaatacgtggccaatataaagtacgatgggagtgagaaatactatgtgggctccgtgaagggccgattcaccgtctccagagacaacgccaagaactcactgtatctgcaaatgattggcctgacatccgaggacacggctgtatattactgtgcgcgggtaatagggggacgctaccacgctgactactggggccggggaaccctggtcaccgtctcctcag

SEQ ID NO: 1312 - DNA, 356 bp, Homo sapiens
  source 1..356: mol_type = other DNA
caggtccagctggtgcaatctggggctgaggtgaagaagcctgggtcctcggtgaaggtctcctgcagggcttctggaggcaccttcttcaggaatactatcagctgggtgcgacaggcccctggacaagggcttcagtggatgggaaggatcacccctatccttggtatgacaaactacgcagaaaagttccagggcagagtcacgattaccgcggacaaatccacgagcacagcctacctggagcttcgcagcctgcgatctgaggacacggccgtatattactgtgcgagagcctatagtagctcgtccggggacgacgtctggggccaagggacctcggtcaccgtctcctc

SEQ ID NO: 1313 - DNA, 355 bp, Homo sapiens
  source 1..355: mol_type = other DNA
gaggtgcagctggtggagtctgggggaggcttggtccagccgggggggtcgctgagtctctcctgtaaagcctctggattcgcctttagttcctattggatgaactgggtccgccaggctccagggaaggggctggagtgggtggccaatataaaggaagatgaaagtgagaaatattatgtggactctgtgaggggccgattcaccatctccagagacaacgccaagaactcactgtttctgcaaatgaacagcctgagagccgacgacacggccttgtattattgtgcgagagcaggatttggtgtaccctttgactactggggccagggaaccctggtcaccgtctcctcag

SEQ ID NO: 1314 - DNA, 363 bp, Homo sapiens
  source 1..363: mol_type = other DNA
caggtgcagctggtgcagtctggggctgaggtaaagaagcctgggtcctcggtgagggtctcctgcaaggcttctggaggcaccctcaacaactatgctttcagctgggtgcgacaggcccctggacaagggcttgagtggatgggagggatcatccctatctttggtacggcaagctacgcacagatattccagggtagagtcacgattaccgcggacctatccacgggcacagcctacatggagctgagcagcctgagatctgaggacacggccgtgtattactgtgcggtgtcccgcggctatatgcccgcctacggtatggacgtctggggccaagggaccacggtcaccgtctcctca

SEQ ID NO: 1315 - DNA, 379 bp, Homo sapiens
  source 1..379: mol_type = other DNA
cagatcaccttgaaggagtctggtcctacgctggtgagacccacacagaccctcacgttgacctgcaccttctctggattctcactcagcactactggagtgggtgtgagctggattcgtcagcccccaggagaggccctggagtggcttgcagtcatttattgggacgatgataagcgctacagcccatctctgaagagcaggctcaccatcaccaaggacacctccaaaaaccaggtggtcctcacaatgaccaacatggaccctgtggacacaggcacatattactgtgcacacttgatgatctcctttgggggagtttttcgtgatgatgcttttgatatctggggccaagggacaatggtcaccgtctcttcag

SEQ ID NO: 1316 - DNA, 373 bp, Homo sapiens
  source 1..373: mol_type = other DNA
gacgtgcagctggtggagtctgggggagacgtggtccagcctggggggtccctgagactctcctgtgcagcctctggattcacctttagaaagtattgcatgagttgggtccgccaggctccagggaaggggctggagtgggtggccaacattaaggaagatggaagcgagaaatattatgtggactctgtgaagggccgattcaccatctccagagacaacgcccagaactcattgtttctgcaactgagcagcctgagaggcgaggacacggccgtgtattactgtgcgagaatatatcactttgaagatggtggttattaccgccactttgactactggggccgcggaaccctggtcatcgtctcctcag

SEQ ID NO: 1317 - DNA, 364 bp, Homo sapiens
  source 1..364: mol_type = other DNA
gaggtgcagctgttggagtctgggggaggcttggtacagcctggggggtccctgagactctcctgtgcagcctctggattcaccttcagcagctatgccatgagctgggtccgccaggctccagggaaggggctggagtgggtctcagctattagcgacactggtagtaccacatactacgcagactccgtaaagggccggttcaccatctccagagacagttccaagaacacgctgtatttgcaaatgaacagcctgagagccgaggacacggccgtatattactgtgcgaaattgggaggcgtatctgcccgtaatccgacagactactggggccagggaaccctggtcaccgtctcctcag

SEQ ID NO: 1318 - DNA, 365 bp, Homo sapiens
  source 1..365: mol_type = other DNA
caggtccagctggtgcaatctggggctgaggtgaagaagcctgggtcatcggtgagggtctcctgcaaggcttctggaggcaccttcggcaggtatacgatcacctgggtgcgacaggcccctggactagggcttgagtggatgggaaggatcatccctatccttgatataacaaactacgcacagaagttccagggcagagtgacgattaccgcggacaaattcacgagcacagcctacatgcagctgagcagcctgagatctgaggacacggccgtgtattactgtgcttctcttttgactggttattataacgactggtacttggatctctggggccgtggcaccctggtcactgtctcctc

SEQ ID NO: 1319 - DNA, 364 bp, Homo sapiens
  source 1..364: mol_type = other DNA
caggtgcagatggtggagtctgggggaggcgtggtccagcctgggaattccctgagactctcctgtgcagcctctggattcaccttcagaagttctggcatgcactgggtccgccaggctccaggcaaggggctggagtgggtggcagttatatcagatgatggaagtaatagacattatgcagactccgtggagggccgattcgccatctccagagacaattccaagaacacgttgtatttgcaaatgaacagcctgagggctgaggacacggctctgtattactgtgcgaaagggggccatgataccatctatagtttttttgactactggggccagggaaccgtggtcaccgtctcctcag

SEQ ID NO: 1320 - DNA, 367 bp, Homo sapiens
  source 1..367: mol_type = other DNA
gaggtgctgctggtggagtctgggggaggactggcacacccgggggggtccctaagactctcctgtacagcctctggattcagttttagtacttatggcatgatgtggatccgccaggctccagggaagggactggagtgggtctcatccattagttctactggtctcagtagatactatgtggattctgtgaagggccggttcaccatctccagggacgacgccaagagctcggtgcatctgcaaatgagcagcctgagagtcgacgattcggctgtatattattgtgtgagagggcccagagtgtcgttttccccagcgaattttgctttctggggccacgggacaatggtcagagtctcttcag

SEQ ID NO: 1321 - DNA, 363 bp, Homo sapiens
  source 1..363: mol_type = other DNA
gaggtgcagctggtggagtctgggggaggcttggtacagcctggggggtccctgagactctcctgtgcagcctctggattcacctttagtgactattggatgagctgggtccgccaggctccagggaaggggctggagtgggtttcctacattagcagtagtagtctttccatatactacgcagactctgtgaagggccgattcaccagctccagagacaatgccaagaagtcattgtatctgcaaatgaacagcctgagagccgaggacacggctgtctattactgtgcgaggagttcctttggtccttactactacggaatggacgtctggggccaagggaccacggtcaccgtctcctca

SEQ ID NO: 1322 - DNA, 384 bp, Homo sapiens
  source 1..384: mol_type = other DNA
gaagtgcagctggtgcagtccggagcagaggtgaaaaagcccggggagtctctgaggatctcctgtaagggttctggatacagctttgccagctactggatcagctgggtgcgccagatgcccgggaaaggcctggagtggatggggaggattgatcctcgtgactcttataccaagtacagcccgtccttccaaggccacgtcaccatctcagtagacaagtccatcagtactgcctacctgcagtggagcagcctgaaggcctcggacaccgccgtgtattactgtgcgacaaatgaccctgatacatattactatgatgatagtggtgcgaattacggtatggacgtctggggccaagggaccacggtcaccgtctcctca

SEQ ID NO: 1323 - DNA, 373 bp, Homo sapiens
  source 1..373: mol_type = other DNA
gaggtgcagctgttggagtctgggggaggcttggtacagcctggggggtccctgagactctcctgtgtagtctctggattcacctttaccagctatgccatgacctgggtccgccaggccccagggaaggggctggagtgggtctcagcaattagtagtggtgctaatacatactacgcagactccgttaagggccggttcaccatctccagagacaattccaagaacacgctgtatctgcaaatgagtagcctgagagtcgaggacacggccatatattactgtgcgaaagcgtggggatattgtggccgtgactgctacatatactattttgactcctggggccagggaaccctggtcaccgtctcctcag

SEQ ID NO: 1324 - DNA, 352 bp, Homo sapiens
  source 1..352: mol_type = other DNA
gaggcgcagctggtggagtccgggggagggttagttcagcctggggggtccctgagactctcctgtgcagcctctggattcaccatcagtacctactggatgcactgggtccgccaagctccagggaaggggctggtgtgggtctcacgtattaagagtgatggtagtagcacaagctacgcggactccgtgaagggccgattcaccatctccagagacaacgccaagaacaccttgtatctgcaaatgaacagtttgagagccgaggacacggctgtatattactgtgcaggtaactggggccgacctgttgactactggggccagggaaccctggtcaccgtctcctcag

SEQ ID NO: 1325 - DNA, 370 bp, Homo sapiens
  source 1..370: mol_type = other DNA
gaggtgcatctggtggaatctgggggaggctcggtccagcctggggggtccctgacactctcctgtacagcctctggattcacctttaataattattggatgacctgggtccgccaggctccagggaaggggctggagtgggtggccagcataaaggaagatgaaagtgaaaaaaattatgtggactctgtgaagggccgattcaccgtctccagagacaacgccaagtatacaatgtctctgcaaatgaacagcctgacggccgaggacacggctgtctattactgtgcgagaaccgccggggatagtagtaccttctatcgtgcttttgatatccggggcccagggacaatggtcaccgtctcttcag

SEQ ID NO: 1326 - DNA, 343 bp, Homo sapiens
  source 1..343: mol_type = other DNA
gaggtgcagctggtggagtctgggggtggcctggtccagccgggggggtccctgagactctcctgtgcgacctctggataccccgtcagtggcaaccacatgacctgggtccgccaggctccagggaaggggctggggtgggtctcaattatttatggcggtggtgcaacacactacgcagactccgtgaagggccgattcagcatctccagagacgcatccaagaacattgtgtatcttcaaatgaatagcctgagaactgaagactcggctgtttattattgcgcgagtttcggtgcggggagttctgtgggccagggaacccgggtcaccgtctcctcag

SEQ ID NO: 1327 - DNA, 367 bp, Homo sapiens
  source 1..367: mol_type = other DNA
gaggtgcagttggtggagtctgggggaggcttggtccagcctggagggtccctgagactctcctgtgcagcctctggattcactctcagtgactactacatggactgggtccgccaggctccagggaaggggctggagtgggttggcagtatcagaagcaaagctcaaggctacaccatagaatacgccgcgtctgtgaaaggcagattcatcatctcaggagatgattcaaccaactcattgtacctgcaaatgaacagcctgacaaccgacgacacggccgtatattattgtgctagaatgagagaaaatagtggctggttcaatgacttctggggccagggaaccctggtcaccgtctcctcag

SEQ ID NO: 1328 - DNA, 362 bp, Homo sapiens
  source 1..362: mol_type = other DNA
gaggtgcagttggtggagtcgggaggaggcttagtccagccgggggggtccctgagactctcctgtgcagcctctggatttacctttagtaactcttggatgaactgggtccgccaggctccagggaggggcctggagtgggtggccaacataaaggaagatggaagtgaagaaaactatgtggactctgtgaagggccgattcaccatctccagagacaacgcccagaactcactgtctctgcacatgaacagcctgagagtcgaggacacggctgtgtattactgtgcgaagctccaacccgacacgggattcaggcctgtagatttctggggccaagggacaatggtcaccgtctcttc

SEQ ID NO: 1329 - DNA, 364 bp, Homo sapiens
  source 1..364: mol_type = other DNA
gaggtacgactggtggagtcggggggaggcttggtccagcctggggggtccctgagactctcctgtgcagcctctggattcacgtttaacaagtattggatgagctgggtccgccaggctccagggaaggggctggagtgggtggccaacataaaggaagatggaagtgaaaaacactatgtggactctgtgaagggccgattcaccatctccatagacaacgccaagaactcactgtatctgcaaatgaacagcctgagagccgaggacacgtctatatattactgtgcgaaactatgtcccgatactgcttatcgacccgttgacttctggggccagggaaccctggtcaccgtctcctcag

SEQ ID NO: 1330 - DNA, 364 bp, Homo sapiens
  source 1..364: mol_type = other DNA
gaggtgcagctggtggagtcgggggggggcttggtccagcctggggggtccctgagactctcctgtgcagcctctggattcacctttagtaactatcccatgggctgggtccgccaggctccagggaaggggctggagtgggtggccaacataaaacacgacgagagtgagaagttttacgtggactctgtgaagggccgattcaccatctccagagacaacgccaagaactcattgtatctgcagatgaacagcctgagagccgaggatacggctgtatattactgtgcgagattgactccggacacctgctataggccgcttgactgctggggccagggaaccctgctcaccgtctcctcag

SEQ ID NO: 1331 - DNA, 361 bp, Homo sapiens
  source 1..361: mol_type = other DNA
caggtgcagctacagcagtggggcgcaggactgttgaagccttcggagaccctgtccctcacaagcgctgtctatggtgggtccttcagtggttactactggagctggatccgccagcccccagggaaggggctggaatggattggggaaatcaatcatagtggaagcaccaactacaacccgtccctcaagagtcgagtcaccatatcagtagacacgtccaagaaccagttctccctgaagctgagctctgtgaccgccgcggacacggctgtgtattactgtgcgagacaatattgtagtagtaccagctgcctttttgactactggggccagggaaccctggtcaccgtctcctcag

SEQ ID NO: 1332 - DNA, 352 bp, Homo sapiens
  source 1..352: mol_type = other DNA
gaggtgcagttggtgcagtctggagcagaggtgaagaagcccggggagtctctgaaaatctcctgtcaggcttctgggtacaactttgccaacaattgggtcggctgggtgcgccagatgcccgggaaaggcctggagtggatggcaatcatctatcctggtgactctgataccaaatacagcccgtccttccaaggccatgtcaccatctcaggcgacaagtccattagcaccgcctacctgcagtggaacagcctgaagacctcggacaccgccatgtattactgtgcgagacttaggggccatgtttttgatatctggggccaagggacaatggtcatcgtctcttcag

SEQ ID NO: 1333 - DNA, 382 bp, Homo sapiens
  source 1..382: mol_type = other DNA
caggtgcacttggtggagtcggggggagccgtggtccagcctggaaggtccctgagactgtcctgtgcagcgtctggactctccttcagtaattatggcatgcattgggtccgccaggctccaggcaaggggctggagtgggtggctgatatttggtttgatagaaatgacaaaaactatgcagactccgtgaagggcagattcaccatctccagagacaactccaagaatatggtctatctggacatggacagcctgacagaagaggacacggctgtctactactgtgcgagaggtcggacaatgtctcgaggcttttcaccagcaactccgacgaattttgactattggggccagggaaccctggtcatcgtctcctcag

SEQ ID NO: 1334 - DNA, 352 bp, Homo sapiens
  source 1..352: mol_type = other DNA
gacgtgcagctggtgcagtccggaccagaactcaaaaagccgggggagtctctgaaaatctcctgcaagggttctgcatacatatttaccaacttctggatcggctgggtgcgccagatgcccgggaaaggcctggagtggatggcaatcatctatcctggtgactctgataccaaatacagcccgtccttccaaggccatgtcaccatctcaggcgacaagtccattagcaccgcctacctgcagtggaacagcctgaagacctcggacaccgccatgtattactgtgcgagacttaggggccatgtttttgatatctggggccaagggacaatggtcatcgtctcttcag

SEQ ID NO: 1335 - DNA, 373 bp, Homo sapiens
  source 1..373: mol_type = other DNA
caggtgcagttggtggagtctgggggaggcgtggtcccgcctgggacgtccctgagactctcctgtgcagcgtctggattcatttttaaggagtttggcatgtattgggcccgccaggctccagggaaggggctggagtgggtggcaattatttggaatgatggaagtaagaaatactatggagactccgtgaggggccgattcaccatttccagagacgaaaccgagaacgcgctgtttttgcaaatgaacagcctgagagtcgaggacacggctctatattactgtgggaggtccaactacggtggtgactccggcagggaggatgcaattgatatctggggccaagggacaatggtcaccgtctcctcag

SEQ ID NO: 1336 - DNA, 354 bp, Homo sapiens
  source 1..354: mol_type = other DNA
caggtgcagctggtggagtctgggggaggcgtggaccagcctgggaggtccctgagactctcctgttcagcgtctggattcatcttcaataactatggcatgcactgggtccgccaggctccaggcaaggggctggagtgggtggcagttatatggaatgatggaagtaataaatattatgcagactccgtgaagggccgattcaccgtctccagagacgaatccaagaacaccctgtatctgcaaatgaacagcctgagagccgaggacacggctgtctattactgtgcgagatccaatgaagggacccacatggacgtctggggcaaggggaccacggtcaccgtctcctca

SEQ ID NO: 1337 - DNA, 370 bp, Homo sapiens
  source 1..370: mol_type = other DNA
gaggaactggtggtggagtctgggggaggcttggtccagcctggggggtccctgagactctcctgtgcagcctctggattcacctttagtgcctattggatgaactgggtccgccaggctccagggaagggactggagtgggtggccagtataaagcatgatggaagtgaggaaaagtatgtggactctgtgaagggccgattcaccgtctccagagacaatgccatgaactcactgtacctgcaaatgaacagcctgagagtcgaggacacggctgtctactactgtgcgagatcccacagtagtgaagactccgcgtaccgcccttctagtgtgtggggccaagggacagtggtcaccgtctcttcag

SEQ ID NO: 1338 - DNA, 376 bp, Homo sapiens
  source 1..376: mol_type = other DNA
caggtgcagctgcaggagtcgggcccaggactggtgaagccttcacagaccctgtccctcacgtgcactgtctctggcacattcgtcaggagtacaagttatttctggacctgggtccggcagcccgccgggaggggcctggagtggattggccatatgtatactagtggcctcgccaactatgacccctccctcaagagtcgggccaccatatcacttgacacgaccaagaaccagttctccctgacgttgagatccgtgaccgccgcagacacaggcaaatatttttgtgcgcgaggaggaatttatgataatggtggttattatcgcggcattgaccactggggccagggaaccctggtcaccgtctcctcag

SEQ ID NO: 1339 - DNA, 379 bp, Homo sapiens
  source 1..379: mol_type = other DNA
gaggtgcaagtggtggagtctgggggaggcttggtccagcctggggggtccctgagactctcctgtgcagcctctggattcaattttggtacttattggatgagttgggtccgccaggctccagggaaggggctggagtgggtggccaatataaaagaagatggaagtaaaagttactatgtggactctgtgaagggccgattcaccatatccagagacaacgccaagaactcactgtttctgcaaatgaacagcctgagaggcgacgacacggctatttattactgtgcgagagatcaaaaaatatattgtagtagtgacacctgctattgggcctttgacgactggggccagggaaccctggtcaccgtctcctcag

SEQ ID NO: 1340 - DNA, 354 bp, Homo sapiens
  source 1..354: mol_type = other DNA
tgcagctggtggagtctgggggagccttggtacagcctggacagtccctgagactctcttgtgcagcctctggaatcaccctcagtagttataacatgaactgggtccgccaggctcctggggaggggctagagtggctttcatacattagtagtagtagtgataaaatatactacgcagactctgtgaagggccgattcaccatctccagagacaatgccaagagttcactgtatctgcaattgaacagcctgagagccgacgacacggctgtgtattactgtgcgaccgacaattggtacgacggtgacctcgactactggggccggggaaccctggtcaccgtctcctcag

SEQ ID NO: 1341 - DNA, 360 bp, Homo sapiens
  source 1..360: mol_type = other DNA
cttttggagtctgggggaggcttggtacagcctggggggtccctgagactctcctgtgcagcctctggattcaggtttagcagctctgccatgagctgggtccgccaggctccagggaaggggctggagtgggtctcatttattagtaacagtggtctctccacatactacgcggactccgtgaagggccggttcaccatctccagagacacttccaaaaacacgctgtatctgcgaatgagtggcctgagagtcgaggacacggccgtatatttctgtgcgaaagaccgggctgtagtagtgccagaccgggggagcatggacgtctggggccgagggaccacggtcaccgtctcctca

SEQ ID NO: 1342 - DNA, 376 bp, Homo sapiens
  source 1..376: mol_type = other DNA
gaggtgcagctggtggagtctgggggaggcttggtacagcctggggggtccctgagactctcctgtgcagcctctggattcaccttcagtagctacgacatgcactgggtccgccaagctacaggaaaaggtctggagtgggtctcaactattggtactcaaagtgacacattctattcaggttccgtggagggccgattcaccatctccagagaaaatgccaagaactccttgtatcttcaaatgaacagcctgagagccggggacacggctgtttattactgtgcaagagggcccctctgtaatagtaccacctgcccaaccgatgatgcttttgatatctggggccaagggacaaaggtcaccgtctcttcag

SEQ ID NO: 1343 - DNA, 376 bp, Homo sapiens
  source 1..376: mol_type = other DNA
caggtccagctggtacagtctggggctgaggtgcagaagcctggggcctcagtgaaggtctcctgcaaggtttccggatacacgctcagtgaattatccatacagtgggtgcgacagggtcgtggaaaagggcttgagtggatgggaagttttgatcgtaaacatggtgaaacaatcaacgcacagaagttccagggcagagtcaacatgaccgacgacacatctacagacacagcgtacatggagctgagcagcctgagatttgaggacacggccgtatattactgtgcaacagagtacatgtatggcccctcaatagggccctttgatgcttttgacatctggggccaagggacaatggtcaccgtctcttcag

SEQ ID NO: 1344 - DNA, 367 bp, Homo sapiens
  source 1..367: mol_type = other DNA
gaggtgaaggtggtggagtctgggggaggcttggtccagcctggggggtccctgaaaatttcctgtgcagtctcgggattcagtattgataatcagtggatgagctgggtccgccaggctccagggaagggactggaatgggtggccaacataaaggaggacggcagtgacagagactatgtggactctgtgaagggccgattcatcatctccagagacaaccccgagaattcagtttatctgcaaatgaacagcctgagagccgaggacacggctgtctattactgtgcccaccccttacgaggttcgtcacgttatgatggttttcaaatctggggccatgggacattggtcaccgtcttttcag

SEQ ID NO: 1345 - DNA, 391 bp, Homo sapiens
  source 1..391: mol_type = other DNA
gaggtgcagctggtgcagtctggagcagaagtgaaaaagcccggggactctctgaagatttcctgtcagacttctggatacacctttaccgactactggatcggctgggtgcgccagatgcccggcaaaggcccggagtggatggggatcgtctatcctggtgactctaaatctgactctaaatctacttacaatccgtcgttccaaggccaggtcaccatttcagccgacaagtccctcaccaccgcctatctgcagtggagcagtctgagggcctcggacaccgctatgtattactgtgggagacttagccgcccgcatagggactcggccgggggttattctccctttgattactggggccagggaaccctactcaccgtctcctcag

SEQ ID NO: 1346 - DNA, 370 bp, Homo sapiens
  source 1..370: mol_type = other DNA
gaggtgcgactggtggaatctgggggagacttggtccagcctggggggtccctgagtctctcctgtgcagtctctggattcagttttagaaattattggatgagttgggtccgccaggctccagggaaggggctgcagtgggtggccaccataaaaaaagatggaagtgagaaatactatgtggactctgtgaagggccggttcaccatctccagagacaacgccaagaactcgctgtttctgcaagtgagcagcttgagagccgacgacacggctatatattactgtgtgaccattcaggatgatgacgccagccgatatcgtccttttgatgtctggggccaagggataatggtcaccgtctcttcag

SEQ ID NO: 1347 - DNA, 364 bp, Homo sapiens
  source 1..364: mol_type = other DNA
caggttcagttggtgcagtctggaggtgaactgaagaagcctgggacctcagtgaaggtctcctgccaggcttctggttacaactttcgcctctattatatcagttgggtgcggcaggcccctggacaaagacttgagtggatgggatggatcaacgtttacaatggtaagacagattatgcacagaggttccaggacagagtcaccatgaccacagacacttccacgagcacagcctacatggacctgaggagtctgaggtctgacgacacggccgtctattactgtgtgagacatccaattataattggatctatcgactttgacttctggggccaaggaaccctgatcaccgtctcctcag

SEQ ID NO: 1348 - DNA, 367 bp, Homo sapiens
  source 1..367: mol_type = other DNA
caggtccagctggtgcagtctggggctgaggtgaagaagcctgggtcctcagtgaaggtctcctgcaaggcttctggaggcaccttcagaaattatggtatcagctgggtgcgacaggcccctggacaagggcttgagtggatggggggtatcgtccctatccttggaattgtaaacaacgcacagaagttccagggcagagtcacgattaccgcgcccttgtccgcggacacagcgtacatggagctgagtggtctgagatctgaggacacggccatttattactgtgcgacagtcccagcctctagttcgtggggaagcgctgttgactactggggccagggaaccctggtcaccgtctcctcag

SEQ ID NO: 1349 - DNA, 370 bp, Homo sapiens
  source 1..370: mol_type = other DNA
gaggtgcaattggtggaatctgggggaggcctggtccagcctggagggtccctgagactctcctgtgtagcctctggattcctcctcagtgactactacatggactgggtccgccaggctccagggaaggggccagagtgggttggctgcattcggagaaacgctaatgatggcactacagaatacgccgcgtctgtgaaaggcagaatgtccatctcaagagatgattcaaagaacacaatgtatctacaaatcaacaggctgaaaaccgaggacacggccgtctattactgttccatatgtagcaacactggagatgactggtataacaggtactggggccagggaacccaggtcaccgtctcctcag

SEQ ID NO: 1350 - DNA, 355 bp, Homo sapiens
  source 1..355: mol_type = other DNA
gagttccagctggtggcgtccgggggaggcttagttcagccgggggggtccctgagactctcctgtgcagcctccggattcaccttcagaaactactggatgcactgggtccgccaagctccagggaaggggctggtttgggtctcacgtattaatggtgatgggagtagcacagactacgcggactccgtgaagggccgattcaccatctccagagacaacggcaagagcacgctgtttctgcaaatgagcagtctgagagccgaggacacggctgtgtattactgtgcaacaaccttttcctctgatggtggtgccttttggggccagggaaccctggccaccgtctcctcag

SEQ ID NO: 1351 - DNA, 355 bp, Homo sapiens
  source 1..355: mol_type = other DNA
gaggtgcagctggtggactctgggggagacttggtacagcctggggggtccctgagactctcctgtgcagcctctggattcaccttcagtaattttggcatgaactgggtccgccaggctccagggaaggggctggagtgggtttcatacatcagtagtagtggtagtgacatatactacgcagactctgtgaaaggccgattcaccatctccagagacaacgccaagaactcactgtatctgcaaatgaacagcctgagagacgaggacacggctctgtatcactgtgcgagaggcgagggggcatggggtgataactgctggggccagggaaccctggtcaccgtctcctcag

SEQ ID NO: 1352 - DNA, 364 bp, Homo sapiens
  source 1..364: mol_type = other DNA
gaggtccagctggtgcagtctggggctgaggtgaagaagcctggggctacagtgagactctcctgcaaagtttctggatacaccttcaccaacttctacatacactggatacaacaggcccctggaaaagggcttgagtggatgggacttattgatcctgaggatggtaaaaccatgtacgcagggaagttccagggcagactcaccataaacgcggacacgtctatagacacagcctacatggacctgagcagcctgacatctgaggacacggccgtctatttctgtgcaactatggggtactataatggtactcagaggttcgacaagtggggccagggaaccctggtctccgtctcctcag

SEQ ID NO: 1353 - DNA, 352 bp, Homo sapiens
  source 1..352: mol_type = other DNA
caggtgcagctggtgcagtctggggctgaggtgaagaagcctggggcctcagtgatgatttcttgcaaggcatctggatacacattcagcgaccactatatgcactgggtgcgacaggcccctggacaagggcttgactggatgggaataatcagccctagtggtgatagcgcaaactacgcacagaagttccagggcagagtcaccatgaccagggacacgtccacgagcacagtctacatggaactgagcagcctgagatctgaagacacggccgtatattactgtgtgagatcctcgaaccaagaatttgactactggggccagggaaccctggtcaccgtctcctcag

SEQ ID NO: 1354 - DNA, 355 bp, Homo sapiens
  source 1..355: mol_type = other DNA
gaggtgcagctggtggagtctgggggaggcttggtacagcctggggggtccctgagactctcctgtgcagcctctggattcaccttcagtagttatagcatgaactgggtccgccaggctccagggaaggggctggagtgggtttcatacattggtagtaggagtgagaccatatactatgcagactctgtgaagggccgattcaccatctccagggacaatgccaagaactcactgtatctgcaaatgaacagcctgagagacgaggacacggctgtgtattactgtgcgagagatctgtggggtattgtagtccccaactggggccagggaaccctggtcaccgtctcctcag

SEQ ID NO: 1355 - DNA, 376 bp, Homo sapiens
  source 1..376: mol_type = other DNA
gaggtgcagctggtggagtctgggggaggcttggtccagcctggggggtccctgagactctcctgtgcagcctctggattcacctttagtagctattggatgagctgggtccgccagcctccagggaaggggctggagtgggtggccaacataaagcaagatggaagtgagaaatactatgtggactctgtgaagggccgattcaccatctccagagacaacgccaagaactcactgtatctgcaaatgaacagcctgagagccgaggacacggctgtgtattactgtgcgaggaccatttggattgtggtagtaccagctgccccggggtactttgactactggggccagggaaccctggtcaccgtctcctcag

SEQ ID NO: 1356 - DNA, 349 bp, Homo sapiens
  source 1..349: mol_type = other DNA
caggtgcagctggtggagtctgggggaggcttggtcaagcctggagggtccctaagactctcctgtgcagcctctggattcaccttcagtaactcctacatgagctggatccgccaggctccagggaaggggctggagtgggtttcatacattagtagtagtggtggtgacatatatcatgcagactctgtcaagggccgattcaccatctccagggacaacgccaagaactcactgtatctacaaatgaacagcctgagagtcgaggacacggctgtctattactgtgcaagagactggggtaaggggcgggactggggccagggaaccctggtcaccgtctcctcag

SEQ ID NO: 1357 - DNA, 379 bp, Homo sapiens
  source 1..379: mol_type = other DNA
gaggtgcagctggtggagtctgggggaggcttggtccagcctggggggtccctgagactctcctgtgcagcctctggattcacttttagtagatattggatgagttgggtccgccaggctccagggaaggggctggagtgggtggccaacataaaggaagatggaagtcagaaagactatgtggactctgtgaagggccgattcaccatctccagagacaacgccgagaactcactgtatctgcaaatgaacaccctgagagccgaggacacggctgtgtatttctgttcgagagtcgcgcttcctgatgatgatggcaattcgaggtatcgccacattggcttctggggccagggaacccaggtcaccgtctcctcag

SEQ ID NO: 1358 - DNA, 384 bp, Homo sapiens
  source 1..384: mol_type = other DNA
caggttcagctggtgcagtccgcagatgaggggaaggagcctggggcctcagtgaaggtctcctgcaaggcttctggttacacctttaccacgtttggtatcacctgggtgcgacaggcccctggacaagggcttgagtggatgggatggatcagcgctaacaacggtaacacaaactatgcacagaagttccagggcagagtcaccatgaccacagacacatccacgagcacagcctacatccacttgaggaacctgagatctgacgacacggccaaatattactgtgcgaaattccgtttgaagtatgactggttacccaatggtccttactacttctacatggacgtctggggcaaagggaccacggtcaccgtctcctca

SEQ ID NO: 1359 - DNA, 387 bp, Homo sapiens
  source 1..387: mol_type = other DNA
gaggtgcagctggtggagtctgggggaggcttggtccagcccggagggtccctgagactctcctgtgcagcctctggattcaccttcagtgaccacgacatggactgggtccgccaggctccagggaaggggctggagtgggttggccgcactgggatcaaagataacaattacgttgcacaatacgccgcgtctgtgaaaggcagattcaccatttcaagagatgattcaaaaaacgaagtctctctgcaaatgagcagcctgaaaatcgaggacacggccatatattattgtgctagagatggtcgggggttgtatgatactagtgattatcgatactactacatggacgtctggggcaaagggaccacggtcaccgtctcctca

SEQ ID NO: 1360 - DNA, 376 bp, Homo sapiens
  source 1..376: mol_type = other DNA
caggtccagctggtacagtctggggctgaggtgaagaagcctggggcctcagtgaaggtctcctgcaaggtttccggatacacgctcagtgaattatccatacactgggtgcgacagggtcctggaaatgggcttgagtggatgggaggttttaatcgtcaatatggtgaaagaatctacgcacagaaattccagggcagagtcaccatggccgaggacccatctacagacacagcctacatggaactgaccagcctgagatctgaggacacggccgtatactactgtataacagagtacatgcttggcccctcaatagggccctttgatgcttttgacatttggggccaagggacagtggtcacagtctcttcag

SEQ ID NO: 1361 - DNA, 364 bp, Homo sapiens
  source 1..364: mol_type = other DNA
gaggtgcagctggtggagtctgggggaggcttggtacagcctggggggtccctgagactctcctgtgcagcctctggattcaccttcagtagctatagcatgaactgggtccgccaggctccagggaaggggctggagtgggtttcatacattagtagtagtagtagtaccatatactacgcagactctgtgaagggccgattcaccatctccagagacaatgccaagaactcactgtatctgcaaatgaacagcctgagagacgaggacacggctgtgtattactgtgcgagagacgacattcagctgctacccggtccctttgactactggggccagggaaccctggtcaccgtctcctcag

SEQ ID NO: 1362 - DNA, 372 bp, Homo sapiens
  source 1..372: mol_type = other DNA
caagtgcagctggtgcagtctggggctgaggtgaagaagcctggggcctcagtgaaggtgtcctgcaaggcttctggatacagctttaccgacttctatgtccactgggtgcgacaggcccctggacaagggcttgagtggatgggatggattaaccctaacactggtgacacaatttatgcacagaagtttcagggcagggtcaccatgaccagggacacgtccatcaggacagcctacatggagcttaacagactgagatctgacgacacggccgtgtatttctgtgcgagagttggtgggaattactttggatacttctactcctacttggacgtctggggcagagggaccgcggtcaccgtctcctca

SEQ ID NO: 1363 - DNA, 370 bp, Homo sapiens
  source 1..370: mol_type = other DNA
caggtgcagctggtggagtctgggggaggcgtggtccagcctgggaggtccctgagactctcctgtgcagcctctggattcaccttcagtaactatgctatgcactgggtccgccaggctccaggcaaggggctagagtgggtggcggttatatcatatgatggaagtaatggatactacgcagactccgtgaagggccgattcaccatctccagagacaattccaagaacatggtgtatctgcaaatgaacagcctgagagctgaggacacggctgtctatttctgtgcgaggggggggaatatatatagcagcagctggtccggcattgagtactggggccagggagccctggtcaccgtctcctcag

SEQ ID NO: 1364 - DNA, 361 bp, Homo sapiens
  source 1..361: mol_type = other DNA
gaggtccagctggtacagtctggggctgaggtggagaagcctggggctacagtgaaaatctcctgcaaggtttctggatacaccttcaccgactattacatccactgggtgcgccaggcccctggaaaagggcttgagtggatgggacttattgatcctgaagatgctaaaacaatgtacgcaaagaagttccagggcagattcaccataaccgcggacacgtctacggacacagcctacatggagctgaccagcctgagatctgaggacacggccatgtattattgtcgaagtggtggttatgcgggattagatgtctttgatttttggggccgagggacaatggtcatcgtctcttcag

SEQ ID NO: 1365 - DNA, 370 bp, Homo sapiens
  source 1..370: mol_type = other DNA
gaggtgcagctcttggagtctgggggaggcttcgtacagcctagggggtccctgagactctcctgtgcagcctctggattcaccttcagcagctatgccatgacctgggtccgccaggctccagggaaggggctggagtgggtctcaagtcttactggtagtggtggtgacacatactacgcagactccgtgaagggccggttcaccatctccagagacaattcccagaacacgatgtacctgcaaatgaatagtctgagagccgaagacacggccgtatattactgtgcgaaagactggcgggagtcatcttgtgatggagactgcttgaactactggggccggggaaccctggtcaccgtctcctcag

SEQ ID NO: 1366 - DNA, 376 bp, Homo sapiens
  source 1..376: mol_type = other DNA
caggtccagttggcacagtctggggctgaggtgaagaagcctggggcctcagtgaaggtctcctgcaaggtttccggatacacggtctctgatttagccatccactgggtgcgacagggtcctggaaaagggcttgagtggatggggggttttgatcgtatcgctgggaaaaggaactacgcacagaaattccagggcagagtcctcatgaccgaagacagatctacaaacacagcctacatggagctgaacagactaagatctgacgacacggccgtctatttttgtgcaacagagtacatgcttggcccgtcaatagggccctttgatgcttttgacatctggggccaagggacactggtcaccgtctcttcag

SEQ ID NO: 1367 - DNA, 378 bp, Homo sapiens
  source 1..378: mol_type = other DNA
caggtccagctggtgcagtctggggctgaggtgaagaagcctggatcctcggtgaaggtctcctgcaggttttctggaggcaccttcaacaaaaatgctatcagttgggtgcgacaggcccctggacaaggcctggagtggatgggaggaatcatgcctatctttggtacaccaaagtacgcacagaggttccagggccgactcacgattaccgcggacgaatccacgagaacactctacatggagctgagcagcctgagatctgaggacacggccgtgtattactgtacgtcaccccgaaatacagctttgcctacacgtttccatcacttctacatggacgtctggggcacagggaccacggtcaccgtctcctca

SEQ ID NO: 1368 - DNA, 373 bp, Homo sapiens
  source 1..373: mol_type = other DNA
caggtgcaactggtgcagtctggggctgaggtgaggaagcctggggcctcagtgaaggtctcctgtaaggcttctggatacaccttcagcgactactatatgcactgggtgcgacaggcccctggacaagggcttgagtggatgggatggatcaaccctaacagcggtggtacaaactatgcacagaagtttaagggcagggtcaccatgaccagggacacgtccatcagcacagtctatatggagctgaactggctgacatctgacgacacggccgtgtattactgtgcgagactcgctccccccctgactacaagaactacgtactggttcgacccctggggccagggaaccctggtcaccgtctcctcag

SEQ ID NO: 1369 - DNA, 364 bp, Homo sapiens
  source 1..364: mol_type = other DNA
gaggcccagctggtacagtctggggctgaggtgaagaagcctggggctacagtgagagtctcctgcaaaacttctggatacaccttcaccaacttctacatacactgggtgcaacaggcccctgggaaaggacttgagtggatgggacttgttgatcctgaggatggtaaaacaatgtacgcggggaagttccagggcagagtcaccattaccgcggacacgtctatcgacacagcctacatggacctgagcagtctgagatctgaggacacggccgtctatttctgtgcgactatggggtattatgatggtactcagaggttcgacaaatggggccagggaaccctggtcaccgtctcctcag

SEQ ID NO: 1370 - DNA, 370 bp, Homo sapiens
  source 1..370: mol_type = other DNA
gaggtgcagttggtggaatttgggggaggcttggtccagcctggggggtccctcagactctcctgtgtaggctctggattcacctttagtaatcattggatgagttgggtccgccaggctccagggaaggggctggagtgggtggccaacataaaggaagatggaagtcagaaagactatgtggactctgtgaagggccgattcaccatctccagagacaacgccgacaactcgctgtctctgcacatgaacagcctgagagtcgaggacacggctgtatattactgtgcgagacaattttgtggtgattgcactgcctacagacactttgactgctggggccagggaaccctggtcaccgtctcctcag

SEQ ID NO: 1371 - DNA, 352 bp, Homo sapiens
  source 1..352: mol_type = other DNA
caggtgcagctggtggagtctgggggaggcgtggtccagcctgggaggtccctgagactctcctgtgcagcctctggattcaccttcagtagctatggcatgcactgggtccgccaggctccaggcaaggggctggagtgggtggcagttatatcatatgatggaagtaataaatactatgcagactccgtgaagggccgattcaccatctccagagacaattccaagaacacgctgtatctgcaaatgaacagcctgagagctgaggacacggctgtgtattactgtgcgaaagatggtaccagccgctttgactactggggccagggaaccctggtcaccgtctcctcag

SEQ ID NO: 1372 - DNA, 364 bp, Homo sapiens
  source 1..364: mol_type = other DNA
caggtgcagctggtggagtctgggggaggcgtggtccagcctgggaggtccctgagactctcctgtgcagcgtctggattcaccttcagtagctatggcatgcattgggtccgccaggctccaggcaaggggctggagtgggtggcagttatatggtctgatggaagtaataaattctatgcagactccgtgcagggccgattcaccatctccagagacaattccaagaacactctgtacctgcaaatgaacagcctgagagccgaggacacggctgtgtactactgtgcgggtcaaaagtatagcagcacctggtacagtattgactactggggccagggaaccctggtcaccgtctcctcag

SEQ ID NO: 1373 - DNA, 361 bp, Homo sapiens
  source 1..361: mol_type = other DNA
caggtccagctggtgcagtctggggctgaggtgaagaagcctgggtcctcagtgagggtctcctgcaaggcttctggaggcaccttcagcagctatggtatcagctgggtgcgacaggcccctggacaaggacttgagtggatgggatgtttcatccctatgcttaatatagcaaggttcgcacagaagttccagggcagagtcacgattaccgcggacaaatccacaatcacaccctacatggagctgagcagcctgagatctgaggacacggccgtatattactgtgcgtgcggcagtgggagctaccccagacactttgactactggggccagggaaccctaatcaccgtctcctcag

SEQ ID NO: 1374 - DNA, 390 bp, Homo sapiens
  source 1..390: mol_type = other DNA
cagatgcaactgcaggagtcgggcccaggactggtgaagccttcggggaccctgtccctcacctgcactgtctctggtggctccatcagtagtaacagtgtctactggggctgggtccgccagcccccagggaagggcctggagtggattgcgactatctattataatgggaacacctattacaatccgtccctcaagagtcgagtcaccatctccgtagacacgtccaagaatctgttctccctgaaactgacgtctgtgaccgccgcagacacggctgtatattactgtgcgagacatgcagccacgatttttggactgcttagacccccggattactacttctgcatggacctctggggcgaagggaccacggtcaccgtctcctca

SEQ ID NO: 1375 - DNA, 379 bp, Homo sapiens
  source 1..379: mol_type = other DNA
cagatcaccttgaaggagtctggtccgacgctggtgaaacccacacagaccctcacgctgagttgcaccttctctgggttctcacttagtgctactggagtgggtgtgggctggatccgtcagcccccaggaaaggccctggagtggcttgcaatcatttattgggatgatgataagagatacagcccatctctgaagaccaggctcaccatcaccaaggacacctccaaaacccaggtggtccttataatgaccgacatggaccctgtagacacagccacatattactgtgcacacatgacgactgcgtttgggggagtcacaaggcttgatgcttttgatgtctggggccaagggacaatggtcaccgtctcttcag

SEQ ID NO: 1376 - DNA, 375 bp, Homo sapiens
  source 1..375: mol_type = other DNA
gaggggcacctggaagagtctgggggaggcttagtacagcctggggggtccctgagactctcctgtgcagcctctggattcaggttcagtgactacagcatcaactgggtccgtcaggctccagggaaggggctggagtggatttcatacattaccagtaggagtcggaccgtgtactacgcaggctctgtgaagggccgattcaccatctccagagacaacgccaagaactcactgtatctgcaaatgaatagcctgagagccgaagacacggctgtgtattattgtgcgagagagggagggtacggtgacttacctccatattcatacggtatgaacgtctggggccaagggaccacggtcaccgtctcctca

SEQ ID NO: 1377 - DNA, 376 bp, Homo sapiens
  source 1..376: mol_type = other DNA
caggtccaactggtgcagtctgggcctgaggtgaggaagcctgggtcctcggtgaaggtctcctgcaaggcttctggaggcaccttcggcagctatgccatcaactgggtgcgacaggcccctggacaagggcttgagtggatgggagggatcatccctatctttaatacaccaagatacgcacagaagttccagggcagagtcacgattaccgcggacgaatccacgagcacagcctacatggagctgagcagcctgagatctgaggacacggccgtctattactgtgcgagtcccgcgccccagtatggttcgggaactttttatttgtcctttgactactggggccagggaacgctggtcaccgtctccacag

SEQ ID NO: 1378 - DNA, 364 bp, Homo sapiens
  source 1..364: mol_type = other DNA
caggtgcagctgcaggagtcgggcccaggactggtgaagccttcggagcccctgtccctcacttgcaatgtctccggtgactccatcagtaattactactgggcctggatccggcagtccccagggaagggactggagtggattgcgtatatttcttccagggggcgcaccaattacaatccctccctcaagcgtcgagtcaccatttctatagacacgtccaagaaccagttctctctgagactactctctgtgaccgcagcggacacggccctttattactgtgcgagagatgatactggtataagtggtcttaatgcttttgacatttggggccgagggacaatggtcaccgtctcttcag

SEQ ID NO: 1379 - DNA, 384 bp, Homo sapiens
  source 1..384: mol_type = other DNA
caggtccaccttgtgcagtctggggctgaggtgaagaagcctggggcctcagtgaagctttcctgcaaggcctccggatacaccttcaatagttatgctatacattgggtgcgccaggcccccggacaaaggcctgagtggatgggatggatcaacgctggcaatgatgagacagaatatgcacagaagttccagggcagagtcaccattaccagggacacatccgcgagcacagcctacatggagttgaggagcctgaaatctgaagacacggctgtctattactgtgcgagagacgcccgtgtagtggtggttcctggttcccgctactacttctactacatggacgtctggggcaaagggacctcggtcaccgtctcctca

SEQ ID NO: 1380 - DNA, 369 bp, Homo sapiens
  source 1..369: mol_type = other DNA
caggttcacctggtgcagtctggagctgaggtgaagaagcctggggcctcagtgaaggtctcctgcaaggcttctggttacacctttaccacctatggtatcagctgggtgcgacaggcccctggacaagggcttgagtggatgggatggatcagcgcttacaatggtaacacaaactatgcacagaagttccagggcagagtcaccatgaccacagacacatccacgagcacagcctacatggagttgaggagcctgagatctgacgacacggccgtgtattactgtgcgagggtgctcggtggctacgtctactacttctacggtatggacgtctggggccaagggaccacggtcaccgtctcctca

SEQ ID NO: 1381 - DNA, 393 bp, Homo sapiens
  source 1..393: mol_type = other DNA
caggttcaattggtgcagtctggagctgaggtgaagaggcctggggcctcagtgaaggtctcctgcaaggcttctggttacacctttaggaattacggcatcagttgggtgcgacaggccccaggacaagggcttgagtggatgggatggatcagcggtaacaatggtgccgattataatatgaacaatgtacagaagtttcagggcagagtcactctgaccatagacacatccacaagtacatcgtacatggaaatgaggagcctgagatcggacgacacggccgtgtattactgtgcgagagattcaggatgcattagtaagtggaacgtaaacggttgtgattacggtatggacgtctggggccaagggaccacggtcaccgtctcctca

SEQ ID NO: 1382 - DNA, 393 bp, Homo sapiens
  source 1..393: mol_type = other DNA
caggtgcaactgcaacagtcgggcccaggattggtaaagccttcggagaccctgtccctcacctgcagggtttctggtggctccatttacagttactattggagttggatccggcagccccaagggaagggactggagtggattggatatgtccattccagtggcagtcccacttacaccccctccctcaacagtcgagccaccatgtcactagacatgtccaagaccctgctctccctgaaggtgacgtctgttacagctgcggacacggccgtttatttctgtgcgggggggtggagagaacaactggcaggtatggcaagtagtagtgtaggacactactactacggtatgcacgtctggggccaagggaccacggtcaccgtctcctca

SEQ ID NO: 1383 - DNA, 361 bp, Homo sapiens
  source 1..361: mol_type = other DNA
caggttcagctggtgcagtctggagctgaggtgaagaagcctggggcctcagtgaaggtctcctgcaaggcttctggttacacctttaccagctatggtatcagctgggtgcgacaggcccctggacaagggcttgagtggatgggatggatcagcgcttacaatggtaacacaaactatgcacagaagctccagggcagagtcaccatgaccacagacacatccacgagcacagcctacatggagctgaggagcctgagatctgacgacacggccgtgtattactgtgcgaggatagcagcagctggcttaaactggttcgacccctggggccagggaaccctggtcaccgtctcctcag

SEQ ID NO: 1384 - DNA, 393 bp, Homo sapiens
  source 1..393: mol_type = other DNA
caggtgcaactgctggagtcgggcccaggactggtgaaactttcggagaccctgtccctcacctgcagtgtctctggtggctccatgaataatcaatactggagctggatccggcagtccccagggaagggactggagtggattgggtatatccattacagtgggaattccaactacaacccctccctcaacagtcgagtcaccatgtcagtagacacgtccaagaaagtgttcttcctgaggctgacctctgttaccgctgcggacacggccgtgtatttctgtgcgggggggtggagagaacaactgggaggtatgggaggaagtcatgtaggccactattactacggaatggacgtctggggccaagggaccacggtcaccgtctcctca

SEQ ID NO: 1385 - DNA, 378 bp, Homo sapiens
  source 1..378: mol_type = other DNA
cagctgctgctgcaggagtcgggcccaggactggtgaagccttcggagaccctgtccctcacctgcactgtctctggtggctccatcagcactagtagttactactggggctggatccgccagcccccagggaaggggctggagtatattgggagtatttattatagtgggatcacctactataacccgtccctcaagagtcgagtcaccatatccgtagacacgtccaagaaccagttctccctgaagctgagctctgtgaccgccacagacacggctgtttattattgtgcgagacaagaatatgggtggctacgaagcaattactacttctacatggacgtctggggcaaagggaccacggtcaccgtctcctca

SEQ ID NO: 1386 - DNA, 355 bp, Homo sapiens
  source 1..355: mol_type = other DNA
caggtgcagctggtgcactctgggcctgaggtgaagaagcctggggcctcagtgaaggtctcctgtcaggcttctggatacaccctcagcgcctactacatgcattgggtgcgacaggcccctggacaagggcttgagtggatgggatggatcaacccaaacaatggtgacacaaagtatgtacagaagtttcaagacagagtcaccatgacctgggacacgtccatcaccacagcctacatggaactaaataggctgaaatctgacgacacggccctatattactgtgcgaggggcggcagctctgattggttggacccctggggccagggaaccctggtcaccgtctcctcag

SEQ ID NO: 1387 - DNA, 391 bp, Homo sapiens
  source 1..391: mol_type = other DNA
caactgcagctgcaggagtcgggcccaggactggtgaagccttcggagaccctgtccctcacttgcactgtctctggtggctccatcaggagtaatagttactactggggctggattcgccagcccccagggaaggggctggagtggattggaagcatctactacaatggggatacctactacaacccgtccctcaagagtcgactcaccatatcggttgacacgtccaagaaccagttctccctgaagctgacctctgtgaccgccgcagacacggctgtttattactgtgcgagacatgaggcgcgagttggtgtaataagggtggatgtggtatctgggcactggttcgacccctggggccagggaaccctggtcagcgtctcctcag

SEQ ID NO: 1388 - DNA, 361 bp, Homo sapiens
  source 1..361: mol_type = other DNA
caggtccagctggtgcagtctggggctgaggtgaggaagcctgggtcctcggtgaaggtctcctgcaaggcttctggaggcaccttcagcaactatggtgtcagctgggtgcgacaggcccctggacaagggcttgagtggatgggagggatcatcggtatgtttggtacagcaaagtacgcacagatgttccagggcagagtcacgattaccgcggacaatttcccgagcgcagtctacatggagctgagcgggctgacatctgaggacacggccatgtattactgtgcgagtagtagtgcttattacttggaatatctccagcattggggccagggcaccctggtcaccgtctccacag

SEQ ID NO: 1389 - DNA, 349 bp, Homo sapiens
  source 1..349: mol_type = other DNA
caggttcagttggagcagtctggagctgagttgaggaagccaggggccccagtgacggtctcctgcaagacttctggttacacctttaacaactacggtattacgtgggtgcgacaggcccctggacaaggccttgactggatgggatggataagttcttatggtaacacaaagtatgcacagaaactacaaggcagagtcaccatgaccactgacacatccacgaccacagcctacatggagctcaggagtctcagatttgacgacacggccgtgtatttttgtgcgagagggcggcagcccccctttgacttctggggccagggaaccctggtcaccgtctcctcag

SEQ ID NO: 1390 - DNA, 369 bp, Homo sapiens
  source 1..369: mol_type = other DNA
caggtgtacctggtggagtctgggggaggcgtggtccagtctgggaggtccctgagactctcctgtgcagcctctgggttcactttcaagaattatggcatgcactgggtccgtcaggctccaggcaaggggctggagtgggtggcacttatatcagatgatggaaccagaatatattatgcagactccgtgaagggccgattcaccatttccagagacaattccaggaacacgctatatctgcaaatgaacaggctaaaaattgaagacacggctgtgtattactgtgcgaaaggggacatttatggttacgactcttactactacatggacgtctggggcaaagggaccacggtcgccgtctcctca

SEQ ID NO: 1391 - DNA, 370 bp, Homo sapiens
  source 1..370: mol_type = other DNA
caggtgcagctgcaggagtcgggcccaggactggtgaagccttcggagaccctgtccctcacctgcactgtctctggtgactccatcagtaattactactggagctggatccggcagcccccagggaagggactggagtggattgggtatatctattacagtgggagcaccaactacaacccctccctcaagagtcgagtcaccatatcagtagacacgtccaagaaccaggtctccctgaagttgagctctgtgaccgctgcggacacggccgtgtattactgtgcgagaggagttaagatttttggagtggcccgacccaactggttcgacccctggggccagggaaccctggtcaccgtctcctcag

SEQ ID NO: 1392 - DNA, 364 bp, Homo sapiens
  source 1..364: mol_type = other DNA
gaagtgcagctggtgcagtctggagcagaggtgaaaaagcccggggactctctgaggatctcctgtaagggttctggatacagctttaccaactactggatcaactgggtgcgccagatgcccgggaaaggcctggagtggatggggaggattgatcctagtgactcttataccgactacagcccgtccttccaaggccacgtcaccatctcagctgacaagtccatcaccactgcctacctgcagtggagcagcctgaaggcctcggacaccgccatgtattactgtgcgagacatcaggggaacccggggttggagaggttcgacccctggggccagggaaccctggtcaccgtctcctcag

SEQ ID NO: 1393 - DNA, 361 bp, Homo sapiens
  source 1..361: mol_type = other DNA
cagctgcagctgcgggagtcgggcccaggactggtgaagccttcggagaccctgtccctcacgtgcactgtctctggcggctccagtattagtggttcttactactggggctggatccgccagcccccagggaaggggctggagtggattggcagtatgtattatactgggtatacctacctcaacccgtccctcaagagtcgagtcaccatatccgtagacacgtccaagaatcaagtctccctgagggtgagctctgtgaccgccgcagacacggctgtctattactgtgcgagacgcgcggggagtagtgggaccttctactactggggccagggaacactggtcaccgtctcctcag

SEQ ID NO: 1394 - DNA, 361 bp, Homo sapiens
  source 1..361: mol_type = other DNA
cagctgcagctgcgggagtcgggcccaggactggtgaagccttcggagaccctgtccctcacgtgcactgtctctggtggctccagtattagtggtacttactactggggctggatccgccagcccccagggaaggggctggagtggattggcagtatgtattatactgggtatacctacttcaacccgtccctcaagagtcgagtcaccatatccgtagacacgtccaggaatcaagtctccctgaagatgagctctgtgaccgccgcagacacggctgtctattactgtgcgagacgcgcggggagtagtgggaacttctactactggggccagggaacactggtcaccgtctcctcag

SEQ ID NO: 1395 - DNA, 367 bp, Homo sapiens
  source 1..367: mol_type = other DNA
caggttcagctggtgcagtctggagctgaggtgaagaagcctggggcctcagtgagggtctcctgcaaggcttctggttacacctttaccaactatggtatcagctgggtgcgacaggcccctggacaagggcttgagtggatgggatgggtcagcgcttacaatggtaacacaaactatgcacagaagttccagggcagagtcaccatgaccacagacacatccacgagcacagcctatatggagctgaggagcctgagatctgacgacacggccttttattattgtgtgagagatgaatcgacggttttagtgggaccttcgtttgactactggggccaaggaacgctggtcaccgtctcctcag

SEQ ID NO: 1396 - DNA, 364 bp, Homo sapiens
  source 1..364: mol_type = other DNA
caggtgcagctgcaggagtcgggcccaggactggtgaagccttcggagaccctgtccctcacctgcactgtctctggtgactccatcggtaattactactggagttggatccggcagcccccagggaagggactggagtggattgggtatattcattacagtgggaggatcaactacaatgtccccctcaagagtcgagtcaccatatcaatagacacgtccaagaaccagttctccctgaagttgacctctgtgaccgctgcggacacggcccaatattactgtgcgagagatgataccggtataatgagaactaatgcctttgactactggggccagggaatgctggtcaccgtctcctcag

SEQ ID NO: 1397 - DNA, 376 bp, Homo sapiens
  source 1..376: mol_type = other DNA
gaggtgcatctgttggagtctgggggaggcttggaacagcctggggggtccctgagactctcctgtgcagcctctggattcacctttagggcctatgccatgagctgggtccgccaggctccagggaaggggctggagtgggtctccagtattcgttttactgatggaaccacatactacgcaggctccgtggagggccgcttcaccatctccagagacgattccaagaacacgctgtttctgcaaatgaaccgcctgagagtcgaggacacggccgtatattactgtgtgaaagattggggtcctggagattcttgtggtagtggtagttgcttaagtaagtggggccagggtacgctggtcaccgtctcctcag

SEQ ID NO: 1398 - DNA, 393 bp, Homo sapiens
  source 1..393: mol_type = other DNA
cagttgcagctgcaggagtctggcccaggactggtgaagccttcggagaccctgtcgcttacctgctctgtctctggcgactccatgaagaattaccactggagctggatccggcagtccccaggaaagggactgcagtggattggatatgtctcttataacggaaacaccatttacagcccctccctcgagagtcgagtcgtcatgtcaatagacacgtccaacagtcagttctccctcaaactgaggtccgtgaccgctgcggacacggccctttattactgtacgggggggtggaaagaagaactgggaggaagtcccggtagtgtcggaggccactactactacgctttcaacgtctggggccaagggaccatggtcaccgtctcctca

SEQ ID NO: 1399 - DNA, 375 bp, Homo sapiens
  source 1..375: mol_type = other DNA
gacgtacaactattggagtcggggggagacctgagacagccgggggggtccctgagactctcctgtgttgcctctggatttaattttagaagttatgccatgagttgggtccgccaggctccagggaaggggctggagtgggtctctggtatcggtggaactgacggcagtacatactacacagactccgtgaagggccggttcaccatttccagagacaatgcaaagaacacggtgtatctgcaaatgaacaacctgagaggcgaggacacggccctctattactgtgcgaaagatatggagggtgggaggtaccacagtcttctctacgctatcgacgtctggggccaagggaccacggtcactgtctcctca

SEQ ID NO: 1400 - DNA, 385 bp, Homo sapiens
  source 1..385: mol_type = other DNA
cagatcaccttgaaggagtctggtcctacgctggtgaaacccacacagaccctcacgctgacctgcaccttctctgggttctcactcagcactagtgcagtgggtgtgggctggatccgtcagcccccaggaaaggccctggagtggcttgcactcatttattggaatgatgataagcgctacagcccatctctgaagagcagggtcaccatcgccaaagacacctccaaaaaccaggtggtccttacagtgaccaacatggaccctgtggacacagccacatattactgtgcacgcaatcgggggggtgtatatgattcggggacttattatataggggactttgactactggggccagggaaccctggtcaccgtctcctcag

SEQ ID NO: 1401 - DNA, 373 bp, Homo sapiens
  source 1..373: mol_type = other DNA
caggtgcagttggtggagtctgggggaggcgtggtccagcctggggagtccctgagactctcgtgtgcagcctctggattcaccttcgatgaccatagtatgcactggatccgccaggctccaggcaaggggctggaatgggtggcatttatatggcatgatggaaataaaatagactacatagcctccgtgcagggccgattcaccatctccagagacaattcgaagaacacgctgtatctacaaatgaacaacctgagagttgaggacacggctgtgtatcactgtgtgagaggccgcgggcgggtagtggctacggagtacaactggttcgagccctggggccacggaaccctagtcaccgtctcctcag

SEQ ID NO: 1402 - DNA, 373 bp, Homo sapiens
  source 1..373: mol_type = other DNA
caggtacaactggtggagtcggggggaggcgtggtccagcctgggaagtccctgagactctcctgtgcagcctctggattcaccttcagtgcttatggtatccactgggtccgacaggctccaggcaaggggctggaatgggtggcatttatatcatttgatggaggcagtaaatattacgcagactccgtgaagggccgattcaccatctccagagacaattccaagaacacactatatgtgcacatgaacagcctgagagttgaggacacggctgtctattactgtgcgagagaccgaggggggaagtatcccccttccatgggcttcttcgacccctggggccagggaaccctggtcaccgtctcctcag

SEQ ID NO: 1403 - DNA, 349 bp, Homo sapiens
  source 1..349: mol_type = other DNA
ctggtgcagtctggagctgaggtgaagaagcctggggcctcagtgaaggtctcctgcaagacttctgattacacctttaccgcctatggtataacctgggtgcgacaggcccctggacaaagtcttgagtggatgggatggatcagcacttccaatggtaacacaaactatgcacagaagttccagggcagagtcaccatgaccacagagacatccacgaccacagcctacatggaactgaggagcctgagatttgacgacacggccgtttattattgtgcgagagggggagcagcagctgactggctcaacccctggggccagggaaccctggtcaccgtctcctcag

SEQ ID NO: 1404 - DNA, 349 bp, Homo sapiens
  source 1..349: mol_type = other DNA
caggtgcagctgcaggagtcgggcccaggactggtgaagccttcggagaccctgtccctcacctgcactgtcactggtggctccatcaacacttattactggacgtggatccggcagccccccgggaagggactgcaatggattgggtatgtctcttacagtgggagcaccaactacaatccctccctccagagtcgcgtcaccatatcagtggacacgtccaagaatcagttctccctgaggttgacctctgtgaccgctgcggacacggccgtttatttctgtgcgagagatgattaccagttcttttcttcctggggccagggaacgctggtcaccgtctcctcag

SEQ ID NO: 1405 - DNA, 358 bp, Homo sapiens
  source 1..358: mol_type = other DNA
gaggtgcagctggtggagtccgggggaggcttagttcagcctggggggtcactgagactctcctgtgcagcctctggattcaccttcagtaacttctggatgcactgggtccgccaagctccagggaaggggctggtgtgggtctcacgtattaataaggatgggactactacagattatgcggactccgtgaagggccgattcaccgtctccagagacaacgccaagaacacgctgtatctacaaatgaacggtctgagagccggggacacggctgtctattattgtgtaaactcagtccaaagactccagtggtatgccttctggggccagggaacgctggtcaccgtctccccag

SEQ ID NO: 1406 - DNA, 373 bp, Homo sapiens
  source 1..373: mol_type = other DNA
caggtgcagctggtgcagtctggggctgaggtgaagaagcctggggcctcagtgaaggtttcctgcaaggcttctggaaacatcttcaccaaattgtatttacactgggtgcggcaggcccctggacaagggcttgagtggatgggaataatcatccctagtgcaggtgccacaacctacgcacagaagttccagggcagactctccatgaccagggacacgtccacgagcgcagtctatatggagctgagcagcctgagatctcaggacacggccgtgtattattgtgcgggatccgaggcacgtggatacatttttatggtcccggacggtgactcctggggccagggaaccctggtcaccgtctcctcag

SEQ ID NO: 1407 - DNA, 393 bp, Homo sapiens
  source 1..393: mol_type = other DNA
caggttcaactggtgcagtctggagctgaggtgaagaggcctggggcctcagtgaaggtctcctgtaaggcttctggttacacctttagcaactatggcatcagctgggtgcgacaggccccaggacaaggacttgagtggatgggatggatcagcggtaagaatggtgccgattataagataaataatgtacagaagtttcagggcagattcactctgaccatagacatatccacaagtacatcctacatggaaatgaggagcctgagatcggacgacacggccctgtattactgtgcgagagattcaggatgcattagtaagtggaatgtaaacggttgtgattacggtatggacgtctggggccaagggaccacggtcaccgtctcctca

SEQ ID NO: 1408 - DNA, 358 bp, Homo sapiens
  source 1..358: mol_type = other DNA
caggtccacctggtgcaatctggggctgaggtgaagaaacctgggtcctcggtgagagtctcctgcgaggcttcaggaggcactttcagcaggtcctctatcggctgggtgcgacaggcccctggacaaggacttgagtggttgggaagtgttatccctacccttggtataacaaactacgcacagaggttccagggcagaatcacaatttccgcgtccaggactacagcctacatggaggtgagatccctgagatctgaagacacggccgtctattattgtgcctcccacgacgagccgctatggtctccatactttgactattggggccagggaacactactcaccgtctcctcag

SEQ ID NO: 1409 - DNA, 376 bp, Homo sapiens
  source 1..376: mol_type = other DNA
gaggtgcagttggtggagtctgggggaggcctggtcaagcctggagggtccctgagactctcctgtgcagcctctggattcaccttcaatagttataccatgaattgggtccgccaggctccagggaaggggctggagtgggtcgcatccattggtaccagtgctggttacatctcctacgcaggatcagtgaagggccgattcaccatctccagagacaacgccaggaactcactatttctgcaaatgaacagcctgagagccgaagacacggctgtctattactgtgcgagagagggcggttattattctggttcggagacttatggggtctttgacttctggggccggggaacgctggtcaccgtctcctcag

SEQ ID NO: 1410 - DNA, 385 bp, Homo sapiens
  source 1..385: mol_type = other DNA
cagatcaccttgaaggagtctggtcctacgctggtgaaacccacacagaccctcacgctgacctgcaccttctctgggttttcactcagcactagtggagtgggtgtgggctggatccgtcagcccccaggaaaggccctggagtggcttgcactcatttattggaatgatggtaaccgttacagcccatctctgaagaacagggtcaccatcaccaaggacacctccaaaaaccaggtggtccttacaatgaccaacatggaccctgtggacacagccacatattactgtgcacacaatcgggggggtgtatatgattcggggacttattatataggggactttgaccactggggccagggaatcctggtcaccgtctcctcag

SEQ ID NO: 1411 - DNA, 373 bp, Homo sapiens
  source 1..373: mol_type = other DNA
caggtgcagctgcaggagtcgggcccaggactggtgaagccttcggagaccctgtccctcacctgcgctgtctctggttactccgtcaatagtggttactacttggcctggatccggcagccccccgggaaggagctggagtcgattggaattatctatcatggtgggattacctactacaacccgtccctcaagagtcgagtcaccatctcactagacacgtccaagagccagttctccctgaagctgacctctgtgaccgccgcagacacggccgtgtattattgtgcgagaggcgtacgggggagctatccggacctaacattctattttgactactggggccagggaatgctggtcaccgtctcctcag

SEQ ID NO: 1412 - DNA, 351 bp, Homo sapiens
  source 1..351: mol_type = other DNA
tgcagttggtggagtctgggggaggcttggtccagccgggggggtccctgagactctcctgtgcagcctctggattcacctttagtacttattggatgacctgggtccgccaggctccagggaagagtctggagtgggtggccaacatagaccaagatgggagtgagaagaactatgtggagtctctgaagggccgattcaccatctccagagacaacgccaagaatttactgtatctgcaaatgagcagcctgagaggcgaggacacggctgtctattactgtgtgagggggggaggaaattcttgggggggatattggggccagggaaccctggtcaccgtctcctcag

SEQ ID NO: 1413 - DNA, 367 bp, Homo sapiens
  source 1..367: mol_type = other DNA
caggtgcagttggtggagtcggggggaggcgtggtccagccgggagggtccctgagactctcgtgtgcagcgtctggattcagcttcagaaattatggcatgcactgggtccgccaggctccaggcaaggggctggagtgggtggcatttatgcgaactgatgacactgataaatactatgcagactctgtgaagggccgattcaccgtctccagagacaattccaaaaacaccctgtatctgcaaatgaacagcctgagacctgaggacacggctgtgtattactgtgggaaggatcccctcgggaaatatagcgatggttctattgactactggggccagggaaccctggtcaaagtctcgtcag

SEQ ID NO: 1414 - DNA, 376 bp, Homo sapiens
  source 1..376: mol_type = other DNA
gaagtgcagctggtggagtctgggggaggcttggtacagcctggcaggtccctgagactctcctgtgcagcctctggattcacctttgatgattatgccatgcactgggtccggcaagctccagggaagggcctggagtgggtctcaggtattagttggaatagtggtagcataggctatgcggactctgtgaagggccgattcaccatctccagagacaacgccaagaactccctgtatctgcaaatgaacagtctgagagctgaggacacggccttgtattactgtgcaaaagatgggggcggatacgaactatggttcggggaaaactggttcgacccctggggccagggaaccctggtcaccgtctcctcag

SEQ ID NO: 1415 - DNA, 362 bp, Homo sapiens
  source 1..362: mol_type = other DNA
ggtgcaattggtggagtcggggggagacttggtccagccgggggggtccctgagactctcctgtgcagcctctggattcacgtttaataagcattggatgagctgggtccgccaggctccaggggaagggctggagtgggtggccgacataaagcaagatggaagtaacaaatactatgtggactctgtgaagggccgattcaccatctccagagacaacgccaagagctcagtgtatctacagatgaacagcctgagagacgaggacacggccgtgtattactgtgtgagagatgacagtagtggaaatgtcgatgcttttgacatctggggccaagggacaatggtcaccgtctcttcag

SEQ ID NO: 1416 - DNA, 357 bp, Homo sapiens
  source 1..357: mol_type = other DNA
gacgtgcaactggtggactctgggggaggcttggtacagcctggggggtcccggagactctcctgtgcagcctctggattcacctttagcaactatgccatgtcctgggtccgccaggctccagggaagggactggagtgggtctcagttatttacagtggtgatatcacatactactcaaattccgtgaggggccgattcaccatctccagagacaattccaggaacacgctgtatcttcaaatgaacagcctgagagccgaggacacggccgtgtattactgtgcgagagggacagacagcgcagctacccgtgtggacgcctggggccaagggactacggtcaccgtctcctca

SEQ ID NO: 1417 - DNA, 375 bp, Homo sapiens
  source 1..375: mol_type = other DNA
cagctgcagctgcaggagtcgggcccaggactggttaagccttcggagaccctgtccctcacctgcactgtctctggtggctccatcagcagtagtggttactactggggctggatccgccagcccccagggaaggggctggagtggattgggactatttattatagagggagcacctactacaacccgtccctcaagagtcgagtcaccatctcagtggacacgtccaagaaccagttctccctgaagctgagctctgtgaccgccgcggacacggccgtgtattactgtgcgagagtcttcaaggagggaatagtggctacgataaatgcttttgatatctggggccaagggacaatggtcaccgtctcttca

SEQ ID NO: 1418 - DNA, 357 bp, Homo sapiens
  source 1..357: mol_type = other DNA
gaggtgcaactggtggagtctgggggaggcttggtacagccgggggggtccctgagactctcctgtgcagcctctgggttcaccgtcagtagcaaatacatgtcctgggtccgccaggctccagggaagggactggagtgggtctcagttatttacagtggtgatatcacatactactcaaattccgtgaggggccgattcaccatctccagagacaattccaggaacacgctgtatcttcaaatgaacagcctgagagccgaggacacggccgtgtattactgtgcgagagggacagacagcgcagctacccgtgtggacgcctggggccaagggactacggtcaccgtctcctca

SEQ ID NO: 1419 - DNA, 359 bp, Homo sapiens
  source 1..359: mol_type = other DNA
gaagtgcagttggtggagtctgggggaggcttggtgcagcctggcaggtccctgagactctcctgtacagcctctggattcacctttgatgattatgccatgcagtgggtccggcaagctccagggaagggcctggagtgggtctcaggtattagttgggatagtggtgccataggctatgtggcctctgtgaagggccgattcaccatctccagagacaacgccaagaactccctgtatctgcaaatgaccagtctgagacctgaagacacggccttgtattactgtgcaagagccccctatggttcggggagttatattaaccactggggcccgggaaccctggtcaccgtctcctc

SEQ ID NO: 1420 - DNA, 364 bp, Homo sapiens
  source 1..364: mol_type = other DNA
caggtccagctggtgcagtctggggctgaggtgaagaagcctgggtcctcggtgaaggtctcctgcaaggcttctggaggcaccttcagcagctatgctgtcaactgggtgcgacaggcccctggacaagggcttgagtggatgggcgtgatcatcggtatgtttggaacaacaaagtacgcacagaagttccagggcagaatgacgattaccgcggacgaaatcacgagcacggcctacatggacctgagcggcctgagatctgaggacacggccgtctattactgtgcgagagcttgggggtatcacatcagtggctattataagtcatggggccagggaaccctggtcaccgtctcctcag

SEQ ID NO: 1421 - DNA, 355 bp, Homo sapiens
  source 1..355: mol_type = other DNA
ggtgcagttagtggagtctgggggaggcttgagacagcctggggggtccctgagactctcctgtgcagcctctgggttcaccgtcagtagcaaatacatgtcctgggtccgccaggctccagggaagggactggagtgggtctcagttatttacagtggtgatatcacatactactcaaattccgtgaggggccgattcaccatctccagagacaattccaggaacacgctgtatcttcaaatgaacagcctgagagccgaggacacggccgtgtattactgtgcgagagggacagacagcgcagctacccgtgtggacgcctggggccaagggactacggtcaccgtctcctca

SEQ ID NO: 1422 - DNA, 357 bp, Homo sapiens
  source 1..357: mol_type = other DNA
gaggtgcagctggtggagtctggaggaggcttgatccagcctggggggtccctgagactctcctgtgcagcctctgggttcaccgtcagtagcaaatacatgtcctgggtccgccaggctccagggaagggactggagtgggtctcagttatttacagtggtgatatcacatactactcaaattccgtgaggggccgattcaccatctccagagacaattccaggaacacgctgtatcttcaaatgaacagcctgagagccgaggacacggccgtgtattactgtgcgagagggacagacagcgcagctacccgtgtggacgcctggggccaagggactacggtcaccgtctcctca

SEQ ID NO: 1423 - DNA, 352 bp, Homo sapiens
  source 1..352: mol_type = other DNA
gcaactggtggagtctgggggaggcttggtacagcctggggggtccctgagactctcctgtgcagcctctgggttcaccgtcagtagcaaatacatgtcctgggtccgccaggctccagggaagggactggagtgggtctcagttatttacagtggtgatatcacatactactcaaattccgtgaggggccgattcaccatctccagagacaattccaggaacacgctgtatcttcaaatgaacagcctgagagccgaggacacggccgtgtattactgtgcgagagggacagacagcgcagctacccgtgtggacgcctggggccaagggactacggtcaccgtctcctca

SEQ ID NO: 1424 - DNA, 364 bp, Homo sapiens
  source 1..364: mol_type = other DNA
caggtccagctggtgcagtctggggctgaggtgaagaagcctgggtcctcggtgaaggtctcctgcaaggcttctggaggcaccttcagcagctatgctgtcaactgggtgcgacaggcccctggacaagggcttgagtggatgggcgggatcatcggtatgtttggaacaacaaactacgcacagaagttccagggcagaatgacgattaccgcggacgaaatcacgagcacggcctacatggacctgagcggcctgagatctgaggacacggccgtctattactgtgcgagagcttgggggtatcacatcagtggctattataactcatggggccagggaaccctggtcaccgtctcctcag

SEQ ID NO: 1425 - DNA, 366 bp, Homo sapiens
  source 1..366: mol_type = other DNA
caggtccagctggtgcagtctggggctgaggtgaagaagcctgggtcctcggtgaaggtctcctgtaaggcttctggaggcaccttcagcagctatactatcagctgggtgcgacaggcccctggacaagggcttgagtggatgggagggatcaccggtatgtttggttcaacaaactacccacagaagttccagggcagagtcacgattaccacggacaaatctacgaggacggcctatatggagttgagcagcctgacatctgaagacacggccgtgtattactgtgcgaaatggagtggttatcattactcctacaactacatggacgtctggggcaaagggaccacggtcatcgtctcctca

SEQ ID NO: 1426 - DNA, 385 bp, Homo sapiens
  source 1..385: mol_type = other DNA
caggtgcagctgcaggagtcgggcccaggactggtgaggccttcggagaccctgaccctcacctgcgctgtctctggtggctccatcggcagtcattactggagctggatccggcagcccgccgggaggggactggagtggattgggcgtatctctgccagtggcagtagcaactacaacccctccctcgagaatcgggtcaccatgtcagtggacacctccaagacccagttctccctgaagttgacgtctgtgaccgccgcggacacggccctgtatttctgtgcgagagattttgaggagtatcttgtgctaagtggtactcggggtctgttcggggcttttgatatctggggccaagggacattggtcaccgtctcttcag

SEQ ID NO: 1427 - DNA, 364 bp, Homo sapiens
  source 1..364: mol_type = other DNA
gaggtgcagctggtggagtctgggggagacttgatacagcctggagggtccctgagactctcctgtgcagcctctggattcactttcagtagttatgaaatgaattgggtccgccaggctccagggaaggggctggagtgggttgcatacattaacagcagcagtaccaacatacactacggagactctgtgaagggccgattcaccatctccagagacaacgccgagaactcactgtatttgcaaatgaatagcctgagagtcgaggacacggctgtttattactgtgtgggcacctattactctagtagtagtggatatctcaagcactggggccagggcaccctgatcaccgtctccccag

SEQ ID NO: 1428 - DNA, 357 bp, Homo sapiens
  source 1..357: mol_type = other DNA
gaggtgcagttggttgagtctgggggagacttggcccagcctggggggtccctgagactctcctgtgcagcctctgggttcaccgtcagtagcaaatacatgtcctgggtccgccaggctccagggaagggactggagtgggtctcagttatttacagtggtgatatcacatactactcaaattccgtgaggggccgattcaccatctccagagacaattccaggaacacgctgtatcttcaaatgaacagcctgagagccgaggacacggccgtgtattactgtgcgagagggacagacagcgcagctacccgtgtggacgcctggggccaagggactacggtcaccgtctcctca

SEQ ID NO: 1429 - DNA, 357 bp, Homo sapiens; identical to SEQ ID NO: 1422
  source 1..357: mol_type = other DNA

SEQ ID NO: 1430 - DNA, 357 bp, Homo sapiens; identical to SEQ ID NO: 1422
  source 1..357: mol_type = other DNA

SEQ ID NO: 1431 - DNA, 367 bp, Homo sapiens
  source 1..367: mol_type = other DNA
caggtccagctggtgcagtctggggctgaggtgaagaagcctgggtcctcagtgaaggtctcctgcaaggcttctggaggcaccttcagcagctatgctatcagctgggtgcgacaggcccctggacaagggcttgagtggatgggagggatcatcggtatgtttggaacagcaaactacgcacagaagttccagggcagagtcacgattaccgcggacgaattcacgagcacaggctacatggagctgagcagcctgagatctgaggacacggccatgtattactgtgcgagacacaggggttattattcattgtacacctggttcgacccctggggccagggaaccctggtcaccgtctcctcag

SEQ ID NO: 1432 - DNA, 367 bp, Homo sapiens
  source 1..367: mol_type = other DNA
caggtccagctggtgcagtctggggccgaggtgaagaagcctgggtcctcggtgaaggtctcctgcacggcttctggagtcaccttcagcagcaattccatcagctgggtgcgacaggcccctggacaagggcttgagtgggtggggggggtcatcggtttgtttggaacagcaaagtacgcacagaagttccagggcagagtcactataaccacggacgagtccacgaccacagcctacatggagctgaccagcctgagaactgaggacacggccgtgtattactgtgtgagagatcggggttactatattcggggcaactggttcgacccctggggccagggaaccctggtcaccgtctcctcag

SEQ ID NO: 1433 - DNA, 376 bp, Homo sapiens
  source 1..376: mol_type = other DNA
gaggtgcagctggtggagtctgggggaggcttagtacagccgggggagtccctgagactctcctgtgaagcctctggattcgcctttagcagctatggcatgagttgggtccgccaggctccaggaaaggggctggagtgggtctcagctgttggtggtggacgtggaaacacatacctcgcagactccgtgaggggccggttcaccatgtcccgagacaattccaagagcatggtatatctacaaatggacaccctgagagccgaggacacggccatatattactgtgcgaaagattgggtaaatgccgatgactgggcatatcaacccgtctttgactcctggggccagggaaccctggtcaccgtctcctcag

SEQ ID NO: 1434 - DNA, 357 bp, Homo sapiens
  source 1..357: mol_type = other DNA
gaggtgcaactggtggagtctgggggaggcttggtccagcctggggactccctgagactctcctgtgtagcctctggcttcaccgtcagttactactacatgaactgggtccgccaggctccagggaaggggctggagtgggtctcagctcttcacagcgatgacagcacatactacgcagactccgtgaagggcagattcaccatctccagagacacttccaagaacactctatatcttcaaatgaacagcctgagagccgaggacacggccgtgtattactgtgcgagagggacagacagcgcagctacccgtgtggacgcctggggccaagggactacggtcaccgtctcctca

SEQ ID NO: 1435 - DNA, 390 bp, Homo sapiens
  source 1..390: mol_type = other DNA
caggtcaccttgaaggagtctggtcctgttctggtgaaacccacagagaccctctcgctgacctgcgtcgtttctgaggtctcactcaccagtcgtgaagtgggggtgagttggatccgtcagcccccagggaaggccctggagtggcttgcactcattttctcggatgacgaaaaatcctacagtccatctctgagcagcaggctcaccatctccaaggacacctccaagagtcaggtggtccttaccatgaccaacatggacccggcggacacaggcacatattactgtgcgcggacgggaagggagtggttactcacgggggccttcagaaatcaccactattacatggacgtctggggcaaagggaccacggtcaccgtctcctca

SEQ ID NO: 1436 - DNA, 360 bp, Homo sapiens
  source 1..360: mol_type = other DNA
gaggtgcaactggtggagtctgggggaggcttggtccagccgggggggtccctgacactctcttgtgcggtctctggattcacttttggtaattattggatgagttgggtccgccaggctccagggaaagggctggagtgggtggccaacataaaacaagatggaagtgagctgaagtatgtggagtctgtgaagggccgattcaccatcttcagagacaatggcaggaattcactgtatctgctaatgaacagcctgagagccgaggacacggccgtgtattactgtgcgagagggacagacagcgcagctacccgtgtggacgcctggggccaagggactacggtcaccgtctcctca

SEQ ID NO: 1437 - DNA, 357 bp, Homo sapiens; identical to SEQ ID NO: 1422
  source 1..357: mol_type = other DNA

SEQ ID NO: 1438 - DNA, 369 bp, Homo sapiens
  source 1..369: mol_type = other DNA
caggtccagctggtgcagtctggggctgaagtgaagaagcctgggtcctcggtgaaggtctcctgcaaggcttctggaggcaccttcagcagctatgctatcagctgggtgcgacaggcccctggacaagggcttgagtggatgggagggatcatccctctctttagtccagcaaagtacgcacagaagttccacggcagagtaacgattaccaaggacgattccacgagtacagcctacatggagctgaccagcctaagatctgaggacacggccgtgtattactgtgcgatctgttcaggggggttaactaactaccacttctacatggacgtctggggcaaagggaccacggtcaccgtctcctca

SEQ ID NO: 1439 - DNA, 360 bp, Homo sapiens
  source 1..360: mol_type = other DNA
caggttcaattggtgcagtctggagctgaggtgaagaagcctggggcctcagtgaaggtgtcctgcgaggcttctggttacagctttagtagttatgttatcagttgggtgcgacaggcccctggacaagggcttgagtggatgggatggatcagcgtttacaatggtgccacaaactatacacagaaactccggggcagactgaccatgaccaccgacacatccgcgaacacagcctacatggagctcagtagcctgagatctgacgactcggccgtctattattgtgcgagaagaggctggtaccgcaacggggctatggacgtctggggccaagggaccacggtcatcgtctcctca

SEQ ID NO: 1440 - DNA, 361 bp, Homo sapiens
  source 1..361: mol_type = other DNA
gaggtgcagttggtggagtctgggggaggcttggtccagcctggggggtccctgagactctcctgttcaatctctggattcaccttcaatagctgtgctatgcactgggtccgccaggctccagggacggggctggaatttgtttcatgtctcagtagaaatgcagataacatatattacgcagactcagtgaggggcaggttcaccatctcccgagacagttccaagaacaccctttatcttcaaatgagcagtctgagaagtgaagacacggctgtctattactgtgtgaaagggggctactataacacctcgccgcttgagcagtggggccagggaaccctggtcaccgtctcctcag

SEQ ID NO: 1441 - DNA, 357 bp, Homo sapiens; identical to SEQ ID NO: 1422
  source 1..357: mol_type = other DNA

SEQ ID NO: 1442 - DNA, 357 bp, Homo sapiens; identical to SEQ ID NO: 1422
  source 1..357: mol_type = other DNA

SEQ ID NO: 1443 - DNA, 378 bp, Homo sapiens
  source 1..378: mol_type = other DNA
caggtgcagctggtgcaatctggggctgaggtgaagaagcctggggcctcagtgaagatttcctgcaaggcatctggatacaccttcaccagcttctatatgcactgggtgcgacaggcccctggacaagggcttgagtggatgggaatgatcaaccctgctggtggcagcgcaaactacgcacagaaattccagggcagagtcaccctgaccagggacacgtccacgaccacagtctacatggacctgagcagcctgagatctgaggacacggccgtgtattcctgtgcgagcgatattggggcatggttcgggcagtcttactactactacggtatggacgtctggggccaagggaccacggtcaccgtctcctca

SEQ ID NO: 1444 - DNA, 376 bp, Homo sapiens
  source 1..376: mol_type = other DNA
caggttcagttggtgcagtctggagttgaggtgaaggagcctgggacctcagtgaaggtctcctgtaagacttctggttacaccttttcgaattatggtgtcacgtggatgcggcaggcccctggacaaggacttgagtggatggggtggatcagcgctaagaatggtaggacagagtatgcacagaagttccagggcagagtcaccatgaccacagacacctccacgagtgttgcctacatggaactgaggagactgagaactgacgacactgccgtctattactgtgcgagagatggggactatgacagtagtaatgtttgggtctttgactttgactactggggccagggaagcctggtcaccgtctcctcag

SEQ ID NO: 1445 - DNA, 382 bp, Homo sapiens
  source 1..382: mol_type = other DNA
caggttcagctggtgcaatctggagctgaggtgaagaagcctggggcctcagtgaaggtctcctgcaaggcttctggttacacctttaccacctatggtatcacctgggtgcgacaggcccctggacaagggcttgagtggatgggatggatcagcgtttacaatggaaacacaaactatgcacagaacctccagggcagagtcaccatgaccacagacacatccacgagcacagcctatatggagctgaggagcctgaggtctgacgacacggccgtttattactgtgcgagagcctcacgttttacgatttttggagtggttatccttagcaactggttcgacccctggggccagggaaccctggtcaccgtctcctcag

SEQ ID NO: 1446 - DNA, 357 bp, Homo sapiens
  source 1..357: mol_type = other DNA
gaggtgcacttggtggagtctgggggaggcttggtccagcctggggggtccctgagactctcctgtgcagcctctgggttcaccgtcagtagcaaatacatgtcctgggtccgccaggctccagggaagggactggagtgggtctcagttatttacagtggtgatatcacatactactcaaattccgtgaggggccgattcaccatctccagagacaattccaggaacacgctgtatcttcaaatgaacagcctgagagccgaggacacggccgtgtattactgtgcgagagggacagacagcgcagctacccgtgtggacgcctggggccaagggactacggtcaccgtctcctca

SEQ ID NO: 1447 - DNA, 363 bp, Homo sapiens
  source 1..363: mol_type = other DNA
gaggtgctattggtggagtctgggggaggcttggtacaacctggggggaccctgagactctcctgtgcagcctctggattcagttttaacaaatatgccatgagctgggtccgccaggctccagggaaggggctggagtgggtctcaggtattagtggtaatcgtgaaggtaacaggtattacgcagactccgtgaggggccgattcaccatctccagagacaattccaggaacacgctgtatcttcaaatgaacagcctgagagccgaggacacggccgtgtattactgtgcgagagggacagacagcgcagctacccgtgtggacgcctggggccaagggactacggtcaccgtctcctca

SEQ ID NO: 1448 - DNA, 376 bp, Homo sapiens
  source 1..376: mol_type = other DNA
gaggtggagctggtggagtccgggggcggcttagttcagcctggggggtccctgagactctcctgtgcagcctctggattcaccttcagtagatactggatgcactgggtccgtcaagctccagggaaggggctggcgtgggtctcacatattaggggtgatggaagtagcacaaactacgcggactccgtgaagggccgattcatcgtctccagagacaacgccaagaacaccctatatctgcagatgaacagtctgagagccgaggacgcggctatatattattgtgtaagagatcgggatgtagtggtgtcatccgctcactacgatgcttttgacatctggggccaagggacaacggtcgctgtctcttcag

SEQ ID NO: 1449 - DNA, 376 bp, Homo sapiens
  source 1..376: mol_type = other DNA
gaggtgcagctggtggagtctgggggaggcttggtacagaagggggggtccctaagactctcctgtgcagcctctggattcacctttaccacctatgccatgagctgggtccgccaggctccaggggaggggctggagtgggtcgcatctatcaataaggatggcagtaaagtatactacgtagactccgtgaagggccggttcaccatctccagagacaattccaagaaaatggtgtttctgcaaatgaacaacgtgagagccgaggacacggccctatattattgtgcgaaagattgggtagatagtagtgactgggcatctcatcccgtctttgactcctggggccagggagccctggtcaccggctcctcag

SEQ ID NO: 1450 - DNA, 357 bp, Homo sapiens; identical to SEQ ID NO: 1422
  source 1..357: mol_type = other DNA

SEQ ID NO: 1451 - DNA, 361 bp, Homo sapiens
  source 1..361: mol_type = other DNA
gaggtccagctggttcagtctggggctgaggtgaggaagcctggcacaacagtgaaaatctcctgcaaggtttctgggttaagtctcaccgacaccttcttgcactgggtccaacaggcccctgggggagggcttgagtggatgggacttattgatgctgaaaacggtgagacagtatacgcagagaagttccggggcagagtcaccatctccgcggacacgtctacaggcacagccaacatggaactgagcagcctgacctctgacgacacggccgtgtattactgtgctagggcaattagcgccaccggggactggctcgacccctggggccagggtaccctggtcaccgtctcctcag

SEQ ID NO: 1452 - DNA, 390 bp, Homo sapiens
  source 1..390: mol_type = other DNA
caggtcaccttgaaggagtctggtcctgttctggtgaaacccacagagaccctctcgctgacctgcgtcgtctctgaggtctcactcaccagtcgtgaagtgggggtgagttggatccgtcagcccccagggaaggccctggagtggcttgcactcattttttcggatgacgaaaaatcctacagtacatctctgaggagcaggctcaccatctccaaggacacctccaaaagtcaggtggtccttaccatgaccaacatggacccggcggacacagccacatattactgtgcccggacgggaagggagtggttactctcggggggcttcagaaatcaccactattacatggacgtctggggcaaagggaccacggtcaccgtctcctca

SEQ ID NO: 1453 - DNA, 367 bp, Homo sapiens
  source 1..367: mol_type = other DNA
caggtccagttggtgcagtctggggctgaggtgaagaagcctgggtcctcggtgaaagtctcctgcaaggcttctggaggcaccttcagcagctatgctatcacctgggtgcgacaggcccctggacaagggcttgagtggatgggaagcatcatccctatgtttggtacaacaaactacgcacagaggttccagggcagagtcacaatcaccgcggacgtattcccgagcacagcctacttggagttgagcagcctgacatctgaggacacggccgtctattactgtgcgagatcggctcattactatgatgttaagtcctggttcgccccctggggccagggaaccctggtcaccgtctcctcag

SEQ ID NO: 1454 - DNA, 356 bp, Homo sapiens
  source 1..356: mol_type = other DNA
aggtgcagctggtggagtctgggggaggcttggtcaagcctggagggtccctgagactctcctgtgcagcctctgggttcaccgtcagtagcaaatacatgtcctgggtccgccaggctccagggaagggactggagtgggtctcagttatttacagtggtgatatcacatactactcaaattccgtgaggggccgattcaccatctccagagacaattccaggaacacgctgtatcttcaaatgaacagcctgagagccgaggacacggccgtgtattactgtgcgagagggacagacagcgcagctacccgtgtggacgcctggggccaagggactacggtcaccgtctcctca

SEQ ID NO: 1455 - DNA, 363 bp, Homo sapiens
  source 1..363: mol_type = other DNA
gaggtactactggtggagtctgggggaggcttggtacagcctggggggtccctgagactctcctgtgcagcctctggattcacctttagcaactatgccatgacctgggtccgccaggctccagggaaggggctggagtgggtctcatctattagtggcaatcgtgatgctaacacatactacgcagactccgtgaagggccgattcaccatctccagagacaattccaggaacacgctgtatcttcaaatgaacagcctgagagccgaggacacggccgtgtattactgtgcgagagggacagacagcgcagctacccgtgtggacgcctggggccaagggactacggtcaccgtctcctca

SEQ ID NO: 1456 - DNA, 379 bp, Homo sapiens
  source 1..379: mol_type = other DNA
caggtccacctggtgcagtctggggctgaggtgaagaagcctgggtcctcggtgaaggtctcctgcaaggcttctggagacaccttcaatggctatgcaatcaactgggtgcgacaggcccctggacaagggcttgagtggatgggagggatcatccctatctttggtacagcaaactacgcacagaagttccagggcagagtcacgataaccgcggacacattgacgggcacaacctacctggagctgagcagcctgagatctgaggacacggccgtgtatttctgtgcgaggcgccgcaatcagtatgaaagtagtggatattataagtcccctttcgacccctggggccagggaaccctggtcaccgtctcctcag

SEQ ID NO: 1457 - DNA, 375 bp, Homo sapiens
  source 1..375: mol_type = other DNA
caggtccagctggcgcagtctggggctgaggtgaagaagcctgggtcgtcggtgaaggtctcctgtaaggtttctggagacagcgtcatcaccttcagcagccatgctcttagctgggtgcgacaggcgcctggacaagggcttgagtggatgggagggatcagccccatacttcgtacagcagtctacgcacagaagttccagggcagagtcacgatcaccgcggacgaatccacgaccacagcctacttggagctgagcagcctgagatctgaggacacggccgtctattactgtgcgagactgagtaagggtcactactactaccactacatggacgtctggggcaaagggaccacggtcaccgtctcctca

SEQ ID NO: 1458 - DNA, 370 bp, Homo sapiens
  source 1..370: mol_type = other DNA
cagctgcaactacaggagtcgggcccaggactggtgaagccttcggagaccctgtccctcacctgcgctgtctctggtgcctccttcagcagtagttactactactggggctggatccgccagcccccagggaaggggctggagtggattgggaatatctattatagtcggaacaccttctacaacccgtcccttaagagtcgagtctccatatcagtagacacgtctaagagtcagttctccctgaacctgaggtctgtgaccgccgcggacacggccgtgtattactgtgcgagaggagtgtccgatgcctacaattcttatgcttttgatatctggggccaagggacagtggtcaccgtctcgtcag

SEQ ID NO: 1459 - DNA, 397 bp, Homo sapiens
  source 1..397: mol_type = other DNA
gaggtgcagctggtacagtctagagcagaggtgaaaaagccgggggaatctctgaagatctcctgtaagggttctggatacacttttaccagttactggatcggctgggtgcgccagatgcccgggaagggcctggagtggatggggatcatctatcctggtgactctgacaccagatataggccgtccttccaaggccaggtcaccatctcagccgacaagtccatcagcaccgcctacctgcagtggcgcagcctgaaggcctcggacaccgccatgtattactgtgcgagagcccggcaaatatattgtagtggtggtccctgctacgttggttttaagaccaatgatgcttttgatatgtggggccaggggacaatggtcaccgtctcttcag

SEQ ID NO: 1460 - DNA, 367 bp, Homo sapiens
  source 1..367: mol_type = other DNA
caggtccagctggtgcagtctgggcctgaagtgaagaagcctgggtcctcggtgaaggtctcctgcaaggcttctggaggcaccttcggcctctatcctattacttgggtgcgacaggcccctggacaaggacttgagtgggtgggagggatcatccccattcatgatacggcttactacggacagacattccaggacagagtcaccattaccgcggacgaatccacacagacagcccacatggaaatgagcagcctgagatctgaggacacggccctgtatttctgtgcgaagggaggctcttcgaagtggctggttttcccgtttgactcctggggccagggaaccctggtcaccgtctcctcag

SEQ ID NO: 1461 - DNA, 382 bp, Homo sapiens
  source 1..382: mol_type = other DNA
caggtgcagctggtgcagtctggggctgaggtgaagaagcctggggcctcagtgaaggtttcctgcaaggcatctggatacaccttcaccagctactatatgcactgcgtgcgacaggcccctggacaggggcttgagtggatgggaataatcaaccctagtagtggtagcacaaactacgcacagaagttccagggcagagtcaccatgaccagggacacgtccacgagcacagtctacatggagctgagcagcctgagatctgaggacacggccgtgtattattgtgcgaggtcccggtattactatgatagtagtggttattacccggatgatgcttttgatatctggggccaagggacaatggtcaccgtctcttcag

SEQ ID NO: 1462 - DNA, 352 bp, Homo sapiens
  source 1..352: mol_type = other DNA
gacgtccagctggtacagtctggggctgaggtgaagaagcctggggcttcagtgaaaatctcctgcaaggtttctggatacaggttcaccgacttgtacatgcactgggtgcaacaggcccctggaaaagggcttaagtggatgggacttgttgatcctgaagatggtgaaacgatatacgcagagaagtttcagggtagagtcaccataaccgcggacacgtctacagacacgacctacatggagttgcgcagcctgaggtctgaggacacggccgtgtattactgcacaatagcgccgcgggggggagtcgacccctggggccagggaaccccggtcaccgtctcctcag

SEQ ID NO: 1463 - DNA, 370 bp, Homo sapiens
  source 1..370: mol_type = other DNA
gagctgcagctggtggagtctgggggagacttggtccagccgggggggtccctgagactctcctgtgccgcctctggattcaccttcagtagatactggatgagttgggtccgccaggctccggggaaaggactggagtgggtggccagcataaaggaagatggaagtgaaaaacactatgtggactctgtgaagggccgattcatcatctccagagacaatgtcgaaaactcagtgtacctgcaaatggacagcctgagagtcggggacatggccttttattattgtgtgagacaacatctttgggaaagtagtggttaccgatgttttgacaactggggccagggaaccctggtcaccgtctcctcag

SEQ ID NO: 1464 - DNA, 379 bp, Homo sapiens
  source 1..379: mol_type = other DNA
caggttcatctggagcagtctggatctgaagtgaagcagcctggggcctcagtgaaggtctcctgcaaggcttctggttacagttttaccgaccaagccatcaactgggtgcgacaggcccctggacaagggcttgaatggatggggaggatcagcgctcaagatgatgacataaagtattcacagaaatttcaggacagggtcgccatgaccacagacacatccacgactacagtctacttggaactcaggagcctgagacctgacgacacggccgtctattactgtgcgagagggcggcggccgggagatgagagtggaggttattattcctggttcgactcctggggccagggaaccctggtcgccgtctcctcag

SEQ ID NO: 1465 - DNA, 381 bp, Homo sapiens
  source 1..381: mol_type = other DNA
caggtgcagctggtggagtctgggggaggcgtggtccagcctgggaggtccctgagactctcctgtgcagcctctggattcaccttcagtaactatgctatgcactgggtccgccaggctccaggcaaggggctggagtgggtggcagttatatcacaggatggaagtaataaacagtacgcagactccgtgaagggccgaatcaccatctccagagacaattccaagaacaccctgtatctgcaaatgaacagcctgagagctgacgacacggctgtgctttattgtgcgagagatcaaacccggatacagcaatggttacccaactggtattacgctatggacgtctggggccaagggaccacggtcaccgtctcctca

SEQ ID NO: 1466 - DNA, 358 bp, Homo sapiens
  source 1..358: mol_type = other DNA
caggtccagctgatccagtctggggctgaggtgaggaagcctggggcctcagtgaaggtctcctgcaaggtctccggatacagcctcactgaattaattttgcactgggtgcgacaggctcctggacaagggcttgaatatatgggaagttttgatcctgaagatggtgaagcgctcttcgcacagaggttccagggcagagtcaccatgaccgaggacacatctacagacacaatctatatggagctgagcgccctgacatctgaggacaccgccgtttatttctgtgcagtaccgggtgtagcagtggcttactcttttgatgtctggggccaagggacagtggtgaccgtctctt

SEQ ID NO: 1467 - DNA, 382 bp, Homo sapiens
  source 1..382: mol_type = other DNA
caggtgcagctacagcagtggggcgcaggactgttgaagccctcggagaccctgtccctcacctgcgctgtctatggtgggtccctcactggttactactggagctgggtccgccagcccccagggaaggggcttgagtggattggggaaatcaatcatagtggaagaaccaactacaatccacccctcaagagtcgagtcaccatgtcactaggcacgtccatgaaccagttctccctgaacctgaccactgtgaccgccgcggacacggccgtgtattactgtgcgagagggacccattaccgttacgatttttggagtggttcccgggccgactggttcgacccctggggccagggaaccctggtcatcgtctcctcag

SEQ ID NO: 1468 - DNA, 367 bp, Homo sapiens
  source 1..367: mol_type = other DNA
gaggtgcaggtggtggagtctgggggaggcttagtacagccagggcggtccctgagactctcctgtagagtttctgggttcagttttgtagattatgctataaattgggtccgccaggctccagggaaggggctccaatgggtaagttacattagacacaaagcttccggtgggaccatagaatacgccgcgtctgtgaaaggcagattcatcatctcaagagatgactccaaaaacaccgcctacttgcaaatgaacagcctgagagtcgaggacacagccgtatattattgtgtggcgggtggctacgatttctcagatcgggttgactactggggccggggagccgtggtcaccgtctcctcag

SEQ ID NO: 1469 - DNA, 385 bp, Homo sapiens
  source 1..385: mol_type = other DNA
gaggtgcagctggaggagtccgggggaggcctagttcagccgggggggtccctgagactctcctgtgcaacctctggattcaccttcagtagcaagtggatgcactgggtccgccaagctccagggaaggggctggtgtgggtctcacatattaatagtgacgggagtagcacaagttacgcggactccgtgaagggccgattcaccatctccagagacaacgccaagaacacgctgtatctgcaaatgaacagtctgagagtcgaagacacggctgtgtattactgtgcaagtctcagaaggaggaaagaggaggaggactatagtgggatctacgaagcttttgatatctggggccaagggacaatggtcaccgtctcctcag

SEQ ID NO: 1470 - DNA, 382 bp, Homo sapiens
  source 1..382: mol_type = other DNA
caggtgcacctggtggagtctgggggagacgtggtccagcccgggaggtccctgagactctcctgtgcagcgtctggattcacctccaatctcaatgctctccattgggtccgccaggctccagccagggggctggagtgggtggcacttatatcgtctgatgcgagtaaaacatactacgcagactccgtgaagggccggttcaccatctccagagacaattccaagaacaccctctatctgcaaatgaacagcctgagacctgaagacacggctgtttattactgtgcgcgagaccccgcccatgacagtactggttcttacacttgggtcggtgcttttgatatctggggccaagggacaacggtcaccgtctcttcag

SEQ ID NO: 1471 - DNA, 367 bp, Homo sapiens
  source 1..367: mol_type = other DNA
caggtgcaactggtggagtctgggggaggcgtggtccagcctgggaggtccctgagactctcctgtgcagcctctggattcaccttcaataactatgctatgtactgggtccgccaggctccaggcaaggggctggagtcggtggcagttatatcatatgatggaagcaataaatactacgcagactccgtgaagggccgattcaccgtctccagagacaattccaagaacacgctgtttctgcaagtgaacaacctgagagctgaggacacggctgtgtattactgtgcgagagatcggattcggattgcgttggctggtacggggccttactggggccagggaaccctggtcaccgtctcctcag

SEQ ID NO: 1472 - DNA, 354 bp, Homo sapiens
  source 1..354: mol_type = other DNA
caggtgcagctgcaggagtcgggcccaggactggtgaagccttcggagaccctgtccctcacctgcactgtctctggtggctccatcagtagttactactggagctggatccggcagcccccagggaagggactggagtggattgggtatatctattacagtgggagcaccaactacaacccctccctcaagagtcgagtcaccatatcagtagacacgtccaagaaccagttctccctgaagctgagctctgtgaccgctgcggacacggccgtgtattactgtagtcggctgtcggactactactacggtatggacgtctggggccaagggaccacggtcaccgtctcctca

SEQ ID NO: 1473 - DNA, 382 bp, Homo sapiens
  source 1..382: mol_type = other DNA
caggtccagctggtgcagtctggggctgaggtgaagaagcctgggtcctcggtgaaggtctcctgcaaggcttctggaggcaccttcagcagctatgctatcagctgggtgcgacaggcccctggacaagggcttgagtggatgggagggatcatccctatctttggtacagcaaactacgcacagaagttccagggcagagtcacgattaccgcggacgaatccacgagcacagcctacatggagctgagcagcctgagatctgaggacacggccgtgtattactgtgcgagagagggcacgaattactatgatagtagtggttataagtctagtgcttttgatatctggggccaagggacaatggtcaccgtctcttcag

SEQ ID NO: 1474 - DNA, 373 bp, Homo sapiens
  source 1..373: mol_type = other DNA
caggtccaactggtgcagtctggggctgaggtgaagaagcctgggtcctcggtgaaggtctcctgcaaggcttctggagacaccttcagcagttatgctatcagctgggtgcgacaggcccctggacaagggcttgagtggatgggagggatcatccctatctttggcacaccaaaatacgcacagaacttccagggcagagtcacgatcaccacggacgaagccacgagcacagcctacatggagctgagcaccctgagatctgaggacacagccgtatattattgtgcgagatgtcgtggatggggcaatagtgggagccaccaagtttttgattcttggggccagggaaccctggtcaccgtctcctcag

SEQ ID NO: 1475 - DNA, 361 bp, Homo sapiens
  source 1..361: mol_type = other DNA
gaagtgaagttggtggagtctgggggaggcttggtacagcctggggggtccctgagactctcgtgtgtgtcctctggattcaggttcaataattataacttgaactgggtccgccaggctccagggaaggggctggagtgggtcgcatacatcagtcatagtagtagtgacatatattatgtagactctgtgaagggccgattcaccatctccagagacaacgccgagaactcactgtatctgcaaatgaacggcctgagagccgaggacacggctgtctattcctgtctcgtggacaactggagcagttttgatggttttaatatctggggccaagggacaatggtcaccgtctcttcag

SEQ ID NO: 1476 - DNA, 379 bp, Homo sapiens
  source 1..379: mol_type = other DNA
caggttctcctggagcagtctggatctgaggtgaagaagcctggggcctcagtgaaggtctcatgcaaggcttctggttacagctttagcaaccatgctatcaactgggtgcgacaggcccctggacaagggctcgagtggatgggatggatcagcgcccacaatggtgacacaaaatttgaagagaagttccagggtagagtcaccatgaccactgacacatccacgaccacagcctacatggaactgaggagcctgagatctgacgacacggccgtctattattgtgcgagagggtggcggccgagagatgagaccagtggttattattcctgggtcgactcctggggccagggaaccctggtcaccgtctcctcag

SEQ ID NO: 1477 - DNA, 370 bp, Homo sapiens
  source 1..370: mol_type = other DNA
gaggtgcaactggtggagtctgggggagacttggtccagcctggggactccctgagactctcctgtgtagcctctggcttcaccgtcagttactactacatgaactgggtccgccaggctccagggaaggggctggagtgggtctcagctattcacagcgatgacagcacatactacgcagactccgtgaagggcagattcaccatctccagagacacttccaagaacactcttaatcttcaaatgaacagcctgagagtcgaggacacggctgtatattactgtgcgagagtttctggggtccccgattacacggccctctacttctttgactactggggccagggaaccctggtcaccgtctcctcag

SEQ ID NO: 1478 - DNA, 374 bp, Homo sapiens
  source 1..374: mol_type = other DNA
ggtgcagctggtgcagtctggggctgaagtgaagaagcctggggactcagtgagggtctcctgcaaggcttctggatacaccttcaatgacaactatatacactggatgcgacaggcccctggacaagcacttgagtggatgggatggatcaaccctaaaagaggcgacacaacctatgcacagaagtttcagggcagggtcaccatggccagggacacgtccatcaacacagcctacatggaactgagcgggctgaagtctgacgacacggccgtgtattactgtgcgagaggatgtttgtgttccctggatagtactggttacagaccacttgactattggggccagggagccctggtcaccgtctcctcag

SEQ ID NO: 1479 - DNA, 376 bp, Homo sapiens
  source 1..376: mol_type = other DNA
gaggtgcagctggtggagtctgggggaggcttggtccagcctggggggtccctgagactctcctgtaagggctctggattcaagttcagtgactattggatgagttgggtccgccaggctccagggaaagggctggagtgggtggccgacatccacggagatggaagtaaaaaatactatttggactctgtgaagggccgattcaccatctccagagacaacgccgaaaactcattgtatttggaaatgaatagcctgagagccgatgacacggccatctattattgtgtgagagacgactattgtccccgtggtgtatgttctaatctttactttgaccactggggcccgggaattgtggtcaccgtctcctcag

SEQ ID NO: 1480 - DNA, 366 bp, Homo sapiens
  source 1..366: mol_type = other DNA
caggtccaggtggtgcagtctggggctgaggtgaggaagcctgggtcctcggtgaaggtctcctgcaaggcttctggaggcatcttcagtagctatgctatcagctgggtgcgacaggtccctggacaagggcttgagtggatgggagggatcatccctatctttggtacaccaacctacgcacagaagttccagggcagagtcacgattaccacggacggatccacgagcacaacctacatggagctgagcagcctgagatctgaagacacggccgtgtattactgtgcgagttttatgagcagttctgactactaccactactacatggacgtctggggcaaggggaccacggtcaccgtctcc

SEQ ID NO: 1481 - DNA, 357 bp, Homo sapiens; identical to SEQ ID NO: 1422
  source 1..357: mol_type = other DNA

SEQ ID NO: 1482 - DNA, 361 bp, Homo sapiens
  source 1..361: mol_type = other DNA
caggtccagctggtgcagtctggggctgaggtgaagaagcctgggtcctcggtgaaggtctcctgcaaggcttctggagtcaccttcagcggctatgctatcagctgggtgcgacaggcccctggacaagggcttgagtggatgggagggatcaccggtgtttttggcacagcaaatcacgcacagaaattccagggcagagtcacgattaccacggacaaatccacgaccacaacctacatggagctgagcagcctgacatctgacgacacggccgtgtattactgtgcgagaggtgccgggtatgttgcttcgtggcttggcttctggggccagggaaccctggtcaccgtctcctcag

SEQ ID NO: 1483 - DNA, 376 bp, Homo sapiens
  source 1..376: mol_type = other DNA
caggtccagctggtgcagtctggggctgaggtgaagaagcctgggtcctcggtgaaggtctcctgcaaggcttctggagtcaccttcaacagctatgctatcagctgggtgcgtcaggcccctggacaagggcttgagtggatgggagggatcatgcctatctttggtacagcacactacccacagaagttccagggcagagtcacgattaccacggacgaatccacgagcacaacctacatggagctgaccagcctgacatctgaggacacggccgtgtattactgtgtgagagatcgtggtgggacttactatgacgggggagatgatgcttttgatatctggggccaagggacaatggtcaccgtctcttcag

SEQ ID NO: 1484 - DNA, 370 bp, Homo sapiens
  source 1..370: mol_type = other DNA
gaggtgcacctggtggagtctgggggaggcttggtccagcctggagagtccctgagactgtcctgtgcagcctctggattcacctttagtgaccactacatggactgggtccgccaggctccagggaagggcctagagtgggttggcgtaagtagaaacaaagctaacaaatataccacagaatacgccgcgtctgtaaaaggcagattcgccgtttcgagagatgattcaacgaactcactgtatctgcaaatgcacagcctgaaaaacgaggacacggccgtatatttctgtgctagatcagtggaaacaacgggtggatggaagctcgacccctggggtccgggaaccctggtcaccgtctcctcag

SEQ ID NO: 1485 - DNA, 367 bp, Homo sapiens
  source 1..367: mol_type = other DNA
gaggtgaagttggttgaatctgggggaggcttggtccagccgggggggtccctgagactctcctgtgcagccactggattcacctttagtaactatggcatgagctgggtccgccaggctccagggaagggtctggagtgggtcgcatttataagtggtagtggtgggagcacatactacgcagactccgtgaagggccggttcaccatctccagagacaattccaagaacacgttgtatctgcaaatgaacagcctgagagtcgaggacacggccgtatattattgtgcgaagatgggacggctgcccacaactaacaggtggttcgacccttggggccagggaaccctggtcaccgtctcgtcag

SEQ ID NO: 1486 - DNA, 357 bp, Homo sapiens; identical to SEQ ID NO: 1422
  source 1..357: mol_type = other DNA

SEQ ID NO: 1487 - DNA, 367 bp, Homo sapiens
  source 1..367: mol_type = other DNA
caggcccacctggagcagtctggggctgaggtgaagaagcctgggtcctcagtgaaggtctcctgcaggacttctggaggcaccttcataagttatgctctcagttgggtgcggcaggcccctggacaagggcttgaatggatgggagggatcatgcctattttgaggacaccaatgtacgcactgaagttccaggggagagtcacgattgccgcggacgactccacaaacacagtctacatggagttgactaacctgagatctgcggacacggccgtatattactgtgcgagagcaaaggatagtgggacctattaccagggttttgacatctggggccagggaaccctggtcaccgtctcctcag

SEQ ID NO: 1488 - DNA, 357 bp, Homo sapiens
  source 1..357: mol_type = other DNA
gaggtgagactcgtggagtctgggggaggcttggtacagccgggggggtccctgagactctcctgtgcagcctctgggttcaccgtcagtagcaaatacatgtcctgggtccgccaggctccagggaagggactggagtgggtctcagttatttacagtggtgatatcacatactactcaaattccgtgaggggccgattcaccatctccagagacaattccaggaacacgctgtatcttcaaatgaacagcctgagagccgaggacacggccgtgtattactgtgcgagagggacagacagcgcagctacccgtgtggacgcctggggccaagggactacggtcaccgtctcctca

SEQ ID NO: 1489 - DNA, 360 bp, Homo sapiens
  source 1..360: mol_type = other DNA
gaagtgcatctggcggagtctgggggagtcttggttcagcctggagggtccctgagactctcgtgtgcagcctctggattcgcctttagcgcttctgaaatgaactgggtccgccaggctccagggaaggggctggagtgggtttcatatattaatgagcgtggtgataacatatactacgcggactctgtgaagggccgattcatcatctccagagacaacgctaagaactcactgtatctgcaaatgaacagtctgagagtcgaggatacggctgtttattactgtgtgagaaaccaggctggtagtggctggccttttgactactggggccagggaactgtggtcaccgtctcctca

SEQ ID NO: 1490 - DNA, 370 bp, Homo sapiens
  source 1..370: mol_type = other DNA
caggtgcagctgcaggagtcgggcccaggactggtgaagccttcggagaccctgtccctcacctgctctgtctctggtgcctccatcactaattactactggagttggatccggcagcccccagggaggggactggagtggattgggtgcatctatcccagtgggaccatcaactacaacccctccctcaagactcgagtcaccttttccgtagacacgtccaagaaccacttctccctgaagttgacctctctgaccgccgcagacacggccgtatattactgtgcgagggggggggttcagttcggactccctcgagtcgggcaccttgactactggggccaggggaccctggccaccgtctcctcag

SEQ ID NO: 1491 - DNA, 357 bp, Homo sapiens; identical to SEQ ID NO: 1422
  source 1..357: mol_type = other DNA

SEQ ID NO: 1492 - DNA, 357 bp, Homo sapiens; identical to SEQ ID NO: 1422
  source 1..357: mol_type = other DNA

SEQ ID NO: 1493 - DNA, 371 bp, Homo sapiens
  source 1..371: mol_type = other DNA
ggtgcgactggtggagtctgggggagccttggtccagccgggggggtccctgacactctcctgtgaaggctctggattcacctttagtcactattacatgtcctgggtccgcctgcctccagggaaggggctggagtgggtggccaatataaatcaagatggaagtcgcaaaaactatttgggctctgtgagggaccgattcaccgtctccagagacaacgccgaaaactccatgtttctgcaaatgaacagcctgcgagccgaggacacggctgtgtatttctgtgcgagagttcagtggtatgataaggctaactcctatcgtcactttgactcttggggccagggaaccctggtcaccgtctcctcag

SEQ ID NO: 1494 - DNA, 360 bp, Homo sapiens
  source 1..360: mol_type = other DNA
gaggtgcaactggtggagtctgggggagacttggtacagccgggggggtccctgagagtctcctgtgcagcctctggattcacctttaacaactttgccatgacctgggtccgccaggctccagggaaggggctggagtgggtcgcaagcatcactgaaagtggggatagtacatactactcagactccgtgaggggccggttcaccatctccagagacagttccaagaacacgttgtatctacaaatgaacagcctgagagccgaggacacggccgtgtattactgtgcgagagggacagacagcgcagctacccgtgtggacgcctggggccaagggactacggtcaccgtctcctca

SEQ ID NO: 1495 - DNA, 359 bp, Homo sapiens
  source 1..359: mol_type = other DNA
caggttcagttggtgcagtctggaactgaaatgaagaagcctggggcctcagtgaaagtctcctgcaaggcctctggttactcctttgccagctatggcatcagttggctgcgacaggcccctggacaaggacttgaatggctgggatggatcagccctatcgatggtgaaacagagattgcacagaagttccaggccagagtcactctgaccacagacacatccgcgaccacagtctacatggacttgaggagtctgacatctgacgacacggccatctattactgtgcgagagattggagcaggtcgtctcacataacggctgaccaatggggccaggggaccctggtcaccgtctc

SEQ ID NO: 1496 - DNA, 361 bp, Homo sapiens
  source 1..361: mol_type = other DNA
caggtgcagttggtgcagtctggggctgaggtgaagaagcctggggcctcagtgaagatttcctgcaagacgtctggatacacctttaactactactatatacactgggtgcgacaggcccctggacaagggcttgagtggatggggatgatcaaccctagagattatacgacaaactacgcacagaagttccagggccgattcaccgtgaccagggacatgtccacgagtacagtctatatggagctcaaccgcctgagatctgaggacacggccgtttattattgtgtgagatatggtatagtgggagaatattattttgacttctggggccagggaaccctggtcaccgtctcctcag

SEQ ID NO: 1497 - DNA, 360 bp, Homo sapiens
  source 1..360: mol_type = other DNA
caggtgcaattggtggagtctgggggaggcgtggtccagcctgggaggtccctgagactctcctgtgcagcctctggattcaccttcagtagttatgctatgcactgggtccgccaggctccaggcaaggggctggagtgggtggcaattatctcatatgatggaagtaaaaaatatcacgcagactccgtgaggggccgattcaccatctccagagacaattccaggaacacgctgtatcttcaaatgaacagcctgagagccgaggacacggccgtgtattactgtgcgagagggacagacagcgcagctacccgtgtggacgcctggggccaagggactacggtcaccgtctcctca

SEQ ID NO: 1498 - DNA, 357 bp, Homo sapiens
  source 1..357: mol_type = other DNA
gaggtgcgcctggtggagtctgggggaggcttggttcaaccgggggggtccctgagactctcctgtgcagcctctgggttcaccgtcagtagcaaatacatgtcctgggtccgccaggctccagggaagggactggagtgggtctcagttatttacagtggtgatatcacatactactcaaattccgtgaggggccgattcaccatctccagagacaattccaggaacacgctgtatcttcaaatgaacagcctgagagccgaggacacggccgtgtattactgtgcgagagggacagacagcgcagctacccgtgtggacgcctggggccaagggactacggtcaccgtctcctca

SEQ ID NO: 1499 - DNA, 361 bp, Homo sapiens
  source 1..361: mol_type = other DNA
caggtccagctggtgcagtctggggctgaggtgaagaggcctgggtcctcggtgaaggtctcctgcaaggcttctggagtcaccttcagcggctatgctatcagctgggtacgacaggcccctggacaaggacttgagtgggtgggagggatcaacgggttttttggtacaacaaactacgcagagaagttccagggcagagtcacgattaccacggacaaatcaacgaccgcaacctacatggaactgagcagcctaacatctgacgacacggccgtgtattactgtgcgagaggtgccgggtatgttgcttcgtggcttggcttctggggccagggaaccctggtcaccgtctcctcag

SEQ ID NO: 1500 - DNA, 379 bp, Homo sapiens
  source 1..379: mol_type = other DNA
caggttcacctggagcagtctgggtctgaagtgaagaaccctggggcctcagtgagagtctcctgcaaggcttctggctacagcttcatcaactatgctatcaactgggtgcgacaggcccctggacaagggcttgagtggatgggacggatcagcgctcacgatggtgacacaaaatatgcacggaacttccagggcagagtcaccatgaccacggacacatccacgaccacagcccacatggaactgaggaacctgagatctgacgacacggccgtctatttctgtgcgagagcgtggcggcctagagatgcgagtggtgggttttattcctggttcgacgcctggggccagggaaccctggtcaccgtctcctcag

SEQ ID NO: 1501 - DNA, 357 bp, Homo sapiens
  source 1..357: mol_type = other DNA
gaggtgcaactggtggagtctgggggaggcttggtccaccctggggggtccctgagactctcctgtgaagcctctggattcaccgtcagtgacaactacatgagctgggtccgccaggctccagggggggggctggagtgggtctcagttattcataccagcggtgtcacaaactacgcagactccatcaagggccgattcaccatctccagagacaattccaggaacacgctgtatcttcaaatgaacagcctgagagccgaggacacggccgtgtattactgtgcgagagggacagacagcgcagctacccgtgtggacgcctggggccaagggactacggtcaccgtctcctca

SEQ ID NO: 1502 - DNA, 379 bp, Homo sapiens
  source 1..379: mol_type = other DNA
gaggtgctactggtggagtctgggggaaccttgctacagcctggggggtccctgagactctcctgtgcagcctctggattcacctttaaccactatgccatgacctgggtccgccaggctccagggaaggggctggagtgggtctcatctattagtggtaatcctaatgctaatagatactatgcagactccgtgaagggccgattcaccatctccagagacaattccaagagcacactgtatctgctagcgaatagcctgcgtgtcgaagacacggccgtttactactgtgcgagagattgggtagataatagtgactggtcatctcagcccgtctttgactactggggccagggaaccctggtcaccgtctcctcag

SEQ ID NO: 1503 - DNA, 371 bp, Homo sapiens
  source 1..371: mol_type = other DNA
gaggtgcaattggtggaatctgggggaggcttggtccagcctggggggtccctgagactctcctgcgcagcctctggattcacttctagtaattattggatgagctgggtccgccaggctccagggaaagggctggagtgggtggccaacataaaagaagatggaagtgaggtgcactatgtggactctgtgaagggccgattcaccgtctccagagacaacgccaggaactcactgtttctgataatggacagcctgagagccgaggacacggccgtctattactgtgcgaggcactcttattatgataagagtactcattatcgccactttgattactggggccagggaaccctggtcaccgtctcctc

SEQ ID NO: 1504 - DNA, 366 bp, Homo sapiens; identical to SEQ ID NO: 1480
  source 1..366: mol_type = other DNA

SEQ ID NO: 1505 - DNA, 360 bp, Homo sapiens
  source 1..360: mol_type = other DNA
caggtccagctggtgcagtctggggctgaggtgaagaaacctgggtcctcggtgaaggtctcctgcaaggcttctggagccaccttcagcagttatgcgatcagctgggtgcgacaggcccctggacaagggcttgagtggatgggagggatcagcggtatttttggtacagcaaactacgcacagaagtttcagggcagagtcacgatcaccgcggccgaatccacgagcacaacctacatggagttgagcagcctgagatctgaggacacggccgtgtattactgtgcgagagggacagacagcgcagctacccgtgtggacgcctggggccaagggactacggtcaccgtctcctca

SEQ ID NO: 1506 - DNA, 373 bp, Homo sapiens
  source 1..373: mol_type = other DNA
caggtccagctggtgcagtctggggctgaggtgaggaagcctgggtcctcagtgaaggtctcctgcaaggcttctggagtcatcttcagcggttttggtatcagctgggtgcggcaggcccctggacaagggcttgagtggatgggagggatcaaccttttgtttggtaccacaaactatgaacagaagttccagggcagagtcacgattaccgcggacgcatccacgagtacagcctacatggagctgaggagcctgagatctgaggacacggccgtgtattactgtgcgagaaaggaatatagtaacaccgggacattggcgggggcttttgatatctggggccaagggacaaaggtcaccgtgtcttcag

SEQ ID NO: 1507 - DNA, 376 bp, Homo sapiens
  source 1..376: mol_type = other DNA
gaggtgcagctggtggagtctgggggaggcttggtacagcctggggggtccctgagactctcctgtgcagcctctggattctcctttagtagttatgccatgagttgggtccgccaggctccagggaaggggctagagtgggtcgcagccattagtaatagtggcaatcatctatactatgccgactccgtgaagggccgcttcaccatctccagagacaattccgagaaaacggtgtttctccaaatggacagcctgagagccgcggacacggccgtgtattattgtgcgaaagattggatagagagcggtgactgggcatctcatcccgtctttgactactggggccagggagccctggtctccgtctcctcag

SEQ ID NO: 1508 - DNA, 357 bp, Homo sapiens
  source 1..357: mol_type = other DNA
gaggtgcaactggtggagtctgggggaggcctcgtccagccgggggggtccctgagactctcctgtgcagcctctgggttcaccgtcagtagcaaatacatgtcctgggtccgccaggctccagggaagggactggagtgggtctcagttatttacagtggtgatatcacatactactcaaattccgtgaggggccgattcaccatctccagagacaattccaggaacacgctgtatcttcaaatgaacagcctgagagccgaggacacggccgtgtattactgtgcgagagggacagacagcgcagctacccgtgtggacgcctggggccaagggactacggtcaccgtctcctca

SEQ ID NO: 1509 - DNA, 357 bp, Homo sapiens
  source 1..357: mol_type = other DNA
gaggtgcggctcgtggagtctgggggaggcttggtacagccgggggggtccctgagactctcctgtgcagcctctgggttcaccgtcagtagcaaatacatgtcctgggtccgccaggctccagggaagggactggagtgggtctcagttatttacagtggtgatatcacatactactcaaattccgtgaggggccgattcaccatctccagagacaattccaggaacacgctgtatcttcaaatgaacagcctgagagccgaggacacggccgtgtattactgtgcgagagggacagacagcgcagctacccgtgtggacgcctggggccaagggactacggtcaccgtctcctca

SEQ ID NO: 1510 - DNA, 372 bp, Homo sapiens
  source 1..372: mol_type = other DNA
caggttcaactggtgcaatctggagctgaggtgaagaagcctggggcctcagtgaaggtctcctgcaaggcttctgattacatcttcaggaattatggaatcacctgggtgcgacaggcccctggacaggggcttgagtggatgggatggatcagcggtcacaatggtgacacaatctatgcacagatgttccagggcagagtcaccatgaccacagacgcatccactagtacagcctacatggacctgacgagcctgacatctggcgacacggccatatattactgtgcgagagtgatcacagggacctctggtgcctactaccagcacatggacgtctggggcaaagggaccacggtcatcgtctcttca

SEQ ID NO: 1511 - DNA, 375 bp, Homo sapiens
  source 1..375: mol_type = other DNA
caggtccagttggtgcagtctggggctgaggtgaagaagcctgggtcgtcggtgaaggtctcctgtaaggtttctggagacagcgtcatcaccttcagcagccatgctattagctgggtgcgacaggcgcctggacaagggcttgagtggataggagggatcagccccatacttcgcacaacagtctacgcacagaagttccagggcagagtcacgatcaccgcggacgactccacgaccacagcctacttggagctgagcaggctgatatctgaggacacggccgtctatttctgtgcgaggctgagtcagggtcactactactaccgctacatggacgtctggggcaaagggaccacggtcaccgtctcctca

SEQ ID NO: 1512 - DNA, 382 bp, Homo sapiens
  source 1..382: mol_type = other DNA
cagctgcagttacagcagtggggcgcaggactgttgaagccttcggagaccctgtccctcacctgctctgtgcatggtgggtccttcagtggttattactggagttggatccggcaggccccagggaaggggctggagtggattggagaaataaatcacagtggaaccaccaggaccaacccgtccctcgagagccgagtcaccatgtcagtagacacgtccaagaaccacttctccctgaaactgaggtctgtgaccgccgcggacagggccttttattattgtgcgagagggaaccattaccgttacgatttttggagtggatcccgggccgactggctcgacccctggggccagggaatcctggtcaccgtctccccag

SEQ ID NO: 1513 - DNA, 357 bp, Homo sapiens; identical to SEQ ID NO: 1422
  source 1..357: mol_type = other DNA

SEQ ID NO: 1514 - DNA, 357 bp, Homo sapiens
  source 1..357: mol_type = other DNA
gaggtgcagctggtggagtctgggggaggcttggtccagccgggggggtccctgagactctcctgtgcagcctctgggttcaccgtcagtagcaaatacatgtcctgggtccgccaggctccagggaagggactggagtgggtctcagttatttacagtggtgatatcacatactactcaaattccgtgaggggccgattcaccatctccagagacaattccaggaacacgctgtatcttcaaatgaacagcctgagagccgaggacacggccgtgtattactgtgcgagagggacagacagcgcagctacccgtgtggacgcctggggccaagggactacggtcaccgtctcctca

SEQ ID NO: 1515 - DNA, 363 bp, Homo sapiens
  source 1..363: mol_type = other DNA
caggtgcaactggtggagtctgggggaggcgtggtccagcctgggaggtccctgagactctcctgtgcagcgtctggattcaccttcagtagttatggcatgcactggttccgccaggctccaggcaaggggctggagtgggtggcagttatatcatatgatgatggaagtaataaatactatacagactccgtgaagggccgattcaccatctccagagacaattccaggaacacgctgtatcttcaaatgaacagcctgagagccgaggacacggccgtgtattactgtgcgagagggacagacagcgcagctacccgtgtggacgcctggggccaagggactacggtcaccgtctcctca

SEQ ID NO: 1516 - DNA, 376 bp, Homo sapiens
  source 1..376: mol_type = other DNA
gaggtacagatgttggagtctgggggagggttgattcaccctggggggtccctgagactctcctgtgcggcctctggattcaccgttagtagttatgccataagctgggtccgccaggctccagggaaggggctggagtgggtctcatctttgggtggtagtgggagtggcacatactacgcaggctccgtgaagggccggttcaccatgtccagggacacttccaagaacacggtgtttctgctgatgagcagcctgacagtcgaggacacggccatgtattactgtgcgaaagattgggggcccaaagatacaagtgcatatgacgaagctcttgatatctggggccaagggacaatggtcaccgtctctgcag

SEQ ID NO: 1517 - DNA, 357 bp, Homo sapiens
  source 1..357: mol_type = other DNA
gaggtgcaactggtggagtctgggggaggcttggtccagcctggggggtccctgagactctcctgtgcagcctctgggttcaccgtcagtagcaaatacatgtcctgggtccgccaggctccagggaagggactggagtgggtctcagttatttacagtggtgatatcacatactactcaaattccgtgaggggccgattcaccatctccagagacaattccaggaacacgctgtatcttcaaatgaacagcctgagagccgaggacacggccgtgtattactgtgcgagagggacagacagcgcagctacccgtgtggacgcctggggccaagggactacggtcaccgtctcctca

SEQ ID NO: 1518 - DNA, 379 bp, Homo sapiens
  source 1..379: mol_type = other DNA
caggtgcagctgcaggagtcgggcccaggactggtgaagccttcggagaccctgtccctcacctgcactgtctctggtggctccatcagtagtcacgactggagctggatccggcagcccccagggaagggactggagtggattgggtatatctataatagtgggagcgccaagtataatccctccctaaagagtcgagtcaccatgtcactagacacgtccaagaaccagttctccctgcagctgagctctgtgaccgctgcggacacggccgtgtattactgtgcgagagagaggaggtttggggagccatttgccttggtctatggtgatgcttttgatatctggggccaagggacaacagtcaccgtctcttcag

SEQ ID NO: 1519 - DNA, 367 bp, Homo sapiens
  source 1..367: mol_type = other DNA
caggtccagctggtgcagtctggggctgaggtgaagaagcctgggtcctcggtgaaggtctcctgcaaggcttctggagtcaccttcagcagcaattccatcagctgggtgcgacaggcccctggacaagggcttgagtgggtggggggggtcatcggtttgtttggaacagcaaagtacgcacagaagttccagggcagagtcactataaccacggacgaatccacgaccaccgcctacatggagctgagcagcctgagaactgaggacacggccgtgtattactgtgcgagagatcggggttactatgttcggggcaactggttcgacccctggggccagggaaccctggtcaccgtctcctcag

SEQ ID NO: 1520 - DNA, 364 bp, Homo sapiens
  source 1..364: mol_type = other DNA
caggtccagctggtgcagtctggggctgaggtgaagaagcctgggtcctcggtgaaggtctcctgcaaggcttctggtggccccttcagcagttatgctatcagttgggtgcgacaggcccctggacaagggcttgagtggatgggagggatcaccggtatgtttggtacggcaaaatacgcacagaagttccagggcagagtcactattaccgcggacgaatccacgagcacagcctacatggagctgagcagtctgagatctgaggacacggccgtgtattactgtgcgagggacgtaggttattacttacggggcgtttttcatctctggggccaggggacaatggtcaccgtctcttcag

SEQ ID NO: 1521 - DNA, 382 bp, Homo sapiens
  source 1..382: mol_type = other DNA
gaggtgcgcctggtggagtctgggggaggtttggtccagccgggggggtccctgagactctcttgtgtagcctctggattcacctttagtagatattggatgaattgggtccgccaggttccagggaaggggctggagtgggtggcctatataaagcaagatggaagtgagaaatactatgtggacactgtggagggccgattcaccatctccagagacaacgccaagacctcactgtatctgcaaatgagcagcctgagagccgaggacacggctatatattactgtgcgagaatgtcagtgttggattatgacaaaactccggacagatataggttccttgactactggggcccgggaactgaagtcaccgtctcctcag

SEQ ID NO: 1522 - DNA, 376 bp, Homo sapiens
  source 1..376: mol_type = other DNA
caggtgcagctggtgcagtctggggctgaggtgaagaagcctgaggactcagtgaaggtctcctgcaggacttctggatacaccttcaccgactactatattcactgggtgcgacaggcccctggacaagcgcctgagtacatgggatggatcgaccctaaaaatggtaacacaaactatgcacagaagtttcagggcagagtcaccatggccagggacacgtccatcagcacagcctacatggaactgagcggactgaggcctgacgacacggccatttactactgtgcgagaggatgtatatgttccttagatactactggttacagaccacttgactactggggccagggagccctggtcaccgtctcctcag

SEQ ID NO: 1523 - DNA, 357 bp, Homo sapiens; identical to SEQ ID NO: 1422
  source 1..357: mol_type = other DNA

SEQ ID NO: 1524 - DNA, 382 bp, Homo sapiens
  source 1..382: mol_type = other DNA
cagctgcacctacagcagtggggcgcaggactgttgaagccttcggagaccctgtccctcacctgctctgtctctggtgggtccttcagtaattactactggagttgggtccgccagcccccaggtaaggggctggagtggcttggagaaatcaatcaaaatggaaggaccagggccaatccgtccctcgagagccgggtcaccatgtcacttgactcgtccaagaacaacctctccctgacactgaggtctgtgaccgccgcggacacggccgtttattactgtgcaagggggacccattatcgctacgattttttgagtggttcccgggccgactggctcgatatttggggccaaggatccctggtcatcgtctcctcag

SEQ ID NO: 1525 - DNA, 370 bp, Homo sapiens
  source 1..370: mol_type = other DNA
caggtccagctggtgcagtctgggcctgaggtgaagaagcctgggtcctcggtgaaggtctcctgcaaggcttctggaggcgccttcactagttatgcaatgaattgggtgcgacaggccccaggacaagggcttgagtggatgggaggagtcatccctatgtttggtacaccaaactacgcccagaagttccagggcagagtcaccattaccgcggacgattcttcgcgcacaagttacttggagttgaggaccctgacatctgaggacacggccgtttattactgtgcgagagatcgggggggaggttataatacctacggtctccttgactactggggccagggaaccctggtcaccgtttcctcag

SEQ ID NO: 1526 - DNA, 376 bp, Homo sapiens
  source 1..376: mol_type = other DNA
caggtgcagttggtggagtctgggggaggcgtggtccagcctgggaggtccctgagactctcctgtgcagcctctggattcaccttcagtagctatgctatgcactgggtccgccaggctccaggcaaggggctggagtgggtggcagttatatcatatgatggcagccataaatactacgcagactccgtgaagggccgattcaccatcgccagagacaattccaagaacacgctgtttctgcaaatgaacagcctgagagctgaggacagggctgtgtattactgtgcgagagggaccacgatttttggagtgcttattatctcgaatccctttgactactggggccagggaaccctggtcaccgtctcctcag

SEQ ID NO: 1527 - DNA, 378 bp, Homo sapiens
  source 1..378: mol_type = other DNA
caggtgcagctggtgcagtctggggctgcggtgaagaagcccggggcctcagtgaaggtctcctgcaaggcttctggatacaccttcaccggctactctatacactgggtgcgacaggcccctggacaaggccttgagtggatgggatggatcaaccctaatactggtggcacaaactttgcacagaagtttcagggcacggtcgccatgacccgggacacgtccatcagcacagcctatatggagctgagcagcctgagatctgacgacacggccgtctattactgtgcgcgaacaatgataccagtggctttccccacatactactattacggtttggacgtctggggccaagggaccacggtcaccgtctcctca

SEQ ID NO: 1528 - DNA, 357 bp, Homo sapiens; identical to SEQ ID NO: 1422
  source 1..357: mol_type = other DNA

SEQ ID NO: 1529 - DNA, 379 bp, Homo sapiens
  source 1..379: mol_type = other DNA
caggttcacctggagcagtctggatctgaggtgaaggagcctggggcctcagtgaaggtctcctgcaagacttctggttacaactttgacaactatgctatcaactgggtacgacaggccccaggacaagggcttgagtggatggggcggatcagcgctcacaatggtgacacaaagtacacacagaagttccagggtagactcaccatgaccacagacacatccacgaccacggcctacatggaactgaggagcctgagatctgacgacacggccgtctattactgtgcgagagggtggcggccgagagatgagagcgacggtttttattcttggttcgacccctggggccagggaaccccggtcaccgtcccctcag

SEQ ID NO: 1530 - DNA, 372 bp, Homo sapiens
  source 1..372: mol_type = other DNA
caggtccacctggtgcagtctggggctgaggtgaagaagcctgggtcctcggtgaaggtctcctgtaaggcttctggaggcaccttcagcagctatactatcagctgggtgcgacaggcccctggacaagggcttgagtggatgggagggatcatccctatgtttggtacagcaaactacggacagaagttccaggacagagtcacgattaccgcggacgaatccacgagtacagcctacatggagctgagcagcctgagatctgaggacacggccgtgtattactgtgcgagagcaactggaacgacttcaggtcacttttactactacattgacgtctggggcaaagggacctcggtcaccgtctcctca

SEQ ID NO: 1531 - DNA, 370 bp, Homo sapiens
  source 1..370: mol_type = other DNA
caggtccaactggtgcagtctggggctgaggtgaggaagcctgggtcttcggtgaaggtctcctgcaagacttcaggaggccccttcagcagctattctttcaactgggtgcgacaggcccctggacaagggcttgagtggatgggagggatcatccctatctttggtactacaaattacgcacagaagttccagggcagagtcacgattaccacggtcgaatccacctccacagcctacatggaactgagcagcctgagatccgaggacacggccgtgtattactgtgcgaggagtcggggtactggtgattattaccaccaaacctttgattactggggccagggaaccctggtccacgtctcctcag

SEQ ID NO: 1532 - DNA, 357 bp, Homo sapiens
  source 1..357: mol_type = other DNA
gaggtgcggctggtggagtctgggggaggcttggtccggcctggggggtccctgatactctcctgtgcagcctctgaattcacgtctagaaattattggatgagttgggtccgccaggctccagggaagggactggagtgggtctcagttatttacagtggtgatatcacatactactcaaattccgtgaggggccgattcaccatctccagagacaattccaggaacacgctgtatcttcaaatgaacagcctgagagccgaggacacggccgtgtattactgtgcgagagggacagacagcgcagctacccgtgtggacgcctggggccaagggactacggtcaccgtctcctca

SEQ ID NO: 1533 - DNA, 382 bp, Homo sapiens
  source 1..382: mol_type = other DNA
caggtgcagctgcaacagcggggcgcaggactgttgaagccttcggagaccctgtccctcagttgcgctgtgtctggtgtgtccttcaatggttactactgcagttggctccggcagaccccagggaagggactggagtggattgcggagataaatgatcgaggaaacactaggtacaacccgtccctcaagagtcgagtcacaatatcagtagacatgtcgaagaaccagttctctctaaagatgtcctctgtgaccgccgcggacacggcaatgtattactgtgcgcgagggaaccactaccgctacgattttttgagtggttcccgggccgactggttcgacccctggggccagggaaccctggtcaccgtctcctcag

SEQ ID NO: 1534 - DNA, 373 bp, Homo sapiens
  source 1..373: mol_type = other DNA
caggtgcagctgcaggagtcgggcccaggactggtgaagccttcggagaccctgtccctcacctgcactgtctctggttactccatcagcagtggttactactggggctggatccggcagcccccagggaaggggctggagtggattgggagtatctatcatagtgggagcacctactacaacccgtccctcaagagtcgagtcaccatatcagtagacacgtccaagaaccagttctccctgaagctgagctctgtgaccgccgcagacacggccgtgtattactgtgcgagaagcaccaaccactactatgggggaacggacaactggttcgacccctggggccagggaaccctggtcaccgtctcctcag

SEQ ID NO: 1535 - DNA, 361 bp, Homo sapiens
  source 1..361: mol_type = other DNA
gaggtccggctggttcagtctggggctgaggtgaggaagcctggcgctacagttaaaatctcctgcaaggtttctggattcagcctcaccgactccttcttgcactgggtccaacaggcccctggcagagggcttgagtggatgggagtgattgatgctgaagacggtgagacaatatacgcagagaatgtccggggcagagtcaccataaccgcggacacgtccacaggcacagcctacatggaagtgagcagcctgacttctgaggacacggccgtgtattactgtgctagggcaattagcgccaccggggactggctcgacccctggggccagggtaccctggtcaccgtcacgtcag

SEQ ID NO: 1536 - DNA, 360 bp, Homo sapiens
  source 1..360: mol_type = other DNA
gaggtgctggtgttggagtctgggggaggcttggtacagccgggggggtccctgagactctcctgtacagcctctggattcacctttaatagttatgccatgagctgggtccgccaggctccagggaaggggcttgagtgggtctcaagtatccaaggcagtggtgatggcacatacgacgcagactccgtgaagggccgattcaccatctccagagagaattccaggaacacggtatatctgcaaatgaacagcctgagagccgaggacacggccgtgtattactgtgcgagagggacagacagcgcagctacccgtgtggacgcctggggccaagggactacggtcaccgtctcctca

SEQ ID NO: 1537 - DNA, 394 bp, Homo sapiens
  source 1..394: mol_type = other DNA
caggtccagctggtgcagtctggggctgaggtgaagaagcctgggtcctcagtgaaggtctcctgcaaggcttctggaggcaccttcagcatctctggaggcaccttctccatgtacgccataagttgggtgcgacaggcccctggacaagggcttgagtgggtgggagggatcatccctacgtttggtacggcaacctacgcacagaggtttcagggcagagtcaccatcaccgcggacgaatccacgagcacatcctacatggaactgaggagcctgaaatctgacgacacggccgtgtattattgttcgaggacgacccgttacagtggctacttttttcaccaaaattttgactcctggggccagggaaccctggtcatcgtctcctcag

SEQ ID NO: 1538 - DNA, 367 bp, Homo sapiens
  source 1..367: mol_type = other DNA
gaagtgctgctggtggagtctgggggaggcttggtacagcctggcaggtccctgagactctcctgtgcagcctctggattcacctttgataattatgccatgcactgggtccggcaagctccagggaagggcctggagtgggtctcaggtattagttgggatagtggtagcacagaatatgcggagtctgtgaagggccgattcaccatctccagagacaacgccaagaactccgtgtttctgcaaatgaacagtctgagacttgaggacacggccttttattactgtgcaaaagatactgggagcagttggtacggccaaggcaccgactactggggccagggaacccaggtcaccgtctcctcag

SEQ ID NO: 1539 - DNA, 379 bp, Homo sapiens
  source 1..379: mol_type = other DNA
caggtccagctggtgcagtctggggctgaggtgaagaagcctgggtcctcagtgaaggtctcctgcaagctttttggaggcacccttcagtctggaggcaccttcagctcctatgctatcaactgggtgcggcaggcccctggacaagggcttgagtggatgggaaggatgtcccctatatttggtacatcaaaatatgcacagaagttccagggcagagtcacgattactgtggacgaatccacaagtacagcctacatggaactgagcagcctaagatctgaggacacggccgtctatttctgtgcgagagagcctgcatatgccaacaactggttcctccactggggccagggaaccctggtcaccgtctcctcag

SEQ ID NO: 1540 - DNA, 375 bp, Homo sapiens
  source 1..375: mol_type = other DNA
caggttcacctggtgcagtctggagctgaggtgaagaagcctggggcctcagtgaaggtctcctgcaaggcttctggttacacctttaccacctatggtatcaactgggtgcgacaggcccctggacaagggcttgagtggatggggtggatcagcgcttacaatggcaacacaaattatgtaaagaagttccagggcagagtcaccatgaccacagacacatccacgagcacagcctacatggagttgacgagcctgagatttgacgacacggccgtgtattactgtgcgagagatctcgggggatatttcgcattcaaccactactactacatggacctctggggcgaagggacaacggtcaccgtctcctca

SEQ ID NO: 1541 - DNA, 364 bp, Homo sapiens
  source 1..364: mol_type = other DNA
gaggtgcagttggtggagtctgggggaggcttgatacagcctggagggtccctgagactctcctgtgcagcctctggattcactttcgatacttatgaaatgaattgggtccgccaggctccagggaaggggctggagtgggtttcatacattaatagtagtagtaccaacatacactacgcagactctgtgaagggccgattcaccatctccagagacaacgccaagaactcactgtatctgcaaatgaacaacctgagagtcgaggacacggctgtttattactgtgcgagcacctattattctacaactagtggttatctccaccactggggccagggcaccctggtcaccgtctcctcag

SEQ ID NO: 1542 - DNA, 357 bp, Homo sapiens; identical to SEQ ID NO: 1422
  source 1..357: mol_type = other DNA

SEQ ID NO: 1543 - DNA, 357 bp, Homo sapiens; identical to SEQ ID NO: 1422
  source 1..357: mol_type = other DNA

SEQ ID NO: 1544 - DNA, 357 bp, Homo sapiens
  source 1..357: mol_type = other DNA
gaggtgcggctggaggagtctgggggaggcttggtccagcctggggggtccctgagactctcctgtgcagcctctgggttcaccgtcagtagcaaatacatgtcctgggtccgccaggctccagggaagggactggagtgggtctcagttatttacagtggtgatatcacatactactcaaattccgtgaggggccgattcaccatctccagagacaattccaggaacacgctgtatcttcaaatgaacagcctgagagccgaggacacggccgtgtattactgtgcgagagggacagacagcgcagctacccgtgtggacgcctggggccaagggactacggtcaccgtctcctca

SEQ ID NO: 1545 - DNA, 382 bp, Homo sapiens
  source 1..382: mol_type = other DNA
gaggtgcgcctggtggagtctgggggaggcttggtccagccgggggggtccctgagactctcttgtgtagcctctggattcacctttagtagatattggatgaattgggtccgccaggttccagggaaggggctggagtgggtggcctatataaagcaagatggaagtgagaaatactatgtggacactgtggagggccggttcaccatctccagagacaacgccaaggcctcactgtatctacaaatgagcagcctgagagccgaggacacggctgtgtattactgtgcgagaatgtcagtgttggattatgacaaaactccgggaagatataggttccttgactactggggcccgggaactgaggtcaccgtctcctcag

SEQ ID NO: 1546 - DNA, 373 bp, Homo sapiens
  source 1..373: mol_type = other DNA
gaggtgcagctgttggagtcggggggaggcttggtgaagcctggggggtccctgagactctcctgtgcggcctctgggttcacctttaggaactatgccatgacctgggtccgccaggctcctgggaaggggctggagtgggtctcaagttttactggtactatgagtacatactacgcggactccgtgaagggccggttcaccatctccagagacaatgtcaagaacactctgtatctacaactgaacagcctgagagccgaggacacggccatctatttctgtgcgaaacttgggtcccctggggtcagtactaacaattatgggtattttgactcctggggccagggaaccccggtcaccgtctcctcag

SEQ ID NO: 1547 - DNA, 357 bp, Homo sapiens; identical to SEQ ID NO: 1422
  source 1..357: mol_type = other DNA

SEQ ID NO: 1548 - DNA, 379 bp, Homo sapiens
  source 1..379: mol_type = other DNA
caggttcacctggagcagtctgggtctgaggtgaagaagcctggggcctcagtgaaagtctcctgcaaggcttctggttacagttttagggactatgctatcagctgggtgcgacaggcccctggacaggggcttgagtggatgggatggatcagcgctcacaatggtgccacaaaatataaacagaagttgcagggcagagtcaccatgaccacagacacatccacgaccacagcctacatggaactgaggagtctgagatctgacgacacggccgtctattactgtgcgagagggtggcggcccagacaggagagtggtgggttttattcctggttcgactcctggggccagggaaccctggtcaccgtctcctcag

SEQ ID NO: 1549 - DNA, 357 bp, Homo sapiens
  source 1..357: mol_type = other DNA
gaggtgcgcctggtggagtctgggggaggcttggtacagccgggggggtccctgagactctcctgtgcagcctctgggttcaccgtcagtagcaaatacatgtcctgggtccgccaggctccagggaagggactggagtgggtctcagttatttacagtggtgatatcacatactactcaaattccgtgaggggccgattcaccatctccagagacaattccaggaacacgctgtatcttcaaatgaacagcctgagagccgaggacacggccgtgtattactgtgcgagagggacagacagcgcagctacccgtgtggacgcctggggccaagggactacggtcaccgtctcctca

SEQ ID NO: 1550 - DNA, 356 bp, Homo sapiens; identical to SEQ ID NO: 1454
  source 1..356: mol_type = other DNA

SEQ ID NO: 1551 - DNA, 370 bp, Homo sapiens
  source 1..370: mol_type = other DNA
caggtgcagctgcaggagtcgggcccaggactggtggagccttcacagaccctgtccctcacctgcactgtctctggtgactccgtcagcagtcgtgattactcctggacctggatccgccagtccccagggaagggcctggagtgcattgggtacatcttttacaatgggcgcacctacaccaacccgtccctcaagagtcgacttgccatatccctagacacgtccaggaaccagttctccctgatgctgggctctgtgactgccgcagacacggccgtttattactgtgccagagagcccagtggctattcccgggcgaatgcttttgatgtctggggccgagggacaatggtcaccgtctcttcag

SEQ ID NO: 1552 - DNA, 357 bp, Homo sapiens; identical to SEQ ID NO: 1422
  source 1..357: mol_type = other DNA

SEQ ID NO: 1553 - DNA, 369 bp, Homo sapiens
  source 1..369: mol_type = other DNA
caggtccagctggtgcagtctggggctgaggtgaagaagcctgggtcctcggtgaaggtctcctgcaaggcttctggaggcaccttcagcagctatgctatcagctgggtgcgacaggcccctggacaagggcttgagtggatgggagggttcgtccctgtctttggtgcagcaaactacgcacagaagttccagggcagagtcacgattaccaaggacgaatccacgagcacagcctacatggagctgagcagcctgagatctgaagacacggccgtatattactgtgcggtctgttcaggggggttaactaattactactactacatggacgtctggggcaaagggaccacggtcaccatctcgtca

SEQ ID NO: 1554 - DNA, 375 bp, Homo sapiens
  source 1..375: mol_type = other DNA
caggtgcaactggtgcagtctggggctgaggtgaagaagcctggggcctcagtgaaggtctcctgcaaggtttctggagacaccctcaccggccagtttttgcactgggtgcgacaggcccctggacaagggcttgagtggatgggatggatgaaccctaacagcggtgacacaaactatgcacagaggtttcagggcagggtcaccatgaccagggacacgtccatcagcatagcctacctggagttgagtcggctgagatctgacgacacggccgtgtattactgtgcgcgagattttgactttataccactggctgggacgagaggggctatagacgtctggggccaagggaccacggtcaccgtctcctca

SEQ ID NO: 1555 - DNA, 379 bp, Homo sapiens
  source 1..379: mol_type = other DNA
caggttcacctggagcagtctggatctgaggtgaagaagcctggggcctcagtgaaggtctcgtgtaaggcttctggttacagctttagcaactatgctatcaactgggtgcgacaggcccctggacaagggcttgagtggatgggatggatcagcgctcacaatggtgacacaaagtatatagagaagttccagggtagagtcaccatgaccacagacacatccacgaccacagcctacatggaactgaggagcctgagatctgacgacacggccgtctattattgtgcgagagggtggcggccgagagatgagagtggtggttattattcctggttcgacccctggggccagggaaccctggtcaccgtctcctcag

SEQ ID NO: 1556 - DNA, 361 bp, Homo sapiens
  source 1..361: mol_type = other DNA
caggtccaactggtgcagtctggggctgaggtgaagaagcctgggtcctcagtcaaggtctcctgcaaggcttccggaggcaccttcagcagttatgctatcagctgggtgcgacaggcccctggacaagggcttgagtggatgggaggcatcatcggtatgtttggaacggtaaagtacgcacagaagttccagggcagagtcacgatcaccgcggacgaactcacgagctcagcctacatggagctgagcagcctgacatctgaggacacggccctgtattactgtgcgagagcaagtggttattacccagactggttcgacccctggggccagggaaccctggtcatcgtctcctcag

SEQ ID NO: 1557 - DNA, 360 bp, Homo sapiens
  source 1..360: mol_type = other DNA
caggtgcagctggtggagtctgggggaggcgtggtccagcctgggaggtccctgagactctcctgtggagcgtctggattcaccttcagaaactatggcatgcactgggtccgccaggctccaggcaaggggctggagtgggtggcacttatatcatatgatggaactaataaaaactatgcagactccgtgaagggccgattcaccatctccagagacaattccaggaacacgctgtatcttcaaatgaacagcctgagagccgaggacacggccgtgtattactgtgcgagagggacagacagcgcagctacccgtgtggacgcctggggccaagggactacggtcaccgtctcctca

SEQ ID NO: 1558 - DNA, 366 bp, Homo sapiens
  source 1..366: mol_type = other DNA
caagtccagctggtgcaatctggggctgaggtgaagaagcctgggtcttcggtgaaggtctcctgcacgacttctggagtcaccttcaacagcgatgccatcagttgggtgcgacaggcccctggacaagggcttgagtggatgggagggatcaccggcatgtttgggtcaacaaactacccacagaagttccagggcagagtcacgattaccacggacaaatctacgaggacggcctatctggagttgaccagactgacatctgaagacacggccgtgtattactgtgcgaaatggagtggttatcattactcctacaactacatggacgtctggggcaaagggaccacggtcatcgtctcctca

SEQ ID NO: 1559 - DNA, 357 bp, Homo sapiens; identical to SEQ ID NO: 1422
  source 1..357: mol_type = other DNA

SEQ ID NO: 1560 - DNA, 369 bp, Homo sapiens
  source 1..369: mol_type = other DNA
caggtccagctggtgcagtctgggactgaggtgaagaagcctggttcttcagtgaaggtctcctgcaaggcttctggaggcaccttcagcaaatatgctatcagctgggtgcgacaggcccctggacaaggacttgagtggatgggagggatcatcgctatctttcgtacaacaaactacgcacagaagttccagggcagagtcacgattaccgcggacgaatacatgagcacaggctacatggagctgagcagcctgacatctgaggacacggccgtgtattattgtgcgagaggctcacgagaccagtactacaactactacggtatggacgtctggggccaagggaccacggtcaccgtctcctca

SEQ ID NO: 1561 - DNA, 360 bp, Homo sapiens
  source 1..360: mol_type = other DNA
caggtccagctggtgcagtctggggctgaggtgaagaagccggggtcctcggtgaaggtctcgtgcaaggcttctggaggcaccttcagcgcctatgctatcaactgggtgcgacaggcccctggacaagggcttgagtggatgggagggatcatccctatctttggtactccaacctacgcacagaagttccagggcagagtcacggttaccgcggacgaatccacgagcacagcctacatggagctgagcagcctgagatctgaggacacggccgtgtattactgtgcgagagtttcgacctactactactactacatggaagtctggggcaaagggaccacggtcatcgtctcctca

SEQ ID NO: 1562 - DNA, 357 bp, Homo sapiens; identical to SEQ ID NO: 1422
  source 1..357: mol_type = other DNA

SEQ ID NO: 1563 - DNA, 361 bp, Homo sapiens
  source 1..361: mol_type = other DNA
gaagtgcaactggcggagtctgggggaggcctggtacagcctggcaggtccctgagactctcctgtgaagcctctggattcacattcgaggattatgcaatgcagtgggtccgccaagttccagggaagggcctggagtgggtcgcaggtattagttgggatagtgctacgaaaggttatgcggactctgtgaagggccgcttcaccgtctccagagacaacgccaagaactccctgtttctgcaaatgaacagtctgaaatctgcggacacggccttctatttctgtgcatcggcgccatatggttcggggagttttgctgattcctggggccagggaaccctggtcaccgtctcctcag

SEQ ID NO: 1564 - DNA, 366 bp, Homo sapiens
  source 1..366: mol_type = other DNA
caggtgcagctgcaggagtcgggcccacgactggtgaagccttcggagaccctgtccctcacctgtactgtctctggtggctccatcagtggttactactggagctggatccggcagcccccagggaagggactggagtggattgggtacatctctcccactgggaacaccaactacaacccctccctcaagaatcgagtcaccttctcactagacacgtccaagaagcagttttccctgaagctgaactctgtggccgtcgcagacacggccgtgtattactgtgcgagacaattcatcccggttggaccatattattactactacatggacgtctggggcaaagggactacggtcaccgtctcc

SEQ ID NO: 1565 - DNA, 357 bp, Homo sapiens; identical to SEQ ID NO: 1422
  source 1..357: mol_type = other DNA

SEQ ID NO: 1566 - DNA, 357 bp, Homo sapiens; identical to SEQ ID NO: 1422
  source 1..357: mol_type = other DNA

SEQ ID NO: 1567 - DNA, 357 bp, Homo sapiens
  source 1..357: mol_type = other DNA
gaggtgcagttggtggagtctgggggaggcttgatacagcctggagggtccctgagactctcctgtgcagcctctgggttcaccgtcagtagcaaatacatgtcctgggtccgccaggctccagggaagggactggagtgggtctcagttatttacagtggtgatatcacatactactcaaattccgtgaggggccgattcaccatctccagagacaattccaggaacacgctgtatcttcaaatgaacagcctgagagccgaggacacggccgtgtattactgtgcgagagggacagacagcgcagctacccgtgtggacgcctggggccaagggactacggtcaccgtctcctca

SEQ ID NO: 1568 - DNA, 361 bp, Homo sapiens
  source 1..361: mol_type = other DNA
caggtccagctggtgcagtctggggctgaggtgaagaagcctgggtcctcggtgaaggtctcctgcaaggcttctggagtcaccttcagcggctatgctatcagctgggtgcgacaggcccctggacaagggcttgagtggatgggagggatcaccggtgtttttgctacggcaaactacgcacagaaattccagggcagagtcacgattagcacggacaaatcgacgaccacaacctacatggagctgagcagcctgacatctgacgacacggccgtgtattactgtgcgagaggtgccgggtatgttgcttcgtggcttggctcctggggccagggaaccctggtcaccgtctcctcag

SEQ ID NO: 1569 - DNA, 357 bp, Homo sapiens
  source 1..357: mol_type = other DNA
gaggtgcggctggtggagtctgggggaggcttggtccggcctggggggtccctgagactctcctgtgcagcctctgggttcaccgtcagtagcaaatacatgtcctgggtccgccaggctccagggaagggactggagtgggtctcagttatttacagtggtgatatcacatactactcaaattccgtgaggggccgattcaccatctccagagacaattccaggaacacgctgtatcttcaaatgaacagcctgagagccgaggacacggccgtgtattactgtgcgagagggacagacagcgcagctacccgtgtggacgcctggggccaagggactacggtcaccgtctcctca

SEQ ID NO: 1570 - DNA, 376 bp, Homo sapiens
  source 1..376: mol_type = other DNA
gaggtgcagctgttggagtctgggggaggcttggtacagccgggggggtccctgagactctcctgtgcggcctctggattcatctttaacaactatgccatgagctgggtccgccaggctccagggaaggggctggagtgggtctcatcttttgctggtgatactggtaacatatactacgcagactccgtgaagggccggttcaccatctccagagacaatcccaagaacacggtgtttctgcaagcgaacagcctgagagtcgacgacacggccatatattactgtgcgaaagattgggggcccaaagacagtagttcttatgacgatggtcttgacatctggggccaagggacaatggtcaccgtcttttcag

SEQ ID NO: 1571 - DNA, 360 bp, Homo sapiens
  source 1..360: mol_type = other DNA
caggtgcaactggtggagtctgggggaggcgtggtccagcctgggaggtccctgagactctcctgtgcagcctctggattcaccttcaataactatgctatgtactgggtccgccaggctccaggcaaggggctggagtcggtggcagttatatcatatgatggaagcaataaatactacgcagactccgtgaagggccgattcaccatctccagagacaattccaggaacacgctgtatcttcaaatgaacagcctgagagccgaggacacggccgtgtattactgtgcgagagggacagacagcgcagctacccgtgtggacgcctggggccaagggactacggtcaccgtctcctca

SEQ ID NO: 1572 - DNA, 357 bp, Homo sapiens; identical to SEQ ID NO: 1422
  source 1..357: mol_type = other DNA

SEQ ID NO: 1573 - DNA, 374 bp, Homo sapiens
  source 1..374: mol_type = other DNA
ggtgcagctggtgcagtctggggctgaagtgaagaagcctggggactcagtgagggtctcctgcaaggcttctggatacaccttcagcgactactatatccactgggtgcgacaggcccctggacaagcgcctgagtacatgggatggatcaaccctaacaaaggtgacacaagctatgcacagaagtttcagggcagggtcaccatggccagtgactcgtccatcagcactgcctacgtggaactgagcgggctgaggtctgacgacacggctgtgtattactgtgcgagaggatgtatatgttccttggatagtactggttacagaccacttgaccattggggccagggagccctggtcaccgtctcctcag

SEQ ID NO: 1574 - DNA, 357 bp, Homo sapiens; identical to SEQ ID NO: 1567
  source 1..357: mol_type = other DNA

SEQ ID NO: 1575 - DNA, 360 bp, Homo sapiens
  source 1..360: mol_type = other DNA
gaagtgcgactggtggagtctgggggaggcttggtacagcctggcaggtccctgagactctcctgtgcagcctctggcttcaactttgatgagtatgccatgcagtgggtccggcaagctccagggaagggcctggagtgggtctcaggtattagttggaatagtggtagcatcggctatgcggactctgtgaggggccgattcaccatctccagagacaattccaggaacacgctgtatcttcaaatgaacagcctgagagccgaggacacggccgtgtattactgtgcgagagggacagacagcgcagctacccgtgtggacgcctggggccaagggactacggtcaccgtctcctca

SEQ ID NO: 1576 - DNA, 360 bp, Homo sapiens
  source 1..360: mol_type = other DNA
caggtgcaactggtggagtctgggggaggcgtggtccagcctgggaggtccctgagactctcctgtgcagcctctggattcaccttcaataactatgctatgtactgggtccgccaggctccaggcaaggggctggagggggtggcacttatatcatatgatggaagcaataaatactacgcagactccgtgaagggccgattcaccatctccagagacaattccaggaacacgctgtatcttcaaatgaacagcctgagagccgaggacacggccgtgtattactgtgcgagagggacagacagcgcagctacccgtgtggacgcctggggccaagggactacggtcaccgtctcctca

SEQ ID NO: 1577 - DNA, 366 bp, Homo sapiens
  source 1..366: mol_type = other DNA
caggtccagctggtgcagtctggggctgaggtgaagaagcctgggtcctcggtgagggtctcctgcaaggcttctggaggcacattcaagaactccgctataagctgggtgcgacaggcccctggccaagggcttgagtggatgggagggatcaaccctgtctttggtgcaccaaactacgcccagaggttccagggtagagtcacaattaccgcggacgcatctaagaccacagcctacatggagctgaacagcctgagatctgaggacacggccgtatattactgtgcgtgcttggccactctcgtgggttactactactacgcggacgtctggggcgaagggaccacggtcagtgtctcgtca

SEQ ID NO: 1578 - DNA, 376 bp, Homo sapiens
  source 1..376: mol_type = other DNA
gaggtgcagctggtggagtctgggggaggcttagtacagccgggggagtccctgagactctcctgtgcagcctctggattcgcctttagcaactatggcatgagctgggtccgccaggctccaggaaaggggctggagtgggtctcagccgttggtggtggacctggaaacacatacctcgcagactccgtgaggggccggttcaccatgtcccgagacaattccaagagcacggtatatctacaaatggacaccctgagagccgaggacacggccatatattactgtgcgaaagattgggtgaatgccgatgactggccatatcaacccgtctttgactcctggggccagggaaccctggtcaccgtctcctcag

SEQ ID NO: 1579 - DNA, 357 bp, Homo sapiens; identical to SEQ ID NO: 1422
  source 1..357: mol_type = other DNA

SEQ ID NO: 1580 - DNA, 369 bp, Homo sapiens
  source 1..369: mol_type = other DNA
caggtgcaactggtgcagtctggggctgaggtgaagaagcctgggtcctcggtgaaggtctcctgcaaggcttctggaggccccttcaaaaactttgctatcaactgggtgcggcaggcccctggacaaggtcttgagtggatgggagggatcgtccctgtctttcctgcaccagcctacgcacagaagttccggggcagagtcacaattagtaaagacgaatccacgaacacagcctacatggaagtgagaagcctgagatttgaggacacggccgtgtattactgtgcgatctgttcaggggggttgactaactactacttctacatggacgtctggggcgaagggaccacggtcaccgtctcctca

SEQ ID NO: 1581 - DNA, 367 bp, Homo sapiens
  source 1..367: mol_type = other DNA
caggtgcaactggcggagtctgggggaggcgtggtccagcctgggaggtccctgagactctcctgtgcagcctctggattcaccttcaataattttgctatgtactgggtccgccaggctccaggcaaggggctggagtcggtggcagttatatcatatgatggaagcaataaatactacgcagactccgtgaggggccggttcaccatctccagagacaattccaagaacacgctgtttctgcaagtgaacaacctgagaactgaggactcggctgtgtattactgtgcgagagatcgccttcggattgtattggcgggtacggggcctcactggggccagggaaccctggtcatcgtctcctcag

SEQ ID NO: 1582 - DNA, 370 bp, Homo sapiens
  source 1..370: mol_type = other DNA
cagttgcagctgcaggagtcgggcccaggactggtgaagccttcggagaccctgtccctcacctgcactgtctctggtggctccatcagcagtaggagttactactggggctggatccgccagcccccagggaaggggctggagtggattggcagtatcttttatactgggagcaccaactacaagccgtccctcagcagtcgagtcaccatatctgtagacacgtccaagaaccaggtctccctgaggctgagctctgtgaccgccgcggacacggccgtctattactgtgcgagatggtttagtgggaggtactattcctttggatttgacaattggggccagggaaccctggtcaccgtctcctcag

SEQ ID NO: 1583 - DNA, 376 bp, Homo sapiens
  source 1..376: mol_type = other DNA
cagctgcagctgcaagagtcgggcccaggactggtgaagccttcggagaccctgtccctcacctgcactgtctctggtggctccatcagcagtaatagtttctactggggctggatccgccagcccccagggagggggctggagtggattgcgaatatctattatagtgggagcacctaccacaacccgtccctcaagagtcgagtcacggtgtcagtagagacgtccaagagccagttctccctgaggctgagctctgtgaccgccgcggacacggccatgtattactgtgcgagatatgggagggatattgcagcagctgggattgatgcttttgatatctggggccaagggacaatggtcaccgtctcttcag

SEQ ID NO: 1584 - DNA, 370 bp, Homo sapiens
  source 1..370: mol_type = other DNA
gaggtgcgcctggtggagtcagggggaggcttggtacagccgggggggtcccggagactctcctgtgtagcctctcaattcacctttaccaaccatgccatgcattgggtccgccaggctccagggaaggggccggagtgggtcgcgagtattagtgggactggaattagtaaatattacgcagactccgtcaagggccggttcaccatttccagagacaattccaagaacacactgtctctgcaattgaacagcctgagaggcgaggacacggccctttattactgtgcgagggactcaagcaactaccctccaaggaccgggtacttcgatctctggggccgtggcaccctggtcactgtctcctcag

SEQ ID NO: 1585 - DNA, 346 bp, Homo sapiens
  source 1..346: mol_type = other DNA
caggtgcagctggtggagtctgggggaggcttggtcaagcctggagggtccctgagactctcctgtgcagcctctggattcaccttcagtgactactacatgagctggatccgccaggctccagggaaggggctggagtgggtttcatacattagtagtagtagtagttacacaaactacgcagactctgtgaagggccgattcaccatctccagagacaacgccaagaactcactgtatctgcaaatgaacagcctgagagccgaggacacggccgtgtattactgtgcgagagcagtacggggtgactactggggccagggaaccctggtcaccgtctcctcag

SEQ ID NO: 1586 - DNA, 357 bp, Homo sapiens; identical to SEQ ID NO: 1422
  source 1..357: mol_type = other DNA

SEQ ID NO: 1587 - DNA, 382 bp, Homo sapiens
  source 1..382: mol_type = other DNA
gaggtgcggctggtggagtctgggggaggcttggtccagccgggggggtccctgagactcacctgtgtagcctctgggttcacctttgacaattattggatgacgtgggtccgccaggctccagggaaggggctggagtgggtggccaacataaagccggatggaagtgacgaatactatgtggactctatgaagggccgattcaccatctccagagacaacgccaggaattcattgtatttgcaaatgaacagcctgagagtcgaagacacggctgtatattactgtgcgagagacccctgggaggagaccaatcatgatagtgctggttatggtgctttcgatatgtggggccaagggacaatggtcaccgtctcttcag

SEQ ID NO: 1588 - DNA, 373 bp, Homo sapiens
  source 1..373: mol_type = other DNA
gaggtgcaactggtggagtctgggggaggcttggtccagccgggggggtccctgagactctcctgtgtagcctctggattcacctttagtaattattggatgagttgggtccgccaggctccagggaaagggctggagtgggtggccaatataaaacatgatggaactgagagtttctctgtggactctgtgaagggccgattcaccctctccagagacaacgccaggaactcactttatcttcaaatgaacggcctgagagccgaggacacggccgtatattattgtgcgagaatttttcactttgagaatggtggttattacagacactttgactgctggggccagggaacccaagtcaccgtctcctcag

SEQ ID NO: 1589 - DNA, 370 bp, Homo sapiens
  source 1..370: mol_type = other DNA
gaggtgcacctggtggagtctgggggaggcttggtccagcctggagagtccctgagactgtcctgtgcagcctctggattcacctttagtgaccactacatggactgggtccgccaggctccagggaagggcctagagtgggttggcgtgagtagaaacaaagctaataaatataccacagagtacgccgcgtctgtaaaaggcagattcgccgtttcgagagatgattcaacgaactcactgtatctgcaaatggacagtctgaaaaacgaggacacggccgtatatttctgtgtcagatcagtgcaaacaacgggtggatggaagctcgacccctggggtccgggaaccctggtcaccgtctcctcag

SEQ ID NO: 1590 - DNA, 369 bp, Homo sapiens
  source 1..369: mol_type = other DNA
caggtgcaactggtgcagtctggggctgaggtgaagaagcctgggtcctcggtgaaggtctcctgcaaggcttctggaggccccttcaaaaactttgctatcaactgggtgcggcaggcccctggacaaggtcttgagtggatgggagggatcgtccctgtctttcctgcaccagcctacgcacagaagttccggggcagagtcacaattagtaaagacgaatccaccaacacagcctacatggaagtgcgcagcctgagatttgaggacacggccgtgtattactgtgcgatctgttcaggggggttgactaattactacttctacatggacgtctggggcgaagggaccacggtcaccgtctcgtca

SEQ ID NO: 1591 - DNA, 357 bp, Homo sapiens; identical to SEQ ID NO: 1422
  source 1..357: mol_type = other DNA

SEQ ID NO: 1592 - DNA, 360 bp, Homo sapiens
  source 1..360: mol_type = other DNA
gaggtgcaactggtggagtctgggggaggcttggtccagccgggggggtccctgacactctcttgtgcggtctctggattcacttttggtaattattggatgagttgggtccgccaggctccagggaaagggctggagtgggtggccaacataaaacaagatggaagtgagctgaactatgtggactctgtgaagggccgattcaccatcttcagagacaatggcaggaattcactgtatctgctaatgaacagcctgagagccgaggacacggccgtgtattactgtgcgagagggacagacagcgcagctacccgtgtggacgcctggggccaagggactacggtcaccgtctcctca

SEQ ID NO: 1593 - DNA, 357 bp, Homo sapiens
  source 1..357: mol_type = other DNA
tggtggagtctgggggaggcctggtacagccgggggggtcccggcggctctcctgtgaagcctctggattcaccttcagcaattttgtcatgagttgggtccgccaggctccaggcaagggactggaatgggtctcatctattagcggtaccagtctcagcgcatattatatagactccgtgaagggccgcttcaccgtatccagagacaactccaagaacaccttatatttgcaaatgaagagcctgagagtcgaggacacggccatctattactgtgcgaaagactttacgagaaggccgatcgagactgctttcgatgtctggggtcaggggacaatggtcaccgtctctccag

SEQ ID NO: 1594 - DNA, 354 bp, Homo sapiens
  source 1..354: mol_type = other DNA
ctggtgcagtctgggggagacttggtacaacctggtgggtccctgagactctcctgtgtagcctctggattcaggtttaacaactatgccatgggctgggtccgccaggctccaggcaaggggctggagtgggtctcaagtattagtggtcatcgtgatgctaacacatactatgccgagtccgtgaagggccgattcaccatctccagagacaattccaggaacacgctgtatcttcaaatgaacagcctgagagccgaggacacggccgtgtattactgtgcgagagggacagacagcgcagctacccgtgtggacgcctggggccaagggactacggtcaccgtctcctca

SEQ ID NO: 1595 - DNA, 390 bp, Homo sapiens
  source 1..390: mol_type = other DNA
caggtcaccttgaaggagtctggtcctgttctggtgaaacccacagagaccctcacgctgacctgcgtcgtctctgaggtctcactcaccagtcgtgaagtgggggtgagctggatccgtcagcccccagggaaggccctggagtggcttgcgctcattttttcggatgacgagaaatcctacagtacatctctgaagagcaggctcaccatctccaaggacacctccaaaagtcaggtggtccttaccatgaccaacatggaccctgcggacacagccacatattactgtgtccggacgggcagggagtggttagtctcgggggccttcagaaatcactactattacatggacgtctggggcaaagggaccacggtcaccgtctcctca

SEQ ID NO: 1596 - DNA, 357 bp, Homo sapiens; identical to SEQ ID NO: 1422
  source 1..357: mol_type = other DNA

SEQ ID NO: 1597 - DNA, 357 bp, Homo sapiens; identical to SEQ ID NO: 1422
  source 1..357: mol_type = other DNA

SEQ ID NO: 1598 - DNA, 379 bp, Homo sapiens
  source 1..379: mol_type = other DNA
caggttcacctggagcagtctgggtctgaagtgaagaaccctggggcctcagtgagagtctcctgcaaggcttctggttacagcttcagcaactatgctatcaactgggtgcgacaggcccctggacaagggcttgagtggatgggacggatcagcgctcacgatggtgacacaaaatatacacagaacttccagggcagagtcaccatgaccacggacacatccacgaccacagcccacatggaactgaggagcctgagatctgacgacacggccgtctatttctgtgcgagagggtggcggcgtagagatgagagtggtggcttttattcctggttcgacgcctggggccagggaaccctggtcaccgtctcctcag

SEQ ID NO: 1599 - DNA, 376 bp, Homo sapiens
  source 1..376: mol_type = other DNA
caggtgcagctgcaggagtcgggcccaggactggtgaagccttcggagaccctgtccctcacctgcactgtctctggtggcccccacagtagttactactggagctggatccggcagcccccagggaagggactggagtggattgggtatatctattacagtgggaccaactacaacccctccctcaagagtcgagtcaccatatcagtagacacgtccaagaaccagttctccctgaagctgagctctgtgaccgctgcggacacggccgtgtattactgtgcgagagggcggtggtactatgatagtagtggttctttccgaagggcgaactttgactactggggccagggaaccctggtcaccgtctcctcag

SEQ ID NO: 1600 - DNA, 368 bp, Homo sapiens
  source 1..368: mol_type = other DNA
gaagtgcagctggtggagtctgggggagtcttggtacagcctggcaggtccctgagactctcctgtgcagcctctggattcagctttgatgaaaatgtcatgcactgggtccggcaagctccagggaagggcctggagtgggtctcaggtattagttggaatagtgataagataggctatgcggactctgtgaagggccgattcaccatctccagagacaacgccaagaactccctgtatctgcaaatggacagtctgagagctgcggactcggccttgtattactgtgcaaaaggctattgtagtagtactcattgttatgggtacttcgatctctggggccgtggcaccctggtcactgtctcctc

SEQ ID NO: 1601 - DNA, 367 bp, Homo sapiens
  source 1..367: mol_type = other DNA
gaggtgcagctgttggagtctgggggaggcttggtacagcctggggggtccctgagactctcctgtgtagcctctagattcacctttacgaattatgtcatgacctgggtccgccaggctccagggaaggggctggagtgggtctcaagtattagtggaagtgggattagcacatactacgcagactctgtgaagggccggttcaccatctccagagacaattccaagaacacgctgtatctgcacatgagtagcctgagagccggggacacggccgtatactattgtgcgaaaggcctacggttacttgtcgaatcgggcgctcttgatatgtggggccaagggacaatggtcaccgtctcttcag

SEQ ID NO: 1602 - DNA, 361 bp, Homo sapiens
  source 1..361: mol_type = other DNA
caggtccagctggtgcagtctggggctgaggtgaagaagcctgggtcctcagtgaaggtctcctgcaaggcttctggaggcaccttcggcagctatgctatcagctgggtgcgacaggcccctggacaagggcttgagtggatgggagggatcatccctatctttggtacagcaaactacgcacagaagttccagggcagagtcacgattaccacggacgaatccacgagcacaggctacatggaactgagcagcctgagatctgaggacacggccgtgtattactgtgccggtcggggttactatgataggagtggttatgactactggggccagggaaccctagtcaccgtctcctcag

SEQ ID NO: 1603 - DNA, 358 bp, Homo sapiens
  source 1..358: mol_type = other DNA
gaagtgcagctggtggagtctgggggaggcttggtacagcctggcaggtccctgagaatatcctgtgcagcctctggattcatctttgatgattatgccatgcagtgggcccggcaagctccagggaagggcctggagtgggtctcaggtattagttggaatagtggtagtataggctatgcggactctgtgaagggccgattcaccatctccagagacaacgccaagagttccctgtttctgcaaatgaacagcctgagacctgaggacacggccttgtattactgtgcaaaagcccatggttcggggagttattcccttagctggggccagggaaccctggtcaccgtctcctcag

SEQ ID NO: 1604 - DNA, 388 bp, Homo sapiens
  source 1..388: mol_type = other DNA
cagctgcagctgcaggagtcgggcccaggactggtgaagacttcggagaccctgtccctcagttgcactgtctctggtggctccatcagcagtagtaattcctactggggctggatccgccagcccccagggaaggggctggagtggattgcgactatctcttacagtggggacacctactacaacccgtccctcgagagtcgagtcaccatatcagtagacacgtccaagaaccagttctccctgaagatgaggtctgtgaccgccgcggacacggccgtgtatttttgtgcgagagatccgggctttcatgttctattgaaggcgtatgctattcgggctgcttttgatatctggggccaagggacaatggtcaccgtctcttcag

SEQ ID NO: 1605 - DNA, 370 bp, Homo sapiens
  source 1..370: mol_type = other DNA
caggtgcacctggtgcagtctggggctgaggcgaagaagcctggggcctcagtgatggtctcctgcaaggcttctggattcagattcagagactactatctgcactgggtgcgacaggcccctggacaagggcctgagtggatggcatggatcaaagttaaaaatggcgacaccaagtatacggagagatttaagggcagggtctccgtgacgtgggactcgtcgcttagcacactctacatggacctgagaagtctgacatctgacgacacggccgtttattactgtgtgagaggtatttggagagatgacttcaaatatgatgcttttgatatctggggccaggggacaatggtcactgtttcctcag

SEQ ID NO: 1606 - DNA, 358 bp, Homo sapiens
  source 1..358: mol_type = other DNA
gaggagcagctgttggagtctgggggagacttggtacagccgggggggtccctgagactctcctgtgcagcctctggattcacctttagcaactatgccatgggctgggtccgccaggctccagggaaggggctggagtgggtctcagatattattagtggtggtagaacatattacgcagactccgttaagggccggttcaccgtctccagagacaattccaaggacacgctgtatctgcaaatgaacagcctgagagccgaggacacggccttatattattgtgcgaaaagtcgcggcgccagggtgggtgcttttgatatctggggccaagggacaatggtcaccgtctcatcag

SEQ ID NO: 1607 - DNA, 388 bp, Homo sapiens
  source 1..388: mol_type = other DNA
caggtgcagctgcaggagtcgggcccaggactggtgaagccttcggagaccctgtccctcacctgcactgtctctggtgtctccatcagtaattactactggagctggatccggcagcccgccgggaagggactagaatggattgggcgtatctataccagtgtgggcaccaactacaacccctccctcaagagtcgagtcaccatgtcagtagacacgtccaagaaccagttctccctgaggctgagctctgtgaccgccgcggacacggccgtgtattactgtgcgagagcggcccctccttattactatgatagtagtggttattattcaacttccgactggttcgacccctggggccagggaaccctggtcaccgtctcctcag

SEQ ID NO: 1608 - DNA, 355 bp, Homo sapiens
  source 1..355: mol_type = other DNA
caggtccggctggtgcagtctggggctgaggtgaagaagcctgggtcctcactgagggtctcctgcaaggcttctggaggcaccttcagcaattttgctttcacctgggtgcgacaggcccctggacaagggcttgagtggatgggagggatcatcgctgtctttggtacagcaaagtacgcacagaaattccagggcagagtcacgatgaccgcggacacatccacggggacagcctacatggagctgagcagcctgaaatctgaggacacggccgtgtattactgtgcgtgccgcgataattatggttacgttctctattggggccaggggaccccggtcaccgtctcctcag

SEQ ID NO: 1609 - DNA, 358 bp, Homo sapiens
  source 1..358: mol_type = other DNA
gaggtgcagctggtggagtctgggggaggcctggtcaagcctggggggtccctgagactctcctgtgcagcctctggattcaccttcagtagctatagcatgaactgggtccgccaggctccagggaaggggctggagtgggtctcatccattagtagtagtagtagttacatatactacgcagactcagtgaagggccgattcaccatctccagagacaacgccaagaactcactgtatctgcaaatgaacagcctgagagccgaggacacggctgtgtattactgtgcgaggggcggagtggctacgatccaaactgactactggggccagggaaccctggtcaccgtctcctcag

SEQ ID NO: 1610 - DNA, 364 bp, Homo sapiens
  source 1..364: mol_type = other DNA
gaagtgcagctggtggagtctgggggaggcttggtacagcctggcaggtccctgagactctcctgtgcagcctctggattcatttttgatgattatgtcatgcactgggtccggcaagctccagggaagggcctggagtgggtctcaggtattggttggaatagtggtaacatagcctatgcggactctgtgaagggccgtttcaccatctccagagacaacgccaagaactccctgtatctgcaaatgaccgatctgagagctgaggacacggccttgtattactgtgcaagagataggcgtatagtggctacttaccactttgactcctggggccagggaaccctggtcaccgtctcctcag

SEQ ID NO: 1611 - DNA, 364 bp, Homo sapiens
  source 1..364: mol_type = other DNA
gaggtgcagttggtgcagtctggagcagaggtgaaaaagccgggggagtctctgaagatctcctgtaagggctctggatacagcttcaccagctactggatcgcctgggtgcgccaggtgcccgggaaaggcctggagtggatggggatcatttatcctggtgactctgataccaagtacagcccgtccttcgaaggccaggtcaccatttcagccgacaggtccatcaccaccgcctacctgcagtggagcagcctgaaggcctcggacaccgccacctattactgtgcgaaacggggaggagcggcagtggctggtgcttttgatgtctggggccaagggacaatggtcaccgtctcttcag

SEQ ID NO: 1612 - DNA, 391 bp, Homo sapiens
  source 1..391: mol_type = other DNA
caggttcagctggtgcagtctgcccctgagatgaagaagcctggggcctcagtgaaggtctcctgccagacttctggttacactttttcctattatggactcagttggctgcgacaggcccctggacaaggatttgaatgggtgggatggatcagcggtcacaatggtgacacaagttattcacacaaactccaggacagagtcaccctgactacagacacatccacgggcgcagcgtatatggagttgaggagtttgagaccggacgacacggccgtgtattactgtgcgcgagattgggttgggaaaatccatgggtcggggactctttactccgacaggaactactttgacatctggggccagggaaccctggtcaccgtctcctcag

SEQ ID NO: 1613 - DNA, 373 bp, Homo sapiens
  source 1..373: mol_type = other DNA
caggcgcagctgttggagtctgggggaggcttggtcaagcctggagggtccctgagactctcctgtgcagcctctggattcaccttcagcgactactacatgaactggatccgccaggctccggggagggggctggagtgggtctcatacattggcactgatggacggatatcctacagagactctgtgaagggccgattcaccatctccagggacgacgccaagaactcagtatatctgcaaatgaacggcctgagaggcgaggacacggccgtttacttctgtgcgagagcccccccctcacaatatagaggtggctggacgaaccgcttggaccactggggcctgggaaccctggtcaccgtctcctcag

SEQ ID NO: 1614 - DNA, 373 bp, Homo sapiens
  source 1..373: mol_type = other DNA
caggtccagctggtgcagtctggggctgaggtgaagaagcctgggtcctcagtgaaggtctcctgcaaggcctctggaggcaccctcaacacctttgctctcagctgggtgcgactggcccctggacaagggcttgagtggatgggagggatcaaccctatgttcggtacatcaacctacgcacagaagttccagggcagagccaccattaccgcggacaaatccacgagcacaggctacatggagctgagtggcctgaaatctgaggacacggccgtatattactgtgtgagagggggggattctccagtggctacgatcgcctactactttgactactggggccagggaaccctggtcaccgtctcctcag

SEQ ID NO: 1615 - DNA, 364 bp, Homo sapiens
  source 1..364: mol_type = other DNA
caggtccagctggtgcagtctggggctgaggtgaagaagcctgggtcctcagtgaaggtctcctgcaaggcttctggaggcaccttcagcacctatgctatcacctgggtgcgacaggcccctggacaagggcttgagtggatgggacagatcatgcccatctttggtacaccaaaatacgcacagaaattccagggcagagtcacgattaccgcggacaaatccacgagcacagcctacatggagctgaacagcctgagaaatgaggacacggccgtgtactattgtgcgcgagatcgggatgactacggtggctccgatttggtttactggggccagggaaccctggtcaccgtctcctcag

SEQ ID NO: 1616 - DNA, 358 bp, Homo sapiens
  source 1..358: mol_type = other DNA
gaagtacaactagtggagtctgggggaggcgtggtccagcctggggggtccctgagactctcctgtggagcctctggattcacctttgggaagtctcggatgagttgggtccgccaggctccagggaaggggccggaatgggtggccaatataaaggaagatggaagcgagacatactatctggactctgtgaagggccgattcaccatctccagagacaacgccgacaactcactgtatctgcaaatgaacagcctgagagccgaggacacggctgtctattactgcgcgagaggtgtttcgtcggtggttgctaatgactattggggccaggggaccctggtctccgtctcctcag

SEQ ID NO: 1617 - DNA, 361 bp, Homo sapiens
  source 1..361: mol_type = other DNA
caggtccagctggtgcagtctggggctgaggtgaagaagcctgggtcctcggtgaaggtctcctgcaaggcctctggaggccccttcagcagctttgctttcagctgggtgcgacaggcccctggacaaggacttgagtggctgggaggaatcatcggtatgtttggaacaacaaactacgcacagaagttccagggcagagtcacgattactacggacgaattcgcgagcacagcctacatggagttgagcagcctgagatctgaggacacggccgtatattattgtgcgcgagggagaggttattacgaaaacgaatttgactactggggccagggaaccctggtcaccgtctcctcag

SEQ ID NO: 1618 - DNA, 378 bp, Homo sapiens
  source 1..378: mol_type = other DNA
caggtgcagctgcaggagtcgggcccaggactggtgaagccttcacagaccctgtccctcacctgcactgtctctggtggctccatcagcagtggtagttactactggagctggatccggcagcccgccgggaagggactggagtggattgggcgtatctataccagtgggagcaccaactacaacccctccctcaagagtcgagtcaccatatcagtagacacgtccaagaaccagttctccctgaagctgagctctgtgaccgccgcagacacggccgtgtattactgtgcgagtacggtgtatgctataagggattactactactactacggtatggacgtctggggccaagggaccacggtcaccgtctcctca

SEQ ID NO: 1619 - DNA, 391 bp, Homo sapiens
  source 1..391: mol_type = other DNA
ggtgcagctggtgcagtctggggctgaggtgaggaagcctggggcctcagtgaaggtctcctgcaagccatctggatacaacttcaccaactaccttatacactgggtgcgacaggcccctggacaagggcttgagtggatgggaataatcaacccaagtggtggtagcacaacgtacgcacagaagttccagggcagagtcaccatgaccacggacatgtccacgaacacagtctacatggagctgagcagcttgagatctgaggacacggccttgtatttctgtgcgagagaccccccaccgtataaatgtgataggagtggttcttccttgcaatactgctacggtatggacgtctggggccaagggaccacggtcaccgtctcctca

SEQ ID NO: 1620 - DNA, 361 bp, Homo sapiens
  source 1..361: mol_type = other DNA
gaggtgcagctggtggagtctgggggaggcttggtacagcctggagggtccctgagactctcctgtgcagcctctggattcaccttcagtagttatgaaatgaactgggtccgccagggtccagggaaggggctggagtgggtttcacacattagtagtagtggtagtaccacatactacgcagactctgtgaagggccgattcaccatctccagagacaacgccaagaactcactgtatctgcaaatgaacagcctgagagccgaggacacggctgtttattactgtgcgagagacggtgggatagtagtggcatcacttgactactggggccagggaaccctggtcaccgtctcctcag

SEQ ID NO: 1621 - DNA, 373 bp, Homo sapiens
  source 1..373: mol_type = other DNA
gaggtgcagctgttggagtctgggggaggcttggtacagcctggggggtccctgagactctcctgtgcagcctctggattcacctttagcaactatgccatgaattgggtccgccaggctccagggaaggggctggagtgggtctcaactgttagtagtagtggtggtagcacatattacgcagactccgtgaagggccggttcaccatctccagagacagttccaagagcacattgtatctgcaaatgaaaagcctgagagccgaggacacggccgtatattactgtgcgagggatagtcgtccttactatcccccctccggggggacctttgactcctggggccagggaaccctggtcaccgtctcctcag

SEQ ID NO: 1622 - DNA, 372 bp, Homo sapiens
  source 1..372: mol_type = other DNA
caggtgcaactggtggagtctgggggaggcgtggtccagcttgggaggtccctgagactctcctgtgtagcctctggattcagcttcagcagctatggcatacactgggtccgccaggctccaggcaaggggctggagtgggtggcagttatatggtatgatggaagtaataaaaagaatgcagactccgtgaagggccgattcatcatctccagagacaattccaggaacacggtgtatctgcaaatgaacagcctgacacctgacgacacggctatctattactgtgcgaaaacgaactggatcgatggggggtcgccgttctacggtctggacgtctggggccaagggaccacggtcaccgtctcctca

SEQ ID NO: 1623 - DNA, 364 bp, Homo sapiens
  source 1..364: mol_type = other DNA
caggtgcagctggtgcagtctggggctgaagtgaggaagcctggggcctcagtgaacgtctcctgcaagacttctggatacaccttcaccacctactatatccattgggtgcgacaggtccctggacaagggcttgagtggatgggtcggatcttcccttccagtggtgccactgactacgcagacaagtttcgaggcaggattaccgtgaccagcgacatgtccaccagaacaggctatctggaagtgaccggactgaatgctgacgactcggccatttattactgcgcgagagtcccttttgttcggggacctatagaccttgactactgggggcagggaaccctagtcaccgtctcttcag

SEQ ID NO: 1624 - DNA, 370 bp, Homo sapiens
  source 1..370: mol_type = other DNA
gaggtgcaactggtggagtctgggggaggcttggtacagcctggggggtccctgagactctcctgtgtagcctctggattcaccttcagtaactttggcatgcactgggtccgccaggctccagggaagggactggagtgggtttcatacattagtactagtagtcttagcacatactacgcagactctgtgaagggccgcttcatcatctccagagacaatgccaagaactcactgtatctacaaatgaacaggctgagagccgaggacacggctgtctattactgtgcgagagaaggaggcgtagtgggacctaccctcgggcgtattgactactggggccggggaaccctggtcaccgtctcctcag

SEQ ID NO: 1625 - DNA, 373 bp, Homo sapiens
  source 1..373: mol_type = other DNA
gaggtgcagctggtggagtccgggggaggcgtagctcagcctggggggtccctgagactctcctgtgcagcctctggattcaccttcagtagctactggatgcactgggtccgccaagctccagggaaggggctggtgtgggtctcacgtattaatggtgatgggagtagcacaagctatgcggactccgtgaagggccgattcaccatctccagagacaacgccaagaacacgctgtatatgcaaatgaaaagtctgagagccgaggacacggctgtgtattactgtgcaagagatatgggagatggcaccatacccacatactggtacttcgatctctggggccgtggcaccctggtcactgtctcctcag

SEQ ID NO: 1626 - DNA, 361 bp, Homo sapiens
  source 1..361: mol_type = other DNA
caggtccagctggtgcagtctggggctgaggtgaagaagcctgggtcctcagtgaaggtctcctgcagggcttctggaggcaacttcctcagctatggtatcaactgggtgcgacaggcccctggacaagggcttgagtggatgggagggatcatccccatctttcgtagaccaaactccgcacagaagttccaaggcagagtcacgattaccgcggacgaatccacgagcacagcctatgtggagctgagcagcctgagatctgacgacacggccgtgtattactgtgcgagccttgatgatagtagtggttacccggtatggtactggggccagggaaccctggtcaccgtctcctcag

SEQ ID NO: 1627 - DNA, 370 bp, Homo sapiens
  source 1..370: mol_type = other DNA
caggtccagctggtgcagtctggggctgaggtgaagaagcctgggtcctcggtgaaggtctcctgcaaggcttttggaagcaccttcaaaagtaattctttcagttgggtgcgtcaggcccctggacaaggccttgagtggatgggagggatcatcgctatctttcgaacagcaaagtacgcagagaagttccagggcagagtcacaatcaccacggacgaattcacgaccactgcctacatggagatgaccagcctgagatctgaggacacggccgtgtattattgtgtgagaggggatggctatcacctcctccaatctaatccggccctctcctggggccagggaacccaggtcatcgtctcctcag

SEQ ID NO: 1628 - DNA, 370 bp, Homo sapiens
  source 1..370: mol_type = other DNA
gaggtgcagctggtggagtctgggggaggcttggtacagcctggggggtccctgagactctcctgtgcagcctctggattcaccttcagtaactttggcatgaactgggtccgccaggctccagggaaggggctggagtgggtttcatacattagtagtagtagtcttagcacatactacgtagactctgtgaagggccgattcaccatctccagagacaatgccaagaattcactgtatctacaaatgaacagcctgagagtcgaggacacggctgtctattactgtgcgagagtaggaggcgcagtgggacctaccctcgggcgtaatgactactggggccagggaaccctggtcaccgtctcctcag

SEQ ID NO: 1629 - DNA, 364 bp, Homo sapiens
  source 1..364: mol_type = other DNA
caggtgcagctggtggagtctgggggaggcgtggtccagcctgggaggtccctgagactgtcctgcgcagcgtctggattcaccttcagaacgtacggcatgcactgggtccgccaggctccaggcaaggggctggagtgggtgacagtcatacggtatgatggaactaatgaaaagtatgcagactccgtgaggggccgattcaccatctccagagacaattccaagaacaccctgtatctacaaatgaacaacctgagagccgaggacacggctgtgtattactgtgcgagacagggaggtgtagtgggagctacacctctggactactggggccagggaaccctggtcaccgtctcctcag

SEQ ID NO: 1630 - DNA, 364 bp, Homo sapiens
  source 1..364: mol_type = other DNA
caggtccagctggtgcagtctggggttgaggtgaagaagcctgggtcctcagtgaaggtctcctgcaaggcttctggaggcaccttcagcaactatgctatcagctgggtgcgacaggcccctggacaagggcttgagtggatgggaggaatcctccctatctttggtacagcaaactacgcacagaagttccggggcagagtcacgattactatggaccaatccacgagcacagcctacatggcgctgagcagcctgagatctgaggacacggccgtgtattactgtgcgagccaagattactatgatagaagtccttattttaactactggggccagggaaccctggtcaccgtctcctcag

SEQ ID NO: 1631 - DNA, 368 bp, Homo sapiens
  source 1..368: mol_type = other DNA
gaggtgcagctggtggagtctgggggaggcttggtccagcctggagggtccctgagactctcctgtgcagtctctggattcagcttcagtggccactacatggagtgggtccgccaggctccagggaaggggctggagtgggttggcgctactagaaacaaagctaacaactacaccacagaattcgccgcgtctgtgaaaggcagattcagcatctcaacagatgagtccaagaactcagtgtatctgcaaatgaacagcctgaaaaccgaggacacggccgtatattactgtgctagagatgttaactggggatccgactggtacttcgatctctggggccgtggcaccctggtcactgtctcctc

SEQ ID NO: 1632 - DNA, 364 bp, Homo sapiens
  source 1..364: mol_type = other DNA
cagctgcagctgcaggagtcgggcccaggactggtgaagccttcggagaccctgtccctcacctgcactgtctctggtggctccatcagcagtagtagttactactggggctggatccgccagcccccagggaaggggctggagtggattgggagtatctattatagtgggagcacctactacaacccgtccctcaagagtcgagtcaccatatcagtagacacgtccaagaaccagttctccctgaagctgagctctgtgaccgccgcggacacggccgtgtattactgtgcgaggaccgatagcagcagcttgaactggttcgacccctggggccagggaaccctggtcaccgtctcctcag

SEQ ID NO: 1633 - DNA, 367 bp, Homo sapiens
  source 1..367: mol_type = other DNA
caggtccagctggtgcagtctggggctgaggtgaagaagcctgggtcctcagtgaaggtctcctgcaaggcttctggaggcaccttcagcagctatgctatcagctgggtgcgacaggcccctggacaagggcttgagtgggtgggagggatcatccctatctttaaaacagcaagttacgcacagaaattgcagggcagagtcacgatcaccagggacgaatccacgagcacagcctacatggagctaagtagcctgacatctgaggacacggccgtgtattactgtgcgaaacaaggtgtgggaactatcaactacgtatactttgactactggggccagggaaccctggtcaccgtctcctcag

SEQ ID NO: 1634 - DNA, 355 bp, Homo sapiens
  source 1..355: mol_type = other DNA
caggtgcagatccagcagtggggcacaggactgttgaagccttcggagaccctgtccctcacctgcggtgcccatggtggggccttcaatgattacttttggacctgggtccgccacgtcccagggaacgggccggagtggattggcgaaatccatcatagtggaaacaccaattacaacccgtccctcaacggtcgagtcaccttaacattggacatggccaagcaccagttttctctgatcctgacctctgtcacggccgcggacacgggtatctattactgtgtgaaacatgtcgcgggaaatcaggcttttgatctctggggcccagggacactggtcaccgtctcttcag

SEQ ID NO: 1635 - DNA, 363 bp, Homo sapiens
  source 1..363: mol_type = other DNA
gaggtgcagctggtggagtctgggggaggcttggtacagcctggggggtccctgagactctcctgttcagcctctggattcaccttcagtagttatagcatgaactgggtccgccaggctccagggaaggggctggagtggctttcatacattagtagtagtagtggtagcaaatactacgcagactctgtgaagggccgattcaccatctccagagacaatgccaagaacttagtgtatctgcaaatgagcagcctgagagccgacgacgcggctatgtattactgtgcgagatctgactacgcagtgttctactacggcatggacgtctggggccaagggaccacggtcaccgtctcctca

SEQ ID NO: 1636 - DNA, 373 bp, Homo sapiens
  source 1..373: mol_type = other DNA
gaggtgcagctgttggagtcggggggaggcttggtacagcctgggggatccctgagactctcctgtgcagcctctggattcaccttcagtaactatgccatgacctgggtccgccaggctccagggaaggggctggagtgggtctcagcagttagtggtagtggtggtagcacatactacgcagactccgtgaagggccggttcaccatatccagagacaattccaagaacacgctgtatctacaaatgaacagcctgagagccgaggacacggccgtatattactgtgcgtcccccggaagtttgagggagttatcgttatacggtcggatcgcctactggggccagggaaccctcgtcaccgtctcctcag

SEQ ID NO: 1637 - DNA, 367 bp, Homo sapiens
  source 1..367: mol_type = other DNA
gaggtgcagctggtggagtctgggggaggcttggtccagcctggagggtccctgagactctcctgtgcagtttctggattcagcatcagtggccactacatggagtgggtccgccaggctccagggaaggggctggagtgggttggcgctactagaaacaaacgtaacaattacaccacagagtacgccgcgtctgtgaaaggcagattcagcatttcaagagatgaatcgaagaactcagtgtatctgcaaatgaacagcctgaaaaccgaggacacggccgtatattactgtgctagagatgttaactggggatccgactggtgcttcgatctctggggccgtggcaccctggtcactgtctcct

SEQ ID NO: 1638 - DNA, 367 bp, Homo sapiens
  source 1..367: mol_type = other DNA
caggtcctcctggtacagtctggggctgaggtgaagaagcctggggcctcagtgagggtctcctgcaaggtttccggacacaccctccgtgaattatgcatacactgggtgcgacaggctcatggaaaagggcttgagtggatgggaggtcttgatcctgaagatggtgaaagaacctatgaacagaagttccagggcagaatcaccatgaccgaggacacatctacagacacagtgtacatggagctgagcagcctgagatctgaggacacggccatgtattattgcgctacaggaaagtactgtagtcttaccacctgtgtttttgactattggggccagggaatcctggtcagcgtctcctcag

SEQ ID NO: 1639 - DNA, 358 bp, Homo sapiens
  source 1..358: mol_type = other DNA
gaagtgcagctggtggagtctgggggaggcttggtacagcctggcaggtccctgagactctcctgtgcagcctctggattcacctttgatgattatgccatgcagtgggcccggcaagctccagggaagggcctggagtggatctcaggtattagttggaatagtggtagtataggctatgcggactctgtgaagggccgattcaccatctccagagacaacgccaagagttccctgtttctgcaaatgaacagtctgagacctgaggacacggccttctattactgtgcaaaagcccatggttcggggagttattcccttaggtggggccagggaattttggtcaccgtctcctcag

SEQ ID NO: 1640 - DNA, 382 bp, Homo sapiens
  source 1..382: mol_type = other DNA
caggtgcagctggtggagtctggggggggcgtggtccagcctgggaggtccctgagactctcctgtgtagcctctggattcaccttcagtaactatggcatgcactgggtccgccaggctccaggcaaggggctggagtgggtggcaattatatggtatgatggaagtcataaagactatggagactccgtgaagggccgattcaccatctccagagacaattccaagaacacgctgtatctgcaaatgaacagtctgagagctgaagacacggctatgtattactgtgtgaaagggccggatgatttcgacattgagaaaggttactcaattaattggttcgacccctggggccagggaaccctggtcaccgtctcctcag

SEQ ID NO: 1641 - DNA, 361 bp, Homo sapiens
  source 1..361: mol_type = other DNA
gaggtccagctggtacagtctgggcctgaggtgaagaagcctggggctacagtgcaaatctcctgcaatgtttctggatacacattcaccgactacttcatgcactgggtgcgacaggcccctgggaaagggcttgagtggatgggacgtattgatcctgaagatggtgagacaaactacgcagagaagttccagggcagagtcaccataagcgcggacaggtctacagacacaacctacatggagctgagcagcctgacatctgacgacacggccatctattactgtgtaacagagggctatagcagtgccccccatgctcttgatgtctggggccaaggaacaagggtcagcgtctctt

SEQ ID NO: 1642 - DNA, 364 bp, Homo sapiens
  source 1..364: mol_type = other DNA
caggtccagctggtgcagtctggggctgaggtgaagaagcctgggtcctcagtgaaggtctcctgcaaggcttctggaggcaccttcagcaactatgctattagctgggtgcgacaggcccctggacaagggcttgagtggatgggagggatcatccctatctttggaacaccaaactacgcacagaaattccagggcagagtgacgatgaccacggccgactccacgagcacagcctacatggagctgagcagcctgagatctgaggacacggccatttattactgtgcgagccaggattactatgatcgtagtccttattttaacttctggggccagggaaccctggtcaccgtctcgtcag

SEQ ID NO: 1643 - DNA, 373 bp, Homo sapiens
  source 1..373: mol_type = other DNA
caggtccagctggtgcagtctggggctgaggtgaagaagcctgggtcctcagtgaaggtctcctgcaaggcctctggaggcaccctcaacacctttggtctcagctgggtgcgacaggcccctcgacaagggcttgagtggatgggggggatcaaccctatgtttgggacagcaacctacgcacagaagttccagggcagagtcaccattaccgcggacaaatcaacgagcacaggcgacatggagctgaggagcctgagatctgaggacacggccgtgtattactgtgtgagagggggggactctccagtggctacgatcgcctactactttgaccactggggccagggaaccctggtcaccgtctcctcag

SEQ ID NO: 1644 - DNA, 367 bp, Homo sapiens
  source 1..367: mol_type = other DNA
gacgtgcaggtgttggagtctgggggaggcctggtacagcctggggggtccctgagactctcttgtgcagcctctggattcaccttcaccagaaatgccatgagttgggtccgccaggctccagggaaggggctggagtgggtctcaagtattagtggtagcggtgacaccaaatactacgcagactccgtgaagggccggctcaccatctccagagacaagtccaagaacatggtgtatctacaaatgaacagcctgagagtcgacgacgcggccgtatattactgtgccatctccaccggggtggttgcggtttgggagtacttccaggagtggggccagggcaccctggtcaccgtctcctcag

SEQ ID NO: 1645 - DNA, 367 bp, Homo sapiens
  source 1..367: mol_type = other DNA
caggtccagctggtacagtctggggctgaggtgaagaagcctggggcctcagtgaaggtctcctgcaaggtttccggatccaccctcactgaattagccattcactgggtgcgacaggctcctggaaaagggcttgagtggatgggaggttttgatcctgaggatagggaaacactctacgcacagaggttccagggcagagtcaccatgaccgaggacccatctacagacacagcctacatggaactgagcgccctgatatctgaggacacggccgtgtatttctgtgcaacacatcccctaaactgggaggggactcactactttgactactggggccagggaaccctggtcaccgtctcctcag

SEQ ID NO: 1646 - DNA, 367 bp, Homo sapiens
  source 1..367: mol_type = other DNA
caggtccagctggtacagtctggggctgaggtgaagaagcctggggcctcattgagggtctcctgcaaggtttccggatacaccctcattggattatccatccactgggtgcgacaggctcctggaaaagggcttgagtggatgggaggttttgatcctgaagatcgtgaaacaatctacgcacagaagttccagggcagagtcaccatgaccgaggacacatccacagacacagcctacatggagctgagcagcctgagatctgaggacacggccgtgtattactgttcaacacatcccctaaactgggaggggactttctactttgactactggggccagggaaccctggtcaccgtctcctcag

SEQ ID NO: 1647 - DNA, 367 bp, Homo sapiens
  source 1..367: mol_type = other DNA
gaggtgcaactattggagtctgggggaggcttggtacagcctggggggtccctgagactctcctgtgcagtctcgggatttatctttaccaactatggcatgagctgggtccgccaggctccagggaaggggctggagtgggtctcatttattagtggaagtggtttcagtacatactacgcagactccgtgaagggccggttcaccatctccagagacaattccaagaacacgctgtatatgcagatgaacagtctgcgagccgaggacacggccatatattattgtgcaaaaggtcaatctacggtgccgtctacggggtggttcgacccctggggccagggaaccctcgtcaccgtctcctcag

SEQ ID NO: 1648 - DNA, 364 bp, Homo sapiens
  source 1..364: mol_type = other DNA
caggtccaattggtgcagtctggggctgaggtgaagaagcctgggtcctcggtgaaggtctcctgcaaggcctctggaggccccttcattagttatgctatcacctgggtgcgacaggcccctggacaagggcttgagtggatgggagggatcatccctgtctttggtacagcaaactacgcacacaacttccagggcagagtcacgattagcacggacgaatccacgagcacagcctacatggagctgaggagcctgaggtctgaggacacggccgtgtatttctgtgcgaaaagataccatcgttacggtgactacgcctttgactcctggggccagggaaccctggtcaccgtctcctcag

SEQ ID NO: 1649 - DNA, 370 bp, Homo sapiens
  source 1..370: mol_type = other DNA
gaggtgcagttgctggagtctgggggaggcttggttcagcctggggggtccctgagactctcctgtgcagcctctggattcgcctttcccatctatgccatgagctgggtccgccaggctccagggaagggactcgagtgggtctcagctattcgtggtagtggtactgagacattctatacagactccgtgaaggggcgcttcaccatctccagagacaactccaagaacaccctgtatctccaaatgaacagcctgagagccgaggacacggccctatattactgtgcgaaatgcgccgggggtggtgacccgaaggcgggaacttttgatatgtggggccaagggacaatggtcaccgtctcttcag

SEQ ID NO: 1650 - DNA, 358 bp, Homo sapiens
  source 1..358: mol_type = other DNA
caggtccagctggtgcagtctggggctgaggtgaagaagcctgggtcctcagtgaaggtctcctgcaaggcttctggaggcaccttcagcaactatggtatcagctgggtgcgacaggcccctggacaagggcttgagtggatgggaggggtcatccctatatttggaacagtaaactacgcacagaagttccagggcagagtcacgattaccgcggacaaatccacgagtacagcctacatggaactgagaagcctgagatctgaggacacggccgtgtattattgtgcctcgtgggggtacttggatataattggtcataattggggccagggaaccctggtcaccgtctcctcag

SEQ ID NO: 1651 - DNA, 355 bp, Homo sapiens
  source 1..355: mol_type = other DNA
gaggtgcagctgttggagtctgggggaggcttggtacagcctggggggtccctgagactctcctgtgcagcctctggattcacctttagcagctatgccatgagctgggtccgccaggctccagggaaggggctggagtgggtctcagctattagtggtagtggtggtagcacatactacgcagactccgtgaagggccggttcaccatctccagagacaattccaagaacacgctgtatctgcaaatgaacagcctgagagccgaggacacggccgtatattactgtgcgaaagttatggttcggggagttattacctactggggccagggaaccctggtcaccgtctcctcag

SEQ ID NO: 1652 - DNA, 367 bp, Homo sapiens
  source 1..367: mol_type = other DNA
caggtccagctggtgcagtctggggctgaggtgaagaagcctgggtcctcagtgaaggtctcctgcaaggcttctggaggcaccttcagcagtaatgctttcagctgggtgcgacaggccccaggacaagggcttgagtggatgggcgggatcatccctatgatggatacagcaaactacatacggaagttccagggcagagtcacgattaccgcggacaagttcacgagcacagcctacatggaggtgagcagcctgagatctgacgacacggccatttattactgtgcgagacacagtggatacactttcacccgctacagtatggacgtctgggggcaagggaccacggtcaccgtctcctcag

SEQ ID NO: 1653 - DNA, 370 bp, Homo sapiens
  source 1..370: mol_type = other DNA
gaggtgcagctggtggagtctgggggaggcttggtacagcctggggggtccctgagactgtcctgtgtagcctctggattcacttttagtacatatagcatgaactgggtccgccaggctccagggaaggggctggagtgggtttcatacattagtggtagtagtcttagtacatactatgcagactctgcgaagggccgattcaccatctccagagacaatgccaagaattcactgtatctgcaaatgaatagcctgagagccgaggacacggctgtgtattactgtgcgagagtaggaggcgtactgggagctaccctcgggcgtaatgactactggggccagggaaccctggtcaccgtctcctcag

SEQ ID NO: 1654 - DNA, 362 bp, Homo sapiens
  source 1..362: mol_type = other DNA
caggtccagctggtgcagtctggggctgaggtgaagaagcctgggtcctcagtgaaggtctcctgtaaggcttctgggggcatcttcaacagctatgctatcagctgggtgcgacaggcccctggacaagggcttgagtggatgggagggatcatcgctatctttggtacaacatcctacgcacagaagttccagggcagagtcacgattacggcggacaaatccacgaccacagtctacatggagctgaacagcctgatatctgaggacacggccgtgtattactgtgcgaggggagctggctatcatttatcgtcccagactgactactggggccagggaaccctggtcaccgtctcctc

SEQ ID NO: 1655 - DNA, 376 bp, Homo sapiens
  source 1..376: mol_type = other DNA
caggtgcaactggtggaatctgggggaggcgtggtccagcctgggaggtccctgagactctcctgtgcagcctctggattcaccttcagtagctatgctatgcactgggtccgccaggctccaggcaaggggctagagtgggtggcgatcatatcatatgatggaaataatcaatactacgcagactccgtgaggggccgattcaccatctccagagacaattccaagaacacgctgtatctacaaatgagcagcctgagacctgaggacacggctgtgttttactgtgcgagagagggtccttcctggggagtggctacgattaaagacgctcttgactactggggccagggaaccctggtcaccgtctcctcag

SEQ ID NO: 1656 - DNA, 373 bp, Homo sapiens
  source 1..373: mol_type = other DNA
caggtccagctggtgcagtctgggcctgaggtgaagaagcctgggtcctccgtgaaggtctcctgcaaggcttctggaggcaccttcagcaactatggtgtcagctgggtgcgacaggcccctggacaagggcttgagtggatgggagggatcatccctatctttggtacagcaaagtacgcacagaagttccagggcagagtcacgattaacacggacgaatccgcgagcacagcctacatgacgctgagcagcctgagatctgaggacacggccgtctatttctgtgcgagaacggggaactttgattgggggagttattataacgtctttgacaactggggccagggaagcctggtgaccgtctcctcag

SEQ ID NO: 1657 - DNA, 393 bp, Homo sapiens
  source 1..393: mol_type = other DNA
caggtgcagctacagcagtggggcgcaggactgtggaagccttcggagaccctgtccctcacctgcgctgtgtatggtggatcactcagtggctacttctggagctggctccgccaatccccagggaaggggctggagtggattggggaaatcaatcataatggacgcactaactacaacccgtccctcacgagtcgagtcactatatcagtagacaggtccaagaaccagttctccctgagggtgagctctgtgaccgccgcggacacggctgtctattactgtgcgagacttccccggcccaaactattactatggttcgggggatcaaacacctccttcgactacgacacggacgtctggggccaagggaccacgatcaccgtctcctca

SEQ ID NO: 1658 - DNA, 368 bp, Homo sapiens
  source 1..368: mol_type = other DNA
caggtccagctggtgcagtctggggctgaggtgaagaagcctgggtcctcggtgaaggtctcctgcaaggcttctggaagcaccttcaaaagtaattctttcagttgggtgcgacaggcccctggacaaggccttgagtggctgggagggatcatcgctatctttcgaacagcaaagtacgcagagaggttccagggcagagtcacaatcaccacggacgagttcacgaccacagcctacatggagatgaccagcctgacatctgaggacacggccgtgtattattgtgtgagaggggatggctatcacgtcctccaatctaatccggccctctcctggggccagggaacccaggtcatcgtctcctc

SEQ ID NO: 1659 - DNA, 367 bp, Homo sapiens
  source 1..367: mol_type = other DNA
gaggtgcagctggtggagtctgggggaggcttggtacagcctggagggtccctgagactctcctgtgcagcctctggattcaccttcagtagttatgaaatgaactgggtccgccaggctccagggaaggggctggagtgggtttcatacattagtagtagtggtagtaccatatactacgcagactctgtgaagggccgattcaccatctccagagacaacgcccagaactctctgtatctgcaaatgaacagcctgagagccgaggacacggctgtttattactgtgcgagagttgggtgggtggccgcccgtcgggccccgattgactactggggccagggaaccctggtcaccgtctcctcag

SEQ ID NO: 1660 - DNA, 376 bp, Homo sapiens
  source 1..376: mol_type = other DNA
gaggtccaactcgtacagtctggggcagaggtgaggaagcctggggctacagtgagaatttcctgcaaggtttctggattcaccctcagcgactcctacatgcactgggtgcaaaaggcccctggaaaagggcttgagtggatgggacttattgatcctgaagttgatgagacacaatatacagagaagttccagggcagactcaccataagcgcggacacgtctagagacacagtctacatggacctgagcgacctgagatctgaggacacggccgtgtattactgcgttaaggagggatccgatatttcgactcattatcacccacaaatacttcactattggggccagggaaccctaatcaccgtctcgtcag

SEQ ID NO: 1661 - DNA, 364 bp, Homo sapiens
  source 1..364: mol_type = other DNA
caggtccagctggtgcagtctggggctgaggtgaagaagcctgggtcctcagtgaaggtctcctgcaaggcttctggaggccgcttcaacagcaatgctatcagctgggtgcgacaggcccctggacaagggcttgagtggatgggagggatcatccccatctttagaacaacaaagtacgcacagaagttccagggcagagtcacgattaccacggacgaattcgcgagcacagcctacatggagctgagcagtctgagatctgaggacacggccgtgtattactgtgcgagagggtcccattactacgttgggggctggttcgacccctggggccagggaaccctggtcaccgtctcctcag

SEQ ID NO: 1662 - DNA, 364 bp, Homo sapiens
  source 1..364: mol_type = other DNA
caggtccagctggtgcagtctggggctgaggtgaagaagcctgggtcctcagtgaaagtctcctgcaaggcttctggaggcaccttcagcagccaaggtatcacctgggtgcgacaggcccctggacaagggcttgagtggatgggacagatcatgcccatctttggtactccaaaatacgcacagaggttccagggcagagtcacgattaccgcggacaaatccacgagcacggcctacatggaattgaagagcctgagaactgacgacacggccgtctattattgtgcgagagatcgggatgactacggtggcgccgatttgctttactggggccagggaaccctggtcaccgtctcctcag

SEQ ID NO: 1663 - DNA, 354 bp, Homo sapiens
  source 1..354: mol_type = other DNA
gaggtgcagttggtgcagtctggagcagaggtgaaaaagccgggggagtctctgaagatctcctgtaagggttctggatacagctttaccagctactggatcgcctgggtgcgccagaagcccgggaaaggcctggagtggatggggatcatctaccctggtgactctgacaccagatacagcccgtccttccaaggccaggccaccatgtcagccgacaagtccatcagcaccgcctacctgcagtggagcaccctgaaggcctcggacaccgccatgtattactgtgcgagacgggagactgaacgcggtctggacgtctggggccaagggaccaccgtcaccgtctcctca

SEQ ID NO: 1664 - DNA, 370 bp, Homo sapiens
  source 1..370: mol_type = other DNA
caggtccagctggtgcagtctggggctgaggtgaagaagccagggtcctcagtgaaggtctcctgcaaggcctctggaggcaccttcagcagctatgccatcagctgggtgcgacaggcccctggacaagggcttgagtggatgggagggatcaccggaatgtttggaacagcaacctacgcacagaagtttcagggcagagtcacgattaccgcgcacgaattaacgagcacagcctacatggagctgagcagcctgagatctgaggacacggccgtgtattattgtgcgagaggggggggctacaacctacaatttggggaaggactttataactggggccagggaaccctggtcaccgtctcctcag

SEQ ID NO: 1665 - DNA, 357 bp, Homo sapiens
  source 1..357: mol_type = other DNA
tggtggagtctgggggaggcgtggtgcggcctggggggtccctgagactctcctgtgcagcctctggattcacccttgatgattatggcatgacctgggtccgccaagctccagggaaggggctggagtgggtctctggtatcttttggaatggtggtattagaggttatgcagactctgtgaaggggcgattcaccatctccagagacaacgccgagaactccctgtatctgcaaatgaacagtctgagagccgaagacacggccttgtattactgtgcgcgaggggaatgggggagcagcagctggtacgcctttgactattggggccagggaaccctggtcaccgtctcctcag

SEQ ID NO: 1666 - DNA, 358 bp, Homo sapiens
  source 1..358: mol_type = other DNA
gaagtgcagctggttgagtctgggggaggcttgatacagcctggcaggtccctgagactctcctgtgcagcctctggattcagctttgaggattatgccatgaactgggtccgacaagctccagggaagggcctggagtgggtctcaggtattagttgggatagtggtgccataggctatgcggactctgtgaagggccgattcaccatctccagagacaacgccaagaagtccctgtatctgcaaatgagaagtctgagggtcgaggacacggccttctattactgtgcaaaagctaatggtgcggggagttattctgtttcttggggccagggaaccctggtcaccgtctcctcag

SEQ ID NO: 1667 - DNA, 373 bp, Homo sapiens
  source 1..373: mol_type = other DNA
gaggtgcagctggtggagtctgggggaggcttggtaaagcctggggggtcccttagactctcctgtgcagcctctggattcactttcagtaacacctggatgagctgggtccgccaggctccagggaaggggctggagtgggttggccatattagaagcaaagctgatggtgggaaaacagacttcgctgcacccctgaaaggcagattcatcatctctagagatgattcaaaagacacgctgtatctgcagatcaacagcctgaaaaccgaggacacagccgtctattattgttgcacagagggaagtcgtggtttctatttcccgggaattgactactggggccagggaaccctggtcaccgtctcctcag

SEQ ID NO: 1668 - DNA, 370 bp, Homo sapiens
  source 1..370: mol_type = other DNA
caggtccaactggtgcagtctggggctgaggtgaagaagcctgggtcctctgtgaaggtctcctgcaagccttctgcaggcaccttcagcaactatgctatcaactgggtgcgacaggcccctggacaagggcttgagtggctgggagggatcagcgctatctttggcacaacaaactacgcacagaagttccagggcagactcacgatcaccgcggaccaattcccgagcacagcctacatggagctgagcagcctgaaatctgaggacacggccgtctattactgtgcgagaagtgatatgtatcatcatggttcggggagcggtattacctattggggccagggaaccctggtcaccgtctcctcag

SEQ ID NO: 1669 - DNA, 370 bp, Homo sapiens
  source 1..370: mol_type = other DNA
caggtgcagctgcaggagtcgggcccaggactggtgaagccttcggagaccctgtccctcacctgcactgtctctggtggctccatcagtagttactactggagctggatccggcagcccccagggaagggactggagtggattgggtatatctattacagtgggagcaccaactacaacccctccctcaagagtcgagtcaccatatcagtagacacgtccaagaaccagttctccctgaagctgagctctgtgaccgctgcggacacggccgtgtattactgtgcgagaggaatacttagttgggtggtagctgctactcactactttgactactggggccagggaaccctggtcaccgtctcctcag

SEQ ID NO: 1670 - DNA, 355 bp, Homo sapiens
  source 1..355: mol_type = other DNA
caggtgcagttgcaggagtcgggcccaggactggtgaagccttcggagaccctgtccctcacctgcactgtctctggtggctccatcactaattattattggaactggatccggcagcccccagggaagggactggagtggattgggtatatctattacactgggcgcaccaactacaacccctccctcaagagtcgagtctccatatcagtggacacctccaagacccagttctccctgaagctgagctctgtgaccgctgcggacacggccgtctattactgtgcgaggagcgattactatgatatacccgttgactcctggggccagggaaccctggtcaccgtctcctcag

SEQ ID NO: 1671 - DNA, 391 bp, Homo sapiens
  source 1..391: mol_type = other DNA
caggttcaactggtgcagtctggagctgagatgaagaagcctggggcctcagtgaaggtctcctgcaagacttctggttacactttttcttactatggactcagttggatacgacaggcccctggacaaggatttgaatgggtgggatggatcagcggttacaatggtgacacaacttattcacagaaactccagggcagagtcaccctgactacagacacatccacgggcgcagcgtatatggagttgaggagcctgagaccggacgacacggccgtgtattactgtgcgcgagattgggttgggaaaatccatgggtcggggagtctttactccgacagaaactactttgacacctggggccagggaaccctggtcaccgtctcctcag

SEQ ID NO: 1672 - DNA, 373 bp, Homo sapiens
  source 1..373: mol_type = other DNA
caggtgcagctgcaccagtggggcgcaggactgttgaagccttcggagaccctgtccctcagctgcgatgtcgatggtgggtccttcagtggttactactggagctggatccgccagcccccaggggaggggctggagtgggttggggaattcactcatagaggaaggaccaactacaacccgtccctcgagagtcgagtcaccatctcagtggacgcgtccaagaaccagttctccctgagactgaactctgtgaccgccgcggacaccgctatgtattactgtgcgagaggctttgggcagctatcgttggacggatacaagtactactttgactactggggccagggaaccctggtcaccgtctcctcag

SEQ ID NO: 1673 - DNA, 367 bp, Homo sapiens
  source 1..367: mol_type = other DNA
caggtgcagctacaacagtggggcgcaggactgttgaagccttcggagaccctgtccctcacgtgcactgtctctggtgggtccttcagtgattcctactggagctggatccgccagtcccctgggaaggggctggcatggcttggagaagtcagtcacagcggaagctccaagtacaacccgtccctcaagagtcgagtcaccatatccttagacacgtccaggaaccaattctccctgaagctgagctctgtgaccgcggcagacacgggtgtctatttctgtgcgcgacaacaacgattctatggtttggggactggtgcttttgatatctggggtcaagggacagtggtcaccgtctcttcag

SEQ ID NO: 1674 - DNA, 367 bp, Homo sapiens
  source 1..367: mol_type = other DNA
gaggtggaactgttggagtctgggggaggcttggtacagccgggggggtccctgagactctcctgtagagtctctggattcaccttaaccacgcacacgatgatgtgggtccgccaggctccagggaaggggctggagtgggtctcgtctattagtggaagtggtcttagtatatactacgcagactccgtgaagggccggttcaccatctccagagacaagtccaagaacacgctctatctgcagatgagcagtctgcgagtcgaggacacggccatatattattgtgcaaaaagtcaatctacgatgccgccaacggggtggttcgacccctggggccagggaaccctcgtcatcgtctcctcag

SEQ ID NO: 1675 - DNA, 358 bp, Homo sapiens
  source 1..358: mol_type = other DNA
caggtccagctggtgcagtctggggctgaggtgaagaagcctgggtcctcggtgaaggtctcctgcaaggcttctggagacaccttcagcaactatgcaatcagctgggtgcgacaggcccctggacaagggcttgagtggatgggagggatcagcccgatttttggtacagtgaaatacgcacagaacttccagggcagagtcacgatcagcaaggacgaatcctcgagcacagcctacatggagctgaacaggctgagatctgaggacacggccacatattactgtgcgattaatatgcagtggatccgcgcttttgacgactggggccagggaatggtggtcatcgtctcctcag

SEQ ID NO: 1676 - DNA, 377 bp, Homo sapiens
  source 1..377: mol_type = other DNA
ggtgcaggtggtggagtcagggggaggcttggtacagccagggcagtccctgagactctcatgtacagtgtctggatttccacttggtgattatgctgtgggctggttccgccaggctccagggaaggggctggagtgggtagggttcatgagaagcaaagcttatggtgggacaatagaatacgccgcgtctgtgaagggcagattcaccatctcaagagatgactccaaaagcgtcgcctatctggaaatgaccagcctgaaaaccgaagacacagccgtgtattattgtggtaggccgatgaaaccggagtggttattacgtcattcgaactttcactactggggccagggaaccctggtcaccgtctcctcag

SEQ ID NO: 1677 - DNA, 358 bp, Homo sapiens
  source 1..358: mol_type = other DNA
caggtgcagctggtgcagtctggggctgaggtgaagaagcctggggcctcagtgaaggtctcctgcaaggcttctggatacaccttcaccggctactatatgcactgggtgcgacaggcccctggacaagggcttgagtggatgggatggatcaaccctaacagtggtggcacaaactatgcacagaagtttcagggcagggtcaccatgaccagggacacgtccatcagcacagcctacatggagctgagcaggctgagatctgacgacacggccgtgtattactgtgcgagaggagctattgtagtagtaccagtaaactactggggccagggaaccctggtcaccgtctcctcag

SEQ ID NO: 1678 - DNA, 364 bp, Homo sapiens
  source 1..364: mol_type = other DNA
caggtgcagctggtgcagtctggggctgaggtgaagaagcctggggcctcagtgagggtctcctgcaagacttctgggtacaccttcaccggctactatatacactgggtgcgacaggcccctggacaagggcttgagtggatgggatggatcaaacctaaaaatggtgccacaaactatgcacaaaagtttcagggcagggtcaccatgaccagggacacgaccatcgccacagtctacatggatctcagcggcctgagatctgacgacacggccgtctattattgtgcgagagattatagtgcctacgacgcctactactttgactactggggccagggaaccctggtcaccgtctcctcag

SEQ ID NO: 1679 - DNA, 370 bp, Homo sapiens
  source 1..370: mol_type = other DNA
caggtccagctgctgcagtctggggctgaggtgaagaagcctgggtcctcagtgaaggtctcctgcaaggcttctggaggcaccttcagcagctatgctatcaactgggtgcgacaggcccctggacacgggcttgagtggatgggagggatcaaccctatgtttggaacagtaagttatgcacaggagttccagggcagagtcacgataaccgcggacgcatttccgagcacagcctacatggagttgagcagcctgagacctgaggacacggccgtatattattgtgcgagaagtgataggtattactatgattcggggagtggtgtaactgactggggccagggaaccctggtcaccgtctcctcag

SEQ ID NO: 1680 - DNA, 354 bp, Homo sapiens
  source 1..354: mol_type = other DNA
gaggtgcagctggtgcagtctggagcagaggtcaaaaagccgggggagtcgctgaagatctcctgtaagggttctggatacagcttttccagccactggatcgcctgggtgcgccagatgcccgggaaaggcctggagtggatggggatcatctatcctggtgactctgataccaaatacagcccgtccttccaaggccaggtcaccatctcagccgacaagtccatcagtaccgcctacctgcagtggagcagcctgaaggcctcggacaccgccatgtattactgtgcgagacgggacgcgacctatggtgtggacgtctggggccaagggaccacggtcaccgtctcctca

SEQ ID NO: 1681 - DNA, 370 bp, Homo sapiens
  source 1..370: mol_type = other DNA
caggtccagctggtgcagtctggggctgaggtgaagaagcctgggtcctcggtgaaggtctcctgcaaggcttctggaagcaccttcaaaagtaattctttcagttgggtgcgacaggcccctggacaaggccttgagtggatgggagggatcatcgctatctttcgaacagcaaagtacgcagagaagttccagggcagagtcacaatcaccacggacgaattcacgaccacagcctacatggacatgaccagcctgagatctgaggacacggccgtgtattattgtgtgagaggggatggctatcacctcctccaatctaatccggccctctcctggggccagggaacccaggtcatcgtctcctcag

SEQ ID NO: 1682 - DNA, 369 bp, Homo sapiens
  source 1..369: mol_type = other DNA
caggtcccgctggtgcagtctggggctgaggttaagaagcctgggtcgtcagtgagggtttcctgcaaggcttctggaggcaccttccagacccatgctttcagctgggtgcgacaggcccctgggcaaggcctagagtggatgggagggatcacccccatgtttcgtacaacaacatacgcacagaagttccagggcagaatcacgattacaacggacgaattcatgagcacagcctacatggacctgagtagtctgagatctgaggacacggccgtctattactgtgcgagagagaatagatataactttggttcggggagtttttgggccgtctggggccaagggaccacggtcaccgtctcctca

SEQ ID NO: 1683 - DNA, 376 bp, Homo sapiens
  source 1..376: mol_type = other DNA
gaggtcctactggtacagtctggggcagaggtgaagaagcctggggctacagtgagaatttcctgcagggtttctggattcaccctcagcgactcctacatgcactgggtgaaacaggcccctggaaaagggcttgagtggatgggacttattgatcctgaagttgatgagacacaatatgcagagaagttccagggcagagtcaccataagcgcggacacgtctagagacacagtctacatggacctgagcgacctgacatctgaggacacggccgtgtattactgcgttaaggagggatccgatattttgactcattatcacccacaaatacttcactattggggccagggatccctgatcaccgtctcgtcag

SEQ ID NO: 1684 - DNA, 370 bp, Homo sapiens
  source 1..370: mol_type = other DNA
gaggtgcaactggtggagtctgggggaggcttggtacagcctggggggtccctgagactctcctgtgtagcctctggattcagcttcagtggttatagcatgaactgggtccgccaggctccagggaaggggctggagtgggtttcatacattagtagtagtagtcttagcaaatactacgcagactctgtgaagggccgattcaccatctccagagacaatgccaagaactcactgtatctgcaaatgagcagcctgagagccgacgacacggctgtctattactgtgtaagagtagggggcgtgctgggagctaccctcgggcataatgactactggggccagggaaccctggtcaccgtctcctcag

SEQ ID NO: 1685 - DNA, 370 bp, Homo sapiens
  source 1..370: mol_type = other DNA
gaggtgcagctggtggagtcggggggaggtttggtacagcctgggaagtccctgagactctcctgcgtagtttctggattcactttcagtagttatagcatgaattgggtccgccaggcgccagggaaggggctggagtgggtttcatacataagtagtagtagtcttagcaaatattacggagactcggtgaagggccgattcaccatctccagagacaacgccaagaactcactgtatctgcaaatgaacagcctgagagccgaggacacggctgtctactactgtgcgagagttgggggcgtactgggagcaaccctcgggcgtaatgacaactggggccagggaatccgggtcaccgtctcctcag

SEQ ID NO: 1686 - DNA, 367 bp, Homo sapiens
  source 1..367: mol_type = other DNA
caggtccagctggtgcagtctggggctgaggtgaagaagcctgggtcctcagtgaaggtctcctgcaaggcttctggagtcaccttcagaagttttgctatcagctgggtgcgacaggcccctggacaagggcttcagtggatgggagggatcagcgccatctttcgtacagcacagtacgcacagaagttccagggcagagtcacaatcaccgcggacgaatccacgagcacagtgtacatggagctggttagcctgagatctgaggacacggccgtgtattactgtgcgagagcccaaggatacagctctaataacaactggttcgacccctggggccagggaaccctgatcaccgtctcctcag

SEQ ID NO: 1687 - DNA, 367 bp, Homo sapiens
  source 1..367: mol_type = other DNA
caggtcctcctgatacaatctggggctgaggtgaagaagcctggggcctcagtgagggtctcctgcaaggtttccggacacaccctcagtgaattggccatacactgggtgcgacaggctcatggaaaagggcttgagtggatgggaggtcttgatccagaagatggtgaaagaagctatgaagagaagttccagggcagactcaccatgaccgaggacacatctacagacacagcctacatggagctgagcagcctgagatctgaggacacggccatgtattattgcgctacaggaaagtactgtagtcttaccacctgtgtttttgactcttggggccagggaatcctggtcaccgtctcctcag

SEQ ID NO: 1688 - DNA, 394 bp, Homo sapiens
  source 1..394: mol_type = other DNA
caggtgcatctgcaggagtcgggcccaggactggtgaagccttcacagaccctgtccctcacctgcactgtctcaaatggctccatcagcagtggtggtcaatgctggagctggctccgccagcacccagggaagggcctggagtggattgcgtacatctataacactgggagaagcaactacaacccgtccctcaagagtcgagtcaccatttcagttgacacgtctaagaaccagttctccctgaagctgagctctgtgactgccgcggacacggccgtctattactgtgcgagagatctttcgggaatttactatgatagtagtggcctacaccagcagtccaatgcttttgatatctggggccaagggacaatggtcaccgtctcttcag

SEQ ID NO: 1689 - DNA, 378 bp, Homo sapiens
  source 1..378: mol_type = other DNA
caggtccagctggtgcagtctggggctgaggtgaagaagcctgggtcctcagtgaaggtctcctgcaaggcttctggaggctccttcagcagctatgccatcagctgggtgcgacaggcccctggacaagggcttgagtggatgggagggatcatccctctctttggtacagcaaactacgcacagaagttccagggcacagtcacgattaccgcggacatatccacgaggacagcctacatggagctgagcagcctgagatctgaggacacggccatgtattactgtgctcacgcggtagatggtgggagctcgttatcgggctactactacggtatggacgtctggggccaagggaccacggtcaccgtctcctca

SEQ ID NO: 1690 - DNA, 373 bp, Homo sapiens
  source 1..373: mol_type = other DNA
caggtccagctggtgcagtctggggctgaggtgaagaagcctgggtcctcggtgaaggtctcctgcaaggcttctggaggcatcttcaacagctatgctatcagctgggtgcgacaggcccctggacaagggcttgagtggatgggagggatcatcgctatctttggtaccgcaaagtacgcacagaagttccagggcagagtcacgattaccacggacgactccacgaccacagcgtacatggagctgagcagcctgagatctgaggacacggccatttactactgtgcgagagcgaggggttaccatctgtttggtgaggccggctactttgactactggggccagggaaccctggtcaccgtctcctcag

SEQ ID NO: 1691 - DNA, 367 bp, Homo sapiens
  source 1..367: mol_type = other DNA
gaggtgcagctgttggagtctgggggagccttggtacagcctggggggtccctgagactctcctgtgcagcctctcaattctccattagcagctataccgtgacgtgggtccgccaggctccagggaagggcctggagtgggtctcaagtattattgggggtggcgttagcacatactacgcagactccgtgaagggccgattcaccctctccagagacaattccaagaacatactgtatctacaaatgaacagcctgagagccgaagacacggccgtttattactgtgcgagagactcccggcggtggctacaatcagctgcttttgactactggggccagggaaccctggtcaccgtctcctcag

SEQ ID NO: 1692 - DNA, 358 bp, Homo sapiens
  source 1..358: mol_type = other DNA
gaagtgcaattggcggaatctggggggggcctggtgcagcctggcaggtccctgagactctcctgtgcagcctctggattcacctttgatgattatgccatgcactgggtccggcaagctccagggaagggcctggaatggctctcaggtattagttgggacagtggtgccataggctatgcggcctctgtgaggggccgattctccatctccagagacaacgccaagaggaccctgtatctgcaaatgaacagtctgagacctgaggacacggccttgtacttctgtgcaaggtcacttggttcggggagttattcctccgactggggccagggaaccctggtcaccgtctcctcag

SEQ ID NO: 1693 - DNA, 380 bp, Homo sapiens
  source 1..380: mol_type = other DNA
ggtgcacctggtggagtctgggggaggcttggtacagcctggagggtccctgagactctcctgtgcagcctctggattaaccttcagtaattatgaaatgaactgggtccgccaggctccagggaaggggctggagtggattgcacagataagttttagtgataatgagatatactatagagactctgtgaagggccgattcaccatatccagagacaacgccaagaactcactgtttctgcaaatggacagcctgggagccgaggacacggctgtttattactgtgcgagaggtgggccatattgtggttctgactgctcttcgaactacaattactttgactactggggccagggaaccctggtcaccgtctcctcag

SEQ ID NO: 1694 - DNA, 358 bp, Homo sapiens
  source 1..358: mol_type = other DNA
caggtccagctggtgcagtctggggctgaggtgaagaagcctgggtcctcagtgaaggtctcctgcaaggcttctggaggcaccttcagcagctatgctatcagctgggtgcgacaggcccctggacaagggcttgagtggatgggagggatcatcggtatctttggtacagcaaactacgcacagaagttccagggcagagtcacgattaccgcggacgaatggggtacagcctacatggagctgagcagcctgaaatctgaggacacggccatgtattactgtgcgagaggggatggctaccaacccgattacttccagcactggggccagggcaccctggtcaccgtctcctcag

SEQ ID NO: 1695 - DNA, 370 bp, Homo sapiens
  source 1..370: mol_type = other DNA
gaggtgcagttgttggagtcggggggaggcttggtacagcctggggggtccctgagactctcctgtgcagcctctggattcagttttagcaactatggcatgaactgggtccgccaggctccaggaaaggggctggagtgggtcgcaactataagtgctagtggtggaagcacatactacgcagactccgtgaggggccggttcaccatctccagagacagatccaagaacaccttgtttctgcaaatgaacagcctgagagccgaggacacggccgtttattactgtgcgaaagatctacgggattgggtagcagtggctgggtaccttgacttctggggccagggaaccctggtcaccgtctcttcag

SEQ ID NO: 1696 - DNA, 361 bp, Homo sapiens
  source 1..361: mol_type = other DNA
caggtccagctggtgcagtctggggctgaggtgaagaagcctgggtcctcaatgaaggtctcctgcaaggcttctggaggcatcttcaggaactatgctatcagctgggtgcgacaggcccctggacaagggcttgagtggatgggagggatcatcgctatctttggcacaacaaactacgcacagaagttccagggcagagtcacgattaccgcggacgaatccacgagcacagcctacatggagctgagcagcctgagatctgaggacacggccatatatttctgtgcgaggggtagtggttattaccacaactactttgagtactggggccagggaaccctggtcaccgtctccccag

SEQ ID NO: 1697 - DNA, 364 bp, Homo sapiens
  source 1..364: mol_type = other DNA
caggtccagctggtgcagtctggggctgaggtgaagaagcctgggtcctcagtgaaggtctcctgcaaggcttctggaggcaccttcagaagcgatgctgtcagctgggtgcgacaggcccctggacaagggcttgagtggatgggagggatcctcggtatctttggtacagcaaactacgcacagaagttccagggcagagtcacgattaccacggaccaatccacgagcacaacgtacatggagctgagcagcctgagatctgacgacacggccgtgtattactgtgcgacattagaacgaagctactatccgaaatacctgcaggattggggccagggcaccctggtcaccgtctcctcag

SEQ ID NO: 1698 - DNA, 370 bp, Homo sapiens
  source 1..370: mol_type = other DNA
gaggtgctgctggtggagtctgggggacgtttggtacagcctggggggtccctgagactctcctgtgtagcctctggattcaccttcagtaactctggcatgaactgggtccgccaggctccaggaaaggggctggagtgggtttcatacatcagcagtagtaggggtagcatgtactacgcagactctgtcaagggccgattcaccatctccagagacaatgccaagaactcactgtatctgcaaatgaacagcctgagagccgaggacacggctgtgtattactgtgcgacagtaggaggcgtactgggagccaccctcgggcgcaatgattactggggccggggaaccctggtcaccgtctcctcag

SEQ ID NO: 1699 - DNA, 352 bp, Homo sapiens
  source 1..352: mol_type = other DNA
gaggtgcagctggtgcagtctggagcagaggtgaaaaagccgggggagtctctgaagatctcctgtaagggttctggatacacctttaggagtcactggatcgcctgggtccgccaggtgcccgggaaaggcctggagtggatggggaacatctattgtggtgactctgaaagcatatatagtccgtccttccaaggccaggtcaccttctcagccgacaagtccatcagcaccgcctacctccagtggagcagtctaaaggcctcggacaccgcgatctattattgtgcgagacggacggattcgggagttgacttctggggccagggaaccctggtcaccgtctcctcag

SEQ ID NO: 1700 - DNA, 364 bp, Homo sapiens
  source 1..364: mol_type = other DNA
caggtgaagctggtggagtcggggggaggcggggtccggcctggggggtccctgagactctcctgtgaagcctctggattcaccttcagtacctatggcttgcactgggtccgccaggctccaggcaaggggctggagtgggttgcagttatatcatatgacggaagtaaaaagttctatgcagacttcgtgaagggccgattcaccatctccagagacaattccaagaacacgctgtatatggaaatgaataggctgagagctgaggacacgtctgtgtattactgtgcgaaatccgagggtgactacgagttatttggtcttgtcacatggggccagggaaccctggtcaccgtctcctcag

SEQ ID NO: 1701 - DNA, 358 bp, Homo sapiens
  source 1..358: mol_type = other DNA
gaggtgcagctgttggagtcggggggaaacttggtacagcctggggggtccctgagactctcctgtgcagcctctggattcacctttagcgactatgccatgggctgggtccgacaggctccagggaaggggctggagtgggtctcagatattattattaatgggagaacatactacgcagactccgtgcagggccggttcaccatctccagagacgattccacggacaccctttttctgcaaatgaacagcctgagagtcgacgacacggccttatattactgtgcgaaaaatcgcggcgccagggtgggtggttttgatgcctggggccaggggacaatggtcaccgtctcttcag

SEQ ID NO: 1702 - DNA, 370 bp, Homo sapiens
  source 1..370: mol_type = other DNA
gaggtgcagctggtggagtctgggggaggcttggtacagtcgggggggtccctgagactctcctgtgcagcctctggattcaccttcagtatctataatatgcactgggtccgccaggctccagggaaggggctggagtgggtctcatacattagtagtactactatcaccagatattatgcagactctgtgaagggccgattcaccatctccagagacaatgccaagaactcactgtatctgcaaatgaacagcctgagagtcgaggacacggctgtgtattactgtgcgagaggcaccccccaaggcaggcagtggctggtcaactttgactattggggccagggaaccctggtcaccgtctcctcag

SEQ ID NO: 1703 - DNA, 354 bp, Homo sapiens
  source 1..354: mol_type = other DNA
gaggtgcagctggtgcagtctggagcagaggtgaaaaagccgggggagtctctaaagatctcctgtaagggttctggatacaacttcgccacctattggatcgcctgggtgcgccagatgcccgggaaaggcttggagtggatggggaacatctatccaggtgactctgatgccagatacagcccgtcctttcaaggccaggtcaccatgtcagccgacaggttcatcagcaccgcctacctgcagtggagcagcctgaaggcctcggacaccgccatgtattactgtgcgagacggtccacagattacaatatggacgtctggggccaagggaccacggtcaccgtctcctca

SEQ ID NO: 1704 - DNA, 361 bp, Homo sapiens
  source 1..361: mol_type = other DNA
caggtccagctgatacagtctggggctgaggtgaagaagcctgggtcctcagtgaaggtctcctgcaaggcttccggaggcaccttaatcaactatgctatctactgggtgcgacaggcccctggacaggggcttgagtggatgggaggcatcgtccctgtctttggttcgtcacactacgcacagaagttccagggcagagtcacgattaccgcggacgaatccacgagcacggcctacatggagctgagcaccctgagatctgaggacacggccgtgtattactgtgcgagggccgaaaatagtgtctacgattccccagagtactggggccagggaaccctggtcaccgtctcctcag

SEQ ID NO: 1705 - DNA, 369 bp, Homo sapiens
  source 1..369: mol_type = other DNA
gaggtgcagctggtggagtctgggggaggcctggtcaagcctggggggtccctgagactctcctgtgcagcctctggattcaccttcagtagctatagcatgaactgggtccgccaggctccagggaaggggctggagtgggtctcatccattagtagtagtagtagttacatatactacgcagactcagtgaagggccgattcaccatctccagagacaacgccaagaactcactgtatctgcaaatgaacagcctgagagccgaggacacggctgtgtattactgtgcagtgggaacgcactatgatagtataagctactacggtatggacgtctggggccaagggaccacggtcaccgtctcctca

SEQ ID NO: 1706 - DNA, 370 bp, Homo sapiens
  source 1..370: mol_type = other DNA
gaggtgcagctgttggagtcagggggaggcttggttcggcctggggggtccctgagactctcctgtgcaacatctggattcgcctttggcatctatgccatgagctgggtccgccaggctccagggaaggggctggagtgggtctcaagtattcgtggtagtggtactgaaacacattatacagactccgtgaagggccgcttcaccatctccagagacaactccaagaacaccctatatctgcaaatgaacggcctgagagccgaggacacggccgtatattactgtgcgaaatccgccgggggtggtgacccgaaggcgggcacttttgatttctggggccaagggacactggtcaccgtctcttcag

SEQ ID NO: 1707 - DNA, 364 bp, Homo sapiens
  source 1..364: mol_type = other DNA
caggtgcagctggtgcagtctgggggaggcgtggtccagcctgggaggtccctgagactcccctgtgcagcctctggattcaccttcactacctattctttccactggatccggcaggctccaggcaaggggctggagtgggtggcattcatttcacttgatggaagcaagaaatggtacactgactccgtgaagggccgattcaccatctccagagacaattccatggacacactgtatctgcacatgaacagccttagacctgaagactcgggtgtgtattactgtgtgaaagatcgtagatactcctatggacccaagtttgacgactggggccagggaaccctggtcaccgtctcctcag

SEQ ID NO: 1708 - DNA, 370 bp, Homo sapiens
  source 1..370: mol_type = other DNA
gaggtgcagctgttggagtctgggggaggcttggtacagcctggggggtccctgagactctcctgtgcagcctctggattcacctttagtacctatttcatgacctgggtccgccaggctccagggaaggggctggagtgggtctcagctgttagtggtagtggtggaagcacatactacacagactccgtgaagggccggttcaccatctccagagacaattccaagaacacggtgtatctgcaaatgaagagcctgagagccgaggacacggccgtatattactgtgcgaaagatctgtcacggcacataccaacatctggtgcttttgatgtctggggccaagggacaatggtcaccgtctcttcag

SEQ ID NO: 1709 - DNA, 361 bp, Homo sapiens
  source 1..361: mol_type = other DNA
caggtccagctggtgcagtctggggctgaggtgaagaagcctgggtcctcagtgaaggtctcctgcaaggcttctggagggaccttcagcagctttggtatcagctgggtgcgacaggcccctggacaggggcttgagtggatgggagggatcatcggtatgtttcgtacagcaaactacgcacagaagttccagggcagagtcacgattaccgcggacgaattcatgagcacagcctacatggagctgagcagcctgagatctgaggacacggccgtgtattactgtgggagaaatgatggctacaagccgcaatacctccagcactggggccagggcaccctgatcagcgtctcctcag

SEQ ID NO: 1710 - DNA, 373 bp, Homo sapiens
  source 1..373: mol_type = other DNA
caggtccagctggtgcagtctggggctgaggtgaagaagcctgggtcctcagtgaaggtctcctgcaaggcttctggaggcaccttcagcagctatgctatcagctgggtgcgacaggcccctggacaagggcttgagtggatgggagggatcatccctatctttggtacagcaaactacgcacagaagttccagggcagagtcacgattaccgcggacgaatccacgagcacagcctacatggagctgagcagcctgagatctgaggacacggccgtgtattactgtgcgagagggccggggatggctacaattgcggagtatctgaggtttgactactggggccagggaaccctggtcaccgtctcctcag

SEQ ID NO: 1711 - DNA, 373 bp, Homo sapiens
  source 1..373: mol_type = other DNA
cagctgcagctgcaggagtcgggcccaggactggtgaagccttcggagaccctgtccctcacctgcactgtctctggtggctccatcagcagtagtagttactactggggctggatccgccagcccccagggaaggggctggagtggattgggagtatctattatagtgggagcacctactacaacccgtccctcaagagtcgagtcaccatatcagtagacacgtccaagaaccagttctccctgaagctgagctctgtgaccgccgcggacacggccgtgtattactgtgcgagaagtggccaaagttacaatttttggagtggttactttgactactggggccagggaaccctggtcaccgtctcctcag

SEQ ID NO: 1712 - DNA, 367 bp, Homo sapiens
  source 1..367: mol_type = other DNA
caggtccagctggtgcagtctggggctgaggtgaagaagcctgggtcctcagtgaaggtctcctgccaggcttccggaggcaccttcagtgcctatgctatcagctgggtgcgacaggcccctggacaagggcttgagtgggtgggagggatcatcgctatctttcatacaacacactacgcacagaagttccagggcagagtcacgattaccgcggacgaatccacgagcacagcctacatggagctgagcagcctgagatctcaggacacggccgtgtattattgtgcgagagcagccggatacacttatggttcaaacccctttgactactggggccagggaaccctggtcaccgtctcctcag

SEQ ID NO: 1713 - DNA, 394 bp, Homo sapiens
  source 1..394: mol_type = other DNA
caggtgcatctgcaggagtcgggcccaggactggtgaagtcttcagagaccctgtccctcacctgctctgtctccaatggctccatcagcagtgctggtcaatgctggagctggctccgccagcacccagggaagggcctggagtggatagcgtacatctacaacactgggagaagcaactacaacccgtccctcaagagtcgagtcaccatttcagttgacacgtctaagaatcagttctccctgaagctgagctctgtgactgccgcggacacggccgtatattactgtgcgagagatctttcgggaattttctatgatagtagtggcctacaccagcagtccaatgcttttgatatctggggccaagggacaatggtcaccgtctcttcag

SEQ ID NO: 1714 - DNA, 364 bp, Homo sapiens
  source 1..364: mol_type = other DNA
caggtgcagctggtggagtctgggggaggcgtggtccagcctgggaggtccctgagactctcctgtgcagcctctggattcaccttcagtacctatactatgcactgggtccgccaggctccaggcaaggggctggagtgggtggcagttatatcatatgatggaagcaataaatactacgcagactccgtgaagggccgattcaccatctccagagacaactccaagaacacgctgtatctgcaaatgaacggcctgagagctgaggacacggctgtgtattactgtgcgagagatgagtgggggagatggctacacttgctcgactactggggccagggaaccctggtcaccgtctcctcag

SEQ ID NO: 1715 - DNA, 355 bp, Homo sapiens
  source 1..355: mol_type = other DNA
gaggtgcggctggtggagtctgggggaggcttggtccagccgggggggtccctgagactctcctgtgaaacctctggattcgcctttagttcctattggatggcctgggtccgccaggctccagggaagggactggagtgggtggccaatataaagaaggatgaaagtgagaaacactatgtggactctgtgacgggccgattcaccatctccagagacaacgccaagaactcagtgtacttgcaaatgaacagcctaagagtcgaagacacggctgtttattactgtgcgagagagccgtcttcagtggccgctgactactggggccagggaaccctggtcaccgtctcctcag

SEQ ID NO: 1716 - DNA, 373 bp, Homo sapiens
  source 1..373: mol_type = other DNA
caggtccagctggtgcagtctggggctgaggtgaagaagcctgggtcctcggtgaaggtctcctgcaaggcttctggaggccccttcaacagctatgccatcagctgggtgcgacaggcccctggacaagggcttgagtggatgggagggatcatcgcagtctttggcacagcaaactacgcacagaagttccagggcagagtcacgattacgacggacgaatccacgagcacagcccacatggaactgagcagcctgagatctgaggacacggccgtgtattactgtgcgagatcgagtggataccacctgctttcgagtcccttaagtttccagcacgggggccagggcaccctggtcatcgtctcctcag

SEQ ID NO: 1717 - DNA, 376 bp, Homo sapiens
  source 1..376: mol_type = other DNA
gaggtgcagctggtggagtctgggggaggcttggtacagccgggggggtccctgagactctcctgtgcagcctctggattcaccctcagtagttatagcatgaactgggtccgccaggctccagggaaggggctggagtgggtttcatacattagtgatagtagtggttccagatattacgcagactctgtgaagggccgattcaccatctccagagacaatgccaagaactcactgtttctgcaagtgaacagcctgagagccgaggacacggctgtctattactgtgcgagagatctcatcaaggggaacaaaccgtggcaactaggatcttttgatgtctggggcccagggacaatggtcaccgtctcttcag

SEQ ID NO: 1718 - DNA, 358 bp, Homo sapiens
  source 1..358: mol_type = other DNA
caggtgcaactggtggagtctgggggaggcgtggtccagcctgggacgtctctgagactctcctgtgcagcgtctggattcagcttcagtggcaatggcatgcactgggtccgccaggccccaggcaagggtctggagtgggtggcagttatatggtctgatggaagtgataaatactatgcagactccgtgaagggccgattcagtgtctccagagacaattccaggaagacactgtctctccaaatgaacagcctgagagtcgaggacacggctgtatattactgtgcgagacgggggagtgggacttacgattttgaccactggggccagggaaccctggtcaccgtctcctcag

SEQ ID NO: 1719 - DNA, 366 bp, Homo sapiens
  source 1..366: mol_type = other DNA
caggtccacctggtgcagtctggggctgaggtgaagaagcctgggtcctcggtgaaggtctcctgcagggcttctgaaggcaccttcagcagttttgcttttagctgggtgcgacaggcccctggacaagggcttgagtggatgggagggatcattggtatgtttggtgttcctaagtacgcacagaagatggagggcagagtcaggattaccacggacgagtccacgagcacatcctacatggaattgcgcagcctgcgatctgaagatacggccgtttattactgtgcgagacatggtggctatcactacaactacaacgctatggaggactggggccaagggaccccggtcaccgtctcgtca

SEQ ID NO: 1720 - DNA, 364 bp, Homo sapiens
  source 1..364: mol_type = other DNA
cagctgcagctgctggagtcgggcccaggactggtgaagccttcggagaccctgtccctcacctgcactgtctctggtggctccatcaacagtaattactactggggctggatccgccagcccccagggaaggggctggagtggattgcgagtatctattatagtgggaacaccgactacaacccgtccctcaagagtcgagtcaccatatcagtagacacgtccaagaaccagttctccctgaagctgagctctgtgaccgccgcggacacggccgtgtatttttgtgcgcgagggaccaccgatatagtgtctaccattattgactactggggccagggaaccctggtcaccgtctcctcag

SEQ ID NO: 1721 - DNA, 367 bp, Homo sapiens
  source 1..367: mol_type = other DNA
gaggtgcaattgttggaatctgggggaggcttggttcagcctggggggtccctgagactctcctgtgcagtctctggattcacctttcccagatataccatgcactgggtccgccaggctccagggaaggggcttgagtgggtctgttctattagcgggagtactctcagtacatactacgtcgactccgtgaagggccggttcaccgtctccagagacaattccaggaacaccctccatctgcagattcacagtctgcgagccgaggacacggccacatattattgtgtgaagggtcaatcaacggtgccgtcaacggggtggttcgacccctggggccagggaaccctcgtcaccgtctcctcag

SEQ ID NO: 1722 - DNA, 364 bp, Homo sapiens
  source 1..364: mol_type = other DNA
caggtgcagctgcaggagtcgggcccaggactggtgaagccttcacagaccctgtccctcacctgcactgtctctggtgactccatcagcagtggtagttactactggagctggatccggcagcccgccgggcagggactggagtggattgggcgtatttatagcagtgggagcaccgactacaacccctccctcaagagtcgagtcaccatatcagttgacgtgtccaagaaccagttctccctgaagctgagctctgtgaccgccgcagacacggccgtgtattactgtgcgaggaggggggatagtggctacgattactttgactattggggccagggaaccctggtcaccgtctcctcag

SEQ ID NO: 1723 - DNA, 355 bp, Homo sapiens
  source 1..355: mol_type = other DNA
caggtgcagctgcaggagtcgggcccaggagtggtgaagccttcggggaccctgtccctcacctgcactgtctctggtggctccatgagcagttactactggaactggatccggcagcccgccgggaagggcctggagtggattgggcgtatctatgccagtgggtacactaaatacaacccctccctcaagagtcgagtcaccatgtcagttgacacgtccaagaaccagttctccctgagggtgaactctgtgaccgccgcggacacggccgtgtattattgtgtgactgaaactattttgggatctactacggcctactggggccagggagccctggtcaccgtctcctcag

SEQ ID NO: 1724 - DNA, 352 bp, Homo sapiens
  source 1..352: mol_type = other DNA
gaggtgcagctggtggagtctgggggaggcttggtccagcctggggggtcccggagactctcctgtgcagtctctggatttacctttagtagctattggatgagttgggtccgccaggctccagggaaggggctggagtgggtggccagcataaagcaagatggaagtgagaaacagtatgggggctctgtgaagggccgattcaccatctccagagacaacgccaagaactctctgtatctgcaaatgaacagcctgagagccgaggacacggctgtgtatttctgtgcgagagtaagcagtttattactctgggcctggggccagggaaccctggtcaccgtctcctcag

SEQ ID NO: 1725 - DNA, 379 bp, Homo sapiens
  source 1..379: mol_type = other DNA
caggtgcagctgcaggagtcgggcccaggactggtgaagccttcggagaccctgtccctcagttgcgctgtctctggtaactccatcgacagggcttactactggggctggatccggcagcccccagggaaggggctggagtggattgggagtatgtttcatagtgggagaggctacttcaacccgtccctccagagtcgagtcaccatatcacttgacacgtccaagaagcagttgtccctgaaggtgacctctgtgaccgccgcggacacggccgtgtattattgtgcgagatggtattacgacattttgacttcttatcaacgccatgatccttttgatatctggggccaaggcacaatggtcagcgtctcatcag

SEQ ID NO: 1726 - DNA, 379 bp, Homo sapiens
  source 1..379: mol_type = other DNA
cagatgcaactggtggagtctgggggaggcgtggtccagcctgggaggtccctgagactctcctgtgcagcctctggattcaggttcagttcctatgttttgcactgggtccgccaggctccaggcaaggggctggagtggctggcagtaatatcaaaagatggaaccaaaaaggtctacgcagactccgtgaagggccgattcaccatctccagagacaattccaaggacacactgtatctgcagatggacagcctgagagctgaggacacatctttttattactgtgcgagagttcggagttactatggttcggggacttcttatggagattcttatgatatctggggccaagggacaatggtcaccgtctcttcag

SEQ ID NO: 1727 - DNA, 358 bp, Homo sapiens
  source 1..358: mol_type = other DNA
gaagtgcagctggtggagtctgggggaggcttggtacagcctggcaggtccctgagactctcctgtgcagcctctggattcacctttgatgattatgccatgcactgggtccggcaagctccagggaagggcctggagtgggtctcaggtattagttggaatagtggtagtataggctatgcggactctgtgaagggccgattcaccatctccagagacaacgccaagaactccctgtatttgcaaatgaacagtctgagagctgaggacacggccttctattactgtgcaaaagcccatggttcggggagttattctcttagatggggccagggaaccctggtcaccgtctcctcag

SEQ ID NO: 1728 - DNA, 370 bp, Homo sapiens
  source 1..370: mol_type = other DNA
gaggtgcagctggtggagtctgggggaggcttggtccagcctggggggtccctaagactctcctgtgaagcctctggattcaccttcagtacttatagtatgaactgggtccgccaggctccagggaaggggctggagtgggttgcatacattagtagtactagtggtagcaaatactacgcagacactgtgaagggccgattcaccatctccagagacaatgccaagaactctctgtctctacaaatgagcagcctgagagccgaggacacggctgtgtatttctgtgtaagagtcgggggcgtactgggggcttccctcgggcgaaatgactactggggccagggaaccctggtcaccgtctcctcag

SEQ ID NO: 1729 - DNA, 378 bp, Homo sapiens
  source 1..378: mol_type = other DNA
caggtccagctggtgcagtctggggctgaggtgaagaagcctgggtcctcagtgaaggtctcctgcaaggcttctggaatcaccttcagcagctatcctatcagctgggtgcgacaggcccctggacaagggcttgagtggatgggagggatcctccctatgtttggtacaacaaactacgcacagaagttccagggcagagtcacgattaccgcggacgaatctacgagcacagcctacatggagctgagcagcctgagatctgaggacacggccgtttattactgtgcgagaataaagagttactatggttcggggagttattttatcaccccctttgactactggggccagggaaccccggtcgccgtctcctca

SEQ ID NO: 1730 - DNA, 369 bp, Homo sapiens
  source 1..369: mol_type = other DNA
gaggtgcagctggtggagtctgggggaggcttggtccagcctggggggtccctgagactctcctgtgcagcctctggattcacctttagtagctattggatgagctgggtccgccaggctccagggaaggggctggagtgggtggccaacataaagcaagatggaagtgagaaatactatgtggactctgtgaagggccgattcaccatctccagagacaacgccaagaactcactgtatctgcaaatgaacagcctgagagccgaggacacggctgtgtattactgtgcgagagatcgatgggccggaaattcccccgggcctactatggacgtctggggccaagggaccacggtcaccgtctcctca

SEQ ID NO: 1731 - DNA, 375 bp, Homo sapiens
  source 1..375: mol_type = other DNA
caggtccagctggtgcagtctggggctgaggtgaagaagcctgggtcctcagtgaaggtctcctgcaaggcttctggaggcatcttcagcagttatgctatcagctgggtgcgacaggcccctggacaagggcttgagtggatgggagggatcatccgtatctttggtatagcaaactacgcacagaagttccagggcagagtcacgattaccgcggacgaatccacgagcacagcctacatggagctgagcagcctgagatctgacgacacggccgtttattactgtgcgagagggtccgcgactacagtaaccccatactactccttcggtatggacgtctggggccaagggaccacggtcaccgtctcctca

SEQ ID NO: 1732 - DNA, 367 bp, Homo sapiens
  source 1..367: mol_type = other DNA
caggtccagctggtgcagtctgggactgaggtgaagaagcctgggtcctcagtgaaggtctcctgcaaggcttctggaggcaccttcagcagttatgctatcagttgggtgcgacaggcccccggacaagggcttgagtggatgggagggatcaaaggtatctttcgtacagcgaactacgcagagaagtttcagggcagagtcacgataaccgcggacgaatttatgaacacagcctatatggagttgagcagcctgagatctgaggacacagccgtatattactgtgcgagggcctccgggtattcgttttctttcaactggttcgacccctggggccagggaacccttgtcaccgtctcctcag

SEQ ID NO: 1733 - DNA, 364 bp, Homo sapiens
  source 1..364: mol_type = other DNA
caggtgcagctggtgcagtctggggctgaggtgaagaagcctggggcctcagtgaaggtctcctgcaaggcttctggatacagcttcagtggctactatatacactgggtgcgacaggcccctggacaagggcttgagtggatgggatgggtcaaacccagaagtggcgacacaaactatgcacagaagtttcagggccgggtcaccatgaccagggacacgtccatcagcacagtctacatagaagtgagcagcctgagatctgacgacacggccgtgtattactgtgcgagagattatagtgcctacgaagcgtactactttgactactggggccagggaaccctggtcaccgtctcctcag

SEQ ID NO: 1734 - DNA, 371 bp, Homo sapiens
  source 1..371: mol_type = other DNA
ggtgcagctggtggagtctgggggaggcgtggtccagcctgggaggtccctgagactctcctgtgcagcttctggattcggcttcagtagttatggcatgcactgggtccgccaggctccaggcaaggggctggagtgggtggcagttatatcatatgatggaggtatgagatactatgcagactccctgcagggccgattcaccatctcgagagacaattctcagaacacgctatatttgcaaatgtacagcctgagagttgaagacacggctgtatatttctgtgcgaaagatgtggtcagtcctagcaatgattggtacagtgctcttgatatctggggccaagggacatcggtcaccgtttctgcag

SEQ ID NO: 1735 - DNA, 352 bp, Homo sapiens
  source 1..352: mol_type = other DNA
caggttcagctggtgcagtctggagctgaggtgaagaagcctggggcctcagtgaaggtctcctgcaaggcttctggttacacctttaccagctatggtatcagctgggtgcgacaggcccctggacaagggcttgagtggatgggatggatcagcgcttacaatggtgacacaaactatgcacagaagctccagggcagagtcaccatgaccacagacacatccacgagcacagcctacatggagctgaggagcctgagatctgacgacacggccgtgtattactgtgcgagagcagggagtagtagttttgactactggggccagggaaccctggtcaccgtctcctcag

SEQ ID NO: 1736 - DNA, 364 bp, Homo sapiens
  source 1..364: mol_type = other DNA
caggtccagctggtgcagtctggggctgaggtgaagaagcctgggtcctcagtgaaggtctcctgcaaggctgctggaggcatcttcaccagctatgctatcagctgggtgcgacaggcccctggacaaggccttgagtggattggagacatcatccctctctttggtataccacactacgcacagaagttccagggcagagtcacgattaccgcggacaaaaatacgatcacagctgaaatggaactgagcagtctgagatccgacgacacggccgtctattactgtgcgacaagtgggggtctttaccagccggcctacttcgacccctggggccagggaaccctggtcaccgtctcctcag

SEQ ID NO: 1737 - DNA, 355 bp, Homo sapiens
  source 1..355: mol_type = other DNA
gaggtgcaactggtggagtctgggggaggcttggtacagcctggagggtccctgagactctcctgtgcagcctctggattcaccttcagtagttatgagatgaactgggtccgccaggctccagggaaggggctggattgggtttcatatattactattgataatagtaccgtatactacgcagactctgtgaagggccgattcaccatctccagagacaatgccaagaactcactgtatctgcaaatgaacagcctgagagccgaggacacggctatttattactgtgcgagaaccgcccatgaagatgcttttgatatctggggccaagggacactggtcaccgtctcttcag

SEQ ID NO: 1738 - DNA, 375 bp, Homo sapiens
  source 1..375: mol_type = other DNA
caggtccagctggtgcagtctggggctgaggtgaagaagccggggtcctcggtgaaggtctcctgcaaggcttctggaggcaccttcagcagctatggtgtcagctgggtgcgacaggcccctggacaaggtcttgagtggatgggagggatcatccctatctttggtacaccaaagtacgcacagaagttccagggcagagtcacgataaccacggacgaatccacgagcacagcctacatggagctgagcagcctgacatctggggacacggccgtgtattactgtgcgagagctcagtcgttctttggttcggggagttattataacgtctttgactactggggccagggaaccctggtcaccgtctcctca

SEQ ID NO: 1739 - DNA, 391 bp, Homo sapiens
  source 1..391: mol_type = other DNA
caggttcagctggtgcagtctgcacctgagatgaagaagcctggggtctcagtgaaggtctcctgcaagacttctggttacactttttcctactatggactcagttggctgcgacaggcccctggacaaggatttgaatgggtgggatggatcagcggtcacaatggtgacacaagttattcacacaaactccagggcagagtcaccctgactacagacacatccacgggcgcagcgtatatggagttgaggagcctgagaccggacgacacggccgtgtattactgtgcgcgagattgggttgggaaaatccaagggtcggggactctttactccgacaggaaccactttgacacctggggccagggaaccctggtcaccgtctcctcag

SEQ ID NO: 1740 - DNA, 367 bp, Homo sapiens
  source 1..367: mol_type = other DNA
caggtccacctggtgcagtctggggctgaggtgaagaagcctgggtcctcggtgatagtctcctgcagggcttctggaggcaccctcaacaagtatgcaatcagctgggtgcgacaggcccctggacaagggcttgagtggatgggagggaacatccctatttttggtgcagcaaaatacgcacagaaattccagggcagagtcacaataaccacggacgaatccacgagcacagcccacatggagctgagcagcctgagatctgaggacacggccatgtacttctgtgcgggggccgaatcgtatagtctgcttcgggaagtcttgatctactggggccagggaaccctggtcaccgtctcctcag

SEQ ID NO: 1741 - DNA, 382 bp, Homo sapiens
  source 1..382: mol_type = other DNA
gaggtgcagctggtggagtctgggggaggtgtggtacggcctggggggtccctgagactctcctgtgcagcctctggattcacctttgatgattatggcatgagctgggtccgccaagctccagggaaggggctggagtgggtctctggtattaattggaatggtggtagcacaggttatgcagactctgtgaagggccgattcaccatctccagagacaacgccaagaactccctgtatctgcaaatgaacagtctgagagccgaggacacggccttgtattactgtgcgagagatccgccacataaccgtattactatggttcggggaccaaaaaaatatgactactggggccagggaaccctggtcaccgtctcctcag

SEQ ID NO: 1742 - DNA, 367 bp, Homo sapiens
  source 1..367: mol_type = other DNA
gaggaccagctgttggagtctgggggagccttggtacagcctggggggtccctgagactctcctgtgcagcctctggattctccattagcagctataccatgacgtgggtccgccaggctccagggaagggcctggagtgggtctcaagtattattggtggtggcgttagcacatactacgcagactccgtgaagggccgattcaccctctccagagacaattccaagaacacactgtatgtgcaaatgaacagcctgagagccgaggacacggccgtttattactgtgcgagagactcccggcggtggcttcaatcagctgcttttgactactggggccagggaaccctggtcaccgtctcctcag

SEQ ID NO: 1743 - DNA, 370 bp, Homo sapiens
  source 1..370: mol_type = other DNA
caggtgcagctggtgcagtctggggctgaggtgaagaagcctggggcctcagtgaaggtctcctgcaaggcttctggatacagcttcaccggctccgatatcaactgggtgcgacaggccgctggacaaggacttgagtggatgggatggatagacccgaacagtggtaagacgggctatgcacagaagttccagggcagagtcaccatgaccgggaacacctccataagtacagcctacatggagctgagcagcctgagatctgaggacacggccgtgtattactgtgcgagagtcggtcgatattctgactggtaccggcgggttcaagactactggggccagggaaccctggtcaccgtctcctcag

SEQ ID NO: 1744 - DNA, 355 bp, Homo sapiens
  source 1..355: mol_type = other DNA
caggtgcaattggtgcagtctgggggaggcctggtcaagcccggagggtccctgagactctcctgtgcagcctctggattcaccttcagtaactactacatgacctggatccgccaggctccagggaagggactggagtgggtttcatttatcagtagtagtggtattaccagctactatgcagactctgtgaagggccgattcaccatctccagggacaacgccaagaactcactgtttctggagatgaacagcctgagagtcgaggacacggccgtctatttctgtgcgagaagttttttcgctgacccgcttgacctctggggccagggaaccctggtcaccgtctcctcag

SEQ ID NO: 1745 - DNA, 364 bp, Homo sapiens
  source 1..364: mol_type = other DNA
caggtgcagctggtgcagtctggggctgaggtgaagaagcctggggcctcagtgagggtctcctgcaagacttctgggtacaccttcaccggctactatatacactgggtgcgacaggcccctggaaaagggcttgagtggatgggatggatcaaacctaaaaatggggccacaaactatgcacagcagtttcagggcagggtcaccatgaccagggacacgaccatcaccacagtctacatggatctcagcggcctgagatcagacgacacggccgtctattattgtgcgagagattatagtgcctacgacgcctactactttgactactggggccagggaaccctggtcaccgtctcctcag

SEQ ID NO: 1746 - DNA, 354 bp, Homo sapiens
  source 1..354: mol_type = other DNA
gaggtgcagctgttggagtctgggggaggcttggtacagcctggggggtccctgagactctcctgtgcagcctctggattcacctttagcaactatgccatgagctgggtccgccaggctccagggaaggggctggagtgggtctcaggtattagaggtaatggtggtagcacatactacgcagactccgtgaagggccggttcaccatctccagagacaattccaagaacaccctgtatctgcaaatgaacagcctgagagccgaggacacggccgtatattactgtgcgagaagggactactactacggtatggacgtctggggccaagggaccacggtcaccgtctcctca

SEQ ID NO: 1747 - DNA, 358 bp, Homo sapiens
  source 1..358: mol_type = other DNA
gaggtgcagctggtggagtctgggggaggggtgatacagcctggcaggtccctgagactctcctgtgcagcctctggattcagttttgatgactacgccatgcagtgggtccgacaggctccagggaagggcctggagtgggtctcaggtattagttgggatagcggtagtataggctatgcggactctgtgaagggccgattcaccatctccagagacaacgccaagaagtccctgtatttgcaaatgagaagtctgagaactgaggacacggccttgtattactgtgtaaaagctaatggtgcggggagttattctgtctcctggggccagggaaccccggtcaccgtctccgcag

SEQ ID NO: 1748 - DNA, 364 bp, Homo sapiens
  source 1..364: mol_type = other DNA
gaggtgcagctggtgcagtctggagcagaggtgaaaaagccgggggagtctctgaagatctcctgtaagggttctggatacaactttgccaactactggatcggctgggtgcgccagatgcccgggaaaggcctggagtggatgggcgtcatttatcccggtgactctgatactaaatatagcccgtccttccaaggccaggtcaccttctcagccgacaggtccatctccacggccttcctgcagtggagcagcctgaaggcctcggacaccgccacgtattactgtgcgaaacggggaggtgtggacgtggctggtgcttttgatatctggggccaagggacaatgatcaccgtctcctcag

SEQ ID NO: 1749 - DNA, 391 bp, Homo sapiens
  source 1..391: mol_type = other DNA
caggttcacctggtgcagtctggagctgagatgaagaagcctggggcctcagtgagggtctcctgcaagacttctggttacactttttcctactatggactcagttggatacgacaggcccctggacaaggatttgaatgggtgggatggatcagcggttacaatggtgacacaacttattcacagaaactccagggcagagtcaccctgactacagacacatccacgggcgcagcgtatatggagttgaggagcctgagaccggacgacacggccgtgtattactgtgcgcgagattgggttgggaaaatccatgggtcggggagtctttactccgacaggaactactttgacacctggggccagggaaccctggtcaccgtctcctcag

SEQ ID NO: 1750 - DNA, 391 bp, Homo sapiens
  source 1..391: mol_type = other DNA
cagggtcagctggtgcagtctggagctgagatgaagaagcctggggcctcagtgaaggtctcctgcaaggcttccggttacaaccttaacaactatggaatcagctggattcgacaggcccctggacaagggcctgagtggatgggatggatcagcggtcacaatggtgacacaaagtatgcccagagtctccagggcagggtcaccatgaccacagacacatccacgagcacagcctacatggagttgaggagcctgagatctgatgacacggccgtgtattactgtgcgcgagattggattgggaaagtctatggttcggggacttattataccgacaggcactactttgacatttgggggcagggaaccctggtcaccgtctcctcag

SEQ ID NO: 1751 - DNA, 367 bp, Homo sapiens
  source 1..367: mol_type = other DNA
gaagtgcagttggtggagtctgggggaggcttggtacagcctggcaggtccctgagactcgcctgtacaacctccggattcacctttgaagattatgccatgaactgggtccggcaagctccagggaagggcccggagtgggtctcaggtattacctggaatagccgtaatataggctatgggggctctgtgaagggccgatttatcatctccagagacaacgccaagaagtccctctatctgcaaatgaacagtctgagagctgaggacacggccttctattactgtgtaaaagatggcaggcgatggctacaatttaattggttcgattcgtggggccagggaaccctggtcaccgtctcgtcag

SEQ ID NO: 1752 - DNA, 381 bp, Homo sapiens
  source 1..381: mol_type = other DNA
gaggtgcagctgttggagtctgggggaggcttggtacagcctggggggtccctgagactctcctgtgcagcctctggattcacctttagcagctatgccatgagctgggtccgccaggctccagggaaggggctggagtgggtctcagctattagtggtagtggtggtagcacatactacgcagactccgtgaagggccggttcaccatctccagagacaattccaagaacacgctgtatctgcaaatgaacagcctgagagccgaggacacggccgtatattactgtgcgaagccgttcggggagttattgtcagacgaggaatactactactacggtatggacgtctggggccaagggaccacggtcaccgtctcctca

SEQ ID NO: 1753 - DNA, 361 bp, Homo sapiens
  source 1..361: mol_type = other DNA
caggtccagctggtgcagtctggggctgaggtgaagaagcctgggtcctcagtgaaggtctcctgcaagacttctggaggcaccttcagcagttatgctatcagctgggtgcgccaggcccctggacaagggcttgagtggatgggaggaatcatcggtatgtttcgtacagcaaactacgcacagaaattccagggcagagtcacgattaccgcggacgaattcatgagcacagcctacatggaactgagcaacctgagatctgacgacacggccgtctattactgtgcgaggaatgatggctacaagccgcaatacctccagcactggggccagggcaccctgatcagcgtctcctcag

SEQ ID NO: 1754 - DNA, 367 bp, Homo sapiens
  source 1..367: mol_type = other DNA
caggtccagctggtgcagtctggggctgaggtgaagaagcctgggtcctcagtgagggtctcctgcaaggcttctggaggcaccttcagcagctatgcaatcatctgggtgcgacaggcccctggacaagggcttgagtggatgggagggatcgtccctatctttggtacagcaaactacgcacagaagttccagggcagagtcacgattaccgcggacgaatccacgcgcacagactacatggagctgagaagcctgagatctgaggacacggccgtgtattactgtgcgagagtcgaatccttctatagcagtggctggtcctttgacaactggggccagggaaccccggtcaccgtctcctcag

SEQ ID NO: 1755 - DNA, 367 bp, Homo sapiens
  source 1..367: mol_type = other DNA
gaagtgcagctggtggagtctgggggaggcttgggacagcctggcaggtccctgagactctcctgtgcagcctctggattcacctttgaaaattatgtaatgcactgggtccggcaagctccaggggagggcctggagtgggtctcaggtatcagttggaatagtgctaccatagtctatgcggactctgtgaagggccgattcaccatctccagagacaaccgcaagaactccctgtatctggaaatgaacagtctgagaagtgaggacacggccttgtattactgtgcaaaaggcggagatattttgactggtcggacacgatttgactactggggccaggggaccctggtcaccgtctcctcag

SEQ ID NO: 1756 - DNA, 355 bp, Homo sapiens
  source 1..355: mol_type = other DNA
caggtgcagctggtgcagtctggggctgaggtgaagaagcctggggcctcagtgaaggtgtcctgcagggcttctggatacaccttcaccgccaattatatgcactgggtgcgacaggcccctggacaagggcttgagtggatgggatggatcaaccctaaaagtggtgacacaagctctacagagaagtttcagggcagggtcaccatgaccagggacacgtccatcaccacagcctacatggaactgagtaggttgagatctgacgacacggccgtgtattactgtgcgagagtcccctatggcagcagccccgacttttggggccagggaaccctggtcaccgtctcctcag

SEQ ID NO: 1757 - DNA, 373 bp, Homo sapiens
  source 1..373: mol_type = other DNA
gaggtgcagttggtggagtctgggggagacttggtccatcctggggagtccctgagactctcctgtgcagcctctggattcaccttcagtggctgtgctatgcactgggtccgccaggctccagggaagggactggaatatgtttcagctattagtagtaatggggatagtacatattatgcaaactctgtcaagggcagattcaccatctccagagacaattccaagaacacgctgtatcttcaaatgggcagtctgagagctgaagactcggctgtatattactgtgcgagagttgccccggatacaactatggttcgggggggattctttgacttctggggccagggaaccctggtcaccgtctcctcag

SEQ ID NO: 1758 - DNA, 384 bp, Homo sapiens
  source 1..384: mol_type = other DNA
caggtccagctggtgcagtctggggctgaggtgaagaagcctgggtcctcagtgaaggtctcctgcaagacctctggaggcaccttcaggaaatatggtctcagctgggtgcgacaggcccctggacaagggcttgagtggatgggcgggatcatccctatctttgaaacggcaaactacgcacagaagttccagggcagagtcacgataagcgcggacggatccacgagcacagcctacatggagctgagcagcctgagatctgaggacacggccatttattattgcacgatatccaatgggggattttgtagtgatggtcgatgcttcttctactaccctatggaggtctggggcccagggaccacggtcaccgtctgctca

SEQ ID NO: 1759 - DNA, 361 bp, Homo sapiens
  source 1..361: mol_type = other DNA
gaggtgcaactgttggagtctgggggaggcttggtacagccgggggggtccctgagactctcctgtgcagcctctggattcacctttaccaagtctgccatgacctgggtccgccagactccagggaaggggctagtgtggatctcatctattcgtcgtggtggtgataaaatatactatgcagactccttgaagggccggttcaccatgtccagagacaattccaagaatacagtgtatctacaaatgaacagcctgagagtcgaagacacggccgtatatttctgcgcgaaagattgggtcagtgaaaccacggggattgacaactggggccagggaaccctggtcaccgtctcctcag

SEQ ID NO: 1760 - DNA, 355 bp, Homo sapiens
  source 1..355: mol_type = other DNA
caggtgcagctggtgcagtctggggctgaggtgaagaagcctggggcctcagtgaaggtctcctgcagggcttctggatacaccttcaccgccaattatatgcactgggtgcgacaggcccctggacaagggcttgagtggatgggatggatcaaccctaacagtggtgacacaagctctgcacagaagtttcagggcagggtcaccatgaccagggacacgtccatcagcacagcctacatggagctgagtagactgagatctgacgacacggccgtgtattactgtgcgagagtcccctatggcagcagccccgacttttggggccagggaaccctggtcaccgtctcctcag

SEQ ID NO: 1761 - DNA, 370 bp, Homo sapiens
  source 1..370: mol_type = other DNA
gaggtgcagctgatggagtctgggggaggcttggtacagccgggggggtccctgagactctcctgtgcaggctctggattcaccttaagtggctatgtcatgtcctgggtccgccaggctcctgggaaggggctggagtgggtctcatcgattagtagcagtggtggcagcacctactacgcagactccgtgaagggccgatttaccatctccagagacacttccaagaacacgctctatttgctaatgaacagcctgagagccgaggacacggccgtgtattattgtgcgaaagaccggacgggatacgttccagtgactgggctctttgattcctggggccagggaaccctggtcgccgtctcctcag

SEQ ID NO: 1762 - DNA, 367 bp, Homo sapiens
  source 1..367: mol_type = other DNA
cagctgcagctgcaggagtcgggcccaggactggtgaagccttcggagaccctgtccctcacctgcactgtctctggtggctccatcaccagtagtacttactactggggctggatccgccagcccccagggaaggggctggagtggattgggagtatctattatagtgggagcacctacaacaacccgtccctcaagagtcgagtcaccatatcactagacacgtccaagaaccaggtctccctgaggctgagctctgtgaccgccgcggacacggccgtgtattactgtgcgagacgaccacgcttcggggagttatcacagcctgactactggggccagggaaccctggtcaccgtctcctcag

SEQ ID NO: 1763 - DNA, 370 bp, Homo sapiens
  source 1..370: mol_type = other DNA
gaggtgcagctgttggagtctgggggaggcttggtacagcctggggggtccctgagactctcctgtgcagcctctggattcacctttagcacctacgccatgagctgggtccgccaggctccagggaaggggctggagtgggtctcaactattagtagtagtcgtcttagcacatactacgcagactccgtgaagggccggttcaccatctccagagacaattccaagaacacactgtatctgcaaatgaacagcctgagcgccgaggacacggccgtatattactgtgcgaaagatctcatggtgtcgataccactgactggttcgcttgactactggggccagggaaccctggtcaccgtctcttcag

SEQ ID NO: 1764 - DNA, 390 bp, Homo sapiens
  source 1..390: mol_type = other DNA
caggtccagctggtgcaatctggggctgaggtgaggaagcctgggtcctcggtgaaggtctcctgcaaggcttctggaggcatcttcagcacctttgctatcagctgggtgcgacaggcccctggacaaggacctgagtggatgggagggtccatccctttccttggaacaccaaaatacgcacagaagttccggggcagagtcacgattaccagggacgaatcgaccaccacttcctacatggaggtgagcagtctgacatctgaggacacggccatatattactgtgcgagaaatagggctatggttcggggcactacggacccctacaactacttctactacggtttggacgtctggggccaagggaccacggtcaccgtctcctca

SEQ ID NO: 1765 - DNA, 367 bp, Homo sapiens
  source 1..367: mol_type = other DNA
caggtccagctggtgcagtccggggctgaggtgaagaagcctgggtcctcagtgaaggtctcctgcaaggcttctggaggcatcttcaacagctatgccatcagctgggtgcgacaggcccctgggcaagggcttgagtggatgggagggatcatcgctatctttaatacaccaaactacgcacagaagtttcagggcagagtctcgatcaccgcggacaaatccacgaccacagtctacatggaactgaacagcctcagatctgatgacacggccgtgtattactgtgcgagaagtagtggctacgactacaggggaaactactttgactattggggccagggaaccctggtcaccgtctcctcag

SEQ ID NO: 1766 - DNA, 373 bp, Homo sapiens
  source 1..373: mol_type = other DNA
gaggtgcagctggtggagtctgggggaggtgtggtacggcctggggggtccctgagagtctcctgtgcagcctctggattcacctttgatgattatggcatgagctgggtccgccaagctccagggaaggggctggagtgggtctctggtattaattggaatggtggtagcacaggttatgcagactctgtgaagggccgattcaccatctccagagacaacgccaagaactccctgtatcttcaaatggacagtctgagagccgaggacacggccttgtattactgtgggagaggggaacctccttgtggtggtgactgccatgatgcttttgatatctggggccaagggacaatggtcaccgtctcttcag

SEQ ID NO: 1767 - DNA, 376 bp, Homo sapiens
  source 1..376: mol_type = other DNA
caggtccagctggtgcagtctggggctgaggtgaagaagcctgggtcctcagtgaaagtctcctgcaaggcttctggaggcaccttcagcagctttcatatcagctgggtgcgacaggcccctggacaagggcttgagtggatgggagggatcatccctatctttgatacagcaaagtacgcacagaagttccagggcagagtcacaattaccgcggacaaatccacaaacacagcctacatggagctgagtagcctgagatacgaggacacggccgtgtattactgtgcgagagatccgggtcgtgttttgggacaattcgggagctctgcttttgatatgtggggccaagggacaatggtcaccgtctcttcag

SEQ ID NO: 1768 - DNA, 367 bp, Homo sapiens
  source 1..367: mol_type = other DNA
caggtgcagctggtggagtctgggggaggcctggtcaagcctggagggtccctgagactctcctgtgcagcctctggattcaccttcagtgactactatatggcctggattcgccaggctccagggaaggggctagagtggctttcatacattgttggtagtagtcgtaataccgtatactacgcagactctgtgaagggccgcttcaccagctccagggacagcgccaagaactcactgtatctccaaatgaacagcctgagagccgaggacacggccgtctattactgtgcgagagttcaggatattattaacccgagggcttttgatttctggggccaagggacactggtcaccgtctcttcag

SEQ ID NO: 1769 - DNA, 379 bp, Homo sapiens
  source 1..379: mol_type = other DNA
caggtccagctggtgcagtctggggctgaggtgaagaagcctgggtcctcggtgaaggtctcctgcaaggcttctggaggcatcttcaacaccaatgctatcagctgggtgcgacaggcccctggacaagggcttgagtggatgggagggatcatgcctctctttggtactgcaaactacgcacagaagtttcagggcagagtcacgattaccacggacgagtccacgagcacagcctatatagaactgagcagcctgagatccgaggacacggccctgtattactgtgcgaggcgagtgggacccaatggttcggggagttattaccccacttactttgactcctggggccggggaaccctggtcaccgtctcctcag

SEQ ID NO: 1770 - DNA, 391 bp, Homo sapiens
  source 1..391: mol_type = other DNA
cagggtcagctggtgcagtctggagctgagatgaagaagcctggggcctcagtgaaggtctcctgcaaggcctccggttacacccttaccaattatggcctcagctggatccgacaggcccctggacaagggcttgagtggatggggtggatcagcggttacaatggtgacacaaattatcaccagaatctccagggcagggtcaccatgaccacagacacatccacgaatacagcctacatggaattgaggagcctgagagcagatgacacggccatttattactgtgcgcgagattggattgggaaagtccatggttcgggggcttattattccgacaggcactactttgacatgtgggggcagggaagcctggtcaccgtctcctcag

SEQ ID NO: 1771 - DNA, 364 bp, Homo sapiens
  source 1..364: mol_type = other DNA
caggtccagctggtgcagtctggggctgaggtgaagaagcctgggtcctcggtgaaggtctcctgcaagactgctggaggcatcttcaataaatatggtatcagctgggtgcgacaggcccctggacaagggcttgagtggatgggagggatcatcgctatctttggaacagcaaactacgcacagaagttccagggcagagtcacgattaccacggacgaatccacgacgacagtttacatggagttgcacaacctaagatctgatgacacggccgtgtattactgtgcgagaggttcggattactatggtcgttccccccttgacgtctggggccagggaaccctggtcaccgtctcctcag

SEQ ID NO: 1772 - DNA, 361 bp, Homo sapiens
  source 1..361: mol_type = other DNA
caggtccagctggtgcaatctggggctgaggtgaagcagcctgggtcctcagtgaaggtctcctgcaaggcttccggaggcaccttcaacaattttggtatcagctgggtgcgacaggcccctggacacgggcttgagtggatgggagggatcgtccctatctttgggacaccaaactacgcgcagaaattccagggcagagtcacgattagagcggacgtgttcagcagtacagtgtacatggacctgagcagcctgagatcggacgacacggccttgtattactgtgcgcgaggtttgacatactactttaattcgcttgacttctggggccagggaaccctggtcaacgtctcgtcag

SEQ ID NO: 1773 - DNA, 346 bp, Homo sapiens
  source 1..346: mol_type = other DNA
gaggtgcagctggtggagtctgggggaggcttggtccagcctggggggtccctgagactctcctgtgcagcctctggattcacctttagtaggtcttggatgagctgggtccgccaggctccagggaaggggctggagtgggtggccaacataaaggaagatggaagtgataagtactatgtggactctgtgaagggccgattcaccatctccagagacaacgccaagaattcactgtatctgcaagtgaacagcctgagagccgaggacacggctgtgtattactgtgtgacataccagtggctgggagactggggccagggaaccctggtcaccgtctcctcag

SEQ ID NO: 1774 - DNA, 370 bp, Homo sapiens
  source 1..370: mol_type = other DNA
gaggtagaactgctccagtctggagccgaggtgaaaaagccgggggagtctctgaagatctcctgtaagagttctggatacgattttaccaagttttggatcggctgggtgcgccagatgcccgggaaaggcctggagtggatgggggtcatctggcctggtgactctgataccagatacagcccgtccttccaaggccaggtcaccatctcagccgacaagttcatcagtaccgcatacctgcagtggagtagcctgaaggcctcggacaccgccatgtattactgtgcgagatttcgggaatatgcagatcattatgtggggcgatttgacttctggggccagggaaccctggtcaccgtctcctcag

SEQ ID NO: 1775 - DNA, 370 bp, Homo sapiens
  source 1..370: mol_type = other DNA
gaggtgcaacttttggagtctgggggaggcttggtacagcctggggggtccctgagactctcctgtgcagcctctgaattcacctttagcaactatgccatgacctgggtccgccaggctccagggaaggggctggagtgggtcgcatctattagtaatagtggttttagcagatacttcgcagactccgtgaagggccggttcaccatctccagagacaattccaagaacacgctgtatttgcaaatgaacagcctgagagccgaggacacggccgtatattactgtgcgcaagataccccttttttgagccgaaccgctgaatacttccgacactggggccagggcaccctggtcgccgtctcctcag

SEQ ID NO: 1776 - DNA, 358 bp, Homo sapiens
  source 1..358: mol_type = other DNA
gaagtgcagttggtggagtctgggggaggcttggtacagcctggcaggtccgtgagactctcctgtgcagcctctggattcacctttgatgattatgccatgcagtgggtccggcaagctccagggaagggcctggagtgggtctcaggaattagttgggatagtggtagtatagggtatgcggactctgtgaagggccgattcaccatttccagagacaacgccaagaacaccctgtatctgcaaatgaacactctgagacctgaggacacggccttctattattgtggaaagtcttatggtgctgggagttatttgatgatctgcggccagggaaccctggtcaccgtctcctcag

SEQ ID NO: 1777 - DNA, 367 bp, Homo sapiens
  source 1..367: mol_type = other DNA
caggtccagctggtgcagtcaggggctgaggtgaagaagcctgggtcctcggtgaaggtctcctgcaaggcttctggaggcagcttcagcagttatgctatcagctgggtgcgacaggcccctggacaagggcttgagtggatgggagggatcatccctatgtttggtacagcaaactacgcacagaagttccagggcagagtcacgattaccacggaccaattcacgagcacaggctacatggagctgagtcgcctgagatctgaggacacggccgtgtattactgtgggagagatcgttcggggagttactacccgacgttctttgactactggggccagggaaccctggtcaccgtctcctcag

SEQ ID NO: 1778 - DNA, 352 bp, Homo sapiens
  source 1..352: mol_type = other DNA
gaggtgcagctggtgcagtctggagcagaggtgaaaaagccgggacagtctgtgaagatctcttgtaaggggtcagggtacagttttagtacccattggatcggctgggtgcgccagaaacccgggaaaggcctggagtggatggggaacatctatcctggtgactctgataccatatacagtccgtccttcgaaggccaggtcaccttctcagccgacaagtccatcagcaccgcctacctgcattggagcagcctgagggcctcggacagcgccatgtattactgtgcgagacgaatagaaggggggttcgacccctggggccagggaaccctggtcaccgtctcctcag

SEQ ID NO: 1779 - DNA, 367 bp, Homo sapiens
  source 1..367: mol_type = other DNA
caggtgcagctgcaggagtcgggcccaggactggtgaagccctcggagaccctgtcgctcacctgctctgtctctggtggctccatcagtgattactactggaactggatccgtcagtccccagggaagggactggagtggattgggtatatctattacagtgggaacaccatctacaaccccgccctcaggagtcgagtcaccatatcactagacacgtccaagaaccagttctccctgaggctgacgtctgtgaccgctgcggacacggccatgtattactgcgcgagatcgagaggggactacggtgatcacgctgaatacatccaatattggggccagggcaccctggtcaccgtctcctcag

SEQ ID NO: 1780 - DNA, 360 bp, Homo sapiens
  source 1..360: mol_type = other DNA
gaggtgcggctggtggaatctgggggaggcttggtccagcctggggggtccctgagactctcctgtgcagcctctggattcacctttggtagtcattggatgagctgggtccgccaggctccagggaaggggctggagtgggtggccaacataaagggagatggaagtgaaatacactatatggactctgtgaagggccgattcgccatctccagagacaacgccaaagagtcactgtttctgcaaatgaacagcctgagagccgaggacgcggctgtctattactgtgcgaaagattggggtgactcggggaaatggggggacgtctggggccaagggaccacggtcatcgtctcctca

SEQ ID NO: 1781 - DNA, 379 bp, Homo sapiens
  source 1..379: mol_type = other DNA
caggtgcagctgcaggagtcgggcccaggactggtgaagccttcggagaccctgtcgctcacctgcagtgtctctagtcactccctcagcagtggtcactactggggctgggtccggcagcccccagggaaggggctggaatggattgggagcatctatcataatggcaatacccactacaatccgtccgtcaggagtcgagtcgccatgtcaatagacacgtccaggaatcagttctccctgcacctgacctctgtgaccgccgcagacacggccgtgtattactgtgcgagagatgaacgggaggattactatgattcgggggcttattatactatcttgggctactggggccagggaatcctggtcaccgtctcct

SEQ ID NO: 1782 - DNA, 352 bp, Homo sapiens
  source 1..352: mol_type = other DNA
caggtgcaactggtgcagtctggggctgaggtgaagaagcctggggcctcagtgagggtctcctgcaaggcttctggattcaccttcaccacacactacatacactgggtgcgacaggcccctggacaagggcttgagtggatgggatggatcgaccctagcagtggtggcacaaagtttgcacagcactttcagggcagggtcaccatgaccacggacgcgtccatcaacacagccttcatggacctgaacaggctgagatctgacgacacggccatgtattactgtgcgagagtgcgctttggaagtggctggtactggggccagggaaccctggtcaccgtctcctcag

SEQ ID NO: 1783 - DNA, 372 bp, Homo sapiens
  source 1..372: mol_type = other DNA
gaagtgcagctggtggagtctgggggaggcttggtacagcctggcaggtccctgagactctcctgtgcagcctctggattcacctttgatgatcatgccatgcactgggtccggcaagctccagggaagggcctggagtgggtctcaggtattagttggaatagtggtagcataggctatgcggactctgtgaagggccgattcaccatctccagagacaacgccaagaactccctgtatttgcaaatgaacagtctgagagctgaggacacggccttgtattactgtgcaaaagatatagcggcagctggtactggcttctactatggtctggacgtctggggccaagggaccacggtcaccgtctcctca

SEQ ID NO: 1784 - DNA, 385 bp, Homo sapiens
  source 1..385: mol_type = other DNA
caggtccaactggtgcagtctggggctgaggtgaagaagcctgggtcctcggtgaaggtctcctgcaagacttttggaggcaccttggcttctggaggcaccttcagcagctatgctatcaactgggtgcgacaggcccctggactagggcttgagtggatgggaggcatcatccctatctttggagcaacacactacgcacagaacttccagggcagagtcacgattaccatggacgaatccacgagcacagcctacatggaagtgagcagcctgagatctgaggacacggccgtgtattactgtgcgagagggaccggatacagtagtggctggttcgaaactgactactggggccagggaaccctggtcaccgtctcctcag

SEQ ID NO: 1785 - DNA, 379 bp, Homo sapiens
  source 1..379: mol_type = other DNA
cagctgcagctgcaggagtcgggcccaggactgctgaagccttcggagaccctgtccctcacgtgcactgtctctggtgactccatcagcagcagtagttactactggggctgggtccgccagcccccagggaaggggctggagtggattggaaatatctattatagggggaccacctattacaacccgtccctcaagagtcgagtcaccatatcactggacacgtccaagacccagttctccctggacctgaactctgtgaccgccgcggacacggccctctactactgtgcgagacaagcccgccgaatttctgtgtggacggtcgtgaatgcttatgatgtctggggccaagggacaatggtcatcgtctcttcag

SEQ ID NO: 1786 - DNA, 370 bp, Homo sapiens
  source 1..370: mol_type = other DNA
gaggtgcagctggtggagtcggggggaagcttgattcagcctgggaggtccctgagactctcctgtgcagcctctggattcaccttcagttcttttggcatgaactgggtccgccaggctccagggaaggggctggagtgggtttcgtacattagtgctaccagtcttagcacatactacacagactctgtgaagggccgattcaccgtctccagagacaatgccaggaactccctgtatcttcaaatgaacaacctgagggtcgaggacacggctgtctattactgtgcgacagtagggggcgtggtgggacctaccctcgggcgtagtgactactggggccagggaaccctggtcagcgtctcctcag

SEQ ID NO: 1787 - DNA, 364 bp, Homo sapiens
  source 1..364: mol_type = other DNA
caggtccagctggtgcaatctggggctgaggtgaagaagcctgggtcctcagtgaaggtctcctgcaaggcttctggagacaccttcaacagccgttccttcacctgggtgcgacaggcccctggacaagggcttgagtggatgggaggcatcatctccatgcttggtacaacaaattacgcacagaagttccagggcagagtcaccattaccacggacgaattgaagactacaacctacatggaattgagcagcctgagatctgaagacacggccgtttattactgtgcgagaggtgtcacgtatcactacacctcggggcttgactactggggccagggaacccaggtcaccgtctcctcag

SEQ ID NO: 1788 - DNA, 379 bp, Homo sapiens
  source 1..379: mol_type = other DNA
caggcgcagctggtggagtctgggggcggcttggtcgagcctggagggtccctgagactctcttgtgcagtgtctggattcaccttcactgactactacatgagttggatccgccaggctccagggaaggggctggagtgggtttcatacattagtcctagtgattatatcatatattatgtagactctgtgaagggccgattctccatctccagggacaacgccaagaactcactatatttgcaaatgaatggcctgagagccgaagacacggccgtatattactgtgcgagagtcccgcgggagcgctgtaagagtggcgattgctatccaatcttcgactcctggggccccggagtcctggtcaccgtctcctcag

SEQ ID NO: 1789 - DNA, 373 bp, Homo sapiens
  source 1..373: mol_type = other DNA
caggtgcagctggtgcagtctggggctgaggtgaagaagcctggggcctcagtgaaggtctcctgcaaggcttctggatacaccttcaccggctactatatgcactgggtgcgacaggcccctggacaagggcttgagtggatgggatggatcaaccctaacagtggtggcacaaactatgcacagaagtttcagggcagggtcaccatgaccagggacacgtccatcagcacagcctacatggagctgagcaggctgagatctgacgacacggccgtgtattactgtgcgagagaggcctcttgggtgggagctactactgaagatgcttttgatatctggggccaagggacaatggtcaccgtctcttcag

SEQ ID NO: 1790 - DNA, 370 bp, Homo sapiens
  source 1..370: mol_type = other DNA
caggtccagctggtgcagtctggggctgaggtgaagaagcctgggtcctcagtgaaggtctcctgcaaggcttctggaggcatcttcaacttctatgctatcaactgggtgcgacaggccccgggacaagggcttgagtgggtgggagggaccatccctatttttggtacaccgaagtacgcacagaagttccagggcagagtctcgattaccgcggaccaatccacgaccacagccttcatggagctgagcagcctgagatctgaggacgcggccgtttattactgtgcgaagtcgtcgtctcagggatatagcaccagctggtatattgactcctggggccaggggaccctggtctccgtctcctcag

SEQ ID NO: 1791 - DNA, 373 bp, Homo sapiens
  source 1..373: mol_type = other DNA
caggtccagctggtgcagtctggggctgagttgaagaagcctgggtcctcagtgaaggtctcctgcaaggcttctggaggcaccttcagcagctatagtttcatctgggtgcgacaggcccctggacaagggcttgagtggatgggaggcatcatcggtatgttcggtacaacaacctacgcacagaagttgcaggacagaatcacgattaccacggaggaattcacgggcacagcctacatggagttgaggagcctgagacctgaggacacggccgtgtattactgtgcgagatctgcgggttactatggttcggggaaggacaactggttcggcccctggggccagggaagtctggtcaccgtctcctcag

SEQ ID NO: 1792 - DNA, 358 bp, Homo sapiens
  source 1..358: mol_type = other DNA
caggtacagctgcaggagtcgggcccaggactggtgaagccttcggagaccctgtccctcacctgcactatctctggtgactccgtcagcagcggttactactggggctggatccggcagcccccagggaaggggctggagtggattgggaatatctatgctagtgggagttcctactacaacccgtccctcaagagtcgagtcaccatatccgcagacacgtccaagaaccagttgtccctgaagctgagctctgtgaccgccgcagacacggccgtgtattactgtgcgagaggcatcccgactacggtggtacgttttgatatctggggccaagggacaatggtcagcgtctctt

SEQ ID NO: 1793 - DNA, 370 bp, Homo sapiens
  source 1..370: mol_type = other DNA
gaggtgcagctgttggagtctgggggaggcttggttcagcctggggggtccctgagactctcctgtgcaacttctggattcacctttagcagctatggcatgagctgggtccgccaggctccagggaaggggctggagtgggtctcatatattagtggtagtggtattagcacatactacgcagactccgtgaagggccggttcaccatctccagagacaattccaagaacacgctgtatctgcaaatgaacagcctgagagccgaggactcggccacatattactgtgcaaaaccacggccgagcgggataccagtggctggaagacttgactactggggccagggaaccctggtcaccgtctcctcag

SEQ ID NO: 1794 - DNA, 370 bp, Homo sapiens
  source 1..370: mol_type = other DNA
caggtccagctggtgcagtctggggctgaggtgaagaagcctgggtcctcagtgaaggtctcctgcaaggcttctggaggcaccttcagcagctatggtatcagctgggtgcgacaggcccctggacaagggcttgagtggatgggagggatcatccctatctttggtacagcaacctacgcacagaagttccagggcagagtcacgattatcgcggacgaatccacgagcacagcctacatggagctgagcagcctgagatctgaggacacggccgtgtattactgtgcgcgttccggatacagtatagtgggaacgcctggtgcttttgatatttggggccaagggacaatggtcaccgtctcttcag

SEQ ID NO: 1795 - DNA, 370 bp, Homo sapiens
  source 1..370: mol_type = other DNA
gaggtgcagctgttggagtctgggggaggtttggtacagccgggggggtccctgagactctcctgtgcagcctctggattcacctttagcagctatgccatgacctgggtccgccaggctccagggaaggggctggaatgggtctcagttattagtgggactggtattagcacatactacgcagactccgtgaagggccggttcaccatctccagagacaattccaagaaaatgctgtatctgcaaatgaacagcctgagagccgaggacacggccgtatattactgtgcgaaagatcttcgggagctgccaccccctgcgggtgcttttgatctctggggccacgggacaagggtcaccgtctcttcag

SEQ ID NO: 1796 - DNA, 364 bp, Homo sapiens
  source 1..364: mol_type = other DNA
gaggtgcagctggtgcagtctggagcagaggtgaaaaagccgggggagtctctgaagatctcctgtaagggttctggatacaactttgccaactactggatcggctgggtgcgccagatgcccgggaaaggcctggagtggatgggcatcatttatcccggtgactctgataccaaatatagcccgtccttccaaggccaggtcaccttctcagccgacaggtccatctccacggccttcctgcagtggagcagcctgaaggcctcggacaccgccatgtattactgtgcgaaacggggaggtgtggaagtggctggtgcttttgatatctggggccaagggacaatggtcaccgtctcctcag

SEQ ID NO: 1797 - DNA, 373 bp, Homo sapiens
  source 1..373: mol_type = other DNA
gaggtgcagctgttggaatctgggggaggcttggtacagcctggggggtccctgagactctcctgtgcagcctccggattcacttttggcgcctatgccatggggtgggtccgccaggctccagggaaggggctggaatgggtctcaggtttcagcagtggtagtggtagcagcacatactacgtagactccgtgaagggccggttcactatctccagagacaagtccaagagcacgctctttctacaaatgaatagcctgagagtcgaggacacggccgtatattactgtgcgaaagaccgagggcaaatgccctacagctctggttcgttcgactactggggccagggaaccctggtcaccgtctcctcag

SEQ ID NO: 1798 - DNA, 382 bp, Homo sapiens
  source 1..382: mol_type = other DNA
caggtgcagctggtggagtctggggggggcgtggtccagcctgggaggtccctgagactctcctgtgcagcctctggattcaccttcagtaattacggcatgcactgggtccgccaggctccaggcaaggggctggagtgggtggcaattatatggtatgatggaagtcataaagactatggagactccgtgaagggccgtttcaccatctccagagacaattccaagaacacgctgtatctgcagatgaacagtctgagacctgaggacacggctatgtattactgtgtcaaagggccggatgatttcgacattgagaaaggttactcaattaattggtttgacccctggggccagggagccctggtcaccgtctcctcag

SEQ ID NO: 1799 - DNA, 363 bp, Homo sapiens
  source 1..363: mol_type = other DNA
caggtccagctggtgcagtctggggctgcggtgaagaagcctgggtcctcggtcaaggtctcctgcaaggcctctggagtcaccttcagcagctatgctatcagctgggtgcgacaggcccctggacaagggcttgagtggatgggagggatcagccctatgtttggtccagcaaagtacgcacagaagttccagggcagagtcacgattaccacggacgcatctacgagcacagcctacatggagatgagcagtctgagatctgaggacaccgccgtgtattactgtgcgagagattcgcattattatggttcggggaaatatatagagtggggccagggaaccctggtcaccgtctcctca

SEQ ID NO: 1800 - DNA, 379 bp, Homo sapiens
  source 1..379: mol_type = other DNA
gaggtgcagctggtggagtctgggggaggcttggtccagcctggggggtccctgagactctcctgtgcagcctctggattcacctttagtgcctattggatgagctgggtccgccaggctccagggaaggggctggaatgggtggccaacataaagcaagatggaagtgacaaatactttatggactctgtgaagggccgattcaccatctccagagacaacgccaagaactctctctatctgcagatgaacagcctcagagtcgaggacacggctgtgtattactgtgcgagagagttcgagatgtattgtcgtgctggtacttgctactgggcttatgactcctggggccagggaaccctggtcaccgtctcctcag

SEQ ID NO: 1801 - DNA, 370 bp, Homo sapiens
  source 1..370: mol_type = other DNA
gaggtgcagctggtggagtctgggggaggcttggtacaccctggggggtccctgagactctcctgtgtagcctctggattcaccttcagtacctatagcatgaactgggtccgccaggctccagggaaggggctggagtgggtttcatacattagcagtagtagtcttagcatatactacgcagactctgtgaagggccgattcaccatctccagagacaatgccaagaactcactgtatctgcaaatgaacagcctgagagccgaggacacggctgtctattactgtgcgagagtaggtggcgtactgggagcttccctcgggcgtaatgactactggggccagggaaccctggtcaccgtctcctcag

SEQ ID NO: 1802 - DNA, 372 bp, Homo sapiens
  source 1..372: mol_type = other DNA
caggtgcagctggtggagtctgggggaggcgtggtccagcctgggaggtccctgagactctcctgtgcagcctctggattcaccttcagtaactatggcatgcactgggtccgccaggctccaggcaaggggctggagtgggtggcagttatatggtatgatggaagaaataaatactatgcagactccgtgaagggccgattcaccatctccagagacaataccaagaacacgctgtttttgcaaatgaacagcctgagagctgaggacacggctatgtattactgtgcgaaagatcttgaggatacagctatcctgcactacttcggtatggacgtctggggccaagggaccacggtcaccgtctcctca

SEQ ID NO: 1803 - DNA, 367 bp, Homo sapiens
  source 1..367: mol_type = other DNA
caggtccagctggttcagtctggggctgaggtgaagaagcctgggtcctcagtgaaggtctcctgcaaggcttctggaggcatcttcagcagtcacgctatcaactgggtgcgacaggcccctggacaaggccttgagtggatgggagggatgatccctatctttggtgcaccaaactacgcacagaagttccagggcagagtcacgataaccacggacgaatccacgagcacagcctacatggagctgagcagcctgagatctgaggacacggccgtgtattattgtgcgagtccggtcttcagagggaaatgggattccttctttgacaactggggccagggaaccctggtcaccgtctcctcag

SEQ ID NO: 1804 - DNA, 391 bp, Homo sapiens
  source 1..391: mol_type = other DNA
caggctcagctggtgcagtctggagctgagatgaagaagcctggggcctcagtgaaggtctcctgcaagacttctggttacactttttcctactatggactcagttggatgcgacaggcccctggacaaggatttgagtgggtgggatggatcagtggttacaatggtgacacaagttattcacagaaactccagggcagagtcaccctgactacagacacatccacgggcgcagcgtacatggagttgaggagcctgagaccggacgacacggccgtttattactgtgcgcgagattgggttgggaaaatccatgggtcggggagtctttactccgacaggaactactttgacacctggggccagggaaccctggtcaccgtctcctcag

SEQ ID NO: 1805 - DNA, 370 bp, Homo sapiens
  source 1..370: mol_type = other DNA
caggtccacctggtgcagtctggggctgaggtgaggaaacctgggtcctcagtgaaggtctcctgcaaggcttctggaggcatcttcagcttctatgcaatcaactgggtgcgacaggcccctggacaagggcttgagtggatgggagggaccatccctatttttggtacaccaaagtacgcacagagtttccagggcagagtctcgattatcgcggacaagtccacgagcacagtctacatggagttgagcagcctgagatctgaggacacggccgtctattactgtgcgaaatcctcgtctcaggggtatagcagcagttggtatattgacgactggggccagggaaccctggtcaccgtctcctcag

SEQ ID NO: 1806 - DNA, 367 bp, Homo sapiens
  source 1..367: mol_type = other DNA
gaggtgcagctgttggaatctgggggaggcttggtacagcctgggggatccctgagactctcctgtgcaacctctggattcacctttagcaactatgccatgagttgggtccgccaggctccagggatggggctggagtgggtctcaggtattaggggtagtggtggcagcacactctacgcagcctccgtgaagggccggttcaccatctccagagacgaatccaagaaaatgctgtatctgcaaatgaacagcctgagagccgaggacacggccatatattactgtgcgaaagatcgaagggagggtagtgattattattcttatgactactggggccagggaaccctggtcaccgtctcctcag

SEQ ID NO: 1807 - DNA, 370 bp, Homo sapiens
  source 1..370: mol_type = other DNA
gaggtgcagctgctgcagtccggagcagaggtgaaaaagccgggggagtctctgaagatctcctgtaagacttccggatacagttttaccacccactggatcggctgggtgcgccagatgcccgggaaaggcctggagtggatgggggtcatctggcctggtgattctgatacaagatacaaccggtccttcgaaggccaggtcaccctctcagtcgacaactccatcagcaccgcctacctccagtggagtagcctgaaggcctcggacaccgccatgtattactgtgcgagattacgggagtacgctgatcactacgtgggacgctttgacttctggggccagggaaccctggtcaccgtctcctcag

SEQ ID NO: 1808 - DNA, 370 bp, Homo sapiens
  source 1..370: mol_type = other DNA
gaggtgcaactggtggagtctgggggaggcttggtacagccagggcggtccctgagactctcctgtacagcctctggattcagttttggtaattatggtatgagctggttccgccggactccagggaagggcctggagtgggtaggttacattagaagcaaagcgcaggatgggacagtcgaacgcgccgcgtctgtgaaagacagattcaccatctcaagggatgattccaaaagcatcgcctatctgcaaatgaacagcctgaaaaccgaggacacagccgtctattactgtagtagagtggacgtcaactggaatcatgatgcttttgatatctggggccaggggacaatggtcaccgtctcttcag

SEQ ID NO: 1809 - DNA, 367 bp, Homo sapiens
  source 1..367: mol_type = other DNA
gaggtgcaactgttggagtctgggggaggcttgctacagccgggggggtccctgagactctcctgtgcagtctctggattcacctttaccagctatgccatgagctgggtccgccaggctccagggaaggggctggagtgggtctcatctattagtggaagtggttttagtagatactacgcagactccgtgaagggccggttcaccatctccagagacaattccaagaacacgctgtatctgcagatgaacagtctgcgagccgaggacacggccatttattattgtgcaaaaggtcaatctacggtgccgtcaacggggtggttcgacccctggggccagggaaccctcgtcaccgtctcctcag

SEQ ID NO: 1810 - DNA, 361 bp, Homo sapiens
  source 1..361: mol_type = other DNA
caggtgcagctggtgcaatctggggctgaggtgaagaagcctggggcctcaatgaaggtctcctgcaaggcttctggatacaccttcacccgctactatgtgcactgggtgcgacaggcccctggacaagggcttgagtggatgggatggatggaccctaatagtggtggcacaaactctgcacagaactttcagggtagggtaaccatgaccagggacacgtccatcaacacggcctacatggaggtgagcgggctgagatctgacgacacgggcgtttattactgtgcgaggattacagtgggttatttcccatactttgacttctggggccagggaaccctggtcaccgtctcctcag

SEQ ID NO: 1811 - DNA, 370 bp, Homo sapiens
  source 1..370: mol_type = other DNA
gaggtgcagctggtggagtctgggggaggcctggtacagcctggggggtccctgagactctcctgtgtagcctctggattcaccttcagtagttatagcatgaactgggtccgccaggctccagggaaggggctggagtgggtttcatacattagtagcagtagtctaagcatatactacgcagactctgtgaagggccgattcaccatctccagagacaatggcaagaactcactgtatctgcaaatgaacagactgagaggcgaggagacggctgtgtattactgtgcgagagtaggaggcgtgctgggagctaccctcgggcgtaatgactactggggccagggaaccctggtcaccgtctcctcag

SEQ ID NO: 1812 - DNA, 370 bp, Homo sapiens
  source 1..370: mol_type = other DNA
caggtccacctggtgcagtctggggctgaggtgaagaagcctgggtcctcggtgaaggtctcctgcaagtcttctggaaacaccttccaaagtaattctttcagttgggtgcgacaggcccctggacaaggccttgagtggatgggaggaatcatcgctatctttcgaacagcaaagtactcagagaagttccagggcagagtcacgatcaccacggacgaattcacgaccacagcctacatggagctgagcagcctgagatctgaggacacggccgtctattactgtgtgagaggggatggctataacctcctccaaagtaatccggccctctcctggggccagggaaccctggtcatcgtctcctcag

SEQ ID NO: 1813 - DNA, 361 bp, Homo sapiens
  source 1..361: mol_type = other DNA
caggtgcagctggtggagtctgggggaggcgtggtccagcctgggaggtccctgagactctcctgtgcagcgtctggattcaccttcagtagctatggcatgcactgggtccgccaggctccaggcaaggggctggagtgggtggcagttatatggtatgatggaagtaataaatactatgcagactccgtgaagggccgattcaccatctccagagacaattccaagaacacgctgtatctgcaaatgaacagcctgagagccgaggacacggctgtgtattactgtgcgagagactatggttcggggagttccggttgcgactactggggccagggaaccctggtcaccgtctcctcag

SEQ ID NO: 1814 - DNA, 361 bp, Homo sapiens
  source 1..361: mol_type = other DNA
caggtgcagctgcaggagtcgggcccaggactggtgaagccatcggagaccctatccctcacctgcactgtctctggtgccgccatcaagacttaccactggaactggatccggcagcccccagggaagggactggagtggattgggtatgtccattacagtgggagcaccaactacagcccctccctcaagagtcgagtcaccatgtcaatagacacgtccaagaaccagttctccctgaatttgggctctgtgaccgctgcggacacggccgtgtatttctgtgcgagagatgccccgtatagtagttatgatcctttggatatctggggccaagggacaatggtcaccgtctcttcag

SEQ ID NO: 1815 - DNA, 368 bp, Homo sapiens
  source 1..368: mol_type = other DNA
ggtgcggctggaggagtctgggggaggcttggtccagccgggggggtccctgagactctcctgtgcagcctctggattcacatttagtaactactggatgggctgggtccgccaggctccagggaaggggctggagtgggtggccaacataaagcaagatggaagtgaggagaagtatgtggactctgtgaagggccgattcaccatctccagagacaacgccaagaactcactggatctgcaaatgaacagcctgcgagtcgacgacacggctgtatattactgtgcgagacttttcctatatgaggatagtggttatcgaaattttgactactggggccagggaaccctggtcatcgtctcctcag

SEQ ID NO: 1816 - DNA, 376 bp, Homo sapiens
  source 1..376: mol_type = other DNA
caggtgcagctgcaggagtcgggcccaggactggtgaagccttcacagaccctgtccctcacctgcactgtctctggtggctccatcagcagtggtggttactactggagctggatccgccagcacccagggaagggcctggagtggattgggtacatctattacagtgggagcaccgactacaacccgtccctcaagagtcgagttaccatatcagtagacacgtctaagaaccagttctccctgaagctgagctctgtgactgccgcggacacggccgtgtattactgtgcgagagtgttcgatgatagtagtggttattaccagtactactttgactactggggccagggaaccctggtcaccgtctcctcag

SEQ ID NO: 1817 - DNA, 367 bp, Homo sapiens
  source 1..367: mol_type = other DNA
caggtccagctggtgcagtctggggctgaggtgaagaagcctgggtcctcagtgaaggtctcctgcaaggcttctggaggcaccttcatcaactatgctatcaactgggtgcgacaggcccctggacaagggcttgagtggatgggagggatcatccctatctttggtaaaccaaacttcgcacagaatttccagggcagagtcacgattaccacggacgaatccacgagcacatcctacatggaactgagcagcctgagatctgaggacacggccatttattactgtgcgaatccggtgttcaaagggaagtgggatttcttctttgactcctggggccagggaaccctggtcaccgtctcctcag

SEQ ID NO: 1818 - DNA, 364 bp, Homo sapiens
  source 1..364: mol_type = other DNA
caggtccagctggtgcagtctggggctgaggtgaagaagcctgggtcctcggtgaaggtctcctgcaaggcttctggaggcatcttcaggagccatggtatcagctgggtgcgacagacccctggacaagggcttgagtggatgggcgggatcatcgctatctttggtacaacaaactacgcacagaagttccagggcagggtcacgattaccacggacgaatccacgctcacagtctacatggaactgaccagcctgaaatctgaggacacggccctttattactgtgcgaggcacgtgggatacaactttgggtcgccctttgactcctggggcccgggaaccctggtcaccgtctccccag

SEQ ID NO: 1819 - DNA, 370 bp, Homo sapiens
  source 1..370: mol_type = other DNA
caggtccagctggtacagtctggggctgagatgaagaagcctgggtcctcggtgaaggtctcctgcaaggcttctggaagcaccttcagcagctatggtatcagctgggtgcgacaggcccctggacaagggcttgagtggatgggagggatcatgcctatctttggtacagcaaagtacgcacagaacttccagggcagagtcacgattaccacggacgaatccacgagcacagcctacatggagctgagcagcctgagatctgaggacacggccgtgtattactgtgcggcgcccccgaccggtgtggtcagcagttggttctattttgactcctggggccagggaaccctggtcaccgtctcctcag

SEQ ID NO: 1820 - DNA, 385 bp, Homo sapiens
  source 1..385: mol_type = other DNA
caggtccaactggtgcagtctggggctgaggtgaagaagcctgggtcctcggtgaaggtctcctgcaagacttttggaggcaccttggcttctggaggcaccttcagcagctatgccatcaactggatccgacagtcccctggcctaggacttgagtggatgggggggatcatccctatctttggaacaacacactacgcacagaagttccagggcagagtcacgattaccatggaggaatcctcgagcacaggctacatggaagtgagcactctgacatttgaggacacggccgtgtattattgtgcgagagggaccggatacagtagtggctggttcgaaactgaccactggggccagggaaccctggtcaccgtctcctcag

SEQ ID NO: 1821 - DNA, 358 bp, Homo sapiens
  source 1..358: mol_type = other DNA
gaagtgcaactggtggagtcggggggaggcttggtacagcctggcaggtccctgagactctcctgtgcagcctctggattcacctttgatgatcacgccatgcactgggtccggcaagctccagggaagggcctggagtgggtctcgggtattagttgggatagtggcagtataggctatgcggagtccttcaagggccgattcaccatctccagagacaacgccaagaactccctgtatctgcaaatgaacagtctgagagctgaggacacggccatatattactgtggaaaggcctatggttcggggagttacaccagcgactggggccagggaaccctggtcaccgtctcatcag

SEQ ID NO: 1822 - DNA, 382 bp, Homo sapiens
  source 1..382: mol_type = other DNA
caggtgcagttggtggagtctgggggaggcgtggtccagcctgggaggtccctgagactctcctgtgcagcctctggattcatcttcagtaactatggcatgcactgggtccgccaggctccaggcaaggggctggagtgggtggcaattatatggtatgatggaagtcataaagactatgcagactccgtgcagggccgattcatcatctccagagacaattccaagaacacactatatctgcaaatgaacagcctgagacctgaggacacggctatgtattactgtgcgaaagggccggatgattacgatgttttgactggttactcaactaactggttcgacccctggggccagggaaccctggtcaccgtctcctcag

SEQ ID NO: 1823 - DNA, 351 bp, Homo sapiens
  source 1..351: mol_type = other DNA
gaggtgcagctggtgcagtctggagcagaggtgaaaaagccgggggagtctctgaagatctcctgtaagggttctggatacaccttttccagttactggatcgcctgggtgcgccagacgcccgggacaggcctggagtggatggggaacatctatcctcgtgactcagataccgcatatagcccgtcgtttgaaggccaggtcaccttctcagccgacacgtccatcaacaccgcctacttagaatggagcagcctgagggcctcggacaccgccatctattattgtgcgcgacggtcaactgacgatatggacgtctggggccaggggactagggtcaccgtctcctca

SEQ ID NO: 1824 - DNA, 381 bp, Homo sapiens
  source 1..381: mol_type = other DNA
caggtgcagctggtggagtctgggggaggcgtggtccagcctgggaggtccctgagactctcctgtgcagcctctggattcaccttcagtagctatgctatgcactgggtccgccaggctccaggcaaggggctagagtgggtggcagttatatcatatgatggaagtaataaatactacgcagactccgtgaagggccgattcaccatctccagagacaattccaagaacacgctgtatctgcaaatgaacagcctgagagctgaggacacggctgtgtattactgtgcgagatcaggtggatacagctatggtggggatgaactctactactacggtatggacgtctggggccaagggaccacggtcaccgtctcctca

SEQ ID NO: 1825 - DNA, 370 bp, Homo sapiens
  source 1..370: mol_type = other DNA
gaggtgcagctggtggagtcggggggaggcttggtacagccagggcggtccctgagactctcctgtacagcctctggattcaggtttggtgattatggtgtgagctggttccgccgggctccagggaagggcctggagtggataggcttcattagaagcaaagcacaagaagggacaacacaacgcgccgcgtctgtgaaagacagattcaccatctcaagagatgattccaaaagtatcgcctatctgcagatgaacagcctgaaaaccgaggacacagccgtctattactgtagtagagtggacgccaactggaatcatgatgcttttgatatctggggccaggggacaatggtcaccgtctcttcag

SEQ ID NO: 1826 - DNA, 367 bp, Homo sapiens
  source 1..367: mol_type = other DNA
gaggtggagctcttggagtccgggggaggcttggtacagccgggggggtccctgagactctcttgtgcagtctctggattcgcctttgccaactatggcatgagttgggtccgccaggctccagggaagcggctggagtgggtctcttttattagtggaagtggtttgagtacatattacgcagactccgtgaagggccggttcaccatctccagagacaattccaagaacacactatatctgcggatgaacagcctgcgagccgaggacacggccatatattattgtgcaaaaggtcaatctacggtgccgtcaacggggtggttcgacccctggggccagggaaccctcgtcgccgtctcctcag

SEQ ID NO: 1827 - DNA, 367 bp, Homo sapiens
  source 1..367: mol_type = other DNA
caggtccagctggtgcaatctggggctgaggtgagggagcctgggtcctcggtgaaggtctcctgcaaggcttctggaggcatcttcaacagctatgctatcagctgggtgcgacaggcccctggacaagggcttgagtggatgggaggaatcatcgctgtctttggaacaacaaactacgcacagagcttacagggcagagtcaccattaccacggacgcatccacgagcacagcctacatggaactgagcagcctgagatctgaggacacggccgtgtattactgtgcgagagcggtgaattactatggttcaaagacttattatgatttatggggccagggaaccctggtcaccgtctcctcag

SEQ ID NO: 1828 - DNA, 370 bp, Homo sapiens
  source 1..370: mol_type = other DNA
gaggtgcagctggtggaatctgggggaggcttggtccagcctggggggtccctgaggctctcctgtgcagcctctggtttcaccttcagtggctctgttatacactgggtccgccagacttccggcacagggctggagtgggttggccgtatttggaccgaagttaacagttacgcgacagcatacgctgcgtcggtgagcggcagattcaccatctccagagatgattcaatgaacacggcgtatctgcaaatgaacagcctgacaaccgaagacacggccgtatatttttgtactagggccacgggagtggctggaggggacctttttgacttttggggccagggaaccctggtcaccgtctcttcag

SEQ ID NO: 1829 - DNA, 367 bp, Homo sapiens
  source 1..367: mol_type = other DNA
gaggtgcagctgttggagtctgggggagccttggtgcagcctggggggtccctgagagtctcctgtgcagcctctggattcgtccttaggagctacaccatgacctgggtccgccaggctccagggaagggcctggagtgggtctcaagtattattgctggtggtgttagtacctactacgcagactctgtgaagggccggttcaccctctccagagacaattccaagagcaccctgtacctgcaaatgaacagcctgagacccgaggacacggccgtatattactgtgcgaaagactcccggcggtggctacaatcagctgcttttgactactggggccagggaaccctggtcaccgtctcctcag

SEQ ID NO: 1830 - DNA, 373 bp, Homo sapiens
  source 1..373: mol_type = other DNA
gaggtgcagttgttggagtctgggggcggcctggtacagcctggggggtccctgagactctcctgtgtagtctctgacttcacctttggcaggcatgccgtgagctgggtccgccaggctccagggaaggggctggagtgggtctcaggtttcagtggtagtggtggcagcacttactacacagactccgtgaagggccggttcaccatctccagagacaactccaagaacacggtgcatctgcaaatgaacagcctgagagtcgaggacacggccgtatattactgtgcgagccccgcaacacctcgaccagttgtttttgattattactttgactactgggggcagggaaccctggtcaccgtctcctcag

SEQ ID NO: 1831 - DNA, 352 bp, Homo sapiens
  source 1..352: mol_type = other DNA
caggttcagctggtgcagtctggagctgaggtgaagaagcctggggcctcagtgaaggtctcctgcaaggcttctggttacacctttaccagctatggtatcagctgggtgcgacaggcccctggacaagggcttgagtggatgggatggatcagcgcttacaatggtgacacaaactatgcacagaagctccagggcagagtcaccatgaccacagacacatccacgagcacagcctacatggagctgaggagcctgagatctgacgacacggccgtgtattactgtacttacggtgactacgcttactttgactactggggccagggaaccctggtcaccgtctcctcag

SEQ ID NO: 1832 - DNA, 364 bp, Homo sapiens
  source 1..364: mol_type = other DNA
caggtgcagctggtgcagtctggggctgaggtgaagaagcctggggcctcagtgaaggtctcctgcaaggcctctggatacaccttcaccggctactatatccactgggtgcgacaggcccctggacaagggtttgagtggatgggatggatcaaccctaacagtggtggcacaaactatgcacagaagtttcggggcagggtcaccgtgaccagggacacgtccataagcacagccttcatggagctgaacagtctgagatctgacgacacggccgtgtattactgtgcgagagctgccacccttatattgggagctaagttccagcactggggccagggcaccctggtcaccgtctcctcag

SEQ ID NO: 1833 - DNA, 370 bp, Homo sapiens
  source 1..370: mol_type = other DNA
gaggtgcagttgttggagtctgggggaggcttggtacagcctggggggtccctgagactctcctgtgtggcctctggattcacctttaccagctatgccatgagctgggtccgccaggctccagggaaggggctggagtggatctcaactattagtggtactggtcttagcacatactacgcagactccgtgaagggccggttcaccatttccagagacaattccaagaacacgctgtatgtgcaaatgaacagcctgagagccgaggacacggccatatattactgtgccaaagatcgcgtcataccagtacctggtacgggacactttgacttctggggccagggaaccctggtcaccgtctcctcag

SEQ ID NO: 1834 - DNA, 370 bp, Homo sapiens
  source 1..370: mol_type = other DNA
gaggtgcagctgttggagtctgggggaggcttggtgcagcctggggggtccctgaggctctcctgtgcagcttctggattcacctttagcggctatgtcatgagctgggtccgccaggctccagggaaggggctggagtgggtctcaagtattagtggtagtggtggtagcagatactacgcagactccgtgaagggccggttcaccatcgccagagacaacaccaagaacaagctgcatctgcaaatgaacagcctgagaggcgaggacaccgccgtatattactgtgcgaaagatctttacactagtataccaggggctggacggatgggctactggggccagggaaccctggtcaccgtctcctcag

SEQ ID NO: 1835 - DNA, 358 bp, Homo sapiens
  source 1..358: mol_type = other DNA
caggtgcagctgctggagtctgggggaggcgtggtccagcctgggaggtccctgagactctcctgtgcaccgtctggatttaccttcagtcatttcggcatgacctgggtccgccaggctccaggcaaggggctggagtgggtggcaggtatatggtatgatggaaggaatgcaaactatgcagactccgtgaagggccgattcaccatctccagagacagttccatggtgtttctacaaatgaacagcctgagagtcgaggacacggctctgtattactgtgcgcgagagtccggtatagtgggagataaggtctttgactactggggccagggaaccctggtcaccgtctcctcag

SEQ ID NO: 1836 - DNA, 364 bp, Homo sapiens
  source 1..364: mol_type = other DNA
caggtccagctggtgcagtctggggctgaggtgaagaagcctgggtcctcagtgaaggtctcctgcaaggcttctggaggcatcttcagaagctatgctatcacctgggtgcgacaggcccctggacaagggcttgagtggatgggagggatcatcgctatcttcggtacagcaaactacgcacagaagtttcagggcagagtcacgattaccacggacgaatccacgagcacagtctacatggagctgagcagcctgagatctgacgacacggccgtgtattattgtgcgaggaacagtggatacacctatacttcctccgttgactactggggccagggaaccctggtcaccgtctcctcag

SEQ ID NO: 1837 - DNA, 364 bp, Homo sapiens
  source 1..364: mol_type = other DNA
gaggtgcagctgatggagtctgggggaggcttagtacagccgggggggtccctgagactctcctgtgcagcctctggattcacctttagcagatatgtcatggggtgggtccgccaggctccagggaaggggctggagtgggtctcaactattagtgggactggtattagttcatactatggagactccgtgaagggccgcttcaccgtctccagagacaattccaagaacatggtctatctgcaaatgaacgggctgagagccgacgacacggccttatatttctgtgcgaaaggggggagccaccccacgtacaactggttcgacccctggggccagggaaccctggtctccgtctcctcag

SEQ ID NO: 1838 - DNA, 385 bp, Homo sapiens
  source 1..385: mol_type = other DNA
gaggtggagctgttggagtctgggggaggcttggtacagcctggggggtccctgagactctcctgtgcagcctctggattcttctttagcaactatgccatgagctgggtccgccaggctccagggaaggggctggagtgggtctcaggtattagtggtagtggagatagaacatattatgtagactccgtgaagggccggttcaccatctccagagacaattccaagaacacgctgtatctgcaaatgaacagcctgagagccgaggacacggccatatattactgtgcgaaggatcataatcgcgcgaacatagcagtggctccatggattgggtactactttgactactggggccagggaaccctggtcaccgtctcctcag

SEQ ID NO: 1839 - DNA, 370 bp, Homo sapiens
  source 1..370: mol_type = other DNA
caggtccagctggtgcagtctggggctgaggtgaagaagcctgggtcctcagtgaaggtctcctgcagtgtttctggagtcaccttcagcagcaatgctatcatctgggtgcgacaggcccctggacaagggctcgagtggatgggagggatcacccctatctttggcacgacaaactacgcacagaagttccagggcagagtcacgattaccacggacaaatccacgaccacagcctacatggagctgagcagcctgacatctgaggacacggccgtgtattactgtgcgatgaactcacactatactttgacactggggaactggttcgacccctggggccagggaaccctggtcaccgtctcctcag

SEQ ID NO: 1840 - DNA, 365 bp, Homo sapiens
  source 1..365: mol_type = other DNA
ggttcagttggtggaggctgggggaggcgtggtccagcctgggaggtccctgagactctcctgtgcagcctctggattcaccttcagtaactatgccatgcactgggtccgccaggctccaggcaagggcctggagtgggtggcagttatatcatatgacggaaccaataaatactacgcagagtccgttaagggccgattcaccatctccagagacaattccaagaacacgctgcatctgcaaatgaacagcctgaaaattaaggacacgggtctatattactgtgcgagagatgaaggggcagcagctggtaacggggaatttgactactggggccagggaaccctggtcaccgtctactcag

SEQ ID NO: 1841 - DNA, 379 bp, Homo sapiens
  source 1..379: mol_type = other DNA
gaggtacagctggtggagtctgggggaggcttggtccagcctggggggtccctgagactctcctgtgcagcctctggattcacctttagtagttattggatgagctgggtccgccagcctccagggaaggggctggagtgggtggccgacataaaggaagatggaagtaaggtatactatgtggactctgtgaagggccggttcaccatctccagagacaacgccaagaactcactgtatctgcaaatgaacagcctgagagccgaggacacggctgtgtattactgtgcgagagataataacctatattatgatggtaatacttattactggggctttgaccagtggggccagggaaccctgctcaccgtctccgcag

SEQ ID NO: 1842 - DNA, 367 bp, Homo sapiens
  source 1..367: mol_type = other DNA
caggtgcagctgcaggagtcgggcccaggactggtgcagccctcggagaccctgtccctcacgtgcactgtctctggtggcgccatcggtgattactactggaattggatccgccagcccccagggaggggactggagtggattggatatatcttttccagtgcgaacaccatgtacaacccgtccctcaggagtcgagtctccatatcattagacacgtcaaagaggcagttctccctgagactgagctctgtgaccgctgcggacacggccatctattattgtgcgagatcgaagggggcctacggtgatcacgctgagtacctccagtattggggccagggcaccctggtcactgtctcctcag

SEQ ID NO: 1843 - DNA, 364 bp, Homo sapiens
  source 1..364: mol_type = other DNA
gaggtacaactattggagtctgggggaggcttggtacaccggggggggtccctgagactctcctgttcagcctctggattcaccttcagcagctacgccatgagctgggtccgccaggcgccagggaaggggctggagtgggtcgcgtctattagtggtagtggtattagcaaatactacgcagactccgtgaagggccgcttcaccatctccagagacaattccaagtacaccctctatgtgcaaatgaacggcctgagaggcgaggacacggccacatattactgtgcgaaaggtcgaggtcaccccactgaaggctggttcgacccctggggccagggaaccctggtcaccgtctcctcag

SEQ ID NO: 1844 - DNA, 368 bp, Homo sapiens
  source 1..368: mol_type = other DNA
caggtccagctggtgcagtctggggctgaggtgaagaagcctgggtcctcggtgaaggtctcctgcaaggcttctggaaacaccttcaaaagtaattctttcagttgggtgcgacaggcccctggacaaggccttgagtggttgggagggatcatcgccatctttcgaacagcaaagtatgcagagaggttccagggcagagtcacaatcaccacggacgaattcacgaccacagcctacatggagatgaccagcctgacatctgaggacacggccatgtattattgtgtgagaggggatggctatcacctcctccagtctaatccggccctctcctggggccagggaacccaggtcatcgtctcctc

SEQ ID NO: 1845 - DNA, 373 bp, Homo sapiens
  source 1..373: mol_type = other DNA
caggtgcagctgcaggagtcgggcccaggactggtgaagccttcacagaccctgtccctcacctgctctgtctctggtggctccatcagcagtggtacttactactggagctggatccggcagcccgccgggaagggactggagtggattgggcttatctacaccagtgggagcaccaactacaacccctccctcaagagtcgagtcaccatatcagtagacacgtccaagaaccagttctccctgaagctgagctctgtgaccgccgcagacacggccgtgtattactgtgcgagaggaacccccgacgatattttgactggttaccactgtgactactggggccagggaaccctggtcaccgtctcctcag

SEQ ID NO: 1846 - DNA, 388 bp, Homo sapiens
  source 1..388: mol_type = other DNA
caggtgcagctgcaggagtcgggcccgggactggtgaggccttcacagaccctgtccctcacctgcactgtctccggtgactccatcaccagtggtacttactcctggggcagtggtagttactcctggagctggatccggcagcccgccggtaagggactggagtggattgggcgtatctataccagcgggagcaccaagtacaacccctccctcaagagtcgagtctccatctcactagacacgtctaagaaccagttctccctgaagctgacctctgtgaccgccgcagacacggccatttattattgtgggagaggcgtgggggtgatgggatctattccgattgacccctggggccagggaaccctggtcaccgtctcctcag

SEQ ID NO: 1847 - DNA, 371 bp, Homo sapiens
  source 1..371: mol_type = other DNA
caggtccagctggtgcagtctggggctgaggtgaagaagcctgggtcctcagtgagagtctcctgcaaggcttctggaggcaccttcagaagtacttctatcagctgggtgcgacaggcccctggacaaggccttgagtggatgggagggatcaacgctatctttgggacaccaaattacgcacagaagttccagggcagagtcatcattaccacggacgaatccacggccacagccaacctggagctgaccagcctgagatctgaggacacggccgtgtattattgtgcgagagggggagaccagctgctgaggggctactacttcgttatggacgtctggggccaaggcaccacggtcaccgtctcctc

SEQ ID NO: 1848 - DNA, 361 bp, Homo sapiens
  source 1..361: mol_type = other DNA
caggtccacctggtgcagtctggggctgaggtgaagaagcctgggtcctcagtgaaggtctcctgccaggcttctggaggcaccttcagcagctatgctatcagttgggtgcgacaggcccctggacaggggcttgagtgggtgggagggatcatcggtatgtttgggacaccaaactacggacagaagttccagggcagagtcacgattaccgcggacgaaatcactagcacagcctacatggaactgcgcagcctgacatctgaagacacggccgtgtattactgtgcgagaggcatttattactatctatcctacctcgcctactggggccagggaaccctagtcaccgtctcctcag

SEQ ID NO: 1849 - DNA, 375 bp, Homo sapiens
  source 1..375: mol_type = other DNA
caggtccacctggtgcagtctggggctgaagtgaagaagcctgggtcctcagtgaaggtctcctgcaaggcttctggaggcaccttcagcacctatggtatcacctgggtgcgacaggcccctggacaagggcttgagtggatgggagggatcatccctatctttgatacagcaaagtatgcacagaagttccagggcagagtcacgataacagcggacagatccacgaacacagcctccatggagctgagcggcctgagatctgaggacacggccatgtatttctgtgcgagaggtcgtatagctggaaccaaatcggcccactactactacggtatggacgtctggggccaagggaccacggtcaccgtctcc

SEQ ID NO: 1850 - DNA, 391 bp, Homo sapiens
  source 1..391: mol_type = other DNA
caggttcagctggtgcagtctgcacctgagatgaagaagcctggggcctcagtgaaggtctcctgcaagacttctggttacactttttcctactatggactcagttggctgcgacaggcccctggacaaggatttgaatgggtgggatggatcagcggtcacaatggtgacacaagttattcacacaaactccagggcagagtcaccctgactacagacacatccacgggcgcagcgtatatggagttgaggagcctgagaccggacgacacggccgtgtattactgtgcgcgagattgggttgggaaaatccatgggtcggggactctttactccgacaggaactactttgacacctggggccagggaaccctggtcaccgtctcctcag

SEQ ID NO: 1851 - DNA, 391 bp, Homo sapiens
  source 1..391: mol_type = other DNA
caggttcagctggtgcagtctggagctgagatgaagaagcctggggcctcagtgaaggtctcctgcaagacttctggttacactttttcttactatggactcagttggatgcgacaggcccctggacaaggatttgagtgggtgggatggatcagcggttacaatggtgacacaagttattcacagaaactccagggcagagtcaccctgactacagacacatccacgggcgcagcgtacatggaattgcggagcctgagaccggacgacacggccgtgtattactgtgcgcgagattgggttgggaaaatccatggatcggggactctttactccgacaggaactactttgacacttggggccagggaaccctggtcaccgtctcctcag

SEQ ID NO: 1852 - DNA, 372 bp, Homo sapiens
  source 1..372: mol_type = other DNA
caggtgcagctgcaggagtcgggcccaggactggtgaagccttcacagaccctgtccctcacctgcagtgtctctggtgactccatcagcagtggtcattaccactggagttggatccgccagcacccagggaagggcctggagtggattgggtacatctattacagtgggagctccgactacaacccgtccctcaagagtcgagttaccatatcagtagacacgtctaagaaccagttctccctgaagctgaggtctgtgactgccgcggacacggccgtctattactgtgcgagaatctgtggtggcagatgcgactactacaagggtctggacgtctggggccaagggactacggtcaccgtctcctca

SEQ ID NO: 1853 - DNA, 373 bp, Homo sapiens
  source 1..373: mol_type = other DNA
caggtccagctggtgcagtctggggctgaggtgaagaagcctgggtcctcggtgaaggtctcctgcaaggcttctggaggcatcttcaggaattatgctatcagttgggtgcgacaggcccccggacaagggcttgagtggatgggagggatcatcgctgtctttggtacagcaaaccacgcacagaagttccagggcagagtcacgattaccacggacgaatccacgagcacagcctacatggagctgagcagcctgagatctgaggacacggccctgtattactgtgcgacatcgagtggttaccacctgctttcgagccccttaactttccagcgctggggccagggcaccctggtcaccgtctcctcag

SEQ ID NO: 1854 - DNA, 376 bp, Homo sapiens
  source 1..376: mol_type = other DNA
gaggtgcagctgatggagtctgggggaggttgggtacagcctggagggtccctgagactctcctgtgcggcctctggattcaccttcagtgattatgaaatgcattgggtccgccaggctccagggaaggggctggagtgggtttcatccattaggagttatgctggtttcatatcctacacagactctgtgaagggccgattcaccatttccagagacaacgccaagaacttactgtttctgcaaatgaatagcctgagaagcgaggacacggctgtttattactgtgtgagaggggccatttgggaagatcttagtggttactatactcattttgattactggggccagggaaccctggtctccgtctcctcag

SEQ ID NO: 1855 - DNA, 393 bp, Homo sapiens
  source 1..393: mol_type = other DNA
caggttcaactggtgcagtctggagctgaggtgaagaagcctggggcctcactgagagtctcctgcaaggcttctggttacacctctaccagttatggtattaattgggtgcgacaggcccctggacaagggcttgagtggatgggatggatcagcgtttacaatggtgacacaaagtttccacagaaacttcagggcagagtctccatgaccacagacacatccacgagcacagcctacatggaactgaggagcctgagatctgaggacacggccatgtattactgtgcgagcccccaagagacggaaggatattgtagtggtgataattgctaccaggactactacggtatggacgtctggggccaagggaccacggtcaccgtctcctca

SEQ ID NO: 1856 - DNA, 371 bp, Homo sapiens
  source 1..371: mol_type = other DNA
gaggtgcagttgttggaatctgggggcggcttggtacagcctggggggtccctgagactctcctgtgcagcctctgggttcacctttaccaactatgccatgagttgggtccgccagcctccaggtatggggctggagtgggtctcaggtattagggctactggtagtggcggcagcacactctatgcagactccgtgaagggccgcttcaccatctccagagacgaatccaaaaagactctgtatctgcaaatgaacaacctgagagccgaggacacggccgtttatttctgtgcgaaagatcgaagggaggctactgattattattcttatgactcctggggccagggaaccctggtcaccgtctcctc

SEQ ID NO: 1857 - DNA, 373 bp, Homo sapiens
  source 1..373: mol_type = other DNA
gaagtgcagctggtggagtctgggggagtcgtggtacagcctggggggtccctgagactctcctgtgcagcctctggattcacctttgatgattataccatgcactgggtccgtcaagctccggggaagggtctggagtgggtctctcttattagttgggatggtggtagcacatactatgcagactctgtgaagggccgattcaccatctccagagacaacagcaaaaactccctgtatctgcaaatgaacagtctgagaactgaggacaccgccttgtattactgtgcaaaaggaggttcggggagttattataacgtattgggctactttgactactggggccagggaaccctggtcaccgtctcctcag

SEQ ID NO: 1858 - DNA, 358 bp, Homo sapiens
  source 1..358: mol_type = other DNA
caggtgcagctgctggagtctgggggaggcgtggtccagcctgggaggtccctgagactctcctgtgcagcgtctggattcaccttcagtaattatggcatgaactgggtccgccaggctccaggcaaggggctggagtgggtggcaggtatatggtatgatggaaggaacaaatactatgcagactccgtgaagggccgattcaccatctccagagacagttccatgctgtttctgcaaatgaacagcctgagagccgaggacacggctctgtactactgtgcgcgagagtccggtatagtgggagataaggtctttgactactggggccagggaaccctggtcaccgtctcctcag

SEQ ID NO: 1859 - DNA, 373 bp, Homo sapiens
  source 1..373: mol_type = other DNA
gaggtgcaattgttggagtcggggggaggcttggtacagcctggggggtccctgagactctcctgtgcagcctctggattcacctttagcacctatgccatgacctgggtccgccaggctccagggaaggggctggagtgggtctcaactattagtggaagtggtggtagcacatactacgcagactccgtgaagggccggttcaccatctccagagacaattccaagaacacgctgtatctgcaaatgaggagcctgagagtcgaggacacggccgtatattactgtgcgtcccccggaagtttgagggagttatccttatacggtcggatcgcccactggggccagggaaccctggtcaccgtctcctcag

SEQ ID NO: 1860 - DNA, 379 bp, Homo sapiens
  source 1..379: mol_type = other DNA
gaggtgcaactggtggcgactggaggaggcctgatccagccgggggggtccctgagactctcctgtgaagcctctgggttcaccgtcagtgacaactacatgagctgggtccgccaggctccagggaaggggctggagtgggtctcaattctttatagaggtggtaagacatactacgcagactccgtgaagggccgattcaccatctccagcgacaattccaagaacacactgtatcttcaaatgaacagcctgagagccgacgacacggccgtctatttctgtgcgagagaagttcgttttggtgacgacattttgactggttattccgatgcttttgatttctggggccaagggacaatggtcaccgtctctgcag

SEQ ID NO: 1861 - DNA, 358 bp, Homo sapiens
  source 1..358: mol_type = other DNA
gaggtgcacctgttggaatctgggggaggcttggtacagcctggggggtccctgagactctcctgtgcagcctctggattcacctttagcagctatgccatgggctgggtccgccaggctccagggaaggggctggagtgggtctcagatattattactggtggtagaacatactacgcagactccgtgaagggccggttcaccatctccagagacaattccaaggacacgctatatctgcaaatgaacagcctgagagccgacgacacggccttatattcctgtgcgaaaagtcgcggcgccagggtgggtgcttttgatatctggggccaagggacaatggtcaccgtctcttcag

SEQ ID NO: 1862 - DNA, 361 bp, Homo sapiens
  source 1..361: mol_type = other DNA
cagattcagctggtgcagtctggagctgaggtgaagaaacctggggcctcagtgaaggtctcctgcaaggcttctggttacacctttaaaaactatggtatcagctgggtgcgacaggcccctggacaagggcttgagtggatgggatggatcagcggtcacaatggtgacacaagctatgcacagaagttccagggcagagtcaccatgaccacagacacatccgcgagcacagcctacatggacctgaggagcctgagatctgacgacacggccgtctattactgtgcgagagacggagggatctacggagactcccttgactactggggccagggagccctggtcaccgtctcctcag

SEQ ID NO: 1863 - DNA, 343 bp, Homo sapiens
  source 1..343: mol_type = other DNA
gaggtgcagctggtggggtctgggggaggcttggtacagcctggagggtccctgagagtctcctgtgcagcctctggattcatttttagtaattatgagatgaactgggtccgccagggtccagggaaggggctggagtggatttcatatattagtactagtggtattaccaaatactacgcagactctgtgaagggccgcttcaccatctccagagacaacgccaagagctcagtctatctgcaaatgaacaacctgaaagtcgaggacacgggtctttatttctgtgcgagggccgggtctgacctctggggccagggaatgctggtcactgtctcctcag

SEQ ID NO: 1864 - DNA, 387 bp, Homo sapiens
  source 1..387: mol_type = other DNA
caggtccagctggtgcagtctggggctgaggtgaagaagcctgggtcctcagtgaaggtctcctgcaaggcttctggagacaccttcatcacatatactatcagctgggtgcgacaggcccctggacaagggcttgagtggatgggagggatcctccctatctttaatacagcgagctacgcacagaagttccagggcagagtcacgattaccagggacgaatccacgagcacagcctacatggagctgagcagcctgagatctgaggacacggccgtgtattactgtgcgaggccgcccccccgtatggtgggacttcaacagagcccctactattactacggtatgggcgtctggggccaagggaccacggtcaccgtctcctca

SEQ ID NO: 1865 - DNA, 361 bp, Homo sapiens
  source 1..361: mol_type = other DNA
caggtgcagctggtggagtctgggggcggcgtggtccagcctgggaagtccctgagcctctcctgcgcagcgtctgggttcactttcaggtcttatgcaatgcactgggtccgccaggctccaggcaaggggctggagtgggtggctgtcatttggtctgatggaaccactaaatactatgcggactccgtgaagggccgattcaccatctccagagacaattcgcagaacacggtgtatctgaagatgaacagcctgagagccgaggacacggctgtgtattattgtgcgaaagagattttatacggtggttattattatgactattggggcctgggaaccctggtcaccgtctcctcag

SEQ ID NO: 1866 - DNA, 370 bp, Homo sapiens
  source 1..370: mol_type = other DNA
gaggtacaactgctccagtctggagccgaggtgaaaaagccgggggagtctctgaagatctcctgtaagacttctggatacgattttaccaagtattggatcggctgggtgcgccagatgcccgggaaaggcctggagtggatgggggtcatctggcctggtgactctgataccagatacagtccgtccttcgaaggccaggtcagcatctcagccgacaagttcatcagtaccgcttacctgcagtggagtgggctgaaggcctcggacaccgccatgtattactgtgcgagatttcgggaatatgcagatcactatgtggggcgatttgacttctggggccagggaaccctggtcaccgtctcctcag

SEQ ID NO: 1867 - DNA, 370 bp, Homo sapiens
  source 1..370: mol_type = other DNA
gaggtgcagctggtggagtctgggggaggcctggtcaagcctggggggtccctgagactctcctgtgcagcctctggattcaccttcagtacatatagcatgaactgggtccgccaggctccagggaaggggcttgagtgggtctcatccattagtagtactagtaagtacaactactacgcagactcaatgaagggccgattcaccatctccagagacaacgccaagaactcgctgtatctgcacatgaacagcctgagagccgaggacacggctgtctattactgtgcgagaggggagctgccaggggactcagtgggctactggttcgactcctggggccagggaaccctggtcaccgtctcctcag

SEQ ID NO: 1868 - DNA, 373 bp, Homo sapiens
  source 1..373: mol_type = other DNA
caggtgcagttggtgcagtctggggctgacgtgaagaggcctggggcctcagtgagggtctcctgcaaggcctctggatacaccttcgtcggctattatttacactgggtgcggcagggccctggacaagggcttgagtggatgggacggataaaccctaacaatggtggcacatactatgcacagacctttcagggcagggtcatcatgaccagcgacacgtccgtcaacacggcctacatggagctgagcaccctgacatctgacgatacggccgtatattattgtgtgagagaagttaggataaatggcttgcccccacagttctgctttgactcctggggccagggaaccctggtcaccgtctcctcag

SEQ ID NO: 1869 - DNA, 370 bp, Homo sapiens
  source 1..370: mol_type = other DNA
gaggtgcaactggtggactctgggggaggcttggtacagcctggggggtccctgagaatatcctgtgcagcctctggattcacctttagcagctatgccatgagctgggtccgacagtctccagggaaggggctggagtgggtctcaagtattagtggtagtggtggttccacatactacgcagactccgtgaagggccggttcaccatctccagaggcacttccaagtacgccctgtatctgcaaatgaacagcctgagagccgaggacacggccgtttattactgtgcgaagtcgaagagtcgaagtgtaccagtgtctggatactttgactactggggccagggaaccctggtcaccgtctcctcag

SEQ ID NO: 1870 - DNA, 388 bp, Homo sapiens
  source 1..388: mol_type = other DNA
caggtgcagctggtggagtctgggggaggcgtggtccagcctgggaggtccctgagactctcctgtgcagcctctggattcaccttcagtagttatgttatgtactgggtccgccaggctccaggcaaggggctggagtgggtggcagttatatcatatgatggaagtaataaatactacgcagactccgtgaagggccgattcaccatctccagagacaattccaagaacacgctgtatctgcaaatgaacagcctgagagctgaggacacggctgtgtattactgtgcgagaccccaagcctacctaggatattgtagtggtgttaggtgcccccagtactactttgactactggggccagggaaccctggtcaccgtctcctcag

SEQ ID NO: 1871 - DNA, 369 bp, Homo sapiens
  source 1..369: mol_type = other DNA
cagctgcagctgcaggagtcgggcccaggactggtgaagccttcggagaccctgtccctcacctgcactgtctctggtggctccatcagcagtggtagttactactggggctggatccgccagcccccagggaaggggctggagtggattcagactatccattatagtgggagcacctactacaacccgtccctcaagagtcgagtcaccttttcagtagacacgtccaagaaccagttctccctgaggctgagctctgtgaccgccgcggacacggccgtgtattactgtgcgagagtagttgtcagatactactactactactacatggacgtctggggcaaagggaccacggtcaccgtctcctca

SEQ ID NO: 1872 - DNA, 346 bp, Homo sapiens
  source 1..346: mol_type = other DNA
caggtgcagttggtgcagtctggggctgaggtgaagaagcctggggccgcagtgaaggtttcctgcaaggcctcgagatacaccttctccagttactattttcagtgggtgcgacaggcccctggacaaggtcttgagtggatgggagtaatcaatcctagtggcggtggcacaaactacgcacagaagttccagggcagagtcactatgaccagggacacgtccacgaccacagtacacatggttctgagcagcctgagatctgaggacacggccatgtattattgtgcgagtggcccgtgggggaatgtctggggccaaggaacaatggtcactgtctcttcag

SEQ ID NO: 1873 - DNA, 388 bp, Homo sapiens
  source 1..388: mol_type = other DNA
gaggtgcagctggtggagtctgggggaggcttggtccagcctggggagtccctgagactctcctgtgcagcctctggattcaccttcagtagatatgctatgcactgggtccgccaggctccagggaagggactggaatatgtttcaactatcagtagtaatgggggtaccacatattatgcaaactccgtgagcggcagattcaccatctccagagacaattccaagaatacgctgtttcttcaaatgggcagcctgagagctgaggacatggctgtgtactactgtgcgagagatgggggggcgacttatatggttcggagagacattctcagggatgatgcttttgatgtctggggccaagggacaacggtcaccgtcttttcag

SEQ ID NO: 1874 - DNA, 352 bp, Homo sapiens
  source 1..352: mol_type = other DNA
cagctgcacctgcagctgtcgggcccaagactggtgaggccttcggagaccctgtccctcacctgcactgtctctggtggctccgtcggcagtacttcttactactgggcctggatccgccagcccccagggaaggggctggagtggattgggactatctattatagtgggaccacatactacagcccgtccctcaagcgtcgagtctccatgtccgtagacacatcgaagaaccaattctccctgaagctgacctctgtgaccgccgcagacacggctctatattactgtgcgacagtcggaacggtgacgagattctggggccagggtgccctggtcaccgtctcctcag

SEQ ID NO: 1875 - DNA, 358 bp, Homo sapiens
  source 1..358: mol_type = other DNA
caggtgcagctgcaggagtcgggcccaggcctggtgaagccttcggagaccctgtccctcacctgcactgtctctggtgactccatcagtcgtgactactggagttggatccggcagcccccagggaagggactggagtggattgggaacacccatcgcagtgggagcaccaatgacaactcctccctcaagagtcgggtcaccatatcagtcgacacctctaagaatcaggttttcctgagggtgaggtctgtgaccgccgctgacacggccgtatattactgtgccaaacatccgtttcgcatacgtctgggtcttgagaactggggccaggggacaatggtcaccgtctctgcag

SEQ ID NO: 1876 - DNA, 355 bp, Homo sapiens
  source 1..355: mol_type = other DNA
caggtgcagctgcaggagtcgggcccaggagtggtgaagccttcacagaccctgtccctcacgtgcactgtctctggtggctccatgagcaataaaagttactactggaactggatccggcagtccgccgggaagggactggagtggattgggcgtatgtatatcagtgggagcaccaactacaacccctccctcaagagtcgagtcaccatatcagtagacacgtccaagaatcagttctccctgaaggtgaggtctgtgaccgccgcagacacggccgtttattactgtgcgagaggcgaatataggggtattgactactggggccagggaaccctggtcaccgtctcctcag

SEQ ID NO: 1877 - DNA, 379 bp, Homo sapiens
  source 1..379: mol_type = other DNA
gaggtgcagctggtgcagtctggagcagaggtgaaaaagccgggggagtctctgaagatctcctgtaagggttctggatacaactttaccaactactggatcggctgggtgcgccagatgcccgggaaaggcctggagtggatggggatcatctatcctggtgactctgataccagatacagcccgtccttccaaggccaggtcaccatctcagccgacaagtccatcagcaccgcctacctgcagtggggcagcctgaaggcctcggacaccgccatatattattgtgtgagacttgatcgatattgtactaagaccagctgcttcggcagctggttcgacccctggggccagggaacccaggtcaccgtctcctcag

SEQ ID NO: 1878 - DNA, 382 bp, Homo sapiens
  source 1..382: mol_type = other DNA
caggtgcaactacaacagtggggcgcaggactgttgaagccttcggagaccctgtccctcacctgcgctttctatggtgggcccttcagtacttactactggagctggatccgccagcccccaggcaaggggctggagtggattggggaaatcaatcacagtggaatcaccaattacagcccggccctcaagagtcgagtcatcatatcactcgacacgtccaagaatcaattctccctgaccctcaattctgtgaccgccgcggacacggctgtgtattactgtgcgacccaaatcccccaactgcattcgtgtggtggtgactgctatgcggccccctttgactactggggccagggaaccccggtcaccgtctcctcag

SEQ ID NO: 1879 - DNA, 358 bp, Homo sapiens
  source 1..358: mol_type = other DNA
caggtgcagctacagcagtggggcgcaggactgttgaagccttcggagaccctgtccctcacctgcgctgtctatggtgggtccttcagtggttactactggagctggatccgccagcccccagggaaggggctggagtggattggggaaatcaatcatagcggaagcaccaccaacaacaacgcgtccctcaagagtcgagtcaccatatcagtagacacgtccaagaaccagttctccctgaagctgagctctgtgaccgccgcagacacggctgtgtattactgtgcgagaaggtcccggccaggccgacgttttgactactggggccagggaaccctggtcaccgtctcctcag

SEQ ID NO: 1880 - DNA, 363 bp, Homo sapiens
  source 1..363: mol_type = other DNA
gaggtgcagctgttggagtctgggggaggcttggtacagcctggggggtccctgagactctcctgtgcagcctctggagtcatctttagcagctataccatgaactgggtccgccaggctccagggaaggggctggagtgggtctcatcaattagtggcagtggtggtagcacatactacgcagactccgtgaagggacggttcatcatctccagagacccttccaagaacacgctgtctctgcaaatgaacagcctgagagccgaggacacggccgtatattactgtgccaaagggggacgagttccttggcttgggtacatggacgtctggggcagagggaccacggtcatcgtctcctca

SEQ ID NO: 1881 - DNA, 385 bp, Homo sapiens
  source 1..385: mol_type = other DNA
caggtgcagctggtgcaatctggggctgaggtgaagaagcctggggcctcagtgaaggtctcctgcaaggcttctggatacaccttcagcaataatgatatcaactgggtgcgacaggcccctgggcaagggcttgagtggatgggatggatgaaccctcagagaggcaacacaggccatgcacagaagttccagggcagagtcaccttgaccacgaacatctccattagcacagcctacatggagctgaggagcctgagatctgaggacacggccgtatattactgtgcgagagcgacgaggggatttacgtttcaggggacgctgggtaggaagtactactttgactattggggccagggaagcctggtcaccgtctcctcag

SEQ ID NO: 1882 - DNA, 375 bp, Homo sapiens
  source 1..375: mol_type = other DNA
gaggtgcaattggtggagtctgggggaggcttggtccagcctggggggtccctaagactttcctgtgtagcctctggattcacctttaggagtcattggatgagctgggtccgccaggctccaggggaggggctggagtgggtggccaacataaaacaagatggaagtgagaaaaactatgtggactctgtgaagggccgattcaccatctccagagacaacaccaagaactcattgtatctgcaaattaaaagcctgagagccgaggacacggctgtctatttctgtgcgagatctatgaacgagctggttcccttgtctttctactactacatggacgtctggggcaaagggaccacggtcatcgtctcctca

SEQ ID NO: 1883 - DNA, 370 bp, Homo sapiens
  source 1..370: mol_type = other DNA
caggttcagctggtgcagtctggagctgaggtgaagaagcctggggcctcagtgaaggtctcctgcaaggcctctggttacacgtttagcagctatggtatcagctgggtgcgacaggcccctggacaagggcttgagtggatggcatgggtcagcggttacaatggtaacaaaaagtttgcacagaagatccagggcagagtcaccctgaccacagacacatccacgaacacggcctacttggaattgaggagcctgagatctgacgacacggccgtctatttttgtgcgagggacaacggctttatgagcagctggtacatagggtctgactactggggccagggaaccctggtcaccgtctcctcag

SEQ ID NO: 1884 - DNA, 370 bp, Homo sapiens
  source 1..370: mol_type = other DNA
caggtccagctggtggagtctgggggaggcgtggtccagcctgggaagtccctgacactctcctgtgcagcgtctggattcaccttcagtaattatggcatgcactgggtccgccaggctccaggcaaggggctggagtgggtggcaattatatcatacgatggaagcaataaattctacgcagactccgtgaagggccgattcaccatcgccagagacaattccaagaacacgctgtatctgcaagtgaatagcctgaaaactgaagacacggctgtctactactgtgcgagagaacgtataccctttgataatagtggttgggagtctgactactggggccagggaaccctggtcaccgtctcctcag

SEQ ID NO: 1885 - DNA, 373 bp, Homo sapiens
  source 1..373: mol_type = other DNA
caggtgcagctggtgcaatctgggtctgagttgaagaagcctggggcctcagtgaaggtttcctgcaaggcttctggatacaccttcactagctatgctatgaattgggtgcgacaggcccctggacaagggcttgagtggatgggatggatcaacaccaacactgggaacccaacgtatgcccagggcttcacaggacggtttgtcttctccttggacacctctgtcagcacggcatatctgcagatcagcagcctaaaggctgaggacactgccgtgtattactgtgcgagaactggggattacgatttttggagtggttatctcgtctttgactactggggccagggaaccctggtcaccgtctcctcag

SEQ ID NO: 1886 - DNA, 367 bp, Homo sapiens
  source 1..367: mol_type = other DNA
gaggtgcagctggtggagtctgggggaaacttgatacagcctggcaggtccctgagactctcctgtgcagcctctggattccgctttgaagagtttgccatacactgggtccgccaacctccagggaagggcctggagtgggtctcaggtattagttggaatagtcgtaccatcggctacgcggactctgtgaagggccgattcaccatctccagagacaacgccaaaaattccgtgtatctgcagatgaacagtctgagagttgaggacacggccttgtattactgtgtaaaagatgggaggcagtgggtgcaatataactggttcgacccatggggccagggaaccctggtcaccgtctcctcag

SEQ ID NO: 1887 - DNA, 367 bp, Homo sapiens
  source 1..367: mol_type = other DNA
cagctgcagctgaaggagtcgggcccaggactggtgaagccttcggagcccctgtccctcacctgcactgtctctggtggttccatcagaagtagcctttcttactggggctggatccgccagcccccagggaagggcctggagtggattgggactatctattttagtgggaacaactacctcaacccgtccctcaagagtcgagtcaccacatcagtagacacgtccaagaaccagctctccctgaagctgaaatctgtgaccgccgcggacacggccgtgtattactgtgcgagacggatcccacatatgaattttgatgcttttgatatttggggccaagggattatggtcaccgtctcttcag

SEQ ID NO: 1888 - DNA, 367 bp, Homo sapiens
  source 1..367: mol_type = other DNA
caggtgcagctgcgggaatcgggcccaggactggtgaggccttcggagaccctgtccctcacctgcactgtctctggtggctccgtcaacagtagaacttactattggggctggatccgccaggcccccgggaagggcctggcgtggattgggagtatctattatagtgggaacgcctactattatccctccctcaagagtcgagtcaccatatccgtagacacgtccaggaaccagttctccctcaaaataacttctgtgaccgccgcagacacggctatttattactgtgcgagacatgacggaataaggccttgggacccaattgactcctggggccagggaaccctggtcaccgtctcctcag

SEQ ID NO: 1889 - DNA, 367 bp, Homo sapiens
  source 1..367: mol_type = other DNA
caggtgcagctgcgggagtcgggcccaggactggtgaggccttcggagaccctgtccctcacctgcactgtctctggtggctccatcaacagtagaacttactactggggctggatccgccagcccccagggaaggggctggcgtggattgggggtatctattatactgggaacgcctactacaacccctccctcaagagtcgagtcaccatatccgtagacacgtccaagaaccagttctccctgaagctaagttctgtgaccgccgcagacacggctatttattactgtgcgagacatgacggaataaggccttgggacccaattgactactggggccagggaaccctggtcaccgtctcctcag

SEQ ID NO: 1890 - DNA, 358 bp, Homo sapiens
  source 1..358: mol_type = other DNA
gaagtgcagctggtggagtctgggggaggcttggtacagcctggcaggtccctgagactctcctgtgcagcctctggattcatttttgatgattatgccatgcagtgggtccggcaagctccagggaagggcctggagtgggtctcaggtattagttgggataatggtgccatcggctatgcgggctttgtgaagggccgatttatcatctccagagacaacgccaagaactccctctatctgcaaatgaacagcctgagaactgaggacacggcattttattactgtgcaaaggcaaatggtgcggggagttacatactttcctggggccagggaaccctggtcaccgtctcctcag

SEQ ID NO: 1891 - DNA, 367 bp, Homo sapiens
  source 1..367: mol_type = other DNA
caggtgcagctggtggagtctgggggagacgtggtccagcctgggaagtccctgagtctctcctgtgcagcctctggattcagcttctttagatatgctatgcactgggtccgccaggccccaggcaaggggctggaatgggtggcagttacatcacatgatggaagtctgacataccatgcagactccgtgaagggccgattcaccatctccagagacaattccaagaacacgctgtttttgcaaatgaacagcctgggaccggaggacacggctgtgtattactgtgcgagagtccgcaggccgggccgagacaacagctgctgggactcctggggccagggaaccctggtcaccgtctcctcag

SEQ ID NO: 1892 - DNA, 367 bp, Homo sapiens
  source 1..367: mol_type = other DNA
caggtccagcttgtgcagtctggggctgaggtgaagaagcctggggcctcagtgaaggtttcctgcaaggcttctggatacaccttcactagctatgctatgcattgggtgcgccaggcccccggacaaaggcttgagtggatgggatggatcaacgctggcaatggtaacacaaaatattcacagaagttccagggcagagtcaccattaccagggacacatccgcgagcacagcctacatggagctgagcagcctgagatctgaagacacggctgtgtattactgtgcgagagaagctaggggctggaactcccgcaactggttcgacccctggggccagggaaccctggtcaccgtctcctcag

SEQ ID NO: 1893 - DNA, 369 bp, Homo sapiens
  source 1..369: mol_type = other DNA
caggtgcagctacagcagtggggcgcaggactgttgaagccttcggagaccctgtccctcacctgcgctgtctatggtgggtccttcagtggttactactggagctggatccgccagcccccagggaaggggctggagtggattggggaaatcaatcatagtggaagcaccaactacaacccgtccctcaagagtcgagtcaccatatcagtagacacgtccaagaaccagttctccctgaagctgagctctgtgaccgccgcggacacggctgtgtattactgtgcgagacagcggctacgagctaattactactactactacggtatggacgtctggggccaagggaccacggtcaccgtctcctca

SEQ ID NO: 1894 - DNA, 369 bp, Homo sapiens
  source 1..369: mol_type = other DNA
aggtgctactggtggagtctgggggagccttggtacaccctgggcggtccctgagactctcctgtgcagcctctggattcaccttcagggactatgccatgacctgggtccgccaggctccagggaagggactggagtgggtctcttttattagtcctactagtcttagcacatactacgcagactccgtgaagggccgattcaccatctccagagacaattccaagaacacactgtctctccaaatgaacagcctgagagccgaggacacggccgtctattactgtgcgagagattttgcccgggcggcatacaattttggcaactttgactactggggccggggaactttggtcaccgtctcctcag

SEQ ID NO: 1895 - DNA, 359 bp, Homo sapiens
  source 1..359: mol_type = other DNA
caggtccagttggtccagtctggggctgaggtgaagaagcctgggtcctcggtgaaggtctcctgcaagacttctggaggactcctcaataaatatgctatcagttgggtgagacaggcccctggacaagggcttgagtggatgggaggaatcatcgctatctttcataccacaaactacgcaaagaagttccagggcagactcacgtttacgacggacgaatccacgagcacagtctacatggagttgagcagcctgcgatctgaggacacggccgtttatttctgtgcgagaggtcagacatatcaccataattatttggaagtttggggcacggggaccacggtcatcgtctcctc

SEQ ID NO: 1896 - DNA, 385 bp, Homo sapiens
  source 1..385: mol_type = other DNA
caggtgcacctggagcagtctggggctgaggtgaagaagcctggggcctcagtgaaggtctcctgcaaggcttctgggtacaccctcaccgattacgatatcaactgggtgcgacaggccactggacaagggcttgagtggatggggtggatgacccctaacaatggtaagacagcctttgcacagaagttccagggcagagtcaccatgaccatggacacctccatgagtacagtctatatggagttgagcagcctgagacctgaggacacggccatatattactgcgcgaggggccaaaatccccgacgtacctcgatttttgaagtggtcccccaggggttcgacccctggggccagggaaccctggtcaccgtctcctcag

SEQ ID NO: 1897 - DNA, 372 bp, Homo sapiens
  source 1..372: mol_type = other DNA
caggtgcaactggtgcagactggggctgaaatgaagaaacctggggcctcagttcaggtctcctgcaaggtttctggagactccttcgccggcttttatatacactgggtgcgacaggcccctggacaagggcttgagtggatgggacggatcaaccctaagactggtggcacagcctatgctcaggactttcagggcagggtcagcatgaccagggacacgtccatcagcacagcctacttgggcctcagcggcctaatatctgacgacacggccgtatattactgcgcgagagatcggaggctttttgagggattgggccactactacctcgacgtctggggcaaagggaccacggtcaccgtctcctca

SEQ ID NO: 1898 - DNA, 367 bp, Homo sapiens
  source 1..367: mol_type = other DNA
caggtgccgctgcaggagtcgggcccaggactggtgaagccttcggagaccctgtccctcacctgcactgtctctggtgcctccatcactaattactactgcaactggatccggcaggccccagggaagggactggagtggattgggtacatctctggcggtgggagcaccaattacaacccctccctcaggagtcgagtcaccatctctttagacacgtccaacaaccagttctccctgaagctgacctctgtgaccgtcgcagacacggccgtctattactgtgcgacagcacccctggggggccccatcatgaggcgctacttcgatctctggggccgtggcaccctggtcactgtctcctcag

SEQ ID NO: 1899 - DNA, 367 bp, Homo sapiens
  source 1..367: mol_type = other DNA
caggtgcggctgcaggagtcgggcccaggactggtgaagccttcggagaccctgtccctcacctgcactgtctctcgtggctccatcaggagttattactggggctggatccggcagcccccagggaagggactggagtggattgggaacgtctataccagtgggagcagcaactacaatccctccctcaagaatcgagtcgccatatcagtggatacctccaagaaccagttctccctgaggctcaagtctgtgaccgccgcagacacggccgtgtattactgtgcgaaccagcgtgcaatcggcgcagcaggtaccggccactttgagtcctggggccagggaaccctggtcaccgtctcctcag

SEQ ID NO: 1900 - DNA, 370 bp, Homo sapiens
  source 1..370: mol_type = other DNA
gaggtgcagctggtgcagtctgggggaggcttggcacagccgggggggtccctgagactctcctgtgcagcctctgaattcaccttcagaaattacgacatgcactgggtccgcacaggagaaggtctggagtgggtctcatctattaatactgctggtgagactttctatccagcctccgtgaagggccgattcaccatctccagagatgatggcaagacctccttatatcttcaaatgaacaacctgagcgccggggacacggctgtctattattgtgcaagaacgatggcctggactaagaaaagtacctcgtccgactggtacttcgatctctggggccgtggcaccctggtcactgtctcctcag

SEQ ID NO: 1901 - DNA, 370 bp, Homo sapiens
  source 1..370: mol_type = other DNA
caggtccagctggtggagtctgggggaggcgtggtccagcctgggaagtccctgacactctcctgtgcagcgtctggattcaccttcagtaattatggcatgcactgggtccgccaggctccaggcaaggggctggagtgggtgtcaattatatcatacgatggaaccaataaattctacgcagactccgtgaagggccgattcaccatcgccagagacaattccaagaacacactgtatctgcaagtgaatagcctgaaaactgaagacacggctgtctactactgtgcgagagaacgtataccctttgataatagtggttgggagtctgagtactggggccagggaaccctggtcaccgtctcctcag

SEQ ID NO: 1902 - DNA, 376 bp, Homo sapiens
  source 1..376: mol_type = other DNA
caggtgcaactggtgcagtctggggctgaggtgaggaagcccggggcctcagtgaaggtctcctgcaaggcttctggatacaccttcaccggctactatatacactgggtgcgacaggcccctggacaaagacctgagtggatggcccggatcaaccctaatagaggtggcacatattatgcacagaaatttcaaggcagggtcaccgtgaccagggacacgtccatgaacacagcctacatggacctgagcaggctgacatctgacgacacggccgtctatttctgtgcgagagaggtgagggaagatgtggtgatgggagctgcgtattattttgactactggggccagggaaccctggtcaccgtctcctcag

SEQ ID NO: 1903 - DNA, 352 bp, Homo sapiens
  source 1..352: mol_type = other DNA
gaggtgcagctggtgcagtctggagcacaggtgaaaaagccgggggagtctctgaagatctcctgtaagacttctggatacagctttaccgacgactggatcggctgggtgcgccagatgcccgggaaaggcctggagtggatggggatcatctatcctggtgactctgataccaaatacagcccgtccttcgaaggccaagtcaccatctcatccgacaagtccatcaggaccgcctacctgcagtggaggagcctgaaggcctcggacaccgccatatattactgtgcgaggcttctgggagcgagatttgactactggggccagggaaccctggtcaccgtctcctcag

SEQ ID NO: 1904 - DNA, 366 bp, Homo sapiens
  source 1..366: mol_type = other DNA
caggagcaactggtgcagtctggggctgaggtgaagaagcctggggcctcagtgagagtctcctgcaaggcctctggatacaccctcgccaactactatatacagtgggtgcgacaggcccctggacaacggcctgagtgggtgggacgaatcaaccctaagaatgggggcacaaagtatgcacagaagtttcagggcagggtcaccatgacccgggacacgtccatcagcacagtctacatggacctgagaagtctgagatctgacgacacggccgtctattactgtgccagagagacgggttcggcggcctcctcctactacatggacgtctggggcaaggggaccacggtcaccgtctcctca

SEQ ID NO: 1905 - DNA, 373 bp, Homo sapiens
  source 1..373: mol_type = other DNA
caggtccagctggtgcaatctggggctgaggtgaagaagccggggtcctcggtgaaggtcgcctgcaaggcttctggaggcaccttcagcagctatactatcagttgggtgcgacaggcccctggacaagggcttgagtggatgggaaagatcatccctattcttggtttagaaaactacgcacagaagttccagggcagagtcacgattaccgcggacaaatccgcgagcgcgagcacagcctacatggagctgaccagcctgagatttgaggacacggccgtgtattactgtgcgagatccgatagtggaaactactaccatcccctgctcgattactggggccagggaaccctggtcaccgtctcctcag

SEQ ID NO: 1906 - DNA, 367 bp, Homo sapiens
  source 1..367: mol_type = other DNA
caggtccagctggtgcagtctggggctgaggtgaagaagcctgggtcctcggtgaaggtctcctgcaagccttctggagacatcttcagaggttatgctatcagttgggtgcgacaggcccctggacaagggcttgagtggatgggaaggatcatccctatgtttggaacaacaaactacgcacagaagttccaggccagagtcacgattaccgcggacaaatccacggacacagcctacatggagctgaggagcctgagatctgaggacacggccgtatattactgtgcgaggtccccttattactatgacagtaatgtggaatttgactcctggggccagggaaccctggtcaccgtctcctcag

SEQ ID NO: 1907 - DNA, 370 bp, Homo sapiens
  source 1..370: mol_type = other DNA
gaggtgcagttgttggaatctgggggaggcttggtacagccgggaaggtccctgagactctcctgtgcagcctctggattcacctttagtaggtatggcatgagctgggtccgccaggctccagggaaggggctgcagtgggtctcacatataagtgcaagtggtcttagcacatactacgcagactccgtgaagggccggttcaccatctccagagacaattccaagaacacactgtatctgcaaatgaccagcctgagagccgaggacacggccgtatatttttgtacgaaagaccagggtgtagtagtgccaactgctatacctttattctactggggccagggatccctggtcaccgtctcctcag

SEQ ID NO: 1908 - DNA, 370 bp, Homo sapiens
  source 1..370: mol_type = other DNA
caggttcaactggtgcagtcaggacctgaggtgaagaagcctggggcctcagtgaaggtctcctgcaaggcttctggttacaccttttccagctatggtatcagctgggtgcgacaggcccctggacaagggcttgagtggctgggatgggtcagcggtttcaatggtaacacgaagtctgcacagaatctccagggcagagtcaccgtgaccaaagacacatccacgaccacggcctacttggaagtgacgagcctgagatctgacgacacggccgtctacttttgtgcgagagacaacggctatatgagtacctggtatatagggtctgaccactggggccagggaaccctggtcaccgtctcctcag

SEQ ID NO: 1909 - DNA, 367 bp, Homo sapiens
  source 1..367: mol_type = other DNA
gaagtgcaactggtggagtcggggggaggcctggtccagcctggcaagtccctgagactctcctgtgcagcctctggattcagctttgaagattatgccatacactgggtccggcaagctccagggaagggcctcgagtgggtctcaggtattagttggaatagtggtagaatagggtatgtggactctgtgaagggccgattcaccatctccagagacaacgccaagaattccgtgtatctacaaatgaacagtctgagagctggggacacggccttctattactgtgtaaaagatggccggagatggctacaattcaactactttgactattggggccagggagccctggtcaccgtctcctcag

SEQ ID NO: 1910 - DNA, 385 bp, Homo sapiens
  source 1..385: mol_type = other DNA
gaggtgcgactggtggagtctgggggaggcttggtccaccctggggggtccctgagactctcctgtgcagtctctggattcaccgtcggtaacaactacatgagctgggtccgccaggctccagggaaggggctagagtgggtctcagttattcatagcggtggcaacacatactacgcagactccctgaaggggcgattcaccatctccagagacgcttccaagaacacactgtatcttcaaataaacagcctgggagctgaggacacggctgtgtattactgcgcgaggggggggtctcaccctatttatgactatgatggtagtggtttacttttaggctttgactactggggccagggaaccctggtcaccgtctcctcag

SEQ ID NO: 1911 - DNA, 355 bp, Homo sapiens
  source 1..355: mol_type = other DNA
gaggtgcagctggtgcagtctggagcagaggtgaaaaagccgggggagtctctgaagatctcctgtaagggttctggatacagttttgccagttactggatcgcctgggtgcgccagacgcccgggaaaggcctggagtggatggggatcatctatcctggtgactctgataccaaatacagcccgtccttccaaggccaggtcaccttctcagccgacaagtccctcagcaccgccttcctgcagtggagcagcctgaaggactcggacaccgccatatattactgtgcgagacgggatgcagatatgggggtggcctactggggccagggaacccaggtcaccgtctcctcag

SEQ ID NO: 1912 - DNA, 382 bp, Homo sapiens
  source 1..382: mol_type = other DNA
caggtgcagctgcaggagtcgggcccaggactggtgaagccttcggagaccctgtccctcacctgcactgtctctggtggctccatcagtagttactactggagctggatccggcagaccgccgggacgggactggagtggattgggcgtatgtttaccagtgggaccaccgactacaacccctccctcaagagtcgagtcaccctgtcagtagacacgtccaagaaccagttctccctgaacctgagctcagtgaccgccgcggacacggccgtttattactgtgcgagagaagttcgttttcggtatggttcggggagttattataacttacgctggttcgacccctggggccagggaaccctggtcaccgtctcctcag

SEQ ID NO: 1913 - DNA, 367 bp, Homo sapiens
  source 1..367: mol_type = other DNA
caggtacatttacaacagtggggcgcaggactgttgaagccttcggagaccctgtccctcaactgcggtgtctatggtgtgtctttgagtgactggttttggagttggatccgccaggtcccagggaaggggctggagtggattggagaaatcaaccaaagtgggcgcaccgactacaacccgtccctcaagagtcgagtcaacattttaggggacacgtccaagaaccagttttccctgaaattgaactctgtgaccgccgcggacgcggctgtgtattactgtgcgagacggcccgtgggttttggttccggcagctattattttgactactggggccagggaaccctggtcaccgtctcctcag

SEQ ID NO: 1914 - DNA, 352 bp, Homo sapiens
  source 1..352: mol_type = other DNA
gaggtgcagctggtggagtctgggggaggcttggtaaagccgggggggtcccttagactctcctgtgtagcctctggattcactttcagtaccgcctggatgagctgggtccgccaggctccagggaaggggctggagtgggttggccgtattaaaaccgaaattgatggtgggacaacagactacgctgcacccgtgaaaggcagattcaccatctcacgagatgattcaaaaaacactctgtatctgcaaatgaacagcctgaaaaccgaggacacagccatttattactgtaccgtacgttcctcgttcgacccctggggccagggaaccctggtcaccgtctcctcag

SEQ ID NO: 1915 - DNA, 364 bp, Homo sapiens
  source 1..364: mol_type = other DNA
caggtgcagctgcagcagtcaggtccaggactggtgaggccctcgcagaccctctcactcacctgtgccatctccggggacagtgtctctagcgacagtgttgcttggaactggatcaggcagtccccatcgagaggccttgagtggctgggaaggacttattacaggttcaagtggtatagtgattctgcagtttctgtgaggagtcgaattaccatcagcccggacacatccaagaaccagttctccctgcagttgaactctgtgactcccgaggacgcggctgtttatttctgtgcaagatcctactacacatattactatgactactggggccagggaaccctggtcaccgtctcttcag

SEQ ID NO: 1916 - DNA, 395 bp, Homo sapiens
  source 1..395: mol_type = other DNA
ggtgcagctggtgcagtctggggctgaggtaaagaagcctggggcctcagtgaaggtctcctgtaaggcttctggatacaccttcagcgactactatatgcactgggtgcgacaggcccctgggcaagggcttgagtggatggggcgggtcaaccctaaaaacggtggcacagactatgcacggaaatttcagggcagggtctccatgaccagcgacacatccatcagcacatcttacatggacctcaacaacctaggatctgacgacacggccgtctatttttgtgctcaagggggggagatggcttcgatggcggcactaatgcgtggaagcttgagaagggatgatttccctgactactggggccagggaaccctggtcaccgtctcctcag

SEQ ID NO: 1917 - DNA, 364 bp, Homo sapiens
  source 1..364: mol_type = other DNA
caggagcagctggtggagtctgggggaggcgtggtccagcctgggaggtctctgagactctcctgtgtagcctctggattcaccttcagtaactatggcatgcactgggtccgccaggctccaggcaaggggctggagtgggtggcagctacatcatatgatggaagtcaaaaatactatgcagactccgtgaagggccgattcaccgtctccagagacaattccaagaatacactgtatctgcaaatgaacagcctgagacctgaagacacggctgtctattactgtgcgacagccgtcatagtgcgacctacaaatgggatccagtattggggccagggcaccctggtcaccgtctcctcag

SEQ ID NO: 1918 - DNA, 360 bp, Homo sapiens
  source 1..360: mol_type = other DNA
caggtccagctggtgcagtctggggctgaggtgaagaagcctgggtcctcggtgaaggtctcctgcaaggcctctggagtcaccttcaacagctatgctatcagctgggtgcgacaggcccctggacaaggccttgagtggatgggagggatcagccctatctttggtacaacaaactacgcacagaagttccagggcagagtcacgattaccacggacaaacccacgaccacagcctacatgcaactgagcagcctgagatctgaggacacggccgtgtatttttgtgcgacaggcccatactactaccactcctacatggacgtctggggcaaagggaccacggtcaccgtctcctca

SEQ ID NO: 1919 - DNA, 367 bp, Homo sapiens
  source 1..367: mol_type = other DNA
caggagccgctacaggagtcgggcccaggactggtgaagccttcggagaccctgtccctcagctgcaatgtctctggtgcctccatcaggaattactactggaactggattcggcaggccccagggaagggactggagtggattgggtacatctatggcagtgggagcaccaattacaatccctccctcaagagtcgagtcaccatatcaatagacacgtccaagaaccagttctccctgaggctgacctctgtgaccgtcgcagacacggccgtgtatttctgtgcgagggcacccctggggggccccaccatgaggcgctacttcgatctctggggccgtggcaccctggtcactgtctcctcag

SEQ ID NO: 1920 - DNA, 370 bp, Homo sapiens
  source 1..370: mol_type = other DNA
caggttcagttggtgcaatctggagctgaggtgaagaagcctggggcctcagtgaaggtctcctgcaaggcctctggttacacattcaccagttatggtttcagctgggtgcgacaggcccccggacaagggcttgagtggatggggtggatcagcgctcacaatggtaacataaagtatgcacagaagttccaggacagactcaccctgatcacagagacatccacgaccacagcctacatggagctgaggaacctgagatctgacgacacggccgtgtattactgtgcgagagagaatgggttcatgagcacctggttcattggctttgacaactggggccagggaacccttatcaccgtctcctcag

SEQ ID NO: 1921 - DNA, 364 bp, Homo sapiens
  source 1..364: mol_type = other DNA
caggtgcagctggtggagtcggggggaggcgtggtccagcctgggaggtccctgagactgtcctgtgcagcctctggattcacctttagtaattatgctatgcactgggtccgccaggctccaggcaaggggctggagtgggtggcagttgtttcatatgatggacgtactgaacactacgcagactccgtaaagggccgattcaccatctccagagacaactccaagaagacactttatctgcaaatgaaaagcctgagacttgaggacacgggtgtttattactgtgcgagagaatatagctatgagagtagtggttattatgccttctggggccagggaaccctggtcaccgtctcctcag

SEQ ID NO: 1922 - DNA, 363 bp, Homo sapiens
  source 1..363: mol_type = other DNA
tgcaactgcaggagtcgggcccaggactggtgaagccttcggggaccctgtccctcacgtgcactgtctctggtggctccatcagcagtagtacttactattgggcctggatccgccagcccccagggaagggactggagtggattggcagtatctttcatagtgggactacctcctactacaacccgtccctcaagagtcgagtcaccatgtcactagacacgtccaggaaccagttctccctgagggtgaggtctctaaccgccgcggacacggccgtgtattattgtgcgagattagccggcggcagcttcttctggttcgacccctggggccagggaaccctggtcaccgtctcctcag

SEQ ID NO: 1923 - DNA, 364 bp, Homo sapiens
  source 1..364: mol_type = other DNA
caggtccagctggtgcagtctggggctgaggtgaagaagcctgggtcctcggtgaaggtctcctgcaagacttctggaggcatcttcaacaaatatgctatcagctgggtacgacaggcccctggacaaggtcttgagtggatgggaaggatcatccctatctttcgaacagcaaagtacgcacagaaattccagggcagactcacgattaccgcggacgaaaccatgagcacggcctacatggagctgagcagcctgagatctgaagacacggccgtttattactgtgcgagaggcgcctacagtggctacgaaatcctcattgacttctggggccagggcactctggtcgtcgtctcctcag

SEQ ID NO: 1924 - DNA, 387 bp, Homo sapiens
  source 1..387: mol_type = other DNA
caggttcagttggtgcagtctggagctgaggtgaagaagcctggggcctcagtgaaggtctcctgcaaggcttctggttacagcttttccacctatggtatcagctgggtgcgacaggcccctggacaagggcttgagtggatgggaaggatcagcgaatacaaaggtaacacaaactatgcacagaagctccagggcagagtcaccatgaccacagacacatccacgagcacagcctacatggagctgaggagcctgagatctgacgacacggccgtgtattactgtgcgagacttaccccggaactaggatattgtagtggtgctaactgcccccgatactacatggacgtctggggcacagggaccacggtcaccgtctcgtca

SEQ ID NO: 1925 - DNA, 373 bp, Homo sapiens
  source 1..373: mol_type = other DNA
gaggtgcagctggtggagtctgggggaggtttggtacaggcggggggttccctgcgactctcctgtgcagtctctggattcaccattagcgactatggcatgagctgggtccgccaggctccagggaaggggctggagtgggtctcaagtattacttatagtggtggtagcacatactatgtagactccgtgaagggccggtacaccatctccagagtaacttccaagaacacgctgtatctgcaaatggacagactgagagccgaggacacggccgtatattattgtgtgaaggcgagggtgaggaaccgtatagcagaagctggtacttttgactcctggggccagggaaccctggtcaccgtctcctcag

SEQ ID NO: 1926 - DNA, 370 bp, Homo sapiens
  source 1..370: mol_type = other DNA
caggtccacctggaacaatctgggactgaggtgaagaagcctgggtcctcggtgaaggtctcctgcaaggcttctggagtcttcttcaacaaatatgccatcagttgggtgcgaaaggcccctggacaagggcttgagtggctgggaaggatcacccctatctttcatagaacaaattacgcacagaacttccagggcagaatcacgattagcgcggacgaaagaacgaccactgcctacatggaactgagcagcctaatctctgaggacacggccgtctattactgtgcgagagaagggggagaaacgatatatgccccgagttggttcgacccctggggccagggaaccctggtcattgtctcctcag

SEQ ID NO: 1927 - DNA, 364 bp, Homo sapiens
  source 1..364: mol_type = other DNA
caggtccagctggtgcagtctgggactgaggtgaagaagcctgggtcctcggtgaaggtctcctgcaaggcttctggaggccccttcaacagccatgctctcagctgggtgcgacaggcccctggacaaggacttgagtggatgggaggggtcctcgctatctttggtacaataaagtatgcacagaaattccagggcagagtcacgatcaccacggacaaatcaacgaccacagtctacatggagctgagcagcctgagattcgaagacacggccgtgtattactgtgcgagggcccaagggtatcagccaaatgatgcttttgatatctggggccaagggacaatggtcactgtctcttcag

SEQ ID NO: 1928 - DNA, 364 bp, Homo sapiens
  source 1..364: mol_type = other DNA
caggtgcaactggtgcagtctggggctgagttgaagaagcctggagcctcagtgaaggtctcctgtaaggcctctggatacaccttcaccggcaaatatatccactgggtgcgacaggcccctggacaagggcttgagtggctgggacggatcaaccctgagaatggtggcacaaggtctgtacagagacttcagggcaggatcaccatgaccagcgacacgtccactaatacggcccacatggagctgagcaggctaacttctgacgacacggccacttattattgtacgagagagtccggggagaggacactttactattttgacttctggggccagggaaccctagtcaccgtttccgcag

SEQ ID NO: 1929 - DNA, 370 bp, Homo sapiens
  source 1..370: mol_type = other DNA
cagctgcagctgcaggtggcgggcccaggactggtgaagccttcggagaccctgtccctcacctgcactgtctctggcggctccatcaccagtcgtacttactactggggctggatccgccagcccccagggaaggggctggagtggattgggaatatctattatagtgcgagcacctactacaacccgtccctcaagagtcgagtcaccatatcagtagacacgtccaagagccagatctccctgaagctgagctctgtgaccgccgcggacacggccgtctattattgtgtgagaacaactagtgggaggtactacgcctactactttgactactggggccagggaaccctggtcaccgtctcctcag

SEQ ID NO: 1930 - DNA, 378 bp, Homo sapiens
  source 1..378: mol_type = other DNA
caggtgcagctggtggagtctgggggaggcgtggtccagcctgggaggtccctgagactctcctgtgcagcctctggattcaccttcaggagttatgctctgcactggctccgccaggctccaggcaaggggctggagtgggtggcagttatcccatatgatggaagcaatagatactacgcagactccgtgaagggccgattcaccatctccagagacaattccaagaacacgctgtatctccaaatgaacagcctgagaactgaggacacggctgtgtatttctgtgcgagagatcaggtccggggacccaccaacccaacttactatggcaccttccagcactggggccagggctccctggtcaccgtctcctca

SEQ ID NO: 1931 - DNA, 355 bp, Homo sapiens
  source 1..355: mol_type = other DNA
gaggtgcagctggtggagtccgggggagtcttggttcagcctggggggtccctgagactctcctgtgtagcctctggattcacttttagtagctactggatgcactgggtccgccaatttccggggaaggggctggtgtgggtctcacgtattaaaactgatggcagtagcacgagttacgcggactccgtggagggccgattcaccatctccagagacaacgccaagaacacactgtatctgcaaatgaacagtctgagagtcgaggacacggctgtctatttctgtggtcgggggtctagactggggattccggactcctggggccagggaaccctggtcaccgtctcctcag

SEQ ID NO: 1932 - DNA, 364 bp, Homo sapiens
  source 1..364: mol_type = other DNA
cagggccaagtggtgcagtctggggctgaggtgaagaagcctgggtcctcggtgaaggtctcctgcaaggcttctggaggcaccttcagtagacatgctgtcaactgggtgcgacaggcccctggtcaagggcttgagtggatgggaggcctcatctccatcttccgtacagcagagtacgcacagaagttccagggcagactcaccattaccacggacgaattgacgagcacagcctacatggagctgagcagcctgagatctgacgatacggccgtctattactgtgcgcgaggcgcgacctaccacttcacgtccccaattgactactggggcccgggaacccttctcaccgtcacctcag

SEQ ID NO: 1933 - DNA, 374 bp, Homo sapiens
  source 1..374: mol_type = other DNA
caggtccacctggtgcagtctggggctgaggtgaagaagcctgggtcctcggtgaaggtctcctgcaaggcttctggaggcaccttcagcaactttcctatcggctgggtccgacaggcccctggacaggggcttgagtgggtgggagggctcatccctgtctttggtacaccaaaatacgcacagaagttccagggcagagtcacaattaccgcggacggttccacgagcacggcctatatggaactgagcagcctgagatctgaagacacggccgtctattactgtgcgagactactaaaaaaaggtgttgactggaacccccacttatactttgactactggggccagggaaccatggtcaccgtctcctc

SEQ ID NO: 1934 - DNA, 361 bp, Homo sapiens
  source 1..361: mol_type = other DNA
caggtgcagctggcgcagtctggggctgaggtgaggaagcctggggcctcagtgaaagtctcctgcaaggcttctggatacaccttcaccgactactatatacactgggtgcgacaggcccctggacaagggcttgagtggatgggatggatcaaccctgacagtggcaggacaaactatgcacagagatttcagggcagggtcagtatgaccagcgacacgtccatcagcacagcctacatggacctgagcagactgagatctgacgacacggccgtgtatttctgtgcgagagagggggctcataattaccaacactttgaccactggggccagggaaccctggtcaccgtgtccgcag

SEQ ID NO: 1935 - DNA, 358 bp, Homo sapiens
  source 1..358: mol_type = other DNA
caggttcagctgcgagagtcgggcccaggactggtgaagccttcggagaccctgtccctcacctgcactgtctctggtgcctccatcactggttactactggagctggatccggcagcccgccgggaagggactggagtggattgggcgtgtctatggaaatgggatcaccgactacagatcctccctcgagagtcgactcaccatgtcagcagacacgtcgcagaatcaagtctccctgaagttgaaatcagtgacggccgcggacacggccgtgtactactgtgcgagggatgccagaagttggactgaatacctccaacactggggccagggcgccctggtcgttgtctcctcag

SEQ ID NO: 1936 - DNA, 358 bp, Homo sapiens
  source 1..358: mol_type = other DNA
caggtgcagctgcaggagtcgggcccaggactggtgaagccttcggagaccctgtccctcacctgcactgtctctggagactccatcagtaattactactggagttgggtccggcagcccccagggaagggactggagtggattgggaacacccatcgcggtgggaccaccaatgacaactcctccctcaagagtcgcgtcaccatatcagtcgacacctctaagaatcaggtttccctgaaggtgacgtctgtgaccgccgctgacacggccgtgtattactgtgccaaacatccgtttcgcatacgtctgggtcttgaaacctggggccaggggacaatggtcaccgtctctgcag

SEQ ID NO: 1937 - DNA, 391 bp, Homo sapiens
  source 1..391: mol_type = other DNA
caagtgcagctggtggagtctgggggaggcgtggtccagcctggggggtccctgagactctcctgtacagcgtctggatttaacttcagtcattatggcatgaactgggtccgccaggctccaggcaaggggctggagtgggtggcatttatacggtatgatggaagaaagaaagactatgcagactccgtgaagggccgattcaccatctccagagacaataccaacaacacgctgcatgtgcaaatgaacagcctgagagctgaggacacggctttgtattactgtgcgaaaggtgaaaggtttttcgatttttggagtgcttatgacgataatggcccggatggctttgatatctggggccaagggacaagggtcaccgtgtcttcag

SEQ ID NO: 1938 - DNA, 376 bp, Homo sapiens
  source 1..376: mol_type = other DNA
caggtgcagctggtggagtctgggggaggcgtggtccagcctgggaggtccctgagactctcctgtgcagcctctggattcaccttcagtgtctattctatgcactgggtccgccaggctccaggcaaggggctggagtgggtggcacttatatcatatgatggaagtaaaaaatattacgcagactccgtgaagggccgattcaccatctccagcgactcttccaaaaacacgctgtatctgcaaatggacagcctgagagctgaggacacggctgtgtattactgtgcgagagatcgggtaaaggcagctggtattttggcgttctactacttcgatctctggggccgtggcaccctggtcactgtctcctcag

SEQ ID NO: 1939 - DNA, 371 bp, Homo sapiens
  source 1..371: mol_type = other DNA
gaggtgcagctggtggagtctgggggaggcttggttcagcctggggggtccctgagactctcctgtgcagcctctggattcaactttaatacttattggatgagctgggtccgccaggctccagggaaggggctggagtgggtggccagcataaagcaagatggaagtgaggaaaagtatgtggactctgtgaagggccgaatcaccatctccagagacaatgccaagaactcagtatatctgcaaatgaacagcctgagagccgaggacacggctgtgtattactgtgtgagagatttcgactactctgattatggttattctgactggttcgactcctggggcccgggaaccctggtcaccgtctcctc

SEQ ID NO: 1940 - DNA, 376 bp, Homo sapiens
  source 1..376: mol_type = other DNA
caggtccagctggtgcaatctggggctgaggtgaagaagcctgggtcctcggtgaaggtctcctgcaaggcttctggaggcaccttcagcacctatactatcagctgggtgcgacaggcccctggacaagggcttgagtggatgggaaggatcatccctatccttggtatagcaaactacgcacagaagtttcagggcagagtcaccattaccgcggacaaatccacgagcacagcctacatggagttgagcagcctgagatctgaggacacggccgtgtattactgtgcgagacctggggaggattgttttagtggtgactgctattccccttttgactactggggccagggatccctggtcaccgtctcctcag

SEQ ID NO: 1941 - DNA, 385 bp, Homo sapiens
  source 1..385: mol_type = other DNA
caggtcctccttgtgcagtctgggcctgaggtgaagaagcctggggcctcagtgaaggtttcctgcaaggcttctggatacaccttcactagttctgatatccactgggtgcgccgggcccccggacaaaggcttgagtggatgggatggatcaactctgacaatggtcacacaaaatattcacagaagttccaagacagagtcaccattaccagggacacatccgcgaccacagcttatatggagctgagcagcctgagatcagaagacacggctatgtattactgtgcgaaagatccgcggacaggacattgtgataaaaccgactgttccgtggcttactggttcgacccctggggccagggaaccctggtcaccgtcacct

SEQ ID NO: 1942 - DNA, 365 bp, Homo sapiens
  source 1..365: mol_type = other DNA
ggtgcagctggtggagtctgggggaggcttggtacagcctggagggtccctgagactctcctgtgcagcctctggattctccttcagtagttatgaaatgcactggatccgccaggctccagggaaggggctggagtgggtttcatacattagtagtagtggtctttccacatactacgcagatcctgtgaagggccgattcaccgtctccagagacaactccaagaactcagtgtacctgcaaatgaacagcctgagagccgaggacacggctgtttattactgtgcgagagaccaatttcggcaggtggtattcctggggcttgactactggggccagggagccctggtcaccgtctcctcag

SEQ ID NO: 1943 - DNA, 370 bp, Homo sapiens
  source 1..370: mol_type = other DNA
cagctgcaggtggaggagtcgggcccaggactggtgaagccttcggagaccctgtccctcacctgcactgtctctggtgcctctatcagtagtagaagttactactggggctggatacgccagcccccagggaagggactggagttaattgggaatatttattatagtgggacaacctactacaccccgtccctcaagagtcggatcaccatattcgtagacacgtccaagaatcagttcttcctgaagctgaactctgtgaccgccgcagacacggcaatgtattactgtgcgagatgggtttcagggacatattatagtgtcggctttgactcctggggccagggaaccctggtcatcgtctcctcag

SEQ ID NO: 1944 - DNA, 357 bp, Homo sapiens
  source 1..357: mol_type = other DNA
caggtgcagctgatgcagtctggggctgaggtgaagaagcctggggcctcagtgaaggtctcctgcaaggcttctggatacaccttcaccagctatgatatcaactgggtgcgacaggccactggccaagggcttgagtggatgggatggttgaaccctaacagtggtaacacaggctatgtacagaagttgcagggcagagtcaccatgaccaggaacacctccacaagcacagcctacatggagctgagcagcctgagatctgaggacacggccgtgtattactgtgcgagaggcggccccctcgactacggtttggacgtctggggccaagggaccacggtcaccgtctcctca

SEQ ID NO: 1945 - DNA, 372 bp, Homo sapiens
  source 1..372: mol_type = other DNA
aggtgcagctggtggagtctgggggaggcttggtccagcctggggggtccctgagactctcctgtgcagcctctggcttcagacttagtaactactggatgagctgggtccgccaggccccagggaaggggctgcagtgggtggccagcataaaggaagatggaagagagaaatcatatgtggcctctgtggagggccgacacgccatctccagagacaacgccaacaattttctttatctacagatgaatagcctgagagtcgaggacacggctatatactactgtgcgagacactcttattgggataaaagtactcattatagacattttgactactggggccagggagccctggtcaccgtctcgtcag

SEQ ID NO: 1946 - DNA, 387 bp, Homo sapiens
  source 1..387: mol_type = other DNA
caggtgcagctgcaggagtcgggcccaggactggtgaagccttcggagaccctgtccctcacctgcattgtctctggtggctccatcagaagttactactggagctggatccgtcagcccccagggaagggactggagtggattggatacatctataccagtgggagcaccaactacaacccctccctcaagagtcgagtcaccatatcagtagacacgtccaagaaccagttctccctgaatctgacctctgtgaccgccgcagacacggccgtgtattattgtgcgagactggggacggcagcagctggaagtaggctaaggtattcctaccactactactacatggacgtctggggcaaagggaccacggtcaccgtctcctca

SEQ ID NO: 1947 - DNA, 388 bp, Homo sapiens
  source 1..388: mol_type = other DNA
caggtgcagctggtggagtctgggggaggcgtggtccagcctgggaggtccctgagactctcctgtgcagcctctggattcaccttcagtaactatgctatgtactgggtccgccaggctccaggcaaggggctggagtgggttgcaattatatcatttgatggaagtaataaattttacgcagactccgtgaagggccgattcaccttctccagagacaattccaagaacacgctgtatctgcaaatgaacagcctgagagctgaggacacggctgtatattactgtgcgagagcccaagcctacctaggatattgtagtggtgatcgctgcccccaatactactttgactactggggccagggaaccctggtcaccgtctcctcag

SEQ ID NO: 1948 - DNA, 370 bp, Homo sapiens
  source 1..370: mol_type = other DNA
caggtgcagctacagcagtggggcgcaggactgttgaagccttcggagaccctgtccctcacctgcgctgtctatggtgggtccttcagtggctactactggagctggatccgccagcccccagggaaggggctggagtggataggggacatcaatcatagtggaagcatcaactacaacccgtccctcaagagtcgagtcaccttatcagtagacacgtccaagagccagttgtccctgaggctgagctctgtgaccgccgcggacacggctgtgtattactgtgcgagacacccccgcttacgagattttgactggttccgtgcttttgatgtctggggccaagggacaatggtcaccgtctcttcag

SEQ ID NO: 1949 - DNA, 382 bp, Homo sapiens
  source 1..382: mol_type = other DNA
caggtccagctggtgcagtctggggctgaggtgaagaagcctgggtcctcggtgaaggtctcctgcaaggcttctggaggcaccttcagcagcttcagcagatatcctatcacctgggtgcgacaggcccctggacaagggcttgagtggatgggaggaatcatccctatctttcatacaacaaaatacgcacagaagttccagggcagagtcacacttaccagggacgaatccacgagcacagcctacatggagctagtcagcctgacatctgaagacacggccgtctattactgtgcgagggtagggccagggtaccagctgctacccaacgactggttcgacccctggggccagggaaccctggtcaccgtctcctcag

SEQ ID NO: 1950 - DNA, 367 bp, Homo sapiens
  source 1..367: mol_type = other DNA
caggtgcagctggtggagtctgggggaggcgtggtccagcctggggggtccctgagactctcctgtgcagcgtctggattcaccttcagtagttatgacatgcactgggtccgccaggctccaggcaaggggctggagtgggtggcatttatacggtatgatggaagtaataaatactatgcagactccgtgaagggccgattcaccatctccagagacaattccaagaacaccctgtatctgcaaatgaacagcctgagacctgaggacacggctgtgtattactgtgcgaaagatggggaagggccagctgctattctgacgggggacccctggggccagggaaccctggtcaccgtctcctcag

SEQ ID NO: 1951 - DNA, 376 bp, Homo sapiens
  source 1..376: mol_type = other DNA
cagatgcagctgcaggagtcgggcccaggactggtgaagccttcggagaccctgtccctcacctgcactgtcactggtggctccgtcagcggtagtaattactactggggctggatccgccagcccccagggaaggggctggagtggattgggagtatccattatagtgggagcacctattacaacccgtccctcaagagtcgagtcaccatgtcactagacacgtccaggaaccaggtctccctgaaggtaacctctgtgaccgccgcggacacggccgtctattactgtgcgagaccgggtcggggaagtatgctgactgcctactggtacttcgatctctggggccgtggcaccctggtcactgtctcctcag

SEQ ID NO: 1952 - DNA, 387 bp, Homo sapiens
  source 1..387: mol_type = other DNA
gaggtgcagctggtggagtctgggggaggcctggtcaagcctggggggtccctgagactctcctgtgcagcctctggattcaccttcagtagctatagcatgaactgggtccgccaggctccagggaaggggctggagtgggtctcatccattagtagtagtactagttacatatactacgcagactcaatgaagggccgattcaccatctccagagacaacgccaagaactcactgtatctgcaaatgaacagcctgagagccgaggacacggctgtgtattactgtgcgagagtagggcccaccgagtaccagctgctatatacaactcgttactactactacatggacgtctggggcaaagggaccacggtcaccgtctcctca

SEQ ID NO: 1953 - DNA, 369 bp, Homo sapiens
  source 1..369: mol_type = other DNA
gaggtacagctggtggagtctgggggaggcttggtacagcctggggggtccctgagactctcctgtgcagcccctggattcacctttagcagctatgccatgagctgggtccgccaggctccagggaaggggctggagtgggtctcaggtattagtggtagtggtggtagcacatactacgcagactccgtgaagggccggttcaccatctccagagacaattccaagaacacgctgtatctgcaaatgaacagcctgagagtcgaggacacggccgtatattactgtgcgaaagatggggttgactggcgcgactactactacggtttggacgtctggggccacgggaccacggtcaccgtcgcctca

SEQ ID NO: 1954 - DNA, 397 bp, Homo sapiens
  source 1..397: mol_type = other DNA
caggttcagctggtgcaacctggggctgaggcgaagaagcctggggcctcgatgaaggtctcctgcaaggcttctggatacaccttcagcgactactatatacactgggtgcgacaggcccctggacaagggcttgagtggatgggacggatcaaccctaaaaatggtgacacagtctatgcacagaagtttcagggccgggtcgccgtgaccacggacacgtccatcaccacagcctacatggagctgagcggcctgacaactgacgacacggccgtatattactgtgctcaagggggggagatcgcttcaatgtcggcagtaatgaaaggaagtatgagaagggatgatttccctgactactggggccagggaacgctggtcaccgtctcctcag

SEQ ID NO: 1955 - DNA, 366 bp, Homo sapiens
  source 1..366: mol_type = other DNA
caggagcaactggtgcagtctggggctgaggtgaagaagcctggggcctcagtgaaggtctcctgcaaggcctctggatacaccctcagcgactactatatacaatgggtgcgacaggcccctgggcaagggcctgagtggattggacgtatcaatcctaagactggaggcacaaaatatgcacagaagtttcagggcagggtcagcatgaccagggacacgtccatcagcacagtctacatggacctgagcaggctgagatctgacgacacggccatctactactgtgccagagagacgggttcggcggcctcctcctattacatggacgtctggggcaaagggaccacggtcaccgtctcctca

SEQ ID NO: 1956 - DNA, 370 bp, Homo sapiens
  source 1..370: mol_type = other DNA
caggtgcagctgcaggagtcgggcccaggactggtgaagccttcacagaccctgtccctcacctgcactgtctctggtggctccatcagcagtggtggttactactggagctggatccgccagcacccagggaagggcctggagtggattgggtacatctattacagtgggagcacctactacaacccgtccctcaagagtcgagttaccatatcagtagacacgtctaagaaccagttctccctgaagctgagctctgtgactgccgcggacacggccgtgtattactgtgcgagagagcaccattactatgatagtagtggttctatccagcactggggccagggcaccctggtcaccgtctcctcag

SEQ ID NO: 1957 - DNA, 372 bp, Homo sapiens
  source 1..372: mol_type = other DNA
gaagtccaactggtggagtctgggggaggtgtggtacggcctggggggtccctgagactctcctgtgtagcctctggattcacctttgatgattatggcatgacctgggtccgccaagttccagggaaggggctggagtgggtctctggtattaattggaatggaggtagcacaggttatacagactctgtgaagggccgattcaccatctccagagacaacgccaggaactccctgtatctgcagatgaacactctgagagccgatgacacggccctgtattactgtgcgagagggggccttgggagctatgtgcgctattactattacatggacgtctggggcaaagggaccacggtcaccgtctcctca

SEQ ID NO: 1958 - DNA, 376 bp, Homo sapiens
  source 1..376: mol_type = other DNA
gaggtgcagctggtggagtctgggggaggcttggtccagcctggggggtccctgagactctcctgtacagcctctggattcaccttcacgaacttttggatgagctgggtccgccaggctccagggaaggggctggagtgggtggccaacatgaagcaagatggaagtgagaaatactatgtggactctgtgaagggccgattcaccatctccagagacaacgccaagaactcactgtatctgcaaatgaacagcctgagagtcgaggacacggctgtgtattactgtgcgagagaaccccaggattcctttgagagtactgcttatcgggggcttggctactggggccagggaaccctagtcaccgtctcctcag

SEQ ID NO: 1959 - DNA, 382 bp, Homo sapiens
  source 1..382: mol_type = other DNA
caggtacagctgcagcagtcaggtccaggactggtgaggccctcgcagaccctctcactcacctgtgacatctccggggacactgtctctagcaacagtgcaggttggaactggatcaggcagtccccatcgagaggccttgagtggctgggaaggacatactacaggtccaagtggtataatgagtatgcagtttctgtggaaagtcgaataaccatcattgcagacacatccaagaaccagttctccctgcagctgagttctgtgactcccgaggacacggctgtgtattactgtgcaaaagattggtcccccaggggcatagcagcccctttctactttgactactggggccagggaaccctggtcaccgtctcctcag

SEQ ID NO: 1960 - DNA, 346 bp, Homo sapiens
  source 1..346: mol_type = other DNA
gaggtgcaggtggtggagtctggaggaggcttgatccagccgggggggtccctgagactctcctgtgcagcctctaggttcaccgtcaggagctactacatgacctgggtccgccaggctcccgggaaggggctggagtgggtctcagttatttatagcggtggcagcacatactacgcagactccgtgaagggccgattcaccatctccagagacaattccaagaacacggtgtatcttcaaatgaacagcctgagagtcgaggacacggccgtgtattactgtgcgattacgcagggaccccttgactactggggccagggaaccctggtcaccgtctcctcag

SEQ ID NO: 1961 - DNA, 370 bp, Homo sapiens
  source 1..370: mol_type = other DNA
gaggtgcaattggtggaatctgggggaggcttgatacagccgggggggtccctgagactctcctgtgcaggctctggattcaccttgtccacatatggcatgtactgggtccgccaggctccagggaaggggctggagtgggtctcatctatgagctttagtggtggtagtacatattatacagactccgtgaagggccggttcaccatctccagagacatttccaagaacactctgtatctgcaaatgaacagcctgagagtcgaggacacggccgtctattattgtgcgaaagaattgtcacgcaatattgcaattggtggaacgctcggccagtggggccagggaaccctggtcaccgtctcctcag

SEQ ID NO: 1962 - DNA, 361 bp, Homo sapiens
  source 1..361: mol_type = other DNA
gaagtgcagttggtggagtctgggggaggcttggtacagcctggcaggtccctgagactctcctgtgcagcctctggattcacctttgaagattatgccatgcagtggctccggcaagctccagggaagggcctagagtgggtctcgggtatcagttggaatagtggtagcataggctatgcggcctctctgaagggccgcttcaccatctccagagacaacgccaagaactccctgtatctgcaaatgaacagtctgagagatgaagacacggccttctattactgtgcaaaggctccatatggttcggggagtttcgttgactactggggccaaggaaccctggtcaccgtctcctcag

SEQ ID NO: 1963 - DNA, 370 bp, Homo sapiens
  source 1..370: mol_type = other DNA
caggtgcagctgcaggagtcgggcccaggactggtgaggccttcggagaccctgtccctcacctgcgctgtctctggctactccatcagcagtggcttctactgggactggatcaggcagcccccagggaagggactggaatggattggcagcatctatcacagtgggagcaggtatcacaacccgtccctcaagaatcgagtcgacatatcagtcgacacgtccaagaaccagttctccctgaaactgagctctgtgaccgccgcagacacggccgtctattactgtgcgagaggggctatggttcggggccacttcggcgaggtctttgactcctggggcctgggaaccctggtcaccgtctcctcag

SEQ ID NO: 1964 - DNA, 286 bp, Homo sapiens
  source 1..286: mol_type = other DNA
agtagctatggcatgcactgggtccgccaggctccaggcaaggggctggagtgggtggcagttatctggtatgatggaagtaataaatactatacagactccgtgaagggccgattcaccatctccagagacaattccaagaacacgctgtatctgcaaatgaacagcctgagagccgaggacacggctgtgtattactgtgcgagagattcccgcccctacggtggtaactccccttcccactttgactactggggccagggaaccctggtcaccgtctcctcag

SEQ ID NO: 1965 - DNA, 364 bp, Homo sapiens
  source 1..364: mol_type = other DNA
caggtccagctggtgcagtctggggctgaggtgaagaagcctgggtcctcggtgaaggtctcctgcaaggcttctggaggcaccttcagcagccacgctatcacctgggtgcgacaggcccctggacaagggcttgagtggatgggaaagatcatcgctatctttcatacaacaaactacgcacagaagttgcagggtagagtcacgattaccgcggacgaatccacgagcacagcctacatggagctgaacagcctgagatccgaggacacggccgtgtattactgtgcgagacacaatgattattatggttcggggagttattatgattggggccagggaaccctggtcaccgtctcctcag

SEQ ID NO: 1966 - DNA, 370 bp, Homo sapiens
  source 1..370: mol_type = other DNA
caggttcaactggtgcagtctggacctgacgtgaagaagcctggggcctcagtgagggtctcctgcaaggcttctggttacaccttttccagctatggtatcagctgggtgcgacaggcccctggacaagggcttgagtggctgggatgggtcagcggtttcaatggtaacacgaagtctgcacagaatctccagggcagagtcaccgtgaccaaagacacatccacgaccacggcctacttggaactgacgagcctgagatctgacgacacggccgtctacttttgtgcgagagacaacggctttatgagtacctggtatatagggtctgaccactggggccagggaaccctggtcaccgtctcctcag

SEQ ID NO: 1967 - DNA, 370 bp, Homo sapiens
  source 1..370: mol_type = other DNA
cagctgcagctgcgggtggcgggcccaggactggtgaagccttcggagaccctgtccctcacctgcactgtctctggcggctccatcaccagtcgttctcactactggggctggatccgccagtccccaggaaaggggctggagtggattgggaatatcttttatagtgcgaacaccaactacaacccgtccctcaagagtcgagtcaccatatcatcagacacgtccaagagtcagatctctatgaggctgacctctgtgaccgccgcggacacggccgtctattattgtgtgagaacaactagtgggaggtataacgcctactactttgactactggggccagggaaccctggtcaccgtctcctcag

SEQ ID NO: 1968 - DNA, 370 bp, Homo sapiens
  source 1..370: mol_type = other DNA
gaggtgcagctgttggagtctgggggaggcctggtgcagcctggggcgtccctgagactctcctgtgcagcctctggattcagctttaaggactatgccctgagctgggtccgccaggctccagggaaggggctggagtgggtctcacatattagtggtagtggtcttagtacatactacgcagactccgtcaagggccggttcaccatctccagagacaattccaagaacaccgtgtatttgcaaatgaacagcttgagagccgaggacacggccgtgtatttctgtgcgaaagatcgggtagtaggtcgcccctgggagtactcccttgacttctggggccagggaaccctggtcaccgtctcctcag

SEQ ID NO: 1969 - DNA, 367 bp, Homo sapiens
  source 1..367: mol_type = other DNA
caggtgcagctggtggagtctgggggtggcgtggtccagcctgggaggtccctgagactctcctgtgcagcctctggattcaccttcagaatctatgctatgcactgggtccggcaggctccaggcaaggggctggagtgggtggcagttatatcaaatgaaggaactaataaatactacgcagactccgtgaagggccgattcaccatttccagagacaattccaagaacacgttgtatttgcaaatgaatagcctgagacctgaggacgcggctgtgtattactgtgcgagagatccctctaatcccccgcactgggggaactttgactcttggggccagggaaccctggtcaccgtctcctcag

SEQ ID NO: 1970 - DNA, 370 bp, Homo sapiens
  source 1..370: mol_type = other DNA
gaggtgcagctgttggagtctgggggaggcttgatacagccgggggggtccctgagactctcctgtgcagcctctgcattcacatttaacaaatatgccatgaactgggtccgccaggctccagggaaggggctggagtgggtctcgcatattagtggcagtggtcttagcacatactacgcagactccgtgaagggccggttcaccatctccagagacaattccaagaacacgctgtatctgcaaatgaacagcctgagagccgaggacacggccgtctactactgtgcgaaagatctcgccgttacaccacctgcccagggttacttggaccgctggggccagggaaccctggtcaccgtctcctcag

SEQ ID NO: 1971 - DNA, 325 bp, Homo sapiens
  source 1..325: mol_type = other DNA
gaaatagtgatgacgcagtctccagccaccctgtctgtgtctccaggggaaagagccaccctctcatgcagggccagtcagagtgttagcagcagcttagcctggtaccagcagacacctggccaggctcccaggctcctcatctatggtgcatctaccagggccactggtatcccagccaggttcagtggcagtgggtctgggacagagttcactctcaccatcagcagtatgcagtctgaagattttgcagtttattactgtcagcagtataataactggcctccggtcaccttcggccaagggacacgactggagattaaac

SEQ ID NO: 1972 - DNA, 324 bp, Homo sapiens
  source 1..324: mol_type = other DNA
gaaattgtgttgacacagtctccagccaccctgtctttgtctccaggggaaagagccaccctctcctgcagggccagtcagagtgttagcagcttcttagcctggtaccaacagaagcctggccaggctcccaggctcctcatctatgatgcatccaacagggccactggcatccccgccaggttcagtggcagtgggtctgggacagacttcactctcaccatcagcagccttgagcctgaagattttgcagtttattactgtcagcagcgtagcaactggcctccgatcaccttcggccaagggacacgactggagattaaa

SEQ ID NO: 1973 - DNA, 325 bp, Homo sapiens
  source 1..325: mol_type = other DNA
gaaattgtgttgacacagtctccagccaccctgtctttgtctccaggggaaagagccaccctctcctgcagggccagtcagagtgtcggcagctacttagcctggtaccaacagaaacctggccaggctcccaggctcctcatctatgatgcatccaacagggccactggcatcccagccaggttcagtggcagtgggtctgggacagacttcactctcaccatcagcagcctagaggctgaagattttgcaatttattactgtcagcagcgtagcaactggcctccgctcactttcggcggagggaccaaggtggaaatcaaac

SEQ ID NO: 1974 - DNA, 325 bp, Homo sapiens
  source 1..325: mol_type = other DNA
gaaattgtgttgacacagtctccagccaccctgtctttgtctccaggggaaagagccaccctctcctgcagggccagtcagagtgttagcagcttcttagcctggtaccaacagaaacctggccaggctcccaggctcctcatctatgatgcatccaacagggccactggcatcccagccaggttcagtggcagtgggtctgggacagacttcactctcaccatcagcagcctagagcctgaagattttgcagtttattactgtcagcagcgtagcaactggcctccgatcaccttcggccaagggacacgactggagattaaac

SEQ ID NO: 1975 - DNA, 325 bp, Homo sapiens
  source 1..325: mol_type = other DNA
gaaatagtgatgacgcagtctccagccaccctgtctgtgtctccaggggaaggagtcaccctctcctgcagggccagtcagagtgttagcagcaacttagcctggtaccagcagaaacctggccaggctcccaggctcctcatctatggtgcatccaccagggccactggtatcccagccaggttcagtggcagtgggtctgggacagagttcactctcaccatcagcagcctgcagtctgaggattttgcagtttattactgtcagcagtattataactggcctcccctcactttcggcggagggaccaaggtggaaatcaaac

SEQ ID NO: 1976 - DNA, 324 bp, Homo sapiens
  source 1..324: mol_type = other DNA
gaaatagtgatgacgcagtctccagccaccctgtctgtgtctccaggggaaagagccaccctctcctgcagggccagtcagagtattagcagcagcttagcctggtaccagcagaaacctggccaggctcccaggctcctcatctatggttcatccaccagggccactggtatcccagccaggttcagtggcagtgggtctgggacagagttcactctcaccatcagcagcctgcagtctgaagattttgcagtttattactgtcagcagtataataactggcctccgctcactttcggcggagggaccaaggtggagatcaaa

SEQ ID NO: 1977 - DNA, 324 bp, Homo sapiens
  source 1..324: mol_type = other DNA
gaaatagtgatgacgcagtccccagccaccctgtctgtgtctccaggggaaagagccaccctctcctgcagggccagtcagactataagaagcgacttagcctggtaccagcagaaacctggccagcctcccaggctcatcatctatggtgcatccaccagggccactggtatcccagccaggttcagtggcagtgggtctgggacagagttcactctcaccatcagcagcctgcagtctgaagattctgcagtttatttctgtcagcagtataataactggccccccctcactttcggcggagggaccaaggtggagatcaaa

SEQ ID NO: 1978 - DNA, 324 bp, Homo sapiens
  source 1..324: mol_type = other DNA
gaaattgtgttgacacagtctccagccaccctatctttgtctccaggggaaagagccaccctctcctgcagggccagtcagagtgttagtacctacttagcctggtaccaacagaaacctggccaggctcccaggctcctcatctatgatgcatccagcagggccactggcatcccagccaggttcagtggcagtgggtctgggacagacttcactctcaccatcagcagcctggagcctgaagattttgcagtttattactgtcagcagcgtagcaactggcctccgatcaccttcggccaagggacacgactggagattaaa

SEQ ID NO: 1979 - DNA, 324 bp, Homo sapiens
  source 1..324: mol_type = other DNA
gaaattgtgttgacacagtctccagccaccctatctttgtctccaggggaaagagccaccctctcctgcagggccagtcagagtgttagtacctacttagcctggtaccaacagaaacctggccaggctcccaggctcctcatgtatgatgcatccaacagggccactggcatcccagccaggttcagtggcagtgggtctgggacagacttcactctcaccatcagcagcctagagcctgaagattttgcagtttattactgtcagcagcgtagcaactggcctccgatcaccttcggccaagggacacgactggagattaaa

SEQ ID NO: 1980 - DNA, 324 bp, Homo sapiens
  source 1..324: mol_type = other DNA
gaaattgtgttgacacagtctccagccaccctgtctttgtctccaggggaaagagccaccctctcctgcagggccagtcagagtgttagcggctacttagcctggtaccaacagaaacctggccaggctcccaggctcctcatctatgatgcattcaacagggccactggcatcccagccaggttcagtggcagtgggtctgggacagacttcactctcaccatcagtagcctagagcctgaagattttgcagtttattactgtcagcagcgtagcaactggcctccgatcaccttcggccaagggacacgactggagattaaa

SEQ ID NO: 1981 - DNA, 324 bp, Homo sapiens
  source 1..324: mol_type = other DNA
gaaattgtgttgacacagtctccagccaccctatctttgtctccaggggaaagagccaccctctcctgcagggccagtcagagtgttagtacctacttagcctggtaccaacagaaacctggccaggctcccaggctcctcatctatgatgcatccaacagggccactggcatcccagccaggttcagtggcagtgggtctgggacagacttcactctcaccatcagcagcctagagcctgaagattttgcagtttattactgtcagcagcgtagcaactggcctccgatcaccttcggccaagggacacgactggagattaaa

SEQ ID NO: 1982 - DNA, 324 bp, Homo sapiens
  source 1..324: mol_type = other DNA
gaaatagtgatgacgcagtctccagccaccctgtctgtatctccaggggaaagagccaccctctcctgcagggccagtcagagtattagtagggacttggcctggtaccagcagaaacctggccaggctcccaggctcatcatatatggtgcgtccaccagggccagtggtttcccacccaggttcagtggcagtgggtctgggacagagttcactctcaccatcagcagcctgcagtctgaagattttgcaatttattactgtcaacagtataataactggcctccgatcaccttcggccaagggacacgactggagattaaa

SEQ ID NO: 1983 - DNA, 324 bp, Homo sapiens
  source 1..324: mol_type = other DNA
gaaatagtgatgacgcagtctccagccaccctgtctgtgtctccaggggagagagccaccctctcctgcagggccagtcagagtgttagcagcaacttagcctggtaccagcagaaacctggccaggctcccaggctcctcatctacggtgcatccaccagggccactggtatcccacccaggttcagtggcagtgggtctgggacagagttctctctcaccatcagcagcctgcagtctgaggattttgcagtttattactgtcaacagtataataactggcctccgatcaccttcggccaagggacacgactggagattaaa

SEQ ID NO: 1984 - DNA, 324 bp, Homo sapiens
  source 1..324: mol_type = other DNA
gaaatagtgatgacgcagtctcaagccaccctgtctgtgtctccaggggaaagagccaccctctcctgcagggccagtcagagtgttggcagtaacttagcctggtaccagcagaaacctggccaggctcccaggctcctcatctatggtgcatccaccagggccactaatatcccacccaggttcagtggcagtgggtctgggacagaattcactctcaccatcagcagcctgcagtctgaagattttgcagtttattactgtcaacagtatcataactggcctccgatcaccttcggccaagggacacgactggagattaaa

SEQ ID NO: 1985 - DNA, 324 bp, Homo sapiens
  source 1..324: mol_type = other DNA
gaaatagtgatgacgcagtctccacccaccctgtctgtgtctccaggggaaagagccaccctctcctgcagggccagtcagagtgttagcagcaacttagcctggtaccagcagaaacctggccaggctcccaggctcctcatctatggtgcatccaccagggccactggtatcccagccaggttcagtggcagtgggtctgggacagagttcactctcaccatcagcagcctgcagtctgaagattttgcagtttattactgtcagcagtataataactggcctccgctcactttcggcggagggaccaaggtggaaatcaaa

SEQ ID NO: 1986 - DNA, 325 bp, Homo sapiens
  source 1..325: mol_type = other DNA
gaaattgtgttgacgcagtctccaggcaccctgtctgtgtctcccgggacaagggccaccctctcctgcagggccagtcagagtgttaagagcaactccttagcctggtaccagcagagacctggccagagtcccagactcctcatttatgatacatcaaagagggccgctggcatcccagacaggttcagtggcagtgggtctgggactgacttcacgctcagtatcagcggagtggagcctgaagacttcgcactgtattactgtcagcaatatggctcctcacccgggacgttcggccccgggaccaaggtggacatcaaac

SEQ ID NO: 1987 - DNA, 331 bp, Homo sapiens
  source 1..331: mol_type = other DNA
cagtctgtgctgactcagccaccctcagcgtctgggacccccgggcagagggtcaccatctcttgttctggaagcagctccaacatcggaagtaatactgtaaattggtaccagcaattcccaggaacggcccccaaactcctcatctatagtaatactcagcggccctcaggggtccctgaccgattctctggctccaagtctggcacctcagcctccctggccatcagtgggctcctgtctgaggatgaggctcattattactgtgcaacatgggatgacagcctgaatggtccggagttcggcggagggaccaagctgaccgtcctag

SEQ ID NO: 1988 - DNA, 325 bp, Homo sapiens
  source 1..325: mol_type = other DNA
gaaattgtgttgatgcagtctccaggcaccctgtctttgtctccaggggaaagagccaccctctcctgcagggccagtcagggtgttagtagcaactacttagcctggtaccaacagaaacctggccaggctcccaggctcctcatctatggtgcatccagcagggccactgccatcccagataggttcagtgccagtgggtctgggacagacttcactctcaccatcagcagactggaggcagaggattttgcagtgtattactgtcagcagtatggtagctcaccgtccacttttggccaggggaccaagctggagatcaaac

SEQ ID NO: 1989 - DNA, 331 bp, Homo sapiens
  source 1..331: mol_type = other DNA
caggcagggctgactcagccaccctcggtgtccaagggcttgagacagaccgccacactcacctgcactgggaacagcaacaatgttggcaaccaaggagcagcttggctgcagcagcaccagggccaccctcccaaactcctatcccacaggaataacaaccggccctcagggatctcagagagattatctgcatccaggtcaggaaatacagcctccctgaccattactggactccagcctgaggacgaggctgactattactgctcagcatgggacagtaccctcagtgcttgggtgttcggcggagggaccaagctgaccgtcctag

SEQ ID NO: 1990 - DNA, 340 bp, Homo sapiens
  source 1..340: mol_type = other DNA
gatattgtgctgacccagactcctctctctctgtccgtcacccctggacagccggcctccatctcctgcaagtctagtcagagcctcctacatagtgatggaaagacgtatttgtattggtacctgcagaggccaggccagtctccacatctcttgttctatgaactttccagccgggtctctggagtgccagataggttcagtgtcatcggctcagggacagatttctcacttaaaatcagccgggtggaggctgaggatgttgggatttattactgcatgcaaggtgtacaccttccttcgatcacttttgcccaggggaccaggctggagatcaaac

SEQ ID NO: 1991 - DNA, 325 bp, Homo sapiens
  source 1..325: mol_type = other DNA
gacgtccagatgacccagtctccttccaccctgtctgcatctgctggtgacagagtcaccatcacttgccgggccagtcagagtattggtaactggttggcctggtatcagcagaaaccagggaaagcccctaagctcctcatctatcaggcgtctagtttagaaagtggggtcccatcaaggttcagcggcagtggatctgggacagaattcactctcaccatcagcagcctgcagcctgatgattttgcaacttattactgccaacagtataatagttattctccgtggacgttcggccaagggaccaaggtggatgtcaaac

SEQ ID NO: 1992 - DNA, 334 bp, Homo sapiens
  source 1..334: mol_type = other DNA
caacttgtgctgactcaagcgccctctgcctctgcctccctgggagcctcggtcaagctcacctgcactctagacagtgggcacagcagttatgccatcgcatggcatcagcagcggccagagaagggccctcgatatttgatgactcttaatagtgatggcagccacatcaagggcgacgggatccctgatcgcttctcaggctccagctctggggctgagcgttacctcaccatctccagcctccagtctgaggatgaggctgactattactgtcagacctggggcagtggcattgctgtgttcggaggaggcacccagctgaccgtcctcg

SEQ ID NO: 1993 - DNA, 328 bp, Homo sapiens
  source 1..328: mol_type = other DNA
caggctgtggtgactcaggagccctcactgactgtgtccccaggagggacagtcactctcacctgtggctccagcactggagctgtcaccagtggtcattatccctactggttccagcagaagcctggccaagcccccaggacactgatttatgatacaagcaacaaatactcctggacacctgcccggttctcaggctccctccttgggggcaaagctgccctaaccctttcgggtgcgcagcctgaggatgaggctgagtattactgcttgctctcctatagtggtgctgtggtattcggcggagggaccaagctgaccgtcctag

SEQ ID NO: 1994 - DNA, 322 bp, Homo sapiens
  source 1..322: mol_type = other DNA
gatatccagatgacccagtctccatcctccctgtctgcatctattggagacagggtcaccatcacttgtcgggcgagtcagggcattagcaattctttagcctggtatcagcagaaaccagggaatgcccctaagctcctactctatggtgcctccactttggacagtgggatcccatccaggttcagtggcagtgggtccgggacggatttcactctcaccatcaccggcctgcaacgtgaagattttgcgtcttattactgtcaacaatactatggtggtccaatcactttcggccctgggaccagagtggatctcaaac

SEQ ID NO: 1995 - DNA, 325 bp, Homo sapiens
  source 1..325: mol_type = other DNA
gaaattgtgttgacgcagtctccaggcaccctgtctttgtctccgggggacagagccaccctctcctgcagggccagtcagagtgttagcaacaacttcttagcctggtaccagcagaaacctggccaggctcccaggttcctcatctatggtgcttccagcagggccactggcatcccagacaggttcagtggcagtgggtctgggacagacttcactctcaccatcagcagactggagtctgaagattttggaatgtattactgtcagcagtatggtagttcaccggtcactttcggcggagggaccaaggtggagatcaaac

SEQ ID NO: 1996 - DNA, 337 bp, Homo sapiens
  source 1..337: mol_type = other DNA
gacatcgtgatgacccagtctccagactccctggctgtgtctctgggcgagagggccaccatcaattgcaggtccagtcagagtgttttgtggaatgacaacaaaaagaactacttagcttggtatcagcagaaaccagggcagtctcctaaactgctcgtttcttgggcatctgtccgggaatccggggtccctgaccgattcagtggcagcgggtctggaacagacttcgctctcaccatcagtagcctgcaggctgaagatgcggcactatattactgtcagcagtattatgctactcctcttacttacggcggagggaccaaggtggagatca

SEQ ID NO: 1997 - DNA, 322 bp, Homo sapiens
  source 1..322: mol_type = other DNA
gacatccagatgacccaggctccatcctccctgtctgcatctgtaggagacagagtcaccatcacttgccgggcaagtcagaccatcaggaactatttaaactggtatcagcagaaaccagggaaagcccctaagctcctgatctatgctgcatccagtttacaaagtggggtcccatcaaggttcagtggcagcggctctgggacagacttcactctcaccatcagcagtctgcaacctgaagattttgcaacttactactgtcaacagagttacaatgtcccgaacacttttggccaggggaccaaactggacatccaac

SEQ ID NO: 1998 - DNA, 322 bp, Homo sapiens
  source 1..322: mol_type = other DNA
gccatccagttgacccagtctccatcctccctgtctgcatctgttggagacagagtcaccatcacgtgccgggcaagtccggccatcagtggtggtttagcctggtatcaacagaaaccagggaaacctcctaaggcactaatctatgatgtctccactttggaaaatggggtcccatcaaggttcggcggcagtggatctatgacagatttcaccctcaccatcagcagactgcagcctgaagattttgcagtttattactgtcaacagttgattggttatcctctcactttcggcggagggaccagggtggagatcaaac

SEQ ID NO: 1999 - DNA, 322 bp, Homo sapiens
  source 1..322: mol_type = other DNA
gaaataatcatgacgcagtctccagccaccctgtctgtgtctccgggggaaagagccaccctctcctgcagggccagtcagagtgttggcaccaacttagcctggtatcagcagaaacctggccaggttcccaggctcctcatctctggggcatccaccagggccactggtatcccagccaggttcagtggcagtgggtctgggacagagtttactctcaccatcagtagtatgcagtctgaagattttgcagtttattactgtcagcagtatgatggctggcctcgactgttcggccaagggaccaaggtggaaatcaaac

SEQ ID NO: 2000 - DNA, 322 bp, Homo sapiens
  source 1..322: mol_type = other DNA
gaaatagtgatgacgcagtctccagccaccctgtctgtgtctccaggggaaggagccaccctctcctgcagggccagtcagagtgtgaacagctacttagcctggtaccagcagaaacctggccaggctcccaggctcctcatctatggtgcatccaccagggccactggaatcccagccaggttcagtgggagtgggtctgggacagagttctctctcaccatcagcagcatgcagcctgcggattttgcagtttattactgtcaacagtataataattggcctcgaacgttcggccaagggaccaaggtggaaatcaaac

SEQ ID NO: 2001 - DNA, 328 bp, Homo sapiens
  source 1..328: mol_type = other DNA
gaaattgtgttgacacagtctccagtcaccctgtctttgtctccaggggaaagagccaccctctcctgcagggccagtcagagtattagcagcttcttagcctggtaccaacagaggcttggccagcctcccaggctcctcatctttgatgcatcccacagggccactggcgtcccagccaggttcagtggcagtgggtctgggacagacttcactctcactatcagcagcctggaacctgaagattctgcagtttattactgtcagcagcgtagcaactggcctccggggatcaccttcggccacgggacacgactggagattaaac

SEQ ID NO: 2002 - DNA, 317 bp, Homo sapiens
  source 1..317: mol_type = other DNA
tcctatgaactgactcagccaccctcagtctccgtctccccaggacagacagccagcatcacctgctctggacataaattgggggataagtatgcttcctggtatcaacagaagtcaggccagtcccctgtcctggtcatctatcgagatatccagcggccctcaggaactcctgagcgattctctggctccagctctgggaacacagccactctgaccatcagcgggacccaggctctggatgaggctgactattactgtcagacgtggcacaacaacactgtgatattcggcggagggaccaagctgaccgtcct

SEQ ID NO: 2003 - DNA, 334 bp, Homo sapiens
  source 1..334: mol_type = other DNA
cagtctgccctgactcagcctgcctccgtgtctgggtctcctggacagtcgatcaccatctcctgcactggaaccagcagtgatgttgggagttataaccttgtctcctggtaccaacaacacccaggcaaagcccccaaactcatgatttatgagggcagtaagcggccctcaggggtttctaatcgcttctctggctccaagtctggcaacacggcctccctgacaatctctgggctccaggctgaggacgagggtgattattactgctcctcatatgtacatagtagcacctcttgggtgttcggcggagggaccaagctgaccgtcctag

SEQ ID NO: 2004 - DNA, 340 bp, Homo sapiens
  source 1..340: mol_type = other DNA
gatattgtgatgacccagactccactctctctgtccgtcagccctggacagccggcctccatctcctgcaagtctagtcagagcctcctacatagtgatggaaagacgtatctttattggtatctgcagaggccaggccagtctccacatctcctattgcaagaagtttccagccgggtttctggagtgccagataggttcagtggcagcgggtcagggacagacttcacactgaaaatcagccgggtggaggctgaggatgttggaacttattactgcatgcagggtgtggaccttcctccgttcacttttggccaggggaccaagctggacctcaaac

SEQ ID NO: 2005 - DNA, 322 bp, Homo sapiens
  source 1..322: mol_type = other DNA
gagattgtgttgacacagtctccagccaccctgtcgctgtctccaggggaaagagccaccctctcctgcagggccagtcaaaatgttaaaaactttttactttggtatagtcagtcgccaggccagcctcccaggctcctcgtccatgatgcttccatcagggccaccggcatcccagccaggttcagtggcagtggatctgggacagactttactctcaccatcagcagcctggagcctgaagattctgcaatttatttttgtcagcagcgtggcacctggcctccgactttcggcggggggaccaggatagagatcaaac

SEQ ID NO: 2006 - DNA, 340 bp, Homo sapiens
  source 1..340: mol_type = other DNA
gatatcgtgctgacccagtctccagactccctggctgtgtctctgggcgagagggccaccatcaactgcaagtccaaccgaagtcttttttacagccgcaacaatcgggactacttagcttggtaccagcagaaaccaggacagcctcctaagctgctcatttactgggcatctactcggaagtccggggtccctgaccgattcagtggcagcgggtctgggacagatttctctctcaccgtcagcagcctgcaggctgaagatgtggcagtttattactgtcaacaatattatgatgatcggtacacttttggccaggggaccacgctggagatcaaac

SEQ ID NO: 2007 - DNA, 340 bp, Homo sapiens
  source 1..340: mol_type = other DNA
gacatcttgatgacccagtcgccagactcccaggctgtggctctgggcgagagggccaccatccactgcaggtccagtcagagtattttacacacttccgacaataagaactacctaagttggttccagcagaaaccaggacagcctcctaagctcctcatttactgggcatctacccgggcatccggagtccctgaccgcttcagtggcagtgggtctgggacagatttcactctcaccatcagtagcctgcaggctgaagatgcggcagtttattattgtcaacactatcatagttttccgttcatttttggccaggggaccaaagtggagatcaaac

SEQ ID NO: 2008 - DNA, 325 bp, Homo sapiens
  source 1..325: mol_type = other DNA
gacattgtgttgacacagtctccagccaccctgtctttgtctccaggggaaagagccaccctctcctgcagggccagtcaaagtattggcagtttcttggcctggtaccaacagaagcctggccagactcccaggctcctcatctatgatgcatccaacagggccactggcatcccagccaggttcagtggcagtgggtctgggacagacttcactctcaccatcagcagcctagagcctgaagattttgcagtttattactgtcagcagcgtagcaactggcctccgatcactttcggccaagggacacgactggagattaaac

SEQ ID NO: 2009 - DNA, 325 bp, Homo sapiens
  source 1..325: mol_type = other DNA
gacatccagatgacccagtctccttccgccctgtctgcatctgttggcgacagagtcaccatcacttgccgggccagtcaaaatattcatatttggttggcctggtatcagcaaaaaccagggaacgcccctaagctcctgatctataacgtttctagtttagagactggggtcccagcaaggttcagcggcagtggatatgggtcagacttcactctcatcatcagcagcctgcagcctgatgattctgcaacttactactgccagcagtattctacttacgcaaggtacacttttggccaggggaccaaggtggagatcaaac

SEQ ID NO: 2010 - DNA, 325 bp, Homo sapiens
  source 1..325: mol_type = other DNA
gaaattgtgttgacgcagtctccaggcaccctgtctttgtctccaggggaaagagccaccctctcctgcagggccagtcagagtgtaaggagcagctccttagcctggtaccagcagaaacctggccaggctcccaggctcctcatctatggtgcatccagtagggccactggcatcccagacaggttcagtggcagtgggtctgggacagacttcactctcaccatcagcagactggagcctggagattttgcagtgtattactgtcagcagtatggtagcttacctgggacgttcggccaagggaccaaggtggaaatcaaac

SEQ ID NO: 2011 - DNA, 321 bp, Homo sapiens
  source 1..321: mol_type = other DNA
tcttatgagctgacacagccaccctcggtgtcagtgtccccaggacagacggccaggatcacctgctctggagatgcattgccaaagcaatatgcttattggtaccagcagaagccaggccaggcccctgtgatggtgatttataaagacagtgagaggccctcagggatccctgagcgattctctggctccagctcagggacaacagtcaccttgaccatcagtggagtccgggcagaagacgaggctgaatattactgtcaatcaccaggcagtgatactcttgtggtattcggcggggggaccaagctgaccgtccta

SEQ ID NO: 2012 - DNA, 324 bp, Homo sapiens
  source 1..324: mol_type = other DNA
gacatccagatgacccagtctccatcctccctgtctgcatctgtaggagacagagtcaccatcacttgccgggcgagtcaggacattagggattatgttgcctggtatcagcaaaaacctgggaaagctcctagactcctgatctttgctacatccactttgcaatcgggagtcccatctcgattcagtggcaataaatctgggcctgatttcactctcaccatcagcagcctgcagcctgaagatgttgcaatttactactgtcaacagtataatagtgtcctcggggccactttcggccctgggaccaaagtggatatcaaa

SEQ ID NO: 2013 - DNA, 326 bp, Homo sapiens
  source 1..326: mol_type = other DNA
gaaattgtcttgacgcagtctccaggcacactgtctttgtctccaggggatcgagccaccctctcctgcagggccagtcagattcaaacgtacagtaacatagcctggtaccaacataaacctggccaggctcccaggctcctcatctatggggcatccggcagggcccctggcaccccagacaggttcagtggcagagggtctgggccagacttcactctcacaatcagtagactggaacctgaagattttgcagtgtattactgtcaggaatatgggagctcgccgaggttcactttcggccctgggacaaaagtggatttcaa

SEQ ID NO: 2014 - DNA, 339 bp, Homo sapiens
  source 1..339: mol_type = other DNA
atgttgtgatgacccagactccactctctctgtccgtcacccctggacagccggcctccatctcctgcaggtctagtcagagcctcctgcatgatgatggacacacctacatgtattggtatatacagaggccaggccggtctccacagctcctaatgtctgaagtttccagccgcttctctggagtgccagataggttcagtggcagcgggtcagggacagatttcacacttaaaatcagccgggtggaggctgaggatgttggggtttattactgcatgcagggtaaacactggaaggaattcactttcggccctgggaccaaggtggatatcaaac

SEQ ID NO: 2015 - DNA, 325 bp, Homo sapiens
  source 1..325: mol_type = other DNA
tcctttgtgctgactcaaccaccctcggtgtcggtggccccaggacagacggccaggatttcctgtgggggggacatcattggcagtcgagctgtgcactggtaccagcagaagccaggccaggcccctgttctggtcgtctatgataataacgaccggccctcagggatccctgagcgattctatggctccacttctgggaacacggccaccttgaccatcagcagggtcgaggccggggatgaggccgcctattactgtcaggtgtgggttagtagtagtcatcatgtggtcttcggcggagggaccgagctgaccgtcctag

SEQ ID NO: 2016 - DNA, 325 bp, Homo sapiens
  source 1..325: mol_type = other DNA
gacatccagatgacccagtctccatcctccctgtttgcatctgtaggagacagagtcaccatcacttgtcgggcaagtcagagcattagcatctccttaaattggtatcagcagagagtaggggaagcccctaagctcctgatctatgctgcatccaatttgcaaagtggggtcccatcaagattcagtggcagtggatctgggacagatttcactctcaccatcagcagtctgcaacctgaagattttgcaacctactactgtcaccagagttacactaccgctccggagacgttcggccaagggaccaaggtggaaatcaaac

SEQ ID NO: 2017 - DNA, 322 bp, Homo sapiens
  source 1..322: mol_type = other DNA
gacatccagatgacccagtctccttccaccctgtctgcatttgtaggagacagagtcaccatcacttgccgggccagtcagagtatcagtaagtggttggcctggtatcagcacaaaccagggaaaggcccaaagctcctgatctatgaggcatctagtttagaaactggggtcccatcaaggttcagcggcagcggatctgggacagaattcactctcaccatcagcagcctgcagcctgatgattttgcaacttattactgccaacagtataatagttacttggtcactttcggcggagggaccaaggtggagatcaaac

SEQ ID NO: 2018 - DNA, 343 bp, Homo sapiens
  source 1..343: mol_type = other DNA
gacatcgtgatgacccagtctccagactccctggctgtgtctctgggcgagagggccaccatcagttgcaagtccagccagagtattttacacacctccaacaataagaactacttagcttggtaccagcagaaaccaggacagcctcctaagttgctcattaaatgggcatctacccgggaatccggggtccctgaccgattcagtggcagcgggtctgggacagatttcactctcaccatcagcagcctgcaagctgcagatgtggcaatttattactgtcaacaatattataatcctggggcgctcactttcggcggagggaccaacgtggagatcaaac

SEQ ID NO: 2019 - DNA, 325 bp, Homo sapiens
  source 1..325: mol_type = other DNA
gaaattgtgttgacgcagtctccaggcaccctgtctttgtctccaggggaaagagccaccctctcttgtagggccagtcagagtattagcagcacctacttagcctggtaccagcagagacctggccaggctcccaggctcctcatctatggtgcatccagcagggccactggcatcccagacaggttcagtggcagcgggtctgggacagacttcactctcaccatcagcagactggagcctgaagattttgcagtgtattactgtcagcagtatggtgactcaaaatacagttttggcaaggggaccaagctggagatcaaac

SEQ ID NO: 2020 - DNA, 325 bp, Homo sapiens
  source 1..325: mol_type = other DNA
gaaatcgtgctgacgcagtctccagccaccctgtctgtgtctccaggggagagagccaccctctcttgcagggccagccagagtgttggcagcaacctggcctggtaccagcacagacctggccagactcccaggctcctcatctttggtgcgtccacccgggccacaggtatcccagggaggttcactggcagtgggtctgggacagagttcactctcaccatcaccagcatgcagtctgaagattttgcagtttattactgtcagcagtatcataactggcctcccctcactttcggcggagggaccaaggtggaaatcaaac

SEQ ID NO: 2021 - DNA, 335 bp, Homo sapiens
  source 1..335: mol_type = other DNA
tattgtgatgacgcagactccactctctctgtccgtcacccctggacagccggcctccatctcctgcaagtctagtcagagcctcctccatgaagatggaaagacttatttgtattggtacctgcagaagccaggccagtctccacaacccctaatctatgaagttttcggccggttctctggagtgccagataggttcactggcagcgggtcagggacagatttcacactgcaaatcagccgggtggaggctgacgatgttggagtttattactgcatgcaaggaaaacactggaaggaattcactttcggccctgggaccaaagtggatatca

SEQ ID NO: 2022 - DNA, 317 bp, Homo sapiens
  source 1..317: mol_type = other DNA
gaaattgtgttgacgcagtctccaggcaccctatctttgtctccaggggcaaaagccaccctctcctgcagggccagtcagcgtattgggagtaataacttagcctggtaccagcagggaattggccagcctcccaggctcctcatctatgctgcatccagccgggccactggcatcccagacaggttcagtggcagtgggtctgggacagacttcactcttaccatcagcagactggagcctgaagattttgctgtttattactgtcagcagtatgattcctcacctgcgacgttcggccaagggaccaaggtgga

SEQ ID NO: 2023 - DNA, 322 bp, Homo sapiens
  source 1..322: mol_type = other DNA
gacatccagttgacccagtctccatccttcctgtctgcgtctgtcggagacagagtcacaattacttgccgggccagtcaggtcatcagtaattatttaggctggtatcagcaaaaaccagggaaagcccctaaactcctgatctatgctgcatatattttgcaaagtggggtcccaacaaggttcagcggcggtggatctgggacacaattcactctcacaatcagcagcctgcggcctgaagattctgcaacttattactgtcaacaggttcacagttatccactcactttcggcggagggaccaaggtggagatcaaac

SEQ ID NO: 2024 - DNA, 331 bp, Homo sapiens
  source 1..331: mol_type = other DNA
cagtctgccctgactcagcctccctccgcgtccggctctcctggacagtcagtcacaatctcctgcactggaaccagcagtgacgttggtggttataactatgtctcctggtatcaacaccacccaggcaaagcccccaaactcattctttatgaggtctctaagcggccctcgggggtcccttatcgcttctctggctccaagtctggcaacacggcctccctgaccgtctctggactccaggctgacgatgaggctgactattactgcacctcatatgcaggcagtaatacactaatatccggcggagggaccaggctggccgtcctag

SEQ ID NO: 2025 - DNA, 328 bp, Homo sapiens
  source 1..328: mol_type = other DNA
gaaattgtgttgacgcagtctccaggcaccctgtctttgtctccaggggaaagagccaccctctcctgcagggccagtcacactgttaccaacacctacttagcctggtaccagcaaaaacctggccaggctcccaggctcctcatctatgatacatccagcagggccactggcatcccagacaggttcggtggcagtgggtctgggacagacttcactctcaccatcagcagactggagcctgaagattttgcagtgtattactgtcagcaatatggtaggtcaccggggctcactttcggcggagggaccaaggtggagatcaaac

SEQ ID NO: 2026 - DNA, 325 bp, Homo sapiens
  source 1..325: mol_type = other DNA
tcgtatgcgctgactcagccaccctcggtgtcggtggccccaggacagacggccaggatttcctgtgagggcaacatcattggcactagaagtgtgcactggtaccagcagaggcctggccaggcccccgtgctggtcgtctatgatgatagcgaccggccctcaggaatccctgagcgattctctggctccaactctgggaacacggccactttgaccatcagcagggtcgaagccggggatgaggccgactattactgtcaggtgtggcttagtagtaattatcaggtgatcttcggcggagggaccgagctgaccgtcctag

SEQ ID NO: 2027 - DNA, 331 bp, Homo sapiens
  source 1..331: mol_type = other DNA
cagtctgtgctgactcagccaccctcagcgtctgggacccccgggcagagggtcaccatctcttgttctggaagcagctccaatatcggaaagaacattgtaaattggtaccaacaactcccaggcacggcccccagactcctcatctatgaaactgatcagcggccctcaggggtccctgaccgattctctggctcccagtctggcaccacagcctccctggccctcagtgggctccagtctgaggatgaggctgattactattgtgcaacatgggatgacagtctgagagcttgggtgttcggcggcgggaccaaggtgaccgtcctag

SEQ ID NO: 2028 - DNA, 337 bp, Homo sapiens
  source 1..337: mol_type = other DNA
gaaatcgtgatgacccagactccaaactctctgtccgtcacccctggagagccggcctccatctcctgcaagtctagtcagagcctcctgcatagtgatggaaagacctatttgtattggtacttgcagagggcaggccagtctcctcagctcctgttttatgaagtttcgagtcgattctctggagtgccagataggttcagtgccagcgggtcagggacagatttcacactgaaaatcagtcgggtggaggctgaagatcttggggtttattactgcatgcaaggtatgcaccctcctccgtacacctttggccaggggacgaagctggatatca

SEQ ID NO: 2029 - DNA, 322 bp, Homo sapiens
  source 1..322: mol_type = other DNA
gacatccagatgacccagtctccatcctccctgtctgcatctgtaggggacagagtcaccatcacttgccggacaagtcagaacatttacaagtatttaaattggtatcagcaaaagccagggaaagcccctaagctcctgatctattctgcatccagtttgcagagtggggtcccatcacggttcagtggcagtggatctgggacagatttcactctcaccatcaccagtctggaccttgaggatgttgccactgtctactgtcaacagagttacagttccccattcactttcggccctgggaccagagtggaaatcaaac

SEQ ID NO: 2030 - DNA, 334 bp, Homo sapiens
  source 1..334: mol_type = other DNA
cagtctgtgctgactcagccaccctcagcgtctgggacccccgggcagagggtcaccatctcttgttctggaagcgactccaacatcggaagtaattctgtatgctggtaccagcagctcccaggaacggcccccaaactcctcgtctttagggataatcagcggccctcaggggtccctgaccgattctctggctccaagtctggcacctcagcctccctggccatcagtgggctccggtccgaggatgaggctcattattactgtgcagcatgggatgacagactgagtggctattgggtgttcggcggagggaccaagctgaccgtcctag

SEQ ID NO: 2031 - DNA, 322 bp, Homo sapiens
  source 1..322: mol_type = other DNA
gacatccagatgacccagtctccatcctccctgtctgcatctgtaggagacagagtcaccatcacttgccgggcgagtcatggcattaacaatcttttagcctggtatcagcaaaaaccagggaatgttcccaagctcctgatctatgatgcatccattttggaatcaggggtcccttctcggttcagtggcagtggatctgggacagatttcactctcaccatcagcagcctgcagcctgaagattttgcaacttatttctgtcaagaatataacattgccccgtggacgttcggccaagggaccaaggtggaagtcaaac

SEQ ID NO: 2032 - DNA, 334 bp, Homo sapiens
  source 1..334: mol_type = other DNA
cagtctgttctgacgcagccgccctcagtgtctggggccccagggcagagggtcaccatctcctgcactgggagtagctccaacatcggggcagattttgatgtacattggtatcagcaacttccaggaaaagcccccaaacttttcatctctggtaacaacaatcggccctcaggggtccctgaccgattctctggctccaagtctgacacgtcagcctccctggccatcagtgggctccaggctgaggatgaggctgattattactgccagtcgtatgacagcagcctgaatcactgggtgttcggcggagggaccaaggtgaccgtcctag

SEQ ID NO: 2033 - DNA, 337 bp, Homo sapiens
  source 1..337: mol_type = other DNA
cagcttgtactgactcaatcgccctctgcctctgcctccctgggagcctcggtcaggctcagctgctctctgaccagtgggcacaccaactacggcatcgcatggcatcagcagcagccagagaagggccctcgttacttgatgaaaattaacagtgatggcagccataccaaagacgacgggatccctgatcgcttctcaggttccacgtctgggactgactactacctcaccatctccaacctccagtctgaagatgaggctgactactattgtcagacctggggcggtggcattcaaggggtgttcggcggggggaccaagctggccgtcctag

SEQ ID NO: 2034 - DNA, 328 bp, Homo sapiens
  source 1..328: mol_type = other DNA
cagtctgccctgactcagcctccctccgcgtccgggtctcttggacagtcagtcaccatctcctgcactggaaccaccagtgacgttggtgcttatgatcgtgtctcctggtaccaacatcacccagacaaagcccccaaactcatgatttatgaggtcagtaagcgtccctcaggggtccctgatcgcttctctggctccaagtctgtcaacacggcctccctgaccgtctctgggctccaggctgaggatgaggctgactattactgcagctcatatgcaggcaactcttgggtgttcggcggagggaccaaggtgaccgtcctag

SEQ ID NO: 2035 - DNA, 337 bp, Homo sapiens
  source 1..337: mol_type = other DNA
cagtctgtgctgacgcagccgccctcagtgtctggggccccagggcagagggtcaccatctcctgcactgggagcagctccaacatcggggcaggttttgatgtacactggtaccagcaacttccaggaacagcccccaaactcctcatctatggtaacagcaatcggccctcaggggtccctgaccgattctctggctccaagtctggcacctcagcctccctggccatcactgggctccaggctgaggatgaggctgattattactgccagtcctatgacagcagcctgagtggttatgcggtattcggcggagggaccaagctgaccgtcctag

SEQ ID NO: 2036 - DNA, 335 bp, Homo sapiens
  source 1..335: mol_type = other DNA
gatgttgtggtgactcagtctccactctccctgcccgtcacccttggacagccggcctccatctcctgcaagtctagtcaaagcctcctacacaatgatggaaacacctacttgaattggtttcagcagaggccaggccaatctccaaggcgcctaatttatatgctttctaaccgggactctggggtcccagtcagattcagcggcagtgggtcaggcactgatttcacactgacaatcagcagggtggaggctgaggatgttggggtttattactgcatgcaacagatacactggccattcactttcggccctgggaccagagtggatatcaa

SEQ ID NO: 2037 - DNA, 325 bp, Homo sapiens
  source 1..325: mol_type = other DNA
gaaatagtgatgacgcagtctccagccaccctgtctgtgtctccaggggaaagagccaccctctcctgcagggccagtcagagtgttagcggcaacgtagcctggtaccagcagaaacctggccaggctcccaggctcctcatctatggtgcatccaccagggccactggtatccccgccaggttcagtggcagtgggtctgggacagagttcactctcaccatcagcagcatgcagtctgaagattttgcagtttattactgtcagcagtataataactggcctccgtacagttttggccaggggaccaggctggagatcaaac

SEQ ID NO: 2038 - DNA, 323 bp, Homo sapiens
  source 1..323: mol_type = other DNA
gagattgtgttgacgcagtctccaggcaccctgtctttgtctccaggggaaagggccaccctctcctgcagggccagtcagagtgtaaagagcagctccttagcctggtaccagcagaaacctggccaggctcccaggctcctcatctatgatgtatccactagggccactggcatcccagacaggttcagtggcagtgggtctgggacagacttcactctcaccatcagcagactggagcctgaagattttgcagtgtattactgtcaacagtatggtgtctcaccagggacgttcggccgagggaccaaggtggaaatcaa

SEQ ID NO: 2039 - DNA, 340 bp, Homo sapiens
  source 1..340: mol_type = other DNA
gacatcgtggtgacccagtctccagactccctggctgtgtctctgggcgagagggccaccatcaactgcaggtccagccagagtgttttctacgactccaacaaaaagaactacttagcttggtatcagcagagaccaggacagcctcctaagctgctcttttactgggcttccacccgggaatccggggtccctgaccgattcagtgccagcgggtctgggacaaatttcaatctcatcatcaacggcctgcagcctgaagatgtggcagtttatttctgtcaacaatattatggtctcccgctcactttcggcggagggaccgtggtggagatcaaac

SEQ ID NO: 2040 - DNA, 325 bp, Homo sapiens
  source 1..325: mol_type = other DNA
gaaattgtgttgacacagtctccagccaccctgtctttgtctccaggggaaagagccaccctctcctgcagggccagtcagagtgttggcgcctacgtagcctggtaccaacagaaacctggccaggctcccaggctcctcatctatgatgcgtcccacagggccactgacatcccagccaggttcagtggcagtgggtctgggacagacttcactctcgccatcagcagcgtagagcctgaagattttgcagtttattactgtcagcagcgtgccaactggcctccgctcactttcggcggagggaccaagctggagatcaaac

SEQ ID NO: 2041 - DNA, 340 bp, Homo sapiens
  source 1..340: mol_type = other DNA
gacatcgtgatgacccagtctccagactccctggctgtgtctctgggcgagagggccaccatcaactgcaagtccagccagcgtgttttatacagctccaacagtaagaactacgtagcttggtaccagcacaaagcaggacagcctcctaaattgctcttttactgggcatcttcccgggaatccggggtccctgaccgattcagtggcagcgggtctgggacagatttcactctcaccatcagcagcctgcaggctgaagatgtggcagtttattactgtcagcaatattatactatgccgtatacttttggccaggggaccaagctggagatcaaac

SEQ ID NO: 2042 - DNA, 318 bp, Homo sapiens
  source 1..318: mol_type = other DNA
tcctatgagctgacacagccatcctcagtgtcagtgtctccgggacagacagccaggatcacctgttcaggagatttgctgacaaacaaatatgctcggtggttccggcagaggccaggccaggcccctttagttttgatttataaagacactgagcggccctcagggatccctgagcgattctccggctccatctctgggaccacagtcaccttgaccatcagcggggcccgacttgaggatgagggtgaatattactgttactctgcgtctgacaacattgtgtttctcggcggagggaccaagctgaccgtccta

SEQ ID NO: 2043 - DNA, 334 bp, Homo sapiens
  source 1..334: mol_type = other DNA
gatattgtgatgacccagactccactctctctgcccgtcacccctggacagccggcctccatctcctgcaagtctagtcagagcctcgtgcatactgatggcaagacctatttgtcttggtacctgcagaagcctggccagtctccacagcccctaatctatgaactttccagtcgcttctctggagtgccagataggttcagtggcagcgggtcagggacagatttcacactgaaaatcagccgggtggaggctgaagatgttggaatttattactgcatgcagggtctacacctttacagttttggccaggggaccaagctggagatcaaac

SEQ ID NO: 2044 - DNA, 337 bp, Homo sapiens
  source 1..337: mol_type = other DNA
gacatcgtgctgacccagtctccggactccctggctgtgtctctgggcgagagggccatcatcaactgcaagtccagccagagtgttttgtacgactccaacaaaaagaactacttagcttggtaccaacaaaaaccaggacagcctcctaagttgctcatttactgggcgtctacccgggaatccggggtccctgaccgcttcagtggcagcgggtctgagacagatttcactctcaccatcagcagcctgcaggctgaagatgtggcagtttattactgtcaacaatactataatattccgctctctttcggcggagggaccaaggtggagatca

SEQ ID NO: 2045 - DNA, 343 bp, Homo sapiens
  source 1..343: mol_type = other DNA
gattttgtgatgactcagtctccactctccctgctcgtcacccttggacagccggcctccatctcctgcaggtctagtcaaagcctcgtacacagtaatgatggaaaaacgtacttgagttggtttcagcagaggccaggccaatctccaaggcgcctaatttatgaggtttctaagcgggactctggggtcccagagagattcagcggcagtgggtcagacactgatttcacactgaaaatcgacagggtggaggctgaggatgttggggtttattactgcatgcaaattaaacactggcgattattcactttcgggcctgggaccaaagtggaaatcaaac

SEQ ID NO: 2046 - DNA, 337 bp, Homo sapiens
  source 1..337: mol_type = other DNA
gatattgtgatgacccagactccactctcctcacctgtcacccttggacagccggcctccatctcctgcaggtctagtcaaagcctcgtacacagtgatggaaacacctacttgacttggcttcagcagaggccaggccagcctccaagactcctgatttataagatttctaaccggttctctggggtcccagacagattcagtggcagtggggcagggacagatttcacactgaaaatcagcagggtggaaactgaggatgtcggggtttattactgcatgcaaggtacacaatttcccttcactttcggcggagggaccaaggtggagatcaaac

SEQ ID NO: 2047 - DNA, 328 bp, Homo sapiens
  source 1..328: mol_type = other DNA
gaaattgtgttgacgcagtctccaggcaccctgtctttgactcctggagaaagagccaccctctcatgcagggccagtcagagtgtgagcagcaggtctttggcctggtaccagcagaaacctggccaggctcccaggctcctcatctatgatgcaaccaccagggccactggcatcccagacaggttcagcggcagtgggtctgggacagacttcactctcaccatcagcagactggagcctgaagattttgcagtgtattactgtcagcagtatggtgactctctctctctcactttcggccctgggaccacagtggattccaaac

SEQ ID NO: 2048 - DNA, 322 bp, Homo sapiens
  source 1..322: mol_type = other DNA
gaaacattaatgacgcagtttccacaaaccctgtctgcctctccaggggagagagtcaccctctcctgcagggccagtcagcctgtcggcggcagcctagcctggtacctcctgagacctgggcaggttcccagacttctcatccattctgtatccagaagggccactgatgttccagccaggttcagtggcagtgggtctgggacagagttcactctcgtcatctccagcctgcagtctgaagattttggagtttactcatgtcagcagtattatgacaggccttggacgttcggccaagggaccagggtggatctcaaac

SEQ ID NO: 2049 - DNA, 337 bp, Homo sapiens
  source 1..337: mol_type = other DNA
gacttcgtgatgacccagtctccagactccctgactgtgtctctgggcgcgagggccaccatcaactgcaagtccagccagagtgttttatacacctccaataaaaagaattacttagcttggtaccagcagaaatcaggccaacctcctaaagtgatcatttactgggcatctgtccgggaatccggggtccctgaccgattcagtggcagcgggtctgggacagatttcagtctcaccatcaacaacctgcaggctgacgatgtggcagtttattactgccagcaatattatgacaaaccgacgttcggccaagggaccaaggtggaaatcaaac

SEQ ID NO: 2050 - DNA, 325 bp, Homo sapiens
  source 1..325: mol_type = other DNA
gaaattgtgttgacacagtctccagccaccctgtctttgtctccaggggaaagagccaccctctcctgcagggccagtcagagtgttagcagcttcttagcctggtaccaacagaaacctggccaggctcccaggctcctcatctatgatgcatccaacagggccactggcatcccagccaggttcagtggcagtgggtctgggacagacttcactctcaccatcagcagcctagagcctgaagattttgcagtttattactgtcagcaacgtagtaactggcctccggtcaccttcggccaagggacacgactggagattaaac

SEQ ID NO: 2051 - DNA, 322 bp, Homo sapiens
  source 1..322: mol_type = other DNA
gaaatagtgatgacgcagtctccagccaccctgtctgtttctccaggggaaagagccaccctctcctgcagggccagtcagagtgttagcagcaacttagcctggtaccagcagaaacctggccaggctcccaggctcctcatctatggtgcatccaccagggccactggtttcccagccaggttcagtggcagtgggtctgggacagagttcactctcaccatcagcagcctgcagtctgaagattttgcagtttattactgtcagcagtattatagctggcctcggagttttggccaggggaccaagctggagatcaaac

SEQ ID NO: 2052 - DNA, 328 bp, Homo sapiens
  source 1..328: mol_type = other DNA
cagtctgcgctgacccaggaagcctcgatgtcagggaccgtgggacaaaaggtcaccctctcctgtagtggaaacagtgacaacgttggaagttatgctgtgggctggtaccaacagatttctcacggtgctcccaaaagtgtgatgtttggaaattctctgccctcagggatccctgaccgcttctctggatcaaagtctgggaccacagcctccctgactatctcgggcctccagcctgaggacgaggctgattattactgttcagtatgggacgaccgcctcaatgctcgcgtgttcggcggagggactaagttgaccgtcctag

SEQ ID NO: 2053 - DNA, 325 bp, Homo sapiens
  source 1..325: mol_type = other DNA
gacatccagatgacccagtctccttccaccctgtctgcatctgtaggagacagagtcaccatcacttgccgggccagtcagagtattagtagctggttggcctggtatcagcagaaaccagggaaagcccctaaactcctgatctataaggcgtctaatttacaaagtggggtcccatcaaggtttagcggcagtggatctgggaccgaattcactctcaccatcagcagcctgcagcctgatgattttgcaacttatgtctgccaacagtatgataatttttatccgtacacttttggccaggggaccaaactggaaatcaaac

SEQ ID NO: 2054 - DNA, 325 bp, Homo sapiens
  source 1..325: mol_type = other DNA
tcatatgtgctgactcaacctccctcggtgtcagtggccccaggacagacggccaggatgacctgtggggcagacaacattgtgagtagaaatgttcactggtaccagcagaaggcaggccgggcccctgtggtggtcgtctatgacgatagcgaccggccctcaggtgtccctgagcgcttctctggctccaactctgagaacacggccaccctgaccatcagcagggtcgaagccggggatgaggccgactattattgtcaggtttgggacactcccagtgatcaatgggtgttcggcggagggaccaagctgaccgtcctag

SEQ ID NO: 2055 - DNA, 337 bp, Homo sapiens
  source 1..337: mol_type = other DNA
gacatcgtgatgacccagtctccagactccctggctgtgtctctgggcgagagggccaccatcaactgcgagtccagccagagtgttttatacagctccaacgagaagaactacttagcttggtaccagcagaaaccaggacagcctcctaaggtgctcatttactgggcatctacccgggaatccggggtccctgaccgattcattggcggcgggtctgggacagatttcactctcaccatcagcagcctgcaggctgaagatgtggcagtttattactgtcagcaatattatagtattccgacgttcggccaagggaccaaactggaaatcaaac

SEQ ID NO: 2056 - DNA, 340 bp, Homo sapiens
  source 1..340: mol_type = other DNA
gacatcgtgatgacccagtctccagactccctggctgtgtctctgggcgagagggccaccatcaattgcaagtccagccagagtgttttacacagctccaacaataagaacttcttagggtggtaccagcagaaaccaggtcagcctcctaagctgctcattgactgggcatctacccgggaatccggggtccctgaccgattcagtggcagcgggtctgggacagatttcactctcaccatcagcagcctgcaggctgaagatgtggcggtttattactgtcagcaagattatagtattccgtggacgttcggccaagggaccaaggtggaaatcaaac

SEQ ID NO: 2057 - DNA, 340 bp, Homo sapiens
  source 1..340: mol_type = other DNA
gattttgtgatgactcagtctccactctccctgcccgtcacccttggacagccggcctccatctcctgcaggtccagtcaaagcctcgtgcacggtgatggaaacacctacttgagttggtttcaccagaggccaggccaatctccaaggcgcctaatttatgaggtttctaagcgggactctggggtcccagacagattcagcggcagtgggtcagacactgatttcacactgcaaatcgacagggtggaggctgaggatgttggggtttattactgcatgcaaattaaacactggcatatattcagtttcgggcctgggaccaaagtggaaatcaaac

SEQ ID NO: 2058 - DNA, 322 bp, Homo sapiens
  source 1..322: mol_type = other DNA
gacatccagatgacccagtctccatctgccatttctgcatctgtgggagacggagtcaccatgacttgtcgggcgagtcaagacatttccgattctttaatttggtttcagcagaaagcagggcaagtccctaagcgcctgatctatgctacttccaatttggagagtggggtcccatcaaggttcagcggcagtggatctgggacagaattcactctcacaatcaccagcctgcagcctgaagattttgcaacttattactgtctacaacataagagttatccgcggacgttcggccaagggaccaaggtggacatcaaac

SEQ ID NO: 2059 - DNA, 322 bp, Homo sapiens
  source 1..322: mol_type = other DNA
gccatccggttgacccagtctccatcctccctgtctgcatctattggcgacagagtcaccatcacttgccggacaagtcagcacattagtagtggtatagcctggtatcaacaaaaaccagggaaagctcctgacctcctgatctctgatgtctccaatttaagaagtggcgtcccatcaaggttcggcggcagtgcatctgggacagatttcactctcaccatcagcagcctgcagcctgaagattctgcaacttatttctgtcaacagttttatagttatcccctcactttcggcggagggaccaaggtggagatcaaac

SEQ ID NO: 2060 - DNA, 325 bp, Homo sapiens
  source 1..325: mol_type = other DNA
gagattgtgttgacacagtctccagccaccctgtctttgtctccaggggaaagagccaccctctcctgtagggccagtcagagtgttagcagctacttggcctggtaccaacagaaacctggccaggctcccaggctcctcatctatgatgcatccaacagggccagtggcatcccagccaggttcagtggcagtgggtctgggacagacttcactctcaccatcagcagcctagagcctgaagattttgcagtttattactgtcagcagcgtagcaactggcctccgatcaccttcggccaagggacacgactggagattaaac

SEQ ID NO: 2061 - DNA, 322 bp, Homo sapiens
  source 1..322: mol_type = other DNA
gaaattgtgttgacgcagtctccaggcaccctgtctttgtctccaggggaaagagccaccctctcctgcagggccagtcagagtgttaggagcagctccttagcctggtaccagcagaagcctggccaggctcccagactcctgatatatggtgcatctaatagggccagtggcatcccagacaggttcagtggcagtgagtctgggacacacttcactctcaccatcaacagactggagcctgaagattttgcagtgtattactgtcagcaatatggtgactcaccaggcacgttcggccaagggaccaaggtggaaatca

SEQ ID NO: 2062 - DNA, 322 bp, Homo sapiens
  source 1..322: mol_type = other DNA
gacatccagatgacccagtctccatcctcactgtctgcatctgtaggagacagagtcaccatcacttgtcgggcgagtcagggcattagcaattatttagcctggtttcagcagaaaccagggaaagcccctaagtccctgatctatgctgcatccagtttgcaaagtggggtcccatcaaagttcagcggcagtggatctgggacagatttcactctcaccatcagcagcctgcagcctgaagattttgcaacttattactgccaacagtataatagttaccctcgcactttcggcggagggaccaaggtggagatcaaac

SEQ ID NO: 2063 - DNA, 325 bp, Homo sapiens
  source 1..325: mol_type = other DNA
tcctatgagctgactcagccaccctcagtgtccgtgtccccaggacagacagccagcatcacctgctctggagataaattgggggataaatatgcttcctggtatcagcagaagccaggccagtcccctatgctggtcatctatcaagataccaagcggccctcagggatccctgagcgattctctggctccaactctgggaacacagccactctgaccatcgccgggacccagactatggatgaggctgactattactgtcaggcgtgggacaccagcactgtccgttatgtcttcggaactgggaccaagatcaccgtcctag

SEQ ID NO: 2064 - DNA, 338 bp, Homo sapiens
  source 1..338: mol_type = other DNA
gatatcgtgatgacccagtatccagactccctggccgtgtctctgggcgagagggccaccatcaactgccagtccagccagagtgttttatacagctccaacaataagaactacttagcttggtaccaacagaaaccaggacagcctcctaaagcactcatttactgggcatccacccgagaatccggggtcccagaccgattcagtggcagcgggtctgggacagatttcactctcaccatcagcagcctgcaggctgaagatgcggcaatttattactgtcagcaatattacagtgatacattcacttttggccaggggaccaagttggaaatcaa

SEQ ID NO: 2065 - DNA, 325 bp, Homo sapiens
  source 1..325: mol_type = other DNA
gaaattgtgctgacacagtctccagccaccctgtctttgtctccaggagacagagccaccctctcctgcagggccagtcaaaatattcgcaacttcttagcctggtaccaacagaaacctggccgggctcccaggctcctcatctatgatgcgtccaacagggccactggcatcccagccaggttcagtggcagtgggtctgggacagacttcacgctcaccatcagcagcctggagcctgaggattttgcaatctattactgtcaacaacggagtaagtggccctcgatcaccttcggccaagggacacgactggagattaaac

SEQ ID NO: 2066 - DNA, 319 bp, Homo sapiens
  source 1..319: mol_type = other DNA
ttgtgttgacgcagtctccaggcaccctgtctttgtctccaggggaaacagccaccctctcctgcagggccagtcagggtcttaccagcagccacttagcctggtaccagcagagacctggccaggctcccaggctcctcatctatggtgcgtccaacagggccactggcatcccaaatagattcactggcagtgggtctggaacagacttcactctcaccatcaacagactggagcctgaagattttgcggtgttttactgtcagcagtatgattcctcaccgtacacttttggccaggggaccaaggtcgagatcaa

SEQ ID NO: 2067 - DNA, 328 bp, Homo sapiens
  source 1..328: mol_type = other DNA
caggcagggctgactcagccaccctcggtgtccaagggcttgagacagaccgccacactcacctgcactgggaacagcaccacttttgccaaccaagaggcagcttggctgcagcagcaccagggccaccctcccaaactcctctccaggaatgacaaccggccctcagagatctcagagagattatctgcatccaggtcaggaaacacagcctccctgaccattactggactccagcctgaggacgaggctgtctattactgctcaacatgggacagcagcctcagtgccgtggtcttcggcggagggaccaagctgaccgtcctag

SEQ ID NO: 2068 - DNA, 340 bp, Homo sapiens
  source 1..340: mol_type = other DNA
gacttcgtgatgacccagtctccagactccctgactgtgcctctgggcgagagggccaccatcaactgcaggtccagccagagtgtttttttcgactccaacggtaagaactacttagcttggtatcagcagaaaccgggacggcctcctaagttgctcattaactgggcatctacccgggaatccggggtcccagaccgattcagtggcagcgggtctgggacagatttcactctcaccatcaacagcctgcaggctgaagatgtggcagtttactactgtcagcaaaattatgagattcctctcactttcggcggagggaccaaggtggaagtcaaac

SEQ ID NO: 2069 - DNA, 322 bp, Homo sapiens
  source 1..322: mol_type = other DNA
gacatccagctgacccagtctccttccaccctgtctgcatctgtaggagacagagtcaccatcacttgccgggccagtcaaagtgttagtagttggttggcctggtatcagcagaaaccagggaaagcccctaagctccttatctatgaggcatctaatttagaaagtggggtcccatcaaggttcagcggcagtggatctgggacagaattcactctcaccatcagcagcctgcagcctgatgattttgcaacttattactgccaacagtataatagttacctgctcactttcggcggagggaccaaggtggagatcaaac

SEQ ID NO: 2070 - DNA, 334 bp, Homo sapiens
  source 1..334: mol_type = other DNA
gattttgtgatgacccagagtccactctctctgcccgtcacccctggacagccggcctccatctcctgcaagtctagtcagagcctcctacatactgatggcaagacttatttgtcttggtacctgcagaggcctggccagtctccacaactcctaatgtatgaagtttccaatcgcttctctggagtgccagataggttcagtggcagcgggtcagggacagatttcacactgaaaatcagccgggtggaggctgaggatgttgggacttactactgcatgcaaggtctacacctttacacttttggccaggggaccaagctggagatcaaac

SEQ ID NO: 2071 - DNA, 317 bp, Homo sapiens
  source 1..317: mol_type = other DNA
gaaatagtgttgacgcagtctccaggcaccctgtctttgtctgtaggggcaagagccaccctctcctgcaggaccagtcagagtattaagaacaataacttagcctggtaccagcagaagcccggccagacccccaggctcctcatctatggagcatccaacagggcccccggcatcccagacaggttcagtggcagtgggtctgggacagactacactctcaccatcagcagactggagactgaagattttgcagtctattactgtcagcagtatggttcgtcaccagggacgttcggccaagggaccaaggtgga

SEQ ID NO: 2072 - DNA, 322 bp, Homo sapiens
  source 1..322: mol_type = other DNA
gaaatagtgatgacgcagtctccagccaccctctctgtgtctccaggggaaagagccaccctctcatgcagggccagtcagagtgttaacaactacttagcctggtaccagcagaaacctggccaagttcccaggctcctcatctatggtgtatccaccagggccactggtatcccagccaggttcagtggcagtgggtctgggacagagttcactctcaccatcagcagcatgcagtctgaagattttgcagtttattactgtcaacagtataataactggcctcgaatgttcggccaagggaccaaggtggaaatcaaac

SEQ ID NO: 2073 - DNA, 340 bp, Homo sapiens
  source 1..340: mol_type = other DNA
gatattgtgatgacccagactccactctctctgtccgtcacccctggacagccggcctccatctcctgcaagtctagtcagagcctcctacatagtgatggaaagacctatttgttttggttcctgcagaggccaggccagtctccacatctcctgttgtatgaaatttccagccgggtctctggagtgccagataggttcagtggcagcgggtcagggacagatttcacactgaaaattagccgggtggaggctgaggatgttgggatttattactgcatgcaaggtgtagacattagtccgatcacttttggccaggggaccaagctggagctcaaac

SEQ ID NO: 2074 - DNA, 334 bp, Homo sapiens
  source 1..334: mol_type = other DNA
cagcctgtgctgactcaatcgccctctgcctctgcctccctgggagccccggtcaagctcacctgcactctgagtagaggccacagcacctacgccatcgcatggcatcagcagcagccagggaagggccctcgatacttgatgaaagttaacagtgatggcagccacaacaagggggacgggatccctgatcgcttctcaggctccagctctggggctgagcgctacctcaccatctccaccctccagtctgaggatgaggctgactactactgtcagacctggggcactggcctttatgtcttcggaattgggaccagggtcaccgtcctag

SEQ ID NO: 2075 - DNA, 325 bp, Homo sapiens
  source 1..325: mol_type = other DNA
tcctatgtgctgactcagccaccctcgatgtcagtggcccccggacagacggccaggatttcctgtgggggagacatcattgaaagaagaagtgtgcactggtaccaacagaagccaggccaggcccctgtgttggtcgtctatgattataacgaccggccctcagggatccctgagcgattctctggctccaagtctgggaacacggccaccctgaccatcagcagggtcgaggccggggatgaggccgactattactgtcaggtgtgggttgatagtactggtcgtgtactgttcggcggagggaccgagctgactgtcctag

SEQ ID NO: 2076 - DNA, 322 bp, Homo sapiens
  source 1..322: mol_type = other DNA
gagatagtgatgacgcagtctccagccaccctgtctgtgtctccaggggaaagagccaccctctcctgcagggccagtcagagtgttagcagcaacttagcctggtaccagcagaaacctggccaggctcccaggctcctcatctatggtgcatccaccagggccattggtatcccagccaggttcagtggcagtgggtctgggacagagttcactctcaccgtcagcagcatgcagtctgaagattttgcagtttattactgtcagcagtataataactggcctcggacgttcggccaagggaccaaggtggaaatcaaac

SEQ ID NO: 2077 - DNA, 331 bp, Homo sapiens
  source 1..331: mol_type = other DNA
cagtctgtactgactcagccaccctcagcgtctgggacccccgggcagagggtcaccatctcttgttctggaagcacctccaacatcggaaaaaacattgtaaattggtaccagcaattcccaggcacggcccccagactcctcatgtatagcgatgatcggcggccctcaggggtctctgaccgcttctctggctcccggtctggcacctcagcctccctggccatcagtgggctccaatctgaggatgaggctgattattattgtgttgcatgggatgacagcctggaggtttgggtattcggcggagggaccaaactgaccgtcctag

SEQ ID NO: 2078 - DNA, 340 bp, Homo sapiens
  source 1..340: mol_type = other DNA
gacttcgtgatgacccagtctccagactcgctggcagcgtctctgggcgagagggtcaccatcaactgcaggtccagtcagagtgttttctataattccaacagaaggaactacttagcttggtaccaacagagaccaggacagcctcctaagttactcatttcctgggcatctactcgggattccggagtccctgaccgattcattggccgcgggtctgggacagatttcactctcaccatcagcagcctgcagcctgaagatgtggcagtttattactgtcaccaatattacgatgctcctcacacttttggccaggggaccaagctggagatcaaac

SEQ ID NO: 2079 - DNA, 325 bp, Homo sapiens
  source 1..325: mol_type = other DNA
gagattgtgttgacacagtctccagccaccctgtctttgtctccaggggaaagagccaccctctcctgtagggccagtcagagtattgccaacttcttggcctggtaccagcagagacctggccaggctcccaggctcctcatctatgatgcatccaacagggccactggcatcccagccaggttcagtggcagtgggtctgggacagacttcacgctcaccatcagcagcctagagcctgaagattttgcagtttattactgtcagcagcgtagcaactggcctccgatcaccttcggccaggggacacggctggagattaaac

SEQ ID NO: 2080 - DNA, 325 bp, Homo sapiens
  source 1..325: mol_type = other DNA
gaaattgtgttgacgcagtctccaggcaccctgtctttgtctccaggggaaagagccaccctctcctgcagggccagtcagagtgttagcaccaactacttagcctggtaccagcagaaacttggccaggctcccaggctcctcatttatggtgcatctagcagggccactggcatcccagacaggttcagtggcagtgggtctgggacagacttcactctcaccatcaccagactggagcctgaagattttgcagtgtactactgtcagcagtatggtacctcacagaacacttttggccaggggaccaagctggagatcaaac

SEQ ID NO: 2081 - DNA, 325 bp, Homo sapiens
  source 1..325: mol_type = other DNA
gagattgtgttgacgcagtctccaggcaccctgtctttgtctccaggggaaagagccaccctctcctgcagggccagtcagagtgttacgagcaactccttagcctggtaccagcagaaatctggccaggctcccaggctcctcatctatggtgcatccaatagggccactggcatcccagacaggttcagtggcagtgggtctgggacagacttcactctcaccatcagcagactggagcctgaagattttgcggtatatttctgtcagcagtatggcaactcaccagggacgttcggccgggggaccaaggtggacatcaaac

SEQ ID NO: 2082 - DNA, 331 bp, Homo sapiens
  source 1..331: mol_type = other DNA
cagtctgtgctgactcagccaccctcagcgtctgggctccccgggcagagggtcaccatctcttgttctggaagcagctccaacatcggaagtaatactgtaaactggtaccagcacctcccaggaacggcccccaaactcctcatctatggtaataatcagcggccctcaggggtccctgaccgattctctggctccaagtctggcacctcagcctccctggccatcagtgggctccagtctgaggatgaggctgattattactgtgcagcatgggatgacagcctgaatggtccggtattcggcggagggaccaagctgaccgtcctag

SEQ ID NO: 2083 - DNA, 319 bp, Homo sapiens
  source 1..319: mol_type = other DNA
tcctatgagctgactcagccaccctcagtctccgtgtccccaggacagacagccagtatcacctgctctggagatcaattgggggataaatatgcctcctggtatcagcagaagccaggccagtcccctgtactggtcctctatcaggataacaagcggccctcggggatccctgagcgattctctggctccaactctgggaacacagccactctgaccatcagcgggacccaggctatggatgaggctgactattactgtcaggcgtgggacagcaatactggggtcttcggaagtgggaccagggtcatcgtcctag

SEQ ID NO: 2084 - DNA, 322 bp, Homo sapiens
  source 1..322: mol_type = other DNA
gccatccagttgacccagtctccatcctccctgtctgcatctgtaggagacagagtcaccatcacttgccgggcaagtctggccattagcagtggtttcgcctggtatcagcagaaaccagggaaagctcctagcctcctgatctctgatgtctccagtttgaaaagtggggtcccatcaagattcagcggcagtggatctgggacagaattcactctcaccatcagcagcctgcagcctgaagattttgcaacttattactgtcaacagttttatgattaccccctcactttcggcggagggaccaaggtagagatcaaac

SEQ ID NO: 2085 - DNA, 319 bp, Homo sapiens
  source 1..319: mol_type = other DNA
gacatccagatgacccagtctccttccaccctgtctgcatctgtaggagacagagtcaccatcacttgccgggccagtcagactattgatggcggattggcctggtatcagcagaaaccagggaaagcccctaaactcctgatctataaggcgtctacattagagagtggggtcccatcaaggttcagcggcagtggatctgggacagatttcactctcaccatcagcagcctgcagcctgatgactttgcaacttattactgccaacattataatacttactcgtgcacttttggccaggggaccaaattggagatca

SEQ ID NO: 2086 - DNA, 322 bp, Homo sapiens
  source 1..322: mol_type = other DNA
gacatccagatgacccagtctccttccaccctgtctgcatctgtaggagacagagtcaccatcacttgccgggccagtcagactattagtagctggttggcctggtatcagcagaaaccagggaaagcccctaagctcctgatctataaggcatctagtttagaaagtggggtcccatcaaggttcagcggcagtggatctgggacagaattcactctcaccatcagcagcctgcagcctgatgattttgcaacttattactgccaacagtataatagttacacaatcagttttggccaggggaccaagctggagatcaaac

SEQ ID NO: 2087 - DNA, 334 bp, Homo sapiens
  source 1..334: mol_type = other DNA
gatattgtgatgactcagtctccactctccctgcccgtcacccctggagagccggcctccatctcctgcaggtctagtcagagcctcctgcatagtaatggatacaactatttggattggtacctgcagaagccagggcagtctccacagctcctgatctatttgggttctaatcgggcctccggggtccctgacaggttcagtggcagtggatcaggcacagattttacactgaaaatcagcagagtggaggctgaggatgttggggtttattactgcatgcaagctctacaaactcggacgttcggccaagggaccaaggtggaaatcaaac

SEQ ID NO: 2088 - DNA, 337 bp, Homo sapiens
  source 1..337: mol_type = other DNA
gatgttgtggtgactcagtctccagtctccctgcccgtcacccttggacagccggcctccatctcctgcaagtctagtcaaagcctcctacatagtgatggaaacacctacttgaattggtttcagcagaggccaggccaatctccaaggcgcctaatttatatggcttctaaccgggactctggggtcccagacagattcagcggcagtgggtcaggcactgatttcacactgacaatcagcagggtggaggctgaggatgttgggatttattactgcatgcaacagatacactggccattcactttcggccctgggaccaaagtggatatcaaac

SEQ ID NO: 2089 - DNA, 325 bp, Homo sapiens
  source 1..325: mol_type = other DNA
gaaattgtgttgacacagtctccagccaccctgtctttgtctccaggggaaagagccaccctctcctgcagggccagtcagagtattggcacctccttagcctggtaccaacagagacctggccaggctcccaggctcctcatctctgatgtttccaaaagggccactgacatcccagccaggttcagtggcagtgggtctgggacagacttcactctcaccatcaacagcctagagcctgaagattttgccgtttattactgtcagcagcgtagcaactggcctccactcactttcggcggagggaccaaggtagagatcaaac

SEQ ID NO: 2090 - DNA, 331 bp, Homo sapiens
  source 1..331: mol_type = other DNA
cagtctgccctgactcagcctccctccgcgtccgggtctcctggacagtcagtcaccatctcctgcactggaaccagcagtgacgttggtggttataactatgtctcctggtaccaacaacacccaggcaaagcccccaaactcataatttatgaggtcactaagcggccctcaggggtccctgatcgcttcattggctccaagtctggcaacacggcctccctgaccgtctctgggctccaggctgaggatgaggctgattattactgcagctcatatgcagacaacaacaatccagggttcggaactgggaccaaggtcaccgtcctag

SEQ ID NO: 2091 - DNA, 323 bp, Homo sapiens
  source 1..323: mol_type = other DNA
gaaattgtgttgacacagtctccaggcaccctgtctttgtctgcaggggcaagagccaccctctcctgcagggccagtcagagtattaagagcaataacttagcctggtaccagcagaaacccggccagacccccaggctcctcatctatggagcatccagcagggcctccggcatcccagacaggttcagtggcagtgggtctgggacagactacactctcaccatcagcagactggagcctgaagattttgcagtctattactgtcaacagtatggttcgtcaccagggacgttcggccaagggaccaaggtggatatcaa

SEQ ID NO: 2092 - DNA, 322 bp, Homo sapiens
  source 1..322: mol_type = other DNA
gacatccagatgacccagtctccttccaccctgtctgcatctgtaggagacagagtcaccatcacttgccgggccagtcagagtattagtagctggttggcctggtatcagcagacaccagggaaagcccctaagctcctaatctataaggcatctagtttagaaaatggggtcccatcaaggttcagcggcagtggatctgggacagagttcactctcaccatcagcagcctgcagcctgatgattttgcaacttattactgccaacagtataatagtaacttcttgacgttcggccaagggaccaaggtggaaatcaaac

SEQ ID NO: 2093 - DNA, 316 bp, Homo sapiens
  source 1..316: mol_type = other DNA
gaaattgtgttgacgcagtctccaggcaccctgtctttgtctccaggggaaggagccaccctcttctgcagggccagtcagagtcttagtagtgattccttagcctggtaccagcagaaacttggccaggctcccaggctcctcatctatggtgcatccaccagggccactggcatcccagacaggttcagtggcagtgggtctgggacagacttcactctcaccatcaccagactggagcctgaagattttgcaatgtattactgtggtggttcacagtacacttttggccaggggaccaaactggagatcaaac

SEQ ID NO: 2094 - DNA, 325 bp, Homo sapiens
  source 1..325: mol_type = other DNA
gaaattgtgttgacacagtctccagccaccctgtctttgtctccaggggaaagagccaccctctcctgcagggccagtcagagtgttaggagcttcttagcctggtaccaacaaaaacctggccaggctcccaggctcctcatctatgatgcatccaacagggccaccggcatcccagccaggttcagtggcagtgggtctgggacagacttcactctcaccatcagcagcctagagcctgacgactttgcagtttattactgtcaacaacgtagcaactggccctcgatcaccttcggccaagggacgcgactggagattaaac

SEQ ID NO: 2095 - DNA, 319 bp, Homo sapiens
  source 1..319: mol_type = other DNA
gaaatagtgatgacgcagtctccagccaccttgtctctgtctccaggggaaagagccaccctctcctgtagggccagtcagagtgttagcagcaacttagcctggtaccagcagaaacctggccaggctcccaggctcctcatctatggtgcatccaccagggccactggaatcccagataggttcagtggcagtgggtctgggacagagttcactctcaccatcagcagcctgcagtctgaagattttgcagtttattattgtaagcagtataataactggcggactttcggccctgggaccaaggtggatatcaaac

SEQ ID NO: 2096 - DNA, 322 bp, Homo sapiens
  source 1..322: mol_type = other DNA
gacatccagatgacccagtctccttccaccctgtctgcatctgtgggagacagagtcaccatcacttgtcgggccagtcagagtattagtaactggttggcctggtatcagcagaaaccaggaaaagcccctaaactcctgatctataaggcatctcttttagagagtggggtcccatcgaggttcagcggcagtggatctgggacagaattcactctcaccatcagcagcctgcagcctgatgattttgcaacttatttctgccaacagtataatacttattatatcactttcgccggagggaccaaggtggagatcaaac

SEQ ID NO: 2097 - DNA, 337 bp, Homo sapiens
  source 1..337: mol_type = other DNA
gatattgtgatgacccagactccactctctctgtccgtcacccctggacagccggcctccatctcctgcaagtctagtcagagcctcctgcataatgatggaaagacctatttgtattggtacctgcagaagccaggccagtctccacatctcctgatctatgaagtttccaaccggttctctggagtgccagataggatcagtggcagcgggtcagggacagatttcacactgaaaatcagccgggtggaggctgaggatgttggggtttattattgcatgcaaagtacacagcttccgctcactttcggcggagggaccaaggtggagatgaaac

SEQ ID NO: 2098 - DNA, 322 bp, Homo sapiens
  source 1..322: mol_type = other DNA
gacatccagatgacccagtctccctcctcactgtctgcatctgtaggggacagagtcaccctcacttgtcgggcgagccagggcattgacgattctttagcctggtttcagcagaaaccagggaaagtccctaagtccctgatctatactgcatccagtttggagagtggggtcccatcaaggttcagcggcagtggatctggcacagatttcactctcaccatcagtagcctgcagcctgaagatatcgcaacttattactgccagcagtatcattcttatccgatcaccttcggccaagggacacgactggagattgaac

SEQ ID NO: 2099 - DNA, 325 bp, Homo sapiens
  source 1..325: mol_type = other DNA
gaaattgtgttgacacagtctccaggcaccctgtctttgtctccaggggaaagagccaccttctcctgcagggccagtcagagtattagtagcaactacttagcctggtatcggcagaaacctggccaggctcccaggctcctcatctatggtgcatccaccagggccactggcatcccagacaggttcagtggcagtgggtctgggacagacttcactctcaccatcagcagactggagcctgaagattttgcagtgtattactgtcagcagtatgttagttcacctatcaccttcggccaagggacacgactggagattaaac

SEQ ID NO: 2100 - DNA, 322 bp, Homo sapiens
  source 1..322: mol_type = other DNA
gacatccagatgacccagtctccttccaccctgtctgcatctgtaggagacagagtcaccatcacttgccgggccagtcagaatattaatagctggttgacctggtatcaacagagaccagggaaagcccctaaacttctgatctataaggcatctaatttagaaagtggggtcccatcaaggttcagcggcagtggatctgggacagaattcactctcaccatcagcagcctgcagcctgaagattttgctgtttatcactgccaacagtataaaaattatccctacacttttggccaggggaccaaactggagatcaaac

SEQ ID NO: 2101 - DNA, 325 bp, Homo sapiens
  source 1..325: mol_type = other DNA
gaagttgtcttgacccagtctccagccaccctgtctttgtctccaggggagagagcgaccctctcctgcagggccaataaaaatattgacagatatttagtctggtatcatcagaggcctggccaggctcccaggctcctcatctatgatgcgtccaacagggccactggaatcccagacaggttcagtggcagtgggtctgggacagacttcagtctcaccatcagcagcctagagcctgaagattttggcgtttattactgtcagcagcgtctttactggcctccggtcactttcggcgaagggacccgggtggacatcaaac

SEQ ID NO: 2102 - DNA, 322 bp, Homo sapiens
  source 1..322: mol_type = other DNA
gccatccagttgacccaatctccatcctccctgtctgcatctgtaggagacagagtcaccatcacgtgccgggcaagtcagggcattagcactggtatagcctggtatcaacagataccagggaaacctcctaaggcactgatctatgatgtctccactttggaagatggggtcccggccaggttcggcggcagtggatctgggccagatttcactctcaccatcagcagactgcagcctgaagattttgcaatttattactgtcaacaattgattgattaccctctcactttcggcggagggaccagggtggagatcaaac

SEQ ID NO: 2103 - DNA, 322 bp, Homo sapiens
  source 1..322: mol_type = other DNA
gccatccagttgacccagtctccatcctccctgtctgcttctgtaggagacagagtcaccatcacgtgccgggcaagtcagggcattagcagtggtttagcctggtatcaacagaaaccagggaaacctcctaaggcactgatctatgatgtctccactttggaaaatggggtcccatcaaggttcggcggcagtggatctatgacaaatttcactctcaccatcagcagactgcagcctgaagattttgcagtttattactgtcaacaattgattggttaccctctcactttcggcggagggaccagggtggagatcaaac

SEQ ID NO: 2104 - DNA, 322 bp, Homo sapiens
  source 1..322: mol_type = other DNA
gacatccagatgacccagtctccttccaccctgtctgcatctgtaggagacagagtcaccatcacttgccgggccagtcagagtattagtagctggttggcctggtatcagcaaaaaccagggaaagcccctaagctcctgatctataaggcgtctaatttagaaagtggggtcccatcaaggttcagcggcagtggatctgggacagaattcactctcaccatcagcagcctgcagcctgatgattttgcaacttattactgccaacagtataatagtaactttctcactttcggcggagggaccaaggtggagatcaaac

SEQ ID NO: 2105 - DNA, 333 bp, Homo sapiens
  source 1..333: mol_type = other DNA
ttgtgatgacccagaccccgctctccctgtccgtcactcctggacagccggcctccatgtcctgcaagtctgatcagagtctcctccacagtgatggaaagacttatttgtcttggtacctgcagaggccaggccagtctccacacctcctaatctacgaagtttccggccggttctctggagtgccagacagattcagtggcagcgggtcagggacagatttcacactgaaaattagccgggtgcaggctgaggatgttggggtttattactgcatgcaaggtcttcacccccccttcactttcggccctgggaccaaggtggatatcaaac

SEQ ID NO: 2106 - DNA, 322 bp, Homo sapiens
  source 1..322: mol_type = other DNA
gacatccagatgacccagtctccatcctccctgtctgcatctgtaggggacagagtcaccatcacttgccggacaagccagaacatttacacttatttaaattggtatcagcaaaagccagggacagcccctaaggtcctgatttattctgcatccagtttgcagagtggggtcccatcacggttcagtggcagaggatctgggacagaattcactctcaccatcagcagtctggcacctgaggatattggcactttctactgtcaacagagttacagttccccattcgctttcggccctgggaccaaagtggagatcaaac

SEQ ID NO: 2107 - DNA, 325 bp, Homo sapiens
  source 1..325: mol_type = other DNA
gaaatagtgatgacgcagtctccagccaccctgtctgtgtctccaggggagagagccaccctctcctgcagggccagtcagagtattcgtagcagcttagcctggtaccagcagaaacctggccaggctcccaggctcctcatctctggagcgtccaccagggccactggtatcccagacaggttcagtggcagtgggtctgggacagagttcactctcaccatcagcagcatgcagtctgaagattttgcagtttattactgtcagcagtatcataactggcctccgctcactttcggcggagggaccaaggtggagatgaaac

SEQ ID NO: 2108 - DNA, 340 bp, Homo sapiens
  source 1..340: mol_type = other DNA
gacatcgtgatgacccagtctccagactccctggctgtgtctctgggcgagagggccaccatcaactgcaagtccagccagagtgtgttattcaactccaacaataacaactacttagcttggtaccagcacaaaccaggacagcctcctaagttgctcatttactgggcatctaaccgggaatccggggtccctgaccgattcagtggcagcgggtctgggacaaatttcactctcaccattgccaacctgcaggctgaagatgtggcagtttattactgtcgtcaatattatactactccgtacacttttggccaggggaccaagctagagatcaaac

SEQ ID NO: 2109 - DNA, 337 bp, Homo sapiens
  source 1..337: mol_type = other DNA
gaaactgtgatgacccagactccactctctctgtccgtcacccctggacagacggcctccatctcctgcaagtctagtcagagcctcctgcacagcgatggaaagtcgtatttgtcttggtacctgcagaagccaggccagtctccacaactcctaatctatgaagtttccagccggttctctggagtgccagataggttcagtggcagcgggtcagggacagatttcacactgaaaatcagccgggtggaggctgaggatgttggcttttattactgcatgcaaggtattcacctcccattcactttcggccctgggaccaaagtggatatcaaac

SEQ ID NO: 2110 - DNA, 334 bp, Homo sapiens
  source 1..334: mol_type = other DNA
gagattgtgatgacccaatctccactctctctgcccgtcacacctggacagccggcctccatctcctgcaggtctagtcagagcctcctgcatactgatggaaagacctatttgtcttggtacctgcagaagccaggccagtctccacagctcctaatctatgaactttccagtcggttctctggagtgccagataggttcagtggcagcgggtcagggacagatttcacactgaaaatcagccgggtggaggctgaggatgttgggacttattactgcatgcaaggtctccacctttacagttttggccaggggaccaagctggagatcaaac

SEQ ID NO: 2111 - DNA, 322 bp, Homo sapiens
  source 1..322: mol_type = other DNA
gaaattgtgttgatgcagtctccaggcaccctgtctttgtctccaggggaaagagccaccctctcctgcagggccagtcagggtgttagtagcaacttagcctggtaccagcagaaacctggccaggctcccaggctcctcatctatggtgcatccagcagggccactgccatcccagatagattcagtgccagtgggtctgggacagacttcactctcaccatcagcagactggaggcagaggattttgcagtgtattactgtcagcagtatggtacctcaccgtacacttttggccaggggaccaagctggagatcaaac

SEQ ID NO: 2112 - DNA, 319 bp, Homo sapiens
  source 1..319: mol_type = other DNA
gacatccagatgacccagtctccttccaccctgtctgcatctgtaggagacagagtcaccatcacttgccgggccagtcagagtattagtagctgggtggcctggtatcagaagaaaccagggaaagcccctaacctcctgatctataaggcgtctaatttagaaagtggggtcccaccaaggttcagcggcagtggatctgggacagaattcactctcaccatcagcagcctgcagcctgatgattttgcaacctatttctgccagcaatatgatagttacccatacacttttggccaggggaccacactggagatca

SEQ ID NO: 2113 - DNA, 340 bp, Homo sapiens
  source 1..340: mol_type = other DNA
gatattgtgatgacccagactccactctttctgtccgtcacccctggacagccggcctccatctcctgtaagtctagtcaaagcctcctacatagtgatggaaagacctatttatattggtacctgcagaggccaggccaatctccacatctgctcttctatgaagtttccaaccgggtctctggagtgccagaaaggttcagtggcagcgggtcagggacagatttcacactgaagatcagccgggtggaggctgaagatgttggagtttattactgcatgcaaggtttagaccttcctccgttcacttttggccaggggaccaaggtagacatcaaac

SEQ ID NO: 2114 - DNA, 331 bp, Homo sapiens
  source 1..331: mol_type = other DNA
cagtctgccctgactcagcctcgcgcagtgtccgggtctcctggacagtcagtcaccatctcctgcactggaaccagcagtgatgttggtggttataactatgtctcctggtaccaacaacacccaggcaaagcccccaaagtcatgatttatgatgtcagtaagcggcccttaggggtccctgatcgcttctctggctccaagtctggcaacacggcctccctgaccatctctggactccaggctgacgatgaggctgattattactgttgctcatatgcaggcagccctcattatgtcttcggaggtgggaccaaggtcaccgtcctag

SEQ ID NO: 2115 - DNA, 322 bp, Homo sapiens
  source 1..322: mol_type = other DNA
gacatccagatgacccagtctccttccaccctgtctgcatctctaggagacagagtcaccatcacttgccgggccagtcagagtattagtacctggttggcctggtatcagcagaaaccagggaaagcccctaacctcctgatctatgaggcatctagtttagaaggtggggtcccatcaaggttcagcggcagtggatctgggacagaattcactctcaccatcaacagcctgcagcctgatgattttgcaacttattactgccaacagtataatggttattcgctcactttcggcggagggaccaaggtggagatcaaac

SEQ ID NO: 2116 - DNA, 323 bp, Homo sapiens
  source 1..323: mol_type = other DNA
gaaattgtgttgacgcagtctccaggcaccctgtcattgtctcccgggacaagagccaccctctcctgcagggccagtcagagtattaggagcaattacttagcctggtaccagcagaaacctggccagactcccaggctcctcatctatggtgcatccagcagggccactggcatcccagacaggttcagtggcagtgggtctgggacagactacaccctcaccatcagcagactggagcctgaagattttgcagtgtattactgtcagcagtatggctcatcaccagggacgttcggccaagggaccaaggtggaaatcaa

SEQ ID NO: 2117 - DNA, 331 bp, Homo sapiens
  source 1..331: mol_type = other DNA
cagtctgtgctgactcagcccccctcagcgtctgggacccccgggcagagggtcaccatctcctgttctggaagcagctccaatatcggaagaaacattgtaaattggtaccaacaagtcccagactcggcccccagactcctcatctatgggagtcatcagcggccctcaggggtccctgaccgattctctggctcccagtctggcgcctcagcctccctggccatcagtgggctccggtctgaggatgaggctgattattactgtgcgacatgggatgacggcctggaagcttgggtgttcggcggagggaccaagctgaccgtcctag

SEQ ID NO: 2118 - DNA, 327 bp, Homo sapiens
  source 1..327: mol_type = other DNA
cagtctgccctgactcagcctgcctccgtgtctgggtctcctggacagtcgatcaccatctcctgcactggaaccagcagtgacgttggtggttataactatgtctcctggtaccaacaacacccaggcaaagcccccaaaatcatgattttcgaggtcaataatcggcccttcggggtttctgatcgcttctctggctccaagtctggcaacacggcttccctgaccatctctgggctccaggctgaggacgagggtgattattactgcagctcatatgcaaggaccaggtcctgggtgttcggcggagggaccaagctgaccgtc

SEQ ID NO: 2119 - DNA, 322 bp, Homo sapiens
  source 1..322: mol_type = other DNA
gaaatagtgatgacgcagtctccagccatcctgtctgtgtctccaggggagagagccaccctctcctgcagggccagtcagagtgttaccagcaacttagcctggtaccagcaaaaacctggccaggctcccaggctcctcattcatagtgcttctaccagggccactggtatcccagccaggttcagtggcagtgggtctgggacagagttcactctcaccatcagcagcctgcagtctgaagattttgcagtttattactgtcagcagtatcataactggcctccgctcactttcggcggagggaccaaggtggaaatca

SEQ ID NO: 2120 - DNA, 325 bp, Homo sapiens
  source 1..325: mol_type = other DNA
gaaattgtgttgacgcagtctccaggcaccctgtctttgtctccaggggcgagagccaccctctcctgtagggccagtcagagtcttgggagcagttccttagcctggtaccaacagaaacctggccagagtcccaggctcctcatttatggtgcatccaccagggccactggcatcccaggcaggttcactggcagtgggtctgggacagactacactctcaccatcagtagagtggagcctgaagattttgcaatgtattactgtcagcagtatgacgtctcaccagggacgttcggccaagggaccaaagtggacatcaaac

SEQ ID NO: 2121 - DNA, 340 bp, Homo sapiens
  source 1..340: mol_type = other DNA
gatgttgtgatgacccagagtccactctctctgtccgtcacacctggacagccggcctccatctcctgcaagtctagtcagagcctcctgcatagtgatggaaagacctatttgtattggttcctgcagaagccaggccagtctccacagccccttatctatgaagtttccagccggttctctggagtgccagaaagattcagcggcagcgggtcagggacagatttcacactgaaaatcagccgggtggaggctgaggatgttggggtttattactgcatgcaaggtatacaccttcctccggtcactttcggcggagggaccaaggtggagatcaaac

SEQ ID NO: 2122 - DNA, 334 bp, Homo sapiens
  source 1..334: mol_type = other DNA
gatattgtgatgacccagactccactctttctgtccgtcacccctggacagccggcctccatctcctgtaagtctagccagagcctcctgcatactaatggaaagacttatttgtactggtacctgcagaagccaggccagtctccacagctcctaatctctgaggtttccacccggttctctggagtgccagataggttcagtggcagcgggtcagggacagatttcacattgagaatcagccgggtggacgctgaggatgttggagtttattactgcatgcaaggtatacacctttacagttttggccaggggaccacgctggagatcaaac

SEQ ID NO: 2123 - DNA, 340 bp, Homo sapiens
  source 1..340: mol_type = other DNA
gacatcgtggcgacccagtctccagtctccctggctgtgtctctgggcgagagggccaccatcaactgcaagaccagccagagtgtcctatgggactccaatgagaggaactacttggcttggtatcaaaaaaaaccaggacagcctccgagactgctcatttattgggcgtctactcgggcgtccggggtccctgaccgcttcagtggtagcgggtcggggacttatttcactctcaccatcagcagcctgcagcctgaagatgtggcagtttattactgtcaacaatattatgcttttcctctcactttcggcggagggaccaaggtagagatcaaac

SEQ ID NO: 2124 - DNA, 337 bp, Homo sapiens
  source 1..337: mol_type = other DNA
gatgttgtgatgacccagactccactctctctgtccgtcacccctggacagccggcctccatctcctgcaagtctagtcagagcctcctgcatgaggatggaaagacctatttgtattggtacctgcagaagccaggccagtctccacaacccctaatctatgaagttttcggccggttctctggagtgccagataggttcagtggcaccgggtcagggacagatttcacactgcaaatcagccgggtggaggctgacgatgttggaatctattactgcatgcaaggtaaacgctggagggaattcactttcggccctgggaccagagtcgatatca

SEQ ID NO: 2125 - DNA, 337 bp, Homo sapiens
  source 1..337: mol_type = other DNA
gaaatcgtgatgacccagactccaagttctctgtccgtcacccctggagagtcggcctccatctcctgcaagtctagtcagagcctcctgcatagtgatggaaagacctatttgtattggtacctgcagaaggcaggccagtctcctcagctcctgttttatgaagtttctagtcgattctctggagtgccagataggttcagtgccagcgggtcagggacagatttcacactgaaaatcagtcgggtggaggctgaagatcttggggtttattactgcatgcaaggtatgcaccctcctccgtatacttttggccaggggacgaagctggatatca

SEQ ID NO: 2126 - DNA, 322 bp, Homo sapiens
  source 1..322: mol_type = other DNA
gaaatactgatgacgcagtctccagccaccctgtctgtgtctccaggggaaagagcctccctctcctgcagggccagtcagagtgttagcaactacttagcctggtaccaacaaaaacctggccaggttcccaggctcctcatctatggtgcatccaccagggccacgggcaccccagccaggttcagtggcagtgggtctgggacagagttcactctcaccatcagcagcgtgcagtctgaagattttgcagtttattactgtcaacagtataatcactggcctcgaatgttcggccaagggaccaaggtggaaatcaaac

SEQ ID NO: 2127 - DNA, 319 bp, Homo sapiens
  source 1..319: mol_type = other DNA
gacatccagatgacccagtctccttcctccctgtctgcgtctgtgggagacagggtcagcatcacttgccgggcaagtcagaccattgacaactttttaaattggtatcagcaaaaacctgggaaaccccctaaactcctgatatatattgcatcccgtttgcagagtggggtcccatcgaggttcagtggcagtgggtctgggacagatttcactctcaccatcagcagtctccaacctgaggattttgcaacgtacttctgtcaacagactggcaatgtcccatatacttttggccaggggaccaaggtggagatca

SEQ ID NO: 2128 - DNA, 337 bp, Homo sapiens
  source 1..337: mol_type = other DNA
gatgttgtgatgactcagtctccccgctccctgtccgtcacccttggacagccggcctccatctcctgcaggtctagtcgaagcctcgttcacagtgatggaaacacctacttcaattggtttcaccagaggccaggccaatctccaaggcgcctaatttatcaagtctctaaccgggactctggggtcccagacagattcagcggcagtgggtcaggcactgattttacactgaagatcagcaggctggaggctgacgatgttggagtttattactgcatgcaaggtacacactggcctctcactttcggcagcgggaccaaggtggagatcaaac

SEQ ID NO: 2129 - DNA, 325 bp, Homo sapiens
  source 1..325: mol_type = other DNA
gacatccagatgacccagtctccttccaccctgtctgcatctgtaggagacagagtcaccatcacttgccgggccagtcagagtattattagttggttggcctggtatcagcagaaaccagggaaagcccctaagctcctgatctataaggcatctaatttagaaagtggggtcccatcaaggttcagcggcagtggatctgggacagaattcactctcaccatcagcagcctgcagcctgatgattttgcaacttattactgccaacagtatactagtttttctccgtggacgttcggccaagggaccaaggtggaaatcaaac

SEQ ID NO: 2130 - DNA, 340 bp, Homo sapiens
  source 1..340: mol_type = other DNA
gatattgtgatgacccagactccactctctctgtccgtcacccctggacagccggcctccatctcctgcaagtctagtcagagcctcctgcataatgatggaaagacctatttgtattggtacctgcagaagccaggccagtctccacagctcctgctccatgaagtttccagccggttctctggagtgccagataggttcagtggcagcgggtcagggacagatttcacactgaaaatcagccgggtggaggctgaggatgttggggtttattactgcatgcaaggtgtacaccttcctccgtacacttttggccaggggaccaaactggagatcaaac

SEQ ID NO: 2131 - DNA, 341 bp, Homo sapiens
  source 1..341: mol_type = other DNA
cagtctgccctgactcagcctgcctccgtgtctggatctcttggacagtcgatcaccatctcctgcactggaaccaacagtgacgtcggtgcttatgagtatgtctcctggtaccaacagcatccaggccacgcccccagagtcctgatttatgcggtcactattcggcccccaggtgtctccgatcgcttctctgggtccaagtctggcaacacggcctccctgactatctctggcctccaggctgacgacgaggccgattatttctgcagctcatatttaatcagtgccagcacctattccaattatgccttcggaactgggaccaaggtcaccgtcct

SEQ ID NO: 2132 - DNA, 343 bp, Homo sapiens
  source 1..343: mol_type = other DNA
gacatcgtgatgacccagtctccagactccctggctgtgtctctgggcgagagggccaccatcaactgcaagtccagccagagtgttttatacagctccaacaataagaactacttagcttggtaccagcagaaaccaggacagcctcctaagctgctcatttactgggcatctacccgggaatccggggtccctgaccgattcagtggcagcgggtctgggacagatttcactctcaccatcagcagcctgcaggctgaagatgtggcagtttattactgtcagcaatattatagtactcccctgtacacttttggccaggggaccaagctggagatcaaac

SEQ ID NO: 2133 - DNA, 325 bp, Homo sapiens
  source 1..325: mol_type = other DNA
gagattgtactgacacagtctccagccaccctgtctttggctccaggggaaagagccaccctctcctgtcgggccagtcagagtattagcaactacttggcctggtaccaacaaaagcctggccaggctcccagactcctcatctatgatgcatccaatagggccactgatatcccagccaggttcagtggcagtgggtctgggacagacttcactctcaccatcagcaacctggagcctgaagattttgcagtttattactgtcagcagcggagcaactggcctccgatcaccttcggccaagggacacgactgcagattaaac

SEQ ID NO: 2134 - DNA, 343 bp, Homo sapiens
  source 1..343: mol_type = other DNA
cagcttgtgctgactcaatcgccctctgcctctgcctccctgggagcctcggtcaagctcacctgcactctgagcagtgggcacagcagctacggcatcgcatggcatcagcagcagccagagaagggccctcggtacctgatgaagctcaacagtgatggcagccacagcaagggggacgggatccctgatcgcttctcaggctccagctctgggactgagcgctacctcatcatctccagactccagtctgaggatgaggctgactattactgtcaaacctggggcactggcattcatgcctcttgggtgttcggcggagggaccaagctgaccgtcctag

SEQ ID NO: 2135 - DNA, 337 bp, Homo sapiens
  source 1..337: mol_type = other DNA
gatactatactgacccagactccactctctctgtccgtcacccctgggcagacgacctccatctcctgcaagtctagtcagagcctcctgcatactgatggaaagacctatctgtattggtaccttcagaggccaggccagtcgccacgactcctgatgtctgaagtctccggtcggttctctggagtgccagataggttcagtggcagcgggtctgggacagatttcacactgaaaatcagccgggtggaggctgaggatgttggggtttattactgcatgcaaggtttacacctcccattcactttcggccctgggaccaaagtggatatcaaac

SEQ ID NO: 2136 - DNA, 329 bp, Homo sapiens
  source 1..329: mol_type = other DNA
cagtctgccctgactcagcctccctccgcgtccgggtctcctggacagtcagtcaccatctcctgcactggaagtagcagtgacgttggtcgttatgactatgtctcctggtaccatcaactcccaggcacagcccccaaactcatcatttatgaggtcactcagcggccctcaggcgtccctgatcgcttctctggctccaagtccggcaacacggcctccctgaccgtctctgggctccaggctgaggatgagggtgactatttctgctgttcatatgcaggcaaggacactcttctgttcggcggagggaccaagctgaccgtcct

SEQ ID NO: 2137 - DNA, 322 bp, Homo sapiens
  source 1..322: mol_type = other DNA
gaaatagtgatgacgcagtctccagccaccctgtctgtgtctccaggggaaagagccaccctctcctgcagggccagtgagagtgttggcacttatttagcctggtaccagcagcgacctggccaggttcccaggctcctcatctatggtgcgtccaccagggccactggtaccccagccaggttcagtggcagtgggtctgggacagagttcactctcaccatcagcagcatgcagtccgaggattttgcagtgtattactgtcaacagtataatatctggcctcgaatgttcggccaagggaccaaggtggaagtcaaac

SEQ ID NO: 2138 - DNA, 322 bp, Homo sapiens
  source 1..322: mol_type = other DNA
gccatccagttgacccagtctccatcctccctgtctgcatctgttggagacagagtcaccatcacttgccggacaagtcagggcattagcagtggtttcgcctggtatcagcagaaaccagggaaagctcctgacctcctgatctctgatgtctccactttgagaactggggtcccatcaaggttcagcggcagtggatctgggacagaattcactctcaccatcagcagcctgcagcctgaagattttgcaacttattactgccaacagttttatgattaccccctcactttcggcggagggaccaaggtagagatcaaac

SEQ ID NO: 2139 - DNA, 325 bp, Homo sapiens
  source 1..325: mol_type = other DNA
gaaattgtgttgacgcagtctccagccaccctgtctttgtctccaggggaaagagccaccctctcctgtggggccagtcagcctgttagcagcaacaacttagcctggtatcagcagacacctggcctggcgcccaggctcctcatctatgatgcatccaatagggccactggcatcccagacaggttcagtggcagtgggtcggggacagacttcactctcaccatcagtggactggagcctgaagattttgcagtttattactgtcagcagtatggtagttcacctcgaacgttcggcccagggaccaaggtggaaatcaaac

SEQ ID NO: 2140 - DNA, 325 bp, Homo sapiens
  source 1..325: mol_type = other DNA
gaaatagtgatgacgcagtctccagccaccctgtctgtgtctccaggagaaagagccatcctctcctgcagggccagtcagagtgttagcagcaacttagcctggtaccagcagaaacctggccaggctcccaggctcctcatctctggtgcatccaccagggccactggtatcccagccaggttcagtggcagtgggtctgggacagagttcactctcaccatcagcagcatgcagtctgaagattttgcagtttattactgtcagcagtatagtaactggcctccgctcactttcggcggagggaccaaggtggagatgaaac

SEQ ID NO: 2141 - DNA, 334 bp, Homo sapiens
  source 1..334: mol_type = other DNA
gacattgtgttgacccagactcctctctctctgtccgtcacccctggacagccggcctccatctcctgtaagtctagccagagcctccttcatactgatggaaagacttatttgcattggtacctgcagaagccaggccagtctcctcagctcctgatctctgaagtttccacccgattctctggagtgccggataggttcagtggcagcgggtcagggacagatttcacattgagaatcagccgcgtggaacgtgaagatgttggagtttacttctgcctgcaaggttcacagttttacagttttggccaggggaccaagctggagatcaaac

SEQ ID NO: 2142 - DNA, 343 bp, Homo sapiens
  source 1..343: mol_type = other DNA
gattttgtgctgactcagtctccactctccctgcccgtcacccttggacagccggcctccatctcctgcaggtctagtcaaagcctcctacacggtaatgatggaaagacgtacttgagttggtttcagcagaggccaggccaatctccaaggcgcctaatttatgaggtttctaagcgggactctggggtcccagagagattcagcggcagtgggtcagacactgatttcacactgaaaatcgacagggtggaggctgaggatgttggggtttattactgcatgcaaattaaacactggcgatcattctctttcgggcctgggaccaaagtggaaatcaaac

SEQ ID NO: 2143 - DNA, 325 bp, Homo sapiens
  source 1..325: mol_type = other DNA
gagattgtgttgacgcagtctccaggcaccctgtctttgtctccaggggaaagagccaccctctcctgcagggccagtcagagtgttagcaacacctacttagcctggtaccagcagaaacctggccaggctcccaggctcctcatctatggtgcatccagcagggccactggcatcccagacaggttcagtggcagtgggtctgggacagacttcactctcaccatcagcagactggagcctgaagattttgcagtgtattactgtcagcagtatagtagttcaacatacagttttggccaggggaccaagctggagttcaaac

SEQ ID NO: 2144 - DNA, 328 bp, Homo sapiens
  source 1..328: mol_type = other DNA
gaaattgtgttgacgcagtctccaggcaccctgtctttgtctccaggggagagagccaccctctcctgcagggccagtcagagtgtcagtggtggtttcttagcctggtaccagcagaaacctggccaggctcccaggctcctcgtctacggtgcatccaacagggccactggcatcccagacaggttcagtggcagtgggtctgggacagacttcactctcaccatcagcagactggaccctgaagattttgcagtgtattattgtcagcactatggtaggtcacctccgtacacttttggccaggggaccaaactggacatcaaac

SEQ ID NO: 2145 - DNA, 322 bp, Homo sapiens
  source 1..322: mol_type = other DNA
gacatccggatgacccagtctccatcctccctgtctgcatttgttggagacagactcaccatcacttgccgggcgagtcaggacattggcaatcatttagcctggtatcaggagagaccagggaaagctcctaagctcctaatctcttctgcgtccactttacagtcaggggtcccatctcgattcagcggcggtggatctgggaccgacttcactctcaccatcaacagtctgcagcctgaagatgttgcaacttattactgtcaaaaatatgacagcgcccctctcactttcggcggtgggaccacagtggagatcaaac

SEQ ID NO: 2146 - DNA, 325 bp, Homo sapiens
  source 1..325: mol_type = other DNA
gaaattctgctgacgcagtctccaggcaccctgtctttgtctccaggggaaagagccaccctctcctgcagggccagtcagagtgttagcagcagttacttagcctggtatcaacagaagtttggccaggctcccaggctcctcatctatggtgcatccagcagggccactggcatcccagacaggttcagtgccagtgggtctggggcagacttcactctcaccatcagcagactggagcctgaagatgttgcagtatattactgtcagcagtatggtagttcaccgtacacttttggccaggggaccaagctggagatcaaac

SEQ ID NO: 2147 - DNA, 347 bp, Homo sapiens
  source 1..347: mol_type = other DNA
cagcctgttctgactcagcccccttctgcatcagcctccctgggagactcggtcacactcacctgcaccctgagcagcgactacagtacttataaagtggactggtaccagcagagaccgggggagggcccccgatttgtaatgcgagtggacagtggtggcattgtggaatccaagggggaaggcatccctgatcgcttctcagtcttcggctcaggcctgagtcggtatctgaccattaataacattcaggaggaggatgagagtgattaccactgtggggcagaccatgtcactgggagagtcttcgtctacgtattcggcggcgggaccaaactgaccgtcct

SEQ ID NO: 2148 - DNA, 322 bp, Homo sapiens
  source 1..322: mol_type = other DNA
gaaattgtgctgactcagtctccagactttcagtctgtgactccaaaggagaaagtcaccctcacctgccgggccagtcagagcattggtagtagcttacactggtaccaacagaaacctgatcagtctccaaagctcctcatcaagtatgcttcccagtccatctcaggggtcccctcgaggttcagtggcagtggatctgggacagatttcaccctcactatcactagcctggaagctgaagatgctgcaacgtattactgtcatcagagtagtagtttaccgtggacgttcggccaagggaccaaggtggaaatcaaac

SEQ ID NO: 2149 - DNA, 332 bp, Homo sapiens
  source 1..332: mol_type = other DNA
gatattgtgatgacccagactccactctctctgcccgtcacccctggacagccggcctccatctcctgcaaatctagtcagagcctcctgcatactgatggcaagacctatttgtcttggtacctgcagaagcctggccagtctccacaactcctattctatgaagtttcaagtcgcttctctggagtgccagataggttcactggcagcgggtcagggacagatttcacactgaaaatcagccgggttgaggctgaggatgttggcatttattactgcatgcaaggtctgcacctttacagttttggccaggggaccagactggagatcaa

SEQ ID NO: 2150 - DNA, 328 bp, Homo sapiens
  source 1..328: mol_type = other DNA
gaaattgtgttgacgcagtctccaggcaccctgtctttgtctccaggggaaagagccaccctctcctgcagggccagtcagagtgttagcagcagttatttagcctggtaccagcagaaacctggccaggctcccaggctcctcatctatggtgcatccagtagggccaccggcatcccagacaggttcagtggcagtgggtctgggacagacttctctctcaccatcagcagactggagcctgaagattttgcagtgtattactgtcagcagtatagtagctcacccatgtacacttttggccaggggaccaagctggagatcaaac

SEQ ID NO: 2151 - DNA, 340 bp, Homo sapiens
  source 1..340: mol_type = other DNA
gatattgtgatgacccagactccactctctctgtccgtcacccctggacagccggcctccatctcctgcaagtctagtcagagcctcctacacagtgatggaaagacctatttgttttggttcctgcagaggccaggccagtctccacatctcctgttgtatgaagtttccagccgggtctctggagtgccagataggttcagtggcagcgggtcagggacagatttcacactgaaaattagccgggtggaggctgaggatgttggggtttattactgcatgcaaggtgtagacgttactccgatcacttttggccaggggaccaagctggagctcaaac

SEQ ID NO: 2152 - DNA, 322 bp, Homo sapiens
  source 1..322: mol_type = other DNA
gacatccagatgacccagtctccttccaccctgtctgcatctgtaggagacagagtcaccatcacttgccgggccagtcagactattagtacttggttggcctggtatcagcagaaaccagggaaagcccctaagctcctgatctctgaggcgtctcgtttagaaagtggggtcccatcaaggttccgcggcagtggatctgggacagaattcactctcaccatcagcagcctgcagcctgatgattttgcaacttattactgccaacaatataatagttacttaatcacattcggccaggggacacgactggagattaaac

SEQ ID NO: 2153 - DNA, 334 bp, Homo sapiens
  source 1..334: mol_type = other DNA
gatattgtgatgacccagactccactctttctgtccgtcacccctggacagccggcctccatctcctgtaagtctagccagagcctcctgcatactaatggaaagacttatttgtactggtacctgcagaagccaggccagtctccacagctcctaatctctgaagtttccacccggttctctggagtgccagataggttcagtggcagcgggtcagggacagatttcacattgagaatcagtcgggtggacgctgaggatgttggagtttattactgcatgcaaggtatacacctttacagttttggccaggggaccaagctggagatcaaac

SEQ ID NO: 2154 - DNA, 329 bp, Homo sapiens
  source 1..329: mol_type = other DNA
cagtctgccctgactcagcctgcctccgtgtctgggtctcctggacagtcgatcaccatctcctgcactggaaccaacagtaacgttggtggttataaccatgtctcctggttccaacaacacccggacaaagcccccaaactcttgatttatgaggtcactaatcggcccttaggggcttcttatcgattctctggctccaagtctggcaacacggcctccctgaccatctctgggctccaggctgaggacgaggcttattattactgcagttcacatacaagcagcaacacttttctcttcggaactgggacaaaggtcaccgtcct

SEQ ID NO: 2155 - DNA, 323 bp, Homo sapiens
  source 1..323: mol_type = other DNA
gacatccagatgacccagtctccatcctccctgtctgcatctgtaggagacagagtcaccatcacttgccgggcgagtcagggcattagcaattatggagtagcctggtatcagcagaaaccagggaaagttcctaaactcctgatctatgctgcatccactttgcaatcaggggtcccatctcggttcagtggcagtggatctgggacagatttcattctcaccatcagcagcctgcagcctgaagatgttgcaacttattactgtcaaaagtatgacggtgccccgtggacgttcggccaagggaccaaggtggaaatcaa

SEQ ID NO: 2156 - DNA, 338 bp, Homo sapiens
  source 1..338: mol_type = other DNA
catcgtgatgacccagtctccagactccctggctgtgtctctgggcgagagggccaccatcaattgtaggtccagccagagtgttttgtggaatgacaacaaaaagaattacctagcttggtaccagcagaaaccagggcagtctcctaaactgctcatttactgggcatctgtccgggaatccggggtccctgaccgattcagtggcagcgggtctggaacagagttcgctctcaccatcagcagcctgcaggctgaagatgtgggagtctattactgtcaccaatattatggtgctcctcttacttacggcggagggaccaaggtggagatcaaac

SEQ ID NO: 2157 - DNA, 322 bp, Homo sapiens
  source 1..322: mol_type = other DNA
gaaattgtgttgacgcagtctccagacaccctgtctttgtctccaggggacagagccaccctctcctgcagggccagtcagagtattagcagctatttagcctggtaccagcagaaacctggccaggctcccaggctcctaatctatggtgcatccaacagggccactggcatcccagacaggttcagtggcagtgggtctgggacagacttcactctcaccatcagcagactggagcctgaagattgtgcagtatattactgtcagcactatggcagctcacttagggcgttcggccaagggaccaaggtggaaatcaaac

SEQ ID NO: 2158 - DNA, 325 bp, Homo sapiens
  source 1..325: mol_type = other DNA
gaaattgtgttgacgcagtctccaggctccctgtctttgtctccaggggaaagagccaccctctcctgcagggccagtcagagtgttaagagcaactccttagcctggtatcagcagaaaccaggccaggctcccaggctcctcctctatggatcatccagcagggccactggcatcccagacaggttcggtggcagtgggtctgggacagacttcactctcatcatcagcggactggagtctgaagattttgcggtctattactgtcagcagtatgggagctcaccgttcacttttggccaggggaccaagctggagatcaaac

SEQ ID NO: 2159 - DNA, 325 bp, Homo sapiens
  source 1..325: mol_type = other DNA
gaaattgtgttgacgcagtctccaggcaccctgtctttgtctccaggggcaagagccaccctctcctgcagggccagtcagagtcttaggagtggttctttagcctggtaccaacaaaaacctggccagagtcccaggctcctcatccatggtgcatccagccgggccactggcatcccagacaggttcactggcagtgggtctgggacagactacactctcaccatcagcagactggagcctgaagattttgcaatgtattactgtcagcagtatgacatgtccccagcgacgttcggccaagggaccaaggtggagatcaaac

SEQ ID NO: 2160 - DNA, 340 bp, Homo sapiens
  source 1..340: mol_type = other DNA
gacttcgtgatgacccagtctccagactccctggctgtgtctctgggcgagcgggccaccatcaactgcaagtccacccaaagtgttttatatgactccaacaataggaactacttagcttggtatcagcagaaaccaggacagccgcctaaactgctcatttactgggcatctacccgggaatccggggtccctgaccggttcagtggaagcgggtctgggacagatttcactctcaccatcagcggcctgcaggctgaagatgtggcagtttattactgtcagcaatattatgatattccgtacacttttggccaggggaccaagctggagatcaaac

SEQ ID NO: 2161 - DNA, 337 bp, Homo sapiens
  source 1..337: mol_type = other DNA
gatactgtgatgacccagactccactctctctgtccgtcacccctgggcagacggcctccatctcctgcaagtctagtcagagcctcctgcatagtgatggaaagacctatctgtattggtacctgcagaaggcaggccagtcgccacaactcctgatatatgaagtctccagtcggttctctggagtgccagataggttcagtggcagcgggtcagggacagatttcacactgaaaatcagccgagtggaggctgaggatgttggggtgtattactgcatgcaaggtatacacctcccattcactttcggccctgggaccaaagtggatatcaaac

SEQ ID NO: 2162 - DNA, 325 bp, Homo sapiens
  source 1..325: mol_type = other DNA
gacatccagatgacccagtctccttccaccctgtctgcatctataggagacagagtcaccatcacttgccgggccagtcagagtattggtaactggttggcctggtatcagcagaaaccagggaaagcccctaaactcctgatctatgaggcctctagtttagaaagtggggtcccatcaaccttcagcggcagtggatctgggacagaattcactctcaccatcagcagcctgcagcctgatgattttgcaacttattactgccaacagtatagtaattatccctacgtgactttcggccaagggaccaaggtggaagtcaaac

SEQ ID NO: 2163 - DNA, 337 bp, Homo sapiens
  source 1..337: mol_type = other DNA
cagtctgccctgactcagcctgcctccgtgtctgggtctcctggacagtcaatcaccatctcctgcactggaaccagcagtgacgttggtggttataagtatgtctcctggtaccaacatcacccaggcaaagcccccaaactcctgatttatgaggtcaatgatcggccctcaggcgtttccaatcgtttctctggctccaagtctggcaacacggcctccctgaccatctctgggctccaggctgaggacgaggctgattattactgcagctcatatacaagtagcaacactcccctttatgtcttcggaactgggaccaaggtcaccgtcctag

SEQ ID NO: 2164 - DNA, 335 bp, Homo sapiens
  source 1..335: mol_type = other DNA
tgttgtgatgactcagtctccgctctccctgcccgtcacccttggacagccggcctccatctcctgcaggtctagtcagggactcgtctatagtgatggagtcacctactttaattggtttcagcagaggcccggccaatctccaaggcgcctaatttttgaggtttctaatcgggactctggggtcccagacagattcagcggcagtgcgtcaggcactgatttcacactgaagatcagcagggtggaggctgaggatgttggggtttattactgcatgcagggtacacactggccgtacacttttggccaggggaccaagctggaggtcaaac

SEQ ID NO: 2165 - DNA, 322 bp, Homo sapiens
  source 1..322: mol_type = other DNA
gaaatagtgatgacgcagtctccagccaccctgtctgtgtctccaggggaaagagtcaccctctcctgcagggccagtcagagtgttagcagcaacttagcctggtaccagcagaaacctggccaggctcccaggctcctcatctatggtgcatccaccagggccactggtatcccagccaggttcagtggcagtgggtctgggacagagttcactctcaccatcagcagcatgcagtctgaagattttgcaatttattactgtcagcagtataataactggcccctcactttcggccctgggaccaaagtggatatcaaac

SEQ ID NO: 2166 - DNA, 322 bp, Homo sapiens
  source 1..322: mol_type = other DNA
gacatccagatgacccaggctccatcctccctgtctgcatctgtaggagacagagtcaccatcacttgccgggcaagtcagaccattaggagttatttaaactggtatcagcagagaccagggaaagcccctaagctcctgatctatgctgcatccaatttacaaagtggggtcccatcaaggttcagtggcagtgggtctgggacagatttcactctcaccatcagcactctgcaacctgaagattttgccacttactactgtcaacagagttacagtatcccgaacacttttggccaggggaccaaactggagatcaaac

SEQ ID NO: 2167 - DNA, 323 bp, Homo sapiens
  source 1..323: mol_type = other DNA
gaaattgttttgacgcagtctccaggcaccctgtctttgtctccaggggcaagagccaccctctcttgtagggccagtcagagtgtcaggagcaattccctagcctggtaccagcagagacctggccagagtcccaggctcctcatctatggtgcatccagcagggccactggcatcccagacaggttcagtggcagtgggtctgggacagactacactctcacgataagcagactggaacccgaagattttgcaatgtattactgtcagcaatatggttcctcaccagggacgttcggccaggggactaaggtggacatcaa

SEQ ID NO: 2168 - DNA, 325 bp, Homo sapiens
  source 1..325: mol_type = other DNA
gaaattgtgttgacgcagtctccagtcacactgtctttgtctccaggggaaagagccaccctctcctgcggggccagtcagagtgttagcagcaactacttagcctggtatcagcagaaacctggcctggcgcccaggctcctcatctatgatgcatccaacagggccactggcatcccagacaggttcagtggcagtgggtctgggacagacttcactctcaccatcagtacactggagcctgaagattttgcagtgtattactgtcagcagtatggtagttcacctcgaacgttcggcccagggaccaaggtggaaatcaaac

SEQ ID NO: 2169 - DNA, 328 bp, Homo sapiens
  source 1..328: mol_type = other DNA
gaaattgtgttgacgcagtctccaggcaccctgtctttgtctccaggggaaagagccaccctctcctgcagggccagtcagagtgttagcagcaactacttagcctggtaccaacagaaacctggccaggctcccaggctcctcatctatggtgcatccaacagggccactggcatcccagacaggttcagtggcagtgggtctgggacagacttcactctcaccatcaccagactggagcctgcagattttgcagtgtattactgtcagcagtatggtacgtcacctccgtacacttttggccaggggaccaagctggagatcaaac

SEQ ID NO: 2170 - DNA, 325 bp, Homo sapiens
  source 1..325: mol_type = other DNA
gagattgttttgacacagtctccaggcaccctgtctctgtctccaggggaaagggccaccctctcctgtagggccagtcagagcattagcaaccacttggcctggtaccaacagaagcctggccaggctcccaggctcctcatgtttgatgcatccaacagggccactggcgtcccagccaggttcagtggcagtggatttgggacagacttcactctcaccatcagcagcctagagactgaagattttgcagtttattactgtcagcagcgtttcaactggcctccgatcaccttcggccaggggacacgagtggagattaaac

SEQ ID NO: 2171 - DNA, 332 bp, Homo sapiens
  source 1..332: mol_type = other DNA
tattgtgatgacccagactccactctctctgcccgtcacccctggacagccggcctccatctcctgcaagtctagtcagagcctcctgcatactgatggcaagacctatatgtcttggtacctgcagaagccaggccagtctccacagctcctaatctatgaagtttccagtcgcttctctggagtgccagataggttcagtggcagtgggtcagggacagagttcacactgaaaatcagtcgggtgggggctgaggatgttgggatttattactgcatgcaaggtctccacctttacagttttggccaggggaccaagctggagataaaac

SEQ ID NO: 2172 - DNA, 318 bp, Homo sapiens
  source 1..318: mol_type = other DNA
tcctatgagctgactcagccaccctcagtgtccgtgtccccaggacagacagccagcatcacctgctctggagagaaattgggagagaaatattgttcctggtatcaacagaagccaggccagtcccctctgatggtcatctatgaagataccaagcggccctcagggatccctgagcgattctctggctccaactctgggaacgcaaccactctgaccatcagcgggacccaggctatggatgaggctgactattactgtcaggcgtgggacagcaccactgacgtgttcggcggagggaccaagctgaccgtccta

SEQ ID NO: 2173 - DNA, 325 bp, Homo sapiens
  source 1..325: mol_type = other DNA
gaaattgtgttgacacagtctccagccaccctgtctttgtctccaggggaaagagccaccctctcctgcagggccagtcagagtgttagaaacttcttagcctggtatcaacagaaacctggccagcctcccagactcctcatatatgatgcgtctaacagggccactggcgtcccagtcaggttcagtggcagtgggtctgggacagatttcactctcaccatcagcggcctagagcctgaagattttgcagtttattactgtcagcaacgtagcaagtggccctcgatcaccttcggccaagggacacgactggagttaaaac

SEQ ID NO: 2174 - DNA, 325 bp, Homo sapiens
  source 1..325: mol_type = other DNA
gaaattgtgttgacgcagtctccaggcaccctgtctttgtctccaggggagagagccaccctctcctgcagggccagtcagagtgttagaagcagttcattagcctggtatcagcagaaacctggccagcctcccaggctcctcatatatggtgcatccagcagggccactggcctcccagacaggtttagtggcagtgggtctgggacagacttcactctcaccatcagcagactggagcctgaagattttgcaatgtattactgtcagcagtatggtagttcaccagggacgttcggccaagggaccaaggtggaaatcaaac

SEQ ID NO: 2175 - DNA, 334 bp, Homo sapiens
  source 1..334: mol_type = other DNA
cagtctgccctgactcagcctgcctccgtgtctgggtctcctggacagtcgatcaccatctcctgcactggaagcagcagtgacattggtgattataattatgtctcctggtaccaacaacacccaggcaaagcccccaaactcgtgatttatgaggtcactaatcggccctcagggatatctagtcgtttctctggctccaagtctggcaacacggcctccctgaccatctctgggctccaggctgaagacgaggctgattattactgcagctcatatacaagcaccactctccatgtactattcggcggagggaccaagctgaccgtcctag

SEQ ID NO: 2176 - DNA, 328 bp, Homo sapiens
  source 1..328: mol_type = other DNA
gaaattgtgttgacgcagtctccaggcaccctgtctttgtctccaggggaaagagccaccctctcctgcagggccagtcagagtattagcagcagtcacttagcctggtaccagcaggaacctggccaggctcccaggctcctcatctatggtgcatccagcagggccactggcatcccagagaggttcagtggcagtgggtctgggacagacttcactctcactatcagcagactggagcctgaagattttgcagtgtattactgtcagctgtatggtaggtcacctccgtacacttttggccaggggaccaagctggagatcaaac

SEQ ID NO: 2177 - DNA, 340 bp, Homo sapiens
  source 1..340: mol_type = other DNA
gatgttgtgatgactcagtctccgctctccctgcccgtcacccttggacagccggcctccatctcctgcaggtctagtctaaacctcgtccacgatgatggacacacctacttgagttggtttcagcagaggccaggccaatctccaaggcgcctaatttatgaggtttctaaccgggactctggggtcccagacagattcagcggcagtgggtcaggcactgatttcacactgaaaatcagcagagtggaggctgaggatgttggggtttattactgcacgcaaattaaacactggcgattattcactttcggccctgggaccaaagtggagatcaaac

SEQ ID NO: 2178 - DNA, 322 bp, Homo sapiens
  source 1..322: mol_type = other DNA
gacatccagatgacccaggctccatcctccctgtctgcatctgtaggagacagagtcaccatcacttgccgggcaagtcagaccatcaggaactatttaaactggtatcagcagaaaccagggaaagcccctaaactcctgatctatgctgcatccagtttgcaaagtggggtcccatctaggttcagtggcagcggctctgggacagacttcactctcaccatcagcagtctgcaacctgaagattttgcaacttactactgtcaacagagttacaatgtcccgaacacttttggccaggggaccaaactggacatccaac

SEQ ID NO: 2179 - DNA, 337 bp, Homo sapiens
  source 1..337: mol_type = other DNA
attgtgatgacgcagagtccactctctgtgtccgtcagccctggacagccgacctccatctcctgcaagtctagtcagagtctcctgcatcaggatggaaaaacctatttgtattggtatctgcagaagccaggccagtctccacatctcctgatttatgaagtttccagccgtttctctggtgtgccagataggttcagtggcagcgggtcagggacagatttcacattgaagatcagccgggtggaggctgaggatgttggggtttatttctgcatgcaaggtaaacactggagtgaattcactttcggccctgggaccaaagtggaaatcaaac

SEQ ID NO: 2180 - DNA, 325 bp, Homo sapiens
  source 1..325: mol_type = other DNA
gacatccagttgacccagtctccatcctccctgtctgcttctgtaggagacagagtcaccatcacttgccgggcgagtcagggcattagtaattctttagcctggtatcagcagaaacccgggaaagcccctaaactcctgctctatgaagcatctaaattggaaagtggggtcccatccaggttcagtggcagtggatctgggacggtttacagtgtcaccatcaacagcctgcagcctgaagattttgcaacttattactgtcaacaatattattccacccccacgtggacgttcggccaagggaccaaggtggaggtcaaac

SEQ ID NO: 2181 - DNA, 323 bp, Homo sapiens
  source 1..323: mol_type = other DNA
gagattgtgttgacgcagtctccaggcaccctgtctttgtctccaggggaaagggccaccctctcctgcagggccagtcagaatgtaaagagcaactccttagcctggtaccagcagaaacctggccaggctcccaggctcctcatctatggtgcatccactagggccactggcatcccagacaggttcagtggcagtgggtctgggacagacttcactctcaccatcaacagactggagcctgaagattttgcagtgtatttctgtcaacaatatggtgtctcaccagggacgttcggccgagggaccaaggtggaaatcaa

SEQ ID NO: 2182 - DNA, 337 bp, Homo sapiens
  source 1..337: mol_type = other DNA
gattttgtgatgactcagtctccactctccctgcccgtcacccttggacagccggcctccatctcctgcaggtctagtcaaagcctcctgcacagtgatggaaacacctacttgagttggtttcaccagaggccaggccaatctccaaggcgcctaatttatgaggtttctaagcgggactctggggtcccagacagattcagcggcagtgggtcaggcactgatttcacactgagaatcaccagggtggaggctgaggatgttggggtttattactgcatgcaaattaaacactggcgattattcactttcgggcctgggaccaaagtggaaatca

SEQ ID NO: 2183 - DNA, 322 bp, Homo sapiens
  source 1..322: mol_type = other DNA
gacatccagatgacccagtctccatctgccatgtctgcatctgtaggagacagagtcaccatcacttgtcgggcgagtcagggcattagaaattttttagcctggtttcagcagaaaccagggaaagtccctaagcgcctgatctatgctgcatccaatttgcaaagtggggtcccatcaaggttcagcggcagtggatctgggacagaattcactctcacaatcagcagcctgcagcctgaagattttgccacttattactgtctacagcattctacttacccgctcactttcggcggagggaccaaggtggagatcaaac

SEQ ID NO: 2184 - DNA, 325 bp, Homo sapiens
  source 1..325: mol_type = other DNA
gacattgtgttgacgcagtctccaggcaccctgtctctgtctccaggggaaagagccaccctctcctgcagggccagtcagactgttaagaacaataacttagcctggtaccagcaaaaacctggccaggctcccagactcctcatgtatggttcatccaccagggccactggcatcccagacaggttcagtggcagtgggtctgagacagacttcactctcaccatcagcagactggagtctgaagattttggagtgtactactgtcagcaatatggaggctcatcagggacgttcggccaagggaccaaggtggaaatcaaac

SEQ ID NO: 2185 - DNA, 331 bp, Homo sapiens
  source 1..331: mol_type = other DNA
cagtctgccctgactcagcctccctccgcgtccgggtctcctggacagtcagtcaccatctcctgcactggaaccagcaatgacgttggttcttataactatgtctcctggtaccaacaacaccccggcagagcccccaaactcgtgatttctgaggtcagtcagcggccctcaggggtccctgatcgcttctctggctccaagtctggcaatacggcctccctgaccgtctctgggctccaggctgaggatgaggctgagtattactgcagctcatatgcaggcaggtacacctgggtgttcggcggagggaccaagctgaccgtcctag

SEQ ID NO: 2186 - DNA, 325 bp, Homo sapiens
  source 1..325: mol_type = other DNA
gaaattgtgttgacacagtctccagccagcctgtctgtgtctccgggggaaagagtcaccctctcctgcagggccagtcagagtgttcggaacttcttagcctggtaccaacagaaacctggccaggctcccaggctcctcatctatgatgcatccaacagggccgctggcgtcccagacaggttcactggcagtgggtctgggacagacttcactctcaccatcagcagcctagagcctgaagattttgcagtttattactgtcaacaacgtagcaagtggccctcgatcaccttcggccaagggacacgactggagattaaac

SEQ ID NO: 2187 - DNA, 337 bp, Homo sapiens
  source 1..337: mol_type = other DNA
gatgttgtgatgactcagtctccactctccctgcccgtcaccctaggacagccggcctccatctcctgcaggtctagtcaaaggttcgaacacagtgatggaaccatctacttgagttggtttcaccagaggccaggccaatctccaaggcgcctaatttataaggtttctaaccgggactctggggtcccagacagattcagcggcagtgggtcaggcactgatttcacactgaaaatcagcagggtggaggctgaagatgttggggtttattactgcatgcagtgtacacactggcctcggacgttcggccaagggaccaaggtggaaatcaaac

SEQ ID NO: 2188 - DNA, 325 bp, Homo sapiens
  source 1..325: mol_type = other DNA
gaaattgtgttgacacagtctccagccaccctgtctttgtctccaggggaaagcgccaccctctcctgcaaggccagtcagagtgttagcaagttcttagcgtggttccaacagaaacctggccaggctcccaggctcctcatctatgatgcatccaacagggccagtggcaccccagccaggttcagtggcagtgggtctgggacagacttcactctcaccatcagtggcctggagcctgaagattttgcagtttattactgtcagcagcgtagcaactggccttcgctcactttcggcggagggaccaaggtagagattaaac

SEQ ID NO: 2189 - DNA, 325 bp, Homo sapiens
  source 1..325: mol_type = other DNA
gagattgtgttgacgcagtctccaggcaccctgtctttgtctccgggggcaagagccaccctctcctgcagggccagtcagagtcttaggagcaattccttagcctggtatcaacaaaaacctggccagagtcccaggctcctcatctatggtgcatccagcagggccactggcgtcccaggcaggttcactggcagtgggtctgggacagactacactctcactatcaccagactggagcctgaagattttgcagtgtattactgtcagcagtatgacatctcaccagggacgttcggccaggggaccaaggtggagatcaaac

SEQ ID NO: 2190 - DNA, 322 bp, Homo sapiens
  source 1..322: mol_type = other DNA
gaaattgtgttgacacagtctccagtcaccctgtctttgtctccaggggaaagagccaccctctcctgcagggccagtcagagtattaacaacttcttggcctggtaccagcagaaacctggccaggctcccaggctcctcatctatgatgcatccaagagggccactggcatcccagccaggttcagtggcagtgggtctgcgacagacttcactctcaccatcagcagcctagagcctgaagattttgcaatttattactgtcagcaacgtagcaactggcctccgatcaccttcggccaagggacacgactggagatta

SEQ ID NO: 2191 - DNA, 319 bp, Homo sapiens
  source 1..319: mol_type = other DNA
gccatccagttgacccagtctccatcctccctgtctgcatctgttggagacagagtcaccatcacttgccgggcaagtcagggcattaccagtggtctcgcctggtatcagcagaaaccagggaaagctcctagcctcctcatctctgatgtctccactttgagaactggggtcccatcgcgcttcatcggcggtgtgtctgggacagacttcactctcaccatcagtagcctgcagcctgaagattttgcaacttatttctgtcaacaattttatgattaccccctcactttcggcggagggaccaaggtcgagatca

SEQ ID NO: 2192 - DNA, 317 bp, Homo sapiens
  source 1..317: mol_type = other DNA
gaaattgtgttgacgcagtctccaggcaccctgtcaatgtctcccgggacaagagccaccctctcctgcagggccagtcagagtattagaaacaatttcttagcctggtatcagcagaaacctggccagactcccaggctcctcatctatggtgcatccaccagggccactggcatcccagacaggttcagtggcagtgggtctgggacagactacaccctcaccatcagcagcctggagcctgaagattttgcagtatattactgtcagcagtatggctcttcaccagggacgttcggccaagggaccaaggtgga

SEQ ID NO: 2193 - DNA, 334 bp, Homo sapiens
  source 1..334: mol_type = other DNA
gatattgtgatgacccagactccactctctctggccgtcacccctggacagccggcctccatctcctgtaggtctagccagactctccttcatactaatggcaagacttatttgtattggtacctgcagaagccaggccagtctccacagctcctgatctctgaggtttccacccggttctctggagtgccagctaggttcagtggcagcgggtcagggacagatttcacattgaaaatcagccgggtggacgctgaggatgttggagtctactactgcatgcaagggacacacctttatagttttggccaggggaccaagctggagatcaaac

SEQ ID NO: 2194 - DNA, 325 bp, Homo sapiens
  source 1..325: mol_type = other DNA
gagattgtgttgacgcagtctccaggcaccctgtctttgtctccaggggaaagagccaccctctcctgcagggccagtcagagtgtaacgagcaactccgtagcctggtaccagcagaaacctggccaggctcccaggctcctcatctatggtgcatccagtcgggccactggcatcccagacagattcagtggcagtgggtctgggacagacttcactctcaccatcagcagactggagcctgaagattttgcagtttattcctgtcagcagtatggtacctcaccagggacgttcggccaagggaccaaggtggagatcaaac

SEQ ID NO: 2195 - DNA, 325 bp, Homo sapiens
  source 1..325: mol_type = other DNA
gaaattgtgttgacgcagtctccaggcaccctgtctttgtctccaggggaaagagccaccctctcctgcagggccagtcagagtgttaggagcagctccttagcctggtatcggcagaaacctggccagcctcccaggctcctcatatatggtgcatccaacagggccactggcatcccagacaggttcagcggcagtgggtctgggacagacttcactctcaccatcagcagactggagcctgaagattttgcaatgtattactgtcaacagtatggtagctcaccagggacgttcggccaagggaccaaggtggaaatcaaac

SEQ ID NO: 2196 - DNA, 322 bp, Homo sapiens
  source 1..322: mol_type = other DNA
gacatccagatgacccagtctccatcttccgtgtctgcatctgtaggagacagagtcaccatcacttgtcgggcgagtcaggatattggcagctggttagcctggtttcagcagaaaccagggaaagcccctaacctcctgatctatgctgcatccagtttgcaaagtggggtcccatcaaggttcagcggcagcggatctgggacagatttcactctcaccatcagcagcctgcagcctgaagattttgcaacttattattgtcaacaggctaacagtttcccctacacttttggccaggggaccaagctggagatcaaac

SEQ ID NO: 2197 - DNA, 322 bp, Homo sapiens
  source 1..322: mol_type = other DNA
gacatccagatgacccagtctccatcctccctgtctgcatctgtaggagacagaatctccatcacttgccgggcaagtcagaccattagcagctatttaaattggtatcagcagaaaccagggaaagcccctaaactcctgatctatggtgcatccagtttgcaaagtggggtcccagcaaggttcagtggcagtgaatctgggacagatttcactctcaccatcaccagtctgcaacctgaagattttgcaacttactactgtcaacagagttacagtacgccattcactttcggccctgggaccaaggtggatatcaaac

SEQ ID NO: 2198 - DNA, 325 bp, Homo sapiens
  source 1..325: mol_type = other DNA
gaaattgtgttgacgcagtctccaggcaccctgtctttgtctccaggggaaagagccaccctctcctgcagggccagtcagagtgttggcagcaacaacttagcctggtaccagcagagacctggcctggctcccaggctcctcatccatggtgcatccagcagggccactggcatcccagacaggttcagtggcagtgggtctgggacagacttcactctcaccatcggcagactggagcctgaagattttgcattgtattactgtcagcagtatggttcctcaccgctcactttcggcggagggaccaaggtggacatcaaac

SEQ ID NO: 2199 - DNA, 322 bp, Homo sapiens
  source 1..322: mol_type = other DNA
gacatccagatgacccagtctccatcgtccctgtctgcaactgttggagacagagtcaccatcacttgccgggcaagtcagaacatcagaaccttcttaaattggtatcaacagaacccaggcaaagcccctaaactcctgatctatgctgcatccactctgcagactggggccccatcaagattcagtggcagtgggtctgggacagatttcactctcaccatcaccagtctccaacctgaagattttgcaacttactactgtcaacagagttacgacaccccaaacacttttggccaggggaccaaggtggagatgaaac

SEQ ID NO: 2200 - DNA, 325 bp, Homo sapiens
  source 1..325: mol_type = other DNA
gaaattgtgttgacgcagtctccaggcaccctgtgtttgtctccaggagaaagagccaccctctcctgcagggccagtcagagtgttgccagcagctacttagcctggtaccagcagaaacctggccaggctcccaggctcctcatctatggtgcatccagcagggccactggcatcccagacaggttcagtggcagtgggtctgggacagacttcactctcaccatcagcagactggaacctgaagattttgcagtgtattcctgtcagcagtatggtagctcacctccaacgttcggccaagggaccaaggtggaaatcaaac

SEQ ID NO: 2201 - DNA, 346 bp, Homo sapiens
  source 1..346: mol_type = other DNA
gacatccagatgacccagtctccatcgtccctgtctgcatctgtaggagacagagtcatcatcacttgccgggcaagtcagagcattagtcgttatttaaattggtatcagcagaaaccaggggaaccccctaaactcctgatttatggtgcatccactttgcagagtggggtctcatcaaggttcagtggcagtgggtctgggacagatttcactctcaccatcagcagtctccaacttgaagattttgcaacttatttctgtcaacagagttacagtaccccctataatcacaaatacggtaccccgtacacttttggccaggggaccaagctggacatcaaac

SEQ ID NO: 2202 - DNA, 321 bp, Homo sapiens
  source 1..321: mol_type = other DNA
gacatccagatgacccagtctccttccaccctgtctgcatctgtaggagacagaatcgccatcacttgccgggccaatcagagtattagtaggtggttggcctggtatcagcaaaaaccagggaaagcccctaaactcctgatctataaggcgtctagtttagaaagtggggtcccgtcaaggttcagcggcagtggatctgggacagaattcactctctccatcagcagcctgcagcctgatgattttgcaacttattactgccaacagtataatagttactcttggacgttcggccaagggaccaaggtggaaatcaaa

SEQ ID NO: 2203 - DNA, 322 bp, Homo sapiens
  source 1..322: mol_type = other DNA
gacatccagatgacccagtctccttccaccctgtctgcatctgttggagacagagtcaccatcacttgccgggccagtcagagtattagtacctggttggcctggtatcagcaaaaaccaggaaaagcccctaagctcctgatctataaggcgtccagtttagaaggtggggtcccatcaaggttcagcggcggtggatctgggacagacttcactctcaccatcaccagcctgcagcctgatgattttgcaacctattactgccaatactatgatagttattcagggaccttcggccaagggaccaaggtggacatcaaac

SEQ ID NO: 2204 - DNA, 322 bp, Homo sapiens
  source 1..322: mol_type = other DNA
gaaattgtgttgacgcagtctccaggcaccctgtctttgtctccaggggaaagagccaccctctcctgcagggccagtcacactgttagcagcaactccttagcctggtaccagcagagaccgggccaggctcccaggctcctcatctatggtgcatccaacagggccactggcatcccagacaggttcagtggcagtgggtctgggacagacttcactctcaccatcagcagactggagcctgaagattttgcagtgtattactgtcagcagtatggtacctcattcactttcggccctgggaccaaagtggataccaaac

SEQ ID NO: 2205 - DNA, 322 bp, Homo sapiens
  source 1..322: mol_type = other DNA
gacatccagatgacccagtctccatcctccctgtctgcatctgtaggagacagagtcaccatcacttgccgggcaagtcagtacattggcacctatttaaattggtatcagcaaaaaccagggaaagcccctaaactcctgatctttggtgcatccaatttgcaaagtggggtcccatcacggttcagtggcgttgcgtctgggacagatttcactctcaccatcaccagtctgcaacctgaagattttgcgacttactactgtcaacagagttacactaccgtcctcactttcggcggcggggccaaggtggacatcaaac

SEQ ID NO: 2206 - DNA, 322 bp, Homo sapiens
  source 1..322: mol_type = other DNA
gtcatctggatgacccagtctccatccttactctctgcatctacaggagacagagtcaccatcagttgtcggatgagtcagggcattagcagttatttagcctggtatcagcaaaaaccagggaaagcccctgagctcctgatctatgctgcatccactttgcaaagtggggtcccatcaaggttcagtggcagtggatctgggacagatttcactctcaccatcagttgcctgcagtctgaagattttgcaacttattactgtcaacagtattatagtttccctctcacgttcggccaagggaccaaggtggaaatcaaac

SEQ ID NO: 2207 - DNA, 322 bp, Homo sapiens
  source 1..322: mol_type = other DNA
gacatccagatgacccagtctccatcctccctgtctgcatctgcaggagacagagtcaccatcacttgccgggcaagtcagagcattagcaactatttaaattggtatcagcagaaaccagggaaagcccctaaactcctgatctatggtgcatccagtttgcaaagtggggtcccatcaaggttcagtggcagtggatctgggacagatttcactctcaccatcatcagtctgcaacctgaagattttgcaacttactactgtcaacagagttacagtaatcctcgaacgttcggccaagggaccaaggtggaaatcaaac

SEQ ID NO: 2208 - DNA, 322 bp, Homo sapiens
  source 1..322: mol_type = other DNA
gaaatagtgatgacgcagtctccagccaccctgtctgtgtctccaggggaaagagccaccctctcctgctgggccaatcagagcgttagcagtaacttagcctggtaccagcagaaacctggccaggctcccaggctcctcatctatggtgcatccaccagggccactggtatcccagccaggttcagtggcagtgggtctgggacagagttcacgctcaccatcagtagcctgcagtctgaagattttgcagtttattactgtcagcagtataatgactggcctaggacgttcggccaagggaccaaggtggaaatcaaac

SEQ ID NO: 2209 - DNA, 325 bp, Homo sapiens
  source 1..325: mol_type = other DNA
gaaattgtgttgacgcagtctccaggcaccctgtctttgtctccaggggaaagagccaccctctcctgcagggccagtcagagtgttagcagcagtaacttagcctggtaccaacagaaacctggccaggctccccgactcctcatccatggtgcatccagcagggccactggcatcccagacaggttcagtggcagtgggtctgggacagacttcactctctccatcagcagactggagcctgaagattttgcagtgtattactgtcagcagtatggtagctcgcctttcactttcggccctgggaccaaagtggatatcaaac

SEQ ID NO: 2210 - DNA, 325 bp, Homo sapiens
  source 1..325: mol_type = other DNA
gaaattgtgttgacgcagtctccaggcaccctgtctttgtctccaggggaaagagtcaccctctcctgcagggccagtcagagtgttaacagcaattctttagcctggtaccaacaaaaacctggccaggttcccagactcctcatctatggtgcattcaccagggccactgccatcccagacaggttcagtggcagtgggtctgggacagacttcacgctcaccatcaacagactggagcctgaagattttgcagtgtattactgtcagcaatatggtagctcaccgctcactttcggcggagggaccaaggtggagatcaaac

SEQ ID NO: 2211 - DNA, 322 bp, Homo sapiens
  source 1..322: mol_type = other DNA
gacatccagatgacccagtctccatcctccctgtctgcatctgtgggagacagagtcagcatctcttgccgggcaagtcagtacattggcaactttttaaattggtatcagcagaaaccggggcaagcccctaaactcctgatctatgaggcctccacattgcagagtggggtgccatcaaggttcagtggcgttgcatctgggacagatttcactctcaccatcagcagtctgcaacctgaggattttgcaacttactactgtcaacagagttacaatgtcgtccccactttcggcggaggggccaaggtggagatcaaac

SEQ ID NO: 2212 - DNA, 319 bp, Homo sapiens
  source 1..319: mol_type = other DNA
gacatccagatgacccagtctccttccaccctgtctgcatctgtaggagacagagtcaccatcacttgccgggccagtcagagtattagtagctggttggcctggtatcagcagaaaccagggaaagcccctaagctcctgatctataaggcgtctagtttagaaagtggggtcccatcaaggttcagcggcagtggatctgggacagaattcactctcaccatcagcagcctgcagcctgatgattttgcaacttattactgccaacagtataatagttattcgacgttcggccaagggaccaaggtggaaatcaaac

SEQ ID NO: 2213 - DNA, 325 bp, Homo sapiens
  source 1..325: mol_type = other DNA
gaaattgtgttgacgcagtctccaggcaccctgtctttgtctccaggggaaagagccaccctctcctgcagggccagtcagagtgttaggagcagctacttagcctggtaccagcataaacctggccaggctcccaggctcctcatctatggtgcatccagcagggccactggcatcccagacaggttcagtggcagtgggtctgggacagacttcactctcaccatcagcagactggagcctgaagattgtgcagtgtatttctgtcagcaatatggtagctcacctcagactttcggcggagggacgaaggtggagatcaaac

SEQ ID NO: 2214 - DNA, 322 bp, Homo sapiens
  source 1..322: mol_type = other DNA
gacatccggatgacccagtctccatcctccctgtctgcatctgtaggcgacagagtcaccatcacttgccgcgcaagtcagaacattaacgggtatgtaagttggtatcagcagaaaccagggaaagcccccaacctcctgatctatgctgcatccagtttgaaaagtagggtcccatcaaggttccgtggcagcggctctggggcagattacactctcagcatcgacagtctacagcctgaggactttgcaacttacttctgtctacagacttacgatacctctcacacttttggccaggggaccaaggtggaaatccaac

SEQ ID NO: 2215 - DNA, 322 bp, Homo sapiens
  source 1..322: mol_type = other DNA
gaaattgtgctgacgcagtctcctggcaccctgtctgtgtctccaggggaaagagtcaccctctcctgtagggccagtcagagtgttaggagcaactacttagcctggtatcagcaaagacttggtcaggctcccagactcctcatctatggtgcatccaccagggccactggcatcccagacaggttcagtggcagtgggtctgggacagacttcactctcaccatcagcacactggagccggaagattttgcagtgtattactgtcagcaatatgatagctctgttacgttcggccaagggaccaaggtggaaatcaaac

SEQ ID NO: 2216 - DNA, 325 bp, Homo sapiens
  source 1..325: mol_type = other DNA
cagtctgccctgactcagcctgcctccgtgtctgggtctcctggacagtcgatcaccatctcctgcactggaaccagcagtgatgttgggagttataaccttgtctcctggtaccaacagcacccaggcaaagcccccaaactcatgatttatgaggtcagtaagcggccctcaggggtttctaatcgcttctctggctccaagtctggcaacacggcctccctgacaatctctgggctccaggctgaggacgaggctgattattactgctgctcatatgcaggtagttgggtgttcggcggagggaccaagctgaccgtcctag

SEQ ID NO: 2217 - DNA, 329 bp, Homo sapiens
  source 1..329: mol_type = other DNA
cagtctgccctgacgcagcctccctccgcgtccgggtctcctggacagtcagtcaccatctcctgcactggaaccagcagtgacgttggtggttataactttgtctcctggtaccaacaacacccaggcaaagcccccaaactcatcatttatgaggtcactaagcggccctcaggggtccctgatcgcttctctggctccaagtctggcaacacggcctccctgaccgtctctgggctccaggctgaggatgaggctgattattactgcatctcatatgcaggcagcaataatttggtatttggcggagggaccaaggtgaccgtcct

SEQ ID NO: 2218 - DNA, 328 bp, Homo sapiens
  source 1..328: mol_type = other DNA
gacatccagatgacccagtctccatcctccctgtctgcctctgtaggagacagagtcaccatcacttgccgggcaagtcagactataagtacttatgtcaattggtatcagcagaaaccagggaaagcccctaacctcataatctatgctgcttccaagttgcagagtggggtcccatcaagattcagtggcagtggatctgggacagctttctctctctctatcaacggtctccaacctgaagatttcgcaacttactactgtcagcagagttacaatacccctcctatgtatacttttggccaggggaccaagctggacatgaaac

SEQ ID NO: 2219 - DNA, 325 bp, Homo sapiens
  source 1..325: mol_type = other DNA
gacatccagatgacccagtctccttccaccctgtctgcatctgtaggagacagagtcaccatcacttgccgggccagtcagagtattagtagctggttggcctggtatcagcagaaaccagggaaagcccctaagctcctgatctataaggcgtctagtttagaaagtggggtcccatcaaggttcagcggcagtggatctgggacagaattcactctcaccatcagcagcctgcagcctgatgattttgcaacttattactgccaacagtataatagttattctccttacacttttggccaggggaccaagctggagatcaaac

SEQ ID NO: 2220 - DNA, 322 bp, Homo sapiens
  source 1..322: mol_type = other DNA
gacatccagatgacccagtctccatcctccctgtctgcatctgtaggagacagagtcaccatcacttgtcgggcaggtcagagcattatcaggtatttaaattggtatcagaagaaagcaggggaagcccctaaactcctgatttatggtgcatccagtttgcaaagtggggtcccatcaaggttcagtggcagtggatctgggacagatttcactctcaccatcaacagtctgcaacctgaagattttgcaacttactactgtcaacagagttacaatgccccttacacttttggccaggggaccaagctcgagatcaaac

SEQ ID NO: 2221 - DNA, 328 bp, Homo sapiens
  source 1..328: mol_type = other DNA
gaaattgtgttgacgcagtctccagccaccctgtctttgtctccaggggaaagagccaccctctcctgcggggccagtcagagtgttagcggcaactacttagcctggtaccagcagaaacctggcctggcgcccaggctcctcatctatgatgcatccagcagggccactggcatcccagacaggttcattggcagtgggtctgggacagacttcattctcaccatcagcacactggagcctgaggattttgcagtgtattactgtcagcagtatggtagctcacttccggccacttttggccaggggaccaagttggagatcaaac

SEQ ID NO: 2222 - DNA, 322 bp, Homo sapiens
  source 1..322: mol_type = other DNA
gaaattgtgctgacgcagtctcctggcaccctgtctgtgtctccaggggaaagagtcaccctctcctgtagggccagtcagagtgttaggagcaactacttagcctggtatcagcaaagacttggtcaggctcccagactcctcatctatggtgcatccaccagggccactggcatcccagacaggttcagtggcagtgggtctgggacagacttcactctcaccatcagcacactggagccggaagattttgcagtgtattactgtcagcagtatggtagctctgttacgttcggccaagggaccaaggtggaaatcaaac

SEQ ID NO: 2223 - DNA, 322 bp, Homo sapiens
  source 1..322: mol_type = other DNA
gacatccagatgacccagtctccatcctccctgtctgcatctgtaggagacagagtcgccatcacttgccgggcaagtcagagcattagtaaatatttaaattggtatcagcagaaaccagggaaagcccctaaactcctgatctatgctgcatccactttgcaaagtggggtcccatccaggttcagtggcagtggatctgggacagatttcactctcaccatcagcagtctgcaacctgaagattttgcaacttactactgtcaacagagttacagtaccttgtggacgttcggccaagggaccaaggtggaactcaaac

SEQ ID NO: 2224 - DNA, 322 bp, Homo sapiens
  source 1..322: mol_type = other DNA
gacatccagatgacccagtctccatcctccctgtctgcatctgtaggagacagagtcaccatcacttgccgggcaagtcagagtgtaatcagctacttaaattggtatcagcagaaacctgggaaagcccctaagttcctgatccattctgcatccactttccaaagtggggccccatcaaggttcagtgccagtggatctgggacagatttcaccctcaccatcagcagtctgcaacctgaagattctgcaacttattactgtcaacagagttacagttccccgtggacgttcggccaagggaccaaggtggaaatcaaac

SEQ ID NO: 2225 - DNA, 325 bp, Homo sapiens
  source 1..325: mol_type = other DNA
gaaatagtgatgacgcagtctccagccaccctgtctctgtctccaggggaaagagccaccttctcctgcagggccagtcagagtgttagcagcgacttagcctggtaccagcagaaacctggccaggttcccaggctcctcatctatggtgcatccaccagggccactggtatcccagccaggttcagtggcagtgggtctgggacagagttcactctcaccatcaccagcctgcagtctgaagattttgcagtttattactgtcagcagtatcataactggcctccgctcactttcggcggagggaccaaggtggagatcaaac

SEQ ID NO: 2226 - DNA, 325 bp, Homo sapiens
  source 1..325: mol_type = other DNA
tcctatgagctggcacagccaccctcggtgtcagtgtccccaggacaaacggccaggatcacctgctctggagatgcattgccaatgaaatatgcttattggtaccagaagaagtcaggccaggcccctgtggtggtcatctatgaggacagtaaacgaccctccgggatccctgagagattctcgggttccaactcagagacaatggccacgttgactatcagtggggcccaggtagaggatgaaggtgactactattgtttctcaacagacagcagtggtgatcatagggtgttcggcggagggaccaagctgaccgtcctag

SEQ ID NO: 2227 - DNA, 319 bp, Homo sapiens
  source 1..319: mol_type = other DNA
gacatccagatgacccagtctccatcctccctgtctgcatctgtaggagacagagtcaccatcacttgccgggcaagtcagagtattagcagttatttaaattggtatcagcagaaaccagggaaagcccctaaactcctgatctatggtgcatctaatttggaaagtggggtcccatcaagattcagtggcagtggatctgggacacagttctctctcaccatcagcagtctgcaacctgaagattttgcgacttactactgtcaacagagttacaggacccctgggttcggccctgggaccaaagtggatatcaaac

SEQ ID NO: 2228 - DNA, 320 bp, Homo sapiens
  source 1..320: mol_type = other DNA
gacatccagatgacccagtctccctcctccctgtctgcatctgtgggagacagagtcaccatcaattgccgggcaagtcagagcattaacacctttgtaaactggtatcagcagaaaccagggaaagcccctaagctcctgatttatggtgcatccagtttgcaaagtggactcccatcaaggttcagtggcagtggatctgggacacatttcactctcaccatcagcagtctgcagcctgaagatattgcaacttaccactgtcaacagagttacaggaaccctgtcactttcggcggagggaccaaggtggagatcaa

SEQ ID NO: 2229 - DNA, 337 bp, Homo sapiens
  source 1..337: mol_type = other DNA
gatattgtgatgactcagtctccactctccctgcccgtcacccctggagagccggcctccatctcctgcaggtctagtcagagcctcctgcatagtaatggatacaactatttggattggtacctgcagaagccagggcagtctccacagctcctgatctatttgggttctaatcgggcctccggggtccctgacaggttcagtggcagtggatcaggcacagattttacactgaaaatcagcagagtggaggctgaggatgttggggtttattactgcatgcaagctctacaaactcctccgacgttcggccaagggaccaaggtggaaatcaaac

SEQ ID NO: 2230 - DNA, 322 bp, Homo sapiens
  source 1..322: mol_type = other DNA
gacatccagatgacccagtctccatcctccctgtctgcatctgtaggagacagagtcaccttcacttgccgggcaagtcagagcattagcagctatttaaattggtatcagcagaaaccagggaaagcccctaagctcctgatgtatgctgcatccagtttggaaagtggggtcccatcaaggttcagtggcagtggatctgggacagatttcactctcaccatccgcagtctgcaacctgaagattttgcaacttactactgtcaacagagttacattaccccgtacacttttggccaggggaccaagctggagatcaaac

SEQ ID NO: 2231 - DNA, 325 bp, Homo sapiens
  source 1..325: mol_type = other DNA
gaaatagtgctgacgcagtctccagccaccctgtctgtgtctccaggggaaagagccaccctctcctgcagggccagtcagagtgtaagcagcgacttagcctggtaccagcagagacctggccaggctcccaggctcgtcatgtatggtgcatccaccagggccactggtatcccagccaggttcagtggcagtgggtctgggacagagttcactctcaccatcagcagcctgcagtctgaagattttgcagtttattactgtcaacagtataataactggcctccgctcactttcggcggagggaccaaggtggagatcaaac

SEQ ID NO: 2232 - DNA, 322 bp, Homo sapiens
  source 1..322: mol_type = other DNA
gacattgtgttgacacagtctccagccaccctgtctttgtctcccggggacagagccaccctctcctgcaggtccagtcagagtgttagtcaccacttagcctggtaccagcagaaacctggccaggctcccaggctcgtcatctttgctgcgtccaacagggccactggcatcccagccaggttcagtggcagtgggtctgggacagacttcaccctcaccatcagcagtgtagagcctgaagattttgcagtttattactgtcagcagcgtgacgactggcctcggacgttcggccaagggaccagggtggaactcaaac

SEQ ID NO: 2233 - DNA, 328 bp, Homo sapiens
  source 1..328: mol_type = other DNA
gaaatagtgatgacgcagtctccagccaccctgtctgtgtctccaggggaaagtgtcaccctctcctgcagggccagtcagagtgttagcaccaacttagcctggtaccagcagaaacctggccaggctcccaggctcctcatccatggtgcatacaccagagtcattggggttccagccaggttcagaggcggtgggtctgggacagacttcactctcaccatcagcggcctgcagtctgaagattttgcggtttactactgtcagcagtatcataattggcctccggcgtacacctttggccaggggaccaagctggatctcaaac

SEQ ID NO: 2234 - DNA, 328 bp, Homo sapiens
  source 1..328: mol_type = other DNA
gacatccagatgacccagtctccatcctccctgtctgcatctgtgggagacagagtcaccatcacttgccgggcgagtcagggcattagcaattatttagcctggtatcagcagaaaccagggaaagttcctaagctcctgatctatggtgcatccactttgcaatcaggggtcacatctcggttcagtggcagtggatctgggacagatttcactctcaccatcagcagcctgcagcctgaagatgttgcaacttattactgtcaaaactataacaatgcccctcgagtattcactttcggccctgggaccaaagtggatgtcaaac

SEQ ID NO: 2235 - DNA, 325 bp, Homo sapiens
  source 1..325: mol_type = other DNA
tcctatgtgctgactcagccaccctcggtgtcagtggccccaggaaagacggccaggattacctgtgggggaaacaacattggaagtaaaagtgtgcactggtaccagcagaagccaggccaggcccctgtgctggtcgtctatgatgatagcgaccggccctcagggatccctgagcgattctctggctccaactctgggaacacggccaccctgaccatcagcagggtcgaagccggggatgaggccgactattactgtcaggtgtgggatagtagtagtgatcatgtggtattcggcggagggaccaagctgaccgtcctag

SEQ ID NO: 2236 - DNA, 325 bp, Homo sapiens
  source 1..325: mol_type = other DNA
gaaatagtgatgacgcagtctccaaccacactgtctgtgtcgccaggggaaagagccaccctcgcctgcagggccagtcagagtgttagcaccaacttagcctggtaccagcagaagcctggccaggctcccaggctcctcatctacggtgcatccaccagggccactggtatcccagccaggtttagtggcagtgggtctgggacagagttcactctcaccatcaccagcctgcagtctgaagattttgcaatttattactgtcagcagtatagtaactggcctcctatcaccttcggccaagggacacgactggacattaaac

SEQ ID NO: 2237 - DNA, 322 bp, Homo sapiens
  source 1..322: mol_type = other DNA
gacatccagatgacccagtctccatcctcgctgtctgcatctgtgggagacagagtcaccatcacttgtcgggcgagtcaggacattagtaataatttagcctggtttcagcagaaaccagggaaagcccctaagtccctgatctatgctgcatcccgtttgcaaagtggagtcccatcaaagttcagcggcagtggatctgggacagatttcactctaatcatcagcagcctgcagcctgaagattttgcaacttactactgccaacagtataatagttatcccgtcactttcggcggagggaccaaggtggagatcaaac

SEQ ID NO: 2238 - DNA, 322 bp, Homo sapiens
  source 1..322: mol_type = other DNA
gacatccagatgacccagtctccatcctccctgtctgcatctgtaggagacagagtcaccatcacttgccgggcaagtcagagcattagcagctatttaaattggtatcagcagaaaccagggaaagcccctaagctcctgatctatgctgcatccagtttgcaaagtggggtcccatcaaggttcagtggcagtggatctgggacagatttcactctcaccatcagcagtctgcaacctgaagattttgcaacttactactgtcaacagagttacagtaccccgtggacgttcggccaagggaccaaggtggaaatcaaac

SEQ ID NO: 2239 - DNA, 325 bp, Homo sapiens
  source 1..325: mol_type = other DNA
gaaattgtgttgacgcagtctccaggcaccctgtctttgtctccaggggaaagagccaccctctcctgcagggccagtcagagtgttagcagcagctacttagcctggtaccagcagaaacctggccaggctcccaggctcctcatctatggtgcatccagcagggccactggcatcccagacaggttcagtggcagtgggtctgggacagacttcactctcaccatcagcagactggagcctgaagattttgcagtgtattactgtcagcagtatggtagctcaccgtggacgttcggccaagggaccaaggtggaaatcaaac

SEQ ID NO: 2240 - DNA, 331 bp, Homo sapiens
  source 1..331: mol_type = other DNA
cagtctgtgctgactcagccaccctcagcgtctgggacccccggacagaacgtcaccatctcttgttctggaagcagctccaacatcggatcctattctggaaactggtaccaacttctcccagggacggcccccaaactcctcatctataggaataatgagcggccctcaggggtccctgaccgattctctggctccaagtctggcacctcagcctccctggccatcagtgggctccagtctgaggatgaggctgattattactgtgcatcgtgggatgacagtctgagtggtccggttttcggcggagggaccaaggtgaccgtcctag

SEQ ID NO: 2241 - DNA, 322 bp, Homo sapiens
  source 1..322: mol_type = other DNA
gacatccagatgacccagtctccatcctccctgtctgcatctgtaggagacagagtcaccatcacttgccgggcaagtcagagcattaacaactatttaaattggtatcaccagaaaccagggaaagcccctaagctcctgatctatgctgcatccagtttgcaaagtggggtcccgtcaaggttcactggtagtggatctgggacagatttcactctcaccatcagcagtctgcaacctgaagattttgcaacttactactgtcaacagagttacagtacttctcgaacattcggccaagggaccaaggtggaaatcaaac

SEQ ID NO: 2242 - DNA, 322 bp, Homo sapiens
  source 1..322: mol_type = other DNA
gacatccagatgacccagtctccatcctcactgtctgcatctgtaggagacagagtcaccatcacttgtcgggcgagtcagggcattagcaattatttagcctggtttcagcagaaaccagggaaagcccctaagtccctgatctatggtgcttccagtttgcaaagtggggtcccatcaaaattcagcggcagtggatctgggacagatttcactctcaccatcagcaacctgcagcctgaagattttgcaacttattactgccaacagtacaattcttacccgtacagttttggccaggggaccaagctggagatcaaac

SEQ ID NO: 2243 - DNA, 340 bp, Homo sapiens
  source 1..340: mol_type = other DNA
gacatcgcgatgacccagtctccagacttcctggctgtgtctctgggcgagagggccaccatcaactgcaagtccagccggactctattatataaccccaacaataagatgttcttaacttggtaccagaagaaacccggactgccgcctaaggtgctcatttactgggcatctatccgggcacctggggtacctgagcgattcagtgccagcgggtctgggacagatttcagtctcaccatcagcagcctgcaggctgaagatgcggcagtttattattgtcagcaatattatggttttccgttcactttcggccctgggaccacagtgcatatcaaac

SEQ ID NO: 2244 - DNA, 325 bp, Homo sapiens
  source 1..325: mol_type = other DNA
gaaattgtgttgacgcagtctccaggcaccctgtctttgtctccaggggagagagccaccctctcctgcagggccagtcagaatgttggcagcaactccttagcctggtaccagcaggcacctggccagtctcccaggctcctcatctatggtgcatctagcagggccactggcatcccagacaggttcagtggcagtgggtccgggacagacttcacgctcaccatcggcagactggagcctgaagattttgcagtgtattactgtcaccagtacggtacctcaccgctcactgtcggcggagggaccaaggtggagatcaaac

SEQ ID NO: 2245 - DNA, 320 bp, Homo sapiens
  source 1..320: mol_type = other DNA
gacatccagatgacccagtctccatcctccctgtctgcttctgtgggagacagagtcaccatcacttgccgggcgagtcagggcattagcaattctttagcctggtatcagcagaaaccagggaaagttcctaagctcctgatttatgctgcatccactttgcaatctggggtcccatctcgcttcagtggcggtgcatctgggacagatttcactctcaccatcagcagcctgcagcctgaagatgttgcaacttattactgtcaaaagtataacagtgcccctctcactttcggccctgggaccaaagtggatatcaa

SEQ ID NO: 2246 - DNA, 322 bp, Homo sapiens
  source 1..322: mol_type = other DNA
gaaattgtgttgacgcagtctccaggcaccctgtctttgtctccaggggagagagccaccctctcctgcagggccagtcagagtgttagcaacttagcctggtaccagcagaaacctgaccaggctcccaggctcctcatctatggtacatccagcagggccactggcatcccggacaggttcagtggcagtgggtctgagacagacttcactctcaccatcaccggactggagcctgaagattttgcagtgtactactgtcagcaatatgctacctcacctgggatcaccttcggccaagggacacgactggaaattaaac

SEQ ID NO: 2247 - DNA, 322 bp, Homo sapiens
  source 1..322: mol_type = other DNA
gacatccagatgacccagtctccatcctccctgtctgcatctgtaggagacagagtcaccatcacttgccgggcaagtcagagcatcatcacctatttaaattggtatcaacaaacaccaggcaaagcccccaagctcatgatctatggtgcatccagtttgcaaagtggggtcccatcaagattcagtggcagtggatctgggacagatttcactctcaccatcaccagtctgcaacctgaagattttgcaacttactactgtcaccagagttacagtacccctcaagtgttcggccaagggactaaggtggaaatcaaac

SEQ ID NO: 2248 - DNA, 322 bp, Homo sapiens
  source 1..322: mol_type = other DNA
gacatccagatgacccagtctccatcctccctgtctgcatctgtgggagacagagtcaccatctcttgccgggcaagtcagtacattggcaactttttaaattggtatcaacagaaaccgggtcaagcccctaaactcctgatctatgaggcctccacattgcagagtggggtgccgtcaaggttcagtggcgttgcgtctgggacagatttcactctcaccatcagcagtctgcaacctgaggattttgcaacttactactgtcaacagagttacactgtcgtccccactttcggcggaggggccaaggtggacatcaaac

SEQ ID NO: 2249 - DNA, 337 bp, Homo sapiens
  source 1..337: mol_type = other DNA
cagtctgccctgactcagcctccctccgcgtccgggtctcctggacagtcagtcaccatctcctgcactggaaccagcagtgacgttggtggttataactatgtctcctggtaccaacagcacccaggcaaagcccccaaactcatgatttatgaggtcagtaagcggccctcaggggtccctgatcgcttctctggctccaagtctggcaacacggcctccctgaccgtctctgggctccaggctgaggatgaggctgattattactgcagctcatatgcaggcagcaacaatttgaggtatgtcttcggaactgggaccaaggtcaccgtcctag

SEQ ID NO: 2250 - DNA, 320 bp, Homo sapiens
  source 1..320: mol_type = other DNA
gacatccagatgacccagtctccatcctccctgtctgcatctgtaggagccagagtcaccatcacttgccaggcgagtgaggacattagcaactatgtaaattggtatcagcagaaacccgggaaagcccctaaattcttgatctacgatgcatccaatttggaaacaggggtcccatcaaggttcagtggaagtggatctgggacacattttacctttaccatcagcagcctgcagcctgaagatattgcaacatattactgtcaacaatatgatgatctcccgtacacttttggccaggggaccaaactggagatcaa

SEQ ID NO: 2251 - DNA, 322 bp, Homo sapiens
  source 1..322: mol_type = other DNA
gaaattgtgttgacgcagtctccaggcatcctgtctttgtctccaggggaaagagccaccctctcctgcagggccaggcagagtgttagtagcaactacttagcctggtaccagcagaaacctggccaggctcccaggctcctcatctatgatgcatccagcagggccactggcatctcagacaggttcagtggcagtgggtctgggacagacttcactctcaccatcagcagactggagcctgaagattttgccgtgtattactgtcagcagtatggtaactcaccgacgttcggccaagggaccaaggtggaaatcaaac

SEQ ID NO: 2252 - DNA, 322 bp, Homo sapiens
  source 1..322: mol_type = other DNA
gacatccagatgacccagtctccatcctccctgtctgcatctgtaggagacagagtcaccatcacttgccgggcaggtcagagcattatcagctatttaaattggtatcaacaaaaaccagggaaagcccctaagctcttgatctatgctgcatccagtttgcaaggtggggtcccatcaaggttcagtggcagtggatctgggacagatttcactctcaccatcagcagtctacaagctgaagattttgcaacttactactgtcaacagagttataataccccttacacttttggccaggggaccaacctcgagatcaaac

SEQ ID NO: 2253 - DNA, 325 bp, Homo sapiens
  source 1..325: mol_type = other DNA
gaaattgtgttgacacagtctccagccaccctgtctttgtctccaggggaaagagccaccctctcctgcagggccagtcagagtgttaatagttacttagcctggtaccaacagaaacctggccaggctcccaggctcctcatctatgatgcatccaacagggccactggcgtcccagccaggttcagtggcagtgggtctgggacagacttcactctcaccatcagcagcctagagcctgaagattttgcagtttattactgtcaacaacgtggcaactggcctccgctcactttcggcggagggaccaaggtggagatcaaac

SEQ ID NO: 2254 - DNA, 322 bp, Homo sapiens
  source 1..322: mol_type = other DNA
gacacccagatgacccagtctccatcctccctgtctgcatctgtaggagacagagtcaccatcacttgccgggcaagtcagggcattagaaatgatttaggctggtatcagcagaaaccagggcaggccccaaagcgcctgatctacgctgcatccaatttacaaagtggggtcccatcaagattcagcggcagtggatctgggacagaattcactctcacaatcagcagcctgcagcctgaggattttgcaacttattattgtctacagcataatagttaccctccgacgttcggccaagggaccaaggtggaaatcaaac

SEQ ID NO: 2255 - DNA, 325 bp, Homo sapiens
  source 1..325: mol_type = other DNA
gacatccagatgacccagtctccatcctccctgtctgcatctgttggagacagagtcaccatcacttgccgggcaagtcagaacattagcagctatttaaattggtatcagcagaaaccagggaaagcccctaagctcctgatctatgctgcatccaatctgcaaagtggggtcccatcaaggttcagtggcagtggatctgggacagatttcactgtcaccatcagcagtctgcagcctgaagattttgcaacttactactgtcaacagacttacactaaccctcgggtcactttcggccctgggaccacagtggatctcaaac

SEQ ID NO: 2256 - DNA, 322 bp, Homo sapiens
  source 1..322: mol_type = other DNA
gaaattgtgttgacgcagtctccaggcaccctgtctttgtctccaggggaaagagccaccctctcctgtagggccagtcagagtgtcagcagcagtaagttagcctggtaccagcagaaacctggccaggctcccaggctcctcatctatggtgcatccagcagggccactggcatcccagacaggtttagtggcagtgggtctgggacagacttcacgctcatcatcagcagactggagcctgaagattttgcagtgtattactgtcagcaatatggtacctcaaagtcgttcggccaagggaccaaggtggaaatcaaac

SEQ ID NO: 2257 - DNA, 330 bp, Homo sapiens
  source 1..330: mol_type = other DNA
cagtctgtgttgacgcagccgccctcagtgtctgcggccccaggacagagggtcaccatctcctgttccggaagcaactccaatattgggagtaattttgtatcttggtatcaactactcccaggagcagcccccagactcctcatctatgacaatactaagcgaccctcagggattcctgaccgattctctggctccaagtccggcacgtcagccaccctggacatctccggactccagactggggacgaggccgattattattgcggaacatgggacactagtctgaatggaggactgttcggcggtgggaccaagctgaccgtccta

SEQ ID NO: 2258 - DNA, 331 bp, Homo sapiens
  source 1..331: mol_type = other DNA
cagtctgtgctgactcagccaccctcgctgtctgaagcccccaggcagagggtcaccatctcctgttctggaaggaactccaatatcggaaataatcttgtaaattggtaccaacaattcccaggcaaggctcccaaactcctcatctacaatgataatatgttggccccaggggtctctggccgattctctggctccaagtctggcacctcggcctccctggccatcagtgggctccagtctgaggatgaggctgattattactgtgcggtatgggatgactggctgagtggcgtggtattcggcggagggaccaggctgaccgtcctag

SEQ ID NO: 2259 - DNA, 331 bp, Homo sapiens
  source 1..331: mol_type = other DNA
gaaattgtgttgacgcagtctccaggcaccctgtctttgtctccaggggatagagccaccctctcctgcagggccagtcagagtcttactgacaccttcttagcctggtaccagcagagaccaggccaggctcccagactcctcatctttggttcctccaccagggccactggcatcccagacaggttcagtgccagtgggtctgggacagacttcactctcaccatcagcagactggagcctgaagattttgcagtatattactgtcagcactttagtacctcactgagaatattcactttcggccctgggaccaaactggatgtcaaac

SEQ ID NO: 2260 - DNA, 322 bp, Homo sapiens
  source 1..322: mol_type = other DNA
gacatccagatgacccagtctccttccaccctgtctgcatctgtaggagacagagtcaccatcacttgccgggccggtcagattgttagttgttgcttggcctggtatcagcagaaaccagggaaagcccctaagctcctgatctataaggcgtctaatttagaaagtggggtcccatcaaggttcagcggcagtggatctgggacagaattcgctctcaccatcagcagcctgcagcctgatgattttgcaacttattactgtcaacactataatacttattcgtggacgttcggccaagggaccaaggtggaaatcaaac

SEQ ID NO: 2261 - DNA, 322 bp, Homo sapiens
  source 1..322: mol_type = other DNA
gacatccagatgacgcagtctccatcctccctgtctacatctgtgggggacagagtcaccatcacttgccaggcgagtcaggacattgggaattctttaaattggtatcagcaaaaaccagggaaagcccctaagctcctgatctacgatgcgtccaatttggaaataggggtcccatcaaggttcagaggaagtggatctgggacagatttcattttcaccatcagcagcctgcagactgaagatattgcaacatattactgtcaacaggataataatctcccgtacacttttggccaggggaccaagctggagatcaaac

SEQ ID NO: 2262 - DNA, 322 bp, Homo sapiens
  source 1..322: mol_type = other DNA
gacatccagatgacccagtctccatcctccctgtcttcatctgtaggagacagagtcaccatcacttgccgggcaagtcagaacattagcagctatttaaattggtatcagcagaaaccagggaaagcccctaagctcctgatctatgctgcatccagtttgcaaagtggggtcccatcaaggttcagtggcagtggatctgggacagatttcactctcaccatcagcagtctacaacctgaagattttgcaacttactactgtcaacagagttacagtacccctccggctttcggccctgggaccaaagtggatatcaaac

SEQ ID NO: 2263 - DNA, 322 bp, Homo sapiens
  source 1..322: mol_type = other DNA
gacatccagatgacccagtctccatcctccctgtctgcatctgtaggagacagagtcaccatcacttgccgggcaagtcggagcattagcaaatatttaaattggtatcagcagaaaccagggaaagcccctaaactcctgatctatgctgcatccaatttgcacagtggggtcccatcaaggttcagtggcagtggatctgggacagatttcactctcaccatcagcagtctgcaacctgaagattttgcaacttactactgtcaacagagttacattaccctctggacgttcggccaggggaccaaggtggaggtcaaac

SEQ ID NO: 2264 - DNA, 322 bp, Homo sapiens
  source 1..322: mol_type = other DNA
gacatccagatgacccagtctccatcctccctgtctgcatctgtaggagacagagtcaccatcacttgccgggcaagtcagaacattagcaactatttaaattggtatcagcgaaaaccagggaaagcccctaagctcctgatctatggtgcatccagtttgcaaagtggggtcccatcaaggttcagtggcagtggatctgggacagatttcactctcaccatcagcagtctacaacctgaagattttgcaatttactactgtcaacagagttatagcacccagctcactttcggcggaggggccgaggtggagatcaaac

SEQ ID NO: 2265 - DNA, 324 bp, Homo sapiens
  source 1..324: mol_type = other DNA
aaattgttttgacacagtctccagccaccctgtctttgtctccaggggaaagagccaccctctcctgcagggccagtcagagtgttaccagctacttagcctggtaccaacataaacctggccaggctcccaggctcctcatctatgatgcatccaagagggccactggcatcccagccaggttcagtggcagtgggtctgggacagacttcactctcaccatcagcagcctagagcctgaagattttgcagtttattactgtcagcagcgtagcaactggccccctctcactttcggcggagggaccaaggtggagatcaaac

SEQ ID NO: 2266 - DNA, 317 bp, Homo sapiens
  source 1..317: mol_type = other DNA
gacatccagatgacccagtctccatcctccctgtctgcctctgtgggagacagagtcaccatcacttgccggccaagtcagagcattagtagttatttaaattggtatcaacagaaaccagggaaagcccctaaactcctgatctatggtgtctccagtttacaaagtggagtcccaccaaggttcagtggcagtagatctgggacagatttcactctcaccatcaccagtctgcaacctgaagattttgcgacttactactgtcaacagacttacagtagccgggcgctctctttcggcggagggaccaaggtgga

SEQ ID NO: 2267 - DNA, 334 bp, Homo sapiens
  source 1..334: mol_type = other DNA
cagtctgtattgacgcagccgccctcagtgtctggggccccagggcagagggtcaccatctcctgcactgggagcagctccaacatcggggcacgttatgaagtacactggtaccagcggcttccaggaacagcccccaaactcctcatctatggtaacaccaatcggccctcaggggtccctgaccgattctctggctccaagtctggcacctcagcctccctggccatcagtggactccaggctgaggatgaggctgattattactgccagtcctatgacagaagcctgagtggttcggtattcggcggagggaccaagctgaccgtcctag

SEQ ID NO: 2268 - DNA, 325 bp, Homo sapiens
  source 1..325: mol_type = other DNA
gaaattgtgttgacacagtctccagccaccctgtctttgtctccaggggaaagagccaccctctcctgcagggccagtcagagtgttagcagcttcttagcctggtaccaacagaaacctggccaggctcccaggctcctcatctatgatgcatccaacagggccactggcatcccagccaggttcagtggcagtgggtctgggacagacttcactctcaccatcagcagcctagagcctgaagattttgcagtttattactgtcagcagcgtagcaactggcctccgctcactttcggcggagggaccaaggtggagatcaaac

SEQ ID NO: 2269 - DNA, 325 bp, Homo sapiens
  source 1..325: mol_type = other DNA
gaaatagtgatgacgcagtctccagccaccctgtctgtgtctccaggggaaagagccaccctctcctgcagggccagtcagagtgttagcagcaacttagcctggtaccagcagaaacctggccaggctcccaggctcctcctctatggtgcatccaccagggccactggtatcccagccagattcagtggcagtgggtctgggacagagttcactctcaccatcagcagcctgcagtctgaagattttgcagtttattactgtcagcagtataataactggcctccgatcaccttcggccaagggacacgactggagattaaac

SEQ ID NO: 2270 - DNA, 329 bp, Homo sapiens
  source 1..329: mol_type = other DNA
cagtctgtgctgactcagccaccctcagcgtctgggacccccgggcagagggtcaccatctcttgttctgggagcagctccaacatcggaaggaatactgtaagctggtaccaccaagtcccaggaacggcccccaaactcctcatctataataataatcagcggccctcaggggtccctgaccgattctctggctccaagtctggcacctcagcctccctggccatcagtgggctccagtctgaggatgaggctgattattattgtgcagcatgggatgacggcctggaagattatgtcttcggaactgggaccaaggtcaccgtcct

SEQ ID NO: 2271 - DNA, 325 bp, Homo sapiens
  source 1..325: mol_type = other DNA
gaaatagtgatgacgcagtctccagccaccctgtctgtgtctccaggggaaagagccaccctctcctgcagggccagtcagagtgttagcaccaatttagcctggtacaggcagaaacctggccagcctcccaggctcctcatctatggtgcatccaccagggccactggtatcccagccaggttcagtggcagtgggtctgggacagagttcactctcaccatcagcagcctgcagtctgaagattttgcagtttattactgtcagcagtataataactggcctccgctcactttcggcggagggaccaaggtggagatcaaac

SEQ ID NO: 2272 - DNA, 322 bp, Homo sapiens
  source 1..322: mol_type = other DNA
tcttctgagctgactcaggaccctgctgtgtctgtggccttgggacagacagtcaggatcacatgccaaggagacagcctcagaagctcttatgcaagctggtaccagcagaagccaggacaggcccctgtacttgtcatctatggtaaacacaagcggccctcagggatcccagaccgattctctggctccagctcaggaaacacagcttccttgaccatcactggggctcaggcggaagatgaggctaactattactgtaactcccgggacaccagtggtaaccacccattcggcggagggaccaagctgaccgtcctag

SEQ ID NO: 2273 - DNA, 337 bp, Homo sapiens
  source 1..337: mol_type = other DNA
cagtctgccctgactcagcctcgctcagtgtccgggtctcctggacagtcagtcaccatctcctgcactggaaccagcagagacgttggtggttacaactatgtcacctggtaccaacagcacccaggcaaagcccccaaactcatgatctatgatgtcagtaagtggcccttaggggtccctgatcgcttctctggctccaagtctggcaacacggcctccctgaccatctctgggctccaggctgaggacgaggctgattattactgctgctcatatgcaggcagcgacacttataattatgtcttcggaactgggaccaaggtcaccgtcctag

SEQ ID NO: 2274 - DNA, 310 bp, Homo sapiens
  source 1..310: mol_type = other DNA
gacatccagatgacccagtctccatcttccctgtctgcgtctgtaggagacagagtcaccatcacttgccgggcaagtcagagaatcggtaattctttaaattggtatcagcaccaacccgggaaagcccctaaattcctgatttatgctgcatccaatttgcagagtggggtcccattaaggttcagtggcagtggatctgggacagatttcactctcaccatcagcagtctccaacctgaagatgtcgcaagttactactgtcaacacaattacacttttggccaggggaccaagctcgagatcaaac

SEQ ID NO: 2275 - DNA, 319 bp, Homo sapiens
  source 1..319: mol_type = other DNA
gaagtagtgatgacgcagtctccagccaccctgtctgtgtctccaggggaaagagccaccctctcctgcagggccagtcagagtgttagcagcaatttagtctggtaccagcagagacctggccaggctcccaggctcctcatttatggtgcatccaccagggccacaggtatcccagccaggttcagtggcagtgggtctgggacagaattcactctcaccatcagcagcatgcagtctgaagattttgcagtctattattgtcagcagtatgatacctggtcttcgttcggccaagggaccaaggtggaaatcaaac

SEQ ID NO: 2276 - DNA, 334 bp, Homo sapiens
  source 1..334: mol_type = other DNA
cagtctgccctgactcagcctcgctcagtgtccgggtctcctggacagtcagtcaccatctcctgcactggaaccagcagtgatgttggtggttataattatgtctcctggtaccaacagcacccaggcaaagcccccaaactcatgatttatgatgtcagtaagcggccctcaggggtccctgatcgcttctctggctccaagtctggcaacacggcctccctgaccatctcttggctccaggctgaggatgaggctgattattactgctgctcatatgcaggccgctcccccctatatgtcttcggaactgggacccaggtcaccgtcgtag

SEQ ID NO: 2277 - DNA, 322 bp, Homo sapiens
  source 1..322: mol_type = other DNA
gacatccagatgacccagtctccttccaccctgtctgcttctgtaggagacagagtcaccatcacttgccgggccagtcagagtattagtacctggttggcctggtatcagcagaaaccagggaaagcccctaaactcctgatctataaggcgtctactatacaaagtggggtcccatcaaggttcagcggcagtggatctgggacagaattcactctcaccatcagcagcctgcagcctgatgattttgcaacttattactgccaacagtataagagttattcttttctcagtttcggcggagggaccaaggtggagatca

SEQ ID NO: 2278 - DNA, 325 bp, Homo sapiens
  source 1..325: mol_type = other DNA
gaaattgtgttgacacagtctccagccaccctgtctttgtctccaggggaaagcgccaccctctcctgcagggccagtcagagtgttaggaaattcttagcctggtaccaacagaagcctggccaggctcccaggctcctcatttatgacgcatccaacagggccactggcatcccagccaggttccgtggcactgggtctgggacagacttcactctcaccatcagcagcctagagcctgaagattttgcagtttattactgtcaggagcgtagcacctggcctcagctcaccttcggcggagggaccaaggtggagatcaaac

SEQ ID NO: 2279 - DNA, 331 bp, Homo sapiens
  source 1..331: mol_type = other DNA
cagtctgccctgactcagcctcgctcagtgtccgggtctcctggacagtcagtcaccatctcctgcactggaaccagcagtgatattggtggttataactatgtctcctggtaccaacagcacccaggtaaagcccccaaactcattatttttgatgtcagtaagcggccctcaacggtccctgatcgcttctctggctccaagtctggcaacacggcctccctgagcatctctgggctccaggctgaggatgaggctgattatcactgctgctcatatgcgggcagttacacttacattttcggcggagggaccaagctgaccgtcctag

SEQ ID NO: 2280 - DNA, 313 bp, Homo sapiens
  source 1..313: mol_type = other DNA
gacatccagatgacccagtctccatcttccctgtctgcgtctgtaggagacagagtcaccatcacttgccggacaagtcagagaataagtagttcttctttaaattggtatcagcaccaacccggcaaagcccctaaattcctcatttatgctgcatccaatttgcagagtggggtcccatccaggttcagtggcagtggatctgggacagatttcactctcaccatcagcagtctgcaacctgaagatttggcaacttactactgtcaatacacttacacttttggccaggggaccaagctcgagatcaaac

SEQ ID NO: 2281 - DNA, 337 bp, Homo sapiens
  source 1..337: mol_type = other DNA
gatattgtgatgactcagtctccactctccctgcccgtcacccctggagagccggcctccatctcctgcaggtctagtcagagcctcctgcatagcaatggaatcgactatttggattggtacctgcagaagccagggcagtctccacagctcctgatctatatgggttctaatcgggcctccggggtccctgacaggttcagtggcagtggatcaggcacagattttacactgaaaatcagtagagtggaggctgaggatgttggggtttattactgcatgcaagctctacaaactccgtggacgttcggccaagggaccaaggtggaaatcaaac

SEQ ID NO: 2282 - DNA, 340 bp, Homo sapiens
  source 1..340: mol_type = other DNA
gacatcgtgatgacccagtctccagactccctggctgtgtctctgggcgagagggccaccatcaactgcaagtccagccagagtattttatacagctccaacagtaagaactacttagcttggtaccagcagaaaccaggacagcctcctaagctgctcatttactgggcatctacccgggcatccggggtccctgaccgattcagtggcagcgggtctgggacagatttcactctcaccatcagcagcctgcagtctgaagatgtggcagtttatttctgtcagcaatattataatactcctcggacgttcggccaagggaccagggtggaaatcaaac

SEQ ID NO: 2283 - DNA, 337 bp, Homo sapiens
  source 1..337: mol_type = other DNA
gatattgtgatgactcagtctccactctccctgtccgtcactcttggagagtcggcctccgtctcctgcaggtctagtcagagcctcctgaatagtaatggatacaactatttgaattggtacctgcagaagccagggcagtctccacagctcctgatctatttgggttctaatcgggcctccggggtccctgacaggttcagtggcggtggatcaggcacagattttacactgaaaatcagcagagtggaggctgaggatgttggggtttattactgcatgcaagctctacaaactcccttcactttcggccctgggaccaaagtggatatcaaac

SEQ ID NO: 2284 - DNA, 322 bp, Homo sapiens
  source 1..322: mol_type = other DNA
gacatccagatgacccagtctccatccaccctgtctgcatctgtaggagacagagtcaccatcacttgccgggccagtcagactgtaagtagtgggttggcctggtatcagcagaaaccagggaaagcccctaaactcctgatctataaggcgtctactttagaaagtggggtcccatcaaggttcagcggcagtggatctgggacacatttcactctcaccatcagcagcctgcagcctgatgattttgcaacttattactgccaacactatgatacttattcggggacgttcggccaagggaccaaggtggaaatcaaac

SEQ ID NO: 2285 - DNA, 322 bp, Homo sapiens
  source 1..322: mol_type = other DNA
tcctatgagctgactcagcctccctcagtgtccgtgtccccaggacagacagccaggatcacctgctctggagatacattgggacgtaactatgctagctggtatcaacagaagccaggccagtcccctgtgctgatcatctttgaagataataagcggccctcaggaatccctgagcgattctctggctccaactctgggaacatactcactctgaccatcagcgggacccagcctatggatgaggctgactattattgtcaggcgtgggacagcaccactccagaggtgttcggcggaggaaccaggctgaccgtcctag

SEQ ID NO: 2286 - DNA, 322 bp, Homo sapiens
  source 1..322: mol_type = other DNA
tcctatgagttgactcagcctccctcagtgtccgtgtccccaggacagacagccaggatcacctgctctggagatacattgggacgtaactatgctagctggtatcaacagaagccaggccagtcccctgtgctggtcatctttgaggataataagcggccctcaggaatccctgagcgattctctggctccaactctgggaacattctcactctgaccatcagcgagacccagcccatggatgaggctgactattattgtcaggcatgggacagcaccactccagaggtattcggcggagggaccaggctgaccgtcctag

SEQ ID NO: 2287 - DNA, 325 bp, Homo sapiens
  source 1..325: mol_type = other DNA
gacatccagatgacccagtctccttccaccctgtctgcatctgtaggagacagagtcaccatcacttgccgggccagtcagagtattcttacctggttggcctggtatcagcagaaaccagggaaagcccctaagctcctgatttataaggcgtctagtttagaaagtggggtcccatcaaggttcagcggcagtggatctgggacagaattcactctcaccatcagcagcctgcagcctgatgattttgcaacttattactgccaacagtataatagttatctgccgtggacgttcggccaagggaccaaggtggaaatcaaac

SEQ ID NO: 2288 - DNA, 319 bp, Homo sapiens
  source 1..319: mol_type = other DNA
gaagcagtgatgacgcagtctccagccaccttgtctgtgtctccaggggatagagccaccctctcctgcagggccagtcagagtgtgagcagtaaagtagtctggtaccagcagaaacctggccaggcccccaggctcctcatctatgatgcatccacacgggccactggtatcccagccaggttcagtggcagtgggtctgggacagagttcactctcaccatcagcagcatgcaggctgaggattttgcagtctattattgtcagcagtattattcctggtcttcgttcggccaagggaccaaggtggaaatcaaac

SEQ ID NO: 2289 - DNA, 325 bp, Homo sapiens
  source 1..325: mol_type = other DNA
gaaattgtattgacgcagtctccaggcaccctgtctttgtctccaggggaaagagccaccctctcttgcagggccagtcagagtgtcagcagcaactacttagcctggtaccagcagaaatctggccaggctcccaggctcctcatctacggtgcatccagcagggccactggcatcccagacaggttcagtggcagtgggtctgggacagacttcactctcaccatcagcagactggagcctgaagattttgcagtgttttactgtcagcagtatggtagctcacctctcactttcggcggagggaccaaggtggagatcaaac

SEQ ID NO: 2290 - DNA, 334 bp, Homo sapiens
  source 1..334: mol_type = other DNA
gatattgtgatgactcagtctccactctccctgcccgtcacccctggagagccggcctccatctcctgcaggtctagtcagagcctcctgcatagtaatggatacaactatttggattggtacctgcagaagccagggcagtctccacaggtcctgatttatttgggttctaatcgggcctccggggtccctgacaggttcagtggcagtggatcaggcacagattttacactgaaaatcagcagagtggaggctgaggatgttggggtttattactgcatgcaaactctacaactgtacacttttggccaggggaccaagctggagatcaaac

SEQ ID NO: 2291 - DNA, 328 bp, Homo sapiens
  source 1..328: mol_type = other DNA
gaaattgtgttgacacagtctccagccaccctgtctttgtctccaggggaaagagccaccctctcctgcagggccagtcagagtgttagcagctacttagcctggtaccaacagaagcctggccaggctcccaggctcctcatctatgatgcatccaagagggccactggcatcccagccaggttcagtggcagtgggtctggcacagacttcactctcatcatcaacagcctagagcctgaagattttgcagtttattactgtcagcagcgtagcaactggcctcccatgtactcttttggccaggggaccaagctggagatcaaac

SEQ ID NO: 2292 - DNA, 330 bp, Homo sapiens
  source 1..330: mol_type = other DNA
cagtctgtgctgactcagccaccctcagcggctgggacccccgggcagagggtcaccatctcttgttctggaagcagctccaacatcggaagtcacactgtaaactggtacctacaggtcccaggaacggcccccaaactcctcatctatagtgataatcagcggcgctcaggggtccctgagcgattctctggctccaggtctggcacctcagcctccctggccatcagtgggctccagtctgaggatgaggctgattattactgtgcagtatgggacgacagcctgagtgccctggttttcggcggagggaccaagctgaccgtccta

SEQ ID NO: 2293 - DNA, 325 bp, Homo sapiens
  source 1..325: mol_type = other DNA
gaagttgtgttgacgcagtctccaggcaccctgtctttgtctccaggagacagagccaccgtctcctgcagggccagtcagagtgttgccaggaactccatcgcctggtttcagcaaaaacctggccaggctcccaggctcctcatctatagtgcttccaccagggccgctggcgtcccagacaggttcagtggcagtgggtctgggacagacttcactctcagtatcagcagactggagcctgaggattttgcagtgtatttctgtcagcaatatggtagtgcacaatacacttttggccaggggaccaaggtggacatcaaac

SEQ ID NO: 2294 - DNA, 325 bp, Homo sapiens
  source 1..325: mol_type = other DNA
gaaatagtgatgacgcagtctccagccaccctgtctgtgtctccagggggaagagccaccctctcctgcagggccagtcagagtgttagcagcaacttagcctggtaccagcagaaacctggccaggctcccaggctcctcatctatggtgcatccaccagggccactggtatcccagccaggttcagtggcagtgggtctgggacagagttcactctcaccatcagcagcatgcagtctgaagattttgcagtttattactgtcagcagtataataactggcctccgatcaccttcggccaagggacacgactggagattaaac

SEQ ID NO: 2295 - DNA, 325 bp, Homo sapiens
  source 1..325: mol_type = other DNA
gaagtagtgatgacgcagtctccagccaccctgtctgtgtctccaggggaaagagccaccctctcctgcagggccagtcagagtgttagcagcaacttagcctggtaccagcagaaacctggccaggctcccaggctcctcatctatggtgcatccagcagggccactggtattccagccaggttcagtggcagtgggtctgggacagagttcactctcaccatcagcagcatgcagtctgaagattttgcagtttattactgtcagcagtataacaactggccacctctcactttcggcggagggaccaaggtggagatcaaac

SEQ ID NO: 2296 - DNA, 340 bp, Homo sapiens
  source 1..340: mol_type = other DNA
gacttcgtgatgacccagtctccagactccctggctgtgtctctgggcgagagggccaccatcaactgcaagtccagccagagtgtcttatacagctccaacaataagaactacttagcttggtaccagcagaaaccaggacagcctcctaaattgctcatttcctgggcatctacccgggaatccggggtccctgaccgattcagtggcagcgggtctgggacagatttcactctcatcatcagcagcctgcaggctgaagatgtggcagtttattactgtcagcaatattatgatactcccgtcactttcggccctgggaccaaagtggatatcaaac

SEQ ID NO: 2297 - DNA, 322 bp, Homo sapiens
  source 1..322: mol_type = other DNA
gacatccagatgacccagtctccatcctccctgtctgcatctgtaggagacagagtcaccatcacttgccaggcgagtcaggacattagcaactatttaaattggtatcagcagaaaccagggaaagcccctaagctcctgatctacgatgcatccaatttggaaacaggggtcccatcaaggttcagtggaagtggatctgggacagattttactttcaccatcagcagcctgcagcctgaagatattgcaacatattactgtcaacagtatgataatctccctcggacgttcggccaagggaccaaggtggaaatcaaac

SEQ ID NO: 2298 - DNA, 319 bp, Homo sapiens
  source 1..319: mol_type = other DNA
gaaatagtgatgacgcagtctccagccaccctgtctgtgtctccaggggaaagagccaccctctcctgcagggccagtcagagtgttagcagcaacttagcctggtaccagcagaaacctggccaggctcccaggctcctcatctatggtgcatccaccagggccactggtatcccagccaggttcagtggcagtgggtctgggacagagttcactctcaccatcagcagcatgcagtctgaagattttgcagtttattactgtcagcagtataataactggctcactttcggcggagggaccaaggtggagatcaaac

SEQ ID NO: 2299 - DNA, 331 bp, Homo sapiens
  source 1..331: mol_type = other DNA
cagcctgtgctgactcagccaccctcagtgtctgggacccccgggcagagggtcaccgtaacttgttctggaagcagctccaacatcggaagtagttctgtacactggtatcagctactcccaggaacggcccccaaactcctcatctctactactagtcagcggccctcgggggtccctgaccgattctctggctccaagtctggcacctcagcctccctggccatcagtgggctccagtctgaggatgagtctgattatttttgtgcagcatgggatgacagcctgaatggttgggttttcggcggagggaccaaactgtccgtcctag

SEQ ID NO: 2300 - DNA, 340 bp, Homo sapiens
  source 1..340: mol_type = other DNA
gacatcgtgatgacccagtctccagactccctggctgtgtctctgggcgagagggccaccatcaactgcaagtccagccagagtgttttatacaggtccaacaataagaactacttagcttggtaccagcagaaaccaggacagcctcctaagttgctcatttactgggcatctacccgggaatccggggtccctgaccgattcagtggcggcgggtctgggacagattttactctcaccatcagctccctgcaggctgaagatgtggcaatttattactgtcagcaatattatactgatgttcggacattcggccaagggaccaaggtggaaatcaaac

SEQ ID NO: 2301 - DNA, 325 bp, Homo sapiens
  source 1..325: mol_type = other DNA
gaaatagtgatgacgcagtctccagccaccctgtctgtgtctccaggggaaagagccaccctctcctgcagggccagtcagagtgttagcagcgacttagcctggtaccagcagaaacctggccaggctcccaggctcctcatctatggtgcatccaccagggccactggtatcccagccaggttcagtggcagtgggtctgggacagagttcactctcaccatcagcagcatgcagtctgaagattttgcagtttattactgtcagcagtataataactggcctcctatcaccttcggccaagggacacgactggagattaaac

SEQ ID NO: 2302 - DNA, 321 bp, Homo sapiens
  source 1..321: mol_type = other DNA
gacatccagatgacccagtctccatcctccctgtctgcatctgtaggagacagagtcaccatcacttgccgggcaagtcagagtattcgaaggtatttaaattggtatcagcagaaatcagggaaagcccctaagctcctgatctatgctgcatccagtttgcaaagtggggtcccatcaaggttcagtggcagtggatctgagacagatttcactctcaccatcagcagtctgcaacctgaagattttgcaacttactactgtcaacagactttcagtacccttgtcacttttggcgcggggaccaaggtggagatcaaa

SEQ ID NO: 2303 - DNA, 329 bp, Homo sapiens
  source 1..329: mol_type = other DNA
cagtctgccctgactcagcctgcctccgtgtctgggtctcctggacagtcgatcaccatctcctgcactggaaccagcagtgacgttggtggttataactatgtctcctggtaccaacagcacccaggcagagtccccaaactcataatttatggggtcaataatcggccctcaggggtttctaatcgcttctctggctccaagtctggcaacacggcctccctgaccatctctgggctccaggctgaggacgaggctgattattactgcggttcatattcaaggagcggcacttttgtcttcggagttgggaccacggtcaccgccct

SEQ ID NO: 2304 - DNA, 322 bp, Homo sapiens
  source 1..322: mol_type = other DNA
gacatccagatgacccagtctccatcctccctggctgcatctgttggagacagagtcaccatcacttgccgggcaagtcagagcatcagcaggtatttaaattggtatcagcagaaaccagggacagcccctaaactcctgatctacgctgcatccagtttgcaaagtggggtcccatcaaggttcagtggcagtggatctgggacagatttcactctaaccgtcagcagtctgcaacctgaagattttgcaacttactactgtcaacagagttacaatacccctcaaacttttggccaggggaccaagctggagatcaaac

SEQ ID NO: 2305 - DNA, 331 bp, Homo sapiens
  source 1..331: mol_type = other DNA
cagtctgtgctgactcagccaccctcagcgtctgggacccccgggcagagggtcaccatctcttgttctggaagcagctccaacatcggaagtaatactgtaaactggtaccagcagctcccaggaacggcccccaaactcctcatctatagtaataatcagcggccctcaggggtccctgaccgattctctggctccaagtctggcacctcagcctccctggccatcagtgggctccagtctgaggatgaggctgattattactgtgcagcatgggatgacagcctgaatggtgtggtattcggcggagggaccaagctgaccgtcctag

SEQ ID NO: 2306 - DNA, 327 bp, Homo sapiens
  source 1..327: mol_type = other DNA
aaattgtgttgacgcagtctccaggcaccctgtctttgtctccaggagaaagagccaccctctcctgtagggccagtgacagtattagaaataattttttagcctggtaccagcagaaacctggccaggctcccaggctcctcatctatggtgcatccagaagggccactggcatcccagacaggttcagtggcagtgggactgggacagacttcactctcaccatcaacacactggagcctgaggattttgcagtgtattactgtcaacagtatggtggctcacctcgtatcaccttcggccaagggacacgactggagattaaac

SEQ ID NO: 2307 - DNA, 325 bp, Homo sapiens
  source 1..325: mol_type = other DNA
gaaattgtgttgacgcagtctccaggcaccctgtctttgtctccaggggaaagagccaccctctcctgcagggccagtcagactgtttccagcagctacttagcctggtaccagcagaaacgtggccaggctcccaggctcctcatctatggtgcatccagcagggccactggcatcccagacaggttcagtggcagtgggtctgggacagacttcactctcactatcagcagactggagcctgaagattttgcagtgtactactgtcagcagtatggtagttcggggctcactttcggcggagggaccaaggtggagatcaaac

SEQ ID NO: 2308 - DNA, 336 bp, Homo sapiens
  source 1..336: mol_type = other DNA
acttcgtggtgacccagtctccagattccctggctgtgtctctgggcgagagggccactatcaactgcaagtccagccagagtgttttctgggactccaacaagaagaattacttagcttggtaccagcagaagccaggacaccctcctaagctgctcattaactgggcatctgcccgggcatccggggtccctgaccgattcaggggcagcgggtctgcgacagatttcactctcaccatcaccagcctgcaggctgaggatgtggcagtttattactgtcaccaatattatagtaatcctcagacttttggccaggggaccaagctggagatca

SEQ ID NO: 2309 - DNA, 328 bp, Homo sapiens
  source 1..328: mol_type = other DNA
gaaatagtgttgacgcagtctccaggcaccctgtctttgtctccaggggaaagagccaccctctcctgcagggccagtcagagtgttggcaacaacttcttagcctggtaccagcagaatcctggccaggctcccaggctcctcatctatggtgcttccagcagggccactggcatcccagacaggttcagtggcagtgggtctgggacagacttcactctcaccatcagcagactggagtctgaagattttgcagtgtattactgtcagcagtatggtggctcacctcggatcaccttcggccaagggacacgactggagattaaac

SEQ ID NO: 2310 - DNA, 337 bp, Homo sapiens
  source 1..337: mol_type = other DNA
cagtctgccctgactcagcctgcctccgtgtctgggtctcctggacagtcgatcaccatctcctgcactggaaccagcagtgatgttgggagttataaccttgtctcctggtaccaacagtatccaggcaaagcccccaaactcatgatttatgaggtcagtaagcggccctcaggggtttctaatcgcttctctggctccaagtctggcaacacggcctccctgacaatctctgggctccaggctgaggacgaggctgattattactgctcctcatatgcaggtagtagaactttcccttatgtcttcggaggtgggaccaaggtcatcgtcctag

SEQ ID NO: 2311 - DNA, 325 bp, Homo sapiens
  source 1..325: mol_type = other DNA
gaaattgtgttgacgcagtctccaggcgccctgtctttgtctccaggggaaagagccactctctcctgcagggccagtcagagtgttagcagcaactacttagcctggtaccagcagaaacctggccaggctcccaggctcctcatctatggtgcttccagcagggccactggcatcccagacaggttcagtggcagtgggtctgggacagacttcactctcaccatcaccagactggagcctgaagattttgcagtgtattactgtcagcagtatggtagttcacccctcactttcggcggagggaccaaggtggagatcaaac

SEQ ID NO: 2312 - DNA, 331 bp, Homo sapiens
  source 1..331: mol_type = other DNA
cagtctgtcctgactcagcctcgctcagtgtccgggtctcctggacagtcagtcaccatctcctgcactggaaccagcagtgatgttggtcgttatgactatgtctcctggtaccaacaatacccaggcaaagcccccaaactcatgatttatgatgtcactaagcggccctcaggggtccctgatcgcttctctgcctccaagtcgggcaacacggcctccctgaccatctctgggctccaggctgaggatgaggctgattattactgctgctcatatgcaggcaggtacagttatgtcttcggaagtgggaccggggtcacgatcctag

SEQ ID NO: 2313 - DNA, 328 bp, Homo sapiens
  source 1..328: mol_type = other DNA
gaaattgtgttgacacagtctccagccaccctgtctttgtctccaggggaaagagccaccctctcctgcagggccagtcagagtgttagcagcaacttagcctggtaccagcagaaacctggccaggctcccaggctcctcatctatggtgcatccaccagggccactggcatcccagccaggttcagtggcagtgggtctgggacagacttcactctcaccatcagcagcctggagcctgaagattttgcaatttattactgtcagcagcgtagcaactggcctccggagtacacttttggccaggggaccaagctggagatcaaac

SEQ ID NO: 2314 - DNA, 343 bp, Homo sapiens
  source 1..343: mol_type = other DNA
gacatcgtgatgacccagtctccagactccctggctgtgtctctgggcgagagggccaccatcaactgcaagtccagccagagtgttttacacaactccaacaataagaactacttagcttggtaccagcagaaaccaggacagcctcctaaactgctcatttactgggcatctacccggcaatccggggtccctgaccggttcagtggcagcgggtctgggacagatttcactctcaccatcaacagcctgcaggctgaagatgtggcagtttattactgtcagcaatattatagtactcgtatgtacacttttggccaggggaccaagctggagatcaaac

SEQ ID NO: 2315 - DNA, 328 bp, Homo sapiens
  source 1..328: mol_type = other DNA
gaaattgtgttgacgcagtctccaggcaccctgtctttgtctccaggggaaagagccaccctctcctgtaggtccagtcagagtgttagaagcagctatttagcctggtaccagcagaaacctggccaggctcccaggctcctcatctatggtgcatccagcagggccactggcatcccagacaggttcagtggcagtgggtctgggacagacttcactctcaccatcagcagactggagcctgaagattttgcagtgtattactgtcagcagtatggtggctcacctcggatcaccttcggccaagggacacgactggagattaaac

SEQ ID NO: 2316 - DNA, 322 bp, Homo sapiens
  source 1..322: mol_type = other DNA
gaaatagtgatgacgcagtctccggccaccctgtctgtgtctccaggggaaagagccaccctctcctgcagggccagtcagagtgttagcagcaactgcgcctggtaccagcagaaacctggccaggctcccaggctcctcatgtctggtgcatccaccagggccactggtgtcccagccaggttcagtggcagtgggtccgggacagagttcactctcaccatcagcagcatgcagtctgaagactttgcagtttactactgtcagcaatataatgactggcctcggacttttggccaggggaccaagctggagatcaaac

SEQ ID NO: 2317 - DNA, 325 bp, Homo sapiens
  source 1..325: mol_type = other DNA
gaaatagtgatgacgcagtctccagccaccctgtctgtgtctccaggggagagagccaccctctcctgcagggccagtcagagtgtgagtagtgacttagcctggtatcagcagaaacctggccaggctcccaggctcctcatctatggtgcatccagcagggccactggtatcccagccaggttcagtggcagtgggtctgggacagagttcactctcagcatcagcagcatgcagtctgaagattttgcagtttattactgtcagcagtataataactggccgcccctcactttcggcggagggaccaaggtggagatcaaac

SEQ ID NO: 2318 - DNA, 325 bp, Homo sapiens
  source 1..325: mol_type = other DNA
gaaattgtgttgacgcagtctccaggcaccctgtctttgtctccaggggaaagagccaccctctcctgcagggccagtcagagtgttagcagcagctacttagcctggtaccagcagaaacctggccaggctcccaggctcctcatctatggtgcatccagcagggccactggcatcccagacaggttcagtggcagtgggtctgggacagacttcactctcaccatcagcagactggagcctgaagattttgcagtgtattactgtcagcagtatggtagctcacccgtcacttttggccaggggaccaagctggagatcaaac

SEQ ID NO: 2319 - DNA, 325 bp, Homo sapiens
  source 1..325: mol_type = other DNA
tcctatgagctgacacagccaccctcggtgtcagtgtccccaggacagacggccaggatcacctgctctggagatgcattgccaaagcaatatgcttattggtaccagcagaagccaggccaggcccctgtgctggtgatatataaagacagtgagaggccctcagggatccctgagcgattctctggctccagctcagggacaacagtcacgttgaccatcagtggagtccaggcagaagacgaggctgactattactgtcaatcagcagacagcagtggtacttatgtggtattcggcggagggaccaagctgaccgtcctag

SEQ ID NO: 2320 - DNA, 322 bp, Homo sapiens
  source 1..322: mol_type = other DNA
gacatccagatgacccagtctccttccaccctgtctgcatctgtaggagacacagtcaccatcacttgccgggccagtcagactattcttagttggttggcctggtatcagcagaaaccaggcaaagcccctaggctcctcatctataaggcgtctagtttacaaagtggggtcccatcaagcttcagcggcagtggatctgggacagaattcactctcaccatcagcagcctgcagcctgatgattttgcaacttattactgccaacagtatactagttatccgtggacgttcggccaaggcaccaaggtggaaatcaaac

SEQ ID NO: 2321 - DNA, 346 bp, Homo sapiens
  source 1..346: mol_type = other DNA
caggctgtgctgactcagccggcttccctctccgcatctcctggagcatcagccagtctcacctgcaccttgcgcagtgacatcaatgttgctacctctaggatatactggtaccaacagaaggcagggagtcctccccagtatctcctgaggtacaaatcagactcagataaacaacagggctctggagtccccagccgcttctctggattcaaagatattttggccaatgcagggattttactcatctctgggctccagtctgaggatgaggctgactattactgtctaatgtggcacagaaacacttatgtgttcggcggagggaccaggctgaccgtcctag

SEQ ID NO: 2322 - DNA, 331 bp, Homo sapiens
  source 1..331: mol_type = other DNA
cagtctgccctgactcagcctcgctcagtgtccgggtctcctggacagtcagtcaccatctcctgcactggaaccagcagtgatgttggtcgttatgactatgtctcctggtaccaacaacacccaggcaaagcccccaaactcatgatttatgatgtcactaagcggccctcaggggtccctgatcgcttctcgggctccaagtctggcaccacggcctcactgaccatctctgggctccaggctgacgatgaggctgattattactgctgctcatatgcaggcaggtacagttatgtcttcggaagtgggaccgaagtcaccgtcctag

SEQ ID NO: 2323 - DNA, 325 bp, Homo sapiens
  source 1..325: mol_type = other DNA
gaaatactgatgacgcagtctccagccaccctgtctgtgtctccaggggaaagagccaccctctcctgcagggccagtcagagtgttagcagcaacttagcctggtaccagcagaaacctggccaggctcccaggctcctcatctatggtgcatccaccagggccactggtatcccagccaggttcagtggcagtgggtctgggacagagttcactctcaccatcagcagcctgcagtctgaagattttgcagtttattactgtcagcagtataataactggcctccgatcaccttcggccaagggacacgactggagattaaac

SEQ ID NO: 2324 - DNA, 328 bp, Homo sapiens
  source 1..328: mol_type = other DNA
gaagttgtgttgacgcagtctccaggcaccctgtctttgtctccaggggaaagagccaccctctcctgcagggccagtcagagtgttcgcaacaactacttagcctggtaccagcagaaatctggccaggctcccaggctcctcatctatggtgcggccagcagggccactggcatcccagacaggttcggtggcagtgggtctgggacagacttcactctcaccatcagcagactggagcctgaagattttgcagtgtattactgtcagcactatggtggctcacctcggatcaccttcggccaagggacacgactggagattaaac

SEQ ID NO: 2325 - DNA, 340 bp, Homo sapiens
  source 1..340: mol_type = other DNA
gacttcgtgatgacccagtctccagactccctggctgtgtctctgggcgagagggccaccatcaactgcaagtccagccagagtgttttatacaagtccaacaataagaactacttagcttggtaccagcagaaaccaggacagcctcctaaattgctcatttcctgggcatctacccgggaatccggggtccctgagcgattcagtggcagggggtctgagacagatttcactctcatcatcagcagcctgcaggctgaagatgtggcagtctattactgtcaacaatattatgaaactcccgtcactttcggccctgggaccaaagtggatatcaaac

SEQ ID NO: 2326 - DNA, 323 bp, Homo sapiens
  source 1..323: mol_type = other DNA
aatagtgatgacgcagtctccagccaccctgtctgtgtctccaggggagagagccaccctctcctgcagggccagtcagagtgttagcagaaaactagcctggtaccagcagagacctggccagtctcccaggctcctcatctatggtgcatccaccagggccactggtgtcccagccaggttcagcggcagtgggtctgggacagacttcactctcaccatcagcagcatgcagtctgaagattttgcagtttattactgtcaccagtatgataactggcctccgctcactttcggcggagggaccaaggtggagatcaaac

SEQ ID NO: 2327 - DNA, 325 bp, Homo sapiens
  source 1..325: mol_type = other DNA
gaaattgtgttgacgcagtctccaggcaccctgtctttgtcaccaggggaaagagccaccctctcgtgcagggccagtcagggtgtcagcagcggctacttagcctggtaccagcagaaacctggccaggctcccaggctcctcatctatggagcagccagcagggccactggcgtcccagacaggttcagtggcagtgggtctgggacagacttcactctcaccatcagcagactgcagcctgaagattttgcagtgtatttctgtcagcagtatggtgactcacccctgacgttcggccaggggaccaaggtggacttcaaac

SEQ ID NO: 2328 - DNA, 340 bp, Homo sapiens
  source 1..340: mol_type = other DNA
gacttcgtgatgacccagtctccagactccctggctgtgtctctgggcgagagggccaccatcaactgcaagtccagccagagtgttttatacaactccaacaataaaaattacttaggttggtaccagcagaaaccaggacagcctcctaagctgctcatttcctgggcatctacccgggaatccggggtccctgaccgattcagtggcagcgggtctgggacagatttcagtctcaccatcagcagcctgcaggctgaagatgtggcagtttattactgtcagcaacattatgatataccgtacacttttggccaggggaccaggctggagatcaaac

SEQ ID NO: 2329 - DNA, 325 bp, Homo sapiens
  source 1..325: mol_type = other DNA
gaaatcctgatgacgcagtctccagccaccctgtctgtgtctccaggggaaagagccaccctctcctgtagggccagtcagagtgttaacagcaacttagcctggtaccagcagaaacctggccaggctcccaggctcctcatctatggtgcatccaccagggccactggtattccagccaggttcagtggcagtgggtctgggacagagttcactctcaccatcggtagcatgcagtctgaggattttgcagtttattactgtcagcagtataataactggcctccgctcactttcggcggagggaccaaggtgaagatcaaac

SEQ ID NO: 2330 - DNA, 325 bp, Homo sapiens
  source 1..325: mol_type = other DNA
gaaattgtgttgacgcagtctccaggcaccctgtctttgtctccaggggaaagagccgccctctcctgcagggccactgagactgtcagcgacaacaagttagcctggtaccagcagaaaccaggccaggctcccaggctcctcatctatggtgcatccagcagggccactggcatcccagacaggttcagtggcagtgggtctgggacagacttcactctcaccatcagcagactggagcctgaagattttgcagcgtattactgtcagcagtatggaaggtcacccttcactttcggccctgggaccaaagtggatatcaaac

SEQ ID NO: 2331 - DNA, 322 bp, Homo sapiens
  source 1..322: mol_type = other DNA
gacatccagatgacccagtctccttccaccctgtctgcatctgtaggagacagagtcaccatcacttgccgggccagtcagagtattaataactggttggcctggtatcagcagagaccagggaaagcccctaacctcctgatctataaggcgtctagtttagaatttggtgtcccatcaaggttcagcggcagtggatctgggacagaattcactctcaccatcaccagcctgcagcctgatgattttggaagttattactgccaacagtatagcacttatccgtacagttttggccaggggaccaagctggagatcaaac

SEQ ID NO: 2332 - DNA, 322 bp, Homo sapiens
  source 1..322: mol_type = other DNA
gaaatagtgatgacacagtctccagccaccctgtctgtgtctccaggggaaagagccaccctctcctgcagggccagtcagagtattagcagcaacttagcctggtaccagcagaaacctggccagactcccaggctcctcatctatggtgcatccaccagggccactggtatcccagccaagttcagtggcagtgggtctgggacagatttcactctcaccatcagcagcatgcagtctgaagattttgcagtttattactgtcagcagtataataactggcctccgctcactttcggccctgggaccaaagtggatttca

SEQ ID NO: 2333 - DNA, 329 bp, Homo sapiens
  source 1..329: mol_type = other DNA
aattttttgctgactcagccccactctgtgtcggagtctccggggaagacggtaaccatctcctgcaccggcagcggtggcgccatcgccaggaactatgtgcagtggtaccaggtgcgcccgggcagtgcccccaccactgtgatctatgaggataatcaaagaccctctggagtccctgatcgcttctctggctccgtcgacagcgcctccaattctgcctccctcatcatctctggactgcagactgaagacgaggctgaatattactgtcagtcttatgataccagcgcccgggtgttcggcggagggaccaagctgatcgtcct

SEQ ID NO: 2334 - DNA, 322 bp, Homo sapiens
  source 1..322: mol_type = other DNA
gacatccagatgacccagtctccatcctccctgtctgcatctgtaggagacagagtcaccatcacttgccgggcaagtcagagcattagcagctatttaaattggtatcagcagaaaccagggaaagcccctaagctcctgatctatgctgcatccagtttgcaaagtggggtcccatcaaggttcagtggcagtggatctgggacagatttcactctcaccatcagcagtctgcaacctgaagattttgcaacttactactgtcaacagagttacagtacccctcggacgttcggccaagggaccaaggtggaaatcaaac

SEQ ID NO: 2335 - DNA, 322 bp, Homo sapiens
  source 1..322: mol_type = other DNA
gtcatctggatgacccagtctccatccttactctctgcatctacaggagacagagtcaccatcagttgtcggatgagtcagggcattagcagttatttagcctggtatcagcaaaaaccagggaaagcccctgagctcctgatctatgctgcatccactttgcaaagtggggtcccatcaaggttcagtggcagtggatctgggacagatttcactctcaccatcagttgcctgcagtctgaagattttgcaacttattactgtcaacagtattatagtttcccgctcactttcggcggagggaccaaggtggagatcaaac

SEQ ID NO: 2336 - DNA, 337 bp, Homo sapiens
  source 1..337: mol_type = other DNA
gaaattgtgatgacccagactccactctctctgtccgtcacccctggacagccggcctccatctcctgcaagtctagtcagagcctcctgcatagtgatggaaatacctatttgtattggtacctgcagaagccaggccagcctccacagctcctgatctatgaagtttccaaccggttctctggagtgccagataggttcagtggcagcgggtcagggacagatttcacactgaaaatcagccgggtggaggctgaggatgttggggtttattactgcatgcaaagtatacagcttcctccggctttcggcggagggaccaaggtggagatcaaac

SEQ ID NO: 2337 - DNA, 343 bp, Homo sapiens
  source 1..343: mol_type = other DNA
gacatcgtgatgacccagtctccagactccctggctgtgtctctgggcgagagggccaccatcaactgcaagtccagccagagtgttttatacagctccaacaataagaactacttagcttggtaccagcagaaaccaggacagcctcctaagctgctcatttactgggcatctacccgggaatccggggtccctgaccgattcagtggcagcgggtctgggacagatttcactctcaccatcagcagcctgcaggctgaagatgtggcagtttattactgtcagcaatattatagtactctcgtattcactttcggccctgggaccaaagtggatatcaaac

SEQ ID NO: 2338 - DNA, 346 bp, Homo sapiens
  source 1..346: mol_type = other DNA
caggctgtggtgactcagccggcttccctcgctgcatctcctggagcatcagtcagtctcacctgcaccttgcgcagtgacatcgatgttgttgcccagaggatatactggtatcaccagaagtctgggagtcctccccagtatctcctgaggtataaatcagactcagataaccagaagggctccggagtccccagccgcttctccggatccaaagatgtttcggccaatgcagggattttactcatctctgggctccagtctgaggatgaaggtgactattactgtgtgatttggcacaaaaacgcctatgtgttcggcggagggaccaacctgatcgtcctag

SEQ ID NO: 2339 - DNA, 319 bp, Homo sapiens
  source 1..319: mol_type = other DNA
gacatccagatgacccagtctccatcttcactgtctgcatctgtcggagacagagtcaccatcacttgtcgggcgagtcaggccattaagactcatttagcctggtttcagcagaaaccagggaaagcccccaagtctctgatctatgctgcatccactttgcaaagtggggtcccatcaaagttcagcggcagtggatccgggacagatttcactctcaccatctacaacctgcagcctgaagattttgcaacttattactgccaacaatatcaaatgtatccggtcactttcggcgaagggaccaaggtggagatca

SEQ ID NO: 2340 - DNA, 331 bp, Homo sapiens
  source 1..331: mol_type = other DNA
caggctgtggtgactcaggagccctcactgactgtgtccccaggagggacagtcactctcacctgtggctccagcactggagctgtcaccagtggtcattatccctactggttccagcagaagcctggccaagcccccaggacactgatttatgatacaagcaacaaacactcctggacccctgcccggttctcaggctccctccttgggggcaaagctgccctgaccctttcgggtgcgcagcctgaggatgaggctgagtattactgcttgctctcctatagtggtgctcggcccctattcggcggagggaccaagctgaccgtcctag

SEQ ID NO: 2341 - DNA, 325 bp, Homo sapiens
  source 1..325: mol_type = other DNA
tcctatgtgctgactcagccaccctcagtgtcagtggccccaggaaagacggccaggattacctgtgggggaaacaacattggaagtaaaagtgtgcactggtaccagcagaagccaggccaggcccctgtgctggtcatctattatgatagcgaccggccctcagggatccctgagcgattctctggctccaactctgggaacacggccaccctgaccatcagcagggtcgaagccggggatgaggccgactattactgtcaggtgtgggatagtagtagtgatcattatgtcttcggaactgggaccaaggtcaccgtcctag

SEQ ID NO: 2342 - DNA, 340 bp, Homo sapiens
  source 1..340: mol_type = other DNA
gacatcgtgatgacccagtctccggactccctggctgtgtctctgggcgagagggccaccatcaactgcaagtccagccagagtgttttctacagctccaacaataagaactacttaggttggtaccagcagaaaccaggacagcctcctaagctgctcatttactgggcatctgcccgggaacccggggtccctgaccgattcagtggcagcgggtctgggacagatttcactctcaccatcagcagcctgcaggctgaagatgtggcagtttattactgtcagcaatattatggtaatcctcacacttttggccaggggaccaagctggagatcaaac

SEQ ID NO: 2343 - DNA, 325 bp, Homo sapiens
  source 1..325: mol_type = other DNA
gaaattgtgttgacgcagtctccaggcaccctgtctttgtctccaggggaaagagccaccctctcctgcagggccagtcagagtgttagcaacagctacttagcctggtatcaacagaaacctggccaggctcccaggctcctcatctatggtgcatccagcagggccactggcatcccagacaggttcagtggcagtgggtctgggacagacttcactctcaccatcaccagactggagcctgaagactttgcaatgtattactgtcagcactatgttggctcacctctcactttcggcggagggaccaaggtggagatcaaac

SEQ ID NO: 2344 - DNA, 337 bp, Homo sapiens
  source 1..337: mol_type = other DNA
gatattgtgatgactcagtctccactctccctgcccgtcacccctggagagccggcctccatctcctgcaggtctagtcagagcctcctgcatagtaatggatacaactatttggattggtacctgcagaagccaggacagtctccacagctcctgatctatttgggttctaatcgggcctccggggtccctgacaggttcagtggcagtggatcaggcacagattttacactgaaaatcagcagagtggaggctgaggatgttggggtttattactgcatgcaagctctacaaactcccgtcactttcggccctgggaccaaagtggatatcaaac

SEQ ID NO: 2345 - DNA, 319 bp, Homo sapiens
  source 1..319: mol_type = other DNA
gaaatagtgttgacgcagtctccagccaccctgtctgtgtctccaggtgaaagagccaccctctcctgcagggccagtcagagtgttagcaacaacttagcctggtgccagcagaaacctggccagtctcccagggtcctcatctatggtgcatccaccagggccactggtatcccagccaggttcagtggcagtgggtctgggacagagttcactctcaccatcaacaacatgcaatctgaagattttgcagtttattactgtcaccaatatgatgacccgtggacgttcggccaagggaccaaggtggaaatcaaac

SEQ ID NO: 2346 - DNA, 334 bp, Homo sapiens
  source 1..334: mol_type = other DNA
gatattgtgatgacccagactccactctctctgtccgtcacccctggacagccggcctccatctcctgcaagtctagtcagagcctcctgcatactgatggaaagacctatttgtattggtacttgcagaagccaggccagtctccacagctcctgatctatgaagtttccaaccggttctctggagtgccagataggttcagtggcagcgggtcagggacagatttcacactggaaatcagccgggtggaggctgaggatgttggggtttattactgcatgcaaagtatactgccactcactttcggcggagggaccaaggtggagatcaaac

SEQ ID NO: 2347 - DNA, 331 bp, Homo sapiens
  source 1..331: mol_type = other DNA
cagtctgccctgactcagcctgcctccgtgtctgggtctcctggacagtcgatcaccatctcctgcactggaaccagcagtgacgttggtggttataactatgtctcctggtaccaacaacacccaggcaaagcccccaaactcatgatttatgatgtcagtaatcggccctcaggggtttctaatcgcttctctggctccaagtctggcaacacggcctccctgaccatctctgggctccaggctgaggacgaggctgattattactgcagctcatatacaagcagcagcacttatgtcttcggaactgggaccaaggtcaccgtcctag

SEQ ID NO: 2348 - DNA, 325 bp, Homo sapiens
  source 1..325: mol_type = other DNA
gaaattgtgttgacgcagtctccaggcaccctgtctttgtctccaggggaaagagccaccctctcctgcagggccagtcagagtgttagcagcagctacttagcctggtaccagcagaaacctggccaggctcccaggctcctcatctatggtgcatccagcagggccactggcgtccccgacagattcagtggcagtgggtctgggacagatttcactctcaccatcaagagactgcagcctgaagattttgcagtgtatttctgtcagcagtatggtagctcacccctgacgttcggccaagggaccaaggtggaaatcaaac

SEQ ID NO: 2349 - DNA, 319 bp, Homo sapiens
  source 1..319: mol_type = other DNA
gacatccagatgacccagtctccttccatcctgtccgcctctgtaggagacagagtcaccatcacttgccgggccagtcagcctattagtagttggttggcctggtatcagcagaaaccagggaaagcccctaaactcctgatctataaggcgtctagtttacaaattggtgtcccatcaaggttcggcggcagtgaatctgggacagaattcactctcaccatcagcggcctgcagcctgatgattttgcaacttattactgccaacagtatagtagttacccagggacgttcggccaagggaccaaggtggaaatca

SEQ ID NO: 2350 - DNA, 329 bp, Homo sapiens
  source 1..329: mol_type = other DNA
gaaattgtgttgacgcagtctccaggcaccctgtctttgtctccaggggagagagccaccctctcctgcagggccagtcagagtgttggcagcggttccttagcctggtaccagcagaaacctggccaggttcccaggctcctcatctatggtgcatccaacagggccaccggcatcccagacagattcagtggcagtgggtctggtacagacttcactctcacaatcagcagactggagcctgaagattttgtagtgtattactgtcagcagtatggtagctcacctcgggggcccactttcggcggagggaccaaggtggagatcaa

SEQ ID NO: 2351 - DNA, 322 bp, Homo sapiens
  source 1..322: mol_type = other DNA
gacatccagatgacccagtctccttccaccctgtctgcatctgtaggagacagagtcaccatcacttgccgggccagtcagagtattagtagctggttggcctggtatcagcagaaaccagggaaagcccctaagctcctgatctataaggcgtctagtttagaaagtggggtcccatcaaggttcagcggcagtggatctgggacagaattcactctcaccatcagcagcctgcagcctgatgattttgcaacttattactgccaacagtataatagttattcgtacacttttggccaggggaccaagctggagatcaaac

SEQ ID NO: 2352 - DNA, 328 bp, Homo sapiens
  source 1..328: mol_type = other DNA
gaaattgtgttgacacagtctccagccaccctgtctttgtctccaggggaaagagccaccctctcctgcagggccagtcagagtgttagtaattctttagcctggtaccaacagaagcctggccagtctcccaggctcctcatctatggtacgtccaacagggccactggcgtcccagccaggttcagtggcagtgggtctgggccagacttcactctcaccatcagcagcctagagcctgaagattttgcagtttattactgtcagcagcgtagcaactggcctccggagtacacttttggccaggggaccaagctggagatcaaac

SEQ ID NO: 2353 - DNA, 325 bp, Homo sapiens
  source 1..325: mol_type = other DNA
gaaatcgtgttgacgcagtctccaggcaccctgtctttgtctccaggggaaagagccaccctctcctgcagggccagtcagaggcttaccagcacctacttagcctggtaccggcagaagcctggccaggctcccaggctcctcatctatggtgcatccatcagggccactggcgtcccagacaggttcagtggcagtgggtctgggacagacttcactctcaccatcagcagactggagcctgaagattttgcagtgtattactgtcagcgatatggtaactcacctgaaaccttcggccaagggaccaaggtggaaatcaaac

SEQ ID NO: 2354 - DNA, 322 bp, Homo sapiens
  source 1..322: mol_type = other DNA
gacatccagatgacccagtctccttccaccctgtctgcatctgtcggagacagagtcaccatcacttgccgggccagtcagactattggtagctggttggcctggtatcagcagaaaccagggcgagcccctaacctcctgatctataaggcctctagtttagtaagtggggtcccatcaaggttcagcggcggaggatctgagacagaattcactctcaccatcagcaacctgcagcctgatgattttgcaacttattactgccaacaatataatacttccccgctcactttcggcggagggaccaaggtagaagtcaaac

SEQ ID NO: 2355 - DNA, 340 bp, Homo sapiens
  source 1..340: mol_type = other DNA
gacttcgtgatgacccagtctccagactccctggctgtgtctctgggcgagagggccaccatcaactgcaagtccagccagagtgttttatacgactccaacaataacaactacttagcttggtaccaacagaaaccaggacagcctcctaagttactcatttactgggcatctacccgggaatccggggtccctgaccgattcagtggcagcgggtctgggacagatttcactctcaccatcagcagcctgcaggctgaagatgtggcagtttattactgtcagcaatattatagtgcccctctcactttcggcggagggaccaaggtggagatcaaac

SEQ ID NO: 2356 - DNA, 343 bp, Homo sapiens
  source 1..343: mol_type = other DNA
cagtctgccctgactcagcctgcctccgtgtctgggtctcctggacagtcgatcaccatctcctgcactggaaccagcagtgatgttgggagttataaccttgtctcctggtaccaacagcacccaggcaaagcccccaaactcatgatttatgagggcagtaagcggccctcaggggtttctaatcgcttctctggctccaagtctggcaacacggcctccctgacaatctctgggctccaggctgaggacgaggctgattattactgctgctcatatgcaggtagtagcactttcgcccataattatgtcttcggaactgggaccaaggtcaccgtcctag

SEQ ID NO: 2357 - DNA, 340 bp, Homo sapiens
  source 1..340: mol_type = other DNA
gatattgtgatgactcagtctccactctccctgcccgtcacccctggagagccggcctccatctcctgcaggtctagtcagagcctcctgcatagtaatggatacaactatttggattggtacctgcagaagccagggcagtctccacagctcctgatctatttgggttctaatcgggcctccggggtccctgacaggttcagtggcagtggatcaggcacagattttacactgaaaatcagcagagtggaggctgaggatgttggggtttattactgcatgcaagctctacaaactccggagtacacttttggccaggggaccaagctggagatcaaac

SEQ ID NO: 2358 - DNA, 319 bp, Homo sapiens
  source 1..319: mol_type = other DNA
gacatccagatgacccagtctccatcctccctgtctgcatctgtaggagacagagtcaccatcacttgccgggcaagtcagagcattagcagctatttaaattggtatcagcagaaaccagggaaagcccctaagctcctgatctatgctgcatccagtttgcaaagtggggtcccatcaaggttcagtggcagtggatctgggacagatttcactctcaccatcagcagtctgcaacctgaagattttgcaacttactactgtcaacagagttacagtacccccactttcggcggagggaccaaggtggagatcaaac

SEQ ID NO: 2359 - DNA, 325 bp, Homo sapiens
  source 1..325: mol_type = other DNA
gaaattgtgttgacgcagtctccaggcaccctgtctttgtctccaggggaaagagccaccctctcctgcagggccagtcagagtgttagcagcagctacttagcctggtaccagcagaaacctggccaggctcccaggctcctcatctatggtgcatccagcagggccactggcatcccagacaggttcagtggcagtgggtctgggacagacttcactctcaccatcagcagactggagcctgaagattttgcagtgtattactgtcagcagtatggtagctcaccttgggcgttcggccaagggaccaaggtggaaatcaaac

SEQ ID NO: 2360 - DNA, 319 bp, Homo sapiens
  source 1..319: mol_type = other DNA
tcctatgagctgactcagccaccctcagtgtccgtgtccccaggacagacagccagcatcacctgctctggagataaattgggggataaatatgcttgctggtatcagcagaagccaggccagtcccctgtgctggtcatctatcaagatagcaagcggccctcagggatccctgagcgattctctggctccaactctgggaacacagccactctgaccatcagcgggacccaggctatggatgaggctgactattactgtcaggcgtgggacagcagcaccgtggtattcggcggagggaccaagctgaccgtcctag

SEQ ID NO: 2361 - DNA, 325 bp, Homo sapiens
  source 1..325: mol_type = other DNA
gaaatagtgatgacgcagtctccagccaccctgtctgtgtctccaggggaaagagccaccctctcctgcagggccagtcagagtgttagcaccaacttagcctggtatcaccagaaacctggccaggctcccaggctcctcatctatggtgcgtccaccagggccactggtatcccagccaggttcagtggcactgggtctgggacagagttcactctcaccattaacagcgtgcggtctgaagattttgcaatttattattgtcagcagtatcataactggcctccgctcactttcggcggagggaccaaggtggagatcaaac

SEQ ID NO: 2362 - DNA, 325 bp, Homo sapiens
  source 1..325: mol_type = other DNA
gaaattgtgttgacgcagtctcccggcaccctgtctttgtctccgggggaaagagtcaccctctcctgcagggccagtcagagtattagcagcaaccagttagcctggtatcagcagaaatctggccaggctcccaggctcctcatctatggtgcatccaccagggccactggcatcccagacaggttcagtggcagtgggtctgggacagacttcactctcaccatcaacagactggaggctgaagattttgcactgtattactgtcagcagtatgacagttcaaccttcactttcggcggagggaccaaggtggagatcaaac

SEQ ID NO: 2363 - DNA, 319 bp, Homo sapiens
  source 1..319: mol_type = other DNA
gacatccagatgacccagtctccatcctccctgtctgcatctgtaggagacagagtcaccatcacttgccgggcaagtcagaatattagaagttatttaaattggtatcaacagaaaccagggaaagccccaaaactcctgatttatgctgcttccagtgtggaaagtggagtcccatcaagattcactggcagtggatctgggacagacttcactctcaccatcagcagtctgcaacctgaagattttgcgacttacttctgtcaccagagttacgacaggcctcaaacttttggccaggggaccaaactgcagatca

SEQ ID NO: 2364 - DNA, 325 bp, Homo sapiens
  source 1..325: mol_type = other DNA
gacatccagatgacccagtctccatcctccctgtctgcatctgtaggagacagagtcaccatcacttgccgggcaagtcagagcattagcagctatttaaattggtatcagcagaaaccagggaaagcccctaagctcctgatctatgctgcatccagtttgcaaagtggggtcccatcaaggttcagtggcagtggatctgggacagatttcactctcaccatcagcagtctgcaacctgaagattttgcaacttactactgtcaacagagttacagtacccctcgggtcacttttggccaggggaccaagctggagatcaaac

SEQ ID NO: 2365 - DNA, 320 bp, Homo sapiens
  source 1..320: mol_type = other DNA
gaagtagtgatgacgcagtctccagccaccctgtctgtgtctccaggggaaagagccaccctctcctgcagggccagtcagagtgttaacagcaacttagcctggtatcagcagaaacctggccaggctcccaggctcctcatctatggtgcatccaccagggccactggtatcccagccaggttcagtggcagtgggtctgggacagagttcactctcaccatcagcagcatgcagtctgaagattttgcagtttattactgtcagcagtataataactggccgtggacgctcggccaagggaccaagggggaagtcaa

SEQ ID NO: 2366 - DNA, 331 bp, Homo sapiens
  source 1..331: mol_type = other DNA
cagtctgtgctgactcagccaccctcagcgtctgggacccccgggcagagggtcaccatctcttgttctggaagcagctccaacatcggaagtaattatgtatactggtaccagcagctcccaggaacggcccccaaactcctcatctataggaataatcagcggccctcaggggtccctgaccgattctctggctccaagtctggcacctcagcctccctggccatcagtgggctccggtccgaggatgaggctgattattactgtgcagcatgggatgacagcctgagtggttgggtgttcggcggagggaccaagctgaccgtcctag

SEQ ID NO: 2367 - DNA, 322 bp, Homo sapiens
  source 1..322: mol_type = other DNA
gacatccagatgacccagtctccttccaccctgtctgcatctgtaggagacagagtcaccatcacttgccgggccagtcagagtattagtagctggttggcctggtatcagcagaaaccagggaaagcccctaagctcctgatctataaggcgtctagtttagaaagtggggtcccatcaaggttcagcggcagtggatctgggacagaattcactctcaccatcagcagcctgcagcctgatgattttgcaacttattactgccaacagtataatagttattcgtggacgttcggccaagggaccaaggtggaaatcaaac

SEQ ID NO: 2368 - DNA, 322 bp, Homo sapiens
  source 1..322: mol_type = other DNA
gacatccagatgacccagtctccatcttccgtgtctgcatctgtaggagacagagtcaccatcacttgtcgggcgagtcagggtattagcagctggttagcctggtatcagcagaaaccagggaaagcccctaagctcctgatctatgctgcatccagtttgcacagtggggtcccatcaaggtttagcggcagtggatctgggacagatttcactctcaccatcagcagcctgcagcctgaagattttgcaacttacttttgtcaacaggctaatagctttccattcactttcggccctgggaccaaagtggatatcaaac

SEQ ID NO: 2369 - DNA, 334 bp, Homo sapiens
  source 1..334: mol_type = other DNA
gatgttgtgatgactcagtctccgctctccctgcccgtcacccttggacagccggcctccatctcctgcaagtctagtcaaggcctcatatacattgatggaagcacctacttgagttggtttcaacagaggccaggccaatctccaaggcgcctaatttataaggtttcttaccgggactctggggtcccagacagattcagcggcagtgggtcaggcactgaattcacactgaaaatcagcagggtggaggctgaggatgttggaatttattactgcatgcaaggtacacacggagggacttttggccaggggaccaagctggagatcaaac

SEQ ID NO: 2370 - DNA, 322 bp, Homo sapiens
  source 1..322: mol_type = other DNA
gacatccagatgacccagtctccatcctccctgtctgcatctgtaggagacagagtcaccatcacttgccgggcaagtcagagcattagcagctatttaaattggtatcagcagaaaccagggaaagcccctaagctcctgatctatgctgcatccagtttgcaaagtggggtcccatcaaggttcagtggcagtggatctgggacagatttcactctcaccatcagcagtctgcaacctgaagattttgcaacttactactgtcaacagagttacagtacccctaaaacttttggccaggggaccaagctggagatcaaac

SEQ ID NO: 2371 - DNA, 325 bp, Homo sapiens
  source 1..325: mol_type = other DNA
gaaatagtgatgacgcagtctccacccaccctgtctgtgtctccaggggaaagagccaccctctcctgcagggccagtcagagtgttagcggcaacttagcctggtaccagcagaaacctggccaggctcccaggctcctcatctatggtgcatccaccagggccagtggtatcccagccaggttcagtggcagtgggtctgggacagagttcactctcaccatcagcaccctgcagactgaagattttgcagtttattactgtcagcaatataataactggcctccgtggacattcggccaagggaccaaggtggaaatcaaac

SEQ ID NO: 2372 - DNA, 334 bp, Homo sapiens
  source 1..334: mol_type = other DNA
aattttatgctgactcagccgcactctgtgtcggagtctccggggaagacggtaaccatctcctgcacccgcagcagtggcagcattgccagcaactatgtgcagtggtaccagcagcgcccgggcagtgcccccaccactgtgatctatgaggataaccaaagaccctctggggtccctgatcggttctctggctccatcgacagctcctccaactctgcctccctcaccatctctggactgaagactgaggacgaggctgactactactgtcagtcttatgatagcagcaatcggggggtattcggcggagggaccaagctgaccgtcctag

SEQ ID NO: 2373 - DNA, 322 bp, Homo sapiens
  source 1..322: mol_type = other DNA
gaaatagtgatgacgcagtctccagccaccctgtctgtgtctccaggggaaagagccaccctctcctgcagggccagtcagagtgttagcagcaacttagcctggtaccagcagaaacctggccaggctcccaggctcctcatctatggtgcatccaccagggccactggtatcccagccaggttcagtggcagtgggtctgggacagagttcactctcaccatcagcagcctgcagtctgaagattttgcagtttattactgtcagcagtataataactggcctcgggtttttggccaggggaccaagctggagatcaaac

SEQ ID NO: 2374 - DNA, 334 bp, Homo sapiens
  source 1..334: mol_type = other DNA
cagtatgccctgactcagcctgcctccgtgtctgggtctcctggacagtcgatcaccatctcctgcactgaaaccagcagtgacattggtgcttataagtatgtctcctggtaccaacagcgcccaggcgaagcccccaaactcatgatttatgatgtcactgagcggccctcagaggtttccaatcgcttctctggctccaagtctggcaacacggcctccctgaccatctctgggctccagtctgaggacgaggctgattattactgcagctcatatacaagcagcaacgcttttgtggtgttcggcggagggaccaagctgaccgtcctag

SEQ ID NO: 2375 - DNA, 325 bp, Homo sapiens
  source 1..325: mol_type = other DNA
gaaactgtgttgacgcaatctccaggcaccctgtctttgtctccaggggagagagtcaccctctcctgcagggccagtcagagtcttaacagcaactccttagcctggtaccagcagaaacctggccagactcccaggctcctcatctatggtgcgtccagcagggccactggcatcccagacaggttccgtggcagtgggtctgggacagacttctctctcaccatcagcagactggaacctgaagattttgcagtgtattactgtcagcagtatgagacctcaagcctcactttcggcggagggaccaaggtagagatcaaac

SEQ ID NO: 2376 - DNA, 331 bp, Homo sapiens
  source 1..331: mol_type = other DNA
gaaattgtgttgacacagtctccagccaccctgtctttgtctccaggggaaagagccaccctctcctgcagggccagtcagagtgttagcagctacttagcctggtaccaacagaaacctggccaggctcccaggctcctcatctatgatgcatccaacagggccactggcatcccagccaggttcagtggcagtgggtctgggacagacttcactctcaccatcagcagcctagagcctgaagattttgcagtttattactgtcagcagcgtagcaactggcctccctccgtgtacacttttggccaggggaccaagctggagatcaaac

SEQ ID NO: 2377 - DNA, 331 bp, Homo sapiens
  source 1..331: mol_type = other DNA
cagtctgccctgactcagcctgcctccgtgtctgggtctcctggacagtcgatcaccatctcctgcactggaaccagcagtgacgttggtggttataactatgtctcctggtaccaacagcacccaggcaaagcccccaaactcatgatttatgatgtcagtaagcggccctcaggggtttctaatcgcttctctggctccaagtctggcaacacggcctccctgaccatctctgggctccaggctgaggacgaggctgattattactgcagctcatatacaagcagcagctatgtggtattcggcggagggaccaagctgaccgtcctag

SEQ ID NO: 2378 - DNA, 325 bp, Homo sapiens
  source 1..325: mol_type = other DNA
gaaattgtgttgacgcagtctcccggcaccctgtctttgtctccaggggaaagagccaccctctcctgcagggccagtcagagtgttagcagcagctacttagcctggtaccagcagaaacctggccaggctcccaggctcctcatctatggtgcatccaccagggccactggcatcccagacaggttcagtggcagtgggtctgggacagacttcactctcaccatcagcagactggagcctgaagattttgcagtttattcctgtcagcagtatggtagttcaaccttcactttcggcggagggaccaaggtggagatcaaac

SEQ ID NO: 2379 - DNA, 322 bp, Homo sapiens
  source 1..322: mol_type = other DNA
gacatccagatgacccagtctccttccaccctgtctgcatctgtaggagacagagtcaccatcacttgccgggccagtcagagtattagtagctggttggcctggtatcagcagaaaccagggaaagcccctaagctcctgatctataaggcgtctagtttagaaagtggggtcccatcaaggttcagcggcagtggatctgggacagaattcactctcaccatcagcagcctgcagcctgatgattttgcaacttattactgccaacagtataatagttatccgtggacgttcggccaagggaccaaggtggaaatcaaac

SEQ ID NO: 2380 - DNA, 322 bp, Homo sapiens
  source 1..322: mol_type = other DNA
gccatctggatgacccagtctccatccttactctctgcatctacaggagacagagtcaccatcagttgtcggatgagtcagggcattagcagttatttagcctggtatcagcaaaaaccagggaaagcccctgagctcctgatctatgctgcatccactttgcaaagtggggtcccatcaaggttcagtggcagtggatctgggacagatttcactctcaccatcagctgcctgcagtctgaagattttgcaacttattactgtcaacagtattatagtttcccgtacacttttggccaggggaccaagctggagatcaaac

SEQ ID NO: 2381 - DNA, 325 bp, Homo sapiens
  source 1..325: mol_type = other DNA
gaaattgtgttgacacagtctccagccaccctgtctttgtctccaggggaaagagccaccctctcctgcagggccagtcagagtgttagcagctacttagcctggtaccaacagaaacctggccaggctcccaggctcctcatctatgatgcatccaacagggccactggcatcccagccaggttcagtggcagtgggtctgggacagacttcactctcaccatcagcagcctagagcctgaagattttgcagtttattactgtcagcagcgtagcaactggcctccgatcactttcggcggagggaccaaggtggagatcaaac

SEQ ID NO: 2382 - DNA, 316 bp, Homo sapiens
  source 1..316: mol_type = other DNA
tcctatgagctgactcagccaccctcagtgtccgtgtccccaggacagacagccagcatcacctgctctggagataaattgggggataaatatgcttgctggtatcagcagaagccaggccagtcccctgtgctggtcatctatcaagatagcaagcggccctcagggatccctgagcgattctctggctccaactctgggaacacagccactctgaccatcagcgggacccaggctatggatgaggctgactattactgtcaggcgtgggacagcagcgtggtattcggcggagggaccaagctgaccgtcctag

SEQ ID NO: 2383 - DNA, 322 bp, Homo sapiens
  source 1..322: mol_type = other DNA
gacatccagttgacccagtctccatccttcctgtctgcatctgtaggagacagagtcaccatcacttgccgggccagtcagggcattagcagttatttagcctggtatcagcaaaaaccagggaaagcccctaagctcctgatctatgctgcatccactttgcaaagtggggtcccatcaaggttcagcggcagtggatctgggacagaattcactctcacaatcagcagcctgcagcctgaagattttgcaacttattactgtcaacagcttaatagttacccgatcaccttcggccaagggacacgactggagattaaac

SEQ ID NO: 2384 - DNA, 331 bp, Homo sapiens
  source 1..331: mol_type = other DNA
cagtctgtgttgacgcagccgccctcagtgtctgcggccccaggacagaaggtcaccatctcctgctctggaagcagctccaacattgggaataattatgtatcctggtaccagcagctcccaggaacagcccccaaactcctcatctatgaaaataataagcgaccctcagggattcctgaccgattctctggctccaagtctggcacgtcagccaccctgggcatcaccggactccagactggggacgaggccgattattactgcggaacatgggatagcagcctgagtgctggggtattcggcggagggaccaagctgaccgtcctag

SEQ ID NO: 2385 - DNA, 322 bp, Homo sapiens
  source 1..322: mol_type = other DNA
gacatccagatgacccagtctccatcctccctgtctgcatctgtaggagacagagtcaccatcacttgccgggcaagtcagagcattagcagctatttaaattggtatcagcagaaaccagggaaagcccctaagctcctgatctatgctgcatccagtttgcaaagtggggtcccatcaaggttcagtggcagtggatctgggacagatttcactctcaccatcagcagtctgcaacctgaagattttgcaacttactactgtcaacagagttacagtacccctcgcacttttggccaggggaccaagctggagatcaaac

SEQ ID NO: 2386 - DNA, 322 bp, Homo sapiens
  source 1..322: mol_type = other DNA
gaaatagtgatgacgcagtctccagccaccctgtctgtgtctccaggggaaagagccaccctctcctgcagggccagtcagagtgttagcagcaacttagcctggtaccagcagaaacctggccaggctcccaggctcctcatctatggtgcatccaccagggccactggtatcccagccaggttcagtggcagtgggtctgggacagagttcactctcaccatcagcagcctgcagtctgaagattttgcagtttattactgtcagcagtataataactggcctaggacgttcggccaagggaccaaggtggaaatcaaac

SEQ ID NO: 2387 - DNA, 334 bp, Homo sapiens
  source 1..334: mol_type = other DNA
gatattgtgatgactcagtctccactctccctgcccgtcacccctggagagccggcctccatctcctgcaggtctagtcagagcctcctgcatagtaatggatacaactatttggattggtacctgcagaagccagggcagtctccacagctcctgatctatttgggttctaatcgggcctccggggtccctgacaggttcagtggcagtggatcaggcacagattttacactgaaaatcagcagagtggaggctgaggatgttggggtttattactgcatgcaagctctacaaactccgacttttggccaggggaccaagctggagatcaaac

SEQ ID NO: 2388 - DNA, 325 bp, Homo sapiens
  source 1..325: mol_type = other DNA
gaaatagtgatgacccagtctccagccaccctgtctgtgtctccaggggaaagagccaccctctcctgcagggccagtcagagtgttagcagcaacttagcctggtaccagcagaaacctggccaggctcccaggctcctcatctatggtgcatccaccagggccactggtatcccagccaggttcagtggcagtgggtctgggacagagttcactctcaccatcagcagcatgcagcctgaagattttgcagtttattactgtcagcagtataataactggcctccgctcactttcggcggagggaccaaggtggagatcaaac

SEQ ID NO: 2389 - DNA, 322 bp, Homo sapiens
  source 1..322: mol_type = other DNA
gaaattgtgctgacgcagtctccaggcaccctgtctttgtctccaggggagggagccaccctctcctgcagggccagtcagagtattattaacaacttcgtagcctggtaccagcagagagctggccaggctcccaggctcctcatctatgatgcgtccaacagggccactggcatcccagacaggttcagtggcagtgggtctgggacagacttcactctcaccatcagcagtctggagcctgaagattttgcagtatattactgtcagcaatatggtacctcaccccggacgttcggccaagggaccaaggtggagatca

SEQ ID NO: 2390 - DNA, 325 bp, Homo sapiens
  source 1..325: mol_type = other DNA
gaaattgtgttgacacagtctccagccaccctgtctttgtctccaggggaaagagccaccctctcctgcagggccagtcagagtgttggcaactccttagcctggttccaacaaaaacctggccagtctccccggctcctcatcgatgatgcatccaacagggccactggcatccccgccaggttcagtggcagtgggtctgggacagacttcactctcaccatcagcagcctagagcctgaagattttggaatttattactgtcagcagcgtagcagctggctctcgctcactttcggcggagggaccacggtggagatcaaac

SEQ ID NO: 2391 - DNA, 328 bp, Homo sapiens
  source 1..328: mol_type = other DNA
gaaattgtgttgacgcagtctccaggcaccctgtctttgtctccaggggaaagagccaccctctcctgcagggccagtcagagtgttagcagcagctacttagcctggtaccagcagaaacctggccaggctcccaggctcctcatctatggtgcatccagcagggccactggcatcccagacaggttcagtggcagtgggtctgggacagacttcactctcaccatcagcagactggagcctgaagattttgcagtgtattactgtcagcagtatggtagctcacctcggtacacttttggccaggggaccaagctggagatcaaac

SEQ ID NO: 2392 - DNA, 325 bp, Homo sapiens
  source 1..325: mol_type = other DNA
gaaatagagatgacgcagtctccaggcaccctgtctgtgtctccaggggaaagagccaccctctcctgcagggccagtcagagtgttggcagcaacttagcctggttccagcagaaacctggccaggctcccaggctcctcatctatggggcatccaccagggccactggtatcccggccaggttcagtggtggtgggtctgggacagacttcactctcaccatcgacagcatagagtctgaagattttgcagtttattactgtcagcagtctgataactggcctccgctcactttcggcggagggaccaaggtggagatcaaac

SEQ ID NO: 2393 - DNA, 322 bp, Homo sapiens
  source 1..322: mol_type = other DNA
gacatccagatgacccagtctccatcctccctgtctgcatctgtaggagacacagtcattatcacttgccgggcgagtcaggacattggcaattctgtagcctggtatcaggtgaaagcggagaaagcccctaaactcctgctctatgctgcatccacattgggaagcggggtcccatccaggttcagtggcagtggatctgggacggattacagtctcaccatcaacagcctgcggcctgaagattctgcaatttattactgtcaacaatattataatacccctcggacgttcggccaagggaccaaggtggatgtcaaac

SEQ ID NO: 2394 - DNA, 319 bp, Homo sapiens
  source 1..319: mol_type = other DNA
gacatccagatgacccagtctccatcctccctgtctgcatctgtaggagacagagtcaccatttcttgccgggcaagtcagaacattggcaacaatttaaattggtatcagcaccaaccaggaaaagcccctaaattcctgatttattttgcgtccaatttgcaaagtggtgtcccatcaagattcagtggcagtggatccgggacagatttcactctcaccatcagtaatctgcagcctgaagattttgcaacttactactgtcaacagagttacagttccctcaccttcggcggaggtaccaaggtgcagatcaaac

SEQ ID NO: 2395 - DNA, 331 bp, Homo sapiens
  source 1..331: mol_type = other DNA
cagtctgtgctgactcagccaccctcagcgtctgggacccccgggcagagggtcaccatctcttgttctggaagcagctccaacatcggaagtaattatgtatactggtaccagcagctcccaggaacggcccccaaactcctcatctataggaataatcagcggccctcaggggtccctgaccgattctctggctccaagtctggcacctcagcctccctggccatcagtgggctccggtccgaggatgaggctgattattactgtgcagcatgggatgacagcctgagtggtggagtgttcggcggagggaccaagctgaccgtcctag

SEQ ID NO: 2396 - DNA, 322 bp, Homo sapiens
  source 1..322: mol_type = other DNA
tcctatgagctgactcagccaccctcagtgtccgtgtccccaggacagacagccagcatcacctgctctggagataaattgggggataaatatgcttgctggtatcagcagaagccaggccagtcccctgtgctggtcatctatcaagatagcaagcggccctcagggatccctgagcgattctctggctccaactctgggaacacagccactctgaccatcagcgggacccaggctatggatgaggctgactattactgtcaggcgtgggacagcagcattttttatgtcttcggaactgggaccaaggtcaccgtcctag

SEQ ID NO: 2397 - DNA, 325 bp, Homo sapiens
  source 1..325: mol_type = other DNA
gaaattgtgttgacgcagtctccaggcaccctgtctttgtctccaggggaaagagccaccctctcctgcagggccagtcagagtgttagcagcagctacttagcctggtaccagcagaaacctggccaggctcccaggctcctcatctatggtgcatccagcagggccactggcatcccagacaggttcagtggcagtgggtctgggacagacttcactctcaccatcagcagactggagcctgaagattttgcagtgtattactgtcagcagtatggtagctcacctgggacgttcggccaagggaccaaggtggaaatcaaac

SEQ ID NO: 2398 - DNA, 317 bp, Homo sapiens
  source 1..317: mol_type = other DNA
tcttatgagctgactcagccaacctctgtgtccgtgtccccaggacagacagccaccatcacctgttctggagataaattggggagtgagtatgtttcctggtatcagcagaaggccggtcaatcccctgtgttggtcatttatcaagatagtcagaggccctcagggatccctgagcgattctctggctccagctctgggaacacagccactctgaccatccgcgggacgcagactttggatgaagctgactatcactgtcaggcgtgggacattcccactgttattttcggcggagggaccaagctgaccgtcct

SEQ ID NO: 2399 - DNA, 319 bp, Homo sapiens
  source 1..319: mol_type = other DNA
gacatccagatgacccagtctccttccaccctgtctgcatctgtaggagacagagtcaccatcacttgccgggccagtcagagtattagtacctggttggcctggtatcagcagaaaccagggaaagcccctaaactcctgatctataaggcgtctagtttagaaagtggggtcccatcaaggttcagcggcagtggatctgggacagaattcactctcaccatcatcagcctgcagcctgatgattttgcaacttattactgccaacagtataatagttatccgacgttcggccaagggaccaaggtggaaatcaaac

SEQ ID NO: 2400 - DNA, 331 bp, Homo sapiens; identical to SEQ ID NO: 2366
  source 1..331: mol_type = other DNA

SEQ ID NO: 2401 - DNA, 324 bp, Homo sapiens
  source 1..324: mol_type = other DNA
gaaattgtgttgacgcagtctccaggcaccctgtctttgtctccaggagagagagccaccctctcctgtagggccagtcagagtgttggcagcaactccttagcctggtaccagcagaaacctggccaggctcccaggctcctcatctatggtgcatccagcagggccactggcatccctgacaggttcagtggcagtgggtctgggacagacttcactctcaccatcagcagactggagcctgaagactttgcagtatattactgtcagcagtatggtggctcaccccggacgttcggccaagggaccaaggtggaaatcaaa

SEQ ID NO: 2402 - DNA, 337 bp, Homo sapiens
  source 1..337: mol_type = other DNA
gatattgtaatgactcagtctccgctctccctgcccgtcactcctggggagccggcctccatctcctgcaagtctagtcagagcctcctgtatagtaatggatatacctatttggaatggtacctgcagaagccagggcagtctccacaggtcctgatctattcgggttttaatcgggcctccggggtccctgacaggttcagtggcagtggttcaggcacagattttacactgaaaatcagcagagtggaggctgaagatgttggagtttattactgtatgcaaagtgtacaaatcccgtggacgttcggccaagggaccaaggtggaaatcaaac

SEQ ID NO: 2403 - DNA, 340 bp, Homo sapiens
  source 1..340: mol_type = other DNA
gacatcgtgatgacccagtctccagactccctggctgtgtctctgggcgagagggccaccatcaactgcaagtccagccagagtgttttatacagctccaacaataagaactacttagcttggtaccagcagaaaccaggacagcctcctaagctgctcatttactgggcatctacccgggaatccggggtccctgaccgattcagtggcagcgggtctgggacagatttcactctcaccatcagcagcctgcaggctgaagatgtggcagtttattactgtcagcaatattatagtactccgtacacttttggccaggggaccaagctggagatcaaac

SEQ ID NO: 2404 - DNA, 333 bp, Homo sapiens
  source 1..333: mol_type = other DNA
cagtctgccctgactcagcctgcctccgtgtctgggtctcctggacagtcgatcaccatctcctgcactggaaccagcagtgacattggtgcttataactttgtctcctggtaccaacaacaccccggcaaagcccccaaactcataatttatgatgtcaataatcggccctcaggggtttctaatcgcttctctggctccaagtctggcaacacggcctccctgaccatctccggactccaggctgaggacgaggctacttattactgcagctcatatacaggcaccaccgttgtcagggttttcggcggagggaccaagctgaccgtccta

SEQ ID NO: 2405 - DNA, 331 bp, Homo sapiens
  source 1..331: mol_type = other DNA
cagtctgtgctgactcagccaccctcagcgtctgggacccccgggcagagggtcaccatctcttgttctggaagcagctccaacatcggaagtaatactgtaaactggtaccagcagctcccaggaacggcccccaaactcctcatctatagtaataatcagcggccctcaggggtccctgaccgattctctggctccaagtctggcacctcagcctccctggccatcagtgggctccagtctgaggatgaggctgattattactgtgcagcatgggatgacagcctgaatggtccggtgttcggcggagggaccaagctgaccgtcctag

SEQ ID NO: 2406 - DNA, 331 bp, Homo sapiens
  source 1..331: mol_type = other DNA
cagtctgccctgactcagcctgcctccgtgtctgggtctcctggacagtcgatcaccatctcctgcactggaaccagcagtgacgttggtggttataactatgtctcctggtaccaacagcacccaggcaaagcccccaaactcatgatttatgatgtcagtaagcggccctcaggggtttctaatcgcttctctggctccaagtctggcaacacggcctccctgaccatctctgggctccaggctgaggacgaggctgattattactgcagctcatatacaagcagcagcacttatgtcttcggaactgggaccaaggtcaccgtcctag

SEQ ID NO: 2407 - DNA, 322 bp, Homo sapiens
  source 1..322: mol_type = other DNA
gacatccagatgacccagtctccttccaccctgtctgcatctgtaggagacagagtcaccatcacttgccgggccagtcagagtattagtagctggttggcctggtatcagcagaaaccagggaaagcccctaagctcctgatctataaggcgtctattttagaaagtggggtcccatcagggttcagcggcagtggatctgggacagaattcactctcaccatcagcagcctgcagcctgatgattttgcgacttattactgccaacagtataatagttatccgctcactttcggcggagggaccaaggtggagatcaaac

SEQ ID NO: 2408 - DNA, 334 bp, Homo sapiens
  source 1..334: mol_type = other DNA
cagtctgccctgactcagcctgcctccgtgtctgggtctcctggacagtcgatcaccatctcctgcactggaaccagcagtgatgttgggagttataaccttgtctcctggtaccaacagcacccaggcaaagcccccaaactcatgatttatgagggcagtaagcggccctcaggggtttctaatcgcttctctggctccaagtctggcaacacggcctccctgacaatctctgggctccaggctgaggacgaggctgattattactgctgctcatatgcaggtagtagcaccgatgtggtattcggcggagggaccaagctgaccgtcctag

SEQ ID NO: 2409 - DNA, 325 bp, Homo sapiens
  source 1..325: mol_type = other DNA
gaaattgtgttgacgcagactcccggcaccctgtctttgtctccaggggaaagagccaccctctcctgcagggccagtcagagtgtcagcagcaattccttagcctggtaccagcagaaacctggccaggctccccgactcctcatttatggtgcatccaccagggcccctggcatcccagacaggttcagtggcagtgggtctgggacagacttcactctcaccatcagcagactggagtctgaagattttgcagtttattcctgtcagcagtatggtagttcaaccttcactttcggcggagggaccaaggtggagatcaaac

SEQ ID NO: 2410 - DNA, 322 bp, Homo sapiens; identical to SEQ ID NO: 2379
  source 1..322: mol_type = other DNA

SEQ ID NO: 2411 - DNA, 317 bp, Homo sapiens
  source 1..317: mol_type = other DNA
aattatgctgacacagtctccggacaccctgtctttgtctccaggggagagagccaccctctcctgcagggccagtcagaatattaggaattatttaagttggtaccaacaaaaacctggccaggctcccagactcctcatttatgatacttccaacagggcaactggcatcccagccagattcagcggcggtgggtgggggacagacttcaccctcaccatcagccgattagagcccgaagattttgcagtctattactgtcagcagcgttatgactggcggatcatcttcggccaagggacacgactggaaatta

SEQ ID NO: 2412 - DNA, 325 bp, Homo sapiens
  source 1..325: mol_type = other DNA
gaaattgtgttgacgcagtctcccggcaccctgtctttgtctccaggggaaagagccaccctctcgtgcagggccagtcagagttttagcagcacctccttagcctggtaccagcagaaacctggccaggctcccaggctcgtcctttatggcgcatccaccagggccaccggcatcccagacaggttcagtggcagtgggtctgggacagacttcactctcagcatcagcagactggagcctgaagattttgcagtgtattactgtcagcagtatgatagttcaaccttcactttcggcggcgggaccaaggtggagatgaaac

SEQ ID NO: 2413 - DNA, 328 bp, Homo sapiens
  source 1..328: mol_type = other DNA
cagtctgccctgactcagcctgcctccgtgtctgggtctcctggacagtcgatcaccatctcctgcactggaaccaacagtgacgttggtggttataactatgtctcttggtaccaacaacacccaggcaaagcccccaaactcatcatttatgatgtcagttatcggccctcaggggtttctagtcgcttctctggctccaagtctggcaacacggcctccctgaccatctctgggctccagtctgaggacgaggctgactattactgcaactcatatacaagtagaacctcggtcttcggcggagggaccaagctgaccgtcctag

SEQ ID NO: 2414 - DNA, 325 bp, Homo sapiens
  source 1..325: mol_type = other DNA
gaatttgtgttgacgcagtctccaggcaccctgtctttgtctccaggggaaagagccaccctctcctgcagggccagtcagagtgttagcggcaactacttagcctggtaccagcagaaacctggccaggctcccaggctcctcatctatggtgcatccagcagggccactggcatcccagacaggttcagtggcagtgggtctgggacagacttcactctcaccatcagcagattggagtctgaagattttgcagtgtattactgtcagcagtatggtagctcaacggggacgttcggccaagggaccaaggtggaaatcaaac

SEQ ID NO: 2415 - DNA, 325 bp, Homo sapiens
  source 1..325: mol_type = other DNA
gaatttgtgttgacgcagtctccaggcaccctgtctttgtctccaggggagagcgccaccctctcctgcagggccagtcagagtgttagcgacaactacttagcctggtaccaacaaaaacctggccaggctcccaggctcctcatctatggtgcatccagcagggccactggcatcccagacaggttcagtggcagtgggtctgggacagacttcactctcaccatcagcagattggagtctgaagattttgcagtgtattactgtcagcagtatggtggctcaacggggacgttcggccaagggaccaaggtggaaatcaaac

SEQ ID NO: 2416 - DNA, 323 bp, Homo sapiens
  source 1..323: mol_type = other DNA
gaaattgtattgacacagtctccagccaccctgtctttgtctccaggggaaagagccaccctctcctgcagggccagtcagagtgtaagtacctatttagcctggtaccaacagaaacctggccaggctcccaggctcctcatctatgacgcatcccacagggccactggcatcccaagcaggttcagtggcagtgggtctgggacagacttcactctcaccatcagcagcctagagcctgaagatttcgcagtttattattgtcatcagcgtggcaactggcctggggtcactttcggcggagggaccaaggtggagatcaa

SEQ ID NO: 2417 - DNA, 322 bp, Homo sapiens
  source 1..322: mol_type = other DNA
gacatccagatgacccagtctccttccaccctgtctgcttctgtaggagacagagtcaccgtcacttgccgggccagtcagagtattagtagttggttggcctggtatcagcagaaatcagggaaagccccgaaactcctgatctataaggcggccaatttagaaagtggggtctcatcgaggttcagcggcagtggatctgggacagaattcactctcaccatcagcagcctgcagcctgatgattttgcaacttattactgccaacagtatgatagttttcctcccactttcggcggagggaccaaggtggagatcaaac

SEQ ID NO: 2418 - DNA, 325 bp, Homo sapiens
  source 1..325: mol_type = other DNA
gacatccagatgacccagtctccatcctccctgtctgcatctgtaggagacagagtcaccatcacttgccgggcaagtcagagcattagcagctatttaaattggtatcagcagaaaccagggaaagcccctaagctcctgatctatgctgcatccagtttgcaaagtggggtcccatcaaggttcagtggcagtggatctgggacagatttcactctcaccatcagcagtctgcaacctgaagattttgcaacttactactgtcaacagagttacagtacccctccgtggacgttcggccaagggaccaaggtggaaatcaaac

SEQ ID NO: 2419 - DNA, 319 bp, Homo sapiens
  source 1..319: mol_type = other DNA
tcctatgagctgactcagccactctcagtgtcagtggccctgggacagacggccaggattacctgtgggggaaacaacattggaagtaaaaatgtgcactggtaccagcagaagccaggccaggcccctgtgctggtcatctatagggatagcaaccggccctctgggatccctgagcgattctctggctccaactcggggaacacggccaccctgaccatcagcagagcccaagccggggatgaggctgactattactgtcaggtgtgggacagcagcactgtggtattcggcggagggaccaagctgaccgtcctag

SEQ ID NO: 2420 - DNA, 325 bp, Homo sapiens
  source 1..325: mol_type = other DNA
gaaattgtgttgacgcagtctcccggcaccctgtctttgtctccaggggaaagagccaccctctcctgcagggccagtcagagtgttagcagtaactacttagcctggtaccagcagaaatctggccaggctcccaggctcctcatctatggtgcatccaccagggccactggcatcccagacaggttcagtggcagtgggtctgggacagacttcactctcaccatcaccagactggaggctgaagattttgcactgtattactgtcagcaatatggtacttcaaccttcactttcggcggagggaccaaggtggagatcaaac

SEQ ID NO: 2421 - DNA, 331 bp, Homo sapiens
  source 1..331: mol_type = other DNA
tcttctgagctgactcaggaccctgctgtgtctgtggccttgggacagacagtcaggatcacatgccaaggagacagcctcagaagctattatgcaagctggtaccagcagaagccaggacaggcccctgtacttgtcatctatggtaaaaacaaccggccctcagggatcccagaccgattctctggctccagctcaggaaacacagcttccttgaccatcactggggctcaggcggaagatgaggctgactattactgtaactcccgggacagcagtggtaaccatctaggaaatgtcttcggaactgggaccaaggtcaccgtcctag

SEQ ID NO: 2422 - DNA, 332 bp, Homo sapiens
  source 1..332: mol_type = other DNA
cagtctgccctgactcagcctcgctcagtgtccgggtctcctggacagtcagtcaccatctcctgcactggaaccagcagtgatgttggtggttataactatgtctcctggtaccaacagcacccaggcaaagcccccaaactcatgatttatgatgtcaataagcggccctcaggggtccctgatcgcttctctggctccaagtctggcaacacggcctccctgaccatctctgggctccaggctgaggatgagactgattattactgctcctcatatgcaggcagccacactctcgtagtattcggcggagggaccaagctgaccgtcct

SEQ ID NO: 2423 - DNA, 322 bp, Homo sapiens
  source 1..322: mol_type = other DNA
gacatccagatgacccagtctccatcttccgtgtctgcatctgtaggagacagagtcaccatcacttgtcgggcgagtcagggtattagcagctggttagcctggtatcagcagaaaccagggaaagcccctaagctcctgatctatgctgcatccagtttgcaaagtggggtcccatcaaggttcagcggcagtggatctgggacagatttcactctcaccatcagcagcctgcagcctgaagattttgcaacttactattgtcaacaggctaacagtttccctccggctttcggcggagggaccaaggtggagatcaaac

SEQ ID NO: 2424 - DNA, 338 bp, Homo sapiens
  source 1..338: mol_type = other DNA
attttgtgatgactcagtctccactctccctgcccgtcacccttggacagccggcctccatctcctgcaggtctagtcgaagcctcgtacacagtgatgggaacacctacttgaattggtttcagcagaagccaggccaatctccaaggcgcctaatttatcaggtttctaaccgagactctggggtcccagacagattcagcggcagtgggtcaggcactgatttcacactgaaaatcagcagggtggaggctgaggatgttgcggtttattactgcatgcaagggacacactggaatatgtacagttttggccaggggaccaagctggagatcaaa

SEQ ID NO: 2425 - DNA, 325 bp, Homo sapiens
  source 1..325: mol_type = other DNA
gaaatagtgatgacgcagtctccagccaccctgtctgtgtctccaggggaaagagccaccctctcctgcagggccagtcagagtgttaacagcaacttagcctggtaccagcagaaacctggccaggctcccaggctcctcatctatgctgcatccaccagggccactggtatcccagccaggttcactggcagtgggtctgggacagagttcactctcaccatcaacagcatgcagtctgaagattttgcagtttattactgtcagcagtataattactggcctccgtacacttttggccaggggaccaagctggagatcaaac

SEQ ID NO: 2426 - DNA, 340 bp, Homo sapiens
  source 1..340: mol_type = other DNA
gacttcgtggtgacccagtctccagactccctggctgtgtctctgggcgagagggccaccatcaactgcaagaccagccagagtgtttattacgactccaacaagatgaactacttagcttggtaccagcacaaactggggcagcctcctaaggtcctcatttactgggcatctacccgggcatccggggtccctgaccgattcagtggcagcgggtctgggacagatttcactctcaccatcagcagcctgcaggctgaagatgtggcactttattactgtcaacagtattatgatcttccgctcactttcggcggggggaccaaggtagagatcaaac

SEQ ID NO: 2427 - DNA, 325 bp, Homo sapiens
  source 1..325: mol_type = other DNA
gaaattgtgttgacacagtctccagccaccctgtctttgtctccaggggaaagagccaccctctcctgcagggccagtcagagtgttagcagctacttagcctggtaccaacagaaacctggccaggctcccaggctcctcatctatgatgcatccaacagggccactggcatcccagccaggttcagtggcagtgggtctgggacagacttcactctcaccatcagcagcctagagcctgaagattttgcagtttattactgtcagcagcgtatcaaacggcgggtgctcactttcggcggagggaccaaggtggagatcaaac

SEQ ID NO: 2428 - DNA, 319 bp, Homo sapiens
  source 1..319: mol_type = other DNA
gacatccagatgacccagtctccttccaccctgtctgcatctgtaggagacagagtcaccatcacttgccgggccagtcagagtattagtagctggttggcctggtatcagcagaaaccagggaaagcccctaagctcctgatctataaggcgtctagtttagaaagtggggtcccatcaaggttcagcggcagtggatctgggacagaattcactctcaccatcagcagcctgcagcctgatgattttgcaacttattactgccaacagtataatagttattacacttttggccaggggaccaagctggagatcaaac

SEQ ID NO: 2429 - DNA, 325 bp, Homo sapiens
  source 1..325: mol_type = other DNA
gaaatagtgatgacgcagtctccagccaccctgtctgtgtctccaggggaaagagccaccctctcctgcagggccagtcagagtgttagcagcaacttagcctggtaccagcagaaacctggccaggctcccaggctcctcatctatggtgcatccaccagggccactggtatcccagccaggttcagtggcagtgggtctgggacagagttcactctcaccatcagcagcctgcagtctgaagattttgcagtttattactgtcagcagtataataactggcctccggcgacgttcggccaagggaccaaggtggaaatcaaac

SEQ ID NO: 2430 - DNA, 325 bp, Homo sapiens
  source 1..325: mol_type = other DNA
gaaattgtgttgacgcagtctcccggcaccctgtctttgtctccaggagaaagagccaccctctcgtgcagggccagtcagagttttagcagcacctccttagcctggtaccagcagaaacctggccaggctcccaggctcctcatttatggcgcttccaccagggccaccggcctcccagacaggttcggtgccagtgggtctgggacagacttcactctcaccatcagcagactggagcctgaagattttgcagtgtattactgtcagcagtatgatagttcaaccttcactttcggcggagggaccaaggtggagatgaaac

SEQ ID NO: 2431 - DNA, 343 bp, Homo sapiens
  source 1..343: mol_type = other DNA
gacatcgtgatgacccagtctccagactccctggctgtgtctctgggcgagagggccaccatcaactgcaagtccagccagagtgttttatacagctccaacaataagaactacttagcttggtaccagcagaaaccaggacagcctcctaagctgctcatttactgggcatctacccgggaatccggggtccctgaccgattcagtggcagcgggtctgggacagatttcactctcaccatcagcagcctgcaggctgaagatgtggcagtttattactgtcagcaatattatagtactcctccgtggacgttcggccaagggaccaaggtggaaatcaaac

SEQ ID NO: 2432 - DNA, 325 bp, Homo sapiens
  source 1..325: mol_type = other DNA
gaaattgtgttgacacagtctccagccaccctgtctttgtctccaggggaaagagccaccctctcctgcagggccagtcagagtgttagtagttacttagcctggtaccaacagaaacctggccaggctcccaggctcctcatctatgatgcatccaaaagggccactggcatcccagccaggttcagtggcagtgggtctgggacagacttcactctcaccatcagcggcctagagtctgaagattttgcagtttattactgtcagcagcgtagcaactggcctccgatcaccttcggccaagggacacgactggagattaaac

SEQ ID NO: 2433 - DNA, 337 bp, Homo sapiens
  source 1..337: mol_type = other DNA
gatattgtgatgactcagtctccactctccctgcccgtcacccctggagagccggcctccatctcctgcaggtctagtcagagcctcctgcatagtaatggatacaactatttggattggtacctgcagaagccagggcagtctccacagctcctgatctatttgggttctaatcgggcctccggggtccctgacaggttcagtggcagtggatcaggcacagattttacactgaaaatcagcagagtggaggctgaggatgttggggtttattactgcatgcaagctctacaaactccattcactttcggccctgggaccaaagtggatatcaaac

SEQ ID NO: 2434 - DNA, 328 bp, Homo sapiens
  source 1..328: mol_type = other DNA
gaaattgtgttgacgcagtctccaggcaccctgtctttgtctccaggggaaagagccaccctctcctgcagggccagtcagagtgttagcagcagctacttagcctggtaccagcagaaacctggccaggctcccaggctcctcatctatggtgcatccaacagggccactggcatcccagacaggttcagtggcagtgggtctgggactgacttcgctctcaccatcagcagactggagcctgaagattttgcagtgtattactgtcagcagtttggaagctcacggatttacacttttggccaggggaccaagctggagatcaaac

SEQ ID NO: 2435 - DNA, 325 bp, Homo sapiens
  source 1..325: mol_type = other DNA
gaaattgtgttgacacagtctccagccaccctgtctttgtctccaggggaaagagccaccctctcctgcagggccagtcagagtgttagcagctacttagcctggtaccaacagaaacctggccaggctcccaggctcctcatctatgatgcatccaacagggccactggcatcccagccaggttcagtggcagtgggtctgggacagacttcactctcaccatcagcagcctagagcctgaagattttgcagtttattactgtcagcagcgtagcaactggccctcgatcaccttcggccaagggacacgactggagattaaac

SEQ ID NO: 2436 - DNA, 310 bp, Homo sapiens
  source 1..310: mol_type = other DNA
gacatccagatgacccagtctccatcttccctatctgcatctataggagacagagtcaccatcaattgccgggcaagtcagagcattagcaggtttttaaattggtatcagcaaaaaccagggaaagcccctaatctcctgatttatgctatatccaatttgcaaagtggggtcccatcaaggttcagtggcagtggatctgggacagatttcactctcaccatcagcagtcttcaacctgaagatgttgcgacttactactgtcaagtccaggagacgttcggccaagggaccaaggtggaaatcaaac

SEQ ID NO: 2437 - DNA, 325 bp, Homo sapiens
  source 1..325: mol_type = other DNA
tcctatgtgttgactcagtcaccctcagtgtcagtggccccaggagagacggccaggattacgtgtgggggagaaaaaattggaaggaagagtgtgaattggtaccaacagaagccaggccaggcccctgttttagtcatttatgatgatcgcaaccggccctcagggatccctgagcgaatctctggctccgtctctgagaacacggccgccctgtccctcagcagggtcgaagccggggatgaggccgactattattgtcaggtgtgggatacaagtacaaatcatgttatattcggcggagggacaaagctgaccgtcctag

SEQ ID NO: 2438 - DNA, 321 bp, Homo sapiens
  source 1..321: mol_type = other DNA
gacatccagatgacccagtctccatcctccctgcctgcatctgtgggagacagagtcaccattacttgccgggcaagtcagggcatcaatatttatttgaattggtatcagcaaaaaccaggagaggcccctgacctcctgatctatggtgcatccactttgcaaagtggggtcccgtcaaggttcagtggcagtggatctgggacagagttcactctcaccatcagcagtctgcaacctgaagattttgcaacttatttctgtcagcagactgaggaagccccgtacacttttggccaggggaccaagttggagatcaaa

SEQ ID NO: 2439 - DNA, 337 bp, Homo sapiens
  source 1..337: mol_type = other DNA
cagtctgtgctgacgcagccgccctcagtgtctggggccccagggcagagggtcaccatctcctgcactgggagcagctccaacatcggggcaggttatgatgtacactggtaccagcagcttccaggaacagcccccaaactcctcatctatggtaacagcaatcggccctcaggggtccctgaccgattctctggctccaagtctggcacctcagcctccctggccatcactgggctccaggctgaggatgaggctgattattactgccagtcctatgacagcagcctgagtggcgcgagggtgttcggcggagggaccaagctgaccgtcctag

SEQ ID NO: 2440 - DNA, 313 bp, Homo sapiens
  source 1..313: mol_type = other DNA
gaaattgtgctgacgcagtctccaggcaccctgtctttgtctccaggggaaagagccaccctctcctgcagggccagtccgactgttagcatccactacttacactggtaccagcagaaacctggccaggctcccaggctcctcatctatagtacatccagcagggccactggcatcccagacaggttcagtggcagtgggtctgggacagacttcactctcaccatcagcagactggagcctgaagactttgcagtgtattactgtcagcagtttgctgcgttcggccaagggaccaaggtggaattcaaac

SEQ ID NO: 2441 - DNA, 328 bp, Homo sapiens
  source 1..328: mol_type = other DNA
gaaattgttttgacgcagtctccaggcaccctgtctttgtctccaggggaaagagccaccctctcctgcagggccagtcagagtgtgagcagcaactacttagcctggtaccagcagaaacctggccaggctcccaggctcctcatctatgatgcatccagcagggccgctggcatcccagacaggttcagtggcagtgggtctgggacagacttcactctcaccatcagcagactggagcctgaagattttgcactgtattactgtcaacattatggtagctcacctcggtggacgttcggccaggggaccaaggtggacatcaaac

SEQ ID NO: 2442 - DNA, 331 bp, Homo sapiens
  source 1..331: mol_type = other DNA
cagtctgtgttgactcaaccaccctcagcgtctgggacccccgggcagaggatcaccatctcttgttctgggagtaactccaacatcggaagtaatactgtgaactggtaccaacaattcccaggaacggcccccaaactcctcatctatggtgatagtcagcggccctcaggggtccctgaccgattctctggcttcaagtctggcacctcaggttccctggtcatcaatggactccagtctgacgatgaggctcattatcactgttcaacgtgggatgacggcctgaatctttgggtgttcggcggagggaccaagctgaccgtcctag

SEQ ID NO: 2443 - DNA, 322 bp, Homo sapiens
  source 1..322: mol_type = other DNA
gacatccagatgacccagtctccttccaccctgtctgcatctgtaggagacagagtcaccatcacttgccgggccagtcagagtattagtagctggttggcctggtatcagcagaaaccagggaaagcccctaagctcctgatctataaggcgtctagtttagaaagtggggtcccatcaaggttcagcggcagtggatctgggacagaattcactctcaccatcagcagcctgcagcctgatgattttgcaacttattactgccaacagtataatagtcccacgtggacgttcggccaagggaccaaggtggaaatcaaac

SEQ ID NO: 2444 - DNA, 319 bp, Homo sapiens
  source 1..319: mol_type = other DNA
gaaattgtgttgacacagtctccagccaccctgtctttgtctccaggggaaagagccaccctctcctgcagggccagtcagagtgttagcagctacttagcctggtaccaacagaaacctggccaggctcccaggctcctcatctatgatgcatccaacagggccactggcatcccagccaggttcagtggcagtgggtctgggacagacttcactctcaccatcagcagcctagagcctgaagattttgcagtttattactgtcagcagcgtagcaactggatcaccttcggccaagggacacgactggagattaaac

SEQ ID NO: 2445 - DNA, 325 bp, Homo sapiens
  source 1..325: mol_type = other DNA
tcttctgagctgactcaggaccctgctgtgtctgtggccttgggacagacagtcaggatcacatgccaaggagacagcctcagaagctattatgcaagctggtaccagcagaagccaggacaggcccctgtacttgtcatctatggtaaaaacaaccggccctcagggatcccagaccgattctctggctccagctcaggaaacacagcttccttgaccatcactggggctcaggcggaagatgaggctgactattactgtaactcccgggacagcagtggtaaccatgtggtattcggcggagggaccaagctgaccgtcctag

SEQ ID NO: 2446 - DNA, 313 bp, Homo sapiens
  source 1..313: mol_type = other DNA
gacatccagatgacccagtctccttccaccctgtctgcatctgtaggagacagagtcaccatcacttgccgggccagtcagagtattagtagctggttggcctggtatcagcagaaaccagggaaagcccctaagctcctgatctataaggcgtctagtttagaaagtggggtcccatcaaggttcagcggcagtggatctgggacagaattcactctcaccatcagcagcctgcagcctgatgattttgcaacttattactgccaaacccctagggggccgttcggccaagggaccaaggtggaaatcaaac

SEQ ID NO: 2447 - DNA, 325 bp, Homo sapiens
  source 1..325: mol_type = other DNA
gaaatagtgatgacgcagtctccagccaccctgtctgtgtctccaggggaaagagtcaccctctcctgcagggccagtcagagtgttagcgtcaatttagcctggtaccagcagaaacctggccaggctcccaggctcctcatctatggtgcatccaccagggccactggtatcccagccaggttcagtggcagtgggtctggggcagagttcactctcaccatcagcagcctgcagtctgaagattttgcaatttattactgtcagcagtataataactggcctccgatcaccttcggccaagggacacgactggagattaaac

SEQ ID NO: 2448 - DNA, 331 bp, Homo sapiens
  source 1..331: mol_type = other DNA
cagtctatgctgactcagccaccctcagcgtctgggacccccgggcagagggtcaccatctcttgttctggaagcagctccaacatcgaaagtaacactgtaaactggtaccagcagctcccaggaacggcccccaaacttctcctctatagtattaataagcggccctcaggggtccctgaccgattctctggctccaagtcgggcacctcagcctccctggccatcagtgggctccactctgaggatgaggctgattattactgtgcagcatgggatgacaacctgaagggtccagtgttcggcggagggaccaagctgaccgtcctag

SEQ ID NO: 2449 - DNA, 325 bp, Homo sapiens
  source 1..325: mol_type = other DNA
gaaattgtgttgacgcagtctccaggcaccctgtctttgtctccaggggaaacagcctccctctcctgcagggccagtcagagtgttagcagcagctacttagcctggtaccagcagaaacctggccaggctcccaggctcctcatttatgatgcatccagcagggccgctggcatcccagacaggttcagtggcagtgggtctgggacagacttcactcttattatcagcagactggagcctgaagattttgcagtgtatttctgtcagcagtatggtagctctccgtggacgttcggccaagggaccaaggtggaaatcaaac

SEQ ID NO: 2450 - DNA, 325 bp, Homo sapiens
  source 1..325: mol_type = other DNA
tcttctgagctgactcaggaccctgctgtgtctgtggccttgggacagacagtcaggatcacatgccaaggagacagcctcagaagctattatgcaagctggtaccagcagaagccaggacaggcccctgtacttgtcatctatggtaaaaacaaccggccctcagggatcccagaccgattctctggctccagctcaggaaacacagcttccttgaccatcactggggctcaggcggaagatgaggctgactattactgtaactcccgggacagcagtggtaaccatctggtattcggcggagggaccaagctgaccgtcctag

SEQ ID NO: 2451 - DNA, 322 bp, Homo sapiens
  source 1..322: mol_type = other DNA
gacatccagatgacccagtctccatcctccctgtctgcatctgtaggagacagagtcaccatcgcttgccgggcaagtcagagcattaccaactatttaaattggtatcagcagaaagcagggcaagtccctaagctcctgatctatggtgcatccagtttgcaaagtggggttccatcaagattcagtggcagtggatctgggacagatttcactctcaccatcagcaatctgcaacctgaagattttgcaacttactactgtcaacagagttacaataatccggtcactttcggcggagggaccaaggtggagatcaaac

SEQ ID NO: 2452 - DNA, 322 bp, Homo sapiens; identical to SEQ ID NO: 2334
  source 1..322: mol_type = other DNA

SEQ ID NO: 2453 - DNA, 322 bp, Homo sapiens
  source 1..322: mol_type = other DNA
gccatccagatgacccagtctccatcctccctgtctgcatctgtaggagacagagtcaccatcacttgccgggcaagtcagggcattagaaatgatttaggctggtatcagcagaaaccagggaaagcccctaagctcctgatctatgctgcatccagtttacaaagtggggtcccatcaaggttcagcggcagtggatctggcacagatttcactctcaccatcagcagcctgcagcctgaagattttgcaacttattactgtctacaagattacaattacccctggacgttcggccaagggaccaaggtggaaatcaaac

SEQ ID NO: 2454 - DNA, 331 bp, Homo sapiens
  source 1..331: mol_type = other DNA
cagtctgccctgactcagcctgcctccgtgtctgggtctcctggacagtcgatcaccatctcctgcactggaaccagcagtgacgttggtggttataactatgtctcctggtaccaacaacacccaggcaaagcccccaaactcatgatttatgatgtcagtaatcggccctcaggggtttctaatcgcttctctggctccaagtctggcaacacggcctccctgaccatctctgggctccaggctgaggacgaggctgattattactgcagctcatatacaagcagcagcactctggtattcggcggagggaccaagctgaccgtcctag

SEQ ID NO: 2455 - DNA, 324 bp, Homo sapiens
  source 1..324: mol_type = other DNA
gaaattgtattgacgcagtctccaggcaccctgtcgttgtctccaggggaacgagccaccctctcctgccgggccagtcagaacattattaacaggtctgtggcctggtaccagcagagagctggccaggctcccaggctcctcatctatgatgcctccaccagggccactggcatcccagacaggttcagtggcagtgggtctgggacagacttcattctcaccatcagcagtctggagcctgaagattttgcagtgtattactgtcagcagtatggtgactcaccccggacgttcggccaagggaccaaggtggaaatcaaa

SEQ ID NO: 2456 - DNA, 329 bp, Homo sapiens
  source 1..329: mol_type = other DNA
ttgtgatgacgcagtctccactctccctggccgtcaccccgggagagtcggcctccatctcctgcaggtctaatcagagtctcctacacagtaatggaaagaattatttggactggtatgtgaagaagccagggcaccctccacaactcctgatccatttgggtttcgatcgggcctccggggtccctgacaggtttagtggcagtggatcagccacagattttacactgaaaatcagcagagtggaggctgacgatgttggactgtatttctgcatgcaaggtctgcagaatctcactttcggcggagggaccagggtggagatcaaa

SEQ ID NO: 2457 - DNA, 334 bp, Homo sapiens
  source 1..334: mol_type = other DNA
cagtctgccctgactcagcctgcctccgtgtctgggtctcctggacagtcgatcaccatctcctgcactggaaccagcagtgacgttggtgcttataactatgtctcctggtaccaacaacacccaggcaaagcccccaaactcatgatttatgatatcagtagtcggccctcaggggtttctaatcggttctctggctccaagtctggcaacacggcctccctgaccatctctgggctccaggctgaggacgaggctgattattactgcagctcatatacaagcagcagcactctcgtggttttcggcggagggaccaagctgaccgtcctag

SEQ ID NO: 2458 - DNA, 328 bp, Homo sapiens
  source 1..328: mol_type = other DNA
gaaattgtgttgacgcagtctccaggcaccctgtctttgtctccaggggaaagagccaccctctcctgcagggccagtcagagtgttagcagcagctacttagcctggtaccagcagaaacctggccaggctcccaggctcctcatctatggtgcatccagcagggccactggcatcccagacaggttcagtggcagtgggtctgggacagacttcactctcaccatcagcagactggagcctgaagattttgcagtgtattactgtcagcagtatggtagctcacctccgtacacttttggccaggggaccaagctggagatcaaac

SEQ ID NO: 2459 - DNA, 346 bp, Homo sapiens
  source 1..346: mol_type = other DNA
gacatcgtgatgacccagtctccagactccctggctgtgtctctgggcgagagggccaccatcaactgcaagtccagccagagtgttttatacagctccaacaataagaactacttagcttggtaccagcagaaaccaggacagcctcctaagctgctcatttactgggcatctacccgggaatccggggtccctgaccgattcagtggcagcgggtctgggacagatttcactctcaccatcagcagcctgcaggctgaagatgtggcagtttattactgtcagcaatattatagtactcctcagaggtacacttttggccaggggaccaagctggagatcaaac

SEQ ID NO: 2460 - DNA, 325 bp, Homo sapiens
  source 1..325: mol_type = other DNA
gaaattgtgttgacgcagtctccaggcaccctgtctttgtctccaggggaaagagccaccctctcctgcagggccagtcagagtgttagcagtagcgacttagcctggtatcagcagacacctggccaggctcccaggctcctcatctatgctggatccagcagggccactggcaccccagacaggttcagcggcagtgggtctgggacagagttcactctcaccatcaacagactggagcctgaagattttgccatctattactgtcagcagtatagtacttcaatcctcactttcggcggagggaccagggtggagatcaaac

SEQ ID NO: 2461 - DNA, 343 bp, Homo sapiens
  source 1..343: mol_type = other DNA
gacatcgtgatgacccagtctccagactccctggctgtgtctctgggcgagagggccaccatcaactgcaagtccagccagagtgttttatacagctccaacaataagaactacttagcttggtaccagcagaaaccaggacagcctcctaagctgctcatttactgggcatctacccgggaatccggggtccctgaccgattcagtggcagcgggtctgggacagatttcactctcaccatcagcagcctgcaggctgaagatgtggcagtttattactgtcagcaatattatagtactctctcggccactttcggcggagggaccaaggtggagatcaaac

SEQ ID NO: 2462 - DNA, 322 bp, Homo sapiens
  source 1..322: mol_type = other DNA
gacatccagatgacccagtctccatcctccctgtctgcatctgtaggagacagagtcactatctcttgccaggcgagtcaggacattagcaactatttaaattggtatcagcagaaaccagggaaagcccctaagttcctgatctacgatgcatccaatttggaaacaggggtcccatcaaggtttagtggaagtggatctgggacagattttactttcaccatcagcagcctgcagcctgaagatattgcaacatattactgtcaacagtatgataatctcccgctcactttcggcggagggaccaaggtggagatcaaac

SEQ ID NO: 2463 - DNA, 322 bp, Homo sapiens
  source 1..322: mol_type = other DNA
gacatccagatgacccagtctccatcttccgtgtctgcatctgtaggagacagagtcaccatcacttgtcgggcgagtcagggtattagcagctggttagcctggtatcagcagaaaccagggaaagcccctaagctcctgatctatgctgcatccagtttgcaaagtggggtcccatcaaggttcagcggcagtggatctgggacagatttcactctcaccatcagcagcctgcagcctgaagattttgcaacttactattgtcaacaggctaacagtttccctttcactttcggcggagggaccaaggtggagatcaaac

SEQ ID NO: 2464 - DNA, 349 bp, Homo sapiens
  source 1..349: mol_type = other DNA
cagcctgtgctgactcagccaccttctgcatcagcctccctgggagcctcggtcacactcacctgcaccctgagcagcggctacagtaattataaagtggactggtaccagcagagaccagggaagggcccccggtttgtgatgcgagtgggcactggtgggattgtgggatccaagggggatggcatccctgatcgcttctcagtcttgggctcaggcctgaatcggtacctgaccatcaagaacatccaggaagaggatgagagtgactaccactgtggggcagaccatggcagtgggagcaacttccttgtggtattcggcggagggaccaagctgaccgtcctag

SEQ ID NO: 2465 - DNA, 334 bp, Homo sapiens
  source 1..334: mol_type = other DNA
cagtctgccctgactcagcctgcctccgtgtctgggtctcctggacagtcgatcaccatctcctgcactggaaccagcagtgacgttggtggttataactatgtctcctggtaccaacaacacccaggcaaagcccccaaactcatgatttatgatgtcagtaatcggccctcaggggtttctaatcgcttctctggctccaagtctggcaacacggcctccctgaccatctctgggctccaggctgaggacgaggctgattattactgcagctcatatacaagcagcagcacttattgggtgttcggcggagggaccaagctgaccgtcctag

SEQ ID NO: 2466 - DNA, 322 bp, Homo sapiens; identical to SEQ ID NO: 2334
  source 1..322: mol_type = other DNA

SEQ ID NO: 2467 - DNA, 322 bp, Homo sapiens
  source 1..322: mol_type = other DNA
gacatccagatgacccagtctccatcctccctgtctgcatctgtaggagacagagtcaccatcacttgccaggcgagtcaggacattagcaactatttaaattggtatcagcagaaaccagggaaagcccctaagctcctgatctacgatgcatccaatttggaaacaggggtcccatcaaggttcagtggaagtggatctgggacagattttactttcaccatcagcagcctgcagcctgaagatattgcaacatattactgtcaacagtatgataatctccctctcactttcggcggagggaccaaggtggagatcaaac

SEQ ID NO: 2468 - DNA, 340 bp, Homo sapiens
  source 1..340: mol_type = other DNA
gatgttgtgatgactcagtctccactctccctgtccgtcacccttggacagccggcctccatctcctgcaggtctagtcaaagcctcgtccacaataatggaaacacttacttgaattggtttcagcagaggccaggccaatctccaaggcgcctaatttatcaggtttctaaccgggactctggggtcccagacagattcagcggcagtgggtcaggcactgatttcacactgaaaatcagcagggtggaggctgaggatgttggggtttattactgcatgcaaggtacacactggcatacgtacacttttggccaggggaccaagctggagatcaaac

SEQ ID NO: 2469 - DNA, 325 bp, Homo sapiens
  source 1..325: mol_type = other DNA
gaaattgtgttgacgcagtctccaggcaccctgtctttgtctccaggggaaagaggcaccctctcctgcagggccagtcagagtgtcagcagcaactacttagcctggtaccagcaaaaacctggccaggctcccaggctcctcatctatggggcatccagcagggccactggcatcccagacaggttcagtggcagtgggtctgggacagacttcactctcagcatcagcagactggagcctgaagatcttgcagtatattactgtcagcagtatggtagctcatcgacgacgttcggccaagggaccaaggtggaaatcaaac

SEQ ID NO: 2470 - DNA, 331 bp, Homo sapiens
  source 1..331: mol_type = other DNA
cagtctgccctgactcagcctgcctccgtgtctgggtctcctggacagtcgatcaccatctcctgcactggaaccagcagtgatgttggtggttataactatgtctcctggtaccaacagcacccaggcaaagcccccaaactcatgatttatgatgtcagtaagcggccctcaggggtttctaatcgcttctctggctccaagtctggcaacacggcctccctgacaatctctgggctccaggctgaggacgaggctgattattactgctgctcatatgcaggtagtagcacttatgtcttcggaactgggaccaaggtcaccgtcctag

SEQ ID NO: 2471 - DNA, 331 bp, Homo sapiens
  source 1..331: mol_type = other DNA
cagtctgtgctgactcagccaccctcagcgtctgggacccccgggcagagggtcaccatctcttgttctggaagcagctccaacatcggaagtaattatgtatactggtaccagcacctcccaggaacggcccccaaactcctcatttataggaatagtcagcggccctcaggggtccctgaccgattctctggctccaagtctggcacctcagcctccctggccatcagtgggctccggtccgaggatgagactgattatttctgtgcagcatgggatgacactttgagtggtgtggtattcggcggagggaccaagctgaccgtcctag

SEQ ID NO: 2472 - DNA, 337 bp, Homo sapiens
  source 1..337: mol_type = other DNA
cagtctgccctgactcagcctgcctccgtgtctgggtctcctggacagtcgatcaccatctcctgcactggaaccagcagtgacgttggtggttataactatgtctcctggtaccaacaacacccaggcaaagcccccaaactcatgatttatgatgtcagtaatcggccctcaggggtttctaatcgcttctctggctccaagtctggcaacacggcctccctgaccatctctgggctccaggctgaggacgaggctgattattactgcagctcatatacaagcagcagcacccccctttatgtcttcggaactgggaccaaggtcaccgtcctag

SEQ ID NO: 2473 - DNA, 322 bp, Homo sapiens
  source 1..322: mol_type = other DNA
gaaatagtgatgacgcagtctccagccaccctgtctgtgtctccaggggaaagagccaccctctcctgcagggccagtcagagtgttagcagcaacttagcctggtaccagcagaaacctggccaggctcccaggctcctcatctatggtgcatccaccagggccactggtatcccagccaggttcagtggcagtgggtctgggacagagttcactctcaccatcagcagcctgcagtctgaagattttgcagtttattactgtcagcagtataataactggcctcggacgttcggccaagggaccaaggtggaaatcaaac

SEQ ID NO: 2474 - DNA, 329 bp, Homo sapiens
  source 1..329: mol_type = other DNA
cagtctgtgttgactcagacaccctcagtgtctgggacccccgggcagagggtcaccatgtcttgttctggaagtacctacaacatcggatataattatgtctcctggtaccagaagatcccaggaatggcccccaaactcctcatctataacttcaatgagcggccctcaggggtccctgaccgattctcaggctccaagtctggcacctcagcctacctggccatcagtgggctccggtccgaggatgaggctgactattattgtgcgtcacgggatgacggttgggatgactatgtcttcggaactgggaccagggtcttcgtcct

SEQ ID NO: 2475 - DNA, 331 bp, Homo sapiens
  source 1..331: mol_type = other DNA
caggctgtggtgactcaggagccctcactgactgtgtccccaggagggacagtcactctcacctgtgactccagcactggagttgtcaccagttatcattatccctactggttccagcagaggcctggccaagccccccggacactgatttatgatacaagaaagaaacactcctggacccctgcccggttctcaggctccctccttgggggcaaagctgccctgaccctttcgggtgcgcagcctgaggatgaggctgagtattattgtttgctctcctttaataatgattatttcgtattcggcggagggactaagctgaccgtcctag

SEQ ID NO: 2476 - DNA, 325 bp, Homo sapiens
  source 1..325: mol_type = other DNA
gaaatagtgatgacgcagtctccagccaccctctctgtgtctccaggggaaagagccaccctctcctgcagggccagtcagagtgttagcgacaacttggcctggtaccagcagaaacctggccaggctcccagactcctcatctatggtgcatccaccagggccactggtatcccagccaggttcagtggcattgggtctgggacagagttcactctcaccatcagcagcctgcagtctgaggattttggagtttattactgtcagcagtataattactggcctccgtggacattcggccaagggaccagggtggaaatcaaac

SEQ ID NO: 2477 - DNA, 340 bp, Homo sapiens
  source 1..340: mol_type = other DNA
gacatcgtgatgacccagtctccagactccctggctgtgtctctgggcgagagggccaccatcaactgcaagtccagccagagtgttttatacagctccaacaataagaactacttagcttggtaccagcagaaaccaggacagcctcctaagctgctcatttactgggcatctacccgggaatccggggtccctgaccgattcagtggcagcgggtctgggacagatttcactctcaccatcagcagcctgcaggctgaagatgtggcagtttattactgtcagcaatattatagtactcctctcacttttggccaggggaccaagctggagatcaaac

SEQ ID NO: 2478 - DNA, 322 bp, Homo sapiens
  source 1..322: mol_type = other DNA
gaaatagtgatgacgcagtctccagccaccctgtctgtgtctccaggggaaagagccaccctctcctgcagggccagtcagagtgttagcagcaacttagcctggtaccagcagaaacctggccaggctcccaggctcctcatctatggtgcatccaccagggccactggtatcccagccaggttcagtggcagtgggtctgggacagagttcactctcaccatcagcagcctgcagtctgaagattttgcagtttattactgtcagcagtataataactggcctcaaacgttcggccaagggaccaaggtggaaatcaaac

SEQ ID NO: 2479 - DNA, 322 bp, Homo sapiens
  source 1..322: mol_type = other DNA
gacatccagatgacccagtctccttccaccctgtctgcatctgtaggagacagagtcaccatcacttgccgggccagtcagagtattagtagctggttggcctggtatcagcagaaaccagggaaagcccctaagctcctgatctataaggcgtctagtttagaaagtggggtcccatcaaggttcagcggcagtggatctgggacagaattcactctcaccatcagcagcctgcagcctgatgattttgcaacttattactgccaacagtataatagttatttattcactttcggccctgggaccaaagtggatatcaaac

SEQ ID NO: 2480 - DNA, 325 bp, Homo sapiens
  source 1..325: mol_type = other DNA
gaaattgtgttgacgcagtctccaggcaccctgtctttgtctccaggggaaagagccaccctctcctgcagggccagtcagagtgttagcagcagctacttagcctggtaccagcagaaacctggccaggctcccaggctcctcatctatggtgcatccagcagggccactggcatcccagacaggttcagtggcagtgggtctgggacagacttcactctcaccatcagcagactggagcctgaagattttgcagtgtattactgtcagcagtatggtagctcactgctcactttcggcggagggaccaaggtggagatcaaac

SEQ ID NO: 2481 - DNA, 322 bp, Homo sapiens
  source 1..322: mol_type = other DNA
gacatccagttgacccagtctccatccttcctgtctgcatctgtaggagacagagtcaccatcacttgccgggccagtcagggcattagcagttctttagcctggtatcagcaaaaaccagggaaagcccctaagctcctgatctatgctgcatccactttgcaaaatggggtcccatcaaggttcagcggcagtggatctgggacagaattcactctcacaatcagcagcctgcagcctgaagattttgcaacttattactgtcaacaacttaataattatcccctcactttcggcggagggaccaaggtggagatcaaac

SEQ ID NO: 2482 - DNA, 325 bp, Homo sapiens
  source 1..325: mol_type = other DNA
gacatccagttgacccagtctccttccaccctgtctgcatctgtgggagacagagtcaccgtcacttgccgggccagtcagagtattaatatctggttggcctggtatcagcagaaaccagggaaagcccctaaactcctgatctataagtcatctactttagaaagtggggtcccatcaaggttcagcggcagtggatctgggacagagtttactctcaccgtcagcagcctgcagcctgatgattttgcaacttattactgccaacactataatcctaattctttctatacttttggccaggggaccaagctggagatcaaac

SEQ ID NO: 2483 - DNA, 325 bp, Homo sapiens
  source 1..325: mol_type = other DNA
gaaatagtgttgacgcagtctcccggcaccctgtctttgtctccaggggaaagagccaccctctcctgcagggccagtcagagtgttagcagcagccagttagcctggtaccagcagaaatctggccaggctcccaggctcctcatctatgctgcatccaccagggccactggcatcccagacaggttcagtggcagtgggtctgggacagacttcactctcaccatcagcagactggaggctgaagattttgcactgtattactgtcagcagtatggtagttcaaccttcactttcggcggagggaccaaggtggagatcaaac

SEQ ID NO: 2484 - DNA, 337 bp, Homo sapiens
  source 1..337: mol_type = other DNA
gatgttgtgatgactcagtctccactctccctgtccgtcacccttggacagtcggcctccatctcctgcgggtctagtcaaagcctcgtacacagagatggaaacacctacttgaattggtttcaacagaggccaggccaatctccaaggcgcctaatttatcaggtttcttaccgggactctggggtcccagacagattcagcggcagtgggtcagccactgatttcacactgaaaatcagcagggtggaggctgcggatgttggggtttattactgcatgcaaggtacacactatcatacgtacacttttggcccggggaccaaactggagatca

SEQ ID NO: 2485 - DNA, 328 bp, Homo sapiens
  source 1..328: mol_type = other DNA
gaaattgtgttgacacagtctccagccaccctgtctttgtctccaggggaaagagccaccctctcctgcagggccagtcagagtgttagcagctacttagcctggtaccaacagaaacctggccaggctcccaggctcctcatctatgatgcatccaacagggccactggcatcccagccaggttcagtggcagtgggtctgggacagacttcactctcaccatcagcagcctagagcctgaagattttgcagtttattactgtcagcagcgtagcaactggcctccgggggggacgttcggccaagggaccaaggtggaaatcaaac

SEQ ID NO: 2486 - DNA, 337 bp, Homo sapiens
  source 1..337: mol_type = other DNA
cagtctgtgttgacgcagccgccctcagtgtctgcggccccaggacagaaggtcaccatctcctgctctggaagcagctccaacattgggaataattatgtatcctggtaccagcagctcccaggaacagcccccaaactcctcatctatgaaaataataagcgaccctcagggattcctgaccgattctctggctccaagtctggcacgtcagccaccctgggcatcaccggactccagactggggacgaggccgattattactgcggaacatgggatagcagcctgagtgctggccgggtggtattcggcggagggaccaagctgaccgtcctag

SEQ ID NO: 2487 - DNA, 346 bp, Homo sapiens
  source 1..346: mol_type = other DNA
gacatcgtgatgacccagtctccagactccctggctgtgtctctgggcgagagggccaccatcaactgcaagtccagccagagtgttttatacagctccaacaataagaactacttagcttggtaccagcagaaaccaggacagcctcctaagctgctcatttactgggcatctacccgggaatccggggtccctgaccgattcagtggcagcgggtctgggacagatttcactctcaccatcagcagcctgcaggctgaagatgtggcagtttattactgtcagcaatattatagtactcctcctatgtacacttttggccaggggaccaagctggagatcaaac

SEQ ID NO: 2488 - DNA, 325 bp, Homo sapiens
  source 1..325: mol_type = other DNA
gaaatagtgatgacgcagtctccagccaccctgtctgtgtctccaggggaaagagccaccctctcctgcagggccagtcagagtgttagcagcaacttagcctggtaccagcagaaacctggccagcctcccaggctcctcatctatggtgcatccaccagggccactggtatcccagccaggttcactggcagtgggtctgggacagagttcactctcaccatcagcagcctgcagtctgaagattttgcagtttattactgtcagcagtataataactggcctccgctcactttcggcggagggaccaaggtggagatcaaac

SEQ ID NO: 2489 - DNA, 325 bp, Homo sapiens
  source 1..325: mol_type = other DNA
gaaattgtgatgacgcagtctccagccacccttgctgtgtctccgggggaaagagccaccctctcctgcagggccagtcagagtgttagtagtaatcttgcctggtaccagcacagacctggccaggctcccaggctcctcatctctggtgcatccaccagggccgcgggtatcccagccaggttcagtggctctgggtctggaacagagttcactctcaccatcaccagcatgcagtctgaagattttgcagtttattactgtcagcagtattataactggcctcccatcaccttcggccaggggacacgattggagatgaaac

SEQ ID NO: 2490 - DNA, 322 bp, Homo sapiens
  source 1..322: mol_type = other DNA
gacatccagatgacccagtctccatcctctctgtctgcgtctgtaggagacagactcaccatcacttgccgggcaagtcagaggattagtaggtatttaaattggtatcaacagaaagcagggaaagcccctaggctcctgatctattctgcatccagtttgcaaggtggggtcccatcaaggttcagtggcagtggatctgagacagatttcactctcaccatcagcagtctgcaacctgaagattttgcaacatactactgtcaacagacttacggtagagtgctcactttcggcggagggaccagggtggagctcaaac

SEQ ID NO: 2491 - DNA, 327 bp, Homo sapiens
  source 1..327: mol_type = other DNA
gaaataatgatgacgcagtctccagccaccgtgtctgtgtctccaggggaaagagccaccctctcctgtagggccagtcagagtgttgataataagttagcctggtaccagcagaaaactggccagactcccaggctcctcatctatggtgcatccaccagggccactggtatcccagccaggttcagtggcagtgggtctgggacagagttcactctcagcatcagcagcgtgcaatctgaagattttgcagtttattattgtcagcaatatagtaactggcctccggcgtacagttttggccaggggaccaggctggagataaaa

SEQ ID NO: 2492 - DNA, 325 bp, Homo sapiens
  source 1..325: mol_type = other DNA
gaaattgtgttgacacagtctccagccaccctgtctttgtctccaggggaaagagccaccctctcctgcagggccagtcagagtgttagcagctacttagcctggtaccaacagaaacctggccaggctcccaggctcctcatctatgatgcatccaacagggccactggcatcccagccaggttcagtggcagtgggtctgggacagacttcactctcaccatcagcagcctagagcctgaagattttgcagtttattactgtcagcagcgtagcaactggtccacgtggacgttcggccaagggaccaaggtggaaatcaaac

SEQ ID NO: 2493 - DNA, 322 bp, Homo sapiens
  source 1..322: mol_type = other DNA
tcctatgagttgactcagccaccctcagtgtccgtgtccccaggacagacagccagcatcacctgctctggagataaattgggggataaatatgcttgctggtatcatcagaagccaggccagtcccctgtgctggtcatctatcaagataccaagcggccctcagggatccctgagcgattctctggctccaactctgggaacacagccactctgaccatcagcgggacccagtctatggatgaggctgactattactgtcaggcgtgggacagcagcactgcggtggtattcggcggagggaccaagctgaccgtcctag

SEQ ID NO: 2494 - DNA, 337 bp, Homo sapiens
  source 1..337: mol_type = other DNA
gatattgtgatgacccagactccactctcctcacctgtcacccttggacagccggcctccatctcctgcaggtctagtcaaagcctcgtacacagtgatggaaacacctacttgagttggcttcagcagaggccaggccagcctccaagactcctaatttataagatttctaaccggttctctggggtcccagacagattcagtggcagtggggcagggacagatttcacactgaaaatcagcagggtggaagctgaggatgtcggggtttattactgcatgcaagctacacaatttccgatcaccttcggccaagggacacgactggagattaaac

SEQ ID NO: 2495 - DNA, 319 bp, Homo sapiens
  source 1..319: mol_type = other DNA
gacatccagatgacccagtctccttccaccctgtctgcatctgtaggagacagagtcagtatcacctgccgggccagtcagagtattactaagtatttggcctggtatcaacaaaaaccagggaaacccccaaatctcctagtctatgaggcgtctactttagaaggtggggtcccatcaagattcagcggcagtggatctgggacagagttcactctcaccatcagcagcctgcagcctgaggattttggaacttattactgccaacattataacacttactcgtacacttttggccaggggaccaagctggagatca

SEQ ID NO: 2496 - DNA, 328 bp, Homo sapiens
  source 1..328: mol_type = other DNA
gaaattgtgttgacgcagtctccaggcaccctgtctttgtctccaggggaaagagccaccctctcctgcagggccagtcagagtgttagcagcagctacttagcctggtaccagcagaaacctggccaggctcccaggctcctcatctatggtgcatccagcagggccactggcatcccagacaggttcagtggcagtgggtctgggacagacttcactctcaccatcagcagactggagcctgaagattttgcagtgtattactgtcagcagtatggtagctcacctccctggacgttcggccaagggaccaaggtggaaatcaaac

SEQ ID NO: 2497 - DNA, 334 bp, Homo sapiens
  source 1..334: mol_type = other DNA
cagcttgtgctgactcaatcgccctctgcctctgcctccctgggagcctcggtcaagctcacctgcactctgagcagtgggcacagcagctacgccatcgcatggcatcagcagcagccagagaagggccctcggtacttgatgaagcttaacagtgatggcagccacagcaagggggacgggatccctgatcgcttctcaggctccagctctggggctgagcgctacctcaccatctccagcctccagtctgaggatgaggctgactattactgtcagacctggggcactggcttttgggtgttcggcggagggaccaagctgaccgtcctag

SEQ ID NO: 2498 - DNA, 322 bp, Homo sapiens
  source 1..322: mol_type = other DNA
gacatccagatgacccagtctccttccaccctgtctgcatctgtaggagacagaatcaccatcacttgtcggtccagtcagagtgtgagtagttggttggcctggtatcagcagaaaccaggaaaggcccctaaactcctaatctataaggcgtcttctttggaaagtggggtcccatctaagttcagcggcagtggatctgggacagagttcactctcaccataagcagcctgcagcctgatgactttgcaacttattattgtcaacaatataataattatccgtggacgttcggccaagggaccaaggtggaaatcaaac

SEQ ID NO: 2499 - DNA, 325 bp, Homo sapiens
  source 1..325: mol_type = other DNA
gaaattgtgttgacgcagtctccaggcactctgtctttgtctccaggggaaagagccaccctctcctgcagggccagtcagagtgttagcagcaggtacttagcctggtaccagcagaaacgtggccaggctcccaggctcctcatctatggtgcatccagcagggccactggcatcccagacaggttcagtggcagtgggtctgggacagagttcactctcaccatcagcagactggagcctgaagattttgcagtgtattactgtcagcagtatggtagttcaccggaaacgttcggccaagggaccaaggtggaaatcaaac

SEQ ID NO: 2500 - DNA, 334 bp, Homo sapiens
  source 1..334: mol_type = other DNA
cagtctgtgttgacgcagccgccctcagtgtctgcggccccaggacagaaggtcaccatctcctgctctggaagcagctccaacattgggaataattatgtatcctggtaccagcaactcccaggaacagcccccaaactcctcatctatgaaaataataagcgaccctcagggattcctgaccgattctctggctccaagtctggcacgtcagccaccctgggcatcaccggactccagactggggacgaggccgattattactgcggaacatgggatagcagcctgagtgccgtttgggtgttcggcggagggaccaagctgaccgtcctag

SEQ ID NO: 2501 - DNA, 328 bp, Homo sapiens
  source 1..328: mol_type = other DNA
gaaattgtgttgacacagtctccagccaccctgtctttgtctccaggggaaagagccaccctctcctgcagggccagtcagagtgttagcagctacttagcctggtaccaacagaaacctggccaggctcccaggctcctcatctatgatgcatccaacagggccactggcatcccagccaggttcagtggcagtgggtctgggacagacttcactctcaccatcagcagcctagagcctgaagattttgcagtttattactgtcagcagcgtagcaactggcccccgggcctcactttcggcggagggaccaaggtggagatcaaac

SEQ ID NO: 2502 - DNA, 324 bp, Homo sapiens
  source 1..324: mol_type = other DNA
gaaattgtgttgacgcagtctccaggcaccctgtctttgtctccaggagagagagccaccctctcctgcagggccagtcagagtgttagcagcaactccttagcctggtaccagcagaaacctggccaggctcccaggctcctcatctatgctgcatccagcagggccagtggcatccctgacaggttcagtggcagtgggtctgggacagacttcactctcaccatcagcagactggagcctgaagactttgcagtgtattactgtcagcagtatggtgcctcaccccggacgttcggccaagggaccaaggtggagatcaaa

SEQ ID NO: 2503 - DNA, 331 bp, Homo sapiens
  source 1..331: mol_type = other DNA
cagtctgtgttgacgcagccgccctcagtgtctgcggccccaggacagaaggtcaccatctcctgctctggaagcagctccaacattgggaataattatgtatcctggtaccagcagctcccaggaacagcccccaaactcctcatttatgacaataataagcgaccctcagggattcctgaccgattctctggctccaagtctggcacgtcagccaccctgggcatcaccggactccagactggggacgaggccgattattactgcggaacatgggatagcagcctgagtgctggggtgttcggcggagggaccaagctgaccgtcctag

SEQ ID NO: 2504 - DNA, 319 bp, Homo sapiens
  source 1..319: mol_type = other DNA
tcctatgaattaattcagccaccctcagtgtccgtgtccccaggacagacagccaccatcacctgctctggagaaaaattgggggtcaaatatgcttcctggtatcagcagaagccaggccagtcccctgtgttggtcgtctatcaagataacaaacggccctctggaatccctgagcgattctctggctccagctctgtgaacacagccactctgaccatcagcgggacccagcctatggatgaggctgactattactgtcaggcgtgggacagcgacaccgcgatattcggcgaagggacgaaactgaccgtcctag

SEQ ID NO: 2505 - DNA, 334 bp, Homo sapiens
  source 1..334: mol_type = other DNA
cagtctgtgctgacgcagccgccctcagtgtctggggccccagggcagagggtcaccatctcctgcactgggagcagctccaacatcggggcaggttatgatgtacactggtaccagcagcttccaggaacagcccccaaactcctcatctatggtaacagcaatcggccctcaggggtccctgaccgattctctggctccaagtctggcacatcagcctccctggccatcactgggctccaggctgaggatgaggctgattattactgccagtcctatgacagcagcctgagtggttgggtgttcggcggagggaccaagctgaccgtcctag

SEQ ID NO: 2506 - DNA, 325 bp, Homo sapiens
  source 1..325: mol_type = other DNA
gaaattgtgttgacgcagtctccaggcaccctgtctttgtctccaggggaaagagccaccctctcctgcagggccagtcagagtgttagcagcagctacttagcctggtaccagcagaaacctggccaggctcccaggctcctcatctatggtgcatccagcagggccactggcatcccagacaggttcagtggcagtgggtctgggacagacttcactctcaccatcagcagactggagcctgaagattttgcagtgtattactgtcagcagtatggtagctcaccggtcaccttcggccaagggacacgactggagattaaac

SEQ ID NO: 2507 - DNA, 325 bp, Homo sapiens
  source 1..325: mol_type = other DNA
gaaattgtgttgacgcagtctccaggcaccctgtctttgtctccaggggaaagagccaccctctcctgcagggccagtcagagcgttagcagcagctacttagcctggtaccagcagaaacctggccagactcccaggctcctcatctatggtgcatccagcagggccactggcatcccagacagattcagtggcagtgggtctgggacagagttcactctcaccatcagcagactggagcctgaagatttcgcagtgtattactgtcagcagtatggtagctcaagcctcactttcggcggagggaccaaggtggagatcaaac

SEQ ID NO: 2508 - DNA, 325 bp, Homo sapiens
  source 1..325: mol_type = other DNA
gaaattgtgttgacgcagtctccaggcaccctgtctttgtctccaggggaaagagccaccctctcctgcagggccagtcagagtgttagcagcagctacttagcctggtaccagcagaaacctggccaggctcccaggctcctcatctatggtgcatccagcagggccactggcatcccagacaggttcagtggcagtgggtctgggacagacttcactctcaccatcagcagactggagcctgaagattttgcagtgtattactgtcagcagtatggtagctcagtctggacgttcggccaagggaccaaggtggaaatcaaac

SEQ ID NO: 2509 - DNA, 322 bp, Homo sapiens
  source 1..322: mol_type = other DNA
gacatccagatgacccagtctccttccaccctgtctgcatctgtaggagacagagtcaccatcacttgccgggccagtcagagtattagtagctggttggcctggtatcagcagaaaccagggaaagcccctaagctcctgatctataaggcgtctagtttagaaagtggggtcccatcaaggttcagcggcagtggatctgggacagaattcactctcaccatcagcagcctgcagcctgatgattttgcaacttattactgccaacagtataatagttattcggggacgttcggccaagggaccaaggtggaaatcaaac

SEQ ID NO: 2510 - DNA, 331 bp, Homo sapiens
  source 1..331: mol_type = other DNA
cagtctgccctgactcagcctgcctccgtgtctgggtctcctggacagtcgatcaccatctcctgcactggaaccagcagtgacgttggtggttataactatgtctcctggtaccaacaacacccaggcaaagcccccaaactcatgatttatgatgtcagtaatcggccctcaggggtttctaatcgcttctctggctccaagtctggcaacacggcctccctgaccatctctgggctccaggctgaggacgaggctgattattactgcagctcatatacaagcagcagcactcgggtgttcggcggagggaccaagctgaccgtcctag

SEQ ID NO: 2511 - DNA, 325 bp, Homo sapiens
  source 1..325: mol_type = other DNA
gaaatagtgatgacgcagtctccagccaccctgtctgtgtctccaggggaaagagccaccctctcctgcagggccagtcagagtattagcagcaacttagcctggtaccagcagaaacctggccaggctcccaggttcctcatctatggtgcatccaccagggccactggtatcccagccaggttcagtggcagtgggtctgggacagagttcactctcaccatcagcagcatgcagtctgaagattttgcagtttattactgtcagcagtataataactggccctcggcgacgttcggccaagggaccaaggtggaaatcaaac

SEQ ID NO: 2512 - DNA, 322 bp, Homo sapiens
  source 1..322: mol_type = other DNA
gacatccagatgacccagtctccttccaccctgtctgcatctgtaggggagagagtcaccatcacttgccgggccagtcaggatattagtacctggttggcctggtatcagcaaaaaccagggaaagcccctaacctcctgatctataaggcgtctactttagaacgtggggtcccatcaaggttcagcggcagtggatctgggacagaattcactctcaccatcagcagcctgcagcctgatgattttgcaagttattactgccaacattataatacttattcgtacacttttggccaggggaccaagctggagatcaaac

SEQ ID NO: 2513 - DNA, 325 bp, Homo sapiens
  source 1..325: mol_type = other DNA
gaaattgtgttgacacagtctccagccaccctgtctttgtctccaggggaaagagccaccctctcctgcagggccagtcagagtgttagcagctacttagcctggtaccaacagaaacctggccaggctcccaggctcctcatctatgatgcatccaacagggccactggcatcccagccaggttcagtggcagtgggtctgggacagacttcactctcaccatcagcagcctagagcctgaagattttgcagtttattactgtcagcagcgtagcaactggcctccgatcaccttcggccaagggacacgactggagattaaac

SEQ ID NO: 2514 - DNA, 324 bp, Homo sapiens
  source 1..324: mol_type = other DNA
gaaattgtgttgaggcagagtccaggcaccctgtctttgtctccaggggagagagccaccctctcctgcagggccagtcagagtgttaccagcggtaacttagcctggtaccaacagaaacctggccaggctcccaggctcctcatctatggtgcatccagcagggcccctggcatcccagacaggttcagtggcagtgggtctgggacagacttcactctcaccatcaggagactggagcctgatgattttgcagtgtattactgtcagcagtatggtagctcaaccctcactttcggcggagggaccaaggtggagatcaaa

SEQ ID NO: 2515 - DNA, 325 bp, Homo sapiens
  source 1..325: mol_type = other DNA
gaaattgtgttgacgcagtttccaggcactctgtctctgtctccaggggaaagagccaccctctcctgcagggccagtcagagtgttagcaacaactacctagcctggtaccaacaaaaacctggccaggctcccaggctcctcatttctggttcgaccagcaggccaactggcatcccagtcaggttcagtggcagtgggtctgggacagacttcactctcaccatcagtacactggagcctgaagattttgcaatatattactgtcagcagtatggtgactctccattcactttcggccctgggaccagagtggaaatcaaac

SEQ ID NO: 2516 - DNA, 328 bp, Homo sapiens
  source 1..328: mol_type = other DNA
gaaattgtgttgacacagtctccagccaccctgtctttgtctccaggggaaagagccaccctctcctgcagggccagtcagagtgttagcagctacttagcctggtaccaacagaaacctggccaggctcccaggctcctcatctatgatgcatccaacagggccactggcatcccagccaggttcagtggcagtgggtctgggacagacttcactctcaccatcagcagcctagagcctgaagattttgcagtttattactgtcagcagcgtagcaactggcctccggggctcactttcggcggagggaccaaggtggagatcaaac

SEQ ID NO: 2517 - DNA, 325 bp, Homo sapiens
  source 1..325: mol_type = other DNA
tcctatgtgctgactcagccaccctcagtgtcagtggccccaggaaagacggccaggattacctgtgggggaaacaacattggaagtaaaagtgtgcactggtaccagcagaagccaggccaggcccctgtgctggtcatctatgatgatagcgaccggccctcagggatccctgagcgattctctggctccaactctgggaacacggccaccctgaccatcagcagggtcgaagccggggatgaggccgactattactgtcaggtgtgggatagtagtagtgatcatcctttattcggcggagggaccaagctgaccgtcctag

SEQ ID NO: 2518 - DNA, 331 bp, Homo sapiens
  source 1..331: mol_type = other DNA
cagactgtggtgacccaggagccatcgttctcagtgtcccctggagggacagtcacactcacttgtggcttgagctctggctcagtctctactagttactaccccagctggtaccagcagaccccaggccaggctccacgcacgctcatctacagcacaaacactcgctcttctggggtccctgatcgcttctctggctccatccttgggaacaaagctgccctcaccatcacgggggcccaggcagatgatgaatctgattattactgtgtgctgtatatgggtagtggcattgtggtattcggcggagggaccaagctgaccgtcctag

SEQ ID NO: 2519 - DNA, 322 bp, Homo sapiens
  source 1..322: mol_type = other DNA
tcctatgagctgactcagccaccctcagtgtccgtgtccccaggacagacagccagcatcacctgctctggagataaattgggggataaatatgcttgctggtatcagcagaagccaggccagtcccctgtgctggtcatctatcaagatagcaagcggccctcagggatccctgagcgattctctggctccaactctgggaacacagccactctgaccatcagcgggacccaggctatggatgaggctgactattactgtcaggcgtgggacagcagcactcccgtggtattcggcggagggaccaagctgaccgtcctag

SEQ ID NO: 2520 - DNA, 325 bp, Homo sapiens
  source 1..325: mol_type = other DNA
gaaatagtaatgacgcagtctccagccgccctgtctgtgtctccaggggaaagagtcaccctctcctgcagggccagtcagagtgttaacaccaagttagcctggtaccagcataaacccggccaggctcccaggctcctcatctatggtacatccaccagggccactggtgtcccaggcaggttcagtggcagtgggtctgggacagagttcactctcaccatcagcaccatacagtctgaagattttgcaatttattactgtcagcagtataataactggcctcccatcaccttcggccaagggacacgactggagattaaac

SEQ ID NO: 2521 - DNA, 322 bp, Homo sapiens
  source 1..322: mol_type = other DNA
gacatccagatgacccagtcgccatcttatgtgtctgcatctgtgggagacagagtcaccatcacttgtcgggcgagcgaaaatattagagtctacttagcctggtatcagcagaagccaggtcaagcccctaaactcctagtctatggtggatccagtttgcaaagtggggtcccttttaggttcagcggcggtggatctggcaccgatttcactctcaccatcaacactctgcagcctgaagattttgcaacttactactgtcagcagtccaagactctcccgctcactttcggcggagggaccaaggtggacatcaaac

SEQ ID NO: 2522 - DNA, 322 bp, Homo sapiens
  source 1..322: mol_type = other DNA
gacatccagatgacccaatctccttccaccctgtctgcatctgtcggggacacaataaccatcacttgccgggccagtcagaatattgaaacctggttggcctggtatcagcagaagccagggaaagccccaaagctcctgattcgtgagggctctattttacaaggtggtgtcccatcaagattcagcggcagtggatctgggacaacattcactctcaccatcagcagtccgcagcctgaagattttgccacttattattgtcagcagtatgataattatcctccgacattcggccaagggaccaaagtggaaatcaaac

SEQ ID NO: 2523 - DNA, 328 bp, Homo sapiens
  source 1..328: mol_type = other DNA
gaaattgtgttgacgcagtctccaggcaccctgtctttgtctccaggggaaagagccaccctctcctgcagggccagtcagagtgttagcagcagctacttagcctggtaccagcagaaacctggccaggctcccaggctcctcatctatggtgcatccagcagggccactggcatcccagacaggttcagtggcagtgggtctgggacagacttcactctcaccatcagcagactggagcctgaagattttgcagtgtattactgtcagcagtatggtagctcacctccgtggacgttcggccaagggaccaaggtggaaatcaaac

SEQ ID NO: 2524 - DNA, 319 bp, Homo sapiens
  source 1..319: mol_type = other DNA
gacatccagatgacccagtctccttccaccctgtctgcatctgtaggagacagagtcaccatcacttgccgggccagtcagagtattagtagctggttggcctggtatcagcagaaaccagggaaagcccctaagctcctgatctataaggcgtctagtttagaaagtggggtcccatcaaggttcagcggcagtggatctgggacagaattcactctcaccatcagcagcctgcagcctgatgattttgcaacttattactgccaacagtataatagttacccgacgttcggccaagggaccaaggtggaaatcaaac

SEQ ID NO: 2525 - DNA, 337 bp, Homo sapiens
  source 1..337: mol_type = other DNA
gatattgtgatgactcagtctccactctccctgcccgtcacccctggagagccggcctccatctcctgcaggtctagtcagagcctcctgcatagtaatggatacaactatttggattggtacctgcagaagccaggacagtctccacagctcctgatctatttgggttctaatcgggcctccggggtccctgacaggttcagtggcagtggatcaggcacagattttacactgaaaatcagcagagtggaggctgaggatgttggggtttattactgcatgcaagctctacaaactcctcggacttttggccaggggaccaagctggagatcaaac

SEQ ID NO: 2526 - DNA, 337 bp, Homo sapiens
  source 1..337: mol_type = other DNA
gatattcttatgactcagtctccactctccctgcccgtcagccctggagagccggcctccatctcctgcaggtctagtcagagcctcctgcatagttatggatacaactacttggattggtacctgcagaagccagggcagtctccacaactcctgatctatttgggctctattcgggcctccggggtccctgacaggtttagtggcagtgggtcaggcacagatttcacactgaaaatcactagagtggagccggaggatgttggaatttattattgcatgcaagctctgcaacctccccggacgttcggccaagggaccagggtggagatcaaac

SEQ ID NO: 2527 - DNA, 322 bp, Homo sapiens
  source 1..322: mol_type = other DNA
gacatccagatgacccagtctccatcctccctgtctgcatctgtaggagacagagtcaccatcacttgccgggcaagtcagggcattagaaatgatttaggctggtatcagcagaaaccagggaaagcccctaagcgcctgatctatgctgcatccagtttgcaaagtggggtcccatcaaggttcagcggcagtggatctgggacagaattcactctcacaatcagcagcctgcagcctgaagattttgcaacttattactgtctacagcataatagttaccctcggacgttcggccaagggaccaaggtggaaatcaaac

SEQ ID NO: 2528 - DNA, 328 bp, Homo sapiens
  source 1..328: mol_type = other DNA
tcctatgagctgacacagccaccctcggtgtcagtgtccccaggacagacggccaggatcacctgctctggagatgcattgccaaagcaatatgcttattggtaccagcagaagccaggccaggcccctgtgctggtgatatataaagacagtgagaggccctcagggatccctgagcgattctctggctccagctcagggacaacagtcacgttgaccatcagtggagtccaggcagaagacgaggctgactattactgtcaatcagcagacagcagtggtacttatcctgtggtattcggcggagggaccaagctgaccgtcctag

SEQ ID NO: 2529 - DNA, 329 bp, Homo sapiens
  source 1..329: mol_type = other DNA
cagtctgccctgactcagcctgcctccgtgtctgcatctcctggacagtcgatcaccatctcttgcactggaaccagcagtgacgttggtggttataactatgtctcctggtaccaagttcacccagccaaagcccccaaactcatactttatgatgtcaataagcggccctcaggaatttctgatcgtttctctggctccaagtctggcaacacggcctccctgaccatctctgggctccacgttgaggacgaggctgattatttctgcaattcatatacagacagcaccacttatgtcttcggaagtgggacaaaggtcaccgtcct

SEQ ID NO: 2530 - DNA, 325 bp, Homo sapiens
  source 1..325: mol_type = other DNA
gaaatagtgatgacgcagtctccagccaccctgtctgtgtctccaggggaaagagccaccctctcctgcagggccagtcagagtgttagcagcaacttagcctggtaccagcagaaacctggccaggctcccaggctcctcatctatggtgcatccatcagggccactggcatcccagccaggttcagtgccagtgggtctgggacagagttcactctcaccatcagcatcctccagtctgaagattttgcagtttattactgtcagcagtatactaactggcctccgatcaccttcggccaagggacacgactggagattaaac

SEQ ID NO: 2531 - DNA, 324 bp, Homo sapiens
  source 1..324: mol_type = other DNA
gaaattgtgttgaggcagagtccaggcaccctgtctttgtctccaggggagagagccaccctctcctgcagggccagtcagagtgttaccagcagctacttagcctggtaccaacagaaacctggccaggctcccaggctcctcatctatggtgcatccagccgggcccctggcatcccagacaggttcagtggcagtgggtctgggacagacttcactctcaccatcagcagactggagcctgatgattttgcagtgtattactgtcagcagtatggtagctcaaccctcactttcggcggagggaccaaggtggagatcaaa

SEQ ID NO: 2532 - DNA, 331 bp, Homo sapiens
  source 1..331: mol_type = other DNA
cagtctgtgttgacgcagccgccctcagtgtctgcggccccaggacagaaggtcaccatctcctgctctggaagcagctccaacattgggaataattatgtatcctggtaccagcaactcccaggaacagcccccaaactcctcatctatgaaaataataagcgaccctcagggattcctgaccgattctctggctccaagtctggcacgtcagccaccctgggcatcaccggactccagactggggacgaggccgattattactgcggaacatgggatagcagcctgagggctgtggtattcggcggagggaccaagctgaccgtcctag

SEQ ID NO: 2533 - DNA, 322 bp, Homo sapiens
  source 1..322: mol_type = other DNA
gacatccagatgacccagtctccatcctccctgtctgcatctgtaggagacagagtcaccatcacttgccgggcaagtcagaacgttggcaactttttgaattggtatcagcagaaacaagagaaggcccctaagctcctgatctatgctgcatccaacttgcaaagtggggtcccctcaaggttcagtggcagtggatctgggacagatttcactctcaccatcagcagtcttcaacctgaagattttgcaacttactactgtcaacagagttacattaccccatactctttcggccctgggaccaaaatggatatcaaac

SEQ ID NO: 2534 - DNA, 325 bp, Homo sapiens
  source 1..325: mol_type = other DNA
gaaattgtgctgacgcagtctccaggcaccctgtctttgtctccaggggaaggagccaccctctcctgcagggccagtcaaaatattattaacaaatacgtagcctggtaccagcagagagctggccaggctcccaggctcctcatctatgatgcatcccacagggccactggcatcccagacaggttcagtggcagtgggtctgggacagacttcactctcaccatccgcagtctggagcctgaagattttgcagtatattactgtcagcaatatggtagctcaccccggacgttcggccaagggaccaaggtggaaatcaaac

SEQ ID NO: 2535 - DNA, 331 bp, Homo sapiens
  source 1..331: mol_type = other DNA
cagtctgtgttgacgcagccgccctcagtgtctgcggccccaggacagaaggtcaccatctcctgctctggaagcagctccaacattgggaataattatgtatcctggtaccagcagctcccaggaacagcccccaaactcctcatctatgaaaataataagcgaccctcagggattcctgaccgattctctggctccaagtctggcacgtcagccaccctgggcatcaccggactccagactggggacgaggccgattattactgcggaacatgggatagcagcctgagtgctgtggtattcggcggagggaccaagctgaccgtcctag

SEQ ID NO: 2536 - DNA, 325 bp, Homo sapiens
  source 1..325: mol_type = other DNA
gaaatagtgatgacgcagtctccagccaccctgtctgtgtctccaggggaaagagccaccctctcctgcagggccagtcagagtgttggcggcaacttagcctggtaccagcagaaacctggccaggctcccaggctcctcatctatggtgcatccaccagggccactggtatcccagccaggttcagtggcagtgggtctgggacagagttcactctcaccatcagcagcctgcagtctgaagatgttgcagtttattactgtcaacagtataataactggcctccgtggacgttcggccaagggaccaaggtggaaatcaaac

SEQ ID NO: 2537 - DNA, 325 bp, Homo sapiens
  source 1..325: mol_type = other DNA
gaaattgtgttgacgcagtctcccggcaccctgtctttgtctccaggggaaagagccaccctctcctgcagggccagtcagagtcttagcagcagccagttagcctggtatcagcagaaatctggccaggctcccaggctcctcatctatggtgcatccaccagggccactggcatcccagacagattcagtggcagtgggtctgggacagacttcactctcaccatcaacagactggaggctgaagattttgcactgtattactgtcagcagtatggtagttcaattttcactttcggcggagggaccaaggtggagatcaaac

SEQ ID NO: 2538 - DNA, 322 bp, Homo sapiens
  source 1..322: mol_type = other DNA
tcctatgagctgactcagccaccctcagtgtccgtgtccccaggacagacagccagcatcacctgctctggagataaattgggggataaatatgcttgctggtatcagcagaagccaggccagtcccctgtgctggtcatctatcaagatagcaagcggccctcagggatccctgagcgattctctggctccaactctgggaacacagccactctgaccatcagcgggacccaggctatggatgaggctgactattactgtcaggcgtgggacagcagcactcatgtggtattcggcggagggaccaagctgaccgtcctag

SEQ ID NO: 2539 - DNA, 322 bp, Homo sapiens
  source 1..322: mol_type = other DNA
tcctatgagctgactcagccaccctcagtgtccgtgtccccaggacagacagccagcatcacctgctctggagataaattgggggataaatatgcttgctggtatcagcagaagccaggccagtcccctgtgctggtcatctatcaagatagcaagcggccctcagggatccctgagcgattctctggctccaactctgggaacacagccactctgaccatcagcgggacccaggctatggatgaggctgactattactgtcaggcgtgggacagcagcactgcatacgtattcggcggagggaccaagctgaccgtcctag

SEQ ID NO: 2540 - DNA, 338 bp, Homo sapiens
  source 1..338: mol_type = other DNA
attttgtgatgactcagtctccgctctccctgcccgtcacccttggacagccggcctccatctgctgcagatctagtcaaagcctcgtacacaaggatgggaacacctacttgaattggtttcagcagaggccaggccaatctccaaggcgcctaatttataaggtttctaaccgggactctggggtcccagacagattcagcggcagtgggtcaggcactgatttcacactgaaaatcagcagggtggaggctgaggatgttgcggtttattactgcatgcaagggacacactggaatatgtacagttttggccaggggaccaagctggagatcaaa

SEQ ID NO: 2541 - DNA, 327 bp, Homo sapiens
  source 1..327: mol_type = other DNA
gaaattgtgttgacgcagtctccaggcaccctgtctttgtctccaggggaaagagccaacctctcctgcagggccagtcagagtgttagcagcagctacttagcctggtaccagcagaaacctggccaggctcccaggctcctcatctatgctgcatctagcagggccactggcatcccagacaggttcagtggcagtgggtctgggacagacttcgctctcaccatcaacagactggagcctgaagattttgcagtgtatcactgtcagcagtatggtagctcacctccgatcaccttcggccaagggacacgactggagattaaa

SEQ ID NO: 2542 - DNA, 322 bp, Homo sapiens
  source 1..322: mol_type = other DNA
gaaattgtgttgacacagtctccaggcaccctgtctttgtctccaggggaaagagccaccctctcctgcagggccagtcagagtgttagcggcaattacttagcctggtaccagcagagacctggccaggctcccaggctcctcatctatggtgcatccaacagggccactggcatcccagacaggttcagtggcagtgggtctgggacagagttcactctcaccatcagcagactggagcctgaagattttgcagtgtattgctgtcagcagtatggtagttcaaccctcactttcggcggagggaccaaggtggagatca

SEQ ID NO: 2543 - DNA, 322 bp, Homo sapiens
  source 1..322: mol_type = other DNA
tcctatgagctgacacagccaccctcggtgtcagtgtccccaggacagacggccaggatcacctgctctggagatgcattgccaaagcaatatgcttattggtaccagcagaagccaggccaggcccctgtgctggtgatatataaagacagtgagaggccctcagggatccctgagcgattctctggctccagctcagggacaacagtcacgttgaccatcagtggagtccaggcagaagacgaggctgactattactgtcaatcagcagacagcagtggtaccctggtattcggcggagggaccaagctgaccgtcctag

SEQ ID NO: 2544 - DNA, 328 bp, Homo sapiens; identical to SEQ ID NO: 2523
  source 1..328: mol_type = other DNA

SEQ ID NO: 2545 - DNA, 323 bp, Homo sapiens
  source 1..323: mol_type = other DNA
gaaattgtgttgacgcagtctccaggcaccctgtctttgtctccaggggaaagagccaccctctcctgcagggccagtcagagtgttagcagcagttacttagcctggtaccagcagaaacctggccaggctcccaggctcctcatctatggtgcatccagcagggccactggcatcccagacaggttcagtggcagtgggtctgggacagacttcactctcaccatcaggagactggagtctgaagattttgcagtgtattactgtcagcagtatggtagctcacctctcactttcggcggagggaccaaggtggagatcaa

SEQ ID NO: 2546 - DNA, 331 bp, Homo sapiens
  source 1..331: mol_type = other DNA
cagtctgccctgactcagcctgcctccgtgtctgggtctcctggacagtcgatcaccatctcctgcactggaaccagcagtgacgttggtggttataactatgtctcctggtaccaacagcacccaggcaaagcccccaaactcatgatttatgatgtcagtaagcggccctcaggggtttctaatcgcttctctggctccaagtctggcaacacggcctccctgaccatctctgggctccaggctgaggacgaggctgattattactgcagctcatatacaagcagcagcgcggtggtattcggcggagggaccaagctgaccgtcctag

SEQ ID NO: 2547 - DNA, 331 bp, Homo sapiens
  source 1..331: mol_type = other DNA
cagtctgccctgactcagcctccctccgcgtccgggtctcctggtcagtcagtcaccatctcctgcactggaacccacaatgacgttggtggttttaactatgtctcctggtaccaacaacacccaggcaaagcccccaaactcatcatttatgaggtcggtgagcggccctcaggtgtccctgatcgcttctctggatccaagtctggcaacacggcctccctgaccgtcactgggctccaggctgacgatgaggctacctatttttgctgctcatttgcaggcagcaacaatttacttttcggcggagggacccggctgaccgtcctag

SEQ ID NO: 2548 - DNA, 328 bp, Homo sapiens
  source 1..328: mol_type = other DNA
gccatccggatgacccagtctccatcctcactctctgcatctacaggagacagagtcaccatcacttgtcgggcgagtcagggtattagcagttatttagcctggtatcagcaaaaaccagggaaagcccctaagctcctgatctatgctgcatccactttgcaaagtggggtcccatcaaggttcagcggcagtggatctgggacagatttcactctcaccatcagctgcctgcagtctgaagattttgcaacttattactgtcaacagtattatagttacctacgtcagtggacgttcggccaagggaccaaggtggaaatcaaac

SEQ ID NO: 2549 - DNA, 343 bp, Homo sapiens
  source 1..343: mol_type = other DNA
gacatcgtgatgatccagtctccagactccctggctgtgtctctgggcgagagggccaccatcaactgcaagtccagccagagtgttttatacagccccaacaataaaaactacttagcttggtaccagcagaaaccaggacagcctcctaaattgctcatttactgggcatctacccgggaatccggggtccctgaccgattcagtggcagcgggtctgggacagatttcactctcaccatcagcagcctgcaacctgaagatgtggcagtctattactgtcagcaatattatagtacttatctgtacacttttggccaggggaccaagctggagatcaaac

SEQ ID NO: 2550 - DNA, 322 bp, Homo sapiens
  source 1..322: mol_type = other DNA
gacatccagatgacccagtctccatcctccctgtctgcatctgtaggagacagagtcaccatcacttgccgggcaagtcagagcattagcagctatttaaattggtatcagcagaaaccagggaaagcccctaagctcctgatctatgctgcatccagtttgcaaagtggggtcccatcaaggttcagtggcagtggatctgggacagatttcactctcaccatcagcagtctgcaacctgaagattttgcaacttactactgtcaacagagttacagtaccccatcgacgttcggccaagggaccaaggtggaaatcaaac

SEQ ID NO: 2551 - DNA, 322 bp, Homo sapiens
  source 1..322: mol_type = other DNA
gaaattgtgctgactcagtctccagactttcagtctgtgactccaaaggagaaagtcaccatcacctgccgggccagtcagagcattggtagtagcttacactggtaccagcagaaaccagatcagtctccaaagctcctcatcaagtatgcttcccagtccttctcaggggtcccctcgaggttcagtggcagtggatctgggacagatttcaccctcaccatcaatagcctggaagctgaagatgctgcaacgtattactgtcatcagagtagtagtttcccgctcactttcggcggagggaccaaggtggagatcaaac

SEQ ID NO: 2552 - DNA, 322 bp, Homo sapiens
  source 1..322: mol_type = other DNA
gaaatagtgatgacgcagtctccagccaccctgtctgtgtctccaggggaaagagccgccctctcctgcagggccagtcagagtgttagcagcgacttagcctggtaccagcagaaacctggccaggctcccaggctcctcatctatggtgcatccaccagggccactggtatcccagccaggttcagtggcagtgggtctgggacagagttcactctcaccatcagcagcctgcagtctgaagattttgcagtttattactgtcagcagtataataactggcccggagatttcggccctgggaccaaagtggatatcaaac

SEQ ID NO: 2553 - DNA, 331 bp, Homo sapiens; identical to SEQ ID NO: 2405
  source 1..331: mol_type = other DNA

SEQ ID NO: 2554 - DNA, 322 bp, Homo sapiens
  source 1..322: mol_type = other DNA
gaaatagtgatgacgcagtctccagccaccctgtctgtgtctccaggggaaagagccaccctctcctgcagggccagtcagagtgttagcagcaacttagcctggtaccagcagaaacctggccaggctcccaggctcctcatctatggtgcatccaccagggccactggtatcccagccaggttcagtggcagtgggtctgggacagagttcactctcaccatcagcagcctgcagtctgaagattttgcagtttattactgtcagcagtataataactggtggtacacttttggccaggggaccaagctggagatcaaac

SEQ ID NO: 2555 - DNA, 322 bp, Homo sapiens
  source 1..322: mol_type = other DNA
tcttctgagctgactcaggaccctgctgtgtctgtggccttgggacagacagtcaggatcacatgccaaggagacagcctcagaagctattatgcaagctggtaccagcagaagccaggacaggcccctgtacttgtcatctatggtaaaaacaaccggccctcagggatcccagaccgattctctggctccagctcaggaaacacagcttccttgaccatcactggggctcaggcggaagatgaggctgactattactgtaactcccgggacagcagtggtaattgggtgttcggcggagggaccaagctgaccgtcctag

SEQ ID NO: 2556 - DNA, 322 bp, Homo sapiens
  source 1..322: mol_type = other DNA
gacatccagatgacccagtctccatcctccctgtctgcatctataggagacagagtcaccatcacttgtcgggcaaatcaagacatcagaacctatttaaattggtatcagcagaaaccaggaaaagccccgcggctcttgatttatgctgcgtccaatttggaaagtggagtcccatcaaggttcagtggcggtggatctgggacagatttcactctcaccatcatcagtctgcaacctgaagattttgcgacttactactgccaccagagttacaacactcctcagacttttggtcaggggaccaaactggagatcaaac

SEQ ID NO: 2557 - DNA, 325 bp, Homo sapiens; identical to SEQ ID NO: 2445
  source 1..325: mol_type = other DNA

SEQ ID NO: 2558 - DNA, 322 bp, Homo sapiens
  source 1..322: mol_type = other DNA
gccatccagatgacccagtctccgtcctccctgtccgcatccataggggacagagtcaccatcacttgccgggcaagtgaagacatcaatgattatttaggctggtatcaacacaggccggggagaccccctagactcctgattatgcggtcattcactagagagaatggggtcccatcaaggttcggcggcagtcggtcaggcacagagttcactctcacaatcaatggcctccaacctgaagatcttgccacttattactgtctccaggacaacgagtacccgttttcgtttggtcaggggaccaaggtggaactcaaac

SEQ ID NO: 2559 - DNA, 322 bp, Homo sapiens
  source 1..322: mol_type = other DNA
gaaattggattgtcgcagtctccaggcaccctctctttgtctccaggggaaagagccaccctctcctgcagggccagtcagagtgttaacagcaattacttagcctggtaccagaagaaacctgaccaggctcccagactcctcatctatggtgcgtccaacagggccactggcatcccagacaggttcagtggcagtgggtctgggacagagttcactctcaccatcagcagactggagcctgaagattttgcagtctattactgtcagcagtatggtagctcaagtctcactttcggcggggggaccaaggtggagatca

SEQ ID NO: 2560 - DNA, 334 bp, Homo sapiens
  source 1..334: mol_type = other DNA
cagcttgtgctgactcaatcgccctctgcctctgcctccctgggagcctcggtcaagctcacctgcactctgagcagtgggcacagtaggtacgccatcgcatggcatcagcagcggccagagaagggccctcgatacttgatgaaccttaacagtgatggcagccacagcaagggggacgggatccctgatcgcttctcaggctccagctctggggctgagcgctacctcaccatctccagcctccagtctgaggatgaggctgactattactgtcagacctggggcactggcattcaggtattcggcggagggaccaagctgaccgtcctag

SEQ ID NO: 2561 - DNA, 325 bp, Homo sapiens
  source 1..325: mol_type = other DNA
gaaatagtgatgacgcagtctccagccaccctgtctgtgtctccaggggaaagagccaccctctcctgcagggccagtcagagtgttagcagcaacttagcctggtaccagcagaaacctggccaggctcccaggctcctcatctatggtgcatccaccagggccactggtatcccagccaggttcagtggcagtgggtctgggacagagttcactctcaccatcagcagcatgcagtctgaagattttgcagtttattactgtcagcagtataataactggccccagtggacgttcggccaagggaccaaggtggaaatcaaac

SEQ ID NO: 2562 - DNA, 340 bp, Homo sapiens
  source 1..340: mol_type = other DNA
gacatcgtgatgacccagtctccagactccctggctgtgtctctgggcgagagggccaccatcaactgcaagtccagccagagtgttttatacagctccaacaatcagaactacttagcttggtaccaggagaaaccaggacagcctcctaaggtgctcatttactgggcatctacccggggatccggggtccctgaccgattcagtggcagcgggtctgggacagatttcactctcaccatcagcagcctgcaggctgaagatgtggcagtttattactgtcagcaatattatagtattccgtacacttttggccaggggaccaagctggagatcaaac

SEQ ID NO: 2563 - DNA, 325 bp, Homo sapiens
  source 1..325: mol_type = other DNA
cagtctgtattgacgcagccgccctcaatctctgcggccccaggacagagggtcaccatctcctgtattggaagcaactccaaccttcagaatgcttatgtctcctggtaccaacaactcccaggaacagcccccaaactcctcatttatgacaatactgagcgcccctcagagattcccgaccgtttctctggctccaagtctgacacgtcagccaccctggtcatcaccggactccagactggggacgaggccgactattattgcggagcatgggattctgacctgatgatattcggcggagggaccaagttgaccgtcctag

SEQ ID NO: 2564 - DNA, 325 bp, Homo sapiens
  source 1..325: mol_type = other DNA
gaaatagtgatgacccagtctccagccaccctgtctgtgtctccgggggaaagagccaccctctcctgcagggccagtcagagtgttaacagcaacttagcctggtaccagcagagacctggccaggctcccaggctcctcatctatactgcctccaccagggccactggtatcccagccaggttcagtggcagtgggtctgggacagagttcactctcaccatcagcagcatacagcctgaagattttgcagtttattactgtcagcagtatagtaattggcctccgctcactttcggcggagggaccaaggtggagatcaaac

SEQ ID NO: 2565 - DNA, 319 bp, Homo sapiens
  source 1..319: mol_type = other DNA
gacatccagatgacccagtctccttccaccctgtctgcgtctgtaggggacagagtcgccatcacttgccgggccagtcagaatattagtacttggttggcctggtatcagcagaaaccagggaaagcccctagactcctggtctatgaggcatctactttacaaagtggggtcccatcaaggttcagcggcagtggctctgagacagagttcatcctcaccatcagcagcctgcagcctgatgattttgcaacttattactgccaacactattatagtttttcgaacacttttggccaggggaccagactggagatca

SEQ ID NO: 2566 - DNA, 322 bp, Homo sapiens
  source 1..322: mol_type = other DNA
gaaatagtgatgacgcagtctccagccaccctgtctgtgtctccaggggaaagagccaccctctcctgcagggccagtcagagtgttaacaccaagttagcctggtaccagcagaagcctggccaggctcccaggctcctcatctatggtgcatccaccagggccactggtatcccagccaggttcagtggcagtgggtctgggacagagttcactctcatcatcagcagcatgcagtctgaagattttgcagtttattactgtcagcagtataataactggcctcccatcaccttcggccaagggacacgactggagatta

SEQ ID NO: 2567 - DNA, 325 bp, Homo sapiens
  source 1..325: mol_type = other DNA
gaaattgtgttgacgcagtctcccggcaccctgtctttgtctccgggggaaagagtcaccctctcctgcagggccagtcagagtgttagcagcaatcacgtagcctggtatcagcagaaatctggccaggctcccaggctcctcatctatggtgcatccaccagggccactggcatcccagacaggttcagtggcagtgggtctgggacagacttcactctcaccatcaacagactggaggctgaagattttgcactgtattactgtcagcagtatgacagttcaaccttcactttcggcggagggaccaaggtggagatcaaac

SEQ ID NO: 2568 - DNA, 319 bp, Homo sapiens
  source 1..319: mol_type = other DNA
gaaattgtgttgacacagtctccagccaccctgtctttgtctccaggggaaagagccaccctctcctgcagggccagtcagagtgttagcagctacttagcctggtaccaacagaaacctggccaggctcccaggctcctcatctatgatgcatccaacagggccactggcatcccagccaggttcagtggcagtgggtctgggacagacttcactctcaccatcagcagcctagagcctgaagattttgcagtttattactgtcagcagcgtagcaactggtggacgttcggccaagggaccaaggtggaaatcaaac

SEQ ID NO: 2569 - DNA, 325 bp, Homo sapiens
  source 1..325: mol_type = other DNA
gacatccagttgacccagtctccatccttcctgtctgcatctgtaggagacagagtcaccatcacttgccgggccagtcagggcattagcagttatttagcctggtatcagcaaaaaccagggaaagcccctaagctcctgatctatgctgcatccactttgcaaagtggggtcccatcaaggttcagcggcagtggatctgggacagaattcactctcacaatcagcagcctgcagcctgaagattttgcaacttattactgtcaacagcttaatagttacccagcgctcactttcggcggagggaccaaggtggagatcaaac

SEQ ID NO: 2570 - DNA, 340 bp, Homo sapiens
  source 1..340: mol_type = other DNA
gacatcgtgatgacccagtctccagactccctggctgtgtctctgggcgagagggccaccatcaactgcaagtccagccagagtgttttatacagctccaacaataagaactacttagcttggtaccagcagaaaccaggacagcctcctaagctgctcatttactgggcatctacccgggaatccggggtccctgaccgattcagtggcagcgggtctgggacagatttcactctcaccatcagcagcctgcaggctgaagatgtggcagtttattactgtcagcaatattatagtactccttggacgttcggccaagggaccaaggtggaaatcaaac

SEQ ID NO: 2571 - DNA, 340 bp, Homo sapiens
  source 1..340: mol_type = other DNA
gatgttgtactgactcagtctccactctccctgtccgtcacccttggacagccggcctccatctcctgcaggtctagtcaagacctcgtacacaacgatggaaacacctacttgaattggtttcaacagaggccaggccaatctccaaggcgcctcatttataaggtttctaaccgggactctggggtcccggacagattcagcgccagtggatcagccactgatttcgcactgaaaatcagcagggtggaggctgaggatgttggggtttatttctgcatgcagggaacacactggaatatatacacttttggccaggggaccaaattggagatcaaac

SEQ ID NO: 2572 - DNA, 325 bp, Homo sapiens
  source 1..325: mol_type = other DNA
gaaatagtgatgacgcagtctccagccaccctgtctgtgtctccaggggaaagagccaccctctcctgcagggccagtcagagtgttaccgacaacttagcctggtaccagcagaagcctggccaggctcccaggctcctcatctatggtgcatccaccagggccactggtgtcccagccaggttcagtggcagtgggtctgggacagagttcactctcaccatcagcagcctgcagtctgaagattttgcagtttattactgtcagcagtataattactggcctccgtggacattcggccaagggaccaaggtggaaatcaaac

SEQ ID NO: 2573 - DNA, 325 bp, Homo sapiens
  source 1..325: mol_type = other DNA
tcctatgagctgacacagccaccctcggtgtcagtgtccccaggacagacggccaggatcacctgctctggagatgcattgccaaagcaatatgcttattggtaccagcagaagccaggccaggcccctgtgctggtgatatataaagacagtgagaggccctcagggatccctgagcgattctctggctccagctcagggacaacagtcacgttgaccatcagtggagtccaggcagaagacgaggctgactattactgtcaatcagcagacagcagtggtactcatggggtattcggcggagggaccaagctgaccgtcctag

SEQ ID NO: 2574 - DNA, 322 bp, Homo sapiens
  source 1..322: mol_type = other DNA
gacatccagatgacccagtctccttccaccctgtctgcatctataggagacagagtcaccatcacttgccgggccagtcagagtattagtagctggttggcctggtatcagcagaaaccagggaaagcccctaaggtcctgatctataaggcgtctagtttagaaagtggggtcccatcaaggttcagcggcagtggatctgggacagaattcactctcaccatcagcagcctgcagcctgatgattttgcaacttattactgccaacagtataatagttattcgatcacgttcggccaagggacacgactggagattaaac

SEQ ID NO: 2575 - DNA, 325 bp, Homo sapiens
  source 1..325: mol_type = other DNA
gaagttgtgttgacgcagtctccaggcaccctgtctttgtctccaggggaaggagccaccctctcctgcagggccagtcagggtctcactaacaaatacatagcctggtaccagcagagacctggccaggctcccaggctcctcatctatgatgcatccaacagggccactggcatcccagacaggttcagtggcagtgggtctgggacagacttcactctcaccatcagcagtctggagcctgaagattttgcagtatattactgtcagcaatatgatagttcaccccggacgttcggccaagggaccaaggtggaaatcaaac

SEQ ID NO: 2576 - DNA, 343 bp, Homo sapiens
  source 1..343: mol_type = other DNA
gacatcgtgatgacccagtctccagactccctggctgtgtctctgggcgagagggccaccatcaactgcaagtccagccagagtgttttatacagctccaacaataagaactacttagcttggtaccagcagaaaccaggacagcctcctaagctgctcatttactgggcatctacccgggaatccggggtccctgaccgattcagtggcagcgggtctgggacagatttcactctcaccatcagcagcctgcaggctgaagatgtggcagtttattactgtcagcaatattatagtactccctcgtggacgttcggccaagggaccaaggtggaaatcaaac

SEQ ID NO: 2577 - DNA, 322 bp, Homo sapiens
  source 1..322: mol_type = other DNA
gacatccagatgacccagtctccttccaccctgtctgcatctgtaggagacagagtcaccatcacttgccgggccagtcagagtattagtagctggttggcctggtatcagcagaaaccagggaaagcccctaagctcctgatctataaggcgtctagtttagaaagtggggtcccatcaaggttcagcggcagtggatctgggacagaattcactctcaccatcagcagcctgcagcctgatgattttgcaacttattactgccaacagtataatagttacccgtggacgttcggccaagggaccaaggtggaaatcaaac

SEQ ID NO: 2578 - DNA, 325 bp, Homo sapiens
  source 1..325: mol_type = other DNA
gaaattgtgttgacgcagtctcccggcaccctgtctttgtctccaggggaaagagccaccctctcctgcagggccagccagagtgttagcagcagctccttagcctggtaccagcagaaatctggccaggctcccaggctcctcatctatggtgcatccaccagggccactggcatcccagacaggttcagtggcagtgggtctgggacagacttcactctcaccatcagcagactggaggctgaagattttgcactgtattactgtcagcagtatgctagttcaaccttcactttcggcggagggaccaaggtggagatcaaac

SEQ ID NO: 2579 - DNA, 331 bp, Homo sapiens; identical to SEQ ID NO: 2305
  source 1..331: mol_type = other DNA

SEQ ID NO: 2580 - DNA, 325 bp, Homo sapiens
  source 1..325: mol_type = other DNA
gaaattgtgttgacgcagtctcccggcaccctgtctttgtctccaggggaaagggccaccctctcctgcagggccagtcagagtgttaacagcaactatttagcctggtaccagcagaaatctggccaggctcccagactcctcatttatgatgcatccaccagggccactggcatcccagacaggttcagtggcagtgggtctgggacagacttcactctcaccatcagcagactggaggctgaagattttgcactgtattactgtcagcaatatggtagttcaaccttcactttcggcggagggaccaaggtggagatcaaac

SEQ ID NO: 2581 - DNA, 322 bp, Homo sapiens
  source 1..322: mol_type = other DNA
gaaatagtgatgacgcagtctccagccaccctgtctgtgtctccaggggaaagagccaccctctcctgcagggccagtcagagtgttagcagcaacttagcctggtaccagcagaaacctggccaggctcccaggctcctcatctatggtgcatccaccagggccactggtatcccagccaggttcagtggcagtgggtctgggacagagttcactctcaccatcagcagcctgcagtctgaagattttgcagtttattactgtcagcagtataataactggcctctcactttcggcggagggaccaaggtggagatcaaac

SEQ ID NO: 2582 - DNA, 322 bp, Homo sapiens
  source 1..322: mol_type = other DNA
tcctatgaactgactcagccaccctcaatgtccgtgtccccaggacagacagtcggcatcacctgctcgggagataacttgagtgatacctatgtttcctggtatcaacagaggccaggccagtcccctatactggtcatctctcaagataaggagcggccctcagggatccctgagcgattctctggctccaactctgggaacacagccacattgaccatcagcgggacccaggctatcgatgaggctgactattattgtcagacgtgggacaaaaaagttggtgtggtgttcggcggagggaccaagctggccgtcctag

SEQ ID NO: 2583 - DNA, 325 bp, Homo sapiens
  source 1..325: mol_type = other DNA
gccatccggatgacccagtctccatcctcattctctgcatctacaggagacagagtcaccatcacttgtcgggcgagtcagggtattagcagttatttagcctggtatcagcaaaaaccagggaaagcccctaagctcctgatctatgctgcatccactttgcaaagtggggtcccatcaaggttcagcggcagtggatctgggacagatttcactctcaccatcagctgcctgcagtctgaagattttgcaacttattactgtcaacagtattatagttaccctccgctcactttcggcggagggaccaaggtggagatcaaac

SEQ ID NO: 2584 - DNA, 332 bp, Homo sapiens
  source 1..332: mol_type = other DNA
cagtctgccctgactcagcctgcctccgtgtctgggtctcctggacagtcgatcaccatctcctgcactggaaccagcagtgacgttggtggttataactatgtctcctggtaccaacagcacccaggcaaagcccccaaactcatgatttatgatgtcaataagcggccctcaggggtttctaatcgcttctctggctccaagtctggcagcacggcctccctgaccatctctgggctccaggctgaggacgagggtgattattactgcaactcatttacaagcagcaccactcccgtggtattcggcggagggaccaagctgaccgtcct

SEQ ID NO: 2585 - DNA, 325 bp, Homo sapiens
  source 1..325: mol_type = other DNA
gaaatcatgttgacgcagtctccaggcaccctgtctttgtctccaggggaaagagccaccctctcctgcagggccagtcagaatattgacagcacctccttagcctggtaccagcagacacctggccaggctcccaggctcctcatctacggtggatccagcagggccactggcgccccagacaggttcagtggcagtgggtctgggacagagttcactctcactgtcaatagactggagcctgaagatttcgcagtgtattactgtcagcaatatgggagttcaatcctcactttcggcggagggaccaaggtggagatcaaac

SEQ ID NO: 2586 - DNA, 328 bp, Homo sapiens
  source 1..328: mol_type = other DNA
gaaattgtgttgacgcagtctccaggcaccctgtctttgtctccagggggaagtgccaccctctcctgcagggccagtcagagtgttgataataattacttagcctggtatcagcataaacctggccaggctcccaggctcctcatctatgatgcatccagcagggccactggcatcccagacaggttcagtggcagtgggtctgggacagacttcactctcaccatccgcagactggagcctgaagattttgcagtgtattactgtcagcactatggtaggtcacctcggtggacgttcggccaagggaccaaggtggaaatcaaac

SEQ ID NO: 2587 - DNA, 325 bp, Homo sapiens
  source 1..325: mol_type = other DNA
gaagttgtgttgacgcagtctccaggcaccctgtctttgtctccaggggaaagagccaccctctcctgcagggccagtcagagtgtttccagcagctacttagcctggtaccagcacaaacctggccaggctcccagactcctcatctatgatgcatccaggagggccactggcatcccagacaggttcagtggcagtgggtctgggacagacttcactctcaccgtcagcagactggagcctgaagattttgcagtttattactgtcagcagtatgatagctcaccattcactttcggccctgggaccaaagtggatttcaaac

SEQ ID NO: 2588 - DNA, 322 bp, Homo sapiens
  source 1..322: mol_type = other DNA
gaaattgtgttgacgcagtctccaggcaccctgtctttgtctccaggggaaagagccaccctctcctgcagggccagtcagagtgttagcagcaattacttaagttggtaccagcagcaacctggccaggctcccagagtcctcatctatggtgcatccaacagggccactggcatcccagacaggttcagtggcagtgggtctgggacagagttcactctcaccatcagcagactggagcctgaagatgttgcagtgtattactgtcagcagtatggtagctcaaccctcactttcggcggagggaccaaggtggagatca

SEQ ID NO: 2589 - DNA, 325 bp, Homo sapiens
  source 1..325: mol_type = other DNA
gaaatagtgatgacgcagtctccagccaccctgtctgtgtctccaggggaaagagccaccctctcctgcagggccagtcagagtattagcagcaacttagcctggtaccagcagaaacctggccaggctcccaggctcctcatctatggtgcatcaaccagggccactggtatcccagccaggttcagtggcagtgggtctgggacagagttcactctcaccattagcagcatgcagtctgaagattttgcagtttattactgtcagcagtatcataactggcctccgctcactttcggcggagggaccaaggtggagatcaaac

SEQ ID NO: 2590 - DNA, 337 bp, Homo sapiens
  source 1..337: mol_type = other DNA
cagtctgtgctgacgcagccgccctcagtgtctggggccccagggcagagggtcaccatctcctgcactgggagcagctccaacatcggggcaggttatgatgtacactggtaccagcagcttccaggaacagcccccaaactcctcatctatggtaacagcaatcggccctcaggggtccctgaccgattctctggctccaagtctggcacctcagcctccctggccatcactgggctccaggctgaggatgaggctgattattactgccagtcctatgacagcagcctgagtggttatgtggtattcggcggagggaccaagctgaccgtcctag

SEQ ID NO: 2591 - DNA, 325 bp, Homo sapiens
  source 1..325: mol_type = other DNA
gaaattgtgttgacgcagtctccaggcaccctgtctttgtctccaggggaaagagccaccctctcctgcagggccagtcagattgttaccagcaactacttagcctggtaccagcagaaacctggccagactcccaggctcctcatctatgatgcatccaggcgggccactggcatcccagacaggttcagtggcagtgggtctgggacagacttcactctcaccatcagcaggctggagcctgaagattttgtagtttattactgtcagcagtatggtacctcaccattcactttcggccctgggaccaaagtggatgtcaaac

SEQ ID NO: 2592 - DNA, 322 bp, Homo sapiens; identical to SEQ ID NO: 2367
  source 1..322: mol_type = other DNA

SEQ ID NO: 2593 - DNA, 325 bp, Homo sapiens
  source 1..325: mol_type = other DNA
gaaattgtgttgacgcagtctccaggcaccctgtctttgtctccaggggaaagagccaccctctcctgcagggccagtcagattgttagcagcaactacttagcctggtatcagcagaaacctggccaggctcccaggctcctcatctatgatgcatccaggagggccactggcatcccagacagattcagtggcagtgggtctgggacagacttcactctcaccatcagcaggctggagcctgaagattttgtagtttattactgtcagcagtatggtaactcaccattcactttcggccctgggaccaaagtggatctcaaac

SEQ ID NO: 2594 - DNA, 322 bp, Homo sapiens
  source 1..322: mol_type = other DNA
gacatccagatgacccagtctccttccaccctgtctgcatctgtcggagacagagtcaccatcacttgccgggccagtcagagtgttagtacctggttggcctggtatcagcagaaaccaggaaaagcccctaagctcctgatctataaggcgtctagtttagaaagtggggtcccatcaagattcagcggcagtggatctgggacagaattcactctcaccatcagcagcctgcagcctgatgattttgcaatttatttctgccaacactataatacttacccgtacacttttggccaggggaccaagctggagatcaaac

SEQ ID NO: 2595 - DNA, 336 bp, Homo sapiens
  source 1..336: mol_type = other DNA
caggttgtgctgacgcagccgccctcagtgtctggggccccagggcagagggtcaccatctcctgcgcggggagcagatccaacatcggggcaggttatgatgtacactggtaccagcagcttccaggaagagcccccaaactcctcatctatggtaacatcaatcggccctcaggggtccctgaccgattttctggctccaagtctggcacctcagcctccctggccatcactgggctccaggctgaggatgaggctagtttttactgccagtcctatgacagaagcctgagtggtctttctgtcttcggaactgggaccaaggtcaccgtccta

SEQ ID NO: 2596 - DNA, 325 bp, Homo sapiens
  source 1..325: mol_type = other DNA
gaaattgtgttgacgcagtctcccggcaccctgtctttgtctccaggggaaagagccaccctctcctgcagggccagtcagagtgttagcaacaactatttagcctggtaccagcagaaatctggccaggctcccagactcctcatctatggtgcgtccaccagggccactggcatcccagacaggttcagtggcagtgggtctgggacagacttcactctcaccatcaacagactggaggctgaagattttgcactgtattactgtcagcagtatggtagttcaacgttcactttcggcggagggaccaaggtggagatcaaac

SEQ ID NO: 2597 - DNA, 340 bp, Homo sapiens
  source 1..340: mol_type = other DNA
gatgttgtaatgactcagtccccactctccctgcccgtcactcctggacagccggcctccatctcctgcaggtctagtgaaaacctcgtacacaaggatggaaacacctacttgaattggtttcagcagaggccaggccaatctccaaggcgcctaatttataaggtttctaaccgggactctggggtcccggacagattcagcggcagtggggcaggcactgacttcacactgagaatcagcagggtggaggctgaggatgttggggtttattactgcatgcaaggttcacactggaatgtgtacacttttggcccggggaccaggctggagatcaaac

SEQ ID NO: 2598 - DNA, 340 bp, Homo sapiens
  source 1..340: mol_type = other DNA
gatattgtgatgacccagactccactctctctgtccgtcacccctggacagccggcctccatctcctgcaagtctagtcagagcctcctgcatagtgatggaaagacctatttgtattggtacctgcagaagccaggccagcctccacagctcctgatctatgaagtttccaaccggttctctggagtgccagataggttcagtggcagcgggtcagggacagatttcacactgaaaatcagccgggtggaggctgaggatgttggggtttattactgcatgcaaagtatacagcttcctcggatcaccttcggccaagggacacgactggagattaaac

SEQ ID NO: 2599 - DNA, 319 bp, Homo sapiens
  source 1..319: mol_type = other DNA
gacatccagatgacccagtctccatcctccctgtctgcatctgtaggagacagagtcaccatcacttgccgggcgagtcagggcattagcaattctttagcctggtatcagcagaaaccagggaaagcccctaagctcctgctctatgctgcatccagattggaaagtggggtcccatccaggttcagtggcagtggatctgggacggattacactctcaccatcagcagcctgcagcctgaagattttgcaacttattactgtcaacagtattatagtaccccgacgttcggccaagggaccaaggtggaaatcaaac

SEQ ID NO: 2600 - DNA, 340 bp, Homo sapiens
  source 1..340: mol_type = other DNA
gacatcgtgatgacccagtctccagactccctggctgtgtctctgggcgagagggccaccatcaactgcaagtccagccagagtgttttatacagctccaacaataagaactacttagcttggtaccagcagaaaccaggacagcctcctaagctgctcatttactgggcatctacccgggaatccggggtccctgaccgattcagtggcagcgggtctgggacagatttcactctcaccatcagcagcctgcaggctgaagatgtggcagtttattactgtcagcaatattatagtactcctcggacgttcggccaagggaccaaggtggaaatcaaac

SEQ ID NO: 2601 - DNA, 322 bp, Homo sapiens
  source 1..322: mol_type = other DNA
gacatccagatgacccagtctccatcctccctgtctgcatctgtaggagacagagtcaccatcacttgccaggcgagtcaggacattagcaactatttaaattggtatcagcagaaaccagggaaagcccctaagctcctgatctacgatgcatccaatttggaaacaggggtcccatcaaggttcagtggaagtggatctgggacagattttactttcaccatcagcagcctgcagcctgaagatattgcaacatattactgtcaacagtatgataatctcccgctcactttcggcggagggaccaaggtggagatcaaac

SEQ ID NO: 2602 - DNA, 322 bp, Homo sapiens
  source 1..322: mol_type = other DNA
gaaattgtattgacacagtctccagccaccctgtctttgtctccaggggaaagagccaccatctcctgcagggccagtcagagtgttggcaggtatttagtctggttccaacagaaacctggccaggctcccaggctcctcatctatgatgcatccaacagggccactggcatcccagccaggttcagtggcagtgggtctgggacagacttcactctcaccatcagcagcctagagcctgaagattttgcactttattactgtcagcagcgtagcaactggccgctcactttcggcggagggaccaaggtggagatcaaac

SEQ ID NO: 2603 - DNA, 323 bp, Homo sapiens
  source 1..323: mol_type = other DNA
tcctatgagctgacacagccaccctcggtgtcagtgtccccaggacagacggccacgatcacctgctctggagatgcattgccaaagcaatatgcttattggtaccaacagaggccaggccaggcccctatattgctgatatataaagacagtgagaggccctcagggatccctgagcgattctctggctccaactcagggacagcagtcacgttgaccatcagtggagtccaggcagaagacgaggctgactattactgtcaatcagcagacagcagtggtacttatgtggtattcggcggagggaccaagctgaccgtcct

SEQ ID NO: 2604 - DNA, 322 bp, Homo sapiens
  source 1..322: mol_type = other DNA
gacatccagatgacccagtctccttccaccctgtctgcatctgtaggagacagagtcaccatcacttgccgggccagtcagagtattagtagctggttggcctggtatcagcagaaaccagggaaagcccctaagctcctgatctataaggcgtctagtttagaaagtggggtcccatcaaggttcagcggcagtggatctgggacagaattcactctcaccatcagcagcctgcagcctgatgattttgcaacttattactgccaacagtataatagttatttgtacacttttggccaggggaccaagctggagatcaaac

SEQ ID NO: 2605 - DNA, 328 bp, Homo sapiens
  source 1..328: mol_type = other DNA
gacatccagatgacccagtctccttccaccctgtctgcgtctgtaggagacagagtcaccatcacttgccgggccagtcagagtattagtaggtggttggcctggtatcagcagaaaccagggaaagcccctaagctcctcatctatgaggcgtctagtttagaaagtggggtcccatcaaggttcagcggcagtggatctgggacagaattcactctcacgatcagcagcctgcagcctgatgatttggcgacttattactgccaacactataatacttattttccggaagggacgttcggccaagggaccaaggtggaaatcaaac

SEQ ID NO: 2606 - DNA, 340 bp, Homo sapiens
  source 1..340: mol_type = other DNA
gacatcgtgatgacccagtctccagactccctggctgtgtctctgggcgagagggccaccatcaactgcaagtccagccagattattttatacagctccagcaataggaactacttagcttggtaccagcagaaaccaggtcagcctcctaagctgctcatttactgggcatctacccgggactccggggtccctgaccgcttcagtggcagcgggtctgggacagatttcactctcaccatcagcagcctgcaggctgaagatgtggcagtttattactgtcagcaatattatagtgctcctttcactttcggcggagggaccaaggtggagatcaaac

SEQ ID NO: 2607 - DNA, 334 bp, Homo sapiens
  source 1..334: mol_type = other DNA
cagtctgtgttgacgcagccgccctcagtgtctgcggccccaggacagaaggtcaccatctcctgctctggaagcagctccaacattgggaataattatgtatcctggtaccagcagctcccaggaacagcccccaaactcctcatctatgaaaataataagcgaccctcagggattcctgaccgattctctggctccaagtctggcacgtcagccaccctgggcatcaccggactccagactggggacgaggccgattattactgcggaacatgggatagcagcctgagtgctctttgggtgttcggcggagggaccaagctgaccgtcctag

SEQ ID NO: 2608 - DNA, 328 bp, Homo sapiens
  source 1..328: mol_type = other DNA
gaaattgtgttggcacagtctccagccaccctgtctttgtctccaggggaaagagccaccctctcatgcagggccagtcagagtcttagcagctacttagcctggtaccaacagaaacctggccaggctcccaggctcctcatctatgatgcatccaacagggccactggcatcccagccaggttcagtggcagtgggtctgggacagacttcactctcaccatcagcagcctagagcctgaagattttgcagtttattactgtcagcaacgtatcaactggcctccttcgttcactttcggcggagggaccaaggtggagatcaaac

SEQ ID NO: 2609 - DNA, 325 bp, Homo sapiens
  source 1..325: mol_type = other DNA
gaaattgtgttgacgcagtctccaggcaccctgtctttgtctccaggggaaagagccaccctctcctgcagggccagtcagagtgttagcagcagctacttagcctggtaccagcagaaacctggccaggctcccaggctcctcatctatggtgcatccagcagggccactggcatcccagacaggttcagtggcagtgggtctgggacagacttcactctcaccatcagcagactggagcctgaagattttgcagtgtattactgtcagcagtatggtagctcacagtacacttttggccaggggaccaagctggagatcaaac

SEQ ID NO: 2610 - DNA, 325 bp, Homo sapiens
  source 1..325: mol_type = other DNA
cagactgtggtgactcaggagccctcactgactgtgtccccaggagggacagtcactctcacctgtgcttccagcactggagcagtcaccagtggttactatccaaactggttccagcagaaacctggacaagcacccagggcactgatttataatacaagcaacaaacactcctggacccctgcccggttctcaggctccctccttgggggcaaagctgccctgacactgtcaggtgtgcagcctgaggacgaggctgagtattactgcctgctctactatggtggttgggtgttcggcggagggaccaagctgaccgtcctag

SEQ ID NO: 2611 - DNA, 320 bp, Homo sapiens
  source 1..320: mol_type = other DNA
gacatccagatgacccagtctccatcctccctgtctgcatctgtaggagacagagtcaccatcacttgccaggcgagtcaggacattagtaactacttaaattggtatcagcagaaaccagggaaagcccctaaggtcctgatctacgatgcatccagtttggaaacaggggtcccatcaaggttcagtggaagtggatctgggacacattttactttcaccatcagcagcctgcagcctgaagatattgcaacatatttctgtcaacagtatgctaatctccctctcactttcggcgcagggaccagggtggagatcaa

SEQ ID NO: 2612 - DNA, 322 bp, Homo sapiens
  source 1..322: mol_type = other DNA
gacatccagatgacccagtctccttccaccctgtctgcatctgtaggagacagagtcaccatcacttgccgggccagtcagagtattagtagctggttggcctggtatcagcagaaaccagggaaagcccctaagctcctgatctataaggcgtctagtttagaaagtggggtcccatcaaggttcagcggcagtggatctgggacagaattcactctcaccatcagcagcctgcagcctgatgattttgcaacttattactgccaacagtataatagttatctcgggacgttcggccaagggaccaaggtggaaatcaaac

SEQ ID NO: 2613 - DNA, 325 bp, Homo sapiens
  source 1..325: mol_type = other DNA
gaaatagtgatgacccagtctccagccaccctgtctgtgtctccaggggaaagagccaccctctcctgcagggccagtcagagtgttagcagcaacttagcctggtaccagcagaaacctggccaggctcccaggctcctcatctatgctgcctccaccagggccactggtatcccagccaggttcagtggcagtgggtctgggacagagttcactctcaccatcagcagcatgcagcctgaagattttgcagtttattactgtcagcagtataataactggcctccgctcactttcggcggagggaccaaggtggagatcaaac

SEQ ID NO: 2614 - DNA, 325 bp, Homo sapiens
  source 1..325: mol_type = other DNA
gaaattgtgttgacacagtctccagccaccctgtctttgtctccaggggaaagagccaccctctcctgcagggccagtcagagtgttagcaacttcttggcctggtaccaacagaaacctggccgggctcccaggctcctcatctatgatgcatccaaccgggccactggcatcccagccaggttcagtggcagtgggtctggaacagacttcactctcaccatcagcagcctggagcctgaagattttgcagtttattactgtcagcagcgtagcaactggcctccgctcactttcggcggagggaccaaggtggagatcaaac

SEQ ID NO: 2615 - DNA, 328 bp, Homo sapiens
  source 1..328: mol_type = other DNA
gacatccagatgacccagtctccatcctccctgtctgcatctgtaggagacagagtcaccatcacttgccgggcgagtcagggcattagcaattatttagcctggtatcagcagaaaccagggaaagttcctaagctcctgatctatgctgcatccactttgcaatcaggggtcccatctcggttcagtggcagtggatctgggacagatttcactctcaccatcagcagcctgcagcctgaagatgttgcaacttattactgtcaaaagtataacagtgcccctccggggatcaccttcggccaagggacacgactggagattaaac

SEQ ID NO: 2616 - DNA, 325 bp, Homo sapiens
  source 1..325: mol_type = other DNA
gaaatagtgatgacgcagtctccagccaccctgtctgtgtctccaggggaaagagccaccctctcctgcagggccagtcagagtgttagcgacaacttagcctggtaccagcagaaacctggccaggctcccaggctcctcatctatggtgcagccaccagggccactggtatcccagccaggttcagtggcagtgggtctgggacagagttcactctcaccatcagcagcctgcagtctgaagattttggagtttattactgtcagcagtataattactggcctccgtggacattcggccaagggaccagggtggaaatcaaac

SEQ ID NO: 2617 - DNA, 325 bp, Homo sapiens
  source 1..325: mol_type = other DNA
gacatccagatgacccagtctccatcctccctgtctgcatctgtaggagacagagtcaccatcacttgccgggcaagtcagagcattagcagctatttaaattggtatcagcagaaaccagggaaagcccctaagctcctgatctatgctgcatccagtttgcaaagtggggtcccatcaaggttcagtggcagtggatctgggacagatttcactctcaccatcagcagtctgcaacctgaagattttgcaacttactactgtcaacagagttacagtacccctccgctcactttcggcggagggaccaaggtggagatcaaac

SEQ ID NO: 2618 - DNA, 325 bp, Homo sapiens
  source 1..325: mol_type = other DNA
gaaattgtgatgacgcagtctccagccacccttgctgtgtctccgggggaaagagccaccctctcctgcagggccagtcagagtgttagtactaatcttgcctggtaccagcacaaacctggccaggctcccaggctcctcatctctggtgcatccaccagggccgctggtatcccagccaggttcagtggctctgggtctggaatagagttcactctcaccatcaccagcatgcagtctgaagattttgcagtttattactgtcagcagtattataactggcctcccatcaccttcggccaggggacacgattggaggttaaac

SEQ ID NO: 2619 - DNA, 322 bp, Homo sapiens
  source 1..322: mol_type = other DNA
gacatccagatgacccagtctccatcctccctgtctgcatctgtaggagacagagtcaccatcacttgccaggcgagtcaggacattagcaactatttaaattggtatcagcagaaaccagggaaagcccctaagctcctgatctacgatgcatccaatttggaaacaggggtcccatcaaggttcagtggaagtggatctgggacagattttactttcaccatcagcagcctgcagcctgaagatattgcaacatattactgtcaacagtatgataatctcccggtcaccttcggccaagggacacgactggagattaaac

SEQ ID NO: 2620 - DNA, 321 bp, Homo sapiens
  source 1..321: mol_type = other DNA
acatcgagatgacccagtctccatcctccctgtctgcatatgttggggacagcgtctctttttcttgtcgggcaagtcaggacattgacacttatttaaattggtatcaactaaaaatagggggagcccctaaactgctgatctatggtgcctccactttggaaagtggggtctcatctaggttcaggggcagtggctctgggacagatttcaccctcaccattaccaatgtcgaacctgacgatttggcaatttactactgtcaacaaagtttcaatacccctccgtacacatttggccaggggaccaagttggagatca

SEQ ID NO: 2621 - DNA, 322 bp, Homo sapiens
  source 1..322: mol_type = other DNA
tcctatgagctgacacagccatcctcagtgtcagtgtctccgggacagacagccaggatcacctgctcaggagatgtactggcaaaaaaatatgctcggtggttccagcagaagccaggccaggcccctgtgctggtgatttataaagacagtgagcggccctcagggatccctgagcgattctccggctccagctcagggaccacagtcaccttgaccatcagcggggcccaggttgaggatgaggctgactattactgttactctgcggctgacaacaatccccccgtcttcggaactgggaccaaggtcaccgtcctag

SEQ ID NO: 2622 - DNA, 322 bp, Homo sapiens
  source 1..322: mol_type = other DNA
gaaattgtgttgacacagtctccagccaccctgtctttgtctccaggggaaagagccaccctctcctgcagggccagtcagagtgttagcagctacttagcctggtaccaacagaaacctggccaggctcccaggctcctcatctatgatgcatccaacagggccactggcatcccagccaggttcagtggcagtgggtctgggacagacttcactctcaccatcagcagcctagagcctgaagattttgcagtttattactgtcagcagcgtagcaactggctgctcactttcggcggagggaccaaggtggagatcaaac

SEQ ID NO: 2623 - DNA, 340 bp, Homo sapiens
  source 1..340: mol_type = other DNA
gacatcgtgatgacccagtctccagactccctggctgtgtctctgggcgagagggccaccatcaactgcaagtccagccagagtgttttatacagctccaacaataagaactacttagcttggtaccagcagaaaccaggacagcctcctaagctgctcatttactgggcatctacccgggaatccggggtccctgaccgattcagtggcagcgggtctgggacagatttcactctcaccatcagcagcctgcaggctgaagatgtggcagtttattactgtcagcaatattatagtactcctcagacgttcggccaagggaccaaggtggaaatcaaac

SEQ ID NO: 2624 - DNA, 325 bp, Homo sapiens
  source 1..325: mol_type = other DNA
gagatagtgatgacgcagtctccagccaccctgtctgtgtctccaggggacagagccaccctctcctgcagggccagtcagagtattagcagcaacttagcctggtaccagcagaaacctggccaggctcccagactcctcattcatgctgcgtccaccagggccactggtgtcccagccaggttcagtggcagtgggtctgggacagagttcactctcgccatcagcaacgtgcagtctgaagattttgcagtttattactgtcagcagtattataactggcctccgctcactttcggcggagggaccaaggtggagatcaaac

SEQ ID NO: 2625 - DNA, 325 bp, Homo sapiens
  source 1..325: mol_type = other DNA
tcctacgtgctgactcagccaccctcactgtcggtggccccaggaacgacggccaggattagctgtgggggagacaacattggaagtgaaagtgtgaattggtaccagcagaagccaggccaggcccctgtgttggtcatctattatgataatgaccggccctcggagatccctgagcgattctctggctccaattctgggcacacggccaccctgaccatcaccagggtcgaagccggagatgaggccgactattactgtcaggtgtggcatggtaatagcgatcatgggcttttcggcggagggaccaagctgaccgtcctag

SEQ ID NO: 2626 - DNA, 334 bp, Homo sapiens
  source 1..334: mol_type = other DNA
cagtctgtgctgacgcagccgccctcagtgtctggggccccagggcagagggtcaccatctcctgcactgggagcagctccaacatcggggcaggttatgatgtacactggtaccagcagcttccaggaacagcccccaaactcctcatctatggtaacagcaatcggccctcaggggtccctgaccgattctctggctccaagtctggcacctcagcctccctggccatcactgggctccaggctgaggatgaggctgattattactgccagtcctatgacagcagcctgagtggttcggtgttcggcggagggaccaagctgaccgtcctag

SEQ ID NO: 2627 - DNA, 325 bp, Homo sapiens
  source 1..325: mol_type = other DNA
gacattttattgacgcagtctccaggcaccctgtctttgtctccaggggaaagagccaccctctcctgcagggccagtcagagtgttagcagcaacaacttagcctggtaccagcaaaaaactggccaggctcccaggctcctcatctatggtgcatccagcagggccactggcatcccagacaggttcagtggcagtgggtctgggacagacttcactctcaccatcagcagactggagcctgaagattttgcagtgtattactgtcagcagtatggtggcgcatctcggacgttcggccaagggaccaaggtggaaatcaaac

SEQ ID NO: 2628 - DNA, 325 bp, Homo sapiens
  source 1..325: mol_type = other DNA
gacatccagatgacccagtctccatcttccgtgtctgcatctgtaggagacagagtcaccatcacttgtcgggcgagtcagggtattagcagctggttagcctggtatcagcagaaaccagggaaagcccctaagctcctgatctatgctgcatccagtttgcaaagtggggtcccatcaaggttcagcggcagtggatctgggacagatttcactctcaccatcagcagcctgcagcctgaagattttgcaacttactattgtcaacaggctaacagtttcctcccgctcactttcggcggagggaccaaggtggagatcaaac

SEQ ID NO: 2629 - DNA, 328 bp, Homo sapiens
  source 1..328: mol_type = other DNA
tcctatgtgctgactcagccaccctcagtgtcagtggccccaggaaagacggccaggattacctgtgggggaaacaacattggaagtaaaagtgtgcactggtaccagcagaagccaggccaggcccctgtgctggtcatctatgatgatagcgaccggccctcagggatccctgagcgattctctggctccaactctgggaacacggccaccctgaccatcagcagggtcgaagccggggatgaggccgactattactgtcaggtgtgggatagtagtagtgatcatccctatgtcttcggaactgggaccaaggtcaccgtcctag

SEQ ID NO: 2630 - DNA, 340 bp, Homo sapiens
  source 1..340: mol_type = other DNA
gacatcgtgatgacccagtctccagactccctggctctgcctctgggcgagagggccaccatcaactgcaagtccagccagaatgttttatacagctccaataataagaactacttagcttggttccagcagaaaccaggacggcctcctaaactgctcatttactgggcatctacccgggaatccggggtccctgaccgattcagtggcagcgggactgggacagatttcactctcaccatcagcaacctgcaggctgaagatgtggcagtttattactgtcagcaatattatcatactccattcactttcggccctgggactaaagtggatatcaaac

SEQ ID NO: 2631 - DNA, 334 bp, Homo sapiens
  source 1..334: mol_type = other DNA
atcgtgatgactcagtctccactctccctgcccgtcacccctggagagtcggcctccatctcctgcaggtctagtcagagcctcctgcataggaatggattcaactatttggactggtacgtgcagaagccagggcagtctccacaactcctgatctacttgggttccaatcgggcctccggggtccctgacaggttcagtggcagtggatcaggcacagatttcacactgaaaatcagcgaagtggaggctggggatgttgggttttattactgcatgcaagctctgcaaactccgtggacgttcggccaagggaccaaggtggaaatcaaac

SEQ ID NO: 2632 - DNA, 322 bp, Homo sapiens
  source 1..322: mol_type = other DNA
gacatccagttgacccagtctccatccttcctgtctgcatctgtaggagacagagtcaccatcacttgccgggccagtcagggcattagcagttatttagcctggtatcagcaaaaaccagggaaagcccctaagctcctgatctatgctgcatccactttgcaaagtggggtcccatcaaggttcagcggcagtggatctgggacagaattcactctcacaatcagcagcctgcagcctgaagattttgcaacttattactgtcaacagcttaatagttaccctcccaccttcggccaagggacacgactggagattaaac

SEQ ID NO: 2633 - DNA, 323 bp, Homo sapiens
  source 1..323: mol_type = other DNA
tcctatgtgttgattcagccaccctcagtgtcagcggccccaggaaagacggccgggattacctgtgggggaaacaacattggaattaaaagtgtgcactggtaccagcagaagccaggccaggcccctgttttggtcatctttgataatagcgaccggccctcagggatccctgagcgattctctggctccaattctgggaacacggccaccctgaccatcagcagggtcgaagccggggatgaggccgactattactgtcaggtgtgggatagtactagtgatcatgtggtattcggcggagggaccaagctgaccgtcct

SEQ ID NO: 2634 - DNA, 337 bp, Homo sapiens
  source 1..337: mol_type = other DNA
gatattgtgatgacccagactccactctcctcacctgtcacccttggacagccggcctccatctcctgcaggtctagtcaaagcctcgtacacagtgatggaaacacctacttgagttggcttcagcagaggccaggccagcctccaagactcctaatttataagatttctaaccggttctctggggtcccagacagattcagtggcagtggggcagggacagatttcacactgaaaatcagcagggtggaagctgaggatgtcggggtttattactgcatgcaagctacacaatttccgggaacgttcggccaagggaccaaggtggaaatcaaac

SEQ ID NO: 2635 - DNA, 325 bp, Homo sapiens
  source 1..325: mol_type = other DNA
gaaattgtgttgacgcagtctccaggcaccctgtctttgtctccaggggaaagagccaccctctcctgcagggccagtcagagtgttagcagcagctacttagcctggtaccagcagaaacctggccaggctcccaggctcctcatctatggtgcatccagcagggccactggcatcccagacaggttcagtggcagtgggtctgggacagacttcactctcaccatcagcagactggagcctgaagattttgcagtgtattactgtcagcagtatggtagctcatccgtgacgttcggccaagggaccaaggtggaaatcaaac

SEQ ID NO: 2636 - DNA, 322 bp, Homo sapiens; identical to SEQ ID NO: 2379
  source 1..322: mol_type = other DNA

SEQ ID NO: 2637 - DNA, 322 bp, Homo sapiens
  source 1..322: mol_type = other DNA
gacatccagatgacccagtctccttccaccctgtctgcatttgtaggggagagagtcaccatcacttgccgggccagtcagagtattagtagttggttggcctggtatcagcaaaaaccagggaaagtccctaagctcctgatctataaggcgtctactttagaaagtggggtcccatcgaggttcagcggcagtggatctgggacagaattcactctcaccatcagcagcctgcagcctgatgattttgcaagttattactgccaacattataatacttactcgtacacttttggccaggggaccaagctggagatcaaac

SEQ ID NO: 2638 - DNA, 337 bp, Homo sapiens
  source 1..337: mol_type = other DNA
gatattgtgatgacccagactccactctctctgtccgtcacccctggacagccggcctccatctcctgcaagtctagtcagagcctcctgcatagtgatggaaagacctatttgtattggtacctgcagaagccaggccagcctccacagctcctgatctatgaagtttccaaccggttctctggagtgccagataggttcagtggcagcgggtcagggacagatttcacactgaaaatcagccgggtggaggctgaggatgttggggtttattactgcatgcaaagtatacagcttcctcggacttttggccaggggaccaagctggagatcaaac

SEQ ID NO: 2639 - DNA, 337 bp, Homo sapiens
  source 1..337: mol_type = other DNA
gatattgtgatgacccagactccactctcctcacctgtcacccttggacagccggcctccatctcctgcaggtctagtcaaagcctcgtacacagtgatggaaacacctacttgagttggcttcagcagaggccaggccagcctccaagactcctaatttataagatttctaaccggttctctggggtcccagacagattcagtggcagtggggcagggacagatttcacactgaaaatcagcagggtggaagctgaggatgtcggggtttattactgcatgcaagctacacaatttccgtacacttttggccaggggaccaagctggagatcaaac

SEQ ID NO: 2640 - DNA, 325 bp, Homo sapiens
  source 1..325: mol_type = other DNA
gaaattgtgttgacgcagtctcccggcaccctgtctttgtctccaggggaaagagccaccctctcctgcagggccagtcagagtgttaacagcaactacttagcctggtaccagcaaaaacctggccaggctcccaggctcctcatctatggtgcatccaccagggccactggcatcccagacaggttcagtggcagtgggtctgggacagacttcactctcaccatcagcagactggagcctgaagattttgcagtgtattcctgtcagcagtatggtagttcaaccttcactttcggcggagggaccaaggtggagatcaaac

SEQ ID NO: 2641 - DNA, 337 bp, Homo sapiens
  source 1..337: mol_type = other DNA
cagtctgccctgactcagcctgcctccgtgtctgggtctcctggacagtcgatcaccatctcctgcactggaaccagcagtgacgttggtggttataactatgtctcctggtaccaacaacacccaggcaaagcccccaaactcatgatttatgatgtcagtaatcggccctcaggggtttctaatcgcttctctggctccaagtctggcaacacggcctccctgaccatctctgggctccaggctgaggacgaggctgattattactgcagctcatatacaagcagcagcactctttatgtggtattcggcggagggaccaagctgaccgtcctag

SEQ ID NO: 2642 - DNA, 322 bp, Homo sapiens
  source 1..322: mol_type = other DNA
gaaatagtgatgacgcagtctccagccaccctgtctgtgtctccaggggaaagagccaccctctcctgcagggccagtcagagtgttagcagcaacttagcctggtaccagcagaaacctggccaggctcccaggctcctcatctatggtgcatccaccagggccactggtatcccagccaggttcagtggcagtgggtctgggacagagttcactctcaccatcagcagcatgcagtctgaagattttgcagtttattactgtcagcagtataataactggcccctcactttcggcggagggaccaaggtggagatcaaac

SEQ ID NO: 2643 - DNA, 325 bp, Homo sapiens
  source 1..325: mol_type = other DNA
gaaattgtgttgacgcagtctcccggcaccctgtctttgtctccgggggaaagagccaccctctcctgcagggccagtcagagtgttaacagcaaccatttagcctggtaccagcagaagtctggccaggctcccagactcctcatctatggtgcatctatcagggccactggcatcccagacaggttcagtggcagtgggtctgggacagacttcactctcatcatcagcagactggaggctgaagattttgcactgtattactgtcagcagtatggtagttcaaccttcactttcggcggagggaccaaggtggcgatcaaac

SEQ ID NO: 2644 - DNA, 325 bp, Homo sapiens
  source 1..325: mol_type = other DNA
gaaatagtgatgacgcagtctccagccaccctgtctgtgtctccaggggaaagagccaccctctcctgcagggccagtcagagtgttagcagcaacttagcctggtaccagcagaaacctggccaggctcccaggctcctcatctatggtgcatccagcagggccactggcatcccagacaggttcagtggcagtgggtctgggacagacttcactctcaccatcagcagactggagcctgaagattttgcagtgtattactgtcagcagtatggtagctcaccgggattcactttcggccctgggaccaaagtggatatcaaac

SEQ ID NO: 2645 - DNA, 325 bp, Homo sapiens
  source 1..325: mol_type = other DNA
tcctatgagctgactcagccaccctcagtgtccgtgtccccaggacagacagccagcatcacctgctctggagataaattgggggataaatatgcttgctggtatcagcagaagccaggccagtcccctgtgctggtcatctatcaagatagcaagcggccctcagggatccctgagcgattctctggctccaactctgggaacacagccactctgaccatcagcgggacccaggctatggatgaggctgactattactgtcaggcgtgggacagcagcactgcaggggtggtattcggcggagggaccaagctgaccgtcctag

SEQ ID NO: 2646 - DNA, 331 bp, Homo sapiens
  source 1..331: mol_type = other DNA
cagtctgccctgactcagcctcgctcagtgtccgggtctcctggacagtcagtcaccatctcctgcactggaaccagcagtgatgttggtggttataactatgtctcctggtaccaacagcacccaggcaaagcccccaaactcatgatttatgatgtcagtaagcggccctcaggggtccctgatcgcttctctggctccaagtctggcaacacggcctccctgaccatctctgggctccaggctgaggatgaggctgattattactgctgctcatatgcaggcagctacaccgtggtattcggcggagggaccaagctgaccgtcctag

SEQ ID NO: 2647 - DNA, 325 bp, Homo sapiens
  source 1..325: mol_type = other DNA
gaaattgtgttgacgcagtctccaggcaccctgtctttgtctccaggggaaagagccaccctctcctgcagggccagtcagagcgttagcagcagctacttagcctggtaccagcagaaacctggccagactcccaggctcctcatctatggtgcatcgagcagggccactggcatcccagacagattcagtggcagtgggtctgagacagagttcactctcaccatcagcagagtggagccggaagatttcgcagtgtattactgtcagcagtatggtagctcaaccctcactttcggcggagggaccaaggtggagatcaaac

SEQ ID NO: 2648 - DNA, 325 bp, Homo sapiens
  source 1..325: mol_type = other DNA
gaaattgtgttgacgcagtctccaggcaccctgtctttgtctccaggggaaggggccaccctctcctgcagggccagtcagagtgttagcagcagctccttagcctggtaccagcagaaacctggccaggctcccaggctcctcatctatggtgcatctaccagggccactggcacccctgccaggttcattggcagagggtctgggacagagttcactctcaccatcaacagactggagcctgaagactttgcagtgtattactgtcagcaatatgatagttcaatcctcactttcggcggagggaccaaggtggagatccaac

SEQ ID NO: 2649 - DNA, 325 bp, Homo sapiens
  source 1..325: mol_type = other DNA
gaaattgtgttgacgcagtctccaggcaccctgtctttgtctccaggggaaagagccaccctctcctgcagggccagtcagagtgttagcagcagctacttagcctggtaccagcagaaacctggccaggctcccaggctcctcatctatggtgcatccagcagggccactggcatcccagacaggttcagtggcagtgggtctgggacagacttcactctcaccatcagcagactggagcctgaagattttgcagtgtattactgtcagcagtatggtagctcacggcggacgttcggccaagggaccaaggtggaaatcaaac

SEQ ID NO: 2650 - DNA, 325 bp, Homo sapiens
  source 1..325: mol_type = other DNA
gaaatagtgatgacacagtctccagccaccctgtctgtgtctccaggggaaagagccaccctctcctgcagggccagtcagagtattagcagcgacttagcctggtaccagcagaaacctggccaggctcccaggctcctcatctatgctgcatccaccagggcgactggtatcccagccaggttcagtggcagtgggtctgggacagagttcgctctaaccatcaccagcatgcagtctgaagattttgcagtttattactgtcagcagtataatatctggcctccgctcactttcggcggagggaccaaggtggagatcaaac

SEQ ID NO: 2651 - DNA, 322 bp, Homo sapiens
  source 1..322: mol_type = other DNA
gacatccagatgacccagtctccatcctccctgtctgcatctgtaggagacagagtcaccatcacttgccaggcgagtcaggacattagcaactatttaaattggtatcagcagaaaccagggaaagcccctaagctcctgatctacgatgcatccaatttggaaacaggggtcccatcaaggttcagtggaagtggatctgggacagattttactttcaccatcagcagcctgcagcctgaagatattgcaacatattactgtcaacagtatgataatctcccccgccttttcggcggagggaccaaggtggagatcaaac

SEQ ID NO: 2652 - DNA, 325 bp, Homo sapiens
  source 1..325: mol_type = other DNA
gaatttgtgttgacgcagtctccaggcaccctgtctttgtctccaggggaaagagccaccctctcctgcagggccagtcagagtattagcgacaactccttagcctggtaccagcagaaacctggccaggctcccaggctcctcatctatggtgcatccagcagggccactggcatcccagacaggttcagtggcagtgggtctgggacagacttcactctcatcatcagtagattggaggctgaagattttgcagtatattactgtcagcaatatggtggctcaacggggacgttcggccaagggaccaaggtggatatcaaac

SEQ ID NO: 2653 - DNA, 322 bp, Homo sapiens
  source 1..322: mol_type = other DNA
gccatccggatgacccagtctccatcctcactctctgcatctacaggagacagagtcaccatcacttgtcgggcgagtcagggtattagcagttatttagcctggtatcagcaaaaaccagggaaagcccctaagctcctgatctatgctgcatccactttgcaaagtggggtcccatcaaggttcagcggcagtggatctgggacagatttcactctcaccatcagctgcctgcagtctgaagattttgcaacttattactgtcaacagtattatagttacccgtacacttttggccaggggaccaagctggagatcaaac

SEQ ID NO: 2654 - DNA, 325 bp, Homo sapiens
  source 1..325: mol_type = other DNA
gaaattgtgttgacacagtctccagccaccctgtctttgtctccaggggaaagagccaccctctcctgcagggccagtcagagtgttagtagttacttagcctggtaccaacagaaacctggccaggctcccaggctcctcatctatgatgcatccaacagggccactggcatcccagccaggttcagtggcagtgggtctgggacagacttcactctcaccatcagcggcctagagtctgaagattttgcagtttattactgtcagcagcgtagcaactggcctccgatcaccttcggccaagggacacgactggagattaaac

SEQ ID NO: 2655 - DNA, 318 bp, Homo sapiens
  source 1..318: mol_type = other DNA
gacatccagatgacccagtctccatcctccctgtctgcatctgttggagacaaagtcaccatcacctgccgggcaagtcaggatattagtagatatttaaattggtatcagcagaaaccagggaaagcccctagactcctcatctctgatacatccactttgcaaagtggggtcccatcaaggttcagtggcagtggatctcgggcagatttcactctcaccatcaacaatctgcaacctgaagattttgcaacttactactgtcaacaaagtttcagtatgtacaattttggccaggggaccaagctggagatcaaa

SEQ ID NO: 2656 - DNA, 337 bp, Homo sapiens
  source 1..337: mol_type = other DNA
gatgttgttctgactcagtctccactctccctgtccgtcacccttggacagccggccgcaatttcctgcaagtctagtcagagcctcgtctacagtgatggcgacacttacttaatttggttgcaacaaaggccaggccaggctccaaggcgcctaatttctaaggtttctgttcgggactctggggtcccagacagattcagtgccagtgggtcaggcaccgattttactctgaaaatcagcagggtggaggctgaagatgttggcgtctattattgcatgcaaggttcattctggcctcccacttttggcggagggaccagggtgcagatcaaac

SEQ ID NO: 2657 - DNA, 319 bp, Homo sapiens
  source 1..319: mol_type = other DNA
gacatccagatgacccagtctccatcctcagtgtctgcatctgttggagacagagttaccatcacttgtcgggcgagtcagggcattagcaatttcttagtttggtttcagcagaaaccagggaaagcccctaagtccctgatctatgctgcatccactttgcaaagaggggtcccatcaaggttcagcggcagtggatctgggacagatttcactctcaccatcagcagcctgcagcctgaagattttgcaacttattactgccaacactatgatggttaccctcggacgttcggccaagggaccaaggtggagatca

SEQ ID NO: 2658 - DNA, 334 bp, Homo sapiens
  source 1..334: mol_type = other DNA
gatgttgtgatgactcagtctccactctttctgcccgtcacccttggacagtcggcctccatctcctgcaggtctggtcgaagcctcgtacatagtgatggaaatatctactttaattggtttaggtggaggccaggccagtctccaaggcgcctaatttatagaacttctaaccgagactctggggtcccggacagattcagcggcagtggatcaggcactgacttcactctgaggatcagcagggtggaggctgaggatgttggggtctattactgcatgcaaggtacacattggccgtacacttttggccaggggaccaagctggagatca

SEQ ID NO: 2659 - DNA, 325 bp, Homo sapiens
  source 1..325: mol_type = other DNA
gaaattgtgttgacgcagtctccaggcaccctgtctttgtctccaggggaaagagccaccctctcctgcagggccagtcagagtgttagcagcagctacttagcctggtaccagcagaaacctggccaggctcccaggctcctcatctatggtgcatccagcagggccactggcatcccagacaggttcagtggcagtgggtctgggacagacttcactctcaccatcagcagactggagcctgaagattttgcagtgtattactgtcagcagtatggtagctcacctccgactttcggcggagggaccaaggtggagatcaaac

SEQ ID NO: 2660 - DNA, 331 bp, Homo sapiens; identical to SEQ ID NO: 2406
  source 1..331: mol_type = other DNA

SEQ ID NO: 2661 - DNA, 340 bp, Homo sapiens
  source 1..340: mol_type = other DNA
gacatcgtgatgacccagtctccagactccctggctgtgtctctgggcgagagggccaccatcaactgcaagtccagccagagtgttttatacagctccaacaataagaactacttagcttggtaccagcagaaaccaggacagcctcctaagctgctcatttactgggcatctacccgggaatccggggtccctgaccgattcagtggcagcgggtctgggacagatttcactctcaccatcagcagcctgcaggctgaagatgtggcagtttattactgtcagcaatattatagtactccattcactttcggccctgggaccaaagtggatatcaaac

SEQ ID NO: 2662 - DNA, 325 bp, Homo sapiens
  source 1..325: mol_type = other DNA
gaaattgtgttgacgcagtctccaggcaccctgtctttgtctccaggggaaagagccaccctctcctgcagggccagtcagagtgttagcagcagctacttagcctggtaccagcagaaacctggccaggctcccaggctcctcatctatggtgcatccagcagggccactggcatcccagacaggttcagtggcagtgggtctgggacagacttcactctcaccatcagcagactggagcctgaagattttgcagtgtattactgtcagcagtatggtagctcacctctcactttcggccctgggaccaaagtggatatcaaac

SEQ ID NO: 2663 - DNA, 325 bp, Homo sapiens
  source 1..325: mol_type = other DNA
gaaattgtgttgacacagtctccagccaccctgtctttgtctccaggggaaagagccaccctctcctgcagggccagtcagagtgttagcagctacttagcctggtaccaacagaaacctggccaggctcccaggctcctcatctatgatgcatccaacagggccactggcatcccagccaggttcagtggcagtgggtctgggacagacttcactctcaccatcagcagcctagagcctgaagattttgcagtttattactgtcagcagcgtagcaactggcctcccctcactttcggcggagggaccaaggtggagatcaaac

SEQ ID NO: 2664 - DNA, 334 bp, Homo sapiens
  source 1..334: mol_type = other DNA
cagtctgccctgactcagcctgcctccgtgtctgggtctcctggacagtcgatcaccatctcctgcactggaaccagcagtgacgttggtggttataactatgtctcctggtaccaacaacacccaggcaaagcccccaaactcatgatttatgatgtcagtaatcggccctcaggggtttctaatcgcttctctggctccaagtctggcaacacggcctccctgaccatctctgggctccaggctgaggacgaggctgattattactgcagctcatatacaagcagcagcactctcgtggtattcggcggagggaccaagctgaccgtcctag

SEQ ID NO: 2665 - DNA, 325 bp, Homo sapiens
  source 1..325: mol_type = other DNA
gaatttgtgttgacgcagtctccaggcaccctgtctttgtctccaggggaaagagccgccctctcctgcagggccagtcagagtattagcgacaactacttagcctggtaccagcagaaacctggccaggctcccaggctcctcatctatggtgcatctaacagggccactggcatcccagacaggttcagtggcagtgggtctgggacagacttcactctcaccatcagcagattggagtctgaagattttgcagtgtattactgtcagcagtatggaagctcaacggggacgttcggccaagggaccagggtggaaatcaaac

SEQ ID NO: 2666 - DNA, 328 bp, Homo sapiens
  source 1..328: mol_type = other DNA
gaaattgtgttgacgcagtctccaggcaccctgtctttgtctccaggggaaagggccaccctctcctgcaggaccagtcagagtattagcagcacctacttagcctggtaccagcaacaacctggccaggctcccatactcctcatctatggtgcatccaccagggccactggcatcccagacaggttcagtggcagtgggtctgggacagacttcactctcaccatcagcagactggagcctgaagattttgcagtgtattactgtcagcaatatggtaactccccccgtgtaacgttcggccaagggaccaaggtggaaatcaaac

SEQ ID NO: 2667 - DNA, 325 bp, Homo sapiens
  source 1..325: mol_type = other DNA
tcctatgtgctgactcagccaccctcagtgtcagtggccccaggaaagacggccaggattacctgtgggggaaacaacattggaagtaaaagtgtgcactggtaccagcagaagccaggccaggcccctgtgctggtcatctattatgatagcgaccggccctcagggatccctgagcgattctctggctccaactctgggaacacggccaccctgaccatcagcagggtcgaagccggggatgaggccgactattactgtcaggtgtgggatagtagtagtgatcccgtggtattcggcggagggaccaagctgaccgtcctag

SEQ ID NO: 2668 - DNA, 325 bp, Homo sapiens
  source 1..325: mol_type = other DNA
gaaattgtgttgacgcagtctccaggcaccctgtctttgtctccaggggaaagagtcaccctctcctgcagggccagtcagagtgttagcagccgctacttagcctggtaccagcagaaacctggccaggctcccaggctcctcatttatggtgcatccagcagggccactggcatcccagacaggttcagtggcagtgggtctgggacagacttcactctcaccatcaacagactggagcctgaagattttgcagtttattactgtcagcagtatggtaactcaccgctcaccttcggcggagggaccaaggtggagatcaaac

SEQ ID NO: 2669 - DNA, 325 bp, Homo sapiens
  source 1..325: mol_type = other DNA
gaaatagtgatgacccagtctccagccaccctgtctgtgtctccaggggaaagagccaccctctcctgcagggccagtcagagtgttggcagcaagttagcctggtaccagcagaaacctggccaggctcccaggctcctcatctctggtgcatccaccagggccactgggatcccagccaggttcagtggcagtgggtctgggacagagttcactctcaccatcagcagcgtgcagcctgaagatttcgcagtttattactgtcaacagtataataactggcctccgctcactttcggcggagggaccaaggtggagatcaaac

SEQ ID NO: 2670 - DNA, 325 bp, Homo sapiens
  source 1..325: mol_type = other DNA
gaaattgtgttgacgcagtctccaggcaccctgtctttgtctccaggggaaagagccaccctctcctgcagggccagtcagagtgttaccagcagctacttagcctggtaccagcagaaacctggccaggctcccaggctcctcatctatggtgcatccagcagggccactggcatcccagacaggttcagtggcagtgggtctgggacagacttcactctcaccatcaccagactggaggctgaagattttgcagtgtattactgtcagcagtatggtagctcaccgctcactttcggcggagggaccaaggtggagatcaaac

SEQ ID NO: 2671 - DNA, 320 bp, Homo sapiens
  source 1..320: mol_type = other DNA
gacatccaattgacccagtctccatcctccctgtctgcatctgttggagacagagtcaccattacttgccgggcgagtcagggtattagcaattctttggcctggtatcagcagaaaccagggaaagcccctaagctcctggtttacgctacatccaatttggagagtggggtcccatccaggttcagtggaagtggatctgggtcggattacagtctcaccatcaccagcctgcagcctgaagattttgcaacttatcactgtcaccaatattatagtcccccgtggacgttcggccaagggaccaaggtggaagtcaa

SEQ ID NO: 2672 - DNA, 316 bp, Homo sapiens
  source 1..316: mol_type = other DNA
gaaattgtgttgacacagtctccagccaccctgtctttgtctccaggggaaagagccaccctctcctgcagggccagtcagagtgttagcagctacttagcctggtaccaacagaaacctggccaggctcccaggctcctcatctatgatgcatccaacagggccactggcatcccagccaggttcagtggcagtgggtctgggacagacttcactctcaccatcagcagcctagagcctgaagattttgcagtttattactgtcagcagcgtagctcgtacacttttggccaggggaccaagctggagatcaaac

SEQ ID NO: 2673 - DNA, 325 bp, Homo sapiens
  source 1..325: mol_type = other DNA
gaaatagtgatgacgcagtctccagccaccctgtctgtgtctccaggggaaagagccaccctctcctgcagggccagtcagagtgttagcagcaacttagcctggtaccagcagaaacctggccaggctcccaggctcctcatctatggtgcatccaccagggccactggtatcccagccaggttcagtggcagtgggtctgggacagagttcactctcaccatcagcagcatgcagtctgaagattttgcagtttattactgtcagcagtataataactggcccatgtacacttttggccaggggaccaagctggagatcaaac

SEQ ID NO: 2674 - DNA, 322 bp, Homo sapiens
  source 1..322: mol_type = other DNA
gacatccagatgacccagtctccatcctccctgtctgcatctgtaggagacagagtcaccatcacttgccaggcgagtcaggacattagcaactatttaaattggtatcagcagaaaccagggaaagcccctaagctcctgatctacgatgcatccaatttggaaacaggggtcccatcaaggttcagtggaagtggatctgggacagattttactttcaccatcagcagcctgcagcctgaagatattgcaacatattactgtcaacagtatgataatctcccgtacacttttggccaggggaccaagctggagatcaaac

SEQ ID NO: 2675 - DNA, 331 bp, Homo sapiens
  source 1..331: mol_type = other DNA
cagtctgccctgactcagcctgcctccgtgtctgggtctcctggacagtcgatcaccatctcctgcactggaaccagcaatgatgttggtggttataactatgtctcctggtaccaacagcacccaggcaaagcccccaaagtcatgatttatgatgtcagtaagcggccctcaggggtttctaatcgcttctctggctccaggtctggcaacacggcctccctgacaatctctgggctccaggctgaggacgaggctgattattactgctgctcatatgcacatagtagaacttatgtcttcggaactgggacccaggtcaccgtcctag

SEQ ID NO: 2676 - DNA, 334 bp, Homo sapiens
  source 1..334: mol_type = other DNA
gatgttgtgatgactcagtctccactctccctgcccgtcccccttggacagccggcctccatctcctgcaggtctagtcaaggcctcgtatacattgatggaaacacctacttgagttggtttcagcagaggccaggccaatctccaaggcgcctaatttataagatttctaaccgggactctggggtcccagacagattcagcggcagtgggtcaggcactgatttcactctgaaaatcagcagggtggaggctgaagatgttggggtttattactgcatgcaaggtacacacggagggacttttggccaggggaccaagctggagatcaaac

SEQ ID NO: 2677 - DNA, 328 bp, Homo sapiens
  source 1..328: mol_type = other DNA
tcctatgtgctgcctcagccaccctcagtgtcagtggccccaggaaagacggccaggattccctgtgggggaaccaacattggaagtaaaagtgtgcactggtaccaacagaagccaggccaggcccctgttctggtcatctatgataatagcgaccggccctcagggatccctgagcgattctctggctccaactctgggaacacggccaccctgaccatcagcagggtcgaagccggggatgaggccgactattactgtcagttttgggatagtagtactgatcttctctatgtcttcggaactgggaccaaggtcaccgtcctag

SEQ ID NO: 2678 - DNA, 337 bp, Homo sapiens
  source 1..337: mol_type = other DNA
gatattgtcatgacccagactcctctctctctgtccgtcacccctggacagccggcctccatctcctgcaagtctagtcagagcctcctccatagtgatggaaagacctatttgtattggtacctgcagaagccaggccagcctccacaactcctgatctatgaagtttccaaccggttctctggagtgccagataggtgcagtggcagcgggtcagggacagatttcacactgaaaatcagccgggtggaggctgaggatgttggcatttattactgcatgcaaagtaaacagcttcctccgacgttcgggcaagggaccaaggtggaaatcaaac

SEQ ID NO: 2679 - DNA, 325 bp, Homo sapiens
  source 1..325: mol_type = other DNA
gacatccagatgacccagtctccatcctccctgtctgcatctgtaggagacagagtcaccatcacttgccaggcgagtcaggacattagcaactatttaaattggtatcagcagaaaccagggaaagcccctaagctcctgatctacgatgcatccaatttggaaacaggggtcccatcaaggttcagtggaagtggatctgggacagattttactttcaccatcagcagcctgcagcctgaagatattgcaacatattactgtcaacagtatgataatctcctttcgctcactttcggcggagggaccaaggtggagatcaaac

SEQ ID NO: 2680 - DNA, 337 bp, Homo sapiens
  source 1..337: mol_type = other DNA
gatattgtgatgacccagactccactctctctgtccgtcacccctggacagccggcctccatctcctgcaagtctagtcagagcctcctgcatagtgatggaaagacctatttgtattggtacctgcagaagccaggccagcctccacagctcctgatctatgaagtttccaaccggttctctggagtgccagataggttcagtggcagcgggtcagggacagatttcacactgaaaatcagccgggtggaggctgaggatgttggggtttattactgcatgcaaagtatacagcttccgtggacgttcggccaagggaccaaggtggaaatcaaac

SEQ ID NO: 2681 - DNA, 325 bp, Homo sapiens
  source 1..325: mol_type = other DNA
gaaatagtgatgacgcagtctccagccaccctgtctgtgtctccaggggaaagagccaccctctcctgcagggccagtcagagtgttagcagcaacttagcctggtaccagcagaaacctggccaggctcccaggctcctcatctatggtgcatccaccagggccactggtatcccagccaggttcagtggcagtgggtctgggacagagttcactctcaccatcagcagcctgcagtctgaagattttgcagtttattactgtcagcagtataataactggcctccggacacttttggccaggggaccaagctggagatcaaac

SEQ ID NO: 2682 - DNA, 331 bp, Homo sapiens
  source 1..331: mol_type = other DNA
cagtctgtgctgactcagccaccctcagcgtctggtacccccgggcagagggtcaccatctcttgttctggaagcaactccaacatcggaagtgattatgtatactggtaccagcagctcccaggaacggcccccaaactcctcatctataggaatgatcagcggccctcaggggtccctgaccgattctctggctccaagtctggcacctcagcctccctggccatcagtgggctccggtccgaagatgaggctgattattactgtgcagcatgggatgacagcctgagtggttgggtgttcggcggagggaccaagctgaccgtcctag

SEQ ID NO: 2683 - DNA, 340 bp, Homo sapiens
  source 1..340: mol_type = other DNA
gacatcgtgatgacccagtctccagactccctggctgtgtctctgggcgagagggccaccatcaactgcaagtccagtcagagtgttttatacagctccagcaataagaacttcttagcttggtaccagcagaaagcaggacagcctcctaagctgctcatttactgggcatctacccgggaatccggggtccctgaccgattcagtggcagcgagtctgggacagacttcactctcaccatcagcagcctgcaggctgaagatgtggcggtttattactgtcagcaatattatagtattcctcccacttttggccaggggaccaaggtggagatcaaac

SEQ ID NO: 2684 - DNA, 325 bp, Homo sapiens
  source 1..325: mol_type = other DNA
gaaatggtgatgacgcagtctccagccaccctgtctgtgtctccaggggaaagagccaccctctcctgcagggccagtcagagtgttagcagcaacttagcctggtaccagcagaaacctggccaggctcccaggctcctcatctatggtgcatccaccagggccactggtatcccagtcaggttcagtggcagtgggtctgggacagagttcactctcaccatcagcagcatgcagtctgaagattttgcagtttattactgtcagcagtatgatacctggcctccgtggacgttcggccaagggaccaaggtggaagtcaaac

SEQ ID NO: 2685 - DNA, 340 bp, Homo sapiens
  source 1..340: mol_type = other DNA
gacttcgtgatgacccagtctccagactccctggctctgtctctgggcgagagggccaccatcaactgcaagtccagccagaatgttttatgggactccaacaataagaattacttagcttggtaccagcagaaaccaggacagcctcctaagttgctcatttactgggcatctacccgggaatccggggtccctgaccgattcaccggcagcgggtctgggacagatttcactctcaccatcagcagcctgcaggctgaagatgtggcagtttatttctgtcatcaatattatagtgttccttacacttttggccaggggaccaagctggagatcaaac

SEQ ID NO: 2686 - DNA, 322 bp, Homo sapiens
  source 1..322: mol_type = other DNA
gacatccagatgacccagtctccatcctccctgtctgcatctgtgggagacagagtcaccatcacttgccgggcaagtcagtccatttccaaatactttaattggtatcagcagaagccagggaaagcccctaaactcctgatctatgctgcatccagtctgcaccgtgaggtcccatcacggttcagtggcagcggatctgggacagatttcaatctcaccgtcagcagtctgcaacctgaagattttgcaacttattactgtcaacagagttataagacccccttcactttcggccctgggaccaaagtggatttcaaac

SEQ ID NO: 2687 - DNA, 337 bp, Homo sapiens
  source 1..337: mol_type = other DNA
gatgttgtgatgactcagtctccactctccctgcccgtcacccttggacagccggcctccatctcctgcaggtctagtcaaagcctcgtatacattgatggaaacacctacttgaattggtttcagcagaggccaggccaatctccaaggcgcctaatttataaggtttctaaccgggactctggggtcccagacagattcagcggcagtgtttcaggcactgatttcacactgaaaatcagcagggtggaggctgaggatgttggggtttattactgcatgcaaggtacatactggcctcacacttttggccaggggaccaagctggagatcaaac

SEQ ID NO: 2688 - DNA, 319 bp, Homo sapiens
  source 1..319: mol_type = other DNA
tcctatgagctgactcagccaccctcagtgtccgtgtccccaggacagacagccagcatcacctgctttggagataaattgggggataaatatgcttgctggtatcagcagaagccgggccagtcccctgcattggtcatctatcaagataacaagcggccctcagggatccctgagcgattctctggctccaactctgggaacacagccactctgaccatcagcgggacccaggctacggatgagggtgactattactgtcaggcgtgggacaggagcactgcggtcttcggaactgggaccaaggtcaccgtcctag

SEQ ID NO: 2689 - DNA, 322 bp, Homo sapiens
  source 1..322: mol_type = other DNA
gacatccagatgacccagtctccatcctcactgtctgcatctgtaggagacagagtcaccatcacttgtcgggcgagtcagggcattagcaattatttagcctggtttcagcagaaaccagggaaagcccctaagtccctgatctatgctgcatccagtttgcaaagtggggtcccatcaaagttcagcggcagtggatctgggacagatttcactctcaccatcagcagcctgcagcctgaagattttgcaacttattactgccaacagtataatcgttaccctctcactttcggcggagggaccaaggtggagatcaaac

SEQ ID NO: 2690 - DNA, 340 bp, Homo sapiens
  source 1..340: mol_type = other DNA
gatgttgtgatgactcagtctccactctccctgcccgtcacccttggacagccggcctccatctcctgcaggtctagtcaaagcctcgtacacagtgatggaaacacctacttgaattggtttcagcagaggccaggccaatctccaaggcgcctaatttataaggtttctaaccgggactctggggtcccagacagattcagcggcagtgggtcaggcactgatttcacactgaaaatcagcagggtggaggctgaggatgttggggtttattactgcatgcaaggtacacactggcctcggctcactttcggcggagggaccaaggtggagatcaaac

SEQ ID NO: 2691 - DNA, 337 bp, Homo sapiens
  source 1..337: mol_type = other DNA
gatattgtgatgactcagtctccactctccctgcccgtcacccctggagagccggcctccatctcctgcaggtctagtcagagcctcctgcatagtaatggatacaactatttggattggtacctgcagaagccagggcagtctccacagctcctgatctatttgggttctaatcgggcctccggggtccctgacaggttcagtggcagtggatcaggcacagattttacactgaaaatcagcagagtggaggctgaggatgttggggtttattactgcatgcaagctctacaaacccctaggggttttggccaggggaccaagctggagatcaaac

SEQ ID NO: 2692 - DNA, 325 bp, Homo sapiens
  source 1..325: mol_type = other DNA
gacatccagttgacccagtctccatccttcctgtctgcatctgtaggagacagagtcaccatcacttgccgggccagtcagggcattagcagttatttagcctggtatcagcaaaaaccagggaaagcccctaagctcctgatctatgctgcatccactttgcaaagtggggtcccatcaaggttcagcggcagtggatctgggacagaattcactctcacaatcagcagcctgcagcctgaagattttgcaacttattactgtcaacagcttaatagttaccctccgctcactttcggcggagggaccaaggtggagatcaaac

SEQ ID NO: 2693 - DNA, 325 bp, Homo sapiens
  source 1..325: mol_type = other DNA
gaaatagtgatgacgcagtctccagtcaccctgtctgtgtctccaggggaaagagccaccctctcctgcagggccagtcagagtgttagcagcaacttagcctggtaccagcagaaacctggccaggctcccaggctcctcatctatggtgcatccaccagggccactggtatcccagccaggttcagtggcagtgggtctgggacagagttcactctcaccatcagcagcatgcagtctgaagattttgcagtttattactgtcagcagtataataactggcccccctggacgttcggccaagggaccaaggtggaaatcaaac

SEQ ID NO: 2694 - DNA, 325 bp, Homo sapiens
  source 1..325: mol_type = other DNA
gacatccagatgacccagtctccatcctccctgtctgcatctgtaggagacagagtcaccatcacttgccgggcaagtcagagcattagcacctatttaaattggtatcagcagaaaccagggaaagcccctaagctcctgatctatgctgcatccagtttgcaacttggggtcccatcaaggttcagtggcagtggatctgggacagatttcactctcaccatcagcagtctgcaacctgaagattttgcaacttactactgtcaacagagttacagtacccctcgttacacttttggccaggggaccaagctggaggtcaaac

SEQ ID NO: 2695 - DNA, 328 bp, Homo sapiens
  source 1..328: mol_type = other DNA
cagtctgtgctgactcagccaccctcagcgtctgggacccccgggcagagggtcaccatctcttgttctggaagcagctccaacatcggagttaatactgttagctggtaccagcaactcccaggatcgacccccaaactcctcatctatgctaatgatcagcggcccccaggggtccctggccgattttctggctccaagtctggcacctcagccgccctggccatcagtggtctccagtctgaggatgaggcttattactactgtgcagcgtgggatggcagactgaatggggtgttcggcggggggaccaagctgaccgtcctag

SEQ ID NO: 2696 - DNA, 324 bp, Homo sapiens
  source 1..324: mol_type = other DNA
ctgtggtgactcaggagccctcactgactgtgtccccaggaggggcagtcactctcacctgtgcttccagcactggagcagtcaccagtggtttctatccaaactggttccagcagaaacctggacaagcaccccgggcactgatttatagtacaagcaacaaacattcctggacccctgcccggttctcaggctccctccttgggggcaaagctgccctgacactgtcaggtgtacagcctgaggacgaggctgagtattactgcttgctctactatggtggtgcttgggtgttcggcggagggaccaagctgaccgtcctag

SEQ ID NO: 2697 - DNA, 322 bp, Homo sapiens
  source 1..322: mol_type = other DNA
gacatccagatgacccagtctccatcctccctgtctgcatctgttggagacaaagtcaccttcacctgccgggcaagtcacaatattagaaattatttaaattggtatcagcaaaaaccggggaaagcccctaacctcctcatttatactgcatccaatttgcatagtggggtcccatctaggttcagtggcagtggatctgggacagatttcactctcaccatcaccagtctgcaacctgaagattttgcaatttactactgtcaacagagttacgataccccctggacgttcggccaggggaccaaagtggaaatcaaac

SEQ ID NO: 2698 - DNA, 325 bp, Homo sapiens
  source 1..325: mol_type = other DNA
tcctatgtgctgactcagccaccctcagtgtcagtggccccaggaaagacggccaggattacctgtgggggaaacaacattggaagtaaaagtgtgcactggtaccagcagaagccaggccaggcccctgtgctggtcatctattatgatagcgaccggccctcagggatccctgagcgattctctggctccaactctgggaacacggccaccctgaccatcagcagggtcgaagccggggatgaggccgactattactgtcaggtgtgggatagtagtagtgatcatgtggtattcggcggagggaccaagctgaccgtcctag

SEQ ID NO: 2699 - DNA, 340 bp, Homo sapiens
  source 1..340: mol_type = other DNA
gacatcgtgatgacccagtctccagactccctggctgtgtctctgggcgagagggccaccatcaactgcaagtccagccagagtgttttatacagctccaacaataagaactacttagcttggtaccagcagaaaccaggacagcctcctaagctgctcatttactgggcatcttcccgggaatccggggtccctgaccgattcagtggcagcgggtctgggacagatttcactctcaccatcagcagcctgcaggctgaggatgtggcagtttattactgtcagcaatattataatattcctcccgctttcggcggagggaccaaggtggagatcaaac

SEQ ID NO: 2700 - DNA, 334 bp, Homo sapiens
  source 1..334: mol_type = other DNA
cagcttgtgctgactcaatcgccctctgcctctgcctccctgggagcctcggtcaagctcacctgcactctgagcagtggtcacagcagctacgccatcgcatggcatcagcagcagccagagaagggccctcgatacttaatgaggcttaacggtgatggcagccacagcaatggggacgggatccctgatcgcttctcaggctccagctctggggctgagcgctacctcaccatctccagcctccagtctgaggatgaggctgactattactgtcagacctggggcactggcactgtggtgttcggcggagggaccaagctgaccgtcctag

SEQ ID NO: 2701 - DNA, 340 bp, Homo sapiens
  source 1..340: mol_type = other DNA
gacatcgtgatgacccagtctccagactccctggctgtgtctctgggcgagagggccaccatcaactgcaagtccagccagactgttttatacagctccaacaactacaactacttagcttggtaccagcagaaaccaggacagcctcctaagctgctcatttactgggcatctacccgggaatccggggtccctgaccgattcattggcagcgggtctgggacagatttcactctcaccatcagcagcctgcaggctgaagatgtggcactttattactgtcaacaatattatagtattcctctcactttcggcggagggaccaaggtggagatcaaac

SEQ ID NO: 2702 - DNA, 337 bp, Homo sapiens
  source 1..337: mol_type = other DNA
gatattgtgatgactcagtctccactctccctgtccgtcacccctggagagtcggcctccatctcctgcaggtctagtcggagtctcctggatagtaatggatacagttatttggattggtacctgcagaagccaggacagtctccacaactcctgatctatttgggctccaatcgggcctccggggtccctgacaggttcagtggcagtggatcaggcacagacttcacactgcaaatcagcagagtggaggcggacgatgttggggtttattattgcatgcaaggcctgcaaactcccgtcactttcggcggagggaccaaggtggagatcaaac

SEQ ID NO: 2703 - DNA, 340 bp, Homo sapiens
  source 1..340: mol_type = other DNA
gacatcgtgatgacccagtctccagactccctggctgtgtctctgggcgagagggccaccatcaactgcaagtccagccagagtattgcatacagttccaacaataagaactacttagcttggtaccagcagaaaccaggacagtctcctaacctgctcatttactgggcatctacccgggaatccggggtccctgaccgattcagtggcagcgggtctgggacagatttcactctcactatcagcagcctgcaggctgaagatgtggcagtttattactgtcagcaatattatgctactccgtggacgttcggccaagggaccaaggtggagatcaaac

SEQ ID NO: 2704 - DNA, 331 bp, Homo sapiens
  source 1..331: mol_type = other DNA
tcttctgagctgactcaggaccctgctgtgtctgtggccttgggacagacagtcaggatcacatgccaaggagacagcctcagaagctattatgcaagctggtaccagcagaagccaggacaggcccctgtacttgtcatctatggtaaaaacaaccggccctcagggatcccagaccgattctctggctccagctcaggaaacacagcttccttgaccatcactggggctcaggcggaagatgaggctgactattactgtaactcccgggacagcagtggtaaccatcttggttgggtgttcggcggagggaccaagctgaccgtcctag

SEQ ID NO: 2705 - DNA, 319 bp, Homo sapiens
  source 1..319: mol_type = other DNA
gaaattgtgttgacacagtctccagccaccctgtctttgtctccaggggaaagagccaccctctcctgcagggccagtcagagtgttagcagctacttagcctggtaccaacagaaacctggccaggctcccaggctcctcatctatgatgcatccaacagggccactggcatcccagccaggttcagtggcagtgggtctgggacagacttcactctcaccatcagcagcctagagcctgaagattttgcagtttattactgtcagcagcgtagcattatgatcaccttcggccaagggacacgactggagattaaac

SEQ ID NO: 2706 - DNA, 322 bp, Homo sapiens
  source 1..322: mol_type = other DNA
gaaattgtgttgacgcagtctccaggcaccctgtctttgtctccaggggaaagagccatcctctcctgcagggccagtcagagtgttagcagcagctacttaggctggtaccagcagaaacctggccaggctcccaggctcctcatctatggtacatccaacagggccactggcatcccagacaggttcagtggcagtgggtctgggacagacttcactctcaccatcagcagactggagcctgaagattttgcagtgtattactgtcagcagtatggtaactcacccactttcggcggagggaccaaggtggagatcaaac

SEQ ID NO: 2707 - DNA, 340 bp, Homo sapiens
  source 1..340: mol_type = other DNA
gacatcgtgatgacccagtctccagactccctggctgtgtctctgggcgagagggccaccatcaactgcaagtccagccagaatgttttatacagctccaacaaaaagaactacttagcttggtaccagcagaaaccaggacagcctcctaagctgctcctttactgggcatctacccgggaatccggggtccctgaccgattcagtggcagcgggtctgggacagatttcactctcaccatcagcagcctgcaggctgaagatgtggcagtttattactgtcagcaatattatagtactccctccacgttcggccaagggaccaaggtggaaatcaaac

SEQ ID NO: 2708 - DNA, 322 bp, Homo sapiens
  source 1..322: mol_type = other DNA
gaaattgtgttgacgcagtctccaggcaccctgtctttgtctccaggggaaagagccaccctctcctgcagggccagtcagagtgttagcagcagctacttagcctggtaccagcagaaacctggccaggctcccaggctcctcatctatggtgcatccagcagggccactggcatcccagacaggttcagtggcagtgggtctgggacagacttcactctcaccatcagcagactggagcctgaagattttgcagtgtattactgtcagcagtatggtagctcccggacgttcggccaagggaccaaggtggaaatcaaac

SEQ ID NO: 2709 - DNA, 325 bp, Homo sapiens
  source 1..325: mol_type = other DNA
gaaattgtgttgacgcagtctccaggcaccctgtctttgtctccaggggaaagagccaccctctcctgcagggccagtcagagtgttagcaacaactacttagcctggtaccagcagaaacctggccaggctcccaggctcctcatctatggtgcatccagcagggccactggcatcccggacaggttcagtggcagtgggtctgggacagacttcactctcaccatcagcagactggagcctgaagattttgcagtgtatcactgtcagcagtatggtaggtttccgtggacgttcggccaagggaccagggtggaaatcaaac

SEQ ID NO: 2710 - DNA, 340 bp, Homo sapiens
  source 1..340: mol_type = other DNA
gacatcgtgatgacccagtctccagactccttggctgtgtctctgggcgagagggccaccatcaactgcaagtccagccagaatattttatacgactccaacgataagaactacttagcttggtaccagcagaaaccaggacagccccctaagttgctcatttactgggcatctacccgggaatccggggtccctgaccgattcagtggcagcgggtctgagacagatttcactctcaccatcagcggcctgcaggctgaagatgtggcagtttattactgtcagcaatattatagtactcctaggacgttcggccaagggaccaaggtggaaatcaaac

SEQ ID NO: 2711 - DNA, 325 bp, Homo sapiens
  source 1..325: mol_type = other DNA
gaaattgtgttgacgcagtctccaggcaccctgtctttgtctccaggggaaagagccaccctctcctgcagggccagtcagagtgttagcagcagttacttagcctggtaccagcaaaaacctggccaggctcccaggctcctcatctatgatgcatccagcagggccactggcatcccagacaggttcagtggcagtgggtctgggacagacttcactctcaccatcagcagactggagcctgaagattttgcactgtattactgtcagcagtatggtacctcaccccggacgttcggccaagggaccaacgtggaaatcaaac

SEQ ID NO: 2712 - DNA, 319 bp, Homo sapiens
  source 1..319: mol_type = other DNA
tcctatgagctgacacagccatcctcagtgtcagtgtctccgggacagacagccaggatcacctgctcaggagatgtactggcaaaaaaatatgctcggtggttccagcagaagccaggccaggcccctgtgctggtgatttataaagacagtgagcggccctcagggatccctgagcgattctccggctccagctcagggaccacagtcaccttgaccatcagcggggcccaggttgaggatgaggctgactattactgttactctgcggctgacaactcttgggtgttcggcggagggaccaagctgaccgtcctag

SEQ ID NO: 2713 - DNA, 322 bp, Homo sapiens
  source 1..322: mol_type = other DNA
gacatccagatgacccagtctccatcctccctgtctgcatctgtgggagacagagtcaccatcacttgccggtcaggtcagaccattttcacctatttaaattggtatcagcagaaaccagggaaagcccctaagctcctgatgtatggtacatccactttgcaaagtgaggtcccatcaaggttcagtggcagtggatctgggacagatttcactctcaccatcaacagtctgcaacctgaagattttgcaacttattactgtcagcagagttacgataccccgtggacgttcggccaagggaccagggtggaaatcaaac

SEQ ID NO: 2714 - DNA, 331 bp, Homo sapiens
  source 1..331: mol_type = other DNA
cagtctgccctgactcagcctgcctccgtgtctgggtctcctggacagtcgatcaccatctcctgcactggaaccagcagtgacgttggtggttataactatgtctcctggtaccaacagcacccaggcaaagcccccaaactcatgatttatgaggtcagtaatcggccctcaggggtttctaatcgcttctctggctccaagtctggcaacacggcctccctgaccatctctgggctccaggctgaggacgaggctgattattactgcagctcatatacaagcagcagctcttatgtcttcggaactgggaccaaggtcaccgtcctag

SEQ ID NO: 2715 - DNA, 334 bp, Homo sapiens
  source 1..334: mol_type = other DNA
gatattgtgatgacccagactccactctctctgtccgtcacccctggacagccggcctccatctcctgcaagtctagtcagagcctcctgcatagtgatggaaagacctatttgtattggtacctgcagaagccaggccagcctccacagctcctgatctatgaagtttccaaccggttctctggagtgccagataggttcagtggcagcgggtcagggacagatttcacactgaaaatcagccgggtggaggctgaggatgttggggtttattactgcatgcaaagtatacagcttcggacgttcggccaagggaccaaggtggaaatcaaac

SEQ ID NO: 2716 - DNA, 325 bp, Homo sapiens
  source 1..325: mol_type = other DNA
gacatccagatgacccagtctccttccaccctgtctgcatctgtaggagacagagtcaccatcacttgccgggccagtcagagtattagtgactggttggcctggtatcagcagaaaccagggaaagcccctaagctcttgatctataaggcgtctactttagaaagtggggtcccatcaaggttcagcggcagtggatctgggacagaattcactctcaccatcagcagcctgcagcctggtgattttgcaacttattactgccaacaatataatagttatcgcatgtacacttttggccaggggaccaagctggagatcaaac

SEQ ID NO: 2717 - DNA, 325 bp, Homo sapiens
  source 1..325: mol_type = other DNA
gaaatagtgatgacgcagtctccagccactttgtctgtgtctccgggagaaagagtcaccctctcctgcagggccggtcagagtcttaccagcgacttggcctggtaccagcagaaacctggccaggctccccggctcctcatctatgatgcatccaccagggccactggtgtccctgccaggttcagtggcagcgggtctgggacagagttcactctcaccatcagcagcctgcagtctgaagattttgcagtttattactgtcagcagtatcataactggccccctctcactttcggcggagggaccaaggtggagatcaaac

SEQ ID NO: 2718 - DNA, 322 bp, Homo sapiens
  source 1..322: mol_type = other DNA
gacatccagatgacccagtctccttccaccctgtctgcatctgtcggagacagagtcactatcacttgccgggccagtcagagtattaatgagtggttggcctggtatcagcagaaaccagggaaagcccctaaggtcctgatccataaggcatctagtttagaaagtggggtcccatccaggttcagcggcagtgcatctgggacagagttcactctcaccatcagcagcctggagcctgatgattttgcaacttattactgccaacagtacaacagttccccgtacacttttggccaggggaccaagctggacatcaaac

SEQ ID NO: 2719 - DNA, 322 bp, Homo sapiens
  source 1..322: mol_type = other DNA
gacatccagatgacccagtctccttccaccctgtctgcatctgtaggagacagagtcaccatcacttgccgggccagtcagagtattagtagctggttggcctggtatcagcagaaaccagggaaagcccctaagctcctgatctataaggcgtctagtttagaaagtggggtcccatcaaggttcagcggcagtggatctgggacagaattcactctcaccatcagcagcctgcagcctgatgattttgcaacttattactgccaacagtataatagttatctgtacacttttggccaggggaccaagctggagatcaaac

SEQ ID NO: 2720 - DNA, 340 bp, Homo sapiens
  source 1..340: mol_type = other DNA
cagtctgtgttgacgcagccgccctcagtgtctgcggccccaggacagaaggtcaccatctcctgctctggaagcagctccaacattgggaataattatgtatcctggtaccagcaactcccaggaacagcccccaaactcctcatctatgaaaataataggcgaccctcagggattcctgaccgattctctggctccaagtctggcacgtcagccaccctgggcatcaccggactccagactggggacgaggccgattattactgcggaacatgggatagcagcctgagtgctggccttaattctgtcttcggagctgggaccaaggtcaccgtcctag

SEQ ID NO: 2721 - DNA, 331 bp, Homo sapiens
  source 1..331: mol_type = other DNA
cagtctgccctgactcagcctgcctccgtgtctgggtctcctggacagtcgatcaccatctcctgcactggaaccagcagtgacgttggtggttataactatgtctcctggtaccaacagcacccaggcaaagcccccaaactcatgatttatgaggtcagtaatcggccctcaggggtttctaatcgcttctctggctccaagtctggcaacacggcctccctgaccatctctgggctccaggctgaggacgaggctgattattactgcagctcatatacaagcagcagcactctggtgttcggcggagggaccaagctgaccgtcctag

SEQ ID NO: 2722 - DNA, 340 bp, Homo sapiens
  source 1..340: mol_type = other DNA
gacttcgtgatgacccagtctccagactccctggctgtgtctctgggcgagagggccaccatcaactgcaagtccagccagagtgttttatacaactccaacaataagaactacttagcttggtaccagcagaaaccaggacagcctcctaaactgctcatttactgggcgtctacccgggaatccggggtccctgaccgattcagtggcagcgggtctgggacagatttcactctcaccatcagcagcctgcaggctgaagatgtggcagtttattactgtcagcaatattatgatactccttccaccttcggccaagggacacgactggagattaaac

SEQ ID NO: 2723 - DNA, 319 bp, Homo sapiens
  source 1..319: mol_type = other DNA
gacatccagctgacccagtctccatcctccctgtctgcttctgttggagacagggtcaccctctcttgccgggcgagtcaggacattaacaattctttagcctggtatcagcagagtccagggaaagcccctaagctcctgctctacgttgcatccagattgcaaagtggggtcccatccaggttcagtggcagtggatctgggacggattacactctcaccatcagcagcctgcagcctgaagattttgcaacttattactgtcaccagtatcatagtacccccacttttggccaggggacgaaggtggatatcaaac

SEQ ID NO: 2724 - DNA, 319 bp, Homo sapiens
  source 1..319: mol_type = other DNA
gccatccagttgacccagtctccatcctccctgtctgcatctgtgggagacagagtcaccatcacttgccgggcaagtcaggacattagtagtgctttagcctggtatcagcagaaaccagggaaagcccctaagctcctgatctatcatgcctccagtttggagagtggggtcccatcaaggttcagtggcagtggatctgggacagatttcactctcaccatcagcagcctgcagcctgaagattttgcaacttattactgtctacagtgtaatccttactatcgtttcggcggagggaccaaggtggagatcaaac

SEQ ID NO: 2725 - DNA, 322 bp, Homo sapiens
  source 1..322: mol_type = other DNA
gacatccagatgacccagtctccttccaccctgtctgcatcagtaggagacagagtcaccatcacttgccgggccagtcagagtattagtaggtggttggcctggtatcagcagaaaccagggaaagcccctaaactcctgatctataaggcgtctactttagaaagtggggtcccatcaaggttcagcggcagtggatctgggacagaattcactctcaccatcaacagcctgcagcctgatgattttgcaacttattactgccaacagtataatagtcagtggtgcacttttggccaggggaccaagctggagatcaaac

SEQ ID NO: 2726 - DNA, 325 bp, Homo sapiens
  source 1..325: mol_type = other DNA
gaaatagtgatgacgcagtctccagccacgctgtctgtgtctccaggggaaagaggcaccctctcctgcagggccagtcagagtgttagcagcaacttggcctggtaccagcagaaacctggccagcctcccaggctcctcatctatgatgcatccaccagggccactggtatcccagccaggttcagtggcagtgggtctgggacagagttcactctcaccatcagcagcatgcagtctgaagattttgcagtttatttttgtcagcagtactataactggcctccgattactttcggccctgggaccaaagtggatatcaaac

SEQ ID NO: 2727 - DNA, 328 bp, Homo sapiens
  source 1..328: mol_type = other DNA
gaaattgtgttgacgcagtctccaggcaccctgtctttgtctccaggggaaagagccaccctctcctgcagggccagtcagagtgttagcagcagctacttagcctggtaccagcagaaacctggccaggctcccaggctcctcatctatggtgcatccagcagggccactggcatcccagacaggttcagtggcagtgggtctgggacagacttcactctcaccatcagcagactggagcctgaagattttgcagtgtattactgtcagcagtatggtagctcacccttattcactttcggccctgggaccaaagtggatatcaaac

SEQ ID NO: 2728 - DNA, 328 bp, Homo sapiens
  source 1..328: mol_type = other DNA
gaaactgtgttgacgcagtctccaggcaccctgtctttgtctccaggggagagagccaccctctcctgcagggccagtcagaatattaacaacaactacttagcctggtaccagcagagacctggccaggctcccaggctcctcatctatggtgcgtccagcagggccactggcatcccagacaggttcagtggcagtgggtctgggacagacttcagtctcaccatcagcagactggagcctgaagattttgcagtgtattactgtcagcactatgggacctcacttttgagcacttttggccaggggaccaagttggagatcaaac

SEQ ID NO: 2729 - DNA, 322 bp, Homo sapiens
  source 1..322: mol_type = other DNA
gaaattgtgttgacgcagtctccaggcaccctgtctttgtctccaggggaaagagccaccctctcctgcagggccagtcagagtgttagcagcagctacttagcctggtaccagcagaaacctggccaggctcccaggctcctcatctatggtgcatccagcagggccactggcatcccagacaggttcagtggcagtgggtctgggacagacttcactctcaccatcagcagactggagcctgaagattttgcagtgtattactgtcagcagtatggtagctccccgacgttcggccaagggaccaaggtggaaatcaaac

SEQ ID NO: 2730 - DNA, 331 bp, Homo sapiens
  source 1..331: mol_type = other DNA
cagtctgccctgactcagcctgcctccgtgtctgggtctcctggacagtcgatcaccatctcttgcactggaaccaacagtgatgttgggagttataaccttgtctcctggtaccaacagcacccaggcaaagcccccaaactcatgatttatgagggcactaagcggccctcaggggtttctaatcgcttctctggctccaagtctggcaacacggcctccctgacagtctctgggctccaggctgaggacgaggctgagtattactgctgctcatatgcaggtagtaacagttgggtgttcggcggagggaccaagttgaccgtcctag

SEQ ID NO: 2731 - DNA, 325 bp, Homo sapiens
  source 1..325: mol_type = other DNA
tcttctgagctgactcaggaccctgctgtgtctgtggccttgggacagacagtcaggatcacatgccaaggagacagcctcagaaccttttatgcaagctggtaccagcagaagccaggacaggcccccgtacttgtcatctatggtaaaaacaaccggccctcagggatcccagaccgattctctggctccacctcaggaaacacagcttccttgaccatcactgggactcaggcggaagatgaggctgactattactgtaactcccgggacagcactggtaaggtctatgtcttcggaactgggacttacgtcaccgtcctag

SEQ ID NO: 2732 - DNA, 337 bp, Homo sapiens
  source 1..337: mol_type = other DNA
gaaattgtgatggcccagactccactctctctgtccgtcacccttggacagccggcctccatctcctgcaagtctagtcagagcctcctgcatagtgatggaaagacctatttgtgttggtacctgcaaaagccaggccagcctccacaactcctgatctatgaagtttccaaccggttctctggagtgccagacaggttcagtggcagcgggtcagggacagatttcacactgaagatcagccgggtggaggctgaagatgttggcacttatttctgcatgcaaagtgtacagcttcccctcaccttcggccaggggacacgactggacattaaac

SEQ ID NO: 2733 - DNA, 319 bp, Homo sapiens
  source 1..319: mol_type = other DNA
gacatccagttgacccagtctccttccaccctgtctgcatctgtaggagacagagtcaccatcacttgccgggccagtcagagtattagtagttggttggcctggtatcagcagaaaccagggaaagcccctaaactcctgatctataaggcgtctaatttagaacgtggggtcccatcaaggttcggcggcagtggatctgggacagaattcactctcaccatcagcagcctgcagcctgatgattctgcaacttattactgccatcagtatagtaggaagtacacttttggccaggggaccaagctggagatcaaac

SEQ ID NO: 2734 - DNA, 325 bp, Homo sapiens
  source 1..325: mol_type = other DNA
gaaattgtgttgacgcagtctccaggcaccttgtctttgtctccaggggaaagagccaccctctcctgcagggccagtcagagtattagcagcaactacttagcctggtaccaacagaaacctggccaggctcccaggctcctcatctatgatgcatccaggagggccactggcatcccagacaggttcagtggcagtgggtctgggacagacttcactctcactatcagcagactggagcctgaagattttgcagtgtattactgtcagcagtatggtggctcaccgctcactttcggcggagggaccaaggtggagatcaaac

SEQ ID NO: 2735 - DNA, 331 bp, Homo sapiens
  source 1..331: mol_type = other DNA
cagtctgtgctgacgcagccgccctcagtgtctggggccccagggcagagggtcaccatctcctgcactgggagcagctccaacatcggggcaggttatgatgtacactggtaccagcagcttccaggaacagcccccaaactcctcatctatggtaacagcaatcggccctcaggggtccctgaccgattctctggctccaagtctggcacctcagcctccctggccatcactgggctccaggctgaggatgaggctgattattactgccagtcctatgacagcaccctgagtgtggtattcggcggagggaccaagctgaccgtcctag

SEQ ID NO: 2736 - DNA, 322 bp, Homo sapiens
  source 1..322: mol_type = other DNA
gaaattgtgttgacgcagtctccaggcaccctgtctttgtctccaggggaaagagccaccctctcctgcagggccagtcagagtgttagcagcagctacttagcctggtaccagcagaaacctggccaggctcccaggctcctcatctatggtgcatccagcagggccactggcatcccagacaggttcagtggcagtgggtctgggacagacttcactctcaccatcagcagactggagcctgaagattttgcagtgtattactgtcagcagtatggtagctcaccccttttcggcggagggaccaaggtggagatcaaac

SEQ ID NO: 2737 - DNA, 319 bp, Homo sapiens
  source 1..319: mol_type = other DNA
gaaattgtgttgacacagtctccagccaccctgtctttgtctccaggggaaagagccaccctctcctgcagggccagtcagagtgttagcagctacttagcctggtaccaacagaaacctggccaggctcccaggctcctcatctatgatgcatccaacagggccactggcatcccagccaggttcagtggcagtgggtctgggacagacttcactctcaccatcagcagcctagagcctgaagattttgcagtttattactgtcagcagcgtagcaactggctcactttcggcggagggaccaaggtggagatcaaac

SEQ ID NO: 2738 - DNA, 337 bp, Homo sapiens
  source 1..337: mol_type = other DNA
gatattgtgatgactcagtctccactctccctgcccgtcacccctggagagccggcctccatctcctgcaggtctagtcagagcctcctgcatagtaatggatacaactatttggattggtacctgcagaagccagggcagtctccacagctcctgatctatttgggttctaatcgggcctccggggtccctgacaggttcagtggcagtggatcaggcacagattttacactgaaaatcagcagagtggaggctgaggatgttggggtttattactgcatgcaagctctacaaactcctgggacgttcggccaagggaccaaggtggaaatcaaac

SEQ ID NO: 2739 - DNA, 325 bp, Homo sapiens
  source 1..325: mol_type = other DNA
gacatccagatgacccagtctccttccaccctgtctgcatctgtaggagacagagtcaccatcacttgccgggccagtcagagtattagtagctggttggcctggtatcagcagaaaccagggaaagcccctaagctcctgatctataaggcgtctagtttagaaagtggggtcccatcaaggttcagcggcagtggatctgggacagaattcactctcaccatcagcagcctgcagcctgatgattttgcaacttattactgccaacagtataatagttattctccctggacgttcggccaagggaccaaggtggaaatcaaac

SEQ ID NO: 2740 - DNA, 322 bp, Homo sapiens
  source 1..322: mol_type = other DNA
gacatccagatgacccagtctccatcctccctgtctgcttctgttggagacaaggtcaccatcacctgccgggcaagtcacaatattagaacttatttaaattggtatcagcaaaaaccagggaaagcccctaacctcctcatttatactgcatcaaatttccaaagtggggtcccatctcggttcagtggcagtggatctgggacagatttcactctcaccatcaccagtctgcaacctgaagattttgcaacttacttctgtcaacagacttacgatactccctggacgttcggccaggggacccaagtggaactcaaac

SEQ ID NO: 2741 - DNA, 325 bp, Homo sapiens
  source 1..325: mol_type = other DNA
gccatccggatgacccagtctccatcctcactctctgcatctacaggagacagagtcaccatcacttgtcgggcgagtcagggtattagcagttatttagcctggtatcagcaaaaaccagggaaagcccctaagctcctgatctatgctgcatccactttgcaaagtggggtcccatcaaggttcagcggcagtggatctgggacagatttcactctcaccatcagctgcctgcagtctgaagattttgcaacttattactgtcaacagtattatagttaccccatgtacacttttggccaggggaccaagctggagatcaaac

SEQ ID NO: 2742 - DNA, 325 bp, Homo sapiens
  source 1..325: mol_type = other DNA
gaaattgtgttgacgcagtctccaggcaccctgtctttgtctccaggggaaagagccaccctctcctgcagggccagtcagagtgttagcagcagctacttagcctggtaccagcagaaacctggccaggctcccaggctcctcatctatggtgcatccagcagggccactggcatcccagacaggttcagtggcagtgggtctgggacagacttcactctcaccatcagcagactggagcctgaagattttgcagtgtattactgtcagcagtatggtagctcacccctcatttttggccaggggaccaagctggagatcaaac

SEQ ID NO: 2743 - DNA, 337 bp, Homo sapiens
  source 1..337: mol_type = other DNA
gatatcgtgatgacccagactccgctctctctgtccgtcacccctggacagtcggcctccatctcctgcaagtctagtcagcgcctcctgcacagtgatggaaagacctatctcttttggtacgtgcagaagccaggtcagcctccacaactcctgatccgtgaggtttccaaccggttctctggagtgtctgctaggttcagtggcagcgggtcagggacagatttcacactcaaaatcagccgggtggaggctgaggatgttgggatttattactgcatgcaaagtttacgacttcctctcactttcggcggagggaccaaggtggaaatcaaac

SEQ ID NO: 2744 - DNA, 367 bp, Homo sapiens
  source 1..367: mol_type = other DNA
tcctatgtactgactcagccgccctcagtgtcagtggccccgggacagacggccaggattacctgtgggggaaataacattggaataaaaagtgtgcactggtaccagcagaagacaggccaggcccctgtgttggtcgtctatgatgatagtgtccggccctcagggatccctgagcgattctctggctccaactctgggaacacggccaccgagcgattctctggctccaactctacgaacacggccaccctgaccatcagcagggtcgaagccggggatgaggccgagtattactgtcaggtgtgggatagtaatagtgatcatcttgtgatattcggcggagggaccaagctgagcgtcctag

SEQ ID NO: 2745 - DNA, 346 bp, Homo sapiens
  source 1..346: mol_type = other DNA
caggctgcgctgactcagccgtcttccctctctgcatctcctggagcatcagccagtctcacctgcaccttgcgcagtggcatcgatgttggtacctacagcatatactggtaccagcagaaggcagggagtcctccccagtatctcctgacgtacaaatcagactcagataagcagcagggctctggagtccccagccgcttctctggatccaaagatgcttcggccaatgcaggggttttactcatctctgggctccagtctgaagatgaggctgactattactgcatgatttggcacagcggcgcttgggtgttaggcggagggaccaggctgaccgtcctag

SEQ ID NO: 2746 - DNA, 325 bp, Homo sapiens
  source 1..325: mol_type = other DNA
gaaatagtgatgacgcagtctccagcgaccctgtctgtgtctccaggggaaagagccaccctctcctgcagggccagtcagagtgttagcagcaacttagcctggtaccagcagaaacctggccaggctcccaggctcctcatctatggtgcatccaccagggccactggtatcccagccaggttcagtggcagtgggtctgggacagacttcactctcaccatcagcagcctgcagtctgaagattttgcagtttattactgtcagcagtataataactggcccccgtacacttttggccaggggaccaagctggagatcaaac

SEQ ID NO: 2747 - DNA, 322 bp, Homo sapiens
  source 1..322: mol_type = other DNA
gacatccagatgacccagtctccttccaccctgtctgcatctgtaggagacagagtcaccatcacttgccgggccagtcagactgttagtaagtggttggcctggtatcagcagaaaccagggaaagcccctaagctcctcatctatgaggcgtctactttagaaagtggggtcccatcaaggttcagcggcagtggatctgggacagaattcactctcaccatcagcagcctacagcctgatgattttggaacctattactgccaacagtataatagttattggatcaccttcggccaagggacacgactggagattaaac

SEQ ID NO: 2748 - DNA, 322 bp, Homo sapiens
  source 1..322: mol_type = other DNA
gacatccagatgacccagtctccttccaccctgtctgcatttgtaggagacagagtcaccatcacttgccgggccagtcagactattagtagctggttggcctggtatcagcaaaagccagggaaagcccctaaactcctgatctataaggcgtctaatttagaaggtggggtcccatcaaggttcagcggcagcggatctgggacagaattcactctcaccatcagcagcctgcagccagatgattttgcattttattattgtcaacagtatgatagttatccgtacacttttggccaggggaccaagctggagatcaaac

SEQ ID NO: 2749 - DNA, 334 bp, Homo sapiens
  source 1..334: mol_type = other DNA
cagtctgccctgactcagcctcgctcagtgtccgggtctcctggacagtcagtcaccatctcctgcgctggaaccagcagtgatgttggtggttataactatgtctcctggtaccaacagcacccaggcaaagcccccaaactcatgattgatgatgtcagtaagcggccctcaggggtccctgatcgcttctctggctccaagtctggcaacacggcctccctgaccatctctgggctccaggctgaggatgaggctgattattactgctgctcatatgcaggcagctacagttattgggtgttcggcggagggaccaagctgaccgtcctag

SEQ ID NO: 2750 - DNA, 328 bp, Homo sapiens
  source 1..328: mol_type = other DNA
cagtctgccctgactcagcctcgctcagtgtccgggtctcctggacagtcagtcaccatctcctgcactggaaccagcagtgattttggtggttataactttgtctcctggtatcagcagcacccaggcaaagcccccaaactcatgatttatgatgtcactaagcggccctcaggggtccctgatcgcttctctggctccaagtctggcaacacggcctccctgaccatctctgggctccaggctgaggatgaggctgattattactgctgctcatatgcaggcaacccttatgtcttcggaactgggaccaaggttaccgtcctag

SEQ ID NO: 2751 - DNA, 331 bp, Homo sapiens
  source 1..331: mol_type = other DNA
cagtctgccctgactcagcctgcctccgtgtctgggtctcctggacagtcgatcaccatctcctgcactggaaccagcagtgacgttggtggttataactatgtctcctggtaccaacagcacccaggcaaagcccccaaactcatgatttatgaggtcagtaatcggccctcaggggtttctaatcgcttctctggctccaagtctggcaacacggcctccctgaccatctctgggctccaggctgaggacgaggctgattattactgcagctcatatacaagcagcagcacttgggtgttcggcggagggaccaagctgaccgtcctag

SEQ ID NO: 2752 - DNA, 331 bp, Homo sapiens; identical to SEQ ID NO: 2721
  source 1..331: mol_type = other DNA

SEQ ID NO: 2753 - DNA, 340 bp, Homo sapiens
  source 1..340: mol_type = other DNA
gacatcgtgatgacccagtctccagactccctggctctgtctctgggcgagagggccaccatcaactgcaagtccagccagaatgttttatgggactccaacaataagaattacttagcttggtaccagcagaaaccaggacagcctcctaagttgctcatttactgggcatctacccgggaatccggggtccctgaccgattcaccggcagcgggtctgggacagatttcactctcaccatcagcagcctgcaggctgaagatgtggcagtttatttctgtcatcaatattatagtgttccttacacttttggccaggggaccaagctggagatcaaac

SEQ ID NO: 2754 - DNA, 323 bp, Homo sapiens
  source 1..323: mol_type = other DNA
gaaattgtgttgacgcaatctccaggcaccctgtctttgtctccaggggaaagagccaccttctcctgcagggccagtcagagtattaagaacatctactcagcctggtaccagcagaaacctggccaggcccccaggctcctcatctatagtacatccaggagggccactggcatcccagacaggttcagtggcagtgggtcggggacagacttcactctcaccatcagcagactggagcctgaagattttgcagtgtattactgtcagcagtggattaactcacggtggacgttcggcctagggaccaaggtggaaatcaa

SEQ ID NO: 2755 - DNA, 340 bp, Homo sapiens
  source 1..340: mol_type = other DNA
gacttcgtgatgacccagtctccagactccctgtctgtgtctctgggcgagagggccaccatcaactgcaagtccagccagaatcttttatgggactccaacaacaagaactacttagcttggtaccagcagaaaccaggacagcctcctaagttgctcattcactgggcatctacccgggaatccggggtccctgaccgattcagtggcagcgggtctgggacagatttcactctcaccatcagcagcctgcaggctgaagatgtggcagtttattactgtcagcaatattatagtattcctctcactttcggcggggggaccaaggtggagatcaaac

SEQ ID NO: 2756 - DNA, 325 bp, Homo sapiens
  source 1..325: mol_type = other DNA
gaaattgtgttgacacagtctccagccaccctgtctttgtctccaggggaaagagccaccctctcctgcagggccagtcagagtgttagcaagttcttagcctggtaccaacaaaaacctggccaggctcccaggctcctcatctatgatgcatccaacagggccactggcatcccagccaggttcagtggcagtgggtctgggacagacttcactctcaccatcagcagcctagagcctgaagattttgcagtttattactgtcagcagcgtagcaactggcccgcgctcactttcggcggagggaccaaggtggagatcaaac

SEQ ID NO: 2757 - DNA, 319 bp, Homo sapiens
  source 1..319: mol_type = other DNA
tcctatgagctgactcagccaccctcagtgtccgtgtccccaggacagacagccagcatcacctgctctggagataaattgggggataaatatgcttgctggtatcagcagaagccaggccagtcccctgtgctggtcatctatcaagatagcaagcggccctcagggatccctgagcgattctctggctccaactctgggaacacagccactctgaccatcagcgggacccaggctatggatgaggctgactattactgtcaggcgtgggacagcagcactgtggtattcggcggagggaccaagctgaccgtcctag

SEQ ID NO: 2758 - DNA, 337 bp, Homo sapiens
  source 1..337: mol_type = other DNA
gatattgcgatgacccagactccactctctctgtccgtcacccctggacagccggcctccatctcctgcaagtctagtcagagcctcctgcatagtgatggaaagacgtatttgttttggtacatgcagaaggcaggccagcctccacagctcctgatctatgaagtttccaaccgcttctctggagtgccagataggttcagtggcagcgggtcagggacagatttcacattgaaaatcagccgggtggaggctgaggatgttggggtttattactgcatgcaaagtatacagcttcctcgaactttcggccctgggaccaaagtggatatcaaac

SEQ ID NO: 2759 - DNA, 337 bp, Homo sapiens
  source 1..337: mol_type = other DNA
gatattgtgatgacccagagtccactctctctgtccgtcacccctggacagccggcctccatctcctgcaagtctagtctgagcctcctggatagtgatggaaagacctatttgtattggtacctgcagaagccaggccagcctccacagctcctgatctatgaagtttccaaccgattctctggagtgccagataggttcagtggcagcgggtcagggacagatttcacactgaaaattagccgcgtggaggctgaggatgttggggtttattactgcatgcaaagtatacagcttcccatcactttcggcggagggaccaaggtggagatcaaac

SEQ ID NO: 2760 - DNA, 334 bp, Homo sapiens
  source 1..334: mol_type = other DNA
agtctgtgctgactcagccaccctcagcgtctggtctgcccgggcagagggtcaccatctcttgttctggaagcagctccaacatcggaaataattatgtatactggtaccagcagctcccaggaacggcccccaaactcctcatctataggaataatcagcggccctcaggggtccctgaccgattctctggctccaagtctggcacctcagcctccctggccatcagtgggctccggtccgaggatgaggctgattattactgtgcagcatgggatgacaccctgagtggtccgaattgggtgttcggcggagggaccaagctgaccgtcct

SEQ ID NO: 2761 - DNA, 322 bp, Homo sapiens
  source 1..322: mol_type = other DNA
gacatccagatgacccagtctccttccaccctgtctgcatctgtaggagacagagtcaccatcacttgccgggccagtcaaagtattagtaactggttggcctggtatcagcagaaaccagggaaagcccctaagctcctgatctataaggcgtctagtttagaaagtggggtcccatcaaggttcagcggcagtggatctgggacagagttcactctcgccatcagcagcctgcagcctgatgattttgcaacttattactgccaacagtataataattattttttcactttcggccctgggaccaaagtggatatcaaac

SEQ ID NO: 2762 - DNA, 338 bp, Homo sapiens
  source 1..338: mol_type = other DNA
tattgtgatgacccagactccactctctctgtccgtcacccctggacagccggcctccatctcctgtaagtctagtcagagcctcctgcatagtgatggaaagacctatttgtattggtacctgcagaagccaggccagtctccacagctcctgatgtatgaagtttccagccgattctctggagtgccagatagattcagtggcagcgggtcagggacagatttcacactgaaaatcagccgggtggaggctgaggatgttggcgtttactactgcatgcaaggtgttcaccttcctccggtcaccttcggccaagggacacgactggagattaaac

SEQ ID NO: 2763 - DNA, 325 bp, Homo sapiens
  source 1..325: mol_type = other DNA
gaaattgtgttgacgcagtctccagccatcctgtctttgtctccaggggaaagagccaccctctcctgcagggccagtcagaatcttgccagccgtttcttagcctggtaccaacaaaaacctggccaccctccccgtctcctcatctacggtgaatccagcaggggcactgacatcccagacaggttcagtggcagtgggtctgggacagacttcactctcaccatcagcagactggagcctgaggattttgcagtttattactgtcaccaatttggggcctcacagaagacgttcggccaagggaccaaggtggagatcaaac

SEQ ID NO: 2764 - DNA, 331 bp, Homo sapiens
  source 1..331: mol_type = other DNA
aattttatgctgactcagccccactctgtgtcggagtctccggggaagacggtaaccatctcctgcacccgcagcagtggcagcattgccagcaactatgtgcagtggtaccagcagcgcccgggcagttcccccaccactgtgatctatgaggataaccaaagaccctctggggtccctgatcggttctctggctccatcgacagctcctccaactctgcctccctcaccatctctggactgaagactgaggacgaggctgactactactgtcagtcttatgatagcagcaatcaggtgttcggcggagggaccaagctgaccgtcctag

SEQ ID NO: 2765 - DNA, 322 bp, Homo sapiens
  source 1..322: mol_type = other DNA
gacatccagatgacccagtctccttccaccctgtctgcatctgtaggagacagagtcaccatcacttgccgggccagtcagactattagtagctggttggcctggtatcagcacaaaccagggaaagcccctaaactcctgatctatcaggcgtctagtttagaaagtggggtcccatcaaggttcagcggcagtggatctgggacagagttcactctcaccatcagcagcctgcagcctgatgattttgcaacttattactgccaacagtataatagttatttctacacttttggccaggggaccaagctggagatcaaac

SEQ ID NO: 2766 - DNA, 334 bp, Homo sapiens
  source 1..334: mol_type = other DNA
aattttatgctgactcagccccactctgtgtcggagtctccggggaagacggtaaccatctcctgcacccgcagcagtggcagcattgccagcaactatgtgcagtggtaccagcagcgcccgggcagttcccccaccactgtgatctatgaggataaccaaagaccctctggggtccctgatcggttctctggctccatcgacagctcctccaactctgcctccctcaccatctctggactgaagactgaggacgaggctgactactactgtcagtcttatgatagcagcaatcaagtggtattcggcggagggaccaagctgaccgtcctag

SEQ ID NO: 2767 - DNA, 331 bp, Homo sapiens
  source 1..331: mol_type = other DNA
cagtctgccctgactcagcctccctccgtgtccgggtctcctggacagtcagtcaccatctcctgcactggaaccagcagtgacgttggtagttataaccgtgtctcctggtaccagcagcccccaggcacagcccccaaactcatgatttatgaggtcagtaatcggccctcaggggtccctgatcgcttctctgggtccaagtctggcaacacggcctccctgaccatctctgggctccaggctgaggacgaggctgattattactgcagctcatatacaagcagcagcaacgtggtattcggcggagggaccaagctgaccgtcctag

SEQ ID NO: 2768 - DNA, 323 bp, Homo sapiens
  source 1..323: mol_type = other DNA
gaaatagtgatgacgcagtctccagccaccctgtctgtgtctccaggggaaagagccaccctctcctgcagggccagtcagagtgttagcagcagcttagcctggtaccagcagaaacctggccaggctcccaggctcctcatctatggtgcatccaccagggccactggtatcccagccaggttcagtggcagtgggtctgggacagagttcactctcaccatcagcagcatgcagtctgaagattttgcaatttattactgtcagcagtatcatacctggcctccgtggacgttcggccaagggaccaaggtggaaatcaa

SEQ ID NO: 2769 - DNA, 325 bp, Homo sapiens
  source 1..325: mol_type = other DNA
gaaattttcttgacgcagtctccaggcaccctgtctttgtctccagggggaagagccaccctctcctgcagggccagtcagagtgttagcaacagccggttagcctggtaccagcagaaacctggccaggctcccaggctcatcatccatggtgcatccagcagggccactggcatcccagacaggttcagcggcagtgggtctgggacagacttcactctcaccatcagcagactggagcctgaagattttgcagtgtattactgtcagcagtatcgtagctcaccgctcactttcggcggagggaccaaggtggagatcaaac

SEQ ID NO: 2770 - DNA, 340 bp, Homo sapiens
  source 1..340: mol_type = other DNA
gacatcgtgatgacccagtctccagactccctggctgtgtctctgggcgagagggccaccatcaactgcaagtccagccagagtgttttatacacctccagcaataagaactacttagcttggtaccagcagaaaccaggacagcctcctaagctggtcatttactgggcatctacccgggcatccggggtccctgtccgattcagtggcagcgggtctgggacagatttcactctcaccatcagcagcctgcaggctgaagatgtggcagtttattactgtcagcaatattatagtactccgtggacgttcggccaagggaccaaggtggaaatcaaac

SEQ ID NO: 2771 - DNA, 322 bp, Homo sapiens
  source 1..322: mol_type = other DNA
gaaattgtgttgaggcagtctccaggcaccctgtctttgtctccaggggaaagagccaccctctcctgcagggccagtcagagtgttaacagcaactacttagcctggtaccagcagaaacctggccaggctcccaggctcctcatctatggtgcatccagcagggccactgacatcccagacaggttcagtggcagtgggtctggggcagatttcactctcaccatcagtagactggagcctgaagattttgcagtgtattactgtcagttatatggtggctttctcactttcggccctgggaccaaagtggatatcaaac

SEQ ID NO: 2772 - DNA, 328 bp, Homo sapiens
  source 1..328: mol_type = other DNA
gaaattgtgttgacgcagtctccagccaccctgtctttgtctccaggggaaagagccaccctctcctgcggggccagtcagagtgttagcagcaactacttagcctggtaccagcagaaacctggcctggcgcccaggctcctcatctatgatgcagccaccagggccactggcatcccagacaggttcagtggcagtgggtctgagacaaacttcactctcaccatcagcagactggagcctgaagattttgcagtgtattactgtcagcagtatggcacctcacattcattcactttcggccctgggaccaaagtggatatcaaac

SEQ ID NO: 2773 - DNA, 319 bp, Homo sapiens
  source 1..319: mol_type = other DNA
gacatccagatgacccagtctccatcctccctgtctgcatctgtaggagacagagtcaccatcacttgccaggcgagtcaggacattagcaactatttaaattggtatcagcagaaaccagggaaagcccctaagctcctgatctacgatgcatccaatttggaaacaggggtcccatcaaggttcagtggaagtggatctgggacagattttactttcaccatcagcagcctgcagcctgaagatattgcaacatattactgtcaacagtatgataatctcccccttttcggcggagggaccaaggtggagatcaaac

SEQ ID NO: 2774 - DNA, 322 bp, Homo sapiens
  source 1..322: mol_type = other DNA
gatatagtgatgacgcagtctccagccaccctttctgtgtctccaggggaaagagccaccctctcctgcagggccagtcagagtgttggcagcaacttagcctggtaccagcggaagcctggccagcctcccaagttcctcatttatggtgcatccaccagggtcattggtgtcccagccaggttcagtggcagtgggtctgggacagagttcactctcaccatcagcagcgtgcagtctgaagattttgcagtttattactgtcagcactataataactggcctcacactttcggcggagggaccaaggtggagatcaaac

SEQ ID NO: 2775 - DNA, 319 bp, Homo sapiens
  source 1..319: mol_type = other DNA
tcctatgagctgactcagccaccctcagtgtccgtgtccccaggacagacagccagcatcacctgctctggagataaattgggggataaatatgcttgctggtatcagcagaagccaggccagtcccctatgctggtcatctatcaagataccaagcggccctcagggatccctgagcgattctctggctccaactctgggaacacagccactctgaccatcagcgggacccaggctatggatgaggctgactattactgtcaggcgtgggacagcagcactggagtattcggcggagggaccaagctgaccgtcctag

SEQ ID NO: 2776 - DNA, 325 bp, Homo sapiens
  source 1..325: mol_type = other DNA
gacatccagatgacccagtctccttccaccctgtcagcatctgtaggagacagagtcaccatcacttgccgggccagtcagagtattagtcgctggttggcctggtatcagcagaaaccagggaaagcccctaaactcctgatctatcaggcgtctactttagaaagtggggtcccgtcaaggttcagcggcagtggatctgggacagaattcactctcaccatcagcagcctgcagcctgatgattttgcaacttattactgccaagagtataatggttattctccgtggacgttcggccaagggaccaaggtggaaatcaaac

SEQ ID NO: 2777 - DNA, 322 bp, Homo sapiens
  source 1..322: mol_type = other DNA
gacattcagatgacccagtccccatcatccctgtctgcatctgtaggagacagaatcaccatcacttgtcgagcaagtcagagcattatcacctatttaaattggtatcagcaaaaaccagggacagcccctaagctcctcatttatgctacatccaatttggaaggtggggtcccatcaaggttcagtggcagtggatctgggacagatttcactctcaccatcagcagtctgcaacctgaagattttgcaacttactactgtcaacagagttacgatacccctcaaacgttcggccaagggaccaaggtggaaatcaaac

SEQ ID NO: 2778 - DNA, 328 bp, Homo sapiens
  source 1..328: mol_type = other DNA
gaaattgtgttgacacagtctccagccaccctgtctttgtctccaggggaaagagccaccctctcctgcagggccagtcagagtgttagcagctacttagcctggtaccaacagaaacctggccaggctcccaggctcctcatctatgatgcatccaacagggccactggcatcccagccaggttcagtggcagtgggtctgggacagacttcactctcaccatcagcagcctagagcctgaagattttgcagtttattactgtcagcagcgtagcaactggcctccgggaatcactttcggccctgggaccaaagtggatatcaaac

SEQ ID NO: 2779 - DNA, 330 bp, Homo sapiens
  source 1..330: mol_type = other DNA
cagtctgccctgactcagcctgcctccgtgtctgggtctcctggacagtcgatcaccatctcctgcactggaaccagcagtgacgttggtgcttataactttgtctcctggtaccaacagcacccaggcaaagcccccaaactcatcatttatgaggtcagtaaccggccctcaggggtttctaatcgcttctctggctccaagtctggcaacacggcctccctgaccatctctgggctccaggctgaggacgaggctgattattactgcaactcatatagaagcgacagtactgacgtcttcggaactgggaccagggtcaccgtccta

SEQ ID NO: 2780 - DNA, 340 bp, Homo sapiens
  source 1..340: mol_type = other DNA
gatattgtgatgactcagtctccacactccctgcccgtcacccctggagagccggcctccatctcctgcaaatctagtcagagcctcctgcatagtaatggatacaactatttggtttggtacctgcagaagccagggcagtctccacagctcctgatctatttgggttctgatcgggcctccggggtccctgacaggttcagtggcagtggatcaggtacaaattttacactgaaaatcagcagagtggaggctgaggatgttggggtttattactgcatgcaagctctacacactcccatttacagttttggccaggggaccaagctggagatcaaac

SEQ ID NO: 2781 - DNA, 328 bp, Homo sapiens
  source 1..328: mol_type = other DNA
gaaattgtgttgacacagtctccagtcaccctgtctttgtctccaggggaaagagccaccctctcctgcagggccactcagagtgttaacaggtacttggcctggtaccaacaaaaacctggccaggctcccaggctcctcatctatgatgtatcccacagggccactggcatcccagccaggttcagtggcagtgggtctgggacagacttcactctcaccatcagcagcctagagcctgaagattttgcggtctattactgtcagcagcgtagcgactggcctcctacgtggacgttcggccaagggaccaaggtggaaatcaaac

SEQ ID NO: 2782 - DNA, 325 bp, Homo sapiens
  source 1..325: mol_type = other DNA
gaaatagtgatgacgcagtctccagccaccctgtctgtgtctccaggggaaagagccaccctctcctgcagggccagtcagagtgttagcagcaacttagcctggtaccagcagaaacctggccaggctcccaggctcctcatctatggtgcatccaccagggccactggtatcccagccaggttcagtggcagtgggtctgggacagagttcactctcaccatcagcagcctgcagtctgaagattttgcagtttattactgtcagcagtataataactggcctatgtacacttttggccaggggaccaagctggagatcaaac

SEQ ID NO: 2783 - DNA, 333 bp, Homo sapiens
  source 1..333: mol_type = other DNA
caacttgtggtgactcaatcgccctctgcctctgcctccctgggagcctcggtcaagctcacctgcactctgagcagtgggcacagcaactccgccatcgcatggcatcagcagcagccagagaagggccctcgttacttgatgaagattaacagtgatggcagccacaccaagggggacgggatccctgatcgcttctcaggctccagctctggggctgcgcgctacctcaccatctccagcctccagtctgaggatgaggctgactattactgtcagacctgggacactggcattcgggtgtttggcggagggaccaagctgaccgtccta

SEQ ID NO: 2784 - DNA, 338 bp, Homo sapiens
  source 1..338: mol_type = other DNA
gacatcgtgatgacccagtctccagactccctggctgtgtctctgggcgagagggccaccatcaactgcaagtccagccagaatgttttattcagttccaacaacaagaactacttagcttggtaccagcagaaacgaggacagcctcctaagttgctcatttcctgggcatctactcgggaatccggggtccctgaccgattcagtggcagcgggtctgggacagatttcactctcaccatcagcaacctgcaggctgaagatgtggcagtttactactgtcagcaatattatagtaaaccgctcactttcggcggtgggaccaaggtggagatcaa

SEQ ID NO: 2785 - DNA, 328 bp, Homo sapiens
  source 1..328: mol_type = other DNA
gaaattgtgttgacacagtctccagccaccctgtctttgtctccaggggaaagagccaccctctcctgcagggccagtcagagtgttagcagctacttagcctggtaccaacagaaacctggccaggctcccaggctcctcatctatgatgcatccaacagggccactggcatcccagccaggttcagtggcagtgggtctgggacagacttcactctcaccatcagcagcctagagcctgaagattttgcagtttattactgtcagcagcgtagcaactggcctcctttattcactttcggccctgggaccaaagtggatatcaaac

SEQ ID NO: 2786 - DNA, 320 bp, Homo sapiens
  source 1..320: mol_type = other DNA
gacatccaaatgtcccagtctccatcctccctgtctgcatctgtaggagacagagtcaccatcacttgtcgggcgagtcagggcattaagaatgatttagcctggtttcagcagagaccagggaaagcccctaagtccctgatctatgctgcatccagtttgcaaagtggggtcccatcaaagttcagcggcggtgggtctgggacagatttcactctcaccatcagcagcctgcagcctgaagattttgcgacttattactgccaacagtataatagtttcccttacacttttggccaggggaccaagctggagatcaa

SEQ ID NO: 2787 - DNA, 331 bp, Homo sapiens
  source 1..331: mol_type = other DNA
cagtctgccctgactcagcctgcctccgtgtctgggtctcttggacagtcgatcaccatctcctgcactggaaccagcagtgatgttgggaattataaccttgtctcctggtaccaacaacacccaggcaaagcccccaaattcataatttatgagggcactaagcggccctcaggggtttctaatcgcttctctggctccaagtctggcaacacggcctccctgacaatctctgggctccaggctgaggacgaggctgattatttctgctgctcatatgcagatggtagtactgcagtgttcggcggagggaccaagctgaccgtcctag

SEQ ID NO: 2788 - DNA, 322 bp, Homo sapiens
  source 1..322: mol_type = other DNA
gaaatagtgatgacgcagtctccagccaccctgtctgtgtctccaggggaaagagccaccctctcctgcagggccagtcagagtgttagcagcaacttagcctggtaccagcagaaacctggccaggctcccaggctcctcatctatggtgcatccaccagggccactggcatcccagccaggttcagtggcagtgggtctgggacagagttcactctcaccatcagcagcctgcagtctgaagattttgcagtttattactgtcagcagtataataactggcctccgacgttcggccaagggaccaaggtggaaatcaaac

SEQ ID NO: 2789 - DNA, 340 bp, Homo sapiens
  source 1..340: mol_type = other DNA
gacttcgtggtgacccagtctccagattccatggctgtgtctctgggcgagagggccaccctctactgcaagtccagccagagtgttttatacagctccaacaaaaagaactacttagcttggtaccagcagaaaccgggccagcctcctaagttgctcatttactgggcatctacccgggaatccggggtccctgaccgattcagtggcagcgggtctgggacagatttcactctcaccatcagcagcctgcagcctgaagatgtggcagtttattactgtcaacaatattatgatactcctccgaccttcggccaagggaccaaggtggaaatcaaac

SEQ ID NO: 2790 - DNA, 322 bp, Homo sapiens
  source 1..322: mol_type = other DNA
gacatccagttgacccagtctccatccttcctgtctgcatctgtaggagacagagtcaccatcacttgccgggccagtcagggcattagcagttatttagcctggtatcagcaaaaaccagggaaagcccctaagctcctgatctatgctgcatccactttgcaaagtggggtcccatcaaggttcagcggcagtggatctgggacagaattcactctcacaatcagcagcctgcagcctgaagattttgcaacttattactgtcaacagcttaatagttaccctctcactttcggcggagggaccaaggtggagatcaaac

SEQ ID NO: 2791 - DNA, 325 bp, Homo sapiens
  source 1..325: mol_type = other DNA
gaaataataatgacgcagtctccagccaccctgtctgtgtcgccaggggaaagagccaccctctcctgcagggccagccagagtgtcagtagcagcttagcctggtaccagcagaaacctggccaggctcccaggctcctcatctatggtgcatccacccgggccactggtatcccagtcaggttcagtggcagtgggtctgggacagagttcactctcaccatcaccggcttgcagtctgaagattttgcagtttattactgtcagcagtataataactggcctccgatcaccttcggccaagggacacgactggagattaaac

SEQ ID NO: 2792 - DNA, 325 bp, Homo sapiens
  source 1..325: mol_type = other DNA
gacatccagatgacccagtctccttccaccctgtctgcatctgtaggagacagagtcaccatcacttgccgggccagtcagagtattagtagctggttggcctggtatcagcagaaaccagggaaagcccctaagctcctgatctataaggcgtctagtttagaaagtggggtcccatcaaggttcagcggcagtggatctgggacagaattcactctcaccatcagcagcctgcagcctgatgattttgcaacttattactgccaacagtataatagttattctctgtggacgttcggccaagggaccaaggtggaaatcaaac

SEQ ID NO: 2793 - DNA, 333 bp, Homo sapiens
  source 1..333: mol_type = other DNA
cagtctgtgttgacgcagccgccctcagtgtctgcggccccaggacagaaggtcaccatctcctgctctggaagcagctccaacattgggaataattatgtatcctggtaccagcagctcccaggaacagcccccaaactcctcatttatgacaataataagcgaccctcagggattcctgaccgattctctggctccaagtctggcacgtcagccaccctgggcatcaccggactccagactggggacgaggccgattattactgcggaacatgggatagcagcctgagtgctgtttgggtgttcggcggagggaccaagctgaccgtccta

SEQ ID NO: 2794 - DNA, 322 bp, Homo sapiens
  source 1..322: mol_type = other DNA
gacatccagatgacccagtctccatcctccctgtctgcatctgtaggagaccgagtcaccatcacttgccgggcaagtgagaccattaacagctatttaaattggtatcagcagaaaccagggaaagcccctagcctcctgatctatgctgcatccactttggaaagtggagtcccatctaggttcagtggcagtggatctgggacagatttcactctcaccatcagcagtctgcaacctgaagattttgcaacttactactgtcaacagacttacaataccccgaccaccttcggccaagggacacgactggaaattaaac

SEQ ID NO: 2795 - DNA, 325 bp, Homo sapiens
  source 1..325: mol_type = other DNA
gaaatagtgatgacgcagtctccagccaccctgtctgtgtctccaggggaaagagccaccctctcctgcagggccagtcagagtgttagcagcaacttagcctggtaccagcagaaacctggccaggctcccaggctcctcatctatggtgcatccaccagggccactggtatcccagccaggttcagtggcagtgggtctgggacagagttcactctcaccatcagcagcctgcagtctgaagattttgcagtttattactgtcagcagtataataactggcctcggtggacgttcggccaagggaccaaggtggaaatcaaac

SEQ ID NO: 2796 - DNA, 331 bp, Homo sapiens
  source 1..331: mol_type = other DNA
cagtctgccctgactcagcctgcctccgtgtctgggtctcctggacagtcgatcaccatctcctgcactggaaccagcagtgatgttgggaattataaccttgtctcctggtaccaacaccacccaggcaaagcccccaaactcatcatttatgagggcagtaagcggccctcaggggtttctaatcgcttctctggctccaagtctggcaacacggcctccctgacaatctctgggctccaggctgaggacgaggctgcttattactgctgctcatatgcaggtagtagttcaggggtgttcggcggagggaccaagctgaccgtcctag

SEQ ID NO: 2797 - DNA, 325 bp, Homo sapiens
  source 1..325: mol_type = other DNA
gccatccagttgacccagtctccatcctccctgtctgcgtctgtcggagacagagtcaccattacttgccggacaagtcaggtcattagtagtgctttagcctggtatcagcagaaaccagggaaaggtcctaaactcctgatctatgatgcctccagtttggacagtggggtcccatcaaggttcagcggcagtggatctgggacagatttcactctcaccatcagcagcctgcagcctgaagattttgcaacttattactgtcaacagtttaatagttacccccgtgcgctctctttcggcggagggaccaaggtggagatca

SEQ ID NO: 2798 - DNA, 322 bp, Homo sapiens
  source 1..322: mol_type = other DNA
gacatccagatgacccagtctccttcctccctgtctgcatctgttggagacagagtcaccatcacttgccgggcaggtcagagcattagcagctatttaaattggtatcagcagaaacctgggaaagcccctaagctcctgatctatgctgcatccaatttacaaagtggggtcccatcaaggttcagtggcagtggatctgggacagatttcactctcaccatcagcagtctgcagcctgaagattttgcaacttactactgtcaacagagttacaataccccgatcaccttcggccaagggacacgactggagattaaac

SEQ ID NO: 2799 - DNA, 322 bp, Homo sapiens
  source 1..322: mol_type = other DNA
gccatccggatgacccagtctccatcctcattctctgcatctacaggagacagagtcaccatcacttgtcgggcgagtcagggtattagcagttatttagcctggtatcagcaaaaaccagggaaagcccctaagctcctgatctatgctgcatccactttgcaaagtggggtcccatcaaggttcagcggcagtggatctgggacagatttcactctcaccatcagctgcctgcagtctgaagattttgcaacttattactgtcaacagtattatagttaccctcgaacgttcggccaagggaccaaggtggaaatcaaac

SEQ ID NO: 2800 - DNA, 340 bp, Homo sapiens
  source 1..340: mol_type = other DNA
gacttcgtgatgacccagtctccagactccctggctgtgtctctgggcgagagggtcaccatcaactgcaagtccagccagagtgttttatacgactccaacaataagaactacttagcttggtaccagcagaaaccagggcagcctcctaaactgctcattcactgggcatctacccgggaatccggggtccctgaccgattcagtggcaccgggtctgggacagatttcactctcgccatcagcagcctgcaggctgaagatgtggcagtttattactgtcagcaatattatagtaatcctccgactttcggccctgggaccagagtggacatcaaac

SEQ ID NO: 2801 - DNA, 325 bp, Homo sapiens
  source 1..325: mol_type = other DNA
gagattgtgttgacacagtctccaggcaccctgtctttgtctccgggggaaggagccaccctctcctgcagggccagtcagagtgttagcagcagccacttagcctggtaccaacacaaacctggccaggctcccaggctcctcatctatggtgcatccagcagggccactggcatcccagacaggttcagtggcagtgggtctgggacagacttcactctcaccatcagcagagtggagcctgaagattttgcaatgtattactgtcaccagtatggtagctcaccgtccacttttggccaggggaccaagctggagatcaaac

SEQ ID NO: 2802 - DNA, 322 bp, Homo sapiens
  source 1..322: mol_type = other DNA
gaaatagtgatgacgcagtctccagccaccctgtctgtgtctccaggggaaagagccactctctcctgcagggccagtcagagtgttagcagcaacttagcctggtaccagcagaaacctggccaggctcccaggctcctcatctatggtgcatccaccagggccactggtatcccagccaggttcagtggcagtgggtctgggacagagttcactctcaccatcagcagcctgcagtctgaagatttcgcagtttattactgtcagcagtataataagtggcccctcactttcggccctgggaccaaagtggatatcaaac

SEQ ID NO: 2803 - DNA, 325 bp, Homo sapiens
  source 1..325: mol_type = other DNA
gaaatagtgatgacgcagtctccagccaccctgtctgtgtctccaggggaaagagccaccctctcctgcagggccagtcagagtgttagcagcaacttagcctggtaccagcagaaacctggccaggctcccaggctcctcatctatggtgcatccaccagggccactgatatcccagccaggttcagtggcagtgggtctgggacagaattcactctcaccatcagcagcctgcagtctgaagattttgcagtttattactgtcagcagtataataactggcctccgtggacgttcggccaagggaccaaggtggaaatcaaac

SEQ ID NO: 2804 - DNA, 331 bp, Homo sapiens
  source 1..331: mol_type = other DNA
cagactgtggtgacccaggagccatcgttctcagtgtcccctggagggacagtcacactcacttgtggcttgagctctggctcagtctctactagttactaccccagctggtaccagcagaccccaggccaggctccacgcacgctcatctacagcacaaacactcgctcttctggggtccctgatcgcttctctggctccatccttgggaacaaagctgccctcaccatcacgggggcccaggcagatgatgaatctgattattactgtgtgctgtatatgggtagtggcatttgggtgttcggcggagggaccaagctgaccgtcctag

SEQ ID NO: 2805 - DNA, 322 bp, Homo sapiens
  source 1..322: mol_type = other DNA
gacatccagttgacccagtctccttccaccctgtctgcatctgtaggaggcagagtcaccatcacttgccgggccagtcagagtattagtagctggttggcctggtatcagcagaaaccagggaaagcccctaaactcctgatctataaggcgtctagtttagaaagtggggtcccatcaaggttcagcggcagaggatctgggacagaattcactctcaccatcagcagcctgcagcctgatgattttgcaacttattactgccaacagtataatagttatttggggacgttcggccaagggaccaaggtggaaatcaaac

SEQ ID NO: 2806 - DNA, 322 bp, Homo sapiens
  source 1..322: mol_type = other DNA
tccgatgagctgacacagccaccctcggcatcagtgtctccaggacagacggccaggatcacctgctctggagatgcattgccaaagcaatatgcttattggtatcagcagaagtcaggccaggcccctgtgctggtgatatataaaggcagtgagaggccctcagggatccctgagcgattctctggctccagctcagggacaacagtcacgttgaccatcagtggagtccaggcagaagacgagggtgactattattgtcaatcaacagacaccaggggtatcgtggtattcggcggagggaccaagctgaccgtcctag

SEQ ID NO: 2807 - DNA, 337 bp, Homo sapiens
  source 1..337: mol_type = other DNA
cagtctgtgctgacgcagccgccctcagtgtctggggccccagggcagagggtcaccatctcctgcgctgggagcagctccaacatcggggcaggttatgatgttcactggtaccagcagcttccaggaacagcccccaaactcctcatctatggtaacagcaatcggccctcaggggtccctgaccgattctctggctccaagtctggcacctcagcctccctggccatcactgggctccaggctgaggatgaggctgattattattgccagtcctatgacaccaccctgagtggcatttatgtcttcggaactgggaccaaggtcaccgtcctag

SEQ ID NO: 2808 - DNA, 331 bp, Homo sapiens
  source 1..331: mol_type = other DNA
cagtctgccctgactcagcctgcctccgtgtctgggtctcctggacagtcgatcaccatctcctgcactggaaccagccgtgatgttgggaattataaccttgtctcctggtaccaacagcgcccaggcaaagcccccaaagtcttgatttatgagggcagtaagcggccctcaggggtttctaatcgtttctctggctccaagtctggcaacacggcctccctgacaatctctgggctccaggctgaggacgaggctgatttttactgctgctcatatgcaggtagtaatactgtcctattcggcggagggaccaagctgaccgtcctag

SEQ ID NO: 2809 - DNA, 322 bp, Homo sapiens
  source 1..322: mol_type = other DNA
gacatccagatgacccagtctccttccaccctgtctgcatctgtaggagacagagtcaccatcacttgccgggccagtcagactattagtagctggttggcctggtatcagcagaaaccagggaaagcccctaagctcctgatctatgaggcgtctaatttagaaagtggggtcccatcaaggttcagcggcagtggatctcggacagaattcactctcaccatcagcagcctgcagcctgatgattttgcaacttatttctgccaacagtataatagttatccgtacacttttggccaggggaccaagctggagatcaaac

SEQ ID NO: 2810 - DNA, 322 bp, Homo sapiens
  source 1..322: mol_type = other DNA
gaaatagtgatgacgcagtctccagccaccctgtctgtgtctccaggggaaagagccaccctctcctgcagggccagtcagagtgttagcagcaacttagcctggtaccagcagaaacctggccaggctcccaggctcctcatctatggtgcatccaccagggccactggtatcccagccaggttcagtggcagtgggtctgggacagagttcactctcaccatcagcagcatgcagtctgaagattttgcagtttattactgtcagcagtataataactggcctcgtacttttggccaggggaccaagctggagatcaaac

SEQ ID NO: 2811 - DNA, 322 bp, Homo sapiens
  source 1..322: mol_type = other DNA
gacatccagatgacccagtctccatcttccgtgtctgcatctgtgggagacagagtcaccatcacttgtcgggcgagtcaggatgttgccagctggttaatctggtatcagcagaaaccagggaaagcccctaagctcctgatctatgctgcatccagtttgcaaagtggagtcccatcaaggttcagcggcagtggatctgggacagatttcactctcaccatcagcagcctgcagcctgaagattttgcaacttactattgtcaacaggctaacagtttccctccaactttcggccctgggaccaaagtggatctcaaac

SEQ ID NO: 2812 - DNA, 334 bp, Homo sapiens
  source 1..334: mol_type = other DNA
cagtctgtgctgactcagccaccctcagcgtctgggacccccgggcagagggtcaccatctcttgttctggaagcagctccaacatcggaagtaatactgtaaactggtaccagcagctcccaggaacggcccccaaactcctcatctatagtaataatcagcggccctcaggggtccctgaccgattctctggctccaagtctggcacctcagcctccctggccatcagtgggctccagtctgaggatgaggctgattattactgtgcagcatgggatgacagcctgaatgtcttttatgtcttcggaactgggaccaaggtcaccgtcctag

SEQ ID NO: 2813 - DNA, 325 bp, Homo sapiens
  source 1..325: mol_type = other DNA
gaagttgtgttgacgcagtctccaggcaccctgtctttgtctccaggagaaagagccaccctctcgtgtagggccagtcagagtgttaatagcagatacttagcctggtaccagcagaagcctggccaggctcccaggctcctcatgtatggtgcatccaacagggccactggcatcccagacaggttcagtggcagcgcgtctgggacagacttcactctcaccatcagcagactggagcctgaagattatgcagtctattactgtcagcagtctggtaggtcaccgtacacttttggccaggggaccaaggtggacatcaaac

SEQ ID NO: 2814 - DNA, 322 bp, Homo sapiens
  source 1..322: mol_type = other DNA
gacatccagatgacccagtctccttccaccctgtctgcatctgtaggagacagaatcaccatcacttgccgggccagtcagagtattagtaagtgggtggcctggtatcagcagaaaccagggaaagcccctaaactcctgatctatgctgcatccagtttgcaaagcggggtcccatcaagtttcagcggcagtggatctgggacagaattcactctcaccatcagcagcctgcagcctgatgattttgcaacttattactgccaacaatataataattacccaccgacttttggccaggggaccaagctggagatcaaac

SEQ ID NO: 2815 - DNA, 331 bp, Homo sapiens
  source 1..331: mol_type = other DNA
gaaattgtgttgacgcagtctccaggcaccctgtctttgtctccaggggaaagagccaccctctcctgcagggccagtcagagtgttagcagcagctacttagcctggtaccagcagaaacctggccaggctcccaggctcctcatctatggtgcatccagcagggccactggcatcccagacaggttcagtggcagtgggtctgggacagacttcactctcaccatcagcagactggagcctgaagattttgcagtgtattactgtcagcagtatggtagctcacctccggggtacacttttggccaggggaccaagctggagatcaaac

SEQ ID NO: 2816 - DNA, 324 bp, Homo sapiens
  source 1..324: mol_type = other DNA
tcttctgagctgactcaggaccctgctgtgtctgtagccttgggacagacagtcaggatcacatgccaaggagacagcctcagaagcttttatgcaagctggtaccagcagaagccaggacaggcccctgtaattgtcatctatggtaaaaccaaccggccctcagggatcccagaccgattctccggctccggctcaggaaacacagcttccttgaccatcactggggctcaggcggaagatgaggctgactattattgtaattcccggcacagcagcggtaactcttgggtcttcggaactgggaccagggtcaccgtccta

SEQ ID NO: 2817 - DNA, 319 bp, Homo sapiens
  source 1..319: mol_type = other DNA
gaaatagtgatgacgcagtctccagccaccctgtctgtgtctccaggggaaagagccaccctctcctgcagggccagtcagagtgttagcagcaacttagcctggtaccagcagaaacctggccaggctcccaggctcctcatctatggtgcatccaccagggccactggtatcccagccaggttcagtggcagtgggtctgggacagagttcactctcaccatcagcagcatgcagtctgaagattttgcagtttattactgtcagcagtataataactggcctgttttcggcggagggaccaaggtggagatcaaac

SEQ ID NO: 2818 - DNA, 316 bp, Homo sapiens
  source 1..316: mol_type = other DNA
gaatttgtgttgacacagtctccagccaccctgtctctgtctccaggggaaagagccaccctctcctgcagggccagtcagagtcttggcagctccttagcctggtatcaacaaaaacctggccaggctcccaggctcctcatctttgatgcatccaacagggccactggcatcccagccaggttcagtggcagtgggtctggaacagacttcactctcaccatcagcagcctagagcctgaagattttgcagtttattactgtcagcagcgtagcaactggctcactttcggcggagggaccaaggtggagatca

SEQ ID NO: 2819 - DNA, 322 bp, Homo sapiens
  source 1..322: mol_type = other DNA
gaaatagtgatgacgcagtctccagccaccctgtctgtgtctccaggggagagagccaccctctcctgcagggccagtcagagtgttagcagcaacttagcctggtaccagcagaaacctggccaggctcccaggctcctcatctatggtgcatccaccagggccactggtttcccagccaggttcagtggcagtgggtctgggacagagttcactttcaccatcagcagcctgcagtctgaagattttgcagtttattactgtcagcagtatgataacaggcctccgacgttcggccaagggaccaaggtggaaatcaaac

SEQ ID NO: 2820 - DNA, 331 bp, Homo sapiens
  source 1..331: mol_type = other DNA
cagtctgtgctgacgcagccgccctcagtgtctggggccccagggcagagggtcaccatctcctgcactgggagcagctccaacatcggggcaggttatgatgtacactggtaccagcagcttccaggaacagcccccaaactcctcatctatggtaacagcaatcggccctcaggggtccctgaccgattctctggctccaagtctggcacctcagcctccctggccatcactgggctccaggctgaggatgaggctgattattactgccagtcctatgacagcagcctgagtgttcttttcggaactgggaccaaggtcaccgtcctag

SEQ ID NO: 2821 - DNA, 325 bp, Homo sapiens
  source 1..325: mol_type = other DNA
gaaattgtgttgacgcagtctccaggcaccctgtctttgtctccaggggaaagagccaccctctcctgcagggccagtcagactgttagcagcagctacttagcctggtaccagcagaaacctggccaggctcccaggctcctcatctatgatgcatccagcagggccactggcatcccagacaggttcagtggcagtgggtctgggacagacttcactctcaccatcagcagactggagcctgaagattttgcagtgtattactgtcagcaatatggtagctcatctctcactttcggcggagggaccaaggtggagatcaaac

SEQ ID NO: 2822 - DNA, 331 bp, Homo sapiens
  source 1..331: mol_type = other DNA
caggcagggctgactcagccaccctcggtgtccaagggcttgagacagaccgccacactcacctgcactgggaacagcaacaatgttggcaaccaaggagcagcttggctgcagcagcaccagggccaccctcccaaactcctatcctacaggaataacaaccggccctcagggatctcagagagattctctgcatccaggtcaggaaacacagcctccctgaccattactggactccagcctgaggacgaggctgactattactgctcagcatgggacagcagcctcagtgcttgggtgttcggcggagggaccaagctgaccgtcctag

SEQ ID NO: 2823 - DNA, 340 bp, Homo sapiens
  source 1..340: mol_type = other DNA
gacatcgtggtgacccagtctccagactccctggctgtgtctctgggcgagagggccaccatcaactgcaagtccagccagagtgttttatacgactccaacaataaggactacttagcttggtaccagcagaaaccagggcagcctcctaaactgctcatttactgggcatctacccgggagtccggggtccctgaccgattcagtgccagcgggtctggcacagatttcactctcaccatcagcagcctgcaggctgaagatgtggcagtttattactgtcagcaatattatgatactccgatcaccttcggccaagggacacgactggagattaaac

SEQ ID NO: 2824 - DNA, 328 bp, Homo sapiens
  source 1..328: mol_type = other DNA
gaaattgtgttgacgcagtctccaggcaccctgtctttgtctccaggggaaagagccaccctctcctgcagggccagtcagagtgttagcagcagctacttagcctggtaccagcagaaacctggccaggctcccaggctcctcatgtatggtgcatccagcagggccactggcatcccagacaggttcagtggcagtgggtctgggacagacttcactctcaccatcagcggactggagcctgaagattttgcagtgtattactgtcagcagtatggtagctcaccgcagctcactttcggcggagggaccaaggtggagatcaaac

SEQ ID NO: 2825 - DNA, 340 bp, Homo sapiens
  source 1..340: mol_type = other DNA
cagtctgccctgactcagcctccctccgcgtccgggtctcctggacagtcagtcaccatctcctgcactggaaccagcagtgacgttggtggttataactatgtctcctggtatcaacaacgcccaggcaaagcccccaaactcatgatttatgaggtcactaatcggccctcaggggtttctaatcgcttctctggctccaagtctggcaacacggcctccctgaccgtctctgggctccaggctgaggatgaggctgattattactgcagctcatttgcaggcaccaacaatttcgctttttatgtcttcggaactgggaccaaggtcaccgtcctag

SEQ ID NO: 2826 - DNA, 331 bp, Homo sapiens
  source 1..331: mol_type = other DNA
cagtctgccctgactcagcctcgctcagtgtccgggtctcctggacagtcagtcaccatctcctgcactggaaccagcagtgatgttggtgcttataactatgtctcctggtaccaacagcgcccaggcaaagcccccaaactcattgtttgtggtgtcagtaagcggccctcaggggtccctgatcgcttctctggctccaagtctggcaacacggcctccctgaccatctctgggctccaggctgaggatgaggctgattattactgctgctcatttgcaggcggcttcacgagggtcttcggaactgggaccaaagtcaccgtcctag

SEQ ID NO: 2827 - DNA, 331 bp, Homo sapiens
  source 1..331: mol_type = other DNA
cagtctgccctgactcagcctgcctccgtgtctgggtctcctggacagtcgatcaccatctcctgcactggaaccagcagtgacgttggtggttataactatgtctcctggtaccagcaatacccaggcaaagcccccaaactcatgatttatgaggtcagtaatcggccctcaggggtttctaatcgcttctctggctccaagtctggcaacacggcctccctgaccgtctctgggctccagcctgaggacgaggctgattattactgtagctcatatacaagcagcatcacttatgtcttcggaactgggaccacggtcaccgtcctag

SEQ ID NO: 2828 - DNA, 328 bp, Homo sapiens
  source 1..328: mol_type = other DNA
gaaattgtgttgacgcagtctccaggcaccctgtctttgtctccaggggaaagagccaccctctcctgcagggccagtcagagtgttagcagcagctacttagcctggtaccagcagaaacctggcctggcgcccaggctcctcatctatgatgcatccagtagggccactggcatcccagacaggttcagtggcagtgggtctgggacagacttcactctcaccatcagcagactggagcctgaagattttgcagtgtattactgtcagcagtatggtagctcacctccgtggacgttcggccaagggaccaaggtggaaatcaaac

SEQ ID NO: 2829 - DNA, 325 bp, Homo sapiens
  source 1..325: mol_type = other DNA
gaaattgtgttgacgcagtctccaggcaccctgtctttgtctccaggggaaagagccaccctctcctgcagggccagtcagagcatgagtaacaaccacttagcctggtaccagcagaaacctggccaggccccccggctcctcatttatgaaacatccaacagggccactggcacccccgacaggttcagtggcagagggtctgggacagacttcactctcaccatcagcagactgcaacatgaagattttgcagtctattactgtcagcaatctggttcctcaacgtcgacttttggccaggggaccaagctggagatcaaac

SEQ ID NO: 2830 - DNA, 325 bp, Homo sapiens
  source 1..325: mol_type = other DNA
gaaattgtgttgatgcagtctccaggcaccctgtctttgtctccaggagaaagagccaccctctcctgtagggccagtcagagtgttaccagcaactacttagcctggtaccagcagaaacctggcctggcgcccaggctcgtcatttatgatgcatccagtagggccgctggcatcccagacaggttcactggcggtggctcagggacagacttcactctcaccatcagcagactggagcctgaagattttgcagtgtattactgtcaacaatatggtggctcaccgctcactttcggcggcgggaccaaggtggagatcaaac

SEQ ID NO: 2831 - DNA, 319 bp, Homo sapiens
  source 1..319: mol_type = other DNA
tcctatgagctgactcaaccactctcagtgtcagtggccctgggacagacggccaggattacctgtgggggaaacaacattggaagtaagaatgtgcactggtatcagcagaagccaggccaggcccctgtgttggtcatctatagggatagtacccggccctctgggatccctggacgattctctggctccaactcggggaacacggccaccctgaccatcaacagagcccaagccggggatgaggctgactattactgtcaggtgtgggacagcagcacttatgtcttcggaactgggaccaagctcaccgtcctag

SEQ ID NO: 2832 - DNA, 322 bp, Homo sapiens
  source 1..322: mol_type = other DNA
tcctatgagctgactcagccaccctcagtgtccgtgtccccaggacagacagccagcatcacctgctctggagataaattgggggataaatatgcttgctggtatcagcagaagccaggccagtcccctgtactggtcatctatgaagataacaagcggccctcagggatccctgagcgattctctggctccaactctgggaacacagccactctgaccatcagcgggacccaggctatggatgaggctgactattactgtcaggcgtgggacagcagcactgaggtcgtcttcggaactgggaccaaggtcaccgtcctag

SEQ ID NO: 2833 - DNA, 322 bp, Homo sapiens
  source 1..322: mol_type = other DNA
gaaattgtgttgacgcagtctccaggcaccctgtctttgtctccaggggaaagagtccccctctcctgcagggccagtcagagtgttagcagcttcttagcctggtaccagcagaaacctggcctggcgcccaggctcctcatctatgatgcatccagcagggccactggcatcccagacaggttcagtggcagtgggtctgggacagacttcactctcaccatcagcagactggaacctgaagattttgcagtgtattactgtcagcagtatggtagctcaccgatcaccttcggccaagggacacgactggagattaaac

SEQ ID NO: 2834 - DNA, 348 bp, Homo sapiens
  source 1..348: mol_type = other DNA
cagcctgtgctgactcagccaccttctgcatcagcctccctgggagcctcggtcacactcacctgcaccctgagtagcggctacagtaattataaagtggattggtaccagcagagaccagggaagggcccccgctttgtgatgcgagtgggcactggtgggattgtgggattcaagggggatggcatccctgatcgcttctcaggcttgggctcaggccagaatcggtacctgaccattaaaaacatccaagaagaggatgagagtgactaccactgtggggcagaccatggcactgggatcaacttcgtgtatgtcttcggacctgggaccaaggtcaccgtccta

SEQ ID NO: 2835 - DNA, 345 bp, Homo sapiens
  source 1..345: mol_type = other DNA
caggctgtgctgactcagccggcttccctctctgcatctcctggagcagcagccagtctcacctgcaccttgcgcagtgacctcaatgtaaatacgtacaggatatattggtaccagcagaagccagggagtcctccccagtatctcctgaggtacacatcagactcagataagcagcagggctctggagtccccagccgcttttctggatccaaagatgcttcggccaatgcagggattttactcatctctgggctccagtctgaggatgaggctgactattactgtatgatttggcacagcgacgcgtatgtcatcggagctgggaccaaggtcaccgtccta

SEQ ID NO: 2836 - DNA, 319 bp, Homo sapiens
  source 1..319: mol_type = other DNA
tcctatgagctgactcagccaccctcagtgtccgtgtccccaggacagacagccagcatcacctgctcaggagataaattgggggataaatatacttgctggtatcaacagaagccaggccagtcccctgtgttggtcatctatcaagacaccaagcggccctcagggatccctgagcgattctctggctccaactctgggaacacagtcactctgaccatcagcgggacccaggctatggatgaggctgactattactgtcagacgtgggacagcagcactgtggtattcggcggagggaccaagctgaccgtcctag

SEQ ID NO: 2837 - DNA, 331 bp, Homo sapiens
  source 1..331: mol_type = other DNA
cagtctgccctgactcagcctcgctcagtgtccgggtctcctggacagtcggtcaccatctcctgcactggaagcagcagtgatattggtcgttatgactatgtctcctggtaccaacaacacccaggcaaagtccccaaactcttgatttatgatgtcgctaagcggccctcaggggtccctgatcgcttctctgggtacaagtctggcaacacggcctccctgaccatctctgggctccaggctgacgatgaggctgattattactgctgctcatatgcaggcaggtactcctttgtcttcggaactgggaccaaggtcaccgtcctag

SEQ ID NO: 2838 - DNA, 325 bp, Homo sapiens
  source 1..325: mol_type = other DNA
gaaattgtgttgacacagtctccagccaccctgtctttgtctcccggggaaagagccaccctctcgtgcagggccagtcagagtgttaagtccttcttagcctggttccagcagaaacctggccagtctcccaggctcctcatttatgatgcatccaacagggccactggcatcccagccaggttcagtggcagtgggtctgggacagacttcactctcaccatcagcagactggagcctgaagattttgcagtgtatttctgtcagcagtatgatcgttcatccatgtacacttttggccaggggaccaagctggagatcaaac

SEQ ID NO: 2839 - DNA, 337 bp, Homo sapiens
  source 1..337: mol_type = other DNA
gatattgcgatgacccagactccactctctctgtccgtctcccctggacagccggcctccatctcctgcaagtctagtcagagcctcctgcatagtgatggaaagacctatttgtgttggtacctgcagaagccaggccagtctccacagctcctgatctatgaagtttccagccggttctctggagtgccagataggttcagtggcagcgggtcagggacagatttcacactgaaaatcagccgggtggaggcggaggatgttggggtttattactgcatgcaaggtatacaccttcctcgcacttttggccaggggaccaagctggagatcaaac

SEQ ID NO: 2840 - DNA, 346 bp, Homo sapiens
  source 1..346: mol_type = other DNA
caggctgtgctgactcagccggcttccctctctgcatctcctggagcatcagccagtctcacctgcaccttgcgcagtgacatcaatgttggtacctacaggatatactggtaccagcagaagccagggagtcctccccagtatctcttgaggtacacatcagattcagataagcagcagggctctggagtccccagccgcttctctggatccaaagatgcttcggccaatgcagggattttactcatctctgggctccagtctgaggatgaggctgactatttttgtatgatttggcacaacagcgcttatgtcttcggaactgggaccaaggtcaccgtcctag

SEQ ID NO: 2841 - DNA, 325 bp, Homo sapiens
  source 1..325: mol_type = other DNA
gaaattgtgttgacgcagtctccaggcaccctgtctttgtctccaggggaaagagccaccctctcctgcagggccagtcagactgttagcagcagccacttagcctggtaccagcagagacctggcctggcgcccaggctcctcatctatgatgcatccagcagggccactggcatcccagacaggttcagtggcagtgggtctgggacagacttcactctcaccatcagcagactggagcctgaagattttgcagtgtattactgtcagcagtatggtagctcatctctcactttcggcggagggaccaacgtggagatcaaac

SEQ ID NO: 2842 - DNA, 325 bp, Homo sapiens; identical to SEQ ID NO: 2841
  source 1..325: mol_type = other DNA

SEQ ID NO: 2843 - DNA, 325 bp, Homo sapiens
  source 1..325: mol_type = other DNA
gaaatagtgatgacgcagtctccagtctccctgtctgtgtctccaggggacagagtcaccctctcctgcagggccagtcagagtattagcaacagtttagcctggtaccagcagaaacctggccaggttcccagactcctcatctatggttcatccaccagggccgctggtatcccagccaggttcagtggcagtgggtctgggacagagttcactctcaccatcagcagcctgcagtctgaagatgttgcagtttattactgtcagcagtataataactggcctccgctcactttcggcggagggaccaaggtggagatcaaac

SEQ ID NO: 2844 - DNA, 323 bp, Homo sapiens
  source 1..323: mol_type = other DNA
aattgtgttgactcagtctccaggcaccctgtctttgtctccaggagaaagagccaccctctcctgcagggccagtcagagtgttagcagcaactacttagcctggtaccagcagaaacctggcctggcgcccaggctcctcatctatgatacatccaacagggccactggcatcccagacaggttcagtggcagtgggtctgggacagacttcactctcaccatcagcagattggagcctgaagattttgcagtgtattattgtcagcactatggtccctcacctctcactttcggcggagggaccaaggtagagatcaaac

SEQ ID NO: 2845 - DNA, 328 bp, Homo sapiens
  source 1..328: mol_type = other DNA
cagtctgcgctgacccaggaagcctcggtgtcagggaccgtgggacagagggtcaccctctcctgcactggaaacagcaacaacgttggaacatatggtgtgggctggtaccaacagatttcccacggcgctcccaaaactgtgatgtttggaaattctctgccctcagggatctctgaccgcttctctgcctcaaagtctgggaccacagcctccctgactatctcgggcctccagcctgaggacgaggctgattattactgttcaacgtgggactccagcctcaacgctgtggtagtcggcggagggaccaagctgaccgtcctag

SEQ ID NO: 2846 - DNA, 319 bp, Homo sapiens
  source 1..319: mol_type = other DNA
gacatccaaatgacccagtctccttccaccctgtctgcatctgtgggtgacagagtctctatcacttgccgggccagtcagagtattagtaactggttggcctggtatcaacacaaaccagggaaagcccctaagtccctgatctatgaggcgtctactttagaaagtggggtcccatcaaggttcagcggcagtggatctgggacagagttcactctcaccatcaccagcctgcagcctgatgattttgcaacttattactgccaacagtataatagttattctccgacgttcggccaggggaccaaggtggagatca

SEQ ID NO: 2847 - DNA, 340 bp, Homo sapiens
  source 1..340: mol_type = other DNA
gatattgtgatgacccagactccactctctctgtccgtcacccctggacagccggcctccatctcctgcaagtctagtcagagcctcctgcatagtgatggaaagacctatttggattggttcctgcagaagccaggccagtctccacagctcctgatatatgaggtttccagccggttctctggagtgccagataggttcagtggcagcgggtcagggacagatttcacactgaaaatcagccgggtggaggctgaggatgttggggtttattactgcatgcaaggtatacaccttcctccgatcaccttcggccaagggacacgactggagattaaac

SEQ ID NO: 2848 - DNA, 325 bp, Homo sapiens
  source 1..325: mol_type = other DNA
gaaatagtgatgacgcagtctccagccaccctgtctgtgtctccagggcaaagagccaccctctcctgcagggccagtcagagtgttggcagctacttagcctggtaccagcagaaacctggccaggctcccaggctcctcatctatggtgcatccaccagggccgctaatatcccacccaggttcagtggcagtgggtctgggacagagttcactctcaccatcagcagcctgcagtctgaagattttgcagtttattactgtcagcagtataataactggcctccgctcactttcggcggagggaccaaggtggagatcaaac

SEQ ID NO: 2849 - DNA, 338 bp, Homo sapiens
  source 1..338: mol_type = other DNA
gacatcgtgatgacccagtctccagactccctggctgtgtctctgggcgagagggccaccatcaactgcaagtccagccagagtgtttcatacatctccaacaataagaactacttagcctggtaccagcagaaaccaggacagcctcctaaattgctcattcactgggcatctactcgggaatccggggtccctgaccgattcagtggcagcgggtctggcacagatttcactctcaccatcagcagcctgcaggctgaggatgtggcaacttattactgtcagcactattatattactccgtacacgtttggccaggggaccaagctgcagatcaa

SEQ ID NO: 2850 - DNA, 323 bp, Homo sapiens
  source 1..323: mol_type = other DNA
gacacccagatgacccagtccccatcctccctgtctgcatctgtgggagacagagtcaccatcacttgccaggcgagtcacgacattaggaaccatttgagttggtatcagaaaaaaccagcgaaagcccctaaactcctgatctacgacgcaaccaatttggaaccaggggtcccatcaagattcagaggaagtggatctgggacagatttcattttcaccattagcagcctgcagcctgaagatattgcaacatattactgtcaacattatgatgatgtccctccgtggacgttcggccaagggaccaaggtggaaatcaa

SEQ ID NO: 2851 - DNA, 325 bp, Homo sapiens
  source 1..325: mol_type = other DNA
gaaatagtgatgacgcagtctccagccaccctgtctgtgtctccaggggaaagagccaccctctcctgcagggccagtcagagtattagcagcagcttagcctggtaccagcagaaacctggccaggctcccaggctcctcatctatggttcatccaccagggccactggtatcccagccaggttcagtggcagtgggtctgggacagagttcactctcaccatcagcagcctgcagtctgaagattttgcagtttattactgtcagcagtataataactggcctccgctcactttcggcggagggaccaaggtggagatcaaac

SEQ ID NO: 2852 - DNA, 322 bp, Homo sapiens
  source 1..322: mol_type = other DNA
gacatccagatgacccagtctccttccaccctgtctgcatctgtaggagacagagtcaccatcgcttgccgggccagtcagagtattgggagctggttggcctggtatcaacataagccagggaaagcccctaagctcctgatctatcaggcatctagtttagaaagtggggtcccatccaggttcagcggcagtggatcggggacagaattcactctcaccgtcagcagcctgcagcctgatgatcttgcaactttttactgccaacagtatcatagttatccttggacgttcggccaggggaccaaggtggaaatcaaac

SEQ ID NO: 2853 - DNA, 319 bp, Homo sapiens
  source 1..319: mol_type = other DNA
gacatccaggtgacccagtctccttccaccgtctctgcatctgtcggagacagaatcaccatcacttgccgggccagtcagagtattgatagatggttggcctggtatcagcagaaaccaggaaaagcccctaaactgttgatctatcagacatctaatttagaaagtggggtcccatcaaggttcagcggcagtggatctgggacagaattcactctcaccatcagcagcctgcagcctgatgattttggaacttacttctgcctacattataattattggtggacgttcggccaagggaccaaggtggaagtcaaac

SEQ ID NO: 2854 - DNA, 318 bp, Homo sapiens
  source 1..318: mol_type = other DNA
tcctatgagctgactcagccactctcagtgtcagtggccctgggacagacggccaggattacctgtgggggaaacaacattggaagtaagaatgtgcactggtaccaacagaggccaggccaggcccctatactggtcatctatagggatgccatccggccctctgggacccctgggcgattttctggctccaactcgggggacacggccaccctgaccatcagcagagcccaagccggggatgaggctgactattactgtcacgtgtgggacagcggcactgtggtattcggcggcgggaccaagctgaccgtccta

SEQ ID NO: 2855 - DNA, 334 bp, Homo sapiens
  source 1..334: mol_type = other DNA
cagtctgtgctgactcagccaccctctgcgtctgggacccccgggcagagggtcaccatctcttgttctggaaacagctccaacatcggaagtaattatgtattctggtaccagcagctcccaggaacggcccccaaactcctcatctataagaataatcggcggccctcaggggtccctgaccgattctctggctccaagtctggcacctcagcctccctggccatcagtgggctccggtccgaggatgaggctgattattactgtgcagcatgggatgacagcctgagtcgtcaagagatgttcggcggagggaccaagctgaccgtcctag

SEQ ID NO: 2856 - DNA, 320 bp, Homo sapiens
  source 1..320: mol_type = other DNA
gagacagtgatgacgcagtctccagccaccctgtctgtgtctccaggggaaagagccaccgtctcctgcagggccagtcagagtgttaacaccaatttagcctggtaccagcaaaaacctggccaggctcccaggctcctcattcacggtgcatcaaccagggccactgatgtcccaggcaggttcagtggcagtgggtctgggacagagttcactctcaccatcagcagcatgcagtcggaagattttgcaatttattactgtcagcagtataataactggcctctcacttttggccaggggaccaggctgcagatcaa

SEQ ID NO: 2857 - DNA, 337 bp, Homo sapiens
  source 1..337: mol_type = other DNA
gatattgtgatgactcagtctccagtctccctgcccgtcacccctggagagccggcctccatttcctgcaggtctagtcagagcctcctgcatagtgatggatacaactatttggattggtacctgcagaagccagggcagtctccacagctcctgatctatttggcttctagtcgggcctccggggtccctgacaggttcagtggcagtggatcaggcacagattttacactgaaaatcagcagagtggaggctgaggatgttggggtttattactgcatgcaagctctacaaactcccctttctttcggcggggggaccaaggtggagatcaaac

SEQ ID NO: 2858 - DNA, 346 bp, Homo sapiens
  source 1..346: mol_type = other DNA
caggctgtactgactcagccggcctccctctctgcatctcctggagcatcagccagtctcacctgcaccttgcacagaggcatcagtgttgcttcctacaggatatactggtaccggcagaagccagggagtcctccccagtatctcttgaggtccaaatcagactcagataaacagcagggctctggagtccccggccgcttctctggatccatggatgcttcggccaatgcaggtattttactcatctctgggctccagtctgaggatgaggctgactattactgtatgatttggtacggcagcgcttatgtcttcggaactgggaccaaggtcaccgtcctag

SEQ ID NO: 2859 - DNA, 331 bp, Homo sapiens
  source 1..331: mol_type = other DNA
cagtctgtgttgacgcagccgccctcagtgtctgcggccccaggacagaaggtcacaatcacctgctctggaagcagctccaacattgggggtaattatgtatcctggtaccagaagttccccggaacagcccccaaactcctcatctatgaaaatactaagcggccctcagggattcctgaccgattctctggctccaagtctggcacgtcagccaccctgggcatcaccggactccagcctggggacgaaagcgattatttctgcggaacatgggataccaacctgagtgctggcgtcttcggaactgggaccaaggtcaccgtcctag

SEQ ID NO: 2860 - DNA, 328 bp, Homo sapiens
  source 1..328: mol_type = other DNA
gatattgtgttgacgcagtctccaggcaccctgtctttgtctccaggggagagagccaccctctcctgcagggccaatcagactcttagcggcagctacttggcctggtaccagcagaaacctggcctggcgcccaggctcctcatctatgatacatccaacagggccactggcatcccagacaggttcagtggcagtgggtctgggacagacttcactctcaccatcagcagactggagcctgacgattttgcagtgtatttctgtcagcagtatgatcgctcatccctgtacagttttggccaggggaccaagctggagatcaaac

SEQ ID NO: 2861 - DNA, 319 bp, Homo sapiens
  source 1..319: mol_type = other DNA
gacatccagatgacccagtctccttccaccctgtctgcatctgtgggtgacagagtcactatcacttgccgggccagtcagagtattagcaactggttggcctggtatcaacagaaacctgggaaagcccctaagtccctgatccatgaggcgtctactttagaaagtggggtcccatcaaggttcagcggcagtggatctgggacagagttcactctcaccatcaccagcctgcagcctgatgattttgcaacttattactgccaacagtataaaagttattctccgacgttcggccaagggaccaaggtggaagtca

SEQ ID NO: 2862 - DNA, 319 bp, Homo sapiens
  source 1..319: mol_type = other DNA
gaattggtgatgacgcagtctccagccaccctgtctgtgtctccaggggaaagagtcaccctgtcctgcagggccagtcagaggattagcaacaacttagcctggtaccagcagagacctggccaggctcccaggctcctcatttctggtgcgtccaccagggccactggtatcccagccaggttcagtggcagtgggtctgggacagacttcactctcgtcatcagcagcctgcagtctgaagattctgcagtttattactgtcagcaatataataactggccttcttttggccaggggaccaagctggagatcaaac

SEQ ID NO: 2863 - DNA, 334 bp, Homo sapiens
  source 1..334: mol_type = other DNA
cagtctgtgctgacgcagccgccctcagtgtctggggccccagggcagagggtcaccatctcctgcactgggagcagctccaacatcggggcaggttatgatgtacactggtaccagcagcttccaggaacagcccccaaactcctcatctatggtaacagcaatcggccctcaggggtccctgaccgattctctggctccaagtctggcacctcagcctccctggccatcactgggctccaggctgaggatgaggctgattattactgccagtcctatgacagcagcctgagtggttatgtcttcggaactgggaccaaggtcaccgtcctag

SEQ ID NO: 2864 - DNA, 334 bp, Homo sapiens
  source 1..334: mol_type = other DNA
cagtctgccctgactcagcctgcctccgtgtctgcgtctcctggacagtcgatcaccatctcctgcactggaaccagcagtgacattggtaataataatcatgtctcctggtaccaacaggtcccaggcaaagccccccaagtcatgatttatgaggtcaataagcggccctcaggcatttctaatcgcttctctggctccaagtctggcaacacggcctccctgaccatctctgggctccagcctgaggacgaggctgattattattgcacctcatattcaagcagcggaaccctttatgtcttcggaagtgggacgaaggtcaccgtcctag

SEQ ID NO: 2865 - DNA, 325 bp, Homo sapiens
  source 1..325: mol_type = other DNA
gaagttgtgttgacgcagtctccaggcaccctgtctttgtctccaggggaaagagcccccctctcctgcagggccagtcagactattagcggcacctacttagcctggtaccaacagaaacctggcctggcgcccaggctcctcatctatgatgcatccaccagggccactggcatcccagacaggttcagtggcagtgggtctgggacagacttcactctcaccatcagcagactggagcctgaagattttgcagtgtattactgtcagcagtatggtagctcaccgatcaccttcggccaagggacacgactggagattaaac

SEQ ID NO: 2866 - DNA, 322 bp, Homo sapiens
  source 1..322: mol_type = other DNA
gacatccagatgacccagtctccttccaccctgtctgcatctgttggagacagagtcaccatctcttgccgggccagtcagggtatcagtgaccggttggcctggtatcagcagaaaccaggcatagccccaaggctcctgatttataaggcgtctactttagaaagtggagtcccatcaaggttcagcggcagtggatctgggacagagttcactctcaccatcagcagcctgcagcctgaagattttgcaacttattactgccaacaatatgatagttattcgggaatgttcggccaagggaccaaggtggagatcaaac

SEQ ID NO: 2867 - DNA, 331 bp, Homo sapiens
  source 1..331: mol_type = other DNA
cagtctgtgttgacgcagccgccctcagtgtctgcggccccaggacagaaggtcaccatctcctgctctggaagcagctccaacattggcaatatgtatgtatcctggtaccagcagttcccaggaacagcccccaaactcctcatttatgacaataataagcgcccctcagggattcctgaccgattctctggctccaagtctggcacgtcagccaccctggacatcaccggactccagactggggacgaggccgattattactgcgaaacatgggataccagcctgagtgcttatgtcttcggaactgggaccacggtcaccgtcctag

SEQ ID NO: 2868 - DNA, 325 bp, Homo sapiens
  source 1..325: mol_type = other DNA
gaaattgtgttgacgcagtctccaggcaccctgtctttgtctccaggggaaagagccaccctctcctgcagggccagtcagagtgttagcagcagctacttagcctggtaccagcagaaacctggcctggcgcccaggctcctcatctatgatgcatccagcagggccactggcatcccagacaggttcagtggcagtgggtctgggatagacttcactttcaccatcagcagactggagcctgaagattttgcactgtattactgtcagcagtatggtacctcaccttggacgttcggccaagggaccagggtggaaatcaaac

SEQ ID NO: 2869 - DNA, 337 bp, Homo sapiens
  source 1..337: mol_type = other DNA
gatattgtgatgactcagtctccactctccctgcccgtcacccttggacagccggcctccatctcctgcaggtccagtcaaagcctcacactcaatgatggaaacacctacttgcattggtttcagcagaggccaggccaatctccacggcgcctaatttataaggtttctaaccgggactctggggtcccagacagattcagcggcagtgggtcaaacactgatttcacactgaaaatcagcagggtggaggctgaggatgttggggtttattactgcatgcaagctctagaaactccgatcaccttcggccaagggacacgactggagattaaac

SEQ ID NO: 2870 - DNA, 329 bp, Homo sapiens
  source 1..329: mol_type = other DNA
cagtctgccctgactcagcctgcctccgtgtctgggtctcctggacagtcgatcaccatctcctgcactggaaccagcagtgacgttggtggttataactatgtctcctggtatcagcaacgcccaggcaaagcccccaaactcatcatttatgaggtcactaatcggccctcaggggtttctaatcgcttctctggctccaagtctggcaacacggcctccctgaccatctctgggctccaggctgaggacgaggctcattattactgctgttcatatacaaggagcagtacctttctcttcgggactgggaccgaggtcaccgtcct

SEQ ID NO: 2871 - DNA, 319 bp, Homo sapiens; identical to SEQ ID NO: 2757
  source 1..319: mol_type = other DNA

SEQ ID NO: 2872 - DNA, 329 bp, Homo sapiens
  source 1..329: mol_type = other DNA
cagtctgccctgactcagcctgcctccgtgtctgggtctcctggacagtcgatcaccatctcctgcactggaaccaccagtgacgttggtcgttataactatgtctcctggtatcaacaacgcccaggcaaagcccccaaactcatgatttatgaggtcactaatcggccctcaggggtttctactcgcttctctggctccaagtctggcaacacggcctccctgaccatctctgggctccaggctgaggacgagggtctttatcactgctgctcatatacaagcagcagcacctttctcttcgggaccgggaccgaggtcaccgtcct

SEQ ID NO: 2873 - DNA, 323 bp, Homo sapiens
  source 1..323: mol_type = other DNA
gacatccagatgacccagtctccttccaccctgtctgcatctgtaggagacagagtcaccatcacttgtcgggcgagtcagggcattagctattatgtagcctggtttcggcagaaaccagggaacgtccctcagcgcctcttctatgctgcatccagtttgcaaagtggggtcccatcaaggttcagcggccgtgcatctgggacagaattcactctcacaatcagctgcctgcagcctgaagattttgcaacttattactgtctacagcataagagttaccccctacacttttggccaggggaccaaactggagatcaaac

SEQ ID NO: 2874 - DNA, 322 bp, Homo sapiens
  source 1..322: mol_type = other DNA
gacatccagatgacccagtctccttccaccctgtctgcatttgtaggagacagagtcaccatcacttgccgggccagtcagagtatcagtagccggttggcctggtatcagcagaaaccagggatagccccaaagctcctgatctataaggcgtctactttacaaactggagtcccatcaaggttcagcggaactggatctgggacagaattcactctcaccatcagcagcctgcagcctgatgattttgcaacttattactgccaacagtatgatagttattcgggagcgttcggccgagggaccaaggtggagatcaaac

SEQ ID NO: 2875 - DNA, 325 bp, Homo sapiens
  source 1..325: mol_type = other DNA
gaaattgtgttgacgcagtctccaggcaccctgtctttgtctccaggggaaagagccaccctctcctgcagggccagtcagagtgttagcagcaacttagcctggtaccagcagaaacctggccaggctcccaggctcctcatctatggtgcatccaccagggccactggtatcccagccaggttcagtggcagtgggtctgggacagagttcactctcaccatcagcagcctgcagtctgaagattttgcagtttattactgtcagcagtataataactggcctccgctcactttcggcggagggaccaaggtggagatcaaac

SEQ ID NO: 2876 - DNA, 325 bp, Homo sapiens
  source 1..325: mol_type = other DNA
gaaattgtgttgacgcagtctccaggcaccctgtctttgtctccaggggaaagagccaccctctcctgcagggccagtcagagtattagcagcaactacctagcctggtaccagcagaaacctggcctggcgcccaggctcctcatctatgatgcatccaccagggccactggcatcccagacaggttcagtggcagtgggtctgggacaggcttcactctcaccatcagcggactggagcctgaagattttgcagtgtattactgtcagcagtatggtagctcgtcgctcactttcggcggagggaccaaggtggagatcaaac

SEQ ID NO: 2877 - DNA, 325 bp, Homo sapiens
  source 1..325: mol_type = other DNA
gaaatagtgatgacgcagtctccagtcaccctgtctgtgtctccaggggagagagccaccctctcctgcaggtccagtcagagtgttggcaccaacttagcctggtaccagcagaagcctggccaggttcccagactcctcgtctatggtgcatccaccagggccactggcatcccagccaggttcagtggcagtgggtctgggacacagttcactctcaccatcagcggcctgcagtctgaagattttgcagtttactactgtcagcagtatcataactggcctccgctcactttcggcggagggaccaaggtggagatcaaac

SEQ ID NO: 2878 - DNA, 328 bp, Homo sapiens
  source 1..328: mol_type = other DNA
cagtctgcgctgacccaggaagcctcggtgtcagggaccgtgggacagaaggtcaccctctcctgtactggaaacagcaacagcgttggacgttatgctgtgggctggtaccaacagatttctcacggtgctcccaaaactgtgatgtttggaaattctctgccctcagggatccctgaccgcttctctggctcaaagtctgggaccacggcctccctaactatctcgggcctccagcctgaggacgaggctgattattactgttcaacatgggactacagcctcagtgcttgggtgttcggcggagggaccaagctgaccgtcctag

SEQ ID NO: 2879 - DNA, 329 bp, Homo sapiens
  source 1..329: mol_type = other DNA
cagtctgccctgactcagcctgcctccgtgtctgggtctcctggacagtcgatcaccatctcctgcactggaaccagcagtgacgttggtggttataactatgtctcctggtatcaacaacgcccaggcaaagcccccaaactcatgatttatgaggtcactaatcggccctcaggggtttctaatcgcttctctggctccaagtctggcgacacggcctccctgaccatctctgggctccaggctgaagacgagggtcattattactgctgttcatatacaaggagcagtacctttctcttcgggactgggaccgaggtcaccgtcct

SEQ ID NO: 2880 - DNA, 322 bp, Homo sapiens
  source 1..322: mol_type = other DNA
gaaattgtgttgacgcagtctccaggcaccctgcctttgtctccaggggaaagagccaccctctcctgcagggccagtcagagtgttagcagcaactacttagcctggtaccagcagaaacctggccaggctcccaggctcctcatctatggtgcatccagcagggccactggcatcccagacaggttcagtggcagtgcgtctgggacagacttcactctcaccatcagcagactggagcctgaagattttgcagtgtattactgtcagcagtatagtggctcacctcccactttcggcggagggaccaaggtggagatca

SEQ ID NO: 2881 - DNA, 328 bp, Homo sapiens
  source 1..328: mol_type = other DNA
gaaattgtgttgacgcagtctccaggcaccctgtctttgtctccaggggaaagagccaccctctcctgcagggccagtcagagtattagcaacaacaacttagcctggtaccagcagaaacctggccaggctcccaggctcctcatctatggttcatccaccagggccactggtatcccagccaggttcagtggcagtgggtctgggacagagttcactctcaccatcagcagcctgcagtctgaagattttgcagtttattactgtcagcagtataataactggcctccgctcactttcggcggagggaccaaggtggagatcaaac

SEQ ID NO: 2882 - DNA, 323 bp, Homo sapiens
  source 1..323: mol_type = other DNA
gaaattgtgttgacacagtctccaggcaccctgtctttgtctccaggggaaagagccaccctctcctgcagggccagtcagagtgttagcggcaactcgttagcctggtatcagcaaaaacctggccaggctcccaggctcctcatctatgatacatccaacagggccactggcgtcccagacaggttcagtggcagtgggtctgggacagacttcactctcatcgttagcatcctggaacctgaagattttgcagtgtattactgtcatcattatgatacctcaacgtcgacttttggccaggggaccaagctggagatcaa

SEQ ID NO: 2883 - DNA, 331 bp, Homo sapiens
  source 1..331: mol_type = other DNA
cagtctgccctgactcagcctgcctccgtgtctgggtctcctggacagtcgatcaccatctcctgcactggaaccaggagtgacattggtacttataactatgtctcctggtaccagcagcacccaggcaaagcccccaaagtcatgatttctgatgtcagtatgcggccctcaggggtttctaaccgcttctctggctccaagtctggcaacacggcctccctgaccatctctgggctccaggctgaggacgaggctgattattactgcagttcatctagaagcggcagcacttatgtcttcggaactgggaccaaggtcaccgtcctag

SEQ ID NO: 2884 - DNA, 322 bp, Homo sapiens
  source 1..322: mol_type = other DNA
gaaattgtgttgacacagtctccagccaccctgtctttgtctccaggggaaagagccaccctctcctgcagggccagtcagagtgttagcagctacttagcctggtaccaacagaaacctggccaggctcccaggctcctcatctatgatgcatccaacagggccactggcatcccagccaggttcagtggcagtgggtctgggacagacttcactctcaccatcagcagcctagagcctgaagattttgcagtttattactgtcagcagcgtagcaactggcccttgacgttcggccaagggaccaaggtggaaatcaaac

SEQ ID NO: 2885 - DNA, 346 bp, Homo sapiens
  source 1..346: mol_type = other DNA
caggctgtgctgactcagccggcttccctctctgcatctcctggagcttcagccagtctcacctgcaccttgcgcagtgacatcagtgttgatacctacaggatattctggtaccagcagaagccagggagtcctccccagtatctcctgaggtacaaatcagacttacataagcagcagggctctggagtccccagccgcttctctggatccaaagatgcttcggccaatgcaggaattttactcatctctgggctccagtctgaggatgaggctgactattattgtatggtttggcacaatagtgcttgggtgttcggcggagggaccaagctgaccgtcctag

SEQ ID NO: 2886 - DNA, 328 bp, Homo sapiens
  source 1..328: mol_type = other DNA
gaaattgtgttgacgcagtctccaggcaccctgtctttgtctccaggggaaagagccaccctctcctgcagggccagtcagagtgttagcagcagctacttagcctggtaccagcagaaacctggccaggctcccaggctcctcatctatggtgcatccagcagggccactggcatcccagacaggttcagtggcagtgggtctgggacagacttcactctcaccatcagcagactggagcctgaagattttgcagtgtattactgtcagcagtatggtagctcacctcgattcactttcggccctgggaccaaagtggatatcaaac

SEQ ID NO: 2887 - DNA, 322 bp, Homo sapiens
  source 1..322: mol_type = other DNA
gacatccagatgacccagtctccttccaccctgtctgcatctgtaggagacagagtcaccatcacttgccgggccagtcagagtattagtagttggttggcctggtatcagcagaaaccaggaaaagcccctaaactcctgatctataaggcgtctagtttagaaagtggggtcccatcaaggttcagcggcagtggatctgggacagaattcactctcaccatcagcagcctgcagcctgatgattttgcaacttattactgccaacagtataatagttattcgtggacgttcggccaagggaccaaggtggaaatcaaac

SEQ ID NO: 2888 - DNA, 325 bp, Homo sapiens
  source 1..325: mol_type = other DNA
gaaattgtgttgacgcagtctccaggcaccctgtctttgtctccaggggaaagagccaccctctcctgcagggccagtcagagtgttagcagcaactacctagcctggtaccagcagaaacctggcctggcgcccaggctcctcatctatgatgcatccagcagggccactggcatcccagacaggttcagtggcagtgggtctgggacagacttcactctcaccatcagcagactggagcctgaagattttgcagtgtattattgtcagcagcatggtagctcgtcgctcactttcggcggagggaccaaggtggagataaaac

SEQ ID NO: 2889 - DNA, 322 bp, Homo sapiens
  source 1..322: mol_type = other DNA
gacatccagatgacccagtctccttcctccctgtctgcatctataggagacagagtcaccatcacttgtcgggcgagtcagggcattgggaattccttagcctggtttcagcagaaaccagggaaagcccctaagtgtctgatctatgatgcatatactttgcaaggtggggtcccaccaaagttcagtggcagtggatctgggacagatttcactctcaccatcagcagcctgcagcctgaagattttgcaacttattactgtcaacaatataaaagttaccctctcactttcggaggagggaccaaggtggacctcaaac

SEQ ID NO: 2890 - DNA, 322 bp, Homo sapiens; identical to SEQ ID NO: 2453
  source 1..322: mol_type = other DNA

SEQ ID NO: 2891 - DNA, 336 bp, Homo sapiens
  source 1..336: mol_type = other DNA
atattgtgatgactcagtctccactctccctgcccgtcacccctggagagccggcctccatctcctgcaggtctagtcagagcctcctgcatagtaatggatacaactatttggattggtacctgcagaagccagggcagtctccacagctcctgatctattggggttctaatcgggcctccggggtccctgacaggttcagtggcagtggatcaggcacagattttacactgaaaatcagcagagtggaggctgacgatgttggggtttattactgcatgcaagctctagaaactccgatcaccttcggccaagggacacgactggagattaaac

SEQ ID NO: 2892 - DNA, 331 bp, Homo sapiens
  source 1..331: mol_type = other DNA
cagtctgccctgactcagcctcgctcagtgtccgggtctcctggacagtcaatcaccatctcctgcactgggaccagcagtgatgttggtgcttataactatgtctcctggtaccaacaacacccagacaaagcccccaaattcatgatttatgatgtcaatgagcggccctcaggggtccctgatcgcttctctggctccaagtctggcaacacggcctccctgaccatctctggactccagcctgaggacgaggctgattattactgctgctcatatgcaggccgctacagttatgtcttcggaactgggaccaaggtcaccgtcctag

SEQ ID NO: 2893 - DNA, 319 bp, Homo sapiens
  source 1..319: mol_type = other DNA
tcctatgcggtgactcagccactctcagtgtcagtggccctgggacagacggccaggatcacctgtgggggaaacaatattagaagtagaaatgtgcactggtaccagcagaagccaggccaggcccctgtggtggtcatctacagggataggaaccggccctctgggatccctgagcgattctctggctccaattcggggaatacggccaccctgaccatcagcagagcccaagccggggatgaggctgaatattactgtcaggtgtgggacagaagcactgccgtattcggcggagggaccaagctgaccgtcctag

SEQ ID NO: 2894 - DNA, 334 bp, Homo sapiens
  source 1..334: mol_type = other DNA
cagtctgtgctgactcagccaccctcagcgtctgggacccccgggcagagggtcaccatctcttgttctggaagcagctcaaacatcgaaaaagattatgtatgctggtaccagcagctcccaggaacggcccccaaactcctcatctttaagaatgaccagcggccctcaggggtccctgaccgattctctggctccaagtctggcacctcggcctccctggccatcagtggcctccagtccgaggatgaggctgattattactgtgcaggatgggatgacagcctgagtggttctgtgcttttcggcggagggaccaagctgaccgtcctag

SEQ ID NO: 2895 - DNA, 322 bp, Homo sapiens
  source 1..322: mol_type = other DNA
gacatccagatgacccagtctccttccaccctgtctgcttttgaaggagatagagtcaccatcacttgccgggccagtcagagtattaataactggttggcctggtatcagcagaaaccagggaaagcccctaagctcctgatctataaggcgtctaatttagaaagtggggtcccatcaaggttcagcggcagtggatctgggacagagttcactctcaccatcagcagcctgcagcctgatgatcttgcaacttattactgccaacactataatacttattcagggacgttcggccaagggaccaaggtggaaatcaaac

SEQ ID NO: 2896 - DNA, 317 bp, Homo sapiens
  source 1..317: mol_type = other DNA
catccagttgacccagtctccatccttcctgtctgcatctgtaggagacagagtcaccatcacttgtcgggccagtcagggcattaccaattccttagcctggtatcagcaaaagtcagggaaagcccctaagctcctgatctatgctgcgtccattttgcaaagtgaagtccctttaaggttcaacggcagtggatctgggacagaattcactctcacagtcagcagcctgcagcctgaagattttgcaacttatttctgtcaacaacttaatagttccccttacacttttggccaggggaccaagctggagatca

SEQ ID NO: 2897 - DNA, 325 bp, Homo sapiens
  source 1..325: mol_type = other DNA
gacatccagatgacccagtctccttccaccctgtctgcatctgtcggagacagagtcaccatcacttgccgggccagtcagagtattagtaggtggttggcctggtatcagcagaaaccagggaaagccccgaaactcctgatccaccaggtgtctaatttagaaagtggggtcccatcaaggttcagcggcagtggatctgggacagaattcactctcaccatcagcagcctgcagcctgatgattttgcaacttattactgccaacagtataatagtttttctgggtacacttttggccaggggaccaagctggagatcaaac

SEQ ID NO: 2898 - DNA, 337 bp, Homo sapiens
  source 1..337: mol_type = other DNA
gatgttgtgatgactcagtctccactcttcctgcccgtcaccgttggacagccggcctccatctcgtgcaggtctagtcaacccctcgtatatagtgatgggaggaccttcttgagttggtttcatcagaggccaggccaatctccaaggcgcctgatttatcaggtttctgaccgggactctggggtcacagacagattcagcggcagtgggtcgggcactgatttcacactgaaaatcagcagggtggaggctgaggatgtggggatttattactgcatgcaagctacacactggccgtggacgttcggccaagggaccaaggtggaaatcaaac

SEQ ID NO: 2899 - DNA, 322 bp, Homo sapiens
  source 1..322: mol_type = other DNA
tcctatgagctgactcagccaccctcagtgtccgtgtccccaggacagacagccagcatcacctgctctggagataaattgggggataaatatgcttgctggtatcagcagaagccaggccagtcccctgtgctggtcatctatcaagatagcaagcggccctcagggatccctgagcgattctctggctccaactctgggaacacagccactctgaccatcagcgggacccaggctatggatgaggctgactattactgtcaggcgtgggacagcagcactgcatggatcttcggaactgggaccaaggtcaccgtcctag

SEQ ID NO: 2900 - DNA, 331 bp, Homo sapiens
  source 1..331: mol_type = other DNA
cagtctgccctgactcagcctgcctccgtgtctgggtctcctggacagtcgatcaccatctcctgcactggaaccagcagtgatgttggtggttataactatgtctcctggtaccaacagcacccaggcaaagcccccaaactcatgatttatgatgtcagtaagcggccctcaggggtttctaatcgcttctctggctccaagtctggcaacacggcctccctgacaatctctgggctccaggctgaggacgaggctgattattactgctgctcatatgcaggtagtagcactttggtattcggcggagggaccaagctgaccgtcctag

SEQ ID NO: 2901 - DNA, 331 bp, Homo sapiens
  source 1..331: mol_type = other DNA
cagtctgtgctgactcagccaccctcagcgtctgggacccccgggcagagggtcaccatctcttgttctggaagcaactccaacatcggaagaaatactgtaaactggtatcagcagctcccaggaacggcccccaaactcctcatccataaaaatgatcagcggccctcaggggtccctgaccgcttctctggctccaagtctggcacctcagcctccctggccatcagtggactccagtctgaggatgaggctgattattactgtgcaacgtgggatgacagcctgaatggtccggttttcggcggagggaccaagctgaccgtcctag

SEQ ID NO: 2902 - DNA, 325 bp, Homo sapiens
  source 1..325: mol_type = other DNA
gaaattgtgttgacgcagtctccagacaccctgtctttgtctccgggggaaagagccaccctctcctgcagggccagtcagagtattagccgcagcgacttagcctggtaccagcagaaacctggcctggcgcccaggctcctcatctatgatgcatccagcagggccactggcgtcccagacaggttcagtggcagtgggtctgggacagacttcactctcaccatcaccagactggagcctgacgattttgcagtgtattactgtcagcagtatggtagctcacctcccacgttcggccaagggaccaaggtggaaatcaaac

SEQ ID NO: 2903 - DNA, 331 bp, Homo sapiens
  source 1..331: mol_type = other DNA
cagtctgccctgactcagcctgcctccgtgtctgggtctcctggacagtcgatcaccatctcctgcactggaaccagcagtgacgttggtggttataactatgtctcctggtaccaacagcacccaggcaaagcccccaaactcatgatttatgatgtcagtaagcggccctcaggggtttctaatcgcttctctggctccaagtctggcaacacggcctccctgaccatctctgggctccaggctgaggacgaggctgattattactgcagctcatatacaagcagcagcacggtggtattcggcggagggaccaagctgaccgtcctag

SEQ ID NO: 2904 - DNA, 337 bp, Homo sapiens
  source 1..337: mol_type = other DNA
gatattgtgatgactcagtctccactctccctgcccgtcacccctggagagccggcctccatctcctgcaggtctagtcagagcctcctgcatagtaatggatacaactatttggattggtacctgcagaagccagggcagtctccacagctcctgatatatttgggttctaatcgggcctccggggtccctgacaggttcagtggcagtggatcaggcacagattttacactgaaaatcagcagagtggaggctgaggatgttggggtttattactgcatgcaagctctacaaactgttcacactttcggcggagggaccaaggtggagatcaaac

SEQ ID NO: 2905 - DNA, 322 bp, Homo sapiens
  source 1..322: mol_type = other DNA
gaaattgtgttgacgcagtctccaagaatcttgtcattgtctccaggggatagagccaccctctcctgcagggccagtcagactcttggcggcagcaacctagcctggtaccagcaaaaacctggcctggcgcccaggctcctcatctatgatgtatccaccagggccactggcatcccagacagattcagtggtcgtgggtctgggacagacttcactctcaccatcagcagactggagcctgaagattttgcactatattactgtcagcagtatgctagttcatcttcgttcggccaagggaccacggtggaaatcaaac

SEQ ID NO: 2906 - DNA, 325 bp, Homo sapiens
  source 1..325: mol_type = other DNA
gaaatagtgatgacgcagtctccagacaccctgtctgtgtctcaaggggaaagagccaccctctcctgtagggccagtcagagtgttaggagcgacttagcctggtaccagcagaaagctggccaggctcccaggctcctcatctatggtgcatccaccagggccactggcattccagccaggttcagtggcagtgggtctgggacagaattcactctcaccatcagcagcctgcagtctgaagattttgcagtttattactgtcaacagtataataactggcctccgcttactttcggcggagggaccaaggtggagatcaaac

SEQ ID NO: 2907 - DNA, 331 bp, Homo sapiens
  source 1..331: mol_type = other DNA
cagtctgccctgactcagcctgcctccgtgtctgggtctcctggacagtcgatcaccatctcctgcactggaaccagcagtgacgttggtggttataactatgtctcctggtaccaacaacacccaggcaaagcccccaaactcatgatttatgaggtcactaatcggccctcaggggtttctaatcgcttctctggctccaagtctggcaacacggcctccctgaccatctctgggctccaggctgaggacgaggctgattattactgcagctcatatacaagtaccagcacctttgtcttcggaactgggaccaaggtcaccgtcctag

SEQ ID NO: 2908 - DNA, 325 bp, Homo sapiens
  source 1..325: mol_type = other DNA
gaaattgtgttgacacagtctccagccaccctgtctttgtctccaggggaaagagccaccctctcctgcagggccagtcagagtgttagtaactacttagcctggtaccaacagaagcctggccaggctcccaggctcctcatctatgatgcatccaacagggccactggcatcccagccaggttcagtggcagtgggtctgggacagacttcactctcaccatcagcagcctagagcctgaagattttgcagtttattactgtcagcagcgtagcaactggcctccgctcactttcggcggagggaccaaggtggagatcaaac

SEQ ID NO: 2909 - DNA, 319 bp, Homo sapiens
  source 1..319: mol_type = other DNA
gacatccagatgacccagtctccatcctccctgtctgcatctgtaggagacagagtcaccatcacttgccaggcgagtcaggacattagcaactatttgaattggtatcagcagaaaccaggcaaagcccctaagctcctgatctacgatgcattgaatttggaaacaggggtcccatcaaggttcagtggaagtggatctgggacagattttactttaacaatcagtagcctgcagcctgaagatattgcaacatatcactgtcaacagtatgataatcttatcaccttcggccaagggacacgactggagattaaac

SEQ ID NO: 2910 - DNA, 325 bp, Homo sapiens
  source 1..325: mol_type = other DNA
gaaaatgtgttgacgcagtctccaggcaccctgtctttgtctccaggggatagagccaccctctcctgcagggccagtcagagtgttaccagcaactacttagcctggtaccagcagaaacctggcctggcgcccaggctcctcatctatgatgcatccagcagggccactggcatcccagacaggttcagtggcagtgggtctgggacagacttcactctcaccgtcagcagactggagcctgaagattttgcagtgtattactgtcagcaatatggtagctcacctaccactttcggcggagggaccaaggtggagatcaaac

SEQ ID NO: 2911 - DNA, 328 bp, Homo sapiens
  source 1..328: mol_type = other DNA
gaaattgtgttgacgcagtctccaggcaccctgtctttgtctccaggggaaagagccaccctctcctgcagggccagtcagagtgttagcagcagctacttagcctggtaccagcagaaacctggcctggcgcccaggctcctcatctatgatgcatccagcagggccactggcatcccagacaggttcagtggcagtgggtctgggacagacttcactctcaccatcagcagactggagcctgaagattttgcagtgtattactgtcagcagtatggtacctcatccatgtacacttttggccaggggaccaagctggagatcaaac

SEQ ID NO: 2912 - DNA, 344 bp, Homo sapiens
  source 1..344: mol_type = other DNA
caggctgtgctgactcagccggcttccctctctgcatctcctggagcatcagccagtctcacctgcaccttgcgcagtggcatcaatgttggtgcctacaggatattctggtaccagcagaagccagggagtcctccccagtatctcctgagggtcggatcagactcagatgaacaacagggctctggagtccccagccgcttctctggatccaaggatgcttcggccaatgcagggattttactcatctctgggctccagtctgaggatgaggctgactattactgtatgatttggcacagcaacacttatgtcttcggaactgggaccaaggtcaccgtcct

SEQ ID NO: 2913 - DNA, 325 bp, Homo sapiens
  source 1..325: mol_type = other DNA
gaaactgtgttgacgcagtctccaggcaccctgtctttgtctccaggggaaggagccaccctctcctgcagggccagtcagagtgttagcaacaccaacttagcctggtaccagcagaaacctggccaggctcccaggctcctcatctatggtgcatccagcagggccactggcatcccagacaggttcagtggcagtgggtctgggacagacttcactctcaccatcagcagactggagcctgaagattttgcagtgtattactgtcagcaatatggtagctcaccattcactttcggccctgggaccaaagtggatatcaaac

SEQ ID NO: 2914 - DNA, 325 bp, Homo sapiens
  source 1..325: mol_type = other DNA
gaaattgtgttgacgcagtctccaggcaccctgtctttgtctccaggggaaagagccaccctctcctgcagggccagtcagagtgttagcagcaactacttagcctggtaccagcaacaacctggccaggctcccaggctcctcatctttggtgcatccagcagggccactggcatcccagacaggttcagtggcagtgggtctgggacagacttcactctcaccatcagcagactggagcctgaggattttgcagtgtattactgtcagcagtatggtagctcacctcagacgttcggccaagggaccaaggtggaactcaaac

SEQ ID NO: 2915 - DNA, 317 bp, Homo sapiens
  source 1..317: mol_type = other DNA
gacatccagatgacccagtctccttccaccctgtctgcatctgtcggagacagagtcaccatcacttgccgggccagtcagagtattaataagtggttggcctggtatcagcagaaaccaggaagagcccctaaactcctaatctatcaggcgtctaatttagaaagtggtgtcccatcaaggttcagcggcagtggatctgggacagaattcactctcaccatcaccagcctgcagcctgatgattttgttacttattactgcctccattatgattattcgtggacgttcggccaagggaccaaggtggaaatcaa

SEQ ID NO: 2916 - DNA, 328 bp, Homo sapiens
  source 1..328: mol_type = other DNA
gaaattgtgttgacgcagtctccaggcaccctgtctttgtctccaggggaaagagccaccctctcctgcagggccaatcagactcttagcggcagctacttggcctggtaccagcagaaacctggcctggcgcccaggctcctcatctatgatacatccaacagggccactggcatcccagacaggttcagtggcagtgggtctgggacagacttcactctcaccatcagcagactggagcctgaagattttgcagtgtatttctgtcagcagtatgatcgttcatccatgtacacttttggccaggggaccaagctggagatcaaac

SEQ ID NO: 2917 - DNA, 334 bp, Homo sapiens
  source 1..334: mol_type = other DNA
cagtctgtgttgacgcagccgccctcagtgtctgcggccccaggacagaaggtcaccatctcctgctctggaagcagtttcaacattgggaataattatgtttcctggtaccagcagctcccaggaacagcccccaaactcctcatctatgaagataataagcgaccctcagggattcctgatcgattctctggctccaagtctggcacgtcagccaccctgggcatcaccggactccagactggggacgaggccgattattactgcggaacatgggatagcagcccgggtgctcattgggtgttcggcggagggaccaagctgaccgtcgtag

SEQ ID NO: 2918 - DNA, 337 bp, Homo sapiens
  source 1..337: mol_type = other DNA
gatgtggtgatgactcagtctccactctccctgcccgtcacccttggacagccggcctccatctcctgcaggtctagtcaaagcctcgttcacaatgatggaaacacctacttgaattggtttcagcagaggccaggccaatctccaaggcgcctaattcataagatttctaaccgggactctggggtcccagacagattcagcggcagtgggtcaggcactgatttcacgctgagaatcagcagggtggaggctgaggatgttggggtttattactgcatgcaaggcacacactggcccccgtacacttttggccaggggaccaacctggagatca

SEQ ID NO: 2919 - DNA, 325 bp, Homo sapiens
  source 1..325: mol_type = other DNA
gaaatagtgatgacgcagtctccagccaccctgtctgtgtctcccggggaaagagccaccctctcctgcagggccagtcagagtgttagcagcgacttagcctggtatcagcagaaacctggccaggctcccaggctcctcatctatggtgcatccaccagggccactggtatcccagccaggttcagtggcagtgggtctgggacagagttcactctcaccatcagtagccttcagtctgaagattttgcagtttattattgtcagcagtataataattggcctccgatcaccttcggcctagggacacgactggagattaaac

SEQ ID NO: 2920 - DNA, 325 bp, Homo sapiens
  source 1..325: mol_type = other DNA
gaaattgtgttgacgcagtctccaggcaccctgtctttgtctccaggggaaagcgccaccctctcctgcagggccagtcagagtgttaccagcaactacttagcctggtaccagcagaaagttggccaggctcccaggctcctgatttctggtgcatccagcagggccactggcatcccagacaggttcagtggcagtgggtctgagacagacttcactctcaccatcagcagactggagcctgaagattttgcagtttattactgtcagcagtatggtagctcacccctcactttcggcggagggaccaaggtggagatcaaac

SEQ ID NO: 2921 - DNA, 322 bp, Homo sapiens
  source 1..322: mol_type = other DNA
gaaattgtgatgacgcagtctccagccaccctatctgtgtctccaggggaaagagtcaccctctcctgcagggccagtcagagtgttggcagcaacttagcctggtaccagaagaaagctggccaggctcctaggctcttgatctatggtccggccaccagggccactgggatcccagccaggttcggtggcagtgggtctgggacagagttcactctcaccatcagcagcattcagtctgaagattttgcgatctattactgtcagcagtataataactggcctcttacttttggccaggggaccaaggtggagatcaaac

SEQ ID NO: 2922 - DNA, 329 bp, Homo sapiens
  source 1..329: mol_type = other DNA
cagtctgccctgactcagcctgcctccgtgtctgggtctcctggacagtcggtcaccatctcctgcactggaaccactaatgacgttggtggttataactatgtctcctggtatcgacagagcccaggcaaagcccccaaactcatcatttatgaggtcacttatcggccctcgggagtttctaatcgcttctctggctccaagtctggcaacacggcctccctgaccatctctgggctccaggctgaggacgagggtcattattactgctgttcgtatacaagggccagtacctttctcttcgggactgggaccgaggtcaccgtcct

SEQ ID NO: 2923 - DNA, 322 bp, Homo sapiens
  source 1..322: mol_type = other DNA
gacatccagatgacccagtctccctctgccatgtctgcatctgtaggagacagagtcaccatcacttgtcgggcgagtcagggcattagtaattatttagcctggtttcagcagaaaccagggaaagtccctaagcgcctgatttatggtgcatccaatttgcaaagtggggtcccatcaaggttcagcggcagtggatctgggacagaattcactctcacaatcagcagcctgcagcctgaagattttgcaacttattactgtctacagcataatagttaccctcggacgttcggccaagggaccaaggtggaaatcaaac

SEQ ID NO: 2924 - DNA, 325 bp, Homo sapiens
  source 1..325: mol_type = other DNA
gacacccagatgacccagtttccatcctccctgtctgcatctgtgggagacagagtcaccatcacttgccaggcgagtcaggacattaagaaccatttgagttggtatcagaaaaaaccagggagagcccctaaactcctaatctacgatgcatccaatttggaagggggggtcccatcaaggttcagaggaggtggatctgggacagattttactttcaccatcagcagcctgcagcctgaagatgttgcaacatattactgtcaacagtatgatgatctccctccgtggacgttcggccaagggaccaaggtggaaatcaaac

SEQ ID NO: 2925 - DNA, 322 bp, Homo sapiens
  source 1..322: mol_type = other DNA
gacatccagatgacccagtctccttccaccctgtctgcatctgtaggagacagagtcaccatcacttgccgggccagtcagaatattggtaattggttggcctggtatcaacagaaaccagggaaagcccctaaactcctgatctctaaggcgtctagtttagaaagtggggtcccatcaaggttcagcggcagtggatctgggacagaattcactctcaccatcagcagcctgcaggctgatgattttgcaacttattactgccaaccgtataattattacttcatcaccttcggccaagggacacgactggagattaaac

SEQ ID NO: 2926 - DNA, 325 bp, Homo sapiens
  source 1..325: mol_type = other DNA
gaaatagtgatgacgcagtctccagccaccctgtctgtgtctgcaggggaaagagccaccctctcctgtagggccagtcagagtgttagcagcgacttagcctggtaccagcagaaacctggccaggctcccaggctcctcatctatggtgcatccaccagggccactggtatcccagccaggtttagtggcagtgggtctgggacagagttcactctcaccatcagcagcatgcagtctgaagattttgcactttattactgtcagcagtatcataactggcccccgatcaccttcggccaagggacacgactggagattaaac

SEQ ID NO: 2927 - DNA, 325 bp, Homo sapiens
  source 1..325: mol_type = other DNA
gaaattgtgttgacgcagtctccaggcaccctgtctttgtctccaggggaaagagccaccctctcctgcagggccagtcagagtgttagcagcagctacttagcctggtaccaacagaaacctggcctggcgcccaggctcctcatctatgatgcatccagcagggccactggcatcccagacaggttcagtggcagtgggtctgggacagacttcactctcaccatcagcagactggagcctgaagattttgcagtgtattactgtcagcagtatggtagctcaccgtggacgttcggccaagggaccaaggtggaaatcaaac

SEQ ID NO: 2928 - DNA, 340 bp, Homo sapiens
  source 1..340: mol_type = other DNA
gacatcgtgatgacccagtctccagacaccctggctgtgtctctgggcgagagggccaccatcaactgcaagtccagtcagactgttttatacacctccaacaataagaactacttagcttggtaccagcagagaccaggacagcctcctaaactgctcattcactgggcatctacccgggaatccggggtccctgaccgattcagtggcagcgggtctgggacaaatttcactctcgccatcagcaccctgcaggctgaagatgtggcagtttattactgtcagcaatattttcttactcctctcactttcggcggagggaccaaggtggagatcaaac

SEQ ID NO: 2929 - DNA, 337 bp, Homo sapiens
  source 1..337: mol_type = other DNA
gatattgtgatgacccagactccactctcctcacctgtcacccttggacagccggcctctatctcctgcaggtctagtcaaagcctcgtacacagtgatgggaacacgtatttgagttgggttcagcagaggccaggccagcctccaagactcctaatttataagatttctaatcgggtctctggggtcccagacagattcagtggcagtggggcagggacagatttcacactgaagatcagcagggtggaagctgaggatgtcggagtttattactgcatgcaagttaaagaatttcccctcactttcggcggagggaccagggtggagatcaaac

SEQ ID NO: 2930 - DNA, 328 bp, Homo sapiens
  source 1..328: mol_type = other DNA
gatattgtgttgacgcagtctccaggcaccctgtctttgtctccaggggaaggagccaccctctcctgcagggccagtcagagtgttagcagcaactacttagcctggtaccagcagaaacctggcctggcgcccaggctcctcatctatgatgcatccagcagggccactggcatcccagacaggttcagtggcagtgggtctgggacagacttcactctcaccatcagcagactggagcctgaagattttgcagtctattactgtcagcagtatggtagtacacctccgagtacttttggccaggggaccaagctggagatcaaac

SEQ ID NO: 2931 - DNA, 325 bp, Homo sapiens
  source 1..325: mol_type = other DNA
gaaattgtgttgacgcagtctccaggcaccctgtctttgtctccaggggaaagagccaccctctcctgcagggccagtcagagtgttagcagcaactgcttagtgtggtaccagcagaagcctggccaggctcccaggctcgtcatctatggtgcatccagcagggccactggcatcccagacaggttcagtggcagtggctctgggacagacttcactctcaccatcagcagactggagcctgaagattttgcagtgtattactgtcagcagtatggtagctcagtgtggacgttcggccaagggaccaaggtggaaatcaaac

SEQ ID NO: 2932 - DNA, 329 bp, Homo sapiens
  source 1..329: mol_type = other DNA
cagtctgccctgactcagcctgcctccgtgtctgggtctcctggacagtcgatcaccatctcctgcactggaaccagcagtgatttaggtacttatgagtatgtctcctggtaccagcagcactcaggcaaagcccccaaactcataatttttgatgtcactaagcggccttcaggggtttctagtcgcttctctggctccaagtctggcaacacggcctccctgacaatctctgggctccaggctgaggacgaggctgattattactgctgctcatatgcaggtcctggcacttcactctccggaagtgggaccaaggtcaccgtcct

SEQ ID NO: 2933 - DNA, 334 bp, Homo sapiens
  source 1..334: mol_type = other DNA
cagtctgtgctgactcagccaccctcagcgtctgggacccccgggcagagggtcaccatctcttgttccggaagctcctccaacatcggaactaataatgtatactggtaccagcaactcccaggaacggcccccaaactcctcatctataagaataatcagcggccctcaggggtccctgaccgaatctctggctccaagtctggcacctcagcctccctggccatcagtgggctccggtccgaggatgaggctgattattactgtgcaacatgggatgacagcctgagtgggtattgggtattcggcggagggaccaagttgaccgtcctag

SEQ ID NO: 2934 - DNA, 319 bp, Homo sapiens
  source 1..319: mol_type = other DNA
tcctatgagctgactcagccaccctcagtgtccgtgtccccaggacagacagccagcatcacctgctctggagataaattgggggataaatatgcttgctggtatcagcagaagccaggccagtcccctgtgctggtcatctatcaagatagcaagcggccctcagggatccctgagcgattctctggctccaactctgggaacacagccactctgaccatcagcgggacccaggctatggatgaggctgactattactgtcaggcgtgggacagcagcactggagtcttcggaactgggaccaaggtcaccgtcctag

SEQ ID NO: 2935 - DNA, 325 bp, Homo sapiens
  source 1..325: mol_type = other DNA
gaaattgtgttgacgcagtctccaggcaccctgtctttgtctccaggggaaagagccaccctctcctgcagggccagtcagagtgttagcaccaactacttagcctggtaccaacagaaacctggcctggcgcccaggctcctcatctatgatgcatccaccagggtcactggcatcccagacaggttcagtggcagtgggtctgggacagacttcactctcaccatcagcagactggagcctgaagattttgcagtgtattactgtcagcagtatggtagctcactctacacttttggccaggggaccaagctggagatcaaac

SEQ ID NO: 2936 - DNA, 334 bp, Homo sapiens
  source 1..334: mol_type = other DNA
cagtctgtgctgactcagccaccctcagcgtctgggacccccgggcagagggtcaccatctcttgttctggaaccagctccaacatcggaagtaatcatgtatactggtaccagcagctcccaggaacggcccccagactcctcatctataagcataatcagcggccctcaggggtccctgaccgattctctggctccacgtctggcacctcagcctccctggccatcagtggcctccggtccgaggatgaggctgattattactgtgcagcctgggatgccagcctgagtggccttgctgtgttcggaggaggcacccagctgaccgtcctcg

SEQ ID NO: 2937 - DNA, 325 bp, Homo sapiens
  source 1..325: mol_type = other DNA
gacatccagatgacccagtctccttccaccctgtctgcatctgtaggagacagagtcaccatcacttgccgggccagtcagagtattagtagctggttggcctggtatcagcagaaaccagggaaagcccctaagctcctgatctataaggcgtctagtttagaaagtggggtcccatcaaggttcagcggcagtggatctgggacagaattcactctcaccatcagcagcctgcagcctgatgattttgcaacttattactgccaacagtataatagtttttctgggtacacttttggccaggggaccaagctggagatcaaac

SEQ ID NO: 2938 - DNA, 340 bp, Homo sapiens
  source 1..340: mol_type = other DNA
gatattgtgatgacccagactccactctctctgtccgtcacccctggacagccggcctccatctcctgtaagtctagtcagagcctcctgcataatgatggaaagacctacttgtattggtacctgcagaagccaggccagtctccacagctcctgatccatgaagattccaggcggttctctggagtgccagataggttcagtggcagcgggtcagggacagatttcacactgaaaatcagccgggtggaggctgaggatgttggggtttattactgcatgcaaggtaaacattttcgtctctacacttttggccaggggaccaagctggagatcaaac

SEQ ID NO: 2939 - DNA, 340 bp, Homo sapiens
  source 1..340: mol_type = other DNA
gatattgtgatgacccagactccactctctctgtccgtcacccctggacagccggcctccatctcctgcaagtctagtcagagcctcctgcatagtgatggaaagacctatttggattggttcctgcagaagccaggccagtctccacagctcctgatatatgaggtttccagccggttctctggagtgccagataggttcagtggcagcgggtcagggacagatttcacactgaaaatcagccgggtggaggctgaggatgttggggtttattactgcatgcaaggtatacagcttcctccgatcaccttcggccaagggacacgactggagattaaac

SEQ ID NO: 2940 - DNA, 334 bp, Homo sapiens
  source 1..334: mol_type = other DNA
cagtctgccctgactcagcctgcctccgtgtctgggtctcctggacagtcgatcaccatctcctgcactggaaccagcaatgacgttggtgcctatgactctgtctcctggtaccaacagcacccaggcaaagcccccaaactcattatttttggggtcactaatcggccctcaggggtttctactcgcttctctggctccaagtctggcaccacggcctccctgaccatctctgggctccaggctgaggacgaggctgattattactgcagttcatatacaagcagcgtttctctcgatgtcttcggaactgggaccaaggtcaccgtcctag

SEQ ID NO: 2941 - DNA, 322 bp, Homo sapiens
  source 1..322: mol_type = other DNA
gacatccagatgacccagtctccttccaccctgtctgcatctgtaggcgacagagtcaccatcacttgccgggccagtcagactattggtagttatttggcctggtatcagcagaaaccagggaaagcccctaaactcctgatctctaagacgtctaatttagaaggtggggtcccatcaaggttcagcggcagtggatctgggacagaattcactctcactatcagcaccctgcagcctgatgattttgcaacttattactgccaacactataatttttattcgtggacgttcggccaagggaccaaggtggaaatcaaac

SEQ ID NO: 2942 - DNA, 322 bp, Homo sapiens
  source 1..322: mol_type = other DNA
gacatccagatgacccagtctccatcctcactgtctgcatctgtaggggacagagtcaccatcacttgtcgggcgagtcagggcattagcaattccttagcctggtttcagcagaaaccagggaaagcccctaagtctctgatctatgatgcatccagtttgcaaagtggggtcccatcaaagttcagcggcagtggatctgggacagatttcactctcaccatcagcagcctgcagcctgaagattttgcaacttattactgccaacagtataatagttatcctctcactttcggcggagggaccaaggtggatatcaaac

SEQ ID NO: 2943 - DNA, 329 bp, Homo sapiens
  source 1..329: mol_type = other DNA
cagtctgccctgactcagcctgcctccgtgtctgggtctcctggacagtcgatcaccatctcctgcactggaaccagcagtgacgttggtggttataactatgtctcctggtatcaacaacgcccaggcaaagcccccaaactcatgatttatgaagtcactaatcggccctcaggggtttctaatcgcttctctggctccaagtctggcaacacggcctccctgaccatctctgggctccaggctgaggacgaggctcattattactgctgttcatatacaaggagcagtacctttctcttcgggactgggaccgaggtcaccgtcct

SEQ ID NO: 2944 - DNA, 323 bp, Homo sapiens
  source 1..323: mol_type = other DNA
aattgtgttgacgcagtctccaggcaccctgtctttgtctccaggggaaagagccaccctctcctgcagggccagccagagtgttagcagcagctacttagcctggtaccagcagaaacctggcctggcgcccaggctcctcatctatgattcatccaacagggccactggcatcccagacaggttcagtggcagtgggtctgggacagacttcactctcaccatcagcagactggagcctgaagattttgcagtgtattactgtcagcagtatgataactcacctccgacgttcggccaagggaccaaggtggaaatcaaac

SEQ ID NO: 2945 - DNA, 334 bp, Homo sapiens
  source 1..334: mol_type = other DNA
cagtctgccctgactcagcctgcctacgtgtctgggtctcctggacagtcgatcaccatctcctgcactggaaccagcagtgacgttggtggttataactctgtctcctggtaccaacaatacccaggcaaagcccccaaactcctgatttatgaggtcactaagcggccctcaggggtccctgatcgcttctctggctccaagtctggcaacacggcctccctgaccatctctgggctccaggctgaggacgaggctgattattactgcagttcatatacaagcagcgtttctctcgatgtcttcggaactgggaccaaggtcaccgtcctag

SEQ ID NO: 2946 - DNA, 319 bp, Homo sapiens
  source 1..319: mol_type = other DNA
gaagtagtcatgacgcagtctccagccaccctgtctgtctctccaggggaaagagccaccctctcctgcagggccactcagaatgttcgcttcagcttagcctggtatcaacaaagacttggccaggctcccaggctcctcatctatggtgcatccactagggccactggtatcccagccaggttcagtggcagtgggtctgggacagagttcactctcaccatcagcagcctgcagtctgaagattttgcagtttattactgtcagcagtatgataactggcctcggacgttcggccaagggaccaaggtggacatca

SEQ ID NO: 2947 - DNA, 325 bp, Homo sapiens
  source 1..325: mol_type = other DNA
gacatccagatgacccagtctccttccaccctgtctgcatctgaaggagacagagtcaccatcacttgccgggccagtcagagcattagtagttggttggcctggtatcaacagaaaccagggaaagcccctaagctcctgatctctaaggcgtctagtttggagagtggagtcccatcaaggttcagcggcagtggatctgggacagaattcactctcaccatcagcagcctgcagcctgatgattttgcaacttattactgccaacagtataatagttattcttccccgctcactttcggcggagggaccaaggtggagatca

SEQ ID NO: 2948 - DNA, 328 bp, Homo sapiens
  source 1..328: mol_type = other DNA
cagtctgcgctgacccaggaagcctcggtgtcagggaccgtgggacagaaggtcaccctgtcctgcactggaaacagcaacaacattggaagttatggtgtgggctggtaccaacagatttctcacggtgctcccaaaactgtaatgtttggaaattctccgccctcagggatccctgaccgcttctctggctcacagtctgggaccacagcctccctgactatctcgggcctccagcctgaggacgaggctgattattactgttcaacatgggactccagcctcactgcttatgtcttcggaactgggaccaaggtcaccgtcctag

SEQ ID NO: 2949 - DNA, 337 bp, Homo sapiens
  source 1..337: mol_type = other DNA
gatattgtgatgacccagactccgctctcctcacctgtcacccttggacagccggcctccatctcctgcaggtctagtcaaagcctcgtacacagtgatggaaacacctacttgagttggcttcagcagaggccaggccagcctccaagagtcctaatttataagatttctaaccgcttctctggggtcccagacagattcagtggcagtggggcagggacagatttcacactgaaaatcagcagggtggaagctgaggatgtcggcgtttattactgcatgcaagctacacaacttcctcacacttttggccaggggaccaagctggagatcaaac

SEQ ID NO: 2950 - DNA, 322 bp, Homo sapiens
  source 1..322: mol_type = other DNA
gccatccagatgacccagtctccctcctccctgtctgcatctgtaggagacagagtcaccataacttgccgggcaagtcaggacattagaaatgatttaggctggtatcagcagaaaccagggaaagcccctcaactcctgatctatactacatccactttacaaagtggggtcccatcaaggttcagcggcagtggatctggcactgatttcactctcaccatcagcagcctgcagcctgaagatcttgcaacctattactgtctgcaagattacaattatccgtacacttttggccaggggaccaagctggagatcaaac

SEQ ID NO: 2951 - DNA, 340 bp, Homo sapiens
  source 1..340: mol_type = other DNA
gatgttgtgatgactcagtctccactctccctgcccgtcacccttggacagtcggcctccatctcctgcaggtctagtcaaggcctcgtatacagtgatggaaacacctacttgacgtggtttcaacagaggccaggccaatctccaaggcgcctaatttataaggtttctaatcgggactctggggtcccagacagattcagcggcagtgggtcaggcactgatttcacactgaaaatcagcagggtggaggctgaggatattggggtttattactgcatgcaaggtacacactggcctccgtacacttttggccaggggaccaagctggagatcaaac

SEQ ID NO: 2952 - DNA, 322 bp, Homo sapiens
  source 1..322: mol_type = other DNA
gaaacgacactcacgcagtccccagctttcatgtcagcgactcctggagacaaagtcagcatatcctgcaaagccagccaagacattgatgatgatatgagctggttccaacagaaaccaggagaagctcctattttcatcattaaagaagcttctactctcgttcctggaatcccaccccgattcagtggcagcggatatggaacagattttaccctcacaattaataatatagaatctgaggatgctgcattttacttctgtctacaacatcataacttccctcggacttttggccaggggaccaagctggagatgaaac

SEQ ID NO: 2953 - DNA, 322 bp, Homo sapiens
  source 1..322: mol_type = other DNA
gacatccagatgacccagtctccatcctccctgtctgcatctgttggagacagagtcaccatcacttgccgggcaagtcagagcattagtacctatttaaattggtaccaacagaagccagggaaagcccctaaactcctgatctacgctgcttccagtttgctaagtggggtcccatcgaggttcagtggcagtggagctgggacagatttcactctcaccatcagcagtctgcaacctgaagattttgcaacttactactgtcaacagagttacgatacccctcggacgttcggccaagggaccgaggtggaaatcaaac

SEQ ID NO: 2954 - DNA, 331 bp, Homo sapiens
  source 1..331: mol_type = other DNA
tcctatgaactgacacagccaccctcggtgtcagtttccccaggacagacggccaggatcacttgctctggagatgcattgccaaggcaatatacttattggtatcaacagaagccgggccaggcccctatattggtgatatatagagacactgagaggccctcagggatccctgagcgattctctggctccagctcagggacaacagtcacgttgaccatcagtggagtccagacagaagatgaggctgactattactgtcaatcagcggacaccattgattcttattggggggcggtattcggcggagggaccaagctgaccgtcctag

SEQ ID NO: 2955 - DNA, 322 bp, Homo sapiens
  source 1..322: mol_type = other DNA
gccatccggatgacccagtctccatcctcattctctgcatctacaggagacagagtcaccatcacttgtcgggcgagtcagggtattgccagttatttagcctggtatcagcaaaaaccagggaaagcccctaagctcctgatctatgatgcatccactttgcaaagtggggtcccatcaaggttcagcggcagtggatctgggacagatttcactctcaccatcagctgcctgcagtctgaagattttgcaacttattactgtcaacagtattatcgttacccgtacacttttggccaggggaccaagctggagatcaaac

SEQ ID NO: 2956 - DNA, 320 bp, Homo sapiens
  source 1..320: mol_type = other DNA
gacatccagatgacccagtctccttccaccctgtctgcatctgtaggagacagagtcaccatcacttgccgggccagtcagactattagtagctggttggcctggtatcagcagaaaccagggaaagcccctaaggtcctgatctatgaggcgtctagtttagaaagtggggtcccatcaaggttcagcggcagtggatctgggacagaattcactctcaccatcagcagcctgcagcctgatgattttgcaacttattactgccaacagtataatagttattcgtacacttttggccaggggaccaagctggagatcaa

SEQ ID NO: 2957 - DNA, 338 bp, Homo sapiens
  source 1..338: mol_type = other DNA
gacttcgtgatgacccagtctccagactccctggctgtgtctctgggcgagagggccaccatcaactgcaagtccagccagaatcttttatgggactccaacaataaggattacttagcttggtaccaacagaaaccgggacagcctcctaggttgctcattcactgggctactacccgggaatccggggtccccgaccgattcagtggcagcgggtctgggacagatttcactctcaccatcagcaacctgcaggctgaagatgtggcaatttattactgtcaacaatattataatattccactcactttcggcggggggaccaaggtggagatcaa

SEQ ID NO: 2958 - DNA, 322 bp, Homo sapiens
  source 1..322: mol_type = other DNA
gacatccagttgacccagtctccatccttcctgtctgcatctgtaggagacagagtcaccatcacttgccgggccagtcagggcattagcagttatttagcctggtatcagcaaaaaccagggaaagcccctaagctcctgatctatgctgcatccactttgcaaagtggggtcccatcaaggttcagcggcagtggatctgggacagaattcactctcacaatcagcagcctgcagcctgaagattttgcaacttattactgtcaacagcttaatagttaccgattcactttcggccctgggaccaaagtggatatcaaac

SEQ ID NO: 2959 - DNA, 328 bp, Homo sapiens
  source 1..328: mol_type = other DNA
tcctatgagctgacacagccaccctcggtgtcagtgtccccaggacagacggccaggatcacctgctctggagatgcattggcaaataattatgcttattggtaccagcagaagccaggccaggcccctgtgttggtgatacttttggacagtgagaggccctcagggatccctgagcgattctctggctccagctcagggacaacagtcacgttgaccatcagtggagtccagccagaagatgaggctgactattactgtcaatcagcagacaccactacttcttatgggggggtattcggcggagggaccaagctgaccgtcctag

SEQ ID NO: 2960 - DNA, 322 bp, Homo sapiens
  source 1..322: mol_type = other DNA
gacatcccgatgacccagtctccgtcctccctgtctgcgtctgtgggagacagagtcaccatcgcttgccgggcgagtcggggcatcgctaatttcttagcctggtatcaacagagaccagggaaagcccctaaactcctgctctctgctgcatccagattggacagtggggtcccatccaggttcagtggcagtggatctggggcggattacactctcaccatcagcagcctgcagcctgaagattatgcaacttattactgtcaacagtattatactaccccgtggacgttcggccaagggaccaaggtggaaatcaaac

SEQ ID NO: 2961 - DNA, 325 bp, Homo sapiens
  source 1..325: mol_type = other DNA
gaaattgtgttgacgcagtctccaggcaccctgtctttgtctccaggggaaagagccaccctctcctgcagggccagtcagagtgttagcagcagctacttagcctggtaccagcagaaacctggccaggctcccaggctcctcatctatggtgcatccagcagggccgcgggcatcccagacaggttcagtggcagtgggtctgggacagacttcactctcaccatcagcagactggagcctgaagattttgcagtgtataactgtcagcagtatggtagttcgccgtacacttttggccaggggaccaggctggagatcaaac

SEQ ID NO: 2962 - DNA, 322 bp, Homo sapiens
  source 1..322: mol_type = other DNA
gacatccaggtgacccagtctccttccaccctgtctgcatctgtaggagacagagtcaccattacttgccgggccagtgagagtatcactaattggttggcctggtatcagcagaaaccagggaaagtccctaaactcctgatctatagggcgtctagtttagaaagtggggtcccatcacggttcagcggcagtggatctgggacagaattcactctcaccatcagcagtctgcagcctgatgatttcgcaacttattactgtctacagtatgatacttatcctcgggcgttcggccaagggaccaaggtggagttcaaac

SEQ ID NO: 2963 - DNA, 325 bp, Homo sapiens
  source 1..325: mol_type = other DNA
gaaattgtgttgacgcagtctccaggcaccctgtctttgtctccaggggaaagagccaccctctcctgtagggccagtcagactattaacaggaagtatttagcctggtaccagcagaaacctggccaggctcccaggctcctcatctatgctgcgtccagcagggccactggcatcccagacaggttcagtggcagtgggtctgggacagacttcactctcaccatcagcagactggagcctgaagactttgcactgtattactgtcagcagtatggtagttcaccgtacacttttggccaggggaccaagctggagatcaaac

SEQ ID NO: 2964 - DNA, 319 bp, Homo sapiens
  source 1..319: mol_type = other DNA
gaaattgtggtgacacagtctccagccaccctgtctttgtctccaggggaaagagccaccctctcctgcaggaccagtcagagttttagctccttagcctggtaccaacagaaacctggccaggctcccaggctcctcatctatgatgcatccaacagggccactggcatcccagccaggttcagtgccagtgggtctgggacagacttcactctcaccatcagcagcctagagcctgaagactttgcgatttattactgtctgcagcgtagcaactggcagtacacttttggccaggggaccaagctggagatcaaac

SEQ ID NO: 2965 - DNA, 325 bp, Homo sapiens
  source 1..325: mol_type = other DNA
gaaattgtgttgacacagtctccagccaccctgtctttgtctccaggggacagagccaccctctcctgcagggccagtcagagtgttaccacgtacttagcctggtaccaacagaaacctggccaggctcccaggctcctcatctatgatgcatccaacagggccactggcatcccagccaggttcagtggcagtgggtctgggacagacttcactctcaccatcagcagcctagagcctgaagattttgcagtgtattactgtcagcagcgaagcaactggcctcccctcactttcggcggagggaccaaggtggagatcaaac

SEQ ID NO: 2966 - DNA, 322 bp, Homo sapiens
  source 1..322: mol_type = other DNA
gacatccagatgacccagtctccatcctccctgtctgcatctgtaggagacagagtcaccatcacttgccgggcaagtcagagcattaccagccatttaaattggtatcagcagaaaccagggaaagcccctaacctcctgatctactctgcatccagtttacaaagtggggtcccttcaaggttcagtggcagtggatctgggacagatttcactctcaccatcagcagtctgcaacctgaagactttgcaacttactactgtcaacagagttacagtatcttattcactttcggccctgggaccaaagtggatatcaaac

SEQ ID NO: 2967 - DNA, 325 bp, Homo sapiens
  source 1..325: mol_type = other DNA
gaaatagtgatgacgcagtctccagccaccctgtctgtgtctccaggtgaaagagtcaccctctcctgcagggccagtcagagtgttagcggcaacttagcctggtaccagcaaaaacctggccaggctcccaggctcctcatctatggtgcatccaccagggccactgatatcccagccaggttcagtggcagtgggtctgggacagagttcactctcaccatcagcagcctacagtctgaagattttgcagtttattactgtcagcaatataataactggcctccgctcactttcggcggagggaccaaggtggagatcaaac

SEQ ID NO: 2968 - DNA, 322 bp, Homo sapiens
  source 1..322: mol_type = other DNA
gagattgtgttgacgcagtctccaggcaccctgtctttgtctccaggggaaagagccaccctctcctgcagggccagtgaaagtgttggcaccacgttcttcgcctggcaccagcagaaacctggccaggctcccaggctcctcatctatgatacatcccgcagggccactggcgtcccagacaggttcagtggcagtgggtctgggacagacttcactctcaccatcagcagactggagcctgaagatattgcagtgtattactgtcagcagtatggtatccccgtcactttcggcggagggaccaaggtggagatcaaac

SEQ ID NO: 2969 - DNA, 337 bp, Homo sapiens
  source 1..337: mol_type = other DNA
gacatcgtgatgacccagtctccagactccctgactgtgtctctgggcgagagggccaccatcaactgcaagtccagccagagtgttttatggaacgacaacaataagaactacttagcttggtaccagcagaaaccaggacaccctcctaacctcctcctttactgggcatctacccgggaatccggggtccctgaccgattcagtggcagcgggtctgggacagatttcactctcaccatcagcagcctgcaggctgaagatgtggcagtttattactgtcagcaatattatgccactcctgggacgttcggccaagggaccaaggtggaaatca

SEQ ID NO: 2970 - DNA, 319 bp, Homo sapiens
  source 1..319: mol_type = other DNA
gacatccagatgacccagtctccatcctccctggctgcatctgtaggagacagagtcaccatcacttgccgggcaagtcagagtattaatactaatttaaactggtatcagcagaaatcagggaaagcccctaatctcctgatctatggtgcatccagtttgcaaagtggggtcccatcaaggttcagtggcagtggatctgggacagatttcactctcaccatcagcaatctgcaacctgaggattttgcaacttactactgtcaacagagttacagtacacggacgttcggccaagggaccaaggtggaaatcaaac

SEQ ID NO: 2971 - DNA, 331 bp, Homo sapiens
  source 1..331: mol_type = other DNA
tcctatgaactgacacagccaccctcggtgtcagtttccccaggacagacggccaggatcacttgctctggagatgcattgccaaagcaatatgcttattggtatcaacagaaggtgggccaggcccctatattggtgatatatagagacactgagaggccctcagggatccctgagcgattctctggctccagctcagggacaacagtcacgttgaccatcagtggagtccagacagaagatgaggctgactattattgtcaatcagcggacaccattgattcttattggggggcggtattcggcggagggaccaagctgaccgtcctag

SEQ ID NO: 2972 - DNA, 322 bp, Homo sapiens
  source 1..322: mol_type = other DNA
gaaatagtgatgacgcagtctccagccaccttgtctgtgtctccaggggaaagagtcaccctctcctgcagggccagtcagagtattaactccaacttagcctggtatcagaagaaacctggccaggctcccaggctcctcatctttggtgcttccaccagggccgctggtgtcccagccaggttcagtggcagtgggtctgggacagagttcattctcaccatcagcagcctgcagtctgaagattttgcagtttattcctgtcagcagtattataactggcctccgatcaccttcggccaagggacacgagtggagatta

SEQ ID NO: 2973 - DNA, 328 bp, Homo sapiens
  source 1..328: mol_type = other DNA
gaaattgtgttgacgcagtctccaggcaccctgtctttgtctccaggggaaagagccaccctctcctgcagggccagtcagagtgttagcagcagctacttagcctggtaccagcagaaacctggccaggctcccaggctcctcatctatggtgcatccagcagggccactggcatcccagacaggttcagtggcagtgggtctgggacagacttcactctcaccatcagcagactggagcctgaagattttgcagtgtattactgtcagcagtatggtagctcacctccgctcactttcggcggagggaccaaggtggagatcaaac

SEQ ID NO: 2974 - DNA, 325 bp, Homo sapiens
  source 1..325: mol_type = other DNA
gacatccagatgacccagtctccatcgtccctgtcggcatctgtaggagacagagtcaccgtcacttgccgggcaagccagtatatttcttattatttaaattggtatcaacaaaagccagggaaagcccctaaactcctgatctatggtgcaaccaccttgcaaagtggggtcccatcaaggttcagtggcagtggatctgggacagatttcactctcaccatcagcggtctgcagcctgaagattttgcaacttactactgtcaacagagttacactactccccctttcactttcggccctgggaccaaagtggatatcaaac

SEQ ID NO: 2975 - DNA, 325 bp, Homo sapiens; identical to SEQ ID NO: 2319
  source 1..325: mol_type = other DNA

SEQ ID NO: 2976 - DNA, 325 bp, Homo sapiens
  source 1..325: mol_type = other DNA
tcctatgagctgacacagccaccctcggtgtcagtgtccccaggacagacggccaggatcacctgctctggagatgcattgccaaagcaatatgcttattggtaccagcagaagccaggccaggcccctgtgctggtgatatataaagacagtgagaggccctcagggatccctgagcgattctctggctccagctcagggacaacagtcacgttgaccatcagtggagtccaggcagaagacgaggctgactattactgtcaatcagcagacagcagtggtacttctgtggtattcggcggagggaccaagctgaccgtcctag

SEQ ID NO: 2977 - DNA, 328 bp, Homo sapiens
  source 1..328: mol_type = other DNA
cagtctgcgctgacccaggaagcctcggtgtcagggaccgtgggacagaaggtcaccctgtcctgtactggaagcagcaagaacattggaagttatgctgtgggctggtaccaacagatttctcacggtgctcccaaaactgtgatgtttgcaaattctctgccctcagggatccctgaccgcttctctggctcacagtctgggaccacagcctccctgactatttcgggcctccagcctgaggacgaggctggttattactgttcaacatgggacgacagcctcagtgctcaggtgttcggcggagggaccaagctgaccgtcctag

SEQ ID NO: 2978 - DNA, 322 bp, Homo sapiens
  source 1..322: mol_type = other DNA
gacatccagatgacccagtctccatcctccctgtctgcatctgtaggagacagagtcattatcacttgccgggcaagtcagaccattagcacctatttaaattggtatcagtacaaacccgggaaagcccccagcctcctgatctatgctgcatccactttgcaaagtggggccccatcaagattcagtggcggtgggtctggtacagatttcacactcaccataagcagtctgcaacctgatgatttcgccacttactactgtcaccagagttatgataatcctcagacgttcggccacgggaccaaggtggaaatcaaac

SEQ ID NO: 2979 - DNA, 325 bp, Homo sapiens
  source 1..325: mol_type = other DNA
gaaatagtgatgacgcagtctccagccaccctgtctatgtctccagggcaaagagtcaccctctcctgcagggccagtcagagtgttaacaacaacttagcctggtatcagaagaaacctggccaggctcccaggctcctcatctatgctgcatccaccagggccactggtatcccagccaggttcagtggcagtgggtctgggacagagttcactctcaccatcggcagcctgcagtctgacgattttgcagtttattactgtcagcagtattctaactggcctccgctcactttcggcggagggaccaaggtggagatcaaac

SEQ ID NO: 2980 - DNA, 337 bp, Homo sapiens
  source 1..337: mol_type = other DNA
gatgttgtgatgactcagtctccactctccctgcccgtcacccttggacagccggcctccatctcctgcaggtctagtcaaagcctcgtatacagtgatggagacacctacttgaattggtttcagcagcggccaggccaatctccaaggcgcctaatttataaggtttctaaccgggactctggggtcccagacagattcagcggcagtgggtcaggcactgatttcacactgaaaatcagcagggtggaggctgaggatgttggggtttattactgcatgcaaggtacgcactggccattcactttcggccctgggaccaaagtggatatcaaac

SEQ ID NO: 2981 - DNA, 340 bp, Homo sapiens
  source 1..340: mol_type = other DNA
gacatcgtgatgacccagtctccagactccctgactgtgtctctgggcgagagggccaccatcaactgcaagtccagccagagtgttttatacgactccaacaacaagaactacttagcttggtaccaggagaggccaggacagcctcctaagctgctcatttactgggcgtctacccgggagtccggggtccctgaccgattcagtggcagcgggtctgggacagatttcactctcaccatcagcagcctgcaggctgaagatgtggcagtttattactgtcagcaatattatggtcatccgttcacttttggccaggggaccaagctggagatcaaac

SEQ ID NO: 2982 - DNA, 340 bp, Homo sapiens
  source 1..340: mol_type = other DNA
gacatcgtggtgacccagtctccagactccctggctgtgtctctgggcgagagggccaccctcaactgcaagaccagccagagtgtcttatatcctggcaacaatgagaactccttagcctggatccaacagaaaccaggacagcctcctaaggtgctcatatactgggcatctacccgggaatccggggtccctgaccgattcggtggcagcgggtctgggacagatttcactctcaccatcagcagcctgcaggctgaagatgtggcagtttattactgtcaccaatattacagtagtccgtggacgttcggccaagggaccaaggtggaaatcaaac

SEQ ID NO: 2983 - DNA, 322 bp, Homo sapiens
  source 1..322: mol_type = other DNA
gacatccagatgacccagtctccatcctccctgtctgcatctgtaggagacagagtcaccatcacttgccgggcaagtcagagcattagcggctatttaaattggtatcagcagaaaccagggaaagcccctaagctcctgatctatgctgcatccactttgcaaagtggggtcccatcaaggttcagtggcagtgtatctggcacagatttcactctcaccatcagcagtctgcaacctgaagattttgcaacttactactgtcaacagagttacagtacccctcggacgttcggccaagggaccaaggtggaaatcaaac

SEQ ID NO: 2984 - DNA, 319 bp, Homo sapiens
  source 1..319: mol_type = other DNA
tcctatgagctgactcagccaccctcagtgtccgtgtccccaggacagacagccagcatcacctgctctggagataaattgggcgataaatatgcttgctggtatcagcagaagccaggccagtcccctgttctggtcatctatcaagataccaagcggccctcagggatccctgagcgattctctggctccaactctgggaacacagccactctgaccatcagcgggacccaggctatggatgaggctgactattactgtcaggcgtgggacagaggcctgtgggtgttcggcggagggaccaagctgaccgtcctag

SEQ ID NO: 2985 - DNA, 340 bp, Homo sapiens
  source 1..340: mol_type = other DNA
gacatcgtgatgacccagtctccagactccctggctgtgtctctgggcgagagggccaccatcaactgcaagtccagccagagtgttttatacaactccaacaatttgaactacttaggttggtaccaacagaaaccaggacagcctcctaagttactcatttactgggcatctacccgggaatccggggtccctgaccgattcagtggcagcgggtctgggacagatttcactctcaccatcagcagcctgcaggctgaagatgtggcaatttattactgtcagcaattttatagtcttccgctcactttcggcggagggaccaaggtggagatcaaac

SEQ ID NO: 2986 - DNA, 346 bp, Homo sapiens
  source 1..346: mol_type = other DNA
caggctgtgctgactcagccgtcttccctctctgcatctcctggagcagcagccagtctcacctgcaccttgcgcagtggcatcaatgttgatacctacaggatatactggtaccagcagaagccagggagtcctccccagtatctcctgatgtacaattcagactcacataaggagcagggctctggagtccccagccgcttctctggatccaaagatgcttcggccaatgcagggattttagtcatctctgggctccagtctgaggatgaggctgactattactgtatgatttggcacagtgatgcttgggtgttcggcggagggaccaagctgaccgtcctag

SEQ ID NO: 2987 - DNA, 325 bp, Homo sapiens
  source 1..325: mol_type = other DNA
gagattgtgctgacgcagtctccaggcaccctgtctttgtctccaggggaaagagccaccctctcctgcagggccagtcagagtgttagcagcagctacttaggctggtaccagcagaagcctggccaggctcccaggctcctcatctatggtgcttccagcagggccactggcatcccagacaggttcagcggcagtgggtctgggacagacttcactctcaccatcagcagactggagcctgaagattttgcagtgtattactgtcaacagtatggaaccttacagctcactttcggcggagggaccaaggtggagatcaaac

SEQ ID NO: 2988 - DNA, 325 bp, Homo sapiens
  source 1..325: mol_type = other DNA
gaaattgtgttgacgcagtctccaggcaccctgtctttgtctccaggggaaagagccaccctctcctgcagggccagtcagagtgttagcagcagctacttagcctggtaccagcagaaacctggccaggctcccaggctcctcatctatggtgcatccagcagggccactggcatcccagacaggttcagtggcagtgggtctgggacagacttcactctcaccatcagcagactggagcctgaagattttgcagtgtattactgtcagcagtatggtagctcactgtacacttttggccaggggaccaagctggagatcaaac

SEQ ID NO: 2989 - DNA, 325 bp, Homo sapiens
  source 1..325: mol_type = other DNA
gaaactgtattgacgcagtctccaggcaccctgtctttgtctccaggggaaagagccaccctctcctgcagggccagtcagagtgttagtagcagttacttaacctggtaccagcagaaatctggccaggctcccaggctcctcatctatggtgcatccaggagggccgctggcatcccagacaggttcagtggaagtgggtctgggacagacttcactctcaccatcagcagactggagcctgaggattttgcagtgtactactgtcagcactatggtagttcactctggacgttcggccaagggaccaaggtggaaatcaaac

SEQ ID NO: 2990 - DNA, 331 bp, Homo sapiens
  source 1..331: mol_type = other DNA
cagtctgccctgactcagcctgcctccgtgtctgggtctcctggacagtcgatcaccatctcctgcactggaaccagcagtgacgttggtggttataactatgtctcctggtaccaacagcacccaggcaaagcccccaaactcatgatttatgaggtcagtaatcggccctcaggggtttctaatcgcttctctggctccaagtctggcaacacggcctccctgaccatctctgggctccaggctgaggacgaggctgattattactgcagctcatatacaagcagcattctcgtggtattcggcggagggaccaagctgaccgtcctag

SEQ ID NO: 2991 - DNA, 322 bp, Homo sapiens
  source 1..322: mol_type = other DNA
tcctatgagctgacacagccaccctcggtgtctgtgtccccaggacagacggccaggatcacctgctctggagatgcattgccaaaccaatatgcttcttggtaccagcagacgccaggccaggcccctgtggtggtgatatataaagacagtgagaggccctcagggatccctgagcgattctctggctccagctcagggacaacagtcacgttgaccatcagtggagtccaggcagaagacgaggctgactattactgtcaatcagcagacagcagtggtacccgggtgttcggcggagggaccaagttgaccgtcctag

SEQ ID NO: 2992 - DNA, 336 bp, Homo sapiens
  source 1..336: mol_type = other DNA
cagtctgtgctgacgcagccgccctcagtgtctggggccccagggcagagggtcaccatctcctgcactgggagcagctccaatatcggggcagcttatgatgtacactggtaccagcagcttccaggaacagcccccaaactcctcatctatggtaacgactatcggccctcaggggtccctgaccgattctctggctccaagtctggcacctcagcctccctggccatcactgggctccaggctgaggatgaggctgactattactgccagtcctatgacaccagcctgagtggttcgtatgtcttcggaagtgggaccaaggtcaccgtccta

SEQ ID NO: 2993 - DNA, 319 bp, Homo sapiens
  source 1..319: mol_type = other DNA
gacatccagatgacccagtctccatcctccctgtctgcatctgtaggagacagagtcaccatcacttgccgggcaagtcagagcattagcagctatttaaattggtatcagcagaaaccagggaaagcccctaagctcctgatctatgctgcatccagtttgcaaagtggggtcccatcaaggttcagtggcagtggatctgggacagatttcactctcaccatcagcagtctgcaacctgaagattttgcaacttactactgtcaacagagttacagcaccggagcgttcggccaagggaccaaggtggaaatcaaac

SEQ ID NO: 2994 - DNA, 334 bp, Homo sapiens
  source 1..334: mol_type = other DNA
gatgttgtgatgactcagtctccactctccctgcccgtcacccttgggcagccggcctccatctcctgctggtctagtcacagcctcgtatacaaagatgacaacacctacttgaattggtttcacctgaggccaggccaatctccaaggcgcctaatttataaggtttctgaccgggactctggggtcccagacagattcagcggcagtgggtcaggcactgacttcacactgaaaatcagcagggtggaggctgaggatgttggggtttattactgcatgcaaggtacacactggccgtacacttttggccaggggaccaagctggagatca

SEQ ID NO: 2995 - DNA, 325 bp, Homo sapiens
  source 1..325: mol_type = other DNA
gaaatagtgatgacgcagtctccagcctccctgtctgtgtctccaggggaaagagccaccctctcttgcagggccagtcagagtgttgtcagcaacttagcctggtatcagcagaggcctggccaggctcccaggctcctcatccatggtgcatccaccagggccactggtatcccagccaggttcagtggcagtgggtctgggacagagttcactctcaccatcagcagcctgcagtctgaagattttgcagtttattactgtcagcaatactataactggcctccgctcaccttcggcggagggaccaaggtggagatcaaac

SEQ ID NO: 2996 - DNA, 319 bp, Homo sapiens
  source 1..319: mol_type = other DNA
gacatccagatgacccagtctccatcctcgctgtctgcttcagtaggggacagagtcaccatctcttgccgggcaagtcagaacattaaaacgtatttaaattggtatcatcagaaaccagggaaagcccctaaactcctgatctatgctgcatccagtttgcaaagtggggtcccatcaaggttcagtggcagtggatctgggacagatttcagtctcaccatcactaatatacaacctgaagatttcgcaacttactattgtcaacagagtttcagttcccagttaagtttcggccctgggaccagagtggacatca

SEQ ID NO: 2997 - DNA, 322 bp, Homo sapiens
  source 1..322: mol_type = other DNA
gaaatagtgatgacgcagtctccagccaccctgtctgtgtctccaggggaaggagccaccctctcctgcagggccagtcagagtgttaacagcgacctagcctggtaccagcagaaacctggccaggctcccaggctcctcatctatggtgcgtccaccggggccactgatatcccggccaggttcagtggcagtgggtctgggacagagttcactctcaccatcagcagcctacagtctgaagattttgcagtttactactgtcagcagtattataactggcctccgacgttcggccatgggaccaaggtggaaatcaaac

SEQ ID NO: 2998 - DNA, 337 bp, Homo sapiens
  source 1..337: mol_type = other DNA
gatgttgtgatgactcagtctccactctccctgcccgtcacccttggacagccggcctccatctcctgcaggtctagtcaaagcctcgtgtacagtgatggaaacacctacttgagttggtttcagcagaggccaggccaatctccaaggcgcctaatttatcaggtttctaatcgggactccggggtcccagatagattcagcggcagtgggtcagacactgatttcacactgaaaatcagcagggtggaggctgaagatgttggtgtttattactgcatgcaaggtacacggtggccgggaagtttcggcggagggaccaaggtggagatcaaac

SEQ ID NO: 2999 - DNA, 334 bp, Homo sapiens
  source 1..334: mol_type = other DNA
caggctgtggtgattcaggagccctcactgactgtgtccccaggagggatagtcactctcacctgtggctccagcaccggtgctgtcaccagtggtcattatccctactggttccagcagaggcctggccaagcccccaggacactgatttatgatacaaacattaaacactcgtggacccccgcccgcttctcaggctccctccttggggacagagctgccctgacccttttgggtgcgcagcctgaggatgaggctgagtatttctgcttgctcgtctatagtgttgatcggccgggggtgttcggcggagggaccaagttgaccgtcctag

SEQ ID NO: 3000 - DNA, 322 bp, Homo sapiens
  source 1..322: mol_type = other DNA
gaaattgtgttgacacagtctccagccaccctgtctttgtctccaggggaaagagccaccctctcctgcagggccagtcagagtgttagcagctacttagcctggtaccaacagaaacctggccaggctcccaggctcctcatctatgatgcatccaacagggccactggcatcccagccaggttcagtggcagtgggtctgggacagacttcactctcaccatcagcagcctagagcctgaagattttgcagtttattactgtcagcagcgtagcaactggcctcccactttcggcggagggaccaaggtggagatcaaac

SEQ ID NO: 3001 - DNA, 335 bp, Homo sapiens
  source 1..335: mol_type = other DNA
tgttgtgatgactcagtctccaccctccctgtccgtcatccttggacagtcggcctccatctcctgctggtctagtgaaagcctccaatacaatgatggaaaaacttacttgcactggtttcagcagaggccaggccaatctccaaggcgcctaatttatcaggtttctaatcgggattctggggtcccagagagattcagcggcagtgggtcaggcactggcttcacactgaaaatcagcagagtggaggctgaggatgttggggtttattactgcatgcaagggaaatcttggccgggaagtttcggcggggggaccaagctggagatcaaac

SEQ ID NO: 3002 - DNA, 337 bp, Homo sapiens
  source 1..337: mol_type = other DNA
gatgttgtgatgactcagtctccactctccctgcccgtcacccttggacagccggcctccatctcctgcaggtctagtcaaagcctcgtatacagtgatggaaaaacctacctgaattggtatcaccagaggccaggccaatctccaaggcgcctaatttataacgtttctaatcggcactctggggtcccagacagattcagcggcagtgggtcaggcactgatttcacgctgaaaattagcagggtggaggctgaggatgttggggtttattactgcatgcaaggtacacacactcctcacacttttggccaggggaccaagctggagatcaaac

SEQ ID NO: 3003 - DNA, 329 bp, Homo sapiens
  source 1..329: mol_type = other DNA
gtttgtgctgcctcagccaccctcagcgtctgggacccccgggcagagggtcaccatctcttgttctggaagcagttccaacatgggaaaaaataatgtcaactggtaccagcaggtcccagggacggcccccaaactcctcatccatagtgataatcagcggccctcaggggtccctgaccgattctctggctccaagtctggcacctcagcctccctggcaatcagtgggctccagtctgaggatgaggctgattattactgtgcagtatgggatgacagcctgagtgtttgggtgttcggcggagggaccaagctgaccgtcctag

SEQ ID NO: 3004 - DNA, 343 bp, Homo sapiens
  source 1..343: mol_type = other DNA
gatgttgtgatgactcagtctccactctccctgcccgtcacccttggacagccggcctccatgtcctgcaggtctagtcaaagcctcttatacaaagatggaaacacctacttgagttggtttcagcagaggccaggccaatctccaaggcgcctaatttataaggtttctaaccgggactctggggtcccagacagattcagcggcagtgggtcaggcactgatttcacactgaaaatcagcagggtggaggctgaggatgttggggtttattactgcatgcaaggtacacactggcctccgggattcactttcggccctgggaccaaagtggatatcaaac

SEQ ID NO: 3005 - DNA, 322 bp, Homo sapiens
  source 1..322: mol_type = other DNA
gacatccagatgacccagtctccttccaccctgtctgcatctgtaggagacacagtcactatcacttgccgggccagtcagaggattaacagttggttggcctggtatcagcaaaaaccagggaaagcccctaaactcctgatctataagacgtctactttagagagtggggtcccatcaaggttcagcggcagtgaatctgggacagaattcactctcaccatctacagcgtgcagcctgatgattttgcaacttattattgccaacagtatagtacttactcgatgttcacttttggccaggggaccaacctggagatca

SEQ ID NO: 3006 - DNA, 325 bp, Homo sapiens
  source 1..325: mol_type = other DNA
tcttctgagctgactcaggaccctgctgtgtctgtggccttgggacagacagtcaggatcacatgccaaggagacagtctcagaaggtattatgcaagttggtaccagcagaagccaggacagacccctatacttgtcatctatggtaaaaacaaccggccctcagggatcccagaccgattctctggctccagctcaggaaacacagcttccttgaccatcactggggctcaggcggaagatgaggctgactattactgtaactcccgggacagtagtggtcagtatcgggtatttggcggagggaccaggctgaccgtcctag

SEQ ID NO: 3007 - DNA, 337 bp, Homo sapiens
  source 1..337: mol_type = other DNA
gatattgtgatgactcagtctccactctccctgcccgtcacccctggagagccggcctccatctcctgcaggtctactcagagcctcctacatagtaatggaaacaattatgtggattggtacctgcagaagccagggcagtctccacagctcctgatctatttgggttctaatcgggcctccggggtccctgacaggttcagtggcagtggatcaggcacagattttacactgaaaatcagcagagtggcggctgaggatgttgggatttattactgcatgcaatctctacaaactccattcactttcggccctgggaccagagtggatatcaaac

SEQ ID NO: 3008 - DNA, 337 bp, Homo sapiens
  source 1..337: mol_type = other DNA
gattttgtgatgactcagtctccactctccctgcccgtcacccttggacagccggcctccatctcgtgcaggtctagtcaaagcctcgtatacagtgatggagacacctacttgaattggtttcagcagaggccaggccaatctccaaggcgcctaatttataaggtgtctaaccgggactctggggtcccagacagattcagcggcagtgggtcaggcactgagttcacactgaaaatcagcagggtggaggctgaggatgttggggtttattactgcatgcaaggtagtcactggcccttcaccttcggccaagggacacgactggagattaaac

SEQ ID NO: 3009 - DNA, 322 bp, Homo sapiens
  source 1..322: mol_type = other DNA
gacatccagatgacccagtctccttccaccatgtctgcatctgtaggagacagagtcaccatcacttgccgggccagtcagagtatcactagttggttggcctggtatcagcagaaaccagggaaagcccctaccctcctgatctatagggcgtctagtttacaaagtggggtcccatcaagattcagcggcagtggatctgggacagagttcactctcaccatcagcagcctgcagcctgatgattttgcaacttattactgccatcagtataaaacttatccgaggacgttcggccaagggaccaaggtggagatcaaac

SEQ ID NO: 3010 - DNA, 325 bp, Homo sapiens
  source 1..325: mol_type = other DNA
gaaattgtgttgacacagtctccaggcaccctgtctttgtctccaggggaaagggccaccctctcctgcagggccagtcagagtgttagcagcagctacttagcctggtaccagcagaaacctggccaggctcccaggctcctcatctatgctgcatctagcagggccactggcatcccagacaggttcagtggcagtgggtctgggacagacttcactctcaccatcagcagactggagcctgaggattttgcagtctattactgtcagcagtatggtagctcacctcgtacgttcggccaagggaccaaggtggaaatcaaac

SEQ ID NO: 3011 - DNA, 325 bp, Homo sapiens
  source 1..325: mol_type = other DNA
gacatccagatgacccagtctccttccaccctgtctgcatctgtcggagacagagtcacgatcgcttgccgggccagtgagagtgttagtgcttggttggcctggtatcagcagaaaccagggaaagcccctaagctcctgatctataaggcatctcatttagaaagtggggtcccatccaggttcagcggcagtggaactgagacagaattcactctcaccatcaccagcctgcagcctgatgattttgcaacttattactgccaacagtataaaagttattctcagtggacgttcggccaagggaccaacgtggaaatcaaac

SEQ ID NO: 3012 - DNA, 325 bp, Homo sapiens
  source 1..325: mol_type = other DNA
gaaattgtgttgacgcagtctccaggcaccctgtctttgtctccaggggaaagagccaccctctcctgcagggccagtcagagtgttagcagcagctactttacctggtaccagcagaaacctggccaggctcccaggctcctcatctatggtacatccagcagggccactggcatcccagacaggttcagtggcagtgggtctgggacagacttcactctcaccatcagcagactggagcctgaagattttgcagtgtattactgtcagcagtatggtagctcaccgctcactttcggcggagggaccaaggtggagatcaaac

SEQ ID NO: 3013 - DNA, 334 bp, Homo sapiens
  source 1..334: mol_type = other DNA
gatgttgtgatgactcagtctccactctccctgcccgccacccttggacagccggcctccatctcctgcaggtctagtgcaagcctcgtatacagtgatggaaacacctacttggattggtttcttcagaggccagggcaatctccaaggcgcctaatttataaggtttctaaccgggactcgggggtcccagacagattcagcggcggtgggtcaggcagtgatttcacactgagaatcagcagggtggaggctgaggatgttggaatttattactgcatgcagggtagacactggccatatacttttggccaggggaccaagctggagatca

SEQ ID NO: 3014 - DNA, 346 bp, Homo sapiens
  source 1..346: mol_type = other DNA
caggctgtgctgactcagccgtcttccctctctgcatctcctggagcatcagccagtctcacctgcaccttacgcagtggcatcaatgttgctacctacaggatatattggtaccagcagaagccagggagtcctccccaatatctcctgaggtacaaatcagactcagataagcagcagggctctggagtccccagccgcttctctggatccaaagatccttcggccaatgcagggattttgctcatctctgggctccagtctgaggatgaggctgactattattgtatggtttggcacaacagcgcttatgtcttcggaactgggaccaaggtcaccgtcctag

SEQ ID NO: 3015 - DNA, 328 bp, Homo sapiens
  source 1..328: mol_type = other DNA
cagactgtggtgactcaggagccctcactgactgtgtccccaggagggacagtcactctcacctgtgcttccagcactggagatgtcaccagtggtttctatccaaactggttccagcagaaacctggacaagcacccagggcactggtttatagtacaaccaacaaacactcctggacccctgcccggttctcaggctccctccttgggggcaaagctgccctgacactgtcaggtgtgcagcctgaggacgaggctgaatattactgcctgctctactgtgatggtgcttgggtgttcggcggagggaccacgctgaccgtcctag

SEQ ID NO: 3016 - DNA, 325 bp, Homo sapiens
  source 1..325: mol_type = other DNA
gacatccagatgacccagtctccttccaccctgtctgcatctgtaggagacagagtcaccatcacttgccgggccagtcagagtatcagtagctggttggcctggtatcagcagaaaccagggcaagcccctaagctcctgatctataaggcatctcatttagaaagtggggtcccagcaaggttcagcggcagtggatctgagacagaattcactctcaccatcagcagcctgcaggctgatgattttgcaacttattactgccaagagtataagagttattctcagtggacgttcggccaagggaccagggtggatgtcaaac

SEQ ID NO: 3017 - DNA, 337 bp, Homo sapiens
  source 1..337: mol_type = other DNA
gatattgtgatgacccagagtccactctctctgtccgtcacccctggacaaccggcctccatctcctgcaagtctagtgagagtctcctgcatagtgatggaaagacctatttgcattggtacctgcagaagccaggccagtctccacagctcctgatctatgaagtttccagccggttctctggagtgccagataggttcagcggcagcgggtcagggacagatttcacactgaagatcagccgggtggaggctgaggatgttgggatttattactgcatgcaaggtgtacaccttccgatcaccttcggcggagggaccaaggtggacatcaaac

SEQ ID NO: 3018 - DNA, 337 bp, Homo sapiens
  source 1..337: mol_type = other DNA
gatgttgtgatgacgcagtctccaccctccctgcccgtcacccttggacagccggcctccatctcctgcaggtctagtcagagtctcgtatatacaaatggaaacacctacttgaattggtttcaccagaggccaggccaatctccaaggcgcctaatatatgaggtttctaatcgggactctggggtcccagacagattcagcggcagtgggtcaggcactgatttcacactgagaatcagcagggtggaggctgaggatgttggactttactactgcatgcaaggtacacagtggccgtacacttttggccaggggaccaaggtagagatcaaac

SEQ ID NO: 3019 - DNA, 325 bp, Homo sapiens
  source 1..325: mol_type = other DNA
gacatccagatgacccagtctccttccaccctgtctgcatctgtaggagacagagtcaccatcacttgccgggccagtcggagtgttgagaggtggctggcctggtatcagcagaaaccagggcaagcccctaagctcctcatctataaggcatcttatttagaaagtggggtcccatcaaggttcagcggcagtggatctgagacagaattcactctcaccatcagcagcctgcaggctgatgattttgcaacttattactgccaagagtataggagttattctcagtggacgttcggccaagggaccagggtggatgtcaaac

SEQ ID NO: 3020 - DNA, 340 bp, Homo sapiens
  source 1..340: mol_type = other DNA
gacatcgtgatgacgcagtctccagactccctgactgtgtccctgggcgagagggccaccatcaactgcaggtccagccagagtcttttatacaggtccaacaagaaaaactacttagcttggtaccagcagaagccaggacagccccctaaactgctcatttcctgggcttctacccgggaatccggggtccctgaccgattcagtggcagcggctctgggacagctttcactctcaccatcagctgcctccaggctgaagatgtggcagtctattactgtcaacaatattatagtcttcctctcagtttcggcggggggaccaaggtggagatcaaac

SEQ ID NO: 3021 - DNA, 331 bp, Homo sapiens
  source 1..331: mol_type = other DNA
cagtctgtgctgactcagccgccctcagcgtctgggacccccgggcagacggtcaccatctcttgttctggaagcggctccaccatcggaagtaatactgtaaattggtaccacctgctcccagcaacggcccccaaactcctcatctatggtaatagtcaccggccctcaggggtccctgaccgattctctggctccaagtctggcacttcagcctccctggccatcagtggcctccagtctgaggatgagggtgattatttctgtgtatcttggcatgacggcctggatggttgggtgttcggcggagggaccaagctgaccgtcctag

SEQ ID NO: 3022 - DNA, 322 bp, Homo sapiens
  source 1..322: mol_type = other DNA
gaaattgtgttgacacagtctccagccaccctgtctttgtctccaggggaaagagccaccctcgcctgcagggccggtcagagtgttagcagctacttagcctggtaccaaaagaaacctggccaggctcccaggctcctcatctatgatgcatccaatagggccactggcatcccagccaggttcagtggcagtgggtctgggacagacttcactctcaccatcagcagcctagagcctgaagattttgcagtttatttctgtcagcagcatagcatctggcctgggacttttggccaggggaccaaggtggagatcaaac

SEQ ID NO: 3023 - DNA, 322 bp, Homo sapiens
  source 1..322: mol_type = other DNA
gaaattttgttgacgcagtctccaggcaccctgtctttgtctccaggggaaagagccaccctctcctgcagggccagtcagagtgttaggggcaacttcttagcctggtaccagcagaaacctggccagactcccaggctcctcatctatggtgcatccagcagggccactggcatcccagacaggttcagtggcagtgggtctgggacagacttcactctcaccatcagcagactggagcctgaagattttgcagtgtattactgtcaacaatatgatatcgtcctcactttcggcggagggaccaaggtggagatcaaac

SEQ ID NO: 3024 - DNA, 328 bp, Homo sapiens
  source 1..328: mol_type = other DNA
caggctgtggtgactcaggagccctcactgactgtgtccccaggagggacagtcactctcacctgctccagcactggagctgtcacccgtggtcatcaaccctactggatccagcagaggcctggccaagcccccaagacattgatttttgatacaaggaacacacactcctggacacctgcccggttctcaggctccctccttggggacaaagctgccctgaccctttcgggtgcgcagcctgaggatgaggctgagtattattgcttggtctcctatagtgatggtcggagagttttcggcggagggaccaagttgaccgtcctag

SEQ ID NO: 3025 - DNA, 337 bp, Homo sapiens
  source 1..337: mol_type = other DNA
gatgttgtgatgactcagtctccactctccctgcccgtcacccttggacagccggcctccatctcctgcaggtctagtcacagcctcgtatacagtgatggagacacctacttaatttggtttcagcagaggccaggccagtctccaaggcgccttatttataaggtttctaaccgggactctggggtcccagacagattcagcggcagtgggtcaggcactgatttcacactgagaatcagcagggtggaggctgaggatgttggcgtttattactgcatgcaaggtagacactggccgtacacttttggccaggggaccaagctggagatcaaac

SEQ ID NO: 3026 - DNA, 325 bp, Homo sapiens
  source 1..325: mol_type = other DNA
gaaatagtgctgacgcagtctccagccaccctgtctgtgtctccaggggaaagagccaccctctcctgcagggccagtcagagtgttagcagcgacttagcctggtaccagcaaaaacctggccagtctcccaggcttctcatctatggtgcatccaccagggccactggtatcccagccaggttcagtggcagtgggtctgggacagagttcactctcaccatcagcagcctgcagtctgaagattttgcagtttattactgtcagcagtataataactggcctccgctcactttcggcggagggaccaaggtggagatcaaac

SEQ ID NO: 3027 - DNA, 325 bp, Homo sapiens
  source 1..325: mol_type = other DNA
gacatccagatgacccagtctccttctaccctgcctgcatctgtaggagacagagtcaccatcacttgccgggccagtcagaatattaacacctggctggcctggtatcagcagaaaccagggaaagcccctaaactcttgatctataagacatctaatttagacagtggggtcccatcaaggttcagcggcagtgggtctgagaccgaattcactctcaccatcagcagcctgcagcctgatgattttgcaacttattactgccaagagtataatacttattctcagtggacgttcggccaagggaccaaggtggaaatcaaac

SEQ ID NO: 3028 - DNA, 321 bp, Homo sapiens
  source 1..321: mol_type = other DNA
gacatccagatgacccagtctccttccaccctgtctgcatctgttggagacagagtcaccttcacttgccgggccagtcagagtattaattactggttggcttggtatcagcagaaactagggaaagcccctaagctcctgatctccaaggcgtctactttagaaaatgggatcccatcaaggttcagcggcagtggatctgggacagaattcactctcaccatcaacggcctgcagcctgatgattttgcaacttattactgccaacaatataatagttatttcgcgacgttcggccaagggaccaaggtggaagtcaaa

SEQ ID NO: 3029 - DNA, 322 bp, Homo sapiens
  source 1..322: mol_type = other DNA
gccatccggatgacccagtctccatcctcactctctgcatctacaggagacagagtcaccatcacttgtcgggcgagtcagggtattagcagttatttagcctggtatcagcaaaaaccagggaaagcccctaagctcctgatctatgctgcatccactttgcaaagtggggtcccatcaaggttcagcggcagtggatctgggacagatttcactctcaccatcagctgcctgcagtctgaagattttgcaacttattactgtcaacagtattataattacccgctcactttcggcggagggaccaaggtggagatcaaac

SEQ ID NO: 3030 - DNA, 337 bp, Homo sapiens
  source 1..337: mol_type = other DNA
gatattgtgatgactcagtctccactctccctgcccgtcacccctggagagccggcctccatctcctgcaggtctagtcagagcctcctgcatagtaatggatacaactatttggattggtacctgcagaagccagggcagtctccacagctcctgatctatttgggttctaatcgggcctccggggtccctgacaggttcagtggcagtggatcaggcacagattttacactgaaaatcagcagagtggaggctgaggatgttggggtttattactgcatgcaagctctacaaagcgcgctcactttcggcggggggaccaaggtggagatcaaac

SEQ ID NO: 3031 - DNA, 331 bp, Homo sapiens
  source 1..331: mol_type = other DNA
cagtctgccctgactcagcctgcctccgtgtctgggtctcctggacagtcgctcaccatctcctgcactggaaccagcagtgacgttggtgcttataagtatgtctcctggtaccaacagcacccaggcagagcccccaaagtcatgatttatgatgtcagtaagcggccctcaggggtttctaatcgcttctctggctccaagtctggcaacacggcctccctgaccatctctgggctccaggctgaggacgagggtgattattactgcagctcatatacaagcagcagcactttggtattcggcggagggaccaagttgaccgtcctag

SEQ ID NO: 3032 - DNA, 340 bp, Homo sapiens
  source 1..340: mol_type = other DNA
gacatcgtgatgacccagtctccagactccctggctgtgtctctgggcgagagggccaccatcaactgcaagtccagccagagtgttttctacaagtccaacaagaggaactacttggcttggtaccaactgaggccaggccagcctccaaagttgctcatttactgggcatctgcccggcaatccggggtccctgaccgattcagtggcagcgggtctgcgacagatttcactctcaccatcagtagcctgcaacctgaagatgtggcgatttattactgtcaacaatattatggtacgccattcactttcggcccagggaccaaagtgcagatcaaac

SEQ ID NO: 3033 - DNA, 337 bp, Homo sapiens
  source 1..337: mol_type = other DNA
gatgctgtgatgactcagtctccactctccctggccgtcacccctggacagccggcctccatctcctgcaggtctggtcaaagcctcctatacagtgatggagacacctacttgaattggtttcagcagaggccaggccaatctccaaggcgcctgatttataaggtttctaagcgggactctggggtcccagacagattcagcggcagtgggtcaggcacttctttcacactgaaaatcagcagggtggaggctgaggatgctggcctttattactgcatgcaaggtacgctctggccgtacacttttggccaggggaccaagctggagatcaaac

SEQ ID NO: 3034 - DNA, 334 bp, Homo sapiens; identical to SEQ ID NO: 2863
  source 1..334: mol_type = other DNA

SEQ ID NO: 3035 - DNA, 337 bp, Homo sapiens
  source 1..337: mol_type = other DNA
gatgttgtgatgactcagtctccactctccctgcccgtcgcccttggacagccggcctccatctcctgcaggtctagtcaaagcctcgtatacagtgatggaaacacctatttgaattggtttcaacagaggccaggccaatctccaaggcgcctaatttatacggtttctaatcgggactctggggtcccagacagattcagcggcagtgggtcaggcactgatttcacactgaaaatcagcagggtggaggctgaggatgttgggttttattactgcatgcaaggtagacactggccgtacacttttggccaggggaccaagctggagatcaaac

SEQ ID NO: 3036 - DNA, 340 bp, Homo sapiens
  source 1..340: mol_type = other DNA
gacatcgtggtgacccagtctccagatttcctgactgtgtctctgggcgagagggccaccatcaactgctggtccagccagagtgttttctacaggtccaataaaaagaactacttagcttggtaccagcagaaaccaggacagcctcctaagctgctcatttcctgggcatctacccgggaatccggggtccctgaccgattcagtggcagcgggtctgggacagatttcactctcaccatcaacagcctgcaggctgaagatgtggcggtttattactgtcagcagtattatggtaatcctcagacgttcggccaagggaccaaggtggaaatcaaac

SEQ ID NO: 3037 - DNA, 331 bp, Homo sapiens
  source 1..331: mol_type = other DNA
cagtctgtcctgactcagcctgcctccgtgtctgggtctcctggacagtcgatcaccatctcctgcactggaaccagcagtgacgttggtggttataactatgtctcctggtaccaacagcacccaggcaaatcccccaaactcatgatttatgatgtcactaagcggccctcaggggtttctaatcgcttctctggctccaagtctggcaacacggcctccctgaccatctctgggctccaggctgaggacgaggctgattattactgcagctcatatacaagcagcagcactttggttttcggcggagggaccaagctggccgtcctag

SEQ ID NO: 3038 - DNA, 346 bp, Homo sapiens
  source 1..346: mol_type = other DNA
caggctgtgctgactcagccgtcttccctctctgcatctcctggagcatcagccagtctcacctgcaccttacgcagtggcatcaatgttgctacctacaggatatattggtaccagcagaagccagggagtcctccccagtatctcctgatgtacaaatcagactcagataagcagcagggctctggagtccccagccgcttctctggatccaaagatgcttcggccaatgcagggattttactcatctctgggctccagtctgaggacgaggctgactattattgtatggtttggcacagcagcgcttatgtcttcggaactgggaccaaggtcaccgtcctag

SEQ ID NO: 3039 - DNA, 337 bp, Homo sapiens
  source 1..337: mol_type = other DNA
gatattgtgatgactcagtctccactctccctgcccgtcacccctggagagccggcctccatctcctgcaggtctagtcagagcctcctacatagtaatggatacaactatttggattggtacctgcagaagccagggcagtctccacagctcctgatctatttgggttctaatcgggcctccggggtccctgacaggttcagtggcagtgaatcaggcacagattttacactgaaaatcagcagagtggaggctgaggatgttggggtttattactgcatgcagactctacaaactccgctcacttttggcggagggaccaaggtggatatcaaac

SEQ ID NO: 3040 - DNA, 325 bp, Homo sapiens
  source 1..325: mol_type = other DNA
gacatccagatgacccagtctccttccaccctgtctgcatctgtgggagacagagtcaccatcacttgccgggccagtcagaatattggtagctggttggcctggtatcagcagaaaccagggcaagcccctaaactcctgatctataaggcatctcatttagaaagtggggtcccatcaaggttcagcggcagtggatctgagacagaattcactctcaccatcggcagcctgcaggctgatgattttgcaacttattactgccaagagtataacagttattctcagtggacgttcggccaagggaccagggtggatgtcaaac

SEQ ID NO: 3041 - DNA, 328 bp, Homo sapiens
  source 1..328: mol_type = other DNA
gaaatagtgatgacgcagtctccagccaccctgtctctgtctccaggggaaagagccaccctctcctgcagggccagtcagagtgttactactttcttagcctggtaccagcagaaacctggccagcctcccaggctcctcatctatggtgcatccaccagggccactggtgtcccagccaggttcagtggcagtgggtctgggacagagttcactctcaccatcagcagcctgcagtctgaagattttgcagtttattactgtcagcagtataatagctggcctcccatgtacacttttggccaggggaccaagctggagatcaaac

SEQ ID NO: 3042 - DNA, 328 bp, Homo sapiens
  source 1..328: mol_type = other DNA
gaaattgtgttgacacagtctccagccaccctgtctttgtctccaggggaaagagccaccctctcctgcagggccagtcagagtgttagcacctacttagcctggtaccaacagaaacctggccaggctcccaggctcctcatctatgatgcatccaacagggccactggcatcccagccaggttcagtggcagtgggtctgggacagacttcactctcaccatcagcagcctagagcctgaagattttgcagtttattactgtcagcagcgtagtaattggcctcccaagtacacttttggccaggggaccaagctggagatgaaac

SEQ ID NO: 3043 - DNA, 325 bp, Homo sapiens
  source 1..325: mol_type = other DNA
tcccatgagctgacacagccaccctcggtgtcagtgtccccaggacagacggccaggatcacctgctctggagatgcattgtcaaagcgatatgcttcttggtgccagcagaagccaggccaggcccctgtggcggtgatatataaagacagtgagaggccctctgggatccctgagcgattctctggctccagctcagggacaacagtcacgttgaccatcactggggtccaggcagaagacgaggctgagtattactgtcaatcagcagacagcagtgattcttttgtactattcggcggagggaccaagctgaccgtcctag

SEQ ID NO: 3044 - DNA, 332 bp, Homo sapiens
  source 1..332: mol_type = other DNA
tgtgatgactcagtctccactctccctggccgtcacccctggacagccggcctccatctcctgcaggtctagtcaaagcctcgtatacagtgatggagacacgtacttgaattggtttcagcagaggccaggccaacctccaaggcgccttatctataaggtttctaaccgggactctggggtcccagacagattcagcggcagtgggtcaggcactgatttcacactgagaatcagtagggtggaggctgaggatgctggactttattactgcatgcaaggtacaaactggccgtactcttttggccgggggaccaagctggagatcaaac

SEQ ID NO: 3045 - DNA, 346 bp, Homo sapiens
  source 1..346: mol_type = other DNA
caggctgtgctgactcagccgtcttccctctctgcatctcctggagcatcagccagtctcacctgcaccttacgcagtggcatcgatgttggtacttacaggatatactggtaccagcagaagccagggagtcctccccagtatctcctgatgtacaaatcagactcagataagcagcagggctctggagtccccagccgcttctctggatccaaagatgcttcggccaatgcagggattttactcatctctgggctccagtctgaggatgaggctgactattactgtatgatttggcacagtggcgcttatgtcttcggaactgggaccaaggtcaccgtcctag

SEQ ID NO: 3046 - DNA, 325 bp, Homo sapiens
  source 1..325: mol_type = other DNA
gacgtccggatgacccagtctccttccaccctgtctgcatctgtaggggacagagtcaccatcacttgtcgggccagccagaatattaagacctggttggcctggtatcagcacaaaccagggcaagcccctaaactcctgatctacacggcatcgactttagaaagtggggtcccatctaggttcagaggcagtggatctgagacagagttcactctcaccatcagcaacctgcaggctgaagattctgcaatttattactgtcaagagtattacagttattctaggtggacgttcggccaggggaccagggtggatgtcaaac

SEQ ID NO: 3047 - DNA, 329 bp, Homo sapiens
  source 1..329: mol_type = other DNA
cagtctgtgatgactcagtcaccctcagcgtctgggacccccgggcagcgggtcaccatctcttgttctggaagcagctccaacatcggaagtagtaccgtactctggttccaacaggtcccaggagcggcccccaaactcctcatctttgataatagtcaccggccctcaggggtccctgaccgattctctggctccaggtctggcgcctcagcctccctggccattagtgggatccagtctgaggatgaggctgattattactgtgtagcctgggataacagtctgagtggatgggtgttcggcggagggaccaagctgaccgtcct

SEQ ID NO: 3048 - DNA, 337 bp, Homo sapiens
  source 1..337: mol_type = other DNA
gatactgtgatgactcaatatccactctccctggccgtcacccctggacagccggcctccatctcctgcaggcctagtcaaagcctcgtatacagtgatggagacacttatttgaattggtttcagcagaggccaggccaatctccaaggcgcctcatttacaaggtttctaaccgggactctggggtcccagacagattcagcggcagtgggtcaggcactgacttcacactgagaatcagcagggtggaggctgaggatgctggactttattactgcatgcaaggtacaaactggccgtacacttttggccgggggaccaagctggagatcaaac

SEQ ID NO: 3049 - DNA, 334 bp, Homo sapiens
  source 1..334: mol_type = other DNA
cagtctgccctgactcagcctcgctcagtgtccgggtctcctggacagtcagtcaccatctcctgcgctggaaccagcagtgatgttggtggttataactatgtctcctggtaccaacaccaccccggcaaagcccccaaactcatgatttatgatgtctttaagcggccctcaggggtccctgatcgcttctctggctccaagtctggcaacgcggcctccctgatcatctctgggctccaggctgaggatgaggctgattattactgctactcatattcaggcagctacactttttgggtgttcggcggagggaccaagctgaccgtcctag

SEQ ID NO: 3050 - DNA, 325 bp, Homo sapiens
  source 1..325: mol_type = other DNA
gacatccagatgacccagtctccatcctccctgtctgcatctgtaggagacagagtcaccatcacttgccaggcgagtcaggacattcgtaactatttaaactggtatcaacacaaaccagggaaagcccctaaactcttgatctacgatgcatccaatttggaaacaggggtcccatcaaggttcagtggaagtggatctgggacagattttactttcaccatcagaagtctgcagcctgaagattttgcaacatattactgtcaacagtatgataatctccctccattcactttcggcggagggaccaaggtggagatcaaac

SEQ ID NO: 3051 - DNA, 322 bp, Homo sapiens
  source 1..322: mol_type = other DNA
gacatccagatgacccagtctccttctaccgtgtctgcgtctgcaggagacagagtcaccatcacttgccgggccagtcgcagtatcagtagttggttggcctggtatcagcagaaactcgggcaagcccctaaactcctgatctataaggcgtctattttaaatagtggggtcccatcaaggttcagcggcagtgggtctgggacagaattcactctcaccatcagcaacctgcagcctgaagactttgcaatttattactgccagcagtatgaaagttattcttggacgttcggccaagggacccgggtggatttcaaac

SEQ ID NO: 3052 - DNA, 322 bp, Homo sapiens
  source 1..322: mol_type = other DNA
gaaacagtgatgacgcagtctcctgccaccctgtctgtgtctccaggggagagagccaccctctcctgcagggccagtcaatatgttagcatcaacttagcctggtaccaacagaaacctggccaggctcccaggctcctcatctatggtgcatccaccagggccactggtatcccagtcaggttcagtggcattgggtctgggacagagttcactctcaccatcagcggcctacagtctgaagattttgcaatttattattgtcaacagtataataactggccgctcaccttcggccaagggacacgactggaaattaaac

SEQ ID NO: 3053 - DNA, 337 bp, Homo sapiens
  source 1..337: mol_type = other DNA
gatgttgtgatgactcagtctccgctctccctgcccgtcacccttggacagccggcctccatctcctgcaggtctagtcaaagcctcgtatacaaagatggaaacacctacttgatttggtttcagcagaggccaggccaatctccaaggcgcctaatttatcaggtttctaaccgggactctggggtcccagacagattcagcggcagtgggtcaggcactgacttcacactgaaaatcagcagggtgcaggctgaggatgttggggtttattactgcatgcaaggcacacagtggccttacacttttggccaggggaccaagctggagatcaaac

SEQ ID NO: 3054 - DNA, 331 bp, Homo sapiens
  source 1..331: mol_type = other DNA
cagtctgccctgactcagcctgcctccgtgtctgggtctcctggacagtcgatcaccatctcctgcactggaaccagcagtgatgttgggagttataaccttgtctcctggtaccaacagcacccaggcaaagcccccaaactcatgatttatgacgtcagtaagcggccctcaggggtttctactcgcttctctggctccaagtctggcaacacggcctccctgacaatctctgggctccaggctgaggacgaggctgattattactgctgctcatatgcacgtagtagcacttgggtgttcggcggagggaccaagctgaccgtcctag

SEQ ID NO: 3055 - DNA, 322 bp, Homo sapiens
  source 1..322: mol_type = other DNA
gacatccagatgacccagtctccatcctcactgtctgcatctgtaggagacagagtcaccatcacttgtcgggcgagtcagggcattagcaattatttagcctggtttcagcagaaaccagggaaagcccctaagtccctgatctttgctgcatccacttttgaaagtggggtcccatcaagattcagcggcagtggatctgggacagatttcactctcaccatcagcagcctgcagcctgaagattttgcaacttattactgccaacagtataatagttaccctctcactttcggcggagggaccaaggtggagatcaaac

SEQ ID NO: 3056 - DNA, 320 bp, Homo sapiens
  source 1..320: mol_type = other DNA
catccggatgacccagtctccattctccctgtctgcatctgtaggagacagagtcaccatcacttgccgggccagtcagagtgttagtaactggttggcctggtatcagcagaaaccagggaaagcccctaagctcctgatctataaggcgtctattttagaaagtggagtcccatcaaggtacagtggcagtggttctgcgacagaattcactctcaccatcagcagcctgcagcctgaagatgctgcaacttattactgtcaaaaatataacagtgccccgctcaccttcggcggagggaccaaggtggagatcaaac

SEQ ID NO: 3057 - DNA, 337 bp, Homo sapiens
  source 1..337: mol_type = other DNA
gatgttgtgatgactcagtctccactctccctgcccgtcacccttggccagccggcctccgtctcctgcaggtctagccaaagcctcgtatacacagatggaaacaccttcttgaattggtttcagcagaggccaggccaatctccaaggcgcctaatttatcaggtttctaaccgggactctggggtcccagacagattcagcggcagtgggtcaggcactgacttcacactgaaaatcagcagggtggaggctgaggatgttggggtttattattgcatgcaaggtacacagtggccttacacttttggccaggggaccaagctggagatcaaac

SEQ ID NO: 3058 - DNA, 337 bp, Homo sapiens
  source 1..337: mol_type = other DNA
gatgttgtgatgactcagtctccactcaccctgcccgtcacccttggacagccggcctccatctcctgcaggtctagtcaaggcctcgtatacagtgatggaaacacctacttgagttggtttcaacagaggccaggccaatctccaaggcgcctcatttataaggtttctaaccgggactctggggtcccagacagattcagcggcagtgggtcaggcactgatttcacactggatatcagcagggtggaggctgaggatgttggggtttattactgcatgcaaggtacacactggcctctcactttcggcggagggactaaggtggagatcaaac

SEQ ID NO: 3059 - DNA, 331 bp, Homo sapiens
  source 1..331: mol_type = other DNA
cagtctgtgttgacgcagccgccctcagtgtcggcggcccccggacagaaggtcaccatctcctgctctggaagcagctccaacattggagctgattatgtatcctggtaccagcagtttccaggaacagcccccaaactcctcatttatgacaataataagcgaccctcagggattcctgaccgattctctggctccaagtctggcacgtcagccaccctgggcatcaccgggctccagactggggacgaggccgattactactgcggaacatgggatcgcagcctgagtgctgtggttttcggcggagggaccaagctgaccgtcctag

SEQ ID NO: 3060 - DNA, 325 bp, Homo sapiens
  source 1..325: mol_type = other DNA
gaaattgtattgacgcagtctccaggcaccctgtctttgtctccaggggaaagagccaccctctcctgcagggccagtcagagtgtaacccgcaacaactttgtctggttccaacagaaacctggccaggctcccaggctcctcatctatggtgcatccagcagggccactggcatcccagacaggttcagtggcagtgggtctgggacagacttcactctcagcatcagcagactggaacctgaggattttgcagtgtattactgtcagcagtatggtagctcagtctggacgttcggccaagggaccaaggtggagatcaaac

SEQ ID NO: 3061 - DNA, 329 bp, Homo sapiens
  source 1..329: mol_type = other DNA
cagtctgccctgactcagcctgcctccgtgtctgggtctcctggacagtcgatcaccatctcctgcactggaaccagcagtgatgttgggaattataatcttgtctcctggtatcaacaacacccaggcaaagtccccaaactcatgatttatgacgtcggtaagcggccctcaggggtttctaatcgcttctctggctccaagtctggcaacacggcctccctgacaatctctgggctccaggctgaggacgaggctgattattactgctgctcatatgcaggtagtgacacttgggttttcggcggagggaccaagctgaccgtcct

SEQ ID NO: 3062 - DNA, 343 bp, Homo sapiens
  source 1..343: mol_type = other DNA
gatgttgtgatgactcagtctccacactccctgcccgtcacccttggacagccggcctccatctcctgcaggtctagtcaaagcctcgtatatagtgatggagatggaaacacccatttgaattggtttcagcagaggccaggccaatctccaaggcgcataatttataaagtttctaaccgggactctggggtccccgacagattcagcggcagtgggtcagacactgatttcacactaaaaatcaacagggtggaggctgaggatattggggtttattactgcatgcaaggtacatactggccgtacacttttggccaggggaccaagctggagatcaaac

SEQ ID NO: 3063 - DNA, 316 bp, Homo sapiens
  source 1..316: mol_type = other DNA
gacatccagatgacccagtctccctcctccctgtctgcatctgtaggggacagagtcaccatcacttgccggacaagtcaggccattagaaaagatttaggctggtatcagcagaaactagggcaagcccctaagcgcctgatctatgctgcatccagtttacagagtggggtcccatcaagattcagcggcagtgcatctgggacagaattcactctcacaattagcagtctgcagcctgaagattctgcaacttattactgtctacagcataatagttacccctccttcggccaagggacacgactggagatta

SEQ ID NO: 3064 - DNA, 334 bp, Homo sapiens
  source 1..334: mol_type = other DNA
cagtctgtgctgacgcagtcgccctcagtgtctggggccccagggcagagggtcaccatctcctgcactgggggcagctccaacatcggggcaggttatgatgtacactggtaccagcaggttccaggaacagcccccaaattcctcatctatggtaacagcaatcggccctcaggggtccctgaccgattctctggctccaagtctggcacctcagcctccctggccatcacggggctccaggctgaggatgaggctgattattactgccagtcctatgacagaagcctgagaggttatgtcttcggaactgggaccaaggtcaccgtcctag

SEQ ID NO: 3065 - DNA, 322 bp, Homo sapiens
  source 1..322: mol_type = other DNA
gacatccagatgacccagtctccatcctccctgtctgcatctgtaggagacagagtcaccatcacttgccgggcaagtcagaacatttatagatatgtaaattggtatcagcagaaaccaggggaagcccctaacctcctcatccatcctgcatccagtttccaaagtggggtcccatctaggttcagtgccagtgggtctgggacagatttcactctcaccatcagcagtctgcaacctgcagattttgcagattacttctgtcaacaaagttacaccaccccgtatacatttggccaggggaccaagctggagatcaaac

SEQ ID NO: 3066 - DNA, 324 bp, Homo sapiens
  source 1..324: mol_type = other DNA
aaatagtgatgacgcagtctccagccaccctgtctgtgtctccaggggaaagagccaccctctcgtgcagggccagtcagagtattagcagcaacttggcctggtaccagcagcaacctggccaggctcccagactcctcatctatggtgcatccaccagggcctctgatatcccagccaggttcagtggcagtgggtctgggacagagttcactctcaccatcagcagcctgcagtctgaggattttgcagtttattactgtcagcagtatcataattggcctcccatcacttttggccaggggaccaaggtagagatcaaac

SEQ ID NO: 3067 - DNA, 322 bp, Homo sapiens
  source 1..322: mol_type = other DNA
gacatccagatggcccagtctccttccaccctgtctgcatctataggagacagagtcaccatcacttgccgggccagtcagagtattagtgactggttggcctggtatcagcagaaaccagggaaagcccctaacctcctgatctataaggcgtctaatttagaaagtggggtcccatcaagattcagcgccagtggatctgggacagaattcactctcaccatcagcagcctgcagcctgatgattctgcaacttattactgccaagagtatagtggttattcggtgacgttcggccaagggaccaaggtggacatcaaac

SEQ ID NO: 3068 - DNA, 337 bp, Homo sapiens
  source 1..337: mol_type = other DNA
gatattgtgatgacccagactccactctctctgtccgtcacccctggacagccggcctccatctcctgcaagtctagtcagagcctcctgcattctaatggaaagacctatttgtattggtacctgcagaagccaggccagcctccacggctcctgatctatgaagtctccaatcggttctctggagtgccagataggttcagtggcagcgggtcagggacagatttcacactgcaaatcagccgcgtggaggctgaggatattgggctttatttctgcatgcaaagtatacttcttccccctacgttcggccaaggggcacgactggagatcaaac

SEQ ID NO: 3069 - DNA, 325 bp, Homo sapiens
  source 1..325: mol_type = other DNA
tcctatgtgctgactcagccaccctcggtgtcagtggccccaggacagacggccagtattacctgtgggggcaactacattgcaagtaaaagtgtgcactggtaccaacagaagccaggcctggcccctgtactggtcgtctatgatgatagggaccggccctcagggatccctgagcgattctctggctccaactctgggaacacggccaccctgaccatcagcagggtcgaagccggggatgaggccgactattactgtcaggtgtggcatagtagtaatgatcattgggtgttcggcggagggaccaagctgaccgtcctag

SEQ ID NO: 3070 - DNA, 316 bp, Homo sapiens
  source 1..316: mol_type = other DNA
gacatagtgatgacgcagtctccagccaccctgtctgtggctccaggggaaagagccatcctctcctgcagggccagtgaaagtattagcagtcacttagcctggtaccaccacaaacctggccaggctcccaggctcctcatctatgctgcatcttccagggccactggtgtcccagcccggttcagtggcagtgggtctgggacagacttcactctcaccatcagcagcctgcagtctgaagattttggagtttattactgtcagcagtataataactggccctcttttggcccggggaccaagctggagatca

SEQ ID NO: 3071 - DNA, 328 bp, Homo sapiens
  source 1..328: mol_type = other DNA
tcctatgtgctgactcagccaccctcggtgtcagtggccccaggacagacggccaggattacctgtgggggtaacagcattggaagtaaaagtgtgcactggtaccagcagaaggcaggccaggcccctgtgctggtcgtctatgaagatcgcgaccggccctcagggatccctgagcgagtctctggctccaactctgggaacacggccaccctgaccatcagcagggtcgaagccggggatgaggccgactattactgtcaggtgtgggataccagtaatgagcatcctctggttttcggcggagggaccaagctgaccgtcctag

SEQ ID NO: 3072 - DNA, 322 bp, Homo sapiens
  source 1..322: mol_type = other DNA
gacatccagatgacccagtctccatcctccctgtctgcatctgtgggagacagagtcatcatcacttgccggacaagtcaggccattagcagttacttaagttggtatcagcacaagtcaggcaatgcccctaagcacctgatctatgctgctttgactttgcgaagtggggtctcgtcaaggttcagtggcggtggatctgggacaaatttcactctcaccatcaccagtctgcagcctgaagattttgcaacctactattgtcaacagagttacataaccccgtggacattcggccaagggaccaaggtggagatcaaac

SEQ ID NO: 3073 - DNA, 333 bp, Homo sapiens
  source 1..333: mol_type = other DNA
cagtctgccctgactcagcctccctccgtgtccgggtctcctggacagtcagtcgccatctcctgcactggaaccagcactgacgttggtaattataaccgtgtctcctggtaccagcagcccccaggcacagcccccaaactcataatttatgaggtcactaatcggccctcaggggtccctgatcgcttctctgggtccaagtctggcaacacggcctccctgaccatctctgggctccaggctgaggacgaggctgattactactgcagctcatttacaagtagcagcagcacccgttatgtcttcggaactgggaccaaggtcaccgtc

SEQ ID NO: 3074 - DNA, 323 bp, Homo sapiens
  source 1..323: mol_type = other DNA
gacatccagatgacccagtctccttccaccctgtctgcatctgtaggagacagagtcaccatcacttgccgggccagtcagagtttcagtagctggttggcctggtctcagcagaagccagggaaagtccctaagattctgatctataaggcgtctagtttggcaagtggggtcccatcaaggttcagcggcagtggatctgggacagacttcactctcaccatcagcagcctgcagcctgaagatttttcaacttattcctgccaacactataatggatattgtccacacttttggccaggggaccaagctggacatcaaac

SEQ ID NO: 3075 - DNA, 337 bp, Homo sapiens
  source 1..337: mol_type = other DNA
cagtctgccctgactcagcctccctccgcgtccgggtctcttggacagtcagtcaccatctcctgcgctggaaccagcagtgacgttggtagttctgactctgtctcctggtatcaacaacacctaggaaaagtccccaaaatcatcatttatgacgtcactaggcggccctcaggggtccctgatcgcttctctggctccaagtctggcaacacggcctccctgaccgtctctgggctccaggctgaggatgaggctgattattattgcagctcatatgtagtcagcaggcgcagcaggccggtcttcggaactgggaccaaggtcaccgtcctag

SEQ ID NO: 3076 - DNA, 337 bp, Homo sapiens
  source 1..337: mol_type = other DNA
gatattgtgatgactcagtctccactctccctgcccgtcacccctggagacccggcctccatctcctgtaggtctagtcagagcctcctgcatggtaatggacacacctatttggattggtacctgcagaagccagggcagtctccacaactcctgatctatttgggttccactcgggcctccggggtccctgacaggttcagtggcagcggatcaggcacagattttacactgaagatcagcagagtggaggctgaggatgttggggtttattactgcatgcaagctctacaaaccccattcactttcggccctgggaccaaagtggatctcaaac

SEQ ID NO: 3077 - DNA, 322 bp, Homo sapiens
  source 1..322: mol_type = other DNA
gacatccagttgacccagtctccatccttcctgtctgcatctgtaggagacagagtcaccatcacttgccgggccagtcagggcattagcagttatttagcctggtatcagcaaaaaccagggaaagcccctaagctcctgatctatgctgcatccactttgcaaagtggggtcccatcaaggttcagcggcagtggatctgggacagaattcactctcacaatcagcagcctgcagcctgaagattttgcaacttattactgtcaacagcttaatagttaccccgggactttcggccctgggaccaaagtggatatcaaac

SEQ ID NO: 3078 - DNA, 330 bp, Homo sapiens
  source 1..330: mol_type = other DNA
cagtctgtgttgacgcagccgccctcagtgtctgcggccccaggacagcaggtcaccatctcctgctctggaagcagctccaacattggaaataattatgtttcctggtaccagcagttcccaggaacagcccccaaactgctcatttatgacaataataagcgaccctcagggattcctgaccgattctctggctccaagtctggcacgtcagccaccctgggcatcaccggactccagactggtgacgaggccgattactactgcggaacatgggatcgcagcctgactgctgtggcattcggcggagggaccaagctgaccgtccta

SEQ ID NO: 3079 - DNA, 325 bp, Homo sapiens
  source 1..325: mol_type = other DNA
tcctatgtgctgactcagccaccctcggtgtctgtggcccctggacagacggccagcattacctgtgggggaaacaacattggaagtaaaagtgtgcactggtaccagcagaagccaggccaggcccctgtgctggtcgtctatgatgataccgaccggccctcaggaatccctgagcgattctctggctccaactctgggaacacggccaccctgaccatcagcagggtcgaagccggcgatgaggccgactattactgtcaggtgtgggatcgtagtagtgatcattgggtgttcggcggagggaccaagctgaccgtcctag

SEQ ID NO: 3080 - DNA, 337 bp, Homo sapiens
  source 1..337: mol_type = other DNA
gatattgtgatgactcagtctccactcttcctgcccgtcacccctggagagccggcctccatctcctgcaggtccagtcagagcctcctgcatggtaatggatacaactatttggattggtacctgcagaagccagggcagtctccacagctcctggtctatttgggttctaatcgggcctccggggtccctgccaggttcagtggcactggatcagggacagactttacactgaaaatcagcagagtggaggctgaggatgttgggatttattactgcatgcaagctctacaaactccattcactttcggccctgggaccaaagtggatatcaaac

SEQ ID NO: 3081 - DNA, 322 bp, Homo sapiens
  source 1..322: mol_type = other DNA
gacatccagatgacccagtctccttccaccctgtctgcatctgtaggagacagagtcaccatcacttgccgggccagtcagagtgttagtaactggttggcctggtatcagcagaaaccagggaaagcccctaagctcctgatctataaggcgtctattttagaaagtggagtcccatcaaggtacagtggcagtggttctgcgacagaattcactctcaccatcagcagcctgcagcctgatgattttgcaacttactactgccaacaatatagtagttattcgtggacgttcggccaagggaccaaggtggatatcaaac

SEQ ID NO: 3082 - DNA, 329 bp, Homo sapiens
  source 1..329: mol_type = other DNA
cagtctgccctgactcagcctgcctccgtgtctgggactcctggacagtcgatcaccatctcctgcactgggaccagtagtgatgttgggagttttaatcttgtctcctggtaccagcaacacccaggcaaagtccccaaactcatgatttatgacgtcggtaagcggccctcaggggtttctaatcgcttctctggctccaagtctggcaacacggcctccctgacaatctctgggctccaggctgaggacgaggctgattattactgctgctcatatgtacatagtgacacttgggttttcggcggagggaccaagctgaccgtcct

SEQ ID NO: 3083 - DNA, 340 bp, Homo sapiens
  source 1..340: mol_type = other DNA
gacatcgtgatgacccagtctccagactccctggctgtgtctctgggcgagagggccaccatcaactgcaagtccagccagagtgttttatacagctccaacaataagaactacttagcttggtaccagcagaagccgggacagcctcctaagctgctcatctactgggcgtctacccgggaatccggggtccctgaccgattcagtggcagcgggtctgggacagatttcactctcaccatcagcagcctgcgggctgaagatgtggcagtttattattgtcagcaatattatagtactccccccttttttggccaggggaccaagctggagatcaaac

SEQ ID NO: 3084 - DNA, 325 bp, Homo sapiens
  source 1..325: mol_type = other DNA
gaaatagtgatgacgcagtctccagccaccctgtctgtgtctccaggcgaaagagccaccctctcctgcagggccagtcagagtattagcagcagcttagcctggtaccagcagaaacctggccaggctcccagtctcctcatctacggtgcatccaccagggccactggtatcccagccaggttcagtggcagtgggtctgggacagagttcactctcaccatcagcagcctgcagtctgaagattttgcagtttattactgtcagcagtataataactggccctcgtactcttttggccaggggaccaagctggacatcaaac

SEQ ID NO: 3085 - DNA, 331 bp, Homo sapiens
  source 1..331: mol_type = other DNA
cagtctgtgttgacgcagccgccctcagtgtctgcggccccaggacagaaggtcaccatctcctgctctggaagcagctccaacattggaaataattatgtatcttggtaccagcagttcccaggaacagcccccaaactcctcatttatgacaataataagcgaccctcagggattcctgaccgattctctggctccaagtctggcacgtcagccaccctgggcatcaccggactccagactggggacgaggccgattactactgcggaacatgggatcgcagcctgactgctgtggcattcggcggaggcaccaagctgaccgtcctag

SEQ ID NO: 3086 - DNA, 324 bp, Homo sapiens
  source 1..324: mol_type = other DNA
gaaattgtgttgacgcagtctccaggcaccctgtcgtcgtctccaggggaaagagccacactctcctgccgggccagtgagagtgttagcaccaactccttagcctggtaccagcagaaacctggccaggctcccaggctcctcctctttggtactttcatcagggccagtggcatcccagacaggttcagtggcagtgggtctgggacagacttcactctcacgatcaacagacttgagcctgaagattttgcagtttattactgtcaacagtgtggtacttcacctcggaccttcggccaagggaccaaggtggaaatcaaa

SEQ ID NO: 3087 - DNA, 325 bp, Homo sapiens
  source 1..325: mol_type = other DNA
tcctatgtgctgactcagccaccctcggtgtctgtggccccaggacagacggccagcattacctgtgggggaaacaacattggaagtgaaagtgtgcactggtaccagcagaagccaggccaggcccctgtgctggtcgtctatgatgatagcgaccggccctcaggaatccctgagcgattctctggctccaactctgggaacacggccaccctgagcatcagcagggtcgaagccggggatgaggccgactattactgtcaggtgtgggatcgtagtagtgatcattgggtgttcggcggagggaccaagctgaccgtcctag

SEQ ID NO: 3088 - DNA, 322 bp, Homo sapiens
  source 1..322: mol_type = other DNA
gacatccagatgacccagtctccatcctccctgtcagcatctgtaggagacacagtcaccatcacttgccgggcgagtcagggcataagcaattctttagcctggtatcagcagaaaccagggaaagttcctaaggtcctgatctatgctgcatccactttgcaatcaggggtcccagctcggttcagtggcggtggatctgggacagatttcactctcaccatcagcagcctgcagcctgaagatgctgcaacttattactgtcaaaaatataacagtgccccgctcaccttcggcggagggaccaaggtggagatcaaac

SEQ ID NO: 3089 - DNA, 331 bp, Homo sapiens
  source 1..331: mol_type = other DNA
cagtctgccctgactcagcctcgctcagtgtccgggtctcctggacagtcagtcaccatctcctgcactggaaccagcagtgatgttggtcgttatgactatgtctcctggtaccaacagcacccaggcaaagcccccaaacttgtgatttatgatgtcaataagcggccctcaggggtccctgatcgcttctctggctccaagtctggcaacacggcctccctgaccatctctgggctccagactgaggatgaggctgactattattgctgctcatatgcaggccgggacactttcgtcttcgcaactgggaccgaggtcaccgtcctag

SEQ ID NO: 3090 - DNA, 324 bp, Homo sapiens; identical to SEQ ID NO: 3066
  source 1..324: mol_type = other DNA

SEQ ID NO: 3091 - DNA, 325 bp, Homo sapiens
  source 1..325: mol_type = other DNA
gaaattgtgctgacacagtctccagtcaccctgtctttgtctccaggggaaagagccaccctctcctgcaggaccagtcagagtgttagcagtcacttagcctggtatcaacagaaacctggccaggctcccaggctcctcatctatgatgcatccaacagggccactggcatcccagccaggttcagtggcagtgggtctgggacagatttcactctcaccatcagcagcctagagcctgaagattttgcagtttattactgtcagcagcgttacaactggcctccgatcaccttcggccaagggacacgactgcagattaaac

SEQ ID NO: 3092 - DNA, 337 bp, Homo sapiens
  source 1..337: mol_type = other DNA
gatgttgtgatgactcagtctccactctccctgcccgtcatccttggacagccggcctccatctcctgcaggtctactcaaagcctcgtatacagtgatggaaacacgtacttgcattggtttcagcagaggccaggccaatctccaaggcgcctgatttataacgtttctaaccgggactctggggtcccagacagattcagcggcagtgggtcaggcactgatttcacactgaaaatcagcagggtggaggctgaggatgttgggatttattactgcatgcaaggcagacactggccgctcactttcggcggagggaccaaggtggagatcaaac

SEQ ID NO: 3093 - DNA, 325 bp, Homo sapiens
  source 1..325: mol_type = other DNA
tcctatgagctgacacagccaccctcggtgtcagtgtccccaggacagacggccaggatcacctgctctggagatgcattgccaaagcaatatgcttattggtaccagcagaagccaggccaggcccctgttctggtgatatatagagacactgagaggccctcagggatccctgagcgattctctggctccagctcagggacaacagtcacgttgaccatcagtggagtccaggcagaagacgaggctgattattactgtcaatcaacagacagcagtggtacttatgtggtattcggcggagggaccaagctgaccgtcctag

SEQ ID NO: 3094 - DNA, 325 bp, Homo sapiens
  source 1..325: mol_type = other DNA
tcctatgtgctgactcagccaccctcggtgtcagtggccccaggacagacggccagggttacctgtgggggaaacaaccttagaagtaaaagtgtacactggtaccagcagaagccaggccaggcccctgtgctggtcgcctatgatgataccgaccggccctcagggatccctgacctattctctggctccaagtctggggacacggccaccctgaccatcaacagggtcgaagccgggtttgaggccgactactactgtcaggtgtgggatagtagtacggatcattgggtgttcggcggagggaccaaactgaccgtcgtag

SEQ ID NO: 3095 - DNA, 322 bp, Homo sapiens
  source 1..322: mol_type = other DNA
gaaattgtgttgacgcagtctccagacaccctgtcctcgtctccaggggaaagagtcacactctcctgccggcccagtcaggatatgagcaccaactccttagcctggtaccagcagaaacctggccaggctcccaggctcctcctgtttggtacacacatcagggccagtggcatcccagacaggttcactggcagtgggtctgggacagacttcacgctcaccatcagcagacttgaacctgaagattttgctgtgtattactgtcagcagtgtgcttactcacctcggactttcggccaagggaccaaggtggaaatca

SEQ ID NO: 3096 - DNA, 337 bp, Homo sapiens
  source 1..337: mol_type = other DNA
gatgttgtgatgatccagactccagtgtctctgtccgtcacccctggccagccggcctccatctcctgcaagtccagtcagagcctcctgcataatgatggaaagacctatttgtattggtatctgcagaagccaggccagcctccacaactcctgatctctgaagtttccaaccggttctctggagtatcagataggttcagcggcagcgggtcagggacagatttcacactgagaatcagccgggtggaggctgaggatgttggagcttattactgcatgcaaagtacagaacttccgtacacttttggccaggggaccaagatggagatcaaac

SEQ ID NO: 3097 - DNA, 331 bp, Homo sapiens
  source 1..331: mol_type = other DNA
cagtctgccctgactcagcctgcctccgtgtctgggtctcctggacagtcgatcaccatctcctgcactggaaccagcagtgatgttgggacttataaccttgtctcctggtaccaacagcacccaggcaaagcccccaaactcatgatttatgaggtcagtaagcggccctcaggggtttctaatcgcttctctggctccaagtctggcaacacggcctccctgacaatctctgggctccaggctgaggacgaggctgattattactgctgctcaaatgcacgtagtggcacttgggtgttcggcggagggaccaagctgaccgtcctag

SEQ ID NO: 3098 - DNA, 324 bp, Homo sapiens
  source 1..324: mol_type = other DNA
tcctatgtgctgactcagccaccctcggtgtcagtggccccaggacagacggccaggattacctgtgggggagacaacattggaagtaaaagtgtgcagtggtaccagaagaagccaggccaggcccctgtgatggtcgtctatgataatagagaccggccctcagggatccctgagcgattctctggctccaactctgggaacacggccaccctgaccatcagtagggtcgaagccggggatgaggccgattattactgtcaggtgtgggatcgtactagtgatcattgggtgttcggcggagggaccaagctgaccgcccta

SEQ ID NO: 3099 - DNA, 334 bp, Homo sapiens
  source 1..334: mol_type = other DNA
gatattgtgatgactcagtctccaccctccctgcccgtcacccctggagagccggcctccatctcttgcaggtctagtcagagcctcctacatggcaatggatacacctatttggattggtacctgcagaagccaggacagtctccacagctcctgatctatttgggttctactcgggcctccggggtccctgacaggttcagtggcagcggatcaggcacagattttacactggaaatcagcagagtggaggctgaggatgttggggtttattactgcatgcaagctctacaaactccattcactttcggccctgggaccaaagtggatatca

SEQ ID NO: 3100 - DNA, 331 bp, Homo sapiens
  source 1..331: mol_type = other DNA
cagtctgtcttgagtcagccaccctcagcgtctgggacccccgggcagagggtcatcatctcttgttctggaagcaggtccaacatcgggggtagtactgtaaactggtttcagcagctcccagggacggcccccaagctcctcatccataataacaatcagcggccctcaggggtccctgaccgattctctggctccaagtctggcacctcagcctccctggccatcagtgggctccagtctgaggatgaggctgattatcactgtgcagtctgggatgacagcctgaatggttggatgttcggcggagggaccaagctgaccgtcctag

SEQ ID NO: 3101 - DNA, 320 bp, Homo sapiens
  source 1..320: mol_type = other DNA
tcctatgagctgagacagccaccctcggtgtcagtgtccccgggacagacggcccaaatcccctgctctggagatatattgacaaaagaatatgcttactggtaccaacagaggccaggccgggcccctgtcttgatcatatatagggtgaatgagaggccctcagggatccctgaccggttctctggctccaactcagggacacgcgccacgttgaccatcagtccagtccagggagaagacgaggctgactatttttgtcaggcaggggacaatagtggtcctgtgatattcggcggagggaccaagttgtccgtcct

SEQ ID NO: 3102 - DNA, 335 bp, Homo sapiens
  source 1..335: mol_type = other DNA
catcgtgatgacccagtctccagactccctggctgtgtctctgggcgagagggccaccatcaactgcaagtccagccagagtcttttatacaggtccaacaataagaactacttagcttggtaccagaagaaaccagggcagcctcctaagctgctcatttactgggcatctacccgggaatccggggtccctgaccgattcagtggcagcgggtctgggacagatttcactctcaccatcagcagcctgcaggctgaagatgtggcagtttattactgtcagcaatattatattagtaacctctccttcggcggagggaccgaggtggagatca

SEQ ID NO: 3103 - DNA, 325 bp, Homo sapiens
  source 1..325: mol_type = other DNA
gacatccagatgacccagtctccatcctccctgtctgcatctgtaggagacagagtcaccatcacttgccgggcaagtcagagcattagcagctatttaaattggtatcagcagaaaccagggaaagcccctaagctcctgatctatgctgcatccagtttgcaaagtggggtcccatcaaggttcagtggcagtggatctgggacagatttcactctcaccatcagcagtctgcaacctgaagattttgcaacttactactgtcaacagagttacagtacccctccgtacacttttggccaggggaccaagctggagatcaaac

SEQ ID NO: 3104 - DNA, 316 bp, Homo sapiens
  source 1..316: mol_type = other DNA
atagtgatgacgcagtttccagccaccctgtctgtgtctccaggggaaagagtcaccctctcctgcagggccagtgcgagtattagcagccacttagcctggtaccagcagaaacctggccaggctcccaggctcctcatctatggtgcatccaccagggccactggtatcccagccaggttcagtggctctgggtctgggacagagttcactctcaccatcagcagcctgcagtctgaagatttaggagtatattactgtcagcagtataataactggcctctatttggccaggggaccaagctgcagatcaaac

SEQ ID NO: 3105 - DNA, 334 bp, Homo sapiens
  source 1..334: mol_type = other DNA
cagtctgtgctgacgcagccgccctcagtgtctggggccccagggcagagggtcaccatctcctgcactgggagcagctccaacatcggggcaggttatgatgtacactggtaccagcagcttccaggaacagcccccaaactcctcatctatggtaacagcaatcggccctcaggggtccctgaccgattctctggctccaagtctggcacctcagcctccctggccatcactgggctccaggctgaggatgaggctgattattactgccagtcctatgacagcagcctgagtggttgggtgttcggcggagggaccaagctgaccgtcctag

SEQ ID NO: 3106 - DNA, 334 bp, Homo sapiens
  source 1..334: mol_type = other DNA
aattttatgctgactcagccccactctgtgtcggagtctccggggaagacggtgaccatctcctgcaccggcagcagtggcaacattgccgaccattatgtgcagtggtaccagctgcgcccgggcagtgtccccaccattgtgatctatgaggataaccaaagaccctctggggtccctgatcgcttctctggctccatcgacatctcctccaactctgcctccctcaccatctctggcctgaagactgaggacgaggctgactactactgtcagtcttctggtaatagcatcaattgggtgttcggcggagggaccaagctgaccgtcctag

SEQ ID NO: 3107 - DNA, 322 bp, Homo sapiens
  source 1..322: mol_type = other DNA
gacatccagatgacccagtctccttccaccctgtctgcatctgtaggagacagagtcaccatcacttgtcgggccagtcagagtgtttttagctggttggcctggtatcagcagaaaccggggaaagcccctaaactcctgatctataaggcgtctagtctagaatatggggtcccatcaaggttcagcggcagtggatctgggacagacttcactctcaccatcagcagcctgcagcctgatgatttcgcaacttattactgccagcagtaccaacgttattcgtggacgttcggccaagggaccaaggtggaaatcaaac

SEQ ID NO: 3108 - DNA, 322 bp, Homo sapiens
  source 1..322: mol_type = other DNA
gacatccagttgacccagtctccatccttcctgtctgcatctgtaggagacagagtcaccatcacttgccgggccagtcaggacattagcagttatttaggttggtatcagcaaaaaccagggaaaggccctaaactcctgatctatgctgcatccactttgcaaagtggggtcccatccaggttcagcggcagtggatctgggacagaattcactctcactatcagcagcctgcagcctgaagattttggagcttattactgtcaacaggttgatcgttatcctctcactttcggcggagggaccaaggtggagatcaaac

SEQ ID NO: 3109 - DNA, 322 bp, Homo sapiens
  source 1..322: mol_type = other DNA
gaaattgtgttgacgcagtctccaggcaccctgtctttgtctccagggcaaagagccaccctctcctgcagggccagtcagagtgttaatggcaactgcttagtctggtaccagcagaagcctgaccagactcccaggctcctcatttatggtgcatccagaagggccactggcatcccagacaggttcagtggcagtgggtctgggacagacttcactctcaccatcaatagactggagcctgacgattttgcagtttattactgtcaacactatgctgactcagtctggacgttcggccaagggaccaaggtggaagtca

SEQ ID NO: 3110 - DNA, 340 bp, Homo sapiens
  source 1..340: mol_type = other DNA
gacatcgtgatgacccagtctccagactccctggctgtgtctctgggcgagagggccaccatcaactgcaagtccagccagagtgttttatacaactccaataataagaactacttagcttggtaccagcagaaaccaggacaccctcctaaggtgctcatttattgggcttctacccgggaatccggggtccctgcccgattcagtggcagcgggtctgggactgatttcactctcaccatcagcagcctgcaggctgaagatgtggcagtttattactgtcagcaatattatggttctccgtacacttttggccaggggaccaaggtggagatcaaac

SEQ ID NO: 3111 - DNA, 325 bp, Homo sapiens
  source 1..325: mol_type = other DNA
gaaatagtgatgacgcagtctccagccaccctgtctgtgtctccaggggaaagagccaccctctcctgcagggccagtcagactgttactaacaacttagcctggtaccagcagaaacctggccaggctcccaggctcctcatctatggtgcatccaccagggccactggtatcccagccaggttcagtggcagtgggtctgggacagagttcactctcaccatcagcagcctgcagtctgaagattatgcagtttattactgtcaacagtataataactggcctccgctcactttcggcggagggaccaaggtggagatcaaac

SEQ ID NO: 3112 - DNA, 325 bp, Homo sapiens
  source 1..325: mol_type = other DNA
gaaatagtgatgacgcagtctccacccaccctgtctgtgtctccaggggaaagagccaccctctcctgcagggccagtcacagtattagcagcaacttagcctggtaccagcagaaacctggccaggctcccagactcctcatctatggtgcatccaccagggccactggtgtcccggccaggttcagtggcagtgggtctgggacagacttcaccctcaccatcagcagcctgcagtctgaagattttgcagtttattactgtcagcaacataataactggcctccgatcaccttcggccaagggacacgactggagattaaac

SEQ ID NO: 3113 - DNA, 332 bp, Homo sapiens
  source 1..332: mol_type = other DNA
cagtctgccctgactcagcctccctccgcgtccgggtctcctggacagtcagtcaccatctcctgcactggaaccaacagtgacattggtgcttataattttgtctcctggtaccaacagcacccaggcaaagcccccaaactcatcatttatgacgtcactaagcggccctcaggggtccctgatcgcttctctggctccaagtctggcaacacggcctccctgaccgtctctgggctccaggctgaggatgaggctgattattactgcggctcatatgcaggcagcaacaatttaaaggtgttcggcggagggactaagctgaccgtcct

SEQ ID NO: 3114 - DNA, 325 bp, Homo sapiens
  source 1..325: mol_type = other DNA
gaagtagtgatgacgcagtctccagccaccctgtctgtgtctccaggggaaagagccaccctctcctgcagggccagtcagagcgttggcagcaacttagcctggtaccagcagaaacctggccaggctcccaggctcctactctatggtgcatccaccagggccactggtatcccagccaggttcagtggcagtgggtctgggacagagttcactctcaccatcagcagcctgcagtctggagattttgcagtttattactgtcagcagtatacttactggcctccgtggacgttcggccaagggaccaaggtggaaatcaaac

SEQ ID NO: 3115 - DNA, 325 bp, Homo sapiens
  source 1..325: mol_type = other DNA
gaaatagtgatgacgcagtctccagccaccctgtctgtgtctccaggcgaaagagccaccctctcctgcagggccagtcagagtattagcagcagcttagcctggtaccagcagaaacctggccaggctcccagtctcctcatctacggtgcatccaccagggccactggtatcccagccaggttcagtggcagtgggtctgggacagagttcactctcaccatcagcagcctgcagtctgaagattttgcagtttattactgtcagcagtataaaaactggccctcgtactcttttggccaggggaccaagctggacatcaaac

SEQ ID NO: 3116 - DNA, 325 bp, Homo sapiens
  source 1..325: mol_type = other DNA
gaaattgtgatgacgcagtctccagccaccctgtctgtgtctccaggggaaagagccaccctctcgtgcagggccagtcagaatattcgcagcaacttggcctggtaccagcagcaacctggccaggctcccaggctcctcatctatggtgcatccaccagggccactgatatcccagccaggttcagtggcagtgggtctgggacagagttcactctcaccatcagcagcctgcagtctgaagattttgcagtttattactgtcagcagtatgataattggcctcccatcacttttggccaggggaccaaggtagagatcaaac

SEQ ID NO: 3117 - DNA, 346 bp, Homo sapiens
  source 1..346: mol_type = other DNA
caggctgtgctgactcagccgtcttccctctctgcatctcctggagcatcagccagtctcacctgcaccttccacagtggcatcaatgttgaaacttacaggatatactggtaccagcagaagccagggagtcctccccagtatctcctgaggtacacatcagactcagataagcaacagggctctggagtccccagccgcttctctgcatccaaagatgcttcggccaatgcagggattttactcatctctgggctccagtctgaggatgaggctgactattactgtatgatttggcacagcaacgcttatgtcctcggaactgggaccaaggtcaccgtcctag

SEQ ID NO: 3118 - DNA, 331 bp, Homo sapiens
  source 1..331: mol_type = other DNA
cagtctgtgttgacgcagccgccctcagtgtctgcggccccaggacagaaggtcaccatctcctgctctggaagcagctccaacattggaaataattatgtatcctggtaccagcagttcccaggaacagcccccaaactcctcatttatgacaatgataagcgaccctcagggattcctgaccgattctctggctccaagtctggcacgtcagccaccctgggcatcaccggactccagactggggacggggccgattactactgcggaacatgggatcgcagcctgactgctgtggcattcggcggagggaccaagctgaccgtcctag

SEQ ID NO: 3119 - DNA, 325 bp, Homo sapiens
  source 1..325: mol_type = other DNA
gaaatagtgatgacgcagtctccagccaccctgtctgtgtctccaggggaaagagccaccctctcctgcagggccagtcagagtgttaccagcaacttagcctggtaccagcagaaacctggccaggctcccaggctcctcatctatggtgcatccaccagggccactggtatcccagccaggttcagtggcagtgggtctgggacagagttcactctcaccatcagcagcctgcagtctgaagattttgcagtttattactgtcagcagtatgataactggcctccgtggacgttcggccaagggaccaaggtggaaatcaaac

SEQ ID NO: 3120 - DNA, 323 bp, Homo sapiens
  source 1..323: mol_type = other DNA
gaagtagtgatgacgcagtcaccagccaccctgtctgtgtctccaggggaaagagccaccctctcctgcagggccagtcagagtgttagcagcaacttagcctggtaccagcagaaacctggccaggctcccaggctcctcatctatggtgcatctgccagggccactggtatcccagccaggttcagtggcagtgggtctgggacagagttcactctcaccatctccagcctgcagtctgaggattttgcagtttattactgtcagcagtatactttctggcctccgtggacgttcggccaagggaccaaggtggaaatcaa

SEQ ID NO: 3121 - DNA, 325 bp, Homo sapiens
  source 1..325: mol_type = other DNA
gacatccagatgacccagtctccatcttccgtgtctgcatctgtaggagacagagtcaccatcacttgtcgggcgagtcagggtattagcagctggttagcctggtatcagcagaaaccagggaaagcccctaacctcctgatctatgctgcatccagtttgcaaagtggggtcccatcaaggttcagcggcagtggatctgggacagatttcactctcaccatcagcagcctgcagcctgaagattttgcaacttactattgtcaacagtctaacagtttcccccctctcactttcggcggagggaccaaggtggagatcaaac

SEQ ID NO: 3122 - DNA, 325 bp, Homo sapiens
  source 1..325: mol_type = other DNA
gaaatagtgatgacgcagtctccagccaccctgtctgtgtctccaggggaaagagccaccctctcctgcagggccagtcagagtgttagcagcaacttagcctggtaccagcagaaacctggccaggctcccaggctcctcatctatggtgcatccaccagggccactggtatcccagccaggttcagtggcagtgggtctgggacagagttcactctcaccatcagcagcctgcagtctgaagattttgcagtttattactgtcagcagtataataactggcctcggtacacttttggccaggggaccaagctggagatcaaac

SEQ ID NO: 3123 - DNA, 337 bp, Homo sapiens
  source 1..337: mol_type = other DNA
gatgttgtgctgactcagtctccactctccctgtccgtcacccctggagagccggcctccatctcctgcaggtccagtcagagcctcctgcatggaaatggaaacaactatttggattggtacctgcagaagccagggcagtctccacagctcgtggtctatttgggttctaatcgggcctccggggtccctgccagattcagtggcagtggatcaggcacagattttacactgcaaatcagcagagtggaggctgaggatgttggggtttattactgcatgcaagctctacaaactccattcactttcggccctgggaccaaagtggatatcaaac

SEQ ID NO: 3124 - DNA, 315 bp, Homo sapiens
  source 1..315: mol_type = other DNA
aaatagtgatgacgcagtctccagccactctgtctgtgtctccagggggaagcgccatcctctcctgcagggccagtcacagtattagcagtcacttagcctggtaccagcacaaacctggcctggctcccagactcctcatctatgatgcatccactagggccgctggtatcccagccaggttcagcggcagtgggtctgggacagagttcactctcaccatcagcagcctgcagtctgaagattgtggagtttattattgtcagcagtacaataactggccctgttttggccaggggacgaagctggagatca

SEQ ID NO: 3125 - DNA, 331 bp, Homo sapiens
  source 1..331: mol_type = other DNA
cagtctgtgctgactcagccaccctcagcgtctgggacccccgggcagagggtcaccatctcttgttctggaagcagccccaacatcgggagtaatactgtgatttggttccaccaactcccaggaacggcccccaagctcctcatatatggtaatgatcagcggccctcaggggtccctgaccgagtttctggctccaagtctggcacctcagcctccctggccatcagtgggctccagtctgaagatgagggtgactattactgtgtagcatgggatgacaacctgaatggttgggtgttcggcggagggaccaagctgaccgtcctag

SEQ ID NO: 3126 - DNA, 331 bp, Homo sapiens
  source 1..331: mol_type = other DNA
cagtctgccctgactcagcctgcctccgtgtctgggtctcctggacagtcgatcaccatctcctgtactggaaccagcagtgatgttgggacttttaaccttgtctcctggtaccaacagcacccaggcaaagcccccaaactcatgatttatgaggtcactaagcggccctcaggggtttctaatcgcttctctgcctccaagtctggcaacacggcctccctgacaatctctgggctccagactgcggacgaggctgatttttactgctgctcatatgcaggtagtgacacttgggtgttcggcggagggaccaagctgaccgtcctag

SEQ ID NO: 3127 - DNA, 328 bp, Homo sapiens
  source 1..328: mol_type = other DNA
tcttctgagctgactcaggaccctgctgtgtctgtggccttgggacagacagtcaggatcacatgccaaggagacagcctcagaacctattatgcaaactggtaccagcagaagccaagacaggcccctttacttgtcatctttggcaaaaacaaccggccctcagggatcccagaccgattctctggctccaggtcaggaaacacagcttccttgaccatcactggggctcaggcggaagatgaggctgactattactgtaactcccgagacagcagtggtaaccttcatgtggtattcggcggagggaccaagctgaccgtcctag

SEQ ID NO: 3128 - DNA, 331 bp, Homo sapiens
  source 1..331: mol_type = other DNA
gaaattgtgttgacgcagtctccagccaccctgtccttgtctccaggggaaagagccaccctctcctgcagggccagtcagagtgttagtggcaactacttagcctggtaccagcagaaacctggccaggctcccaggctcctcatctttggtgcatccaggagggccactgacatcccagacaggttcagtggcagtgggtctgggacagacttcagtctcaccatcagcagactggagcctgaagattttgcagtgtattactgtcagcagtactctgtctcactttcaaagtacacttttggccaggggaccaagctggagatcaaac

SEQ ID NO: 3129 - DNA, 330 bp, Homo sapiens
  source 1..330: mol_type = other DNA
cagtctgtgttgacgcagccgccctcagtgtctgcggccccaggacagaaggtcaccatctcctgctctggaagcagctccaatattggaaataattatgtgtcctggtaccagcagctcccaggaacagcccccaaactcctcatttatgacaataataagcgaccctcagggattcctgaccgattctctggctccaagtctggcacgtcagccaccctgggcatcaccggactccagactggggacgaggccgattattactgcggaacatgggatagaagtctgagtgctgtggtattcggcggagggaccaagctgaccgtccta

SEQ ID NO: 3130 - DNA, 337 bp, Homo sapiens
  source 1..337: mol_type = other DNA
gatgttgtgatgactcagtctccactctccctgcccgtcacccttggacagccggcctccatctcctgcaggtctagtcaaagcctcgtatacaaagatggaaacacctacttgaattggtttcagcagaggccaggccaatctccaaggcgcctaatttataaggtttctcaccgggactctggggtcccagacagattcagcggcagtgggtcagacactgacttcacactgaaaatcagcagggtggaggctgaggatattggggtttattactgcatgcaaggtacacaatggccgtacacttttggccaggggaccaagctggatatcaaac

SEQ ID NO: 3131 - DNA, 331 bp, Homo sapiens
  source 1..331: mol_type = other DNA
cagtctgccctgactcagcctcgctcagtgtccgggtctcctggacagtcagtcaccatctcctgcactggagccagcagtgatgttggtcgttatgactatgtctcctggtaccaacaacacccaggcaaagccccccaacttgtgatttttgatgtcaacaagcggccctcaggggtccctgatcggttctctggctccaagtctggcaacacggcctccctgaccatctctgggctccagactgaggatgaggctgactattattgctgctcatatgcaggccgcgactctttcgtcttcggaaccgggaccaaggtcaccgtcgtag

SEQ ID NO: 3132 - DNA, 325 bp, Homo sapiens
  source 1..325: mol_type = other DNA
tcctatgtgctgactcagccaccctcggtgtcagtggccccaggacagacggccaggattacctgtgggggaaacaacattggagataagagtgtgcactggtaccagcagaggccaggccaggcccctgtgctggtcgtctttgatgatagcgaccggccctcacggatccctgagcgattctctggctccaactctgggaacacggccaccctgaccatcagcagtgtcgaagccggggatgaggccgacttttactgtcaggtgtgggatagaagtagtgatcattgggtgttcggcggagggaccaagctgaccgtcctag

SEQ ID NO: 3133 - DNA, 337 bp, Homo sapiens
  source 1..337: mol_type = other DNA
gatgctgtgatgactcagtctccactctccctgcccgtcacccttggacagccggcctccatctcctgcaggtctagtcaaagcctcgtatacaatgatggaaacacctacttgaattggtttcaacagaggccaggccaatctccaaggcgcctaatttataaggtttctaaccgggactctggggtcccagacagattcagcggcagtgggtcaggaactgatttcacactggaaatcagcagtgtggaggccgaggatgttggggtttattactgcatgcaaggtacacactggccattcactttcggcccggggaccaaagtggatatcaaac

SEQ ID NO: 3134 - DNA, 323 bp, Homo sapiens
  source 1..323: mol_type = other DNA
gaagtagtgatgacgcagtcaccagccaccctgtctgtgtctccaggggaaagagccaccctctcctgcagggccagtcagagtgttagcagcaacttagcctggtaccagcagaaacctggccaggctcccaggctcctcatctatggtgcatctgccagggccactggtatcccagccaggttcagtggcagtgggtctgggacagagttcactctcaccatctccagcctgcagtctgaggattttgcagtttattactgtcagcagtatagtttctggcctccgtggacgttcggccaagggaccaaggtggaaatcaa

SEQ ID NO: 3135 - DNA, 337 bp, Homo sapiens
  source 1..337: mol_type = other DNA
gatgttgtgatgactcagtctccactctccctgcccgtcacccttggacagccggcctccatctcctgcaggtctagtcaaggcctcgtatacagtgatggaaacacctacctgagttggtttcagcagaggccaggccaatctccaaggcgcctcatttataaggtttctaaccgggactctggggtcccagacagattcagcggcagtgggtcaggcactgatttcacactggatatcagcagggtggaggctgtggatgttggggtttattactgcatgcaaggtacacactggcctctcactttcggcggagggactaaggtggagatcaaac

SEQ ID NO: 3136 - DNA, 340 bp, Homo sapiens
  source 1..340: mol_type = other DNA
gatgttgtgatgactcagtctcctctctccctgcccgtcacccttggacagccggcctccatctcctgcaggtctagtcaaagcctcgcccacagtgatggaaacaccctcttaaattggtttcagcagaggccaggccaatctccaaggcgcctaatttataaggtttctaaccgggagtctggggtcccagacagattcagcggcagtgggtcaggcacttatttcacactgaaaatcagcagggtggaggctgaggatgttggggtttattactgcatgcaaggtacacactggcctccgtacacttttggccaggggaccaagctggagatcaaac

SEQ ID NO: 3137 - DNA, 336 bp, Homo sapiens
  source 1..336: mol_type = other DNA
atgttgtgatgactcagtctccactctccctgctcgtcacccttggacagccggcctccatctcctgcaggtctagtcaaagcctcgtgtatagtggcggaaatacgttcttgcattggtttcatcagaggccaggccaatctccaaggcgcctaatttatgaggtttctaaccgggactctggggtcccagacagattcagcggcagtgggtcaggcactgatttcacactggagatcagcagggtggaggctgaggatgttggaatatattactgcatgcaaggtacacactggccgctcactttcggcggagggaccaaggtggagatcaaac

SEQ ID NO: 3138 - DNA, 325 bp, Homo sapiens
  source 1..325: mol_type = other DNA
gaaattgtgttgacacagtctccagccaccctgtctttgtctccaggggaaagagtcaccctctcctgcagggccagtcagagtgttagcagctacttggcctggtaccaacagaaacctggccaggctcccaggctcctcatctatgatgcatccaacagggccaatggcatcccagcgaggttcagtggcagtgggtctgggacagacttcactctcaccatcagcagtctagagcctgaagattttgcagtttattactgtcagcagcgtcgctactggcctccgctcactttcggcggagggaccaaggtggagatcaaac

SEQ ID NO: 3139 - DNA, 337 bp, Homo sapiens
  source 1..337: mol_type = other DNA
gatgctgtgatgactcagtctccactcacccttcccgtcacccttggacagccggcctccatatcctgcaggtctagtcaaagcctcgtgtacagtgatggaagcacccacttgttttggtttcaccagaggccaggccaatctccaaggcgcctaattcatggggcttctaaccgggactctggggtcccagacagattcagcggcagtgggtcagacactgatttcacactgaaaatcagcagggtggaggctgaggatgttggggtttattactgcatgcaaggtagacactggcccctcaccttcggccaagggacacgactggagattaaac

SEQ ID NO: 3140 - DNA, 331 bp, Homo sapiens
  source 1..331: mol_type = other DNA
cagtctgccctaactcagcctgcctccgtgtctgggtctcctggacagtcgatcaccatctcctgcactggaaccagcagtgatgttgggagttataaccttgtctcctggtaccaacaggacccaggcaaagcccccaaactcatgatttatgaggtcagtaagcggccctcagggatttctaatcgcttctctggctccaagtctggcaacacggcctccctgacaatctctgggctccaggctgaggacgaggctgattattactgctgctcaaatgcacgtagtggcacttgggtgttcggcggagggaccaagctgaccgtcctag

SEQ ID NO: 3141 - DNA, 331 bp, Homo sapiens
  source 1..331: mol_type = other DNA
cagtctgccctgactcagcctcgctcagtgtccgggtctcctggacagtcagtcaccatctcctgcactggaaccagcagtgatgttggtcgttatgactatgtctcctggtaccaacatcacccaggcaaagcccccaaacttgtgatttatgatgtcaataagcggccctcaggggtccctgatcgcttctctggctccaagtctggcaacacggcctccctgaccatctctgggctccagactgaggatgaggctgactattattgctgctcatatgcaggccgggacactttcgtcttcggaactgggaccaaggtcaccgtcctag

SEQ ID NO: 3142 - DNA, 334 bp, Homo sapiens
  source 1..334: mol_type = other DNA
cagtctgccctgactcaacctgcctccgtgtctgggtctcctggacagtcgatcaccatctcctgcactggaaccagcagtaatgttggaggttataaccttgtctcgtggtaccaacagcacccaggcaaagcccccaaactgatgatttatgagggcagtcatcggccctcaggggtttctaatcgcttctctggctcccagtctggcaacacggcctccctgacaatctctgggctccaggctgaggacgaggctgattattactgctgctcatatggagatactaccacaccttatgtcttcggaattgggaccacggtcaccgtcctag

SEQ ID NO: 3143 - DNA, 325 bp, Homo sapiens
  source 1..325: mol_type = other DNA
gaaattgtgttgacgcagtctccaggcaccctgtctttgtctccaggggaaagagcctccctctcctgcagggccagtcagaatgttaacagcaactccttggcctggtaccagcaaaaacctggccaggctcccaggctcctcatctatgctgcatccagcagggccactggcatcccagacaggttcagtggcagtgggtctgggacagacttcactctcaccatcagcagactggagcctgaagattttgcagtgtattactgtcagcactatggtacctcaccccggacttttggccaggggaccaaggtggagatcaaac

SEQ ID NO: 3144 - DNA, 337 bp, Homo sapiens
  source 1..337: mol_type = other DNA
gatattgtgatgacccagactccactctcctcacctgtcacccttggacagccggcctccatctcctgcaggtctagtcaaagcctcgtacacagtaatggagacacctacttgagttggcttcagcagaggccaggccagcctccaagactcctaatttataagatttctaagcggttctctggggtcccagacagattcagtggcagtggggcggggacagacttcacactgaaaatcggcagggtggaaagtgaggatgtcggagtttattactgcatgcaaactacacaatttcctcacacttttggccaggggaccaagctggagatcaaac

SEQ ID NO: 3145 - DNA, 316 bp, Homo sapiens
  source 1..316: mol_type = other DNA
atagtgatgacgcagtttccagccaccctgtctgtgtctccaggggaaagagtcaccctctcctgcagggccagtgcgagtattagcagccacttagcctggtaccagcagaaacctggccaggctcccaggctcctcatctatggtgcatccaccagggccactggtatcccagccaggttcagtggctctgggtctgggacagagttcactctcaccatcagcagcctgcagtctgaagatttagcagtgtattactgtcagcagtataataactggcctctatttggccaggggaccaagctgcagatcaaac

SEQ ID NO: 3146 - DNA, 337 bp, Homo sapiens
  source 1..337: mol_type = other DNA
gatgttgtgatgactcagtctccactctccctgcccgtcacccttggacagccggcctccatctcctgcaggtctagtcaaggcctcgtgttcagtgatggaaacacctacttgagttggtttcagcagaggccaggccaatctccaaggcgcctaatttatcaggtttctaatcgggactctggggtcccagacagattcagcggcagtgggtcaggcactgatttcacactgagaatcagcagggtggaggctgaggatgttggggtttattactgcatgcaaggtacatactggcctctcactttcggcggagggaccaaggtggagatcaaac

SEQ ID NO: 3147 - DNA, 331 bp, Homo sapiens
  source 1..331: mol_type = other DNA
cagtctgtactgactcagccaccctcagcgtctgggacccccgggcagagggtcaccatctcttgttctggaggcacctccaacatcggaagaaattttgtatattggtatcagcagcttccaggaacggcccccaaactcctcatctatagtaatgatcagcggccctcaggggtccctgaccgattctctggctccaagtctggcacctcagcctccctggccatcagtgggcttcggtccgaggatgagtccgattattactgtgcagcatgggatgacagcctgaatagtcggctcttcggcggagggaccaagctgaccgtcctag

SEQ ID NO: 3148 - DNA, 328 bp, Homo sapiens
  source 1..328: mol_type = other DNA
gacatccagatgacccagtctccatcctccctgtctgcatctgtaggagacagagtcaccatcacttgccgggcaagtcggagcataagcacctttttaaattggtatcagcagaaacctggcaaagcccctcagctcctgatctatactgcatccagtttgcaaagtggggtcccatcaaggttcagtggcagtggatctgggacagatttcactctcaccatcagcagtctgcaagctgaagattttgcaacttactactgtcaacagagttacagtagccctccggagcccacttttggccaggggaccaagctggagatcaaac

SEQ ID NO: 3149 - DNA, 333 bp, Homo sapiens
  source 1..333: mol_type = other DNA
cagtctgtgctgacgcagccgccctcagtgtctggggccccagggcagagggtcaccatctcctgcactgggagcacctccaacatcggggcaggttatgatgtgcactggtaccagcagcttccaggaacagcccccaaactcctcatctttggtagcacaaatcggccctcaggggtccctgaccgattctctggctccaagtctggcacctcagcctccctggccatcactgggctccagcctgaggatgaggctaattattactgccagtcttatgacaacagcctgagtggttcggtgttcggcggagggaccaagctgaccgtccta

SEQ ID NO: 3150 - DNA, 340 bp, Homo sapiens
  source 1..340: mol_type = other DNA
gatattgtgatgactcagtctccactctccctgcccgtcacccctggagagccggcctccatctcctgcaggtctagtcagagcctcctgcatagtaatgaatacaactatttggattggtacctgcagaagccagggcagtctccacagctcctgatctatttgggttctaatcgggcctccggggtccctgacaggttcagtggcagtggatcaggcacagattttacactgaaaatcagcagagtggaggctgaggatgttggggtttattactgcatgcaagctctacaaactcccccgtacacttttggccaggggaccaagctggagatcaaac

SEQ ID NO: 3151 - DNA, 322 bp, Homo sapiens
  source 1..322: mol_type = other DNA
gacatccagatgacccagtctccatcctccctgtctgcatctgtaggagacagagtcaccatcacttgccaggcgagtcacgacattagcaactatttaaattggtatcagcagaaaccagggaaagcccctaagctcctgatctacgatgcatccaatttggaaacaggggtcccatcaaggttcagtggaagtggatctgggacagattttactttcaccatcagcagcctgcagcctgaagatattgcagcatattactgtcaacactatgataatctccccctcactttcggcggagggaccaaggtggagatcaaac

SEQ ID NO: 3152 - DNA, 325 bp, Homo sapiens
  source 1..325: mol_type = other DNA
gaaacagtgatgacgcagtctccagtcaccctgtctgtgtctccaggggaaagagccaccctctcctgcagggccagtcagagtgttagcagcaacttagcctggtaccagcagaaacctggccaggctcccaggctcctcatctatggtgcatccagtagggccactggtatcccagccaggttcagtggcagtgggtctgggacagagttcactctcaccatcagcagcctgcagtctgaagattttgcagtttattactgtcagcagtataatacatggcctcctctcactttcggcggagggaccaaggtggagatcaaac

SEQ ID NO: 3153 - DNA, 325 bp, Homo sapiens
  source 1..325: mol_type = other DNA
gaaatactgatgacgcagtctccagccaccctgtctgtgtctccaggggaaagagccaccctctcctgcagggccagtcagaatgttgccagcaacttagcctggtaccagcagaaacctggccagcctcccaggctcctcatctatggtgcgtccaccagggcccctagtatcccggccaggttcactggcactgggtctgggacagacttcactctcaccatcagcagcctgcagtctgaagattttgcagtttattactgtcaacagtattataattggcccccgatcactttcggcgcagggaccaaggtggagatcaaac

SEQ ID NO: 3154 - DNA, 325 bp, Homo sapiens
  source 1..325: mol_type = other DNA
gacatccagatgacccagtctccatccttcctgtctgcatctataggagacagagtcaccatctcttgccgggcaagtcagagcattagcacctatgtaaattggtatcagcagaaatcaggcagagcccctaatctcctgatttatgctgcatccagtttgcggagtggggtcccatcaaggttcagtggcagtggatctgggacagatttcactctcaccatcagcagtctgcaacctgaagattttgcaacttattactgtcaacagagttacagtcaccctcgggtgacgttcggccaagggaccaaggtggaaatcaaac

SEQ ID NO: 3155 - DNA, 322 bp, Homo sapiens
  source 1..322: mol_type = other DNA
gacatccagatggcccagtctccatcctccctgtctgcatctgtaggagacagagtcaccatcacttgccaggcgagtcaggacattagtcactatttaaattggtatcagcagaaaccagggaaagcccctaagctcctgatctacggtgcatccaatttggaaacaggggtcccatcaaggttcagtggaagtggatctgggacagatttttctttcaccatcagcagcctgcagcctgaagatattgcaatatattattgtcaacagtatgataatctccccttaactttcggccctgggaccaaagtggatgtcaaac

SEQ ID NO: 3156 - DNA, 331 bp, Homo sapiens
  source 1..331: mol_type = other DNA
cagtctgccctgactcagcctgcctccgtgtctgggtctcctggacagtcgatcaccatctcctgcactggaaccagcagtgatgttgggagttataaccttgtctcctggtaccaacaacacccaggcaaagcccccaaactcatgatttatgaggtcagtaagcggccctcaggggtttctaatcgcttctctggctccaagtctggcaacacggcctccctgacaatctctgggctccaggctgaggacgaggctaattattactgctgctcatatgtagctattagcactttggtattcggcggagggaccaagctgaccgtcctag

SEQ ID NO: 3157 - DNA, 337 bp, Homo sapiens
  source 1..337: mol_type = other DNA
gattttgtgctgactcagtctccactctccctgcccgtcacccttggacagccggcctccatctcctgcaggtctagtcaaagcctcgtccacagggatggaaacacctacttgaattggtttcaccagaggccaggccaatctccaaggcgcctaatttataaggtttctaaccgggactctggggtcccagacagattcagcgccagtgggtcaggcactgatttcacactgaaaatcagcagggtggaggctgaggatgttggggtttattactgcatgcaaggtacacactggcacgtgtacagttttggccaggggaccaagctggagatca

SEQ ID NO: 3158 - DNA, 331 bp, Homo sapiens
  source 1..331: mol_type = other DNA
cagtctgtgctgacgcagccgccctcagtgtctggggccccagggcagagggtcaccatctcctgcactgggagcagctccaacatcgggacaggttatgatgtacactggtaccagcagcttccaggaacagcccccaaactcctcatctatggtcacagcaatcgaccctcgggggtccctgaccgattctctggctccaagtctggcacctcagcctccctggccatcactgggctccaggctgaggatgaggctgattattactgccagtcctatgacagcagcctgagggaggtattcggcggagggaccaagctgaccgtcctag

SEQ ID NO: 3159 - DNA, 340 bp, Homo sapiens
  source 1..340: mol_type = other DNA
gatgttgtgatgactcagtctccactctccctgcccgtcacccttggacagccggcctccatctcctgcaggtctagtcaaagcctcgtacatcgtgatggaaacacctacttgaattggtttcagcagaggccaggccaatctccaaggcgcctaatttataaggtttctagccgcgactctggggtcccagacagattcagcggcagtgggtcaggcactgatttcacactgaaaatcagcagggtggaggctgaggatgttggggtttactactgcatgcaaggtacacactggcctccgtacatttatggccaggggaccaggctggagatcaaac

SEQ ID NO: 3160 - DNA, 325 bp, Homo sapiens
  source 1..325: mol_type = other DNA
gaaatagtgatgacacagtctccagccaccgtgtctgtgtctcctgggggaagagccaccctctcctgcagggccagtcagagtgttagcagtagcttagcctggtaccagcaaaaacctggccagcctcccaggctcctcatctttgatgcctctaggagagccactggtatcccagccaggttcagtggcagtgggtctgggacagagttcactctcaccattaccagcctgcagtctgaagattttgcagtttattactgtcagcactacagtaactggcctccgtggacgttcggccaagggaccaaggtggagatcaaac

SEQ ID NO: 3161 - DNA, 325 bp, Homo sapiens
  source 1..325: mol_type = other DNA
tcctatgagctgactcagccaccctcagtgtccgtgtccccaggacagacagccagcatcacctgctctggagataatttgggggataaatatgcttgctggtatcagcagaagccaggccagtcccctgtgctggtcatctatcaagatagcaagcggccctcagggatccctgagcgattctctggctccaactctgggaacacagccactctgaccatcagcgggacccaggctatggatgaggctgactattactgtcaggcgtgggacaccagcactgcaaatgtggtattcggcggagggaccaagctgaccgtcctag

SEQ ID NO: 3162 - DNA, 320 bp, Homo sapiens
  source 1..320: mol_type = other DNA
catccagttgacccagtctccatcctccctgtctgcatctgtaggagacagagtcaccatcagttgccgggccagtcagggcattagcagttatttagcctggtatcagcaaaagccagggaaagcccctaagctcctgatctatagtgcatccactttgcagagtggggtcccacccaggttcagcggcagtggatctgggacaaatttcactctcaccatcagcagcctgcagcctgaagattttgcaacttattactgtcaacagcttgatagttacacgtacacttttggccaggggaccaagctggacatcaaac

SEQ ID NO: 3163 - DNA, 325 bp, Homo sapiens
  source 1..325: mol_type = other DNA
gagatagtgatgacgcagtctccagccaccctgtctgtgtctccaggggaaagagccaccctctcctgcagggccagtcagagtattagcagcgacttagcctggtaccagcagagacctggccaggctcccaggctcctcatctatggtgcgtccaccagggccactggtatcccagccaggttcagtggcagtgggtctgggacagagttcactctcaccatcaacagcctgcagtctgaagattttgcagtttattactgtcagcagtataataactggcctccgtggacgttcggccaagggaccaaggtggaaatcaaac

SEQ ID NO: 3164 - DNA, 322 bp, Homo sapiens
  source 1..322: mol_type = other DNA
gacatccagatgacccagtctccatcctccctgtctgcatctgtaggagacagagtcaccatcacttgccaggcgagtcacgacattagtcactatttaaattggtatcagcagaaaccagggaaagcccctaacctcctgatctacggtgcatccaatttggaaacaggggtcccatcaaggttcagtgggagtggatctgggacagatttttctttcaccatcagcagcctgcagcctgaagatattgcaacatattactgtcaacagtatgataatctccccttaactttcggccctgggaccaaagtggatatcaaac

SEQ ID NO: 3165 - DNA, 325 bp, Homo sapiens
  source 1..325: mol_type = other DNA
gacatccagatgacccagtctccatcctccctgtctgcatctgtaggagacagagtcaccatcacttgccgggcgagtcagggcattagcaattttttagcctggtatcagcagaaaccagggaaagttcctaagctcctgatctatgctgcatccactttgcagtcaggggtcccatctcgcttcagcggcagtggatctgggacagatttcactctcaccatcagcagcctgcagcctgaagatgttgcaacttattactgtcaaaagtataacagtgcccccccgctcactttcggcggagggaccaaggtggagatcaaac

SEQ ID NO: 3166 - DNA, 322 bp, Homo sapiens
  source 1..322: mol_type = other DNA
gacatccagatgacccagtctccatcctccctgtctgcatctgtaggagacagagtcacaatcacttgccgggcaagtcagaacattagaaaatttttaaattggtatcagcagaaaccagggaaagcccctaacctcctgatctatgctgcatccagtttgcacagtggggtcccatcaaggttcagtggcagtggatctgggacagatttcactctcaccatcagcagtctgcaacctgaagattttgcaacttattactgtcaacagagttacgatattcctcaaacttttggccaggggaccaagttggagatcaaac

SEQ ID NO: 3167 - DNA, 334 bp, Homo sapiens
  source 1..334: mol_type = other DNA
cagtctgtgctgacgcagccgccctcagtgtctggggccccagggcagagggtcaccatctcctgcactgggagcagctccaacatcggggcaggttatgatgtacactggtaccagcagcttccaggaacagcccccaaactcctcatctatggtaacagcaatcggccctcaggggtccctgaccgattctctggctccaagtctggcacctcagcctccctggccatcactgggctccaggctgaggatgaggctgattattactgccagtcctatgacagcagcctgagtgcctgggtgttcggcggagggaccaagctgaccgtcctag

SEQ ID NO: 3168 - DNA, 322 bp, Homo sapiens
  source 1..322: mol_type = other DNA
gaagtcgtgctgactcagtctccagactttcagtctgtgactccaaaggagaaagtcaccatcacctgccgggccagtcagagcattgatacttatttacactggtaccagcagaaaccagatcagtctccaaagctcctcatcaagtatgcttccaagtccatctcaggggtcccctcgaggttcagtggcagtggatttgggactgatttcaccctcaccatcaatagcctggaagctgaagatgctgcagtttattactgtcatcagagtaataagttacctccgacgttcggccaagggaccaaggtcgaaatcaaac

SEQ ID NO: 3169 - DNA, 325 bp, Homo sapiens
  source 1..325: mol_type = other DNA
gaaatagtgatgacgcagtctccagtcaccctgtctgtgtctccaggggaaagagtcaccctctcctgcaggacgagtgagagtgttagcagcaacttagcctggtaccagcagaaacctggccaggctcccaggctcctcatctatggtgcatccaccagggccactggtatcccagccaggttcagtggcagtgggtctgggacagagttcactctcaccatcagcagcctgcagtctgaagattttgcagtttattactgtcagcagtataataactggcctcctctcactttcggcggggggaccaaggtggagatcaaac

SEQ ID NO: 3170 - DNA, 334 bp, Homo sapiens
  source 1..334: mol_type = other DNA
cagcttgtggtgactcaatcgccctctgcctctgcctccctgggagcctcggtcaaactcacctgcactctgaacagtgggcacagcaactacggcatcgcctggcatcaacagcagccagagaagggccctcgttacttgatgaaggttaacagtgatggcagctacaccaagggggacgggatccctgatcgcttctcaggctccagctctgggactgagcgctacctcaccatctccagcctccagtctgaggatgaggctgactattactgtcaggcctgggacactggcattcgagtattcggcggagggaccaagctgaccgtcctag

SEQ ID NO: 3171 - DNA, 331 bp, Homo sapiens
  source 1..331: mol_type = other DNA
caggcagggctgactcagccaccctcggtgtccaaggacttgggacagaccgccactctcacctgcactggggacagcaataatgttgacaaagaaggagcagtttggctgcagcagcaccagggccaccctcccaaactcctatccttcagggataacaaccgtccctcaggggtctcagagagattttctgcgtccaggtcaagaaacacagcctccctgaccattactggactccagcctgaggacgaggctgactattactgcacatcgtgggacgactatctcaaatcttatgtcttcggggctgggaccaaggtcaccgtcctag

SEQ ID NO: 3172 - DNA, 325 bp, Homo sapiens
  source 1..325: mol_type = other DNA
gaaatagtgatgacgcagtctccagccaccgtgtctgtgtctccaggggacagagtcaccctcttttgcagggccagtcagagtgttggcagcagcttagcctggtaccagcagaaacctggccaggctcccaggctcctcatctttgatgcatccagcagggccactggtatcccagccaggttcagtggcagtgggtctgggacagagttcactctcaccatcagcaacctgctgtctgaagattttgcagtttattactgccaacaatatactgactggcctccgtggacgttcggccaagggtccaaggtggagatcaaac

SEQ ID NO: 3173 - DNA, 322 bp, Homo sapiens
  source 1..322: mol_type = other DNA
gacatccagatgacccagtctccatcctccctgtctgcatctgtaggagacagagtcaccatcacttgccaggcgagtcaggacattagtatttatttgaattggtatcaacagaaaccagggaaagcccctaagctcctgatctacggtgcatccaatttggaaacaggggtcccatcaaggttcagtggaagtggatctgggacagatttttctttcaccatcagcagcctgcagcctgaagatattgcaacatattactgtcaacaatatgataatctccccttaactttcggccctgggaccaaagtggatatcaaac

SEQ ID NO: 3174 - DNA, 322 bp, Homo sapiens
  source 1..322: mol_type = other DNA
gagattgtgttgacacagtctccagccaccctgtctttgtctccaggggaaagagccaccctctcctgcagggccagtcagagtgttaacacctacttagcctggtaccaacagaaacctggccaggctcccaggctcctcatctatgatgcatccaacagggccgctggcatcccagccaggttcagtggcagtgggtctgggacagacttcactctcaccatcagcagcctagagcctgaagattttgcagtttattactgtcagcagcgtagcaactggtcgtggacgttcggccaagggaccaaggtggaaatcaaac

SEQ ID NO: 3175 - DNA, 331 bp, Homo sapiens
  source 1..331: mol_type = other DNA
cagtctgtgctgacgcagccgccctcagtgtctggggccccagggcagagggtcaccatctcctgcactgggagcagctccaacatcgggacaggttatgatgtccactggtaccagcagcttccaggaacagcccccaaactcctcatctatggtaacagcaatcggccctcaggggtccctgaccgattctctggctccaagtctggcacctcagcctccctggccatcactgggctccaggctgaggatgaggctgattattactgccagtcctatgacagcagcctgagagaagtattcggcggagggaccaagctgaccgtcctag

SEQ ID NO: 3176 - DNA, 319 bp, Homo sapiens
  source 1..319: mol_type = other DNA
gaaatagtgatgacgcagtctccggccaccctgtctgtgtctccaggggaaagagccaccctctcctgcagggccagtcagagtgttgacggcaacttagcctggtaccagcagaatcctggccaggctcccagactcctcatctatggtgcatccatcagggccactggtatcccagccaggttcagtggcagtgggtctaggacagagttcactctcaccatcagcagcctacagtctgaagattttgcactttattactgtcagcagtataatgactggcctcggacttttggccaggggaccaagctggagatca

SEQ ID NO: 3177 - DNA, 328 bp, Homo sapiens
  source 1..328: mol_type = other DNA
gacatccagatgtcccagtctccgtcctccctgtctgcatctgtaggagacagaatcaccatcacttgccgggcaagtcagaccgctcagagcgttgccaactatttaaattggtatcagcagaaaccagggaaagcccctaaactcctgatctatgctgcatctcgtttgcaaagtggggtcccatcaaggttcagtggcagtggatctgggacagatttcactctcaccatcaacagtctgcggcctgaggattttgcaacttacttctgtcaacagacttacaataaccctataactttcggccctgggaccacagtggatatca

SEQ ID NO: 3178 - DNA, 322 bp, Homo sapiens
  source 1..322: mol_type = other DNA
gaaatcgtgatgacgcagtctccagccaccctgtctgtgtctccagggggaagagtcaccctctcctgcagggccagtcagcctattagcaccagcttagcctggtaccagcagaagcctggccagtctcccaggctcctcatctttggtgcatccaccagggccactggtatcccagacacgttcagtggcagtggggctgggacagagttcactctcacaatcagcagcctgcagtctgaagattttgcagtttattactgtcaacaatatcattcgtggcctcctctcactttcggcggggggaccaaggtggagatca

SEQ ID NO: 3179 - DNA, 325 bp, Homo sapiens
  source 1..325: mol_type = other DNA
gaaatagtgatgacgcagtctccaaccaccctgtctgtgtctccaggggaaagagccaccttctcctgcagggccagtcagagtgttagcagcaacttagcctggtaccagcagcaacctggccaggctcccaggctcctcatctatggtgcatccaccagggccactggtgtcccagccaggttcagtgccagtgggtctgggacagagttcactctcaccatcagcagcctgcagtctgaagattttgcagtttatttctgtcagcagtatcataactggcctccgatcaccttcggccaagggacacgactggaaattaaac

SEQ ID NO: 3180 - DNA, 340 bp, Homo sapiens
  source 1..340: mol_type = other DNA
gacatcgtgatgacccagtctccagactccctggctgtgtctctgggcgagagggccaccatcaactgtaagtccagtcagagtgttttgtacagctccaacaataagaactacttaggttggttccagcagaagccaggacagcctcctaagcttctcatttactgggcatctgcccgggaatccggggtccctgaccgattcagtggcagcggatctgtgacagatttcactctcaccatcagcagcctgcagcctgaagatctggcggtttattactgtcagcaatattatagtactccctggacgttcggccaaggcaccaaggtggaaatcaaac

SEQ ID NO: 3181 - DNA, 340 bp, Homo sapiens
  source 1..340: mol_type = other DNA
gatgttgtgatgactcagtctccactctccctgcccgtcacccttggacagccggcctccatctcctgcaggtctagtcaaagcctcgtacatagtgatggaaacacctacttgaattggtttcagcagaggccaggccagtctccaaggcgcctaatttatcaggtttctcaccgggactctggggtcccagacagattcagcggcagtgggtcaggcactgatttcacactgaaaatcagcagggtggaggctgaggatgttggcgtttattactgcatgcaagctacacactggcctccgtacacttttggccaggggaccaagctggagatcgaac

SEQ ID NO: 3182 - DNA, 322 bp, Homo sapiens
  source 1..322: mol_type = other DNA
gacatccagatgacccagtctccatcctccctgtctgcttctacaggagacagagtcaccatcacttgccaggcgagtcaggacattagcaaatatttaaattggtttcagcataaaccagggaaagcccctaaactcctgatcttcgaatcatcccatttggaaacaggggtcccatcaaggttcagtggaggtggatctgggacagattttactttcaccatcagcaccctgcagcctgaagatattgcaacatattactgtcaacaatatgataatctccccttaactttcggccctgggaccaaggtggatatcaaac

SEQ ID NO: 3183 - DNA, 334 bp, Homo sapiens
  source 1..334: mol_type = other DNA
gatattgtgatgacccagactccactctccttacctgtcacccttggacagccggcctccatctcctgcaggtctagtcaaagcctcgtacacagtgatggaaacacctacttgagttggcttcagcagaggccaggccagcctccgagactcctaatttataagatttctaaccggttctctggggtcccagacacattcagtggcagtggggcagggacagatttcacactgaaaatcagcagggtggaagctgaggatgtcgggatttattactgcatgcaagctacacaatttccgtacacttttggccaggggaccaagctggagatca

SEQ ID NO: 3184 - DNA, 322 bp, Homo sapiens
  source 1..322: mol_type = other DNA
gacatccagatgacccagtctccatcctcactgtctgcatctgtaggggacagagtcaccatcgcttgtcgggcgaatcagggcattagcaattatttagcctggtttcagcagaaaccagggaatgcccctaagtccctgatctatgctgcatccagtttgcaaagtggggtcccatcaaggttcagcggcagtggatctgggacacatttcaccctcaccatcagccgcctgcagcctgaagattctgcaacttactactgcctgcagtattatagttaccctcccactttcggcggagggaccaaggtggagatcaaac

SEQ ID NO: 3185 - DNA, 319 bp, Homo sapiens; identical to SEQ ID NO: 2757
  source 1..319: mol_type = other DNA

SEQ ID NO: 3186 - DNA, 335 bp, Homo sapiens
  source 1..335: mol_type = other DNA
gatattgtgatgacccagagtccgcgctcctcacctgtcacccttggacagccggcctccatctcctgcaggtctagtcaaagcctcgttcacggtgatggaaacacctacttgagttggcttcagcagaggccaggccagcctccaagactcctcatttataagatttctaaacgattctctggggtcccagacagattcagtggcagtggggcagggacagatttcacactgaaaatcagcagggtggaagctgaggatgtcggggtttattactgcacgcaagctacacaatttcctcacacttttggccaggggaccaagctggagatcaa

SEQ ID NO: 3187 - DNA, 343 bp, Homo sapiens
  source 1..343: mol_type = other DNA
cagtctgtgctgattcagccaccctcagtgtctgggacccccgggcagagggtcaccatctcttgttttggaagcacctccaacatcggaagtagagacggaagtagacctgtaaactggtaccagcatctcccagaaacggcccccagactcctcatctatgagaatgatcagcggccctcaggggtccctgaccgcttctcaggctccaagtctggcacctcagcctccctggccatcagtgggctccagtctgaggatgagggtgattattactgtttatcatgggatgacagactgagtgcttgggtgttcggcggagggaccaaactgaccgtcctag

SEQ ID NO: 3188 - DNA, 322 bp, Homo sapiens
  source 1..322: mol_type = other DNA
gacatccagatgacccagtctccatcctccctgtctgcatctgtaggagacagagtcaccatcacttgccgggcgagtcagggcattagcaattatttagcctggtatcagcagaaaccagggaaagttcctaagctcctgatctatgctgcatccactttgcaatcaggggtcccatctcggttcagtggcagtggatctgggacagatttcactctcaccatcagcagcctgcagcctgaagatgttgcaacttattactgtcaaaagtataacagtgcccctcagacgttcggccaagggaccaaggtggaaatcaaac

SEQ ID NO: 3189 - DNA, 340 bp, Homo sapiens
  source 1..340: mol_type = other DNA
gatgttgtgatgactcagtctccactctccctgcccgtcacccttggacagccggcctccatctcctgcaggtctagtcaaagcctcgtacacagagacggaaacacctacttgaattggtttcagcagaggccaggccaatctccaaggcgcctaatttataaggtttctagtcgcgactctggggtcccggacagattcagcggcagtgggtcaggcactgatttcacactgcacatcagcagggtggaggctgaggatgttggggtttattactgcatgcaaggtacacactggcctccgtacatctttggccaggggaccaagctggagatcaaac

SEQ ID NO: 3190 - DNA, 322 bp, Homo sapiens
  source 1..322: mol_type = other DNA
gaaattgtgttgacacagtctccagtcaccctgtctttgtctccaggggaaagagccaccctctcctgcagggccagtcagagtgttaacagctacttagcctggtaccaacagaaacctggccaggctcccaggctcctcatctatgatgcatccaacagggccgctggcatcccagccaggttcagtggcagtgggtctgggacagacttcactctcaccatcagcagcctagagcctgaagattttgcagtttattactgtcagcagcggagcaactggcctccgctcactttcggcggagggaccaaggtggagatca

SEQ ID NO: 3191 - DNA, 322 bp, Homo sapiens
  source 1..322: mol_type = other DNA
gacatccagatgacccagtctccatcgtccctgtctgcatctgtaggagacagagtcaccatcacttgccaggcgagtcaagacattgccaagtatttaaattggtatcagcagaaaccagggaaagcccctaaactcttgatctacgatgcatccaatttggaaacaggggtcccatcaaggttcagtggaagtggatttgggacagattttactttcatcatcagcagcctgcagcctgaagatattgcaacatatttctgtcaacagtatgataatctccccttaactttcggccctgggaccaaagtggatatcaaac

SEQ ID NO: 3192 - DNA, 334 bp, Homo sapiens
  source 1..334: mol_type = other DNA
cagtctgtgctgacgcagccgccctcagtgtctggggccccagggcagagggtcaccatctcctgcactgggagcagctccaacatcggggcaggttatgatgtacactggtaccagcagcttccaggaacagcccccaaactcctcatctatggtgacagcaatcggccctcaggggtccctgaccgcttctctggctccaagtctggcacttcagcctccctggccatcactgggctccaggctgaggatgaggctgattattactgccagtcctatgacagcagcctgagtggttcggtattcggcggagggaccaagctgaccgtcctag

SEQ ID NO: 3193 - DNA, 322 bp, Homo sapiens
  source 1..322: mol_type = other DNA
tcctatgagctgactcagccaccctcagtgtccgtgtccccaggacagacagccagcatcacctgctctggagataaattgggggataaatatgcttcctggtatcagcagaagccaggccagtcccctgtggtggtcatccatcaagatagcaagcggccctcagggatccctgagcgattctctggctccaactctgggaacacagccactctgaccatcagcgggacccaggctatggatgaggctgactattactgtcaggcgtgggacagtagtacttatgtggtattcggcggagggaccaagctgaccgtcctag

SEQ ID NO: 3194 - DNA, 325 bp, Homo sapiens
  source 1..325: mol_type = other DNA
gaaatagtgatgacgcagtctccagccaccctgtctgtgtctccaggggagagagccaccctctcctgcagggccagtcagagtcttagcagcgacttagcctggtaccagcagaagcctggccaggctcccaggctcctcatctatggtgcatccaccagggccactggtgtcccacccaggttcagtggcagtgggtctgggacagagttcactctcaccatcagcagcctgcagtctgaagattttgcactttattactgtcagcagtataataactggcctccgatcaccttcggccaagggacacgactggagattaaac

SEQ ID NO: 3195 - DNA, 319 bp, Homo sapiens
  source 1..319: mol_type = other DNA
gccatccggataacccagtctccatcctcactctctgcatctacaggagacagagtcaccatcacttgtcgggcgagtcagggtattagcagttatttagcctggtatcagcaaaaaccagggaaagcccctaagctcctgatctatgctgcatccactttgcaaagtggggtcccatcaaggttcagcggcagtggatctgggacagatttcactctcaccatcagctgcctgcagtctgaagattttgcaacttattactgtcaacagtattatagttacctcactttcggccctgggaccaaagtggatatcaaac

SEQ ID NO: 3196 - DNA, 331 bp, Homo sapiens
  source 1..331: mol_type = other DNA
gatattgtgatgactcagtctccactctccctgcccgtcacccctggagagccggcctccatctcctgcaggtctagtcagagcctcctgcatagtaatggatacaactatttggattggtacctgcaaaagccagggcagtctccacagctcctgatctatttgggttctaatcgggcctccggggtccctgacaggttcagtggcagtggatcaggcacagattttacactgaaaatcagcagagtggaggctgaggatgttgggatttattactgcatgcaagctctacaaacttacacttttggccaggggaccaggctggagatca

SEQ ID NO: 3197 - DNA, 331 bp, Homo sapiens
  source 1..331: mol_type = other DNA
cagtctgtgttgactcagccaccctcagcgtctgggacccccgggcagagggtcaccatctcttgttctggaagtagttccaacatcggaagtaatactgtgaattggtaccagcatctcccaggaacggcccccaaactcctcatctatagtaataatcagcggccctcaggggtccctgaccgattctctggctccaagtctggcacctcagcctccctggtcatcagtgggctccagtctgaggatgaggctgactattactgtgcaccatgggatgacagcctgagtagtctggtgttcggcggaggcaccaagctgaccgtcctag

SEQ ID NO: 3198 - DNA, 325 bp, Homo sapiens
  source 1..325: mol_type = other DNA
gaaatagtgatgacgcagtctccagccaccctgtctgtgtctccaggggaaagagtcaccctctcctgcagggccagtcagactgttaccgacagcttagcctggtaccagcacaaacctggccaggctcccaggctcctcatcttcggtgcaaataccagggccactggtatcccagccaggttcagtggcagtgggtctgggacagagttcgctctcaccatcagcagcctgcagtctgaggattttgcagtttattactgtcagcagtataatgactggcctccgtggacgttcggccaagggaccaaggtggaaatcaaac

SEQ ID NO: 3199 - DNA, 337 bp, Homo sapiens
  source 1..337: mol_type = other DNA
gatgttgtgatgactcagtctccactctccctgcccgtcacccttggacagacggcctccatctcctgcaggtctagtcgaggcctcgtacacattgatggaaacacctacttgacttggtttcagcagaggccgggccaatctccaaggcgcctaatttataaggtttctaaccgggactctggggtcccagacagattcagcggcagtgggtcaggcactgatttcacactgcaaatcagcagggtggaggctgaggatgttggggtttatttctgcatgcaaggtacatacatgggctccacttttggccaggggaccaagctggagatcaaac

SEQ ID NO: 3200 - DNA, 322 bp, Homo sapiens
  source 1..322: mol_type = other DNA
gacatccagatgacccagtctccatcctccctgtctgcttctataggagacagagtcaccatcacttgccaggcgagtcaggacattagcaaatatttaaattggtttcagcataaaccagggaaagcccctaagctcctgatctacgatgcatccaatttggaaacaggggtcccatcaaggttcagtggaagtggatctgggacagattttactttcaccatcagcaccctgcagcctgaagatattgcaacatattactgtcaacaatatgataatctccccttaactttcggccctgggaccaaagtggatatcaaac

SEQ ID NO: 3201 - DNA, 334 bp, Homo sapiens
  source 1..334: mol_type = other DNA
gatactgtgatgacccagactccactctcctcacctgtcacccttggacagccggcctccttctcctgcaggtcaagtcagggcctcgtgtacagtgatggaaacacctacttgagttggcttcagcagaggccaggccagcctccaagagtcctaatttataagatttctaaccggttctctggggtcccagacagattcagtggcagtggggcagggacagagttcacactgaaaatcagcagggtggaagctgaggatgtcggagtttattattgcatgcaagctacacactttccgtacacttttggccaggggaccaagctggagatca

SEQ ID NO: 3202 - DNA, 325 bp, Homo sapiens
  source 1..325: mol_type = other DNA
gaaatagtgatgacgcagtctccagccaccctgtctgtgtctccaggggaaagagccaccctctcctgcagggccagtcagagtgtcagcagcaacttagcctggtaccagcagaaacctggccaggctcccaggctcctcatttatggtgcatccaccagggccactggtatctcagtcaggttcactggcagtgggtctgggacagagttcactctcaccatcagcagcctgcagtctgaagattttgcagtttattactgtcagcagtataataactggcctccgctcactttcggcggagggaccaaggtggagatcaaac

SEQ ID NO: 3203 - DNA, 325 bp, Homo sapiens
  source 1..325: mol_type = other DNA
gaagtagtgatgacgcagtctccagccaccgtgtctgtgtctcctgggggaagagccaccctctcctgcagggccagccagagtgttagcagcagcctagcctggtaccagcaaaaacctggccagcctcccaggctcctcatctttgatgcatctagaagggtcactggtatcccagacaggttcagtggcagtgggtctgggacagagttcactctcaccattaccagcctgcagtctgaagattttgcagtttattactgtcagcactatactaattggcctccgtggacgttcggccaagggaccaaggtggagatcaaac

SEQ ID NO: 3204 - DNA, 325 bp, Homo sapiens
  source 1..325: mol_type = other DNA
gaaattgtgttgacgcagtctccaggcaccctgtctttgtctccaggggaaagagccaccctctcctgcagggccagtcagagtgttggcagcagctccttagcctggtaccagcagaaacctggccaggctcccaggctcctcatctatgctgcatccagcagggccactggcatcccagacaggttcagtggcagcgggtctgggacagacttcactctcaccatcagcagactggagcctgaagattttgcagtgtattactgtcagcagtatggtacgtcacctcggacgttcggccaagggaccaaggtggaaatcaaac

SEQ ID NO: 3205 - DNA, 325 bp, Homo sapiens
  source 1..325: mol_type = other DNA
gaaattgtgttgacacagtctccagccaccctgtctttgtctccaggggaaagagccaccctctcctgcagggccagtcagagtattagcaacttcttagcctggtaccaacagaaacctggccaggctcccaggctcctcatctatgatgcatccactagggccactggcatccccgccaagttcagtggcagtgggtctgggacagacttcactctcaccatcagcagtctagaccctgaagattttgcagtttattactgtcagcagcgtagcaactggcctccgatcaccttcggccaagggacacgactggagattaaac

SEQ ID NO: 3206 - DNA, 319 bp, Homo sapiens
  source 1..319: mol_type = other DNA
gacatccagatgacccagtctccatcctccctgtctgcatctgttggagacagagtcaccatcacttgccaggcgagtcaagacattagcaactatttaaattggtatcagcagaaaccagggaaagcccctaagctcctgatctacgatgcatccgatttggaaacaggggtcccatcaaggttcagtggaagtggatctgggacagattttactttcaccatcaacagcctgcagcctgaagatattgcaacatattactgtcaacagtatgataatctctccaccttcggccaagggacacgactggagattaaac

SEQ ID NO: 3207 - DNA, 319 bp, Homo sapiens
  source 1..319: mol_type = other DNA
gaaatagtgatgacgcagtctccagccaccctgtctgtgtctccaggggaaagagccaccctctcctgcagggccagtcagagtgttagcagcaacttagcctggtaccagcagaaacctggccaggctcccaggctcctcatctatggtgcatccaccagggccactggtatcccagccaggttcagtggcagtgggtctgggacagagttcactctcaccatcagcagcctgcagtctgaagattttgcagtttattactgtcagcagtataataactggcagacgttcggccaagggaccaaggtggaaatcaaac

SEQ ID NO: 3208 - DNA, 322 bp, Homo sapiens
  source 1..322: mol_type = other DNA
gaaattgtgttgacacagtctccagccaccctgtctttgtctccaggggaaagagccaccctctcctgcagggccagtcagagtgttagcagttacttagcctggtaccaacagaaacctggccaggctcccaggctcctcattcatgatgcatccaacagggccactggcatcccagccaggttcagtggcagtgggtctgggacagacttcactctcaccatcagcagcctagagcctgaagattttgcagtttattactgtcagcagcgtagcaactggtcgtggacgttcggccaagggaccaaggtggaaatcaaac

SEQ ID NO: 3209 - DNA, 325 bp, Homo sapiens
  source 1..325: mol_type = other DNA
gaaatagtgatgacgcagtctccagccaccctgtctgtgtctccaggggaaagagccaccctctcctgcagggccagtcagagtgttctcagcaatctagcctggtaccagcagaaacctggccaggctcccaggctcctcatctatggtgcatccaccagggccactggtatcccagccaggttcagtggcagtgggtctgggacacagttcactctcaccatcaacagcctgcagtccgaagattttgcagtttattactgtcagcagtataataactggcctccgcttactttcggcggagggaccaaggtggagatcaaac

SEQ ID NO: 3210 - DNA, 322 bp, Homo sapiens
  source 1..322: mol_type = other DNA
tcctatgagctgacacagccatcctcagcgtcagtgtctccgggacagacagccaggatcacctgctcaggagatatactggcaaaaaaatatgctcggtggttccagcagaagccaggccaggcccctgtgctggtgatttataaagacagtgagcggccctcagggatccctgagcgattctccggctccagctcagggaccacagtcaccttgaccatcaccggggcccaggttgaggatgaggctgactattactgttactctgcggctgacaatagtaggagggtgttcggcggagggaccaagctgaccgtcctag

SEQ ID NO: 3211 - DNA, 340 bp, Homo sapiens
  source 1..340: mol_type = other DNA
gacatcgtgatgacccagtctccagactccctggctgtgtctctgggcgagagggccaccatcaactgcaagtccagccagaatgttttatacagctccaataataagaactatttagcttggtaccagcagaaaccaggacagcctcctaagctgctcatttactgggcatctgcccggaattccggggtccctgaccgattcaatggcagcgggtctgggacagatttcattctcaccatcagcggcctgcaggctgaagatgtggcactttattactgtcagcaatattatggttatcctctcacgttcggccaagggaccaaggtggaaatcaaac

SEQ ID NO: 3212 - DNA, 331 bp, Homo sapiens
  source 1..331: mol_type = other DNA
cagtctgtgctgactcagccaccctcagcgtctgggacccccggacagagggtcgccatctcttgttctggaagcagctccaacatcggaagtaattctgtaaactggtaccagcacctcccaggaacggcccccaaactcctcatctttggtaataatcagcggccctcaggggtccctgaccgattttctgactccaagtctggcacctcggcctccctggccatcagtgggctccagtctgaggatgaggctgattattactgtgcagcttgggatgccagcctgaatggttgggtgttcggcggagggaccaagctgaccgtcctag

SEQ ID NO: 3213 - DNA, 322 bp, Homo sapiens
  source 1..322: mol_type = other DNA
gaaattgtgttgacgcagtctccaggcaccctgtctttgtctccaggggaaagagtcaccctctcctgcagggccagtcagagtgttagaagcaactccgtggcctggtaccagcagaaacctggccaggctcccaggctcctcatctatggtgcaaccagcagggccactggcatcccagacaggttcagtggcagtgggtctgggacagacttcactctcaccatcagcagactggagcctgaagattttgcagtgtattactgtcaccaatatggtggttcaccgaacacttttgggcaggggaccaagctagacatca

SEQ ID NO: 3214 - DNA, 334 bp, Homo sapiens
  source 1..334: mol_type = other DNA
cagtctgtgctgacgcagccgccctcagtgtctggggccccagggcagagggtcaccatctcctgcactgggagcagctccaacatcggggcaagttatgatgtacactggtaccagcaccttccaggaacagcccccaaactcctcatctatggtaacaacaatcggccctcaggggtccctgaccgattctctggctccaggtctggcacctcagcctccctggccatcactaggctccagactgaagatgaggctgattattactgccagtcctatgacagcagcctgcatgtttgggtgttcggcggagggaccgacctgaccgtcctag

SEQ ID NO: 3215 - DNA, 346 bp, Homo sapiens
  source 1..346: mol_type = other DNA
caggctgtgctgactcagccgtcttccctctctgcatctcctggagcatcagccagtctcacctgcaccttgcgcagtggcatcaatgttgatacctacaggatattttggtaccagcagaagccagggagtcctccccagtatctcctgaaatacaaatcagactcagataagcagcagggctctggagtccccagccgcttctctggatccaaagatgcttcggccaatgcagggattttactcatctctgggctccagtctgaggatgaggctgactattactgtatggtttggcataataacgcttgggtgttcggcggagggaccaaagtgaccgtcctag

SEQ ID NO: 3216 - DNA, 322 bp, Homo sapiens
  source 1..322: mol_type = other DNA
gaaatagtgatgacgcagtctccagccaccctgtctgtgtctccaggggagagagccaccctctcctgcagggccagtcagagtgttagcagcagcttagcctggtaccagcagaaacctggccaggctcccaggctcctcatctatggtgcatccaccagggccactggtatcccagccaggttcagtggcagtgggtctgggacagagttcacactcaccatcagcagcctgcagtctgaagattttgcagtttattactgtcaccaatatgctaactggctgtacagttttggccaggggaccaagctggagatcaaac

SEQ ID NO: 3217 - DNA, 325 bp, Homo sapiens
  source 1..325: mol_type = other DNA
gacatccagatgacccagtctccatcctccctgtctgtatctgtaggagacagaatcaccatcacttgccaggcgagtcacgacattagcaactatttaaattggtatcagcaaaaaccagggaaagcccctaagctcctgatccacgatgcgtccaatttggaaacaggcgtcccatcaaggttcagtggaagtggatctgggacagattttactttcaccattagcagcctgcagcctgaagatattgcaacatattactgtcaacagtgtaataatctcccgatgtgcacttttggccaggggaccaagctggagatcaaac

SEQ ID NO: 3218 - DNA, 325 bp, Homo sapiens
  source 1..325: mol_type = other DNA
gacatccagatgacccagtctccatcctccctgtctgcatctgtaggagacagagtcaccatcacttgccgggcaagtcagagtattagtaacgatttaaattggtatcagcaaaaaccagggaaagcccctaacctcctgatctatggtgcatccagcttgcagagtggggtcccatcaaggttcagtggcagtggatctgggacagatttcactctcaccatcagcagtctgcaacctgaagatttagcaacttactactgtcaacagagttacagtacgcctccgctcactttcggcggagggaccaaggtggagatcaaac

SEQ ID NO: 3219 - DNA, 323 bp, Homo sapiens
  source 1..323: mol_type = other DNA
aattgtgttgacgcagtctccaggcaccctgtctttgtctccaggggaaagagccaccctctcctgcagggccagtcagagtattagcagcaactccttagcctggtaccagcagaaacctgcccaggctcccaggctcctcatctatggtgcatccagcagggccactggcatcccagacaggttcagtggcagtgggtctgggacagacttcactctcaccatcagcagactggagcctgaagattttgcagtgtattactgtcagcagtatggtggctcaccgtacagttttggccaggggaccaagctggagatcaaac

SEQ ID NO: 3220 - DNA, 319 bp, Homo sapiens
  source 1..319: mol_type = other DNA
tcctatgagctgacacagccatcctcagtgtcagtgtctccgggacagacagccagtatcacctgctcaggagatatactgacaaaaaaatatgctcggtggttccagcagaagccaggccaggcccctatcttggtgatttataaagacaatgagcggccctcagggatccctgagcgattctccggctccagctcagggaccacagtcactttgaccatcagcggggcccaggttgaggatgaggctgactattactgttactctgcggctgacaacataggtgtcttcggaactgggaccaaggtcaccgtcctag

SEQ ID NO: 3221 - DNA, 322 bp, Homo sapiens
  source 1..322: mol_type = other DNA
gacatccagatgacccagtctccatcctcactgtctgcatctgtaggagacagagtcaccatcacttgtcgggcgagtcagggtattgttaattatttagcctggtttcagcagacaccagggaaagccccaaagtccctgatctatgctgcatccaatttggtaagtggggtcccatcaaggttcagcggcagtggatctgggacagatttcactctcaccatcagcagcctgcagcctgaagattttgcaacttattactgccaacagtatattagttaccccctcactttcggcggagggaccaaggtggacatcaaac

SEQ ID NO: 3222 - DNA, 325 bp, Homo sapiens
  source 1..325: mol_type = other DNA
gaaattgtgttgacacagtctccaggcaccctgtccttgtctccaggggaaagagccactctctcctgcagggccagtcagagtattagtaacttcttagcctggtaccaacagaaacctggccaggctcccaggctcctcatctatgatgcatccaacagggccactggcatcccagccaggttcagtggcagtgggtctgggacagacttcactctcaccatcagcagcctagagcctgaagattttgcagtttattactgtcagcagcgtagcaactggcctccgatcaccttcggccaagggacacgactggagattaaac

SEQ ID NO: 3223 - DNA, 328 bp, Homo sapiens; identical to SEQ ID NO: 2528
  source 1..328: mol_type = other DNA

SEQ ID NO: 3224 - DNA, 328 bp, Homo sapiens
  source 1..328: mol_type = other DNA
gaaattgtgttgacgcagtctccaggcaccctgtctttgtctccaggggaaagagccaccctctcctgcagggccagtcagagtcttagcagcagctacttagcctggtaccagcagaaacctggccaggctcccaggctcctcatctatggtgcatccagcagggccactggcatcccagacaggttcagtggcagtgggtctgggacagacttcactctcaccatcagcagactggagcctgaagattttgcagtgtatttctgtcagcactatggtagctcacctgggtacacttttggccaggggaccaaggtggagatcaaac

SEQ ID NO: 3225 - DNA, 334 bp, Homo sapiens
  source 1..334: mol_type = other DNA
cagtctgtgctgacgcagccgccctcagtgtctggggccccagggcagagggtcaccatctcctgcactgggagcagctccaacatcggggcaagttatgatgtacactggtaccagcaccttccaggaacagcccccaaactcctcatctatggtaacaacaatcggccctcaggggtccctgaccgattctctggctccaggtctggcacctcagcctccctggccatcactgggctccagactgaagatgaggctgtttattactgccagtcctatgacagcagtctgcatatttgggtgttcggcggagggaccgacctgaccgtcctag

SEQ ID NO: 3226 - DNA, 325 bp, Homo sapiens
  source 1..325: mol_type = other DNA
gaaaatgtgttgacgcagtctccaggcaccctgtctttgtctccaggggaaagagccaccctctcctgcagggccagtcagagtgttagcagcagccacttagcctggtaccagcagaaacctggccaggctcccaggctcctcatctatggtgcatccagcagggccactggcatcccagacaggttcagtggcagtgggtctgggacagacttcactctcaccatcagcagactggagcctgaagattttgcagtgtattactgtcagcagtatggtagttcacccgtcactttcggcggagggaccaaggtggagatcaaac

SEQ ID NO: 3227 - DNA, 328 bp, Homo sapiens
  source 1..328: mol_type = other DNA
gaaattgtgttgacgcagtctccaggcaccctgtctttgtctccaggggaaagagccaccctctcctgcagggccagtcagagtgttagcagcacctacttagcctggtaccagcagagacctggccaggctcccaggctcctcatctatggtgtatccagcagggccactggcgtcccagacaggttcagtggcggtgggtctgggacagacttcactctcaccatcagcagactggagcctgaggattttgcagtctattactgtcagcactatggtagctcacctgggtacacttttggccaggggaccaagctggagatcaaac

SEQ ID NO: 3228 - DNA, 322 bp, Homo sapiens
  source 1..322: mol_type = other DNA
gaaattgtgttgacacagtctccagccaccctgtctttgtctccaggggaaagagccaccctctcctgcagggccagtcagagtattaccaactacttagcctggtaccaacagaaacctggtcaggctcccaggctcctcatctatgatgcatccaacagggccactggcgtcccagccaggttcagtggcagtgggtctgggacagacttcactctcgccatcagtagcctagagcctgaagattttgcagtttattactgtcagcagcgtagcaactggcctaggactttcggccctgggaccaaagtggatctcaaac

SEQ ID NO: 3229 - DNA, 325 bp, Homo sapiens
  source 1..325: mol_type = other DNA
tcctatgagctgacacagccaccctcggtgtcagtgtccccaggacagacggccaggatcacctgctctggagatgcattgccaaaccaatatgctaattggtaccagcagaggccaggccaggcccctctactggtgatttataaagacagtgagaggtcgtcacggtttcctgagcgattctctggctccagctcagggacaactgtcacgttgatcatcagtggagtccaggcagaagacgaggctgactattactgtcaatcagcagacaccagtggtacttatcgggtatttggcggcgggaccaagttgaccgtcctag

SEQ ID NO: 3230 - DNA, 322 bp, Homo sapiens
  source 1..322: mol_type = other DNA
gaaattgtattgacacagtctccagtcaccctgtctttgtctccaggggaaagagccaccctctcctgcagggccagtcagagtgttagcagctacttagcctggtaccaacagaaacctggccaggctcccaggctcctcatctatgatgcatccaacagggccacgggcatcccagccaggttcagtggcagtgggtctgggacagacttcactctcaccatcagcagcctagagcctgaagattttgcagtttattactgtcagcagcgtggcaactggctctggacgttcggccaagggaccaaggtggaaatcaaac

SEQ ID NO: 3231 - DNA, 334 bp, Homo sapiens
  source 1..334: mol_type = other DNA
cagtctgtgctgacgcagccgccctcagtgtctggggccccagggcagagggtcaccatctcctgcactgggagcagctccaacatcggggcaagttatgatgtacactggtaccagcaccttccaggaacagcccccaaactcctcatctatggtaacaccaatcggccctcaggggtccctgaccgattctctggctccaggtctggcacctcagcctccctggccatcactgggctccagactgaagatgagggtgattattactgccagtcctatgacaacagtctgcatatttgggtgttcggcggagggaccgacctgaccgtcctag

SEQ ID NO: 3232 - DNA, 331 bp, Homo sapiens
  source 1..331: mol_type = other DNA
gaaattgtgttgacgcagtctccaggcaccctgtctttgtctccaggggaaagagccaccctctcctgcagggccagtcagagtgttaacaacaactacttagcctggtaccagcagaagcctgcccaggctcccaggctcctcatctatgatgcatccagcagggccactggcaccccagacaggttcagtggcagggggtctgggacagacttcactctcaccatcagcagactggagcctgaagattttgcagtgtatttctgtcagcagtatggcagctcacctcgagggctcactttcggcggagggaccaaggtggagatcaaac

SEQ ID NO: 3233 - DNA, 331 bp, Homo sapiens
  source 1..331: mol_type = other DNA
cagtctgccctgactcagcctcgctcagtgtccgggtctcctggacagtcagtcaccatctcctgcactggaaccagcagtaatgttggtggttataactatgtctcctggtaccaacaacacccaggcaaagcccccaaactcatgattttggatgtcagtaagcggccctcaggggtccctgatcgcttctctggctccaagtctggcaacacggcctccctgaccatctctgggctccaggctgaggatgaggctgactattactgctgctcatatgcaggcagctactcttgggtgttcggcggagggaccaagctgaccgtcctag

SEQ ID NO: 3234 - DNA, 340 bp, Homo sapiens
  source 1..340: mol_type = other DNA
gacatcgtgatgacccagtctccagactccctggctgtgtctctgggcgagagggccaccatcacctgcaggtccagccaggatgtcttatacagctccaacaataagaactacttagcttggtaccagcagaaaccaggacagcctcctaaactactcattagttgggcatctacccgggagtccgaggtccctgaccgattcagtggcagcgggtctgggacatatttcactctcaccatcagcagcacgcaggctgaagacgcggcagtttattactgtcaacaatattatagtgatcacttcactttcggcggagggaccaaggtggagatcaaac

SEQ ID NO: 3235 - DNA, 325 bp, Homo sapiens
  source 1..325: mol_type = other DNA
gacatccagatgacccagtctccatcctccctgtctgcatctgtgggagacagagtcaccatcacttgccgggcaagccagagcattagcacctatttaagttggtttcagcagaaagcagggaaagcccctcagctcctgatccatgctgtatccaatttgccacgtggggtcccatcaaggttcagtggcagtggatctgggacagatttcactctcaccatcagcagtcttcaacctgaggattttgcaacttactactgtcaacagagtcacagtacctctccgaagacgttcggccaagggacgaaggtggaattcaaac

SEQ ID NO: 3236 - DNA, 325 bp, Homo sapiens
  source 1..325: mol_type = other DNA
gaaattgtgttgacacagtctccagccaccctgtctttgtctccaggggaaagagccaccctctcctgcagggccagtcagagtgttagcagcgacttagcctggtaccaacagaaacctggccaggctcccaggctcctcatctatgatgcaatcaacagggccactggcatcccagccaggttcagtggcagtgggtctgggacagacttcactctcactatcagcagcctagagcctgaagattttgcagtttattactgtcagcagcgtttcaactggcctccgatcaccttcggccaagggacacgactggagattaaac

SEQ ID NO: 3237 - DNA, 325 bp, Homo sapiens
  source 1..325: mol_type = other DNA
gaaatagtgatgacgcagtctccagccaccctgtctgtgtcttcaggggaaagagccaccctctcctgcagggccagtcagagtgttagcagcaacttagcctggtaccagcagaaacctggccaggctcccaggctcctcatctatggtgcatccaccagggccactggtatcccagccaggttcagtggcagtgggtctgggacagagttcactctcaccatcagcagcctgcagtctgaagattttgcagtttattactgtcagcagtataataactggcccccgctcactttcggcggagggaccaaggtggagatcaaac

SEQ ID NO: 3238 - DNA, 322 bp, Homo sapiens
  source 1..322: mol_type = other DNA
gacatccagatgacccagtctccatcctccctgtctgcatctgtgggagacagagtcattatcacttgccggccaagccagaacattaacacctatttaaattggtatcaacagaagccagggaaagtccctaaactcctgatctatgctgcatccagtttgcagagtggggtcccatcaaggttcagtggcagtggatctgggacagatttcactctcaccatcggcagtctgcaacctgaagactttgcaacttacttctgtcaacagagttatagtacccctccaacgttcggccaagggaccaaggtggaaatcaaac

SEQ ID NO: 3239 - DNA, 325 bp, Homo sapiens
  source 1..325: mol_type = other DNA
gaaatagtgatgacgcagtctccagccaccctgtctgtgtctccaggggaaagagccaccctctcctgcagggccagtcagagtgttagcaacaacttagcctggtaccagcagaaacttggccaggctcccaggctcctcatctatggtgcatccaccagggccactggtatcccagccaggttcagtggcagtgggtctgggacagagttcactctcaccatcagcagcctgcagtctggagattttgcagtttattactgtcagcagtatcataactggccacctctcactttcggccctgggaccaaagtggatatcaaac

SEQ ID NO: 3240 - DNA, 325 bp, Homo sapiens
  source 1..325: mol_type = other DNA
gacatccagatgacccagtctccatcgtccctgtctgcatctgtaggagacagagtcaccatcacttgccgggcaagtcagagcatgagcagttatgtaaattggtatcaacagaaaccagggaaagcccctaagctcctgatctatcgtgcatccaatttgcaaagagacgtcccatcaaggttcagtggcagtggatctgggacagatttcactctcaccatcagcagtctgcaacctgaagattttgcaacttactactgtcaacagagtgacagtactcctccgaagacgttcggccaagggaccaaggtggaaatcaaac

SEQ ID NO: 3241 - DNA, 319 bp, Homo sapiens
  source 1..319: mol_type = other DNA
tcctatgagctgacacagccatcctcagtgtcagtgtctccgggacagacagccagtatcacctgctcaggagatatactgacaaaaaaatatgctcggtggttccagcagaagccaggccaggcccctatcctggtgatttataaagacaatgagcggccctcagggatccctgagcgattctccggctccagctcagggaccacagtcactttgaccatcaccggggcccaggttgaggatgaggctgactattactgttactctgcggctgacaacaaaggtgtcttcggaactgggaccaaggtcaccgtcctag

SEQ ID NO: 3242 - DNA, 325 bp, Homo sapiens
  source 1..325: mol_type = other DNA
gaaatagtgatgacgcagtctccagccaccctgtctgtgtctccaggggaaagagccaccctctcctgcagggccagtcagaatgttaacaacaacttagcctggtaccagcagaaacctggccaggctcccaggctcgtcatctatgatgcatccaccagggccactggtatccctgccaggttcagtggcagtgggtccgggacagagttcagtctcaccatcaccagcctgcagtctgaagattttgcagtttactactgtcagcagtataatgagtggactccgctcaccttcggcggagggaccaaggtggacatcaaac

SEQ ID NO: 3243 - DNA, 325 bp, Homo sapiens
  source 1..325: mol_type = other DNA
gaaatagtgatgacgcagtctccagccaccctgtctgtgtctccaggggaaagagccaccctctcctgcagggccagtcagagtgttagcagcaacttagcctggtaccagcagaaacctggccaggctcccaggctcctcatctatggtgcatccagcagggccactggtatcccagccaggttcactggcagtgggtctgggacagagttcactctcaccatcagcagcctgcagtctgaagattttgcattttattactgtcagcagtataataactggcctccgctcactttcggcggagggaccaaggtggagatcaaac

SEQ ID NO: 3244 - DNA, 325 bp, Homo sapiens
  source 1..325: mol_type = other DNA
gacaaccagctgacccagtctccttccaccctgtctgcatctgtaggagacagagtcaccatcacttgccgggccagtcagagtattggtggctggttggcctggtatcagcagaaaccagggaaagcccctaaggtcctgatctataaggtgtctactttagaaagtggggtcccatcaaggttcagcggcagtggatctgggacagaattcactctcaccatcagcagcctgcagcctgatgattttgcaacttattactgccaacggtataatagttattccttattcactttcggccctgggaccaaagtggatatcaaac

SEQ ID NO: 3245 - DNA, 331 bp, Homo sapiens
  source 1..331: mol_type = other DNA
caggcagggctgactcagccaccctcggtgtccaaggacttgagacagaccgccacactcacctgcactgggaacagcaacaatgttggcaaccgaggagcagcttggctgcagcagcaccagggccaccctcccaaactcctatcctacaggaataacaaccggccctcagggatctcagagagattctctgcatccaggtcaggaaccacagcctccctgaccattactggactccagcctgaggacgaggctgactattactgctcagcatgggacagcagcctcagtgcctgggtgttcggcggagggaccaaactgaccgtcctag

SEQ ID NO: 3246 - DNA, 320 bp, Homo sapiens
  source 1..320: mol_type = other DNA
gacatccagttgacccagtctccatccttcctgtctgcatctgtaggagacagagtcaccatcgcttgccgggccagtcaggacattatcactcatttagcctggtatcagcaaaaaccagggaaagtccctagcctcttgatttatggaacatccactttacaaagtggggtcccatcaaggttcagcggcagtggatctgagacagaattcactctcacaatcagcagcctgcagcctgaggattttgcaacttattactgtcaacaatttaatacttatccctacagttttggccaggggaccaagctggagatcaa

SEQ ID NO: 3247 - DNA, 340 bp, Homo sapiens
  source 1..340: mol_type = other DNA
gacatcgtgatgacccagtctccagactccctggctgtgtctctgggcgagagggccaccatcacctgcaagtccagccagagtgttttatacacatccaacaagaagaactacttagcttggtaccagcagaaaccgggacagtctcctaccttgctcattaactgggcttctacccgggaatccggggtccctgaccgattcagtggcagcgggtctgggacagatttcactctcaccatcagcagcctgcaggctgaagatgtggcagtttattactgtcaacaattttatagtgatcagttcactttcggcggagggaccaaggtggacatcaaac

SEQ ID NO: 3248 - DNA, 322 bp, Homo sapiens
  source 1..322: mol_type = other DNA
gaaatagtgatgacgcagtctccagccaccctgtctgtgtctccaggggaaagagccaccctctcctgcagggccagtcagagtgttagcagcaacttagcctggtaccaacagaaacctggccaggctcccaggctcctcatctatggtgcatccaccagggccactggtatcccagccaggttcagtggcagtgggtctgggacagagttcactctcaccatcagcagcctgcagtctgaagattttgctttttattactgtcagcactataataactggctgtacacttttggccaggggaccaagctggagatcaaac

SEQ ID NO: 3249 - DNA, 319 bp, Homo sapiens
  source 1..319: mol_type = other DNA
gaaattgtattgacacagtcaccagccaccctgtctctgtctcctggggaaagagccaccctctcctgcagggccagtcagagtattagcagctccttagtctggtaccaacaaaaacctggccaggctcccaggctcctcatctatgaagcatccaacagggccactggcatcccagccaggttcagtggcagtgggtctgggacagtcttcactctcaccatcagcaacctagagcctgaagatcttgcagtttattactgtcaacagcgtggcagctggctctggacgttcggccaggggaccaaggtggaaatca

SEQ ID NO: 3250 - DNA, 331 bp, Homo sapiens
  source 1..331: mol_type = other DNA
cagtctgtgctgactcagccaccctcagcgtctgggacccccggacagagggtcaccatctcttgttctggaagcagctccaacatcggaagtaattctgtaaactggtaccagctggtcccaggaacggcccccaaactcctcatctttggtaatagtcaacggccctcaggggtccctgaccggttttctgactccaagtctggcacctcagcctccctggccatccgtgggctccagtctgaggatgaggctgattattactgtgcagcttgggatgccagcctgaatggttgggtgttcggcggagggaccaagctgaccgtcctag

SEQ ID NO: 3251 - DNA, 337 bp, Homo sapiens
  source 1..337: mol_type = other DNA
cagtctgtgctgacgcagccgccctcagtgtctggggccccagggcagagggtcaccatctcctgcactgggagcagctccaacatcggggcaggttatgatgtacactggtaccagcagcttccaggaacagcccccaaactcctcatctatggtaacagcaatcggccctcaggggtccctgaccgattctctggctccaagtctggcacctcagcctccctggccatcactgggctccaggctgaggatgaggctgattattactgccagtcctatgacagcagcctgagtggtaaagtggtattcggcggagggaccaagctgaccgtcctag

SEQ ID NO: 3252 - DNA, 334 bp, Homo sapiens
  source 1..334: mol_type = other DNA
cagtctgtgctgactcagccaccctcagcgtctgggacccccgggcagagggtcaccatctcttgttctggaagcagctccaacatcggaactaatactgtaaactggttccagcagctcccaggaacggcccccaaactcctcatttatagaaataatcagcggccctcaggggtccctgaccgattctctggctccaagtctggcacctcagcctccctggccatcagtgggctccagtctgaggatgaggctgactattactgtgcagcatgggatgacagcctgaatggtcgttgggtgttcggcggagggaccaagctgaccgtcctag

SEQ ID NO: 3253 - DNA, 340 bp, Homo sapiens
  source 1..340: mol_type = other DNA
gatgttgtgatgactcagtctccactctccctgcccgtcacccttggacagccggcctccatctcctgcaggtctagtcaaagcctcgtatacagtgatggaaacacctacttgaattggtttcagcagaggccaggccaatctccaaggcgcctaatttataaggtttctaaccgggactctggggtcccggacagattcagcggcagtgggtcaggcactgatttcacactgaaaatcagcagggtggaggctgaggatgttggggtttattactgcatgcaaggtacacactggccttcttacactttcggccctgggaccaaagtggatatcaaac

SEQ ID NO: 3254 - DNA, 325 bp, Homo sapiens
  source 1..325: mol_type = other DNA
gaagttgtgttgacacagtctccagccaccctgtctttgtctccaggggaaagcgccaccctctcctgcagggccagtcagagtgttagcaactacttagcctggtaccaacagaaacctggcctggctcccaggctcctcatctatgattcatccaacagggccactggcatcccagccaggttcagtggcagtgggtctgggacagacttcactctcaccatcagcagcctagagcctgaagattttgcagtttattactgtcagcagcgtagcaactggcctcctatcaccttcggccaagggacacgactggagattaaac

SEQ ID NO: 3255 - DNA, 325 bp, Homo sapiens
  source 1..325: mol_type = other DNA
gaaatagtgatgacgcagtctccagccaccctgtctgtgtctccaggggaaagagccaccctctcctgcagggccagtcagagtgttagtagtaatttagcctggtaccagcagaaagttggccaggctcccaggctcctcatctatggtgcatcaaccagggccactggtatcccacccaggttcagtggcagtgggtctgggacagagttcactctcaccatcagcagcctgcagtctgaagattttgcagtttattattgtcagcagtataataactggccccccatcaccttcggccaagggacacgactggagattaaac

SEQ ID NO: 3256 - DNA, 325 bp, Homo sapiens
  source 1..325: mol_type = other DNA
gacatccagatgacccagtctccatcctccctgtctgcatctgtaggagacagagtcaccatcacttgccgggcaagccagagcattagcaactatttaagttggtttcagcagaaaccagggaaagcccctaagctcctgatccatgctgcatccagtttgcaacgtggggtcccatcaaggttcagtggcagtggatctgggacagatttcactctcaccatcagcagtctgcaacgtgaagattttgcaacttattactgtcaacagagttacaatacccctccgaagacgttcggccaagggaccaaggtggaaatcaaac

SEQ ID NO: 3257 - DNA, 328 bp, Homo sapiens
  source 1..328: mol_type = other DNA
gaaattgtgttgacgcagtctccaggcaccctgtctttgtctccaggggaaagagccaccctctcctgcagggccagtcagagtgttagcagcggccacttagcctggtaccagcagaaacctggccaggctcccaggctcctcatctatggtgcatccagaagggccactggcatcccagacaggttcagtggcagtgggtctgggacagacttcactctctccatcagcagactggagcctgaagattttgcagtgtattactgtcagcagtatggtggctcacctgggtacacttttggccaggggaccaacctggagatcaaac

SEQ ID NO: 3258 - DNA, 322 bp, Homo sapiens
  source 1..322: mol_type = other DNA
gacatccagatgacccagtctccttccaccctgtctgcatctgtaggagacagagtcaccatcagttgccgggccagtcagagtattaagtcctggttggcctggtatcagcagagaccagggagagcccctaacgtcctgatctatagggcgtctactttagaaagtggggtcccatcaaggttcagcggcagtggatctgggacagacttcactctcaccatcagcagcctacagcctgatgattttgcaacttattactgccaccaatattataattatccgtggacgttcggccaagggaccaaggtggaaatcaaac

SEQ ID NO: 3259 - DNA, 325 bp, Homo sapiens
  source 1..325: mol_type = other DNA
gaaatagtgatgacgcagtctccagccaccctgtctgtgtctccaggggaaagagccaccctctcctgcaggtccagtcagactattactgaccacttagcctggtaccagcagaaacctggccaggctcccaggctcctcatctatggtgcatccaccagggccagtggtatcccagccaggttcagtggcagtgggtctgggaccgagttcactctcaccatcagcagcctgcagtctgaagattttgcaatttattactgtcagcagtattataactggcctccgctcactttcggcggagggaccaaggtggagatcaaac

SEQ ID NO: 3260 - DNA, 322 bp, Homo sapiens
  source 1..322: mol_type = other DNA
gacatccagatgacccagtctccttccaccctgtctgcatctgtaggagacagagtcaccatcacttgccgggccagtcagagcattagtagttggttggcctggtatcagcagaaaccagggaaagcccctaagctcctgatctataaggcgtctagtttagaaagtggggtcccatcaaggttcagcggcagtggatctgggacagaattcagtctcagcatcagcagcctgcagcctgatgattttgcaacttatttctgcctgcagtatgaaagttattctgagactttcggcggggggaccaaggtggagatcaaac

SEQ ID NO: 3261 - DNA, 325 bp, Homo sapiens
  source 1..325: mol_type = other DNA
gaaattgtgttgacacagtctccagccaccctgtctttgtctccaggggaaagagccaccctctcctgcagggccagtcagagtgttagcagctacttagcctggttccaacagaaacctggccaggctcccaggctcctcatctatgatgcatccaacagggccactggcatcccagccaggttcagtggcagtgggtctgggacagacttcactctcaccatcagcagcctagagcctgaagattttgcagtttattactgtcagcagcgtagcaactggcctccgatcaccttcggccaagggacacgactggagattaaac

SEQ ID NO: 3262 - DNA, 319 bp, Homo sapiens
  source 1..319: mol_type = other DNA
gaaatagtgctgacgcagtctccagccaccctgtctgtgtctccaggggaaagagtcaccctctcctgcagggccagtcagagtgttagtagcaacttagcctggtaccagcagaaacctggccaggctcccaggctcctcatctatgctgcatccaccagggccactggtatcccagccaagttcagtggcagtgggtctgggacagagttcactctcaccatcagcagcctgcagcctgaagattttgcagtttattactgtcagcagtatgctaactggcttaacagttttggccaggggaccaagctggagatca

SEQ ID NO: 3263 - DNA, 322 bp, Homo sapiens
  source 1..322: mol_type = other DNA
gaaatagtgatgacgcagtctccagccaccctgtctgtgtctccaggggaaagagccaccctctcctgcagggccagtcagagtgttaacagcaacgtagcctggtaccagaagaaacctggccagcctcccaggctcctcatctatggtgcatccaccagggccactggtatcccagccaggttcagtggcagtgggtctggggcagagttcattctcaccatcagcagcctgcagtctgaagatcttgcagtttattactgtcaccactataataactggcttccgacgttcggccaagggaccaaggtggaaatcaaac

SEQ ID NO: 3264 - DNA, 331 bp, Homo sapiens
  source 1..331: mol_type = other DNA
cagtctgtgttgacgcagccgccctctgtgtctgcggccccaggacagaaggtcactgtctcctgctctggaagcagctccaacattgggaggaatcatgtctcgtggtaccagcaactccccggaacagcccccaccctcctcatttatgacaataataagcgaccctcagggattcctgaccgattctctggctccaagtctgagacgtcagccaccctgggcatcaccggactccagattggggacgaggccgattactactgcggaacatgggatagtagcctgagggctggcgtgttcggcggagggaccaaactgaccgtcctag

SEQ ID NO: 3265 - DNA, 322 bp, Homo sapiens
  source 1..322: mol_type = other DNA
gacatccagatgacccagtctccttccaccctgtctgcatctgtgggagacagagtcaccatcacttgccgggccagtcagagtattggtatctacttggcctggtatcagcagaaaccagggaaagcccctaagcgcctgatctataaggcgtctagtttggagagtggggtcccatcaaggttcagcggcagtggatctgggacacaattcactctcaccatcagcagcctgcagcctgatgattttgcaacttattactgccaacactataatacttattggtgcgctttcggcggcgggaccaaggtggagatcaaac

SEQ ID NO: 3266 - DNA, 331 bp, Homo sapiens
  source 1..331: mol_type = other DNA
cagtctgtgctcactcagccaccctcagcgtctgggacccccgggcagagggtcaccatctcttgttctggaagcagctccaacatcggaaataatgctgtaaactggtaccagcacctcccaggaacggcccccaaactcctcatctatagtaataatcagcggccctcaggggtccctgaccgattctctggctccaagtctggcacctcagcctccctggccatcagtgggctccagtctgaggatgaggctgattattactgtgcagcatgggatggcagcctgaatgcttttgtcttcggacctgggaccacggtcaacgtcctag

SEQ ID NO: 3267 - DNA, 337 bp, Homo sapiens
  source 1..337: mol_type = other DNA
gatgttgtgatgactcagtctccactctccctgcccgtcacccttggacagccggcctccatctcctgcaggtctagtcaaggcctcgtatacagtgatggaaacacctacttgaattggtttcagcagaggccaggccaatctccaaggcgcctgatttataaggtttctaaccgggactctggggtcccagacagattcagcggcagtgggtcaggcactgatttcacactgagaatcagcagggtggaggctgaggatgttggggtttattactgcatgcaaggtacatactggcctccggcattcggccaagggaccaaggtggaaatcaaac

SEQ ID NO: 3268 - DNA, 331 bp, Homo sapiens
  source 1..331: mol_type = other DNA
cagtctgggctgactcagccaccctcagcgtctgggacccccgggcagagggtcaccatctcttgctctggaagcacctccaacatgggaggtaaaactttcaactggtaccaacaactcccaggaacggcccccaaactcctcatgtatggtaaaaatcagcggccctcaggggtccctgggcgattctctggctccaggtctggcacctcagcctccctgaccatcagtgggctccagtctgaggatgaggctgattattactgcgcagcttgggatgacagtttgaatggttgggtcttcggcggggggaccaggctgaccgtcctag

SEQ ID NO: 3269 - DNA, 322 bp, Homo sapiens
  source 1..322: mol_type = other DNA
gacatccagatgacccagtctccttccaccctgtctgcatctgtaggagacagagtcaccatcacttgccgggccagtcagagtgtttttagttggttggcctggtatcagcagagaccagggaaagcccctaagctcctgatctataaggcgtctaatttagaaagtggggtcccatcaagattcagcggcagtggatctgggacagaattcactctcaccatcaacagcctgcagcctgatgattttgcaacttattactgccagcagtatcagagttattcctggacgttcggccaagggaccaacgtggaaatcaaac

SEQ ID NO: 3270 - DNA, 322 bp, Homo sapiens
  source 1..322: mol_type = other DNA
gacatccagatgacccagtctccatcctccctgtctgcctctataggagacagagtcaccatcacttgccgggcaagtcagagcgttagcggctatttaaattggtatcaacagagaccagggaaagcccctagactcctgatatatggtgcatccaacttacaaagtggggtcccatcaaggttcagtggcagtggatttgggacagatttcactctcaccatcagcagtctgcaatctgaagattttgcgacttactactgtcaacagagttacagtttgctgtatagttttggccaggggaccaagctggggatcaaac

SEQ ID NO: 3271 - DNA, 331 bp, Homo sapiens
  source 1..331: mol_type = other DNA
cagtctgccctgactcagcctcgctcagtgtccgggtctcctggacagtcagtcaccatctcctgcactggaaccagcagtgatgttggtggtgataactatgtctcctggtaccaacagcacccaggcaaagcccccaaactcataatttatgatgtcagtaagcggccctcaggggtccctgatcgcttctctggctccaagtctggcaacacggcctccctgaccatctctgggctccaggttgaggatgaggctgattattactgctgctcttttgcaggcagctacacttgggtgttcggcggagggaccaagctgaccgtcctag

SEQ ID NO: 3272 - DNA, 334 bp, Homo sapiens
  source 1..334: mol_type = other DNA
cagtctgtgctgacgcagccgccctcagtgtctggggccccagggcagagggtcaccttctcctgcactgggagcagctccaacatcggggcaacttatgatgtacactggtaccagcagcttccaggaacagcccccaaactcctcatctatggtaacaacaatcggccctcaggggtccctgaccgattctctggctccaagtctggcacctcagcctccctggccatcactgggctccaggctgaggatgaggctgattatttctgccagtcccacgacagcaccctgagtgcttgggtgttcggcggagggaccaagctgaccgtcctag

SEQ ID NO: 3273 - DNA, 322 bp, Homo sapiens
  source 1..322: mol_type = other DNA
gaaattgtgttgacacagtctccagccaccctgtccttgtctccaggggaaagagccaccctctcctgcagggccagtcagagtgttagcagatacttagcctggtatcaacagaaacctggccaggctcccaggctcctcatctatgatgcatccaatagggccactggcatcccagccaggttcagtggcagtgggtctgggacagacttcactctcaccatcagcagcctagagcctgaagattttgcagtttattactgtcagcagcgtggcaactggctctggacgttcggccaagggaccaaggtggaaatcaaac

SEQ ID NO: 3274 - DNA, 322 bp, Homo sapiens
  source 1..322: mol_type = other DNA
gacatccagatgacccagtctccatcctccctgtctgcatctgtcggagacagagtcaccatcacttgccgggcaagtcagagcattagcagctatttaaattggtatcagcagaaagtagggaaagcccctaagctcctgatctatggtgcatccactttgcaaagtggggtcccatcaaggatcagtggcagtggatctgggacagatttcactctcaccatcagcagtctgcaacctgaagattttgcaacttactactgtcaacagagttacagtacccctcagacgttcggccaagggaccaaggtggaaatcaaac

SEQ ID NO: 3275 - DNA, 340 bp, Homo sapiens
  source 1..340: mol_type = other DNA
gacatcgtgatgacccagtctccagactccctggctgtgtctctgggcgagagggccaccatcaactgcaagtccagccagagtcttttatacagctccaacaataagaactacttagcttggtaccagcagaaaccaggacagcctcctaagctgctcatttactgggcatccacccgggaatccggggtccctgaccgactcagtggcagcgggtctgggacagatttcactctcaccatcagcagcctgcaggctgaagatgtggcagtttattattgtcagcaatattatagtactcctcccacttttggccaggggaccaagctggagatcaaac

SEQ ID NO: 3276 - DNA, 322 bp, Homo sapiens
  source 1..322: mol_type = other DNA
tccgatgagctgacacagccatccgcagtgtcagtgtctccgggacagacagccaggatcacctgctcaggagatgtactggcaaaaaaatatgctcggtggttccagcagaaggcaggccaggcccctgtgctagtgatttataaagacactgagcggccctcagggatccctgaccgattctccggctccagctcagggaccacagtcaccttgaccatcaccggggcccaggttgaggatgaggctgactattactgttactctgcggctgacaacagtaggagggtgttcggtggagggaccaagttgaccgtcctag

SEQ ID NO: 3277 - DNA, 331 bp, Homo sapiens
  source 1..331: mol_type = other DNA
cagtctgccctgactcagcctccctccgcgtccgggtctcctggacagtcagtcaccatctcctgcactggaaccagcagtgacgttggtggttataactatgtctcctggtaccaacaacacccaggcaaagcccccaaagtcatcatttatgaggtcagtaagcggacctcaggggtccctgatcggttctctggctccaagtctggcaacacggcctccctgaccgtctctgggctccaggctgaggatgaggttgattattactgcagctcatatgcaggcaacaacaattgggtgttcggcggagggactaagttgaccgtcctag

SEQ ID NO: 3278 - DNA, 317 bp, Homo sapiens
  source 1..317: mol_type = other DNA
gacatccagatgacccagtctccttccaccctgtctgcatttgtaggagacagagtcaccatcacttgtcgggccagtgagaatattaatacctggttggcctggtatcaacagaaaccaggaaaaggcccaaatctcctgatctatgaggcgtctattttagagggtggcgtcccgtcaaggttcaccggcagtggatctgggacagagttcactctcaccatcgacagcctgcagcctgatgattttgcaacttattactgccaacagtataatacttattcggcgttcggccaagggaccaaggtggagatcaa

SEQ ID NO: 3279 - DNA, 325 bp, Homo sapiens
  source 1..325: mol_type = other DNA
gagattgtgttgacacagtctccagccaccctgtctttgtctccaggggaaagagccaccctctcctgcagggccagtcagactataggcgaccacttagcctggtaccaacaaaaacctggccaggctcccagactcctcatctatgatgcttccaacagggccactggcatcccagccaggttcagtggcagtgggtttgggacagacttcactctcaccatcagcagcctcgagcctgaagattttgcagtttattactgtcagcagcgttacaactggcctccactcactttcggcggagggaccaaggtggagatcaaac

SEQ ID NO: 3280 - DNA, 325 bp, Homo sapiens
  source 1..325: mol_type = other DNA
gaaattgtgttgacacagtctccagtcaccctggctttgtctccaggggaaagagccaccctctcctgcagggccagtcagagtattagtgtttccttagcctggtaccaacagaaacctggccaggctcccaggctcctcatctatggtgcatccaccagggccactggcatcccagccaggttcagtggcagtgggtctgggacagacttcactctcaccatcagcagcctagagcctgaagattttgcagtttattactgtcaacagcgttataactggcccccgatcaccttcggccaagggacccgactggagattaaac

SEQ ID NO: 3281 - DNA, 334 bp, Homo sapiens
  source 1..334: mol_type = other DNA
cagtctgtgctgacgcagccgccctcagtgtctggggccccagggcagagggtcaccatctcctgcactgggagcagctccaacatcggggcaagttatgatgtacactggtaccagcaccttccaggaacagcccccaaactcctcatctatggtaacaacaatcggccctcaggggtccctgaccgattctctggctccaggtctgtcacctcagcctccctggccatcactgggcttcagactgaagatgaggctgtttattactgccagtcctatgacagcagcctgcatatttgggtgttcggcggagggaccgacctgaccgtcctag

SEQ ID NO: 3282 - DNA, 325 bp, Homo sapiens
  source 1..325: mol_type = other DNA
gaaattgtgttgacgcagtctccaggcaccctgtctttgtctccaggggaaagagccaccctctcctgcagggccagccagagtattagcagcaggtacttagcctggtaccagcagaaacctggccaggctcccaggctcctcatctatgctgcgtccagcagggccactggcatcccagacaggttcagtggcagtgggtctgggacagacttcactctcaccatcagcagactggagcctgaagattttgcagtgtattactgtcagcagtatggtagtttcttgtacagttttggccaggggaccaagctggagatcaaac

SEQ ID NO: 3283 - DNA, 325 bp, Homo sapiens
  source 1..325: mol_type = other DNA
gaaatagtaatgacgcagtttccagccaccctgtctgtgtctccaggggcaagagccaccctctcctgcagggccagtcagagtgttagcagcaacttagcctggtaccagcagaaacctggccaggctcccaggctcctcatctatggtgcatccaccagggccactggtatcccagccaggttcagtggcagtgggtctgggacagacttcactctcaccatcagcagcctagagcctgaagattttgcagtttattactgtcagcagcgtagcaactggcctccgatcaccttcggccaagggacacgactggagattaaac

SEQ ID NO: 3284 - DNA, 331 bp, Homo sapiens
  source 1..331: mol_type = other DNA
cagtctgccctgactcagcctgcctccgtgtctgggtctcctggacagtcgatcaccatctcctgcactggaaccagcagtgacattggtggttataactatgtctcctggtaccaacagcacccaggcaaagtccccaaagtcataatttttgatgtcagtaatcggccctcaggggcttctaatcgcttctctggctccaagtctggcaacacggcctccctgaccatctctgggctccaggctgaggacgaggctgattattactgctcctcatatacaagcagcaacactcgggtattcggcggagggaccaagttgaccgtcctag

SEQ ID NO: 3285 - DNA, 331 bp, Homo sapiens
  source 1..331: mol_type = other DNA
cagtctgccctgactcagcctcgctcagtgtccgggtctcctggacagtcagtcaccatctcctgctctggaaccagcggtgatgttggtgcttataactatgtctcctggtaccaacaccacccaggtcaagcccccaaactcatgatttatgatgtcattaagcggccctcagggatcccagatcgcttctctggttccaagtctggcaacacggcctccctgacaatctctgggctccaggctgaggatgaggctgattattactgctgctcatatgcaggcagttattcttgggtgttcggcggagggaccaagctgaccgtcctag

SEQ ID NO: 3286 - DNA, 340 bp, Homo sapiens
  source 1..340: mol_type = other DNA
gacatcgtgatgacccagtctccagactccctggctgtgtctctgggcgagagggccaccatcaactgcaagtccagccagagtgttttatacagttccaacaagaagaactacttaagttggtaccagcagaaaccaggacagcctcctaaggtgctcatttactgggcatctacccgggaatccggggtccctgaccgattcagtggcagcgggtctgggacagatttcactctcaccatcagcagcctgcaggctgaagatgtggcagtttattactgtcagcaatattatgatactccattcactttcggccctgggaccaaagtggatatcaaac

SEQ ID NO: 3287 - DNA, 337 bp, Homo sapiens
  source 1..337: mol_type = other DNA
cagtctgccctgactcagcctgcctccgtgtctgggtctcttggacagtcgatcaccatctcctgcactggaaccagcagtgatgttgggagttataaccttgtctcctggtaccaacagcacccaggcaaagcccccaaactcatcatttatgaggtcagtaagcggccctcaggggtttctaatcgcttctctggctccaagtctggcaacacggcctccctgacaatctctgggctccaggctgaggacgaggctgattattactgctgctcatatgcaaatagtaacactttcgagagggtgttcggcggagggaccaagctgaccgtcctag

SEQ ID NO: 3288 - DNA, 346 bp, Homo sapiens
  source 1..346: mol_type = other DNA
gaaattgtgttgacgcagtctccaggcaccctgtctttgtctccaggggaaagagccaccctctcctgcagggccagtcagagtcttagcagcagctacttagcctggtaccagcataaacctggccaggctcccaggctcctcatctatggtgcatccagcagggccactggcatcccagacaggttcagtggcagtgggtctgggacagacttcactctcaccatcagcagactggagcctgaagattttgcagtatattactgtcagcagtatggtaactcaccgacgttcggccaagggacctcaccgacgttcggccaagggaccaaggtggaaatcaaac

SEQ ID NO: 3289 - DNA, 338 bp, Homo sapiens
  source 1..338: mol_type = other DNA
gacatcgtgatgacccagtctccagactccctgactgtgtctctgggcgagagggccaccatcaactgcaagtccagccagaatatcttatacagctccaacaaaaagaactacttagcttggtaccagcagaagccaggacagcctcctaagttgctcatttactgggcgtctacccgggaatccggggtccctgaccgattcagtggcagcgggtctggggcagatttcactctcaccatcagcagcctgcaggctgaagatgtggcagtttattactgtcagcaacattatagtatgccattgactttcggccctgggaccaaagtggatatcaa

SEQ ID NO: 3290 - DNA, 322 bp, Homo sapiens
  source 1..322: mol_type = other DNA
gaaatagtcatgacgcagtctccagtcaccctgtctgtggctccaggggagagagccaccctctcctgcagggccagtcagagtctcaatatggacttagcctggtatcagcagaaaccaggccaggctcccagactcctcatctatggtgcatccaccagggccactggtatcccagccaggttcagtggtagtgggtctgggacagagttcactctcaccatcagcagcctgcagtctgaagattttgcagtttattactgtcagcagtatcataactggcctccgctcactttcggcggaggtaccaaggtggagatca

SEQ ID NO: 3291 - DNA, 325 bp, Homo sapiens
  source 1..325: mol_type = other DNA
gaaatagtgatgacgcagtctccagccaccctgtctgtgtctccaggggaaagagccaccctctcctgcagggccagtcagagtgttagcagcgacttagcctggtaccggcagaaacctggccaggctcccaggctcctcatctatggtgcatccaccagggccactggtatcccagccaggttcagtggcagtgggtctgggacagagttcactctcaccatcagcagcctgcagtctgaagattttgcagtttattactgtcagcagtataataactggcctccgatcaccttcggccaagggacacgactggagattaaac

SEQ ID NO: 3292 - DNA, 319 bp, Homo sapiens
  source 1..319: mol_type = other DNA
tcctatgagctgacccagccatcctcagtgtcagtgtctccgggacagacagccagtatcacctgctcaggagatctactggcaaaaaaatatgctcgatggttccagcagaagccaggccaggcccctgtgctggtgatttataaagacaatgagcggccctcagggatccctgagcgattctccggctccagctcagggaccacagtcactttgaccatcagcggggcccaggttgacgatgaggctgactattactgttactctgcggctgacaacaaaggtgtcttcggaactgggaccaaggtcaccgtcctag

SEQ ID NO: 3293 - DNA, 331 bp, Homo sapiens
  source 1..331: mol_type = other DNA
cagtctgtgctgactcagccaccctcagcgtctgggacccccgggcagagggtcaccatctcttgttctggaagcagctccaacatcggaagtaatcctgtaaattggttccaccacctcccagggacggcccccaaactcctcatttacagtaataatcagcggccctcaggggtccctgaccgattctctggctccaagtctggcacctcagtatccctggccatcagtgggctccagtctgaggatgaggctgattattactgtgcggcctgggataacagcctgaatggttgggtactcggcggagggaccaagctgaccatcctag

SEQ ID NO: 3294 - DNA, 331 bp, Homo sapiens
  source 1..331: mol_type = other DNA
cagtctgccctgactcagcctgcctccgtgtctgggtctcctggacagtcgatcaccatctcctgcactggaaccagcggtgacattggtgcttataactatgtctcctggtaccaacaacacccaggcaaagcccccaaactcatgatttatgaggtcagtaatcggccctcaggggtttctgatcggttctctggctccaagtctggcgacacggcctccctgaccatctctgggctccagcctgaggacgaggctgattattactgctgctcatatacaaccagcaacacttgggtgttcggcggagggaccaagctgaccgtcctag

SEQ ID NO: 3295 - DNA, 339 bp, Homo sapiens
  source 1..339: mol_type = other DNA
acatcgtggtgacccagtctccagcctccctggctgtgtctctgggcgagagggccaccatcaactgcaagtccagccagagtgttttatacagctccaacgaaaagaactacttagcttggtatcagcagaaaccaggacagcctcctaagctcctcatttactgggcgtccacccgggaatccggggtccctgaccgattcagtggcagcgggtctcatacagatttcactctcaccatcagcagtctgcaggctgaagatgtggcagtttattactgtcagcaatattacgatagtccgctcgctttcggcggagggaccaaggtggagatcaaac

SEQ ID NO: 3296 - DNA, 327 bp, Homo sapiens
  source 1..327: mol_type = other DNA
caggctgtggtgactcaggagccctcactgactgtgtccccaggagggacagtcactctcacctgtgcttccagcactggagctgtcaccagtggtcattatccctactggttccagcagaagcctggccaagccccccggacactgatttctgatacaagcaacaaacactcctggacccctgcccgtttctcaggctccctccttgggggcaaagctgccctgaccctttcgggtgcgcagcctgaggatgaggctgtgtattactgcttcctctcctatagtgatttttgggtgttcggcggagggaccaggctgaccgtccta

SEQ ID NO: 3297 - DNA, 322 bp, Homo sapiens
  source 1..322: mol_type = other DNA
gacaaccaggtgacccagtctccatccttcctgtctgcatctgtaggagacagagtcaccatcacttgctgggccagtcaggacattagcagtgatttagcctggtatcatcaaaaaccagggaaagcccctaagctcctgatctatgctgcatccactttgcaaagtggggtcccatcaaggttcagcggcagtggatctgggacagaattcactctaacaatcagcagcctgcagcctgaagattttgcaacttattactgtcaacaacttaagagttacccggtcactttcggcggggggaccaaggtggggatcaaac

SEQ ID NO: 3298 - DNA, 340 bp, Homo sapiens
  source 1..340: mol_type = other DNA
gacatcgtgatgacccagtctccagactccctggctgtgtctctgggcgagagggccaccatcaactgcaagtccagccagagcgttttatacagctccaacaagaagaactacttagcttggtaccagcagaaaccaggacagcctcctaagttgctcatttactgggcatccacccgggaatccggggtccctgaccgattcagtggcagcgggtctgggacagatttcactctcaccatcagcggcctgcaggctgaagatgtggcagtttattactgtcagcaatattatgatattcctatcaccttcggccaagggacacgactggagattaaac

SEQ ID NO: 3299 - DNA, 340 bp, Homo sapiens
  source 1..340: mol_type = other DNA
gacatcgtggtgacccagtctccagactccctggctgtgtctctgggcgagagggccactatcaactgcaagtccagccagagtgttttatacaactccaacaataaggactacttagcttggtaccagcagaaaccaggacaccctcctaagctgctcatttactgggcgtctacccgggaatccggggtccctgaccgattcagtggcagcgggtctgagacagacttcagtctcaccatcaacagcctgcaggctgaagatgtggcagtttatttctgtcagcaatactttggtcttccgctcaccttcggcggagggaccaaggtggagatcaaac

SEQ ID NO: 3300 - DNA, 340 bp, Homo sapiens
  source 1..340: mol_type = other DNA
gacatcgtgatgacccagtctccagactccctggctgtgtctctgggcgagagggccaccatcaactgcaagtccagccagagtgttttatacagttccaacgataagaattacttagcttggtaccagcagaaatcaggacagcctcctaagctgctcatttactgggcatctaaccgggaatccggggtccctgaccgattcagtggcagcgggtctgagacagatttcactctcaccatcagcagcctgcaggctgaagatgtggcagtttattactgtcaacaatattatggtgtacctcatacgttcggccaagggaccaaggtggaattcaaac

SEQ ID NO: 3301 - DNA, 331 bp, Homo sapiens
  source 1..331: mol_type = other DNA
cagtctgccctgactcagcctccctccgcgtccgggtctcctggacagtcagtcaccatctcctgcactggaaccagcagtgacgttggtggttataactatgtctcctggtaccaacagcacccaggcaaagcccccaaactcatgatttatgatgtcagtaatcggccctcaggggtttctaatcgcttctctggctccaagtctggcaacacggcctccctgaccgtctctgggctccaggctgaggatgaggctgattattactgcagctcatatgcaggcagcaacagttgggtgttcggcggagggaccaagctgaccgtcctag

SEQ ID NO: 3302 - DNA, 340 bp, Homo sapiens
  source 1..340: mol_type = other DNA
gacatcgtgatgacccagtctccagactccctggctgtgtctctgggcgagagggccaccatcaactgcaagtccagccagagtattttatacaactccaacaaaaagaactacttagcttggtaccagcagaaaccaggacagcctcctaagctgctcatttactgggcatctacccgggaatccggggtccctgaccgattcagtggcagcgggtctgagacagatttcactctcaccatcagcagcctgcaggctgaagatgtggcagtttattactgtcagcaatattatgatattcctatcaccttcggccaagggacacgactggagattaaac

SEQ ID NO: 3303 - DNA, 319 bp, Homo sapiens
  source 1..319: mol_type = other DNA
gacatccagatgacccagtcaccatcctccctgtctgcatccacaggagacagagtcaccatcacttgccgggcaactcagagcattggtacctatttaaattggtatcgccagataccaggcaaagcccctcaggtcctaatgtatactacagacaatttgcaggctggggtcccatctaggttcactggcagcgggtctgggacagaattcactctcaccctcaatagtgtgcaacctgaagatgctgccacttactactgtcaacagacttacagtagaccgtactcttttggccaggggaccagactggacatca

SEQ ID NO: 3304 - DNA, 322 bp, Homo sapiens
  source 1..322: mol_type = other DNA
gacatccagatgacccagtctcctcccacgctgtctgcatatgtaggagacaaagtcaccatcacttgccgggccactcagaatattagtatttggttggcctggtatcagcagaaaccagggaaagcccctaaggtcctgattaataaggcgtctaatttagaaagtggggtcccatcaaggttccgcggcagtggatctgggacagagttcactctcaccatcagcagcctgcagcctgatgattttgcaacttattactgccaacagtataattactattcttggacgttcggcccagggaccaaggtggaaatcaaac

SEQ ID NO: 3305 - DNA, 318 bp, Homo sapiens
  source 1..318: mol_type = other DNA
tcttatgaactgactcaaccaccctcagtgtccgtgtccccaggacagacagccagcatcacctgctctggagataaattgggagataagtttgcttgctggtaccagcagaagccaggccagtcccctgtgctgctcgtctatcagaataacaagcggccctcagggatccctgagcgattctctggctgcaactctggtaacacagccactctgaccatcagcgggacccaggctgtggatgaggctgattattactgtcaggcgtgggacagcaacactgtggtattcggcggagggaccaagctgaccgtccta

SEQ ID NO: 3306 - DNA, 325 bp, Homo sapiens
  source 1..325: mol_type = other DNA
gaaattgtgttgacgcagtctccaggcaccctgtctttgtctccaggggaaagagccaccctctcctgcagggccagtcagagtgttaacagctactccttagtctggtaccagcagaaacctggccaggctcccaggctcctcatctatggtgcatccagcagggccactggcatcccagacaggttcagtggcagtgggtctgggacagacttcactctcaccatcagcagactggagcctgaagattttgcagtgtattactgtctgcactatggtacctcatcgtggacgttcggccaagggaccaaggtggaaatcaaac

SEQ ID NO: 3307 - DNA, 340 bp, Homo sapiens
  source 1..340: mol_type = other DNA
gacatcgtgatgacccagtctccagactccctgactgtgtctctgggcgagagggccaccatcaactgcaagtccagccagagtgttttatacaaaaaaaaaaaaaaaaactactttgcttggtaccagcagaaaccaggacagcctcctaagctgctcatttactgggcatctacccgggaatccggggtccctgaccgattcagtggcagcgggtctgggacagatttcactctcaccatcagcagcctgcaggctgaagatgtggcagtttattactgtcagcaatattatggtcttccgctcactttcggcggagggaccaaggtgcagatcaaac

SEQ ID NO: 3308 - DNA, 322 bp, Homo sapiens
  source 1..322: mol_type = other DNA
gaaattgtgttgacgcagtctccagtcagactgtctttgtctccaggggagagagccaccctcttttgcagggccagccagagtgtgaatgtcagggacttagtctggtaccagcacagacctgggcaggctccgaggctcctcatctatggtgcatccaagagggccagcggcatcccagacaggttcactggcagcgggtccgggacagacttcactctcagcataaacagtctggagccggaagattttgcaatatactattgtcaacaatatggcacctcgccgacgctcggccaggggaccaacgtggaaatgaaac

SEQ ID NO: 3309 - DNA, 334 bp, Homo sapiens
  source 1..334: mol_type = other DNA
cagcttgtgctgactcaatcgccctctgcctctgcctccctgggagcctcggtcaagctcacctgcactctgagtagtgggcacagcaactacgccatcgcgtggcatcagcagcagccagagaagggccctcggtatttgatgaagcttaatagtgatggcagccacttcaagggggacgggatccctgatcgcttctcaggctccagctctggggctgagcgctacctcaccatctccaacctccagtctgaggatgaggctgactattactgtcagacttggggcactgattcttatgtcttcggaactgggaccaaggtcaccgtcctag

SEQ ID NO: 3310 - DNA, 346 bp, Homo sapiens
  source 1..346: mol_type = other DNA
caggctgtgctgactcagccgtcttccctctctgcatctcctggagcatcagccagtctcacctgcaccatacgcagtggcatcaatgttggtgcctacaggatttactggtaccagcagaagccagggagtcctccccagtatctcctgatgtacaaatcagactcagagaaacatcagggctctggagtccccagccgcttctctggatccaaagatgcttcggccaatgcagggattttactcatctctgggctccagtcggaggatgaggctgactattactgtttaatttggcacagcaacacttacgtattcggcgcagggactaaactgaccgtcctag

SEQ ID NO: 3311 - DNA, 325 bp, Homo sapiens
  source 1..325: mol_type = other DNA
gaaatagtgatgacgcagtctccagccaccctgtctgtgtctctaggggatagagccaccctctcctgcagggccagtcagagtgttggcagcaacttggcctggtatcagcagaaacctggccaggctcccaggctcctcatctatggtgtatccaccagggccactggtttcccagccaggttcagtggcagtgggtctgggacagagttcactctcaccatcaccagtctgcagcctgaagattttgcagtttattactgtcagcagtataataactggcctccgatcacgttcggccaagggacacgactggagattaaac

SEQ ID NO: 3312 - DNA, 322 bp, Homo sapiens
  source 1..322: mol_type = other DNA
gacatccagatgacccagtctccatctgccatgtctgcatctgtaggagacagagtcaccatcacttgtcgggcgagtcaggacattaacaattatttagcctggtttcagcagaaaccagggaaagtccctaagcgcctgatctatgctgcatccagtttgcaaagtggggtcccatcaaggttcagcggcagtggatctgggacagaattcactctcacaatcagcagcctgcagcctgaagattttgcaacttattactgtctacagcataatagttaccctcggacgttcggccaagggaccaaggtggaaatcaaac

SEQ ID NO: 3313 - DNA, 337 bp, Homo sapiens
  source 1..337: mol_type = other DNA
gaaattgtgatgactcagtctccactctccctgcccgtcacagttggagagccggcctccatctcctgcaggtctagtcagagcctcctgcatagtaatggatacaactatttgaattggtacctgcagaagccaggacagtctccacaactcctgatctatttcggttctaatggggcctccggggtccctgacaggttcagtgccagtggatcaggaacagattttacactgaaaatcagcagagtggaggccgaggatgttggggtttattactgcatgcaaactctacaaactccattcactttcggccctgggaccaaagtggatatcaaac

SEQ ID NO: 3314 - DNA, 340 bp, Homo sapiens
  source 1..340: mol_type = other DNA
gacaccgtgatgacccagtctcctgactccctgcctgtgtctctgggcgagagggccaccatcaactgcaagtccagccagaatcttttatacgactccaacaataaggactacttagcttggtatcagcagaaaccaggacagcctcctaaactgctcatgtactgggcatctacccgggaatccggggtccctgaccgattcagtggcagcgggtctgggacagatttcactctcaccatcagcagcctgcaggctgaagatgtggcgatttattactgtcagcaatattattatcttcctctcactttcggcggggggaccaaggtggagatcaaac

SEQ ID NO: 3315 - DNA, 343 bp, Homo sapiens
  source 1..343: mol_type = other DNA
gacttcgtgatgacccagtctccagactccctggctgtgtctctgggcgagagggccaccatcaactgcaagtccagccagagtcttttctggagcgacaacaaaaagaactacctagcttggtaccagcagaagccaggacagcctcctaaactgctcatttactgggcatctacccgggaatccggggtccctgaccgattcagtggcagcgggtctgagacagatttcactctcaccatcagtagcctgcaggctgaagatgtggcggtttattactgtcaacagtattatagtcctcctccgttcactttcggccctgggaccaaagtggatatcaaac

SEQ ID NO: 3316 - DNA, 333 bp, Homo sapiens
  source 1..333: mol_type = other DNA
tcgtgatgacccagtctccagactccctggctgtgtctctgggcgagagggccaccatcaactgcaagtccagccagagtcttttctggagcgacaacaaaaagaactacctagcttggtaccagcagaagccaggacagcctcctaaactgctcatttactgggcatctacccgggaatccggggtccctgaccgattcagtggcagcgggtctgggacagatttcactctcaccatcagcagcctgcaggctgaggatgtggcagtttattactgtcagcagtattatgattatcctctcactttcggcgcagggaccaaggtggacatca

SEQ ID NO: 3317 - DNA, 325 bp, Homo sapiens
  source 1..325: mol_type = other DNA
gaaattgtgttgacccagtctccaggcaccctgtctttgtctccaggggagagagccaccctctcctgccgggccagtcagagtattagaaacaactacttagcctggtaccagcagaaacctggccaggctcccaggctcctcatgtatggtgtctccatcagggccgatggaaccccaggcaggttcagtggcagtgggtctgggacagacttcactctcaccatcagcagactggagcctgaagatattgcggtgtatttctgtcagcagtctggtagttcacctaggacgttcggccaagggaccaaggtggaaatcaaac

SEQ ID NO: 3318 - DNA, 325 bp, Homo sapiens
  source 1..325: mol_type = other DNA
gaaactgtgttgacacagtctccagccaccctgtctttgtctccaggggaaagagccaccctctcctgcagggccagtcagagtcttaacaactacttagcctggtaccaacacaaacctggccaggctcccaggctcctcatctatgatgcatccaacagggccactggcgtcccagccaggttcagtggcagtgggtctgggacagacttcactctcaccatcagcagcctagagcctgaagattttgcagtttattactgtcagcagcgtagtagctggcctacatggacgttcggccaagggaccagggtggagatcaaac

SEQ ID NO: 3319 - DNA, 322 bp, Homo sapiens
  source 1..322: mol_type = other DNA
gacatccagttgacccagtctccatccttcctgtctgcatctataggagacagagtcaccatcacttgccgggccagtcaggacattaacagtcatttagcctggtttcaccagagaccaggtgaagcccccaagcttctcatctatagtgcatccactttgcaaagtggggtcccatcaaggttcagcggcagtggatctgggacagcattcactctcacaatcagcagcctgcaggctgaagattttgcaaactatttctgtcaacaacttaagagttaccccctcactttcggcggagggaccaaggtggagatcaaac

SEQ ID NO: 3320 - DNA, 328 bp, Homo sapiens
  source 1..328: mol_type = other DNA
cagactgtggtgacccaggagccatcgttctcagtgtcccctggagggacagtcacactcacttgtggcttgaactctggctcaatctctactagttactacccctgttggtaccagcagaccccaggccaggctccacgcacgctcatctatagcacaaacactcgctcttctggggtccctgatcgcttctctggctccatccttgggaacaaagctgccctcaccatcacgggggcccaggcagatgatgaatctgattattactgtgcgctacatatgggtagttattgggtgttcggcggagggaccaagctgaccgtcctag

SEQ ID NO: 3321 - DNA, 346 bp, Homo sapiens
  source 1..346: mol_type = other DNA
caggctgtactgactcagccggcttccctctctgcatctcctggagcagcagccagtctcacctgcaccctgcgcagtggcatcaatgttaatacgtacagggtatactggtaccaacagaggccagggagtcctccccgatatctcctgaggtacaaatcagactcagataaacagcagggctctggagtccccagccgcttctctggatccaaagctgcttcggccaatgcagggattttactcatctctgggctccagtctgaggatgaaggtgactatttctgtatgatttggcacagcaacacttgggtgttcggcggagggaccaaactgaccgtcctag

SEQ ID NO: 3322 - DNA, 337 bp, Homo sapiens
  source 1..337: mol_type = other DNA
gaaattgtgatgactcagtctccactctccctgcccgtcatccctggagagccggcctccatctcctgcaggtctagtcagagcctcctgcatactaatggatacaactatttggcttggtacctgcagaagccagggcagtctccacaactcctgatctatttggcttctaatcgggcctccggggtccctgacaggttcagtggcagtggatcaggtacagattttacactgaaaatcagcagattcgaggctgacgatgttggggtctattactgcatgcaagctctgaaaattcccaggacgttcggccgcgggaccaaggtggaaatcaaac

SEQ ID NO: 3323 - DNA, 337 bp, Homo sapiens
  source 1..337: mol_type = other DNA
gatattgtgatgacccagactccactctcctcacctgtcacccttggacagccggcctccatctcctgcaagtctggtcaaagcctcgtacacagtgatggaaatacctacttgagttggcttcagcagaggccaggccagcctccaagactcctaatttataagatttctaaccggttctctggggtcgcagacagattcagtggcagtggggcagggacagatttcacactggaaatcagcagggtggaagctgaggatgtcggggtttattactgcatgcaagctacacaatttccgaggacttttggccaggggaccaagctggagatcaaac

SEQ ID NO: 3324 - DNA, 337 bp, Homo sapiens
  source 1..337: mol_type = other DNA
gatgttgtgatgactcagtctccactctccctgcccgtcacccttggacagccggcctccatctcctgcaggtctagtcaaagcctcgtacacagtgatggagacacctacttgaattggtttcagcagaggccaggccaacctccaaggcgcctaatttataaggtttctaaccgggactctggggtccccgacagattcagcggcagtgggtcaggcactgatttcacactgaaaatcagcagggtggaggctgaggatgttggggtttattactgcatgcaaggtacacactggcctctcactttcggcggagggaccaaggtggagatcaaac

SEQ ID NO: 3325 - DNA, 325 bp, Homo sapiens
  source 1..325: mol_type = other DNA
tcctatgagctgacacagccaccctcggtgtcagtgtccccaggacaaacggccaggatcacctgctctggagatgcattgccaaaaaaatatgcttattggtaccagcagaagtcaggccaggcccctgtgctggtcatctatgaggacagcaaacgaccctccgggatccctgagagattctctggctccagctcagggacaatggccaccttgactatcagtggggcccaggtggaggatgaagctgactactactgttactcaacagacagcagtggtaatcatagggtgttcggcggagggaccaagctgaccgtcctag

SEQ ID NO: 3326 - DNA, 325 bp, Homo sapiens
  source 1..325: mol_type = other DNA
gaaattgtgttgacgcagtctccaggcaccctgtctttgtctccaggggagagagccaccctctcctgcagggccagtcagaatgttaacaacaactacttagcctggtaccagcagaaacctggcctggcgcccaggctcctcatctatgatgcatccagctgggccagtggcatcccagacaggttcagtggcagtgggtctgggacagacttcactctcaccatcagcagactggagcctgaagattttgcagtgtattactgtcagcagtctggtgcctcaccgtggacgttcggccaagggaccaaggtggaaatcaaac

SEQ ID NO: 3327 - DNA, 340 bp, Homo sapiens
  source 1..340: mol_type = other DNA
gacatcgtcatgacccagtctccagactccctggctgtgtctctgggcgagagggccaccatcaactgcaagtccagccagaatgttctatacgactccaacaaaaagaactacttagattggtaccagcagaaaccaggacagcctcctaagctgctcatttactgggcctctacccgggactccggggtccctgaccgattcagtggcagcgggtctgggacagatttcactctcaccatcagcagcctgcaggctgaagatgtggcagtctattactgtcggcagtattatggaactccgttcacttttggccaggggaccaaggtggagatcaaac

SEQ ID NO: 3328 - DNA, 331 bp, Homo sapiens
  source 1..331: mol_type = other DNA
cagtctgccctgactcagcctgcctccgtgtctgggtctcctggacagtcgatcaccatctcctgcactggaaccagcagtgacgttgttgattataactatgtctcctggtaccaacaacacccagacaaagcccccaaactcattatttatgatgtcaataatcggccctcaggggtttctaatcgcttctctgcctccaagtctgccaacacggcctccctgaccatctctggactccaggctgaggacgaggctgattactactgctcctcatatacaaccaacaacaactgggtgttcggcggagggaccaagctgaccgtcctag

SEQ ID NO: 3329 - DNA, 340 bp, Homo sapiens
  source 1..340: mol_type = other DNA
gacatcgggatgacccagtctccagactccctggctgtgtctctgggcgagagggccaccatcaactgcaagtccagccagactgttttatacaactccaacaataagaactacttagcttggtaccagcagaaaccaggacagcctcctaaactgctcatttactgggcatctacccgggaatccggggtccctgaccgattcagtggcagcgggtctgggacagatttcactctcaccatcagcagcctgcaggctgaagatgtggcagtttattactgtcagcagtattatggtactccttggacgttcggccaagggaccaaggtggaaatcaaac

SEQ ID NO: 3330 - DNA, 337 bp, Homo sapiens
  source 1..337: mol_type = other DNA
gaaattgtgatgactcagtcgccgctctccctgcccgtcacagttggagagtcggcctccatctcctgcaggtctagtcagagcctcctgcatagcaatggatacaactatttgaattggtacctgcagaagccaggacagtctccacaactcctgatctatttcgggtctaatggggcccccggggtccctgccaggttcagtggcagtggatcaggcacagattttacactgaaaatcaccagagtggaggctgaggatgttggggtttattactgcatgcaaggtacacactggcctctcactttcggcggagggaccaaggtggagatcaaac

SEQ ID NO: 3331 - DNA, 322 bp, Homo sapiens
  source 1..322: mol_type = other DNA
gacatccagatgacccagtctccatcctccctgtctgcatctgtaggagacagagtcaccatcacttgccaggcgagtcaggacattagcaactatttaaattggtatcagcagaaaccagggaaagcccctaagctcctgatctacgatgcatccaatttggaaacaggggtcccatcaaggttcagtggaagtggatctgggacagattttactttcaccatcagcagcctgcagcctgaagatattgcaacatattactgtcaacagtatgataatctccctcccactttcggccctgggaccaaagtggatatcaaac

SEQ ID NO: 3332 - DNA, 319 bp, Homo sapiens
  source 1..319: mol_type = other DNA
gaagttgtgttgacgcagtctccaggcaccctgtctttgtctccaggggaaggagccaccctctcctgcagggccagtcagagtgtttccagctccttagcctggtaccagcaaaaacctggcctggcgcccaggctcctcatctttggtgcatccaccagggccactggcatcccagacaggttcagcggcagtgggtctgggacagacttcactctcaggatcagcagactggagcctgaagattttgcagtgtattactgtcagcagtatggtagatcgctcagtttcggcggagggaccaaggtggagatcaaac

SEQ ID NO: 3333 - DNA, 337 bp, Homo sapiens
  source 1..337: mol_type = other DNA
gatattgtaatgactcagtctccactctccctgcccgtcacccctggagagccggcctccatctcctgcaggtctagtcagagcctcctgcatagtgatggatacatttatttggattggtacctgcagaggccagggcagtctccacagctcctgatctatgtgggttcaagtcgggcctccggggtccctgacaggttcagtgccagtggatcaggcacagattttacactgaaaatcagcagagtggaggctgacgatgttggggtttattactgcatgcagggaacacactggccgtggacgttcggccaagggaccaaggtggaaatcaaac

SEQ ID NO: 3334 - DNA, 337 bp, Homo sapiens
  source 1..337: mol_type = other DNA
gatattgtgatgactcagtctccactctccctgcccgtcatccctggagagtcggcctccatctcctgcaggtctagtcagagcctcctgcatagtaatggacacaagtatttggattggtacctgcagaagccagggcagtctccacagctcctgatctatgtggcttctagtcgggcctccggggtccctgacaggttcagtggcagtggaacaggcacagattttacactgaacatcagcagagtggaggctggggatgttggggtatattactgcatgcaagctctacaaattcctcggacgttcggccaagggaccaaggtggaaatcaaac

SEQ ID NO: 3335 - DNA, 331 bp, Homo sapiens
  source 1..331: mol_type = other DNA
cagtctgtgttgactcagccaccctcagcgtctgggacccccgggcagagggtcaccatctcttgttctggaagcagctccaacatcggaagtaacactgtgatctggttccagcagctcccaggaacggcccccaaagtcttcatccatactaataatcagcggccctcaggggtccctgaccgattctctggctccaagtctggcacctcagcctccctggccatcagtgggctccagtctgaggatgaggctgagtatttctgtgcagcatgggatgacaccctgaatggctggatgttcggcggagggaccaagctgaccgtcctag

SEQ ID NO: 3336 - DNA, 337 bp, Homo sapiens
  source 1..337: mol_type = other DNA
gaaattgtgatgactcagtctccactctccctgcccgtcacagttggagagccggcctccatctcctgcaggtctagtcagagcctcctgcatagtaatggatacaactatttgaattggtacgtgcagaagccaggacagtctcctcaactcctgatctatttcggttctaatggggccccaggggtccctgacaggttcagtggcagtggatcaggcacagattttacactgagaatcaccagagtggaggctgaggacgttggggtttactactgcatgcaaactctacaaactccattcactttcggccctgggaccaaagtggatatcaaac

SEQ ID NO: 3337 - DNA, 322 bp, Homo sapiens
  source 1..322: mol_type = other DNA
gacatccagatgacccagtctccttctaccctgtctgcatctgtaggagacagagtcaccatcacttgccgggccagtcagagtattagtgactggttggcctggtttcagcagaaaccagggaaagcccctaacctcctaatctctaaggcgtctaatttagaaactggggtcccatcaagattcagcggcagtggatctgggacagagttcactctcaccatcagcagcctgcagcctgatgattttgcaacttattactgtcaacattataacagttattcggcgacgttcggccaagggaccaaggtggaaatcaaac

SEQ ID NO: 3338 - DNA, 322 bp, Homo sapiens
  source 1..322: mol_type = other DNA
gacatccagatgacccagtctccatcctccctgtctgcatctgtaggagacagagtcaccatcacttgccgggcaagtcagagcattagcagcaatttaaattggtatcagcagaaaccagggaaagcccctaacctcctaatctctaaggcgtctaatttagaaactggggtcccatcaagattcagcggcagtggatctgggacagagttcactctcaccatcagcagcctgcagcctgatgattttgcaacttattactgtcaacattataacagttattcggcgacgttcggccaagggaccaaggtggaaatcaaac

SEQ ID NO: 3339 - DNA, 337 bp, Homo sapiens
  source 1..337: mol_type = other DNA
gatattgtgatgactcagtctccactctccctgtccgtcacccctggagaggcggcctccatctcctgcaggtctagtcggagcctcctgcatactaatggatacaactatttggcttggtacctgcagaagccagggcagtctccacaactcctgatctatttgggttctactcgggcctccggggtccctgacaggttcagtggcagtggatcaggcacagattttacactgagaatcagcagaatggaggctgaggatgttggggtctattactgcatgcaagctctacaaattcccaggacgttcggccacgggaccaaggtggaaatcaaac

SEQ ID NO: 3340 - DNA, 340 bp, Homo sapiens
  source 1..340: mol_type = other DNA
gacgtcgtgatgacccagtctcccgactccctggctgtgtctctgggcgagagggccaccatcaactgcaggtccagcctgagtgttttctacaactccaacaataagaactacttagcctggtaccaacaaaagccaggacagcctcctaaggtcgtcatgtactgggcatctacccgagaatccggggtccctgaccgattcagtggcagcgggtctgggacagatttcactctcaccatcagcagcctgcaggctgaagatgtggctgtttattactgtcaccagtactttgaaactccattcactttcggccctgggaccaaagtggaaatcaaac

SEQ ID NO: 3341 - DNA, 325 bp, Homo sapiens
  source 1..325: mol_type = other DNA
gaaatagtgatgacgcagtctccagccaccctgtctgtgtctccaggggaaagagccaccctctcctgcagggccagtcagagtgttagcagcaacttagcctggtaccagcagaaacctggccaggctcccaggctcctcatctatggtgcatccaccagggccactggtatcccagccaggttcagtggcagtgggtctgggacagagttcactctcaccatcagcagcctgcagtctgaagattttgcagtttattactgtcagcagtataataactggcctccgctcactttcggcggagggaccaaggtggagatcaaac

SEQ ID NO: 3342 - DNA, 340 bp, Homo sapiens
  source 1..340: mol_type = other DNA
gacatcgtgatgacccagtctcctgactccctggctgtgtctctgggcgagggggccaccatcaactgcaagtccagccagagtgttttatacagctccaacaataagaactacttaggttggtaccaacagaaaccaggacagcctcctaagctgctcatttactgggcatctacccgggaatccggggtccctgaccgattcagtggcagcgggtctgggacagatttcactctcaccatcagcagcctgcaggctgaagatgtggcagtttattactgtcagcagtattatagtactcctatcaccttcggccaagggacacgactggagattaaac

SEQ ID NO: 3343 - DNA, 325 bp, Homo sapiens
  source 1..325: mol_type = other DNA
gaaatagtgctgacgcagtctccggccaccctgtctgtgtctccaggggaaagagccaccctctcctgcaaggccagtcagagtgttagcaccaacttagcctggtaccagcaaaaacctggccaggttcccaggctcctcatctatggtgcatccaccagggccactggtatctcagccaggttcagtggcagtgggtctgggacagacttcactctcaccatcagcagcctgcagtctgaagattttgcagtttattactgtcaacagtataataactggtccgcgctcactttcggcggagggaccaaggtggagatcaaac

SEQ ID NO: 3344 - DNA, 331 bp, Homo sapiens
  source 1..331: mol_type = other DNA
cagtctgtgttgacgcagccgccctcagtgtctgcggccccaggacagaaggtcaccatctcctgctctggaagcagctccaacattgggaataattatgtctcctggtaccggcaattcccaggaacagcccccaaactcctcatctatgaaaatactaagcgaccctctgggattcctgaccgattctctggctccaagtctggcacgtcagccaccctgggcatcaccggactccagactggggacgaggccgattattactgcggaacatgggatagcagcctgaatactggggtgttcggcggagggaccaagctgaccgtcctag

SEQ ID NO: 3345 - DNA, 331 bp, Homo sapiens
  source 1..331: mol_type = other DNA
cagtctgccctgactcagcctcgctcagtgtccgagtctcctggacagtcagtcaccatctcctgcactggaaccagcagtaatgttggtcgttatgactatgtctcctggtaccaacagcacccaggcaaagcccccaaactcataatttataatgtcaataagtggccctcaggggtccctgatcgcttctctggctccaagtctggcaacacggcctccctgaccatctctgggctccaggctgaggatgaggctgattattactgctgctcatatgcaggcagctactcttttgtcttcggaactgggaccaaagtcaccgtcctag

SEQ ID NO: 3346 - DNA, 331 bp, Homo sapiens
  source 1..331: mol_type = other DNA
cagtctgtgctgactcagccaccctcagcgtctgggacccccgggcagagggtcaccatctcttgttctggaagcagctccaacattggacgtaattatgtctactggtactatcagctcccaggaacgacccccaaactcctcatttataggaataatcagtggccctcaggggtccctgaccgattctctggctccaagtctggcacctcagcctccctggccatcagtgggctccggtccgaggatgaggctgattattactgtgcagcatgggatgataccctgagtggttggttgttcggcggagggaccaagctgaccgtcctag

SEQ ID NO: 3347 - DNA, 322 bp, Homo sapiens
  source 1..322: mol_type = other DNA
gacatccagatgacccagtctccttccaccctgtctgcatctgtaagagacagagtcaccatcacttgccgggccagtcagagtattggtacctggttggcctggtatcagcagaaaccagggaaagcccctaaactcctgatctataaggcatctagtttagaaagtggggtcccgtcaaggttcagcggcagtgggtctgggacagaattcactctcaccatcagcagcctgcagcctgatgattttgcaacttactactgccaacattataatacttactcgtgcacctttggccaggggaccaagctggagatcaaac

SEQ ID NO: 3348 - DNA, 322 bp, Homo sapiens
  source 1..322: mol_type = other DNA
gacatccagatgacccagtctccaccctccctgtctgcatctctgggagacagagtcactatcacttgccgggcaagtcagagcatcagaacctttttaaattggtatcagcaaaaaccagggaaagcccctgagctcctgatctatgctgcgtccagtttgcatagaggggtcccgtcaaggttcagtggcagtggatctgggacagatttcactctcaccatcagcactctgctacctgaggattttgcaacttactactgtcagcagagttacgataccccgcagacttttggccaggggaccaaactggagatcaaac

SEQ ID NO: 3349 - DNA, 340 bp, Homo sapiens
  source 1..340: mol_type = other DNA
gacatcgtgatgacccagtctccagactccctggctgtgtctctgggcgagagggccaccatcaactgcaagtccagccagggtcttttatacaggtccaacactaaggactacttagcttggtatcagcagaaagcaggacagcctcctaaactgctcatttcctgggcatctacccgagaatccggggtccctgaccgattcagtggcagcgggtctgggacagatttcactctcaccatcagcagcctgcaggctgaagacgtggcagtttattactgtcaacaacattatactactcctccgacttttggccaggggaccaaagtggagatcaaac

SEQ ID NO: 3350 - DNA, 331 bp, Homo sapiens
  source 1..331: mol_type = other DNA
cagtctgccctgactcagcctgcctccgtgtctgggtctcctggacagtcgatcaccatctcctgcactggaaccagcagtgacgttggtggttataactatgtctcctggtaccaacagcacccagacaaagcccccgaactcatgatttatgatgtcagtaatcggccctcaggggtttctaatcgcttctctggctccaagtctggcaacacggcctccctgaccatctctgggctccaggctgaggacgaggctgattattactgcagctcatatacaagcagcagcactgtggtattcggcggagggaccaagctgaccgtcctag

SEQ ID NO: 3351 - DNA, 322 bp, Homo sapiens
  source 1..322: mol_type = other DNA
gacatccagatgacccagtctccatcctccctgtctgcatctgtaggagacagagtcaccatcacttgccgggcaagtcagaccattggcagcaatttaaattggtatcagcagaaagcaggaaaggcccctaaactcctgatctttgctacatccaatttacaaagtggagtcccgtcgagattcagtggcagtgggtctgcgacagagttcactctcaccatcagcagtctacaacctgaagatattgcgcgttactactgtcaacagacttacactaccccgctcactttcggcggagggaccctggtggggatcaaac

SEQ ID NO: 3352 - DNA, 322 bp, Homo sapiens
  source 1..322: mol_type = other DNA
gacatccagatgacccagtctccagcctccctgtctgcatctgtaggagacagagtcaccatcacttgccgggcaagccagagtattagcaactatttaaattggtatcaacagaaaccagggaaagcccctaaactcctgatctatattgtttccaatttgcaaagtggggtcccttcaaggttcagtggcagtggatctgggacagaattcactctcgccatcagtagtctgcaacctgacgatgttgcaagttactactgtcaacaaagttacaataccccgtacacgtttggccgggggaccaagcttgagatcaaac

SEQ ID NO: 3353 - DNA, 319 bp, Homo sapiens
  source 1..319: mol_type = other DNA
tcctatgagctgactcagccaccctcagtgtccgtgtccccaggacagacagccagcatcacctgctctggagataaattgggggataaatatgcttgctggtatcagcagaagccaggccagtcccctgtgctggtcatctatcaagatagcaagcggccctcagggatccctgagcgattctctggctccaactctgggaacacagccactctgaccatcagcgggacccaggctatggatgaggctgactattactgtcaggcgtgggacagcagcactgctgtattcggcggagggaccaagctgaccgtcctag

SEQ ID NO: 3354 - DNA, 322 bp, Homo sapiens
  source 1..322: mol_type = other DNA
gacatccagatgacccagtctccagtctccctggctgcgtctgtaggagacagagtcaccatcacttgccgggcgagtcagaatattaacaattatttaaattggtatcaacaaaaaccaggaaaagcccctaagctcctgatctatattgtttccaatttgcaaagtggggtcccatcaaggttcactggcagtggatctgggacagatttcactctcgccatcggtagtgtccaacctgaagattttgcaacttactactgtcaacagagttacactaccccgtacacttttggcctggggaccaagctggagatcaaac

SEQ ID NO: 3355 - DNA, 340 bp, Homo sapiens
  source 1..340: mol_type = other DNA
gacatcgtgatgacccagtctccagacttcttggctgtgtctctgggcgagagggccaccatcaactgcaggtccagccagagtattttatacagctccaattataagaactacttagcttggtaccagcagaaaccaggacagcctcctaagctgctcatttactgggcatttacccgggaatccggggtccctgagcgattcagtggcagcgggtctgggacagacttcagtctcaccatcagcagcctgcaggctgaagatgtggcagtttattactgtcagcaatattatagtagtccactcactttcggcggagggaccaaggtggagatcaaac

SEQ ID NO: 3356 - DNA, 322 bp, Homo sapiens
  source 1..322: mol_type = other DNA
gacatccagatgacccagtctccatcctccctgtctgcatctgtaggagacagagtcaccatcacttgccgggcaagtcagaggattagcggttatttaaactggtatcaacagagaccagggaaagcccctaagctcctcatctatgctgcatccaatttgcaaagtggcgtctcatcaaggttcagtggcagtcgatctgggacagatttcactctcaccatcattaatctgcaacctgaagattctgccacttactactgtcagcagagttacagtccccctctcactttcggcggggggaccagggtggagatcaaac

SEQ ID NO: 3357 - DNA, 322 bp, Homo sapiens
  source 1..322: mol_type = other DNA
gatacagtgatgacgcagtctctagccaccctggctgtgtctccaggggaaagagccaccctctcctgcagggccagtcagagtattcgatccaacttagcctggtaccaggtcctgcctggccaggctcccaggctcctcatctataatgcatccaccagggccacaggtattccacccaggttcagtggcagtgggtctgggacagaattcactctcaccatcaacagcctgcagtctgaagattttgcagtttattactgtcagcaatataatgattggcttctcactttcggcggagggaccaaggtggaaatcaaac

SEQ ID NO: 3358 - DNA, 325 bp, Homo sapiens
  source 1..325: mol_type = other DNA
gaaattgtgttgacgcagtctccaggcaccctgtctctgtctccaggggaaagaggcaccctctcctgcagggccagtcagagtgttaacagcaacaatttagcctggtaccagcagaaacatggccaggctcccaggctcctcatctatggtgcatccagtagggccactggcatcccagacaggttcagtggcagtgggtctgggacagacttcactctcaccatcagcagactggagcctgaagattttgcagtctattactgtcagcagtatggtagctcaccattcactttcggccctgggaccaacgtggatatcaaac

SEQ ID NO: 3359 - DNA, 331 bp, Homo sapiens
  source 1..331: mol_type = other DNA
cagtctgtgttgacgcagccgccctcagtgtctgcggccgcaggacagaaggtcagcatctcctgctctggaagcacctccaacattgggaacaattatgtttcctggtaccagcagttccccggaacagcccccaaactcctcatttttgacaatagtaagcgaccctcagggactcctgaccgattctctggctccaagtctggcacgtcagccaccctggacatcaccggactccagacaggggacgaggccgagtattactgcggaacatgggatagcagactgagtgctggggtgttcggcggagggaccaaactgaccgtcgtag

SEQ ID NO: 3360 - DNA, 322 bp, Homo sapiens
  source 1..322: mol_type = other DNA
gacatccagatgacccagtctccttccaccctgtctgcatctgtaggagacagagtcaccatcacttgccgggccagtcagattattaataggtggttggcctggtatcagcagcaaccagggaaagcccctagggtcctgatctataaggcgtctattttagaaagtggggtcccatcaaggttcagcggcagtggatctgggacagaattcactctcaccatcagcagcctggagaccgacgattttgcaacttactactgccaacagtatagtagttacccgatcaccttcggccaagggacacgactagacattaaac

SEQ ID NO: 3361 - DNA, 322 bp, Homo sapiens
  source 1..322: mol_type = other DNA
gacatccagatgacccagtctccatcttccgtgtctgcatctgtaggagacagagtcaccatcacttgtcgggcgagtcagggtattaacagctggttagcctggtatcagcagaaaccagggaaagcccctaagctcctgatctatcctacatccactttgcaaagtggggtcccatcaaggttcagcggcagtggatctgggacagatttcactctcaccatcagcagcctgcagcctgaagattttgcaacttactattgtcaacaggctaacagtttcccctggacgttcggccaagggaccaaggtggaaatcaaac

SEQ ID NO: 3362 - DNA, 331 bp, Homo sapiens
  source 1..331: mol_type = other DNA
cagtctgtgctgactcagccaccctcggtgtctgaagcccccaggcagagggtcaccatctcctgttctggaagcagctccaacatcggaaataatgctgtaaactggtaccagcagctcccaggaaaggctcccaaactcctcatctattatgatgatctgctgccctcaggggtctctgaccgattctctggctcccagtctggcacctcagcctccctggccatcagtgggctccagtctgaggatgaggctgattattactgtgcagcatgggatgacagcctgaatggttatgtcttcggaactgggaccaaggtcaccgtcctag

SEQ ID NO: 3363 - DNA, 333 bp, Homo sapiens
  source 1..333: mol_type = other DNA
cagcctgtattgactcaatcgccctctgcctctgcctccctgggagcctcggtcaaactcacctgcactctgaacagtgggcacagcgactacgtcatcgcctggcatcagcagcagccagagaagggccctcgatacttgatgaagcttaatcctgatggcagccacgacaagggggacgggattcctgatcgcttctcaggctccagctctggggctgagcgctacctcaccatctccaacctccagtctgaagatgaggctgattattactgtcagacctggggcactggcatttgggtgttcggcggagggaccaaggtgaccgtccta

SEQ ID NO: 3364 - DNA, 334 bp, Homo sapiens
  source 1..334: mol_type = other DNA
cagcctgtactgactcaatcgccctctgcctctgcctccctgggagcctcggtcaaactcacctgcactctgaacagtgggcacagagactacgtcatcgcatggcatcagcaccagccagagaagggccctcgatacttgatgaagcttaatcctgatggcagccacgacaagggggacgggattcctgatcgcttctcaggctccagctctggggctgagcgctacctcaccatctccaacctccagtctgaggatgaggctgattattactgtcagacctggggcactggcatttgggtgttcggcggagggaccaagctgaccgtcctag

SEQ ID NO: 3365 - DNA, 337 bp, Homo sapiens
  source 1..337: mol_type = other DNA
gatgttgtgatgactcagtctccactctccctgcccgtcacccttggacagccggcctccatctcctgcaggtctggtcaaagcctcgcatacattgatggaaacacctacttgaattggtttcaacagaggccaggcctatctccaaggcgcctaatttataaggtttctaaccgggactctggggtcccagacagattcagcggcagtgggtcaggcactgatttcacactgaaaatcagcagggtggaggctgaggatgttggggtttattactgcatgcaaggtacacactggcgggttacgttcggccaagggaccaaggtggaaatcaaac

SEQ ID NO: 3366 - DNA, 322 bp, Homo sapiens
  source 1..322: mol_type = other DNA
gacatccagctgacccagtctccatcttccctgtctgtatctgtaggagacagagtaaccatcacttgccgggcaagtcagagcattggcaactttctaaattggtatcagcagaaaccagggaaagcccctaaactcttgatctttgctgcatccagtttgcaaggtggggtcccatcaaggttcagtgggagtggatctgggacagatttcgctctcaccatcagcagtctgcaacctgaagattttgcaacttactactgtcaacagagttacaatacccctcagacgttcggccaggggaccaaggtggaaatcaaac

SEQ ID NO: 3367 - DNA, 329 bp, Homo sapiens
  source 1..329: mol_type = other DNA
cagtctgtactgactcagccaccctcagcgtctgggacccccgggcagagggtcagcatctcttgttctggaagcagctccaacatcggaactagtactgtccactggttccagcagctcccaggaacggcccccaaagtcctcatctctactaatgatcagcggccctcaggggtccctgaccgattctctggctccaagtctggcacctcagcctccctggccatcagtgggctccagtctgaggatgcggctgattattactgtgcagtatgggatgacagtctgaatggttgggcgttcggcggagggaccaagctgaccgtcct

SEQ ID NO: 3368 - DNA, 321 bp, Homo sapiens
  source 1..321: mol_type = other DNA
gacatccagatgacgcagtctccatcctccctggctgcatctgttggagacagggtcactatcacttgccgggcaagtcagggcattagcaactacttgcattggtatcagcagaaaccagggaatgcccctaaactcctgatctatattgtgtccaatctgcaaagtggggtcccatcaaggttcagtggcagtggatctgggacagatttcactctcaccatcaccaatctccaacctgaagattttgcaacttacttctgtcaacagagttacaataccccgtacacttttgcccaggggacaaagctggagatcaaa

SEQ ID NO: 3369 - DNA, 332 bp, Homo sapiens
  source 1..332: mol_type = other DNA
cagtctgtcttgagtcagccaccctcagcgtctgagacccccgggcagagggtcaccatctcttgttctggaagcgactccaacatcggaagtaattatgtatactggtaccaacacgtcccaggagtggcccccaaactcctcatctataggaatcatcagcgaccctcaggggtccctgaccgattcgttggcttcaagtctggcgcctcagcctccctggccatcagtggactgcgggccgaggatgaggctgattattactgtgcgtcatgggatgacagcctgggtggtttttatgtcttcggaactgggaccaaggtcaccgtcct

SEQ ID NO: 3370 - DNA, 340 bp, Homo sapiens
  source 1..340: mol_type = other DNA
gacatcgtgatgacccagtctccagactccctggctgtgtctctgggcgagagggccaccatcaactgcaagtccagccagagtgttttatacagctccgacaataacaactacttcgcttggtaccagcagaaaccaggacagcctcctaagctgctcatttactgggcatctacccgggaatccggggtccctgaccgattcagtggcagcgggtctgggacagatttcactctcaccatcagcagcctgcaggctgaagatgtggcagtttattactgtcagcaatattatagtagtccgctcactttcggcggagggaccaaggtggagatcaaac

SEQ ID NO: 3371 - DNA, 337 bp, Homo sapiens
  source 1..337: mol_type = other DNA
gacttcgtgatgacccagtctccagactccctggctgtgcctctgggcgagagggccaccatcaactgcaagtccagccagagtgttttatatgactccaacaataagaactacttagcttggtaccaacagaaaccagggcagcctcctaacctgctcgtttactgggcatctacccgggaatccggggtccctgaccgattcagtggcagcgggtctgggacagatttcactctcaccatcagcagcctgcaggctgaagatgtggcaatttattactgtcagcaatattacagtattccgctcactttcggcggagggaccaaggtggagatca

SEQ ID NO: 3372 - DNA, 325 bp, Homo sapiens
  source 1..325: mol_type = other DNA
gagattgtgttgacacagtctccacccaccctatctttgtctccaggggaaagagccaccctctcctgcagggccagtcaaagtattagcaactccttagcctggtaccagcagaaacctggccaggctccgaggctcctcatctatgatgcatccaacagggccactggcatcccagccagattcagtggcagtgggtttgggacagatttcactctcaccatcagcagcctagagcctgaagattgtgcagtttattactgtcaacagcggaacaactggcctccgctcactttcggcggagggaccaaggtagagatcaaac

SEQ ID NO: 3373 - DNA, 322 bp, Homo sapiens
  source 1..322: mol_type = other DNA
gacatccagatgacccagtctccatcctccctgtctgcatctgtcggcgacagagtcaccatcacttgccgggcaagtcagagtattagcacctatgtgagttggtatcagcagaaaccagggcaagcccctaagctcctgatttatgctgcatccaatttgcaaagtagggtcccatcaaggttcagtggcagtagatctgggacagatttcactctcaccatcagcagtctgcaacctgaagatttagcaacttactactgtcaacagagttacactaccccgtggacgttcggccaggggaccaaggtggagatcaaac

SEQ ID NO: 3374 - DNA, 322 bp, Homo sapiens
  source 1..322: mol_type = other DNA
gacatccaactgacccagtctccatcctccctgtctgcatctgtgggagacagagtcaccatcacttgccgggcaagtcagaccataagcacctatttaaattggtatcagcaaaaaccaggaaaagcccctaaggtcgtgatctttgctgcatccagtttgaaaagtggggtcccatcaaggttcagtggcagtagatctgggacagatttcactctcaccatcaacagtctgcaacctgaagattctgcaacttactactgtcaacagaattacaagacccctcggacgttcggccaagggaccaaggtggaggtcaaac

SEQ ID NO: 3375 - DNA, 322 bp, Homo sapiens
  source 1..322: mol_type = other DNA
gacatccaggtgacccagtctccatcctccctgtctgcatctgtaggagacagagtcaccatcacttgccgggcaagtcagtacattagcagctatttaaattggtatcaacaaaaaccagggaaagcccctaacctcctgatcaatgttgcatccactttgcacactggggtcccatcaaggttcagtggcagtggctctgggacagacttcactctcaccatcaacagtctgcaacctgaagattttgcaacttactactgtcaacagacttacagttcccctccgacgttcggccaagggaccaaggtggaaatcaaac

SEQ ID NO: 3376 - DNA, 322 bp, Homo sapiens
  source 1..322: mol_type = other DNA
tcctatgagttgactcagccaccctcagtgtccgtgtccccaggacagacagtcagcatcacctgctctggagatgaattgggacataaatatgcttcatggtatcagcagaagccaggccagtcccctgtgttggtcatctatcaagatatcaagcggccctcagggatccctgagcgattctctggctccaactctgggaacacagccactctgaccatcagcgggacccaggctacggatgaggctgactattactgccaggcgtgggacagaaacactgaggtggttttcggcggagggaccaagttgaccgtcctag

SEQ ID NO: 3377 - DNA, 322 bp, Homo sapiens
  source 1..322: mol_type = other DNA
gacatccagatgacccagtctccatcctccctgtctgcatctgtaggagacagagtcaccatcacttgccgggcaagtcagaccattggcagaaatttaaattggtatcaacagacaccaggaaaggcccctaaactcgtgatctatgctacatccaatttacaaagtggggtcccgtcgagattcagtggcagtgggtctgcgacagagttcactctcaccatcagcagtctgcaacctgaagatgttgcgcgttactactgtcaacagacttacactaccccgctcactttcggcggagggaccatggtggggatcaaac

SEQ ID NO: 3378 - DNA, 319 bp, Homo sapiens
  source 1..319: mol_type = other DNA
gacatccagatgacccagtctccatccaccctgtctgcatctgtaggagacagagtcaccatcacttgccgggccagtcagagtattactaggcggttggcctggtatcagaagaagccagggaaaccccctaagctcctgatatatgaggcttctactttagaaaatggggtcccctcaaggttcagcggcactggatctgggacagaattcactctcaccatcagcagcctgcagcctgatgatcttgcgacttatttctgccaacagtataattctctttccactttcggccctgggaccaaggtagatgtcaaac

SEQ ID NO: 3379 - DNA, 333 bp, Homo sapiens
  source 1..333: mol_type = other DNA
caggttgtgctgactcaatcgccctctgcctctgcctccctgggcgcctcggtcaagctcacctgcactctgagcagagggcacagcagctacgccatcgcttggcatcaacagcagccagagaagggccctcggtacttgatgaaggttaacagtgacggcagccacatcaagggggacggggtccctgatcgcttctcaggctccagctctggggctgagcgctacctcaccatctccagcctccagtctgaggatgaggctgactattactgtcagacctggggcactggcattgtggtcttcggcggagggaccaagctgaccgtccta

SEQ ID NO: 3380 - DNA, 340 bp, Homo sapiens
  source 1..340: mol_type = other DNA
gacatcgtgatgacccagtctccagactccctggctgtgtctctgggcgagagggccaccatcaactgcaagtccagccagagtgttttgtacaactccgacaataagaactacttagcttggtaccagcagaaaccaggacagcctcctaagttgctcatttactgggcatctacccgggaatccggggtccctgaccgattcagtggcagcgggtctgggacagatttcactctcaccatcagcagcctgcaggctgaagatgtggcagtttattactgtcaccaatattatagtagtccgctctctttcggcggagggaccaaggtggagatcaaac

SEQ ID NO: 3381 - DNA, 325 bp, Homo sapiens
  source 1..325: mol_type = other DNA
tcctatgtgctgactcagccaccctcggtgtcagtggccccaggacagacggccaggattacctgtgggggaaacaacattggaactaaaattgtgcactggtaccagcagaagccaggccaggcccctgtgctggtcgtctatgatgatagcgaccggccctcagggatccctgagcgattctctggctccaactctgggaacccggccaccctgaccatcagcagggtcgaagccggggatgaggccgactattactgtcaggtgtgggatagtagtagtgatcattgggtgttcggcggagggaccaagctgaccgtcctag

SEQ ID NO: 3382 - DNA, 322 bp, Homo sapiens
  source 1..322: mol_type = other DNA
gacatccagatgacccagtctccctcctccctgtctgcatctgtaggagacagagtcaccatcacttgccgggcaagtcagagaataagcagctatttgaattggtatcagcagaagccagggaaagcccctaaactcctgatctatgctgcatccagtttgcaaagtggggtcccatcaagattcagtggcagtagatctgggacagatttcactctcaccatcagcagtctgcaacctgaagattttgcaacttactactgtcaacagagctacagtaaattgtggacgttcggccaagggaccagggtggaaatcaaac

SEQ ID NO: 3383 - DNA, 337 bp, Homo sapiens
  source 1..337: mol_type = other DNA
gatgttgtgatgactcagtctccactctccctgcccgtcacccttggacagtcggcctccttctcctgcaggtctagtcaaagcctcgtttacagtgatggagacaccttcttgaattggtttcaccagaggccaggccaatctccaaggcgcctaatttataaggtctctgtccgcgactctggggtcccagacagattcagcggcagtgggtcaggcactgatttcacactgaaaatcagcagggtggaggctgaggatgttggggtttattactgcatgcaaggtacacactggccattcactttcggccctgggaccaaagtggatatcaaac

SEQ ID NO: 3384 - DNA, 325 bp, Homo sapiens
  source 1..325: mol_type = other DNA
gaaatagtgatgacgcagtctccagccaccctgtctgtgtctccaggggaaagagccaccctctcctgcagggccagtcagagtgttagcagcaacttagcctggtaccagcagaaacctggccaggctcccaggctcctcatctatggtgcatccaccagggccactggtatcccagccaggttcagtggcagtgggtctgggacagagttcactctcaccatcagcagcctgcagtctgaagattttgcagtttattactgtcagcagtataataactggcctccaatcaccttcggccaagggacacgactggagattaaac

SEQ ID NO: 3385 - DNA, 331 bp, Homo sapiens
  source 1..331: mol_type = other DNA
caggcagggctgactcagccaccctcggtgtcctacgtcttgagacagaccgccacactcacctgcactgggagcggcaacaatgttggctaccaaggagcagcttggctgcagcagcaccagggccaccctcccaaacttctatcctacaggaataacagccggccctcagggatctcagaaagattctctgcatccaggtcaggaaacacagcctccctgaccattgatggactccagcctgaggacgaggctgactattactgctcagcatgggacaccagcctcaatatttatgtcttcggaattgggaccagggtctccgtcctag

SEQ ID NO: 3386 - DNA, 325 bp, Homo sapiens
  source 1..325: mol_type = other DNA
gacatccagatgacccagtctccatcctccctgtctgcatctgttggagacagagtcaccatcacttgccgggcgagtcagggcattagcaattctttagtctggtatcagcagaaaccagggaaagcccctaagctcctgctctctgctgcatccagcttggaaagtggggtcccatccaggttcagtggcagtggatctgggacggattacactctcaccatcagcaacctgcagcctgaagattttgcaacttattactgtcaacagtattataatacccccccgagcacttttggccaggggaccaagctggagatcaaac

SEQ ID NO: 3387 - DNA, 340 bp, Homo sapiens
  source 1..340: mol_type = other DNA
gacatcgtgatgacccagtctccagactccctggctgtgtctctgggcgagagggccaccatcaactgcaagtccagccagagttttttatacagttccaacaataagaaccacttagcttggtaccagcagaaatcaggacagcctcctaagctgctcatttactgggcatctacccgggaatccggggtccctgaccgattcagtggcagcgggtctgggacagatttcactctcaccatcagcagcctgcaggctgaagatgtggcagtttattactgtcagcaatattatagtactccctggacgttcggccaagggaccaaggtggaaatcaaac

SEQ ID NO: 3388 - DNA, 325 bp, Homo sapiens
  source 1..325: mol_type = other DNA
gaaatagtgatgacgcagtctccagccaccctgtctgtgtctccaggggaaagaaccaccctctcgtgcagggccagtcagaatgttggcagcaacatagcctggtaccagcagaaacctggccaggctcccaggctcctcatctatggtgcatccaccagggccagtggcatcccagccaggatcagtggcagtgggtctgggacagagttcactctcaccatcagcagcctgcagtctgaagattttgctgtttattactgtcagcagtatcttaactggcctccgatcaccttcggccaagggactcggctggagattaaac

SEQ ID NO: 3389 - DNA, 319 bp, Homo sapiens
  source 1..319: mol_type = other DNA
gaaatagtgatgacgcagtttccaggcaccctgtctgtgtctccaggggaaagagccaccctctcctgcagggccagtgagagtattagtaacaacttagcctggtaccagcagaaacctggccaggctcccaggctcctcatctatggtacatccaccagggccacaggtatcccagccaggttcagtggcagtgggtctgggacacagttcactctcacaatcagtagcatgcagtctgaagattttgcagtctattactgtcagcagtataataactggccgacgttcggcctagggaccaaggtggaaagcaaac

SEQ ID NO: 3390 - DNA, 323 bp, Homo sapiens
  source 1..323: mol_type = other DNA
tcctatgtactgactcagccaccctcggtgtcagtggccccaggaaagacggccaggattacctgtgggggaaatgatgttacgagtaaaagtgtgcactggtaccagcagaagccaggccaggcccctgttttggtcctctacgataatagcgaccggccctcagggatccctgagcgattctctggctccaactctgggaacacggccaccctgaccatcagcagggtcgaagccggggatgaggccgattattactgtcaggtgtgggataagagtagtgatcactgggtgttcggcggagggaccaagctgaccgtcct

SEQ ID NO: 3391 - DNA, 325 bp, Homo sapiens
  source 1..325: mol_type = other DNA
gaaatcgtgatgacgcagtctccagccaccctgtctgtgtctccaggggaaagagccaccctctcctgcagggccagtcagactattgggaccagcttagcctggtaccagcagaaacctggccgggctcccaggctcctcatttctggtgcatccaccagggccactggtgtcccagccagattcagtggcagtgggtctgggacagagttcactctcaccatcagcagcatgcagtctgaagattttgcagtttattattgtcagcaatatagtaattggcctcccatcaccttcggccaagggacgcgactggaaattaaac

SEQ ID NO: 3392 - DNA, 334 bp, Homo sapiens
  source 1..334: mol_type = other DNA
cagtctgccctgactcagcctgcctccgtgtctgggtctcctggacagtcgatcaccatctactgcactggaaccagcagtgacgttggtggttataactatgtctcctggtaccgacaacacccaggcaaagccccccaactcatgatctatgatgtcagttatcggccctcaggggtttctaatcgcttctctggctccaggtctggcaacacggcctccctgaccatctctgggctccaggctgaggacgaggctgattattactgcagctcatatacaagcagcagcagtctcgggatattcggcggagggaccaagctgaccgtcctag

SEQ ID NO: 3393 - DNA, 328 bp, Homo sapiens
  source 1..328: mol_type = other DNA
cagtctgcactgacccaggaagcctcggtgtcagggaccgtgggacagaaggtcaccctctcctgtattgggaacagcaacaacatcggaaaatatgctgtgggctggtaccaacagatttctcacggtgttcccaaaactgtgatgtttggaaattctctgccctcaggaatccctgaccgcttctctggctcaaagtctgggaccacagcctccctgactatctcgggcctccagcctgaggacgaggctgattattactgttcaacatgggacttcagtctcagtgtttgggtgttcggcggagggaccaaggtgaccgtcctag

SEQ ID NO: 3394 - DNA, 325 bp, Homo sapiens
  source 1..325: mol_type = other DNA
tcctatgtactgactcagccaccctcggtgtcagtggccccaggaaagacggccaggattacctgtgggggaaatgatgttgggagtaaaagtgtgcactggtaccagcagaagccaggccaggcccctgttttggtcctctacgataatagcgaccggccctcagggatccctgagcgattctctggctccaactctgggaacacggccaccctgaccatcagcagggtcgaagccggggatgaggccgattattactgtcaggtgtgggataagagtagtgatcactgggtgttcggcggagggaccaagctgaccgtcctag

SEQ ID NO: 3395 - DNA, 337 bp, Homo sapiens
  source 1..337: mol_type = other DNA
gatattgtgatgacccagagtcccctctctctgtccgtcacccctggacagccggcctccatctcctgcaagtctagtcagagcctcctgcatagtgatggaaagacctatttgttttggtatctgcacaagccaggccagcctccacagctcctgatctatgaagtttccaaccgattctctggagtgtcagataggttcagtggcagcgggtcagggacagatttcacactgaaaatcagccgggtggaggctgaggatcttggggtttattactgcatgcaaagtatacatcttcccatcaccttcggccaagggacacgcctggagattaaac

SEQ ID NO: 3396 - DNA, 322 bp, Homo sapiens
  source 1..322: mol_type = other DNA
gacatccagatgacccagtctccatcctccctgtctgcatctgtaggagacagagtcaccatcacttgccgggcaagtcagagcattagcagcaatttaaattggtatcagctgaaaccagggaaagcccctaagttcctggtctatgctgcatccaatttgcaaagtggggtcccatctagattcagtggcagtggatctgggacagatttcactctcaccatcagcaatctgcaacctgaagattttgcaacttactactgtcaacagagttacagtacccccaggacgttcggccaagggaccaaggtggaaatcaaac

SEQ ID NO: 3397 - DNA, 323 bp, Homo sapiens
  source 1..323: mol_type = other DNA
catccagatgacccagtctccctccaccctgtctgcatctgtaggagacagagtcaccatcacttgccgggccagtcagagtattaatagctggttggcctggtatcagcagaaaccagggaaggcccctaagctcctgatccatcaggcgtctagtttagaaagtggggtcccatcaaggttcagcggcagtggatctgggacagaattcactctcaccatcagcagcctgcagcctgatgattttgcaacttattactgccaacagtataatagttatgcttcgtacacttttggccaggggaccaaactggagatgaaac

SEQ ID NO: 3398 - DNA, 340 bp, Homo sapiens
  source 1..340: mol_type = other DNA
gacatcgtgatgacccagtctccagactccctcgctgtgtctctgggcgagaggatcaccatcaactgcaggtccagccagagtgttttctacaactccaacaaaaagaactacttagcttggtatcagcagaaaccagggcagcctcctaaactgctcatttcctgggcatctgcccgggaatccggggtccctgagcgattcagtggcagcgggtctgggacagatttcactctcaccatcgcctgcctgcaggctgaagatgcggcagtctattattgtcagcaatattatagtgatcctcccgatttcggccctgggaccaaggtggaaatcaaac

SEQ ID NO: 3399 - DNA, 345 bp, Homo sapiens
  source 1..345: mol_type = other DNA
cagtctgtggtgactcagccggcttccctctctgcatctcctggaacatcagccagtctcacctgcaccttgcacagtggcatcaatgttggttcctacaggatatactggtatcagcagaagtcagggagtcctccccagtttctcttgaggtaccgatcggactcagataagcagcggggctctggagtccccagccgcttctctggattcaaagatgtttcggccaatgtagggattttactcatctctgggctccagtctgaggatgaggctgactattactgtatgatttggcatagcgacgcttgggtgttcggcggagggaccaaactgaccgtccta

SEQ ID NO: 3400 - DNA, 337 bp, Homo sapiens
  source 1..337: mol_type = other DNA
cagtctgcgctgacccaggaagcctcggtgtcaggggccgtgggacagaaggtcaccctctcctgtgcgggaagcagcaacaacgttggaacttttgctgtgggctggtaccaacagatttctcacggtgttcccaaaactgtgatgcttggaaattttgtgccctctctgccctcagggatccctgaccgcttctctggctcaaagtctgggaccacagcctccctgactatctcgggcctccagcccgaggacgaggctgattattactgttcaacatgggactccagcctcagttctcaggtgttcggcggagggaccaagctgaccgtcctag

SEQ ID NO: 3401 - DNA, 337 bp, Homo sapiens
  source 1..337: mol_type = other DNA
gatattgtgatgacccagactccactctctctgtccgtcacccctggacagccggcctccatctcctgcaagtctagtcagagcctcctgcatagtgatggaaagacgtatttgtattggtacctgcagaagtcaggccagcctccacagctcctgatctatgaagtttccaaccggttctctggagtgccagataggttcagtggcagcgggtcagggacagatttcacactgaaaatcagccgggtggaggctgaggatgttggggtttattactgcatgcaaaattttcagcttcccgtaacgttcggccaagggaccaaggtggaaatcaaac

SEQ ID NO: 3402 - DNA, 322 bp, Homo sapiens
  source 1..322: mol_type = other DNA
gacgtccagatgacccagtctccatcctccctgtctgcatctgtcggagacagagtcaccatcacttgccaggcgagtcaggacattagtaactatttaaattggtatcaacaaaaaccagggaaagcccctaagctcctgatctacgatgcatccaatttggaaacaggggtcccatcaagcttcagtggaagtggatctgggacacattttactttcaccatcaccagcctgcagcctgaagatattgcaacctattactgtcaacagtatgataatctccctcccaccttcggccaagggacacgactggagataaaac

SEQ ID NO: 3403 - DNA, 329 bp, Homo sapiens
  source 1..329: mol_type = other DNA
cagtctgtggtgactcagacaccctcagcgtctgggacccccgggcagagggtcaccatctcttgttctggaagcagctccaacatcggaagtaatactgtaaactggtaccagcagctcccaggaacggcccccaaactcctcatctatagtaatcatcagcggccctcaggggtccctgaccgattctctggctccaagtctggcacctcagcctccctggccgtcagtgggctccagtctgaggatgaggctgattattactgtgtagcatgggatgacagcctgaaggcttgggtgttcggcggagggaccaagctgaccgtcct

SEQ ID NO: 3404 - DNA, 328 bp, Homo sapiens
  source 1..328: mol_type = other DNA
tcctatgacctgacacagccaccctcggtgtcagtgtccccaggacagacggccaggatcacctgctctggagatgcattgccaaagcaatttgcttattggtaccagcagaagccaggccaggcccctgtgttggtgatatataaagacagtgagaggccctcagggatccctgagcgattctctggctccagctcagggacaacagtcacattgaccatcagtggagtccaggcagaagacgaggctgactattactgtcaatcagcagacagcagtgcgacttatgcttgggtgttcggcggagggaccaagctgaccgtcctag

SEQ ID NO: 3405 - DNA, 319 bp, Homo sapiens
  source 1..319: mol_type = other DNA
gacatccaaatgacccagtctccatcctccctgtctgcctctgttggagacagagtcaccctcacttgccgggcaagtcagaacattagaacctctttaaattggtaccagcaaaaaccagggagagccccttccttcttgatctatgctgcagtcaatctacagagtggggtcccgtccaggttcagtggcagtggatctgggacagattttactctcaccatcagcagtctgcaacccgaggatttcgctacttactactgtcaacagactcagtctctcccgctcactttcggcggggggaccaaggtggaaatca

SEQ ID NO: 3406 - DNA, 340 bp, Homo sapiens
  source 1..340: mol_type = other DNA
gacatcgtgttgacccagtctccagacttcctggctgtgtctctgggcgagagggccaccatcaactgcaagtccagccagagtgttttgtacaactccaataaaaagaactacttggcttggtaccagcaaaaaccaggccagcctcctaaattgctcatttcctgggcctcttcccgggaatccggtgtccctgaccggttcagtggcagcgggtctgggacagacttcactctcaccatcagcagcctgcaggctgaagatgtggcagtttattactgtcagcagtactatgatgctgctttcactttcggccctgggaccaaagtggaaatcaaac

SEQ ID NO: 3407 - DNA, 332 bp, Homo sapiens
  source 1..332: mol_type = other DNA
cagtctgtgctgattcagccacccgcagcgtctgggacccccgggcagagggtcaccatctcttgttctggaagcagctccaacatcggaaacaatcctgtaaactggtaccaacagctcccaggagcggcccccaaactcctcatatatggaaataataatcagcggccctcaggggtccctgaccgattctctggctccaagtctggcacctctgcctccctggccatcagcgggctccagtctgaggatgaggctgattattactgtgtagcatgggatgacagcctgagaatttgggtgttcggcggagggaccaagctgaccgtcct

SEQ ID NO: 3408 - DNA, 322 bp, Homo sapiens
  source 1..322: mol_type = other DNA
gacatccagatgacccagtctccttccaccctgtctgcatctgtaggagacagagtcaccatcacttgccaggccagtcagagtattagttcctggttggcctggtatcagcagaaagcagggaaagcccctaagctcctgatctataaggcgtctagtttagaaagtggggtcccatcaaggttcagcggcagtggatctgggacagatttcactctcaccatcagcagcctgcagcctgatgatgtcgcaacttattactgccaacactataatagttattcggggacgttcggccaggggaccaaggtggaaatcaaac

SEQ ID NO: 3409 - DNA, 325 bp, Homo sapiens
  source 1..325: mol_type = other DNA
gaaattgtgttgacgcagtctccaggcaccctgtctttgtctccaggggacagagccaccctctcctgtagggccagtcaaaatctgagcagcggctacgtagcctggtaccagcagaaatctggccaggctcccaggctcctcatctatgctgcatccagcagggccactggcatcccagacaggtttagtggcagtgggtctgggacagacttcaccctcaccatcagcagactggagcctgaggattttgcagtgtattactgtcagcaatatggtagctcacctcgggccttcggccaagggacacgactggagattaaac

SEQ ID NO: 3410 - DNA, 331 bp, Homo sapiens
  source 1..331: mol_type = other DNA
cagtctgtgttgacgcagccgccctcagtgtctgcggccccaggacagaaggtcaccatctcctgctctggaagcagctccaacattgggaagaattatgtatcctggtaccagcacctcccaggaacaccccccaaactcctcatctatgaaaataataagcgaccctcaggaattcctgaccgattctctggctccaagtctggcacatcagccaccctggccatcaccggactccagactggggacgaggccgattattactgcggaacatgggataccagcccgaattctgggctattcggcggaggcaccaagctgaccgtcctag

SEQ ID NO: 3411 - DNA, 321 bp, Homo sapiens
  source 1..321: mol_type = other DNA
gacatccagttgacccagtctccacccttcctgtctgcatctgtaggagacagcgtcaccatcacttgccgggccagtcaggacattgacgattatttagcctggtatcaagaaaaaccagggaaagcccctaacctcctcatctatggtgcatccattttgcaaagtggggtcccatcaaggttcagcggcagtggatctggggcagagttcactctcacaatcaccagcctgcagcctgaagattttgcaacttattcctgtcaacaccttaaaagttaccccctcagcttcggccaagggacacgactggagattaaa

SEQ ID NO: 3412 - DNA, 322 bp, Homo sapiens
  source 1..322: mol_type = other DNA
gacatccagttgacccagtctccatccttcctgtctgcatctgtaggagacagagtcaccatcacttgccgggccagtcagggcattagcagttttttagcctggtatcagcaaaaaccagggaaagcccctaagctcctgatctatgctgcatccactttgcaaaatggagtcccatcaaggttcagcggcggtggatctgggacacaattcactctcacaatcagcagcctgcagcctgaagactttggaacttattactgtcaacagcttcaagcttaccccatcaccttcggccaagggacacgactggagattaaac

SEQ ID NO: 3413 - DNA, 331 bp, Homo sapiens
  source 1..331: mol_type = other DNA
cagtctgccctgactcagcctccctccgcgtccgggtctcctggacagtcagtcaccatctcctgcactggaaccagcagtgacgttggtgattataactatgtctcctggtaccaacagcacccaggcaaggcccccaaactcatgatttatgaggtcactaagcggccctcaggggtccctgatcgcttctctggctccaagtctggcaacacggcctccctgaccgtctctgggctccaggctgaggatgaggctgattattactgcagctcatatagaggcggcaactccgtggtattcggcggagggaccaagctgaccgtcctag

SEQ ID NO: 3414 - DNA, 337 bp, Homo sapiens
  source 1..337: mol_type = other DNA
gatgctgtgatgactcagtctccgctctcccagtccgtcacacttggacagccggcctccatctcctgcaggtctagtcatggcctcgtttacaaggatggaaacacctacttgcattggtttcaccagaggccaggccaatctccaaggcgcctaatttatgaggtttctaaattggactctggggtccctgacagattcagcggcagtgggtcagacactgagttcacactgaaaatcagcagggtggaggctgaggatgttggcatttattactgcatgcaaggtacacactggccgtacacttttggccaggggaccaacctggaaatcaaac

SEQ ID NO: 3415 - DNA, 334 bp, Homo sapiens
  source 1..334: mol_type = other DNA
cagtctgccctgactcagcctccctccgcgtccgggtctcctggacagtcagtcaccatctcctgcactggaaccagcagtgacgttggtaattataactatgtctcctggtaccaacagtacccaggcaaagcccccaaactcttgatttatgaggtcactaagcggccctcaggggtccctgatcgcttctctggctccaagtctggcaacacggcctccctgaccgtctctgggctccaggctgaggatgaggctgattattactgcagctcatattcaggcagcaacaacccttatgtcttcggaactgggaccaaggtcaccgtcctag

SEQ ID NO: 3416 - DNA, 337 bp, Homo sapiens
  source 1..337: mol_type = other DNA
gaaatcgtaatgacccagtctccagactccctggctgtgtctccgggcgagagggccaccatcaagtgcaagtccagccagagtcttttattcagctccaacaataagaactacttagcttggtaccagcaaagaccagggcagcctcctaaactgctcatttactgggcttctacccgggaatccggggtccctgagcgattcagtggcagcgggtctgggacagatttcactctcaccatcagcagcctgcaggctgaagatgtggcactttattactgtcagcaatattatgatattccgctcactttcggcggagggaccaaggtggagttca

SEQ ID NO: 3417 - DNA, 329 bp, Homo sapiens
  source 1..329: mol_type = other DNA
cagtctgtgctgactcagccaccctctgcgtctgggacccccgggcagagggtcaccatgtcttgttctggaggcagctccaacatcggaagtaatactgttaattggtaccgccagctcccaggagcggcccccaaactcctcgttcatagtgataatcggcggccctcaggggtccctgaccgattctctggctccaagtctgacacctcagcctccctggccatcagtgggctccagtctgaggatgaggctgattattattgtgtagcatgggatgacaggctgaaagcttgggtgttcggcggagggaccaagctgaccgtcct

SEQ ID NO: 3418 - DNA, 319 bp, Homo sapiens
  source 1..319: mol_type = other DNA
gccatccagatgacccagtctccatcctccctgtctgcatctgtcggagacagagtcaccatcacttgccgggcaagtcagggcattagaaatgatttagcctggtatcagctgaaaccagggaaagcccctaaactcctgatctatgctgcatccagtttagaaagtggggtcccattaaggtttaccggcagtggatctggcacagatttcgctctcaccatcagcagcctgcagcctgaagattttgcaacttattactgtctacaagattacaattaccctcggacgttcggccaggggaccaaggtggaaatca

SEQ ID NO: 3419 - DNA, 329 bp, Homo sapiens
  source 1..329: mol_type = other DNA
cagtctgtgttgactcagccaccctcagcgtctgggacccccgggcagagggtcaccatgtcttgttctggaagcggctccaacatcggaagtaatcctgtaaactggtaccagcaggtcccaggaacggcccccaaactcctcatctatagtgataatcagcggccctcaggggtccctgaccgattctctggctccaagtctggcacctcagcctccctggccatcagtgggctccagtctgaagatgagactgattatttctgtgcaacatgggacgacaacctgaagggttgggtgttcggcggagggaccaagctgaccgtcct

SEQ ID NO: 3420 - DNA, 325 bp, Homo sapiens
  source 1..325: mol_type = other DNA
gaaatagtgatgacacagtctccagccaccctgtctgtgtctcctggggaaagagccaccctctcctgcagggccagtcagagtgttacaagtaacttagcctggtaccagcagaaacctggccaggctcccaggctcctcatctatggtgcatccaccagggccactggtatcccagccaggttcagtggcagtgggtctgggacagagttcactctcaccatcagcagcctgcagtctgaagattttgcagtttattactgtcagcagtataataactggcctccgatcactttcggccctgggaccaaagtggatatccaac

SEQ ID NO: 3421 - DNA, 337 bp, Homo sapiens
  source 1..337: mol_type = other DNA
gatattgtgatgactcagtctccactctccctgcccgtcacccctggagagccggcctccatctcctgcaagtctagtcagagcctcctgcatagtgatggaaagacctatttgtattggtacctgcagaagccagggcagcctccacagctcctgatctatgaagtttccaaccggttctctggagtgccagataggttcagtggcagcgggtcagggacagatttcacactgaaaatcagccgggtggaggctgaggatgttggggtttattactgcatgcaaggtacacactggcccctcactttcggcggagggaccaaggtggagatcaaac

SEQ ID NO: 3422 - DNA, 320 bp, Homo sapiens
  source 1..320: mol_type = other DNA
gacatccaaatgacccagtctccatcctccctgtctgcctctgttggagacagagtcaccctcacttgccgggcaagtcagagcattagaacctctttaaattggtatcagcaaaaaccagggagagccccttccttcttgatctatgctgcagtcaatttacagagtggggtcccgtccaggttcagtggcagtggatctgggacagattttactctcaccatcagcagtctgcaacccgaggattttgctacttactactgtcaacagactcagtctctcccactcactttcggcggagggaccaaggtggaaatcaa

SEQ ID NO: 3423 - DNA, 337 bp, Homo sapiens
  source 1..337: mol_type = other DNA
gatattgtgatgacccagactccactctctctgtccgtcacccctggacagccggcctccatctcctgcaagtctagtcagaccctcctgcatagtgatggaacgacctctttgtattggtacctgcagaagccaggccagcctccacaactcctgatctatgaagttttcaaccggttctctggagtgccagataggttcagtggcagcgggtcagggacagatttctcactgaaaatcagccgggtggaggctgaggatgttggggtttattactgcatgcaaactatacagttccctttcactttcggccctgggaccaaagtggatatcaaac

SEQ ID NO: 3424 - DNA, 328 bp, Homo sapiens
  source 1..328: mol_type = other DNA
cagtctgccctgactcagcctccctccgcgtccgggtctcctggacagtcagtcaccatctcctgctctggaaccagcagtgacgttggtggttataactatgtctcctggtaccaacagcacccaggccaagcccccaaactcatgatttatgaggtcagtgagcggccctcaggggtccctgatcgcttctctggctccaagtctggcaacacggcctccctgaccgtctctgggctccaggctgaggatgaggctgattattactgcagctcatatgcaggcagcaacaattttgtcttcggaactgggaccaaggtcaccgtcc

SEQ ID NO: 3425 - DNA, 331 bp, Homo sapiens
  source 1..331: mol_type = other DNA
cagttggtgctgactcagccaccctcagcgtctgggacccccgggcagagggtcaccatctcttgttctggaagcagctccaacatcggaagtaatactgtaaactggtaccagcagctcccaggaacggccccccaactcctcatttatagtaataatcagcggccctcaggggtccctgaccgattctctggctccaagtctgacacctcagcctccctggccatcagtgggctcctgtctgaggatgaggctgattattattgtgtagcatgggatgacagactgaatgtttgggtgttcggcggagggacccagctgaccgtcctag

SEQ ID NO: 3426 - DNA, 322 bp, Homo sapiens
  source 1..322: mol_type = other DNA
gccatccagttgacccagtctccatcctccctgtctgcatctataggagacagagtcaccatcacttgccgggcaagtcagggcattgccagtgctttagcctggtatcagcagaagccagggaaagcgcctaaactcttgatctttgatggctccagtttggaaagtggggtcccatcaaggttcagcggaagaggatctgggacagatttcagtctcaccatcagcagcctgcagcctgacgattttgcgacttattactgtcaacagtttaatgattcccctgtgacgttcggccaagggaccaaggtggaggtcaaac

SEQ ID NO: 3427 - DNA, 328 bp, Homo sapiens
  source 1..328: mol_type = other DNA
gaaattgtgttgacgcagtctccagccaccctgtctttgtctccaggggaaagagccaccctctcctgcagggccagtcagagtgttagcagcagctacttagcctggtatcagcagagacctggccaggctcccaggctcctcatctatgatgcatcgagcagggccgctggcatcccagacaggttcagtggcagtgggtctgggacagacttcactctcaccatcagcagactggagcctgaagattttgcagtgtattattgtcagcagtatggtagctcacctccgtggacgttcggccaagggaccaaggtggaaatcaaac

SEQ ID NO: 3428 - DNA, 337 bp, Homo sapiens
  source 1..337: mol_type = other DNA
gatattgtgatgacccagacttcactctctctgtccgtcacccctggacagccggcctccatctcctgcaagtctagtcagagcctcctgcatagtgatggaaagacctatttgtattggtacctgcagaagccaggccagcctccacagctcctgatctatgaagtttccaaccggttctctggagtgccagataggttcagtggcagcgggtcaggcacagatttcacactgaaaatcagccgggtggaggctgaggatgttggggtttattactgcatgcaaagtatacagcttccgtacacttttggccaggggaccaagctggagatcaaac

SEQ ID NO: 3429 - DNA, 340 bp, Homo sapiens
  source 1..340: mol_type = other DNA
gacatcgtgatgacccagtctccagactccctggctgtgtctctgggcgagagggccaccatcaactgcaagtccagccagagtgttttatacagctccaacaataagaactgcttagcttggtaccagcagaaaccaggacagcctcctaaactactcatttattgggcatctacccgggaatccggggtccctgaccgatttactggcagcgggtctgggacagatttcactctcaccatcagcagcctgcaggctgaagatgtggcagtttattactgtcagcaatattatagtaatacgtggacgttcggccatgggaccaaggtggaaatcaaac

SEQ ID NO: 3430 - DNA, 331 bp, Homo sapiens
  source 1..331: mol_type = other DNA
cagtctgccctgactcagcctcgctcagtgtccgggtctcctggacagtcagtcaccatctcctgtactggctccagtagtgatgttggttcttataactatgtctcctggtaccgacaacacccaggcaaagccccccaactcctactttctgatgtcaataagcggccctcaggggtccctgatcgcctctctggctccaagtctggcaacacggcctccctgaccatctctgggctccgggctgaggatgagggtgattattactgctgctcatatggaggctcctacaatttcgcattcggcggagggaccaccctgaccgtcctag

SEQ ID NO: 3431 - DNA, 322 bp, Homo sapiens
  source 1..322: mol_type = other DNA
gaaattgtgttgacgcagtctccaggcaccctgtctttgtctccaggggaaagagccaccctctcctgcagggccagtcagagtgttaccagctacttagcctggtaccagcagaaacctggccaggctcccaggctcctcatctatggtgcatccagcagggccactggcatccccgacaggttcagtggcagtgggtctgggacagacttcactctcagcatcagcagactggagcctgaagattttgcagtgtattactgtcagcagtatggtagctcacccttcaccttcggccaagggacacgactggagattaaac

SEQ ID NO: 3432 - DNA, 325 bp, Homo sapiens
  source 1..325: mol_type = other DNA
gaaattgtgttgacgcagtctccaggcaccctgtctttgtctccaggggaaagagccaccctctcctgcagggccagtcagagtgttagcagcaacttagcctggtatcagcagatacctggccaggctcccaggctcctcatctatggtgcatccaccagggccactggtatcccagccaggttcagtggcagtgggtctgggacagagttcactctcaccatcagcagcatgcagtctgaagattttgcagtttattactgtcagcagtataataactggcctccgtggtcgttcggccaagggaccaaggtggaaatcaaac

SEQ ID NO: 3433 - DNA, 340 bp, Homo sapiens
  source 1..340: mol_type = other DNA
gacatcgtgatgacccagtctccagactccctggctgtgtctctgggcgagagggccaccatcaactgcaagtccagccagaatgttttatacagctccaacaaaaagaactacttagcttggtaccagcagaaaccaggacagcctcttaagctgctcgtttactgggcatctacccgggaatccggggtccctgaccgattcagtggcagcgggtctgggacagatttcactctcaccatcagcagcctgcaggctgaagatgtggcaacttattactgtcaccaatattatagttttcctcacacttttggccaggggaccaagctggagatcaaac

SEQ ID NO: 3434 - DNA, 338 bp, Homo sapiens
  source 1..338: mol_type = other DNA
gacatcgtgatgacccagtctccagactccctggctgtgtctctgggcgagagggccaccatcagctgcaagtccagccagaatattttatacagcggcaacaatgagaactacttagcttggtaccaacagaagccgggacagcctcctaaattgctcctttactgggcatctacccgggaatccggggtccctgaccgattcagtggcagcgggtctgggacagatttcactctcaccatcagcagcctgcaggctgaagatgtggcaatttattactgtcagcaatattatgaatatcccttcactttcgccggagggaccaaggtggagatcaa

SEQ ID NO: 3435 - DNA, 322 bp, Homo sapiens
  source 1..322: mol_type = other DNA
gaaatagtgatgacgcagtctccagccaccctgtctgtgtctccaggggaaagagccaccctctcctgcagggccagtcagagtgttagcagcaacttagcctggtaccagcataaacctggccaggctcccaggctcctcatctatggtgcatccaccagggccactggtatcccagccaggttcagtggcactgggtctgggacagagttcactctcaccatcagcagcttgcagtctgaagattttgcagtttattactgtcagcagtataatgactggcctcggacgttcggccaggggaccaaggtggaaatcaaac

SEQ ID NO: 3436 - DNA, 337 bp, Homo sapiens
  source 1..337: mol_type = other DNA
gatattgtgatgactcagtctccactctccctgcccgtcacccctggagagccggcctccatctcctgcaggtctagtcagagcctcctccatagtaatggatacaactatttggattggtacctgcagaagccagggcagtctccacagctcctgatctatttgggttctcatcgggcctccggggtccctgacaggttcagtggcagtggatcaggcacagattttacactgaaaatcagcagagtggaggctgaggatgttgggatttattactgcatgcaaactctacaaaccgtactcactttcggcggagggaccaaggtggagatcaaac

SEQ ID NO: 3437 - DNA, 326 bp, Homo sapiens
  source 1..326: mol_type = other DNA
tcttctgagctgactcaggaccctgctgtgtctgtggccttgggacagacagtcagaatgacatgccaaggagacagcctcagaagcttttatgcaagctggtatcaacagaagccaggacaggcccctgtagttgtcatctatggtaaaaacaaccggccctcagggatcccagaccgattctctggctccacctcaggaaacacagcttccttgaccatcactggggctcaggcggaagatgaggctgactattattgtcaatcccgggacagcagtgctgaccatcgttgggtgttcggcggagggaccaaactgaccgtcct

SEQ ID NO: 3438 - DNA, 340 bp, Homo sapiens
  source 1..340: mol_type = other DNA
gatgttgtgatgactcagtctccactctccctgcccgtcacccttggacagccggccaccatctcctgcaggtctagtcaaagcctcgtatacagtgatggagagacctacttgaattggtttcagcagaggccaggccaatctccacggcgcctaatttataaggtttctaaccgggactctggggtcccagacagattcagcggcagtgggtcaggcactgagttcacactgagaatcagcagggtggaggcggaggatgttggggtttattactgcatgcaaggtacatactggcctcccttcactttcggcggcgggaccaaggtagagatcaaac

SEQ ID NO: 3439 - DNA, 340 bp, Homo sapiens
  source 1..340: mol_type = other DNA
gacatcgtgatgacccagtctccagactccctggctgtgtctctgggcgagagggccaccatcaactgcaagtccagccagaatgttttatacagttccaacaataagaattatttagcttggtaccagcacaaaccaggacagcctcctaagttactcatttactgggcatctacccgggaatccggggtccctgaccgattcagtggcagcgggtctgggacagatttcactctcaccatcagcagcctgcaggctgaagatgtggcagtttattcctgtcagcaatattatactactccattcactttcggccctgggaccaaagtggatatcaaac

SEQ ID NO: 3440 - DNA, 337 bp, Homo sapiens
  source 1..337: mol_type = other DNA
gaaattgtgatgactcagtctccactctccctgaccgtcacccctggagagccggcctccatctcctgcaggtctagtcagagcctcctgtatgaaaatggaatcaactatttggattggtacctacagaggccagggcagtcgccacacctcctgatctatttgggttctaatcgggcctccggggtccctgacaggttcagtggcagtggatcaggcacagattttacactgaaaatcagcagagtggaggctgaggatgttggagtttattactgcatgcaagctctacaaagtccgctcactttcggcggagggaccaaggtggagatcaaac

SEQ ID NO: 3441 - DNA, 322 bp, Homo sapiens
  source 1..322: mol_type = other DNA
gacatccagatgacccagtctccatcctccctgtctgcatctgtaggagacagagtcaccatcacttgccaggcgagtcaggacattagaaatcatttaaattggtatcaacaaaaaccagggaaagcccctaagctcctgatcttcgatggttccaatttgcagacaggggtcccatcaaggttcggtggtagtggatctgggacagattttagcttcaccatcaatagcctgcagcctgaagatattgcaacattttactgtcagcagaatcatattctcccggggacgttcggccaagggaccaaggtggaaatcaaac

SEQ ID NO: 3442 - DNA, 329 bp, Homo sapiens
  source 1..329: mol_type = other DNA
cagtctgtgctgactcagccaccctcagcgtctgggacccccgggcagagggtcaccatctcttgttcaggaagcaaatccaacttcggacgaaatactgcaaactggtaccagcagttcccaggagcggcccccaaactcctcatccatactaataatcagcggccctcgggggtccctgaccgattctctggctccaactctggcacctcagcctccctggccatcagtggcctccagtctgaagatgaggctcattattactgtgcagtatgggatgacagcctgaatggtccggtgttcggcggagggaccaagctgaccgtcct

SEQ ID NO: 3443 - DNA, 329 bp, Homo sapiens
  source 1..329: mol_type = other DNA
cagtctgtgctgactcagccaccctctgcgtctgggacccccgggcagagggtcaccatctcttgttcaggaagcaaatccaacttcggacgaaatactgcaaactggtaccagcagttcccaggagcggcccccaaactcctcatccatactaataatcagcggccctcgggggtccctgaccgattctctggctccaactctggcacctcagcctccctggccatcagtggcctccagtctgaagatgaggctcattattactgtgcagtatgggatgacagcctgaatggtccggtgttcggcggagggaccaagctgaccgtcct

SEQ ID NO: 3444 - DNA, 322 bp, Homo sapiens
  source 1..322: mol_type = other DNA
gacatccagatgacccagtctccttccaccctgtctgcatctgtcggagacagagtcaccatcacttgccgggccagtcagagtattagtgactggttggcctggtatcagcagaaaccagggaaagcccctaaactcgtgatctataaggcgtctaatttagaacgtggggtcccaccaaggttcagcggcagtggatctgggacagaattcactctcaccatcagcagcctgcagcctgatgatcttgcaacttattactgccaacactataatacttattcggggacttttggccaggggaccaagctggagatcaaac

SEQ ID NO: 3445 - DNA, 346 bp, Homo sapiens
  source 1..346: mol_type = other DNA
caggctgtgctgactcagccgtcttccctctctgcatctcctggagcatcagccagtctcacctgcaccttacacagtggcatcaatgttgatacctccaagattttctggtaccagcagaagccagggagtcctccccggtatctcctgaggtatacatcagactcagataaggagcatggctctggagtccccagccgcttctctggatccacagatgcttcggccaatgcagggattttattcatctctgggctccagcctgaggatgaggctgactattactgtatgatttggcacagcagcgcttatgtcttcggaactgggaccaaggtcaccgtcctag

SEQ ID NO: 3446 - DNA, 334 bp, Homo sapiens
  source 1..334: mol_type = other DNA
gacatcgtgatgacccagtctccggactccctgcctgtgtctctgggcgagagggccaccatcagctgcaagtccagccagaatcttttattcaaccaaaggaactacttagcttggtaccagcagaaaccaggacagcctcctaagttgctcctttactgggcatctatccgggaatccggggtccctgaccgattcagtggcagcgggtctgagacagatttcactctcaccatcagcagcctgcaggctgaagatgtggcactttattactgtcagcaatattatggttatcccttcactttcgccggagggaccaaggtggagatcaaac

SEQ ID NO: 3447 - DNA, 328 bp, Homo sapiens
  source 1..328: mol_type = other DNA
tcctatgacctgacacagccaccctcggtgtcagtgtccccaggacagacggccaggatcacctgctctggagatgcattgccaaagcaatatgcttattggtaccagcagaagttaggccaggcccctgtgttggtgatatataaagacagtgagaggccctcagggatccctgagcgattctctggctccagctcagggacaacagtcacattgaccatcagtggagtccaggcagaagacgaggctgactattactgtcaatcagcagacagcagtgctacttatgcttgggtattcggcggagggaccaagctgaccgtcctag

SEQ ID NO: 3448 - DNA, 340 bp, Homo sapiens
  source 1..340: mol_type = other DNA
gacatcgtgatgacccagtctccagactccctggctgtgtctctgggcgagagggccaccatcaactgcaagtccagccagagtgttttatacgactccaacaataagaactacttagcttggtattcgcagaaaccaggacaggctcctaaactgctcgtttactgggcttctgaccgggaatccggggtccctgaccgattcagtggcagtgggtctgggacagatttcgctctcaccatcaccaaagtgcaggccgaagatgtggcagtttattactgtcagcaatattatggtactccgcacacttttggccaggggaccaagctggagatcaaac

SEQ ID NO: 3449 - DNA, 329 bp, Homo sapiens
  source 1..329: mol_type = other DNA
cagtctgtgctgactcagccaccctcagcgtctgggacccccgggcagagggtcaccatctcttgttctggaagcagctccaacatcggaagtcgtgctgtaaactggttccagcaactcccaggagcggcccccaaactcctcatctataatagtgatcagaggccctcaggggtccctgatcgattttctggctccaagtctggcacctcagcctccctggccatcagtggcctccagtctgaagatgaggctcattattactgtgcagtatgggatgacagcctgaatggtccggtgttcggcggagggaccaagctgaccgtcct

SEQ ID NO: 3450 - DNA, 322 bp, Homo sapiens
  source 1..322: mol_type = other DNA
gacatccagatgacccagtctccatcctccctgtctgcatctgtaggagacagagtcaccatcacttgccgggcaagtcagagcattggcaccaatttaaattggtatcagcagaaaccagggaaagcccctaagttcctgatctatgctgcatccaatttgcaaagtggggtcccatcaaggttcagtggcagtggatctgggacagatttcactctcaccatcagcagtctgcaacctgaagattttgcaatgtactactgtcaacagagttacattacccccaggacgttcggccaagggaccaaggtggaaatcaaac

SEQ ID NO: 3451 - DNA, 323 bp, Homo sapiens
  source 1..323: mol_type = other DNA
catccagatgaaccagtctccttccaccctgtgtgcatctgtaggagacagagtcaccatcacttgccgggccagtcagagtattaatgggtggttggcctggtatcagcagaaaccagggaaagcccctaagctcctgatccattggacgtctactttagaaaatggggtcacatcaaggttcagcggcagtgggtctgggacagaattcactctcaccatcagcagcctgcagcctgatgactgtgcaacttattactgccaacaatataatagttattcctcgtacacttttggccaggggaccaaggtggagatcaaac

SEQ ID NO: 3452 - DNA, 325 bp, Homo sapiens
  source 1..325: mol_type = other DNA
gaaatggtgttgacgcagtctccaggcaccctgtctttgtctccaggggaaagagccaccctctcctgcagggccagccagagtgttagcagcagctccttagcctggtaccagcagaagcctggccaggctcccaggctcctcatctatgatgcttccagcagggccactggcatcccagacaggttcagtggcagtgggtctgggacagacttcactctcaccatcagcagactggagcctgaagattttgcagtgtattactgtcagcactatggtagctcatttctcactttcggcggagggaccagggtggagatcaaac

SEQ ID NO: 3453 - DNA, 331 bp, Homo sapiens
  source 1..331: mol_type = other DNA
cagtctgccctgactcagcctccctccgcgtccgggtctcctggacagtcagtcaccttctcctgcactggaaccagcagtgacgttggcgcttataactatgtctcctggtaccaacagcacccaggcaaagcccccaaactcatgatttatgaggtcagtaagcggccctcaggggtccctgatcgcttctctggctccaagtctggcaacacggcctccctgaccgtcgctgggctccaggctgaggatgaggctgactattattgcagctcatatgtaggcaggaacaatttggtattcggcggagggaccaagctgaccgtcctag

SEQ ID NO: 3454 - DNA, 322 bp, Homo sapiens
  source 1..322: mol_type = other DNA
gacatccagttgacccagtctccatccctcctgtctgcatctgttggagacagagtcaccatcacttgccgggccagtcaggaccttggcaattatttagcctggtttcaggaaaaaccagggaaagtccctaagctgcttatctatgatgtatccactttgcaaagtggggtcccatcaaggttcagcggcagtggatctgagacacacttcactctcacaatcagcagcctgcagcctgaagactttgcaacttattactgtcaacaacttaagagttatcccatcatcttcggccaagggacacgactggagattaaac

SEQ ID NO: 3455 - DNA, 322 bp, Homo sapiens
  source 1..322: mol_type = other DNA
atagtgatgacgcagtctccagccaccctgtctgtgtctccaggggaaggagccaccctctcctgcagggccagtcagagtattagcaacaacttagcctggtaccagcagaaacctggccaggctcccaggctcctcatgtatgatgcatccaccagggccactggtatcccagccaggttcagtggcagtgggtctgggacagagttcactctcaccatcagcagcctgcagtctgaagattttgcagtttattactgtcagcagtataataactggcctccgatcaccttcggccaagggacacgactggagattaaac

SEQ ID NO: 3456 - DNA, 325 bp, Homo sapiens
  source 1..325: mol_type = other DNA
gaaatagcgatgacgcagtctccagccaccctgtctgtgtctccaggggaaagagccaccctctcctgcagggccagtcagagtattaccagagacttggcctggtaccagcagaaacctggccaggctcccaggctcctcatctatgatgcatccaccagggccactggtatcccagccaggttcagtggcagtgggtctgggacagagttcactctcaccataagcagcctgcagtctgaagattttgcaatttattactgtcagcagtataataactggcctccgatcacttttggccaggggaccaagctggagatcaaac

SEQ ID NO: 3457 - DNA, 325 bp, Homo sapiens
  source 1..325: mol_type = other DNA
gaaattgtgttgacgcagtctccaggcaccctgtctttgtctccaggggaaagagccaccctctcttgtagggccagtcagagtattcgcaacagtaacttagcctggtaccagcaaaaacctggccaggctcccaggctcctcatctatgctgcatccagccgggccgctggcatcccagacaggttcagtggcagagggtctgggacagacttcactctcaccatcagcagactggagcctgaagatttggcagtgtattactgtcagcagtttggcacctcacctttcactttcggcggagggaccaaggtggagatcaaac

SEQ ID NO: 3458 - DNA, 325 bp, Homo sapiens
  source 1..325: mol_type = other DNA
gaaattatattgacacagtctccagccaccctgtctttgtctccaggggaaagagccaccctctcctgcagggccagtcagagtgttagtacctccttagcctggtaccaacagagacctggccagcctcccaggctcctcatctatgaagcatccaagagggccactggcatcccagccagattcagtggcagtgggtctgggacagacttcactctcacgatcagcagcctagagcctgaagactttgcagtttattactgtcagcaccgtagcggctggcctccgatcaccttcggccaggggacacgactggaagttaaac

SEQ ID NO: 3459 - DNA, 331 bp, Homo sapiens
  source 1..331: mol_type = other DNA
cagtctgtgttgacgcagccgccctcagtgtctgcggccccaggacagaaggtcaccatctcttgctctgcaagcagctccaacatcggagatagtcatatatcctggtaccagcaagtcccaggaacagcccccaaactcctcatctatgaagataataagcgaccctcagggattcctgaccgattctctggctccaggtctggcacgtcagccaccctgggcatcaccggactccagactggggacgaggccgattattactgcgaaacatgggatagaagcctgagtgcttatgtcttcggaactgggaccaaggtcaccgtcctag

SEQ ID NO: 3460 - DNA, 325 bp, Homo sapiens
  source 1..325: mol_type = other DNA
gaaatagtgatgacgcagtctccagccaccctgtctatatctccaggggagagagccaccctctcctgcagggccagtcagagtgttagtattagcttagcctggtaccagcagaaacctggccaggctcccaggctcctcatctatgctgcatccaccagggccactggtgtcccagccaggttcagtggcagtgggtctgggacagagttcactctcaccatcagtagtatgcagtctgaagactttgcagtttattactgtcagcagtataatgactggcccccactcactttcggcggagggaccaaggtggagatcaaac

SEQ ID NO: 3461 - DNA, 337 bp, Homo sapiens
  source 1..337: mol_type = other DNA
gatgttgtgatgactcagtctccactctccctgcccgtcacccttggacagccggcctccatctcctgcaggtccagtcaaggcctcgtattcgttgatggaaacacctacttgagttggtttcagcagaggccaggccattctccaaggcgcctaatttataaggtttctagccgggactctggggtccctgacagattcagcggcagtgggtcaggcactgatttcacactgaaaatcaacagggtggaggctgaggatgttggggtttattactgcatgcaaggcacatactggcccttcactttcggcggagggaccaaggtggagatcaaac

SEQ ID NO: 3462 - DNA, 325 bp, Homo sapiens
  source 1..325: mol_type = other DNA
gaaatagtgatgacgcagtctccagccaccctgtctgtgtctccaggggaaagaggcaccctctcctgcagggccagtcagagtgtgagcaacaacttagcctggtaccagcagaaacctggccaggctcccaggctcctcatctatggtgcatccaccagggccactggtgtcccagccaggttcggtggcagtgggtctgggacagagttcactctcaccatcagcagcattcagtctgaagattttgcagtttattactgtcagcagtataataactggcctccgctcactttcggcggagggaccacggtggagatcaaac

SEQ ID NO: 3463 - DNA, 337 bp, Homo sapiens
  source 1..337: mol_type = other DNA
gacttcgtgatgacccagtctccagacgccctggctgtgtctctgggcgagagggccaccatcaactgcaagtccagccagagtgttctctatgactccaacaataagaattatttagcctggtaccagcagaaaccaggacagcctcctaagttactcatttactgggcatctacccgggaatccggggtccctgaccgattcagtggcagcgggtctgggacagacttcactctcaccatcagcaacctgcaggctgaagatgtggcagtttattactgtcaacaatattatgatactccgtctttcggccctgggacgaaagtagatatcaaac

SEQ ID NO: 3464 - DNA, 322 bp, Homo sapiens
  source 1..322: mol_type = other DNA
gacatccagatgacccagtctccttccaccctgtctgcatctgtaggagacagagtcaccatcacttgccgggccagtcagagtgttggtaactggttggcctggtttcagcagaaaccagggaaagcccctaagctcctgatctataaggcgtctaagttagaaagtggggtcccatcaaggttcagcggcagtgaatctgggacagaattcactctcaccatcagtagcctgcagcctgatgactttgcaacttattactgccaacagtatgacctttacccgtacagttttggccaggggaccaaggtggagatcaaac

SEQ ID NO: 3465 - DNA, 337 bp, Homo sapiens
  source 1..337: mol_type = other DNA
gatgtggtgatgactcagtctccactctccctgcccgtcacccttggacagccggcctccatctcctgcaggtctagtcaaagcctcgtgcacaagactggaaacacctttttgagttggtttcatcagaggccaggccagtctccaaggcgcctaatttataaggtttctaatcgggagtctggggtcccagagagattcagcggcagtgggtcagacacagatttcacactgagtatcagcagagtggaggctgaggatgttgggctttactactgcatgcaaggtacaaagtggccttacacttttggccaggggaccaagctggagatcaaac

SEQ ID NO: 3466 - DNA, 322 bp, Homo sapiens
  source 1..322: mol_type = other DNA
gacatccagatgacccagtctccatctgccatgtctgcatctgtaggagacagagtcatcatcacttgtcgggcgagtcaggccattggcaattatttagcctggtttcagcagaagccagggaaggtccctaagcgcctgatctatgctgcatccagtttgcaaagtggggtcccatcaaggttcagcggcagtggatctgggacagaattcattctcacaatcagcagcctgcagtctgaagattttgcaacttattactgtctacagcataaaagttatccgctcactttcggcggagggaccaaggtggagatcaaac

SEQ ID NO: 3467 - DNA, 321 bp, Homo sapiens
  source 1..321: mol_type = other DNA
tcctatgagctgacacagccaccctcggtgtcagtgtccccaggacagacggccaggatcacctgttctggagatgcgttgccaaagcaatatgcttattggtaccagcagaagccaggccaggcccctgtcctggtgatttatagagacaatgagaggccctcagggatccctgagcgaatctctggctccagctcagggacaacagtcacgttgaccatcagtggagtccaggcagaagacgaggctgactattactgtcagtccacagacagcagtggtgtttatgtcttcggaacagggaccaaggtcaccgtccta

SEQ ID NO: 3468 - DNA, 325 bp, Homo sapiens
  source 1..325: mol_type = other DNA
gaaattgtgttgacacagtctccagccaccctgtctttgtctccaggggaaagagccaccctctcctgcagggccagtcagagtcttcgcaactccttagcctggtaccaacaaagacctggccaggctcccaggctcctcatttatgatgcatccaacagggccactggcatccccgccaggttcagtggcagtgggtctgggacagacttcactctcaccatcagcagtgtagagcctgaagattttgcagtttattactgtcagcagtatagcaactggcctccgatcaccttcggccaagggacccgactggagatgaaac

SEQ ID NO: 3469 - DNA, 325 bp, Homo sapiens
  source 1..325: mol_type = other DNA
gaaatggtgttgacgcagtctccaggcaccctgtctttgtctccaggggaaagagccaccctctcctgcagggccagccagagtgttagcagcacctccttagcctggtaccagcagaggcctggccaggctcccaggctcctcatctatgatgcttccaacagggccactggcatcccagacaggttcagtggcagtgggtctgggactgacttcactctcaccatcagcagactggagcctgaagattttgcagtgtatttctgtcagcactatgatagctcatctctcactttcggcggagggaccaaggtggagatcaaac

SEQ ID NO: 3470 - DNA, 340 bp, Homo sapiens
  source 1..340: mol_type = other DNA
gacatcgtgatgacccagtctccagactccctggctgtgtctctgggcgagagggccaccatcagctgcaagtccagccagaatgttttattcagcgacaacaataagaattacttagcttggtaccagaagaaaccaggacagcctcctaagttgctcctttactgggcatctacccgggaatccggggtccctgaccgattcagtggcagcgggtctgggacagatttcactctcaccatcagcagcctgcaggctgctgacgtggcagtctattactgtcagcaatattatgcttatcccttcactttcgccggagggaccaaggtggagatcaaac

SEQ ID NO: 3471 - DNA, 333 bp, Homo sapiens
  source 1..333: mol_type = other DNA
cagtctgccctgactcagcctgcctctgtgtctgggtctcctgggcagtcgatcaccatctcctgctttggaaacaccagtgacgttgttgattataactctgtcacctggtaccaacaacacccagacaaagcccccaaactcatcatttatgatgtctataatcggccctcaaggatttctaatcgcttctctggctccaagtctggcaacacggcctccctgaccatctctgtcgtccaggctgacgacgaggctgattattactgcagttcatatacaagaggcacctctctcgtggtcttcggcggagggaccaaactgaccgtccta

SEQ ID NO: 3472 - DNA, 329 bp, Homo sapiens
  source 1..329: mol_type = other DNA
cagtctgtgctgactcagccaccctcagcgtctgggacccccgggcagagggtcaccatctcttgttctggaagtagctccaacatcggaagtaatactgtgagctggtgccagcacctcccaggaacggcccccaaactcctcatttatgctaataatcagcggccctcaggggtccctgaccgattctctggctccaagtctggcacctcagcctccctggccatcagtggcctccagtctgaagatgaggctcattattactgtgcagtatgggatgacagcctgaatggtccggtgttcggcggagggaccaagctgaccgtcct

SEQ ID NO: 3473 - DNA, 340 bp, Homo sapiens
  source 1..340: mol_type = other DNA
gacatcgtgatgacccagtctccagactccctggctgtgtctctgggcgagagggccaccatcaactgcaagtccagccagagtgttttatacaactccaacaaatggaactacttggcttggtaccagcagaaaccacaacagcctcctaaattgctcatttcctgggcgtcttcccgggaatccggcgtccctgaccggttcagtggcagcgggtctgggacagacttcactctcaccatcagcagcctgcaggctgaagatgtggcagtttattactgtcagcagtattatgataatacattcactttcggccctgggaccaaagtggaaatcaaac

SEQ ID NO: 3474 - DNA, 322 bp, Homo sapiens
  source 1..322: mol_type = other DNA
gacatccagatgacccagtctccatcgtccctgtctgcatctgtaggagacagagtcagcatcacttgccgggcgagtcagggcattagcaattatttagcctggtatcagcagaaaccagggaaggttcctgagctcctgatctatgctgcatccactttgcaatcaggggtcccatctcggttcagtggcagtggatctgggacagaattcactctcaccatcagcagcctacagcctgaagatgttgcaacttattactgtcaaaagtatgacagtgcccctcggacgttcggccaagggaccaaggtggaaatcaaac

SEQ ID NO: 3475 - DNA, 337 bp, Homo sapiens
  source 1..337: mol_type = other DNA
gatattgtaatgacccagactccactctctctgtccgtcacccctggacagccggcctccatctcctgcaagtctagtcagagcgtcctgcatagtgatggaaagacctatttgtattggtacctgcagaagccaggccagcctccacagctcctgatctatgaagtttccaaccggttctctggagtgccagataggttcagtggcagcgggtcagggacagatttcacactgaaaatcagccgggtggaggctgaggatgtcggggtttattactgcatgcaaagtatacagcgtccgtacacttttggccaggggaccaagctggagatcaaac

SEQ ID NO: 3476 - DNA, 322 bp, Homo sapiens
  source 1..322: mol_type = other DNA
gacatccagttgacccagtctccatccttcctgtctgcatctgtaggagacagagtcaccatcacttgccgggccagtcagggcattagcggttatttagcctggtatcaacaaaaacccgggaaagcccctaacctcctgatctatgctgcatccactttgcaaagtggggtcccatcaaggttcagcggcagtggatctgggacagagttcactctcacaatcaccagcctgcagcctgaggattttgcaacttattactgtcaacagcttaatagctaccctcggacgttcggccaagggaccaaggtggaaatcaaac

SEQ ID NO: 3477 - DNA, 331 bp, Homo sapiens
  source 1..331: mol_type = other DNA
cagtctgtactgactcagccagcctcagcgtctgggacccccgggcagagggtcaccatgtcttgttctggaagcaggtccaacatcggaagtaatcctgtaagctggtaccagcaggtcccaggctcggcccccaaactactcatgtatagtaataatcagcggccctcaggggtccctgaccgcttctctggctccaagtctggcacctcagcctccctggccatcactggcctccagtctgaggatgagactgattattactgtgcagcatgggatgacagcctgaagggttgggtgttcggcggagggaccacgctgaccgtcttag

SEQ ID NO: 3478 - DNA, 345 bp, Homo sapiens
  source 1..345: mol_type = other DNA
caggctgtactgactcagccggcttccctctctgcatctcctggagcatcagccagtctcacctgcaccttgcgcagtgacatcaatgttgatacctccaggatattctggtaccagcagaagccagggagtcctccccactatctcctgaagtacaaatcagactcagataagcagcagggctctggagtccccagccgcttctctggatccaaggatgcttcggccaatgcagggattttactcatctctgggctccactctgaagatgaggctgactattattgtatgatttggcacgacaatgcttgggtgttcggcggagggaccaagctgaccgtccta

SEQ ID NO: 3479 - DNA, 325 bp, Homo sapiens
  source 1..325: mol_type = other DNA
gaaattgtgttgacacagtctccagccaccctgtctttgtctccaggtgaaagagccaccctctcctgcagggccagtcagagtgttagcagcttcttagcctggtaccaacagaaacctggccaggctcccaggctcctcatctatgatgcatccaacagggccactggcatcccagccaggttcagtggcagtgggtctgggacagacttcactctcaccatcagcagcctagagcctgaagattttgcagtttattactgtcagcagcgtagcaactggcctccgatcaccttcggccaagggacacgactggaaattaaac

SEQ ID NO: 3480 - DNA, 322 bp, Homo sapiens
  source 1..322: mol_type = other DNA
tcctatgacctgactcagccaccctcagtgtccgtgtccccaggactgacagccagcatcacctgctctggagataaattggaggataagtttgtttgctggtatcaactgaggccaggccagtcccctgtgttggtcatatatcaagataacaagcggccctcagggatccctgcgcgattcactgggtccaactctgggaacacagccactctgaccatcacccgggcccagcctgtagatgaggctgactattactgtcagacgtgggacagcgccactgggggggtattcggcggagggaccaaactgaccgtcctag

SEQ ID NO: 3481 - DNA, 337 bp, Homo sapiens
  source 1..337: mol_type = other DNA
gatgttgtggtgactcagtctccactctccctgcccgtcacccttggacagccggcctccatctcctgcaggtctaatcaaagcctcgtatatagtgatggagacacctacttgagttggtttcagcagaggccaggccaatctccaaggcgcctaatttataaggtttctaaccgggactctggggtcccggacaaattcagtggcagtgggtcaggcactgatttcacactgaaaatcagcagggtggaggctgaggatgttggggtttattactgcatgcagagtacagactggccgtacactttcggcggagggaccaaggtggagatcaaac

SEQ ID NO: 3482 - DNA, 328 bp, Homo sapiens
  source 1..328: mol_type = other DNA
tcttctgagctgactcagcaccctgctgtgtctgtggccttgggacagacagtcaggatcacatgccaaggggacatcctcagagactattatgcaagttggtatcagcagaagccaggacaggcccctgtagttgtcatctatggtaaaaatgaccggccctcagggatcccagaccgattctctggctccagttcaggaaacacagcttccttgaccatcactggggctctggcggaagacgaggctgactattattgtcaatcccgggacagcagtgtgaattatcgttgggtgttcggcggagggaccaagctgaccgtcctag

SEQ ID NO: 3483 - DNA, 328 bp, Homo sapiens
  source 1..328: mol_type = other DNA
gaaattgtgttggcgcagtctccaggcaccctgtctttgtctccaggggaaagagccaccctctcctgcagggccagtcagagtgttgccagcagctacttagcctggtaccagcagaaacctggccaggctcccaggctcctcatctatggtgcatccagcagggccactggcatcccagacaggttcagtggcagtgggtctgggacagacttcactctcaccatcagcagactggagcctgaagattttgcagtgtattactgtcaccagtatggtagctcacctggatcgttcactttcggccctgggaccaaagtggatatca

SEQ ID NO: 3484 - DNA, 340 bp, Homo sapiens
  source 1..340: mol_type = other DNA
gacatcgtgatgacccagtctccagactccctggctgtgtctctgggcgagagggccaccatcaactgcaagtccagccagaatgttttatacagctccaacaagaagaactacttagcttggtaccagcagaaaccaggacagtctcctaacctgctcatttactgggcatctacccgggaatccggggtccctgaccgattcagtggcagcgggtctgggacagatttcaccctcaccatcagcagcctgcaggctgaagatgtggcagtttattactgtcaccaatattatagttttcctcacacttttggccaggggaccaagctggagatcaaac

SEQ ID NO: 3485 - DNA, 325 bp, Homo sapiens
  source 1..325: mol_type = other DNA
gaaatagtgatgacgcagtctccagccaccctgtctgtgtctcttggggagggagccaccctctcctgcagggccagtcagactgttaacactaagttagcctggtaccagcacaaacctggccaggctcccaggctcctcatctatggtgcctccaccagggccactggtgtcccagccaggttcagtggcggtgggtctgggacagagttcacgctcaccatcagcagcatggagtctgaagattttgcagtttattactgtcagcagtataataattggcctccgatcaccttcggccaagggacacgactggagattaaac

SEQ ID NO: 3486 - DNA, 346 bp, Homo sapiens
  source 1..346: mol_type = other DNA
caggctgtgctgactcagccggcttccctctctgcatctcctggagcatcagccagtctcacctgcaccttgcgcagtggcatcgatgttggttcccaaaggatatactggtatcagcagaagtcagggagtcctccccagtatctcctgaggtacaaatcagactcagatcatcaccaggggtctggagtccccagccgcttctctggattcaaagatgcttcggccaatgcaggagttttagtcatctctgggctccagtctgaggatgaggctgactattactgtatgatttggcatagcgacgcttgggtgttcggcggagggaccaaactgaccgtcctag

SEQ ID NO: 3487 - DNA, 340 bp, Homo sapiens
  source 1..340: mol_type = other DNA
gacatcgtgatgacccagtctccagactccctggctgtgtctctgggcgagagggccaccataaactgcaagtccagccagagtgttttatggagctccaacaagaagaactacttaggttggtaccagcagaaaccaggacagcctcctaagttgctcatttactgggcatctacacgggaatccggggtccctgaccgattcagtggcagcgggtctgggacagatttcactctcaccatcagcagcctgcaggctgaagatgtggcagtttatttctgtcagcaatattatgatactccccggacgttcggccaagggaccaaggtggaaatcaaac

SEQ ID NO: 3488 - DNA, 325 bp, Homo sapiens
  source 1..325: mol_type = other DNA
gacatccagatgacccagtctccatcctccctgtctgcatctgtaggagacagagtcaccatcacttgccgggcaagtcagagcattagaagttatttaaattggtatcagcaaaaaccagggaaagcccctcagctcctgatctatgttgcatccagtttgcaaagtggggtcccatcaaggttcagtggcagtggatctgggacagatttcactctcaccatcagcaatctgcaacctgaagattttgcaacttactactgtcagcagagctacagtgccccctcatacacttttggccaggggaccaagctggagatcaaac

SEQ ID NO: 3489 - DNA, 322 bp, Homo sapiens
  source 1..322: mol_type = other DNA
gacgtccagatgacccagtctccatcctccctgtctgcatctgtaggagacagagtcaccatcacttgccaggcgagtcaggacattagtaactatttaaattggtatcaacaaaaaccagggaaagcccctaagctcctgatctacgatgcatccaatttggaaacaggggtcccatctaggttcagtggaagtggatctgggacacattttactttcaccatcaccagcctgcagcctgaagatattgcaacctattactgtcaacagtatgataatctccctcccaccttcggccaagggacacgactggatataaaac

SEQ ID NO: 3490 - DNA, 325 bp, Homo sapiens
  source 1..325: mol_type = other DNA
gaaatagtgatgacgcagtctccagccaccctgtctgtgtctcttggggagggagccaccctctcctgcagggccagtcagactgttagcaccaacctagcctggtaccaacagaaacctggccaggctcccagactcctcatttatggtgcatctaccagggccactggtatcccagccaggttcagtggcagtgggtctgggacagagttcactctcaccatcagcggcctccagtctgaagattttgcagtttattactgtcagcagtataataattggcctccgatcaccttcggccaagggacacgactggagattaaac

SEQ ID NO: 3491 - DNA, 337 bp, Homo sapiens
  source 1..337: mol_type = other DNA
gacatcgtgatgacccagtctccagactccctggctgtgtctctgggcgagagggccaccatcaactgcaagtccagccagagtgttttatacaacgacaacaagaagaactacttagcttggtaccagcagaaaccaggacagcctcctaaggtgctcatttactgggcatctacccgggaatccggggtccctgaccgattcagtggcagcgggtctgggacagatttcactctcaccatcaacagcctgcaggctgaagatgtggcagtttattactgtcagcaatattatagcactccggttttcggcggagggaccaaggtggagatcaaac

SEQ ID NO: 3492 - DNA, 340 bp, Homo sapiens
  source 1..340: mol_type = other DNA
gacatcgtgatgacccagtctccagactccctggctgtgtctctgggcgagagggccaccatcaactgcaagtccagccagagtgttttatacagctccaacaaaaagaactacttagcttggtattcgcagaaaccaggacagcctcctaagctgctcgtttactgggcatctgaccgagaatccggggtccctgaccgattcagtggcagcgggtctgggacagatttcactctcaccatcagcagcctgcaggctgaagatgtggcagtttattactgtcagcaatattatggtagtccgcacacttttggccaggggaccaaggtggagatcaaac

SEQ ID NO: 3493 - DNA, 325 bp, Homo sapiens
  source 1..325: mol_type = other DNA
gaaatagtgatgacgcagtctccagccaccctgtctgtgtctccaggggaaagagccaccctctcctgcagggccagtcagagtattaccagcaacttagcctggtaccagcggaaacctggccaggctcccaggctcctcatctatggtgcatccaccagggccactggtatcccagccaggttcagtggcagtgggtctgggacagaattctctctcaccatcaacagcctgcagtctgaagattttgcagtttattactgtcaacagtatcataactggcctccgatcactttcggccctgggaccaaagtggatatcaaac

SEQ ID NO: 3494 - DNA, 326 bp, Homo sapiens
  source 1..326: mol_type = other DNA
tcttctgagctgactcagtaccctgctgtgtctgcggccttgggacagacagtcaggatcacatgtgaaggagacagcctcagagaatattatgcaacttggtaccagcagaagccaggacaggcccctgtagttgtcatctatggtaaaaatgaccggccctcagggatcccagaccgattctctggctccacttcaggaaacacagcttccttgaccatcactggggctctggcggaagacgaggctgactattattgtcagtcccgggacagcactttgaactatcgttgggtgttcggcggagggaccaagctgaccgtcct

SEQ ID NO: 3495 - DNA, 325 bp, Homo sapiens
  source 1..325: mol_type = other DNA
gaaattgtgttgacacagtctccagccaccctgtctttgtctccaggggaaagagccaccctctcctgcagggccagtcagagtattcgcacttccttagcctggtatcaacagaaacctggccaggctcccaggctcctcatctatgatgcatccaacagggccactggcatcccagccaggttcagtggcagtgggtctgggacagacttcactctcaccatcagcagcctagagcctgaagattttgcagtttattactgtcaccagcgtagcgactggctcatgtacacttttggccaggggaccaggctggagatcaaac

SEQ ID NO: 3496 - DNA, 322 bp, Homo sapiens
  source 1..322: mol_type = other DNA
gaaatagtgatgacgcagtctccagccaccctgtctgtgtctccaggggaaagagccaccctctcctgcagggccagtcagagtgttaggagcttcttagcctggtaccagcacaaacctggccaggctcccaggctcctcatctatggtacatccaccagggccactggtatcccagccaggttcagtggcagtgggtctgggacagagttcactctcaccatcagcatcatgcagtctgaagattttgcagtttattactgtcagcagtataataactggccgctcactttcggcggagggaccaaggtggagatcaaac

SEQ ID NO: 3497 - DNA, 325 bp, Homo sapiens
  source 1..325: mol_type = other DNA
gaaattgtgttgacgcagtctccaggcaccctgtctttgtctccaggggaaagagccaccctctcctgcagggccagtcagagtgttcgcaacacctacttagcctggtaccagcagaaacctggccaggctcccaggctcctcatctatggtgcctccagcagggccactggcatcccagacaggttcagtggcagtgggtctgggacagacttcactctcaccatcaccagactggagcctgaggattttgcagtgtattactgtcagcattatgatagctcgagggggacgttcggccaagggaccaaggtggaaatcaaac

SEQ ID NO: 3498 - DNA, 330 bp, Homo sapiens
  source 1..330: mol_type = other DNA
cagtctgtgatgactcagacaccctcagcgtctgggacccccgggcagagggtcaccatctcttgttctggaagcagctccaacattggaattaatactgtaaactggtaccaccaggtcccaggaacggcccccagactcctcatctatagcaatcatcagcggccctcaggggtccctgaccgattctctggctccaagtctggcacctcagcctccctggccatcagtgggctccagtctgaggatgagggtgattattactgtgcagcatgggatgacagcctgaaggcttgggtgttcggcggagggaccaagttgaccgtccta

SEQ ID NO: 3499 - DNA, 340 bp, Homo sapiens
  source 1..340: mol_type = other DNA
gacatcgtgatgacccagtctccagactccctggttgtgtctctgggcgagagggccaccatcacctgcaagtccagccagaatgttttatatagcgagaacaataagaattacttagcttggtaccagcagaaaccaggacaccctcctaagttgctcctttactgggcatctacccggggatccggggtccctgaccgattcagtggcagcggatctgagacagatttcactctcaccatcagcagcctgcaggctgaagatgtggcagtttattactgtcagcaatattatggttatcccttcactttcgccggagggaccaaggtggagatcaaac

SEQ ID NO: 3500 - DNA, 322 bp, Homo sapiens
  source 1..322: mol_type = other DNA
gacatccagatgacccagtctccttccaccctgtctgcatctgttggagacggaatcaccatcacttgccgggccagtcagagtattagtagctggttggcctggtatcagcagaaaccagggaaagcccctaaggtcctgatctataaggcgtctactttagaaagtggggtcccatcaaggttcagcggcagtggatctgggacagaattcactctcaccatcagcagcctgcagcctgatgattttgcaacttattactgccaacagtatagtagttcttcactcactttcggccctgggaccaaagtggatatcaaac

SEQ ID NO: 3501 - DNA, 325 bp, Homo sapiens
  source 1..325: mol_type = other DNA
gacatccagatgacccagtctccttccaccctgtctgcatctgtaggggacagagtcaccatcacttgccgggccagtcagagtattagtacctggatggcctggtatcagcagaaaccagggaaagcccctaagctcctgatctataaggcgtctaatttagagagtggggtcccatcaaggttcagcggcagtggctctgggacagaattcactctcaccatcagcggcctgcagcctgatgattttgcaacttatcactgccaacagtataatagtttcctcacgtacacttttggccaggggaccaaactggagatcaaac

SEQ ID NO: 3502 - DNA, 343 bp, Homo sapiens
  source 1..343: mol_type = other DNA
gacatcgtgatgacccagtctccagactccctggctgtgtctctgggcgagagggccaccatcaactgcaagtccagccagagcattttatacaactccaacaataagaactacttagcttggtaccagcagaagccaggacagcctcctaaactgatcatttactgggcatcgacccgggaatccggggtccctgaccgattcagtggcagcgggtctgcgacagatttcactctcaccatcagcagcctgcaggctgaagatgtggcagtttattactgtcagcaatattatagtactcctccgcacacttttggccaggggaccaagctggagatcaaac

SEQ ID NO: 3503 - DNA, 328 bp, Homo sapiens
  source 1..328: mol_type = other DNA
tcttctgagctgactcaggaccctgctgtgtctgtggtcttgggacagacagtcaaaatcacatgccaaggagacaacctcagaaagtattatgcaagttggtaccagcagaagccggggcaggcccctgttgttgtcatctatggtaaaaacgaccggccctcagggatcccagaccgattctctggctccacctcaggaaacacagcttccttgaccataactggggctcaggcagaagatgaggctgactattggtgtcagtcccgggacagcagtgatgaccattcttgggtcttcggcggagggaccaaactgaccgtcctag

SEQ ID NO: 3504 - DNA, 334 bp, Homo sapiens; identical to SEQ ID NO: 3105
  source 1..334: mol_type = other DNA

SEQ ID NO: 3505 - DNA, 337 bp, Homo sapiens
  source 1..337: mol_type = other DNA
gatattgtgatgactcagtctccactctccctgcccgtcacccctggagagccggcctccatctcctgcaggtctagtcagagtctcctacataatagtggatacaactatttgtcttggttcctgcagaggccagggcagtctccacagctcctgatctatttggcttctattcgggcctccggggtccctgacaggttcagtggcagtgggtcaggcacagattttacactgagaatcagcagagtggaggctgaggatgttggggtttattactgcatgcaaggtcaacaaactcctcctacttttggccaggggaccaagctggagatcaaac

SEQ ID NO: 3506 - DNA, 346 bp, Homo sapiens
  source 1..346: mol_type = other DNA
caggctgtgctgactcagccggcttccctctctgcatctcctggagcatcagccagtctcacctgcaccttgcgcagtgacatcaatgttggttccaacaggatatactggtaccagcagaagccagggagtcctccccactatctcctgagctacaaatcagacttagataaccagaagggctctggagtccccagccgcttctctggatccaaagatacttcggccaatgcagggctttttctcatctctgggctccagtctgaggatgaggctgactattactgtatgatttggcacaggaacgcttgggtgttcggcggagggaccaaactgaccgtcctag

SEQ ID NO: 3507 - DNA, 337 bp, Homo sapiens
  source 1..337: mol_type = other DNA
gatattctgatgactcagtctccgctttctctgcccgtcacccctggagagccggcctccatctcctgcaggtctggtcagagcctcctgcagagtagtggacacaattatttggattggtacctacagaagccagggcagtctccacagctcctgatctatttgggttctaatcgggcctccggggtccctgacaggttcagtggcagtgggtcaggcacagaatttacactgaaaatcagcagagtggaggctgaggatgttggggtttattactgcatgcaagctctacaaactcctcacacttttggccaggggaccaagctggagatcaaac

SEQ ID NO: 3508 - DNA, 325 bp, Homo sapiens
  source 1..325: mol_type = other DNA
cagtctgtgctgactcagccaccctcagtgtctgggacccccggccagtgggtcaccatctcttgttctggaagcagctccgacatcggaaataattatgtatactggtaccagcagctccctggaacggcccccaaactcctcatctacaagactaaaaagcgtccctcaggggtccctgaccgattctctggctccaagtttggctcctcagcctccctggccatcagtgggctccggtccgaggatgaggctgattattactgtgcagcatgggataacaggtcttgggtgttcggcagagggaccaagctgaccgtcctag

SEQ ID NO: 3509 - DNA, 322 bp, Homo sapiens
  source 1..322: mol_type = other DNA
gacatccagatgacccagtctccatcctccctgtctgcatctgtaggagacagagtcaccatcgcttgccgggcaagtcagagcgttagcagttatttgaattggtatcagcagaaaccagggaaagcccctaagctcctgatctatgctgcatccactctgcagagtggggtcccatcaaggttcagtggcagtggatctgggacagatttcactctcaccatcagcagtctgcaacctgaagattttgcaacttactactgtcaacaaagtgacagtctttctcggacgttcggccaagggaccaaggtggaaatcaaac

SEQ ID NO: 3510 - DNA, 313 bp, Homo sapiens
  source 1..313: mol_type = other DNA
gaaatagtgatgacgcagtctccaggcaccctgtctgtgtttccaggggaaaaagccaccctctcctgcagggccagtcagagtattagcaacaacttagcctggtaccagcaaaaacctggccaggctcccaggctcctcatctatggtgcatccaccagggccactgctatcccagccaggttcagtggcagtgggtctgggacagagttcactctcaccatcagcagcgtgcagtctgaagattttgcagtttattactgtcagcattatagggacaccttcggccaagggacacgactggacattaaac

SEQ ID NO: 3511 - DNA, 323 bp, Homo sapiens
  source 1..323: mol_type = other DNA
gacatccagatgacccagtctccttccaccctgtctgcatctgtaggagacagagtcaccatcacttgccgggccagtcagagtattagtaattggttggcctggtatcagcagaaaccagggaaagcccctaagctcctgatccatcaggcgtctagtttagaaagtggggtcccatcaaggttcagcggcagtgcatctgggacagaattcactctcaccatcagcagcctgcagcctgatgattttgcaacttattactgccaacagtataatagttattcttcatacacttttggccaagggaccaagctggagatcaa

SEQ ID NO: 3512 - DNA, 319 bp, Homo sapiens
  source 1..319: mol_type = other DNA
gaaattgtgttgacacagtctccagccaccctgtctttgtctccaggggaaagagccaccctctcctgcagggccagtcagagtattaacaacttcttagcctggtaccaacagaaacctggccaggctcccaggctcctcatctatgatgcatccaacagggccactggcatcccagccaggttcagtggcagtgggtctgggacagacttcactctcaccatcagcagcctagagcctgaagattttgcagtttattactgtcagcagtataataactggcccggttttggccaggggaccaagctggagatcaaac

SEQ ID NO: 3513 - DNA, 325 bp, Homo sapiens
  source 1..325: mol_type = other DNA
gaaatagtcatgacgcagtctccagccaccctgtctgtgtctccaggggaaagagccaccctctcctgcagggccagtcagagtgttggccgcgacttagcctggtatcagcacaaacctggccaggctcccaggctcctcgtctatggtgcatccaccagggccactggtatcccagccaggttcagtggcagtgggtctgggacagagttcactctcaccatcagcagcctgcagtctgaggattttgcactttattactgtcagcaatataataactggcctccggccaccttcggccaagggacacgactggacattaaac

SEQ ID NO: 3514 - DNA, 340 bp, Homo sapiens
  source 1..340: mol_type = other DNA
gacttcgtgatgacccagtctccagactccctggctgtgtctctgggcgagagggccaccatcaactgcaggtccagtcagagtgttttctacagttccaacgaaaagaactacttagcttggtaccagcagaaaccaggacagcctcctaagttgctcatttactgggcatctacccgggaatccggggtcccagaccgattcagtggcagcgggtctgggacagatttcactctcaccatcagcagcgtgctgcctgaagatgtgggagtttattactgtcagcaatattatgatactcctcggacgttcggccaagggaccaaggtggaaatcaaac

SEQ ID NO: 3515 - DNA, 337 bp, Homo sapiens; identical to SEQ ID NO: 3491
  source 1..337: mol_type = other DNA

SEQ ID NO: 3516 - DNA, 324 bp, Homo sapiens
  source 1..324: mol_type = other DNA
aaatagtgatgacacagtctccagccatgttgtctgtgtctcctggggaaagagccaccctctcctgcagggccagtcagaatattagaagtagcttagcctggtaccagcagaaacctggccaggctcccaggctcctcatctatggtgcgtccaccagggccactggtatcccagccaggttcagtggcggtgggtctggcacagacttcactctcaccatcagcagcctgcagtctgaagatgttgcagtttattactgtcagcagtataataattggcctccgatcactttcggccctgggaccaaactggatatccaac

SEQ ID NO: 3517 - DNA, 332 bp, Homo sapiens
  source 1..332: mol_type = other DNA
cagtctgtgctgattcagccatccgcagcgtctgggacccccgggcagagggtcaccatctcttgttctggaagcagctccaacatcggaaataatcctgtaaactggtaccaacagctcccaggaacggcccccaaactcctcatatatggtaataatagtcagcggccctcaggggtccctgaccgattctctggctccaagtctggcacctcagcctccctggccatcagcgggctccagtctgaggatgaggctgattattactgtgcagcatgggatgacagcctgagaatttgggtgttcggcggagggaccaagctgaccgtcct

SEQ ID NO: 3518 - DNA, 340 bp, Homo sapiens
  source 1..340: mol_type = other DNA
gacatcgtgatgacccagtctccagactccctggctgtgtctctgggcgagagggccaccatcagctgcaagtccagccagaatattttatacagcgacaacaataagaactacttagcctggtaccagcagaaaccaggacagcctcctaagttgctcctttactgggcatctgcccgggaattcggggtccctgaccgattcagtggcagcgggtctgggacagatttcactctcaccatcagcagcctgcaggctgaagatgtggcagtctattactgtcagcaatattatgcttatcccttcactttcgccggagggaccaaggtggagatcaaac

SEQ ID NO: 3519 - DNA, 325 bp, Homo sapiens
  source 1..325: mol_type = other DNA
gaaattgtgttgacacagtctccagccaccctgtctttgtctccaggggagagagccaccctctcctgcaaggccagtcagagtcttagcacttccttagcctggtaccaacagagacctggccagcctcccaggctcctcatctatgatgcatccaacagggccactggcatcccagccaggttcagtggcagtgggtctgggacagacttcactctcaccatcagcagcctagagcctgaggattttgcagtttattactgtcagcagcgtttcaactggcctccgattaccttcggccaagggacacgactggaaattaaac

SEQ ID NO: 3520 - DNA, 334 bp, Homo sapiens
  source 1..334: mol_type = other DNA
cagtctgccctgactcagcctgcctccgtgtctgggtctcctggacagtcgatcaccatctcctgcactggaaccagcagtggcgttgggagtgataaccttgtctcctggtatcaacagcacccagggaaagcccccaaactcatgatttttgagggcagtaagcggccctcaggggtttccaatcgcttctctggctccaagtctggcaccacggcctccctgacaatctctgggctccaggctgacgacgaggctgcatattactgctgctcatatgtacgtatttccagtattgtgttgtttggcggagggaccaaagtgaccgtcctag

SEQ ID NO: 3521 - DNA, 322 bp, Homo sapiens
  source 1..322: mol_type = other DNA
gacattcacatgacccagtctccatcctccctgtctgcttctgtaggagacagagtcaccatcacttgccgggctagtcagagtgttagcaactatttaaattggtatcagcagaaaccagggacagcccctaaactcctgatctatgctgcatccactttgcaaagtggggtcccatcaaggttcagtggcagtggatctgggacagatttcactctcaccatcagcagtctacaacctgaagattttgcaacttacttctgtcaacagagttacaatacccctaacacttttggccaggggaccaaactggagatcaaac

SEQ ID NO: 3522 - DNA, 340 bp, Homo sapiens
  source 1..340: mol_type = other DNA
gacatcgtgatgacccagtctccagactccctggctgtgtctctgggcgagagggccaccatcaactgcaagtccagccagaatgttttatacgactccaacaataagaactacttagcttggtaccagcagaaaccacgacagcctcctaagctgctcttttactgggcatctacccgggaatccggggtccctgaccgattcagtggcagcgggtctgggacagatttcactctcaccatcagcagcctgcaggctgaagatgtggcagtttattattgtcaacaatattatagtactccgtacacttttggccaggggaccaagctggagatcaaac

SEQ ID NO: 3523 - DNA, 322 bp, Homo sapiens
  source 1..322: mol_type = other DNA
gacatccagatgacccagtctccttccaccctgtctgcatctgtaggagacagagtcaccatcacttgccgggccagtcagagtattagtagctggttggcctggtatcagcagaaaccagggaaagcccctaagctcctgatctataagacgtctagtttagaaagtggggtcccatcaaggttcagcggcagtggatctgggacagaattcactctcatcatcagcagcctgcagcctgatgattctgcaacttattactgccaacactataatagttattcggggacgttcggccaagggaccaaggtggcaatcaaac

SEQ ID NO: 3524 - DNA, 334 bp, Homo sapiens
  source 1..334: mol_type = other DNA
cagtctgccctgactcagcctgcctccgtgtctgggtctcctggacagtcgatcaccatctcctgcactggaaccagcagtgacgttcgtagttataactatgtctcctggtaccaacagcacccaggcaaagcccccaaactcgtgatttatgatgtcagtgatcggccctcaggggtttctaatcgcttctctggctccaggtctggcaatacggcctccctgaccatctctgggctccaggctgaggacgaggctgattattactgcagctcatatagagacagcaacagtgttgtgatgttcggcggggggaccaagctggccgtcctag

SEQ ID NO: 3525 - DNA, 340 bp, Homo sapiens
  source 1..340: mol_type = other DNA
gacatcgtgatgacccagtctccagactccctggctgtgtctctgggcgagagggccaccatcagctgcaagtccagccagaatgttttatacagcgagaacaataagaactacttagcttggtaccagcagaaaccaggacagcctcctaagttgctcctttactgggcatctacccgggaatccggggtccctgaccgattcagtggcagcgggtctgggacagatttcactctcaccatcagcagcctgcaggctgaagatgtggcagtttattactgtcagcaatattatggttatcccttcactttcgccggagggaccaaggtggagatcaaac

SEQ ID NO: 3526 - DNA, 325 bp, Homo sapiens
  source 1..325: mol_type = other DNA
gaaatagtgatgacgcagtctccagccaccctgtctgtgtctccaggggaaagggccaccctcacctgcagggccagtcagagtgtttccaccaagttagcctggtaccaacagaaacctggccaggctcccaggctcctcatccatggtgcatccaccagggccactggtatcccagccaggttcagtggcagtgggtctgggacagagttcactctcaccatcagcagcatgcagcctgaagattttgcagtttattactgtcagcagtataataactggcctccggtcactttcggcggagggaccaaggtggagatcaaac

SEQ ID NO: 3527 - DNA, 319 bp, Homo sapiens
  source 1..319: mol_type = other DNA
tcctatgagctgacccagccaccctcggtgtcagtgtccccaggacagacggccaggatcacctgctctggagatgcattgccaaaccaatatgcctattggtaccagcagaagccaggccaggcccctgtgcaggtgatatataaagacagtgagaggccctcagggatccctgagcgattctctggctccagctcagggacaacagtcacgttgaccatcagcggagtccaggcagaggacgagggtgactattactgtcaatcagcagacagcagtggttgggtgttcggcggagggaccaagctgaccgtcctag

SEQ ID NO: 3528 - DNA, 337 bp, Homo sapiens
  source 1..337: mol_type = other DNA
gatattgtgatgacgcagactcccctctctctgtccgtcacccctggacagccggcctccatctcctgcaagtctagtcagagcctcctgcatactgatggaaagacctatttgttttggtatctgcacaagccaggccagtctccacagctcctgatctatgaagtttccaaccggttctctggagtgtcagataggttcagtggcagcgggtcagggacagatttcacactgaaaatcagccgggtggaggctgaggatcttggggtttattactgcatgcaaagtacacaacttcccatcaccttcggccaagggacacgcctggagattaaac

SEQ ID NO: 3529 - DNA, 333 bp, Homo sapiens
  source 1..333: mol_type = other DNA
cagtctgtgctgacgcagccgccctcagtgtctggggccccagggcagagggtcaccatctcctgcactgggaccagctccaacatcggggcaggttatgatgtccactggtatcagcagcttcccggagaagcccccaaactcctcatctataataccggttatcgcccctcaggggtccctgaccgaatctctggctccaagtctggcacttcggcctccctggccatcactgggctccagggtgaggatgaggctgattattactgccggtcctatgacggcagcctgagtggttatgtcttcggaactgggaccaaggtcaccgtccta

SEQ ID NO: 3530 - DNA, 337 bp, Homo sapiens
  source 1..337: mol_type = other DNA
gatattgtgatgacccagactccactctctctgtccgtcacacccggacagccggcctccatctcctgcaagtctagtcagagtctcctgcatagtgatggaaagacccatttgtattggttccagcagaggccaggccagcctccacagctcctgatctatgaactttccaatcggttctctggagtgccagataggttcagtggcagcgggtcagggacagatttcacactgaaaatcagccgggtggaggctgaggatgttggggtttattactgcatgcaaggtatacaacttcctcggacgttcggccaagggaccaaggtggaaattaaac

SEQ ID NO: 3531 - DNA, 331 bp, Homo sapiens
  source 1..331: mol_type = other DNA
cagactgtggtgacccaggagccatcgttctcagtgtcccctggagagacagtcacactcacttgtggcttgagctctggctcagtctctgctaacaactaccccagctggtaccagcagaccccaggccaggctccacgcacgctcatctacagcacaaacactcgctcttctggggttcctggtcgcttctctggctccatccttgggaacaaagctgccctcaccatcacgggggcccaggcagatgatgaatgttattattattgtgtgctgtatatgggtagtggcatttcggtattcggcggagggaccaagctgaccgtcctag

SEQ ID NO: 3532 - DNA, 334 bp, Homo sapiens
  source 1..334: mol_type = other DNA
cagtctgtgttgacgcagccgccctcagtgtctgcggccccaggacagacggtctccatctcctgctctggagccacctccaacattggggataattatgtatcctggtaccaacatctcccaggatcagcccccaaactcctcatctataaaaataataagcgaccctcagggattcctggccgattctctggctccaagtctggcacgtcagccaccctaaacatcaccgggctccagactggggacgaggccgattattattgcggaacatggaatagcggcctgagtgctggtcgggtattcggcggagggaccaagctgaccgtcctag

SEQ ID NO: 3533 - DNA, 319 bp, Homo sapiens
  source 1..319: mol_type = other DNA
gaaatagtgatgacgcagtctccagccaccctgtctgtgtctccaggggaaagagccaccctctcctgcagggccagtgagagtgttagcagccacttagcctggtaccagcacaaacctggtcagtctcccaggctcctcatttatggtgcatccaccagggccactggtgtcccagccaggttcagtggcagtgggtctgggacagagttcactctcaccatcagcagcctgcagtctgaagattttgcagtttattactgtcagcagtataataactggcccggttttggccaggggaccaagctggagatcaaac

SEQ ID NO: 3534 - DNA, 328 bp, Homo sapiens
  source 1..328: mol_type = other DNA
tcctatgtgctgactcagccaccctcggtgtcggtggccccaggaaagacggccaacataacctgtgggggaagcaacattggaagtaaaactgtgcactggtaccagcagaagccaggccaggtccctgtgctggtcgtctatgatgatagcgaccggccctcatcgatccctgagcgattctctggctccaactctgggaacacggccaccctgaccatcagcacggtcgaggccggggatgaggccgactattactgtcaggtgtgggaaagtagtagtgagcctcatgtggttttcggcggggggaccaagctgaccgtcctag

SEQ ID NO: 3535 - DNA, 325 bp, Homo sapiens
  source 1..325: mol_type = other DNA
gaaatagtgatgacacagtctccagccaccctgtctgtgtctcctggggaaagagccaccctctcctgcagggccagtcagagtgttagaagtaacttagcctggtaccagcagaaacctggccaggctcccaggctcctcatctatggtgcctctaccagggccactggtatcccagccaggttcagtggcagtgggtctgggacagacttcactctcaccatcagcagcctgcagtctgaagattttgcagtttattactgtcagcagtatgataactggcctccgatcactttcggccctgggaccacagtggatatccaac

SEQ ID NO: 3536 - DNA, 329 bp, Homo sapiens; identical to SEQ ID NO: 3443
  source 1..329: mol_type = other DNA

SEQ ID NO: 3537 - DNA, 325 bp, Homo sapiens
  source 1..325: mol_type = other DNA
gacatccagatgacccagtctccttccaccctgtctgcatctgttggagacagagtcaccatcacttgccgggccagtcagagtattaataggtggttggcctggtatcagcagaaacctgggaaagcccctgagctcctgatccatcaggcgtctactttagagaatggggtcccatcaaggttcagcggcagtggatctgggacagaattcactctcaccatcagcagcctgcagcctgatgattttgcaacttattactgccaacaatataatagttatgcttcgtacacttttggccaggggaccaagctggagatcaaac

SEQ ID NO: 3538 - DNA, 325 bp, Homo sapiens
  source 1..325: mol_type = other DNA
gaaatagtgatgacgcagtctccagccaccctgtctgtgtctccaggggaaagagccaccctctcctgcagggccagccagagtgttagcagcagctccttagcctggtaccagcagaaacctggccaggctcccaggctcctcatctatgatgcttccagcagggccactggcatcccagacaggttcagtggcagtgggtctgggacagacttcactctcaccatcagcggactggagcctgaagattttgcagtctattactgtcagcactatggtagctcatctctcactttcggcggagggaccaaggtggagatcaaac

SEQ ID NO: 3539 - DNA, 337 bp, Homo sapiens
  source 1..337: mol_type = other DNA
gacatcgtgatgacccagtctccagactccctggctgtgtctctgggcgagagggccaccatcaactgcaagtccagccagagtgttttatacgactccaacaataagaactacttagcttggtaccagcagaaaccaggacagcctcctaagttactcatttactgggcatctactcgggaatccggggtccctgaccgattcagtggcagcgggtctgggacagatttcactctcaccatcagcagcctgcaggctgaagatgtggcagtttattactgtcaacagtattacagtactccttctttcggccccgggacgaaagtggatgtcaaac

SEQ ID NO: 3540 - DNA, 346 bp, Homo sapiens
  source 1..346: mol_type = other DNA
caggctgtgctgactcagccggctgccctctctgcatctcctggagcgtcagccagtctcacctgcaccttgcgcagtgacatcagtgttggtagccacaggatatactggtaccagcagaagccagggagtcctccccagtatctcctgaggtacaaatcagactcggataagcagcagggctctggagtccccagtcgcttctctggatccaaagctgcttcggccaatgcaggaattttgctcatctctgggctccactctgacgatgaggctgactattactgtatgatttggcacagtaacgcttgggtgttcggcggagggaccaagctgaccgtcctag

SEQ ID NO: 3541 - DNA, 322 bp, Homo sapiens
  source 1..322: mol_type = other DNA
gacatccagatgacccagtctccatcctccctgtctgcatctgtaggagacagagtcaccatcacttgccaggcgagtcaggacattagaaatcatttaaattggtatcaacaaaaaccagggaaagcccctaagctcctgatcttcgatggttccaatttgcagacaggggtcccatcaaggttcggtgggagtggatctgggacagattttagcttcaccatcagtagcctgcagcctgaagatattgcaacattttactgtcagcagaatcatattctcccggggacgttcggccaagggaccaaggtggaaatcaaac

SEQ ID NO: 3542 - DNA, 329 bp, Homo sapiens
  source 1..329: mol_type = other DNA
cagtctgtgctgactcagacgccctcagcgtctgggacccccgggcagagggtcaccatctcttgttctggaagcagctccaacatcggaagtaatactgtaaattggtaccagcagctcccaggaacggcccccaaactcctcatctatagtaatcatcagcggccctcaggggtccctgaccgattctctggctccaagtctggcacctcagcctccctggccatcagtgggctccagtctgaggatgaggctgattattactgtgcagcatgggatgacagcctgaagggttgggtgttcggcggagggaccaagctgaccgtcct

SEQ ID NO: 3543 - DNA, 337 bp, Homo sapiens
  source 1..337: mol_type = other DNA
gacatcgtgatgacccagtctccagagtccctggctgtgtctctgggcgagagggccaccatcaactgcaagtccagccagagtcttttatacagctccaacaaaaagaactacttagcttggtattcgcagaaaccagggcagcctcctaagctgctcgtttactgggcatctaaccgggagtccggggtccctgaccgattcagtggcggcgggtctgggacagatttcactctcaccatcagcagcctgcaggctgaagatgtggcagtttattactgtcagcaatattatggtagtccgcacacttttggccaggggaccaagctggagatca

SEQ ID NO: 3544 - DNA, 325 bp, Homo sapiens
  source 1..325: mol_type = other DNA
gacatccagatgacccagtctccttccaccctgtctgcatctgttggagacagagtcaccatcacttgccgggccagtcagaatattattaggtggttggcctggtatcagcagaaacctgggaaagcccctaagctcctgatccatcaggcgtctagtttagagagtggggtcccatcaaggttcagcggcagtggatctgggacagatttcactctcaccatcagcagcctgcagcctgatgattttgcaacttattattgccaacagtataatagttatgcatcgtacacttttggccaggggaccaagctggagatcaaac

SEQ ID NO: 3545 - DNA, 319 bp, Homo sapiens
  source 1..319: mol_type = other DNA
gacatagtgatgacgcagtctccagccaccctctctgtgtctccaggggaaagagtcaccctctcctgcagggccagtcagagtattagcagcaacttagcctggtaccagcggaaacctggccaggctcccaggctcctcatctatggtgcatccaccagggccactgatatcccagccaggttcagtggcagtgggtctgggacagagttcactctcaccatcagcagcctgcagtctgaagattttgcagtttattcctgtcagcagtataataactggccttctttcggcggagggaccaaggtggagatcaaac

SEQ ID NO: 3546 - DNA, 322 bp, Homo sapiens
  source 1..322: mol_type = other DNA
gacatccagatgacccagtctccatcctccctgtctgcatctgtaggagacagagtcaccatcacttgccaggcgagtcaggacattagaaatcatttaaattggtatcaacagaaaccagggaaagcccctaagctcctgatcttcgatgcttccaatttgcaaacaggggtcccgtcaaggttcggtggaagtggatctgggacagattttactttcaccatcagcagcctgcagcctgaagatattgcaacatattactgtcaacagtgtcataatctcccggggaccttcggccaagggaccaaggtggaaatcaaac

SEQ ID NO: 3547 - DNA, 322 bp, Homo sapiens
  source 1..322: mol_type = other DNA
gacatccagatgacccagtctccttcccccttgtctgcttctgtgggagacagagtcaccatcacttgccgggccagtcagagtattgataagtggttggcctggtatcagcagaaaccagggaaagcccctaaactcctgatctataaggcgtcttctttacaaagtggggtcccatcaaggttcagcggcagtggatctgggacagaattcactctcaccattagcagcctgcagcctgatgattttgcaacttattactgccaacagtatagcagttatttagggacgttcggccaagggaccaaggtggagatcaaac

SEQ ID NO: 3548 - DNA, 329 bp, Homo sapiens
  source 1..329: mol_type = other DNA
cagtctgtggtgactcaggcaccctcagcgtctgggacccccgggcagagggtcaccatctcttgttctggaagccgctccaacatcggaagtaatactgtaaactggtaccaacagctcccaggaacggcccccaaactcctcatctatggtaatcatcagcggccctcaggggtccctgaccgattctctggctccaagtctggcacctcagcctccctggccgtcagtgggctccagtctgaggatgaggctgattattactgtttaacatgggataacggcctgaaggcttgggtgttcggcggagggaccaagctgaccgtcct

SEQ ID NO: 3549 - DNA, 340 bp, Homo sapiens
  source 1..340: mol_type = other DNA
gacatcgtgatgacccagtctccagactccctggctgtgtctctgggcgagagggccgccatcaactgcaagtccagccagagtgttttattcgactccaacgggaagaactacttagcttggtaccagcagagaccacgacagcctcctaagctgctcatttactgggcaaacaaccgggaatccggggtccctgaccgattcactggcagcgggtctgggacagatttcactctcaccatcagtagcctgcaggctgaagatgtggcagtttattactgtcagcaatattatagtactccattcactttcggccctgggaccaaagtggatatcaaac

SEQ ID NO: 3550 - DNA, 322 bp, Homo sapiens
  source 1..322: mol_type = other DNA
gacatccagatgacccagtctccttccaccctgtctgcatctgtaggagacagagtcaccatcacttgccgggccagtcagagtattagttcctggttggcctggtatcagcagaaaccagggaaagcccctaaactcctgatctataaggcgtctagtttagagaatggggtcccatcaaggttcagcggaagtggatctgggacagagttcactctcaccatcagcagcctgcagcctgatgattttgcaagttattactgccaacactatgacagttattcggggacgttcggccaagggaccaaggtggagatcaaac

SEQ ID NO: 3551 - DNA, 322 bp, Homo sapiens
  source 1..322: mol_type = other DNA
gacatccagatgacccagtctccatcctccctgtctgcatctgtgggagacagagtcaccatcacttgccaggcgagtcaggacattagaaatcatttaaattggtatcaacagaaaccagggaaagcccctaagctcctgatcttcgatgcttccaatttggaaacaggggtcccatcaaggttcggtggcagtggatctgggacagattttagtttcaccatcactagcctgcagcctgaagatattgcaacattttactgtcaacagaatcataatctcccggggacgttcggccaagggaccaaggtggaaatcaaac

SEQ ID NO: 3552 - DNA, 337 bp, Homo sapiens
  source 1..337: mol_type = other DNA
gatattgtgatgacccagactccactctctctgtccgtcacccctggacagccggcctccatctcctgtaagtctagtcagagcctcctgcatagtgatggaaagacctatttgtattggtacctgcagaagccaggccagcctccacagctcctgatctatgaagtttccaaccggttctctggagtgccagataggttcagtggcagcgggtcagggacagatttcacactgaaaatcagccgggtggaggctgaggatgttggggtttattactgcatgcaaagtatacagcttccggggacttttggccaggggaccaagctggagatcaaac

SEQ ID NO: 3553 - DNA, 337 bp, Homo sapiens
  source 1..337: mol_type = other DNA
gatattgtgatgactcagtctccactctccctgcccgtcacccctggagagccggcctccatctcctgcaggtctagtcagagcctcctgcatagtaatggatacaactatttggattggtacctgcagaagccagggcagcctcctctgctcctgatctatttgggttctactcgggcctccggggtccctgacaggttcagtggcagtggatcaggcacagattttacactgaagatcagcagagtggaggctgaggatgttggggtttattactgcatgcaagctctacaaaatactctgacgttcggccaagggaccaaggtggaaatcaaac

SEQ ID NO: 3554 - DNA, 325 bp, Homo sapiens
  source 1..325: mol_type = other DNA
gaaattgttttgacacaatctccagccaccctgtctttgtctccaggggaaagagccaccctctcctgcagggccagtcagagtcttagtagttccttagcctggtaccaacagactcctggccaggctcccaggctcctcatttatgatgcatccaagagggccactggcatcccagccaggttcagtggcagtgggtctgggacagacttcactctcaccatcagcagcctcgagcctgaagattttgcagtttattactgtcagcagtgtggcaactggcctccgatcaccttcggccaagggacacgactggatattaaac

SEQ ID NO: 3555 - DNA, 331 bp, Homo sapiens
  source 1..331: mol_type = other DNA
cagtctgtgctgactcagccaccctctgcgtctgggacccccgggcagagggtcaccatctcttgttcaggaagcaaatccaacttcggacgaaatactgcaaactggtaccagcagttcccaggagcggcccccaaactcctcatccatactaataatcagcggccctcgggggtccctgaccgattctctggctccaactctggcacctcagcctccctggccatcagtggcctccagtctgaagatgaggctcattattactgtgcagtatgggatgacagcctgaatggtccggtgttcggcggagggaccaagctgaccgtcctag

SEQ ID NO: 3556 - DNA, 322 bp, Homo sapiens
  source 1..322: mol_type = other DNA
gacatccagatgacccagtctccatcctccctgtctgcatctgtaggagacagagtcaccatcgcttgccaggcgagtcaggacattaggaagtctttaaattggtatcagcagaaaccaggaaaagcccctaaactcctgatctacgatgcatccaaattggtgacaggggtcccatcaaggttcagtggaagtggctctgggacagattttactttcaccatcagcagcctgcagcctgaagatattgcgacatattactgtcaacagtatcataatctcccgatcaccttcggccaagggacacggctggacattaaac

SEQ ID NO: 3557 - DNA, 337 bp, Homo sapiens
  source 1..337: mol_type = other DNA
gatgttgtgatgactcagtctccactctccctgcccgtcacccttggacagccggcctccatctcctgcaggtctagtcaaagcctcgtatacagtgatggaaacacctacttgaattggtttcagcagaggccaggccaacctccaaggcgcctaatttataaggtttctaatcgggactctggggtcccagacagattcagcggcagtgagtcaggcactgatttcacactgaaaatcagcagggtggaggctgaggatgttggggtttattactgcatgcaaggtacacagtggccgtatacctttggccaggggaccaagctggagatcaaac

SEQ ID NO: 3558 - DNA, 340 bp, Homo sapiens
  source 1..340: mol_type = other DNA
gacatcgtgatgacccagtctccagactccctggctgtgtctctgggcgagagggccaccatcaactgcaagtccagccagaatgttttatacgactccaacaataagaattacttagcttggtaccagcagaaaccgcgacagcctcctaagttgctcttttactgggcatctacccgggaatccggggtccctgaccgattcagtggcagcgggtctgggacagatttcactctcaccatcaacagcctgcaggctgaagatgtggcagtttattattgtcaacagtattatgctactccgtacacttttggccaggggaccaagctggagatcaaac

SEQ ID NO: 3559 - DNA, 322 bp, Homo sapiens
  source 1..322: mol_type = other DNA
gacatccagttgacccagtctccatccctcctgtctgcatctgttggagacagagtcaccatcacttgccgggccagtcaggaccttggcaagtatttagcctggtatcaggagataccagggaaagtccctaatttactcatctatgatgtatccactttgcaaagtggggtcccatcaaggttcagcggcagtggatctgagacacacttcactctcacaatcagcagcctgcagcctgaggactgtgcaacttattactgtcaacaacttcacacttatcccatcatcttcggccaagggacacgactggagattaaac

SEQ ID NO: 3560 - DNA, 329 bp, Homo sapiens; identical to SEQ ID NO: 3443
  source 1..329: mol_type = other DNA

SEQ ID NO: 3561 - DNA, 322 bp, Homo sapiens
  source 1..322: mol_type = other DNA
gacatccagatgacccagtctccatcctccctgtctgcatctgtaggagacagagtcaccattacttgccgggcaagtcagagtattggcaccaatttaaattggtatcaacagaaaccagggaaagcccctaagttcctgatctatgctgcatccaatttgcaaagtggggtcccatccacgttcagtggcagtggatctgggacagatttcactctcaccatcagcagtctgcaacctgaagattttgcaatgtactactgtcaacagagttacagtttccccacgacgttcggccaggggaccaaggtggaaatcaaac

SEQ ID NO: 3562 - DNA, 340 bp, Homo sapiens
  source 1..340: mol_type = other DNA
gacatcgtgttgacccagtctccagacttcctggctgtgtctctgggcgagagggccaccatcaactgcaagtccagccagagtgttttgtacaactccaataaaaagaactacttggcttggtaccagcaaaaaccaggccagcctcctaaattgctcatttcctgggcgtcttcccgggaatccggtgtccctgaccggttcagtggcagcgggtctgggacagacttcactctcaccatcagcagcctgcaggctgaagatgtggcagtttattactgtcagcagtactatgatgatgcattcactttcggccctgggaccaaagtggaaatcaaac

SEQ ID NO: 3563 - DNA, 321 bp, Homo sapiens
  source 1..321: mol_type = other DNA
tagtgatgacgcagtctccagccaccctgtctgtgtctccaggggacagagccgtcttctcctgcagggccagtcagagtattagttacgacttagcctggtaccagcagaagcctggccaggctcccaggctcctcatctatggtgcttccaccagggccgctggtgtcccggccaggttcagtgccagtgggtctgggacagagttcactctcaccatcagcaccatccagtctgacgactttgcagtttatttctgtcagcagtataataactggcctccgctcactttcggcggagggaccaaggtggagatcaaac

SEQ ID NO: 3564 - DNA, 331 bp, Homo sapiens
  source 1..331: mol_type = other DNA
cagtctgcgctgactcagccaccctcagtgtctgggacccccgggcagagggtcatcatctcttgttctggaagtagctccaacatcggaactaatactgtaaactggtaccagcaactcccaggaacggcccccaaactcctcatttatagtaataatcagtggccctcaggggtccctgaccgattctctggctccaagtctgacacctcagcctccctggccatcagtgggctccagtctgaggatgaggcagattattattgtgcagcatgggatgacagtctcaatgcttgggtgttcggcggagggaccaaggtgaccgtcttag

SEQ ID NO: 3565 - DNA, 320 bp, Homo sapiens
  source 1..320: mol_type = other DNA
gacatccagatgacccagtctccatcctccctgtctgcctctgttggagacagagtcaccctcacttgtcgggcaagtcagagcattaggaattctttaaattggtatcagcaaaaaccagggaaagccccttccttcctgatctatgctgcgtccaatttgcagagtggagtcccgtcaaggttcagtggcagtggatctgggacagattttactctcaccatcaccggtctacaacctgaggattttgcaacttactactgtcaacagagtcactctctcccgctcactttcggcggagggaccaaggtggaaatcaa

SEQ ID NO: 3566 - DNA, 325 bp, Homo sapiens
  source 1..325: mol_type = other DNA
gaaatagtgatgacgcagtctccagccaccctgtctgtgtctccaggtgaaagagtcaccctctcctgcagggccagtcagagtgtcagcagcaacttagcctggtaccagcagaaaccaggccaggctcccaggctcctcatctatggtgcaaccaccagggccactggtatcccagccaggttcagtggcagtgggtctgggacagagttcactctcaccatcagcagcctgcagtctgaagattttgcagtttattactgtcagcagtctaataactggcctccgctcactttcggcggagggaccaaggtggagatcaaac

SEQ ID NO: 3567 - DNA, 346 bp, Homo sapiens
  source 1..346: mol_type = other DNA
caggctgtgctgactcagccggcttccctctctgcatctcctggagcatcagccagtctcacctgcaccttgcgcagtgacatcaatcttggtacctacagaatatactggtaccagcagaagccagggagtcctccccagtatctcctgaggtacaaatcagactcagataagcagcagggctctggagtccccagccgcttctctggatccaaagatgcttcggccaatgcagggattttactcatctctgggctccagtctgaggatgaggctgactattactgtatggtttggcacagcagcgcttgggtgttcggcggagggaccaagctgaccgtcctag

SEQ ID NO: 3568 - DNA, 340 bp, Homo sapiens
  source 1..340: mol_type = other DNA
gacatcgtgatgacccagtctccagactccctggctgtgtctctgggcgagagggccaccatcagctgcaagtccagccagaatgttttattcagcgacaacaataagaattacttagcttggtaccagcagaaaccaggacagcctcctaagttgctcctttactgggcatctacccgggaatccggggtccctgaccgattcagtggcagcgggtctgggacagatttcactctcaccatcagcagcctgcaggctgctgacgtggcagtctattactgtcagcaatattatgcttatcccttcactttcgccggagggaccaaggtggagatcaaac

SEQ ID NO: 3569 - DNA, 325 bp, Homo sapiens
  source 1..325: mol_type = other DNA
gacatccagatgacccagtctccatcctccctgtctgcatctgtaggagacagagtcaccatcacttgccaggcgagtcaggacattagcaactatttaaattggtatcagcaaaaaccagggaaagcccctcaactcctgatctacgatgcatccaatttggaaacaggggtcccatcaaggttcagtggaagtggatctgggacatattttactttcaccatcagcagcctgcagcctgaagattttgcaacatattactgtcaacagtatgataatctcctctcgatcaccttcggccaagggacacgactggagtttaaac

SEQ ID NO: 3570 - DNA, 325 bp, Homo sapiens
  source 1..325: mol_type = other DNA
gaaattgtgttgacgcagtctccaggcaccctgtctttgtctccaggggaaagagccaccctctcctgcagggccagtcagagtgttaggagcagctacctagcctggtaccagcagaaacctggccaggctcccaggctcctcatctatggtgcatccagcagggccactggcatcccagacaggttcagtggcagtgggtctgggacagacttcagtctcaccatcagcagactggagcctgaagattttgcagtgtattactgtcagcagtatggtaattcacctcagacttttggccaggggaccaagctggagatcaaac

SEQ ID NO: 3571 - DNA, 325 bp, Homo sapiens
  source 1..325: mol_type = other DNA
gaaatagtgatgacgcagtctccagccaccctgtctgtgtctccaggggaaagagccaccctctcctgtagggccagtcagagtgttagcagcgacttagcctggtaccagcagaaacctggccagtctcccaggctcctcatctatggtgcatccaccagggccactggtatcccagccaggttcagtggcagtgggtctgggacagagttcactctcaccatcagcagcctgcagtctgaagattttgcagtttattactgtcagcagtataataactggcctccgctcactttcggcggagggaccaaggtggagatcaaac

SEQ ID NO: 3572 - DNA, 322 bp, Homo sapiens
  source 1..322: mol_type = other DNA
gacatccagatgacccagtctccttccaccctgtctgcatctgtaggagacagagtcaccatcacttgccgggccagtcagagtattagtagctggttggcctggtatcagcagaaaccagggaaagcccctaagatcttgatctataaggcgtctagtttagaaagtggggtcccatcaaggttcagcggcagtggatctgggacagaattcactctcaccatcagcagcctgcagcctgatgattttgcaacttattactgccaacactataatagttattctcggacgttcggccaagggaccaaggtggaaatcaaac

SEQ ID NO: 3573 - DNA, 319 bp, Homo sapiens
  source 1..319: mol_type = other DNA
gatatagtgatgacgcagtctccagccaccctgtctgtgtctccaggggaaagagccaccctctcctgcagggccagtgagagtatcagcagccacttagcctggtaccagcagaaacctggccaggctcccaggctcctcatctttgatgcatccaccagggccactggtatcccagccaagtttagtggcagtgggtctggaagagagttcactctcaccatcagcagcctgcagtctgacgattttgcagtttattactgtcagcagtataataactggccttctttcggcggagggaccaaggtgaagatcaaac

SEQ ID NO: 3574 - DNA, 331 bp, Homo sapiens
  source 1..331: mol_type = other DNA
cagtctgccctgactcagcctccctccgcgtccgggtctcctggacagtcagtcaccatctcctgcactggaaccagcagtgacgttggtgcttatgactatgtctcctggtaccaacaacacccaggcaaagcccccagactcataatttatgaggtcagtaagcggccctcaggggtccctgatcgtttctctggctccaagtctggcaacacggcctccctgaccgtctctgggctccaggatgaggatgaggctgactattactgcagctcatatgccggcaacaacaattccctattcggcggagggaccaaggtcaccgtcctag

SEQ ID NO: 3575 - DNA, 324 bp, Homo sapiens
  source 1..324: mol_type = other DNA
aaactgtgttgacgcagtctccaggcaccctgtctttgtctccaggggaaagagccaccctctcctgcagggccagtcagagtgtcaccagtaattatttagtctggtaccagcagaagactggccaggctcccagagtcctcatctatggtgcatccaccagggccactggcatcccagacaggttcagtggcagtgggtctgggacagacttcactctcaccatcaccagactggagcctgaagattttgcagtgtattactgtcagcagtatggtaactcactttacacttttggccaggggaccaagctggagatcaaac

SEQ ID NO: 3576 - DNA, 322 bp, Homo sapiens
  source 1..322: mol_type = other DNA
gacatccagatgacccagtccccatcctccctgtctgcatctgtaggagacagagtcaccatcacttgccgggcgagtcaggacattagcaattatttagcctggtatcagcagaaaccagggaaagttcctaaggtcctgatctatgctgcatccactttgcaatcaggggtcccatctcggttcagtggcagtggatctgggacagatttcactctcaccatcagcagcctgcagcctgaagatgttgcaacttattactgtcaaaagtataacagtgactcgggaacgttcggccaagggaccaaggtggaaatcaaac

SEQ ID NO: 3577 - DNA, 337 bp, Homo sapiens
  source 1..337: mol_type = other DNA
gacatcgtgatgacccagtctccagactccctggctgtgtctctgggcgagagggccaccatcaactgcaagtccagccagagtgttttattcagctccaacaataagaactacttagcttggtaccagcagaaaccaggacagcctcctaagctgctcatttactgggcatctacccgggaatccggggtccctgaccgattcagtggcagcgggtctgggacagatttcactctcaccatcagcagcctgcaggctgaagatgtggcagtttattactgtcagcaatattatagtactcctcccactttcggcggagggaccaaggtggagatca

SEQ ID NO: 3578 - DNA, 322 bp, Homo sapiens
  source 1..322: mol_type = other DNA
gacatccagatgacccagtctccttccaccctgtctgcatctgtaggtgacagagtcaccatcacttgccgggccagtcagagtattagtaactggttggcctggtaccagcagaaaccacggaaagcccctaagctcctgatctataaggcgtctagtttagaaagtggggtcccatcaaggttcagcggcagtggatctgggacagaattctctctcaccatcagcagcctgcagcctgatgattttgcaacttattactgccaacagtatactacttattctcagacgttcggccaagggaccaaggtggaaatcaaac

SEQ ID NO: 3579 - DNA, 340 bp, Homo sapiens
  source 1..340: mol_type = other DNA
cagcttgtgctgactcaatcgccctctgcctctgcctccctgggagcctcggtcaagctcacctgcactctgagcagtgggcacagcagctacgccatcgcatggcatcagcagcagccagagaagggccctcggtacttgatgaagcttaacagtgatggcagccacagcaagggggacgggatccctgatcgcttctcaggctccagctctggggctgagcgctacctcaccatctccagcctccagtctgaggatgaggctgactattactgtcagacctggggcactggcatcccccttgctgtgttcggaggaggcacccagctgaccgtcctcg

SEQ ID NO: 3580 - DNA, 322 bp, Homo sapiens
  source 1..322: mol_type = other DNA
gacatccagatgacccagtctccatcctccctgtctgcatctgtaggagacagagtcaccatcacttgccgggcaagtcagagcattaggacctatttaaattggtatcaacagaaaccagggaaagcccctaagtccctgatctatgctgcatccagtttgcaaagtggggtcccatcaaggttcagtggcagtggatctgggacagagttcaatctcaccatcagcagtctggaacctgaagattttgcaagttactactgtcaagagagtaacagttccccattcactttcggccctgggaccaaagtcgatatcaaac

SEQ ID NO: 3581 - DNA, 329 bp, Homo sapiens
  source 1..329: mol_type = other DNA
cagtctgccctgactcagcctccctccgcgtccgggtctcctggacagtcagtcaccatctcctgcactgaaaccagcagtgacgttggtggtcgttactatgtctcctggtacctacaacaccccggcaaagcccccaaactcttaatttatgaggacaggaagcggccctcaggggtccctgatcgcttctctggctccaagtctggcaacgcggcctccctgaccgtctctgggctccaggctgaggatgaggctgattattactgcagctcatatgcaggcagcgacaatcaaaaattcggcggagggaccaagctgaccgtcct

SEQ ID NO: 3582 - DNA, 320 bp, Homo sapiens
  source 1..320: mol_type = other DNA
gacatccagatgacccagtctccatcctccctgtctgcatctgtaggagacagagtcaccatcacttgccgggcaagtcagaacattaacagagatttaaattggtatcaacagaaaccagggaaagcccctaagttcctggtctatcttggttccaatttgcaaggtggggtcccatcaaggttcagtggcagtggatctgggacagatttcactctcaccatcagtagtctgcagcctgaagactttgcaacttactactgtcaacagagtttcgctttcccgatcaccttcggcggagggacgaaggtggagatcaa

SEQ ID NO: 3583 - DNA, 340 bp, Homo sapiens
  source 1..340: mol_type = other DNA
gacatcgtgatgacccagtctccagactccctgactgtgtctctgggcgagagggccaccatcaactgcaagtccagccagagtgttttcttcgaccgcaccaatcagaactatttagcttggttccagcagaaaccaggacagtctcctaaactactcattttctgggcatcttcgcgagaatccggggtccctgaccgattcagtggcagcgggtctgggacagatttcactctcaccatcggcagcgtgcaggctgaagatgtggcaatttattactgtcagcactattatgattttccgtacacttttggccaggggaccaggctggagatcaaac

SEQ ID NO: 3584 - DNA, 328 bp, Homo sapiens
  source 1..328: mol_type = other DNA
gaaattgttttgacacagtctccagtcaccctgtctttgtctccaggggaaagagccaccctctcctgcagggccagtcagagtgttagctactacttagcctggtaccaacagaaacctggccaggctcccaggctcctcatctatgatgcatccaagagggccactgacatcccagccaggttcagtggcagtgggtctgggacagacttcactctcaccatcagcagcctggagcctgaagattttgcagtttattactgtcagcagcgtaccagctggcctctggagtattcttttggccaggggaccaagctggagatcaaac

SEQ ID NO: 3585 - DNA, 322 bp, Homo sapiens
  source 1..322: mol_type = other DNA
gacatccagatgacccagtctccttccaccctgtctgcatctgtaggagacagagtcaccatcacttgccgggccagtcagagtattgatagctggttggcctggtatcagcagaaaccagggaaagcccctaatctcctgatctataaggcgtctagtctacaatctggggtcccatcaaggttcagcggcagtggatctgggacaggattcactctcaccatcagcagcctgcagcctgatgattttgcaacttattactgccaacactataatagttattctcggacgttcggccaagggaccaaggtggaaatcaaac

SEQ ID NO: 3586 - DNA, 325 bp, Homo sapiens
  source 1..325: mol_type = other DNA
gacatccagatgacccagtctccttccaccctgtctgcatctgtcggagacagagtcattatcacttgccgggccagtcagaatattaaaaattggttggcctggtatcagcagtcaccagggaaagcccctaaactcctcatctatcaggcgtctagtttacaaagtggggtcccatcaaggttcagcggcagtggatctgggacagaattcactctcaccatcagcagcctgcagcccgatgattttgcaacttattactgtcaacagtatagtacttattctcaggtcactttcggccctgggaccaaagtggatatcaaac

SEQ ID NO: 3587 - DNA, 322 bp, Homo sapiens
  source 1..322: mol_type = other DNA
gaaatagtgatgacgcagtctccagccaccctgtctgtgtctccaggggaaagagccaccctctcctgcagggccagtcagagtgttagcagcagcttagcctggtaccagcagaaacctggccaggctcccaggctcctcatctatggtgcatccaccagggccactggtatcccagccaggttcagtggcagtgggtctgggacagagttcactctcaccatcagcagcctgcagtctgaagattttgcagttttttactgtcagcagtataacaactggcctcggacgttcggccaagggaccaaggtggaaatcaaac

SEQ ID NO: 3588 - DNA, 337 bp, Homo sapiens
  source 1..337: mol_type = other DNA
gatattgtgatgactcagtctccactctccctgcccgtcacccctggagagccggcctccatctcctgcaggtctagtcagagcctcctgcatagtaatggatacaactatttggattggtacctgcagaagccagggcagtctccacagctcctgatctatttgggttctaatcgggcctccggggtccctgacaggttcagtggcagtggatcaggcacagattttacactgaaaatcagcagagtggaggctgaggatgttggggtttattactgcatgcaagctctacaaacttcgctcactttcggcggagggaccaaggtggagatcaaac

SEQ ID NO: 3589 - DNA, 322 bp, Homo sapiens
  source 1..322: mol_type = other DNA
tcctatgagctgacacagccatcctcagtgtcagtgtctccgggacagacagccaggatcacctgctcaggaaatgtactggcaaaaaaatatgctcggtggttccagcagaagccaggccaggcccctgtgttgttgatttatcaagacactgagcggccctcagggatccctgagcgattctccggctccagctcggggaccacagtcaccttgaccatcagcggggcccaggttgaagatgaggctgactattactgttactctgtggctgacaggactgttaggtttttcggcggagggaccaagctgaccgtcctag

SEQ ID NO: 3590 - DNA, 330 bp, Homo sapiens
  source 1..330: mol_type = other DNA
cagtctgccctgactcagcctgcctccgtgtctgggtctcctggacagtcgatcaccatctcctgcactggaaccagcagtgacgttggtggttataagtttgtctcctggtaccaacagcacccagccaaagcccccaaactcatgatttatgaggtcagtaagcgggcctcaggggtttctaatcgcttctctggctccaagtctggcaacacggcctccctgaccatctctgggctccaggctgaggacgaggctgattattactgcagctcatatacaagcagcggcatttgggtgttcggcggagggaccaagctgaccgtccta

SEQ ID NO: 3591 - DNA, 325 bp, Homo sapiens
  source 1..325: mol_type = other DNA
gaaatagtgatgacgcagtctccagccaccctgtctgtgtctccaggggaaagagtcaccctctcctgcagggccagtcagagtgttagcagcagcttagcctggtaccagcagaaacctggccaggctcccaggctcctcatctatgctgcatccaccagggccactggtatcccatccagcttcagtggcagtgggtctgggacagagttcactctcaccatcagtagcctgcagtctgaagattttgcagtttattactgtcagcagtataataactggcctccgctcactttcggcggagggaccaaggtggagatcaaac

SEQ ID NO: 3592 - DNA, 319 bp, Homo sapiens
  source 1..319: mol_type = other DNA
tcctatgagctgacacagccgccctcggtgtcagtgtccccaggacagacggccaggatcacctgctctggagatacattgccaaaccaatttgcttattggtaccaacagaagccaggccaggcccctgtgttggtgatatatcaagacactgagaggccctcagggatccctgagcgattctctggctccacctcagggacaacagtcacattgaccatcagtggagtccaggcagaagacgaggctgagtattactgtcaaggagctgacaccagtggtacggggttcggcggagggacgaaactgaccgtcctag

SEQ ID NO: 3593 - DNA, 325 bp, Homo sapiens
  source 1..325: mol_type = other DNA
gaacttgtgttgacgcagtctccaggcaccctgtctttgtctccagggcaaagggccaccctctcctgcagggccagtcagagtatttggaaaaattacttaagttggtatcagcagaaacctggccaggctcccagcctcctcatctacggtgcgtccaccagggccactggcatccctgacaggttcagtggcagtgggtctgggacagacttcactctcaccatcaccagactggagcctgaagacattgcagtgtattactgtcaacaacatggaaattcaccccgcacgttcggccaagggaccaaggtggaaatcaaac

SEQ ID NO: 3594 - DNA, 325 bp, Homo sapiens
  source 1..325: mol_type = other DNA
gaaatagtgatgacgcagtctccagccaccctgtctatgtctccaggggaaagagccaccctctcctgcagggccagtcagagtgttagcagcagcttggcctggtaccagcagaaacctggccaggctcccaggctcctcatctatggtgcatccaccagggccactggtatcccagccaggttcagtggcagtgggtctgggacagagttcactctcaccatcagcagcctgcagtctgaagattttgcagtttattactgtcagcagtataataactggcctccgctcactttcggcggagggaccaaggtggagatcaaac

SEQ ID NO: 3595 - DNA, 325 bp, Homo sapiens
  source 1..325: mol_type = other DNA
tcctatgagctgacacagccaccctcggtgtcagtgtccccaggacagacggccaggatcacctgctctggagatgcattgccacaccaatttgcttattggtaccagcagaggccaggccaggcccctatactggtgatatataaagacagtgagaggccctcagggatccctgagcgattctctggctccagctcagggacaacagtcacgttgaccatcagtggagtccaggcagatgacgaggctgactattactgtcaatcagcagacagcagtggttcttatgtggtattcggcggagggaccaagctgaccgtcctag

SEQ ID NO: 3596 - DNA, 343 bp, Homo sapiens
  source 1..343: mol_type = other DNA
gatattgtgatgacccagactccactctctctgcccgtcacccctggacagccggcctccatctcctgcaagtctagtcagagcctcctacatagtgatggaaagacctatttgtattggtacctgcagaagccaggccagcctccacagctcctgatctatgaagtttccaagcggttctctggagtgccagataggttcagtggcagcgggtcggggacagatttcacactgaaaatcagccgggtggaggctgaggatgttggggtttattactgcatgcatagtatacagtttcccccgacgtggacgttcggccaagggaccaaggtggaaatcaaac

SEQ ID NO: 3597 - DNA, 337 bp, Homo sapiens
  source 1..337: mol_type = other DNA
gatattgtgatgacccagactccactctctctggccgtcacctctggacagccggcctccatctcctgtaagtctagtcagagcctcctgcatagtgatggcaagacctatttgtactggtatctgcagaagccaggccagcctccacagctcctgatttatgaactttccaacccgttctctggagtcccagataggttcagtggcagcgggtcagggacagatttcacactgaaaatcagccgggtggaggctgaggatgttggcgtttattactgcatgcaaagtgtacagcttccgtgtacttttggccaggggaccaagttggagatcaaac

SEQ ID NO: 3598 - DNA, 325 bp, Homo sapiens
  source 1..325: mol_type = other DNA
gaaatagtgatgacgcagtctccagccaccctgtctgtgtctccaggggaaagagccaccctctcctgcagggccagtcagagtgttggcagcagtttggcctggtaccagcagaaacctggccaggctcccaggctcctcatctatggtgcatccaccagggccactggtatcccagccaggttcagtggcagtgggtctgggacagacttcactctcaccatcagcagcctgcagtctgaggattttgcagtttattcctgtcagcagtattttaactggcctccgctcactttcggcggagggaccaaggtggagatcaaac

SEQ ID NO: 3599 - DNA, 319 bp, Homo sapiens
  source 1..319: mol_type = other DNA
gacatccagatgacccagtctccatcctccctgtctgcatctataggagacagagtcaccatcacttgccgggcaagtcagagcattagcaagtatttaaattggtatcagcagaaaccagggaaagcccctaaactcctgatctattctgcatccagtttgcaaggtggggtcccatcaaggttcagtggcagtggatctgggacagatttcactctcaccatcaacagtctccaacctgacgattttgcaacttactactgtcagcagacttacaatctgtgctcgttcggccgagggaccaaggtggaaatccaac

SEQ ID NO: 3600 - DNA, 325 bp, Homo sapiens
  source 1..325: mol_type = other DNA
gaaattgtgttgacacagtctccagccaccctgtctttgtctccaggggaaagagccaccctctcctgcagggccagtcagagtcttagcagcaacttagcctggtaccaacagaaacctggccaggctcccaggctcctcatctatgatgcatccaacagggccactggcatcccagccaggttcagtggcagtgggtctgggacagacttcactctcaccatcagcagcctagagcctgaagattttgcagtttattactgtcagcagcgtagcagctggcctcccttaatcactttcggccctgggaccaaagtggatatca

SEQ ID NO: 3601 - DNA, 322 bp, Homo sapiens
  source 1..322: mol_type = other DNA
gacatccagttgacccagtctccagccttcctgtctgcatctgtaggagacagagtcaccatcacttgccgggccagtcagggcattagcagttatttagcctggtgtcagcaaaaaccagggaaagcccctaagctcctgatctatcgtgcatccgttttgcaaagtggggtcccatcaagattcagcggcagtggatctgggacagaattcactctcacaatcagcagcctgcagcctgaagattttgcaacttattactgtcaacagcttaatagttaccctctcactttcggcggagggaccacggtggagatcaaac

SEQ ID NO: 3602 - DNA, 334 bp, Homo sapiens
  source 1..334: mol_type = other DNA
cagtctgtgctgacgcagccgccctcagtgtctggggccccagggcagagggtcaccatctcctgcactgggagcagctccaacatcggggcaggttatgatgtacactggtaccagcagcttccaggaacagcccccaaactcctcatctatggtaacagcaatcggccctcaggggtccctgaccgattctctggctccaagtctggcacctcagcctccctggccatcactgggctccaggctgaggatgaggctgattattactgccagtcctatgacagcagcctgagtggttcggtattcggcggagggaccaagctgaccgtcctag

SEQ ID NO: 3603 - DNA, 319 bp, Homo sapiens
  source 1..319: mol_type = other DNA
gaaatagtgatgacgcagtctccagccaccctgtctgtgtctccaggggaaagagccaccctctcctgcagggccagtcagagtgttagcagcaacttagcctggtaccagcagaaacctggccaggctcccaggctcctcttctatggcgcatccaccagggccactggtatcccagccaggttcagtggcagtgggtctgggacagagttcactctcaccatcagcagcctgcaggctgaagattttgcagtttatcactgtcagcagtataatatgtggccgtggacgttcggccaagggaccaaggtggaaatca

SEQ ID NO: 3604 - DNA, 334 bp, Homo sapiens
  source 1..334: mol_type = other DNA
gagattgtgatgacccagactccactctcttcacctgtcaccctaggacagccggcctccatctcctgcacgtccagtgaaagtctcgtccacagtaatggaaacacgtacttgagttggatccaccagaggccaggccagcctccaagaccccttatttataaggtttctgaccgcttctctggggttccagagagattcagtggcagtggggcagggacggatttcacattgaagatcagcggggtggagcctgaggatgtcgggatttattactgcatgcaggccacacgctttccgtggacgttcggccaggggaccgaggtggaaatca

SEQ ID NO: 3605 - DNA, 325 bp, Homo sapiens
  source 1..325: mol_type = other DNA
gaaatagtgatgacgcagtctccagccaccctgtctgtgtctccaggggaaagagccaccctctcctgcagggccagtcagagtgttagcagcaacttagcctggtaccagcagaaacctggccaggctcccaggctcctcatctacggtgcatccaccagggccactggtatcccagccaggttcagtggcagtgggtctgggacagagttcactctcaccatcagcagcctgcagtctgaagattttgcagtttattactgtcagcagtattataactggcctcccctcactttcggcggagggaccaaggtggagatcaaac

SEQ ID NO: 3606 - DNA, 325 bp, Homo sapiens
  source 1..325: mol_type = other DNA
gaaatagtgatgacgcagtctccagccaccctgtctgtgtctccgggggaaagagccatcctctcctgcagggccagtcagagtgttagcagcgacttagcctggtaccagcagaaacctggccaggctcccaggctcctcatttatggtgcatccaccagggccactggtatcccagccaggttcagtggcggtgggtctgggacagagttcactctcaccatcaacagcctgcagtctgaagattttgcagtttattactgtcagcagtataataactggcctcctctcactttcggcggagggaccaaggtggagatcaaac

SEQ ID NO: 3607 - DNA, 322 bp, Homo sapiens
  source 1..322: mol_type = other DNA
gacatccagttgacccaggctccatccttcctgtctgcatctgtaggagacagagtcaccatcacttgccgggccagtcagggcattagcagtgatttagcctggtgtcagcaaaaaccagggaaagcccctaaggtcctaatctatagtgcatccgctttgcaaagtggggtcccatcaaggttcagaggcagtggatctgggacagaattcactctcacaatcaccagcctgcagcctgaagactttgcaacttattactgtcaacaacttaaaagttaccctcttactttcggcggagggaccaaggtggagatcaaac

SEQ ID NO: 3608 - DNA, 340 bp, Homo sapiens
  source 1..340: mol_type = other DNA
gatattgtgatgactcagtctccactctccctgcccgtcacccctggagagccggcctccatctcctgcaggtctagtcggagcctcctgcatagtaatggatacaaccatttggattggtacctgcagaagccaggccagtctccacaactcctgatctttttgggttctactcgggcctccggggtccctgacaggttcagtggcagtggatcaggcacagattttacactgaaaatcagcagggtggaggctgaggatgttggggtttattactgcatgcaaggtctacatactcctccattcactttcggccctgggaccaaggtggagatcaaac

SEQ ID NO: 3609 - DNA, 319 bp, Homo sapiens
  source 1..319: mol_type = other DNA
gatatagtgatgacgcagtctccagccaccctgtctgtgtctccaggggaaagagccaccctctcctgcagggccagtgagagtatcagcagccacttagcctggtaccagcagaaacctggccaggctcccaggctcctcatttatgatgcatccaccagggccactggtatcccagccaagtttagtggcagtgggtctggaagagagttcactctcaccatcagcagcctgcagtctgaagattttgcagtttattactgtcagcagtataataactggccttctttcggcggagggaccaaggtggagatcaaac

SEQ ID NO: 3610 - DNA, 334 bp, Homo sapiens
  source 1..334: mol_type = other DNA
cagtctgccctgactcagcctgcctccgtgtctgggtctcctggacagtcgatcaccatctcctgcactggaaccagcagtgacgttggtgcttctgactctgtctcctggtaccaacagcacccagccaaagcccccaaactcatgatttatgatgtcgataagcggccctcaggggtttctaatcgcttctctggctccaagtctggcaacacggcctccctgaccatctctgggctccaggctgaggacgaggctgattattactgcagctcctatacaagaagaaccaccccttatgtcttcggaactgggaccaaggtcaccgtcctag

SEQ ID NO: 3611 - DNA, 336 bp, Homo sapiens
  source 1..336: mol_type = other DNA
atattgtgatgactcagtctccactctccctgcccgtcacccctggagagccggcctccatctcctgcaggtctagtcagagcctcctgcatagtaatggatacaactatttggattggtacctgcataggccagggcagtctccacatctcctgatctatttgggttctattcgggcctccggggtccctgacaggttcagcggcagtggatcaggcacagattttacactgagaatcagcagagtggagcctgaggatgttggggtttattactgcatgcagtctctacaaactcagctcactttcggcggagggaccaaggtggagatcaaac

SEQ ID NO: 3612 - DNA, 328 bp, Homo sapiens
  source 1..328: mol_type = other DNA
gaaattgtgttgacacagtctccagccaccctgtctttgtctccaggggaaagagccaccctctcctgcagggccagtcagagtgttagcaactccttagcctggtaccaacagaaacctggccaggctcccaggctcctcatctatggtgcatccaacagggccactggcatcccagccaggttcagtggcagtgggtctgggacagacttcactctcaccatcagcagcctagagccggaagattctgcagtttattactgtcagcagcgtagcaactggcctcccgtaatcactttcggccctgggaccaaagtggatatcaaac

SEQ ID NO: 3613 - DNA, 328 bp, Homo sapiens
  source 1..328: mol_type = other DNA
gagattgtgttgacacagtctccagtcaccctgtctttgtctccaggggagagagccaccctctcctgcagggccagtcagagtgttagctactacttagcctggtaccaacagaaacctggccaggctcccaggctcctcatctatgatgcatccaagagggccactgacatcccagccaggttcagtggcagtgggtctgggacagacttcactctcaccatcagcagcctggagcctgaagattttgcagtttattactgtcagcagcgtaccagctggcctctggagtattcttttggccaggggaccaagctggagatcaaac

SEQ ID NO: 3614 - DNA, 320 bp, Homo sapiens
  source 1..320: mol_type = other DNA
catccagatgacccagtctccatcttctgtgtctgcatctgtaggagacagagtcagcatcacttgtcgggcgagtcaggatattagtgactatttagcctggtatcagcagaaaccagggaaagcccctaagctcctgatctatgctgcatccagtttgcaaagtggggtcccctcaaggttcagcggcagtggatctgggacagatttcactctcactatcaccagcctgcagcctgaagattttgcaacttattattgtcaacaggctaacaggttccccctcagtttcggcggagggaccaaggtggacgtcaaac

SEQ ID NO: 3615 - DNA, 317 bp, Homo sapiens
  source 1..317: mol_type = other DNA
gaaattgtgttgacacagtctccagccaccctgtctttgtctccaggggaaagagccaccctctcctgcagggccagtcagagtgttagcgactacttagcctggtaccaacagaaacctggccaggctcccaggctcctcatctatgatgcatccaacagggccactggcatcccagccaggttcagtggcagtgggtctgggacagacttcactctcaccatcagcagcctagagcctgaagattttgcagtttattactgtcagcagcgtagcagcctacggacgttcggccaagggaccagggtggaaatcaa

SEQ ID NO: 3616 - DNA, 319 bp, Homo sapiens
  source 1..319: mol_type = other DNA
gaaattgtgttgacacagtctccagccaccctgtctttgtctccaggggaaagagccaccctctcctgcagggccagtcagagtgttagcagctacttagcctggtaccaacagaaacctggccaggctcccaggctcctcatctatgatgcatccaacagggccactggcatcccagccaggttcagtggcagtgggtctgggacagacttcactctcaccatcagcagcctagagcctgaagattttgcagtttattactgtcagcagcgtagcaacctacggacgttcggccaagggaccaaggtggaaatcaaac

SEQ ID NO: 3617 - DNA, 324 bp, Homo sapiens
  source 1..324: mol_type = other DNA
aaatagtaatgacgcagtctccagccaccctgtctgtgtctccaggggaaacagccaccctctcctgcagggccagtcagagtgttagcagcgacttagcctggtaccagcagaaacccggccaggctcccaggctcctcatctatggtgcgtccatcagggccgctgctatcccagccaggttcagtggcagtgggtctgggacagagttcactctcaccatcagccgcctgcagtctgaagattttgcagtttattactgtcagcagtataataattggcctccgatcactttcggcggagggaccacggtggagatcaaac

SEQ ID NO: 3618 - DNA, 316 bp, Homo sapiens
  source 1..316: mol_type = other DNA
gaaattgtgttgacgcagtctccaggcaccctgtctttgtctccaggggaaagagccaccctctcctgcagggccagtcagagtgttagcagcagctacttagcctggtaccagcagaaacctggccaggctcccaggctcctcatctatggtgcatccaacagggccactggcatcccagacaggttcagtggcagtgggtctgggacagacttcactctcaccatcagcagactggagcctgaagattttgcagtttattactgtcagcagtatggtaggacgttcggccaagggaccaaggtggaaatcaaac

SEQ ID NO: 3619 - DNA, 322 bp, Homo sapiens
  source 1..322: mol_type = other DNA
gacatccagatgacccagtctccatcctccctgtctgcatctgtaggagacagagtcaccatcacttgccgggcaagtcagggcattagaagtgatttaggctggtatcagcagaaaccagggaaagcccctaagcgcctgatctatgcagcatccagtttatatagtggggtcccatcaaggttcagcggcagtggatctgggactgaattcactctcacaatcagcagcctgcagcctgaagattttgcaacttattactgtctacagcattttaattatccgttcactttcggcggagggaccaaggtggagatcaaac

SEQ ID NO: 3620 - DNA, 328 bp, Homo sapiens
  source 1..328: mol_type = other DNA
gacatccagatgacccagtctccttccaccctgtctgcatctgtaggagacagagtcaccatcacttgccgggccagtcagagcattactacctggttggcctggcatcagcagaaaccagggaaagcccctaaggtcctgatctataaggcgtctagtttacaaagtggggtcccatcaaggttcagcggcagtggatctgggacagagttcactctcaccatcagcagcctgcagcctgatgattttgcaacttattactgccaacagtacagtagttactcaggggcgatcaccttcggccaagggacacgactggagattaaac

SEQ ID NO: 3621 - DNA, 334 bp, Homo sapiens
  source 1..334: mol_type = other DNA
cagtctgccctgactcagcctcgctcagtgtccgggtctcctggacagtcagtcaccatctcctgcactggaaccagcagtgatgttggtggttataactatgtctcctggtaccaacagcacccaggcaaagcccccaaactcatgatttatgatgtcagtaagcggccctcaggggtccctgatcgcttctctggctccaagtctggcaacacggcctccctgaccatctctgggctccaggctgaggatgaggctgattattactgctgctcatatgcaggcagctacactttcggggtattcggcggagggaccaagctgaccgtcctag

SEQ ID NO: 3622 - DNA, 322 bp, Homo sapiens
  source 1..322: mol_type = other DNA
gacatccagatgacccagtctccatcctcactgtctgcatttgtaggagacagcgtcaccatcacctgtcgggcgagtgagggcattagcaattatttagcctggtttcagcagaaacccgggaaagcccctaggtccctgatctacgctgcatccactttgcagagtggggtcccatcaaggttcagcggcagtggatctgggacagacttcactctcagcatcagcagcctgcagcctgaggattttggaacttattactgccaacagtataatactttccctcccactttcggcggagggaccaaggtggagaccaaac

SEQ ID NO: 3623 - DNA, 325 bp, Homo sapiens
  source 1..325: mol_type = other DNA
gaaatagtgatgacgcagtctccagccaccctgtctgtgtctccaggggaaagagccaccctctcctgcagggccagtcagagtgttagaagtgacttagcctggtatcagcagaaacctggccaggctcccaggctcctcatctatggtgcatccaccagggccactggtatcccagccaggttcagtggcagtgggtctgggacagagttcactctcaccatcagcagcctgcagtctgaagattttgcagtttattactgtcagcagtataataactggcctccgctcactttcggcggagggaccaaggtggagatcaaac

SEQ ID NO: 3624 - DNA, 322 bp, Homo sapiens
  source 1..322: mol_type = other DNA
gacatccagatgacccagtctccatcctccctgtctgcttctgtaggagacagagtcaccatcacttgccgggcgagtcagggcattaccaattatttagcctggtatcaacagaaaccagggaaagttccaaagctcctgatctatgctgcatccactttgcagtcaggggtcccatctcggttcagtggcagtggatctgggacagatttcactctcaccatcagcagcctgcagcctgaagatgttgcaacttattactgtcaaaagtataacagtgccccgctcactttcggcggagggaccaaggtggagatcaaac

SEQ ID NO: 3625 - DNA, 325 bp, Homo sapiens
  source 1..325: mol_type = other DNA
gaaatagtgatgacgcagtctccagccaccctgtctgtgtctccaggggaaagagccaccctctcctgcagggccagtcagagtgttagcagcaacttagcctggtaccagcagaaacctggccaggctcccaggctcctcatctatggtgcatccaccagggccactggtatcccggccaggttcagtggcagtgggtctgggacagagttcactctcaccatcagcagcctgcagtctgaagattttgcagtttattactgtcagcagtataatcactggccccccctcactttcggcggagggaccaaggtggagatcaaac

SEQ ID NO: 3626 - DNA, 322 bp, Homo sapiens
  source 1..322: mol_type = other DNA
gacatccagatgacccagtctccttccaccctgtctgcatctgtgggagacagagtcaccatcacttgccgggccagccagagtattagtagctggttggcctggtatcagctgaaaccaggaaaagcccctaaactcctgatctataaggcgtctagtttacagagtggaatcccatcaaggttcagcggcagtggatctgggacagaattcactctcaccatcagcagcctgcagcctgatgatttagcaacttattactgccaacagtatgatacttattcctcccaattcggccaagggaccaaggtggaaatcaaac

SEQ ID NO: 3627 - DNA, 337 bp, Homo sapiens
  source 1..337: mol_type = other DNA
gatattgtgatgacccagactccactctctctgtccgtcacccctggacagccggcctccatctcctgcaagtctagtcagagcctcctacatagtgatggaaagacctatttctattggtacttgcagaagccaggccagcctccacatctcctgatctatgaagtttccaaccgcttctctggagtgccagataggttcagtggcagcgggtcagagacagatttcacactgaaaatcagccgcgtggaggctgaggatcttgggatttattactgcatgcaaagtctacaacttccgtacacttttggccaggggaccaagctggagatcaaac

SEQ ID NO: 3628 - DNA, 337 bp, Homo sapiens
  source 1..337: mol_type = other DNA
gaaattgtgatgacccagactccactgtctctggccgtcacctctggacagccggcctccatctcctgtaagtccagtcagagcctcctgcatagtgatggaaagacctatttgtactggtatctgcagaagccaggccagcctccacagcttctgatttatgaagtttccaaccggttctctggagtgccagataggttcagtggcagcgggtcagggacagatttcacactgaaaatcagccgggtggaggctgaggatgttggggtttattactgcatgcaaagtgttcagcttccgtgtacttttggccaggggaccaagttggagatcaaac

SEQ ID NO: 3629 - DNA, 328 bp, Homo sapiens
  source 1..328: mol_type = other DNA
gaaattgtgttgacgcagtctccaggcaccctgtctttgtctccaggggaaagagccaccctctcctgcagggccagtcagagtgttagcagcagctacttagcctggtaccagcagaaacctggccaggctcccaggctcctcatctatggtgcatccagcagggccactggcatcccagacaggttcagtggcagtgggtctgggacagacttcactctcaccatcagcagactggagcctgaagattttgcagtgtattactgtcagcagtatggtagctctcttacgtggacgttcggccaagggaccaaggtggaaatcaaac

SEQ ID NO: 3630 - DNA, 331 bp, Homo sapiens
  source 1..331: mol_type = other DNA
gatattgtgatgactcagtctccactctccctgcccgtcatccctggagagccggcctccatctcctgcaggtccagtcagagtctccagaacattggatacaactatttggattggtacgtgcagaagccagggcagtctccacagctcctgatctatttggggtctgctcgggcctccggggtccctgacaggttcagtggcagtgggtcaggcacagattttacactgaaaatcaccagagtggaggctgaggatgttggggtatattactgcatgcaaactctacaaaaaaggacgttcggccaagggaccaaggtggaaatcaaac

SEQ ID NO: 3631 - DNA, 337 bp, Homo sapiens
  source 1..337: mol_type = other DNA
gatattgtgatgacccagactccactctctctgtccgtcacccctggacagccggcctccatctcctgcaagtctagtaagagcctcctgcatagtgatggaaagacctatttgtattggtacctgcagaagccaggccagcctccacagctgctgatctatgaagtttccaaccggttctctggagtgtcagataggttcagtggcagcgggtcagggacagatttcacactgaaaatcagccgggtggaggctgaggatgttggggtttattactgcatgcaaagtatacagcttcctcctgcgttcggccaagggaccaaggtggaaatcaaac

SEQ ID NO: 3632 - DNA, 322 bp, Homo sapiens
  source 1..322: mol_type = other DNA
gacatccagatgacccagtctccttccacactgtctgcatctgtaggagacagagtcaccatcacttgccgggccagtcagaatattgatacctggttggcatggtatcagcagaaaccaggaaaagcccctaatctcctgatctataaggcgtctactctacaagctggggtcccatcgaggttcagcggcagtggatctgggactggattcactctcaccatcagcagcctgcagcctgatgatttcgcaacgtattactgccaacactatagtgtttattctcggacgttcggccaagggaccaaggttgaaatcaaac

SEQ ID NO: 3633 - DNA, 325 bp, Homo sapiens
  source 1..325: mol_type = other DNA
gaaattgtgttgacacagtctccagccaccctgtctttgtctccaggggaaagagccaccctctcctgcagggccagtcagagtgttaacaagttcttagcctggtaccaacagaaacctggccaggctcccaggctcctcatctatgatgcatccaacagggccgctggcatcccagccaggttcagtggcagtgggtctgggacagacttcactctcaccatcagcagcctagagcctgaagattttgcagtttatttctgtcaccagcgtagcaactggcctttcctcactttcggcggagggaccaaggtggaggtcaaac

SEQ ID NO: 3634 - DNA, 334 bp, Homo sapiens
  source 1..334: mol_type = other DNA
gatattgtgatgactcagtctccactctccctgcccgtcacccctggagagccggcctccttctcctgcaggtctagtcagagcctcctgcatagtaatggacacaactatttggattggtatgtgcagaagcctgggcagtctccacaactcctgatctatttgagttctaatcgggcctccggggtccctgacaggttcagtggcagtggatcaggcacagattttactctgaagatcagcagagtggaggctgaggatgttggggtttattactgcatgcaggctctacaaaccctgtacacttttggccaggggaccaagctggagatca

SEQ ID NO: 3635 - DNA, 328 bp, Homo sapiens
  source 1..328: mol_type = other DNA
cagtctgccctgactcagcctgcctccgtgtctgggtctcctggacagtcgatcaccatctcctgcactggaaccagcagtgatgttgggagttataaccttgtctcctggtaccaacagcacccaggcaaagcccccaaactcatgatttatgaggtcactcagcggccctcaggggtttctaatcgcttctctggctccaagtctgacaacacggcctccctgacaatctctgggctccaggctgaggacgaggcttattattattgctgttcatatgcaggtagtagtgctcgattcggcggagggaccaagctgaccgtcctag

SEQ ID NO: 3636 - DNA, 319 bp, Homo sapiens
  source 1..319: mol_type = other DNA
gacattgtgatgacgcagtctcccgccaccctgtctgtgtctccaggggaaagagccaccctctcctgcagggccagtgcgaatattggcagccacttagcctggtaccagcagaaacctggccaggctcccaggctcctcatctatggtgcatccaccagggccactggtatcccagccaggttcagtggcagtgggtctgggacagagttcactctcaccattagcagcctgcagtctgaagattttgcagtttattactgtcagcagtataataactggcccctcttcggccaggggacacgactggagattaaac

SEQ ID NO: 3637 - DNA, 322 bp, Homo sapiens
  source 1..322: mol_type = other DNA
gacatccagatgacccagtctccatcttccgtgtctgcagctgtaggagacagagtcaccatcacttgtcgggcgagtcagggtataagcagctggttaggttggtatcagcagaaaccggggaaagccccgaaactcctaatctatgcagcagtcagattgcaaagtggggtcccatcaaggttcagcggcagtggatctgggacagagttcactctcaccatcagcagcctgcagcctgaagattttgcaacttactattgtcaacaggcaggcagtttcccgtggaccttcggccaagggaccaaggtggaaatcaaac

SEQ ID NO: 3638 - DNA, 337 bp, Homo sapiens
  source 1..337: mol_type = other DNA
gatattgtgatgacccagactcctctctctctgtctgtcacccctggacagccggcctccatctcctgcaagtctagtcagagcctcctgcatagtgatggaaagacctatttgtcttggtacctacagagaccaggccagcctccacacctcctgatctatgaagtttccagccgattctctggagtgccagataggttcagtggcagcgggtcagggacagatttcacactgaagatcagccgcatggaggctgaggatgtaggtctttattactgcatgcagggtgtacagcttccaaagacgttcggccaggggaccaaggtggaaatcaaac

SEQ ID NO: 3639 - DNA, 340 bp, Homo sapiens
  source 1..340: mol_type = other DNA
gacatcgtgatgacccagtctccagactccctggctgtgtctctgggcgagagggccaccatcaactgcaagtccagccagagtgttttatacagctccaacaataagaactacttagcttggtaccagcagaaaccaggacagcctcctaagctgctcatttactgggcatctacccgggaatccggggtccctgaccgattcagtggcagcgggtctgggacagatttcactctcaccatcagcagcctgcaggctgaagatgtggcagtttattactgtcagcaatattatagtacctctcagacgttcggccaagggaccaaggtggaaatcaaac

SEQ ID NO: 3640 - DNA, 334 bp, Homo sapiens
  source 1..334: mol_type = other DNA
cagtctgtgctgactcagccaccctcagcgtctgggacccccgggcagagggtcaccatctcttgttctggaagcacctccaacatcggaagtaattatgtatactggtaccagcaactcccaggaacggcccccaaactcctcatctataggaataatcagcggccctcaggggtccctgaccgattctctggctccaagtctgacacctcagcctccctggccatcagtgggctccggtccgaggatgaggctgattatttctgtgcagcatgggatgacagcctgagtggttatgtggtattcggcggagggaccaagctgaccgtcctag

SEQ ID NO: 3641 - DNA, 320 bp, Homo sapiens
  source 1..320: mol_type = other DNA
gacatccagatgacccagtctccatcctccctgtctgcatctgtaggagacagagtcaccatcacttgccgggcaagtcagaacattaacaaggatttaaattggtatcaacagaaaccagggaaagcccctaagttcctggtctatcttgtttccaatttacaaagtggggtcccatcaaggttcagtggcagtggatctgggacagatttcactctcaccatcagcagtctgcaacctgaagactttgcaacttactactgtcagcagagtttcgctttcccgatcactttcggcggagggaccaaggtggagatcaa

SEQ ID NO: 3642 - DNA, 334 bp, Homo sapiens
  source 1..334: mol_type = other DNA
cagtctgtgttgacgcagccgccctcagtgtctgcggccgcaggacagagggtcaccatctcctgctctggaagcagctccaacattgggaataattttgtgtcctggtaccagcagctcccaggaacagcccccaaactcctcatttatgacaataataagcgaccctcagggattcctgaccggttctctggctccaagtctggcacgtcagccaccctgggcatcaccggactccagactggggacgaggccgattattactgtggaacatgggataccagcctgagtgctggcgtggtattcggcggagggaccaagctgaccgtcctag

SEQ ID NO: 3643 - DNA, 340 bp, Homo sapiens
  source 1..340: mol_type = other DNA
gacatcgtgatgacccagtctccagactccctggctgtgtctctgggcgagagggcgaccatcaagtgcaagtccagccagagtgttttatacagctccaacaataagaactacttaagttggtaccagcacaaaccaggacagcctccaaagttgctcatttactgggcatctacccgggaatccggggtccctgaccgattcagtggcagcgggtcggggacagatttcactctcaccattagcagcctgcaggctgacgatgtggcagtttatttctgtcagcagtattatattggtcctccgacgttcggccaagggaccagggtggagatcaaac

SEQ ID NO: 3644 - DNA, 325 bp, Homo sapiens
  source 1..325: mol_type = other DNA
gaagtagtgatgacgcagtctccagcctccctgtctgtgtctccaggggaaagcgccaccctctcctgcagggccagtcagagtgttagcaccgacttagcctggtaccagcagaaacctggccaggctcccaggctcctcatctatggtgcgtccaccagggccactgggatcccagccaggttcagtggcagtgggtctgggacagagttcactctcaccatcagccgcctgcagtctgaagattttgcagtttattactgtcagcagtataataattggcctccgatcactttcggcggagggaccacggtggagatcaaac

SEQ ID NO: 3645 - DNA, 322 bp, Homo sapiens
  source 1..322: mol_type = other DNA
gacatccagatgacccagtctccatcctccctgtctgcatctgtaggagacagagtcaccatcacttgccgggcaagtcagggcattagaaatgatttaggctggtatcagcagaaaccagggaaagcccctaagcgcctgatctatgctgtatccagtttgcaaagtggggtcccatcgaggttcagcggcagtggatctgggacagaattcactctcacaatcagcagcctgcagcctgaagattttgcaacttattactgtctacagcataatagttacccctgggcgttcggccaagggaccaaggtggaaatcaaac

SEQ ID NO: 3646 - DNA, 328 bp, Homo sapiens
  source 1..328: mol_type = other DNA
cagtctgccctgactcagcctgcctccgtgtctgggtctcctggacagtcgatcaccatctcctgcactggaaccatcagtgacattggtgattataactatgtctcctggtaccagcaggtcccaggcaaagcccccaaactcatgatttatgacgtcagtgatcggccctcaggggtttctaatcgcttctctggctccaagtctggcaacacggcctccctgaccatctctgggatccagtctgaggacgaggctaattattattgcagcttatatacaaccaccaccgtccttttcggcggagggaccaggctgaccgtcctag

SEQ ID NO: 3647 - DNA, 325 bp, Homo sapiens
  source 1..325: mol_type = other DNA
gacatccagatgacccagtctccatcctccctgtctgcatctgtaggagacagagtcaccatcacttgccgggcgagtcagggcattagcaattatttagcctggtatcagcagaaaccagggaaagttcctaagctcctgatctatgctgcatccactttgcaatcaggggtcccatctcggttcagtggcagtggatctgggacagatttcactctcaccatcagcagcctgcagcctgaagatgttgcaacttattactgtcaaaagtataacagtgcccctccgtggacgttcggccaagggaccaaggtggaaatcaaac

SEQ ID NO: 3648 - DNA, 349 bp, Homo sapiens
  source 1..349: mol_type = other DNA
cagcctgtactgactcagccaccttctgcatcagcctccctgggagcctcggtcacactcacctgcaccctgaccagcggctacagtaattataaagtggactggtaccagcagagaccagggaagggcccccggtttgtgatgcgagtgggcactggtgggattatgggatccaagggggatggcatccctgatcgctactcagtcttgggctcaggcctgaatcggtacctgaccatcaggaacatccaggaagaggatgagagtgactactactgtggggcagaccatggcagtgggagcgacttcgtcgtggtattcggcggagggaccaagttgaccgtcctag

SEQ ID NO: 3649 - DNA, 336 bp, Homo sapiens
  source 1..336: mol_type = other DNA
gatattgtgatgacccagactccactctctctgtccgtcacccctggacagccggcctccatttcctgcaagtctagtcagagcctcctgcatagtgatggaaagacctatttgtcttggttcctgcagaagccaggccatcctccacagctcctgatctatgaggtttccaaccggttctctggagcgccagataggttcagtggcagcgggtcagggacagatttcacactgaaaatcagccgggtggaggctgaagatgttggggtttattactgcatgcaaggtataggggttcctaagacgttcggacaagggaccaaggtggaaatcaaa

SEQ ID NO: 3650 - DNA, 325 bp, Homo sapiens
  source 1..325: mol_type = other DNA
gaaattgtgttgacacagtctccagccaccctgtctttgtctccaggggaaagagccaccctctcctgcagggccagtcagggtgttagcagcttcttatcctggtaccaacagagacctggccaggctcccaggctcctcatctatgatgcatcgaatagggccactggcatcccggccaggttcagtggtagtgggtctgggacagacttcactctcaccatcagcagcctagagactgaagattttgcagtttattactgtctgcagcgtagcaactggccatcgatcaccttcggccaagggacacgactggagattaaac

SEQ ID NO: 3651 - DNA, 337 bp, Homo sapiens
  source 1..337: mol_type = other DNA
gatattgtgatgacccagactccactctctctggccgtcacctctggacagccggcctccatctcctgtaagtccagtcagagcctcctgcatagtgatggaaagacctatttgtactggtatctgcagaagccaggccagcctccacagctcctgatttatgaagtttccaaccggttctctggagtgccagataggttcagtggcagcgggtcagggacagatttcacactgaaaatcagccgggtggaggctgaggatgttggggtttattactgcatgcaaagtgtacagcttccgtgcacttttggccaggggaccaagctggagatcaaac

SEQ ID NO: 3652 - DNA, 336 bp, Homo sapiens
  source 1..336: mol_type = other DNA
atattgtgatgacccagagtccactctctctgtccgtcacccctggacagccggcctccatctcctgcaagtctagtcagagcctcctccatagtgatggaaagacgtatttgttttggtacctgcagaagccaggccagtctccgcagctcctgatccatgaagtttccaaccggttctctggagtgactgataggttcagtggcagcgggtcagggtcagatttcacactgaaaatcagccgggtggaggctgaggatgtcggggtttatttctgcatgcagagtgtacaggttcctccgacgttcggccaagggaccaaggtggatatcaaac

SEQ ID NO: 3653 - DNA, 329 bp, Homo sapiens
  source 1..329: mol_type = other DNA
gatattgtgatgactcagtctccactctccctgcccgtcatccctggagagccggcctccatctcctgcaggtccagtcagagtgtccagaacattggatacaactatttggattggtacgtgcagaagccagggcagtctccacagctcctgatctatttggggtctactcgggcctccggggtccctgacaggttcactggcagtggctcaggcacagattttacactgaaaatcagcagagtggaggctgaggacgttggggtttattactgcatgcaaactctacaaaaaaggacgttcggccaagggaccaaggtggaaatcaa

SEQ ID NO: 3654 - DNA, 325 bp, Homo sapiens
  source 1..325: mol_type = other DNA
gaaatagtgatgacgcagtctccagccaccctgtctgtgtctccaggggaaagaaccaccctctcctgcagggccagtcagagtgttaacagcaacttagcctggtaccagcagaaacctggccaggctcccaggctcctcatctatggtgcatccaccagggccactggtatcccagccaggttcagtggcagtgggtctgggacagagttcactctcaccatcagcagcctgcagtctgaagattttgcagtttattactgtcagcagtataataactggcctccgctcactttcggcggagggaccagggtggagatcaaac

SEQ ID NO: 3655 - DNA, 325 bp, Homo sapiens
  source 1..325: mol_type = other DNA
gaaatagtgatgacacagtctccagccaccctgtctgtgtctccaggggaaagagccaccctctcctgctgggccagtcagagtgttagcagcaacttagcctggtaccagcaaaaacctggccaggctcccaggctcctcatatatggtgcatccaccagggccactggtattccagccaggttcagtggcagtgggtctgggacagagttcactctcaccatcagcagcctgcagtctgaagattttgcagtttattactgtcagcagtataataactggcctccgctcactttcggcggagggaccaagctggagatcaaac

SEQ ID NO: 3656 - DNA, 323 bp, Homo sapiens
  source 1..323: mol_type = other DNA
gaaatagtgatgacgcagtctccagccaccctgtctgtgtctccaggggaaagtgccaccctctcctgcagggccagtcagagtgttagcagcaacttagcctggtaccagcagagacctggccaggctcccaggctcctcatctatggtgcatccaccagggccactggtatcccagccaggttcagtggcagtgggtctgggacagagttcactctcaccatcagcagcctgcagtctgaagattttgcagtttactactgtcagcagtataataactggcctccgtggacgttcggccaagggaccaaggtggaaatcaa

SEQ ID NO: 3657 - DNA, 340 bp, Homo sapiens
  source 1..340: mol_type = other DNA
gatattgtgatgactcagtctccactctccctgcccgtcacccctggagagccggcctccatctcctgcaagtctagtcagagcctcctacatagtaatggatacaaccatttggattggtacctgcagaagccagggcagtctccacaactcctgatctttttgggttctactcgggcctccggggtccctgacaggttcagtggcagtggatcaggcacagattttacactgaaaatcagcagggtggaggctgaggatgttggggtttattactgcatgcaaggtctacatactcctccattcactttcggccctgggaccaaggtggagatcaaac

SEQ ID NO: 3658 - DNA, 322 bp, Homo sapiens
  source 1..322: mol_type = other DNA
gacatccagatgacccagtctccatcctccctgtctgcatctgttggagacagagtcaccatcacttgccgggcaagtcagagcattagaacgtatttaaattggtatcagcagaaaccagggaaagcccctaaactcctgatctatgctgcatccagtttgcaaagtggggtcccatcaaggttcagtggcagtggatctgggacagatttcactctcaccatcggcagtctgcaacctgaagattttgcaacttactactgtcaacagagttacactacccctcagacttttggccaggggaccaagctggagatcaaac

SEQ ID NO: 3659 - DNA, 337 bp, Homo sapiens
  source 1..337: mol_type = other DNA
gatgttgtgatgactcagtctccactctccctgcccgtcacccttggacagccggcctccatctcctgcaggtcaagtcacagcctcgtatccagtgatggaaacacctacttgaattggtttcagcagaggccaggccaatctccaaggcgcctaatttataaggtttctaagtgggactctggggtcccagacagattcagcggcagtgggtcaggcactgatttcacactgaaaatcagcagggtggaggctgaggatgttggggtttattactgcatgcaagctacacactcgcctcccacttttggccaggggaccaagctggagatcaaac

SEQ ID NO: 3660 - DNA, 319 bp, Homo sapiens
  source 1..319: mol_type = other DNA
gaaattgtgttgacgcagtctccaggcaccctgtctttgtctccaggggaaagagccaccctctcctgcagggccagtcagagtgttaccagcaactacttagcctggtaccagcagatacctggccaggctcccaggctcctcatctatggtgcatccaacagggccactggcatcccagacaggttcagtggcagtgggtctgggacagacttcactctcaccatcagcagactggagcctgaagattttgcagtgtattactgtcagcagtatggtagccagaccttcggccaagggacacgactggagattaaac

SEQ ID NO: 3661 - DNA, 325 bp, Homo sapiens
  source 1..325: mol_type = other DNA
gaaatagtgatgactcagtctccagccaccctgtctgtgtctccaggggaaagagccaccctctcctgcagggccagccagagtgttgcaagcgacttagcctggtaccagcagaaacctggccaggctcccaggctcctcatctatggtgcgtccaccagggccactggtatcccagccaggttcagtggcagtgggtctgggacagacttcactctcaccatcagcagcctgcagtctgaagattttgcagtttactactgtcagcagtataataattggcctccgctcactttcggcggggggaccaaggtggagatcaaac

SEQ ID NO: 3662 - DNA, 319 bp, Homo sapiens
  source 1..319: mol_type = other DNA
gaaatagtgatgacgcagtctccagccaccctgtctgtgtctccaggggaaagagccaccctctcctgcagggccagtgagagtattagcacccacttagcctggtaccagcagaaacctggccaggctcccaggctcctcatctatggttcatccaccagggccgctggtatcccagccaggttcagtggcagtgggtctgggacagagttcactctcaccatcagcagcctgcagtctgaagattctgcagtttattactgtcagcagtataataactggccccttttcggccctgggaccaaagtgcatatcaaac

SEQ ID NO: 3663 - DNA, 317 bp, Homo sapiens
  source 1..317: mol_type = other DNA
gaaattgtgttgactcagtctccagccaccctgtctttgtctccaggggaaagagccaccctctcctgcagggccagtcagagtattagagcctacttagcctggtaccaacagaagcctggccaggctcccaggctcctcatctatgatgcatctaacagggccactggcatcccagccaggttcagtggtagtgggtctgggacagacttcactctcaccatcagcggcctagagcctgaggattttgcggtttattactgtcagcagcgtagcacctggccctctttcggcggagggaccaaggtggagatcaa

SEQ ID NO: 3664 - DNA, 325 bp, Homo sapiens
  source 1..325: mol_type = other DNA
gaaattgtgttgacgcagtctccaggcaccctgtctttgtctccaggggaaagagccaccctctcctgcagggccagtcagagtgttagcagcagctacttagcctggtaccagcagaaacctggccagcctcccaggctcctcatctctggtgcatccagcagggccactggcatcccagacaggttcagtggcagtgggtctgggacagacttcactctcaccatcagcagactggagcctgaggattttgcagtgtattactgtcagcagtatggtaactcaccccggacgttcggccaagggaccaaggtggaaatcaaac

SEQ ID NO: 3665 - DNA, 325 bp, Homo sapiens
  source 1..325: mol_type = other DNA
gaaattgtgttgacacagtctccagccaccctgtctttgtctccaggggaaagagccaccctctcctgcagggccagtcagagtgttaacaactacttagcctggtaccaacaaaaacctggccaggctcccaggctcctcatgtatgatgcatccaaaagggccactggcatcccagccaggttcagtggcagtgggtctgggacagacttcactctcaccatcagcagcctagagcctgaagattttgcagtttattactgtcagcagcgtagcaactggcctccactcactttcggcggagggaccaaggtggagatcaaac

SEQ ID NO: 3666 - DNA, 325 bp, Homo sapiens
  source 1..325: mol_type = other DNA
gaaattgtgttgacgcagtctccaggcaccctgtctttgtctccaggggaaagagccaccctctcctgcagggccagtcagagtgttagcaacacctacttagcctggtaccagcagaaacctggccaggctcccaggctcctcatttatggtgcatccagcagggccactggcatcccagacaggttcagtggcagtgggtctgggacagacttcactctcaccatcagcagactggagcctgaagactttgcagtgtattactgtcagcagtatggtgggtcacctcggacgttcggccaagggaccaaagtggacatcaaac

SEQ ID NO: 3667 - DNA, 325 bp, Homo sapiens
  source 1..325: mol_type = other DNA
gaaactgtgttgacgcagtctccagccaccctgtctttgtctccaggggaaagagccaccctctcctgcggggccagtcagagtgttagcagcagctacttagcctggtaccagcagaaacctggcctggcgcccaggctcctcatctatgatgcatccatcagggccactggcatcccagacaggttcagtggcagtgggtctgggacagacttcactctcaccatcagcggactggagcctgaagattttgcagtgtattactgtcagcagtatggtaactcaccgttcactttcggcggagggaccaaggtggagatcaaac

SEQ ID NO: 3668 - DNA, 322 bp, Homo sapiens
  source 1..322: mol_type = other DNA
gaaatagtgatgacgcagtctccagccaccctgtctgtgtctccaggggaaagagccaccctctcctgcagggccagtcagagtattagcagcaacttagcctggtaccagcagaaacctggccaggctcccaggctcctcatctatggtgcatccaccagggccactggtatcccagccaggttcagtggcagtgggtctgggacagagttcactctcaccatcagcagcctgcagtctgaagattttgcagtttattactgtcagcagtataataactggcctccgctcactttcggcggagggaccaaggtggagatca

SEQ ID NO: 3669 - DNA, 325 bp, Homo sapiens
  source 1..325: mol_type = other DNA
gagattgtgttgacgcagtctccagccactctgtctttgtctccaggggaaagagccaccctctcctgcagggccagtcagagtgttagcaggttcttagcctggtaccaacaaaaacctggccaggctcccaggctcctcatctatgaagcatccaacagggccactggcatcccagccaggttcagtggcagtgggtctgggacagacttcactctcaccatcagcagcctagagcctgaagattttgcagtttattactgtcagcagcgtagcaaatggcccgggatcaccttcggccaagggacacgactggagattaaac

SEQ ID NO: 3670 - DNA, 335 bp, Homo sapiens
  source 1..335: mol_type = other DNA
ttttatgctgactcagccccactctgtgtcggagtctctggggaagacgataaccatctcctgcacctgcagcagtggcagcattgccagcaactatgtgcaatggttccagcagcgcccgggcagttcccccaccactgtgatctatgaggatgaccacagaccctctggggtccctgatcggttctctggctccatcgacaggtcctccaactctgcctccctcaccatctctggactgaagactgaggacgaggctgactactactgtcagtcttatgatggcaggaatcaagatgtggtgttcggcggagggaccaagctgaccgtcctag

SEQ ID NO: 3671 - DNA, 322 bp, Homo sapiens
  source 1..322: mol_type = other DNA
gacatccagatgacccagtccccatcctccctgtctgcatctataggagacagagtcaccatcacttgccgggcgagtcagggcatttacaattatttagcctggtatcagcagaaaccagggaaagttcctaagctcctgatctatggtgcatccactttgcaatcaggggtcccgtctcggttcagtggcagtggatctgggacagatttcactctcaccatcaacagcctgcagcctgaagatgttgcaacttattactgtcaaaagtataacagtgactcgggaacgttcggcccagggaccaaggtggaaatcaaac

SEQ ID NO: 3672 - DNA, 325 bp, Homo sapiens
  source 1..325: mol_type = other DNA
gaagtcgtgatgacgcagtctccagccaccctgtctgtgtctccaggggaaagagccaccctctcctgcagggccagtcagagtattagcaacgacttagcctggttccagcagaaacctggccagcctcccaggctcctcatctatggtgcatccaccagggccactggtatcccagccaggttcagtggcagtgggtctgggacagagttcactctcaccatcagcagcctgcagtctgaagattttgcagtttattactgtcagcagtataataactggcctccggccactttcggccctgggaccaaagtggatatcaaac

SEQ ID NO: 3673 - DNA, 325 bp, Homo sapiens
  source 1..325: mol_type = other DNA
gaaattgtgttgacacagtctccagccaccctgtctttgtctccaggggagagagccaccctcgcctgcagggccagtcagagtgttagcaggcacttagcctggtaccaacagaaacctggccaggctcccaggctcctcatctatgatgcatccaacagggccactggcatcccagccaggttcagtggcagtgggtctgggacagacttcactctcaccatcagcagcctagagcctgaggattttgcagtttattactgtcagcaacgtaccaactggcctcggatcaccttcggccaagggacacgactggagaataaac

SEQ ID NO: 3674 - DNA, 322 bp, Homo sapiens
  source 1..322: mol_type = other DNA
gacatccagatgacccagtctccatcctccctgtctgcatctgtaggagacagagtcaccatcacttgccgggcaagtcagggcattagaaatgatttaggctggtttcagcagaaaccagggaaagcccctaagcgcctgatctatgctgcatccagtttgcaaagtggggtcccatcaaggttcagcggcagtggatctgggacagacttcactctcacaatcagcagcctgcagcctgaagattttgcaacttattactgtctacagcataatagttaccctcggacgttcggccaagggaccaaggtggaaatcaaac

SEQ ID NO: 3675 - DNA, 346 bp, Homo sapiens
  source 1..346: mol_type = other DNA
caggctgtgctgactcagccgtcttccctctctgcatctcctggagcatcagccagtctcacctgcaccttgcgcagtggcatcaatgttggtacctacaggatatactggtaccagcagaagccagggagtcctccccagtatctcctgaggtacaaatcagactcagataagcagcagggctctggagtccccagccgcttctctggatccaaagatgcttcggccaatgcagggattttactcatctctgggctccagtctgaggatgaggctgactattactgtatgatttggcacagcagcgcttgggtgttcggcggagggaccaagctgaccgtcctag

SEQ ID NO: 3676 - DNA, 319 bp, Homo sapiens
  source 1..319: mol_type = other DNA
gacatccagatgacccagtctccatcctccctgtctgcatctgtaggagacagagtcaccatcacttgccgggcaagtcagggcattagagatgatttaggctggtatcagcagaaaccagggaaagcccctaagcgcctgatctgggctgcatccagtttacaaagtggggtcccatcaaggttcagcggcagtggatctgggactgaattcactctcacaatcagtagcctgcagcctgaagattttgcaacttattactgtctacagcattataattacccgctcactttcggcggagggaccaaggtggagatca

SEQ ID NO: 3677 - DNA, 331 bp, Homo sapiens
  source 1..331: mol_type = other DNA
cagtctgccctgactcagcctcgctcagtgtccgggtctcctggacagtcagtcaccatctcctgccctggaaccagcagtgatgttggtggttataactatgtctcctggttccaacaacacccaggcaaagccccccaactcatcatttatgatgtcactaggcggccctcaggggtcccttatcgcttctctggctccaagtctggcaacacggcctccctgaccatctctgggctccaggctgaggatgaggctgattattattgctgctcatatgtagacagcgacacttatgtcttcggaactgggactacggtcaccgtcctag

SEQ ID NO: 3678 - DNA, 325 bp, Homo sapiens
  source 1..325: mol_type = other DNA
gaaatagtgatgacgcagtctccagccaccctgtctgtgtctccgggggaaagagccaccctctcctgcagggccagtcagagtgttagcagcaacttagcctggtaccagcagaaacctggccaggctcccaggctcctcatctatggtgcatccaccagggccactggtatcccagccaggttcagtggcagtgggtctgggacagagttcactctcaccatcagcagcctgcagtctgaagattttgcagtttattactgtcagcagtataataactggcctccgctcactttcgccggagggaccaaggtggagatcaaac

SEQ ID NO: 3679 - DNA, 325 bp, Homo sapiens
  source 1..325: mol_type = other DNA
gaaattgtgttgacgcagtctccaggcaccctgtctttgtctccaggggaaagagtcaccctctcctgcagggccagtcagagtgttagcagcaactacttagcctggtaccaacagagacctggccaggctcccaggctcctcgtctatggtgcatccagcagggccactggcatcccagacaggttcagtggcagtgggtctgggacagacttcactctcaccatcaccagactggagcctgaagattttgcagtgtattactgtcagcagtatggtagttcacctagcaccttcggccaagggacacgactggagattaaac

SEQ ID NO: 3680 - DNA, 325 bp, Homo sapiens
  source 1..325: mol_type = other DNA
gaaattgtgttgacgcagtctccaggcaccctgtctttgtctccaggggaaagagccaccctctcctgcagggccagtcagagtgttagcagcagctacttagcctggtaccagcagaaacctggccaggctcccaggctcctcatctatggtgcatccagcagggccactggcatcccagacaggttcagtggcagtgggtctgggacagacttcactctcaccatcagcagactggagcctgaagattttgcagtgtattactgtcagcagtatggtagctcactttggacgttcggccaagggaccaaggtggaaatcaaac

SEQ ID NO: 3681 - DNA, 328 bp, Homo sapiens
  source 1..328: mol_type = other DNA
gaaatagtgatgacgcagtctccagccaccctgtctgtgtctccaggggaaagagccaccctctcctgcagggccagtcagagtgttagcagcaacttagcctggtaccagcagaaacctggccaggctcccaggctcctcatctatggtgcatccaccagggccactggtatcccagccaggttcagtggcagtgggtctgggacagagttcactctcaccatcagcagcctgcagtctgaagattttgcagtttattactgtcagcagtataataactggcctccgaggctcactttcggcggagggaccaaggtggagatcaaac

SEQ ID NO: 3682 - DNA, 331 bp, Homo sapiens
  source 1..331: mol_type = other DNA
cagtctgccctgactcagcctccctccgcgtccgggtctcctggacagtcagtcaccatctcctgcactggaaccagcagtgacgttggtggttataactatgtctcgtggtaccaacagcacccaggcaaagcccccaaactcatgatttatgaggtcactaagcggccctcaggggtccctgatcgcttctctggctccaagtctggcaacacggcctccctgaccgtctctgggctccaggctgaggatgaggctgattattactgctcctcatatgcaggcagcaacaattgggtgttcggcggagggaccaagctgaccgtcctag

SEQ ID NO: 3683 - DNA, 322 bp, Homo sapiens
  source 1..322: mol_type = other DNA
gacatccagatgacccagtctccatcctccctgtctgcatctgttggagacagagtcaccatcacttgccgggcaagtcagagcattagaacgtatttaaattggtatcagcagaaaccagggaaagcccctaaactcctgatctatgctgcatccagtttgcaaagtggggtcccatcgaggttcagtggcagtggatctgggacagatttcactctcaccatcggcagtctgcaacctgaagattttgcaacttactactgtcaacagagttacagtacccctcagacttttggccaggggaccaagctggagatcaaac

SEQ ID NO: 3684 - DNA, 325 bp, Homo sapiens
  source 1..325: mol_type = other DNA
cagtctgccctgactcagcctgcctccgtgtctgggtctcctggacagtcgatcaccatctcctgcactggaaccagcagtgattttgggagttataaccttgtctcctggtaccaacagtatttaggcaaagcccccaaactcatgatttatgaggtcactaagcggccctcaggggtttctaatcgcttctctggctccaagtctggcaacacggcctccctgacaatctctgggctccaggctgaggacgaggctgattattactgctgctcatatgcaggtcatgtggtattcggcggagggaccaagctgaccgtcctag

SEQ ID NO: 3685 - DNA, 322 bp, Homo sapiens
  source 1..322: mol_type = other DNA
gacatccagatgacccagtctccttccaccctgtctgcatctgtgggagacggggtcactatcacttgccgggccagtcagagtatttatatctggttggcctggtatcagcagaaaccagggaaagcccctaaactcctcatctataaggcgtcttctttagaaactggggtcccatcaaggttcagcggcagtggatctgggacagacttcactctcaccatcagcagcctgcagcctgatgattttgcgacttattactgccaacaatataaaacttatccgtggacgttcggcccagggaccaaggtggaaatcaaac

SEQ ID NO: 3686 - DNA, 337 bp, Homo sapiens
  source 1..337: mol_type = other DNA
gatattgtgatgacccagactccgctctctctgtccgtcacccctggacagccggcctccatctcctgcaagtctagtcagagcctcctgcatagtgatggaaagacctatctgtattggtacctgcagaagccaggccagcctccacagctcctgatctatgaagtttccaaccgtgtctctggagtgccagacaggatcagtggcagcgggtcagggacagatttcacactgagaatcagccgggtggaggctgaggatgttggtatttattactgcatgcaaagtatacatcttcctctcactttcgccggagggaccaaggtggagatcaaac

SEQ ID NO: 3687 - DNA, 325 bp, Homo sapiens; identical to SEQ ID NO: 3341
  source 1..325: mol_type = other DNA

SEQ ID NO: 3688 - DNA, 329 bp, Homo sapiens
  source 1..329: mol_type = other DNA
cagtctgccctgactcagcctccctccgcgtccgggtctcctggacagtcagtctccatctcctgcactggaaccagtagtgacgttggttattataactatgtctcctggtaccaacagtacccaggcaaagcccccaaactcatcatttctgaggtcagtaggcggccctcaggggtccctgatcgcttctctggctccaagtctggcaacacggcctccctgaccgtctctgggctcctacctgaggatgaggctgattattactgcacctcatatggaggcagcaacaattgggtgttcggcggagggaccaagctgaccgtcct

SEQ ID NO: 3689 - DNA, 337 bp, Homo sapiens
  source 1..337: mol_type = other DNA
gatattgtgctaacccagactccactctctctgtccgtcacacctggacaggcggcctccatgtcctgcaagtctagtcagaccctcctgcatagtgatggaaagacctatttatattggtacctgcagaagccaggccaggctccacgtctcctgatctatgaagtttccaaccggttctccggagtgccagataggttcagcggcagcgggtcagggacagatttcacactgaaaatcagccgggtggcggctgaggatgttgggatttattactgcatgcaaagtatacaggttccgggggcgttcggccaagggaccaaggtggagatcaaac

SEQ ID NO: 3690 - DNA, 325 bp, Homo sapiens
  source 1..325: mol_type = other DNA
tcctatgagctgactcagccaccctcagtgtccgtgtccccaggacagacagccagcatcacctgctctggagataaattgggggataaatatgcttgctggtatcagcagaagccaggccagtcccctgtattggtcatttatcaagataacaagcggccctcagggatccctgagcgattctctggctccaactctgggaacacagccactctgaccatcagcgggacccagactatggatgaggctgactattactgtcaggcgtgggacagcagcacctctcatgtggtattcggcggagggaccaagctgaccgtcctag

SEQ ID NO: 3691 - DNA, 325 bp, Homo sapiens
  source 1..325: mol_type = other DNA
gaaatagtgatgacgcagtctccagccaccctgtctgtgtctccaggggaaagtgccaccctctcgtgcagggccagtcagagtgttagcaccgacttagcctggtaccagcagaaacccggccaggctcccaggctcctcatctatggtgcgtccatcagggccactgatatcccagccaggttcagtggcagtgggtctgggacagagttcactctcaccatcagccgcctgcagtctgaagattttgcagtttattactgtcagcagtataataattggcctccgatcactttcggcggggggaccacggtggagatcaaac

SEQ ID NO: 3692 - DNA, 322 bp, Homo sapiens
  source 1..322: mol_type = other DNA
gacatccagatgacccagtctccatcctccctgtctgcatctgtaggagacagagtcaccatcacttgccgggcgagtcagggccttagcaattctttagcctggtatcagcagaaattagggaaagccccgaaactcctgctctctgctgcatccagattggaaagtggggtcccttccaggttcagtggcagtagatctgggacggattacactctcaccatcagcagcctgcagcctgaagattttgcaacttattactgtcaacagttttatagtcccccgtggacgttcggccaagggaccaaggtggaaatcaaac

SEQ ID NO: 3693 - DNA, 319 bp, Homo sapiens
  source 1..319: mol_type = other DNA
gacatccagatgacccagtctccatcctccctgtctgcatctgtaggagacagagtcaccatcacttgccgggcaagtcagagcattagcagatattttagttggtttcagcagaaaccaggtaaagcccctaagctcctgatctatgctgcaaccagtttgcaaagtggggtcccgtcacgcttcagtggcagtggatctgggacagatttcactctcaccatcagcagtctgcagcctgaagattttgcaacttactactgtcaacagacttacagtacccctatcactttcggccctgggaccaaagtggatctca

SEQ ID NO: 3694 - DNA, 322 bp, Homo sapiens
  source 1..322: mol_type = other DNA
gacattgtgttgacacagtctccagccaccctgtctttgtctccaggggaaagagccaccctctcctgcagggccagtcagagtattagcaactccttagcctggtaccagcagaaacctggccaggctcccaggctcctcatctatgatgcatccaacagggccactggcatcccagccaggttcagtggcagtgggtctgggacaaacttcgctctcaccatcagcagtctacaccctgaagattttgcagtttattactgtcagcagcatagcaactggccctccacgttcggccaagggacacgactggagattaaac

SEQ ID NO: 3695 - DNA, 324 bp, Homo sapiens
  source 1..324: mol_type = other DNA
aaattgtgttgacacagtctccagccaccctgtctttgtctccaggggaaagagccaccctctcctgcagggccagtcagagaattagcagcttcttagcctggtaccaacagaaacctggccaggctcccaggctcctcatctatgatgcatccaacagggccactggcatcccagccaggttcagtggcagtgggtctgggacagacttcactctcaccatcagcagcctagagcctgaagattttgcagtttattactgtcagcagcgtgccaactggccactgctcagtttcggcggagggaccaaggtggagatcaaac

SEQ ID NO: 3696 - DNA, 329 bp, Homo sapiens
  source 1..329: mol_type = other DNA
cagtctgccctgactcagcctgcctccgtgtctgggtctcctgggcagtcgatcaccatctcctgcactggaaccagcagtgacgttggtggttataactttatctcctggtaccgacaacacccaggcaaagcccccaaactcattatttatgatgtctatcagcggccctcaggggtttccaatcgcttctctgcttccaagtctggcaacacggcctccctgaccatctctgggctccaggctgaggacgaggctgattattactgcagctcatacacaagcagcagcactttgctattcggcggggggaccaagctgactgtcct

SEQ ID NO: 3697 - DNA, 319 bp, Homo sapiens
  source 1..319: mol_type = other DNA
gatatagtgatgacgcagtctccagccaccctgtctgtgtctccaggggaaagagccaccctctcctgcagggccagtgagagtatcagcagccacttagcctggtaccagcagaaacctggccaggctcccaggctcctcatctatgatgcatccaccagggccactggtatcccagccaagtttagtggcagtgggtctggaagagagttcactctcaccatcagcagcctgcagtctgaagattttgcagtttattactgtcagcagtataataactggccttctttcggcggagggaccaaggtggagatcaaac

SEQ ID NO: 3698 - DNA, 325 bp, Homo sapiens
  source 1..325: mol_type = other DNA
gaaatagtgatgacgcagtctccagccaccctgtctgtgtctccaggggaaagtaccaccctctcctgcagggccagtgagagtgttgacagcaacttagcctggtaccagcagaaacctggccaggctcccaggctcctcatctatggtgcatccaccagggccactggtatcccagccaggttcagtggcagtgggtctgggacagagttcactctcaccatcagcagcctgcagtctgaagattttgcagtttattactgtcagcagtataataactggcctccgctcactttcggcggagggaccaaggtggagatcaaac

SEQ ID NO: 3699 - DNA, 324 bp, Homo sapiens
  source 1..324: mol_type = other DNA
gaaattgtgttgacgcagtctccaggcaccctgtctttgtctccaggggaaagagccaccctctcctgcagggccagtcagagtgtttccagcaggtacttagcctggtaccagcagaaacctggccaggctcccaggctcctcatctatggtgcatccagcagggcctctggcatcgcagacaggttcagtggcagtgggtctgggacagacttcactctcaccatcagcagactggagcctgaagattttgcagtgtattactgtcagcagtatggtagctcacctctcactttcggccctgggaccaaagtggatatcaaa

SEQ ID NO: 3700 - DNA, 325 bp, Homo sapiens; identical to SEQ ID NO: 3341
  source 1..325: mol_type = other DNA

SEQ ID NO: 3701 - DNA, 334 bp, Homo sapiens
  source 1..334: mol_type = other DNA
ttgtgatgacccagactcccctctcctcacctgtcacccttggacagccggcctccatctcctgcaattctagtcagagcctcgtgtacagtgatggagacacctacttgaattgctttcagcagaggccaggccaatctccaaggcgcctaattaataaggtttctaactgggactctggggtcccagacagattcagcggcagtgggtcaggcactgatttcacactgaaaatcagccggatggaggctgaggatgttggggtttatttctgcatgcaagatacacactgcctccctcactttcggcggtgggaccaaggtggagatcaaac

SEQ ID NO: 3702 - DNA, 337 bp, Homo sapiens
  source 1..337: mol_type = other DNA
gatattgtgatgacccagactccactctctctgtccgtcactcctggacagccggcctccatctcctgcaagtctagtcagagccccctgcatactgatggaaagacctatttgtattggtacctacagaggccgggccagcctccacagctcctgatctatgaagtttccaaccgcttctctggagtgccagataggttcagtggcagcggctcagggacagacttcacactgaaaatcagccgagtggaggctgaagatgttggcgtctattactgcatgcaaagtgtgcaggttcctcccacgttcggccaggggaccaaggtggaaatcaaac

SEQ ID NO: 3703 - DNA, 349 bp, Homo sapiens
  source 1..349: mol_type = other DNA
cagcctgtgctgactcagccaccttctgcatcagcctccctgggagcctcggtcactctcacctgcaccctgagcagcggctacagtaattataaagtggactggtaccagcagagaccagggaagggcccccgatttgtgatgcgggtgggcactggtgggaatgtgggagccaagggggagggcatccctgatcgcttctcagtcttggcctcaggcctgaatcggtacctgaccatcaagaacgttcaggaagaggatgagagtgactaccactgtggggcagactatggcagtgggagcaacttcgtcgtggtattcggcggagggaccaagctgaccgtcctag

SEQ ID NO: 3704 - DNA, 319 bp, Homo sapiens
  source 1..319: mol_type = other DNA
gacatccagatgacccagtctccttccaccctgtctgcgtctgtaggagacagagtcaccatcacttgccgggccagtcagagtgttgataggtggttggcctggtatcagcagaaaccagggaaagcccctaagctcctcatctataaggcgtctagtttagatattggggtcccatcaaggttcagcggcaatggatctgggacagatttcactctcaccatcagcagcctgcagcctgatgattttgcaacttattactgccaacaatttagtaggtatttgacgttcggccaagggaccaaggtggaaatcaaac

SEQ ID NO: 3705 - DNA, 322 bp, Homo sapiens
  source 1..322: mol_type = other DNA
tcctatgagctgactcagccaccctcagtgtccgtgtccccaggacagacagccagcatcacctgctctggagataaattgggggataaatatgcttgctggtatcagcagaagccaggccagtcccctgtgctggtcatctatcaagatagcaagcggccctcagggatccctgagcgattctctggctccaactctgggaacacagccactctgaccatcagcgggacccaggctatggatgaggctgactattactgtcaggcgtgggacagcagcactgatgtggtattcggcggagggaccaagctgaccgtcctag

SEQ ID NO: 3706 - DNA, 319 bp, Homo sapiens
  source 1..319: mol_type = other DNA
gaaatagtgatgtcgcagtctccagtcaccctgtctgtgtctccaggggagagagccaccctctcctgcagggccagtcagagtgttagcagcaacttagcctggtaccagcagcaacctggccaggctcccaggctcctcatctatgctgcatccaccagggccactggtatcccagccaggttcagtggcggcgggtctgggacagagttcactctcaccatcagcagcctgcagtctgaagattttgcactttatttctgtcagcaatataattcctggcctcggacgttcggccaagggaccaaggtggaaatca

SEQ ID NO: 3707 - DNA, 325 bp, Homo sapiens
  source 1..325: mol_type = other DNA
tcctatgagctgactcagccaccctcactgtccgtgtccccaggacagacagccagcatcacctgctctggagatagattgggggataaatatacctgctggtatcagcagaagccaggccagtcccctgtgctggtcatctatcaagataccaggcggccctcagggatctctgagcgattctccggctccaactcggggaacacagccattctgaccatcagcgggacccaggcgatggatgaggctgactattactgtcaggcgtgggacagcagcactgccctttatgtcttcggaactgggaccaaggtcaccgtcctag

SEQ ID NO: 3708 - DNA, 322 bp, Homo sapiens
  source 1..322: mol_type = other DNA
gacatccagatgacccagtctccttccaccctgtctgcatctgtaggagacagagtcaccatcacttgccgggccagtcagagtattagtccctggttggcctggtatcagcagaaaccagggaaagcccctaagctcctgatctataaggcgtctagtttagaaagtggggtcccatcaaggttcagcggcagtggatctgggacagaattcactctcaccatcagcagcctgcagcctgatgattttgcaacttattactgccaacagtatgatagttattctggggctttcggccctgggaccaaagtggatatcaaac

SEQ ID NO: 3709 - DNA, 320 bp, Homo sapiens
  source 1..320: mol_type = other DNA
gacatccagatgacccagtctccatcctccctgtctgcttctgtaggagacagagtcaccatcacttgccgggcaagtcagaacattaacagcgatttaaattggtatcaacagaaaccagggaaagcccctaagttcctggtctatcttgtttccaatttgcaaagtggggtcccatcaaggttcagtggcagtggatctgggacagatttcactctcaccatcagcagtctgcaacctgaagactttgcaacttactactgtcaacagagtttcgctttcccgatcactttcggcggagggaccaaggtggagatcaa

SEQ ID NO: 3710 - DNA, 322 bp, Homo sapiens
  source 1..322: mol_type = other DNA
gaaatagtgatgacgcagtctccagccaccctgtctgtgtctccaggggaaagagccaccctctcctgcagggccagtcagagtgttagcagcaacttagcctggttccagcagaaacctggccaggctcccaggctcctcatttatggagcatccaccagggccactggaatcccagccaggttcagtggcagtgggtctgggacagagttcactctcaccatcagcagcctgcagtctgaagattttgcagtttattactgtcagcagtataatgactggccccgagggttcggccaagggaccaaggtggaaatcaaac

SEQ ID NO: 3711 - DNA, 322 bp, Homo sapiens
  source 1..322: mol_type = other DNA
gacatccagatgacccagtctccatcctccctgtctgcatctgtaggagacagagtcaccatcacttgtcgggcgagtcagggcattagcaattatttagcctggtttcagcagaaaccagggaaagcccctaagtccctgatctatgctgcatccagtttgcaaagtggggtcccatcaaagttcagcggcagtggatctgggacagatttcactctcaccatcagcagcctgcagcctgaagattttgcaacttattactgccaacagtataatagttaccctcaaactttcggcggagggaccaaggtggagatcaaac

SEQ ID NO: 3712 - DNA, 325 bp, Homo sapiens
  source 1..325: mol_type = other DNA
gaagtagtgatgactcagtctccagccaccctgtctgtgtctccaggggaaagagccaccctctcctgcagggccagtcagagtgttacaagcgacttagcctggtaccagcagaaacctggccaggctcccaggctcctcatctacggtgcatccaccagggccactggtatcccagccaggttcagtggcagtgggtctgggacagagttcactctcaccatcagcagcctgcagtctgaagattttgcagtttattactgtcagcagtataataattggcctccgctcactttcggcggggggaccaaggtggagatcaaac

SEQ ID NO: 3713 - DNA, 317 bp, Homo sapiens
  source 1..317: mol_type = other DNA
gacatccagatggcccagtctccttccaccgtgtctgcatctgtaggagacagagtcaccatcacttgccgggccagtcagagtgttggtagttgggtggcctggtatcagcagaagccagggtacgcccctaggctcctcatctataaggcgtctagtttagagagtggagtcccatcaaggttcagcggcagtggatctgggacagaattcactctcactatcagcagcctgcagcctgatgattatgcaacttattactgccaacagtctaaaagttattttatgttcggccaagggaccaaggtggaaatcaa

SEQ ID NO: 3714 - DNA, 328 bp, Homo sapiens
  source 1..328: mol_type = other DNA
gaaattgtgttgacgcagtctccagtcaccctgtctttgtctccaggggaaagagccaccctctcctgcagggccagtgagagtgttagcagtcactacttagcctggttccaacagaaacctggccaggctcccaggctcctcatttctgccacatccagcagggccactggcaccccagacaggttcagtgccactgggtctggggcagacttcactctcaccatcaccagactggagcctgaagattttgcagtgtattactgtcaactgtatggtgcctcacctgggaggacgttcggccaagggaccaaggtggacttcaaac

SEQ ID NO: 3715 - DNA, 349 bp, Homo sapiens
  source 1..349: mol_type = other DNA
cagcctgtgctgactcagccaccttctgcatcagcctccctgggagcctcggtctcactcacctgcaccctgagcagcggctacagtaattataaagtggactggtaccagcagagaccagggaagggcccccaatttgtgatgcgagtgggcactggtgggattatgggatccaagggggatggcatccctgatcgttactcagtcttgggctcaggcctgaatcggtacctgaccatcaggaacatccaggaagaggatgagagtgactactactgtggggcagaccatggcagtgggagcaacttcgtcgtggtattcggcggagggaccaagttgaccgtcctag

SEQ ID NO: 3716 - DNA, 337 bp, Homo sapiens
  source 1..337: mol_type = other DNA
cagcctgtgctgactcaatcatcctctgcctctgcttccctgggatcctcggtcaagctcacctgcactctgagcagtgggcacagtagctacatcatcgcatggcatcagcagcagccagggaaggcccctcggtacttgatgaagcttgaaggtagtggaagctacaacaaggggagcggagttcctgatcgcttctcaggctccagctctggggctgaccgctacctcaccatctccaacctccagtctgaggatgaggctgattattactgtgagacctgggacagtaacactctttgcgtgttcggcggagggaccaagctgaccgtcctag

SEQ ID NO: 3717 - DNA, 316 bp, Homo sapiens
  source 1..316: mol_type = other DNA
atagtgatggcgcagtctccagccaccctgtctgtgtctccaggggagagagccaccctctcctgcagggccagtgcgagtgttggcagccacttagcctggtaccagcagaaacctggccaggctcccaggctcctcttctatggtgcatccaccagggccattggtgtcccagccaggttcagtggcggtgggtctgggacagaattcactctcaccatcagcagcctgcagtctgaagattctgcagtttattactgtcagcagtataataactggcccctcttcggccaggggacacgactggagattaaac

SEQ ID NO: 3718 - DNA, 330 bp, Homo sapiens
  source 1..330: mol_type = other DNA
cagtctgccctgactcagcctccctccgcgtccgggtctcctggacagtcagtcaccatctcctgcaccgaaaccagcagtgacgttggtggtcggaactttgtctcctggtaccaacagcaccccggcaaagcccccaaactcatcatttatgaagacaagaagcggccctcaggggtccctgatcgcttctctggctccaagtctggcaacacggcctccctgaccgtctctgggctccaggctgacgatgaggctgattattactgcacctcatatgcaggcaacaacgatcaaaaattcggcggagggaccaagttgaccgtccta

SEQ ID NO: 3719 - DNA, 320 bp, Homo sapiens
  source 1..320: mol_type = other DNA
gacatccagatgacccagtctccatcctccctgtctgcatctgtaggagacagagtcaccatcacttgccgggcaagtcagaacattaacagcgatttaaattggtatcaacagaaaccagggaaagcccctaagttcctggtctatcttgtttccaatttacaaagtggggtcccatcaaggttcagtggcagtggatctgggacagatttcactctcaccatcagcagtctgcaacctgaagactttgcaacttactactgtcaacagagtttcgctttcccgatcactttcggcggagggaccaaggtggagatcaa

SEQ ID NO: 3720 - DNA, 320 bp, Homo sapiens
  source 1..320: mol_type = other DNA
gacatccagatgacccagtctccttcctccctgtctgcatctgttggagacagtgtcaccatcacttgccgggcaagtcagagcattagcagcgatttaaattggtatcaacaaaaaccagggaaagcccctaagttcctgatctatcttgtatcgaatttgcaaagtggggtcccatcaaggttcagtggcggtggatctgggacagatttcactctcaccatcagcagtctgcaacctgaagattttggaacttactactgtcaacagagttacagctttccgatcactttcggcggtgggaccaaggtgcagatcaa

SEQ ID NO: 3721 - DNA, 322 bp, Homo sapiens
  source 1..322: mol_type = other DNA
gaaatagtgatgacgcagtctccagccaccctgtctgtgtctccgggggaaagagccaccctctcctgcagggccagtcagagtgttagcagcaacttagcctggtaccagcagaaacctggccaggctcccaggctcctcatctatggtgcatccaccagggcccctggcatcccagccagtttcagtggcagtgggtctgggacagagtttactctcaccatcagcaacctgcagtctgacgattttgcaatttattactgtcagcagtataatgactggcctaagacgttcggccaagggaccaaggtggaaatcaaac

SEQ ID NO: 3722 - DNA, 319 bp, Homo sapiens; identical to SEQ ID NO: 2757
  source 1..319: mol_type = other DNA

SEQ ID NO: 3723 - DNA, 325 bp, Homo sapiens
  source 1..325: mol_type = other DNA
gaaattgtgttgacgcagtctccaggcaccctgtctttgtctccaggggaaggggccaccctctcctgcagggccagtcagagtgttagcagcagctacttagcctggtaccagcagaaacctggccaggctcccaggctcctcatctatggtgcatccagcagggccactggcatcccagacaggttcagtggcagagggtctgggacagacttcactctcaccatcaccagactggagcctgaagattttgcagtgtattactgtcagcagtatggtggctcacctagcaccttcggccaggggacacgagtggagattaaac

SEQ ID NO: 3724 - DNA, 327 bp, Homo sapiens
  source 1..327: mol_type = other DNA
aaattgtgttgacgcagtctccaggcaccctgtctttgtctccaggggaaagagccaccctctcctgcagggccagtcagagtgttagcagcagctacttagcctggtaccagcagaaacctggccaggctcccaggctcctcatctatggtgcatccagcagggccactggcatcccagacaggttcagtggcagtgggtctgggacagacttcactctcaccatcagcagactggagcctgaagattttgcagtgtattactgtcagcagtatggtaactcacttacgtggacgttcggccaagggaccaaggtggaaatcaaac

SEQ ID NO: 3725 - DNA, 331 bp, Homo sapiens
  source 1..331: mol_type = other DNA
cagtctgtgctgactcagccaccctcagcgtctgggacccccgggcagagggtcaccatctcttgttctggaagcagctccaacatcgaaagtaatactgtaaactggtaccagcagctcccaggaacggcccccaaactcctcatctataataatagtcagcggccctcaggggtccctgaccgattctctggctccaagtctggcacctccgcctccctggccatcagtgggctccagtctgaggatgaggctgattattactgtgcatcgtgggatgacaggctgaatgccccccgattcggcggagggaccaagctgaccgtcctag

SEQ ID NO: 3726 - DNA, 331 bp, Homo sapiens
  source 1..331: mol_type = other DNA
cagtctgccctgactcagcctgcctccgtgtctgggtctcctggacagtcgatcaccatctcctgcactggaaccagcagtgatgttgggaggtataagtttgtctcctggtaccaacagcacccaggcaaagcccccaaagtcatgatttttgaggtcactaagcggccctcaggggtttctgatcgcttctctggctccaagtctgccaacacggcctccctgacaatctctgggctccaggctgaggacgaggctgattattactgcttgtcatatgccggcagtagcaattgggtcttcggcggagggaccaggctgaccgtcctag

SEQ ID NO: 3727 - DNA, 325 bp, Homo sapiens
  source 1..325: mol_type = other DNA
gaaattgtgttgacgcagtctccaggcaccctgtctttgtctccaggggaaagagccaccctctcctgcagggccagtcagagtgttagcagctcctacttagcctggtaccagcacaaacctggccagtctcccaggctcctcatctacggtgcatccagcagggccactggcatcccagacagattcagtggcagtgggtctgggacagacttcactctcaccatcagcagactggagcctgaagattttgcagtgtattactgtcaccagtatggtaggtcaccgtggacgttcggccaagggaccaaggtggaaatcaaac

SEQ ID NO: 3728 - DNA, 322 bp, Homo sapiens
  source 1..322: mol_type = other DNA
gacattgtgctaacgcagtctccaggcaccctgtctttgtctccaggggaaagagccaccctctcctgccgggccagtcagagtgttcgcagcaactccttagcctggtaccagcagaaacctggccaggctcccaggctcatcatctatggtgcatccagcagggccactggcatcccagacaggttcagtggcagtgggtctgggacagacttcactctcgtcatcagcagactagagcctgaagattttgcagtgtattactgtcagcagtacggtacctggtacacttttggccaggggaccaagctggagatcaaac

SEQ ID NO: 3729 - DNA, 346 bp, Homo sapiens
  source 1..346: mol_type = other DNA
caggctgtgctgactcagccgtcttccctctctgcatctcctggagcgtcagccagtctcacctgcaccttgcgcagtgacatcaatattgatacgtgcaggatattctggtaccagcaaataccagggagtcctccccgatatctcctgacataccaatcagactcagacaaggagcagggctctggagtccccagccgcttctctggatccaaagatgcttcggccaatgcagggattttagtcatctctgggctccagtctgaagatgaggctgactattattgtatgatttggcacagcgacgcttgggtgttcggcggagggaccaagctggccgtcctag

SEQ ID NO: 3730 - DNA, 331 bp, Homo sapiens
  source 1..331: mol_type = other DNA
cagtctgccctgactcagcctgcctccgtgtctgggtctcctggacagtcgatcaccatctcctgcactggaaccagcagtgatgttgggagttataagtttgtctcctggtaccaacagcacccaggcaaagcccccaaagtcatgatttttgaggtcactaagcggccctcaggggtttctgatcgcttctctggctccaagtctgccaacacggcctccctgacaatctctgggctccaggctgaggacgaggctgattattactgcttctcatatgcaggtagtagcacttgggtattcggcggagggaccaggctgaccgtcctag

SEQ ID NO: 3731 - DNA, 325 bp, Homo sapiens
  source 1..325: mol_type = other DNA
gaaatagtgatgacgcagtctccagccaccctgtctgtgtctccaggggaaagagccaccctctcttgcagggccagtcagagtgttagcagcaacttagcctggtaccagcagaaacctggccaggctcccaggctcctcatctatggtgcatccaacagggccactggcgtcccagccaggttcagtggcagtgggtctgggacagagttcactctcaccatcagcagcctgcagtctggagattttgcagtttattactgtcagcagtataataactggccaccgattaccttcggccaagggacacgactggagattaaac

SEQ ID NO: 3732 - DNA, 331 bp, Homo sapiens
  source 1..331: mol_type = other DNA
cagtctgccctgactcagcctcgctcagtgtccgggtctcctggacagtcagtcaccatctcctgcactggaaccagcagtgatgttggtggttataactatgtctcctggtaccaacagcacccaggcaaagcccccaaactcatcatttatgatgtcagtaagcggccctcaggggtccctgatcgcttctctggctccaagtctggcaacacggcctccctgaccatctctgggctccaggctgaggatgaggctgattattactgctgctcatatgcaggcaggtacactttggtttttggcggagggaccaagctgaccgtcctag

SEQ ID NO: 3733 - DNA, 325 bp, Homo sapiens
  source 1..325: mol_type = other DNA
gaaattgtgttgacacagtctccagccaccctgtctttgtctccaggggaaagagccaccctctcctgcagggccagtcagagtgttagcagctacttagcctggtaccaacagaaacctggccaggctcccaggctcctcatctatgatgcatccaacagggccactggcatcccagccaggttcagtggcagtgggtctgggacagacttcactctcaccatcagcagcctagagcctgaagattttgcagtttattactgtcagcagcgtagcaactggcctccgctcactttcggcggagggaccaaggtggagatcaaac

SEQ ID NO: 3734 - DNA, 322 bp, Homo sapiens
  source 1..322: mol_type = other DNA
tcctctgagttgactcagccaccctcagtgtccgtgtccccaggacaaacagccaggatcagctgctctggagatatattgggggataaatatacttgctggtatcaacagaggccaggccggtcccctgtcctggtcatccatgaagatacggagcggccctcagggatccctgagcgattctctggctccaaatctgggaacacagccactctgaccatcagcggggcccaggctatggatgaggctgactattactgccaggcgtgggacagtagcactcctgtggtgttcggcggagggaccaagctgaccgtcctag

SEQ ID NO: 3735 - DNA, 325 bp, Homo sapiens
  source 1..325: mol_type = other DNA
gaaattgtgttgacgcagtctccaggcaccctgtctttgtctccaggggaaagagccaccctctcctgcagggccagtcagagtcttagcaccaactccttagcctggtaccagcagaaacctggccaggctcccaggctcctcatccatggtgcatccagcagggccactggcatcccagacaggttcagtggcagtgggtctgggacagacttcactctcaccatcagcagactggagcctgaagattttgcagtgtattactgtcaccagtttggtggctcacttccgctcactttcggcggagggaccaaggtggagatca

SEQ ID NO: 3736 - DNA, 322 bp, Homo sapiens
  source 1..322: mol_type = other DNA
gaaatagtgatgacgcagtctccagccaccctgtctgtgtctccaggggaaagagccaccctctcctgcagggccagtcagagtgttagcagcaacttagcctggtaccagcagaaacctggccaggctcccaggctcctcatctatggtacatccaccagggccactggtatcccagccaggttcagtggcagtgggtctgggacagagttcactctcaccatcagcagcctgcagtcggaagattttgcagtttattactgtcagcagtataatagctggctcatcaccttcggccaagggacacgactggagattaaac

SEQ ID NO: 3737 - DNA, 325 bp, Homo sapiens
  source 1..325: mol_type = other DNA
gacatccagatgacccagtctccatcctccctgtctgcatctgtgggagacagagtcaccatcacttgccgggcaagtcaggacattagaaatgatttaggctggtatcagcagaaaccagggaaagcccctaagcgcctgatctatggtgcatccagtttggaaagtggggtcccatcaaggttcagcggcagtggatctgggacagaattcactctcacagtcagcagcctgcagcctgaagatgttgcaacttattactgtctacagtataatacttaccatatgtacacttttggccaggggaccaaggtggaaatcaaac

SEQ ID NO: 3738 - DNA, 331 bp, Homo sapiens
  source 1..331: mol_type = other DNA
gaaatagtgatgacgcagtctccagccacccttcctgtggctccaggggaaagagccaccctctcctgcaggtccagtcagagtgtttacagcaacttagcctggtaccagcaaaaacctggccaggctcccaggctcctcatctatgatgcatccaccagggccactggtatcccagccaggttcagtggcagtgggtctgggacagagttcactctcaccatcatcaacctgcagtctgaagattttgcagtttattactgtcagcagtataataactggcctccgggggaagacacttttggccaggggaccaagctggagatcaaac

SEQ ID NO: 3739 - DNA, 325 bp, Homo sapiens
  source 1..325: mol_type = other DNA
gaaattgtgttgacgcagtctccaggcaccctgtctctgtctccaggggaaagagccaccctctcctgcagggccagtcagagtgttagcagcaactacttagcctggtaccagcagaaacctggccaggctcccaggctcctcatctatggtgcatccagcagggccactggcatcccagacagattcagtggcagtgggtctgggacagacttcactctcaccatcagcaggctggaacttgaagattttgtagtgtattactgtcagcagtatggtagctcacctctcactttcggcggagggaccaaggtggagatcaaac

SEQ ID NO: 3740 - DNA, 320 bp, Homo sapiens
  source 1..320: mol_type = other DNA
gacatccagatgacccagtctccttcctccctgtctgcatctgttggagacagtgtcaccatcacttgccgggcaagtcagagcattagccgcgatttaaattggtatcaacagaagccagggaaagcccctaagttcctgatctatcttgtatccaatttgcaaagtggggtcccatcaaggttcagtggcagtggatctgggacagatttcactctcaccatcagcagtctgcaacctgaagattttggaacttactactgtcaacagagtcacagcttcccgatcactttcggcggtgggaccaaggtgcagatcaa

SEQ ID NO: 3741 - DNA, 325 bp, Homo sapiens
  source 1..325: mol_type = other DNA
gaaattgtgttgacgcagtctccaggcaccctgtctttgtctccaggggaaagagccaccctctcctgcagggccagtcagagtgttgaaagcagctacttagcctggtaccagcagagacctggccaggctcccaggctcctcatccatgctgcatccagcagggccactggcatctcagacaggttcagtggcagtgggtctgggacagacttcactctcaccatcagcagactggagcctgaagattttgcagtgtattactgtcagcagtatggtaggtcacctcggacgttcggccaagggaccaaggtggaaatcaaac

SEQ ID NO: 3742 - DNA, 331 bp, Homo sapiens
  source 1..331: mol_type = other DNA
cagtctgccctgactcagcctccctccgcgtccgggtctcctggacagtcagtcaccatctcctgcactggaaccagcagtgaccttggtggttctaactatgtctcctggtaccaacagcacccaggcaaagtccccaaactcatactttatgaggtcagtaagcggccctcaggggtccctgatcgcttctctggctctaagtctggcaacacggcctccctgaccgtctctggcctccaggctgaggatgaggctaattattattgcagctcatatggaggcagcaacaatctggttttcggcggagggaccacgttgaccgtcctag

SEQ ID NO: 3743 - DNA, 322 bp, Homo sapiens
  source 1..322: mol_type = other DNA
gacatccagatgacccagtctccatcctccctgtctgcatctgtaggagacagagtcaccatcacttgccgggcaagtcagggcattagaaatgatttaggctggtatcagcagaaaccagggaaagcccctaagcgcctgatctatgctgcatccactttgcaaagtggggtcccatcaaggttcagcggcagtggatctgggacagaattcactctcacaatcagcagcctgcagcctgaagattttgcaacttattactgtctacagcataatagttaccctttcactttcggccctgggaccaaagtggatatcaaac

SEQ ID NO: 3744 - DNA, 316 bp, Homo sapiens
  source 1..316: mol_type = other DNA
gacatccagatgacccagtctccttccaccctgtctgcatctgtaggagacagagtcaccatcacttgccgggccagtcagagtagtagtaattggttggcctggtatcagcagaaaccagggaaagcccctaagctcctgatctataaggcgtctactttagagactggggtcccatcaaggttcagcggcagtggatctgagacagaattcactctcaccatcagcagcctgcagcctgatgattttgcaacttattactgccaagagagttttatgtacacctttggccaggggaccaaggtggagatcaaac

SEQ ID NO: 3745 - DNA, 325 bp, Homo sapiens
  source 1..325: mol_type = other DNA
gacatccatatgacccagtctccatcctccctgtctgcatctgtgggagacagagtcaccatcacttgccgggcgagtcaggacattcgcgattctttagcctggtatcagcagaaaccagggaaagcccctaagctcctactctattctgcgtccagattgcaaagtggggtcccatccaggttcagtggcgttggatctgggacggattacactctcaccatcagcagcctgcagcctgaagattttgcaacttattactgtcaacagtattatagtacccccccggtcactttcggcggagggaccaaggtggagatcaaac

SEQ ID NO: 3746 - DNA, 319 bp, Homo sapiens
  source 1..319: mol_type = other DNA
gaaatagtgatgacgcagtctccagccaccctgtctgtgtctccagggaaaagagccaccctctcctgcagggccagtgagagtgttagcagcaacttagcctggtaccaacacaaacctggccaggctcccaggctcctcatctatggtgcatccaccagggccactggtatcccagccaggttcagtggcagtgggtctgggacagagttcactctcaccatcagcagcctgcagtctgatgattgggcaatttattactgtcagcagtataataactggccgacgttcggccaagggaccaaggtggaaatcaaac

SEQ ID NO: 3747 - DNA, 337 bp, Homo sapiens
  source 1..337: mol_type = other DNA
gaaatagtgatgacgcagtctccagccaccctgtctgtgtctccaggggaaagagccaccctctcctgcaggaccagtcagagtgttagcagcagcttagcctggtaccagcagaaacatggccagggtcccaggctcctcatctatggtgcatccaccagggccaccggtattccagccaggttcagtggcagtgggtctgggacagagttcactctcaccatcagcagcctgcagtctgaagattctgcagtatattattgtcagcagtataataagcaggataataagtggcctttgatcactttcggcggagggaccaaggtggagatcaaac

SEQ ID NO: 3748 - DNA, 328 bp, Homo sapiens
  source 1..328: mol_type = other DNA
gaaatagtgatgacgcagtctccagccaccctgtctgtgtctccaggggaaagagccaccctctcctgtagggccagtcagagtgttagaaggaacgttgcctggtaccagcagaaacctggccaggctcccagactcctcatctatggtgcatccgccagggccactggcatcccagccaggttcagtggcagtgggtctgggacagagttcactctcaccatcagcagcctgcagtctgaggattttgcagtttattactgtcagcagtataataactggccccgagcgctcactttcggcggagggatcaaggtggagttcaaac

SEQ ID NO: 3749 - DNA, 322 bp, Homo sapiens
  source 1..322: mol_type = other DNA
gccatccagctgacccagtctccatcctccctgtctgcatctgtaggagacagagtcaccatcacttgccgggcaagtcaggacattagaaatgatttaggctggtatcagcagaaaccagggaaagcccctaacctcctgatctatgctgcatccaatttacaaagtggggtcccatcaaggttcagcggcagtggatctggcacagatttcactctcaccatcagcagcctgcagcctgaagattttgcaacttattactgtctacaagattacaatcacccgctcactttcggcggagggaccaaggtggagatgaaac

SEQ ID NO: 3750 - DNA, 325 bp, Homo sapiens
  source 1..325: mol_type = other DNA
gacatccagatgacccagtctccttccaccctgtctgcatctgtaggagacagagtcagcatcacttgccgggccagtcagagtgttgctaactggttggcctggtatcagcagaaaccagggaaagcccctaaactcctaatctatcaggcgtctcatttagagagtggagtcccatcacggttcagcggcagtggatctgagacagaattcactctcaccatcagcagcctgcagcctagtgatcttgcaacttattactgccagcaatataagagttattcttcgtggacttttggccaggggaccaaggtggacatcaaac

SEQ ID NO: 3751 - DNA, 337 bp, Homo sapiens
  source 1..337: mol_type = other DNA
gacatcgtcctgacccagtctccagactccctggctgtgtctctgggcgagagggccaccatcaactgcaagtccagccagagtcttttatacaactccaacaaaaagaactacttagcttggtaccagcagaaaccaggacagcctcctaaggtgctcatttactgggcatctacccggaagtctggggtccctgaccgattcagtggcagcgggtctgggacagatttcactctcaccatcagcagcctgcaggctgaagatgtggcgctttattactgtcagcaatattatggtattcccctgactttcggccctgggaccaaagtggaaatca

SEQ ID NO: 3752 - DNA, 328 bp, Homo sapiens
  source 1..328: mol_type = other DNA
caggctgtggtgactcaggagccctcactgactgtgtccccaggagggacggtcactctcacctgtggttccaccactggacctgtcaccagtggtcattatccctactggttccaacagaagcctggccaagcccccaggacagtgatttatgatacaaccaacaaacactcctggacacctgcctggttctcaggctccctccttgggggcaaagctgccctgaccctttcgggtgcacagcctgaggatgaggctgagtattactgcttgctcgcctatagtggtacttgggtattcggcggagggaccaagctgaccgtcctag

SEQ ID NO: 3753 - DNA, 322 bp, Homo sapiens
  source 1..322: mol_type = other DNA
gacatccagatgacccagtctccatcctctgtgtctgcatctgtaggagacagagtcaccatcacttgtcgggcgagtcaggctattagcaggtggttagcctggtatcagcagaaaccagggaaagcccctaagttcctgatctatgctgcatccagtttgcaaagtggggtcccatcaaggttcagcggcagtggatctgggacagatttcactctcactatcagcagcctgcagcctgaagattttgcaacttactattgtcagcaggttaacagtttcgcgctcactttcggcggagggaccaaggtggagatcaaac

SEQ ID NO: 3754 - DNA, 322 bp, Homo sapiens
  source 1..322: mol_type = other DNA
gaaatggtgatgacgcagtctccagccaccctgtctgtgtctccaggggatacagccaccctctcctgcagggccagtcagagtgttagcagcaagttagcctggtaccagcacaaacctggccaggctcccaggctcctcatctatggtgcatccaccagggccactggtatcccagccaggttcagtggcagtgggtctgggacagagttcactctcaccatcaccagcctgcagtctgaagattttgcagtttattactgtcaccagtataataactggcctcgcacgttcggccaagggaccaaggtggaaatcaaac

SEQ ID NO: 3755 - DNA, 334 bp, Homo sapiens
  source 1..334: mol_type = other DNA
cagtctgccctgactcagcctgcctctgtgtctgggtctcctggacagtcgatcaccatctcctgcactggaaccagcagtgacgttggtggttataactctgtctcctggtatcaacaacacccgggcaaagcccccaaactcatgatttatgacgtcactcagcggccctcaggggtttctaatcgcttctctggctccaggtctggcaacacggcctccctgaccatctctgggctccaggctgaggacgaggctgattattactgcagctcatatacaagcgacataatccctgtgttcttcggcggagggaccaagctgaccgtcctag

SEQ ID NO: 3756 - DNA, 325 bp, Homo sapiens
  source 1..325: mol_type = other DNA
gaaatagtgatgacgcaatctccagccaccctgtctgtgtctccaggggaaagagccaccctctcctgcagggccagtcagagcgttgacaccagcttggcctggtaccagcagaaacctggccaggctcccaggctcctcatctatggtgcatccaccagggccactggtgtcccagccaggttcagtggcagtgggtctgggacagagttcactctcaccatcagcagcctgcagtctgaagattttgcagtctattactgtcagcagtatcataactggcctccgctcactttcggcggagggaccaaggtggagatcaaac

SEQ ID NO: 3757 - DNA, 337 bp, Homo sapiens
  source 1..337: mol_type = other DNA
gatattgtgttgacccagactccactctctctgtccgtcacccctggacagccggcctccatctcctgcaagtctagtcagagcctcctgcatagtgatggaaagacctatttgtattggtacctgcagaagccaggccagcctccacagctcctgatctacgaagtttccaaccagttctctggagtgccagataggttcaggggcagcgggtcagggacagatttcacactgaaaatcagccgggtggagggtgaggatgttggggtttattactgtatgcaaagtatacaacttccgctcactttcggcggagggaccaaggtggagatcaaac

SEQ ID NO: 3758 - DNA, 340 bp, Homo sapiens
  source 1..340: mol_type = other DNA
gacatcgtgatgacccagtctccagactccctcgatgtgtctctgggcgagtgggccaccatcaactgcaggtccagtcagagtgttttttacaagtccaacaagaagaattactttgcttggtaccagcagaaaccaggacagcctcctaggttgctcattcactgggcatctacccgggaacccggggtccctgaccgattcagtggcagcgggtccgggacagagttcactctcactatcagtaacgtgcaggctgaagatgcggcaatttatttctgtcagcaatattacagtattcctctcactttcggcggagggaccagggtggcgatcaaac

SEQ ID NO: 3759 - DNA, 346 bp, Homo sapiens; identical to SEQ ID NO: 3675
  source 1..346: mol_type = other DNA

SEQ ID NO: 3760 - DNA, 328 bp, Homo sapiens
  source 1..328: mol_type = other DNA
gaaattgtgttgacgcagtctccaggcaccctgtctttgtctccaggggaaagagccaccctctcttgcagggccagtcagagtgttagtagcggttacttagcctggtaccagcacaagcctggccagtctcccaggctcctcatctatggtgcatccagcagggccactgacatcccagacaggttcagtggcagtgggtctgggacagacttcactctcaccatcagcagactggagcctgaagattttgcagtgtattactgtcagcactatggtagctcaccaatgtacacttttggccaggggaccaagctggagatcaaac

SEQ ID NO: 3761 - DNA, 322 bp, Homo sapiens
  source 1..322: mol_type = other DNA
gaaatagtgatgacgcagtctccagccaccctgtctgtgtctccaggggaaagagccaccctctcctgcaggggcagtcagagtgttagcagcaacttagcctggtaccagcagaaacctggccaggctcccaggctcctcatctatggtgcatccaccagggccactgatatcccagccaggttcagtggcattgggtctgggacagagttcactctcaccatcagcagcctgcagtctgaagattttgcagtttattactgtcagcagtataataactggccgatcaccttcggccaagggacacgactggatattaaac

SEQ ID NO: 3762 - DNA, 337 bp, Homo sapiens
  source 1..337: mol_type = other DNA
cagtctgtgctgacgcagccgccctcagtgtctggggccccagggcagagggtcaccatctcctgcactgggagcagctccaacatcggggcaggttatgatgtacactggtaccagcaacttccaggaacagcccccaaactcctcatctatgctaacagcaatcggccctcaggggtccctgaccgattctctggctccaagtctggcacctcagcctccctggccatcactgggctccaggctgaggatgaggctgattattactgccagtcctatgacagaagcctgagtggttcgggtgtcttcggaactgggaccaaggtcaccgtcctag

SEQ ID NO: 3763 - DNA, 325 bp, Homo sapiens
  source 1..325: mol_type = other DNA
gaaatagtgatgacgcagtctccagccactctgtctgtgtctccaggggaaagagccaccctctcctgcagggccagtcagagtgttagcagcgacttggcctggtaccagcagaagcctggccaggctcccaggctcctcatctatggtgcatccaccagggccactggtatcccagccaggttcagtggcagtgggtctgggatagagttcactctcaccatcagcagcctgcagtctgaagattttgcagtttattactgtcagcagtataataactggcctccgctcactttcggcggagggaccaaggtggagatcaaac

SEQ ID NO: 3764 - DNA, 322 bp, Homo sapiens
  source 1..322: mol_type = other DNA
gacatccagatgacccagtctccatcctccctgtctgcatctgtaggagacagagtcaccatcacttgccgggcaagtcagggcattagaaatgatttaggctggtatcagcagaaaccagggaaagcccctaagcgcctgatctatgctgcatccagtttgcaaagtggggtcccatcgaggttcagcggcagtggatctgggacagaattcactctcactatcagcagcctgcagcctgaagattttgcaacttattactgtctacagcatactacttacctctggacgttcggccaagggaccaaggtggaaatcaaac

SEQ ID NO: 3765 - DNA, 325 bp, Homo sapiens
  source 1..325: mol_type = other DNA
gaaatagtgatgacgcagtctccagccaccctgtctgtgtctccaggggagagagccaccctctcctgcagggccagtcagagtgttagcagcaacttagcctggtaccagcagaaacctggccaggctcccaggctcctcatctatggtgcatccaccagggccactggtatcccagccaggttcagtggcagtgggtctgggacagagttcactctcaccatcagcagcctgcagtctgaagattttgcagtttattactgtcagcagtataataactggcctccgctcactttcggcggagggaccaaggtggagatcaaac

SEQ ID NO: 3766 - DNA, 330 bp, Homo sapiens
  source 1..330: mol_type = other DNA
cagtctgccctgactcagcctccctccgcgtccgggtctcctggacagtcagtcaccatctcctgcaccgaaaccagcagtgacgttggtggtcggaactatgtctcctggtaccaacagcaccccggcaaagcccccaaactcatcatttatgaagacaagaagcggccctcaggggtccctgatcgcttctctggctccaagtctggcaacacggcctccctgaccgtctctgggctccaggctgacgatgaggctgattattactgcagctcatatgcaggcagtaacgatcaaaaattcggcggagggaccaagttgaccgtccta

SEQ ID NO: 3767 - DNA, 325 bp, Homo sapiens
  source 1..325: mol_type = other DNA
gaaattgtgttgacacagtctccagccaccctgtctttgtctccaggggatagagccaccctctcctgcagggccagtcagagtgttggcagctacttagcctggtaccaacagaaacctggccagcctcccaggctcctcatctatgatgcatccaacagggcctctggcatcccagccaggttcagtggcagtgggtctgggacagacttcactctcaccatcagcagcctagagtctgaagattttgcagtttattactgtcagcagcgtagcaactggcctccgctcactttcggcggagggaccaaggtggagatcaaac

SEQ ID NO: 3768 - DNA, 334 bp, Homo sapiens
  source 1..334: mol_type = other DNA
cagtctgccctgactcagcctgcctccgtgtctgggtctcctggacagtcgatcaccatctcctgcactggaaccagcactgacgttggtgcttctgactctgtctcctggtaccaacaacacccacccaaagcccccaaactcatgatttatgatgtcgataagcggccctcaggggtttctaatcgcttctctggctccaagtctggcaacacggcctccctgaccatctctgggctccaggctgaggacgaggctgattattactgcagctcctatacaagaagaaccaccccttatgtcttcggaactgggaccaaggtcaccgtcctag

SEQ ID NO: 3769 - DNA, 337 bp, Homo sapiens
  source 1..337: mol_type = other DNA
gatattgtgatgacccagactccactctctctgtccgtcacccctggacagccggcctccatctcctgcaagtctagtcagagcctcctgcatagtgatggaaagacctatttgtattggtacctgcagaagccaggccagcctccacacctcctgatctatgaagtttccaaccggttctctggagtgccagataggttcagtggcagcgggtcagggacagatttcacgctgaaaatcagccgggtggaggctgaggatgttgggtcttatttctgcatgcaaagtacacagcttccgtacacttttggccaggggaccaagctggagatcaaac

SEQ ID NO: 3770 - DNA, 334 bp, Homo sapiens
  source 1..334: mol_type = other DNA
cagcttgtgctgactcaatcgccctctgcctctgcctccctgggagcctcggtcaaactcacctgcactctgagcagtgggcacagcgactacgccatcgcttggcatcagcagcggccagagatgggccctcggtacttgatgaaggttagtagtgatggcacccacaacaagggggacgggatccctgatcgcttctcaggctccagctctggggctgagcgctacctcaccatctccagtctccagtctgaggatgaggctgactattactgtcagacgtgggtcactggccattatgtcttcggaactgggaccaaggtcaccgtcctag

SEQ ID NO: 3771 - DNA, 325 bp, Homo sapiens
  source 1..325: mol_type = other DNA
gaaatagtgatgacgcagtctccagccaccctgtctgtgtctccaggggaaagagccaccctctcctgcagggccagtcagagtgttagcagcaacttagcctggtaccagcagaaacctggccaggctcccaggctcctcatctatggtacatccaccagggccactggtatcccagccaggttcagtggcagtgggtctgggacagagttcactctcaccatcagcagcctgcagtctgaagattttgcagtttattactgtcagcagtataataactggcctccgctcactttcggcggagggaccaaggtggagatcaaac

SEQ ID NO: 3772 - DNA, 337 bp, Homo sapiens
  source 1..337: mol_type = other DNA
gaaaatgtgatgactcagtctccactctccctgcccgtcacccctggagagccggcctccatctcctgcaggtctagtcagagcctcctgcatagtaatgggtacaactatttggattggtacctgcagaagccaggacagtctccacaactcctgatctatttgggttctattcgggcctccggggtccctgacaggttcagtggcagtggatcaggcacagattttacactgaaaatcagcagagtggaggctgaggatgttggggtttattactgcatgcaaggtctacaaactcccaacacttttggccaggggaccaagctggagatcaaac

SEQ ID NO: 3773 - DNA, 328 bp, Homo sapiens
  source 1..328: mol_type = other DNA
gaaatagtgatgacgcagtctccagccaccctgtctgtgtctccaggggaaagagccaccctctcctgcagggccagtcagagtgttggcagcaacttagcctggtaccagcagaaacctggccaggctcccaggctcctcatctatggtgcatccaccagggccactggtatcccagccaggttcagtggcagtgggtctgggacagagttcactctcaccatcgccagcctgcagtctgaagattttgcactttattactgtcagcagtttaatagctggcctccgagactcactttcggcggagggaccaaggtggagatcaaac

SEQ ID NO: 3774 - DNA, 320 bp, Homo sapiens
  source 1..320: mol_type = other DNA
gacatccagatgacccagtctccatcctccctgtctgcatctgtaggagacagagtcaccatcacttgccgggcaagtcagaacattaacagcgatttaaattggtatcaacagaaaccagggaaagcccctaagttcctggtctatcttgtatccaatttgcaaagtggggtcccatcaaggttcagtggcagtggatctgggacagatttcactctcaccatcagcagtctgcaacctgaggactttgcaacttactactgtcaacagagtttcggtttcccgatcactttcggcggagggaccaaggtggagatcaa

SEQ ID NO: 3775 - DNA, 328 bp, Homo sapiens
  source 1..328: mol_type = other DNA
gaaattgtgttgacgcagtctccaggcaccctgtctttgtctccaggggaaagagccaccctctcctgcagggccagtcagagtgttaccaacaactacttagcctggtaccagcagagacctggccagtctcccaggctcctcatctacggtgcatccagcagggccactggcatcccagacaggttcagtggcagtgggtctgggactgacttcactctcaccatcagcagactggaacctgaagattttgctgtgtattactgtcagcagtatggtgcctcacctatgtacacttttggccgggggaccaagctggacatcaaac

SEQ ID NO: 3776 - DNA, 340 bp, Homo sapiens
  source 1..340: mol_type = other DNA
gacatcgtgatgacccagtctccagactccctggctgtgtctctgggcgagagggccaccatcaactgcaagtccagccagagtgttttatatagctccaacaataacaactacctagcttggtaccagcagaaaccaggacagcctcctaaactgctcatttactgggcatctacccgggaatccggggtccctgaccgattcagtggcagcgggtctgggacagatttcactctcaccatcagcagcctgcaggctgaagatgtggcagtttattactgtcagcaacattatagtaccccgggcacttttggccaggggaccaaggtggagatcaaac

SEQ ID NO: 3777 - DNA, 316 bp, Homo sapiens
  source 1..316: mol_type = other DNA
gacatccagatgacccagtctccttccaccctgtctgcatctgttggagacacagtcaacatcacctgccgggccagtcagagcagtagtgactggttggcctggtatcagcagaagccagggaaagcccctagactcctgatctataaggcgtctactttagaaagtggggtctcatcaaggttcagcggcagtggatctgagacagaattcactctcaccatcagcagcctgcagcctgatgattttgcaacttatttctgccaacagagttttatgtacacttttggcccggggaccaaggtggagatcaaac

SEQ ID NO: 3778 - DNA, 337 bp, Homo sapiens
  source 1..337: mol_type = other DNA
gatgttgtgctgactcagtctccactctccctgcccgtcacccttggacagccggcctccatctcctgcaggtctaatcaaagcctcctataccgtgatggaaacacctacttgtattggtttcagcagaggccaggccaatctccaaggcgcctaatttataaggtttctaactgggactctggggtcccagacagattcagcggcagtgggtcaggcactgatttcacactgaaaatcagcagggtggaggctgaggatgttggggtttattactgcatgcaagttacacactggccgctcactgtcggcggagggaccaaggtggagatcaaac

SEQ ID NO: 3779 - DNA, 325 bp, Homo sapiens
  source 1..325: mol_type = other DNA
gaaatagtgatgacgcagtctccagccaccctgtctgtgtctccaggggaaagagccaccctctcctgcagggccagtcagagtgttagcagcgacttagcctggtatcagcagaaacccggccaggctcccaggctcctcatctatggcgcgtccatcagggccactgctatcccagccaggttcagtggcagtgggtctgggacagagttcactctcaccatcagccgcctgcagtctgaagattttgcagtttattactgtcagcagtataataattggcctccgatcactttcggcggagggaccacggtggagatcaaac

SEQ ID NO: 3780 - DNA, 331 bp, Homo sapiens
  source 1..331: mol_type = other DNA
cagtctgccctgattcagcctcgctcagtgtccgggtctcctggacagtcaatcaccatctcctgcagtggaaccagcagtgatgttggtaattataactatatttcctggtaccaacagcacccaggcaaagcccccaaagtcatgatttatgatgtcaataagcggccctcaggggtccctgatcgcttctctggctccaagtctggcaacacggcctccctgaccatctctgggctccaggctgaagatgaggctgattactactgctgctcatatgcaggcagctcctcttgggtgttcggcggagggaccaaactgaccgtcctag

SEQ ID NO: 3781 - DNA, 325 bp, Homo sapiens
  source 1..325: mol_type = other DNA
gaaatagtgatgacgcagtctccagccaccctgtctgtgtctccaggggaaagagccaccctctcctgccgggccagtcagagtgttagcagcaacttagcctggtaccagcagaaacctggccaggctcccaggctcctcatctatggtgcatccaccagggccactggtgtcccagccaggttcagtggcagtgggtctgggacagagttcactctcaccatcagcagcctgcagtctgaagattttgcagtttattactgtcagcagtataataactggcctccgctcactttcggcggagggaccaaggtggagatcaaac

SEQ ID NO: 3782 - DNA, 337 bp, Homo sapiens
  source 1..337: mol_type = other DNA
gatactgtgatgacccagactccactctctctgtccgtcacctctggacagccggcctccatctcctgtaagtctagtcagagcctcctacatagtgatggaaagacctatttgtactggtacctgcagaagccaggccagcctccacagctcctgatctatgaagtttccaaccggttctctggagtgccagataggttcagtggcagcgggtcagggacagatttcacactgaaaatcagccgggtggaggctgaggatgttggggtttattactgcatgcaaagtgtacagcttccgtgcacttttggccaggggaccaagctggagatcaaac

SEQ ID NO: 3783 - DNA, 346 bp, Homo sapiens
  source 1..346: mol_type = other DNA
caggctgtgctgactcagccgtcttccctctctgcatctcctggagcatcagccagtctcacctgcaccttgcgcagtggcatcaatgttggtacctacaggatatactggtaccagcagaagccagggagtcctccccagtatctcctgaggtacaaatcagactcagataagcagcagggctctggagtccccagccgcttctctggatccaaagatgcttcggccaatgcagggattttactcatctctgggctccagtctgaggatgaggctgactattactgtatgatttggcacagcagcggaggagtgttcggcggagggaccaagctgaccgtcctag

SEQ ID NO: 3784 - DNA, 323 bp, Homo sapiens
  source 1..323: mol_type = other DNA
tcctatgtggtgactcagccaccctcagtgtcagtggccccaggaatgacggccacgatttcctgtgggggatacaacattggaagtcaaagtgtgcactggtatcagcagaagccaggcctggcccctttattggtcttgtatgatgatagggaccggccctcagggatccctgagcgattctctggctccaactctgggaacacggccaccctgaccatcagcagggtcgaagccggggatgaggccgcctattactgtcaggtgcgggatagtagtggtgatcatcgggtattcggcggagggaccaagctgaccgtcct

SEQ ID NO: 3785 - DNA, 340 bp, Homo sapiens
  source 1..340: mol_type = other DNA
gacttcgtgatgacccagtctccagactccctggctgtgtctctgggcgagagggccaccatcaactgcaagtccagccagagtgttttctgggagtccaacaaaaagaactacttagcttggtaccaacagaaagccggacagcctcctaaggtgctcatttactgggcatcttcccgggaatccggggtccctgaccgattcagtggcagcgggtctgggacagatttcactctcaccatcagcagcctgcaggctgaagatgtggcagtttattactgtcagcaatattatgatattcccttcactttcggccctgggaccagagtggatatcaaac

SEQ ID NO: 3786 - DNA, 322 bp, Homo sapiens
  source 1..322: mol_type = other DNA
tcctatgagctgactcagccaccctcagtgtccgtgtccccaggacagacagccaccatcacctgctctggagataaattgggggataaatatgcttgctggtatcagcagaagccaggccagtcccctgtgctggtcatctatcaagatagcaagcggccctcagggatccctgagcgattctctggctccaactctgggaacacagccactctgaccatcagcgggacccgggctatggatgaggctgactattactgtcaggcgtgggacagcagcactgcagtggtattcggcggcgggaccaagctgaccgtcctag

SEQ ID NO: 3787 - DNA, 328 bp, Homo sapiens
  source 1..328: mol_type = other DNA
gaaatattgatgacgcagtctccatccaccctgtctgtgtctccaggggaaagagccaccctctcctgcagggccagtcagagtgttggcagtaacttagcctggtaccagcagaaacctggccaggctcccaggctcctcctctatggtgcatccaccagggccactggtatcccagccaggttcagtggcagtgggtctgggacagacttcactctcaccatcagcaacctgcagtctgaagattttgcagtttattactgtcagcagtataataactggcctccgaagctcactttcggcggagggaccaaggtggcgatcaaac

SEQ ID NO: 3788 - DNA, 328 bp, Homo sapiens
  source 1..328: mol_type = other DNA
gaaattgtgttgacgcagtctccaggcaccctgtctttgtctccaggggaaagagccaccctctcctgcagggccagtcagagtgttagcgccagttacttagcctggtaccagcagaaacctggccaggctcccaggctcctcatctatggtacatccagcagggccactggcatcccagacaggttcagtggcagtgggtctgggacagacttcactctcaccatcagcagactggagcctgaagattttgcagtttattactgtcagcagtatggtagctcagtcgcgctcactttcggcggagggaccaaggtggagatcaaac

SEQ ID NO: 3789 - DNA, 322 bp, Homo sapiens
  source 1..322: mol_type = other DNA
gacatccagatgacccagtctccttccaccctgtctgcatctgtaggagacagagtcaccatcacttgccgggccagtcagagtattagtagctggttggcctggtatcagcagaaaccagggaaagcccctaagctcctgatctataaggcgtctaatttagaaagtggggtcccatcaaggttcagcggcagtggatctgggacagaattcactctcaccatcagcagcctgcagcctgatgattttgcagcttattactgccaacactataatacttattcagggaccttcggccaagggaccaaggtggaaatcaaac

SEQ ID NO: 3790 - DNA, 322 bp, Homo sapiens
  source 1..322: mol_type = other DNA
gaaatagtgatgacgcagtctccagccaccctgtctgtgtctccaggggaaagagccaccctctcctgcagggccagtcagagtgttagcagcaacttagcctggtaccagcacaagcctggccaggctcccaggctcctcatctatggcgcatccaccagggccactggtatcccagccaggttcagtggcagtgggtctgggacagagttcactctcaccatcaccagcctgcagtctgaagattttgctgtttattactgtcaccagtattataactggcctcgcacgttcggccaagggaccaaggtggaaatcaaac

SEQ ID NO: 3791 - DNA, 319 bp, Homo sapiens
  source 1..319: mol_type = other DNA
gaaatagtgatgacgcagtctccagccaccctgtctgtgtctccaggggaaagagccaccctctcctgcagggccagtgagagtatcagcagcaacttagcctggtaccagcagaaacctggccaggctcccaggctcctcatctatggtgcatcaaccagggcccctggtatcccaaccagattcagtggcagtgggtctgggacagagttcactctcaccatcagcagcctgcagtctgaagattttgcagtttattactgtcagcagtataataactggccttttttcggccctgggaccaaagtgcatatcaaac

SEQ ID NO: 3792 - DNA, 330 bp, Homo sapiens
  source 1..330: mol_type = other DNA
cagtctgccctgactcagcctgcctccgtgtctgggtctcctggacagtcgatcaccatctcctgcactgggaccagcagtgacgttggtggttataactctgtctcctggtaccaacaacacccaggcaaagcccccaaactcatgatttatgatgtcagtaagcggccctcaggggtttctaatcgcttctctggctccaagtctggcaacacggcctccctgaccatctctgggctccaggctgaggacgaggctgattattactgcagctcatatacagacaggaccccttatgtcttcggaactgggaccaaggtcaccgtccta

SEQ ID NO: 3793 - DNA, 325 bp, Homo sapiens
  source 1..325: mol_type = other DNA
gaaattgtgttgacacagtctccagccaccctgtctttgtctccaggggaaagagccaccctctcctgcagggccagtcagagtgttcgcagcttcttagcctggtaccagcagaaacctggccaggctcccaggctcctcatttatgatgcatttaagagggccactggcatcccagccaggttcagtggcagtgggtctgggacagacttcactctcatcatcagcagcctagagcctgaagattttgcagtttattactgtcagcagcgtagcaactggcctcaggtcacttttggccaggggaccaggctggaaatcaaac

SEQ ID NO: 3794 - DNA, 334 bp, Homo sapiens; identical to SEQ ID NO: 3105
  source 1..334: mol_type = other DNA

SEQ ID NO: 3795 - DNA, 337 bp, Homo sapiens
  source 1..337: mol_type = other DNA
gatgttgtgttgactcagtctccactctccctgcccgtcacccttggacagccggcctccatctcctgcaggtctaatcaaagcctcgtatacagtgatggagtcacctacttgaattggtttcagcagcggccaggccaatctccaaggcgcctaatttatagggtttctaactgggactctggggtcccagacagattcagcggcagcgggtcaggcactgatttcacactgaaaatcagcagggtggaggctgaggatgttggggtttattactgcatgcaagctacacactggccgctcactgtcggcggagggaccaaggtggagatcaaac

SEQ ID NO: 3796 - DNA, 325 bp, Homo sapiens
  source 1..325: mol_type = other DNA
gaaatagtgatgacgcagtctccagccaccctgtctgtgtctccaggggaaagagccaccctctcctgcagggccagtcagagtgtgagcagcgacttagcctggtatcagcaaaaacccggccaggctcccaggctcgtcatctatggtgcgtccattagggccactgctatcccagccaggttcagtggcagtgggtctgggacagagttcactctcaccatcagccgcctgcagtctgaggattttgcagtttattactgtcagcagtatcataattggcctccgatcactttcggcggagggaccacggtggagatcaaac

SEQ ID NO: 3797 - DNA, 337 bp, Homo sapiens
  source 1..337: mol_type = other DNA
gatattgtgatgacccagactccactctctctgtccgtcacccctggacagccggcctccatctcctgcaagtcgagtcagagcctcctgcatagtgatggaaagacctatttgtattggtacctgcagaagccaggccagcctccacaggtcctgatctatgaagtttccaaccggttctctggagtgccagataggttcagtggcagcgggtcagggacagatttcacactgaaaatcagccgggtggaggctgaggatgttggggtttattactgcatgcaaagtatacactttcctctcactttcggccctgggaccaaagtggatatcaaac

SEQ ID NO: 3798 - DNA, 325 bp, Homo sapiens
  source 1..325: mol_type = other DNA
gacatccagatgacccagtccccttccaccctgtctgcatctgtgggagacagagtcaccatcacttgccgggccagtcagagtattagtacttggttggcctggtatcagcagaaaccagggaaagcccctaagctcctgatctataaggcgtcaaagttagagagaggggtcccatcaaggttcagcggcagtggatctgggacagaattcactctcaccatcagcggcctgcagcctgatgactttgcaacttattactgcggacagtataatcattatacgtcttacgcttttggccaggggaccaagctggagatcaaac

SEQ ID NO: 3799 - DNA, 325 bp, Homo sapiens
  source 1..325: mol_type = other DNA
gaaatagtgatgactcagtttccagccaccctgtctgtgtctccaggggaaagagccaccctctcctgcagggccagtcagagtgttaccagcgacttagcctggtaccagcagaaacctggccaggctcccaggctcctcatctatggtgcatctaccagggccactggtatcccagccaggttcagtggcagtgggtctgggacagagttcactctcaccatcagcagcctgcagtctgaagattttgcagtttattactgtcagcagtataataattggcctccgctcactttcggcggggggaccaaggtggagatcaaac

SEQ ID NO: 3800 - DNA, 325 bp, Homo sapiens
  source 1..325: mol_type = other DNA
gaagtagtgatgacgcagtctccagccaccctgtctgtgtctccaggggaaggagccaccctctcctgcagggccagtcagagtgttagcaccagcgtagcctggtaccagcggaagcctggccaggctcccaggctcctcatctatggtgcatccaccagggccactggtatcccagccaggttcagtggcagtgggtctgggacagagttcactctcaccatcagcagcctgcagtctgaagattttgcagtttattactgtcagcagtataataactggcccccgctcactttcggcggagggaccaagttggagatcaaac

SEQ ID NO: 3801 - DNA, 334 bp, Homo sapiens
  source 1..334: mol_type = other DNA
cagtctgtgctgactcagccaccctcagcgtctgggacccccgggcagagggtcaccatctcttgttctggaagcagctccaacatcggaagtaattatgtatactggtaccagcagctcccaggaacggcccccaaactcctcatctataggaataatcagcggccctcaggggtccctgaccgattctctggctccaagtctggcacctcagcctccctggccatcagtgggctccggtccgaggatgaggctgattattactgtgcagcatgggatgacagcctgagtggtcatgtggtattcggcggagggaccaagctgaccgtcctag

SEQ ID NO: 3802 - DNA, 340 bp, Homo sapiens
  source 1..340: mol_type = other DNA
gacatcgtgatgacccagtctccagactccctgactgtgtctctgggcgagagggccaccatcaactgcaagtccagccagagtgttttatacagctccaacagtgagaactccttagcttggtaccagcagaaaccaggacagcctcctaagttgctcatttactgggcatctacccgggaatccggggtccctgaccgattcagtggcagcgggtctgggacagatttcactctcaccatcagcagcctgcaggctgaagatgtggcagtttattactgtcagcaatattatactactccgtacacttttggccaggggaccaagctggagatcaaac

SEQ ID NO: 3803 - DNA, 325 bp, Homo sapiens
  source 1..325: mol_type = other DNA
gaaattgtgttgacacagtctccagccaccctgtctttgtctccaggggcaagagccaccctctcctgcagggccggacagagtgttggcaaccacttagcctggtaccaacagaaacctggccagcctcccaggctcctcatctatgatacatccaacagggccactggcatcccagccaggttcagtggcagtgggtctgggacagacttcactctcaccatcagcagcctagagcctgaagattttgcagtttattactgtcagcagcgtagcaactggcctccgatcaccttcggccaagggacacgactggagattaaac

SEQ ID NO: 3804 - DNA, 325 bp, Homo sapiens
  source 1..325: mol_type = other DNA
gaaatagtgatgacgcagtctccggccaccctgtctgtctctccaggggaaagcgccaccctctcctgcagggccagtcagagtgttagcagcgacttagcctggtaccagcagaaacctggccaggctcccagtctcctcatccatggtgcatccaccagggccactggtatcccagtcaggttcagtggcagtgggtctgggacacagttcactctcaccatcaccagcctgcagtctgaagattttgcagtttattactgtcagcagtataataactggcctccgatcaccttcggccaagggacacgactggagattaaac

SEQ ID NO: 3805 - DNA, 319 bp, Homo sapiens
  source 1..319: mol_type = other DNA
gacatccagatgacccagtctccatcctccctgtctgcatctgtgggagacagagtcaccatcacttgccgggcgagtcagagtattagcagatatttaagttggtatcaacagaaaccagggaaagccccaaagctcctgatctatgctgcatccagtttacaaagtggggtcccatcaaggttcagtggcagtgggtctgggacagatttcactctcaccatcagcagtctgcaacctgaagattttgcaacttattactgtcaccagagttacagtaacccgaggtctttcggccctgggaccaaagtggatatca

SEQ ID NO: 3806 - DNA, 325 bp, Homo sapiens
  source 1..325: mol_type = other DNA
gaaagtgtgttgacgcagtctccaggcaccctgtctttgtctccaggggaaagagccaccctctcctgcagggccagtcagagtgttcgcagcagctacttagcctggtaccagcagaaacctggccaggctcccaggctcctcatctatggtgcatccagcagggccactggcattccagacaggttcagtggcagtgggtctgcgacagacttcactctcaccatcagcagactggagcctgaagattttgcagtgtattactgtcagcagtatggtagctcaccgtgcacttttggccaggggaccaagctggagatcaaac

SEQ ID NO: 3807 - DNA, 325 bp, Homo sapiens
  source 1..325: mol_type = other DNA
gaaatactgatgacgcagtctccagccaccctatctgtgtctccaggggaaagagccaccctctcctgcagggccagtcagaccattagcagcgacttagcctggtaccagcagaaacctggccaggctcccaggctcctcatctatggtgcgtccaacagggccactggtatcccagccaggttcagtggcagtgggtctgggacagagttcactctcaccatcagcagcctgcagtctgacgactttgcagtttattactgtcagcagtataataactggcctccgatcaccttcggccaagggacacgactggaaattaaac

SEQ ID NO: 3808 - DNA, 325 bp, Homo sapiens
  source 1..325: mol_type = other DNA
gaaatagtgatgacgcagtctccagccaccctgtctgtgtctccaggggaaagagccaccctctcctgcagggccagtcagagtattagcaacaacttagcctggtaccagcagaaacctggccaggctcccaggctcctcatctatggtgcatccaccagggccactggtatcccagccaggttcagtggcagtgggtctgggacagagttcactctcaccatcagcagcctgcagtctgaagattttgcagtttattattgtcagcaacataataactggcccccgtggacgttcggccaagggaccaaggtggaaatcaaac

SEQ ID NO: 3809 - DNA, 331 bp, Homo sapiens
  source 1..331: mol_type = other DNA
cagtctgtgctgactcagccaccctcagcatctgggacccccgggcagagggtcaccatctcttgttctggaagcagctccaacatcggaagtaatactgtgaactggtaccagcagctcccaggaacggcccccaaactcctcatctatagtaataatcagcggccctcaggggttcctgaccgattctctggctccaagtctggcacctcagcctccctggccatcggtgggctccagtctgaggatgaggctgattattactgtgcagcatgggatgacaggctgaaaggtgtggtattcggcggagggaccaagctgaccgtcctag

SEQ ID NO: 3810 - DNA, 325 bp, Homo sapiens
  source 1..325: mol_type = other DNA
tcctatgagctgacacagccaccctcggtgtcagtgtccccaggacagacggccaggatcacctgctctggagatgccttgtcaaggcaacatgctcattggtaccagcagaagccaggccaggcccctatattggtgatatataaagacaatgagaggccctcagggatccccgagcgattctctggctccagcgccgggacaacagtcacattgaccatcagtggagtccaggcagaagacgagtctgactattactgtcaatcaacatcagcacacagtagcggtcgggtattcggcggagggaccaggctgaccgtcctag

SEQ ID NO: 3811 - DNA, 334 bp, Homo sapiens
  source 1..334: mol_type = other DNA
cagcttgtgctgactcaatcgccctctgcctctgcctccctgggagcctcggtcaaggtcacctgcactctgagcagtgggcacatcaactacgccatcgcatggcatcagcaccagccagagaagggccctcgatatttgatgaagcttaacagtgatggcagccacaccaagggggacggcattcctgatcgcttctcaggctccagctctggggctgagcgctacctcatcatctccagcctccaggctgaggatgagggtgactattactgtcagacctggggcactggcatgtatgtcttcggagctgggaccaaggtcaccgtcctag

SEQ ID NO: 3812 - DNA, 317 bp, Homo sapiens
  source 1..317: mol_type = other DNA
gccatccagatgacccagtctccatcctccctgtctgcatctgtaggagacagagtcaccatcacttgccgggcaagtcagggcattagaaatgatttaggctggtatcagcagagaccaggggaagccccgaggctcctgatctatgctgcatccagtttacaaagtggagtcccatctaggttcagcggcagtggatctggcacagatttcactctcaccatcagcagcctgcagcctgaagattttgcaacttattactgtctacaagattacaatcacccgctcactttcggcggagggaccaaggtggagat

SEQ ID NO: 3813 - DNA, 325 bp, Homo sapiens
  source 1..325: mol_type = other DNA
gaaatagtgatgacgcagtctccagccaccctgtctgtgtctccaggggaaagagccaccctctcctgcagggccagtcagagtgttagcagcgacttagcctggtaccagcagaaacctggccaggctcccaggctcctcatctatggtgcatccaccagggccactggtatcccagccaggttcagtggcagtgggtctgggacagagttcactctcaccatcagcagcctgcagtctgaagattttgcagtttattactgtcagcagtataataactggcctccgatcaccttcggccaagggacacgactggagattaaac

SEQ ID NO: 3814 - DNA, 337 bp, Homo sapiens
  source 1..337: mol_type = other DNA
gaaattgtgatgacccagactccactgtctctggccgtcacttctggacagccggcctccatctcctgtaagtccagtcagagcctcctgcatagtgatggaaagacctatttgtactggtatctgcagaagccaggccagcctccacagctcctgatttatgaagtttccaaccgcttctctggagtgccagataggttcagtggcagcgggtcagggacagatttcacactgaagatcagccgggtggaggctgaggatgttgggctttattactgcatgcaaagtgtacagattccgtgtacttttggccaggggaccaagttggagatcaaac

SEQ ID NO: 3815 - DNA, 322 bp, Homo sapiens
  source 1..322: mol_type = other DNA
tcctatgagctgactcagccaccctcagtgtccgtgtccccaggacagacagccagcatcacctgctctggagataaattgggggataaatatgcttgctggtatcagcagaagccaggccagtcccctgtgctggtcatctatcaagatagcaagcggccctcagggatccctgagcgattctctggctccaactctgcgaacacagccactctgaccatcagcgggacccaggctatggatgaggctgactattactgtcaggcgtgggacagcagcagcctttatgtcttcggaactgggaccaaggtcaccgtcctag

SEQ ID NO: 3816 - DNA, 319 bp, Homo sapiens
  source 1..319: mol_type = other DNA
gacatccagatgacccagtctccatcctccctgtctgcatctgtaggagacagagtcaccatcgcttgccggacaagtcagagcattagcaggtatttaaattggtatcagcaaaaaccagggaaagcccctaaggccctgatctattctgcatccagtttgcaaagtggggtcccatcaaggttcaatggcagtgggtctgggacagaattcactctcaccatcagcagtctgcagcctgaagattttgctacttattactgtcaacagacttacagtgcccccagtttcggccctgggaccaatgtggatgtcaaac

SEQ ID NO: 3817 - DNA, 322 bp, Homo sapiens
  source 1..322: mol_type = other DNA
gacatccagatgacccagtctccttccaccctgtctgcatctgtaggagacagagtcaccatcacttgccgggccagtcagagtattagtacctggttggcctggtatcagcagaaaccagggaaagcccccaagctcctaatctataaggcgtctagtttagaaagtggggtcccatcaaggttcagcggcagtggatctgggacagagttcactctcaccatcagtagtctgcagcctgatgattgtgcaactttttactgtcaacagtatagtagttattcggggacattcggccaagggaccaaggtggaaatcaaac

SEQ ID NO: 3818 - DNA, 322 bp, Homo sapiens
  source 1..322: mol_type = other DNA
gacatccagatgacccagtctccatcctccctgtctgcatctgtgggagacagagtcaccatcacttgccgggcgagtcagggcatcagcaataatttagcctggtatcagcaaaaaccagggaacattcctaagctcctgatctatgctgcatccactttgcagtcaggggtcccatctcggttcagtggcagtggatctgggacagatttcactctcaccatcaccagcctgcagcctgaagatgttgcatcttattactgtcaaaggtataacagtgcccctgcgacgttcggccaagggaccaaggtggaaatcaaac

SEQ ID NO: 3819 - DNA, 322 bp, Homo sapiens
  source 1..322: mol_type = other DNA
tcctatgagctgacacagccaccctcggtgtcagtgtccccaggacagacggccaggatcacttgttctggagatgccttgccaaagaaatatgcttattggtaccagcagaagccgggccaggcccctgtcttgatgataaataaagacagtgagaggccctcagggatccctgagcgattctctggctccagatctgggacaacagtcacgttgaccatcagtggagtccaggcagaagacgaggctgactattattgtcaatcagccgacagcagtggttcttatgtcttcggaactgggaccaaggtcaccgtcctag

SEQ ID NO: 3820 - DNA, 320 bp, Homo sapiens
  source 1..320: mol_type = other DNA
gacatccagatgacccagtctccatcctccctgtctgcatctgtaggagacagagtcaccatcacttgccgggcaagtcagaacattaacagcgatttaaattggtatcaacagaaaccagggaaagcccctaagttcctggtctatcttgtttccaatttgcaaagtggggtcccatcaaggttcagtggcagtggatctgggacagatttcactctcaccatcagcagtctgcaacctgaagactttgcaacttactactgtcaacagagtttcgctttcccgatcactttcggcggagggaccaaggtggagatcaa

SEQ ID NO: 3821 - DNA, 320 bp, Homo sapiens
  source 1..320: mol_type = other DNA
gacatccagatgacccagtctccatcctccctgtctgcatctgtaggagacagagtcaccatcacttgccgggcaagtcagaacattaacagagatttaaattggtatcaacagaaaccaggggaagcccctaagttcctggtctatcttgtatccaatttgcaaagtggggtcccatcaaggttcagtggcagtggatctgggacagatttcactctcaccatcagcagtctgcaacctgaggactttgcaacttactactgtcaacagagtttcggtttcccgatcactttcggcggagggaccaaggtggagatcaa

SEQ ID NO: 3822 - DNA, 322 bp, Homo sapiens
  source 1..322: mol_type = other DNA
gacatccagatgacccagtctccatcctccctgtctgcatctgtacgagacagagtcaccatcacttgccaggcgagtcaggacattagcaagtatttaaattggtatcaacacaaaccagggaaagcccctaacctcctgatctacgacgcatccaatttggaaacaggggtcccatcaaggttcagtggaagtggatctgggacacattttactctcaccatcagcagcctgcagcctgaagatattgcaacatacttctgtcaacagtatgataatttccccctcgctttcggcggagggaccaaggtggagatcaaac

SEQ ID NO: 3823 - DNA, 337 bp, Homo sapiens
  source 1..337: mol_type = other DNA
gatattgtgatgacccagactccactctctctgtccgtcacccctggacagccggcctccatctcctgcaagtctagtcagagcctcctgcatagtgatggaaagacctatttgtattggtacctgcagaagccaggccagcctccacagctcctgttccatgaagtttccaaccggttctctggagtgccagataggttcagtggcagcgggtcagggacagatttcacactgaaaatcagccgggtggaggctgcggatgttgggatttattactgcatgcaaagtatacagcttcctctcactttcggcggagggaccaaggtggagatcaaac

SEQ ID NO: 3824 - DNA, 334 bp, Homo sapiens
  source 1..334: mol_type = other DNA
gatattgtgatgacccagactccactctcctcacctgtcacccttggacagccggcctccatctcctgcaggtctagtcaaagcctcgtacatagtgatggaggcacctacttgagttggcttcaccagaggccaggccagcctccaagactcctaatttataagatttctaaccggttctctggggtcccagacagattcagtggcagtggggcagggacagatttcacactgaaaatcagcagggtggaagctgaggatgtcggagtttattactgcgtgcaaactacacaatccgtggcgttcggccaagggaccaaggtggaaatcaaac

SEQ ID NO: 3825 - DNA, 334 bp, Homo sapiens
  source 1..334: mol_type = other DNA
cagactgccctgactcagcctcgctcagtgtccgggtctcctggacagtcagtcaccatctcctgcactggatccagtactgacgttggtggttataattacgtctcctggtatcaacagaacccaggcaaagcccccaaactcatgatttatgatgtcagtaagcgaccctcaggggtccctgctcgcttctctggctccaagtctgccaacacggcctccctgaccatctctgggctccaggctgaggatgaggctgattattactgctcctcatatgaaggcacttccacctatgtgattttcggcggagggaccaagctgaccgtcctag

SEQ ID NO: 3826 - DNA, 340 bp, Homo sapiens
  source 1..340: mol_type = other DNA
gacatcgtgatgacccagtctccagactccctggctgtgtctctgggcgagagggccaccatcaactgcaagtccagtcagagtcttttatacgactccaacaatttaaactacttagtttggtaccagcagaaaccaggacagcctcctaagctgctcatttactgggcatctatccgggagtccggggtccctgaccgattcagtggcagcgggtctgagacagatttcactctcaccatcagcagcctgcaggctgaagatgtggcagtttatttctgtcagcaacattatagtaccccgggcacttttggccaggggaccagggtggagatcaaac

SEQ ID NO: 3827 - DNA, 322 bp, Homo sapiens
  source 1..322: mol_type = other DNA
gccatccggatgacccagtctccatcctcattctctgcatctacaggagacagagtcaccatcacttgtcgggcgagtcagggtattagcagttatttagcctggtatcagcaaaaaccagggaaagcccctaagctcctgatctatgctgcatccactttgcaaagtggggtcccatcaaggttcagcggcagtggatctgggacagatttcactctcaccatcagctgcctgcagtctgaagattttgcaacttattactgtcaacagtattatagttaccctcacacttttggccaggggaccaagctggagatcaaac

SEQ ID NO: 3828 - DNA, 319 bp, Homo sapiens
  source 1..319: mol_type = other DNA
gacatccagatgacccagtctccatcctccctgtctgcatctgtaggagacagagtcaccatcacttgccgggcaagtcagagtattagcaggtatttaagttggtatcaacagaaaccagggaaagccccaaagctcctgatctatgctgcatccagtttacaaagtggggtcccatcaaggttcagtggcagtggatctgggacagatttcactctcaccatcagcagtctgcaacctgaagattttgcaacttactactgtcaccagagttacaataacccgaggtctttcggccctgggaccaaagtggatatca

SEQ ID NO: 3829 - DNA, 325 bp, Homo sapiens
  source 1..325: mol_type = other DNA
gaaatagtgatgacgcagtctccagccaccctgtctgtgtctccgggggaaagagtcaccctctcctgcagggccagtcagagtgttaacagcgacttagcctggtaccagcagaagccaggccaggctcccaggctcctcatctatggtgcatccaccagggccactggtatcccagccaggttcagtggcggtgggtctgggacagagttcactctcaccatcagcagcctgcagtctgaagattttgcagtttattactgtcagcagtataataactggcctcctctcactttcggcggagggaccaaggtggagatcaaac

SEQ ID NO: 3830 - DNA, 325 bp, Homo sapiens
  source 1..325: mol_type = other DNA
gacatccagatgacccagtctccatcctccctgtctgcatctgtaggagacagagtcaccatcacttgccgggcaagtcagaacattagaaattacttaaattggtatcaacagaaaccagggaaagcccctaacctcctgatctatgctgcgtcaactttgcacagtggggtcccatcaaggttcagtggcagtggatctgggacagacttcactctcaccatcaacagtctgcaacgggaagattttgcaacttactactgtcaacagagttaccatacccctccgtacacttttggccaggggaccaagctggagatcaaac

SEQ ID NO: 3831 - DNA, 319 bp, Homo sapiens
  source 1..319: mol_type = other DNA
gacatccagatgacccagtccccatcctccctgtctgcatctgtaggagacagagtctccatcacttgccgggcgagtcaggacatttacaattatttagcctggtatcagcagaaaccagggaaagttcctcagctcctgatctatgctgcatccactttgcaatcaggggtcccgtctcggttcagtggcagtggatctgggacagatttcactctcaccatcagcagcctgcagcctgaagatgttgcaacttattactgtcaaaagtataacagtgcctcgggaacgttcggccaagggaccaaggtggaaatca

SEQ ID NO: 3832 - DNA, 322 bp, Homo sapiens
  source 1..322: mol_type = other DNA
gacatccagatgacccagtctccttccaccctgtctgcatctgtaggagacagagtcaccatcacttgccgggccagtcagactattagtaggtggttggcctggtatcagcaggcaccagggaaagcccctaaactcctgatctataaggcgtctattttagagagtggggtcccatcaaggttcagcggcagtggatctgggacagatttcactctcaccatcagcagcctgcagcctgatgattttgcaacttattactgccaacagtataatagttatccgtggacgttcggccaagggaccaaggtggacatcaaac

SEQ ID NO: 3833 - DNA, 325 bp, Homo sapiens
  source 1..325: mol_type = other DNA
gaaatagtaatgacgcagtctccagccaccctgtctgtgtctccaggggaaagagccaccctctcctgcagggccagtcagagtgttagcagcgacttagcctggtaccagcagaaacctggccaggctcccaggctcctcatctatggtgcatccaccagggccactgatatcccagccaggttcagtggcagtgggtctgggacagagttcactctcaccatcagcagcctgcagtctgaagattttgcagtttattactgtcagcagtataataactggcctccggtcaccttcggccaagggacacgactggagattaaac

SEQ ID NO: 3834 - DNA, 334 bp, Homo sapiens
  source 1..334: mol_type = other DNA
gatattgtgatgacccagactccactctcctcacctgtcacccttggacagccggcctccatctcctgcaggtctagtcaaagcctcgtacacagtgatggaaacacctacttgagttggcttcagcagaggccaggccagcctccaagactcctaatttataagatttctaaccggttctctggggtcccagacagattcagtggcagtggggcggggacagatttcacactgaaaatcagcagggtggaacctgaggatgtcggggtttattactgcatgcaagctacacaatttccgacttttggccaggggaccaagctggagatcaaac

SEQ ID NO: 3835 - DNA, 325 bp, Homo sapiens
  source 1..325: mol_type = other DNA
gaagttgtgatgacgcagtctccagccaccctgtctgcgtctcctggggaaagagccaccctctcttgcaggtccagtcagagtattagtaacaatttagcctggtaccagcagaaacctggccaggctcccaggctcctcatctatggtgcatccaccagggccactggtaccccggccaggttcagtggcagtgggtctgggacagagttcactctcaccatcagcagcctgcagtctgaagattttgcagtctattactgtcagcagtataccttctggcctccgtggacgttcggccaagggaccaaggtggacatcaaac

SEQ ID NO: 3836 - DNA, 316 bp, Homo sapiens
  source 1..316: mol_type = other DNA
gacatccagatgacccagtctccttccaccctgtctgcatctgtaggagacagagtcaccatcacttgccgggccagtcagagtagtagtgattggttggcctggtatcagcagaaaccagggaaagcccccaagctcctgatctataaggcgtctactttagagactggggtcccatcaaggttcagcggcagtggatctgagacagaattcactctcaccatcagcagcctgcagcctgatgattttgcaacttattactgccaacagagttttatgtacacctttggccaggggaccaaggtggagatgaaac

SEQ ID NO: 3837 - DNA, 325 bp, Homo sapiens
  source 1..325: mol_type = other DNA
gaaatcgtgttgacacagtctccagccaccctgtctttgtctccaggggaaagagccaccctctcctgcagggccagtcagagtgttagcagctacttagcctggtaccaacagaaacctggccaggctcccaggctcctcatctatgatgcatccaacagggccactggcatcccagccaggttcagtggcagtgggtctgggacagacttcactctcaccatcagcagcctagagcctgaagattttgcaatttattactgtcagcagcgtagccactggcctccgcggttcacttttggccaggggaccaagctggagatca

SEQ ID NO: 3838 - DNA, 320 bp, Homo sapiens
  source 1..320: mol_type = other DNA
catccagatgacccagtctccatcctccctgtctgcgtctgttggagacagagtcaccatcacttgccgggccagtcagggcattagtaattatttaacctggtatcagcaaaaaccagggaaagcccctaagctcctgatctatgctgcatccactttgcacagtggggtcccatcaaggttcagcggcagtggatctgggacagatttcactctcaccatcagcagcctgcagcctgaagattttgcaacttattactgtcaacatcttgatacttacccgctcactttcggcggagggaccaaggtggagatcaaac

SEQ ID NO: 3839 - DNA, 325 bp, Homo sapiens
  source 1..325: mol_type = other DNA
gaaatagtgatgacgcagtctccagccaccctgtctgtgtctccaggggaaagagccaccctctcctgcagggccagtcagagtgttaccagcaacttagtctggtaccagcagaaacctggccaggctcccaggctcctcatctatgatgcatccaccagggccactggtatcccagccaggttcagtggcagtgggtctgggacagagttcactctcaccatcagcagcctgcagtctgaagattttgcagtttattactgtcagcagcataataactggcctcccatcaccttcggccaagggacacgactggagattaaac

SEQ ID NO: 3840 - DNA, 310 bp, Homo sapiens
  source 1..310: mol_type = other DNA
gacatccagatgacccagtctccttccaccctgtctgcatctgtaggagacagagtcaccatcacttgccgggccagtcagagtattagtacctggttggcctggtatcagcagaaaccagggaaagcccctaagctcctgatctataaggcgtctagtttagaaagtggggtcccatcaaggttcagcggcagtgggtctgggacagaattcactctcaccatcagtagcctgcagcctgatgattttgcaacttattactgccaacagtataggacgttcggccaagggaccaaggtggaaatcaaac

SEQ ID NO: 3841 - DNA, 331 bp, Homo sapiens
  source 1..331: mol_type = other DNA
cagtctgccctgactcagcctgcctccgtgtctgggtctcctggacagtcgatcaccatctcctgcactggaaccagcagtgacgttggtggttataactatgtctcctggtaccagcaacacccaggcaaagcccccaaactcatgatttatgatgtcagtgatcggccctcaggggtttctaatcgcttctctggctccaagtctggcaacacggcctccctgaccatctctgggctccaggctgaggacgaggctgattattactgcagctcatatacaagcagcagcacttatgtcttcggaactgggaccaaggtcaccgtcctag

SEQ ID NO: 3842 - DNA, 322 bp, Homo sapiens
  source 1..322: mol_type = other DNA
tcctctgacttgacacagccaccctcggtgtcagtgtccccaggacagacggccaggatcacctgctctggagatgcattcccaaagttgtatgcttattggtaccagcagaagccaggccgggcccctgttttagtgatatatagagacactgagaggccctcagggatccctgagcgattctctggctccagctcagggacaacagccacgttgaccatcagtggagtccaggcagaggacgaggctgactattactgtcaatcagcagacagcagtggtactcgtgtcttcggacctgggaccaagatcaccgtcctag

SEQ ID NO: 3843 - DNA, 325 bp, Homo sapiens
  source 1..325: mol_type = other DNA
tcttctgagctgactcaggaccctgctgtgtctgtggccttgggacagacagtcaggatcacatgccaaggagacaggcttagaaggaattatgcaagttggtatcagcagaagccaggacaggcccctttacttgtcctgtatggcaaagacaagcggccctcagggatcccagaccgattctctggctccagctcaggaaacacaggttccttgaccatcactggggctcaggcggaagatgagggtgactattactgtaactcccgggacaacaatggtgattactatgtcttcggaggtgggaccaaggtcaccgtcctag

SEQ ID NO: 3844 - DNA, 330 bp, Homo sapiens
  source 1..330: mol_type = other DNA
cagtctgtgctgactcagccaccctcagcgtcggggacccccgggcagagggtcaccatctcttgttctggaggcagctccaacatcgggactaatattgtaaactggtaccagcacctcccaggaacggcccccaaactcctcatctatagtgataataagcggccctcaggggtccctgaccgattctctggctccaagtctggcacctcagcctccctggccatcagtggactccagtctgaggatgaggctgattatttctgtgcagcatgggatgacagcctgaatggtccggttttcggcggagggaccaagctgaccgtccta

SEQ ID NO: 3845 - DNA, 322 bp, Homo sapiens
  source 1..322: mol_type = other DNA
gacatccagttgacccagtctccatccttcctgtctgcatctgtgggagacagagtcaccatcatttgccgggccagccaggacattagtggatatttatcctggtatcaacaaaaggcgggaaaagcccctgaactcctcatctatactgcatccactttgcaaagaggggtcccatcaaggttcagcggcagtggatctgggacagaattcactctcacaatcaccagcctgcagcctgaagattttgcaacttatcactgtcaacaactctatagttacccttacactttcggcggagggaccaaggtggagatcaaac

SEQ ID NO: 3846 - DNA, 319 bp, Homo sapiens
  source 1..319: mol_type = other DNA
tcctatgaattgattcagccaccctcagtgtccgtgtccccaggacagacagccaacatcacctgctctggagagaaattgggggagaaatatacttgctggtttcagcagaagccaggccagtcccctgtactggtcatctatcaaaatgacaagcggccctcagggatccctgagcgattctctggctccaactctgggaacacagccactctgaccatcagcgggacccaggctatggatgagggtgactattactgtcaggcgtgggacagcagcacatctgttttcggcggagggaccaagctggccgccctag

SEQ ID NO: 3847 - DNA, 334 bp, Homo sapiens
  source 1..334: mol_type = other DNA
gatattgtgatgactcagtctccactctccctgcccgtcacccctggagagccggcctccatctcctgcaggtctagccagagcctcctgcataataatggatacaactatttgggttggtacctgcagaagccagggcagtctccacacctcctgatctatttggattctaatcgggcctccggggtccctgacaggttcagtggcagtggatcaggcacagattttacactgaaaatcagcagagtggaggctgaggatgttggggtttattactgcatgcaagttctacaatttccgtacacttttggccaggggaccaagctggagatca

SEQ ID NO: 3848 - DNA, 322 bp, Homo sapiens
  source 1..322: mol_type = other DNA
gacatccagttgacccagtctccatccttactgtctgcatctgtagcagacagagtcaccatcacttgccgggccagtcagggcattagcagttatttagcctggtatcagcaaaaactggggaaagcccctaagctcctgatctatgctgcatccactttgcaaagtggggtcccatcaaggttcagcggcagtggatctgggacagaattcactctcacaatcagcagcctgcagcctgaagattttgcaacttattactgtcaacagggtgatagttacccgtacacttttggccaggggaccaagctggagatcaaac

SEQ ID NO: 3849 - DNA, 331 bp, Homo sapiens
  source 1..331: mol_type = other DNA
cagtctgccctgactcagcctgcctccgtgtctgggtctcctggacagtcgatcaccatctcctgcactggaaccagcagtgacgttggtacttataactatgtctcctggtaccaacaacacccagacaaagcccccaaactcgtgatttatgatgtcagtaatcggccctcaggggtttctaatcgcttctctggctccaagtctggcaacacggcctccctgaccatctctgggctccagactgaggacgaggctgattattactgcagctcatatacaagcagcaccactgtggtattcggcggagggaccaagctgaccgtcctag

SEQ ID NO: 3850 - DNA, 325 bp, Homo sapiens
  source 1..325: mol_type = other DNA
gaagtggtgatgacgcagtctccagccaccctgtctctgtctccaggggaaagagccaccctctcctgcagggccactcagagtgttaacagcgacttggcctggtaccaacagaaacctggccaggctcccaggctcctcatctatggtgcatccagcagggccactggcatcccagacaggttcagtggcagtgggtctgggacagacttcactctcaccatcagcagcctagagcctgaagattttgcagtttattactgtcagcagtacaataactggcctccgaagacgttcggccaagggaccaaggtggaaatcaaac

SEQ ID NO: 3851 - DNA, 331 bp, Homo sapiens
  source 1..331: mol_type = other DNA
cagtctgtgctgactcagccaccctcagcgtctgggactcttgggcagagagtcaccatctcttgttctggaagcagctccaacatcgaagataatactgtaagctggtaccagcaactcccagggacggccccccagctcctcgtctacggtgaaaatcagcggccctcaggggtccctgaccgattctctgcctccaagtctggcacctcagcctccctggccatcagtgggctccagtctgaggatgaggctcattattactgtgcagcatgggatgacagcctggatggccttgcgttcggcggagggaccaagctgaccgtcctag

SEQ ID NO: 3852 - DNA, 320 bp, Homo sapiens
  source 1..320: mol_type = other DNA
gacatccagatgacccagtctccttccaccctgtctgcatctgtaggagacagaatcaacatcacttgccgggccagtcaagatattcgtaggtggttggcctggtatcaacagaagccagggaaagcccctaaactcctgatctataaggagtctgctttacaaactggggtcccatcaaggttcagcggcagtggatctgggacagaattcactctctccatcagcggcctgcagcctgatgattttgcgacttattactgccaacaatataaaagttattcgtatacttttggccaggggaccaggctggaggtcaa

SEQ ID NO: 3853 - DNA, 322 bp, Homo sapiens
  source 1..322: mol_type = other DNA
gacatccagttgacccagtctccatccttcctgtctgcatctgtaggagacagagtcaccatcacttgccgggccagtcaggccattagcaattatttagcctggtatcagcaaaaaccagggaaagcccctaagctcctgatctatgctgcatccactttgcaaagtggggtcccgtcaaggttcagtggcagtggatctgggacagagttcactctcacaatcagcagcctgcagcctgaagattttgcaacttactactgtcagcagcctaatagtttccctcggacgttcggccaagggaccaacgtggaaatcaaac

SEQ ID NO: 3854 - DNA, 322 bp, Homo sapiens
  source 1..322: mol_type = other DNA
gacatccagatgacccagtctccttccaccctgtctgcatctgtaggagacagagtcaccatcacttgccgggccagtcagagtattagaagctggttggcctggtatcagcagaaagcagggaaagcccctaagctcctgatctataaggcgtctagtttagaaagcggggtcccatcaaggttcagcggcagtggatctgggacagaattcactctcaccatcagcagtctgcagcctgatgattttgcaacttattactgccaacagtatgatagttacccgtacacttttggccaggggaccaagctggagatcaaac

SEQ ID NO: 3855 - DNA, 322 bp, Homo sapiens
  source 1..322: mol_type = other DNA
gacatccagatgacccagtctccatctgccatgtctgcatctgtaggagacagagtcaccatcacttgtcgggcgagtcagggcattagcaattatttagcctggtttcagcagaaaccagggaaagtccctaagcgcctgatctatgctgcatccagtttgcaaagtggggtcccatcaaggttcagcggcagtggatctgggacagaattcactctcacaatcagcagcctgcagcctgaagattttgcaacttattactgtctacagcatattatttacccgtggacgttcggccaagggaccaaggtggaaatcaaac

SEQ ID NO: 3856 - DNA, 320 bp, Homo sapiens
  source 1..320: mol_type = other DNA
gaaatcgtgctgacgcagtctccagccaccctgtctgtgtctccaggggaaggagccaccctctcctgcagggccagtcagagtgttgccaggaatttcgcctggtaccagcagaaacctggccaggctcccaggctcctcatctatggtatttccaccacggccgctggtatcccagccaggttcagtggcagtgggtctgggacagagttcactctcaccatcagcagtgtgcagtctgaagattttgcagtttatttctgtcagcagtataattactggccgctcactttcggcggagggaccaaggtggagatcaa

SEQ ID NO: 3857 - DNA, 337 bp, Homo sapiens
  source 1..337: mol_type = other DNA
gacatcgtgatgacccagtctccagactccctggctgtgtctctgggcgagagggccaccatcaactgcaagtccagccagagtgttttatacgccaacagtaagaactacttagcttggtaccagcagagagtaggacagcctccaaagctgctcatttactgggcatctacgcggcaatccggggtccctgaccgattcagtggcagcgggtctgggacagatttcactctcaccatcagcagcctgcaggctgaagatgtggcagtatattattgtcagcaattttatgctactcctccgacgttcggccaagggaccaaggtggaaatcaaac

SEQ ID NO: 3858 - DNA, 322 bp, Homo sapiens
  source 1..322: mol_type = other DNA
gaaatagtcctgacgcagtctccagccaccctgtctgtgtctccaggggaaagagccaccctctcatgcagggccagtcagagcattagcagcagcttagcctggtaccagcagaaacctggccagcctcccaggctcctcatctatggtgcctccaccagggccactggtatcccagccaggttcagtggcagtgggtctgggacagagttcactctcagcatcagcagcatgcagtctgaagactttgcactttatttctgtcagcagtatgataacaggcctctcactttcggcggagggaccaaggtggatatcaaac

SEQ ID NO: 3859 - DNA, 322 bp, Homo sapiens
  source 1..322: mol_type = other DNA
gaaatagtcctgacgcagtctccagccaccctgtctgtgtctccaggggaaagagtcaccctctcctgcagggccagtcagagtattagcagcagcttagcctggtaccagcagaaacctggccaggctcccaggctcctcatctatggtgcatccaccagggccactggtatcccagccaggttcagtggcagtgggtctgggacagagttcactctcaccatcagcagcatgcagtctgaagattttgcagtttactactgtcagcagtatgataacaggcctctcactttcggcggagggaccaaggtggagatcaaac

SEQ ID NO: 3860 - DNA, 319 bp, Homo sapiens
  source 1..319: mol_type = other DNA
gaaatagtgatgacgcagtctccagccaccctttctgtgtctccaggggaaagagccaccctctcctgcaaggccagtaaaaatattagcaagaacttagcctggtaccagcagaaacctggccaggctcccaggctcgtcatatatggtgcatccaccagggccactggtatcccagccaggttcagtggcagtgggtctgggacagagttcactctcaccatcagcagtatggagtctgaagattctgcactttattactgtcagcagtttaataactggccgacgttcggccaagggaccaaggtggaaatcaaac

SEQ ID NO: 3861 - DNA, 322 bp, Homo sapiens
  source 1..322: mol_type = other DNA
gacatccagatgacccagtctccttccactctgtctgcatctgtaggagacagagtcaccatcacttgccgggccagtcagagtattagtaactggttggcctggtatcagcagaaaccagggaaagcccctaagctcctcatctataaggcttcttatttagatgatggagtcccatcaaggttcagcggcagtggatctgggacagaattcactctcaccatcagcagcctgcagcctgatgattttgcaacttattactgccagcagtatgatgtttattctcgaacgttcggccaagggaccaaggtggaaatcaaac

SEQ ID NO: 3862 - DNA, 322 bp, Homo sapiens
  source 1..322: mol_type = other DNA
gaaatagtgatgacgcagtctccagccaccctgtctgtgtctccaggggaaagagccaccctctcctgcagggccagtcagagtgttagcagcaacttagcctggtaccagcagaaacctggccaggctcccaggctcctcatctatggtgcatccaccagggccactggtatcccagccaggttcagtggcagtgggtctgggacagagttcactctcaccatcagcagcatgcagtctgaagattttgcagtttattactgtcagcagtataataactggcctaggacttttggccaggggaccaagctggagatcaaac

SEQ ID NO: 3863 - DNA, 325 bp, Homo sapiens
  source 1..325: mol_type = other DNA
gaaattgtgttgacgcagtctccaggcaccctgtctttgtctccaggggaaagagccaccctctcctgcagggccagtcagagtgttagcagcagctacttagcctggtaccagcagaaacctggccaggctcccaggctcctcatctatggtgcatccagcagggccactggcatcccagacaggttcagtggcagtgggtctgggacagacttcactctcaccatcagcagactggagcctgaagattttgcagtgtattactgtcagcagtatggtagctcaccgctcactttcggcggagggaccaaggtggagatcaaac

SEQ ID NO: 3864 - DNA, 325 bp, Homo sapiens
  source 1..325: mol_type = other DNA
gaaattgtgttgacacagtctccagccatcctgtctttgtctctaggggaaagagccaccctctcctgcagggccagtcagagtattagcaccttcttagcctggtaccaacagaagcctggccaggctcccaggctcctcatctatgatgcatccaacagggccactggcatcccagccaggttcagtggcagtgggtctgggacagacttcactctcaccatcagcagcctagagcctgaagattttgcagtttattactgtctgcagcgtagcaactggcctccgctcactttcggcggcgggaccaagcttgagatcaaac

SEQ ID NO: 3865 - DNA, 322 bp, Homo sapiens
  source 1..322: mol_type = other DNA
gacatccagatgacccagtctccatcctccctgtacgcttctgtgggagacagagtcagcatcacttgccgggcgagtcagggcattagcaatagtctggcctggtatcagcagagaccaggggaacttcctaaactcctcatctatgctgcatccactttgcaatcaggggtcccctctcggttcaggggcagtggatctgggacagatttcgctctcaccatcaccagcctgcagcctgaagatgttgcaacttattactgtcaaaactataagagtgtcccgctcactttcggcggagggaccaaagtgcagatcaaac

SEQ ID NO: 3866 - DNA, 319 bp, Homo sapiens
  source 1..319: mol_type = other DNA
gaacttgtgttgacacagtctccagccgccctgtctttgtctccaggggagagagccaccctctcctgcagggccagtcaggccgttagcagctacttagcctggtaccaacaaaaacctggccaggctcccaggctcctcatgtatgatgtatccatccgggccactggcatcccagacaggttcagtggcagtgggtctgggacagacttcactctcaccatcagcagcctagagcctgaggattttgcagtttattactgtcagcagcgtaacagctggcggtacacttttggcccggggaccaagctggagatca

SEQ ID NO: 3867 - DNA, 317 bp, Homo sapiens
  source 1..317: mol_type = other DNA
catccagttgacccagtctccatcctccctgtctgcatctgtaggagacagagtcaccgtcacttgccgggccagtcagggcattaataattatttagcctggtatcagcaaaaaccagggaaggcccctgacctcctgatctatgctgcatctaatttggtaagtggggtcccatcaaggtttagcggcagtggatccgggacagattttactctcaccatcagcagcctgcagcctgaagatattgcaacttattactgtcaacagcttgatactaaccccctcactttcggcggagggaccaaggtggagatca

SEQ ID NO: 3868 - DNA, 340 bp, Homo sapiens
  source 1..340: mol_type = other DNA
gacatcgtgatgacccagtctccagactccgtggctgtgtctctgggcgagagggccaccatcaactgcaagtccagccagagtgttttatctacctccaaaaataagaatttcttagcttggtaccagcagaaaccgggacagcctcctaaactgctcatttactgggcatctacccgggcatctggggtccctgaccgattcagtggcagcgggtctgggacagacttcactctcaccatcagcagcctgcaggctgaagatgtggcagtttattactgtcagcaatatgatcgtactccgctcactttcggcggagggaccaaggtagagatcaaac

SEQ ID NO: 3869 - DNA, 323 bp, Homo sapiens
  source 1..323: mol_type = other DNA
tcctatgagctgacacagccaccctcgatgtcagtgtccccaggacagacggccaggatcgcctgctctggagatgcattgccaaagcaatatgcttattggtaccagcagaagccaggccgggcccctgtcctcataatatataaagatactgagaggccctcagggatccctgagcgattctctgcctccagctcagggacaacggccactttgaccatcagtggagtcaaggcagaagacgaggctgactattactgtcaatcttcagacaccagtggaaccatagcggttttcggcggagggaccaaggtgaccgtcct

SEQ ID NO: 3870 - DNA, 322 bp, Homo sapiens
  source 1..322: mol_type = other DNA
gacatccagatgacccagtctccatcctcattgtctgcatctgtaggagacagagtcaccatcacttgtcgggcgagtcaggacattaggcagtatttagcctggtttcagcagaaaccagggaaagcccctaagtccctgatctatgctgcatccactttgcagagtggggtcccatcaaagttcagcggcagtggatctgggacagatttcactctcaccatcagcagcctgcagcctgaagatgttgcaacttattactgccaacgctataatagttaccccctaggtttcggcggagggaccaaggtggagatcaaac

SEQ ID NO: 3871 - DNA, 322 bp, Homo sapiens
  source 1..322: mol_type = other DNA
gacatccagatgacccagtctccttccaccctgtctgcatctgtaggagacagagtcaccatcacttgccgggccagtcagagtattagaagctggttggcctggtatcagcagaaagcagggaaagcccctaagctcctgatctataaggcgtctagtttagaaagcggggtcccagcaaggttcagcggcagtggatctgggacagaattcactctcagcatcagcagtctgcagcctgatgattttgcaacttattactgtcaacagtatgatagttacccgtacacttttggccaggggaccaagctggagatcaaac

SEQ ID NO: 3872 - DNA, 322 bp, Homo sapiens
  source 1..322: mol_type = other DNA
gacatccagttgacccagtctccatccttcctgtctgcatctgtaggagacagagtcaccatcacttgccgggccagtcagggcattagcagttatttagcctggtatcagcaaaaaccagggaaagcccctaaactcctgatctatgctgcatcaattttacaaagtggggtcccatcaaggttcatcggcagtggatctgggacagaattcactctcacaatcagcagcctgcagcctgaagattttgcaacttattactgtctacagcatattatttacccgtggacgttcggccaagggaccaaggtggaaatcaaac

SEQ ID NO: 3873 - DNA, 322 bp, Homo sapiens
  source 1..322: mol_type = other DNA
gacatccagatgacccagtctccttccaccctgtctgcatctgtaggagacagagtcaccatcacttgccgggccagtcagagtattagtaactggttgacctggtatcagcagaaaccagggaaagcccctaaggtcctgatctataaggcatctagtttagaaagtggggtcccatcaaggttcagcggcagtggatctgggacagaattcactctcaccatcagcagcctgcagcctgatgattttgcaacttattactgccaacactacaatttttaccgattcactttcggccctgggaccaaagtggatatcaaac

SEQ ID NO: 3874 - DNA, 322 bp, Homo sapiens
  source 1..322: mol_type = other DNA
gacatccaattgacccagtctccatcattcctgtctgcatctgtaggagacagagtcaccatcacttgccgggccagtcaggacataaatttttttttagcctggtttcagcaaaaaccagggagtccccctaagctcctgatctatggtgcatccactttgcaaagtggggtcccatcaaggttcagcggcagtggatctgggacacaattcagtctcacaatcagcagcctgcagcctgaagattctgcaacttattactgtcaacagcttgatacttaccctctcactttcggcggagggaccaaggtggagatcaaac

SEQ ID NO: 3875 - DNA, 325 bp, Homo sapiens
  source 1..325: mol_type = other DNA
gaaattgtgttgacgcagtctccaggcaccctgtctttgtctccaggggaaagagccaccctctcctgcagggccagtcagagtgttagcagcagctacttagcctggtaccagcagaagcctggccaggctcccaggctcctcatctatggtgcatccagcagggctactggcatcccagacaggttcagtggcagtgggtctgggacagacttcactctcaccatcagcagactggagcctgaagattttgcagtgtattactgtcagcagtatggtggctcacccatcaccttcggccaagggacacgactggagattaaac

SEQ ID NO: 3876 - DNA, 337 bp, Homo sapiens
  source 1..337: mol_type = other DNA
gatgttgtgatgactcagtctccactctccctgcccgtcacccttggacagccggcctccatctcctgcaggtctagtcaaagcctcgtacacagtgatggaaacacctacttgacttggtttcagcagaggccaggccaatctccaaggcgcctaatttataaggtctctaaccgggactctggggtcccagacagattcagcggcagtgggtcaggcactgatttcacactgaaaatcagcagggtggaggctgaagatgttgcggtttattactgcatgcaaggcacacactggcctccctacacttttggccaggggaccaagctggagatca

SEQ ID NO: 3877 - DNA, 325 bp, Homo sapiens
  source 1..325: mol_type = other DNA
gaaatagtgatgacgcagtctccagacaccctgtctctgtctccaggggaaagagccaccctctcctgcagggccagtcagagtgctggcagcaacttagcctggttccagcagaaacctggccaggctcccaggctcctcatctatggtgcatccaccagggcccctggtgtcccagccaggttcagtggcagtgggtctgggacagagttcactctcaccatcaacagtatgcagcctgaggattttgcagtttattactgtcagcaatataataactggcctccgatcaccttcggccaagggacacgactggagattaaac

SEQ ID NO: 3878 - DNA, 322 bp, Homo sapiens
  source 1..322: mol_type = other DNA
gacatccacttgacccagtctccatccttcctgtctgcatctgtaggagacagagtcaccatcacttgccgggccagtcaggccaatagtaattatttagcctggtatcagcaaaaaccagggaaagcccctaagctcctgatctatgctgcatcgactttgcaaagtggggtcccgtcaaggttcagcggcagtggatctgggacagaattcactctcacaatcaccaccctgcaggctgaagattgtgcaacttactactgtcagcagactaatagtttccctcggacgttcggccaagggaccaacgtggaaatcaaac

SEQ ID NO: 3879 - DNA, 322 bp, Homo sapiens
  source 1..322: mol_type = other DNA
gaaatagtgatgacgcagtctccagccaccctgtctgtgtctccaggggaaagagccaccctctcctgtagggccagtcagattcttagcaccaacttagcctggtaccagcagaaacctggccagtctcccaggctcgtcatctatggtgcatccaccagggccactggtatcccagccaggttcagtggcactgggtctgggacagagttcactttcaccatcagcagcatgcagtctgaagattttgcagtttattactgtcagcagtataatgactggccgtacacttttggccaggggaccaagctggagatcaaac

SEQ ID NO: 3880 - DNA, 331 bp, Homo sapiens
  source 1..331: mol_type = other DNA
cagtctgccctgactcagcctgcctccgtgtctgggtctcctggacaatcgatcaccatctcctgcactggaaccagcagtgatgtcggtggttataattatgtctcctggtaccaacaacaccccggcaaagcccccaaactcatgatttatgatgtcactaagcggccctcgggggtctcaaatcacttctctggctccaagtctggcaacacggcctccctgacaatctctggactccaggctgacgacgaggctaattattactgctgttcatatgcaggtcgtagtatttgggtattcggcggagggaccaaactgaccgtcctag

SEQ ID NO: 3881 - DNA, 325 bp, Homo sapiens
  source 1..325: mol_type = other DNA
gaaattgtgttgacacagtctccagccaccctggctttgtctccgggggaaagagccaccctctcctgcagggccagtcagagtgttagaagcttcttagcctggtaccaacaaaaacctggccaggctcccaggctcctcatctatgatgcatctaacagggccactggcatcccagccaggttcagtggcagtgggtctgggacagacttcactctcaccatcagcagcctagagcctgaagattttgcagtttattactgtcagcagcgtagcaactggccttcgatcaccttcggccaagggacacgactggagattaaac

SEQ ID NO: 3882 - DNA, 322 bp, Homo sapiens
  source 1..322: mol_type = other DNA
gaagtagtgatgacgcagtctccagccaccctgtctgtgtctccaggggaaagagccaccctctcctgcagggccagtcagagtgttagcagcaacttagcctggtaccagcagaaacctggccaggctcccaggctcctcatctatggtgcatccaccagggccacgggtatcccagccaggttcagtggcagtgggtctgggacagagttcattctcaccatcagcagcctgcagtctgaagattttgcagtttattactgtcagcagtataataactggcctccgtacacttttggccaggggaccaagctggaaatca

SEQ ID NO: 3883 - DNA, 319 bp, Homo sapiens
  source 1..319: mol_type = other DNA
tcctttgagccgactcagccaccctccctgtccgtgtccccaggacagacagccagcatcacctgctctggacatcaattggggaataaatatctttgctggtatcaacaaaagcccggccagtcccctgtgttggtcatgtatcaagataccaagcggccctcagggatccctgagcgattctctggctccagctctgggaacacagccactctgaccatcagcgggacccagcctatggatgaggctgtctattactgtcaggcgtgggacggcagcaccgtggtgttcggcggagggaccaagttgaccgtcctag

SEQ ID NO: 3884 - DNA, 319 bp, Homo sapiens
  source 1..319: mol_type = other DNA
tcctatgagctgactcagccactctcagtgtcagtggacctgggacagacggccaggattacctgtgggggaaacaacattggaagtagaaatgtgcactggtaccagcagaagccaggccaggcccctgtgctggtcatctataggaataacaaccggccctctgggatccctgagcgattctctggctccaactcggggaacacggccaccctgaccatcagcagagcccaagccggggatgaggctgactattactgtcacgtgtgggacagtagcactgccgtattcggcggagggaccaagctgaccgtcctag

SEQ ID NO: 3885 - DNA, 319 bp, Homo sapiens
  source 1..319: mol_type = other DNA
gacatccagatgacccagtctccttccaccctgtctgcatctgtaggagacagagtcaccatcacttgccgggccagtcagagtattagtacctggttggcctggtatcagcagaaaccagggagagcccctaaggtcctgatctataaggcatctagtttacaaagtggggtcccatcgacgttcagcggcagtggatctgggacagaattcactctcaccatcagcagactgcagtctgatgactttgcaacctattactgccaacagtataaaactaatccgtacacttttggccaggggaccaagctggagatca

SEQ ID NO: 3886 - DNA, 329 bp, Homo sapiens
  source 1..329: mol_type = other DNA
cagtctgccctgactcagcctcgctcagtgtccgggtctccgggacagtcagtcaccatctcctgcactggaaccagcagtgatgtgggtacttataattctctctcctggtaccaacaacacccaggcaaagccccccaactcatcattcatgatgtcagtaagaggccctcaggggtccctgatcgcttctctggctccaagtctggcaacgcggcctccctgaccatctctgggctccagcctgcggacgaggctgactattattgctgctcatacgcaggcaggtacaattgggtgttcggcggagggaccaagctgaccgtcct

SEQ ID NO: 3887 - DNA, 325 bp, Homo sapiens
  source 1..325: mol_type = other DNA
tcctatgagctgacacagccaccctcggtgtctgtgtccccaggacaaacggccaggatcacctgctctggagatgcattgccatacaaatatgcttactggtaccagcagaagtcaggccaggcccctgtgatggtcatctatgaggacaacaaacgaccctccgggatccctgagagattctctgcctccaactcacggaccttggccaccttgactatcagtggggcccaggtggaggatgaagctgactactactgttactcaacagaccgtagtggtaatcattatgtcttcggaagtgggaccaaggtcaccgtcctag

SEQ ID NO: 3888 - DNA, 325 bp, Homo sapiens
  source 1..325: mol_type = other DNA
gaaattgtgttgacgcagtctccaggcaccgtgtctttgtctccaggggaaagagccaccctctcctgcagggccagtcagagtgttgccaacaactacttagcctggtaccagcagagacttggcctggctcccaggctcctcatctatggtgcatccagcagggccactggcatcccagacaggttcagtggcagtgggtctgggacagacttcactctcaccatcaccagactggagcctgaagattttgcagtgtattactgtcagcagtatggtaggtcaccgctcactttcggcggagggaccaaggtggagttcaaac

SEQ ID NO: 3889 - DNA, 340 bp, Homo sapiens
  source 1..340: mol_type = other DNA
gacatcgtgatgacgcagtctccagactccgtggctgtgtctctgggcgagagggccaccgtcagctgcaagtccagccagaatattttacacagctccaaaaataagacattcttagcttggtaccagcagaaaccaggacaggctcctaaactgctcatttactgggcatttacccgggaatctggggtccctgaccgattcagtggcagcgggtctgggacagatttcactctcaccatcaccagcctgcaggctgaagatgtggcagtttattactgtcagcaatattatagtactccgctcactttcggcggagggaccaaggtggagatcaaac

SEQ ID NO: 3890 - DNA, 322 bp, Homo sapiens
  source 1..322: mol_type = other DNA
gacatccagttgacccaatctccatccttcctgtctgcatctgtaggagacagagtcaccatcacttgccgggccagtcagggcattagaaattatttagtctggtatcagcaaaaaccagggaaagcccctaacctcctgatctatgctgcatccactttgcaaagtggggtcccatcaaggttcagcggcagtggatctgggacagaattcactctcacaatcagcagcctgcagcctgaggatgttgcaacttattactgtcaacagcctaatagtttccctcggactttcggcggagggaccaaggtggagatcaaac

SEQ ID NO: 3891 - DNA, 334 bp, Homo sapiens
  source 1..334: mol_type = other DNA
gatattgtgatgacccagactccactctcctcacctgtcacccttggacagccggcctccatctcctgcaggtctagtcagagcctcgtacacggtgatggaaacacctacttgagttggcttcaccagaggccaggccagcctccaagactcctaatttattacatctctaaccgtttctctggggtcccagacagattcagtggcagtggggcagggacagatttcacactgaaaatcagcagggtggaggctgcggatgtcggagtttattactgcatgcaaggaacacactttccgttcacttttggccaggggaccaagctggagatca

SEQ ID NO: 3892 - DNA, 328 bp, Homo sapiens
  source 1..328: mol_type = other DNA
tcttctgagctgactcaggaccctgctgtgtctgtggccttgggacagacagtcaggatcacatgccaaggagacagtctcagaagctattatgcaaactggtaccagcagaagccaggacaggcccctgttcttgtcatccatggtaaaaacaaccggccctcagggatcccagaccgattctctggctccagttcaggaaacacagcttctttgaccatcactggggctcaggcggaagatgaggctgcctattactgtaactcccgggacagcagtggtaaccatctcgtggtattcggcggagggaccaagctgaccgtcctag

SEQ ID NO: 3893 - DNA, 335 bp, Homo sapiens
  source 1..335: mol_type = other DNA
gatattgtgatgacccagactccactctcctcacctgtcacccttggacagccggcctccatctcctgcaggtctagtcaaagcctcgtacacagtgatggaaacacctacttgagttggcttcagcagaggccaggccagcctccaagagtcctaatttataagatttctaaccggttctctggggtcccagacagattcagtggcagtggggctgggacagatttcacactgaagatcagcagggtggaagttgaggatgtcggggtttattactgcatgcaagctacacaatttccgtggacgttcggccaagggaccaaggtggaaatcaa

SEQ ID NO: 3894 - DNA, 331 bp, Homo sapiens
  source 1..331: mol_type = other DNA
cagtctgtgctgactcagccaccctcagcgtctgggacccccgggcagagggtcaccatctcttgttctggaggcagttccaacatcgaaactaattttgtatactggtaccagcacctgcccggaacggcccccaaactcctcatctataggaataaacagcggccctcaggggtccctgaccgattctctggctccaagtctggcacctcagcctccctggccatcagtgggctccggtccgaggatgaggctgattattactgtgcagcatgggatgacagcctgagtggtccggtgttcggcggggggaccaggctgaccgtcctag

SEQ ID NO: 3895 - DNA, 325 bp, Homo sapiens
  source 1..325: mol_type = other DNA
gaaatagtgatgacgcagtctccagccaccctgtctgtgtctccaggggaaagagccaccctctcctgtagggccagtcagagtgttagcagcagcttagcctggtaccagcagaagcctggccaggctcccaggctcctcgtctatggtgcatctaccagggccactggtatcccacccaggttcagtggcagtgggtctgggacagagttcactctcaccatcaacaacgtgcagtctgaagattttgcagtttattactgtcagcagtatcataactggcctccactcactttcggcggagggaccaaggtggagatcaaac

SEQ ID NO: 3896 - DNA, 322 bp, Homo sapiens
  source 1..322: mol_type = other DNA
gaaattgtgttgacacagtctccagccaccctgtctttgtctccaggggaaagagtcaccctctcctgcggggccagtcagagtattaccacctccttagcctggtaccagcagaagcctggcctggcgcccagcctcctcatttacgatgcatccaagagggccactggcgtcccagacaggttcaggggcagtgggtctgggacagacttcactctcaccatcagcagactggagcctgaagattttgcagtgtatttctgtcaccagtatagtacatcacctcagacgttcggcccagggaccaaggtggacctcaaac

SEQ ID NO: 3897 - DNA, 336 bp, Homo sapiens
  source 1..336: mol_type = other DNA
caacttgtgctgactcaatcgccctctgcctctgcctccctgggagcctcggtcaagctcacctgcactctgagtagtgggcacagcagtagcgccatcgcatggcatcagcagcagccggagaagggccctcggtacttgatgaaggttaacaatgatggcagccactccaagggggacgggatccctaatcgcttctcaggctccagctctgggactgagcgctacctcaccatctccagcctccagtctgaggatgaggctgtctattactgtcagacctggggcactggcattcaagtggtcttcggcggagggaccaagctgaccgtccta

SEQ ID NO: 3898 - DNA, 322 bp, Homo sapiens
  source 1..322: mol_type = other DNA
gacatccacttgacccagtcgccatccttcgtgtctgcttctataggagacagagtcaccatcacttgccgggccagtcagggcattagccattatttagcctggtatcagcaaaaaccagggaaagcccctaacctcctgatctatggtgcatccactttgcaaagtggggtcccatcaaggttcgccgggagtggatctgggacacagttcactctcacaatcagcagcctccagcctgaggatattgcaacttattactgtcagcaccttgatacttaccctctcactttcggcggagggaccaaggtacagatcaaac

SEQ ID NO: 3899 - DNA, 334 bp, Homo sapiens
  source 1..334: mol_type = other DNA
gatattgtgatgacccagactccactctctctgtccgtcacccctggacagccggcctccatctcctgcaagtctagtcacagcctcctgcatagtgatggaaagacctatttgttttggtacctgcagaagccaggccagtctccacaactcctgatctatgaagtttccagccggttctctggagtgccagacaggttcagtggcagcgggtcagggacagatttcacactgaaaatcagccgggtggaggctgacgatgttggggtttattactgcatgcaaggtatacaccttatcaccttcggccaagggacacgactggagattaaac

SEQ ID NO: 3900 - DNA, 325 bp, Homo sapiens
  source 1..325: mol_type = other DNA
gaaatagtgatgacgcagtctccagccaccctgtctgtgtctccaggggaaagagccaccctctcctgcagggccagtctgagtgttggcactaacttagcctggtaccagcagaaacctggccaggctcccaggctcctcatctatggtgcttcaaccagggccactggtatcccagccaggttcggtggcagtgggtctgggacagatttcactctcaccatcaacagcctgcagtctgaagattttgcagtgtattactgtcagcagtataataactggcctccgctcactttcggcggagggacccaggtggagatcaaac

SEQ ID NO: 3901 - DNA, 319 bp, Homo sapiens
  source 1..319: mol_type = other DNA
gacatccagatgacccagtctccttccaccctgtctgcatctgtaggagacagagtcaccatcacttgccgggccagtcagagtatttttgtctggttggcctggtatcagcagaaaccagggaaagcccctaaactcctgatctataaggcgtctagtttacaaagtggggtcccatcaaggttcagcggcaggggatctgggacagaattcactctcaccatcagcagcctgcagcctgatgattttgcaacttattattgtctacagtataaaagtgattcgtacacttttggccaggggaccaagctggagatca

SEQ ID NO: 3902 - DNA, 325 bp, Homo sapiens
  source 1..325: mol_type = other DNA
gaaattgtgttgacgcagtctccaggcaccctgttttcgtctccaggggaaagagtcaccctctcctgcagggccagtcagagtgttaccagcaactacttagcctggtaccagcagaaacgtggccaggctcccaggctcctcatctctggtgcatccagcagggccactggcatcccagacaggttcagtggcagtgggtctgggacacacttcactctcaccatcagcgaactggagcctgaagattttgcagtgtattactgtcagcagtatgctacttcccctagggcgttcggccaagggaccaaggtgggaatgaaac

SEQ ID NO: 3903 - DNA, 322 bp, Homo sapiens
  source 1..322: mol_type = other DNA
gacatccagatgacccagtctccttccaccctgtctgcatctgtaggagacaaagtcaccatcacttgccgggccagtcagagtattagtacctggttggcctggtatcagcagaaaccaggaaaagcccctaacctccttatctataaggcgtctactttacatactggggtcccatcaaggttcagcggcagtggatctgggacagaattcactctctccatcagcagcctgcagcccgacgatttcgcaacttattactgccaagagtataatacttattcatgcacttttggccaggggaccaggctggagatcaaac

SEQ ID NO: 3904 - DNA, 325 bp, Homo sapiens
  source 1..325: mol_type = other DNA
gaaattgtgttgacgcagtctccagacaccctgtctttgtctccaggggaaagcgccaccctcttctgcagggccagtcagagtgttaggagcagttacttagcctggtaccagcagacacctggccaggctcccaggctcctcatctatggtgcatccagcagggccactggcatcccagacaggttcagtggcagtgggtctgggacagacttcactctcaccatcagcagactggagcctgaagattttgcagtgtattactgtcagcagtttggtaggtcgtcgtggacgttcggccaagggaccaaggtggaaatcaaac

SEQ ID NO: 3905 - DNA, 325 bp, Homo sapiens
  source 1..325: mol_type = other DNA
gaaaatgtgttgacgcagtctccaggcaccctgtctttgtccccaggggaaagagccaccctctcctgcagggccagccagagtgttagcagcagctacttagcctggtatcagcagaaacctggccaggctcccagactcctcatctatgatgtatctagcagggccactggcattccagacaggttcagtggcagtgggtctgggacagacttcactctcaccatcagcagactggagcctgaagattttgcattgtattactgtcagcagtatggcagttcacctcggaccttcggccaagggaccaaggtggaaatcaaac

SEQ ID NO: 3906 - DNA, 322 bp, Homo sapiens
  source 1..322: mol_type = other DNA
gacatccagttgacccagtctccatccttcctgtctgcatctgtgggagacagagtcaccatcatttgccgggccagccagtatattagtggatatttatcctggtatcaacaaaaggcgggaaaagcccctgaactcctgatctatactgcatccactttacaaagaggagtcccatcaaggttcagcggcagtggatctgggacagaattcactctcacaatcaccaacctgcagcctgaagattttgcaacttatcactgtcaacaactctatagttaccctgacactttcggcggagggaccaaggtggagatcaaac

SEQ ID NO: 3907 - DNA, 328 bp, Homo sapiens
  source 1..328: mol_type = other DNA
cagtctgccctgactcagcctccctccgcgtccgggtctcctggacagtcagtcaccatctcctgcactggaaccagcagtgacgttggtggttataactatgtctcctggtaccaacagcacccaggcaaagcccccaaactaatgatttatgaggtcactaagcggccctcaggggtccctgatcgcttctctggttccaagtctggcaacacggcctccctgaccgtctctgggctccaggctgaggatgaggctgattattactgcagctcatatgcaggcaggcgttgggtgttcggcggagggaccaagctgaccgtcctag

SEQ ID NO: 3908 - DNA, 325 bp, Homo sapiens
  source 1..325: mol_type = other DNA
gaaatagtgatgacgcagtctccagtcaccctgtctgtgtctccaggggaaacagccaccctctcctgcagggccagtcagagtgttgccaggaacttagcctggtatcagcagaaacctggccaggctcccaggctcctcatctacggtgcatccaccagggccactggtatcccagccaggttcagtggcagtgggtctgggacagagttcactctcaccatcagcagcctgcagtctgaagattttgcagtttattactgtcagcagtataataactggcctccgctcactttcggcggagggaccaaggtggagatcaaac

SEQ ID NO: 3909 - DNA, 338 bp, Homo sapiens
  source 1..338: mol_type = other DNA
gatgttgtgatgactcagtctccactgtccctgcccgtcacccttggacagccggcctccatttcctgcaggtctagtcaaagcctcgtacacagtgatggaaacacctacttgaattggtttcagcagaggccaggccaatctccaaggcgcctaatttatagggtttctaaccgggatgctggggtcccagacagattcagcggcagtgggtcaggcactgatttcacactgaaagtcagcagggtggaggctgaggatgttggggtttattactgcatgcaaggtacacactggcctccgtacacttttggccaggggacgaagctggagatcaa

SEQ ID NO: 3910 - DNA, 337 bp, Homo sapiens
  source 1..337: mol_type = other DNA
gatattgtgatgactcagtctccactctccctgcccgtcacccctggagagccggcctccatctcctgcaggtctagtcagagcctcctgcatggtaatggatacaactatttggattggtacctgcagaagccagggcagtctccacagctcctgatctatttgggttctaatcgggcctccggggtccctgacaggttcagtggcagtggatcaggcacagattttacactgaaaatcagcagagtggaggctgaggatgttggggtttattactgcatgcaagctctacaaactcctcggacgttcggccaagggaccaaggtggaaatcaaac

SEQ ID NO: 3911 - DNA, 343 bp, Homo sapiens
  source 1..343: mol_type = other DNA
gacatcgtgatgacccagtctccagactccctggctgtgtctctgggcgagagggccaccatcaactgcaagtccagccagagtgttttatacagctccaacaataaggactacttagcttggtaccagcagaaaccaggacagcctcctaagctgctcatttactgggcatctacccgggcatccggggtccctgaccgcttcagtggcagcgggtctgggacagatttcactctcaccatcagcagcctgcaggctgatgatgtggcagtttattactgtcagcaatattatagtactcttgcggccactttcggcggagggaccaatctggagatcaaac

SEQ ID NO: 3912 - DNA, 325 bp, Homo sapiens
  source 1..325: mol_type = other DNA
gaagtggtgatgacgcagtctccagccaccctgtctgtgtctccaggggaaagagccaccctctcctgcagggccagtcagagtattagtagcgacttagcctggtaccagcagaaacctggccaggctcccaggctcctcatctatggtgcatccaccagggccactggtgtcccagccaggttcagtggcagtgggtctgggacagagttcactctcaccatcagcagcctgcagtctgaagattttgcagtttattactgtcagcagtataataactggcctccgctcactttcggcggagggaccaaagtggagatcaaac

SEQ ID NO: 3913 - DNA, 337 bp, Homo sapiens
  source 1..337: mol_type = other DNA
gatgttgtgatgacccaggcgccactctctctgtccgtcacccctggacagtcggcctccatctcctgtaagtctagtcagagcctcctgcatagagatggaaagacctatttgtattggtacttgcagaagccaggccagtctccacagctcctgatttatgaagtttccaaccggttctctggagtgccagagaggttcagtggcagcgggtcagggacagatttcacactgaaaatcagccgggtggaggctgaggatgttggggtttattactgcatgcaaagtgtacagcttccctggacgttcggccaagggaccaaggtggaaatcaaac

SEQ ID NO: 3914 - DNA, 322 bp, Homo sapiens
  source 1..322: mol_type = other DNA
gacatccagatgacccagtctccttccaccctgtctgcatctgtaggagacagagtcaccatcacttgccgggccagtcagagtattagtcgttggttggcctggtatcagcagaaaccagggaaagcccctaagctcctgatctataaggcgtctattttagaaagtggggtcccatcaaggttcagcggcagtggatctgggacagaattcactctcaccatcagcagcctgcagcctgatgattttgcaacttattactgccaacagtattatacttattcgtacacttttggccaggggaccaagctggagatcaaac

SEQ ID NO: 3915 - DNA, 337 bp, Homo sapiens
  source 1..337: mol_type = other DNA
gacatcgtgatgacccaatctccagactccctggctgtgtctctgggcgagagggccaccatcaactgcaagtccagtcagagtgttctctacagctccaaccagaggaactacttagcttggtaccagcagaaaccaggacaacgtcctaagctcctcatttcctgggcatctacccgggaatccggtgtccctgaccgattcagtggcagcgggtctgggacagatttcagtctcaccatcagcagcctgcaggctgaagatgtggcagtttattactgtcaacagtattatagtgatgtattcactttcggccctgggaccaaggtgaatatca

SEQ ID NO: 3916 - DNA, 340 bp, Homo sapiens
  source 1..340: mol_type = other DNA
gacatcttgatgacccagtctccagactccctggctgtgtctctgggcgagagggccaccatcaactgcaagtccagccagagtcttttatacagctccaacactaagaactacttagcttggtaccagcagaaaccaggacagcctcctaggctgctcatttactgggcatttacccgggaatccggggtccctgaccgattcagtggcagcgggtctgggacagatttcactctcaccatcagcagtctgcaggctgaagatgtggcagtttattactgtcagcaatatcatagtccgcctctcactttcggcggagggaccaaggtggagatcaaac

SEQ ID NO: 3917 - DNA, 310 bp, Homo sapiens
  source 1..310: mol_type = other DNA
gacatccagatgacccagtctccttccaccctgtctgcatctgtaggagacagagtcaccatcacttgccgggccagtcagagtattagtaactggttggcctggtatcagcagaaacctgggaaagcccctaagctcctgatctataaggcatctagtttacaaagtggggtcccatcaaggttcagcggcagtggatctgggacagatttcactctcaccatcagcagcctgcagcctgatgattttgcaacttattactgccaacactatcggacgttcggccaagggaccaaggtggaaatcaaac

SEQ ID NO: 3918 - DNA, 343 bp, Homo sapiens
  source 1..343: mol_type = other DNA
gacatcgtgatgacccagtctccagactccctggctgtgtctctgggcgagagggccaccatcaactgcaagtccagtcagagtgttttatacaactccaacaataagaactacttagcttggtaccagcagaaaccaggacagcctcctaagctgctcatttactgggcttctacccgggaatccggggtccctgaccgattcagtggcagcgggtctgggacagatttcactctcaccatcagcagcctgcaggctgaagatgtggcagtttattactgtcagcaatattatagtactcccttattcactttcggccctgggaccaaagtggatatcaaac

SEQ ID NO: 3919 - DNA, 322 bp, Homo sapiens
  source 1..322: mol_type = other DNA
gacatccagttgacccagtctccatccttcctgtctgcatctgtaggggacagagtcaccatcacttgccgggccactcagggcattagcagttctttagcctggtatcagcaaaaaccagggaaagcccctaagcttctgatctatgctgcatctagtttgcagagtggggtctcatcaaggttcagcggcagtggatctgggacagaattcactctcacaatcagcagcctgcagcctgaagattttgcaacttattactgtcaacaacttaatagtgacccgctcactttcggcggagggaccaaggtggagatcaaac

SEQ ID NO: 3920 - DNA, 322 bp, Homo sapiens
  source 1..322: mol_type = other DNA
tcctatgagctgacacagccaccctcggtgtcagtgtccccaggacagacggccaggatcacctgctctggagatgcattgtcaaagcaatatgcttattggtaccagcagaagccaggccaggcccctgtgctggtgatatataaagacagtgagaggccctcagggatccctgagcgattctctggctccagctcagggacaacagtcacgttgaccatcagtggagtccaggcagaagacgaggctgactattactgtcaatcagcagacagcagtggtacttgggtgttcggcggagggaccaagctgaccgtcctag

SEQ ID NO: 3921 - DNA, 340 bp, Homo sapiens
  source 1..340: mol_type = other DNA
gacatcgtgatgacccagtctccagactccctggctgtgtctctgggcgagagggccaccatcaagtgcaagtccagccagagtgttttatacagctccagaaataaggactacttagcgtggtaccagcagaaagtaggacagcctcctaagctgctcatttactgggcatctacccgggaatccggagtccctgaccgattcagtggcagcgggtctgggtcagatttcactctcaccatcagcagcctgcaggctgaagatgtggcagtttattactgtcagcaatattatagtactccgtactcttttggccaggggaccaggctggagatcaaac

SEQ ID NO: 3922 - DNA, 334 bp, Homo sapiens
  source 1..334: mol_type = other DNA
cagtctgccctgactcagcctccctccgcgtccgggtctcctggacagtcagtcaccatctcctgcactggaaccagcagtgacgttggtacttataactatgtctcctggtaccaacagcacccaggcaaagcccccaaactcatgatttgtgaggtcagtaagcggccctcaggggtccctgatcgcttctctggctccaagtctggcaacacggcctccctgaccgtctctgggctccaggctgaggatgaggctgattattactgcagctcatatgcaggcagcaacaacctcgtggtattcggcggagggaccaaactgaccgtcctag

SEQ ID NO: 3923 - DNA, 328 bp, Homo sapiens
  source 1..328: mol_type = other DNA
gaaattgtgttgacgcagtctccaggcaccctgtctttgtctccaggggaaagagccaccctctcctgcagggccagtcagagtgttagcagcggctacttagcctggtaccagcagaaacctggccaggctcccaggctcctcatctatggtgcatccagcagggccactggcatcccagacaggttcagtggcagtgggtctgggacagacttcactctcaccatcagcagactggagcctgaagattttgcagtgtattactgtcagcagtatggtagctcacccctttacacttttggccaggggaccaagctggagatcaaac

SEQ ID NO: 3924 - DNA, 331 bp, Homo sapiens
  source 1..331: mol_type = other DNA
cagtctaccctgactcagcctcgctcagtgtccgggtctcctggacagtcagtcaccatctcctgcactggaaccagcggtgatgttggtcgttataattctctctcctggtaccaacagtacccaggcaaagcccccaaactcatgatttatgatgtcactaagcggccctcaggggtccctgatcgcttctctggctccaggtctggcaacacggcctccctgaccatcagtgggctccaggctgaggatgagtctgatttttactgctgctcatatgcaggcaggtacacttgggtgttcggcggagggaccaaggtgaccgtcctag

SEQ ID NO: 3925 - DNA, 321 bp, Homo sapiens
  source 1..321: mol_type = other DNA
gacatccacttgacccagtctccatcattcctgtctgcatctgtaggagacagagtcaccatcacttgccgggccagtcaggacataagcaggtatttagcctggtttcagcaaaaaccagggaatccccctaaactcttgatctatggtgcatccactttgcaaagtggggtcccatcaagattcagcggcagtggatctgggacagaattcagtctcacgatcagcagcctgcagcctgaagattctgcaacttattactgtcaacagcttgatacttaccctctcactttcggcggagggaccaaggtggagatcaaa

SEQ ID NO: 3926 - DNA, 340 bp, Homo sapiens
  source 1..340: mol_type = other DNA
gacatcgtgatgacccagtctccagactccctggctgtgtctctgggcgagagggccaccatcaactgcaagtccagccagagtgttttatacagctccaacaataagaactacttagcttggtaccagcagaaaccaggacagcctcctaagctgctcatttactgggcatctacccgggaatccggggtccctgaccgattcagtggcagcgggtctgggacagatttcactctcaccatcagcagcctgcagcctgaagattttgcaacttattactgccaacagtataatagttacccgctcactttcggcggagggaccaaggtggagatcaaac

SEQ ID NO: 3927 - DNA, 325 bp, Homo sapiens
  source 1..325: mol_type = other DNA
gacatccagatgacccagtctccttccaccctgtctgcatctgtaggggacagagtcaccatcacttgccgggccagtcagcctattagtacctggttggcctggtatcagcaaagaccagggaaagcccctaacctcctaatctataaggcgtctactttagcgagtggtgtcccttcaaggttcagcggcagtggctctgggacagaattcactctcaccatcaccagcctgcagcctgatgattttgcaactttttactgccaacagtatcatactttttctccgtcgacgttcggccaagggaccaagctggagatcaaac

SEQ ID NO: 3928 - DNA, 340 bp, Homo sapiens
  source 1..340: mol_type = other DNA
gacatcgtgatgacccagtctccagactccctggctgtgtctctgggcgagagggccaccatcaactgcaagtccacccagagtgttttatacagctccaacaatatgaactacttagcttggtaccagcagaaaccaggacagcctcctaagctgctcatttactgggcatctacccgggaatccggggtccctgaccgattcagtggcagcgggtctgagacagatttcactctcaccatcagcagcctgcagcctgaagatgtggcagtttattactgtcagcaatattatggtattccgatcactttcggccaagggacacggctggagattaaac

SEQ ID NO: 3929 - DNA, 331 bp, Homo sapiens
  source 1..331: mol_type = other DNA
cagtctgccctgactcagcctgcctccgtgtctgggtctcctggacagtcgatcaccatctcctgcactggaaccagcagtgatgttgggacttataagcttgtctcctggtaccaacaccacccaggcaaagcccccaaactcatgatttatgaggacaataagcggccctcaggggtttctaatcgcttctctggctccaagtctggcaacacggcctccctgacaatctctgggctccaggctgaggacgaggctaattattactgctgctcatatgcaggtcgtaggtcttgggtgttcggcggagggaccacactgaccgtcctag

SEQ ID NO: 3930 - DNA, 315 bp, Homo sapiens
  source 1..315: mol_type = other DNA
tcctatgagctgacacagccatcctcagtgtcagtgtctccgggacagacagccaaaatcacctgctcaggagatgtactgacaaaaagatatcctcgatggttccagcagaagccaggccaggcccctgtgctggtgatttataaagacagtgagcggccctcagggatccctgagcgattctccggctccaggtcagggaccacagtcaccttgaccatctccggggcccaggttgaggatgaggctgactattactgttactctgcgactgacaacacttgggtgttcggcggagggaccaaactgaccgtc

SEQ ID NO: 3931 - DNA, 325 bp, Homo sapiens
  source 1..325: mol_type = other DNA
gaagtagtgatgacgcagtctccagccaccctgtctgtgtctccagggcaaagagccaccctctcatgcagggccagtcagagtgtcaccaggaacttagcctggtaccagcagaaacctggccaggctcccaggctcctcatctatggtgcatccaccagggccactggtatcccagccaggttcagtggcagtgggtctgggacagagttcactctcaccatcagcagcatgcagtctgaagattttgcagtttattactgtcagcagtataataactggcctccggtcactttcggcggagggaccaaggtggagatcaaac

SEQ ID NO: 3932 - DNA, 317 bp, Homo sapiens
  source 1..317: mol_type = other DNA
aatagtgatgacgcagtctccagccaccctgtctgtgtctccaggggaaagagccaccctctcctgcagggccagtgcgactattagcaacaacttagcctggtatcagcagagacctggccacgctcccaggctcctcctctacggtgcatccaccagggccactggtatcccagccaggttcactggcagtgggtctgggacagagttcactctcgccatcagcagcctgcagtctgaagattctgcaatttattactgtcagcagtataataactggcccactttcggcggagggaccaaggtagagatcaaac

SEQ ID NO: 3933 - DNA, 322 bp, Homo sapiens
  source 1..322: mol_type = other DNA
gacatccagatgacccagtctccttccactctgtttgcatatgtaggagacagagtcaccatcacttgccgggccagccaaacaattcgtggctggttggcctggtatcaacagaaaccagggaaagcccctagcctcctgatctctaaggcgtctactttacaaagtggggtcccatcaaggttcagcggcagtggatccgggacagatttcactctcaccatcaccaacctgcagcctgatgattttgcaacttattactgccaacactataatgattatccgtacacttttggccaggggaccaagctggagctcaaac

SEQ ID NO: 3934 - DNA, 328 bp, Homo sapiens
  source 1..328: mol_type = other DNA
tcctatgtgctgactcagccaccctcagtgtcagtggccccaggaaagacggccaggattacctgtgggggaaacaacattggaaataaaagtgtgcactggtaccagcagaagccaggccaggcccctgtgctggtcgtctatgatgatagcgaccggccctcagggatccctgagcgattctctggctccaactctgggaacacggccaccctgaccatcagcagggtcgaagccggggatgaggccgactattactgtcaggtgtgggatagtagtagtgatcatccttatgtcttcggaactgggaccaacgtccccgtcctag

SEQ ID NO: 3935 - DNA, 328 bp, Homo sapiens
  source 1..328: mol_type = other DNA
caggctgtggtgactcaggagccctcactgactgtgtccccaggagggacagtcactctcacctgtggctccagcactggggcagtcaccagtggtcattatccctactggttccagcagaagcctggccaagcccccaggacactgatttatgatacaagcaacaaacactcctggacacctgcccggatctcaggctccctccttgggggcaaagctgccctgaccctttcgggtgcgcagcctgaggatgaggctgactattactgcttgctctcctataatggtgctcgggtattcggcggagggaccaagctgaccgtcctag

SEQ ID NO: 3936 - DNA, 322 bp, Homo sapiens
  source 1..322: mol_type = other DNA
gacatccacttgacccagtctccatccttcctgtctgcatctgtaggagacagagtcaccatcacttgccgggccagtcaggccaatagcaattatttagcctggtatcaacaaaagccagggaaagcccctaagctcctgatctatgctgcatcgactttgcaaagtggggtcccgtcaaggttcagcggcagtggatctgggacagaattcactctcacaatcaccagcctgcaggctgaagattgtgcaacttactactgtcagcagactaatagtttccctcggacgttcggccaagggaccaacgtggaaatcaaac

SEQ ID NO: 3937 - DNA, 334 bp, Homo sapiens
  source 1..334: mol_type = other DNA
gatattgtgatgacccagactccactctctctgtccgtaacccctggacagtcggcctccatctcctgtaagtctagtcagagcctcctgcatagtgatggaaagacctatttgttttggtacctgcagaagccaggccagtctccacaactcctgatttatgaagtttccagccggttctctggagtgccagacaggttcagtggcagcgggtcagggacagatttcacactgaaaatcagccgggtggaggctgacgatgttggggtttattactgcatgcaaggtatacaccttattaccttcggccaagggacacgactggagattaaac

SEQ ID NO: 3938 - DNA, 325 bp, Homo sapiens
  source 1..325: mol_type = other DNA
gaaatagtgatgacgcagtctccagccaccgtgtctgtgtctccaggggaaagagccaccctctcttgcagggccagtcagagtgttaacagcgacctcgtatggtaccagcagaaacctggccaggctcccagactcctcatttatggagcgtccattagggccactggtatcccagccaggttcagtggcagtgggtctgggacagagttcactctcaccatcagcagcattcagtctgaagattttgcagtttattactgtcagcagtataataactggcctccgctcactttcggcggagggaccaaggtggaaatcaaac

SEQ ID NO: 3939 - DNA, 325 bp, Homo sapiens
  source 1..325: mol_type = other DNA
gaaattgtgttgacacagtctccaggcaccctgtctctgtctccaggggaaagagccaccctctcctgccgggccagtgagagtgttagcacctacttagcctggtaccaaaagaaacctggccaggctcccaggctcctcatctatgatgcatcccacagggccactggcatcccagccaggttcagtggcagtgggtctgggacagacttcactctcaccatcagcagcctagagtctgaagattttggagtttattactgtcagcagcgtagcaactggcctccgatcaccttcggccaagggacacgactggagattaaac

SEQ ID NO: 3940 - DNA, 325 bp, Homo sapiens
  source 1..325: mol_type = other DNA
gaaattgtgttgacacagtctccagccaccctgtctttgtctccaggggaaagagccaccctctcctgcagggccagtcagagtgttaacaactacttagcctggtaccaagagaagcctggccaggctcccaggctcctcatctatgatgcatccaacagggccactggcatcccagccaggttcagtggcagtgggtctgggacagacttcactctcaccatcagcagcctagaacctgaagattttgcagtttattactgtcagcagcgtagcaactggcctccgatcaccttcggccaagggacacgactggagattaaac

SEQ ID NO: 3941 - protein, 14 aa, Homo sapiens
AAAPHIVVAGVFDY

SEQ ID NO: 3942 - protein, 11 aa, Homo sapiens
AAGSGYSPPVN

SEQ ID NO: 3943 - protein, 13 aa, Homo sapiens
AAGYTYGSNPFDY

SEQ ID NO: 3944 - protein, 7 aa, Homo sapiens
AALTLRS

SEQ ID NO: 3945 - protein, 10 aa, Homo sapiens
AAMATISPYI

SEQ ID NO: 3946 - protein, 16 aa, Homo sapiens
AAPDTAGGSYYLTFDY

SEQ ID NO: 3947 - protein, 21 aa, Homo sapiens
AAPPYYYDSSGYYSTSDWFDP

SEQ ID NO: 3948 - protein, 7 aa, Homo sapiens
AARMGVS

SEQ ID NO: 3949 - protein, 7 aa, Homo sapiens
AASILQS

SEQ ID NO: 3950 - protein, 7 aa, Homo sapiens
AASKLQS

SEQ ID NO: 3951 - protein, 7 aa, Homo sapiens
AASNLES

SEQ ID NO: 3952 - protein, 7 aa, Homo sapiens
AASNLHS

SEQ ID NO: 3953 - protein, 7 aa, Homo sapiens
AASNLQS

SEQ ID NO: 3954 - protein, 7 aa, Homo sapiens
AASNLVS

SEQ ID NO: 3955 - protein, 7 aa, Homo sapiens
AASNRAT

SEQ ID NO: 3956 - protein, 7 aa, Homo sapiens
AASRLDS

SEQ ID NO: 3957 - protein, 7 aa, Homo sapiens
AASRLES

SEQ ID NO: 3958 - protein, 7 aa, Homo sapiens
AASRLES

SEQ ID NO: 3959 - protein, 12 aa, Homo sapiens
DRGVAESTYFDS

SEQ ID NO: 3960 - protein, 7 aa, Homo sapiens
AASRLQS

SEQ ID NO: 3961 - protein, 7 aa, Homo sapiens
AASSLES

SEQ ID NO: 3962 - protein, 7 aa, Homo sapiens
AASSLHR

SEQ ID NO: 3963 - protein, 7 aa, Homo sapiens
AASSLHS

SEQ ID NO: 3964 - protein, 7 aa, Homo sapiens
AASSLKS

SEQ ID NO: 3965 - protein, 7 aa, Homo sapiens
AASSLLS

SEQ ID NO: 3966 - protein, 7 aa, Homo sapiens
AASSLQG

SEQ ID NO: 3967 - protein, 7 aa, Homo sapiens
AASSLQL

SEQ ID NO: 3968 - protein, 7 aa, Homo sapiens
AASSLQR

SEQ ID NO: 3969 - protein, 7 aa, Homo sapiens
AASSLQS

SEQ ID NO: 3970 - protein, 7 aa, Homo sapiens
AASSLRS

SEQ ID NO: 3971 - protein, 7 aa, Homo sapiens
AASSLYS

SEQ ID NO: 3972 - protein, 7 aa, Homo sapiens
AASSRAA

SEQ ID NO: 3973 - protein, 7 aa, Homo sapiens
AASSRAS

SEQ ID NO: 3974 - protein, 7 aa, Homo sapiens
AASSRAT

SEQ ID NO: 3975 - protein, 7 aa, Homo sapiens
AASSVES

SEQ ID NO: 3976 - protein, 7 aa, Homo sapiens
AASTFES

SEQ ID NO: 3977 - protein, 7 aa, Homo sapiens
AASTLES

SEQ ID NO: 3978 - protein, 7 aa, Homo sapiens
AASTLGS

SEQ ID NO: 3979 - protein, 7 aa, Homo sapiens
AASTLHS

SEQ ID NO: 3980 - protein, 7 aa, Homo sapiens
AASTLQN

SEQ ID NO: 3981 - protein, 7 aa, Homo sapiens
AASTLQR

SEQ ID NO: 3982 - protein, 7 aa, Homo sapiens
AASTLQS

SEQ ID NO: 3983 - protein, 7 aa, Homo sapiens
AASTRAT

SEQ ID NO: 3984 - protein, 12 aa, Homo sapiens
AATLILGAKFQH

SEQ ID NO: 3985 - protein, 7 aa, Homo sapiens
AATSLQS

SEQ ID NO: 3986 - protein, 7 aa, Homo sapiens
AAVNLQS

SEQ ID NO: 3987 - protein, 7 aa, Homo sapiens
AAVRLQS

SEQ ID NO: 3988 - protein, 11 aa, Homo sapiens
AAWDASLNGWV

SEQ ID NO: 3989 - protein, 12 aa, Homo sapiens
AAWDASLSGLAV

SEQ ID NO: 3990 - protein, 11 aa, Homo sapiens
AAWDDGLEDYV

SEQ ID NO: 3991 - protein, 11 aa, Homo sapiens
AAWDDNLKGPV

SEQ ID NO: 3992 - protein, 11 aa, Homo sapiens
AAWDDRLKGVV

SEQ ID NO: 3993 - protein, 12 aa, Homo sapiens
AAWDDRLSGYWV

SEQ ID NO: 3994 - protein, 11 aa, Homo sapiens
AAWDDSLDGLA

SEQ ID NO: 3995 - protein, 11 aa, Homo sapiens
AAWDDSLKAWV

SEQ ID NO: 3996 - protein, 11 aa, Homo sapiens
AAWDDSLNAWV

SEQ ID NO: 3997 - protein, 11 aa, Homo sapiens
AAWDDSLNGPV

SEQ ID NO: 3998 - protein, 12 aa, Homo sapiens
AAWDDSLNGRWV

SEQ ID NO: 3999 - protein, 11 aa, Homo sapiens
AAWDDSLNGVV

SEQ ID NO: 4000 - protein, 11 aa, Homo sapiens
AAWDDSLNGWV

SEQ ID NO: 4001 - protein, 11 aa, Homo sapiens
AAWDDSLNGYV

SEQ ID NO: 4002 - protein, 11 aa, Homo sapiens
AAWDDSLNSRL

SEQ ID NO: 4003 - protein, 12 aa, Homo sapiens
AAWDDSLNVFYV

SEQ ID NO: 4004 - protein, 11 aa, Homo sapiens
AAWDDSLRIWV

SEQ ID NO: 4005 - protein, 11 aa, Homo sapiens
AAWDDSLSGGV

SEQ ID NO: 4006 - protein, 12 aa, Homo sapiens
AAWDDSLSGHVV

SEQ ID NO: 4007 - protein, 11 aa, Homo sapiens
AAWDDSLSGPV

SEQ ID NO: 4008 - protein, 11 aa, Homo sapiens
AAWDDSLSGWV

SEQ ID NO: 4009 - protein, 12 aa, Homo sapiens
AAWDDSLSGYVV

SEQ ID NO: 4010 - protein, 12 aa, Homo sapiens
AAWDDSLSRQEM

SEQ ID NO: 4011 - protein, 11 aa, Homo sapiens
AAWDDTLNGWM

SEQ ID NO: 4012 - protein, 13 aa, Homo sapiens
AAWDDTLSGPNWV

SEQ ID NO: 4013 - protein, 11 aa, Homo sapiens
AAWDDTLSGVV

SEQ ID NO: 4014 - protein, 11 aa, Homo sapiens
AAWDDTLSGWL

SEQ ID NO: 4015 - protein, 10 aa, Homo sapiens
AAWDGRLNGV

SEQ ID NO: 4016 - protein, 11 aa, Homo sapiens
AAWDGSLNAFV

SEQ ID NO: 4017 - protein, 9 aa, Homo sapiens
AAWDNRSWV

SEQ ID NO: 4018 - protein, 11 aa, Homo sapiens
AAWDNSLNGWV

SEQ ID NO: 4019 - protein, 7 aa, Homo sapiens
AAYILQS

SEQ ID NO: 4020 - protein, 14 aa, Homo sapiens
ADFWDSFFGGHFDH

SEQ ID NO: 4021 - protein, 9 aa, Homo sapiens
ADRWEAFDI

SEQ ID NO: 4022 - protein, 6 aa, Homo sapiens
ADYMDV

SEQ ID NO: 4023 - protein, 12 aa, Homo sapiens
AEGPMVRSANSY

SEQ ID NO: 4024 - protein, 11 aa, Homo sapiens
AENSVYDSPEY

SEQ ID NO: 4025 - protein, 14 aa, Homo sapiens
AERHYIPMAGYFDY

SEQ ID NO: 4026 - protein, 7 aa, Homo sapiens
AERLLDY

SEQ ID NO: 4027 - protein, 15 aa, Homo sapiens
AESWDSSGWSGYFDY

SEQ ID NO: 4028 - protein, 13 aa, Homo sapiens
AESYSLLREVLIY

SEQ ID NO: 4029 - protein, 11 aa, Homo sapiens
AEYGSGSYGDF

SEQ ID NO: 4030 - protein, 16 aa, Homo sapiens
AEYYGSGSYYWGYFDY

SEQ ID NO: 4031 - protein, 5 aa, Homo sapiens
AFAIN

SEQ ID NO: 4032 - protein, 12 aa, Homo sapiens
AFDDGKYHGPDF

SEQ ID NO: 4033 - protein, 12 aa, Homo sapiens
AFDDGSYHGPDF

SEQ ID NO: 4034 - protein, 5 aa, Homo sapiens
AFMVH

SEQ ID NO: 4035 - protein, 16 aa, Homo sapiens
AFPPGSGTYYNDAFDI

SEQ ID NO: 4036 - protein, 9 aa, Homo sapiens
AFRFGEFHA

SEQ ID NO: 4037 - protein, 10 aa, Homo sapiens
AFYLLYYFDF

SEQ ID NO: 4038 - protein, 5 aa, Homo sapiens
AFYMS

SEQ ID NO: 4039 - protein, 5 aa, Homo sapiens
AFYWS

SEQ ID NO: 4040 - protein, 13 aa, Homo sapiens
AGEIIVVPGYMDV

SEQ ID NO: 4041 - protein, 9 aa, Homo sapiens
AGFGVPFDY

SEQ ID NO: 4042 - protein, 14 aa, Homo sapiens
AGGGFLEWVLYLDD

SEQ ID NO: 4043 - protein, 12 aa, Homo sapiens
AGGYHLNDAFHI

SEQ ID NO: 4044 - protein, 15 aa, Homo sapiens
AGGYHVSGERAFMDV

SEQ ID NO: 4045 - protein, 20 aa, Homo sapiens
AGGYYDSSGYFSPPSLYFQH

SEQ ID NO: 4046 - protein, 15 aa, Homo sapiens
AGITIFGIIIGALDI

SEQ ID NO: 4047 - protein, 18 aa, Homo sapiens
AGLPPALSVGATRSAFDI

SEQ ID NO: 4048 - protein, 9 aa, Homo sapiens
AGPGAAFDI

SEQ ID NO: 4049 - protein, 5 aa, Homo sapiens
AGSDL

SEQ ID NO: 4050 - protein, 16 aa, Homo sapiens
AGSFSPRYYHFYYMDV

SEQ ID NO: 4051 - protein, 14 aa, Homo sapiens
AGSHLIPYSGSLDS

SEQ ID NO: 4052 - protein, 14 aa, Homo sapiens
AGSRSNIGAGYDVH

SEQ ID NO: 4053 - protein, 13 aa, Homo sapiens
AGSSNNVGTFAVG

SEQ ID NO: 4054 - protein, 7 aa, Homo sapiens
AGSSRAT

SEQ ID NO: 4055 - protein, 8 aa, Homo sapiens
AGSSSFDY

SEQ ID NO: 4056 - protein, 14 aa, Homo sapiens
AGSSSNIGAGYDVH

SEQ ID NO: 4057 - protein, 14 aa, Homo sapiens
AGTSSDVGGYNYVS

SEQ ID NO: 4058 - protein, 14 aa, Homo sapiens
AGTSSDVGSSDSVS

SEQ ID NO: 4059 - protein, 12 aa, Homo sapiens
AGWDDSLSGSVL

SEQ ID NO: 4060 - protein, 5 aa, Homo sapiens
AHAIT

SEQ ID NO: 4061 - protein, 16 aa, Homo sapiens
AHCTNGVCYPSDAFDI

SEQ ID NO: 4062 - protein, 14 aa, Homo sapiens
AHDRRVPNQGFMDV

SEQ ID NO: 4063 - protein, 10 aa, Homo sapiens
AHGSGSYSLR

SEQ ID NO: 4064 - protein, 10 aa, Homo sapiens
AHGSGSYSLS

SEQ ID NO: 4065 - protein, 16 aa, Homo sapiens
AIGTAGDTYYPGSVKG

SEQ ID NO: 4066 - protein, 16 aa, Homo sapiens
AIGTNGDTYYSDSVKG

SEQ ID NO: 4067 - protein, 16 aa, Homo sapiens
AIHSDDSTYYADSVKG

SEQ ID NO: 4068 - protein, 17 aa, Homo sapiens
AIIPIFGTANYAQKFQG

SEQ ID NO: 4069 - protein, 17 aa, Homo sapiens
AIMGMFGTTNYAQRFQG

SEQ ID NO: 4070 - protein, 17 aa, Homo sapiens
AINAGGGGTYYADSVKG

SEQ ID NO: 4071 - protein, 16 aa, Homo sapiens
AINNRGSTYYDPSLKS

SEQ ID NO: 4072 - protein, 17 aa, Homo sapiens
AINPIFGVTHYAQNFQG

SEQ ID NO: 4073 - protein, 17 aa, Homo sapiens
AINPIFSVVDYAQKFQG

SEQ ID NO: 4074 - protein, 17 aa, Homo sapiens
AINSNGRNTYYAASVKG

SEQ ID NO: 4075 - protein, 95 aa, Homo sapiens
AIQLTQSPSSLSASIGDRVTITCRASQGIASALAWYQQKPGKAPKLLIFDGSSLESGVPSRFSGRGSGTDFSLTISSLQPDDFATYYCQQFNDSP

SEQ ID NO: 4076 - protein, 107 aa, Homo sapiens
AIQLTQSPSSLSASIGDRVTITCRASQGIASALAWYQQKPGKAPKLLIFDGSSLESGVPSRFSGRGSGTDFSLTISSLQPDDFATYYCQQFNDSPVTFGQGTKVEVK

SEQ ID NO: 4077 - protein, 95 aa, Homo sapiens
AIQLTQSPSSLSASVGDRVTITCRASLAISSGFAWYQQKPGKAPSLLISDVSSLKSGVPSRFSGSGSGTEFTLTISSLQPEDFATYYCQQFYDYP

SEQ ID NO: 4078 - protein, 107 aa, Homo sapiens
AIQLTQSPSSLSASVGDRVTITCRASLAISSGFAWYQQKPGKAPSLLISDVSSLKSGVPSRFSGSGSGTEFTLTISSLQPEDFATYYCQQFYDYPLTFGGGTKVEIK

SEQ ID NO: 4079 - protein, 95 aa, Homo sapiens
AIQLTQSPSSLSASVGDRVTITCRASPAISGGLAWYQQKPGKPPKALIYDVSTLENGVPSRFGGSGSMTDFTLTISRLQPEDFAVYYCQQLIGYP

SEQ ID NO: 4080 - protein, 107 aa, Homo sapiens
AIQLTQSPSSLSASVGDRVTITCRASPAISGGLAWYQQKPGKPPKALIYDVSTLENGVPSRFGGSGSMTDFTLTISRLQPEDFAVYYCQQLIGYPLTFGGGTRVEIK

SEQ ID NO: 4081 - protein, 95 aa, Homo sapiens
AIQLTQSPSSLSASVGDRVTITCRASQDIRNDLGWYQQKPGKAPNLLIYAASNLQSGVPSRFSGSGSGTDFTLTISSLQPEDFATYYCLQDYNHP

SEQ ID NO: 4082 - protein, 107 aa, Homo sapiens
AIQLTQSPSSLSASVGDRVTITCRASQDIRNDLGWYQQKPGKAPNLLIYAASNLQSGVPSRFSGSGSGTDFTLTISSLQPEDFATYYCLQDYNHPLTFGGGTKVEMK

SEQ ID NO: 4083 - protein, 94 aa, Homo sapiens
AIQLTQSPSSLSASVGDRVTITCRASQDISSALAWYQQKPGKAPKLLIYHASSLESGVPSRFSGSGSGTDFTLTISSLQPEDFATYYCLQCNPY

SEQ ID NO: 4084 - protein, 106 aa, Homo sapiens
AIQLTQSPSSLSASVGDRVTITCRASQDISSALAWYQQKPGKAPKLLIYHASSLESGVPSRFSGSGSGTDFTLTISSLQPEDFATYYCLQCNPYYRFGGGTKVEIK

SEQ ID NO: 4085 - protein, 95 aa, Homo sapiens
AIQLTQSPSSLSASVGDRVTITCRASQGISSGLAWYQQKPGKPPKALIYDVSTLENGVPSRFGGSGSMTNFTLTISRLQPEDFAVYYCQQLIGYP

SEQ ID NO: 4086 - protein, 107 aa, Homo sapiens
AIQLTQSPSSLSASVGDRVTITCRASQGISSGLAWYQQKPGKPPKALIYDVSTLENGVPSRFGGSGSMTNFTLTISRLQPEDFAVYYCQQLIGYPLTFGGGTRVEIK

SEQ ID NO: 4087 - protein, 95 aa, Homo sapiens
AIQLTQSPSSLSASVGDRVTITCRASQGISTGIAWYQQIPGKPPKALIYDVSTLEDGVPARFGGSGSGPDFTLTISRLQPEDFAIYYCQQLIDYP

SEQ ID NO: 4088 - protein, 107 aa, Homo sapiens
AIQLTQSPSSLSASVGDRVTITCRASQGISTGIAWYQQIPGKPPKALIYDVSTLEDGVPARFGGSGSGPDFTLTISRLQPEDFAIYYCQQLIDYPLTFGGGTRVEIK

SEQ ID NO: 4089 - protein, 95 aa, Homo sapiens
AIQLTQSPSSLSASVGDRVTITCRASQGITSGLAWYQQKPGKAPSLLISDVSTLRTGVPSRFIGGVSGTDFTLTISSLQPEDFATYFCQQFYDYP

SEQ ID NO: 4090 - protein, 106 aa, Homo sapiens
AIQLTQSPSSLSASVGDRVTITCRASQGITSGLAWYQQKPGKAPSLLISDVSTLRTGVPSRFIGGVSGTDFTLTISSLQPEDFATYFCQQFYDYPLTFGGGTKVEI

SEQ ID NO: 4091 - protein, 95 aa, Homo sapiens
AIQLTQSPSSLSASVGDRVTITCRTSQGISSGFAWYQQKPGKAPDLLISDVSTLRTGVPSRFSGSGSGTEFTLTISSLQPEDFATYYCQQFYDYP

SEQ ID NO: 4092 - protein, 107 aa, Homo sapiens
AIQLTQSPSSLSASVGDRVTITCRTSQGISSGFAWYQQKPGKAPDLLISDVSTLRTGVPSRFSGSGSGTEFTLTISSLQPEDFATYYCQQFYDYPLTFGGGTKVEIK

SEQ ID NO: 4093 - protein, 95 aa, Homo sapiens
AIQLTQSPSSLSASVGDRVTITCRTSQVISSALAWYQQKPGKGPKLLIYDASSLDSGVPSRFSGSGSGTDFTLTISSLQPEDFATYYCQQFNSYP

SEQ ID NO: 4094 - protein, 108 aa, Homo sapiens
AIQLTQSPSSLSASVGDRVTITCRTSQVISSALAWYQQKPGKGPKLLIYDASSLDSGVPSRFSGSGSGTDFTLTISSLQPEDFATYYCQQFNSYPRALSFGGGTKVEI

SEQ ID NO: 4095 - protein, 95 aa, Homo sapiens
AIQMTQSPSSLSASIGDRVTITCRASEDINDYLGWYQHRPGRPPRLLIMRSFTRENGVPSRFGGSRSGTEFTLTINGLQPEDLATYYCLQDNEYP

SEQ ID NO: 4096 - protein, 107 aa, Homo sapiens
AIQMTQSPSSLSASIGDRVTITCRASEDINDYLGWYQHRPGRPPRLLIMRSFTRENGVPSRFGGSRSGTEFTLTINGLQPEDLATYYCLQDNEYPFSFGQGTKVELK

SEQ ID NO: 4097 - protein, 95 aa, Homo sapiens
AIQMTQSPSSLSASVGDRVTITCRASQDIRNDLGWYQQKPGKAPQLLIYTTSTLQSGVPSRFSGSGSGTDFTLTISSLQPEDLATYYCLQDYNYP

SEQ ID NO: 4098 - protein, 107 aa, Homo sapiens
AIQMTQSPSSLSASVGDRVTITCRASQDIRNDLGWYQQKPGKAPQLLIYTTSTLQSGVPSRFSGSGSGTDFTLTISSLQPEDLATYYCLQDYNYPYTFGQGTKLEIK

SEQ ID NO: 4099 - protein, 95 aa, Homo sapiens
AIQMTQSPSSLSASVGDRVTITCRASQGIRNDLAWYQLKPGKAPKLLIYAASSLESGVPLRFTGSGSGTDFALTISSLQPEDFATYYCLQDYNYP

SEQ ID NO: 4100 - protein, 106 aa, Homo sapiens
AIQMTQSPSSLSASVGDRVTITCRASQGIRNDLAWYQLKPGKAPKLLIYAASSLESGVPLRFTGSGSGTDFALTISSLQPEDFATYYCLQDYNYPRTFGQGTKVEI

SEQ ID NO: 4101 - protein, 95 aa, Homo sapiens
AIQMTQSPSSLSASVGDRVTITCRASQGIRNDLGWYQQKPGKAPKLLIYAASSLQSGVPSRFSGSGSGTDFTLTISSLQPEDFATYYCLQDYNYP

SEQ ID NO: 4102 - protein, 107 aa, Homo sapiens
AIQMTQSPSSLSASVGDRVTITCRASQGIRNDLGWYQQKPGKAPKLLIYAASSLQSGVPSRFSGSGSGTDFTLTISSLQPEDFATYYCLQDYNYPWTFGQGTKVEIK

SEQ ID NO: 4103 - protein, 95 aa, Homo sapiens
AIQMTQSPSSLSASVGDRVTITCRASQGIRNDLGWYQQRPGEAPRLLIYAASSLQSGVPSRFSGSGSGTDFTLTISSLQPEDFATYYCLQDYNHP

SEQ ID NO: 4104 - protein, 105 aa, Homo sapiens
AIQMTQSPSSLSASVGDRVTITCRASQGIRNDLGWYQQRPGEAPRLLIYAASSLQSGVPSRFSGSGSGTDFTLTISSLQPEDFATYYCLQDYNHPLTFGGGTKVE

SEQ ID NO: 4105 - protein, 17 aa, Homo sapiens
AIRGDGGGTHYAGSVKG

SEQ ID NO: 4106 - protein, 17 aa, Homo sapiens
AIRGDGGNKYYAGSVKG

SEQ ID NO: 4107 - protein, 17 aa, Homo sapiens
AIRGGGYSTYYADSVKG

SEQ ID NO: 4108 - protein, 17 aa, Homo sapiens
AIRGSGTETFYTDSVKG

SEQ ID NO: 4109 - protein, 94 aa, Homo sapiens
AIRITQSPSSLSASTGDRVTITCRASQGISSYLAWYQQKPGKAPKLLIYAASTLQSGVPSRFSGSGSGTDFTLTISCLQSEDFATYYCQQYYSY

SEQ ID NO: 4110 - protein, 106 aa, Homo sapiens
AIRITQSPSSLSASTGDRVTITCRASQGISSYLAWYQQKPGKAPKLLIYAASTLQSGVPSRFSGSGSGTDFTLTISCLQSEDFATYYCQQYYSYLTFGPGTKVDIK

SEQ ID NO: 4111 - protein, 95 aa, Homo sapiens
AIRLTQSPSSLSASIGDRVTITCRTSQHISSGIAWYQQKPGKAPDLLISDVSNLRSGVPSRFGGSASGTDFTLTISSLQPEDSATYFCQQFYSYP

SEQ ID NO: 4112 - protein, 107 aa, Homo sapiens
AIRLTQSPSSLSASIGDRVTITCRTSQHISSGIAWYQQKPGKAPDLLISDVSNLRSGVPSRFGGSASGTDFTLTISSLQPEDSATYFCQQFYSYPLTFGGGTKVEIK

SEQ ID NO: 4113 - protein, 95 aa, Homo sapiens
AIRMTQSPSSFSASTGDRVTITCRASQGIASYLAWYQQKPGKAPKLLIYDASTLQSGVPSRFSGSGSGTDFTLTISCLQSEDFATYYCQQYYRYP

SEQ ID NO: 4114 - protein, 107 aa, Homo sapiens
AIRMTQSPSSFSASTGDRVTITCRASQGIASYLAWYQQKPGKAPKLLIYDASTLQSGVPSRFSGSGSGTDFTLTISCLQSEDFATYYCQQYYRYPYTFGQGTKLEIK

SEQ ID NO: 4115 - protein, 95 aa, Homo sapiens
AIRMTQSPSSFSASTGDRVTITCRASQGISSYLAWYQQKPGKAPKLLIYAASTLQSGVPSRFSGSGSGTDFTLTISCLQSEDFATYYCQQYYSYP

SEQ ID NO: 4116 - protein, 107 aa, Homo sapiens
AIRMTQSPSSFSASTGDRVTITCRASQGISSYLAWYQQKPGKAPKLLIYAASTLQSGVPSRFSGSGSGTDFTLTISCLQSEDFATYYCQQYYSYPHTFGQGTKLEIK

SEQ ID NO: 4117 - protein, 96 aa, Homo sapiens
AIRMTQSPSSFSASTGDRVTITCRASQGISSYLAWYQQKPGKAPKLLIYAASTLQSGVPSRFSGSGSGTDFTLTISCLQSEDFATYYCQQYYSYPP

SEQ ID NO: 4118 - protein, 108 aa, Homo sapiens
AIRMTQSPSSFSASTGDRVTITCRASQGISSYLAWYQQKPGKAPKLLIYAASTLQSGVPSRFSGSGSGTDFTLTISCLQSEDFATYYCQQYYSYPPLTFGGGTKVEIK

SEQ ID NO: 4119 - protein, 107 aa, Homo sapiens
AIRMTQSPSSFSASTGDRVTITCRASQGISSYLAWYQQKPGKAPKLLIYAASTLQSGVPSRFSGSGSGTDFTLTISCLQSEDFATYYCQQYYSYPRTFGQGTKVEIK

SEQ ID NO: 4120 - protein, 95 aa, Homo sapiens
AIRMTQSPSSLSASTGDRVTITCRASQGISSYLAWYQQKPGKAPKLLIYAASTLQSGVPSRFSGSGSGTDFTLTISCLQSEDFATYYCQQYYNYP

SEQ ID NO: 4121 - protein, 107 aa, Homo sapiens
AIRMTQSPSSLSASTGDRVTITCRASQGISSYLAWYQQKPGKAPKLLIYAASTLQSGVPSRFSGSGSGTDFTLTISCLQSEDFATYYCQQYYNYPLTFGGGTKVEIK

SEQ ID NO: 4122 - protein, 94 aa, Homo sapiens
AIRMTQSPSSLSASTGDRVTITCRASQGISSYLAWYQQKPGKAPKLLIYAASTLQSGVPSRFSGSGSGTDFTLTISCLQSEDFATYYCQQYYSY

SEQ ID NO: 4123 - protein, 109 aa, Homo sapiens
AIRMTQSPSSLSASTGDRVTITCRASQGISSYLAWYQQKPGKAPKLLIYAASTLQSGVPSRFSGSGSGTDFTLTISCLQSEDFATYYCQQYYSYLRQWTFGQGTKVEIK

SEQ ID NO: 4124 - protein, 95 aa, Homo sapiens
AIRMTQSPSSLSASTGDRVTITCRASQGISSYLAWYQQKPGKAPKLLIYAASTLQSGVPSRFSGSGSGTDFTLTISCLQSEDFATYYCQQYYSYP

SEQ ID NO: 4125 - protein, 108 aa, Homo sapiens
AIRMTQSPSSLSASTGDRVTITCRASQGISSYLAWYQQKPGKAPKLLIYAASTLQSGVPSRFSGSGSGTDFTLTISCLQSEDFATYYCQQYYSYPMYTFGQGTKLEIK

SEQ ID NO: 4126 - protein, 107 aa, Homo sapiens
AIRMTQSPSSLSASTGDRVTITCRASQGISSYLAWYQQKPGKAPKLLIYAASTLQSGVPSRFSGSGSGTDFTLTISCLQSEDFATYYCQQYYSYPYTFGQGTKLEIK

SEQ ID NO: 4127 - protein, 19 aa, Homo sapiens
AIRNRAKSYSTEYAASVEG

SEQ ID NO: 4128 - protein, 17 aa, Homo sapiens
AIRSGGDYAYHADSVKG

SEQ ID NO: 4129 - protein, 11 aa, Homo sapiens
AISATGDWLDP

SEQ ID NO: 4130 - protein, 17 aa, Homo sapiens
AISDSDRTTYYADSVKG

SEQ ID NO: 4131 - protein, 17 aa, Homo sapiens
AISDSGGSTYYADSVKG

SEQ ID NO: 4132 - protein, 17 aa, Homo sapiens
AISDTGSTTYYADSVKG

SEQ ID NO: 4133 - protein, 17 aa, Homo sapiens
AISGGFDRTFYADSVKG

SEQ ID NO: 4134 - protein, 17 aa, Homo sapiens
AISGGGSSTYYADSVKG

SEQ ID NO: 4135 - protein, 17 aa, Homo sapiens
AISGSGGRTYYADSVRG

SEQ ID NO: 4136 - protein, 17 aa, Homo sapiens
AISGSGGSTYYADSVKG

SEQ ID NO: 4137 - protein, 17 aa, Homo sapiens
AISGSGGTTSYADSVKG

SEQ ID NO: 4138 - protein, 17 aa, Homo sapiens
AISGSGISTYYADSVKG

SEQ ID NO: 4139 - protein, 17 aa, Homo sapiens
AISGSGLSTYYADSVKG

SEQ ID NO: 4140 - protein, 17 aa, Homo sapiens
AISGTGISTYYADSVKG

SEQ ID NO: 4141 - protein, 7 aa, Homo sapiens
AISNLQS

SEQ ID NO: 4142 - protein, 17 aa, Homo sapiens
AISNSGNHLYYADSVKG

SEQ ID NO: 4143 - protein, 17 aa, Homo sapiens
AISPSSDSTSHTDSVKG

SEQ ID NO: 4144 - protein, 16 aa, Homo sapiens
AISSGANTYYADSVKG

SEQ ID NO: 4145 - protein, 17 aa, Homo sapiens
AISSNGDSTYYANSVKG

SEQ ID NO: 4146 - protein, 17 aa, Homo sapiens
AISSNGGSTYYANSVKG

SEQ ID NO: 4147 - protein, 17 aa, Homo sapiens
AISSNGGSTYYGNSVKG

SEQ ID NO: 4148 - protein, 17 aa, Homo sapiens
AISSSAGTTHYGASVKG

SEQ ID NO: 4149 - protein, 17 aa, Homo sapiens
AISTSGGSRYYADSVKG

SEQ ID NO: 4150 - protein, 17 aa, Homo sapiens
AISYDGSDTNYADSVKG

SEQ ID NO: 4151 - protein, 17 aa, Homo sapiens
AISYDGSNIYYADSVKG

SEQ ID NO: 4152 - protein, 17 aa, Homo sapiens
AISYTGNSKYYADSVKG

SEQ ID NO: 4153 - protein, 17 aa, Homo sapiens
AITDSGGSSYYADSVKG

SEQ ID NO: 4154 - protein, 17 aa, Homo sapiens
AITGSGDSTYYADSVKG

SEQ ID NO: 4155 - protein, 17 aa, Homo sapiens
AITGSGGSKYYGDSVKG

SEQ ID NO: 4156 - protein, 17 aa, Homo sapiens
AITWNGGNTAYADSVKG

SEQ ID NO: 4157 - protein, 95 aa, Homo sapiens
AIWMTQSPSLLSASTGDRVTISCRMSQGISSYLAWYQQKPGKAPELLIYAASTLQSGVPSRFSGSGSGTDFTLTISCLQSEDFATYYCQQYYSFP

SEQ ID NO: 4158 - protein, 107 aa, Homo sapiens
AIWMTQSPSLLSASTGDRVTISCRMSQGISSYLAWYQQKPGKAPELLIYAASTLQSGVPSRFSGSGSGTDFTLTISCLQSEDFATYYCQQYYSFPYTFGQGTKLEIK

SEQ ID NO: 4159 - protein, 16 aa, Homo sapiens
AIYHSGSTYFNPSLRS

SEQ ID NO: 4160 - protein, 13 aa, Homo sapiens
AKDSGTYYQGFDI

SEQ ID NO: 4161 - protein, 15 aa, Homo sapiens
AKEFYGSASHFLLES

SEQ ID NO: 4162 - protein, 15 aa, Homo sapiens
AKMPGAGVHPYYFDS

SEQ ID NO: 4163 - protein, 18 aa, Homo sapiens
AKVRYYDSSGHHSGYLGY

SEQ ID NO: 4164 - protein, 11 aa, Homo sapiens
ALDSSGYYPRY

SEQ ID NO: 4165 - protein, 9 aa, Homo sapiens
ALHMGSYWV

SEQ ID NO: 4166 - protein, 16 aa, Homo sapiens
ALHSDDSTYYADSVKG

SEQ ID NO: 4167 - protein, 13 aa, Homo sapiens
ALNSGYKIPSLDY

SEQ ID NO: 4168 - protein, 10 aa, Homo sapiens
ALPAATIIDY

SEQ ID NO: 4169 - protein, 7 aa, Homo sapiens
ALRTFDY

SEQ ID NO: 4170 - protein, 15 aa, Homo sapiens
ALSNKWPGREAYLDL

SEQ ID NO: 4171 - protein, 15 aa, Homo sapiens
ALSPGGSLPTMTFAS

SEQ ID NO: 4172 - protein, 17 aa, Homo sapiens
AMSFDGYSKYHADSVKG

SEQ ID NO: 4173 - protein, 7 aa, Homo sapiens
ANDQRPP

SEQ ID NO: 4174 - protein, 10 aa, Homo sapiens
ANGAGSYILS

SEQ ID NO: 4175 - protein, 10 aa, Homo sapiens
ANGAGSYSVS

SEQ ID NO: 4176 - protein, 7 aa, Homo sapiens
ANNQRPS

SEQ ID NO: 4177 - protein, 7 aa, Homo sapiens
ANRMCID

SEQ ID NO: 4178 - protein, 12 aa, Homo sapiens
ANRYNWNDVWHY

SEQ ID NO: 4179 - protein, 6 aa, Homo sapiens
ANSLPS

SEQ ID NO: 4180 - protein, 7 aa, Homo sapiens
ANSNRPS

SEQ ID NO: 4181 - protein, 5 aa, Homo sapiens
ANYIH

SEQ ID NO: 4182 - protein, 5 aa, Homo sapiens
ANYMH

SEQ ID NO: 4183 - protein, 13 aa, Homo sapiens
APGQYFDWLYFDY

SEQ ID NO: 4184 - protein, 11 aa, Homo sapiens
APGYYDSYLDI

SEQ ID NO: 4185 - protein, 11 aa, Homo sapiens
APGYYDSYLEI

SEQ ID NO: 4186 - protein, 12 aa, Homo sapiens
APIVGARSYFDY

SEQ ID NO: 4187 - protein, 11 aa, Homo sapiens
APKIYHWYFDL

SEQ ID NO: 4188 - protein, 14 aa, Homo sapiens
APLGGPIMRRYFDL

SEQ ID NO: 4189 - protein, 14 aa, Homo sapiens
APLGGPTMRRYFDL

SEQ ID NO: 4190 - protein, 16 aa, Homo sapiens
APPSQYRGGWTNRLDH

SEQ ID NO: 4191 - protein, 13 aa, Homo sapiens
APPSTLAARWNDY

SEQ ID NO: 4192 - protein, 8 aa, Homo sapiens
APRGGVDP

SEQ ID NO: 4193 - protein, 7 aa, Homo sapiens
APVEVGY

SEQ ID NO: 4194 - protein, 11 aa, Homo sapiens
APWDDSLSSLV

SEQ ID NO: 4195 - protein, 11 aa, Homo sapiens
APYGSGSFADS

SEQ ID NO: 4196 - protein, 11 aa, Homo sapiens
APYGSGSFVDY

SEQ ID NO: 4197 - protein, 11 aa, Homo sapiens
APYGSGSYINH

SEQ ID NO: 4198 - protein, 10 aa, Homo sapiens
APYVATMIDY

SEQ ID NO: 4199 - protein, 20 aa, Homo sapiens
AQAYLGYCSGDRCPQYYFDY

SEQ ID NO: 4200 - protein, 11 aa, Homo sapiens
AQGYHRPIPHF

SEQ ID NO: 4201 - protein, 11 aa, Homo sapiens
AQGYHRPIPHY

SEQ ID NO: 4202 - protein, 11 aa, Homo sapiens
AQGYNRPIPHY

SEQ ID NO: 4203 - protein, 12 aa, Homo sapiens
AQGYQPNDAFDI

SEQ ID NO: 4204 - protein, 13 aa, Homo sapiens
AQGYSSNNNWFDP

SEQ ID NO: 4205 - protein, 11 aa, Homo sapiens
AQGYYRPIPHY

SEQ ID NO: 4206 - protein, 13 aa, Homo sapiens
AQKYYFESSGYPN

SEQ ID NO: 4207 - protein, 13 aa, Homo sapiens
AQNYYGTSGYWGN

SEQ ID NO: 4208 - protein, 7 aa, Homo sapiens
AQRYSWG

SEQ ID NO: 4209 - protein, 16 aa, Homo sapiens
AQSFFGSGSYYNVFDY

SEQ ID NO: 4210 - protein, 14 aa, Homo sapiens
AQYYYDSSGFSLDY

SEQ ID NO: 4211 - protein, 8 aa, Homo sapiens
ARDGYFDY

SEQ ID NO: 4212 - protein, 13 aa, Homo sapiens
ARESHFENSPFNF

SEQ ID NO: 4213 - protein, 12 aa, Homo sapiens
ARGFGEEYYFDY

SEQ ID NO: 4214 - protein, 12 aa, Homo sapiens
ARGSNYVGWFGP

SEQ ID NO: 4215 - protein, 9 aa, Homo sapiens
ARGVTVFDY

SEQ ID NO: 4216 - protein, 15 aa, Homo sapiens
ARGYHLFGEAGYFDY

SEQ ID NO: 4217 - protein, 12 aa, Homo sapiens
ARHYYDTSYYHS

SEQ ID NO: 4218 - protein, 17 aa, Homo sapiens
ARIGMFGTTSYAEKFQG

SEQ ID NO: 4219 - protein, 9 aa, Homo sapiens
ARLRLYFDY

SEQ ID NO: 4220 - protein, 12 aa, Homo sapiens
ARPSWNDNWFDP

SEQ ID NO: 4221 - protein, 23 aa, Homo sapiens
ARQIYCSGGPCYVGFKTNDAFDM

SEQ ID NO: 4222 - protein, 16 aa, Homo sapiens
ARSELFGSASYLVFDS

SEQ ID NO: 4223 - protein, 12 aa, Homo sapiens
ARTYYYDNFFVS

SEQ ID NO: 4224 - protein, 13 aa, Homo sapiens
ARTYYYDNSPFDY

SEQ ID NO: 4225 - protein, 15 aa, Homo sapiens
ARVRNRIAEAGTFDS

SEQ ID NO: 4226 - protein, 5 aa, Homo sapiens
ASAIS

SEQ ID NO: 4227 - protein, 19 aa, Homo sapiens
ASDRELRFLEWLSHEAFDI

SEQ ID NO: 4228 - protein, 5 aa, Homo sapiens
ASEMN

SEQ ID NO: 4229 - protein, 13 aa, Homo sapiens
ASGYSFSFNWFDP

SEQ ID NO: 4230 - protein, 11 aa, Homo sapiens
ASGYYPDWFDP

SEQ ID NO: 4231 - protein, 11 aa, Homo sapiens
ASLRRYSGYDL

SEQ ID NO: 4232 - protein, 13 aa, Homo sapiens
ASPPVESGTEYDY

SEQ ID NO: 4233 - protein, 13 aa, Homo sapiens
ASPPVETGTEYDY

SEQ ID NO: 4234 - protein, 11 aa, Homo sapiens
ASRDDGWDDYV

SEQ ID NO: 4235 - protein, 18 aa, Homo sapiens
ASRFTIFGVVILSNWFDP

SEQ ID NO: 4236 - protein, 17 aa, Homo sapiens
ASSRASVRQGKGGYMDV

SEQ ID NO: 4237 - protein, 14 aa, Homo sapiens
ASSTGAVTSGFYPN

SEQ ID NO: 4238 - protein, 14 aa, Homo sapiens
ASSTGAVTSGHYPY

SEQ ID NO: 4239 - protein, 14 aa, Homo sapiens
ASSTGAVTSGYYPN

SEQ ID NO: 4240 - protein, 14 aa, Homo sapiens
ASSTGDVTSGFYPN

SEQ ID NO: 4241 - protein, 9 aa, Homo sapiens
ASSWNVFDI

SEQ ID NO: 4242 - protein, 5 aa, Homo sapiens
ASTMH

SEQ ID NO: 4243 - protein, 17 aa, Homo sapiens
ASVRASVRQDKGGYMDV

SEQ ID NO: 4244 - protein, 11 aa, Homo sapiens
ASWDDRLNAPR

SEQ ID NO: 4245 - protein, 12 aa, Homo sapiens
ASWDDSLGGFYV

SEQ ID NO: 4246 - protein, 11 aa, Homo sapiens
ASWDDSLSGPV

SEQ ID NO: 4247 - protein, 7 aa, Homo sapiens
ASWFFDY

SEQ ID NO: 4248 - protein, 5 aa, Homo sapiens
ASYWH

SEQ ID NO: 4249 - protein, 15 aa, Homo sapiens
ATGTTSGHFYYYIDV

SEQ ID NO: 4250 - protein, 12 aa, Homo sapiens
ATGVAGGDLFDF

SEQ ID NO: 4251 - protein, 7 aa, Homo sapiens
ATGVGVG

SEQ ID NO: 4252 - protein, 19 aa, Homo sapiens
ATRGFTFQGTLGRKYYFDY

SEQ ID NO: 4253 - protein, 19 aa, Homo sapiens
ATRNKANNYTTEFAASVKG

SEQ ID NO: 4254 - protein, 19 aa, Homo sapiens
ATRNKRNNYTTEYAASVKG

SEQ ID NO: 4255 - protein, 7 aa, Homo sapiens
ATSNLEG

SEQ ID NO: 4256 - protein, 7 aa, Homo sapiens
ATSNLES

SEQ ID NO: 4257 - protein, 7 aa, Homo sapiens
ATSNLQS

SEQ ID NO: 4258 - protein, 7 aa, Homo sapiens
ATSSRAT

SEQ ID NO: 4259 - protein, 7 aa, Homo sapiens
ATSTLQS

SEQ ID NO: 4260 - protein, 17 aa, Homo sapiens
ATSYDGSQKYYADSVKG

SEQ ID NO: 4261 - protein, 11 aa, Homo sapiens
ATWDDGLEAWV

SEQ ID NO: 4262 - protein, 11 aa, Homo sapiens
ATWDDNLKGWV

SEQ ID NO: 4263 - protein, 11 aa, Homo sapiens
ATWDDSLNGPE

SEQ ID NO: 4264 - protein, 11 aa, Homo sapiens
ATWDDSLNGPV

SEQ ID NO: 4265 - protein, 11 aa, Homo sapiens
ATWDDSLRAWV

SEQ ID NO: 4266 - protein, 12 aa, Homo sapiens
ATWDDSLSGYWV

SEQ ID NO: 4267 - protein, 16 aa, Homo sapiens
ATWIQPWLRPRDFFDY

SEQ ID NO: 4268 - protein, 8 aa, Homo sapiens
AVAGTIDY

SEQ ID NO: 4269 - protein, 17 aa, Homo sapiens
AVDGGSSLSGYYYGMDV

SEQ ID NO: 4270 - protein, 17 aa, Homo sapiens
AVGGGPGNTYLADSVRG

SEQ ID NO: 4271 - protein, 17 aa, Homo sapiens
AVGGGRGNTYLADSVRG

SEQ ID NO: 4272 - protein, 12 aa, Homo sapiens
AVGYSLPSYFDY

SEQ ID NO: 4273 - protein, 12 aa, Homo sapiens
AVGYSLPSYFES

SEQ ID NO: 4274 - protein, 12 aa, Homo sapiens
AVGYYLPSYFDS

SEQ ID NO: 4275 - protein, 12 aa, Homo sapiens
AVIVRPTNGIQY

SEQ ID NO: 4276 - protein, 14 aa, Homo sapiens
AVLSVEGELLGLDY

SEQ ID NO: 4277 - protein, 13 aa, Homo sapiens
AVNYYGSKTYYDL

SEQ ID NO: 4278 - protein, 6 aa, Homo sapiens
AVRGDY

SEQ ID NO: 4279 - protein, 17 aa, Homo sapiens
AVSGSGGSTYYADSVKG

SEQ ID NO: 4280 - protein, 17 aa, Homo sapiens
AVSGSGGSTYYTDSVKG

SEQ ID NO: 4281 - protein, 7 aa, Homo sapiens
AVSNLPR

SEQ ID NO: 4282 - protein, 7 aa, Homo sapiens
AVSSLQS

SEQ ID NO: 4283 - protein, 7 aa, Homo sapiens
AVTIRPP

SEQ ID NO: 4284 - protein, 11 aa, Homo sapiens
AVWDDSLNGPV

SEQ ID NO: 4285 - protein, 11 aa, Homo sapiens
AVWDDSLNGWA

SEQ ID NO: 4286 - protein, 11 aa, Homo sapiens
AVWDDSLNGWM

SEQ ID NO: 4287 - protein, 11 aa, Homo sapiens
AVWDDSLSALV

SEQ ID NO: 4288 - protein, 11 aa, Homo sapiens
AVWDDSLSVWV

SEQ ID NO: 4289 - protein, 11 aa, Homo sapiens
AVWDDWLSGVV

SEQ ID NO: 4290 - protein, 11 aa, Homo sapiens
AWDGDKGAFDV

SEQ ID NO: 4291 - protein, 11 aa, Homo sapiens
AWDGHSAAYDI

SEQ ID NO: 4292 - protein, 11 aa, Homo sapiens
AWDGNNGAFDI

SEQ ID NO: 4293 - protein, 10 aa, Homo sapiens
AWDGRGAFDI

SEQ ID NO: 4294 - protein, 11 aa, Homo sapiens
AWDGSNGAFDI

SEQ ID NO: 4295 - protein, 9 aa, Homo sapiens
AWGIAAFDF

SEQ ID NO: 4296 - protein, 16 aa, Homo sapiens
AWGYCGRDCYIYYFDS

SEQ ID NO: 4297 - protein, 12 aa, Homo sapiens
AWGYHISGYYKS

SEQ ID NO: 4298 - protein, 12 aa, Homo sapiens
AWGYHISGYYNS

SEQ ID NO: 4299 - protein, 17 aa, Homo sapiens
AWRPRDASGGFYSWFDA

SEQ ID NO: 4300 - protein, 14 aa, Homo sapiens
AWVAYGSGYWYFDL

SEQ ID NO: 4301 - protein, 12 aa, Homo sapiens
AWWFGELFPFGY

SEQ ID NO: 4302 - protein, 5 aa, Homo sapiens
AYAIG

SEQ ID NO: 4303 - protein, 5 aa, Homo sapiens
AYAIH

SEQ ID NO: 4304 - protein, 5 aa, Homo sapiens
AYAIN

SEQ ID NO: 4305 - protein, 5 aa, Homo sapiens
AYAIS

SEQ ID NO: 4306 - protein, 5 aa, Homo sapiens
AYAIT

SEQ ID NO: 4307 - protein, 5 aa, Homo sapiens
AYAMG

SEQ ID NO: 4308 - protein, 5 aa, Homo sapiens
AYAMS

SEQ ID NO: 4309 - protein, 11 aa, Homo sapiens
AYDDTNGAFDI

SEQ ID NO: 4310 - protein, 5 aa, Homo sapiens
AYGIH

SEQ ID NO: 4311 - protein, 5 aa, Homo sapiens
AYGIT

SEQ ID NO: 4312 - protein, 17 aa, Homo sapiens
AYGLSSSWTDSINWFDP

SEQ ID NO: 4313 - protein, 11 aa, Homo sapiens
AYGRNYGRFDP

SEQ ID NO: 4314 - protein, 10 aa, Homo sapiens
AYGSGSYTSD

SEQ ID NO: 4315 - protein, 11 aa, Homo sapiens
AYSANYGRFDP

SEQ ID NO: 4316 - protein, 5 aa, Homo sapiens
AYSIA

SEQ ID NO: 4317 - protein, 10 aa, Homo sapiens
AYSSSSGDDV

SEQ ID NO: 4318 - protein, 5 aa, Homo sapiens
AYTIA

SEQ ID NO: 4319 - protein, 5 aa, Homo sapiens
AYWIA

SEQ ID NO: 4320 - protein, 5 aa, Homo sapiens
AYWMH

SEQ ID NO: 4321 - protein, 5 aa, Homo sapiens
AYWMN

SEQ ID NO: 4322 - protein, 5 aa, Homo sapiens
AYWMS

SEQ ID NO: 4323 - protein, 14 aa, Homo sapiens
AYYDYVWWGGWFDP

SEQ ID NO: 4324 - protein, 5 aa, Homo sapiens
AYYMH

SEQ ID NO: 4325 - protein, 14 aa, Homo sapiens
CAGGGDPKAGTFDM

SEQ ID NO: 4326 - protein, 17 aa, Homo sapiens
CFIPMLNIARFAQKFQG

SEQ ID NO: 4327 - protein, 17 aa, Homo sapiens
CINPDSGGTKFAQKFEG

SEQ ID NO: 4328 - protein, 19 aa, Homo sapiens
CIRNKANRATTEYAASVKG

SEQ ID NO: 4329 - protein, 19 aa, Homo sapiens
CIRRNANDGTTEYAASVKG

SEQ ID NO: 4330 - protein, 17 aa, Homo sapiens
CISSSGLSIYYADSVKG

SEQ ID NO: 4331 - protein, 16 aa, Homo sapiens
CIYPSGTINYNPSLKT

SEQ ID NO: 4332 - protein, 17 aa, Homo sapiens
CLSRNADNIYYADSVRG

SEQ ID NO: 4333 - protein, 15 aa, Homo sapiens
CRGWGNSGSHQVFDS

SEQ ID NO: 4334 - protein, 11 aa, Homo sapiens
CRHYYSSYMVV

SEQ ID NO: 4335 - protein, 10 aa, Homo sapiens
CSFAGGFTRV

SEQ ID NO: 4336 - protein, 10 aa, Homo sapiens
CSFAGSNNLL

SEQ ID NO: 4337 - protein, 10 aa, Homo sapiens
CSFAGSYTWV

SEQ ID NO: 4338 - protein, 14 aa, Homo sapiens
CSGGLTNYHFYMDV

SEQ ID NO: 4339 - protein, 14 aa, Homo sapiens
CSGGLTNYYFYMDV

SEQ ID NO: 4340 - protein, 14 aa, Homo sapiens
CSGGLTNYYYYMDV

SEQ ID NO: 4341 - protein, 12 aa, Homo sapiens
CSGTYEPRPFDV

SEQ ID NO: 4342 - protein, 10 aa, Homo sapiens
CSNARSGTWV

SEQ ID NO: 4343 - protein, 12 aa, Homo sapiens
CSNTGDDWYNRY

SEQ ID NO: 4344 - protein, 10 aa, Homo sapiens
CSYADGSTAV

SEQ ID NO: 4345 - protein, 8 aa, Homo sapiens
CSYAGHVV

SEQ ID NO: 4346 - protein, 10 aa, Homo sapiens
CSYAGKDTLL

SEQ ID NO: 4347 - protein, 9 aa, Homo sapiens
CSYAGNPYV

SEQ ID NO: 4348 - protein, 10 aa, Homo sapiens
CSYAGPGTSL

SEQ ID NO: 4349 - protein, 10 aa, Homo sapiens
CSYAGRDSFV

SEQ ID NO: 4350 - protein, 10 aa, Homo sapiens
CSYAGRDTFV

SEQ ID NO: 4351 - protein, 10 aa, Homo sapiens
CSYAGRRSWV

SEQ ID NO: 4352 - protein, 10 aa, Homo sapiens
CSYAGRSIWV

SEQ ID NO: 4353 - protein, 11 aa, Homo sapiens
CSYAGRSPLYV

SEQ ID NO: 4354 - protein, 10 aa, Homo sapiens
CSYAGRYNWV

SEQ ID NO: 4355 - protein, 10 aa, Homo sapiens
CSYAGRYSFV

SEQ ID NO: 4356 - protein, 10 aa, Homo sapiens
CSYAGRYSYV

SEQ ID NO: 4357 - protein, 10 aa, Homo sapiens
CSYAGRYTLV

SEQ ID NO: 4358 - protein, 10 aa, Homo sapiens
CSYAGRYTWV

SEQ ID NO: 4359 - protein, 10 aa, Homo sapiens
CSYAGSDTWV

SEQ ID NO: 4360 - protein, 12 aa, Homo sapiens
CSYAGSDTYNYV

SEQ ID NO: 4361 - protein, 10 aa, Homo sapiens
CSYAGSNSWV

SEQ ID NO: 4362 - protein, 10 aa, Homo sapiens
CSYAGSNTVL

SEQ ID NO: 4363 - protein, 10 aa, Homo sapiens
CSYAGSPHYV

SEQ ID NO: 4364 - protein, 9 aa, Homo sapiens
CSYAGSSAR

SEQ ID NO: 4365 - protein, 10 aa, Homo sapiens
CSYAGSSSGV

SEQ ID NO: 4366 - protein, 10 aa, Homo sapiens
CSYAGSSSWV

SEQ ID NO: 4367 - protein, 11 aa, Homo sapiens
CSYAGSSTDVV

SEQ ID NO: 4368 - protein, 14 aa, Homo sapiens
CSYAGSSTFAHNYV

SEQ ID NO: 4369 - protein, 10 aa, Homo sapiens
CSYAGSSTLV

SEQ ID NO: 4370 - protein, 10 aa, Homo sapiens
CSYAGSSTYV

SEQ ID NO: 4371 - protein, 8 aa, Homo sapiens
CSYAGSWV

SEQ ID NO: 4372 - protein, 10 aa, Homo sapiens
CSYAGSYSFV

SEQ ID NO: 4373 - protein, 10 aa, Homo sapiens
CSYAGSYSWV

SEQ ID NO: 4374 - protein, 11 aa, Homo sapiens
CSYAGSYSYWV

SEQ ID NO: 4375 - protein, 11 aa, Homo sapiens
CSYAGSYTFGV

SEQ ID NO: 4376 - protein, 10 aa, Homo sapiens
CSYAGSYTVV

SEQ ID NO: 4377 - protein, 10 aa, Homo sapiens
CSYAGSYTYI

SEQ ID NO: 4378 - protein, 10 aa, Homo sapiens
CSYAHSRTYV

SEQ ID NO: 4379 - protein, 12 aa, Homo sapiens
CSYANSNTFERV

SEQ ID NO: 4380 - protein, 10 aa, Homo sapiens
CSYARSSTWV

SEQ ID NO: 4381 - protein, 11 aa, Homo sapiens
CSYGDTTTPYV

SEQ ID NO: 4382 - protein, 10 aa, Homo sapiens
CSYGGSYNFA

SEQ ID NO: 4383 - protein, 10 aa, Homo sapiens
CSYTRASTFL

SEQ ID NO: 4384 - protein, 10 aa, Homo sapiens
CSYTRSSTFL

SEQ ID NO: 4385 - protein, 10 aa, Homo sapiens
CSYTTSNTWV

SEQ ID NO: 4386 - protein, 10 aa, Homo sapiens
CSYVAISTLV

SEQ ID NO: 4387 - protein, 10 aa, Homo sapiens
CSYVDSDTYV

SEQ ID NO: 4388 - protein, 10 aa, Homo sapiens
CSYVHSDTWV

SEQ ID NO: 4389 - protein, 11 aa, Homo sapiens
CSYVRISSIVL

SEQ ID NO: 4390 - protein, 17 aa, Homo sapiens
CVRSDGSSQYSSEFVKG

SEQ ID NO: 4391 - protein, 18 aa, Homo sapiens
CVSSTEPNSSGWCNWFDP

SEQ ID NO: 4392 - protein, 13 aa, Homo sapiens
DAAPGPVFHYMDV

SEQ ID NO: 4393 - protein, 7 aa, Homo sapiens
DAATRAT

SEQ ID NO: 4394 - protein, 19 aa, Homo sapiens
DADSHYYASGSYLRDAFDI

SEQ ID NO: 4395 - protein, 14 aa, Homo sapiens
DADYRVPMTGSFDS

SEQ ID NO: 4396 - protein, 18 aa, Homo sapiens
DAEPAWFGELDYFNAFDI

SEQ ID NO: 4397 - protein, 14 aa, Homo sapiens
DAEWTPPRQGYMDV

SEQ ID NO: 4398 - protein, 14 aa, Homo sapiens
DAEYCGGDCYEEYF

SEQ ID NO: 4399 - protein, 11 aa, Homo sapiens
DAEYINYGGHY

SEQ ID NO: 4400 - protein, 7 aa, Homo sapiens
DAFKRAT

SEQ ID NO: 4401 - protein, 18 aa, Homo sapiens
DAGKMLFGLVIIQYYFDS

SEQ ID NO: 4402 - protein, 7 aa, Homo sapiens
DAHYWHY

SEQ ID NO: 4403 - protein, 15 aa, Homo sapiens
DAIAGRVWLQGAFDS

SEQ ID NO: 4404 - protein, 7 aa, Homo sapiens
DAINRAT

SEQ ID NO: 4405 - protein, 15 aa, Homo sapiens
DAISGQIWLQGTFDY

SEQ ID NO: 4406 - protein, 7 aa, Homo sapiens
DALNLET

SEQ ID NO: 4407 - protein, 12 aa, Homo sapiens
DAMSGNHSDFDY

SEQ ID NO: 4408 - protein, 7 aa, Homo sapiens
DAPLIDY

SEQ ID NO: 4409 - protein, 12 aa, Homo sapiens
DAPYSSYDPLDI

SEQ ID NO: 4410 - protein, 11 aa, Homo sapiens
DARSWTEYLQH

SEQ ID NO: 4411 - protein, 19 aa, Homo sapiens
DARVVVVPGSRYYFYYMDV

SEQ ID NO: 4412 - protein, 7 aa, Homo sapiens
DASDLET

SEQ ID NO: 4413 - protein, 7 aa, Homo sapiens
DASHRAT

SEQ ID NO: 4414 - protein, 7 aa, Homo sapiens
DASILES

SEQ ID NO: 4415 - protein, 7 aa, Homo sapiens
DASIRAT

SEQ ID NO: 4416 - protein, 7 aa, Homo sapiens
DASKLVT

SEQ ID NO: 4417 - protein, 7 aa, Homo sapiens
DASKRAT

SEQ ID NO: 4418 - protein, 7 aa, Homo sapiens
DASNLEG

SEQ ID NO: 4419 - protein, 7 aa, Homo sapiens
DASNLEI

SEQ ID NO: 4420 - protein, 7 aa, Homo sapiens
DASNLET

SEQ ID NO: 4421 - protein, 7 aa, Homo sapiens
DASNLQT

SEQ ID NO: 4422 - protein, 7 aa, Homo sapiens
DASNRAA

SEQ ID NO: 4423 - protein, 7 aa, Homo sapiens
DASNRAN

SEQ ID NO: 4424 - protein, 7 aa, Homo sapiens
DASNRAS

SEQ ID NO: 4425 - protein, 7 aa, Homo sapiens
DASNRAT

SEQ ID NO: 4426 - protein, 7 aa, Homo sapiens
DASRRAT

SEQ ID NO: 4427 - protein, 7 aa, Homo sapiens
DASRRVT

SEQ ID NO: 4428 - protein, 7 aa, Homo sapiens
DASSLDS

SEQ ID NO: 4429 - protein, 7 aa, Homo sapiens
DASSLET

SEQ ID NO: 4430 - protein, 7 aa, Homo sapiens
DASSLQS

SEQ ID NO: 4431 - protein, 7 aa, Homo sapiens
DASSRAA

SEQ ID NO: 4432 - protein, 7 aa, Homo sapiens
DASSRAT

SEQ ID NO: 4433 - protein, 7 aa, Homo sapiens
DASSWAS

SEQ ID NO: 4434 - protein, 7 aa, Homo sapiens
DASTLQS

SEQ ID NO: 4435 - protein, 7 aa, Homo sapiens
DASTRAA

SEQ ID NO: 4436 - protein, 7 aa, Homo sapiens
DASTRAT

SEQ ID NO: 4437 - protein, 7 aa, Homo sapiens
DASTRVT

SEQ ID NO: 4438 - protein, 14 aa, Homo sapiens
DASVRIPTTGSSDH

SEQ ID NO: 4439 - protein, 13 aa, Homo sapiens
DATGITEKNAFDV

SEQ ID NO: 4440 - protein, 13 aa, Homo sapiens
DATGITKKNAFDI

SEQ ID NO: 4441 - protein, 7 aa, Homo sapiens
DATNLEP

SEQ ID NO: 4442 - protein, 7 aa, Homo sapiens
DATTRAT

SEQ ID NO: 4443 - protein, 100 aa, Homo sapiens
DAVMTQSPLSLAVTPGQPASISCRSGQSLLYSDGDTYLNWFQQRPGQSPRRLIYKVSKRDSGVPDRFSGSGSGTSFTLKISRVEAEDAGLYYCMQGTLWP

SEQ ID NO: 4444 - protein, 112 aa, Homo sapiens
DAVMTQSPLSLAVTPGQPASISCRSGQSLLYSDGDTYLNWFQQRPGQSPRRLIYKVSKRDSGVPDRFSGSGSGTSFTLKISRVEAEDAGLYYCMQGTLWPYTFGQGTKLEIK

SEQ ID NO: 4445 - protein, 100 aa, Homo sapiens
DAVMTQSPLSLPVTLGQPASISCRSSQSLVYNDGNTYLNWFQQRPGQSPRRLIYKVSNRDSGVPDRFSGSGSGTDFTLEISSVEAEDVGVYYCMQGTHWP

SEQ ID NO: 4446 - protein, 112 aa, Homo sapiens
DAVMTQSPLSLPVTLGQPASISCRSSQSLVYNDGNTYLNWFQQRPGQSPRRLIYKVSNRDSGVPDRFSGSGSGTDFTLEISSVEAEDVGVYYCMQGTHWPFTFGPGTKVDIK

SEQ ID NO: 4447 - protein, 100 aa, Homo sapiens
DAVMTQSPLSQSVTLGQPASISCRSSHGLVYKDGNTYLHWFHQRPGQSPRRLIYEVSKLDSGVPDRFSGSGSDTEFTLKISRVEAEDVGIYYCMQGTHWP

SEQ ID NO: 4448 - protein, 112 aa, Homo sapiens
DAVMTQSPLSQSVTLGQPASISCRSSHGLVYKDGNTYLHWFHQRPGQSPRRLIYEVSKLDSGVPDRFSGSGSDTEFTLKISRVEAEDVGIYYCMQGTHWPYTFGQGTNLEIK

SEQ ID NO: 4449 - protein, 100 aa, Homo sapiens
DAVMTQSPLTLPVTLGQPASISCRSSQSLVYSDGSTHLFWFHQRPGQSPRRLIHGASNRDSGVPDRFSGSGSDTDFTLKISRVEAEDVGVYYCMQGRHWP

SEQ ID NO: 4450 - protein, 112 aa, Homo sapiens
DAVMTQSPLTLPVTLGQPASISCRSSQSLVYSDGSTHLFWFHQRPGQSPRRLIHGASNRDSGVPDRFSGSGSDTDFTLKISRVEAEDVGVYYCMQGRHWPLTFGQGTRLEIK

SEQ ID NO: 4451 - protein, 5 aa, Homo sapiens
DAWLN

SEQ ID NO: 4452 - protein, 5 aa, Homo sapiens
DAWMN

SEQ ID NO: 4453 - protein, 5 aa, Homo sapiens
DAWMT

SEQ ID NO: 4454 - protein, 7 aa, Homo sapiens
DAYTLQG

SEQ ID NO: 4455 - protein, 17 aa, Homo sapiens
DAYYDNSDVWRGDVLDI

SEQ ID NO: 4456 - protein, 13 aa, Homo sapiens
DAYYYGSGSAFDY

SEQ ID NO: 4457 - protein, 5 aa, Homo sapiens
DCYIH

SEQ ID NO: 4458 - protein, 11 aa, Homo sapiens
DDGDSNGSFDY

SEQ ID NO: 4459 - protein, 18 aa, Homo sapiens
DDGWEPQRRGEGPYFFDY

SEQ ID NO: 4460 - protein, 12 aa, Homo sapiens
DDIQLLPGPFDY

SEQ ID NO: 4461 - protein, 15 aa, Homo sapiens
DDIVVVPAATWSFDY

SEQ ID NO: 4462 - protein, 10 aa, Homo sapiens
DDPGPRAFDF

SEQ ID NO: 4463 - protein, 15 aa, Homo sapiens
DDRDGYNYYYYGMDV

SEQ ID NO: 4464 - protein, 7 aa, Homo sapiens
DDRDRPS

SEQ ID NO: 4465 - protein, 7 aa, Homo sapiens
DDRNRPS

SEQ ID NO: 4466 - protein, 17 aa, Homo sapiens
DDRRYFDWLLPNWYFDL

SEQ ID NO: 4467 - protein, 7 aa, Homo sapiens
DDSDRPS

SEQ ID NO: 4468 - protein, 9 aa, Homo sapiens
DDSSGGFQS

SEQ ID NO: 4469 - protein, 12 aa, Homo sapiens
DDSSGNVDAFDI

SEQ ID NO: 4470 - protein, 7 aa, Homo sapiens
DDSVRPS

SEQ ID NO: 4471 - protein, 16 aa, Homo sapiens
DDSWSRSFYYYYYMDV

SEQ ID NO: 4472 - protein, 7 aa, Homo sapiens
DDTDRPS

SEQ ID NO: 4473 - protein, 13 aa, Homo sapiens
DDTGIMRTNAFDY

SEQ ID NO: 4474 - protein, 13 aa, Homo sapiens
DDTGIRRKNAFDI

SEQ ID NO: 4475 - protein, 13 aa, Homo sapiens
DDTGISGLNAFDI

SEQ ID NO: 4476 - protein, 5 aa, Homo sapiens
DDWIG

SEQ ID NO: 4477 - protein, 16 aa, Homo sapiens
DDYCPRGVCSNLYFDH

SEQ ID NO: 4478 - protein, 14 aa, Homo sapiens
DDYERSGYYWALRH

SEQ ID NO: 4479 - protein, 8 aa, Homo sapiens
DDYQFFSS

SEQ ID NO: 4480 - protein, 11 aa, Homo sapiens
DDYYESSGYIP

SEQ ID NO: 4481 - protein, 13 aa, Homo sapiens
DEGAAAGNGEFDY

SEQ ID NO: 4482 - protein, 12 aa, Homo sapiens
DEGAYSLPKLGD

SEQ ID NO: 4483 - protein, 18 aa, Homo sapiens
DEGDSGSYNTLSSAFEAV

SEQ ID NO: 4484 - protein, 14 aa, Homo sapiens
DEQQLDYYYYYMDV

SEQ ID NO: 4485 - protein, 18 aa, Homo sapiens
DEREDYYDSGAYYTILGY

SEQ ID NO: 4486 - protein, 13 aa, Homo sapiens
DERWLQYNAAFDI

SEQ ID NO: 4487 - protein, 14 aa, Homo sapiens
DESSSSLFGGGLGY

SEQ ID NO: 4488 - protein, 13 aa, Homo sapiens
DESTVLVGPSFDY

SEQ ID NO: 4489 - protein, 12 aa, Homo sapiens
DEWGRWLHLLDY

SEQ ID NO: 4490 - protein, 4 aa, Homo sapiens
DEYY

SEQ ID NO: 4491 - protein, 15 aa, Homo sapiens
DFAGRGGSDLGYFDY

SEQ ID NO: 4492 - protein, 5 aa, Homo sapiens
DFAMH

SEQ ID NO: 4493 - protein, 5 aa, Homo sapiens
DFAMS

SEQ ID NO: 4494 - protein, 5 aa, Homo sapiens
DFAMT

SEQ ID NO: 4495 - protein, 14 aa, Homo sapiens
DFARAAYNFGNFDY

SEQ ID NO: 4496 - protein, 19 aa, Homo sapiens
DFCNGDRPATCSRDSWGDY

SEQ ID NO: 4497 - protein, 16 aa, Homo sapiens
DFDFIPLAGTRGAIDV

SEQ ID NO: 4498 - protein, 7 aa, Homo sapiens
DFDRGDD

SEQ ID NO: 4499 - protein, 8 aa, Homo sapiens
DFDRGFDY

SEQ ID NO: 4500 - protein, 15 aa, Homo sapiens
DFDYSDYGYSDWFDS

SEQ ID NO: 4501 - protein, 20 aa, Homo sapiens
DFEEYLVLSGTRGLFGAFDI

SEQ ID NO: 4502 - protein, 10 aa, Homo sapiens
DFGAFGGVRD

SEQ ID NO: 4503 - protein, 5 aa, Homo sapiens
DFGIS

SEQ ID NO: 4504 - protein, 14 aa, Homo sapiens
DFGLRVVDQGAFDI

SEQ ID NO: 4505 - protein, 15 aa, Homo sapiens
DFKGRGGSDLGYFDY

SEQ ID NO: 4506 - protein, 21 aa, Homo sapiens
DFLEGDYYDSSGYYLPLPFDY

SEQ ID NO: 4507 - protein, 21 aa, Homo sapiens
DFQIHRLRYFDWQKYNYGLDV

SEQ ID NO: 4508 - protein, 17 aa, Homo sapiens
DFSPHCDGDCYTDFFAS

SEQ ID NO: 4509 - protein, 14 aa, Homo sapiens
DFSTYIPMTGTFDS

SEQ ID NO: 4510 - protein, 13 aa, Homo sapiens
DFTRRPIETAFDV

SEQ ID NO: 4511 - protein, 18 aa, Homo sapiens
DFTYYYNSGSDHLGYFDY

SEQ ID NO: 4512 - protein, 100 aa, Homo sapiens
DFVLTQSPLSLPVTLGQPASISCRSSQSLLHGNDGKTYLSWFQQRPGQSPRRLIYEVSKRDSGVPERFSGSGSDTDFTLKIDRVEAEDVGVYYCMQIKHW

SEQ ID NO: 4513 - protein, 114 aa, Homo sapiens
DFVLTQSPLSLPVTLGQPASISCRSSQSLLHGNDGKTYLSWFQQRPGQSPRRLIYEVSKRDSGVPERFSGSGSDTDFTLKIDRVEAEDVGVYYCMQIKHWRSFSFGPGTKVEIK

SEQ ID NO: 4514 - protein, 99 aa, Homo sapiens
DFVLTQSPLSLPVTLGQPASISCRSSQSLVHRDGNTYLNWFHQRPGQSPRRLIYKVSNRDSGVPDRFSASGSGTDFTLKISRVEAEDVGVYYCMQGTHW

SEQ ID NO: 4515 - protein, 112 aa, Homo sapiens
DFVLTQSPLSLPVTLGQPASISCRSSQSLVHRDGNTYLNWFHQRPGQSPRRLIYKVSNRDSGVPDRFSASGSGTDFTLKISRVEAEDVGVYYCMQGTHWHVYSFGQGTKLEI

SEQ ID NO: 4516 - protein, 101 aa, Homo sapiens
DFVMTQSPDALAVSLGERATINCKSSQSVLYDSNNKNYLAWYQQKPGQPPKLLIYWASTRESGVPDRFSGSGSGTDFTLTISNLQAEDVAVYYCQQYYDTP

SEQ ID NO: 4517 - protein, 112 aa, Homo sapiens
DFVMTQSPDALAVSLGERATINCKSSQSVLYDSNNKNYLAWYQQKPGQPPKLLIYWASTRESGVPDRFSGSGSGTDFTLTISNLQAEDVAVYYCQQYYDTPSFGPGTKVDIK

SEQ ID NO: 4518 - protein, 101 aa, Homo sapiens
DFVMTQSPDSLAASLGERVTINCRSSQSVFYNSNRRNYLAWYQQRPGQPPKLLISWASTRDSGVPDRFIGRGSGTDFTLTISSLQPEDVAVYYCHQYYDAP

SEQ ID NO: 4519 - protein, 113 aa, Homo sapiens
DFVMTQSPDSLAASLGERVTINCRSSQSVFYNSNRRNYLAWYQQRPGQPPKLLISWASTRDSGVPDRFIGRGSGTDFTLTISSLQPEDVAVYYCHQYYDAPHTFGQGTKLEIK

SEQ ID NO: 4520 - protein, 101 aa, Homo sapiens
DFVMTQSPDSLALSLGERATINCKSSQNVLWDSNNKNYLAWYQQKPGQPPKLLIYWASTRESGVPDRFTGSGSGTDFTLTISSLQAEDVAVYFCHQYYSVP

SEQ ID NO: 4521 - protein, 113 aa, Homo sapiens
DFVMTQSPDSLALSLGERATINCKSSQNVLWDSNNKNYLAWYQQKPGQPPKLLIYWASTRESGVPDRFTGSGSGTDFTLTISSLQAEDVAVYFCHQYYSVPYTFGQGTKLEIK

SEQ ID NO: 4522 - protein, 101 aa, Homo sapiens
DFVMTQSPDSLAVPLGERATINCKSSQSVLYDSNNKNYLAWYQQKPGQPPNLLVYWASTRESGVPDRFSGSGSGTDFTLTISSLQAEDVAIYYCQQYYSIP

SEQ ID NO: 4523 - protein, 112 aa, Homo sapiens
DFVMTQSPDSLAVPLGERATINCKSSQSVLYDSNNKNYLAWYQQKPGQPPNLLVYWASTRESGVPDRFSGSGSGTDFTLTISSLQAEDVAIYYCQQYYSIPLTFGGGTKVEI

SEQ ID NO: 4524 - protein, 101 aa, Homo sapiens
DFVMTQSPDSLAVSLGERATINCKSSQNLLWDSNNKDYLAWYQQKPGQPPRLLIHWATTRESGVPDRFSGSGSGTDFTLTISNLQAEDVAIYYCQQYYNIP

SEQ ID NO: 4525 - protein, 112 aa, Homo sapiens
DFVMTQSPDSLAVSLGERATINCKSSQNLLWDSNNKDYLAWYQQKPGQPPRLLIHWATTRESGVPDRFSGSGSGTDFTLTISNLQAEDVAIYYCQQYYNIPLTFGGGTKVEI

SEQ ID NO: 4526 - protein, 102 aa, Homo sapiens
DFVMTQSPDSLAVSLGERATINCKSSQSLFWSDNKKNYLAWYQQKPGQPPKLLIYWASTRESGVPDRFSGSGSETDFTLTISSLQAEDVAVYYCQQYYSPPP

SEQ ID NO: 4527 - protein, 114 aa, Homo sapiens
DFVMTQSPDSLAVSLGERATINCKSSQSLFWSDNKKNYLAWYQQKPGQPPKLLIYWASTRESGVPDRFSGSGSETDFTLTISSLQAEDVAVYYCQQYYSPPPFTFGPGTKVDIK

SEQ ID NO: 4528 - protein, 101 aa, Homo sapiens
DFVMTQSPDSLAVSLGERATINCKSSQSVFWESNKKNYLAWYQQKAGQPPKVLIYWASSRESGVPDRFSGSGSGTDFTLTISSLQAEDVAVYYCQQYYDIP

SEQ ID NO: 4529 - protein, 113 aa, Homo sapiens
DFVMTQSPDSLAVSLGERATINCKSSQSVFWESNKKNYLAWYQQKAGQPPKVLIYWASSRESGVPDRFSGSGSGTDFTLTISSLQAEDVAVYYCQQYYDIPFTFGPGTRVDIK

SEQ ID NO: 4530 - protein, 101 aa, Homo sapiens
DFVMTQSPDSLAVSLGERATINCKSSQSVLYDSNNNNYLAWYQQKPGQPPKLLIYWASTRESGVPDRFSGSGSGTDFTLTISSLQAEDVAVYYCQQYYSAP

SEQ ID NO: 4531 - protein, 113 aa, Homo sapiens
DFVMTQSPDSLAVSLGERATINCKSSQSVLYDSNNNNYLAWYQQKPGQPPKLLIYWASTRESGVPDRFSGSGSGTDFTLTISSLQAEDVAVYYCQQYYSAPLTFGGGTKVEIK

SEQ ID NO: 4532 - protein, 101 aa, Homo sapiens
DFVMTQSPDSLAVSLGERATINCKSSQSVLYKSNNKNYLAWYQQKPGQPPKLLISWASTRESGVPERFSGRGSETDFTLIISSLQAEDVAVYYCQQYYETP

SEQ ID NO: 4533 - protein, 113 aa, Homo sapiens
DFVMTQSPDSLAVSLGERATINCKSSQSVLYKSNNKNYLAWYQQKPGQPPKLLISWASTRESGVPERFSGRGSETDFTLIISSLQAEDVAVYYCQQYYETPVTFGPGTKVDIK

SEQ ID NO: 4534 - protein, 101 aa, Homo sapiens
DFVMTQSPDSLAVSLGERATINCKSSQSVLYNSNNKNYLAWYQQKPGQPPKLLIYWASTRESGVPDRFSGSGSGTDFTLTISSLQAEDVAVYYCQQYYDTP

SEQ ID NO: 4535 - protein, 113 aa, Homo sapiens
DFVMTQSPDSLAVSLGERATINCKSSQSVLYNSNNKNYLAWYQQKPGQPPKLLIYWASTRESGVPDRFSGSGSGTDFTLTISSLQAEDVAVYYCQQYYDTPSTFGQGTRLEIK

SEQ ID NO: 4536 - protein, 98 aa, Homo sapiens
DFVMTQSPDSLAVSLGERATINCKSSQSVLYNSNNKNYLGWYQQKPGQPPKLLISWASTRESGVPDRFSGSGSGTDFSLTISSLQAEDVAVYYCQQHY

SEQ ID NO: 4537 - protein, 113 aa, Homo sapiens
DFVMTQSPDSLAVSLGERATINCKSSQSVLYNSNNKNYLGWYQQKPGQPPKLLISWASTRESGVPDRFSGSGSGTDFSLTISSLQAEDVAVYYCQQHYDIPYTFGQGTRLEIK

SEQ ID NO: 4538 - protein, 101 aa, Homo sapiens
DFVMTQSPDSLAVSLGERATINCKSSQSVLYSSNNKNYLAWYQQKPGQPPKLLISWASTRESGVPDRFSGSGSGTDFTLIISSLQAEDVAVYYCQQYYDTP

SEQ ID NO: 4539 - protein, 113 aa, Homo sapiens
DFVMTQSPDSLAVSLGERATINCKSSQSVLYSSNNKNYLAWYQQKPGQPPKLLISWASTRESGVPDRFSGSGSGTDFTLIISSLQAEDVAVYYCQQYYDTPVTFGPGTKVDIK

SEQ ID NO: 4540 - protein, 101 aa, Homo sapiens
DFVMTQSPDSLAVSLGERATINCKSTQSVLYDSNNRNYLAWYQQKPGQPPKLLIYWASTRESGVPDRFSGSGSGTDFTLTISGLQAEDVAVYYCQQYYDIP

SEQ ID NO: 4541 - protein, 113 aa, Homo sapiens
DFVMTQSPDSLAVSLGERATINCKSTQSVLYDSNNRNYLAWYQQKPGQPPKLLIYWASTRESGVPDRFSGSGSGTDFTLTISGLQAEDVAVYYCQQYYDIPYTFGQGTKLEIK

SEQ ID NO: 4542 - protein, 101 aa, Homo sapiens
DFVMTQSPDSLAVSLGERATINCRSSQSVFYSSNEKNYLAWYQQKPGQPPKLLIYWASTRESGVPDRFSGSGSGTDFTLTISSVLPEDVGVYYCQQYYDTP

SEQ ID NO: 4543 - protein, 113 aa, Homo sapiens
DFVMTQSPDSLAVSLGERATINCRSSQSVFYSSNEKNYLAWYQQKPGQPPKLLIYWASTRESGVPDRFSGSGSGTDFTLTISSVLPEDVGVYYCQQYYDTPRTFGQGTKVEIK

SEQ ID NO: 4544 - protein, 102 aa, Homo sapiens
DFVMTQSPDSLAVSLGERVTINCKSSQSVLYDSNNKNYLAWYQQKPGQPPKLLIHWASTRESGVPDRFSGTGSGTDFTLAISSLQAEDVAVYYCQQYYSNPP

SEQ ID NO: 4545 - protein, 113 aa, Homo sapiens
DFVMTQSPDSLAVSLGERVTINCKSSQSVLYDSNNKNYLAWYQQKPGQPPKLLIHWASTRESGVPDRFSGTGSGTDFTLAISSLQAEDVAVYYCQQYYSNPPTFGPGTRVDIK

SEQ ID NO: 4546 - protein, 101 aa, Homo sapiens
DFVMTQSPDSLSVSLGERATINCKSSQNLLWDSNNKNYLAWYQQKPGQPPKLLIHWASTRESGVPDRFSGSGSGTDFTLTISSLQAEDVAVYYCQQYYSIP

SEQ ID NO: 4547 - protein, 113 aa, Homo sapiens
DFVMTQSPDSLSVSLGERATINCKSSQNLLWDSNNKNYLAWYQQKPGQPPKLLIHWASTRESGVPDRFSGSGSGTDFTLTISSLQAEDVAVYYCQQYYSIPLTFGGGTKVEIK

SEQ ID NO: 4548 - protein, 101 aa, Homo sapiens
DFVMTQSPDSLTVPLGERATINCRSSQSVFFDSNGKNYLAWYQQKPGRPPKLLINWASTRESGVPDRFSGSGSGTDFTLTINSLQAEDVAVYYCQQNYEIP

SEQ ID NO: 4549 - protein, 113 aa, Homo sapiens
DFVMTQSPDSLTVPLGERATINCRSSQSVFFDSNGKNYLAWYQQKPGRPPKLLINWASTRESGVPDRFSGSGSGTDFTLTINSLQAEDVAVYYCQQNYEIPLTFGGGTKVEVK

SEQ ID NO: 4550 - protein, 98 aa, Homo sapiens
DFVMTQSPDSLTVSLGARATINCKSSQSVLYTSNKKNYLAWYQQKSGQPPKVIIYWASVRESGVPDRFSGSGSGTDFSLTINNLQADDVAVYYCQQYY

SEQ ID NO: 4551 - protein, 112 aa, Homo sapiens
DFVMTQSPDSLTVSLGARATINCKSSQSVLYTSNKKNYLAWYQQKSGQPPKVIIYWASVRESGVPDRFSGSGSGTDFSLTINNLQADDVAVYYCQQYYDKPTFGQGTKVEIK

SEQ ID NO: 4552 - protein, 100 aa, Homo sapiens
DFVMTQSPLSLLVTLGQPASISCRSSQSLVHSNDGKTYLSWFQQRPGQSPRRLIYEVSKRDSGVPERFSGSGSDTDFTLKIDRVEAEDVGVYYCMQIKHW

SEQ ID NO: 4553 - protein, 114 aa, Homo sapiens
DFVMTQSPLSLLVTLGQPASISCRSSQSLVHSNDGKTYLSWFQQRPGQSPRRLIYEVSKRDSGVPERFSGSGSDTDFTLKIDRVEAEDVGVYYCMQIKHWRLFTFGPGTKVEIK

SEQ ID NO: 4554 - protein, 99 aa, Homo sapiens
DFVMTQSPLSLPVTLGQPASISCRSSQSLLHSDGNTYLSWFHQRPGQSPRRLIYEVSKRDSGVPDRFSGSGSGTDFTLRITRVEAEDVGVYYCMQIKHW

SEQ ID NO: 4555 - protein, 112 aa, Homo sapiens
DFVMTQSPLSLPVTLGQPASISCRSSQSLLHSDGNTYLSWFHQRPGQSPRRLIYEVSKRDSGVPDRFSGSGSGTDFTLRITRVEAEDVGVYYCMQIKHWRLFTFGPGTKVEI

SEQ ID NO: 4556 - protein, 99 aa, Homo sapiens
DFVMTQSPLSLPVTLGQPASISCRSSQSLVHGDGNTYLSWFHQRPGQSPRRLIYEVSKRDSGVPDRFSGSGSDTDFTLQIDRVEAEDVGVYYCMQIKHW

SEQ ID NO: 4557 - protein, 113 aa, Homo sapiens
DFVMTQSPLSLPVTLGQPASISCRSSQSLVHGDGNTYLSWFHQRPGQSPRRLIYEVSKRDSGVPDRFSGSGSDTDFTLQIDRVEAEDVGVYYCMQIKHWHIFSFGPGTKVEIK

SEQ ID NO: 4558 - protein, 100 aa, Homo sapiens
DFVMTQSPLSLPVTLGQPASISCRSSQSLVYSDGDTYLNWFQQRPGQSPRRLIYKVSNRDSGVPDRFSGSGSGTEFTLKISRVEAEDVGVYYCMQGSHWP

SEQ ID NO: 4559 - protein, 112 aa, Homo sapiens
DFVMTQSPLSLPVTLGQPASISCRSSQSLVYSDGDTYLNWFQQRPGQSPRRLIYKVSNRDSGVPDRFSGSGSGTEFTLKISRVEAEDVGVYYCMQGSHWPFTFGQGTRLEIK

SEQ ID NO: 4560 - protein, 99 aa, Homo sapiens
DFVMTQSPLSLPVTPGQPASISCKSSQSLLHTDGKTYLSWYLQRPGQSPQLLMYEVSNRFSGVPDRFSGSGSGTDFTLKISRVEAEDVGTYYCMQGLHL

SEQ ID NO: 4561 - protein, 111 aa, Homo sapiens
DFVMTQSPLSLPVTPGQPASISCKSSQSLLHTDGKTYLSWYLQRPGQSPQLLMYEVSNRFSGVPDRFSGSGSGTDFTLKISRVEAEDVGTYYCMQGLHLYTFGQGTKLEIK

SEQ ID NO: 4562 - protein, 14 aa, Homo sapiens
DFVRQWAVVAPFDY

SEQ ID NO: 4563 - protein, 98 aa, Homo sapiens
DFVVTQSPDSLAVSLGERATINCKTSQSVYYDSNKMNYLAWYQHKLGQPPKVLIYWASTRASGVPDRFSGSGSGTDFTLTISSLQAEDVALYYCQQYY

SEQ ID NO: 4564 - protein, 113 aa, Homo sapiens
DFVVTQSPDSLAVSLGERATINCKTSQSVYYDSNKMNYLAWYQHKLGQPPKVLIYWASTRASGVPDRFSGSGSGTDFTLTISSLQAEDVALYYCQQYYDLPLTFGGGTKVEIK

SEQ ID NO: 4565 - protein, 102 aa, Homo sapiens
DFVVTQSPDSMAVSLGERATLYCKSSQSVLYSSNKKNYLAWYQQKPGQPPKLLIYWASTRESGVPDRFSGSGSGTDFTLTISSLQPEDVAVYYCQQYYDTPP

SEQ ID NO: 4566 - protein, 113 aa, Homo sapiens
DFVVTQSPDSMAVSLGERATLYCKSSQSVLYSSNKKNYLAWYQQKPGQPPKLLIYWASTRESGVPDRFSGSGSGTDFTLTISSLQPEDVAVYYCQQYYDTPPTFGQGTKVEIK

SEQ ID NO: 4567 - protein, 16 aa, Homo sapiens
DFYDYSNHYPPWTGDY

SEQ ID NO: 4568 - protein, 15 aa, Homo sapiens
DFYHDSSGTTAPIDH

SEQ ID NO: 4569 - protein, 5 aa, Homo sapiens
DFYVH

SEQ ID NO: 4570 - protein, 17 aa, Homo sapiens
DGASCGGDCDMPQYFQD

SEQ ID NO: 4571 - protein, 17 aa, Homo sapiens
DGATVNGAPAPLNWFDP

SEQ ID NO: 4572 - protein, 9 aa, Homo sapiens
DGDAYNFDF

SEQ ID NO: 4573 - protein, 7 aa, Homo sapiens
DGDQFDY

SEQ ID NO: 4574 - protein, 19 aa, Homo sapiens
DGDVARFLEWLSKLDAFDM

SEQ ID NO: 4575 - protein, 13 aa, Homo sapiens
DGDWQLARGYFDY

SEQ ID NO: 4576 - protein, 18 aa, Homo sapiens
DGDYDNNGHWRGGPGEDY

SEQ ID NO: 4577 - protein, 18 aa, Homo sapiens
DGDYDNSGHWRGGPGEDY

SEQ ID NO: 4578 - protein, 16 aa, Homo sapiens
DGDYDSSNVWVFDFDY

SEQ ID NO: 4579 - protein, 14 aa, Homo sapiens
DGDYRIPLAGSFDS

SEQ ID NO: 4580 - protein, 14 aa, Homo sapiens
DGDYRIPLAGSFDY

SEQ ID NO: 4581 - protein, 13 aa, Homo sapiens
DGEGPAAILTGDP

SEQ ID NO: 4582 - protein, 17 aa, Homo sapiens
DGEYCSGTSCYVKYMDV

SEQ ID NO: 4583 - protein, 11 aa, Homo sapiens
DGFTNGWAFDT

SEQ ID NO: 4584 - protein, 20 aa, Homo sapiens
DGGATYMVRRDILRDDAFDV

SEQ ID NO: 4585 - protein, 21 aa, Homo sapiens
DGGCSSTSCYMAHYYSYYMDV

SEQ ID NO: 4586 - protein, 16 aa, Homo sapiens
DGGGYELWFGENWFDP

SEQ ID NO: 4587 - protein, 11 aa, Homo sapiens
DGGIVVASLDY

SEQ ID NO: 4588 - protein, 11 aa, Homo sapiens
DGGIYGDSLDY

SEQ ID NO: 4589 - protein, 10 aa, Homo sapiens
DGGLEGHFDI

SEQ ID NO: 4590 - protein, 20 aa, Homo sapiens
DGGLRFLEWNIGRAYNWLDP

SEQ ID NO: 4591 - protein, 14 aa, Homo sapiens
DGGMTVVAMGTLDI

SEQ ID NO: 4592 - protein, 10 aa, Homo sapiens
DGGSKTPERH

SEQ ID NO: 4593 - protein, 11 aa, Homo sapiens
DGGVSVTPTGY

SEQ ID NO: 4594 - protein, 8 aa, Homo sapiens
DGGYGMDV

SEQ ID NO: 4595 - protein, 14 aa, Homo sapiens
DGGYHFGSGSYNDN

SEQ ID NO: 4596 - protein, 16 aa, Homo sapiens
DGHGSGSYYIHYGMDV

SEQ ID NO: 4597 - protein, 8 aa, Homo sapiens
DGILSYDY

SEQ ID NO: 4598 - protein, 15 aa, Homo sapiens
DGISRQVWLQGTFDS

SEQ ID NO: 4599 - protein, 14 aa, Homo sapiens
DGLDSSSWSGSFDY

SEQ ID NO: 4600 - protein, 17 aa, Homo sapiens
DGNYLDDRNLLNWYLDL

SEQ ID NO: 4601 - protein, 13 aa, Homo sapiens
DGPDYHGSGYFDF

SEQ ID NO: 4602 - protein, 16 aa, Homo sapiens
DGREDHGSGSYSQFDY

SEQ ID NO: 4603 - protein, 18 aa, Homo sapiens
DGRGLYDTSDYRYYYMDV

SEQ ID NO: 4604 - protein, 13 aa, Homo sapiens
DGRQWVQYNWFDP

SEQ ID NO: 4605 - protein, 13 aa, Homo sapiens
DGRRWLQFNWFDS

SEQ ID NO: 4606 - protein, 13 aa, Homo sapiens
DGRRWLQFNYFDY

SEQ ID NO: 4607 - protein, 14 aa, Homo sapiens
DGSGNYNKDWYFDV

SEQ ID NO: 4608 - protein, 14 aa, Homo sapiens
DGSGNYYKDWYFDL

SEQ ID NO: 4609 - protein, 7 aa, Homo sapiens
DGSNLQT

SEQ ID NO: 4610 - protein, 16 aa, Homo sapiens
DGSNQYYYDSSGYYSG

SEQ ID NO: 4611 - protein, 7 aa, Homo sapiens
DGSSLES

SEQ ID NO: 4612 - protein, 15 aa, Homo sapiens
DGTSGYSGGDWYFDL

SEQ ID NO: 4613 - protein, 8 aa, Homo sapiens
DGTSRFDY

SEQ ID NO: 4614 - protein, 14 aa, Homo sapiens
DGVDWRDYYYGLDV

SEQ ID NO: 4615 - protein, 14 aa, Homo sapiens
DGVSNYEEGGWFDP

SEQ ID NO: 4616 - protein, 16 aa, Homo sapiens
DGWKYSTNWYGSWFDP

SEQ ID NO: 4617 - protein, 8 aa, Homo sapiens
DGYGSGVI

SEQ ID NO: 4618 - protein, 11 aa, Homo sapiens
DGYYDRNAFDI

SEQ ID NO: 4619 - protein, 5 aa, Homo sapiens
DHAMH

SEQ ID NO: 4620 - protein, 5 aa, Homo sapiens
DHDMD

SEQ ID NO: 4621 - protein, 13 aa, Homo sapiens
DHDYGDSDWYFDL

SEQ ID NO: 4622 - protein, 15 aa, Homo sapiens
DHENSSGWLSYGMDV

SEQ ID NO: 4623 - protein, 17 aa, Homo sapiens
DHGSPGWLRRTGWWFDP

SEQ ID NO: 4624 - protein, 17 aa, Homo sapiens
DHHISVGRGVTHFPFDY

SEQ ID NO: 4625 - protein, 12 aa, Homo sapiens
DHHSGGSWHFDL

SEQ ID NO: 4626 - protein, 19 aa, Homo sapiens
DHNRANIAVAPWIGYYFDY

SEQ ID NO: 4627 - protein, 7 aa, Homo sapiens
DHPLYDF

SEQ ID NO: 4628 - protein, 12 aa, Homo sapiens
DHSGGGSWHFDL

SEQ ID NO: 4629 - protein, 14 aa, Homo sapiens
DHSGSPPWGGVFEY

SEQ ID NO: 4630 - protein, 5 aa, Homo sapiens
DHSMH

SEQ ID NO: 4631 - protein, 5 aa, Homo sapiens
DHWMT

SEQ ID NO: 4632 - protein, 5 aa, Homo sapiens
DHYID

SEQ ID NO: 4633 - protein, 5 aa, Homo sapiens
DHYIH

SEQ ID NO: 4634 - protein, 5 aa, Homo sapiens
DHYMD

SEQ ID NO: 4635 - protein, 5 aa, Homo sapiens
DHYMH

SEQ ID NO: 4636 - protein, 15 aa, Homo sapiens
DIAAAGTGFYYGLDV

SEQ ID NO: 4637 - protein, 101 aa, Homo sapiens
DIAMTQSPDFLAVSLGERATINCKSSRTLLYNPNNKMFLTWYQKKPGLPPKVLIYWASIRAPGVPERFSASGSGTDFSLTISSLQAEDAAVYYCQQYYGFP

SEQ ID NO: 4638 - protein, 113 aa, Homo sapiens
DIAMTQSPDFLAVSLGERATINCKSSRTLLYNPNNKMFLTWYQKKPGLPPKVLIYWASIRAPGVPERFSASGSGTDFSLTISSLQAEDAAVYYCQQYYGFPFTFGPGTTVHIK

SEQ ID NO: 4639 - protein, 100 aa, Homo sapiens
DIAMTQTPLSLSVSPGQPASISCKSSQSLLHSDGKTYLCWYLQKPGQSPQLLIYEVSSRFSGVPDRFSGSGSGTDFTLKISRVEAEDVGVYYCMQGIHLP

SEQ ID NO: 4640 - protein, 112 aa, Homo sapiens
DIAMTQTPLSLSVSPGQPASISCKSSQSLLHSDGKTYLCWYLQKPGQSPQLLIYEVSSRFSGVPDRFSGSGSGTDFTLKISRVEAEDVGVYYCMQGIHLPRTFGQGTKLEIK

SEQ ID NO: 4641 - protein, 100 aa, Homo sapiens
DIAMTQTPLSLSVTPGQPASISCKSSQSLLHSDGKTYLFWYMQKAGQPPQLLIYEVSNRFSGVPDRFSGSGSGTDFTLKISRVEAEDVGVYYCMQSIQLP

SEQ ID NO: 4642 - protein, 112 aa, Homo sapiens
DIAMTQTPLSLSVTPGQPASISCKSSQSLLHSDGKTYLFWYMQKAGQPPQLLIYEVSNRFSGVPDRFSGSGSGTDFTLKISRVEAEDVGVYYCMQSIQLPRTFGPGTKVDIK

SEQ ID NO: 4643 - protein, 17 aa, Homo sapiens
DIGAWFGQSYYYYGMDV

SEQ ID NO: 4644 - protein, 101 aa, Homo sapiens
DIGMTQSPDSLAVSLGERATINCKSSQTVLYNSNNKNYLAWYQQKPGQPPKLLIYWASTRESGVPDRFSGSGSGTDFTLTISSLQAEDVAVYYCQQYYGTP

SEQ ID NO: 4645 - protein, 113 aa, Homo sapiens
DIGMTQSPDSLAVSLGERATINCKSSQTVLYNSNNKNYLAWYQQKPGQPPKLLIYWASTRESGVPDRFSGSGSGTDFTLTISSLQAEDVAVYYCQQYYGTPWTFGQGTKVEIK

SEQ ID NO: 4646 - protein, 12 aa, Homo sapiens
DIGWFGEVGLDI

SEQ ID NO: 4647 - protein, 17 aa, Homo sapiens
DIHGDGSKKYYLDSVKG

SEQ ID NO: 4648 - protein, 95 aa, Homo sapiens
DIHLTQSPSFLSASVGDRVTITCRASQANSNYLAWYQQKPGKAPKLLIYAASTLQSGVPSRFSGSGSGTEFTLTITSLQAEDCATYYCQQTNSFP

SEQ ID NO: 4649 - protein, 107 aa, Homo sapiens
DIHLTQSPSFLSASVGDRVTITCRASQANSNYLAWYQQKPGKAPKLLIYAASTLQSGVPSRFSGSGSGTEFTLTITSLQAEDCATYYCQQTNSFPRTFGQGTNVEIK

SEQ ID NO: 4650 - protein, 95 aa, Homo sapiens
DIHLTQSPSFLSASVGDRVTITCRASQANSNYLAWYQQKPGKAPKLLIYAASTLQSGVPSRFSGSGSGTEFTLTITTLQAEDCATYYCQQTNSFP

SEQ ID NO: 4651 - protein, 107 aa, Homo sapiens
DIHLTQSPSFLSASVGDRVTITCRASQANSNYLAWYQQKPGKAPKLLIYAASTLQSGVPSRFSGSGSGTEFTLTITTLQAEDCATYYCQQTNSFPRTFGQGTNVEIK

SEQ ID NO: 4652 - protein, 95 aa, Homo sapiens
DIHLTQSPSFLSASVGDRVTITCRASQDISRYLAWFQQKPGNPPKLLIYGASTLQSGVPSRFSGSGSGTEFSLTISSLQPEDSATYYCQQLDTYP

SEQ ID NO: 4653 - protein, 107 aa, Homo sapiens
DIHLTQSPSFLSASVGDRVTITCRASQDISRYLAWFQQKPGNPPKLLIYGASTLQSGVPSRFSGSGSGTEFSLTISSLQPEDSATYYCQQLDTYPLTFGGGTKVEIK

SEQ ID NO: 4654 - protein, 95 aa, Homo sapiens
DIHLTQSPSFVSASIGDRVTITCRASQGISHYLAWYQQKPGKAPNLLIYGASTLQSGVPSRFAGSGSGTQFTLTISSLQPEDIATYYCQHLDTYP

SEQ ID NO: 4655 - protein, 107 aa, Homo sapiens
DIHLTQSPSFVSASIGDRVTITCRASQGISHYLAWYQQKPGKAPNLLIYGASTLQSGVPSRFAGSGSGTQFTLTISSLQPEDIATYYCQHLDTYPLTFGGGTKVQIK

SEQ ID NO: 4656 - protein, 96 aa, Homo sapiens
DIHMTQSPSSLSASVGDRVTITCRASQDIRDSLAWYQQKPGKAPKLLLYSASRLQSGVPSRFSGVGSGTDYTLTISSLQPEDFATYYCQQYYSTPP

SEQ ID NO: 4657 - protein, 108 aa, Homo sapiens
DIHMTQSPSSLSASVGDRVTITCRASQDIRDSLAWYQQKPGKAPKLLLYSASRLQSGVPSRFSGVGSGTDYTLTISSLQPEDFATYYCQQYYSTPPVTFGGGTKVEIK

SEQ ID NO: 4658 - protein, 95 aa, Homo sapiens
DIHMTQSPSSLSASVGDRVTITCRASQSVSNYLNWYQQKPGTAPKLLIYAASTLQSGVPSRFSGSGSGTDFTLTISSLQPEDFATYFCQQSYNTP

SEQ ID NO: 4659 - protein, 107 aa, Homo sapiens
DIHMTQSPSSLSASVGDRVTITCRASQSVSNYLNWYQQKPGTAPKLLIYAASTLQSGVPSRFSGSGSGTDFTLTISSLQPEDFATYFCQQSYNTPNTFGQGTKLEIK

SEQ ID NO: 4660 - protein, 16 aa, Homo sapiens
DIIINGRTYYADSVQG

SEQ ID NO: 4661 - protein, 17 aa, Homo sapiens
DIIPLFGIPHYAQKFQG

SEQ ID NO: 4662 - protein, 16 aa, Homo sapiens
DIISGGRTYYADSVKG

SEQ ID NO: 4663 - protein, 16 aa, Homo sapiens
DIITGGRTYYADSVKG

SEQ ID NO: 4664 - protein, 17 aa, Homo sapiens
DIKEDGSATYSVDSVKG

SEQ ID NO: 4665 - protein, 17 aa, Homo sapiens
DIKEDGSKVYYVDSVKG

SEQ ID NO: 4666 - protein, 17 aa, Homo sapiens
DIKKDGSVTYSVESVKG

SEQ ID NO: 4667 - protein, 7 aa, Homo sapiens
DIKMGVG

SEQ ID NO: 4668 - protein, 17 aa, Homo sapiens
DIKQDGSNKYYVDSVKG

SEQ ID NO: 4669 - protein, 17 aa, Homo sapiens
DIKQDGSVKYFVDSVKG

SEQ ID NO: 4670 - protein, 96 aa, Homo sapiens
DILLTQSPGTLSLSPGERATLSCRASQSVSSNNLAWYQQKTGQAPRLLIYGASSRATGIPDRFSGSGSGTDFTLTISRLEPEDFAVYYCQQYGGAS

SEQ ID NO: 4671 - protein, 108 aa, Homo sapiens
DILLTQSPGTLSLSPGERATLSCRASQSVSSNNLAWYQQKTGQAPRLLIYGASSRATGIPDRFSGSGSGTDFTLTISRLEPEDFAVYYCQQYGGASRTFGQGTKVEIK

SEQ ID NO: 4672 - protein, 101 aa, Homo sapiens
DILMTQSPDSLAVSLGERATINCKSSQSLLYSSNTKNYLAWYQQKPGQPPRLLIYWAFTRESGVPDRFSGSGSGTDFTLTISSLQAEDVAVYYCQQYHSPP

SEQ ID NO: 4673 - protein, 113 aa, Homo sapiens
DILMTQSPDSLAVSLGERATINCKSSQSLLYSSNTKNYLAWYQQKPGQPPRLLIYWAFTRESGVPDRFSGSGSGTDFTLTISSLQAEDVAVYYCQQYHSPPLTFGGGTKVEIK

SEQ ID NO: 4674 - protein, 101 aa, Homo sapiens
DILMTQSPDSQAVALGERATIHCRSSQSILHTSDNKNYLSWFQQKPGQPPKLLIYWASTRASGVPDRFSGSGSGTDFTLTISSLQAEDAAVYYCQHYHSFP

SEQ ID NO: 4675 - protein, 113 aa, Homo sapiens
DILMTQSPDSQAVALGERATIHCRSSQSILHTSDNKNYLSWFQQKPGQPPKLLIYWASTRASGVPDRFSGSGSGTDFTLTISSLQAEDAAVYYCQHYHSFPFIFGQGTKVEIK

SEQ ID NO: 4676 - protein, 100 aa, Homo sapiens
DILMTQSPLSLPVSPGEPASISCRSSQSLLHSYGYNYLDWYLQKPGQSPQLLIYLGSIRASGVPDRFSGSGSGTDFTLKITRVEPEDVGIYYCMQALQPP

SEQ ID NO: 4677 - protein, 112 aa, Homo sapiens
DILMTQSPLSLPVSPGEPASISCRSSQSLLHSYGYNYLDWYLQKPGQSPQLLIYLGSIRASGVPDRFSGSGSGTDFTLKITRVEPEDVGIYYCMQALQPPRTFGQGTRVEIK

SEQ ID NO: 4678 - protein, 100 aa, Homo sapiens
DILMTQSPLSLPVTPGEPASISCRSGQSLLQSSGHNYLDWYLQKPGQSPQLLIYLGSNRASGVPDRFSGSGSGTEFTLKISRVEAEDVGVYYCMQALQTP

SEQ ID NO: 4679 - protein, 112 aa, Homo sapiens
DILMTQSPLSLPVTPGEPASISCRSGQSLLQSSGHNYLDWYLQKPGQSPQLLIYLGSNRASGVPDRFSGSGSGTEFTLKISRVEAEDVGVYYCMQALQTPHTFGQGTKLEIK

SEQ ID NO: 4680 - protein, 18 aa, Homo sapiens
DIMPREIRSYYSYYHMDV

SEQ ID NO: 4681 - protein, 17 aa, Homo sapiens
DINEDGSTKYYVDSVEG

SEQ ID NO: 4682 - protein, 16 aa, Homo sapiens
DINHSGSINYNPSLKS

SEQ ID NO: 4683 - protein, 95 aa, Homo sapiens
DIPMTQSPSSLSASVGDRVTIACRASRGIANFLAWYQQRPGKAPKLLLSAASRLDSGVPSRFSGSGSGADYTLTISSLQPEDYATYYCQQYYTTP

SEQ ID NO: 4684 - protein, 107 aa, Homo sapiens
DIPMTQSPSSLSASVGDRVTIACRASRGIANFLAWYQQRPGKAPKLLLSAASRLDSGVPSRFSGSGSGADYTLTISSLQPEDYATYYCQQYYTTPWTFGQGTKVEIK

SEQ ID NO: 4685 - protein, 95 aa, Homo sapiens
DIQLTQAPSFLSASVGDRVTITCRASQGISSDLAWCQQKPGKAPKVLIYSASALQSGVPSRFRGSGSGTEFTLTITSLQPEDFATYYCQQLKSYP

SEQ ID NO: 4686 - protein, 107 aa, Homo sapiens
DIQLTQAPSFLSASVGDRVTITCRASQGISSDLAWCQQKPGKAPKVLIYSASALQSGVPSRFRGSGSGTEFTLTITSLQPEDFATYYCQQLKSYPLTFGGGTKVEIK

SEQ ID NO: 4687 - protein, 95 aa, Homo sapiens
DIQLTQSPAFLSASVGDRVTITCRASQGISSYLAWCQQKPGKAPKLLIYRASVLQSGVPSRFSGSGSGTEFTLTISSLQPEDFATYYCQQLNSYP

SEQ ID NO: 4688 - protein, 107 aa, Homo sapiens
DIQLTQSPAFLSASVGDRVTITCRASQGISSYLAWCQQKPGKAPKLLIYRASVLQSGVPSRFSGSGSGTEFTLTISSLQPEDFATYYCQQLNSYPLTFGGGTTVEIK

SEQ ID NO: 4689 - protein, 95 aa, Homo sapiens
DIQLTQSPPFLSASVGDSVTITCRASQDIDDYLAWYQEKPGKAPNLLIYGASILQSGVPSRFSGSGSGAEFTLTITSLQPEDFATYSCQHLKSYP

SEQ ID NO: 4690 - protein, 107 aa, Homo sapiens
DIQLTQSPPFLSASVGDSVTITCRASQDIDDYLAWYQEKPGKAPNLLIYGASILQSGVPSRFSGSGSGAEFTLTITSLQPEDFATYSCQHLKSYPLSFGQGTRLEIK

SEQ ID NO: 4691 - protein, 95 aa, Homo sapiens
DIQLTQSPSFLSASIGDRVTITCRASQDINSHLAWFHQRPGEAPKLLIYSASTLQSGVPSRFSGSGSGTAFTLTISSLQAEDFANYFCQQLKSYP

SEQ ID NO: 4692 - protein, 107 aa, Homo sapiens
DIQLTQSPSFLSASIGDRVTITCRASQDINSHLAWFHQRPGEAPKLLIYSASTLQSGVPSRFSGSGSGTAFTLTISSLQAEDFANYFCQQLKSYPLTFGGGTKVEIK

SEQ ID NO: 4693 - protein, 95 aa, Homo sapiens
DIQLTQSPSFLSASVGDRVTIACRASQDIITHLAWYQQKPGKVPSLLIYGTSTLQSGVPSRFSGSGSETEFTLTISSLQPEDFATYYCQQFNTYP

SEQ ID NO: 4694 - protein, 106 aa, Homo sapiens
DIQLTQSPSFLSASVGDRVTIACRASQDIITHLAWYQQKPGKVPSLLIYGTSTLQSGVPSRFSGSGSETEFTLTISSLQPEDFATYYCQQFNTYPYSFGQGTKLEI

SEQ ID NO: 4695 - protein, 95 aa, Homo sapiens
DIQLTQSPSFLSASVGDRVTIICRASQDISGYLSWYQQKAGKAPELLIYTASTLQRGVPSRFSGSGSGTEFTLTITSLQPEDFATYHCQQLYSYP

SEQ ID NO: 4696 - protein, 107 aa, Homo sapiens
DIQLTQSPSFLSASVGDRVTIICRASQDISGYLSWYQQKAGKAPELLIYTASTLQRGVPSRFSGSGSGTEFTLTITSLQPEDFATYHCQQLYSYPYTFGGGTKVEIK

SEQ ID NO: 4697 - protein, 95 aa, Homo sapiens
DIQLTQSPSFLSASVGDRVTIICRASQYISGYLSWYQQKAGKAPELLIYTASTLQRGVPSRFSGSGSGTEFTLTITNLQPEDFATYHCQQLYSYP

SEQ ID NO: 4698 - protein, 107 aa, Homo sapiens
DIQLTQSPSFLSASVGDRVTIICRASQYISGYLSWYQQKAGKAPELLIYTASTLQRGVPSRFSGSGSGTEFTLTITNLQPEDFATYHCQQLYSYPDTFGGGTKVEIK

SEQ ID NO: 4699 - protein, 95 aa, Homo sapiens
DIQLTQSPSFLSASVGDRVTITCRASQAISNYLAWYQQKPGKAPKLLIYAASTLQSGVPSRFSGSGSGTEFTLTISSLQPEDFATYYCQQPNSFP

SEQ ID NO: 4700 - protein, 107 aa, Homo sapiens
DIQLTQSPSFLSASVGDRVTITCRASQAISNYLAWYQQKPGKAPKLLIYAASTLQSGVPSRFSGSGSGTEFTLTISSLQPEDFATYYCQQPNSFPRTFGQGTNVEIK

SEQ ID NO: 4701 - protein, 95 aa, Homo sapiens
DIQLTQSPSFLSASVGDRVTITCRASQDINFFLAWFQQKPGSPPKLLIYGASTLQSGVPSRFSGSGSGTQFSLTISSLQPEDSATYYCQQLDTYP

SEQ ID NO: 4702 - protein, 107 aa, Homo sapiens
DIQLTQSPSFLSASVGDRVTITCRASQDINFFLAWFQQKPGSPPKLLIYGASTLQSGVPSRFSGSGSGTQFSLTISSLQPEDSATYYCQQLDTYPLTFGGGTKVEIK

SEQ ID NO: 4703 - protein, 95 aa, Homo sapiens
DIQLTQSPSFLSASVGDRVTITCRASQDISSYLGWYQQKPGKGPKLLIYAASTLQSGVPSRFSGSGSGTEFTLTISSLQPEDFGAYYCQQVDRYP

SEQ ID NO: 4704 - protein, 107 aa, Homo sapiens
DIQLTQSPSFLSASVGDRVTITCRASQDISSYLGWYQQKPGKGPKLLIYAASTLQSGVPSRFSGSGSGTEFTLTISSLQPEDFGAYYCQQVDRYPLTFGGGTKVEIK

SEQ ID NO: 4705 - protein, 95 aa, Homo sapiens
DIQLTQSPSFLSASVGDRVTITCRASQGIRNYLVWYQQKPGKAPNLLIYAASTLQSGVPSRFSGSGSGTEFTLTISSLQPEDVATYYCQQPNSFP

SEQ ID NO: 4706 - protein, 107 aa, Homo sapiens
DIQLTQSPSFLSASVGDRVTITCRASQGIRNYLVWYQQKPGKAPNLLIYAASTLQSGVPSRFSGSGSGTEFTLTISSLQPEDVATYYCQQPNSFPRTFGGGTKVEIK

SEQ ID NO: 4707 - protein, 95 aa, Homo sapiens
DIQLTQSPSFLSASVGDRVTITCRASQGISGYLAWYQQKPGKAPNLLIYAASTLQSGVPSRFSGSGSGTEFTLTITSLQPEDFATYYCQQLNSYP

SEQ ID NO: 4708 - protein, 107 aa, Homo sapiens
DIQLTQSPSFLSASVGDRVTITCRASQGISGYLAWYQQKPGKAPNLLIYAASTLQSGVPSRFSGSGSGTEFTLTITSLQPEDFATYYCQQLNSYPRTFGQGTKVEIK

SEQ ID NO: 4709 - protein, 95 aa, Homo sapiens
DIQLTQSPSFLSASVGDRVTITCRASQGISSFLAWYQQKPGKAPKLLIYAASTLQNGVPSRFSGGGSGTQFTLTISSLQPEDFGTYYCQQLQAYP

SEQ ID NO: 4710 - protein, 107 aa, Homo sapiens
DIQLTQSPSFLSASVGDRVTITCRASQGISSFLAWYQQKPGKAPKLLIYAASTLQNGVPSRFSGGGSGTQFTLTISSLQPEDFGTYYCQQLQAYPITFGQGTRLEIK

SEQ ID NO: 4711 - protein, 95 aa, Homo sapiens
DIQLTQSPSFLSASVGDRVTITCRASQGISSSLAWYQQKPGKAPKLLIYAASTLQNGVPSRFSGSGSGTEFTLTISSLQPEDFATYYCQQLNNYP

SEQ ID NO: 4712 - protein, 107 aa, Homo sapiens
DIQLTQSPSFLSASVGDRVTITCRASQGISSSLAWYQQKPGKAPKLLIYAASTLQNGVPSRFSGSGSGTEFTLTISSLQPEDFATYYCQQLNNYPLTFGGGTKVEIK

SEQ ID NO: 4713 - protein, 95 aa, Homo sapiens
DIQLTQSPSFLSASVGDRVTITCRASQGISSYLAWYQQKPGKAPKLLIYAASILQSGVPSRFIGSGSGTEFTLTISSLQPEDFATYYCLQHIIYP

SEQ ID NO: 4714 - protein, 107 aa, Homo sapiens
DIQLTQSPSFLSASVGDRVTITCRASQGISSYLAWYQQKPGKAPKLLIYAASILQSGVPSRFIGSGSGTEFTLTISSLQPEDFATYYCLQHIIYPWTFGQGTKVEIK

SEQ ID NO: 4715 - protein, 94 aa, Homo sapiens
DIQLTQSPSFLSASVGDRVTITCRASQGISSYLAWYQQKPGKAPKLLIYAASTLQSGVPSRFSGSGSGTEFTLTISSLQPEDFATYYCQQLNSY

SEQ ID NO: 4716 - protein, 95 aa, Homo sapiens
DIQLTQSPSFLSASVGDRVTITCRASQGISSYLAWYQQKPGKAPKLLIYAASTLQSGVPSRFSGSGSGTEFTLTISSLQPEDFATYYCQQLNSYP

SEQ ID NO: 4717 - protein, 108 aa, Homo sapiens
DIQLTQSPSFLSASVGDRVTITCRASQGISSYLAWYQQKPGKAPKLLIYAASTLQSGVPSRFSGSGSGTEFTLTISSLQPEDFATYYCQQLNSYPALTFGGGTKVEIK

SEQ ID NO: 4718 - protein, 107 aa, Homo sapiens
DIQLTQSPSFLSASVGDRVTITCRASQGISSYLAWYQQKPGKAPKLLIYAASTLQSGVPSRFSGSGSGTEFTLTISSLQPEDFATYYCQQLNSYPGTFGPGTKVDIK

SEQ ID NO: 4719 - protein, 107 aa, Homo sapiens
DIQLTQSPSFLSASVGDRVTITCRASQGISSYLAWYQQKPGKAPKLLIYAASTLQSGVPSRFSGSGSGTEFTLTISSLQPEDFATYYCQQLNSYPITFGQGTRLEIK

SEQ ID NO: 4720 - protein, 107 aa, Homo sapiens
DIQLTQSPSFLSASVGDRVTITCRASQGISSYLAWYQQKPGKAPKLLIYAASTLQSGVPSRFSGSGSGTEFTLTISSLQPEDFATYYCQQLNSYPLTFGGGTKVEIK

SEQ ID NO: 4721 - protein, 96 aa, Homo sapiens
DIQLTQSPSFLSASVGDRVTITCRASQGISSYLAWYQQKPGKAPKLLIYAASTLQSGVPSRFSGSGSGTEFTLTISSLQPEDFATYYCQQLNSYPP

SEQ ID NO: 4722 - protein, 108 aa, Homo sapiens
DIQLTQSPSFLSASVGDRVTITCRASQGISSYLAWYQQKPGKAPKLLIYAASTLQSGVPSRFSGSGSGTEFTLTISSLQPEDFATYYCQQLNSYPPLTFGGGTKVEIK

SEQ ID NO: 4723 - protein, 107 aa, Homo sapiens
DIQLTQSPSFLSASVGDRVTITCRASQGISSYLAWYQQKPGKAPKLLIYAASTLQSGVPSRFSGSGSGTEFTLTISSLQPEDFATYYCQQLNSYPPTFGQGTRLEIK

SEQ ID NO: 4724 - protein, 107 aa, Homo sapiens
DIQLTQSPSFLSASVGDRVTITCRASQGISSYLAWYQQKPGKAPKLLIYAASTLQSGVPSRFSGSGSGTEFTLTISSLQPEDFATYYCQQLNSYRFTFGPGTKVDIK

SEQ ID NO: 4725 - protein, 95 aa, Homo sapiens
DIQLTQSPSFLSASVGDRVTITCRASQVISNYLGWYQQKPGKAPKLLIYAAYILQSGVPTRFSGGGSGTQFTLTISSLRPEDSATYYCQQVHSYP

SEQ ID NO: 4726 - protein, 107 aa, Homo sapiens
DIQLTQSPSFLSASVGDRVTITCRASQVISNYLGWYQQKPGKAPKLLIYAAYILQSGVPTRFSGGGSGTQFTLTISSLRPEDSATYYCQQVHSYPLTFGGGTKVEIK

SEQ ID NO: 4727 - protein, 95 aa, Homo sapiens
DIQLTQSPSFLSASVGDRVTITCRATQGISSSLAWYQQKPGKAPKLLIYAASSLQSGVSSRFSGSGSGTEFTLTISSLQPEDFATYYCQQLNSDP

SEQ ID NO: 4728 - protein, 107 aa, Homo sapiens
DIQLTQSPSFLSASVGDRVTITCRATQGISSSLAWYQQKPGKAPKLLIYAASSLQSGVSSRFSGSGSGTEFTLTISSLQPEDFATYYCQQLNSDPLTFGGGTKVEIK

SEQ ID NO: 4729 - protein, 95 aa, Homo sapiens
DIQLTQSPSLLSASVADRVTITCRASQGISSYLAWYQQKLGKAPKLLIYAASTLQSGVPSRFSGSGSGTEFTLTISSLQPEDFATYYCQQGDSYP

SEQ ID NO: 4730 - protein, 107 aa, Homo sapiens
DIQLTQSPSLLSASVADRVTITCRASQGISSYLAWYQQKLGKAPKLLIYAASTLQSGVPSRFSGSGSGTEFTLTISSLQPEDFATYYCQQGDSYPYTFGQGTKLEIK

SEQ ID NO: 4731 - protein, 95 aa, Homo sapiens
DIQLTQSPSLLSASVGDRVTITCRASQDLGKYLAWYQEIPGKVPNLLIYDVSTLQSGVPSRFSGSGSETHFTLTISSLQPEDCATYYCQQLHTYP

SEQ ID NO: 4732 - protein, 107 aa, Homo sapiens
DIQLTQSPSLLSASVGDRVTITCRASQDLGKYLAWYQEIPGKVPNLLIYDVSTLQSGVPSRFSGSGSETHFTLTISSLQPEDCATYYCQQLHTYPIIFGQGTRLEIK

SEQ ID NO: 4733 - protein, 95 aa, Homo sapiens
DIQLTQSPSLLSASVGDRVTITCRASQDLGNYLAWFQEKPGKVPKLLIYDVSTLQSGVPSRFSGSGSETHFTLTISSLQPEDFATYYCQQLKSYP

SEQ ID NO: 4734 - protein, 107 aa, Homo sapiens
DIQLTQSPSLLSASVGDRVTITCRASQDLGNYLAWFQEKPGKVPKLLIYDVSTLQSGVPSRFSGSGSETHFTLTISSLQPEDFATYYCQQLKSYPIIFGQGTRLEIK

SEQ ID NO: 4735 - protein, 95 aa, Homo sapiens
DIQLTQSPSSLSASVGDRVTITCRASQGISNSLAWYQQKPGKAPKLLLYEASKLESGVPSRFSGSGSGTVYSVTINSLQPEDFATYYCQQYYSTP

SEQ ID NO: 4736 - protein, 108 aa, Homo sapiens
DIQLTQSPSSLSASVGDRVTITCRASQGISNSLAWYQQKPGKAPKLLLYEASKLESGVPSRFSGSGSGTVYSVTINSLQPEDFATYYCQQYYSTPTWTFGQGTKVEVK

SEQ ID NO: 4737 - protein, 95 aa, Homo sapiens
DIQLTQSPSSLSASVGDRVTITCRASQGISNSLAWYQQKPGKAPKLLVYATSNLESGVPSRFSGSGSGSDYSLTITSLQPEDFATYHCHQYYSPP

SEQ ID NO: 4738 - protein, 106 aa, Homo sapiens
DIQLTQSPSSLSASVGDRVTITCRASQGISNSLAWYQQKPGKAPKLLVYATSNLESGVPSRFSGSGSGSDYSLTITSLQPEDFATYHCHQYYSPPWTFGQGTKVEV

SEQ ID NO: 4739 - protein, 95 aa, Homo sapiens
DIQLTQSPSSLSASVGDRVTITCRASQTISTYLNWYQQKPGKAPKVVIFAASSLKSGVPSRFSGSRSGTDFTLTINSLQPEDSATYYCQQNYKTP

SEQ ID NO: 4740 - protein, 107 aa, Homo sapiens
DIQLTQSPSSLSASVGDRVTITCRASQTISTYLNWYQQKPGKAPKVVIFAASSLKSGVPSRFSGSRSGTDFTLTINSLQPEDSATYYCQQNYKTPRTFGQGTKVEVK

SEQ ID NO: 4741 - protein, 95 aa, Homo sapiens
DIQLTQSPSSLSASVGDRVTLSCRASQDINNSLAWYQQSPGKAPKLLLYVASRLQSGVPSRFSGSGSGTDYTLTISSLQPEDFATYYCHQYHSTP

SEQ ID NO: 4742 - protein, 106 aa, Homo sapiens
DIQLTQSPSSLSASVGDRVTLSCRASQDINNSLAWYQQSPGKAPKLLLYVASRLQSGVPSRFSGSGSGTDYTLTISSLQPEDFATYYCHQYHSTPTFGQGTKVDIK

SEQ ID NO: 4743 - protein, 95 aa, Homo sapiens
DIQLTQSPSSLSVSVGDRVTITCRASQSIGNFLNWYQQKPGKAPKLLIFAASSLQGGVPSRFSGSGSGTDFALTISSLQPEDFATYYCQQSYNTP

SEQ ID NO: 4744 - protein, 107 aa, Homo sapiens
DIQLTQSPSSLSVSVGDRVTITCRASQSIGNFLNWYQQKPGKAPKLLIFAASSLQGGVPSRFSGSGSGTDFALTISSLQPEDFATYYCQQSYNTPQTFGQGTKVEIK

SEQ ID NO: 4745 - protein, 92 aa, Homo sapiens
DIQLTQSPSTLSASVGDRVTITCRASQSISSWLAWYQQKPGKAPKLLIYKASNLERGVPSRFGGSGSGTEFTLTISSLQPDDSATYYCHQYS

SEQ ID NO: 4746 - protein, 106 aa, Homo sapiens
DIQLTQSPSTLSASVGDRVTITCRASQSISSWLAWYQQKPGKAPKLLIYKASNLERGVPSRFGGSGSGTEFTLTISSLQPDDSATYYCHQYSRKYTFGQGTKLEIK

SEQ ID NO: 4747 - protein, 93 aa, Homo sapiens
DIQLTQSPSTLSASVGDRVTITCRASQSVSSWLAWYQQKPGKAPKLLIYEASNLESGVPSRFSGSGSGTEFTLTISSLQPDDFATYYCQQYNS

SEQ ID NO: 4748 - protein, 107 aa, Homo sapiens
DIQLTQSPSTLSASVGDRVTITCRASQSVSSWLAWYQQKPGKAPKLLIYEASNLESGVPSRFSGSGSGTEFTLTISSLQPDDFATYYCQQYNSYLLTFGGGTKVEIK

SEQ ID NO: 4749 - protein, 95 aa, Homo sapiens
DIQLTQSPSTLSASVGDRVTVTCRASQSINIWLAWYQQKPGKAPKLLIYKSSTLESGVPSRFSGSGSGTEFTLTVSSLQPDDFATYYCQHYNPNS

SEQ ID NO: 4750 - protein, 108 aa, Homo sapiens
DIQLTQSPSTLSASVGDRVTVTCRASQSINIWLAWYQQKPGKAPKLLIYKSSTLESGVPSRFSGSGSGTEFTLTVSSLQPDDFATYYCQHYNPNSFYTFGQGTKLEIK

SEQ ID NO: 4751 - protein, 94 aa, Homo sapiens
DIQLTQSPSTLSASVGGRVTITCRASQSISSWLAWYQQKPGKAPKLLIYKASSLESGVPSRFSGRGSGTEFTLTISSLQPDDFATYYCQQYNSY

SEQ ID NO: 4752 - protein, 107 aa, Homo sapiens
DIQLTQSPSTLSASVGGRVTITCRASQSISSWLAWYQQKPGKAPKLLIYKASSLESGVPSRFSGRGSGTEFTLTISSLQPDDFATYYCQQYNSYLGTFGQGTKVEIK

SEQ ID NO: 4753 - protein, 95 aa, Homo sapiens
DIQMAQSPSSLSASVGDRVTITCQASQDISHYLNWYQQKPGKAPKLLIYGASNLETGVPSRFSGSGSGTDFSFTISSLQPEDIAIYYCQQYDNLP

SEQ ID NO: 4754 - protein, 107 aa, Homo sapiens
DIQMAQSPSSLSASVGDRVTITCQASQDISHYLNWYQQKPGKAPKLLIYGASNLETGVPSRFSGSGSGTDFSFTISSLQPEDIAIYYCQQYDNLPLTFGPGTKVDVK

SEQ ID NO: 4755 - protein, 95 aa, Homo sapiens
DIQMAQSPSTLSASIGDRVTITCRASQSISDWLAWYQQKPGKAPNLLIYKASNLESGVPSRFSASGSGTEFTLTISSLQPDDSATYYCQEYSGYS

SEQ ID NO: 4756 - protein, 107 aa, Homo sapiens
DIQMAQSPSTLSASIGDRVTITCRASQSISDWLAWYQQKPGKAPNLLIYKASNLESGVPSRFSASGSGTEFTLTISSLQPDDSATYYCQEYSGYSVTFGQGTKVDIK

SEQ ID NO: 4757 - protein, 94 aa, Homo sapiens
DIQMAQSPSTVSASVGDRVTITCRASQSVGSWVAWYQQKPGYAPRLLIYKASSLESGVPSRFSGSGSGTEFTLTISSLQPDDYATYYCQQSKSY

SEQ ID NO: 4758 - protein, 105 aa, Homo sapiens
DIQMAQSPSTVSASVGDRVTITCRASQSVGSWVAWYQQKPGYAPRLLIYKASSLESGVPSRFSGSGSGTEFTLTISSLQPDDYATYYCQQSKSYFMFGQGTKVEI

SEQ ID NO: 4759 - protein, 98 aa, Homo sapiens
DIQMSQSPSSLSASVGDRITITCRASQTAQSVANYLNWYQQKPGKAPKLLIYAASRLQSGVPSRFSGSGSGTDFTLTINSLRPEDFATYFCQQTYNNP

SEQ ID NO: 4760 - protein, 109 aa, Homo sapiens
DIQMSQSPSSLSASVGDRITITCRASQTAQSVANYLNWYQQKPGKAPKLLIYAASRLQSGVPSRFSGSGSGTDFTLTINSLRPEDFATYFCQQTYNNPITFGPGTTVDI

SEQ ID NO: 4761 - protein, 95 aa, Homo sapiens
DIQMSQSPSSLSASVGDRVTITCRASQGIKNDLAWFQQRPGKAPKSLIYAASSLQSGVPSKFSGGGSGTDFTLTISSLQPEDFATYYCQQYNSFP

SEQ ID NO: 4762 - protein, 106 aa, Homo sapiens
DIQMSQSPSSLSASVGDRVTITCRASQGIKNDLAWFQQRPGKAPKSLIYAASSLQSGVPSKFSGGGSGTDFTLTISSLQPEDFATYYCQQYNSFPYTFGQGTKLEI

SEQ ID NO: 4763 - protein, 95 aa, Homo sapiens
DIQMTQAPSSLSASVGDRVTITCRASQTIRNYLNWYQQKPGKAPKLLIYAASSLQSGVPSRFSGSGSGTDFTLTISSLQPEDFATYYCQQSYNVP

SEQ ID NO: 4764 - protein, 107 aa, Homo sapiens
DIQMTQAPSSLSASVGDRVTITCRASQTIRNYLNWYQQKPGKAPKLLIYAASSLQSGVPSRFSGSGSGTDFTLTISSLQPEDFATYYCQQSYNVPNTFGQGTKLDIQ

SEQ ID NO: 4765 - protein, 95 aa, Homo sapiens
DIQMTQAPSSLSASVGDRVTITCRASQTIRSYLNWYQQRPGKAPKLLIYAASNLQSGVPSRFSGSGSGTDFTLTISTLQPEDFATYYCQQSYSIP

SEQ ID NO: 4766 - protein, 107 aa, Homo sapiens
DIQMTQAPSSLSASVGDRVTITCRASQTIRSYLNWYQQRPGKAPKLLIYAASNLQSGVPSRFSGSGSGTDFTLTISTLQPEDFATYYCQQSYSIPNTFGQGTKLEIK

SEQ ID NO: 4767 - protein, 95 aa, Homo sapiens
DIQMTQSPASLSASVGDRVTITCRASQSISNYLNWYQQKPGKAPKLLIYIVSNLQSGVPSRFSGSGSGTEFTLAISSLQPDDVASYYCQQSYNTP

SEQ ID NO: 4768 - protein, 107 aa, Homo sapiens
DIQMTQSPASLSASVGDRVTITCRASQSISNYLNWYQQKPGKAPKLLIYIVSNLQSGVPSRFSGSGSGTEFTLAISSLQPDDVASYYCQQSYNTPYTFGRGTKLEIK

SEQ ID NO: 4769 - protein, 95 aa, Homo sapiens
DIQMTQSPPSLSASLGDRVTITCRASQSIRTFLNWYQQKPGKAPELLIYAASSLHRGVPSRFSGSGSGTDFTLTISTLLPEDFATYYCQQSYDTP

SEQ ID NO: 4770 - protein, 107 aa, Homo sapiens
DIQMTQSPPSLSASLGDRVTITCRASQSIRTFLNWYQQKPGKAPELLIYAASSLHRGVPSRFSGSGSGTDFTLTISTLLPEDFATYYCQQSYDTPQTFGQGTKLEIK

SEQ ID NO: 4771 - protein, 95 aa, Homo sapiens
DIQMTQSPPTLSAYVGDKVTITCRATQNISIWLAWYQQKPGKAPKVLINKASNLESGVPSRFRGSGSGTEFTLTISSLQPDDFATYYCQQYNYYS

SEQ ID NO: 4772 - protein, 107 aa, Homo sapiens
DIQMTQSPPTLSAYVGDKVTITCRATQNISIWLAWYQQKPGKAPKVLINKASNLESGVPSRFRGSGSGTEFTLTISSLQPDDFATYYCQQYNYYSWTFGPGTKVEIK

SEQ ID NO: 4773 - protein, 95 aa, Homo sapiens
DIQMTQSPSAISASVGDGVTMTCRASQDISDSLIWFQQKAGQVPKRLIYATSNLESGVPSRFSGSGSGTEFTLTITSLQPEDFATYYCLQHKSYP

SEQ ID NO: 4774 - protein, 107 aa, Homo sapiens
DIQMTQSPSAISASVGDGVTMTCRASQDISDSLIWFQQKAGQVPKRLIYATSNLESGVPSRFSGSGSGTEFTLTITSLQPEDFATYYCLQHKSYPRTFGQGTKVDIK

SEQ ID NO: 4775 - protein, 93 aa, Homo sapiens
DIQMTQSPSALSASVGDRVTITCRASQNIHIWLAWYQQKPGNAPKLLIYNVSSLETGVPARFSGSGYGSDFTLIISSLQPDDSATYYCQQYST

SEQ ID NO: 4776 - protein, 108 aa, Homo sapiens
DIQMTQSPSALSASVGDRVTITCRASQNIHIWLAWYQQKPGNAPKLLIYNVSSLETGVPARFSGSGYGSDFTLIISSLQPDDSATYYCQQYSTYARYTFGQGTKVEIK

SEQ ID NO: 4777 - protein, 95 aa, Homo sapiens
DIQMTQSPSAMSASVGDRVIITCRASQAIGNYLAWFQQKPGKVPKRLIYAASSLQSGVPSRFSGSGSGTEFILTISSLQSEDFATYYCLQHKSYP

SEQ ID NO: 4778 - protein, 107 aa, Homo sapiens
DIQMTQSPSAMSASVGDRVIITCRASQAIGNYLAWFQQKPGKVPKRLIYAASSLQSGVPSRFSGSGSGTEFILTISSLQSEDFATYYCLQHKSYPLTFGGGTKVEIK

SEQ ID NO: 4779 - protein, 95 aa, Homo sapiens
DIQMTQSPSAMSASVGDRVTITCRASQDINNYLAWFQQKPGKVPKRLIYAASSLQSGVPSRFSGSGSGTEFTLTISSLQPEDFATYYCLQHNSYP

SEQ ID NO: 4780 - protein, 107 aa, Homo sapiens
DIQMTQSPSAMSASVGDRVTITCRASQDINNYLAWFQQKPGKVPKRLIYAASSLQSGVPSRFSGSGSGTEFTLTISSLQPEDFATYYCLQHNSYPRTFGQGTKVEIK

SEQ ID NO: 4781 - protein, 95 aa, Homo sapiens
DIQMTQSPSAMSASVGDRVTITCRASQGIRNFLAWFQQKPGKVPKRLIYAASNLQSGVPSRFSGSGSGTEFTLTISSLQPEDFATYYCLQHSTYP

SEQ ID NO: 4782 - protein, 107 aa, Homo sapiens
DIQMTQSPSAMSASVGDRVTITCRASQGIRNFLAWFQQKPGKVPKRLIYAASNLQSGVPSRFSGSGSGTEFTLTISSLQPEDFATYYCLQHSTYPLTFGGGTKVEIK

SEQ ID NO: 4783 - protein, 95 aa, Homo sapiens
DIQMTQSPSAMSASVGDRVTITCRASQGISNYLAWFQQKPGKVPKRLIYAASSLQSGVPSRFSGSGSGTEFTLTISSLQPEDFATYYCLQHIIYP

SEQ ID NO: 4784 - protein, 107 aa, Homo sapiens
DIQMTQSPSAMSASVGDRVTITCRASQGISNYLAWFQQKPGKVPKRLIYAASSLQSGVPSRFSGSGSGTEFTLTISSLQPEDFATYYCLQHIIYPWTFGQGTKVEIK

SEQ ID NO: 4785 - protein, 95 aa, Homo sapiens
DIQMTQSPSAMSASVGDRVTITCRASQGISNYLAWFQQKPGKVPKRLIYGASNLQSGVPSRFSGSGSGTEFTLTISSLQPEDFATYYCLQHNSYP

SEQ ID NO: 4786 - protein, 107 aa, Homo sapiens
DIQMTQSPSAMSASVGDRVTITCRASQGISNYLAWFQQKPGKVPKRLIYGASNLQSGVPSRFSGSGSGTEFTLTISSLQPEDFATYYCLQHNSYPRTFGQGTKVEIK

SEQ ID NO: 4787 - protein, 95 aa, Homo sapiens
DIQMTQSPSFLSASIGDRVTISCRASQSISTYVNWYQQKSGRAPNLLIYAASSLRSGVPSRFSGSGSGTDFTLTISSLQPEDFATYYCQQSYSHP

SEQ ID NO: 4788 - protein, 108 aa, Homo sapiens
DIQMTQSPSFLSASIGDRVTISCRASQSISTYVNWYQQKSGRAPNLLIYAASSLRSGVPSRFSGSGSGTDFTLTISSLQPEDFATYYCQQSYSHPRVTFGQGTKVEIK

SEQ ID NO: 4789 - protein, 93 aa, Homo sapiens
DIQMTQSPSILSASVGDRVTITCRASQPISSWLAWYQQKPGKAPKLLIYKASSLQIGVPSRFGGSESGTEFTLTISGLQPDDFATYYCQQYSS

SEQ ID NO: 4790 - protein, 106 aa, Homo sapiens
DIQMTQSPSILSASVGDRVTITCRASQPISSWLAWYQQKPGKAPKLLIYKASSLQIGVPSRFGGSESGTEFTLTISGLQPDDFATYYCQQYSSYPGTFGQGTKVEI

SEQ ID NO: 4791 - protein, 94 aa, Homo sapiens
DIQMTQSPSPLSASVGDRVTITCRASQSIDKWLAWYQQKPGKAPKLLIYKASSLQSGVPSRFSGSGSGTEFTLTISSLQPDDFATYYCQQYSSY

SEQ ID NO: 4792 - protein, 107 aa, Homo sapiens
DIQMTQSPSPLSASVGDRVTITCRASQSIDKWLAWYQQKPGKAPKLLIYKASSLQSGVPSRFSGSGSGTEFTLTISSLQPDDFATYYCQQYSSYLGTFGQGTKVEIK

SEQ ID NO: 4793 - protein, 95 aa, Homo sapiens
DIQMTQSPSSLAASVGDRVTITCRASQGISNYLHWYQQKPGNAPKLLIYIVSNLQSGVPSRFSGSGSGTDFTLTITNLQPEDFATYFCQQSYNTP

SEQ ID NO: 4794 - protein, 107 aa, Homo sapiens
DIQMTQSPSSLAASVGDRVTITCRASQGISNYLHWYQQKPGNAPKLLIYIVSNLQSGVPSRFSGSGSGTDFTLTITNLQPEDFATYFCQQSYNTPYTFAQGTKLEIK

SEQ ID NO: 4795 - protein, 94 aa, Homo sapiens
DIQMTQSPSSLAASVGDRVTITCRASQSINTNLNWYQQKSGKAPNLLIYGASSLQSGVPSRFSGSGSGTDFTLTISNLQPEDFATYYCQQSYST

SEQ ID NO: 4796 - protein, 106 aa, Homo sapiens
DIQMTQSPSSLAASVGDRVTITCRASQSINTNLNWYQQKSGKAPNLLIYGASSLQSGVPSRFSGSGSGTDFTLTISNLQPEDFATYYCQQSYSTRTFGQGTKVEIK

SEQ ID NO: 4797 - protein, 95 aa, Homo sapiens
DIQMTQSPSSLAASVGDRVTITCRASQSISRYLNWYQQKPGTAPKLLIYAASSLQSGVPSRFSGSGSGTDFTLTVSSLQPEDFATYYCQQSYNTP

SEQ ID NO: 4798 - protein, 107 aa, Homo sapiens
DIQMTQSPSSLAASVGDRVTITCRASQSISRYLNWYQQKPGTAPKLLIYAASSLQSGVPSRFSGSGSGTDFTLTVSSLQPEDFATYYCQQSYNTPQTFGQGTKLEIK

SEQ ID NO: 4799 - protein, 96 aa, Homo sapiens
DIQMTQSPSSLFASVGDRVTITCRASQSISISLNWYQQRVGEAPKLLIYAASNLQSGVPSRFSGSGSGTDFTLTISSLQPEDFATYYCHQSYTTAP

SEQ ID NO: 4800 - protein, 108 aa, Homo sapiens
DIQMTQSPSSLFASVGDRVTITCRASQSISISLNWYQQRVGEAPKLLIYAASNLQSGVPSRFSGSGSGTDFTLTISSLQPEDFATYYCHQSYTTAPETFGQGTKVEIK

SEQ ID NO: 4801 - protein, 90 aa, Homo sapiens
DIQMTQSPSSLPASVGDRVTITCRASQGINIYLNWYQQKPGEAPDLLIYGASTLQSGVPSRFSGSGSGTEFTLTISSLQPEDFATYFCQQ

SEQ ID NO: 4802 - protein, 107 aa, Homo sapiens
DIQMTQSPSSLPASVGDRVTITCRASQGINIYLNWYQQKPGEAPDLLIYGASTLQSGVPSRFSGSGSGTEFTLTISSLQPEDFATYFCQQTEEAPYTFGQGTKLEIK

SEQ ID NO: 4803 - protein, 96 aa, Homo sapiens
DIQMTQSPSSLSAFVGDSVTITCRASEGISNYLAWFQQKPGKAPRSLIYAASTLQSGVPSRFSGSGSGTDFTLSISSLQPEDFGTYYCQQYNTFPP

SEQ ID NO: 4804 - protein, 107 aa, Homo sapiens
DIQMTQSPSSLSAFVGDSVTITCRASEGISNYLAWFQQKPGKAPRSLIYAASTLQSGVPSRFSGSGSGTDFTLSISSLQPEDFGTYYCQQYNTFPPTFGGGTKVETK

SEQ ID NO: 4805 - protein, 95 aa, Homo sapiens
DIQMTQSPSSLSASAGDRVTITCRASQSISNYLNWYQQKPGKAPKLLIYGASSLQSGVPSRFSGSGSGTDFTLTIISLQPEDFATYYCQQSYSNP

SEQ ID NO: 4806 - protein, 107 aa, Homo sapiens
DIQMTQSPSSLSASAGDRVTITCRASQSISNYLNWYQQKPGKAPKLLIYGASSLQSGVPSRFSGSGSGTDFTLTIISLQPEDFATYYCQQSYSNPRTFGQGTKVEIK

SEQ ID NO: 4807 - protein, 89 aa, Homo sapiens
DIQMTQSPSSLSASIGDRVTINCRASQSISRFLNWYQQKPGKAPNLLIYAISNLQSGVPSRFSGSGSGTDFTLTISSLQPEDVATYYCQ

SEQ ID NO: 4808 - protein, 103 aa, Homo sapiens
DIQMTQSPSSLSASIGDRVTINCRASQSISRFLNWYQQKPGKAPNLLIYAISNLQSGVPSRFSGSGSGTDFTLTISSLQPEDVATYYCQVQETFGQGTKVEIK

SEQ ID NO: 4809 - protein, 95 aa, Homo sapiens
DIQMTQSPSSLSASIGDRVTITCQASQDISKYLNWFQHKPGKAPKLLIYDASNLETGVPSRFSGSGSGTDFTFTISTLQPEDIATYYCQQYDNLP

SEQ ID NO: 4810 - protein, 107 aa, Homo sapiens
DIQMTQSPSSLSASIGDRVTITCQASQDISKYLNWFQHKPGKAPKLLIYDASNLETGVPSRFSGSGSGTDFTFTISTLQPEDIATYYCQQYDNLPLTFGPGTKVDIK

SEQ ID NO: 4811 - protein, 95 aa, Homo sapiens
DIQMTQSPSSLSASIGDRVTITCRANQDIRTYLNWYQQKPGKAPRLLIYAASNLESGVPSRFSGGGSGTDFTLTIISLQPEDFATYYCHQSYNTP

SEQ ID NO: 4812 - protein, 107 aa, Homo sapiens
DIQMTQSPSSLSASIGDRVTITCRANQDIRTYLNWYQQKPGKAPRLLIYAASNLESGVPSRFSGGGSGTDFTLTIISLQPEDFATYYCHQSYNTPQTFGQGTKLEIK

SEQ ID NO: 4813 - protein, 95 aa, Homo sapiens
DIQMTQSPSSLSASIGDRVTITCRASQGIGNSLAWFQQKPGKAPKCLIYDAYTLQGGVPPKFSGSGSGTDFTLTISSLQPEDFATYYCQQYKSYP

SEQ ID NO: 4814 - protein, 107 aa, Homo sapiens
DIQMTQSPSSLSASIGDRVTITCRASQGIGNSLAWFQQKPGKAPKCLIYDAYTLQGGVPPKFSGSGSGTDFTLTISSLQPEDFATYYCQQYKSYPLTFGGGTKVDLK

SEQ ID NO: 4815 - protein, 93 aa, Homo sapiens
DIQMTQSPSSLSASIGDRVTITCRASQGISNSLAWYQQKPGNAPKLLLYGASTLDSGIPSRFSGSGSGTDFTLTITGLQREDFASYYCQQYYG

SEQ ID NO: 4816 - protein, 107 aa, Homo sapiens
DIQMTQSPSSLSASIGDRVTITCRASQGISNSLAWYQQKPGNAPKLLLYGASTLDSGIPSRFSGSGSGTDFTLTITGLQREDFASYYCQQYYGGPITFGPGTRVDLK

SEQ ID NO: 4817 - protein, 93 aa, Homo sapiens
DIQMTQSPSSLSASIGDRVTITCRASQGIYNYLAWYQQKPGKVPKLLIYGASTLQSGVPSRFSGSGSGTDFTLTINSLQPEDVATYYCQKYNS

SEQ ID NO: 4818 - protein, 107 aa, Homo sapiens
DIQMTQSPSSLSASIGDRVTITCRASQGIYNYLAWYQQKPGKVPKLLIYGASTLQSGVPSRFSGSGSGTDFTLTINSLQPEDVATYYCQKYNSDSGTFGPGTKVEIK

SEQ ID NO: 4819 - protein, 92 aa, Homo sapiens
DIQMTQSPSSLSASIGDRVTITCRASQSISKYLNWYQQKPGKAPKLLIYSASSLQGGVPSRFSGSGSGTDFTLTINSLQPDDFATYYCQQTY

SEQ ID NO: 4820 - protein, 106 aa, Homo sapiens
DIQMTQSPSSLSASIGDRVTITCRASQSISKYLNWYQQKPGKAPKLLIYSASSLQGGVPSRFSGSGSGTDFTLTINSLQPDDFATYYCQQTYNLCSFGRGTKVEIQ

SEQ ID NO: 4821 - protein, 93 aa, Homo sapiens
DIQMTQSPSSLSASIGDRVTITCRASQSVSGYLNWYQQRPGKAPRLLIYGASNLQSGVPSRFSGSGFGTDFTLTISSLQSEDFATYYCQQSYS

SEQ ID NO: 4822 - protein, 107 aa, Homo sapiens
DIQMTQSPSSLSASIGDRVTITCRASQSVSGYLNWYQQRPGKAPRLLIYGASNLQSGVPSRFSGSGFGTDFTLTISSLQSEDFATYYCQQSYSLLYSFGQGTKLGIK

SEQ ID NO: 4823 - protein, 95 aa, Homo sapiens
DIQMTQSPSSLSASTGDRVTITCQASQDISKYLNWFQHKPGKAPKLLIFESSHLETGVPSRFSGGGSGTDFTFTISTLQPEDIATYYCQQYDNLP

SEQ ID NO: 4824 - protein, 107 aa, Homo sapiens
DIQMTQSPSSLSASTGDRVTITCQASQDISKYLNWFQHKPGKAPKLLIFESSHLETGVPSRFSGGGSGTDFTFTISTLQPEDIATYYCQQYDNLPLTFGPGTKVDIK

SEQ ID NO: 4825 - protein, 93 aa, Homo sapiens
DIQMTQSPSSLSASTGDRVTITCRATQSIGTYLNWYRQIPGKAPQVLMYTTDNLQAGVPSRFTGSGSGTEFTLTLNSVQPEDAATYYCQQTYS

SEQ ID NO: 4826 - protein, 106 aa, Homo sapiens
DIQMTQSPSSLSASTGDRVTITCRATQSIGTYLNWYRQIPGKAPQVLMYTTDNLQAGVPSRFTGSGSGTEFTLTLNSVQPEDAATYYCQQTYSRPYSFGQGTRLDI

SEQ ID NO: 4827 - protein, 95 aa, Homo sapiens
DIQMTQSPSSLSASVGARVTITCQASEDISNYVNWYQQKPGKAPKFLIYDASNLETGVPSRFSGSGSGTHFTFTISSLQPEDIATYYCQQYDDLP

SEQ ID NO: 4828 - protein, 106 aa, Homo sapiens
DIQMTQSPSSLSASVGARVTITCQASEDISNYVNWYQQKPGKAPKFLIYDASNLETGVPSRFSGSGSGTHFTFTISSLQPEDIATYYCQQYDDLPYTFGQGTKLEI

SEQ ID NO: 4829 - protein, 95 aa, Homo sapiens
DIQMTQSPSSLSASVGDKVTFTCRASHNIRNYLNWYQQKPGKAPNLLIYTASNLHSGVPSRFSGSGSGTDFTLTITSLQPEDFAIYYCQQSYDTP

SEQ ID NO: 4830 - protein, 107 aa, Homo sapiens
DIQMTQSPSSLSASVGDKVTFTCRASHNIRNYLNWYQQKPGKAPNLLIYTASNLHSGVPSRFSGSGSGTDFTLTITSLQPEDFAIYYCQQSYDTPWTFGQGTKVEIK

SEQ ID NO: 4831 - protein, 95 aa, Homo sapiens
DIQMTQSPSSLSASVGDKVTITCRASHNIRTYLNWYQQKPGKAPNLLIYTASNFQSGVPSRFSGSGSGTDFTLTITSLQPEDFATYFCQQTYDTP

SEQ ID NO: 4832 - protein, 107 aa, Homo sapiens
DIQMTQSPSSLSASVGDKVTITCRASHNIRTYLNWYQQKPGKAPNLLIYTASNFQSGVPSRFSGSGSGTDFTLTITSLQPEDFATYFCQQTYDTPWTFGQGTQVELK

SEQ ID NO: 4833 - protein, 93 aa, Homo sapiens
DIQMTQSPSSLSASVGDKVTITCRASQDISRYLNWYQQKPGKAPRLLISDTSTLQSGVPSRFSGSGSRADFTLTINNLQPEDFATYYCQQSFS

SEQ ID NO: 4834 - protein, 106 aa, Homo sapiens
DIQMTQSPSSLSASVGDKVTITCRASQDISRYLNWYQQKPGKAPRLLISDTSTLQSGVPSRFSGSGSRADFTLTINNLQPEDFATYYCQQSFSMYNFGQGTKLEIK

SEQ ID NO: 4835 - protein, 95 aa, Homo sapiens
DIQMTQSPSSLSASVGDRISITCRASQTISSYLNWYQQKPGKAPKLLIYGASSLQSGVPARFSGSESGTDFTLTITSLQPEDFATYYCQQSYSTP

SEQ ID NO: 4836 - protein, 107 aa, Homo sapiens
DIQMTQSPSSLSASVGDRISITCRASQTISSYLNWYQQKPGKAPKLLIYGASSLQSGVPARFSGSESGTDFTLTITSLQPEDFATYYCQQSYSTPFTFGPGTKVDIK

SEQ ID NO: 4837 - protein, 95 aa, Homo sapiens
DIQMTQSPSSLSASVGDRITITCRASQSIITYLNWYQQKPGTAPKLLIYATSNLEGGVPSRFSGSGSGTDFTLTISSLQPEDFATYYCQQSYDTP

SEQ ID NO: 4838 - protein, 107 aa, Homo sapiens
DIQMTQSPSSLSASVGDRITITCRASQSIITYLNWYQQKPGTAPKLLIYATSNLEGGVPSRFSGSGSGTDFTLTISSLQPEDFATYYCQQSYDTPQTFGQGTKVEIK

SEQ ID NO: 4839 - protein, 93 aa, Homo sapiens
DIQMTQSPSSLSASVGDRLTITCRASQRISRYLNWYQQKAGKAPRLLIYSASSLQGGVPSRFSGSGSETDFTLTISSLQPEDFATYYCQQTYG

SEQ ID NO: 4840 - protein, 107 aa, Homo sapiens
DIQMTQSPSSLSASVGDRLTITCRASQRISRYLNWYQQKAGKAPRLLIYSASSLQGGVPSRFSGSGSETDFTLTISSLQPEDFATYYCQQTYGRVLTFGGGTRVELK

SEQ ID NO: 4841 - protein, 94 aa, Homo sapiens
DIQMTQSPSSLSASVGDRVAITCRASQSISKYLNWYQQKPGKAPKLLIYAASTLQSGVPSRFSGSGSGTDFTLTISSLQPEDFATYYCQQSYST

SEQ ID NO: 4842 - protein, 107 aa, Homo sapiens
DIQMTQSPSSLSASVGDRVAITCRASQSISKYLNWYQQKPGKAPKLLIYAASTLQSGVPSRFSGSGSGTDFTLTISSLQPEDFATYYCQQSYSTLWTFGQGTKVELK

SEQ ID NO: 4843 - protein, 95 aa, Homo sapiens
DIQMTQSPSSLSASVGDRVIITCRASQSISRYLNWYQQKPGEPPKLLIYGASTLQSGVSSRFSGSGSGTDFTLTISSLQLEDFATYFCQQSYSTP

SEQ ID NO: 4844 - protein, 115 aa, Homo sapiens
DIQMTQSPSSLSASVGDRVIITCRASQSISRYLNWYQQKPGEPPKLLIYGASTLQSGVSSRFSGSGSGTDFTLTISSLQLEDFATYFCQQSYSTPYNHKYGTPYTFGQGTKLDIK

SEQ ID NO: 4845 - protein, 95 aa, Homo sapiens
DIQMTQSPSSLSASVGDRVIITCRASQTISTYLNWYQYKPGKAPSLLIYAASTLQSGAPSRFSGGGSGTDFTLTISSLQPDDFATYYCHQSYDNP

SEQ ID NO: 4846 - protein, 107 aa, Homo sapiens
DIQMTQSPSSLSASVGDRVIITCRASQTISTYLNWYQYKPGKAPSLLIYAASTLQSGAPSRFSGGGSGTDFTLTISSLQPDDFATYYCHQSYDNPQTFGHGTKVEIK

SEQ ID NO: 4847 - protein, 96 aa, Homo sapiens
DIQMTQSPSSLSASVGDRVIITCRPSQNINTYLNWYQQKPGKVPKLLIYAASSLQSGVPSRFSGSGSGTDFTLTIGSLQPEDFATYFCQQSYSTPP

SEQ ID NO: 4848 - protein, 107 aa, Homo sapiens
DIQMTQSPSSLSASVGDRVIITCRPSQNINTYLNWYQQKPGKVPKLLIYAASSLQSGVPSRFSGSGSGTDFTLTIGSLQPEDFATYFCQQSYSTPPTFGQGTKVEIK

SEQ ID NO: 4849 - protein, 95 aa, Homo sapiens
DIQMTQSPSSLSASVGDRVIITCRTSQAISSYLSWYQHKSGNAPKHLIYAALTLRSGVSSRFSGGGSGTNFTLTITSLQPEDFATYYCQQSYITP

SEQ ID NO: 4850 - protein, 107 aa, Homo sapiens
DIQMTQSPSSLSASVGDRVIITCRTSQAISSYLSWYQHKSGNAPKHLIYAALTLRSGVSSRFSGGGSGTNFTLTITSLQPEDFATYYCQQSYITPWTFGQGTKVEIK

SEQ ID NO: 4851 - protein, 92 aa, Homo sapiens
DIQMTQSPSSLSASVGDRVSISCRASQYIGNFLNWYQQKPGQAPKLLIYEASTLQSGVPSRFSGVASGTDFTLTISSLQPEDFATYYCQQSY

SEQ ID NO: 4852 - protein, 107 aa, Homo sapiens
DIQMTQSPSSLSASVGDRVSISCRASQYIGNFLNWYQQKPGQAPKLLIYEASTLQSGVPSRFSGVASGTDFTLTISSLQPEDFATYYCQQSYNVVPTFGGGAKVEIK

SEQ ID NO: 4853 - protein, 94 aa, Homo sapiens
DIQMTQSPSSLSASVGDRVSITCRASQDIYNYLAWYQQKPGKVPQLLIYAASTLQSGVPSRFSGSGSGTDFTLTISSLQPEDVATYYCQKYNSA

SEQ ID NO: 4854 - protein, 106 aa, Homo sapiens
DIQMTQSPSSLSASVGDRVSITCRASQDIYNYLAWYQQKPGKVPQLLIYAASTLQSGVPSRFSGSGSGTDFTLTISSLQPEDVATYYCQKYNSASGTFGQGTKVEI

SEQ ID NO: 4855 - protein, 95 aa, Homo sapiens
DIQMTQSPSSLSASVGDRVSITCRASQGISNYLAWYQQKPGKVPELLIYAASTLQSGVPSRFSGSGSGTEFTLTISSLQPEDVATYYCQKYDSAP

SEQ ID NO: 4856 - protein, 107 aa, Homo sapiens
DIQMTQSPSSLSASVGDRVSITCRASQGISNYLAWYQQKPGKVPELLIYAASTLQSGVPSRFSGSGSGTEFTLTISSLQPEDVATYYCQKYDSAPRTFGQGTKVEIK

SEQ ID NO: 4857 - protein, 95 aa, Homo sapiens
DIQMTQSPSSLSASVGDRVSITCRASQTIDNFLNWYQQKPGKPPKLLIYIASRLQSGVPSRFSGSGSGTDFTLTISSLQPEDFATYFCQQTGNVP

SEQ ID NO: 4858 - protein, 106 aa, Homo sapiens
DIQMTQSPSSLSASVGDRVSITCRASQTIDNFLNWYQQKPGKPPKLLIYIASRLQSGVPSRFSGSGSGTDFTLTISSLQPEDFATYFCQQTGNVPYTFGQGTKVEI

SEQ ID NO: 4859 - protein, 95 aa, Homo sapiens
DIQMTQSPSSLSASVGDRVTFTCRASQSISSYLNWYQQKPGKAPKLLMYAASSLESGVPSRFSGSGSGTDFTLTIRSLQPEDFATYYCQQSYITP

SEQ ID NO: 4860 - protein, 107 aa, Homo sapiens
DIQMTQSPSSLSASVGDRVTFTCRASQSISSYLNWYQQKPGKAPKLLMYAASSLESGVPSRFSGSGSGTDFTLTIRSLQPEDFATYYCQQSYITPYTFGQGTKLEIK

SEQ ID NO: 4861 - protein, 95 aa, Homo sapiens
DIQMTQSPSSLSASVGDRVTIACQASQDIRKSLNWYQQKPGKAPKLLIYDASKLVTGVPSRFSGSGSGTDFTFTISSLQPEDIATYYCQQYHNLP

SEQ ID NO: 4862 - protein, 107 aa, Homo sapiens
DIQMTQSPSSLSASVGDRVTIACQASQDIRKSLNWYQQKPGKAPKLLIYDASKLVTGVPSRFSGSGSGTDFTFTISSLQPEDIATYYCQQYHNLPITFGQGTRLDIK

SEQ ID NO: 4863 - protein, 96 aa, Homo sapiens
DIQMTQSPSSLSASVGDRVTIACRANQGISNYLAWFQQKPGNAPKSLIYAASSLQSGVPSRFSGSGSGTHFTLTISRLQPEDSATYYCLQYYSYPP

SEQ ID NO: 4864 - protein, 107 aa, Homo sapiens
DIQMTQSPSSLSASVGDRVTIACRANQGISNYLAWFQQKPGNAPKSLIYAASSLQSGVPSRFSGSGSGTHFTLTISRLQPEDSATYYCLQYYSYPPTFGGGTKVEIK

SEQ ID NO: 4865 - protein, 93 aa, Homo sapiens
DIQMTQSPSSLSASVGDRVTIACRASQSITNYLNWYQQKAGQVPKLLIYGASSLQSGVPSRFSGSGSGTDFTLTISNLQPEDFATYYCQQSYN

SEQ ID NO: 4866 - protein, 107 aa, Homo sapiens
DIQMTQSPSSLSASVGDRVTIACRASQSITNYLNWYQQKAGQVPKLLIYGASSLQSGVPSRFSGSGSGTDFTLTISNLQPEDFATYYCQQSYNNPVTFGGGTKVEIK

SEQ ID NO: 4867 - protein, 93 aa, Homo sapiens
DIQMTQSPSSLSASVGDRVTIACRASQSVSSYLNWYQQKPGKAPKLLIYAASTLQSGVPSRFSGSGSGTDFTLTISSLQPEDFATYYCQQSDS

SEQ ID NO: 4868 - protein, 107 aa, Homo sapiens
DIQMTQSPSSLSASVGDRVTIACRASQSVSSYLNWYQQKPGKAPKLLIYAASTLQSGVPSRFSGSGSGTDFTLTISSLQPEDFATYYCQQSDSLSRTFGQGTKVEIK

SEQ ID NO: 4869 - protein, 95 aa, Homo sapiens
DIQMTQSPSSLSASVGDRVTIACRTSQSISRYLNWYQQKPGKAPKALIYSASSLQSGVPSRFNGSGSGTEFTLTISSLQPEDFATYYCQQTYSAP

SEQ ID NO: 4870 - protein, 106 aa, Homo sapiens
DIQMTQSPSSLSASVGDRVTIACRTSQSISRYLNWYQQKPGKAPKALIYSASSLQSGVPSRFNGSGSGTEFTLTISSLQPEDFATYYCQQTYSAPSFGPGTNVDVK

SEQ ID NO: 4871 - protein, 95 aa, Homo sapiens
DIQMTQSPSSLSASVGDRVTINCRASQSINTFVNWYQQKPGKAPKLLIYGASSLQSGLPSRFSGSGSGTHFTLTISSLQPEDIATYHCQQSYRNP

SEQ ID NO: 4872 - protein, 106 aa, Homo sapiens
DIQMTQSPSSLSASVGDRVTINCRASQSINTFVNWYQQKPGKAPKLLIYGASSLQSGLPSRFSGSGSGTHFTLTISSLQPEDIATYHCQQSYRNPVTFGGGTKVEI

SEQ ID NO: 4873 - protein, 95 aa, Homo sapiens
DIQMTQSPSSLSASVGDRVTISCQASQDISNYLNWYQQKPGKAPKFLIYDASNLETGVPSRFSGSGSGTDFTFTISSLQPEDIATYYCQQYDNLP

SEQ ID NO: 4874 - protein, 107 aa, Homo sapiens
DIQMTQSPSSLSASVGDRVTISCQASQDISNYLNWYQQKPGKAPKFLIYDASNLETGVPSRFSGSGSGTDFTFTISSLQPEDIATYYCQQYDNLPLTFGGGTKVEIK

SEQ ID NO: 4875 - protein, 94 aa, Homo sapiens
DIQMTQSPSSLSASVGDRVTISCRASQNIGNNLNWYQHQPGKAPKFLIYFASNLQSGVPSRFSGSGSGTDFTLTISNLQPEDFATYYCQQSYSS

SEQ ID NO: 4876 - protein, 106 aa, Homo sapiens
DIQMTQSPSSLSASVGDRVTISCRASQNIGNNLNWYQHQPGKAPKFLIYFASNLQSGVPSRFSGSGSGTDFTLTISNLQPEDFATYYCQQSYSSLTFGGGTKVQIK

SEQ ID NO: 4877 - protein, 94 aa, Homo sapiens
DIQMTQSPSSLSASVGDRVTISCRASQNIKTYLNWYHQKPGKAPKLLIYAASSLQSGVPSRFSGSGSGTDFSLTITNIQPEDFATYYCQQSFSS

SEQ ID NO: 4878 - protein, 106 aa, Homo sapiens
DIQMTQSPSSLSASVGDRVTISCRASQNIKTYLNWYHQKPGKAPKLLIYAASSLQSGVPSRFSGSGSGTDFSLTITNIQPEDFATYYCQQSFSSQLSFGPGTRVDI

SEQ ID NO: 4879 - protein, 92 aa, Homo sapiens
DIQMTQSPSSLSASVGDRVTISCRASQYIGNFLNWYQQKPGQAPKLLIYEASTLQSGVPSRFSGVASGTDFTLTISSLQPEDFATYYCQQSY

SEQ ID NO: 4880 - protein, 107 aa, Homo sapiens
DIQMTQSPSSLSASVGDRVTISCRASQYIGNFLNWYQQKPGQAPKLLIYEASTLQSGVPSRFSGVASGTDFTLTISSLQPEDFATYYCQQSYTVVPTFGGGAKVDIK

SEQ ID NO: 4881 - protein, 95 aa, Homo sapiens
DIQMTQSPSSLSASVGDRVTITCQASHDISHYLNWYQQKPGKAPNLLIYGASNLETGVPSRFSGSGSGTDFSFTISSLQPEDIATYYCQQYDNLP

SEQ ID NO: 4882 - protein, 107 aa, Homo sapiens
DIQMTQSPSSLSASVGDRVTITCQASHDISHYLNWYQQKPGKAPNLLIYGASNLETGVPSRFSGSGSGTDFSFTISSLQPEDIATYYCQQYDNLPLTFGPGTKVDIK

SEQ ID NO: 4883 - protein, 95 aa, Homo sapiens
DIQMTQSPSSLSASVGDRVTITCQASHDISNYLNWYQQKPGKAPKLLIYDASNLETGVPSRFSGSGSGTDFTFTISSLQPEDIAAYYCQHYDNLP

SEQ ID NO: 4884 - protein, 107 aa, Homo sapiens
DIQMTQSPSSLSASVGDRVTITCQASHDISNYLNWYQQKPGKAPKLLIYDASNLETGVPSRFSGSGSGTDFTFTISSLQPEDIAAYYCQHYDNLPLTFGGGTKVEIK

SEQ ID NO: 4885 - protein, 95 aa, Homo sapiens
DIQMTQSPSSLSASVGDRVTITCQASQDIAKYLNWYQQKPGKAPKLLIYDASNLETGVPSRFSGSGFGTDFTFIISSLQPEDIATYFCQQYDNLP

SEQ ID NO: 4886 - protein, 107 aa, Homo sapiens
DIQMTQSPSSLSASVGDRVTITCQASQDIAKYLNWYQQKPGKAPKLLIYDASNLETGVPSRFSGSGFGTDFTFIISSLQPEDIATYFCQQYDNLPLTFGPGTKVDIK

SEQ ID NO: 4887 - protein, 95 aa, Homo sapiens
DIQMTQSPSSLSASVGDRVTITCQASQDIRNHLNWYQQKPGKAPKLLIFDASNLETGVPSRFGGSGSGTDFSFTITSLQPEDIATFYCQQNHNLP

SEQ ID NO: 4888 - protein, 107 aa, Homo sapiens
DIQMTQSPSSLSASVGDRVTITCQASQDIRNHLNWYQQKPGKAPKLLIFDASNLETGVPSRFGGSGSGTDFSFTITSLQPEDIATFYCQQNHNLPGTFGQGTKVEIK

SEQ ID NO: 4889 - protein, 95 aa, Homo sapiens
DIQMTQSPSSLSASVGDRVTITCQASQDIRNHLNWYQQKPGKAPKLLIFDASNLQTGVPSRFGGSGSGTDFTFTISSLQPEDIATYYCQQCHNLP

SEQ ID NO: 4890 - protein, 107 aa, Homo sapiens
DIQMTQSPSSLSASVGDRVTITCQASQDIRNHLNWYQQKPGKAPKLLIFDASNLQTGVPSRFGGSGSGTDFTFTISSLQPEDIATYYCQQCHNLPGTFGQGTKVEIK

SEQ ID NO: 4891 - protein, 95 aa, Homo sapiens
DIQMTQSPSSLSASVGDRVTITCQASQDIRNHLNWYQQKPGKAPKLLIFDGSNLQTGVPSRFGGSGSGTDFSFTINSLQPEDIATFYCQQNHILP

SEQ ID NO: 4892 - protein, 107 aa, Homo sapiens
DIQMTQSPSSLSASVGDRVTITCQASQDIRNHLNWYQQKPGKAPKLLIFDGSNLQTGVPSRFGGSGSGTDFSFTINSLQPEDIATFYCQQNHILPGTFGQGTKVEIK

SEQ ID NO: 4893 - protein, 95 aa, Homo sapiens
DIQMTQSPSSLSASVGDRVTITCQASQDIRNHLNWYQQKPGKAPKLLIFDGSNLQTGVPSRFGGSGSGTDFSFTISSLQPEDIATFYCQQNHILP

SEQ ID NO: 4894 - protein, 107 aa, Homo sapiens
DIQMTQSPSSLSASVGDRVTITCQASQDIRNHLNWYQQKPGKAPKLLIFDGSNLQTGVPSRFGGSGSGTDFSFTISSLQPEDIATFYCQQNHILPGTFGQGTKVEIK

SEQ ID NO: 4895 - protein, 96 aa, Homo sapiens
DIQMTQSPSSLSASVGDRVTITCQASQDIRNYLNWYQHKPGKAPKLLIYDASNLETGVPSRFSGSGSGTDFTFTIRSLQPEDFATYYCQQYDNLPP

SEQ ID NO: 4896 - protein, 108 aa, Homo sapiens
DIQMTQSPSSLSASVGDRVTITCQASQDIRNYLNWYQHKPGKAPKLLIYDASNLETGVPSRFSGSGSGTDFTFTIRSLQPEDFATYYCQQYDNLPPFTFGGGTKVEIK

SEQ ID NO: 4897 - protein, 95 aa, Homo sapiens
DIQMTQSPSSLSASVGDRVTITCQASQDISIYLNWYQQKPGKAPKLLIYGASNLETGVPSRFSGSGSGTDFSFTISSLQPEDIATYYCQQYDNLP

SEQ ID NO: 4898 - protein, 107 aa, Homo sapiens
DIQMTQSPSSLSASVGDRVTITCQASQDISIYLNWYQQKPGKAPKLLIYGASNLETGVPSRFSGSGSGTDFSFTISSLQPEDIATYYCQQYDNLPLTFGPGTKVDIK

SEQ ID NO: 4899 - protein, 94 aa, Homo sapiens
DIQMTQSPSSLSASVGDRVTITCQASQDISNYLNWYQQKPGKAPKLLIYDALNLETGVPSRFSGSGSGTDFTLTISSLQPEDIATYHCQQYDNL

SEQ ID NO: 4900 - protein, 106 aa, Homo sapiens
DIQMTQSPSSLSASVGDRVTITCQASQDISNYLNWYQQKPGKAPKLLIYDALNLETGVPSRFSGSGSGTDFTLTISSLQPEDIATYHCQQYDNLITFGQGTRLEIK

SEQ ID NO: 4901 - protein, 94 aa, Homo sapiens
DIQMTQSPSSLSASVGDRVTITCQASQDISNYLNWYQQKPGKAPKLLIYDASDLETGVPSRFSGSGSGTDFTFTINSLQPEDIATYYCQQYDNL

SEQ ID NO: 4902 - protein, 106 aa, Homo sapiens
DIQMTQSPSSLSASVGDRVTITCQASQDISNYLNWYQQKPGKAPKLLIYDASDLETGVPSRFSGSGSGTDFTFTINSLQPEDIATYYCQQYDNLSTFGQGTRLEIK

SEQ ID NO: 4903 - protein, 94 aa, Homo sapiens
DIQMTQSPSSLSASVGDRVTITCQASQDISNYLNWYQQKPGKAPKLLIYDASNLETGVPSRFSGSGSGTDFTFTISSLQPEDIATYYCQQYDNL

SEQ ID NO: 4904 - protein, 108 aa, Homo sapiens
DIQMTQSPSSLSASVGDRVTITCQASQDISNYLNWYQQKPGKAPKLLIYDASNLETGVPSRFSGSGSGTDFTFTISSLQPEDIATYYCQQYDNLLSLTFGGGTKVEIK

SEQ ID NO: 4905 - protein, 95 aa, Homo sapiens
DIQMTQSPSSLSASVGDRVTITCQASQDISNYLNWYQQKPGKAPKLLIYDASNLETGVPSRFSGSGSGTDFTFTISSLQPEDIATYYCQQYDNLP

SEQ ID NO: 4906 - protein, 106 aa, Homo sapiens
DIQMTQSPSSLSASVGDRVTITCQASQDISNYLNWYQQKPGKAPKLLIYDASNLETGVPSRFSGSGSGTDFTFTISSLQPEDIATYYCQQYDNLPLFGGGTKVEIK

SEQ ID NO: 4907 - protein, 107 aa, Homo sapiens
DIQMTQSPSSLSASVGDRVTITCQASQDISNYLNWYQQKPGKAPKLLIYDASNLETGVPSRFSGSGSGTDFTFTISSLQPEDIATYYCQQYDNLPLTFGGGTKVEIK

SEQ ID NO: 4908 - protein, 96 aa, Homo sapiens
DIQMTQSPSSLSASVGDRVTITCQASQDISNYLNWYQQKPGKAPKLLIYDASNLETGVPSRFSGSGSGTDFTFTISSLQPEDIATYYCQQYDNLPP

SEQ ID NO: 4909 - protein, 107 aa, Homo sapiens
DIQMTQSPSSLSASVGDRVTITCQASQDISNYLNWYQQKPGKAPKLLIYDASNLETGVPSRFSGSGSGTDFTFTISSLQPEDIATYYCQQYDNLPPTFGPGTKVDIK

SEQ ID NO: 4910 - protein, 107 aa, Homo sapiens
DIQMTQSPSSLSASVGDRVTITCQASQDISNYLNWYQQKPGKAPKLLIYDASNLETGVPSRFSGSGSGTDFTFTISSLQPEDIATYYCQQYDNLPRLFGGGTKVEIK

SEQ ID NO: 4911 - protein, 107 aa, Homo sapiens
DIQMTQSPSSLSASVGDRVTITCQASQDISNYLNWYQQKPGKAPKLLIYDASNLETGVPSRFSGSGSGTDFTFTISSLQPEDIATYYCQQYDNLPRTFGQGTKVEIK

SEQ ID NO: 4912 - protein, 107 aa, Homo sapiens
DIQMTQSPSSLSASVGDRVTITCQASQDISNYLNWYQQKPGKAPKLLIYDASNLETGVPSRFSGSGSGTDFTFTISSLQPEDIATYYCQQYDNLPVTFGQGTRLEIK

SEQ ID NO: 4913 - protein, 107 aa, Homo sapiens
DIQMTQSPSSLSASVGDRVTITCQASQDISNYLNWYQQKPGKAPKLLIYDASNLETGVPSRFSGSGSGTDFTFTISSLQPEDIATYYCQQYDNLPYTFGQGTKLEIK

SEQ ID NO: 4914 - protein, 95 aa, Homo sapiens
DIQMTQSPSSLSASVGDRVTITCQASQDISNYLNWYQQKPGKAPKVLIYDASSLETGVPSRFSGSGSGTHFTFTISSLQPEDIATYFCQQYANLP

SEQ ID NO: 4915 - protein, 106 aa, Homo sapiens
DIQMTQSPSSLSASVGDRVTITCQASQDISNYLNWYQQKPGKAPKVLIYDASSLETGVPSRFSGSGSGTHFTFTISSLQPEDIATYFCQQYANLPLTFGAGTRVEI

SEQ ID NO: 4916 - protein, 94 aa, Homo sapiens
DIQMTQSPSSLSASVGDRVTITCQASQDISNYLNWYQQKPGKAPQLLIYDASNLETGVPSRFSGSGSGTYFTFTISSLQPEDFATYYCQQYDNL

SEQ ID NO: 4917 - protein, 108 aa, Homo sapiens
DIQMTQSPSSLSASVGDRVTITCQASQDISNYLNWYQQKPGKAPQLLIYDASNLETGVPSRFSGSGSGTYFTFTISSLQPEDFATYYCQQYDNLLSITFGQGTRLEFK

SEQ ID NO: 4918 - protein, 95 aa, Homo sapiens
DIQMTQSPSSLSASVGDRVTITCRAGQSIIRYLNWYQKKAGEAPKLLIYGASSLQSGVPSRFSGSGSGTDFTLTINSLQPEDFATYYCQQSYNAP

SEQ ID NO: 4919 - protein, 107 aa, Homo sapiens
DIQMTQSPSSLSASVGDRVTITCRAGQSIIRYLNWYQKKAGEAPKLLIYGASSLQSGVPSRFSGSGSGTDFTLTINSLQPEDFATYYCQQSYNAPYTFGQGTKLEIK

SEQ ID NO: 4920 - protein, 95 aa, Homo sapiens
DIQMTQSPSSLSASVGDRVTITCRAGQSIISYLNWYQQKPGKAPKLLIYAASSLQGGVPSRFSGSGSGTDFTLTISSLQAEDFATYYCQQSYNTP

SEQ ID NO: 4921 - protein, 107 aa, Homo sapiens
DIQMTQSPSSLSASVGDRVTITCRAGQSIISYLNWYQQKPGKAPKLLIYAASSLQGGVPSRFSGSGSGTDFTLTISSLQAEDFATYYCQQSYNTPYTFGQGTNLEIK

SEQ ID NO: 4922 - protein, 95 aa, Homo sapiens
DIQMTQSPSSLSASVGDRVTITCRAGQSISSYLNWYQQKPGKAPKLLIYAASNLQSGVPSRFSGSGSGTDFTLTISSLQPEDFATYYCQQSYNTP

SEQ ID NO: 4923 - protein, 107 aa, Homo sapiens
DIQMTQSPSSLSASVGDRVTITCRAGQSISSYLNWYQQKPGKAPKLLIYAASNLQSGVPSRFSGSGSGTDFTLTISSLQPEDFATYYCQQSYNTPITFGQGTRLEIK

SEQ ID NO: 4924 - protein, 95 aa, Homo sapiens
DIQMTQSPSSLSASVGDRVTITCRASETINSYLNWYQQKPGKAPSLLIYAASTLESGVPSRFSGSGSGTDFTLTISSLQPEDFATYYCQQTYNTP

SEQ ID NO: 4925 - protein, 107 aa, Homo sapiens
DIQMTQSPSSLSASVGDRVTITCRASETINSYLNWYQQKPGKAPSLLIYAASTLESGVPSRFSGSGSGTDFTLTISSLQPEDFATYYCQQTYNTPTTFGQGTRLEIK

SEQ ID NO: 4926 - protein, 95 aa, Homo sapiens
DIQMTQSPSSLSASVGDRVTITCRASHGINNLLAWYQQKPGNVPKLLIYDASILESGVPSRFSGSGSGTDFTLTISSLQPEDFATYFCQEYNIAP

SEQ ID NO: 4927 - protein, 107 aa, Homo sapiens
DIQMTQSPSSLSASVGDRVTITCRASHGINNLLAWYQQKPGNVPKLLIYDASILESGVPSRFSGSGSGTDFTLTISSLQPEDFATYFCQEYNIAPWTFGQGTKVEVK

SEQ ID NO: 4928 - protein, 95 aa, Homo sapiens
DIQMTQSPSSLSASVGDRVTITCRASQAIKTHLAWFQQKPGKAPKSLIYAASTLQSGVPSKFSGSGSGTDFTLTIYNLQPEDFATYYCQQYQMYP

SEQ ID NO: 4929 - protein, 106 aa, Homo sapiens
DIQMTQSPSSLSASVGDRVTITCRASQAIKTHLAWFQQKPGKAPKSLIYAASTLQSGVPSKFSGSGSGTDFTLTIYNLQPEDFATYYCQQYQMYPVTFGEGTKVEI

SEQ ID NO: 4930 - protein, 94 aa, Homo sapiens
DIQMTQSPSSLSASVGDRVTITCRASQDIRDYVAWYQQKPGKAPRLLIFATSTLQSGVPSRFSGNKSGPDFTLTISSLQPEDVAIYYCQQYNSV

SEQ ID NO: 4931 - protein, 108 aa, Homo sapiens
DIQMTQSPSSLSASVGDRVTITCRASQDIRDYVAWYQQKPGKAPRLLIFATSTLQSGVPSRFSGNKSGPDFTLTISSLQPEDVAIYYCQQYNSVLGATFGPGTKVDIK

SEQ ID NO: 4932 - protein, 94 aa, Homo sapiens
DIQMTQSPSSLSASVGDRVTITCRASQDIRNDLGWYQQKPGKAPKRLIYGASSLESGVPSRFSGSGSGTEFTLTVSSLQPEDVATYYCLQYNTY

SEQ ID NO: 4933 - protein, 108 aa, Homo sapiens
DIQMTQSPSSLSASVGDRVTITCRASQDIRNDLGWYQQKPGKAPKRLIYGASSLESGVPSRFSGSGSGTEFTLTVSSLQPEDVATYYCLQYNTYHMYTFGQGTKVEIK

SEQ ID NO: 4934 - protein, 95 aa, Homo sapiens
DIQMTQSPSSLSASVGDRVTITCRASQDIRQYLAWFQQKPGKAPKSLIYAASTLQSGVPSKFSGSGSGTDFTLTISSLQPEDVATYYCQRYNSYP

SEQ ID NO: 4935 - protein, 107 aa, Homo sapiens
DIQMTQSPSSLSASVGDRVTITCRASQDIRQYLAWFQQKPGKAPKSLIYAASTLQSGVPSKFSGSGSGTDFTLTISSLQPEDVATYYCQRYNSYPLGFGGGTKVEIK

SEQ ID NO: 4936 - protein, 95 aa, Homo sapiens
DIQMTQSPSSLSASVGDRVTITCRASQDISNNLAWFQQKPGKAPKSLIYAASRLQSGVPSKFSGSGSGTDFTLIISSLQPEDFATYYCQQYNSYP

SEQ ID NO: 4937 - protein, 107 aa, Homo sapiens
DIQMTQSPSSLSASVGDRVTITCRASQDISNNLAWFQQKPGKAPKSLIYAASRLQSGVPSKFSGSGSGTDFTLIISSLQPEDFATYYCQQYNSYPVTFGGGTKVEIK

SEQ ID NO: 4938 - protein, 93 aa, Homo sapiens
DIQMTQSPSSLSASVGDRVTITCRASQDISNYLAWYQQKPGKVPKVLIYAASTLQSGVPSRFSGSGSGTDFTLTISSLQPEDVATYYCQKYNS

SEQ ID NO: 4939 - protein, 107 aa, Homo sapiens
DIQMTQSPSSLSASVGDRVTITCRASQDISNYLAWYQQKPGKVPKVLIYAASTLQSGVPSRFSGSGSGTDFTLTISSLQPEDVATYYCQKYNSDSGTFGQGTKVEIK

SEQ ID NO: 4940 - protein, 95 aa, Homo sapiens
DIQMTQSPSSLSASVGDRVTITCRASQGIRDDLGWYQQKPGKAPKRLIWAASSLQSGVPSRFSGSGSGTEFTLTISSLQPEDFATYYCLQHYNYP

SEQ ID NO: 4941 - protein, 106 aa, Homo sapiens
DIQMTQSPSSLSASVGDRVTITCRASQGIRDDLGWYQQKPGKAPKRLIWAASSLQSGVPSRFSGSGSGTEFTLTISSLQPEDFATYYCLQHYNYPLTFGGGTKVEI

SEQ ID NO: 4942 - protein, 95 aa, Homo sapiens
DIQMTQSPSSLSASVGDRVTITCRASQGIRNDLGWFQQKPGKAPKRLIYAASSLQSGVPSRFSGSGSGTDFTLTISSLQPEDFATYYCLQHNSYP

SEQ ID NO: 4943 - protein, 107 aa, Homo sapiens
DIQMTQSPSSLSASVGDRVTITCRASQGIRNDLGWFQQKPGKAPKRLIYAASSLQSGVPSRFSGSGSGTDFTLTISSLQPEDFATYYCLQHNSYPRTFGQGTKVEIK

SEQ ID NO: 4944 - protein, 95 aa, Homo sapiens
DIQMTQSPSSLSASVGDRVTITCRASQGIRNDLGWYQQKPGKAPKRLIYAASSLQSGVPSRFSGSGSGTEFTLTISSLQPEDFATYYCLQHNSYP

SEQ ID NO: 4945 - protein, 107 aa, Homo sapiens
DIQMTQSPSSLSASVGDRVTITCRASQGIRNDLGWYQQKPGKAPKRLIYAASSLQSGVPSRFSGSGSGTEFTLTISSLQPEDFATYYCLQHNSYPRTFGQGTKVEIK

SEQ ID NO: 4946 - protein, 94 aa, Homo sapiens
DIQMTQSPSSLSASVGDRVTITCRASQGIRNDLGWYQQKPGKAPKRLIYAASSLQSGVPSRFSGSGSGTEFTLTISSLQPEDFATYYCLQHTTY

SEQ ID NO: 4947 - protein, 107 aa, Homo sapiens
DIQMTQSPSSLSASVGDRVTITCRASQGIRNDLGWYQQKPGKAPKRLIYAASSLQSGVPSRFSGSGSGTEFTLTISSLQPEDFATYYCLQHTTYLWTFGQGTKVEIK

SEQ ID NO: 4948 - protein, 95 aa, Homo sapiens
DIQMTQSPSSLSASVGDRVTITCRASQGIRNDLGWYQQKPGKAPKRLIYAASTLQSGVPSRFSGSGSGTEFTLTISSLQPEDFATYYCLQHNSYP

SEQ ID NO: 4949 - protein, 107 aa, Homo sapiens
DIQMTQSPSSLSASVGDRVTITCRASQGIRNDLGWYQQKPGKAPKRLIYAASTLQSGVPSRFSGSGSGTEFTLTISSLQPEDFATYYCLQHNSYPFTFGPGTKVDIK

SEQ ID NO: 4950 - protein, 95 aa, Homo sapiens
DIQMTQSPSSLSASVGDRVTITCRASQGIRNDLGWYQQKPGKAPKRLIYAVSSLQSGVPSRFSGSGSGTEFTLTISSLQPEDFATYYCLQHNSYP

SEQ ID NO: 4951 - protein, 107 aa, Homo sapiens
DIQMTQSPSSLSASVGDRVTITCRASQGIRNDLGWYQQKPGKAPKRLIYAVSSLQSGVPSRFSGSGSGTEFTLTISSLQPEDFATYYCLQHNSYPWAFGQGTKVEIK

SEQ ID NO: 4952 - protein, 95 aa, Homo sapiens
DIQMTQSPSSLSASVGDRVTITCRASQGIRSDLGWYQQKPGKAPKRLIYAASSLYSGVPSRFSGSGSGTEFTLTISSLQPEDFATYYCLQHFNYP

SEQ ID NO: 4953 - protein, 107 aa, Homo sapiens
DIQMTQSPSSLSASVGDRVTITCRASQGIRSDLGWYQQKPGKAPKRLIYAASSLYSGVPSRFSGSGSGTEFTLTISSLQPEDFATYYCLQHFNYPFTFGGGTKVEIK

SEQ ID NO: 4954 - protein, 96 aa, Homo sapiens
DIQMTQSPSSLSASVGDRVTITCRASQGISNFLAWYQQKPGKVPKLLIYAASTLQSGVPSRFSGSGSGTDFTLTISSLQPEDVATYYCQKYNSAPP

SEQ ID NO: 4955 - protein, 108 aa, Homo sapiens
DIQMTQSPSSLSASVGDRVTITCRASQGISNFLAWYQQKPGKVPKLLIYAASTLQSGVPSRFSGSGSGTDFTLTISSLQPEDVATYYCQKYNSAPPLTFGGGTKVEIK

SEQ ID NO: 4956 - protein, 95 aa, Homo sapiens
DIQMTQSPSSLSASVGDRVTITCRASQGISNNLAWYQQKPGNIPKLLIYAASTLQSGVPSRFSGSGSGTDFTLTITSLQPEDVASYYCQRYNSAP

SEQ ID NO: 4957 - protein, 107 aa, Homo sapiens
DIQMTQSPSSLSASVGDRVTITCRASQGISNNLAWYQQKPGNIPKLLIYAASTLQSGVPSRFSGSGSGTDFTLTITSLQPEDVASYYCQRYNSAPATFGQGTKVEIK

SEQ ID NO: 4958 - protein, 95 aa, Homo sapiens
DIQMTQSPSSLSASVGDRVTITCRASQGISNSLAWFQQKPGKAPKSLIYDASSLQSGVPSKFSGSGSGTDFTLTISSLQPEDFATYYCQQYNSYP

SEQ ID NO: 4959 - protein, 107 aa, Homo sapiens
DIQMTQSPSSLSASVGDRVTITCRASQGISNSLAWFQQKPGKAPKSLIYDASSLQSGVPSKFSGSGSGTDFTLTISSLQPEDFATYYCQQYNSYPLTFGGGTKVDIK

SEQ ID NO: 4960 - protein, 95 aa, Homo sapiens
DIQMTQSPSSLSASVGDRVTITCRASQGISNSLAWYQQKPGKAPKLLLYAASRLESGVPSRFSGSGSGTDYTLTISSLQPEDFATYYCQQYYSTP

SEQ ID NO: 4961 - protein, 106 aa, Homo sapiens
DIQMTQSPSSLSASVGDRVTITCRASQGISNSLAWYQQKPGKAPKLLLYAASRLESGVPSRFSGSGSGTDYTLTISSLQPEDFATYYCQQYYSTPTFGQGTKVEIK

SEQ ID NO: 4962 - protein, 95 aa, Homo sapiens
DIQMTQSPSSLSASVGDRVTITCRASQGISNSLAWYQQKPGKVPKLLIYAASTLQSGVPSRFSGGASGTDFTLTISSLQPEDVATYYCQKYNSAP

SEQ ID NO: 4963 - protein, 106 aa, Homo sapiens
DIQMTQSPSSLSASVGDRVTITCRASQGISNSLAWYQQKPGKVPKLLIYAASTLQSGVPSRFSGGASGTDFTLTISSLQPEDVATYYCQKYNSAPLTFGPGTKVDI

SEQ ID NO: 4964 - protein, 96 aa, Homo sapiens
DIQMTQSPSSLSASVGDRVTITCRASQGISNSLVWYQQKPGKAPKLLLSAASSLESGVPSRFSGSGSGTDYTLTISNLQPEDFATYYCQQYYNTPP

SEQ ID NO: 4965 - protein, 108 aa, Homo sapiens
DIQMTQSPSSLSASVGDRVTITCRASQGISNSLVWYQQKPGKAPKLLLSAASSLESGVPSRFSGSGSGTDYTLTISNLQPEDFATYYCQQYYNTPPSTFGQGTKLEIK

SEQ ID NO: 4966 - protein, 96 aa, Homo sapiens
DIQMTQSPSSLSASVGDRVTITCRASQGISNYGVAWYQQKPGKVPKLLIYAASTLQSGVPSRFSGSGSGTDFILTISSLQPEDVATYYCQKYDGAP

SEQ ID NO: 4967 - protein, 107 aa, Homo sapiens
DIQMTQSPSSLSASVGDRVTITCRASQGISNYGVAWYQQKPGKVPKLLIYAASTLQSGVPSRFSGSGSGTDFILTISSLQPEDVATYYCQKYDGAPWTFGQGTKVEI

SEQ ID NO: 4968 - protein, 95 aa, Homo sapiens
DIQMTQSPSSLSASVGDRVTITCRASQGISNYLAWFQQKPGKAPKSLIFAASTFESGVPSRFSGSGSGTDFTLTISSLQPEDFATYYCQQYNSYP

SEQ ID NO: 4969 - protein, 107 aa, Homo sapiens
DIQMTQSPSSLSASVGDRVTITCRASQGISNYLAWFQQKPGKAPKSLIFAASTFESGVPSRFSGSGSGTDFTLTISSLQPEDFATYYCQQYNSYPLTFGGGTKVEIK

SEQ ID NO: 4970 - protein, 95 aa, Homo sapiens
DIQMTQSPSSLSASVGDRVTITCRASQGISNYLAWFQQKPGKAPKSLIYAASSLQSGVPSKFSGSGSGTDFTLTISSLQPEDFATYYCQQYNRYP

SEQ ID NO: 4971 - protein, 107 aa, Homo sapiens
DIQMTQSPSSLSASVGDRVTITCRASQGISNYLAWFQQKPGKAPKSLIYAASSLQSGVPSKFSGSGSGTDFTLTISSLQPEDFATYYCQQYNRYPLTFGGGTKVEIK

SEQ ID NO: 4972 - protein, 95 aa, Homo sapiens
DIQMTQSPSSLSASVGDRVTITCRASQGISNYLAWFQQKPGKAPKSLIYAASSLQSGVPSKFSGSGSGTDFTLTISSLQPEDFATYYCQQYNSYP

SEQ ID NO: 4973 - protein, 107 aa, Homo sapiens
DIQMTQSPSSLSASVGDRVTITCRASQGISNYLAWFQQKPGKAPKSLIYAASSLQSGVPSKFSGSGSGTDFTLTISSLQPEDFATYYCQQYNSYPQTFGGGTKVEIK

SEQ ID NO: 4974 - protein, 107 aa, Homo sapiens
DIQMTQSPSSLSASVGDRVTITCRASQGISNYLAWFQQKPGKAPKSLIYAASSLQSGVPSKFSGSGSGTDFTLTISSLQPEDFATYYCQQYNSYPRTFGGGTKVEIK

SEQ ID NO: 4975 - protein, 95 aa, Homo sapiens
DIQMTQSPSSLSASVGDRVTITCRASQGISNYLAWFQQKPGKAPKSLIYGASSLQSGVPSKFSGSGSGTDFTLTISNLQPEDFATYYCQQYNSYP

SEQ ID NO: 4976 - protein, 107 aa, Homo sapiens
DIQMTQSPSSLSASVGDRVTITCRASQGISNYLAWFQQKPGKAPKSLIYGASSLQSGVPSKFSGSGSGTDFTLTISNLQPEDFATYYCQQYNSYPYSFGQGTKLEIK

SEQ ID NO: 4977 - protein, 95 aa, Homo sapiens
DIQMTQSPSSLSASVGDRVTITCRASQGISNYLAWYQQKPGKVPKLLIYAASTLQSGVPSRFSGSGSGTDFTLTISSLQPEDVATYYCQKYNSAP

SEQ ID NO: 4978 - protein, 96 aa, Homo sapiens
DIQMTQSPSSLSASVGDRVTITCRASQGISNYLAWYQQKPGKVPKLLIYAASTLQSGVPSRFSGSGSGTDFTLTISSLQPEDVATYYCQKYNSAPP

SEQ ID NO: 4979 - protein, 109 aa, Homo sapiens
DIQMTQSPSSLSASVGDRVTITCRASQGISNYLAWYQQKPGKVPKLLIYAASTLQSGVPSRFSGSGSGTDFTLTISSLQPEDVATYYCQKYNSAPPGITFGQGTRLEIK

SEQ ID NO: 4980 - protein, 108 aa, Homo sapiens
DIQMTQSPSSLSASVGDRVTITCRASQGISNYLAWYQQKPGKVPKLLIYAASTLQSGVPSRFSGSGSGTDFTLTISSLQPEDVATYYCQKYNSAPPWTFGQGTKVEIK

SEQ ID NO: 4981 - protein, 107 aa, Homo sapiens
DIQMTQSPSSLSASVGDRVTITCRASQGISNYLAWYQQKPGKVPKLLIYAASTLQSGVPSRFSGSGSGTDFTLTISSLQPEDVATYYCQKYNSAPQTFGQGTKVEIK

SEQ ID NO: 4982 - protein, 95 aa, Homo sapiens
DIQMTQSPSSLSASVGDRVTITCRASQGISNYLAWYQQKPGKVPKLLIYGASTLQSGVTSRFSGSGSGTDFTLTISSLQPEDVATYYCQNYNNAP

SEQ ID NO: 4983 - protein, 109 aa, Homo sapiens
DIQMTQSPSSLSASVGDRVTITCRASQGISNYLAWYQQKPGKVPKLLIYGASTLQSGVTSRFSGSGSGTDFTLTISSLQPEDVATYYCQNYNNAPRVFTFGPGTKVDVK

SEQ ID NO: 4984 - protein, 95 aa, Homo sapiens
DIQMTQSPSSLSASVGDRVTITCRASQGITNYLAWYQQKPGKVPKLLIYAASTLQSGVPSRFSGSGSGTDFTLTISSLQPEDVATYYCQKYNSAP

SEQ ID NO: 4985 - protein, 107 aa, Homo sapiens
DIQMTQSPSSLSASVGDRVTITCRASQGITNYLAWYQQKPGKVPKLLIYAASTLQSGVPSRFSGSGSGTDFTLTISSLQPEDVATYYCQKYNSAPLTFGGGTKVEIK

SEQ ID NO: 4986 - protein, 95 aa, Homo sapiens
DIQMTQSPSSLSASVGDRVTITCRASQGIVNYLAWFQQTPGKAPKSLIYAASNLVSGVPSRFSGSGSGTDFTLTISSLQPEDFATYYCQQYISYP

SEQ ID NO: 4987 - protein, 107 aa, Homo sapiens
DIQMTQSPSSLSASVGDRVTITCRASQGIVNYLAWFQQTPGKAPKSLIYAASNLVSGVPSRFSGSGSGTDFTLTISSLQPEDFATYYCQQYISYPLTFGGGTKVDIK

SEQ ID NO: 4988 - protein, 95 aa, Homo sapiens
DIQMTQSPSSLSASVGDRVTITCRASQGLSNSLAWYQQKLGKAPKLLLSAASRLESGVPSRFSGSRSGTDYTLTISSLQPEDFATYYCQQFYSPP

SEQ ID NO: 4989 - protein, 107 aa, Homo sapiens
DIQMTQSPSSLSASVGDRVTITCRASQGLSNSLAWYQQKLGKAPKLLLSAASRLESGVPSRFSGSRSGTDYTLTISSLQPEDFATYYCQQFYSPPWTFGQGTKVEIK

SEQ ID NO: 4990 - protein, 91 aa, Homo sapiens
DIQMTQSPSSLSASVGDRVTITCRASQNINKDLNWYQQKPGKAPKFLVYLVSNLQSGVPSRFSGSGSGTDFTLTISSLQPEDFATYYCQQS

SEQ ID NO: 4991 - protein, 106 aa, Homo sapiens
DIQMTQSPSSLSASVGDRVTITCRASQNINKDLNWYQQKPGKAPKFLVYLVSNLQSGVPSRFSGSGSGTDFTLTISSLQPEDFATYYCQQSFAFPITFGGGTKVEI

SEQ ID NO: 4992 - protein, 95 aa, Homo sapiens
DIQMTQSPSSLSASVGDRVTITCRASQNINRDLNWYQQKPGEAPKFLVYLVSNLQSGVPSRFSGSGSGTDFTLTISSLQPEDFATYYCQQSFGFP

SEQ ID NO: 4993 - protein, 106 aa, Homo sapiens
DIQMTQSPSSLSASVGDRVTITCRASQNINRDLNWYQQKPGEAPKFLVYLVSNLQSGVPSRFSGSGSGTDFTLTISSLQPEDFATYYCQQSFGFPITFGGGTKVEI

SEQ ID NO: 4994 - protein, 91 aa, Homo sapiens
DIQMTQSPSSLSASVGDRVTITCRASQNINRDLNWYQQKPGKAPKFLVYLGSNLQGGVPSRFSGSGSGTDFTLTISSLQPEDFATYYCQQS

SEQ ID NO: 4995 - protein, 106 aa, Homo sapiens
DIQMTQSPSSLSASVGDRVTITCRASQNINRDLNWYQQKPGKAPKFLVYLGSNLQGGVPSRFSGSGSGTDFTLTISSLQPEDFATYYCQQSFAFPITFGGGTKVEI

SEQ ID NO: 4996 - protein, 91 aa, Homo sapiens
DIQMTQSPSSLSASVGDRVTITCRASQNINSDLNWYQQKPGKAPKFLVYLVSNLQSGVPSRFSGSGSGTDFTLTISSLQPEDFATYYCQQS

SEQ ID NO: 4997 - protein, 106 aa, Homo sapiens
DIQMTQSPSSLSASVGDRVTITCRASQNINSDLNWYQQKPGKAPKFLVYLVSNLQSGVPSRFSGSGSGTDFTLTISSLQPEDFATYYCQQSFAFPITFGGGTKVEI

SEQ ID NO: 4998 - protein, 95 aa, Homo sapiens
DIQMTQSPSSLSASVGDRVTITCRASQNINSDLNWYQQKPGKAPKFLVYLVSNLQSGVPSRFSGSGSGTDFTLTISSLQPEDFATYYCQQSFGFP

SEQ ID NO: 4999 - protein, 106 aa, Homo sapiens
DIQMTQSPSSLSASVGDRVTITCRASQNINSDLNWYQQKPGKAPKFLVYLVSNLQSGVPSRFSGSGSGTDFTLTISSLQPEDFATYYCQQSFGFPITFGGGTKVEI

SEQ ID NO: 5000 - protein, 95 aa, Homo sapiens
DIQMTQSPSSLSASVGDRVTITCRASQNIRKFLNWYQQKPGKAPNLLIYAASSLHSGVPSRFSGSGSGTDFTLTISSLQPEDFATYYCQQSYDIP

SEQ ID NO: 5001 - protein, 107 aa, Homo sapiens
DIQMTQSPSSLSASVGDRVTITCRASQNIRKFLNWYQQKPGKAPNLLIYAASSLHSGVPSRFSGSGSGTDFTLTISSLQPEDFATYYCQQSYDIPQTFGQGTKLEIK

SEQ ID NO: 5002 - protein, 96 aa, Homo sapiens
DIQMTQSPSSLSASVGDRVTITCRASQNIRNYLNWYQQKPGKAPNLLIYAASTLHSGVPSRFSGSGSGTDFTLTINSLQREDFATYYCQQSYHTPP

SEQ ID NO: 5003 - protein, 108 aa, Homo sapiens
DIQMTQSPSSLSASVGDRVTITCRASQNIRNYLNWYQQKPGKAPNLLIYAASTLHSGVPSRFSGSGSGTDFTLTINSLQREDFATYYCQQSYHTPPYTFGQGTKLEIK

SEQ ID NO: 5004 - protein, 92 aa, Homo sapiens
DIQMTQSPSSLSASVGDRVTITCRASQNIRSYLNWYQQKPGKAPKLLIYAASSVESGVPSRFTGSGSGTDFTLTISSLQPEDFATYFCHQSY

SEQ ID NO: 5005 - protein, 106 aa, Homo sapiens
DIQMTQSPSSLSASVGDRVTITCRASQNIRSYLNWYQQKPGKAPKLLIYAASSVESGVPSRFTGSGSGTDFTLTISSLQPEDFATYFCHQSYDRPQTFGQGTKLQI

SEQ ID NO: 5006 - protein, 94 aa, Homo sapiens
DIQMTQSPSSLSASVGDRVTITCRASQNISNYLNWYQRKPGKAPKLLIYGASSLQSGVPSRFSGSGSGTDFTLTISSLQPEDFAIYYCQQSYST

SEQ ID NO: 5007 - protein, 107 aa, Homo sapiens
DIQMTQSPSSLSASVGDRVTITCRASQNISNYLNWYQRKPGKAPKLLIYGASSLQSGVPSRFSGSGSGTDFTLTISSLQPEDFAIYYCQQSYSTQLTFGGGAEVEIK

SEQ ID NO: 5008 - protein, 95 aa, Homo sapiens
DIQMTQSPSSLSASVGDRVTITCRASQNISSYLNWYQQKPGKAPKLLIYAASNLQSGVPSRFSGSGSGTDFTVTISSLQPEDFATYYCQQTYTNP

SEQ ID NO: 5009 - protein, 108 aa, Homo sapiens
DIQMTQSPSSLSASVGDRVTITCRASQNISSYLNWYQQKPGKAPKLLIYAASNLQSGVPSRFSGSGSGTDFTVTISSLQPEDFATYYCQQTYTNPRVTFGPGTTVDLK

SEQ ID NO: 5010 - protein, 95 aa, Homo sapiens
DIQMTQSPSSLSASVGDRVTITCRASQNIYRYVNWYQQKPGEAPNLLIHPASSFQSGVPSRFSASGSGTDFTLTISSLQPADFADYFCQQSYTTP

SEQ ID NO: 5011 - protein, 107 aa, Homo sapiens
DIQMTQSPSSLSASVGDRVTITCRASQNIYRYVNWYQQKPGEAPNLLIHPASSFQSGVPSRFSASGSGTDFTLTISSLQPADFADYFCQQSYTTPYTFGQGTKLEIK

SEQ ID NO: 5012 - protein, 95 aa, Homo sapiens
DIQMTQSPSSLSASVGDRVTITCRASQNVGNFLNWYQQKQEKAPKLLIYAASNLQSGVPSRFSGSGSGTDFTLTISSLQPEDFATYYCQQSYITP

SEQ ID NO: 5013 - protein, 107 aa, Homo sapiens
DIQMTQSPSSLSASVGDRVTITCRASQNVGNFLNWYQQKQEKAPKLLIYAASNLQSGVPSRFSGSGSGTDFTLTISSLQPEDFATYYCQQSYITPYSFGPGTKMDIK

SEQ ID NO: 5014 - protein, 92 aa, Homo sapiens
DIQMTQSPSSLSASVGDRVTITCRASQRIGNSLNWYQHQPGKAPKFLIYAASNLQSGVPLRFSGSGSGTDFTLTISSLQPEDVASYYCQHNY

SEQ ID NO: 5015 - protein, 103 aa, Homo sapiens
DIQMTQSPSSLSASVGDRVTITCRASQRIGNSLNWYQHQPGKAPKFLIYAASNLQSGVPLRFSGSGSGTDFTLTISSLQPEDVASYYCQHNYTFGQGTKLEIK

SEQ ID NO: 5016 - protein, 95 aa, Homo sapiens
DIQMTQSPSSLSASVGDRVTITCRASQRISGYLNWYQQRPGKAPKLLIYAASNLQSGVSSRFSGSRSGTDFTLTIINLQPEDSATYYCQQSYSPP

SEQ ID NO: 5017 - protein, 107 aa, Homo sapiens
DIQMTQSPSSLSASVGDRVTITCRASQRISGYLNWYQQRPGKAPKLLIYAASNLQSGVSSRFSGSRSGTDFTLTIINLQPEDSATYYCQQSYSPPLTFGGGTRVEIK

SEQ ID NO: 5018 - protein, 93 aa, Homo sapiens
DIQMTQSPSSLSASVGDRVTITCRASQRISSYLNWYQQKPGKAPKLLIYAASSLQSGVPSRFSGSRSGTDFTLTISSLQPEDFATYYCQQSYS

SEQ ID NO: 5019 - protein, 107 aa, Homo sapiens
DIQMTQSPSSLSASVGDRVTITCRASQRISSYLNWYQQKPGKAPKLLIYAASSLQSGVPSRFSGSRSGTDFTLTISSLQPEDFATYYCQQSYSKLWTFGQGTRVEIK

SEQ ID NO: 5020 - protein, 95 aa, Homo sapiens
DIQMTQSPSSLSASVGDRVTITCRASQSIGTNLNWYQQKPGKAPKFLIYAASNLQSGVPSRFSGSGSGTDFTLTISSLQPEDFAMYYCQQSYITP

SEQ ID NO: 5021 - protein, 107 aa, Homo sapiens
DIQMTQSPSSLSASVGDRVTITCRASQSIGTNLNWYQQKPGKAPKFLIYAASNLQSGVPSRFSGSGSGTDFTLTISSLQPEDFAMYYCQQSYITPRTFGQGTKVEIK

SEQ ID NO: 5022 - protein, 95 aa, Homo sapiens
DIQMTQSPSSLSASVGDRVTITCRASQSIGTNLNWYQQKPGKAPKFLIYAASNLQSGVPSTFSGSGSGTDFTLTISSLQPEDFAMYYCQQSYSFP

SEQ ID NO: 5023 - protein, 107 aa, Homo sapiens
DIQMTQSPSSLSASVGDRVTITCRASQSIGTNLNWYQQKPGKAPKFLIYAASNLQSGVPSTFSGSGSGTDFTLTISSLQPEDFAMYYCQQSYSFPTTFGQGTKVEIK

SEQ ID NO: 5024 - protein, 95 aa, Homo sapiens
DIQMTQSPSSLSASVGDRVTITCRASQSIITYLNWYQQTPGKAPKLMIYGASSLQSGVPSRFSGSGSGTDFTLTITSLQPEDFATYYCHQSYSTP

SEQ ID NO: 5025 - protein, 107 aa, Homo sapiens
DIQMTQSPSSLSASVGDRVTITCRASQSIITYLNWYQQTPGKAPKLMIYGASSLQSGVPSRFSGSGSGTDFTLTITSLQPEDFATYYCHQSYSTPQVFGQGTKVEIK

SEQ ID NO: 5026 - protein, 95 aa, Homo sapiens
DIQMTQSPSSLSASVGDRVTITCRASQSINNYLNWYHQKPGKAPKLLIYAASSLQSGVPSRFTGSGSGTDFTLTISSLQPEDFATYYCQQSYSTS

SEQ ID NO: 5027 - protein, 107 aa, Homo sapiens
DIQMTQSPSSLSASVGDRVTITCRASQSINNYLNWYHQKPGKAPKLLIYAASSLQSGVPSRFTGSGSGTDFTLTISSLQPEDFATYYCQQSYSTSRTFGQGTKVEIK

SEQ ID NO: 5028 - protein, 94 aa, Homo sapiens
DIQMTQSPSSLSASVGDRVTITCRASQSIRRYLNWYQQKSGKAPKLLIYAASSLQSGVPSRFSGSGSETDFTLTISSLQPEDFATYYCQQTFST

SEQ ID NO: 5029 - protein, 107 aa, Homo sapiens
DIQMTQSPSSLSASVGDRVTITCRASQSIRRYLNWYQQKSGKAPKLLIYAASSLQSGVPSRFSGSGSETDFTLTISSLQPEDFATYYCQQTFSTLVTFGAGTKVEIK

SEQ ID NO: 5030 - protein, 95 aa, Homo sapiens
DIQMTQSPSSLSASVGDRVTITCRASQSIRSYLNWYQQKPGKAPQLLIYVASSLQSGVPSRFSGSGSGTDFTLTISNLQPEDFATYYCQQSYSAP

SEQ ID NO: 5031 - protein, 108 aa, Homo sapiens
DIQMTQSPSSLSASVGDRVTITCRASQSIRSYLNWYQQKPGKAPQLLIYVASSLQSGVPSRFSGSGSGTDFTLTISNLQPEDFATYYCQQSYSAPSYTFGQGTKLEIK

SEQ ID NO: 5032 - protein, 95 aa, Homo sapiens
DIQMTQSPSSLSASVGDRVTITCRASQSIRTYLNWYQQKPGKAPKLLIYAASSLQSGVPSRFSGSGSGTDFTLTIGSLQPEDFATYYCQQSYSTP

SEQ ID NO: 5033 - protein, 107 aa, Homo sapiens
DIQMTQSPSSLSASVGDRVTITCRASQSIRTYLNWYQQKPGKAPKLLIYAASSLQSGVPSRFSGSGSGTDFTLTIGSLQPEDFATYYCQQSYSTPQTFGQGTKLEIK

SEQ ID NO: 5034 - protein, 95 aa, Homo sapiens
DIQMTQSPSSLSASVGDRVTITCRASQSIRTYLNWYQQKPGKAPKLLIYAASSLQSGVPSRFSGSGSGTDFTLTIGSLQPEDFATYYCQQSYTTP

SEQ ID NO: 5035 - protein, 107 aa, Homo sapiens
DIQMTQSPSSLSASVGDRVTITCRASQSIRTYLNWYQQKPGKAPKLLIYAASSLQSGVPSRFSGSGSGTDFTLTIGSLQPEDFATYYCQQSYTTPQTFGQGTKLEIK

SEQ ID NO: 5036 - protein, 95 aa, Homo sapiens
DIQMTQSPSSLSASVGDRVTITCRASQSIRTYLNWYQQKPGKAPKSLIYAASSLQSGVPSRFSGSGSGTEFNLTISSLEPEDFASYYCQESNSSP

SEQ ID NO: 5037 - protein, 107 aa, Homo sapiens
DIQMTQSPSSLSASVGDRVTITCRASQSIRTYLNWYQQKPGKAPKSLIYAASSLQSGVPSRFSGSGSGTEFNLTISSLEPEDFASYYCQESNSSPFTFGPGTKVDIK

SEQ ID NO: 5038 - protein, 95 aa, Homo sapiens
DIQMTQSPSSLSASVGDRVTITCRASQSISGYLNWYQQKPGKAPKLLIYAASTLQSGVPSRFSGSVSGTDFTLTISSLQPEDFATYYCQQSYSTP

SEQ ID NO: 5039 - protein, 107 aa, Homo sapiens
DIQMTQSPSSLSASVGDRVTITCRASQSISGYLNWYQQKPGKAPKLLIYAASTLQSGVPSRFSGSVSGTDFTLTISSLQPEDFATYYCQQSYSTPRTFGQGTKVEIK

SEQ ID NO: 5040 - protein, 95 aa, Homo sapiens
DIQMTQSPSSLSASVGDRVTITCRASQSISKYFNWYQQKPGKAPKLLIYAASSLHREVPSRFSGSGSGTDFNLTVSSLQPEDFATYYCQQSYKTP

SEQ ID NO: 5041 - protein, 107 aa, Homo sapiens
DIQMTQSPSSLSASVGDRVTITCRASQSISKYFNWYQQKPGKAPKLLIYAASSLHREVPSRFSGSGSGTDFNLTVSSLQPEDFATYYCQQSYKTPFTFGPGTKVDFK

SEQ ID NO: 5042 - protein, 96 aa, Homo sapiens
DIQMTQSPSSLSASVGDRVTITCRASQSISNDLNWYQQKPGKAPNLLIYGASSLQSGVPSRFSGSGSGTDFTLTISSLQPEDLATYYCQQSYSTPP

SEQ ID NO: 5043 - protein, 108 aa, Homo sapiens
DIQMTQSPSSLSASVGDRVTITCRASQSISNDLNWYQQKPGKAPNLLIYGASSLQSGVPSRFSGSGSGTDFTLTISSLQPEDLATYYCQQSYSTPPLTFGGGTKVEIK

SEQ ID NO: 5044 - protein, 96 aa, Homo sapiens
DIQMTQSPSSLSASVGDRVTITCRASQSISNYLSWFQQKPGKAPKLLIHAASSLQRGVPSRFSGSGSGTDFTLTISSLQREDFATYYCQQSYNTPP

SEQ ID NO: 5045 - protein, 108 aa, Homo sapiens
DIQMTQSPSSLSASVGDRVTITCRASQSISNYLSWFQQKPGKAPKLLIHAASSLQRGVPSRFSGSGSGTDFTLTISSLQREDFATYYCQQSYNTPPKTFGQGTKVEIK

SEQ ID NO: 5046 - protein, 95 aa, Homo sapiens
DIQMTQSPSSLSASVGDRVTITCRASQSISRYFSWFQQKPGKAPKLLIYAATSLQSGVPSRFSGSGSGTDFTLTISSLQPEDFATYYCQQTYSTP

SEQ ID NO: 5047 - protein, 106 aa, Homo sapiens
DIQMTQSPSSLSASVGDRVTITCRASQSISRYFSWFQQKPGKAPKLLIYAATSLQSGVPSRFSGSGSGTDFTLTISSLQPEDFATYYCQQTYSTPITFGPGTKVDL

SEQ ID NO: 5048 - protein, 95 aa, Homo sapiens
DIQMTQSPSSLSASVGDRVTITCRASQSISRYLSWYQQKPGKAPKLLIYAASSLQSGVPSRFSGSGSGTDFTLTISSLQPEDFATYYCHQSYNNP

SEQ ID NO: 5049 - protein, 106 aa, Homo sapiens
DIQMTQSPSSLSASVGDRVTITCRASQSISRYLSWYQQKPGKAPKLLIYAASSLQSGVPSRFSGSGSGTDFTLTISSLQPEDFATYYCHQSYNNPRSFGPGTKVDI

SEQ ID NO: 5050 - protein, 95 aa, Homo sapiens
DIQMTQSPSSLSASVGDRVTITCRASQSISRYLSWYQQKPGKAPKLLIYAASSLQSGVPSRFSGSGSGTDFTLTISSLQPEDFATYYCHQSYSNP

SEQ ID NO: 5051 - protein, 106 aa, Homo sapiens
DIQMTQSPSSLSASVGDRVTITCRASQSISRYLSWYQQKPGKAPKLLIYAASSLQSGVPSRFSGSGSGTDFTLTISSLQPEDFATYYCHQSYSNPRSFGPGTKVDI

SEQ ID NO: 5052 - protein, 95 aa, Homo sapiens
DIQMTQSPSSLSASVGDRVTITCRASQSISSNLNWYQLKPGKAPKFLVYAASNLQSGVPSRFSGSGSGTDFTLTISNLQPEDFATYYCQQSYSTP

SEQ ID NO: 5053 - protein, 107 aa, Homo sapiens
DIQMTQSPSSLSASVGDRVTITCRASQSISSNLNWYQLKPGKAPKFLVYAASNLQSGVPSRFSGSGSGTDFTLTISNLQPEDFATYYCQQSYSTPRTFGQGTKVEIK

SEQ ID NO: 5054 - protein, 95 aa, Homo sapiens
DIQMTQSPSSLSASVGDRVTITCRASQSISSNLNWYQQKPGKAPNLLISKASNLETGVPSRFSGSGSGTEFTLTISSLQPDDFATYYCQHYNSYS

SEQ ID NO: 5055 - protein, 107 aa, Homo sapiens
DIQMTQSPSSLSASVGDRVTITCRASQSISSNLNWYQQKPGKAPNLLISKASNLETGVPSRFSGSGSGTEFTLTISSLQPDDFATYYCQHYNSYSATFGQGTKVEIK

SEQ ID NO: 5056 - protein, 94 aa, Homo sapiens
DIQMTQSPSSLSASVGDRVTITCRASQSISSYLNWYQQKPGKAPKLLIYAASSLQSGVPSRFSGSGSGTDFTLTISSLQPEDFATYYCQQSYST

SEQ ID NO: 5057 - protein, 106 aa, Homo sapiens
DIQMTQSPSSLSASVGDRVTITCRASQSISSYLNWYQQKPGKAPKLLIYAASSLQSGVPSRFSGSGSGTDFTLTISSLQPEDFATYYCQQSYSTGAFGQGTKVEIK

SEQ ID NO: 5058 - protein, 95 aa, Homo sapiens
DIQMTQSPSSLSASVGDRVTITCRASQSISSYLNWYQQKPGKAPKLLIYAASSLQSGVPSRFSGSGSGTDFTLTISSLQPEDFATYYCQQSYSTP

SEQ ID NO: 5059 - protein, 107 aa, Homo sapiens
DIQMTQSPSSLSASVGDRVTITCRASQSISSYLNWYQQKPGKAPKLLIYAASSLQSGVPSRFSGSGSGTDFTLTISSLQPEDFATYYCQQSYSTPKTFGQGTKLEIK

SEQ ID NO: 5060 - protein, 96 aa, Homo sapiens
DIQMTQSPSSLSASVGDRVTITCRASQSISSYLNWYQQKPGKAPKLLIYAASSLQSGVPSRFSGSGSGTDFTLTISSLQPEDFATYYCQQSYSTPP

SEQ ID NO: 5061 - protein, 108 aa, Homo sapiens
DIQMTQSPSSLSASVGDRVTITCRASQSISSYLNWYQQKPGKAPKLLIYAASSLQSGVPSRFSGSGSGTDFTLTISSLQPEDFATYYCQQSYSTPPLTFGGGTKVEIK

SEQ ID NO: 5062 - protein, 108 aa, Homo sapiens
DIQMTQSPSSLSASVGDRVTITCRASQSISSYLNWYQQKPGKAPKLLIYAASSLQSGVPSRFSGSGSGTDFTLTISSLQPEDFATYYCQQSYSTPPWTFGQGTKVEIK

SEQ ID NO: 5063 - protein, 108 aa, Homo sapiens
DIQMTQSPSSLSASVGDRVTITCRASQSISSYLNWYQQKPGKAPKLLIYAASSLQSGVPSRFSGSGSGTDFTLTISSLQPEDFATYYCQQSYSTPPYTFGQGTKLEIK

SEQ ID NO: 5064 - protein, 107 aa, Homo sapiens
DIQMTQSPSSLSASVGDRVTITCRASQSISSYLNWYQQKPGKAPKLLIYAASSLQSGVPSRFSGSGSGTDFTLTISSLQPEDFATYYCQQSYSTPRTFGQGTKLEIK

SEQ ID NO: 5065 - protein, 107 aa, Homo sapiens
DIQMTQSPSSLSASVGDRVTITCRASQSISSYLNWYQQKPGKAPKLLIYAASSLQSGVPSRFSGSGSGTDFTLTISSLQPEDFATYYCQQSYSTPRTFGQGTKVEIK

SEQ ID NO: 5066 - protein, 108 aa, Homo sapiens
DIQMTQSPSSLSASVGDRVTITCRASQSISSYLNWYQQKPGKAPKLLIYAASSLQSGVPSRFSGSGSGTDFTLTISSLQPEDFATYYCQQSYSTPRVTFGQGTKLEIK

SEQ ID NO: 5067 - protein, 107 aa, Homo sapiens
DIQMTQSPSSLSASVGDRVTITCRASQSISSYLNWYQQKPGKAPKLLIYAASSLQSGVPSRFSGSGSGTDFTLTISSLQPEDFATYYCQQSYSTPSTFGQGTKVEIK

SEQ ID NO: 5068 - protein, 106 aa, Homo sapiens
DIQMTQSPSSLSASVGDRVTITCRASQSISSYLNWYQQKPGKAPKLLIYAASSLQSGVPSRFSGSGSGTDFTLTISSLQPEDFATYYCQQSYSTPTFGGGTKVEIK

SEQ ID NO: 5069 - protein, 107 aa, Homo sapiens
DIQMTQSPSSLSASVGDRVTITCRASQSISSYLNWYQQKPGKAPKLLIYAASSLQSGVPSRFSGSGSGTDFTLTISSLQPEDFATYYCQQSYSTPWTFGQGTKVEIK

SEQ ID NO: 5070 - protein, 95 aa, Homo sapiens
DIQMTQSPSSLSASVGDRVTITCRASQSISSYLNWYQQKPGKAPKLLIYGASNLESGVPSRFSGSGSGTQFSLTISSLQPEDFATYYCQQSYRTP

SEQ ID NO: 5071 - protein, 106 aa, Homo sapiens
DIQMTQSPSSLSASVGDRVTITCRASQSISSYLNWYQQKPGKAPKLLIYGASNLESGVPSRFSGSGSGTQFSLTISSLQPEDFATYYCQQSYRTPGFGPGTKVDIK

SEQ ID NO: 5072 - protein, 95 aa, Homo sapiens
DIQMTQSPSSLSASVGDRVTITCRASQSISSYLNWYQQKVGKAPKLLIYGASTLQSGVPSRISGSGSGTDFTLTISSLQPEDFATYYCQQSYSTP

SEQ ID NO: 5073 - protein, 107 aa, Homo sapiens
DIQMTQSPSSLSASVGDRVTITCRASQSISSYLNWYQQKVGKAPKLLIYGASTLQSGVPSRISGSGSGTDFTLTISSLQPEDFATYYCQQSYSTPQTFGQGTKVEIK

SEQ ID NO: 5074 - protein, 95 aa, Homo sapiens
DIQMTQSPSSLSASVGDRVTITCRASQSISTYLNWYQQKPGKAPKLLIYAASSLLSGVPSRFSGSGAGTDFTLTISSLQPEDFATYYCQQSYDTP

SEQ ID NO: 5075 - protein, 107 aa, Homo sapiens
DIQMTQSPSSLSASVGDRVTITCRASQSISTYLNWYQQKPGKAPKLLIYAASSLLSGVPSRFSGSGAGTDFTLTISSLQPEDFATYYCQQSYDTPRTFGQGTEVEIK

SEQ ID NO: 5076 - protein, 95 aa, Homo sapiens
DIQMTQSPSSLSASVGDRVTITCRASQSISTYLNWYQQKPGKAPKLLIYAASSLQLGVPSRFSGSGSGTDFTLTISSLQPEDFATYYCQQSYSTP

SEQ ID NO: 5077 - protein, 108 aa, Homo sapiens
DIQMTQSPSSLSASVGDRVTITCRASQSISTYLNWYQQKPGKAPKLLIYAASSLQLGVPSRFSGSGSGTDFTLTISSLQPEDFATYYCQQSYSTPRYTFGQGTKLEVK

SEQ ID NO: 5078 - protein, 96 aa, Homo sapiens
DIQMTQSPSSLSASVGDRVTITCRASQSISTYLSWFQQKAGKAPQLLIHAVSNLPRGVPSRFSGSGSGTDFTLTISSLQPEDFATYYCQQSHSTSP

SEQ ID NO: 5079 - protein, 108 aa, Homo sapiens
DIQMTQSPSSLSASVGDRVTITCRASQSISTYLSWFQQKAGKAPQLLIHAVSNLPRGVPSRFSGSGSGTDFTLTISSLQPEDFATYYCQQSHSTSPKTFGQGTKVEFK

SEQ ID NO: 5080 - protein, 95 aa, Homo sapiens
DIQMTQSPSSLSASVGDRVTITCRASQSISTYVSWYQQKPGQAPKLLIYAASNLQSRVPSRFSGSRSGTDFTLTISSLQPEDLATYYCQQSYTTP

SEQ ID NO: 5081 - protein, 107 aa, Homo sapiens
DIQMTQSPSSLSASVGDRVTITCRASQSISTYVSWYQQKPGQAPKLLIYAASNLQSRVPSRFSGSRSGTDFTLTISSLQPEDLATYYCQQSYTTPWTFGQGTKVEIK

SEQ ID NO: 5082 - protein, 93 aa, Homo sapiens
DIQMTQSPSSLSASVGDRVTITCRASQSITSHLNWYQQKPGKAPNLLIYSASSLQSGVPSRFSGSGSGTDFTLTISSLQPEDFATYYCQQSYS

SEQ ID NO: 5083 - protein, 107 aa, Homo sapiens
DIQMTQSPSSLSASVGDRVTITCRASQSITSHLNWYQQKPGKAPNLLIYSASSLQSGVPSRFSGSGSGTDFTLTISSLQPEDFATYYCQQSYSILFTFGPGTKVDIK

SEQ ID NO: 5084 - protein, 96 aa, Homo sapiens
DIQMTQSPSSLSASVGDRVTITCRASQSMSSYVNWYQQKPGKAPKLLIYRASNLQRDVPSRFSGSGSGTDFTLTISSLQPEDFATYYCQQSDSTPP

SEQ ID NO: 5085 - protein, 108 aa, Homo sapiens
DIQMTQSPSSLSASVGDRVTITCRASQSMSSYVNWYQQKPGKAPKLLIYRASNLQRDVPSRFSGSGSGTDFTLTISSLQPEDFATYYCQQSDSTPPKTFGQGTKVEIK

SEQ ID NO: 5086 - protein, 95 aa, Homo sapiens
DIQMTQSPSSLSASVGDRVTITCRASQSVISYLNWYQQKPGKAPKFLIHSASTFQSGAPSRFSASGSGTDFTLTISSLQPEDSATYYCQQSYSSP

SEQ ID NO: 5087 - protein, 107 aa, Homo sapiens
DIQMTQSPSSLSASVGDRVTITCRASQSVISYLNWYQQKPGKAPKFLIHSASTFQSGAPSRFSASGSGTDFTLTISSLQPEDSATYYCQQSYSSPWTFGQGTKVEIK

SEQ ID NO: 5088 - protein, 95 aa, Homo sapiens
DIQMTQSPSSLSASVGDRVTITCRASQTIGRNLNWYQQTPGKAPKLVIYATSNLQSGVPSRFSGSGSATEFTLTISSLQPEDVARYYCQQTYTTP

SEQ ID NO: 5089 - protein, 107 aa, Homo sapiens
DIQMTQSPSSLSASVGDRVTITCRASQTIGRNLNWYQQTPGKAPKLVIYATSNLQSGVPSRFSGSGSATEFTLTISSLQPEDVARYYCQQTYTTPLTFGGGTMVGIK

SEQ ID NO: 5090 - protein, 95 aa, Homo sapiens
DIQMTQSPSSLSASVGDRVTITCRASQTIGSNLNWYQQKAGKAPKLLIFATSNLQSGVPSRFSGSGSATEFTLTISSLQPEDIARYYCQQTYTTP

SEQ ID NO: 5091 - protein, 107 aa, Homo sapiens
DIQMTQSPSSLSASVGDRVTITCRASQTIGSNLNWYQQKAGKAPKLLIFATSNLQSGVPSRFSGSGSATEFTLTISSLQPEDIARYYCQQTYTTPLTFGGGTLVGIK

SEQ ID NO: 5092 - protein, 96 aa, Homo sapiens
DIQMTQSPSSLSASVGDRVTITCRASQTISTYVNWYQQKPGKAPNLIIYAASKLQSGVPSRFSGSGSGTAFSLSINGLQPEDFATYYCQQSYNTPP

SEQ ID NO: 5093 - protein, 109 aa, Homo sapiens
DIQMTQSPSSLSASVGDRVTITCRASQTISTYVNWYQQKPGKAPNLIIYAASKLQSGVPSRFSGSGSGTAFSLSINGLQPEDFATYYCQQSYNTPPMYTFGQGTKLDMK

SEQ ID NO: 5094 - protein, 94 aa, Homo sapiens
DIQMTQSPSSLSASVGDRVTITCRASQYIGTYLNWYQQKPGKAPKLLIFGASNLQSGVPSRFSGVASGTDFTLTITSLQPEDFATYYCQQSYTT

SEQ ID NO: 5095 - protein, 107 aa, Homo sapiens
DIQMTQSPSSLSASVGDRVTITCRASQYIGTYLNWYQQKPGKAPKLLIFGASNLQSGVPSRFSGVASGTDFTLTITSLQPEDFATYYCQQSYTTVLTFGGGAKVDIK

SEQ ID NO: 5096 - protein, 94 aa, Homo sapiens
DIQMTQSPSSLSASVGDRVTITCRASRSISKYLNWYQQKPGKAPKLLIYAASNLHSGVPSRFSGSGSGTDFTLTISSLQPEDFATYYCQQSYIT

SEQ ID NO: 5097 - protein, 107 aa, Homo sapiens
DIQMTQSPSSLSASVGDRVTITCRASRSISKYLNWYQQKPGKAPKLLIYAASNLHSGVPSRFSGSGSGTDFTLTISSLQPEDFATYYCQQSYITLWTFGQGTKVEVK

SEQ ID NO: 5098 - protein, 96 aa, Homo sapiens
DIQMTQSPSSLSASVGDRVTITCRASRSISTFLNWYQQKPGKAPQLLIYTASSLQSGVPSRFSGSGSGTDFTLTISSLQAEDFATYYCQQSYSSPP

SEQ ID NO: 5099 - protein, 109 aa, Homo sapiens
DIQMTQSPSSLSASVGDRVTITCRASRSISTFLNWYQQKPGKAPQLLIYTASSLQSGVPSRFSGSGSGTDFTLTISSLQAEDFATYYCQQSYSSPPEPTFGQGTKLEIK

SEQ ID NO: 5100 - protein, 94 aa, Homo sapiens
DIQMTQSPSSLSASVGDRVTITCRPSQSISSYLNWYQQKPGKAPKLLIYGVSSLQSGVPPRFSGSRSGTDFTLTITSLQPEDFATYYCQQTYSS

SEQ ID NO: 5101 - protein, 105 aa, Homo sapiens
DIQMTQSPSSLSASVGDRVTITCRPSQSISSYLNWYQQKPGKAPKLLIYGVSSLQSGVPPRFSGSRSGTDFTLTITSLQPEDFATYYCQQTYSSRALSFGGGTKV

SEQ ID NO: 5102 - protein, 95 aa, Homo sapiens
DIQMTQSPSSLSASVGDRVTITCRSGQTIFTYLNWYQQKPGKAPKLLMYGTSTLQSEVPSRFSGSGSGTDFTLTINSLQPEDFATYYCQQSYDTP

SEQ ID NO: 5103 - protein, 107 aa, Homo sapiens
DIQMTQSPSSLSASVGDRVTITCRSGQTIFTYLNWYQQKPGKAPKLLMYGTSTLQSEVPSRFSGSGSGTDFTLTINSLQPEDFATYYCQQSYDTPWTFGQGTRVEIK

SEQ ID NO: 5104 - protein, 95 aa, Homo sapiens
DIQMTQSPSSLSASVGDRVTITCRTSQAIRKDLGWYQQKLGQAPKRLIYAASSLQSGVPSRFSGSASGTEFTLTISSLQPEDSATYYCLQHNSYP

SEQ ID NO: 5105 - protein, 105 aa, Homo sapiens
DIQMTQSPSSLSASVGDRVTITCRTSQAIRKDLGWYQQKLGQAPKRLIYAASSLQSGVPSRFSGSASGTEFTLTISSLQPEDSATYYCLQHNSYPSFGQGTRLEI

SEQ ID NO: 5106 - protein, 95 aa, Homo sapiens
DIQMTQSPSSLSASVGDRVTITCRTSQNIYKYLNWYQQKPGKAPKLLIYSASSLQSGVPSRFSGSGSGTDFTLTITSLDLEDVATVYCQQSYSSP

SEQ ID NO: 5107 - protein, 107 aa, Homo sapiens
DIQMTQSPSSLSASVGDRVTITCRTSQNIYKYLNWYQQKPGKAPKLLIYSASSLQSGVPSRFSGSGSGTDFTLTITSLDLEDVATVYCQQSYSSPFTFGPGTRVEIK

SEQ ID NO: 5108 - protein, 95 aa, Homo sapiens
DIQMTQSPSSLSASVGDRVTITCRTSQNIYTYLNWYQQKPGTAPKVLIYSASSLQSGVPSRFSGRGSGTEFTLTISSLAPEDIGTFYCQQSYSSP

SEQ ID NO: 5109 - protein, 107 aa, Homo sapiens
DIQMTQSPSSLSASVGDRVTITCRTSQNIYTYLNWYQQKPGTAPKVLIYSASSLQSGVPSRFSGRGSGTEFTLTISSLAPEDIGTFYCQQSYSSPFAFGPGTKVEIK

SEQ ID NO: 5110 - protein, 93 aa, Homo sapiens
DIQMTQSPSSLSASVGDRVTITCRTSQRISSSSLNWYQHQPGKAPKFLIYAASNLQSGVPSRFSGSGSGTDFTLTISSLQPEDLATYYCQYTY

SEQ ID NO: 5111 - protein, 104 aa, Homo sapiens
DIQMTQSPSSLSASVGDRVTITCRTSQRISSSSLNWYQHQPGKAPKFLIYAASNLQSGVPSRFSGSGSGTDFTLTISSLQPEDLATYYCQYTYTFGQGTKLEIK

SEQ ID NO: 5112 - protein, 95 aa, Homo sapiens
DIQMTQSPSSLSASVGDRVTLTCRASQGIDDSLAWFQQKPGKVPKSLIYTASSLESGVPSRFSGSGSGTDFTLTISSLQPEDIATYYCQQYHSYP

SEQ ID NO: 5113 - protein, 107 aa, Homo sapiens
DIQMTQSPSSLSASVGDRVTLTCRASQGIDDSLAWFQQKPGKVPKSLIYTASSLESGVPSRFSGSGSGTDFTLTISSLQPEDIATYYCQQYHSYPITFGQGTRLEIE

SEQ ID NO: 5114 - protein, 90 aa, Homo sapiens
DIQMTQSPSSLSASVGDRVTLTCRASQNIRTSLNWYQQKPGRAPSFLIYAAVNLQSGVPSRFSGSGSGTDFTLTISSLQPEDFATYYCQQ

SEQ ID NO: 5115 - protein, 106 aa, Homo sapiens
DIQMTQSPSSLSASVGDRVTLTCRASQNIRTSLNWYQQKPGRAPSFLIYAAVNLQSGVPSRFSGSGSGTDFTLTISSLQPEDFATYYCQQTQSLPLTFGGGTKVEI

SEQ ID NO: 5116 - protein, 92 aa, Homo sapiens
DIQMTQSPSSLSASVGDRVTLTCRASQSIRNSLNWYQQKPGKAPSFLIYAASNLQSGVPSRFSGSGSGTDFTLTITGLQPEDFATYYCQQSH

SEQ ID NO: 5117 - protein, 106 aa, Homo sapiens
DIQMTQSPSSLSASVGDRVTLTCRASQSIRNSLNWYQQKPGKAPSFLIYAASNLQSGVPSRFSGSGSGTDFTLTITGLQPEDFATYYCQQSHSLPLTFGGGTKVEI

SEQ ID NO: 5118 - protein, 90 aa, Homo sapiens
DIQMTQSPSSLSASVGDRVTLTCRASQSIRTSLNWYQQKPGRAPSFLIYAAVNLQSGVPSRFSGSGSGTDFTLTISSLQPEDFATYYCQQ

SEQ ID NO: 5119 - protein, 106 aa, Homo sapiens
DIQMTQSPSSLSASVGDRVTLTCRASQSIRTSLNWYQQKPGRAPSFLIYAAVNLQSGVPSRFSGSGSGTDFTLTISSLQPEDFATYYCQQTQSLPLTFGGGTKVEI

SEQ ID NO: 5120 - protein, 96 aa, Homo sapiens
DIQMTQSPSSLSASVGDRVTVTCRASQYISYYLNWYQQKPGKAPKLLIYGATTLQSGVPSRFSGSGSGTDFTLTISGLQPEDFATYYCQQSYTTPP

SEQ ID NO: 5121 - protein, 108 aa, Homo sapiens
DIQMTQSPSSLSASVGDRVTVTCRASQYISYYLNWYQQKPGKAPKLLIYGATTLQSGVPSRFSGSGSGTDFTLTISGLQPEDFATYYCQQSYTTPPFTFGPGTKVDIK

SEQ ID NO: 5122 - protein, 92 aa, Homo sapiens
DIQMTQSPSSLSASVGDSVTITCRASQSISRDLNWYQQKPGKAPKFLIYLVSNLQSGVPSRFSGSGSGTDFTLTISSLQPEDFGTYYCQQSH

SEQ ID NO: 5123 - protein, 106 aa, Homo sapiens
DIQMTQSPSSLSASVGDSVTITCRASQSISRDLNWYQQKPGKAPKFLIYLVSNLQSGVPSRFSGSGSGTDFTLTISSLQPEDFGTYYCQQSHSFPITFGGGTKVQI

SEQ ID NO: 5124 - protein, 92 aa, Homo sapiens
DIQMTQSPSSLSASVGDSVTITCRASQSISSDLNWYQQKPGKAPKFLIYLVSNLQSGVPSRFSGGGSGTDFTLTISSLQPEDFGTYYCQQSY

SEQ ID NO: 5125 - protein, 106 aa, Homo sapiens
DIQMTQSPSSLSASVGDSVTITCRASQSISSDLNWYQQKPGKAPKFLIYLVSNLQSGVPSRFSGGGSGTDFTLTISSLQPEDFGTYYCQQSYSFPITFGGGTKVQI

SEQ ID NO: 5126 - protein, 95 aa, Homo sapiens
DIQMTQSPSSLSASVGDTVIITCRASQDIGNSVAWYQVKAEKAPKLLLYAASTLGSGVPSRFSGSGSGTDYSLTINSLRPEDSAIYYCQQYYNTP

SEQ ID NO: 5127 - protein, 107 aa, Homo sapiens
DIQMTQSPSSLSASVGDTVIITCRASQDIGNSVAWYQVKAEKAPKLLLYAASTLGSGVPSRFSGSGSGTDYSLTINSLRPEDSAIYYCQQYYNTPRTFGQGTKVDVK

SEQ ID NO: 5128 - protein, 95 aa, Homo sapiens
DIQMTQSPSSLSASVGDTVTITCRASQGISNSLAWYQQKPGKVPKVLIYAASTLQSGVPARFSGGGSGTDFTLTISSLQPEDAATYYCQKYNSAP

SEQ ID NO: 5129 - protein, 107 aa, Homo sapiens
DIQMTQSPSSLSASVGDTVTITCRASQGISNSLAWYQQKPGKVPKVLIYAASTLQSGVPARFSGGGSGTDFTLTISSLQPEDAATYYCQKYNSAPLTFGGGTKVEIK

SEQ ID NO: 5130 - protein, 95 aa, Homo sapiens
DIQMTQSPSSLSASVRDRVTITCQASQDISKYLNWYQHKPGKAPNLLIYDASNLETGVPSRFSGSGSGTHFTLTISSLQPEDIATYFCQQYDNFP

SEQ ID NO: 5131 - protein, 107 aa, Homo sapiens
DIQMTQSPSSLSASVRDRVTITCQASQDISKYLNWYQHKPGKAPNLLIYDASNLETGVPSRFSGSGSGTHFTLTISSLQPEDIATYFCQQYDNFPLAFGGGTKVEIK

SEQ ID NO: 5132 - protein, 95 aa, Homo sapiens
DIQMTQSPSSLSATVGDRVTITCRASQNIRTFLNWYQQNPGKAPKLLIYAASTLQTGAPSRFSGSGSGTDFTLTITSLQPEDFATYYCQQSYDTP

SEQ ID NO: 5133 - protein, 107 aa, Homo sapiens
DIQMTQSPSSLSATVGDRVTITCRASQNIRTFLNWYQQNPGKAPKLLIYAASTLQTGAPSRFSGSGSGTDFTLTITSLQPEDFATYYCQQSYDTPNTFGQGTKVEMK

SEQ ID NO: 5134 - protein, 96 aa, Homo sapiens
DIQMTQSPSSLSSSVGDRVTITCRASQNISSYLNWYQQKPGKAPKLLIYAASSLQSGVPSRFSGSGSGTDFTLTISSLQPEDFATYYCQQSYSTPP

SEQ ID NO: 5135 - protein, 107 aa, Homo sapiens
DIQMTQSPSSLSSSVGDRVTITCRASQNISSYLNWYQQKPGKAPKLLIYAASSLQSGVPSRFSGSGSGTDFTLTISSLQPEDFATYYCQQSYSTPPAFGPGTKVDIK

SEQ ID NO: 5136 - protein, 95 aa, Homo sapiens
DIQMTQSPSSLSTSVGDRVTITCQASQDIGNSLNWYQQKPGKAPKLLIYDASNLEIGVPSRFRGSGSGTDFIFTISSLQTEDIATYYCQQDNNLP

SEQ ID NO: 5137 - protein, 107 aa, Homo sapiens
DIQMTQSPSSLSTSVGDRVTITCQASQDIGNSLNWYQQKPGKAPKLLIYDASNLEIGVPSRFRGSGSGTDFIFTISSLQTEDIATYYCQQDNNLPYTFGQGTKLEIK

SEQ ID NO: 5138 - protein, 95 aa, Homo sapiens
DIQMTQSPSSLSVSVGDRITITCQASHDISNYLNWYQQKPGKAPKLLIHDASNLETGVPSRFSGSGSGTDFTFTISSLQPEDIATYYCQQCNNLP

SEQ ID NO: 5139 - protein, 108 aa, Homo sapiens
DIQMTQSPSSLSVSVGDRITITCQASHDISNYLNWYQQKPGKAPKLLIHDASNLETGVPSRFSGSGSGTDFTFTISSLQPEDIATYYCQQCNNLPMCTFGQGTKLEIK

SEQ ID NO: 5140 - protein, 95 aa, Homo sapiens
DIQMTQSPSSLYASVGDRVSITCRASQGISNSLAWYQQRPGELPKLLIYAASTLQSGVPSRFRGSGSGTDFALTITSLQPEDVATYYCQNYKSVP

SEQ ID NO: 5141 - protein, 107 aa, Homo sapiens
DIQMTQSPSSLYASVGDRVSITCRASQGISNSLAWYQQRPGELPKLLIYAASTLQSGVPSRFRGSGSGTDFALTITSLQPEDVATYYCQNYKSVPLTFGGGTKVQIK

SEQ ID NO: 5142 - protein, 95 aa, Homo sapiens
DIQMTQSPSSVSAAVGDRVTITCRASQGISSWLGWYQQKPGKAPKLLIYAAVRLQSGVPSRFSGSGSGTEFTLTISSLQPEDFATYYCQQAGSFP

SEQ ID NO: 5143 - protein, 107 aa, Homo sapiens
DIQMTQSPSSVSAAVGDRVTITCRASQGISSWLGWYQQKPGKAPKLLIYAAVRLQSGVPSRFSGSGSGTEFTLTISSLQPEDFATYYCQQAGSFPWTFGQGTKVEIK

SEQ ID NO: 5144 - protein, 94 aa, Homo sapiens
DIQMTQSPSSVSASVGDRVTITCRASQAISRWLAWYQQKPGKAPKFLIYAASSLQSGVPSRFSGSGSGTDFTLTISSLQPEDFATYYCQQVNSF

SEQ ID NO: 5145 - protein, 107 aa, Homo sapiens
DIQMTQSPSSVSASVGDRVTITCRASQAISRWLAWYQQKPGKAPKFLIYAASSLQSGVPSRFSGSGSGTDFTLTISSLQPEDFATYYCQQVNSFALTFGGGTKVEIK

SEQ ID NO: 5146 - protein, 95 aa, Homo sapiens
DIQMTQSPSSVSASVGDRVTITCRASQDIGSWLAWFQQKPGKAPNLLIYAASSLQSGVPSRFSGSGSGTDFTLTISSLQPEDFATYYCQQANSFP

SEQ ID NO: 5147 - protein, 107 aa, Homo sapiens
DIQMTQSPSSVSASVGDRVTITCRASQDIGSWLAWFQQKPGKAPNLLIYAASSLQSGVPSRFSGSGSGTDFTLTISSLQPEDFATYYCQQANSFPYTFGQGTKLEIK

SEQ ID NO: 5148 - protein, 96 aa, Homo sapiens
DIQMTQSPSSVSASVGDRVTITCRASQDVASWLIWYQQKPGKAPKLLIYAASSLQSGVPSRFSGSGSGTDFTLTISSLQPEDFATYYCQQANSFPP

SEQ ID NO: 5149 - protein, 107 aa, Homo sapiens
DIQMTQSPSSVSASVGDRVTITCRASQDVASWLIWYQQKPGKAPKLLIYAASSLQSGVPSRFSGSGSGTDFTLTISSLQPEDFATYYCQQANSFPPTFGPGTKVDLK

SEQ ID NO: 5150 - protein, 95 aa, Homo sapiens
DIQMTQSPSSVSASVGDRVTITCRASQGINSWLAWYQQKPGKAPKLLIYPTSTLQSGVPSRFSGSGSGTDFTLTISSLQPEDFATYYCQQANSFP

SEQ ID NO: 5151 - protein, 107 aa, Homo sapiens
DIQMTQSPSSVSASVGDRVTITCRASQGINSWLAWYQQKPGKAPKLLIYPTSTLQSGVPSRFSGSGSGTDFTLTISSLQPEDFATYYCQQANSFPWTFGQGTKVEIK

SEQ ID NO: 5152 - protein, 95 aa, Homo sapiens
DIQMTQSPSSVSASVGDRVTITCRASQGISNFLVWFQQKPGKAPKSLIYAASTLQRGVPSRFSGSGSGTDFTLTISSLQPEDFATYYCQHYDGYP

SEQ ID NO: 5153 - protein, 106 aa, Homo sapiens
DIQMTQSPSSVSASVGDRVTITCRASQGISNFLVWFQQKPGKAPKSLIYAASTLQRGVPSRFSGSGSGTDFTLTISSLQPEDFATYYCQHYDGYPRTFGQGTKVEI

SEQ ID NO: 5154 - protein, 95 aa, Homo sapiens
DIQMTQSPSSVSASVGDRVTITCRASQGISSWLAWYQQKPGKAPKLLIYAASSLHSGVPSRFSGSGSGTDFTLTISSLQPEDFATYFCQQANSFP

SEQ ID NO: 5155 - protein, 107 aa, Homo sapiens
DIQMTQSPSSVSASVGDRVTITCRASQGISSWLAWYQQKPGKAPKLLIYAASSLHSGVPSRFSGSGSGTDFTLTISSLQPEDFATYFCQQANSFPFTFGPGTKVDIK

SEQ ID NO: 5156 - protein, 94 aa, Homo sapiens
DIQMTQSPSSVSASVGDRVTITCRASQGISSWLAWYQQKPGKAPKLLIYAASSLQSGVPSRFSGSGSGTDFTLTISSLQPEDFATYYCQQANSF

SEQ ID NO: 5157 - protein, 108 aa, Homo sapiens
DIQMTQSPSSVSASVGDRVTITCRASQGISSWLAWYQQKPGKAPKLLIYAASSLQSGVPSRFSGSGSGTDFTLTISSLQPEDFATYYCQQANSFLPLTFGGGTKVEIK

SEQ ID NO: 5158 - protein, 95 aa, Homo sapiens
DIQMTQSPSSVSASVGDRVTITCRASQGISSWLAWYQQKPGKAPKLLIYAASSLQSGVPSRFSGSGSGTDFTLTISSLQPEDFATYYCQQANSFP

SEQ ID NO: 5159 - protein, 107 aa, Homo sapiens
DIQMTQSPSSVSASVGDRVTITCRASQGISSWLAWYQQKPGKAPKLLIYAASSLQSGVPSRFSGSGSGTDFTLTISSLQPEDFATYYCQQANSFPFTFGGGTKVEIK

SEQ ID NO: 5160 - protein, 96 aa, Homo sapiens
DIQMTQSPSSVSASVGDRVTITCRASQGISSWLAWYQQKPGKAPKLLIYAASSLQSGVPSRFSGSGSGTDFTLTISSLQPEDFATYYCQQANSFPP

SEQ ID NO: 5161 - protein, 107 aa, Homo sapiens
DIQMTQSPSSVSASVGDRVTITCRASQGISSWLAWYQQKPGKAPKLLIYAASSLQSGVPSRFSGSGSGTDFTLTISSLQPEDFATYYCQQANSFPPAFGGGTKVEIK

SEQ ID NO: 5162 - protein, 96 aa, Homo sapiens
DIQMTQSPSSVSASVGDRVTITCRASQGISSWLAWYQQKPGKAPNLLIYAASSLQSGVPSRFSGSGSGTDFTLTISSLQPEDFATYYCQQSNSFPP

SEQ ID NO: 5163 - protein, 108 aa, Homo sapiens
DIQMTQSPSSVSASVGDRVTITCRASQGISSWLAWYQQKPGKAPNLLIYAASSLQSGVPSRFSGSGSGTDFTLTISSLQPEDFATYYCQQSNSFPPLTFGGGTKVEIK

SEQ ID NO: 5164 - protein, 94 aa, Homo sapiens
DIQMTQSPSTLFAYVGDRVTITCRASQTIRGWLAWYQQKPGKAPSLLISKASTLQSGVPSRFSGSGSGTDFTLTITNLQPDDFATYYCQHYNDY

SEQ ID NO: 5165 - protein, 107 aa, Homo sapiens
DIQMTQSPSTLFAYVGDRVTITCRASQTIRGWLAWYQQKPGKAPSLLISKASTLQSGVPSRFSGSGSGTDFTLTITNLQPDDFATYYCQHYNDYPYTFGQGTKLELK

SEQ ID NO: 5166 - protein, 95 aa, Homo sapiens
DIQMTQSPSTLPASVGDRVTITCRASQNINTWLAWYQQKPGKAPKLLIYKTSNLDSGVPSRFSGSGSETEFTLTISSLQPDDFATYYCQEYNTYS

SEQ ID NO: 5167 - protein, 108 aa, Homo sapiens
DIQMTQSPSTLPASVGDRVTITCRASQNINTWLAWYQQKPGKAPKLLIYKTSNLDSGVPSRFSGSGSETEFTLTISSLQPDDFATYYCQEYNTYSQWTFGQGTKVEIK

SEQ ID NO: 5168 - protein, 95 aa, Homo sapiens
DIQMTQSPSTLSAFEGDRVTITCRASQSINNWLAWYQQKPGKAPKLLIYKASNLESGVPSRFSGSGSGTEFTLTISSLQPDDLATYYCQHYNTYS

SEQ ID NO: 5169 - protein, 107 aa, Homo sapiens
DIQMTQSPSTLSAFEGDRVTITCRASQSINNWLAWYQQKPGKAPKLLIYKASNLESGVPSRFSGSGSGTEFTLTISSLQPDDLATYYCQHYNTYSGTFGQGTKVEIK

SEQ ID NO: 5170 - protein, 95 aa, Homo sapiens
DIQMTQSPSTLSAFVGDRVTITCRASENINTWLAWYQQKPGKGPNLLIYEASILEGGVPSRFTGSGSGTEFTLTIDSLQPDDFATYYCQQYNTYS

SEQ ID NO: 5171 - protein, 105 aa, Homo sapiens
DIQMTQSPSTLSAFVGDRVTITCRASENINTWLAWYQQKPGKGPNLLIYEASILEGGVPSRFTGSGSGTEFTLTIDSLQPDDFATYYCQQYNTYSAFGQGTKVEI

SEQ ID NO: 5172 - protein, 93 aa, Homo sapiens
DIQMTQSPSTLSAFVGDRVTITCRASQSISKWLAWYQHKPGKGPKLLIYEASSLETGVPSRFSGSGSGTEFTLTISSLQPDDFATYYCQQYNS

SEQ ID NO: 5173 - protein, 107 aa, Homo sapiens
DIQMTQSPSTLSAFVGDRVTITCRASQSISKWLAWYQHKPGKGPKLLIYEASSLETGVPSRFSGSGSGTEFTLTISSLQPDDFATYYCQQYNSYLVTFGGGTKVEIK

SEQ ID NO: 5174 - protein, 95 aa, Homo sapiens
DIQMTQSPSTLSAFVGDRVTITCRASQSISSRLAWYQQKPGIAPKLLIYKASTLQTGVPSRFSGTGSGTEFTLTISSLQPDDFATYYCQQYDSYS

SEQ ID NO: 5175 - protein, 107 aa, Homo sapiens
DIQMTQSPSTLSAFVGDRVTITCRASQSISSRLAWYQQKPGIAPKLLIYKASTLQTGVPSRFSGTGSGTEFTLTISSLQPDDFATYYCQQYDSYSGAFGRGTKVEIK

SEQ ID NO: 5176 - protein, 94 aa, Homo sapiens
DIQMTQSPSTLSAFVGDRVTITCRASQTISSWLAWYQQKPGKAPKLLIYKASNLEGGVPSRFSGSGSGTEFTLTISSLQPDDFAFYYCQQYDSY

SEQ ID NO: 5177 - protein, 107 aa, Homo sapiens
DIQMTQSPSTLSAFVGDRVTITCRASQTISSWLAWYQQKPGKAPKLLIYKASNLEGGVPSRFSGSGSGTEFTLTISSLQPDDFAFYYCQQYDSYPYTFGQGTKLEIK

SEQ ID NO: 5178 - protein, 95 aa, Homo sapiens
DIQMTQSPSTLSAFVGERVTITCRASQSISSWLAWYQQKPGKVPKLLIYKASTLESGVPSRFSGSGSGTEFTLTISSLQPDDFASYYCQHYNTYS

SEQ ID NO: 5179 - protein, 107 aa, Homo sapiens
DIQMTQSPSTLSAFVGERVTITCRASQSISSWLAWYQQKPGKVPKLLIYKASTLESGVPSRFSGSGSGTEFTLTISSLQPDDFASYYCQHYNTYSYTFGQGTKLEIK

SEQ ID NO: 5180 - protein, 95 aa, Homo sapiens
DIQMTQSPSTLSASEGDRVTITCRASQSISSWLAWYQQKPGKAPKLLISKASSLESGVPSRFSGSGSGTEFTLTISSLQPDDFATYYCQQYNSYS

SEQ ID NO: 5181 - protein, 108 aa, Homo sapiens
DIQMTQSPSTLSASEGDRVTITCRASQSISSWLAWYQQKPGKAPKLLISKASSLESGVPSRFSGSGSGTEFTLTISSLQPDDFATYYCQQYNSYSSPLTFGGGTKVEI

SEQ ID NO: 5182 - protein, 94 aa, Homo sapiens
DIQMTQSPSTLSASIGDRVTITCRASQSIGNWLAWYQQKPGKAPKLLIYEASSLESGVPSTFSGSGSGTEFTLTISSLQPDDFATYYCQQYSNY

SEQ ID NO: 5183 - protein, 108 aa, Homo sapiens
DIQMTQSPSTLSASIGDRVTITCRASQSIGNWLAWYQQKPGKAPKLLIYEASSLESGVPSTFSGSGSGTEFTLTISSLQPDDFATYYCQQYSNYPYVTFGQGTKVEVK

SEQ ID NO: 5184 - protein, 95 aa, Homo sapiens
DIQMTQSPSTLSASIGDRVTITCRASQSISSWLAWYQQKPGKAPKVLIYKASSLESGVPSRFSGSGSGTEFTLTISSLQPDDFATYYCQQYNSYS

SEQ ID NO: 5185 - protein, 107 aa, Homo sapiens
DIQMTQSPSTLSASIGDRVTITCRASQSISSWLAWYQQKPGKAPKVLIYKASSLESGVPSRFSGSGSGTEFTLTISSLQPDDFATYYCQQYNSYSITFGQGTRLEIK

SEQ ID NO: 5186 - protein, 95 aa, Homo sapiens
DIQMTQSPSTLSASLGDRVTITCRASQSISTWLAWYQQKPGKAPNLLIYEASSLEGGVPSRFSGSGSGTEFTLTINSLQPDDFATYYCQQYNGYS

SEQ ID NO: 5187 - protein, 107 aa, Homo sapiens
DIQMTQSPSTLSASLGDRVTITCRASQSISTWLAWYQQKPGKAPNLLIYEASSLEGGVPSRFSGSGSGTEFTLTINSLQPDDFATYYCQQYNGYSLTFGGGTKVEIK

SEQ ID NO: 5188 - protein, 95 aa, Homo sapiens
DIQMTQSPSTLSASVGDGITITCRASQSISSWLAWYQQKPGKAPKVLIYKASTLESGVPSRFSGSGSGTEFTLTISSLQPDDFATYYCQQYSSSS

SEQ ID NO: 5189 - protein, 107 aa, Homo sapiens
DIQMTQSPSTLSASVGDGITITCRASQSISSWLAWYQQKPGKAPKVLIYKASTLESGVPSRFSGSGSGTEFTLTISSLQPDDFATYYCQQYSSSSLTFGPGTKVDIK

SEQ ID NO: 5190 - protein, 94 aa, Homo sapiens
DIQMTQSPSTLSASVGDGVTITCRASQSIYIWLAWYQQKPGKAPKLLIYKASSLETGVPSRFSGSGSGTDFTLTISSLQPDDFATYYCQQYKTY

SEQ ID NO: 5191 - protein, 107 aa, Homo sapiens
DIQMTQSPSTLSASVGDGVTITCRASQSIYIWLAWYQQKPGKAPKLLIYKASSLETGVPSRFSGSGSGTDFTLTISSLQPDDFATYYCQQYKTYPWTFGPGTKVEIK

SEQ ID NO: 5192 - protein, 95 aa, Homo sapiens
DIQMTQSPSTLSASVGDKVTITCRASQSISTWLAWYQQKPGKAPNLLIYKASTLHTGVPSRFSGSGSGTEFTLSISSLQPDDFATYYCQEYNTYS

SEQ ID NO: 5193 - protein, 107 aa, Homo sapiens
DIQMTQSPSTLSASVGDKVTITCRASQSISTWLAWYQQKPGKAPNLLIYKASTLHTGVPSRFSGSGSGTEFTLSISSLQPDDFATYYCQEYNTYSCTFGQGTRLEIK

SEQ ID NO: 5194 - protein, 95 aa, Homo sapiens
DIQMTQSPSTLSASVGDRIAITCRANQSISRWLAWYQQKPGKAPKLLIYKASSLESGVPSRFSGSGSGTEFTLSISSLQPDDFATYYCQQYNSYS

SEQ ID NO: 5195 - protein, 107 aa, Homo sapiens
DIQMTQSPSTLSASVGDRIAITCRANQSISRWLAWYQQKPGKAPKLLIYKASSLESGVPSRFSGSGSGTEFTLSISSLQPDDFATYYCQQYNSYSWTFGQGTKVEIK

SEQ ID NO: 5196 - protein, 95 aa, Homo sapiens
DIQMTQSPSTLSASVGDRINITCRASQDIRRWLAWYQQKPGKAPKLLIYKESALQTGVPSRFSGSGSGTEFTLSISGLQPDDFATYYCQQYKSYS

SEQ ID NO: 5197 - protein, 106 aa, Homo sapiens
DIQMTQSPSTLSASVGDRINITCRASQDIRRWLAWYQQKPGKAPKLLIYKESALQTGVPSRFSGSGSGTEFTLSISGLQPDDFATYYCQQYKSYSYTFGQGTRLEV

SEQ ID NO: 5198 - protein, 93 aa, Homo sapiens
DIQMTQSPSTLSASVGDRITITCRASQSISKWVAWYQQKPGKAPKLLIYAASSLQSGVPSSFSGSGSGTEFTLTISSLQPDDFATYYCQQYNN

SEQ ID NO: 5199 - protein, 107 aa, Homo sapiens
DIQMTQSPSTLSASVGDRITITCRASQSISKWVAWYQQKPGKAPKLLIYAASSLQSGVPSSFSGSGSGTEFTLTISSLQPDDFATYYCQQYNNYPPTFGQGTKLEIK

SEQ ID NO: 5200 - protein, 94 aa, Homo sapiens
DIQMTQSPSTLSASVGDRITITCRSSQSVSSWLAWYQQKPGKAPKLLIYKASSLESGVPSKFSGSGSGTEFTLTISSLQPDDFATYYCQQYNNY

SEQ ID NO: 5201 - protein, 107 aa, Homo sapiens
DIQMTQSPSTLSASVGDRITITCRSSQSVSSWLAWYQQKPGKAPKLLIYKASSLESGVPSKFSGSGSGTEFTLTISSLQPDDFATYYCQQYNNYPWTFGQGTKVEIK

SEQ ID NO: 5202 - protein, 95 aa, Homo sapiens
DIQMTQSPSTLSASVGDRVAITCRASQNISTWLAWYQQKPGKAPRLLVYEASTLQSGVPSRFSGSGSETEFILTISSLQPDDFATYYCQHYYSFS

SEQ ID NO: 5203 - protein, 106 aa, Homo sapiens
DIQMTQSPSTLSASVGDRVAITCRASQNISTWLAWYQQKPGKAPRLLVYEASTLQSGVPSRFSGSGSETEFILTISSLQPDDFATYYCQHYYSFSNTFGQGTRLEI

SEQ ID NO: 5204 - protein, 95 aa, Homo sapiens
DIQMTQSPSTLSASVGDRVIITCRASQNIKNWLAWYQQSPGKAPKLLIYQASSLQSGVPSRFSGSGSGTEFTLTISSLQPDDFATYYCQQYSTYS

SEQ ID NO: 5205 - protein, 108 aa, Homo sapiens
DIQMTQSPSTLSASVGDRVIITCRASQNIKNWLAWYQQSPGKAPKLLIYQASSLQSGVPSRFSGSGSGTEFTLTISSLQPDDFATYYCQQYSTYSQVTFGPGTKVDIK

SEQ ID NO: 5206 - protein, 96 aa, Homo sapiens
DIQMTQSPSTLSASVGDRVSITCRASQSISNWLAWYQHKPGKAPKSLIYEASTLESGVPSRFSGSGSGTEFTLTITSLQPDDFATYYCQQYNSYSP

SEQ ID NO: 5207 - protein, 106 aa, Homo sapiens
DIQMTQSPSTLSASVGDRVSITCRASQSISNWLAWYQHKPGKAPKSLIYEASTLESGVPSRFSGSGSGTEFTLTITSLQPDDFATYYCQQYNSYSPTFGQGTKVEI

SEQ ID NO: 5208 - protein, 95 aa, Homo sapiens
DIQMTQSPSTLSASVGDRVSITCRASQSITKYLAWYQQKPGKPPNLLVYEASTLEGGVPSRFSGSGSGTEFTLTISSLQPEDFGTYYCQHYNTYS

SEQ ID NO: 5209 - protein, 106 aa, Homo sapiens
DIQMTQSPSTLSASVGDRVSITCRASQSITKYLAWYQQKPGKPPNLLVYEASTLEGGVPSRFSGSGSGTEFTLTISSLQPEDFGTYYCQHYNTYSYTFGQGTKLEI

SEQ ID NO: 5210 - protein, 95 aa, Homo sapiens
DIQMTQSPSTLSASVGDRVSITCRASQSVANWLAWYQQKPGKAPKLLIYQASHLESGVPSRFSGSGSETEFTLTISSLQPSDLATYYCQQYKSYS

SEQ ID NO: 5211 - protein, 108 aa, Homo sapiens
DIQMTQSPSTLSASVGDRVSITCRASQSVANWLAWYQQKPGKAPKLLIYQASHLESGVPSRFSGSGSETEFTLTISSLQPSDLATYYCQQYKSYSSWTFGQGTKVDIK

SEQ ID NO: 5212 - protein, 94 aa, Homo sapiens
DIQMTQSPSTLSASVGDRVTFTCRASQSINYWLAWYQQKLGKAPKLLISKASTLENGIPSRFSGSGSGTEFTLTINGLQPDDFATYYCQQYNSY

SEQ ID NO: 5213 - protein, 107 aa, Homo sapiens
DIQMTQSPSTLSASVGDRVTFTCRASQSINYWLAWYQQKLGKAPKLLISKASTLENGIPSRFSGSGSGTEFTLTINGLQPDDFATYYCQQYNSYFATFGQGTKVEVK

SEQ ID NO: 5214 - protein, 95 aa, Homo sapiens
DIQMTQSPSTLSASVGDRVTIACRASESVSAWLAWYQQKPGKAPKLLIYKASHLESGVPSRFSGSGTETEFTLTITSLQPDDFATYYCQQYKSYS

SEQ ID NO: 5215 - protein, 108 aa, Homo sapiens
DIQMTQSPSTLSASVGDRVTIACRASESVSAWLAWYQQKPGKAPKLLIYKASHLESGVPSRFSGSGTETEFTLTITSLQPDDFATYYCQQYKSYSQWTFGQGTNVEIK

SEQ ID NO: 5216 - protein, 95 aa, Homo sapiens
DIQMTQSPSTLSASVGDRVTIACRASQSIGSWLAWYQHKPGKAPKLLIYQASSLESGVPSRFSGSGSGTEFTLTVSSLQPDDLATFYCQQYHSYP

SEQ ID NO: 5217 - protein, 107 aa, Homo sapiens
DIQMTQSPSTLSASVGDRVTIACRASQSIGSWLAWYQHKPGKAPKLLIYQASSLESGVPSRFSGSGSGTEFTLTVSSLQPDDLATFYCQQYHSYPWTFGQGTKVEIK

SEQ ID NO: 5218 - protein, 95 aa, Homo sapiens
DIQMTQSPSTLSASVGDRVTISCRASQGISDRLAWYQQKPGIAPRLLIYKASTLESGVPSRFSGSGSGTEFTLTISSLQPEDFATYYCQQYDSYS

SEQ ID NO: 5219 - protein, 107 aa, Homo sapiens
DIQMTQSPSTLSASVGDRVTISCRASQGISDRLAWYQQKPGIAPRLLIYKASTLESGVPSRFSGSGSGTEFTLTISSLQPEDFATYYCQQYDSYSGMFGQGTKVEIK

SEQ ID NO: 5220 - protein, 94 aa, Homo sapiens
DIQMTQSPSTLSASVGDRVTISCRASQSIKSWLAWYQQRPGRAPNVLIYRASTLESGVPSRFSGSGSGTDFTLTISSLQPDDFATYYCHQYYNY

SEQ ID NO: 5221 - protein, 107 aa, Homo sapiens
DIQMTQSPSTLSASVGDRVTISCRASQSIKSWLAWYQQRPGRAPNVLIYRASTLESGVPSRFSGSGSGTDFTLTISSLQPDDFATYYCHQYYNYPWTFGQGTKVEIK

SEQ ID NO: 5222 - protein, 95 aa, Homo sapiens
DIQMTQSPSTLSASVGDRVTITCQASQSISSWLAWYQQKAGKAPKLLIYKASSLESGVPSRFSGSGSGTDFTLTISSLQPDDVATYYCQHYNSYS

SEQ ID NO: 5223 - protein, 107 aa, Homo sapiens
DIQMTQSPSTLSASVGDRVTITCQASQSISSWLAWYQQKAGKAPKLLIYKASSLESGVPSRFSGSGSGTDFTLTISSLQPDDVATYYCQHYNSYSGTFGQGTKVEIK

SEQ ID NO: 5224 - protein, 95 aa, Homo sapiens
DIQMTQSPSTLSASVGDRVTITCRAGQIVSCCLAWYQQKPGKAPKLLIYKASNLESGVPSRFSGSGSGTEFALTISSLQPDDFATYYCQHYNTYS

SEQ ID NO: 5225 - protein, 107 aa, Homo sapiens
DIQMTQSPSTLSASVGDRVTITCRAGQIVSCCLAWYQQKPGKAPKLLIYKASNLESGVPSRFSGSGSGTEFALTISSLQPDDFATYYCQHYNTYSWTFGQGTKVEIK

SEQ ID NO: 5226 - protein, 95 aa, Homo sapiens
DIQMTQSPSTLSASVGDRVTITCRASQGISYYVAWFRQKPGNVPQRLFYAASSLQSGVPSRFSGRASGTEFTLTISCLQPEDFATYYCLQHKSYP

SEQ ID NO: 5227 - protein, 108 aa, Homo sapiens
DIQMTQSPSTLSASVGDRVTITCRASQGISYYVAWFRQKPGNVPQRLFYAASSLQSGVPSRFSGRASGTEFTLTISCLQPEDFATYYCLQHKSYPLHFWPGDQTGDQT

SEQ ID NO: 5228 - protein, 93 aa, Homo sapiens
DIQMTQSPSTLSASVGDRVTITCRASQIINRWLAWYQQQPGKAPRVLIYKASILESGVPSRFSGSGSGTEFTLTISSLETDDFATYYCQQYSS

SEQ ID NO: 5229 - protein, 107 aa, Homo sapiens
DIQMTQSPSTLSASVGDRVTITCRASQIINRWLAWYQQQPGKAPRVLIYKASILESGVPSRFSGSGSGTEFTLTISSLETDDFATYYCQQYSSYPITFGQGTRLDIK

SEQ ID NO: 5230 - protein, 95 aa, Homo sapiens
DIQMTQSPSTLSASVGDRVTITCRASQNIDTWLAWYQQKPGKAPNLLIYKASTLQAGVPSRFSGSGSGTGFTLTISSLQPDDFATYYCQHYSVYS

SEQ ID NO: 5231 - protein, 107 aa, Homo sapiens
DIQMTQSPSTLSASVGDRVTITCRASQNIDTWLAWYQQKPGKAPNLLIYKASTLQAGVPSRFSGSGSGTGFTLTISSLQPDDFATYYCQHYSVYSRTFGQGTKVEIK

SEQ ID NO: 5232 - protein, 93 aa, Homo sapiens
DIQMTQSPSTLSASVGDRVTITCRASQNIGNWLAWYQQKPGKAPKLLISKASSLESGVPSRFSGSGSGTEFTLTISSLQADDFATYYCQPYNY

SEQ ID NO: 5233 - protein, 107 aa, Homo sapiens
DIQMTQSPSTLSASVGDRVTITCRASQNIGNWLAWYQQKPGKAPKLLISKASSLESGVPSRFSGSGSGTEFTLTISSLQADDFATYYCQPYNYYFITFGQGTRLEIK

SEQ ID NO: 5234 - protein, 95 aa, Homo sapiens
DIQMTQSPSTLSASVGDRVTITCRASQNIGSWLAWYQQKPGQAPKLLIYKASHLESGVPSRFSGSGSETEFTLTIGSLQADDFATYYCQEYNSYS

SEQ ID NO: 5235 - protein, 108 aa, Homo sapiens
DIQMTQSPSTLSASVGDRVTITCRASQNIGSWLAWYQQKPGQAPKLLIYKASHLESGVPSRFSGSGSETEFTLTIGSLQADDFATYYCQEYNSYSQWTFGQGTRVDVK

SEQ ID NO: 5236 - protein, 94 aa, Homo sapiens
DIQMTQSPSTLSASVGDRVTITCRASQNIIRWLAWYQQKPGKAPKLLIHQASSLESGVPSRFSGSGSGTDFTLTISSLQPDDFATYYCQQYNSY

SEQ ID NO: 5237 - protein, 108 aa, Homo sapiens
DIQMTQSPSTLSASVGDRVTITCRASQNIIRWLAWYQQKPGKAPKLLIHQASSLESGVPSRFSGSGSGTDFTLTISSLQPDDFATYYCQQYNSYASYTFGQGTKLEIK

SEQ ID NO: 5238 - protein, 94 aa, Homo sapiens
DIQMTQSPSTLSASVGDRVTITCRASQNINSWLTWYQQRPGKAPKLLIYKASNLESGVPSRFSGSGSGTEFTLTISSLQPEDFAVYHCQQYKNY

SEQ ID NO: 5239 - protein, 107 aa, Homo sapiens
DIQMTQSPSTLSASVGDRVTITCRASQNINSWLTWYQQRPGKAPKLLIYKASNLESGVPSRFSGSGSGTEFTLTISSLQPEDFAVYHCQQYKNYPYTFGQGTKLEIK

SEQ ID NO: 5240 - protein, 96 aa, Homo sapiens
DIQMTQSPSTLSASVGDRVTITCRASQPISTWLAWYQQRPGKAPNLLIYKASTLASGVPSRFSGSGSGTEFTLTITSLQPDDFATFYCQQYHTFSP

SEQ ID NO: 5241 - protein, 108 aa, Homo sapiens
DIQMTQSPSTLSASVGDRVTITCRASQPISTWLAWYQQRPGKAPNLLIYKASTLASGVPSRFSGSGSGTEFTLTITSLQPDDFATFYCQQYHTFSPSTFGQGTKLEIK

SEQ ID NO: 5242 - protein, 96 aa, Homo sapiens
DIQMTQSPSTLSASVGDRVTITCRASQSFSSWLAWSQQKPGKVPKILIYKASSLASGVPSRFSGSGSGTDFTLTISSLQPEDFSTYSCQHYNGYCP

SEQ ID NO: 5243 - protein, 108 aa, Homo sapiens
DIQMTQSPSTLSASVGDRVTITCRASQSFSSWLAWSQQKPGKVPKILIYKASSLASGVPSRFSGSGSGTDFTLTISSLQPEDFSTYSCQHYNGYCPHFWPGDQAGHQT

SEQ ID NO: 5244 - protein, 95 aa, Homo sapiens
DIQMTQSPSTLSASVGDRVTITCRASQSIDSWLAWYQQKPGKAPNLLIYKASSLQSGVPSRFSGSGSGTGFTLTISSLQPDDFATYYCQHYNSYS

SEQ ID NO: 5245 - protein, 107 aa, Homo sapiens
DIQMTQSPSTLSASVGDRVTITCRASQSIDSWLAWYQQKPGKAPNLLIYKASSLQSGVPSRFSGSGSGTGFTLTISSLQPDDFATYYCQHYNSYSRTFGQGTKVEIK

SEQ ID NO: 5246 - protein, 95 aa, Homo sapiens
DIQMTQSPSTLSASVGDRVTITCRASQSIFVWLAWYQQKPGKAPKLLIYKASSLQSGVPSRFSGRGSGTEFTLTISSLQPDDFATYYCLQYKSDS

SEQ ID NO: 5247 - protein, 106 aa, Homo sapiens
DIQMTQSPSTLSASVGDRVTITCRASQSIFVWLAWYQQKPGKAPKLLIYKASSLQSGVPSRFSGRGSGTEFTLTISSLQPDDFATYYCLQYKSDSYTFGQGTKLEI

SEQ ID NO: 5248 - protein, 94 aa, Homo sapiens
DIQMTQSPSTLSASVGDRVTITCRASQSIGIYLAWYQQKPGKAPKRLIYKASSLESGVPSRFSGSGSGTQFTLTISSLQPDDFATYYCQHYNTY

SEQ ID NO: 5249 - protein, 107 aa, Homo sapiens
DIQMTQSPSTLSASVGDRVTITCRASQSIGIYLAWYQQKPGKAPKRLIYKASSLESGVPSRFSGSGSGTQFTLTISSLQPDDFATYYCQHYNTYWCAFGGGTKVEIK

SEQ ID NO: 5250 - protein, 96 aa, Homo sapiens
DIQMTQSPSTLSASVGDRVTITCRASQSIISWLAWYQQKPGKAPKLLIYKASNLESGVPSRFSGSGSGTEFTLTISSLQPDDFATYYCQQYTSFSP

SEQ ID NO: 5251 - protein, 108 aa, Homo sapiens
DIQMTQSPSTLSASVGDRVTITCRASQSIISWLAWYQQKPGKAPKLLIYKASNLESGVPSRFSGSGSGTEFTLTISSLQPDDFATYYCQQYTSFSPWTFGQGTKVEIK

SEQ ID NO: 5252 - protein, 94 aa, Homo sapiens
DIQMTQSPSTLSASVGDRVTITCRASQSILTWLAWYQQKPGKAPKLLIYKASSLESGVPSRFSGSGSGTEFTLTISSLQPDDFATYYCQQYNSY

SEQ ID NO: 5253 - protein, 108 aa, Homo sapiens
DIQMTQSPSTLSASVGDRVTITCRASQSILTWLAWYQQKPGKAPKLLIYKASSLESGVPSRFSGSGSGTEFTLTISSLQPDDFATYYCQQYNSYLPWTFGQGTKVEIK

SEQ ID NO: 5254 - protein, 93 aa, Homo sapiens
DIQMTQSPSTLSASVGDRVTITCRASQSINEWLAWYQQKPGKAPKVLIHKASSLESGVPSRFSGSASGTEFTLTISSLEPDDFATYYCQQYNS

SEQ ID NO: 5255 - protein, 107 aa, Homo sapiens
DIQMTQSPSTLSASVGDRVTITCRASQSINEWLAWYQQKPGKAPKVLIHKASSLESGVPSRFSGSASGTEFTLTISSLEPDDFATYYCQQYNSSPYTFGQGTKLDIK

SEQ ID NO: 5256 - protein, 92 aa, Homo sapiens
DIQMTQSPSTLSASVGDRVTITCRASQSINKWLAWYQQKPGRAPKLLIYQASNLESGVPSRFSGSGSGTEFTLTITSLQPDDFVTYYCLHYD

SEQ ID NO: 5257 - protein, 105 aa, Homo sapiens
DIQMTQSPSTLSASVGDRVTITCRASQSINKWLAWYQQKPGRAPKLLIYQASNLESGVPSRFSGSGSGTEFTLTITSLQPDDFVTYYCLHYDYSWTFGQGTKVEI

SEQ ID NO: 5258 - protein, 94 aa, Homo sapiens
DIQMTQSPSTLSASVGDRVTITCRASQSINNWLAWYQQRPGKAPNLLIYKASSLEFGVPSRFSGSGSGTEFTLTITSLQPDDFGSYYCQQYSTY

SEQ ID NO: 5259 - protein, 107 aa, Homo sapiens
DIQMTQSPSTLSASVGDRVTITCRASQSINNWLAWYQQRPGKAPNLLIYKASSLEFGVPSRFSGSGSGTEFTLTITSLQPDDFGSYYCQQYSTYPYSFGQGTKLEIK

SEQ ID NO: 5260 - protein, 95 aa, Homo sapiens
DIQMTQSPSTLSASVGDRVTITCRASQSINRWLAWYQQKPGKAPELLIHQASTLENGVPSRFSGSGSGTEFTLTISSLQPDDFATYYCQQYNSYA

SEQ ID NO: 5261 - protein, 108 aa, Homo sapiens
DIQMTQSPSTLSASVGDRVTITCRASQSINRWLAWYQQKPGKAPELLIHQASTLENGVPSRFSGSGSGTEFTLTISSLQPDDFATYYCQQYNSYASYTFGQGTKLEIK

SEQ ID NO: 5262 - protein, 93 aa, Homo sapiens
DIQMTQSPSTLSASVGDRVTITCRASQSIRSWLAWYQQKAGKAPKLLIYKASSLESGVPARFSGSGSGTEFTLSISSLQPDDFATYYCQQYDS

SEQ ID NO: 5263 - protein, 107 aa, Homo sapiens
DIQMTQSPSTLSASVGDRVTITCRASQSIRSWLAWYQQKAGKAPKLLIYKASSLESGVPARFSGSGSGTEFTLSISSLQPDDFATYYCQQYDSYPYTFGQGTKLEIK

SEQ ID NO: 5264 - protein, 93 aa, Homo sapiens
DIQMTQSPSTLSASVGDRVTITCRASQSIRSWLAWYQQKAGKAPKLLIYKASSLESGVPSRFSGSGSGTEFTLTISSLQPDDFATYYCQQYDS

SEQ ID NO: 5265 - protein, 107 aa, Homo sapiens
DIQMTQSPSTLSASVGDRVTITCRASQSIRSWLAWYQQKAGKAPKLLIYKASSLESGVPSRFSGSGSGTEFTLTISSLQPDDFATYYCQQYDSYPYTFGQGTKLEIK

SEQ ID NO: 5266 - protein, 95 aa, Homo sapiens
DIQMTQSPSTLSASVGDRVTITCRASQSISDWLAWFQQKPGKAPNLLISKASNLETGVPSRFSGSGSGTEFTLTISSLQPDDFATYYCQHYNSYS

SEQ ID NO: 5267 - protein, 107 aa, Homo sapiens
DIQMTQSPSTLSASVGDRVTITCRASQSISDWLAWFQQKPGKAPNLLISKASNLETGVPSRFSGSGSGTEFTLTISSLQPDDFATYYCQHYNSYSATFGQGTKVEIK

SEQ ID NO: 5268 - protein, 94 aa, Homo sapiens
DIQMTQSPSTLSASVGDRVTITCRASQSISDWLAWYQQKPGKAPKLLIYKASTLESGVPSRFSGSGSGTEFTLTISSLQPGDFATYYCQQYNSY

SEQ ID NO: 5269 - protein, 108 aa, Homo sapiens
DIQMTQSPSTLSASVGDRVTITCRASQSISDWLAWYQQKPGKAPKLLIYKASTLESGVPSRFSGSGSGTEFTLTISSLQPGDFATYYCQQYNSYRMYTFGQGTKLEIK

SEQ ID NO: 5270 - protein, 95 aa, Homo sapiens
DIQMTQSPSTLSASVGDRVTITCRASQSISDWLAWYQQKPGKAPKLVIYKASNLERGVPPRFSGSGSGTEFTLTISSLQPDDLATYYCQHYNTYS

SEQ ID NO: 5271 - protein, 107 aa, Homo sapiens
DIQMTQSPSTLSASVGDRVTITCRASQSISDWLAWYQQKPGKAPKLVIYKASNLERGVPPRFSGSGSGTEFTLTISSLQPDDLATYYCQHYNTYSGTFGQGTKLEIK

SEQ ID NO: 5272 - protein, 95 aa, Homo sapiens
DIQMTQSPSTLSASVGDRVTITCRASQSISNWLAWYQQKPGKAPKLLIHQASSLESGVPSRFSGSASGTEFTLTISSLQPDDFATYYCQQYNSYS

SEQ ID NO: 5273 - protein, 107 aa, Homo sapiens
DIQMTQSPSTLSASVGDRVTITCRASQSISNWLAWYQQKPGKAPKLLIHQASSLESGVPSRFSGSASGTEFTLTISSLQPDDFATYYCQQYNSYSSYTFGQGTKLEI

SEQ ID NO: 5274 - protein, 94 aa, Homo sapiens
DIQMTQSPSTLSASVGDRVTITCRASQSISNWLAWYQQKPGKAPKLLIYKASLLESGVPSRFSGSGSGTEFTLTISSLQPDDFATYFCQQYNTY

SEQ ID NO: 5275 - protein, 107 aa, Homo sapiens
DIQMTQSPSTLSASVGDRVTITCRASQSISNWLAWYQQKPGKAPKLLIYKASLLESGVPSRFSGSGSGTEFTLTISSLQPDDFATYFCQQYNTYYITFAGGTKVEIK

SEQ ID NO: 5276 - protein, 94 aa, Homo sapiens
DIQMTQSPSTLSASVGDRVTITCRASQSISNWLAWYQQKPGKAPKLLIYKASSLESGVPSRFSGSGSGTEFTLAISSLQPDDFATYYCQQYNNY

SEQ ID NO: 5277 - protein, 107 aa, Homo sapiens
DIQMTQSPSTLSASVGDRVTITCRASQSISNWLAWYQQKPGKAPKLLIYKASSLESGVPSRFSGSGSGTEFTLAISSLQPDDFATYYCQQYNNYFFTFGPGTKVDIK

SEQ ID NO: 5278 - protein, 91 aa, Homo sapiens
DIQMTQSPSTLSASVGDRVTITCRASQSISNWLAWYQQKPGKAPKLLIYKASSLQSGVPSRFSGSGSGTDFTLTISSLQPDDFATYYCQHY

SEQ ID NO: 5279 - protein, 103 aa, Homo sapiens
DIQMTQSPSTLSASVGDRVTITCRASQSISNWLAWYQQKPGKAPKLLIYKASSLQSGVPSRFSGSGSGTDFTLTISSLQPDDFATYYCQHYRTFGQGTKVEIK

SEQ ID NO: 5280 - protein, 95 aa, Homo sapiens
DIQMTQSPSTLSASVGDRVTITCRASQSISNWLAWYQQKPGKAPKLLIYKASYLDDGVPSRFSGSGSGTEFTLTISSLQPDDFATYYCQQYDVYS

SEQ ID NO: 5281 - protein, 107 aa, Homo sapiens
DIQMTQSPSTLSASVGDRVTITCRASQSISNWLAWYQQKPGKAPKLLIYKASYLDDGVPSRFSGSGSGTEFTLTISSLQPDDFATYYCQQYDVYSRTFGQGTKVEIK

SEQ ID NO: 5282 - protein, 96 aa, Homo sapiens
DIQMTQSPSTLSASVGDRVTITCRASQSISNWLAWYQQKPGKAPKSLIHEASTLESGVPSRFSGSGSGTEFTLTITSLQPDDFATYYCQQYKSYSP

SEQ ID NO: 5283 - protein, 106 aa, Homo sapiens
DIQMTQSPSTLSASVGDRVTITCRASQSISNWLAWYQQKPGKAPKSLIHEASTLESGVPSRFSGSGSGTEFTLTITSLQPDDFATYYCQQYKSYSPTFGQGTKVEV

SEQ ID NO: 5284 - protein, 95 aa, Homo sapiens
DIQMTQSPSTLSASVGDRVTITCRASQSISNWLAWYQQKPRKAPKLLIYKASSLESGVPSRFSGSGSGTEFSLTISSLQPDDFATYYCQQYTTYS

SEQ ID NO: 5285 - protein, 107 aa, Homo sapiens
DIQMTQSPSTLSASVGDRVTITCRASQSISNWLAWYQQKPRKAPKLLIYKASSLESGVPSRFSGSGSGTEFSLTISSLQPDDFATYYCQQYTTYSQTFGQGTKVEIK

SEQ ID NO: 5286 - protein, 93 aa, Homo sapiens
DIQMTQSPSTLSASVGDRVTITCRASQSISNWLTWYQQKPGKAPKVLIYKASSLESGVPSRFSGSGSGTEFTLTISSLQPDDFATYYCQHYNF

SEQ ID NO: 5287 - protein, 107 aa, Homo sapiens
DIQMTQSPSTLSASVGDRVTITCRASQSISNWLTWYQQKPGKAPKVLIYKASSLESGVPSRFSGSGSGTEFTLTISSLQPDDFATYYCQHYNFYRFTFGPGTKVDIK

SEQ ID NO: 5288 - protein, 95 aa, Homo sapiens
DIQMTQSPSTLSASVGDRVTITCRASQSISPWLAWYQQKPGKAPKLLIYKASSLESGVPSRFSGSGSGTEFTLTISSLQPDDFATYYCQQYDSYS

SEQ ID NO: 5289 - protein, 107 aa, Homo sapiens
DIQMTQSPSTLSASVGDRVTITCRASQSISPWLAWYQQKPGKAPKLLIYKASSLESGVPSRFSGSGSGTEFTLTISSLQPDDFATYYCQQYDSYSGAFGPGTKVDIK

SEQ ID NO: 5290 - protein, 95 aa, Homo sapiens
DIQMTQSPSTLSASVGDRVTITCRASQSISRWLAWYQQKPGKAPKLLIHQVSNLESGVPSRFSGSGSGTEFTLTISSLQPDDFATYYCQQYNSFS

SEQ ID NO: 5291 - protein, 108 aa, Homo sapiens
DIQMTQSPSTLSASVGDRVTITCRASQSISRWLAWYQQKPGKAPKLLIHQVSNLESGVPSRFSGSGSGTEFTLTISSLQPDDFATYYCQQYNSFSGYTFGQGTKLEIK

SEQ ID NO: 5292 - protein, 96 aa, Homo sapiens
DIQMTQSPSTLSASVGDRVTITCRASQSISRWLAWYQQKPGKAPKLLIYEASSLESGVPSRFSGSGSGTEFTLTISSLQPDDLATYYCQHYNTYFP

SEQ ID NO: 5293 - protein, 109 aa, Homo sapiens
DIQMTQSPSTLSASVGDRVTITCRASQSISRWLAWYQQKPGKAPKLLIYEASSLESGVPSRFSGSGSGTEFTLTISSLQPDDLATYYCQHYNTYFPEGTFGQGTKVEIK

SEQ ID NO: 5294 - protein, 95 aa, Homo sapiens
DIQMTQSPSTLSASVGDRVTITCRASQSISRWLAWYQQKPGKAPKLLIYKASILESGVPSRFSGSGSGTEFTLTISSLQPDDFATYYCQQYYTYS

SEQ ID NO: 5295 - protein, 107 aa, Homo sapiens
DIQMTQSPSTLSASVGDRVTITCRASQSISRWLAWYQQKPGKAPKLLIYKASILESGVPSRFSGSGSGTEFTLTISSLQPDDFATYYCQQYYTYSYTFGQGTKLEIK

SEQ ID NO: 5296 - protein, 93 aa, Homo sapiens
DIQMTQSPSTLSASVGDRVTITCRASQSISRWLAWYQQKPGKAPKLLIYKASTLESGVPSRFSGSGSGTEFTLTINSLQPDDFATYYCQQYNS

SEQ ID NO: 5297 - protein, 107 aa, Homo sapiens
DIQMTQSPSTLSASVGDRVTITCRASQSISRWLAWYQQKPGKAPKLLIYKASTLESGVPSRFSGSGSGTEFTLTINSLQPDDFATYYCQQYNSQWCTFGQGTKLEIK

SEQ ID NO: 5298 - protein, 96 aa, Homo sapiens
DIQMTQSPSTLSASVGDRVTITCRASQSISRWLAWYQQKPGKAPKLLIYQASTLESGVPSRFSGSGSGTEFTLTISSLQPDDFATYYCQEYNGYSP

SEQ ID NO: 5299 - protein, 108 aa, Homo sapiens
DIQMTQSPSTLSASVGDRVTITCRASQSISRWLAWYQQKPGKAPKLLIYQASTLESGVPSRFSGSGSGTEFTLTISSLQPDDFATYYCQEYNGYSPWTFGQGTKVEIK

SEQ ID NO: 5300 - protein, 95 aa, Homo sapiens
DIQMTQSPSTLSASVGDRVTITCRASQSISSWLAWYQLKPGKAPKLLIYKASSLQSGIPSRFSGSGSGTEFTLTISSLQPDDLATYYCQQYDTYS

SEQ ID NO: 5301 - protein, 107 aa, Homo sapiens
DIQMTQSPSTLSASVGDRVTITCRASQSISSWLAWYQLKPGKAPKLLIYKASSLQSGIPSRFSGSGSGTEFTLTISSLQPDDLATYYCQQYDTYSSQFGQGTKVEIK

SEQ ID NO: 5302 - protein, 95 aa, Homo sapiens
DIQMTQSPSTLSASVGDRVTITCRASQSISSWLAWYQQKPGKAPKILIYKASSLESGVPSRFSGSGSGTEFTLTISSLQPDDFATYYCQHYNSYS

SEQ ID NO: 5303 - protein, 107 aa, Homo sapiens
DIQMTQSPSTLSASVGDRVTITCRASQSISSWLAWYQQKPGKAPKILIYKASSLESGVPSRFSGSGSGTEFTLTISSLQPDDFATYYCQHYNSYSRTFGQGTKVEIK

SEQ ID NO: 5304 - protein, 94 aa, Homo sapiens
DIQMTQSPSTLSASVGDRVTITCRASQSISSWLAWYQQKPGKAPKLLIYKASILESGVPSGFSGSGSGTEFTLTISSLQPDDFATYYCQQYNSY

SEQ ID NO: 5305 - protein, 107 aa, Homo sapiens
DIQMTQSPSTLSASVGDRVTITCRASQSISSWLAWYQQKPGKAPKLLIYKASILESGVPSGFSGSGSGTEFTLTISSLQPDDFATYYCQQYNSYPLTFGGGTKVEIK

SEQ ID NO: 5306 - protein, 95 aa, Homo sapiens
DIQMTQSPSTLSASVGDRVTITCRASQSISSWLAWYQQKPGKAPKLLIYKASNLESGVPSRFSGSGSGTEFTLTISSLQPDDFAAYYCQHYNTYS

SEQ ID NO: 5307 - protein, 107 aa, Homo sapiens
DIQMTQSPSTLSASVGDRVTITCRASQSISSWLAWYQQKPGKAPKLLIYKASNLESGVPSRFSGSGSGTEFTLTISSLQPDDFAAYYCQHYNTYSGTFGQGTKVEIK

SEQ ID NO: 5308 - protein, 95 aa, Homo sapiens
DIQMTQSPSTLSASVGDRVTITCRASQSISSWLAWYQQKPGKAPKLLIYKASNLESGVPSRFSGSGSGTEFTLTISSLQPDDFATYYCQQYNSNF

SEQ ID NO: 5309 - protein, 107 aa, Homo sapiens
DIQMTQSPSTLSASVGDRVTITCRASQSISSWLAWYQQKPGKAPKLLIYKASNLESGVPSRFSGSGSGTEFTLTISSLQPDDFATYYCQQYNSNFLTFGGGTKVEIK

SEQ ID NO: 5310 - protein, 96 aa, Homo sapiens
DIQMTQSPSTLSASVGDRVTITCRASQSISSWLAWYQQKPGKAPKLLIYKASNLQSGVPSRFSGSGSGTEFTLTISSLQPDDFATYVCQQYDNFYP

SEQ ID NO: 5311 - protein, 108 aa, Homo sapiens
DIQMTQSPSTLSASVGDRVTITCRASQSISSWLAWYQQKPGKAPKLLIYKASNLQSGVPSRFSGSGSGTEFTLTISSLQPDDFATYVCQQYDNFYPYTFGQGTKLEIK

SEQ ID NO: 5312 - protein, 95 aa, Homo sapiens
DIQMTQSPSTLSASVGDRVTITCRASQSISSWLAWYQQKPGKAPKLLIYKASSLENGVPSRFSGSGSGTEFTLTISSLQPDDFASYYCQHYDSYS

SEQ ID NO: 5313 - protein, 107 aa, Homo sapiens
DIQMTQSPSTLSASVGDRVTITCRASQSISSWLAWYQQKPGKAPKLLIYKASSLENGVPSRFSGSGSGTEFTLTISSLQPDDFASYYCQHYDSYSGTFGQGTKVEIK

SEQ ID NO: 5314 - protein, 95 aa, Homo sapiens
DIQMTQSPSTLSASVGDRVTITCRASQSISSWLAWYQQKPGKAPKLLIYKASSLESGVPSRFSGSGSGTEFSLSISSLQPDDFATYFCLQYESYS

SEQ ID NO: 5315 - protein, 107 aa, Homo sapiens
DIQMTQSPSTLSASVGDRVTITCRASQSISSWLAWYQQKPGKAPKLLIYKASSLESGVPSRFSGSGSGTEFSLSISSLQPDDFATYFCLQYESYSETFGGGTKVEIK

SEQ ID NO: 5316 - protein, 89 aa, Homo sapiens
DIQMTQSPSTLSASVGDRVTITCRASQSISSWLAWYQQKPGKAPKLLIYKASSLESGVPSRFSGSGSGTEFTLTISSLQPDDFATYYCQ

SEQ ID NO: 5317 - protein, 93 aa, Homo sapiens
DIQMTQSPSTLSASVGDRVTITCRASQSISSWLAWYQQKPGKAPKLLIYKASSLESGVPSRFSGSGSGTEFTLTISSLQPDDFATYYCQQYNS

SEQ ID NO: 5318 - protein, 95 aa, Homo sapiens
DIQMTQSPSTLSASVGDRVTITCRASQSISSWLAWYQQKPGKAPKLLIYKASSLESGVPSRFSGSGSGTEFTLTISSLQPDDFATYYCQQYNSFS

SEQ ID NO: 5319 - protein, 108 aa, Homo sapiens
DIQMTQSPSTLSASVGDRVTITCRASQSISSWLAWYQQKPGKAPKLLIYKASSLESGVPSRFSGSGSGTEFTLTISSLQPDDFATYYCQQYNSFSGYTFGQGTKLEIK

SEQ ID NO: 5320 - protein, 107 aa, Homo sapiens
DIQMTQSPSTLSASVGDRVTITCRASQSISSWLAWYQQKPGKAPKLLIYKASSLESGVPSRFSGSGSGTEFTLTISSLQPDDFATYYCQQYNSPTWTFGQGTKVEIK

SEQ ID NO: 5321 - protein, 94 aa, Homo sapiens
DIQMTQSPSTLSASVGDRVTITCRASQSISSWLAWYQQKPGKAPKLLIYKASSLESGVPSRFSGSGSGTEFTLTISSLQPDDFATYYCQQYNSY

SEQ ID NO: 5322 - protein, 107 aa, Homo sapiens
DIQMTQSPSTLSASVGDRVTITCRASQSISSWLAWYQQKPGKAPKLLIYKASSLESGVPSRFSGSGSGTEFTLTISSLQPDDFATYYCQQYNSYLFTFGPGTKVDIK

SEQ ID NO: 5323 - protein, 107 aa, Homo sapiens
DIQMTQSPSTLSASVGDRVTITCRASQSISSWLAWYQQKPGKAPKLLIYKASSLESGVPSRFSGSGSGTEFTLTISSLQPDDFATYYCQQYNSYLGTFGQGTKVEIK

SEQ ID NO: 5324 - protein, 107 aa, Homo sapiens
DIQMTQSPSTLSASVGDRVTITCRASQSISSWLAWYQQKPGKAPKLLIYKASSLESGVPSRFSGSGSGTEFTLTISSLQPDDFATYYCQQYNSYLYTFGQGTKLEIK

SEQ ID NO: 5325 - protein, 106 aa, Homo sapiens
DIQMTQSPSTLSASVGDRVTITCRASQSISSWLAWYQQKPGKAPKLLIYKASSLESGVPSRFSGSGSGTEFTLTISSLQPDDFATYYCQQYNSYPTFGQGTKVEIK

SEQ ID NO: 5326 - protein, 107 aa, Homo sapiens
DIQMTQSPSTLSASVGDRVTITCRASQSISSWLAWYQQKPGKAPKLLIYKASSLESGVPSRFSGSGSGTEFTLTISSLQPDDFATYYCQQYNSYPWTFGQGTKVEIK

SEQ ID NO: 5327 - protein, 95 aa, Homo sapiens
DIQMTQSPSTLSASVGDRVTITCRASQSISSWLAWYQQKPGKAPKLLIYKASSLESGVPSRFSGSGSGTEFTLTISSLQPDDFATYYCQQYNSYS

SEQ ID NO: 5328 - protein, 107 aa, Homo sapiens
DIQMTQSPSTLSASVGDRVTITCRASQSISSWLAWYQQKPGKAPKLLIYKASSLESGVPSRFSGSGSGTEFTLTISSLQPDDFATYYCQQYNSYSGTFGQGTKVEIK

SEQ ID NO: 5329 - protein, 108 aa, Homo sapiens
DIQMTQSPSTLSASVGDRVTITCRASQSISSWLAWYQQKPGKAPKLLIYKASSLESGVPSRFSGSGSGTEFTLTISSLQPDDFATYYCQQYNSYSLWTFGQGTKVEIK

SEQ ID NO: 5330 - protein, 96 aa, Homo sapiens
DIQMTQSPSTLSASVGDRVTITCRASQSISSWLAWYQQKPGKAPKLLIYKASSLESGVPSRFSGSGSGTEFTLTISSLQPDDFATYYCQQYNSYSP

SEQ ID NO: 5331 - protein, 108 aa, Homo sapiens
DIQMTQSPSTLSASVGDRVTITCRASQSISSWLAWYQQKPGKAPKLLIYKASSLESGVPSRFSGSGSGTEFTLTISSLQPDDFATYYCQQYNSYSPWTFGQGTKVEIK

SEQ ID NO: 5332 - protein, 108 aa, Homo sapiens
DIQMTQSPSTLSASVGDRVTITCRASQSISSWLAWYQQKPGKAPKLLIYKASSLESGVPSRFSGSGSGTEFTLTISSLQPDDFATYYCQQYNSYSPYTFGQGTKLEIK

SEQ ID NO: 5333 - protein, 106 aa, Homo sapiens
DIQMTQSPSTLSASVGDRVTITCRASQSISSWLAWYQQKPGKAPKLLIYKASSLESGVPSRFSGSGSGTEFTLTISSLQPDDFATYYCQQYNSYSTFGQGTKVEIK

SEQ ID NO: 5334 - protein, 107 aa, Homo sapiens
DIQMTQSPSTLSASVGDRVTITCRASQSISSWLAWYQQKPGKAPKLLIYKASSLESGVPSRFSGSGSGTEFTLTISSLQPDDFATYYCQQYNSYSWTFGQGTKVEIK

SEQ ID NO: 5335 - protein, 107 aa, Homo sapiens
DIQMTQSPSTLSASVGDRVTITCRASQSISSWLAWYQQKPGKAPKLLIYKASSLESGVPSRFSGSGSGTEFTLTISSLQPDDFATYYCQQYNSYSYTFGQGTKLEIK

SEQ ID NO: 5336 - protein, 106 aa, Homo sapiens
DIQMTQSPSTLSASVGDRVTITCRASQSISSWLAWYQQKPGKAPKLLIYKASSLESGVPSRFSGSGSGTEFTLTISSLQPDDFATYYCQQYNSYYTFGQGTKLEIK

SEQ ID NO: 5337 - protein, 104 aa, Homo sapiens
DIQMTQSPSTLSASVGDRVTITCRASQSISSWLAWYQQKPGKAPKLLIYKASSLESGVPSRFSGSGSGTEFTLTISSLQPDDFATYYCQTPRGPFGQGTKVEIK

SEQ ID NO: 5338 - protein, 95 aa, Homo sapiens
DIQMTQSPSTLSASVGDRVTITCRASQSISSWLAWYQQKPGKAPKLLIYKTSSLESGVPSRFSGSGSGTEFTLIISSLQPDDSATYYCQHYNSYS

SEQ ID NO: 5339 - protein, 107 aa, Homo sapiens
DIQMTQSPSTLSASVGDRVTITCRASQSISSWLAWYQQKPGKAPKLLIYKTSSLESGVPSRFSGSGSGTEFTLIISSLQPDDSATYYCQHYNSYSGTFGQGTKVAIK

SEQ ID NO: 5340 - protein, 95 aa, Homo sapiens
DIQMTQSPSTLSASVGDRVTITCRASQSISSWLAWYQQKPGQAPKLLIYKASHLESGVPARFSGSGSETEFTLTISSLQADDFATYYCQEYKSYS

SEQ ID NO: 5341 - protein, 108 aa, Homo sapiens
DIQMTQSPSTLSASVGDRVTITCRASQSISSWLAWYQQKPGQAPKLLIYKASHLESGVPARFSGSGSETEFTLTISSLQADDFATYYCQEYKSYSQWTFGQGTRVDVK

SEQ ID NO: 5342 - protein, 93 aa, Homo sapiens
DIQMTQSPSTLSASVGDRVTITCRASQSISSWLAWYQQTPGKAPKLLIYKASSLENGVPSRFSGSGSGTEFTLTISSLQPDDFATYYCQQYNS

SEQ ID NO: 5343 - protein, 107 aa, Homo sapiens
DIQMTQSPSTLSASVGDRVTITCRASQSISSWLAWYQQTPGKAPKLLIYKASSLENGVPSRFSGSGSGTEFTLTISSLQPDDFATYYCQQYNSNFLTFGQGTKVEIK

SEQ ID NO: 5344 - protein, 93 aa, Homo sapiens
DIQMTQSPSTLSASVGDRVTITCRASQSISSWVAWYQKKPGKAPNLLIYKASNLESGVPPRFSGSGSGTEFTLTISSLQPDDFATYFCQQYDS

SEQ ID NO: 5345 - protein, 106 aa, Homo sapiens
DIQMTQSPSTLSASVGDRVTITCRASQSISSWVAWYQKKPGKAPNLLIYKASNLESGVPPRFSGSGSGTEFTLTISSLQPDDFATYFCQQYDSYPYTFGQGTTLEI

SEQ ID NO: 5346 - protein, 94 aa, Homo sapiens
DIQMTQSPSTLSASVGDRVTITCRASQSISTWLAWYQQKPGKAPKLLIYKASKLERGVPSRFSGSGSGTEFTLTISGLQPDDFATYYCGQYNHY

SEQ ID NO: 5347 - protein, 108 aa, Homo sapiens
DIQMTQSPSTLSASVGDRVTITCRASQSISTWLAWYQQKPGKAPKLLIYKASKLERGVPSRFSGSGSGTEFTLTISGLQPDDFATYYCGQYNHYTSYAFGQGTKLEIK

SEQ ID NO: 5348 - protein, 95 aa, Homo sapiens
DIQMTQSPSTLSASVGDRVTITCRASQSISTWLAWYQQKPGKAPKLLIYKASSLEGGVPSRFSGGGSGTDFTLTITSLQPDDFATYYCQYYDSYS

SEQ ID NO: 5349 - protein, 107 aa, Homo sapiens
DIQMTQSPSTLSASVGDRVTITCRASQSISTWLAWYQQKPGKAPKLLIYKASSLEGGVPSRFSGGGSGTDFTLTITSLQPDDFATYYCQYYDSYSGTFGQGTKVDIK

SEQ ID NO: 5350 - protein, 94 aa, Homo sapiens
DIQMTQSPSTLSASVGDRVTITCRASQSISTWLAWYQQKPGKAPKLLIYKASSLESGVPSRFSGSGSGTEFTLTIISLQPDDFATYYCQQYNSY

SEQ ID NO: 5351 - protein, 106 aa, Homo sapiens
DIQMTQSPSTLSASVGDRVTITCRASQSISTWLAWYQQKPGKAPKLLIYKASSLESGVPSRFSGSGSGTEFTLTIISLQPDDFATYYCQQYNSYPTFGQGTKVEIK

SEQ ID NO: 5352 - protein, 95 aa, Homo sapiens
DIQMTQSPSTLSASVGDRVTITCRASQSISTWLAWYQQKPGKAPKLLIYKASSLESGVPSRFSGSGSGTEFTLTISSLQPDDCATFYCQQYSSYS

SEQ ID NO: 5353 - protein, 107 aa, Homo sapiens
DIQMTQSPSTLSASVGDRVTITCRASQSISTWLAWYQQKPGKAPKLLIYKASSLESGVPSRFSGSGSGTEFTLTISSLQPDDCATFYCQQYSSYSGTFGQGTKVEIK

SEQ ID NO: 5354 - protein, 91 aa, Homo sapiens
DIQMTQSPSTLSASVGDRVTITCRASQSISTWLAWYQQKPGKAPKLLIYKASSLESGVPSRFSGSGSGTEFTLTISSLQPDDFATYYCQQY

SEQ ID NO: 5355 - protein, 103 aa, Homo sapiens
DIQMTQSPSTLSASVGDRVTITCRASQSISTWLAWYQQKPGKAPKLLIYKASSLESGVPSRFSGSGSGTEFTLTISSLQPDDFATYYCQQYRTFGQGTKVEIK

SEQ ID NO: 5356 - protein, 95 aa, Homo sapiens
DIQMTQSPSTLSASVGDRVTITCRASQSISTWLAWYQQKPGKAPKLLIYKASTIQSGVPSRFSGSGSGTEFTLTISSLQPDDFATYYCQQYKSYS

SEQ ID NO: 5357 - protein, 107 aa, Homo sapiens
DIQMTQSPSTLSASVGDRVTITCRASQSISTWLAWYQQKPGKAPKLLIYKASTIQSGVPSRFSGSGSGTEFTLTISSLQPDDFATYYCQQYKSYSFLSFGGGTKVEI

SEQ ID NO: 5358 - protein, 94 aa, Homo sapiens
DIQMTQSPSTLSASVGDRVTITCRASQSISTWLAWYQQKPGRAPKVLIYKASSLQSGVPSTFSGSGSGTEFTLTISRLQSDDFATYYCQQYKTN

SEQ ID NO: 5359 - protein, 106 aa, Homo sapiens
DIQMTQSPSTLSASVGDRVTITCRASQSISTWLAWYQQKPGRAPKVLIYKASSLQSGVPSTFSGSGSGTEFTLTISRLQSDDFATYYCQQYKTNPYTFGQGTKLEI

SEQ ID NO: 5360 - protein, 93 aa, Homo sapiens
DIQMTQSPSTLSASVGDRVTITCRASQSISTWMAWYQQKPGKAPKLLIYKASNLESGVPSRFSGSGSGTEFTLTISGLQPDDFATYHCQQYNS

SEQ ID NO: 5361 - protein, 108 aa, Homo sapiens
DIQMTQSPSTLSASVGDRVTITCRASQSISTWMAWYQQKPGKAPKLLIYKASNLESGVPSRFSGSGSGTEFTLTISGLQPDDFATYHCQQYNSFLTYTFGQGTKLEIK

SEQ ID NO: 5362 - protein, 92 aa, Homo sapiens
DIQMTQSPSTLSASVGDRVTITCRASQSITRRLAWYQKKPGKPPKLLIYEASTLENGVPSRFSGTGSGTEFTLTISSLQPDDLATYFCQQYN

SEQ ID NO: 5363 - protein, 106 aa, Homo sapiens
DIQMTQSPSTLSASVGDRVTITCRASQSITRRLAWYQKKPGKPPKLLIYEASTLENGVPSRFSGTGSGTEFTLTISSLQPDDLATYFCQQYNSLSTFGPGTKVDVK

SEQ ID NO: 5364 - protein, 95 aa, Homo sapiens
DIQMTQSPSTLSASVGDRVTITCRASQSITTWLAWHQQKPGKAPKVLIYKASSLQSGVPSRFSGSGSGTEFTLTISSLQPDDFATYYCQQYSSYS

SEQ ID NO: 5365 - protein, 109 aa, Homo sapiens
DIQMTQSPSTLSASVGDRVTITCRASQSITTWLAWHQQKPGKAPKVLIYKASSLQSGVPSRFSGSGSGTEFTLTISSLQPDDFATYYCQQYSSYSGAITFGQGTRLEIK

SEQ ID NO: 5366 - protein, 90 aa, Homo sapiens
DIQMTQSPSTLSASVGDRVTITCRASQSSSDWLAWYQQKPGKAPKLLIYKASTLETGVPSRFSGSGSETEFTLTISSLQPDDFATYYCQQ

SEQ ID NO: 5367 - protein, 105 aa, Homo sapiens
DIQMTQSPSTLSASVGDRVTITCRASQSSSDWLAWYQQKPGKAPKLLIYKASTLETGVPSRFSGSGSETEFTLTISSLQPDDFATYYCQQSFMYTFGQGTKVEMK

SEQ ID NO: 5368 - protein, 90 aa, Homo sapiens
DIQMTQSPSTLSASVGDRVTITCRASQSSSNWLAWYQQKPGKAPKLLIYKASTLETGVPSRFSGSGSETEFTLTISSLQPDDFATYYCQE

SEQ ID NO: 5369 - protein, 105 aa, Homo sapiens
DIQMTQSPSTLSASVGDRVTITCRASQSSSNWLAWYQQKPGKAPKLLIYKASTLETGVPSRFSGSGSETEFTLTISSLQPDDFATYYCQESFMYTFGQGTKVEIK

SEQ ID NO: 5370 - protein, 94 aa, Homo sapiens
DIQMTQSPSTLSASVGDRVTITCRASQSVDRWLAWYQQKPGKAPKLLIYKASSLDIGVPSRFSGNGSGTDFTLTISSLQPDDFATYYCQQFSRY

SEQ ID NO: 5371 - protein, 106 aa, Homo sapiens
DIQMTQSPSTLSASVGDRVTITCRASQSVDRWLAWYQQKPGKAPKLLIYKASSLDIGVPSRFSGNGSGTDFTLTISSLQPDDFATYYCQQFSRYLTFGQGTKVEIK

SEQ ID NO: 5372 - protein, 95 aa, Homo sapiens
DIQMTQSPSTLSASVGDRVTITCRASQSVFSWLAWYQQKPGKAPKLLIYKASSLEYGVPSRFSGSGSGTDFTLTISSLQPDDFATYYCQQYQRYS

SEQ ID NO: 5373 - protein, 107 aa, Homo sapiens
DIQMTQSPSTLSASVGDRVTITCRASQSVFSWLAWYQQKPGKAPKLLIYKASSLEYGVPSRFSGSGSGTDFTLTISSLQPDDFATYYCQQYQRYSWTFGQGTKVEIK

SEQ ID NO: 5374 - protein, 95 aa, Homo sapiens
DIQMTQSPSTLSASVGDRVTITCRASQSVFSWLAWYQQRPGKAPKLLIYKASNLESGVPSRFSGSGSGTEFTLTINSLQPDDFATYYCQQYQSYS

SEQ ID NO: 5375 - protein, 107 aa, Homo sapiens
DIQMTQSPSTLSASVGDRVTITCRASQSVFSWLAWYQQRPGKAPKLLIYKASNLESGVPSRFSGSGSGTEFTLTINSLQPDDFATYYCQQYQSYSWTFGQGTNVEIK

SEQ ID NO: 5376 - protein, 91 aa, Homo sapiens
DIQMTQSPSTLSASVGDRVTITCRASQSVGNWLAWFQQKPGKAPKLLIYKASKLESGVPSRFSGSESGTEFTLTISSLQPDDFATYYCQQY

SEQ ID NO: 5377 - protein, 107 aa, Homo sapiens
DIQMTQSPSTLSASVGDRVTITCRASQSVGNWLAWFQQKPGKAPKLLIYKASKLESGVPSRFSGSESGTEFTLTISSLQPDDFATYYCQQYDLYPYSFGQGTKVEIK

SEQ ID NO: 5378 - protein, 95 aa, Homo sapiens
DIQMTQSPSTLSASVGDRVTITCRASQSVSNWLAWYQQKPGKAPKLLIYKASILESGVPSRYSGSGSATEFTLTISSLQPDDFATYYCQQYSSYS

SEQ ID NO: 5379 - protein, 107 aa, Homo sapiens
DIQMTQSPSTLSASVGDRVTITCRASQSVSNWLAWYQQKPGKAPKLLIYKASILESGVPSRYSGSGSATEFTLTISSLQPDDFATYYCQQYSSYSWTFGQGTKVDIK

SEQ ID NO: 5380 - protein, 93 aa, Homo sapiens
DIQMTQSPSTLSASVGDRVTITCRASQSVSTWLAWYQQKPGKAPKLLIYKASSLESGVPSRFSGSGSGTEFTLTISSLQPDDFAIYFCQHYNT

SEQ ID NO: 5381 - protein, 107 aa, Homo sapiens
DIQMTQSPSTLSASVGDRVTITCRASQSVSTWLAWYQQKPGKAPKLLIYKASSLESGVPSRFSGSGSGTEFTLTISSLQPDDFAIYFCQHYNTYPYTFGQGTKLEIK

SEQ ID NO: 5382 - protein, 95 aa, Homo sapiens
DIQMTQSPSTLSASVGDRVTITCRASQTIDGGLAWYQQKPGKAPKLLIYKASTLESGVPSRFSGSGSGTDFTLTISSLQPDDFATYYCQHYNTYS

SEQ ID NO: 5383 - protein, 106 aa, Homo sapiens
DIQMTQSPSTLSASVGDRVTITCRASQTIDGGLAWYQQKPGKAPKLLIYKASTLESGVPSRFSGSGSGTDFTLTISSLQPDDFATYYCQHYNTYSCTFGQGTKLEI

SEQ ID NO: 5384 - protein, 93 aa, Homo sapiens
DIQMTQSPSTLSASVGDRVTITCRASQTIGSWLAWYQQKPGRAPNLLIYKASSLVSGVPSRFSGGGSETEFTLTISNLQPDDFATYYCQQYNT

SEQ ID NO: 5385 - protein, 107 aa, Homo sapiens
DIQMTQSPSTLSASVGDRVTITCRASQTIGSWLAWYQQKPGRAPNLLIYKASSLVSGVPSRFSGGGSETEFTLTISNLQPDDFATYYCQQYNTSPLTFGGGTKVEVK

SEQ ID NO: 5386 - protein, 95 aa, Homo sapiens
DIQMTQSPSTLSASVGDRVTITCRASQTIGSYLAWYQQKPGKAPKLLISKTSNLEGGVPSRFSGSGSGTEFTLTISTLQPDDFATYYCQHYNFYS

SEQ ID NO: 5387 - protein, 107 aa, Homo sapiens
DIQMTQSPSTLSASVGDRVTITCRASQTIGSYLAWYQQKPGKAPKLLISKTSNLEGGVPSRFSGSGSGTEFTLTISTLQPDDFATYYCQHYNFYSWTFGQGTKVEIK

SEQ ID NO: 5388 - protein, 94 aa, Homo sapiens
DIQMTQSPSTLSASVGDRVTITCRASQTISRWLAWYQQAPGKAPKLLIYKASILESGVPSRFSGSGSGTDFTLTISSLQPDDFATYYCQQYNSY

SEQ ID NO: 5389 - protein, 107 aa, Homo sapiens
DIQMTQSPSTLSASVGDRVTITCRASQTISRWLAWYQQAPGKAPKLLIYKASILESGVPSRFSGSGSGTDFTLTISSLQPDDFATYYCQQYNSYPWTFGQGTKVDIK

SEQ ID NO: 5390 - protein, 94 aa, Homo sapiens
DIQMTQSPSTLSASVGDRVTITCRASQTISSWLAWYQHKPGKAPKLLIYQASSLESGVPSRFSGSGSGTEFTLTISSLQPDDFATYYCQQYNSY

SEQ ID NO: 5391 - protein, 107 aa, Homo sapiens
DIQMTQSPSTLSASVGDRVTITCRASQTISSWLAWYQHKPGKAPKLLIYQASSLESGVPSRFSGSGSGTEFTLTISSLQPDDFATYYCQQYNSYFYTFGQGTKLEIK

SEQ ID NO: 5392 - protein, 94 aa, Homo sapiens
DIQMTQSPSTLSASVGDRVTITCRASQTISSWLAWYQQKPGKAPKLLIYEASNLESGVPSRFSGSGSRTEFTLTISSLQPDDFATYFCQQYNSY

SEQ ID NO: 5393 - protein, 107 aa, Homo sapiens
DIQMTQSPSTLSASVGDRVTITCRASQTISSWLAWYQQKPGKAPKLLIYEASNLESGVPSRFSGSGSRTEFTLTISSLQPDDFATYFCQQYNSYPYTFGQGTKLEIK

SEQ ID NO: 5394 - protein, 93 aa, Homo sapiens
DIQMTQSPSTLSASVGDRVTITCRASQTISSWLAWYQQKPGKAPKLLIYKASSLESGVPSRFSGSGSGTEFTLTISSLQPDDFATYYCQQYNS

SEQ ID NO: 5395 - protein, 107 aa, Homo sapiens
DIQMTQSPSTLSASVGDRVTITCRASQTISSWLAWYQQKPGKAPKLLIYKASSLESGVPSRFSGSGSGTEFTLTISSLQPDDFATYYCQQYNSYTISFGQGTKLEIK

SEQ ID NO: 5396 - protein, 95 aa, Homo sapiens
DIQMTQSPSTLSASVGDRVTITCRASQTISSWLAWYQQKPGKAPKVLIYEASSLESGVPSRFSGSGSGTEFTLTISSLQPDDFATYYCQQYNSYS

SEQ ID NO: 5397 - protein, 106 aa, Homo sapiens
DIQMTQSPSTLSASVGDRVTITCRASQTISSWLAWYQQKPGKAPKVLIYEASSLESGVPSRFSGSGSGTEFTLTISSLQPDDFATYYCQQYNSYSYTFGQGTKLEI

SEQ ID NO: 5398 - protein, 93 aa, Homo sapiens
DIQMTQSPSTLSASVGDRVTITCRASQTISTWLAWYQQKPGKAPKLLISEASRLESGVPSRFRGSGSGTEFTLTISSLQPDDFATYYCQQYNS

SEQ ID NO: 5399 - protein, 107 aa, Homo sapiens
DIQMTQSPSTLSASVGDRVTITCRASQTISTWLAWYQQKPGKAPKLLISEASRLESGVPSRFRGSGSGTEFTLTISSLQPDDFATYYCQQYNSYLITFGQGTRLEIK

SEQ ID NO: 5400 - protein, 94 aa, Homo sapiens
DIQMTQSPSTLSASVGDRVTITCRASQTVSKWLAWYQQKPGKAPKLLIYEASTLESGVPSRFSGSGSGTEFTLTISSLQPDDFGTYYCQQYNSY

SEQ ID NO: 5401 - protein, 107 aa, Homo sapiens
DIQMTQSPSTLSASVGDRVTITCRASQTVSKWLAWYQQKPGKAPKLLIYEASTLESGVPSRFSGSGSGTEFTLTISSLQPDDFGTYYCQQYNSYWITFGQGTRLEIK

SEQ ID NO: 5402 - protein, 95 aa, Homo sapiens
DIQMTQSPSTLSASVGDRVTITCRASQTVSSGLAWYQQKPGKAPKLLIYKASTLESGVPSRFSGSGSGTHFTLTISSLQPDDFATYYCQHYDTYS

SEQ ID NO: 5403 - protein, 107 aa, Homo sapiens
DIQMTQSPSTLSASVGDRVTITCRASQTVSSGLAWYQQKPGKAPKLLIYKASTLESGVPSRFSGSGSGTHFTLTISSLQPDDFATYYCQHYDTYSGTFGQGTKVEIK

SEQ ID NO: 5404 - protein, 95 aa, Homo sapiens
DIQMTQSPSTLSASVGDRVTITCRASRSVERWLAWYQQKPGQAPKLLIYKASYLESGVPSRFSGSGSETEFTLTISSLQADDFATYYCQEYRSYS

SEQ ID NO: 5405 - protein, 108 aa, Homo sapiens
DIQMTQSPSTLSASVGDRVTITCRASRSVERWLAWYQQKPGQAPKLLIYKASYLESGVPSRFSGSGSETEFTLTISSLQADDFATYYCQEYRSYSQWTFGQGTRVDVK

SEQ ID NO: 5406 - protein, 96 aa, Homo sapiens
DIQMTQSPSTLSASVGDRVTVTCRASQSISSWLAWYQQKSGKAPKLLIYKAANLESGVSSRFSGSGSGTEFTLTISSLQPDDFATYYCQQYDSFPP

SEQ ID NO: 5407 - protein, 107 aa, Homo sapiens
DIQMTQSPSTLSASVGDRVTVTCRASQSISSWLAWYQQKSGKAPKLLIYKAANLESGVSSRFSGSGSGTEFTLTISSLQPDDFATYYCQQYDSFPPTFGGGTKVEIK

SEQ ID NO: 5408 - protein, 96 aa, Homo sapiens
DIQMTQSPSTLSASVGDTITITCRASQNIETWLAWYQQKPGKAPKLLIREGSILQGGVPSRFSGSGSGTTFTLTISSPQPEDFATYYCQQYDNYPP

SEQ ID NO: 5409 - protein, 107 aa, Homo sapiens
DIQMTQSPSTLSASVGDTITITCRASQNIETWLAWYQQKPGKAPKLLIREGSILQGGVPSRFSGSGSGTTFTLTISSPQPEDFATYYCQQYDNYPPTFGQGTKVEIK

SEQ ID NO: 5410 - protein, 90 aa, Homo sapiens
DIQMTQSPSTLSASVGDTVNITCRASQSSSDWLAWYQQKPGKAPRLLIYKASTLESGVSSRFSGSGSETEFTLTISSLQPDDFATYFCQQ

SEQ ID NO: 5411 - protein, 105 aa, Homo sapiens
DIQMTQSPSTLSASVGDTVNITCRASQSSSDWLAWYQQKPGKAPRLLIYKASTLESGVSSRFSGSGSETEFTLTISSLQPDDFATYFCQQSFMYTFGPGTKVEIK

SEQ ID NO: 5412 - protein, 95 aa, Homo sapiens
DIQMTQSPSTLSASVGDTVTITCRASQRINSWLAWYQQKPGKAPKLLIYKTSTLESGVPSRFSGSESGTEFTLTIYSVQPDDFATYYCQQYSTYS

SEQ ID NO: 5413 - protein, 107 aa, Homo sapiens
DIQMTQSPSTLSASVGDTVTITCRASQRINSWLAWYQQKPGKAPKLLIYKTSTLESGVPSRFSGSESGTEFTLTIYSVQPDDFATYYCQQYSTYSMFTFGQGTNLEI

SEQ ID NO: 5414 - protein, 94 aa, Homo sapiens
DIQMTQSPSTLSASVGDTVTITCRASQTILSWLAWYQQKPGKAPRLLIYKASSLQSGVPSSFSGSGSGTEFTLTISSLQPDDFATYYCQQYTSY

SEQ ID NO: 5415 - protein, 107 aa, Homo sapiens
DIQMTQSPSTLSASVGDTVTITCRASQTILSWLAWYQQKPGKAPRLLIYKASSLQSGVPSSFSGSGSGTEFTLTISSLQPDDFATYYCQQYTSYPWTFGQGTKVEIK

SEQ ID NO: 5416 - protein, 95 aa, Homo sapiens
DIQMTQSPSTLSASVGERVTITCRASQDISTWLAWYQQKPGKAPNLLIYKASTLERGVPSRFSGSGSGTEFTLTISSLQPDDFASYYCQHYNTYS

SEQ ID NO: 5417 - protein, 107 aa, Homo sapiens
DIQMTQSPSTLSASVGERVTITCRASQDISTWLAWYQQKPGKAPNLLIYKASTLERGVPSRFSGSGSGTEFTLTISSLQPDDFASYYCQHYNTYSYTFGQGTKLEIK

SEQ ID NO: 5418 - protein, 95 aa, Homo sapiens
DIQMTQSPSTLSASVRDRVTITCRASQSIGTWLAWYQQKPGKAPKLLIYKASSLESGVPSRFSGSGSGTEFTLTISSLQPDDFATYYCQHYNTYS

SEQ ID NO: 5419 - protein, 107 aa, Homo sapiens
DIQMTQSPSTLSASVRDRVTITCRASQSIGTWLAWYQQKPGKAPKLLIYKASSLESGVPSRFSGSGSGTEFTLTISSLQPDDFATYYCQHYNTYSCTFGQGTKLEIK

SEQ ID NO: 5420 - protein, 94 aa, Homo sapiens
DIQMTQSPSTMSASVGDRVTITCRASQSITSWLAWYQQKPGKAPTLLIYRASSLQSGVPSRFSGSGSGTEFTLTISSLQPDDFATYYCHQYKTY

SEQ ID NO: 5421 - protein, 107 aa, Homo sapiens
DIQMTQSPSTMSASVGDRVTITCRASQSITSWLAWYQQKPGKAPTLLIYRASSLQSGVPSRFSGSGSGTEFTLTISSLQPDDFATYYCHQYKTYPRTFGQGTKVEIK

SEQ ID NO: 5422 - protein, 95 aa, Homo sapiens
DIQMTQSPSTVSASAGDRVTITCRASRSISSWLAWYQQKLGQAPKLLIYKASILNSGVPSRFSGSGSGTEFTLTISNLQPEDFAIYYCQQYESYS

SEQ ID NO: 5423 - protein, 107 aa, Homo sapiens
DIQMTQSPSTVSASAGDRVTITCRASRSISSWLAWYQQKLGQAPKLLIYKASILNSGVPSRFSGSGSGTEFTLTISNLQPEDFAIYYCQQYESYSWTFGQGTRVDFK

SEQ ID NO: 5424 - protein, 95 aa, Homo sapiens
DIQMTQSPSYVSASVGDRVTITCRASENIRVYLAWYQQKPGQAPKLLVYGGSSLQSGVPFRFSGGGSGTDFTLTINTLQPEDFATYYCQQSKTLP

SEQ ID NO: 5425 - protein, 107 aa, Homo sapiens
DIQMTQSPSYVSASVGDRVTITCRASENIRVYLAWYQQKPGQAPKLLVYGGSSLQSGVPFRFSGGGSGTDFTLTINTLQPEDFATYYCQQSKTLPLTFGGGTKVDIK

SEQ ID NO: 5426 - protein, 95 aa, Homo sapiens
DIQMTQSPVSLAASVGDRVTITCRASQNINNYLNWYQQKPGKAPKLLIYIVSNLQSGVPSRFTGSGSGTDFTLAIGSVQPEDFATYYCQQSYTTP

SEQ ID NO: 5427 - protein, 107 aa, Homo sapiens
DIQMTQSPVSLAASVGDRVTITCRASQNINNYLNWYQQKPGKAPKLLIYIVSNLQSGVPSRFTGSGSGTDFTLAIGSVQPEDFATYYCQQSYTTPYTFGLGTKLEIK

SEQ ID NO: 5428 - protein, 96 aa, Homo sapiens
DIQVTQSPSSLSASVGDRVTITCRASQYISSYLNWYQQKPGKAPNLLINVASTLHTGVPSRFSGSGSGTDFTLTINSLQPEDFATYYCQQTYSSPP

SEQ ID NO: 5429 - protein, 107 aa, Homo sapiens
DIQVTQSPSSLSASVGDRVTITCRASQYISSYLNWYQQKPGKAPNLLINVASTLHTGVPSRFSGSGSGTDFTLTINSLQPEDFATYYCQQTYSSPPTFGQGTKVEIK

SEQ ID NO: 5430 - protein, 95 aa, Homo sapiens
DIQVTQSPSTLSASVGDRVTITCRASESITNWLAWYQQKPGKVPKLLIYRASSLESGVPSRFSGSGSGTEFTLTISSLQPDDFATYYCLQYDTYP

SEQ ID NO: 5431 - protein, 107 aa, Homo sapiens
DIQVTQSPSTLSASVGDRVTITCRASESITNWLAWYQQKPGKVPKLLIYRASSLESGVPSRFSGSGSGTEFTLTISSLQPDDFATYYCLQYDTYPRAFGQGTKVEFK

SEQ ID NO: 5432 - protein, 92 aa, Homo sapiens
DIQVTQSPSTVSASVGDRITITCRASQSIDRWLAWYQQKPGKAPKLLIYQTSNLESGVPSRFSGSGSGTEFTLTISSLQPDDFGTYFCLHYN

SEQ ID NO: 5433 - protein, 106 aa, Homo sapiens
DIQVTQSPSTVSASVGDRITITCRASQSIDRWLAWYQQKPGKAPKLLIYQTSNLESGVPSRFSGSGSGTEFTLTISSLQPDDFGTYFCLHYNYWWTFGQGTKVEVK

SEQ ID NO: 5434 - protein, 17 aa, Homo sapiens
DIREDGGKTYYGDSAKG

SEQ ID NO: 5435 - protein, 95 aa, Homo sapiens
DIRMTQSPSSLSAFVGDRLTITCRASQDIGNHLAWYQERPGKAPKLLISSASTLQSGVPSRFSGGGSGTDFTLTINSLQPEDVATYYCQKYDSAP

SEQ ID NO: 5436 - protein, 107 aa, Homo sapiens
DIRMTQSPSSLSAFVGDRLTITCRASQDIGNHLAWYQERPGKAPKLLISSASTLQSGVPSRFSGGGSGTDFTLTINSLQPEDVATYYCQKYDSAPLTFGGGTTVEIK

SEQ ID NO: 5437 - protein, 95 aa, Homo sapiens
DIRMTQSPSSLSASVGDRVTITCRASQNINGYVSWYQQKPGKAPNLLIYAASSLKSRVPSRFRGSGSGADYTLSIDSLQPEDFATYFCLQTYDTS

SEQ ID NO: 5438 - protein, 107 aa, Homo sapiens
DIRMTQSPSSLSASVGDRVTITCRASQNINGYVSWYQQKPGKAPNLLIYAASSLKSRVPSRFRGSGSGADYTLSIDSLQPEDFATYFCLQTYDTSHTFGQGTKVEIQ

SEQ ID NO: 5439 - protein, 13 aa, Homo sapiens
DIRSTPPAGITDY

SEQ ID NO: 5440 - protein, 17 aa, Homo sapiens
DISASGGSTYYADSVKG

SEQ ID NO: 5441 - protein, 7 aa, Homo sapiens
DISFFWA

SEQ ID NO: 5442 - protein, 13 aa, Homo sapiens
DISFTAEDTYFDY

SEQ ID NO: 5443 - protein, 17 aa, Homo sapiens
DISGSGGSTYYADSVKG

SEQ ID NO: 5444 - protein, 17 aa, Homo sapiens
DISHNGARRHYADSVKG

SEQ ID NO: 5445 - protein, 7 aa, Homo sapiens
DISSRPS

SEQ ID NO: 5446 - protein, 14 aa, Homo sapiens
DISTFGLVRNIFDT

SEQ ID NO: 5447 - protein, 16 aa, Homo sapiens
DISVSGGTHYNPSLKS

SEQ ID NO: 5448 - protein, 13 aa, Homo sapiens
DISVVVPTGAFDI

SEQ ID NO: 5449 - protein, 16 aa, Homo sapiens
DITYSGTTYYNPFLQS

SEQ ID NO: 5450 - protein, 101 aa, Homo sapiens
DIVATQSPVSLAVSLGERATINCKTSQSVLWDSNERNYLAWYQKKPGQPPRLLIYWASTRASGVPDRFSGSGSGTYFTLTISSLQPEDVAVYYCQQYYAFP

SEQ ID NO: 5451 - protein, 113 aa, Homo sapiens
DIVATQSPVSLAVSLGERATINCKTSQSVLWDSNERNYLAWYQKKPGQPPRLLIYWASTRASGVPDRFSGSGSGTYFTLTISSLQPEDVAVYYCQQYYAFPLTFGGGTKVEIK

SEQ ID NO: 5452 - protein, 95 aa, Homo sapiens
DIVLTQSPATLSLSPGDRATLSCRSSQSVSHHLAWYQQKPGQAPRLVIFAASNRATGIPARFSGSGSGTDFTLTISSVEPEDFAVYYCQQRDDWP

SEQ ID NO: 5453 - protein, 107 aa, Homo sapiens
DIVLTQSPATLSLSPGDRATLSCRSSQSVSHHLAWYQQKPGQAPRLVIFAASNRATGIPARFSGSGSGTDFTLTISSVEPEDFAVYYCQQRDDWPRTFGQGTRVELK

SEQ ID NO: 5454 - protein, 96 aa, Homo sapiens
DIVLTQSPATLSLSPGERATLSCRASQSIGSFLAWYQQKPGQTPRLLIYDASNRATGIPARFSGSGSGTDFTLTISSLEPEDFAVYYCQQRSNWPP

SEQ ID NO: 5455 - protein, 108 aa, Homo sapiens
DIVLTQSPATLSLSPGERATLSCRASQSIGSFLAWYQQKPGQTPRLLIYDASNRATGIPARFSGSGSGTDFTLTISSLEPEDFAVYYCQQRSNWPPITFGQGTRLEIK

SEQ ID NO: 5456 - protein, 95 aa, Homo sapiens
DIVLTQSPATLSLSPGERATLSCRASQSISNSLAWYQQKPGQAPRLLIYDASNRATGIPARFSGSGSGTNFALTISSLHPEDFAVYYCQQHSNWP

SEQ ID NO: 5457 - protein, 107 aa, Homo sapiens
DIVLTQSPATLSLSPGERATLSCRASQSISNSLAWYQQKPGQAPRLLIYDASNRATGIPARFSGSGSGTNFALTISSLHPEDFAVYYCQQHSNWPSTFGQGTRLEIK

SEQ ID NO: 5458 - protein, 98 aa, Homo sapiens
DIVLTQSPDFLAVSLGERATINCKSSQSVLYNSNKKNYLAWYQQKPGQPPKLLISWASSRESGVPDRFSGSGSGTDFTLTISSLQAEDVAVYYCQQYY

SEQ ID NO: 5459 - protein, 101 aa, Homo sapiens
DIVLTQSPDFLAVSLGERATINCKSSQSVLYNSNKKNYLAWYQQKPGQPPKLLISWASSRESGVPDRFSGSGSGTDFTLTISSLQAEDVAVYYCQQYYDAA

SEQ ID NO: 5460 - protein, 113 aa, Homo sapiens
DIVLTQSPDFLAVSLGERATINCKSSQSVLYNSNKKNYLAWYQQKPGQPPKLLISWASSRESGVPDRFSGSGSGTDFTLTISSLQAEDVAVYYCQQYYDAAFTFGPGTKVEIK

SEQ ID NO: 5461 - protein, 113 aa, Homo sapiens
DIVLTQSPDFLAVSLGERATINCKSSQSVLYNSNKKNYLAWYQQKPGQPPKLLISWASSRESGVPDRFSGSGSGTDFTLTISSLQAEDVAVYYCQQYYDDAFTFGPGTKVEIK

SEQ ID NO: 5462 - protein, 101 aa, Homo sapiens
DIVLTQSPDSLAVSLGERAIINCKSSQSVLYDSNKKNYLAWYQQKPGQPPKLLIYWASTRESGVPDRFSGSGSETDFTLTISSLQAEDVAVYYCQQYYNIP

SEQ ID NO: 5463 - protein, 112 aa, Homo sapiens
DIVLTQSPDSLAVSLGERAIINCKSSQSVLYDSNKKNYLAWYQQKPGQPPKLLIYWASTRESGVPDRFSGSGSETDFTLTISSLQAEDVAVYYCQQYYNIPLSFGGGTKVEI

SEQ ID NO: 5464 - protein, 98 aa, Homo sapiens
DIVLTQSPDSLAVSLGERATINCKSNRSLFYSRNNRDYLAWYQQKPGQPPKLLIYWASTRKSGVPDRFSGSGSGTDFSLTVSSLQAEDVAVYYCQQYY

SEQ ID NO: 5465 - protein, 113 aa, Homo sapiens
DIVLTQSPDSLAVSLGERATINCKSNRSLFYSRNNRDYLAWYQQKPGQPPKLLIYWASTRKSGVPDRFSGSGSGTDFSLTVSSLQAEDVAVYYCQQYYDDRYTFGQGTTLEIK

SEQ ID NO: 5466 - protein, 101 aa, Homo sapiens
DIVLTQSPDSLAVSLGERATINCKSSQSLLYNSNKKNYLAWYQQKPGQPPKVLIYWASTRKSGVPDRFSGSGSGTDFTLTISSLQAEDVALYYCQQYYGIP

SEQ ID NO: 5467 - protein, 112 aa, Homo sapiens
DIVLTQSPDSLAVSLGERATINCKSSQSLLYNSNKKNYLAWYQQKPGQPPKVLIYWASTRKSGVPDRFSGSGSGTDFTLTISSLQAEDVALYYCQQYYGIPLTFGPGTKVEI

SEQ ID NO: 5468 - protein, 97 aa, Homo sapiens
DIVLTQSPGTLSLSPGEGATLSCRASQSVSSNYLAWYQQKPGLAPRLLIYDASSRATGIPDRFSGSGSGTDFTLTISRLEPEDFAVYYCQQYGSTPP

SEQ ID NO: 5469 - protein, 109 aa, Homo sapiens
DIVLTQSPGTLSLSPGEGATLSCRASQSVSSNYLAWYQQKPGLAPRLLIYDASSRATGIPDRFSGSGSGTDFTLTISRLEPEDFAVYYCQQYGSTPPSTFGQGTKLEIK

SEQ ID NO: 5470 - protein, 95 aa, Homo sapiens
DIVLTQSPGTLSLSPGERATLSCRANQTLSGSYLAWYQQKPGLAPRLLIYDTSNRATGIPDRFSGSGSGTDFTLTISRLEPDDFAVYFCQQYDRS

SEQ ID NO: 5471 - protein, 109 aa, Homo sapiens
DIVLTQSPGTLSLSPGERATLSCRANQTLSGSYLAWYQQKPGLAPRLLIYDTSNRATGIPDRFSGSGSGTDFTLTISRLEPDDFAVYFCQQYDRSSLYSFGQGTKLEIK

SEQ ID NO: 5472 - protein, 94 aa, Homo sapiens
DIVLTQSPGTLSLSPGERATLSCRASQSVRSNSLAWYQQKPGQAPRLIIYGASSRATGIPDRFSGSGSGTDFTLVISRLEPEDFAVYYCQQYGT

SEQ ID NO: 5473 - protein, 107 aa, Homo sapiens
DIVLTQSPGTLSLSPGERATLSCRASQSVRSNSLAWYQQKPGQAPRLIIYGASSRATGIPDRFSGSGSGTDFTLVISRLEPEDFAVYYCQQYGTWYTFGQGTKLEIK

SEQ ID NO: 5474 - protein, 95 aa, Homo sapiens
DIVLTQSPGTLSLSPGERATLSCRASQTVKNNNLAWYQQKPGQAPRLLMYGSSTRATGIPDRFSGSGSETDFTLTISRLESEDFGVYYCQQYGGS

SEQ ID NO: 5475 - protein, 108 aa, Homo sapiens
DIVLTQSPGTLSLSPGERATLSCRASQTVKNNNLAWYQQKPGQAPRLLMYGSSTRATGIPDRFSGSGSETDFTLTISRLESEDFGVYYCQQYGGSSGTFGQGTKVEIK

SEQ ID NO: 5476 - protein, 100 aa, Homo sapiens
DIVLTQTPLSLSVTPGQAASMSCKSSQTLLHSDGKTYLYWYLQKPGQAPRLLIYEVSNRFSGVPDRFSGSGSGTDFTLKISRVAAEDVGIYYCMQSIQVP

SEQ ID NO: 5477 - protein, 112 aa, Homo sapiens
DIVLTQTPLSLSVTPGQAASMSCKSSQTLLHSDGKTYLYWYLQKPGQAPRLLIYEVSNRFSGVPDRFSGSGSGTDFTLKISRVAAEDVGIYYCMQSIQVPGAFGQGTKVEIK

SEQ ID NO: 5478 - protein, 100 aa, Homo sapiens
DIVLTQTPLSLSVTPGQPASISCKSSQSLLHSDGKTYLYWYLQKPGQPPQLLIYEVSNQFSGVPDRFRGSGSGTDFTLKISRVEGEDVGVYYCMQSIQLP

SEQ ID NO: 5479 - protein, 112 aa, Homo sapiens
DIVLTQTPLSLSVTPGQPASISCKSSQSLLHSDGKTYLYWYLQKPGQPPQLLIYEVSNQFSGVPDRFRGSGSGTDFTLKISRVEGEDVGVYYCMQSIQLPLTFGGGTKVEIK

SEQ ID NO: 5480 - protein, 100 aa, Homo sapiens
DIVLTQTPLSLSVTPGQPASISCKSSQSLLHSDGKTYLYWYLQRPGQSPHLLFYELSSRVSGVPDRFSVIGSGTDFSLKISRVEAEDVGIYYCMQGVHLP

SEQ ID NO: 5481 - protein, 113 aa, Homo sapiens
DIVLTQTPLSLSVTPGQPASISCKSSQSLLHSDGKTYLYWYLQRPGQSPHLLFYELSSRVSGVPDRFSVIGSGTDFSLKISRVEAEDVGIYYCMQGVHLPSITFAQGTRLEIK

SEQ ID NO: 5482 - protein, 99 aa, Homo sapiens
DIVLTQTPLSLSVTPGQPASISCKSSQSLLHTDGKTYLHWYLQKPGQSPQLLISEVSTRFSGVPDRFSGSGSGTDFTLRISRVEREDVGVYFCLQGSQF

SEQ ID NO: 5483 - protein, 111 aa, Homo sapiens
DIVLTQTPLSLSVTPGQPASISCKSSQSLLHTDGKTYLHWYLQKPGQSPQLLISEVSTRFSGVPDRFSGSGSGTDFTLRISRVEREDVGVYFCLQGSQFYSFGQGTKLEIK

SEQ ID NO: 5484 - protein, 100 aa, Homo sapiens
DIVMIQSPDSLAVSLGERATINCKSSQSVLYSPNNKNYLAWYQQKPGQPPKLLIYWASTRESGVPDRFSGSGSGTDFTLTISSLQPEDVAVYYCQQYYST

SEQ ID NO: 5485 - protein, 114 aa, Homo sapiens
DIVMIQSPDSLAVSLGERATINCKSSQSVLYSPNNKNYLAWYQQKPGQPPKLLIYWASTRESGVPDRFSGSGSGTDFTLTISSLQPEDVAVYYCQQYYSTYLYTFGQGTKLEIK

SEQ ID NO: 5486 - protein, 95 aa, Homo sapiens
DIVMTQSPATLSVAPGERAILSCRASESISSHLAWYHHKPGQAPRLLIYAASSRATGVPARFSGSGSGTDFTLTISSLQSEDFGVYYCQQYNNWP

SEQ ID NO: 5487 - protein, 105 aa, Homo sapiens
DIVMTQSPATLSVAPGERAILSCRASESISSHLAWYHHKPGQAPRLLIYAASSRATGVPARFSGSGSGTDFTLTISSLQSEDFGVYYCQQYNNWPSFGPGTKLEI

SEQ ID NO: 5488 - protein, 95 aa, Homo sapiens
DIVMTQSPATLSVSPGERATLSCRASANIGSHLAWYQQKPGQAPRLLIYGASTRATGIPARFSGSGSGTEFTLTISSLQSEDFAVYYCQQYNNWP

SEQ ID NO: 5489 - protein, 106 aa, Homo sapiens
DIVMTQSPATLSVSPGERATLSCRASANIGSHLAWYQQKPGQAPRLLIYGASTRATGIPARFSGSGSGTEFTLTISSLQSEDFAVYYCQQYNNWPLFGQGTRLEIK

SEQ ID NO: 5490 - protein, 95 aa, Homo sapiens
DIVMTQSPATLSVSPGERATLSCRASESISSHLAWYQQKPGQAPRLLIFDASTRATGIPAKFSGSGSGREFTLTISSLQSDDFAVYYCQQYNNWP

SEQ ID NO: 5491 - protein, 106 aa, Homo sapiens
DIVMTQSPATLSVSPGERATLSCRASESISSHLAWYQQKPGQAPRLLIFDASTRATGIPAKFSGSGSGREFTLTISSLQSDDFAVYYCQQYNNWPSFGGGTKVKIK

SEQ ID NO: 5492 - protein, 95 aa, Homo sapiens
DIVMTQSPATLSVSPGERATLSCRASESISSHLAWYQQKPGQAPRLLIYDASTRATGIPAKFSGSGSGREFTLTISSLQSEDFAVYYCQQYNNWP

SEQ ID NO: 5493 - protein, 106 aa, Homo sapiens
DIVMTQSPATLSVSPGERATLSCRASESISSHLAWYQQKPGQAPRLLIYDASTRATGIPAKFSGSGSGREFTLTISSLQSEDFAVYYCQQYNNWPSFGGGTKVEIK

SEQ ID NO: 5494 - protein, 95 aa, Homo sapiens
DIVMTQSPATLSVSPGERATLSCRASQSVGSNLAWYQRKPGQPPKFLIYGASTRVIGVPARFSGSGSGTEFTLTISSVQSEDFAVYYCQHYNNWP

SEQ ID NO: 5495 - protein, 107 aa, Homo sapiens
DIVMTQSPATLSVSPGERATLSCRASQSVGSNLAWYQRKPGQPPKFLIYGASTRVIGVPARFSGSGSGTEFTLTISSVQSEDFAVYYCQHYNNWPHTFGGGTKVEIK

SEQ ID NO: 5496 - protein, 95 aa, Homo sapiens
DIVMTQSPATLSVSPGERVTLSCRASQSISSNLAWYQRKPGQAPRLLIYGASTRATDIPARFSGSGSGTEFTLTISSLQSEDFAVYSCQQYNNWP

SEQ ID NO: 5497 - protein, 106 aa, Homo sapiens
DIVMTQSPATLSVSPGERVTLSCRASQSISSNLAWYQRKPGQAPRLLIYGASTRATDIPARFSGSGSGTEFTLTISSLQSEDFAVYSCQQYNNWPSFGGGTKVEIK

SEQ ID NO: 5498 - protein, 101 aa, Homo sapiens
DIVMTQSPDFLAVSLGERATINCRSSQSILYSSNYKNYLAWYQQKPGQPPKLLIYWAFTRESGVPERFSGSGSGTDFSLTISSLQAEDVAVYYCQQYYSSP

SEQ ID NO: 5499 - protein, 113 aa, Homo sapiens
DIVMTQSPDFLAVSLGERATINCRSSQSILYSSNYKNYLAWYQQKPGQPPKLLIYWAFTRESGVPERFSGSGSGTDFSLTISSLQAEDVAVYYCQQYYSSPLTFGGGTKVEIK

SEQ ID NO: 5500 - protein, 101 aa, Homo sapiens
DIVMTQSPDSLALPLGERATINCKSSQNVLYSSNNKNYLAWFQQKPGRPPKLLIYWASTRESGVPDRFSGSGTGTDFTLTISNLQAEDVAVYYCQQYYHTP

SEQ ID NO: 5501 - protein, 113 aa, Homo sapiens
DIVMTQSPDSLALPLGERATINCKSSQNVLYSSNNKNYLAWFQQKPGRPPKLLIYWASTRESGVPDRFSGSGTGTDFTLTISNLQAEDVAVYYCQQYYHTPFTFGPGTKVDIK

SEQ ID NO: 5502 - protein, 101 aa, Homo sapiens
DIVMTQSPDSLALSLGERATINCKSSQNVLWDSNNKNYLAWYQQKPGQPPKLLIYWASTRESGVPDRFTGSGSGTDFTLTISSLQAEDVAVYFCHQYYSVP

SEQ ID NO: 5503 - protein, 113 aa, Homo sapiens
DIVMTQSPDSLALSLGERATINCKSSQNVLWDSNNKNYLAWYQQKPGQPPKLLIYWASTRESGVPDRFTGSGSGTDFTLTISSLQAEDVAVYFCHQYYSVPYTFGQGTKLEIK

SEQ ID NO: 5504 - protein, 101 aa, Homo sapiens
DIVMTQSPDSLAVSLGEGATINCKSSQSVLYSSNNKNYLGWYQQKPGQPPKLLIYWASTRESGVPDRFSGSGSGTDFTLTISSLQAEDVAVYYCQQYYSTP

SEQ ID NO: 5505 - protein, 113 aa, Homo sapiens
DIVMTQSPDSLAVSLGEGATINCKSSQSVLYSSNNKNYLGWYQQKPGQPPKLLIYWASTRESGVPDRFSGSGSGTDFTLTISSLQAEDVAVYYCQQYYSTPITFGQGTRLEIK

SEQ ID NO: 5506 - protein, 101 aa, Homo sapiens
DIVMTQSPDSLAVSLGERAAINCKSSQSVLFDSNGKNYLAWYQQRPRQPPKLLIYWANNRESGVPDRFTGSGSGTDFTLTISSLQAEDVAVYYCQQYYSTP

SEQ ID NO: 5507 - protein, 113 aa, Homo sapiens
DIVMTQSPDSLAVSLGERAAINCKSSQSVLFDSNGKNYLAWYQQRPRQPPKLLIYWANNRESGVPDRFTGSGSGTDFTLTISSLQAEDVAVYYCQQYYSTPFTFGPGTKVDIK

SEQ ID NO: 5508 - protein, 102 aa, Homo sapiens
DIVMTQSPDSLAVSLGERATIKCKSSQSVLYSSNNKNYLSWYQHKPGQPPKLLIYWASTRESGVPDRFSGSGSGTDFTLTISSLQADDVAVYFCQQYYIGPP

SEQ ID NO: 5509 - protein, 113 aa, Homo sapiens
DIVMTQSPDSLAVSLGERATIKCKSSQSVLYSSNNKNYLSWYQHKPGQPPKLLIYWASTRESGVPDRFSGSGSGTDFTLTISSLQADDVAVYFCQQYYIGPPTFGQGTRVEIK

SEQ ID NO: 5510 - protein, 101 aa, Homo sapiens
DIVMTQSPDSLAVSLGERATIKCKSSQSVLYSSRNKDYLAWYQQKVGQPPKLLIYWASTRESGVPDRFSGSGSGSDFTLTISSLQAEDVAVYYCQQYYSTP

SEQ ID NO: 5511 - protein, 113 aa, Homo sapiens
DIVMTQSPDSLAVSLGERATIKCKSSQSVLYSSRNKDYLAWYQQKVGQPPKLLIYWASTRESGVPDRFSGSGSGSDFTLTISSLQAEDVAVYYCQQYYSTPYSFGQGTRLEIK

SEQ ID NO: 5512 - protein, 101 aa, Homo sapiens
DIVMTQSPDSLAVSLGERATINCESSQSVLYSSNEKNYLAWYQQKPGQPPKVLIYWASTRESGVPDRFIGGGSGTDFTLTISSLQAEDVAVYYCQQYYSIP

SEQ ID NO: 5513 - protein, 112 aa, Homo sapiens
DIVMTQSPDSLAVSLGERATINCESSQSVLYSSNEKNYLAWYQQKPGQPPKVLIYWASTRESGVPDRFIGGGSGTDFTLTISSLQAEDVAVYYCQQYYSIPTFGQGTKLEIK

SEQ ID NO: 5514 - protein, 102 aa, Homo sapiens
DIVMTQSPDSLAVSLGERATINCKSSQGLLYRSNTKDYLAWYQQKAGQPPKLLISWASTRESGVPDRFSGSGSGTDFTLTISSLQAEDVAVYYCQQHYTTPP

SEQ ID NO: 5515 - protein, 113 aa, Homo sapiens
DIVMTQSPDSLAVSLGERATINCKSSQGLLYRSNTKDYLAWYQQKAGQPPKLLISWASTRESGVPDRFSGSGSGTDFTLTISSLQAEDVAVYYCQQHYTTPPTFGQGTKVEIK

SEQ ID NO: 5516 - protein, 101 aa, Homo sapiens
DIVMTQSPDSLAVSLGERATINCKSSQIILYSSSNRNYLAWYQQKPGQPPKLLIYWASTRDSGVPDRFSGSGSGTDFTLTISSLQAEDVAVYYCQQYYSAP

SEQ ID NO: 5517 - protein, 113 aa, Homo sapiens
DIVMTQSPDSLAVSLGERATINCKSSQIILYSSSNRNYLAWYQQKPGQPPKLLIYWASTRDSGVPDRFSGSGSGTDFTLTISSLQAEDVAVYYCQQYYSAPFTFGGGTKVEIK

SEQ ID NO: 5518 - protein, 101 aa, Homo sapiens
DIVMTQSPDSLAVSLGERATINCKSSQNILYDSNDKNYLAWYQQKPGQPPKLLIYWASTRESGVPDRFSGSGSETDFTLTISGLQAEDVAVYYCQQYYSTP

SEQ ID NO: 5519 - protein, 113 aa, Homo sapiens
DIVMTQSPDSLAVSLGERATINCKSSQNILYDSNDKNYLAWYQQKPGQPPKLLIYWASTRESGVPDRFSGSGSETDFTLTISGLQAEDVAVYYCQQYYSTPRTFGQGTKVEIK

SEQ ID NO: 5520 - protein, 99 aa, Homo sapiens
DIVMTQSPDSLAVSLGERATINCKSSQNVLFSSNNKNYLAWYQQKRGQPPKLLISWASTRESGVPDRFSGSGSGTDFTLTISNLQAEDVAVYYCQQYYS

SEQ ID NO: 5521 - protein, 112 aa, Homo sapiens
DIVMTQSPDSLAVSLGERATINCKSSQNVLFSSNNKNYLAWYQQKRGQPPKLLISWASTRESGVPDRFSGSGSGTDFTLTISNLQAEDVAVYYCQQYYSKPLTFGGGTKVEI

SEQ ID NO: 5522 - protein, 101 aa, Homo sapiens
DIVMTQSPDSLAVSLGERATINCKSSQNVLYDSNKKNYLDWYQQKPGQPPKLLIYWASTRDSGVPDRFSGSGSGTDFTLTISSLQAEDVAVYYCRQYYGTP

SEQ ID NO: 5523 - protein, 113 aa, Homo sapiens
DIVMTQSPDSLAVSLGERATINCKSSQNVLYDSNKKNYLDWYQQKPGQPPKLLIYWASTRDSGVPDRFSGSGSGTDFTLTISSLQAEDVAVYYCRQYYGTPFTFGQGTKVEIK

SEQ ID NO: 5524 - protein, 101 aa, Homo sapiens
DIVMTQSPDSLAVSLGERATINCKSSQNVLYDSNNKNYLAWYQQKPRQPPKLLFYWASTRESGVPDRFSGSGSGTDFTLTINSLQAEDVAVYYCQQYYATP

SEQ ID NO: 5525 - protein, 113 aa, Homo sapiens
DIVMTQSPDSLAVSLGERATINCKSSQNVLYDSNNKNYLAWYQQKPRQPPKLLFYWASTRESGVPDRFSGSGSGTDFTLTINSLQAEDVAVYYCQQYYATPYTFGQGTKLEIK

SEQ ID NO: 5526 - protein, 101 aa, Homo sapiens
DIVMTQSPDSLAVSLGERATINCKSSQNVLYDSNNKNYLAWYQQKPRQPPKLLFYWASTRESGVPDRFSGSGSGTDFTLTISSLQAEDVAVYYCQQYYSTP

SEQ ID NO: 5527 - protein, 113 aa, Homo sapiens
DIVMTQSPDSLAVSLGERATINCKSSQNVLYDSNNKNYLAWYQQKPRQPPKLLFYWASTRESGVPDRFSGSGSGTDFTLTISSLQAEDVAVYYCQQYYSTPYTFGQGTKLEIK

SEQ ID NO: 5528 - protein, 101 aa, Homo sapiens
DIVMTQSPDSLAVSLGERATINCKSSQNVLYSSNKKNYLAWYQQKPGQPLKLLVYWASTRESGVPDRFSGSGSGTDFTLTISSLQAEDVATYYCHQYYSFP

SEQ ID NO: 5529 - protein, 113 aa, Homo sapiens
DIVMTQSPDSLAVSLGERATINCKSSQNVLYSSNKKNYLAWYQQKPGQPLKLLVYWASTRESGVPDRFSGSGSGTDFTLTISSLQAEDVATYYCHQYYSFPHTFGQGTKLEIK

SEQ ID NO: 5530 - protein, 101 aa, Homo sapiens
DIVMTQSPDSLAVSLGERATINCKSSQNVLYSSNKKNYLAWYQQKPGQPPKLLLYWASTRESGVPDRFSGSGSGTDFTLTISSLQAEDVAVYYCQQYYSTP

SEQ ID NO: 5531 - protein, 113 aa, Homo sapiens
DIVMTQSPDSLAVSLGERATINCKSSQNVLYSSNKKNYLAWYQQKPGQPPKLLLYWASTRESGVPDRFSGSGSGTDFTLTISSLQAEDVAVYYCQQYYSTPSTFGQGTKVEIK

SEQ ID NO: 5532 - protein, 101 aa, Homo sapiens
DIVMTQSPDSLAVSLGERATINCKSSQNVLYSSNKKNYLAWYQQKPGQSPNLLIYWASTRESGVPDRFSGSGSGTDFTLTISSLQAEDVAVYYCHQYYSFP

SEQ ID NO: 5533 - protein, 113 aa, Homo sapiens
DIVMTQSPDSLAVSLGERATINCKSSQNVLYSSNKKNYLAWYQQKPGQSPNLLIYWASTRESGVPDRFSGSGSGTDFTLTISSLQAEDVAVYYCHQYYSFPHTFGQGTKLEIK

SEQ ID NO: 5534 - protein, 101 aa, Homo sapiens
DIVMTQSPDSLAVSLGERATINCKSSQNVLYSSNNKNYLAWYQHKPGQPPKLLIYWASTRESGVPDRFSGSGSGTDFTLTISSLQAEDVAVYSCQQYYTTP

SEQ ID NO: 5535 - protein, 113 aa, Homo sapiens
DIVMTQSPDSLAVSLGERATINCKSSQNVLYSSNNKNYLAWYQHKPGQPPKLLIYWASTRESGVPDRFSGSGSGTDFTLTISSLQAEDVAVYSCQQYYTTPFTFGPGTKVDIK

SEQ ID NO: 5536 - protein, 101 aa, Homo sapiens
DIVMTQSPDSLAVSLGERATINCKSSQNVLYSSNNKNYLAWYQQKPGQPPKLLIYWASARNSGVPDRFNGSGSGTDFILTISGLQAEDVALYYCQQYYGYP

SEQ ID NO: 5537 - protein, 113 aa, Homo sapiens
DIVMTQSPDSLAVSLGERATINCKSSQNVLYSSNNKNYLAWYQQKPGQPPKLLIYWASARNSGVPDRFNGSGSGTDFILTISGLQAEDVALYYCQQYYGYPLTFGQGTKVEIK

SEQ ID NO: 5538 - protein, 99 aa, Homo sapiens
DIVMTQSPDSLAVSLGERATINCKSSQRVLYSSNSKNYVAWYQHKAGQPPKLLFYWASSRESGVPDRFSGSGSGTDFTLTISSLQAEDVAVYYCQQYYT

SEQ ID NO: 5539 - protein, 113 aa, Homo sapiens
DIVMTQSPDSLAVSLGERATINCKSSQRVLYSSNSKNYVAWYQHKAGQPPKLLFYWASSRESGVPDRFSGSGSGTDFTLTISSLQAEDVAVYYCQQYYTMPYTFGQGTKLEIK

SEQ ID NO: 5540 - protein, 101 aa, Homo sapiens
DIVMTQSPDSLAVSLGERATINCKSSQSFLYSSNNKNHLAWYQQKSGQPPKLLIYWASTRESGVPDRFSGSGSGTDFTLTISSLQAEDVAVYYCQQYYSTP

SEQ ID NO: 5541 - protein, 113 aa, Homo sapiens
DIVMTQSPDSLAVSLGERATINCKSSQSFLYSSNNKNHLAWYQQKSGQPPKLLIYWASTRESGVPDRFSGSGSGTDFTLTISSLQAEDVAVYYCQQYYSTPWTFGQGTKVEIK

SEQ ID NO: 5542 - protein, 101 aa, Homo sapiens
DIVMTQSPDSLAVSLGERATINCKSSQSIAYSSNNKNYLAWYQQKPGQSPNLLIYWASTRESGVPDRFSGSGSGTDFTLTISSLQAEDVAVYYCQQYYATP

SEQ ID NO: 5543 - protein, 113 aa, Homo sapiens
DIVMTQSPDSLAVSLGERATINCKSSQSIAYSSNNKNYLAWYQQKPGQSPNLLIYWASTRESGVPDRFSGSGSGTDFTLTISSLQAEDVAVYYCQQYYATPWTFGQGTKVEIK

SEQ ID NO: 5544 - protein, 101 aa, Homo sapiens
DIVMTQSPDSLAVSLGERATINCKSSQSILYNSNKKNYLAWYQQKPGQPPKLLIYWASTRESGVPDRFSGSGSETDFTLTISSLQAEDVAVYYCQQYYDIP

SEQ ID NO: 5545 - protein, 113 aa, Homo sapiens
DIVMTQSPDSLAVSLGERATINCKSSQSILYNSNKKNYLAWYQQKPGQPPKLLIYWASTRESGVPDRFSGSGSETDFTLTISSLQAEDVAVYYCQQYYDIPITFGQGTRLEIK

SEQ ID NO: 5546 - protein, 102 aa, Homo sapiens
DIVMTQSPDSLAVSLGERATINCKSSQSILYNSNNKNYLAWYQQKPGQPPKLIIYWASTRESGVPDRFSGSGSATDFTLTISSLQAEDVAVYYCQQYYSTPP

SEQ ID NO: 5547 - protein, 114 aa, Homo sapiens
DIVMTQSPDSLAVSLGERATINCKSSQSILYNSNNKNYLAWYQQKPGQPPKLIIYWASTRESGVPDRFSGSGSATDFTLTISSLQAEDVAVYYCQQYYSTPPHTFGQGTKLEIK

SEQ ID NO: 5548 - protein, 101 aa, Homo sapiens
DIVMTQSPDSLAVSLGERATINCKSSQSILYSSNSKNYLAWYQQKPGQPPKLLIYWASTRASGVPDRFSGSGSGTDFTLTISSLQSEDVAVYFCQQYYNTP

SEQ ID NO: 5549 - protein, 113 aa, Homo sapiens
DIVMTQSPDSLAVSLGERATINCKSSQSILYSSNSKNYLAWYQQKPGQPPKLLIYWASTRASGVPDRFSGSGSGTDFTLTISSLQSEDVAVYFCQQYYNTPRTFGQGTRVEIK

SEQ ID NO: 5550 - protein, 101 aa, Homo sapiens
DIVMTQSPDSLAVSLGERATINCKSSQSLLYDSNNLNYLVWYQQKPGQPPKLLIYWASIRESGVPDRFSGSGSETDFTLTISSLQAEDVAVYFCQQHYSTP

SEQ ID NO: 5551 - protein, 113 aa, Homo sapiens
DIVMTQSPDSLAVSLGERATINCKSSQSLLYDSNNLNYLVWYQQKPGQPPKLLIYWASIRESGVPDRFSGSGSETDFTLTISSLQAEDVAVYFCQQHYSTPGTFGQGTRVEIK

SEQ ID NO: 5552 - protein, 102 aa, Homo sapiens
DIVMTQSPDSLAVSLGERATINCKSSQSLLYSSNNKNYLAWYQQKPGQPPKLLIYWASTRESGVPDRLSGSGSGTDFTLTISSLQAEDVAVYYCQQYYSTPP

SEQ ID NO: 5553 - protein, 113 aa, Homo sapiens
DIVMTQSPDSLAVSLGERATINCKSSQSLLYSSNNKNYLAWYQQKPGQPPKLLIYWASTRESGVPDRLSGSGSGTDFTLTISSLQAEDVAVYYCQQYYSTPPTFGQGTKLEIK

SEQ ID NO: 5554 - protein, 101 aa, Homo sapiens
DIVMTQSPDSLAVSLGERATINCKSSQSVFYKSNKRNYLAWYQLRPGQPPKLLIYWASARQSGVPDRFSGSGSATDFTLTISSLQPEDVAIYYCQQYYGTP

SEQ ID NO: 5555 - protein, 113 aa, Homo sapiens
DIVMTQSPDSLAVSLGERATINCKSSQSVFYKSNKRNYLAWYQLRPGQPPKLLIYWASARQSGVPDRFSGSGSATDFTLTISSLQPEDVAIYYCQQYYGTPFTFGPGTKVQIK

SEQ ID NO: 5556 - protein, 101 aa, Homo sapiens
DIVMTQSPDSLAVSLGERATINCKSSQSVFYSSNNKNYLGWYQQKPGQPPKLLIYWASAREPGVPDRFSGSGSGTDFTLTISSLQAEDVAVYYCQQYYGNP

SEQ ID NO: 5557 - protein, 113 aa, Homo sapiens
DIVMTQSPDSLAVSLGERATINCKSSQSVFYSSNNKNYLGWYQQKPGQPPKLLIYWASAREPGVPDRFSGSGSGTDFTLTISSLQAEDVAVYYCQQYYGNPHTFGQGTKLEIK

SEQ ID NO: 5558 - protein, 101 aa, Homo sapiens
DIVMTQSPDSLAVSLGERATINCKSSQSVLFNSNNNNYLAWYQHKPGQPPKLLIYWASNRESGVPDRFSGSGSGTNFTLTIANLQAEDVAVYYCRQYYTTP

SEQ ID NO: 5559 - protein, 113 aa, Homo sapiens
DIVMTQSPDSLAVSLGERATINCKSSQSVLFNSNNNNYLAWYQHKPGQPPKLLIYWASNRESGVPDRFSGSGSGTNFTLTIANLQAEDVAVYYCRQYYTTPYTFGQGTKLEIK

SEQ ID NO: 5560 - protein, 102 aa, Homo sapiens
DIVMTQSPDSLAVSLGERATINCKSSQSVLFSSNNKNYLAWYQQKPGQPPKLLIYWASTRESGVPDRFSGSGSGTDFTLTISSLQAEDVAVYYCQQYYSTPP

SEQ ID NO: 5561 - protein, 112 aa, Homo sapiens
DIVMTQSPDSLAVSLGERATINCKSSQSVLFSSNNKNYLAWYQQKPGQPPKLLIYWASTRESGVPDRFSGSGSGTDFTLTISSLQAEDVAVYYCQQYYSTPPTFGGGTKVEI

SEQ ID NO: 5562 - protein, 100 aa, Homo sapiens
DIVMTQSPDSLAVSLGERATINCKSSQSVLHNSNNKNYLAWYQQKPGQPPKLLIYWASTRQSGVPDRFSGSGSGTDFTLTINSLQAEDVAVYYCQQYYST

SEQ ID NO: 5563 - protein, 114 aa, Homo sapiens
DIVMTQSPDSLAVSLGERATINCKSSQSVLHNSNNKNYLAWYQQKPGQPPKLLIYWASTRQSGVPDRFSGSGSGTDFTLTINSLQAEDVAVYYCQQYYSTRMYTFGQGTKLEIK

SEQ ID NO: 5564 - protein, 101 aa, Homo sapiens
DIVMTQSPDSLAVSLGERATINCKSSQSVLHSSNNKNFLGWYQQKPGQPPKLLIDWASTRESGVPDRFSGSGSGTDFTLTISSLQAEDVAVYYCQQDYSIP

SEQ ID NO: 5565 - protein, 113 aa, Homo sapiens
DIVMTQSPDSLAVSLGERATINCKSSQSVLHSSNNKNFLGWYQQKPGQPPKLLIDWASTRESGVPDRFSGSGSGTDFTLTISSLQAEDVAVYYCQQDYSIPWTFGQGTKVEIK

SEQ ID NO: 5566 - protein, 101 aa, Homo sapiens
DIVMTQSPDSLAVSLGERATINCKSSQSVLWSSNKKNYLGWYQQKPGQPPKLLIYWASTRESGVPDRFSGSGSGTDFTLTISSLQAEDVAVYFCQQYYDTP

SEQ ID NO: 5567 - protein, 113 aa, Homo sapiens
DIVMTQSPDSLAVSLGERATINCKSSQSVLWSSNKKNYLGWYQQKPGQPPKLLIYWASTRESGVPDRFSGSGSGTDFTLTISSLQAEDVAVYFCQQYYDTPRTFGQGTKVEIK

SEQ ID NO: 5568 - protein, 101 aa, Homo sapiens
DIVMTQSPDSLAVSLGERATINCKSSQSVLYANSKNYLAWYQQRVGQPPKLLIYWASTRQSGVPDRFSGSGSGTDFTLTISSLQAEDVAVYYCQQFYATPP

SEQ ID NO: 5569 - protein, 112 aa, Homo sapiens
DIVMTQSPDSLAVSLGERATINCKSSQSVLYANSKNYLAWYQQRVGQPPKLLIYWASTRQSGVPDRFSGSGSGTDFTLTISSLQAEDVAVYYCQQFYATPPTFGQGTKVEIK

SEQ ID NO: 5570 - protein, 101 aa, Homo sapiens
DIVMTQSPDSLAVSLGERATINCKSSQSVLYDSNNKNYLAWYQQKPGQPPKLLIYWASTRESGVPDRFSGSGSGTDFTLTISSLQAEDVAVYYCQQYYSTP

SEQ ID NO: 5571 - protein, 112 aa, Homo sapiens
DIVMTQSPDSLAVSLGERATINCKSSQSVLYDSNNKNYLAWYQQKPGQPPKLLIYWASTRESGVPDRFSGSGSGTDFTLTISSLQAEDVAVYYCQQYYSTPSFGPGTKVDVK

SEQ ID NO: 5572 - protein, 101 aa, Homo sapiens
DIVMTQSPDSLAVSLGERATINCKSSQSVLYDSNNKNYLAWYSQKPGQAPKLLVYWASDRESGVPDRFSGSGSGTDFALTITKVQAEDVAVYYCQQYYGTP

SEQ ID NO: 5573 - protein, 113 aa, Homo sapiens
DIVMTQSPDSLAVSLGERATINCKSSQSVLYDSNNKNYLAWYSQKPGQAPKLLVYWASDRESGVPDRFSGSGSGTDFALTITKVQAEDVAVYYCQQYYGTPHTFGQGTKLEIK

SEQ ID NO: 5574 - protein, 101 aa, Homo sapiens
DIVMTQSPDSLAVSLGERATINCKSSQSVLYNDNKKNYLAWYQQKPGQPPKVLIYWASTRESGVPDRFSGSGSGTDFTLTINSLQAEDVAVYYCQQYYSTP

SEQ ID NO: 5575 - protein, 112 aa, Homo sapiens
DIVMTQSPDSLAVSLGERATINCKSSQSVLYNDNKKNYLAWYQQKPGQPPKVLIYWASTRESGVPDRFSGSGSGTDFTLTINSLQAEDVAVYYCQQYYSTPVFGGGTKVEIK

SEQ ID NO: 5576 - protein, 101 aa, Homo sapiens
DIVMTQSPDSLAVSLGERATINCKSSQSVLYNSDNKNYLAWYQQKPGQPPKLLIYWASTRESGVPDRFSGSGSGTDFTLTISSLQAEDVAVYYCHQYYSSP

SEQ ID NO: 5577 - protein, 113 aa, Homo sapiens
DIVMTQSPDSLAVSLGERATINCKSSQSVLYNSDNKNYLAWYQQKPGQPPKLLIYWASTRESGVPDRFSGSGSGTDFTLTISSLQAEDVAVYYCHQYYSSPLSFGGGTKVEIK

SEQ ID NO: 5578 - protein, 98 aa, Homo sapiens
DIVMTQSPDSLAVSLGERATINCKSSQSVLYNSNKWNYLAWYQQKPQQPPKLLISWASSRESGVPDRFSGSGSGTDFTLTISSLQAEDVAVYYCQQYY

SEQ ID NO: 5579 - protein, 113 aa, Homo sapiens
DIVMTQSPDSLAVSLGERATINCKSSQSVLYNSNKWNYLAWYQQKPQQPPKLLISWASSRESGVPDRFSGSGSGTDFTLTISSLQAEDVAVYYCQQYYDNTFTFGPGTKVEIK

SEQ ID NO: 5580 - protein, 101 aa, Homo sapiens
DIVMTQSPDSLAVSLGERATINCKSSQSVLYNSNNKNYLAWYQQKPGHPPKVLIYWASTRESGVPARFSGSGSGTDFTLTISSLQAEDVAVYYCQQYYGSP

SEQ ID NO: 5581 - protein, 113 aa, Homo sapiens
DIVMTQSPDSLAVSLGERATINCKSSQSVLYNSNNKNYLAWYQQKPGHPPKVLIYWASTRESGVPARFSGSGSGTDFTLTISSLQAEDVAVYYCQQYYGSPYTFGQGTKVEIK

SEQ ID NO: 5582 - protein, 101 aa, Homo sapiens
DIVMTQSPDSLAVSLGERATINCKSSQSVLYNSNNKNYLAWYQQKPGQPPKLLIYWASTRESGVPDRFSGSGSGTDFTLTISSLQAEDVAVYYCQQYYSTP

SEQ ID NO: 5583 - protein, 114 aa, Homo sapiens
DIVMTQSPDSLAVSLGERATINCKSSQSVLYNSNNKNYLAWYQQKPGQPPKLLIYWASTRESGVPDRFSGSGSGTDFTLTISSLQAEDVAVYYCQQYYSTPLFTFGPGTKVDIK

SEQ ID NO: 5584 - protein, 101 aa, Homo sapiens
DIVMTQSPDSLAVSLGERATINCKSSQSVLYNSNNLNYLGWYQQKPGQPPKLLIYWASTRESGVPDRFSGSGSGTDFTLTISSLQAEDVAIYYCQQFYSLP

SEQ ID NO: 5585 - protein, 113 aa, Homo sapiens
DIVMTQSPDSLAVSLGERATINCKSSQSVLYNSNNLNYLGWYQQKPGQPPKLLIYWASTRESGVPDRFSGSGSGTDFTLTISSLQAEDVAIYYCQQFYSLPLTFGGGTKVEIK

SEQ ID NO: 5586 - protein, 98 aa, Homo sapiens
DIVMTQSPDSLAVSLGERATINCKSSQSVLYRSNNKNYLAWYQQKPGQPPKLLIYWASTRESGVPDRFSGGGSGTDFTLTISSLQAEDVAIYYCQQYY

SEQ ID NO: 5587 - protein, 113 aa, Homo sapiens
DIVMTQSPDSLAVSLGERATINCKSSQSVLYRSNNKNYLAWYQQKPGQPPKLLIYWASTRESGVPDRFSGGGSGTDFTLTISSLQAEDVAIYYCQQYYTDVRTFGQGTKVEIK

SEQ ID NO: 5588 - protein, 101 aa, Homo sapiens
DIVMTQSPDSLAVSLGERATINCKSSQSVLYSSDNNNYFAWYQQKPGQPPKLLIYWASTRESGVPDRFSGSGSGTDFTLTISSLQAEDVAVYYCQQYYSSP

SEQ ID NO: 5589 - protein, 113 aa, Homo sapiens
DIVMTQSPDSLAVSLGERATINCKSSQSVLYSSDNNNYFAWYQQKPGQPPKLLIYWASTRESGVPDRFSGSGSGTDFTLTISSLQAEDVAVYYCQQYYSSPLTFGGGTKVEIK

SEQ ID NO: 5590 - protein, 101 aa, Homo sapiens
DIVMTQSPDSLAVSLGERATINCKSSQSVLYSSNDKNYLAWYQQKSGQPPKLLIYWASNRESGVPDRFSGSGSETDFTLTISSLQAEDVAVYYCQQYYGVP

SEQ ID NO: 5591 - protein, 113 aa, Homo sapiens
DIVMTQSPDSLAVSLGERATINCKSSQSVLYSSNDKNYLAWYQQKSGQPPKLLIYWASNRESGVPDRFSGSGSETDFTLTISSLQAEDVAVYYCQQYYGVPHTFGQGTKVEFK

SEQ ID NO: 5592 - protein, 101 aa, Homo sapiens
DIVMTQSPDSLAVSLGERATINCKSSQSVLYSSNKKNYLAWYQQKPGQPPKLLIYWASTRESGVPDRFSGSGSGTDFTLTISGLQAEDVAVYYCQQYYDIP

SEQ ID NO: 5593 - protein, 113 aa, Homo sapiens
DIVMTQSPDSLAVSLGERATINCKSSQSVLYSSNKKNYLAWYQQKPGQPPKLLIYWASTRESGVPDRFSGSGSGTDFTLTISGLQAEDVAVYYCQQYYDIPITFGQGTRLEIK

SEQ ID NO: 5594 - protein, 101 aa, Homo sapiens
DIVMTQSPDSLAVSLGERATINCKSSQSVLYSSNKKNYLAWYSQKPGQPPKLLVYWASDRESGVPDRFSGSGSGTDFTLTISSLQAEDVAVYYCQQYYGSP

SEQ ID NO: 5595 - protein, 113 aa, Homo sapiens
DIVMTQSPDSLAVSLGERATINCKSSQSVLYSSNKKNYLAWYSQKPGQPPKLLVYWASDRESGVPDRFSGSGSGTDFTLTISSLQAEDVAVYYCQQYYGSPHTFGQGTKVEIK

SEQ ID NO: 5596 - protein, 101 aa, Homo sapiens
DIVMTQSPDSLAVSLGERATINCKSSQSVLYSSNKKNYLSWYQQKPGQPPKVLIYWASTRESGVPDRFSGSGSGTDFTLTISSLQAEDVAVYYCQQYYDTP

SEQ ID NO: 5597 - protein, 113 aa, Homo sapiens
DIVMTQSPDSLAVSLGERATINCKSSQSVLYSSNKKNYLSWYQQKPGQPPKVLIYWASTRESGVPDRFSGSGSGTDFTLTISSLQAEDVAVYYCQQYYDTPFTFGPGTKVDIK

SEQ ID NO: 5598 - protein, 100 aa, Homo sapiens
DIVMTQSPDSLAVSLGERATINCKSSQSVLYSSNNKDYLAWYQQKPGQPPKLLIYWASTRASGVPDRFSGSGSGTDFTLTISSLQADDVAVYYCQQYYST

SEQ ID NO: 5599 - protein, 114 aa, Homo sapiens
DIVMTQSPDSLAVSLGERATINCKSSQSVLYSSNNKDYLAWYQQKPGQPPKLLIYWASTRASGVPDRFSGSGSGTDFTLTISSLQADDVAVYYCQQYYSTLAATFGGGTNLEIK

SEQ ID NO: 5600 - protein, 99 aa, Homo sapiens
DIVMTQSPDSLAVSLGERATINCKSSQSVLYSSNNKNCLAWYQQKPGQPPKLLIYWASTRESGVPDRFTGSGSGTDFTLTISSLQAEDVAVYYCQQYYS

SEQ ID NO: 5601 - protein, 113 aa, Homo sapiens
DIVMTQSPDSLAVSLGERATINCKSSQSVLYSSNNKNCLAWYQQKPGQPPKLLIYWASTRESGVPDRFTGSGSGTDFTLTISSLQAEDVAVYYCQQYYSNTWTFGHGTKVEIK

SEQ ID NO: 5602 - protein, 102 aa, Homo sapiens
DIVMTQSPDSLAVSLGERATINCKSSQSVLYSSNNKNYLAWYQQKPGQPPKLLIYWASSRESGVPDRFSGSGSGTDFTLTISSLQAEDVAVYYCQQYYNIPP

SEQ ID NO: 5603 - protein, 113 aa, Homo sapiens
DIVMTQSPDSLAVSLGERATINCKSSQSVLYSSNNKNYLAWYQQKPGQPPKLLIYWASSRESGVPDRFSGSGSGTDFTLTISSLQAEDVAVYYCQQYYNIPPAFGGGTKVEIK

SEQ ID NO: 5604 - protein, 100 aa, Homo sapiens
DIVMTQSPDSLAVSLGERATINCKSSQSVLYSSNNKNYLAWYQQKPGQPPKLLIYWASTRESGVPDRFSGSGSGTDFTLTISSLQAEDVAVYYCQQYYST

SEQ ID NO: 5605 - protein, 114 aa, Homo sapiens
DIVMTQSPDSLAVSLGERATINCKSSQSVLYSSNNKNYLAWYQQKPGQPPKLLIYWASTRESGVPDRFSGSGSGTDFTLTISSLQAEDVAVYYCQQYYSTLSATFGGGTKVEIK

SEQ ID NO: 5606 - protein, 114 aa, Homo sapiens
DIVMTQSPDSLAVSLGERATINCKSSQSVLYSSNNKNYLAWYQQKPGQPPKLLIYWASTRESGVPDRFSGSGSGTDFTLTISSLQAEDVAVYYCQQYYSTLVFTFGPGTKVDIK

SEQ ID NO: 5607 - protein, 101 aa, Homo sapiens
DIVMTQSPDSLAVSLGERATINCKSSQSVLYSSNNKNYLAWYQQKPGQPPKLLIYWASTRESGVPDRFSGSGSGTDFTLTISSLQAEDVAVYYCQQYYSTP

SEQ ID NO: 5608 - protein, 113 aa, Homo sapiens
DIVMTQSPDSLAVSLGERATINCKSSQSVLYSSNNKNYLAWYQQKPGQPPKLLIYWASTRESGVPDRFSGSGSGTDFTLTISSLQAEDVAVYYCQQYYSTPFTFGPGTKVDIK

SEQ ID NO: 5609 - protein, 113 aa, Homo sapiens
DIVMTQSPDSLAVSLGERATINCKSSQSVLYSSNNKNYLAWYQQKPGQPPKLLIYWASTRESGVPDRFSGSGSGTDFTLTISSLQAEDVAVYYCQQYYSTPLTFGQGTKLEIK

SEQ ID NO: 5610 - protein, 114 aa, Homo sapiens
DIVMTQSPDSLAVSLGERATINCKSSQSVLYSSNNKNYLAWYQQKPGQPPKLLIYWASTRESGVPDRFSGSGSGTDFTLTISSLQAEDVAVYYCQQYYSTPLYTFGQGTKLEIK

SEQ ID NO: 5611 - protein, 102 aa, Homo sapiens
DIVMTQSPDSLAVSLGERATINCKSSQSVLYSSNNKNYLAWYQQKPGQPPKLLIYWASTRESGVPDRFSGSGSGTDFTLTISSLQAEDVAVYYCQQYYSTPP

SEQ ID NO: 5612 - protein, 115 aa, Homo sapiens
DIVMTQSPDSLAVSLGERATINCKSSQSVLYSSNNKNYLAWYQQKPGQPPKLLIYWASTRESGVPDRFSGSGSGTDFTLTISSLQAEDVAVYYCQQYYSTPPMYTFGQGTKLEIK

SEQ ID NO: 5613 - protein, 114 aa, Homo sapiens
DIVMTQSPDSLAVSLGERATINCKSSQSVLYSSNNKNYLAWYQQKPGQPPKLLIYWASTRESGVPDRFSGSGSGTDFTLTISSLQAEDVAVYYCQQYYSTPPWTFGQGTKVEIK

SEQ ID NO: 5614 - protein, 115 aa, Homo sapiens
DIVMTQSPDSLAVSLGERATINCKSSQSVLYSSNNKNYLAWYQQKPGQPPKLLIYWASTRESGVPDRFSGSGSGTDFTLTISSLQAEDVAVYYCQQYYSTPQRYTFGQGTKLEIK

SEQ ID NO: 5615 - protein, 113 aa, Homo sapiens
DIVMTQSPDSLAVSLGERATINCKSSQSVLYSSNNKNYLAWYQQKPGQPPKLLIYWASTRESGVPDRFSGSGSGTDFTLTISSLQAEDVAVYYCQQYYSTPQTFGQGTKVEIK

SEQ ID NO: 5616 - protein, 113 aa, Homo sapiens
DIVMTQSPDSLAVSLGERATINCKSSQSVLYSSNNKNYLAWYQQKPGQPPKLLIYWASTRESGVPDRFSGSGSGTDFTLTISSLQAEDVAVYYCQQYYSTPRTFGQGTKVEIK

SEQ ID NO: 5617 - protein, 114 aa, Homo sapiens
DIVMTQSPDSLAVSLGERATINCKSSQSVLYSSNNKNYLAWYQQKPGQPPKLLIYWASTRESGVPDRFSGSGSGTDFTLTISSLQAEDVAVYYCQQYYSTPSWTFGQGTKVEIK

SEQ ID NO: 5618 - protein, 113 aa, Homo sapiens
DIVMTQSPDSLAVSLGERATINCKSSQSVLYSSNNKNYLAWYQQKPGQPPKLLIYWASTRESGVPDRFSGSGSGTDFTLTISSLQAEDVAVYYCQQYYSTPWTFGQGTKVEIK

SEQ ID NO: 5619 - protein, 113 aa, Homo sapiens
DIVMTQSPDSLAVSLGERATINCKSSQSVLYSSNNKNYLAWYQQKPGQPPKLLIYWASTRESGVPDRFSGSGSGTDFTLTISSLQAEDVAVYYCQQYYSTPYTFGQGTKLEIK

SEQ ID NO: 5620 - protein, 101 aa, Homo sapiens
DIVMTQSPDSLAVSLGERATINCKSSQSVLYSSNNKNYLAWYQQKPGQPPKLLIYWASTRESGVPDRFSGSGSGTDFTLTISSLQAEDVAVYYCQQYYSTS

SEQ ID NO: 5621 - protein, 113 aa, Homo sapiens
DIVMTQSPDSLAVSLGERATINCKSSQSVLYSSNNKNYLAWYQQKPGQPPKLLIYWASTRESGVPDRFSGSGSGTDFTLTISSLQAEDVAVYYCQQYYSTSQTFGQGTKVEIK

SEQ ID NO: 5622 - protein, 99 aa, Homo sapiens
DIVMTQSPDSLAVSLGERATINCKSSQSVLYSSNNKNYLAWYQQKPGQPPKLLIYWASTRESGVPDRFSGSGSGTDFTLTISSLQPEDFATYYCQQYNS

SEQ ID NO: 5623 - protein, 113 aa, Homo sapiens
DIVMTQSPDSLAVSLGERATINCKSSQSVLYSSNNKNYLAWYQQKPGQPPKLLIYWASTRESGVPDRFSGSGSGTDFTLTISSLQPEDFATYYCQQYNSYPLTFGGGTKVEIK

SEQ ID NO: 5624 - protein, 102 aa, Homo sapiens
DIVMTQSPDSLAVSLGERATINCKSSQSVLYSSNNKNYLAWYQQKPGQPPKLLIYWASTRESGVPDRFSGSGSGTDFTLTISSLRAEDVAVYYCQQYYSTPP

SEQ ID NO: 5625 - protein, 113 aa, Homo sapiens
DIVMTQSPDSLAVSLGERATINCKSSQSVLYSSNNKNYLAWYQQKPGQPPKLLIYWASTRESGVPDRFSGSGSGTDFTLTISSLRAEDVAVYYCQQYYSTPPFFGQGTKLEIK

SEQ ID NO: 5626 - protein, 101 aa, Homo sapiens
DIVMTQSPDSLAVSLGERATINCKSSQSVLYSSNNKNYLGWFQQKPGQPPKLLIYWASARESGVPDRFSGSGSVTDFTLTISSLQPEDLAVYYCQQYYSTP

SEQ ID NO: 5627 - protein, 113 aa, Homo sapiens
DIVMTQSPDSLAVSLGERATINCKSSQSVLYSSNNKNYLGWFQQKPGQPPKLLIYWASARESGVPDRFSGSGSVTDFTLTISSLQPEDLAVYYCQQYYSTPWTFGQGTKVEIK

SEQ ID NO: 5628 - protein, 101 aa, Homo sapiens
DIVMTQSPDSLAVSLGERATINCKSSQSVLYSSNNNNYLAWYQQKPGQPPKLLIYWASTRESGVPDRFSGSGSGTDFTLTISSLQAEDVAVYYCQQHYSTP

SEQ ID NO: 5629 - protein, 113 aa, Homo sapiens
DIVMTQSPDSLAVSLGERATINCKSSQSVLYSSNNNNYLAWYQQKPGQPPKLLIYWASTRESGVPDRFSGSGSGTDFTLTISSLQAEDVAVYYCQQHYSTPGTFGQGTKVEIK

SEQ ID NO: 5630 - protein, 101 aa, Homo sapiens
DIVMTQSPDSLAVSLGERATINCKSSQSVLYSSNNQNYLAWYQEKPGQPPKVLIYWASTRGSGVPDRFSGSGSGTDFTLTISSLQAEDVAVYYCQQYYSIP

SEQ ID NO: 5631 - protein, 113 aa, Homo sapiens
DIVMTQSPDSLAVSLGERATINCKSSQSVLYSSNNQNYLAWYQEKPGQPPKVLIYWASTRGSGVPDRFSGSGSGTDFTLTISSLQAEDVAVYYCQQYYSIPYTFGQGTKLEIK

SEQ ID NO: 5632 - protein, 99 aa, Homo sapiens
DIVMTQSPDSLAVSLGERATINCKSSQSVLYSSNQRNYLAWYQQKPGQRPKLLISWASTRESGVPDRFSGSGSGTDFSLTISSLQAEDVAVYYCQQYYS

SEQ ID NO: 5633 - protein, 112 aa, Homo sapiens
DIVMTQSPDSLAVSLGERATINCKSSQSVLYSSNQRNYLAWYQQKPGQRPKLLISWASTRESGVPDRFSGSGSGTDFSLTISSLQAEDVAVYYCQQYYSDVFTFGPGTKVNI

SEQ ID NO: 5634 - protein, 102 aa, Homo sapiens
DIVMTQSPDSLAVSLGERATINCKSSQSVLYSSSNKNFLAWYQQKAGQPPKLLIYWASTRESGVPDRFSGSESGTDFTLTISSLQAEDVAVYYCQQYYSIPP

SEQ ID NO: 5635 - protein, 113 aa, Homo sapiens
DIVMTQSPDSLAVSLGERATINCKSSQSVLYSSSNKNFLAWYQQKAGQPPKLLIYWASTRESGVPDRFSGSESGTDFTLTISSLQAEDVAVYYCQQYYSIPPTFGQGTKVEIK

SEQ ID NO: 5636 - protein, 101 aa, Homo sapiens
DIVMTQSPDSLAVSLGERATINCKSSQSVLYTSSNKNYLAWYQQKPGQPPKLVIYWASTRASGVPVRFSGSGSGTDFTLTISSLQAEDVAVYYCQQYYSTP

SEQ ID NO: 5637 - protein, 113 aa, Homo sapiens
DIVMTQSPDSLAVSLGERATINCKSSQSVLYTSSNKNYLAWYQQKPGQPPKLVIYWASTRASGVPVRFSGSGSGTDFTLTISSLQAEDVAVYYCQQYYSTPWTFGQGTKVEIK

SEQ ID NO: 5638 - protein, 101 aa, Homo sapiens
DIVMTQSPDSLAVSLGERATINCKSSQSVSYISNNKNYLAWYQQKPGQPPKLLIHWASTRESGVPDRFSGSGSGTDFTLTISSLQAEDVATYYCQHYYITP

SEQ ID NO: 5639 - protein, 112 aa, Homo sapiens
DIVMTQSPDSLAVSLGERATINCKSSQSVSYISNNKNYLAWYQQKPGQPPKLLIHWASTRESGVPDRFSGSGSGTDFTLTISSLQAEDVATYYCQHYYITPYTFGQGTKLQI

SEQ ID NO: 5640 - protein, 101 aa, Homo sapiens
DIVMTQSPDSLAVSLGERATINCKSSQTVLYSSNNYNYLAWYQQKPGQPPKLLIYWASTRESGVPDRFIGSGSGTDFTLTISSLQAEDVALYYCQQYYSIP

SEQ ID NO: 5641 - protein, 113 aa, Homo sapiens
DIVMTQSPDSLAVSLGERATINCKSSQTVLYSSNNYNYLAWYQQKPGQPPKLLIYWASTRESGVPDRFIGSGSGTDFTLTISSLQAEDVALYYCQQYYSIPLTFGGGTKVEIK

SEQ ID NO: 5642 - protein, 101 aa, Homo sapiens
DIVMTQSPDSLAVSLGERATINCKSTQSVLYSSNNMNYLAWYQQKPGQPPKLLIYWASTRESGVPDRFSGSGSETDFTLTISSLQPEDVAVYYCQQYYGIP

SEQ ID NO: 5643 - protein, 113 aa, Homo sapiens
DIVMTQSPDSLAVSLGERATINCKSTQSVLYSSNNMNYLAWYQQKPGQPPKLLIYWASTRESGVPDRFSGSGSETDFTLTISSLQPEDVAVYYCQQYYGIPITFGQGTRLEIK

SEQ ID NO: 5644 - protein, 101 aa, Homo sapiens
DIVMTQSPDSLAVSLGERATINCRSSQSVLWNDNKKNYLAWYQQKPGQSPKLLVSWASVRESGVPDRFSGSGSGTDFALTISSLQAEDAALYYCQQYYATP

SEQ ID NO: 5645 - protein, 112 aa, Homo sapiens
DIVMTQSPDSLAVSLGERATINCRSSQSVLWNDNKKNYLAWYQQKPGQSPKLLVSWASVRESGVPDRFSGSGSGTDFALTISSLQAEDAALYYCQQYYATPLTYGGGTKVEI

SEQ ID NO: 5646 - protein, 98 aa, Homo sapiens
DIVMTQSPDSLAVSLGERATISCKSSQNILYSDNNKNYLAWYQQKPGQPPKLLLYWASAREFGVPDRFSGSGSGTDFTLTISSLQAEDVAVYYCQQYY

SEQ ID NO: 5647 - protein, 113 aa, Homo sapiens
DIVMTQSPDSLAVSLGERATISCKSSQNILYSDNNKNYLAWYQQKPGQPPKLLLYWASAREFGVPDRFSGSGSGTDFTLTISSLQAEDVAVYYCQQYYAYPFTFAGGTKVEIK

SEQ ID NO: 5648 - protein, 98 aa, Homo sapiens
DIVMTQSPDSLAVSLGERATISCKSSQNILYSGNNENYLAWYQQKPGQPPKLLLYWASTRESGVPDRFSGSGSGTDFTLTISSLQAEDVAIYYCQQYY

SEQ ID NO: 5649 - protein, 112 aa, Homo sapiens
DIVMTQSPDSLAVSLGERATISCKSSQNILYSGNNENYLAWYQQKPGQPPKLLLYWASTRESGVPDRFSGSGSGTDFTLTISSLQAEDVAIYYCQQYYEYPFTFAGGTKVEI

SEQ ID NO: 5650 - protein, 98 aa, Homo sapiens
DIVMTQSPDSLAVSLGERATISCKSSQNVLFSDNNKNYLAWYQKKPGQPPKLLLYWASTRESGVPDRFSGSGSGTDFTLTISSLQAADVAVYYCQQYY

SEQ ID NO: 5651 - protein, 113 aa, Homo sapiens
DIVMTQSPDSLAVSLGERATISCKSSQNVLFSDNNKNYLAWYQKKPGQPPKLLLYWASTRESGVPDRFSGSGSGTDFTLTISSLQAADVAVYYCQQYYAYPFTFAGGTKVEIK

SEQ ID NO: 5652 - protein, 98 aa, Homo sapiens
DIVMTQSPDSLAVSLGERATISCKSSQNVLFSDNNKNYLAWYQQKPGQPPKLLLYWASTRESGVPDRFSGSGSGTDFTLTISSLQAADVAVYYCQQYY

SEQ ID NO: 5653 - protein, 113 aa, Homo sapiens
DIVMTQSPDSLAVSLGERATISCKSSQNVLFSDNNKNYLAWYQQKPGQPPKLLLYWASTRESGVPDRFSGSGSGTDFTLTISSLQAADVAVYYCQQYYAYPFTFAGGTKVEIK

SEQ ID NO: 5654 - protein, 101 aa, Homo sapiens
DIVMTQSPDSLAVSLGERATISCKSSQNVLYSENNKNYLAWYQQKPGQPPKLLLYWASTRESGVPDRFSGSGSGTDFTLTISSLQAEDVAVYYCQQYYGYP

SEQ ID NO: 5655 - protein, 113 aa, Homo sapiens
DIVMTQSPDSLAVSLGERATISCKSSQNVLYSENNKNYLAWYQQKPGQPPKLLLYWASTRESGVPDRFSGSGSGTDFTLTISSLQAEDVAVYYCQQYYGYPFTFAGGTKVEIK

SEQ ID NO: 5656 - protein, 100 aa, Homo sapiens
DIVMTQSPDSLAVSLGERATISCKSSQSILHTSNNKNYLAWYQQKPGQPPKLLIKWASTRESGVPDRFSGSGSGTDFTLTISSLQAADVAIYYCQQYYNP

SEQ ID NO: 5657 - protein, 114 aa, Homo sapiens
DIVMTQSPDSLAVSLGERATISCKSSQSILHTSNNKNYLAWYQQKPGQPPKLLIKWASTRESGVPDRFSGSGSGTDFTLTISSLQAADVAIYYCQQYYNPGALTFGGGTNVEIK

SEQ ID NO: 5658 - protein, 99 aa, Homo sapiens
DIVMTQSPDSLAVSLGERATITCKSSQSVLYTSNKKNYLAWYQQKPGQSPTLLINWASTRESGVPDRFSGSGSGTDFTLTISSLQAEDVAVYYCQQFYS

SEQ ID NO: 5659 - protein, 113 aa, Homo sapiens
DIVMTQSPDSLAVSLGERATITCKSSQSVLYTSNKKNYLAWYQQKPGQSPTLLINWASTRESGVPDRFSGSGSGTDFTLTISSLQAEDVAVYYCQQFYSDQFTFGGGTKVDIK

SEQ ID NO: 5660 - protein, 99 aa, Homo sapiens
DIVMTQSPDSLAVSLGERATITCRSSQDVLYSSNNKNYLAWYQQKPGQPPKLLISWASTRESEVPDRFSGSGSGTYFTLTISSTQAEDAAVYYCQQYYS

SEQ ID NO: 5661 - protein, 113 aa, Homo sapiens
DIVMTQSPDSLAVSLGERATITCRSSQDVLYSSNNKNYLAWYQQKPGQPPKLLISWASTRESEVPDRFSGSGSGTYFTLTISSTQAEDAAVYYCQQYYSDHFTFGGGTKVEIK

SEQ ID NO: 5662 - protein, 102 aa, Homo sapiens
DIVMTQSPDSLAVSLGERITINCRSSQSVFYNSNKKNYLAWYQQKPGQPPKLLISWASARESGVPERFSGSGSGTDFTLTIACLQAEDAAVYYCQQYYSDPP

SEQ ID NO: 5663 - protein, 113 aa, Homo sapiens
DIVMTQSPDSLAVSLGERITINCRSSQSVFYNSNKKNYLAWYQQKPGQPPKLLISWASARESGVPERFSGSGSGTDFTLTIACLQAEDAAVYYCQQYYSDPPDFGPGTKVEIK

SEQ ID NO: 5664 - protein, 101 aa, Homo sapiens
DIVMTQSPDSLDVSLGEWATINCRSSQSVFYKSNKKNYFAWYQQKPGQPPRLLIHWASTREPGVPDRFSGSGSGTEFTLTISNVQAEDAAIYFCQQYYSIP

SEQ ID NO: 5665 - protein, 113 aa, Homo sapiens
DIVMTQSPDSLDVSLGEWATINCRSSQSVFYKSNKKNYFAWYQQKPGQPPRLLIHWASTREPGVPDRFSGSGSGTEFTLTISNVQAEDAAIYFCQQYYSIPLTFGGGTRVAIK

SEQ ID NO: 5666 - protein, 99 aa, Homo sapiens
DIVMTQSPDSLPVSLGERATISCKSSQNLLFNQRNYLAWYQQKPGQPPKLLLYWASIRESGVPDRFSGSGSETDFTLTISSLQAEDVALYYCQQYYGYP

SEQ ID NO: 5667 - protein, 111 aa, Homo sapiens
DIVMTQSPDSLPVSLGERATISCKSSQNLLFNQRNYLAWYQQKPGQPPKLLLYWASIRESGVPDRFSGSGSETDFTLTISSLQAEDVALYYCQQYYGYPFTFAGGTKVEIK

SEQ ID NO: 5668 - protein, 99 aa, Homo sapiens
DIVMTQSPDSLTVSLGERATINCKSSQNILYSSNKKNYLAWYQQKPGQPPKLLIYWASTRESGVPDRFSGSGSGADFTLTISSLQAEDVAVYYCQQHYS

SEQ ID NO: 5669 - protein, 112 aa, Homo sapiens
DIVMTQSPDSLTVSLGERATINCKSSQNILYSSNKKNYLAWYQQKPGQPPKLLIYWASTRESGVPDRFSGSGSGADFTLTISSLQAEDVAVYYCQQHYSMPLTFGPGTKVDI

SEQ ID NO: 5670 - protein, 98 aa, Homo sapiens
DIVMTQSPDSLTVSLGERATINCKSSQSVFFDRTNQNYLAWFQQKPGQSPKLLIFWASSRESGVPDRFSGSGSGTDFTLTIGSVQAEDVAIYYCQHYY

SEQ ID NO: 5671 - protein, 113 aa, Homo sapiens
DIVMTQSPDSLTVSLGERATINCKSSQSVFFDRTNQNYLAWFQQKPGQSPKLLIFWASSRESGVPDRFSGSGSGTDFTLTIGSVQAEDVAIYYCQHYYDFPYTFGQGTRLEIK

SEQ ID NO: 5672 - protein, 101 aa, Homo sapiens
DIVMTQSPDSLTVSLGERATINCKSSQSVLWNDNNKNYLAWYQQKPGHPPNLLLYWASTRESGVPDRFSGSGSGTDFTLTISSLQAEDVAVYYCQQYYATP

SEQ ID NO: 5673 - protein, 112 aa, Homo sapiens
DIVMTQSPDSLTVSLGERATINCKSSQSVLWNDNNKNYLAWYQQKPGHPPNLLLYWASTRESGVPDRFSGSGSGTDFTLTISSLQAEDVAVYYCQQYYATPGTFGQGTKVEI

SEQ ID NO: 5674 - protein, 101 aa, Homo sapiens
DIVMTQSPDSLTVSLGERATINCKSSQSVLYDSNNKNYLAWYQERPGQPPKLLIYWASTRESGVPDRFSGSGSGTDFTLTISSLQAEDVAVYYCQQYYGHP

SEQ ID NO: 5675 - protein, 113 aa, Homo sapiens
DIVMTQSPDSLTVSLGERATINCKSSQSVLYDSNNKNYLAWYQERPGQPPKLLIYWASTRESGVPDRFSGSGSGTDFTLTISSLQAEDVAVYYCQQYYGHPFTFGQGTKLEIK

SEQ ID NO: 5676 - protein, 101 aa, Homo sapiens
DIVMTQSPDSLTVSLGERATINCKSSQSVLYKKKKKNYFAWYQQKPGQPPKLLIYWASTRESGVPDRFSGSGSGTDFTLTISSLQAEDVAVYYCQQYYGLP

SEQ ID NO: 5677 - protein, 113 aa, Homo sapiens
DIVMTQSPDSLTVSLGERATINCKSSQSVLYKKKKKNYFAWYQQKPGQPPKLLIYWASTRESGVPDRFSGSGSGTDFTLTISSLQAEDVAVYYCQQYYGLPLTFGGGTKVQIK

SEQ ID NO: 5678 - protein, 101 aa, Homo sapiens
DIVMTQSPDSLTVSLGERATINCKSSQSVLYSSNSENSLAWYQQKPGQPPKLLIYWASTRESGVPDRFSGSGSGTDFTLTISSLQAEDVAVYYCQQYYTTP

SEQ ID NO: 5679 - protein, 113 aa, Homo sapiens
DIVMTQSPDSLTVSLGERATINCKSSQSVLYSSNSENSLAWYQQKPGQPPKLLIYWASTRESGVPDRFSGSGSGTDFTLTISSLQAEDVAVYYCQQYYTTPYTFGQGTKLEIK

SEQ ID NO: 5680 - protein, 101 aa, Homo sapiens
DIVMTQSPDSLTVSLGERATINCRSSQSLLYRSNKKNYLAWYQQKPGQPPKLLISWASTRESGVPDRFSGSGSGTAFTLTISCLQAEDVAVYYCQQYYSLP

SEQ ID NO: 5681 - protein, 113 aa, Homo sapiens
DIVMTQSPDSLTVSLGERATINCRSSQSLLYRSNKKNYLAWYQQKPGQPPKLLISWASTRESGVPDRFSGSGSGTAFTLTISCLQAEDVAVYYCQQYYSLPLSFGGGTKVEIK

SEQ ID NO: 5682 - protein, 101 aa, Homo sapiens
DIVMTQSPDSLVVSLGERATITCKSSQNVLYSENNKNYLAWYQQKPGHPPKLLLYWASTRGSGVPDRFSGSGSETDFTLTISSLQAEDVAVYYCQQYYGYP

SEQ ID NO: 5683 - protein, 113 aa, Homo sapiens
DIVMTQSPDSLVVSLGERATITCKSSQNVLYSENNKNYLAWYQQKPGHPPKLLLYWASTRGSGVPDRFSGSGSETDFTLTISSLQAEDVAVYYCQQYYGYPFTFAGGTKVEIK

SEQ ID NO: 5684 - protein, 101 aa, Homo sapiens
DIVMTQSPDSVAVSLGERATINCKSSQSVLSTSKNKNFLAWYQQKPGQPPKLLIYWASTRASGVPDRFSGSGSGTDFTLTISSLQAEDVAVYYCQQYDRTP

SEQ ID NO: 5685 - protein, 113 aa, Homo sapiens
DIVMTQSPDSVAVSLGERATINCKSSQSVLSTSKNKNFLAWYQQKPGQPPKLLIYWASTRASGVPDRFSGSGSGTDFTLTISSLQAEDVAVYYCQQYDRTPLTFGGGTKVEIK

SEQ ID NO: 5686 - protein, 101 aa, Homo sapiens
DIVMTQSPDSVAVSLGERATVSCKSSQNILHSSKNKTFLAWYQQKPGQAPKLLIYWAFTRESGVPDRFSGSGSGTDFTLTITSLQAEDVAVYYCQQYYSTP

SEQ ID NO: 5687 - protein, 113 aa, Homo sapiens
DIVMTQSPDSVAVSLGERATVSCKSSQNILHSSKNKTFLAWYQQKPGQAPKLLIYWAFTRESGVPDRFSGSGSGTDFTLTITSLQAEDVAVYYCQQYYSTPLTFGGGTKVEIK

SEQ ID NO: 5688 - protein, 101 aa, Homo sapiens
DIVMTQSPDTLAVSLGERATINCKSSQTVLYTSNNKNYLAWYQQRPGQPPKLLIHWASTRESGVPDRFSGSGSGTNFTLAISTLQAEDVAVYYCQQYFLTP

SEQ ID NO: 5689 - protein, 113 aa, Homo sapiens
DIVMTQSPDTLAVSLGERATINCKSSQTVLYTSNNKNYLAWYQQRPGQPPKLLIHWASTRESGVPDRFSGSGSGTNFTLAISTLQAEDVAVYYCQQYFLTPLTFGGGTKVEIK

SEQ ID NO: 5690 - protein, 101 aa, Homo sapiens
DIVMTQSPESLAVSLGERATINCKSSQSLLYSSNKKNYLAWYSQKPGQPPKLLVYWASNRESGVPDRFSGGGSGTDFTLTISSLQAEDVAVYYCQQYYGSP

SEQ ID NO: 5691 - protein, 112 aa, Homo sapiens
DIVMTQSPESLAVSLGERATINCKSSQSLLYSSNKKNYLAWYSQKPGQPPKLLVYWASNRESGVPDRFSGGGSGTDFTLTISSLQAEDVAVYYCQQYYGSPHTFGQGTKLEI

SEQ ID NO: 5692 - protein, 100 aa, Homo sapiens
DIVMTQSPHSLPVTPGEPASISCKSSQSLLHSNGYNYLVWYLQKPGQSPQLLIYLGSDRASGVPDRFSGSGSGTNFTLKISRVEAEDVGVYYCMQALHTP

SEQ ID NO: 5693 - protein, 113 aa, Homo sapiens
DIVMTQSPHSLPVTPGEPASISCKSSQSLLHSNGYNYLVWYLQKPGQSPQLLIYLGSDRASGVPDRFSGSGSGTNFTLKISRVEAEDVGVYYCMQALHTPIYSFGQGTKLEIK

SEQ ID NO: 5694 - protein, 100 aa, Homo sapiens
DIVMTQSPLFLPVTPGEPASISCRSSQSLLHGNGYNYLDWYLQKPGQSPQLLVYLGSNRASGVPARFSGTGSGTDFTLKISRVEAEDVGIYYCMQALQTP

SEQ ID NO: 5695 - protein, 112 aa, Homo sapiens
DIVMTQSPLFLPVTPGEPASISCRSSQSLLHGNGYNYLDWYLQKPGQSPQLLVYLGSNRASGVPARFSGTGSGTDFTLKISRVEAEDVGIYYCMQALQTPFTFGPGTKVDIK

SEQ ID NO: 5696 - protein, 97 aa, Homo sapiens
DIVMTQSPLSLPVIPGEPASISCRSSQSLQNIGYNYLDWYVQKPGQSPQLLIYLGSARASGVPDRFSGSGSGTDFTLKITRVEAEDVGVYYCMQTLQ

SEQ ID NO: 5697 - protein, 110 aa, Homo sapiens
DIVMTQSPLSLPVIPGEPASISCRSSQSLQNIGYNYLDWYVQKPGQSPQLLIYLGSARASGVPDRFSGSGSGTDFTLKITRVEAEDVGVYYCMQTLQKRTFGQGTKVEIK

SEQ ID NO: 5698 - protein, 97 aa, Homo sapiens
DIVMTQSPLSLPVIPGEPASISCRSSQSVQNIGYNYLDWYVQKPGQSPQLLIYLGSTRASGVPDRFTGSGSGTDFTLKISRVEAEDVGVYYCMQTLQ

SEQ ID NO: 5699 - protein, 109 aa, Homo sapiens
DIVMTQSPLSLPVIPGEPASISCRSSQSVQNIGYNYLDWYVQKPGQSPQLLIYLGSTRASGVPDRFTGSGSGTDFTLKISRVEAEDVGVYYCMQTLQKRTFGQGTKVEI

SEQ ID NO: 5700 - protein, 100 aa, Homo sapiens
DIVMTQSPLSLPVIPGESASISCRSSQSLLHSNGHKYLDWYLQKPGQSPQLLIYVASSRASGVPDRFSGSGTGTDFTLNISRVEAGDVGVYYCMQALQIP

SEQ ID NO: 5701 - protein, 112 aa, Homo sapiens
DIVMTQSPLSLPVIPGESASISCRSSQSLLHSNGHKYLDWYLQKPGQSPQLLIYVASSRASGVPDRFSGSGTGTDFTLNISRVEAGDVGVYYCMQALQIPRTFGQGTKVEIK

SEQ ID NO: 5702 - protein, 95 aa, Homo sapiens
DIVMTQSPLSLPVTLGQPASISCRSSQSLTLNDGNTYLHWFQQRPGQSPRRLIYKVSNRDSGVPDRFSGSGSNTDFTLKISRVEAEDVGVYYCMQ

SEQ ID NO: 5703 - protein, 112 aa, Homo sapiens
DIVMTQSPLSLPVTLGQPASISCRSSQSLTLNDGNTYLHWFQQRPGQSPRRLIYKVSNRDSGVPDRFSGSGSNTDFTLKISRVEAEDVGVYYCMQALETPITFGQGTRLEIK

SEQ ID NO: 5704 - protein, 100 aa, Homo sapiens
DIVMTQSPLSLPVTPGDPASISCRSSQSLLHGNGHTYLDWYLQKPGQSPQLLIYLGSTRASGVPDRFSGSGSGTDFTLKISRVEAEDVGVYYCMQALQTP

SEQ ID NO: 5705 - protein, 112 aa, Homo sapiens
DIVMTQSPLSLPVTPGDPASISCRSSQSLLHGNGHTYLDWYLQKPGQSPQLLIYLGSTRASGVPDRFSGSGSGTDFTLKISRVEAEDVGVYYCMQALQTPFTFGPGTKVDLK

SEQ ID NO: 5706 - protein, 99 aa, Homo sapiens
DIVMTQSPLSLPVTPGEPASFSCRSSQSLLHSNGHNYLDWYVQKPGQSPQLLIYLSSNRASGVPDRFSGSGSGTDFTLKISRVEAEDVGVYYCMQALQT

SEQ ID NO: 5707 - protein, 111 aa, Homo sapiens
DIVMTQSPLSLPVTPGEPASFSCRSSQSLLHSNGHNYLDWYVQKPGQSPQLLIYLSSNRASGVPDRFSGSGSGTDFTLKISRVEAEDVGVYYCMQALQTLYTFGQGTKLEI

SEQ ID NO: 5708 - protein, 97 aa, Homo sapiens
DIVMTQSPLSLPVTPGEPASISCKSSQSLLHSDGKTYLYWYLQKPGQPPQLLIYEVSNRFSGVPDRFSGSGSGTDFTLKISRVEAEDVGVYYCMQGT

SEQ ID NO: 5709 - protein, 112 aa, Homo sapiens
DIVMTQSPLSLPVTPGEPASISCKSSQSLLHSDGKTYLYWYLQKPGQPPQLLIYEVSNRFSGVPDRFSGSGSGTDFTLKISRVEAEDVGVYYCMQGTHWPLTFGGGTKVEIK

SEQ ID NO: 5710 - protein, 101 aa, Homo sapiens
DIVMTQSPLSLPVTPGEPASISCKSSQSLLHSNGYNHLDWYLQKPGQSPQLLIFLGSTRASGVPDRFSGSGSGTDFTLKISRVEAEDVGVYYCMQGLHTPP

SEQ ID NO: 5711 - protein, 113 aa, Homo sapiens
DIVMTQSPLSLPVTPGEPASISCKSSQSLLHSNGYNHLDWYLQKPGQSPQLLIFLGSTRASGVPDRFSGSGSGTDFTLKISRVEAEDVGVYYCMQGLHTPPFTFGPGTKVEIK

SEQ ID NO: 5712 - protein, 98 aa, Homo sapiens
DIVMTQSPLSLPVTPGEPASISCKSSQSLLYSNGYTYLEWYLQKPGQSPQVLIYSGFNRASGVPDRFSGSGSGTDFTLKISRVEAEDVGVYYCMQSVQ

SEQ ID NO: 5713 - protein, 112 aa, Homo sapiens
DIVMTQSPLSLPVTPGEPASISCKSSQSLLYSNGYTYLEWYLQKPGQSPQVLIYSGFNRASGVPDRFSGSGSGTDFTLKISRVEAEDVGVYYCMQSVQIPWTFGQGTKVEIK

SEQ ID NO: 5714 - protein, 100 aa, Homo sapiens
DIVMTQSPLSLPVTPGEPASISCRSSQSLLHGNGYNYLDWYLQKPGQSPQLLIYLGSNRASGVPDRFSGSGSGTDFTLKISRVEAEDVGVYYCMQALQTP

SEQ ID NO: 5715 - protein, 112 aa, Homo sapiens
DIVMTQSPLSLPVTPGEPASISCRSSQSLLHGNGYNYLDWYLQKPGQSPQLLIYLGSNRASGVPDRFSGSGSGTDFTLKISRVEAEDVGVYYCMQALQTPRTFGQGTKVEIK

SEQ ID NO: 5716 - protein, 100 aa, Homo sapiens
DIVMTQSPLSLPVTPGEPASISCRSSQSLLHNNGYNYLGWYLQKPGQSPHLLIYLDSNRASGVPDRFSGSGSGTDFTLKISRVEAEDVGVYYCMQVLQFP

SEQ ID NO: 5717 - protein, 111 aa, Homo sapiens
DIVMTQSPLSLPVTPGEPASISCRSSQSLLHNNGYNYLGWYLQKPGQSPHLLIYLDSNRASGVPDRFSGSGSGTDFTLKISRVEAEDVGVYYCMQVLQFPYTFGQGTKLEI

SEQ ID NO: 5718 - protein, 101 aa, Homo sapiens
DIVMTQSPLSLPVTPGEPASISCRSSQSLLHNSGYNYLSWFLQRPGQSPQLLIYLASIRASGVPDRFSGSGSGTDFTLRISRVEAEDVGVYYCMQGQQTPP

SEQ ID NO: 5719 - protein, 112 aa, Homo sapiens
DIVMTQSPLSLPVTPGEPASISCRSSQSLLHNSGYNYLSWFLQRPGQSPQLLIYLASIRASGVPDRFSGSGSGTDFTLRISRVEAEDVGVYYCMQGQQTPPTFGQGTKLEIK

SEQ ID NO: 5720 - protein, 94 aa, Homo sapiens
DIVMTQSPLSLPVTPGEPASISCRSSQSLLHSDGYIYLDWYLQRPGQSPQLLIYVGSSRASGVPDRFSASGSGTDFTLKISRVEADDVGVYYCM

SEQ ID NO: 5721 - protein, 112 aa, Homo sapiens
DIVMTQSPLSLPVTPGEPASISCRSSQSLLHSDGYIYLDWYLQRPGQSPQLLIYVGSSRASGVPDRFSASGSGTDFTLKISRVEADDVGVYYCMQGTHWPWTFGQGTKVEIK

SEQ ID NO: 5722 - protein, 101 aa, Homo sapiens
DIVMTQSPLSLPVTPGEPASISCRSSQSLLHSNEYNYLDWYLQKPGQSPQLLIYLGSNRASGVPDRFSGSGSGTDFTLKISRVEAEDVGVYYCMQALQTPP

SEQ ID NO: 5723 - protein, 113 aa, Homo sapiens
DIVMTQSPLSLPVTPGEPASISCRSSQSLLHSNEYNYLDWYLQKPGQSPQLLIYLGSNRASGVPDRFSGSGSGTDFTLKISRVEAEDVGVYYCMQALQTPPYTFGQGTKLEIK

SEQ ID NO: 5724 - protein, 100 aa, Homo sapiens
DIVMTQSPLSLPVTPGEPASISCRSSQSLLHSNGIDYLDWYLQKPGQSPQLLIYMGSNRASGVPDRFSGSGSGTDFTLKISRVEAEDVGVYYCMQALQTP

SEQ ID NO: 5725 - protein, 112 aa, Homo sapiens
DIVMTQSPLSLPVTPGEPASISCRSSQSLLHSNGIDYLDWYLQKPGQSPQLLIYMGSNRASGVPDRFSGSGSGTDFTLKISRVEAEDVGVYYCMQALQTPWTFGQGTKVEIK

SEQ ID NO: 5726 - protein, 100 aa, Homo sapiens
DIVMTQSPLSLPVTPGEPASISCRSSQSLLHSNGYNYLDWYLQKPGQPPLLLIYLGSTRASGVPDRFSGSGSGTDFTLKISRVEAEDVGVYYCMQALQNT

SEQ ID NO: 5727 - protein, 112 aa, Homo sapiens
DIVMTQSPLSLPVTPGEPASISCRSSQSLLHSNGYNYLDWYLQKPGQPPLLLIYLGSTRASGVPDRFSGSGSGTDFTLKISRVEAEDVGVYYCMQALQNTLTFGQGTKVEIK

SEQ ID NO: 5728 - protein, 99 aa, Homo sapiens
DIVMTQSPLSLPVTPGEPASISCRSSQSLLHSNGYNYLDWYLQKPGQSPQLLIYLGSHRASGVPDRFSGSGSGTDFTLKISRVEAEDVGIYYCMQTLQT

SEQ ID NO: 5729 - protein, 112 aa, Homo sapiens
DIVMTQSPLSLPVTPGEPASISCRSSQSLLHSNGYNYLDWYLQKPGQSPQLLIYLGSHRASGVPDRFSGSGSGTDFTLKISRVEAEDVGIYYCMQTLQTVLTFGGGTKVEIK

SEQ ID NO: 5730 - protein, 100 aa, Homo sapiens
DIVMTQSPLSLPVTPGEPASISCRSSQSLLHSNGYNYLDWYLQKPGQSPQLLIYLGSNRASGVPDRFSGSESGTDFTLKISRVEAEDVGVYYCMQTLQTP

SEQ ID NO: 5731 - protein, 112 aa, Homo sapiens
DIVMTQSPLSLPVTPGEPASISCRSSQSLLHSNGYNYLDWYLQKPGQSPQLLIYLGSNRASGVPDRFSGSESGTDFTLKISRVEAEDVGVYYCMQTLQTPLTFGGGTKVDIK

SEQ ID NO: 5732 - protein, 99 aa, Homo sapiens
DIVMTQSPLSLPVTPGEPASISCRSSQSLLHSNGYNYLDWYLQKPGQSPQLLIYLGSNRASGVPDRFSGSGSGTDFTLKISRVEAEDVGIYYCMQALQT

SEQ ID NO: 5733 - protein, 110 aa, Homo sapiens
DIVMTQSPLSLPVTPGEPASISCRSSQSLLHSNGYNYLDWYLQKPGQSPQLLIYLGSNRASGVPDRFSGSGSGTDFTLKISRVEAEDVGIYYCMQALQTYTFGQGTRLEI

SEQ ID NO: 5734 - protein, 98 aa, Homo sapiens
DIVMTQSPLSLPVTPGEPASISCRSSQSLLHSNGYNYLDWYLQKPGQSPQLLIYLGSNRASGVPDRFSGSGSGTDFTLKISRVEAEDVGVYYCMQALQ

SEQ ID NO: 5735 - protein, 112 aa, Homo sapiens
DIVMTQSPLSLPVTPGEPASISCRSSQSLLHSNGYNYLDWYLQKPGQSPQLLIYLGSNRASGVPDRFSGSGSGTDFTLKISRVEAEDVGVYYCMQALQSALTFGGGTKVEIK

SEQ ID NO: 5736 - protein, 99 aa, Homo sapiens
DIVMTQSPLSLPVTPGEPASISCRSSQSLLHSNGYNYLDWYLQKPGQSPQLLIYLGSNRASGVPDRFSGSGSGTDFTLKISRVEAEDVGVYYCMQALQT

SEQ ID NO: 5737 - protein, 100 aa, Homo sapiens
DIVMTQSPLSLPVTPGEPASISCRSSQSLLHSNGYNYLDWYLQKPGQSPQLLIYLGSNRASGVPDRFSGSGSGTDFTLKISRVEAEDVGVYYCMQALQTP

SEQ ID NO: 5738 - protein, 113 aa, Homo sapiens
DIVMTQSPLSLPVTPGEPASISCRSSQSLLHSNGYNYLDWYLQKPGQSPQLLIYLGSNRASGVPDRFSGSGSGTDFTLKISRVEAEDVGVYYCMQALQTPEYTFGQGTKLEIK

SEQ ID NO: 5739 - protein, 112 aa, Homo sapiens
DIVMTQSPLSLPVTPGEPASISCRSSQSLLHSNGYNYLDWYLQKPGQSPQLLIYLGSNRASGVPDRFSGSGSGTDFTLKISRVEAEDVGVYYCMQALQTPFTFGPGTKVDIK

SEQ ID NO: 5740 - protein, 112 aa, Homo sapiens
DIVMTQSPLSLPVTPGEPASISCRSSQSLLHSNGYNYLDWYLQKPGQSPQLLIYLGSNRASGVPDRFSGSGSGTDFTLKISRVEAEDVGVYYCMQALQTPGTFGQGTKVEIK

SEQ ID NO: 5741 - protein, 101 aa, Homo sapiens
DIVMTQSPLSLPVTPGEPASISCRSSQSLLHSNGYNYLDWYLQKPGQSPQLLIYLGSNRASGVPDRFSGSGSGTDFTLKISRVEAEDVGVYYCMQALQTPP

SEQ ID NO: 5742 - protein, 112 aa, Homo sapiens
DIVMTQSPLSLPVTPGEPASISCRSSQSLLHSNGYNYLDWYLQKPGQSPQLLIYLGSNRASGVPDRFSGSGSGTDFTLKISRVEAEDVGVYYCMQALQTPPTFGQGTKVEIK

SEQ ID NO: 5743 - protein, 112 aa, Homo sapiens
DIVMTQSPLSLPVTPGEPASISCRSSQSLLHSNGYNYLDWYLQKPGQSPQLLIYLGSNRASGVPDRFSGSGSGTDFTLKISRVEAEDVGVYYCMQALQTPRGFGQGTKLEIK

SEQ ID NO: 5744 - protein, 112 aa, Homo sapiens
DIVMTQSPLSLPVTPGEPASISCRSSQSLLHSNGYNYLDWYLQKPGQSPQLLIYLGSNRASGVPDRFSGSGSGTDFTLKISRVEAEDVGVYYCMQALQTPRTFGQGTKLEIK

SEQ ID NO: 5745 - protein, 111 aa, Homo sapiens
DIVMTQSPLSLPVTPGEPASISCRSSQSLLHSNGYNYLDWYLQKPGQSPQLLIYLGSNRASGVPDRFSGSGSGTDFTLKISRVEAEDVGVYYCMQALQTPTFGQGTKLEIK

SEQ ID NO: 5746 - protein, 112 aa, Homo sapiens
DIVMTQSPLSLPVTPGEPASISCRSSQSLLHSNGYNYLDWYLQKPGQSPQLLIYLGSNRASGVPDRFSGSGSGTDFTLKISRVEAEDVGVYYCMQALQTPVTFGPGTKVDIK

SEQ ID NO: 5747 - protein, 111 aa, Homo sapiens
DIVMTQSPLSLPVTPGEPASISCRSSQSLLHSNGYNYLDWYLQKPGQSPQLLIYLGSNRASGVPDRFSGSGSGTDFTLKISRVEAEDVGVYYCMQALQTRTFGQGTKVEIK

SEQ ID NO: 5748 - protein, 112 aa, Homo sapiens
DIVMTQSPLSLPVTPGEPASISCRSSQSLLHSNGYNYLDWYLQKPGQSPQLLIYLGSNRASGVPDRFSGSGSGTDFTLKISRVEAEDVGVYYCMQALQTSLTFGGGTKVEIK

SEQ ID NO: 5749 - protein, 112 aa, Homo sapiens
DIVMTQSPLSLPVTPGEPASISCRSSQSLLHSNGYNYLDWYLQKPGQSPQLLIYLGSNRASGVPDRFSGSGSGTDFTLKISRVEAEDVGVYYCMQALQTVHTFGGGTKVEIK

SEQ ID NO: 5750 - protein, 98 aa, Homo sapiens
DIVMTQSPLSLPVTPGEPASISCRSSQSLLHSNGYNYLDWYLQKPGQSPQVLIYLGSNRASGVPDRFSGSGSGTDFTLKISRVEAEDVGVYYCMQTLQ

SEQ ID NO: 5751 - protein, 111 aa, Homo sapiens
DIVMTQSPLSLPVTPGEPASISCRSSQSLLHSNGYNYLDWYLQKPGQSPQVLIYLGSNRASGVPDRFSGSGSGTDFTLKISRVEAEDVGVYYCMQTLQLYTFGQGTKLEIK

SEQ ID NO: 5752 - protein, 101 aa, Homo sapiens
DIVMTQSPLSLPVTPGEPASISCRSSRSLLHSNGYNHLDWYLQKPGQSPQLLIFLGSTRASGVPDRFSGSGSGTDFTLKISRVEAEDVGVYYCMQGLHTPP

SEQ ID NO: 5753 - protein, 113 aa, Homo sapiens
DIVMTQSPLSLPVTPGEPASISCRSSRSLLHSNGYNHLDWYLQKPGQSPQLLIFLGSTRASGVPDRFSGSGSGTDFTLKISRVEAEDVGVYYCMQGLHTPPFTFGPGTKVEIK

SEQ ID NO: 5754 - protein, 100 aa, Homo sapiens
DIVMTQSPLSLPVTPGEPASISCRSTQSLLHSNGNNYVDWYLQKPGQSPQLLIYLGSNRASGVPDRFSGSGSGTDFTLKISRVAAEDVGIYYCMQSLQTP

SEQ ID NO: 5755 - protein, 112 aa, Homo sapiens
DIVMTQSPLSLPVTPGEPASISCRSTQSLLHSNGNNYVDWYLQKPGQSPQLLIYLGSNRASGVPDRFSGSGSGTDFTLKISRVAAEDVGIYYCMQSLQTPFTFGPGTRVDIK

SEQ ID NO: 5756 - protein, 100 aa, Homo sapiens
DIVMTQSPLSLSVTLGESASVSCRSSQSLLNSNGYNYLNWYLQKPGQSPQLLIYLGSNRASGVPDRFSGGGSGTDFTLKISRVEAEDVGVYYCMQALQTP

SEQ ID NO: 5757 - protein, 112 aa, Homo sapiens
DIVMTQSPLSLSVTLGESASVSCRSSQSLLNSNGYNYLNWYLQKPGQSPQLLIYLGSNRASGVPDRFSGGGSGTDFTLKISRVEAEDVGVYYCMQALQTPFTFGPGTKVDIK

SEQ ID NO: 5758 - protein, 100 aa, Homo sapiens
DIVMTQSPLSLSVTPGEAASISCRSSRSLLHTNGYNYLAWYLQKPGQSPQLLIYLGSTRASGVPDRFSGSGSGTDFTLRISRMEAEDVGVYYCMQALQIP

SEQ ID NO: 5759 - protein, 112 aa, Homo sapiens
DIVMTQSPLSLSVTPGEAASISCRSSRSLLHTNGYNYLAWYLQKPGQSPQLLIYLGSTRASGVPDRFSGSGSGTDFTLRISRMEAEDVGVYYCMQALQIPRTFGHGTKVEIK

SEQ ID NO: 5760 - protein, 100 aa, Homo sapiens
DIVMTQSPLSLSVTPGESASISCRSSRSLLDSNGYSYLDWYLQKPGQSPQLLIYLGSNRASGVPDRFSGSGSGTDFTLQISRVEADDVGVYYCMQGLQTP

SEQ ID NO: 5761 - protein, 112 aa, Homo sapiens
DIVMTQSPLSLSVTPGESASISCRSSRSLLDSNGYSYLDWYLQKPGQSPQLLIYLGSNRASGVPDRFSGSGSGTDFTLQISRVEADDVGVYYCMQGLQTPVTFGGGTKVEIK

SEQ ID NO: 5762 - protein, 100 aa, Homo sapiens
DIVMTQSPLSLSVTPGQPASISCKSSESLLHSDGKTYLHWYLQKPGQSPQLLIYEVSSRFSGVPDRFSGSGSGTDFTLKISRVEAEDVGIYYCMQGVHLP

SEQ ID NO: 5763 - protein, 112 aa, Homo sapiens
DIVMTQSPLSLSVTPGQPASISCKSSESLLHSDGKTYLHWYLQKPGQSPQLLIYEVSSRFSGVPDRFSGSGSGTDFTLKISRVEAEDVGIYYCMQGVHLPITFGGGTKVDIK

SEQ ID NO: 5764 - protein, 100 aa, Homo sapiens
DIVMTQSPLSLSVTPGQPASISCKSSLSLLDSDGKTYLYWYLQKPGQPPQLLIYEVSNRFSGVPDRFSGSGSGTDFTLKISRVEAEDVGVYYCMQSIQLP

SEQ ID NO: 5765 - protein, 112 aa, Homo sapiens
DIVMTQSPLSLSVTPGQPASISCKSSLSLLDSDGKTYLYWYLQKPGQPPQLLIYEVSNRFSGVPDRFSGSGSGTDFTLKISRVEAEDVGVYYCMQSIQLPITFGGGTKVEIK

SEQ ID NO: 5766 - protein, 100 aa, Homo sapiens
DIVMTQSPLSLSVTPGQPASISCKSSQSLLHSDGKTYLFWYLHKPGQPPQLLIYEVSNRFSGVSDRFSGSGSGTDFTLKISRVEAEDLGVYYCMQSIHLP

SEQ ID NO: 5767 - protein, 112 aa, Homo sapiens
DIVMTQSPLSLSVTPGQPASISCKSSQSLLHSDGKTYLFWYLHKPGQPPQLLIYEVSNRFSGVSDRFSGSGSGTDFTLKISRVEAEDLGVYYCMQSIHLPITFGQGTRLEIK

SEQ ID NO: 5768 - protein, 100 aa, Homo sapiens
DIVMTQSPPSLPVTPGEPASISCRSSQSLLHGNGYTYLDWYLQKPGQSPQLLIYLGSTRASGVPDRFSGSGSGTDFTLEISRVEAEDVGVYYCMQALQTP

SEQ ID NO: 5769 - protein, 111 aa, Homo sapiens
DIVMTQSPPSLPVTPGEPASISCRSSQSLLHGNGYTYLDWYLQKPGQSPQLLIYLGSTRASGVPDRFSGSGSGTDFTLEISRVEAEDVGVYYCMQALQTPFTFGPGTKVDI

SEQ ID NO: 5770 - protein, 100 aa, Homo sapiens
DIVMTQSPRSSPVTLGQPASISCRSSQSLVHGDGNTYLSWLQQRPGQPPRLLIYKISKRFSGVPDRFSGSGAGTDFTLKISRVEAEDVGVYYCTQATQFP

SEQ ID NO: 5771 - protein, 111 aa, Homo sapiens
DIVMTQSPRSSPVTLGQPASISCRSSQSLVHGDGNTYLSWLQQRPGQPPRLLIYKISKRFSGVPDRFSGSGAGTDFTLKISRVEAEDVGVYYCTQATQFPHTFGQGTKLEI

SEQ ID NO: 5772 - protein, 100 aa, Homo sapiens
DIVMTQSPVSLPVTPGEPASISCRSSQSLLHSDGYNYLDWYLQKPGQSPQLLIYLASSRASGVPDRFSGSGSGTDFTLKISRVEAEDVGVYYCMQALQTP

SEQ ID NO: 5773 - protein, 112 aa, Homo sapiens
DIVMTQSPVSLPVTPGEPASISCRSSQSLLHSDGYNYLDWYLQKPGQSPQLLIYLASSRASGVPDRFSGSGSGTDFTLKISRVEAEDVGVYYCMQALQTPLSFGGGTKVEIK

SEQ ID NO: 5774 - protein, 101 aa, Homo sapiens
DIVMTQTPLFLSVTPGQPASISCKSSQSLLHSDGKTYLYWYLQRPGQSPHLLFYEVSNRVSGVPERFSGSGSGTDFTLKISRVEAEDVGVYYCMQGLDLPP

SEQ ID NO: 5775 - protein, 113 aa, Homo sapiens
DIVMTQTPLFLSVTPGQPASISCKSSQSLLHSDGKTYLYWYLQRPGQSPHLLFYEVSNRVSGVPERFSGSGSGTDFTLKISRVEAEDVGVYYCMQGLDLPPFTFGQGTKVDIK

SEQ ID NO: 5776 - protein, 99 aa, Homo sapiens
DIVMTQTPLFLSVTPGQPASISCKSSQSLLHTNGKTYLYWYLQKPGQSPQLLISEVSTRFSGVPDRFSGSGSGTDFTLRISRVDAEDVGVYYCMQGIHL

SEQ ID NO: 5777 - protein, 111 aa, Homo sapiens
DIVMTQTPLFLSVTPGQPASISCKSSQSLLHTNGKTYLYWYLQKPGQSPQLLISEVSTRFSGVPDRFSGSGSGTDFTLRISRVDAEDVGVYYCMQGIHLYSFGQGTKLEIK

SEQ ID NO: 5778 - protein, 111 aa, Homo sapiens
DIVMTQTPLFLSVTPGQPASISCKSSQSLLHTNGKTYLYWYLQKPGQSPQLLISEVSTRFSGVPDRFSGSGSGTDFTLRISRVDAEDVGVYYCMQGIHLYSFGQGTTLEIK

SEQ ID NO: 5779 - protein, 99 aa, Homo sapiens
DIVMTQTPLSLAVTPGQPASISCRSSQTLLHTNGKTYLYWYLQKPGQSPQLLISEVSTRFSGVPARFSGSGSGTDFTLKISRVDAEDVGVYYCMQGTHL

SEQ ID NO: 5780 - protein, 111 aa, Homo sapiens
DIVMTQTPLSLAVTPGQPASISCRSSQTLLHTNGKTYLYWYLQKPGQSPQLLISEVSTRFSGVPARFSGSGSGTDFTLKISRVDAEDVGVYYCMQGTHLYSFGQGTKLEIK

SEQ ID NO: 5781 - protein, 100 aa, Homo sapiens
DIVMTQTPLSLAVTSGQPASISCKSSQSLLHSDGKTYLYWYLQKPGQPPQLLIYELSNPFSGVPDRFSGSGSGTDFTLKISRVEAEDVGVYYCMQSVQLP

SEQ ID NO: 5782 - protein, 112 aa, Homo sapiens
DIVMTQTPLSLAVTSGQPASISCKSSQSLLHSDGKTYLYWYLQKPGQPPQLLIYELSNPFSGVPDRFSGSGSGTDFTLKISRVEAEDVGVYYCMQSVQLPCTFGQGTKLEIK

SEQ ID NO: 5783 - protein, 100 aa, Homo sapiens
DIVMTQTPLSLAVTSGQPASISCKSSQSLLHSDGKTYLYWYLQKPGQPPQLLIYEVSNRFSGVPDRFSGSGSGTDFTLKISRVEAEDVGVYYCMQSVQLP

SEQ ID NO: 5784 - protein, 112 aa, Homo sapiens
DIVMTQTPLSLAVTSGQPASISCKSSQSLLHSDGKTYLYWYLQKPGQPPQLLIYEVSNRFSGVPDRFSGSGSGTDFTLKISRVEAEDVGVYYCMQSVQLPCTFGQGTKLEIK

SEQ ID NO: 5785 - protein, 100 aa, Homo sapiens
DIVMTQTPLSLPVTLGQPASISCRSSQSLVHSDGNTYLSWLQQRPGQPPRLLIYKISNRFSGVPDTFSGSGAGTDFTLKISRVEAEDVGIYYCMQATQFP

SEQ ID NO: 5786 - protein, 111 aa, Homo sapiens
DIVMTQTPLSLPVTLGQPASISCRSSQSLVHSDGNTYLSWLQQRPGQPPRLLIYKISNRFSGVPDTFSGSGAGTDFTLKISRVEAEDVGIYYCMQATQFPYTFGQGTKLEI

SEQ ID NO: 5787 - protein, 101 aa, Homo sapiens
DIVMTQTPLSLPVTPGQPASISCKSSQSLLHSDGKTYLYWYLQKPGQPPQLLIYEVSKRFSGVPDRFSGSGSGTDFTLKISRVEAEDVGVYYCMHSIQFPP

SEQ ID NO: 5788 - protein, 114 aa, Homo sapiens
DIVMTQTPLSLPVTPGQPASISCKSSQSLLHSDGKTYLYWYLQKPGQPPQLLIYEVSKRFSGVPDRFSGSGSGTDFTLKISRVEAEDVGVYYCMHSIQFPPTWTFGQGTKVEIK

SEQ ID NO: 5789 - protein, 99 aa, Homo sapiens
DIVMTQTPLSLPVTPGQPASISCKSSQSLLHTDGKTYLSWYLQKPGQSPQLLFYEVSSRFSGVPDRFTGSGSGTDFTLKISRVEAEDVGIYYCMQGLHL

SEQ ID NO: 5790 - protein, 110 aa, Homo sapiens
DIVMTQTPLSLPVTPGQPASISCKSSQSLLHTDGKTYLSWYLQKPGQSPQLLFYEVSSRFSGVPDRFTGSGSGTDFTLKISRVEAEDVGIYYCMQGLHLYSFGQGTRLEI

SEQ ID NO: 5791 - protein, 99 aa, Homo sapiens
DIVMTQTPLSLPVTPGQPASISCKSSQSLVHTDGKTYLSWYLQKPGQSPQPLIYELSSRFSGVPDRFSGSGSGTDFTLKISRVEAEDVGIYYCMQGLHL

SEQ ID NO: 5792 - protein, 111 aa, Homo sapiens
DIVMTQTPLSLPVTPGQPASISCKSSQSLVHTDGKTYLSWYLQKPGQSPQPLIYELSSRFSGVPDRFSGSGSGTDFTLKISRVEAEDVGIYYCMQGLHLYSFGQGTKLEIK

SEQ ID NO: 5793 - protein, 101 aa, Homo sapiens
DIVMTQTPLSLSVSPGQPASISCKSSQSLLHSDGKTYLYWYLQRPGQSPHLLLQEVSSRVSGVPDRFSGSGSGTDFTLKISRVEAEDVGTYYCMQGVDLPP

SEQ ID NO: 5794 - protein, 113 aa, Homo sapiens
DIVMTQTPLSLSVSPGQPASISCKSSQSLLHSDGKTYLYWYLQRPGQSPHLLLQEVSSRVSGVPDRFSGSGSGTDFTLKISRVEAEDVGTYYCMQGVDLPPFTFGQGTKLDLK

SEQ ID NO: 5795 - protein, 99 aa, Homo sapiens
DIVMTQTPLSLSVTPGQPASISCKSSHSLLHSDGKTYLFWYLQKPGQSPQLLIYEVSSRFSGVPDRFSGSGSGTDFTLKISRVEADDVGVYYCMQGIHL

SEQ ID NO: 5796 - protein, 111 aa, Homo sapiens
DIVMTQTPLSLSVTPGQPASISCKSSHSLLHSDGKTYLFWYLQKPGQSPQLLIYEVSSRFSGVPDRFSGSGSGTDFTLKISRVEADDVGVYYCMQGIHLITFGQGTRLEIK

SEQ ID NO: 5797 - protein, 101 aa, Homo sapiens
DIVMTQTPLSLSVTPGQPASISCKSSKSLLHSDGKTYLYWYLQKPGQPPQLLIYEVSNRFSGVSDRFSGSGSGTDFTLKISRVEAEDVGVYYCMQSIQLPP

SEQ ID NO: 5798 - protein, 112 aa, Homo sapiens
DIVMTQTPLSLSVTPGQPASISCKSSKSLLHSDGKTYLYWYLQKPGQPPQLLIYEVSNRFSGVSDRFSGSGSGTDFTLKISRVEAEDVGVYYCMQSIQLPPAFGQGTKVEIK

SEQ ID NO: 5799 - protein, 100 aa, Homo sapiens
DIVMTQTPLSLSVTPGQPASISCKSSQSLLHNDGKTYLYWYLQKPGQSPHLLIYEVSNRFSGVPDRISGSGSGTDFTLKISRVEAEDVGVYYCMQSTQLP

SEQ ID NO: 5800 - protein, 112 aa, Homo sapiens
DIVMTQTPLSLSVTPGQPASISCKSSQSLLHNDGKTYLYWYLQKPGQSPHLLIYEVSNRFSGVPDRISGSGSGTDFTLKISRVEAEDVGVYYCMQSTQLPLTFGGGTKVEMK

SEQ ID NO: 5801 - protein, 100 aa, Homo sapiens
DIVMTQTPLSLSVTPGQPASISCKSSQSLLHNDGKTYLYWYLQKPGQSPQLLIHEDSRRFSGVPDRFSGSGSGTDFTLKISRVEAEDVGVYYCMQGKHFR

SEQ ID NO: 5802 - protein, 113 aa, Homo sapiens
DIVMTQTPLSLSVTPGQPASISCKSSQSLLHNDGKTYLYWYLQKPGQSPQLLIHEDSRRFSGVPDRFSGSGSGTDFTLKISRVEAEDVGVYYCMQGKHFRLYTFGQGTKLEIK

SEQ ID NO: 5803 - protein, 101 aa, Homo sapiens
DIVMTQTPLSLSVTPGQPASISCKSSQSLLHNDGKTYLYWYLQKPGQSPQLLLHEVSSRFSGVPDRFSGSGSGTDFTLKISRVEAEDVGVYYCMQGVHLPP

SEQ ID NO: 5804 - protein, 113 aa, Homo sapiens
DIVMTQTPLSLSVTPGQPASISCKSSQSLLHNDGKTYLYWYLQKPGQSPQLLLHEVSSRFSGVPDRFSGSGSGTDFTLKISRVEAEDVGVYYCMQGVHLPPYTFGQGTKLEIK

SEQ ID NO: 5805 - protein, 100 aa, Homo sapiens
DIVMTQTPLSLSVTPGQPASISCKSSQSLLHSDGKTHLYWFQQRPGQPPQLLIYELSNRFSGVPDRFSGSGSGTDFTLKISRVEAEDVGVYYCMQGIQLP

SEQ ID NO: 5806 - protein, 112 aa, Homo sapiens
DIVMTQTPLSLSVTPGQPASISCKSSQSLLHSDGKTHLYWFQQRPGQPPQLLIYELSNRFSGVPDRFSGSGSGTDFTLKISRVEAEDVGVYYCMQGIQLPRTFGQGTKVEIK

SEQ ID NO: 5807 - protein, 100 aa, Homo sapiens
DIVMTQTPLSLSVTPGQPASISCKSSQSLLHSDGKTYFYWYLQKPGQPPHLLIYEVSNRFSGVPDRFSGSGSETDFTLKISRVEAEDLGIYYCMQSLQLP

SEQ ID NO: 5808 - protein, 112 aa, Homo sapiens
DIVMTQTPLSLSVTPGQPASISCKSSQSLLHSDGKTYFYWYLQKPGQPPHLLIYEVSNRFSGVPDRFSGSGSETDFTLKISRVEAEDLGIYYCMQSLQLPYTFGQGTKLEIK

SEQ ID NO: 5809 - protein, 101 aa, Homo sapiens
DIVMTQTPLSLSVTPGQPASISCKSSQSLLHSDGKTYLDWFLQKPGQSPQLLIYEVSSRFSGVPDRFSGSGSGTDFTLKISRVEAEDVGVYYCMQGIHLPP

SEQ ID NO: 5810 - protein, 113 aa, Homo sapiens
DIVMTQTPLSLSVTPGQPASISCKSSQSLLHSDGKTYLDWFLQKPGQSPQLLIYEVSSRFSGVPDRFSGSGSGTDFTLKISRVEAEDVGVYYCMQGIHLPPITFGQGTRLEIK

SEQ ID NO: 5811 - protein, 101 aa, Homo sapiens
DIVMTQTPLSLSVTPGQPASISCKSSQSLLHSDGKTYLDWFLQKPGQSPQLLIYEVSSRFSGVPDRFSGSGSGTDFTLKISRVEAEDVGVYYCMQGIQLPP

SEQ ID NO: 5812 - protein, 113 aa, Homo sapiens
DIVMTQTPLSLSVTPGQPASISCKSSQSLLHSDGKTYLDWFLQKPGQSPQLLIYEVSSRFSGVPDRFSGSGSGTDFTLKISRVEAEDVGVYYCMQGIQLPPITFGQGTRLEIK

SEQ ID NO: 5813 - protein, 101 aa, Homo sapiens
DIVMTQTPLSLSVTPGQPASISCKSSQSLLHSDGKTYLFWFLQRPGQSPHLLLYEISSRVSGVPDRFSGSGSGTDFTLKISRVEAEDVGIYYCMQGVDISP

SEQ ID NO: 5814 - protein, 113 aa, Homo sapiens
DIVMTQTPLSLSVTPGQPASISCKSSQSLLHSDGKTYLFWFLQRPGQSPHLLLYEISSRVSGVPDRFSGSGSGTDFTLKISRVEAEDVGIYYCMQGVDISPITFGQGTKLELK

SEQ ID NO: 5815 - protein, 101 aa, Homo sapiens
DIVMTQTPLSLSVTPGQPASISCKSSQSLLHSDGKTYLFWFLQRPGQSPHLLLYEVSSRVSGVPDRFSGSGSGTDFTLKISRVEAEDVGVYYCMQGVDVTP

SEQ ID NO: 5816 - protein, 113 aa, Homo sapiens
DIVMTQTPLSLSVTPGQPASISCKSSQSLLHSDGKTYLFWFLQRPGQSPHLLLYEVSSRVSGVPDRFSGSGSGTDFTLKISRVEAEDVGVYYCMQGVDVTPITFGQGTKLELK

SEQ ID NO: 5817 - protein, 100 aa, Homo sapiens
DIVMTQTPLSLSVTPGQPASISCKSSQSLLHSDGKTYLSWFLQKPGHPPQLLIYEVSNRFSGAPDRFSGSGSGTDFTLKISRVEAEDVGVYYCMQGIGVP

SEQ ID NO: 5818 - protein, 112 aa, Homo sapiens
DIVMTQTPLSLSVTPGQPASISCKSSQSLLHSDGKTYLSWFLQKPGHPPQLLIYEVSNRFSGAPDRFSGSGSGTDFTLKISRVEAEDVGVYYCMQGIGVPKTFGQGTKVEIK

SEQ ID NO: 5819 - protein, 100 aa, Homo sapiens
DIVMTQTPLSLSVTPGQPASISCKSSQSLLHSDGKTYLSWYLQRPGQPPHLLIYEVSSRFSGVPDRFSGSGSGTDFTLKISRMEAEDVGLYYCMQGVQLP

SEQ ID NO: 5820 - protein, 112 aa, Homo sapiens
DIVMTQTPLSLSVTPGQPASISCKSSQSLLHSDGKTYLSWYLQRPGQPPHLLIYEVSSRFSGVPDRFSGSGSGTDFTLKISRMEAEDVGLYYCMQGVQLPKTFGQGTKVEIK

SEQ ID NO: 5821 - protein, 100 aa, Homo sapiens
DIVMTQTPLSLSVTPGQPASISCKSSQSLLHSDGKTYLYWYLQKPGQPPHLLIYEVSNRFSGVPDRFSGSGSGTDFTLKISRVEAEDVGSYFCMQSTQLP

SEQ ID NO: 5822 - protein, 112 aa, Homo sapiens
DIVMTQTPLSLSVTPGQPASISCKSSQSLLHSDGKTYLYWYLQKPGQPPHLLIYEVSNRFSGVPDRFSGSGSGTDFTLKISRVEAEDVGSYFCMQSTQLPYTFGQGTKLEIK

SEQ ID NO: 5823 - protein, 100 aa, Homo sapiens
DIVMTQTPLSLSVTPGQPASISCKSSQSLLHSDGKTYLYWYLQKPGQPPQLLFHEVSNRFSGVPDRFSGSGSGTDFTLKISRVEAADVGIYYCMQSIQLP

SEQ ID NO: 5824 - protein, 112 aa, Homo sapiens
DIVMTQTPLSLSVTPGQPASISCKSSQSLLHSDGKTYLYWYLQKPGQPPQLLFHEVSNRFSGVPDRFSGSGSGTDFTLKISRVEAADVGIYYCMQSIQLPLTFGGGTKVEIK

SEQ ID NO: 5825 - protein, 101 aa, Homo sapiens
DIVMTQTPLSLSVTPGQPASISCKSSQSLLHSDGKTYLYWYLQKPGQPPQLLIYEVSNRFSGVPDRCSGSGSGTDFTLKISRVEAEDVGIYYCMQSKQLPP

SEQ ID NO: 5826 - protein, 112 aa, Homo sapiens
DIVMTQTPLSLSVTPGQPASISCKSSQSLLHSDGKTYLYWYLQKPGQPPQLLIYEVSNRFSGVPDRCSGSGSGTDFTLKISRVEAEDVGIYYCMQSKQLPPTFGQGTKVEIK

SEQ ID NO: 5827 - protein, 99 aa, Homo sapiens
DIVMTQTPLSLSVTPGQPASISCKSSQSLLHSDGKTYLYWYLQKPGQPPQLLIYEVSNRFSGVPDRFSGSGSGTDFTLKISRVEAEDVGVYYCMQSIQL

SEQ ID NO: 5828 - protein, 100 aa, Homo sapiens
DIVMTQTPLSLSVTPGQPASISCKSSQSLLHSDGKTYLYWYLQKPGQPPQLLIYEVSNRFSGVPDRFSGSGSGTDFTLKISRVEAEDVGVYYCMQSIQLP

SEQ ID NO: 5829 - protein, 112 aa, Homo sapiens
DIVMTQTPLSLSVTPGQPASISCKSSQSLLHSDGKTYLYWYLQKPGQPPQLLIYEVSNRFSGVPDRFSGSGSGTDFTLKISRVEAEDVGVYYCMQSIQLPGTFGQGTKLEIK

SEQ ID NO: 5830 - protein, 113 aa, Homo sapiens
DIVMTQTPLSLSVTPGQPASISCKSSQSLLHSDGKTYLYWYLQKPGQPPQLLIYEVSNRFSGVPDRFSGSGSGTDFTLKISRVEAEDVGVYYCMQSIQLPRITFGQGTRLEIK

SEQ ID NO: 5831 - protein, 112 aa, Homo sapiens
DIVMTQTPLSLSVTPGQPASISCKSSQSLLHSDGKTYLYWYLQKPGQPPQLLIYEVSNRFSGVPDRFSGSGSGTDFTLKISRVEAEDVGVYYCMQSIQLPRTFGQGTKLEIK

SEQ ID NO: 5832 - protein, 112 aa, Homo sapiens
DIVMTQTPLSLSVTPGQPASISCKSSQSLLHSDGKTYLYWYLQKPGQPPQLLIYEVSNRFSGVPDRFSGSGSGTDFTLKISRVEAEDVGVYYCMQSIQLPWTFGQGTKVEIK

SEQ ID NO: 5833 - protein, 111 aa, Homo sapiens
DIVMTQTPLSLSVTPGQPASISCKSSQSLLHSDGKTYLYWYLQKPGQPPQLLIYEVSNRFSGVPDRFSGSGSGTDFTLKISRVEAEDVGVYYCMQSIQLRTFGQGTKVEIK

SEQ ID NO: 5834 - protein, 100 aa, Homo sapiens
DIVMTQTPLSLSVTPGQPASISCKSSQSLLHSDGKTYLYWYLQKPGQPPQLLIYEVSNRVSGVPDRISGSGSGTDFTLRISRVEAEDVGIYYCMQSIHLP

SEQ ID NO: 5835 - protein, 112 aa, Homo sapiens
DIVMTQTPLSLSVTPGQPASISCKSSQSLLHSDGKTYLYWYLQKPGQPPQLLIYEVSNRVSGVPDRISGSGSGTDFTLRISRVEAEDVGIYYCMQSIHLPLTFAGGTKVEIK

SEQ ID NO: 5836 - protein, 100 aa, Homo sapiens
DIVMTQTPLSLSVTPGQPASISCKSSQSLLHSDGKTYLYWYLQKPGQPPQVLIYEVSNRFSGVPDRFSGSGSGTDFTLKISRVEAEDVGVYYCMQSIHFP

SEQ ID NO: 5837 - protein, 112 aa, Homo sapiens
DIVMTQTPLSLSVTPGQPASISCKSSQSLLHSDGKTYLYWYLQKPGQPPQVLIYEVSNRFSGVPDRFSGSGSGTDFTLKISRVEAEDVGVYYCMQSIHFPLTFGPGTKVDIK

SEQ ID NO: 5838 - protein, 100 aa, Homo sapiens
DIVMTQTPLSLSVTPGQPASISCKSSQSLLHSDGKTYLYWYLQKSGQPPQLLIYEVSNRFSGVPDRFSGSGSGTDFTLKISRVEAEDVGVYYCMQNFQLP

SEQ ID NO: 5839 - protein, 112 aa, Homo sapiens
DIVMTQTPLSLSVTPGQPASISCKSSQSLLHSDGKTYLYWYLQKSGQPPQLLIYEVSNRFSGVPDRFSGSGSGTDFTLKISRVEAEDVGVYYCMQNFQLPVTFGQGTKVEIK

SEQ ID NO: 5840 - protein, 101 aa, Homo sapiens
DIVMTQTPLSLSVTPGQPASISCKSSQSLLHSNGKTYLYWYLQKPGQPPRLLIYEVSNRFSGVPDRFSGSGSGTDFTLQISRVEAEDIGLYFCMQSILLPP

SEQ ID NO: 5841 - protein, 112 aa, Homo sapiens
DIVMTQTPLSLSVTPGQPASISCKSSQSLLHSNGKTYLYWYLQKPGQPPRLLIYEVSNRFSGVPDRFSGSGSGTDFTLQISRVEAEDIGLYFCMQSILLPPTFGQGARLEIK

SEQ ID NO: 5842 - protein, 100 aa, Homo sapiens
DIVMTQTPLSLSVTPGQPASISCKSSQSLLHTDGKTYLFWYLHKPGQSPQLLIYEVSNRFSGVSDRFSGSGSGTDFTLKISRVEAEDLGVYYCMQSTQLP

SEQ ID NO: 5843 - protein, 112 aa, Homo sapiens
DIVMTQTPLSLSVTPGQPASISCKSSQSLLHTDGKTYLFWYLHKPGQSPQLLIYEVSNRFSGVSDRFSGSGSGTDFTLKISRVEAEDLGVYYCMQSTQLPITFGQGTRLEIK

SEQ ID NO: 5844 - protein, 98 aa, Homo sapiens
DIVMTQTPLSLSVTPGQPASISCKSSQSLLHTDGKTYLYWYLQKPGQSPQLLIYEVSNRFSGVPDRFSGSGSGTDFTLEISRVEAEDVGVYYCMQSIL

SEQ ID NO: 5845 - protein, 111 aa, Homo sapiens
DIVMTQTPLSLSVTPGQPASISCKSSQSLLHTDGKTYLYWYLQKPGQSPQLLIYEVSNRFSGVPDRFSGSGSGTDFTLEISRVEAEDVGVYYCMQSILPLTFGGGTKVEIK

SEQ ID NO: 5846 - protein, 101 aa, Homo sapiens
DIVMTQTPLSLSVTPGQPASISCKSSQSPLHTDGKTYLYWYLQRPGQPPQLLIYEVSNRFSGVPDRFSGSGSGTDFTLKISRVEAEDVGVYYCMQSVQVPP

SEQ ID NO: 5847 - protein, 112 aa, Homo sapiens
DIVMTQTPLSLSVTPGQPASISCKSSQSPLHTDGKTYLYWYLQRPGQPPQLLIYEVSNRFSGVPDRFSGSGSGTDFTLKISRVEAEDVGVYYCMQSVQVPPTFGQGTKVEIK

SEQ ID NO: 5848 - protein, 100 aa, Homo sapiens
DIVMTQTPLSLSVTPGQPASISCKSSQSVLHSDGKTYLYWYLQKPGQPPQLLIYEVSNRFSGVPDRFSGSGSGTDFTLKISRVEAEDVGVYYCMQSIQRP

SEQ ID NO: 5849 - protein, 112 aa, Homo sapiens
DIVMTQTPLSLSVTPGQPASISCKSSQSVLHSDGKTYLYWYLQKPGQPPQLLIYEVSNRFSGVPDRFSGSGSGTDFTLKISRVEAEDVGVYYCMQSIQRPYTFGQGTKLEIK

SEQ ID NO: 5850 - protein, 100 aa, Homo sapiens
DIVMTQTPLSLSVTPGQPASISCKSSQTLLHSDGTTSLYWYLQKPGQPPQLLIYEVFNRFSGVPDRFSGSGSGTDFSLKISRVEAEDVGVYYCMQTIQFP

SEQ ID NO: 5851 - protein, 112 aa, Homo sapiens
DIVMTQTPLSLSVTPGQPASISCKSSQTLLHSDGTTSLYWYLQKPGQPPQLLIYEVFNRFSGVPDRFSGSGSGTDFSLKISRVEAEDVGVYYCMQTIQFPFTFGPGTKVDIK

SEQ ID NO: 5852 - protein, 100 aa, Homo sapiens
DIVMTQTPLSLSVTPGQSASISCKSSQRLLHSDGKTYLFWYVQKPGQPPQLLIREVSNRFSGVSARFSGSGSGTDFTLKISRVEAEDVGIYYCMQSLRLP

SEQ ID NO: 5853 - protein, 112 aa, Homo sapiens
DIVMTQTPLSLSVTPGQSASISCKSSQRLLHSDGKTYLFWYVQKPGQPPQLLIREVSNRFSGVSARFSGSGSGTDFTLKISRVEAEDVGIYYCMQSLRLPLTFGGGTKVEIK

SEQ ID NO: 5854 - protein, 99 aa, Homo sapiens
DIVMTQTPLSLSVTPGQSASISCKSSQSLLHSDGKTYLFWYLQKPGQSPQLLIYEVSSRFSGVPDRFSGSGSGTDFTLKISRVEADDVGVYYCMQGIHL

SEQ ID NO: 5855 - protein, 111 aa, Homo sapiens
DIVMTQTPLSLSVTPGQSASISCKSSQSLLHSDGKTYLFWYLQKPGQSPQLLIYEVSSRFSGVPDRFSGSGSGTDFTLKISRVEADDVGVYYCMQGIHLITFGQGTRLEIK

SEQ ID NO: 5856 - protein, 100 aa, Homo sapiens
DIVMTQTPLSSPVTLGQPASISCKSGQSLVHSDGNTYLSWLQQRPGQPPRLLIYKISNRFSGVADRFSGSGAGTDFTLEISRVEAEDVGVYYCMQATQFP

SEQ ID NO: 5857 - protein, 112 aa, Homo sapiens
DIVMTQTPLSSPVTLGQPASISCKSGQSLVHSDGNTYLSWLQQRPGQPPRLLIYKISNRFSGVADRFSGSGAGTDFTLEISRVEAEDVGVYYCMQATQFPRTFGQGTKLEIK

SEQ ID NO: 5858 - protein, 100 aa, Homo sapiens
DIVMTQTPLSSPVTLGQPASISCRSSQSLVHGDGNTYLSWLHQRPGQPPRLLIYYISNRFSGVPDRFSGSGAGTDFTLKISRVEAADVGVYYCMQGTHFP

SEQ ID NO: 5859 - protein, 111 aa, Homo sapiens
DIVMTQTPLSSPVTLGQPASISCRSSQSLVHGDGNTYLSWLHQRPGQPPRLLIYYISNRFSGVPDRFSGSGAGTDFTLKISRVEAADVGVYYCMQGTHFPFTFGQGTKLEI

SEQ ID NO: 5860 - protein, 98 aa, Homo sapiens
DIVMTQTPLSSPVTLGQPASISCRSSQSLVHSDGGTYLSWLHQRPGQPPRLLIYKISNRFSGVPDRFSGSGAGTDFTLKISRVEAEDVGVYYCVQTTQ

SEQ ID NO: 5861 - protein, 111 aa, Homo sapiens
DIVMTQTPLSSPVTLGQPASISCRSSQSLVHSDGGTYLSWLHQRPGQPPRLLIYKISNRFSGVPDRFSGSGAGTDFTLKISRVEAEDVGVYYCVQTTQSVAFGQGTKVEIK

SEQ ID NO: 5862 - protein, 100 aa, Homo sapiens
DIVMTQTPLSSPVTLGQPASISCRSSQSLVHSDGNTYLSWLQQRPGQPPRLLIYKISNRFSGVPDRFSGSGAGTDFTLKISRVEAEDVGVYYCMQATQFP

SEQ ID NO: 5863 - protein, 112 aa, Homo sapiens
DIVMTQTPLSSPVTLGQPASISCRSSQSLVHSDGNTYLSWLQQRPGQPPRLLIYKISNRFSGVPDRFSGSGAGTDFTLKISRVEAEDVGVYYCMQATQFPGTFGQGTKVEIK

SEQ ID NO: 5864 - protein, 112 aa, Homo sapiens
DIVMTQTPLSSPVTLGQPASISCRSSQSLVHSDGNTYLSWLQQRPGQPPRLLIYKISNRFSGVPDRFSGSGAGTDFTLKISRVEAEDVGVYYCMQATQFPITFGQGTRLEIK

SEQ ID NO: 5865 - protein, 112 aa, Homo sapiens
DIVMTQTPLSSPVTLGQPASISCRSSQSLVHSDGNTYLSWLQQRPGQPPRLLIYKISNRFSGVPDRFSGSGAGTDFTLKISRVEAEDVGVYYCMQATQFPYTFGQGTKLEIK

SEQ ID NO: 5866 - protein, 100 aa, Homo sapiens
DIVMTQTPLSSPVTLGQPASISCRSSQSLVHSDGNTYLSWLQQRPGQPPRLLIYKISNRFSGVPDRFSGSGAGTDFTLKISRVEPEDVGVYYCMQATQFP

SEQ ID NO: 5867 - protein, 111 aa, Homo sapiens
DIVMTQTPLSSPVTLGQPASISCRSSQSLVHSDGNTYLSWLQQRPGQPPRLLIYKISNRFSGVPDRFSGSGAGTDFTLKISRVEPEDVGVYYCMQATQFPTFGQGTKLEIK

SEQ ID NO: 5868 - protein, 100 aa, Homo sapiens
DIVMTQTPLSSPVTLGQPASISCRSSQSLVHSDGNTYLSWLQQRPGQPPRVLIYKISNRFSGVPDRFSGSGAGTDFTLKISRVEAEDVGVYYCMQATQLP

SEQ ID NO: 5869 - protein, 112 aa, Homo sapiens
DIVMTQTPLSSPVTLGQPASISCRSSQSLVHSDGNTYLSWLQQRPGQPPRVLIYKISNRFSGVPDRFSGSGAGTDFTLKISRVEAEDVGVYYCMQATQLPHTFGQGTKLEIK

SEQ ID NO: 5870 - protein, 100 aa, Homo sapiens
DIVMTQTPLSSPVTLGQPASISCRSSQSLVHSDGNTYLSWLQQRPGQPPRVLIYKISNRFSGVPDRFSGSGAGTDFTLKISRVEVEDVGVYYCMQATQFP

SEQ ID NO: 5871 - protein, 111 aa, Homo sapiens
DIVMTQTPLSSPVTLGQPASISCRSSQSLVHSDGNTYLSWLQQRPGQPPRVLIYKISNRFSGVPDRFSGSGAGTDFTLKISRVEVEDVGVYYCMQATQFPWTFGQGTKVEI

SEQ ID NO: 5872 - protein, 100 aa, Homo sapiens
DIVMTQTPLSSPVTLGQPASISCRSSQSLVHSDGNTYLSWVQQRPGQPPRLLIYKISNRVSGVPDRFSGSGAGTDFTLKISRVEAEDVGVYYCMQVKEFP

SEQ ID NO: 5873 - protein, 112 aa, Homo sapiens
DIVMTQTPLSSPVTLGQPASISCRSSQSLVHSDGNTYLSWVQQRPGQPPRLLIYKISNRVSGVPDRFSGSGAGTDFTLKISRVEAEDVGVYYCMQVKEFPLTFGGGTRVEIK

SEQ ID NO: 5874 - protein, 100 aa, Homo sapiens
DIVMTQTPLSSPVTLGQPASISCRSSQSLVHSDGNTYLTWLQQRPGQPPRLLIYKISNRFSGVPDRFSGSGAGTDFTLKISRVETEDVGVYYCMQGTQFP

SEQ ID NO: 5875 - protein, 112 aa, Homo sapiens
DIVMTQTPLSSPVTLGQPASISCRSSQSLVHSDGNTYLTWLQQRPGQPPRLLIYKISNRFSGVPDRFSGSGAGTDFTLKISRVETEDVGVYYCMQGTQFPFTFGGGTKVEIK

SEQ ID NO: 5876 - protein, 100 aa, Homo sapiens
DIVMTQTPLSSPVTLGQPASISCRSSQSLVHSNGDTYLSWLQQRPGQPPRLLIYKISKRFSGVPDRFSGSGAGTDFTLKIGRVESEDVGVYYCMQTTQFP

SEQ ID NO: 5877 - protein, 112 aa, Homo sapiens
DIVMTQTPLSSPVTLGQPASISCRSSQSLVHSNGDTYLSWLQQRPGQPPRLLIYKISKRFSGVPDRFSGSGAGTDFTLKIGRVESEDVGVYYCMQTTQFPHTFGQGTKLEIK

SEQ ID NO: 5878 - protein, 100 aa, Homo sapiens
DIVMTQTSLSLSVTPGQPASISCKSSQSLLHSDGKTYLYWYLQKPGQPPQLLIYEVSNRFSGVPDRFSGSGSGTDFTLKISRVEAEDVGVYYCMQSIQLP

SEQ ID NO: 5879 - protein, 112 aa, Homo sapiens
DIVMTQTSLSLSVTPGQPASISCKSSQSLLHSDGKTYLYWYLQKPGQPPQLLIYEVSNRFSGVPDRFSGSGSGTDFTLKISRVEAEDVGVYYCMQSIQLPYTFGQGTKLEIK

SEQ ID NO: 5880 - protein, 99 aa, Homo sapiens
DIVMTQYPDSLAVSLGERATINCQSSQSVLYSSNNKNYLAWYQQKPGQPPKALIYWASTRESGVPDRFSGSGSGTDFTLTISSLQAEDAAIYYCQQYYS

SEQ ID NO: 5881 - protein, 112 aa, Homo sapiens
DIVMTQYPDSLAVSLGERATINCQSSQSVLYSSNNKNYLAWYQQKPGQPPKALIYWASTRESGVPDRFSGSGSGTDFTLTISSLQAEDAAIYYCQQYYSDTFTFGQGTKLEI

SEQ ID NO: 5882 - protein, 101 aa, Homo sapiens
DIVVTQSPDFLTVSLGERATINCWSSQSVFYRSNKKNYLAWYQQKPGQPPKLLISWASTRESGVPDRFSGSGSGTDFTLTINSLQAEDVAVYYCQQYYGNP

SEQ ID NO: 5883 - protein, 113 aa, Homo sapiens
DIVVTQSPDFLTVSLGERATINCWSSQSVFYRSNKKNYLAWYQQKPGQPPKLLISWASTRESGVPDRFSGSGSGTDFTLTINSLQAEDVAVYYCQQYYGNPQTFGQGTKVEIK

SEQ ID NO: 5884 - protein, 101 aa, Homo sapiens
DIVVTQSPDSLAVSLGERATINCKSSQSVLYDSNNKDYLAWYQQKPGQPPKLLIYWASTRESGVPDRFSASGSGTDFTLTISSLQAEDVAVYYCQQYYDTP

SEQ ID NO: 5885 - protein, 113 aa, Homo sapiens
DIVVTQSPDSLAVSLGERATINCKSSQSVLYDSNNKDYLAWYQQKPGQPPKLLIYWASTRESGVPDRFSASGSGTDFTLTISSLQAEDVAVYYCQQYYDTPITFGQGTRLEIK

SEQ ID NO: 5886 - protein, 101 aa, Homo sapiens
DIVVTQSPDSLAVSLGERATINCKSSQSVLYNSNNKDYLAWYQQKPGHPPKLLIYWASTRESGVPDRFSGSGSETDFSLTINSLQAEDVAVYFCQQYFGLP

SEQ ID NO: 5887 - protein, 113 aa, Homo sapiens
DIVVTQSPDSLAVSLGERATINCKSSQSVLYNSNNKDYLAWYQQKPGHPPKLLIYWASTRESGVPDRFSGSGSETDFSLTINSLQAEDVAVYFCQQYFGLPLTFGGGTKVEIK

SEQ ID NO: 5888 - protein, 99 aa, Homo sapiens
DIVVTQSPDSLAVSLGERATINCRSSQSVFYDSNKKNYLAWYQQRPGQPPKLLFYWASTRESGVPDRFSASGSGTNFNLIINGLQPEDVAVYFCQQYYG

SEQ ID NO: 5889 - protein, 113 aa, Homo sapiens
DIVVTQSPDSLAVSLGERATINCRSSQSVFYDSNKKNYLAWYQQRPGQPPKLLFYWASTRESGVPDRFSASGSGTNFNLIINGLQPEDVAVYFCQQYYGLPLTFGGGTVVEIK

SEQ ID NO: 5890 - protein, 101 aa, Homo sapiens
DIVVTQSPDSLAVSLGERATLNCKTSQSVLYPGNNENSLAWIQQKPGQPPKVLIYWASTRESGVPDRFGGSGSGTDFTLTISSLQAEDVAVYYCHQYYSSP

SEQ ID NO: 5891 - protein, 113 aa, Homo sapiens
DIVVTQSPDSLAVSLGERATLNCKTSQSVLYPGNNENSLAWIQQKPGQPPKVLIYWASTRESGVPDRFGGSGSGTDFTLTISSLQAEDVAVYYCHQYYSSPWTFGQGTKVEIK

SEQ ID NO: 5892 - protein, 15 aa, Homo sapiens
DIWAAGGGYFYYMDV

SEQ ID NO: 5893 - protein, 17 aa, Homo sapiens
DIWFDRNDKNYADSVKG

SEQ ID NO: 5894 - protein, 18 aa, Homo sapiens
DKDFWRGIRGDYYYYMDV

SEQ ID NO: 5895 - protein, 8 aa, Homo sapiens
DKDWSFDS

SEQ ID NO: 5896 - protein, 21 aa, Homo sapiens
DKGYWYYYDSSGYSYHGAFDI

SEQ ID NO: 5897 - protein, 13 aa, Homo sapiens
DKPIELVIHALDH

SEQ ID NO: 5898 - protein, 16 aa, Homo sapiens
DKSREQWVIRPDAFDI

SEQ ID NO: 5899 - protein, 14 aa, Homo sapiens
DKSTWAVVADDLDY

SEQ ID NO: 5900 - protein, 14 aa, Homo sapiens
DKTHSSSWYGAFDY

SEQ ID NO: 5901 - protein, 5 aa, Homo sapiens
DLAIH

SEQ ID NO: 5902 - protein, 14 aa, Homo sapiens
DLAVTPPAQGYLDR

SEQ ID NO: 5903 - protein, 19 aa, Homo sapiens
DLAWSESVGAAEGLYYFGH

SEQ ID NO: 5904 - protein, 16 aa, Homo sapiens
DLAYDNVMAVAGVIAS

SEQ ID NO: 5905 - protein, 15 aa, Homo sapiens
DLEDTAILHYFGMDV

SEQ ID NO: 5906 - protein, 16 aa, Homo sapiens
DLEFDNVMVVAGLIGY

SEQ ID NO: 5907 - protein, 16 aa, Homo sapiens
DLEFDNVVAVAGLIGY

SEQ ID NO: 5908 - protein, 14 aa, Homo sapiens
DLEIAVWGSGYFDY

SEQ ID NO: 5909 - protein, 13 aa, Homo sapiens
DLEVVEVTSLLGY

SEQ ID NO: 5910 - protein, 14 aa, Homo sapiens
DLFDYYGSGGRFDP

SEQ ID NO: 5911 - protein, 13 aa, Homo sapiens
DLGDYYASGSFDF

SEQ ID NO: 5912 - protein, 20 aa, Homo sapiens
DLGGPNYYDSSGYLSYYFDY

SEQ ID NO: 5913 - protein, 16 aa, Homo sapiens
DLGGYFAFNHYYYMDL

SEQ ID NO: 5914 - protein, 13 aa, Homo sapiens
DLGGYFLRYYFDY

SEQ ID NO: 5915 - protein, 11 aa, Homo sapiens
DLGILAAGTDY

SEQ ID NO: 5916 - protein, 13 aa, Homo sapiens
DLGIVGANPTFDY

SEQ ID NO: 5917 - protein, 14 aa, Homo sapiens
DLGIYYTSRTGDDY

SEQ ID NO: 5918 - protein, 11 aa, Homo sapiens
DLGNWKYYFDY

SEQ ID NO: 5919 - protein, 10 aa, Homo sapiens
DLGNYGDIDY

SEQ ID NO: 5920 - protein, 14 aa, Homo sapiens
DLGYRPFDWGYFDS

SEQ ID NO: 5921 - protein, 16 aa, Homo sapiens
DLGYSYGYYYYYGMDV

SEQ ID NO: 5922 - protein, 12 aa, Homo sapiens
DLGYYYGSGSLY

SEQ ID NO: 5923 - protein, 16 aa, Homo sapiens
DLIKGNKPWQLGSFDV

SEQ ID NO: 5924 - protein, 16 aa, Homo sapiens
DLITPLDYSNPAGVDY

SEQ ID NO: 5925 - protein, 18 aa, Homo sapiens
DLLWSGDKTKNTQDWFDS

SEQ ID NO: 5926 - protein, 14 aa, Homo sapiens
DLMVSIPLTGSLDY

SEQ ID NO: 5927 - protein, 18 aa, Homo sapiens
DLNRCSGGSCYYYYGMDV

SEQ ID NO: 5928 - protein, 14 aa, Homo sapiens
DLNRGIPTAGYLDS

SEQ ID NO: 5929 - protein, 17 aa, Homo sapiens
DLNWGSGANDPTHYFDY

SEQ ID NO: 5930 - protein, 19 aa, Homo sapiens
DLPWGNCGGICSTLYYFES

SEQ ID NO: 5931 - protein, 15 aa, Homo sapiens
DLQQWLVRDHVAFDI

SEQ ID NO: 5932 - protein, 21 aa, Homo sapiens
DLQRHRLKYFDWQKYHYGMDV

SEQ ID NO: 5933 - protein, 21 aa, Homo sapiens
DLQSHRLKYFDWQRYHYGMDV

SEQ ID NO: 5934 - protein, 14 aa, Homo sapiens
DLRDWVAVAGYLDF

SEQ ID NO: 5935 - protein, 14 aa, Homo sapiens
DLRELPPPAGAFDL

SEQ ID NO: 5936 - protein, 10 aa, Homo sapiens
DLRGARAFDI

SEQ ID NO: 5937 - protein, 22 aa, Homo sapiens
DLRGGSREYYYDSSGYYWWFDP

SEQ ID NO: 5938 - protein, 14 aa, Homo sapiens
DLRWLPPEWGYFDY

SEQ ID NO: 5939 - protein, 14 aa, Homo sapiens
DLSFAIWFGDHRDY

SEQ ID NO: 5940 - protein, 21 aa, Homo sapiens
DLSGIFYDSSGLHQQSNAFDI

SEQ ID NO: 5941 - protein, 21 aa, Homo sapiens
DLSGIYYDSSGLHQQSNAFDI

SEQ ID NO: 5942 - protein, 16 aa, Homo sapiens
DLSLGRLLRSTDGLDV

SEQ ID NO: 5943 - protein, 14 aa, Homo sapiens
DLSRHIPTSGAFDV

SEQ ID NO: 5944 - protein, 14 aa, Homo sapiens
DLSRQQWDSGYFDY

SEQ ID NO: 5945 - protein, 14 aa, Homo sapiens
DLSTMIPFGGVSSS

SEQ ID NO: 5946 - protein, 14 aa, Homo sapiens
DLTSMVRGASYLDC

SEQ ID NO: 5947 - protein, 14 aa, Homo sapiens
DLTSVTPMNGYLHQ

SEQ ID NO: 5948 - protein, 12 aa, Homo sapiens
DLVGWDLVNQDN

SEQ ID NO: 5949 - protein, 16 aa, Homo sapiens
DLVKRYSSVYEAGTDY

SEQ ID NO: 5950 - protein, 15 aa, Homo sapiens
DLVPSAPYAEGAFDI

SEQ ID NO: 5951 - protein, 12 aa, Homo sapiens
DLVRGVNPHIDY

SEQ ID NO: 5952 - protein, 14 aa, Homo sapiens
DLVRPVPGTGYFES

SEQ ID NO: 5953 - protein, 17 aa, Homo sapiens
DLVWGDSPAIPSKWIDP

SEQ ID NO: 5954 - protein, 12 aa, Homo sapiens
DLWDYEGEADDY

SEQ ID NO: 5955 - protein, 9 aa, Homo sapiens
DLWGIVVPN

SEQ ID NO: 5956 - protein, 15 aa, Homo sapiens
DLWGYGSGDPDALDM

SEQ ID NO: 5957 - protein, 21 aa, Homo sapiens
DLYDYSGTPFTAQGRNEAFDI

SEQ ID NO: 5958 - protein, 5 aa, Homo sapiens
DLYMH

SEQ ID NO: 5959 - protein, 14 aa, Homo sapiens
DLYTSIPGAGRMGY

SEQ ID NO: 5960 - protein, 9 aa, Homo sapiens
DMAVGASDI

SEQ ID NO: 5961 - protein, 16 aa, Homo sapiens
DMEGGRYHSLLYAIDV

SEQ ID NO: 5962 - protein, 15 aa, Homo sapiens
DMGDGTIPTYWYFDL

SEQ ID NO: 5963 - protein, 14 aa, Homo sapiens
DMLVAAAGTAGFEY

SEQ ID NO: 5964 - protein, 16 aa, Homo sapiens
DMNGDGYNTLHNAFDI

SEQ ID NO: 5965 - protein, 13 aa, Homo sapiens
DMRSGSDFPLFDF

SEQ ID NO: 5966 - protein, 11 aa, Homo sapiens
DMSFEYYAMDV

SEQ ID NO: 5967 - protein, 14 aa, Homo sapiens
DMTSMVRRASYLDC

SEQ ID NO: 5968 - protein, 7 aa, Homo sapiens
DNDKRPS

SEQ ID NO: 5969 - protein, 9 aa, Homo sapiens
DNEEWAFDY

SEQ ID NO: 5970 - protein, 14 aa, Homo sapiens
DNGFMSSWYIGSDY

SEQ ID NO: 5971 - protein, 14 aa, Homo sapiens
DNGFMSTWYIGSDH

SEQ ID NO: 5972 - protein, 14 aa, Homo sapiens
DNGYMSTWYIGSDH

SEQ ID NO: 5973 - protein, 14 aa, Homo sapiens
DNIPRIPGAGAMDV

SEQ ID NO: 5974 - protein, 18 aa, Homo sapiens
DNMARAIRSYYYSYHVDV

SEQ ID NO: 5975 - protein, 14 aa, Homo sapiens
DNMVATLNDKPFDV

SEQ ID NO: 5976 - protein, 7 aa, Homo sapiens
DNNDRPS

SEQ ID NO: 5977 - protein, 7 aa, Homo sapiens
DNNKRPS

SEQ ID NO: 5978 - protein, 17 aa, Homo sapiens
DNNLYYDGNTYYWGFDQ

SEQ ID NO: 5979 - protein, 17 aa, Homo sapiens
DNQIGRFYDSTSGAFEI

SEQ ID NO: 5980 - protein, 95 aa, Homo sapiens
DNQLTQSPSTLSASVGDRVTITCRASQSIGGWLAWYQQKPGKAPKVLIYKVSTLESGVPSRFSGSGSGTEFTLTISSLQPDDFATYYCQRYNSYS

SEQ ID NO: 5981 - protein, 108 aa, Homo sapiens
DNQLTQSPSTLSASVGDRVTITCRASQSIGGWLAWYQQKPGKAPKVLIYKVSTLESGVPSRFSGSGSGTEFTLTISSLQPDDFATYYCQRYNSYSLFTFGPGTKVDIK

SEQ ID NO: 5982 - protein, 95 aa, Homo sapiens
DNQVTQSPSFLSASVGDRVTITCWASQDISSDLAWYHQKPGKAPKLLIYAASTLQSGVPSRFSGSGSGTEFTLTISSLQPEDFATYYCQQLKSYP

SEQ ID NO: 5983 - protein, 107 aa, Homo sapiens
DNQVTQSPSFLSASVGDRVTITCWASQDISSDLAWYHQKPGKAPKLLIYAASTLQSGVPSRFSGSGSGTEFTLTISSLQPEDFATYYCQQLKSYPVTFGGGTKVGIK

SEQ ID NO: 5984 - protein, 7 aa, Homo sapiens
DNRDRPS

SEQ ID NO: 5985 - protein, 7 aa, Homo sapiens
DNSDRPS

SEQ ID NO: 5986 - protein, 15 aa, Homo sapiens
DNSGGYGPWGGYFDY

SEQ ID NO: 5987 - protein, 7 aa, Homo sapiens
DNSHRPS

SEQ ID NO: 5988 - protein, 7 aa, Homo sapiens
DNSKRPS

SEQ ID NO: 5989 - protein, 7 aa, Homo sapiens
DNTERPS

SEQ ID NO: 5990 - protein, 13 aa, Homo sapiens
DNTGSSEKNAFDI

SEQ ID NO: 5991 - protein, 7 aa, Homo sapiens
DNTKRPS

SEQ ID NO: 5992 - protein, 11 aa, Homo sapiens
DNWNDAVDRDY

SEQ ID NO: 5993 - protein, 11 aa, Homo sapiens
DNWSSFDGFNI

SEQ ID NO: 5994 - protein, 10 aa, Homo sapiens
DNWYDGDLDY

SEQ ID NO: 5995 - protein, 13 aa, Homo sapiens
DNYGSRSPNAFDF

SEQ ID NO: 5996 - protein, 5 aa, Homo sapiens
DNYIH

SEQ ID NO: 5997 - protein, 5 aa, Homo sapiens
DNYMS

SEQ ID NO: 5998 - protein, 18 aa, Homo sapiens
DPAHDSTGSYTWVGAFDI

SEQ ID NO: 5999 - protein, 15 aa, Homo sapiens
DPCGSGGDCYYQFDY

SEQ ID NO: 6000 - protein, 18 aa, Homo sapiens
DPDFGLVRGPWDYYGLDV

SEQ ID NO: 6001 - protein, 18 aa, Homo sapiens
DPDFGLVRGPWEYYGLDV

SEQ ID NO: 6002 - protein, 18 aa, Homo sapiens
DPDFSLVRGPWDFYGVDV

SEQ ID NO: 6003 - protein, 18 aa, Homo sapiens
DPDFSLVRGPWDYYGVDV

SEQ ID NO: 6004 - protein, 18 aa, Homo sapiens
DPDFSLVRGPWDYYNVDV

SEQ ID NO: 6005 - protein, 18 aa, Homo sapiens
DPDFSTVRGPWDFYGVDV

SEQ ID NO: 6006 - protein, 19 aa, Homo sapiens
DPDLDYDVEAGYLGTYFDS

SEQ ID NO: 6007 - protein, 19 aa, Homo sapiens
DPDLDYDVETGYLGTYFDS

SEQ ID NO: 6008 - protein, 16 aa, Homo sapiens
DPEAYCGGDCSDAFDI

SEQ ID NO: 6009 - protein, 11 aa, Homo sapiens
DPEMATIGIDY

SEQ ID NO: 6010 - protein, 11 aa, Homo sapiens
DPEYSAYEDVY

SEQ ID NO: 6011 - protein, 11 aa, Homo sapiens
DPGDGFNYPNY

SEQ ID NO: 6012 - protein, 15 aa, Homo sapiens
DPGFGGAAGNNWFDP

SEQ ID NO: 6013 - protein, 19 aa, Homo sapiens
DPGFHVLLKAYAIRAAFDI

SEQ ID NO: 6014 - protein, 11 aa, Homo sapiens
DPGIRVAGIDL

SEQ ID NO: 6015 - protein, 16 aa, Homo sapiens
DPGRVLGQFGSSAFDM

SEQ ID NO: 6016 - protein, 15 aa, Homo sapiens
DPGYSGYPPENYFDP

SEQ ID NO: 6017 - protein, 14 aa, Homo sapiens
DPGYVFRPLSHFDY

SEQ ID NO: 6018 - protein, 15 aa, Homo sapiens
DPILILRGGVIGHDY

SEQ ID NO: 6019 - protein, 18 aa, Homo sapiens
DPIPFYGSGTHYYYGMDV

SEQ ID NO: 6020 - protein, 13 aa, Homo sapiens
DPKLRLGELSSDY

SEQ ID NO: 6021 - protein, 21 aa, Homo sapiens
DPKPYDGNPLTALSFYHYMDV

SEQ ID NO: 6022 - protein, 18 aa, Homo sapiens
DPLFLRFFDWPAQGYFDY

SEQ ID NO: 6023 - protein, 16 aa, Homo sapiens
DPLGGYCSGDNCRGDY

SEQ ID NO: 6024 - protein, 13 aa, Homo sapiens
DPLGKYSDGSIDY

SEQ ID NO: 6025 - protein, 15 aa, Homo sapiens
DPLGSGSNYYYYMDV

SEQ ID NO: 6026 - protein, 18 aa, Homo sapiens
DPPHNRITMVRGPKKYDY

SEQ ID NO: 6027 - protein, 22 aa, Homo sapiens
DPPPYKCDRSGSSLQYCYGMDV

SEQ ID NO: 6028 - protein, 14 aa, Homo sapiens
DPPSTSSLDTWFDP

SEQ ID NO: 6029 - protein, 16 aa, Homo sapiens
DPPYQLHGDYYYYMDV

SEQ ID NO: 6030 - protein, 18 aa, Homo sapiens
DPQIKYGLPVYYYYGMDV

SEQ ID NO: 6031 - protein, 12 aa, Homo sapiens
DPRDSEYAIFDY

SEQ ID NO: 6032 - protein, 15 aa, Homo sapiens
DPRPTYDAGWHIFAS

SEQ ID NO: 6033 - protein, 10 aa, Homo sapiens
DPRSSDAFDI

SEQ ID NO: 6034 - protein, 20 aa, Homo sapiens
DPRTGHCDKTDCSVAYWFDP

SEQ ID NO: 6035 - protein, 18 aa, Homo sapiens
DPSAEGLPLGDFSSTFDY

SEQ ID NO: 6036 - protein, 16 aa, Homo sapiens
DPSALAAAGTEGWFDP

SEQ ID NO: 6037 - protein, 18 aa, Homo sapiens
DPSDYGGDLYNSYYYLDV

SEQ ID NO: 6038 - protein, 12 aa, Homo sapiens
DPSGWYINYLDF

SEQ ID NO: 6039 - protein, 13 aa, Homo sapiens
DPSNPPHWGNFDS

SEQ ID NO: 6040 - protein, 18 aa, Homo sapiens
DPWEETNHDSAGYGAFDM

SEQ ID NO: 6041 - protein, 18 aa, Homo sapiens
DPYCGGDCPGGSFGAFDI

SEQ ID NO: 6042 - protein, 14 aa, Homo sapiens
DPYNRNDGGFGMDV

SEQ ID NO: 6043 - protein, 12 aa, Homo sapiens
DPYSDIYGAFDI

SEQ ID NO: 6044 - protein, 11 aa, Homo sapiens
DQAETQFYFDL

SEQ ID NO: 6045 - protein, 5 aa, Homo sapiens
DQAIN

SEQ ID NO: 6046 - protein, 11 aa, Homo sapiens
DQDTAMGTFDY

SEQ ID NO: 6047 - protein, 16 aa, Homo sapiens
DQELGGSGSHDDAFDI

SEQ ID NO: 6048 - protein, 13 aa, Homo sapiens
DQFRQVVFLGLDY

SEQ ID NO: 6049 - protein, 8 aa, Homo sapiens
DQGGTDDY

SEQ ID NO: 6050 - protein, 10 aa, Homo sapiens
DQGRNGFIDS

SEQ ID NO: 6051 - protein, 14 aa, Homo sapiens
DQGVVVPTAIPLFY

SEQ ID NO: 6052 - protein, 15 aa, Homo sapiens
DQIDLSGYSSNFFDP

SEQ ID NO: 6053 - protein, 12 aa, Homo sapiens
DQILEQLNAFDI

SEQ ID NO: 6054 - protein, 17 aa, Homo sapiens
DQKIYCSSDTCYWAFDD

SEQ ID NO: 6055 - protein, 14 aa, Homo sapiens
DQLLLWFGELLLSY

SEQ ID NO: 6056 - protein, 7 aa, Homo sapiens
DQMAWDY

SEQ ID NO: 6057 - protein, 10 aa, Homo sapiens
DQRATFGASD

SEQ ID NO: 6058 - protein, 10 aa, Homo sapiens
DQRATYGASD

SEQ ID NO: 6059 - protein, 12 aa, Homo sapiens
DQSGGGSWYFDL

SEQ ID NO: 6060 - protein, 14 aa, Homo sapiens
DQSTFIPVTGTLDY

SEQ ID NO: 6061 - protein, 12 aa, Homo sapiens
DQTGLGYSYVDF

SEQ ID NO: 6062 - protein, 18 aa, Homo sapiens
DQTRIQQWLPNWYYAMDV

SEQ ID NO: 6063 - protein, 17 aa, Homo sapiens
DQVRGPTNPTYYGTFQH

SEQ ID NO: 6064 - protein, 17 aa, Homo sapiens
DQVYSSYTWLVGYWFDP

SEQ ID NO: 6065 - protein, 15 aa, Homo sapiens
DQYFWSGHYQYPTDY

SEQ ID NO: 6066 - protein, 12 aa, Homo sapiens
DQYYDGSGYFES

SEQ ID NO: 6067 - protein, 12 aa, Homo sapiens
DQYYYDSGTYVG

SEQ ID NO: 6068 - protein, 14 aa, Homo sapiens
DRALTIPDSGTFDT

SEQ ID NO: 6069 - protein, 14 aa, Homo sapiens
DRASYPLVPEYFQY

SEQ ID NO: 6070 - protein, 14 aa, Homo sapiens
DRAVSPAMGGYFHD

SEQ ID NO: 6071 - protein, 14 aa, Homo sapiens
DRAVVVPDRGSMDV

SEQ ID NO: 6072 - protein, 12 aa, Homo sapiens
DRDDGGWYLGAY

SEQ ID NO: 6073 - protein, 12 aa, Homo sapiens
DRDDYGGADLLY

SEQ ID NO: 6074 - protein, 12 aa, Homo sapiens
DRDDYGGSDLVY

SEQ ID NO: 6075 - protein, 12 aa, Homo sapiens
DRDNSGWYLGDS

SEQ ID NO: 6076 - protein, 12 aa, Homo sapiens
DRDNTGWYLGDN

SEQ ID NO: 6077 - protein, 12 aa, Homo sapiens
DRDNTGWYLGDY

SEQ ID NO: 6078 - protein, 14 aa, Homo sapiens
DRDSGSYLKGLLRY

SEQ ID NO: 6079 - protein, 16 aa, Homo sapiens
DRDVVVSSAHYDAFDI

SEQ ID NO: 6080 - protein, 12 aa, Homo sapiens
DRDYYDSSGYLF

SEQ ID NO: 6081 - protein, 15 aa, Homo sapiens
DRERIQLWFRGAFDL

SEQ ID NO: 6082 - protein, 15 aa, Homo sapiens
DRGDYSPYYYYGMDV

SEQ ID NO: 6083 - protein, 14 aa, Homo sapiens
DRGGGYNTYGLLDY

SEQ ID NO: 6084 - protein, 15 aa, Homo sapiens
DRGGKYPPSMGFFDP

SEQ ID NO: 6085 - protein, 16 aa, Homo sapiens
DRGGTYYDGGDDAFDI

SEQ ID NO: 6086 - protein, 14 aa, Homo sapiens
DRGQMPYSSGSFDY

SEQ ID NO: 6087 - protein, 14 aa, Homo sapiens
DRGTYVPSSGTFDS

SEQ ID NO: 6088 - protein, 14 aa, Homo sapiens
DRGVSPAMGGYFQD

SEQ ID NO: 6089 - protein, 13 aa, Homo sapiens
DRGYYIRGNWFDP

SEQ ID NO: 6090 - protein, 13 aa, Homo sapiens
DRGYYVRGNWFDP

SEQ ID NO: 6091 - protein, 13 aa, Homo sapiens
DRHSYGYLYGMDV

SEQ ID NO: 6092 - protein, 16 aa, Homo sapiens
DRIRGNNPPHSGTLHY

SEQ ID NO: 6093 - protein, 13 aa, Homo sapiens
DRIRIALAGTGPY

SEQ ID NO: 6094 - protein, 13 aa, Homo sapiens
DRITGNGDGIFDS

SEQ ID NO: 6095 - protein, 17 aa, Homo sapiens
DRLGRRDSGTYYRCLDL

SEQ ID NO: 6096 - protein, 13 aa, Homo sapiens
DRLGWLQPPLFDH

SEQ ID NO: 6097 - protein, 12 aa, Homo sapiens
DRLPDGRWDIDY

SEQ ID NO: 6098 - protein, 13 aa, Homo sapiens
DRLRIVLAGTGPH

SEQ ID NO: 6099 - protein, 14 aa, Homo sapiens
DRPPRVVLIGVLGS

SEQ ID NO: 6100 - protein, 14 aa, Homo sapiens
DRPRVGATREPFDY

SEQ ID NO: 6101 - protein, 13 aa, Homo sapiens
DRPSVLLGGGFDP

SEQ ID NO: 6102 - protein, 18 aa, Homo sapiens
DRPYYYDSSGYEDDAFDI

SEQ ID NO: 6103 - protein, 15 aa, Homo sapiens
DRQIYYGPPRYYFDY

SEQ ID NO: 6104 - protein, 14 aa, Homo sapiens
DRQRTIPGAGSFDS

SEQ ID NO: 6105 - protein, 13 aa, Homo sapiens
DRRDILTGYTADY

SEQ ID NO: 6106 - protein, 13 aa, Homo sapiens
DRREATDYYSYDS

SEQ ID NO: 6107 - protein, 13 aa, Homo sapiens
DRREGSDYYSYDY

SEQ ID NO: 6108 - protein, 13 aa, Homo sapiens
DRRHILSGLDPDY

SEQ ID NO: 6109 - protein, 14 aa, Homo sapiens
DRRIAAAHPEYFQH

SEQ ID NO: 6110 - protein, 17 aa, Homo sapiens
DRRIGSWPDYYYYGMDV

SEQ ID NO: 6111 - protein, 12 aa, Homo sapiens
DRRIVATYHFDS

SEQ ID NO: 6112 - protein, 15 aa, Homo sapiens
DRRLFEGLGHYYLDV

SEQ ID NO: 6113 - protein, 13 aa, Homo sapiens
DRRNYDILTGYLY

SEQ ID NO: 6114 - protein, 18 aa, Homo sapiens
DRRSSGWYDGAYNYYMDV

SEQ ID NO: 6115 - protein, 12 aa, Homo sapiens
DRRYSYGPKFDD

SEQ ID NO: 6116 - protein, 14 aa, Homo sapiens
DRSFSEKDTWAFDI

SEQ ID NO: 6117 - protein, 13 aa, Homo sapiens
DRSGSYYPTFFDY

SEQ ID NO: 6118 - protein, 14 aa, Homo sapiens
DRSLTIPDSGTFDS

SEQ ID NO: 6119 - protein, 14 aa, Homo sapiens
DRSNYVVYYGYFDS

SEQ ID NO: 6120 - protein, 16 aa, Homo sapiens
DRSPGSLGYYYYGMDV

SEQ ID NO: 6121 - protein, 13 aa, Homo sapiens
DRSRRPPWYGFDY

SEQ ID NO: 6122 - protein, 17 aa, Homo sapiens
DRTGLYGSGSPGYWFDP

SEQ ID NO: 6123 - protein, 12 aa, Homo sapiens
DRTGPGYSYVDF

SEQ ID NO: 6124 - protein, 13 aa, Homo sapiens
DRTGPSDYNAFDI

SEQ ID NO: 6125 - protein, 14 aa, Homo sapiens
DRTGYVPVTGLFDS

SEQ ID NO: 6126 - protein, 13 aa, Homo sapiens
DRTVPALGGWFEH

SEQ ID NO: 6127 - protein, 14 aa, Homo sapiens
DRVIPVPGTGHFDF

SEQ ID NO: 6128 - protein, 14 aa, Homo sapiens
DRVIQVWATGTFDF

SEQ ID NO: 6129 - protein, 16 aa, Homo sapiens
DRVKAAGILAFYYFDL

SEQ ID NO: 6130 - protein, 17 aa, Homo sapiens
DRVQGQVWFGSDGRMDY

SEQ ID NO: 6131 - protein, 16 aa, Homo sapiens
DRVRGNNPPALGTLGS

SEQ ID NO: 6132 - protein, 16 aa, Homo sapiens
DRVRGNNPPHLGSLDS

SEQ ID NO: 6133 - protein, 16 aa, Homo sapiens
DRVRGVNPPHLGSLGD

SEQ ID NO: 6134 - protein, 16 aa, Homo sapiens
DRVRGVNPPHLGSLGS

SEQ ID NO: 6135 - protein, 16 aa, Homo sapiens
DRVRGVNPPLLGTLGS

SEQ ID NO: 6136 - protein, 9 aa, Homo sapiens
DRVTGLFDY

SEQ ID NO: 6137 - protein, 19 aa, Homo sapiens
DRVTRLLRYFDYIGDAFDM

SEQ ID NO: 6138 - protein, 13 aa, Homo sapiens
DRVTTVFGVGIDS

SEQ ID NO: 6139 - protein, 16 aa, Homo sapiens
DRVTYNKVVVQGTFDV

SEQ ID NO: 6140 - protein, 21 aa, Homo sapiens
DRVVGLAAAGDPFGRADAFDF

SEQ ID NO: 6141 - protein, 14 aa, Homo sapiens
DRVVGRPWEYSLDF

SEQ ID NO: 6142 - protein, 14 aa, Homo sapiens
DRVVPTALHGYLDS

SEQ ID NO: 6143 - protein, 14 aa, Homo sapiens
DRWAGNSPGPTMDV

SEQ ID NO: 6144 - protein, 7 aa, Homo sapiens
DRYWSGV

SEQ ID NO: 6145 - protein, 5 aa, Homo sapiens
DSAIH

SEQ ID NO: 6146 - protein, 5 aa, Homo sapiens
DSAMS

SEQ ID NO: 6147 - protein, 14 aa, Homo sapiens
DSEFVPAGRGFMDV

SEQ ID NO: 6148 - protein, 11 aa, Homo sapiens
DSEYSAKESAY

SEQ ID NO: 6149 - protein, 10 aa, Homo sapiens
DSFLAAPENY

SEQ ID NO: 6150 - protein, 5 aa, Homo sapiens
DSFLH

SEQ ID NO: 6151 - protein, 19 aa, Homo sapiens
DSGCISKWNVNGCDYGMDV

SEQ ID NO: 6152 - protein, 19 aa, Homo sapiens
DSGCISKWNVNGCDYGMDV

SEQ ID NO: 6153 - protein, 19 aa, Homo sapiens
DSGDYYFNKENLPYNWFDP

SEQ ID NO: 6154 - protein, 10 aa, Homo sapiens
DSGGGAYFDY

SEQ ID NO: 6155 - protein, 16 aa, Homo sapiens
DSGGGYSFGQTNWFDP

SEQ ID NO: 6156 - protein, 5 aa, Homo sapiens
DSGIH

SEQ ID NO: 6157 - protein, 9 aa, Homo sapiens
DSGWNPPDF

SEQ ID NO: 6158 - protein, 19 aa, Homo sapiens
DSGYAPLFVPSNFYYGMDV

SEQ ID NO: 6159 - protein, 12 aa, Homo sapiens
DSGYTYGGRLDP

SEQ ID NO: 6160 - protein, 16 aa, Homo sapiens
DSHTVTTYRLGGSFDY

SEQ ID NO: 6161 - protein, 12 aa, Homo sapiens
DSHYDNSGYFLG

SEQ ID NO: 6162 - protein, 12 aa, Homo sapiens
DSHYYGSGKYIE

SEQ ID NO: 6163 - protein, 8 aa, Homo sapiens
DSKGSYDY

SEQ ID NO: 6164 - protein, 18 aa, Homo sapiens
DSLFDFWSGQPGGVSFDY

SEQ ID NO: 6165 - protein, 15 aa, Homo sapiens
DSLMFDSSAYYGIDY

SEQ ID NO: 6166 - protein, 12 aa, Homo sapiens
DSLNYDNRYFDL

SEQ ID NO: 6167 - protein, 17 aa, Homo sapiens
DSLSVHDYGDYVSYFDY

SEQ ID NO: 6168 - protein, 5 aa, Homo sapiens
DSNMN

SEQ ID NO: 6169 - protein, 16 aa, Homo sapiens
DSNYGSGNTNLWAFDM

SEQ ID NO: 6170 - protein, 14 aa, Homo sapiens
DSPNYYGSNNWFDP

SEQ ID NO: 6171 - protein, 22 aa, Homo sapiens
DSQFWASSGWYHPKPYYYGMDV

SEQ ID NO: 6172 - protein, 15 aa, Homo sapiens
DSRPYGGNSPSHFDY

SEQ ID NO: 6173 - protein, 15 aa, Homo sapiens
DSRPYYPPSGGTFDS

SEQ ID NO: 6174 - protein, 13 aa, Homo sapiens
DSRRWLQSAAFDY

SEQ ID NO: 6175 - protein, 14 aa, Homo sapiens
DSRSWIAVAGSFDS

SEQ ID NO: 6176 - protein, 7 aa, Homo sapiens
DSSNRAT

SEQ ID NO: 6177 - protein, 14 aa, Homo sapiens
DSSNYPPRTGYFDL

SEQ ID NO: 6178 - protein, 14 aa, Homo sapiens
DSSSWFGPGFLFDY

SEQ ID NO: 6179 - protein, 9 aa, Homo sapiens
DSSSYGMDV

SEQ ID NO: 6180 - protein, 14 aa, Homo sapiens
DSSTGVVTSYHYPY

SEQ ID NO: 6181 - protein, 9 aa, Homo sapiens
DSSWNPPDY

SEQ ID NO: 6182 - protein, 13 aa, Homo sapiens
DSTGHQLKNAFDI

SEQ ID NO: 6183 - protein, 13 aa, Homo sapiens
DSTGSQAKNAFDI

SEQ ID NO: 6184 - protein, 5 aa, Homo sapiens
DSWMS

SEQ ID NO: 6185 - protein, 20 aa, Homo sapiens
DSYDFWSGYYLTYYYYYMDV

SEQ ID NO: 6186 - protein, 5 aa, Homo sapiens
DSYMH

SEQ ID NO: 6187 - protein, 5 aa, Homo sapiens
DSYMS

SEQ ID NO: 6188 - protein, 5 aa, Homo sapiens
DSYWS

SEQ ID NO: 6189 - protein, 21 aa, Homo sapiens
DTAGCSGGSCYPYDYYYGMDV

SEQ ID NO: 6190 - protein, 16 aa, Homo sapiens
DTFGQLYPPVQWPSDY

SEQ ID NO: 6191 - protein, 5 aa, Homo sapiens
DTFLH

SEQ ID NO: 6192 - protein, 9 aa, Homo sapiens
DTGDGWLVH

SEQ ID NO: 6193 - protein, 16 aa, Homo sapiens
DTGGYSGYVPPNWFDP

SEQ ID NO: 6194 - protein, 13 aa, Homo sapiens
DTGSSWYGQGTDY

SEQ ID NO: 6195 - protein, 100 aa, Homo sapiens
DTILTQTPLSLSVTPGQTTSISCKSSQSLLHTDGKTYLYWYLQRPGQSPRLLMSEVSGRFSGVPDRFSGSGSGTDFTLKISRVEAEDVGVYYCMQGLHLP

SEQ ID NO: 6196 - protein, 112 aa, Homo sapiens
DTILTQTPLSLSVTPGQTTSISCKSSQSLLHTDGKTYLYWYLQRPGQSPRLLMSEVSGRFSGVPDRFSGSGSGTDFTLKISRVEAEDVGVYYCMQGLHLPFTFGPGTKVDIK

SEQ ID NO: 6197 - protein, 9 aa, Homo sapiens
DTLRILQGS

SEQ ID NO: 6198 - protein, 17 aa, Homo sapiens
DTMGDYGGLLRLGAFDI

SEQ ID NO: 6199 - protein, 7 aa, Homo sapiens
DTNIKHS

SEQ ID NO: 6200 - protein, 14 aa, Homo sapiens
DTPFLSRTAEYFRH

SEQ ID NO: 6201 - protein, 96 aa, Homo sapiens
DTQMTQFPSSLSASVGDRVTITCQASQDIKNHLSWYQKKPGRAPKLLIYDASNLEGGVPSRFRGGGSGTDFTFTISSLQPEDVATYYCQQYDDLPP

SEQ ID NO: 6202 - protein, 108 aa, Homo sapiens
DTQMTQFPSSLSASVGDRVTITCQASQDIKNHLSWYQKKPGRAPKLLIYDASNLEGGVPSRFRGGGSGTDFTFTISSLQPEDVATYYCQQYDDLPPWTFGQGTKVEIK

SEQ ID NO: 6203 - protein, 96 aa, Homo sapiens
DTQMTQSPSSLSASVGDRVTITCQASHDIRNHLSWYQKKPAKAPKLLIYDATNLEPGVPSRFRGSGSGTDFIFTISSLQPEDIATYYCQHYDDVPP

SEQ ID NO: 6204 - protein, 107 aa, Homo sapiens
DTQMTQSPSSLSASVGDRVTITCQASHDIRNHLSWYQKKPAKAPKLLIYDATNLEPGVPSRFRGSGSGTDFIFTISSLQPEDIATYYCQHYDDVPPWTFGQGTKVEI

SEQ ID NO: 6205 - protein, 96 aa, Homo sapiens
DTQMTQSPSSLSASVGDRVTITCRASQGIRNDLGWYQQKPGQAPKRLIYAASNLQSGVPSRFSGSGSGTEFTLTISSLQPEDFATYYCLQHNSYPP

SEQ ID NO: 6206 - protein, 107 aa, Homo sapiens
DTQMTQSPSSLSASVGDRVTITCRASQGIRNDLGWYQQKPGQAPKRLIYAASNLQSGVPSRFSGSGSGTEFTLTISSLQPEDFATYYCLQHNSYPPTFGQGTKVEIK

SEQ ID NO: 6207 - protein, 7 aa, Homo sapiens
DTRKKHS

SEQ ID NO: 6208 - protein, 7 aa, Homo sapiens
DTRNTHS

SEQ ID NO: 6209 - protein, 13 aa, Homo sapiens
DTSFSITMVGFDY

SEQ ID NO: 6210 - protein, 14 aa, Homo sapiens
DTSGSPPREGYFDY

SEQ ID NO: 6211 - protein, 7 aa, Homo sapiens
DTSKRAA

SEQ ID NO: 6212 - protein, 7 aa, Homo sapiens
DTSNKHS

SEQ ID NO: 6213 - protein, 7 aa, Homo sapiens
DTSNKYS

SEQ ID NO: 6214 - protein, 7 aa, Homo sapiens
DTSNRAT

SEQ ID NO: 6215 - protein, 7 aa, Homo sapiens
DTSSRAT

SEQ ID NO: 6216 - protein, 7 aa, Homo sapiens
DTSTLQS

SEQ ID NO: 6217 - protein, 13 aa, Homo sapiens
DTTAALGKNAFDI

SEQ ID NO: 6218 - protein, 7 aa, Homo sapiens
DTTNKHS

SEQ ID NO: 6219 - protein, 95 aa, Homo sapiens
DTVMTQSLATLAVSPGERATLSCRASQSIRSNLAWYQVLPGQAPRLLIYNASTRATGIPPRFSGSGSGTEFTLTINSLQSEDFAVYYCQQYNDWL

SEQ ID NO: 6220 - protein, 107 aa, Homo sapiens
DTVMTQSLATLAVSPGERATLSCRASQSIRSNLAWYQVLPGQAPRLLIYNASTRATGIPPRFSGSGSGTEFTLTINSLQSEDFAVYYCQQYNDWLLTFGGGTKVEIK

SEQ ID NO: 6221 - protein, 101 aa, Homo sapiens
DTVMTQSPDSLPVSLGERATINCKSSQNLLYDSNNKDYLAWYQQKPGQPPKLLMYWASTRESGVPDRFSGSGSGTDFTLTISSLQAEDVAIYYCQQYYYLP

SEQ ID NO: 6222 - protein, 113 aa, Homo sapiens
DTVMTQSPDSLPVSLGERATINCKSSQNLLYDSNNKDYLAWYQQKPGQPPKLLMYWASTRESGVPDRFSGSGSGTDFTLTISSLQAEDVAIYYCQQYYYLPLTFGGGTKVEIK

SEQ ID NO: 6223 - protein, 100 aa, Homo sapiens
DTVMTQTPLSLSVTPGQTASISCKSSQSLLHSDGKTYLYWYLQKAGQSPQLLIYEVSSRFSGVPDRFSGSGSGTDFTLKISRVEAEDVGVYYCMQGIHLP

SEQ ID NO: 6224 - protein, 112 aa, Homo sapiens
DTVMTQTPLSLSVTPGQTASISCKSSQSLLHSDGKTYLYWYLQKAGQSPQLLIYEVSSRFSGVPDRFSGSGSGTDFTLKISRVEAEDVGVYYCMQGIHLPFTFGPGTKVDIK

SEQ ID NO: 6225 - protein, 100 aa, Homo sapiens
DTVMTQTPLSLSVTSGQPASISCKSSQSLLHSDGKTYLYWYLQKPGQPPQLLIYEVSNRFSGVPDRFSGSGSGTDFTLKISRVEAEDVGVYYCMQSVQLP

SEQ ID NO: 6226 - protein, 112 aa, Homo sapiens
DTVMTQTPLSLSVTSGQPASISCKSSQSLLHSDGKTYLYWYLQKPGQPPQLLIYEVSNRFSGVPDRFSGSGSGTDFTLKISRVEAEDVGVYYCMQSVQLPCTFGQGTKLEIK

SEQ ID NO: 6227 - protein, 100 aa, Homo sapiens
DTVMTQTPLSSPVTLGQPASFSCRSSQGLVYSDGNTYLSWLQQRPGQPPRVLIYKISNRFSGVPDRFSGSGAGTEFTLKISRVEAEDVGVYYCMQATHFP

SEQ ID NO: 6228 - protein, 111 aa, Homo sapiens
DTVMTQTPLSSPVTLGQPASFSCRSSQGLVYSDGNTYLSWLQQRPGQPPRVLIYKISNRFSGVPDRFSGSGAGTEFTLKISRVEAEDVGVYYCMQATHFPYTFGQGTKLEI

SEQ ID NO: 6229 - protein, 100 aa, Homo sapiens
DTVMTQYPLSLAVTPGQPASISCRPSQSLVYSDGDTYLNWFQQRPGQSPRRLIYKVSNRDSGVPDRFSGSGSGTDFTLRISRVEAEDAGLYYCMQGTNWP

SEQ ID NO: 6230 - protein, 112 aa, Homo sapiens
DTVMTQYPLSLAVTPGQPASISCRPSQSLVYSDGDTYLNWFQQRPGQSPRRLIYKVSNRDSGVPDRFSGSGSGTDFTLRISRVEAEDAGLYYCMQGTNWPYTFGRGTKLEIK

SEQ ID NO: 6231 - protein, 5 aa, Homo sapiens
DTWMS

SEQ ID NO: 6232 - protein, 13 aa, Homo sapiens
DTYYYDSSGLMDI

SEQ ID NO: 6233 - protein, 13 aa, Homo sapiens
DVADKSSSGSFDY

SEQ ID NO: 6234 - protein, 9 aa, Homo sapiens
DVAESYFDY

SEQ ID NO: 6235 - protein, 7 aa, Homo sapiens
DVAKRPS

SEQ ID NO: 6236 - protein, 15 aa, Homo sapiens
DVDDSHGYYAWHFDY

SEQ ID NO: 6237 - protein, 7 aa, Homo sapiens
DVDKRPS

SEQ ID NO: 6238 - protein, 7 aa, Homo sapiens
DVFKRPS

SEQ ID NO: 6239 - protein, 7 aa, Homo sapiens
DVGKRPS

SEQ ID NO: 6240 - protein, 15 aa, Homo sapiens
DVGQAAAGNGGSFDY

SEQ ID NO: 6241 - protein, 12 aa, Homo sapiens
DVGYYLRGVFHL

SEQ ID NO: 6242 - protein, 7 aa, Homo sapiens
DVIKRPS

SEQ ID NO: 6243 - protein, 7 aa, Homo sapiens
DVNERPS

SEQ ID NO: 6244 - protein, 7 aa, Homo sapiens
DVNKRPS

SEQ ID NO: 6245 - protein, 7 aa, Homo sapiens
DVNNRPS

SEQ ID NO: 6246 - protein, 12 aa, Homo sapiens
DVNWGSDWCFDL

SEQ ID NO: 6247 - protein, 12 aa, Homo sapiens
DVNWGSDWYFDL

SEQ ID NO: 6248 - protein, 12 aa, Homo sapiens
DVPGSPGYYFDY

SEQ ID NO: 6249 - protein, 98 aa, Homo sapiens
DVQLLESGGDLRQPGGSLRLSCVASGFNFRSYAMSWVRQAPGKGLEWVSGIGGTDGSTYYTDSVKGRFTISRDNAKNTVYLQMNNLRGEDTALYYCAK

SEQ ID NO: 6250 - protein, 125 aa, Homo sapiens
DVQLLESGGDLRQPGGSLRLSCVASGFNFRSYAMSWVRQAPGKGLEWVSGIGGTDGSTYYTDSVKGRFTISRDNAKNTVYLQMNNLRGEDTALYYCAKDMEGGRYHSLLYAIDVWGQGTTVTVSS

SEQ ID NO: 6251 - protein, 97 aa, Homo sapiens
DVQLLESGGGLVQPGGSLRLSCAATGFTFSNYAMTWVRQAPGKGLEWVSSISATGISTYYADSVKGRFTISRDSSKSTLFLQMSSLRPEDTALYYCA

SEQ ID NO: 6252 - protein, 123 aa, Homo sapiens
DVQLLESGGGLVQPGGSLRLSCAATGFTFSNYAMTWVRQAPGKGLEWVSSISATGISTYYADSVKGRFTISRDSSKSTLFLQMSSLRPEDTALYYCAKVREDVIPLAGTLDYWGQGTLVTVSS

SEQ ID NO: 6253 - protein, 98 aa, Homo sapiens
DVQLLVSGGGLVQPGGSLRLSCAASGFTFSRFTMYWVRQSPGKGLEWVSSISGSGLSTYFADSVKGRFTLSRDNSKNRLTLQLSRLRAEDTAIYYCAK

SEQ ID NO: 6254 - protein, 124 aa, Homo sapiens
DVQLLVSGGGLVQPGGSLRLSCAASGFTFSRFTMYWVRQSPGKGLEWVSSISGSGLSTYFADSVKGRFTLSRDNSKNRLTLQLSRLRAEDTAIYYCAKDLVPSAPYAEGAFDIWGQGTMVSVST

SEQ ID NO: 6255 - protein, 97 aa, Homo sapiens
DVQLVDSGGGLVQPGGSRRLSCAASGFTFSNYAMSWVRQAPGKGLEWVSVIYSGDITYYSNSVRGRFTISRDNSRNTLYLQMNSLRAEDTAVYYCAR

SEQ ID NO: 6256 - protein, 119 aa, Homo sapiens
DVQLVDSGGGLVQPGGSRRLSCAASGFTFSNYAMSWVRQAPGKGLEWVSVIYSGDITYYSNSVRGRFTISRDNSRNTLYLQMNSLRAEDTAVYYCARGTDSAATRVDAWGQGTTVTVSS

SEQ ID NO: 6257 - protein, 98 aa, Homo sapiens
DVQLVESGGALVQPGESLRLSCVASGFTFGTYAMNWVRQAPGKGLEWVSGIIGNSNTKEYADSVKGRFTISRDNSKGTLYLQMNILRAEDTAIYYCAK

SEQ ID NO: 6258 - protein, 121 aa, Homo sapiens
DVQLVESGGALVQPGESLRLSCVASGFTFGTYAMNWVRQAPGKGLEWVSGIIGNSNTKEYADSVKGRFTISRDNSKGTLYLQMNILRAEDTAIYYCAKDRLPDGRWDIDYWGPGTLVTVSS

SEQ ID NO: 6259 - protein, 98 aa, Homo sapiens
DVQLVESGGDVVQPGGSLRLSCAASGFTFRKYCMSWVRQAPGKGLEWVANIKEDGSEKYYVDSVKGRFTISRDNAQNSLFLQLSSLRGEDTAVYYCAR

SEQ ID NO: 6260 - protein, 124 aa, Homo sapiens
DVQLVESGGDVVQPGGSLRLSCAASGFTFRKYCMSWVRQAPGKGLEWVANIKEDGSEKYYVDSVKGRFTISRDNAQNSLFLQLSSLRGEDTAVYYCARIYHFEDGGYYRHFDYWGRGTLVIVSS

SEQ ID NO: 6261 - protein, 98 aa, Homo sapiens
DVQLVESGGGLEHPGGTLRLSCVASGFTFSNYAMSWVRQAPGKGLEWVSGVSVSGGSTYYADSVKGRFTISRDNSKNTLYLQMNRLRTEDTAIYYCAK

SEQ ID NO: 6262 - protein, 124 aa, Homo sapiens
DVQLVESGGGLEHPGGTLRLSCVASGFTFSNYAMSWVRQAPGKGLEWVSGVSVSGGSTYYADSVKGRFTISRDNSKNTLYLQMNRLRTEDTAIYYCAKNQYDYFGSWTDWFDPWGQGTLVTVSS

SEQ ID NO: 6263 - protein, 100 aa, Homo sapiens
DVQLVESGGGLVKPGGSLRLSCTVSGLSFSDAWLNWVRQAPGKGLEWVGRIKSKIDGGTTDYAAPVKGRFTISRDDSKKTLFLQMSSLKIEDTAVYYCPT

SEQ ID NO: 6264 - protein, 124 aa, Homo sapiens
DVQLVESGGGLVKPGGSLRLSCTVSGLSFSDAWLNWVRQAPGKGLEWVGRIKSKIDGGTTDYAAPVKGRFTISRDDSKKTLFLQMSSLKIEDTAVYYCPTGADSYDDSGYWEFWGQGALVTVSS

SEQ ID NO: 6265 - protein, 98 aa, Homo sapiens
DVQLVESGGGLVQPGGSLRISCAASGFTFNTYVMYWVRQAPGKGLEWVSSISGTGLSTYYADSVKGRFTISRDNSKKMVYLQMNGLRLEDTAVFYCAK

SEQ ID NO: 6266 - protein, 123 aa, Homo sapiens
DVQLVESGGGLVQPGGSLRISCAASGFTFNTYVMYWVRQAPGKGLEWVSSISGTGLSTYYADSVKGRFTISRDNSKKMVYLQMNGLRLEDTAVFYCAKDLTSVTPMNGYLHQWGQGTLVIVSS

SEQ ID NO: 6267 - protein, 98 aa, Homo sapiens
DVQLVESGGGLVQPGGSLRLSCAASGFIVGSFWMSWVRQAPGKGLEWVANIDEGGNDKYYEDSVKGRFTISRDNAKNSLYLEMNSLRAEDTAVYYCAR

SEQ ID NO: 6268 - protein, 119 aa, Homo sapiens
DVQLVESGGGLVQPGGSLRLSCAASGFIVGSFWMSWVRQAPGKGLEWVANIDEGGNDKYYEDSVKGRFTISRDNAKNSLYLEMNSLRAEDTAVYYCARAWDGRGAFDIWGQGTMVTVSS

SEQ ID NO: 6269 - protein, 98 aa, Homo sapiens
DVQLVESGGGLVQPGGSLRLSCAASGLTLIDYYIDWVRQAPGKGLEWFGAIRNRAKSYSTEYAASVEGRLTVSRDDSQNSAHLQLNGLKIDDTAVYYC

SEQ ID NO: 6270 - protein, 121 aa, Homo sapiens
DVQLVESGGGLVQPGGSLRLSCAASGLTLIDYYIDWVRQAPGKGLEWFGAIRNRAKSYSTEYAASVEGRLTVSRDDSQNSAHLQLNGLKIDDTAVYYCLIWKEGDNWKPYWGRGTLVTVSS

SEQ ID NO: 6271 - protein, 98 aa, Homo sapiens
DVQLVESGGGLVQPGGSLRLSCATSGFSFNDYWMTWVRQTPGKSPEWVANIKQDGGETSYVASVKGRFTISRDNAKNSLFLQMDSLRVEDTAVYYCAR

SEQ ID NO: 6272 - protein, 123 aa, Homo sapiens
DVQLVESGGGLVQPGGSLRLSCATSGFSFNDYWMTWVRQTPGKSPEWVANIKQDGGETSYVASVKGRFTISRDNAKNSLFLQMDSLRVEDTAVYYCARVGSHDSTAYRSFHNWGQGTLVTVSS

SEQ ID NO: 6273 - protein, 98 aa, Homo sapiens
DVQLVESGGGLVQPGGSLRLSCEASGFGLNSYWMSWARQAPGKGLEWVGNINDDGSEKHYVDSVEGRATMSRDNTKNSLYLHMNSLRVEDTAVYYCAR

SEQ ID NO: 6274 - protein, 120 aa, Homo sapiens
DVQLVESGGGLVQPGGSLRLSCEASGFGLNSYWMSWARQAPGKGLEWVGNINDDGSEKHYVDSVEGRATMSRDNTKNSLYLHMNSLRVEDTAVYYCARAWDGNNGAFDIWGQGTMVTVSS

SEQ ID NO: 6275 - protein, 97 aa, Homo sapiens
DVQLVESGGGLVQPGGSLRLSCLASGFSIKDYWMSWVRQAPGMGLEWVATIKKDSSEKYFVDSVKGRFTISRDNAKNSLFLQMNSLGADDSALYYCA

SEQ ID NO: 6276 - protein, 121 aa, Homo sapiens
DVQLVESGGGLVQPGGSLRLSCLASGFSIKDYWMSWVRQAPGMGLEWVATIKKDSSEKYFVDSVKGRFTISRDNAKNSLFLQMNSLGADDSALYYCAKSSRDSNYAIWDLWGQGTLVTVSS

SEQ ID NO: 6277 - protein, 98 aa, Homo sapiens
DVQLVESGGGLVQPGGSLRLSCTASGFTFTAYWMNWVRQAPGRGLEWLANINEDGSDKYYVDSVKGRFTISRDNTKNSFYLQMNSLRVEDTAIYYCAR

SEQ ID NO: 6278 - protein, 116 aa, Homo sapiens
DVQLVESGGGLVQPGGSLRLSCTASGFTFTAYWMNWVRQAPGRGLEWLANINEDGSDKYYVDSVKGRFTISRDNTKNSFYLQMNSLRVEDTAIYYCARDRYWSGVWGQGTLVTVSS

SEQ ID NO: 6279 - protein, 98 aa, Homo sapiens
DVQLVESGGGSVVPGGSLRLSCAASGFTFSGYAMNWVRQAPGKGLEWVAYIRINGGKIYYADSVKGRFTVSIDNAKNSFYLEMNSLRNEDTAVYYCAR

SEQ ID NO: 6280 - protein, 121 aa, Homo sapiens
DVQLVESGGGSVVPGGSLRLSCAASGFTFSGYAMNWVRQAPGKGLEWVAYIRINGGKIYYADSVKGRFTVSIDNAKNSFYLEMNSLRNEDTAVYYCARDRDNTGWYLGDYWGPGTLVTVSS

SEQ ID NO: 6281 - protein, 98 aa, Homo sapiens
DVQLVESGGGVVWPGGSLRLSCVASGFTFDNYGLSWVRQAPGKGLEWVSSVNWNGGNTDYADSVKGRFTVSRDNAKNSLYLQMTSLRAEDTAFYYCAR

SEQ ID NO: 6282 - protein, 124 aa, Homo sapiens
DVQLVESGGGVVWPGGSLRLSCVASGFTFDNYGLSWVRQAPGKGLEWVSSVNWNGGNTDYADSVKGRFTVSRDNAKNSLYLQMTSLRAEDTAFYYCARNIVGTTIVHYSYMDVWGKGTTVTVSS

SEQ ID NO: 6283 - protein, 98 aa, Homo sapiens
DVQLVQSGAEVKKPGASVKISCKVSGYRFTDLYMHWVQQAPGKGLKWMGLVDPEDGETIYAEKFQGRVTITADTSTDTTYMELRSLRSEDTAVYYCTI

SEQ ID NO: 6284 - protein, 117 aa, Homo sapiens
DVQLVQSGAEVKKPGASVKISCKVSGYRFTDLYMHWVQQAPGKGLKWMGLVDPEDGETIYAEKFQGRVTITADTSTDTTYMELRSLRSEDTAVYYCTIAPRGGVDPWGQGTPVTVSS

SEQ ID NO: 6285 - protein, 98 aa, Homo sapiens
DVQLVQSGGGLVQPGGSLKLSCAASGFAFNIHSMYWVRQAPGRGLVWVSRINSDGDSVNYADSVKGRFTISRDNARNTLFLQMNRLRDEDTAVYYCVR

SEQ ID NO: 6286 - protein, 116 aa, Homo sapiens
DVQLVQSGGGLVQPGGSLKLSCAASGFAFNIHSMYWVRQAPGRGLVWVSRINSDGDSVNYADSVKGRFTISRDNARNTLFLQMNRLRDEDTAVYYCVRASWFFDYWGQGVLVTVSS

SEQ ID NO: 6287 - protein, 98 aa, Homo sapiens
DVQLVQSGPELKKPGESLKISCKGSAYIFTNFWIGWVRQMPGKGLEWMAIIYPGDSDTKYSPSFQGHVTISGDKSISTAYLQWNSLKTSDTAMYYCAR

SEQ ID NO: 6288 - protein, 117 aa, Homo sapiens
DVQLVQSGPELKKPGESLKISCKGSAYIFTNFWIGWVRQMPGKGLEWMAIIYPGDSDTKYSPSFQGHVTISGDKSISTAYLQWNSLKTSDTAMYYCARLRGHVFDIWGQGTMVIVSS

SEQ ID NO: 6289 - protein, 96 aa, Homo sapiens
DVQMTQSPSSLSASVGDRVTITCQASQDISNYLNWYQQKPGKAPKLLIYDASNLETGVPSRFSGSGSGTHFTFTITSLQPEDIATYYCQQYDNLPP

SEQ ID NO: 6290 - protein, 107 aa, Homo sapiens
DVQMTQSPSSLSASVGDRVTITCQASQDISNYLNWYQQKPGKAPKLLIYDASNLETGVPSRFSGSGSGTHFTFTITSLQPEDIATYYCQQYDNLPPTFGQGTRLDIK

SEQ ID NO: 6291 - protein, 96 aa, Homo sapiens
DVQMTQSPSSLSASVGDRVTITCQASQDISNYLNWYQQKPGKAPKLLIYDASNLETGVPSSFSGSGSGTHFTFTITSLQPEDIATYYCQQYDNLPP

SEQ ID NO: 6292 - protein, 107 aa, Homo sapiens
DVQMTQSPSSLSASVGDRVTITCQASQDISNYLNWYQQKPGKAPKLLIYDASNLETGVPSSFSGSGSGTHFTFTITSLQPEDIATYYCQQYDNLPPTFGQGTRLEIK

SEQ ID NO: 6293 - protein, 96 aa, Homo sapiens
DVQMTQSPSTLSASAGDRVTITCRASQSIGNWLAWYQQKPGKAPKLLIYQASSLESGVPSRFSGSGSGTEFTLTISSLQPDDFATYYCQQYNSYSP

SEQ ID NO: 6294 - protein, 108 aa, Homo sapiens
DVQMTQSPSTLSASAGDRVTITCRASQSIGNWLAWYQQKPGKAPKLLIYQASSLESGVPSRFSGSGSGTEFTLTISSLQPDDFATYYCQQYNSYSPWTFGQGTKVDVK

SEQ ID NO: 6295 - protein, 98 aa, Homo sapiens
DVQMVESGGGLVQPGGSLRLSCGASGFTFSNYWMTWVRQGPGKGLEWVANIRADGNERNYVDSVKGRFTISRDNANNLVFLQLNSLRVEDTAVYYCAR

SEQ ID NO: 6296 - protein, 125 aa, Homo sapiens
DVQMVESGGGLVQPGGSLRLSCGASGFTFSNYWMTWVRQGPGKGLEWVANIRADGNERNYVDSVKGRFTISRDNANNLVFLQLNSLRVEDTAVYYCARGASKEESAGGYRPLHYGGQGTLVTVSS

SEQ ID NO: 6297 - protein, 98 aa, Homo sapiens
DVQVEEFGGGLVQPGGSLRLSCLVSGVDIDDYNMHWVRQAPVKGLEWVATFKKTGEEIHYVDSVKGRFIISRDSPRNSIYLQMNRLRADDTAVYYCVR

SEQ ID NO: 6298 - protein, 121 aa, Homo sapiens
DVQVEEFGGGLVQPGGSLRLSCLVSGVDIDDYNMHWVRQAPVKGLEWVATFKKTGEEIHYVDSVKGRFIISRDSPRNSIYLQMNRLRADDTAVYYCVRGDDYSEWRPSTFWGQGTLVTVSS

SEQ ID NO: 6299 - protein, 97 aa, Homo sapiens
DVQVLESGGGLVQPGGSLRLSCAASGFTFNRYTMTWVRQAPGKGLEWVAAISSSAGTTHYGASVKGRFTISRDNSQNMLFLQMSSLRVEDTAVYYCA

SEQ ID NO: 6300 - protein, 120 aa, Homo sapiens
DVQVLESGGGLVQPGGSLRLSCAASGFTFNRYTMTWVRQAPGKGLEWVAAISSSAGTTHYGASVKGRFTISRDNSQNMLFLQMSSLRVEDTAVYYCAVLNSGWYSYFDYWGQGTLVSVSS

SEQ ID NO: 6301 - protein, 97 aa, Homo sapiens
DVQVLESGGGLVQPGGSLRLSCAASGFTFTRNAMSWVRQAPGKGLEWVSSISGSGDTKYYADSVKGRLTISRDKSKNMVYLQMNSLRVDDAAVYYCA

SEQ ID NO: 6302 - protein, 122 aa, Homo sapiens
DVQVLESGGGLVQPGGSLRLSCAASGFTFTRNAMSWVRQAPGKGLEWVSSISGSGDTKYYADSVKGRLTISRDKSKNMVYLQMNSLRVDDAAVYYCAISTGVVAVWEYFQEWGQGTLVTVSS

SEQ ID NO: 6303 - protein, 95 aa, Homo sapiens
DVRMTQSPSTLSASVGDRVTITCRASQNIKTWLAWYQHKPGQAPKLLIYTASTLESGVPSRFRGSGSETEFTLTISNLQAEDSAIYYCQEYYSYS

SEQ ID NO: 6304 - protein, 108 aa, Homo sapiens
DVRMTQSPSTLSASVGDRVTITCRASQNIKTWLAWYQHKPGQAPKLLIYTASTLESGVPSRFRGSGSETEFTLTISNLQAEDSAIYYCQEYYSYSRWTFGQGTRVDVK

SEQ ID NO: 6305 - protein, 9 aa, Homo sapiens
DVRSRYFDC

SEQ ID NO: 6306 - protein, 16 aa, Homo sapiens
DVRYYEILTGVNWFDP

SEQ ID NO: 6307 - protein, 7 aa, Homo sapiens
DVSDRPS

SEQ ID NO: 6308 - protein, 7 aa, Homo sapiens
DVSHRAT

SEQ ID NO: 6309 - protein, 7 aa, Homo sapiens
DVSIRAT

SEQ ID NO: 6310 - protein, 7 aa, Homo sapiens
DVSKRAT

SEQ ID NO: 6311 - protein, 7 aa, Homo sapiens
DVSKRPL

SEQ ID NO: 6312 - protein, 7 aa, Homo sapiens
DVSKRPS

SEQ ID NO: 6313 - protein, 7 aa, Homo sapiens
DVSKWPL

SEQ ID NO: 6314 - protein, 98 aa, Homo sapiens
DVSLLESGGGFVQPGGSLRLSCRASGFNFNNYVMYWVRQAPGKGLEWVSSISGSGLSRYYADSVKGRFTISRDTSKTTVFLQMNSLSAEDTALYYCAK

SEQ ID NO: 6315 - protein, 123 aa, Homo sapiens
DVSLLESGGGFVQPGGSLRLSCRASGFNFNNYVMYWVRQAPGKGLEWVSSISGSGLSRYYADSVKGRFTISRDTSKTTVFLQMNSLSAEDTALYYCAKDRGTYVPSSGTFDSWGHGILVTVSS

SEQ ID NO: 6316 - protein, 7 aa, Homo sapiens
DVSMRPS

SEQ ID NO: 6317 - protein, 7 aa, Homo sapiens
DVSNLRS

SEQ ID NO: 6318 - protein, 7 aa, Homo sapiens
DVSNRPS

SEQ ID NO: 6319 - protein, 7 aa, Homo sapiens
DVSSLKS

SEQ ID NO: 6320 - protein, 7 aa, Homo sapiens
DVSSRAT

SEQ ID NO: 6321 - protein, 7 aa, Homo sapiens
DVSTLED

SEQ ID NO: 6322 - protein, 7 aa, Homo sapiens
DVSTLEN

SEQ ID NO: 6323 - protein, 7 aa, Homo sapiens
DVSTLEN

SEQ ID NO: 6324 - protein, 7 aa, Homo sapiens
DVSTLQS

SEQ ID NO: 6325 - protein, 7 aa, Homo sapiens
DVSTLRT

SEQ ID NO: 6326 - protein, 7 aa, Homo sapiens
DVSTRAT

SEQ ID NO: 6327 - protein, 7 aa, Homo sapiens
DVSYRPS

SEQ ID NO: 6328 - protein, 7 aa, Homo sapiens
DVTERPS

SEQ ID NO: 6329 - protein, 13 aa, Homo sapiens
DVTGIEKLNAFDI

SEQ ID NO: 6330 - protein, 13 aa, Homo sapiens
DVTGYGALNALDI

SEQ ID NO: 6331 - protein, 7 aa, Homo sapiens
DVTKRPS

SEQ ID NO: 6332 - protein, 7 aa, Homo sapiens
DVTQRPS

SEQ ID NO: 6333 - protein, 7 aa, Homo sapiens
DVTRRPS

SEQ ID NO: 6334 - protein, 15 aa, Homo sapiens
DVVATNPPLSGYFDY

SEQ ID NO: 6335 - protein, 9 aa, Homo sapiens
DVVGATCDF

SEQ ID NO: 6336 - protein, 100 aa, Homo sapiens
DVVLTQSPLSLPVTLGQPASISCRSNQSLLYRDGNTYLYWFQQRPGQSPRRLIYKVSNWDSGVPDRFSGSGSGTDFTLKISRVEAEDVGVYYCMQVTHWP

SEQ ID NO: 6337 - protein, 112 aa, Homo sapiens
DVVLTQSPLSLPVTLGQPASISCRSNQSLLYRDGNTYLYWFQQRPGQSPRRLIYKVSNWDSGVPDRFSGSGSGTDFTLKISRVEAEDVGVYYCMQVTHWPLTVGGGTKVEIK

SEQ ID NO: 6338 - protein, 100 aa, Homo sapiens
DVVLTQSPLSLPVTLGQPASISCRSNQSLVYSDGVTYLNWFQQRPGQSPRRLIYRVSNWDSGVPDRFSGSGSGTDFTLKISRVEAEDVGVYYCMQATHWP

SEQ ID NO: 6339 - protein, 112 aa, Homo sapiens
DVVLTQSPLSLPVTLGQPASISCRSNQSLVYSDGVTYLNWFQQRPGQSPRRLIYRVSNWDSGVPDRFSGSGSGTDFTLKISRVEAEDVGVYYCMQATHWPLTVGGGTKVEIK

SEQ ID NO: 6340 - protein, 101 aa, Homo sapiens
DVVLTQSPLSLSVTLGQPAAISCKSSQSLVYSDGDTYLIWLQQRPGQAPRRLISKVSVRDSGVPDRFSASGSGTDFTLKISRVEAEDVGVYYCMQGSFWPP

SEQ ID NO: 6341 - protein, 112 aa, Homo sapiens
DVVLTQSPLSLSVTLGQPAAISCKSSQSLVYSDGDTYLIWLQQRPGQAPRRLISKVSVRDSGVPDRFSASGSGTDFTLKISRVEAEDVGVYYCMQGSFWPPTFGGGTRVQIK

SEQ ID NO: 6342 - protein, 99 aa, Homo sapiens
DVVLTQSPLSLSVTLGQPASISCRSSQDLVHNDGNTYLNWFQQRPGQSPRRLIYKVSNRDSGVPDRFSASGSATDFALKISRVEAEDVGVYFCMQGTHW

SEQ ID NO: 6343 - protein, 113 aa, Homo sapiens
DVVLTQSPLSLSVTLGQPASISCRSSQDLVHNDGNTYLNWFQQRPGQSPRRLIYKVSNRDSGVPDRFSASGSATDFALKISRVEAEDVGVYFCMQGTHWNIYTFGQGTKLEIK

SEQ ID NO: 6344 - protein, 100 aa, Homo sapiens
DVVLTQSPLSLSVTPGEPASISCRSSQSLLHGNGNNYLDWYLQKPGQSPQLVVYLGSNRASGVPARFSGSGSGTDFTLQISRVEAEDVGVYYCMQALQTP

SEQ ID NO: 6345 - protein, 112 aa, Homo sapiens
DVVLTQSPLSLSVTPGEPASISCRSSQSLLHGNGNNYLDWYLQKPGQSPQLVVYLGSNRASGVPARFSGSGSGTDFTLQISRVEAEDVGVYYCMQALQTPFTFGPGTKVDIK

SEQ ID NO: 6346 - protein, 100 aa, Homo sapiens
DVVMIQTPVSLSVTPGQPASISCKSSQSLLHNDGKTYLYWYLQKPGQPPQLLISEVSNRFSGVSDRFSGSGSGTDFTLRISRVEAEDVGAYYCMQSTELP

SEQ ID NO: 6347 - protein, 112 aa, Homo sapiens
DVVMIQTPVSLSVTPGQPASISCKSSQSLLHNDGKTYLYWYLQKPGQPPQLLISEVSNRFSGVSDRFSGSGSGTDFTLRISRVEAEDVGAYYCMQSTELPYTFGQGTKMEIK

SEQ ID NO: 6348 - protein, 100 aa, Homo sapiens
DVVMTQAPLSLSVTPGQSASISCKSSQSLLHRDGKTYLYWYLQKPGQSPQLLIYEVSNRFSGVPERFSGSGSGTDFTLKISRVEAEDVGVYYCMQSVQLP

SEQ ID NO: 6349 - protein, 112 aa, Homo sapiens
DVVMTQAPLSLSVTPGQSASISCKSSQSLLHRDGKTYLYWYLQKPGQSPQLLIYEVSNRFSGVPERFSGSGSGTDFTLKISRVEAEDVGVYYCMQSVQLPWTFGQGTKVEIK

SEQ ID NO: 6350 - protein, 101 aa, Homo sapiens
DVVMTQSPDSLAVSLGERATINCRSSLSVFYNSNNKNYLAWYQQKPGQPPKVVMYWASTRESGVPDRFSGSGSGTDFTLTISSLQAEDVAVYYCHQYFETP

SEQ ID NO: 6351 - protein, 113 aa, Homo sapiens
DVVMTQSPDSLAVSLGERATINCRSSLSVFYNSNNKNYLAWYQQKPGQPPKVVMYWASTRESGVPDRFSGSGSGTDFTLTISSLQAEDVAVYYCHQYFETPFTFGPGTKVEIK

SEQ ID NO: 6352 - protein, 102 aa, Homo sapiens
DVVMTQSPHSLPVTLGQPASISCRSSQSLVYSDGDGNTHLNWFQQRPGQSPRRIIYKVSNRDSGVPDRFSGSGSDTDFTLKINRVEAEDIGVYYCMQGTYWP

SEQ ID NO: 6353 - protein, 114 aa, Homo sapiens
DVVMTQSPHSLPVTLGQPASISCRSSQSLVYSDGDGNTHLNWFQQRPGQSPRRIIYKVSNRDSGVPDRFSGSGSDTDFTLKINRVEAEDIGVYYCMQGTYWPYTFGQGTKLEIK

SEQ ID NO: 6354 - protein, 100 aa, Homo sapiens
DVVMTQSPLFLPVTLGQSASISCRSGRSLVHSDGNIYFNWFRWRPGQSPRRLIYRTSNRDSGVPDRFSGSGSGTDFTLRISRVEAEDVGVYYCMQGTHWP

SEQ ID NO: 6355 - protein, 111 aa, Homo sapiens
DVVMTQSPLFLPVTLGQSASISCRSGRSLVHSDGNIYFNWFRWRPGQSPRRLIYRTSNRDSGVPDRFSGSGSGTDFTLRISRVEAEDVGVYYCMQGTHWPYTFGQGTKLEI

SEQ ID NO: 6356 - protein, 100 aa, Homo sapiens
DVVMTQSPLFLPVTVGQPASISCRSSQPLVYSDGRTFLSWFHQRPGQSPRRLIYQVSDRDSGVTDRFSGSGSGTDFTLKISRVEAEDVGIYYCMQATHWP

SEQ ID NO: 6357 - protein, 112 aa, Homo sapiens
DVVMTQSPLFLPVTVGQPASISCRSSQPLVYSDGRTFLSWFHQRPGQSPRRLIYQVSDRDSGVTDRFSGSGSGTDFTLKISRVEAEDVGIYYCMQATHWPWTFGQGTKVEIK

SEQ ID NO: 6358 - protein, 100 aa, Homo sapiens
DVVMTQSPLSLPATLGQPASISCRSSASLVYSDGNTYLDWFLQRPGQSPRRLIYKVSNRDSGVPDRFSGGGSGSDFTLRISRVEAEDVGIYYCMQGRHWP

SEQ ID NO: 6359 - protein, 111 aa, Homo sapiens
DVVMTQSPLSLPATLGQPASISCRSSASLVYSDGNTYLDWFLQRPGQSPRRLIYKVSNRDSGVPDRFSGGGSGSDFTLRISRVEAEDVGIYYCMQGRHWPYTFGQGTKLEI

SEQ ID NO: 6360 - protein, 100 aa, Homo sapiens
DVVMTQSPLSLPVALGQPASISCRSSQSLVYSDGNTYLNWFQQRPGQSPRRLIYTVSNRDSGVPDRFSGSGSGTDFTLKISRVEAEDVGFYYCMQGRHWP

SEQ ID NO: 6361 - protein, 112 aa, Homo sapiens
DVVMTQSPLSLPVALGQPASISCRSSQSLVYSDGNTYLNWFQQRPGQSPRRLIYTVSNRDSGVPDRFSGSGSGTDFTLKISRVEAEDVGFYYCMQGRHWPYTFGQGTKLEIK

SEQ ID NO: 6362 - protein, 100 aa, Homo sapiens
DVVMTQSPLSLPVILGQPASISCRSTQSLVYSDGNTYLHWFQQRPGQSPRRLIYNVSNRDSGVPDRFSGSGSGTDFTLKISRVEAEDVGIYYCMQGRHWP

SEQ ID NO: 6363 - protein, 112 aa, Homo sapiens
DVVMTQSPLSLPVILGQPASISCRSTQSLVYSDGNTYLHWFQQRPGQSPRRLIYNVSNRDSGVPDRFSGSGSGTDFTLKISRVEAEDVGIYYCMQGRHWPLTFGGGTKVEIK

SEQ ID NO: 6364 - protein, 98 aa, Homo sapiens
DVVMTQSPLSLPVPLGQPASISCRSSQGLVYIDGNTYLSWFQQRPGQSPRRLIYKISNRDSGVPDRFSGSGSGTDFTLKISRVEAEDVGVYYCMQGTH

SEQ ID NO: 6365 - protein, 111 aa, Homo sapiens
DVVMTQSPLSLPVPLGQPASISCRSSQGLVYIDGNTYLSWFQQRPGQSPRRLIYKISNRDSGVPDRFSGSGSGTDFTLKISRVEAEDVGVYYCMQGTHGGTFGQGTKLEIK

SEQ ID NO: 6366 - protein, 98 aa, Homo sapiens
DVVMTQSPLSLPVTLGQPASISCKSSQGLIYIDGSTYLSWFQQRPGQSPRRLIYKVSYRDSGVPDRFSGSGSGTEFTLKISRVEAEDVGIYYCMQGTH

SEQ ID NO: 6367 - protein, 111 aa, Homo sapiens
DVVMTQSPLSLPVTLGQPASISCKSSQGLIYIDGSTYLSWFQQRPGQSPRRLIYKVSYRDSGVPDRFSGSGSGTEFTLKISRVEAEDVGIYYCMQGTHGGTFGQGTKLEIK

SEQ ID NO: 6368 - protein, 99 aa, Homo sapiens
DVVMTQSPLSLPVTLGQPASISCRSGQSLAYIDGNTYLNWFQQRPGLSPRRLIYKVSNRDSGVPDRFSGSGSGTDFTLKISRVEAEDVGVYYCMQGTHW

SEQ ID NO: 6369 - protein, 112 aa, Homo sapiens
DVVMTQSPLSLPVTLGQPASISCRSGQSLAYIDGNTYLNWFQQRPGLSPRRLIYKVSNRDSGVPDRFSGSGSGTDFTLKISRVEAEDVGVYYCMQGTHWRVTFGQGTKVEIK

SEQ ID NO: 6370 - protein, 101 aa, Homo sapiens
DVVMTQSPLSLPVTLGQPASISCRSSHSLVSSDGNTYLNWFQQRPGQSPRRLIYKVSKWDSGVPDRFSGSGSGTDFTLKISRVEAEDVGVYYCMQATHSPP

SEQ ID NO: 6371 - protein, 112 aa, Homo sapiens
DVVMTQSPLSLPVTLGQPASISCRSSHSLVSSDGNTYLNWFQQRPGQSPRRLIYKVSKWDSGVPDRFSGSGSGTDFTLKISRVEAEDVGVYYCMQATHSPPTFGQGTKLEIK

SEQ ID NO: 6372 - protein, 100 aa, Homo sapiens
DVVMTQSPLSLPVTLGQPASISCRSSHSLVYSDGDTYLIWFQQRPGQSPRRLIYKVSNRDSGVPDRFSGSGSGTDFTLRISRVEAEDVGVYYCMQGRHWP

SEQ ID NO: 6373 - protein, 112 aa, Homo sapiens
DVVMTQSPLSLPVTLGQPASISCRSSHSLVYSDGDTYLIWFQQRPGQSPRRLIYKVSNRDSGVPDRFSGSGSGTDFTLRISRVEAEDVGVYYCMQGRHWPYTFGQGTKLEIK

SEQ ID NO: 6374 - protein, 99 aa, Homo sapiens
DVVMTQSPLSLPVTLGQPASISCRSSLNLVHDDGHTYLSWFQQRPGQSPRRLIYEVSNRDSGVPDRFSGSGSGTDFTLKISRVEAEDVGVYYCTQIKHW

SEQ ID NO: 6375 - protein, 113 aa, Homo sapiens
DVVMTQSPLSLPVTLGQPASISCRSSLNLVHDDGHTYLSWFQQRPGQSPRRLIYEVSNRDSGVPDRFSGSGSGTDFTLKISRVEAEDVGVYYCTQIKHWRLFTFGPGTKVEIK

SEQ ID NO: 6376 - protein, 100 aa, Homo sapiens
DVVMTQSPLSLPVTLGQPASISCRSSQGLVFSDGNTYLSWFQQRPGQSPRRLIYQVSNRDSGVPDRFSGSGSGTDFTLRISRVEAEDVGVYYCMQGTYWP

SEQ ID NO: 6377 - protein, 112 aa, Homo sapiens
DVVMTQSPLSLPVTLGQPASISCRSSQGLVFSDGNTYLSWFQQRPGQSPRRLIYQVSNRDSGVPDRFSGSGSGTDFTLRISRVEAEDVGVYYCMQGTYWPLTFGGGTKVEIK

SEQ ID NO: 6378 - protein, 100 aa, Homo sapiens
DVVMTQSPLSLPVTLGQPASISCRSSQGLVFVDGNTYLSWFQQRPGHSPRRLIYKVSSRDSGVPDRFSGSGSGTDFTLKINRVEAEDVGVYYCMQGTYWP

SEQ ID NO: 6379 - protein, 112 aa, Homo sapiens
DVVMTQSPLSLPVTLGQPASISCRSSQGLVFVDGNTYLSWFQQRPGHSPRRLIYKVSSRDSGVPDRFSGSGSGTDFTLKINRVEAEDVGVYYCMQGTYWPFTFGGGTKVEIK

SEQ ID NO: 6380 - protein, 101 aa, Homo sapiens
DVVMTQSPLSLPVTLGQPASISCRSSQGLVYSDGNTYLNWFQQRPGQSPRRLIYKVSNRDSGVPDRFSGSGSGTDFTLRISRVEAEDVGVYYCMQGTYWPP

SEQ ID NO: 6381 - protein, 112 aa, Homo sapiens
DVVMTQSPLSLPVTLGQPASISCRSSQGLVYSDGNTYLNWFQQRPGQSPRRLIYKVSNRDSGVPDRFSGSGSGTDFTLRISRVEAEDVGVYYCMQGTYWPPAFGQGTKVEIK

SEQ ID NO: 6382 - protein, 100 aa, Homo sapiens
DVVMTQSPLSLPVTLGQPASISCRSSQGLVYSDGNTYLSWFQQRPGQSPRRLIYKVSNRDSGVPDRFSGSGSGTDFTLDISRVEAVDVGVYYCMQGTHWP

SEQ ID NO: 6383 - protein, 112 aa, Homo sapiens
DVVMTQSPLSLPVTLGQPASISCRSSQGLVYSDGNTYLSWFQQRPGQSPRRLIYKVSNRDSGVPDRFSGSGSGTDFTLDISRVEAVDVGVYYCMQGTHWPLTFGGGTKVEIK

SEQ ID NO: 6384 - protein, 100 aa, Homo sapiens
DVVMTQSPLSLPVTLGQPASISCRSSQRFEHSDGTIYLSWFHQRPGQSPRRLIYKVSNRDSGVPDRFSGSGSGTDFTLKISRVEAEDVGVYYCMQCTHWP

SEQ ID NO: 6385 - protein, 112 aa, Homo sapiens
DVVMTQSPLSLPVTLGQPASISCRSSQRFEHSDGTIYLSWFHQRPGQSPRRLIYKVSNRDSGVPDRFSGSGSGTDFTLKISRVEAEDVGVYYCMQCTHWPRTFGQGTKVEIK

SEQ ID NO: 6386 - protein, 101 aa, Homo sapiens
DVVMTQSPLSLPVTLGQPASISCRSSQSLAHSDGNTLLNWFQQRPGQSPRRLIYKVSNRESGVPDRFSGSGSGTYFTLKISRVEAEDVGVYYCMQGTHWPP

SEQ ID NO: 6387 - protein, 113 aa, Homo sapiens
DVVMTQSPLSLPVTLGQPASISCRSSQSLAHSDGNTLLNWFQQRPGQSPRRLIYKVSNRESGVPDRFSGSGSGTYFTLKISRVEAEDVGVYYCMQGTHWPPYTFGQGTKLEIK

SEQ ID NO: 6388 - protein, 100 aa, Homo sapiens
DVVMTQSPLSLPVTLGQPASISCRSSQSLVHKTGNTFLSWFHQRPGQSPRRLIYKVSNRESGVPERFSGSGSDTDFTLSISRVEAEDVGLYYCMQGTKWP

SEQ ID NO: 6389 - protein, 112 aa, Homo sapiens
DVVMTQSPLSLPVTLGQPASISCRSSQSLVHKTGNTFLSWFHQRPGQSPRRLIYKVSNRESGVPERFSGSGSDTDFTLSISRVEAEDVGLYYCMQGTKWPYTFGQGTKLEIK

SEQ ID NO: 6390 - protein, 101 aa, Homo sapiens
DVVMTQSPLSLPVTLGQPASISCRSSQSLVHNDGNTYLNWFQQRPGQSPRRLIHKISNRDSGVPDRFSGSGSGTDFTLRISRVEAEDVGVYYCMQGTHWPP

SEQ ID NO: 6391 - protein, 112 aa, Homo sapiens
DVVMTQSPLSLPVTLGQPASISCRSSQSLVHNDGNTYLNWFQQRPGQSPRRLIHKISNRDSGVPDRFSGSGSGTDFTLRISRVEAEDVGVYYCMQGTHWPPYTFGQGTNLEI

SEQ ID NO: 6392 - protein, 101 aa, Homo sapiens
DVVMTQSPLSLPVTLGQPASISCRSSQSLVHRDGNTYLNWFQQRPGQSPRRLIYKVSSRDSGVPDRFSGSGSGTDFTLHISRVEAEDVGVYYCMQGTHWPP

SEQ ID NO: 6393 - protein, 113 aa, Homo sapiens
DVVMTQSPLSLPVTLGQPASISCRSSQSLVHRDGNTYLNWFQQRPGQSPRRLIYKVSSRDSGVPDRFSGSGSGTDFTLHISRVEAEDVGVYYCMQGTHWPPYIFGQGTKLEIK

SEQ ID NO: 6394 - protein, 101 aa, Homo sapiens
DVVMTQSPLSLPVTLGQPASISCRSSQSLVHRDGNTYLNWFQQRPGQSPRRLIYKVSSRDSGVPDRFSGSGSGTDFTLKISRVEAEDVGVYYCMQGTHWPP

SEQ ID NO: 6395 - protein, 113 aa, Homo sapiens
DVVMTQSPLSLPVTLGQPASISCRSSQSLVHRDGNTYLNWFQQRPGQSPRRLIYKVSSRDSGVPDRFSGSGSGTDFTLKISRVEAEDVGVYYCMQGTHWPPYIYGQGTRLEIK

SEQ ID NO: 6396 - protein, 100 aa, Homo sapiens
DVVMTQSPLSLPVTLGQPASISCRSSQSLVHSDGDTYLNWFQQRPGQPPRRLIYKVSNRDSGVPDRFSGSGSGTDFTLKISRVEAEDVGVYYCMQGTHWP

SEQ ID NO: 6397 - protein, 112 aa, Homo sapiens
DVVMTQSPLSLPVTLGQPASISCRSSQSLVHSDGDTYLNWFQQRPGQPPRRLIYKVSNRDSGVPDRFSGSGSGTDFTLKISRVEAEDVGVYYCMQGTHWPLTFGGGTKVEIK

SEQ ID NO: 6398 - protein, 100 aa, Homo sapiens
DVVMTQSPLSLPVTLGQPASISCRSSQSLVHSDGNTYLNWFQQRPGQSPRRLIYKVSNRDSGVPDRFSGSGSGTDFTLKISRVEAEDVGVYYCMQGTHWP

SEQ ID NO: 6399 - protein, 113 aa, Homo sapiens
DVVMTQSPLSLPVTLGQPASISCRSSQSLVHSDGNTYLNWFQQRPGQSPRRLIYKVSNRDSGVPDRFSGSGSGTDFTLKISRVEAEDVGVYYCMQGTHWPRLTFGGGTKVEIK

SEQ ID NO: 6400 - protein, 101 aa, Homo sapiens
DVVMTQSPLSLPVTLGQPASISCRSSQSLVHSDGNTYLNWFQQRPGQSPRRLIYQVSHRDSGVPDRFSGSGSGTDFTLKISRVEAEDVGVYYCMQATHWPP

SEQ ID NO: 6401 - protein, 113 aa, Homo sapiens
DVVMTQSPLSLPVTLGQPASISCRSSQSLVHSDGNTYLNWFQQRPGQSPRRLIYQVSHRDSGVPDRFSGSGSGTDFTLKISRVEAEDVGVYYCMQATHWPPYTFGQGTKLEIE

SEQ ID NO: 6402 - protein, 101 aa, Homo sapiens
DVVMTQSPLSLPVTLGQPASISCRSSQSLVHSDGNTYLNWFQQRPGQSPRRLIYRVSNRDAGVPDRFSGSGSGTDFTLKVSRVEAEDVGVYYCMQGTHWPP

SEQ ID NO: 6403 - protein, 112 aa, Homo sapiens
DVVMTQSPLSLPVTLGQPASISCRSSQSLVHSDGNTYLNWFQQRPGQSPRRLIYRVSNRDAGVPDRFSGSGSGTDFTLKVSRVEAEDVGVYYCMQGTHWPPYTFGQGTKLEI

SEQ ID NO: 6404 - protein, 101 aa, Homo sapiens
DVVMTQSPLSLPVTLGQPASISCRSSQSLVHSDGNTYLTWFQQRPGQSPRRLIYKVSNRDSGVPDRFSGSGSGTDFTLKISRVEAEDVAVYYCMQGTHWPP

SEQ ID NO: 6405 - protein, 112 aa, Homo sapiens
DVVMTQSPLSLPVTLGQPASISCRSSQSLVHSDGNTYLTWFQQRPGQSPRRLIYKVSNRDSGVPDRFSGSGSGTDFTLKISRVEAEDVAVYYCMQGTHWPPYTFGQGTKLEI

SEQ ID NO: 6406 - protein, 100 aa, Homo sapiens
DVVMTQSPLSLPVTLGQPASISCRSSQSLVYIDGNTYLNWFQQRPGQSPRRLIYKVSNRDSGVPDRFSGSVSGTDFTLKISRVEAEDVGVYYCMQGTYWP

SEQ ID NO: 6407 - protein, 112 aa, Homo sapiens
DVVMTQSPLSLPVTLGQPASISCRSSQSLVYIDGNTYLNWFQQRPGQSPRRLIYKVSNRDSGVPDRFSGSVSGTDFTLKISRVEAEDVGVYYCMQGTYWPHTFGQGTKLEIK

SEQ ID NO: 6408 - protein, 100 aa, Homo sapiens
DVVMTQSPLSLPVTLGQPASISCRSSQSLVYKDGNTYLIWFQQRPGQSPRRLIYQVSNRDSGVPDRFSGSGSGTDFTLKISRVQAEDVGVYYCMQGTQWP

SEQ ID NO: 6409 - protein, 112 aa, Homo sapiens
DVVMTQSPLSLPVTLGQPASISCRSSQSLVYKDGNTYLIWFQQRPGQSPRRLIYQVSNRDSGVPDRFSGSGSGTDFTLKISRVQAEDVGVYYCMQGTQWPYTFGQGTKLEIK

SEQ ID NO: 6410 - protein, 100 aa, Homo sapiens
DVVMTQSPLSLPVTLGQPASISCRSSQSLVYKDGNTYLNWFQQRPGQSPRRLIYKVSHRDSGVPDRFSGSGSDTDFTLKISRVEAEDIGVYYCMQGTQWP

SEQ ID NO: 6411 - protein, 112 aa, Homo sapiens
DVVMTQSPLSLPVTLGQPASISCRSSQSLVYKDGNTYLNWFQQRPGQSPRRLIYKVSHRDSGVPDRFSGSGSDTDFTLKISRVEAEDIGVYYCMQGTQWPYTFGQGTKLDIK

SEQ ID NO: 6412 - protein, 100 aa, Homo sapiens
DVVMTQSPLSLPVTLGQPASISCRSSQSLVYSDGDTYLNWFQQRPGQSPRRLIYKVSNRDSGVPDRFSGSGSGTDFTLKISRVEAEDVGVYYCMQGTHWP

SEQ ID NO: 6413 - protein, 112 aa, Homo sapiens
DVVMTQSPLSLPVTLGQPASISCRSSQSLVYSDGDTYLNWFQQRPGQSPRRLIYKVSNRDSGVPDRFSGSGSGTDFTLKISRVEAEDVGVYYCMQGTHWPFTFGPGTKVDIK

SEQ ID NO: 6414 - protein, 100 aa, Homo sapiens
DVVMTQSPLSLPVTLGQPASISCRSSQSLVYSDGKTYLNWYHQRPGQSPRRLIYNVSNRHSGVPDRFSGSGSGTDFTLKISRVEAEDVGVYYCMQGTHTP

SEQ ID NO: 6415 - protein, 112 aa, Homo sapiens
DVVMTQSPLSLPVTLGQPASISCRSSQSLVYSDGKTYLNWYHQRPGQSPRRLIYNVSNRHSGVPDRFSGSGSGTDFTLKISRVEAEDVGVYYCMQGTHTPHTFGQGTKLEIK

SEQ ID NO: 6416 - protein, 100 aa, Homo sapiens
DVVMTQSPLSLPVTLGQPASISCRSSQSLVYSDGNTYLNWFQQRPGQPPRRLIYKVSNRDSGVPDRFSGSESGTDFTLKISRVEAEDVGVYYCMQGTQWP

SEQ ID NO: 6417 - protein, 112 aa, Homo sapiens
DVVMTQSPLSLPVTLGQPASISCRSSQSLVYSDGNTYLNWFQQRPGQPPRRLIYKVSNRDSGVPDRFSGSESGTDFTLKISRVEAEDVGVYYCMQGTQWPYTFGQGTKLEIK

SEQ ID NO: 6418 - protein, 100 aa, Homo sapiens
DVVMTQSPLSLPVTLGQPASISCRSSQSLVYSDGNTYLNWFQQRPGQSPRRLIYKVSNRDSGVPDRFSGSGSGTDFTLKISRVEAEDVGVYYCMQGTHWP

SEQ ID NO: 6419 - protein, 113 aa, Homo sapiens
DVVMTQSPLSLPVTLGQPASISCRSSQSLVYSDGNTYLNWFQQRPGQSPRRLIYKVSNRDSGVPDRFSGSGSGTDFTLKISRVEAEDVGVYYCMQGTHWPSYTFGPGTKVDIK

SEQ ID NO: 6420 - protein, 100 aa, Homo sapiens
DVVMTQSPLSLPVTLGQPASISCRSSQSLVYSDGNTYLSWFQQRPGQSPRRLIYQVSNRDSGVPDRFSGSGSDTDFTLKISRVEAEDVGVYYCMQGTRWP

SEQ ID NO: 6421 - protein, 112 aa, Homo sapiens
DVVMTQSPLSLPVTLGQPASISCRSSQSLVYSDGNTYLSWFQQRPGQSPRRLIYQVSNRDSGVPDRFSGSGSDTDFTLKISRVEAEDVGVYYCMQGTRWPGSFGGGTKVEIK

SEQ ID NO: 6422 - protein, 100 aa, Homo sapiens
DVVMTQSPLSLPVTLGQPASISCWSSHSLVYKDDNTYLNWFHLRPGQSPRRLIYKVSDRDSGVPDRFSGSGSGTDFTLKISRVEAEDVGVYYCMQGTHWP

SEQ ID NO: 6423 - protein, 111 aa, Homo sapiens
DVVMTQSPLSLPVTLGQPASISCWSSHSLVYKDDNTYLNWFHLRPGQSPRRLIYKVSDRDSGVPDRFSGSGSGTDFTLKISRVEAEDVGVYYCMQGTHWPYTFGQGTKLEI

SEQ ID NO: 6424 - protein, 101 aa, Homo sapiens
DVVMTQSPLSLPVTLGQPASMSCRSSQSLLYKDGNTYLSWFQQRPGQSPRRLIYKVSNRDSGVPDRFSGSGSGTDFTLKISRVEAEDVGVYYCMQGTHWPP

SEQ ID NO: 6425 - protein, 114 aa, Homo sapiens
DVVMTQSPLSLPVTLGQPASMSCRSSQSLLYKDGNTYLSWFQQRPGQSPRRLIYKVSNRDSGVPDRFSGSGSGTDFTLKISRVEAEDVGVYYCMQGTHWPPGFTFGPGTKVDIK

SEQ ID NO: 6426 - protein, 100 aa, Homo sapiens
DVVMTQSPLSLPVTLGQPASVSCRSSQSLVYTDGNTFLNWFQQRPGQSPRRLIYQVSNRDSGVPDRFSGSGSGTDFTLKISRVEAEDVGVYYCMQGTQWP

SEQ ID NO: 6427 - protein, 112 aa, Homo sapiens
DVVMTQSPLSLPVTLGQPASVSCRSSQSLVYTDGNTFLNWFQQRPGQSPRRLIYQVSNRDSGVPDRFSGSGSGTDFTLKISRVEAEDVGVYYCMQGTQWPYTFGQGTKLEIK

SEQ ID NO: 6428 - protein, 101 aa, Homo sapiens
DVVMTQSPLSLPVTLGQPATISCRSSQSLVYSDGETYLNWFQQRPGQSPRRLIYKVSNRDSGVPDRFSGSGSGTEFTLRISRVEAEDVGVYYCMQGTYWPP

SEQ ID NO: 6429 - protein, 113 aa, Homo sapiens
DVVMTQSPLSLPVTLGQPATISCRSSQSLVYSDGETYLNWFQQRPGQSPRRLIYKVSNRDSGVPDRFSGSGSGTEFTLRISRVEAEDVGVYYCMQGTYWPPFTFGGGTKVEIK

SEQ ID NO: 6430 - protein, 100 aa, Homo sapiens
DVVMTQSPLSLPVTLGQSASFSCRSSQSLVYSDGDTFLNWFHQRPGQSPRRLIYKVSVRDSGVPDRFSGSGSGTDFTLKISRVEAEDVGVYYCMQGTHWP

SEQ ID NO: 6431 - protein, 112 aa, Homo sapiens
DVVMTQSPLSLPVTLGQSASFSCRSSQSLVYSDGDTFLNWFHQRPGQSPRRLIYKVSVRDSGVPDRFSGSGSGTDFTLKISRVEAEDVGVYYCMQGTHWPFTFGPGTKVDIK

SEQ ID NO: 6432 - protein, 101 aa, Homo sapiens
DVVMTQSPLSLPVTLGQSASISCRSSQGLVYSDGNTYLTWFQQRPGQSPRRLIYKVSNRDSGVPDRFSGSGSGTDFTLKISRVEAEDIGVYYCMQGTHWPP

SEQ ID NO: 6433 - protein, 113 aa, Homo sapiens
DVVMTQSPLSLPVTLGQSASISCRSSQGLVYSDGNTYLTWFQQRPGQSPRRLIYKVSNRDSGVPDRFSGSGSGTDFTLKISRVEAEDIGVYYCMQGTHWPPYTFGQGTKLEIK

SEQ ID NO: 6434 - protein, 101 aa, Homo sapiens
DVVMTQSPLSLPVTLGQTASISCRSSRGLVHIDGNTYLTWFQQRPGQSPRRLIYKVSNRDSGVPDRFSGSGSGTDFTLQISRVEAEDVGVYFCMQGTYMGS

SEQ ID NO: 6435 - protein, 112 aa, Homo sapiens
DVVMTQSPLSLPVTLGQTASISCRSSRGLVHIDGNTYLTWFQQRPGQSPRRLIYKVSNRDSGVPDRFSGSGSGTDFTLQISRVEAEDVGVYFCMQGTYMGSTFGQGTKLEIK

SEQ ID NO: 6436 - protein, 99 aa, Homo sapiens
DVVMTQSPLSLPVTPGQPASISCRSSENLVHKDGNTYLNWFQQRPGQSPRRLIYKVSNRDSGVPDRFSGSGAGTDFTLRISRVEAEDVGVYYCMQGSHW

SEQ ID NO: 6437 - protein, 113 aa, Homo sapiens
DVVMTQSPLSLPVTPGQPASISCRSSENLVHKDGNTYLNWFQQRPGQSPRRLIYKVSNRDSGVPDRFSGSGAGTDFTLRISRVEAEDVGVYYCMQGSHWNVYTFGPGTRLEIK

SEQ ID NO: 6438 - protein, 99 aa, Homo sapiens
DVVMTQSPLSLSVTLGQPASISCRSSQSLVHNNGNTYLNWFQQRPGQSPRRLIYQVSNRDSGVPDRFSGSGSGTDFTLKISRVEAEDVGVYYCMQGTHW

SEQ ID NO: 6439 - protein, 113 aa, Homo sapiens
DVVMTQSPLSLSVTLGQPASISCRSSQSLVHNNGNTYLNWFQQRPGQSPRRLIYQVSNRDSGVPDRFSGSGSGTDFTLKISRVEAEDVGVYYCMQGTHWHTYTFGQGTKLEIK

SEQ ID NO: 6440 - protein, 98 aa, Homo sapiens
DVVMTQSPLSLSVTLGQSASISCGSSQSLVHRDGNTYLNWFQQRPGQSPRRLIYQVSYRDSGVPDRFSGSGSATDFTLKISRVEAADVGVYYCMQGTH

SEQ ID NO: 6441 - protein, 112 aa, Homo sapiens
DVVMTQSPLSLSVTLGQSASISCGSSQSLVHRDGNTYLNWFQQRPGQSPRRLIYQVSYRDSGVPDRFSGSGSATDFTLKISRVEAADVGVYYCMQGTHYHTYTFGPGTKLEI

SEQ ID NO: 6442 - protein, 101 aa, Homo sapiens
DVVMTQSPLSLSVTPGQPASISCKSSQSLLHSDGKTYLYWFLQKPGQSPQPLIYEVSSRFSGVPERFSGSGSGTDFTLKISRVEAEDVGVYYCMQGIHLPP

SEQ ID NO: 6443 - protein, 113 aa, Homo sapiens
DVVMTQSPLSLSVTPGQPASISCKSSQSLLHSDGKTYLYWFLQKPGQSPQPLIYEVSSRFSGVPERFSGSGSGTDFTLKISRVEAEDVGVYYCMQGIHLPPVTFGGGTKVEIK

SEQ ID NO: 6444 - protein, 100 aa, Homo sapiens
DVVMTQSPLTLPVTLGQPASISCRSSQGLVYSDGNTYLSWFQQRPGQSPRRLIYKVSNRDSGVPDRFSGSGSGTDFTLDISRVEAEDVGVYYCMQGTHWP

SEQ ID NO: 6445 - protein, 112 aa, Homo sapiens
DVVMTQSPLTLPVTLGQPASISCRSSQGLVYSDGNTYLSWFQQRPGQSPRRLIYKVSNRDSGVPDRFSGSGSGTDFTLDISRVEAEDVGVYYCMQGTHWPLTFGGGTKVEIK

SEQ ID NO: 6446 - protein, 100 aa, Homo sapiens
DVVMTQSPPSLPVTLGQPASISCRSSQSLVYTNGNTYLNWFHQRPGQSPRRLIYEVSNRDSGVPDRFSGSGSGTDFTLRISRVEAEDVGLYYCMQGTQWP

SEQ ID NO: 6447 - protein, 112 aa, Homo sapiens
DVVMTQSPPSLPVTLGQPASISCRSSQSLVYTNGNTYLNWFHQRPGQSPRRLIYEVSNRDSGVPDRFSGSGSGTDFTLRISRVEAEDVGLYYCMQGTQWPYTFGQGTKVEIK

SEQ ID NO: 6448 - protein, 100 aa, Homo sapiens
DVVMTQSPRSLSVTLGQPASISCRSSRSLVHSDGNTYFNWFHQRPGQSPRRLIYQVSNRDSGVPDRFSGSGSGTDFTLKISRLEADDVGVYYCMQGTHWP

SEQ ID NO: 6449 - protein, 112 aa, Homo sapiens
DVVMTQSPRSLSVTLGQPASISCRSSRSLVHSDGNTYFNWFHQRPGQSPRRLIYQVSNRDSGVPDRFSGSGSGTDFTLKISRLEADDVGVYYCMQGTHWPLTFGSGTKVEIK

SEQ ID NO: 6450 - protein, 97 aa, Homo sapiens
DVVMTQTPLSLSVTPGQPASISCKSSQSLLHEDGKTYLYWYLQKPGQSPQPLIYEVFGRFSGVPDRFSGTGSGTDFTLQISRVEADDVGIYYCMQGK

SEQ ID NO: 6451 - protein, 112 aa, Homo sapiens
DVVMTQTPLSLSVTPGQPASISCKSSQSLLHEDGKTYLYWYLQKPGQSPQPLIYEVFGRFSGVPDRFSGTGSGTDFTLQISRVEADDVGIYYCMQGKRWREFTFGPGTRVDI

SEQ ID NO: 6452 - protein, 15 aa, Homo sapiens
DVVSPSNDWYSALDI

SEQ ID NO: 6453 - protein, 100 aa, Homo sapiens
DVVVTQSPLSLPVTLGQPASISCKSSQSLLHNDGNTYLNWFQQRPGQSPRRLIYMLSNRDSGVPVRFSGSGSGTDFTLTISRVEAEDVGVYYCMQQIHWP

SEQ ID NO: 6454 - protein, 111 aa, Homo sapiens
DVVVTQSPLSLPVTLGQPASISCKSSQSLLHNDGNTYLNWFQQRPGQSPRRLIYMLSNRDSGVPVRFSGSGSGTDFTLTISRVEAEDVGVYYCMQQIHWPFTFGPGTRVDI

SEQ ID NO: 6455 - protein, 100 aa, Homo sapiens
DVVVTQSPLSLPVTLGQPASISCRSNQSLVYSDGDTYLSWFQQRPGQSPRRLIYKVSNRDSGVPDKFSGSGSGTDFTLKISRVEAEDVGVYYCMQSTDWP

SEQ ID NO: 6456 - protein, 112 aa, Homo sapiens
DVVVTQSPLSLPVTLGQPASISCRSNQSLVYSDGDTYLSWFQQRPGQSPRRLIYKVSNRDSGVPDKFSGSGSGTDFTLKISRVEAEDVGVYYCMQSTDWPYTFGGGTKVEIK

SEQ ID NO: 6457 - protein, 100 aa, Homo sapiens
DVVVTQSPVSLPVTLGQPASISCKSSQSLLHSDGNTYLNWFQQRPGQSPRRLIYMASNRDSGVPDRFSGSGSGTDFTLTISRVEAEDVGIYYCMQQIHWP

SEQ ID NO: 6458 - protein, 112 aa, Homo sapiens
DVVVTQSPVSLPVTLGQPASISCKSSQSLLHSDGNTYLNWFQQRPGQSPRRLIYMASNRDSGVPDRFSGSGSGTDFTLTISRVEAEDVGIYYCMQQIHWPFTFGPGTKVDIK

SEQ ID NO: 6459 - protein, 7 aa, Homo sapiens
DVYNRPS

SEQ ID NO: 6460 - protein, 7 aa, Homo sapiens
DVYQRPS

SEQ ID NO: 6461 - protein, 12 aa, Homo sapiens
DWDAKTPVIADY

SEQ ID NO: 6462 - protein, 14 aa, Homo sapiens
DWEKSSCEGECLNY

SEQ ID NO: 6463 - protein, 14 aa, Homo sapiens
DWERESCNGDCLSN

SEQ ID NO: 6464 - protein, 14 aa, Homo sapiens
DWETSSCNGDCLSN

SEQ ID NO: 6465 - protein, 5 aa, Homo sapiens
DWFWS

SEQ ID NO: 6466 - protein, 11 aa, Homo sapiens
DWGDSGKWGDV

SEQ ID NO: 6467 - protein, 15 aa, Homo sapiens
DWGGPSEGYNVITDY

SEQ ID NO: 6468 - protein, 7 aa, Homo sapiens
DWGKGRD

SEQ ID NO: 6469 - protein, 7 aa, Homo sapiens
DWGLGRN

SEQ ID NO: 6470 - protein, 16 aa, Homo sapiens
DWGPGDSCGSGSCLSK

SEQ ID NO: 6471 - protein, 16 aa, Homo sapiens
DWGPKDSSSYDDGLDI

SEQ ID NO: 6472 - protein, 16 aa, Homo sapiens
DWGPKDTSAYDEALDI

SEQ ID NO: 6473 - protein, 13 aa, Homo sapiens
DWGYYDSIEGFDP

SEQ ID NO: 6474 - protein, 16 aa, Homo sapiens
DWIESGDWASHPVFDY

SEQ ID NO: 6475 - protein, 21 aa, Homo sapiens
DWIGKVHGSGAYYSDRHYFDM

SEQ ID NO: 6476 - protein, 21 aa, Homo sapiens
DWIGKVYGSGTYYTDRHYFDI

SEQ ID NO: 6477 - protein, 15 aa, Homo sapiens
DWIPSRPALGGYMDV

SEQ ID NO: 6478 - protein, 14 aa, Homo sapiens
DWKGNQCDGDCLSH

SEQ ID NO: 6479 - protein, 15 aa, Homo sapiens
DWNNYDIFTGLYFDS

SEQ ID NO: 6480 - protein, 8 aa, Homo sapiens
DWPGAFDI

SEQ ID NO: 6481 - protein, 14 aa, Homo sapiens
DWQTSSCGDDCLIN

SEQ ID NO: 6482 - protein, 11 aa, Homo sapiens
DWRDDSGGIEY

SEQ ID NO: 6483 - protein, 14 aa, Homo sapiens
DWRESSCDGDCLNY

SEQ ID NO: 6484 - protein, 11 aa, Homo sapiens
DWRGDEDGIDY

SEQ ID NO: 6485 - protein, 13 aa, Homo sapiens
DWRGYSQLGLIDY

SEQ ID NO: 6486 - protein, 9 aa, Homo sapiens
DWSIIAFDI

SEQ ID NO: 6487 - protein, 15 aa, Homo sapiens
DWSPRGIAAPFYFDY

SEQ ID NO: 6488 - protein, 12 aa, Homo sapiens
DWSRSSHITADQ

SEQ ID NO: 6489 - protein, 11 aa, Homo sapiens
DWTGSYFRKDY

SEQ ID NO: 6490 - protein, 16 aa, Homo sapiens
DWVDNSDWSSQPVFDY

SEQ ID NO: 6491 - protein, 16 aa, Homo sapiens
DWVDSSDWASHPVFDS

SEQ ID NO: 6492 - protein, 21 aa, Homo sapiens
DWVGKIHGSGSLYSDRNYFDT

SEQ ID NO: 6493 - protein, 21 aa, Homo sapiens
DWVGKIHGSGTLYSDRNYFDI

SEQ ID NO: 6494 - protein, 21 aa, Homo sapiens
DWVGKIHGSGTLYSDRNYFDT

SEQ ID NO: 6495 - protein, 21 aa, Homo sapiens
DWVGKIQGSGTLYSDRNHFDT

SEQ ID NO: 6496 - protein, 16 aa, Homo sapiens
DWVNADDWAYQPVFDS

SEQ ID NO: 6497 - protein, 16 aa, Homo sapiens
DWVNADDWPYQPVFDS

SEQ ID NO: 6498 - protein, 11 aa, Homo sapiens
DWVSETTGIDN

SEQ ID NO: 6499 - protein, 6 aa, Homo sapiens
DWYFDL

SEQ ID NO: 6500 - protein, 5 aa, Homo sapiens
DYAIH

SEQ ID NO: 6501 - protein, 5 aa, Homo sapiens
DYAIN

SEQ ID NO: 6502 - protein, 5 aa, Homo sapiens
DYAIQ

SEQ ID NO: 6503 - protein, 5 aa, Homo sapiens
DYAIS

SEQ ID NO: 6504 - protein, 5 aa, Homo sapiens
DYALH

SEQ ID NO: 6505 - protein, 5 aa, Homo sapiens
DYALS

SEQ ID NO: 6506 - protein, 5 aa, Homo sapiens
DYAMG

SEQ ID NO: 6507 - protein, 5 aa, Homo sapiens
DYAMH

SEQ ID NO: 6508 - protein, 5 aa, Homo sapiens
DYAMN

SEQ ID NO: 6509 - protein, 5 aa, Homo sapiens
DYAMQ

SEQ ID NO: 6510 - protein, 5 aa, Homo sapiens
DYAMS

SEQ ID NO: 6511 - protein, 5 aa, Homo sapiens
DYAMT

SEQ ID NO: 6512 - protein, 5 aa, Homo sapiens
DYAVG

SEQ ID NO: 6513 - protein, 16 aa, Homo sapiens
DYCNGDGCSRESWGDF

SEQ ID NO: 6514 - protein, 16 aa, Homo sapiens
DYCNGDNCPRQSWGDF

SEQ ID NO: 6515 - protein, 19 aa, Homo sapiens
DYCNGDNGDSCSRESWGDY

SEQ ID NO: 6516 - protein, 19 aa, Homo sapiens
DYCNGDNGESCSRQSWGDY

SEQ ID NO: 6517 - protein, 16 aa, Homo sapiens
DYCNGDSCSREAWGDY

SEQ ID NO: 6518 - protein, 11 aa, Homo sapiens
DYCTNGVCPDY

SEQ ID NO: 6519 - protein, 5 aa, Homo sapiens
DYDIH

SEQ ID NO: 6520 - protein, 5 aa, Homo sapiens
DYDIN

SEQ ID NO: 6521 - protein, 5 aa, Homo sapiens
DYDMN

SEQ ID NO: 6522 - protein, 10 aa, Homo sapiens
DYEGYSYGTH

SEQ ID NO: 6523 - protein, 5 aa, Homo sapiens
DYEMH

SEQ ID NO: 6524 - protein, 5 aa, Homo sapiens
DYFLH

SEQ ID NO: 6525 - protein, 5 aa, Homo sapiens
DYFMH

SEQ ID NO: 6526 - protein, 5 aa, Homo sapiens
DYFWA

SEQ ID NO: 6527 - protein, 5 aa, Homo sapiens
DYFWT

SEQ ID NO: 6528 - protein, 5 aa, Homo sapiens
DYGLS

SEQ ID NO: 6529 - protein, 5 aa, Homo sapiens
DYGMH

SEQ ID NO: 6530 - protein, 5 aa, Homo sapiens
DYGMS

SEQ ID NO: 6531 - protein, 5 aa, Homo sapiens
DYGMT

SEQ ID NO: 6532 - protein, 5 aa, Homo sapiens
DYGMY

SEQ ID NO: 6533 - protein, 11 aa, Homo sapiens
DYGSGSSGCDY

SEQ ID NO: 6534 - protein, 5 aa, Homo sapiens
DYGVA

SEQ ID NO: 6535 - protein, 5 aa, Homo sapiens
DYGVH

SEQ ID NO: 6536 - protein, 5 aa, Homo sapiens
DYGVS

SEQ ID NO: 6537 - protein, 7 aa, Homo sapiens
DYNDRPS

SEQ ID NO: 6538 - protein, 16 aa, Homo sapiens
DYNFGSGNSAFWAFDI

SEQ ID NO: 6539 - protein, 5 aa, Homo sapiens
DYNMH

SEQ ID NO: 6540 - protein, 13 aa, Homo sapiens
DYPGIAVAGIFCY

SEQ ID NO: 6541 - protein, 5 aa, Homo sapiens
DYPMN

SEQ ID NO: 6542 - protein, 12 aa, Homo sapiens
DYSAYDAYYFDY

SEQ ID NO: 6543 - protein, 12 aa, Homo sapiens
DYSAYEAYYFDY

SEQ ID NO: 6544 - protein, 14 aa, Homo sapiens
DYSEFIPVAGALDY

SEQ ID NO: 6545 - protein, 5 aa, Homo sapiens
DYSIN

SEQ ID NO: 6546 - protein, 5 aa, Homo sapiens
DYSMH

SEQ ID NO: 6547 - protein, 5 aa, Homo sapiens
DYSMI

(The sequence listing continues in the following parts.)
